United States Patent Application Publication US 2023/0272435 A1 - sequence listing, part 8

SEQ ID NO: 27747 - protein, 547 aa, synthetic construct
MKLLVPYIRWSTKEQDSGDSLRRQTNLIDAFYAKHKDDYYLLPAHRYVDKGKSGFHQQHKAQGSDFRRMFENVMSGAIPEGSLIVVENFDRFSRADIDTAIDDVRQILRKGVSILTLGDGELYDKSALTDPVKLIKHIIIAERAHQESLVKQKRIAQVWNHKTQLARELKKPMGKQAPGWLELSEDGSHYIVDEDKASLVNIIYDKRLSGMSMFAICKWLNEQGYPTINQRKVRISKTKKPDGNWSALSVKHILTSRSVLGYLPAKISTEDRKTVLREEIESFYPQIVTDSKFYAVQQLLEETGKGKTSSGEHWLYVNILKGLIRCKCGLVMTPTGIRKPVYQGTYRCNGNKESRCSYGTVSRKLLDTQLCSRLFSKLSQLHDEATDTAKLDELQRRLNTVDGELEKLTETLIQLPNITQIQEALRVKQGEKDELIVQLSREKARVKSVSSLDLSGLDMESVEGRTEAQIIIKRLVKEIVVSGNEKLVDIYLHNGNMIRGFPLDGKDDHTLTLEEATDEMQSLDDMLIFGEPVTRIYPAGDMEEVDA

SEQ ID NO: 27748 - protein, 507 aa, synthetic construct
MKRVISYIRFSSEKQSRGDSLRRQSKMVTDWLKAHPEYYLDQDLSFRDLGVSGFTGKHLKGGLGDFLTAIEKGLVKAGDTLLIESLDRLSRQAVDRASELLRNILRSGVDIVTLSDGEHYTSESLKDPLALIKSILIMQRAHEESLRKSERIQAAWDAKKEAAKAGIKVSKRCPAWLRLNDDRKSFSVIPEKVETVKRCFQLRLEGKSIWEIVRTLNAEGHQTLHQHKPGSFGQSSVQDLLKNRSVIGYFTPKGREEIAGYFPPIIPETDFYKVQQLSYSRYGRKPASDKPLSVNLFKGVIRCSECGHALIITGFSDTRNGIYRCPLRNENRCSAKGLSRKQTDGTLLALLSRLDRFDSDTTNIIDMLRLHREHVSSNIEKLVQLSLEIEDLNAITSKLKQLKGELSQVDADIEKETQRLKSIDVGCLSDCDLTTKAGRIEAQLIIKSAVKEVVLNTAKRRCKVTFHNGKTITLSITENPSEDVTEAIQSLSEVTERGLIDVDEVII

SEQ ID NO: 27749 - protein, 507 aa, synthetic construct
MKRVISYIRFSSEKQAKGDSLRRQSKMVTDWLKAHPEYYLDESLTFRDLGVSGFTGKHLKGGLGDFLTAIEKGLVKAGDTLLIESLDRLSRQNVDRASELLRNILRSGVDVVTLSDGEHYTRESLKDPLALIKSILIMQRSHEESLRKSERIQAAWNRKKELISEGIKISKRCPAWLKLNDDRKSFSVIPDKVETVKRCFQLRLEGKSIWEIVRTLNAEGHRSMNQYKPGKFGQTSVQDLLKNRSVIGYFTPKGREEIAGYYPSVIDETTFYKVQQLSHSRYGRKPASAKPLSVNLFKGVIRCSECGHALIITGFSDTRNGIYRCPLRNENRCSAKGLSRKQTDGTLLTLLSRLDRFDSDTTNTVDMLRLHREHISSNIEKLVQLSLEIEDLNAITSKLKQLKGELSQVDADIEKETQRLKSIDVGCLSDCDLTTKAGRIEAQLIIKSAVKEVVLNTAKRRCKVTFHNGRAITLPITENPSEDVTEAIQSLSEVTGRGLIDVDEVII

SEQ ID NO: 27750 - protein, 559 aa, synthetic construct
MKTKLYSYIRFSSMRQNDGSSYERQIRMAREVAAKYDLELVNDYQDLGVSAFKGANSKTGALSRFLDAIGRSVPVGSWLFIENLDRLSRADIVSAQELFLSIIRRGITIVTGMDNKIYSLDTVTANPMDLMFSILLFIRGNEESQTKRNRTNSSALIKIKAHQEKPQNPAVAIEEVGKNMWWTDTTSGYVLPHPVYFPVVQEIVELRKNGRSTAEILDHLNETYTPPPAVSNKKHSKWSRAMVERLFHTRALIGIKEVSVDGVNYELKDYYPRVIDDPTFYHLKKNIGARAWNFGDKEEVKPIPLLSGIGLLKCDHCGCAMVKVKGTNKRSDQYRYTCDATRSRRLDCEHPNWSFRGDQLEKAVLQLLADKIWIAEDKANPVPALKVQVDEISRKIDNLIALSAMTGATKELADQITTLNSERETLYNQIKMAEEEMYSVDSQGWEKLAEFDLEDVYNEERLKVRFKIKQALKRIGCSRIDRNKNLFVLEYIDGKTQRVVIENSRGTRKGQIFVDLKTINDRQILESNGLVLHPCLDMLTDKNWKPEEEIPGPLQEFGI

SEQ ID NO: 27751 - protein, 507 aa, synthetic construct
MKRAISYIRFSSEKQSRGDSLRRQSKMVTDWLKAHPEYYLDQDLSFRDLGVSGFTGKHLKGGLGDFLTAIEKGLVKAGDTLLIESLDRLSRQAVDRASELLRNILRSGVDVVTLSDGEHYTSESLKDPLALIKSILIMQRAHEESLRKSERIQAAWNRKKELISEGIKVSRRCPAWLRLNDDRKSFSVIPDKVETVKRCFQLRLEGKSIWEIVRTLNAEGHRSMNQYKPGKFGQTSVQDLLKNRSVIGYFTPKGCEEIAGYYPSVIDETTFYKVQQLSHSRYGRKPASDKPLSVNLFKGVIRCSECGHALIITGFSDTRNGIYRCPLRNENRCSAKGLSRKQTDGTLLTLLSRLDRFDSDTTNTIDMLRIHREHISSNIEKLVQLSLEIEDLNAITNKLKQLKNELSQVDADIEKETQRLKSIDTGSLSDCDLTTKAGRIEAQLIIKSAVKEVVLNTAKRRCKVTFHNGRAITLPITENLSEDVTEAIQSLSEVTERGLIDVDEVII

SEQ ID NO: 27752 - protein, 559 aa, synthetic construct
MKTKLYSYIRFSSMRQNDGSSYERQIRMAREIAAKYDLELVNDYQDLGVSAFKGANSKTGALSRFLDAIGRSVPVGSWLFIENLDRLSRADIVSAQELFLSIIRRGITIVTGMDNKIYSLDTVTANPMDLMFSILLFIRGNEESQTKRNRTNSSALIKIKAHQENPQNPAVAIEEVGKNMWWTDTTSGYVLPHPVYFPVVQEIVELRKNGRSTAEILDHLNETYAPPPAVSNKKHSKWSRAMVERLFHTRALIGIKEISVDGVNYELKDYYPRVIDDATFYHLKKNIGARAWNFGDKEEVKPIPLLSGIGLLKCDHCGCAMVKVKGTNKRSDQYRYTCDATRSRRLDCEHPNWSFRGDQLEKAVLQLLADKIWIAEDKANPVPALKVQVDEISRKIDNLIALSAMTGATKELADQITTLNSERETLYNQIKMAEEEMYSVDSQGWEKLAEFDLEDVYNEERLKVRFKIKQALKRIGCSRIDRNKNLFVLEYIDGKTQRVVIENSRGTRKGQIFVDLKTINDRQILESNGLVLHPCLDMLTDKNWKPEEEIPGPLQEFGI

SEQ ID NO: 27753 - protein, 559 aa, synthetic construct
MKKEKIKVYTYKRVSTAMQIDGYSLDAQRARMKAYADFNDYEIVGEYEDAGKSGKSIEGRLQFRQMMEDVKSGKDNISYVLVFKLSRFGRNAADVLSTLQVMQDFGVNLICVEDGIDSSKDAGKLMISVLSAVAEIERENIRVQTMEGRIQKAREGKWNGGFAPYGYQLVNGKLEINEEEAVAVRTIYDQYVNTDIGSNGISKYLENHGIRKIQRQNGKNPLFDAHLVRLILKNPVYCGKIAYGRRKTEKVHGTRNEYHLVEQDNFLLVDGLHEAIIPEDVWNAAQVKLVAQAKKYEHVNKGKNERTHLLSGIVKCPICGAGMYGNKSIKHKKDGTKYKDFFYYGCKHRSMQRGHKCDYKKQIREELLDDAVAEVIVKLVSNPNFATMMQEKINMKVDTTAIDQEIENYEKQLRQDYSIKSKLMEEIDNLDPDDRHYIRRKADLDGRLYRMYDKIEELESQLIDARAKKTSIEAEKITGDNIYKVLICFDKLYFAMNDVERRQLIEALIAEIQIYEERKPNGQWLKSIRFKLPIIENNLRIGLDNSEHVETVAKIIKQY

SEQ ID NO: 27754 - protein, 457 aa, synthetic construct
MDKIKRVALYIRVSTEEQVLHGDSIRTQTEALEQYSKDNNFIIVDKYIDEGYSATNLKRPNLKRMIEDVKNNKIDLVMITKIDRLSRGVKNYYKIMETLEKHKCDWKTILEDYDSSTAAGRLHINIMLSVAENEAAQTSERIKFVFQDKLKRGEVITGSVPFGYKIKDKHLVIKEDEASIVREAFDAYQDFSSLAKTIQHINTKFSTKYMFKWMPKMLKNKIYIGIYEKGDLVVENYCEPIISKEQFNFVQTLLKKNIRFSENKFKMNYLFSGMIVCGSCGRKMGGVHSRGGANRHYLYYRCPLSFATKLCDNKPYLNEKKVEAFLLENVKKELQKTILEHESNNKKRQKKNNNKNLRNKLEKQIEKLQDLYFDDLINKDTYKFKYKKLNDDLSELNKAENEAESVEKDLKSMKIFLDTNFEDNYYDMNYSEKRTLWTSAIDRIEVQKNGELVIKFL

SEQ ID NO: 27755 - protein, 501 aa, synthetic construct
MKCAIYIRVSTDKEEQKTSLQNQKDLFFKYISDKGWDIGKMYIDIESGTKDKREQFQQMISDAKNRSFDIILAKELSRIARNGKLSYEIKTLAENNNIHIITLDNAINTIEGNTHMFGMYAWMYEQESQRISDRVKYALKSRAEKGIFKGSVAPYGYYCKDGTLFIKNDFTPDIVRRIFNEYISGVGFDAIARNLYNDDIPSPRQIAGIKNASPKWHGSSVRCILENPHFAGNLVQGRTTTKNVTSTKRNIIPVEELIIVENTHEAIISKDDFNAVQQLIASRKRKRPSPSPHLFSNILICKDCGHGMHFKKNRKGYICGNFNKHGIKACTCHIIRENSLKDIVISDINFILDTIQNKSLLGSISSSLNKKCKSNEKNSENIEAKISKLMLRKNNALSKFVDDYISKEDYDNIIKVINSEIIELKNKKLLLENQVGSKLSSDISNGISYFKNIASNVTELTPSSINRLIDKIEVSEDGTPRIYYRFSESSICLSDFINIIS

SEQ ID NO: 27756 - protein, 507 aa, synthetic construct
MFFKETETQEIIKYEDYPYAVYARVSSEKDEQVTSIANQIDICHHWIEKNNYEWKDEAIQLDDGISGTVLLDRKAMQLILDKAQKRKLKMVVFKSISRLARDLKDALEIREVLLAHGVRVVTLEEGYDSLYEGKNSMKFEMFSMFAAQYPQTISVAASGALAAKARRGEHSGRVPFGFKKEGKFLAINEEEAKVVRFIFDLHNNHGYGHKRIVLKLNEELALGNIVKPQKTEFWQLSTVQTILKNPIYCGVFIANRHTQVKIGGRKKFIRNPKEKWTVYKDWCPKIISEEEYEKANNKEHKMRKKRFNPRNELRGMMKCGVCGCNMVVLPSYKYNQKREKKEFNYLKCSAYRRGGTALCVNHAPMQYKDLRAFVIKTLKQKGKKLKLDVKSDFEEQKKNRIKRTKIEIENAENKKKRLIELYLEDQLITKAEFQAKRKELEEQIEKLNDKLFMLEREEEETIDISNIKNAFAQLERTDQDLFEAFSALIDKIVIYEDGTVDFHYKFK

SEQ ID NO: 27757 - protein, 506 aa, synthetic construct
MRHVITYLRYSSAIQGAEGADSTRRQNDLFKQWLKKNSDAQVVASFNDEGLSGYKGKHLSGQFGDMLSRIESGEFSEGTVLLVEAIDRIGRLEHLETEALMNRIIAHGIEIHTLQDGLIYTRDALSDDLGISIIQRVKSYIAHQESKQKSFRVSQKWEQRAKLALAGEQRLTRNVPGWIDPDTFKCNEHAETVRLIFKLLLDGESLHNIARHLQSNDIKSFSRRKDANGFSVHSVRTILRSETTIGTLPASQRNDRPAIPNYYEAAIDASTFNKAQEILDKNRKGRTPASDNPLTINIFKGLFRCQCGASVHPTGTKNKYAGVYRCNNHLDGRCDVPPLKRKPFDKWMIDNFLGMIDVGNDGEAEGKIASLQHEVEIVTARIKKATALLLEMDDIDELKIQIKELNQRRTELQTTIDSMRRKASLTDKELPQLKDIDLTTKAGRVECQLILSKHLKGLTLGKGSVTITLQNDTEITIPTNPLPLNDGSPIFEIADKELLDIDAYQL

SEQ ID NO: 27758 - protein, 507 aa, synthetic construct
MKRAISYIRFSSEKQSRGDSLRRQSKMVNDWLKAHPEYYLDQDLSFRDLGVSGFTGKHLKGGLGDFLTAIEKGLVKAGDTLLIESLDRLSRQAVDRASELLRNILRSGVDIVTLSDGEHYTSESLKDPLALIKSILIMQRAHEESLRKSERIQAAWDAKKEAAKAGIKVSKRCPAWLRLNDDRKSFSVIPEKVETVKRCFQLRLEGKSIWEIVRTLNAEGHRSMNQYKPGKFGQTSVQDLLKNRSVIGYFTPKGCEEISGYYPAIIDETTFYKVQQLSHSRYGKRSVSDKPLSVNLFKGVIRCSECGHALIITGFSDTRNGIYRCPLRNENRCNAKGLSRKQTDGTLLALLSRLDRFDSDMTNVIDALKLHREHISNNIEKLVQLSLEIEDLSAITIKLKQLKGELSQVDADIEKETQRLKSIDVGCLSDCDLTTKAGRIEAQLIIKSAVKEVVLNAAKRRCKVTFHNSKSITLPITENPSEDVTEAIQSLSEVTERGLIDVDVVEI

SEQ ID NO: 27759 - protein, 506 aa, synthetic construct
MRSVITYLRYSSAIQGAEGADSTRRQNELFKQWLKKNSDAQIVASFSDEGLSGYKGKHLTGQFGDMLARIESGEFPQGAILLVESIDRIGRLEHLETEALMNRIIAHGIEIHTLQDGLIYTRDALSDDLGISIIQRVKSYLAHQESKQKSFRVSEKWKQRAKLALAGEQRLTKMVPGWIDPETFKLNEHAETVRLIFKLLLDGESLHNIARHLQSNDIKSFSRRKDANGFSVHSVRTVLRSESVIGTLPASQRNDRPAIPNYYEAAIDAATFNKAQEILDKNRKGRTPASDNPLTINIFKGLFRCQCGASVHPTGTKNKYAGVYRCNNHLDGRCDVPPLKRKPFDKWMIDNFLGMIDVGNDGEAEKEIASLQHEVEIVTARIKKATALLLEMDDIDELKIQLKELNQKRTELQTTIDNMRRKASLTDKELPQLKDIDLTTKTGRVECQLILSKHLKGLTLGKDSVTVTLQNDTEITIPTNPLPLNDGSPIFEIADKELLDIDAYQL

SEQ ID NO: 27760 - protein, 509 aa, synthetic construct
MRRAISYIRFSSERQLKGDSVRRQSKLVTDWLDKNPEFYLDSSLSFKDLGKSAFSGKHLKGGLGDFLTAIEKGLVKAGDTLLIESLDRLSRQAVDRASELLRNILRSGVDVVTLSDGEHYTKKSLKDPLSLIKSILIMQRAHEESLRKSERVQAAWNRKKELISEGIKISKRCPAWLRLNDDRRTFTIIPDKVEVVKRAFDLRLQGLSFWAITRTLNDEGHLSLNQYTPKQKGWSDTAVKKLLRNRAVIGCFTPAGREEVQGYYPAIISESLFYRVQQLNTGQYGRASVSSNPLSVNLFRGIIKCSECGATIVLGGYALKRFGMYRCPNRSANRCSAKAISRKQTDATILYMLALCDRFETENTDIIDSLKLQREDLQRKISKMAELAIELDDMTIITEKLRDMKNALSKLNHDIEEETKRIKAITTGSLKDIDRTTKEGMIETQLLIKGVLKEIVIDAAKRRCKVTFHNGRAITLPITEDPSEDVTEAIQSLSEVTERGLIDVDEVII

SEQ ID NO: 27761 - protein, 507 aa, synthetic construct
MKRVISYIRFSSERQAKGDSLRRQSKMVNDWLKAHPEYYLDQDLSFRDLGVSGFTGKHLKGGLGDFLTAIEKGLVKAGDTLLIESLDRLSRQAVDRASELLRNILRSGVDVVTLSDGEHYTRESLKDPLALIKSILIMQRAHEESLRKSERIQAAWDAKKEAAKAGIKVSRRCPAWLRLNDDRKSFSVIPEKVETVKRCFQLRLEGKSIWEIVRTLNAEGHQTLNQYKAGKFGQTSVQDLLKNRSVIGYFTPKGCEEISGYFPPIIPETDFYKVQQLSYSRYGRKPASDKPLSVNLFKGVIRCSECGHALIITGFGDTRNGIYRCPLRNENRCSAKGLSRKQTDGTLLTLLSRLDRFDSDTTNVIDMLRLHREHISSNIEKLVQLSLEIEDLSAITIKLKQLKGELSQVDADIEKETQRLKSIDVGCLSDCDLTTKAGRIEAQLIIKSAVKEVVLNTAKRRCKVTFHNGRIIDLPITENPSEDVTEAIQSLSEVTERGLIDVDVVAI

SEQ ID NO: 27762 - protein, 559 aa, synthetic construct
MKTKLYSYIRFSSMRQNDGSSYERQIRMAREVAAKYDLELVNDYQDLGVSAFKGANSKTGALSRFLDAIGRSVPVGSWLFIENLDRLSRADIVSAQELFLSIIRRGITIVTGMDNKIYSLDTVTANPMDLMFSILLFIRGNEESQTKRNRTNSSALIKIKAHQENPQNPAVAIEEVGKNMWWTDTTSGYVLPHPVFFPIVQEVVELRKNGRSTAEILDHLNETYTPPPAVSNKKHSKWSRAMVERLFHTRALIGIKEVSVDGVNYELTDYYPRVIDDATFYHLKKNIGARAWNFGDKEEVKPIPLLSGIGLLKCDHCGCAMVKVKGTNKRSDQYRYTCDATRSRRLDCEHPNWSFRGDQLEKAVLQLLADKIWIAEDKANPVPALKVQVDEISRKIDNLIALSAMTGATKELADQITTLNSERETLYNQIKMAEEEMYSVDSQGWEKLAEFDLEDVYNEERLKVRFKIKQALKRIGCSRIDRNKNLFVLEYIDGKTQRVVIENSRGTRKGRIFIDLKTINDRQILESNGLVLHPCLDMLTDKNWKPEEEQAGPLQEFGI

SEQ ID NO: 27763 - protein, 509 aa, synthetic construct
MRRAISYIRFSSERQLKGDSVRRQSKLVTDWLDKNPEFYLDSSLSFKDLGKSAFSGKHLKGGLGDFLTAIEKGLVKAGDTLLIESLDRLSRQDIDIASELLRRILRAGVDVVTLSDGEHYTKESLKDPLSLIKSILIMQRAHEESLRKSERVQAAWNRKKELISEGIKVSRRCPAWLRLNDDRRTFTIIPDKVEVVKRAFDLRLQGLSFWAITRTLNDEGHLSLNQYTPKQKGWSDTAVKKLLRNRAVIGCFTPAGREEVQGYYPAIISESLFYRVQQLNTGQYGRASVSSNPLSVNLFRGIIKCSECGATIVLGGYALKRFGMYRCPNRSANRCSAKAISRKQTDATILYMLALCDRFETENTDTIDGLKIQREDLQRKISKMAELAIELDDMTIITEKLRDMKNALSKLNHDIEEETKRIKAITTGSLKDIDRTTKEGMIETQLLIKGVLKEIVIDAAKRRCKVTFHNGKSITLPITENPSEDVTEAIQSLSEVTERGLIDVDVVEI

SEQ ID NO: 27764 - protein, 547 aa, synthetic construct
MKLLVTYIRWSTKEQDSGDSLRRQTNLIDAFYAKHKDDYYLLPAHRYVDKGKSGFHQQHKNQGSDFRRMFENVMSGAIPEGSLIVVENFDRFSRADIDTAIDDVRQILRKGVSILTLGDGELYDKSALTDPVKLIKHIIIAERAHQESLVKQKRIAQVWNHKTQLARELKKPMGKQAPGWLELSEDGSHYIVDEDKASLVNIIYDKRLSGMSMFAICKWLNEQGYPTINQRKVRISKTKKPDGNWSALSVKHILTSRSVLGYLPAKISTEDRKTVLREEIESFYPQIVTDSKFYAVQQLLEETGKGKTSSGEHWLYVNILKGLIRCKCGLVMTPTGIRKPVYQGTYRCNGNKESRCNYGTVSRKLLDTQLCSRLFSKLSQLHDEATDTAKLDELQRRLNTVDGELEKLTETLIQLPNITQIQEALRVKQGEKDELIVQLSREKARVKSVSSLDLSGLDMESVEGRTEAQIIIKRLVKEIVVSGNEKLVDIYLHNGNMIRGFPLDGKDDHTLTLEEATDEMQSLDDMLIFGEPVTRIYPAGDMEEVDA

SEQ ID NO: 27765 - protein, 506 aa, synthetic construct
MRSVITYLRYSSAIQGAEGADSTRRQNDLFKQWLKKNSDAQVVASFSDEGLSGYKGKHLTGQFGDMLARIESGEFPEGTILLVESIDRIGRLEHLETEALMNRILGNGLEIHTLQDGLIYTKDALADDLGISIIQRVKAYIAHQESKQKSFRVSQKWEQRAKLALAGEQRLTKMVPGWIDPDTFKLNEHAETVRLIFKLLLSGESLHNIARHLQANNISSFSRRKDANGFSVHSVRTILRSETTIGTLPASQRNDRPAIPNYYEPAIDASTFNKAQEILDKNRKGRTPASDNPLTINIFKGLFRCQCGASVHPTGTKNKYAGVYRCNNHLDGRCDVQPLKRKPFDRWMTDNFLGMIDVGNDGKSKRKIASLQHEVEIVTARIKKATALLLEMDDITELKTQVRELNQKRTELQTTIDTLKRKTSLTDKELTQLKDIDLMTKAGRVECQLILSKHLKGLTLGKDSVTVTLQNDTEITIPTNPLPLNDGSPIFEIADKELLDIDAYQL

SEQ ID NO: 27766 - protein, 509 aa, synthetic construct
MRRAISYIRFSSERQLKGDSVRRQSKLVTDWLDKNPEFYLDSSLSFKDLGKSAFSGKHLKGGLGDFLTAIEKGLVKAGDTLLIESLDRLSRQDIDIASELLRRILRAGVDIVTLSDGEHYTRESLKDPLSLIKSILIMQRAHEESLRKSERVQAAWNRKKELISEGIKVSRRCPAWLRLNDDRRTFTIIPDKVEVVKRAFDLRLQGLSFWAITRTLNDEGHLSLNQYTPKQKGWSDTAVKKLLRNRAVIGCFTPAGREEVQGYYPAIISESLFYRVQQLNTGQYGRASVSSNPLSVNLFRGIIKCSECGATIVLGGYALKRFGMYRCPNRSANRCSAKAISRKQTDATILYMLALCDRFETENTDTIDSLKLQREDLQRKISKMAELAIELDDMTIITEKLRDMKNALSKLNHDIEEETKRIKAITTGSLKDIDRTTKEGMIETQLLIKGVLKEIVIDAAKRRCKVTFHNSKSITLPITENPSEDVTEAIQSLSEVTERGLIDVDEVII

SEQ ID NO: 27767 - protein, 506 aa, synthetic construct
MRTVITYLRFSSATQGAEGADSTRRQNELFKQWLRKNSDAQVVASFSDEGLSGYKGKHLTGQFGDMLARIEAGEFPAGAILLVESIDRIGRLEHLETEALMNRIIAHGIEIHTLQDGLIYTRDALSDDLGISIIQRVKSYLAHQESKQKSFRVSEKWKQRAKLALAGEQHLTRNVPGWIDPDTFKCNEHAETVRLIFKLLLDGESLHNIARHLQSNDIKSFSRRKDANGFSVHSVRTVLRSESVIGTLPASQRNDRPAIPNYYEAAIDASTFNKAQEILDKNRKGRTPASDNPLTINIFKGLFRCQCGASVHPTGTKNKYQGVYRCNSHLDGRCDVPPLKRKPFDRWMIDNFLGMIDVGNDGEAEKEIASLQHEVETVTARIKKATALLLEMDDITELKAQVKELNQKRTELQTTIDSMRRKTSLSDKGLPQLKDIDLMTKEGRVECQLILSKHLKGLTLGKDSVTVTLQNDTEITIPTDPLPLNDGTSIFEIAEKNLLNIDTFQL

SEQ ID NO: 27768 - protein, 507 aa, synthetic construct
MKRVISYIRFSSEKQAKGDSLRRQSKMVTDWLKAHPEYYLDQDLSFRDLGVSGFTGKHLKGGLGDFLTAIEKGLVKAGDTLLIESLDRLSRQDIDIASELLRNILRSGVDVVTLSDGEHYTRESLRDPLALIKSILIMQRAHEESLRKAERIQAAWDAKKEAAKAGIKVSKRCPAWLKLNDDRKSFSVIPEKVETVKRCFQLRLEGKSIWEIVRTLNAEGHRSMNQYKPGKFGQTSVQDLLKNRSVIGYFTPKGCEEISGYYPAIIDETTFYKVQQLSHYRYGRKPVSDKPLSVNLFKGVIRCSECGHALIITGFSDTRNGIYRCPLRNENRCNAKGLSRKQTDGTLLALLSRLDRFDSDMTNVIDALKLHREHISNNIEKLVQLSLEIEDLSAITSKLKQLKGELSQVDADIEKETQRLKSIDVGCLSDCDLTTKAGRIEAQLIIKSAVKEVVLNTAKRRCKVTFHNGRAITLPITENPSEDVTEAIQSLSEVTERGLIDVDVVAI

SEQ ID NO: 27769 - protein, 507 aa, synthetic construct
MKRVISYIRFSSERQAKGDSLRRQSKMVTDWLKAHPEYYLDQDLSFRDLGVSGFTGKHLKGGLGDFLTAIEKGLVKAGDTLLIESLDRLSRQAVDRASELLRNILRSGVDVVTLSDGEHYTRESLKDPLSLIKSILIMQRAHEESLRKSERIQAAWNRKKELISEGIKVSRRCPAWLKLNDDRKSFSIIPEKVETVKRCFQLRLEGKSIWEIVRTLNDEGRQTLNQYKAGKFGQTSVQDLLKNRSVIGYFTPKGCEEISGYYPAIIDETTFYKVQQLSYARYGRKPASDKPLSVNLFKGVIRCSECGHALIITGFSDTRSGIYRCPLRNENRCSAKGLSRKQTDGTLLALLSRLDRFDSDTTNTIDTLKLHREHISSNIEKLVQLSLEIEDLNAITSKLKQLKGELSQVDADIEKETQRLKSIDVGCLSDCDLTTKAGRIEAQLIIKSAVKEVVLNTAKRRCKVTFHNGKIIDLPITENPSEDVTEAIQSLSEVTERGLIDVDEVII

SEQ ID NO: 27770 - protein, 507 aa, synthetic construct
MKRVISYIRFSSEKQAKGDSLRRQSKMVTDWLKAHPEYYLDQDLSFRDLGVSGFTGKHLKGGLGDFLTAIEKGLVKAGDTLLIESLDRLSRQDIDIASELLRNILRSGVDVVTLSDGEHYTRESLRDPLALIKSILIMQRAHEESLRKAERIQAAWDAKKEAAKAGIKVSKRCPAWLKLNDDRKSFSVIPEKVETVKRCFQLRLEGKSIWEIVRTLNDEGHQSMSQYKPGSFGQSSVQDLLKNRSVIGYFTPKGCEEIAGYYPAIIDETTFYKVQQLSYARYGRKPASDKPLSVNLFKGVIRCSECGHALIITGFSDTRSGIYRCPLRNENRCSAKGLSRKQTDGTLLALLSRLDRFDSDMTNTIDTLKLHREHISSNIEKLVQLSLEIEDLNAITNKLKQLKNELSQVDADIEKETQRLKSIDVGCLSDCDLTTKAGRIEAQLIIKSAVKEVVLNTAKRRCKVTFHNGKVIDLPITENPSDNVTEAIQSLSEVTERGLIDVDEVII

SEQ ID NO: 27771 - protein, 507 aa, synthetic construct
MKRVISYIRFSSEKQAKGDSLRRQSKMVTDWLKAHPEYYLDESLTFRDLGVSGFTGKHLKGGLGDFLTAIEKGLVKAGDTLLIESLDRLSRQDVDQASELLRNILRSGVDVVTLSDGEHYTRESLKDPLSLIKSILIMQRAHEESLRKAERIQAAWDAKKEAAKAGIKISKRCPAWLKLNDDRKSFSVIPEKVETVKRCFQLRLEGKSIWEIVRTLNAEGHRSMNQYKPGKFGQTSVQDLLKNRSVIGYFTPKGCEEISGYYPAIIDETTFYKVQQLSHSRYGKRSVSDKPLSVNLFKGVIRCSECGHALIITGFSDTRNGIYRCPLRNENRCNAKGLSRKQTDGTLLALLSRLDRFDSDMTNVIDALKLHREHISSNIEKLVQLSLEIEDLSAITSKLRQLKGELSQVDADIEKETQRLKSIDVGCLSDCDLTTKAGRIEAQLIIKSAVKEVVLNTAKRRCKVTFHNGRAITLPITENPSEDVTEAIQSLSEVTERGLIDVDVVEI

SEQ ID NO: 27772 - protein, 507 aa, synthetic construct
MKRVISYIRFSSEKQAKGDSLRRQSKMVNDWLKAHPEYYLDQDLSFRDLGVSGFTGKHLKGGLGDFLTAIEKGLVKAGDTLLIESLDRLSRQDVDQASELLRNILRSGVDVVTLSDGEHYTRESLKDPLALIKSILIMQRSHEESLRKSERIQAAWNRKKELISEGIKISKRCPAWLKLNDDRKSFSVIPEKVETVKRCFQLRLEGKSIWEIVRTLNDEGHQTLNQYKAGSFGQTSVQDLLKNRSVIGYFTPKGCEEIADYYPAIIDETTFYKVQQLSYARYGRKPASDKPMAVNLFKGVIRCSECGHALIITGFSDTRNGIYRCPLRNENRCSAKGLSRKQTDGTLLTLLSRLDRFDSDTTNTIDTLKLHREHISSNIEKLVQLSLEIEDLSAITSKLKQLKNELSQVDADIEKETQRLKSIDVGCLSDCDLTTKAGRIEAQLIIKSAVKEVVLNTAKRRCKVTFHNGRIIDLPITENPSEDVTEAIQSLSEVTERGLIDVDEVII

SEQ ID NO: 27773 - protein, 506 aa, synthetic construct
MRSVITYLRFSSAIQGAEGADSTRRQNELFKQWLRKNSDAQVVASFNDEGLSGYKGKHLSGQFGDMLSRIESGEFPEGTILLVEAIDRIGRLEHLETEALMNRIIAHGIEIHTLQDGLIYTRDALSDDLGISIIQRVKSYIAHQESKQKSFRVSQKWKQRAKLALAGEQRLTRNVPGWIDPETFKLNEHAETVRLIFKLLLDGESLHNIARRLQNNGIKSFSRRKDANGFSVHSVRTILRSETTIGTLPASQRNDRPAIPNYYEAAIDASTFNKAQEILGKNRTGRTPASDNPLTINIFKGLFRCQCGASVHPTGTKNKYAGVYRCNNHLDGRCDVPPLKRKPFDKWMLENFLGMIDVGNDGESERKIAALQHEVEIVTSRIKKATALLLEMDDISELKAQVKELNQKRTELQTTIDTLKRKTSLSDKGLPQLKDIDLMTKAGRVECQLILSKHLKGLTLCEGSVVVTLQNDTEITVPTDPLPLNDGASIFAIAEKELLEIDAYQL

SEQ ID NO: 27774 - protein, 547 aa, synthetic construct
MKLLATYIRWSTREQDSGDSLRRQTNLIDAFYAKHKDDYYLLPAHRYVDKGKSGFHQQHKAQGSDFRRMFENVMSGVIPEGSLIVVENFDRFSRADIDTAIDDVRQILRKGVSILTLGDGELYDKSALTDPVKLIKHIIIAERAHQESLVKQKRIAQVWNHKTQLARELKKPMGKQAPGWLELSEDGSHYIVDEDKASLVNIIYDKRLSGMSMFAICKWLNEQGYPTINQRKVRISKTKKPDGNWSALSVKHILTSRSVLGYLPAKISTEDRKTVLREEIEGFYPQIVTDSKFYAVQQLLEETGKGKTSSGEHWLYVNILKGLIRCKCGLVMTPTGIRKPVYQGTYRCNGNKESRCSYGTVSRKLLDTQLCSRLFSKLSQLHDEATDTAKLDELQRRLNTVDSELEKLTETLIQLPNITQIQEALRVKQEEKDELIVQLSREKARVKSVSSLDLSGLDMESVEGRTEAQIIIKRLVKEIVVSGNEKLVDIYLHNGNMIRGFPLDGKDDHTLTLEEATDEMQSLDDMLIFGEPVTRIYPAGDMEEVDA

SEQ ID NO: 27775 - protein, 506 aa, synthetic construct
MRTVITYLRFSSATQGAEGADSTRRQNELFKQWLRKNSDAQVVASFSDEGLSGYKGKHLTGQFGDMLARIESGEFSEGTVLLVEAIDRIGRLEHLETEALMNRIIAHGIEIHTLQDGLIYTRDALSDDLGISIIQRVKSYVAHQESKQKSFRVSQKWKQRAKLALAGEQRLTRNVPGWIDPDTFKCNEHAETVRLIFKLLLDGESLHNIARHLQSNDIKSFSRRKDANGFSVHSVRTVLRSESVIGTLPASQRNDRPAIPNYYEAAIDASTFNKAQEILDKNRKGRTPASDNPLTINIFKGLFRCQCGASVHPTGTKNKYAGVYRCNNHLDGRCDVPPLKRKPFDRWMIDNFLGMIDVGNDGESERKIAALQHEVEIVTARIKKATALLLEMDDITELKAQVKGLNQKRTEIQTTIDTLKRKTSLTDKELPQLKDIDLTTKAGRVECQLILSKHLKGLTLGKDSVTVTLQNDTEITIPTNPLPLNDGSPIFEIADKELLDIDAYQL

SEQ ID NO: 27776 - protein, 560 aa, synthetic construct
MKTKLYSYIRFSSMKQADGSSFERQKRTAKEIAAKYDLELVTSYQDFGVSAFKGANSKTGALSRFLDEIGRSVPVGSWLVVENLDRISRQSVIEAQELFLSIIRRGITIVTGMDGKVYSKESVNANPIDLLLSVMLFARANEESQTKRNRTNSSALLKVKAHQENPQNPAVAIEEVGRNIWWADTSSGYVLPHPVYFPVIKKIVELKQNGYSNGRILDYLNERIAPPNYTTNKDTPKKWARSMLGRMFTNRALLGIKEITIEGVTYELNNYYPRVMEDAEFYQLKKTIGLRSFSYPTKSSPVITLLSGAGLLRCGHCGASMVKRSGASKERLAQYRYMCDGADSRRTNCDHPNWGFRGDQLDKAVLQLLADKIWIAEDKANPIPGMQAQIEDISRKIDNLISLSAMTGATKELADQITTLNHEREAIYNQIKVIEENMYSVDSQGWEKLAQFDLEDVCSEERLKVRLKIKEAVKSIKCYKIDTNYNHFVMEYIDGKTQRIVIERSRRNRKGQIFVDLKTINDRQILESNGLVLHPCLDMLTDKNWKPEEEQAGPLQEFGI

SEQ ID NO: 27777 - protein, 559 aa, synthetic construct
MKTKLYSYIRFSSMKQADGSSYERQKRTAAEIAAKYDLELVTSYQDFGVSAFKGANSRTGALSRFLDEIGRSVPVGSWLVVENLDRISRQSIIEAQELFLSIIRRGITIVTGMDGKVYSKESVNANPIDLLLSVMLFARANEESQTKRNRTNSSALIKIKAHQENPQNPAVAIEEIGKNMWWTDTTSGYVLPHPVFFPIVQEVVELRRNGRSTAEILDHLNATYTPPPAASHKRHSNWSRAMIERLFHTRALIGIKEISVDGVKYELKDYYPRVLDDAEFYHLKKSIGVRACNFGDKEEAKPIPLLSGVGLLKCEHCGSAMVKVKGTNRRPNQYRYSCDAMRSSRIECVHTNWSFRGDQLEKAVLQLLADKIWIAEDKANPVPALKVQIDEISRKIDNLITLSAMTGATKELADQITTLNSERETLYNQIKMAEEEMYSVDSQGWEKLAEFDLEDVYNEDRIKVRFKIKQALKRIGCSRIDKYKNLFVLEYIDGKTQRVVIENSRGPRKGRIFVDLKTINDRQILESNGLVLHPCLDMLTDKNWKPEEEIPGPLQEFGI

SEQ ID NO: 27778 - protein, 509 aa, synthetic construct
MRRAISYIRFSSERQLKGDSVRRQSKLVTDWLDKNPEFYLDSSLSFKDLGKSAFSGKHLKGGLGDFLTAIEKGLVKAGDTLLIESLDRLSRQDIDIASELLRRILRAGVDVVTLSDGEHYTRESLKDPLSLIKSILIMQRAHEESLRKSERVQAAWNRKKELISEGIKVSRRCPAWLRLNDDRRTFTIIPDKVEVVKRAFDLRLQGLSFWAITRTLNDEGHLSLNQYTPKQKGWSDTAVKKLLRNRAVIGCFTPAGREEVQGYYPAIISESLFYRVQQLNTGQYGRASVSSNPLSVNLFRGIIKCSECGATIVLGGYALKRFGMYRCPNRSANRCSAKAISRKQTDATILYMLALCDRFETENIGTIDSLKLQREDLQRKISKMAELAIELDDMTIITEKLRDMKNALSKLNHDIEEETKRIKAITTGSLKDIDRTTKEGMIETQLLIKGVLKEIVIDAAKRRCKVTFHNGKSIDLPITENPSEDVTEAIQSLSEVTERGLIDVDVVAI

SEQ ID NO: 27779 - protein, 507 aa, synthetic construct
MKRVISYIRFSSEKQSRGDSLRRQSKMVTDWLKAHPEYYLDQDLSFRDLGVSGFTGKHLKGGLGDFLTAIEKGLVKAGDTLLIESLDRLSRQAVDQASELLRNILRSGVDVVTLSDGEHYTRESLKDPLALIKSILIMQRSHEESLRKSERIQAAWNRKKELISEGIKISKRCPAWLKLNDDRKSFSVIPEKVETVKRCFQLRLEGKSIWEIVRTLNAEGHQTLNQYKAGSFGQTSVQDLLKNRSVIGYFTPKGCEGISGYYPAIIDETTFYKVQQLSHYRYGRKPVSDKPMAVNLFKGVIRCSECGHALIITGFSDTRSGIYRCPLRNENRCSAKGLSRKQTDGTLLALLSRLDRFDSDMTNTVDTLKLHREHISSNIEKLVQLSLEIEDLSAITSKLKQLKGELSQVDADIEKETQRLKSIDVGCLSDCDLTTKAGRIEAQLIIKSAVKEVVLNTAKRRCKVTFHNGRIIDLPITENPSEDVTEAIQSLSEVTERGLIDVDEVII

SEQ ID NO: 27780 - protein, 546 aa, synthetic construct
MKQADGSSYERQKRTAAEIAAKYDLELVTSYQDFGVSAFKGANSKTGALSRFLDEIGRSVPVGSWLVVENLDRISRQSIIEAQELFLSIIRRGITIVTGMDGRVYSRESVNANPIDLLLSVMLFARANEESQTKRNRTNSSALIKIKAHQENPQNPAVAIEEVGKNMWWTDTTSGYVLPHPVYFPVVQEIVELRKNGRSTAEILDHLNETYAPPPAVSNKKHSKWSRAMVERLFHTRALIGIKEISVDGVNYELKDYYPRVIDDPTFYHLKKNIGARAWNFGDKEEVKPIPLLSGIGLLKCDHCGCAMVKVKGTNKRSDQYRYTCDATRSRRLDCEHPNWSFRGDQLEKAVLQLLADKIWIAEDKANPVPALKVQVDEISRKIDNLIALSAMTGATKELADQITTLNSERETLYNQIKMAEEEMYSVDSQGWEKLAEFDLEDVYNEERLKVRFKIKQALRRIGCSRIDRNKNLFVLEYIDGKTQRVVIENSRGTRKGRIFIDLKTINDRQILESNGLVLHPCLDMLTDKNWKPEEEIPGPLQEFGI

SEQ ID NO: 27781 - protein, 506 aa, synthetic construct
MRSVITYLRFSSAIQGAEGADSTRRQNDLFKQWLKKNSDAQVVASFSDEGLSGYKGKHLTGQFGDMLARIESGEFSEGTVLLVEAIDRIGRLEHLETEALMNRIIAHGIEIHTLQDGLIYTRDALSDDLGISIIQRVKSYVAHQESKQKSFRVSQKWKQRAKLALAGEQRLTKMVPGWIDPDTFKCNEHAETVRLIFKLLLDGESLHNIARHLQSNDIKSFSRRKDANGFSVHSVRTVLRSESVIGTLPASQRNDRPAIPNYYEAAIDASTFNKAQEILDKNRKGRTPASDNPLTINIFKGLFRCQCGASVHPTGTKNKYQGVYRCNNHLDGRCDVPPLKRKPFDKWMIDNFLGMIDVGNDGEAEGKIASLQHEVEIVTTRIKKATALLLEMDDIDELKIQLKELNQKRTELQTTIDNMRRKASLTDKELPQLKDIDLTTKAGRVECQLILSKHLKGLTLGKDSVTVTLQNDTEIIVPTDPLPLNDGTSIFEIAEKELLEIDAYQL

SEQ ID NO: 27782 - protein, 507 aa, synthetic construct
MKRVISYIRFSSEKQAKGDSLRRQSKMVTDWLKAHPEYYLDQDLSFRDLGVSGFTGKHLKGGLGDFLTAIEKGLVKAGDTLLIESLDRLSRQAVDRASELLRNILRSGVDVVTLSDGEHYTSESLKDPLALIKSILIMQRAHEESLRKSERIQAAWDAKKEAAKAGIKVSKRCPAWLKLNDDRKSFSVIPEKVETVKRCFQLRLEGKSIWEIVRTLNDEGHQSMSQYKPGKFGQTSVQDLLKNRSVIGYFTPKGCEEISGYYPAIIDETTFYKVQQLSHSRYGRKPASDKPLSVNLFKGVIRCSECGHALIITGFSDTRSGIYRCPLRNENRCSAKGLSRKQTDGTLLALLSRLDRFDSDTTNIIDTLKLHREHISSNIEKLVQLSLEIEDLSAITSKLKQLKGELSQVDADIEKETQRLKSIDVGCLSDCDLTTKAGRIEAQLIIKSAVKEVVLNTAKRRCKVTFHNGKVIDLPITENPSDNVTEAIQSLSEVTERGLIDVDEVII

SEQ ID NO: 27783 - protein, 547 aa, synthetic construct
MKLLVPYIRWSTKEQDSGDSLRRQTNLIDAFYSKHKNDYYLLPAHRYVDKGKSGFHQQHKNQGSDFRRMFENVMSGAIPEGSLIVVENFDRFSRADIDTAIDDVRQILRKGVSILTLGDGELYDKSALTDPVKLIKHIIIAERAHQESLVKQKRIAQVWNHKTQLARELKKPMGKQAPGWLELSEDGSHYIVDEDKASLVNIIYDKRLSGMSMFAICKWLNEQGYPTINQRKVRISKTKKPDGNWSALSVKHILTSRSVLGYLPAKISTEDRKTVLREEIESFYPQIVTDSKFYAVQQLLEETGKGKTSSGEHWLYVNILKGLIRCKCGLVMTPTGIRKPVYQGTYRCNGNKESRCSYGTVSRKLLDTQLCSRLFSKLSQLHDEATDTAKLDELQRRLNTVDGELEKLTETLIQLPNITQIQEALRVKQEEKDELIVQLSREKARVKSVSSLDLSGLDMESVEGRTEAQIIIKRLVKEIVVSGNEKLVDIYLHNGNMIRGFPLDGKDDHTLTLEEATDEMQSLDDMLIFGEPVTRIYPAGDMEEVDA

SEQ ID NO: 27784 - protein, 507 aa, synthetic construct
MKRVISYIRFSSERQAKGDSLRRQSKMVNDWLKAHPEYYLDESLTFRDLGVSGFTGKHLKGGLGDFLTAIEKGLVKAGDTLLIESLDRLSRQNVDRASELLRNILRSGVDVVTLSDGEHYTRESLKDPLALIKSILIMQRAHEESLRKAERIQAAWDAKKEAAKAGIKVSKRCPAWLKLNDDRKSFSVIPEKVETVKRCFQLRLEGKSIWEIVRTLNDEGHQSMSQYKPGSFGQSSVQDLLKNRSVIGYFTPKGREEIAGYFPPIIPETDFYKVQQLSYSRYGRKPASDKPLSVNLFKGVIRCSECGHALIITGFSDTRNGIYRCPLRNENRCSAKGLSRKQTDGTLLALLSRLDRFDSDTTNIIDMLRLHREHVSSNIEKLVQLSLEIEDLNAITSKLKQLKGELSQVDADIEKETQRLKSIDVGCLSDCDLTTKAGRIEAQLIIKSAVKEVVLNTAKRRCKVTFHNGKSITLPITENPSEDVTEAIQSLSEAIERGLIDVDVVEI

SEQ ID NO: 27785 - protein, 506 aa, synthetic construct
MRHVITYLRYSSAIQGAEGADSTRRQNDLFKQWLKKNSDAQVVASFNDEGLSGYKGKHLSGQFGDMLSRIESGEFPEGTILLVEAIDRIGRLEHLETEALMNRIIAHGIEIHTLQDGLIYTRDALSDDLGISIIQRVKSYIAHQESKQKSFRVSEKWKQRAKLALAGKQRLTKMVPGWIDPDTFKLNEHAETVRLIFKLLLDGESLHNIARHLQANNISSFSRRKDANGFSVHSVRTILRSETTIGTLPASQRNDRPAIPNYYEAAIDAATFNKAQEILDKNRKGRTPASDNPLTINIFKGLFRCQCGASVHPTGTKNKYAGVYRCNNNPDGRCDVPPLKRKPFDKWMIDNFLGMIDVGNDGEAEGKIAALQHEVEIVTARIKKATALLLEMDDITELKTQVKGLNQKRTELQTTIDNMRRKASLTDKELPQLKDIDLTTKAGRVECQLILSKHLKGLTLGKDSVIVTLQNDTEITIPTNPLPLNDGTSIFEIADKELLDVDAYQL

SEQ ID NO: 27786 - protein, 507 aa, synthetic construct
MKRVISYIRFSSEKQAKGDSLRRQSKMVNDWLKAHPEYYLDQDLSFRDLGVSGFTGKHLKGGLGDFLTAIEKGLVKAGDTLLIESLDRLSRQDVDQASELLRNILRSGVDVVTLSDGEHYTRESLKDPLALIKSILIMQRSHEESLRKSERIQAAWDAKKEAAKAGIKISRRCPAWLKLNDDRKSFSVIPEKVETVRRCFQLRLEGKSIWEIVRTLNDEGHQTLNQYKAGKFGQTSVQDLLKNRSVIGYFTPKGCEEISGYFPPIIPETDFYKVQQLSYSRYGRKPASDKPLSVNLFKGVIRCSECGHALIITGFSDTRSGIYRCPSRNENRCNAKGLSRKQTDGTLLALLSRLDRFDSDMTNIIDTLKLHREHISSNIEKLVQLSLEIEDLSAITSKLKQLKGELSQVDADIEKETQRLKSIDVGCLSDCDLTTKAGRIEAQLIIKSAVKEVVLNTAKRRCKVTFHNGKVIDLPITENPSEDVTEAIQSLSEVTERGLLDVDEVII

SEQ ID NO: 27787 - protein, 506 aa, synthetic construct
MRSVITYLRYSSTIQGVEGADSTRRQNDLFKQWLKKNSDARIIASFSDEGLSGYKGKHLTGQFGDMLTRIEAGEFPEGTILLVEAIDRIGRLEHLETEALMNRILGNGIEIHTLQDGLIYTKDALADDLGISIIQRVKAYIAHQESKQKSFRVSQKWEQRAKLALAGEQRLTKMVPGWIDPETFKCNEHAETVRLIFKLLLDGESLHNIARHLQSNGIKSFSRRKDANGFSVHAVRTILRSETTIGTLPASQRNDRPAIPNYYEAAIDALTFSKAQEILDKNRKGRTPASDNPRTINIFKGLFRCECGATVHPTGVKNTYEGVYRCCRRFDGRCDIPQLKRKPFDKWMIENLLSMIVVGDDGESERKIASLQHEVEVVTARIKKATALLLEMDDITELKTQVKELNQKRTELQTTIDGMRRKASLTDKKLPQLKDIDLTTKAGRVECQLILSKHLESLTLGRGQVTVKLSNGTEIVVPTDPLPLTDGTAIFEIAEKGLLDVDAFQL

SEQ ID NO: 27788 - protein, 506 aa, synthetic construct
MRTVITYLRFSSAIQGAEGADSTRRQNDLFKQWLKKNSDAQVVASFSDEGLSGYKGKHLTGQFGDMLARIESGEFPEGTILLVEAIDRIGRLEHLETEALMNRIIAHGIEIHTLQDGLIYTRDALSDDLGISIIQRVKSYVAHQESKQKSFRVSQKWKQRAKLALAGEQRLTKMVPGWIDPDTFKCNEHAETVRLIFKLLLDGESLHNIARHLQANNISSFSRRKDANGFSVHSVRTILRSETTIGTLPASQRNDRPAIPNYYEAAIDASTFNKAQEILGKNRIGRTPASDNPLTINIFKGLFRCQCGASVHPTGTKNKYQGVYRCNNHLDGRCDVPPLKRKPFDKWMIDNFLGMIDVGNDGEAEGKIASLQHEVEIVTTRIKKATALLLEMDDIDELKIQLKELNQKRTELQTTIDNMRRKASLTDKELPQLKDIDLTTKAGRVECQLILSKHLKGLTLGKDTVTVTLQNDTEITIPTDPLPLNDGTSIFEIAEKNLLNIDTFQL

SEQ ID NO: 27789 - protein, 547 aa, synthetic construct
MKLLVTYIRWSTKEQDSGDSLRRQTNLIDAFYSKHKEEYYLLPAHRYVDKGKSGFHQQHKNQGSDFRRMFENVMSGVIPEGSLIVVENFDRFSRADIDTAIDDVRQILRKGVSILTLGDGELYDKSALTDPVKLIKHIIIAERAHQESLVKQKRIAQVWNHKTQLARELKKPMGKQAPGWLELSEDGSHYIVDEDKASLVNIIYDKRLSGMSMFAICKWLNEQGYPTINQRKVRISKTKKPDGNWSALSVKHILTSRSVLGYLPAKISTEDRKTVLREEIESFYPQIVTDSKFYAVQQLLEETGKGKTSSGDHWLYVNMLKGIIRCKCGLVMTPTGIRKPVYQGTYRCNGNKESRCSYGTVSRKLLDTQLCSRLFSKLSQLHDEATDTAKLDELQRRLNTVDSELEKLTETLIQLPNITQIQEALRVKQGEKDELTFQLSREKARVKSVSSLDLSGLDMESVEGRTEAQIIIKRLVKEIVVSGNEKLVDIYLHNGNMIRGFPLDGKDDHTLTLEEATDEMQSLDDMLIFGEPVTRIYPAGDMEEVDA

SEQ ID NO: 27790 - protein, 507 aa, synthetic construct
MKRAISYIRFSSEKQSRGDSLRRQAKMVTDWLKAHPEYYLDESLTFRDLGVSGFTGKHLKGGLGDFLTAIEKGLVKAGDTLLIESLDRLSRQDVDQASELLRNILRSGVDVVTLSDGEHYTRESLKDPLALIKSILIMQRAHEESLRKAERIQAAWDAKKEAAKAGIKISRRCPAWLKLNDDRKSFSVIPEKVETVKRCFQLRLEGKSIWEIVRTLNAEGHQTLNQYKAGKFGQTSVQDLLKNRSVIGYFTPKGCEEISGYYPAIIDETTFYKVQQLSYSRYGRKPASDKPMAVNLFKGVIRCSECGHALIITGFSDTRNGIYRCPLRNENRCSAKGLSRKQTDGTLLALLSRLDRFDSDMTNTIDTLKLHREHISSNIEKLVQLSLEIEDLSAITSKLRQLKNELSQVDADIEKETQRLKSIDVGCLSDCDLTTKAGRIEAQLIIKSAVKEVVLNTAKRRCKVTFHNGKAITLPITENPSDNVTEAIQSLSEVTERGLIDVDEVII

SEQ ID NO: 27791 - protein, 547 aa, synthetic construct
MKLLVTYIRWSTKEQDSGDSLRRQTNLIDAFYSKHKNDYYLLPAHRYVDKGKSGFHQQHKNQGSDFRRMFENVMSGVIPEGSLIVVENFDRFSRADIDTAIDDVRQILRKGVSILTLGDGELYDKSALTDPVKLIKHIIIAERAHQESLVKQKRIAQVWNHKTQLARELKKPMGKQAPGWLELSEDGSHYIVDEDKASLVNIIYDKRLSGMSMFAICKWLNEQGYPTINQRKVRISKTKKPDGNWSALSVKHILTSRSVLGYLPAKISTEDRKTVLREEIESFYPQIVTDSKFYAVQQLLEETGKGKTSSGEHWLYVNILKGLIRCKCGLVMTPTGIRKPVYQGTYRCNGNKESRCNYGTVSRKLLDTQLCSRLFSKLSQLHDEATDTAKLDELQRRLNTVDSELEKLTETLIQLPNITQIQEALRVKQEEKDELIVQLSREKARVKSVSSLDLSGLDMESVEGRTEAQIIIKRLVKEIVVSGNEKLVDIYLHNGNMIRGFPLDGKDDHTLTLEEATDEMQSLDDMLIFGEPVTRIYPAGDMEEVDA

SEQ ID NO: 27792 - protein, 547 aa, synthetic construct
MKLLVTYIRWSTKEQDSGDSLRRQTNLIDAFYSKHKNDYYLLPAHRYVDKGKSGFHQQHKNQGSDFRRMFENVMSGAIPEGSLIVVENFDRFSRADIDTAIDDVRQILRKGVSILTLGDGELYDKSALTDPVKLIKHIIIAERAHQESLVKQKRIAQVWNHKTQLARELKKPMGKQAPGWLELSEDGSHYIVDEDKASLVNIIYDKRLSGMSMFAICKWLNEQGYPTINQRKVRISKTKKPDGNWSALSVKHILTSRSVLGYLPAKVSSEDRKTVLREEIEGFYPQIVTDSKFYAVQQLLEETGKGKTSSGEHWLYVNILKGLIRCKCGLVMTPTGIRKPVYQGTYRCNGNKESRCSYGTVSRKLLDTQLCSRLFSKLSQLHDEATDTAKLDELQRRLNTVDGELEKLTETLIQLPNITQIQEALRVKQGEKDELIVQLSREKARVKSVSSLDLSGLDMESVEGRTEAQIIIKRLVKEIVVSGNERLVDIYLHNGNMIRGFPLDGKDDHTLTLEEATDEMQSLDDMLIFGEPVTRIYPAGDMEEVDA

SEQ ID NO: 27793 - protein, 559 aa, synthetic construct
MKTKLYSYIRFSSMRQSDGSSYERQIRMAREIAAKYDLELVNDYQDLGVSAFKGANSKTGALSRFLDAIGRSVPVGSWLFIENLDRLSRADIVSAQELFLSIIRRGITIVTGMDNKIYSLDTVTANPMDLMFSILLFIRGNEESQTKRNRTNSSALIKIKAHQENPQNPAVAIEEIGKNMWWTDTTSGYVLPHPVYFPVVQEIVELRKNGRSTAEILDHLNETYAPPPAVSNKKHSKWSRAMVERLFHTRALIGIKEISVDGVNYELKDYYPRVIDDPTFYHLKKNIGARAWNFGDKEEVKPIPLLSGIGLLKCDHCGCAMVKVKGTNKRSDQYRYTCDATRSRRLDCEHPNWSFRGDQLEKAVLQLLADKIWIAEDKANPVPALKVQVDEISRKIDNLIALSAMTGATKELADQITTLNSERETLYNQIKMAEEEMYSVDSQGWEKLAEFDLEDVYNEDRIKVRFKIKQALKRIGCSRIDRNKNLFVLEYVDGKTQRVVIENSRGTRKGRIFIDLKTINDRQILESNGLVLHPCLDMLTDKNWKPEEEIPGPLQEFGI

SEQ ID NO: 27794 - protein, 507 aa, synthetic construct
MKRAISYIRFSSEKQSRGDSLRRQSKMVNDWLKAHPEYYLDQDLSFRDLGVSGFTGKHLKGGLGDFLTAIEKGLVKAGDTLLIESLDRLSRQAVDRASELLRNILRSGVDVVTLSDGEHYTSESLKDPLALIKSILIMQRAHEESLRKSERIQAAWDAKKEAAKAGIKVSKRCPAWLRLNDDRKSFSVIPEKVETVKRCFQLRLEGKSIWEIVRTLNAEGHQTLNQYKAGKFGQTSVQDLLKNRSVIGYFTPKGCEEISGYFPPIIPETDFYKVQQLSYSRYGRKPASDKPLSVNLFKGVIRCSECGHALIITGFGDTRNGIYRCPLRNENRCSAKGLSRKQTDGTLLALLSRLDRFDSDMTNVIDMLRLHREHISSNIEKLVQLSLEIEDLSAITIKLKQLKGELSQVDADIEKETQRLKSIDVGCLSDCDLTTKAGRIEAQLIIKSAVKEVVLNTAKRRCKVTFHNGRIIDLPITENPSEDVTEAIQSLSEVTERGLIDVDEVII

SEQ ID NO: 27795 - protein, 506 aa, synthetic construct
MRTVITYLRFSSATQGAEGADSTRRQNELFKQWLRKNSDAQVVASFSDEGLSGYKGKHLTGQFGDMLARIESGEFSEGTVLLVEAIDRIGRLEHLETEALMNRIIAHGIEIHTLQDGLIYTRDALSDDLGISIIQRVKSYVAHQESKQKSFRVSQKWKQRAKLALAGEQRLTKMVPGWIDPDTLKLNEHAETVRLIFKLLLDGESLHNIARHLQANNISSFSRRKDANGFSVHSVRTILRSETTIGTLPASQRNDRPAIPNYYEAAIDVSTFNKAQEILDKNRKGRTPASDNPLTINIFKGLFRCQCGASVHPTGTKNKYQGVYRCNNHLDGRCDVQPLKRKPFDRWMIDNFLGMIDVGNDGESERKIAALQHEVEIVTARIKKATALLLEMDDITELKTQVKGLNQKRTELQTTIDNMRRKASLTDKELPQLKDIDLTTKAGRVECQLILSKHLKGLTLGKDSVTVTLQNDTEITIPTNPLPLNDGTSIFEIADKELLDIDAYQL

SEQ ID NO: 27796 - protein, 507 aa, synthetic construct
MKRVISYIRFSSEKQAKGDSLRRQSKMVNDWLKAHPEYYLDQDLSFRDLGVSGFTGKHLKGGLGDFLTAIEKGLVKAGDTLLIESLDRLSRQDIDIASELLRNILRSGVDVVTLSDGEHYTRESLKDPLSLIKSILIMQRAHEESLRKSERIQAAWNRKKELISEGIKVSRRCPAWLRLNDDRKSFSVIPEKVETVKRCFQLRLEGKSIWAIVKALNDEGHQSMSQYKPGKFGQTSVQDLLKNRSVIGYFTPKGCEEISGYYPAIIDETTFYKVQQLSHYRYGRKPVSDKPLSVNLFKGVIRCSECGHALIITGFSDTRNGIYRCPLRNENRCSAKGLSRKQTDGTLLTLLSRLDRFDSDTTNTIDTLKLHREHISSNIEKLVQLSLEIEDLSAITIKLRQLKGELSQVDADIEKETQRLKSIDVGCLSDCDLTTKAGRIEAQLIIKSAVKEVVLNTAKRRCKVTFHNGKVIDLPITENPSEDVTEAIQSLSEVIERGLIDVDEVIV

SEQ ID NO: 27797 - protein, 506 aa, synthetic construct
MRTAITYLRYSSAIQGAEGADSTRRQNDLFKQWLKKNSDAQIVASFSDEGLSGYKGKHLTGQFGDMLARIEAGEFPAGTLLLVESIDRIGRLEHLETEALMNRILCNGIEIHTLQDGLVYTKDALADDLGISIIQRVKAYIAHQESKQKSFRVSQKWGQRAKLALAGKQRLTKMVPGWIDPETFKLNEHAETVRLIFKLLLDGESLHNIARHLQANNISSFSRRKDANGFSVHSVRTVLRSESVIGTLPASQRNDRPAIPNYYEAAIDAATFNKAQEILDKNRKGRTPASDNPLTINIFKGLFRCQCGASVHPTGTKNKYAGVYRCNNNPDGRCDVPPLKRKPFDKWMIDNFLGMIDVGNDGESEGKIAALQHEVEIVTTRIKKATALLLEMDDITELKTQVKELNQKRTELQTTIDNMRRKASLTDKELPQLKDIDLTTKAGRVECQLILSKHLKGLTLGKDSVTVTLQNDTEITIPTNPLPLNDGTSIFEIADKELLDIDAFRL

SEQ ID NO: 27798 - protein, 559 aa, synthetic construct
MKTKLYSYIRFSSMRQNDGSSYERQIRMAREVAAKYDLELVNDYQDLGVSAFKGANSKTGALSRFLDAIGRSVPVGSWLFIENLDRLSRADIVSAQELFLSIIRRGITIVTGMDNKIYSLDTVTANPMDLMFSILLFIRGNEESQTKRNRTNSSALIKIKAHQENPQNPAVAIEEVGKNMWWTDTTSGYVLPHPVYFPVVQEIVELRKNGRSTAEILDHLNETYAPPPAVSNKKHSKWSRAMVERLFHTRALIGIKEVSVDGVNYELKDYYPRVIDDPTFYHLKKNIGARAWNFGDKEEVKPIPLLSGIGLLKCDHCGCAMVKVKGTNKRSDQYRYTCDAIRSRRLDCEHPNWSFRGDQLEKAVLQLLADKIWIAEDKANPVPALKVQIDEISRKIDNLIALSAMTGATKELADQITTLNSERESLYNQIKMAEEEMYSVDSQGWEKLAEFDLEDVYNEERLKVRFKIKQALRRIGCSRIDRNKNLFVLEYIDGKTQRVVIENSRGTRKGRIFIDLKTINDRQILESNGLVLHPCLDMLTDKNWKPEEEIPGPLQEFGI

SEQ ID NO: 27799 - protein, 435 aa, synthetic construct
MKRAISYIRFSSEKQSRGDSLRRQSKMVNDWLKAQPEYYLDQDLSFRDLGVSGFTGKHLKGGLGDFLTAIEKGLVKAGDTLLIESLDRLSRQDIDIASELLRNILRSGVDVVTLSDGEHYTRESLKDPLALIKSILIMQRAHEESLRKAERIQAAWDAKKEAAKAGIKISKRCPAWLKLNDDRKSFSVIPEKVETVKRCFQLRLEGKSIWEIVRTLNAEGHQTMNQYKPGKFGQTSVQDLLKNRSVIGYFTPKGCGEIAGYYPSVIDETTFYKVQQLSHSRYGRKPVSAKPLSVNLFKGVIRCSECGHALIITGFSDTRNGIYRCPLRNENRCSAKGLSRKQTDGTLLTLLSRLDRFDSDTTNTIDMLRLHREHISSNIEKLVQLSLEIEDLSAITIKLKQLKGELSQVDADIEKETQRLKSIDVGCLSDCDLTT

SEQ ID NO: 27800 - protein, 559 aa, synthetic construct
MKTKLYSYIRFSSMRQNDGSSYERQIRMAREVAAKYDLELVNDYQDLGVSAFKGANSKTGALSRFLDAIGRSVPVGSWLFIENLDRLSRADIVSAQELFLSIIRRGITIVTGMDNKIYSLDTVTANPMDLMFSILLFIRGNEESQTKRNRTNSSALIKIKSHQENPQNPAVAIEEVGKNMWWTDTTSGYVLPHPTYFPVVQEIVELRKNGRSTAEILDHLNETYAPPPAVSNKKHSKWSRAMVERLFHTRALIGIKEVSVDGVNYELKDYYPRVVDDATFYHLKKNIGARAWNFGDKAEAKPIPLLSGIGLLKCDHCGCAMVKVKGTNKRSDQYRYTCDATRSRRLDCEHPNWSFRGDQLEKAVLQLLADKIWIAEDKANPVPALKVQVDEISRKIDNLIALSAMTGATKELADQITTLNSERETLYNQIKMAEEEMYSVDSQGWEKLAEFDLEDVYNEERLKVRFKIKQALKRIGCSRIDRNKNLFVLEYIDGKTQRVVIENSRGTRKGQIFVDLKTINDRQILESNGLVLHPCLDMLTDKNWKPEEEIPGPLQEFGI

SEQ ID NO: 27801 - protein, 506 aa, synthetic construct
MRSVITYLRFSSATQGAEGADSTRRQNDLFKQWLKKNSDAQVVASFNDEGLSGYKGKHLSGQFGDMLSRIESGEFSEGTILLVEAIDRIGRLEHLETEALMNRIIAHGIEIHTLQDGLIYTRDALSDDLGISIIQRVKSYIAHQESKQKSFRVSQKWKQRAKLALAGEQRLTKMVPGWIDPDTFKLNEHAETVRLIFKLLLDGESLHNIARHLQSNDIKSFSRRKDANGFSVHSVRTVLRSVSAIGTLPASQRNDRPAIPNYYEAAIDASTFNKAQEILDKNRKGRTPASDNPLTINIFKGLFRCQCGASVHPTGTKNKYAGVYRCNNNPDGRCDVPPLKRKPFDKWMIDNFLGMIDVGNDGEAEGKIASLQHEVEIVTARIKKATALLLEMDDIDELKIQIKELNQKRTELQTMIDNMRRKASLTDKELPQLKDIDLMTKAGRVECQLILSKHLKGLTLGKDSVTVTLQNDTEIIVPTDPLPLNDGTSIFEIAEKELLEIDAYQL

SEQ ID NO: 27802 - protein, 507 aa, synthetic construct
MKRVISYIRFSSERQAKGDSLRRQSKMVNDWLKAHPEYYLDQDLSFRDLGVSGFTGKHLKGGLGDFLTAIEKGLVKAGDTLLIESLDRLSRQAVDRASELLRNILRSGVDVVTLSDGEHYTSESLKDPLALIKSILIMQRAHEESLRKSERIQAAWDAKKEAAKAGIKVSKRCPAWLRLNDDRKSFSVIPEKVETVKRCFQLRLEGKSIWEIVRTLNDEGHQSMSQYKPGSFGQNSVQDLLKNRSVIGYFTPKGCEEIAGYYPAIIDETTFYKVQQLSYARHGRKPASAKPLSVNLFKGVIRCSECGHALIITGFSDTRNGIYRCPLRNENRCSAKGLSRKQTDGTLLTLLSRLDRFDSDTTNTVDMLRLHREHISSNIEKLVQLSLEIEDLSAITSKLKQLKNELSQVDADIEKETQRLKSIDVGCLSDCDLSTKAGRIEAQLIIRSAVKEVVLNTAKRRCKVTFHNGKSITLPITENPSEDVTEAIQSLSEVTERGLIDVDEVII

SEQ ID NO: 27803 - protein, 559 aa, synthetic construct
MKTKLYSYIRFSSMRQNDGSSYERQIRMAREVAAKYDLELVNDYQDLGVSAFKGANSKTGALSRFLDAIGRSVPVGSWLFIENLDRLSRADIVSAQELFLSIIRRGITIVTGMDNKIYSLDTVTANPMDLMFSILLFIRGNEESQTKRNRTNSSALIKIKAHQENPQNPAVAIEEVGKNMWWADTTSGYVLPHPVFFPIVQEVVELRRNGRSTAEILDHLNATYTPPPAASHKRHSNWSRAMIERLFHTRALIGIKEISVDGVKYELKDYYPRVLDDAEFYHLKKSIGVRACNYGDKEEAKPIPLLSGVGLLKCEHCGSAMVKVKGTNRRPNQYRYSCDAMRSSRIECVHTNWSFRGDQLEKAVLQLLADKIWIAEDKANPVPALKVQIDEISRKIDNLITLSAMTGATKELADQITTLNSERESLYNQIKMAEEEMYSVDSQGWEKLAEFDLEDVYSEDRIKVRFKIKQALKRIGCSRIDKYKNLFVLEYIDGKTQRVVIENSRGPRKGRIFVDLKTINDRQILESNGLVLHPCLDMLTDKNWKPEEEIPGPLQEFGI

SEQ ID NO: 27804 - protein, 596 aa, synthetic construct
MMSKIIPYGYLRVSSLEQVKSGGGLDSQDEAVRRYINERSDLFDIEQMVMMSDMASAYSGKQLSEGQLGGGLADVEAGKVPSGSALIAYSIDRLSRQNPWIGTKLISTLIGAGIQIHSVAENQILKSSDPVGAIMSTIYLMRANNESEIKSDRAKTGYQKRLKESIQNKKVLTRQMPRWLFDNDGKYAVEPKMKRVIEFVFDSYIAGQSSGYIANELNNKGWLYGNTYWRGSYVAKLIRDERLIGKHLRYSKQIKGVKREVIETIPDFYPNAVDVEKYHLANNMLTNVAENIRGRTRITYGDTSILRNIFSNVIKCGLCGGDTSVVQNTRKKVVGDKFVYIPYKMFLRCRNKYELKTCTHGDIRYEIIERAILVHLMGLDIANLLATPIDNSIELYKTELERCIADESQYREIIELRRKAGKRVRPETVEVLEDVLDRIDELNRLIESHVVENFVPDFNVDLGNIADVSNVEERSLIKKGIAAIAKRIFYKRVGGYILVEVMYRNLSIKHILVIDNKSSNTVVNFSIKYEEEKHIYTCNSFNMNYLIKSGDFEIHEETTMEDYAQMMNFIDIVSEDEAKKAKEFLVKNFNQNFISK

SEQ ID NO: 27805 - protein, 452 aa, synthetic construct
MKAAIYIRVSTQEQIENYSIQAQTEKLTALCRSKDWDVYDIFIDGGYSGSNMNRPALNEMLSKLHEIDAVVVYRLDRLSRSQRDTITLIEEYFLKNNVEFVSLSETLDTSSPFGRAMIGILSVFAQLERETIRDRMVMGKIKRIEAGLPLTTAKGRTFGYDVIDTKLYINEEEAKQLQLIYDIFEEEQSITFLQKRLKKLGFKVRTYNRYNNWLTNDLYCGYVSYKDKVHVKGIHEPIISEEQFYRVQEIFARMGKNPNMNRDSASLLNNLVVCGKCGLGFVHRRKDTVSRGKKYHYRYYSCKTYKHTHELEKCGNKIWRADKLEELIIDRVNNYSFASRNVDKEDELDYLNEKLKIEHAKKKRLFDLYINGSYEVSELDSMMNDIDAQINYYESQIEANEELKKNKKIQENLADLATVDFDSLEFREKQLYLKSLINKIYIDDEQVTIEWL

SEQ ID NO: 27806 - protein, 506 aa, synthetic construct
MRTVITYLRFSSATQGAEGADSTRRQNELFKQWLRKNSDAQVVASFSDEGLSGYKGKHLTGQFGDMLARIEAGEFPASTILLVESIDRIGRLEHLETEALMNRILGNGIEIHTLQDGLIYTKDALADDLGISIIQRVKAYIAHQESKQKSFRVSQKWKQRAKLALAGEQHLTRNVPGWIDPDTFKCNEHAETVRLIFKLLLDGESLHNIARHLQSNDIKSFSRRKDANGFSVHSVRTVLRSESVIGTLPASQRNDRPAIPNYYEAAIDAATFNKAQEILDKNRKGRTPASDNPLTINIFKGLFRCQCGASVHPTGTKNKYAGVYRCNNHLDGRCDVPPLKRKPFDRWMIDNFLGMIDVGNDGESERKIAALQHEVEIVTARIKKATALLLEMDDITELKAQVKGLNQKRTEIQTTIDTLKRKTSLTDKELPQLKDIDLTTKAGRVECQLILSKHLKGLTLGKDSVTVTLQNDTEITIPTNPLPLNDGSPIFEIADKELLDVDAYQL

SEQ ID NO: 27807 - protein, 547 aa, synthetic construct
MKLLVTYIRWSTREQDSGDSLRRQTNLIDAFYAKHKDDYYLLPAHRYVDKGKSGFHQQHKNQGSDFRRMFENVMSGAIPEGSLIVVENFDRFSRADIDTAIDDVRQILRKGVSILTLGDGEFYDKSALTDPVKLIKHIIIAERAHQESLVKQKRIAQVWNHKTQLARELKKPMGKQAPGWLELSEDGSHYIVDEDKASLVNIIYDKRLSGMSMFAICKWLNEQGYPTINQRKVRISKTKKPDGNWSALSVKHILTSRSVLGYLPAKISTEDRKTVLREEIEGFYPQIVTDSKFYAVQQLLEETGKGKTSSGDHWLYVNILKGIIRCKCGLVMTPTGIRKPVYQGTYRCNGNKESRCSYGTVSRKLLDTQLCSRLFSKLSQLHDEATDTAKLDALQRRLNTVDSELEKLTETLIQLPNITQIQEALRVKQEEKDELIVQLSREKARVKSVSSLDLSGLDMESVEGRTEAQIIIKRLVKEIVVSGNEKLVDIYLHNGNMIRGFPLDGKDDHTLTLEEATDEMQSLDDMLIFGEPVTRIYPAGDMEEVDA

SEQ ID NO: 27808 - protein, 507 aa, synthetic construct
MKRVISYIRFSSEKQSRGDSLRRQSKMVTDWLKAHPEYYLDQDLSFRDLGVSGFTGKHLKGGLGDFLTAIEKGLVKAGDTLLIESLDRLSRQAVDRASELLRNILRSGVDVVTLSDGEHYTSESLKDPLALIKSILIMQRAHEESLRKSERIQAAWNRKKELISEGIKISKRCPAWLKLNDDRKSFSVIPEKVETVKRCFQLRLEGKSIWEIVRTLNDEGHQSMSQYKPGKFGQTSVQDLLKNRSVIGYFTPKGCEEISGYYPAIIDETTFYKVQQLSYARHGRKPASAKPLSVNLFKGVIRCSECGHALIITGFSDTRNGIYRCPLRNENRCSAKGLSRKQTDGTLLALLSRLDRFDSDTTNTIDTLKLHREHISSNIEKLVQLSLEIEDLSAITSKLKQLKGELSQVDADIEKETQRLKSIDVGCLSDCDLTTKAGRIEAQLIIKSAVKEVVLNTAKRRCKVTFHNGKSITLPITENPSEDVTEAIQSLSEVTERGLIDVDVVEI

SEQ ID NO: 27809 - protein, 546 aa, synthetic construct
MKQADGSSYERQKRTAAEIAAKYDLELVTSYQDFGVSAFKGANSKTGALSRFLDEIGRSVPVGSWLVVENLDRISRQSIIEAQELFLSIIRRGITIVTGMDGRVYSRESVNANPIDLLLSVMLFARANEESQTKRNRTNSSALIKIKAHQENPQNPAVAIEEVGKNMWWTDTTSGYVLPHPVFFPIVQEVVELRKNGRSTAEILDHLNETYTPPPAVSNKKHSKWSRAMVERLFHTRALIGIKEVSVDGVNYELNNYYPRVIDDATFYHLKKNIGARAWNFGDKEEVKPIPLLSGIGLLKCDHCGCAMVKVKGTNKRSDQYRYTCDATRSRRLDCEHPNWSFRGDQLEKAVLQLLADKIWIAEDKANPVPALKVQIDEISRKIDNLIALSAMTGATKELADQITALNSERETLYNQIKMAEEEMYSVDSQGWEKLAEFDLEDVYNEERLKVRFKIKQALKRIGCSRIDRNKNLFVLEYIDGKTQRVVIENSRGTRKGRIFIDLKTINDRQILESNGLVLHPCLDMLTDKNWKPEEEQAGPLQEFGI

SEQ ID NO: 27810 - protein, 509 aa, synthetic construct
MRRAISYIRFSSERQLKGDSVRRQSKLVTDWLDKNPEFYLDSSLSFKDLGKSAFSGKHLKGGLGDFLTAIEKGLVKAGDTLLIESLDRLSRQDIDIASELLRRILRAGVDVVTLSDGEHYTKESLKDPLSLIKSILIMQRAHEESLRKSERVQAAWNRKKELISEGIKISKRCPAWLRLNDDRRTFTIIPDKVEVVKRAFDLRLQGLSFWAITRTLNDEGHLSLNQYTPKQKGWSDTAVKKLLRNRAVIGCFTPAGREEVQGYYPAIISESLFYRVQQLNTGQYGRASVSSNPLSVNLFRGIIKCSECGATIVLGGYALKRFGMYRCPNRSANRCSAKAISRKQTDATILYMLALCDRFETENTDIIDSLKLQREDLQRKISKMAELAIELDDMTIITEKLRDMKNALSKLNHDIEEETKRIKAITTGSLKDIDRTTKEGMIETQLLIKGVLKEIVIDAAKRRCKVTFHNGRAITLPITENPSEDVTEAIQSLSEVTERGLIDVDEVII

SEQ ID NO: 27811 - protein, 507 aa, synthetic construct
MKRVISYIRFSSEKQAKGDSLRRQSKMVTDWLKAHPEYYLDQDLSFRDLGVSGFTGKHLKGGLGDFLTAIEKGLVKAGDTLLIESLDRLSRQAVDRASELLRNILRSGVDVVTLSDGEHYTSESLKDPLALIKSILIMQRAHEESLRKSERIQAAWNRKKELISEGIKISKRCPAWLKLNDDRKSFSVIPDKVETVKRCFQLRLEGKSIWEIVRTLNAEGHRSMNQYKPGKFGQTSVQDLLKNRSVIGYFTPKGCEEISGYYPAIIDETTFYKVQQLSHSRYGKRSVSDKPLSVNLFKGVIRCSECGHALIITGFSDTRNGIYRCPLRNENRCNAKGLSRKQTDGTLLALLSRLDRFDSDTTNTIDTLKLHREHLSSNIEKLVQLSLEIEDLNAITNKLKQLKNELSQVDADIEKETQRLKSIDVGCLSDCDLTTKAGRIEAQLIIKSAVKEVVLNTAKRRCKVTFHNGKLIDLPITETPSDNVTEAIQSLSEVTERGLIDVDEVII

SEQ ID NO: 27812 - protein, 559 aa, synthetic construct
MKTKLYSYIRFSSMRQNDGSSYERQIRMAREVAAKYDLELVNDYQDLGVSAFKGANSKTGALSRFLDAIGRSVPVGSWLFIENLDRLSRADIVSAQELFLSIIRRGITIVTGMDNKIYSLDTVSANPMDLMFSILLFIRGNEESQTKRNRTNSSALIKIKSHQENPQNPAVAIEEVGKNMWWTDTTSGYVLPHPTYFPVVQEIVELRKNGRSTAEILDHLNETYAPPPAVSNKKHSKWSRAMVERLFHTRALIGIKEVSVDGVNYELKDYYPRVIDDATFYHLKKNIGARAWNFGDKEEAKPIPLLSGIGLLKCDHCGCAMVKVKGTNKRSDQYRYTCDATRSRRLDCEHPNWSFRGDQLEKAVLQLLADKIWIAEDKANPVPALKVQVDEISRKIDNLIALSAMTGATKELADQITTLNSERETLYNQIKMAEEEMYSVDSQGWEKLAEFDLEDVYNEERLKVRFKIKQALKRIGCSRIDRNKNLFVLEYIDGKTQRVVIENSRGTRKGRIFIDLKTINDRQILESNGLVLHPCLDMLTDKNWKPEEEIPGPLQEFGI

SEQ ID NO: 27813 - protein, 559 aa, synthetic construct
MKTKLYSYIRFSSMRQSDGSSYERQIRMAREIAAKYDLELVNDYQDLGVSAFKGANSKTGALSRFLDAIGRSVPVGSWLFIENLDRLSRADIVSAQELFLSIIRRGITIVTGMDNKIYSLDTVTANPMDLMFSILLFIRGNEESQTKRNRTNSSALIKIKAHQENPQNPAVAIEEVGKNMWWTDTTSGYVLPHPTYFPVVQEIVELRKNGRSTAEILDHLNETYAPPPAVSNKKHSKWSRAMVERLFHTRALIGIKEISVDGVNYELKDYYPRVIDDPTFYHLKKNIGARAWNFGDKEEVKPIPLLSGIGLLKCDHCGCAMVKVKGTNKRSDQYRYTCDATRSRRLDCEHPNWSFRGDQLEKAVLQLLADKIWIAEDKANPVPALKVQIDEISRKIDNLIALSAMTGATKELADQITALNSERETLYNQIKMAEEEMYSVDSQGWEKLAEFDLEDVYNEERIKVRFKIKQALRRIGCSRIDRNKNLFVLEYVDGKTQRVVIENSRGTRKGRIFIDLKTINDRQILESNGLVLHPCLDMLTDKNWKPEEEIPGPLQEFGI

SEQ ID NO: 27814 - protein, 507 aa, synthetic construct
MKRAISYIRFSSEKQSRGDSLRRQAKMVTDWLKAHPEYYLDESLTFRDLGVSGFTGKHLKGGLGDFLTAIEKGLVKAGDTLLIESLDRLSRQDVDQASELLRNILRSGVDVVTLSDGEHYTRESLKDPLALIKSILIMQRAHEESLRKAERIQAAWDAKKEAAKAGIKISRRCPAWLKLNDDRKSFSVIPEKVETVKRCFQLRLEGKSIWEIVRTLNAEGHQTLNQYKAGKFGQTSVQDLLKNRSVIGYFTPKGCEEISGYYPVIIDETTFYKVQQLSYARYGRKPASDKPMAVNLFKGVIRCSECGHALIITGFSDTRNGIYRCPLRNENRCSAKGLSRKQTDGTLLALLSRLDRFDSDMTNTIDTLKLHREHISSNIEKLVQLSLEIEDLSAITSKLRQLKNELSQVDADIEKETQRLKSIDVGCLSDCDLTTKAGRIEAQLIIKSAVKEVVLNTAKRRCKVTFHNGKTITLPITENPSDNVTEAIQSLSEVTERGLIDVDEVII

SEQ ID NO: 27815 - protein, 559 aa, synthetic construct
MKTKLYSYIRFSSMRQNDGSSYERQIRMAREVAAKYDLELVNDYQDLGVSAFKGANSKTGALSRFLDAIGRSVPVGSWLFIENLDRLSRADIVSAQELFLSIIRRGITIVTGMDNKIYSLDTVTANPMDLMFSILLFIRGNEESQTKRNRTNSSALIKIKAHQENPQNPAVAIEEVGKNMWWTDTTSGYVLPHPTYFPVVQEVVELRRNGRSTAEILDHLNATYTPPPAASHKRHSNWSRAMIERLFHTRALIGIKEISVDGVKYELKDYYPRVLDDAEFYHLKKSIGVRACNYGDKEEVKPIPLLSGVNLLKCDHCGSAMVKVKGTNRRPNQYRYSCDAMRSSRIECVHTNWSFRGDQLEKAVLQLLADKIWIAEDKANPVPALKVQIDEISRKIDNLITLSAMTGATKELADQITTLNSERETLYNQIKMAEEEMYSVDSQGWEKLAEFDLEDVYNEDRIKVRFKIKQALKRIGCSRIDKYKNLFVLEYIDGKTQRVVIENSRGPRKGRIFVDLKTINDRQILESNGLVLHPCLDMLTDKNWKPEEEIPGPLQEFGI

SEQ ID NO: 27816 - protein, 507 aa, synthetic construct
MKRVISYIRFSSEKQAKGDSLRRQSKMVTDWLKAHPEYYLDESLTFRDLGVSGFTGKHLKGGLGDFLTAIEKGLVKAGDTLLIESLDRLSRQDVDQASELLRNILRSGVDVVTLSDGEHYTSESLKDPLALIKSILIMQRAHEESLRKSERIQAAWDAKKEAAKAGIKVSKRCPAWLKLNDDRKSFSVIPEKVETVKRCFQLRLEGKSIWEIVRTLNDECHQSMSQYKPGKFGQTSVQDLLKNRSVIGYFTPKGCEEISGYYPAIIDETTFYKVQQLSHSRYGRKPVSAKPLSVNLFKGVIRCSECGHALIITGFSDTRSGIYRCPLRNENRCNAKGLSRKQTDGTLLALLSRLDRFDSDMTNTVDTLKLHREHISSNIEKLVQLSLEIEDLSAITSKLKQLKGELSQVDADIEKETQRLKSIDVGCLSDCDLTTKAGRIEAQLIIKSAVKEVVLNTAKRRCKVTFHNGKIIDLPITENPSEDVTEAIQSLSEVTERGLIDVDVVEI

SEQ ID NO: 27817 - protein, 547 aa, synthetic construct
MKLLVTYIRWSTREQDSGDSLRRQTNLIDAFYAKHKDDYYLLPAHRYVDKGKSGFHQQHKAQGSDFRRMFENVMSGVIPEGSLIVVENFDRFSRADIDTAIDDVRQILRKGVSILTLGDGELYDKSALTDPVKLIKHIIIAERAHQESLVKQKRIAQVWNHKTQLARELKKPMGKQAPGWLELSEDGSHYIVDEDKASLVNIIYDKRLSGMSMFAICKWLNEQGYPTINQRKVRISKTKKPDGNWSALSVKHILTSRSVLGYLPAKISSEDRKTVLREEIEGFYPQIVTDSKFYAVQQLLEETGKGKTSSGEHWLYVNILKGLIRCKCGLVMTPTGIRKPVYQGTYRCNGNKESRCSYGTVSRKLLDTQLCSRLFSKLSQLHDEATDTARLDELQRRLNTVDGELEKLTETLIQLPNITQIQEALRVKQEEKDELIVQLSREKARVKSVSSLDLSGLDMESVEGRTEAQIIIKRLVKEIVVSGNEKLVDIYLHNGNMIRGFPLDGKDDHTLTLEEATDEMQSLDDMLIFGEPVTRIYPAGDMEEVDA

SEQ ID NO: 27818 - protein, 559 aa, synthetic construct
MKTKLYSYIRFSSMKQADGSSYERQKRTAAEIAAKYDLELVTSYQDFGVSAFKGANSRTGALSRFLDEIGRSVPVGSWLVVENLDRISRQSIIEAQELFLSIIRRGITIVTGMDGKVYSKESVNANPIDLLLSVMLFARANEESQTKRNRTNSSALIKIKAHQENPQNPAVAIEEIGKNMWWTDTTSGYVLPHPVFFPIVQEVVELRRNGRSTAEILDHLNATYTPPPAASHKRHSNWSRAMIERLFHTRALIGIKEISVDGVKYELKDYYPRVLDDAEFYHLKKSIGVRACNYGDKEEVKPIPLLSGVGLLKCEHCGSAMVKVKGTNKRPNQYRYSCDAMRSSRIACVHTNWSFRGDQLEKAVLQLLADKIWIAEDKANPVPALKVQIDEISRKIDNLITLSAMTGATKELADQITTLNSERETLYNQIKMAEEEMYSVDSQGWEKLAEFDLEDVYNEDRIKVRFKIKQALKRIGCSRIDKYKNLFVLEYIDGKTQRVVIENSRGPRKGRIFVDLKTINDRQILESNGLVLHPCLDMLTDKNWKPEEEISGPLQEFGI

SEQ ID NO: 27819 - protein, 452 aa, synthetic construct
MKAAIYIRVSTQEQIENYSIQAQTEKLTALCRSKDWDVYDIFIDGGYSGSNMNRPALNEMLSKLHEIDAVVVYRLDRLSRSQRDTITLIEEYFLKNNVEFVSLSETLDTSSPFGRAMIGILSVFAQLERETIRDRMVMGKIKRIEAGLPLTTAKGRTFGYDVIDTKLYINEEEAKQLQMIYDIFEEEKSITTLQKRLKKLGFKVKSYSSYNNWLTNDLYCGYVSYADKVHTKGVHEPIISEEQFYRVQEIFSRMGKNPNMNRDSASLLNNLVVCSKCGLGFVHRRKDTVSRGKKYHYRYYSCKTYKHTHELEKCGNKIWRADKLEELIIDRVNNYSFASRNVDKEDELDNLNEKLKTEHTKKKRLFDLYISGSYEVSELDGMMADIDARINYYEAQIEANEELKKNKKIQENLADLATVDFDSLEFREKQLYLKSLINKIYIDGEQVTIEWL

SEQ ID NO: 27820 - protein, 547 aa, synthetic construct
MKLLVPYIRWSTKEQDSGDSLRRQTNLIDAFYAKHKDDYYLLPAHRYVDKGKSGFHQQHKAQGSDFRRMFENVMSGAIPEGSLIVVENFDRFSRADIDTAIDDVRQILRKGVSILTLGDGELYDKSALTDPVKLIKHIIIAERAHQESLVKQKRIAQVWNHKTQLARELKKPMGKQAPGWLELSEDGSHYIVDEDKASLVNIIYDKRLSGMSMFAICKWLNEQGYPTINQRKVRISKTKKPDGNWSALSVKHILTSRSVLGYLPAKISTEDRKTVLREEIEGFYPQIVTDSKFYAVQQLLEETGKGKTSSGEHWLYVNILKGLIRCKCGLVMTPTGIRKPVYQGTYRCNGNKESRCNYGTVSRKLLDTQLCSRLFSKLSQLHDEATDTAKLDELQRRLNTVDSELEKLTETLIQLPNITQIQEALRVKQGEKDELIVQLSREKARVKSVSSLDLSGLDMESVEGRTEAQIIIKRLVKEIVVSGNEKLVDIYLHNGNMIRGFPLDGKDDHTLTLEEATDEMQSLDDMLIFGEPVTRIYPAGDMEEVDA

SEQ ID NO: 27821 - protein, 520 aa, synthetic construct
MKKAVYCYARVSSRGQAKDGYGMSRQQTMLRDYVAAYDDSQHNRGYEFGDISWLYAEGVSAYSGKNIEDGSVLKNFIDDVLQKKITNSVLVIENLDRFSRAAPNRAAGLFLSLINAGCDIHEVETEMIHHQYSDLNIISGGLQRAHNESKRKSRLSIKNWDERIKNTIEGTSVLTHRVPSWIEVKNNKYVIKEGEAEKFNLIFKMYADGFGPAAIRDELKKKKMQINESEPTINHLVKIIKDQRLIGKFNSTGRKILDGMIIYPVVVEQSLFETVNDLRKQRNPLGKVNVKANNLFAGLCICMNCGRYVQVNSVDKKGDTYFRCGGSLLKIDKCKERGFKYKIIENALLEHIRNFDFSMLRSNDDDIQIKINYLSIELATKENYSSEILADMEKEYIPDPNDRRILKNLQRRISEIRTEITRLKQSNVGYEKFSDLKESCTDDLLDSKNTNLRLNFNVKIKRVIKNIKMKRLGNAIMLVVNYIGVNEKQAMVIDSKTGDVKFMAVQNDDLKSVEYLINKS

SEQ ID NO: 27822 - protein, 507 aa, synthetic construct
MKRVISYIRFSSEKQAKGDSLRRQSKMVTDWLKAHPEYHLDQDLSFRDLGVSGFTGKHLKGGLGDFLTAIEKGLVKAGDTLLIESLDRLSRQAVDRASELLRNILRSGVDVVTLSDGEHYTSESLKDPLALIKSILIMQRAHEESLRKSERIQAAWNRKKELISEGIKISKRCPAWLKLNDDRKSFSVIPDKVETVKRCFQLRLEGKSIWEIVRTLNAEGHRSMNQYKPGKFGQTSVQDLLKNRSVIGYFTPKGCEEISGYYPAIIDETTFYKVQQLSHYRYGRKPVSDKPMAVNLFKGVIRCSECGHALIITGFSDTRSGIYRCPLRNENRCSAKGLSRKQTDGTLLTLLSRLDRFDSDTTNIIDTLKLHREHISSNIEKLVQLSLEIEDLSAITSKLKQLKNELSQVDADIEKETQRLKSIDVGCLSDCDLTTKAGRIEAQLIIKSAVKEVVLNTAKRRCKVTFHNGKAITLPITETPSEDVTEAIQSLSEVTERGLIDVDEVII

SEQ ID NO: 27823 - protein, 507 aa, synthetic construct
MKRVISYIRFSSEKQAKGDSLRRQSKMVNDWLKAHPEYYLDQDLSFRDLGVSGFTGKHLKGGLGDFLTAIEKGLVKAGDTLLIESLDRLSRQAVDRASELLRNILRSGVDVVTLSDGEHYTSESLKDPLALIKSILIMQRAHEESLRKSERIQAAWDAKKEAAKAGIKVSKRCPAWLRLNDDRKSFSVIPEKVETVKRCFQLRLEGKSIWEIVRTLNAEGHRSMNQYKPGKFGQTSVQDLLKNRSVIGYFTPKGCEEISGYYPAIIDETTFYKVQQLSHSRYGKRSVSDKPLSVNLFKGVIRCSECGHALIITGFSDTRNGIYRCPLRNENRCSAKGLSRKQTDGTLLALLSRLDRFDSDTTNIIDTLKLHREHISNNIEKLVQLSLEIEDLSAITIKLKQLKGELSQVDADIEKETQRLKSIDVGCLSDCDLTTKAGRIEAQLIIKSAVKEVVLNAAKRRCKVTFHNSKSITLPITENPSEDVTEAIQSLSEVTERGLIDVDEVII

SEQ ID NO: 27824 - protein, 559 aa, synthetic construct
MKTKLYSYIRFSSMRQNDGSSYERQIRMAREVAAKYDLELVNDYQDLGVSAFKGANSKTGALSRFLDAIGRSVPVGSWLFIENLDRLSRADIVSAQELFLSIIRRGITIVTGMDNKIYSLDTVTANPMDLMFSILLFIRGNEESQTKRNRTNSSALIKIKAHQENPQNPAVAIEEVGKNMWWTDTTSGYVLPHPVYFPVVQEIVELRKNGRSTAEILDHLNETYTPPPAVSNKKHSKWSRAMVERLFHTRALIGIKEVSVDGVNYELKDYYPRVIDDATFYHLKKNIGARAWNFGDKEEVKPIPLLSGIGLLKCDHCGCAMVKVKGTNKRSDQYRYTCDATRSRRLDCEHPNWSFRGDQLEKAVLQLLADKIWIAEDKANPVPALKVQVDEISRKIDNLIALSAMTGATKELADQITTLNSERETLYNQIKMAEEEMYSVDSQGWEKLAEFDLEDVYNEERLKVRFKIKQALKRIGCSRIDRNKNLFVLEYIDGKTQRVVIENSRGTRKGQIFVDLKTINDRQILESNGLVLHPCLDMLTDKNWKPEEEIPGPLQEFGI

SEQ ID NO: 27825 - protein, 506 aa, synthetic construct
MRHVITYLRYSSAIQGAEGADSTRRQNDLFKQWLKKNSDAQVVASFNDEGLSGYKGKHLSGQFGDMLSRIESGEFSEGTVLLVEAIDRIGRLEHLETEALMNRILGNGIEIHTLQDGLIYTKDALSDDLGISIIQRVKSYIAHQESKQKSFRVSQKWEQRAKLALAGEQRLTRNVPGWIDPDTFKCNEHAETVRLIFKLLLSGESLHNIARHLQSNGIKSFSRRKDANGFSVHSVRTILRSETTIGTLPASQRNDRPAIPNYYEAAIDASTFNKAQEILGKNRIGRTPASDNPLTINIFKGLFRCQCGASVHPTGTKNKYQGVYRCNNHLDGRCDVPPLKRKPFDKWMIDNFLGMIDVGNDGEAEGKIASLQHEVEIVTTRIKKATALLLEMDDIDELKIQLKELNQKRTELQTTIDNMRRKASLTDKELPQLKDIDLTTKAGRVECQLILSKHLKGLKLGKDSVTVTLQNDTEITIPTNPLPLNDGSPIFEIADKELLDIDAYQL

SEQ ID NO: 27826 - protein, 507 aa, synthetic construct
MKRVISYIRFSSEKQAKGDSLRRQSKMVTDWLKAHPEYYLDQDLSFRDLGVSGFTGKHLKGGLGDFLTAIEKGLVKAGDTLLIESLDRLSRQAVDRASELLRNILRSGVDVVTLSDGEHYTRESLRDPLALIKSILIMQRAHEESLRKAERIQAAWDAKKEAAKAGIKVSKRCPAWLKLNDDRKSFSVIPEKVETVKRCFQLRLEGKSIWEIVRTLNDEGHQSMSQYKPGKFGQTSVQDLLKNRSVIGYFTPKGCEEISGYYPAIIDETTFYKVQQLSHYRYGRKPVSDKPLSVNLFKGVIRCSECGHALIITGFSDTRNGIYRCPLRNENRCSAKGLSRKQTDGTLLTLLSRLDRFDSDTTNTIDMLRLHREHISSNIEKLVQLSLEIEDLSAITIKLKQLKGELSQVDADIEKETQRLKSIDVGCLSDCDLTTKAGRIEAQLIIKSAVKEVVLNTAKRRCKVTFHNGKSITLPITENPSEDVTEAIQSLSEVTERGLIDVDEVII

SEQ ID NO: 27827 - protein, 522 aa, synthetic construct
MNHSKRKVAIYIRVSTEEQANEGFSLGAQEDYLKQYANAKGYEIYDIYVDDGYSGKDYNRPEIQRLFKDLYQEKFTGILVKSVDRISRRVSDVTKLIDDVLAPRKCCVLVSDNNLDSSTTGGTAFIQLLATFAEYERSMIVQRVKSGMSKRAELGYWNGGRVLGYDVKNKELKINKEEAEIVRKVFDLRAEGKGYKSIAVILNQQGFKTKRGRLFSIGTIKTILENPLYIGYCRWGRHKNWNVERRKGKTDEYKFVKGKHEPIVSEDLWKRVQSVNYAHKKSISKNRNFNGEFVLSGILRCPSCGAGMVMCKTKKRDKSGYHLYYMCQAFHSKGKLACKSNLIRKEDIEEKVLQCINKIILIPSIVDKTFERIQEKKESGIKRIKNDLSYINEELKRKKQFIKKLNKDYFDEKIRVETYTELSEPLREEIVELEREKSKLDGKIESSEIPITKKMVIKALENFTNLYENATYEQKKSLLRAIIKKIEVQPNRKEIKGITYWFDCDNGQDDALLVSKEGRTVS

SEQ ID NO: 27828 - protein, 506 aa, synthetic construct
MRSVITYLRFSSAIQGAEGADSTRRQNDLFKQWLKKNSDAQVVASFSDEGLSGYKGKHLTGQFGDMLARIESGEFPEGTLLLVEAIDRIGRLEHLETEALMNRIIAHGIEIHTLQDGLIYTRDALSDDLGISIIQRVKSYVAHQESKQKSFRVSQKWKQRAKLALAGEQRLTKMVPGWIDPDTFKCNEHAETVRLIFKLLLDGESLHNIARHLQANNISSFSRRKDANGFSVHSVRTILRSETTRGTLPASQRNDRPAIPNYYEAAIDASTFNKAQEILDKNRKGRTPASDNPLTINIFKGLFRCQCGASVHPTGTKNKYAGVYRCNNHLDGRCDVPPLKRKPFDKWMIDNFLGMIDVGNDGEAEGKIASLQHEVEIVTARIKKATALLLEMDDIDELKIQLKELNQKRTELQTMIDNMRRKASLTDKELPQLKDIDLMTKAGRVECQLILSKHLKGLTLGKDSVTVTLQNDTEIIVPTDPLPLNDGTSIFEIAEKELLEIDAYQL

SEQ ID NO: 27829 - protein, 560 aa, synthetic construct
MKTKLYSYIRFSSMKQADGSSFERQKRTAKEIAAKYDLELVTSYQDFGVSAFKGANSKTGALSRFLDEIGRSVPVGSWLVVENLDRISRQSVIEAQELFLSIIRRGITIVTGMDGKVYSKESVNANPIDLLLSVMLFARANEESQTKRNRTNSSALLKVKAHQENPQNPAVAIEEVGRNIWWADTSSGYVLPHPVYFPVIKKIVELKQNGYSNGRILDYLNERIAPPNYTTNKDTTKKWARSMLGRMFTNRALLGIKEITIEGVTYELKDYYPRVMEDAEFYQLKKTIGLRSFSYPTKSSPVITLLSGAGLLRCGHCGASMVKRSGASKERLAQYRYMCDGADSRRTNCDHPNWGFRGDQLDKAVLQLLADKIWIAEDKANPIPGMQAQIEDISRKIDNLISLSAMTGATKELADQITTLNHEREAIYNQIKVIEENMYSVDSQGWEKLAQFDLEDVCSEERLKVRLKIKEAVKSIKCYKIDSNYNHFVMEYIDGKIQRIVIERSRRNRKGQIFVDLKTINDRQILESNGLVLHPCLDMLTDKNWKPEEEIPGPLQEFGI

SEQ ID NO: 27830 - protein, 507 aa, synthetic construct
MKRVISYIRFSSERQAKGDSLRRQSKMVNDWLKAHPEYYLDQDLSFRDLGVSGFTGKHLKGGLGDFLTAIEKGLVKAGDTLLIESLDRLSRQAVDRASELLRNILRSGVDVVTLSDGEHYTSESLKDPLALIKSILIMQRAHEESLRKSERIQAAWDAKKEAAKAGIKVSKRCPAWLRLNDDRKSFSVIPDKVETVKRCFQLRLEGKSIWEIVRTMNAEGRQTLHQYKAGSFGQSSVQDLLKNRSVIGYFTPKGCEEISGYYPAIIDETTFYKVQQLSYARHGRKPASAKPLSVNLFKGVIRCSECGHALIITGFSDTRNGIYRCPLRNENRCSAKGLSRKQTDGTLLALLSRLDRFDSDMTNTIDTLKLHREHISSNIEKLVQLSLEIEDLNAITNKLKQLKNELSQVDADIEKETQRLKSIDVGCLSDCDLTTKAGRIEAQLIIKSAVKEVVLNTAKRRCKVTFHNGKSITLPITENPSEDVTEAIQSLSEVTERGLIDVDVVAI

SEQ ID NO: 27831 - protein, 559 aa, synthetic construct
MKTKLYSYIRFSSMRQNDGSSYERQIRMAREIAAKYDLELVNDYQDQGVSAFKGANSKTGALSRFLDAIGRSVPVGSWLFIENLDRLSRADIVSAQELFLSIIRRGITIVTGMDNKIYSLDTVTANPMDLMFSILLFIRGNEESQTKRNRTNSSALIKIKAHQENPQNPAVAIEEVGKNMWWTDTTSGYVLPHPTYFPVVQEIVELRKNGRSTAEILDHLNETYAPPPAVSNKKHSKWSRAMVERLFHTRALIGIKEVSVDGVNYELKDYYPRVIDDATFYHLKKNIGARAWNFGDKEEVKPIPLLSGIGLLKCDHCGCAMVKVKGTNKRSDQYRYTCDATRSRRLDCEHPNWSFRGDQLEKAVLQLLADKIWIAEDKANPVPALKVQVDEISRKIDNLIALSAMTGATKELADQITTLNSERETLYNQIKMAEEEMYSVDSQGWEKLAEFDLEDVYNEERLKVRFKIKQALKRIGCSRIDRNKNLFVLEYIDGKTQRVVIENSRGTRKGRIFIDLKTINDRQILESNGLVLHPCLDMLTDKNWKPEEEIPGPLQEFGI

SEQ ID NO: 27832 - protein, 506 aa, synthetic construct
MRTVITYLRFSSAIQGAEGADSTRRQNDLFKQWLKKNSDAQVVASFSDEGLSGYKGKHLTGQFGDMLARIESGEFPEGTILLVESIDRIGRLEHLETEALMNRILGNGLEIHTLQDGLIYTKDALADDLGISIIQRVKAYIAHQESKQKSFRVSQKWGQRAKLALAGKQRLTKMVPGWIDPDTFKCNEHAETVRLIFKLLLDGESLHNIARHLQSNGIKSFSRRKDANGFSVHSVRTVLRSESVIGTLPASQRNDRPAIPNYYEAAIDAATFNKAQEILDKNRKGRTPASDNPLTINIFKGLFRCQCGASVHPTGTKNKYAGVYRCNNHLDGRCDVPPLKRKPFDRWMIDNFLGMIDVGNDGESERKIAALQHEVETVTARIKKATALLLEMDDIDELKIQLKELNQKRTELQTTIDSMRRKASLTDKELPQLKDIDLTTKAGRVECQLILSKHLKGLTLGKDSVTVTLQNDTEITIPTNPLPLNDGSPIFEIADKELLDIDAYQL

SEQ ID NO: 27833 - protein, 547 aa, synthetic construct
MKLLVTYIRWSTKEQDSGDSLRRQTNLIDAFYSKHKNDYYLLPAHRYVDKGKSGFHQQHKNQGSDFRRMFENVMSGVIPEGSLIVVENFDRFSRADIDTAIDDVRQILRKGVSILTLGDGELYDKSALTDPVKLIKHIIIAERAHQESLVKQKRIAQVWNHKTQLARELKKPMGKQAPGWLELSEDGSHYIVDEDKASLVNIIYDKRLSGMSMFAICKWLNEQGYPTINQRKVRISKTKKPDGNWSALSVKHILTSRSVLGYLPAKISTEDRKTVLREEIESFYPQIVTDSKFYAVQQLLEETGKGKTSSGEHWLYVNILKGLIRCKCGLVMTPTGIRKPVYQGTYRCNGNKESRCSYGTVSRKLLDTQLCSRLFSKLSQLHDEATDTAKLDELQRRLNTVDSELEKLTETLIQLPNITQIQEALRVKQGEKDELIVQLSREKARLKSVSSLDLSGLDMESVEGRTEAQIIIKRLVKEIVVSGNKKLVDIYLHNGNMIRGFPLDGKDDHTLTLEEATDEMQSLDDMLIFGEPVTRIYPAGDMEEVDA

SEQ ID NO: 27834 - protein, 507 aa, synthetic construct
MKRAISYIRFSSEKQSRGDSLRRQAKMVTDWLKAHPEYYLDESLTFRDLGVSGFTGKHLKGGLGDFLTAIEKGLVKAGDTLLIESLDRLSRQDVDQASELLRNILRSGVDVVTLSDGEHYTRESLKDPLALIKSILIMQRAHEESLRKAERIQAAWDAKKEAAKAGIKISRRCPAWLKLNDDRKSFSVIPEKVETVKRCFQLRLEGKSIWEIVRTLNAEGHQTLNQYKAGKFGQTSVQDLLKNRSVIGYFTPKGCEEISGYYPAIIDETTFYKVQQLSYARYGRKPASDKPMAVNLFKGVIRCSECGHALIITGFSDTRNGIYRCPLRNENRCSAKGLSRKQTDGTLLALLSRIDRFDSDMTNTIDTLKLHREHISSNIEKLVQLSLEIEDLSAITSKLKQLKGELSQVDADIEKETQRLKSIDVGCLSDCDLTTKAGRIEAQLIIKSAVKEVVLNTAKRRCKVTFHNGKVIDLPITEDPSEDVTEAIQSLSEVTERGLIDVDEVII

SEQ ID NO: 27835 - protein, 559 aa, synthetic construct
MKTKLYSYIRFSSMRQNDGSSYERQIRMAREVAAKYDLELVNDYQDLGVSAFKGANSKTGALSRFLDAIGRSVPVGSWLFIENLDRLSRADIVSAQELFLSIIRRGITIVTGMDNKIYSLDTVTANPMDLMFSILLFIRGNEESQTKRNRTNSSALIKIKAHQENPQNPAVAIEEVGKNMWWTDTTSGYVLPHPTYFPVVQEIVELRKNGRSTAEILDHLNETYAPPPAVSNKKHSKWSRAMVERLFHTRALIGIKEVSVDGVNYELKDYYPRVIDDATFYHLKKNIGARAWNFGDKEEVKPIPLLSGIGLLKCDHCGCAMVKVKGTNKRSDQYRYTCDATRSRRLDCEHPNWSFRGDQLEKAVLQLLADKIWIAEDKANPVPALKVQVDEISRKIDNLIALSAMTGATKELADQITTLNSERETLYNQIKMAEEEMYSVDSQGWEKLAEFDLEDVYNEERLKVRFKIKQALKRIGCSRIDRNKNLFVLEYIDGKTQRVVIENSRGTRKGQIFIDLKTINDRQILESNGLVLHPCLDMLTDKNWKPEEEIPGPLQEFGI

SEQ ID NO: 27836 - protein, 506 aa, synthetic construct
MRSVITYLRFSSAIQGAEGADSTRRQNDLFKQWLKKNSDAQVVASFSDEGLSGYKGKHLTGQFGDMLARIESGEFSEGTVLLVEAIDRIGRLEHLETEALMNRIIAHGIEIHTLQDGLIYTRDALSDDLGISIIQRVKSYVAHQESKQKSFRVSQKWKQRAKLALAGEQRLTRNVPGWIDPDTFKCNEHAETVRLIFKLLLDGESLHNIARHLQSNDIKSFSRRKDANGFSVHSVRTVLRSESVIGTLPASQRNDRPAIPNYYEAAIDAATFNKAQEILDKNRKGRTPASDNPLTINIFKGLFRCQCGASVHPTGTKNKYQGVYRCNNHLDGRCDVPPLKRKPFDRWMIDNFLGMIDVGNDGESERKIASLQHEVEIVTTRIKKATALLLEMDDIDELKIQLKELNQKRTELQTTIDNMRRKASLTDKELPQLKDIDLTTKVGRVECQLILSKHLKGLTLGKDSVIVTLQNDTEITIPTNPLPLNDGSPIFEIADKELLDIDAYQL

SEQ ID NO: 27837 - protein, 506 aa, synthetic construct
MRTVITYLRFSSATQGAEGADSTRRQNELFKQWLRKNSDAQVVASFSDEGLSGYKGKHLTGQFGDMLARIESGEFSEGTVLLVEAIDRIGRLEHLETEALMNRIIAHGIEIHTLQDGLIYTRDALSDDLGISIIQRVKSYLAHQESKQKSFRVSQKWEQRAKLALAGEQRLTKMVPGWIDPETFKLNEHAETVRLIFKLLLDGESLHNIARHLQANNISSFSRRKDANGFSVHSVRTILRSETTIGTLPASQRNDRPAIPNYYEAAIDAATFNKAQEILDKNRKGRTPASDNPLTINIFKGLFRCQCGASVHPTGTKNKYAGVYRCNNHLDGRCDVPPLKRKPFDKWMIDNFLGMIDVGNDGEAEGKIASLQHEVEIVTTRIKKATALLLEMDDIDELKIQIKELNQRRTELQTTIDSMRRKASLTDKELPQLKDIDLTTKAGRVECQLILSKHLKGLTLGKDSVTITLQNDTEITIPTNPLPLNDGSPIFEIADKELLDIDAYQL

SEQ ID NO: 27838 - protein, 559 aa, synthetic construct
MKTKLYSYIRFSSMKQADGSSYERQKRTAAEIAAKYDLELVTSYQDFGVSAFKGANSRTGALSRFLDEIGRSVPVGSWLVVENLDRISRQSIIEAQELFLSIIRRGITIVTGMDGKVYSKESVNANPIDLLLSVMLFARANEESQTKRNRTNSSALIKIKAHQENPQNPAVAIEEIGKNMWWTDTTSGYVLPHPVFFPIVQEVVELRRNGRSTAEILDHLNATYTPPPAASHKRHSNWSRAMIERLFHTRALIGIKEISVDGVKYELKDYYPRVLDDAEFYHLKKSIGVRACNYGDKEEVKPIPLLSGVGLLKCEHCGSAMVKVKGTNRRPNQYRYSCDAMRSSRIECVHTNWSFRGDQLEKAVLQLLADKIWIAEDKANPVPALKVQIDEISHKIDNLITLSAMTGATKELADQITTLNSERETLYNQIKMAEEEMYSVDSQGWEKLAEFDLEDVYNEDRIKVRFKIKQALKRIGCSRIDKYKNLFVLEYIDGKTQRVVIENSRGPRKGRIFVDLKTINDRQILESNGLVLHPCLDMLTDKNWKPEEEIPGPLQEFGI

SEQ ID NO: 27839 - protein, 559 aa, synthetic construct
MKTKLYSYIRFSSMRQNDGSSYERQIRMAREVAAKYDLELVNDYQDLGVSAFKGANSKTGALSRFLDAIGRSVPVGSWLFIENLDRLSRADIVSAQELFLSIIRRGITIVTGMDNKIYSLDTVTANPMDLMFSILLFIRGNEESQTKRNRTNSSALIKIKAHQENPQNPAVAIEEVGKNMWWTDTTSGYVLPHPVYFPVVQEIVELRKNGRSTAEILDHLNETYTPPPAVSNKKHSKWSRAMVERLFHTRALIGIKEVSVDGVNYELKDYYPRVIDDATFYHLKKNIGARAWNFGDKEEAKPIPLLSGIGLLKCDHCGCAMVKVKGTNKRSDQYRYTCDATRSRRLDCEHPNWSFRGDQLEKAVLQLLADKIWIAEDKANPVPALKVQVDEISRKIDNLIALSAMTGATKELADQITTLNSERETLYNQIKMAEEEMYSVDSQGWEKLAEFDLEDVYNEERLKVRFKIKQALKRIGCSRIDRNKNLFVLEYIDGKTQRVVIENSRGTRKGRIFIDLKTINDRQILESNGLVLHPCLDMLTDKNWKPEEEIPGPLQEFGI

SEQ ID NO: 27840 - protein, 506 aa, synthetic construct
MRHVITYLRYSSATQGAEGADSTRRQNELFKQWLRKNSDAQVVASFNDEGLSGYKGKHLSGQFGDMLSRIESGEFSKGTILLVEAIDRIGRLEHLETEALMNRIIAHGIEIHTLQDGLIYTRDALSDDLGISIIQRVKSYLAHQESKQKSFRVSEKWKQRAKLALAGEQRLTKMVPGWIDPETFKLNEHAETVRLIFKLLLDGESLHNIARHLQANNISSFSRRKDANGFSVHSVRTILRSETTIGTLPASQRNDRPAIPNYYEAAIDAATFNKAQEILGKNRIGRTPASDNPLTINIFKGLFRCQCGASVHPTGTKNKYQGVYRCNNHLDGRCDVPPLKRKPFDKWMIDNFLGMIDVGNDGEVEGKIASLQHEVEIVTTRIKKATALLLEMDDIDELKIQLKELNQKRTELQTTIDNMRRKASLTDKELPQLKDIDLTTKAGRVECQLILSKHLKGLTLGKDTVTVTLQNDTEITIPTDPLPLNDGTSIFEIAEKNLLNIDTFQL

SEQ ID NO: 27841 - protein, 505 aa, synthetic construct
MRGVITYLRYSSAIQGVEGADSTRRQNDLFQQWLKKNSDAQVVASFSDEGLSGYKGKHLSGQFGDMLSRIESGEFPEGTILLVESIDRIGRLEHLETEALMNRILGNGLEIHTLQDGLIYTKDALADDLGISIIQRVKAYIAHQESKQKSFRVSQKWEQRAKLALAGEQRLTRNVPGWIDPDTFKCNEHAETVRLIFKLLLSGESLHHIARHLQSNGIPSFSRHRANGFSVHSVRTVLRSESVIGTLPASQRNDRPAIPNYYEAAIDVSTFSKAQEILDKNRKGRTPASDNPLTINVFKGLFRCQCGASVHPTGTKRTYQGVYRCNNHLDGRCDVPPLKRKPFDNWMIDNFLGMIDVVSDGESERKIAALQHEVETVTARIKKATALLLEMDDITELKLQVKELNQKRTELQTTIDTLKRKTSLTDKELPQLKDIDLMTKVGRVECQLILSKHLKGLTLGKDSVTVTLQNDTEIIIPTDPLPLNDGSPILEIAEKELLEIDAYQL

SEQ ID NO: 27842 - protein, 559 aa, synthetic construct
MKTKLYSYIRFSSMRQNDGSSYERQIRMAREIAAKYDLELVNDYQDLGVSAFKGANSKTGALSRFLDAIGRSVPVGSWLFIENLDRLSRADIVSAQELFLSIIRRGITIVTGMDNKIYSLDTVTANPMDLMFSILLFIRGNEESQTKRNRTNSSALIKIKAHQENPQNPAVAIEEVGKNMWWTDTTSGYVLPHPVYFPVVQEIVELRKNGRSTAEILDHLNETYAPPPAVSNKKHSKWSRAMVERLFHTRALIGIKEVSVDGVNYELKDYYPRVIDDPTFYHLKKNIGARAWNFGDKEEVKPIPLLSGIGLLKCDHCGCAMVKVKGTNKRSDQYRYTCDATRSRRLDCEHPNWSFRGDQLEKAVLQLLADKIWIAEDKANPVPALKVQVDEISRKIDNLIALSAMTGATKELADQITTLNSERETLYNQIKMAEEEMYSVDSQGWEKLAEFDLEDVYNEERLKVRFKIKQALKRIGCSRIDRNKNLFVLEYIDGKTQRVVIENSRGTRKGQIFVDLKTINDRQILESNGLVLHPCLDMLTDKNWKPEEEIPGPLQEFGI

SEQ ID NO: 27843 - protein, 507 aa, synthetic construct
MKRVISYIRFSSEKQAKGDSLRRQSKMVNDWLKAHPEYYLDESLTFRDLGVSGFTGKHLKGGLGDFLTAIEKGLVKAGDTLLIESLDRLSRQAVDRASELLRNILRSGVDVVTLSDGEHYTSESLKDPLALIKSILIMQRAHEESLRKSERIQAAWDAKKEAAKAGIKVSKRCPAWLKLNDDRKSFSVIPEKVETVKRCFQLRLEGKSIWEIVRTLNDECHQSMNQYKPGKFGQTSVQDLLKNRSVIGYFTPKGCEEISGYFPPIIPETDFYKVQQLSYARHGRKPASAKPLSVNLFKGVIRCSECGHALIITGFSDTRNGIYRCPLRNENRCSAKGLSRKQTDGTLLALLSRLDRFDSDTTNTIDMLRLHREHISSNIEKLVQLSLEIEDLSAITSKLKQLKGELSQVDADIEKETQRLKSIDVGCLSDCDLTTKAGRIEAQLIIKSAVKEVVLNTAKRRCKVTFHNGKVIDLPITDPPSEDVTEAIQSLSEVTERGLIDVDEVII

SEQ ID NO: 27844 - protein, 547 aa, synthetic construct
MKLLVTYIRWSTREQDSGDSLRRQTNLIDAFYSKHREEYYLLPAHRYVDKGKSGFHQQHKNQGSDFRRMFENVMSGTIPEGSLIVVENFDRFSRADIDTAIDDVRQILRKGVSILTLGDGELYDKSALTDPVKLIKHIIIAERAHQESLVKQKRIAQVWNHKTQLARELKKPMGKQAPGWLELSDDGSHYIVDEDKAVLVNIIYDKRLSGMSMFAICKWLNEQGYPTINQRKVRISKTKKPDGNWSALSVKHILTSRSVLGYLPAKISTEDRKTVLREEIEGFYPQIVTDSKFYAVQQLLEETGKGKTSGGEHWLYVNILKGIIRCKCGLVMTPTGIRKPVYQGTYRCNGNKESRCNYGTVSRKLLDTQLCSRLFSKLSQLHDEATDTARLDELQRRLTTVDSELEKLTETLIQLPNITQIQEALRVKQEEKDELIAQLSREKARVKSVSSLDLSGLDMESVEGRTEAQIIIKRLVKEIVVSGNEKLVDIYLHNGNMIRGFPLDGKDDHTLTLEEATDEMQPLDDMLIFGEPVTRVYPAGDMEEVDA

SEQ ID NO: 27845 - protein, 507 aa, synthetic construct
MKRVISYIRFSSEKQAKGDSLRRQSKMVTDWLKAHPEYYLDESLTFRDLGVSGFTGKHLKGGLGDFLTAIEKGLVKAGDTLLIESLDRLSRQDVDRASELLRNILRSGVDVVTLSDGEHYTRESLKDPLSLIKSILIMQRAHEESLRKSERIQAAWDAKKEAAKAGIKISRRCPAWLKLNDDRKSFSVIPEKVETVKRCFQLRLEGKSIWEIVRTLNDEGHQSMSQYKPGSFGQTSVQDLLKNRSVIGYFTPKGCEEISGYYPAIIDETTFYKVQQLSHYRYGRKPVSDKPLSVNLFKGVIRCSECGHALIITGFSDTRNGIYRCPLRNENRCSAKGLSRKQTDGTLLALLSRLDRFDSDTTNTIDTLKLHREHISSNIEKLVQLSLEIEDLSAITSKLRQLKGELSQVDADIEKETQRLKSIDVGCLSDCDLTTKAGRIEAQLIIKSAVKEVVLNTAKRRCKVTFHNGKSITLPITENPSEDVTEAIQSLSEVTERGLIDVDEVII

SEQ ID NO: 27846 - protein, 506 aa, synthetic construct
MRSVITYLRFSSAIQGAEGADSTRRQNDLFKQWLKKNSDAQVVASFSDEGLSGYKGKHLTGQFGDMLARIEAGEFLAGTILLVESIDRIGRLEHLETEALMNRILCNGIEIHTLQDGLVYTKDALADDLGISIIQRVKAYIAHQESKQKSFRVSQKWKQRAKLALAGEQRLTKMVPGWIDPDTFKCNEHAETVRLIFKLLLDGESLHNIARHLQSNDIKSFSRRKDANGFSVHSVRTVLRSVSAIGTLPASQRNDRPAIPNYYEAAIDAATFNKAQEILDKNRKGRTPASDNPLTINIFKGLFRCQCGASVHPTGTKNKYAGVYRCNNNPDGRCDVPPLKRKPFDKWMIDNFLGMIDVGNDGEAEGKIASLQHEVEIVTTRIKKATALLLEMDDIDELKIQLKELNQKRTELQTTIDNMRRKASLTDKELPQLKDIDLMTKAGRVECQLILSKHLESLTLGRGQVTVKLSNGTEIIVPTDPLPLTDGAAIFEIAEKNLLNIDTFQL

SEQ ID NO: 27847 - protein, 547 aa, synthetic construct
MKLLVPYIRWSTKEQDSGDSLRRQTNLIDAFYSKHKNDYYLLPAHRYVDKGKSGFHQQHKNQGSDFRRMFENVMSGVIPEGSLIVVENFDRFSRADIDTAIDDVRQILRKGVSILTLGDGELYDKSALTDPVKLIKHIIIAERAHQESLVKQKRIAQVWNHKTQLARELKKPMGKQAPGWLELSEDGSHYIVDEDKASLVNIIYDKRLSGMSMFAICKWLNEQGYPTINQRKVRISKTKKPDGNWSALSVKHILTSRSVLGYLPAKISSEDRKTVLREEIESFYPRIVTDSKFYAVQQLLEETGKGKTSSGDHWLYVNILKGIIRCKCGLVMTPTGIRKPVYQGTYRCNGNKESRCSYGTVSRKLLDTQLCSRLFSKLSQLHDEATDTAKLDELQRRLNTVDGELEKLTETLIQLPNITQIQEALRVKQEEKDELIVQLSREKARVKSVSSLDLSGLDMESVEGRTEAQIIIKRLVKEIVVSGNEKLVDIYLHNGNMIRGFPLDGKDDHTLTLEEATDEMQPLDDMLIFGEPVTRIYPAGDMEEVDA

SEQ ID NO: 27848 - protein, 506 aa, synthetic construct
MRHVITYLRYSSAIQGAEGADSTRRQNELFKQWLRKNSDAQVVASFSDEGLSGYKGKHLTGQFGDMLARIESGEFSEGTVLLVEAIDRIGRLEHLETEALMNRIIAHGIEIHTLQDGLIYTRDALSDDLGISIIQRVKSYVAHQESKQKSFRVSQKWKQRAKLALAGEQRLTKMVPGWIDPDTFKCNEHAETVRLIFKLLLDGESLHNIARHLQANNISSFSRRKDANGFSVHSVRTVLRSESVIGTLPASQRNDRPAIPNYYEAAIDAATFNKAQEILDKNRKGRTPASDNPLTINIFKGLFRCQCGASVHPTGTKNKYQGVYRCNNHLDGRCDVQPLKRKPFDRWMIDNFLGMIDVGNDGESERKIAALQHEVEIVTARIKKATALLLEMDDITELKTQVKGLNQKRTELQTTIDNMRRKASLTDKELPQLKDIDLTTKAGRVECQLILSKHLKGLTLGKDSVTVTLQNDTEITIPTNPLPLNDGTSIFEIAEKELLEIDAYQL

SEQ ID NO: 27849 - protein, 509 aa, synthetic construct
MRRAISYIRFSSERQLKGDSVRRQSKLVTDWLDKNPEFYLDSSLSFKDLGKSAFSGKHLKGGLGDFLTAIEKGLVKAGDTLLIESLDRLSRQDIDIASELLRRILRAGVDVVTLSDGEHYTRESLKDPLSLIKSILIMQRAHEESLRKSERVQAAWNRKKELISEGIKVSRRCPAWLRLNDDRRTFTIIPDKVEVVKRAFDLRLQGLSFWAITRTLNDEGHLSLNQYTPKQKGWSDTAVKKLLRNRAVIGCFTPAGREEVQGYYPAIISESLFYRVQQLNTGQYGRASVSSNPLSVNLFRGIIKCSECGATIVLGGYALKRFGMYRCPNRSANRCSAKAISRKQTDATILYMLALCDRFETENTDTIDSLRLQREDLQRKISKMAELAIELDDMTIITEKLRDMKNALSKLNHDIEEETQRIKAITTGSLKDIDRTTKEGMIETQLLIKGVLKEIVIDTAKRRCKVTFHNGRAITLPITENPSEDVTEAIQSLSEVIERGLIDVDEVII

SEQ ID NO: 27850 - protein, 547 aa, synthetic construct
MKLLVPYIRWSTKEQDSGDSLRRQTNLIDAFYSKHKEEYYLLPAHRYVDKGKSGFHQQHKAQGSDFKRMFENVMSGAIPEGSLIVVENFDRFSRADIDTAIDDVRQILRKGVSILTLGDGELYDKSALTDPVKLIKHIIIAERAHQESLVKQKRIAQVWNHKTQLARELKKPMGKQAPGWLELSEDGSHYIVDEDKASLVNIIYDKRLSGMSMFAICKWLNEQGYPTINQRKVRISKTKKPDGNWSALSVKHILTSRSVLGFLPAKLSSEDRKTVLREEIEGFYPQIVTDSKFYAVQQLLEETGKGKTSSGDHWLYVNILKGIIRCRCGLVMTPTGIRKPVYQGTYRCNGNKESRCSYGTVSRKLLDTQLCSRLFSKLSQLHDEATDTAKLDELQRRLNTVDGELEKLTETLIQLPNITQIQEALRVKQEEKDELIVQLSREKARVKSVSSLDLSGLDMESVEGRTEAQIIIKRLVKEIVVSGNEKLVDIYLHNGNMIRGFPLDGKDDHTLTLEEATDEMQSLDDMLIFGEPVTRIYPAGDMEEVDA

SEQ ID NO: 27851 - protein, 559 aa, synthetic construct
MKTKLYSYIRFSSMRQNDGSSYERQIRMAREVAAKYDLELVNDYQDLGVSAFKGANSKTGALSRFLDAIGRSVPVGSWLFIENLDRLSRADIVSAQELFLSIIRRGITIVTGMDNKIYSLDTVTANPMDLMFSILLFIRGNEESQTKRNRTNSSALIKIKSHQENPQNPAVAIEEVGKNMWWTDTTSGYVLPHPVYFPVVQEIVELRKNGRSTAEILDHLNDTYTPPPAVSNKKHSKWSRAMVERLFHTRALIGIKEVSVDGVNYELKDYYPRVIDDATFYHLKKNIGARAWNFGDKEEVKPIPLLSGIGLLKCDHCGCAMVKVKGTNKRSDQYRYTCDATRSRRLDCEHPNWSFRGDQLEKAVLQLLADKIWIAEDKANPVPALKVQVDEISRKIDNLIALSAMTGATKELADQITTLNSERETLYNQIKMAEEEMYSVDSQGWEKLAEFDLEDVYNEERLKVRFKIKQALKRIGCSRIDRNKNLFVLEYIDGKTQRVVIENSRGTRKGRIFIDLKTINDRQILESNGLVLHPCLDMLTDKNWKPEEEIPGPLQEFGI

SEQ ID NO: 27852 - protein, 506 aa, synthetic construct
MRSVITYLRFSSAIQGAEGADSTRRQNDLFKQWLKKNSDAQVVASFSDEGLSGYKGKHLTGQFGDMLARIESGEFPEGTLLLVEAIDRIGRLEHLETEALMNRIIAHGIEIHTLQDGLIYTRDALSDDLGISIIQRVKSYVAHQESKQKSFRVSQKWKQRAKLALAGEQRLTKMVPGWIDPDTFKCNEHAETVRLIFKLLLDGESLHNIARHLQANNISSFSRRKDANGFSVHSVRTILRSETTIGTLPASQRNDRPAIPNYYEPAIDASTFNKAQEILDKNRKGRTPASDNPLTINIFKGLFRCQCGASVHPTGTKNKYAGVYRCNSHLDGRCGVPPLKRKPFDKWMIDNFLGMIDVGNDGEAEKEIASLQHEVETVTARIKKATALLLEMDDIDELKIQLKELNQKRTELQTTIDSMRRKASLTDKELPQLKDIDLTTKAGRVECQLILSKHLESLTLGRGQVTVKLSNGTEIIVPTDPLPLTDGAAIFEIAEKNLLNIDTFQL

SEQ ID NO: 27853 - protein, 566 aa, synthetic construct
MLILKGDQKLSTDNIMHLIGKINALIYARVSTTDQANKGFSIESQIERCKNRAISKFGYKESEIIALIEPGGMGDDPNRPALNHALYLLEKGLGKKFIVLHPDRLTRDNTLQGVVSRRIWGMGVDIEFIEFEVNPHDPESMLMYNIQGSIAQYNKAKIHANSKRGRFAKAKKGEFPSFKRLYGYKFNTVTDLPEYNEEEKEILIEMKDMLLNKKMSSNEIAKELSRRGVAAPNGKTWYQATVSRMLQNEDYTGDFYYGKSKVVQINGKKKQVPTNQDEWILIKIPPMWDKATREQIIERLKSNFKGRSRATKDYLLKNKAKCGRCGGACGSGITSKTKSGVYKYYSCRAKTAKGYQNGKKVVTCEGKNWRVDIVDDIFWNWFMKVMKNPEDFLESFLEETSDQKKIDELKARVSQLEKQLNELDEEIANYVILFGKGKIKESMFDQLSQPLEQNKDHIENEIKIINSQLAANKQTEDKKQKLLKYISSFSKMIKNEITIEEKRHFLDFFIEKVTLFDDDHMEVVWKSKTLNNENSHVDFLNGEQGGEFSNSHKRLNRIQAYGRQTA

SEQ ID NO: 27854 - protein, 506 aa, synthetic construct
MRHVITYLRYSSAIQGAEGADSTRRQNDLFKQWLKKNSDAQVVASFNDEGLSGYKGKHLSGQFGDMLSRIESGEFSEGTILLVEAIDRIGRLEHLETEALMNRIIAHGIEIHTLQDGLIYTRDALSDDLGISIIQRVKSYIAHQESKQKSFRVSEKWKQRAKLALAGKQRLTKMVPGWIDPDTFKLNEHAETVRLIFKLLLDGESLHNIARHLQSNGIKSFSRRKDANGFSVHSVRTILRSETTIGTLPASQRNDRPAIPNYYEAAIDAATFNKAQEILDKNRKGRTPASDNPLTINIFKGLFRCQCGASVHPTGTKNKYAGVYRCNNHLDGRCDVQPLKRKPFDRWMIDNFLGMIDVGNDGESERKIAALQHEVEIVTSRIKKATALLLEMDDITELKTQVKGLNQKRTELQTTIDNMRRKASLTDKELPQLKDIDLTTKAGRVECQLILSKHLKGLTLGKDSVIVTLQNDTEITIPTNPLPLNDGTSIFEIAEKELLEIDAYQL

SEQ ID NO: 27855 - protein, 506 aa, synthetic construct
MRTVITYLRFSSATQGAEGADSTRRQNELFKQWLRKNSDAQVVASFSDEGLSGYKGKHLTGQFGDMLARIEAGEFPAGAILLVESIDRIGRLEHLETEALMNRIIAHGIEIHTLQDGLIYTRDALSDDLGISIIQRVKSYLAHQESKQKSFRVSEKWKQRAKLALAGEQHLTRNVPGWIDPDTFKCNEHAETVRLIFKLLLDGESLHNIARHLQSNGIKSFSRRKDANGFSVHSVRTVLRSESVIGTLPASQRNDRPAIPNYYEAAIDAATFNKAQEILDKNRKGRTPASDNPLTINIFKGLFRCQCGASVHPTGTKNKYAGVYRCNNHLDGRCDVPPLKRKPFDRWMIDNFLGMIDVGNDGESERKIAALQHEVETVTARIKKATALLLEMDDIDELKIQLKELNQKRTELQTTIDSMRRKASLTDKELPQLKDIDLTTKAGRVECQLILSKHLKGLTLGKDSVTVTLQNDTEITIPTNPLPLNDGSPIFEIADKELLDIDAYQL

SEQ ID NO: 27856 - protein, 547 aa, synthetic construct
MKLLVPYIRWSTKEQDSGDSLRRQTNLIDAFYSKHKEEYYLLPAHRYVDKGKSGFHQQHKAQGSDFRRMFENVMSGAIPEGSLIVVENFDRFSRADIDTAIDDVRQILRKGVSILTLGDGELYDKSALTDPVKLIKHIIIAERAHQESLVKQKRIAQVWNHKTQLARELKKPMGKQAPGWLELSEDGSHYIVDEDKASLVNIIYDKRLSGMSMFAICKWLNEQGYPTINQRKVRISKTKKPDGNWSALSVKHILTSRSVLGYLPAKISTEDRKTVLREEIESFYPQIVTDSKFYAVQQLLEETGKGKTSSGEHWLYVNILKGLIRCKCGLVMTPTGIRKPVYQGTYRCNGNKESRCNYGTVSRKLLDTQLCSRLFSKLSQLHDEATDTAKLDELQRRLNTVDSELEKLTETLIQLPNITQIQEALRVKQEEKDELIVQLSREKARVKSVSSLDLSGLDMESVEGRTEAQIIIKRLVKEIVVSGNEKLVDIYLHNGNMIRGFPLDGKDDHTLTLEEATDEMQPLDDMLIFGEPVTRIYPAGDMEEVDA

SEQ ID NO: 27857 - protein, 507 aa, synthetic construct
MKRVISYIRFSSEKQAKGDSLRRQSKMVNDWLKAHPEYYLDQDLSFRDLGVSGFTGKHLKGGLGDFLTAIEKGLVKAGDTLLIESLDRLSRQDVDQASELLRNILRSGVDVVTLSDGEHYTRESLKDPLALIKSILIMQRAHEESLRKAERIQAAWNRKKELISEGIKVSRRCPAWLRLNDDRKSFSVIPEKVETVKRCFQLRLEGKSIWEIVRTLNAEGHQTLNQYKAGKFGQTSVQDLLKNRSVIGYFTPKGCEEISGYYPAIIDETTFYKVQQLSYARYGRKPASDKPMAVNLFKGVIRCSECGHALIITGFSDTRNGIYRCPLRNENRCSAKGLSRKQTDGTLLALLSRLDRFDSDTTNTIDTLKLHREHISSNIEKLVQLSLEIEDLNAITNKLKQLKNELSQVDADIEKETQRLKSIDVGCLSDCDLTTKAGRIEAQLIIKSAVKEVVLNTAKRRCKVTFHNGKAITLPITENPSDNVTEAIQSLSEVTERGLIDVDEVII

SEQ ID NO: 27858 - protein, 560 aa, synthetic construct
MKTKLYSYIRFSSMKQADGSSFERQKRTAAEIAAKYDLELVTSYQDFGVSAFKGANSKTGALSRFLDEIGRSVPVGSWLVVENLDRISRQSVIEAQELFLSIIRRGITIVTGMDGKVYSKESVNANPIDLLLSVMLFARANEESQTKRNRTNSSALLKVKAHQENPQNPAVAIEEVGRNIWWADTSSGYVLPHPVYFPVIKKIVELKQNGYSNGRILDYLNERIAPPNYTTNKDTPKKWARSMLGRMFTNRALLGIKEITIEGVTYELNNYYPRVMEDAEFYQLKKTIGLRSFSYPTKSSPVITLLSGAGLLRCGHCGASMVKRSGASKERLAQYRYMCDGADSRRTNCDHPNWGFRGDQLDKAVLQLLADKIWIAEDKANPIPGMQAQIEDISRKIDNLISLSAMTGATKELADQITTLNHEREVIYNQIKVIEENMYSVDSQGWEKLAQFDLEDVCSEERLKVRLKIKEAVKSIKCYKIDTNYNHFVMEYIDGKTQRIVIERSRRNRKGQIFVDLKTINDRQILESNGLVLHPCLDMLTDKNWKPEEEQAGPLQEFGI

SEQ ID NO: 27859 - protein, 547 aa, synthetic construct
MKLLVTYIRWSTKEQDSGDSLRRQTNLIDAFYAKHKDDYYLLPAHRYVDKGKSGFHQQHKNQGSDFRRMFENVMSGVIPEGSLIVVENFDRFSRADIDTAIDDVRQILRKGVSILTLGDGELYDKSALTDPVKLIKHIIIAERAHQESLVKQKRIAQVWNHKTQLARELKKPMGKQAPGWLELSEDGSHYIVDEDKASLVNIIYDKRLSGMSMFAICKWLNEQGYPTINQRKVRISKTKKPDGNWSALSVKHILTSRSVLGYLPAKISTEDRKTVLREEIEGFYPQIVTDSKFYAVQQLLEETGKGKTSSGDHWLYVNILKGLIRCKCGLVMTPTGIRKPVYQGTYRCNGNKESRCSYGTVSRKLLDTQLCSRLFSKLSQLHDEATDTARLDELQRRLNTVDSELEKLTETLIQLPNITQIQEALRVKQEEKDELIVQLSREKARVKSVSSLDLSGLDMESVEGRTEAQIIIKRLVKEIVVSGNEKLVDIYLHNGNMIRGFPLDGKDDHTLTLEEATDEMQSLDDMLIFGEPVTRIYPAGDMEEVDA

SEQ ID NO: 27860 - protein, 507 aa, synthetic construct
MKRVISYIRFSSEKQAKGDSLRRQSKMVTDWLKAHPEYYLDQDLSFRDLGVSGFTGKHLKGGLGDFLTAIEKGLVKAGDTLLIESLDRLSRQDIDIASELLRNILRSGVDVVTLSDGEHYTRESLRDPLSLIKSILIMQRSHEESLRKSERIQAAWDAKKEAAKAGIKVSKRCPAWLRLNDDRKSFSVIPEKVETVKRCFQLRLEGKSIWEIVRTLNDEGHQSMSQYKPGSFGQSSVQDLLKNRSVIGYFTPKGREEIAGYFPPIIPETDFYKVQQLSYSRYGRKPASDKPLSVNLFKGVIRCSECGHALIITGFSDTRNGIYRCPLRNENRCNAKGLSRKQTDGTLLALLSRLDRFDSDTTNIIDMLKLHREHISNNIEKLVQLSLEIEDLSAITIKLKQLKGELSQVDADIEKETQRLKSIDVGCLSDCDLSTKAGRIEAQLIIKSAVKEVVLNTAKRRCKVTFHNSKSITLPITENPSEDVTEAIQSLSEVTERGLIDVDVVEI

SEQ ID NO: 27861 - protein, 509 aa, synthetic construct
MRRAISYIRFSSERQLKGDSVRRQSKLVTDWLDKNPEFYLDSSLSFKDLGKSAFSGKHLKGGLGDFLTAIEKGLVKAGDTLLIESLDRLSRQDIDIASELLRRILRAGVDVVTLSDGEHYTRESLKDPLSLIKSILIMQRAHEESLRKSERVQAAWNRKKELISEGIKVSRRCPAWLRLNDDRRTFTIIPDKVEVVKRAFDLRLQGLSFWAITRTLNDEGHLSLNQYTPKQKGWSDTAVKKLLRNRAVIGCFTPAGREEVQGYYPAIISESLFYRVQQLNTGQYGRASVSSNPLSVNLFRGIIKCSECGATIVLGGYALKRFGMYRCPNRSANRCSAKAISRKQTDATILYMLALCDRFETENTDTIDSLRLQREDLQRKISKMAELAIELDDMTIITEKLRDMKNALSKLNHDIEEETQRIKAITTGSLKDIDRTTKEGMIETQLLIKGVLKEIVIDAAKRRCKVTFHNSKSITLPITENPSEDVTEAIQSLSEVTERGLIDVDEVII

SEQ ID NO: 27862 - protein, 559 aa, synthetic construct
MKTKLYSYIRFSSMRQNDGSSYERQIRMAREIAAKYDLELVNDYQDLGVSAFKGANSKTGALSRFLDAIGRSVPVGSWLFIENLDRLSRADIVSAQELFLSIIRRGITIVTGMDNKIYSLDTVTANPMDLMFSILLFIRGNEESQTKRNRTNSSALIKIKAHQENPQNPAVAIEEVGKNMWWTDTTSGYVLPHPTYFPVVQEIVELRKNGRSTAEILDHLNETYAPPPAVSNKKHSKWSRAMVERLFHTRALIGIKEVSVDGVNYELKDYYPRVIDDATFYHLKKNIGARAWNFGDKEEVKPIPLLSGIGLLKCDHCGCAMVKVKGTNKRSDQYRYTCDATRSRRLDCEHPNWSFRGDQLEKAVLQLLADKIWIAEDKANPVPALKVQVDEISRKIDNLITLSAMTGATKELADQITTLNSERETLYNQIKMAEEEMYSVDSQGWEKLAEFDLEDVYNEERLKVRFKIKQALKRIGCSRIDRNKNLFVLEYIDGKTQRVVIENSRGTRKGRIFIDLKTINDRQILESNGLVLHPCLDMLTDKNWKPEEEIPGPLQEFGI

SEQ ID NO: 27863 - protein, 598 aa, synthetic construct
MNKIIPYGYLHVSSLEQVRTGGGLDTQDEEVRRYITQNSEKFDIDRMVVMSDAGMSAYTGSNIKEGELGRFLADVNAGLIPTGSALICYSVDRLSRQNPWVGTHLISTLIGAGIEIHSVAENQILRSDDPVGAIMSTIYLMRANNESVIKSERAKKGYEKRLNESITNKKVLTRQMPRWLFDCDGKYAIDPNMQNVINFTFDSYIAGQSTGFIAKELNNRGLMYGNTSWRGSYVAKLIRDERLIGKHIRYSKQIKGVKRVVIETIPNFYPVVVDVEKFFLANNMLTSVAKNIRGRTRVTYGDDSILRNLFNGVIKCGVCGGDTSVVQNTRKKIVNGEATYIPYKTFLRCRTRYELKNCVQSDIRYEVIERAILNHLMGLDISALLSVPVDNKIESYRTELELCKAEEVELHTLIEQREREGKRVRPRTIKAYEDVSDRIDELNKLIESYVEDTFVPDFNVDLNSIADVSNVSDRSLIKKGIATIADSICYKRISDFILVEIKYRNLSVKHVLVIDNKQSKVVVNFSIEYHENSHDYTCNGFILKYVKSPEEFHLMGVNIEDYAHMMNFVDFISDNEAKKIKEYLVSNLSRVLISNVPE

SEQ ID NO: 27864 - protein, 507 aa, synthetic construct
MKRVISYIRFSSEKQAKGDSLRRQSKMVTDWLKAHPEYYLDQDLSFRDLGVSGFTGKHLKGGLGDFLTAIEKGLVKAGDTLLIESLDRLSRQDIDIASELLRRILRAGVDVVTLSDGEHYTKESLKDPLALIKSILIMQRAHEESLRKAERIQAAWDAKKEAAKAGIKVSKRCPAWLKLNDDRKSFSVIPEKVETVKRCFQLRLEGKSIWEIVRTLNDEGHQSMSQYKPGSFGQSSVQDLLKNRSVIGYFTPKGCEEIAGYYPAIIDETTFYKVQQLSYARHGRKPASAKPLSVNLFKGVIRCSECGHALIITGFSDTRNGIYRCPLRNENRCSAKGLSRKQTDGTLLALLSRLDRFDSDTTNTIDTLKLHREHISSNIEKLVQLSLEIEDLSAITSKLRQLKGELSQVDADIEKETQRLKSIDVGCLSDCDLTTKAGRIEAQLIIKSAVKEVVLNTAKRRCKVTFHNGRAITLPITENPSEDVTEAIQSLSEVTERGLIDVDEVII

SEQ ID NO: 27865 - protein, 506 aa, synthetic construct
MRSVITYLRYSSAIQGAEGADSTRRQNDLFKQWLKKNSDAQVVASFSDEGLSGYKGKHLTGQFGDMLARIEAGEFPEGTILLVESIDRIGRLEHLETEALMNRILGNGIEIHTLQDGLIYTKDALADDLGISIIQRVKAYIAHQESKQKSFRVSQKWGQRAKLALAGKQRLTKMVPGWIDPETFKLNEHAETVRLIFKLLLDGESLHNIARHLQSNGIRSFSRRKDANGFSVHSVRTILRSETTIGTLPASQRNDRPAIPNYYEAAIDASTFNKAQEILDKNRKGRTPASDNPLTINIFKGLFRCQCGASVHPTGTKNKYAGVYRCNNHLDGRCDVPPLKRKPFDKWVLENFLGMIDVGNDGESERKIAALQHEVEIVTARIKKATALLLEMDDIDELKIQLKELNQKRTELQTTIDNMRRKASLSDKGLPQLKDIDLMTKEGRVECQLILSKHLKGLTLGKDSVTVTLQNDTEITIPTNPLPLNDGSPIFEIADKELLDIDAYRL

SEQ ID NO: 27866 - protein, 507 aa, synthetic construct
MKRVISYFRFSSEKQAKGDSLRRQSKMVTDWLKAHPEYYLDQDLSFRDLGVSGFTGKHLKGGLGDFLTAIEKGLVKAGDTLLIESLDRLSRQDIDIASELLRRILRAGVDVVTLSDGEHYTSESLKDPLALIKSILIMQRAHEESLRKAERIQAAWDAKKEAAKAGIKVSKRCPAWLKLNDDRKTFSVIPDKVETVKRCFQLRLEGKSIWEIVRTLNAEGHRSMNQYKPGKFGQTSVQDLLKNRSVIGYFTPKGCEEISGYYPAIIDETTFYKVQQLSYARYGRKPASDKPLSVNLFKGVIRCSECGHALIITGFSDTRNGIYRCPLRNENRCSAKGLSRKQTDGTLLTLLSRLDRFDSDTTNTIDMLRLHREHISSNIEKLVQLSLEIEDLSAITSKLKQLKGELSQVDADIEKETQRLKSIDVGCLSDCDLSTKAGRIEAQLIIRSAVKEVVLNTAKRRCKVTFHNGKVIDLPITENPSEDVTEAIQSLSEVTERGLIDVDVVEI

SEQ ID NO: 27867 - protein, 559 aa, synthetic construct
MKTKLYSYIRFSSMRQSDGSSYERQIRMAREIAAKYDLELVNDYQDLGVSAFKGANSKTGALSRFLDAIGRSVPVGSWLFIENLDRLSRADIVSAQELFLSIIRRGITIVTGMDNKIYSLDTVTANPMDLMFSILLFIRGNEESQTKRNRTNSSALIKIKSHQENPQNPAVAIEEVGKNMWWTDTTSGYVLPHPVYFPVVQEIVELRKNGRSTAEILDHLNETYTPPPAVSNKKHSKWSRAMVERLFHTRALIGIKEVSVDGVNYELKDYYPRVIDDATFYHLKKNIGARAWNFGDKEEVKPIPLLSGIGLLKCDHCGCAMVKVKGTNKRSDQYRYTCDATRSRRLDCEHPNWSFRGDQLEKAVLQLLADKIWIAEDKANPVPALKVQVDEISRKIDNLIALSAMTGATKELADQITTLNSERETLYNQIKMAEEEMYSVDSQGWEKLAEFDLEDVYNEERLKVRFKIKQALKRIGCSRIDRNKNLFVLEYIDGKTQRVVIENSRGTRKGRIFIDLKTINDRQILESNGLVLHPCLDMLTDKDWKPEEEIPGPLQEFGI

SEQ ID NO: 27868 - protein, 507 aa, synthetic construct
MKRVISYIRFSSERQAKGDSLRRQSKMVTDWLKAHPEYYLDESLTFRDLGVSGFTGKHLKGGLGDFLTAIEKGLVKAGDTLLIESLDRLSRQAVDRASELLRNILRSGVDVVTLSDGEHYTSESLKDPLALIKSILIMQRAHEESLRKSERIQAAWNRKKELISEGIKISKRCPAWLRLNDDRKSFSVIPEKVETVKRCFQLRLEGKSIWEIVRTLNDEGHQSMSQYKPGKFGQTSVQDLLKNRSVIGYFTPKGCEEISGYFPSIIPETDFYKVQQLSYSRYGRKPASDKPLSVNLFKGVIRCSECGHALIITGFSDTRNGIYRCPLRNENRCSAKGLSRKQTDGTLLALLSRLDRFDSDTTNIIDTLKLHREHISSNIEKLVQLSLEIEDLSAITSKLKQLKGELSQVDADIEKETQRLKSIDVGCLSDCDLTTKAGRIEAQLIIKSAVKEVVLNTAKRRCKVTFHNGKIIDLPITENPSEDVTEAIQSLSEVTERGLIDVDEVII

SEQ ID NO: 27869 - protein, 507 aa, synthetic construct
MKRVISYIRFSSEKQAKGDSLRRQSKMVTDWLKAHPEYYLDQDLSFRDLGVSGFTGKHLKGGLGDFLTAIEKGLVKAGDTLLIESLDRLSRQAVDRASELLRNILRSGVDVVTLSDGEHYTRESLKDPLSLIKSILIMQRAHEESLRKSERIQAAWNRKKELISEGIKVSRRCPAWLRLNDDRKSFSVIPDKVETVKRCFQLRLEGKSIWEIVRTLNAEGHQTLNQYKAGKFGQTSVQDLLKNRSVIGYFTPKGREEISGYYPAIIDETTFYKVQQLSYARYGRKPASDKPLSVNLFKGVIRCSECGHALIITGFSDTRSGIYRCPLRNENRCSAKGLSRKQTDGTLLALLSRLDRFDSDTTNTIDTLKLHREHISSNIEKLVQLSLEIEDLSAITIKLRQLKGELSQVDADIEKETQRLKSIDVGCLSDCDLTTKAGRIEAQLIIKSAVKEVVLNTAKRRCKVTFHNGKVIDLPITENPSEDVTEAIQSLSEVTERGLLDVDEVII

SEQ ID NO: 27870 - protein, 507 aa, synthetic construct
MKRVISYIRFSSEKQAKGDSLRRQSKMVTDWLKAHPEYYLDQDLSFRDLGVSGFTGKHLKGGLGDFLTAIEKGLVKAGDTLLIESLDRLSRQDIDIASELLRNILRSGVDVVTLSDGEHYTKESLRDPLSLIKSILIMQRAHEESLRKAERIQAAWDAKKEAAKAGIKVSKRCPAWLKLNDDRKSFSVIPEKVETVKRCFQLRLEGKSIWEIVRTLNDEGHQSMSQYKPGKFGQTSVQDLLKNRSVIGYFTPKGCEEISGYYPAIIDETTFYKVQQLSHYRYGRKPASDKPLSVNLFKGVIRCSECGHALIITGFSDTRSGIYRCPLRNENRCSAKGLSRKQTDGTLLTLLSRLDRFDSDTTNTIDTLKLHREHISSNIEKLVQLSLEIEDLSAITSKLKQLKNELSQVDADIEKETQRLKSIDVGCLSDCDLTTKAGRIEAQLIIKSAVKEVVLNTAKRRCKVTFHNGRAITLPITENPSEDVTEAIQSLSEVTERGLIDVDEVII

SEQ ID NO: 27871 - protein, 506 aa, synthetic construct
MRSVITYLRYSSAIQGAEGADSTRRQNDLFKQWLKKNSDAQVVASFSDEGLSGYKGKHLTGQFGDMLARIESGEFPEGTILLVESIDRIGRLEHLETEALMNRILGNGLEIHTLQDGLIYTKDALADDLGISIIQRVKAYIAHQESKQKSFRVSQKWEQRAKLALAGEQRLTKMVPGWIDPDTFKCNEHAETVRLIFKLLLDGESLHNIARHLQANNISSFSRRKDANGFSVHSVRTILRSETTRGTLPASQRNDRPAIPNYYEAAIDAATFNKAQEILDKNRKGRTPASDNPLTINIFKGLFRCQCGASVHPTGTKNKYAGVYRCNNHLDGRCDVPPLKRKPFDRWMIDNFLGMIDVGNDGEAEKEIASLQHEVEIVTTRIKKATALLLEMDDIDELKIQLKELNQKRTELQTTIDNMRRKASLTDKELPQLKDIDLMTKAGRVECQLILSKHLKGLTLGKDSVTVTLQNDTEITIPTDPLPLNDGTSIFEIAEKNLLNIDTFQL

SEQ ID NO: 27872 - protein, 547 aa, synthetic construct
MKLLVTYIRWSTKEQDSGDSLRRQTNLIDAFYSKHKEEYYLLPAHRYVDKGKSGFHQQHKAQGSDFRRMFENVMSGAIPEGSLIVVENFDRFSRADIDTAIDDVRQILRKGVSILTLGDGELYDKSALTDPVKLIKHIIIAERAHQESLVKQKRIAQVWNHKTQLARELKKPMGKQAPGWLELSEDGSHYIVDEDKASLVNIIYDKRLSGMSMFAICKWLNEQGYPTINQRKVRISKTKKPDGNWSALSVKHILTSRSVLGYLPAKISSEDRKTVLREEIEGFYPQIVTDSKFYAVQQLLEETGKGKTSSGDHWLYVNILKGLIRCKCGLVMTPTGIRKPVYQGTYRCNGNKESRCSYGTVSRKLLDTQLCSRLFSKLSQLHDEATDTAKLDELQRRLNTVDSELEKLTETLIQLPNITQIQEALRIKQEEKDELIVQLSREKARVKSVSSLDLSGLDMESVEGRTEAQIIIKRLVKEIVVSGNEKLVDIYLHNGNMIRGFPLDGKDDHTLTLEEATDEMQSLDDMLIFGEPVTRIYPAGDMEEVDA

SEQ ID NO: 27873 - protein, 507 aa, synthetic construct
MKRVISYIRFSSEKQSRGDSLRRQSKMVTDWLKAHPEYHLDQDLSFRDLGVSGFTGKHLKGGLGDFLTAIEKGLVKAGDTLLIESLDRLSRQDVDQASELLRNILRSGVDVVTLSDGEHYTSESLKDPLALIKSILIMQRAHEESLRKSERIQAAWNRKKELISEGIKVSKRCPAWLRLNDDRKSFSVIPEKVETVKRCFQLRLEGKSIWEIVRTLNDEGHQSMSQYKPGKFGQTSVQDLLKNRSVIGYFTPKGCEEISGYYPAIIDETTFYKVQQLSHYRYGRKPVSDKPLSVNLFKGVIRCSECGHALIITGFSDTRSGIYRCPLRNENRCSAKGLSRKQTDGTLLTLLSRLDRFDSDTTNIIDMLRLHREHISSNIEKLVQLSLEIEDLNAITSKLKQLKGELSQVDADIEKETQRLKSIDVGCLSDCDLTTKAGRIEAQLIIKSAVKEVVLNTAKRRCKVTFHNGRAITLPITENPSEDVTEAIQSLSEVTERGLIDVDEVII

SEQ ID NO: 27874 - protein, 514 aa, synthetic construct
MRKVYSYIRFSSTKQAFGDSHRRQSKAIQDWLASHPDHILDESLSFEDLGRSAFHGDHLKEGGALRAFLEAVKQGLIPPDSVLLVESLDRVSRQSISHAQETIRAILEQGITVVTLSDGETYNRQSLDDSLALIRMIILQERSHNESVIKSDRIKKVWSHKRQQFEQDGTKITGNCPGWLKLNSDGKSFSLIPHHVETIHRIFDEKLSGKSLHAIARDLNLENIPTITNKKVDTGWTPTRVRDLLLKESLIGVAYGVSDYFPPAISKEKFHAVQMIRGQGKGKKPTSRQPSSIDILKGICKCAECGSTLRQRNTKKTPEGRYPRGYLECRNRQLGRCNSKAFNRSLIEDILIQKVFPTLQYLSLKSNGDNISVTTLKADITSLEKGINNLISLAERGLGDLDTLAQRITNNRVELESKKKDLRQAEAIQSLRSDNDIQDSDRKTVEGRIKLQLAIKSFIKEMIFDYYKQEITIRLLNGKSFSGISVARENKDFDHSSVFEVLQKSLLDIDEVHL

SEQ ID NO: 27875 - protein, 532 aa, synthetic construct
MKRAAIYARYSTDLQNDKSVEDQIRLCEAHAQRIGARIVKNFHDRAKSGASMFGRAGLSQLMQEAEKGTFEILISESPDRVSRDIADLAHIHKTLKFRGIEMNCVNGGVMDTMQIGMYGVVGQMQREEGAKKVKRGMMGVVRSGRNAGGKAYGYEPVPGKPGELAIIEEQAAIIRRIFKQFAAGVSARSIAGALNDENVPPPRGSKWNASTINGNGARGYGILRNPIYDGRIIWNRVRMVKDPSTGRRVSRVNDASEHETIEAPHLRIVEEKLFAAVQKRKEDATEFAMPLVRSRRILSGLLRCRSCGGGMSIVGSDRSGPRVMCSTHRESRTCDNDARYYIEKIEQKVLNTLRQQFADSDMIKAYVNTYEEERRRTSADLKRNRASIERQLDEAKRAIARVVEKVAKGIIEDDDAAAILPGLREERDRHSADLSKMEKPNNVIELFPLAVRRFKENLEKLTEILSAAGEIPDADAVLTFRELVASVIVDPRKAGEDYVVEIKGYLSSLIQPEMSAVVVVAGEGLEPPTRGL

SEQ ID NO: 27876 - protein, 539 aa, synthetic construct
MTAGGAKVYSYLRFSDPRQATGSSADRQLAYAMAWAMKNSMVLDETLTLKDEGLSAYHERHVKQGALGAFLRAIDEGRIPRGSVLIVEGLDRLSRAEPLLAQAQLAQIINGGVTVVTASDNREYNRVSLKAQPMDLVYSLLVMIRAHEESDTKSKRVKAAIRRQCEGWLAGTYRGLIRNGKDPQWLRLSTEGWELIPERVAAVKRALELYSQGLGAGRAANVMHDEGFKLTDWGISGLQIYRMIKQPALRGVKRLTLDGEDYELEEYYPRILSDTEWAELRHLASQRFRRRGAGEIPGIITGVGLAYCGYCGTAVVAQNIMSRRRADGTIADGHRRLHCTSYSKNGGCTYGGSCSVVPVERAVLSFCSDQINLTRLMQAGDAGQTLQKQLVVARAAVTKITTQLSKVTDALLADESGAAPLAFVRKARELEAQQTAAEQKVAQLEHEAIATSGAVRPAQAERWVELAAEVEAGNYSAREKVRQLVMDTFNRIVIYMRGMQTDGRNGPFIDVQLFSRSGQHRLLRINRKNGAWVASEDWE

SEQ ID NO: 27877 - protein, 578 aa, synthetic construct
MPSAIPYIRFSSARQTTGSSAERQQQMVTQWLTEHPEYTLSDLTYKDFGKSGYHGEHVKDGGGFAKLLAAVEAGNIKAGDVVLVEAIDRTGRLHPLEMLNKVITPILAAGVSIITLDDKVTYTHESAASGHLFLLVAKIQAAYGYSKQLSERTKASYSIRLEQAKEGMKVKRNTPIWLHSDGRLNDDVAPFIKQAFELYVSGVGKTAIANRLRASGVPELATCSGPTVEAWLRNQAAIGNWEYGKDDPENPSQIIHGVYPPVISHELFLQAQQRKSAVATKPRERTSKNVLVGIVKCGVCGANLIVHNKEGKPNNMRCLTHHRLKDAGCTNKETIPYQVVHFIYLQTAPSWVDRAMKVVQLSVNDKRKLYLAGEREEVTKTIERLVRLSAMGDSVELESQYKLATDRRAVIDNELEVLNRREDDGFASKSTSILENYESTLDHDRLAFHDPIQLSALLKQAGYSITVKPGRKLYLPDNNDPWIYTGVARRGNATLGYRIQDGEMEYTISPVIPKAVDASAYNNNSDGELQHIFDRSYKHIKSAISLDQTRVRNTKAMTVEKFESADAAMQHLMSGVEK

SEQ ID NO: 27878 - protein, 532 aa, synthetic construct
MKAGAKIYLYFRYSDMKQENGDSIRRQRECAQRVADKYKLEIDEESVITDRGVSAFYGNNAKKGNLAGFLKSVEQGEIEKDSILIVESFDRLSRDAPRDAHKLFDKLIDNDITIITENDGLEYNKETLAREPSRLFMMIGTMLRAHEESLTKQKRAIESIKGKVKEFRESGNVKSIGTVPHWLDYIDGSYVLNSRAENVKLIIDMYLNNEGLKSISRKLAEKGIKSPTGKDRWGITTIRTILDNKALYGFKEFEISYLVNGRKVKENFELESFYPPLISKVDYLVIQEKKNARSNSRESYGEVTYLLSSYGKGKSVCAKCGYATGTQTQKQINRKGKYMQSVMRLHCKKHSESGDCCKSFKCAELEKHFIYSIYHELDPDFLMNYKSKKINKEGLKAEISEIDRQIKLLVNSMIELNNADLTSVFQEKLHDLNKKKIELSNELNKTNDIKNDSDFKELKTLALKCLDVKNSVERKKFKNLIIQVLDKIVIDFETKSLSIKFINGNVMNVYFDEKSKSYCTSLFRSKIIRRKS

SEQ ID NO: 27879 - protein, 500 aa, synthetic construct
MSGKIHPIIRVSTEKQLQGHGLESQHRAISDWISRHPEYEFGTSLELDGYSAYKGQHVEKLKAFVAMLPAGDTILMTEISRLSRLPIRQSYELLYWILDRGVNIGFVTLDQVLTNSELDDSLYLRLSILFQNAKSESEIKSFRIRNVFADRIKRIEKGTHIKTTGLPAWVEVQNNAYHVHEYHAQTLRLMFERKLETGTYEVCKWLQENRKVFPRLSGWSASRVQAILKNRAVLGDYTPFTTYHEEGRAKRKALTPIPSVYPQVIDESLFARVQQSFNQQPAGRKPRAPNPLAGIFVCPECGGSTSINRVADRVYYRCERVRDRRGCTAKSIRQKRVLDAVDALIAQVDLSRVLQPQTSPEAIHEHIADLTKKIENLVNLVAQGVELPEVGAQLQQLEQQRSALRQQLIAHKQVITPDFKKDKNKALRLLFNYITLIPDHIYEYPNPDTGEPTSRAVDTLRFQLVDVNNWGMHEVKVPVDRLQESKNLVNDLLDTLQKAL

SEQ ID NO: 27880 - protein, 421 aa, synthetic construct
MQQLIKDADTGLYDAVLVYKLDRLSRSQKDTLYLIEDVFQKNNIHFISLSENFDTSTAFGKAMIGILSVFAQLEREQIKERMSMGRVGRAKSGKIMEFKNPAFGYEVDGDNYKVDPLRAKIVKQIYKMYLSGTSINKIKETLNNEGHIGNKKNWSDTRIRYILSNPTYLGKIRYDGKTYDGKFIPIIDEETFNKTQNELKERQTATYKRFNMKLRPFQSKYMLSGLLRCGYCGATLFVNSYVYNGKRKLRYNCPSTYKSKQKTRTYKIMDPNCPFKLVYAKDLEPAVINEIKNLALNPQSIQKPVKKKPDIDVEAIQKELAKIRKQQQRLIDLYVISDDVNIDNISKKSADLKLQEETLKKQLAPLEDPDNDDKIVAFNEILAQIKDIDSLDYDKQKFIVKKLIKKIDVWNNNKIKIHWNI

SEQ ID NO: 27881 - protein, 703 aa, synthetic construct
MNVHLKVQSHHLERGAYLYIRQSSMRQVVENVESARRQYALRGRAVALGWRDEQIIVIDNDQGESGASAVWREGFQRLVSDVGMGHAGIVMGLEVSRLARNNADWQRLLEICALADTLILDEDGVYDPASFNDRLLLGLKGTMSEAELHVIKARLRGGILNKVRRGEFRCLLPTGLVYDHSGNVALDPDMQVRETIVHFFETFSRVGSASQTVKVFRNEGLLFPSRLHNSETVFRPLTASTAVRALSNPRYAGAYTYGRRQFRRTIDGKKTLRARDIDDWPACMPDAHPGYISWERHQENLKILKANGRGFEAARASIPREGPALLQGRAVCGQCGNHLRVRYAARRGRQEAWYICNRDHIYRGEPMCQSIAGPPVDEAIGMLIAEQMTPAAVELALDVRKEIQARHEEADRLRCRAIERAQTEADLAQRRFMLVDPNNRLVADTLEGEWNEMLRILANAREERERGREHDQFILDKAVHERLVAMTADFNELWKDPDTPSRERKRLLAHIIEDVTLLKLPAEGTTKLHVRFKGGKIQTLTTMNPKSSAQQIKTKPNIVELIDKLLDDYIYPEIAEILNEQGHRPGGTARRGCHNARFTPLKVAYLIHEYKLRSRYDRLRQRGMLTRQEAAVHLNISEQTVARWAKYGLIARHAYNGHYSLYEIPDGDLPQKQCSRWNPLEDRAAAHRQMQTGQEHQLARKEV

SEQ ID NO: 27882 - protein, 506 aa, synthetic construct
MRTVITYLRFSSATQGAEGADSTRRQNELFKQWLRKNSDAQVVASFSDEGLSGYKGKHLTGQFGDMLARIEAGEFPAGAILLVESIDRIGRLEHLETEALMNRIIAHGIEIHTLQDGLIYTRDALSDDLGISIIQRVKSYLAHQESKQKSFRVSEKWKQRAKLALAGEQHLTRNVPGWIDPDTFKCNEHAETVRLIFKLLLDGESLHNIARHLQSNDIKSFSRRKDANGFSVHSVRTVLRSESVIGTLPASQRNDRPAIPNYYEAAIDAATFNKAQEILDKNRKGRTPASDNPLTINIFKGLFRCQCGASVHPTGTKNKYQGVYRCNNHLDGRCDVPPLKRKPFDRWMIDNFLGMIDVGNDGEAEKEIASLQHEVETVTARIKKATALLLEMDDITELKTQVKELNQKRTELQTTINTMKRKTSLSDKGLPQLKDIDLMTKAGRVECQLILSKHLKGLTLGKDSVTVTLQNDTEITIPTDPLPLNDGTSIFEIAEKNLLNIDTFQL

SEQ ID NO: 27883 - protein, 506 aa, synthetic construct
MRTVITYLRFSSATQGAEGADSTRRQNELFKQWLRKNSDAQVVASFSDEGLSGYKGKHLTGQFGDMLARIEAGEFPAGAILLVESIDRIGRLEHLETEALMNRIIAHGIEIHTLQDGLIYTRDALSDDLGISIIQRVKSYLAHQESKQKSFRVSEKWKQRAKLALAGEQHLTRNVPGWIDPDTFKCNEHAETVRLIFKLLLDGESLHNIARHLQSNDIKSFSRRKDANGFSVHSVRTVLRSESVIGTLPASQRNDRPAIPNYYEAAIDASTFNKTQEILDKNRKGRTPASDNPLTINIFKGLFRCQCGASVHPTGTKNKYQGVYRCNSHLDGRCDVPPLKRKPFDRWMIDNFLGMIDVGNDGEAEKEIASLQHEVETVTARIKKATALLLEMDDITELKTQVKELNQKRTELQTTINTMKRKTSLSDKGLPQLKDIDLMTKAGRVECQLILSKHLKGLTLGKDSVTVTLQNDTEITIPTNPLPLNDGTSIFEIAEKNLLNIDTFQL

SEQ ID NO: 27884 - protein, 475 aa, synthetic construct
MKCVIYVRVSTDEQAKHGFSIAAQIEKLEAYCVSQGWDIVEAPYVDDGYSAKDLNRPHFQAMLQRIQQGGIDVLLVYKLDRLTRSVPDLHTILAELDQYECKFKSATEVYDTTNAMGRLFITLVAAIAQWERENTAERVRLGMEKKVKLGYWKGGTPPYGYQVVNGALMMDEEEAQIIRDIFTLAKTLGFYTIAKQLTSKGVPTRKGGQWHVDSVRDIANNPTYAGYLMFSLNPKDIKKPPRERVLFEGNHERIINRDEFWALQDLLDKRRTLGGKRETSNYYFSSLLKCARCGHSMAGHKAGKKKTYRCSGKKAGKACTSHMILESNLVQAIFAQWDDLVGGHFTSNEGDATFPAAQLTALQQELAVVQKLLHKKKTMFEHDIIGIDELIRDSEKLRNKEKEIQASLKKIQLLDDRHHDEIRAIVRNIDTLWINADDTERKQLMTTIFEQIVVDTKDDYRSSKQAREITIVIAK

SEQ ID NO: 27885 - protein, 506 aa, synthetic construct
MRHVITYLRYSSAIQGAEGADSTRRQNELFKQWLRKNSDAQVVASFSDEGLSGYKGKHLTGQFGDMLARIEAGEFPAGTILLVESIDRIGRLEHLETEALMNRILGNGIEIHTLQDGLIYTKDALADDLGISIIQRVKAYIAHQESKQKSFRVSQKWEQRAKLALAGEQRLTKMVPGWIDPDTFKLNEHAETVRLIFKLLLDGESLHNIARHLQANNISSFSRRKDANGFSVHSVRTILRSETTRGTLPASQRNDRPAIPNYYEAAIDAATFNKAQEILDKNRKGRTPASDNPLTINIFKGLFRCQCGASVHPTGTKNKYAGVYRCNNHLDGRCDVPPLKRKPFDKWMLENFLGMIDVGNDGEAEGKIASLQHEVEIVTTRIKKATALLLEMDDIDELKIQLKELNQKRTELQTTIDSMRRKASLTDKELPQLKDIDLTTKAGRVECQLILSKHLKGLTLGKDSVTVTLQNDTEITIPTNPLPLNDGTSIFEIADKELLDIDAYQL

SEQ ID NO: 27886 - protein, 507 aa, synthetic construct
MKRVISYIRFSSEKQAKGDSLRRQSKMVNDWLKAHPEYYLDQDLSFRDLGVSGFTGKHLKGGLGDFLTAIEKGLVKAGDTLLIESLDRLSRQDIDIASELLRNILRSGVDVVTLSDGEHYTRESLRDPLALIKSILIMQRAHEESLRKAERIQAAWDAKKEAAKAGIKVSKRCPAWLKLNDDRKSFSVIPEKVETVKRCFQLRLEGKSIWEIVRTLNDEGHQSMSQYKPGKFGQTSVQDLLKNRSVIGYFTPKGCEEIAGYYPAIIDETTFYKVQQLSHSRYGRKPASDKPLSVNLFKGVIRCSECGHALIITGFSDTRSGIYRCPLRNENRCSAKGLSRKQTDGTLLALLSRLDRFDSDTTNTVDMLRLHREHISSNIEKLVQLSLEIEDLSAITSKLKQLKGELSQVDADIEKETQRLKSIDVGCLSDCDLTTKAGRIEAQLIIKSAVKEVVLNTAKRRCKVTFHNSKSIALPITENPSEDVTEAIQSLSEVTERGLIDVDEVII

SEQ ID NO: 27887 - protein, 507 aa, synthetic construct
MKRVISYIRFSSEKQAKGDSLRRQSKMVTDWLKAHPEYYLDQDLSFRDLGVSGFTGKHLKGGLGDFLTAIEKGLVKAGDTLLIESLDRLSRQAVDQASELLRNILRSGVDVVTLSDGEHYTRESLKDPLALIKSILIMQRAHEESLRKSERIQAAWDAKKEAAKAGIKVSKRCPAWLRLNDDRKSFSVIPEKVETVKRCFQLRLEGKSIWEIVRTLNAEGHRSMNQYKPGKFGQTSVQDLLKNRSVIGYFTPKGCEEISGYYPAIIDETTFYKVQQLSHSRYGKRSVSDKPLSVNLFKGVIRCSECGHALIITGFSDTRNGIYRCPLRNENRCNAKGLSRKQTDGTLLALLSRLDRFDSDMTNVIDALKLHREHISNNIEKLVQLSLEIEDLSAITIKLKQLKGELSQVDADIEKETQRLKSIDVGCLSDCDLTTKAGRIEAQLIIKSAVKEVVLNTAKRRCKVTFHNGRAITLPITENPSEDVTEAIQSLSEVTERGLIDVDVVEI

SEQ ID NO: 27888 - protein, 507 aa, synthetic construct
MKRAISYIRFSSEKQSRGDSLRRQSKMVTDWLKAHPEYYLDQDLSFRDLGVSGFTGKHLKGGLGDFLTAIEKGLVKAGDTLLIESLDRLSRQNVDRASELLRNILRSGVDVVTLSDGEHYTRESLKDPLALIKSILIMQRSHEESLRKSERIQAAWNRKKELISEGIKISKRCPAWLKLNDDRKSFSVIPEKVETVKRCFQLRLEGKSIWEIVRTLNDEGHQTLNQYKAGKFGQTSVQDLLKNRSVIGYFTPKGCEEISGYYPAIIDETTFYKVQQLSYARYGRKPASDKPLSVNLFKGVIRCSECGHALIITGFSDTRNGIYRCPLRNENRCSAKGLSRKQTDGTLLTLLSRLDRFDSDMTNVIDTLKLHREHISNNIEKLVQLSLEIEDLSAITSKLKQLKNELSQVDADIEKETQRLKSIDVGCLSDCDLTTKAGRIEAQLIIKSAVKEVVLNTAKRRCKVTFHNGKVIDLPITENPSEDVTEAIQSLSEVTERGLIDVDEVII

SEQ ID NO: 27889 - protein, 506 aa, synthetic construct
MRSVITYLRYSSAIQGVEGADSTRRQNDLFKQWLKKNGDAQIVASFSDEGLSGYKGKHLTGQFGDMLARIEAGEFPEGTILLVESIDRIGRLEHLETEALMNRILGNGLEIHTLQDGLIYTKDALADDLGISIIQRVKAYIAHQESKQKSFRVSQKWEQRAKLALAGEQRLTRNVPGWIDPDTFKLNEHAETVRLIFKLLLDGESLHNIARHLQSNGIKSFSRRKDANGFSVHSVRTILRSETTIGTLPASQRNDRPAIPNYYEAAIDASTFNKAQEILGKNRTGRTPASDNPLTINIFKGLFRCQCGASVHPTGTKNKYAGVYRCNNHLDGRCDVPPLKRKPFDKWMLENFLGMIDVGNDGESERKIAALQHEVEIVTSRIKKATALLLEMDDITELKAQVKELNQKRTELQTTINTMKRKTSLSDKGLPQLKDIDLMTKAGRVECQLILSKHLKGLTLGKDSVTVTLQNDTEIIVPTDPLPLNDGTSIFEIAEKELLEIDAYQL

SEQ ID NO: 27890 - protein, 507 aa, synthetic construct
MKRVISYIRFSSERQAKGDSLRRQSKMVTDWLKAHPEYYLDQDLSFRDLGVSGFTGKHLKGGLGDFLTAIEKGLVKAGDTLLIESLDRLSRQDIDIASELLRNILRSGVDVVTLSDGEHYTRESLKDPLSLIKSILIMQRAHEESLRKSERIQAAWNRKKELISEGIKVSRRCPAWLKLNDDRKSFSVIPEKVETVKRCFQLRLEGKSIWEIVRTLNDEGRQTLNQHKAGSFGQSSVQDLLKNRSVIGYFTPKGCEEIAGYYPAIIDETTFYKVQQLSYARYGRKPASDKPLSVNLFKGVIRCSECGHALIITGFSDTRSGIYRCPLRNENRCSAKGLSRKQTDGTLLALLSRLDRFDSDTTNTIDTLKLHREHISSNIEKLVQLSLEIEDLNAITNKLKQLKNELSQVDADIEKETQRLKSIDVGCLSDCDLSTKAGRIEAQLIIRSAVKEVVLNTAKRRCKVTFHNGKAITLPITETPSEDVTEAIQSLSEVTERGLIDVDEVII

SEQ ID NO: 27891 - protein, 547 aa, synthetic construct
MKLLVTYIRWSTKEQDSGDSLRRQTNLIDAFYSKHKNDYYLLPAHRYVDKGKSGFHQQHKAQGSDFRRMFENVMSGAIPEGSLIVVENFDRFSRADIDTAIDDVRQILRKGVSILTLGDGELYDKSALTDPVKLIKHIIIAERAHQESLVKQKRIAQVWNHKTQLARELKKPMGKQAPGWLELSEDGSHYIVDEDKASLVNIIYDKRLSGMSMFAICKWLNEQGYPTINQRKVRISKTKKPDGNWSALSVKHILTSRSVLGYLPAKISTEDRKTVLREEIEGFYPQIVTDSKFYAVQQLLEETGKGKTSSGDHWLYVNILKGLIRCKCGLVMTPTGIRKPVYQGTYRCNGNKESRCSYGTVSRKLLDTQLCSRLFSKLSQLHDEATDTAKLDELQRRLNTVDSELEKLTETLIQLPNITQIQEALRIKQEEKDELIVQLSREKARVKSVSSLDLSGLDMESVEGRTEAQIIIKRLVKEIVVSGNEKLVDIYLHNGNMIRGFPLDGKDDHTLTLEEATDEMQSLDDMLIFGEPVTRIYPAGDMEEVDA

SEQ ID NO: 27892 - protein, 506 aa, synthetic construct
MRSVITYLRFSSATQGAEGADSTRRQNDLFKQWLKKNSDAQVVASFSDEGLSGYKGKHLTGQFGDMLARIESGEFPEGTLLLVEAIDRIGRLEHLETEALMNRIIAHGIEIHTLQDGLIYTRDALSDDLGISIIQRVKSYVAHQESKQKSFRVSQKWKQRAKLALAGEQRLTKMVPGWIDPDTFKCNEHAETVRLIFKLLLDGESLHNIARHLQANNISSFSRRKDANGFSVHSVRTILRSETTRGTLPASQRNDRPAIPNYYEAAIDAATFNKAQEILDKNRKGRTPASDNPLTINIFKGLFRCQCGASVHPTGAKNKYAGVYRCNNHLDGRCDVPPLKRKPFDRWMIDNFLGMIDVGNDGEAEGKIAALQHEVEIVTARIKKATALLLEMDDITELKTQVKGLNQKRTELQTTIDNMRRKASLTDKELPQLKDIDLTTKAGRVECQLILSKHLKGLTLGKDSVIVTLQNDTEITIPTNPLPLNDGSPIFEIADKELLDIDAYQL

SEQ ID NO: 27893 - protein, 507 aa, synthetic construct
MKRVISYIRFSSEKQAKGDSLRRQSKMVTDWLKAHPEYYLDQDLSFRDLGVSGFTGKHLKGGLGDFLTAIEKGLVKAGDTLLIESLDRLSRQAVDRASELLRNILRSGVDVVTLSDGEHYTSESLKDPLALIKSILIMQRSHEESLRKSERIQAAWDAKKEAAKAGIKVSKRCPAWLRLNDDRKSFSVIPDKVETVKRCFQLRLEGKSIWEIVRTLNAEGHRSMNQYKPGKFGQTSVQDLLKNRSVIGYFTPKGCEEIAGYYPSVIDETTFYKVQQLSHSRYGRKPASAKPLSVNLFKGVIRCSECGHALIITGFSDTRNGIYRCPLRNENRCNAKGLSRKQTDGTLLALLSRLDRFDSDMTNVIDALKLHREHISNNIEKLVQLSLEIEDLSAITIKLKQLKGELSQVDADIEKETQRLKSIDVGCLSDCDLTTKAGRIEAQLIIKSAVKEVVLNAAKRRCKVTFHNSKSITLPITENPSEDVTEAIQSLSEVTEKGLIDVDVVEI

SEQ ID NO: 27894 - protein, 507 aa, synthetic construct
MKRVISYIRFSSEKQAKGDSLRRQSKMVTDWLKAHPDYYLDQDLSFRDLGVSGFTGKHLKGGLGDFLTAIEKGLVKAGDTLLIESLDRLSRQDVDQASELLRNILRSGVDVVTLSDGEHYTSESLKDPLALIKSILIMQRAHEESLRKSERIQAAWNRKKELISEGIKISKRCPAWLRLNDDRKSFSVIPDKVETVKRCFQLRLEGKSIWEIVRTLNDEGHQTLNQYKAGSFGQTSVQDLLKNRSVIGYFTPKGCEEIAGYYPAIIDETTFYKVQQLAYARYGRKPASDKPLSVNLFKGVIRCSECGHALIITGFSDTRSGIYRCPLRNENRCSAKGLSRKQTDGTLLTLLSRLDRFDSDMTNTIDMLRLHREHISSNIEKLVQLSLEIEDLSAITSKLKQLKGELSQVDADIEKETQRLKSIDVGCLSDCDLTTKAGRIEAQLIIKSAVKEVVLNTAKRRCKVTFHNGKVIDLPITENPSDNVTEAIQSLSEVTERGLIDVDEVII

SEQ ID NO: 27895 - protein, 506 aa, synthetic construct
MRTVITYLRFSSATQGAEGADSTRRQNELFKQWLRKNSDAQVVASFNDEGLSGYKGKHLSGQFGDMLSRIESGEFPEGTILLVEAIDRIGRLEHLETEALMNRIIAHGIEIHTLQDGLIYTRDALSDDLGISIIQRVKSYLAHQESKQKSFRVSEKWKQRAKLALAGKQRLTKMVPGWIDPDTLKLNEHAETVRLIFKLLLDGESLHNIARHLQSNDIKSFSRRKDANGFSVHSVRTVLRSESVIGTLPASQRNDRPAIPNYYEAAIDAATFNKAQEILDKNRKGRTPASDNPLTINIFKGLFRCQCGASVHPTGTKNKYAGVYRCNNNPDGRCDVPPLKRKPFDKWMIDNFLGMIDVGNDGEAEGKLAALQHEVEIVTARIKKATALLLEMDDIDELKIQLKELNQKRTELQTTIDNMRRKASLTDKELPQLKDIDLTTKAGRVECQLILSKHLKGLTLGKDSVTVTLQNDTEITIPTNPLPLNDGTSIFEIADKELLDIDAYQL

SEQ ID NO: 27896 - protein, 559 aa, synthetic construct
MKTKLYSYIRFSSMKQADGSSYERQKRTAAEIAAKYDLELVTSYQDFGVSAFKGANSKTGALSRFLDEIGRSVPVGSWLVVENLDRISRQSIIEAQELFLSIIRRGITIVTGMDGRVYSRESVNANPIDLLLSVMLFARANEESQTKRNRTNSSALIKIKAHQENPQNPAVAIEEVGKNMWWTDTTSGYVLPHPTYFPVVQEIVELRKNGRSTAEILDHLNETYAPPPAVSNKKHSKWSRAMVERLFHTRALIGIKEVSVDGVNYELNNYYPRVIDDATFYHLKKNIGARAWNFGDKEEVKPIPLLSGIGLLKCDHCGCAMVKVKGTNKRSDQYRYTCDATRSRRLDCEHPNWSFRGDQLEKAVLQLLADKIWIAEDKANPVPALKVQIDEISRKIDNLITLSAMTGATKELADQITALNSERETLYNQIKMAEEEMYSVDSQGWEKLAEFDLEDVYNEERLKVRFKIKQALKRIGCSRIDRNKNLFVLEYIDGKTQRVVIENSRGTRKGRIFVDMKTINDRQILESNGLVLHPCLDMLTDKNWKPEEEIPGPLQEFGI

SEQ ID NO: 27897 - protein, 507 aa, synthetic construct
MKRVISYIRFSSERQAKGDSLRRQSKMVTDWLKAHPEYYLDQDLSFRDLGVSGFTGKHLKGGLGDFLTAIEKGLVKAGDTLLIESLDRLSRQDIDIASELLRRILRAGVDVVTLSDGEHYTKESLRDPLSLIKSILIMQRAHEESLRKAERIQAAWDAKKEAAKAGIKVSKRCPAWLKLNDDRKSFSVIPEKVETVKRCFQLRLEGKSIWEIVRTLNAEGHQTLNQYKAGSFGQSSVQDLLKNRSVIGYFTPKGCEEIAGYYPAIIDETTFYKVQQLSYARHGRKPASAKPLSVNLFKGVIRCSECGHALIITGFSDTRNGIYRCPLRNENRCSAKGLSRKQTDGTLLTLLSRLDRFDSDTTNTVDMLRLHREHISSNIEKLVQLSLEIEDLSAITSKLKQLKGELSQVDADIEKETQRLKSIDVGCLSDCDLTTKAGRIEAQLIIKSAVKEVVLNTAKRRCKVTFHNGKAITLPITEDPSENVTEAIQSLSEVTERGLIDVDVVAI

SEQ ID NO: 27898 - protein, 507 aa, synthetic construct
MKRVISYIRFSSEKQAKGDSLRRQSKMVTDWLKAHPEYYLDQDLSFRDLGVSGFTGKHLKGGLGDFLTAIEKGLVKAGDTLLIESLDRLSRQDIDIASELLRNILRSGVDVVTLSDGEHYTRESLRDPLALIKSILIMQRAHEESLRKAERIQAAWDAKKEAAKAGIKVSKRCPAWLKLNDDRKSFSVIPEKVETVKRCFQLRLEGKSIWEIVRTLNDEGHQSMSQYKPGSFGQSSVQDLLKNRSVIGYFTPKGCEEIAGYYPAIIDETTFYKVQQLSYARYGRKPASDKPLSVNLFKGVIRCSECGHALIITGFSDTRSGIYRCPLRNENRCSAKGLSRKQTDGTLLALLSRLDRFDSDMTNTIDTLKLHREHISSNIEKLVQLSLEIEDLSAITSKLKQLKNELSQVDADIEKETQRLKSIDVGCLSDCDLTTKAGRIEAQLIIKSAVKEVVLNTAKRRCKVTFHNGKVIDLPITENPSDNVTEAIQSLSEVTERGLIDVDEVII

SEQ ID NO: 27899 - protein, 547 aa, synthetic construct
MKLLVTYIRWSTREQDSGDSLRRQTNLIDAFYAKHKEEYYLLPAHRYVDKGKSGFHQQHKAQGSDFRRMFENVMSGVIPEGSLIVVENFDRFSRADIDTAIDDVRQILRKGVSILTLGDGELYDKSALTDPVKLIKHIIIAERAHQESLVKQKRIAQVWNHKTQLARELKKPMGKQAPGWLELSEDGSHYIVDEDKASLVNIIYDKRLSGMSMFAICKWLNEQGYPTINQRKVRISKTKKPDGNWSALSVKHILTSRSVLGYLPAKISTEDRKTVLREEIESFYPQIVTDSKFYAVQQLLEETGKGKTSSGEHWLYVNILKGLIRCKCGLVMTPTGIRKPVYQGTYRCNGNKESRCNYGTVSRKLLDTQLCSRLFSKLSQLHDEATDTAKLDELQRRLNTVDSELEKLTETLIQLPNITQIQEALRVKQEEKDELIVQLSREKARVKSVSSLNLSGLDMESVEGRTEAQIIIKRLVKEIVVSGNEKLVDIYLHNGNMIRGFPLDGKDDHTLTLEEATDEMQSLDDMLIFGEPVTRIYPAGDMEEVDA

SEQ ID NO: 27900 - protein, 507 aa, synthetic construct
MKRAISYIRFSSEKQSRGDSLRRQSKMVNDWLKAHPEYYLDQDLSFRDLGVSGFTGKHLKGGLGDFLTAIEKGLVKAGDTLLIESLDRLSRQAVDRASELLRNILRSGVDVVTLSDGEHYTSESLKDPLALIKSILIMQRAHEESLRKSERIQAAWDAKKEAAKAGIKISKRCPAWLRLNDDRKSFSVIPEKVETVKRCFQLRLEGKSIWEIVRTLNDEGHQSMSQYKPGKFGQTSVQDLLKNRSVIGYFTPKGCEEISGYFPPIIPETDFYKVQQLSYARYGRKPASDKPLSVNLFKGVIRCSECGHALIITGFSDTRNGIYRCPLRNENRCSAKGLSRKQTDGTLLALLSRLDRFDSDMTNVIDTLKLHREHLSSNIEKLVQLSLEIEDLSAITSKLKQLKNELSQVDADIEKETQRLKSIDVGCLSDCDLTTKAGRIEAQLIIKSAVKEVVLNTAKRRCKVTFHNGRAITLPITENPSKDVTEAIQSLSEVTERGLIDVDVVEI

SEQ ID NO: 27901 - protein, 507 aa, synthetic construct
MKRVISYIRFSSEKQAKGDSLRRQSKMVTDWLKAHPEYYLDQDLSFRDLGVSGFTGKHLKGGLGDFLTAIEKGLVKAGDTLLIESLDRLSRQAVDRASELLRNILRSGVDVVTLSDGEHYTSESLKDPLALIKSILIMQRAHEESLRKSERIQAAWDAKKEAAKAGIKISKRCPAWLKLNDDRKSFSVIPEKVETVKRCFQLRLEGKSIWEIVRTMNAEGHQTLHQHKPGSFGQSSVQDLLKNRSVIGYFTPKGCEEIAGYYPSVIDETTFYKVQQLSHSRYGRKPASAKPLSVNLFKGVIRCSECGHALIITGFSDTRNGIYRCPLRNENRCSAKGLSRKQTDGTLLTLLSRLDRFDSDTTNVIDMLRLHREHISSNIEKLVQLSLEIEDLSAITIKLKQLKGELSQVDADIEKETQRLKSIDVGCLSDCDLTTKAGRIEAQLIIRSAVKEVVLNTAKRRCKVTFHNGKVIDLPITENPSEDVTEAIQSLSEVTAKGLIDVDVVEI

SEQ ID NO: 27902 - protein, 507 aa, synthetic construct
MKRVISYIRFSSEKQAKGDSLRRQSKMVTDWLKAHPEYYLDQDLSFRDLGVSGFTGKHLKGGLGDFLTAIEKGLVKAGDTLLIESLDRLSRQDIDIASELLRNILRSGVDVVTLSDGEHYTRESLRDPLALIKSILIMQRAHEESLRKAERIQAAWDAKKEAAKAGIKVSKRCPAWLKLNDDRKSFSVIPEKVETVKRCFQLRLEGKSIWEIVRTLNAEGHQTLNQYKAGKFGQTSVQDLLKNRSVIGYFTPKGCEEISGYYPAIIDETTFYKVQQLSHYRYGRKPVSDKPLSVNLFKGVIRCSECGHALIITGFSDTRNGIYRCPLRNENRCSAKGLSRKQTDGTLLTLLSRLDRFDSDMTNTLDTLKLHREHISSNIEKLVQLSLEIEDLSAITIKLKQLKGELSQVDADIEKETQRLKSIDVGCLSDCDLTTKAGRIEAQLIIKSAVKEVVLNTAKRRCKVTFHNGRAITLPITENPSEDVTEAIQSLSEVTERGLIDVDEVII

SEQ ID NO: 27903 - protein, 507 aa, synthetic construct
MKRVISYIRFSSEKQAKGDSLRRQSKMVTDWLKAHPEYYLDQDLSFRDLGVSGFTGKHLKGGLGDFLTAIEKGLVKAGDTLLIESLDRLSRQDVDQASELLRNILRSGVDVVTLSDGEHYTSESLKDPLALIKSILIMQRAHEESLRKSERIQAAWNRKKELISEGIKVSKRCPAWLKLNDDRKSFSVIPEKVETVKRCFQLRLEGKSIWEIVRTLNAEGHQTLNQYKAGKFGQTSVQDLLKNRSVIGYFTPKGCEEISGYYPAIIDETTFYKVQQLSHSRYGKRSVSDKPLSVNLFKGVIRCSECGHALIITGFSDTRNGIYRCPLRNENRCSAKGLSRKQTDGTLLTLLSRLDRFDSDTTNTIDTLKLHREHISSNIEKLVQLSLEIEDLNAITSKLKQLKGELSQVDADIEKETQRLKSIDVGCLSDCDLTTKAGRIEAQLIIKSAVKEVVLNTAKRRCKVTFHNGKTITLSITETPSDNVTEAIQSLSEVTERGLIDVDEVII

SEQ ID NO: 27904 - protein, 559 aa, synthetic construct
MKTKLYSYIRFSSMRQSDGSSYERQIRMAREIAAKYDLELVNDYQDLGVSAFKGANSKTGALSRFLDAIGRSVPVGSWLFIENLDRLSRADIVSAQELFLSIIRRGITIVTGMDNKIYSLDTVTANPMDLMFSILLFIRGNEESQTKRNRTNSSALIKIKSHQENPQNPAVAIEEVGKNMWWTDTTSGYVLPHPVYFPVVQEIVELRKNGRSTAEILDHLNETYAPPPAVSNKKHSKWSRAMVERLFHTRALIGIKEVSVDGVNYELKDYYPRVIDDPTFYHLKKNIGARAWNFGDKEEVKPIPLLSGIGLLKCDHCGCAMVKVKGTNKRSDQYRYTCDATRSRRLDCEHPNWSFRGDQLEKAVLQLLADKIWIAEDKANPVPALKVQVDEISRKIDNLIALSAMTGATKELADQITTLNSERETLYNQIKMAEEEMYSVDSQGWEKLAEFDLEDVYNEERLKVRFKIKQALKRIGCSRIDRNKNLFVLEYIDGKTQRVVIENSRGTRKGQIFVDLKTINDRQILESNGLVLHPCLDMLTDKNWKPEEEIPGPLQEFGI

SEQ ID NO: 27905 - protein, 507 aa, synthetic construct
MKRVISYIRFSSEKQAKGDSLRRQSKMVTDWLKAHPEYYLDQDLSFRDLGVSGFTGKHLKGGLGDFLTAIEKGLVKAGDTLLIESLDRLSRQAVDRASELLRNILRSGVDVVTLSDGEHYTSESLKDPLALIKSILIMQRAHEESLRKSERIQAAWDAKKEAAKAGIKVSKRCPAWLKLNDDRKSFSVIPEKVETVKRCFQLRLEGKSIWEIVRTLNDECHQSMNQYKPGKFGQTSVQDLLKNRSVIGYFTPKGCEEISGYYPAIIDETTFYKVQQLSHSRYGKRSVSDKPLSVNLFKGVIRCSECGHALIITGFSDTRNGIYRCPLRNENRCNAKGLSRKQTDGTLLALLSRLDRFDSDMTNVIDALKLHREHISNNIEKLVQLSLEIEDLSAITIKLKQLKGELSQVDADIEKETQRLKSIDVGCLSDCDLTTKAGRIEAQLIIKSAVKEVVLNTAKRRCKVTFHNSKSITLPITENPSEDVTEAIQSLSEVTERGLIDVDEVII

SEQ ID NO: 27906 - protein, 516 aa, synthetic construct
MRSVITYLRFSSAIQGAEGADSTRRQNDLFKQWLKKNSDAQVVASFSDEGLSGYKGKHLTGQFGDMLARIESGEFPEGTLLLVEAIDRIGRLEHLETEALMNRIIAHGIEIHTLQDGLIYTRDALSDDLGISIIQRVKSYVAHQESKQKSFRVSQKWKQRAKLALAGEQRLTKMVPGWIDPDTFKCNEHAETVRLIFKLLLDGESLHNIARHLQANNISSFSRRKDANGFSVHSVRTILRSETTIGTLPASQRNDRPAIPNYYEAAIDVSTFNKAQEILDKNRKGRTPASDNPLTINIFKGLFRCQCGASVHPTGTKNKYAGVYRCNNNPDGRCDVPPLKRKPFDKWMIDNFLGMIDVGNDGEAEGKIASLQHEVEIVTARIKKATALLLEMDDIDELKIQIKELNQRRTELQTTIDNMRRKASLTDKELPQLKDIDLTTKAGRVECQLILSKHLKGLTLGKDSVTVTLQNDTEITIPTNPLPLNDGTSIFEIADKELLDIDAYQLTLINCNFQGL

SEQ ID NO: 27907 - protein, 507 aa, synthetic construct
MKRVISYIRFSSEKQAKGDSLRRQSKMVTDWLKAHPEYYLDQDLSFRDLGVSGFTGKHLKGGLGDFLTAIEKGLVKAGDTLLIESLDRLSRQAVDRASELLRNILRSGVDVVTLSDGEHYTSESLKDPLALIKSILIMQRAHEESLRKSERIQAAWDAKKEAAKAGIKVSKRCPAWLKLNDDRKSFSVIPEKVETVKRCFQLRLEGKSIWEIVRTLNDEGHQTLNQYKPGKFGQTSVQDLLKNRSVIGYFTPKGREEIAGYFPPIIPETDFYKVQQLSYSRYGRKPASDKPLSVNLFKGVIRCSECGHALIITGFSDTRSGIYRCPSRNENRCNAKGLSRKQTDGTLLALLSRLDRFDSDMTNTVDTLKLHREHISSNIEKLVQLSLEIEDLSAITSKLKQLKGELSQVDADIEKETQRLKSIDVGCLSDCDLTTKAGRIEAQLIIKSAVKEVVLNTAKRRCKVTFHNGRIIDLPITENPSEDVTEAIQSLSEVTERGLIDVDEVII

SEQ ID NO: 27908 - protein, 509 aa, synthetic construct
MRRAISYIRFSSERQLKGDSVRRQSKLVTDWLDKNPEFYLDSSLSFKDLGKSAFSGKHLKGGLGDFLTAIEKGLVKAGDTLLIESLDRLSRQDIDIASELLRRILRAGVDVVTLSDGEHYTRESLKDPLSLIKSILIMQRAHEESLRKSERVQAAWNRKKELISEGIKVSRRCPAWLRLNDDRRTFTIIPDKVEVVKRAFDLRLQGLSFWAITRTLNDEGHLSLNQYTPKQKGWSDTAVKKLLRNRAVIGCFTPAGREEVQGYYPAIISESLFYRVQQLNTGQYGRASVSSNPLSVNLFRGIIKCSECGATIVLGGYALKRFGMYRCPNRSANRCSAKAISRKQTDATILYMLALCDRFETENTGTIDSLKLQREDLQRKISKMAELAIELDDMTIITEKLRDMKNALSKLNHDIEEETKRIKAITTGSLKDIDRTTKEGMIETQLLIKGVLKEIVIDAAKRRCKVTFHNGKSIDLPITENPSEDVTEAIQSLSEVTERGLIDVDVVAI

SEQ ID NO: 27909 - protein, 507 aa, synthetic construct
MKRVISYIRFSSERQAKGDSLRRQSKMVNDWLKAHPEYYLDQDLSFRDLGVSGFTGKHLKGGLGDFLTAIEKGLVKAGDTLLIESLDRLSRQDIDIASELLRRILRAGVDVVTLSDGEHYTRESLKDPLSLIKSILIMQRSHEESLRKSERIQAAWDAKKEAAKAGIKISRRCPAWLKLNDDRKSFSVIPEKVETVKRCFQLRLEGKSIWEIVRTLNDEGHQSMSQYKPGKFGQTSVQDLLKNRSVIGYFTPKGCEEIAGYYPAIIDETTFYKVQQLSHSRYGRKPVSAKPLSVNLFKGVIRCSECGHALIITGFSDTRNGIYRCPLRNENRCSAKGLSRKQTDGTLLALLSRLDRFDSDMTNTVDTLKLHREHISSNIEKLVQLSLEIEDLSAITSKLKQLKGELSQVDADIEKETQRLKSIDVGCLSDCDLTTKAGRIEAQLIIKSAVKEVVLNTAKRRCKVTFHNGKVIDLSITENPSEDVTEAIQSLSEVTERGLIDVDEVII

SEQ ID NO: 27910 - protein, 507 aa, synthetic construct
MKRVISYIRFSSEKQAKGDSLRRQSKMVTDWLKAHPEYYLDQDLSFRDLGVSGFTGKHLKGGLGDFLTAIEKGLVKAGDTLLIESLDRLSRQDIDIASELLRNILRSGVDVVTLSDGEHYTKESLRDPLSLIKSILIMQRAHEESLRKAERIQAAWDAKKEAAKAGIKVSKRCPAWLKLNDDRKSFSVIPEKVETVKRCFQLRLEGKSIWEIVRTLNDEGHQSMSQYKPGKFGQTSVQDLLKNRSVIGYFTPKGCEEISGYYPAIIDETTFYKVQQLSHYRYGRKPVSDKPLSVNLFKGVIRCSECGHALIITGFSDTRNGIYRCPLRNENRCSAKGLSRKQTDGTLLTLLSRLDRFDSDTTNTIDTLKLHREHISSNIEKLVQLSLEIEDLSAITSKLKQLKNELSQVDADIEKETQRLKSIDVGCLSDCDLTTKAGRIEAQLIIKSAVKEVVLNTAKRRCKVTFHNGRAITLPITENPSEDVTEAIQSLSEVTERGLIDVDEVII

SEQ ID NO: 27911 - protein, 507 aa, synthetic construct
MKRAISYIRFSSEKQSRGDSLRRQSKMVNDWLKAQPEYYLDQDLSFRDLGVSGFTGKHLKGGLGDFLTAIEKGLVKAGDTLLIESLDRLSRQAVDRASELLRNILRSGVDVVTLSDGEHYTSESLKDPLALIKSILIMQRAHEESLRKSERIQAAWNRKKELISEGIKVSKRCPAWLKLNDDRKSFSVIPEKVETVKRCFQLRLEGKSIWEIVRTLNDEGHQSMSQYKPGSFGQSSVQDLLKNRSVIGYFTPKGCEEIAGYYPAIIDETTFYKVQQLSYARYGRKPASDKPLSVNLFKGVIRCSECGHALIITGFSDTRSGIYRCPLRNENRCSAKGLSRKQTDGTLLALLSRLDRFDSDMTNTIDTLKLHREHISSNIEKLVQLSLEIEDLNAITNKLKQLKNELSQVDADIEKETQRLKSIDVGCLSDCDLTTKAGRIEAQLIIKSAVKEVVLNTAKRRCKVTFHNGKIIDLPITENPSEDVTEAIQSLSEVTERGLIDVDVVEI

SEQ ID NO: 27912 - protein, 507 aa, synthetic construct
MKRVISYIRFSSEKQAKGDSLRRQSKMVTDWLKAHPEYYLDESLTFRDLGVSGFTGKHLKGGLGDFLTAIEKGLVKAGDTLLIESLDRLSRQAVDRASELLRNILRSGVDVVTLSDGEHYTRESLKDPLSLIKSILIMQRAHEESLRKSERIQAAWNRKKELISEGIKVSRRCPAWLRLNDDRKSFSVIPDKVETVKRCFQLRLEGKSIWEIVRTLNAEGHRSMNQYKPGKFGQTSVQDLLKNRSVIGYFTPKGCEEIAGYYPSVIDETTFYKVQQLSHSRYGRRSVSGKPLSVNLFRGVIRCSECGHALIITGFSDTRSGIYRCPLRNENRCSAKGLSRKQTDGTLLALLSRLDRFDSDTTNTIDTLKLHREHISSNIEKLVQLSLEIEDLNAITSKLKQLKGELSQVDADIEKETQRLKSIDVGCLSDCDLTTKAGRIEAQLIIKSAVKEVVLNTAKRRCKVTFHNGRAITLPITENPSEDVTEAIQSLSEVTERGLIDVDEVII

SEQ ID NO: 27913 - protein, 518 aa, synthetic construct
MRSVITYLRYSSAIQGAEGADSTRRQNDLFKQWLKKNSDAQVVASFSDEGLSGYKGKHLTGQFGDMLARIESGEFSEGTILLVEAIDRIGRLEHLETEALMNRILGNGIEIHTLQDGLIYTKDALADDLGISIIQRVKSYIAHQESKQKSFRVSQKWGQRAKLALAGEQRLTKMVPGWIDPETFEVNEHAETVRLIFKLLLDGESLHNIARHLQANNISSFSRRKDANGFSVHSVRTILRSETTIGTLPASQRNDRPAIPNYYEAAIDAATFNKAQEILDKNRKGRTPASDNPLTINIFKGLFRCQCGASVHPTGTKNKYQGVYRCNNHLDGRCDVPPLKRKPFDRWMIDNFLGMIDVVSDGETERRIAALQHEVEIVTARIKKATALLLEMDDITELKAQVKELNQKRTELQTTIDTMKRKTSLSDKGLPQLKDIDLMTMNRPGFPGECFICELRLPDQYFRWKHNKLFLLLPEEYGPAFPAIVDCYTSPPTLVWPVPLLSGFSNSYGVLPPLCKDH

SEQ ID NO: 27914 - protein, 507 aa, synthetic construct
MKRVISYIRFSSEKQAKGDSLRRQSKMVTDWLKAHPEYYLDQDLSFRDLGVSGFTGKHLKGGLGDFLTAIEKGLVKAGDTLLIESLDRLSRQAVDRASELLRNILRSGVDVVTLSDGEHYTSESLKDPLALIKSILIMQRAHEESLRKSERIQAAWDAKKEAAKAGIKVSKRCPAWLKLNDDRKSFSVIPEKVETVKRCFQLRLEGKSIWEIVRTLNDEGHRSMNQYKPGKFGQTSVQDLLKNRSVIGYFTPKGCEEISGYYPAIIDETTFYKVQQLSHYRYGRKPVSDKPLSVNLFKGVIRCSECGHALIITGFSDTRNGIYRCPLRNENRCSAKGLSRKQTDGTLLALLSRLDRFDSDTTNIINTLKLHREHISSNIEKLVQLSLEIEDLSAITSKLKQLKNELSQVDADIEKETQRLKSIDVGCLSDCDLTTKAGRIEAQLIIKSAVKEVVLNTAKRRCKVTFHNGKSITLPITENPSEDVTEAIQSLSEVTERGLIDVDEVII

SEQ ID NO: 27915 - protein, 506 aa, synthetic construct
MRSVITYLRFSSAIQGAEGADSTRRQNDLFKQWLKKNSDAQVVASFSDEGLSGYKGKHLTGQFGDMLARIESGEFPEGTILLVESIDRIGRLEHLETEALMNRILGNGLEIHTLQDGLIYTKDALADDLGISIIQRVKAYIAHQESKQKSFRVSEKWKQRAKLALAGEQRLTKMVPGWIDPDTLKLNEHAETVRLIFKLLLSGESLHNIARHLQANNISSFSRRKDANGFSVHSVRTILRSETTRGTLPASQRNDRPAIPNYYEAAIDAATFNKAQEILDKNRKGRTPASDNPLTINIFKGLFRCQCGASVHPTGTKNKYQGVYRCNNHLDGRCDVPPLKRKPFDKWMIDNFLGMIDVGNDGEAEGKIAALQHEVEIVTARIKKATALLLEMDDITELKTQVKGLNQKRTELQTTIDNMRRKASLTDKELPQLKDIDLTTKAGRVECQLILSKHLKGLTLGKDSVTVTLQNDTEITIPTDPLPLNDGTSIFEIAEKNLLNIDTFQL

SEQ ID NO: 27916 - protein, 507 aa, synthetic construct
MKRVISYIRFSSEKQAKGDSLRRQSKMVTDWLKAHPEYYLDQDLSFRDLGVSGFTGKHLKGGLGDFLTAIEKGLVKAGDTLLIESLDRLSRQAVDRASELLRNILRSGVDVVTLSDGEHYTRESLRDPLSLIKSILIMQRSHEESLRKSERIQAAWDAKKEAAKAGIKVSKRCPAWLRLNDDRKSFSVIPDKVETVKRCFQLRLEGKSIWEIVRTLNAEGHRSMNQYKPGKFGQTSVQDLLKNRSVIGYFTPKGCEEIAGYFPPIIPETDFYKVQQLSYARYGRKPASDKPLSVNLFKGVIRCSECGHALIITGFSDTRNGIYRCPLRNENRCSAKGLSRKQTDGTLLALLSRLDRFDSDTTNIIDMLRLHREHVSSNIEKLVQLSLEIEDLNAITSKLKQLKGELSQVDADIEKETQRLKSIDVGCLSDCDLTTKAGRIEAQLIIKSAVKEVVLNTAKRRCKVTFHNGKTITLSITENPSEDVTEAIQSLSEVTERGLIDVDVVEI

SEQ ID NO: 27917 - protein, 506 aa, synthetic construct
MRTVITYLRFSSATQGAEGADSTRRQNELFKQWLRKNSDAQVVASFSDEGLSGYKGKHLTGQFGDMLARIEAGEFPASTILLVESIDRIGRLEHLETEALMNRILGNGIEIHTLQDGLIYTKDALADDLGISIIQRVKAYIAHQESKQKSFRVSQKWKQRAKLALAGEQHLTRNVPGWIDPDTFKCNEHAETVRLIFKLLLDGESLHNIARHLQSNDIKSFSRRKDANGFSVHSVRTVLRSESVIGTLPASQRNDRPAIPNYYEAAIDAATFNKAQEILDKNRKGRTPASDNPLTINIFKGLFRCQCGASVHPTGTKNKYQGVYRCNNHLDGRCDVPPLKRKPFDKWMIDNFLGMIDVGNDGEAEGKIAALQHEVEIVTARIKKATALLLEMDDITELKTQVKGLNQKRTELQTTIDNMRRKASLTDKELPQLKDIDLTTKAGRVECQLILSKHLKGLTLGKDSVTVTLQNDTEITIPTDPLPLNDGTSIFEIAEKNLLNIDTFQL

SEQ ID NO: 27918 - protein, 507 aa, synthetic construct
MKRVISYIRFSSERQAKGDSLRRQSKMVNDWLKAHPEYYLDQDLSFRDLGVSGFTGKHLKGGLGDFLTAIEKGLVKAGDTLLIESLDRLSRQDIDIASELLRNILRSGVDVVTLSDGEHYTRESLRDPLALIKSILIMQRAHEESLRKSERIQAAWNRKKELISEGIKVSKRCPAWLRLNDDRKSFSVIPEKVETVKRCFQLRLEGKSIWEIVRTLNDEGHQSMSQYKPGKFGQTSVQDLLKNRSVIGYFTPKGCEEISGYYPAILDETTFYKVQQLSYARHGRKPASAKPLSVNLFKGVIRCSECGHALIITGFSDTRNGIYRCPLRNENRCSAKGLSRKQTDGTLLTLLSRLDRFDSDTTNTVDMLRLHREHISSNIEKLVQLSLEIEDLSAITSKLKQLKGELSQVDADIEKETQRLKSIDVGCLSDCDLTTKAGRIEAQLIIKSAVKEVVLNTAKRRCKVSFHNGKVIDLPITENPSEDVTEAIQSLSEVTERGLIDVDEVII

SEQ ID NO: 27919 - protein, 508 aa, synthetic construct
MKKAIAYMRFSSPGQMSGDSLNRQRRLIAEWLKVNSNYYLDTITYEDLGLSAFKGKHAQSGAFSEFLDAIEHGYILPGTTLLVESLDRLSREKVGEAIERLKLILNHGIDVITLCDNTVYNIDSLNDPYSLIKAILIAQRANEESEIKSSRVKLSWKKKRQDALESGTIMTASCPRWLSLDDKRTAFIPDPDRVKTIELIFKLRMERRSLNAIAKYLNDHAVKNFSGKESAWGPSVIEKLLANKALIGICVPSYRARGKGISEIAGYYPRVISDDLFYAVQEIRLAPFGISNSSKNPMLINLLRTVMKCEACGNTMIVHAVSGSLHGYYVCPMRRLHRCDRPSIKRDLVDYNIINELLFNCSKIQPVENKKDANETLELKIIELQMKINNLIAALSVAPEVTAIAEKIRLLDKELRRASVSLKTLKSKAVSSLGDFHAIDLTSKNGRELCRTLAYKTFEKIIINTDNKTCDIYFMNGIVFKHYPLMKTISAQQAISTLKYMVDGEVYF

SEQ ID NO: 27920 - protein, 547 aa, synthetic construct
MKLLVPYIRWSTKEQDSGDSLRRQTNLIDAFYSKHKEEYYLLPAHRYVDKGKSGFHQQHKAQGSDFRRMFENVMSGAIPEGSLIVVENFDRFSRADIDTAIDDVRQILRKGVSILTLGDGELYDKSALTDPVKLIKHIIIAERAHQESLVKQKRIAQVWNHKTQLARELKKPMGKQAPGWLELSEDGSHYIVDEDKASLVNIIYDKRLSGMSMFAICKWLNEQGYPTINQRKVRISKTKKPDGNWSALSVKHILTSRSVLGYLPAKISTEDRKTVLREEIESFYPQIVTDSKFYAVQQLLEETGKGKTSSGEHWLYVNILKGLIRCKCGLVMTPTGIRKPVYQGTYRCNGNKESRCSYGTVSRKLLDTQLCSRLFSKLSQLHDEATDTARLDELQRRLNTVDSELEKLTETLIQLPNITQIQEALRVKQEEKDELIVQLSREKARVKSVSSLDLSGLDMESVEGRTEAQIIIKRLVKEIVVSGNEKLVDIYLHNGNMIRGFPLDGKDDHTLTLEEATDEMQSLDDMLIFGEPVTRIYPAGDMEEVDA

SEQ ID NO: 27921 - protein, 547 aa, synthetic construct
MKLLVPYIRWSTKEQDSGDSLRRQTNLIDAFYSKHKNDYYLLPAHRYVDKGKSGFHQQHKNQGSDFRRMFENVMSGVIPEGSLIVVENFDRFSRADIDTAIDDVRQILRKGVSILTLGDGELYDKSALTDPVKLIKHIIIAERAHQESLVKQKRIAQVWNHKTQLARELKKPMGKQAPGWLELSEDGSHYIVDEDKASLVNIIYDKRLSGMSMFAICKWLNEQGYPTINQRKVRISKTKKPDGNWSALSVKHILTSRSVLGYLPAKISSEDRKTVLREEIESFYPRIVTDSKFYAVQQLLEETGKGKTSSGEHWLYVNILKGLIRCKCGLVMTPTGIRKPVYQGTYRCNGNKESRCNYGTVSRKLLDTQLCSRLFSKLSQLHDEATDTAKLDELQRRLNTVDSELEKLTETLIQLPNITQIQEALRVKQEEKDELIVQLSREKARLKSVSSLDLSGLDMESVEGRTEAQIIIKRLVKEIVVSGNEKLVDIYLHNGNMIRGFPLDGKDDHTLTLEEATDEMQPLDDMLIFGEPVTRIYPAGDMEEVDA

SEQ ID NO: 27922 - protein, 507 aa, synthetic construct
MKRAISYIRFSSEKQSRGDSLRRQAKMVTDWLKAHPEYYLDESLTFRDLGVSGFTGKHLKGGLGDFLTAIEKGLVKAGDTLLIESLDRLSRQDVDQASELLRNILRSGVDVVTLSDGEHYTRESLKDPLALIKSILIMQRAHEESLRKAERIQAAWDAKKEAAKAGIKISRRCPAWLKLNDDRKSFSVIPEKVETVKRCFQLRLEGKSIWEIVRTLNAEGHQTLNQYKAGKFGQTSVQDLLKNRSVIGYFTPKGCEEISGYYPAIIDETTFYKVQQLSYARYGRKPASDKPMAVNLFKGVIRCSECGHALIITGFSDTRNGIYRCPLRNENRCSAKGLSRKQTDGTLPALLSRLDRFDSDMTNTIDTLKLHREHISSNIEKLVQLSLEIEDLSAITSKLRQLKNELSQVDADIEKETQRLKSIDVGCLSDCDLTTKAGRIEAQLIIKSAVKEVVLNTAKRRCKVTFHNGKTITLPITENPSDNVTEAIQSLSEVTERGLIDVDEVII

SEQ ID NO: 27923 - protein, 546 aa, synthetic construct
MKQADGSSYERQKRTAAEIAAKYDLELVTSYQDFGVSAFKGANSKTGALSRFLDEIGRSVPVGSWLVVENLDRISRQSIIEAQELFLSIIRRGITIVTGMDGRVYSRESVNANPIDLLLSVMLFARANEESQTKRNRTNSSALIKIKSHQENPQNPAVAIEEVGKNMWWTDTTSGYVCPDPVYFPIVKEIVELRKNGRSTSEILNYLNETYTPPPAVSNKKHSKWPRAMIGRLFHTRALIGIKEVSVDGVKYELKDYYPRVIDDATFYHLKKNIGARAWNFGDTEEIKPIPLLSGIGLLKCEHCSSAMIKVKGTNKRADQYRYSCEGIRSHRFDCEQPNWSFRGDQLEKAVLQLLADKIWIAEDKANPVPALKVQIDEISRKIDNLIALSAMTGATKELADQITALNSERETLYNQIKMAEEEMYSVDSQGWEKLAEFDLEDVYNEERIKVRFKIKQALRRIGCRRIDRNKNLFVLEYVDGKTQRVVIENSRGTRKGRIFIDLKTINDRQILESNGLVLHPCLDMLTDKNWKPEEEQAGPLQEFGI

SEQ ID NO: 27924 - protein, 509 aa, synthetic construct
MRRAISYIRFSSERQLKGDSVRRQSKLVTDWLDKNPEFYLDSSLSFKDLGKSAFSGKHLKGGLGDFLTAIEKGLVKAGDTLLIESLDRLSRQDIDIASELLRRILRAGVDVVTLSDGEHYTKESLKDPLSLIKSILIMQRAHEESLRKSERVQAAWNRKKELISEGIKVSRRCPAWLRLNDDRRTFTIIPDKVEVVKRAFDLRLQGLSFWAITRTLNDEGHLSLNQYTPKQKGWSDTAVKKLLRNRAVIGCFTPAGREEVQGYYPAIISESLFYRVQQLNTGQYGRASVSSNPLSVNLFRGIIKCSECGATIVLGGYALKRFGMYRCPNRSANRCSAKAISRKQTDATILYMLALCDRFETENTDTIDGLKIQREDLQRKISKMAELAIELDDMTIITEKLRDMKNALSKLNHDIEEETKRIKAITTGSLKDIDRTTKEGMIETQLLIKGVLKEIFIDAAKRRCKVTFHNGRAITLPITETPSEDVTEAIQSLSEVTERGLIDVDEVII

SEQ ID NO: 27925 - protein, 547 aa, synthetic construct
MKLLVTYIRWSTKEQDSGDSLRRQTNLIDAFYSKHKEEYYLLPAHRYVDKGKSGFHQQHKAQGSDFRRMFENVMSGAIPEGSLIVVENFDRFSRADIDTAIDDVRQILRKGVSILTLGDGELYDKSALTDPVKLIKHIIIAERAHQESLVKQKRIAQVWNHKTQLARELKKPMGKQAPGWLELSEDGSHYIVDEDKASLVNIIYDKRLSGMSMFAICKWLNEQGYPTINQRKVRISKTKKPDGNWSALSVKHILTSRSVLGYLPAKISTEDRKTVLREEIESFYPQIVTDSKFYAVQQLLEETGKGKTSSGEHWLYVNILKGLIRCKCGLVMTPTGIRKPVYQGTYRCNGNKESRCSYGTVSRKLLDTQLCSRLFSKLSQLHDEATDTAKLDELQRRLNTVDSELEKLTETLIQLPNITQIQEALRVKQEEKDELIVQLSREKARVKSVSSLDLSGLDMESVEGRTEAQIIIKRLVKEIVVSGNEKLVDIYLHNGNMIRGFPLDGKDDHTLTLEEATDEMQPLDDMLIFGEPVTRIYPAGDMEEVDA

SEQ ID NO: 27926 - protein, 507 aa, synthetic construct
MKRVISYIRFSSERQAKGDSLRRQSKMVNDWLKAHPEYYLDQDLSFRDLGVSGFTGKHLKGGLGDFLTAIEKGLVKAGDTLLIESLDRLSRQAVDRASELLRNILRSGVDVVTLSDGEHYTKESLRDPLSLIKSILIMQRSHEESLRKSERIQAAWNRKKELISEGIKISKRCPAWLRLNDDRKSFSVIPDKVETVKRCFQLRLEGKSIWEIVRTMNAEGRQTLHQYKAGSFGQSSVQDLLKNRSVIGYFTPKGCEEISGYYPAIIDETTFYKVQQLSYARHGRKPASAKPLSVNLFKGVIRCSECGHALIITGFSDTRSGIYRCPLRNENRCSAKGLSRKQTDGTLLALLSRLDRFDSDTTNTIDTLKLHREHISSNIEKLVQLSLEIEDLSAITSKLKQLKGELSQVDADIEKETQRLKSIDVGCLSDCDLTTKAGRIEAQLIIKSAVKEVVLNTAKRRCKVTFHNGKVIDLPITENPSEDVTEAIQSLSEVTERGLIDVDEVII

SEQ ID NO: 27927 - protein, 507 aa, synthetic construct
MKRVISYIRFSSEKQAKGDSLRRQSKMVTDWLKAHPEYYLDESLTFRDLGVSGFTGKHLKGGLGDFLTAIEKGLVKAGDTLLIESLDRLSRQAVDQASELLRNILRSGVDVVTLSDGEHYTRESLRDPLALIKSILIMQRAHEESLRKAERIQAAWDAKKEAAKAGIKVSKRCPAWLKLNDDRKSFSVIPEKVETVKRCFQLRLEGKSIWEIVRTLNDEGHQSMSQYKPGSFGQSSVQDLLKNRSVIGYFTPKGREEIAGYFPPIIPETDFYKVQQLSYSRYGRKPASDKPLSVNLFKGVIRCSECGHALIITGFSDTRNGIYRCPLRNENRCSAKGLSRKQTDGTLLTLLSRIDRFDSDMTNTIDTLKLHREHISSNIEKLVQLSLEIEDLSAITSKLKQLKGELSQVDADIEKETQRLKSIDVGCLSDCDLTTKAGRIEAQLIIKSAVKEVVLNTAKRRCKVTFHNGKVIDLSITENPSEDVTEAIQSLSEVTERGLIDVDVVEI

SEQ ID NO: 27928 - protein, 435 aa, synthetic construct
MKLLVTYIRWSTKEQDSGDSLRRQTNLIDAFYSKHKEEYYLLPAHRYVDKGKSGFHQQHKNQGSDFRRMFENVMSGVIPEGSLIVVENFDRFSRADIDTAIDDVRQILRKGVSILTLGDGELYDKSALTDPVKLIKHIIIAERAHQESLVKQKRIAQVWNHKTQLARELKKPMGKQAPGWLELSEDGSHYIVDEDKASLVNIIYDKRLSGMSMFAICKWLNEQGYPTINQRKVRISKTKKPDGNWSALSVKHILTSRSVLGYLPAKISTEDRKTVLREEIEGFYPQIVTDSKFYAVQQLLEETGKGKTSSGEHWLYVNILKGLIRCKCGLVMTPTGIRKPVYQGTYRCNGNKESRCNYGTVSRKLLDTQLCSRLFSKLSQLHDEATDTARLDELQRRLNTVDSELEKLTETLIQLPNITQIQEALRVAYYREGDR

SEQ ID NO: 27929 - protein, 507 aa, synthetic construct
MKRVISYIRFSSERQAKGDSLRRQSKMVNDWLKAHPEYYLDQDLSFRDLGVSGFTGKHLKGGLGDFLTAIEKGLVKAGDTLLIESLDRLSRQDVDQASELLRNILRSGVDVVTLSDGEHYTKESLRDPLSLIKSILIMQRAHEESLRKAERIQAAWDAKKEAAKAGIKISRRCPAWLKLNDDRKSFSVIPEKVETVKRCFQLRLEGKSIWEIVRTLNAEGHQTLNQYKAGKFGQTSVQDLLKNRSVIGYFTPKGCEEIAGYYPSVIDETTFYKVQQLSHSRYGRKPASDKPLSVNLFKGVIRCSECGHALIITGFSDTRSGIYRCPLRNENRCSAKGLSRKQTDGTLLALLSRLDRFDSDTTNTIDTLKLHREHISSNIEKLVQLSLEIEDLNAITNKLKQLKNELSQVDADIEKETQRLKSIDVGCLSDCDLTTKAGRIEAQLIIKSAVKEVVLNTAKRRCKVTFHNGKVIDLSITENPSEDVTEAIQSLSEVTERGLIDVDEVII

SEQ ID NO: 27930 - protein, 506 aa, synthetic construct
MRTVITYLRFSSAIQGAEGADSTRRQNDLFKQWLKKNSDAQVVASFSDEGLSGYKGKHLTGQFGDMLSRIESGEFPEGTILLVEAIDRIGRLEHLETEALMNRIIAHGIEIHTLQDGLIYTRDALSDDLGISIIQRVKSYVAHQESKQKSFRVSQKWKQRAKLALAGEQRLTKMVPGWIDPDTFKCNEHAETVRLIFKLLLDGESLHNIARHLQANNISSFSRRKDANGFSVHSVRTILRSETTRGTLPASQRNDRPAIPNYYEAAIDAATFNKAQEILDKNRKGRTPASDNPLTINIFKGLFRCQCGASVHPTGTKNKYAGVYRCNNNPDGRCDVPPLKRKPFDKWMIDNFLGMIDVGNDGEAEGKIAALQHEVEIVTARIKKATALLLEMDDIDELKIQLKELNQKRTELQTTIDSMRRKASLTDKELPQLKDIDLTTKAGRVECQLILSKHLKGLTLGKDSVTVTLQNDTEITIPTNPLPLNDGSPIFEIADKELLDIDAYQL

SEQ ID NO: 27931 - protein, 506 aa, synthetic construct
MRSVITYLRFSSATQGAEGADSTRRQNDLFKQWLKKNSDAQVVASFNDEGLSGYKGKHLSGQFGDMLSRIESGEFSEGTILLVEAIDRIGRLEHLETEALMNRIIAHGIEIHTLQDGLIYTRDALSDDLGISIIQRVKSYIAHQESKQKSFRVSQKWKQRAKLALAGEQRLTKMVPGWIDPDTFKLNEHAETVRLIFKLLLDGESLHNIARHLQSNDIKSFSRRKDANGFSVHSVRTVLRSVSAIGTLPASQRNDRPAIPNYYEAAIDASTFNKAQEILDKNRKGRTPASDNPLTINIFKGLFRCQCGASVHPTGTKNKYAGVYRCNNNPDGRCDVPPLKRKPFDKWMIDNFLGMIDVGNDGEAEGKIASLQHEVEIVTARIKKATALLLEMDDIDELKIQLKELNQKRTELQTMIDNMRRKASLTDKELPQLKDIDLMTKAGRVECQLILSKHLKGLTLGKDSVTVTLQNDTEIIVPTDPLPLNDGTSIFEIAEKELLEIDAYQL

SEQ ID NO: 27932 - protein, 507 aa, synthetic construct
MKRVISYIRFSSERQAKGDSLRRQSKMVNDWLKAHPEYYLDQDLSFRDLGVSGFTGKHLKGGLGDFLTAIEKGLVKAGDTLLIESLDRLSRQDVDQASELLRNILRSGVDVVTLSDGEHYTKESLKDPLALIKSILIMQRAHEESLRKAERIQAAWDAKKEAAKAGIKISRRCPAWLKLNDDRKSFSVIPEKVETVKRCFQLRLEGKSIWEIVRTLNAEGHRSMNQYKPGKFGQTSVQDLLKNRSVIGYFTPKGCEEISGYYPAIIDETTFYKVQQLSHSRYGKRSVSDKPLSVNLFKGVIRCSECGHALIITGFSDTRNGIYRCPLRNENRCNAKGLSRKQTDGTLLALLSRLDRFDSDMTNVIDALKLHREHISNNIEKLVQLSLEIEDLSAITIKLKQLKGELSQVDADIEKETQRLKSIDVGCLSDCDLTTKAGRIEAQLIIKSAVKEVVLNTAKRRCKVTFHNSKSITLPITENPSEDVTEAIQSLSEVTERGLIDVDEVII

SEQ ID NO: 27933 - protein, 506 aa, synthetic construct
MRTVITYLRFSSATQGAEGADSTRRQNELFKQWLRKNSDAQVVASFSDEGLSGYKGKHLTGQFGDMLARIESGEFTAGTILLVESIDRIGRLEHLETEALMNRILGNGIEIHTLQDGLIYTKDALADDLGISIIQRVKAYIAHQESKQKSFRVSQKWEQRAKLALAGEQRLTKMVPGWIDPDTFKLNEHAETVRLIFKLLLDGESLHNIARHLQSNGIKSFSRRKDANGFSVHSVRTILRSETTTGTLPASQRNDRPAIPNYYEAAIDAATFNKAQEILDKNRKGRTPASDNPLTINIFKGLFRCQCGASVHPTGTKNKYQGVYRCNNHLDGRCDVPPLKRKPFDKWMIDNFLGMIDVGNDGEAEGKIAALQHEVEIVTARIKKATALLLEMDDITELKTQVKGLNQKRTELQTTIDNMRRKASLTDKELPQLKDIDLTTKAGRVECQLILSKHLKGLTLGKDSVIVTLQNDTEITIPTNPLPLNDGTSIFEIAEKNLLNIDTFQL

SEQ ID NO: 27934 - protein, 506 aa, synthetic construct
MRSVITYLRFSSAIQGAEGADSTRRQNDLFKQWLKKNSDAQVVASFSDEGLSGYKGKHLTGQFGDMLARIEAGEFLAGTILLVESIDRIGRLEHLETEALMNRILGNGIEIHTLQDGLVYTKDALADDLGISIIQRVKSYIAHQESKQKSFRVSQKWKQRAKLALAGEQRLTRNVPGWIDPDTFKCNEHAETVRLIFKLLLDGESLHNIARHLQSNDIKSFSRRKDANGFSVHSVRTVLRSESVIGTLPASQRNDRPAIPNYYEAAIDAATFNKAQEILDKNRKGRTPASDNPLTINIFKGLFRCQCGASVHPTGTKRTYQGVYRCNNHLDGRCDVQPLKRKPFDRWMIDNFLGMIDVGNDGESERKIAALQHEVEIVTARIKKATALLLEMDDIDELKIQLKELNQKRTELQTTIDNMRRKTSLTDKELPQLKDIDLTTKAGRVECQLILSKHLKGLTLGKDSVTVTLQNDTEITIPTNPLPLNDGSPIFEIADKELLDIDAYQL

SEQ ID NO: 27935 - protein, 507 aa, synthetic construct
MKRVISYIRFSSEKQAKGDSLRRQSKMVTDWLKAHPEYYLDQDLSFRDLGVSGFTGKHLKGGLGDFLTAIEKGLVKAGDTLLIESLDRLSRQDIDIASELLRRILRAGVDVVTLSDGEHYTRESLKDPLSLIKSILIMQRSHEESLRKSERIQAAWDAKKEAAKAGIKISRRCPAWLRLNDDRKSFSVIPDKVETVKRCFQLRLEGKSIWEIVRTLNDEGHQSMSQYKPGKFGQTSVQDLLKNRSVIGYFTPKGCEEISGYFPPIIPETDFYKVQQLSYSRYGRKPASDKPLSVNLFKGVIRCSECGHALIITGFSDTRSGIYRCPSRNENRCNAKGLSRKQTDGTLLALLSRIDRFDSDMTNTIDTLKLHREHISSNIEKLVQLSLEIEDLSAITSKLKQLKGELSQVDADIEKETQRLKSIDVGCLSDCDLTTKAGRIEAQLIIKSAVKEVVLNTAKRRCKVTFHNGKVIDLPITENPSEDVTEAIQSLSEVTERGLIDVDEVII

SEQ ID NO: 27936 - protein, 507 aa, synthetic construct
MKRVISYFRFSSEKQAKGDSLRRQSKMVTDWLKAHPEYYLDESLTFRDLGVSGFTGKHLKGGLGDFLTAIEKGLVKAGDTLLIESLDRLSRQAVDRASELLRNILRSGVDVVTLSDGEHYTKESLRDPLSLIKSILIMQRAHEESLRKSERIQAAWNRKKELISEGIKISKRCPAWLKLNDDRKSFSVIPEKVATVKRCFQLRLEGKSIWEIVRTLNAEGHQTLNQYKAGKFGQTSVQDLLKNRSVIGYFTPKGCEEITGYFPSIIPETDFYKVQQLSYSRYGRKPVSDKPLSVNLFKGVIRCSECGHALIITGFSDTRSGIYRCPLRNENRCSAKGLSRKQTDGTLLTLLSRLDRFDSNTTNTIDMLRLHREHISSNIEKLVQLSLEIEDLSAITIKLKQLKGELSQVDADIEKETQRLKSIDVGCLSDCDLTTKAGRIEAQLIIKSAVKEVVLNTAKRRCKVTFHNGKAITLPITENPSDNVTEAIQSLSEVTERGLIDVDEVII

SEQ ID NO: 27937 - protein, 507 aa, synthetic construct
MKRAISYIRFSSEKQSRGDSLRRQSKMVNDWLKAHPEYYLDQDLSFRDLGVSGFTGKHLKGGLGDFLTAIEKGLVKAGDTLLIESLDRLSRQDVDQASELLRNILRSGVDVVTLSDGEHYTKESLKDPLALIKSILIMQRAHEESLRKAERIQAAWDAKKEAAKAGIKVSKRCPAWLRLNDDRKSFSVIPEKVETVKRCFQLRLEGKSIWEIVRTLNAEGHRSMNQYKPGKFGQTSVQDLLKNRSVIGYFTPKGCEEISGYYPAIIDETTFYKVQQLSHSRYGKRSVSDKPLSVNLFKGVIRCSECGHALIITGFSDTRNGIYRCPLRNENRCNAKGLSRKQTDGTLLALLSRLDRFDSDMTNVIDALKLHREHISNNIEKLVQLSLEIEDLSAITIKLKQLKGELSQVDADIEKETQRLKSIDVGCLSDCDLTTKAGRIEAQLIIKSAVKEVVLNTAKRRCKVTFHNSKSITLPITENPSEDVTEAIQSLSEVTERGLIDVDEVII

SEQ ID NO: 27938 - protein, 547 aa, synthetic construct
MKLLVTYIRWSTKEQDSGDSLRRQTNLIDAFYSKHKNDYYLLPAHRYVDKGKSGFHQQHKNQGSDFRRMFENVMSGAIPEGSLIVVENFDRFSRADIDTAIDDVRQILRKGVSILTLGDGELYDKSALTDPVKLIKHIIIAERAHQESLVKQKRIAQVWNHKTQLARELKKPMGKQAPGWLELSEDGSHYIVDEDKASLVNIIYDKRLSGMSMFAICKWLNEQGYPTINQRKVRISKTKKPDGNWSALSVKHILTSRSVLGYLPAKISSEDRKTVLREEIEGFYPQIVTDSKFYAVQQLLEETGKGKTSSGEHWLYVNILKGLIRCKCGLVMTPTGIRKPVYQGTYRCNGNKESRCSYGTVSRKLLDTQLCSRLFSKLSQLHDEATDTAKLDELQRRLNTVDSELEKLTETLIQLPNITQIQEALRVKQEEKDELIVQLSREKARVKSVSSLDLSGLDMESVEGRTEAQIIIKRLVKEIVVSGNEKLVDIYLHNGNMIRGFPLDGKDDHTLTLEEATDEMQSLDDMLIFGEPVTRIYPAGDMEEVDA

SEQ ID NO: 27939 - protein, 507 aa, synthetic construct
MKRVISYIRFSSEKQAKGDSLRRQSKMVTDWLKAHPEYYLDQDLSFRDLGVSGFTGKHLKGGLGDFLTAIEKGLVKAGDTLLIESLDRLSRQDIDIASELLRRILRAGVDVVTLSDGEHYTKESLRDPLSLIKSILIMQRAHEESLRKAERIQAAWDAKKEAAKAGIKISRRCPAWLRLNDDRKSFSVIPEKVETVKRCFQLRLEGKSIWEIVRTLNDEGHQTLNQYKAGKFGQTSVQDLLKNRSVIGYFTPKGCEEISGYYPAIIDETTFYKVQQLSHYRYGRKPVSDKPLSVNLFKGVIRCSECGHALIITGFSDTRNGIYRCPLRNENRCSAKGLSRKQTDGTLLTLLSRLDRFDSDTTNTIDMLRLHREHISSNIEKLVQLSLEIEDLNAITNKLKQLKNELSQVDADIEKETQRLKSIDVGCLSDCDLSTKAGRIEAQLIIKSAVKEVVLNTAKRRCKVTFHNGRAITLSITENPSEDVTEAIQSLSEVTERGLIDVDEVII

SEQ ID NO: 27940 - protein, 506 aa, synthetic construct
MRHVITYLRYSSAIQGAEGADSTRRQNDLFKQWLKKNSDAQVVASFNDEGLSGYKGKHLSGQFGDMLSRIESGEFSEGTVLLVEAIDRIGRLEHLETEALMNRIIAHGIEIHTLQDGLIYTRDALSDDLGISIIQRVKSYVAHQESKQKSFRVSQKWKQRAKLALAGEQRLTKMVPGWIDPDTFKCNEHAETVRLIFKLLLDGESLHNIARHLQANNISSFSRRKDANGFSVHSVRTILRSETTIGTLPASQRNDRPAIPNYYEAAIDAATFNKAQEILDKNRKGRTPASDNPLTINIFKGLFRCQCGASVHPTGTKNKYAGVYRCNNNPDGRCDVPPLKRKPFDKWMIDNFLGMIDVGNDGEAEGKIASLQHEVEIVTARIKKATALLLEMDDIDELKIQLKELNQKRTELQTMIDNMRRKASLTDKELPQLKDIDLMTKAGRVECQLILSKHLKGLTLGKDSVTVTLQNDTEIIVPTDPLPLNDGTSIFEIAEKELLEIDAYQL

SEQ ID NO: 27941 - protein, 547 aa, synthetic construct
MKLLVTYIRWSTKEQDSGDSLRRQTNLIDAFYAKHKDDYYLLPAHRYVDKGKSGFHQQHKNQGSDFRRMFENVMSGVIPEGSLIVVENFDRFSRADIDTAIDDVRQILRKGVSILTLGDGELYDKSALTDPVKLIKHIIIAERAHQESLVKQKRIAQVWNHKTQLARELKKPMGKQAPGWLELSEDGSHYIVDEDKASLVNIIYDKRLSGMSMFAICRWLNEQGYPTINQRKARISKTKKPDGNWSALSVKHILTSRSVLGYLPAKISTEDRKTVLREEIESFYPQIVTDSKFYAVQQLLEETGKGKTSSGDHWLYVNILKGLIRCKCGLVMTPTGIRKPVYQGTYRCNGNKESRCSYGTVSRKLLDTQLCSRLFSKLSQLHDEATDTAKLDELQRRLNTVDSELEKLTETLIQLPNITQIQEALRVKQEEKDELIAQLSREKARVKSVSSLDLSGLGMESVEGRTEAQIIIKRLVKEIVVSGNEKLVDIYLHNGNMIRGFQIDGKDDHTLTLEEATDEMQSLDDMLIFGEPVTRIYPAGDMEEVDA

SEQ ID NO: 27942 - protein, 509 aa, synthetic construct
MRRAISYIRFSSERQLKGDSVRRQSKLVTDWLDKNPEFYLDSSLSFKDLGKSAFSGKHLKGGLGDFLTAIEKGLVKAGDTLLIESLDRLSRQDIDIASELLRRILRAGVDVVTLSDGEHYTKESLKDPLSLIKSILIMQRAHEESLRKSERVQAAWNRKKELISEGIKISRRCPAWLKLNDDRRTFTIIPDKVEVVKRAFDLRLQGLSFWAITRTLNDEGHLSLNQYTPKQKGWSDTAVKKLLRNRAVIGCFTPAGREEVQGYYPAIISESLFYRVQQLNTGQYGRASVSSNPLSVNLFRGIIKCSECGATIVLGGYALKRFGMYRCPNRSANRCSAKAISRKQTDATILYMLALCDRFETENTDTIDSLKLQREDLQRKISKMAELAIELDDMTIITEKLRDMKNALSKLNHDIEEETKRIKAITTGSLKDIDRTTKEGMIETQLLIKGVLKEIVIDAAKRRCKVTFHNGRIIDLPITENPSEDVTEAIQSLSEVTERGLIDVDVVAI

SEQ ID NO: 27943 - protein, 506 aa, synthetic construct
MRSVITYLRYSSAIQGAEGADSTRRQNDLFKQWLKKNSDAQVVASFSDEGLSGYKGKHLTGQFGDMLARIESGEFPEGTILLVESIDRIGRLEHLETEALMNRILGNGLEIHTLQDGLIYTKDALADDLGISIIQRVKAYIAHQESKQKSFRVSQKWEQRAKLALAGEQRLTKMVPGWIDPDTFKINEHAETVRLIFKLLLSGESLHNIARHLQSNGIKSFSRRKDANGFSVHSVRTILRSETTIGTLPASQRNDRPAIPNYYEAAIDASTFNKAQEILDKNRTGRTPASDNPLTINIFKGLFRCQCGASVHPTGTKNKYAGVYRCNNNPDGRCDVPPLKRKPFDKWMIDNFLGMIDVGNDGEAEGKIASLQHEVEIVTARIKKATALLLEMDDITELKTQVKELNQKRTELQTTIDNMRRKTSLSDKGLPQLKDIDLTTKAGRVECQLILSKHLKGLTLGKDSVTVTLQNDTEIIVPTDPLPLNDGTSIFEIAEKELLEIDAYQL

SEQ ID NO: 27944 - protein, 506 aa, synthetic construct
MRSVITYLRYSSAIQGAEGADSTRRQNELFKQWLRKNSDAQVVASFSDEGLSGYKGKHLTGQFGDMLARIEAGEFPAGAILLVESIDRIGRLEHLETEALMNRIIAHGIEIHTLQDGLIYTRDALSDDLGISIIQRVKSYLAHQESKQKSFRVSEKWKQRAKLALAGEQHLTRNVPGWIDPDTFKCNEHAETVRLIFKLLLDGESLHNIARHLQSNDIKSFSRRKDANGFSVHSVRTVLRSESVIGTLPASQRNDRPAIPNYYEAAIDASTFNKAQEILDKNRKGRTPASDNPLTINIFKGLFRCQCGASVHPTGTKNKYQGVYRCNSHLDGRCDVPPLKRKPFDRWMIDNFLGMIDVGNDGEAEKEIASLQHEVETVTARIKKATALLLEMDDITELKTQVKELNQKRTELQTTINTMKRKTSLSDKGLPQLKDIDLMTKAGRVECQLILSKHLKGLTLGKDSVIVTLQNDTEITIPTNPLPLNDGTLIFEIAEKELLEIDAYQL

SEQ ID NO: 27945 - protein, 506 aa, synthetic construct
MRHVITYLRYSSAIQGAEGADSTRRQNDLFKQWLKKNSDAQVVASFNDEGLSGYKGKHLSGQFGDMLSRIESGEFSKGTILLVEAIDRIGRLEHLETEALMNRIIAHGIEIHTLQDGLIYTRDALSDDLGISIIQRVKSYLAHQESKQKSFRVSEKWKQRAKLALAGEQRLTKMVPGWIDPETFKLNEHAETVRLIFKLLLDGESLHNIARHLQANNISSFSRRKDANGFSVHSVRTILRSETTRGTLPASQRNDRPAIPNYYEAAIDAATFNKAQEILDKNRKGRTPASDNPLTINIFKGLFRCQCGASVHPTGTKNKYQGVYRCNNHLDGRCDVPPLKRKPFDKWMIDNFLGMIDVGNDGEAEGKIAALQHEVEIVTARIKKATALLLEMDDIDELKIQLKGLNQKRTELQTTIDNMRRKASLTDKELPQLKDIDLTTKAGRVECQLILSKHLKGLTLGKDSVTVTLQNDTEITIPTNPLPLNDGTSIFEIADKELLDIDAFRL

SEQ ID NO: 27946 - protein, 507 aa, synthetic construct
MKRVISYIRFSSEKQAKGDSLRRQSKMVTDWLKAHPEYYLDQDLSFRDLGVSGFTGKHLKGGLGDFLTAIEKGLVKAGDTLLIESLDRLSRQDVDQASELLRNILRSGVDVVTLSDGEHYTRESLRDPLALIKSILIMQRAHEESLRKAERIQAAWDAKKEAAKAGIKVSKRCPAWLKLNDDRKSFSVIPEKVETVKRCFQLRLEGKSIWEIVRTLNDEGHQSMSQYKPGSFGQSSVQDLLKNRSVIGYFTPKGREEIAGYFPPIIPETDFYKVQQLSYSRYGRKPASDKPLSVNLFKGVIRCSECGHALIITGFSDTRNGIYRCPLRNENRCSAKGLSRKQTDGTLLALLSRLDRFDSDTTNTIDTLKLHREHISSNIEKLVQLSLEIEDLNAITSKLKQLKGELSQVDADIEKETQRLKSIDVGCLSDCDLTTKAGRIEAQLIIKSAVKEVVLNTAKRRCKVTFHNGKLIDLPITENPSEDVTEAIQSLSEVTERGLIDVDVVEI

SEQ ID NO: 27947 - protein, 509 aa, synthetic construct
MRRAISYIRFSSERQLKGDSVRRQSKLVTDWLDKNPEFYLDSSLSFKDLGKSAFSGKHLKGGLGDFLTAIEKGLVKAGDTLLIESLDRLSRQDIDIASELLRRILRAGVDVVTLSDGEHYTRESLKDPLSLIKSILIMQRAHEESLRKSERVQAAWNRKKELISEGIKVSRRCPAWLRLNDDRRTFTIIPDKVEVVKRAFDLRLQGLSFWAITRTLNDEGHLSLNQYTPKQKGWSDTAVKKLLRNRAVIGCFTPAGREEVQGYYPAIISESLFYRVQQLNTGQYGRASVSSNPLSVNLFRGIIKCSECGATIVLGGYALKRFGMYRCPNRSANRCSAKAISRKQTDATILYMLALCDRFETENTDTIDSLRLQREDLQRKISKMAELAIELDDMTIITEKLRDMKNALSKLNHDIEEETQRIKAITTGSLKDIDRTTKEGMIETQLLIKGVLKEIVIDAAKRRCKVTFHNGRAITLPITENPSEDVTEAIQSLSEVTERGLIAVDEVII

SEQ ID NO: 27948 - protein, 507 aa, synthetic construct
MKRVISYIRFSSEKQAKGDSLRRQSKMVTDWLKAHPEYYLDESLTFRDLGVSGFTGKHLKGGLGDFLTAIEKGLVKAGDTLLIESLDRLSRQAVDRASELLRNILRSGVDVVTLSDGEHYTSESLKDPLALIKSILIMQRAHEESLRKSERIQAAWDAKKEAAKAGIKVSKRCPAWLRLNDDRKSFSVIPEKVETVKRCFQLRLEGKSIWEIVRTLNDEGHQSMSQYKPGSFGQSSVQDLLKNRSVIGYFTPKGCEEIAGYYPAIIDETTFYKVQQLSYARHGRKPASAKPLSVNLFKGVIRCSECGHALIITGFSDTRNGIYRCPLRNENRCSAKGLSRKQTDGTLLTLLSRLDRFDSDTTNTVDMLRLHREHISSNIEKLVQLSLEIEDLSAITSKLKQLKNELSQVDADIEKETQRLKSIDVGCLSDCDLSTKAGRIEAQLIIRSAVKEVVLNTAKRRCKVTFHNGKSITLPITENPSEDVTEAIQSLSEVTERGLIDVDEVIV

SEQ ID NO: 27949 - protein, 506 aa, synthetic construct
MRTVITYLRFSSAIQGAEGADSTRRQNDLFKQWLKKNSDAQVVASFSDEGLSGYKGKHLTGQFGDMLARIESGEFPEGTILLVESIDRIGRLEHLETEALMNRILGNGLEIHTLQDGLIYTKDALADDLGISIIQRVKAYIAHQESKQKSFRVSEKWGQRAKLALAGEQRLTRNVPGWIDPDTFKCNEHAETVRLIFKLLLSGESLHNIARHLQSNGIKSFSRRKDANGFSVHSVRTVLRSESVIGTLPASQRNDRPAIPNYYEAAIDAATFNKAQEILDKNRKGRTPASDNPLTINIFKGLFRCQCGASVHPTGTKNKYAGVYRCNNHLDGRCDVPPLKRKPFDRWMIDNFLGMIDVGNDGESERKIAALQHEVETVTARIKKATALLLEMDDIDELKIQLKELNQKRTELQTTIDSMRRKASLTDKELPQLKDIDLTTKAGRVECQLILSKHLKGLTLGKDSVTVTLQNDTEITIPTNPLPLNDGSPIFEIADKELLDIDAYQL

SEQ ID NO: 27950 - protein, 547 aa, synthetic construct
MKLLVPYIRWSTKEQDSGDSLRRQTNLIDAFYSKHKEEYYLLPAHRYVDKGKSGFHQQHKAQGSDFRRMFENAMSGAIPEGSLIVVENFDRFSRADIDTAIDDVRQILRKGVSILTLGDGELYDKSALTDPVKLIKHIIIAERAHQESLVKQKRIAQVWNHKTQLARELKKPMGKQAPGWLELSEDGSHYIVDEDKASLVNIIYDKRLSGMSMFAICKWLNEQGYPTINQRKVRISKTKKPDGNWSALSVKHILTSRSVLGYLPAKISTEDRKTVLREEIESFYPQIVTDSKFYAVQQLLEETGKGKTSSGEHWLYVNILKGLIRCKCGLVMTPTGIRKPVYQGTYRCNGNKESRCSYGTVSRKLLDTQLCSRLFSKLSQLHDEATDTAKLDELQRRLNTVDSELEKLTETLIQLPNITQIQEALRVKQEEKDELIVQLSREKARVKSVSSLDLSGLDMESVEGRTEAQIIIKRLVKEIVVSGNEKLVDIYLHNGNMIRGFPLDGKDDHTLTLEEATDEMQSLDDMLIFGEPVTRIYPAGDMEEVDA

SEQ ID NO: 27951 - protein, 559 aa, synthetic construct
MKTKLYSYIRFSSMRQNDGSSYERQIRMAREIAAKYDLELVNDYQDLGVSAFKGANSKTGALSRFLDAIGRSVPVGSWLFIENLDRLSRADIVSAQELFLSIIRRGITIVTGMDNKIYSLDTVTANPMDLMFSILLFIRGNEESQTKRNRTNSSALIKIKAHQENPQNPAVAIEEVGKNMWWTDTTSGYVLPHPTYFPVVQEIVELRKNGRSTAEILDHLNETYAPPPAVSNKKHSKWSRAMVERLFHTRALIGIKEVSVDGVNYELKDYYPRVIDDATFYHLKKNIGARAWNFGDKEEVKPIPLLSGIGLLKCDHCGCAMVKVKGTNKRSDQYRYTCDATRSRRLDCEHPNWSFRGDQLEKAVLQLLADKIWIAEDKANPVPALKVQVDEISRKIDNLIALSAMTGATKELADQITTLNSERETLYNQIKMAEEEMYSVDSQGWEKLAEFDLEDVYNEERLKVRFKIKQALKRIGCSRIDRNKNLFVLEYIDGKTQRVVIENSRGTRKGRIFIDLKTINDRQILESNGLVLHPCLDMLTDKNWKPEEEIPGQLQEFGI

SEQ ID NO: 27952 - protein, 507 aa, synthetic construct
MKRVISYIRFSSERQAKGDSLRRQSKMVNDWLKAHPEYYLDQDLSFRDLGVSGFTGKHLKGGLGDFLTAIEKGLVKAGDTLLIESLDRLSRQDVDQASELLRNILRSGVDVVTLSDGEHYTRESLKDPLALIKSILIMQRSHEESLRKSERIQAAWNRKKELISEGIKISKRCPAWLKLNDDRKSFSVIPEKVETVKRCFQLRLEGKSIWEIVRTLNDEGHQTLNQYKAGSFGQTSVQDLLKNRSVIGYFTPKGCEEIADYYPAIIDETTFYKVQQLSYARYGRKPASDKPMAVNLFKGVIRCSECGHALIITGFSDTRNGIYRCPLRNENRCSAKGLSRKQTDGTLLTLLSRLDRFDSDTTNTIDTLKLHREHISSNIEKLVQLSLEIEDLSAITSKLKQLKNELSQVDADIEKETQRLKSIDVGCLSDCDLTTKAGRIEAQLIIKSAVKEVVLNTAKRRCKVTFHNGKVINLPITENPSDNVTEAIQSLSEVTERGLIDVDEVII

SEQ ID NO: 27953 - protein, 559 aa, synthetic construct
MKTKLYSYIRFSSMRQNDGSSYERQIRMAREVAAKYDLELVNDYQDLGVSAFKGANSKTGALSRFLDAIGRSVPVGSWLFIENLDRLSRADIVSAQELFLSIIRRGITIVTGMDNKIYSLDTVTANPMDLMFSILLFIRGNEESQTKRNRTNSSALIKIKAHQENPQNPAVAIEEVGKNMWWTDTTSGYVLPHPVYFPVVQEIVELRKNGRSTAEILDHLNETYTPPPAVSNKKHSKWSRAMVERLFHTRALIGIKEVSVDGVNYELKDYYPRVVDDATFYHLKKNIGARAWNFGDKEEVKPIPLLSGIGLLKCDHCGCAMVKVKGTNKRSDQYRYTCDATRSRRLDCEHPNWSFRGDQLEKAVLQLLADKIWIAEDKANPVPALKVQVDEISRKIDNLIALSAMTGATKELADQITTLNSERETLYNQIKMAEEEMYSVDSQGWEKLAEFDLEDVYNEERLKVRFKIKQALKRIGCSRIDRNKNLFVLEYIDGKTQRVVIENSRGTRKGRIFIDLKTINDRQILESNGLVLHPCLDMLTDKNWKPEEEIPGPLQEFGI

SEQ ID NO: 27954 - protein, 507 aa, synthetic construct
MKRVISYIRFSSEKQAKGDSLRRQSKMVTDWLKAHPEYYLDQDLSFRDLGVSGFTGKHLKGGLGDFLTAIEKGLVKAGDTLLIESLDRLSRQDVDQASELLRNILRSGVDVVTLSDGEHYTRESLKDPLALIKSILIMQRSHEESLRKSERIQAAWDAKKEAAKAGIKISRRCPAWLKLNDDRKSFSIIPEKVETVKRCFQLRLEGKSIWEIVRTLNDEGHQTLNQYKAGKFGQTSVQDLLKNRSVIGYFTPKGREEIAGYFPPIIPETDFYKVQQLSYSRYGRKPASDKPLSVNLFKGVIRCSECGHALIITGFSDTRSGIYRCPLRNENRCSAKGLSRKQTDGTLLALLSRLDRFDSDTTNIIDTLKLHREHISSNIEKLVQLSLEIEDLSAITSKLKQLKGELSQVDADIEKETQRLKSIDVGCLSDCDLTTKAGRIEAQLIIKSAVKEVVLNTAKRRCKVTFHNGKIIDLPITENPSEDVTEAIQSLSEVTERGLIDVDVVEI

SEQ ID NO: 27955 - protein, 506 aa, synthetic construct
MRSVITYLRYSSAIQGAEGADSTRRQNDLFKQWLKKNSDAQVVASFSDEGLSGYKGKHLTGQFGDMLARIESGEFSEGTILLVESIDRIGRLEHLETEALMNRILGNGLEIHTLQDGLIYTKDALADDLGISIIQRVKAYIAHQESKQKSFRVSQKWEQRAKLALAGEQRLTRNVPGWIDPDTFKCNEHAETVRLIFKLLLDGESLHNIARHLQSNDIKSFSRRKDANGFSVHSVRTVLRSESVIGTLPASQRNDRPAIPNYYEAAIDAATFNKAQEILDKNRKGRTPASDNPLTINIFKGLFRCQCGASVHPTGTKNKYAGVYRCNNHLDGRCDVPPLKRKLFDKWMIDNFLGMIDVGNDGEAEGKIASLQHEVEIVTARIKKATALLLEMDDIDELKIQLKELNQKRTELQTMIDNMRRKASLTDKELPQLKDIDLTTKAGRVECQLILSKHLKGLTLGKDSVTVTLQNDTEITIPTNPLPLNDGSPIFEIADKELLDIDAYQL

SEQ ID NO: 27956 - protein, 618 aa, synthetic construct
MESASPGLRVLGRLRLSRLTDESTSIERQRETIQRWAESQGHTVVGWAEDADVSGAVDPFDTPQLGQWLNHRVEEYDVIAAWKLDRLGRNAIQLNKLFGWCLDHNKTLVSCSESIDLSSWAGRMLASVIAGLAEGELEAIRERAKGSRVKLRESARFAGGKPPFGYRKKPRPGGGWMLEIDDSDNGDESPAGLVQRIVADVLDGKPVSRVVSKLNDDGYRTPRDYYETIKSGKPSLKLAVGEKRTSEWRSTALRNLLTNPALRGYVHHKGQVARGDDGMPLQLADEPLVDADEWEALQAIFDGHRERRSHYRRPDASPLVGLVFCYWCHAPLWHNRNVSRGHEYFYYRCPNIQQHERASMIPADQAEKAVAESFLDEAGDLPVMERVWVPGDSAEQELKEATTALDDVFAELETAKSEITRARARKRIAALDERISILEAKPKQEARWEYKQLGGTYRDAWESLGEAERWQLILKSGMTFAFGLTDKGRGPNSVWVSSVYTPEPLRQTLVSGVTQRRTLADADPHRDVSPADHTKHLPEHWATMREAGIQGIETREDKTVVVLKTGERVEIPNWLDEIGISEITNDDDVRIVWTKDGRGFYHQPSGEWIEVPLGEPAG

SEQ ID NO: 27957 - protein, 563 aa, synthetic construct
MAIPHKPTRALIVVRLSRVTDATTSPERQLEECRKLCEQRGYEVVGIAEDLDVSAGLTTPFERPQLGDWLGNRFHEFDVLVVYRMDRIVRRLLDLADLIRWGQTHSVSLVSATEPFLDLTAPFGDIVALLVAKVAELELDAISSRIASAYKHNRQLGKWTGGAQVPWGYLPRQTDDGWRLFPDPEAVPMIHEVAERVLAGEPLRAIAHDMNERKIPTAKDRMNAHLGRELQGYEWTSGGLKRSMTSPTMLGYATVREPKRDANGEIQRDARGRKMFEAEDILRGPDGSPIQRAEPILTNHVFDQLGVELAGRENRKEPTKRSTALLLQVIFCEVCGRPAYRLKGGAGRRPRYRCSSAQYKSTCGNGSVVMEEMDELVESAVLGLLGSSERLSRAWDAGEDTSAELADLDATLADLAGQLGLSVYRAGTPQRAVLDTRIAELSHRRDELAAITTRPAGWTWQPTGETFAEWWERQDIQQRNIYLRSMGVSVRFDKREDLKIKLELGELDRMASEVKAAGRLKGTTELLSAMAEHGIAGVEIQSGKAVFVSKTGERVEVPLDGGE

SEQ ID NO: 27958 - protein, 515 aa, synthetic construct
MKTAIYLRKSRADLEAEARGEGETLAKHRTTLLKIAKEMNLNVLAVREEIVSGESLVKRPEMLALLEEIEDNKYDVVLCMDMDRLGRGGMKEQGIILETFKRSNTKIMTPRKTYDLNDEWDEEYSEFEAFMARKELKIITRRMQRGRIASVEAGNYLGTHAPYGYDIHRLNKRERTLTINSEEASVVRMIFDWYANEDMGANAIRSKLNDLGYKSKLGNEWNPYSILDILKNNVYIGKVTWQKRKEVKRPDAVKRSCARQDKSDWIIADGKHEPIIPESLFEQVQEKLNSRYHVPYNTNGIKNPLAGIIKCSKCGYSMVQRYPKNRKETMDCKHRGCENKSSYTELIEKRLLEALKEWYINYKADFEKHKQDDKLKETQVIQMNEAALRKLEKELVDVQKQKNNLHDLLERGVYTVDMFLERSNVVSDRITEITSTIENLKKEIKTEIKKEKVKKDTIPQVENVLDLYFKTDDPKKKNSLLKSVLEKAVYKKEKWQRLDDFELVLYPKLPQDGDI

SEQ ID NO: 27959 - protein, 507 aa, synthetic construct
MKRVISYIRFSSERQAKGDSLRRQSKMVNDWLKAHPEYYLDESLTFRDLGVSGFTGKHLKGGLGDFLTAIEKGLVKAGDTLLIESLDRLSRQNVDRASELLRNILRSGVDVVTLSDGEHYTRESLKDPLALIKSILIMQRAHEESLRKAERIQAAWDAKKEAAKAGIKISKRCPAWLKLNDDRKSFSIIPEKVETVKRCFQLRLEGKSIWAIVKALNDEGHQTLNQYKAGKFGQTSVQDLLKNRSVIGYFTPKGCEEIAGYYPAIIDETTFYKVQQLSHSRYGKRSVSDKPLSVNLFKGVIRCSECGHALIITGFSDTRNGIYRCPLRNENRCSAKGLSRKQTDGTLLTLLSRLDRFDSDTTNTIDTLKLHREHISSNIEKLVQLSLEIEDLSAITSKLKQLKGELSQVDADIEKETQRLKSIDVGCLSDCDLTTKAGRIEAQLIIKSAVKEVVLNTAKRRCKVTFHNGKVIDLPITENPSEDVTEAIQSLSEVTERGLIDVDVVEI

SEQ ID NO: 27960 - protein, 506 aa, synthetic construct
MRSVITYLRFSSATQGAEGADSTRRQNDLFKQWLKKNSDAQVVASFSDEGLSGYKGKHLTGQFGDMLARIESGEFPEGTLLLVEAIDRIGRLEHLETEALMNRIIAHGIEIHTLQDGLIYTRDALSDDLGISIIQRVKSYIAHQESKQKSFRVSQKWEQRAKLALAGEQRLTKMVPGWIDPDTFKLNEHAETVRLIFKLLLDGESLHNIARHLQSNDIKSFSRRKDANGFSVHSVRTVLRSVSAIGTLPASQRNDRPAIPNYYEAAIDAATFNKAQEILDKKRKGRTPASDNPLTINIFKGLFRCQCGASVHPTGTKRTYQGVYRCNNHLDGRCDVPPLKRKPFDKWMIDNFLGMIDVGNDGEAEGKIAALQHEVEIVTARIKKATALLLEMDDITELKTQVKGLNQKRTELQTTIDNMRRKASLTDKELPQLKDIDLTTKAGRVECQLILSKHLKGLTLGKDSVTVTLQNDTEITIPTNPLPLNDGSPIFEIADKELLDIDAYQL

SEQ ID NO: 27961 - protein, 506 aa, synthetic construct
MRSVITYLRYSSAIQGAEGADSTRRQNDLFKQWLKKNSDAQVVASFSDEGLSGYKGKHLTGQFGDMLARIESGEFPEGTVLLVESIDRIGRLEHLETEALMNRILGNGLEIHTLQDGLIYTKDALADDLGISIIQRVKAYIAHQESKQKSFRVSQKWEQRAKLALAGEQRLTKMVPGWIDPDTFKLNEHAETVRLIFKLLLSGESLHNIARHLQSNGIKSFSRRKDANGFSVHSVRTILRSETTIGTLPASQRNDRPAIPNYYEAAIDASTFNKAQEILGKNRIGRTPASDNPLTINIFKGLFRCQCGASVHPTGTKNKYQGVYRCNNHLDGRCDVPPLKRKPFDKWMLENFLGMIDVGNDGEAEGKIASLQHEVEIVTTRIKKATALLLEMDDIDELKIQLKELNQKRTELQTTIDNMRRKASLTDKELPQLKDIDLTTKAGRVECQLILSKHLKGLTLGKDSVIVTLQNDTEITIPTNPLPLNDGSPIFEIADKELLDIDAYQL

SEQ ID NO: 27962 - protein, 507 aa, synthetic construct
MKRVISYIRFSSEKQSRGDSLRRQSKMVTDWLKAHPEYHLDQDLSFRDLGVSGFTGKHLKGGLGDFLTAIKKGLVKAGDTLLIESLDRLSRQDIDIASELLRNILRSGVDVVTLSDGEHYTRESLRDPLALIKSILIMQRAHEESLRKAERIQAAWDAKKEAAKAGIKVSKRCPAWLKLNDDRKSFSVIPEKVETVKRCFQLRLEGKSIWEIVRTMNAEGHQTLNQYKAGSFGQSSVQDLLKNRSVIGYFTPKGCEEIAGYYPAIIDETTFYKVQQLSYSRYGRKPASDKPLSVNLFKGVIRCSECGHALIITGFSDTRSGIYRCPLRNENRCSAKGLSRKQTDGTLLALLSRLDRFDSDTTNIIDMLRLHREHVSSNIEKLVQLSLEIEDLNAITSKLKQLKGELSQVDADIEKETQRLKSIDVGCLSDCDLTTKAGRIEAQLIIKSAVKEVVLNTAKRRCKVTFHNGKVIDLPITENPSEDVTEAIQSLSEVTERGLIDVDEVII

SEQ ID NO: 27963 - protein, 507 aa, synthetic construct
MKRVISYIRFSSERQAKGDSLRRQSKMVNDWLKAHPEYYLDQDLSFRDLGVSGFTGKHLKGGLGDFLTAIEKGLVKAGDTLLIESLDRLSRQNVDRASELLRNILRSGVDVVTLSDGEHYTRESLKDPLALIKSILIMQRSHEESLRKSERIQAAWNRKKELISEGIKISKRCPAWLKLNDDRKSFSVIPEKVETVKRCFQLRLEGKSIWEIVRTLNAEGHQTLNQYKAGKFGQTSVQDLLKNRSVIGYFTPKGCEEISGYYPAIIDETTFYKVQQLSYARYGRKPASDKPMAVNLFKGVIRCSECGHALIITGFSDTRNGIYRCPLRNENRCSAKGLSRKQTDGTLLALLSRLDRFDSDMTNTIDTLKLHREHISSNIEKLVQLSLEIEDLSAITSKLKQLKGELSQVDADIEKETQRLKSIDVGCLSDCDLTTKAGRIEAQLIIKSAVKGVVLNTAKRRCKVTFHNGKAITLPITENPSDNVTEAIQSLSEVTERSLIDVDEVII

SEQ ID NO: 27964 - protein, 559 aa, synthetic construct
MKTKLYSYIRFSSMRQSDGSSYERQIRMAREVAAKYDLELVNDYQDLGVSAFKGANSKTGALSRFLDAIGRSVPVGSWLFIENLDRLSRADIVSAQELFLSIIRRGITIVTGMDNKIYSLDTVTANPMDLMFSILLFIRGNEESQTKRNRTNSSALIKIKAHQENPQNPAVAIEEVGKNMWWTDTTSGYVLPHPVYFPVVQEIVELRKNGRSTAEILDHLNETYAPPPAVSNKKHSKWSRAMVERLFHTRALIGIKEVSVDGVSYELKDYYPRVIDDPTFYHLKKNIGARAWNFGDKEEVKPIPLLSGIGLLKCDHCGCAMVKVKGTNKRSDQYRYTCDATRSRRLDCEHPNWSFRGDQLEKAVLQLLADKIWIAEDKANPVPALKVQVDEISRKIDNLIALSAMTGATKELADQITTLNSERETLYNQIKMAEEEMYSVDSQGWEKLAEFDLEDVYNEERLKVRFKIKQALKRIGCSRIDRNKNLFVLEYIDGKTQRVVIENSRGTRKGQIFVDLKTINDRQILESNGLVLHPCLDMLTDKNWKPEEEIPGPLQEFGI

SEQ ID NO: 27965 - protein, 547 aa, synthetic construct
MKLLVPYIRWSTKEQDSGDSLRRQTNLIDAFYAKHKDDYYLLPAHRYVDKGKSGFHQQHKAQGSDFRRMFENVMSGAIPEGSLIVVENFDRFSRADIDTAIDDVRQILRKGVSILTLGDGELYDKSALTDPVKLIKHIIIAERAHQESLVKQKRIAQVWNHKTQLARELKKPMGKQAPGWLELSEDGSHYIVDEDKASLVNIIYDKRLSGMSMFAICKWLNEQGYPTINQRKVRISKTKKPDGNWSALSVKHILTSRSVLGYLPAKVSSEDRKTVLREEIEGFYPQIVTDSKFYAVQQLLEETGKGKTSSGEHWLYVNILKGLIRCKCGLVMTPTGIRKPVYQGTYRCNGNKESRCSYGTVSRKLLDTQLCSRLFSKLSQLHDEATDTAKLDELQRRLNTVDSELEKLTETLIQLPNITQIQEALRAKQEEKDELIVQLSREKARVKSVSSLDLSGLDMESVEGRTEAQIIIKRLVKEIVVSGNEKLVDIYLHNGNMIRGFPLDGKDDHTLTLEEATDEMQSLDDMLIFGEPVTRIYPAGDMEEVDA

SEQ ID NO: 27966 - protein, 507 aa, synthetic construct
MKRVISYIRFSSEKQAKGDSLRRQSKMVTDWLKAHPEYYLDQDLSFRDLGVSGFTGKHLKGGLGDFLTAIEKGLVKAGDTLLIESLDRLSRQDVDQASELLRNILRSGVDVVTLSDGEHYTRESLRDPLALIKSILIMQRAHEESLRKAERIQAAWDAKKEAAKAGIKVSKRCPAWLKLNDDRKSFSVIPEKVETVKRCFQLRLEGKSIWEIVRTLNDEGHQSMSQYKPGSFGQSSVQDLLKNRSVIGYFTPKGCEEIAGYYPAIIDETTFYKVQQLSHSRYGKRSVSDKPLSVNLFKGVIRCSECGHALIITGFSDTRNGIYRCPLRNENRCSAKGLSRKQTDGTLLALLSRLDRFDSDTTNTIDTLKLHREHISSNIEKLVQLSLEIEDLSAITSKLRQLKGELSQVDADIEKETQRLKSIDVGCLSDCDLTTKAGRIEAQLIIKSAVKEVVLNTAKRRCKVTFHNGKLIDLPITETPSDNVTEAIQSLSEVTERGLIDVDEVII

SEQ ID NO: 27967 - protein, 505 aa, synthetic construct
MRGVITYLRYSSAIQGVEGADSTRRQNDLFQQWLKKNSDAQVVASFSDEGLSGYKGKHLSGQFGDMLSRIESGEFPEGTILLVESIDRIGRLEHLETEALMNRILGNGLEIHTLQDGLIYTKDALADDLGISIIQRVKAYIAHQESKQKSFRVSQKWEQRAKLALAGEQRLTRNVPGWIDPDTFKCNEHAETVRLIFKLLLSGESLHHIARHLQSNGIPSFSRHRANGFSVHSVRTVLRSESVIGTLPASQRNDRPAIPNYYEAAIDVSTFSKAQEILDKNRKGRTPASDNPLTINVFKGLFRCQCGASVHPTGTKRTYQGVYRCNNHLDGRCDVPPLKRKPFDKWMIDNFLGMIDVVSDGESERKIAALQHEVETVTARIKKATALLLEMDDITELKAQVKELNQKRTELQTTIDTLKRKTSLTDKELPQLKDIDLTTKVGRVECQLILSKHLKGLTLGKDSVTVTLQNDTEIIIPTDPLPLNDGSPIPEIAEKELLEIDAYQL

SEQ ID NO: 27968 - protein, 506 aa, synthetic construct
MRSVITYLRFSSATQGAEGADSTRRQNDLFKQWLKKNSDAQVVASFSDEGLSGYKGKHLTGQFGDMLARIESGEFPEGTLLLVEAIDRIGRLEHLETEALMNRIIAHGIEIHTLQDGLIYTRDALSDDLGISIIQRVKSYIAHQESKQKSFRVSQKWEQRAKLALAGEQRLTKMVPGWIDPDTFKLNEHAETVRLIFKLLLDGESLHNIARHLQSNDIKSFSRRKDANGFSVHSVRTVLRSVSAIGTLPASQRNDRPAIPNYYEAAIDAATFNKAQEILDKNRKGRTPASDNPLTINIFKGLFRCQCGASVHPTGTKNKYQGVYRCNNHLDGRCDVPPLKRKPFDKWMIDNFLGMIDVGNDGEAEGKIAALQHEVEIVTARIKKATALLLEMDDIDELKIQIKELNQRRTELQTTIDSMRRKASLTDKELPQLKDIDLTTKAGRVECQLILSKHLKGLTLGKGSVTITLQNDTEITIPTNPLPLNDGSPIFEIADKELLDIDAYQL

SEQ ID NO: 27969 - protein, 507 aa, synthetic construct
MKRVISYIRFSSEKQAKGDSLRRQSKMVTDWLKAHPEYYLDQDLSFRDLGVSGFTGKHLKGGLGDFLTAIEKGLVKAGDTLLIESLDRLSRQDVDQASELLRNILRSGVDVVTLSDGEHYTSESLKDPLALIKSILIMQRAHEESLRKSERIQAAWDAKKEAAKAGIKVSKRCPAWLKLNDDRKSFSVIPDKVETVKRCFQLRLEGKSIWEIVRTLNAEGHRSMNQYKPGKFGQTSVQDLLKNRSVIGYFTPKGCEEISGYFPPIIPETDFYKVQQLSYSRYGRKPVSDKPLSVNLFKGVIRCSECGHALIITGFSDTKNGIYRCPLRNENRCSAKGLSRKQTDGTLLTLLSRLDRFDSDTTNIIDMLRLHREHISSNIEKLVQLSLEIEDLNAITSKLKQLKGELSQVDADIEKETQRLKSIDVGCLSDCDLTTKAGRIEAQLIIKSAVKEVVLNTARRRCKVTFHNGKVIDLPITENPSEDVTEAIQSLSEVTAKGLIDVDVVEI

SEQ ID NO: 27970 - protein, 546 aa, synthetic construct
MKQADGSSYERQKRTAAEIAAKYDLELVTSYQDFGVSAFKGANSKTGALSRFLDEIGRSVPVGSWLVVENLDRISRQSIIEAQELFLSIIRRGITIVTGMDGRVYSRESVNANPIDLLLSVMLFARANEESQTKRNRTNSSALIKIKAHQENPQNPAVAIEEVGKNMWWTDTTSGYVLPHPVYFPVVQEIVELRKNGRSTAEILDHLNETYAPPPAVSNKKHSKWSRAMVERLFHTRALIGIKEVSVDGVNYELKDYYPRVIDDATFYHLKKNIGARAWNFGDKEEVKPIPLLSGIGLLKCDHCGCAMVKVKGTNKRSDQYRYTCDATRSRRLDCEHPNWSFRGDQLEKAVLQLLADKIWIAEDKANPVPALKVQVDEISRKIDNLIALSAMTGATKELADQITTLNSERETLYNQIKMAEEEMYSVDSQGWEKLAEFDLEDVYNEERLKVRFKIKQALKRIGCSRIDRNKNLFVLEYIDGKTQRVVIENSRGTRKGQIFVDLKTINDRQILESNGLVLHPCLDMLTDKNWKPEEEIPGPLQEFGI

SEQ ID NO: 27971 - protein, 507 aa, synthetic construct
MKRVISYIRFSSERQAKGDSLRRQSKMVNDWLKAHPEYYLDQDLSFRDLGVSGFTGKHLKGGLGDFLTAIEKGLVKAGDTLLIESLDRLSRQDVDQASELLRNILRSGVDVVTLSDGEHYTRESLKDPLALIKSILIMQRSHEESLRKSERIQAAWNRKKELISEGIKISKRCPAWLKLNDDRKSFSVIPEKVETVKRCFQLRLEGKSIWEIVRTLNDEGHQTLNQYKAGSFGQTSVQDLLKNRSVIGYFTPKGCEEIADYYPAIIDETTFYKVQQLSYARYGRKPASDKPMAVNLFKGVIRCSECGHALIITGFSDTRNGIYRCPLRNENRCSAKGLSRKQTDGTLLTLLSRLDRFDSDTTNTIDTLKLHREHISSNIEKLVQLSLEIEDLSAITSKLKQLKGELSQVDADIEKETQRLKSIDVGCLSDCDLSTKAGRIEAQLIIRSAVKEVVLNTAKRRCKVTFHNGRAITLPITETPSEDVTEAIQSLSEVTERGLIDVDEVII

SEQ ID NO: 27972 - protein, 507 aa, synthetic construct
MKRVISYIRFSSEKQAKGDSLRRQSKMVTDWLKAHPEYYLDQDLSFRDLGVSGFTGKHLKGGLGDFLTAIEKGLVKAGDTLLIESLDRLSRQDIDIASELLRNILRSGVDVVTLSDGEHYTRESLKDPLALIKSILIMQRAHEESLRKSERIQAAWNRKKELISEGIKVSKRCPAWLKLNDDRKTFSVIPEKVETVKRCFQLRLEGKSIWAIVKALNDEDRQSMNQYKPGKFGQTSVQDLLKNRSVIGYFTPKGCEEIAGYYPAIIDETTFYKVQQLSYARHGRKPASAKPLSVNLFKGVIRCSECGHALIITGFSDTRNGIYRCPLRNENRCSAKGLSRKQTDGTLLALLSRLDRFDSDTTNIIDTLKLHREHISSNIEKLVQLSLEIEDLSAITSKLKQLKGELSQVDADIEKETQRLKSIDVGCLSDCDLTTKAGRIEAQLIIKSAVKEVVLNTVKRRCKVTFHNGKVIDLSITENPSEDVTEAIQSLSEVTERGLIDVDEVII

SEQ ID NO: 27973 - protein, 506 aa, synthetic construct
MRHVITYLRYSSAIQGAEGADSTRRQNDLFKQWLRKNSDAQVVASFNDEGLSGYKGKHLSGQFGDMLSRIESGEFSKGTILLVEAIDRIGRLEHLETEALMNRIIAHGIEIHTLQDGLIYTRDALSDDLGISIIQRVKSYLAHQESKQKSFRVSEKWKQRAKLALAGEQRLTKMVPGWIDPETFKLNEHAETVRLIFKLLLDGESLHNIARHLQSNDIKSFSRRKDANGFSVHSVRTVLRSESVIGTLPASQRNDRPAIPNYYEAAIDAATFNKAQEILDKNRKGRTPASDNPLTINIFKGLFRCQCGASVHPTGTKNKYAGVYRCNNHLDGRCDVPPLKRKPFDRWMIDNFLGMIDVGNDGESERKIAALQHEVEIVTARIKKATALLLEMDDITELKAQVKGLNQKRTEIQTTIDTLKRKTSLTDKELPQLKDIDLTTKAGRVECQLILSKHLKGLTLGKDSVTVTLQNDTEITIPTNPLPLNDGSPIFEIADKELLDIDAYQL

SEQ ID NO: 27974 - protein, 507 aa, synthetic construct
MKRVISYIRFSSEKQSRGDSLRRQSKMVTDWLKAHPEYYLDQDLSFRDLGVSGFTGKHLKGGLGDFLTAIEKGLVKAGDTLLIESLDRLSRQDIDIASELLRNILRSGVDVVTLSDGEHYTRESLKDPLALIKSILIMQRAHEESLRKSERIQAAWNRKKELISEGIKVSKRCPAWLKLNDDRKSFSVIPEKVETVKRCFQLRLEGKSIWEIVRTMNAEGHQTLNQYKAGSFGQTSVQDLLKNRSVIGYFTPKGCEEIAGYYPAIIDETTFYKVQQLSYARHGRKPASAKPLSVNLFKGVIRCSECGHALIITGFSDTRNGIYRCPLRNENRCSAKGLSRKQTDGTLLALLSRLDRFDSDTTNTIDTLKLHREHISSNIEKLVQLSLEIEDLNAITNKLKQLKNELSQVDADIEKETQRLKSIDVGCLSDCDLTTKAGRIEAQLIIKSAVKEVVLNTAKRRCKVSFHNGKVIDLPITENPSDNVTEAIQSLSEVTERGLIDVDEVII

SEQ ID NO: 27975 - protein, 507 aa, synthetic construct
MKRVISYIRFSSEKQAKGDSLRRQSKMVTDWLKAHPEYYLDQDLSFRDLGVSGFTGKHLKGGLGDFLTAIEKGLVKAGDTLLIESLDRLSRQAVDRASELLRNILRSGVDVVTLSDGEHYTSESLKDPLALIKSILIMQRAHEESLRKSERIQAAWDAKKEAAKAGIKVSKRCPAWLKLNDDRKSFSVIPEKVATVKRCFQLRLEGKSIWEIVRTLNDEGHQTLNQYKPGKFGQTSVQDLLKNRSVIGYFTPKGREEIAGYFPPIIPETDFYKVQQLSYSRYGRKPASDKPLSVNLFKGVIRCSECGHALIITGFSDTRSGIYRCPSRNENRCNAKGLSRKQTDGTLLALLSRLDRFDSDMTNTVDTLKLHREHISNNIEKLVQLSLEIEDLSAITSKLKQLKGELSQVDADIEKETQRLKSIDVGCLSDCDLTTKAGRIEAQLIIKSAVKEVVLNTARRRCKVTFHNGKVIDLPITENPSEDVTEAIQSLSEVTAKGLIDVDVVEI

SEQ ID NO: 27976 - protein, 559 aa, synthetic construct
MKTKLYSYIRFSSMRQSDGSSYERQIRMAREIAAKYDLELVNDYQDLGVSAFKGANSKTGALSRFLDAIGRSVPVGSWLFIENLDRLSRADIVSAQELFLSIIRRGITIVTGMDNKIYSLDTVTANPMDLMFSILLFIRGNEESQTKRNRTNSSALIKIKAHQENPQNPAVAIEEVGKNMWWTDTTSGYVLPHPVYFPVVQEIVELRKNGRSTAEILDHLNETYAPPPAVSNKKHSKWSRAMVERLFHTRALIGIKEISVDGVNYELKDYYPRVIDDATFYHLKKNIGARAWNFGDKEEVKPIPLLSGIGLLKCDHCGCAMVKVKGTNKRSDQYRYTCDATRSRRLDCEHPNWSFRGDQLEKAVLQLLADKIWIAEDKANPVPALKVQVDEISRKIDNLIALSAMTGATKELADQITTLNSERETLYNQIKMAEEEMYSVDSQGWEKLAEFDLEDVYNEERLKVRFKIKQALKRIGCSRIDRNKNLFVLEYIDGKTQRVVIENSRGTRKGQIFVDLKTINDRQILESNGLVLHPCLDMLTDKNWKPEEEIPGPLQEFGI

SEQ ID NO: 27977 - protein, 559 aa, synthetic construct
MKTKLYSYIRFSSMRQNDGSSYERQIRMAREIAAKYDLELVNDYQDLGVSAFKGANSKTGALSRFLDAIGRSVPVGSWLFIENLDRLSRADIVSAQELFLSIIRRGITIVTGMDNKIYSLDTVTANPMDLMFSILLFIRGNEESQTKRNRTNSSALIKIKAHQENPQNPAVAIEEVGKNMWWTDTTSGYVLPHPVFFPVVQEIVELRKNGRSTAEILDHLNETYAPPPAVSNKKHSKWSRAMVERLFHTRALIGIKEVSVDGVNYELKDYYPRVIDDATFYHLKKNIGARAWNFGDKEEVKPIPLLSGIGLLKCDHCGCAMVKVKGTNKRSDQYRYTCDATRSRRLDCEHPNWSFRGDQLEKAVLQLLADKIWIAEDKANPVPALKVQVDEISRKIDNLIALSAMTGATKELADQITTLNSERETLYNQIKMAEEEMYSVDSQGWEKLAEFDLEDVYNEERLKVRFKIKQALKRIGCSRIDRNKNLFVLEYIDGKTQRVVIENSRGTRKGQIFVDLKTINDRQILESNGLVLHPCLDMLTDKNWKPEEEIPGPLQEFGI

SEQ ID NO: 27978 - protein, 506 aa, synthetic construct
MRHVITYLRYSSAIQGAEGADSTRRQNDLFKQWLKKNSDAQVVASFSDEGLSGYKGKHLTGQFGDMLARIESGEFPEGTILLVESIDRIGRLEHLETEALMNRILGNGLEIHTLQDGLIYTKDALADDLGISIIQRVKAYIAHQESKQKSFRVSQKWEQRAKLALAGEQRLTKMVPGWIDPDTFKLNEHAETVRLIFKLLLSGESLHNIARHLQSNGIKSFSRRKDANGFSVHSVRTILRSVTTIGTLPASQRNDRPAIPNYYEAAIDAATFNKAQEILDKNRKGRTPASDNPLTINIFKGLFRCQCGASVHPTGTKNKYAGVYRCNNHLDGRCDVPPLKRKPFDRWMIDNFLGMIDVGNDGESERKIAALQHEVEIVTSRIKKATALLLEMDDITELKTQVKELNQKRTALQTTIDNMRRKTSLTDKELPQLKDIDLTTKAGRVECQLILSKHLKGLTLGKDSVTVTLQNDTEITIPTNPLPLNDGTSIFEIAEKNLLNIDTFQL

SEQ ID NO: 27979 - protein, 507 aa, synthetic construct
MKRVISYIRFSSEKQAKGDSLRRQSKMVTDWLKAHPEYYLDESLTFRDLGVSGFTGKHLKGGLGDFLTAIEKGLVKAGDTLLIESLDRLSRQNVDRASELLRNILRSGVDVVTLSDGEHYTRESLRDPLALIKSILIMQRAHEESLRKSERIQAAWNRKKELISEGIKISKRCPAWLKLNDDRKSFSVIPEKVETVKRCFQLRLEGKSIWEIVRTLNDEGHQSMSQYKPGSFGQSSVQDLLKNRSVIGYFTPKGCEELSGYYPAIIDETTFYKVQQLSYARYGRKPASDKPLSVNLFKGVIRCSECGHALIITGFSDTRNGIYRCPLRNENRCSAKGLSRKQTDGTLLALLSRLDRFDSDTTNTIDTLKLHREHISSNIEKLVQLSLEIEDLSAITSKLRQLKGELSQVDADIEKETQRLKSIDVGCLSDCDLTTKAGRIEAQLIIKSAVKEVVLNTAKRRCKVTFHNSKVINLPITETPSDNVTEAIQSLSEVTERGLIDVDEVII

SEQ ID NO: 27980 - protein, 507 aa, synthetic construct
MKRAISYIRFSSEKQSRGDSLRRQSKMVNDWLKAHPEYYLDQDLSFRDLGVSGFTGKHLKGGLGDFLTAIEKGLVKAGDTLLIESLDRLSRQNVDRASELLRNILRSGVDVVTLSDGEHYTRESLKDPLALIKSILIMQRAHEESLRKAERIQAAWDAKKEAAKAGIKISRRCPAWLKLNDDRKSFSVIPEKVETVKRCFQLRLEGKSIWEIVRTLNAEGHRSMNQYKPGKFGQTSVQDLLKNRSVIGYFTPKGCEEISGYYPAIIDETTFYKVQQLSHSRYGKRSVSDKPLSVNLFKGVIRCSECGHALIITGFSDTRNGIYRCPLRNENRCNAKGLSRKQTDGTLLALLSRLDRFDSDMTNVIDALKLHREHISNNIEKLVQLSLEIEDLSAITIKLKQLKGELSQVDADIEKETQRLKSIDVGCLSDCDLTTKAGRIEAQLIIKSAVKEVVLNAAKRRCKVTFHNSKSITLPITENPSEDVTEAIQSLSEVTEKGLIDVDVVEI

SEQ ID NO: 27981 - protein, 507 aa, synthetic construct
MKRVISYIRFSSEKQAKGDSLRRQSKMVNDWLKAHPEYYLDQDLSFRDLGVSGFTGKHLKGGLGDFLTAIEKGLVKAGDTLLIESLDRLSRQNVDRASELLRNILRSGVDVVTLSDGEHYTRESLKDPLALIKSILIMQRSHEESLRKSERIQAAWNRKKELISEGIKISKRCPAWLKLNDDRKSFSVIPEKVETVKRCFQLRLEGKSIWEIVRTLNDEGHQSMSQYKPGKFGQTSVQDLLKNRSVIGYFTPKGREEISGYYPAIIDETTFYKVQQLSYARYGRKPASDKPLSVNLFKGVIRCSECGHALIITGFSDTRSGIYRCPLRNENRCSAKGLSRKQTDGTLLALLSRLDRFDSDTTNTIDTLKLHREHISSNIEKLVQLSLEIEDLNAITSKLKQLKGELSQVDADIEKETQRLKSIDVGCLSDCDLTTKAGRIEAQLIIKSAVKEVVLNTAKRRCKVTFHNGKLIDLPITENPSEDVTEAIQSLSEVTERGLIDVDVVAI

SEQ ID NO: 27982 - protein, 507 aa, synthetic construct
MKRVISYIRFSSEKQAKGDSLRRQSKMVTDWLKAHPEYYLDQDLSFRDLGVSGFTGKHLKGGLGDFLTAIEKGLVKAGDTLLIESLDRLSRQDIDIASELLRRILRAGVDVVTLSDGEHYTKESLKDPLALIKSILIMQRAHEESLRKAERIQAAWDAKKEAAKAGIKISRRCPAWLKLNDDRKSFSVIPEKVETVKRCFQLRLEGKSIWEIVRTLNAEGHRSMNQYKPGKFGQTSVQDLLKNRSVIGYFTPKGCEEISGYYPAIIDETTFYKVQQLSYSRYGRKPASDKPLSVNLFKGVIRCSECGHALIITGFSDTRNGIYRCPLRNENRCSAKGLSRKQTDGTLLALLSRLDRFDSDTTNIIDMLRLHREHVSSNIEKLVQLSLEIEDLSAITSKLKQLKGELSQVDADIEKETQRLKSIDVGCLSDCDLTTKAGRIEAQLIIKSAVKEVVLNTAKRRCKVTFHNGRAITLPITENPSEDVTEAIQSLSEVTERGLIDVDEVII

SEQ ID NO: 27983 - protein, 559 aa, synthetic construct
MKTKLYSYIRFSSMRQNDGSSYERQIRMAREIAVKYDLELVNDYQDLGVSAFKGANSKTGALSRFLDAIGRSVPVGSWLFIENLDRLSRADIVSAQELFLSIIRRGITIVTGMDNKIYSLDTVTANPMDLMFSILLFIRGNEESQTKRNRTNSSALIKIKAHQENPQNPAVAIEEVGKNMWWTDTTSGYVLPHPTYFPVVQEIVELRKNGRSTAEILDHLNETYAPPPAVSNKKHSKWSRAMVERLFHTRALIGIKEVSVDGVNYELKDYYPRVIDDATFYHLKKNIGARAWNFGDKEEVKPIPLLSGIGLLKCDHCGCAMVKVKGTNKRSDQYRYTCDATRSRRLDCEHPNWSFRGDQLEKAVLQLLADKIWIAEDKANPVPALKVQVDEISRKIDNLIALSAMTGATKELADQITTLNSERETLYNQIKMAEEEMYSVDSQGWEKLAEFDLEDVYNEERLKVRFKIKQALKRIGCSRIDRNKNLFVLEYIDGKTQRVVIENSRGTRKGRIFIDLKTINDRQILESNGLVLHPCLDMLTDKNWKPEEEIPGPLQEFGI

SEQ ID NO: 27984 - protein, 509 aa, synthetic construct
MRRAISYIRFSSERQLKGDSVRRQSKLVTDWLDKNPEFYLDSSLSFKDLGKSAFSGKHLKGGLGDFLTAIEKGLVKAGDTLLIESLDRLSRQDIDIASELLRRILRAGVDIVTLSDGEHYTRESLKDPLSLIKSILIMQRAHEESLRKSERVQAAWNRKKELISEGIKVSRRCPAWLRLNDDRRTFTIIPDKVEVVKRAFDLRLQGLSFWAITRTLNDEGHLSLNQYTPKQKGWSDTAVKKLLRNRAVIGCFTPAGREEVQGYYPAIISESLFYRVQQLNTGQYGRASVSSNPLSVNLFRGIIKCSECGATIVLGGYALKRFGMYRCPNRSANRCSAKAISRKQTDATILYMLALCDRFETENTDTIDSLKLQREDLQRKISKMAELAIELDDMTIITEKLRDMKNALSKLNHDIEEETQRIKAITTGSLKDIDRTTKEGMIETQLLIKGVLKEIVIDAAKRRCKVTFHNGKVIDLPITENPSEDVTEAIQSLSEVTERGLIDVDVVAI

SEQ ID NO: 27985 - protein, 559 aa, synthetic construct
MKTKLYSYIRFSSMRQSDGSSYERQIRMAREIAAKYDLELVNDYQDLGVSAFKGANSKTGALSRFLDAIGRSVPVGSWLFIENLDRLSRADIVSAQELFLSIIRRGITIVTGMDNKIYSLDTVTANPMDLMFSILLFIRGNEESQTKRNRTNSSALIKIKAHQENPQNPAVAIEEVGKNMWWTDTTSGYVLPHPVYFPVVQEIVVLRKNGRSTAEILDHLNETYAPPPAVSNKKHSKWSRAMVERLFHTRALIGIKEISVDGVNYELKDYYPRVIDDATFYHLKKNIGARAWNFGDKEEVKPIPLLSGIGLLKCDHCGCAMVKVKGTNKRSDQYRYTCDATRSRRLDCEHPNWSFRGDQLEKAVLQLLADKIWIAEDKANPVPALKVQVDEISRKIDNLIALSAMTGATKELADQITTLNSERETLYNQIKMAEEEMYSVDSQGWEKLAEFDLEDVYNEERLKVRFKIKQALKRIGCSRIDRNKNLFVLEYIDGKTQRVVIENSRGTRKGQIFVDLKTINDRQILESNGLVLHPCLDMLTDKNWKPEEEIPGPLQEFGI

SEQ ID NO: 27986 - protein, 506 aa, synthetic construct
MRSVITYLRFSSATQGAEGADSTRRQNDLFKQWLKKNSDAQVVASFNDEGLSGYKGKHLSGQFGDMLSRIESGEFSEGTILLVEAIDRIGRLEHLETEALMNRIIAHGIEIHTLQDGLIYTRDALSDDLGISIIQRVKSYIAHQESKQKSFRVSQKWEQRAKLALAGEQRLTKMVPGWIDPDTFKCNEHAETVRLIFKLLLDGESLHNIARHLQSNDIKSFSRRKDANGFSVHSVRTVLRSESVIGTLPASQRNDRPAIPNYYEAAIDAATFNKAQEILDKNRKGRTPASDNPLTINIFKGLFRCQCGASVHPTGTKNKYAGVYRCNNHLDGRCDVPPLKRKPFDKWMIDNFLGMIDVGNDGESERKIAALQHEVEIVTARIKKATALLLEMDDITELKAQVKGLNQKRTEIQTTIDTLKRKTSLTDKELPQLKDIDLMTKAGRVECQLILSKHLKGLTLGKDSVTVTLQNDTEIIVPTDPLPLNDGTSIFEIAEKELLEIDAYQL

SEQ ID NO: 27987 - protein, 506 aa, synthetic construct
MRSVITYLRYSSAIQGAEGADSTRRQNDLFKQWLKKNSDAQVVASFSDEGLSGYKGKHLTGQFGDMLARIESGEFPEGTILLVESIDRIGRLEHLDTEALMNRILGNGLEIHTLQDGLIYTKDALADDLGISIIQRVKAYIAHQESKQKSFRVSQKWEQRAKLALAGEQRLTKMVPGWIDPDTFKLNEHAETVRLIFKLLLSGESLHNIARHLQANNISSFSRRKDANGFSVHSVRTILRSETTIGTLPASQRNDRPAIPNYYEPAIDASTFNKAQEILDKNRKGRTPASDNPLTINIFKGLFRCQCGASVHPTGTKNKYAGVYRCNNHLDGRCDVQPLKRKPFDRWMIDNFLGMIDVGNDGKSKRKIASLQHEVEIVTARIKKATALLLEMDDITELKTQVRELNQKRTELQTTIDTLKRKTSLTDKELTQLKDIDLMTKAGRVECQLILSKHLKGLTLGKDSVTVTLQNDTEITIPTNPLPLNDGSPIFEIADKELLDIDAYQL

SEQ ID NO: 27988 - protein, 547 aa, synthetic construct
MKLLATYIRWSTREQDSGDSLRRQTNLIDAFYSKHKNDYYLLPAHRYVDKGKSGFHQQHKAQGSDFRRMFENVMSGAIPEGSLIVVENFDRFSRADIDTAIDDVRQILRKGVSILTLGDGELYDKSALTDPVKLIKHIIIAERAHQESLVKQKRIAQVWNHKTQLARELKKPMGKQAPGWLELSEDGSHYIVDEDKASLVNIIYDKRLSGMSMFAICKWLNEQGYPTINQRKVRISKTKKPDGNWSALSVKHILTSRSVLGYLPAKISTEDRKTVLREEIESFYPQIVTDSKFYAVQQLLEETGKGKTSSGEHWLYVNILKGLIRCKCGLVMTPTGIRKPVYQGTYRCNGNKESRCSYGTVSRKLLDTQLCSRLFSKLSQLHDEATDTAKLDELQRRLNTVDSELEKLTETLIQLPNITQIQEALRVKQGEKDELIVQLSREKARLKSVSSLDLSGLDMESVEGRTEAQIIIKRLVKEIVVSGNKKLVDIYLHNGNMIRGFPLDGKDDHTLTLEEATDEMQPLDDMLIFGEPVTRIYPAGDMEEVDA

SEQ ID NO: 27989 - protein, 507 aa, synthetic construct
MKRVISYIRFSSERQAKGDSLRRQSKMVNDWLKAHPEYYLDESLTFRDLGVSGFTGKHLKGGLGDFLTAIEKGLVKAGDTLLIESLDRLSRQNVDRASELLRNILRSGVDVVTLSDGEHYTRESLKDPLALIKSILIMQRAHEESLRKAERIQAAWDAKKEAAKAGIKISKRCPAWLKLNDDRKSFSIIPEKVETVKRCFQLRLEGKSIWAIVKALNDEGHQTLNQYKAGKFGQTSVQDLLKNRSVIGYFTPKGCEEIAGYYPAIIDETTFYKVQQLSHSRYGKRSVSDKPLSVNLFKGVIRCSECGHALIITGFSDTRNGIYRCPLRNENRCSAKGLSRKQTDGTLLTLLSRLDRFDSDMTNTLDTLKLHREHISSNIEKLVQLSLEIEDLSAITIKLKQLKGELSQVDADIEKETQRLKSIDVGCLSDCDLTTKAGRIEAQLIIKSAVKEVVLNTAKRRCKVTFHNGRAITLPITENPSKDVTEAIQSLSEVTERGLIDVDEVII

SEQ ID NO: 27990 - protein, 545 aa, synthetic construct
MKLLVTYIRWSTKEQDAGDSLRRQTNLIDAFYAKHKDDYYLLPAHRYVDKGKSGFHQQHKNQGSDFRRMFENVMSGTIPEGSLIVVENFDRFSRADIDTAIDDVRQILRKGVSILTLGDGELYDKSALTDPVKLIKHIIIAERAHQESLVKQKRIAQVWNHKTQLARELKKPMGKQAPGWLELSEDGSHYIVDEDKTSLVNIIYDKRLSGMSMFAITKWLNEQGYPTINQRKVRISKTKKPDGNWSALSVKHILTSRSVLGYLPAKISTEDRKTVLREEIEGFYPQIVTDSKFYAVQQLLKDTGKGKTSSGEHWLYVNILRGLVRCRCGLVMIPSGIRKPVYQGVYRCNGRHEGRCNYGTVSRKLLDTQLCSRLFSKLSQLHDEATDTAKLDELQRRLNTVDGELEKLTETLIQLPNITQIQEALRIKQEEKDELIVQLSREKARVKSVSSLDLSGLDMESVEGRTEAQIIIKRLVKEIVVSGNEKLVDIYLHNGNMIRGFPLDGKDDHTLTLEEATDEMQPLDDMLIFGEPVTRVYPAGDMEEV

SEQ ID NO: 27991 - protein, 507 aa, synthetic construct
MKRVISYFRFSSEKQAKGDSLRRQSKMVTDWLKAHPEYYLDESLTFRDLGVSGFTGKHLKGGLGDFLTAIEKGLVKAGDTLLIESLDRLSRQAVDRASELLRNILRSGVDVVTLSDGEHYTKESLRDPLSLIKSILIMQRAHEESLRKSERIQAAWNRKKELISEGIKISRRCPAWLKLNDDRKSFSVIPEKVETVKRCFQLRLEGKSIWEIVRTLNDEGHQTLHQHKPGSFGQSSVQDLLKNRSVIGYFTPKGCEEISGYYPAIIDETTFYKVQQLSYSRYGRKPVSDKPLSVNLFKGVIRCSECGHALIITGFSDTRSGIYRCPLRNENRCSAKGLSRKQTDGTLLTLLSRLDRFDSDMTNTIDMLRLHREHISSNIEKLVQLSLEIEDLSAITIKLKQLKGELSQVDADIEKETQRLKSIDVGCLSDCDLTTKAGRIEAQLIIKSAVKEVVLNTAKRRCKVTFHNGKVIDLPITETPSEDVTEAIQSLSEVTERGLIDVDEVIV

SEQ ID NO: 27992 - protein, 507 aa, synthetic construct
MKRVISYIRFSSERQAKGDSLRRQSKMVNDWLKAHPEYYLDQDLSFRDLGVSGFTGKHLKGGLGDFLTAIEKGLVKAGDTLLIESLDRLSRQDVDQASELLRNILRSGVDVVTLSDGEHYTRESLKDPLALIKSILIMQRSHEESLRKSERIQAAWNRKKELISEGIKISKRCPAWLKLNDDRKSFSVIPEKVETVKRCFQLRLEGKSIWEIVRTLNAEGHQTLNQYKAGSFGQTSVQDLLKNRSVIGYFTPKGCEEIADYYPAIIDETTFYKVQQLSYARYGRKPASDKPMAVNLFKGVIRCSECGHALIITGFSDTRNGIYRCPLRNENRCSAKGLSRKQTDGTLLTLLSRLDRFDSDTTNTIDTLKLHREHISSNIEKLVQLSLEIEDLSAITSKLKQLKNELSQVDADIEKETQRLKSIDVGCLSDCDLTTKAGRIEAQLIIKSAVKEVVLNTAKRRCKVTFHNGKVIDLPITENPSDNVTEAIQSLSEVTERGLIDVDEVII

SEQ ID NO: 27993 - protein, 559 aa, synthetic construct
MKTKLYSYIRFSSMRQNDGSSYERQIRMAREVAAKYDLELVNDYQDLGVSAFKGANSKTGALSRFLDAIGRSVPVGSWLFIENLDRLSRADIVSAQELFLSIIRRGITIVTGMDNKIYSLDTVTANPMDLMFSILLFIRGNEESQTKRNRTNSSALIKIKAHQENPQNPAVAIEEVGKNMWWTDTTSGYVLPHPVYFPVVQEIVELRKNGRSTAEILDHLNETYAPPPAVSNKKHSKWSRAMVERLFHTRALIGIKEVSVDGVNYELNNYYPRVIDDATFYHLKKNIGARAWNFGDKEEVKPIPLLSGIGLLKCDHCGCAMVKVKGTNKRSDQYRYTCDAIRSRRLDCEHPNWSFRGDQLEKAVLQLLADKIWIAEDKANPVPALKVQIDEISRKIDNLIALSAMTGATKELADQITALNSERETLYNQIKMAEEEMYSVDSQGWEKLAEFDLEDVYNEERLKVRFKIKQALKRIGCSRIDRNKNLFVLEYIDGKTQRVVIENSRGTRKGRIFIDLKTINDRQILESNGLVLHPCLDMLTDKNWKPEEEIPGPLQEFGI

SEQ ID NO: 27994 - protein, 506 aa, synthetic construct
MRTVITYLRFSSATQGAEGADSTRRQNELFKQWLRKNSDAQVVASFSDEGLSGYKGKHLTGQFGDMLARIEAGEFPAGAILLVESIDRIGRLEHLETEALMNRIIAHGIEIHTLQDGLIYTRDALSDDLGISIIQRVKSYLAHQESKQKSFRVSEKWKQRAKLALAGEQHLTRNVPGWIDPDTFKCNEHAETVRLIFKLLLDGESLHNIARHLQSNDIKSFSRRKDANGFSVHSVRTVLRSESVIGTLPASQRNDRPAIPNYYEAAIDASTFNKAQEILDKNRKGRTPASDNPLTINIFKGLFRCQCGASVHPTGTKNKYQGVYRCNSHLDGRCDVPPLKRKPFDRWMIDNFLGMIDVGNDGEAEGKIASLQHEVEIVTTRIKKATALLLEMDDIDELKIQLKELNQKRTELQTTIDNMRRKASLTDKELPQLKDIDLTTKAGRVECQLILSKHLKGLTLGKDSVTVTLQNDTEITIPTNPLPLNDGSPIFEIADKELLDIDAYQL

SEQ ID NO: 27995 - protein, 444 aa, synthetic construct
MAAYCRVSTDQLEQLSSYEAQVNYYTTYIENHPDYECAGIYADEGISGTNTKKREQFNKMIEDCKAGKIDMIITKSISRFARNTLDCLNYVRMLKELGVGVIFEKENINTLDSKGEVLLSILSSLAQDESRSISENSTWGIRRRFEQGKVIVNHKKFLGYDKDEDGNLIINEEQAKIVRRIYREYLEGKGTNRIAKDLEKDKVPKWDGSFKWYESSIRKMLQNEKYKGDALLQKTYTVDFLTKKRLENDGQVPKYYVEESHPAIIDKDTWEAVQLEMERRRAYAKEHGMKRLEYTTVKNPFAGKVICGNCNKIYGRKTWNSTSKSLKRIIWRCNNKYPSKGVVGCESRHIDDKVLYQAFIDTFNKVVENMDDFIKKWEEQIQSEDILKRVTARRFIKLFKEAKPIKEFDIDYHLKILEKIAVYNERLIVSLLDGTEVELKIEYV

SEQ ID NO: 27996 - protein, 428 aa, synthetic construct
MRVRIIEPIRNAQDVKKRVCAYARVSTDSEAQGESLENQTIYYENLITSNPKYEFIGVFADKGITGTTENRPEFRKMIEVARDGHIDLIITKSISRFARNTTVMLEVVRELKELGVEVRFEKENINTLSGDGELMLAVLSSFAQEESKNVSDNIKWRVRKKFEAGEVMVNTTRFLGYDKDEYGDLVINEEEAEIVKIIFHEYLSGKGTFVIAKELNQRGVPTVTDGRWHDSTILTILKNEKYKGDVLLQKTYILDHLTKKKVKNTGEVDSYYIENNHPAIISKEMWEKVQEEIIKRGRAKGNTGGRDKYTKRYPLTGMLYCSKCAASLIRRTWNSKHSCRKIVWQCSNYIKNGKDACLGTKIDDEVVSRLNIKEEIIVKEGIKDGEKHYSYTSKSKQAEHSREARTTEKENGSILQSINRPIRTVIKL

SEQ ID NO: 27997 - protein, 559 aa, synthetic construct
MKTKLYSYIRFSSMKQADGSSYERQKRTAAEIAAKYDLELVTSYQDFGVSAFKGANSRTGALSRFLDEIGRSVPVGSWLVVENLDRISRQSIIEAQELFLSIIRRGITIVTGMDGKVYSKESVNANPIDLLLSVMLFARANEESQTKRNRTNSSALIKIKAHQENPQNPAVAIEEIGKNMWWTDTTSGYVLPHPVFFPIVQEVVELRRNGRSTAEILDHLNATYTPPPAASHKRHSNWSRAMIERLFHTRALIGIKEISVDGVKYELKDYYPRVLDDAEFYHLKKSIGVRACNYGDKEEVKPIPLLSGVGLLKCEHCGSAMVKVKGTNKRPNQYRYSCDAMRSSRIACVHTNWSFRGDQLEKAVLQLLADKIWIAEDKANPVPALKVQIDEISRKIDNLIALSAMTGATKELADQITTLNSERETLYNQIKMAEEEMYSVDSQGWEKLAEFDLEDVYNEDRIKVRFKIKQALKRIGCSRIDKYKNLFVLEYIDGKTQRVVIENSRGPRKGQIFVDLKTINDRQILESNGLVLHPCLDMLTDKDWKPEEEIPGPLQEFGI

SEQ ID NO: 27998 - protein, 506 aa, synthetic construct
MRSVITYLRFSSATQGAEGADSTRRQNELFKQWLRKNSDAQVVASFNDEGLSGYKGKHLSGQFGDMLSRIESGEFPEGTILLVEAIDRIGRLEHLETEALMNRIIAHGIEIHTLQDGLIYTRDALSDDLGISIIQRVKSYIAHQESKQKSFRVSQKWEQRAKLALAGEQRLTKMVPGWIDPETFKLNEHAETVRLIFKLLLDGESLHNIARHLQANNISSFSRRKDANGFSVHSVRTILRSETTIGTLPASQRNDRPAIPNYYEAAIDAATFNKAQKILDKNRKGRTPASDNPLTINIFKGLFRCQCGASVHPTGTKNKYAGVYRCNNHLDGRCDVPPLKRKPFDKWMIDNFLGMIDVGNDEEAEGKIASLQHEVEIVTTRIKKATALLLEMDDIDELKIQLKELNQKRTELQTTIDNMRRKASLTDKELPQLKDIDLTTKAGRVECQLILSKHLKGLTLGKDSVTVTLQNDTEIIVPTDPLPLNDGTSIFEIAEKELLEIDAYQL

SEQ ID NO: 27999 - protein, 509 aa, synthetic construct
MRRAISYIRFSSERQLKGDSVRRQSKLVTDWLDKNPEFYLDSSLSFKDLGKSAFSGKHLKGGLGDFLTAIEKGLVKAGDTLLIESLDRLSRQDIDIASELLRRILRAGVDVVTLSDGEHYTRESLKDPLSLIKSILIMQRAHEESLRKSERVQAAWNRKKELISEGIKISKRCPAWLRLNDDRRTFTIIPDKVEVVKRAFDLRLQGLSFWAITRTLNDEGHLSLNQYTPKQKGWSDTAVKKLLRNRAVIGCFTPAGREEVQGYYPAIISESLFYRVQQLNTGQYGRASVSSNPLSVNLFRGIIKCSECGATIVLGGYALKRFGMYRCPNRSANRCSAKAISRKQTDATILYMLALCDRFETENTDIIDSLKLQREDLQRKISKMAELAIELDDMTIITEKLRDMKNALSKLNHDIEEETKRIKAITTGSLKDIDRTTKEGMIETQLLIKGVLKEIVIDAAKRRCKVTFHNGRAITLPITENPSEDVTEAIQSLSEVTERGLIDVDVVEI

SEQ ID NO: 28000 - protein, 547 aa, synthetic construct
MKLLVTYIRWSTREQDSGDSLRRQTNLIDAFYSKHKEEYYLLPAHKYIDKGKSGFHQQHKNQGSDFRRMFDNVMSGTIPEGSLIVVENFDRFSRADIDTAIDDVRQILRKGVSILTLGDGELYDKSALTDPVKLIKHIIIAERAHQESLVKQKRIAQVWNHKTQLARELKKPMGKQAPGWLELSEDGSHYIVDEDKASLVNIIYDKRLSGMSMFAICKWLNEQGYPTINQRKVRISKTKKPDGNWSALSVKHILTSRSVLGYLPAKVSSEDRKTVLREEIEGFYPQIVTDSKFYAVQQLLEETGKGKTSSGEHWLYVNILKGLIRCKCGLVMTPTGIRKPVYQGTYRCNGNKESRCSYGTVSRKLLDTQLCSRLFSKLSQLHDEATDTAKLDELQRRLNTVDSELEKLTETLIQLPNITQIQEALRAKQEEKDELIVQLSREKARVKSVSSLDLSGLDMESVEGRTEAQIIIKRLVKEIVVSGNEKLVDIYLHNGNMIRGFPLDGKDDHTLTLEEATDEMQSLDDMLIFGEPVTRIYPAGDMEEVDA

SEQ ID NO: 28001 - protein, 559 aa, synthetic construct
MKTKLYSYIRFSSMRQNDGSSYERQIRMAREIAVKYDLELVNDYQDLGVSAFKGANSKTGALSRFLDAIGRSVPVGSWLFIENLDRLSRADIVSAQELFLSIIRRGITIVTGMDNKIYSLDTVTANPMDLMFSILLFIRGNEESQTKRNRTNSSALIKIKAHQENPQNPAVAIEEVGKNMWWTDTTSGYVCPDPVFFPIVQEVVELRRNGRSTAEILDHLNATYTPPPAASHKRHSNWSRAMIERLFHTRALIGIKEISVDGVKYELKDYYPRVLDDAEFYHLKKSIGVRACNYGDKEEVKPIPLLSGVNLLKCDHCGSAMVKVKGTNRRPNQYRYSCDAMRSSRIECVHTNWSFRGDQLEKAVLQLLADKIWIAEDKANPVPALKVQIDEISRKIDNLITLSAMTGATKELADQITTLNSERETLYNQIKMAEEEMYSVDSQGWEKLAEFDLEDVYNEDRIKVRFKIKQALKRIGCSRIDKYKNLFVLEYIDGKTQRVVIENSRGPRKGRIFVDLKTINDRQILESNGLVLHPCLDMLTDKNWKPEEEIPGPLQEFGI

SEQ ID NO: 28002 - protein, 521 aa, synthetic construct
MAGKNITVIPARKRVGSTAAKEKIKKLRVAAYCRVSTETEEQNLSYEVQVAHYTEYIKKNTEWEFAGIFADDGISGTNTKKREEFNRMIEECMEGNIDLVITKSISRFARNTLDCLKYIRQLKEKNIAVYFEKENINTMDAKGEVLLTIMASLAQQESQSLSQNVKLGLQYRYQQGKVQVNHNRFMGYTKDEEGNLIIVPEEAEIIKRIYREYLEGKSLVGIGRDLEKDGILTAAGKPRWRPETIKKILLNEKYIGDALLQKTFTVDFLTKKRVKNEGHVPQYYVENSHEAIIPKELFLQAQEELHRRSNIYTGADKNKRIYSSKYALSTITFCGDCGDIYRRVYWNIHGRKEFVWRCVTRIEQGPEVCKNRTVKEAELYDAVMTAINRLLAGGDNMIRILEENIHAVIGDTTEYKISEINTLLEEKQKELISLANKGKDFEFLADEIEELREKRQTLLVEDASLSGENERINELIEFIRTNKYRTLLYDDTLVRKIIQNVTVYDDHFVICFKSGIEIEVE

SEQ ID NO: 28003 - protein, 521 aa, synthetic construct
MKKITKIDELNKSQQSNIKLRVAAYARVSTDSDEQMVSLKTQREHYENYIKSNPEWEFAGLYYDEGISGTKKEKRPELLRMIRDCESDRIDFIITKSISRFARNTTDCLELVRQLLNIGVFIYFEKENLNTGDMESELMLSILSGFAAEESASISQNTTWSINKRFQNGNYIIGSPPYGYANVNGEMVIVPEEAEVVKRIFSECLAGKGGSVIAKGLNRDKIPARRGNHWSSGTVIDMLRNEKYKGDVLFQKTYTDSNFNRHINNGEKDQFYCKDHHEPIISREVFSKAQKLITQRAKSMSKTANKKAYQNRYVLSGRILCGECGSKFKRRTNYSVGRSYIAWSCKGHIEDKDSCSMLFLRDGEIKATFSTMMNKLAFSKKLILEPLYDSINKIDEECDLARIEAIDKRMEQLTEERNTLIGLMTKGFLEPALFNKERNVLDKEIKNLTTEKTNLVMSFTSGSSQADEVKALLDYVSADKFDGNFTDEAFEKLVENIIVNSRDELTFKMKCGLSLIEKVVR

SEQ ID NO: 28004 - protein, 530 aa, synthetic construct
MKAAIYSRKSKFTGKGESVENQIQMCLDYARNIGIEDFLVYEDEGFSGKNTDRPQFQQMLKDAKEKKFDVLICYRLDRISRNIADFSTLIQELQDIAISFISIREQFDTTTPMGRAMMYIASVFAQLERETISERVRDNMYELAKTGRWLGGQVPLGYDSEETICFDENMKERKMYTLKPNEEELKIAKLIFDKYLETKSLSQVHKYMLSNNIKGKNGGNLAKGSINEILKNPVYVKADQNVLDYLESLGITVVGNPNGKQGILTYSKHRNGKETDMSKWIAAISKHKGIIDSKDWLMIQKILQKNKEKAPRTDTSHTAILTGVLKCKCGSGMRVIYGKKRKDGTKPFYYTCTMKNDSGGTRCKSSNINGTEVETIVINKLKEINEDVLRKEYKSTKKNLLNNDHAVEIENINKKIEENESDISNLVKQLSKNTNSSASDYIISEIENLNKEIQELKIKLKNLNENNQRLSNDLFSLDIILDSLNKFNKEIDSASIEDKRFLISILIDKIIWDYETGDLQVIYWGGVKKK

SEQ ID NO: 28005 - protein, 540 aa, synthetic construct
MKAAIYSRKSVFTGKGESVENQVQMCKEYAEKNLGITEFIIYEDEGFSGGNKNRPKFQELIQDINKNKFDVLICYRLDRISRNVADFSATLELLQDNNISFVSIKEQFDTSTPMGKAMVYIASVFAQLERETIAERIRDNMIQLSKTGRWLGGQTPLGFKSEQITYIDSEFKERSMSKLIPIGYELEQVKLIFDKYLEAGSIHMVLKYLLANNIKGKNGGDFASMSVNDILRNPVYVQSTEDIFEYLSEKEMLLCGIPNGNGILIYNKRNSKYKYKDTSQWIAAVSKHKGIISSNDWLEVQRKLDNNAKKENPRQGTSKKSLLSGILKCAKCGAPMRVSYGRPRKDNKERIYYYMCTMKAHSAKSRCDNPNVRGDKLEKTVIEHIKNLNTDMIMKELEKYKEKTASTQISYRLDSIERDIDQKRKDMDALLKQLAKLDSTCVASEFILSKIDELGNKIKELQTKLISLKNKKQEATANVVNSSLILDTIKEFNSFFDSTLDNSENTIMKKRYLLETIIDKITWNGESNDIHINLWGSKKK

SEQ ID NO: 28006 - protein, 507 aa, synthetic construct
MKRVISYIRFSSERQAKGDSLRRQSKMVNDWLKAHPEYYLDQDLSFRDLGVSGFTGKHLKGGLGDFLTAIEKGLVKAGDTLLIESLDRLSRQAVDRASELLRNILRSGVDIVTLSDGEHYTRESLRDPLALIKSILIMQRAHEESLRKSERIQAAWNRKKELISEGIKISKRCPAWLKLNDDRKSFSVIPDKVETVKRCFQLRLEGKSIWEIVRTLNAEGHRSMNQYKPGKFGQTSVQDLLKNRSVIGYFTPKGCEEIAGYYPSVIDETTFYKVQQLSYARHGRKPASAKPLSVNLFKGVIRCSECGHALIITGFSDTRSGIYRCPLRNENRCSAKGLSRKQTDGTLLTLLSRLDRFDSDTTNTIDTLKLHREHLSSNIEKLVQLSLEIEDLNAITNKLKQLKNELSQVDADIEKETQRLKSIDVGCLSDCDLTTKAGRIEAQLIIKSAVKEVVLNTAKRRCKVTFHNSKSITLPITENPSEDVTEAIQSLSEVTERGLIDVDEVII

SEQ ID NO: 28007 - protein, 507 aa, synthetic construct
MKRVISYIRFSSERQAKGDSLRRQSKMVNDWLKAHPEYYLDQDLSFRDLGVSGFTGKHLKGGLGDFLTAIEKGLVKAGDTLLIESLDRLSRQDIDIASELLRRILRAGVDVVTLSDGEHYTKESLRDPLSLIKSILIMQRAHEESLRKAERIQAAWDAKKEAAKAGIKVSKRCPAWLKLNDDRKTFSVIPEKVETVKRCFQLRLEGKSIWAIVKALNDEDRQSMNQYKPGKFGQTSVQDLLKNRSVIGYFTPKGCEEISGYYPAIIDETTFYKVQQLSHSRYGRKSVSDKPLSVNLFKGVIRCSECGHALIITGFSDTRNGIYRCPLRNENRCSAKGLSRKQTDGTLLTLLSRLDRFDSDTTNIIDMLRLHREHISSNIEKLVQLSLEIEDLSAITSKLKQLKGELSQVDADIEKETQRLKSIDVGCLSDCDLTTKAGRIEAQLIIKSAVKEVVLNTAKRRCKVTFHNGKVIDLPITENPSEDVTEAIQSLSEVTERGLIDVDEVII

SEQ ID NO: 28008 - protein, 496 aa, synthetic construct
MRVAIYRRVSTPGQTEGFSLETQFEELTQLADSKGWIWDDYCDPGISGEKLEERPQMVELLSRIADYQAVLVSDPSRLARDELVFALIRSQLRAAQVRVITPSGETDLNDPMGNMVSGMLAIFAQYEQQLRTKKTKAGLKAAAEAGYWTGGDAPYGYRLVRTDDGHSTLEINEPEAVTLRLAVSLIVDDGLSTFDTCRRLEALGHPTRSGKAWTHRNLRLKLTRRHLLGEVPFETEDESIARAFPPILDPDRFEALQLALDRQSGSQDQSRSYPLSKRLLCLCGGTRVGHYRNDRGHRYYICSRNTSNAIDQDPCPISPRYRRADDIEQLIWNQLQETISDPERLFKAAAAALDEYREAAPRRTELRAELEARLDEIKSERVRTFRDAKRLGLDDDEIRQILDDLADERTSIEDQLEQFQDEPHVADLADISERLERIAHTSAADLSEADLDKQKEILELLNVEVVPSEDGYTINGTLPYWAGERGKMATQAPQRP

SEQ ID NO: 28009 - protein, 460 aa, synthetic construct
MIRVATYTRVSTLEQAEEGYSINEQQDKLEKYCELKDWTITQRYSDPGFSGSNIKRPGISELVAAAKQGDFDLVLVYKLDRLSRSQKDTLYLIEDVFQANQVEFVSLSENFDTSTPFGKAMIGILSVFAQLEREQIKERMTMGKIGRAKSGKAMGWSKTPFGYNLVDDVYEVDDFQATVVKRIFSDYLSGESPAIIAKNLNGEGHLGKGKPWSWKTVKDVLMNVIYTGYISFKGELYPGMHKPIIDMETYKKTQTQIEIRRVNADNPRPFRAKYMLSGLLKCHYCGATLRIAVSVNQRTKARSYRYNCPSSHPRKASTYKTKAVCPFKLVYKDEMEKRVIAEIEKLPKNFKQKQEPGVDLDAIKKQIKLIKTKQSKLMDLYLVDGIDMEELNRRNGEFNKQIKGLEQELSATPTKLDVSEMLNRAKNISELTYDEQKKLVKLLINEIEVSNDSIKIHWRF

SEQ ID NO: 28010 - protein, 432 aa, synthetic construct
MTTQELSTENIRYCLYARKSTESDEKQALSIESQIKEMLAIAERENLNVIDIRRESHSAKDSGTRPVFKELLEDIQRGRYTGIITWAPDRLSRNAGDLGSIVDLMDEQKLAEIRTYGQTFRNSPNEKFLLMILCSQAKLENDNKSINVKRGLRAKVEMGLWPSVAPTGYLNIKEIDKKGHVKIDSERGPIIKKIFEKVAYEKWSGRKVYNWLRFELNFKTAAGNKNLSLSNIYLVLQNTFYYGTFEYPRGSGNWYKGKHKPIITKELFDQVQEQVKSQALTARKSKEFAFTKIMICGQCGSGISADEKFKKLASGDVKRYVYYLCAKSKDVNCKGCYTEEKALIQEFKKLVDTIGINEKVMREKIKKEVTRIKKFQQSLLNIEQDIKISEIDIKNYAKFILNDGDLYEKRELLDCFQGKLVLKDKKLTLQKI

SEQ ID NO: 28011 - protein, 506 aa, synthetic construct
MRTVITYLRFSSATQGAEGADSTRRQNELFKQWLRKNSDAQVVASFSDEGLSGYKGKHLTGQFGDMLARIEAGEFPAGTILLVESIDRIGRLEHLETEALMNRILGNGIEIHTLQDGLIYTKDALADDLGISIIQRVKAYIAHQESKQKSFRVSQRWGQRAKLALAGKQRLTKMVPGWIDPETFKLNEHAETVRLIFKLLLDGESLHNIARHLQSNGIKSFSRRKDANGFSVHSVRTILRSETTIGTLPASQRNDRPAIPNYYEGVVDIPTFNKAQEILDKNRKGRTPASDNPLTINIFKGLFRCQCGASVHPTGTKNKYAGVYRCNNHLDGRCDVQPLKRKPFDRWMIDNFLGMIDVGNDGESERKIAALQHEVEIVTARIKKATALLLEMDDITELKTQVKGLNQKRTELQTTIDSMRRKTSLSDKGLPQLKDIDLTTKAGRVECQLILSKHLKGLTLGKDTVTVTLQNDTEITIPTNPLPINDGSPIFEIADKELLDIDAYQL

SEQ ID NO: 28012 - protein, 559 aa, synthetic construct
MKTKLYSYIRFSSMRQNDGSSYERQIRMAREIAAKYDLELVNDYQDLGVSAFKGANSKTGALSRFLDAIGRSVPVGSWLFIENLDRLSRADIVSAQELFLSIIRRGITIVTGMDNKIYSLDTVTANPMDLMFSILLFIRGNEESQTKRNRTNSSALIKIKAHQENPQNPAVAIEEVGKNMWWTDTTSGYVLPHPVYFPVVQEIVELRKNGRSTAEILDHLNETYAPPPAVSNKKHSKWSRAMVERLFHTRALIGIKEISVDGVNYELKDYYPRVIDDATFYHLKKNIGARAWNFGDKEEVKPIPLLSGIGLLKCDHCGCAMVKVKGTNKRSDQYRYTCDATRSRRLDCEHPNWSFRGDQLEKAVLQLLADKIWIAEDKANPVPALKVQVDEISRKIDNLITLSAMTGATKELADQITTLNSERETLYNQIKMAEEEMYSVDSQGWEKLAEFDLEDVYNEERLKVRFKIKQALKRIGCSRIDRNKNLFVLEYIDGKTQRVVIENSRGTRKGQIFVDLKTINDRQILESNGLVLHPCLDMLTDKNWKPEEEIPGPLQEFGI

SEQ ID NO: 28013 - protein, 559 aa, synthetic construct
MKTKLYSYIRFSSMRQNDGSSYERQIRMAREVAAKYDLELVNDYQDLGVSAFKGANSKTGALSRFLDAIGRSVPVGSWLFIENLDRLSRADIVSAQELFLSIIRRGITIVTGMDNKIYSLDTVTANPMDLMFSILLFIRGNEESQTKRNRTNSSALIKIKAHQENPQNPAVAIEEVGKNMWWTDTTSGYVLPHPTYFPVVQEIVELRKNGRSTAEILDHLNETYTPPPAVSNKKHSKWSRAMVERLFHTRALIGIKEVSVDGVNYELKDYYPHVIDDATFYHLKKNIGARAWNFGDKEEVKPIPLLSGIGLLKCDHCGCAMVKVKGTNKRSDQYRYTCDATRSRRLDCEHPNWSFRGDQLEKAVLQLLADKIWIAEDKANPVPALKVQVDEISRKIDNLIALSAMTGATKELADQITTLNSERETLYNQIKMAEEEMYSVDSQGWEKLAEFDLEDVYNEERLKVRFKIKQALKRIGCSRIDRNKNLFVLEYIDGKTQRVVIENSRGTRKGQIFVDLKTINDRQILESNGLVLHPCLDMLTDKNWKPEEEIPGPLQEFGI

SEQ ID NO: 28014 - protein, 507 aa, synthetic construct
MKRVISYIRFSSEKQAKGDSLRRQSKMVTDWLKAHPEYYLDQDLSFRDLGVSGFTGKHLKGGLGDFLTAIEKGLVKAGDTLLIESLDRLSRQAVDRASELLRNILRSGVDVVTLSDGEHYTSESLKDPLALIKSILIMQRAHEESLRKSERIQAAWNAKKEAAKAGIKVSKRCPAWLKLNDDRKSFSVIPEKVETVKRCFQLRLEGKSIWEIVRTLNDEGHQTLNQYKAGKFGQTSVQDLLKNRSVIGYFTPKGCEEISGYYPAIIDETTFYKVQQLSHYRYGRKPVSDKPLSVNLFKGVIRCSECGHALIITGFSDTRNGIYRCPLRNENRCSAKGLSRKQTDGTLLALLSRLDRFDSDMTNTVDTLKLHREHISSNIEKLVQLSLEIEDLSAITSKLKQLKGELSQVDADIEKETQRLKSIDVGCLSDCDLTTKAGRIEAQLIIKSAVKEVVLNTAKRRCKVTFHNGRIIDLPITENPSEDVTEAIQSLSEVTERGLIDVDEVII

SEQ ID NO: 28015 - protein, 507 aa, synthetic construct
MKRAISYMRFSTEKQIKGDSIRRQSKLVTDWLSKNPDYFLDESLSFKDLGKSAFSGKHLRAGLGDFLTAIKEGLVKAGDTLLIESLDRLSRQDVDQASELLRGILRSGVDVVTLSDGEHYTAESLKDPLSLIKSILIMQRAYEESLRKSERVAAAWNRKKDIISEGIKVSKRCPAWLKLNDDRRGFTIIPEKVEIVKKVFALRLQGLSFWAITRALNDGGYLSLNQYKPQGWSDTSVKTLLRNRSVIGCFTPAGREEVKDYYPAIISESLFYKVQQLNTGQYGRASTSDNPLSVNLFRGIIKCSECGSSVVVGGYAKRRYGMYRCPKNSSHQCHAKAISRKQTDETLLFMLSLVDRMEPDITNQIDSLNLRKSDLETKISKLLELAIELDDMAMVTDKLRDLKKELGQVKHQIEEETKRVRAISTGNLKDIDRSTKEGMIEAQLLIKGVVKSIIIDSAKRRCRVTLHNGKVIGLPISKNPSEELTSALTSMFEGTERGLLSLDEVEL

SEQ ID NO: 28016 - protein, 547 aa, synthetic construct
MKLLVPYIRWSTKEQDSGDSLRRQTNLIDAFYSKHKNDYYLLPAHRYVDKGKSGFHQQHKNQGSDFRRMFENVMSGVIPEGSLIVVENFDRFSRADIDTAIDDVRQILRKGVSILTLGDGELYDKSALTDPVKLIKHIIIAERAHQESLVKQKRIAQVWNHKTQLARELKKPMGKQAPGWLELSEDGSHYIVDEYKASLVNIIYDKRLSGMSMFAICKWLNEQGYPTINQRKVRISKTKKPDGNWSALSVKHILTSRSVLGYLPAKISSEDRKTVLREEIEGFYPQIVTDSKFYAVQQLLEETGKGKTSSGDHWLYVNILKGLIRCRCGLVMTPTGIRKPVYQGTYRCNGNKESRCSYGTVSRKLLDTQLCSRLFSKLSQLHDEATDTAKLDELQRRLNTVDGELEKLTETLIQLPNITQIQEALRVKQEEKDELIVQLSREKARVKSVSSLDLSGLDMESVEGRTEAQIIIKRLVKEIVVSGNEKLVDIYLHNGNMIRGFPLDGKDDHTLTLEEATDEMQSLDDMLIFGEPVTRIYPAGDMEEVDA

SEQ ID NO: 28017 - protein, 547 aa, synthetic construct
MKLLATYIRWSTKEQDSGDSLRRQTNLIDAFYSKHKNDYYLLPAHRYVDKGKSGFHQQHKAQGSDFRRMFENVMSGAIPEGSLIVVENFDRFSRADIDTAIDDVRQILRKGVSILTLGDGELYDKSALTDPVKLIKHIIIAERAHQESLVKQKRIAQVWNHKTQLARELKKPMGKQAPGWLELSEDGSHYIVDEDKASLVNIIYDKRLSGMSMFAICKWLNEQGYPTINQRKVRISKTKKPDGNWSALSVKHILTSRSVLGYLPAKISTEDRKTVLREEIEGFYPQIVTDSKFYAVQQLLEETGKGKTSSGDHWLYVNILKGLIRCKCGLVMTPTGIRKPVYQGTYRCNGNKESRCSYGTVSRKLLDTQLCSRLFSKLSQLHDEATDTAKLDELQRRLNTVDSELEKLTETLIQLPNITQIQEALRVKQGEKDELIVQLSREKARVKSVSSLDLSGLDMESVEGRTEAQIIIKRLVKEIVVSGNEKLVDIYLHNGNMIRGFPLDGKDDHTLTLEEATDEMQPLDDMLIFGEPVTRIYPAGDMEEVDA

SEQ ID NO: 28018 - protein, 507 aa, synthetic construct
MKRVISYIRFSSEKQAKGDSLRRQSKMVTDWLKAHPEYYLDESLTFRDLGVSGFTGKHLKGGLGDFLTAIEKGLVKAGDTLLIESLDRLSRQAVDRASELLRNILRSGVDVVTLSDGEHYTSESLKDPLALIKSILIMQRAHEESLRKSERIQAAWNRKKELISEGIKVSKRCPAWLRLNDDRKSFSVIPEKVETVKRCFQLRLEGKSIWEIVRTLNDEGHQSMSQYKPGKFGQTSVQDLLKNRSVIGYFTPKGCEEISGYYPAIIDETTFYKVQQLSYARYGRKPASDKPLSVNLFKGVIRCSECGHALIITGFSDTRSGIYRCPLRNENRCSAKGLSRKQTDGTLLALLSRLDRFDSDTTNNINMLRLHREHISSNIEKLVQLSLEIEDLSAITSKLKQLKGELSQVDADIEKETQRLKSIDVGCLSDCDLTTKAGRIEAQLIIKSAVKEVVLNTAKRRCKVTFHNGRAITLPITENPSEDVTEAIQSLSEVTERGLIDVDVVEI

SEQ ID NO: 28019 - protein, 559 aa, synthetic construct
MKTKLYSYIRFSSMKQADGSSYERQKRTAAEIAAKYDLELVTSYQDFGVSAFKGANSRTGALSRFLDEIGRSVPVGSWLVVENLDRISRQSIIEAQELFLSIIRRGITIVTGMDGKVYSKESVNANPIDLLLSVMLFARANEESQTKRNRTNSSALIKIKAHQENPQNPAVAIEEIGKNMWWADTTSGYVLPHPVFFPIVQEVVELRRNGRSTAEILDHLNATYTPPPAASHKRHSNWSRAMIERLFHTRALIGIKEISVDGVKYELKDYYPRVLDDAEFYHLKKSIGVRACNYGDKEEAKPIPLLSGVGLLKCEHCGSAMVKVKGTNRRPNQYRYSCDAMRSSRIECVHTNWSFRGDQLEKAVLQLLADKIWIAEDKANPVPALKVQIDEISRKIDNLITLSAMTGATKELADQITTLNSERETLYNQIKMAEEEMYSVDSQGWEKLAEFDLEDVYNEDRIKVRFKIKQALKRIGCSRIDKYKNLFVLEYIDGKTQRVVIENSRGPRKGRIFVDLKTINDRQILESNGLVLHPCLDMLTDKNWKPEEEQAGPLQEFGI

SEQ ID NO: 28020 - protein, 507 aa, synthetic construct
MKRVISYFRFSSEKQAKGDSLRRQSKMVTDWLKAHPEYYLDQDLSFRDLGVSGFTGKHLKGGLGDFLTAIEKGLVKAGDTLLIESLDRLSRQNVDRASELLRNILRSGVDVVTLSDGEHYTRESLKDPLALIKSILIMQRSHEESLRKSERIQAAWNRKKELISEGIKISKRCPAWLRLNDDRKTFSVIPEKVETVKRCFQLRLEGKSIWEIVRTMNAEGHQTLNQYKAGSFGQTSVQDLLKNRSVIGYFTPKGCEEIAGYYPAIIDETTFYKVQQLAYARYGRKPASDKPLSVNLFKGVIRCSECGHALIITGFSDTRSGIYRCPLRNENRCSAKGLSRKQTDGTLLALLSRLDRFDSDMTNTIDTLKLHREHISNNIEKMVQLSLEIEDLNAITSKLKQLKGELSQVDADIEKETQRLKSIDVGCLSDCDLTTKAGRIEAQLIIKSAVKEVVLNTAKRRCKVTFHNGRIIDLPITENPSEDVTEAIQSLSEVTERGLIDVDEVII

SEQ ID NO: 28021 - protein, 509 aa, synthetic construct
MRRAISYIRFSSERQLKGDSVRRQSKLVTDWLDKNPEFYLDSSLSFKDLGKSAFSGKHLKGGLGDFLTAIEKGLVKAGDTLLIESLDRLSRQDIDIASELLRRILRAGVDVVTLSDGEHYTRESLKDPLSLIKSILIMQRAHEESLRKSERVQAAWNRKKELISEGIKVSRRCPAWLRLNDDRRTFTIIPDKVEVVKRAFDLRLQGLSFWAITRTLNDEGHLSLNQYTPKQKGWSDTAVKKLLRNRAVIGCFTPAGREEVQGYYPAIISESLFYRVQQLNTGQYGRASVSSNPLSVNLFRGIIKCSECGATIVLGGYALKRFGMYRCPNRSANRCSAKAISRKQTDATILYMLALCDRFETENTDTIDSLKLQREDLQRKISKMAELAIELDDMTIITEKLRDMKNALSKLNHDIEEETKRIKAITTGSLKDIDRTTKEGMIETQLLIKGVLKEIVIDAARRRCKVTFHNGKSIDLPITENPSEDVTEAIQSLSEVTERGLIDVDVVAI

SEQ ID NO: 28022 - protein, 500 aa, synthetic construct
MRAVIYKRVSVLRNHIEGTSLDVQHERLEAYAKAHGWDVVRVYEDAGISGKDTNRPQLQRMLQDAEKGVFDVILVYKLDRLSRSVSDFHQLANFLDAHKIALVSVTQHLDTSSPTGRLLRNILVDFANFERELITERIMDNKLHRAAEGKWNGGHAPLGYKLVNKKLEIVPEEAAQVREVYDLYLTNKLSMRKIAKMTGVSFSRVELILTNPIYAGKLAYGKTKYKNTKGQFERKKPEEWIWGDSDHEPIITFEEWQRVQEIKKANTRIPKGRTEHQLFQGLCYCGKCGRKLYFFWNGTSTKPYAYYRCHDHNRFEGCRSLSVSQTELEEKVVRKLNELLSDKMFWKSVKENIKNGKKKKSDEEREIEVIDKGLQKIEEQIKRLIKQMADADIAHLIKPQLMELEKERKTLIEDKDVLLSQQTEQTVINTGLSSQLMREVMDGWEYLSTEEKSEGIHLLIKKITAFTEYVEIEWTDSALPNVTFLRNKMAKNGRITEYCF

SEQ ID NO: 28023 - protein, 488 aa, synthetic construct
MQVFGYPRVSTDEQAERGNSLSEQMERMTAYCKAMGWDEPIFFIDDGYSAKDLNRPELTRMLDRVKKDKQGGIILTTKLDRLSRKLFDILSLNEFFNKHGFNYVSATEGFDTSTPAGRLVLQMLGMVAEFERERNSERVRDNMTSIARNTTRVISRPCFGYDIINGEYVINIDESTEIIKAANELLSGTPSRQIIKRWNFVDNIKTKEGNEWHEKTFRELFQRETLIGDFVYNKTYKDGSRIITRPENEWIYIENHHPAILDRETFDKLGQLFQARRRLGRHTSDDRYLLSGLVVCGHCKNKMNGKMSRSYSKKLKQENIHYKYLCDGYLKRAKCFHHYISRDDIETAIIERIKKMSEASPGTLNIVIAKPKTQSINEDEIRAKLARLDKNMQKQIEAFNDDLITAHDLKTATEKVERQRAELHKLLESSNSEQLENEAETKIIRKANASIKDLLSGDRLKAKEVIRELVDKIEVMNGSDIDVLWRAD

SEQ ID NO: 28024 - protein, 506 aa, synthetic construct
MRTVITYLRFSSATQGAEGADSTRRQNELFKQWLRKNSDAQVVASFSDEGLSGYKGKHLTGQFGDMLARIEAGEFPAGAILLVESIDRIGRLEHLETEALMNRIIAHGIEIHTLQDGLIYTRDALSDDLGISIIQRVKSYLAHQESKQKSFRVSQKWEQRAKLALAGEQRLTKMVPGWIDPDTFKCNEHAETVRLIFKLLLDGESLHNIARHLQANNISSFSRRKDANGFSVHSVRTILRSETTRGTLPASQRNDRPAIPNYYEAAIDAATFNKAQEILDKNRKGRTPASDNPLTINIFKGLFRCQCGASVHPTGTKNKYQGVYRCNNHLDGRCDVPPLKRKPFDKWMIDNFLGMIDVGNDGEAEGKIAALQHEVEIVTARIKKATALLLEMDDIDELKIQLKELNQRRTELQTTIDNMRRKASLTDKELPQLKDIDLTTKAGRVECQLILSKHLKGLTLGKDTVTVTLQNDTEITIPTDPLPLNDGTSIFEIAEKNLLNIDTFQL

SEQ ID NO: 28025 - protein, 560 aa, synthetic construct
MTLRCALYARYSSDQQRAASIEDQFRVCRERAEREGWKIAGAYKDSAVSGASMILRPGIQALLDDARRGMFEIVVAEALDRVSRDQADVATLYKHLKFAGVMIVTLSEGEINELHVGLKGTMNALFLKDLAAKTHRGLRGRVEQGRSGGGLCYGYDVVKSLDGSGDPVRGGRTVNETEAQIVLRVFREFADGVSPRAIARRLNEENVPGPSGKLWMDTTIRGHAKRGTGLINNELYIGRLIWNRLRYVKNPETGKRVSRINPPEDWIVAEVPELRIVDDDLWKSVKHRQGEITEQYATVIEAMQSARGNRLNGAHRPRHLLSGLLECGVCGGPYSMRGQDRYGCSNHIMTGTCSNGRGIRRPVIEERVLSGLKERLMAPEAAAEAMRAYAEETNRINRERRASGAGDRKELAGVEKKIAAMIAVIEDGGYVRGMVDRLRELEARQDELNERLSATPADLPDIHPNIANIYRRKVERLAEALDHPEDRDAAASAIRGLIGRIVLTPGEKWAEMDAVLHGDLGTILEWAGNGRENTKTDIPMPEMSVSVVAGVGFEPTTFRL

SEQ ID NO: 28026 - protein, 569 aa, synthetic construct
MSIQTELTPAALYARVSSDRQDVDLSVAAQLRALRDFAERSGYVIAREYIDEAESGRIANRPQFQRMLDEARAPDAPFQEILVWKFSRFTRKREHAVAFKSMLRRRGIRVTSITEHADDTPTGKLMEAIIESVDEFYSENLAQEVTRGMREAASRGFWVATWAPYGYRKVHVPDGAKTRPRLELNSPADAVMRRIFDDALSGKSVLDITRALNADGIPTTNGKPWLKTTVHRLLTNEAYTGTLVWGLNAKDGAPPVRVEDAFPAIVSRPEFERVGQLMQARRPERAHPRRIASRYLLSGLVRCGSCRRALTAAEAKSGKYTYYVCQSKIKKGSETCDTPRLAAKQFEQLIIDQLREHVLTQSNIRSLVTLVDEEMDGQAHEQRQKLETIELQLAEVQHRLDRIWQVIETSNLDAADAGDRIREHKQRQEQLEIAAVKARNVLAERRQLLDRADVIAVFAAQMSEFLLTSQLTETKAFINSFVKRITVRPGRAVIRYAIPMPEDSPIGPADAAEVGLTEGIMSTVRVGTPGGTRTPDPQVRSLVLYPLSYGRTMSAYPGRLGCSYGQTYA

SEQ ID NO: 28027 - protein, 506 aa, synthetic construct
MRTVITYLRFSSATQGAEGADSTRRQNELFKQWLRKNSDAQVVASFSDEGLSGYKGKHLTGQFGDMLARIEAGEFPAGTILLVESIDRIGRLEHLETEALMNRILGNGIEIHTLQDGLIYTKDALADDLGISIIQRVKAYIAHQESKQKSFRVSQKWEQRAKLALAGEQRLTKMVPGWIDPDTFKCNEHAETVRLIFKLLLDGESLHNIARHLQANNISSFSRRKDANGFSVHSVRTILRSVTTIGTLPASQRNDRPAIPNYYEAAIDAATFNKAQEILDKNRKGRTPASDNPLTINIFKGLFRCQCGASVHPTGTKNKYAGVYRCNNHLDGRCDVPPLKRKPFDKWMIDNFLGMIDVGNDGEAEGKIAALQHEVEIVTSRIKKATALLLEMDDITELKAQVKELNQKRTELQTTINTMKRKTSLSDKGLPQLKDIDLMTKAGRVECQLILSKHLKGLTLGKDSVIVTLQNDTEITIPTNPLPLNDGTSIFEIAEKELLEIDAYQL

SEQ ID NO: 28028 - protein, 559 aa, synthetic construct
MKTKLYSYIRFSSMRQSDGSSYERQIRMAREIAAKYDLELVNDYQDLGVSAFKGANSKTGALSRFLDAIGRSVPVGSWLFIENLDRLSRADIVSAQELFLSIIRRGITIVTGMDNKIYSLDTVTANPMDLMFSILLFIRGNEESQTKRNRTNSSALIKIKAHQENPQNPAVAIEEVGKNMWWTDTTSGYVLPHPVYFPVVQEIVELRKNGRSTAEILDHLNETYAPPPAVSNKKHSKWSRAMVERLFHTRALIGIKEISVDGVNYELKDYYPRVIDDPTFYHLKKNIGARAWNFGDKEEVKPIPLLSGIGLLKCDHCGCAMVKVKGTNKRSDQYRYTCDATRSRRLDCEHPNWSFRGDQLEKAVLQLLADKIWIAEDKANPVPALKVQVDEISRKIDNLIALSAMTGATKELADQITTLNSERETLYNQIKMAEEEMYSVDSQGWEKLAEFDLEDVYNEERLKVRFKIKQALKRIGCSRIDRNKNLFVLEYIDGKTQRVVIENSRGTRKGQIFVDLKTINDSQILESNGLVLHPCLDMLTDKNWKPEEEIPGPLQEFGI

SEQ ID NO: 28029 - protein, 507 aa, synthetic construct
MKRVISYIRFSSERQAKGDSLRRQSKMVNDWLKAHPEYYLDQDLSFRDLGVSGFTGKHLKGGLGDFLTAIEKGLVKAGDTLLIESLDRLSRQDVDQASELLRNILRSGVDVVTLSDGEHYTRESLKDPLALIKSILIMQRSHEESLRKSERIQAAWNRKKELISEGIKISKRCPAWLKLNDDRKSFSVIPEKVETVKRCFQLRLEGKSIWEIVRTLNDEGHQTLNQYKAGSFGQTSVQDLLKNRSVIGYFTPKGCEEIAGYYPAIIDETTFYKVQQLSYARYGRKPASDKPLSVNLFKGVIRCSECGHALIITGFSDTRSGIYRCPLRNENRCSAKGLSRKQTDGTLLALLSRLDRFDSDTTNTIDTLKLHREHISSNIEKLVQLSLEIEDLSAITSKLKQLKGELSQVDADIEKETQRLKSIDVGCLSDCDLTTKAGRIEAQLIIKSAVKEVVLNTAKRRCKVTFHNGKIIDLPITENPSEDVTEAIQSLSEVTERGLIDVDEVII

SEQ ID NO: 28030 - protein, 506 aa, synthetic construct
MRTVITYLRFSSAIQGAEGADSTRRQNDLFKQWLKKNSDAQVVASFSDEGLSGYKGKHLTGQFGDMLARIESGEFPAGTILLVESIDRIGRLEHLETEALMNRILGNGIEIHTLQDGLIYTKDALADDLGISIIQRVKAYIAHQESKQKSFRVSQKWEQRAKLALAGEQRLTKMVPGWIDPDTFKCNEHAETVRLIFKLLLDGESLHNIARHLQANNISSFSRRKDANGFSVHSVRTILRSETTRGTLPASQRNDRPAIPNYYEAAIDAATFNKAQEILDKNRKGRTPASDNPLTINIFKGLFRCQCGASVHPTGTKNKYQGVYRCNNHLDGRCDVQPLKRKPFDRWMIDNFLGMIDVGNDGEAEGKIASLQHEVEIVTARIKKATALLLEMDDIDELKIQLKELNQKRTELQTMIDNMRRKASLTDKELPQLKDIDLMTKAGRVECQLILSKHLKGLTLGKDSVTVTLQNDTEIIVPTDPLPLNDGTSIFEIAEKELLEIDAYQL

SEQ ID NO: 28031 - protein, 559 aa, synthetic construct
MKTKLYSYIRFSSMRQSDGSSYERQIRMAREIAAKYDLELVNDYQDLGVSAFKGANSKTGALSRFLDAIGRSVPVGSWLFIENLDRLSRADIVSAQELFLSIIRRGITIVTGMDNKIYSLDTVTANPMDLMFSILLFIRGNEESQTKRNRTNSSALIKIKAHQENPQNPAVAIEEVGKNMWWTDTTSGYVLPHPVFFPVVQEIVELRKNGRSTAEILDHLNETYAPPPAVSNKKHSKWSRAMVERLFHTRALIGIKEVSVDGVNYELKDYYPRVIDDATFYHLKKNIGARAWNFGDKEEVKPIPLLSGIGLLKCDHCGCAMVKVKGTNKRSDQYRYTCDATRSRRLDCEHPNWSFRGDQLEKAVLQLLADKIWIAEDKANPVPALKVQVDEISRKIDNLIALSAMTGATKELADQITTLNSERETLYNQIKMAEEEMYSVDSQGWEKLAEFDLEDVYNEERLKVRFKIKQALKRIGCSRIDRNKNLFVLEYIDGKTQRVVIENSRGTRKGQIFVDLKTINDRQILESNGLVLHPCLDMLTDKNWKPEEEIPGPLQEFGI

SEQ ID NO: 28032 - protein, 507 aa, synthetic construct
MKRVISYIRFSSEKQAKGDSLRRQSKMVTDWLKAHPEYYLDQDLSFRDLGVSGFTGKHLKGGLGDFLTAIEKGLVKAGDTLLIESLDRLSRQAVDRASELLRNILRSGVDVVTLSDGEHYTSESLKDPLALIKSILIMQRAHEESLRKSERIQAAWDAKKEAAKAGIKVSKRCPAWLKLNDDRKSFSVIPEKVATVKRCFQLRLEGKSIWEIVRTLNDEGHQTLNQYKAGKFGQTSVQDLLKNRSVIGYFTPKGREEIAGYFPPIIPETDFYKVQQLSYSRYGRKPASDKPLSVNLFKGVIRCSECGHALIITGFSDTRNGIYRCPLRNENRCNAKGLSRKQTDGTLLALLSRLDRFDSDTTNTIDTLKLHREHLSSNIEKLVQLSLEIEDLNAITNKLKQLKNELSQVDADIEKETQRLKSIDVGCLSDCDLTTKAGRIEAQLIIKSAVKEVVLNTAKRRCKVTFHNGKVIDLSITENPSEDVTEAIQSLSEVTERGLIDVDEVII

SEQ ID NO: 28033 - protein, 549 aa, synthetic construct
MNTSIDLFSKWAKKPSLAIVKSGERKAIVYTRVSSKEQFDTNLSLEWQRKTIEEYATRQNFELLEYFGGVYESAKTDGRKEFQRMLDYARKNKKVTHIFVYLLDRFSRTGGGAIKLAKDLREKYGITIIAVTQPIDTSNPGGVFQQNIQFLFSEYDNQLRRQRAMAGIREKLQRGIWCVKPPMGYDIVYDKTGFSDERSKGERKIIVNDTGKKLRRAFEWKAQGMKNEEILSRLKALGLKIYKQKISAIFSNPFYCGIISNKMLEGKLIVGKHEKLVSQELFLKVNNVRAEAKGKYGILHQKHHENVPLKVFMKCSDCSSPYTGYIVKSRNRWYYKCRSKGCCNNKSAEKANTHFINYLTKYAIVPHLVQPFLFAMKHEVAKLETAKVDEEKLLKNNLNEVQKKIDTIEEQYFILKSMPDETYQKFQAKLTEEKAQILRNIDQAGSSISNTTEALEKALQFSLKLPSLWGSADVNQKEIIQNLIFPDGVIYDRKKEAFRTEKVNEVFRCIAVLNSSSGENETGQTSNETNLSCSVGTTRFELATPSTPC

SEQ ID NO: 28034 - protein, 574 aa, synthetic construct
MTEEATQDKEPRGVAYSYVRFSTAKQELGDSLRRQVEMAEKYCLKHNLELHPVSYRDLGVSAFKRKNLEKGALSAFIDAVTTGKVPKGSYLVIEQFDRMSRAETSTALQLLLNLVKAGIKVVTLSDEKVWDSDTINDTGNLVLAIVYMSRANNESQAKADRLSAIWGRKMLAASKGTANRIVTSECPRWLKPNADKTGFVVLEDKVESIRKVFEMRINGNGVTRIVSRANEEQWPCPGKPPVQKSGETPAEFEVRRRSDAVTWHTSTVGRLLKNRALLGEYQPFVDDPEHEGKRKPHDKITPVLGYYPAVLDEVTFLRAQAKANRSGRFPGRRDASLKNWLQGLLRCTCGHSFVRKNKDSKAQPEYARYYCTARNRQVRRLDGTLCPGVDAKQLEGAVLTVVSTVAPQFFEGTAKMDELSSRADLIEVDLDTAKLSLNRLMEALEDGKGASKSISARVRDKEAEIERLEKELAAVRAEVADLSGDFDDVFENIVRQVKSIDSLDARAKLREELSRVVDRVIVHEPQGFIEVFLRGEDVPVVQPLRIVSSLPGLTFTTMTEEEHKHMLDSLKGGF

SEQ ID NO: 28035 - protein, 528 aa, synthetic construct
MSGRSRLPHPRRRRGAATATPRGLRWAIYLRNSKQRRVNGVPVGYSIPTQALECRAFVAHLDPDAASVEEIVDRGRPGGAGVYRPGMEQVLELVKAGAVDAVMAFKADRIGRSLRESEAFWDDCERAGAWVAACDAPDLSDPAIRGMLFGMAERENQSRSDWAHTSLQRRREAGLPPVKSAAAYGMRWDGDELALEPAEWAVVARVFQAFDAGSTINEIARSLSADRVPRRRSRRHEWNAAAVSRILHCSWYIGLVPDNDAFWNARFNPLAALDGELWDRVQARLGDRRRTGQNLNHVMSGLLFCGLCGGPSPMSVLHEKKVRKDGSVLRTPRYRCIHHVNDRTACPGQSISGTHVERFLLEQIRAVIDGDELSAARFARRQITASQGLEHAAARHDAAVADLRAQRERLISRVKDEGFAMDAVSFNAQLQSLQQQITLHETHCTQALGRASLSRAALARLRNQLDSDSPLSLESWGRVAPARRNEFLRAMFPAGLLVHPAPPDTPRGQVQSRLTIRARSPKDASKSP

SEQ ID NO: 28036 - protein, 559 aa, synthetic construct
MKTKLYSYIRFSSMRQSDGSSYERQIRMAREIAAKYDLELVNDYQDLGVSAFKGANSKTGALSRFLDAIGRSVPVGSWLFIENLDRLSRADIVSAQELFLSIIRRGITIVTGMDNKIYSLDTVTANPMDLMFSILLFIRGNEESQTKRNRTNSSALIKIKAHQENPQNPAVAIEEVGKNMWWTDTTSGYVLPHPTYFPVVQEIVELRKNGRSTAEILDHLNETYAPPPAVSNKKHSKWSRAMVERLFHTRALIGIKEVSVDGVNYELKDYYPRVIDDATFYHLKKNIGARAWNFGDKEEVKPIPLLSGIGLLKCDHCGCAMVKVKGTNKRSDQYRYTCDATRSRRLDCEHPNWSFRGDQLEKAVLQLLADKIWIAEDKANPVPALKVQVDEISRKIDNLIALSAMTGATKELADQITTLNSERETLYNQIKMAEEEMYSVDSQGWEKLAEFDLEDVYNEERLKVRFKIKQALKRIGCSRIDRNKNLFVLEYIDGKTQRVVIENSRGTRKGQIFVDLKTINDRQILESNGLVLHPCLDMLTDKNWKPEEEIPGPLQEFGI

SEQ ID NO: 28037 - protein, 547 aa, synthetic construct
MKLLATYIRWSTKEQDSGDSLRRQTNLIDAFYAKHKNDYYLLPAHRYVDKGKSGFHQQHKAQGSDFRRMFENVMSGVIPEGSLIVVENFDRFSRADIDTAIDDVRQILRKGVSILTLGDGELYDKSALTDPVKLIKHIIIAERAHQESLVKQKRIAQVWNHKTQLARELKKPMGKQAPGWLELSEDGSHYIVDEDKASLVNIIYDKRLSGMSMFAICKWLNEQGYPTINQRKVRISKTKKPDGNWSALSVKHILTSRSVLGYLPAKISTEDRKTVLREEIEGFYPQIVTDSKFYAVQQLLEETGKGKTSSGDHWLYVNILKGLIRCKCGLVMTPTGIRKPVYQGTYRCNGNKESRCSYGTVSRKLLDTQLCSRLFSKLSQLHDEATDTAKLDELQRRLNTVDSELEKLTETLIQLPNITQIQEALRVKQEEKDELIVQLSREKARVKSVSSLDLSGLDMESVEGRTEAQIIIKRLVKEIVVSGNEKLVDIYLHNGNMIRGFPLDGKDDHTLTLEEATDEMQSLDDMLIFGEPVTRIYPAGDMEEVDA

SEQ ID NO: 28038 - protein, 506 aa, synthetic construct
MRTVITYLRFSSATQGAEGADSTRRQNELFKQWLRKNSDAQVVASFSDEGLSGYKGKHLTGQFGDMLARIESGEFSEGTVLLVEAIDRIGRLEHLETEALMNRIIAHGIEIHTLQDGLIYTRDALSDDLGISIIQRVKSYVAHQESKQKSFRVSQKWKQRAKLALAGEQRLTRNVPGWIDPDTFKCNEHAETVRLIFKLLLDGESLHNIARHLQANNISSFSRRKDANGFSVHSVRTILRSETTRGTLPASQRNDRPAIPNYYEAAIDASTFNKAQEILDKNRKGRTPASDNPLTINIFKGLFRCQCGASVHPTGTKNKYAGVYRCNNNPDGRCDVPPLKRKPFDKWMIDNFLGMIDVGNDGEAEGKIASLQHEVEIVTARIKKATALLLEMDDIDELKIQIKELNQRRTELQTTIDNMRRKASLTDKELPQLKDIDLTTKAGRVECQLILSKHLKGLTLGKDSVTVTLQNDTEIIVPTDPLPLNDGTSIFEIAEKNLLNIDTFQL

SEQ ID NO: 28039 - protein, 559 aa, synthetic construct
MKTKLYSYIRFSSMRQNDGSSYERQIRMAREVAAKYDLELVNDYQDLGVSAFKGANSKTGALSRFLDAIGRSVPVGSWLFIENLDRLSRADIVSAQELFLSIIRRGITIVTGMDNKIYSLDTVTANPMDLMFSILLFIRGNEESQTKRNRTNSSALIKIKAHQENPQNPAVAIEEVGKNMWWTDTTSGYVLPHPVFFPIVQEVVELRRNGRSTAEILDHLNATYTPPPAASHKRHSNWSRAMIERLFHTRALIGIKEISVDGVKYELKDYYPRVLDDAEFYHLKKSIGVRACNYGDKEEAKPIPLLSGVNLLKCEHCGSAMVKVKGTNKRPNQYRYSCDAMRSSRIACVHTNWSFRGDQLEKAVLQLLADKIWIAEDKANPVPALKVQVDEISRKIDNLIALSAMTGATKELADQITTLNSERETLYNQIKMAEEEMYSVDSQGWEKLAEFDLEDVYNEDRIKVRFKLKQALKRIGCSRIDKYKNLFVLEYIDGKTQRVVIENSRGPRKGQIFVDLKTINDRQILESNGLVLHPCLDMLTDKDWKPEEEIPGPLQEFGI

SEQ ID NO: 28040 - protein, 507 aa, synthetic construct
MKRVISYFRFSSEKQAKGDSLRRQSKMVTDWLKAHPEYYLDQDLSFRDLGVSGFTGKHLKGGLGDFLTAIEKGLVKAGDTLLIESLDRLSRQAVDRASELLRNILRSGVDVVTLSDGEHYTSESLKDPLALIKSILIMQRAHEESLRKSERIQAAWNRKKELISEGIKISKRCPAWLRLNDDRKSFSVIPDKVETVKRCFQLRLEGKSIWEIVRTMNAEGRQTLNQYEAGSFGQSSVQDLLKNRSVIGYFTPKGCEEIAGYYPAIIDETTFYKVQQLSYARYGRKPASDKPLSVNLFKGVIRCSECGHALIITGFSDTRSGIYRCPLRNENRCSAKGLSRKQTDGTLLTLLSRLDRFDSDTTNIIDMLRLHREHISSNIEKLVQLSLEIEDLSAITSKLKQLKNELSQVDADIEKETQRLKSIDVGCLSDCDLTTKAGRIEAQLIIKSAVKEVVLNTAKRRCKVTFHNGRAITLPITENPSEDVTEAIQSLSEVTERGLIDVDEVII

SEQ ID NO: 28041 - protein, 507 aa, synthetic construct
MKRAISYIRFSSEKQSRGDSLRRQSKMVNDWLKAHPEYYLDQDLSFRDLGVSGFTGKHLKGGLGDFLTAIEKGLVKAGDTLLIESLDRLSRQAVDRASELLRNILRSGVDIVTLSDGEHYTRESLKDPLALIKSILIMQRAHEESLRKSERIQAAWNRKKELISEGIKISKRCPAWLKLNDDRKSFSVIPEKVETVKRCFQLRLEGKSIWEIVRTLNAEGHQTLNQYKAGSFGQTSVQDLLKNRSVIGYFTPKGCEEISGYYPSIIHETDFYKVQQLSYARHGRKPASAKPLSVNLFKGVIRCSECGHALIITGFSDTRNGIYRCPLRNENRCSAKGLSRKQTDGTLLTLLSRLDRFDSDTTNTIDTLKLHREHISSNIEKLVQLSLEIEDLSAITSKLKQLKGELSQVDADIEKETQRLKSIDVGCLSDCDLTTKAGRIEAQLIIKSAVKEVVLNTAKRRCKVTFHNGKSITLPITENPSEDVTEAIQSLSEVTERGLIDVDEVII

SEQ ID NO: 28042 - protein, 559 aa, synthetic construct
MKTKLYSYIRFSSMRQNDGSSYERQIRMAREVAAKYDLELVNDYQDLGVSAFKGANSKTGALSRFLDAIGRSVPVGSWLFIENLDRLSRADIVSAQELFLSIIRRGITIVTGMDNKIYSLDTVTANPMDLMFSILLFIRGNEESQTKRNRTNSSALIKIKAHQENPQNPAVAIEEVGKNMWWTDTTSGYVLPHPVYFPVVQEIVELRKNGRSTAEILDHLNETYTPPPAVSNKKHSKWSRAMVERLFHTRALIGIKEVSVDGVNYELKDYYPRVIDDATFYHLKKNIGARAWNLGDKEEVKPIPLLSGIGLLKCDHCGCAMVKVKGTNKRSDQYRYTCDATRSRRLDCEHPNWSFRGDQLEKAVLQLLADKIWIAEDKANPVPALKVQVDEISRKIDNLIALSAMTGATKELADQITTLNSERETLYNQIKMAEEEMYSVDSQGWEKLAEFDLEDVYNEERLKVRFKIKQALKRIGCSRIDRNKNLFVLEYIDGKTQRVVIENSRGTRKGRIFIDLKTINDRQILESNGLVLHPCLDMLTDKNWKPEEEIPGPLQEFGI

SEQ ID NO: 28043 - protein, 559 aa, synthetic construct
MKTKLYSYIRFSSMRQNDGSSYERQIRMAREVAAKYDLELVNDYQDLGVSAFKGANSKTGALSRFLDAIGRSVPVGSWLFIENLDRLSRADIVSAQELFLSIIRRGITIVTGMDNKIYSLDTVTANPMDLMFSILLFIRGNEESQTKRNRTNSSALIKIKSHQENPQNPAVAIEEVGKNMWWTDTTSGYVLPHPVYFPVVQEIVELRKNGRSTAEILDHLNETYAPPPAVSNKKHSKWSRAMVERLFHTRALIGIKEVSVDGVNYELKDYYPRVIDDATFYHLKKNIGARAWNFGDKEEAKPIPLLSGIGLLKCDHCGCAMVKVKGTNKRSDQYRYTCDATRSRRLDCEHPNWSFRGDQLEKAVLQLLADKIWIAEDKANPVPALKVQVDEISRKIDNLIALSAMTGATKELADQITTLNSERETLYNQIKMAEEEMYSVDSQGWEKLAEFDLEDVYNEERLKVRFKIKQALKRIGCSRIDRNKNLFVLEYIDGKTQRVVIENSRGTRKGRIFVDLKTINDRQILESNGLVLHPCLDMLTDKNWKPEEEIPGPLQEFGI

SEQ ID NO: 28044 - protein, 507 aa, synthetic construct
MKRVISYIRFSSERQAKGDSLRRQSKMVNDWLKAHPEYYLDQDLSFRDLGVSGFTGKHLKGGLGDFLTAIEKGLVKAGDTLLIESLDRLSRQDVDQASELLRNILRSGVDVVTLSDGEHYTKESLKDPLALIKSILIMQRSHEESLRKSERIQAAWDAKKEAAKAGIKISKRCPAWLKLNDDRKTFSVIPEKVETVKRCFQLRLEGKSIWEIVRTLNDEGHQTLNQYKAGKFGQTSVQDLLKNRSVIGYFTPKGCEEITGYFPPIIPETDFYKVQQLSYSRYGRKPASDKPLSVNLFKGVIRCSECGHALIITGFSDTRNGIYRCPLRNENRCSAKGLSRKQTDGTLLTLLSRLDRFDSDMTNTIDMLRLHREHISSNIEKLVQLSLEIEDLSAITIKLKQLKGELSQVDADIEKETQRLKSIDVGCLSDCDLTTKAGRIEAQLIIKSAVKEVVLNTAKRRCKVTFHNGKSITLPITENPSEDVTEAIQSLSEVTERGLIDVDVVEI

SEQ ID NO: 28045 - protein, 506 aa, synthetic construct
MRTVITYLRFSSATQGAEGADSTRRQNELFKQWLRKNSDAQVVASFSDEGLSGYKGKHLTGQFGDMLARIEAGEFPAGTILLVESIDRIGRLEHLETEALMNRILGNGIEIHTLQDGLIYTKDALADDLGISIIQRVKAYIAHQESKQKSFRVSQKWEQRAKLALAGEQRLTKMVPGWIDPEILKLNEHAETVRLIFKLLLDGESLHNIARHLQSNGIKSFSRRKDANGFSVHSVRTILRSETTIGTLPASQRNDRPAIPNYYEAAIDAATFNKAQEILDKNRKGRTPASDNPLTINIFKGLFRCQCGASVHPTGTKNKYAGVYRCNNNPDGRCDVPPLKRKPFDKWMIDNFLGMIDVGNDGEAEGKIASLQHEVEIVTTRIKKATALLLEMDDIDELKIQIKELNQRRTELQTTIDSMRRKASLTDKELPQLKDIDLTTKAGRVECQLILSKHLKGLTLGKDSVTVTLQNDTEITIPTNPLPLNDGSPIFEIADKELLDIDAYQL

SEQ ID NO: 28046 - protein, 507 aa, synthetic construct
MKRAISYIRFSSEKQSRGDSLRRQSKMVNDWLKAHPEYYLDQDLSFRDLGVSGFTGKHLKGGLGDFLTAIEKGLVKAGDTLLIESLDRLSRQNVDRASELLRNILRSGVDVVTLSDGEHYTRESLKDPLALIKSILIMQRAHEESLRKAERIQAAWDAKKEAAKAGIKISRRCPAWLKLNDDRKSFSVIPEKVETVKRCFQLRLEGKSIWEIVRTLNAEGHQTLNQYKAGKFGQTSVQDLLKNRSVIGYFTPKGCEEISGYYPAIIDETTFYKVQQLSHYRYGRKPVSDKPLSVNLFKGVIRCSECGHALIITGFSDTRNGIYRCPLRNENRCSAKGLSRKQTDGTLLTLLSRLDRFDSDMTNTLDTLKLHREHISSNIEKLVQLSLEIEDLSAITIKLKQLKGELSQVDADIEKETQRLKSIDVGCLSDCDLTTKAGRIEAQLIIKSAVKEVVLNTAKRRCKVTFHNGRAITLPITENPSKDVTEAIQSLSEVTERGLIDVDVVAI

SEQ ID NO: 28047 - protein, 507 aa, synthetic construct
MKRAISYMRFSTEKQIKGDSIRRQSKLVTDWLSKNPDYFLDESLSFKDLGKSAFSGKHLRAGLGDFLTAIKEGLVKAGDTLLIESLDRLSRQDVDQASELLRGILRSGVDVVTLSDGEHYTAESLKDPLALIKSILIMQRAYEESLRKSERVAAAWNRKKDIISEGIKVSKRCPAWLKLNDDRRGFSIIPEKVEIVKKVFDLRLQGLSFWAITRALNDGGYLSLNQYKPQGWSDTSVKTLLRNRSVIGCFTPAGREEVKDYYPAIISESLFYKVQQLNTGQYGRASTSDNPLSVNLFRGIIKCSECGSSIVIGGYAERRYGMYRCPKNSSHQCHAKAISRKQTDETLLFMLSLVDRMEPDISNQIDSLNLKKSDLESKVAKLLELAIELDDMTMVTDKLRDLKKELGQVKHQIEEETKRVRAISTGNLNDIDRSTKEGMIEAQLLIKGVVKSIVIDSSKRRCRVTLHNGKVIGLPISKNPPEELTSALTSMFEGTERGLLSLDEVEL

SEQ ID NO: 28048 - protein, 536 aa, synthetic construct
MLRQTTRNLITALYPRLSHEDELQGESNSISNQKRILETYAKQNGFSNVQWYTDDGYSGANFQRPGFQAMLADIEAGKVGTVIVKDMSRLGRNYLQVGMYTEMIFPQKGVRFIAINDGVDSAQGDNDFAPLRNIFNEWLVRDTSKKIKAVKRSKGMSGKPVTSKPVYGYFMDEDENFIIDGEAAPVVRQIYSLCLAGNGPTKIARMLTEQEIPTPGTLEYRRTGSTRRYHPGYECKWATNTVVHILENREYTGCLVNFKTEKPSYKTKHSVENPIEKQAIFENHHEPIIDTQMWERVQELRKQRKRPNRYDEVGLFSGILFCADCGSVLYQQRYQNATRKQDCYICGSYKKRTRDCTAHFIRTDLLTAGVTDNLRKVTSYAAKHEARFMKLLIEQNEDGGKRRNAARKKELEAAEKRISELSAIFKRLYEDSVTGRISDERFTELSADYEAEQKELKERAAAIRAELSKAQEATVNAEKFMNVVRKYTSFEELTPTLLREFVEKIVVHECSYDENGTRRQDIDIYYSFVGKVDLPE

SEQ ID NO: 28049 - protein, 506 aa, synthetic construct
MRTVITYLRFSSATQGAEGADSTRRQNELFKQWLRKNSDAQVVASFSDEGLSGYKGKHLTGQFGDMLARIEAGEFPASTILLVESIDRIGRLEHLETEALMNRILGNGIEIHTLQDGLIYTKDALADDLGISIIQRVKAYIAHQESKQKSFRVSQKWKQRAKLALAGEQHLTRNVPGWIDPDTFKCNEHAETVRLIFKLLLDGESLHNIARHLQSNDIKSFSRRKDANGFSVHSVRTVLRSESVIGTLPASQRNDRPAIPNYYEAAIDAATFNKAQEILDKNRKGRTPASDNPLTINIFKGLFRCQCGASVHPTGTKNKYAGVYRCNNHLDGRCDVPPLKRKPFDRWMIDNFLGMIDVGNDGESEGKIAALQHEVEIVTARIKKATALLLEMDDITELKAQVKGLNQKRTEIQTTIDTLKRKTSLTDKELPQLKDIDLTTKAGRVECQLILSKHLKGLTLGKDSVTVTLQNDTEITIPTNPLPLNDGSPIFEIADKELLDIDAYQL

SEQ ID NO: 28050 - protein, 506 aa, synthetic construct
MRSVITYLRFSSAIQGAEGADSTRRQNDLFKQWLKKNSDAQVVASFNDEGLSGYKGKHLSGQFGDMLSRIESGEFSEGTVLLVEAIDRIGRLEHLETEALMNRIIAHGIEIHTLQDGLIYTRDALSDDLGISIIQRVKSYLAHQESKQKSFRVSEKWKQRAKLALAGEQHLTRNVPGWIDPDTFKCNEHAETVRLIFKLLLDGESLHNIARHLQSNDIKSFSRRKDANGFSVHSVRTVLRSESVIGTLPASQRNDRPAIPNYYEAAIDASTFNKAQEILDKNRKGRTPASDNPLTINIFKGLFRCQCGASVHPTGTKNKYQGVYRCNSHLDGRCDVPPLKRKPFDRWMIDNFLGMIDVGNDGEAEKEIASLQHEVETVTARIKKATALLLEMDDITELKTQVKELNQKRTELQTTINTMKRKTSLSDKGLPQLKDIDLMTKAGRVECQLILSKHLKGLTLGKDSVTVTLQNDTEITIPTNPLPLNDGTSIFEIAEKNLLNIDTFQL

SEQ ID NO: 28051 - protein, 507 aa, synthetic construct
MKRVISYIRFSSERQAKGDSLRRQSKMVNDWLKAHPEYYLDQDLSFRDLGVSGFTGKHLKGGLGDFLTAIEKGLVKAGDTLLIESLDRLSRQAVDRASELLRNILRSGVDVVTLSDGEHYTSESLKDPLALIKSILIMQRAHEESLRKSERIQAAWNRKKELISEGIKISKRCPAWLRLNDDRKSFSVIPDKVETVKRCFQLRLEGKSIWEIVRTLNDEGHQTLNQYKAGKFGQTSVQDLLKNRSVIGYFTPKGCEEISGYYPSIIHETDFYKVQQLSYSRYGRKPASDKPMAVNLFKGVIRCSECGHALIITGFSDTRSGIYRCPLRNENRCSAKGLSRKQTDGTLLALLSRLDRFDSDTTNIIDTLKLHREHISSNIEKLVQLSLEIEDLSAITSKLKQLKGELSQVDADIEKETQRLKSIDVGCLSDCDLTTKAGRIEAQLIIKSAVKEVVLNTAKRRCKVTFHNGKIIDLPITENPSEDVTEAIQSLSEVTERGLIDVDVVEI

SEQ ID NO: 28052 - protein, 507 aa, synthetic construct
MKRVISYIRFSSEKQAKGDSLRRQSKMVTDWLKAHPEYYLDQDLSFRDLGVSGFTGKHLKGGLGDFLTAIEKGLVKAGDTLLIESLDRLSRQDVDQASELLRNILRSGVDVVTLSDGEHYTKESLRDPLSLIKSILIMQRAHEESLRKAERIQAAWDAKKEAAKAGIKISRRCPAWLKLNDDRKSFSVIPEKVETVKRCFQLRLEGKSIWEIVRTLNAEGHQTLNQYKAGKFGQTSVQDLLKNRSVIGYFTPKGCEEISGYYPAIIDETTFYKVQQLSYARYGRKPASDKPMAVNLFKGVIRCSECGHALIITGFSDTRSGIYRCPSRNENRCNAKGLSRKQTDGTLLALLSRLDRFDSDMTNTIDTLKLHREHISSNIEKLVQLSLEIEDLNAITNKLKQLKNELSQVDADIEKETQRLKSIDVGCLSDCDLTIKAGRIEAQLIIKSAVKEVVLNTAKRRCKVTFHNGRAITLPITENPSEDVTEAIQSLSEVTERGLIDVDEVII

SEQ ID NO: 28053 - protein, 507 aa, synthetic construct
MKRVISYIRFSSERQAKGDSLRRQSKMVNDWLKAHPEYYLDQDLSFRDLGVSGFTGKHLKGGLGDFLTAIEKGLVKAGDTLLIESLDRLSRQAVDRASELLRNILRSGVDVVTLSDGEHYTRESLKDPLALIKSILIMQRAHEESLRKAERIQAAWDAKKEAAKAGIKISKRCPAWLKLNDDRKSFSIIPEKVETVKRCFQLRLEGKSIWAIVKALNDEGHQTLNQYKAGKFGQTSVQDLLKNRSVIGYFTPKGCEEIAGYYPAIIDETTFYKVQQLSHSRYGKRSVSDKPLSVNLFKGVIRCSECGHALIITGFSDTRNGIYRCPLRNENRCSAKGLSRKQTDGTLLTLLSRLDRFDSDTTNTIDTLKLHREHISSNIEKLVQLSLEIEDLSAITSKLKQLKGELSQVDADIEKETQRLKSIDTGSLSDCDLSTKAGRIEAQLIIKSAVKEVVLNTAKRRCKVTFHNGKLIDLPITETPSDNVTEAIQSLSEVTERGLIDVDEVII

SEQ ID NO: 28054 - protein, 507 aa, synthetic construct
MKRVISYIRFSSEKQAKGDSLRRQSKMVTDWLKAHPEYYLDQDLSFRDLGVSGFTGKHLKGGLGDFLTAIEKGLVKAGDTLLIESLDRLSRQAVDRASELLRNILRSGVDVVTLSDGEHYTSESLKDPLALIKSILIMQRAHEESLRKSERIQAAWDAKKEAAKAGIKVSKRCPAWLKLNDDRKSFSVIPEKVATVKRCFQLRLEGKSIWEIVRTLNDEGHQTLNQYKPGKFGQTSVQDLLKNRSVIGYFTPKGREEIAGYFPPIIPETDFYKVQQLSYSRYGRKPASDKPLSVNLFKGVIRCSECGHALIITGFSDTRSGIYRCPSRNENRCNAKGLSRKQTDGTLLALLSRLDRFDSDMTNTVDTLKLHREHISSNIEKLVQLSLEIEDLSAITSKLKQLKGELSQVDADIEKETQRLKSIDVGCLSDCDLTTKAGRIEAQLIIKSAVKEVVLNTAKRRCKVTFHNGRIIDLPITENPSEDVTEAIQSLSEVTERCLIDVDEVII

SEQ ID NO: 28055 - protein, 559 aa, synthetic construct
MKTKLYSYIRFSSMRQNDGSSYERQIRMAREIAAKYDLELVNDYQDLGVSAFKGANSKTGALSRFLDAIGRSVPVGSWLFIENLDRLSRADIVSAQELFLSIIRRGITIVTGMDNKIYSLDTVTANPMDLMFSILLFIRGNEESQTKRNRTNSSALIKIKAHQENPQNPAVAIEEVGKNMWWTDTTSGYVLPHPVYFPVVQEIVELRKNGRSTAEILDHLNETYAPPPAVSNKKHSKWSRAMVERLFHTRALIGIKEISVDGVNYELKDYYPRVIDDPTFYHLKKNIGARAWNFGDKEEVKPIPLLSGIGLLKCDHCGCAMVKVKGTNKRSDQYRYTCDATRSRRLDCEHPNWSFRGDQLEKAVLQLLADKIWIAEDKANPVPALKVQVDEISRKIDNLIALSAMTGATKELADQITTLNSERETLYNQIKMAEEEMYSVDSQGWEKLAEFDLEDVYNEERLKVRFKIKQALKRIGCSRIDRNKNLFVLEYIDGKTQRVVIENSRGTRKGQIFVDLKTINDRQILESNGLVLHPCLDMLTDKNWKPEEEIPGPLQEFGI

SEQ ID NO: 28056 - protein, 506 aa, synthetic construct
MRTVITYLRFSSATQGAEGADSTRRQNELFKQWLRKNSDAQVVASFSDEGLSGYKGKHLTGQFGDMLARIESGEFSEGTVLLVEAIDRIGRLEHLETEALMNRIIAHGIEIHTLQDGLIYTRDALSDDLGISIIQRVKSYVAHQESKQKSFRVSQKWKQRAKLALAGEQRLTKMVPGWIDPETFEVNEHAETVRLIFKLLLDGESLHNIARHLQANNISSFSRRKDANGFSVHSVRTILRSETTIGTLPASQRNDRPAIPNYYEAAIDAATFNKAQEILDKNRKGRTPASDNPLTINIFKGLFRCQCGASVHPTGTKNKYQGVYRCNNHLDGRCDVPPLKRKPFDRWMIDNFLGMIDVGNDGEAEGKIAALQHEVEIVTARIKKATALLLEMDDITELKTQVKGLNQKRTELQTTIDNMRRKASLTDKELPQLKDIDLTTKAGRVECQLILSKHLKGLTLGKDSVIVTLQNDTEITIPTDPLPLNDGTSIFEIAEKNLLNIDTFQL

SEQ ID NO: 28057 - protein, 507 aa, synthetic construct
MKRVISYIRFSSERQAKGDSLRRQSKMVNDWLKAHPEYYLDQDLSFRDLGVSGFTGKHLKGGLGDFLTAIEKGLVKAGDTLLIESLDRLSRQDIDIASELLRRILRAGVDIVTLSDGEHYTRESLKDPLALIKSILIMQRAHEESLRKAERIQAAWDAKKEAAKAGIKISKRCPAWLKLNDDRKTFSVIPEKVETVKRCFQLRLEGKSIWEIVRTMNAEGHQTLNQYKAGKFGQTSVQDLLKNRSVIGYFTPKGCEEIAGYFPPIIPETDFYKVQQLSYSRYGRKPASDKPLSVNLFKGVIRCSECGHALIITGFSDTRNGIYRCPLRNENRCSAKGLSRKQTDGTLLTLLSRLDRFDSDMTNTIDTLKLHREHISSNIEKLVQLSLEIEDLSAITIKLKQLKNELSQVDADIEKETQRLKSIDVGCLSDCDLTTKAGRIEAQLIIKSAVKEVVLNTAKRRCKVTFHNGKVIDLPITETPSEDVTEAIQSLSEVTERGLIDVDEVII

SEQ ID NO: 28058 - protein, 506 aa, synthetic construct
MRHVITYLRYSSAIQGAEGADSTRRQNDLFKQWLKKNSDAQVVASFNDEGLSGYKGKHLSGQFGDMLSRIESGEFSEGTVLLVEAIDRIGRLEHLETEALMNRILGNGIEIHTLQDGLIYTKDALSDDLGISIIQRVKSYIAHQESKQKSFRVSQKWEQRAKLALAGEQRLTRNVPGWIDPDTFKCNEHAETVRLIFKLLLSGESLHNIARHLQSNGIKSFSRRKDANGFSVHSVRTILRSETTIGTLPASQRNDRPAIPNYYEAAIDASTFNKAQEILGKNRIGRTPASDNPLTINIFKGLFRCQCGASVHPTGTKNKYQGVYRCNNHLDGRCDVPPLKRKPFDKWMLENFLGMIDVGNDGEAEGKIASLQHEVEIVTTRIKKATALLLEMDDIDELKIQLKELNQKRTELQTTIDNMRRKASLTDKELPQLKDIDLTTKVGRVECQLILSKHLKGLTLGKDSVTVTLQNDTEITIPTNPLPLNDGSPIFEIADKELLDIDAYQL

SEQ ID NO: 28059 - protein, 507 aa, synthetic construct
MKRVISYIRFSSEKQAKGDSLRRQSKMVTDWLKAHPEYYLDQDLSFRDLGVSGFTGKHLKGGLGDFLTAIEKGLVKAGDTLLIESLDRLSRQAVDRASELLRNILRSGVDVVTLSDGEHYTSESLKDPLALIKSILIMQRAHEESLRKSERIQAAWNRKKELISEGIKISKRCPAWLRLNDDRKSFSVIPDKVETVKRCFQLRLEGKSIWEIVRTLNDEGHQTLNQYKAGKFGQTSVQDLLKNRSVIGYFTPKGREEIAGYFPPIIPETDFYKVQQLSYSRYGRKPASDKPLSVNLFKGVIRCSECGHALIITGFSDTRSGIYRCPLRNENRCSAKGLSRKQTDSTLLALLSRLDRFDSDMTNTIDTLKLHREHISSNIEKLVQLSLEIEDLSAITIKLKQLKGELSQVDADIEKETQRLKSIDVGCLSDCDLTTKAGRIEAQLIIKSAVKEVVLNTAKRRCKVTFHNGKVIDLPITENPSEDVTEAIQSLSEVTERGLIDVDEVII

SEQ ID NO: 28060 - protein, 506 aa, synthetic construct
MRSVITYLRFSSATQGAEGADSTRRQNELFKQWLRKNSDAQVVASFNDEGLSGYKGKHLSGQFGDMLSRIESGEFSEGTILLVEAIDRIGRLEHLETEALMNRILGNGIEIHTLQDGLIYTKDALADDLGISIIQRVKAYIAHQESKQKSFRVSQKWGQRAKLALAGKQRLTKMVPGWIDPETFEVNEHAETVRLIFKLLLDGESLHNIARHLQANNISSFSRRKDANGFSVHSVRTILRSETTIGTLPASQRNDRPAIPNYYEAAIDAATFNKAQEILDKNRKGRTPASDNPLTINIFKGLFRCQCGASVHPTGTKNKYQGVYRCNNHLDGRCDVPPLKRKPFDRWMIDNFLGMIDVVSDGETERRLAELQHEVEIVTARIKKATALLLEMDDIDELKIQLKELNQKRTELQTTIDNMRRKASLTDKELPQLKDIDLTTKAGRVECQLILSKHLKGLTLGKDSVTVTLQNDTEITIPTNPLPLNDGSPIFEIADKELLDIDAYQL

SEQ ID NO: 28061 - protein, 547 aa, synthetic construct
MKLLVTYIRWSTREQDSGDSLRRQTNLIDAFYSKHKNDYYLLPAHRYVDKGKSGFHQQHKAQGSDFRRMFENVMSGAIPEGSLIVVENFDRFSRADIDTAIDDVRQILRKGVSILTLGDGELYDKSALTDPVKLIKHIIIAERAHQESLVKQKRIAQVWNHKTQLARELKKPMGKQAPGWLELSEDGSHYIVDEDKASLVNIIYDKRLSGMSMFAICKWLNEQGYPTINQRKVRISKTKKPDGNWSALSVKHILTSRSVLGYLPAKISTEDRKTVLREEIESFYPQIVTDSKFYAVQQLLEETGKGKTSSGEHWLYVNILKGLIRCKCGLVMTPTGIRKPVYQGTYRCNGNKESRCSYGTVSRKLLDTQLCSRLFSKLSQLHDEATDTAKLDEIQRRLNTVDSELEKLTETLIQLPNITQIQEALRVKQEEKDELIVQLSREKARVKSVSSLDLSGLDMESVEGRTEAQIIIKRLVKEIVVSGNEKLVDIYLHNGNMIRGFPLDGKDDHTLTLEEATDEMQPLDDMLIFGEPVTRIYPAGDMEEVDA

SEQ ID NO: 28062 - protein, 506 aa, synthetic construct
MRTVITYLRFSSATQGAEGADSTRRQNELFKQWLRKNSDAQVVASFSDEGLSGYKGKHLTGQFGDMLARIEAGEFPAGAILLVESIDRIGRLEHLETEALMNRIIAHGIEIHTLQDGLIYTRDALSDDLGISIIQRVKAYIAHQESKQKSFRVSQKWEQRAKLALAGEQRLTKMVPGWIDPDTFKLNEHAETVRLIFKLLLSGESLHNIARHLQSNGIKSFSRRKDANGFSVHSVRTILRSETTIGTLPASQRNDRPAIPNYYEAAIDASTFNKAQEILDKNRKGRTPASDNPLTINIFKGLFRCQCGASVHPTGTKNKYQGVYRCNNHLDGRCDVPPLKRKPFDKWMIDNFLGMIDVGNDGEAEGKIASLQHEVETVTARIKKATALLLEMDDITELKTQVKELNQKRTELQTTIDSMRRKTSLSDKGLPQLKDIDLMTKVGRVECQLILSKHLKGLTLGKDSVTVTLQNDTEITIPTDPLPLNDGTSIFEIAEKNLLNIDTFQL

SEQ ID NO: 28063 - protein, 507 aa, synthetic construct
MKRVISYIRFSSEKQAKGDSLRRQSKMVNDWLKAHPEYYLDQDLSFRDLGVSGFTGKHLKGGLGDFLTAIEKGLVKAGDTLLIESLDRLSRQDIDIASELLRNILRSGVDVVTLSDGEHYTRESLKDPLSLIKSILIMQRAHEESLRKSERIQAAWNRKKELISEGIKVSRRCPAWLRLNDDRKSFSVIPEKVETVKRCFQLRLEGKSIWEIVRTLNDEGHQSMSQYKPGKFGQTSVQDLLKNRSVIGYFTPKGCEEISGYYPAIIDETTFYKVQQLSYARHGRKPASAKPLSVNLFKGVIRCSECGHALIITGFSDTRNGIYRCPLRNENRCSAKGLSRKQTDGTLLTLLSRLDRFDSDTTNTIDTLKLHREHISSNIEKLVQLSLEIEDLSAITSKLKQLKNELSQVDADIEKETQRLKSIDVGCLSDCDLTTKAGRIEAQLIIKSAVKEVVLNTAKRRCKVTFHNGKAITLPITENPSDNVTEAIQSLSEVTERGLIDVDVVEI

SEQ ID NO: 28064 - protein, 506 aa, synthetic construct
MRHVITYLRYSSAIQGAEGADSTRRQNDLFKQWLKKNSDAQVVASFNDEGLSGYKGKHLSGQFGDMLSRIESGEFSEGTVLLVEAIDRIGRLEHLETEALMNRILGNGIEIHTLQDGLIYTKDALADDLGISIIQRVKAYIAHQESKQKSFRVSQKWEQRAKLALAGEQRLTKMVPGWIDPDTFKCNEHAETVRLIFKLLLDGESLHNIARHLQANNISSFSRRKDANGFSVHSVRTILRSETTRGTLPASQRNDRPAIPNYYEAAIDAATFNKAQEILDKNRKGRTPASDNPLTINIFKGLFRCQCGASVHPTGTKNKYAGVYRCNNHLDGRCDVPPLKRKPFDRWMIDNFLGMIDVGNDGESERKIAALQHEVEIVTARIKKATALLLEMDDITELKAQVKGLNQKRTEIQTTIDTLKRKTSLTDKELPQLKDIDLTTKAGRVECQLILSKHLKGLTLGKDSVTVTLQNDTEITIPTNPLPLNDGSPIFEIADKELLDIDAYQL

SEQ ID NO: 28065 - protein, 506 aa, synthetic construct
MRTVITYLRFSSATQGAEGADSTRRQNELFKQWLRKNSDAQVVASFSDEGLSGYKGKHLTGQFGDMLARIEAGEFPAGAILLVESIDRIGRLEHLETEALMNRIIAHGIEIHTLQDGLIYTRDALSDDLGISIIQRVKSYLAHQESKQKSFRVSEKWKQRAKLALAGEQHLTRNVPGWIDPDTFKCNEHAETVRLIFKLLLDGESLHNIARHLQSNDIKSFSRRKDANGFSVHSVRTILRSETTIGTLPASQRNDRPAIPNYYEAAIDAATFNKAQEILDKNRKGRTPASDNPLTINIFKGLFRCQCGASVHPTGTKNKYQGVYRCNNHLDGRCDVPPLKRKPFDRWMIDNFLGMIDVGNDGEAEGKIASLQHEVEIVTTRIKKATALLLEMDDIDELKIQLKELNQKRTELQTTIDNMRRKASLTDKELPQLKDIDLTTKAGRVECQLILSKHLKGLTLGKDTVTVTLQNDTEITIPTDPLPLNDGTSIFEIAEKNLLNIDTFQL

SEQ ID NO: 28066 - protein, 547 aa, synthetic construct
MKLLVTYIRWSTKEQDSGDSLRRQTNLIDAFYAKHKDDYYLLPAHRYVDKGKSGFHQQHKNQGSDFRRMFENVMSGVIPEGSLIVVENFDRFSRADIDTAIDDVRQILRKGVSILTLGDGELYDKSALTDPVKLIKHIIIAERAHQESLVKQKRIAQVWNHKTQLARELKKPMGKQAPGWLELSEDGSHYIVDEDKASLVNIIYDKRLSGMSMFAICKWLNEQGYPTINQRKVRISKTKKPDGNWSALSVKHILTSRSVLGYLPAKISTEDRKTVLREEIESFYPQIVTDSKFYAVQQLLEETGKGKTSSGEHWLYVNILKGLIRCKCGLVMTPTGIRKPVYQGTYRCNGNKESRCSYGTVSRKLLDTQLCSRLFSKLSQLHDEATDTAKLDELQRRLNTVDGELEKLTETLIQLPNITQIQEALRVKQEEKDELIAQLSREKARVKSVSSLDLSGLDMESVEGRTEAQIIIKRLVKEIVVSGNEKLVDIYLHNGNMIRGFQIDGKDDHTLTLEEATDEMQSLDDMLIFGEPVTRIYPAGDMEEVDA

SEQ ID NO: 28067 - protein, 507 aa, synthetic construct
MKRVISYIRFSSERQAKGDSLRRQSKMVNDWLKAHPEYYLDQDLSFRDLGVSGFTGKHLKGGLGDFLTAIEKGLVKAGDTLLIESLDRLSRQDVDQASELLRNILRSGVDVVTLSDGEHYTKESLRDPLSLIKSILIMQRSHEESLRKSERIQAAWNRKKELISEGIKISKRCPAWLRLNDDRKSFSVIPDKVETVKRCFQLRLEGKSIWEIVRTLNAEGHQTLNQYKAGSFGQSSVQDLLKNRSVIGYFTPKGCEEIVGYFPPIIPETDFYKVQQLSYSRYGRKPASDKPLSVNLFKGVIRCSECGHALIITGFSDTRSGIYRCPLRNENRCSAKGLSRKQTDGTLLTLLSRLDRFDSDTTNTIDTLKLHREHISSNIEKLVQLSLEIEDLSAITIKLKQLKNELSQVDADIEKETQRLKSIDVGCLSDCDLTTKAGRIEAQLIIKSAVKEVVLNTAKRRCKVTFHNGKVIDLPITENPSEDVTEAIQSLSEVTERGLIDVDEVII

SEQ ID NO: 28068 - protein, 547 aa, synthetic construct
MKLLVTYIRWSTKEQDSGDSLRRQTNLIDAFYAKHKDDYYLLPAHRYVDKGKSGFHQQHKAQGSDFRRMFENVMSGVIPEGSLIVVENFDRFSRADIDTAIDDVRQILRKGVSILTLGDGELYDKSALTDPVKLIKHIIIAERAHQESLVKQKRIAQVWNHKTQLARELKKPMGKQAPGWLELSEDGSHYIVDEDKASLVNIIYDKRLSGMSMFAICKWLNEQGYPTINQRKVRISKTKKPDGNWSALSVKHILTSRSVLGYLPAKISTEDRKTVLREEIEGFYPQIVTDSKFYAVQQLLEETGKGKTSSGEHWLYVNILKGLIRCKCGLVMTPTGIRKPVYQGTYRCNGNKESRCSYGTVSRKLLDTQLCSRLFSKLSQLHDEATDTAKLDELQRRLNTVDSELEKLTETLIQLPNITQIQEALRVKQEEKDELIVQLSREKARVKSVSSLDLSGLDMESVEGRTEAQIIIKRLVKEIVVSGNEKLVDIYLHNGNMIRGFPLDGKDDHTLTLEEATDEMQSLDDMLIFGEPVTRIYPAGDMEEVDA

SEQ ID NO: 28069 - protein, 507 aa, synthetic construct
MKRVISYIRFSSEKQAKGDSLRRQSKMVTDWLKAHPEYYLDQDLSFRDLGVSGFTGKHLKGGLGDFLTAIEKGLVKAGDTLLIESLDRLSRQDIDIASELLRRILRAGVDVVTLSDGEHYTRESLRDPLSLIKSILIMQRSHEESLRKSERIQAAWDAKKEAAKAGIKVSKRCPAWLRLNDDRKSFSVIPDKVETVKRCFQLRLEGKSIWEIVRTLNAEGHRSMNQYKPGKFGQTSVQDLLKNRSVIGYFTPKGCEEISGYYPAIIDETTFYKVQQLSHSRYGKRSVSDKPLSVNLFKGVIRCSECGHALIITGFSDTRSGIYRCPLRNENRCSAKGLSRKQTDGTLLTLLSRLDRFDSDTTNIIDMLRLHREHISSNIEKLVQLSLEIEDLSAITSKLKQLKNELSQVDADIEKETQRLKSIDVGCLSDCDLTTKAGRIEAQLIIKSAVKEVVLNTAKRRCKVTFHNGRAITLPITETPSEDVTEAIQSLSEVTERGLIDVDVVAI

SEQ ID NO: 28070 - protein, 506 aa, synthetic construct
MRTVITYLRFSSAIQGAEGADSTRRQNDLFKQWLKKNSDAQVVASFSDEGLSGYKGKHLTGQFGDMLARIESGEFPAGTILLVESIDRIGRLEHLETEALMNRILGNGLEIHTLQDGLIYTKDALADDLGISIIQRVKAYIAHQESKQKSFRVSQKWEQRAKLALAGEQRLTKMVPGWIDPDTFKCNEHAETVRLIFKLLLDGESLHNIARHLQANNISSFSRRKDANGFSVHSVRTILRSVTTIGTLPASQRNDRPAIPNYYEAAIDAATFNKAQEILDKNRKGRTPASDNPLTINIFKGLFRCQCGASVHPTGTKNKYAGVYRCNNHLDGRCDVPPLKRKPFDRWMIDNFLGMIDVGNDGESERKIAALQHEVETVTARIKKATALLLEMDDIDELKIQLKELNQKRTELQTTIDSMRRKASLTDKELPQLKDIDLTTKAGRVECQLILSKHLKGLTLGKDSVTVTLQNDTEITIPTNPLPLNDGSPIFEIADKELLDIDAYQL

SEQ ID NO: 28071 - protein, 506 aa, synthetic construct
MRHVITYLRYSSAIQGAEGADSTRRQNDLFKQWLKKNSDAQVVASFNDEGLSGYKGKHLSGQFGDMLSRIESGEFPEGTILLVEAIDRIGRLEHLETEALMNRIIAHGIEIHTLQDGLIYTRDALSDDLGISIIQRVKSYIAHQESKQKSFRVSQKWEQRAKLALAGEQRLTKMVPGWIDPDTFKCNEHAETVRLIFKLLLDGESLHNIARHLQANNISSFSRRKDANGFSVHSVRTILRSETTIGTLPASQRNDRPAIPNYYEAAIDAATFNKAQEILDKNRKGRTPASDNPLTINIFKGLFRCQCGASVHPTGTKNKYAGVYRCNNHLDGRCDVPPLKRKPFDKWMIDNFLGMIDVGNDGEAEGKIASLQHEVEIVTARIKKATALLLEMDDIDELKIQLKELNQKRTELQTMIDNMRRKASLTDKELPQLKDIDLMTKEGRVECQLILSKHLKGLTLGKDSVTVTLQNDTEITIPTNPLPLNDGTSIFEIADKELLDIDAFRL

SEQ ID NO: 28072 - protein, 506 aa, synthetic construct
MRHVITYLRYSSAIQGAEGADSTRRQNELFKQWLRKNSDAQVVASFSDEGLSGYKGKHLTGQFGDMLARIEAGEFPASTILLVESIDRIGRLEHLETEALMNRILGNGIEIHTLQDGLIYTKDALADDLGISIIQRVKAYIAHQESKQKSFRVSQKWEQRAKLALAGEQRLTKMVPGWIDPDTFKCNEHAETVRLIFKLLLDGESLHNIARHLQANNISSFSRRKDANGFSVHSVRTILRSETTIGTLPASQRNDRPAIPNYYEAAIDVSTFNKAQEILDKNRKGRTPASDNPLTINIFKGLFRCQCGASVHPTGTKNKYQGVYRCNNHLDGRCDVQPLKRKPFDRWMIDNFLGMIDVGNDGESERKIAALQHEVEIVTARIKKATALLLEMDDIDELKIQLKELNQKRTELQTTIDNMRRKASLSDKGLPQLKDIDLMTKAGRVECQLILSKHLKGLTLGKDSVTVTLQNDTEIIVPTDPLPLNDGTSIFEIAEKELLEIDAYQL

SEQ ID NO: 28073 - protein, 547 aa, synthetic construct
MKLLATYIRWSTREQDSGDSLRRQTNLIDAFYSKHKNDYYLLPAHRYVDKGKSGFHQQHKAQGSDFRRMFENVMSGAIPEGSLIVVENFDRFSRADIDTAIDDVRQILRKGVSILTLGDGELYDKSALTDPVKLIKHIIIAERAHQESLVKQKRIAQVWNHKTQLARELKKPMGKQAPGWLELSEDGSHYIVDEDKASLVNIIYDKRLSGMSMFAICKWLNEQGYPTINQRKVRISKTKKPDGNWSALSVKHILTSRSVLGYLPAKISTEDRKTVLREEIEGFYPQIVTDSKFYAVQQLLEETGKGKTSSGDHWLYVNILKGLIRCRCGLVMTPTGIRKPVYQGTYRCNGNKESRCSYGTVSRKLLDTQLCSRLFSKLSQLHDEATDTAKLDELQRRLNTVDSELEKLTETLIQLPNITQIQEALRVKQEEKDELIVQLSREKARVKSVSSLDLSGLDMESVEGRTEAQIIIKRLVKEIVVSGNEKLVDIYLHNGNMIRGFPLDGKDDHTLTLEEATDEMQSLDDMLIFGEPVTRIYPAGDMEEVDA

SEQ ID NO: 28074 - protein, 507 aa, synthetic construct
MKRAISYIRFSSEKQSRGDSLRRQSKMVNDWLKAHPEYYLDQDLSFRDLGVSGFTGKHLKGGLGDFLTAIEKGLVKAGDTLLIESLDRLSRQDVDQASELLRNILRSGVDVVTLSDGEHYTKESLKDPLALIKSILIMQRSHEESLRKSERIQAAWNRKKELISEGIKISKRCPAWLRLNDDRKTFSVIPEKVETVKRCFQLRLEGKSIWEIVRTMNAEGHQTLNQYKAGSFGQTSVQDLLKNRSVIGYFTPKGREEISGYYPAIIDETTFYKVQQLSYARYGRKPASDKPLSVNLFKGVIRCSECGHALIITGFSDTRNGIYRCPLRNENRCSAKGLSRKQTDGTLLTLLSRLDRFDSDTTNIIDMLRLHREHISSNIEKLVQLSLEIEDLNAITSKLKQLKGELSQVDADIEKETQRLKSIDVGCLSDCDLTTKAGRIEAQLIIKSAVKEVVLNTAKRRCKVTFHNGKLIDLPITENPSEDVTEAIQSLSEVTERGLIDVDEVII

SEQ ID NO: 28075 - protein, 547 aa, synthetic construct
MKLLVPYIRWSTKEQDSGDSLRRQTNLIDAFYAKHKDDYYLLPAHRYVDKGKSGFHQQHKNQGSDFRRMFENVMSGVIPEGSLIVVENFDRFSRADIDTAIDDVRQILRKGVSILTLGDGELYDKSALTDPVKLIKHIIIAERAHQESLVKQKRIAQVWNHKTQLARELKKPMGKQAPGWLELSEDGSHYIVDEDKASLVNIIYDKRLSGMSMFAICKWLNEQGYPTINQRKVRISKTKKPDGNWSALSVKHILTSRSVLGYLPAKISTEDRKTVLREEIESFYPQIVTDSKFYAVQQLLEETGKGKTSSGEHWLYVNILKGLIRCKCGLVMTPTGIRKPVYQGTYRCNGNKESRCSYGTVSRKLLDTQLCSRLFSKLSQLHDEATDTARLDELQRRLNTVDSELEKLTETLIQLPNITQIQEALRVKQEEKDELIVQLSREKARVKSVSSLDLSGLDMESVEGRTEAQIIIKRLVKEIVVSGNEKLVDIYLHNGNMIRGFPLDGKDDHTLTLEEATDEMQPLDDMLIFGEPVTRIYPAGDMEEVDA

SEQ ID NO: 28076 - protein, 559 aa, synthetic construct
MKTKLYSYIRFSSMRQSDGSSYERQIRMAREIAAKYDLELVNDYQDLGVSAFKGANSKTGALSRFLDAIGRSVPVGSWLFIENLDRLSRADIVSAQELFLSIIRRGITIVTGMDNKIYSLDTVTANPMDLMFSILLFIRGNEESQTKRNRTNSSALIKIKAHQENPQNPAVAIEEVGKNMWWTDTTSGYVLPHPVYFPVVQEIVELRKNGRSTAEILDHLNETYTPPPAVSNKKHSKWSRAMVERLFHTRALIGIKEVSVDGVNYELKDYYPRVIDDPTFYHLKKNIGARAWNFGDKEEVKPIPLLSGIGLLKCDHCGCAMVKVKGTNKRSDQYRYTCDATRSRRLDCEHPNWSFRGDQLEKAVLQLLADKIWIAEDKANPVPALKVQVDEISRKIDNLIALSAMTGATKELADQITTLNSERETLYNQIKMAEEEMYSVDSQGWEKLAEFDLEDVYNEDRIKVRFKIKQALKRIGCSRIDRNKNLFVLEYVDGKTQRVVIENSRGTRKGRIFIDLKTINDRQILESNGLVLHPCLDMLTDKNWKPEEEQAGPLQEFGI

SEQ ID NO: 28077 - protein, 547 aa, synthetic construct
MKLLVTYIRWSTREQDSGDSLRRQTNLIDAFYSKHKEDYYLLPAHKYVDKGKSGFHQQHKNQGSDFRRMFDNVMSGAIPEGSLIVVENFDRFSRADIDTAIDDVRQILRKGVSILTLGDGELYDKSALTDPVKLIKHIIIAERAHQESLVKQKRIAQVWSHKTQLARELKKPMGKQAPGWLELSDDGSHYIVDEDKASLVNLIYDKRLSGMSMFAICKWLNEQGYPTINQRKVRISKTKKPDGNWSALSVKHILTSRSVLGYLPAKISTEDRKTVLREEIEGFYPQIVTDSKFYAVQQLLEETGKGKTSGGEHWLYVNILKGLIRCRCGLVMTPTGIRKPVYQGTYRCNGNKESRCNYGTVSRKLLDTQLCSRLFSKLSQLHDEATDTARLDELQRRLTSVDSELEKLTETLIQLPNITQIQEALRVKQEEKDELIAQLSREKARVKSVSSLDLSGLDMESVEGRTEAQIIIKRLVKEIVVSGNEKLVDIYLHNGNMIRGFPLDGKDDHTLTLEEATDEMQPLDDMLIFGEPVTRVYPAGDMEEVDA

SEQ ID NO: 28078 - protein, 506 aa, synthetic construct
MRTVITYLRFSSATQGAEGADSTRRQNELFKQWLRKNSDAQVVASFSDEGLSGYKGKHLTGQFGDMLARIEAGEFPAGAILLVESIDRIGRLEHLETEALMNRIIAHGIEIHTLQDGLIYTRDALSDDLGISIIQRVKSYLAHQESKQKSFRVSEKWKQRAKLALAGEQHLTRNVPGWIDPDTFKCNEHAETVRLIFKLLLDGESLHNIARHLQSNDIKSFSRRKDANGFSVHSVRTVLRSESVIGTLPASQRNDRPAIPNYYEAAIDASTFNKAQEILDKNRKGRTPASDNPLTINIFKGLFRCQCGASVHPTGTKNKYQGVYRCNSHLDGRCDVPPLKRKPFDRWMIDNFLGMIDVGNDGEAEKEIASLQHEVETVTARIKKATALLLEMDDITELKTQVKGLNQKRTELQTTIDNMRRKASLTDKELPQLKDIDLTTKAGRVECQLILSKHLKGLTLGKDSVIVTLQNDTEITIPTNPLPLNDGTSIFEIAEKELLEIDAYQL

SEQ ID NO: 28079 - protein, 507 aa, synthetic construct
MKRVISYIRFSSEKQAKGDSLRRQSKMVTDWLKAHPEYYLDQDLSFRDLGVSGFTGKHLKGGLGDFLTAIEKGLVKAGDTLLIESLDRLSRQAVDRASELLRNILRSGVDVVTLSDGEHYTRESLKDPLSLIKSILIMQRAHEESLRKSERIQAAWNRKKELISEGIKVSRRCPAWLRLNDDRKSFSVIPDKVETVKRCFQLRLEGKSIWEIVRTLNAEGHRSMNQYKPGKFGQTSVQDLLKNRSVIGYFTPKGCEEIAGYYPSVIDETTFYKVQQLSHSRYGRRSVSGKPLSVNLFRGVIRCSECGHALIITGFSDTRSGIYRCPLRNENRCSAKGLSRKQTDGTLLALLSRLDRFDSDTTNTIDTLKLHREHISSNIEKLVQLSLEIEDLNAITSKLKQLKGELSQVDADIEKETQRLKSIDVGCLSDCDLTTKAGRIEAQLIIKSAVKEVVLNTAKRRCKVTFHNGRAITLPITENPSEDVTEAIQSLSEVTERGLIDVDEVII

SEQ ID NO: 28080 - protein, 507 aa, synthetic construct
MKRVISYIRFSSEKQAKGDSLRRQSKMVTDWLKAHPEYYLDQDLSFRDLGVSGFTGKHLKGGLGDFLTAIEKGLVKAGDTLLIESLDRLSRQNVDRASELLRNILRSGVDVVTLSDGEHYTRESLKDPLALIKSILIMQRSHEESLRKSERIQAAWNRKKELISEGIKISKRCPAWLKLNDDRKSFSVIPEKVETVKRCFQLRLEGKSIWEIVRTLNDEGHQSMSQYKPGKFGQTSVQDLLKNRSVIGYFTPKGREEISGYYPAIIDETTFYKVQQLSYARYGRKPASDKPLSVNLFKGVIRCSECGHALIITGFSDTRSGIYRCPLRNENRCSAKGLSRKQTDGTLLALLSRLDRFDSDTTNTIDTLKLHREHISSNIEKLVQLSLEIEDLNAITSKLKQLKGELSQVDADIEKETQRLKSIDVGCLSDCDLTTKAGRIEAQLIIKSAVKEVVLNTAKRRCKVTFHNGKLIDLPITENPSEDVTEAIQSLSEVTERGLIDVDEVII

SEQ ID NO: 28081 - protein, 507 aa, synthetic construct
MKRVISYIRFSSEKQAKGDSLRRQSKMVTDWLKAHPEYYLDQDLSFRDLGVSGFTGKHLKGGLGDFLTAIEKGLVKAGDTLLIESLDRLSRQDIDIASELLRNILRSGVDVVTLSDGEHYTRESLKDPLSLIKSILIMQRAHEESLRKAERIQAAWDAKKEAAKAGIKVSKRCPAWLKLNDDRKSFSVIPEKVETVKRCFQLRLEGKSIWEIVRTLNAEGHRSMNQYKPGKFGQTSVQDLLKNRSVIGYFTPKGCEEISGYYPAIIDETTFYKVQQLSHYRYGRKPVSDKPLSVNLFKGVIRCSECGHALIITGFSDTRNGIYRCPLRNENRCNAKGLSRKQTDGTLLALLSRLDRFDSDMTNVIDALKLHREHISNNIEKLVQLSLEIEDLSAITSKLKQLKGELSQVDADIEKETQRLKSIDVGCLSDCDLTTKAGRIEAQLIIKSAVKEVVLNTAKRRCKVTFHNGRAITLPITENPSEDVTEAIQSLSEVTERGLIDVDVVAI

SEQ ID NO: 28082 - protein, 559 aa, synthetic construct
MKTKLYSYIRFLSMRQNDGSSYERQIRMAREVAAKYDLELVNDYQDLGVSAFKGANSKTGALSRFLDAIGRSVPVGSWLFIENLDRLSRADIVSAQELFLSIIRRGITIVTGMDNKIYSLDTVTANPMDLMFSILLFIRGNEESQTKRNRTNSSALIKIKAHQENPQNPAVAIEEVGKNMWWTDTTSGYVLPHPVYFPVVQEIVELRKNGRSTAEILDHLNETYAPPPAVSNKKHSKWSRAMVERLFHTRALIGIKEISVDGVNYELKDYYPRVIDDPTFYHLKKNIGARAWNFGDKEEVKPIPLLSGIGLLKCDHCGCAMVKVKGTNKRSDQYRYTCDATRSRRLDCEHPNWSFRGDQLEKAVLQLLADKIWIAEDKANPVPALKVQVDEISRKIDNLIALSAMTGATKELADQITTLNSERETLYNQIKMAEEEMYSVDSQGWEKLAEFDLEDVYNEERLKVRFKIKQALKRIGCSRIDRNKNLFVLEYIDGKTQRVVIENSRGTRKGQIFVDLKTINDRQILESNGLVLHPCLDMLTDKDWKPEEEIPGPLQEFGI

SEQ ID NO: 28083 - protein, 506 aa, synthetic construct
MRTVITYLRFSSATQGAEGADSTRRQNELFKQWLRKNSDAQVVASFSDEGLSGYKGKHLTGQFGDMLARIEAGEFPAGAILLVESIDRIGRLEHLETEALMNRIIAHGIEIHTLQDGLIYTRDALSDDLGISIIQRVKSYLAHQESKQKSFRVSEKWKQRAKLALAGEQHLTRNVPGWIDPDTLKLNEHAETVRLIFKLLLDGESLHNIARHLQSNDIKSFSRRKDANGFSVHSVRTVLRSESVIGTLPASQRNDRPAIPNYYEAAIDASTFNKAQEILDKNRKGRTPASDNPLTINIFKGLFRCQCGASVHPTGTKNKYQGVYRCNSHLDGRCDVPPLKRKPFDRWMIDNFLGMIDVGNDGEAEKEIASLQHEVETVTARIKKATALLLEMDDIDELKIQIKELNQRRTELQTTIDSMRRKASLTDKELPQLKDIDLTTKAGRVECQLILSKHLKGLTLGKGSVTITLQNDTEITIPTNPLPLNDGSPIFEIADKELLDIDAYQL

SEQ ID NO: 28084 - protein, 507 aa, synthetic construct
MKRVISYIRFSSEKQAKGDSLRRQSKMVTDWLKAHPEYYLDESLTFRDLGVSGFTGKHLKGGLGDFLTAIEKGLVKAGDTLLIESLDRLSRQDVDQASELLRNILRSGVDVVTLSDGEHYTSESLKDPLALIKSILIMQRAHEESLRKSERIQAAWNRKKELISEGIKVSKRCPAWLRLNDDRKSFSVIPEKVETVKRCFQLRLEGKSIWEIVRTLNDEGHQSMSQYKPGKFGQTSVQDLLKNRSVIGYFTPKGCEEISGYYPAIIDETTFYKVQQLSHYRYGRKPVSDKPLSVNLFKGVIRCSECGHALIITGFSDTRSGIYRCPLRNENRCSAKGLSRKQTDGTLLALLSRLDRFDSDTTNTIDTLKLHREHISSNIEKLVQLSLEIEDLNAITNKLKQLKGELSQVDADIEKETQRLKSIDVGCLSDCDLSTKAGRIEAQLIIRSAVKEVVLNTAKRRCKVTFHNSKSITLSITENPSEDVTEAIQSLSEVTERGLIDVDEVII

SEQ ID NO: 28085 - protein, 507 aa, synthetic construct
MKRVISYIRFSSERQAKGDSLRRQSKMVNDWLKAHPDYYLDQDLSFRDLGVSGFTGKHLKGGLGDFLTAIEKGLVKAGDTLLIESLDRLSRQDIDIASELLRRILRAGVDVVTLSDGEHYTRESLKDPLALIKSILIMQRAHEESLRKAERIQAAWDAKKEAAKAGIKISKRCPAWLKLNDDRKTFSVIPEKVETVRRCFQLRLEGKSIWEIVRTLNDEGHQTLNQYKAGKFGQTSVQDLLKNRSVIGYFTPKGCEEISGYYPAIIDETTFYKVQQLSHYRYGRKPVSAKPLSVNLFKGVIRCSECGHALIITGFSDTRNGIYRCPLRNENRCSAKGLSRKQTDGTLLALLSRLDRFDSDMTNTIDMLKLHREHISSNIEKLVQLSLEIEDLSAITSKLKQLKGELSQVDADIEKETQRLKSIDVGCLSDCDLTTKAGRIEAQLIIKSAVKEVVLNTAKRRCKVTFHNGKSITLPITENPSEDVTEAIQSLSEVTERGLIDVDVVEI

SEQ ID NO: 28086 - protein, 550 aa, synthetic construct
MLCYSYVRFSTPDQAKGDSYRRQMEFASNYCKLHNLTLVEDLSFKDLGVSAYKGNNLKSGALGKFLELVVSGQIPSGSTLVIESFDRLSRQTAIKAQAVFFEIISAGITIVTAMDNRSYNLQSVADNPFDLMYSLMIMIRANEESETKSKRVKEAIKSKIDNKKIIPSKLPYWIKHNKNEDVLELIPERAQIISYIIERYLSGFGINKLTRHLNETIPPFAGKSWYPLYLQKLLRSVSLYGERQFNMNDTLYIMDDYYPAIIDKSKFAVIQENLDSRAPTRGGKIPSAITGIRKAYCGYCQGVLVSQSTKRNGKIVDGLRRARCGTNNNAGSCITSSFRISIVESAIAEYCSQHFDLSLLAPESNSSKLDLAKYRLELKQLDTKIANYVKFISDGNISPAIISALDEAEKNKKKLQQKIQKSELNTLTKSKSEITAKWKTIKTNLSVYDEENILKLRELIRGSIKRILVFQYGLWANTGQITTPSGKIIQPHKGNFTIQITFNNGVRKTLELGENVKDQEVDTINRRILKNGNTYTPDEYILMIQKTLTK

SEQ ID NO: 28087 - protein, 547 aa, synthetic construct
MKLLVTYIRWSTKEQDSGDSLRRQTNLIDAFYSKHKNDYYLLPAHRYVDKGKSGFHQQHKNQGSDFRRMFENVMSGAIPEGSLIVVENFDRFSRADIDTAIDDVRQILRKGVSILTLGDGELYDKSALTDPVKLIKHIIIAERAHQESLVKQKRIAQVWNHKTQLARELKKPMGKQAPGWLELSEDGSHYIVDEDKASLVNIIYDKRLSGMSMFAICKWLNEQGYPTINQRKVRISKTKKPDGNWSALSVKHILTSRSVLGYLPAKISSEDRKTVLREEIEGFYPQIVTDSKFYAVQQLLEETGKGKTSSGDHWLYVNILKGIIRCKCGLVMTPTGIRKPVYQGTYRCNGNKESRCSYGTVSRKLLDTQLCSRLFSKLSQLHDEATDTARLDELQRRLNTVDSELEKLTETLIQLPNITQIQEALRVKQEEKDELIVQLSREKARVKSVSSLDLSGLDMESVEGRTEAQIIIKRLVKEIVVSGNEKLVDIYLHNGNMIRGFPLDGKDDHTLTLEEATDEMQSLDDMLIFGEPVTRIYPAGDMEEVDA

SEQ ID NO: 28088 - protein, 507 aa, synthetic construct
MKRVISYIRFSSEKQAKGDSLRRQSKMVTDWLKAHPEYYLDESLTFRDLGVSGFTGKHLKGGLGDFLTAIEKGLVKAGDTLLIESLDRLSRQAVDRASELLRNILRSGVDVVTLSDGEHYTSESLKDPLALIKSILIMQRAHEESLRKSERIQAAWDAKKEAAKAGIKISRRCPAWLKLNDDRKSFSVIPEKVETVKRCFQLRLEGKSIWEIVRTLNDEGHQSMSQYKPGKFGQTSVQDLLKNRSVIGYFTPKGCEEIAGYYPAIIDETTFYKVQQLSHSRYGRKPVSAKPLSVNLFKGVIRCSECGHALIITGFSDTRNGIYRCPLRNENRCSAKGLSRKQTDGTLLALLSRLDRFDSDTTNTIDTLKLHREHLSSNIEKLVQLSLEIEDLNAITNKLKQLKNELSQVDADIEKETQRLKSIDVGCLSDCDLTTKAGRIEAQLIIKSAVKEVVLNTAKRRCKVTFHNGKLIDLPITETPSDNVTEAIQSLSEVTERGLIDVDEVII

SEQ ID NO: 28089 - protein, 507 aa, synthetic construct
MKRVISYIRFSSERQAKGDSLRRQSKMVNDWLKAHPEYYLDQDLSFRDLGVSGFTGKHLKGGLGDFLTAIEKGLVKAGDTLLIESLDRLSRQDVDQASELLRNILRSGVDVVTLSDGEHYTRESLKDPLALIKSILIMQRSHEESLRKSERIQAAWNRKKELISEGIKISKRCPAWLKLNDDRKSFSVIPEKVETVKRCFQLRLEGKSIWEIVRTLNDEGHQTLNQYKAGSFGQTSVQDLLKNRSVIGYFTPKGCEEIADYYPAIIDETTFYKVQQLSYARYGRKPASDKPMAVNLFKGVIRCSECGHALIITGFSDTRNGIYRCPLRNENRCSAKGLSRKQTDGTLLTLLSRLDRFDSDTTNTIDTLKLHREHISSNIEKLVQLSLEIEDLSAITSKLKQLKNELSQVDADIEKETQRLKSIDVGCLSDCDLTTKAGRIEAQLIIKSAVKEVVLNTAKRRCKVTFHNGKAITLPITENPSDNVTEAIQSLSEVTERGLIDVDEVII

SEQ ID NO: 28090 - protein, 507 aa, synthetic construct
MKRVISYIRFSSERQAKGDSLRRQSKMVNDWLKAHPEYYLDQDLSFRDLGVSGFTGKHLKGGLGDFLTAIEKGLVKAGDTLLIESLDRLSRQDVDRASELLRNILRSGVDVVTLSDGEHYTKESLKDPLSLIKSILIMQRAHEESLRKSERIQAAWDAKKEAAKAGIKVSKRCPAWLKLNDDRKSFSVIPDKVETVKRCFQLRLEGKSIWEIVRTMNAEGRQTLNQYKAGKFGQTSVQDLLKNRSVIGYFTPKGCEEIAGYFPPIIPETDFYKVQQLSYSRYGRKPASDKPLSVNLFKGVIRCSECGHALIITGFSDTRNGIYRCPLRNENRCSAKGLSRKQTDGTLLALLSRIDRFDSDMTNTIDTLKLHREHISSNIEKLVQLSLEIEDLSAITSKLKQLKGELSQVDADIEKETQRLKSIDVGCLSDCDLTTKAGRIEAQLIIKSAVKEVILNTAKRRCKVTFHNGKVIDLPITEDPSENVTEAIQSLSEVTERGLIDVDEVII

SEQ ID NO: 28091 - protein, 507 aa, synthetic construct
MKRVISYIRFSSEKQAKGDSLRRQSKMVTDWLKAHPEYYLDQDLSFRDLGVSGFTGKHLKGGLGDFLTAIEKGLVKAGDTLLIESLDRLSRQDVDQASELLRNILRSGVDVVTLSDGEHYTSESLKDPLALIKSILIMQRAHEESLRKSERIQAAWNRKKELISEGIKISKRCPAWLRLNDDRKSFSVIPDKVETVKRCFQLRLEGKSIWEIVRTLNDEGHQTLNQYKAGSFGQTSVQDLLKNRSVIGYFTPKGCEEIAGYYPAIIDETTFYKVQQLAYARYGRKPVSDKPLSVNLFKGVIRCSECGHALIITGFSDTRSGIYRCPLRNENRCSAKGLSRKQTDGTLLTLLSRLDRFDSDMTNTIDMLRLHREHISSNIEKLVQLSLEIEDLNAITNKLKQLKNELSQVDADIEKETQRLKSIDVGCLSDCDLTTKAGRIEAQLIIKSAVKEVVLNTAKRRCKVTFHNGKSITLPITENPSEDVTEAIQSLSEVTERGLIDVDVVEI

SEQ ID NO: 28092 - protein, 507 aa, synthetic construct
MKRVISYIRFSSERQAKGDSLRRQSKMVNDWLKAHPEYYLDQDLSFRDLGVSGFTGKHLKGGLGDFLTAIEKGLVKAGDTLLIESLDRLSRQDIDIASELLRRILRAGVDIVTLSDGEHYTRESLKDPLALIKSILIMQRAHEESLRKAERIQAAWDAKKEAAKAGIKISKRCPAWLKLNDDRKTFSVIPEKVETVRRCFQLRLEGKSIWEIVRTLNDEGHQTLNQYKAGKFGQTSVQDLLKNRSVIGYFTPKGCEEIAGYFPPIIPETDFYKVQQLSYSRYGRKPASDKPLSVNLFKGVIRCSECGHALIITGFSDTRSGIYRCPLRNENRCSAKGLSRKQTDGTLLALLSRLDRFDSDMTNTIDTLKLHREHISSNIEKLVQLSLEIEDLSAITSKLKQLKGELSQVNADIEKETQRLKSIDVGCLSDCDLTTKAGRIEAQLIIKSAVKEVILNTAKRRCKVTFHNGKVIDLPITEDPSENVTEAIQSLSEVTERGLIDVDEVIV

SEQ ID NO: 28093 - protein, 547 aa, synthetic construct
MKLLVTYIRWSTKEQDSGDSLRRQTNLIDAFYAKHKNDYYLLPAHRYVDKGKSGFHQQHKNQGSDFRRMFENVMSGVIPEGSLIVVENFDRFSRADIDTAIDDVRQILRKGVSILTLGDGELYDKSALTDPVKLIKHIIIAERAHQESLVKQKRIAQVWNHKTQLARELKKPMGKQAPGWLELSEDGSHYIVDEDKASLVNIIYDKRLSGMSMFAICKWLNEQGYPTINQRKVRISKTKKPDGNWSALSVKHILTSRSVLGYLPAKISTEDRKTVLREEIEGFYPQIVTDSKFYAVQQLLEETGKGKTSSGDHWLYVNILKGLIRCKCGLVMTPTGIRKPVYQGTYRCNGNKESRCSYGTVSRKLLDTQLCSRLFSKLSQLHDEATDTAKLDELQRRLNTVDSELEKLTETLIQLPNITQIQEALRVKQEEKDELIVQLSREKARVKSVSSLDLSGLDMESVEGRTEAQIIIKRLVKEIVVSGNEKLVDIYLHNGNMIRGFPLDGKDDHTLTLEEATDEMQSLDDMLIFGEPVTRIYPAGDMEEVDA

SEQ ID NO: 28094 - protein, 507 aa, synthetic construct
MKRVISYIRFSSEKQAKGDSLRRQSKMVTDWLKAHPEYYLDQDLSFRDLGVSGFTGKHLKGGLGDFLTAIEKGLVKSGDTLLIESLDRLSRQAVDRASELLRNILRSGVDVVTLSDGEHYTSESLKDPLALIKSILIMQRAHEESLRKSERIQAAWDAKKEAAKAGIKVSKRCPAWLKLNDDRKSFSVIPEKVETVKRCFQLRLEGKSIWEIVRTLNDEGHQSMSQYKPGKFGQTSVQDLLKSRSVIGYFTPKGCEEISGYYPAIIDETTFYKVQQLSHYRYGRKPVSAKPLSVNLFKGVIRCSECGHALIITGFSDTRNGIYRCPLRNENRCSAKGLSRKQTDGTLLALLSRLDRFDSDMTNTIDMLKLHREHISSNIEKLVQLSLEIEDLSAITSKLKQLKGELSQVDADIEKETQRLKSIDVGCLSDCDLTTKAGRIEAQLIIKSAVKEVVLNTAKRRCKVTFHNGRAITLPITENPSEDVTEAIQSLSEVTERGLIDVDVVEI

SEQ ID NO: 28095 - protein, 507 aa, synthetic construct
MKRVISYIRFSSERQAKGDSLRRQSKMVNDWLKAHPDYYLDQDLSFRDLGVSGFTGKHLKGGLGDFLTAIEKGLVKAGDTLLIESLDRLSRQDIDIASELLRRILRAGVDVVTLSDGEHYTSESLKDPLALIKSILIMQRAHEESLRKSERIQAAWNRKKELISEGIKVSKRCPAWLRLNDDRKSFSVIPEKVETVKRCFQLRLEGKSIWEIVRTLNDEGHQSMSQYKPGKFGQTSVQDLLKNRSVIGYFTPKGCEEISGYYPAIIDETTFYKVQQLSHYRYGRKPVSAKPLSVNLFKGVIRCSECGHALIITGFSDTRNGIYRCPLRNENRCSAKGLSRKQTDGTLLALLSRLDRFDSDMTNTIDMLKLHREHISSNIEKLVQLSLEIEDLNAITSKLKQLKNELSQVDADIEKETQRLKSIDVGCLSDCDLTTKAGRIEAQLIIKSAVKEVVLNTAKRRCKVTFHNGRSITLPITENPSEDVTEAIQSLSEVTERGLIDVDEVII

SEQ ID NO: 28096 - protein, 507 aa, synthetic construct
MKRVISYIRFSSERQAKGDSLRRQSKMVNDWLKAHPEYYLDQDLSFRDLGVSGFTGKHLKGGLGDFLTAIEKGLVKAGDTLLIESLDRLSRQDVDQASELLRNILRSGVDVVTLSDGEHYTRESLKDPLALIKSILIMQRSHEESLRKSERIQAAWDAKKEAAKAGIKISRRCPAWLKLNDDRKSFSVIPEKVETVRRCFQLRLEGKSIWEIVRILNDEGHQTLNQYKAGKFGQTSVQDLLKNRSVIGYFTPKGCEEIAGYFPPIIPETDFYKVQQLSYSRYGRKPASDKPLSVNLFKGVIRCSECGHALIITGFSDTRSGIYRCPSRNENRCNAKGLSRKQTDGTLLALLSRIDRFDSDMTNTIDTLKLHREHISSNIEKLVQLSLEIEDLSAITSKLKQLKGELSQVDADIEKETQRLKSIDVGCLSDCDLTTKAGRIEAQLIIKSAVKEVVLNTAKRRCKVTFHNGKAITLPITENPSDNVTEAIQSLSEVTERGLIDVDEVII

SEQ ID NO: 28097 - protein, 507 aa, synthetic construct
MKRVISYIRFSSERQAKGDSLRRQSKMVNDWLKAHPDYYLDQDLSFRDLGVSGFTGKHLKGGLGDFLTAIEKGLVKAGDTLLIESLDRLSRQDIDIASELLRRILRAGVDIVTLSDGEHYTRESLKDPLALIKSILIMQRAHEESLRKAERIQAAWDAKKEAAKAGIKISKRCPAWLKLNDDRKTFSVIPEKVETVKRCFQLRLEGKSIWEIVRTLNDEGHQTLNQYKAGKFGQTSVQDLLKNRSVIGYFTPKGCEEISGYFPPIIPETDFYKVQQLSYARYGRKPASDKPMAVNLFKGVIRCSECGHALIITGFSDTRNGIYRCPLRNENRCSAKGLSRKQTDGTLLTLLSRLDRFDSDTTNTIDTLKLHREHISSNIEKLVQLSLEIEDLSAITIKLKQLKGELSQVDADIEKETQRLKSIDVGCLSDCDLTTKAGRIEAQLIIKSAVKEVVLNTAKRRCKVTFHNGKVIDLSITENPSEDVTEAIQSLSEVTERGLIDVDEVII

SEQ ID NO: 28098 - protein, 507 aa, synthetic construct
MKRVISYIRFSSEKQAKGDSLRRQSKMVTDWLKAHPEYYLDQDLSFRDLGVSGFTGKHLKGGLGDFLTAIEKGLVKAGDTLLIESLDRLSRQDIDIASELLRRILRAGVDIVTLSDGEHYTRESLKDPLALIKSILIMQRAHEESLRKAERIQAAWDAKKEAAKAGIKISKRCPAWLKLNDDRKTFSVIPEKVETVRRCFQLRLEGKSIWEIVRTLNDEGHQTLNQYKAGKFGQTSVQDLLKNRSVIGYFTPKGCEEISGYYPAIIDETTFYKVQQLSHYRYGRKPVSAKPLSVNLFKGVIRCSECGHALIITGFSDTRNGIYRCPLRNENRCSAKGLSRKQTDGTLLTLLSRLDRFDSDTTNTIDMLKLHREHISSNIEKLVQLSLEIEDLSAITIKLKQLKGELSQVDADIEKETQRLKSIDVGCLSDCDLTTKAGRIEAQLIIKSAVKEVVLNTAKRRCKVTFHNSKSITLPITENPSEDVTEAIQSLSEVTERGLIGVDEVII

SEQ ID NO: 28099 - protein, 506 aa, synthetic construct
MRTAITYLRFSSAIQGAEGADSTRRQNDLFKQWLKKNGDAQVVASFSDEGLSGYKGKHLTGQFGDMLARIEAGEFPEGTILLVESIDRIGRLEHLETEALMNRILGNGIEIHTLQDGLIYTKDALADDLGISIIQRVKAYIAHQESKQKSFRVSQKWEQRAKLALAGKQRLTKMVPGWIDPETFKLNEHAETVRLIFKLLLDGESLHNIARHLQSNGIKSFSRRKDANGFSVHSVRTILRSETTIGTLPASQRNDRPAIPNYYEAAIDASTFNKAQEILGKNRIGRTPASDNPLTINIFKGLFRCQCGASVHPTGTKNKYQGVYRCNNHLDGRCDVPPLKRKPFDRWMIDNFLGMIDVGNDGKSEGRIAALQHEVEIVTTRIKKATALLLEMDDIDELKIQLKELNQKRTELQTTIDSMRRKTSLSDKGLPQLKDIDLMTKAGRVECQLILSKHLKGLTLGKDSVTVTLQNDTEITIPTNPLPLNDGSPIFEIADKELLDIDTYRL

SEQ ID NO: 28100 - protein, 506 aa, synthetic construct
MRHAITYLRYSSAIQGVEGADSTRRQNDLFKQWLKKNSDAQVVASFSDEGLSGYKGKHLTGQFGDMLARIESGEFPEGTILLVESIDRIGRLEHLETEALMNRILGNGIEIHTLQDGLIYTKDALADDLGISIIQRVKAYIAHQESKQKSFRVSQKWEQRAKLALAGEQRLTKMVPGWIDPETFKLNEHAETVRLIFKLLLDGESLHNIARHLQSNGIKSFSRRKDANGFSVHSVRTILRSETTIGTLPASQRNDRPAIPNYYECVVDMPTFNKAQEILDKNRKGRTPASDNPLTINIFKGLFRCQCGASVHPTGTKNKYAGVYRCNNHLDGRCDVPPLKRKPFDKWVLENFLGMIDVGNDGESERKIAALQHEVEIVTARIKKATALLLEMDDIDELKIQLKELNQKRTELQTTIDSMRRKASLTDKELPQLKDIDLTTKAGRVECQLILSKHLESLTLGRGQVTVKLSNGTEIIVPTDPLPLTDGAAIFEIAEKNLLNIDTFQL

SEQ ID NO: 28101 - protein, 506 aa, synthetic construct
MRSVITYLRFSSAIQGAEGADSTRRQNDLFKQWLKKNSDAQVVASFSDEGLSGYKGKHLTGQFGDMLARIEAGEFSEGTLLLVEAIDRIGRLEHLETEALMNRIIAHGIEIHTLQDGLIYTRDALSDDLGISIIQRVKSYVAHQESKQKSFRVSQKWKQRAKLALAGEQRLTKMVPGWIDPDTFKCNEHAETVRLIFKLLLDGESLHNIARHLQANNISSFSRRKDANGFSVHSVRTILRSETTRGTLPASQRNDRPAIPNYYEAAIDASTFNKAQEILDKNRKGRTPASDNPLTINIFKGLFRCQCGASVHPTGTKNKYAGVYRCNNNPDGRCDVPPLKRKPFDKWMIDNFLGMIDVGNDGEAEGKIASLQHEVEIVTARIKKATALLLEMDDIDELKIQIKELNQRRTELQTTIDNMRRKASLTDKELPQLKDIDLTTKAGRVECQLILSKHLKGLTLGKDSVTVTLQNDTEITIPTNPLPLNDGSPIFEIADKELLDIDAYQL

SEQ ID NO: 28102 - protein, 507 aa, synthetic construct
MKRAISYIRFSSEKQSRGDSLRRQSKMVTDWLKAHPEYYLDQDLSFRDLGVSGFTGKHLKGGLGDFLTAIEKGLVKAGDTLLIESLDRLSRQNVDRASELLRNILRSGVDVVTLSDGEHYTRESLKDPLALIKSILIMQRSHEESLRKSERIQAAWNRKKELISEGIKISKRCPAWLKLNDDRKSFSVIPEKVETVKRCFQLRLEGKSIWEIVRTLNAEGHRSMNQYKPGKFGQTSVQDLLKNRSVIGYFTPKGCEEIAGYYPSVIDETTFYKVQQLSHSRHGRKPVSDKPLSVNLFKGVIRCSECGHALIITGFSDTRNGIYRCPLRNENRCSAKGLSRKQTDGTLLTLLSRLDRFDSDTTNTIDMLRLHREHISSNIEKLVQLSLEIEDLNAITNKLKQLKNELSQVDADIEKETQRLKSIDTGSLSDCDLSTKAGRIEAQLIIKSAVKEVVLNTAKRRCKVTFHNGKSIILSITENPSEDVTEAIQSLSEVTERGLIDVDEVII

SEQ ID NO: 28103 - protein, 507 aa, synthetic construct
MKRVISYIRFSSERQAKGDSLRRQSKMVNDWLKAHPEYYLDQDLSFRDLGVSGFTGKHLKGGLGDFLTAIEKGLVKAGDTLLIESLDRLSRQDVDQASELLRNILRSGVDVVTLSDGEHYTRESLKDPLALIKSILIMQRSHEESLRKSERIQAAWDAKKEAAKAGIKISRRCPAWLKLNDDRKSFSVIPEKVETVRRCFQLRLEGKSIWEIVRILNDEGHQTLNQYKAGKFGQTSVQDLLKNRSVIGYFTPKGCEAIVGYFPPIIPETDFYKVQQLSYSRYGRKPASDKPLSVNLFKGVIRCSECGHALIITGFSDTRSGIYRCPSRNENRCNAKGLSRKQTDGTLLALLSRIDRFDSDMTNTIDTLKLHREHISSNIEKLVQLSLEIEDLSAITSKLKQLKGELSQVDADIEKETQRLKSIDVGCLSDCDLTTKAGRIEAQLIIKSAVKEVVLNTAKRRCKVTFHNGKVIDLPITEDPSEDVTEAIQSLSEVTERGLIDVDEVII

SEQ ID NO: 28104 - protein, 507 aa, synthetic construct
MKRVISYIRFSSERQAKGDSLRRQSKMVNDWLKAHPEYYLDQDLSFRDLGVSGFTGKHLKGGLGDFLTAIEKGLVKAGDTLLIESLDRLSRQDIDIASELLRRILRAGVDVVTLSDGEHYTKESLKDPLALIKSILIMQRAHEESLRKAERIQAAWDAKKEAAKAGIKISRRCPAWLKLNDDRKSFSVIPEKVETVKRCFQLRLEGKSIWEIVRTLNAEGHRSMNQYKPGKFGQTSVQDLLKNRSVIGYFTPKGCEEISGYYPAIIDETTFYKVQQLSHSRYGKRSVSDKPLSVNLFKGVIRCSECGHALIITGFSDTRNGIYRCPLRNENRCSAKGLSRKQTDGTLLALLSRLDRFDSDMTNVIDMLRLHREHISSNIEKLVQLSLEIEDLSAITIKLKQLKGELSQVDADIEKETQRLKSIDVGCLSDCDLTTKAGRIEAQLIIKSAVKEVVLNTAKRRCKVTFHNSKSITLPITENPSEDVTEAIQSLSEVTERGLIDVDEVII

SEQ ID NO: 28105 - protein, 559 aa, synthetic construct
MKTKLYSYIRFSSMRQNDGSSYERQIRMAREVATKYDLELVNDYQDLGVSAFKGANSKTGALSRFLDAIGRSVPVGSWLFIENLDRLSRADIVSAQELFLSIIRRGITIVTGMDNKIYSLDTVTANPMDLMFSILLFIRGNEESQTKRNRTNSSALIKIKAHQENPQNPAVAIEEVGKNMWWTDTTSGYVLPHPTYFPVVQEIVELRKNGRSTAEILDHLNETYAPPPAVSNKKHSKWSRAMVERLFHTRALIGIKEVSVDGVNYELKDYYPRVIDDATFYHLKKNIGARAWNFGDKEEVKPIPLLSGIGLLKCDHCGCAMVKVKGTNKRSDQYRYTCDATRSRRLDCEHPNWSFRGDQLEKAVLQLLADKIWIAEDKANPVPALKVQVDEISRKIDNLIALSAMTGATKELADQITTLNSERETLYNQIKMAEEEMYSVDSQGWEKLAEFDLEDVYNEERLKVRFKIKQALKRIGCSRIDRNKNLFVLEYIDGKTQRVVIENSRGTRKGRIFIDLKTINDRQILESNGLVLHPCLDMLTDKNWKPEEEIPGPLQEFGI

SEQ ID NO: 28106 - protein, 506 aa, synthetic construct
MRHVITYLRYSSATQGAEGADSTRRQNELFKQWLRKNSDAQVVASFNDEGLSGYKGKHLSGQFGDMLSRIESGEFSKGTILLVEAIDRIGRLEHLETEALMNRIIAHGIEIHTLQDGLIYTRDALSDDLGISIIQRVKSYLAHQESKQKSFRVSEKWKQRAKLALAGKQRLTKMVPGWIDPDTLKLNEHAETVRLIFKLLLSGESLHNIARHLQANNISSFSRRKDANGFSVHSVRTVLRSESVIGTLPASQRNDRPAIPNYYEAAIDASTFNKAQEILDKNRKGRTPASDNPLTINIFKGLFRCQCGASVHPTGTKNKYAGVYRCNNHLDGRCDVQPLKRKPFDRWMIDNFLGMIDVGNDGEAEGKIASLQHEVEIVTTRIKKATALLLEMDDITELKTQVKELNQKRTELQTTIDSMRRKTSLSDKGLPQLKDIDLMTKEGRVECQLILSKHLKGLTLGKDSVTVTLQNDTEITIPTNPLPLNDGTSIFEIADKELLDIDAFRL

SEQ ID NO: 28107 - protein, 559 aa, synthetic construct
MKTKLYSYIRFSSMRQSDGSSYERQIRMAREVAAKYDLELVNDYQDLGVSAFKGANSKTGALSRFLDAIGRSVPVGSWLFIENLDRLSRADIVSAQELFLSIIRRGITIVTGMDNKIYSLDTVTANPMDLMFSILLFIRGNEESQTKRNRTNSSALIKIKAHQENPQNPAVAIEEVGKNMWWTDTTSGYVLPHPTYFPVVQEIVELRKNGRSTAEILDHLNETYAPPPAVSNKKHSKWSRAMVERLFHTRALIGIKEVSVDGVNYELKDYYPRVIDDATFYHLKKNIGARAWNFGDKEEVKPIPLLSGIGLLKCDHCGCAMVKVKGTNKRSDQYRYTCDATRSRRLDCEHPNWSFRGDQLEKAVLQLLADKIWIAEDKANPVPALKVQVDEISRKIDNLIALSAMTGATKELADQITTLNSERETLYNQIKMAEEEMYSVDSQGWEKLAEFDLEDVYNEERLKVRFKIKQALKRIGCSRIDRNKNLFVLEYIDGKTQRVVIENSRGTRKGQIFVDLKTINDRQILESNGLVLHPCLDMLTDKNWKPEEEIPGPLQEFGI

SEQ ID NO: 28108 - protein, 559 aa, synthetic construct
MKTKLYSYIRFSSMKQADGSSYERQKRTAAEIAAKYDLELVTSYQDFGVSAFKGANSRTGALSRFLDEIGRSVPVGSWLVVENLDRISRQSIIEAQELFLSIIRRGITIVTGMDGKVYSKESVNANPIDLLLSVMLFARANEESQTKRNRTNSSALIKIKAHQENPQNPAVAIEEIGKNMWWTDTTSGYVLPHPVFFPIVQEVVELRRNGRSTAEILDHLNATYTPPPAASHKRHSNWSRAMIERLFHTRALIGIKEVSVDGVKYELKDYYPRVLDDAEFYHLKKSIGVRACNYGDKEEVKPIPLLSGVGLLKCEHCGSAMVKVKGTNKRPNQYRYSCDAMRSSRIACVHTNWSFRGDQLEKAVLQLLADKIWIAEDKANPVPALKVQIDEISRKIDNLIALSAMTGATKELADQITALNSERETLYNQIKMAEEEMYSVDSQGWEKLAEFDLEDVYNEERIKVRFKIKQALKRIGCSRIDRNKNLFVLEYVDGKTQRVVIENSRGTRKGRIFIDLKTINDRQILESNGLVLHPCLDMLTDKNWKPEEEIPGPLQEFGI

SEQ ID NO: 28109 - protein, 506 aa, synthetic construct
MRSVITYLRYSSAIQGAEGADSTRRQNDLFKQWLKKNSDAQVVASFSDEGLSGYKGKHLTGQFGDMLARIESGEFPEGTILLVESIDRIGRLEHLETEALMNRILGNGLEIHTLQDGLIYTKDALADDLGISIIQRVKAYIAHQESKQKSFRVSQKWEQRAKLALAGEQRLTKMVPGWIDPDTFKLNEHAETVRLIFKLLLSGESLHNIARHLQANNISSFSRRKDANGFSIHSVRTILRSETTIGTLPASQRNDRPAIPNYYEPAIDASTFNKAQEILDKNRKGRTPASDNPLTINIFKGLFRCQCGASVHPTGTKNKYAGVYRCNSHLDGRCGVPPLKRKPFDKWMIDNFLGMIDVGNDGEAEKEIASLQHEVETVTARIKKATALLLEMDDIDELKIQLKELNQKRTELQTTIDSMRRKASLTDKELPQLKDIDLTTKAGRVECQLILSKHLESLTLGRGQVTVKLSNGTEIIVPTDPLPLTDGAAIFEIAEKNLLNIDTFQL

SEQ ID NO: 28110 - protein, 507 aa, synthetic construct
MKRVISYIRFSSERQAKGDSLRRQSKMVNDWLKAHPEYYLDQDLSFRDLGVSGFTGKHLKGGLGDFLTAIEKGLVKAGDTLLIESLDRLSRQNVDRASELLRNILRSGVDVVTLSDGEHYTRESLKDPLSLIKSILIMQRSHEESLRKSERIQAAWNRKKELISEGIKISKRCPAWLKLNDDRKSFSVIPEKVETVRRCFQLRLEGKSIWEIVRTMNAEGHQTLNQYKAGSFGQTSVQDLLKNRSVIGYFTPKGCEEISGYYPAIIDETTFYKVQQLSYARYGRKPASDKPLSVNLFKGVIRCSECGHALIITGFSDTRSGIYRCPLRNENRCNAKGLSRKQTDSTLLALLSRLDRFDSDMTNTIDTLKLHREHISSNIEKLVQLSLEIEDLSAITSKLKQLKNELSQVDADIEKETQRLKSIDVGCLSDCDLTTKAGRVEAQLIIKSAVKEVVLNTAKRRCKVTFHNGKSITLPITENPSEDVTEAIQSLSEVTERGLIDVDEVII

SEQ ID NO: 28111 - protein, 507 aa, synthetic construct
MKRVISYIRFSSEKQAKGDSLRRQSKMVTDWLKAHPEYYLDESLTFRDLGVSGFTGKHLKGGLGDFLTAIEKGLVKAGDTLLIESLDRLSRQAVDRASELLRNILRSGVDVVTLSDGEHYTSESLKDPLALIKSILIMQRAHEESLRKSERIQAAWNRKKELISEGIKVSRRCPAWLRLNDDRKSFSVIPEKVETVKRCFQLRLEGKSIWEIVRTLNDECHQSMNQYKPGKFGQTSVQDLLKNRSVIGYFTPKGREEIAGYFPSIIHETDFYKVQQLSHSRYGRKPVSAKPLSVNLFKGVIRCSECGHALIITGFSDTRSGIYRCPLRNENRCNAKGLSRKQTDGTLLTLLSRLDRFDSDMTNTVDTLKLHREHISSNIEKLVQLSLEIEDLNAITSKLKQLKNELSQVDADIEKETQRLKSIDVGCLSDCDLTTKAGRIEAQLIIKSAVKEVVLNTAKRRCKVTFHNGKVIDLPITENPSEDVTEAIQSLSEVTERGLIDVDVVEI

SEQ ID NO: 28112 - protein, 559 aa, synthetic construct
MKTKLYSYIRFSSMKQADGSSYERQKRTAAEIAAKYDLELVTSYQDFGVSAFKGANSKTGALSRFLDEIGRSVPVGSWLVVENLDRISRQSIIEAQELFLSIIRRGITIVTGMDGRVYSRESVNANPIDLLLSVMLFARANEESQTKRNRTNSSALIKIKAHQENPQNPAVAIEEVGKNMWWTDTTSGYVLPHPVFFPIVQEVVELRKNGRSTAEILDHLNETYTPPPAVSNKKHSKWSRAMVERLFHTRALIGIKEVSVDGVNYELNNYYPRVIDDATFYHLKKNIGARAWNFGDKEEVKPIPLLSGIGLLKCDHCGCAMVKVKGTNKRSDQYRYTCDATRSRRLDCEHPNWSFRGDQLEKAVLQLLADKIWIAEDKANPVPALKVQIDEISRKIDNLITLSAMTGATKELADQITTLNSERETLYNQIKMAEEEMYSVDSQGWEKLAEFDLEDVYNEERLKVRFKIKQALKRIGCSRIDRNKNLFVLEYIDGKTQRVVIENSRGTRKGRIFIDLKTINDRQILESNGLVLHPCLDMLTDKNWKPEEEQAGPLQEFGI

SEQ ID NO: 28113 - protein, 537 aa, synthetic construct
MKADLYIRVSTDEQADKGFSQRDQEERLRKYCHNNQISIRKVIFEDHSAKTFERPEWRSEIIDLKKRKDQIDIILFTKWDRFSRNAGDAYQMINTLRRLGVEPQAIEQPLDMAVPENKIMLAVYLAAPEVENDRRALNVLHGMRRAKKEGRWMGPAPVGYANKITEDMRKYIAPVEPYASIMKWVFNMMVTGQYQVEQLYREARLKGIRCCKTNFWNLLRNPVYCGKIYLSAYKDEPSTHVPGLHEPIISESLFYEVQDLLDGKKKNYRTKVGAQEIMQLRGHLLCPKCGHLLTGSASRGRNGIYYYYHCKSSCGARFKAEAANDLFTKELRKFVPRAGMAESYKVVVNAAYKAQAKGHRSEAKEITDQLNEAQNDIAKARKLLLKEEIDASDYKIIKAESEKRIMLLEAKLMEAAKNTNNIESLLDKAVKSLVTLDQLYKDGDVKKKRQIIGSIFPEKLTFDGSHYRTARLNEAVKLIYTLDAGFTENKNGQTEMNFDLSTLVPRTGFEPAHPCGRCDLNTVRLPISPSGQGCVPR

SEQ ID NO: 28114 - protein, 480 aa, synthetic construct
MIATNKVAIYIRVSTTNQAEEGYSIEEQQEKLKAYCAIKDWSIYDVYIDGGFTGSNTDRPELKRLVKEAKNKKFDTVLVYKLDRLSRSQKDTLYLIEEVFTKNNIAFLSLLENFDTSSAFGKAMIGILSVFAQLEREQIKERMQLGKVGRAKSGKSMMWAKPSYGYIYHQETGEMTVDEYESIAIKFIFSSYLAGRSITKLRDDLNKKYPKKIAWNYKMIRHILDNPVYCGNIRFKDEIYSGNHEAIISKEDFEKVQEELAIRQRTAAENSNPRPFQAKYMLSGIAQCGYCKAPLKIIMGAIRKDGTRFIRYECYQRHPRKIKGVTVYNDNKKCNSGYYDKKELEQYVLKEVSKLQEDKEYLESLFNVPDKSIERDKLQGQVNILEKKISRLNDLYVDDRISLNELKIKSDNFLKMKAVLETELENDPAIKQQKKKENMKKILKTKDILSMNYEQQKAVIRALITKVKVTAESIIIKWKI

SEQ ID NO: 28115 - protein, 480 aa, synthetic construct
MIATNKVAIYIRVSTTNQAEEGYSIEEQQEKLKAYCAIKDWSIYDVYIDGGFTGSNTDRPELKRLVKEAKNKKFDTVLVYKLDRLSRSQKDTLYLIEEVFTKNNIAFLSLLENFDTSSAFGKAMIGILSVFAQLEREQIKERMQLGKVGRAKSGKSMMWAKPSYGYIYHQETGEMTVDEYESIAIKFIFSSYLAGRSITKLRDDLNKKYPKKIAWNYKMVRHILDNPVYCGNIRFKDEIYSGNHEAIISKKIFEKVQEELAIRQRTAAENSNPRPFQAKYMLSGIAQCGYCKAPLKIIMGAIRKDGTRFIRYECYQRHPRKIKGVTVYNDNKKCNSGYYDKKELEQYVLKEVSKLQEDKEYFESLFNVPDKSIERDKIQGQVNILENKISRLNDLYVDDRISLDELKIKSDNFLKMKAVLETELENDPAIKQQKKKENMKKILKTKDILSMNYEQQKAVIRALITKVQVTAESIIIKWKI

SEQ ID NO: 28116 - protein, 605 aa, synthetic construct
MKKCFIYHRVSPEFQLARTGIQRQEDSLQAYVERTNLLADMEDPEPTIISDRGISAFKTNENNFSIGELGRWMDQVRDGMWDGSALVLESIDRFSRQNPFTVVAYLSELVSHNITIHDVSLSMLINRTNSAMLPIVTMSAQRAYEESKLKSDRIRDGWRRRRENAFNNGTIVTNKRPRWIDVKNDKYVLNDKVAIVREIFRLYKKGIGTSTIAKILNTRGEKWLFESGRLWRSESVHKILKNKRVTGVIFISETIRDYNSTDKSIDRNTYEMDLYPIAISKEEYTLVQQLLKMRRTNNGRITNIKDTGELKKSNIFNRVFRCAKCGEAMYHNVVLANRDSKRRGKFKEEYRYIRCIGERDGLCDNKALRYEVVEQFVIEHIKGMDFTKILKPNEINPEIELVRVLIEEEKAHIQEYELGIERLKKQDKKIPFDVLTELQDSRDKLRTLEERQFSFADIKVDTDYIKSVDSSVIFDQTNIAIRSMVENELIKIIDTIKLYRMGKHYVITLKYRSVGILKHVLIVEAKKTPTLISNIVIERTGKTVEYSTASFSLVITDGDSPRLKTSDGVQISMIDYSLLLNYVDDVDRDDIVGVWMREKFNTLTS

SEQ ID NO: 28117 - protein, 506 aa, synthetic construct
MRTVITYLRFSSATQGAEGADSTRRQNELFKQWLRKNSDAQVVASFSDEGLSGYKGKHLTGQFGDMLARIESGEFSEGTVLLVEAIDRIGRLEHLETEALMNRIIAHGIEIHTLQDGLIYTRDALSDDLGISIIQRVKSYVAHQESKQKSFRVSQKWKQRAKLALAGEQRLTKMVPGWIDPDTFKCNEHAETVRLIFKLLLDGESLHNIARHLQANNISSFSRRKDANGFSVHSVRTILRSETTIGTLPASQRNDRPAIPNYYEAAIDAATFNKAQEILDKNRKGRTPASDNPLTINIFKGLFRCQCGASVHPTGTKNKYAGVYRCNNNPDGRCDVPPLKRKPFDKWMIDNFLGMIDVGNDGEAEGKIAALQHEVEIVTARIKKATALLLEMDDITELKTQVKGLNQKRTELQTTIDNMRRKASLTDKELPQLKDIDLTTKAGRVECQLILSKHLKGLTLGKDSVIVTLQNDTEITIPTNPLPLNDGTSIFEIADKELLDVDAYQL

SEQ ID NO: 28118 - protein, 506 aa, synthetic construct
MRSVITYLRFSSATQGAEGADSTRRQNELFKQWLRKNSDAQVVASFNDEGLSGYKGKHLSGQFGDMLSRIESGEFSKGTILLVEAIDRIGRLEHLETEALMNRIIAHGIEIHTLQDGLIYTRDALSDDLGISIIQRVKSYLAHQESKQKSFRVSEKWKQRAKLALAGEQRLTKMVPGWIDPETFKLNEHAETVRLIFKLLLDGESLHNIARHLQANNISSFSRRKDANGFSVHSVRTILRSETTIGTLPASQRNDRPAIPNYYEAAIDAATFNKAQEILDKNRKGRTPASDNPLTINIFKGLFRCQCGASVHPTGTKNKYAGVYRCNNHLDGRCHVPPLKRKPFDKWMIDNFLGMIDVGNDGEAEGKIASLQHEVEIVTTRIKKATALLLEMDDIDELKIQLKELNQKRTELQTTIDNMRRKASLTDKELPQLKDIDLTTKAGRVECQLILSKHLKGLTLGKDSVTVTLQNDTEITIPTDPLPLNDGTSIFEIAEKNLLNIDTFQL

SEQ ID NO: 28119 - protein, 507 aa, synthetic construct
MKRVISYIRFSSERQAKGDSLRRQSKMVNDWLKAHPEYYLDESLTFRDLGVSGFTGKHLKGGLGDFLTAIEKGLVKAGDTLLIESLDRLSRQAVDRASELLRNILRSGVDIVTLSDGEHYTSESLKDPLALIKSILIMQRAHEESLRKSERIQAAWDAKKEAAKAGIKVSKRCPAWLKLNDDRKSFSVIPEKVATVKRCFQLRLEGKSIWEIVRTLNDEGHQTLNQYKPGKFGQTSVQDLLKNRSVIGYFTPKGREEIAGYFPPIIPETDFYKVQQLSYSRYGRKPASDKPLSVNLFKGVIRCSECGHALIITGFSDTRSGIYRCPSRNENRCNAKGLSRKQTDGTLLALLSRLDRFDSDMTNVIDALKLHREHISNNIEKLVQLSLEIEDLSAITIKLKQLKGELSQVDADIEKETQRLKSIDVGCLSDCDLTTKAGRIEAQLIIKSAVKEVVLNTAKRRCKVTFHNGKVIDLPITENPSEDVTEAIQSLSEVTERGLIDVDVVEI

SEQ ID NO: 28120 - protein, 507 aa, synthetic construct
MKRVISYIRFSSERQAKGDSLRRQSKMVNDWLKAHPEYYLDQDLSFRDLGVSGFTGKHLKGGLGDFLTAIEKGLVKAGDTLLIESLDRLSRQDVDQASELLRNILRSGVDVVTLSDGEHYTRESLKDPLALIKSILIMQRSHEESLRKSERIQAAWDAKKEAAKAGIKISRRCPAWLKLNDDRKSFSVIPEKVETVRRCFQLRLEGKSIWEIVRILNDEGHQTLNQYKAGKFGQTSVQDLLKNRSVIGYFTPKGCEEIAGYFPPIIPETDFYKVQQLSYSRYGRKPASDKPLSVNLFKGVIRCSECGHALIITGFSDTRSGIYRCPSRNENRCNAKGLSRKQTDGTLLALLSRIDRFDSDMTNTIDTLKLHREHISSNIEKLVQLSLEIEDLSAITSKLKQLKGELSQVDADIEKETQRLKSIDVGCLSDCDLSTKAGRIEAQLIIRSAVKEVVLNTAKRRCKVTFHNGRAITLPITETPSEDVTEAIQSLSEVTERGLIDVDEVII

SEQ ID NO: 28121 - protein, 506 aa, synthetic construct
MRGVITYLRYSSAIQGAEGADSTRRQNDLFKQWLKKNSDAQVVASFNDEGLSGYKGKHLSGQFGDMLSRIESGEFPEGTILLVEAIDRIGRLEHLETEALMNRIIAHGIEIHTLQDGLIYTRDALSDDLGISIIQRVKSYIAHQESKQKSFRVSQKWEQRAKLALAGEQRLTRNVPGWIDPETFKLNEHAETVRLIFKLLLDGESLHNIARHLQANNISSFSRRKDANGFSVHSVRTILRSETTIGTLPASQRNDRPAILNYYEAAIDASTFNKAQEILSKNRKGRTPASDNPLTINIFKGLFRCQCGASVHPTGTKNKYAGVYRCNNHLDGRCDVPPLKRKPFDKWMIDNFLGMIDVVSDGESERKIAALQHEVETVTARIKKATALLLEMDDITELKAQVKELNQKRTELQTTIDTLKRKTSLTDKELPQLKDIDLTTKVGRVECQLILSKHLKGLTLGKDSVTVTLQNDTEIIIPTDPLPLNDGTSILEIAEKELLGIDVYQL

SEQ ID NO: 28122 - protein, 506 aa, synthetic construct
MRHVITYLRYSSAIQGAEGADSTRRQNDLFKQWLKKNSDAQVVASFNDEGLSGYKGKHLSGQFGDMLSRIESGEFSEGTILLVEAIDRIGRLEHLETEALMNRIIAHGIEIHTLQDGLIYTRDALSDDLGISIIQRVKSYIAHQESKQKSFRVSQKWEQRAKLALAGEQRLTKMVPGWIDPETFKANEHAETVRLIFKLLLDGESLHNIARHLQANNISSFSRRKDANGFSVHSVRTILRSETTIGTLPASQRNDRPAIPNYYEAAIDAATFNKAQEILDKNRKGRTPASDNPLTINIFKGLFRCQCGASVHPTGTKNKYAGVYRCNNHLDGRCDVPPLKRKPFDRWMIDNFLGMIDVGNDGEAEKEIASLQHEVETVTARIKKATALLLEMDDITELKTQVKELNQKRTELQTTINTMKRKTSLSDKGLPQLKDIDLMTKAGRVECQLILSKHLKGLTLGKDSVTVTLQNDTEITIPTDPLPLNDGTSIFEIAEKELLEIDAYQL

SEQ ID NO: 28123 - protein, 559 aa, synthetic construct
MKTKLYSYIRFSSMRQNDGSSYERQIRMAREIAVKYDLELVNDYQDLGVSAFKGANSKTGALSRFLDAIGRSVPVGSWLFIENLDRLSRADIVSAQELFLSIIRRGITIVTGMDNKIYSLDTVTANPMDLMFSILLFIRGNEESQTKRNRTNSSALIKIKAHQENPQNPAVAIEEVGKNMWWTDTTSGYVLPHPTYFPVVQEIVELRKNGRSTAEILDHLNETYTPPPAVSNKKHSKWSRAMVERLFHTRALIGIKEVSVDGVNYELKDYYPRVIDDATFYHLKKNIGARAWNFGDKEEVKPIPLLSGIGLLKCDHCGCAMVKVKGTNKRSDQYRYTCDATRSRRLDCEHPNWSFRGDQLEKAVLQLLADKIWIAEDKANPVPALKVQVDEISRKIDNLIALSAMTGATKELADQITTLNSERETLYNQIKMAEEEMYSVDSQGWEKLAEFDLEDVYNEERLKVRFKIKQALKRIGCSRIDRNKNLFVLEYIDGKTQRVVIENSRGTRKGRIFIDLKTINDRQILESNGLVLHPCLDMLTDKNWKPEEEIPGPLQEFGI

SEQ ID NO: 28124 - protein, 605 aa, synthetic construct
MKKCFIYHRVSSEFQLARTGIQRQEDSLQAYVERTNLLADMEDPEPTIISDRGISAFKTNENNFSIGELGRWMDQVRDGMWDGSALVLESIDRFSRQNPFTVVAYLSELVSHNITIHDVSLSMLINRTNSAMLPIVTMSAQRAYEESKLKSDRIRDGWRRRRENAFNNGTIVTNKRPRWIDVKNDKYVLNDKVAIVREIFRLYKKGIGTSTIAKILNTRGEKWLFESGRLWRSESVHKILKNKRVTGVIFISETIRDYNSTDKSIDRNTYEMDLYPIAISKEEYTLVQQLLKMRRTNNGRITNIKDTGELKKSNIFNRVFRCAKCGEAMYHNVVLANRDSKRRGKFKEEYRYIRCIGERDGLCDNKALRYEVVEQFVIEHIKGMDFTKILKPNEINPEIELVRVLIEEEKAHIQEYELGIERLKKQDKKIPFDVLTELQDSRDKLRTLEERQFSFADIKVDTDYIKSVDSSVIFDQTNIAIRSMVENELIKIIDTIKLYRMGKHYVITLKYRSVGILKHVLIVEAKKTPTLISNIVIERTGKTVEYSTASFSLVITDGDSPRLKTSDGVQISMIDYSLLLNYVDDVDRDDIVGVWMREKFNTLTS

SEQ ID NO: 28125 - protein, 514 aa, synthetic construct
MRKVYSYIRFSSTKQAFGDSHRRQSKAIQDWLASHPDHILDESLSFEDLGRSAFHGDHLKEGGALRAFLEAVKQGLIPPDSVLVVESLDRVSRQSISHAQETIRAILEQGITVVTLSDGETYNRQSLDDSLALIRMIILQERSHNESVIKSDRIKKVWSHKRQQFEQDGTKITGNCPGWLKLNSDGKSFSLIPHHVETIHRIFDEKLSGKSLHAIARDLNLENIPTITNKKVDTGWTPTRVRDLLLKESLIGVAYGVSDYFPPAISKEKFHAVQMIRGQGKGKKPTSRQPSSIDIFKGICKCAECGSTLRQRNTKKTPEGRYPRGYLECRNRQLGRCNSKAFNRSLIEDILIQKVFPTLQYLSLKSNGDNISVTTLKADITSLEKGINNLISLAERGLGDLDTLAQRITNNRVELESKKKDLRQAEAIQSLRSDNDIQDSDRKTVEGRIKLQLAIKSFIKEMIFDYYKQEITIRLLNGKSFSGISVARENKDFDHSSVFEVLQKSLLDIDEVHL

SEQ ID NO: 28126 - protein, 559 aa, synthetic construct
MKTKLYSYIRFSSMRQNDGSSYERQIRMAREIAAKYDLELVNDYQDLGVSAFKGANSKTGALSRFLDAIGRSVPVGSWLFIENLDRLSRADIVSAQELFLSIIRRGITIVTGMDNKIYSLDTVTANPMDLMFSILLFIRGNEESQTKRNRTNSSALIKIKAHQENPQNPAVAIEEVGKNMWWTDTTSGYVLPHPVFFPIVQEVVELRKNGRSTAEILDHLNETYTPPPAVSNKKHSKWSRAMVERLFHTRALIGIKEVSVDGVNYELNNYYPRVIDDATFYHLKKNIGARAWNFGDKEEVKPIPLLSGIGLLKCDHCGCAMVKVKGTNKRSDQYRYTCDATRSRRLDCEHPNWSFRGDQLEKAVLQLLADKIWIAEDKANPVPALKVQIDEISRKIDNLITLSAMTGATKELADQITALNSERETLYNQIKMAEEEMYSVDSQGWEKLAEFDLEDVYNEERLKVRFKIKQALRRIGCSRIDRNKNLFVLEYVDGKTQRVVIENSRGTRKGRIFIDLKTINDRQILESNGLVLHPCLDMLTDKNWKPEEEQAGPLQEFGI

SEQ ID NO: 28127 - protein, 547 aa, synthetic construct
MKLLVTYIRWSTREQDSGDSLRRQTNLIDAFYAKHKDDYYLLPAHRYVDKGKSGFHQQHKAQGSDFRRMFENVMSGAIPEGSLIVVENFDRFSRADIDTAIDDVRQILRKGVSILTLGDGELYDKSALTDPVKLIKHIIIAERAHQESLVKQKRIAQVWNHKTQLARELKKPMGKQAPGWLELSEDGSHYIVDEDKASLVNIIYDKRLSGMSMFAICKWLNEQGYPTINQRKVRISKTKKPDGNWSALSVKHILTSRSVLGYLPAKISSEDRKTVLREEIEGFYPQIVTDSKFYAVQQLLEETGKGKTSSGEHWLYVNILKGLIRCKCGLVMTPTGIRKPVYQGTYRCNGNKESRCNYGTVSRKLLDTQLCSRLFSKLSQLHDEATDTAKLDELQRRLNTVDSELEKLTETLIQLPNITQIQEALRVKQEEKDELIVQLSREKARVKSVSSLDLSGLDMESVEGRTEAQIIIKRLVKEIVVSGNERLVDIYLHNGNMIRGFPLDGKDDHTLTLEEATDEMQSLDDMLIFGEPVTRIYPAGDMEEVDA

SEQ ID NO: 28128 - protein, 547 aa, synthetic construct
MKLLVTYIRWSTKEQDSGDSLRRQTNLIDAFYAKHKEEYYLLPAHRYVDKGKSGFHQQHKAQGSDFRRMFENVMSGVIPEGSLIVVENFDRFSRADIDTAIDDVRQILRKGVSILTLGDGELYDKSALTDPVKLIKHIIIAERAHQESLVKQKRIAQVWNHKTQLARELKKPMGKQAPGWLELSEDGSHYIVDEDKASLVNIIYDKRLSGMSMFAICKWLNEQGYPTINQRKVRISKTKKPDGNWSALSVKHILTSRSVLGYLPAKISSEDRKTVLREEIEGFYPQIVTDSKFYAVQQLLEETGKGKTSSGEHWLYVNILKGLIRCKCGLVMTPTGIRKPVYQGTYRCNGNKESRCSYGTVSRKLLDTQLCSRLFSKLSQLHDEATDTAKLDELQRRLNNVDSELEKLTETLIQLPNITQIQEALRVKQEEKDELIVQLSREKARVKSVSSLDLSGLDMESVEGRTEAQIIIKRLVKEIVVSGNEKLVDIYLHNGNMIRGFPLDGKDDHTLTLEEATDEMQSLDDMLIFGEPVTRIYPAGDMEEVDA

SEQ ID NO: 28129 - protein, 507 aa, synthetic construct
MKRVISYIRFSSEKQSRGDSLRRQSKMVNDWLKAHPEYYLDQDLSFRDLGVSGFTGKHLKGGLGDFLTAIEKGLVKAGDTLLIESLDRLSRQNVDRASELLRNILRSGVAVVTLSDGEHYTRESLKDPLALIKSILIMQRSHEESLRKSERIQAAWNRKKELISEGIKISKRCPAWLKLNDDRKSFSVIPEKVETVKRCFQLRLEGKSIWEIVRTLNDEGHQSMSQYKPGSFGQSSVQDLLKNRSVIGYFTPKGCEEIAGYYPAIIDETTFYKVQQLSHSRYGKRSVSDKPLSVNLFKGVIRCSECGHALIITGFSDTRNGIYRCPLRNENRCSAKGLSRKQTDGTLLALLSRLDRFDSDTTNTIDTLKLHREHISSNIEKLVQLSLEIEDLSAITSKLRQLKGELSQVDADIEKETQRLKSIDVGCLSDCDLTTKAGRIEAQLIIKSAVKEVVLNTAKRRCKVTFHNGRAITLPITETPSEDVTEAIQSLSEVTERGLIDVDEVII

SEQ ID NO: 28130 - protein, 547 aa, synthetic construct
MKLLVTYIRWSTKEQDSGDSLRRQTNLIDAFYSKHKNDYYLLPAHRYVDKGKSGFHQQHKNQGSDFRRMFENVMSEAIPEGSLIVVENFDRFSRADIDTAIDDVRQILRKGVSILTLGDGELYDKSALTDPVKLIKHIIIAERAHQESLVKQKRIAQVWNHKTQLARELKKPMGKQAPGWLELSDDGSHYIVDEDKASLVNIIYDKRLSGMSMFAICKWLNEQGYPTINQRKVRISKTKKPDGNWSALSVKHILTSRSVLGYLPAKISSEDRKTVLREEIEGFYPQIVTDSKFYAVQQLLEETGKGKTSSGEHWLYVNILKGLIRCKCGLVMTPTGIRKPVYQGTYRCNGNKESRCSYGTVSRKLLDTQLCSRLFSKLSQLHDEATDTAKLDELQRRLNTVDSELEKLTETLIQLPNITQIQEALRVKQEEKDGLIVQLSREKARLKSVSSLDLSGLDMESVEGRTEAQIIIKRLVKEIVVSGNEKLVDIYLHNGNMIRGFPLDGKDDHTLTLEEATDEMQSLDDMLIFGEPVTRIYPAGDMEEVDA

SEQ ID NO: 28131 - DNA, 38 bp, synthetic construct
  source 1..38: mol_type = other DNA
gatatggggaagtgaatcagtacaaccgccacagtacc

SEQ ID NO: 28132 - DNA, 50 bp, synthetic construct
  source 1..50: mol_type = other DNA
tggtttgtctggtcaaccaccgcggtctcagtggtgtacggtacaaaccc

SEQ ID NO: 28133 - DNA, 50 bp, synthetic construct
  source 1..50: mol_type = other DNA
ggttgtatttgtagaacttgaccagttgttttagtaacataaatacaact

SEQ ID NO: 28134 - DNA, 50 bp, synthetic construct
  source 1..50: mol_type = other DNA
tgtccgtacatggaataataaagcaccagaactttagccatttctaacca

SEQ ID NO: 28135 - DNA, 50 bp, synthetic construct
  source 1..50: mol_type = other DNA
gaaccgggcggctgtctaaaatcatctaataaaaatcacccgattaacgc

SEQ ID NO: 28136 - DNA, 50 bp, synthetic construct
  source 1..50: mol_type = other DNA
acacttatcgaactgatggtggtcatcatggtggttattggcatcattgc

SEQ ID NO: 28137 - DNA, 50 bp, synthetic construct
  source 1..50: mol_type = other DNA
atcaagggtcattgtattgtagctatagacttaaatcaagggtcattgaa

SEQ ID NO: 28138 - DNA, 50 bp, synthetic construct
  source 1..50: mol_type = other DNA
cttcagcaacggctttcacatctattattatatgcacattgccgctggcg

SEQ ID NO: 28139 - DNA, 50 bp, synthetic construct
  source 1..50: mol_type = other DNA
ttcaatgacccttgaatgaagtctatagctacaatacaatgacccttgat

SEQ ID NO: 28140 - DNA, 50 bp, synthetic construct
  source 1..50: mol_type = other DNA
ttcacatctatttcatatttgggatttccgggatggcttattatatgcac

SEQ ID NO: 28141 - DNA, 50 bp, synthetic construct
  source 1..50: mol_type = other DNA
gcgttaatcgggtgatttttattagatgattttagacagccgcccggttc

SEQ ID NO: 28142 - DNA, 50 bp, synthetic construct
  source 1..50: mol_type = other DNA
aaagtattaattaactcaatgggttaattgatataaacaagcaagtgttt

SEQ ID NO: 28143 - DNA, 50 bp, synthetic construct
  source 1..50: mol_type = other DNA
gctgcatgaaccgggcggctgtctaaaatcacccgattaacgccgcgctg

SEQ ID NO: 28144 - DNA, 50 bp, synthetic construct
  source 1..50: mol_type = other DNA
aaaagcgcttgttttacttgactaatatcaaagataaatgaagtgtgttt

SEQ ID NO: 28145 - DNA, 50 bp, synthetic construct
  source 1..50: mol_type = other DNA
acttacggtatgaagcagtttacctgggcctgctgctcgtccatgtgctt

SEQ ID NO: 28146 - DNA, 50 bp, synthetic construct
  source 1..50: mol_type = other DNA
ctacgcaatttgatgggtttataaaaatattttatgaggaatatctgtca

SEQ ID NO: 28147 - DNA, 50 bp, synthetic construct
  source 1..50: mol_type = other DNA
tgcaaaaaatcctcaaacggattgagaaacggtaaagaagattttgcaga

SEQ ID NO: 28148 - DNA, 50 bp, synthetic construct
  source 1..50: mol_type = other DNA
gcgaatatcactcataaagagggtaacttatctagatgagatcactttga

SEQ ID NO: 28149 - DNA, 50 bp, synthetic construct
  source 1..50: mol_type = other DNA
aagacaaaagaaaggcacataaatcaatttatgtagaaagctttattctt

SEQ ID NO: 28150 - DNA, 50 bp, synthetic construct
  source 1..50: mol_type = other DNA
tggcggcttcatcttcgttaatcacatgagtaacgaaaacgaaattatta

SEQ ID NO: 28151 - DNA, 50 bp, synthetic construct
  source 1..50: mol_type = other DNA
gtttcgtccttccctcatgtacctcaaggtaactgttgtacaggcccgcg

SEQ ID NO: 28152 - DNA, 50 bp, synthetic construct
  source 1..50: mol_type = other DNA
ctgaatccttccaaagccatgctgcatagcaagtcaattgtgcgtaaaac

SEQ ID NO: 28153 - DNA, 50 bp, synthetic construct
  source 1..50: mol_type = other DNA
cggcatcctcatgctgctcttcaccggcgctgaacttcctgcggtgcccg

SEQ ID NO: 28154 - DNA, 50 bp, synthetic construct
  source 1..50: mol_type = other DNA
cggggcggtggcggggataactcgtacggggaatccggagccttattccg

SEQ ID NO: 28155 - DNA, 50 bp, synthetic construct
  source 1..50: mol_type = other DNA
gcgttaatcgggtgatttttattagatgattttagacggccgcccggttc

SEQ ID NO: 28156 - DNA, 50 bp, synthetic construct
  source 1..50: mol_type = other DNA
cgaggacccgcgcctgctggagaccgctcacccgccggcgccactcttcg

SEQ ID NO: 28157 - DNA, 50 bp, synthetic construct
  source 1..50: mol_type = other DNA
actcgcccgtcaggggaggagtggccgaactcctcctgggacggctggtg

SEQ ID NO: 28158 - DNA, 50 bp, synthetic construct
  source 1..50: mol_type = other DNA
cgggtgatttttattagacacgtttagaccttgatgattttagacagccg

SEQ ID NO: 28159 - DNA, 50 bp, synthetic construct
  source 1..50: mol_type = other DNA
taaggtttataaaagcatactttagcaggtcttcgctgtaaaaaagttta

SEQ ID NO: 28160 - DNA, 50 bp, synthetic construct
  source 1..50: mol_type = other DNA
gcgttaatcgggtgatttttattagatgattttagacagccgtccggttc

SEQ ID NO: 28161 - DNA, 50 bp, synthetic construct
  source 1..50: mol_type = other DNA
atcaagggtcattgtattgtagctatagacttcattcaagggtcattgaa

SEQ ID NO: 28162 - DNA, 50 bp, synthetic construct
  source 1..50: mol_type = other DNA
gactaattctttgctgaaattccaaaggtgatttctcaaaataattttac

SEQ ID NO: 28163 - DNA, 50 bp, synthetic construct
  source 1..50: mol_type = other DNA
cttttgaagaatcgctctgtaattgggttcacagaaagcttcttcaaagt

SEQ ID NO: 28164 - DNA, 50 bp, synthetic construct
  source 1..50: mol_type = other DNA
gtgcatataataagccatcccggaaatcccaaatatgaaatagatgtgaa

SEQ ID NO: 28165 - DNA, 50 bp, synthetic construct
  source 1..50: mol_type = other DNA
gatacaatctagggcatcagttttgaaacgctgcccgcgcagattgctaa

SEQ ID NO: 28166 - DNA, 50 bp, synthetic construct
  source 1..50: mol_type = other DNA
tccggtgggcaaccccataggtcaatgatatgttaggcaaggcaaccggg

SEQ ID NO: 28167 - DNA, 50 bp, synthetic construct
  source 1..50: mol_type = other DNA
cagcgcggcgttaatcgggtgattttagacagccgcccggttcatgcagc

SEQ ID NO: 28168 - DNA, 50 bp, synthetic construct
  source 1..50: mol_type = other DNA
actggccgcgtgatcaaggggtgggaccagggcttgatgggcatgcaggt

SEQ ID NO: 28169 - DNA, 50 bp, synthetic construct
  source 1..50: mol_type = other DNA
atggcacctatttgtaggacggctataatatacatttgtatgattatcat

SEQ ID NO: 28170 - DNA, 50 bp, synthetic construct
  source 1..50: mol_type = other DNA
atcaagggtcattgtattgtagctatagactttattcaagggtcattgaa

SEQ ID NO: 28171 - DNA, 50 bp, synthetic construct
  source 1..50: mol_type = other DNA
caaacctaaaatcttaatcatcttcatgtttgattctccatttaaaaagc

SEQ ID NO: 28172 - DNA, 50 bp, synthetic construct
  source 1..50: mol_type = other DNA
ccacttagataagcatagtccgaagattctctatatatttcaataagtta

SEQ ID NO: 28173 - DNA, 50 bp, synthetic construct
  source 1..50: mol_type = other DNA
gcgcgtgccatcgtttcgatatgtccacgtagcgaaaatatggcagccgc

SEQ ID NO: 28174 - DNA, 50 bp, synthetic construct
  source 1..50: mol_type = other DNA
ggaaggtacgcatttgaccggacatgttaccaatcaataagtgcccttct

SEQ ID NO: 28175 - DNA, 50 bp, synthetic construct
  source 1..50: mol_type = other DNA
gcgttaatcgggtgatttttattagatgattttagacagccgcccgattc

SEQ ID NO: 28176 - DNA, 50 bp, synthetic construct
  source 1..50: mol_type = other DNA
tatgattatacaaacaaatttaaaatttttcatttaaagctataacaaga

SEQ ID NO: 28177 - DNA, 50 bp, synthetic construct
  source 1..50: mol_type = other DNA
aaatgagaatcaattgcatgggagttttccatatcaaagcattttcagag

SEQ ID NO: 28178 - DNA, 50 bp, synthetic construct
  source 1..50: mol_type = other DNA
gttaaatcgaactcttacaaaatcataagcttataaccgttatggctaat

SEQ ID NO: 28179 - DNA, 50 bp, synthetic construct
  source 1..50: mol_type = other DNA
tttcttcctgctattgtcagtctctattcactacacatgacgcattctac

SEQ ID NO: 28180 - DNA, 50 bp, synthetic construct
  source 1..50: mol_type = other DNA
cactaaggtttataaaagcatacgttttgaactattattaaaaaatgatg

SEQ ID NO: 28181 - DNA, 50 bp, synthetic construct
  source 1..50: mol_type = other DNA
tctacaagggctggggaatcaaaaatttttatttaaaaagacaattaagg

SEQ ID NO: 28182 - DNA, 50 bp, synthetic construct
  source 1..50: mol_type = other DNA
ccacttagataagcatagtccgaagattctttatatatttcaataagtta

SEQ ID NO: 28183 - DNA, 50 bp, synthetic construct
  source 1..50: mol_type = other DNA
gcaacttacttaataccggacaactagtggtgagatatgatttttgttta

SEQ ID NO: 28184 - DNA, 50 bp, synthetic construct
  source 1..50: mol_type = other DNA
taatgatgaaggtcaccagacacttaagcacctttgaagcttgctcatta

SEQ ID NO: 28185 - DNA, 50 bp, synthetic construct
  source 1..50: mol_type = other DNA
aacagaaacaggtggtattcgaacggtgagatataatttttgtttaattt

SEQ ID NO: 28186 - DNA, 50 bp, synthetic construct
  source 1..50: mol_type = other DNA
cccaatcttcacatcaatcggtttttcaaccgtgctatagtaagaaagtt

SEQ ID NO: 28187 - DNA, 50 bp, synthetic construct
  source 1..50: mol_type = other DNA
taactttcttactatagcacggttgaaatctcagcactgtcagaaagcgc

SEQ ID NO: 28188 - DNA, 50 bp, synthetic construct
  source 1..50: mol_type = other DNA
cgggtgatttttattagacacgtttaaacgtgccaacggttacagcgaac

SEQ ID NO: 28189 - DNA, 50 bp, synthetic construct
  source 1..50: mol_type = other DNA
ttcaatgacccttgaataaagtctatagctacaatacaatgacccttgat

SEQ ID NO: 28190 - DNA, 50 bp, synthetic construct
  source 1..50: mol_type = other DNA
tcgttataatacgcggtaggggcgttaatcaatacctgacattggctcag

SEQ ID NO: 28191 - DNA, 50 bp, synthetic construct
  source 1..50: mol_type = other DNA
aaagactctctttttttatctaaaattctgagaactcatcgcgctttttc

SEQ ID NO: 28192 - DNA, 50 bp, synthetic construct
  source 1..50: mol_type = other DNA
tgaaaatcgtcgaactttaatttcacactggtaaagtatacagtgatttc

SEQ ID NO: 28193 - DNA, 50 bp, synthetic construct
  source 1..50: mol_type = other DNA
tcgatctttcccttcgttataaagcgtattataacgataggggctaggtg

SEQ ID NO: 28194 - DNA, 50 bp, synthetic construct
  source 1..50: mol_type = other DNA
cgggtgatttttattagacacgtttagaccttgctaatcttagacagccg

SEQ ID NO: 28195 - DNA, 50 bp, synthetic construct
  source 1..50: mol_type = other DNA
atttatatttgttagtataaaagaattatcttaaatatacaacaataatc

SEQ ID NO: 28196 - DNA, 50 bp, synthetic construct
  source 1..50: mol_type = other DNA
tagccaggcgaattggcaacccgaattagggaaacctaaacaggagatta

SEQ ID NO: 28197 - DNA, 50 bp, synthetic construct
  source 1..50: mol_type = other DNA
aagccatcccggaaacccagacgttgatattaggcaatccgaaatatgag

SEQ ID NO: 28198 - DNA, 50 bp, synthetic construct
  source 1..50: mol_type = other DNA
tatcagccgataattggggatattataagcgagatacatatcggcgaggc

SEQ ID NO: 28199 - DNA, 50 bp, synthetic construct
  source 1..50: mol_type = other DNA
aaaattgtggtaagtgatgagtgcatgcctgcaaggcatataaaaaggtg

SEQ ID NO: 28200 - DNA, 50 bp, synthetic construct
  source 1..50: mol_type = other DNA
gaaaaatgggtatgcatccttcctgacagcaggatgtctaatttgctttg

SEQ ID NO: 28201 - DNA, 50 bp, synthetic construct
  source 1..50: mol_type = other DNA
cttcaatgaccattgaataaagtctagctacaatacaatgacccttgatt

SEQ ID NO: 28202 - DNA, 50 bp, synthetic construct
  source 1..50: mol_type = other DNA
ttatcatttatagaaataagttctatagaacttcagtgcctccatgatca

SEQ ID NO: 28203 - DNA, 50 bp, synthetic construct
  source 1..50: mol_type = other DNA
agcatttctgctgcttctttttcttctcggcaagaagaagttcaacgaac

SEQ ID NO: 28204 - DNA, 50 bp, synthetic construct
  source 1..50: mol_type = other DNA
ttcattcgatgaggccgcataaaacggcttttgcggcttcaacgttcatt

SEQ ID NO: 28205 - DNA, 50 bp, synthetic construct
  source 1..50: mol_type = other DNA
ttagaaatggctaaagttctggtgctagtgctttattattccatgtacgg

SEQ ID NO: 28206 - DNA, 50 bp, synthetic construct
  source 1..50: mol_type = other DNA
tttgattatagagctagcaccacagacttgctgattaatctttaattttt

SEQ ID NO: 28207 - DNA, 50 bp, synthetic construct
  source 1..50: mol_type = other DNA
tccagcccggttgccttgcctaacattgacctatggggttacccaccgga

SEQ ID NO: 28208 - DNA, 50 bp, synthetic construct
  source 1..50: mol_type = other DNA
ttattttaattaagtagtgaataatcaatatcaaataatatttaatatta

SEQ ID NO: 28209 - DNA, 50 bp, synthetic construct
  source 1..50: mol_type = other DNA
acagttgagatgtttgaagatgctgcaggacaggcaaggataaaaactat

SEQ ID NO: 28210 - DNA, 50 bp, synthetic construct
  source 1..50: mol_type = other DNA
caacgcaaacattaaaaactattatttgaccgtttttgaatttgagattg

SEQ ID NO: 28211 - DNA, 50 bp, synthetic construct
  source 1..50: mol_type = other DNA
attgtcttcagtataatgggttcctagggaacaaatatcagcattacatt

SEQ ID NO: 28212 - DNA, 50 bp, synthetic construct
  source 1..50: mol_type = other DNA
cgggtgatttttattagacacgtttagaccttgatgattttagacggccg

SEQ ID NO: 28213 - DNA, 50 bp, synthetic construct
  source 1..50: mol_type = other DNA
gtgcatataataagccatcccggaaatccgaaatatgaaatagatgttaa

SEQ ID NO: 28214 - DNA, 50 bp, synthetic construct
  source 1..50: mol_type = other DNA
ctatttcatatttgggattccctaattcgggtttccgggatggcttatta

SEQ ID NO: 28215 - DNA, 50 bp, synthetic construct
  source 1..50: mol_type = other DNA
cggctgtctaaaatcatcaaggtctaaacgtgtctaataaaaatcacccg

SEQ ID NO: 28216 - DNA, 50 bp, synthetic construct
  source 1..50: mol_type = other DNA
ccattaagtttcgtcaaagataattaattataattgatcataaatatcgc

SEQ ID NO: 28217 - DNA, 50 bp, synthetic construct
  source 1..50: mol_type = other DNA
gtggataatttcccacaaacgacccacattgaatctgtcacgttattaac

SEQ ID NO: 28218 - DNA, 50 bp, synthetic construct
  source 1..50: mol_type = other DNA
atactggacatgctatgtgaactattttgtttatataggtcatgcaaagc

SEQ ID NO: 28219 - DNA, 50 bp, synthetic construct
  source 1..50: mol_type = other DNA
ataccatgtgaagcgtgaactccagggcctataaggccaccttttatatt

SEQ ID NO: 28220 - DNA, 50 bp, synthetic construct
  source 1..50: mol_type = other DNA
atgaagaatgaaccgtaccataaataatactgatacggagaaccttatca

SEQ ID NO: 28221 - DNA, 50 bp, synthetic construct
  source 1..50: mol_type = other DNA
cagttcaaatctgggtggtgcctccaaataaaaaaagcatcttaaaacag

SEQ ID NO: 28222 - DNA, 50 bp, synthetic construct
  source 1..50: mol_type = other DNA
tcatccccgacgttcacccacgttgcggcgagggataacggacgtcacgc

SEQ ID NO: 28223 - DNA, 50 bp, synthetic construct
  source 1..50: mol_type = other DNA
ccatgatgcgccacttccgaaatttcaaaaagatcagtggtcaaacggct

SEQ ID NO: 28224 - DNA, 50 bp, synthetic construct
  source 1..50: mol_type = other DNA
tggttagaaatggctaaagttctggtgctttattattccatgtacggaca

SEQ ID NO: 28225 - DNA, 50 bp, synthetic construct
  source 1..50: mol_type = other DNA
catctatttcatatttgggattgccttgggtttccgggatggcttattat

SEQ ID NO: 28226 - DNA, 50 bp, synthetic construct
  source 1..50: mol_type = other DNA
tataattattcactgtttaaaattcaaaattaaaacattaaaaaacaata

SEQ ID NO: 28227 - DNA, 50 bp, synthetic construct
  source 1..50: mol_type = other DNA
cggctgtctaaaatcatcaaggtctaaacgtgtataataaaaatcacccg

SEQ ID NO: 28228 - DNA, 50 bp, synthetic construct
  source 1..50: mol_type = other DNA
cggtcccggacgcggggtcagacgggcgtcggaccgggcgtggccgatcg

SEQ ID NO: 28229 - DNA, 50 bp, synthetic construct
  source 1..50: mol_type = other DNA
attgttaggaaatatagatagaaatatttgtatgaatatttaatataacc

SEQ ID NO: 28230 - DNA, 50 bp, synthetic construct
  source 1..50: mol_type = other DNA
ctagcactagtatatcattttttagataatgttgtatatactggtcgaca

SEQ ID NO: 28231 - DNA, 50 bp, synthetic construct
  source 1..50: mol_type = other DNA
gcccttatctcgccccgtcatgaaaaatggtggcggggcgcgcggcccta

SEQ ID NO: 28232 - DNA, 50 bp, synthetic construct
  source 1..50: mol_type = other DNA
tttgcgccttgcgcaattgatcctgcttgatcccaagcggaagatcgaac

SEQ ID NO: 28233 - DNA, 50 bp, synthetic construct
  source 1..50: mol_type = other DNA
agcagctcgagtagcggcgacaccgcggccggctcgcgctcggacctgcg

SEQ ID NO: 28234 - DNA, 50 bp, synthetic construct
  source 1..50: mol_type = other DNA
gctggagacgcgccgcgtctacctgcgcgcggtcgcggcgcgcgtcagct

SEQ ID NO: 28235 - DNA, 50 bp, synthetic construct
  source 1..50: mol_type = other DNA
cgggtgattttcatcagacacgtttagaccttgctaatcttagacagccg

SEQ ID NO: 28236 - DNA, 50 bp, synthetic construct
  source 1..50: mol_type = other DNA
cgcccgaccagccaagacgggcttcgccgcctgatcagggttctcgggcg

SEQ ID NO: 28237 - DNA, 50 bp, synthetic construct
  source 1..50: mol_type = other DNA
gacggcggcgccgatcgatccgcagctagagatcgaacgggaccgattgg

SEQ ID NO: 28238 - DNA, 50 bp, synthetic construct
  source 1..50: mol_type = other DNA
gcgttaatcgggtgattttcatcagatgattttagacagccgcccggttc

SEQ ID NO: 28239 - DNA, 50 bp, synthetic construct
  source 1..50: mol_type = other DNA
ttcggcaggctcggcttgacgctcgggctcgttacgccgcgcgatcgccg

SEQ ID NO: 28240 - DNA, 50 bp, synthetic construct
  source 1..50: mol_type = other DNA
actacgttgctgcaccaccctgtcatgacagggtggtgaaaccacgtacg

SEQ ID NO: 28241 - DNA, 50 bp, synthetic construct
  source 1..50: mol_type = other DNA
tcaccctcggcctcctggacacccctcgacgaccaggcgggacagggtcc

SEQ ID NO: 28242 - DNA, 50 bp, synthetic construct
  source 1..50: mol_type = other DNA
tgccgacagactatatagacaaaaatttttgtccctataagcataccgca

SEQ ID NO: 28243 - DNA, 50 bp, synthetic construct
  source 1..50: mol_type = other DNA
aaaagaaagtatacaaaatttagatttcataataaatggttgtttcttta

SEQ ID NO: 28244 - DNA, 50 bp, synthetic construct
  source 1..50: mol_type = other DNA
tgatttctaaaagaagtcttagaatcatctataagaagttttttgcatgg

SEQ ID NO: 28245 - DNA, 50 bp, synthetic construct
  source 1..50: mol_type = other DNA
gacggcacaacagatcaaatctatgccggtgcggcatccgctctgtgtcc

SEQ ID NO: 28246 - DNA, 50 bp, synthetic construct
  source 1..50: mol_type = other DNA
cttgttgtcaatagtagtattaacatgttatcctcaaggatgtatacaaa

SEQ ID NO: 28247 - DNA, 50 bp, synthetic construct
  source 1..50: mol_type = other DNA
tgcttttctgcttttaattttttaatataaaaatgtaaaaaataaaagct

SEQ ID NO: 28248 - DNA, 50 bp, synthetic construct
  source 1..50: mol_type = other DNA
catgaataaaaacagtattcactataaccaaagaattgtattttattcta

SEQ ID NO: 28249 - DNA, 50 bp, synthetic construct
  source 1..50: mol_type = other DNA
tctatattaaaataatctaaacatatattaattttataaatttattaaaa

SEQ ID NO: 28250 - DNA, 50 bp, synthetic construct
  source 1..50: mol_type = other DNA
ttaaaaaaccttttttataaattatataagacttttcaaatcgattttaa

SEQ ID NO: 28251 - DNA, 50 bp, synthetic construct
  source 1..50: mol_type = other DNA
gaaataaccaaaagagccgtctgcatgattaaaaaatttttgtttgattt

SEQ ID NO: 28252 - DNA, 50 bp, synthetic construct
  source 1..50: mol_type = other DNA
tttttcatctttgggtatttcaaaatattaaaaagggcagccattaaagc

SEQ ID NO: 28253 - DNA, 50 bp, synthetic construct
  source 1..50: mol_type = other DNA
atcgtgctgatggacatcaatatgcctgtattgtaggtgaggtacagcaa

SEQ ID NO: 28254 - DNA, 50 bp, synthetic construct
  source 1..50: mol_type = other DNA
tgacataccaatcttcttttaataattattatcttgatttttctcggttc

SEQ ID NO: 28255 - DNA, 50 bp, synthetic construct
  source 1..50: mol_type = other DNA
cttggaagctggactattcagacttaatgctgatttgtcgtagagttcac

SEQ ID NO: 28256 - DNA, 50 bp, synthetic construct
  source 1..50: mol_type = other DNA
ttaaaataagatgtttaaaaattccataatcattaatttagatattctaa

SEQ ID NO: 28257 - DNA, 50 bp, synthetic construct
  source 1..50: mol_type = other DNA
tacgtatatttcaatatcatcctttttaggttgcttttcaaattggttta

SEQ ID NO: 28258 - DNA, 50 bp, synthetic construct
  source 1..50: mol_type = other DNA
cagatttaattttttgatagggggattttgtttacaataaaacttataaa

SEQ ID NO: 28259 - DNA, 50 bp, synthetic construct
  source 1..50: mol_type = other DNA
tcgcgccggtcgtgaagatgtcgtctcgacgaggaggatgtgttttccct

SEQ ID NO: 28260 - DNA, 50 bp, synthetic construct
  source 1..50: mol_type = other DNA
accctctatggcatcaaaaactgcgacaccatcaagaaagcccgcaagtg

SEQ ID NO: 28261 - DNA, 50 bp, synthetic construct
  source 1..50: mol_type = other DNA
gagttcccgagcaaacacatcactatcacggtcaacctggcccccgccga

SEQ ID NO: 28262 - DNA, 50 bp, synthetic construct
  source 1..50: mol_type = other DNA
cattaccagaaggataatataggttaacttatatattccggaaggatgat

SEQ ID NO: 28263 - DNA, 50 bp, synthetic construct
  source 1..50: mol_type = other DNA
ttagcaatctgcgcgggcagcgtttcaaaactgatgccctagattgtatc

SEQ ID NO: 28264 - DNA, 50 bp, synthetic construct
  source 1..50: mol_type = other DNA
aatcaaggcttttccttttgctgttaaggcaagaatactagtgctttatt

SEQ ID NO: 28265 - DNA, 50 bp, synthetic construct
  source 1..50: mol_type = other DNA
gattgccagatggatgatatgttttaacaaatactaaccagatggatgat

SEQ ID NO: 28266 - DNA, 50 bp, synthetic construct
  source 1..50: mol_type = other DNA
cgagcacttcctcgccagcctggagggccagacccgcgatggcctgctcg

SEQ ID NO: 28267 - DNA, 50 bp, synthetic construct
  source 1..50: mol_type = other DNA
tacaataagaagaaaggatgaaatacccggcatccttttttcaccagctc

SEQ ID NO: 28268 - DNA, 50 bp, synthetic construct
  source 1..50: mol_type = other DNA
actttttaggcaattgatgcttgaaatcaagatctttgctcaagaaaata

SEQ ID NO: 28269 - DNA, 50 bp, synthetic construct
  source 1..50: mol_type = other DNA
gtcatcgcaaatgagctagctgagtacttagctacgacaaatgttgtgat

SEQ ID NO: 28270 - DNA, 50 bp, synthetic construct
  source 1..50: mol_type = other DNA
ctggtaagtcatctgcacaaagttttctgactgtgctccaatcttttgtt

SEQ ID NO: 28271 - DNA, 50 bp, synthetic construct
  source 1..50: mol_type = other DNA
ttgctgagatgccctcatccgcatagatgtctgctagcttctcactggtc

SEQ ID NO: 28272 - DNA, 50 bp, synthetic construct
  source 1..50: mol_type = other DNA
actatccatttgcagctttttttgagcaattaaagcttttaatcgcatca

SEQ ID NO: 28273 - DNA, 50 bp, synthetic construct
  source 1..50: mol_type = other DNA
ggaagacaaatacgacaatccaattattatcttttttatattttattcca

SEQ ID NO: 28274 - DNA, 50 bp, synthetic construct
  source 1..50: mol_type = other DNA
atggcagattggccagcttttagttcgcacagtaggtggtctaacaaaat

SEQ ID NO: 28275 - DNA, 50 bp, synthetic construct
  source 1..50: mol_type = other DNA
cgttgtataaaaggatacatcaaaactttgagttttccttgctggtaaaa

SEQ ID NO: 28276 - DNA, 50 bp, synthetic construct
  source 1..50: mol_type = other DNA
tcaaacataatggaaagaaaattcaagccttgcggaaagctcggttttct

SEQ ID NO: 28277 - DNA, 50 bp, synthetic construct
  source 1..50: mol_type = other DNA
aaatcaaggcattcagatggaaatttgttaaggtcataatgggttgattt

SEQ ID NO: 28278 - DNA, 50 bp, synthetic construct
  source 1..50: mol_type = other DNA
cttccttacgtttggctgcctacataatctcaacccaaaacggggagaat

SEQ ID NO: 28279 - DNA, 50 bp, synthetic construct
  source 1..50: mol_type = other DNA
ttcttaatgatgaaggtcaccagacacctttgaagcttgctcattagcgg

SEQ ID NO: 28280 - DNA, 50 bp, synthetic construct
  source 1..50: mol_type = other DNA
ggttataaaagccgcaacgaatttgtttttatattatctgcattatatcc

SEQ ID NO: 28281 - DNA, 50 bp, synthetic construct
  source 1..50: mol_type = other DNA
cgtctccctgggctgccctaagaatcattagggtgcccgaaaaacctcgt

SEQ ID NO: 28282 - DNA, 50 bp, synthetic construct
  source 1..50: mol_type = other DNA
atcaagggtcattgtatttgagctatagcctatattcaagggtcatcgaa

SEQ ID NO: 28283 - DNA, 50 bp, synthetic construct
  source 1..50: mol_type = other DNA
tttagttgggcaattgctttttttgaatattgtcttcaggttcctgccaa

SEQ ID NO: 28284 - DNA, 50 bp, synthetic construct
  source 1..50: mol_type = other DNA
gagagttcgattctctcaggcggctccacgatttacgcccgtaaattcgg

SEQ ID NO: 28285 - DNA, 50 bp, synthetic construct
  source 1..50: mol_type = other DNA
tcttttttgctccgcattcggcgccgaccccgcatgaatggctccccgac

SEQ ID NO: 28286 - DNA, 50 bp, synthetic construct
  source 1..50: mol_type = other DNA
agttcgagcatgccgatcaccgcaattgcgttcatcggggtgcggatttc

SEQ ID NO: 28287 - DNA, 50 bp, synthetic construct
  source 1..50: mol_type = other DNA
ttccctgggttgccctaacgattattgtatcgctagggtgcccgaaggcg

SEQ ID NO: 28288 - DNA, 50 bp, synthetic construct
  source 1..50: mol_type = other DNA
gagatccgcacgcccatgaacgcaattgcggtgatcggcatgctggaatt

SEQ ID NO: 28289 - DNA, 50 bp, synthetic construct
  source 1..50: mol_type = other DNA
cttgaggtgctgcgcgagccgctggagtccgggcatatcgtgatttcccg

SEQ ID NO: 28290 - DNA, 50 bp, synthetic construct
  source 1..50: mol_type = other DNA
ttcccacggcgcaaccggatcatgatcatcagcgggttgtcgttaggcgt

SEQ ID NO: 28291 - DNA, 50 bp, synthetic construct
  source 1..50: mol_type = other DNA
aaggttggctttgtttccctgggttgcccgaaagcactggtcgactccga

SEQ ID NO: 28292 - DNA, 50 bp, synthetic construct
  source 1..50: mol_type = other DNA
ctggaagtcttgcgagagcccatggaaagcggctttattgtgattgcccg

SEQ ID NO: 28293 - DNA, 50 bp, synthetic construct
  source 1..50: mol_type = other DNA
ttcatatttgggattgccaaatataacatttaggttttccgggatggctt

SEQ ID NO: 28294 - DNA, 50 bp, synthetic construct
  source 1..50: mol_type = other DNA
atcaagggtcattgtattgtagctatagacttcactcaagggtcattgaa

SEQ ID NO: 28295 - DNA, 50 bp, synthetic construct
  source 1..50: mol_type = other DNA
tgcaaccatggccggcccacctgggtgaagctcggccatggcgatatcga

SEQ ID NO: 28296 - DNA, 50 bp, synthetic construct
  source 1..50: mol_type = other DNA
acaatggaagattggacttgggaagctctccctcctaatccttgtatccg

SEQ ID NO: 28297 - DNA, 50 bp, synthetic construct
  source 1..50: mol_type = other DNA
ccagaacctggcggtcctatcatgagcacgttatgggaacccgccgcagc

SEQ ID NO: 28298 - DNA, 50 bp, synthetic construct
  source 1..50: mol_type = other DNA
atttatttccgaatacgcatcacgtgaagttgtgagtctgttagaaaaac

SEQ ID NO: 28299 - DNA, 50 bp, synthetic construct
  source 1..50: mol_type = other DNA
aatgtaatgctgatatttgttccctaggaacccattatactgaagacaat

SEQ ID NO: 28300 - DNA, 50 bp, synthetic construct
  source 1..50: mol_type = other DNA
tagagtggggggtgtggtagcggaggagggacttgaacccccgacacgcg

SEQ ID NO: 28301 - DNA, 50 bp, synthetic construct
  source 1..50: mol_type = other DNA
tgattttgtggatttggttgcgggagcaggatttgaacctgcgaccttca

SEQ ID NO: 28302 - DNA, 50 bp, synthetic construct
  source 1..50: mol_type = other DNA
tatttcatatttgggattgcctaatacgttcgggtttccgggatggctta

SEQ ID NO: 28303 - DNA, 50 bp, synthetic construct
  source 1..50: mol_type = other DNA
tataaaaaagctgaacgtgaaacattataatgccaacttagtataaaaaa

SEQ ID NO: 28304 - DNA, 50 bp, synthetic construct
  source 1..50: mol_type = other DNA
tagacacgtttaaatacaccacctaaaggaagtccttttaagactggtta

SEQ ID NO: 28305 - DNA, 50 bp, synthetic construct
  source 1..50: mol_type = other DNA
cggctgtctaacattagcaaggtctaaacgtgtctgatgaaaatcacccg

SEQ ID NO: 28306 - DNA, 50 bp, synthetic construct
  source 1..50: mol_type = other DNA
attgtcttcagtataatgggttcctagagaacaaatatcagcattacatt

SEQ ID NO: 28307 - DNA, 50 bp, synthetic construct
  source 1..50: mol_type = other DNA
ttcaatgacctttgaataaagtctatagctacgatacaatgacctttgat

SEQ ID NO: 28308 - DNA, 50 bp, synthetic construct
  source 1..50: mol_type = other DNA
caggcgaattggcaaacctaaatgttatattaggcaaacctaaacaggag

SEQ ID NO: 28309 - DNA, 50 bp, synthetic construct
  source 1..50: mol_type = other DNA
ttaacatctatttcatatttcggatttccgggatggcttattatatgcac

SEQ ID NO: 28310 - DNA, 50 bp, synthetic construct
  source 1..50: mol_type = other DNA
acactttacggcatcaaaaattgtgacaccattaaaaaggctcgccgttg

SEQ ID NO: 28311 - DNA, 50 bp, synthetic construct
  source 1..50: mol_type = other DNA
ctatttcatatttcggattccctaattcgggtttccgggatggcttatta

SEQ ID NO: 28312 - DNA, 50 bp, synthetic construct
  source 1..50: mol_type = other DNA
gggaagcggcgaggtaaatcaagggtcattgaagtcataatcatttcagt

SEQ ID NO: 28313 - DNA, 50 bp, synthetic construct
  source 1..50: mol_type = other DNA
cggctgtctaaaatcatcaaggtctaaacgtgtctaataaaaatcacacg

SEQ ID NO: 28314 - DNA, 50 bp, synthetic construct
  source 1..50: mol_type = other DNA
gaaaatcggctttgtttcccttggctgtccgaaaaaccttgtcgattcag

SEQ ID NO: 28315 - DNA, 50 bp, synthetic construct
  source 1..50: mol_type = other DNA
aagccatcccggaaacccgaatgttgatattagggaatcccaaatatgaa

SEQ ID NO: 28316 - DNA, 50 bp, synthetic construct
  source 1..50: mol_type = other DNA
aggtgagtaatgcgtaaaatcataatcattcatgtggatatggactgctt

SEQ ID NO: 28317 - DNA, 50 bp, synthetic construct
  source 1..50: mol_type = other DNA
attgtcttcagtataatgggtccctagggaattaatatcagcattacatt

SEQ ID NO: 28318 - DNA, 50 bp, synthetic construct
  source 1..50: mol_type = other DNA
tatttagataaaaatgctggattgttttaaactttatttttacctcgcag

SEQ ID NO: 28319 - DNA, 50 bp, synthetic construct
  source 1..50: mol_type = other DNA
catgtggtcaaggtgctttatcgtatggacaatagtattaaggttctcta

SEQ ID NO: 28320 - DNA, 50 bp, synthetic construct
  source 1..50: mol_type = other DNA
gccttcgtctggatgatcaacaaggtgatgctgattgcccccatcggggt

SEQ ID NO: 28321 - DNA, 50 bp, synthetic construct
  source 1..50: mol_type = other DNA
tattccctgattagctgccgtgaaatttctaaaacgtcaatcgtacaaat

SEQ ID NO: 28322 - DNA, 50 bp, synthetic construct
  source 1..50: mol_type = other DNA
gccgccttttatcggcggcttttgtactctgaaatggtgcgcgaggcggg

SEQ ID NO: 28323 - DNA, 50 bp, synthetic construct
  source 1..50: mol_type = other DNA
ctaagcttttacgagcagagtaacactccacatggttcgtcattgggaag

SEQ ID NO: 28324 - DNA, 50 bp, synthetic construct
  source 1..50: mol_type = other DNA
tcgaatcctttcgggtgcgccatttcacccggcggggcgcgccattcttc

SEQ ID NO: 28325 - DNA, 50 bp, synthetic construct
  source 1..50: mol_type = other DNA
cgcaaccacatctcaaatgtcatatgcatcacaaacgcaatgcaaaagct

SEQ ID NO: 28326 - DNA, 50 bp, synthetic construct
  source 1..50: mol_type = other DNA
acgctgcatttttgcgttggttattagtaactaaagtatttgcgttggtt

SEQ ID NO: 28327 - DNA, 50 bp, synthetic construct
  source 1..50: mol_type = other DNA
caaatgaccaagttcgttggtagttcattaaaaacaaaagtggcaacttt

SEQ ID NO: 28328 - DNA, 50 bp, synthetic construct
  source 1..50: mol_type = other DNA
acataaattataggtggaacttactaaatgtatctaatactaatttatca

SEQ ID NO: 28329 - DNA, 50 bp, synthetic construct
  source 1..50: mol_type = other DNA
actataaaaatccaaaataagatttttatattcttttataattttatctt

SEQ ID NO: 28330 - DNA, 50 bp, synthetic construct
  source 1..50: mol_type = other DNA
attcattagctcctaacccttggatatccaaaggtgtggtcctaattctt

SEQ ID NO: 28331 - DNA, 50 bp, synthetic construct
  source 1..50: mol_type = other DNA
catatccaagtcattatcgacgaggcctccttaattatgccttgtagata

SEQ ID NO: 28332 - DNA, 50 bp, synthetic construct
  source 1..50: mol_type = other DNA
gcggctcaaaccggtcatctggtcctctcgacgctgcacaccaactccac

SEQ ID NO: 28333 - DNA, 50 bp, synthetic construct
  source 1..50: mol_type = other DNA
ttaatcgtggggaaccgtatcataaatatgttacggtgaaccgtatcata

SEQ ID NO: 28334 - DNA, 50 bp, synthetic construct
  source 1..50: mol_type = other DNA
catcggaatctgctgatcgagaagtatgctactgttgatccaggagcatc

SEQ ID NO: 28335 - DNA, 50 bp, synthetic construct
  source 1..50: mol_type = other DNA
cttagtatatccataagacaaaattcatttccttctttatcgactccgat

SEQ ID NO: 28336 - DNA, 50 bp, synthetic construct
  source 1..50: mol_type = other DNA
gcggcagctggaaaacacaatataattctttatggagagccaggatgtgg

SEQ ID NO: 28337 - DNA, 50 bp, synthetic construct
  source 1..50: mol_type = other DNA
ggcttttgcaactcttggatgtcgtacattaggatgcagggtaaatcatt

SEQ ID NO: 28338 - DNA, 50 bp, synthetic construct
  source 1..50: mol_type = other DNA
tccagctaagcgaatcactatgctataaaattacagtcaatctcgcgcct

SEQ ID NO: 28339 - DNA, 50 bp, synthetic construct
  source 1..50: mol_type = other DNA
aggtgagcaatgcgtaaaatcataatcattcatgtggatatggactgctt

SEQ ID NO: 28340 - DNA, 50 bp, synthetic construct
  source 1..50: mol_type = other DNA
aactattacccggagaacagtttcatgatactattacccgcggcacattt

SEQ ID NO: 28341 - DNA, 50 bp, synthetic construct
  source 1..50: mol_type = other DNA
caaattatgagtgtacgtttagtgttagccaaagggcgcgagaagtcatt

SEQ ID NO: 28342 - DNA, 50 bp, synthetic construct
  source 1..50: mol_type = other DNA
gcgctatggaccgggcggctgtcgaggatcacgcggttgacgttacgctc

SEQ ID NO: 28343 - DNA, 50 bp, synthetic construct
  source 1..50: mol_type = other DNA
atcatcccagcggaagatatttattaatttatactttccgagcggcagtc

SEQ ID NO: 28344 - DNA, 50 bp, synthetic construct
  source 1..50: mol_type = other DNA
tgatacgcctctgcgtatcagttaatttatgatatgcttctcctcgcata

SEQ ID NO: 28345 - DNA, 50 bp, synthetic construct
  source 1..50: mol_type = other DNA
atggaggatctgttccaggatctgaaagcagaacggatcagatccctgat

SEQ ID NO: 28346 - DNA, 50 bp, synthetic construct
  source 1..50: mol_type = other DNA
tttttgcttagtttaacaaccgcctcggtccgtgctgtgtggggaaacat

SEQ ID NO: 28347 - DNA, 50 bp, synthetic construct
  source 1..50: mol_type = other DNA
agccaccccggaaacccaaagagaaatgctttcgggaacccaaaatatcc

SEQ ID NO: 28348 - DNA, 50 bp, synthetic construct
  source 1..50: mol_type = other DNA
ctaataatcccacaacttctatgtgtgatgcgtatttggaaataaatcag

SEQ ID NO: 28349 - DNA, 50 bp, synthetic construct
  source 1..50: mol_type = other DNA
ctaatagactcacaacttcaacatgtgatgcgtattcggaaataaatcag

SEQ ID NO: 28350 - DNA, 50 bp, synthetic construct
  source 1..50: mol_type = other DNA
ttaatggtggattctacattgccctcccccccagttgctacccaaatggg

SEQ ID NO: 28351 - DNA, 50 bp, synthetic construct
  source 1..50: mol_type = other DNA
gggatatttttgctcatagtaggcacatgggcttgtagggctggtaggac

SEQ ID NO: 28352 - DNA, 50 bp, synthetic construct
  source 1..50: mol_type = other DNA
atgtttccccacacagcacggaccgaggcggttgttaaactaagcaaaaa

SEQ ID NO: 28353 - DNA, 50 bp, synthetic construct
  source 1..50: mol_type = other DNA
ttttaaataaaaacattaagttatgatttttgtttaatttttatttaaaa

SEQ ID NO: 28354 - DNA, 50 bp, synthetic construct
  source 1..50: mol_type = other DNA
tttttgcttagtttaacaaccgcctcggtccgtgctgtatggggaaacat

SEQ ID NO: 28355 - DNA, 50 bp, synthetic construct
  source 1..50: mol_type = other DNA
ttaaaggaagtcttagattttatctaggcagcgtctaagagcgtattaaa

SEQ ID NO: 28356 - DNA, 50 bp, synthetic construct
  source 1..50: mol_type = other DNA
ggtctgtatcggtattagtactcatttcagaactcacacttcggtatggg

SEQ ID NO: 28357 - DNA, 50 bp, synthetic construct
  source 1..50: mol_type = other DNA
ggactctggtccttaccaggtggggagggttggtgcgatgtggaccagtc

SEQ ID NO: 28358 - DNA, 50 bp, synthetic construct
  source 1..50: mol_type = other DNA
cactctggtggaaatgaaggatagtagtatcctttattgaaatgttagtc

SEQ ID NO: 28359 - DNA, 50 bp, synthetic construct
  source 1..50: mol_type = other DNA
tttttgcttagtttaacaaccgcctcggtccgtgctgtgtgaggaaacat

SEQ ID NO: 28360 - DNA, 50 bp, synthetic construct
  source 1..50: mol_type = other DNA
tttttgtttagtttaacaaccgcctcggtccgtgctgtgtggggaaacat

SEQ ID NO: 28361 - DNA, 50 bp, synthetic construct
  source 1..50: mol_type = other DNA
aaggtcccatccatgtctgttgcgatcgaactgtcatcttctctctcctc

SEQ ID NO: 28362 - DNA, 50 bp, synthetic construct
  source 1..50: mol_type = other DNA
gatagtctagtgctgacccacaccgacacagaccatgtgggtgatgtgct

SEQ ID NO: 28363 - DNA, 50 bp, synthetic construct
  source 1..50: mol_type = other DNA
atgtttccccatacagcacggaccgaggcggttgttaaactaagcaaaaa

SEQ ID NO: 28364 - DNA, 50 bp, synthetic construct
  source 1..50: mol_type = other DNA
agactcacaacttcaacatgtggtgacacactcgacgtgatgcgtattcg

SEQ ID NO: 28365 - DNA, 50 bp, synthetic construct
  source 1..50: mol_type = other DNA
gactaacatttcaatcagtgtatctagatatgcttatctccaccagagtg

SEQ ID NO: 28366 - DNA, 50 bp, synthetic construct
  source 1..50: mol_type = other DNA
aagcaggcgcttcagttactcttaaataatagagtttccaatcaaaataa

SEQ ID NO: 28367 - DNA, 50 bp, synthetic construct
  source 1..50: mol_type = other DNA
ctagttgttctcacttgttgtagttccttggatcgttggtatgctggaat

SEQ ID NO: 28368 - DNA, 50 bp, synthetic construct
  source 1..50: mol_type = other DNA
ctaggcttttacgagcagagcgacacgtgatgcgtattcggaaataaatc

SEQ ID NO: 28369 - DNA, 50 bp, synthetic construct
  source 1..50: mol_type = other DNA
gatatgtaattcatcgacaaagccgagggtaatttagggtataacaaaat

SEQ ID NO: 28370 - DNA, 50 bp, synthetic construct
  source 1..50: mol_type = other DNA
tttttgtttagtttaacaaccgcctcggtccgtgctgtgtgaggaaacat

SEQ ID NO: 28371 - DNA, 50 bp, synthetic construct
  source 1..50: mol_type = other DNA
ctagttgttctcgcttgtcgtagttccttggatcgttggtatgctggaat

SEQ ID NO: 28372 - DNA, 50 bp, synthetic construct
  source 1..50: mol_type = other DNA
gatagtttggtcctgacgcacaccgatacagaccatgtgggcgatgtgct

SEQ ID NO: 28373 - DNA, 50 bp, synthetic construct
  source 1..50: mol_type = other DNA
ctcacgcatcttaatgctgggtcttattgctaagtattttaaagctgcta

SEQ ID NO: 28374 - DNA, 50 bp, synthetic construct
  source 1..50: mol_type = other DNA
tttccgaatacgcatcacgtggagtggaactcctaaatacgcatcatgtc

SEQ ID NO: 28375 - DNA, 50 bp, synthetic construct
  source 1..50: mol_type = other DNA
ctcttcacagcgtcaagtcttgttcagattgcaggccgggttggcaggag

SEQ ID NO: 28376 - DNA, 50 bp, synthetic construct
  source 1..50: mol_type = other DNA
tctaacagactcacaacttcaacgtgatgcgtatttgggaataaatccgt

SEQ ID NO: 28377 - DNA, 50 bp, synthetic construct
  source 1..50: mol_type = other DNA
ccaaccatataccaatgccgaactgtggattggttgttggaaaacatcgg

SEQ ID NO: 28378 - DNA, 50 bp, synthetic construct
  source 1..50: mol_type = other DNA
ttattttgattggaaactctattatttaagagtaactgaagcgcctgctt

SEQ ID NO: 28379 - DNA, 50 bp, synthetic construct
  source 1..50: mol_type = other DNA
ctcttaaataagaagcacatagcaatgttattgttactcttaaataatag

SEQ ID NO: 28380 - DNA, 50 bp, synthetic construct
  source 1..50: mol_type = other DNA
aattctcgccttcttcaatatgtccccacctggaaaggcaacaccagacc

SEQ ID NO: 28381 - DNA, 50 bp, synthetic construct
  source 1..50: mol_type = other DNA
gagaaacccaggagtgtaaatgctcctggatcatttaaggtgttttcgat

SEQ ID NO: 28382 - DNA, 50 bp, synthetic construct
  source 1..50: mol_type = other DNA
tccctaccaatgataaccgagaatgccaaaatggcaatcaagcaaaaatt

SEQ ID NO: 28383 - DNA, 50 bp, synthetic construct
  source 1..50: mol_type = other DNA
tgccaatgccaggcaagaattcatagtttaaaaagcggtgggaattgcac

SEQ ID NO: 28384 - DNA, 50 bp, synthetic construct
  source 1..50: mol_type = other DNA
gaagacggaaaccttatcattaatgataacggaatcaggtatccttgtcc

SEQ ID NO: 28385 - DNA, 50 bp, synthetic construct
  source 1..50: mol_type = other DNA
gggacgattgccattatagcaatcgcagtcctgataattctcgttgtcga

SEQ ID NO: 28386 - DNA, 50 bp, synthetic construct
  source 1..50: mol_type = other DNA
cagctaatgagcaagcttcaaaggtgtctggtgaccttcatcattaagag

SEQ ID NO: 28387 - DNA, 50 bp, synthetic construct
  source 1..50: mol_type = other DNA
ctgaatcaaagtgtaaataacactatagttttgtttattagtattgctca

SEQ ID NO: 28388 - DNA, 50 bp, synthetic construct
  source 1..50: mol_type = other DNA
agaaagagctaaaagcttttactttgtactagctattattagtattttga

SEQ ID NO: 28389 - DNA, 50 bp, synthetic construct
  source 1..50: mol_type = other DNA
agggttcaaatccctatctctccgccccgccactttcgataaaaaaccgc

SEQ ID NO: 28390 - DNA, 50 bp, synthetic construct
  source 1..50: mol_type = other DNA
actaagcgaggctctataatcatttgaagtattaaacgtttatgcttagg

SEQ ID NO: 28391 - DNA, 50 bp, synthetic construct
  source 1..50: mol_type = other DNA
cttgcgggccttcttgatggtgtcgctcgcagttcttgatgccatagagg

SEQ ID NO: 28392 - DNA, 50 bp, synthetic construct
  source 1..50: mol_type = other DNA
aagtaaaacgtatcttcgaacggatagctgtccgaagatgatacaatatt

SEQ ID NO: 28393 - DNA, 50 bp, synthetic construct
  source 1..50: mol_type = other DNA
tagccccgtggaggggctatttcttttaatcttccattctcatcggcagc

SEQ ID NO: 28394 - DNA, 50 bp, synthetic construct
  source 1..50: mol_type = other DNA
gctctagggcttaatggagtaaatctcatgcgcctaatggcaacaaaaaa

SEQ ID NO: 28395 - DNA, 50 bp, synthetic construct
  source 1..50: mol_type = other DNA
aatttcagcatctgcggtatgcttattggctgtccgcatctgcgtgtctc

SEQ ID NO: 28396 - DNA, 50 bp, synthetic construct
  source 1..50: mol_type = other DNA
gcttcaaaggtgcttaagtcgggtaaagctgacttaatcaaaccggaaga

SEQ ID NO: 28397 - DNA, 50 bp, synthetic construct
  source 1..50: mol_type = other DNA
agtagttttcccagaaccggttgcaaccagttggaccgcttattaatata

SEQ ID NO: 28398 - DNA, 50 bp, synthetic construct
  source 1..50: mol_type = other DNA
aaagctcatatgattagcgcctattaataggaagtaatcatatttctcgt

SEQ ID NO: 28399 - DNA, 50 bp, synthetic construct
  source 1..50: mol_type = other DNA
gaccggcgataattttggcggatgtacggatgagccgactggaaaccttg

SEQ ID NO: 28400 - DNA, 50 bp, synthetic construct
  source 1..50: mol_type = other DNA
ctcatacgacgcacgtagagacggtaccgttgaaagtatttgcctcctcg

SEQ ID NO: 28401 - DNA, 50 bp, synthetic construct
  source 1..50: mol_type = other DNA
tatctctggaaagccttgatttagcacattataaggttttccagagattt

SEQ ID NO: 28402 - DNA, 50 bp, synthetic construct
  source 1..50: mol_type = other DNA
acggatatcggcacggaggaatacgcgaaagaactggcccatatggaaat

SEQ ID NO: 28403 - DNA, 50 bp, synthetic construct
  source 1..50: mol_type = other DNA
gcaatctatggatttatcggcagaaacggtgccggcaagactacctgtat

SEQ ID NO: 28404 - DNA, 50 bp, synthetic construct
  source 1..50: mol_type = other DNA
atttacaagcaggcagcgggtgtagttactggaaaaacagcaaagtctat

SEQ ID NO: 28405 - DNA, 50 bp, synthetic construct
  source 1..50: mol_type = other DNA
catatcatttccatgtgggcaagttcctctgtgccaatatcggttaaaat

SEQ ID NO: 28406 - DNA, 50 bp, synthetic construct
  source 1..50: mol_type = other DNA
ctgctgtgagatgtaaccctgcaggtctgcatctacgataccaggtgcag

SEQ ID NO: 28407 - DNA, 50 bp, synthetic construct
  source 1..50: mol_type = other DNA
gtaaaactgtccacgtatgcggttccactcattcagggggagattagacg

SEQ ID NO: 28408 - DNA, 50 bp, synthetic construct
  source 1..50: mol_type = other DNA
caagcactatttgctaatgtgtgataccgtacatgagcattatcacagcg

SEQ ID NO: 28409 - DNA, 50 bp, synthetic construct
  source 1..50: mol_type = other DNA
ctgatataggtatatcggtttcgatatcgaaaacaatataggtacagaag

SEQ ID NO: 28410 - DNA, 50 bp, synthetic construct
  source 1..50: mol_type = other DNA
atttctacatccgtcgagattacaatgataatggcaacatcaataggaac

SEQ ID NO: 28411 - DNA, 50 bp, synthetic construct
  source 1..50: mol_type = other DNA
ctcatatttcggattccctaatatcaacgtttgggtttccgggatggctt

SEQ ID NO: 28412 - DNA, 50 bp, synthetic construct
  source 1..50: mol_type = other DNA
ggcggttgtactggtttagttagctgaacgattgtactgattcacttccc

SEQ ID NO: 28413 - DNA, 50 bp, synthetic construct
  source 1..50: mol_type = other DNA
ttcccttagtaaaatggatattacggtgatatgccatactcctaaggatc

SEQ ID NO: 28414 - DNA, 50 bp, synthetic construct
  source 1..50: mol_type = other DNA
gaattaattttggctgatgagccaacaggagcactggattcaaaggcaac

SEQ ID NO: 28415 - DNA, 50 bp, synthetic construct
  source 1..50: mol_type = other DNA
caatttgttgtaatggcacttatttgtatgattatcacgcaaaagaggtt

SEQ ID NO: 28416 - DNA, 50 bp, synthetic construct
  source 1..50: mol_type = other DNA
gtgagcagacctacacactcgatgtgatgcgtctgcggaaaaagatccac

SEQ ID NO: 28417 - DNA, 50 bp, synthetic construct
  source 1..50: mol_type = other DNA
gtggataatttcccacaaacgacccattgaatctgtcacgttattaacaa

SEQ ID NO: 28418 - DNA, 50 bp, synthetic construct
  source 1..50: mol_type = other DNA
tgagcaatactaataaacaaaatcatagtgttatttacactttgattcag

SEQ ID NO: 28419 - DNA, 50 bp, synthetic construct
  source 1..50: mol_type = other DNA
atcatccatctggttagtatttgttaaaacatatcatccatctggcaatc

SEQ ID NO: 28420 - DNA, 50 bp, synthetic construct
  source 1..50: mol_type = other DNA
agccgtttgaccactgatctttttgaaatttcagaagtggcgcatcatgg

SEQ ID NO: 28421 - DNA, 50 bp, synthetic construct
  source 1..50: mol_type = other DNA
gttaagcaccaacaacatcacagtatatcaccatgcagttcggcagcaag

SEQ ID NO: 28422 - DNA, 50 bp, synthetic construct
  source 1..50: mol_type = other DNA
cgtgacagattcaacttgttcatcataatgctaccgtctcaatgtgggtc

SEQ ID NO: 28423 - DNA, 50 bp, synthetic construct
  source 1..50: mol_type = other DNA
actttgttgactcgttgtttctactggcgctatcaacgcaacagccatta

SEQ ID NO: 28424 - DNA, 50 bp, synthetic construct
  source 1..50: mol_type = other DNA
tgggcttataaaaaataccaccaagcttggtggtatttttaagaattaga

SEQ ID NO: 28425 - DNA, 50 bp, synthetic construct
  source 1..50: mol_type = other DNA
tgagcaatactaataagaaaaaccatagtgttatttacactttgattcag

SEQ ID NO: 28426 - DNA, 50 bp, synthetic construct
  source 1..50: mol_type = other DNA
gattgccagatggatgatatattttaataaatactaaccagatggatgat

SEQ ID NO: 28427 - DNA, 50 bp, synthetic construct
  source 1..50: mol_type = other DNA
tcataatcatccatctggttagtatttatcatccatctggcaatccgaca

SEQ ID NO: 28428 - DNA, 50 bp, synthetic construct
  source 1..50: mol_type = other DNA
ttaacatctatctcatatttcggatttccgggatggcttattatatgcac

SEQ ID NO: 28429 - DNA, 50 bp, synthetic construct
  source 1..50: mol_type = other DNA
aattgccaatctggcttcacgacacgtgtcgtgacgccaatctggaaaag

SEQ ID NO: 28430 - DNA, 50 bp, synthetic construct
  source 1..50: mol_type = other DNA
acgtaaaatggttaagtcccgattaaccacgatcattcactatatttatt

SEQ ID NO: 28431 - DNA, 50 bp, synthetic construct
  source 1..50: mol_type = other DNA
gccgccgctggcggccataatctgctgatggtcggcccacccggttcggg

SEQ ID NO: 28432 - DNA, 50 bp, synthetic construct
  source 1..50: mol_type = other DNA
tgaagatgaatggtagcgggagaccgggagagggacttgaacccccgaca

SEQ ID NO: 28433 - DNA, 50 bp, synthetic construct
  source 1..50: mol_type = other DNA
tcggaaaattgcggcagattgagattcatcaaggacatcctttttgccgg

SEQ ID NO: 28434 - DNA, 50 bp, synthetic construct
  source 1..50: mol_type = other DNA
ccggcaaaaaggatgtccttgatgaatctcaacatgccgcaattttccga

SEQ ID NO: 28435 - DNA, 50 bp, synthetic construct
  source 1..50: mol_type = other DNA
ggtcgccggttcgaatccggcccgggggagccattttcagacttaggtgc

SEQ ID NO: 28436 - DNA, 50 bp, synthetic construct
  source 1..50: mol_type = other DNA
taatatattggggaatcactatttataaaaatagcatctactttaccttc

SEQ ID NO: 28437 - DNA, 50 bp, synthetic construct
  source 1..50: mol_type = other DNA
cactacgcactcgacgtgcgttgtctatagtctccacgtggtgcgtttgc

SEQ ID NO: 28438 - DNA, 50 bp, synthetic construct
  source 1..50: mol_type = other DNA
gtcgaccactttaagctggccgagcgctgatccgtacgaaccaacgcgag

SEQ ID NO: 28439 - DNA, 50 bp, synthetic construct
  source 1..50: mol_type = other DNA
attgacttgatattccgggctttcagtattctgctgaatatattttctct

SEQ ID NO: 28440 - DNA, 50 bp, synthetic construct
  source 1..50: mol_type = other DNA
aattattatagcacaagccgtttgattcataatcttgtggtataatgaat

SEQ ID NO: 28441 - DNA, 50 bp, synthetic construct
  source 1..50: mol_type = other DNA
gtaatgtttttgtgaagcatatcatatcacaaataaaactaaaaaatagg

SEQ ID NO: 28442 - DNA, 50 bp, synthetic construct
  source 1..50: mol_type = other DNA
gcgtttaagattatgcgcggcgaagcagagacatatcacaaataaaacta

SEQ ID NO: 28443 - DNA, 50 bp, synthetic construct
  source 1..50: mol_type = other DNA
tcagctttcggaagggcgtatcatagtgaatttgatagttctaaaatctt

SEQ ID NO: 28444 - DNA, 50 bp, synthetic construct
  source 1..50: mol_type = other DNA
catgtcattaatatcagtacagataaagctgtatctcctgtgaacacaat

SEQ ID NO: 28445 - DNA, 50 bp, synthetic construct
  source 1..50: mol_type = other DNA
ataccatatgccacaatgaaatccatggaaagccgtcaccacgcgtaaat

SEQ ID NO: 28446 - DNA, 50 bp, synthetic construct
  source 1..50: mol_type = other DNA
ttcaatgacccttgatttaagtctatagctacaatacaatgacccttgat

SEQ ID NO: 28447 - DNA, 50 bp, synthetic construct
  source 1..50: mol_type = other DNA
aggacacgatggatctctatacaatattagatggatcattgtcaactggg

SEQ ID NO: 28448 - DNA, 50 bp, synthetic construct
  source 1..50: mol_type = other DNA
aggtgagtaatgcgtaaaatcatgattattcatgtggatatggactgctt

SEQ ID NO: 28449 - DNA, 50 bp, synthetic construct
  source 1..50: mol_type = other DNA
tgatttgtgaaaagcagggatggcctgctggagcttttcctcggtgatca

SEQ ID NO: 28450 - DNA, 50 bp, synthetic construct
  source 1..50: mol_type = other DNA
cgggcgtgggggttcaagtcccccctttgggacaccagctgagacccctg

SEQ ID NO: 28451 - DNA, 50 bp, synthetic construct
  source 1..50: mol_type = other DNA
tgtggttggtcttgatgatatgatcgttcttactggtcacaccaatcaca

SEQ ID NO: 28452 - DNA, 50 bp, synthetic construct
  source 1..50: mol_type = other DNA
ccttctcagggcatgactctaccatcgtgtgcagccgactgctggcgggg

SEQ ID NO: 28453 - DNA, 50 bp, synthetic construct
  source 1..50: mol_type = other DNA
atgtttcctcaaacttatcatattgaaatgttgtcgcttttaaaaaaata

SEQ ID NO: 28454 - DNA, 50 bp, synthetic construct
  source 1..50: mol_type = other DNA
atcagtaatggcatgcccggctttactctcgttgggttgccggagactac

SEQ ID NO: 28455 - DNA, 50 bp, synthetic construct
  source 1..50: mol_type = other DNA
gtcggggcaagcgcgccgcgcgcgagcgtcgccggagtggcgggatcgaa

SEQ ID NO: 28456 - DNA, 50 bp, synthetic construct
  source 1..50: mol_type = other DNA
aagcgacggccgcgaatacaacagggctgatcacctcggggtcgcctgga

SEQ ID NO: 28457 - DNA, 50 bp, synthetic construct
  source 1..50: mol_type = other DNA
cggcagaacgctccaggcgcagttaacacactccacgggaagttgatcca

SEQ ID NO: 28458 - DNA, 50 bp, synthetic construct
  source 1..50: mol_type = other DNA
tggttcgaacccagtatcgcccaccaccgggaagaggccggtccgcagca

SEQ ID NO: 28459 - DNA, 50 bp, synthetic construct
  source 1..50: mol_type = other DNA
ttaaaaaacccaagtcctatgaaaaatatcaggggatttttttcttttcc

SEQ ID NO: 28460 - DNA, 50 bp, synthetic construct
  source 1..50: mol_type = other DNA
cagtaaaagaacccagggttcaagcgccctcgacctcctcgctgccacag

SEQ ID NO: 28461 - DNA, 50 bp, synthetic construct
  source 1..50: mol_type = other DNA
cggtgctgatcaagtccggtctataaatgtgtacaacttgatcaagtccg

SEQ ID NO: 28462 - DNA, 50 bp, synthetic construct
  source 1..50: mol_type = other DNA
gcgggcacaaattcaagaaatgctgcacaacatcaagaaatgctgcgcca

SEQ ID NO: 28463 - DNA, 50 bp, synthetic construct
  source 1..50: mol_type = other DNA
gataatgccctgaattcgttgatataggacaagtaattcagaagtataca

SEQ ID NO: 28464 - DNA, 50 bp, synthetic construct
  source 1..50: mol_type = other DNA
tcagagtcaaccagagctttggggcaacccaaagagacaaagccgacttt

SEQ ID NO: 28465 - DNA, 50 bp, synthetic construct
  source 1..50: mol_type = other DNA
cggcataggatcggcggccaaaacctatttgcttgatttatcctacaatc

SEQ ID NO: 28466 - DNA, 50 bp, synthetic construct
  source 1..50: mol_type = other DNA
aactttttcggatcaagctatgagggacgcaaagagggaactaaacactt

SEQ ID NO: 28467 - DNA, 50 bp, synthetic construct
  source 1..50: mol_type = other DNA
caattatagaattaagtcgtgataagtatccattttcagatttataatct

SEQ ID NO: 28468 - DNA, 50 bp, synthetic construct
  source 1..50: mol_type = other DNA
aatttgtattttgtaaatactaataaattaatattctttaaatatgaaaa

SEQ ID NO: 28469 - DNA, 50 bp, synthetic construct
  source 1..50: mol_type = other DNA
tttggtaacaagcctgtccccggatttcagggcattatctctgctaaaaa

SEQ ID NO: 28470 - DNA, 50 bp, synthetic construct
  source 1..50: mol_type = other DNA
gaaattcaagaagtgttgccacaattttgttgcgtaacatcaagaagtgc

SEQ ID NO: 28471 - DNA, 50 bp, synthetic construct
  source 1..50: mol_type = other DNA
ctgggccgcgcgtaacagtagatgcaaccgtgttcgcagccacgataggg

SEQ ID NO: 28472 - DNA, 50 bp, synthetic construct
  source 1..50: mol_type = other DNA
gccaagggataaaccgctgatgattgatgatgatccggttgcggcggggg

SEQ ID NO: 28473 - DNA, 50 bp, synthetic construct
  source 1..50: mol_type = other DNA
ccagtacccggcggcccgctgaacagcaggttgtgggcgccggcggcggc

SEQ ID NO: 28474 - DNA, 50 bp, synthetic construct
  source 1..50: mol_type = other DNA
tggccgccttgaactcactataatcagttcttgtgatcgatcagcagcgt

SEQ ID NO: 28475 - DNA, 50 bp, synthetic construct
  source 1..50: mol_type = other DNA
gctttaggattaaatggcgtaaacctaatgcgcctaatggctacaaaaaa

SEQ ID NO: 28476 - DNA, 50 bp, synthetic construct
  source 1..50: mol_type = other DNA
catgccgatgacggcaatgacaggagccagtcattgcgttcatcggtgtg

SEQ ID NO: 28477 - DNA, 50 bp, synthetic construct
  source 1..50: mol_type = other DNA
tcggagtcgaccagagccttcgggcaacccagggaaacaaagccaacctt

SEQ ID NO: 28478 - DNA, 50 bp, synthetic construct
  source 1..50: mol_type = other DNA
ttcacgagcggcatcaatagcttcttccagcgtggcgtacatggtcattg

SEQ ID NO: 28479 - DNA, 50 bp, synthetic construct
  source 1..50: mol_type = other DNA
accatcggtaacactaaagtaaaatattacacttcagtgaacaccgacgg

SEQ ID NO: 28480 - DNA, 50 bp, synthetic construct
  source 1..50: mol_type = other DNA
gccaacgcctcaccattaagagtagctggccttaacgggtcggccttttt

SEQ ID NO: 28481 - DNA, 50 bp, synthetic construct
  source 1..50: mol_type = other DNA
aagaggtttctttcgttttatgtttaaacccttaaaggctgagacacctt

SEQ ID NO: 28482 - DNA, 50 bp, synthetic construct
  source 1..50: mol_type = other DNA
ttagcgtaattcttcaacgggataaacaactttttgaaggttccgaataa

SEQ ID NO: 28483 - DNA, 50 bp, synthetic construct
  source 1..50: mol_type = other DNA
ctgtcatcccgaccagagtcgctttaacatcctaggacctcgaccaaaca

SEQ ID NO: 28484 - DNA, 50 bp, synthetic construct
  source 1..50: mol_type = other DNA
ccggttccaggcggcccgctgaacaacaggttatgagcgcctgcggcagc

SEQ ID NO: 28485 - DNA, 50 bp, synthetic construct
  source 1..50: mol_type = other DNA
tgtggatgtggtttcttcgtgaagttgattaacggaaacccaagcttgaa

SEQ ID NO: 28486 - DNA, 50 bp, synthetic construct
  source 1..50: mol_type = other DNA
gctatgttctgtagagaaccttagtactttgaccacatgccagccaaatt

SEQ ID NO: 28487 - DNA, 50 bp, synthetic construct
  source 1..50: mol_type = other DNA
tcgggtcattggatcagacagtaagtttattacgatcgcgcatccacgtg

SEQ ID NO: 28488 - DNA, 50 bp, synthetic construct
  source 1..50: mol_type = other DNA
ggccggtacaaaggtgcagatcggaggcattatgctttacactaagagcc

SEQ ID NO: 28489 - DNA, 50 bp, synthetic construct
  source 1..50: mol_type = other DNA
acgaacaaattcatatatcctctcaagattggatttatatcattagggtg

SEQ ID NO: 28490 - DNA, 50 bp, synthetic construct
  source 1..50: mol_type = other DNA
ttatacaaacaaaaaatagagggtttctactctacatctattgtgtaaag

SEQ ID NO: 28491 - DNA, 50 bp, synthetic construct
  source 1..50: mol_type = other DNA
aaggtcggctttgtatccctgggttgcccaaaggctctggtcgactccga

SEQ ID NO: 28492 - DNA, 50 bp, synthetic construct
  source 1..50: mol_type = other DNA
tcaacatcacgaccgatacggtctagactgtgtctatttcgtgttgtctt

SEQ ID NO: 28493 - DNA, 50 bp, synthetic construct
  source 1..50: mol_type = other DNA
ttaagacctgcttaatagctggattttattccacctttctcaaatcttat

SEQ ID NO: 28494 - DNA, 50 bp, synthetic construct
  source 1..50: mol_type = other DNA
tttttagcagcttgagaaatatttttaccgcgttctccatcaaagaaaat

SEQ ID NO: 28495 - DNA, 50 bp, synthetic construct
  source 1..50: mol_type = other DNA
aagatgggcctgcacaagcgcagcgagcccgccttgtgcgggctttaatc

SEQ ID NO: 28496 - DNA, 50 bp, synthetic construct
  source 1..50: mol_type = other DNA
acccaaacctaataaggcgccgcgcctccggcgccgatgaaatcgtggtc

SEQ ID NO: 28497 - DNA, 50 bp, synthetic construct
  source 1..50: mol_type = other DNA
cacttgcgggctttcttgatggtgtcgcagttcttgatgccatagagggt

SEQ ID NO: 28498 - DNA, 50 bp, synthetic construct
  source 1..50: mol_type = other DNA
ttcagggtcactgtgttccagtgttgacactgtaacttgttcatatgcca

SEQ ID NO: 28499 - DNA, 50 bp, synthetic construct
  source 1..50: mol_type = other DNA
tgataaggcaagccacagttggcaaatgaaacaaacgggccacgttcaaa

SEQ ID NO: 28500 - DNA, 50 bp, synthetic construct
  source 1..50: mol_type = other DNA
ggtcctgcgcgagccgctggagagcattggaaagcggcgagatcgtcatt

SEQ ID NO: 28501 - DNA, 50 bp, synthetic construct
  source 1..50: mol_type = other DNA
aattaacatctcaattaaggtaactatttcgtttatctctatcaaagtaa

SEQ ID NO: 28502 - DNA, 50 bp, synthetic construct
  source 1..50: mol_type = other DNA
gctgctaccagagcgaactatgattaatcaagaacctgtctgatagctgc

SEQ ID NO: 28503 - DNA, 50 bp, synthetic construct
  source 1..50: mol_type = other DNA
tcttttaagtaccttttaaaagggtatcatttaaagatgaacttataaac

SEQ ID NO: 28504 - DNA, 50 bp, synthetic construct
  source 1..50: mol_type = other DNA
cttacgtgcgaaataattcttctaataataataattttgccactggtctt

SEQ ID NO: 28505 - DNA, 50 bp, synthetic construct
  source 1..50: mol_type = other DNA
cagcagttttaattgcatcaccttctgacgtattccaaataaaagtgcgc

SEQ ID NO: 28506 - DNA, 50 bp, synthetic construct
  source 1..50: mol_type = other DNA
aaattggccaacttgaagatcacttcaccacaggccaagtccactatttt

SEQ ID NO: 28507 - DNA, 50 bp, synthetic construct
  source 1..50: mol_type = other DNA
tagattgcggtataaaatgtttaaattacaaccgtttcgacctaaataaa

SEQ ID NO: 28508 - DNA, 50 bp, synthetic construct
  source 1..50: mol_type = other DNA
aagtgtttagttccctctttgcgtccctcatagcttgatccgaaaaagtt

SEQ ID NO: 28509 - DNA, 50 bp, synthetic construct
  source 1..50: mol_type = other DNA
gcaggcataatgagcgcacccctaaagcgcctggcgcttattcgaaatgg

SEQ ID NO: 28510 - DNA, 50 bp, synthetic construct
  source 1..50: mol_type = other DNA
ctcaatgtagtctatagatctttgtattcggttctagagcattgcttatc

SEQ ID NO: 28511 - DNA, 50 bp, synthetic construct
  source 1..50: mol_type = other DNA
tataattagtcaccccggaaatcctagggaatccaaagtatccagtggag

SEQ ID NO: 28512 - DNA, 50 bp, synthetic construct
  source 1..50: mol_type = other DNA
tgcgaacatcttccggaagatatttaaacatcttccgtgacttttttgcc

SEQ ID NO: 28513 - DNA, 50 bp, synthetic construct
  source 1..50: mol_type = other DNA
tcggagtcgacgaggtttttcgggcaaccgagggaaacaaagccgatacg

SEQ ID NO: 28514 - DNA, 50 bp, synthetic construct
  source 1..50: mol_type = other DNA
gcgctatgcaccgggcggctgtcgaggatggcgcgattcacgtgacgttg

SEQ ID NO: 28515 - DNA, 50 bp, synthetic construct
  source 1..50: mol_type = other DNA
tcgctgtccaccgtggccttggggcaaccgaggctgacgaagccgacttt

SEQ ID NO: 28516 - DNA, 50 bp, synthetic construct
  source 1..50: mol_type = other DNA
ggccttcgggcaccctaaagaaataacgatctttagggcagccaaggctg

SEQ ID NO: 28517 - DNA, 50 bp, synthetic construct
  source 1..50: mol_type = other DNA
acgattaatgcaaataaaaaggagaagcgctttttcgccattctaattcc

SEQ ID NO: 28518 - DNA, 50 bp, synthetic construct
  source 1..50: mol_type = other DNA
gaggccctgctgtctttcgtgcgggccgcaaggattatcagaagggcttc

SEQ ID NO: 28519 - DNA, 50 bp, synthetic construct
  source 1..50: mol_type = other DNA
gcgctcgccgtcgctgatgctaggcgctgaccgtcgccgatgccgagcgc

SEQ ID NO: 28520 - DNA, 50 bp, synthetic construct
  source 1..50: mol_type = other DNA
taacgggcacagtgcattcttgccgcagctaggttgcagagcgcccgcgt

SEQ ID NO: 28521 - DNA, 50 bp, synthetic construct
  source 1..50: mol_type = other DNA
cacttgcgggccttcttgatggtgtcgcagttcttgatgccatagagggt

SEQ ID NO: 28522 - DNA, 50 bp, synthetic construct
  source 1..50: mol_type = other DNA
cgtatcggctttgtttccctcggttgcccgaaaaacctcgtcgactccga

SEQ ID NO: 28523 - DNA, 50 bp, synthetic construct
  source 1..50: mol_type = other DNA
tcgaatcctgccaccccgacttcacgacaggacgacgaattttagtaata

SEQ ID NO: 28524 - DNA, 50 bp, synthetic construct
  source 1..50: mol_type = other DNA
gcgggtccttgtccgcgaggtcggcggcggtcgcgcgggcaagggcctgc

SEQ ID NO: 28525 - DNA, 50 bp, synthetic construct
  source 1..50: mol_type = other DNA
gtagatatgtttccgatgacgacacatattgaagctgtgaccgttttaac

SEQ ID NO: 28526 - DNA, 50 bp, synthetic construct
  source 1..50: mol_type = other DNA
caggcgaattggcaaacctaaatgttatattagggaaacctaaacaggag

SEQ ID NO: 28527 - DNA, 50 bp, synthetic construct
  source 1..50: mol_type = other DNA
gaagtcgggcatgtcgcggacccgctatgtcccgcgccaccgccgcgcgc

SEQ ID NO: 28528 - DNA, 50 bp, synthetic construct
  source 1..50: mol_type = other DNA
ttaacctccactggatactttggatttccggggtgactaattatatgcac

SEQ ID NO: 28529 - DNA, 50 bp, synthetic construct
  source 1..50: mol_type = other DNA
accatctgctacgccttcatgcaggccagcatgcaggccaccggcatggt

SEQ ID NO: 28530 - DNA, 50 bp, synthetic construct
  source 1..50: mol_type = other DNA
ccttatcgcggttgcgagcacgggtgcatctactgctatgcacgcccttc

SEQ ID NO: 28531 - DNA, 50 bp, synthetic construct
  source 1..50: mol_type = other DNA
cgcgcggcgtaaaccgcgtgatcctttggatagtcgtccggtacatgccg

SEQ ID NO: 28532 - DNA, 50 bp, synthetic construct
  source 1..50: mol_type = other DNA
tagtcaccccggaaatccaaagtgtgatattagggaatccaaagtatcca

SEQ ID NO: 28533 - DNA, 50 bp, synthetic construct
  source 1..50: mol_type = other DNA
caccccggaaacccaaagtgtcaatatgataagatagggaatccaaagta

SEQ ID NO: 28534 - DNA, 50 bp, synthetic construct
  source 1..50: mol_type = other DNA
gcacctatttgtatgggttgcacttttgatcaactcatttgtatgattat

SEQ ID NO: 28535 - DNA, 50 bp, synthetic construct
  source 1..50: mol_type = other DNA
cgtcaaaattgaccagaaaaatcgtgtgatcagattggatcattttccaa

SEQ ID NO: 28536 - DNA, 50 bp, synthetic construct
  source 1..50: mol_type = other DNA
gaaaaaaagatagtccctactaaatttctaacattaagtgtgattttttc

SEQ ID NO: 28537 - DNA, 50 bp, synthetic construct
  source 1..50: mol_type = other DNA
aggagcttttttaacatgatttatcaaaaaggaatgtacaaaaaaagatg

SEQ ID NO: 28538 - DNA, 50 bp, synthetic construct
  source 1..50: mol_type = other DNA
ttttacagtgtcaaatctaaaattttgattttccggattactctgtgacc

SEQ ID NO: 28539 - DNA, 50 bp, synthetic construct
  source 1..50: mol_type = other DNA
ataacaaatgattatagccctcagtatgtctgtatataataattaattct

SEQ ID NO: 28540 - DNA, 50 bp, synthetic construct
  source 1..50: mol_type = other DNA
ctcgcccggctctaggttcggctggccatatctgtctcccgctaaggtcg

SEQ ID NO: 28541 - DNA, 50 bp, synthetic construct
  source 1..50: mol_type = other DNA
gttaattttatagacttaaaaagaacactacttataagaataaatgaagc

SEQ ID NO: 28542 - DNA, 50 bp, synthetic construct
  source 1..50: mol_type = other DNA
tagtcaccccggaaacccaaatggtgatattagggaatccaaagtatcca

SEQ ID NO: 28543 - DNA, 50 bp, synthetic construct
  source 1..50: mol_type = other DNA
aacatacattcgaaaggattttaattgggaaagcctgtcgaaaccgtaaa

SEQ ID NO: 28544 - DNA, 50 bp, synthetic construct
  source 1..50: mol_type = other DNA
cgaggtgggctgatagcccgcaatctacatcgggctaaagttacctaaaa

SEQ ID NO: 28545 - DNA, 50 bp, synthetic construct
  source 1..50: mol_type = other DNA
gagcgtaacgtcaaccgcgtgatcctcgacagccgccctgtccatagcgc

SEQ ID NO: 28546 - DNA, 50 bp, synthetic construct
  source 1..50: mol_type = other DNA
gaggaagatgtatgactaattcatatattccatatggatacaaaattcaa

SEQ ID NO: 28547 - DNA, 50 bp, synthetic construct
  source 1..50: mol_type = other DNA
ataatgcgaatcactcaaacgatgtacatgatttatacatgtgatattat

SEQ ID NO: 28548 - DNA, 50 bp, synthetic construct
  source 1..50: mol_type = other DNA
ttcagcctcgcccaactcgctaagacgctcgcgtctctaccgagatggaa

SEQ ID NO: 28549 - DNA, 50 bp, synthetic construct
  source 1..50: mol_type = other DNA
tccctaattatcccgaagtccgatacaggggaagcgatagtgctcaggaa

SEQ ID NO: 28550 - DNA, 50 bp, synthetic construct
  source 1..50: mol_type = other DNA
agtaaatgacgttcatcaataatgatatttatggatgaattgatatataa

SEQ ID NO: 28551 - DNA, 50 bp, synthetic construct
  source 1..50: mol_type = other DNA
cttccttatatatattatttatttataaatatatattttatttatggagt

SEQ ID NO: 28552 - DNA, 50 bp, synthetic construct
  source 1..50: mol_type = other DNA
gtccttatcgctgctccagaacccgtaatcagggcgcgggcgattgccac

SEQ ID NO: 28553 - DNA, 50 bp, synthetic construct
  source 1..50: mol_type = other DNA
aggtttattcaaattatagtaaaatattttactacaatttaaatacactt

SEQ ID NO: 28554 - DNA, 50 bp, synthetic construct
  source 1..50: mol_type = other DNA
ctttttagaaacatctttagttaaattaaaacctagtctttatctaaaat

SEQ ID NO: 28555 - DNA, 50 bp, synthetic construct
  source 1..50: mol_type = other DNA
ttttataagtatgatatgagttaataataaattttcaaacgtaggtaaag

SEQ ID NO: 28556 - DNA, 50 bp, synthetic construct
  source 1..50: mol_type = other DNA
ctgctgaaataaacaaagggaaaaaagtagctgaatacttattcttcaag

SEQ ID NO: 28557 - DNA, 50 bp, synthetic construct
  source 1..50: mol_type = other DNA
tcaaaatactgataaataaagggttttcaggttacttgtcaggattatct

SEQ ID NO: 28558 - DNA, 50 bp, synthetic construct
  source 1..50: mol_type = other DNA
tacagagaacacgattgtaggaaatttttctaggaattttaaatccttta

SEQ ID NO: 28559 - DNA, 50 bp, synthetic construct
  source 1..50: mol_type = other DNA
gcgctatgaaccggacggctatccaggatgacgcggttgacgtttcgctg

SEQ ID NO: 28560 - DNA, 50 bp, synthetic construct
  source 1..50: mol_type = other DNA
cgatgataaccgcgcgcggaaaacttgtcctccgcccggtgcaataatta

SEQ ID NO: 28561 - DNA, 50 bp, synthetic construct
  source 1..50: mol_type = other DNA
catgactttagtccagtgtggttttaaaacagcagtagactttacgtttg

SEQ ID NO: 28562 - DNA, 50 bp, synthetic construct
  source 1..50: mol_type = other DNA
accgggcatattacccggtgcgcacgcttggcccgtgtagcctttccggt

SEQ ID NO: 28563 - DNA, 50 bp, synthetic construct
  source 1..50: mol_type = other DNA
cggctggcgcagcgcatccagcacctatgctggacttcctgcggctgccc

SEQ ID NO: 28564 - DNA, 50 bp, synthetic construct
  source 1..50: mol_type = other DNA
tggccgaactgatcgaggaggttcgcgaccccccgcgtttattttcttag

SEQ ID NO: 28565 - DNA, 50 bp, synthetic construct
  source 1..50: mol_type = other DNA
ataatcatacaaatgagttgatcaaaagtgcaacctatacaaataggtgc

SEQ ID NO: 28566 - DNA, 50 bp, synthetic construct
  source 1..50: mol_type = other DNA
gcgcatgcttcggcggttcccgaggcgcgccaaaccgggcgaagcttcgc

SEQ ID NO: 28567 - DNA, 50 bp, synthetic construct
  source 1..50: mol_type = other DNA
cgaaacattgccgggttcacaacaatttgtgacgcaccggccgggacatg

SEQ ID NO: 28568 - DNA, 50 bp, synthetic construct
  source 1..50: mol_type = other DNA
tcgagttcatcaaggccctcgctcgccttcgactgccaccatgccatcga

SEQ ID NO: 28569 - DNA, 50 bp, synthetic construct
  source 1..50: mol_type = other DNA
tagccaggcgaattggcaacccgaattagtgaaacctaaacaggagatta

SEQ ID NO: 28570 - DNA, 50 bp, synthetic construct
  source 1..50: mol_type = other DNA
aacgatctgttccgcgcggatgtgacaaaatcaagcaggagcggatcggg

SEQ ID NO: 28571 - DNA, 50 bp, synthetic construct
  source 1..50: mol_type = other DNA
cgacaagcattatggtcaggtcagcaactagctgaccaacctacttgttc

SEQ ID NO: 28572 - DNA, 50 bp, synthetic construct
  source 1..50: mol_type = other DNA
ccccggacacggagcttgaaaggactctggcattcggtccgtgtccggca

SEQ ID NO: 28573 - DNA, 50 bp, synthetic construct
  source 1..50: mol_type = other DNA
gataccggagagcagacgctttgggcccgaacgcgctttgtcgtggtatt

SEQ ID NO: 28574 - DNA, 50 bp, synthetic construct
  source 1..50: mol_type = other DNA
ggcgctgaaaaatgtgctcatgctcgcacatgacgcatcgggggtgcgcc

SEQ ID NO: 28575 - DNA, 50 bp, synthetic construct
  source 1..50: mol_type = other DNA
ggaagaagaaactgatgatatgcctccgtatatttacggttgcttcttcc

SEQ ID NO: 28576 - DNA, 50 bp, synthetic construct
  source 1..50: mol_type = other DNA
ttgaactatcgttaaagaaatcaaaagtgttttcttggatatcctttcac

SEQ ID NO: 28577 - DNA, 50 bp, synthetic construct
  source 1..50: mol_type = other DNA
gcaatagtaaaggctttaaaaaaggccttctttgctataatatagggtgc

SEQ ID NO: 28578 - DNA, 50 bp, synthetic construct
  source 1..50: mol_type = other DNA
tgctgttcgaaggatgctgtactcgcggaatcagcgtcgacaaaacctag

SEQ ID NO: 28579 - DNA, 50 bp, synthetic construct
  source 1..50: mol_type = other DNA
gttggccggtcggaaacgacgtgagggccgagcgcggcgctgttgccgtg

SEQ ID NO: 28580 - DNA, 50 bp, synthetic construct
  source 1..50: mol_type = other DNA
ttagaaatggctaaagttctggtgctagtactttattattccatgtacgg

SEQ ID NO: 28581 - DNA, 50 bp, synthetic construct
  source 1..50: mol_type = other DNA
gcagcaatgaacagttatgttatgattcttgcatgactacgaacagtcag

SEQ ID NO: 28582 - DNA, 50 bp, synthetic construct
  source 1..50: mol_type = other DNA
aagcaatgcattgaccagatccaaatcatttttttgtcatacagttgctt

SEQ ID NO: 28583 - DNA, 50 bp, synthetic construct
  source 1..50: mol_type = other DNA
ctggaacaacaaatataacaactttaataaaaaatcggttgttgttccaa

SEQ ID NO: 28584 - DNA, 50 bp, synthetic construct
  source 1..50: mol_type = other DNA
taagggcgcgaaggacttggagaagcatctcctcggaccgcgcgccgagc

SEQ ID NO: 28585 - DNA, 50 bp, synthetic construct
  source 1..50: mol_type = other DNA
gtgcatataataagccatcccggaaatccgaaatatgagatagatgttaa

SEQ ID NO: 28586 - DNA, 50 bp, synthetic construct
  source 1..50: mol_type = other DNA
aaaaccttgaggattttcttggtcttgagagggaatttcctcaattttcc

SEQ ID NO: 28587 - DNA, 50 bp, synthetic construct
  source 1..50: mol_type = other DNA
agaatcgcaataatgccgatgaccaccatcagctcaataagagtgaatcc

SEQ ID NO: 28588 - DNA, 50 bp, synthetic construct
  source 1..50: mol_type = other DNA
ccgtacatggaataataaagtactagcaccagaactttagccatttctaa

SEQ ID NO: 28589 - DNA, 50 bp, synthetic construct
  source 1..50: mol_type = other DNA
atcaagcgtcattgtattgtagctatagacttcattcaagggtcattgaa

SEQ ID NO: 28590 - DNA, 50 bp, synthetic construct
  source 1..50: mol_type = other DNA
aagaaaagcagggcttagttccctgcaaggaaacgagccgtagcgtgttg

SEQ ID NO: 28591 - DNA, 50 bp, synthetic construct
  source 1..50: mol_type = other DNA
gctcttgcggatagcgggttgggccaacccccttctcaatttaacgtggc

SEQ ID NO: 28592 - DNA, 50 bp, synthetic construct
  source 1..50: mol_type = other DNA
ctgcaaacgaactggccggcgatgccggccatcagccagccagtttgcag

SEQ ID NO: 28593 - DNA, 50 bp, synthetic construct
  source 1..50: mol_type = other DNA
accatcggcaacactaaagtaaaatattacacttcagtgaacactgacgg

SEQ ID NO: 28594 - DNA, 50 bp, synthetic construct
  source 1..50: mol_type = other DNA
gtgctgttttatacgaccaagcgtgtgggcggtggggtgcagaattttga

SEQ ID NO: 28595 - DNA, 50 bp, synthetic construct
  source 1..50: mol_type = other DNA
gtagatcggaggcattatggaagttagctatacgatagcagacgttatgc

SEQ ID NO: 28596 - DNA, 50 bp, synthetic construct
  source 1..50: mol_type = other DNA
cccgctaatgaaaatctcccgaaggaaattgaataattatagatcgccgc

SEQ ID NO: 28597 - DNA, 50 bp, synthetic construct
  source 1..50: mol_type = other DNA
gcataacgtctgctatcgtatagctaacttccataatgcctccgatctac

SEQ ID NO: 28598 - DNA, 50 bp, synthetic construct
  source 1..50: mol_type = other DNA
cttttttgcctgataatcatacaaattcaaataagtgccattacaacaaa

SEQ ID NO: 28599 - DNA, 50 bp, synthetic construct
  source 1..50: mol_type = other DNA
gccgtcagtgttcactgaagtgtaattttactttagtgttgccgatggta

SEQ ID NO: 28600 - DNA, 50 bp, synthetic construct
  source 1..50: mol_type = other DNA
tgcaatttgctgtaacggtacctatttgtatgattatcaagcaaaaaagg

SEQ ID NO: 28601 - DNA, 50 bp, synthetic construct
  source 1..50: mol_type = other DNA
ctcaattgcggctggactaagtttataaactttgcctgcccgtcgaaaac

SEQ ID NO: 28602 - DNA, 50 bp, synthetic construct
  source 1..50: mol_type = other DNA
aaccttttttgcctgataatcatacaaataagtgccattacaacaaattg

SEQ ID NO: 28603 - DNA, 50 bp, synthetic construct
  source 1..50: mol_type = other DNA
aacgaaaggacgcatacatcaatcaaaaggacggcatgccatgaatatat

SEQ ID NO: 28604 - DNA, 50 bp, synthetic construct
  source 1..50: mol_type = other DNA
tgagttaacagagaattaacaattataaacgttatggctaatgctacaat

SEQ ID NO: 28605 - DNA, 50 bp, synthetic construct
  source 1..50: mol_type = other DNA
caccttcacagactcagctaattcaggaattatttgacgtttcacaggtt

SEQ ID NO: 28606 - DNA, 50 bp, synthetic construct
  source 1..50: mol_type = other DNA
gattattgctcggaggccagggtaattctcttgaatatacaacaataatc

SEQ ID NO: 28607 - DNA, 50 bp, synthetic construct
  source 1..50: mol_type = other DNA
acacaaaatagttatgatattgttcaaacaaaaacgcccctaccgtgtat

SEQ ID NO: 28608 - DNA, 50 bp, synthetic construct
  source 1..50: mol_type = other DNA
atccataatgatcaccgacgttggttttactatagggactgccaatggat

SEQ ID NO: 28609 - DNA, 50 bp, synthetic construct
  source 1..50: mol_type = other DNA
cgagggttccaggaacatacctacactaagggccacaatttcttccatat

SEQ ID NO: 28610 - DNA, 50 bp, synthetic construct
  source 1..50: mol_type = other DNA
cataacttaaaatccgagatcattatactgatgtaccacttaccgcagga

SEQ ID NO: 28611 - DNA, 50 bp, synthetic construct
  source 1..50: mol_type = other DNA
gcgatatttatgatcaattataattaattatctttgacgaaacttaatgg

SEQ ID NO: 28612 - DNA, 50 bp, synthetic construct
  source 1..50: mol_type = other DNA
aaaggctttgactaacacttcatcgcttgttaggattaacagaaaacttc

SEQ ID NO: 28613 - DNA, 50 bp, synthetic construct
  source 1..50: mol_type = other DNA
atctttaaaactgagccatgtaagcatgcaattgattatcatttaaagat

SEQ ID NO: 28614 - DNA, 50 bp, synthetic construct
  source 1..50: mol_type = other DNA
ccgtcggtgttcactgaagtgtaatattttactttagtgttaccgatggt

SEQ ID NO: 28615 - DNA, 50 bp, synthetic construct
  source 1..50: mol_type = other DNA
agttttgacggacaggcaaagtttataaacttagcccaaccacagttcag

SEQ ID NO: 28616 - DNA, 50 bp, synthetic construct
  source 1..50: mol_type = other DNA
tataattagtcaccccggaaacgctagggaatccaaagtatccagtggag

SEQ ID NO: 28617 - DNA, 50 bp, synthetic construct
  source 1..50: mol_type = other DNA
gatggcaataattttgcaattatcatgaaaatcacccgattaacgccgcg

SEQ ID NO: 28618 - DNA, 50 bp, synthetic construct
  source 1..50: mol_type = other DNA
acgattattgttgtatattcaagatatcattaaatatcaatgaattgaac

SEQ ID NO: 28619 - DNA, 50 bp, synthetic construct
  source 1..50: mol_type = other DNA
aatgtgaccttaattgtctttttaaagcctatgacagcgaagcacacaaa

SEQ ID NO: 28620 - DNA, 50 bp, synthetic construct
  source 1..50: mol_type = other DNA
tagtcaccccggaaatccaaagtgtggtattagggaatccaaagtatcca

SEQ ID NO: 28621 - DNA, 50 bp, synthetic construct
  source 1..50: mol_type = other DNA
gccgctaatgagcaagcttcaaaggtctggtgaccttcatcattaagagt

SEQ ID NO: 28622 - DNA, 50 bp, synthetic construct
  source 1..50: mol_type = other DNA
aaaccatagctcaggacgcttcgttcaggaaaggtaaagaactgcctgtt

SEQ ID NO: 28623 - DNA, 50 bp, synthetic construct
  source 1..50: mol_type = other DNA
cttgacattagtctttggaaatgctacaatgccgaatagctacaatacaa

SEQ ID NO: 28624 - DNA, 50 bp, synthetic construct
  source 1..50: mol_type = other DNA
tagccaggcgaattggcaacccgaatttggcaaacctaaacaggagatta

SEQ ID NO: 28625 - DNA, 50 bp, synthetic construct
  source 1..50: mol_type = other DNA
aatatattcatggtatgccgtcctttatgcgtcctttcgttttttagcac

SEQ ID NO: 28626 - DNA, 50 bp, synthetic construct
  source 1..50: mol_type = other DNA
gtgcatattattagccatcccggcaatcccaaatatcctatcgatatcat

SEQ ID NO: 28627 - DNA, 50 bp, synthetic construct
  source 1..50: mol_type = other DNA
ggtgatatggtcggcagcccctttgagtttgaccacaacaattacaagca

SEQ ID NO: 28628 - DNA, 50 bp, synthetic construct
  source 1..50: mol_type = other DNA
ctcctgtttaggtttccctaatataacatttaggtttgccaattcgcctg

SEQ ID NO: 28629 - DNA, 50 bp, synthetic construct
  source 1..50: mol_type = other DNA
accaatgcccctatcgttataatacgctttataacgaagggaaagatcga

SEQ ID NO: 28630 - DNA, 50 bp, synthetic construct
  source 1..50: mol_type = other DNA
cgacataaagtcgatggtcattgtattcaagggtgacggtattaccccgg

SEQ ID NO: 28631 - DNA, 50 bp, synthetic construct
  source 1..50: mol_type = other DNA
cttcaataacccttgaataaagtctagctacaatacaatgacccttgatt

SEQ ID NO: 28632 - DNA, 50 bp, synthetic construct
  source 1..50: mol_type = other DNA
gccgattgtccttgcgcaatcggcggaagtttttatcaaccgcaatcggc

SEQ ID NO: 28633 - DNA, 50 bp, synthetic construct
  source 1..50: mol_type = other DNA
gcataacgtgtactatataggacatatgttccttaacgtgtcggatctac

SEQ ID NO: 28634 - DNA, 50 bp, synthetic construct
  source 1..50: mol_type = other DNA
cggctgtctaagattagcaaggtctaaacgtgtctgatgaaaatcacccg

SEQ ID NO: 28635 - DNA, 50 bp, synthetic construct
  source 1..50: mol_type = other DNA
ggaaagccccctcatcgcatttgttacgagatcaatttgaagggctacct

SEQ ID NO: 28636 - DNA, 50 bp, synthetic construct
  source 1..50: mol_type = other DNA
tgtcgaccgccgagccgaagttttcgtaaagttcgcgtctacggtcgcct

SEQ ID NO: 28637 - DNA, 50 bp, synthetic construct
  source 1..50: mol_type = other DNA
accatgcagtttcatatataataattgctattaagtaacaatatcaccat

SEQ ID NO: 28638 - DNA, 50 bp, synthetic construct
  source 1..50: mol_type = other DNA
taaacaaaaatcatatctcaccactagatgtccggtattaagtaagttgc

SEQ ID NO: 28639 - DNA, 50 bp, synthetic construct
  source 1..50: mol_type = other DNA
cgatgtaagtttcatttttaagcatatgctataatgtgtatagtaatctg

SEQ ID NO: 28640 - DNA, 50 bp, synthetic construct
  source 1..50: mol_type = other DNA
aactttcttactatagcacggttgaaaaaccgattgatgtgaagattggg

SEQ ID NO: 28641 - DNA, 50 bp, synthetic construct
  source 1..50: mol_type = other DNA
gcttctttgctctgggctttctggatagtaaacacccaaataaaagaact

SEQ ID NO: 28642 - DNA, 50 bp, synthetic construct
  source 1..50: mol_type = other DNA
ttatgcctgaaaataagggtggtcaatgtctcacgaattttcagcgataa

SEQ ID NO: 28643 - DNA, 50 bp, synthetic construct
  source 1..50: mol_type = other DNA
tttcatattatccctccttagtgatatttttaatagaaaacaatcgtatc

SEQ ID NO: 28644 - DNA, 50 bp, synthetic construct
  source 1..50: mol_type = other DNA
ttcaataacccttgaatgaagtctatagctacaatacaatgacccttgat

SEQ ID NO: 28645 - DNA, 50 bp, synthetic construct
  source 1..50: mol_type = other DNA
gaatcgggcggctgtctaaaatcatctaataaaaatcacccgattaacgc

SEQ ID NO: 28646 - DNA, 50 bp, synthetic construct
  source 1..50: mol_type = other DNA
tgtgctttgacccgcaagcgcccgtcaacgctgttatggcaaaggtaatg

SEQ ID NO: 28647 - DNA, 50 bp, synthetic construct
  source 1..50: mol_type = other DNA
gaaaaaataatgtaaatagtagtatattctgcctgtttgacgggattgtc

SEQ ID NO: 28648 - DNA, 50 bp, synthetic construct
  source 1..50: mol_type = other DNA
tctgagtttagctgcagctggttgatcaaatactcaattggataccacag

SEQ ID NO: 28649 - DNA, 50 bp, synthetic construct
  source 1..50: mol_type = other DNA
aatagcctgccggcatcttacttccgccgatcctatgccggtagagcaag

SEQ ID NO: 28650 - DNA, 50 bp, synthetic construct
  source 1..50: mol_type = other DNA
tcgagggttacacctttcttatgatatcaatagaaaggtctcttcaggat

SEQ ID NO: 28651 - DNA, 50 bp, synthetic construct
  source 1..50: mol_type = other DNA
ttaacatctatttcatatttgggatttccgggatggcttattatatgcac

SEQ ID NO: 28652 - DNA, 50 bp, synthetic construct
  source 1..50: mol_type = other DNA
ctccactggatactttggattccctaggatttccggggtgactaattata

SEQ ID NO: 28653 - DNA, 50 bp, synthetic construct
  source 1..50: mol_type = other DNA
caggcgaattggcaaacctaaatgttatatttggcaaacctaaacaggag

SEQ ID NO: 28654 - DNA, 50 bp, synthetic construct
  source 1..50: mol_type = other DNA
cagtcttgagttcttctttattttcgaaaaaggcgttaagtccaaataaa

SEQ ID NO: 28655 - DNA, 50 bp, synthetic construct
  source 1..50: mol_type = other DNA
ccaggcgaattggcaacccgaacgtatattaggcaaacctaaacaggaga

SEQ ID NO: 28656 - DNA, 50 bp, synthetic construct
  source 1..50: mol_type = other DNA
atagctactatgaaaaaatagtaaattatacaagtattcagaagtaagga

SEQ ID NO: 28657 - DNA, 50 bp, synthetic construct
  source 1..50: mol_type = other DNA
agaagttgtacatcgtgtacaaggaccattccatgtaatgtacaacttca

SEQ ID NO: 28658 - DNA, 50 bp, synthetic construct
  source 1..50: mol_type = other DNA
acaaacacatcacatcgagtgtgtagtcaacgcatgtggaattagtggcg

SEQ ID NO: 28659 - DNA, 50 bp, synthetic construct
  source 1..50: mol_type = other DNA
catttttttctttctgcagtttcgctctaaacatttcacagaaagaaata

SEQ ID NO: 28660 - DNA, 50 bp, synthetic construct
  source 1..50: mol_type = other DNA
cattatgaataacatcaaatccttttaagacttttttccaattcttttat

SEQ ID NO: 28661 - DNA, 50 bp, synthetic construct
  source 1..50: mol_type = other DNA
aaatttggctaattttgaacataatttaattttcaaaactgctagaaatc

SEQ ID NO: 28662 - DNA, 50 bp, synthetic construct
  source 1..50: mol_type = other DNA
gaatactccgcctctatgcatggcgattgataaataggttttcgatatta

SEQ ID NO: 28663 - DNA, 50 bp, synthetic construct
  source 1..50: mol_type = other DNA
cggaacaaaagttcgctggctgttatatcaagattgataaataggttttc

SEQ ID NO: 28664 - DNA, 50 bp, synthetic construct
  source 1..50: mol_type = other DNA
aaaaatcctagcacataccattttatcggcatttatttatgcagattttt

SEQ ID NO: 28665 - DNA, 50 bp, synthetic construct
  source 1..50: mol_type = other DNA
ccattgcccgcatttttaaacattataatgtcgaatgaatttcagtaggg

SEQ ID NO: 28666 - DNA, 50 bp, synthetic construct
  source 1..50: mol_type = other DNA
gtagttttaccacatccacttggctatccactaggtccgagtaaacatag

SEQ ID NO: 28667 - DNA, 50 bp, synthetic construct
  source 1..50: mol_type = other DNA
aacttaaatattaaaaatattagataacttaattagaggattattaagag

SEQ ID NO: 28668 - DNA, 50 bp, synthetic construct
  source 1..50: mol_type = other DNA
ctttcttctttattgatataataatatgattttgttgatacttctgaaaa

SEQ ID NO: 28669 - DNA, 50 bp, synthetic construct
  source 1..50: mol_type = other DNA
gtggcactacgcggagtaggacgtttcactcctacgacggtgcgtgcccg

SEQ ID NO: 28670 - DNA, 50 bp, synthetic construct
  source 1..50: mol_type = other DNA
aggatgtctttgcggcgcttgttcatggtggcgctgcgcagaaaagtcca

SEQ ID NO: 28671 - DNA, 50 bp, synthetic construct
  source 1..50: mol_type = other DNA
tgtactacaatttttggtaaatttcagcaagaacaaagtatccatcagca

SEQ ID NO: 28672 - DNA, 50 bp, synthetic construct
  source 1..50: mol_type = other DNA
attgttatttaatattatacatgtataaccatataacgataaattatcat

SEQ ID NO: 28673 - DNA, 50 bp, synthetic construct
  source 1..50: mol_type = other DNA
cttttccgtctatgattttgtacccaagtagtaaacagcaaccaaaaaca

SEQ ID NO: 28674 - DNA, 50 bp, synthetic construct
  source 1..50: mol_type = other DNA
atgaagaaaaattcaattctatatttcagcatttttgaatttttcttctc

SEQ ID NO: 28675 - DNA, 50 bp, synthetic construct
  source 1..50: mol_type = other DNA
ttacactagatacacttatcaaaggtattagataagtctattagtaataa

SEQ ID NO: 28676 - DNA, 50 bp, synthetic construct
  source 1..50: mol_type = other DNA
agggactggcttacattttcgtataaaaataacgtcccttgccaggacgc

SEQ ID NO: 28677 - DNA, 50 bp, synthetic construct
  source 1..50: mol_type = other DNA
gaaaggggagtggagaccatttattaaaaagacaattaaggtcacattat

SEQ ID NO: 28678 - DNA, 50 bp, synthetic construct
  source 1..50: mol_type = other DNA
atattcatggtatgccgtcctttcgtggtgtgcgtcctttcgttttttag

SEQ ID NO: 28679 - DNA, 50 bp, synthetic construct
  source 1..50: mol_type = other DNA
tcggtggagctgcatgacaaagtcattactttgtttgctcccacaagcga

SEQ ID NO: 28680 - DNA, 50 bp, synthetic construct
  source 1..50: mol_type = other DNA
ctgatgaaatagtcaaaggctctattaagcacctttgaagcttgctcatt

SEQ ID NO: 28681 - DNA, 50 bp, synthetic construct
  source 1..50: mol_type = other DNA
tggcaaaagtactgactagtattcttagctatgtaaaagcacaatctacc

SEQ ID NO: 28682 - DNA, 50 bp, synthetic construct
  source 1..50: mol_type = other DNA
taaccagtcttaaaaggacttcctttaggtggtgtatttaaacgtgtcta

SEQ ID NO: 28683 - DNA, 50 bp, synthetic construct
  source 1..50: mol_type = other DNA
cattgtagcattagccataacgtttaaatcatatatacaatcctagcatt

SEQ ID NO: 28684 - DNA, 50 bp, synthetic construct
  source 1..50: mol_type = other DNA
agaagggcacttattgattggtaacatgtccggtcaaatgcgtaccttcc

SEQ ID NO: 28685 - DNA, 50 bp, synthetic construct
  source 1..50: mol_type = other DNA
taacgctggtcgagtagcttcaaagcttaagccatgcaggacaacgctta

SEQ ID NO: 28686 - DNA, 50 bp, synthetic construct
  source 1..50: mol_type = other DNA
aaaattatattttgcaaattttaataaaaagacaattaaggtcacattat

SEQ ID NO: 28687 - DNA, 50 bp, synthetic construct
  source 1..50: mol_type = other DNA
acataacaaatgaagtggatagtaattacgatcacattcttttgaatata

SEQ ID NO: 28688 - DNA, 50 bp, synthetic construct
  source 1..50: mol_type = other DNA
atcaagcaagatacagtgatggggattaaggtcacattatcttgaatata

SEQ ID NO: 28689 - DNA, 50 bp, synthetic construct
  source 1..50: mol_type = other DNA
gcactgtggacggggcgactgtcaagaatgacacggttgaccgcacgttc

SEQ ID NO: 28690 - DNA, 50 bp, synthetic construct
  source 1..50: mol_type = other DNA
acttaacagaagctgaaaaaaccaactgcgtcgcggtgctgatggtaagc

SEQ ID NO: 28691 - DNA, 50 bp, synthetic construct
  source 1..50: mol_type = other DNA
atattcatggtatgccgtcctttcgtggtgtgtgtcctttcgttttttag

SEQ ID NO: 28692 - DNA, 50 bp, synthetic construct
  source 1..50: mol_type = other DNA
tgtaataagtatatttaggcaattgactactataaaatatagtgatataa

SEQ ID NO: 28693 - DNA, 50 bp, synthetic construct
  source 1..50: mol_type = other DNA
taaaataattataaatggaaatggttgaattttaatttattattaaatat

SEQ ID NO: 28694 - DNA, 50 bp, synthetic construct
  source 1..50: mol_type = other DNA
tcgtgccggtcgtcatcgggttggcgccatcctctacacggtcgtcaccg

SEQ ID NO: 28695 - DNA, 50 bp, synthetic construct
  source 1..50: mol_type = other DNA
agccgtttgaccactgatctttttgaaatttcggaagtggcgcatcatgg

SEQ ID NO: 28696 - DNA, 50 bp, synthetic construct
  source 1..50: mol_type = other DNA
atatcacgcatctatccttcaaaacattataccacgaatacacgttctat

SEQ ID NO: 28697 - DNA, 50 bp, synthetic construct
  source 1..50: mol_type = other DNA
gcgaggtaaatcaagggtcattgtattcaagggttattgaagtcataatc

SEQ ID NO: 28698 - DNA, 50 bp, synthetic construct
  source 1..50: mol_type = other DNA
tcgtcaacaacagcctttccgtcaactgacctcaagggtgttattgatat

SEQ ID NO: 28699 - DNA, 50 bp, synthetic construct
  source 1..50: mol_type = other DNA
ctggaggtgttacgcgagccattggagtccggtgaaatcgtgattgcccg

SEQ ID NO: 28700 - DNA, 50 bp, synthetic construct
  source 1..50: mol_type = other DNA
atatgcttccccctattagtgatttttatttgtgatatgcttccccacgc

SEQ ID NO: 28701 - DNA, 50 bp, synthetic construct
  source 1..50: mol_type = other DNA
ctgtcatcccgaccagagtcgctttaacatcctaggatctcgaccaaaca

SEQ ID NO: 28702 - DNA, 50 bp, synthetic construct
  source 1..50: mol_type = other DNA
tctgcgagagcacttgctgcttgccagcaacccgcaagctctacagcgga

SEQ ID NO: 28703 - DNA, 50 bp, synthetic construct
  source 1..50: mol_type = other DNA
ggccgagcggaacgagcccctcatcgatcctctggggaacgagccggact

SEQ ID NO: 28704 - DNA, 50 bp, synthetic construct
  source 1..50: mol_type = other DNA
aacacctgttttagagcgtgtatagaccataatgtcctcaatcgtcggtc

SEQ ID NO: 28705 - DNA, 50 bp, synthetic construct
  source 1..50: mol_type = other DNA
cgtgatgattgaggccttcgagcaccagcaacgcgcgctcgaccaagacg

SEQ ID NO: 28706 - DNA, 50 bp, synthetic construct
  source 1..50: mol_type = other DNA
cagcaggtcgcgcagcatgtcggcgagctaccgggctgctccaccccgcg

SEQ ID NO: 28707 - DNA, 50 bp, synthetic construct
  source 1..50: mol_type = other DNA
accaattaaaacactgattctatttctctagattgctaatttccaatgaa

SEQ ID NO: 28708 - DNA, 50 bp, synthetic construct
  source 1..50: mol_type = other DNA
cggcgcgatggcgccaccggggggccccctatgcacccagtagcccgtac

SEQ ID NO: 28709 - DNA, 50 bp, synthetic construct
  source 1..50: mol_type = other DNA
gcagccctcctgatcggaaagaaggcccgccgaccggcgagctgggcgtc

SEQ ID NO: 28710 - DNA, 50 bp, synthetic construct
  source 1..50: mol_type = other DNA
caatgaccatgtacgccacgctggaagaagctattgatgccgctcgtgaa

SEQ ID NO: 28711 - DNA, 50 bp, synthetic construct
  source 1..50: mol_type = other DNA
aaccatcggcaacactaaagtaaaattacacttcagtgaacaccgacggc

SEQ ID NO: 28712 - DNA, 50 bp, synthetic construct
  source 1..50: mol_type = other DNA
ttcaatgaccattgatttaagtctatagctacaatacaatgacccttgat

SEQ ID NO: 28713 - DNA, 50 bp, synthetic construct
  source 1..50: mol_type = other DNA
ggtcagataagaaaacccccaaggcggcttgggggtttcggtagttgagg

SEQ ID NO: 28714 - DNA, 50 bp, synthetic construct
  source 1..50: mol_type = other DNA
caatttgttgtaatggcacctatttgtatgattatcaggcaaaaaaggtt

SEQ ID NO: 28715 - DNA, 50 bp, synthetic construct
  source 1..50: mol_type = other DNA
taattgaaatatacagtaagaaatgtctttctttcagtttcattcatttc

SEQ ID NO: 28716 - DNA, 50 bp, synthetic construct
  source 1..50: mol_type = other DNA
acaatatatcaaattcatcattatcattaatatatcaaatgatattaatg

SEQ ID NO: 28717 - DNA, 50 bp, synthetic construct
  source 1..50: mol_type = other DNA
gtaagcagaaacgcaagttcagagcacagaaaacttccgtaaagcattac

SEQ ID NO: 28718 - DNA, 50 bp, synthetic construct
  source 1..50: mol_type = other DNA
cgactagttataaacaatcaatgatgacacaaacagtttagcacatacaa

SEQ ID NO: 28719 - DNA, 50 bp, synthetic construct
  source 1..50: mol_type = other DNA
agattgactgcttaaatagaaaggatcctttctgattaagcaatcgatga

SEQ ID NO: 28720 - DNA, 50 bp, synthetic construct
  source 1..50: mol_type = other DNA
tcgatactatagccttcagtactttggaatgatgaacgctttattatatc

SEQ ID NO: 28721 - DNA, 50 bp, synthetic construct
  source 1..50: mol_type = other DNA
tataattaagtggtaaaagtgataaaaaacactaatatgattaaattatt

SEQ ID NO: 28722 - DNA, 50 bp, synthetic construct
  source 1..50: mol_type = other DNA
attataatcgttacttgaaaaaaggtatttcctccttccacattgataat

SEQ ID NO: 28723 - DNA, 50 bp, synthetic construct
  source 1..50: mol_type = other DNA
atgatatgttctaccaccgtgattttccgcctgcttgtatgggtcttcat

SEQ ID NO: 28724 - DNA, 50 bp, synthetic construct
  source 1..50: mol_type = other DNA
tagcttcaatttgttgcttagataattatctccttcaaaaatggagagaa

SEQ ID NO: 28725 - DNA, 50 bp, synthetic construct
  source 1..50: mol_type = other DNA
taagtgttattgaaattgataaagagaatgattcaattcaatcacaatta

SEQ ID NO: 28726 - DNA, 50 bp, synthetic construct
  source 1..50: mol_type = other DNA
gtgttattgaaattgataaagagaattcgtttgattgatttcttcaatta

SEQ ID NO: 28727 - DNA, 50 bp, synthetic construct
  source 1..50: mol_type = other DNA
tgataaaaatgaaacaaatctacaaattaatttatttttttatcttatca

SEQ ID NO: 28728 - DNA, 50 bp, synthetic construct
  source 1..50: mol_type = other DNA
aatagttcatacaaaagactccatttatggagtacacattattaattagg

SEQ ID NO: 28729 - DNA, 50 bp, synthetic construct
  source 1..50: mol_type = other DNA
tattaaatagttgtttgataatatcaaaatatatgaattcatattaaata

SEQ ID NO: 28730 - DNA, 50 bp, synthetic construct
  source 1..50: mol_type = other DNA
caatataagcttcacattgagccatgtgattcatgctgaacattataatg

SEQ ID NO: 28731 - DNA, 50 bp, synthetic construct
  source 1..50: mol_type = other DNA
tttgagttgttgcatgattttttcatttaaaaatgaggaaatcatctggc

SEQ ID NO: 28732 - DNA, 50 bp, synthetic construct
  source 1..50: mol_type = other DNA
tatattatccatatgatgttacaagtatgtttgtttttgaggataatatt

SEQ ID NO: 28733 - DNA, 50 bp, synthetic construct
  source 1..50: mol_type = other DNA
ttcaaatatatttttgaatgtattttcatagtttatcttatataactcaa

SEQ ID NO: 28734 - DNA, 50 bp, synthetic construct
  source 1..50: mol_type = other DNA
catagcctgcaactctacgctttttcaaaaagtccatcttttatcataga

SEQ ID NO: 28735 - DNA, 50 bp, synthetic construct
  source 1..50: mol_type = other DNA
gttaggcacatcttgtttgactccaaccagccaaacaagtcacccataag

SEQ ID NO: 28736 - DNA, 50 bp, synthetic construct
  source 1..50: mol_type = other DNA
ttgacttatcttccctttagagtgatcagaaaaaacgcaagttgatcaaa

SEQ ID NO: 28737 - DNA, 50 bp, synthetic construct
  source 1..50: mol_type = other DNA
ggattaatcttttgacctaaaatatctaatatagatcctcgaattatatt

SEQ ID NO: 28738 - DNA, 50 bp, synthetic construct
  source 1..50: mol_type = other DNA
ttagtaggcgctcctaaatactgtaacgattatttcgccattcttactaa

SEQ ID NO: 28739 - DNA, 50 bp, synthetic construct
  source 1..50: mol_type = other DNA
ttgttcgagatgtaggatagtaaaattttagtatctttcattgaaatgat

SEQ ID NO: 28740 - DNA, 50 bp, synthetic construct
  source 1..50: mol_type = other DNA
caaaaacacaaattgagacggactaaattctgtctagtttagtgtaaccg

SEQ ID NO: 28741 - DNA, 50 bp, synthetic construct
  source 1..50: mol_type = other DNA
tccaaaaagatatttactcgatggaagcatcagcgaagtaaaagtagatg

SEQ ID NO: 28742 - DNA, 50 bp, synthetic construct
  source 1..50: mol_type = other DNA
aaatataaagcaagcctagatatgaacttgtttaaactttatgtatcttt

SEQ ID NO: 28743 - DNA, 50 bp, synthetic construct
  source 1..50: mol_type = other DNA
ctatagaaaaataaatagaaaaaggattttgattattttagtcgtaatta

SEQ ID NO: 28744 - DNA, 50 bp, synthetic construct
  source 1..50: mol_type = other DNA
gtgaagtccgaatttggttgcggggataggatttgaacctatgaccttca

SEQ ID NO: 28745 - DNA, 50 bp, synthetic construct
  source 1..50: mol_type = other DNA
aaagccaacgctaatcaggtaaacgaaggaaactgttttttattggcaaa

SEQ ID NO: 28746 - DNA, 50 bp, synthetic construct
  source 1..50: mol_type = other DNA
ccctgacggcagatacattgaccgatcctcctttccatctgcttcaaggg

SEQ ID NO: 28747 - DNA, 50 bp, synthetic construct
  source 1..50: mol_type = other DNA
ctttgaccgccgctgattctgtgggaaaaaagaactggcggattccaaag

SEQ ID NO: 28748 - DNA, 50 bp, synthetic construct
  source 1..50: mol_type = other DNA
ggccttcttgatggtgtcgcagttctaaaaacagctcgcagttcttgatg

SEQ ID NO: 28749 - DNA, 50 bp, synthetic construct
  source 1..50: mol_type = other DNA
aaagggcgacattttaatgttgtgtagactcgacgtaaatgattatcaat

SEQ ID NO: 28750 - DNA, 50 bp, synthetic construct
  source 1..50: mol_type = other DNA
agcgcggacctcgaaaaagttatgattcagcgcgaatcgggctatccgct

SEQ ID NO: 28751 - DNA, 50 bp, synthetic construct
  source 1..50: mol_type = other DNA
gagcgtaacgtcaaccgcgtgatcctcgacagccggccggtccatagcgc

SEQ ID NO: 28752 - DNA, 50 bp, synthetic construct
  source 1..50: mol_type = other DNA
ggcgtttatcccgcccagccgggacctcgggggaggccggcgtatagcag

SEQ ID NO: 28753 - DNA, 50 bp, synthetic construct
  source 1..50: mol_type = other DNA
aagtccgtgtaggcacgtgttcgcagacttgatgtgctgctggtggtaag

SEQ ID NO: 28754 - DNA, 50 bp, synthetic construct
  source 1..50: mol_type = other DNA
tataaaaaagctgaacgcgaaacattataatgccaacttagtataaaaaa

SEQ ID NO: 28755 - DNA, 50 bp, synthetic construct
  source 1..50: mol_type = other DNA
actgaaatgattatgacttcaatgacccttgatttacctcgccgcttccc

SEQ ID NO: 28756 - DNA, 50 bp, synthetic construct
  source 1..50: mol_type = other DNA
cggcggtggtacgactgactgttcgttcattgctgctgatggggccgcag

SEQ ID NO: 28757 - DNA, 50 bp, synthetic construct
  source 1..50: mol_type = other DNA
tgtaaaatggcaaaagttctggtgctagtgctttattattccatgtacgg

SEQ ID NO: 28758 - DNA, 50 bp, synthetic construct
  source 1..50: mol_type = other DNA
gctcgattgcaaggtaaccgcccgatcggccggttacattgcaagcatcc

SEQ ID NO: 28759 - DNA, 50 bp, synthetic construct
  source 1..50: mol_type = other DNA
cgtgtgggattcgtttcccttggctgcccgaaagcgctggtcgactcgga

SEQ ID NO: 28760 - DNA, 50 bp, synthetic construct
  source 1..50: mol_type = other DNA
tttctaacagactcacaacttcaacactccacgtgatgcgtatttgggaa

SEQ ID NO: 28761 - DNA, 50 bp, synthetic construct
  source 1..50: mol_type = other DNA
cactacgcactcaacttgttcatcataatgctaccgtctccacgtgatgc

SEQ ID NO: 28762 - DNA, 50 bp, synthetic construct
  source 1..50: mol_type = other DNA
tgaaggccgcaggttcaaatcctgcccccgcaaccaaattctccaatagc

SEQ ID NO: 28763 - DNA, 50 bp, synthetic construct
  source 1..50: mol_type = other DNA
ctggtacaggtagtactttgaagaaagcagcagcggactttatgcaacag

SEQ ID NO: 28764 - DNA, 50 bp, synthetic construct
  source 1..50: mol_type = other DNA
tcttttcgtgatttaggtgtgagtggattcacactaaacttcttcaaagt

SEQ ID NO: 28765 - DNA, 50 bp, synthetic construct
  source 1..50: mol_type = other DNA
caatgcggaaaccgtggttttaagttgctaaaaccgtggtcattggtcag

SEQ ID NO: 28766 - DNA, 50 bp, synthetic construct
  source 1..50: mol_type = other DNA
cttgacattagtctttgaaaatgctacaatgccgaatagctacaatacaa

SEQ ID NO: 28767 - DNA, 50 bp, synthetic construct
  source 1..50: mol_type = other DNA
gttggcgtgcacggtcgtgcacgcgcgcgtgcacggtggtgcagccgccg

SEQ ID NO: 28768 - DNA, 50 bp, synthetic construct
  source 1..50: mol_type = other DNA
cgtggaatcccttgctttgacgcttgattgtaacactttgcgataacggg

SEQ ID NO: 28769 - DNA, 50 bp, synthetic construct
  source 1..50: mol_type = other DNA
atgagtgtactatggcggttgtactgattcacttccccatatccaaacat

SEQ ID NO: 28770 - DNA, 50 bp, synthetic construct
  source 1..50: mol_type = other DNA
taatatcatattagttactttactttcatacaggcgataacatcatattc

SEQ ID NO: 28771 - DNA, 50 bp, synthetic construct
  source 1..50: mol_type = other DNA
tccctacaagtgcactctagaaagagttcgaaagggagcactgaaagcct

SEQ ID NO: 28772 - DNA, 50 bp, synthetic construct
  source 1..50: mol_type = other DNA
ctttttttgatttcctacgaatagatagataagtaggaggaataaaaatg

SEQ ID NO: 28773 - DNA, 50 bp, synthetic construct
  source 1..50: mol_type = other DNA
gtgttgatatcgactgcttcatctcgagctaaaacagttaaggggtacag

SEQ ID NO: 28774 - DNA, 50 bp, synthetic construct
  source 1..50: mol_type = other DNA
cccttgggtgcccaaaggtggccaaatggtgtcgcttgggtgccccaagg

SEQ ID NO: 28775 - DNA, 50 bp, synthetic construct
  source 1..50: mol_type = other DNA
ctattttttaacagatagcacaaaatttaaacgtgtctaataaaaatcac

SEQ ID NO: 28776 - DNA, 50 bp, synthetic construct
  source 1..50: mol_type = other DNA
tatgaatgtatgttagatgcaggagcaggagctaattttgcaagttctcc

SEQ ID NO: 28777 - DNA, 50 bp, synthetic construct
  source 1..50: mol_type = other DNA
accctctatggcatcaagaactgcgacaccatcaagaaagcccgcaagtg

SEQ ID NO: 28778 - DNA, 50 bp, synthetic construct
  source 1..50: mol_type = other DNA
ccccgaggtgaagcctggctggcatatgaacaagcaacactggaacacag

SEQ ID NO: 28779 - DNA, 50 bp, synthetic construct
  source 1..50: mol_type = other DNA
cagtagacttattcccaatgacacatgtggagtgcgtagcgttgctacaa

SEQ ID NO: 28780 - DNA, 50 bp, synthetic construct
  source 1..50: mol_type = other DNA
cctttcgcgctcacttaatgacaccaagttcacaaaaaatctcatcattt

SEQ ID NO: 28781 - DNA, 50 bp, synthetic construct
  source 1..50: mol_type = other DNA
ttagctcagctgactgagcggtttataaaccgctcaattgggagagcgct

SEQ ID NO: 28782 - DNA, 50 bp, synthetic construct
  source 1..50: mol_type = other DNA
aggtatcgtgtaccttctcgtctaccgtcataacttgaaccaaaatattg

SEQ ID NO: 28783 - DNA, 50 bp, synthetic construct
  source 1..50: mol_type = other DNA
gagttatgatggaagaagaagaaacgttatctctcgttggacgtaaagag

SEQ ID NO: 28784 - DNA, 50 bp, synthetic construct
  source 1..50: mol_type = other DNA
aatttttttggttcaagctacgatggacggaaagagggaaccaagcacct

SEQ ID NO: 28785 - DNA, 50 bp, synthetic construct
  source 1..50: mol_type = other DNA
ctccttacgaccagcgagaggaaacgattcgtctccgtccatcatagcta

SEQ ID NO: 28786 - DNA, 50 bp, synthetic construct
  source 1..50: mol_type = other DNA
cttctcgtctaccgtcataaaaacatacagctatctaccgtcataacttg

SEQ ID NO: 28787 - DNA, 50 bp, synthetic construct
  source 1..50: mol_type = other DNA
gcggccatgaatgtgtgggctacaccagttgcacaggcagttactgcgat

SEQ ID NO: 28788 - DNA, 50 bp, synthetic construct
  source 1..50: mol_type = other DNA
tatgtaaatcgcgtgcaatcaacctatctttaaaatgagtctgggacata

SEQ ID NO: 28789 - DNA, 50 bp, synthetic construct
  source 1..50: mol_type = other DNA
aactttttcggatcaagctatgagggtcgtaaggagggcaccaaacattt

SEQ ID NO: 28790 - DNA, 50 bp, synthetic construct
  source 1..50: mol_type = other DNA
ctctttccgtccagagagagaaatcgtttattctccgtccatcgtagctt

SEQ ID NO: 28791 - DNA, 50 bp, synthetic construct
  source 1..50: mol_type = other DNA
gagttttctaatgggggatgctcatatgagacactacctaataatgactt

SEQ ID NO: 28792 - DNA, 50 bp, synthetic construct
  source 1..50: mol_type = other DNA
aataaccagaactgtacttatcatatatgataagtaaagagaactgtatt

SEQ ID NO: 28793 - DNA, 50 bp, synthetic construct
  source 1..50: mol_type = other DNA
agacggatgggttataaatacagcagcggctactccaacttggaaaaagg

SEQ ID NO: 28794 - DNA, 50 bp, synthetic construct
  source 1..50: mol_type = other DNA
aagccgaatttaggtagtgtctcatatgagaaacgaccattggagggagt

SEQ ID NO: 28795 - DNA, 50 bp, synthetic construct
  source 1..50: mol_type = other DNA
aactttttcggatcgagttatgatggacgtaaagagggaacaaagcatct

SEQ ID NO: 28796 - DNA, 50 bp, synthetic construct
  source 1..50: mol_type = other DNA
caatattttggctcaagttatgacggtagacgagaaggtacacgatacct

SEQ ID NO: 28797 - DNA, 50 bp, synthetic construct
  source 1..50: mol_type = other DNA
atacgcaacttcatttaaagggataaatcactaattaataaaatttatat

SEQ ID NO: 28798 - DNA, 50 bp, synthetic construct
  source 1..50: mol_type = other DNA
cctttttccaagttggagtagccgctgctgtatttataacccatccgtct

SEQ ID NO: 28799 - DNA, 50 bp, synthetic construct
  source 1..50: mol_type = other DNA
caagttatgacggtagatagctgtatgtttttatgacggtagacgagaag

SEQ ID NO: 28800 - DNA, 50 bp, synthetic construct
  source 1..50: mol_type = other DNA
atcgcagtaactgcctgtgcaacaggtgtagcccacacattcatggccgc

SEQ ID NO: 28801 - DNA, 50 bp, synthetic construct
  source 1..50: mol_type = other DNA
gccaaaagaagagagatgccagccttcgctggcatgacgaacggtggtgg

SEQ ID NO: 28802 - DNA, 50 bp, synthetic construct
  source 1..50: mol_type = other DNA
ccagaaggaagtgggatgccagccttcgctggcatgacggagtataggaa

SEQ ID NO: 28803 - DNA, 50 bp, synthetic construct
  source 1..50: mol_type = other DNA
atgttcccaaatacgccacatatagactgtagttaaacttattagagaat

SEQ ID NO: 28804 - DNA, 50 bp, synthetic construct
  source 1..50: mol_type = other DNA
atcctgaagagacctttctattgatatcataagaaaggtataatcctcga

SEQ ID NO: 28805 - DNA, 50 bp, synthetic construct
  source 1..50: mol_type = other DNA
tttttttaagccattttagcttgtaatcaagctgagagggtcattaagac

SEQ ID NO: 28806 - DNA, 50 bp, synthetic construct
  source 1..50: mol_type = other DNA
ttgtgatacgcttctgcttatcggtatgatacgcttcccctcgcatgatt

SEQ ID NO: 28807 - DNA, 50 bp, synthetic construct
  source 1..50: mol_type = other DNA
gcaacggtttgcacgatggcgtgggtatacggctccgttcagggcgtcgg

SEQ ID NO: 28808 - DNA, 50 bp, synthetic construct
  source 1..50: mol_type = other DNA
gtctgccctcgcagaaatgtgccgcgggtaatagttctttcatatacccg

SEQ ID NO: 28809 - DNA, 50 bp, synthetic construct
  source 1..50: mol_type = other DNA
ccaaacgggtcatctggtgctaattagtcctctctactctgcacaccaat

SEQ ID NO: 28810 - DNA, 50 bp, synthetic construct
  source 1..50: mol_type = other DNA
agccatccgggtaacccgaagagaaatacttttgggaatccgaaattccc

SEQ ID NO: 28811 - DNA, 50 bp, synthetic construct
  source 1..50: mol_type = other DNA
cacttctccagccacattttcagggctttgaaaaagttcttgatgagcgt

SEQ ID NO: 28812 - DNA, 50 bp, synthetic construct
  source 1..50: mol_type = other DNA
aactttttcggttcaagctatgagggacgcaaagagggaactaaacactt

SEQ ID NO: 28813 - DNA, 50 bp, synthetic construct
  source 1..50: mol_type = other DNA
cagcttcaatatgtggtgacatgacactgtctccacatgtgtcgtcattg

SEQ ID NO: 28814 - DNA, 50 bp, synthetic construct
  source 1..50: mol_type = other DNA
tcgaggattacacctttcttatgatatcaatagaaaggtctcttcaggat

SEQ ID NO: 28815 - DNA, 50 bp, synthetic construct
  source 1..50: mol_type = other DNA
ggaggtataaataatcatacttccttgccagtactgttattcctgccatc

SEQ ID NO: 28816 - DNA, 50 bp, synthetic construct
  source 1..50: mol_type = other DNA
aattttttcggttctagctatgatggtcgtaaggagggaacaaagcatct

SEQ ID NO: 28817 - DNA, 50 bp, synthetic construct
  source 1..50: mol_type = other DNA
cattaccagaaggataatatagattaacttatatattccggaaggatgat

SEQ ID NO: 28818 - DNA, 50 bp, synthetic construct
  source 1..50: mol_type = other DNA
catctatttcatatttgggattcccttggatttccgggatggcttattat

SEQ ID NO: 28819 - DNA, 50 bp, synthetic construct
  source 1..50: mol_type = other DNA
atacgttctgagtctaccaggtttttgattcttcgggcagcccagggaga

SEQ ID NO: 28820 - DNA, 50 bp, synthetic construct
  source 1..50: mol_type = other DNA
taaagtaaactacacctcattaatatcttgatagggtctatattacttta

SEQ ID NO: 28821 - DNA, 50 bp, synthetic construct
  source 1..50: mol_type = other DNA
gattatgcgtggagaagcatatcatatctgatacgcagaggcgtatcata

SEQ ID NO: 28822 - DNA, 50 bp, synthetic construct
  source 1..50: mol_type = other DNA
ggagaagcatatcataagtgatgcggaggcgtatcataagtaaaactaaa

SEQ ID NO: 28823 - DNA, 50 bp, synthetic construct
  source 1..50: mol_type = other DNA
aaagggcggcattttaatgttgtgtagactcgacgtaaatgattatcaat

SEQ ID NO: 28824 - DNA, 50 bp, synthetic construct
  source 1..50: mol_type = other DNA
gagcgcaacgttaaccgcgtgatcctcgatagccgcccggtccacagcgc

SEQ ID NO: 28825 - DNA, 50 bp, synthetic construct
  source 1..50: mol_type = other DNA
aatcgcgtcatgcttaagttacccgctggacagccgcccggttcacgcct

SEQ ID NO: 28826 - DNA, 50 bp, synthetic construct
  source 1..50: mol_type = other DNA
actgggcgcgtgatcaagggctgggacctgggcttgatgggcatgcaggt

SEQ ID NO: 28827 - DNA, 50 bp, synthetic construct
  source 1..50: mol_type = other DNA
ccggtgccgggcgggccgcttaacagcaggttatgcgcccccgccgccgc

SEQ ID NO: 28828 - DNA, 50 bp, synthetic construct
  source 1..50: mol_type = other DNA
gcaaacagctcacatcgagtgtatagtcaacgcacgtggaaaccgtagta

SEQ ID NO: 28829 - DNA, 50 bp, synthetic construct
  source 1..50: mol_type = other DNA
gagcgtaacgtcaaccgcgtgatcctcgacagccgcccggtccatagcgc

SEQ ID NO: 28830 - DNA, 50 bp, synthetic construct
  source 1..50: mol_type = other DNA
tcggaggtcgattatatatatttaattacaaaaacgaactcccactcctg

SEQ ID NO: 28831 - DNA, 50 bp, synthetic construct
  source 1..50: mol_type = other DNA
tattcatggcatgccgtcctttcgtatggtatgcgtcctttcgtttttta

SEQ ID NO: 28832 - DNA, 50 bp, synthetic construct
  source 1..50: mol_type = other DNA
atgggaaataaccaaaagagccgtctcagtccaatggatgtcttgcatac

SEQ ID NO: 28833 - DNA, 50 bp, synthetic construct
  source 1..50: mol_type = other DNA
tagccaggcgaattggcaacccgaattaggaaaacctaaacaggagatta

SEQ ID NO: 28834 - DNA, 50 bp, synthetic construct
  source 1..50: mol_type = other DNA
gtagatccgaggcattatggaagttagctatacgatagcagacgttatgc

SEQ ID NO: 28835 - DNA, 50 bp, synthetic construct
  source 1..50: mol_type = other DNA
tatttcatatttgggattccctaatacgttcgggtttccgggatggctta

SEQ ID NO: 28836 - DNA, 50 bp, synthetic construct
  source 1..50: mol_type = other DNA
gcgttaatcaggtgatttttattagatgattttagacagccgcccggttc

SEQ ID NO: 28837 - DNA, 50 bp, synthetic construct
  source 1..50: mol_type = other DNA
caggtgatttttattagacacgtttagaccttgatgattttagacagccg

SEQ ID NO: 28838 - DNA, 50 bp, synthetic construct
  source 1..50: mol_type = other DNA
gattccctgcatgaatttctgcacatgtgtagaaattcgtttaggattac

SEQ ID NO: 28839 - DNA, 50 bp, synthetic construct
  source 1..50: mol_type = other DNA
tggcgcgacaaacaactgcccgacggcgcggtgatctggacctctccgtc

SEQ ID NO: 28840 - DNA, 50 bp, synthetic construct
  source 1..50: mol_type = other DNA
attggcggcggtaccaccgactgttccatgctgctgatggggccgcagtg

SEQ ID NO: 28841 - DNA, 50 bp, synthetic construct
  source 1..50: mol_type = other DNA
gtcgttcgttgttgagccggttttcaaatgctgtaagaacactcgccatg

SEQ ID NO: 28842 - DNA, 50 bp, synthetic construct
  source 1..50: mol_type = other DNA
tctatgtcttaaatagtactttgaagtaaaggtattctttgagaaataca

SEQ ID NO: 28843 - DNA, 50 bp, synthetic construct
  source 1..50: mol_type = other DNA
ataaagaacttccaaaacttccgatatcttgggtttttgaagataatatg

SEQ ID NO: 28844 - DNA, 50 bp, synthetic construct
  source 1..50: mol_type = other DNA
gtgttaagtttgaatcttccttgtccacaatgccgagtcaaacctccgat

SEQ ID NO: 28845 - DNA, 50 bp, synthetic construct
  source 1..50: mol_type = other DNA
cgattggtctgctgcaggtgccagatcttgtgggtgatgagaatggtctt

SEQ ID NO: 28846 - DNA, 50 bp, synthetic construct
  source 1..50: mol_type = other DNA
catgaccatgccgctggcctgcatgcatgtaggcataacagatggtcggg

SEQ ID NO: 28847 - DNA, 50 bp, synthetic construct
  source 1..50: mol_type = other DNA
atacatcgtcggtataatagacggcgccgttcctcggtccaaggagtgcc

SEQ ID NO: 28848 - DNA, 50 bp, synthetic construct
  source 1..50: mol_type = other DNA
aattcccctattgctgaaactctccggcagttttcgctcgattttctcta

SEQ ID NO: 28849 - DNA, 50 bp, synthetic construct
  source 1..50: mol_type = other DNA
ggtatcaggttccaataattgatagctataaacgtggcccgtcttattca

SEQ ID NO: 28850 - DNA, 50 bp, synthetic construct
  source 1..50: mol_type = other DNA
accgtcagtgttcactgaagtgtaattttactttagtgttgccgatggtg

SEQ ID NO: 28851 - DNA, 50 bp, synthetic construct
  source 1..50: mol_type = other DNA
actaaagtggcgggatacatgggacgtctcaaagtggcggagagataggg

SEQ ID NO: 28852 - DNA, 50 bp, synthetic construct
  source 1..50: mol_type = other DNA
gtacgcgcaggtattccataccgttggtagaaggcaacaccaccttttat

SEQ ID NO: 28853 - DNA, 50 bp, synthetic construct
  source 1..50: mol_type = other DNA
tgctcaagaatatctaagcaactttgcgagagcaactttcttttgcatca

SEQ ID NO: 28854 - DNA, 50 bp, synthetic construct
  source 1..50: mol_type = other DNA
aatgcggcacatttatttatattatacaagccaaaagaaaaggcgacaaa

SEQ ID NO: 28855 - DNA, 50 bp, synthetic construct
  source 1..50: mol_type = other DNA
gcgcttgagcgccagttcgagcatgccgcctcgacgtgctgttcaacaac

SEQ ID NO: 28856 - DNA, 50 bp, synthetic construct
  source 1..50: mol_type = other DNA
aatatacccatattacactaaatgcgtattcttaccaataccggaaatat

SEQ ID NO: 28857 - DNA, 50 bp, synthetic construct
  source 1..50: mol_type = other DNA
tgaacctcgccaatcatgattttctttcaagccattcctcgaactgcgag

SEQ ID NO: 28858 - DNA, 50 bp, synthetic construct
  source 1..50: mol_type = other DNA
tagtcaccccggaaatcccaagtgtgatattagggaatccaaagtatcca

SEQ ID NO: 28859 - DNA, 50 bp, synthetic construct
  source 1..50: mol_type = other DNA
ccagtgccgggcgggccgctgagcagcaggttatgcgcgcccgccgctgc

SEQ ID NO: 28860 - DNA, 50 bp, synthetic construct
  source 1..50: mol_type = other DNA
atcaaaggtcattgtattgtagctatagacttcattcaagggtcattgaa

SEQ ID NO: 28861 - DNA, 50 bp, synthetic construct
  source 1..50: mol_type = other DNA
ttgagccgccacgccaagggcgtgtactgatccttatcgtagccgggcac

SEQ ID NO: 28862 - DNA, 50 bp, synthetic construct
  source 1..50: mol_type = other DNA
aaagcaatgccccgctggcatcctgaggggggagcccttggcagtgagga

SEQ ID NO: 28863 - DNA, 50 bp, synthetic construct
  source 1..50: mol_type = other DNA
cgggtgtgcagggcaatcgccacctgattggtcatgctgcccgacggcat

SEQ ID NO: 28864 - DNA, 50 bp, synthetic construct
  source 1..50: mol_type = other DNA
gtgagcatcacgagggacttctcgggctggaagccgaggaggaccggaac

SEQ ID NO: 28865 - DNA, 50 bp, synthetic construct
  source 1..50: mol_type = other DNA
gcgtggctgctgaactccggggtctcgtccaggaacaggacgccccggtg

SEQ ID NO: 28866 - DNA, 50 bp, synthetic construct
  source 1..50: mol_type = other DNA
aaccaggtgaagttcatccacgcccaccagatggcgaagaagaccatcgc

SEQ ID NO: 28867 - DNA, 50 bp, synthetic construct
  source 1..50: mol_type = other DNA
aaccttttttgcatgataatcatacaaataagtgccgttacagcaaattg

SEQ ID NO: 28868 - DNA, 50 bp, synthetic construct
  source 1..50: mol_type = other DNA
gataaaggatgcgaagcacttgtgaatgtggtacaggcccaggtggatct

SEQ ID NO: 28869 - DNA, 50 bp, synthetic construct
  source 1..50: mol_type = other DNA
accctctatggcatcaagaactgcgacaccatcaaaaaagcccgcaagtg

SEQ ID NO: 28870 - DNA, 50 bp, synthetic construct
  source 1..50: mol_type = other DNA
cgggtgatttttattagatacgtttagaccttgatgattttagacagccg

SEQ ID NO: 28871 - DNA, 50 bp, synthetic construct
  source 1..50: mol_type = other DNA
gctgcatgaaccgggcggccgtctaaaatcacccgattaacgccgcgctg

SEQ ID NO: 28872 - DNA, 50 bp, synthetic construct
  source 1..50: mol_type = other DNA
cgggcgatgatgatttcaccggactccagcggctcgcgcagcacctccag

SEQ ID NO: 28873 - DNA, 50 bp, synthetic construct
  source 1..50: mol_type = other DNA
atgcgtggagaggcttatcataaatatcattgataaggggaggcgtatca

SEQ ID NO: 28874 - DNA, 50 bp, synthetic construct
  source 1..50: mol_type = other DNA
gttcgattcccctacgggctacagaagcttagcccgcactctaccaaagc

SEQ ID NO: 28875 - DNA, 50 bp, synthetic construct
  source 1..50: mol_type = other DNA
atttgctgatggtaatggatttccatggatttcagtgtggcatttggtat

SEQ ID NO: 28876 - DNA, 50 bp, synthetic construct
  source 1..50: mol_type = other DNA
atcaaaggtcattgtattgtagctatagacttcattcaaaggtcattgaa

SEQ ID NO: 28877 - DNA, 50 bp, synthetic construct
  source 1..50: mol_type = other DNA
tggtggttggaggcgactaccaacgcgttggtggttggaggcgggatcga

SEQ ID NO: 28878 - DNA, 50 bp, synthetic construct
  source 1..50: mol_type = other DNA
agccgttgttcatccagatcaggttggaaggatcattttttttcacggct

SEQ ID NO: 28879 - DNA, 50 bp, synthetic construct
  source 1..50: mol_type = other DNA
tacgtggggcgctggaagccggagtactacgagttcaagaacctgcagat

SEQ ID NO: 28880 - DNA, 50 bp, synthetic construct
  source 1..50: mol_type = other DNA
gtcgatcactgtaactgtgagcaattacgtgaacttaaagcaagccaaac

SEQ ID NO: 28881 - DNA, 50 bp, synthetic construct
  source 1..50: mol_type = other DNA
tatttttttaaaagtgacaacatttcaatatgataagtttgaggaaacat

SEQ ID NO: 28882 - DNA, 50 bp, synthetic construct
  source 1..50: mol_type = other DNA
gcttacactgtatatccaaccagtatacctgtatcaagcaattccgaagc

SEQ ID NO: 28883 - DNA, 50 bp, synthetic construct
  source 1..50: mol_type = other DNA
ccctgccaaccgctgaacaagcacgcgtatttatccagtcgcttgctgca

SEQ ID NO: 28884 - DNA, 50 bp, synthetic construct
  source 1..50: mol_type = other DNA
gaccatccagattgcaggaaaacaggtattttccacagctttggatggtg

SEQ ID NO: 28885 - DNA, 50 bp, synthetic construct
  source 1..50: mol_type = other DNA
atgtcgtcataatatttatagcgcatataaaatacaatgacttacgaatg

SEQ ID NO: 28886 - DNA, 50 bp, synthetic construct
  source 1..50: mol_type = other DNA
ttcattttgatacaagactggcttggcgcttcgttccgtaacaccatcag

SEQ ID NO: 28887 - DNA, 50 bp, synthetic construct
  source 1..50: mol_type = other DNA
ccagacggggttgtgacattcccaaagcggacaccgtcgttgtagtcgac

SEQ ID NO: 28888 - DNA, 50 bp, synthetic construct
  source 1..50: mol_type = other DNA
ccaatagttttaaaactgatatctctctatatcagttttacaactatagc

SEQ ID NO: 28889 - DNA, 50 bp, synthetic construct
  source 1..50: mol_type = other DNA
cggctgtctaagattagcaaggtctaaacgtgtctaataaaaatcacccg

SEQ ID NO: 28890 - DNA, 50 bp, synthetic construct
  source 1..50: mol_type = other DNA
gcataacgtctgctatcttagagctatgttcctggaaccctcggatctac

SEQ ID NO: 28891 - DNA, 50 bp, synthetic construct
  source 1..50: mol_type = other DNA
gtgcatataataagccatcccggaaatcccaaatatgaaatagatgttaa

SEQ ID NO: 28892 - DNA, 50 bp, synthetic construct
  source 1..50: mol_type = other DNA
tttttgtactatacattgctcagaatataatgaaatcgatctataaaaac

SEQ ID NO: 28893 - DNA, 50 bp, synthetic construct
  source 1..50: mol_type = other DNA
gcgttaatcgggtgatttttattagatgattttagacagccgctcggttc

SEQ ID NO: 28894 - DNA, 50 bp, synthetic construct
  source 1..50: mol_type = other DNA
cgcggaagttcttattgttgagatttagcggaagttcttaaattggaaag

SEQ ID NO: 28895 - DNA, 50 bp, synthetic construct
  source 1..50: mol_type = other DNA
gataattaggtatggaggttttgaaatgaatgtccgtttacacaactata

SEQ ID NO: 28896 - DNA, 50 bp, synthetic construct
  source 1..50: mol_type = other DNA
taatggttaatcgaattaattgcatggcaacctggctgcgaattacatta

SEQ ID NO: 28897 - DNA, 50 bp, synthetic construct
  source 1..50: mol_type = other DNA
tacaacgttactacaaattaaaatatggaaatattaatatgaagtcatta

SEQ ID NO: 28898 - DNA, 50 bp, synthetic construct
  source 1..50: mol_type = other DNA
tttaaaatagatttttatattatttaagttttaatatcatataagttaat

SEQ ID NO: 28899 - DNA, 50 bp, synthetic construct
  source 1..50: mol_type = other DNA
taatacaagctttaatagatagatttgtttttgacttaaaatttgtctta

SEQ ID NO: 28900 - DNA, 50 bp, synthetic construct
  source 1..50: mol_type = other DNA
gagacattatggaagttatacacactatacgatagcagacattatgcttt

SEQ ID NO: 28901 - DNA, 50 bp, synthetic construct
  source 1..50: mol_type = other DNA
agacaaatttatcacatgaaaagtaaacagcgcagaaaataaatttttat

SEQ ID NO: 28902 - DNA, 50 bp, synthetic construct
  source 1..50: mol_type = other DNA
gttcgagtccccttagctccaccattccaccatcgcgacacgaggcgaga

SEQ ID NO: 28903 - DNA, 50 bp, synthetic construct
  source 1..50: mol_type = other DNA
atgttgctgtccagcgtgacagcgacggctcatttgtggtacaccaatta

SEQ ID NO: 28904 - DNA, 50 bp, synthetic construct
  source 1..50: mol_type = other DNA
cacttgcgggctttcttgatggtgtcacagttcttgatgccatagagggt

SEQ ID NO: 28905 - DNA, 50 bp, synthetic construct
  source 1..50: mol_type = other DNA
gtagtctttttgagtcttttttacatgtttcaagggaaacaaagcactat

SEQ ID NO: 28906 - DNA, 50 bp, synthetic construct
  source 1..50: mol_type = other DNA
ttcttcaaatataacttagttatattgcaaagaattatctaaacgaagaa

SEQ ID NO: 28907 - DNA, 50 bp, synthetic construct
  source 1..50: mol_type = other DNA
tgccgactttataagggcatttccatataattgcttttataggatcatca

SEQ ID NO: 28908 - DNA, 50 bp, synthetic construct
  source 1..50: mol_type = other DNA
gggcgggatatagtcaaagctctcatgaacgaattgacttacacccgctg

SEQ ID NO: 28909 - DNA, 50 bp, synthetic construct
  source 1..50: mol_type = other DNA
aaatagggcgtttcttcacattttatacgtccctctgaaatctgcgattt

SEQ ID NO: 28910 - DNA, 50 bp, synthetic construct
  source 1..50: mol_type = other DNA
cagaacgataccggcccggaactgtttgctcccactgtggtacaattcgg

SEQ ID NO: 28911 - DNA, 50 bp, synthetic construct
  source 1..50: mol_type = other DNA
ccgaccaaatcgactgggaacgcttcggagtatgtggcatcgctgaacga

SEQ ID NO: 28912 - DNA, 50 bp, synthetic construct
  source 1..50: mol_type = other DNA
caaattgatctcgagaggatactcctgaaaacattcttatgctgttttat

SEQ ID NO: 28913 - DNA, 50 bp, synthetic construct
  source 1..50: mol_type = other DNA
gccggccgaaggcggacttcacctgctggtagagtacatcttccgacaat

SEQ ID NO: 28914 - DNA, 50 bp, synthetic construct
  source 1..50: mol_type = other DNA
gcactccgtagccaaagcggtcaacttccagcggtttgcacccgaacact

SEQ ID NO: 28915 - DNA, 50 bp, synthetic construct
  source 1..50: mol_type = other DNA
tgcgtcgtgatgatactgtcgggggtaatccggctgcacatcggccggca

SEQ ID NO: 28916 - DNA, 50 bp, synthetic construct
  source 1..50: mol_type = other DNA
ggagtgggttcaggctgtggttcagtcatcgcacaggatgaagctacggt

SEQ ID NO: 28917 - DNA, 50 bp, synthetic construct
  source 1..50: mol_type = other DNA
cgcctccgtcctggaggggatggatatagtataatttatgttaggaggcg

SEQ ID NO: 28918 - DNA, 50 bp, synthetic construct
  source 1..50: mol_type = other DNA
tttaattgaaatggcgttctctaaatttaggacatgacattgaaatggca

SEQ ID NO: 28919 - DNA, 50 bp, synthetic construct
  source 1..50: mol_type = other DNA
acatgatcttcacccaagatgcggtgccgttttcttcacccagccggtgt

SEQ ID NO: 28920 - DNA, 50 bp, synthetic construct
  source 1..50: mol_type = other DNA
gccgatgaacgcaatgaccagccttagaagacatcattgcggtgctgggc

SEQ ID NO: 28921 - DNA, 50 bp, synthetic construct
  source 1..50: mol_type = other DNA
gtggaccgggcggctatcgaggaatatttaaggatcacgcggttaacgtt

SEQ ID NO: 28922 - DNA, 50 bp, synthetic construct
  source 1..50: mol_type = other DNA
cctccgggcttttctttttaccgaaattactaaaaagaaatcgccttttt

SEQ ID NO: 28923 - DNA, 50 bp, synthetic construct
  source 1..50: mol_type = other DNA
tttcagtgatccgcttggggctttcatttctcctaagtgatccagctggg

SEQ ID NO: 28924 - DNA, 50 bp, synthetic construct
  source 1..50: mol_type = other DNA
aactatattagtaggtgctcctaaattcatgcacaactatattagtaggt

SEQ ID NO: 28925 - DNA, 50 bp, synthetic construct
  source 1..50: mol_type = other DNA
gcagcgcaaaccgggcaccttgttctctcaacgctgcacaccaattcaac

SEQ ID NO: 28926 - DNA, 50 bp, synthetic construct
  source 1..50: mol_type = other DNA
gcgcctgctccggccaccagggatacctcgctggatgcgacattggcaat

SEQ ID NO: 28927 - DNA, 50 bp, synthetic construct
  source 1..50: mol_type = other DNA
ggcaagaatactcacttaactaaatattttattatactctgccaaagcta

SEQ ID NO: 28928 - DNA, 50 bp, synthetic construct
  source 1..50: mol_type = other DNA
agtcctgccaggcgcaccaaaccaattgccttgctgcaccatttcacaat

SEQ ID NO: 28929 - DNA, 50 bp, synthetic construct
  source 1..50: mol_type = other DNA
tcgcaggttcgagtcctgccgaggtcaccattttgaaatcaacaccgcaa

SEQ ID NO: 28930 - DNA, 50 bp, synthetic construct
  source 1..50: mol_type = other DNA
gcttttacgagcagagccacacactccacatgatgtgtcattgggaataa

SEQ ID NO: 28931 - DNA, 50 bp, synthetic construct
  source 1..50: mol_type = other DNA
gaaagtttacatgcaaagggaacaattttataccaaggtggcggagagag

SEQ ID NO: 28932 - DNA, 50 bp, synthetic construct
  source 1..50: mol_type = other DNA
catgtcattaatatcagtacagataaagctgtatctcctgtgaatacaat

SEQ ID NO: 28933 - DNA, 50 bp, synthetic construct
  source 1..50: mol_type = other DNA
gccgataccgtggtaatgtgatacaatattactatgaccgtggtcatcgg

SEQ ID NO: 28934 - DNA, 50 bp, synthetic construct
  source 1..50: mol_type = other DNA
cttgggattgaaccatttttataaaattatatttataaaagccgaacacc

SEQ ID NO: 28935 - DNA, 50 bp, synthetic construct
  source 1..50: mol_type = other DNA
tcgatcaacgcatggttgctgggcaagattgatgactacaaattcagcgt

SEQ ID NO: 28936 - DNA, 50 bp, synthetic construct
  source 1..50: mol_type = other DNA
accctcattgagctaatggtcatcatcatggtcgtgatcgccatcatcgc

SEQ ID NO: 28937 - DNA, 50 bp, synthetic construct
  source 1..50: mol_type = other DNA
tctgagtctaccaggtttttcgggcagcccagggagacgaagccgatttt

SEQ ID NO: 28938 - DNA, 50 bp, synthetic construct
  source 1..50: mol_type = other DNA
gttgtaatggcacctatttgagtgcacatttgtatgattatcaggcaaaa

SEQ ID NO: 28939 - DNA, 50 bp, synthetic construct
  source 1..50: mol_type = other DNA
gcacctatttgtataggttgcacttttgatcaactcatttgtatgattat

SEQ ID NO: 28940 - DNA, 50 bp, synthetic construct
  source 1..50: mol_type = other DNA
ggctggaaaccacaacctactgctttatacctaagattccttttccttgg

SEQ ID NO: 28941 - DNA, 50 bp, synthetic construct
  source 1..50: mol_type = other DNA
cctgtaccaggaggaccaaggaaaagtaggttgtggtttccagccgccgc

SEQ ID NO: 28942 - DNA, 50 bp, synthetic construct
  source 1..50: mol_type = other DNA
ctaaatgtggcggagagagtgggacgtcactatatggcggagagataggg

SEQ ID NO: 28943 - DNA, 50 bp, synthetic construct
  source 1..50: mol_type = other DNA
gtagtctccggcaacccaacgagagtaaagccgggcatgccattactgat

SEQ ID NO: 28944 - DNA, 50 bp, synthetic construct
  source 1..50: mol_type = other DNA
gaccaagaaaaaggaattgagggtataacctaaaggtaagtaggttgtgg

SEQ ID NO: 28945 - DNA, 50 bp, synthetic construct
  source 1..50: mol_type = other DNA
gggtagaggctatgttctgtagagaatacgataaagcaccttgaccacat

SEQ ID NO: 28946 - DNA, 50 bp, synthetic construct
  source 1..50: mol_type = other DNA
agcatggtttttcctgtaccaggaggtctataaccatagtaggttgtggt

SEQ ID NO: 28947 - DNA, 50 bp, synthetic construct
  source 1..50: mol_type = other DNA
caaattgaccgtcatgaacttgattagtaaaattgagggtaatgcgcttg

SEQ ID NO: 28948 - DNA, 50 bp, synthetic construct
  source 1..50: mol_type = other DNA
gctggcatgtggtcaaagtattatacacgttactaaggttctctacagaa

SEQ ID NO: 28949 - DNA, 50 bp, synthetic construct
  source 1..50: mol_type = other DNA
ttttatgtctttagataaaccctttactatgtaaatcattcatagtaaac

SEQ ID NO: 28950 - DNA, 50 bp, synthetic construct
  source 1..50: mol_type = other DNA
gtttactatgaatgatttacatagtaaagcgtttatctaaagacataaaa

SEQ ID NO: 28951 - DNA, 50 bp, synthetic construct
  source 1..50: mol_type = other DNA
ccctatctctccgccactttgtgacgtcccatgtagcccgccacatttag

SEQ ID NO: 28952 - DNA, 50 bp, synthetic construct
  source 1..50: mol_type = other DNA
gatctccacagcgaatatcactgtatattactcaacaatttggcgctaag

SEQ ID NO: 28953 - DNA, 50 bp, synthetic construct
  source 1..50: mol_type = other DNA
tttgtttcattagtcaactgtatgatcatacaattgtcatttgccaactg

SEQ ID NO: 28954 - DNA, 50 bp, synthetic construct
  source 1..50: mol_type = other DNA
tttgaacgtggcccgtttgtttcatttgccaactgtggcttgccttatca

SEQ ID NO: 28955 - DNA, 50 bp, synthetic construct
  source 1..50: mol_type = other DNA
cgaatatcactgtatagttctaagatttaccaacaatattactcaacaat

SEQ ID NO: 28956 - DNA, 50 bp, synthetic construct
  source 1..50: mol_type = other DNA
tatgttctgtagagaaccttagttaataccttgaccacatgccaaccaaa

SEQ ID NO: 28957 - DNA, 50 bp, synthetic construct
  source 1..50: mol_type = other DNA
ccacagttggcaaaagacaactacatttagttgactaatgaaacaaacgg

SEQ ID NO: 28958 - DNA, 50 bp, synthetic construct
  source 1..50: mol_type = other DNA
tttaatctttaatcacctagcccctagtgtgacgtggactagctttaaag

SEQ ID NO: 28959 - DNA, 50 bp, synthetic construct
  source 1..50: mol_type = other DNA
taaaatcatagctcaggacgcttcgttcagggtatccagcgacgatttta

SEQ ID NO: 28960 - DNA, 50 bp, synthetic construct
  source 1..50: mol_type = other DNA
taattgttaataagctaattgtaaattttcaatgatatcttgttgtattt

SEQ ID NO: 28961 - DNA, 50 bp, synthetic construct
  source 1..50: mol_type = other DNA
aactttttcggatcaagctatgagggacgcaaagagggaactaaacattt

SEQ ID NO: 28962 - DNA, 50 bp, synthetic construct
  source 1..50: mol_type = other DNA
gccgctaatgagcaagcttcaaaggtctggtgaccttcagcattaagagt

SEQ ID NO: 28963 - DNA, 50 bp, synthetic construct
  source 1..50: mol_type = other DNA
aaatcatgaacgaaggatgggcttcgaaggctgggcgacgtattggcatc

SEQ ID NO: 28964 - DNA, 50 bp, synthetic construct
  source 1..50: mol_type = other DNA
caatgaaacgtgtcgttctttacgtcacaaaagacaaatgccctcactgc

SEQ ID NO: 28965 - DNA, 50 bp, synthetic construct
  source 1..50: mol_type = other DNA
ttgttgagtaatattgttggtaaatatcttagaattatacagtgatattc

SEQ ID NO: 28966 - DNA, 50 bp, synthetic construct
  source 1..50: mol_type = other DNA
ttgggtatgtttactatgaatgatttatctaaagacataaaactgaatac

SEQ ID NO: 28967 - DNA, 50 bp, synthetic construct
  source 1..50: mol_type = other DNA
aaacggctttccagtattagaaataaattcttattaatattataccattt

SEQ ID NO: 28968 - DNA, 50 bp, synthetic construct
  source 1..50: mol_type = other DNA
ttcaaaagtgcttaagtcgggtaatgtttacctttgtaaccactcaaccc

SEQ ID NO: 28969 - DNA, 50 bp, synthetic construct
  source 1..50: mol_type = other DNA
gcgccggcgtttgcgccgtcagtcgaaatcaccggctcattccccggcgc

SEQ ID NO: 28970 - DNA, 50 bp, synthetic construct
  source 1..50: mol_type = other DNA
tggatcttgcgcgtgcacttgccaggcgatccggggcagcgcaatggcca

SEQ ID NO: 28971 - DNA, 50 bp, synthetic construct
  source 1..50: mol_type = other DNA
gcttttttggtgaacatcacaggactcgacaggattcaaacctgtaacct

SEQ ID NO: 28972 - DNA, 50 bp, synthetic construct
  source 1..50: mol_type = other DNA
cctttcgcgctcacttaatgacaccaagttcacttaaagagacaactttt

SEQ ID NO: 28973 - DNA, 50 bp, synthetic construct
  source 1..50: mol_type = other DNA
ggatggtttgtagtcttaaacgaacatttctactgttatgtagactcaca

SEQ ID NO: 28974 - DNA, 50 bp, synthetic construct
  source 1..50: mol_type = other DNA
tcagtataaccgttcatcatctacccctgctaactaaaccagtataaccg

SEQ ID NO: 28975 - DNA, 50 bp, synthetic construct
  source 1..50: mol_type = other DNA
ctgcggtcccatcagcagcaatgaacgaacagtcagtcgtaccaccgccg

SEQ ID NO: 28976 - DNA, 50 bp, synthetic construct
  source 1..50: mol_type = other DNA
atttgcaagtcattttttcttggatggtgcggatgacaggacttgaacct

SEQ ID NO: 28977 - DNA, 50 bp, synthetic construct
  source 1..50: mol_type = other DNA
ctgctcatggggaacacctccttccctttttgttttttctttattatatc

SEQ ID NO: 28978 - DNA, 50 bp, synthetic construct
  source 1..50: mol_type = other DNA
aaatcctgtttgcacccctgccgcttccatctgggctgctttttctttca

SEQ ID NO: 28979 - DNA, 50 bp, synthetic construct
  source 1..50: mol_type = other DNA
ccagcagtaccacaggcagggtctatttcacaaatggtgtcgtcaggtgt

SEQ ID NO: 28980 - DNA, 50 bp, synthetic construct
  source 1..50: mol_type = other DNA
cccatcgggcatcaataactgacaaagtagatttacacttgccctgcata

SEQ ID NO: 28981 - DNA, 50 bp, synthetic construct
  source 1..50: mol_type = other DNA
tgctggccgatttggagccagcttaacagtccatcccattaccgcaaagt

SEQ ID NO: 28982 - DNA, 50 bp, synthetic construct
  source 1..50: mol_type = other DNA
tcctgaccaggcgctgtccgcgtatctaagcggacagcccctcattgtcg

SEQ ID NO: 28983 - DNA, 50 bp, synthetic construct
  source 1..50: mol_type = other DNA
cgccagctgttggaagtaccgttacacgacagttacacctatcgttgacg

SEQ ID NO: 28984 - DNA, 50 bp, synthetic construct
  source 1..50: mol_type = other DNA
ctttacctacgtttgaaaatttattattaactcatatcatacttataaaa

SEQ ID NO: 28985 - DNA, 50 bp, synthetic construct
  source 1..50: mol_type = other DNA
cctcggtgacagctctctggatggccacattccgagtgcttccagctctg

SEQ ID NO: 28986 - DNA, 50 bp, synthetic construct
  source 1..50: mol_type = other DNA
aaagggagctgtgaggaaggaggcaaacctactgccactaagctccgaca

SEQ ID NO: 28987 - DNA, 50 bp, synthetic construct
  source 1..50: mol_type = other DNA
caaaccctacagcttgaatagctacttgttgattcaactgttttaatttt

SEQ ID NO: 28988 - DNA, 50 bp, synthetic construct
  source 1..50: mol_type = other DNA
cgattcacgttgacctgcgccctgttcctggcgcagggcaacgttcagag

SEQ ID NO: 28989 - DNA, 50 bp, synthetic construct
  source 1..50: mol_type = other DNA
tattttactttgtaattcttttatatgtaaaacaaattaataaaaaaaca

SEQ ID NO: 28990 - DNA, 50 bp, synthetic construct
  source 1..50: mol_type = other DNA
ccattgaagattcggcagagctgcagccagcaggaacgaatgttccgctt

SEQ ID NO: 28991 - DNA, 50 bp, synthetic construct
  source 1..50: mol_type = other DNA
actattatattgttgttttccagttattttcgttacaaacatataataat

SEQ ID NO: 28992 - DNA, 50 bp, synthetic construct
  source 1..50: mol_type = other DNA
atatgcctccggttacaagattgccttcaatcccagcagcagagccacag

SEQ ID NO: 28993 - DNA, 50 bp, synthetic construct
  source 1..50: mol_type = other DNA
ccgattttgttcgagggcttataaatgaattagcccatctcgaaatgatt

SEQ ID NO: 28994 - DNA, 50 bp, synthetic construct
  source 1..50: mol_type = other DNA
attattatagaaaaaaattaatatctactggggattttttatattataaa

SEQ ID NO: 28995 - DNA, 50 bp, synthetic construct
  source 1..50: mol_type = other DNA
atataaccagtgtactgtgtagttctaggtatttctgtaaccgattatat

SEQ ID NO: 28996 - DNA, 50 bp, synthetic construct
  source 1..50: mol_type = other DNA
aactttttcggatcaagctatgagggacgcaaagagggaaccaaacactt

SEQ ID NO: 28997 - DNA, 50 bp, synthetic construct
  source 1..50: mol_type = other DNA
ggtggccttcacgttgtactgtgacagccttcacgttgtactgcgccacc

SEQ ID NO: 28998 - DNA, 50 bp, synthetic construct
  source 1..50: mol_type = other DNA
tgatgcggtgcgcaggcgaaggtgagcacctaagcttgtcgatgtcggtg

SEQ ID NO: 28999 - DNA, 50 bp, synthetic construct
  source 1..50: mol_type = other DNA
cggcaatcattcccaccactattagctaatttggctgggtttttttgtct

SEQ ID NO: 29000 - DNA, 50 bp, synthetic construct
  source 1..50: mol_type = other DNA
tctatcaattaatttacagtgaggtgcccctttagtaataagttgatagg

SEQ ID NO: 29001 - DNA, 50 bp, synthetic construct
  source 1..50: mol_type = other DNA
gtgcatataattagtcaccccggaaatccaaagtatccagtggaggttaa

SEQ ID NO: 29002 - DNA, 50 bp, synthetic construct
  source 1..50: mol_type = other DNA
cgctttcaatagcttttatacagtttactgttttaagtatgcagtagcag

SEQ ID NO: 29003 - DNA, 50 bp, synthetic construct
  source 1..50: mol_type = other DNA
tatacagctatacacctacttggcatgtaaaactttataataaattatta

SEQ ID NO: 29004 - DNA, 50 bp, synthetic construct
  source 1..50: mol_type = other DNA
acagctcgctatttttacggaagaaaatcaacttaaaaacggcggaaaaa

SEQ ID NO: 29005 - DNA, 50 bp, synthetic construct
  source 1..50: mol_type = other DNA
aattggcgtgtcccctcttttctgccttcatagcttgatccaaaatattt

SEQ ID NO: 29006 - DNA, 50 bp, synthetic construct
  source 1..50: mol_type = other DNA
ggaattaggttgatgttcaatggatgtccaaccaacatcagactacttag

SEQ ID NO: 29007 - DNA, 50 bp, synthetic construct
  source 1..50: mol_type = other DNA
ttaaaacatgggattaaattcagaaatcttaacttaataactatatctag

SEQ ID NO: 29008 - DNA, 50 bp, synthetic construct
  source 1..50: mol_type = other DNA
attccccctaggctgacttttgtaacaaaataaggcttacttggaagaat

SEQ ID NO: 29009 - DNA, 50 bp, synthetic construct
  source 1..50: mol_type = other DNA
cctttttatacctgattttttagcagggtattgaagggattatgaaaata

SEQ ID NO: 29010 - DNA, 50 bp, synthetic construct
  source 1..50: mol_type = other DNA
attaattactaaaagaggttgccaaagggcagcctctttttacattgtaa

SEQ ID NO: 29011 - DNA, 50 bp, synthetic construct
  source 1..50: mol_type = other DNA
taaaatcaattccacaaaaggtaaggtttgctttggtgccacaatgggat

SEQ ID NO: 29012 - DNA, 50 bp, synthetic construct
  source 1..50: mol_type = other DNA
attgaacttcagccatgataactctcaagttatatatccatcaaatccgc

SEQ ID NO: 29013 - DNA, 50 bp, synthetic construct
  source 1..50: mol_type = other DNA
aaaatttcacccgttttacaaggaattccagactgtacgtctgcaatcac

SEQ ID NO: 29014 - DNA, 50 bp, synthetic construct
  source 1..50: mol_type = other DNA
gtatggttacggttatacacggaacgtgccgagcccgacgtgcagcgtca

SEQ ID NO: 29015 - DNA, 50 bp, synthetic construct
  source 1..50: mol_type = other DNA
ttaggtgactttctaaccgctatcgaagcttgcccattagcggcatctga

SEQ ID NO: 29016 - DNA, 50 bp, synthetic construct
  source 1..50: mol_type = other DNA
aaattttcaggagttcatatgtttgtcgtaatctttggccgtccaggctg

SEQ ID NO: 29017 - DNA, 50 bp, synthetic construct
  source 1..50: mol_type = other DNA
cttttgcattgcgtttgagatatgtacacatcacatttgagatgtggtta

SEQ ID NO: 29018 - DNA, 50 bp, synthetic construct
  source 1..50: mol_type = other DNA
ataggcttattttgttacgcctatttcaagtaaatacaaattaaatgttc

SEQ ID NO: 29019 - DNA, 50 bp, synthetic construct
  source 1..50: mol_type = other DNA
ttgataatccgtttaatgcagctaagatcagtggtcaaacggctcattaa

SEQ ID NO: 29020 - DNA, 50 bp, synthetic construct
  source 1..50: mol_type = other DNA
aaatgcgcgccgacgagcgcgtcttctatgacgctgtgcggcgcggaaat

SEQ ID NO: 29021 - DNA, 50 bp, synthetic construct
  source 1..50: mol_type = other DNA
ataactatcattttacttatttgcatatctataattaaaaatatagaggt

SEQ ID NO: 29022 - DNA, 50 bp, synthetic construct
  source 1..50: mol_type = other DNA
ctatttcatatttgggattgccaaattcgggtttccgggatggcttatta

SEQ ID NO: 29023 - DNA, 50 bp, synthetic construct
  source 1..50: mol_type = other DNA
gaaaatgcgcgagaaatatcgccccggaggaggagatcaaacgaattttc

SEQ ID NO: 29024 - DNA, 50 bp, synthetic construct
  source 1..50: mol_type = other DNA
acgatgaagttgttttccatttgaaaggaactggagaagcgcggcatcaa

SEQ ID NO: 29025 - DNA, 50 bp, synthetic construct
  source 1..50: mol_type = other DNA
atcttcctctccgtatccgctcccgtaggagcctgtactaaacagatccg

SEQ ID NO: 29026 - DNA, 50 bp, synthetic construct
  source 1..50: mol_type = other DNA
tagtcaccccggaaatcctaagtgtgatattagggaatccaaagtatcca

SEQ ID NO: 29027 - DNA, 50 bp, synthetic construct
  source 1..50: mol_type = other DNA
aaggtgacgggcgggttctccctcggatatgacaatccgctttacattct

SEQ ID NO: 29028 - DNA, 50 bp, synthetic construct
  source 1..50: mol_type = other DNA
gtgccttgacgaaaatctgtttgatttctcgcgcattttcgcttcaaatg

SEQ ID NO: 29029 - DNA, 50 bp, synthetic construct
  source 1..50: mol_type = other DNA
gcggaaccattatagcacgggatgtcgatcccgtgataccgccgtctgcg

SEQ ID NO: 29030 - DNA, 50 bp, synthetic construct
  source 1..50: mol_type = other DNA
gtgccttgacgaaaatctgtttgatttctcgcgcattttcgcttcaaacg

SEQ ID NO: 29031 - DNA, 50 bp, synthetic construct
  source 1..50: mol_type = other DNA
gcacctatttgtataggttgcacttttgatcaactaatttgtatgattat

SEQ ID NO: 29032 - DNA, 50 bp, synthetic construct
  source 1..50: mol_type = other DNA
ttttttgcctgataatcatacaaatatacaaataagtgccattacaacaa

SEQ ID NO: 29033 - DNA, 50 bp, synthetic construct
  source 1..50: mol_type = other DNA
gccgtcggtattcactgaagtgtaattttactttagtgttaccgatagtg

SEQ ID NO: 29034 - DNA, 50 bp, synthetic construct
  source 1..50: mol_type = other DNA
ctacagatattctagagcctaaaaatttttactttggaaatcgcttcaag

SEQ ID NO: 29035 - DNA, 50 bp, synthetic construct
  source 1..50: mol_type = other DNA
gtgcatataataagccatcccggaaacccgaaatatgaaatagatgttaa

SEQ ID NO: 29036 - DNA, 50 bp, synthetic construct
  source 1..50: mol_type = other DNA
aatttaaatgtaaaacagtcacagctcaacgtgtgtcgtcattggaaaca

SEQ ID NO: 29037 - DNA, 50 bp, synthetic construct
  source 1..50: mol_type = other DNA
tggcctaaagacttgataaataagggcttatttagaaagtatggtggatt

SEQ ID NO: 29038 - DNA, 50 bp, synthetic construct
  source 1..50: mol_type = other DNA
tcatcattatctataatttctactatagaagaagttatattaggatttgt

SEQ ID NO: 29039 - DNA, 50 bp, synthetic construct
  source 1..50: mol_type = other DNA
ttaatcaggtgatttttattagacacggctacgaaagtacagcgttttat

SEQ ID NO: 29040 - DNA, 50 bp, synthetic construct
  source 1..50: mol_type = other DNA
atagcacggttgaaaaagtgattattaaggcgctttttcagggcggcata

SEQ ID NO: 29041 - DNA, 50 bp, synthetic construct
  source 1..50: mol_type = other DNA
attaatgaaaaaaaacacagatgatgggatataatttttgtttaattttt

SEQ ID NO: 29042 - DNA, 50 bp, synthetic construct
  source 1..50: mol_type = other DNA
gtgatatatagtaaggaagaaaggaggctctcttcctatccctaaatctt

SEQ ID NO: 29043 - DNA, 50 bp, synthetic construct
  source 1..50: mol_type = other DNA
attcctgccaagaaaatgatacaagtttctatccaactcttgctagggag

SEQ ID NO: 29044 - DNA, 50 bp, synthetic construct
  source 1..50: mol_type = other DNA
agccggctgttggcagaacatgtgccatcatgggctgataatatgttaat

SEQ ID NO: 29045 - DNA, 50 bp, synthetic construct
  source 1..50: mol_type = other DNA
ccttaattgtctttttaaataaaaatttttgattccccagcccttgtaga

SEQ ID NO: 29046 - DNA, 50 bp, synthetic construct
  source 1..50: mol_type = other DNA
gaaattcgtactatccactgcgcaaacactggcgctatgacaggttgtgc

SEQ ID NO: 29047 - DNA, 50 bp, synthetic construct
  source 1..50: mol_type = other DNA
tggcgttttttatatgaagatttacacattatgttacatcacaaattcat

SEQ ID NO: 29048 - DNA, 50 bp, synthetic construct
  source 1..50: mol_type = other DNA
ctttcagagtgatatatagactacccacagcaaatatatcttcctgcgga

SEQ ID NO: 29049 - DNA, 50 bp, synthetic construct
  source 1..50: mol_type = other DNA
ggggatggggagaaatcaaaaaagatgagttttacgatctttgcttcccc

SEQ ID NO: 29050 - DNA, 50 bp, synthetic construct
  source 1..50: mol_type = other DNA
atttcccgagaatatccggcaaggatctatgactcgtatcataaaaaatg

SEQ ID NO: 29051 - DNA, 50 bp, synthetic construct
  source 1..50: mol_type = other DNA
cgacgcactcagagaggaagagcgccgcctgctcctcggtgagacggtgc

SEQ ID NO: 29052 - DNA, 50 bp, synthetic construct
  source 1..50: mol_type = other DNA
atttcccctgaacatcattaaaatggattttcatgattggttttcgattg

SEQ ID NO: 29053 - DNA, 50 bp, synthetic construct
  source 1..50: mol_type = other DNA
ttagatggatgggaaaaaggttactagtaagttttcttaagaaattagaa

SEQ ID NO: 29054 - DNA, 50 bp, synthetic construct
  source 1..50: mol_type = other DNA
gatcgactcactagacaagaagttacactttgtaacccagtgagtgtatg

SEQ ID NO: 29055 - DNA, 50 bp, synthetic construct
  source 1..50: mol_type = other DNA
gatcgactcactagacaagaagttacactttgtaacctagtgagtgtatg

SEQ ID NO: 29056 - DNA, 50 bp, synthetic construct
  source 1..50: mol_type = other DNA
attgattcttcccgtcatacaacccaaatctcctgaggggatgaggcaaa

SEQ ID NO: 29057 - DNA, 50 bp, synthetic construct
  source 1..50: mol_type = other DNA
atagcgacaaataactgaagcaatgttcaatttttgttatacattgccag

SEQ ID NO: 29058 - DNA, 50 bp, synthetic construct
  source 1..50: mol_type = other DNA
taaacctttccattgtacccaacacctgtgtagtacccagtgccggaatc

SEQ ID NO: 29059 - DNA, 50 bp, synthetic construct
  source 1..50: mol_type = other DNA
tttacttatgatacgcctctgcttatgtttctccacgcataatcttaaat

SEQ ID NO: 29060 - DNA, 50 bp, synthetic construct
  source 1..50: mol_type = other DNA
ataatatcatttctataaaaggggatcagcttttcttattatattattac

SEQ ID NO: 29061 - DNA, 50 bp, synthetic construct
  source 1..50: mol_type = other DNA
aggtaacgccgtttgtgtgcgtattcgtatatcccgaaacggcaaaaccc

SEQ ID NO: 29062 - DNA, 50 bp, synthetic construct
  source 1..50: mol_type = other DNA
ttttcacttacacataatactaccatggtagtattatgtgcaaatgttta

SEQ ID NO: 29063 - DNA, 50 bp, synthetic construct
  source 1..50: mol_type = other DNA
taaagtatcaaaatttgagagctgatatttttgcttatttttatattttt

SEQ ID NO: 29064 - DNA, 50 bp, synthetic construct
  source 1..50: mol_type = other DNA
gtgccatataggccatgatgatgatgtactcaacatttcttatctgggga

SEQ ID NO: 29065 - DNA, 50 bp, synthetic construct
  source 1..50: mol_type = other DNA
gaacttatcttatcaaatgtggatggataaacatttccgaagattttttc

SEQ ID NO: 29066 - DNA, 50 bp, synthetic construct
  source 1..50: mol_type = other DNA
tgactgcagaaaataaaagcaatgcagccgcagaattttatcttccatcg

SEQ ID NO: 29067 - DNA, 50 bp, synthetic construct
  source 1..50: mol_type = other DNA
gcaatctgtcaaatctagttcaataatgataactttattatacatttttc

SEQ ID NO: 29068 - DNA, 50 bp, synthetic construct
  source 1..50: mol_type = other DNA
acaaggtcacctttggcctacaagatctatgcagacgaggggatttctgc

SEQ ID NO: 29069 - DNA, 50 bp, synthetic construct
  source 1..50: mol_type = other DNA
taatttttcccacacattttttgttggaaatagtaaaaagccttaatttt

SEQ ID NO: 29070 - DNA, 50 bp, synthetic construct
  source 1..50: mol_type = other DNA
ccttcccgtttcgctcaagttagtataatgccaacttagtataaaaaagc

SEQ ID NO: 29071 - DNA, 50 bp, synthetic construct
  source 1..50: mol_type = other DNA
cgccggccgatcccatctgcccgatcccaggtccttcacgacggctgcaa

SEQ ID NO: 29072 - DNA, 50 bp, synthetic construct
  source 1..50: mol_type = other DNA
ttattttttttagacatacagaatagtagatgtatttaatgagaaaataa

SEQ ID NO: 29073 - DNA, 50 bp, synthetic construct
  source 1..50: mol_type = other DNA
tgtaaaatactccaaacattttttataaatatcttcgtgtcccatttgca

SEQ ID NO: 29074 - DNA, 50 bp, synthetic construct
  source 1..50: mol_type = other DNA
caattaaacacaacctaactacattattgtagttatatagtgtttggtca

SEQ ID NO: 29075 - DNA, 50 bp, synthetic construct
  source 1..50: mol_type = other DNA
tccatgccatatatagagtgaaagctttttcacttcgtgtacatggtgga

SEQ ID NO: 29076 - DNA, 50 bp, synthetic construct
  source 1..50: mol_type = other DNA
aacgattactcgttttaaaccatattgttggtgtaattagatttactcca

SEQ ID NO: 29077 - DNA, 50 bp, synthetic construct
  source 1..50: mol_type = other DNA
aggcaattggtgcaacggaaagaattttctcaacaatgcatcaagtgtaa

SEQ ID NO: 29078 - DNA, 50 bp, synthetic construct
  source 1..50: mol_type = other DNA
aacatttctgtttttccagcgccgcacacagcccaaataaaaaacgattc

SEQ ID NO: 29079 - DNA, 50 bp, synthetic construct
  source 1..50: mol_type = other DNA
ttttataatttattcaaattaattttctcgaaaaggaatgaatcataaaa

SEQ ID NO: 29080 - DNA, 50 bp, synthetic construct
  source 1..50: mol_type = other DNA
cggctgtctaaaattagcaaggtctaaacgtgtctgatgaaaatcacccg

SEQ ID NO: 29081 - DNA, 50 bp, synthetic construct
  source 1..50: mol_type = other DNA
cgacgatgatgagggcagttttcggagcgaaagagtccgcgagagcgtcg

SEQ ID NO: 29082 - DNA, 50 bp, synthetic construct
  source 1..50: mol_type = other DNA
ccctcgtcgccggcaccatcgtccgctataggaatgcgcggcgaagcggt

SEQ ID NO: 29083 - DNA, 50 bp, synthetic construct
  source 1..50: mol_type = other DNA
taatctcctgtttaggtttgcctaattcgggttgccaattcgcctggcta

SEQ ID NO: 29084 - DNA, 50 bp, synthetic construct
  source 1..50: mol_type = other DNA
cgagaggctgctggtcgaggccctcgcgggcggtgcggagctgctcctcc

SEQ ID NO: 29085 - DNA, 50 bp, synthetic construct
  source 1..50: mol_type = other DNA
cacaggttcgagccctgtttaaggcgccatgtaaaggtatccgaactatc

SEQ ID NO: 29086 - DNA, 50 bp, synthetic construct
  source 1..50: mol_type = other DNA
atgattaaaagcacaactaacatttccactaaagtaaaagctttaacctt

SEQ ID NO: 29087 - DNA, 50 bp, synthetic construct
  source 1..50: mol_type = other DNA
atcatccatctggttagtatttattaaaatatatcatccatctggcaatc

SEQ ID NO: 29088 - DNA, 50 bp, synthetic construct
  source 1..50: mol_type = other DNA
taataacgtgacagattcaacttgctaccgtctcaatgtgggtcgtttgt

SEQ ID NO: 29089 - DNA, 50 bp, synthetic construct
  source 1..50: mol_type = other DNA
tccaccgcctttgttaataacgtgacgctatagcttccacgtgggtcgtt

SEQ ID NO: 29090 - DNA, 50 bp, synthetic construct
  source 1..50: mol_type = other DNA
gcctttgttaataacgtgacagattcaatgtgggtcgtttgtgggaaatt

SEQ ID NO: 29091 - DNA, 50 bp, synthetic construct
  source 1..50: mol_type = other DNA
gggggaagctgaataatccttcgttcagtagcgcttattcggattcaccg

SEQ ID NO: 29092 - DNA, 50 bp, synthetic construct
  source 1..50: mol_type = other DNA
aatttcccacaaacgacccacattgaatctgtcacgttattaacaaaggc

SEQ ID NO: 29093 - DNA, 50 bp, synthetic construct
  source 1..50: mol_type = other DNA
tgggcttataaaaaataccaccaagcttggtggtattttttttaattaga

SEQ ID NO: 29094 - DNA, 50 bp, synthetic construct
  source 1..50: mol_type = other DNA
gcctttgttaataacgtgacagattctccacatgggtcgtttgtgggaaa

SEQ ID NO: 29095 - DNA, 50 bp, synthetic construct
  source 1..50: mol_type = other DNA
taaccagtcttaaaaggacttcctttagatggtgtatttaaacgtgtcta

SEQ ID NO: 29096 - DNA, 50 bp, synthetic construct
  source 1..50: mol_type = other DNA
ttcttcattgaagccatgaactgagctcaattgatggactacgagaagaa

SEQ ID NO: 29097 - DNA, 50 bp, synthetic construct
  source 1..50: mol_type = other DNA
tgaagtgtcagatctagtcggaactagcaccaaccagttcagacgatttt

SEQ ID NO: 29098 - DNA, 50 bp, synthetic construct
  source 1..50: mol_type = other DNA
tagatatgtttccaatgacgacacacatatcgaagctgtaaccgtattaa

SEQ ID NO: 29099 - DNA, 50 bp, synthetic construct
  source 1..50: mol_type = other DNA
ccagtaaaatgaaaaaacgcccataacgttgggcgttttttcatttcgtg

SEQ ID NO: 29100 - DNA, 50 bp, synthetic construct
  source 1..50: mol_type = other DNA
ctctttccgtccagtgagagaaaacgtttattctccgtccatcgtagctt

SEQ ID NO: 29101 - DNA, 50 bp, synthetic construct
  source 1..50: mol_type = other DNA
accctgattgaactgatggtgatgatcggcatcatcgccattctcagcgc

SEQ ID NO: 29102 - DNA, 50 bp, synthetic construct
  source 1..50: mol_type = other DNA
acagaaacgactatgagcgcaatgacccttgatttacctcgccgctttcc

SEQ ID NO: 29103 - DNA, 50 bp, synthetic construct
  source 1..50: mol_type = other DNA
cgcggcgttaatcgggtgattttcatgataattgcaaaattattgccatc

SEQ ID NO: 29104 - DNA, 50 bp, synthetic construct
  source 1..50: mol_type = other DNA
tgatatgcttctgcgtatcggttaatttatgatatgcttcgcctcgcatg

SEQ ID NO: 29105 - DNA, 50 bp, synthetic construct
  source 1..50: mol_type = other DNA
ctggttaatatttattagtgcaaatatttgcactaagtcacatcatccat

SEQ ID NO: 29106 - DNA, 50 bp, synthetic construct
  source 1..50: mol_type = other DNA
atttgtatttacttgaataccaagaaattgaaattgcagatcacgtaaat

SEQ ID NO: 29107 - DNA, 50 bp, synthetic construct
  source 1..50: mol_type = other DNA
cgttgatagcgccaagcgttactagtacggcatatgcagtagaaacaacg

SEQ ID NO: 29108 - DNA, 50 bp, synthetic construct
  source 1..50: mol_type = other DNA
ttgttaataacgtgacagattcaatgggtcgtttgtgggaaattatccac

SEQ ID NO: 29109 - DNA, 50 bp, synthetic construct
  source 1..50: mol_type = other DNA
tgagcaatactaataaacaaaactatagtgttatttacactttgattcag

SEQ ID NO: 29110 - DNA, 50 bp, synthetic construct
  source 1..50: mol_type = other DNA
attgattcttcccgtcatgcactccacagatgatgatattaataaggcat

SEQ ID NO: 29111 - DNA, 50 bp, synthetic construct
  source 1..50: mol_type = other DNA
atcatccatctggttagtatttgttaaaatatatcatccatctggcaatc

SEQ ID NO: 29112 - DNA, 50 bp, synthetic construct
  source 1..50: mol_type = other DNA
ttaataacgtgacagattcgacattaccgtctcaatgtgggtcgtttgtg

SEQ ID NO: 29113 - DNA, 50 bp, synthetic construct
  source 1..50: mol_type = other DNA
tattagctgatggaaatgtaccatcattgatacattctctgatttaaaag

SEQ ID NO: 29114 - DNA, 50 bp, synthetic construct
  source 1..50: mol_type = other DNA
aacgcttggcaagaaacaattgatggataaagcaattaatgcccctttga

SEQ ID NO: 29115 - DNA, 50 bp, synthetic construct
  source 1..50: mol_type = other DNA
atgggaaactggtgtttcccaaacaactaagggaaagcggacaatccatc

SEQ ID NO: 29116 - DNA, 50 bp, synthetic construct
  source 1..50: mol_type = other DNA
gattgccagatggatgatatagtttaacaaatattaaccagatggatgat

SEQ ID NO: 29117 - DNA, 50 bp, synthetic construct
  source 1..50: mol_type = other DNA
gttaataacgtgacagattcaatgtgggtcgtttgtgggaaattatccac

SEQ ID NO: 29118 - DNA, 50 bp, synthetic construct
  source 1..50: mol_type = other DNA
aactaaactgtggaagttaaatatctatatcccctttctaaattttacta

SEQ ID NO: 29119 - DNA, 50 bp, synthetic construct
  source 1..50: mol_type = other DNA
aagatacaatctaaagaaatcttgtacacaccttctgtgttcattatcga

SEQ ID NO: 29120 - DNA, 50 bp, synthetic construct
  source 1..50: mol_type = other DNA
gccagatggatgatatagtttagtgcactaataaatactaaccagatgga

SEQ ID NO: 29121 - DNA, 50 bp, synthetic construct
  source 1..50: mol_type = other DNA
aagtgggtgtggggacagtgatataaatccacaattttaaacttaattgc

SEQ ID NO: 29122 - DNA, 50 bp, synthetic construct
  source 1..50: mol_type = other DNA
gctgacattagcattttgatggtctagatcaatttgggtctacatcgaac

SEQ ID NO: 29123 - DNA, 50 bp, synthetic construct
  source 1..50: mol_type = other DNA
gattgccagatggatgatgtattttaacaaatactaaccagatggatgat

SEQ ID NO: 29124 - DNA, 50 bp, synthetic construct
  source 1..50: mol_type = other DNA
gattgccgaggtggtcttcgtggcgcatgtaggtcacggtctcgaagccg

SEQ ID NO: 29125 - DNA, 50 bp, synthetic construct
  source 1..50: mol_type = other DNA
ccgtggttgcgagcatggctggatatgtctgcatctactgctatgcgcgg

SEQ ID NO: 29126 - DNA, 50 bp, synthetic construct
  source 1..50: mol_type = other DNA
gccgggcgcgccaatctgatacgacttcgtcccccatggcgcgccaagtc

SEQ ID NO: 29127 - DNA, 50 bp, synthetic construct
  source 1..50: mol_type = other DNA
acgtgcagcccggaaatcgcaatgaacattgcgacgagatggctcgtgcc

SEQ ID NO: 29128 - DNA, 50 bp, synthetic construct
  source 1..50: mol_type = other DNA
attcaaccagtggataatttcccacaatcaaaagacaacgcacattgaat

SEQ ID NO: 29129 - DNA, 50 bp, synthetic construct
  source 1..50: mol_type = other DNA
tcgaatcctgtcgggtgcgccatttcacccggcggggcgcgccatttttc

SEQ ID NO: 29130 - DNA, 50 bp, synthetic construct
  source 1..50: mol_type = other DNA
tgagcaatactaataaacaaaaccatagtgttatttacactttgattcag

SEQ ID NO: 29131 - DNA, 50 bp, synthetic construct
  source 1..50: mol_type = other DNA
ctgaaagtgataaacgaaaagaatatattcgccagaatcctctctaccag

SEQ ID NO: 29132 - DNA, 50 bp, synthetic construct
  source 1..50: mol_type = other DNA
ggcaaaaaacattacagttattcctggggaaaactataatgtttcaattg

SEQ ID NO: 29133 - DNA, 50 bp, synthetic construct
  source 1..50: mol_type = other DNA
tcttcccctgtattttcaaattttttaacgatatgagctacaagccgtaa

SEQ ID NO: 29134 - DNA, 50 bp, synthetic construct
  source 1..50: mol_type = other DNA
gcgcttaccgatatgctgcaaaccttcgcctgcagcagatgggcgttgcg

SEQ ID NO: 29135 - DNA, 50 bp, synthetic construct
  source 1..50: mol_type = other DNA
gtacaacaccttagtaacgtgctcatctgtatagtactttcaacacgtgc

SEQ ID NO: 29136 - DNA, 50 bp, synthetic construct
  source 1..50: mol_type = other DNA
taaagcttctgtatctaaatgggaaaagctatcctgacataaccttttta

SEQ ID NO: 29137 - DNA, 50 bp, synthetic construct
  source 1..50: mol_type = other DNA
caaacaatatctaaatgggaacaaggactgtcggttcccgattctgatat

SEQ ID NO: 29138 - DNA, 50 bp, synthetic construct
  source 1..50: mol_type = other DNA
atggatatgttcccaaatacgccacattgtgagactgtagttaaacttat

SEQ ID NO: 29139 - DNA, 50 bp, synthetic construct
  source 1..50: mol_type = other DNA
ccacgacaaccgcgttgacggcctcccggccgaagtgatgaaggtttcgg

SEQ ID NO: 29140 - DNA, 50 bp, synthetic construct
  source 1..50: mol_type = other DNA
gaccaatgaccacggtaatacaagatatcacatgaccaccgtttccgcat

SEQ ID NO: 29141 - DNA, 50 bp, synthetic construct
  source 1..50: mol_type = other DNA
atttaagataaatagaggagaagcatgtttttatgaagactatcataagt

SEQ ID NO: 29142 - DNA, 50 bp, synthetic construct
  source 1..50: mol_type = other DNA
aaggatgggaaaaaggtgtttcccaagggaaaccggcggtgtctatactt

SEQ ID NO: 29143 - DNA, 50 bp, synthetic construct
  source 1..50: mol_type = other DNA
gggtcgtctgggttggcttcctcccggcgtgaagctgtcccggatcgcct

SEQ ID NO: 29144 - DNA, 50 bp, synthetic construct
  source 1..50: mol_type = other DNA
aactggtcgtcatggtctgttgagactgcactgtaccaatacgctccaat

SEQ ID NO: 29145 - DNA, 50 bp, synthetic construct
  source 1..50: mol_type = other DNA
accctttttgtttcaactggagatgtttcgggtttaacggtaatgtattt

SEQ ID NO: 29146 - DNA, 50 bp, synthetic construct
  source 1..50: mol_type = other DNA
gagctgtcgcgcatctggtggaccaacagccgcacgatgagaaccgtcag

SEQ ID NO: 29147 - DNA, 50 bp, synthetic construct
  source 1..50: mol_type = other DNA
aagtatagacaccgccggtttcccttgggaaacacctttttcccatcctt

SEQ ID NO: 29148 - DNA, 50 bp, synthetic construct
  source 1..50: mol_type = other DNA
cttaatcgcggtttacatcagcgcggtagctgaagtcttcccggatatga

SEQ ID NO: 29149 - DNA, 50 bp, synthetic construct
  source 1..50: mol_type = other DNA
catgatgggatagcggtgtttcccaagggaaactggctgtggagttcaag

SEQ ID NO: 29150 - DNA, 50 bp, synthetic construct
  source 1..50: mol_type = other DNA
gtattctgctggtacaaacacccccggtgaataagacaccaccgataaag

SEQ ID NO: 29151 - DNA, 50 bp, synthetic construct
  source 1..50: mol_type = other DNA
caaaggcctggaccagctgatcgccgggactatcgcggccgcggccttcg

SEQ ID NO: 29152 - DNA, 50 bp, synthetic construct
  source 1..50: mol_type = other DNA
cgccgtcaagaaagactgatgacaggtgggctttttctttttgcatggcg

SEQ ID NO: 29153 - DNA, 50 bp, synthetic construct
  source 1..50: mol_type = other DNA
atcccgcccccaattatatatttacttaaatttgctatggacggactata

SEQ ID NO: 29154 - DNA, 50 bp, synthetic construct
  source 1..50: mol_type = other DNA
acgcttcccggcacatcccatagtgcgttatggcacttgcgggtgtcgaa

SEQ ID NO: 29155 - DNA, 50 bp, synthetic construct
  source 1..50: mol_type = other DNA
gactgcctttatacctgagcatacttactggctctgggatcaaacctcgc

SEQ ID NO: 29156 - DNA, 50 bp, synthetic construct
  source 1..50: mol_type = other DNA
ttttgaacaggctgaagaaatcttgttgattgcttattgcgggtgcaaag

SEQ ID NO: 29157 - DNA, 50 bp, synthetic construct
  source 1..50: mol_type = other DNA
agttattgtccaaaggatactttgcagtaagtaatccgaattttttattt

SEQ ID NO: 29158 - DNA, 50 bp, synthetic construct
  source 1..50: mol_type = other DNA
gcataacgtctgctatcgtatagctaacttccataatgcctcggatctac

SEQ ID NO: 29159 - DNA, 50 bp, synthetic construct
  source 1..50: mol_type = other DNA
cggttcgtcctcgtccattttcgatatcttgctcatccattttcagaacg

SEQ ID NO: 29160 - DNA, 50 bp, synthetic construct
  source 1..50: mol_type = other DNA
tggaaatagaatgagataaattctagtgaaaatatggtgctcttgttcca

SEQ ID NO: 29161 - DNA, 50 bp, synthetic construct
  source 1..50: mol_type = other DNA
aaggtaaaagggttcactctggtggaatgtttggtggttctagtcattct

SEQ ID NO: 29162 - DNA, 50 bp, synthetic construct
  source 1..50: mol_type = other DNA
tttaggcaattgatgcttgaaaaatattttgaatttaagaattgattttc

SEQ ID NO: 29163 - DNA, 50 bp, synthetic construct
  source 1..50: mol_type = other DNA
aaaacttttcttattatatatgttaacaatggtataattgagtatgttca

SEQ ID NO: 29164 - DNA, 50 bp, synthetic construct
  source 1..50: mol_type = other DNA
ttccctcatgataatacttggcaataagacccagcattataaaactggag

SEQ ID NO: 29165 - DNA, 50 bp, synthetic construct
  source 1..50: mol_type = other DNA
caaactccttgtcccacaaggagatattaaattgcacaggaaactttttt

SEQ ID NO: 29166 - DNA, 50 bp, synthetic construct
  source 1..50: mol_type = other DNA
tcgtttggtaaagctcggcaggtcaaatttttccgctctttcagaaaaaa

SEQ ID NO: 29167 - DNA, 50 bp, synthetic construct
  source 1..50: mol_type = other DNA
tcgaaaatttactttaataataaaaatgaaggattcgatgaaattcttat

SEQ ID NO: 29168 - DNA, 50 bp, synthetic construct
  source 1..50: mol_type = other DNA
gaaaatcaattcttaaattcaaaatatttttcaagcatcaattgcctaaa

SEQ ID NO: 29169 - DNA, 50 bp, synthetic construct
  source 1..50: mol_type = other DNA
accacaccgcgttggcttccttcttctcttggcaagaataggcgccattc

SEQ ID NO: 29170 - DNA, 50 bp, synthetic construct
  source 1..50: mol_type = other DNA
gactcattgtgcttataagatgttgcaactaataccaaaaaacgtgatgc

SEQ ID NO: 29171 - DNA, 50 bp, synthetic construct
  source 1..50: mol_type = other DNA
gggcttttaccatacccattttaacaataaatttttcatgataatatctc

SEQ ID NO: 29172 - DNA, 50 bp, synthetic construct
  source 1..50: mol_type = other DNA
ctggttctatcgtgataacttttttcaaaaatctatctagattatacatc

SEQ ID NO: 29173 - DNA, 50 bp, synthetic construct
  source 1..50: mol_type = other DNA
ccaactgaacattttccaatggggttatatttttatcaattatggtttgg

SEQ ID NO: 29174 - DNA, 50 bp, synthetic construct
  source 1..50: mol_type = other DNA
cgataaagaagtaatagaagtgtaaaagtgataaatctgcttctttacag

SEQ ID NO: 29175 - DNA, 50 bp, synthetic construct
  source 1..50: mol_type = other DNA
cattatacaggtcttcaaatgtcatatcaagtcattttccgataataatg

SEQ ID NO: 29176 - DNA, 50 bp, synthetic construct
  source 1..50: mol_type = other DNA
acgaatgaagcgactaattcgatatgatgggtttgcgggaaaagatctac

SEQ ID NO: 29177 - DNA, 50 bp, synthetic construct
  source 1..50: mol_type = other DNA
ttgaaaaagctactatatcatcgctatccgactggcgcgttgcatttcct

SEQ ID NO: 29178 - DNA, 50 bp, synthetic construct
  source 1..50: mol_type = other DNA
gtgcatataattagtcaccccggaaatactggggaatccaaagtatccag

SEQ ID NO: 29179 - DNA, 50 bp, synthetic construct
  source 1..50: mol_type = other DNA
atcaacgcatattacatcatcgccttacagatgatataatatggcttgat

SEQ ID NO: 29180 - DNA, 50 bp, synthetic construct
  source 1..50: mol_type = other DNA
aacttcttcaagggaacaatcagaatgctgatcgcgccgctcggcgtgtt

SEQ ID NO: 29181 - DNA, 50 bp, synthetic construct
  source 1..50: mol_type = other DNA
ccgtgcttgcacaactaagcaatgcaaaacgccccatgccctgcgcatgc

SEQ ID NO: 29182 - DNA, 50 bp, synthetic construct
  source 1..50: mol_type = other DNA
gaggattcaagaagaatatttgatagcatcgctattcttcttcagccact

SEQ ID NO: 29183 - DNA, 50 bp, synthetic construct
  source 1..50: mol_type = other DNA
gcgatcaacatatttttgatttagttaaaattaagaaactatttgaggct

SEQ ID NO: 29184 - DNA, 50 bp, synthetic construct
  source 1..50: mol_type = other DNA
cctgaattttaggtttcatgcttcaaaaatcatgaagtctacaatgaaga

SEQ ID NO: 29185 - DNA, 50 bp, synthetic construct
  source 1..50: mol_type = other DNA
tatagaagacattcaccatatttcttacgctatgtcaaatgcgccagaag

SEQ ID NO: 29186 - DNA, 50 bp, synthetic construct
  source 1..50: mol_type = other DNA
aatccaccatactttctaaataagcccttatttatcaagtttttaggcaa

SEQ ID NO: 29187 - DNA, 50 bp, synthetic construct
  source 1..50: mol_type = other DNA
ccgcctatcaacacgcccatcaatggcgtggtcgcgttgaaaattgacga

SEQ ID NO: 29188 - DNA, 50 bp, synthetic construct
  source 1..50: mol_type = other DNA
ccataagcatgcgccgcctttggtggagctaaggggaatcgaacccctga

SEQ ID NO: 29189 - DNA, 50 bp, synthetic construct
  source 1..50: mol_type = other DNA
gtcaccacggactggcgcacctccattctggtgcccccggcaggaatcga

SEQ ID NO: 29190 - DNA, 50 bp, synthetic construct
  source 1..50: mol_type = other DNA
ccggcagctccacgacagcggccttagtttcccgcaagctccactcgagg

SEQ ID NO: 29191 - DNA, 50 bp, synthetic construct
  source 1..50: mol_type = other DNA
atggagcttgacagccgaaacgacccgcgggttgcgctcggtgagcgcgt

SEQ ID NO: 29192 - DNA, 50 bp, synthetic construct
  source 1..50: mol_type = other DNA
cctgtggtggacctcgcaggaaactaaggccgctgtggtggagctgccgg

SEQ ID NO: 29193 - DNA, 50 bp, synthetic construct
  source 1..50: mol_type = other DNA
gagagatggtgcacacactgggacggtgccgagtgtgggactcgaaccca

SEQ ID NO: 29194 - DNA, 50 bp, synthetic construct
  source 1..50: mol_type = other DNA
cctgtcgtggaccttgcaggaaactaaggccgctgtggtggagctgccgg

SEQ ID NO: 29195 - DNA, 50 bp, synthetic construct
  source 1..50: mol_type = other DNA
cttcaatgacccttgaataaagtctagctacgatacaatgacctttgatg

SEQ ID NO: 29196 - DNA, 50 bp, synthetic construct
  source 1..50: mol_type = other DNA
aggtaaatcatcaaaggtcattgtattcaagggtcattgaagtcataatc

SEQ ID NO: 29197 - DNA, 50 bp, synthetic construct
  source 1..50: mol_type = other DNA
ccgtacatggaataataaagcactagcaccagaactttagccatttctaa

SEQ ID NO: 29198 - DNA, 50 bp, synthetic construct
  source 1..50: mol_type = other DNA
gtattgtagctattcggcattgtagctgttaagtaccccagattcacgct

SEQ ID NO: 29199 - DNA, 50 bp, synthetic construct
  source 1..50: mol_type = other DNA
ggatcaatgcgggggctccgtatcatgatacccagcgccttatcataagt

SEQ ID NO: 29200 - DNA, 50 bp, synthetic construct
  source 1..50: mol_type = other DNA
atggccttcggggtacgcatagctgtggtaatctgtgttcacgtcgcgat

SEQ ID NO: 29201 - DNA, 50 bp, synthetic construct
  source 1..50: mol_type = other DNA
gagtatcccgtcgaaggcatggcaggtggcggcatacgcccgagtgtcca

SEQ ID NO: 29202 - DNA, 50 bp, synthetic construct
  source 1..50: mol_type = other DNA
tgtttccgcgcctgctatgtgcgccggcgctctttcacagtgtaaaggac

SEQ ID NO: 29203 - DNA, 50 bp, synthetic construct
  source 1..50: mol_type = other DNA
ttaccaacctttactttacccatatatcctgaagaagcttaattatttca

SEQ ID NO: 29204 - DNA, 50 bp, synthetic construct
  source 1..50: mol_type = other DNA
cttgcgggccttcttgatggtgtcgcctcgcagttcttgatgccatagag

SEQ ID NO: 29205 - DNA, 50 bp, synthetic construct
  source 1..50: mol_type = other DNA
atcgttttagcgcataatcatccttctggtaatgttattccatcgcagca

SEQ ID NO: 29206 - DNA, 50 bp, synthetic construct
  source 1..50: mol_type = other DNA
ccgtattttttctaaggattttgcgattaaaatctatataaaaaggtgtg

SEQ ID NO: 29207 - DNA, 50 bp, synthetic construct
  source 1..50: mol_type = other DNA
tgagcaatactaataagcaaaactatagtgttagttacactttgattcag

SEQ ID NO: 29208 - DNA, 50 bp, synthetic construct
  source 1..50: mol_type = other DNA
ctgaatcaaagtgtaaataacactatgattttgtttattagtattgctca

SEQ ID NO: 29209 - DNA, 50 bp, synthetic construct
  source 1..50: mol_type = other DNA
cttatgataaggcgctgggtatcatatgatacggagcccccgcattgatc

SEQ ID NO: 29210 - DNA, 50 bp, synthetic construct
  source 1..50: mol_type = other DNA
tgcacttgaagaacagctttattatatcagaaggccgtttttcggttgcc

SEQ ID NO: 29211 - DNA, 50 bp, synthetic construct
  source 1..50: mol_type = other DNA
tgcttaagtcggggaatgctttacgggatgttcatggaattctttaacca

SEQ ID NO: 29212 - DNA, 50 bp, synthetic construct
  source 1..50: mol_type = other DNA
aacctttcagcaaattgctgaagggtcctttcggaagtcgctcgtattgg

SEQ ID NO: 29213 - DNA, 50 bp, synthetic construct
  source 1..50: mol_type = other DNA
tatgcgaggagaagcatatcataaatcaactgataagcagaggcgtatca

SEQ ID NO: 29214 - DNA, 50 bp, synthetic construct
  source 1..50: mol_type = other DNA
ttaagattatgcgtggagaagcttataagtaatgaggttcatgatttttg

SEQ ID NO: 29215 - DNA, 50 bp, synthetic construct
  source 1..50: mol_type = other DNA
ttttcatggatgatagcgctggcagagtatgcttttcaaattccggcaaa

SEQ ID NO: 29216 - DNA, 50 bp, synthetic construct
  source 1..50: mol_type = other DNA
ccattgccttttgctaatgtgcgataccgtacatgagcattgaaaaaggt

SEQ ID NO: 29217 - DNA, 50 bp, synthetic construct
  source 1..50: mol_type = other DNA
aactgtaaatattcaggaggtaataactacgatcctattttaaatgaatt

SEQ ID NO: 29218 - DNA, 50 bp, synthetic construct
  source 1..50: mol_type = other DNA
atgtttccgatgagtgtgcatgtcgagacggttgtccttttgtcccgact

SEQ ID NO: 29219 - DNA, 50 bp, synthetic construct
  source 1..50: mol_type = other DNA
ctgagcgattgcagcctgtgcagatatttgcgatagccgcctgagcagca

SEQ ID NO: 29220 - DNA, 50 bp, synthetic construct
  source 1..50: mol_type = other DNA
gtgcgggttcaagtcccgcttcgagtacgagtattcttgattaaaagctc

SEQ ID NO: 29221 - DNA, 50 bp, synthetic construct
  source 1..50: mol_type = other DNA
ctggcgcataacggagttttatttttggacgaattacccgaattcaacag

SEQ ID NO: 29222 - DNA, 50 bp, synthetic construct
  source 1..50: mol_type = other DNA
tttaattttacaactgtctctacgtgaggagtgttagggaacatatccat

SEQ ID NO: 29223 - DNA, 50 bp, synthetic construct
  source 1..50: mol_type = other DNA
ccctggctctttgctgatgtgtgataccgcacatgagcattagcgccggg

SEQ ID NO: 29224 - DNA, 50 bp, synthetic construct
  source 1..50: mol_type = other DNA
tactttgattgaaatgaaggatagtactatctttgattgaaatgcttgtc

SEQ ID NO: 29225 - DNA, 50 bp, synthetic construct
  source 1..50: mol_type = other DNA
aaatcggtttctaaatgggaacgaggcatatgcctgccggacgtgtcaat

SEQ ID NO: 29226 - DNA, 50 bp, synthetic construct
  source 1..50: mol_type = other DNA
ctccaacataaagatttaacattagcaaatgtgttatcaagaccacccag

SEQ ID NO: 29227 - DNA, 50 bp, synthetic construct
  source 1..50: mol_type = other DNA
gctacaggaattgtccgccggatcgatgatcttggcagaattgtcgttcc

SEQ ID NO: 29228 - DNA, 50 bp, synthetic construct
  source 1..50: mol_type = other DNA
ggggttcgaatccccttagctccaccctcggctccacagaacagaacgcc

SEQ ID NO: 29229 - DNA, 50 bp, synthetic construct
  source 1..50: mol_type = other DNA
atcaaaggtcattgtatttgagctatagcctatattcaagggtcattgcg

SEQ ID NO: 29230 - DNA, 50 bp, synthetic construct
  source 1..50: mol_type = other DNA
ctaatatgcaggagggggttcacttatgtgataccaggttttcacatttt

SEQ ID NO: 29231 - DNA, 50 bp, synthetic construct
  source 1..50: mol_type = other DNA
cgaggaggcaaatactttcaacggtaccgtctctacgtgcgtcgtatgag

SEQ ID NO: 29232 - DNA, 50 bp, synthetic construct
  source 1..50: mol_type = other DNA
tatcctcctatgcatactgccgaaatcgcacctatgcatacagcagagca

SEQ ID NO: 29233 - DNA, 50 bp, synthetic construct
  source 1..50: mol_type = other DNA
aacgatacctcaggcaacccatttcctgtttcccatttagaaattgtctt

SEQ ID NO: 29234 - DNA, 50 bp, synthetic construct
  source 1..50: mol_type = other DNA
gaaggcggcatgatgctgcggcaaaaggtggacttgcgcgttccctgcgc

SEQ ID NO: 29235 - DNA, 50 bp, synthetic construct
  source 1..50: mol_type = other DNA
gtcttattgttcccacaaatgaagtcccacatatgaagctgacaaaagat

SEQ ID NO: 29236 - DNA, 50 bp, synthetic construct
  source 1..50: mol_type = other DNA
taccctcctatgcatatagtcgaaatcgcacctatgcatacagcagagca

SEQ ID NO: 29237 - DNA, 50 bp, synthetic construct
  source 1..50: mol_type = other DNA
ctggtcgaactcgtcgatgttgattaattgatcagaaagaaacgtcccag

SEQ ID NO: 29238 - DNA, 50 bp, synthetic construct
  source 1..50: mol_type = other DNA
accttatctgacatagaaatagcttctgatatatcatgggtaactaatat

SEQ ID NO: 29239 - DNA, 50 bp, synthetic construct
  source 1..50: mol_type = other DNA
tttagagctgatgttctgtttaccatggttgttatacctgatgttatatt

SEQ ID NO: 29240 - DNA, 50 bp, synthetic construct
  source 1..50: mol_type = other DNA
attcatccgttttcggatggaaaggtatcgcctgatggtaatggcagagt

SEQ ID NO: 29241 - DNA, 50 bp, synthetic construct
  source 1..50: mol_type = other DNA
gactctcatatcatctgaaatgtcaatactttacggactctcatatcatc

SEQ ID NO: 29242 - DNA, 50 bp, synthetic construct
  source 1..50: mol_type = other DNA
cttcggtgcctggatcgttatcgatatcgatacagatatacctatatccg

SEQ ID NO: 29243 - DNA, 50 bp, synthetic construct
  source 1..50: mol_type = other DNA
atgaagaatgaaccgtaccataaataatactgatacggagaaccgtacca

SEQ ID NO: 29244 - DNA, 50 bp, synthetic construct
  source 1..50: mol_type = other DNA
gcgtttcggatcaatacgggggctcccagcgccttatcataagtgatgcg

SEQ ID NO: 29245 - DNA, 50 bp, synthetic construct
  source 1..50: mol_type = other DNA
gttcaagtcccgcttcgagtactctaagggtacttgattagagctccatg

SEQ ID NO: 29246 - DNA, 50 bp, synthetic construct
  source 1..50: mol_type = other DNA
aaaaatataaatgtgtaaagaaatccattattttagatgcttttgtctta

SEQ ID NO: 29247 - DNA, 50 bp, synthetic construct
  source 1..50: mol_type = other DNA
aataattgtcggtgcaacataccaccattttaggaaacccgataattacg

SEQ ID NO: 29248 - DNA, 50 bp, synthetic construct
  source 1..50: mol_type = other DNA
ctgttggcgtgtttcttatcctattttttatccattcccctccaatgggc

SEQ ID NO: 29249 - DNA, 50 bp, synthetic construct
  source 1..50: mol_type = other DNA
aaggaggcaatcgatacattagtcaaacatatggaagataagcggaacga

SEQ ID NO: 29250 - DNA, 50 bp, synthetic construct
  source 1..50: mol_type = other DNA
ctttttggagcgtggtaaataaacatgttaaatagtcaggtcgtacagca

SEQ ID NO: 29251 - DNA, 50 bp, synthetic construct
  source 1..50: mol_type = other DNA
ttaacatcatagtgatacgtttatttattttttaagtttactgtgattaa

SEQ ID NO: 29252 - DNA, 50 bp, synthetic construct
  source 1..50: mol_type = other DNA
aaaataatcatcgcatcccgtatgatcatagcatctccgaagctgaaaaa

SEQ ID NO: 29253 - DNA, 50 bp, synthetic construct
  source 1..50: mol_type = other DNA
attgccgtactttttcctgcgccgttttttcctacaaaccctgtaattct

SEQ ID NO: 29254 - DNA, 50 bp, synthetic construct
  source 1..50: mol_type = other DNA
ccggctttgatgctgtgattatgacagccaaatctataattcaaaggagg

SEQ ID NO: 29255 - DNA, 50 bp, synthetic construct
  source 1..50: mol_type = other DNA
tctatatttgggataaaagaaagattggctttttttgtccaaaagaaaac

SEQ ID NO: 29256 - DNA, 50 bp, synthetic construct
  source 1..50: mol_type = other DNA
ataacggaattttatatcttgatgaactgccagagtacagccgtaacgta

SEQ ID NO: 29257 - DNA, 50 bp, synthetic construct
  source 1..50: mol_type = other DNA
gcgactaattccacgtgcgttgactgtgatacgtttgtgggaatagatcg

SEQ ID NO: 29258 - DNA, 50 bp, synthetic construct
  source 1..50: mol_type = other DNA
aagataaaagagggatttcgtaaagggaaaagaagtccttttattttgaa

SEQ ID NO: 29259 - DNA, 50 bp, synthetic construct
  source 1..50: mol_type = other DNA
ttatggtaaggttctccgtatcacttatgatacggttctcctttcaatat

SEQ ID NO: 29260 - DNA, 50 bp, synthetic construct
  source 1..50: mol_type = other DNA
gtagtcataagtttagcatgttctatagcatgtccagtatctaataaaat

SEQ ID NO: 29261 - DNA, 50 bp, synthetic construct
  source 1..50: mol_type = other DNA
gcctccaagtgtgtggaaaatgctatagcaaacgaaatcctgatgcatct

SEQ ID NO: 29262 - DNA, 50 bp, synthetic construct
  source 1..50: mol_type = other DNA
aaggcgatatcaaaatgggaacgtggactgagtctcccagatatcgcctt

SEQ ID NO: 29263 - DNA, 50 bp, synthetic construct
  source 1..50: mol_type = other DNA
ttttacttatgatacgcctctgcgtatgcttctccacgcataatcttaaa

SEQ ID NO: 29264 - DNA, 50 bp, synthetic construct
  source 1..50: mol_type = other DNA
ttaagattatgcgaggagaagcatatacgctgaagcttatcataagtaat

SEQ ID NO: 29265 - DNA, 50 bp, synthetic construct
  source 1..50: mol_type = other DNA
gaaccgggcggctgtccagaatcatctaataagtattaccctattaacgc

SEQ ID NO: 29266 - DNA, 50 bp, synthetic construct
  source 1..50: mol_type = other DNA
acgctgtgcaccggacggctatcgaggatcacccggttaacggcgcgctg

SEQ ID NO: 29267 - DNA, 50 bp, synthetic construct
  source 1..50: mol_type = other DNA
ttttatttgtgatacgcttctgcttatgcttctccccgcatgattttaaa

SEQ ID NO: 29268 - DNA, 50 bp, synthetic construct
  source 1..50: mol_type = other DNA
agcgtatcataagtgatgcggtttttataaggttcttcttattagtgaaa

SEQ ID NO: 29269 - DNA, 50 bp, synthetic construct
  source 1..50: mol_type = other DNA
cagccccgtccctgattacatatccggacttcctccagagtcagaggctt

SEQ ID NO: 29270 - DNA, 50 bp, synthetic construct
  source 1..50: mol_type = other DNA
ttatctacagcattaccgaaactgctcggtttctatcatgctgtaggcat

SEQ ID NO: 29271 - DNA, 50 bp, synthetic construct
  source 1..50: mol_type = other DNA
agtatatcataccagatacaacatacaagaaggactatgaaatatataca

SEQ ID NO: 29272 - DNA, 50 bp, synthetic construct
  source 1..50: mol_type = other DNA
ggtaacttctttacgacgaccaaaggggctaggtgattaaagattaaaga

SEQ ID NO: 29273 - DNA, 50 bp, synthetic construct
  source 1..50: mol_type = other DNA
atattaagacataactttattttttaaaaaataatttattattttagtaa

SEQ ID NO: 29274 - DNA, 50 bp, synthetic construct
  source 1..50: mol_type = other DNA
tatgcgtggagaagcatatcataaatcaactgataagcagaggcgtatca

SEQ ID NO: 29275 - DNA, 50 bp, synthetic construct
  source 1..50: mol_type = other DNA
ataatcatccatccggtgatgtattaaaacatcacgccctcacaagaaga

SEQ ID NO: 29276 - DNA, 50 bp, synthetic construct
  source 1..50: mol_type = other DNA
atttattgatagtgttggttttgattgttgaagtacctcattttctaatg

SEQ ID NO: 29277 - DNA, 50 bp, synthetic construct
  source 1..50: mol_type = other DNA
gcggcgctcgcggatatgcgtataggaataatcctgcacgggagggcttt

SEQ ID NO: 29278 - DNA, 50 bp, synthetic construct
  source 1..50: mol_type = other DNA
ttttctagttttttaaaaaattttgcgtgtattgggacaaaaaaagacca

SEQ ID NO: 29279 - DNA, 50 bp, synthetic construct
  source 1..50: mol_type = other DNA
gcatttaagattatgcgtggagaagcttatcataaataaaactaaaaatt

SEQ ID NO: 29280 - DNA, 50 bp, synthetic construct
  source 1..50: mol_type = other DNA
gctgccgcccctggaacccctggcgcgtcgtgggcgaggatcgcggcacc

SEQ ID NO: 29281 - DNA, 50 bp, synthetic construct
  source 1..50: mol_type = other DNA
ttttgtatttgggctgtgtgaatagctacttgcggcgctggaaaaacaga

SEQ ID NO: 29282 - DNA, 50 bp, synthetic construct
  source 1..50: mol_type = other DNA
ctggaggacggccgggtgaccattgcgcggtcggacctaatggcctcaag

SEQ ID NO: 29283 - DNA, 50 bp, synthetic construct
  source 1..50: mol_type = other DNA
tgattaagtaatccaaataatccattaagaatattcctcgaagttaatat

SEQ ID NO: 29284 - DNA, 50 bp, synthetic construct
  source 1..50: mol_type = other DNA
aactaaaaaatgataagcccaagttttaactttctttgactttttttatt

SEQ ID NO: 29285 - DNA, 50 bp, synthetic construct
  source 1..50: mol_type = other DNA
ttcaaccggtattcattaatattatggccatataagctttaacggttgaa

SEQ ID NO: 29286 - DNA, 50 bp, synthetic construct
  source 1..50: mol_type = other DNA
gcgatggcggcggtgacgaagcacgcccgggtgcgggcacccgccatcgc

SEQ ID NO: 29287 - DNA, 50 bp, synthetic construct
  source 1..50: mol_type = other DNA
gttgatgacgggaaagaggaccgagcgctgtcatccgccccgtgacgcac

SEQ ID NO: 29288 - DNA, 50 bp, synthetic construct
  source 1..50: mol_type = other DNA
gccgcactggtcatgcagatcatcatccggaatccgcacacccggacagg

SEQ ID NO: 29289 - DNA, 50 bp, synthetic construct
  source 1..50: mol_type = other DNA
ttgacaactggggtattttcatacccacataatgatggttatgtggtcaa

SEQ ID NO: 29290 - DNA, 50 bp, synthetic construct
  source 1..50: mol_type = other DNA
acgccgagattgagatttgggtagcccttgccggcagaccatctcgacgc

SEQ ID NO: 29291 - DNA, 50 bp, synthetic construct
  source 1..50: mol_type = other DNA
acttgtattcttcttaaaaacgaaaggtcgattataatctcgacctttta

SEQ ID NO: 29292 - DNA, 50 bp, synthetic construct
  source 1..50: mol_type = other DNA
agaaagtaaatgtctaagaggcacaaattactccagatcgattacttttt

SEQ ID NO: 29293 - DNA, 50 bp, synthetic construct
  source 1..50: mol_type = other DNA
atgtttgggtatggggaagtgaatcaatacaatcgccacagtacactcat

SEQ ID NO: 29294 - DNA, 50 bp, synthetic construct
  source 1..50: mol_type = other DNA
ttgcggcggatttccgtgcgtgcgatcgctatcaagctttttcaattgcg

SEQ ID NO: 29295 - DNA, 50 bp, synthetic construct
  source 1..50: mol_type = other DNA
ctctactagcctatatacaagcttatttcattgtatatataatattataa

SEQ ID NO: 29296 - DNA, 50 bp, synthetic construct
  source 1..50: mol_type = other DNA
agattatccggctgtcatcagtactgcaactcatgaatcctatatggact

SEQ ID NO: 29297 - DNA, 50 bp, synthetic construct
  source 1..50: mol_type = other DNA
tttcagcttcggagatgcgatgtttagcaatcggggatgcgatgattatt

SEQ ID NO: 29298 - DNA, 50 bp, synthetic construct
  source 1..50: mol_type = other DNA
ttttcaatttctctcaatataacatcagctctaaatatgaacattccact

SEQ ID NO: 29299 - DNA, 50 bp, synthetic construct
  source 1..50: mol_type = other DNA
gttgatctttttcctcagacgcatcatgttgagtgtgtgagtttattggt

SEQ ID NO: 29300 - DNA, 50 bp, synthetic construct
  source 1..50: mol_type = other DNA
gccccgcacccgcgcgcgggctggccggcaccggcgccctctctcgcgca

SEQ ID NO: 29301 - DNA, 50 bp, synthetic construct
  source 1..50: mol_type = other DNA
tcaagtcccgcttcgagtactctaagggtactcgattaagctctgtgaat

SEQ ID NO: 29302 - DNA, 50 bp, synthetic construct
  source 1..50: mol_type = other DNA
ggtccctgtcttattgttcaatgcgccattgagtgcggaagatgggactt

SEQ ID NO: 29303 - DNA, 50 bp, synthetic construct
  source 1..50: mol_type = other DNA
ccggcaggtattgctgatgtgcgatactaaacataagcattggcatctgt

SEQ ID NO: 29304 - DNA, 50 bp, synthetic construct
  source 1..50: mol_type = other DNA
ctgtcaatatcaggcaatgattcaccgctttcccattttgctacagattg

SEQ ID NO: 29305 - DNA, 50 bp, synthetic construct
  source 1..50: mol_type = other DNA
tttgccggaatttgaaaagcatactctgccagcgctatcatccatgaaaa

SEQ ID NO: 29306 - DNA, 50 bp, synthetic construct
  source 1..50: mol_type = other DNA
aatatattaaaaaaaacatcctttaattagggtgtttttttaaagaagtt

SEQ ID NO: 29307 - DNA, 50 bp, synthetic construct
  source 1..50: mol_type = other DNA
atttcatatttgggattccctaatacgttcggatttccgggatggcttat

SEQ ID NO: 29308 - DNA, 50 bp, synthetic construct
  source 1..50: mol_type = other DNA
aaattgtttttacagttagaaaatatacccagataaggtaaaaacactaa

SEQ ID NO: 29309 - DNA, 50 bp, synthetic construct
  source 1..50: mol_type = other DNA
gccgatgactgcaatgaccagagcttccgcctgtgattgcgttcatgggc

SEQ ID NO: 29310 - DNA, 50 bp, synthetic construct
  source 1..50: mol_type = other DNA
atttattattccaacctctaataatattattccttattaaaataatatcc

SEQ ID NO: 29311 - DNA, 50 bp, synthetic construct
  source 1..50: mol_type = other DNA
tttcaaaagatattaccttttgagacaagaatggaatctctcatcataaa

SEQ ID NO: 29312 - DNA, 50 bp, synthetic construct
  source 1..50: mol_type = other DNA
agtatggttcagcaagatgggttgcaaaacgcttcttggggaacgagaaa

SEQ ID NO: 29313 - DNA, 50 bp, synthetic construct
  source 1..50: mol_type = other DNA
gccaacactgtaattttgctgatacatctaatgtttttatggcagttggc

SEQ ID NO: 29314 - DNA, 50 bp, synthetic construct
  source 1..50: mol_type = other DNA
tatttcatatttgggattccctaatacgtttgggtttccgggatggctta

SEQ ID NO: 29315 - DNA, 50 bp, synthetic construct
  source 1..50: mol_type = other DNA
ttcttggtggaggcaataggaacctaagacctctctggtggagctaaggg

SEQ ID NO: 29316 - DNA, 50 bp, synthetic construct
  source 1..50: mol_type = other DNA
tttatacctggaactgtaacggttgatggagtatctgtaccaggagtaga

SEQ ID NO: 29317 - DNA, 50 bp, synthetic construct
  source 1..50: mol_type = other DNA
attatcttagctacagtttccacatgtgtagaatgagggaacatatctac

SEQ ID NO: 29318 - DNA, 50 bp, synthetic construct
  source 1..50: mol_type = other DNA
ctacctatatcaggaatagattctccactttcccattttgctattgattg

SEQ ID NO: 29319 - DNA, 50 bp, synthetic construct
  source 1..50: mol_type = other DNA
taaaaaggttatgtcaggatagcttttcccatttagatacagaagcttta

SEQ ID NO: 29320 - DNA, 50 bp, synthetic construct
  source 1..50: mol_type = other DNA
caatcaatagcaaaatgggaaagtggagaatctattcctgatataggtag

SEQ ID NO: 29321 - DNA, 50 bp, synthetic construct
  source 1..50: mol_type = other DNA
aacattactattgcttgattatcttaccgtctccacatgtgtagaatgag

SEQ ID NO: 29322 - DNA, 50 bp, synthetic construct
  source 1..50: mol_type = other DNA
caaacaatatctaaatgggaacaagggctgtcagttcccgattctgatat

SEQ ID NO: 29323 - DNA, 50 bp, synthetic construct
  source 1..50: mol_type = other DNA
attaagtttaatatttcctcaactttacctgtcccaatgtaaaatgctct

SEQ ID NO: 29324 - DNA, 50 bp, synthetic construct
  source 1..50: mol_type = other DNA
attctctaataagtttaactacagtccacatgtggcgtatttgggaacat

SEQ ID NO: 29325 - DNA, 50 bp, synthetic construct
  source 1..50: mol_type = other DNA
aaatacgccacattgtgagacggtagcaagttgagactgtagttaaactt

SEQ ID NO: 29326 - DNA, 50 bp, synthetic construct
  source 1..50: mol_type = other DNA
ttcagtatattatattttttcataattaaaatcagttattgaatatgcga

SEQ ID NO: 29327 - DNA, 50 bp, synthetic construct
  source 1..50: mol_type = other DNA
gtcatttacataaaatttcatcggtgccccaggtgattctgcgaaatgac

SEQ ID NO: 29328 - DNA, 50 bp, synthetic construct
  source 1..50: mol_type = other DNA
ttactcccactcaactgttgcagttggttgccggcggcttggaggtgcag

SEQ ID NO: 29329 - DNA, 50 bp, synthetic construct
  source 1..50: mol_type = other DNA
aatccaatacagacgggaagaagatttagatacattttccgtattggatg

SEQ ID NO: 29330 - DNA, 50 bp, synthetic construct
  source 1..50: mol_type = other DNA
ccttcaccagattccacttttacatttgtaaacagatgccttttttcagc

SEQ ID NO: 29331 - DNA, 50 bp, synthetic construct
  source 1..50: mol_type = other DNA
aaatcatggctcatcttctgttgcccaatatctattatgtgtcaatgccc

SEQ ID NO: 29332 - DNA, 50 bp, synthetic construct
  source 1..50: mol_type = other DNA
gcaaaaggctgatggaaaagaatctcatatcgtttccatgattgttttgc

SEQ ID NO: 29333 - DNA, 50 bp, synthetic construct
  source 1..50: mol_type = other DNA
tccatatcggtatctgcggcgagcatgcccgcgtcagcaccgaccatgag

SEQ ID NO: 29334 - DNA, 50 bp, synthetic construct
  source 1..50: mol_type = other DNA
tctcctgaaaatatgagatacatgttgatgttcaatcttttttaatgagt

SEQ ID NO: 29335 - DNA, 50 bp, synthetic construct
  source 1..50: mol_type = other DNA
gatttgggctgaccgtatttatatggtggccgcctatgcccgcgtctcca

SEQ ID NO: 29336 - DNA, 50 bp, synthetic construct
  source 1..50: mol_type = other DNA
tctgaatgacacagatatccggacgaaagctgatttctgcatcattcttt

SEQ ID NO: 29337 - DNA, 50 bp, synthetic construct
  source 1..50: mol_type = other DNA
tggtgctgacagaccatttttccgcataaaaaaatgcactgtcatttcat

SEQ ID NO: 29338 - DNA, 50 bp, synthetic construct
  source 1..50: mol_type = other DNA
tcaatatatttcagcaaagttttacatccagtttatcacgaatattacgg

SEQ ID NO: 29339 - DNA, 50 bp, synthetic construct
  source 1..50: mol_type = other DNA
gaaatcaccgccgtttcttttattataaggggagaaagttcggcggtttt

SEQ ID NO: 29340 - DNA, 50 bp, synthetic construct
  source 1..50: mol_type = other DNA
ctaagtattcattctgtgtatttgcattgatcctgcaaaaattgacttag

SEQ ID NO: 29341 - DNA, 50 bp, synthetic construct
  source 1..50: mol_type = other DNA
cttttcttatgaaaaaggaattaatggtagtctattaatcactctgaaag

SEQ ID NO: 29342 - DNA, 50 bp, synthetic construct
  source 1..50: mol_type = other DNA
ggcttatcaaaaattttctttctatttgctttgcaaatctttgatatact

SEQ ID NO: 29343 - DNA, 50 bp, synthetic construct
  source 1..50: mol_type = other DNA
ttgcaagagacattgccgcccttcgcgctggggggcgtggtaggcctgct

SEQ ID NO: 29344 - DNA, 50 bp, synthetic construct
  source 1..50: mol_type = other DNA
accatgattgtgatgtacggcattaaagtatgcgacaccatcaaaaaggc

SEQ ID NO: 29345 - DNA, 50 bp, synthetic construct
  source 1..50: mol_type = other DNA
cagaactttctgcatcatacttttaataaagtggcatgggctcagtacct

SEQ ID NO: 29346 - DNA, 50 bp, synthetic construct
  source 1..50: mol_type = other DNA
ttatcccttcgctagccatttcaaattgagagctttaatttaattgataa

SEQ ID NO: 29347 - DNA, 50 bp, synthetic construct
  source 1..50: mol_type = other DNA
caatttgaatattccttagcgtacaaaaccggtatatattattatattat

SEQ ID NO: 29348 - DNA, 50 bp, synthetic construct
  source 1..50: mol_type = other DNA
ttgcactttgctttagtttttgatttgataaaaaggaaatcaaaaaagac

SEQ ID NO: 29349 - DNA, 50 bp, synthetic construct
  source 1..50: mol_type = other DNA
agaagtttgtaccttgccaactttcccccacaggcaaggtatcaacttcg

SEQ ID NO: 29350 - DNA, 50 bp, synthetic construct
  source 1..50: mol_type = other DNA
ggatatgcatggtcaggaatatatcgaccagctcgccaaaatgcgccgcc

SEQ ID NO: 29351 - DNA, 50 bp, synthetic construct
  source 1..50: mol_type = other DNA
tcgcggataactctataaacagttgcaactgttgatgcttgcatcagcaa

SEQ ID NO: 29352 - DNA, 50 bp, synthetic construct
  source 1..50: mol_type = other DNA
catcgccattgcgcactctctagcgcggcggccgtgcagttatcccgatc

SEQ ID NO: 29353 - DNA, 50 bp, synthetic construct
  source 1..50: mol_type = other DNA
ggagggcaagcctaatagtcaattataatggttcattaggcaagcctgcg

SEQ ID NO: 29354 - DNA, 50 bp, synthetic construct
  source 1..50: mol_type = other DNA
cacaacctgttcttttaggcaaccatgatggtctaaatgcttgctcagcg

SEQ ID NO: 29355 - DNA, 50 bp, synthetic construct
  source 1..50: mol_type = other DNA
ctgggccgcgcatagcagtagatgcaaccatgctcgcaaccacggtaggg

SEQ ID NO: 29356 - DNA, 50 bp, synthetic construct
  source 1..50: mol_type = other DNA
catcgccgcaaccagctgaaagcgcgcttcatgttcgtccagcggcggca

SEQ ID NO: 29357 - DNA, 50 bp, synthetic construct
  source 1..50: mol_type = other DNA
ccgacgaacagggcgatccgctctatagcaccaacataggaggatgtcgg

SEQ ID NO: 29358 - DNA, 50 bp, synthetic construct
  source 1..50: mol_type = other DNA
cttaattgtggttgtgcaaagtttataaactttgcctgtccttctaaaac

SEQ ID NO: 29359 - DNA, 50 bp, synthetic construct
  source 1..50: mol_type = other DNA
cattggacagaacacaaatctacaattgtaaattggtgtgacggaagttt

SEQ ID NO: 29360 - DNA, 50 bp, synthetic construct
  source 1..50: mol_type = other DNA
agggttcaaatccctatctctccgccccgccacatttagaaaaaagccgt

SEQ ID NO: 29361 - DNA, 50 bp, synthetic construct
  source 1..50: mol_type = other DNA
cagcgaatatcactatatagtatctaccaacaatattactcaacaatttg

SEQ ID NO: 29362 - DNA, 50 bp, synthetic construct
  source 1..50: mol_type = other DNA
aagcactggttattcctaccaatgaaccaacgaagagtgggtaatcgctc

SEQ ID NO: 29363 - DNA, 50 bp, synthetic construct
  source 1..50: mol_type = other DNA
ttttatgtctttagataaacgctttactatgtaaatcattcatagtaaac

SEQ ID NO: 29364 - DNA, 50 bp, synthetic construct
  source 1..50: mol_type = other DNA
cagcgaatattactgtatagttgttaccaacaatattactcaacaattcg

SEQ ID NO: 29365 - DNA, 50 bp, synthetic construct
  source 1..50: mol_type = other DNA
ggatgtgtcagtaatcagggatgggcctattgccgtgtatcaacagatca

SEQ ID NO: 29366 - DNA, 50 bp, synthetic construct
  source 1..50: mol_type = other DNA
tacgaagcaatgtatgatacggaaggctccggctcatccgttttcttctg

SEQ ID NO: 29367 - DNA, 50 bp, synthetic construct
  source 1..50: mol_type = other DNA
tcaatctccgccgtggttgcctgatatgcagccgcccaatcggaggaaga

SEQ ID NO: 29368 - DNA, 50 bp, synthetic construct
  source 1..50: mol_type = other DNA
ctgctcgtcagagtccgtagacacgccagtctttgaaattgcggatcatg

SEQ ID NO: 29369 - DNA, 50 bp, synthetic construct
  source 1..50: mol_type = other DNA
gatttaattaaacctctttaagggcattcttcaagaggaattggaaagtg

SEQ ID NO: 29370 - DNA, 50 bp, synthetic construct
  source 1..50: mol_type = other DNA
ttatagagccttgatttctgatccatagcaagtaaataaagcacctaagc

SEQ ID NO: 29371 - DNA, 50 bp, synthetic construct
  source 1..50: mol_type = other DNA
tgagtgtttccggctccgatctggtacctttgaggagatgttcgaactca

SEQ ID NO: 29372 - DNA, 50 bp, synthetic construct
  source 1..50: mol_type = other DNA
atttttacggaagaaactgaaggaaattcttctgtttcttgatgcaattc

SEQ ID NO: 29373 - DNA, 50 bp, synthetic construct
  source 1..50: mol_type = other DNA
gacttgattttcaaaactattcaactatgaatattacaaaaaatcagttg

SEQ ID NO: 29374 - DNA, 50 bp, synthetic construct
  source 1..50: mol_type = other DNA
gacatattattatgtgatgagcccacaggagcacttgattatcacacatc

SEQ ID NO: 29375 - DNA, 50 bp, synthetic construct
  source 1..50: mol_type = other DNA
accatggtccaacggccagactgaagatagtgtccgagatcgaccacggt

SEQ ID NO: 29376 - DNA, 50 bp, synthetic construct
  source 1..50: mol_type = other DNA
cgaaacgctcctgattggcaggagatcgcgggcggcccgctagtttccgg

SEQ ID NO: 29377 - DNA, 50 bp, synthetic construct
  source 1..50: mol_type = other DNA
ccggcggacgtgtttcccatttacgaggaggtgggtcttgccgacgccga

SEQ ID NO: 29378 - DNA, 50 bp, synthetic construct
  source 1..50: mol_type = other DNA
taataactttattagtatcttcgtctgctaaaatatttataaggttatta

SEQ ID NO: 29379 - DNA, 50 bp, synthetic construct
  source 1..50: mol_type = other DNA
gaaaatagtcgcaagctgttaaaattcttccacagcttgccctctaattc

SEQ ID NO: 29380 - DNA, 50 bp, synthetic construct
  source 1..50: mol_type = other DNA
tagccatggtgatcccgaccaatgaaccaacgaagaattcgtgattgccc

SEQ ID NO: 29381 - DNA, 50 bp, synthetic construct
  source 1..50: mol_type = other DNA
cagaactaacccattatgcgactcaaaagaagaaaaattacttatgtcag

SEQ ID NO: 29382 - DNA, 50 bp, synthetic construct
  source 1..50: mol_type = other DNA
accatctgctacgccttcatacaggcctgcatgcaggccagcggcatggt

SEQ ID NO: 29383 - DNA, 50 bp, synthetic construct
  source 1..50: mol_type = other DNA
atataaaaatagaaaggctgtgcttttcccatgcctctctatttgttcta

SEQ ID NO: 29384 - DNA, 50 bp, synthetic construct
  source 1..50: mol_type = other DNA
cggacttgatcaagtcgtacaggtttatataccggacttgatcagcaccg

SEQ ID NO: 29385 - DNA, 50 bp, synthetic construct
  source 1..50: mol_type = other DNA
aacctttacattaatgcgaaagtattttaaatcgctctataggcgggggt

SEQ ID NO: 29386 - DNA, 50 bp, synthetic construct
  source 1..50: mol_type = other DNA
atcttgcagaacttctagccatccagctttggggagaatttctggcggtt

SEQ ID NO: 29387 - DNA, 50 bp, synthetic construct
  source 1..50: mol_type = other DNA
cgacggcagtctttgcgccagcatcgcgcgccgccgcgtggatgccggct

SEQ ID NO: 29388 - DNA, 50 bp, synthetic construct
  source 1..50: mol_type = other DNA
ggtgttcaggccttcactttactggaaatgcttctggttttgttaatcat

SEQ ID NO: 29389 - DNA, 50 bp, synthetic construct
  source 1..50: mol_type = other DNA
acactttcatggcagtaatatatttgccttaactactcccactcaacggt

SEQ ID NO: 29390 - DNA, 50 bp, synthetic construct
  source 1..50: mol_type = other DNA
acatcatgtggagacggtagcgttatgatgaacaagttgagtgcgtagtg

SEQ ID NO: 29391 - DNA, 50 bp, synthetic construct
  source 1..50: mol_type = other DNA
agtcggctggcgccaaattgaccgtgtgatccgtttggcgggaaactgaa

SEQ ID NO: 29392 - DNA, 50 bp, synthetic construct
  source 1..50: mol_type = other DNA
gggcgatcacgaattcctcgttggttcattggttggcaccaccaacgcta

SEQ ID NO: 29393 - DNA, 50 bp, synthetic construct
  source 1..50: mol_type = other DNA
aagattccgggctacgacgaaacaatccgctcgacgttctgtacgatctt

SEQ ID NO: 29394 - DNA, 50 bp, synthetic construct
  source 1..50: mol_type = other DNA
gtgctttgacgaaaatccgtttgatttctcgcgcattttcgcttcaaacg

SEQ ID NO: 29395 - DNA, 50 bp, synthetic construct
  source 1..50: mol_type = other DNA
gcgggatgattgatgctctgtcctatggaacggatcgagggtcatcccca

SEQ ID NO: 29396 - DNA, 50 bp, synthetic construct
  source 1..50: mol_type = other DNA
cttggttctgccgcaacttctgaccggcaagtgagagcggcagtcccatg

SEQ ID NO: 29397 - DNA, 50 bp, synthetic construct
  source 1..50: mol_type = other DNA
atctttaaaggctggtagcaattgatcaagcttgaagaggagttaaatac

SEQ ID NO: 29398 - DNA, 50 bp, synthetic construct
  source 1..50: mol_type = other DNA
ctattatcaagactatcgtaaggggtggatgcttccaaatgagattcgca

SEQ ID NO: 29399 - DNA, 50 bp, synthetic construct
  source 1..50: mol_type = other DNA
agcgcgcagggggcaaaaaaacgcgcgccatttcttcccctctgcacgac

SEQ ID NO: 29400 - DNA, 50 bp, synthetic construct
  source 1..50: mol_type = other DNA
tttatataatctttcttgaaaaaattattttgaacacattcgtttatatt

SEQ ID NO: 29401 - DNA, 50 bp, synthetic construct
  source 1..50: mol_type = other DNA
gccagtcaaggttattacgccaaagtgttcgtctgcaaaccagaatcgtc

SEQ ID NO: 29402 - DNA, 50 bp, synthetic construct
  source 1..50: mol_type = other DNA
taaagaaccttaatactattgtccatacgataaagcaccttgaccacatg

SEQ ID NO: 29403 - DNA, 50 bp, synthetic construct
  source 1..50: mol_type = other DNA
cctgtaccaggaggaccaagaaaaagtaggttgtggtttccagccgccgc

SEQ ID NO: 29404 - DNA, 50 bp, synthetic construct
  source 1..50: mol_type = other DNA
aaataagtggcgggctacatgggacgtcacaaagtggcggagagataggg

SEQ ID NO: 29405 - DNA, 50 bp, synthetic construct
  source 1..50: mol_type = other DNA
agcatttccaatgatctctcccgcatgtactatgataaatataaaataat

SEQ ID NO: 29406 - DNA, 50 bp, synthetic construct
  source 1..50: mol_type = other DNA
cggcggtttggcgctgataaacttataggttgattcacatggcgcctccg

SEQ ID NO: 29407 - DNA, 50 bp, synthetic construct
  source 1..50: mol_type = other DNA
gccgctgcgggcaatcacaatttattgtttttagggcctccagggacggg

SEQ ID NO: 29408 - DNA, 50 bp, synthetic construct
  source 1..50: mol_type = other DNA
ccattggaccgacagtcagggcggtactaactagacggatggctcatttg

SEQ ID NO: 29409 - DNA, 50 bp, synthetic construct
  source 1..50: mol_type = other DNA
gggcgaccgcgggcgtctgccccaggggctcaacgtgccctagctcgatt

SEQ ID NO: 29410 - DNA, 50 bp, synthetic construct
  source 1..50: mol_type = other DNA
ctgtacaacaccttgatttagtttcaataccttcaacacgtgccaaccga

SEQ ID NO: 29411 - DNA, 50 bp, synthetic construct
  source 1..50: mol_type = other DNA
ttggggtggtttaccctaaatgatttatctaaggacattaaaatcacctc

SEQ ID NO: 29412 - DNA, 50 bp, synthetic construct
  source 1..50: mol_type = other DNA
tcggcggtttggctctgataaacataagtttattcacatggcgcctccgt

SEQ ID NO: 29413 - DNA, 50 bp, synthetic construct
  source 1..50: mol_type = other DNA
aagttgacggtgattaattgtatgatcttgcatggcacagtgatccgctt

SEQ ID NO: 29414 - DNA, 50 bp, synthetic construct
  source 1..50: mol_type = other DNA
aatttctctggtgcgtaagcatagaaatgaccaaaaccaccacccaagta

SEQ ID NO: 29415 - DNA, 50 bp, synthetic construct
  source 1..50: mol_type = other DNA
ctatctctccgccatatagtgtcgatcgtcccatgtagcccgccacattt

SEQ ID NO: 29416 - DNA, 50 bp, synthetic construct
  source 1..50: mol_type = other DNA
gacgtatttgccagcaggcttttgtacaaatcgtttatgtataataagga

SEQ ID NO: 29417 - DNA, 50 bp, synthetic construct
  source 1..50: mol_type = other DNA
aaatgtggcgggctacatgggacgatcgacactgtatggcggagagatag

SEQ ID NO: 29418 - DNA, 50 bp, synthetic construct
  source 1..50: mol_type = other DNA
gtatgcaagacatccattggactgagacggctcttttggttatttcccat

SEQ ID NO: 29419 - DNA, 50 bp, synthetic construct
  source 1..50: mol_type = other DNA
agaggctatgttctgtagagaaccttgaccacatgccagccaaattttgt

SEQ ID NO: 29420 - DNA, 50 bp, synthetic construct
  source 1..50: mol_type = other DNA
tgcaagacatccattggactgaaagacagacggctcttttggttatttcc

SEQ ID NO: 29421 - DNA, 50 bp, synthetic construct
  source 1..50: mol_type = other DNA
tttaaattcctctccggccttgacatctcacctttaaaaaataatttaaa

SEQ ID NO: 29422 - DNA, 50 bp, synthetic construct
  source 1..50: mol_type = other DNA
aaataaccaaaagagccgtcccccttggcgtcagtccaatggatgtcttg

SEQ ID NO: 29423 - DNA, 50 bp, synthetic construct
  source 1..50: mol_type = other DNA
ggtagaggctatgttctgtagagaactttgaccacatgccagccaaattt

SEQ ID NO: 29424 - DNA, 50 bp, synthetic construct
  source 1..50: mol_type = other DNA
gagcgattacccactcttcgttggttcattggtaggaataaccagtgctt

SEQ ID NO: 29425 - DNA, 50 bp, synthetic construct
  source 1..50: mol_type = other DNA
caaatccctatctctccgccacattcatcccatgtagcccgccacattta

SEQ ID NO: 29426 - DNA, 50 bp, synthetic construct
  source 1..50: mol_type = other DNA
attcacatggtggtgccatatggatatgattgccaaaccacctagagatg

SEQ ID NO: 29427 - DNA, 50 bp, synthetic construct
  source 1..50: mol_type = other DNA
ctttttatcaaaccacaaaataacaactgttttttattggcaaaccacag

SEQ ID NO: 29428 - DNA, 50 bp, synthetic construct
  source 1..50: mol_type = other DNA
ggaaataaccaaaagagccgtctgtctctcagtccaatggatgtcttgca

SEQ ID NO: 29429 - DNA, 50 bp, synthetic construct
  source 1..50: mol_type = other DNA
ccgcctttttgtaatgagagacacaccatgtcagaagcaactaacagcga

SEQ ID NO: 29430 - DNA, 50 bp, synthetic construct
  source 1..50: mol_type = other DNA
tgggaaataaccaaaagagccgtctgtcttgcatacaaccatttttgaag

SEQ ID NO: 29431 - DNA, 50 bp, synthetic construct
  source 1..50: mol_type = other DNA
catgtggtcaaggtgctttatcgtatggacaatagtattaaggttctata

SEQ ID NO: 29432 - DNA, 50 bp, synthetic construct
  source 1..50: mol_type = other DNA
agcgtatctagggttcaaatccctatttagaaaaaagccgttgattatca

SEQ ID NO: 29433 - DNA, 50 bp, synthetic construct
  source 1..50: mol_type = other DNA
ccctacgtttccttagtcaactgtatacaattgtcatttgccaactgcgg

SEQ ID NO: 29434 - DNA, 50 bp, synthetic construct
  source 1..50: mol_type = other DNA
gtggtttaccctaaaagatgtataagattttatctaaggacattaaaatc

SEQ ID NO: 29435 - DNA, 50 bp, synthetic construct
  source 1..50: mol_type = other DNA
agccaaataacccgccgaagaagtaaatctttcaggtgcattattcttag

SEQ ID NO: 29436 - DNA, 50 bp, synthetic construct
  source 1..50: mol_type = other DNA
ggtgcaacggcaccaagcccaatggaaatggtgctaatggccgctggtgg

SEQ ID NO: 29437 - DNA, 50 bp, synthetic construct
  source 1..50: mol_type = other DNA
aaatttggctggcatgtggtcaaagttctctacagaacatagcctctacc

SEQ ID NO: 29438 - DNA, 50 bp, synthetic construct
  source 1..50: mol_type = other DNA
ggtttttcctgtaccaggaggaccaaagtagtaggttgtggtttccagcc

SEQ ID NO: 29439 - DNA, 50 bp, synthetic construct
  source 1..50: mol_type = other DNA
tgccagaaccttatttactttggtttcaaaaacaaggttttccagaaggg

SEQ ID NO: 29440 - DNA, 50 bp, synthetic construct
  source 1..50: mol_type = other DNA
tatgttctgtagagaaccttagttataaccgatacaataccttgaccaca

SEQ ID NO: 29441 - DNA, 50 bp, synthetic construct
  source 1..50: mol_type = other DNA
cgcaaatgctatatgtatttcccccatatgaattataaaaagtatttgat

SEQ ID NO: 29442 - DNA, 50 bp, synthetic construct
  source 1..50: mol_type = other DNA
tttggttggcatgtggtcaaggtattaactaaggttctctacagaacata

SEQ ID NO: 29443 - DNA, 50 bp, synthetic construct
  source 1..50: mol_type = other DNA
ttctgtagagaaccttagtaacgtgtatagtactttgaccacatgccaac

SEQ ID NO: 29444 - DNA, 50 bp, synthetic construct
  source 1..50: mol_type = other DNA
ggccagccctttttatcaaaccattattcgcaaaccacagcaaatattcc

SEQ ID NO: 29445 - DNA, 50 bp, synthetic construct
  source 1..50: mol_type = other DNA
aaataagtggcgggcagcatgggacgtcacaaagtggcggagagataggg

SEQ ID NO: 29446 - DNA, 50 bp, synthetic construct
  source 1..50: mol_type = other DNA
ctaagtgataatgaaaagctacaaattaatgacttcctattatcctttag

SEQ ID NO: 29447 - DNA, 50 bp, synthetic construct
  source 1..50: mol_type = other DNA
accaaaagagccgtctgtctaatgtacatttgctttcagtccaatggatg

SEQ ID NO: 29448 - DNA, 50 bp, synthetic construct
  source 1..50: mol_type = other DNA
catccattggactgaaagaaaatgtacattagacagacggctcttttggt

SEQ ID NO: 29449 - DNA, 50 bp, synthetic construct
  source 1..50: mol_type = other DNA
agaggctatgttctgtagagaaccttgaccacatgccaaccaaattttgt

SEQ ID NO: 29450 - DNA, 50 bp, synthetic construct
  source 1..50: mol_type = other DNA
catatcggcagttaattgaatatctggatatacgattcaagatggaaaag

SEQ ID NO: 29451 - DNA, 50 bp, synthetic construct
  source 1..50: mol_type = other DNA
taaaattagcatttcaggttcatcatacgctgatacaaataagaatttag

SEQ ID NO: 29452 - DNA, 50 bp, synthetic construct
  source 1..50: mol_type = other DNA
ataaccgcttgaattgtatatttgaaagatatgagttatcaagctgttat

SEQ ID NO: 29453 - DNA, 50 bp, synthetic construct
  source 1..50: mol_type = other DNA
atgttctgtagagaacctttattctaaacgtatcagagtctgtagagtac

SEQ ID NO: 29454 - DNA, 50 bp, synthetic construct
  source 1..50: mol_type = other DNA
agatgtatggcagtcgctaccttgttaacgttctgtccgccatttccttg

SEQ ID NO: 29455 - DNA, 50 bp, synthetic construct
  source 1..50: mol_type = other DNA
ggtagaggctatgttctgtagagaaccttgaccacatgccagccaaattt

SEQ ID NO: 29456 - DNA, 50 bp, synthetic construct
  source 1..50: mol_type = other DNA
ctttgggtatgtttactatgaaagatctaaagacataaaactgaatacgc

SEQ ID NO: 29457 - DNA, 50 bp, synthetic construct
  source 1..50: mol_type = other DNA
atggctgactgacctgctttcagctcgcacagtaagtgatccaataaaat

SEQ ID NO: 29458 - DNA, 50 bp, synthetic construct
  source 1..50: mol_type = other DNA
aggcggtttggcaatcataaacttatatgtttatccatatggcaccacca

SEQ ID NO: 29459 - DNA, 50 bp, synthetic construct
  source 1..50: mol_type = other DNA
ccgcagttggcaaatgacaattgtatacagttgactaaggaaacgtaggg

SEQ ID NO: 29460 - DNA, 50 bp, synthetic construct
  source 1..50: mol_type = other DNA
tttttatcaaaccaaaaagaatcaactgttttttattggcaaaccacagc

SEQ ID NO: 29461 - DNA, 50 bp, synthetic construct
  source 1..50: mol_type = other DNA
gtagagaaccttaattgtgttttcatgccaaccaaattttgttttgacca

SEQ ID NO: 29462 - DNA, 50 bp, synthetic construct
  source 1..50: mol_type = other DNA
atactaataagtaaagtaaacaacaaagtttggactttaatctcaagtat

SEQ ID NO: 29463 - DNA, 50 bp, synthetic construct
  source 1..50: mol_type = other DNA
agtaaaaatgaaagaactgcagtgagaaatgcagtagcgtcatttatggt

SEQ ID NO: 29464 - DNA, 50 bp, synthetic construct
  source 1..50: mol_type = other DNA
ttagaaaggctttataaagagcctttatagtctttcatcagcctttgttt

SEQ ID NO: 29465 - DNA, 50 bp, synthetic construct
  source 1..50: mol_type = other DNA
gccgctcggccagccctttttatcaaaccacagcaaatattcctcaggta

SEQ ID NO: 29466 - DNA, 50 bp, synthetic construct
  source 1..50: mol_type = other DNA
tttttatcaaaccaaaaaaaatcaactgttttttattggcaaaccacagc

SEQ ID NO: 29467 - DNA, 50 bp, synthetic construct
  source 1..50: mol_type = other DNA
aaatccgccggagccaaattgaccgtaatgcgcttggctggaaactggaa

SEQ ID NO: 29468 - DNA, 50 bp, synthetic construct
  source 1..50: mol_type = other DNA
aaatttggctggcatgtggtcaaggttctatacagaacatagcctctacc

SEQ ID NO: 29469 - DNA, 50 bp, synthetic construct
  source 1..50: mol_type = other DNA
gtaccaggaggaccaaggaaaagcttaagtaggttgtggtttccagccgc

SEQ ID NO: 29470 - DNA, 50 bp, synthetic construct
  source 1..50: mol_type = other DNA
acaaaatttggctggcatgtggtcaaggttctctacagaacatagcctct

SEQ ID NO: 29471 - DNA, 50 bp, synthetic construct
  source 1..50: mol_type = other DNA
aaatgtggcgggctacatgggacgatcgacactatatggcggagagatag

SEQ ID NO: 29472 - DNA, 50 bp, synthetic construct
  source 1..50: mol_type = other DNA
cggcaggtgccaagttgacggtaatacagtgatccgcttggcaggaaatt

SEQ ID NO: 29473 - DNA, 50 bp, synthetic construct
  source 1..50: mol_type = other DNA
tgctgagcaatcacgaattcttcgttggttggaataaccatcgccactgc

SEQ ID NO: 29474 - DNA, 50 bp, synthetic construct
  source 1..50: mol_type = other DNA
ccattcgtttcattagtcaactgtatacaattgtcatttgccaactgtgg

SEQ ID NO: 29475 - DNA, 50 bp, synthetic construct
  source 1..50: mol_type = other DNA
gttaaatcgaactcttacaaaatcatgaacttataaacgttatggctaat

SEQ ID NO: 29476 - DNA, 50 bp, synthetic construct
  source 1..50: mol_type = other DNA
gcgggttcgattcccgtcatcggctcattttcaaccggtgttcctcgcgg

SEQ ID NO: 29477 - DNA, 50 bp, synthetic construct
  source 1..50: mol_type = other DNA
acagatacgactatgagcgcaatgacccttgatttacctcgccgctttcc

SEQ ID NO: 29478 - DNA, 50 bp, synthetic construct
  source 1..50: mol_type = other DNA
atctacttaatcctattttttgttttccccacgcatgatcttgaacgcgc

SEQ ID NO: 29479 - DNA, 50 bp, synthetic construct
  source 1..50: mol_type = other DNA
gcattgagcaaatgctctgctgtatgcatcgggggatattcttgtttatt

SEQ ID NO: 29480 - DNA, 50 bp, synthetic construct
  source 1..50: mol_type = other DNA
caaattggccctcaacgcctcggcccgccgtcgattttccactccgcttg

SEQ ID NO: 29481 - DNA, 50 bp, synthetic construct
  source 1..50: mol_type = other DNA
gctttagggctgaatggagtaaatctcatgcgcctaatggctacaaaaaa

SEQ ID NO: 29482 - DNA, 50 bp, synthetic construct
  source 1..50: mol_type = other DNA
atgtttgggtatggggaagtgaaccagtataatcgccatagtacacttat

SEQ ID NO: 29483 - DNA, 50 bp, synthetic construct
  source 1..50: mol_type = other DNA
aatcatgatttattatattgaaactttcgacaataagataagtgttgatt

SEQ ID NO: 29484 - DNA, 50 bp, synthetic construct
  source 1..50: mol_type = other DNA
aaagtgggctttgtttcgttgggctgccccaaggccttgactgatagcga

SEQ ID NO: 29485 - DNA, 50 bp, synthetic construct
  source 1..50: mol_type = other DNA
tgaaaatgctttgatttttcatcgcacactgtacaaagcaagtgttttta

SEQ ID NO: 29486 - DNA, 50 bp, synthetic construct
  source 1..50: mol_type = other DNA
ggggttggcgaggatgccgatgccgcagcgaccctacgccctggtgcccg

SEQ ID NO: 29487 - DNA, 50 bp, synthetic construct
  source 1..50: mol_type = other DNA
tgggaatgatgggtagcgtgagtcgccgtcgagatgagctgtcacgtcgc

SEQ ID NO: 29488 - DNA, 50 bp, synthetic construct
  source 1..50: mol_type = other DNA
gcgtgttcgattcacgctaagggctttcatttatcgtttccattttttcg

SEQ ID NO: 29489 - DNA, 50 bp, synthetic construct
  source 1..50: mol_type = other DNA
ccgtcgtcggctccactatgacgtcgacgtctaagtatccattttcccgc

SEQ ID NO: 29490 - DNA, 50 bp, synthetic construct
  source 1..50: mol_type = other DNA
tgatcatgctgtcgccgtagaacagctggtcgactccgagcgcatcctca

SEQ ID NO: 29491 - DNA, 50 bp, synthetic construct
  source 1..50: mol_type = other DNA
ctgaagtacgaaaccgagagcgtcaacatataattaaaatcgttcttcac

SEQ ID NO: 29492 - DNA, 50 bp, synthetic construct
  source 1..50: mol_type = other DNA
aggatggcaataatgccaatcaccaccatgagttcgataagcgtaaagcc

SEQ ID NO: 29493 - DNA, 50 bp, synthetic construct
  source 1..50: mol_type = other DNA
tattgcggacgcagaaatgtgcctcaggtaatagttctttcatatactcc

SEQ ID NO: 29494 - DNA, 50 bp, synthetic construct
  source 1..50: mol_type = other DNA
taaaccaatgattggcagtttatagaaatggagagtttcacgaagttttg

SEQ ID NO: 29495 - DNA, 50 bp, synthetic construct
  source 1..50: mol_type = other DNA
gagcatatactttgaggagggttgtgaaatacaatggaaagtatttgcag

SEQ ID NO: 29496 - DNA, 50 bp, synthetic construct
  source 1..50: mol_type = other DNA
ccagtgtttttatttcttattctgctaagaataaatttaaaaaacaacta

SEQ ID NO: 29497 - DNA, 50 bp, synthetic construct
  source 1..50: mol_type = other DNA
cagcagtactacgcccatccgcgcaaccagttctggccgctgatgggcgc

SEQ ID NO: 29498 - DNA, 50 bp, synthetic construct
  source 1..50: mol_type = other DNA
gagaactcttctcatttacacagatttatgtctcaataagtacccttctt

SEQ ID NO: 29499 - DNA, 50 bp, synthetic construct
  source 1..50: mol_type = other DNA
ctgaatcaaagcgtaaataacactatagtcttgtttattagtattgctca

SEQ ID NO: 29500 - DNA, 50 bp, synthetic construct
  source 1..50: mol_type = other DNA
ggaatgtcgatcgggtaacgcgggttgccggggtggctgatgatatgcac

SEQ ID NO: 29501 - DNA, 50 bp, synthetic construct
  source 1..50: mol_type = other DNA
ccagtttactcttggagttatataatttattatttgaaagaccaaaaaat

SEQ ID NO: 29502 - DNA, 50 bp, synthetic construct
  source 1..50: mol_type = other DNA
gtagcattagccataacgtttataagagtaaacttattgggcaccgcaat

SEQ ID NO: 29503 - DNA, 50 bp, synthetic construct
  source 1..50: mol_type = other DNA
ttcctaatacctctcatatagagtgcacactatacacgtagaaaatgtag

SEQ ID NO: 29504 - DNA, 50 bp, synthetic construct
  source 1..50: mol_type = other DNA
aatgttgttttattagatactggacatgctaagcttatgactacttatta

SEQ ID NO: 29505 - DNA, 50 bp, synthetic construct
  source 1..50: mol_type = other DNA
acttatttatggtatggttctccgtacggttcgttcttcattattctaaa

SEQ ID NO: 29506 - DNA, 50 bp, synthetic construct
  source 1..50: mol_type = other DNA
agtaaaaatatccattatttgtgatatccaaaacctcatttatttatgat

SEQ ID NO: 29507 - DNA, 50 bp, synthetic construct
  source 1..50: mol_type = other DNA
ggcaccaggagtacgaggtgtctttaaagacggtaggagtcccaggaggg

SEQ ID NO: 29508 - DNA, 50 bp, synthetic construct
  source 1..50: mol_type = other DNA
aggaaggtaatgaaatatatctaatattgtgtgtaatgaaatttgtctca

SEQ ID NO: 29509 - DNA, 50 bp, synthetic construct
  source 1..50: mol_type = other DNA
tggctttattcctttaccaagtgtataaacctcctttaccaggtttaaca

SEQ ID NO: 29510 - DNA, 50 bp, synthetic construct
  source 1..50: mol_type = other DNA
aatataacatcaggtataacaaccatggtaaacagaacatcagctctaaa

SEQ ID NO: 29511 - DNA, 50 bp, synthetic construct
  source 1..50: mol_type = other DNA
tattgtggttataacattctttgctgctgcggggttattgttcctttaag

SEQ ID NO: 29512 - DNA, 50 bp, synthetic construct
  source 1..50: mol_type = other DNA
taagtagtcataagcttagcatgtacatgtccagtatctaataaaacaac

SEQ ID NO: 29513 - DNA, 50 bp, synthetic construct
  source 1..50: mol_type = other DNA
ataaggaagggaatgaaatatatctatatgtaatgaaatttgtcttatag

SEQ ID NO: 29514 - DNA, 50 bp, synthetic construct
  source 1..50: mol_type = other DNA
ataggagtggataaggaaggaaatgaaatttgtcttatagatattttaag

SEQ ID NO: 29515 - DNA, 50 bp, synthetic construct
  source 1..50: mol_type = other DNA
tgataaggttctccgtatcagtattatttatggtacggttcattcttcat

SEQ ID NO: 29516 - DNA, 50 bp, synthetic construct
  source 1..50: mol_type = other DNA
gttgcagtttctttatataacttaattaatacatattgcagtttctttat

SEQ ID NO: 29517 - DNA, 50 bp, synthetic construct
  source 1..50: mol_type = other DNA
tggccttataggccctcttgttagttgtatttgatgaaacctggagttca

SEQ ID NO: 29518 - DNA, 50 bp, synthetic construct
  source 1..50: mol_type = other DNA
tgatacggttctccgtatcagtattatttatggtacggttcgttcttcat

SEQ ID NO: 29519 - DNA, 50 bp, synthetic construct
  source 1..50: mol_type = other DNA
taataagtagtcataagcttagcatgtccagtatctaataaaacaacatt

SEQ ID NO: 29520 - DNA, 50 bp, synthetic construct
  source 1..50: mol_type = other DNA
cttccaaccagcgtctggcttttttaaaaatagctcgcaattcttaatgc

SEQ ID NO: 29521 - DNA, 50 bp, synthetic construct
  source 1..50: mol_type = other DNA
ccaatcaccaccatgatatactgcttactgttgataatcaccatgagttc

SEQ ID NO: 29522 - DNA, 50 bp, synthetic construct
  source 1..50: mol_type = other DNA
gcgtgaactccaggtattattaaataactaacacgagggcctataaggcc

SEQ ID NO: 29523 - DNA, 50 bp, synthetic construct
  source 1..50: mol_type = other DNA
agtaaaaatatccattatttgtgatatccaaaacctcatttatttatggt

SEQ ID NO: 29524 - DNA, 50 bp, synthetic construct
  source 1..50: mol_type = other DNA
aattctatttatggtacgtttctccggttcgttcttcataattctaaatg

SEQ ID NO: 29525 - DNA, 50 bp, synthetic construct
  source 1..50: mol_type = other DNA
tagtaaataaaaagcctctattaaattatgcagagtcaaaataaaaagat

SEQ ID NO: 29526 - DNA, 50 bp, synthetic construct
  source 1..50: mol_type = other DNA
agaaatatttagaaacttttggtaaatataaaaattgatataaaaagagg

SEQ ID NO: 29527 - DNA, 50 bp, synthetic construct
  source 1..50: mol_type = other DNA
tcttttttcgttccccatgaagcgttaagattatgcactccatcttgctg

SEQ ID NO: 29528 - DNA, 50 bp, synthetic construct
  source 1..50: mol_type = other DNA
tgattatcttagctacagtttccacaagtctctatatgtgtagaatgagg

SEQ ID NO: 29529 - DNA, 50 bp, synthetic construct
  source 1..50: mol_type = other DNA
gcctaaagatgaaaaaaagaaaaatatcttttttttcttcgaatttttct

SEQ ID NO: 29530 - DNA, 50 bp, synthetic construct
  source 1..50: mol_type = other DNA
gctgaaagctatacgatgacgtcgttccttgggctagaaaggccttcaga

SEQ ID NO: 29531 - DNA, 50 bp, synthetic construct
  source 1..50: mol_type = other DNA
tcgccctcccaaccttatatccgcgctgcgatcttgccgtgggacacatt

SEQ ID NO: 29532 - DNA, 50 bp, synthetic construct
  source 1..50: mol_type = other DNA
caaagatggtataggtataaagaaggttaggagtttgtataggggatact

SEQ ID NO: 29533 - DNA, 50 bp, synthetic construct
  source 1..50: mol_type = other DNA
atgaatgttaaagaaaacatattagataggtggttttctttcattgactg

SEQ ID NO: 29534 - DNA, 50 bp, synthetic construct
  source 1..50: mol_type = other DNA
gggttctgggcccggccgatcaccacggtattggcgttgcgccacaggaa

SEQ ID NO: 29535 - DNA, 50 bp, synthetic construct
  source 1..50: mol_type = other DNA
accttatctgatatgcttattgcttcaccaatatcatgtgtaaccaaaat

SEQ ID NO: 29536 - DNA, 50 bp, synthetic construct
  source 1..50: mol_type = other DNA
tttcgtggtttttatggtggaggcgacgggtgtcgaacccgtgtccgaaa

SEQ ID NO: 29537 - DNA, 50 bp, synthetic construct
  source 1..50: mol_type = other DNA
aactgatggtgatgattaacaacgaaaacagtatatcatggtggtcatcg

SEQ ID NO: 29538 - DNA, 50 bp, synthetic construct
  source 1..50: mol_type = other DNA
gggttgtttcttttagaaggaggattctttcctggaaaaaggaaaaccgc

SEQ ID NO: 29539 - DNA, 50 bp, synthetic construct
  source 1..50: mol_type = other DNA
ggatgcgttcagaatccaccaggttttatttcttgatttttagggcagcc

SEQ ID NO: 29540 - DNA, 50 bp, synthetic construct
  source 1..50: mol_type = other DNA
ccctgttattctctaataagtttaacgctaccgtctcacaatgtggagta

SEQ ID NO: 29541 - DNA, 50 bp, synthetic construct
  source 1..50: mol_type = other DNA
aatttcctgccaagcggatcactgtattaccgtcaacttggcacctgctg

SEQ ID NO: 29542 - DNA, 50 bp, synthetic construct
  source 1..50: mol_type = other DNA
ttccaatttcctgccaagcggatcaccgtcaacttggcacctgccgatct

SEQ ID NO: 29543 - DNA, 50 bp, synthetic construct
  source 1..50: mol_type = other DNA
gtcttcgtccccatctcggcgacctcgtcgaggaacagcacaccgcggtg

SEQ ID NO: 29544 - DNA, 50 bp, synthetic construct
  source 1..50: mol_type = other DNA
aattataccactacaggattacttttgaggaactcttaagtggactaatt

SEQ ID NO: 29545 - DNA, 50 bp, synthetic construct
  source 1..50: mol_type = other DNA
caaaaattagatacaaagaatagactactcaaatttggacggtatttttc

SEQ ID NO: 29546 - DNA, 50 bp, synthetic construct
  source 1..50: mol_type = other DNA
gttggctattggcagactcgcatcggaggaacagtccatgaaacggaaac

SEQ ID NO: 29547 - DNA, 50 bp, synthetic construct
  source 1..50: mol_type = other DNA
gtacagcagggccggtttccatatggatttagggcagagtgaggctgtac

SEQ ID NO: 29548 - DNA, 50 bp, synthetic construct
  source 1..50: mol_type = other DNA
accagattggaagaaaccggccggaacagaccatattcattgacgatggt

SEQ ID NO: 29549 - DNA, 50 bp, synthetic construct
  source 1..50: mol_type = other DNA
atcatcaagaaaatttttctacatgatataagaaaaacatatatgtataa

SEQ ID NO: 29550 - DNA, 50 bp, synthetic construct
  source 1..50: mol_type = other DNA
gcctggactgccgatcaacaagcaatggaacagatggtgcccacccgcag

SEQ ID NO: 29551 - DNA, 50 bp, synthetic construct
  source 1..50: mol_type = other DNA
tcggaatcgacaagggccttcgggcagccaaggctgacgaagccgacttt

SEQ ID NO: 29552 - DNA, 50 bp, synthetic construct
  source 1..50: mol_type = other DNA
tcggaatcgacgagggccttcgggcagccaaggctgacgaagccgacttt

SEQ ID NO: 29553 - DNA, 50 bp, synthetic construct
  source 1..50: mol_type = other DNA
acctgcatgcccatcaagccctggtcccaccccttgattacgcggccagt

SEQ ID NO: 29554 - DNA, 50 bp, synthetic construct
  source 1..50: mol_type = other DNA
ggccgacttgatcaagtcgtccatatacgacagacttgatgagcaccgcg

SEQ ID NO: 29555 - DNA, 50 bp, synthetic construct
  source 1..50: mol_type = other DNA
gctgaacaacaagttgtgtgataatattgagccacatgatcaacaagttg

SEQ ID NO: 29556 - DNA, 50 bp, synthetic construct
  source 1..50: mol_type = other DNA
cggtgctgatcaagtctgtcgtataaatatggacgacttgatcaagtccg

SEQ ID NO: 29557 - DNA, 50 bp, synthetic construct
  source 1..50: mol_type = other DNA
ggccgaccatctgctacgccttcatatgcaggccagcggcatggtcatgg

SEQ ID NO: 29558 - DNA, 50 bp, synthetic construct
  source 1..50: mol_type = other DNA
cgaatgtaccagaatatcggcagaaaaatactgatactgtggagatttcg

SEQ ID NO: 29559 - DNA, 50 bp, synthetic construct
  source 1..50: mol_type = other DNA
aaatgagtccagaggaaggcgaagcaattttgctttataagttccaattt

SEQ ID NO: 29560 - DNA, 50 bp, synthetic construct
  source 1..50: mol_type = other DNA
ttttttgtggccattaggcgcatgagatttactccattaagccctaaagc

SEQ ID NO: 29561 - DNA, 50 bp, synthetic construct
  source 1..50: mol_type = other DNA
tgattccccgatgtttcagcttgctgctgaaacggatcatcgtatagatt

SEQ ID NO: 29562 - DNA, 50 bp, synthetic construct
  source 1..50: mol_type = other DNA
gaaagataaaccttaaatagcttcttaatgctatttattcattaatttta

SEQ ID NO: 29563 - DNA, 50 bp, synthetic construct
  source 1..50: mol_type = other DNA
tgacctcagattgagtttttgaggttttatcattaaaaaataaaagttca

SEQ ID NO: 29564 - DNA, 50 bp, synthetic construct
  source 1..50: mol_type = other DNA
tcgctatcagtcaaggccttggggcagcccagcgaaacaaagcccacttt

SEQ ID NO: 29565 - DNA, 50 bp, synthetic construct
  source 1..50: mol_type = other DNA
tcttagctacagtttccacatgtgtccacatgtgtagaatgagggaacat

SEQ ID NO: 29566 - DNA, 50 bp, synthetic construct
  source 1..50: mol_type = other DNA
agggcttataggataaataatggtgaaccgtatcataaataaatgatacg

SEQ ID NO: 29567 - DNA, 50 bp, synthetic construct
  source 1..50: mol_type = other DNA
ctacatatatcaggaatagattctccactttcccattttgctattgattg

SEQ ID NO: 29568 - DNA, 50 bp, synthetic construct
  source 1..50: mol_type = other DNA
ctcccctcgtctccaccattgaaatccaccaattttgaaaaaagaatgat

SEQ ID NO: 29569 - DNA, 50 bp, synthetic construct
  source 1..50: mol_type = other DNA
gcttctgtatctaaatgggaaactggacaaagttatcttgacataacctt

SEQ ID NO: 29570 - DNA, 50 bp, synthetic construct
  source 1..50: mol_type = other DNA
acgatggatggtctggaacgaactttttgacaggccggattttcagagaa

SEQ ID NO: 29571 - DNA, 50 bp, synthetic construct
  source 1..50: mol_type = other DNA
aggcaggcggcgcaggagtgctatgcatggcactgcaataccgcaagcgg

SEQ ID NO: 29572 - DNA, 50 bp, synthetic construct
  source 1..50: mol_type = other DNA
atatttatggacataaagcaatataaacaatatataaaacatataaaact

SEQ ID NO: 29573 - DNA, 50 bp, synthetic construct
  source 1..50: mol_type = other DNA
aaatacgccacatgtggagacttgtggcagtcaccacattgtgagactgt

SEQ ID NO: 29574 - DNA, 50 bp, synthetic construct
  source 1..50: mol_type = other DNA
atgttcccaaatacgccacatgtagactgtagttaaacttattagagaat

SEQ ID NO: 29575 - DNA, 50 bp, synthetic construct
  source 1..50: mol_type = other DNA
tgaactatctcctgagggctatacttcccgaaggaacaggatatagggta

SEQ ID NO: 29576 - DNA, 50 bp, synthetic construct
  source 1..50: mol_type = other DNA
tgtagattttcctgcacctgatggtacctgatggtcctaaaaatcctagt

SEQ ID NO: 29577 - DNA, 50 bp, synthetic construct
  source 1..50: mol_type = other DNA
aattatattaaattatatatgtctttattctttctatgttttgtataaat

SEQ ID NO: 29578 - DNA, 50 bp, synthetic construct
  source 1..50: mol_type = other DNA
gcggtggtggggcagttggtgcggctgcgccagggggatgtgtccaccgc

SEQ ID NO: 29579 - DNA, 50 bp, synthetic construct
  source 1..50: mol_type = other DNA
aaaaaagaatgatgaagtgactgggataaaatacttgaaaatactagtct

SEQ ID NO: 29580 - DNA, 50 bp, synthetic construct
  source 1..50: mol_type = other DNA
aagtattgtaagcgtgggttgtttctccatcacttacccatccaatattt

SEQ ID NO: 29581 - DNA, 50 bp, synthetic construct
  source 1..50: mol_type = other DNA
cttatactttttaactgaaactatttttaaggtcagtcaaagcgtcatac

SEQ ID NO: 29582 - DNA, 50 bp, synthetic construct
  source 1..50: mol_type = other DNA
gttatctgaaccagcgctatgccatgtggattgtgcctggttcatgtcac

SEQ ID NO: 29583 - DNA, 50 bp, synthetic construct
  source 1..50: mol_type = other DNA
tgcacagaacgaactgacgttgtcaccacgacggaacagtgttcggttat

SEQ ID NO: 29584 - DNA, 50 bp, synthetic construct
  source 1..50: mol_type = other DNA
attttggttacacatgatattggtgaagcaataagcatatcagataaggt

SEQ ID NO: 29585 - DNA, 50 bp, synthetic construct
  source 1..50: mol_type = other DNA
ccagcagtatctaagtgggagagtggaaattcttacccagatatagaatt

SEQ ID NO: 29586 - DNA, 50 bp, synthetic construct
  source 1..50: mol_type = other DNA
tcattctacacatatagagacggtagcaagttgagacttgtgtgttgcta

SEQ ID NO: 29587 - DNA, 50 bp, synthetic construct
  source 1..50: mol_type = other DNA
tgctgaaggataatatatactctagctttcttggatatgatacgggcttt

SEQ ID NO: 29588 - DNA, 50 bp, synthetic construct
  source 1..50: mol_type = other DNA
attatgcgcggcgaagcttatcataaatgatgcggttttttcagccgctt

SEQ ID NO: 29589 - DNA, 50 bp, synthetic construct
  source 1..50: mol_type = other DNA
ttcgagttcccgagcaaacacatcacggtcaatctggcccccgccgatct

SEQ ID NO: 29590 - DNA, 50 bp, synthetic construct
  source 1..50: mol_type = other DNA
atttcaaataaccttttttttgacataaaatataaagaattatattttat

SEQ ID NO: 29591 - DNA, 50 bp, synthetic construct
  source 1..50: mol_type = other DNA
aatataacatcagatataacaaccatggtaaacagaacatcagctctaaa

SEQ ID NO: 29592 - DNA, 50 bp, synthetic construct
  source 1..50: mol_type = other DNA
tgattatcttagctacagtttccacaagtctctatatgagtagaatgagg

SEQ ID NO: 29593 - DNA, 50 bp, synthetic construct
  source 1..50: mol_type = other DNA
taataaaaaatgatttctttaaagtaaaataaagcgtaaatttttgatta

SEQ ID NO: 29594 - DNA, 50 bp, synthetic construct
  source 1..50: mol_type = other DNA
attaatatgaaattaggtatcgttatgaaactaggtatcgttggtttacc

SEQ ID NO: 29595 - DNA, 50 bp, synthetic construct
  source 1..50: mol_type = other DNA
tatcttagctacagtttcaacttgctaccgtctccacatgtgtcgttact

SEQ ID NO: 29596 - DNA, 50 bp, synthetic construct
  source 1..50: mol_type = other DNA
atgttcccaaatacgccacatgtggactgtagttaaacttattagagaat

SEQ ID NO: 29597 - DNA, 50 bp, synthetic construct
  source 1..50: mol_type = other DNA
tatcttagctacagtttcaacttgctaccgtctccacatgtgtagaatga

SEQ ID NO: 29598 - DNA, 50 bp, synthetic construct
  source 1..50: mol_type = other DNA
ccagcagtatccaaatgggagagtggaaattcttatccagatatagaatt

SEQ ID NO: 29599 - DNA, 50 bp, synthetic construct
  source 1..50: mol_type = other DNA
tatcttaaatccaaatagccaataaagtaaggctatttggatttttaata

SEQ ID NO: 29600 - DNA, 50 bp, synthetic construct
  source 1..50: mol_type = other DNA
cgggtgattctggacagacacgtttagaccttgctaatgctggacagccg

SEQ ID NO: 29601 - DNA, 50 bp, synthetic construct
  source 1..50: mol_type = other DNA
gcggcatgtaccggacggctgtcgagcatcacgcggttaacgccgcgcgc

SEQ ID NO: 29602 - DNA, 50 bp, synthetic construct
  source 1..50: mol_type = other DNA
tacagtttccacatgtgtcgttactagtctccacatgtgtagaatgaggg

SEQ ID NO: 29603 - DNA, 50 bp, synthetic construct
  source 1..50: mol_type = other DNA
taattgctaagtagttaattactcgatataaggctagttctatgaaattt

SEQ ID NO: 29604 - DNA, 50 bp, synthetic construct
  source 1..50: mol_type = other DNA
ctctaataagtttaactacatcaacgtctcacaatgtggtgtatttggga

SEQ ID NO: 29605 - DNA, 50 bp, synthetic construct
  source 1..50: mol_type = other DNA
cccgccataccggggtgcccctgccggcaaaggcatccatgtcgatctgg

SEQ ID NO: 29606 - DNA, 50 bp, synthetic construct
  source 1..50: mol_type = other DNA
attctacccgcacgctgttcaagatcagctggtctccaaggcacatccaa

SEQ ID NO: 29607 - DNA, 50 bp, synthetic construct
  source 1..50: mol_type = other DNA
ctctaataagtttaactacatcaacgtctcacaatgtggagtatttggga

SEQ ID NO: 29608 - DNA, 50 bp, synthetic construct
  source 1..50: mol_type = other DNA
tgtttgattatcttagctacagtttcaacttgctcatcattttccaaact

SEQ ID NO: 29609 - DNA, 50 bp, synthetic construct
  source 1..50: mol_type = other DNA
gtgtaaaatggcaaaagttctggtgcaagaatacttgtgctttattattc

SEQ ID NO: 29610 - DNA, 50 bp, synthetic construct
  source 1..50: mol_type = other DNA
acggcttgctgccgaactgcatggtgtgatgttgttggtgcttaacacag

SEQ ID NO: 29611 - DNA, 50 bp, synthetic construct
  source 1..50: mol_type = other DNA
taataataaaacatctggtttttgaatactaaccagatggatgattatga

SEQ ID NO: 29612 - DNA, 50 bp, synthetic construct
  source 1..50: mol_type = other DNA
gagaggtgagtaatgcgtaaaatcattcatgtggatatggactgcttttt

SEQ ID NO: 29613 - DNA, 50 bp, synthetic construct
  source 1..50: mol_type = other DNA
ttttaactctttctcaatatatttaaaattacaaaaatttattgttactt

SEQ ID NO: 29614 - DNA, 50 bp, synthetic construct
  source 1..50: mol_type = other DNA
tagcgccagggatttcaacgatttcaaaacagtaataaccattgttgcaa

SEQ ID NO: 29615 - DNA, 50 bp, synthetic construct
  source 1..50: mol_type = other DNA
ttcatatttcggattccctaatatcaacattcgggtttccgggatggctt

SEQ ID NO: 29616 - DNA, 50 bp, synthetic construct
  source 1..50: mol_type = other DNA
aaatatatattatccatatgatgttaagtcaatgcctttaaagcccattt

SEQ ID NO: 29617 - DNA, 50 bp, synthetic construct
  source 1..50: mol_type = other DNA
aaaattagttgcaacagaaatcggaacagatatggacggcacctttttag

SEQ ID NO: 29618 - DNA, 50 bp, synthetic construct
  source 1..50: mol_type = other DNA
ttttactttgattgaaatgaaggatatctttaattgaaatgcttgtcgtc

SEQ ID NO: 29619 - DNA, 50 bp, synthetic construct
  source 1..50: mol_type = other DNA
actgattaagagtcagttgctctcccctagtgaacactttcttaaatctc

SEQ ID NO: 29620 - DNA, 50 bp, synthetic construct
  source 1..50: mol_type = other DNA
gggaaaagtgcttttagtggtaagcattacccgacttaagcacttttgaa

SEQ ID NO: 29621 - DNA, 50 bp, synthetic construct
  source 1..50: mol_type = other DNA
cctctcattcagggtatacctcagcgctgatgtaaaccgcgattaagcgt

SEQ ID NO: 29622 - DNA, 50 bp, synthetic construct
  source 1..50: mol_type = other DNA
cagcattgagagtggcaaaggaagtactttccatgctatactcaatgcat

SEQ ID NO: 29623 - DNA, 50 bp, synthetic construct
  source 1..50: mol_type = other DNA
ggcgcggtgaaggcgtatcccccacgtgggtggtcgccggccacggcgcc

SEQ ID NO: 29624 - DNA, 50 bp, synthetic construct
  source 1..50: mol_type = other DNA
cagtattcgggtatctaggcacctcatcgtactgactggcggaaatactg

SEQ ID NO: 29625 - DNA, 50 bp, synthetic construct
  source 1..50: mol_type = other DNA
gcgttttcgcgtacaattatagtatattttcttcgctgacgagatcgggc

SEQ ID NO: 29626 - DNA, 50 bp, synthetic construct
  source 1..50: mol_type = other DNA
taatactgtttttgatgacttcatatcgtgattcacttttagcctgttta

SEQ ID NO: 29627 - DNA, 50 bp, synthetic construct
  source 1..50: mol_type = other DNA
tataagggagaaaatcaatttatatctatcaattgcgctatgcccctgta

SEQ ID NO: 29628 - DNA, 50 bp, synthetic construct
  source 1..50: mol_type = other DNA
attttttttctttttttagcacgaaagccttcgagctgcggagtgaaagt

SEQ ID NO: 29629 - DNA, 50 bp, synthetic construct
  source 1..50: mol_type = other DNA
gcagcgccttccagattattttggacgcctcaggagctggaagcggctgg

SEQ ID NO: 29630 - DNA, 50 bp, synthetic construct
  source 1..50: mol_type = other DNA
tcgaaggcgcttaatagtggcactggaatgtttctcaaaagcgcctacta

SEQ ID NO: 29631 - DNA, 50 bp, synthetic construct
  source 1..50: mol_type = other DNA
catcgcccggctggagaagcgggccgtcccactggcgcatcgcggctgcc

SEQ ID NO: 29632 - DNA, 50 bp, synthetic construct
  source 1..50: mol_type = other DNA
gcacatccgtcaactattttgtaccctatcatcattattgacggatggga

SEQ ID NO: 29633 - DNA, 50 bp, synthetic construct
  source 1..50: mol_type = other DNA
aaaccatttggttgatgttttcaatcttgaacgcttcaaaagtcaggttg

SEQ ID NO: 29634 - DNA, 50 bp, synthetic construct
  source 1..50: mol_type = other DNA
tgttagcccttaattggcggttaatattatctcaacttaaagttgtaaca

SEQ ID NO: 29635 - DNA, 50 bp, synthetic construct
  source 1..50: mol_type = other DNA
caagtaacctgaaaataactcttttaaaaaacagattttcatctctcttg

SEQ ID NO: 29636 - DNA, 50 bp, synthetic construct
  source 1..50: mol_type = other DNA
ttaaattaataatttagatgaaagaatttgcattcataatactaaatctt

SEQ ID NO: 29637 - DNA, 50 bp, synthetic construct
  source 1..50: mol_type = other DNA
atttttattttgacgactgtagaaagacatattttcgtcgatgaaaaagt

SEQ ID NO: 29638 - DNA, 50 bp, synthetic construct
  source 1..50: mol_type = other DNA
tatagtttctttatacttttttatcaataaaatcagggtgtgttcctata

SEQ ID NO: 29639 - DNA, 50 bp, synthetic construct
  source 1..50: mol_type = other DNA
aagtacattataccctttgatgggttttgtacgaagtgtatagcttgtta

SEQ ID NO: 29640 - DNA, 50 bp, synthetic construct
  source 1..50: mol_type = other DNA
attcctatgctttatttgaacaaaaattttaacaaatactggatattttt

SEQ ID NO: 29641 - DNA, 50 bp, synthetic construct
  source 1..50: mol_type = other DNA
taaaagaaaatcctttaaatagggtttccccttcaaactcatttcttttc

SEQ ID NO: 29642 - DNA, 50 bp, synthetic construct
  source 1..50: mol_type = other DNA
aatataacatcagatataataaccatggtaaacagaacatcagctctaaa

SEQ ID NO: 29643 - DNA, 50 bp, synthetic construct
  source 1..50: mol_type = other DNA
aacaagtttatagagcctttagaatatcacaaataatggatatttttatt

SEQ ID NO: 29644 - DNA, 50 bp, synthetic construct
  source 1..50: mol_type = other DNA
agtggaatgttcatatttagagctgatgttatattgagagaaattgaaaa

SEQ ID NO: 29645 - DNA, 50 bp, synthetic construct
  source 1..50: mol_type = other DNA
gagtagataaggaaggtaatgaaataatgaaatttgtctcatagatattt

SEQ ID NO: 29646 - DNA, 50 bp, synthetic construct
  source 1..50: mol_type = other DNA
caaacactgcacacgttgagtgcgtgtcctctcgagccatattgaaaatg

SEQ ID NO: 29647 - DNA, 50 bp, synthetic construct
  source 1..50: mol_type = other DNA
ggccttataggccctcgtgttagttatttaataatacctggagttcacgc

SEQ ID NO: 29648 - DNA, 50 bp, synthetic construct
  source 1..50: mol_type = other DNA
acctgctaataaagaaactgcaatatttggcaactgcaacctgtataggt

SEQ ID NO: 29649 - DNA, 50 bp, synthetic construct
  source 1..50: mol_type = other DNA
cattctcaatatggctcgagaggacacggtctcaacatgtgcagtgtttg

SEQ ID NO: 29650 - DNA, 50 bp, synthetic construct
  source 1..50: mol_type = other DNA
taaaaaaacatcttcataggatattacttctcgcatatgctgttttcgct

SEQ ID NO: 29651 - DNA, 50 bp, synthetic construct
  source 1..50: mol_type = other DNA
cgctgtccgtggaaacacgggcgtagccgagtatgttaatcggaaaatcc

SEQ ID NO: 29652 - DNA, 50 bp, synthetic construct
  source 1..50: mol_type = other DNA
tcgatgaatgcgtggctgctgggcaaaattgatgactataaattcagcgt

SEQ ID NO: 29653 - DNA, 50 bp, synthetic construct
  source 1..50: mol_type = other DNA
acggcttactgccaaactgcatagtgtgatgttgttagtgcttaacacag

SEQ ID NO: 29654 - DNA, 50 bp, synthetic construct
  source 1..50: mol_type = other DNA
gaactgcatggtgatattgttacttatgaaacaacattgtgatgttgtta

SEQ ID NO: 29655 - DNA, 50 bp, synthetic construct
  source 1..50: mol_type = other DNA
atattttttgagccaagatttagtataaaaaatctactcctaataaaaat

SEQ ID NO: 29656 - DNA, 50 bp, synthetic construct
  source 1..50: mol_type = other DNA
tataattagccaccccggaaatcctagggaatccaaagtatccagtggag

SEQ ID NO: 29657 - DNA, 50 bp, synthetic construct
  source 1..50: mol_type = other DNA
ctcatccgcagcatgaacgtactcgcacctacatcaatgtgcttaatggc

SEQ ID NO: 29658 - DNA, 50 bp, synthetic construct
  source 1..50: mol_type = other DNA
tgctgtttatggcaatcatgtttgaacaaagatgctgaaaataaaaaaat

SEQ ID NO: 29659 - DNA, 50 bp, synthetic construct
  source 1..50: mol_type = other DNA
tattattgttttctgcataaaatacattatttatcaagttattaatccag

SEQ ID NO: 29660 - DNA, 50 bp, synthetic construct
  source 1..50: mol_type = other DNA
cgggtgctgttagttatattgtatatataaattatttaaaacttgtaaaa

SEQ ID NO: 29661 - DNA, 50 bp, synthetic construct
  source 1..50: mol_type = other DNA
gtatgccaacataggcctatcagttttctgctagtgctatattcccgtac

SEQ ID NO: 29662 - DNA, 50 bp, synthetic construct
  source 1..50: mol_type = other DNA
ctttcttcaaatataacttagttatatagctaagctatattttaaaaact

SEQ ID NO: 29663 - DNA, 50 bp, synthetic construct
  source 1..50: mol_type = other DNA
tctgcagactttataagagcattgcctgtagcccttctaaattcttgtag

SEQ ID NO: 29664 - DNA, 50 bp, synthetic construct
  source 1..50: mol_type = other DNA
caaaagtattgtaagcgtgggttgtttaaatgaagcatttagtactttag

SEQ ID NO: 29665 - DNA, 50 bp, synthetic construct
  source 1..50: mol_type = other DNA
tatactaaaaaatttttagttatatatataattctactttttataatata

SEQ ID NO: 29666 - DNA, 50 bp, synthetic construct
  source 1..50: mol_type = other DNA
taagccggggatcgaagggcataggtgctgtcccttcctgccgcggcctc

SEQ ID NO: 29667 - DNA, 50 bp, synthetic construct
  source 1..50: mol_type = other DNA
aatatataaatattttattttagtaatcttaaattccttatttatatact

SEQ ID NO: 29668 - DNA, 50 bp, synthetic construct
  source 1..50: mol_type = other DNA
aagaaaataaataagttattagttaaaagtattaattgagctctactctt

SEQ ID NO: 29669 - DNA, 50 bp, synthetic construct
  source 1..50: mol_type = other DNA
aataaaatttcttgtaaaagaataattgtaatttgtgatataatttactt

SEQ ID NO: 29670 - DNA, 50 bp, synthetic construct
  source 1..50: mol_type = other DNA
gaccgagatcgccatgcagtattcgtaaacactggccggcatcgccggcc

SEQ ID NO: 29671 - DNA, 50 bp, synthetic construct
  source 1..50: mol_type = other DNA
caatatcttctggtttaaaattatataaacttttgaacttcttgaaatac

SEQ ID NO: 29672 - DNA, 50 bp, synthetic construct
  source 1..50: mol_type = other DNA
gataaacttcgactccatcttcccgggggaagatggattcgaaccatcga

SEQ ID NO: 29673 - DNA, 50 bp, synthetic construct
  source 1..50: mol_type = other DNA
gtaagattgacaaatatattagttcttatacatgctttcttcaaacttcg

SEQ ID NO: 29674 - DNA, 50 bp, synthetic construct
  source 1..50: mol_type = other DNA
agtcgttttaagcaactttaaaattaacgagcaaattgcaaaatcagacc

SEQ ID NO: 29675 - DNA, 50 bp, synthetic construct
  source 1..50: mol_type = other DNA
atcatctacaacagcctttccatcttgactgatcccaggttacgaaggaa

SEQ ID NO: 29676 - DNA, 50 bp, synthetic construct
  source 1..50: mol_type = other DNA
acttgtcattgatgccatgtccactagcgaacttgtcactggtgtcacgt

SEQ ID NO: 29677 - DNA, 50 bp, synthetic construct
  source 1..50: mol_type = other DNA
taaaggctattcgattatttccctacaaaaaaatagcttaataggtaata

SEQ ID NO: 29678 - DNA, 50 bp, synthetic construct
  source 1..50: mol_type = other DNA
aagatattaaaataggcaaatttattcgtatttgtcttaccgtatttctg

SEQ ID NO: 29679 - DNA, 50 bp, synthetic construct
  source 1..50: mol_type = other DNA
ccgagattgatacaatttaattttttcgagtagaattgtatcaatttcag

SEQ ID NO: 29680 - DNA, 50 bp, synthetic construct
  source 1..50: mol_type = other DNA
caatatcatcacttctttcaattaaaaatttgcaagaaaacaagatattt

SEQ ID NO: 29681 - DNA, 50 bp, synthetic construct
  source 1..50: mol_type = other DNA
ctttttctttgtttcactaattggaggtttatagctctccaaaaaagatc

SEQ ID NO: 29682 - DNA, 50 bp, synthetic construct
  source 1..50: mol_type = other DNA
tatctatataaacgattatatgcgtgcacatcccggccctgatagagata

SEQ ID NO: 29683 - DNA, 50 bp, synthetic construct
  source 1..50: mol_type = other DNA
tttagggcttcttgcatttgttttttagaataaatagaaaaagccctaaa

SEQ ID NO: 29684 - DNA, 50 bp, synthetic construct
  source 1..50: mol_type = other DNA
aattttacatcagctcattcaacaaatgaacaactaactgatgatgaatt

SEQ ID NO: 29685 - DNA, 50 bp, synthetic construct
  source 1..50: mol_type = other DNA
cccgcaggatggttcaaacaaaccatgaatgaagaaaaaaattgtggtgc

SEQ ID NO: 29686 - DNA, 50 bp, synthetic construct
  source 1..50: mol_type = other DNA
cggtatcactgtcaccgcccgtgccggcgagcgcacgctgccgattaccg

SEQ ID NO: 29687 - DNA, 50 bp, synthetic construct
  source 1..50: mol_type = other DNA
ggggcgcacaacctgttcttttaggctcaattccttgttcaccggcccgc

SEQ ID NO: 29688 - DNA, 50 bp, synthetic construct
  source 1..50: mol_type = other DNA
gagctttgacccggaatatgggatctgggcaatgtgccgggattcagttc

SEQ ID NO: 29689 - DNA, 50 bp, synthetic construct
  source 1..50: mol_type = other DNA
gtgcccggcgggccgctgagcaagatcaacaggttgtgcgcgccggcggc

SEQ ID NO: 29690 - DNA, 50 bp, synthetic construct
  source 1..50: mol_type = other DNA
ttttacctccaaatatttttacgaagatttaaaaatatcagaaactagaa

SEQ ID NO: 29691 - DNA, 50 bp, synthetic construct
  source 1..50: mol_type = other DNA
agatttaatttatgattaaatttatatagatttaaaaatatcagaaacta

SEQ ID NO: 29692 - DNA, 50 bp, synthetic construct
  source 1..50: mol_type = other DNA
tgctagtgctactagtgatatggttgcatctataaaaagtatctatacta

SEQ ID NO: 29693 - DNA, 50 bp, synthetic construct
  source 1..50: mol_type = other DNA
acttttatttgcataaaaagaacatatatggattcgacctatataaaata

SEQ ID NO: 29694 - DNA, 50 bp, synthetic construct
  source 1..50: mol_type = other DNA
gaatctaaaattgtagataatctatgctgattataataatattttaataa

SEQ ID NO: 29695 - DNA, 50 bp, synthetic construct
  source 1..50: mol_type = other DNA
aagtgtggcagacatcttgaacgaattttttcataggaagctccaagctt

SEQ ID NO: 29696 - DNA, 50 bp, synthetic construct
  source 1..50: mol_type = other DNA
acttggttgttaggagataactgaagagagtttatctctaaacacgagga

SEQ ID NO: 29697 - DNA, 50 bp, synthetic construct
  source 1..50: mol_type = other DNA
aattaacaaattaattttaacatataacaactaaatagacaccattaggt

SEQ ID NO: 29698 - DNA, 50 bp, synthetic construct
  source 1..50: mol_type = other DNA
ttcattaaattagttttattataccaaaggaattggacatgccaaaagaa

SEQ ID NO: 29699 - DNA, 50 bp, synthetic construct
  source 1..50: mol_type = other DNA
tcgtgtttagagataaactctcggtagcatcgttttatctctaataacga

SEQ ID NO: 29700 - DNA, 50 bp, synthetic construct
  source 1..50: mol_type = other DNA
ctcatagtcctcgtgtttagagataagttagataatgtttcggctatgat

SEQ ID NO: 29701 - DNA, 50 bp, synthetic construct
  source 1..50: mol_type = other DNA
agaataagagatttgctgtaccggatgaggtactattcggatttcattca

SEQ ID NO: 29702 - DNA, 50 bp, synthetic construct
  source 1..50: mol_type = other DNA
attccagccaagtcacaggaaacagctgttcgattgaaagctgattgtat

SEQ ID NO: 29703 - DNA, 50 bp, synthetic construct
  source 1..50: mol_type = other DNA
acatttagtgtttggcttattttctccgcttaacgggaataactaaatta

SEQ ID NO: 29704 - DNA, 50 bp, synthetic construct
  source 1..50: mol_type = other DNA
tagttggtctgataacttgactaataagggattttctataagatcaaaca

SEQ ID NO: 29705 - DNA, 50 bp, synthetic construct
  source 1..50: mol_type = other DNA
gccaggagaaagcacaaaatcagcttgcagtttttttcgtttttagtggt

SEQ ID NO: 29706 - DNA, 50 bp, synthetic construct
  source 1..50: mol_type = other DNA
aaccttaccaggaacaggtaattcgacaattacctctggcagacacagga

SEQ ID NO: 29707 - DNA, 50 bp, synthetic construct
  source 1..50: mol_type = other DNA
accttatctgacatagaaatagcttctgatatatcatgggtaactaaaat

SEQ ID NO: 29708 - DNA, 50 bp, synthetic construct
  source 1..50: mol_type = other DNA
tattttatataggtcgaatccatatatgttctttttatctaaataaaaat

SEQ ID NO: 29709 - DNA, 50 bp, synthetic construct
  source 1..50: mol_type = other DNA
tttatataggtcgaatccatatatattgtactatataatatgtataatta

SEQ ID NO: 29710 - DNA, 50 bp, synthetic construct
  source 1..50: mol_type = other DNA
aatttatttagcttacttaaatagtaacattttagtaaaactttaatata

SEQ ID NO: 29711 - DNA, 50 bp, synthetic construct
  source 1..50: mol_type = other DNA
gatagattaaatactcctgtcgtaattacaaaaagattaaaaggtctagc

SEQ ID NO: 29712 - DNA, 50 bp, synthetic construct
  source 1..50: mol_type = other DNA
ctatacaaaattaatataatttaataaaactttaatataatttaatatat

SEQ ID NO: 29713 - DNA, 50 bp, synthetic construct
  source 1..50: mol_type = other DNA
gagtataataatttttcttctacataccacctttcagaagtattataact

SEQ ID NO: 29714 - DNA, 50 bp, synthetic construct
  source 1..50: mol_type = other DNA
cttacttataataataatttttagatatcaaaggctacataataaatatg

SEQ ID NO: 29715 - DNA, 50 bp, synthetic construct
  source 1..50: mol_type = other DNA
aaattaataattttacttttaaatagatttaaaaatatcagaaactagaa

SEQ ID NO: 29716 - DNA, 50 bp, synthetic construct
  source 1..50: mol_type = other DNA
aaataaaaaacaactatgtaaataactgttatcataaaaccgataaccaa

SEQ ID NO: 29717 - DNA, 50 bp, synthetic construct
  source 1..50: mol_type = other DNA
taattatgccaaacttttcttttgattttagtaaaactttaatataattt

SEQ ID NO: 29718 - DNA, 50 bp, synthetic construct
  source 1..50: mol_type = other DNA
ccatgcaaaaaacttcttttagaagattctaaaacttcttttagaaatca

SEQ ID NO: 29719 - DNA, 50 bp, synthetic construct
  source 1..50: mol_type = other DNA
tcattcggttgatcatccgcatcgtccgctcgtaccgataaaacaaatga

SEQ ID NO: 29720 - DNA, 50 bp, synthetic construct
  source 1..50: mol_type = other DNA
taggaaattttgaaagaggtactacttagaacttcttttataaaaagtta

SEQ ID NO: 29721 - DNA, 50 bp, synthetic construct
  source 1..50: mol_type = other DNA
acgctgaatttgtagtcatcaatcttgcccagcaaccatgcgttgatcga

SEQ ID NO: 29722 - DNA, 50 bp, synthetic construct
  source 1..50: mol_type = other DNA
ttgagtgtcagttcgagcatgccgatcggcgtgcgaatctcatggctcat

SEQ ID NO: 29723 - DNA, 50 bp, synthetic construct
  source 1..50: mol_type = other DNA
gcgtgatgcaccgggcggctgtcgaggatcacccgattgatgccgcgctg

SEQ ID NO: 29724 - DNA, 50 bp, synthetic construct
  source 1..50: mol_type = other DNA
ggattcactcttattgagctgatggtggtcatcggcattattgcgattct

SEQ ID NO: 29725 - DNA, 50 bp, synthetic construct
  source 1..50: mol_type = other DNA
ttctgtagagaaccttagtaacatgtatagtactttgaccacatgccagc

SEQ ID NO: 29726 - DNA, 50 bp, synthetic construct
  source 1..50: mol_type = other DNA
accatgttcggcattccaaactgcgacaccatcaaaaaagcaaagaaatg

SEQ ID NO: 29727 - DNA, 50 bp, synthetic construct
  source 1..50: mol_type = other DNA
accaaaagagccgtctgtccaatgtacatttgctctcagtccaatggatg

SEQ ID NO: 29728 - DNA, 50 bp, synthetic construct
  source 1..50: mol_type = other DNA
accaaaagagccgtctgtctaatgtacatttgctatctgtccaatggatg

SEQ ID NO: 29729 - DNA, 50 bp, synthetic construct
  source 1..50: mol_type = other DNA
ggccaaattgaccgtgaagctatgtacatagaatagtaatgcgcttggct

SEQ ID NO: 29730 - DNA, 50 bp, synthetic construct
  source 1..50: mol_type = other DNA
gaatttctcaggcgcgtacgcgtagacaagcgtacaagtgaccaaaaccg

SEQ ID NO: 29731 - DNA, 50 bp, synthetic construct
  source 1..50: mol_type = other DNA
gaccatgaccaatataccagcataattatacaggtatgatgaccaacatc

SEQ ID NO: 29732 - DNA, 50 bp, synthetic construct
  source 1..50: mol_type = other DNA
cactggggacccatcagcagtaatgaacagtccgtcgtaccgccgccgat

SEQ ID NO: 29733 - DNA, 50 bp, synthetic construct
  source 1..50: mol_type = other DNA
attttccacttgatgacaatgtcctcatgcgaggttatctccatgaaaat

SEQ ID NO: 29734 - DNA, 50 bp, synthetic construct
  source 1..50: mol_type = other DNA
ctctgaatcaacaaggttttttgggcaatgtatttcttgattttttgggc

SEQ ID NO: 29735 - DNA, 50 bp, synthetic construct
  source 1..50: mol_type = other DNA
ccgtacatggaataatagagcactagcaccagaatctttgccatttgtac

SEQ ID NO: 29736 - DNA, 50 bp, synthetic construct
  source 1..50: mol_type = other DNA
atgtttaccttgaaagataaacctatgtctttatctaaagatattaaaat

SEQ ID NO: 29737 - DNA, 50 bp, synthetic construct
  source 1..50: mol_type = other DNA
tctaaagtctgcactattgcctgggttcacggcgtcgttcagggcgtggg

SEQ ID NO: 29738 - DNA, 50 bp, synthetic construct
  source 1..50: mol_type = other DNA
accatcggtaacactaaagtaaaatattacacttcagtgaataccgacgg

SEQ ID NO: 29739 - DNA, 50 bp, synthetic construct
  source 1..50: mol_type = other DNA
tcacggatgccagcaaaaaagtcgcggaagatattggcaccgagaattgc

SEQ ID NO: 29740 - DNA, 50 bp, synthetic construct
  source 1..50: mol_type = other DNA
aaggcgttgtctatgtaggtctgtgacaaaaaaagcatagagaaggggat

SEQ ID NO: 29741 - DNA, 50 bp, synthetic construct
  source 1..50: mol_type = other DNA
cgggggacatggtggggtagagctgggcttctaccccactcacacctttt

SEQ ID NO: 29742 - DNA, 50 bp, synthetic construct
  source 1..50: mol_type = other DNA
tggatatataaaggactatgtggtaggatgcacagtatgatacgagtgca

SEQ ID NO: 29743 - DNA, 50 bp, synthetic construct
  source 1..50: mol_type = other DNA
gatgtagaaggctttacgaaaaatgcccgatgatccgggcgttttattgt

SEQ ID NO: 29744 - DNA, 50 bp, synthetic construct
  source 1..50: mol_type = other DNA
atggcatttgatatgcatatctatcgaccgatatgcataccatttgaaat

SEQ ID NO: 29745 - DNA, 50 bp, synthetic construct
  source 1..50: mol_type = other DNA
agaaatgaaaaggggcttcatagcccgcgattgagccgctgttcatcctc

SEQ ID NO: 29746 - DNA, 50 bp, synthetic construct
  source 1..50: mol_type = other DNA
gcgttggggcttaatggggtaaatctcatgcgcctaatggctacaaaaga

SEQ ID NO: 29747 - DNA, 50 bp, synthetic construct
  source 1..50: mol_type = other DNA
ttttttgttgccattaggcgcatgagatttaccccatttaatcctaatgc

SEQ ID NO: 29748 - DNA, 50 bp, synthetic construct
  source 1..50: mol_type = other DNA
tcttttgtagccattaggcgcatgagatttaccccattaagccccaacgc

SEQ ID NO: 29749 - DNA, 50 bp, synthetic construct
  source 1..50: mol_type = other DNA
agtgaattttatacggctggagggggattaactggttggcaaaatggcct

SEQ ID NO: 29750 - DNA, 50 bp, synthetic construct
  source 1..50: mol_type = other DNA
cttatgatacggttcaccgtaccatatgatacggttccccacgattaatc

SEQ ID NO: 29751 - DNA, 50 bp, synthetic construct
  source 1..50: mol_type = other DNA
agaaggatgcccagccttcgtattgtaatacgaagcccagccttcattca

SEQ ID NO: 29752 - DNA, 50 bp, synthetic construct
  source 1..50: mol_type = other DNA
gctcttgatgttcttccattaccatcactaaaaggatgaacatatacaaa

SEQ ID NO: 29753 - DNA, 50 bp, synthetic construct
  source 1..50: mol_type = other DNA
accatcggcaacactaaagtaaaatattacacttcagtgaacacggacgg

SEQ ID NO: 29754 - DNA, 50 bp, synthetic construct
  source 1..50: mol_type = other DNA
tggtatgccgtcctttcgtatactattgatgattttatgcgtcctttcgt

SEQ ID NO: 29755 - DNA, 50 bp, synthetic construct
  source 1..50: mol_type = other DNA
ttgtctccctcggctgcccgaaaaatcattagggtgcccgaaaaaccttg

SEQ ID NO: 29756 - DNA, 50 bp, synthetic construct
  source 1..50: mol_type = other DNA
gtacttacttgaatatgtagtgtctaaacataacacatttgtatgattat

SEQ ID NO: 29757 - DNA, 50 bp, synthetic construct
  source 1..50: mol_type = other DNA
cattgcggccccatcagcagcagtgaacagtcggttgtacccccgccaat

SEQ ID NO: 29758 - DNA, 50 bp, synthetic construct
  source 1..50: mol_type = other DNA
attttttgcttgataatcatacaaattcaagtaagtgccattacagcaaa

SEQ ID NO: 29759 - DNA, 50 bp, synthetic construct
  source 1..50: mol_type = other DNA
ccatgtatgccacgctggaagaagtttttatgccacgctggaagaagcca

SEQ ID NO: 29760 - DNA, 50 bp, synthetic construct
  source 1..50: mol_type = other DNA
ccgtccgtgttcactgaagtgtaatattttactttagtgttaccgatggt

SEQ ID NO: 29761 - DNA, 50 bp, synthetic construct
  source 1..50: mol_type = other DNA
cttgccaacgggttgccgtcgttctcgatcgtcggcctgcccgacgtcga

SEQ ID NO: 29762 - DNA, 50 bp, synthetic construct
  source 1..50: mol_type = other DNA
agatagaacagcatgatcttcgggttgccgagcgtgaccagcgtgccggc

SEQ ID NO: 29763 - DNA, 50 bp, synthetic construct
  source 1..50: mol_type = other DNA
tacggttctccgtaccgtactctacgttacttgtgatacggttctccatt

SEQ ID NO: 29764 - DNA, 50 bp, synthetic construct
  source 1..50: mol_type = other DNA
aacaaattacatcccgccctaattttccttactgcgtttataaatttgtt

SEQ ID NO: 29765 - DNA, 50 bp, synthetic construct
  source 1..50: mol_type = other DNA
tacccctgactgaaaactataattgatattatactttttcatcagcttta

SEQ ID NO: 29766 - DNA, 50 bp, synthetic construct
  source 1..50: mol_type = other DNA
cccaaaggtacgcatcaaaggtattccaataagtcctgcaatcgtaaaac

SEQ ID NO: 29767 - DNA, 50 bp, synthetic construct
  source 1..50: mol_type = other DNA
tttataagcatttacatacctgaatattcaggacataataaatgactaag

SEQ ID NO: 29768 - DNA, 50 bp, synthetic construct
  source 1..50: mol_type = other DNA
ggcatcccgccaagcacagttaatccataatcaactgttaaattgatgtt

SEQ ID NO: 29769 - DNA, 50 bp, synthetic construct
  source 1..50: mol_type = other DNA
ggctgaagaggacggtttgctaaatctccggcggcccgtccagcgtcaat

SEQ ID NO: 29770 - DNA, 50 bp, synthetic construct
  source 1..50: mol_type = other DNA
acgctgaatttgtattcatcaatcttgcccagcaaccatgcgttgatcga

SEQ ID NO: 29771 - DNA, 50 bp, synthetic construct
  source 1..50: mol_type = other DNA
aaatataacactgggcaactcttcggtgggatataatttttgtttaattt

SEQ ID NO: 29772 - DNA, 50 bp, synthetic construct
  source 1..50: mol_type = other DNA
ctgatttatttccaaatacgcatcacacatagaagttgtgggattattag

SEQ ID NO: 29773 - DNA, 50 bp, synthetic construct
  source 1..50: mol_type = other DNA
tttaactgcaagagtactacggtttctcaacgtgagctgtttgcgggaac

SEQ ID NO: 29774 - DNA, 50 bp, synthetic construct
  source 1..50: mol_type = other DNA
ccttcttgatggtgtcgcagtttttaaaaacagctcgcagttcttgatgc

SEQ ID NO: 29775 - DNA, 50 bp, synthetic construct
  source 1..50: mol_type = other DNA
agatgcttagtgccctccttacgtccatcatagctcgaaccgaaaaaatt

SEQ ID NO: 29776 - DNA, 50 bp, synthetic construct
  source 1..50: mol_type = other DNA
tgataaggttcttcgtatcggtagtatttatgatacggttcattcttcat

SEQ ID NO: 29777 - DNA, 50 bp, synthetic construct
  source 1..50: mol_type = other DNA
atcgacagtttcaagccgttcaacgatatctacggctatgggcgtgggga

SEQ ID NO: 29778 - DNA, 50 bp, synthetic construct
  source 1..50: mol_type = other DNA
tacgacatgatcttcacgaagaaagcattctgcacccagccggtgtacta

SEQ ID NO: 29779 - DNA, 50 bp, synthetic construct
  source 1..50: mol_type = other DNA
tacgttccagcacagtaacactctcaacgtgcgtcgtctgcgggaactgg

SEQ ID NO: 29780 - DNA, 50 bp, synthetic construct
  source 1..50: mol_type = other DNA
ggggtcgcgggttcgagtcccgtccgaggttcgccatacatcttcaccac

SEQ ID NO: 29781 - DNA, 50 bp, synthetic construct
  source 1..50: mol_type = other DNA
aatgggggtcaggtccgggagcagaaggtcataggcaccccaccctgttt

SEQ ID NO: 29782 - DNA, 50 bp, synthetic construct
  source 1..50: mol_type = other DNA
ccaatacccatgccggggtcgcacaaagtttcgatgaaattggcaaagat

SEQ ID NO: 29783 - DNA, 50 bp, synthetic construct
  source 1..50: mol_type = other DNA
tggatactttggattccctaatatcacactttggatttccggggtgacta

SEQ ID NO: 29784 - DNA, 50 bp, synthetic construct
  source 1..50: mol_type = other DNA
gccagtatctgcacaatggcatgggtttacggctcggttcagggcgtggg

SEQ ID NO: 29785 - DNA, 50 bp, synthetic construct
  source 1..50: mol_type = other DNA
cgcaatgacccttgaatataggctatagctcaaatacaatgacccttgat

SEQ ID NO: 29786 - DNA, 50 bp, synthetic construct
  source 1..50: mol_type = other DNA
attttccaattgataacaatgtcctcaaaaggtaatatcttttgaaaagt

SEQ ID NO: 29787 - DNA, 50 bp, synthetic construct
  source 1..50: mol_type = other DNA
ttttatatgatataataaagtatagtacctctttcaaaatttcctaaaaa

SEQ ID NO: 29788 - DNA, 50 bp, synthetic construct
  source 1..50: mol_type = other DNA
gcgttcaagatcatgcgtggggaagcagaatcactaattaggggaaagtt

SEQ ID NO: 29789 - DNA, 50 bp, synthetic construct
  source 1..50: mol_type = other DNA
aggcatatcaaaatcatcaaggtctaaacgtgtctaataaataacacccg

SEQ ID NO: 29790 - DNA, 50 bp, synthetic construct
  source 1..50: mol_type = other DNA
gttcgaatccctgtgggtctacattcgtttaagactactttgactggaga

SEQ ID NO: 29791 - DNA, 50 bp, synthetic construct
  source 1..50: mol_type = other DNA
gaaccgagcggctgtctaaaatcatctaataaaaatcacccgattaacgc

SEQ ID NO: 29792 - DNA, 50 bp, synthetic construct
  source 1..50: mol_type = other DNA
gaacccaacacggtacggatgttagtcatggtcaggttgatgatcgccag

SEQ ID NO: 29793 - DNA, 50 bp, synthetic construct
  source 1..50: mol_type = other DNA
ctcctgtttaggtttgcctaatataacatttaggtttgccaattcgcctg

SEQ ID NO: 29794 - DNA, 50 bp, synthetic construct
  source 1..50: mol_type = other DNA
caggcgaattggcaaccctaaatgttatattaggcaaacctaaacaggag

SEQ ID NO: 29795 - DNA, 50 bp, synthetic construct
  source 1..50: mol_type = other DNA
cacggtttttgcatgataatcatacaaataggtgccattacagcaaatag

SEQ ID NO: 29796 - DNA, 50 bp, synthetic construct
  source 1..50: mol_type = other DNA
aggtgagtaatgcgtaaaatcattattattcatgtggatatggactgctt

SEQ ID NO: 29797 - DNA, 50 bp, synthetic construct
  source 1..50: mol_type = other DNA
aatgtaatgctgatattaattccctagggacccattatactgaagacaat

SEQ ID NO: 29798 - DNA, 50 bp, synthetic construct
  source 1..50: mol_type = other DNA
ctatttgctgtaatggcacctatttgtatgattatcatgcaaaaaccgtg

SEQ ID NO: 29799 - DNA, 50 bp, synthetic construct
  source 1..50: mol_type = other DNA
aggcccatgtatcaaaatatggaggtaccccttttttgataaaataggta

SEQ ID NO: 29800 - DNA, 50 bp, synthetic construct
  source 1..50: mol_type = other DNA
atggcacctatttgagtgtgtattgcataacacatttgtatgattatcat

SEQ ID NO: 29801 - DNA, 50 bp, synthetic construct
  source 1..50: mol_type = other DNA
attttccaattgataacaatgtcctcatgcgaggttatctccatgaaaat

SEQ ID NO: 29802 - DNA, 50 bp, synthetic construct
  source 1..50: mol_type = other DNA
cgtcagccccctttgtattgtggctccccgggcaggactcgaacctgcga

SEQ ID NO: 29803 - DNA, 50 bp, synthetic construct
  source 1..50: mol_type = other DNA
gttggggtaggattcatcaacttgctaccgtctcattggagttatccaag

SEQ ID NO: 29804 - DNA, 50 bp, synthetic construct
  source 1..50: mol_type = other DNA
taaaatagaactaacccgtggtgctagcacaacgggtagaactagttttg

SEQ ID NO: 29805 - DNA, 50 bp, synthetic construct
  source 1..50: mol_type = other DNA
ataatcatttgtgctcttacgtagtcctgtttagtagccccaagcagaat

SEQ ID NO: 29806 - DNA, 50 bp, synthetic construct
  source 1..50: mol_type = other DNA
atgagtgtactatggcggttgtactgattcacttccccatacccaaacat

SEQ ID NO: 29807 - DNA, 50 bp, synthetic construct
  source 1..50: mol_type = other DNA
cagcatccatccgcttcacctccccgacctgatgacgcggattgatgccg

SEQ ID NO: 29808 - DNA, 50 bp, synthetic construct
  source 1..50: mol_type = other DNA
attttattggatcacttactgtgcgagcttaaagcaggtcagtcagccat

SEQ ID NO: 29809 - DNA, 50 bp, synthetic construct
  source 1..50: mol_type = other DNA
attcgtctccttgggttgccctaacattgggttgccccaaaaacctggtc

SEQ ID NO: 29810 - DNA, 50 bp, synthetic construct
  source 1..50: mol_type = other DNA
tgcgcacgtcgcagcgtacaacgatactgccgtgcttagctcggtcggca

SEQ ID NO: 29811 - DNA, 50 bp, synthetic construct
  source 1..50: mol_type = other DNA
gtcaaaccgggctggcacatgaacaagcagcactggaacacggttacctt

SEQ ID NO: 29812 - DNA, 50 bp, synthetic construct
  source 1..50: mol_type = other DNA
ttgatggtgtcacagtttttgggggatgccatagagggtggtggccatgg

SEQ ID NO: 29813 - DNA, 50 bp, synthetic construct
  source 1..50: mol_type = other DNA
ggcatcaagaactgcgagctgtttttcccccaaaaactgcgacaccatca

SEQ ID NO: 29814 - DNA, 50 bp, synthetic construct
  source 1..50: mol_type = other DNA
cagcgaaacgtcaaccgcgtgatcctggatagccgtccggttcatagcgc

SEQ ID NO: 29815 - DNA, 50 bp, synthetic construct
  source 1..50: mol_type = other DNA
gaacagttcttattggagagaaacgctcctttcaaaaataagggctgttt

SEQ ID NO: 29816 - DNA, 50 bp, synthetic construct
  source 1..50: mol_type = other DNA
gcttcgagaccgtgacctacatgctcgaagggcgtatgcgccacgaagac

SEQ ID NO: 29817 - DNA, 50 bp, synthetic construct
  source 1..50: mol_type = other DNA
cggatttatttccgaatacgcatcacatgttgaagttgtgagtctattag

SEQ ID NO: 29818 - DNA, 50 bp, synthetic construct
  source 1..50: mol_type = other DNA
tatttttgtgcccgacatttatgtcgaaatcaatgtatatgtcaaacagg

SEQ ID NO: 29819 - DNA, 50 bp, synthetic construct
  source 1..50: mol_type = other DNA
gacatgcgttaaacattactgaagcaccgcagaagaagatacgggttgca

SEQ ID NO: 29820 - DNA, 50 bp, synthetic construct
  source 1..50: mol_type = other DNA
ctgttgaattcgggtaattcgtccaaaaataaaactccgttatgcgccag

SEQ ID NO: 29821 - DNA, 50 bp, synthetic construct
  source 1..50: mol_type = other DNA
acaggagtaccctcctatgcatatctatgcatacagcagagcatttacta

SEQ ID NO: 29822 - DNA, 50 bp, synthetic construct
  source 1..50: mol_type = other DNA
tccttctgcggtcacctttcgggaaaaacggacaaatcatttttattaat

SEQ ID NO: 29823 - DNA, 50 bp, synthetic construct
  source 1..50: mol_type = other DNA
aaaggttcgaatcctttcgcgctcacctcataatttttattgtgaggttt

SEQ ID NO: 29824 - DNA, 50 bp, synthetic construct
  source 1..50: mol_type = other DNA
ggttcgaatcctttcgcgctcacttaaggatcacaaaaaaacctcacaat

SEQ ID NO: 29825 - DNA, 50 bp, synthetic construct
  source 1..50: mol_type = other DNA
catgtcatcaatatcagtacagacaaagctgtgtcccctgtaaacacaat

SEQ ID NO: 29826 - DNA, 50 bp, synthetic construct
  source 1..50: mol_type = other DNA
ggagggcaagcctaatagtcaatcataattatatgttaggcaagcctgcc

SEQ ID NO: 29827 - DNA, 50 bp, synthetic construct
  source 1..50: mol_type = other DNA
caaattatgagtgtacgtttagtgttagccaaagggcgcgagaaatcatt

SEQ ID NO: 29828 - DNA, 50 bp, synthetic construct
  source 1..50: mol_type = other DNA
atgtttcctcacacagcacggaccgaggcggttgttaaactaagcaaaaa

SEQ ID NO: 29829 - DNA, 50 bp, synthetic construct
  source 1..50: mol_type = other DNA
aattggtgtaactgttgtatttgttaagatttgttacagtgctaccaaca

SEQ ID NO: 29830 - DNA, 50 bp, synthetic construct
  source 1..50: mol_type = other DNA
aggtatctcgcgcggcgtgctgccgaaaatgcacaccacctgcgatgacc

SEQ ID NO: 29831 - DNA, 50 bp, synthetic construct
  source 1..50: mol_type = other DNA
cttttgagatgttttcttgtacccattaagagaagaaaacccagcaaaat

SEQ ID NO: 29832 - DNA, 50 bp, synthetic construct
  source 1..50: mol_type = other DNA
tattttttcaaaagtgacaacatttcaatatgataagtttgaggaaacat

SEQ ID NO: 29833 - DNA, 50 bp, synthetic construct
  source 1..50: mol_type = other DNA
atgtttcctcaaacttatcatattgaaatgttgtcacttttgaaaaaata

SEQ ID NO: 29834 - DNA, 50 bp, synthetic construct
  source 1..50: mol_type = other DNA
tttggctggcatgtggtcaaggtattaattaaggttctctacagaacata

SEQ ID NO: 29835 - DNA, 50 bp, synthetic construct
  source 1..50: mol_type = other DNA
gcgtattcagttttatgtctttagatcattcatagtaaacatacccaaag

SEQ ID NO: 29836 - DNA, 50 bp, synthetic construct
  source 1..50: mol_type = other DNA
gcagtgagggcatttgtcttttgtgacgtaaagaacgacacgtttcattg

SEQ ID NO: 29837 - DNA, 50 bp, synthetic construct
  source 1..50: mol_type = other DNA
tgataaggcaagccacagttggcaaatgaaacgaatgggccacgttcaaa

SEQ ID NO: 29838 - DNA, 50 bp, synthetic construct
  source 1..50: mol_type = other DNA
aaatttggctggcatgtggtcaaggttctctacagaacatagcctctacc

SEQ ID NO: 29839 - DNA, 50 bp, synthetic construct
  source 1..50: mol_type = other DNA
gctgtggtttgccaataaaaaacagttgattgtttttagtttgataaaaa

SEQ ID NO: 29840 - DNA, 50 bp, synthetic construct
  source 1..50: mol_type = other DNA
gtttactatgaatgatttacatagtaaagggtttatctaaagacataaaa

SEQ ID NO: 29841 - DNA, 50 bp, synthetic construct
  source 1..50: mol_type = other DNA
cagttttatgtctttagataaaatcttatacatctttcatagtaaacata

SEQ ID NO: 29842 - DNA, 50 bp, synthetic construct
  source 1..50: mol_type = other DNA
agtgccatcgataagcgtgctgttctaacagcgtgccgtggtagtgcact

SEQ ID NO: 29843 - DNA, 50 bp, synthetic construct
  source 1..50: mol_type = other DNA
attttattggatcacttactgtgcgagctaaaagcaggtcagtcagccat

SEQ ID NO: 29844 - DNA, 50 bp, synthetic construct
  source 1..50: mol_type = other DNA
tctaaatgtggcgggcagataaggatatcaaattggcggagagataggga

SEQ ID NO: 29845 - DNA, 50 bp, synthetic construct
  source 1..50: mol_type = other DNA
gctggcatgtggtcaaggtgttgtataactaaggttctctacagaacata

SEQ ID NO: 29846 - DNA, 50 bp, synthetic construct
  source 1..50: mol_type = other DNA
gcccggctttactatgtttggcaatagtaccgactattactctcgttggg

SEQ ID NO: 29847 - DNA, 50 bp, synthetic construct
  source 1..50: mol_type = other DNA
tgattatcaacggcttttttctaaatagggatttgaaccctagatacgct

SEQ ID NO: 29848 - DNA, 50 bp, synthetic construct
  source 1..50: mol_type = other DNA
tgataatcaacggcttttttctaaatttaaaaatggcggagagataggga

SEQ ID NO: 29849 - DNA, 50 bp, synthetic construct
  source 1..50: mol_type = other DNA
accaaaagagccgtctgtctaatgtacatttgctatcagtccaatggatg

SEQ ID NO: 29850 - DNA, 50 bp, synthetic construct
  source 1..50: mol_type = other DNA
tatgtttactatgaaagatgtataagattttatctaaagacataaaactg

SEQ ID NO: 29851 - DNA, 50 bp, synthetic construct
  source 1..50: mol_type = other DNA
gatgggaaataaccaaaagagccgtcagtccaatggatgtcttgcataca

SEQ ID NO: 29852 - DNA, 50 bp, synthetic construct
  source 1..50: mol_type = other DNA
ccacagttggcaaaagacaactacatttagttgactaatgaaacgaatgg

SEQ ID NO: 29853 - DNA, 50 bp, synthetic construct
  source 1..50: mol_type = other DNA
ttttatgtctttagataaacgctctactatgtaaatcattcatagtaaac

SEQ ID NO: 29854 - DNA, 50 bp, synthetic construct
  source 1..50: mol_type = other DNA
gtttactatgaatgatttacacagtaaagcgtttatctaaagacataaaa

SEQ ID NO: 29855 - DNA, 50 bp, synthetic construct
  source 1..50: mol_type = other DNA
ttgggtacgcaccacaatgggtgggcgggccaaatgcacttatagatgca

SEQ ID NO: 29856 - DNA, 50 bp, synthetic construct
  source 1..50: mol_type = other DNA
acggcttttttctaaatgtggcggggcggagagatagggatttgaaccct

SEQ ID NO: 29857 - DNA, 50 bp, synthetic construct
  source 1..50: mol_type = other DNA
caagcgcattactgtaaatcgttttatattactatattacggtcaatttg

SEQ ID NO: 29858 - DNA, 50 bp, synthetic construct
  source 1..50: mol_type = other DNA
tgttctgtagagaaccttaatactatacgataaagcaccttgaccacatg

SEQ ID NO: 29859 - DNA, 50 bp, synthetic construct
  source 1..50: mol_type = other DNA
ccacagttggcaaatgacaattgtatgtagttgactaatgaaacgaatgg

SEQ ID NO: 29860 - DNA, 50 bp, synthetic construct
  source 1..50: mol_type = other DNA
cacacttttagaaatgaaggatagtagttacgttcattgaaatgctaatg

SEQ ID NO: 29861 - DNA, 50 bp, synthetic construct
  source 1..50: mol_type = other DNA
tctaacaggctcacacactccacgtgatgcgtatgcggaaaaagatccac

SEQ ID NO: 29862 - DNA, 50 bp, synthetic construct
  source 1..50: mol_type = other DNA
tgtatagatgctggtagtgaatactgcccttgtcatttagctgaaacagg

SEQ ID NO: 29863 - DNA, 50 bp, synthetic construct
  source 1..50: mol_type = other DNA
gccttttcaattgttggtagcgggggctggatttgaaccaacgaccttcg

SEQ ID NO: 29864 - DNA, 50 bp, synthetic construct
  source 1..50: mol_type = other DNA
tccccagataagaaatgttgagtacatcatcatcatggcctatatggcac

SEQ ID NO: 29865 - DNA, 50 bp, synthetic construct
  source 1..50: mol_type = other DNA
aggcgagtaatctcctgtttaggtttgccaattcgcctggctaactcttg

SEQ ID NO: 29866 - DNA, 50 bp, synthetic construct
  source 1..50: mol_type = other DNA
catgagaggcgaagcatatcataaattacctaataagcagaagcgtatcg

SEQ ID NO: 29867 - DNA, 50 bp, synthetic construct
  source 1..50: mol_type = other DNA
atcatgagaggcgaagcatatcataagtaatgaggttcatgatttttgac

SEQ ID NO: 29868 - DNA, 50 bp, synthetic construct
  source 1..50: mol_type = other DNA
gagaggcgaagcatatcataagtgatcaactgataagcagaagcgtacca

SEQ ID NO: 29869 - DNA, 50 bp, synthetic construct
  source 1..50: mol_type = other DNA
aatcaagggtcattgtattggagctaggctgcatacgatagtcattgaag

SEQ ID NO: 29870 - DNA, 50 bp, synthetic construct
  source 1..50: mol_type = other DNA
ctacgtccttcacgtggaagttccgtagatgccccactggatgaagtagg

SEQ ID NO: 29871 - DNA, 50 bp, synthetic construct
  source 1..50: mol_type = other DNA
ggcaacccttcgcgttgactcaccaaatgaggcaacaggcccttcgcgct

SEQ ID NO: 29872 - DNA, 50 bp, synthetic construct
  source 1..50: mol_type = other DNA
gctgcgccatcagcgccgccatcgacttcattctccgcagacggcgcaca

SEQ ID NO: 29873 - DNA, 50 bp, synthetic construct
  source 1..50: mol_type = other DNA
acttaaaaagtggcttctttagtatattattttcaacccactctttatca

SEQ ID NO: 29874 - DNA, 50 bp, synthetic construct
  source 1..50: mol_type = other DNA
cattggactgaacacaaatctacaattgtaaattggtgtgacggatcttt

SEQ ID NO: 29875 - DNA, 50 bp, synthetic construct
  source 1..50: mol_type = other DNA
acaaaatttggctggcatgtggtcaaggttctctacaggacatagcctct

SEQ ID NO: 29876 - DNA, 50 bp, synthetic construct
  source 1..50: mol_type = other DNA
ttttatcaaaccattataaaactaaattgttttttattcgcaaaccacag

SEQ ID NO: 29877 - DNA, 50 bp, synthetic construct
  source 1..50: mol_type = other DNA
ttttatcaaaccattataaaactaaattgttttttattggcaaaccacag

SEQ ID NO: 29878 - DNA, 50 bp, synthetic construct
  source 1..50: mol_type = other DNA
tctaaacgtggcgggcagataaggatatcaaattggcggagagataggga

SEQ ID NO: 29879 - DNA, 50 bp, synthetic construct
  source 1..50: mol_type = other DNA
gtctgtcgcaatcagggctcgaacttatttgaaacaccacagcatccacg

SEQ ID NO: 29880 - DNA, 50 bp, synthetic construct
  source 1..50: mol_type = other DNA
tttactatgaaagatgtataagttataaagattttatctaaagacataaa

SEQ ID NO: 29881 - DNA, 50 bp, synthetic construct
  source 1..50: mol_type = other DNA
cccgtgttgggtgggatgcggggctcgtggaacatcactcggaacacggc

SEQ ID NO: 29882 - DNA, 50 bp, synthetic construct
  source 1..50: mol_type = other DNA
gccgtgttccgagtgatgttccacgagccccgcatcccacccaacacggg

SEQ ID NO: 29883 - DNA, 50 bp, synthetic construct
  source 1..50: mol_type = other DNA
tcaagctacgatggacggagacgaatttctctctctggacggaaagaggg

SEQ ID NO: 29884 - DNA, 50 bp, synthetic construct
  source 1..50: mol_type = other DNA
ccctctttccgtccagagagagaaattcgtctccgtccatcgtagcttga

SEQ ID NO: 29885 - DNA, 50 bp, synthetic construct
  source 1..50: mol_type = other DNA
agatgctttgttccctctttacgtccatcataactcgatccgaaaaagtt

SEQ ID NO: 29886 - DNA, 50 bp, synthetic construct
  source 1..50: mol_type = other DNA
gttactgtctcgacatgcgtctacacgtgagctgtttgcgggaacatatc

SEQ ID NO: 29887 - DNA, 50 bp, synthetic construct
  source 1..50: mol_type = other DNA
catgagaggcgaagcatatcataaattaaccgatacgcagaagcgtatca

SEQ ID NO: 29888 - DNA, 50 bp, synthetic construct
  source 1..50: mol_type = other DNA
tcatgagaggcgaagcgtatcacaaagcagaaagttatcataagtgatgg

SEQ ID NO: 29889 - DNA, 50 bp, synthetic construct
  source 1..50: mol_type = other DNA
ttccataaatgatctcctcctaatgttgtagtagaatgtgagttgcacaa

SEQ ID NO: 29890 - DNA, 50 bp, synthetic construct
  source 1..50: mol_type = other DNA
aaggtattgttaaatcatttacacatgtgtgtatggtatcacaaaaccaa

SEQ ID NO: 29891 - DNA, 50 bp, synthetic construct
  source 1..50: mol_type = other DNA
aacaaatttatcgctcatttaagatatcgtaagtgaggcgggttttattt

SEQ ID NO: 29892 - DNA, 50 bp, synthetic construct
  source 1..50: mol_type = other DNA
agaaaaatggcgcgcccgacgagatgttcgtaaatggcgcacccgacagg

SEQ ID NO: 29893 - DNA, 50 bp, synthetic construct
  source 1..50: mol_type = other DNA
gaccaattactagtgactcatgcggatactgatcatatgggggatataga

SEQ ID NO: 29894 - DNA, 50 bp, synthetic construct
  source 1..50: mol_type = other DNA
gaagcgtatcataaataaaactaaaagcagaagcatatcataaatgatgg

SEQ ID NO: 29895 - DNA, 50 bp, synthetic construct
  source 1..50: mol_type = other DNA
tcctctatttctccatcatattataaacaatatgaataagctgttttgga

SEQ ID NO: 29896 - DNA, 50 bp, synthetic construct
  source 1..50: mol_type = other DNA
ttaatcctattttttgttttacttatatgcttccccacgcatgatcttga

SEQ ID NO: 29897 - DNA, 50 bp, synthetic construct
  source 1..50: mol_type = other DNA
gcgggccttttttatggtgtcgcaattgctgcataatatcgctggctcgc

SEQ ID NO: 29898 - DNA, 50 bp, synthetic construct
  source 1..50: mol_type = other DNA
gttcgagtcgcctcattccgacagaattcgatagtgtagccgacaataaa

SEQ ID NO: 29899 - DNA, 50 bp, synthetic construct
  source 1..50: mol_type = other DNA
ttgcgattagctcttctcagtgaactctgatgacgatgaagtgatcccgc

SEQ ID NO: 29900 - DNA, 50 bp, synthetic construct
  source 1..50: mol_type = other DNA
gggttcaaatccctccgtcggcaccagtgctttatataaaggacttttaa

SEQ ID NO: 29901 - DNA, 50 bp, synthetic construct
  source 1..50: mol_type = other DNA
gcccagccttcgtattgctaaggtgcaccttagcaatacgaagcccagcc

SEQ ID NO: 29902 - DNA, 50 bp, synthetic construct
  source 1..50: mol_type = other DNA
ttccgggttcgagtcccgggtgggtcaccatatgatttataaaattaaag

SEQ ID NO: 29903 - DNA, 50 bp, synthetic construct
  source 1..50: mol_type = other DNA
tggaccagttcccacagacaacacatgttgagacggtggtattgatgtca

SEQ ID NO: 29904 - DNA, 50 bp, synthetic construct
  source 1..50: mol_type = other DNA
ctaccgccagattttgagttattcaatagacgaacaagattttgagtctg

SEQ ID NO: 29905 - DNA, 50 bp, synthetic construct
  source 1..50: mol_type = other DNA
caatgacacatcatgtggagtgcatatggacaacacatgtggagtgcgta

SEQ ID NO: 29906 - DNA, 50 bp, synthetic construct
  source 1..50: mol_type = other DNA
aaccttaggggcaggtatgttaggcagataataattccacctgcatcctc

SEQ ID NO: 29907 - DNA, 50 bp, synthetic construct
  source 1..50: mol_type = other DNA
tcaatggaattatccgcatgccgtcccccatttaggatattcatcatcgg

SEQ ID NO: 29908 - DNA, 50 bp, synthetic construct
  source 1..50: mol_type = other DNA
cgagcgttcatctgacacccaaaggtcatctgacaaccgaaagtcgtcac

SEQ ID NO: 29909 - DNA, 50 bp, synthetic construct
  source 1..50: mol_type = other DNA
gtccggcatagtcttcagtataatacgatatgagtattacctttttattc

SEQ ID NO: 29910 - DNA, 50 bp, synthetic construct
  source 1..50: mol_type = other DNA
tatttccaaatacgcatcacgtcgagcacatatagaagttgtgggattat

SEQ ID NO: 29911 - DNA, 50 bp, synthetic construct
  source 1..50: mol_type = other DNA
ttaacaaccgcctcaaccgatgtattcacaaccgcctcggtccgtgctgt

SEQ ID NO: 29912 - DNA, 50 bp, synthetic construct
  source 1..50: mol_type = other DNA
ttaacggaattgttataccggaggggaattctccaaaaatgttttgttgc

SEQ ID NO: 29913 - DNA, 50 bp, synthetic construct
  source 1..50: mol_type = other DNA
ggagttcgaatctccttaggtccaccgatggggccaccacatcggtcgct

SEQ ID NO: 29914 - DNA, 50 bp, synthetic construct
  source 1..50: mol_type = other DNA
gttccggggacgtgatggtgccccaatggtgccgcttacaggactcgaac

SEQ ID NO: 29915 - DNA, 50 bp, synthetic construct
  source 1..50: mol_type = other DNA
gtcttcgtggcgcatacgcccttcgagcatgtaggtcacggtctcgaagc

SEQ ID NO: 29916 - DNA, 50 bp, synthetic construct
  source 1..50: mol_type = other DNA
cggtgctgatcaagtcgggcaagtttatagcgccgacttgatcaagtccg

SEQ ID NO: 29917 - DNA, 50 bp, synthetic construct
  source 1..50: mol_type = other DNA
cggacttgatcaagtctgtcgtataaatatggacgacttgatcagcaccg

SEQ ID NO: 29918 - DNA, 50 bp, synthetic construct
  source 1..50: mol_type = other DNA
attgtcattgatttagcaactggacaaggtgccgacaaagttatgcaagc

SEQ ID NO: 29919 - DNA, 50 bp, synthetic construct
  source 1..50: mol_type = other DNA
aatacgtcgcccagccttcgttcagcaaaacgaagctcagccttcgttca

SEQ ID NO: 29920 - DNA, 50 bp, synthetic construct
  source 1..50: mol_type = other DNA
attagcgtcgagtggcggttatactgatttacttctccatatccaaacat

SEQ ID NO: 29921 - DNA, 50 bp, synthetic construct
  source 1..50: mol_type = other DNA
tcagatgaattagaaatagatggatttactacttcttctataaaatctac

SEQ ID NO: 29922 - DNA, 50 bp, synthetic construct
  source 1..50: mol_type = other DNA
catatattaaatacatataatgaatgattttcaaaatcttttaatatata

SEQ ID NO: 29923 - DNA, 50 bp, synthetic construct
  source 1..50: mol_type = other DNA
gccttccggatcaatgcgggggctcccagcgccttatcataagtgatgcg

SEQ ID NO: 29924 - DNA, 50 bp, synthetic construct
  source 1..50: mol_type = other DNA
ttcatatttgggattccctaatatcaacgtttgggtttccgggatggctt

SEQ ID NO: 29925 - DNA, 50 bp, synthetic construct
  source 1..50: mol_type = other DNA
atctcatatttcggattgcctaatatgttcgggtttccgggatggcttat

SEQ ID NO: 29926 - DNA, 50 bp, synthetic construct
  source 1..50: mol_type = other DNA
atcaaaggtcattgtatcgtagctatagactttattcaaaggtcattgaa

SEQ ID NO: 29927 - DNA, 50 bp, synthetic construct
  source 1..50: mol_type = other DNA
gcgttaatcgggtgatttttattagatgattttagatagccgcccggttc

SEQ ID NO: 29928 - DNA, 50 bp, synthetic construct
  source 1..50: mol_type = other DNA
tcccacgaaaaaaggcatcccacaagtggcagattcctggctttacggat

SEQ ID NO: 29929 - DNA, 50 bp, synthetic construct
  source 1..50: mol_type = other DNA
ctatgtatatgattttacaggttaattaataacggaataaaaacatgaat

SEQ ID NO: 29930 - DNA, 50 bp, synthetic construct
  source 1..50: mol_type = other DNA
agcctgttcttcatcgatgaccgccctcgtgcatcatgctcaaacaaacg

SEQ ID NO: 29931 - DNA, 50 bp, synthetic construct
  source 1..50: mol_type = other DNA
agtgttattatagcataggcccccaacggatcgcggcagaaaaccgcatg

SEQ ID NO: 29932 - DNA, 50 bp, synthetic construct
  source 1..50: mol_type = other DNA
gagaaccgctgcttgcggaaacgccggcggcgctggtactgccggtgctc

SEQ ID NO: 29933 - DNA, 50 bp, synthetic construct
  source 1..50: mol_type = other DNA
atggaaggtatatgttgtcaactggccagatagggcattcctccggccag

SEQ ID NO: 29934 - DNA, 50 bp, synthetic construct
  source 1..50: mol_type = other DNA
ctccaaacgcaaaaaagcgccggggtcacgctctttccgcagatttgcgg

SEQ ID NO: 29935 - DNA, 50 bp, synthetic construct
  source 1..50: mol_type = other DNA
gccgtgcccgtggtcggcctcttcggacgttggccggtcgcggcttcgat

SEQ ID NO: 29936 - DNA, 50 bp, synthetic construct
  source 1..50: mol_type = other DNA
atctgatcgccgcgcgggagcggctctccgcttccgcgggacgaggccat

SEQ ID NO: 29937 - DNA, 50 bp, synthetic construct
  source 1..50: mol_type = other DNA
atataggtaaggccattattgtattcatcaagataagggtgatcaatttg

SEQ ID NO: 29938 - DNA, 50 bp, synthetic construct
  source 1..50: mol_type = other DNA
cttttcttgtacccattttatcatttaagataaaaagaccttaaccaaat

SEQ ID NO: 29939 - DNA, 50 bp, synthetic construct
  source 1..50: mol_type = other DNA
ttgacttttcttctctttcattgtatcactctaaagggaagataagtcaa

SEQ ID NO: 29940 - DNA, 50 bp, synthetic construct
  source 1..50: mol_type = other DNA
cactgcggccccatcagcagcatggagcagtcggtggtgccgccgccaat

SEQ ID NO: 29941 - DNA, 50 bp, synthetic construct
  source 1..50: mol_type = other DNA
ttttagcattgatttttccttctaaccagccaaacaagtcacccataagg

SEQ ID NO: 29942 - DNA, 50 bp, synthetic construct
  source 1..50: mol_type = other DNA
aataggaagcagaaaaatccaataatttttaattttttcatattcctttt

SEQ ID NO: 29943 - DNA, 50 bp, synthetic construct
  source 1..50: mol_type = other DNA
gccagagataattgtcaaagctcccttggtctttggaaatttgttccaga

SEQ ID NO: 29944 - DNA, 50 bp, synthetic construct
  source 1..50: mol_type = other DNA
agcggcaggacaggcagataagtatgccattgagtgctacatctgcgtaa

SEQ ID NO: 29945 - DNA, 50 bp, synthetic construct
  source 1..50: mol_type = other DNA
aagcttgacgaaacggaagaaattgatgtttcttcgttgtcatcaatctg

SEQ ID NO: 29946 - DNA, 50 bp, synthetic construct
  source 1..50: mol_type = other DNA
aagggtcattgtattgtagctgttcgaatagacttcattcaagggtcatt

SEQ ID NO: 29947 - DNA, 50 bp, synthetic construct
  source 1..50: mol_type = other DNA
ttcgacgggaaatttcccgccggtcagccgggctgattttgcctccagcg

SEQ ID NO: 29948 - DNA, 50 bp, synthetic construct
  source 1..50: mol_type = other DNA
gcttgatattccggccttttagagtgttcttaaagccgataaagccaagc

SEQ ID NO: 29949 - DNA, 50 bp, synthetic construct
  source 1..50: mol_type = other DNA
atggtaccccttggaccgaggaacggcttgataacaccaagcacatcgta

SEQ ID NO: 29950 - DNA, 50 bp, synthetic construct
  source 1..50: mol_type = other DNA
ggccaatatattccgtgacttgtttcgccgggattcgcgatattgtgggc

SEQ ID NO: 29951 - DNA, 50 bp, synthetic construct
  source 1..50: mol_type = other DNA
gaaccgggcggctgtctaaaatcatctgatgaaaatcacccgattaacgc

SEQ ID NO: 29952 - DNA, 50 bp, synthetic construct
  source 1..50: mol_type = other DNA
aaagatggatttgcatagggtgttgtctctggtatttggatgaaatgctt

SEQ ID NO: 29953 - DNA, 50 bp, synthetic construct
  source 1..50: mol_type = other DNA
ccgtacatggaataataaagcactagtaccagaactttagccatttctaa

SEQ ID NO: 29954 - DNA, 50 bp, synthetic construct
  source 1..50: mol_type = other DNA
atggaatcaacgtattaccgccaatatgctggggttccccctccaaccca

SEQ ID NO: 29955 - DNA, 50 bp, synthetic construct
  source 1..50: mol_type = other DNA
tccaggcgaccccgaggtgatcagccctgttgtattcgcggccgtcgctt

SEQ ID NO: 29956 - DNA, 50 bp, synthetic construct
  source 1..50: mol_type = other DNA
agagactatgttctgtagagaaccttgaccacatgccagccaaattttgt

SEQ ID NO: 29957 - DNA, 50 bp, synthetic construct
  source 1..50: mol_type = other DNA
ggggttcgaatcccctatgggacaccatcggcacaccaaatctatttggt

SEQ ID NO: 29958 - DNA, 50 bp, synthetic construct
  source 1..50: mol_type = other DNA
atcaatggtcattgtattgtagctatagactttattcaagggtcattgaa

SEQ ID NO: 29959 - DNA, 50 bp, synthetic construct
  source 1..50: mol_type = other DNA
atcaagggtcattgtattgtagctatagacttcattcaatggtcattgaa

SEQ ID NO: 29960 - DNA, 50 bp, synthetic construct
  source 1..50: mol_type = other DNA
gaataataaagcactagtattcttgcaccagaactttagccatttctaac

SEQ ID NO: 29961 - DNA, 50 bp, synthetic construct
  source 1..50: mol_type = other DNA
caaaggatacaaaatccctagtcagacatgcagtggtttggtagccccac

SEQ ID NO: 29962 - DNA, 50 bp, synthetic construct
  source 1..50: mol_type = other DNA
ttcaatgacccttgaattaagtctatagctacaatacaatgacccttgat

SEQ ID NO: 29963 - DNA, 50 bp, synthetic construct
  source 1..50: mol_type = other DNA
tttatagtacccgatagcgcggatttgcttttcctgtgtagtacccagtg

SEQ ID NO: 29964 - DNA, 50 bp, synthetic construct
  source 1..50: mol_type = other DNA
ctggacggcacggaccttcagtccgtcgaacccctgtccgaaagcacttt

SEQ ID NO: 29965 - DNA, 50 bp, synthetic construct
  source 1..50: mol_type = other DNA
ttagtgaagcaattacttagagcatttggtctgccccattgctgctattt

SEQ ID NO: 29966 - DNA, 50 bp, synthetic construct
  source 1..50: mol_type = other DNA
tgtgacaccttttgtttttcttgggtacaagaaaaagggctttttaatgc

SEQ ID NO: 29967 - DNA, 50 bp, synthetic construct
  source 1..50: mol_type = other DNA
atcctttttagattggagatgatatttatcattcaaaaatcaaaactgac

SEQ ID NO: 29968 - DNA, 50 bp, synthetic construct
  source 1..50: mol_type = other DNA
cttgaaaactgatccgaaatcaccttggaaaggtcacacctctttccaaa

SEQ ID NO: 29969 - DNA, 50 bp, synthetic construct
  source 1..50: mol_type = other DNA
ttgcttcttccagcgtactatagaattttactttactctgcttccagcgt

SEQ ID NO: 29970 - DNA, 50 bp, synthetic construct
  source 1..50: mol_type = other DNA
cggcgctgcagttcgcgccggccctgccgcccggaacgcctgccgcaccg

SEQ ID NO: 29971 - DNA, 50 bp, synthetic construct
  source 1..50: mol_type = other DNA
aagaaatcacgaaaaatgtttacatatgtaaacatttttcgaaaaatgtt

SEQ ID NO: 29972 - DNA, 50 bp, synthetic construct
  source 1..50: mol_type = other DNA
tcgtcgtcaatgattggaggacaaaaagacaaggctgtctgactctttgt

SEQ ID NO: 29973 - DNA, 50 bp, synthetic construct
  source 1..50: mol_type = other DNA
cagcgcggcatcaatcgggtgatcctcgacagccgcccggtgcatcacgc

SEQ ID NO: 29974 - DNA, 50 bp, synthetic construct
  source 1..50: mol_type = other DNA
gagaatatatctcatgattggcggtcccttccatagacgactatattctc

SEQ ID NO: 29975 - DNA, 50 bp, synthetic construct
  source 1..50: mol_type = other DNA
atttaatcctgttaacattgccgtcggcgaaaaagttttaagatttaact

SEQ ID NO: 29976 - DNA, 50 bp, synthetic construct
  source 1..50: mol_type = other DNA
gaaaaagaaaaaaatgttgaaggtatacctatatcatttaaaataccttt

SEQ ID NO: 29977 - DNA, 50 bp, synthetic construct
  source 1..50: mol_type = other DNA
actattgaggcgggtatagttttgtcagaacttatgttcgaaataatagt

SEQ ID NO: 29978 - DNA, 50 bp, synthetic construct
  source 1..50: mol_type = other DNA
gcaggcgaaggtgaggttgcttatttgttgggttgtcgatgtcggtgggt

SEQ ID NO: 29979 - DNA, 50 bp, synthetic construct
  source 1..50: mol_type = other DNA
catggcccactactgatcgaggagtatgctactgttgctggtatcagatg

SEQ ID NO: 29980 - DNA, 50 bp, synthetic construct
  source 1..50: mol_type = other DNA
gctcgcatgatcctgacgaccgagaccagcatcgtggacaagcctgccga

SEQ ID NO: 29981 - DNA, 50 bp, synthetic construct
  source 1..50: mol_type = other DNA
tttgcatgataatcatacaagtgtattcaaataggtgccgttacagcaaa

SEQ ID NO: 29982 - DNA, 50 bp, synthetic construct
  source 1..50: mol_type = other DNA
gcgctgtgaaccgggcggctatcgaggataacgcggttgacgtttcgctg

SEQ ID NO: 29983 - DNA, 50 bp, synthetic construct
  source 1..50: mol_type = other DNA
atgccggaacttgaggccgctggaatgtccggcagatcaaagaccggaga

SEQ ID NO: 29984 - DNA, 50 bp, synthetic construct
  source 1..50: mol_type = other DNA
taaatgtcgcatcataatctgtcttatgatcagcgctgcttgctttaaaa

SEQ ID NO: 29985 - DNA, 50 bp, synthetic construct
  source 1..50: mol_type = other DNA
catgtccatcgttgagatcgtggacgtcctcgatcctttggatctgcggg

SEQ ID NO: 29986 - DNA, 50 bp, synthetic construct
  source 1..50: mol_type = other DNA
actttgtatggcattccgaactgcgacaccatgaaaaaagcccgtaaatg

SEQ ID NO: 29987 - DNA, 50 bp, synthetic construct
  source 1..50: mol_type = other DNA
cggttcagcagccatgtaccgtatgaatatattcgatcactatcgccagc

SEQ ID NO: 29988 - DNA, 50 bp, synthetic construct
  source 1..50: mol_type = other DNA
gtgaactctacgacaaatcagcattaagtctgaatagtccagcttccaag

SEQ ID NO: 29989 - DNA, 50 bp, synthetic construct
  source 1..50: mol_type = other DNA
cataacatatgttattatttcaacgtcgtctatccattatatatcaatga

SEQ ID NO: 29990 - DNA, 50 bp, synthetic construct
  source 1..50: mol_type = other DNA
gcaattgcttactataagcaaaaatattttcaactggcttaagcaagtaa

SEQ ID NO: 29991 - DNA, 50 bp, synthetic construct
  source 1..50: mol_type = other DNA
caagttgtggcattacatacatcatatgcgtaatggcaagcctatcattc

SEQ ID NO: 29992 - DNA, 50 bp, synthetic construct
  source 1..50: mol_type = other DNA
caaaactaactggaaagaaatattaaccgcgttctttccatttagtgaca

SEQ ID NO: 29993 - DNA, 50 bp, synthetic construct
  source 1..50: mol_type = other DNA
tcactccgccctgaatatgtggtccggtttacgcaatgccagtggattga

SEQ ID NO: 29994 - DNA, 50 bp, synthetic construct
  source 1..50: mol_type = other DNA
gttgataaaaaagttcatgtcttgaagaatactagtgctttattattcca

SEQ ID NO: 29995 - DNA, 50 bp, synthetic construct
  source 1..50: mol_type = other DNA
accgactatacgattcatggctctaaaagcccatgaatcggactttctaa

SEQ ID NO: 29996 - DNA, 50 bp, synthetic construct
  source 1..50: mol_type = other DNA
aagccatcccggaaacccaaacgttgatattagggaatccgaaatatgaa

SEQ ID NO: 29997 - DNA, 50 bp, synthetic construct
  source 1..50: mol_type = other DNA
accgaaccaccaaccagaagtacagcagaaaaattgtctgacttttcgga

SEQ ID NO: 29998 - DNA, 50 bp, synthetic construct
  source 1..50: mol_type = other DNA
acactcaaggcaaaatcatatacagtggtctttgattcgggcgattgggg

SEQ ID NO: 29999 - DNA, 50 bp, synthetic construct
  source 1..50: mol_type = other DNA
cagggagggatcgtccgcctgattacctgcgcatggacgcagcttttctg

SEQ ID NO: 30000 - DNA, 50 bp, synthetic construct
  source 1..50: mol_type = other DNA
gcatgagcaatattcgatacataccgagaaaaaagcgctggaagagctgc

SEQ ID NO: 30001 - DNA, 50 bp, synthetic construct
  source 1..50: mol_type = other DNA
accgccagaggctggaccttgacaatagtcaatctgacagctcatctgga

SEQ ID NO: 30002 - DNA, 50 bp, synthetic construct
  source 1..50: mol_type = other DNA
ctcatatagccaaaagcttgatggagctaccaaccttacaactatattat

SEQ ID NO: 30003 - DNA, 50 bp, synthetic construct
  source 1..50: mol_type = other DNA
ccaataaatacaaaaataaagattccaatagttaagtttgtcttcatcaa

SEQ ID NO: 30004 - DNA, 50 bp, synthetic construct
  source 1..50: mol_type = other DNA
caaatattcttcaaatcggtaagttgccctccttttttgaagaaacaaca

SEQ ID NO: 30005 - DNA, 50 bp, synthetic construct
  source 1..50: mol_type = other DNA
tgttgttccaggcgtggagcccgatccgcgcgtctcgcactgaagaaaaa

SEQ ID NO: 30006 - DNA, 50 bp, synthetic construct
  source 1..50: mol_type = other DNA
ccacctcgcggatggaactatgacgcctcatatctggggcgtttcggcgc

SEQ ID NO: 30007 - DNA, 50 bp, synthetic construct
  source 1..50: mol_type = other DNA
gactcctttatcagtggaatcacgggcgtgattgtctatgttgaagaaaa

SEQ ID NO: 30008 - DNA, 50 bp, synthetic construct
  source 1..50: mol_type = other DNA
aagggatagtcctgatatgtattttttaatgtgactcagtattatccgtt

SEQ ID NO: 30009 - DNA, 50 bp, synthetic construct
  source 1..50: mol_type = other DNA
aggtcccgctgatctctgtatagcctcttatgcagaggtctcctcttcct

SEQ ID NO: 30010 - DNA, 50 bp, synthetic construct
  source 1..50: mol_type = other DNA
tgacctcgtatctatgatagaataaattctgacagaaggatatccggtag

SEQ ID NO: 30011 - DNA, 50 bp, synthetic construct
  source 1..50: mol_type = other DNA
tatacttaattttaaggaggatgaattcattgattcttgctactttttta

SEQ ID NO: 30012 - DNA, 50 bp, synthetic construct
  source 1..50: mol_type = other DNA
gcatccacggctcgattcagatacgaacatacaaaaggagcctgcatata

SEQ ID NO: 30013 - DNA, 50 bp, synthetic construct
  source 1..50: mol_type = other DNA
cttcgccggttccttttccaaaatttacttttggaaaatatcctatgtaa

SEQ ID NO: 30014 - DNA, 50 bp, synthetic construct
  source 1..50: mol_type = other DNA
gtagtcatgagcttgtcatggttcactaaccatgacaaaaaccatgatta

SEQ ID NO: 30015 - DNA, 50 bp, synthetic construct
  source 1..50: mol_type = other DNA
gtcccggaaacatcagcacccggtacaccgatgcggatggtttctgggac

SEQ ID NO: 30016 - DNA, 50 bp, synthetic construct
  source 1..50: mol_type = other DNA
atatgccccggaacacctttgtgtataaaaacagccgtttcggattttac

SEQ ID NO: 30017 - DNA, 50 bp, synthetic construct
  source 1..50: mol_type = other DNA
aatatatagctataggaatattttatagaatattactagagatatataag

SEQ ID NO: 30018 - DNA, 50 bp, synthetic construct
  source 1..50: mol_type = other DNA
cgttgagcagatatacagaagggttggcagatcgatatatccgctatgaa

SEQ ID NO: 30019 - DNA, 50 bp, synthetic construct
  source 1..50: mol_type = other DNA
cgacccgtattcggccaagccttaacttatgtgctgttttataccaccaa

SEQ ID NO: 30020 - DNA, 50 bp, synthetic construct
  source 1..50: mol_type = other DNA
gggcgaggttgacggagctgcgtgagagcgaccctcgaccagcttccagc

SEQ ID NO: 30021 - DNA, 50 bp, synthetic construct
  source 1..50: mol_type = other DNA
attttccgggtactgcggcggttttgaaacggctgcagaacaaataaggg

SEQ ID NO: 30022 - DNA, 50 bp, synthetic construct
  source 1..50: mol_type = other DNA
gaatgaagtatacgctgaaatagataaggccgcaggcgatgcctttattg

SEQ ID NO: 30023 - DNA, 50 bp, synthetic construct
  source 1..50: mol_type = other DNA
ttaaggacataccactcagataatttttactcattgtcatattcttccat

SEQ ID NO: 30024 - DNA, 50 bp, synthetic construct
  source 1..50: mol_type = other DNA
gccgcgctggccggcgggctcgacaagccctatccgcccgagaacgacag

SEQ ID NO: 30025 - DNA, 50 bp, synthetic construct
  source 1..50: mol_type = other DNA
gacaatagagatgtttttgcgttttcggcttcaagagagggatatccgtc

SEQ ID NO: 30026 - DNA, 50 bp, synthetic construct
  source 1..50: mol_type = other DNA
aaattgtactaatttttttaaaaacttttctgataaaatgggtacaagaa

SEQ ID NO: 30027 - DNA, 50 bp, synthetic construct
  source 1..50: mol_type = other DNA
caaaaaaatcccgcaacccctgatttcacaggatttgcgggattttttga

SEQ ID NO: 30028 - DNA, 50 bp, synthetic construct
  source 1..50: mol_type = other DNA
tataattaaccttgccagtttcccttgggaaactcctttttcccattagg

SEQ ID NO: 30029 - DNA, 50 bp, synthetic construct
  source 1..50: mol_type = other DNA
gtcaaagtcaatccgtaaataagaaacagatattatggagttaattcacg

SEQ ID NO: 30030 - DNA, 50 bp, synthetic construct
  source 1..50: mol_type = other DNA
gataatgtatgtttttattaggagtactcttaaatcaactataaattatt

SEQ ID NO: 30031 - DNA, 50 bp, synthetic construct
  source 1..50: mol_type = other DNA
tatattttaacacaataagtcattttaagcacttcaacaatattgctata

SEQ ID NO: 30032 - DNA, 50 bp, synthetic construct
  source 1..50: mol_type = other DNA
tcctgccaagtatcctgaaaataattgcttttttaggaattatatctgca

SEQ ID NO: 30033 - DNA, 50 bp, synthetic construct
  source 1..50: mol_type = other DNA
tgaaagtgctgtatcgtattccctgattaaggtactatacagaacctaat

SEQ ID NO: 30034 - DNA, 50 bp, synthetic construct
  source 1..50: mol_type = other DNA
gcagtggcgatggttattccaaccaacgaggaattcgtgatagcccagca

SEQ ID NO: 30035 - DNA, 50 bp, synthetic construct
  source 1..50: mol_type = other DNA
cttaaatcttaaaagccttcctttataaataggaggtcttttttctgtat

SEQ ID NO: 30036 - DNA, 50 bp, synthetic construct
  source 1..50: mol_type = other DNA
caacttctatgtgtgctgacagtttccacgtgatgcgtatttggaaataa

SEQ ID NO: 30037 - DNA, 50 bp, synthetic construct
  source 1..50: mol_type = other DNA
cctcattctacacatgtggagactgtagttcaaacacatgtggaaactgt

SEQ ID NO: 30038 - DNA, 50 bp, synthetic construct
  source 1..50: mol_type = other DNA
gcaatgatgccaataaccaccatgatgaccaccatcagttcgataagtgt

SEQ ID NO: 30039 - DNA, 50 bp, synthetic construct
  source 1..50: mol_type = other DNA
ccggctttcagctcacttaaagattacgcctatagctcgcacagtaagtg

SEQ ID NO: 30040 - DNA, 50 bp, synthetic construct
  source 1..50: mol_type = other DNA
cgggtgatttttgttatacacgtttagaccttgatgattttagacagccg

SEQ ID NO: 30041 - DNA, 50 bp, synthetic construct
  source 1..50: mol_type = other DNA
aagccatcccggaaacccaaacgttgatattagggaatccgaaatatgag

SEQ ID NO: 30042 - DNA, 50 bp, synthetic construct
  source 1..50: mol_type = other DNA
acgcttgaagaagttttgaatatttttttatgcaacgcttgaagaagcca

SEQ ID NO: 30043 - DNA, 50 bp, synthetic construct
  source 1..50: mol_type = other DNA
agcattgtgacatcaaatgtaccatattttctaactgtaaaaacaatttg

SEQ ID NO: 30044 - DNA, 50 bp, synthetic construct
  source 1..50: mol_type = other DNA
tatgcgaggagaagcttatcataaattacctaataagcagaggcgtatca

SEQ ID NO: 30045 - DNA, 50 bp, synthetic construct
  source 1..50: mol_type = other DNA
agtttaatgtctttagataaagacataggtttatctttcaaggtaaacat

SEQ ID NO: 30046 - DNA, 50 bp, synthetic construct
  source 1..50: mol_type = other DNA
ggactcacctacagcggggagcggttgccgtcctcaagaacggtgatacc

SEQ ID NO: 30047 - DNA, 50 bp, synthetic construct
  source 1..50: mol_type = other DNA
ggacagcggcgttgccgtgtacttgcatttgcaaggcaacgagcctatcg

SEQ ID NO: 30048 - DNA, 50 bp, synthetic construct
  source 1..50: mol_type = other DNA
gctgtaagagccgccctaacagggcataaggtatatgccacgattcacac

SEQ ID NO: 30049 - DNA, 50 bp, synthetic construct
  source 1..50: mol_type = other DNA
gtatgcatcgttgtcaaaaccaagtgtccggtaagtgctgctctcacagc

SEQ ID NO: 30050 - DNA, 50 bp, synthetic construct
  source 1..50: mol_type = other DNA
gcttttcgaatcaatgcgggtgctcccagcgccttatcataagtgaggag

SEQ ID NO: 30051 - DNA, 50 bp, synthetic construct
  source 1..50: mol_type = other DNA
cgcatcgggcagctgcctgttcaaacaaaaacaggcgcaccgccaaaagc

SEQ ID NO: 30052 - DNA, 50 bp, synthetic construct
  source 1..50: mol_type = other DNA
ttggggagcggcaccttataagccgcgttcgccatgttgccgctctcctc

SEQ ID NO: 30053 - DNA, 50 bp, synthetic construct
  source 1..50: mol_type = other DNA
gcgatcttcttcgttcccgtcttcttcgtcttcgtcatgaagattttcgg

SEQ ID NO: 30054 - DNA, 50 bp, synthetic construct
  source 1..50: mol_type = other DNA
actaactcaaaaaaatatataaaatattccatatatgacattcagttaag

SEQ ID NO: 30055 - DNA, 50 bp, synthetic construct
  source 1..50: mol_type = other DNA
ttgatgaaggtattcgctggattgctcaatcggttcaacagttacatcag

SEQ ID NO: 30056 - DNA, 50 bp, synthetic construct
  source 1..50: mol_type = other DNA
ttatgcgaggggaagcgtatcacaaactaacagggagaagcgtatcataa

SEQ ID NO: 30057 - DNA, 50 bp, synthetic construct
  source 1..50: mol_type = other DNA
aacatgcgtgttttctcaacatcatccacattgtacgctacagccccgtt

SEQ ID NO: 30058 - DNA, 50 bp, synthetic construct
  source 1..50: mol_type = other DNA
atgttcccgcaaacagctcatgttgaaaccgtagtactcttgcagttaaa

SEQ ID NO: 30059 - DNA, 50 bp, synthetic construct
  source 1..50: mol_type = other DNA
gccatggtcttcttcgccgtctggtgggcgtggatgaacttcacctggtt

SEQ ID NO: 30060 - DNA, 50 bp, synthetic construct
  source 1..50: mol_type = other DNA
gtacggcaaagacttcttttatgagggcataaaaatagcccttgccttct

SEQ ID NO: 30061 - DNA, 50 bp, synthetic construct
  source 1..50: mol_type = other DNA
tttttaggaaattttgaaagaggtactatactttattatatcatataaaa

SEQ ID NO: 30062 - DNA, 50 bp, synthetic construct
  source 1..50: mol_type = other DNA
gcatgtgacaggaaaagattttcatgagaatgatttcccctgagacaagc

SEQ ID NO: 30063 - DNA, 50 bp, synthetic construct
  source 1..50: mol_type = other DNA
attttcatggagataacctcgcatgaggacattgtcatcaagtggaaaat

SEQ ID NO: 30064 - DNA, 50 bp, synthetic construct
  source 1..50: mol_type = other DNA
atgcaaatgttttaaaaaaccaccatgaaggtaacaaacaggtcggacat

SEQ ID NO: 30065 - DNA, 50 bp, synthetic construct
  source 1..50: mol_type = other DNA
ttccaggaattgcctttctgttttgaaaaacagctttttaatgctttttt

SEQ ID NO: 30066 - DNA, 50 bp, synthetic construct
  source 1..50: mol_type = other DNA
ctacgtttccttagtcaattgcatctgcggcttgccttatcacatcggtg

SEQ ID NO: 30067 - DNA, 50 bp, synthetic construct
  source 1..50: mol_type = other DNA
attttccaattgataacaatgtcctcatgagaggttatctccatgaaaat

SEQ ID NO: 30068 - DNA, 50 bp, synthetic construct
  source 1..50: mol_type = other DNA
taactttttataaaagaagttctaagtagtacctctttcaaaatttccta

SEQ ID NO: 30069 - DNA, 50 bp, synthetic construct
  source 1..50: mol_type = other DNA
tacacggaatggtacaggggaatatatgcacaatgacgtacaggggtaag

SEQ ID NO: 30070 - DNA, 50 bp, synthetic construct
  source 1..50: mol_type = other DNA
ttctcaagcaccgtcactgcttcaactcaacatgcggagtttggggaaac

SEQ ID NO: 30071 - DNA, 50 bp, synthetic construct
  source 1..50: mol_type = other DNA
atagcaaccgcaaccattgttagtgctgctgccagcaccatcaattcaat

SEQ ID NO: 30072 - DNA, 50 bp, synthetic construct
  source 1..50: mol_type = other DNA
attgaattgatggtgctggcagcagcactaacaatggttgcggttgctat

SEQ ID NO: 30073 - DNA, 50 bp, synthetic construct
  source 1..50: mol_type = other DNA
attgttaaagagtacgtagatcctggggtatctaaatcctctttaacaag

SEQ ID NO: 30074 - DNA, 50 bp, synthetic construct
  source 1..50: mol_type = other DNA
tatggtccgggatcgtcttcagtatatcagcattaccttccttttctccg

SEQ ID NO: 30075 - DNA, 50 bp, synthetic construct
  source 1..50: mol_type = other DNA
ggggttggtagatgattcggatgaagacagcctcttcaaaacattacctg

SEQ ID NO: 30076 - DNA, 50 bp, synthetic construct
  source 1..50: mol_type = other DNA
aattcacctatgatgatatcatttacaaaaagtatatgaatagatataat

SEQ ID NO: 30077 - DNA, 50 bp, synthetic construct
  source 1..50: mol_type = other DNA
tacctattttatcaaaaaaggggtacctccatattttgatacatgggcat

SEQ ID NO: 30078 - DNA, 50 bp, synthetic construct
  source 1..50: mol_type = other DNA
gacaatttgcgagttttgaacacaaagcttatcagtagcaggaaaaacag

SEQ ID NO: 30079 - DNA, 50 bp, synthetic construct
  source 1..50: mol_type = other DNA
gggttcgaatccctcctccgctaccaacagaacagggtccattctggaca

SEQ ID NO: 30080 - DNA, 50 bp, synthetic construct
  source 1..50: mol_type = other DNA
ctgtttttcctgctactgatcagctttgtgttcaaaactcgcaaattgtc

SEQ ID NO: 30081 - DNA, 50 bp, synthetic construct
  source 1..50: mol_type = other DNA
cagcaacagcataatgtaattgatatcaaatatacattatgatagcgttt

SEQ ID NO: 30082 - DNA, 50 bp, synthetic construct
  source 1..50: mol_type = other DNA
tactgataagctttgtgattcggttggtgaaaacagctttgtgttcaaaa

SEQ ID NO: 30083 - DNA, 50 bp, synthetic construct
  source 1..50: mol_type = other DNA
tgtttttcctgctactgataagctttttgtgttcaaaactcgcaaattgt

SEQ ID NO: 30084 - DNA, 50 bp, synthetic construct
  source 1..50: mol_type = other DNA
tcccgaatgccggcaaagaagtcccggaatatgttcgcgcccagaatcgc

SEQ ID NO: 30085 - DNA, 50 bp, synthetic construct
  source 1..50: mol_type = other DNA
ccgtcgttctctatcgtcgggctatacggttgcacgatatcgatcgtcgg

SEQ ID NO: 30086 - DNA, 50 bp, synthetic construct
  source 1..50: mol_type = other DNA
gtgtttgcaataggggcaccaggagtcccaggagggacagttatggcatc

SEQ ID NO: 30087 - DNA, 50 bp, synthetic construct
  source 1..50: mol_type = other DNA
tgataaggttctccgtatcgttattatttatggtacggttcattcttcat

SEQ ID NO: 30088 - DNA, 50 bp, synthetic construct
  source 1..50: mol_type = other DNA
ggctagagcagtatcaatagtatttaaaaccactaggagtcccaagagat

SEQ ID NO: 30089 - DNA, 50 bp, synthetic construct
  source 1..50: mol_type = other DNA
gatgccataactgttccccctgggactcctggtgcccctattgcaaacac

SEQ ID NO: 30090 - DNA, 50 bp, synthetic construct
  source 1..50: mol_type = other DNA
tcccaaacactgcacatatagagtgcactctatacatattgagaatgttg

SEQ ID NO: 30091 - DNA, 50 bp, synthetic construct
  source 1..50: mol_type = other DNA
ggagggtaatgaaatatatctagcatattgtgtgtaatgaaatttgtctc

SEQ ID NO: 30092 - DNA, 50 bp, synthetic construct
  source 1..50: mol_type = other DNA
ataggagtagataaggaaggtaatgaaatttgtctcatagatattttaag

SEQ ID NO: 30093 - DNA, 50 bp, synthetic construct
  source 1..50: mol_type = other DNA
attatttttttattaacttagctacacgctctcaacatgagaagtattag

SEQ ID NO: 30094 - DNA, 50 bp, synthetic construct
  source 1..50: mol_type = other DNA
acatgtcactggtgccatgtccactagcgaacatgtcactggtgccacgt

SEQ ID NO: 30095 - DNA, 50 bp, synthetic construct
  source 1..50: mol_type = other DNA
gaagacgctcgaggtgctgcgcgagccggagggattcctcaatcgtctta

SEQ ID NO: 30096 - DNA, 50 bp, synthetic construct
  source 1..50: mol_type = other DNA
aagggaccttgttgaactaagcaaaggcggttgttaaactaagcaaaaaa

SEQ ID NO: 30097 - DNA, 50 bp, synthetic construct
  source 1..50: mol_type = other DNA
agtcgtccatttcgctgtacaatatcagacggcctccagggaacgtctaa

SEQ ID NO: 30098 - DNA, 50 bp, synthetic construct
  source 1..50: mol_type = other DNA
tcatggagttaaacgggtcgccggtttcgggtcgccggtcggctcctgac

SEQ ID NO: 30099 - DNA, 50 bp, synthetic construct
  source 1..50: mol_type = other DNA
gtcgtaaccggatctgtcgtaagaatgcttgtgacgattatcgggatgac

SEQ ID NO: 30100 - DNA, 50 bp, synthetic construct
  source 1..50: mol_type = other DNA
gtcatcccgataatcgtcacaagcatcgtcacgacagatccggttacgac

SEQ ID NO: 30101 - DNA, 50 bp, synthetic construct
  source 1..50: mol_type = other DNA
tcttttgaactcttttcttgtacccaaaactcctcaaaactatccaaatt

SEQ ID NO: 30102 - DNA, 50 bp, synthetic construct
  source 1..50: mol_type = other DNA
tgtatgcaagacatccattggactgacggctcttttggttatttcccatc

SEQ ID NO: 30103 - DNA, 50 bp, synthetic construct
  source 1..50: mol_type = other DNA
ttcaatgacttgtttggttgcgggggcacgcaaccaacgatatcagcagt

SEQ ID NO: 30104 - DNA, 50 bp, synthetic construct
  source 1..50: mol_type = other DNA
ttcccccttcttcgtccattccgatcagcaaaggtatggaactggcttgc

SEQ ID NO: 30105 - DNA, 50 bp, synthetic construct
  source 1..50: mol_type = other DNA
caaacccatcatgtcgagactgtggttagtgacaacacatatcgaattag

SEQ ID NO: 30106 - DNA, 50 bp, synthetic construct
  source 1..50: mol_type = other DNA
gtgccgcccgagtgatcgtcgtccactaattattatcaccccagcggcag

SEQ ID NO: 30107 - DNA, 50 bp, synthetic construct
  source 1..50: mol_type = other DNA
taatggctgttgcgttgatagcgccagtagaaacaacgagtcaacaaagt

SEQ ID NO: 30108 - DNA, 50 bp, synthetic construct
  source 1..50: mol_type = other DNA
aaaccttgaaagcgggtgccgaggaacctcaatatccttttttatatctt

SEQ ID NO: 30109 - DNA, 50 bp, synthetic construct
  source 1..50: mol_type = other DNA
tcgagatcgggcagcccgacgatcgagaacgacggcagcccgttggcgag

SEQ ID NO: 30110 - DNA, 50 bp, synthetic construct
  source 1..50: mol_type = other DNA
accaaaagagccgtctgtctaatgtacatttgctctcagtccaatggatg

SEQ ID NO: 30111 - DNA, 50 bp, synthetic construct
  source 1..50: mol_type = other DNA
tacagaagacattcaccatatttcttacgctatgtcaaatgcgccagaag

SEQ ID NO: 30112 - DNA, 50 bp, synthetic construct
  source 1..50: mol_type = other DNA
tgttggcaaaattacaaatgttaattttggcattagaatattattcaaca

SEQ ID NO: 30113 - DNA, 50 bp, synthetic construct
  source 1..50: mol_type = other DNA
cagccgtaccagcgtttcagtcgtcgccacgctcatcgctgaaacgtaac

SEQ ID NO: 30114 - DNA, 50 bp, synthetic construct
  source 1..50: mol_type = other DNA
taacatattgatatgtatagattatttaaacagtgaataattatatgtta

SEQ ID NO: 30115 - DNA, 50 bp, synthetic construct
  source 1..50: mol_type = other DNA
ggatttttccattttgatttccttatcaggcaaaaaaggttttagaatcc

SEQ ID NO: 30116 - DNA, 50 bp, synthetic construct
  source 1..50: mol_type = other DNA
aaggctattcatcttgaggctcaaatctctcctgccctcacacgttcctt

SEQ ID NO: 30117 - DNA, 50 bp, synthetic construct
  source 1..50: mol_type = other DNA
cggcatcaattgcttcttccagcgtaaatctaccgcagcaacaacacctt

SEQ ID NO: 30118 - DNA, 50 bp, synthetic construct
  source 1..50: mol_type = other DNA
aaatggatgatccagccccagtagtacaccgctttgcggctacgacgaaa

SEQ ID NO: 30119 - DNA, 50 bp, synthetic construct
  source 1..50: mol_type = other DNA
tcaggtgcatttggtgaattcttagctcaggatggcaataatgccaatga

SEQ ID NO: 30120 - DNA, 50 bp, synthetic construct
  source 1..50: mol_type = other DNA
gttttacttatgatacgcctctgcttaaaaaaccgcatcacttatgatac

SEQ ID NO: 30121 - DNA, 50 bp, synthetic construct
  source 1..50: mol_type = other DNA
cagcgtaaagtaaaatacatcataaagaatatgtattctatagtacgctg

SEQ ID NO: 30122 - DNA, 50 bp, synthetic construct
  source 1..50: mol_type = other DNA
ctttctcgtaggcaccggagcgcccgctggacccggaaattactgcccag

SEQ ID NO: 30123 - DNA, 50 bp, synthetic construct
  source 1..50: mol_type = other DNA
ctaattcgatatgcgttgagagtacagtcctacacactcgatgtgatggg

SEQ ID NO: 30124 - DNA, 50 bp, synthetic construct
  source 1..50: mol_type = other DNA
cacaaccttttcttttaggcaaccatggtactctaatcccttactgattg

SEQ ID NO: 30125 - DNA, 50 bp, synthetic construct
  source 1..50: mol_type = other DNA
tagtcaccccggaaaccccaaaggtgatattagggaatccaaagtatcca

SEQ ID NO: 30126 - DNA, 50 bp, synthetic construct
  source 1..50: mol_type = other DNA
tcactcgttttttattaagaaaatcactttcgataatgctgtacaaatat

SEQ ID NO: 30127 - DNA, 50 bp, synthetic construct
  source 1..50: mol_type = other DNA
tagtcggtcgaaacccggcaataagccgcttgatggtttgcaaccgctta

SEQ ID NO: 30128 - DNA, 50 bp, synthetic construct
  source 1..50: mol_type = other DNA
atatggtctgggaaaaaaattcgatatatgctttttttccggtaccattt

SEQ ID NO: 30129 - DNA, 50 bp, synthetic construct
  source 1..50: mol_type = other DNA
ctgctatggatactttccatgatgatcaatgttatttttcttcatagcat

SEQ ID NO: 30130 - DNA, 50 bp, synthetic construct
  source 1..50: mol_type = other DNA
atggatttgctaaagttatcaaaatattttgataactgcatcatattcat

SEQ ID NO: 30131 - DNA, 50 bp, synthetic construct
  source 1..50: mol_type = other DNA
gtacaagcacaaaaaattaggcacatgattttaagttcttaggattctat

SEQ ID NO: 30132 - DNA, 50 bp, synthetic construct
  source 1..50: mol_type = other DNA
gcgacaatccagccgacagtgcttatcagcaaacccagaaggattccaac

SEQ ID NO: 30133 - DNA, 50 bp, synthetic construct
  source 1..50: mol_type = other DNA
aagcagtccatatccacatgaatgattatgattttacgcattactcacct

SEQ ID NO: 30134 - DNA, 50 bp, synthetic construct
  source 1..50: mol_type = other DNA
ttcatatttgggattgcctaatatcaaatatcgggtttccgggatggctt

SEQ ID NO: 30135 - DNA, 50 bp, synthetic construct
  source 1..50: mol_type = other DNA
ccaatctaaaaaatctcgattatcttaatcgtcagtaattttgacttgga

SEQ ID NO: 30136 - DNA, 50 bp, synthetic construct
  source 1..50: mol_type = other DNA
cgtgcaggtgcaggtcgcgccgggctcctcgcgcgaatagatgcggtacg

SEQ ID NO: 30137 - DNA, 50 bp, synthetic construct
  source 1..50: mol_type = other DNA
atcaaaggtcattgtattgtagctatagactttattcaagggtcattgaa

SEQ ID NO: 30138 - DNA, 50 bp, synthetic construct
  source 1..50: mol_type = other DNA
ttatccatttttgtttctaaaagttgtgttttagagtcaaaaaattgtgt

SEQ ID NO: 30139 - DNA, 50 bp, synthetic construct
  source 1..50: mol_type = other DNA
tgtcggtggttcgattccgcccccggacatccggaaaccgcccccgggca

SEQ ID NO: 30140 - DNA, 50 bp, synthetic construct
  source 1..50: mol_type = other DNA
gatcgagcaggccagcgtgcttggtcaaatccattctggcccagcgcatt

SEQ ID NO: 30141 - DNA, 50 bp, synthetic construct
  source 1..50: mol_type = other DNA
ctggtatgggcggtttgaatagccaagctaattcaaatgcaatccgccaa

SEQ ID NO: 30142 - DNA, 50 bp, synthetic construct
  source 1..50: mol_type = other DNA
cttattggttttttagcaattaaaaaatgatgctataaaacaacaattat

SEQ ID NO: 30143 - DNA, 50 bp, synthetic construct
  source 1..50: mol_type = other DNA
ccaaacggtttgaagataaacaggatttaccaatgatacgaacattttta

SEQ ID NO: 30144 - DNA, 50 bp, synthetic construct
  source 1..50: mol_type = other DNA
attgtcttcagtataataggttcctagggaacaaatatcagcattacatt

SEQ ID NO: 30145 - DNA, 50 bp, synthetic construct
  source 1..50: mol_type = other DNA
acacgttctacttattacgagatgagtacttcagtataacacaaacttcc

SEQ ID NO: 30146 - DNA, 50 bp, synthetic construct
  source 1..50: mol_type = other DNA
aggcgccgggacgcagggaggctccggagccgcccttgcgggttccgccc

SEQ ID NO: 30147 - DNA, 50 bp, synthetic construct
  source 1..50: mol_type = other DNA
ttacgctaacgaaacttaaaccagcgtttgataaagttgtgtctgcttaa

SEQ ID NO: 30148 - DNA, 50 bp, synthetic construct
  source 1..50: mol_type = other DNA
tccaatcattgattggaggtcaactagcatcaaggttatcaatgattgaa

SEQ ID NO: 30149 - DNA, 50 bp, synthetic construct
  source 1..50: mol_type = other DNA
aaccttgagattgcgccaattttatataaaaatgcttaccgagatgggct

SEQ ID NO: 30150 - DNA, 50 bp, synthetic construct
  source 1..50: mol_type = other DNA
cgcggtgtgcaacacgccgccacgtaggtgcgggcgatttactgcccgca

SEQ ID NO: 30151 - DNA, 50 bp, synthetic construct
  source 1..50: mol_type = other DNA
aatgctcctgagccctcgcaatgccggtcgggcggcagctcaggagcgtt

SEQ ID NO: 30152 - DNA, 50 bp, synthetic construct
  source 1..50: mol_type = other DNA
gaaggaattcaccgaaacaaaaaaacttcagcatttcctggaattccatc

SEQ ID NO: 30153 - DNA, 50 bp, synthetic construct
  source 1..50: mol_type = other DNA
tcattttctcccccctccccctttataaagggagagaatgttatgagtgt

SEQ ID NO: 30154 - DNA, 50 bp, synthetic construct
  source 1..50: mol_type = other DNA
cggcccctcgccgttctcatcgacgacgcaaccatgtcggcgaggatggc

SEQ ID NO: 30155 - DNA, 50 bp, synthetic construct
  source 1..50: mol_type = other DNA
gctgaaaagccgctcagtccgctccggataggaacggcaaaattttttac

SEQ ID NO: 30156 - DNA, 50 bp, synthetic construct
  source 1..50: mol_type = other DNA
gaatccagtccggctggctttgccggggcaatgccaaccatactgcacaa

SEQ ID NO: 30157 - DNA, 50 bp, synthetic construct
  source 1..50: mol_type = other DNA
tattaaaatatatccttaacaattcttatttttattatcattccataatt

SEQ ID NO: 30158 - DNA, 50 bp, synthetic construct
  source 1..50: mol_type = other DNA
cctatttgatcaaggcggtagcgtttatacgcccgacttgatcaaatcgg

SEQ ID NO: 30159 - DNA, 50 bp, synthetic construct
  source 1..50: mol_type = other DNA
tgtggtcaaatcgctctgcaccttagaaatatcacatgcctttgaccaaa

SEQ ID NO: 30160 - DNA, 50 bp, synthetic construct
  source 1..50: mol_type = other DNA
gccgtcataaaacgcagttcgctcatatatgaagcaagtattattttcaa

SEQ ID NO: 30161 - DNA, 50 bp, synthetic construct
  source 1..50: mol_type = other DNA
ccttcggggcttttcttcaacctcatgagcatgaacagcttttcttaact

SEQ ID NO: 30162 - DNA, 50 bp, synthetic construct
  source 1..50: mol_type = other DNA
actgcggcggcagggccagaacgatttcgttcaaccccatgctgttgagt

SEQ ID NO: 30163 - DNA, 50 bp, synthetic construct
  source 1..50: mol_type = other DNA
gggtccactcgcttctcctccgtaaccgcggttaactagcgagtgcggcg

SEQ ID NO: 30164 - DNA, 50 bp, synthetic construct
  source 1..50: mol_type = other DNA
ttttagttttatttgtggtatgcttctccctatcagtgattttgctaaaa

SEQ ID NO: 30165 - DNA, 50 bp, synthetic construct
  source 1..50: mol_type = other DNA
tattaaaatttttactaatgttttaaaatacacctgtaaagctttattgc

SEQ ID NO: 30166 - DNA, 50 bp, synthetic construct
  source 1..50: mol_type = other DNA
aagcagttctcgccttcctggttgcgcaacaaagaaacccggaactgtca

SEQ ID NO: 30167 - DNA, 50 bp, synthetic construct
  source 1..50: mol_type = other DNA
cacctcgcggatggaactatgacgccggttgggtgagcatctacgaggtg

SEQ ID NO: 30168 - DNA, 50 bp, synthetic construct
  source 1..50: mol_type = other DNA
acccttgggtttctaactggataaatttctcctatccacaccccaataca

SEQ ID NO: 30169 - DNA, 50 bp, synthetic construct
  source 1..50: mol_type = other DNA
aaagtctaggcgaaaggaaaccgagctagaacagcgttatttgcgactaa

SEQ ID NO: 30170 - DNA, 50 bp, synthetic construct
  source 1..50: mol_type = other DNA
ataaacgccatgtttagagcgtgtataaacagctcgtttaaggcgtttgc

SEQ ID NO: 30171 - DNA, 50 bp, synthetic construct
  source 1..50: mol_type = other DNA
ccagacaatcatagcgctggcccagctaaaacaccgctggtcaggtgaaa

SEQ ID NO: 30172 - DNA, 50 bp, synthetic construct
  source 1..50: mol_type = other DNA
accgagcgcctccagacgggcgggtaccgggcgaactggcgggactcggc

SEQ ID NO: 30173 - DNA, 50 bp, synthetic construct
  source 1..50: mol_type = other DNA
cttatcaaggccatcgataattttgaaaaaagccaaaaactctggataag

SEQ ID NO: 30174 - DNA, 50 bp, synthetic construct
  source 1..50: mol_type = other DNA
cctagcttttgcatagcgttggaaatttccttagaaatatggtttctaac

SEQ ID NO: 30175 - DNA, 50 bp, synthetic construct
  source 1..50: mol_type = other DNA
ggcgcgcgcggatcaccgcacgaccggtcagtttacgtgtcgcgcaaacc

SEQ ID NO: 30176 - DNA, 50 bp, synthetic construct
  source 1..50: mol_type = other DNA
cgcggtcgcctcgatcccgcgccggccgtcgcggtggcgatgctggcgcg

SEQ ID NO: 30177 - DNA, 50 bp, synthetic construct
  source 1..50: mol_type = other DNA
agagaacagttcaacctgtgcgccgctgcgcagctcttcaagctcgcgaa

SEQ ID NO: 30178 - DNA, 50 bp, synthetic construct
  source 1..50: mol_type = other DNA
ccgcgaaagagcgggtggtcgtccgcggggcgccagccggtcgagggcgg

SEQ ID NO: 30179 - DNA, 50 bp, synthetic construct
  source 1..50: mol_type = other DNA
ctgacggcgcgccgcgcatcggccaccgccgcgaccatctgcgcgctctg

SEQ ID NO: 30180 - DNA, 50 bp, synthetic construct
  source 1..50: mol_type = other DNA
tgtatagatgctggaacggagttttgtccttgccatctggcagaatcaaa

SEQ ID NO: 30181 - DNA, 50 bp, synthetic construct
  source 1..50: mol_type = other DNA
aagcatattaacggtaaaaaatacggttaatctttgacagttatatgcga

SEQ ID NO: 30182 - DNA, 50 bp, synthetic construct
  source 1..50: mol_type = other DNA
tcaaacgataggcaaaacgaagaccagagactttcatattaagttcatgg

SEQ ID NO: 30183 - DNA, 50 bp, synthetic construct
  source 1..50: mol_type = other DNA
cgaggttctttgagcttgcgtaagcgcttacgagcttgctaacaactgat

SEQ ID NO: 30184 - DNA, 50 bp, synthetic construct
  source 1..50: mol_type = other DNA
gctgaacgagccatgcgtccgcttggaatcggaagaaaaaactggctctt

SEQ ID NO: 30185 - DNA, 50 bp, synthetic construct
  source 1..50: mol_type = other DNA
atttaaagagaaatatacaccaaaaataaaaaactatgatgaaactaaat

SEQ ID NO: 30186 - DNA, 50 bp, synthetic construct
  source 1..50: mol_type = other DNA
attttaatgatggaaagataataagtaatttatctttcactctcaaaaat

SEQ ID NO: 30187 - DNA, 50 bp, synthetic construct
  source 1..50: mol_type = other DNA
agaaggtgtattttttggtataatttattataacacatagagagcagcaa

SEQ ID NO: 30188 - DNA, 50 bp, synthetic construct
  source 1..50: mol_type = other DNA
aaaaaaggctttacattggttgaaatctaaattaatatatttactttttt

SEQ ID NO: 30189 - DNA, 50 bp, synthetic construct
  source 1..50: mol_type = other DNA
tcaataaaattgcaaatgaattatagtttatcaaataaaccaatttttga

SEQ ID NO: 30190 - DNA, 50 bp, synthetic construct
  source 1..50: mol_type = other DNA
tcccggatcccgctcaaatgatcttccattcctttataatttcatcggga

SEQ ID NO: 30191 - DNA, 50 bp, synthetic construct
  source 1..50: mol_type = other DNA
aatacggaaagacaaatgcaaaagaacctttgcataaatacctctgtaac

SEQ ID NO: 30192 - DNA, 50 bp, synthetic construct
  source 1..50: mol_type = other DNA
cgctttcatttttagtacagcaggacgcctcacaggcaaagatggtatct

SEQ ID NO: 30193 - DNA, 50 bp, synthetic construct
  source 1..50: mol_type = other DNA
atcaagcgtcattgtattgtagctatagactttattcaagggtcattgaa

SEQ ID NO: 30194 - DNA, 50 bp, synthetic construct
  source 1..50: mol_type = other DNA
aagagctagttgttcggatagttgatctttctaaggaagaagaagttagt

SEQ ID NO: 30195 - DNA, 50 bp, synthetic construct
  source 1..50: mol_type = other DNA
tgggtctttttctagcttttcttttaaaatgggtacaagaaaaacgccca

SEQ ID NO: 30196 - DNA, 50 bp, synthetic construct
  source 1..50: mol_type = other DNA
tccagccaacggcgagcctttttaataaaaatagctcacaatttttgata

SEQ ID NO: 30197 - DNA, 50 bp, synthetic construct
  source 1..50: mol_type = other DNA
gaagaaaaaatatgtcctaagacagatgagttaagatttatttttctgat

SEQ ID NO: 30198 - DNA, 50 bp, synthetic construct
  source 1..50: mol_type = other DNA
cttcaatgacccttgaatgaagtctagctacaatacaatgacccttgatt

SEQ ID NO: 30199 - DNA, 50 bp, synthetic construct
  source 1..50: mol_type = other DNA
gctctaagaaaaaaaggctatcagggaaatccgcttcttcttctcgtcgc

SEQ ID NO: 30200 - DNA, 50 bp, synthetic construct
  source 1..50: mol_type = other DNA
gaagcaagcaatctcatatattcgatcggtaatctgtaattctttgctca

SEQ ID NO: 30201 - DNA, 50 bp, synthetic construct
  source 1..50: mol_type = other DNA
atttttaacccacaaaagaacaaacgtttggacaattcgtttcgattcgt

SEQ ID NO: 30202 - DNA, 50 bp, synthetic construct
  source 1..50: mol_type = other DNA
attatcaacgtctcctttgaaaatagatcatcacataataatatgaaata

SEQ ID NO: 30203 - DNA, 50 bp, synthetic construct
  source 1..50: mol_type = other DNA
aaaaaggatatatccctgcacgatccgctgaagagggagatatcgttttt

SEQ ID NO: 30204 - DNA, 50 bp, synthetic construct
  source 1..50: mol_type = other DNA
ggattcccgtgagagttttcagcaattgcttgatcgaatccagatagtcc

SEQ ID NO: 30205 - DNA, 50 bp, synthetic construct
  source 1..50: mol_type = other DNA
agcccgagtggcgcagcgccctggcgccggggcgcggagcgccgtcagcg

SEQ ID NO: 30206 - DNA, 50 bp, synthetic construct
  source 1..50: mol_type = other DNA
atcaattacaaaagcgtagagaactttttgaaactggtcccgatattgat

SEQ ID NO: 30207 - DNA, 50 bp, synthetic construct
  source 1..50: mol_type = other DNA
ctctttgcgtccagcgagaggaaacgattcgtctccgtccctcatagctt

SEQ ID NO: 30208 - DNA, 50 bp, synthetic construct
  source 1..50: mol_type = other DNA
acggactgtaaatccgttggcttcgctcagctaagcgcttatggttccgg

SEQ ID NO: 30209 - DNA, 50 bp, synthetic construct
  source 1..50: mol_type = other DNA
agaaacgatacaccagttattcacatgtagcggtggaaaatatcctttct

SEQ ID NO: 30210 - DNA, 50 bp, synthetic construct
  source 1..50: mol_type = other DNA
gcagccgctggcaaccataacttactgttccttggccctccgggaaccgg

SEQ ID NO: 30211 - DNA, 50 bp, synthetic construct
  source 1..50: mol_type = other DNA
acgggaagtagccgaatgcgccgtctctgtccagtggatgtcttgcatac

SEQ ID NO: 30212 - DNA, 50 bp, synthetic construct
  source 1..50: mol_type = other DNA
tggttggcatgtggttaaagttttatgtaacgaaggttctttacagaact

SEQ ID NO: 30213 - DNA, 50 bp, synthetic construct
  source 1..50: mol_type = other DNA
tattacttgaattcgcacaagctaattacatgttatcaattcgagtagtt

SEQ ID NO: 30214 - DNA, 50 bp, synthetic construct
  source 1..50: mol_type = other DNA
tttatataaaattaaatctttaatatagttatacctatattttacataaa

SEQ ID NO: 30215 - DNA, 50 bp, synthetic construct
  source 1..50: mol_type = other DNA
tagttacattgtagcacatgttatatatgcaaataagtaaaatgatagtt

SEQ ID NO: 30216 - DNA, 50 bp, synthetic construct
  source 1..50: mol_type = other DNA
tattccatcatttttaactctcttcttatagcaataattctgaaagaata

SEQ ID NO: 30217 - DNA, 50 bp, synthetic construct
  source 1..50: mol_type = other DNA
tgaaactgaaaaactccacaaagtgcgctttgttcggtggtgcaggttca

SEQ ID NO: 30218 - DNA, 50 bp, synthetic construct
  source 1..50: mol_type = other DNA
agtaatcgcccacaagaacatagtccaatagtaaagaatatcagattgct

SEQ ID NO: 30219 - DNA, 50 bp, synthetic construct
  source 1..50: mol_type = other DNA
atccgccagatcctggtacttccatgacgaaatttgcccagttccaggat

SEQ ID NO: 30220 - DNA, 50 bp, synthetic construct
  source 1..50: mol_type = other DNA
tttcttgcatatgctccagtttttgagaaaacttacagcaggggaagtta

SEQ ID NO: 30221 - DNA, 50 bp, synthetic construct
  source 1..50: mol_type = other DNA
gaaagacgtttacgatggccaacgtgcggcgggcagatatacggactgcg

SEQ ID NO: 30222 - DNA, 50 bp, synthetic construct
  source 1..50: mol_type = other DNA
tttaactcgctaacggagtcgaaaaagaaggacaccactgcatgagtaaa

SEQ ID NO: 30223 - DNA, 50 bp, synthetic construct
  source 1..50: mol_type = other DNA
ctcgccgtgtgagcttcgcagtagtaaaagaaataacttcaaactccaag

SEQ ID NO: 30224 - DNA, 50 bp, synthetic construct
  source 1..50: mol_type = other DNA
gacttgataaacaccaagattagagctctaatctcgtgtcttacctagtc

SEQ ID NO: 30225 - DNA, 50 bp, synthetic construct
  source 1..50: mol_type = other DNA
ttatctttggggttatgactctaatgaaagtaacatatggatcaagataa

SEQ ID NO: 30226 - DNA, 50 bp, synthetic construct
  source 1..50: mol_type = other DNA
ccgggtccacccggtcttgcatcagctgatgctcgaaggcctcgatcatc

SEQ ID NO: 30227 - DNA, 50 bp, synthetic construct
  source 1..50: mol_type = other DNA
ctgcgtgctggtaccccggacggggtgtgcgccgggaaaccatcacgaaa

SEQ ID NO: 30228 - DNA, 50 bp, synthetic construct
  source 1..50: mol_type = other DNA
tcaaatcaccaaatagttccaactcctgtgagcctcacagagcgatttta

SEQ ID NO: 30229 - DNA, 50 bp, synthetic construct
  source 1..50: mol_type = other DNA
tccagtttccagccaagcgcattacacggtcaatttggccccggcggatt

SEQ ID NO: 30230 - DNA, 50 bp, synthetic construct
  source 1..50: mol_type = other DNA
taaccaaaagagccgtctgcatactgtcttgcatacaaccatttttgaag

SEQ ID NO: 30231 - DNA, 50 bp, synthetic construct
  source 1..50: mol_type = other DNA
ttgtctctctgggctgccctaagaatcattagggtgcccgaaaaatctgg

SEQ ID NO: 30232 - DNA, 50 bp, synthetic construct
  source 1..50: mol_type = other DNA
gtgaacttgctgatggtggcgggtattcacgcatccagaagcggattggt

SEQ ID NO: 30233 - DNA, 50 bp, synthetic construct
  source 1..50: mol_type = other DNA
atacgcctctccctatcagtgatttttatttatggtacgcttctcctcgc

SEQ ID NO: 30234 - DNA, 50 bp, synthetic construct
  source 1..50: mol_type = other DNA
caaaacgtcaactattataaatactatagtatatactattaaacgtatta

SEQ ID NO: 30235 - DNA, 50 bp, synthetic construct
  source 1..50: mol_type = other DNA
ttcatacttcattttttctttctttaataaacgatgaatttctttatgaa

SEQ ID NO: 30236 - DNA, 50 bp, synthetic construct
  source 1..50: mol_type = other DNA
taatataataaaaagaaaggagttataacagctcttatttttttattttc

SEQ ID NO: 30237 - DNA, 50 bp, synthetic construct
  source 1..50: mol_type = other DNA
tattttatcataaatgataaattcataccagtagaagagatgatacgaat

SEQ ID NO: 30238 - DNA, 50 bp, synthetic construct
  source 1..50: mol_type = other DNA
ttaattttttcattttaataacctccccgcttttattaaagaaattttag

SEQ ID NO: 30239 - DNA, 50 bp, synthetic construct
  source 1..50: mol_type = other DNA
tattgttaaatttttgattgctgatatcagagagttctacaaaggatata

SEQ ID NO: 30240 - DNA, 50 bp, synthetic construct
  source 1..50: mol_type = other DNA
attttctgttaaagcacggtctttagaaaccaaatggtttaaaataaaat

SEQ ID NO: 30241 - DNA, 50 bp, synthetic construct
  source 1..50: mol_type = other DNA
attacataactaatcaacttatggagcgtaagaatatttaactatttaat

SEQ ID NO: 30242 - DNA, 50 bp, synthetic construct
  source 1..50: mol_type = other DNA
tcgtaattgtctttttaaataaaaatttttgattccccagcccttgtaga

SEQ ID NO: 30243 - DNA, 50 bp, synthetic construct
  source 1..50: mol_type = other DNA
gtttcaaagaaataaccgttagtgagtttgctgtaagattgctttcaaca

SEQ ID NO: 30244 - DNA, 50 bp, synthetic construct
  source 1..50: mol_type = other DNA
ccgatggcaattcggaaatatacatttgtatacttctgaattacttgtcc

SEQ ID NO: 30245 - DNA, 50 bp, synthetic construct
  source 1..50: mol_type = other DNA
atcccctatacaaactcctaacctttcagttttggaatttgatgaaggat

SEQ ID NO: 30246 - DNA, 50 bp, synthetic construct
  source 1..50: mol_type = other DNA
ggagtagctcagctggttagagcagctcgtggcgtttgccgagccgggcc

SEQ ID NO: 30247 - DNA, 50 bp, synthetic construct
  source 1..50: mol_type = other DNA
ccaagtgcttcgtttggctcccaagattggctccccgacctgggctcgaa

SEQ ID NO: 30248 - DNA, 50 bp, synthetic construct
  source 1..50: mol_type = other DNA
caacgataattgcgaaacctccaaaggcggtcacttggcatccgggccgt

SEQ ID NO: 30249 - DNA, 50 bp, synthetic construct
  source 1..50: mol_type = other DNA
ctggtcttatcctttgctttgatcttgtccatggcatcaacaaacacaag

SEQ ID NO: 30250 - DNA, 50 bp, synthetic construct
  source 1..50: mol_type = other DNA
tagccaacttttatgagtccgactttaatgttgcaaataatacaaaagtc

SEQ ID NO: 30251 - DNA, 50 bp, synthetic construct
  source 1..50: mol_type = other DNA
ttagtatcaaattaaaaaggattattttaagtagatgaagtagatcttcg

SEQ ID NO: 30252 - DNA, 50 bp, synthetic construct
  source 1..50: mol_type = other DNA
agcatgttatacataatatgttaaaaaggacacattatgatcaatacaca

SEQ ID NO: 30253 - DNA, 50 bp, synthetic construct
  source 1..50: mol_type = other DNA
attcgtcaaatcctgatgatttgctagcttcaccccatcaatgcatcaag

SEQ ID NO: 30254 - DNA, 50 bp, synthetic construct
  source 1..50: mol_type = other DNA
attttattttatacaaatggaagtatggcttttaggattttaaaagaaat

SEQ ID NO: 30255 - DNA, 50 bp, synthetic construct
  source 1..50: mol_type = other DNA
tctgctgaacaacctcgcccaattgaaataatggagggttagctattgac

SEQ ID NO: 30256 - DNA, 50 bp, synthetic construct
  source 1..50: mol_type = other DNA
gtgtttgcaataggggcaccaggagtcccaggagggacagtaatggcatc

SEQ ID NO: 30257 - DNA, 50 bp, synthetic construct
  source 1..50: mol_type = other DNA
gagacaaatttcaatacacacaatatgttaggtatatttcattaccttcc

SEQ ID NO: 30258 - DNA, 50 bp, synthetic construct
  source 1..50: mol_type = other DNA
ggcaccaggagtacgagatgtctttaaagacaccccgagtcccaggaggg

SEQ ID NO: 30259 - DNA, 50 bp, synthetic construct
  source 1..50: mol_type = other DNA
tttataacagacatatattttgattctccatctaatatatcaactactgc

SEQ ID NO: 30260 - DNA, 50 bp, synthetic construct
  source 1..50: mol_type = other DNA
atggacccttgaatgaagtctattcgaatagctacaatacaatgaccctt

SEQ ID NO: 30261 - DNA, 50 bp, synthetic construct
  source 1..50: mol_type = other DNA
ccgttgaagcaatcaaaaaaacttttaacgctttttgatggtatcacacc

SEQ ID NO: 30262 - DNA, 50 bp, synthetic construct
  source 1..50: mol_type = other DNA
gaaccgggcggctgtctaaaatcatctcataaaaatcacccgattaacgc

SEQ ID NO: 30263 - DNA, 50 bp, synthetic construct
  source 1..50: mol_type = other DNA
gcaacccaacgagagtaaatgttggccatcgacagtaaagccgggcatgc

SEQ ID NO: 30264 - DNA, 50 bp, synthetic construct
  source 1..50: mol_type = other DNA
cgttacgcacaaactagtgggcgtgaacgcccacctgttttacatgctgt

SEQ ID NO: 30265 - DNA, 50 bp, synthetic construct
  source 1..50: mol_type = other DNA
cccggccgccgatgagttgctggagggtcaggccctgggcggcggccgga

SEQ ID NO: 30266 - DNA, 50 bp, synthetic construct
  source 1..50: mol_type = other DNA
tatctctccgccactttgtgacgaaatcgtcccatgtagcccgccacatt

SEQ ID NO: 30267 - DNA, 50 bp, synthetic construct
  source 1..50: mol_type = other DNA
tcaccgtgcggctccgccaaaccggccggtacggcgcagcagcttggcgg

SEQ ID NO: 30268 - DNA, 50 bp, synthetic construct
  source 1..50: mol_type = other DNA
cggccgcgatagtcccgatcgcgtatactcgaccgtggacatgccatcct

SEQ ID NO: 30269 - DNA, 50 bp, synthetic construct
  source 1..50: mol_type = other DNA
gagatgaaggccaaggagatgtgccgtcagccgaccgcagcccgcatctc

SEQ ID NO: 30270 - DNA, 50 bp, synthetic construct
  source 1..50: mol_type = other DNA
tccgccggggccaaattgaccgtgatggtaatgcgcttggctggaaactg

SEQ ID NO: 30271 - DNA, 50 bp, synthetic construct
  source 1..50: mol_type = other DNA
gcggccgcgatagtcccgatcgcgtactcgaccgtggacatgccatcctc

SEQ ID NO: 30272 - DNA, 50 bp, synthetic construct
  source 1..50: mol_type = other DNA
gccccagtattgcagcgtctcgcgatcacgaggtgctgcattatgtcgcc

SEQ ID NO: 30273 - DNA, 50 bp, synthetic construct
  source 1..50: mol_type = other DNA
gtactatgattgaagaagataagaagtcttccatcctacaatcaagcaac

SEQ ID NO: 30274 - DNA, 50 bp, synthetic construct
  source 1..50: mol_type = other DNA
tttctttctttaaaatcactaacattaaacggagacataaaccaaactaa

SEQ ID NO: 30275 - DNA, 50 bp, synthetic construct
  source 1..50: mol_type = other DNA
tttacgttcaatttctgcatgacattagaaatatgattccgtacggtctt

SEQ ID NO: 30276 - DNA, 50 bp, synthetic construct
  source 1..50: mol_type = other DNA
aattttgaatgcatttaaatttattttatccattaaatatattgttaaga

SEQ ID NO: 30277 - DNA, 50 bp, synthetic construct
  source 1..50: mol_type = other DNA
aggatgcgttcggagtccaccaggttatttcttgatttttcgggcagccc

SEQ ID NO: 30278 - DNA, 50 bp, synthetic construct
  source 1..50: mol_type = other DNA
ttaccattgacggttttagaaggacaaccacaattaagatcaacccccca

SEQ ID NO: 30279 - DNA, 50 bp, synthetic construct
  source 1..50: mol_type = other DNA
gtacggatgttggtcatggttacatgtgaacattggtcatcgtcaggttg

SEQ ID NO: 30280 - DNA, 50 bp, synthetic construct
  source 1..50: mol_type = other DNA
cggcagaacttttttaatcctgataaatcaggtataaaaagggattggcc

SEQ ID NO: 30281 - DNA, 50 bp, synthetic construct
  source 1..50: mol_type = other DNA
aagaaatacgatgatccttatcggcacggatattgagattggtaagcttt

SEQ ID NO: 30282 - DNA, 50 bp, synthetic construct
  source 1..50: mol_type = other DNA
tttaatactctcttagacgctgcctagataaaatctaagacttcctttaa

SEQ ID NO: 30283 - DNA, 50 bp, synthetic construct
  source 1..50: mol_type = other DNA
tgtatgcaggatatccattggaccgatggatctttcggctacttcccaag

SEQ ID NO: 30284 - DNA, 50 bp, synthetic construct
  source 1..50: mol_type = other DNA
tataaaaatggttgtatgcaggatatctttcggctacttcccaagctata

SEQ ID NO: 30285 - DNA, 50 bp, synthetic construct
  source 1..50: mol_type = other DNA
acgaaaaatatacaatcaatgtgcgtgcctactatttggagaagaatcgc

SEQ ID NO: 30286 - DNA, 50 bp, synthetic construct
  source 1..50: mol_type = other DNA
gccttcgtctggatgatcaacaaggtgatgctgatggcgccgctcggcgt

SEQ ID NO: 30287 - DNA, 50 bp, synthetic construct
  source 1..50: mol_type = other DNA
aaccggagccgattgtcatggtcccgggaccatgacaatcggctccggtt

SEQ ID NO: 30288 - DNA, 50 bp, synthetic construct
  source 1..50: mol_type = other DNA
gcgttaatcgggtgatttttattagatgattttagacagccgccctgttc

SEQ ID NO: 30289 - DNA, 50 bp, synthetic construct
  source 1..50: mol_type = other DNA
cagcgcggcgttaatcaggtgattttagacagccgcccggttcatgcagc

SEQ ID NO: 30290 - DNA, 50 bp, synthetic construct
  source 1..50: mol_type = other DNA
aattagatatacttgcacaaaggtattcctccaatatagtattggaaaac

SEQ ID NO: 30291 - DNA, 50 bp, synthetic construct
  source 1..50: mol_type = other DNA
tgctgggcaatcacgaattcttcgttggtcgggatcaccatggctacggc

SEQ ID NO: 30292 - DNA, 50 bp, synthetic construct
  source 1..50: mol_type = other DNA
agttttatgtctttagataaaacaagcagtatatctttcatagtaaacat

SEQ ID NO: 30293 - DNA, 50 bp, synthetic construct
  source 1..50: mol_type = other DNA
caggaggaccaaggaaaaacaccttgataggagtaggttgtggtttccag

SEQ ID NO: 30294 - DNA, 50 bp, synthetic construct
  source 1..50: mol_type = other DNA
aacccaacgagagtaagtattggcattgccagcaacagtaaagccgggca

SEQ ID NO: 30295 - DNA, 50 bp, synthetic construct
  source 1..50: mol_type = other DNA
gataatcaacggcttttttctaaatgcgtaagaaaaatggcggagagata

SEQ ID NO: 30296 - DNA, 50 bp, synthetic construct
  source 1..50: mol_type = other DNA
caagacatccattggacagaccctcagaccgacggctcttttggttattt

SEQ ID NO: 30297 - DNA, 50 bp, synthetic construct
  source 1..50: mol_type = other DNA
tgggtttccgttaatcaagtacatatgctactaacttcacgaagaaacca

SEQ ID NO: 30298 - DNA, 50 bp, synthetic construct
  source 1..50: mol_type = other DNA
gctggcatgtggtcaaagtactatacatgttactaaggttctctacagaa

SEQ ID NO: 30299 - DNA, 50 bp, synthetic construct
  source 1..50: mol_type = other DNA
gcaacccaacgagagtaagtgttggccattaatagtaaagccgggcatgc

SEQ ID NO: 30300 - DNA, 50 bp, synthetic construct
  source 1..50: mol_type = other DNA
gcacgaaatgtatattggtaactaattaacatttcgtatagcttttatgg

SEQ ID NO: 30301 - DNA, 50 bp, synthetic construct
  source 1..50: mol_type = other DNA
attcaatcctttattaggtcctttaataggatacccagaaaggatcgact

SEQ ID NO: 30302 - DNA, 50 bp, synthetic construct
  source 1..50: mol_type = other DNA
tggttataattagaaagctagaaatttgactgtgaatatacgtataataa

SEQ ID NO: 30303 - DNA, 50 bp, synthetic construct
  source 1..50: mol_type = other DNA
aagggttcgagccttgtgcttgtggtggagctaaggggattcgaacccct

SEQ ID NO: 30304 - DNA, 50 bp, synthetic construct
  source 1..50: mol_type = other DNA
ttggacaggttgagccgacaacccccgtcattcctgtctaaatcaccccg

SEQ ID NO: 30305 - DNA, 50 bp, synthetic construct
  source 1..50: mol_type = other DNA
tatgctatagtacatattatttatgcattttcaatacaacgtgctgcata

SEQ ID NO: 30306 - DNA, 50 bp, synthetic construct
  source 1..50: mol_type = other DNA
atgctttatgataattttataaatatattataaaaattatagttgagaat

SEQ ID NO: 30307 - DNA, 50 bp, synthetic construct
  source 1..50: mol_type = other DNA
gacgaatcacggcccgcggcggcgggcatgcggtactgccgcggctcgtc

SEQ ID NO: 30308 - DNA, 50 bp, synthetic construct
  source 1..50: mol_type = other DNA
cgacctgaaatctgaaatagcggtcaacccttgatttgaataagactgct

SEQ ID NO: 30309 - DNA, 50 bp, synthetic construct
  source 1..50: mol_type = other DNA
ttgtagcgagtggtaatacgtacatcgcttggcacgccaccgcagaatgg

SEQ ID NO: 30310 - DNA, 50 bp, synthetic construct
  source 1..50: mol_type = other DNA
acagaaacgactatgagcgcaatgacctttgatttacctcgccgctttcc

SEQ ID NO: 30311 - DNA, 50 bp, synthetic construct
  source 1..50: mol_type = other DNA
cgaggaactcggccgggtggatcacgagaccgccgttccgaacacactcg

SEQ ID NO: 30312 - DNA, 50 bp, synthetic construct
  source 1..50: mol_type = other DNA
gtatccctcggctgcccgaaggtagtatccctcgggtgcccgaaagcgct

SEQ ID NO: 30313 - DNA, 50 bp, synthetic construct
  source 1..50: mol_type = other DNA
gttcgcggccggcacgctggtcacgcatcgtcatacccccaacccgaaga

SEQ ID NO: 30314 - DNA, 50 bp, synthetic construct
  source 1..50: mol_type = other DNA
tcggaatcgacgagcgctttcgggcagccgagggatacgaaccctacttt

SEQ ID NO: 30315 - DNA, 50 bp, synthetic construct
  source 1..50: mol_type = other DNA
ccggactgattgaccagatccaccgcccctctttccgccaatggaatcgc

SEQ ID NO: 30316 - DNA, 50 bp, synthetic construct
  source 1..50: mol_type = other DNA
cgccagatagaacagcatgatcttcgagcgtgaccagcgtgccggccgcg

SEQ ID NO: 30317 - DNA, 50 bp, synthetic construct
  source 1..50: mol_type = other DNA
cgcggccggcacgctggtcacgctcgaagatcatgctgttctatctggcg

SEQ ID NO: 30318 - DNA, 50 bp, synthetic construct
  source 1..50: mol_type = other DNA
gatagtaagatttctgtaaaaggagaacttttccgtaaattcttagaatt

SEQ ID NO: 30319 - DNA, 50 bp, synthetic construct
  source 1..50: mol_type = other DNA
gatgattcttctaagaagatttttattaagccaatcttaaactttttaac

SEQ ID NO: 30320 - DNA, 50 bp, synthetic construct
  source 1..50: mol_type = other DNA
acaggctcaggggacagtgatataattgtagggaaaaacaacgattatga

SEQ ID NO: 30321 - DNA, 50 bp, synthetic construct
  source 1..50: mol_type = other DNA
caggcaaaggcaatgggcgaggcgcggttccgcctggcgccctggcactg

SEQ ID NO: 30322 - DNA, 50 bp, synthetic construct
  source 1..50: mol_type = other DNA
gcctgggtacaaatgctaacattgatttgtgttagatgctgggtacacgg

SEQ ID NO: 30323 - DNA, 50 bp, synthetic construct
  source 1..50: mol_type = other DNA
gctgtgttaagcactaacaacatcaccatgcagttcggcagtaagccgtt

SEQ ID NO: 30324 - DNA, 50 bp, synthetic construct
  source 1..50: mol_type = other DNA
atcaaaaattgtgagcagtttttatcctaaagtatgcgacaccattaaaa

SEQ ID NO: 30325 - DNA, 50 bp, synthetic construct
  source 1..50: mol_type = other DNA
gccacgacgacgctgggggctcccgcggctcgtcgtagtaatccaggtgt

SEQ ID NO: 30326 - DNA, 50 bp, synthetic construct
  source 1..50: mol_type = other DNA
ccaggaactcgcgcttgagctcatcgtgatccacccggccgagttcctcg

SEQ ID NO: 30327 - DNA, 50 bp, synthetic construct
  source 1..50: mol_type = other DNA
ataagttggtactaagtaccaatatttattggtgattaatggtataatta

SEQ ID NO: 30328 - DNA, 50 bp, synthetic construct
  source 1..50: mol_type = other DNA
ttcaatattttttgatcaaatttttttaaaatttcacatcaaatggtgcc

SEQ ID NO: 30329 - DNA, 50 bp, synthetic construct
  source 1..50: mol_type = other DNA
tctaggattaaaggatatcttgatgcaagagcatacgaccggattcttcg

SEQ ID NO: 30330 - DNA, 50 bp, synthetic construct
  source 1..50: mol_type = other DNA
gcttgtctcaggggaaatcattctcatgaaaatcttttcctgtcacatgc

SEQ ID NO: 30331 - DNA, 50 bp, synthetic construct
  source 1..50: mol_type = other DNA
accgagtttctcaagaagaaattggacaatttcgtctttcgtttctaatc

SEQ ID NO: 30332 - DNA, 50 bp, synthetic construct
  source 1..50: mol_type = other DNA
agacagccataacactgacgccttctcaggagtagagttgtgggcttttc

SEQ ID NO: 30333 - DNA, 50 bp, synthetic construct
  source 1..50: mol_type = other DNA
catgcaggctattgacagggataaatttacaggaaaaaatatccgcgaag

SEQ ID NO: 30334 - DNA, 50 bp, synthetic construct
  source 1..50: mol_type = other DNA
gtatagtagggttgccgccaaaaatattttcatattaaactacatatgaa

SEQ ID NO: 30335 - DNA, 50 bp, synthetic construct
  source 1..50: mol_type = other DNA
ttaaactacatatgaaaggagaagataagctccttccttatggcaagcag

SEQ ID NO: 30336 - DNA, 50 bp, synthetic construct
  source 1..50: mol_type = other DNA
cctcgcgcaggcaatcggccccggcgccggcagcgacggtggcggcgaac

SEQ ID NO: 30337 - DNA, 50 bp, synthetic construct
  source 1..50: mol_type = other DNA
tggatctttttccgcagacgcatcacacatcgagtgtgtaggtctgctca

SEQ ID NO: 30338 - DNA, 50 bp, synthetic construct
  source 1..50: mol_type = other DNA
attatgcggggagaagcatatcataagtgaagttgagattaattattaaa

SEQ ID NO: 30339 - DNA, 50 bp, synthetic construct
  source 1..50: mol_type = other DNA
gcgaagatggcagtaaagaacccaattgaatatgttgaaaccctctgata

SEQ ID NO: 30340 - DNA, 50 bp, synthetic construct
  source 1..50: mol_type = other DNA
ttttgcgaaattctggacggttggttctagaggtccagtggttgcggggg

SEQ ID NO: 30341 - DNA, 50 bp, synthetic construct
  source 1..50: mol_type = other DNA
gcgggcttcggcatttggttgcggggggtaggatttgaacctacgacctt

SEQ ID NO: 30342 - DNA, 50 bp, synthetic construct
  source 1..50: mol_type = other DNA
tcacgccgttttttatgtatatttttaaagtgtatataaaacaatcgtga

SEQ ID NO: 30343 - DNA, 50 bp, synthetic construct
  source 1..50: mol_type = other DNA
agagggcttttatatattaatcacaaagaatgtggaggtaacagacaatg

SEQ ID NO: 30344 - DNA, 50 bp, synthetic construct
  source 1..50: mol_type = other DNA
aaaatgtagaacctcctgagttagcacattagaaggggtagcagatattt

SEQ ID NO: 30345 - DNA, 50 bp, synthetic construct
  source 1..50: mol_type = other DNA
ctatgtttactcggacctagtggatagccaagtggatgtggtaaaactac

SEQ ID NO: 30346 - DNA, 50 bp, synthetic construct
  source 1..50: mol_type = other DNA
tttgaattgatacatccatttcaagatggtaatggtcgcataggtagatt

SEQ ID NO: 30347 - DNA, 50 bp, synthetic construct
  source 1..50: mol_type = other DNA
ccatttgaaaagattcgtacccgtaaatgcgccgataacttttccaatga

SEQ ID NO: 30348 - DNA, 50 bp, synthetic construct
  source 1..50: mol_type = other DNA
ggaccagaagatgctgtacccatatataatagattaaaaggttctttgga

SEQ ID NO: 30349 - DNA, 50 bp, synthetic construct
  source 1..50: mol_type = other DNA
gtatatacttccgacgcatttttatagaaaaatggaaaagcgtatgataa

SEQ ID NO: 30350 - DNA, 50 bp, synthetic construct
  source 1..50: mol_type = other DNA
gcattgcatccaaaccccatgcacatgagccggatagccatatcggatgg

SEQ ID NO: 30351 - DNA, 50 bp, synthetic construct
  source 1..50: mol_type = other DNA
aacctatgaaagttatttttacttttaatttaaatattcttccatatgta

SEQ ID NO: 30352 - DNA, 50 bp, synthetic construct
  source 1..50: mol_type = other DNA
atgtatagctgaaagcgcgagagtttattgatcctatttcatttacgtat

SEQ ID NO: 30353 - DNA, 50 bp, synthetic construct
  source 1..50: mol_type = other DNA
atagaatcttctgcgtgatggaatctttttgttcattaagttcctgcgga

SEQ ID NO: 30354 - DNA, 50 bp, synthetic construct
  source 1..50: mol_type = other DNA
cttggttctgccgtaacctccgaccgttcgacctttacctcagaacccgg

SEQ ID NO: 30355 - DNA, 50 bp, synthetic construct
  source 1..50: mol_type = other DNA
tctgttgcgaggctgcttctggtaaacatgaaatggagcaccgcaacgga

SEQ ID NO: 30356 - DNA, 50 bp, synthetic construct
  source 1..50: mol_type = other DNA
aaaatagaagagaatagatcgtagtgacgggacgatatttctcgcgcatt

SEQ ID NO: 30357 - DNA, 50 bp, synthetic construct
  source 1..50: mol_type = other DNA
atctcctttgctttctgattcatctttttgaagaacagctggcaggaggc

SEQ ID NO: 30358 - DNA, 50 bp, synthetic construct
  source 1..50: mol_type = other DNA
agctatgtgcggggaggtgtggtagtatcgactccttcccgctcctagcc

SEQ ID NO: 30359 - DNA, 50 bp, synthetic construct
  source 1..50: mol_type = other DNA
aatctgtttcatggcaatgccctgcgcagggcagagcctgtgccgggatg

SEQ ID NO: 30360 - DNA, 50 bp, synthetic construct
  source 1..50: mol_type = other DNA
acgctggaattgccattgctcgaccggtggaatcgggtgcgctcccgatt

SEQ ID NO: 30361 - DNA, 50 bp, synthetic construct
  source 1..50: mol_type = other DNA
attttcatggagataacctctcatgaggacattgttatcaattggaaaat

SEQ ID NO: 30362 - DNA, 50 bp, synthetic construct
  source 1..50: mol_type = other DNA
taaataaaaaataaacaaaaattataatacgctgatttacagtggcgtta

SEQ ID NO: 30363 - DNA, 50 bp, synthetic construct
  source 1..50: mol_type = other DNA
gagttatgatggaagaagaagaaacgttatctctcgctggacgtaaagag

SEQ ID NO: 30364 - DNA, 50 bp, synthetic construct
  source 1..50: mol_type = other DNA
caagagttagccaggcgaattggcaaacctaaacaggagattactcgcct

SEQ ID NO: 30365 - DNA, 50 bp, synthetic construct
  source 1..50: mol_type = other DNA
ctgttggcgtgtttcttatcctatttattgtccattcccctccaatgggc

SEQ ID NO: 30366 - DNA, 50 bp, synthetic construct
  source 1..50: mol_type = other DNA
tttctggacgaatagcacaaaaaatattttttaaattacgaattacccga

SEQ ID NO: 30367 - DNA, 50 bp, synthetic construct
  source 1..50: mol_type = other DNA
cctcagcgtcagctaagttctcaaatttgaaaatatcgcctcggctaatg

SEQ ID NO: 30368 - DNA, 50 bp, synthetic construct
  source 1..50: mol_type = other DNA
taggagcaagaaaaaagcattaaaaagacaaggcttataaactttgtctt

SEQ ID NO: 30369 - DNA, 50 bp, synthetic construct
  source 1..50: mol_type = other DNA
tgatacgcctctgcttatcagttgatttatgatatgcttctccacgcata

SEQ ID NO: 30370 - DNA, 50 bp, synthetic construct
  source 1..50: mol_type = other DNA
ttttttgttgccattaggcgcatgaggtttaccccatttaatcctaaagc

SEQ ID NO: 30371 - DNA, 50 bp, synthetic construct
  source 1..50: mol_type = other DNA
actcttaatgctgaaggtcaccagacctttgaagcttgctcattagcggc

SEQ ID NO: 30372 - DNA, 50 bp, synthetic construct
  source 1..50: mol_type = other DNA
agatttaccattagttttccttgtaaggcaagaatactagtgctttatta

SEQ ID NO: 30373 - DNA, 50 bp, synthetic construct
  source 1..50: mol_type = other DNA
gtccggaaccacatttccaatgttattacaaatgtcatgcaaaaactgaa

SEQ ID NO: 30374 - DNA, 50 bp, synthetic construct
  source 1..50: mol_type = other DNA
ctgttaacaattagtcttaatccctgcccgtgcggcttttttggcaatga

SEQ ID NO: 30375 - DNA, 50 bp, synthetic construct
  source 1..50: mol_type = other DNA
tggataggagtggagactcccgtccagaacgtgcagttattggataggag

SEQ ID NO: 30376 - DNA, 50 bp, synthetic construct
  source 1..50: mol_type = other DNA
gccatgatggaagtggttattgtatatgcattacggaagcttatcgaccg

SEQ ID NO: 30377 - DNA, 50 bp, synthetic construct
  source 1..50: mol_type = other DNA
ttactggcaaaaaaaagggcagacttgtccgccctttttttgcaaaacat

SEQ ID NO: 30378 - DNA, 50 bp, synthetic construct
  source 1..50: mol_type = other DNA
gcgcaacgccgaaaccgtggtgttctaataccgtggtcattggccagtca

SEQ ID NO: 30379 - DNA, 50 bp, synthetic construct
  source 1..50: mol_type = other DNA
ctatgccggaacgatagtgttcgtctatagtctcactccatcgaccatag

SEQ ID NO: 30380 - DNA, 50 bp, synthetic construct
  source 1..50: mol_type = other DNA
ccctaccgcggctgcgaacatggctgcatttactgctttgcgcggcccag

SEQ ID NO: 30381 - DNA, 50 bp, synthetic construct
  source 1..50: mol_type = other DNA
ctcaccattaccatctgaaagatttcgaagcttagaagggtaaaaaatag

SEQ ID NO: 30382 - DNA, 50 bp, synthetic construct
  source 1..50: mol_type = other DNA
tccacataagacaaatttaactgcttaccgcactcaactatttatgtccg

SEQ ID NO: 30383 - DNA, 50 bp, synthetic construct
  source 1..50: mol_type = other DNA
catgttgtcaacatttcaaccgacaaagcggtttctccgacaaatgccat

SEQ ID NO: 30384 - DNA, 50 bp, synthetic construct
  source 1..50: mol_type = other DNA
tatcctcctatgcacacaggagatatcgcaccgatgcatacggctgaaca

SEQ ID NO: 30385 - DNA, 50 bp, synthetic construct
  source 1..50: mol_type = other DNA
gcgtgctgaaggctttcatcagcagttgtcaatgacggccttcttcaccc

SEQ ID NO: 30386 - DNA, 50 bp, synthetic construct
  source 1..50: mol_type = other DNA
cccggtagggcccacccaagtgtcgaatcgcttgggaaggcccacaaaat

SEQ ID NO: 30387 - DNA, 50 bp, synthetic construct
  source 1..50: mol_type = other DNA
gtggcggatcagccagaccgggaaatgccccggcttcctcactctgccgt

SEQ ID NO: 30388 - DNA, 50 bp, synthetic construct
  source 1..50: mol_type = other DNA
cctgttacccgcactgaatcatgatatcctgcttcggtgcagtattaaaa

SEQ ID NO: 30389 - DNA, 50 bp, synthetic construct
  source 1..50: mol_type = other DNA
gaatcttccctggagcttcgaccggagggtaccgggtaccagatgaagag

SEQ ID NO: 30390 - DNA, 50 bp, synthetic construct
  source 1..50: mol_type = other DNA
atgcgcgcgctggtcaggactcttgcatcggatttcaccaacgccagcgc

SEQ ID NO: 30391 - DNA, 50 bp, synthetic construct
  source 1..50: mol_type = other DNA
tggcagcgtggagtgcataatcttaacgcttcatgggaggcaaagccgtg

SEQ ID NO: 30392 - DNA, 50 bp, synthetic construct
  source 1..50: mol_type = other DNA
gggaatactgatatacgcaaggcttaagccaatggtttgcagtgtttttg

SEQ ID NO: 30393 - DNA, 50 bp, synthetic construct
  source 1..50: mol_type = other DNA
tacaacattacagactcacagggctgtatttgtgcttgtacagaattata

SEQ ID NO: 30394 - DNA, 50 bp, synthetic construct
  source 1..50: mol_type = other DNA
gcataaatgcctgcaaattcatacaaatatctcttttcaggtggattcca

SEQ ID NO: 30395 - DNA, 50 bp, synthetic construct
  source 1..50: mol_type = other DNA
ttacatcatgccaggcattaattacttacatcatgccaggcatgccaccc

SEQ ID NO: 30396 - DNA, 50 bp, synthetic construct
  source 1..50: mol_type = other DNA
tctgagtcgcgggcattcatctgacacccgaaggtcttgacgaaataagt

SEQ ID NO: 30397 - DNA, 50 bp, synthetic construct
  source 1..50: mol_type = other DNA
ccgatcataatgacaaattgaacaattgttcattacctcatgagattgtg

SEQ ID NO: 30398 - DNA, 50 bp, synthetic construct
  source 1..50: mol_type = other DNA
tcattttaatctatttaaagtaaaaattttagtaaaaacctccgttattt

SEQ ID NO: 30399 - DNA, 50 bp, synthetic construct
  source 1..50: mol_type = other DNA
taaggaaggaaatgaaatatatctaagtgtgtaatgaaatttgtcttata

SEQ ID NO: 30400 - DNA, 50 bp, synthetic construct
  source 1..50: mol_type = other DNA
atattagttacccatgatatatcagaagctatttctatgtcagataaggt

SEQ ID NO: 30401 - DNA, 50 bp, synthetic construct
  source 1..50: mol_type = other DNA
atcccaaagaaaaattggcttatctctcattttaaatcgttctttgggag

SEQ ID NO: 30402 - DNA, 50 bp, synthetic construct
  source 1..50: mol_type = other DNA
cttcgactaaattgcttgaatggtaagcttttcaggacataatctcggct

SEQ ID NO: 30403 - DNA, 50 bp, synthetic construct
  source 1..50: mol_type = other DNA
atcaggccctggtcccaacgttttcaaagagcttgctcccagcctttaat

SEQ ID NO: 30404 - DNA, 50 bp, synthetic construct
  source 1..50: mol_type = other DNA
atcagaccctgatcccaacattttcaaaaagcttgctcccagcccttgat

SEQ ID NO: 30405 - DNA, 50 bp, synthetic construct
  source 1..50: mol_type = other DNA
ccggtagtggaccaaaggtggtcaagtgacgttctattggagggaatgac

SEQ ID NO: 30406 - DNA, 50 bp, synthetic construct
  source 1..50: mol_type = other DNA
aagcagtccatatccacatgaatgattatgattttacgcattgctcacct

SEQ ID NO: 30407 - DNA, 50 bp, synthetic construct
  source 1..50: mol_type = other DNA
atcacttatgataaggcgctgggtatacggagcccccgcattgatccgga

SEQ ID NO: 30408 - DNA, 50 bp, synthetic construct
  source 1..50: mol_type = other DNA
cggcacggaggaatcggtaccaccatggtggtactgaagaattcgcgcat

SEQ ID NO: 30409 - DNA, 50 bp, synthetic construct
  source 1..50: mol_type = other DNA
gcgcataagctgattttttcttgataagctggtggggcagcgtcatgcgc

SEQ ID NO: 30410 - DNA, 50 bp, synthetic construct
  source 1..50: mol_type = other DNA
tcctcatataaatcagcaatcggatctccttttgcctgaatataagtagc

SEQ ID NO: 30411 - DNA, 50 bp, synthetic construct
  source 1..50: mol_type = other DNA
aacctcatcatttatgatatgcttctctcattatcttaaatgagcgataa

SEQ ID NO: 30412 - DNA, 50 bp, synthetic construct
  source 1..50: mol_type = other DNA
taaaaaacgaaaggacgcataccatacgaaaggacggcatgccatgaata

SEQ ID NO: 30413 - DNA, 50 bp, synthetic construct
  source 1..50: mol_type = other DNA
catgtcatcaatatcagtacagataaagctgtgtcccctgtaaacacaat

SEQ ID NO: 30414 - DNA, 50 bp, synthetic construct
  source 1..50: mol_type = other DNA
taaaacgaccaacatttcaattagtgctcatctccaccagagtgaaccct

SEQ ID NO: 30415 - DNA, 50 bp, synthetic construct
  source 1..50: mol_type = other DNA
cctgtcaggctggctcgaatgacaattactgctcgagcggtttccgcatc

SEQ ID NO: 30416 - DNA, 50 bp, synthetic construct
  source 1..50: mol_type = other DNA
ttctaataatcccacaacttctatgtgatgcgtatttggaaataaatcag

SEQ ID NO: 30417 - DNA, 50 bp, synthetic construct
  source 1..50: mol_type = other DNA
gtttttctaataatcccacaacttctcgacgtgatgcgtatttggaaata

SEQ ID NO: 30418 - DNA, 50 bp, synthetic construct
  source 1..50: mol_type = other DNA
ggtacagccggctgatttatttccaaggaaactgtcagtacacatagaag

SEQ ID NO: 30419 - DNA, 50 bp, synthetic construct
  source 1..50: mol_type = other DNA
acgagatttttcgggcaccctaatgattcttagggcagcccagggagacg

SEQ ID NO: 30420 - DNA, 50 bp, synthetic construct
  source 1..50: mol_type = other DNA
tccacgaggtttttcgggcagcccaagtttgtttcttgatttttcgggca

SEQ ID NO: 30421 - DNA, 50 bp, synthetic construct
  source 1..50: mol_type = other DNA
cggctgtccagcattagcaaggtctaaacgtgtctatctagaatcacccg

SEQ ID NO: 30422 - DNA, 50 bp, synthetic construct
  source 1..50: mol_type = other DNA
ggtctgtgtcggtatgggtactcatttcagaactcacacttcggtgtggg

SEQ ID NO: 30423 - DNA, 50 bp, synthetic construct
  source 1..50: mol_type = other DNA
ttcaatgacccttgaatgaagtctatagctacaatacaatgacctttgat

SEQ ID NO: 30424 - DNA, 50 bp, synthetic construct
  source 1..50: mol_type = other DNA
aggatggcaataatgccaatgaccaccattagctcaatcagggtaaatcc

SEQ ID NO: 30425 - DNA, 50 bp, synthetic construct
  source 1..50: mol_type = other DNA
ttgcttcttccagcgtactatagaattttactttacgctgcttccatcgt

SEQ ID NO: 30426 - DNA, 50 bp, synthetic construct
  source 1..50: mol_type = other DNA
agccgctcaagcaacaaacgttatggatgcccttcgaagctttagcggag

SEQ ID NO: 30427 - DNA, 50 bp, synthetic construct
  source 1..50: mol_type = other DNA
cgagctcgcgggcgcctgggtcgagccgtccgatggcgcgcgccagctca

SEQ ID NO: 30428 - DNA, 50 bp, synthetic construct
  source 1..50: mol_type = other DNA
gacaatcggcaacactaaagtaaaattacacttcagtgaacaccgacggc

SEQ ID NO: 30429 - DNA, 50 bp, synthetic construct
  source 1..50: mol_type = other DNA
caatgaccatgtacgccacgctggaagaagcaattgatgccgctcgcgaa

SEQ ID NO: 30430 - DNA, 50 bp, synthetic construct
  source 1..50: mol_type = other DNA
tttgttgtaatggcacctatttgaatttgtatgattatcaggcaaaaaag

SEQ ID NO: 30431 - DNA, 50 bp, synthetic construct
  source 1..50: mol_type = other DNA
gcgctgtgcacggggcggctgtcgaggatcacgcggttgaccgatcgttc

SEQ ID NO: 30432 - DNA, 50 bp, synthetic construct
  source 1..50: mol_type = other DNA
acgttgatgattatgacttcgatgacccttgatttacctcgccgctttcc

SEQ ID NO: 30433 - DNA, 50 bp, synthetic construct
  source 1..50: mol_type = other DNA
gactttgatgtctttagataaaatcttatacatctttcaaagtaaaccaa

SEQ ID NO: 30434 - DNA, 50 bp, synthetic construct
  source 1..50: mol_type = other DNA
cacctactgtgcgagctaatagcgtattcttttagtgaactaaaagctgg

SEQ ID NO: 30435 - DNA, 50 bp, synthetic construct
  source 1..50: mol_type = other DNA
ctaaaagtggcggagagagtgggacgtcactatatggcggagagataggg

SEQ ID NO: 30436 - DNA, 50 bp, synthetic construct
  source 1..50: mol_type = other DNA
tattcgcaaggcggcgctaggtgaatcaaagctaacccacccagtgacgt

SEQ ID NO: 30437 - DNA, 50 bp, synthetic construct
  source 1..50: mol_type = other DNA
ccatttgtgtcattagtcaactgtatttagttgtcttttgcaaactgtgg

SEQ ID NO: 30438 - DNA, 50 bp, synthetic construct
  source 1..50: mol_type = other DNA
tatttggtgatgcgaaagtcaaaactattttactttaagtgatgcgaaag

SEQ ID NO: 30439 - DNA, 50 bp, synthetic construct
  source 1..50: mol_type = other DNA
catgttgtaaaggtgctttatcgtattgactcaagtactaaggtgcttta

SEQ ID NO: 30440 - DNA, 50 bp, synthetic construct
  source 1..50: mol_type = other DNA
accaagttcggttggcatgttgtaaaggtgctttacagaacataaggctt

SEQ ID NO: 30441 - DNA, 50 bp, synthetic construct
  source 1..50: mol_type = other DNA
tttccagtacctggcgggccaagaaagttgtggtttccagcggcagcaat

SEQ ID NO: 30442 - DNA, 50 bp, synthetic construct
  source 1..50: mol_type = other DNA
tgttctgtaaagcaccttaatactatacgataaagcacctttacaacatg

SEQ ID NO: 30443 - DNA, 50 bp, synthetic construct
  source 1..50: mol_type = other DNA
ccacagtttgcaaatgacaactaaatacagttgactaatgacacaaatgg

SEQ ID NO: 30444 - DNA, 50 bp, synthetic construct
  source 1..50: mol_type = other DNA
cgggtgattttcatcagacacgtttagaccttgatgattttagacagccg

SEQ ID NO: 30445 - DNA, 50 bp, synthetic construct
  source 1..50: mol_type = other DNA
aatcatacaaatgtgttatgcttataaggcgaaaacagcttttaaatttt

SEQ ID NO: 30446 - DNA, 50 bp, synthetic construct
  source 1..50: mol_type = other DNA
cgggtatatgaaagaactattacccgcggcacatttctgcgagggcagac

SEQ ID NO: 30447 - DNA, 50 bp, synthetic construct
  source 1..50: mol_type = other DNA
caagaggggttcgattcccctacggggttcggctactttaaagtctctct

SEQ ID NO: 30448 - DNA, 50 bp, synthetic construct
  source 1..50: mol_type = other DNA
aaaatggttagataaaataagtgaaagcaataatgatatataccgtattt

SEQ ID NO: 30449 - DNA, 50 bp, synthetic construct
  source 1..50: mol_type = other DNA
aaacttttgaacctttatttctaaaattagaatgaaaggtccaacgtgct

SEQ ID NO: 30450 - DNA, 50 bp, synthetic construct
  source 1..50: mol_type = other DNA
gaaccgggcggccgtctaaaatcatctaataaaaatcacccgattaacgc

SEQ ID NO: 30451 - DNA, 50 bp, synthetic construct
  source 1..50: mol_type = other DNA
tatattagtcggtgctcctaaatactgattcatgcacaactatattagtc

SEQ ID NO: 30452 - DNA, 50 bp, synthetic construct
  source 1..50: mol_type = other DNA
tggtccaaatcgaaaagaagatatttaacttctccttatttcaaaaagta

SEQ ID NO: 30453 - DNA, 50 bp, synthetic construct
  source 1..50: mol_type = other DNA
gaatacacaccacgtcgagtgcgtagggacagacaacacatgttgagacg

SEQ ID NO: 30454 - DNA, 50 bp, synthetic construct
  source 1..50: mol_type = other DNA
cccacgccctgaaccgagccatatacccatgccattgtgcagattgtcgc

SEQ ID NO: 30455 - DNA, 50 bp, synthetic construct
  source 1..50: mol_type = other DNA
ttaaaggaagtcttagattttatctagagagcgtttaagagagtattaaa

SEQ ID NO: 30456 - DNA, 50 bp, synthetic construct
  source 1..50: mol_type = other DNA
gcgcggcaagccctgctcgtaacgggcgtttacagcgcgtttggctgtgc

SEQ ID NO: 30457 - DNA, 50 bp, synthetic construct
  source 1..50: mol_type = other DNA
agcgttgagcgggccgtcaatccctcgggcgagatggggcggggcaggcc

SEQ ID NO: 30458 - DNA, 50 bp, synthetic construct
  source 1..50: mol_type = other DNA
ttaatttttagatatttagtaataattattcttttgtggagaagaattct

SEQ ID NO: 30459 - DNA, 50 bp, synthetic construct
  source 1..50: mol_type = other DNA
atatacaaaataatacagataaagatttttatctgttatatttattaaat

SEQ ID NO: 30460 - DNA, 50 bp, synthetic construct
  source 1..50: mol_type = other DNA
tgattttgaaaaaagaaatcctaatattagtcttctcctttcaaaaacat

SEQ ID NO: 30461 - DNA, 50 bp, synthetic construct
  source 1..50: mol_type = other DNA
tacttttgaagatgaaatagtactaatcaactatttcatatttcattttt

SEQ ID NO: 30462 - DNA, 50 bp, synthetic construct
  source 1..50: mol_type = other DNA
tatatctgcctcaatttctgttctatgccaaggaaatactgttgcatata

SEQ ID NO: 30463 - DNA, 50 bp, synthetic construct
  source 1..50: mol_type = other DNA
aacagttccttttgcaattcttcaagatatggcgagaaagtttgcctgtt

SEQ ID NO: 30464 - DNA, 50 bp, synthetic construct
  source 1..50: mol_type = other DNA
taaaaaaacacccacaaagtcaactatattgctttttatgtgttttaact

SEQ ID NO: 30465 - DNA, 50 bp, synthetic construct
  source 1..50: mol_type = other DNA
ctcaattgcggctggaccaagtttataaactttgcctgcccgtcgaaaac

SEQ ID NO: 30466 - DNA, 50 bp, synthetic construct
  source 1..50: mol_type = other DNA
cggctgtctaaaatcatcaagctctaaacgtgtctaataaaaatcacccg

SEQ ID NO: 30467 - DNA, 50 bp, synthetic construct
  source 1..50: mol_type = other DNA
atgattaacaaaaccagaagcatttccagtaaagtgaaggcctgaacacc

SEQ ID NO: 30468 - DNA, 50 bp, synthetic construct
  source 1..50: mol_type = other DNA
attttttagttttacttatgatacgcttctccacgcataatcttaaatgc

SEQ ID NO: 30469 - DNA, 50 bp, synthetic construct
  source 1..50: mol_type = other DNA
tagtgtaaagcataacgtctgctattccttaatgcctccgatctacacct

SEQ ID NO: 30470 - DNA, 50 bp, synthetic construct
  source 1..50: mol_type = other DNA
tcggtcaaccgcgtgatccttaaatattcctcgacagccgccccgtgcac

SEQ ID NO: 30471 - DNA, 50 bp, synthetic construct
  source 1..50: mol_type = other DNA
gactatgacttcgatgactatcgtatacaatgacccttgatttacctcgc

SEQ ID NO: 30472 - DNA, 50 bp, synthetic construct
  source 1..50: mol_type = other DNA
aaccttttttgcctgataatcatacaaataggtgccattacaacaaattg

SEQ ID NO: 30473 - DNA, 50 bp, synthetic construct
  source 1..50: mol_type = other DNA
gctcggctcgcagcagcaacagacggtctgccgagtgctgcaagccggca

SEQ ID NO: 30474 - DNA, 50 bp, synthetic construct
  source 1..50: mol_type = other DNA
gcgctacttcggcgatgtccttgatgaaaagctgcaaagccatgtcgcgc

SEQ ID NO: 30475 - DNA, 50 bp, synthetic construct
  source 1..50: mol_type = other DNA
actactccacctaaaccgtatactgaggacacacttttaaaggctatgaa

SEQ ID NO: 30476 - DNA, 50 bp, synthetic construct
  source 1..50: mol_type = other DNA
tacagtttccacatgtgtcggggctagtctcgatatgtgtagaatgaggg

SEQ ID NO: 30477 - DNA, 50 bp, synthetic construct
  source 1..50: mol_type = other DNA
tgtttgattatcttagctacagtttccacatgtgtagaatgagggaacat

SEQ ID NO: 30478 - DNA, 50 bp, synthetic construct
  source 1..50: mol_type = other DNA
ataagtttaactacagtctcacaatgtggcgtatttgggaacatatccat

SEQ ID NO: 30479 - DNA, 50 bp, synthetic construct
  source 1..50: mol_type = other DNA
taactacagtctcaacggtattaccagtactaccgtctcacaatgtggag

SEQ ID NO: 30480 - DNA, 50 bp, synthetic construct
  source 1..50: mol_type = other DNA
acaagagctatacaaacatcggtgtacaccgttgcaagtgttggacaata

SEQ ID NO: 30481 - DNA, 50 bp, synthetic construct
  source 1..50: mol_type = other DNA
actcccctcgtctccaccattgaaattcgtctccaccaattttgaaaaaa

SEQ ID NO: 30482 - DNA, 50 bp, synthetic construct
  source 1..50: mol_type = other DNA
tatggatatgttcccaaatacgccacattgtgagactgtagttaaactta

SEQ ID NO: 30483 - DNA, 50 bp, synthetic construct
  source 1..50: mol_type = other DNA
ttcgttccccatgaagcgttttgtcactccatcttgctgagccatactct

SEQ ID NO: 30484 - DNA, 50 bp, synthetic construct
  source 1..50: mol_type = other DNA
taaagcttctgtatctaaatgggaaaagttatcttgacataaccttttta

SEQ ID NO: 30485 - DNA, 50 bp, synthetic construct
  source 1..50: mol_type = other DNA
atgatcaataagaccaccaacatttcaataagtgtaaaggcctttacctt

SEQ ID NO: 30486 - DNA, 50 bp, synthetic construct
  source 1..50: mol_type = other DNA
tactaacatttcaatcaaggatactactatctttcatttctataagcgta

SEQ ID NO: 30487 - DNA, 50 bp, synthetic construct
  source 1..50: mol_type = other DNA
tggtagcgggggctggcttccaacgggctggatttgaaccaacgaccttc

SEQ ID NO: 30488 - DNA, 50 bp, synthetic construct
  source 1..50: mol_type = other DNA
ggttcgactccccttggggacgccatcaaatccccttggggacgccaata

SEQ ID NO: 30489 - DNA, 50 bp, synthetic construct
  source 1..50: mol_type = other DNA
gtggaattggtatgcagggtcgatagcaccaaatgcccggtttgtgccgc

SEQ ID NO: 30490 - DNA, 50 bp, synthetic construct
  source 1..50: mol_type = other DNA
aggtgagcaatgcgtaaaatcatgattattcatgtggatatggactgctt

SEQ ID NO: 30491 - DNA, 50 bp, synthetic construct
  source 1..50: mol_type = other DNA
agcaaaagagctttataataaagcaagtgaaattataaatactcattcta

SEQ ID NO: 30492 - DNA, 50 bp, synthetic construct
  source 1..50: mol_type = other DNA
aactcctactcatgaggagacggtagcaagttgatagttgtactatgtgt

SEQ ID NO: 30493 - DNA, 50 bp, synthetic construct
  source 1..50: mol_type = other DNA
tttgattatcttagctacagtttccaacgtgagtagaatgagggaacata

SEQ ID NO: 30494 - DNA, 50 bp, synthetic construct
  source 1..50: mol_type = other DNA
tagcaacacacaagtctcaacttgctaccgtctccacatgtgtagaatga

SEQ ID NO: 30495 - DNA, 50 bp, synthetic construct
  source 1..50: mol_type = other DNA
tttgtatacaaacattatatttttataaaaatctcataaaaattttgatt

SEQ ID NO: 30496 - DNA, 50 bp, synthetic construct
  source 1..50: mol_type = other DNA
tttagaaaagataagaaatcaactttatatattttttttggccttcctct

SEQ ID NO: 30497 - DNA, 50 bp, synthetic construct
  source 1..50: mol_type = other DNA
tagctacagtttcaacttgcttatcacacaagtctccacatgtgtagaat

SEQ ID NO: 30498 - DNA, 50 bp, synthetic construct
  source 1..50: mol_type = other DNA
ccctcgtctccaccattaaaatccaccaattttgaaaaaagaatgatgaa

SEQ ID NO: 30499 - DNA, 50 bp, synthetic construct
  source 1..50: mol_type = other DNA
tcagaattaggagttctctgcgaaccttaggagagaatagtcagattcaa

SEQ ID NO: 30500 - DNA, 50 bp, synthetic construct
  source 1..50: mol_type = other DNA
tgctggatacttgttagaaaaagaataatcttcctataaaaattgtatct

SEQ ID NO: 30501 - DNA, 50 bp, synthetic construct
  source 1..50: mol_type = other DNA
gcaaatttattcctagaggatttaaatcaataccatatataagtatatat

SEQ ID NO: 30502 - DNA, 50 bp, synthetic construct
  source 1..50: mol_type = other DNA
tacagtttccacatgtgtcgttactatatgtgtagaatgagggaacatat

SEQ ID NO: 30503 - DNA, 50 bp, synthetic construct
  source 1..50: mol_type = other DNA
ttcatatgttatttatattaaagtttagatatctaaaaatacttttagaa

SEQ ID NO: 30504 - DNA, 50 bp, synthetic construct
  source 1..50: mol_type = other DNA
gaggaatcttatgaataataattatactattttttattataattggaatg

SEQ ID NO: 30505 - DNA, 50 bp, synthetic construct
  source 1..50: mol_type = other DNA
agagcattttacattgggacaggtaaagttgaggaaatattaaacttaat

SEQ ID NO: 30506 - DNA, 50 bp, synthetic construct
  source 1..50: mol_type = other DNA
gataagtgttattgaaattgataaagaagctattcctgataactcggaaa

SEQ ID NO: 30507 - DNA, 50 bp, synthetic construct
  source 1..50: mol_type = other DNA
gtgatgtagttcatatacatcattgaattgatatataagcccaacatcaa

SEQ ID NO: 30508 - DNA, 50 bp, synthetic construct
  source 1..50: mol_type = other DNA
gagagcgcttgcgcgcgacgccgcgcggggcgtcgacagccggcgggagc

SEQ ID NO: 30509 - DNA, 50 bp, synthetic construct
  source 1..50: mol_type = other DNA
tccacccctcgaaccctattgcgtggccaaaatgccaatcagtactggga

SEQ ID NO: 30510 - DNA, 50 bp, synthetic construct
  source 1..50: mol_type = other DNA
aatccaactttacaaagtgtcaggattaagtgcctgggtaagacaaattt

SEQ ID NO: 30511 - DNA, 50 bp, synthetic construct
  source 1..50: mol_type = other DNA
tggtgaactggtagcgtccggattcgtagttcaaaaagtcccttacgagg

SEQ ID NO: 30512 - DNA, 50 bp, synthetic construct
  source 1..50: mol_type = other DNA
tagctctcaaaagcttattcgaccgtaacactcttagcaaggttgcgtgg

SEQ ID NO: 30513 - DNA, 50 bp, synthetic construct
  source 1..50: mol_type = other DNA
aggaggtgttaatatcagacaagtaagttggtgttatttggatggctcta

SEQ ID NO: 30514 - DNA, 50 bp, synthetic construct
  source 1..50: mol_type = other DNA
tttaaagcaatgcttgcaacggtgtacaccgatgtttatataatttagaa

SEQ ID NO: 30515 - DNA, 50 bp, synthetic construct
  source 1..50: mol_type = other DNA
tataaaagcatacgttagcaggtgtcaaacagcatggcgcgctttttatc

SEQ ID NO: 30516 - DNA, 50 bp, synthetic construct
  source 1..50: mol_type = other DNA
tgcgctacgccccgacttttcggacggtatggctcccccggcgggactcg

SEQ ID NO: 30517 - DNA, 50 bp, synthetic construct
  source 1..50: mol_type = other DNA
cagcgcggcgttaatcgggtgattttagacagccgcccggttcatgtagc

SEQ ID NO: 30518 - DNA, 50 bp, synthetic construct
  source 1..50: mol_type = other DNA
actctaacttgatttgctttttcttcatcaactacaaattgaaggaaaca

SEQ ID NO: 30519 - DNA, 50 bp, synthetic construct
  source 1..50: mol_type = other DNA
atggacacattacatgtcgatcctaggtgactccactgtaatgtgaatca

SEQ ID NO: 30520 - DNA, 50 bp, synthetic construct
  source 1..50: mol_type = other DNA
gcaatagcacaatcctccttaacattaaaatcaaaggtttcaagctttgt

SEQ ID NO: 30521 - DNA, 50 bp, synthetic construct
  source 1..50: mol_type = other DNA
atatagtatttttcctactactttttgtgacagctttaataataatatat

SEQ ID NO: 30522 - DNA, 50 bp, synthetic construct
  source 1..50: mol_type = other DNA
gcaatccatatccttgaagataaagctttttcttattctctatactataa

SEQ ID NO: 30523 - DNA, 50 bp, synthetic construct
  source 1..50: mol_type = other DNA
tcgctctggtctacgcaggctttcttaacatatttagtagaccacagcga

SEQ ID NO: 30524 - DNA, 50 bp, synthetic construct
  source 1..50: mol_type = other DNA
ttgctgccgctaatggtgccaaaaatccttatttccattagaattctatt

SEQ ID NO: 30525 - DNA, 50 bp, synthetic construct
  source 1..50: mol_type = other DNA
ataaatcctcaaactatgaatgatgataccttggtaaagattggaagaga

SEQ ID NO: 30526 - DNA, 50 bp, synthetic construct
  source 1..50: mol_type = other DNA
ccatataaattagaatttgaaaactagaggagaaatgtaaatggatgtat

SEQ ID NO: 30527 - DNA, 50 bp, synthetic construct
  source 1..50: mol_type = other DNA
gagcgatttgatttcatctttgaatccattaagatttttataaatttctg

SEQ ID NO: 30528 - DNA, 50 bp, synthetic construct
  source 1..50: mol_type = other DNA
aatgtaacatgcttttcccatgcttttatatttttggctcatttcacaaa

SEQ ID NO: 30529 - DNA, 50 bp, synthetic construct
  source 1..50: mol_type = other DNA
ttcggacaatcataccaatgagcaaaagctcattgcgctggaaaaagccc

SEQ ID NO: 30530 - DNA, 50 bp, synthetic construct
  source 1..50: mol_type = other DNA
aatggagaaccgtaccacaagtaacgttggaggtgtaacggagaaccgta

SEQ ID NO: 30531 - DNA, 50 bp, synthetic construct
  source 1..50: mol_type = other DNA
ctctaataagtttaactacatcaacgtctcgcaatgtggagtatttggga

SEQ ID NO: 30532 - DNA, 50 bp, synthetic construct
  source 1..50: mol_type = other DNA
tacagtttccacatgtgtcgttactaccgtctccacatgtgtagaatgag

SEQ ID NO: 30533 - DNA, 50 bp, synthetic construct
  source 1..50: mol_type = other DNA
caaatacgccacatgtggagtgcatatggacaacacattgtgagactgta

SEQ ID NO: 30534 - DNA, 50 bp, synthetic construct
  source 1..50: mol_type = other DNA
tacagtttccacatgtgtttgaactagcaacgccacagtctccacatgtg

SEQ ID NO: 30535 - DNA, 50 bp, synthetic construct
  source 1..50: mol_type = other DNA
cttataggataaataatggagaaccggagaaccgtatcataaataaatga

SEQ ID NO: 30536 - DNA, 50 bp, synthetic construct
  source 1..50: mol_type = other DNA
ggttaagtgtatggatatgtttccgacacattgcgagactatagttaaac

SEQ ID NO: 30537 - DNA, 50 bp, synthetic construct
  source 1..50: mol_type = other DNA
gggaagtgaatcagtataatcgctcagctaactaaaccagtacaaccgcc

SEQ ID NO: 30538 - DNA, 50 bp, synthetic construct
  source 1..50: mol_type = other DNA
tacagtttccacatgtgtcggagctagtctccacatgtgtagaatgaggg

SEQ ID NO: 30539 - DNA, 50 bp, synthetic construct
  source 1..50: mol_type = other DNA
atggggaagtgaatcagtacaacactaattaaaccaatacaaccgccaca

SEQ ID NO: 30540 - DNA, 50 bp, synthetic construct
  source 1..50: mol_type = other DNA
taaactccatctaaaactttcatatttgtaactttcccaacggttccata

SEQ ID NO: 30541 - DNA, 50 bp, synthetic construct
  source 1..50: mol_type = other DNA
gcgttggggcttaatggagtaaatctaatgcgcctaatggctacaaaaga

SEQ ID NO: 30542 - DNA, 50 bp, synthetic construct
  source 1..50: mol_type = other DNA
gctttagggcttaatggagtaaatctcatgcgcctaatggctacaaaaga

SEQ ID NO: 30543 - DNA, 50 bp, synthetic construct
  source 1..50: mol_type = other DNA
gttgtactgatttaattagcaaggatgatgaacggttatactgattcact

SEQ ID NO: 30544 - DNA, 50 bp, synthetic construct
  source 1..50: mol_type = other DNA
acagtctcacaatggcttgagaggaccgtctccacatgtggcgtatttgg

SEQ ID NO: 30545 - DNA, 50 bp, synthetic construct
  source 1..50: mol_type = other DNA
tcttttgtagccattaggcgcatgagatttactccattaagccctaaagc

SEQ ID NO: 30546 - DNA, 50 bp, synthetic construct
  source 1..50: mol_type = other DNA
tatccactttcacttaaataatcattcctatactatttatataatttatc

SEQ ID NO: 30547 - DNA, 50 bp, synthetic construct
  source 1..50: mol_type = other DNA
ttttttgtggccattaggcgcatgagatttaccccgtttaatcctaaagc

SEQ ID NO: 30548 - DNA, 50 bp, synthetic construct
  source 1..50: mol_type = other DNA
ttttatttatgatacggttcaccgtacggttccccacgattaatacgaaa

SEQ ID NO: 30549 - DNA, 50 bp, synthetic construct
  source 1..50: mol_type = other DNA
tgaaacctttcaataatgtcatgtaaacctttcaataatgtaaggttttt

SEQ ID NO: 30550 - DNA, 50 bp, synthetic construct
  source 1..50: mol_type = other DNA
ttaactcctagcttttgcattgcgtttgagatgtgattgcgtactgtttt

SEQ ID NO: 30551 - DNA, 50 bp, synthetic construct
  source 1..50: mol_type = other DNA
gggaagtgaatcagtacaaccgttcagctaactaaaccagtacaaccgcc

SEQ ID NO: 30552 - DNA, 50 bp, synthetic construct
  source 1..50: mol_type = other DNA
atgtttgggtatggggaagtgaatcagtacaaccgccacagtacgcttat

SEQ ID NO: 30553 - DNA, 50 bp, synthetic construct
  source 1..50: mol_type = other DNA
gttggaaattacgttaaagcgatatggtttactaagtataaaaatataaa

SEQ ID NO: 30554 - DNA, 50 bp, synthetic construct
  source 1..50: mol_type = other DNA
aaattaaaataatatatatttcttaaagcaaattttaaaaaaatttttta

SEQ ID NO: 30555 - DNA, 50 bp, synthetic construct
  source 1..50: mol_type = other DNA
ggtccaacagggccaacaggtgctactggtccaacaggaccgacggggcc

SEQ ID NO: 30556 - DNA, 50 bp, synthetic construct
  source 1..50: mol_type = other DNA
gatattttaatagaagatttagaatttcggcaaattagaatttgtatgta

SEQ ID NO: 30557 - DNA, 50 bp, synthetic construct
  source 1..50: mol_type = other DNA
ttaagtggtaaaagtgataaaaatgaaaatttatcacttttaccactttt

SEQ ID NO: 30558 - DNA, 50 bp, synthetic construct
  source 1..50: mol_type = other DNA
atacagaaaaaagccctcctatttataaaggaaggcttttaagatttaag

SEQ ID NO: 30559 - DNA, 50 bp, synthetic construct
  source 1..50: mol_type = other DNA
gtaaaaatgaaacgaaattataaatataaatacttaatattcatttcaag

SEQ ID NO: 30560 - DNA, 50 bp, synthetic construct
  source 1..50: mol_type = other DNA
tgcttgattatcttagctacagtttccacatgtgtagaatgagggaacat

SEQ ID NO: 30561 - DNA, 50 bp, synthetic construct
  source 1..50: mol_type = other DNA
tggcagttcaatagtagagacggtagcaagttgatgcattggcagcaact

SEQ ID NO: 30562 - DNA, 50 bp, synthetic construct
  source 1..50: mol_type = other DNA
taaaattgataaatttcttatatctttatataaataattatatcatttta

SEQ ID NO: 30563 - DNA, 50 bp, synthetic construct
  source 1..50: mol_type = other DNA
atcattcttttttcaaaattggtggatttcaatggtggagacgaggggag

SEQ ID NO: 30564 - DNA, 50 bp, synthetic construct
  source 1..50: mol_type = other DNA
gtagttttaccacatccacttggctatccactaggcccaagtaaacatag

SEQ ID NO: 30565 - DNA, 50 bp, synthetic construct
  source 1..50: mol_type = other DNA
aaatacgccacattgtgagacggtagacattgcgagactgtagttaaact

SEQ ID NO: 30566 - DNA, 50 bp, synthetic construct
  source 1..50: mol_type = other DNA
tatcttagctacagtttcaacttgctaccgtctccacatgagtagaatga

SEQ ID NO: 30567 - DNA, 50 bp, synthetic construct
  source 1..50: mol_type = other DNA
tatttaaattaaaaacttactaaatttttattgtgtttttaaattaaaaa

SEQ ID NO: 30568 - DNA, 50 bp, synthetic construct
  source 1..50: mol_type = other DNA
taggatttttaggaccatcaggtaattaccatcaggtgcaggaaaatcta

SEQ ID NO: 30569 - DNA, 50 bp, synthetic construct
  source 1..50: mol_type = other DNA
tttaattttctctaaagtacagtttaaactgacctaaatcttttgctaaa

SEQ ID NO: 30570 - DNA, 50 bp, synthetic construct
  source 1..50: mol_type = other DNA
aacagcagcaggtgtagtaagtttgacattttgttactggagcagctgga

SEQ ID NO: 30571 - DNA, 50 bp, synthetic construct
  source 1..50: mol_type = other DNA
tacagtttccacatgtctcattattacagtctcgacatgtgtagaatgag

SEQ ID NO: 30572 - DNA, 50 bp, synthetic construct
  source 1..50: mol_type = other DNA
aggatttttaggaccatctggtagtataaccatcaggtgcaggaaaatct

SEQ ID NO: 30573 - DNA, 50 bp, synthetic construct
  source 1..50: mol_type = other DNA
agcagctcaggctgctatcgcaaatatctgcacaggcagctatcgctaac

SEQ ID NO: 30574 - DNA, 50 bp, synthetic construct
  source 1..50: mol_type = other DNA
ggcaccagccatcagctgttttatccatgaactgtttgatgccctggctc

SEQ ID NO: 30575 - DNA, 50 bp, synthetic construct
  source 1..50: mol_type = other DNA
aaatctgtttcaaaatgggaacgagggatatgtttgccggatgtatctgt

SEQ ID NO: 30576 - DNA, 50 bp, synthetic construct
  source 1..50: mol_type = other DNA
tattattcaaaaaaactgcctgcatttgtgttcctcttttgttaattcat

SEQ ID NO: 30577 - DNA, 50 bp, synthetic construct
  source 1..50: mol_type = other DNA
aagtccgtttccaagtgggagcggggcatctgtctgccggatgtttctgt

SEQ ID NO: 30578 - DNA, 50 bp, synthetic construct
  source 1..50: mol_type = other DNA
accacatactctttcccatttgctatatgatatgggttcccataggcaac

SEQ ID NO: 30579 - DNA, 50 bp, synthetic construct
  source 1..50: mol_type = other DNA
gatcgccttttttgaatataaatagtacgttatgttaaacgaatattcct

SEQ ID NO: 30580 - DNA, 50 bp, synthetic construct
  source 1..50: mol_type = other DNA
tcccgaatacggttcatatcgagacgttgagagtatcgtattgctacaaa

SEQ ID NO: 30581 - DNA, 50 bp, synthetic construct
  source 1..50: mol_type = other DNA
atttctacatccgtcgagattacaatgataatggcaacatcgataggaac

SEQ ID NO: 30582 - DNA, 50 bp, synthetic construct
  source 1..50: mol_type = other DNA
cagcagtatccaaatgggagagtggggaaattcttatccagatatagaat

SEQ ID NO: 30583 - DNA, 50 bp, synthetic construct
  source 1..50: mol_type = other DNA
gcttgaatattatgattaattttcatgggcggtaacactttaattccctg

SEQ ID NO: 30584 - DNA, 50 bp, synthetic construct
  source 1..50: mol_type = other DNA
agttaaaaaagtaaagtaaactcctcagattttacttctgcaggttagtt

SEQ ID NO: 30585 - DNA, 50 bp, synthetic construct
  source 1..50: mol_type = other DNA
atttaacgaccaagattttataatttctgatacaatacatcactctaaag

SEQ ID NO: 30586 - DNA, 50 bp, synthetic construct
  source 1..50: mol_type = other DNA
tctaataagtttaactacagtctcacacacaagtctccacatgtggcgta

SEQ ID NO: 30587 - DNA, 50 bp, synthetic construct
  source 1..50: mol_type = other DNA
attatgcgtggagaagcatatcataactgatacgcagaggcgtatcataa

SEQ ID NO: 30588 - DNA, 50 bp, synthetic construct
  source 1..50: mol_type = other DNA
taggatttttaggaccatcaggtaattgccatcaggtgcaggaaaatcta

SEQ ID NO: 30589 - DNA, 50 bp, synthetic construct
  source 1..50: mol_type = other DNA
actaggatttttaggaccatcaggtaccatcaggtgcaggaaaatctaca

SEQ ID NO: 30590 - DNA, 50 bp, synthetic construct
  source 1..50: mol_type = other DNA
gtataagagattatctaaaaagacttaacatataagaatatcatataaaa

SEQ ID NO: 30591 - DNA, 50 bp, synthetic construct
  source 1..50: mol_type = other DNA
gtgaaaccgggttggcatatgaacaagcaacactggaacactgtgaccct

SEQ ID NO: 30592 - DNA, 50 bp, synthetic construct
  source 1..50: mol_type = other DNA
caatacttatattattatttttctattctactattttttaatatgcataa

SEQ ID NO: 30593 - DNA, 50 bp, synthetic construct
  source 1..50: mol_type = other DNA
tacagtttccacatgtgttgtcaatatgcactccacatgagtagaatgag

SEQ ID NO: 30594 - DNA, 50 bp, synthetic construct
  source 1..50: mol_type = other DNA
tcatttatttatgatacggttctccggttctccattatttatcctataag

SEQ ID NO: 30595 - DNA, 50 bp, synthetic construct
  source 1..50: mol_type = other DNA
ggagaaataggaccaacgggagcaacaggaccaacaggcccaacaggaaa

SEQ ID NO: 30596 - DNA, 50 bp, synthetic construct
  source 1..50: mol_type = other DNA
gtctcacaatgtgttgtcaataggatgctaccgtctccacatgtggcgta

SEQ ID NO: 30597 - DNA, 50 bp, synthetic construct
  source 1..50: mol_type = other DNA
actacagtctcaacggtattaccaaaaagtacgcacgtctcacaatgtgg

SEQ ID NO: 30598 - DNA, 50 bp, synthetic construct
  source 1..50: mol_type = other DNA
tcattctacacatgtggaaacggtagcaagttgaaactgtagctaagata

SEQ ID NO: 30599 - DNA, 50 bp, synthetic construct
  source 1..50: mol_type = other DNA
caaatacgccacatgtggagacggtagttcaaacacattgtgagactgta

SEQ ID NO: 30600 - DNA, 50 bp, synthetic construct
  source 1..50: mol_type = other DNA
aagtttaactacagtctcaacttgctaccgtctcacaatgtggcgtattt

SEQ ID NO: 30601 - DNA, 50 bp, synthetic construct
  source 1..50: mol_type = other DNA
aagtttaactacatcaacggtattacaataacgctaccgtctcacaatgt

SEQ ID NO: 30602 - DNA, 50 bp, synthetic construct
  source 1..50: mol_type = other DNA
atatttcctctatggaacccctcgtcaataagacagccatcagatataac

SEQ ID NO: 30603 - DNA, 50 bp, synthetic construct
  source 1..50: mol_type = other DNA
ttgatatgttatttatattaaagtttagatatctaaaaatacttttagaa

SEQ ID NO: 30604 - DNA, 50 bp, synthetic construct
  source 1..50: mol_type = other DNA
gctcttttgggagctaatggagcaggaaaatctacacttattaaaatttt

SEQ ID NO: 30605 - DNA, 50 bp, synthetic construct
  source 1..50: mol_type = other DNA
tcttcacttatacccccacaaggacagggattaaaggctccgactaacaa

SEQ ID NO: 30606 - DNA, 50 bp, synthetic construct
  source 1..50: mol_type = other DNA
cataagcttagcatgtgctaggtggacaacctgcatgccctgtgtctaat

SEQ ID NO: 30607 - DNA, 50 bp, synthetic construct
  source 1..50: mol_type = other DNA
caaatgactccctttccataacatgacaccaatgacaagtagaatagccg

SEQ ID NO: 30608 - DNA, 50 bp, synthetic construct
  source 1..50: mol_type = other DNA
tgaaattactatgacagttacaggtagatgctattgatataattaaagaa

SEQ ID NO: 30609 - DNA, 50 bp, synthetic construct
  source 1..50: mol_type = other DNA
cttcaatgacctttgaatgaagtctagctacaatacaatgacccttgatt

SEQ ID NO: 30610 - DNA, 50 bp, synthetic construct
  source 1..50: mol_type = other DNA
agctgatggtgatgattaatagcaaaagcagtatatcatggtggtcatcg

SEQ ID NO: 30611 - DNA, 50 bp, synthetic construct
  source 1..50: mol_type = other DNA
gctgaatttacactcgaaattctcatagaataatcgaatttacactcgat

SEQ ID NO: 30612 - DNA, 50 bp, synthetic construct
  source 1..50: mol_type = other DNA
agacaaggaaccaccttattattttcatcatgagctgttaatccattaaa

SEQ ID NO: 30613 - DNA, 50 bp, synthetic construct
  source 1..50: mol_type = other DNA
cttatgctcgatgaggcaacttcaagcttagatagtaaatctgagtctgt

SEQ ID NO: 30614 - DNA, 50 bp, synthetic construct
  source 1..50: mol_type = other DNA
atagtgctaccgtctccacatgtgtccacatgtgtagaatgagggaacat

SEQ ID NO: 30615 - DNA, 50 bp, synthetic construct
  source 1..50: mol_type = other DNA
gttaagtgtatggatatgttcccaaaacacattgtgagactgtagttaaa

SEQ ID NO: 30616 - DNA, 50 bp, synthetic construct
  source 1..50: mol_type = other DNA
tttgaattgatacatccatttcaagatggtaatggtcacataggtagatt

SEQ ID NO: 30617 - DNA, 50 bp, synthetic construct
  source 1..50: mol_type = other DNA
agatatttttttagccaatgctatccgttgcaaattctatacactttacc

SEQ ID NO: 30618 - DNA, 50 bp, synthetic construct
  source 1..50: mol_type = other DNA
ataatgctaccgtctcaacggtattactaccgtctccacatgtgtagaat

SEQ ID NO: 30619 - DNA, 50 bp, synthetic construct
  source 1..50: mol_type = other DNA
gtttttaccctatatcctgttccttcaggagatagttcaaaggagctttg

SEQ ID NO: 30620 - DNA, 50 bp, synthetic construct
  source 1..50: mol_type = other DNA
ctacctatatcaggaatagattctccaatttcccattttgctattgattg

SEQ ID NO: 30621 - DNA, 50 bp, synthetic construct
  source 1..50: mol_type = other DNA
ctgtcggagacgacgaagcgatctgtagagtgctttttcggtttcatcat

SEQ ID NO: 30622 - DNA, 50 bp, synthetic construct
  source 1..50: mol_type = other DNA
attgtattggatattatgttaccagatggcgaaggttatgatatttgtaa

SEQ ID NO: 30623 - DNA, 50 bp, synthetic construct
  source 1..50: mol_type = other DNA
gtttactaggtccaagtgggtactataatatccaagtggttgtggaaaaa

SEQ ID NO: 30624 - DNA, 50 bp, synthetic construct
  source 1..50: mol_type = other DNA
aatggagaaccgtatcacaagtaacgttagaggtgtaacggagaaccgta

SEQ ID NO: 30625 - DNA, 50 bp, synthetic construct
  source 1..50: mol_type = other DNA
tgtttgattatcttagctacagtttcgacgtagcaacaccacagtctcca

SEQ ID NO: 30626 - DNA, 50 bp, synthetic construct
  source 1..50: mol_type = other DNA
tacagtttccacatgtgttgtcaatatgcactccacatgtgtagaatgag

SEQ ID NO: 30627 - DNA, 50 bp, synthetic construct
  source 1..50: mol_type = other DNA
tagcgcccgcacccgataccctgccgaagaggaatcaggtctgggcgaag

SEQ ID NO: 30628 - DNA, 50 bp, synthetic construct
  source 1..50: mol_type = other DNA
tgcttgattatcttagctacagtttccacatgagtagaatgagggaacat

SEQ ID NO: 30629 - DNA, 50 bp, synthetic construct
  source 1..50: mol_type = other DNA
tcattctactcatgtggagacggtagcaagttgaaactgtagctaagata

SEQ ID NO: 30630 - DNA, 50 bp, synthetic construct
  source 1..50: mol_type = other DNA
caagaatgattttaataataacgtaagagaaacaacaaatatacttgaag

SEQ ID NO: 30631 - DNA, 50 bp, synthetic construct
  source 1..50: mol_type = other DNA
tatataactttatacttttttattaaagggaaatatttactttttctcta

SEQ ID NO: 30632 - DNA, 50 bp, synthetic construct
  source 1..50: mol_type = other DNA
tcaatgtacggctcaatatcttttctccatcttgccgagccatactcttt

SEQ ID NO: 30633 - DNA, 50 bp, synthetic construct
  source 1..50: mol_type = other DNA
gcttctgtatctaaatgggaaactggacaaagctatcctgacataacctt

SEQ ID NO: 30634 - DNA, 50 bp, synthetic construct
  source 1..50: mol_type = other DNA
gatttggtgaagcaaagcgggaagatcttcccgtttcggtgaagcattaa

SEQ ID NO: 30635 - DNA, 50 bp, synthetic construct
  source 1..50: mol_type = other DNA
ggtcaagagaaagatgaggttagatatcttacctcaacaaatgtataagt

SEQ ID NO: 30636 - DNA, 50 bp, synthetic construct
  source 1..50: mol_type = other DNA
aacagccggtccgccaagaccaagaccccgccggtggcgccatctaagta

SEQ ID NO: 30637 - DNA, 50 bp, synthetic construct
  source 1..50: mol_type = other DNA
ttaaatgagatacggttattttttgtgaaaaagttcttctaaacattcgt

SEQ ID NO: 30638 - DNA, 50 bp, synthetic construct
  source 1..50: mol_type = other DNA
aacgaagatttcatttattagaagctctttctaaaaatgagaaagagttt

SEQ ID NO: 30639 - DNA, 50 bp, synthetic construct
  source 1..50: mol_type = other DNA
acgaaaagtatggaaaaatcctgaaaatttaattttattatatatcacta

SEQ ID NO: 30640 - DNA, 50 bp, synthetic construct
  source 1..50: mol_type = other DNA
agttcgagtctgacagggggctccacatcttttcatgccttgtcgcaaat

SEQ ID NO: 30641 - DNA, 50 bp, synthetic construct
  source 1..50: mol_type = other DNA
atttgcgacaaggcatgaaaagatgtggagccccctgtcagactcgaact

SEQ ID NO: 30642 - DNA, 50 bp, synthetic construct
  source 1..50: mol_type = other DNA
agcgtgcttaagattctgatgcagggcatcatcaggtgcttatacacgca

SEQ ID NO: 30643 - DNA, 50 bp, synthetic construct
  source 1..50: mol_type = other DNA
ccgtctcaacgtgccacgagctgagtaacgctctcaacatgtgctgtttg

SEQ ID NO: 30644 - DNA, 50 bp, synthetic construct
  source 1..50: mol_type = other DNA
taatgaagaatgaaccgtaccataaaaaggagacggagaaccgtaccata

SEQ ID NO: 30645 - DNA, 50 bp, synthetic construct
  source 1..50: mol_type = other DNA
ctgtagaggaaaacggtcagcgggcgcactacgctcccttgtcttgattg

SEQ ID NO: 30646 - DNA, 50 bp, synthetic construct
  source 1..50: mol_type = other DNA
ccaccagatgatcttcagcagatcacttattgggcgcagccttctggtgc

SEQ ID NO: 30647 - DNA, 50 bp, synthetic construct
  source 1..50: mol_type = other DNA
cgaatgccgtcatcaggaggctcctgcgagcggagtgctgatcggtttcg

SEQ ID NO: 30648 - DNA, 50 bp, synthetic construct
  source 1..50: mol_type = other DNA
atagatttcgctgtttttccagagacaacaccggcagcaagtttgtattt

SEQ ID NO: 30649 - DNA, 50 bp, synthetic construct
  source 1..50: mol_type = other DNA
ttacaaggggcaatgcaacaaaaaagttcttcttgtaaagcccagtggcc

SEQ ID NO: 30650 - DNA, 50 bp, synthetic construct
  source 1..50: mol_type = other DNA
aaccgggaaaaattcacccctttttataacatcattaattttgcctatgg

SEQ ID NO: 30651 - DNA, 50 bp, synthetic construct
  source 1..50: mol_type = other DNA
tttcttttgtttatacgtgcatagagaaatggatgtaaggtgaaaaatac

SEQ ID NO: 30652 - DNA, 50 bp, synthetic construct
  source 1..50: mol_type = other DNA
ctgcccttgagggcttaacggatttaacctatacaagaactaccttgcag

SEQ ID NO: 30653 - DNA, 50 bp, synthetic construct
  source 1..50: mol_type = other DNA
gcagcaggcagaatacatttacagccaaatacatctctgccgccgcctat

SEQ ID NO: 30654 - DNA, 50 bp, synthetic construct
  source 1..50: mol_type = other DNA
agtttccgcagcatccgcatttaatcttaccgtcaccgcctcgccggact

SEQ ID NO: 30655 - DNA, 50 bp, synthetic construct
  source 1..50: mol_type = other DNA
gccaccttccttttctccttgctgaccactccgttcttctggaaggtgac

SEQ ID NO: 30656 - DNA, 50 bp, synthetic construct
  source 1..50: mol_type = other DNA
gttgaagcagagggatatgactatgcaacgacatatgccgcttggatacc

SEQ ID NO: 30657 - DNA, 50 bp, synthetic construct
  source 1..50: mol_type = other DNA
gaatacatcagcacgatgctgtgtgaccagcggttcctgccagtgtataa

SEQ ID NO: 30658 - DNA, 50 bp, synthetic construct
  source 1..50: mol_type = other DNA
attcaggtgctgcaaaggtactcaagtgcttaccagtgaatccactcaca

SEQ ID NO: 30659 - DNA, 50 bp, synthetic construct
  source 1..50: mol_type = other DNA
ttaagaaaatacataaaagcgatatggtttactaaagtatttttatataa

SEQ ID NO: 30660 - DNA, 50 bp, synthetic construct
  source 1..50: mol_type = other DNA
tcttagctacagtttcaacggtattactaccgtctccacatgtgtagaat

SEQ ID NO: 30661 - DNA, 50 bp, synthetic construct
  source 1..50: mol_type = other DNA
agacgttatgggatgagacggtagtaataccgttgagacatgaattgtat

SEQ ID NO: 30662 - DNA, 50 bp, synthetic construct
  source 1..50: mol_type = other DNA
aaagacaggaaaggatatgccataattgtggcaaagagctaatgagccaa

SEQ ID NO: 30663 - DNA, 50 bp, synthetic construct
  source 1..50: mol_type = other DNA
tgtagattttcctgcacctgatggtaccagatggtcctaaaaatcctagt

SEQ ID NO: 30664 - DNA, 50 bp, synthetic construct
  source 1..50: mol_type = other DNA
aatcagaaaatcagacgtggccgttcacttaaataagtgatagtcttaat

SEQ ID NO: 30665 - DNA, 50 bp, synthetic construct
  source 1..50: mol_type = other DNA
tctactcctggtacagatactccatcaaccgttacagttccaggtataaa

SEQ ID NO: 30666 - DNA, 50 bp, synthetic construct
  source 1..50: mol_type = other DNA
gatgttctggatttcttagccgcatatgacgctaagaaattcgctcacgt

SEQ ID NO: 30667 - DNA, 50 bp, synthetic construct
  source 1..50: mol_type = other DNA
cgtatcatttatttatgatacggttctccattatttatcctataagccct

SEQ ID NO: 30668 - DNA, 50 bp, synthetic construct
  source 1..50: mol_type = other DNA
atgtatccctctttctgcaccatatctgtacagcagggtgtgatttgttg

SEQ ID NO: 30669 - DNA, 50 bp, synthetic construct
  source 1..50: mol_type = other DNA
tcatttatttatgatacggttcaccggttctccattatttatcctataag

SEQ ID NO: 30670 - DNA, 50 bp, synthetic construct
  source 1..50: mol_type = other DNA
gacaataacgctaccgtctcacaatgtggagtatttgggaacatatccat

SEQ ID NO: 30671 - DNA, 50 bp, synthetic construct
  source 1..50: mol_type = other DNA
tttcgttccccatgaagcgttttgtccatcttgctgagccatactctttc

SEQ ID NO: 30672 - DNA, 50 bp, synthetic construct
  source 1..50: mol_type = other DNA
agatttgcggacaggggttcgactcctgcgattcgtctccaccaatttta

SEQ ID NO: 30673 - DNA, 50 bp, synthetic construct
  source 1..50: mol_type = other DNA
cattacacataccacatcaacttgctaccgtctccatgatgccctacaac

SEQ ID NO: 30674 - DNA, 50 bp, synthetic construct
  source 1..50: mol_type = other DNA
cgtctcctggttcctcaccgccttcgaaggcgagcaggaaccaggagaca

SEQ ID NO: 30675 - DNA, 50 bp, synthetic construct
  source 1..50: mol_type = other DNA
ccagtagacccaaataaccaagatacttctattttaactggatcaattga

SEQ ID NO: 30676 - DNA, 50 bp, synthetic construct
  source 1..50: mol_type = other DNA
cgacggcggcgacgagctcgggggcggcgccgttgacgtcgatcttctcg

SEQ ID NO: 30677 - DNA, 50 bp, synthetic construct
  source 1..50: mol_type = other DNA
cactctgacaggcacgctcgccgtgcgcggcgatcgccgcgcgcagactg

SEQ ID NO: 30678 - DNA, 50 bp, synthetic construct
  source 1..50: mol_type = other DNA
gcggctgattgccattttgggcggttctgccgtaaaccttcttcagcccg

SEQ ID NO: 30679 - DNA, 50 bp, synthetic construct
  source 1..50: mol_type = other DNA
tcgaggcgatcatcgatacgtccagctggacttcctgcggctgccctcat

SEQ ID NO: 30680 - DNA, 50 bp, synthetic construct
  source 1..50: mol_type = other DNA
agcgaggcagctattggaaaccttccaagctggccaattagtgttgccag

SEQ ID NO: 30681 - DNA, 50 bp, synthetic construct
  source 1..50: mol_type = other DNA
aaaaagataagcaaacacgcaaaatagattcttgtttttagttaagattt

SEQ ID NO: 30682 - DNA, 50 bp, synthetic construct
  source 1..50: mol_type = other DNA
tttaatctatttaaagtaaaaatatccaattttagtaaaaacctccgtta

SEQ ID NO: 30683 - DNA, 50 bp, synthetic construct
  source 1..50: mol_type = other DNA
gtacaatagctgcctcaattaagaatactctatttcaattaacgtaaaac

SEQ ID NO: 30684 - DNA, 50 bp, synthetic construct
  source 1..50: mol_type = other DNA
ggtagaggctaggttctgtagagaaccttgaccacatgccagccaaattt

SEQ ID NO: 30685 - DNA, 50 bp, synthetic construct
  source 1..50: mol_type = other DNA
ccaaaagagccgtctgtctaatgcatgtcttgcatacaaccatttttgaa

SEQ ID NO: 30686 - DNA, 50 bp, synthetic construct
  source 1..50: mol_type = other DNA
tgcatcaagctctttacgaccacgtttcgcgttacaaaggcggtaattaa

SEQ ID NO: 30687 - DNA, 50 bp, synthetic construct
  source 1..50: mol_type = other DNA
tgtggtcaaggtattgtatcggttataactaaggttctctacagaacata

SEQ ID NO: 30688 - DNA, 50 bp, synthetic construct
  source 1..50: mol_type = other DNA
atttgtgcgcaagcctctgcatcagcgtctgccagtgcgtggtggtgatt

SEQ ID NO: 30689 - DNA, 50 bp, synthetic construct
  source 1..50: mol_type = other DNA
accgtaataacaaatgatattaatctgctaagtacagattcctctgttcc

SEQ ID NO: 30690 - DNA, 50 bp, synthetic construct
  source 1..50: mol_type = other DNA
cactgaaatttttttaaagcttagtgctgtgtggacataatatttcagca

SEQ ID NO: 30691 - DNA, 50 bp, synthetic construct
  source 1..50: mol_type = other DNA
aagtgatattgatggttttattatcagcagtattgccgctaaggttgccg

SEQ ID NO: 30692 - DNA, 50 bp, synthetic construct
  source 1..50: mol_type = other DNA
tcatgctgtttgtcttccatatgctttacaagtgtgtcgatcgcttcttt

SEQ ID NO: 30693 - DNA, 50 bp, synthetic construct
  source 1..50: mol_type = other DNA
ataagggtaatgccaataatagtgacgacagaccctgtcacgacaggcgg

SEQ ID NO: 30694 - DNA, 50 bp, synthetic construct
  source 1..50: mol_type = other DNA
aactgctttgtcagtttatcatgatatcatgatataccgctttgtcagtg

SEQ ID NO: 30695 - DNA, 50 bp, synthetic construct
  source 1..50: mol_type = other DNA
ctacaaacaaatagttatcatgaatataactgtgaaatctttaaatgtaa

SEQ ID NO: 30696 - DNA, 50 bp, synthetic construct
  source 1..50: mol_type = other DNA
cgggtgcccgaaagatgccaaaaataggtatggtatctctcgggtgcccg

SEQ ID NO: 30697 - DNA, 50 bp, synthetic construct
  source 1..50: mol_type = other DNA
ctcgccaacgggttgccgtcgttctcgatcgtcggcctgcccgatctcga

SEQ ID NO: 30698 - DNA, 50 bp, synthetic construct
  source 1..50: mol_type = other DNA
tcggattgccgagcgtgtctgaaaattttgcctcacgttcgggttgccga

SEQ ID NO: 30699 - DNA, 50 bp, synthetic construct
  source 1..50: mol_type = other DNA
aaagtcggcttcgtttccctcggctgcccgaaagcgctcgtcgactccga

SEQ ID NO: 30700 - DNA, 50 bp, synthetic construct
  source 1..50: mol_type = other DNA
gccgcggcgggcggccatcacctgctgatgatcggcccgcccggcgccgg

SEQ ID NO: 30701 - DNA, 50 bp, synthetic construct
  source 1..50: mol_type = other DNA
tcggattgccgagcgtgtctgaaaattttgactcacgttcgggttgccga

SEQ ID NO: 30702 - DNA, 50 bp, synthetic construct
  source 1..50: mol_type = other DNA
aaaacacttgacatttcattgttttaaaacaatgaaggttcgtcgtattt

SEQ ID NO: 30703 - DNA, 50 bp, synthetic construct
  source 1..50: mol_type = other DNA
ttacatagtattacacaaccattctaaaaaggttgtgtattaaagcgttt

SEQ ID NO: 30704 - DNA, 50 bp, synthetic construct
  source 1..50: mol_type = other DNA
gagcgttccgttaaccgggtgatcctcgatagccggccggtgcacagcgc

SEQ ID NO: 30705 - DNA, 50 bp, synthetic construct
  source 1..50: mol_type = other DNA
atcaagggtcattgtatttgagctatagcctatattcaagggtcattgcg

SEQ ID NO: 30706 - DNA, 50 bp, synthetic construct
  source 1..50: mol_type = other DNA
attttattgtacttacctaactttctaaatgcagttaaaatttttaacga

SEQ ID NO: 30707 - DNA, 50 bp, synthetic construct
  source 1..50: mol_type = other DNA
aaatgtgccgcgaagaacagtttcatgatactattacccgggtaatagtt

SEQ ID NO: 30708 - DNA, 50 bp, synthetic construct
  source 1..50: mol_type = other DNA
agagctatcggtgttacaatcatcgtttccattgtcagcccaatcattga

SEQ ID NO: 30709 - DNA, 50 bp, synthetic construct
  source 1..50: mol_type = other DNA
gcatgcccggctttactgtcgatggccaacatttactctcgttgggttgc

SEQ ID NO: 30710 - DNA, 50 bp, synthetic construct
  source 1..50: mol_type = other DNA
ttggaggtgttcggctccgaggtgccgttctcccacttggacaccgcctg

SEQ ID NO: 30711 - DNA, 50 bp, synthetic construct
  source 1..50: mol_type = other DNA
gaactggagtagatgtatatactcatgagttgaaacatactctctaatta

SEQ ID NO: 30712 - DNA, 50 bp, synthetic construct
  source 1..50: mol_type = other DNA
catccattggactgaaagcaaatgtacattagacagacggctcttttggt

SEQ ID NO: 30713 - DNA, 50 bp, synthetic construct
  source 1..50: mol_type = other DNA
aaaagtggcgggctacatgggacgatcgacactatatggcggagagatag

SEQ ID NO: 30714 - DNA, 50 bp, synthetic construct
  source 1..50: mol_type = other DNA
accaggaggaccaaggaaaagaaggtatcagtaggttgtggtttccagcc

SEQ ID NO: 30715 - DNA, 50 bp, synthetic construct
  source 1..50: mol_type = other DNA
ccaagaaaaagtaatattggatataaaagcagtaggttgtggtttccagc

SEQ ID NO: 30716 - DNA, 50 bp, synthetic construct
  source 1..50: mol_type = other DNA
tagcaaataacagaggcagaaacgatcgtttcgattcctttctctcgctg

SEQ ID NO: 30717 - DNA, 50 bp, synthetic construct
  source 1..50: mol_type = other DNA
taatctcctgtttaggtttgccaaattcgggttgccaattcgcctggcta

SEQ ID NO: 30718 - DNA, 50 bp, synthetic construct
  source 1..50: mol_type = other DNA
gccaaacataaagaagtaattataaagatatacctctccttttgtttttt

SEQ ID NO: 30719 - DNA, 50 bp, synthetic construct
  source 1..50: mol_type = other DNA
gctttaggaataggaaattaatattaataataatttaacattggatagta

SEQ ID NO: 30720 - DNA, 50 bp, synthetic construct
  source 1..50: mol_type = other DNA
aaaaaacaaaaggagaggtatatctttataattacttctttatgtttggc

SEQ ID NO: 30721 - DNA, 50 bp, synthetic construct
  source 1..50: mol_type = other DNA
atgtgtcatatatttctcattcccttctgaatatgaaatggtaaaagtct

SEQ ID NO: 30722 - DNA, 50 bp, synthetic construct
  source 1..50: mol_type = other DNA
gaacataatccaagacagtttcctatgaccagttgaggtgatatatgttt

SEQ ID NO: 30723 - DNA, 50 bp, synthetic construct
  source 1..50: mol_type = other DNA
tggcggagcggaccggactgcgcctccgcgacttccggcccgagacgccg

SEQ ID NO: 30724 - DNA, 50 bp, synthetic construct
  source 1..50: mol_type = other DNA
attggcgggcttgcctaacatataattgactatcaggcttgccctccggc

SEQ ID NO: 30725 - DNA, 50 bp, synthetic construct
  source 1..50: mol_type = other DNA
aaaatcggcttcgtctccctgggctgcccgaaaaacctggtggattccga

SEQ ID NO: 30726 - DNA, 50 bp, synthetic construct
  source 1..50: mol_type = other DNA
actgtggttcgccaataaaaaacagttaattatttttggtttgccaataa

SEQ ID NO: 30727 - DNA, 50 bp, synthetic construct
  source 1..50: mol_type = other DNA
ttccattttctgattggtagcgggggctggatttgaaccaacgaccctcg

SEQ ID NO: 30728 - DNA, 50 bp, synthetic construct
  source 1..50: mol_type = other DNA
cagtaaatgcagacatgctaggctatcgcataacatatgcagccatgctc

SEQ ID NO: 30729 - DNA, 50 bp, synthetic construct
  source 1..50: mol_type = other DNA
gctatttgtgcacaagcttctgcgtcagcaagtgcgtggtggtgattctc

SEQ ID NO: 30730 - DNA, 50 bp, synthetic construct
  source 1..50: mol_type = other DNA
tcgatctttcccttcgttataaagcgtattataacgataggggcattggt

SEQ ID NO: 30731 - DNA, 50 bp, synthetic construct
  source 1..50: mol_type = other DNA
accaatcatcaccatgctctcgccgatgctgaggcttgtgcacaaatagc

SEQ ID NO: 30732 - DNA, 50 bp, synthetic construct
  source 1..50: mol_type = other DNA
tctatgatttaactatttaacattcaaatgtttatttaccacgctccaaa

SEQ ID NO: 30733 - DNA, 50 bp, synthetic construct
  source 1..50: mol_type = other DNA
ttggcaggaacctgaagacaatattcaaaaaaagcaattgcccaactaaa

SEQ ID NO: 30734 - DNA, 50 bp, synthetic construct
  source 1..50: mol_type = other DNA
ctaaattctttaagaaaagatcttcttatgtctatttataaaaaattaaa

SEQ ID NO: 30735 - DNA, 50 bp, synthetic construct
  source 1..50: mol_type = other DNA
ttaatcctattttttgttttacttatatgcttccccgcgcataatcttaa

SEQ ID NO: 30736 - DNA, 50 bp, synthetic construct
  source 1..50: mol_type = other DNA
gctcaactttatgcagagtataaaaagctattcaaagcatatctttcagg

SEQ ID NO: 30737 - DNA, 50 bp, synthetic construct
  source 1..50: mol_type = other DNA
aaccgaacctaaaagttcaagaggagttgcttaaaacgacttgttgtgtt

SEQ ID NO: 30738 - DNA, 50 bp, synthetic construct
  source 1..50: mol_type = other DNA
atttttggagtgtcttttattatgctatttatataataaaggccaagaaa

SEQ ID NO: 30739 - DNA, 50 bp, synthetic construct
  source 1..50: mol_type = other DNA
ggataaatttgctaattctgaaatactcatcttaattggcttttttattt

SEQ ID NO: 30740 - DNA, 50 bp, synthetic construct
  source 1..50: mol_type = other DNA
cccatactgtcttcacgatgacgtcacggtcatcgagaaggatgctccgg

SEQ ID NO: 30741 - DNA, 50 bp, synthetic construct
  source 1..50: mol_type = other DNA
atgtgcagatagggacactttggcagtccggtgtgtctatatatcactct

SEQ ID NO: 30742 - DNA, 50 bp, synthetic construct
  source 1..50: mol_type = other DNA
acccgcaccgcggcttcgagaccgtgaatcttctttctcgaagggcgtat

SEQ ID NO: 30743 - DNA, 50 bp, synthetic construct
  source 1..50: mol_type = other DNA
cggtgctgatcaagtccggtctataaacctgtacgacttgatcaagtccg

SEQ ID NO: 30744 - DNA, 50 bp, synthetic construct
  source 1..50: mol_type = other DNA
taagctcaaaggtgtcaatacggacgattgggtttgtaccattgagcggc

SEQ ID NO: 30745 - DNA, 50 bp, synthetic construct
  source 1..50: mol_type = other DNA
acagtttccacatgtgtcggaactatagtctccacatgtgtagaatgagg

SEQ ID NO: 30746 - DNA, 50 bp, synthetic construct
  source 1..50: mol_type = other DNA
gaatgatgaaatgattgggattacttaaaaaaagaatgataaaatacttg

SEQ ID NO: 30747 - DNA, 50 bp, synthetic construct
  source 1..50: mol_type = other DNA
gatcaatgcgggggctccataccacactcatgatacgcagcgccttatca

SEQ ID NO: 30748 - DNA, 50 bp, synthetic construct
  source 1..50: mol_type = other DNA
agcaatcacttgcatgttcgcttatttaagcaatcacttgcatgtttgca

SEQ ID NO: 30749 - DNA, 50 bp, synthetic construct
  source 1..50: mol_type = other DNA
aagcgcattacaatattacgcaagatcatatttaaaattacggtcaattt

SEQ ID NO: 30750 - DNA, 50 bp, synthetic construct
  source 1..50: mol_type = other DNA
tttatgtctttagataaaatctttataacttatacatctttcatagtaaa

SEQ ID NO: 30751 - DNA, 50 bp, synthetic construct
  source 1..50: mol_type = other DNA
cctgtaccaggaggaccaaggaaaagtaggttgtggtttccagccgctgc

SEQ ID NO: 30752 - DNA, 50 bp, synthetic construct
  source 1..50: mol_type = other DNA
cactcttcgttggttggattaccattggtaggaataaccagtgctttcgc

SEQ ID NO: 30753 - DNA, 50 bp, synthetic construct
  source 1..50: mol_type = other DNA
aatccgccggggccaaattgaccgtgtaatgcgcttggctggaaactgga

SEQ ID NO: 30754 - DNA, 50 bp, synthetic construct
  source 1..50: mol_type = other DNA
cacttactgtgcgagcagttggcataagccttccgtgagctgaaagccgg

SEQ ID NO: 30755 - DNA, 50 bp, synthetic construct
  source 1..50: mol_type = other DNA
aatttggctggcatgtggtcaaagtactaaggttctctacagaacatagc

SEQ ID NO: 30756 - DNA, 50 bp, synthetic construct
  source 1..50: mol_type = other DNA
acatctcaaacgcaatgtgtagtgatcactacgcatctcaaacgcaatgc

SEQ ID NO: 30757 - DNA, 50 bp, synthetic construct
  source 1..50: mol_type = other DNA
agtggttagaaatggctaaagttctggtgctttattattccatgtacgga

SEQ ID NO: 30758 - DNA, 50 bp, synthetic construct
  source 1..50: mol_type = other DNA
atcaagggtcattgtattgtagctatagacttcattcaagggttattgaa

SEQ ID NO: 30759 - DNA, 50 bp, synthetic construct
  source 1..50: mol_type = other DNA
aatcctgattactatttagacgaatcaacggtcaaacagaaatcagtgaa

SEQ ID NO: 30760 - DNA, 50 bp, synthetic construct
  source 1..50: mol_type = other DNA
agctaacataccacactgacgaaaggttttgctggcgtcgttggttgaat

SEQ ID NO: 30761 - DNA, 50 bp, synthetic construct
  source 1..50: mol_type = other DNA
acatcagctaaaggaaattcaatccagattgaattaaattatcttgaatc

SEQ ID NO: 30762 - DNA, 50 bp, synthetic construct
  source 1..50: mol_type = other DNA
tgataaatttggcctttagagtgatatgcttctaatccctcacttctttt

SEQ ID NO: 30763 - DNA, 50 bp, synthetic construct
  source 1..50: mol_type = other DNA
gattcgtttagctctattagatgatgcggtaaaatagaactaacaataaa

SEQ ID NO: 30764 - DNA, 50 bp, synthetic construct
  source 1..50: mol_type = other DNA
cgaaaaaatggaaacgataaatgaaagctcttagcgtgaatcgaacacgc

SEQ ID NO: 30765 - DNA, 50 bp, synthetic construct
  source 1..50: mol_type = other DNA
taacctgacgatgaccaatgttcacatgtaaccatgaccaacattcgtac

SEQ ID NO: 30766 - DNA, 50 bp, synthetic construct
  source 1..50: mol_type = other DNA
ccactggatactttggattccctattttgggtttccggggtgactaatta

SEQ ID NO: 30767 - DNA, 50 bp, synthetic construct
  source 1..50: mol_type = other DNA
tatttagacgaatcattacgctttcaaatcccatctttagagtgtatcaa

SEQ ID NO: 30768 - DNA, 50 bp, synthetic construct
  source 1..50: mol_type = other DNA
atcaagggtcattgtattgtagccatagacttcattcaagggtcattgaa

SEQ ID NO: 30769 - DNA, 50 bp, synthetic construct
  source 1..50: mol_type = other DNA
atcctgaagagacctttctattgatatcataagaaaggtgtaatccttga

SEQ ID NO: 30770 - DNA, 50 bp, synthetic construct
  source 1..50: mol_type = other DNA
acttttttcactctaaaaaagtggtaccactttgagaaagagataggttc

SEQ ID NO: 30771 - DNA, 50 bp, synthetic construct
  source 1..50: mol_type = other DNA
gattattttattttacaaaatgacaatgcaggctgggacataaatcaatg

SEQ ID NO: 30772 - DNA, 50 bp, synthetic construct
  source 1..50: mol_type = other DNA
aacatctcaataaaggatagtaaaattttagtaacctacatttccacaag

SEQ ID NO: 30773 - DNA, 50 bp, synthetic construct
  source 1..50: mol_type = other DNA
atcggtttttggtggaggcgccgggtataacgcccccgggtccaatgggt

SEQ ID NO: 30774 - DNA, 50 bp, synthetic construct
  source 1..50: mol_type = other DNA
ggattcatctcaatttcaacaccatttgtttgatcgattcccataaatat

SEQ ID NO: 30775 - DNA, 50 bp, synthetic construct
  source 1..50: mol_type = other DNA
tagagaaccttaatactattgtccatacgataaagcaccttgaccacatg

SEQ ID NO: 30776 - DNA, 50 bp, synthetic construct
  source 1..50: mol_type = other DNA
cttgaaaaatatcaaccatttattagaaaaaatggtagaatcagcacaag

SEQ ID NO: 30777 - DNA, 50 bp, synthetic construct
  source 1..50: mol_type = other DNA
atttttttctgagcattaattgatttttgatataatgtgtgtaaaaaaag

SEQ ID NO: 30778 - DNA, 50 bp, synthetic construct
  source 1..50: mol_type = other DNA
gcaccgtcactgcttcaacatgccactccacatggggagtttgagggaac

SEQ ID NO: 30779 - DNA, 50 bp, synthetic construct
  source 1..50: mol_type = other DNA
atcaggatagccttcggatttcccaagggctcgccaatggacacatgacc

SEQ ID NO: 30780 - DNA, 50 bp, synthetic construct
  source 1..50: mol_type = other DNA
cctcgctcggcggtttggctctgatattcacatggcgcctccgtgtgaat

SEQ ID NO: 30781 - DNA, 50 bp, synthetic construct
  source 1..50: mol_type = other DNA
ttgggttggtttaccctaaatgatttatctaaggacattaaaatcacctc

SEQ ID NO: 30782 - DNA, 50 bp, synthetic construct
  source 1..50: mol_type = other DNA
cgggaaatcacgatgtggcctgactccaggggttcgcgcagtacttccag

SEQ ID NO: 30783 - DNA, 50 bp, synthetic construct
  source 1..50: mol_type = other DNA
gcacttcttgatgttacgcaacaaaattgtggcaacacttcttgaatttc

SEQ ID NO: 30784 - DNA, 50 bp, synthetic construct
  source 1..50: mol_type = other DNA
aaataagtaacctaatttataacctagcgttattgagagagaatttattt

SEQ ID NO: 30785 - DNA, 50 bp, synthetic construct
  source 1..50: mol_type = other DNA
aatttgtttccaaatttacttagtaatggtagcaaaaaaggaactctatt

SEQ ID NO: 30786 - DNA, 50 bp, synthetic construct
  source 1..50: mol_type = other DNA
aaaggaccgaatatgggcaaaaacatcattccaaagataatcccgataac

SEQ ID NO: 30787 - DNA, 50 bp, synthetic construct
  source 1..50: mol_type = other DNA
gtagaaaatgcccatgaggcgattataaagacatcaaaggcattgaaaaa

SEQ ID NO: 30788 - DNA, 50 bp, synthetic construct
  source 1..50: mol_type = other DNA
aacacttaggctttcaatcattcaagttgattattgtaggcatctacgta

SEQ ID NO: 30789 - DNA, 50 bp, synthetic construct
  source 1..50: mol_type = other DNA
tctcaaatcctaatataactccttctaaaattttctattatcatttacaa

SEQ ID NO: 30790 - DNA, 50 bp, synthetic construct
  source 1..50: mol_type = other DNA
atctttaaatgataatcaattgcatgcctgggtgatactcattgcaggat

SEQ ID NO: 30791 - DNA, 50 bp, synthetic construct
  source 1..50: mol_type = other DNA
aataactgcggaaaatttgtttccaaggaagaaggttcgaaatggttatt

SEQ ID NO: 30792 - DNA, 50 bp, synthetic construct
  source 1..50: mol_type = other DNA
cgaggccgtagccgccatcgggctggtgcccgaaggccctcacggattcc

SEQ ID NO: 30793 - DNA, 50 bp, synthetic construct
  source 1..50: mol_type = other DNA
tctctgttttcagatgactcatatagatttgtattctttgaatgttgatc

SEQ ID NO: 30794 - DNA, 50 bp, synthetic construct
  source 1..50: mol_type = other DNA
attggtttgatcaaggccataaacacctttatcgggtacaataacacact

SEQ ID NO: 30795 - DNA, 50 bp, synthetic construct
  source 1..50: mol_type = other DNA
gatttcacatcatcaaggtattgtataaatcatcaaagttctgtacagaa

SEQ ID NO: 30796 - DNA, 50 bp, synthetic construct
  source 1..50: mol_type = other DNA
gctgccgcaggcgggcacaatctgctgatgatcggcccgccaggtgcggg

SEQ ID NO: 30797 - DNA, 50 bp, synthetic construct
  source 1..50: mol_type = other DNA
actacgcactcgacgtgtgttgtccactccacatgatgcgtttgcggaaa

SEQ ID NO: 30798 - DNA, 50 bp, synthetic construct
  source 1..50: mol_type = other DNA
tacttggggggaggcttcggtcacttctatgcttatgctcccgagaaata

SEQ ID NO: 30799 - DNA, 50 bp, synthetic construct
  source 1..50: mol_type = other DNA
gcgctaatgcgcgatatgttcaccaaggatgattttgcgcgcatgatgtc

SEQ ID NO: 30800 - DNA, 50 bp, synthetic construct
  source 1..50: mol_type = other DNA
aagaggtgttacaaatatctttaaatttccggctattcatacagcccaaa

SEQ ID NO: 30801 - DNA, 50 bp, synthetic construct
  source 1..50: mol_type = other DNA
gtagagcagcaaatgccactcgaagcatcgcggggcatttcctttcctag

SEQ ID NO: 30802 - DNA, 50 bp, synthetic construct
  source 1..50: mol_type = other DNA
cataatgaaaagaaaatcgtatttgaaatggatcattttctttcattaaa

SEQ ID NO: 30803 - DNA, 50 bp, synthetic construct
  source 1..50: mol_type = other DNA
gcgctatggacagggcggctgtcgaggatcacgcggttgacgttacgctc

SEQ ID NO: 30804 - DNA, 50 bp, synthetic construct
  source 1..50: mol_type = other DNA
tggcttgcatgcatatagttatactagcttgactttctacatgtacgcgt

SEQ ID NO: 30805 - DNA, 50 bp, synthetic construct
  source 1..50: mol_type = other DNA
tattcatggcatgccgtcctttcgtaacgtatgcgtcctttcgtttttta

SEQ ID NO: 30806 - DNA, 50 bp, synthetic construct
  source 1..50: mol_type = other DNA
gaacagggcggctgtctaaaatcatctaataaaaatcacccgattaacgc

SEQ ID NO: 30807 - DNA, 50 bp, synthetic construct
  source 1..50: mol_type = other DNA
tgtcgggaaggccgacgatggcaatattgcgaaggccggcaggcccgggg

SEQ ID NO: 30808 - DNA, 50 bp, synthetic construct
  source 1..50: mol_type = other DNA
gtgccctgtcacgttaaaaagaatatattccttttgtggtgacatgatat

SEQ ID NO: 30809 - DNA, 50 bp, synthetic construct
  source 1..50: mol_type = other DNA
taaaattaagtatttatgattacggatgtaatatgaagaggaaaaaagta

SEQ ID NO: 30810 - DNA, 50 bp, synthetic construct
  source 1..50: mol_type = other DNA
cctaaaacacaaaaatgccccacataagtggctgtgttttcagtatttta

SEQ ID NO: 30811 - DNA, 50 bp, synthetic construct
  source 1..50: mol_type = other DNA
agatctccattttattgttagttctagatttaacaattctatgaaattta

SEQ ID NO: 30812 - DNA, 50 bp, synthetic construct
  source 1..50: mol_type = other DNA
acaaacatattaaaaagctaacaatcctttcttccttactatatatcact

SEQ ID NO: 30813 - DNA, 50 bp, synthetic construct
  source 1..50: mol_type = other DNA
caactagaaaaatgcttgaatgagtgcctttctaacataccttctaggaa

SEQ ID NO: 30814 - DNA, 50 bp, synthetic construct
  source 1..50: mol_type = other DNA
atcataagcagcttgaaaaattccagtcaattttacatatataaattaat

SEQ ID NO: 30815 - DNA, 50 bp, synthetic construct
  source 1..50: mol_type = other DNA
ctggcaagttttaaaaaatgcaataagtatgcttttataaaccttagtgg

SEQ ID NO: 30816 - DNA, 50 bp, synthetic construct
  source 1..50: mol_type = other DNA
acctagcccctatcgttataatacacgctttataacgaagggaaagatcg

SEQ ID NO: 30817 - DNA, 50 bp, synthetic construct
  source 1..50: mol_type = other DNA
caagataatgtgaccttaattgtcttcacgaaggaggcaaccagccggat

SEQ ID NO: 30818 - DNA, 50 bp, synthetic construct
  source 1..50: mol_type = other DNA
tccatatcccccatatgatctgtatcggtatgagttatcactaaatcatc

SEQ ID NO: 30819 - DNA, 50 bp, synthetic construct
  source 1..50: mol_type = other DNA
tggcgcaatgccgataccgtggtaatgactgtggtcatcggccgcgcgca

SEQ ID NO: 30820 - DNA, 50 bp, synthetic construct
  source 1..50: mol_type = other DNA
aatcaagtaattttagttttgttttaactcacaaataaaaataatttata

SEQ ID NO: 30821 - DNA, 50 bp, synthetic construct
  source 1..50: mol_type = other DNA
acaagtaacctgaaaataactctttttaaaattatataactatttagcaa

SEQ ID NO: 30822 - DNA, 50 bp, synthetic construct
  source 1..50: mol_type = other DNA
cggcttcgtcagccttggctgccctagggtgcccgaaggcccttgtcgat

SEQ ID NO: 30823 - DNA, 50 bp, synthetic construct
  source 1..50: mol_type = other DNA
cgcgtttgaacacggaaaagctgtcgacagccgccccgtgcacagcgcaa

SEQ ID NO: 30824 - DNA, 50 bp, synthetic construct
  source 1..50: mol_type = other DNA
ggcgactaattccacgtgcattgactacacactcgatgtgatacgtttgt

SEQ ID NO: 30825 - DNA, 50 bp, synthetic construct
  source 1..50: mol_type = other DNA
atcactaataaaacgactagcatttcaaccaatgtaaagccttttttgac

SEQ ID NO: 30826 - DNA, 50 bp, synthetic construct
  source 1..50: mol_type = other DNA
cattttcaaagtcgtcgtttttccctgtccccactaccactcggccctac

SEQ ID NO: 30827 - DNA, 50 bp, synthetic construct
  source 1..50: mol_type = other DNA
agttttgacgggcaggcaaagtttataaacttggtccagccgcagttaag

SEQ ID NO: 30828 - DNA, 50 bp, synthetic construct
  source 1..50: mol_type = other DNA
ctcaactgcggctggaccaagtttataaactttgcctgcccgtcaaagct

SEQ ID NO: 30829 - DNA, 50 bp, synthetic construct
  source 1..50: mol_type = other DNA
gattgccagatggatgatatattttaacaaatactaaccagatggatgat

SEQ ID NO: 30830 - DNA, 50 bp, synthetic construct
  source 1..50: mol_type = other DNA
gtggataatttcccacaaacgacccacattgaatctgtcacgttattaat

SEQ ID NO: 30831 - DNA, 50 bp, synthetic construct
  source 1..50: mol_type = other DNA
cagcgaaacgtcaatcgcgttatcctcgatagccgcccggttcacagcgc

SEQ ID NO: 30832 - DNA, 50 bp, synthetic construct
  source 1..50: mol_type = other DNA
atctgcacaatggcatgggtatacatttgggtatatggctcggttcaggg

SEQ ID NO: 30833 - DNA, 50 bp, synthetic construct
  source 1..50: mol_type = other DNA
tcggcattgtagcattagccataacgtttttttgctttctggagttaaat

SEQ ID NO: 30834 - DNA, 50 bp, synthetic construct
  source 1..50: mol_type = other DNA
gattgccagatggatgatatgacttaacaaatattaaccagatggatgat

SEQ ID NO: 30835 - DNA, 50 bp, synthetic construct
  source 1..50: mol_type = other DNA
agcaattaactcttgataccgaggtgaatcaaatatttcttttaattttc

SEQ ID NO: 30836 - DNA, 50 bp, synthetic construct
  source 1..50: mol_type = other DNA
gaccaacatttcaatcaaggatactagtatccttcatttcaatcagtgta

SEQ ID NO: 30837 - DNA, 50 bp, synthetic construct
  source 1..50: mol_type = other DNA
ccaagcggttatgagaacgtcgctaatggtgaggtctggcggttatgagc

SEQ ID NO: 30838 - DNA, 50 bp, synthetic construct
  source 1..50: mol_type = other DNA
cgtccccctcctaaggttgtgctctaagccatactcctaaggggaaggcc

SEQ ID NO: 30839 - DNA, 50 bp, synthetic construct
  source 1..50: mol_type = other DNA
ttgcatggtgatattgttacttaatattgttagtacttagcacagagctc

SEQ ID NO: 30840 - DNA, 50 bp, synthetic construct
  source 1..50: mol_type = other DNA
ttattgtgcctttatggcattaaaatcaaaaattgtgacaccataaaaaa

SEQ ID NO: 30841 - DNA, 50 bp, synthetic construct
  source 1..50: mol_type = other DNA
ggttcgagccctgtagggcgtaccatggtttaatttggctcctgtagggc

SEQ ID NO: 30842 - DNA, 50 bp, synthetic construct
  source 1..50: mol_type = other DNA
tttagttttcccgcgaaacggatcaccgtcagtctggccccggcagactt

SEQ ID NO: 30843 - DNA, 50 bp, synthetic construct
  source 1..50: mol_type = other DNA
gagctctgtgctaagtactaacaatattaagtaacaatatcaccatgcaa

SEQ ID NO: 30844 - DNA, 50 bp, synthetic construct
  source 1..50: mol_type = other DNA
atggcatcaaaataccatgaacattaaagtatatggtatcaaaaactgtg

SEQ ID NO: 30845 - DNA, 50 bp, synthetic construct
  source 1..50: mol_type = other DNA
aataaaaaacacttgacatttcattgccttgatcgaaagttggaatccct

SEQ ID NO: 30846 - DNA, 50 bp, synthetic construct
  source 1..50: mol_type = other DNA
acacaaatgcctttgtatttcgacttatcgaacgagaacatctaaccacc

SEQ ID NO: 30847 - DNA, 50 bp, synthetic construct
  source 1..50: mol_type = other DNA
aaagtgggctttgtttcgctgggctgccccaaggccttgactgatagcga

SEQ ID NO: 30848 - DNA, 50 bp, synthetic construct
  source 1..50: mol_type = other DNA
ctgcgcgagccgctggagagcggatatcctttggaaagcggcgagatcgt

SEQ ID NO: 30849 - DNA, 50 bp, synthetic construct
  source 1..50: mol_type = other DNA
tataacatctgctctccttaccaaatttagtgataagagcatctgctcta

SEQ ID NO: 30850 - DNA, 50 bp, synthetic construct
  source 1..50: mol_type = other DNA
tttcatcatttcataaatcattagttgtgttggcaaatgaaaagacgtat

SEQ ID NO: 30851 - DNA, 50 bp, synthetic construct
  source 1..50: mol_type = other DNA
gcagattgcagcggcagtttcacatggatgaaccgaccgcaggacttgat

SEQ ID NO: 30852 - DNA, 50 bp, synthetic construct
  source 1..50: mol_type = other DNA
ctcgtcctggctcatcagctctttgcatatctttccctaatttttgataa

SEQ ID NO: 30853 - DNA, 50 bp, synthetic construct
  source 1..50: mol_type = other DNA
ggccgcctcaaagctgacgttagatatcttacctcaacaaaagtaatccc

SEQ ID NO: 30854 - DNA, 50 bp, synthetic construct
  source 1..50: mol_type = other DNA
gtatcggaatcgcactgtccaacagatgtggacttccaatcatcccgaca

SEQ ID NO: 30855 - DNA, 50 bp, synthetic construct
  source 1..50: mol_type = other DNA
cagagctttttcacaaagaacactcgattcgtcccttagagtactcgaag

SEQ ID NO: 30856 - DNA, 50 bp, synthetic construct
  source 1..50: mol_type = other DNA
tacgctatatgctgcttggaaatcggaaaatgaatgccggacatatttta

SEQ ID NO: 30857 - DNA, 50 bp, synthetic construct
  source 1..50: mol_type = other DNA
gctctgctgtatgcataggtgcgatttcgactgtatgcataggaggatac

SEQ ID NO: 30858 - DNA, 50 bp, synthetic construct
  source 1..50: mol_type = other DNA
tgctcgcaggtgtgcataggtgcgatttcgactatatgcataggcgggta

SEQ ID NO: 30859 - DNA, 50 bp, synthetic construct
  source 1..50: mol_type = other DNA
attagtggcctaaaaacttgataaatttcatctattttctctccgttagt

SEQ ID NO: 30860 - DNA, 50 bp, synthetic construct
  source 1..50: mol_type = other DNA
accatatttcttttaatagcgtgaccaaagtcaattcaagtaaaagaaag

SEQ ID NO: 30861 - DNA, 50 bp, synthetic construct
  source 1..50: mol_type = other DNA
cttcccgagttcgctggttatactattgtaccttccgttttcgctgataa

SEQ ID NO: 30862 - DNA, 50 bp, synthetic construct
  source 1..50: mol_type = other DNA
aaggcagtcagcagatgggaaagaggacttggttttccagacattaatac

SEQ ID NO: 30863 - DNA, 50 bp, synthetic construct
  source 1..50: mol_type = other DNA
gatttatttccaatgacacatcatgtgcgtagtgtcgctacaacgaagca

SEQ ID NO: 30864 - DNA, 50 bp, synthetic construct
  source 1..50: mol_type = other DNA
gtggccgccgccggcgggcatcacctgcttggcacgccgggctgcggcaa

SEQ ID NO: 30865 - DNA, 50 bp, synthetic construct
  source 1..50: mol_type = other DNA
caaaaaaactcccaccgatatttattgttaaatttttgccgccatccaag

SEQ ID NO: 30866 - DNA, 50 bp, synthetic construct
  source 1..50: mol_type = other DNA
gaccggggagaccaggtgtttcaccggtgatctccctggccaccgcgctg

SEQ ID NO: 30867 - DNA, 50 bp, synthetic construct
  source 1..50: mol_type = other DNA
cagcgggcgggagagcaccacgatcaatcacagtgatatcgcgcgccccc

SEQ ID NO: 30868 - DNA, 50 bp, synthetic construct
  source 1..50: mol_type = other DNA
ttcaagcggcacaatatttgtcataactgaccgacattgtgccgctttgc

SEQ ID NO: 30869 - DNA, 50 bp, synthetic construct
  source 1..50: mol_type = other DNA
gtgtttgcaataggagcaccaggagttccaggtggaacagttatggcatc

SEQ ID NO: 30870 - DNA, 50 bp, synthetic construct
  source 1..50: mol_type = other DNA
agatagaaaaccgcgatcttcggattgccgagcgtgacggccatgcccgc

SEQ ID NO: 30871 - DNA, 50 bp, synthetic construct
  source 1..50: mol_type = other DNA
cggcgttcgaggaccgctacggtttcggtgtggtcggtgtgagggaacat

SEQ ID NO: 30872 - DNA, 50 bp, synthetic construct
  source 1..50: mol_type = other DNA
aaacaagattgaacatgttgaatttaaattcactatacacaaaaatggca

SEQ ID NO: 30873 - DNA, 50 bp, synthetic construct
  source 1..50: mol_type = other DNA
gagaggtgagcaatgcgtaaaatcattcatgtggatatggactgcttttt

SEQ ID NO: 30874 - DNA, 50 bp, synthetic construct
  source 1..50: mol_type = other DNA
ttttcacggtcattgtattgtagctagacttcattcaagggtcgttgatt

SEQ ID NO: 30875 - DNA, 50 bp, synthetic construct
  source 1..50: mol_type = other DNA
cttagctccaccattaggactacctttggagtgcaaacaacagatagggt

SEQ ID NO: 30876 - DNA, 50 bp, synthetic construct
  source 1..50: mol_type = other DNA
gatggtgtcgcagtttttgggagaaatgtctcgcagtttttgatgccata

SEQ ID NO: 30877 - DNA, 50 bp, synthetic construct
  source 1..50: mol_type = other DNA
gtggcaggattgactcagccccacttgtcggggtggcaggattcgaacct

SEQ ID NO: 30878 - DNA, 50 bp, synthetic construct
  source 1..50: mol_type = other DNA
gccgtatttatcgcaacattattattgactggaattggtaaaaggcatat

SEQ ID NO: 30879 - DNA, 50 bp, synthetic construct
  source 1..50: mol_type = other DNA
caattttgcatattgtcttttaaatttttaagagaatgtatgttcttttt

SEQ ID NO: 30880 - DNA, 50 bp, synthetic construct
  source 1..50: mol_type = other DNA
gtttgaggctctggatgtagtcctttacgacttcatccaggtactcgggc

SEQ ID NO: 30881 - DNA, 50 bp, synthetic construct
  source 1..50: mol_type = other DNA
gcgtaaatatgttatcgggagagtgaaacatcccggtagcacaactcaca

SEQ ID NO: 30882 - DNA, 50 bp, synthetic construct
  source 1..50: mol_type = other DNA
agcgtcatactgcgccaatatggaggaaaatgttggcgcccagaatcgcc

SEQ ID NO: 30883 - DNA, 50 bp, synthetic construct
  source 1..50: mol_type = other DNA
gcaggtttgcctaacatacaattatttaattcaaaacaaagcaaaaaagc

SEQ ID NO: 30884 - DNA, 50 bp, synthetic construct
  source 1..50: mol_type = other DNA
tactttgacaattgtttgttgcaaattaagcttgtttaattgtaaaaata

SEQ ID NO: 30885 - DNA, 50 bp, synthetic construct
  source 1..50: mol_type = other DNA
ttacttccgacaactgacacaaaataatgggttactcagtaaacattgaa

SEQ ID NO: 30886 - DNA, 50 bp, synthetic construct
  source 1..50: mol_type = other DNA
tgtgaaagaatggtatttagttcattcataaagaataccattctctacca

SEQ ID NO: 30887 - DNA, 50 bp, synthetic construct
  source 1..50: mol_type = other DNA
ttacttccgacaactgacacaaaatactggaataaccttgttttctataa

SEQ ID NO: 30888 - DNA, 50 bp, synthetic construct
  source 1..50: mol_type = other DNA
ccttcgttagaatgcgatttaggcgcccctaccgcgtattataacgatag

SEQ ID NO: 30889 - DNA, 50 bp, synthetic construct
  source 1..50: mol_type = other DNA
aaagccgaatgcgcatccgatgatgctactacggtcccggctacggctac

SEQ ID NO: 30890 - DNA, 50 bp, synthetic construct
  source 1..50: mol_type = other DNA
agcttcaagggttcttaagtcgggtacgcacagaatgaacgctaaacccg

SEQ ID NO: 30891 - DNA, 50 bp, synthetic construct
  source 1..50: mol_type = other DNA
cgatactttactgctgccgatcgacgtttattatggcctgtaaagtaaaa

SEQ ID NO: 30892 - DNA, 50 bp, synthetic construct
  source 1..50: mol_type = other DNA
gtgcatattattagccaccccggcaacccgaagtacccgattgatattca

SEQ ID NO: 30893 - DNA, 50 bp, synthetic construct
  source 1..50: mol_type = other DNA
gttctatttttttttagaacctattaaaaggtaaatatgcaaaataaggt

SEQ ID NO: 30894 - DNA, 50 bp, synthetic construct
  source 1..50: mol_type = other DNA
attaataaaagatactaatatagataaataaattagtatcttcaagaaat

SEQ ID NO: 30895 - DNA, 50 bp, synthetic construct
  source 1..50: mol_type = other DNA
ctacactatataaaaatatcgttgctcaactacattgttaagctgtttat

SEQ ID NO: 30896 - DNA, 50 bp, synthetic construct
  source 1..50: mol_type = other DNA
tctatccatttttgtgctttatatatcaataaagaagaaagagggaatat

SEQ ID NO: 30897 - DNA, 50 bp, synthetic construct
  source 1..50: mol_type = other DNA
tttgcatatttaccttttaagttaatctggttaaaagtataaaatacatt

SEQ ID NO: 30898 - DNA, 50 bp, synthetic construct
  source 1..50: mol_type = other DNA
attaatttccttgttaatgttagttaacttaaaaggtaaatatgcaaaat

SEQ ID NO: 30899 - DNA, 50 bp, synthetic construct
  source 1..50: mol_type = other DNA
tttgaccgaaattgaacagtttgcaagcctccttttgtgattcgctgaaa

SEQ ID NO: 30900 - DNA, 50 bp, synthetic construct
  source 1..50: mol_type = other DNA
gaattttcggttaagtcatctaattttatatttttgtgtacagaaaaatt

SEQ ID NO: 30901 - DNA, 50 bp, synthetic construct
  source 1..50: mol_type = other DNA
aaccatttggtttataatcacaagattttttctttggaaacaatggagtt

SEQ ID NO: 30902 - DNA, 50 bp, synthetic construct
  source 1..50: mol_type = other DNA
aaatatattctttataaaaatttcttgtactaatgaagaagataaccttt

SEQ ID NO: 30903 - DNA, 50 bp, synthetic construct
  source 1..50: mol_type = other DNA
tgattattatattaattttatgtcaaccctttaaactagaatattaattt

SEQ ID NO: 30904 - DNA, 50 bp, synthetic construct
  source 1..50: mol_type = other DNA
tttatattttgtgattctaaatacttatatttattaacttaaaaggtaaa

SEQ ID NO: 30905 - DNA, 50 bp, synthetic construct
  source 1..50: mol_type = other DNA
gctcatcaactgctggcaaggaacactccggctgcctcagccttctgagc

SEQ ID NO: 30906 - DNA, 50 bp, synthetic construct
  source 1..50: mol_type = other DNA
gccgtggcgcagaaacccgagattctaaacccgggttttatccagtcgaa

SEQ ID NO: 30907 - DNA, 50 bp, synthetic construct
  source 1..50: mol_type = other DNA
atataataaattcttactatacgaataccataaaatgcaagttatcacta

SEQ ID NO: 30908 - DNA, 50 bp, synthetic construct
  source 1..50: mol_type = other DNA
aggtgcaatgtacgcggctcagttcactaggagccatgtacgcggcacaa

SEQ ID NO: 30909 - DNA, 50 bp, synthetic construct
  source 1..50: mol_type = other DNA
aaggcatgattaatttcggatcaatattttttagagtttcatatattaaa

SEQ ID NO: 30910 - DNA, 50 bp, synthetic construct
  source 1..50: mol_type = other DNA
gctactaatccaaacaattgttaataagacccaatatttagaatagttgt

SEQ ID NO: 30911 - DNA, 50 bp, synthetic construct
  source 1..50: mol_type = other DNA
aattcttttatattttcattcaaagttttgaataaaaatgtaaaataaat

SEQ ID NO: 30912 - DNA, 50 bp, synthetic construct
  source 1..50: mol_type = other DNA
gcacacgcatctggctactcggctgcagctcggaagccccctccgatggc

SEQ ID NO: 30913 - DNA, 50 bp, synthetic construct
  source 1..50: mol_type = other DNA
gaatcacattagtaatgaaatgcgtacgcataaggaatgncggtcgattt

SEQ ID NO: 30914 - DNA, 50 bp, synthetic construct
  source 1..50: mol_type = other DNA
cagctcccggccacggcgaagcgctcctcccccgcccaggagaggaccac

SEQ ID NO: 30915 - DNA, 50 bp, synthetic construct
  source 1..50: mol_type = other DNA
aaaattgcaattgcgccttctgctttcgattgaggcggttgtgcagatga

SEQ ID NO: 30916 - DNA, 50 bp, synthetic construct
  source 1..50: mol_type = other DNA
ttcacgcgcgcaaattgtgcgcgccattatgcgcaatctgcatggctgcg

SEQ ID NO: 30917 - DNA, 50 bp, synthetic construct
  source 1..50: mol_type = other DNA
atgcgagtgcgcaaacctgcctacgaatgatatcgttagggtgcccgaag

SEQ ID NO: 30918 - DNA, 50 bp, synthetic construct
  source 1..50: mol_type = other DNA
ctcgcagccaaataccgcaggcgcagtcgcctgccgggtttgttgccgcc

SEQ ID NO: 30919 - DNA, 50 bp, synthetic construct
  source 1..50: mol_type = other DNA
gcatttcataactccagtatttctaaattattactggacttgctgaaata

SEQ ID NO: 30920 - DNA, 50 bp, synthetic construct
  source 1..50: mol_type = other DNA
aataaacacatcaggagctttaattaaggagaacttctgcagtacttgca

SEQ ID NO: 30921 - DNA, 50 bp, synthetic construct
  source 1..50: mol_type = other DNA
caccttcacagcctcagctaatgagctgattaccgaagatggtgaagcga

SEQ ID NO: 30922 - DNA, 50 bp, synthetic construct
  source 1..50: mol_type = other DNA
gaagctttatgtgagccctgaaggagccctgaaggattcgaaccttcgac

SEQ ID NO: 30923 - DNA, 50 bp, synthetic construct
  source 1..50: mol_type = other DNA
ttcgtaagtctcatatgcaccatatctctcctacccgctgtatctaccaa

SEQ ID NO: 30924 - DNA, 50 bp, synthetic construct
  source 1..50: mol_type = other DNA
aatatattcatggcatgccgtcctgtatgcgtcctttcgttttttagcac

SEQ ID NO: 30925 - DNA, 50 bp, synthetic construct
  source 1..50: mol_type = other DNA
gcgttaatcgggtgatttttattagatgattttagacagccaccctgttc

SEQ ID NO: 30926 - DNA, 50 bp, synthetic construct
  source 1..50: mol_type = other DNA
ttcaatgacccttgaatagagtctatagctacaatacaatgacccttgat

SEQ ID NO: 30927 - DNA, 50 bp, synthetic construct
  source 1..50: mol_type = other DNA
cgggtgatttttattagacacgtttagaacttgatgattttagacagccg

SEQ ID NO: 30928 - DNA, 50 bp, synthetic construct
  source 1..50: mol_type = other DNA
ttttgcgtgaaaggtgatctcttgaatttgccgtcatagacgaccacacc

SEQ ID NO: 30929 - DNA, 50 bp, synthetic construct
  source 1..50: mol_type = other DNA
ttcttcatggtcggtcgaaactctggcgagaagataccggccattgcgtc

SEQ ID NO: 30930 - DNA, 50 bp, synthetic construct
  source 1..50: mol_type = other DNA
taattaactccataaaaaaacacccaagtaggtttttagaatatatatca

SEQ ID NO: 30931 - DNA, 50 bp, synthetic construct
  source 1..50: mol_type = other DNA
ttttcacttaaaatcctctcaatttccattagcattctatcaattttatt

SEQ ID NO: 30932 - DNA, 50 bp, synthetic construct
  source 1..50: mol_type = other DNA
gcatactgaagatatgataatgaatatttaatgtagtatgggcactattt

SEQ ID NO: 30933 - DNA, 50 bp, synthetic construct
  source 1..50: mol_type = other DNA
tattcgcaaaaactatgcacgcaaccagtcgatgggcgtgttcgctaccc

SEQ ID NO: 30934 - DNA, 50 bp, synthetic construct
  source 1..50: mol_type = other DNA
tcgcgttgaagattcctacaagaagcgtcgcagagtagtaatctataccc

SEQ ID NO: 30935 - DNA, 50 bp, synthetic construct
  source 1..50: mol_type = other DNA
ttcagttatatatatgccttatagaaatttaattataatatataataaaa

SEQ ID NO: 30936 - DNA, 50 bp, synthetic construct
  source 1..50: mol_type = other DNA
ccaccacgcaaatctgtggagaagatcaggaccacctgccccgacgcgag

SEQ ID NO: 30937 - DNA, 50 bp, synthetic construct
  source 1..50: mol_type = other DNA
tcaaaccaaaatcatactcaatatttataaaataaatgattttaaattgt

SEQ ID NO: 30938 - DNA, 50 bp, synthetic construct
  source 1..50: mol_type = other DNA
ataaacggacatgatgaaatgtaaaaatttgtttcatttactatatttta

SEQ ID NO: 30939 - DNA, 50 bp, synthetic construct
  source 1..50: mol_type = other DNA
ttttaattttagtgataattttaattttaagtaaaggcataaaactaaag

SEQ ID NO: 30940 - DNA, 50 bp, synthetic construct
  source 1..50: mol_type = other DNA
acggaatatatccaggcaaaaggagatccaattgcagatttatatgaaga

SEQ ID NO: 30941 - DNA, 50 bp, synthetic construct
  source 1..50: mol_type = other DNA
cgtcgtgtacctgccgcgggtcaccggtgccgctgagccggtccccgatg

SEQ ID NO: 30942 - DNA, 50 bp, synthetic construct
  source 1..50: mol_type = other DNA
actaaggtatgcaccaaatacttgtacaagaattaggtgcagacgagcga

SEQ ID NO: 30943 - DNA, 50 bp, synthetic construct
  source 1..50: mol_type = other DNA
tttgcaacataaatgctccttgccatttattttcgcaaggtaattgcatc

SEQ ID NO: 30944 - DNA, 50 bp, synthetic construct
  source 1..50: mol_type = other DNA
agaacacaaccaaaagcgccattattttctggcttcctgtcgcttcttct

SEQ ID NO: 30945 - DNA, 50 bp, synthetic construct
  source 1..50: mol_type = other DNA
catcgaaaagcagcgcaaaaagcgcactcctttctacctgtgatgttagc

SEQ ID NO: 30946 - DNA, 50 bp, synthetic construct
  source 1..50: mol_type = other DNA
ttcttattgtacactatttttagtatcttttatcttgtgacaacaaaaat

SEQ ID NO: 30947 - DNA, 50 bp, synthetic construct
  source 1..50: mol_type = other DNA
aggagggcttaatctaatttacagtaatgtaaattctttttccacaagtt

SEQ ID NO: 30948 - DNA, 50 bp, synthetic construct
  source 1..50: mol_type = other DNA
cggcatcctcaccccacgcgaagccacgagactgaaccttgctgacgccc

SEQ ID NO: 30949 - DNA, 50 bp, synthetic construct
  source 1..50: mol_type = other DNA
cgaagtaccgggccgtggccaaggcatctcgatgttcgacgggcccttct

SEQ ID NO: 30950 - DNA, 50 bp, synthetic construct
  source 1..50: mol_type = other DNA
tgaggatgcgctcggagtcgaccagctgttctacggcgacagcatgatca

SEQ ID NO: 30951 - DNA, 50 bp, synthetic construct
  source 1..50: mol_type = other DNA
tcggagctaaaatttttcgaagctttgtgcgacccagcctgcggatcggg

SEQ ID NO: 30952 - DNA, 50 bp, synthetic construct
  source 1..50: mol_type = other DNA
aagatctcagagctaaaatttttcgaccctgcctgcggttcgggaaactt

SEQ ID NO: 30953 - DNA, 50 bp, synthetic construct
  source 1..50: mol_type = other DNA
tgaaaatgcagatagcatgtcagagccctgaggcgctcgtggaattgcgt

SEQ ID NO: 30954 - DNA, 50 bp, synthetic construct
  source 1..50: mol_type = other DNA
cgacatgcaggcccgagatcgcaatattgcgaccagatggctcgtgcccg

SEQ ID NO: 30955 - DNA, 50 bp, synthetic construct
  source 1..50: mol_type = other DNA
gcaccagccacctggtggcaatgttgaaatggcgatctcgggcatgcata

SEQ ID NO: 30956 - DNA, 50 bp, synthetic construct
  source 1..50: mol_type = other DNA
ccggcgccgggcggaccgatcatcagcatgtggtggccgcccgcggcggc

SEQ ID NO: 30957 - DNA, 50 bp, synthetic construct
  source 1..50: mol_type = other DNA
cggctgcccgagagtcatccaaaataggtatggtatccctcgggtgcccg

SEQ ID NO: 30958 - DNA, 50 bp, synthetic construct
  source 1..50: mol_type = other DNA
gctcgaagtggccgccgcgggcgggccgcccggcgccggcaagtcgatgc

SEQ ID NO: 30959 - DNA, 50 bp, synthetic construct
  source 1..50: mol_type = other DNA
agcccgacatgcaggcccgagatcgcgaccagatggctcgtgcccgtact

SEQ ID NO: 30960 - DNA, 50 bp, synthetic construct
  source 1..50: mol_type = other DNA
gatcttcgggttgccgaacgttatgccttacgttcgggttgccgagcgtg

SEQ ID NO: 30961 - DNA, 50 bp, synthetic construct
  source 1..50: mol_type = other DNA
ccgtgaccttcacgcctccggcggttgtcttgcgagcatgtaggtcacgg

SEQ ID NO: 30962 - DNA, 50 bp, synthetic construct
  source 1..50: mol_type = other DNA
ccggcgccgggcgggccgatcatcagcaggtgatggccgcccgccgcggc

SEQ ID NO: 30963 - DNA, 50 bp, synthetic construct
  source 1..50: mol_type = other DNA
cgttgcaggatgatgttgctcggcacttcgaagaccacatagccgagaaa

SEQ ID NO: 30964 - DNA, 50 bp, synthetic construct
  source 1..50: mol_type = other DNA
cggcttgccgtcgttctcattcgttgactatctccatcgtcggcctgccc

SEQ ID NO: 30965 - DNA, 50 bp, synthetic construct
  source 1..50: mol_type = other DNA
gggggataaaattaacaatctattatcagaagttcttcccctactcccac

SEQ ID NO: 30966 - DNA, 50 bp, synthetic construct
  source 1..50: mol_type = other DNA
acgccgatgccggacccggctcccgcggcggcatgatcacggcgcgccgc

SEQ ID NO: 30967 - DNA, 50 bp, synthetic construct
  source 1..50: mol_type = other DNA
gtgattcccgttcgtatagggccgcccggcttgttgctgaaccgaatctc

SEQ ID NO: 30968 - DNA, 50 bp, synthetic construct
  source 1..50: mol_type = other DNA
cttgccgatagggatgatgatccgggacgactccgaggtgtattggcgcg

SEQ ID NO: 30969 - DNA, 50 bp, synthetic construct
  source 1..50: mol_type = other DNA
ggccttggtcgctttcgtcaaagcgcgcggtggcgggcgtgaccaattcg

SEQ ID NO: 30970 - DNA, 50 bp, synthetic construct
  source 1..50: mol_type = other DNA
tcgatatcgccatgctgcaatttcacgcccgaacagcttcgcgagcgatt

SEQ ID NO: 30971 - DNA, 50 bp, synthetic construct
  source 1..50: mol_type = other DNA
tgcccgcctcgttccgggtcgtgcgcgatgaacccgtgccgctgcggcca

SEQ ID NO: 30972 - DNA, 50 bp, synthetic construct
  source 1..50: mol_type = other DNA
cttcgttccctggacgttatctcaagaacgctcgcgtccaccgccggcac

SEQ ID NO: 30973 - DNA, 50 bp, synthetic construct
  source 1..50: mol_type = other DNA
tgaatccgctcttgacttggcgggccccgagcacgctgaccacgttcagt

SEQ ID NO: 30974 - DNA, 50 bp, synthetic construct
  source 1..50: mol_type = other DNA
tctagagggtgtatagtgcccctacttgggggcctcaagggcgctataga

SEQ ID NO: 30975 - DNA, 50 bp, synthetic construct
  source 1..50: mol_type = other DNA
cgacgaggagccagctcggcgaatgcatgcgcaccgtgccgccctcgccg

SEQ ID NO: 30976 - DNA, 50 bp, synthetic construct
  source 1..50: mol_type = other DNA
tgagttttctcggcatgtattagaggacgactacgccagagggaatgaac

SEQ ID NO: 30977 - DNA, 50 bp, synthetic construct
  source 1..50: mol_type = other DNA
aacaagaatctccatctgagccttatagatttggttttcagattacaatt

SEQ ID NO: 30978 - DNA, 50 bp, synthetic construct
  source 1..50: mol_type = other DNA
ccacgttatcggtaaatgataccgcacggtatcgtttacgaattcctcat

SEQ ID NO: 30979 - DNA, 50 bp, synthetic construct
  source 1..50: mol_type = other DNA
ccgtgcgaggaccaccaacccaactccggcagcatcgcgtccacgaacgg

SEQ ID NO: 30980 - DNA, 50 bp, synthetic construct
  source 1..50: mol_type = other DNA
tgatgcgaattcgcaaccaagcggatccatagcgttgaggatagacttca

SEQ ID NO: 30981 - DNA, 50 bp, synthetic construct
  source 1..50: mol_type = other DNA
acgtgcccggcctccaggggctgccggctcacgctcgacgccgatcacat

SEQ ID NO: 30982 - DNA, 50 bp, synthetic construct
  source 1..50: mol_type = other DNA
acaaaaaagccgcctgtttagcaggcgagctgaaagctcgctttttctga

SEQ ID NO: 30983 - DNA, 50 bp, synthetic construct
  source 1..50: mol_type = other DNA
agagaaataataaaagcttttaccattcctggctcttttatatcatctct

SEQ ID NO: 30984 - DNA, 50 bp, synthetic construct
  source 1..50: mol_type = other DNA
tctgcttcctttggttctataactgcatatctctttgcagctctagcatc

SEQ ID NO: 30985 - DNA, 50 bp, synthetic construct
  source 1..50: mol_type = other DNA
gtcaaattgttgattttaatatctttcaaggtaaacatgccgagactgac

SEQ ID NO: 30986 - DNA, 50 bp, synthetic construct
  source 1..50: mol_type = other DNA
ttcgttacgtggggaaactgaagtcgagttttgattccggtgtggacaaa

SEQ ID NO: 30987 - DNA, 50 bp, synthetic construct
  source 1..50: mol_type = other DNA
cacgagcactacgacgccgtactcaccgccaccgccctccactggctgca

SEQ ID NO: 30988 - DNA, 50 bp, synthetic construct
  source 1..50: mol_type = other DNA
cgacaacgagctcggagaggttgcgcggacgtgcttccgtgccgccgttg

SEQ ID NO: 30989 - DNA, 50 bp, synthetic construct
  source 1..50: mol_type = other DNA
ataccaaataccacactgaaatccatggaaatccattaccatcagcaaat

SEQ ID NO: 30990 - DNA, 50 bp, synthetic construct
  source 1..50: mol_type = other DNA
tacgcctctgcgtctcggttagtgatcatttatgataagcttctcctcgc

SEQ ID NO: 30991 - DNA, 50 bp, synthetic construct
  source 1..50: mol_type = other DNA
ttgagtagccctattaaaactaaaaatttagaagcaatctggctcaacag

SEQ ID NO: 30992 - DNA, 50 bp, synthetic construct
  source 1..50: mol_type = other DNA
ttttacttatgatacgcctcagcgtatgcttctccacgcataatcttaaa

SEQ ID NO: 30993 - DNA, 50 bp, synthetic construct
  source 1..50: mol_type = other DNA
cccggcgttcccgccccggcgccagctggaaacgttcgggaaaacccggc

SEQ ID NO: 30994 - DNA, 50 bp, synthetic construct
  source 1..50: mol_type = other DNA
tgatacgcctctgcttatcagttaatttatgatatgcttctccacgcata

SEQ ID NO: 30995 - DNA, 50 bp, synthetic construct
  source 1..50: mol_type = other DNA
tggagatgatgcacagccatacaaattttgatgatcttgcatcgcagttt

SEQ ID NO: 30996 - DNA, 50 bp, synthetic construct
  source 1..50: mol_type = other DNA
tgtgaagaagctgcatttctacacgtgtgccgaaagggtccgtctacaca

SEQ ID NO: 30997 - DNA, 50 bp, synthetic construct
  source 1..50: mol_type = other DNA
cagattcaatgtgcttggagttgcatactaccgtctcaacgtgggtcgtt

SEQ ID NO: 30998 - DNA, 50 bp, synthetic construct
  source 1..50: mol_type = other DNA
tgatagagtctgtaaaggtacttgactatgcttatctaagtggttcattg

SEQ ID NO: 30999 - DNA, 50 bp, synthetic construct
  source 1..50: mol_type = other DNA
atactattttttcaaatgaaaaagttattaattatacgaaaagtaggtat

SEQ ID NO: 31000 - DNA, 50 bp, synthetic construct
  source 1..50: mol_type = other DNA
ccggccatgctctgcacatcccgggcccgccctgtgcgggctttattcaa

SEQ ID NO: 31001 - DNA, 50 bp, synthetic construct
  source 1..50: mol_type = other DNA
gtttttgagtatgctgatagtggtatacgtaaatcagcccaagcaaacac

SEQ ID NO: 31002 - DNA, 50 bp, synthetic construct
  source 1..50: mol_type = other DNA
ccttataagccgctcatcccacgagctcggattcagggcggctgatgcgg

SEQ ID NO: 31003 - DNA, 50 bp, synthetic construct
  source 1..50: mol_type = other DNA
tatttcatttcaatataaaaacatccttgtcataattcctaaatgaaacg

SEQ ID NO: 31004 - DNA, 50 bp, synthetic construct
  source 1..50: mol_type = other DNA
cttgatgttcattatatcaatagctactaatgctgttaatgtggccacat

SEQ ID NO: 31005 - DNA, 50 bp, synthetic construct
  source 1..50: mol_type = other DNA
ttgtattgtagctattcggcattgtagcattttcaaagactaatgtcaag

SEQ ID NO: 31006 - DNA, 50 bp, synthetic construct
  source 1..50: mol_type = other DNA
ttcattttccgaggatcttagtatgagtacgaagaacaaccagaagaaga

SEQ ID NO: 31007 - DNA, 50 bp, synthetic construct
  source 1..50: mol_type = other DNA
tcatggtattctccttctgatagataagtggtttgatagttacaccatgt

SEQ ID NO: 31008 - DNA, 50 bp, synthetic construct
  source 1..50: mol_type = other DNA
gcagcgacgcgccgtgcaatgcgtgcacggcttgcgcgcttggtcgtgtg

SEQ ID NO: 31009 - DNA, 50 bp, synthetic construct
  source 1..50: mol_type = other DNA
cgccgcgcggtgggcggctgagcatgatctcgcacggccacggcggcacg

SEQ ID NO: 31010 - DNA, 50 bp, synthetic construct
  source 1..50: mol_type = other DNA
ggatgcggcaggacgcgttgcgcggccgcgctgcccgacggcgcgcaagt

SEQ ID NO: 31011 - DNA, 50 bp, synthetic construct
  source 1..50: mol_type = other DNA
ccgactacgacgagtggctgcacacgtgtgggcgcccgtcgggcagtcgt

SEQ ID NO: 31012 - DNA, 50 bp, synthetic construct
  source 1..50: mol_type = other DNA
gtggcgtgatgtccggaattgccactcgtcgattccgaacagatcatcac

SEQ ID NO: 31013 - DNA, 50 bp, synthetic construct
  source 1..50: mol_type = other DNA
ttcgaatcctgccgccggagcagagttccgccaagcgagcagaaacgaaa

SEQ ID NO: 31014 - DNA, 50 bp, synthetic construct
  source 1..50: mol_type = other DNA
gtgatggcggtgctgggcgtcaccatggtagtcccttggtaagacctcac

SEQ ID NO: 31015 - DNA, 50 bp, synthetic construct
  source 1..50: mol_type = other DNA
ctacgccatgtggtggatcaaggcctaccgggctgctccaccccgcgtta

SEQ ID NO: 31016 - DNA, 50 bp, synthetic construct
  source 1..50: mol_type = other DNA
cccgcgtgcacgacgtcaccctccaccggtggtgaataggtgcacaacgt

SEQ ID NO: 31017 - DNA, 50 bp, synthetic construct
  source 1..50: mol_type = other DNA
agcgtcgcatcggtgaccaacacgccagtgcgggtcacggatgcaactgg

SEQ ID NO: 31018 - DNA, 50 bp, synthetic construct
  source 1..50: mol_type = other DNA
gcccaatggagatggttgatctatttcgagattgcggttctgaattggaa

SEQ ID NO: 31019 - DNA, 50 bp, synthetic construct
  source 1..50: mol_type = other DNA
aggggtcgtcagttcaatcctgactcgtcatccttcggaagtcgaccaat

SEQ ID NO: 31020 - DNA, 50 bp, synthetic construct
  source 1..50: mol_type = other DNA
cgtgcgtggagcgggtaagataatcgagtacctgaccgagtccgatgcac

SEQ ID NO: 31021 - DNA, 50 bp, synthetic construct
  source 1..50: mol_type = other DNA
aatgatccacgctcaacagacgaatattcgtgggttgtatgacgggaagg

SEQ ID NO: 31022 - DNA, 50 bp, synthetic construct
  source 1..50: mol_type = other DNA
ctctgaacgttgccctgcgccaggaacagggcgcaggtcaacgtgaatcg

SEQ ID NO: 31023 - DNA, 50 bp, synthetic construct
  source 1..50: mol_type = other DNA
ggccgagttcgcggacgtggtcgaccctcaccgtgtccagcttctcggcc

SEQ ID NO: 31024 - DNA, 50 bp, synthetic construct
  source 1..50: mol_type = other DNA
ggtgtttattaatgtttcctttgtcaagaatggcttcatttgtttcaagt

SEQ ID NO: 31025 - DNA, 50 bp, synthetic construct
  source 1..50: mol_type = other DNA
tgaaatccttgagataaaaagtaaaagctgttgtggatgaaaagacttct

SEQ ID NO: 31026 - DNA, 50 bp, synthetic construct
  source 1..50: mol_type = other DNA
caaaatggggtacttgtaacattgatgtttttatatggaggtacattatg

SEQ ID NO: 31027 - DNA, 50 bp, synthetic construct
  source 1..50: mol_type = other DNA
acatggatgatccagccccagtagtacaccgctttgcggctacgacgaaa

SEQ ID NO: 31028 - DNA, 50 bp, synthetic construct
  source 1..50: mol_type = other DNA
aatccagtttctttattacaaattgaatgtttgaataaagaaaaactttg

SEQ ID NO: 31029 - DNA, 50 bp, synthetic construct
  source 1..50: mol_type = other DNA
gtaaaactgcttaaaatgcaggatttatcttgcacttgcttttgtttgaa

SEQ ID NO: 31030 - DNA, 50 bp, synthetic construct
  source 1..50: mol_type = other DNA
cgcacccataaataggcgtcaaaggtctttgacatatatgacattcggct

SEQ ID NO: 31031 - DNA, 50 bp, synthetic construct
  source 1..50: mol_type = other DNA
gtcaaaatgaagtgttaaaaggaattttcctccttcctcttaatttctta

SEQ ID NO: 31032 - DNA, 50 bp, synthetic construct
  source 1..50: mol_type = other DNA
acttaacagaagctgaaaaaaccaaccagctttagcagcctctttcttgg

SEQ ID NO: 31033 - DNA, 50 bp, synthetic construct
  source 1..50: mol_type = other DNA
taataggttcctaaacacatcattttgcagagtttgaacttaatcgcatc

SEQ ID NO: 31034 - DNA, 50 bp, synthetic construct
  source 1..50: mol_type = other DNA
taatgtgaattaaatttagcattttgttttggcaaatggaatacaccttg

SEQ ID NO: 31035 - DNA, 50 bp, synthetic construct
  source 1..50: mol_type = other DNA
gttccaaaagttacagaataatattaataatctcctcttccttttcccaa

SEQ ID NO: 31036 - DNA, 50 bp, synthetic construct
  source 1..50: mol_type = other DNA
ataaattcaacatccttgcttattttctgaaagaataggtctgaattttt

SEQ ID NO: 31037 - DNA, 50 bp, synthetic construct
  source 1..50: mol_type = other DNA
tgtccattacagcaccaagccacatatcactctacttactgtaattatca

SEQ ID NO: 31038 - DNA, 50 bp, synthetic construct
  source 1..50: mol_type = other DNA
cccttctctagtaccttatccgatatatgcgatttatttgctggttcagg

SEQ ID NO: 31039 - DNA, 50 bp, synthetic construct
  source 1..50: mol_type = other DNA
tcataaacaaatagatatataattatctagtactaagtatacgtttacta

SEQ ID NO: 31040 - DNA, 50 bp, synthetic construct
  source 1..50: mol_type = other DNA
aaacaaaatcagaagacgaccttcggaaaagggatcttcttatttaattg

SEQ ID NO: 31041 - DNA, 50 bp, synthetic construct
  source 1..50: mol_type = other DNA
tataatgtggacttaaaaggcttattaaaacctttcaaggaaacattctc

SEQ ID NO: 31042 - DNA, 50 bp, synthetic construct
  source 1..50: mol_type = other DNA
ttgacccccaatttctgcatggcatttgaaatgtgattccgcacagtctt

SEQ ID NO: 31043 - DNA, 50 bp, synthetic construct
  source 1..50: mol_type = other DNA
tccgacatgtacctgaaatatgagcctaaataagtcaggatatagaacta

SEQ ID NO: 31044 - DNA, 50 bp, synthetic construct
  source 1..50: mol_type = other DNA
atgtgctgttcgagagtacggatcgcgactattactgaaaagcagcaatt

SEQ ID NO: 31045 - DNA, 50 bp, synthetic construct
  source 1..50: mol_type = other DNA
aattttgattgaagcaccagcttttaatggctgtcttaataattctaata

SEQ ID NO: 31046 - DNA, 50 bp, synthetic construct
  source 1..50: mol_type = other DNA
tttatatactgaatcagtaattatatacaattacggacggagttgttacc

SEQ ID NO: 31047 - DNA, 50 bp, synthetic construct
  source 1..50: mol_type = other DNA
ttctgtgagccgttgtccgcatcgtgcgatacccgcaacaaagaaacccg

SEQ ID NO: 31048 - DNA, 50 bp, synthetic construct
  source 1..50: mol_type = other DNA
attagtgaattttctgaaagagataaaaatctttaaaaattatcttgctg

SEQ ID NO: 31049 - DNA, 50 bp, synthetic construct
  source 1..50: mol_type = other DNA
agtttttaaaatatagcttagctatataactaagttatatttgaagaaag

SEQ ID NO: 31050 - DNA, 50 bp, synthetic construct
  source 1..50: mol_type = other DNA
atatcaatgcaaacataaacatcaattttttagcctgtttttgacccgat

SEQ ID NO: 31051 - DNA, 50 bp, synthetic construct
  source 1..50: mol_type = other DNA
ttatttgcttgattttatttcttctatattttacataaatcataatataa

SEQ ID NO: 31052 - DNA, 50 bp, synthetic construct
  source 1..50: mol_type = other DNA
tgctatttgctgtaatggcacctatttgtatgattatcatgcaaaaaccg

SEQ ID NO: 31053 - DNA, 50 bp, synthetic construct
  source 1..50: mol_type = other DNA
aatgagaacaaccacggggaagaacgtcctttgcccactggacgctcacg

SEQ ID NO: 31054 - DNA, 50 bp, synthetic construct
  source 1..50: mol_type = other DNA
gtcagctaacttggaaatgacaacagcttctcattcgctcgttgcaggac

SEQ ID NO: 31055 - DNA, 50 bp, synthetic construct
  source 1..50: mol_type = other DNA
cgagcagtatcccaataagatcatcaattacattatgctgttgctggcac

SEQ ID NO: 31056 - DNA, 50 bp, synthetic construct
  source 1..50: mol_type = other DNA
atataaatattgaaaataaataaaaaaacgatttttatcaatttctattg

SEQ ID NO: 31057 - DNA, 50 bp, synthetic construct
  source 1..50: mol_type = other DNA
caaagaaacactaaaagctctaccctgattgagtaatatcacattctttg

SEQ ID NO: 31058 - DNA, 50 bp, synthetic construct
  source 1..50: mol_type = other DNA
catgggagtatcataattaactattaatcattaactaaaaaacacccagt

SEQ ID NO: 31059 - DNA, 50 bp, synthetic construct
  source 1..50: mol_type = other DNA
aaagaagtaatcaactttatcgctaaagggcttaagtcgagttctaactt

SEQ ID NO: 31060 - DNA, 50 bp, synthetic construct
  source 1..50: mol_type = other DNA
ttttagttttacataatcaaatgaatattaggttctgttgcaaagtaaaa

SEQ ID NO: 31061 - DNA, 50 bp, synthetic construct
  source 1..50: mol_type = other DNA
ccacgggaaaatgcagggaatggcgcgcccgaaaggattcgaacctctga

SEQ ID NO: 31062 - DNA, 50 bp, synthetic construct
  source 1..50: mol_type = other DNA
ttaatgggagatgcgattaagccaaatgactcgttcggagaccctaacgc

SEQ ID NO: 31063 - DNA, 50 bp, synthetic construct
  source 1..50: mol_type = other DNA
ccgctaatgggcaagcttcgaaagtgtctggtgaccttcatcattaagag

SEQ ID NO: 31064 - DNA, 50 bp, synthetic construct
  source 1..50: mol_type = other DNA
atatataaaatgtatctgaatgtatttactttcaataatatgaaaaatat

SEQ ID NO: 31065 - DNA, 50 bp, synthetic construct
  source 1..50: mol_type = other DNA
caataaatgcgagctttctaaataagtggcggagagatagggatttgaac

SEQ ID NO: 31066 - DNA, 50 bp, synthetic construct
  source 1..50: mol_type = other DNA
tgattattattttttaagtattgtaaccagtcttttttaagtaatcatcc

SEQ ID NO: 31067 - DNA, 50 bp, synthetic construct
  source 1..50: mol_type = other DNA
tcctagtaacgcaatctcagggtctataaaatgtagtataacatgtagtt

SEQ ID NO: 31068 - DNA, 50 bp, synthetic construct
  source 1..50: mol_type = other DNA
attatgaactacagttaaaaaatttaattttataaataatagtcctgaat

SEQ ID NO: 31069 - DNA, 50 bp, synthetic construct
  source 1..50: mol_type = other DNA
aattttagatcaatataaaaacatgataatttttatcataatcagtcatt

SEQ ID NO: 31070 - DNA, 50 bp, synthetic construct
  source 1..50: mol_type = other DNA
tggaagctgcaattaaaattgcgcggacgcaagcgcattcggtgtagcgg

SEQ ID NO: 31071 - DNA, 50 bp, synthetic construct
  source 1..50: mol_type = other DNA
cagatcatctccatatgagcaagttcttctgtcccgatatccgtgagtat

SEQ ID NO: 31072 - DNA, 50 bp, synthetic construct
  source 1..50: mol_type = other DNA
ttcaaattaactaataagaggtgaattcccctccttattgataatcccct

SEQ ID NO: 31073 - DNA, 50 bp, synthetic construct
  source 1..50: mol_type = other DNA
tttatctttccctccacttggttcagtttccaccgagatggaagagcaaa

SEQ ID NO: 31074 - DNA, 50 bp, synthetic construct
  source 1..50: mol_type = other DNA
cacctcgcggatggaaccatgacgccggttgggtgagcatctacgaggtg

SEQ ID NO: 31075 - DNA, 50 bp, synthetic construct
  source 1..50: mol_type = other DNA
cacctggaacggcgtcacgtagtcctcccgcggtggcgccaacgcaggtg

SEQ ID NO: 31076 - DNA, 50 bp, synthetic construct
  source 1..50: mol_type = other DNA
ggtcggtggacacgcgggcatacccgggtattcggccgtggccatggatt

SEQ ID NO: 31077 - DNA, 50 bp, synthetic construct
  source 1..50: mol_type = other DNA
ttaatcggggagaaccgtatcataaaaccggtacggtgaaccgtatcata

SEQ ID NO: 31078 - DNA, 50 bp, synthetic construct
  source 1..50: mol_type = other DNA
gtctggcttttttaatcgtgtcgcagctcgcaattcttaatgccgtagag

SEQ ID NO: 31079 - DNA, 50 bp, synthetic construct
  source 1..50: mol_type = other DNA
tatttggtggacctagcagaaggctttctcatcttacgtggacctgaggg

SEQ ID NO: 31080 - DNA, 50 bp, synthetic construct
  source 1..50: mol_type = other DNA
atcccgccaacccaaacgtagtcaacatgatattagggaacccgcgcgat

SEQ ID NO: 31081 - DNA, 50 bp, synthetic construct
  source 1..50: mol_type = other DNA
acagtaacgactatgagcgcaatgacccttgatttacctcgccgcttccc

SEQ ID NO: 31082 - DNA, 50 bp, synthetic construct
  source 1..50: mol_type = other DNA
cagcggcgggcttttttaatggtatcgcagtttttaattccgtacatggt

SEQ ID NO: 31083 - DNA, 50 bp, synthetic construct
  source 1..50: mol_type = other DNA
caccatcggcaacattaaagtaaaattacacttcagtgaacaccgacggc

SEQ ID NO: 31084 - DNA, 50 bp, synthetic construct
  source 1..50: mol_type = other DNA
acagaaacgactatgagcgcaatgacccttgatttacctcgccgcttccc

SEQ ID NO: 31085 - DNA, 50 bp, synthetic construct
  source 1..50: mol_type = other DNA
gggatatccaccgggaatttcggattacccggatggctaatcatatgcac

SEQ ID NO: 31086 - DNA, 50 bp, synthetic construct
  source 1..50: mol_type = other DNA
acagattcaatgtgcgttgtcttttgggtcgtttgtgggaaattatccac

SEQ ID NO: 31087 - DNA, 50 bp, synthetic construct
  source 1..50: mol_type = other DNA
accagcctatttcctatttatgatacgggtaaatatccctatttatgata

SEQ ID NO: 31088 - DNA, 50 bp, synthetic construct
  source 1..50: mol_type = other DNA
tggataatttcccacaaacgacccacacattgaatctgtcacgttattaa

SEQ ID NO: 31089 - DNA, 50 bp, synthetic construct
  source 1..50: mol_type = other DNA
tttgagtatattcatcccttctatgatgggaatggacggatgggccgttt

SEQ ID NO: 31090 - DNA, 50 bp, synthetic construct
  source 1..50: mol_type = other DNA
acttccgaaatttcaaatacagaatactctttattttcaaaaagatcagt

SEQ ID NO: 31091 - DNA, 50 bp, synthetic construct
  source 1..50: mol_type = other DNA
ttttttgaaaaaattgaggttatgaaagattccattttttattgattaaa

SEQ ID NO: 31092 - DNA, 50 bp, synthetic construct
  source 1..50: mol_type = other DNA
aacgaccccgaaccaaccgttggatcataaattgaaaaactttcctcttc

SEQ ID NO: 31093 - DNA, 50 bp, synthetic construct
  source 1..50: mol_type = other DNA
gattgccagatggatgatatgacttaataaatattaaccagatggatgat

SEQ ID NO: 31094 - DNA, 50 bp, synthetic construct
  source 1..50: mol_type = other DNA
aacggtctgcgcgcatccaccggcgcgccggcaccggcgccctctctcgc

SEQ ID NO: 31095 - DNA, 50 bp, synthetic construct
  source 1..50: mol_type = other DNA
gtcggaaattgcccttgcagccgagtgccgaacgaaagcgcatctccgag

SEQ ID NO: 31096 - DNA, 50 bp, synthetic construct
  source 1..50: mol_type = other DNA
tcagtaactaaatgcactacttttaacaaatcgatagatacctatactaa

SEQ ID NO: 31097 - DNA, 50 bp, synthetic construct
  source 1..50: mol_type = other DNA
gaaaaagattactggtttgtaaagtacctttcaaaaatgtaaggtttttg

SEQ ID NO: 31098 - DNA, 50 bp, synthetic construct
  source 1..50: mol_type = other DNA
aataattctatatttattattagagtacatgagcacgccctataatttcg

SEQ ID NO: 31099 - DNA, 50 bp, synthetic construct
  source 1..50: mol_type = other DNA
attcgtctcaaatctaactaaaccttggtgtaattagatttaccccatta

SEQ ID NO: 31100 - DNA, 50 bp, synthetic construct
  source 1..50: mol_type = other DNA
ctttcaggtaaacggccttacgtttggagcattgtccacagcactcgaac

SEQ ID NO: 31101 - DNA, 50 bp, synthetic construct
  source 1..50: mol_type = other DNA
tattttcagatgcgagtttaactttccagctacactcgccgctgaatcca

SEQ ID NO: 31102 - DNA, 50 bp, synthetic construct
  source 1..50: mol_type = other DNA
accagacggtcaaattcgcggatctgctttagcgaattcgatgagcgggt

SEQ ID NO: 31103 - DNA, 50 bp, synthetic construct
  source 1..50: mol_type = other DNA
ataaatcatttgtaattgttttgctttgaattataatataaatgaaatga

SEQ ID NO: 31104 - DNA, 50 bp, synthetic construct
  source 1..50: mol_type = other DNA
cagcatgccgaaggtctggaggatcgaacctacggccattcgattaacag

SEQ ID NO: 31105 - DNA, 50 bp, synthetic construct
  source 1..50: mol_type = other DNA
ttcaaaaatggccctatagctcagttctggcctgtgctgccatttttact

SEQ ID NO: 31106 - DNA, 50 bp, synthetic construct
  source 1..50: mol_type = other DNA
tggtcaacccgattgacgtaggtgcccaagcacgatccgttcgtggacct

SEQ ID NO: 31107 - DNA, 50 bp, synthetic construct
  source 1..50: mol_type = other DNA
tcttttaagtatcttttaaaagggtatcatttaaagatgaacttataaac

SEQ ID NO: 31108 - DNA, 50 bp, synthetic construct
  source 1..50: mol_type = other DNA
tgccccgcaaataccgggtggtcgtacgaacacctgtcaaagggcacggc

SEQ ID NO: 31109 - DNA, 50 bp, synthetic construct
  source 1..50: mol_type = other DNA
ttggccggaaccaaacaaaaatattccgcaagggcgatgttccatgaaaa

SEQ ID NO: 31110 - DNA, 50 bp, synthetic construct
  source 1..50: mol_type = other DNA
accaactattgtctataggtaactatagttattgatgtttgcatctatga

SEQ ID NO: 31111 - DNA, 50 bp, synthetic construct
  source 1..50: mol_type = other DNA
cgacaggctgtacaactgcccccagaagcaacaatgtcagatgcactttc

SEQ ID NO: 31112 - DNA, 50 bp, synthetic construct
  source 1..50: mol_type = other DNA
tgggcagcaaattttttcaatggtggtggaggcggggggaatcgaacccc

SEQ ID NO: 31113 - DNA, 50 bp, synthetic construct
  source 1..50: mol_type = other DNA
gaaaagaatactcacttaactaaatattttattatactccgctaaggcaa

SEQ ID NO: 31114 - DNA, 50 bp, synthetic construct
  source 1..50: mol_type = other DNA
ggaaaatgcctttacaatttaaaaatttcatgcttggtttcccatttttc

SEQ ID NO: 31115 - DNA, 50 bp, synthetic construct
  source 1..50: mol_type = other DNA
ctacctaggattccagctacggcaacccgccatattcgaattcgccgtat

SEQ ID NO: 31116 - DNA, 50 bp, synthetic construct
  source 1..50: mol_type = other DNA
gtcacaccctgactctacctccgcgcagagcgcggcaccgaggtcgtgtc

SEQ ID NO: 31117 - DNA, 50 bp, synthetic construct
  source 1..50: mol_type = other DNA
aagccaatatgcaagcccgaaatcgccaccagatgacttgtgcccgtgcc

SEQ ID NO: 31118 - DNA, 50 bp, synthetic construct
  source 1..50: mol_type = other DNA
tacataaatgaatggctcaagaataaagtttacttacatttagatttgta

SEQ ID NO: 31119 - DNA, 50 bp, synthetic construct
  source 1..50: mol_type = other DNA
tggctggcatgtggtcaaggtgctttaggattaaggttctctacagaaca

SEQ ID NO: 31120 - DNA, 50 bp, synthetic construct
  source 1..50: mol_type = other DNA
gctggcatgtggtcaaagtattatacatattactaaggttctctacagaa

SEQ ID NO: 31121 - DNA, 50 bp, synthetic construct
  source 1..50: mol_type = other DNA
caaaatttggctggcatgtggtcaaaaggttctctacagaacatagcctc

SEQ ID NO: 31122 - DNA, 50 bp, synthetic construct
  source 1..50: mol_type = other DNA
ctttgggtatgtttactatgaatgatctaaagacataaaactgaatacgc

SEQ ID NO: 31123 - DNA, 50 bp, synthetic construct
  source 1..50: mol_type = other DNA
gacctagaactcgatttaagacctttagcgataaagttgattacttcttt

SEQ ID NO: 31124 - DNA, 50 bp, synthetic construct
  source 1..50: mol_type = other DNA
ggccgaaaaatcaatgaaacatggttggttgcgggggcaggatttgaacc

SEQ ID NO: 31125 - DNA, 50 bp, synthetic construct
  source 1..50: mol_type = other DNA
cgatggtagcggaggcccgttctgttggtagcggaggagggattcgaacc

SEQ ID NO: 31126 - DNA, 50 bp, synthetic construct
  source 1..50: mol_type = other DNA
gaccatagacctaaccctctcactctagggaagaggctgtgtctatttcg

SEQ ID NO: 31127 - DNA, 50 bp, synthetic construct
  source 1..50: mol_type = other DNA
caaactttgtgatggaagatatgaggaatgatcttattttatttaagttc

SEQ ID NO: 31128 - DNA, 50 bp, synthetic construct
  source 1..50: mol_type = other DNA
atctatttcatatttgggattccctaggttttccgggatggcttattata

SEQ ID NO: 31129 - DNA, 50 bp, synthetic construct
  source 1..50: mol_type = other DNA
cttttaatatacgtattctacgaaacatcaaagaagagaaatcataacca

SEQ ID NO: 31130 - DNA, 50 bp, synthetic construct
  source 1..50: mol_type = other DNA
caaataatagataaattgtgtgaatatttttcaactttagttattgattt

SEQ ID NO: 31131 - DNA, 50 bp, synthetic construct
  source 1..50: mol_type = other DNA
tcatttttactctttttattatttctatctaatctatagcatatcaatat

SEQ ID NO: 31132 - DNA, 50 bp, synthetic construct
  source 1..50: mol_type = other DNA
aaatatactccacattatttataaatttatatataaaataacttacggca

SEQ ID NO: 31133 - DNA, 50 bp, synthetic construct
  source 1..50: mol_type = other DNA
atcgaaaatttagactaatcatcttaagaatcgaatgatattttatggat

SEQ ID NO: 31134 - DNA, 50 bp, synthetic construct
  source 1..50: mol_type = other DNA
aaaatttttaaaattttttaataaaattattttattatttttaaatgatc

SEQ ID NO: 31135 - DNA, 50 bp, synthetic construct
  source 1..50: mol_type = other DNA
gaatgaattcggtcaggccggacggccctttaccctcccagaagttctcc

SEQ ID NO: 31136 - DNA, 50 bp, synthetic construct
  source 1..50: mol_type = other DNA
ctaaaaaacgaaaggacgcacaccacgaaaggacggcataccatgaatat

SEQ ID NO: 31137 - DNA, 50 bp, synthetic construct
  source 1..50: mol_type = other DNA
aggtgagtaatgcgtaaaatcataataattcatgtggatatggactgctt

SEQ ID NO: 31138 - DNA, 50 bp, synthetic construct
  source 1..50: mol_type = other DNA
gatatgcttccccttgttagtgatatttatgatacgcttcccctcgcata

SEQ ID NO: 31139 - DNA, 50 bp, synthetic construct
  source 1..50: mol_type = other DNA
ccgactcttttataaaagtcggcttttttagccttttataaaagatatga

SEQ ID NO: 31140 - DNA, 50 bp, synthetic construct
  source 1..50: mol_type = other DNA
taactggaacttctctgctaattaaataatttcatatccgtgtctatcta

SEQ ID NO: 31141 - DNA, 50 bp, synthetic construct
  source 1..50: mol_type = other DNA
ccagggcataaacatgcattccgtgtaaatcatgcacatgccagccttta

SEQ ID NO: 31142 - DNA, 50 bp, synthetic construct
  source 1..50: mol_type = other DNA
gatgccataactgttccacctggaactcctggtgctcctattgcgaacac

SEQ ID NO: 31143 - DNA, 50 bp, synthetic construct
  source 1..50: mol_type = other DNA
aaaatacatggaacaataagtattaaaattaatatttttccttcacttac

SEQ ID NO: 31144 - DNA, 50 bp, synthetic construct
  source 1..50: mol_type = other DNA
ttattaaaattattgatatttaacttattatatatttatcattttacaaa

SEQ ID NO: 31145 - DNA, 50 bp, synthetic construct
  source 1..50: mol_type = other DNA
tctcggtcgatacgtttgaagacgcgggtcatagcagagttcgaattatt

SEQ ID NO: 31146 - DNA, 50 bp, synthetic construct
  source 1..50: mol_type = other DNA
cggggttcgaaacccgctttcgcggccgcgaaactctctttgggggacaa

SEQ ID NO: 31147 - DNA, 50 bp, synthetic construct
  source 1..50: mol_type = other DNA
ttgctttttttgagtataataaaatatttagttaagtgaatactcatgtc

SEQ ID NO: 31148 - DNA, 50 bp, synthetic construct
  source 1..50: mol_type = other DNA
ttttgtgtcggctacactatcgaattctgtcggaatgaggcgactcgaac

SEQ ID NO: 31149 - DNA, 50 bp, synthetic construct
  source 1..50: mol_type = other DNA
tgctaggtctgctactagtgcttgcacaacttctcgcagagctgcgtaaa

SEQ ID NO: 31150 - DNA, 50 bp, synthetic construct
  source 1..50: mol_type = other DNA
ctatcaaccctgtactgcacccatttttggggtcagtacaccctggggct

SEQ ID NO: 31151 - DNA, 50 bp, synthetic construct
  source 1..50: mol_type = other DNA
ttttacggcgcaccggataaaaagcgcaactcaatcaagaaacagtcaaa

SEQ ID NO: 31152 - DNA, 50 bp, synthetic construct
  source 1..50: mol_type = other DNA
cttccgcacgacaagcggaagtgccggcagcggtaccggccggcggcatc

SEQ ID NO: 31153 - DNA, 50 bp, synthetic construct
  source 1..50: mol_type = other DNA
acgccgaccgaggcggcggccgcggcctttcgtcggtcctcgtgcgggaa

SEQ ID NO: 31154 - DNA, 50 bp, synthetic construct
  source 1..50: mol_type = other DNA
tgctaattctcttgttggcacttctagtacgcttaagagcagaattagtg

SEQ ID NO: 31155 - DNA, 50 bp, synthetic construct
  source 1..50: mol_type = other DNA
gaatataagtgtgttattatgttgatggacataattcttgtctgatttct

SEQ ID NO: 31156 - DNA, 50 bp, synthetic construct
  source 1..50: mol_type = other DNA
tcttctgtaccaccatgttatcagtactgataacatgacggtactaattc

SEQ ID NO: 31157 - DNA, 50 bp, synthetic construct
  source 1..50: mol_type = other DNA
tgctttgaagaagtattctgtgaaccgttgccggatcggtattcacagcc

SEQ ID NO: 31158 - DNA, 50 bp, synthetic construct
  source 1..50: mol_type = other DNA
actatcattggtattgcgatgattgtggttccgttaatgcccatccgctg

SEQ ID NO: 31159 - DNA, 50 bp, synthetic construct
  source 1..50: mol_type = other DNA
taccaatcacgtgatgatgggagtatcaactcaaaatcacgtacttgtct

SEQ ID NO: 31160 - DNA, 50 bp, synthetic construct
  source 1..50: mol_type = other DNA
gaaaaagagaactttcttagccgcttggtgatgcgaagaaaagctgctta

SEQ ID NO: 31161 - DNA, 50 bp, synthetic construct
  source 1..50: mol_type = other DNA
tttggcaagcctgaacgccctcaagtagtataaatgtcgagtgacctcgg

SEQ ID NO: 31162 - DNA, 50 bp, synthetic construct
  source 1..50: mol_type = other DNA
accagggcagcatcactccgtcgcgttcgacatggtgatgctgaacgacc

SEQ ID NO: 31163 - DNA, 50 bp, synthetic construct
  source 1..50: mol_type = other DNA
acttagaccctgattttattgattatattcagtaaaatctgtgcctataa

SEQ ID NO: 31164 - DNA, 50 bp, synthetic construct
  source 1..50: mol_type = other DNA
cttcgttattcctctgtttttatcttaatagggctagtcaaataacgaat

SEQ ID NO: 31165 - DNA, 50 bp, synthetic construct
  source 1..50: mol_type = other DNA
ttactcactgaataatcattactaaacagaaaaggataaaaatcttgtag

SEQ ID NO: 31166 - DNA, 50 bp, synthetic construct
  source 1..50: mol_type = other DNA
caaggggcgggaaaatattcctgctagcaggattcatgtttatttccttc

SEQ ID NO: 31167 - DNA, 50 bp, synthetic construct
  source 1..50: mol_type = other DNA
tttaatagaattagttactgaagagctgttcataaagcgattgagctaaa

SEQ ID NO: 31168 - DNA, 50 bp, synthetic construct
  source 1..50: mol_type = other DNA
taatgattatatagaaagaaatggatacatcgcttccttaaacattaata

SEQ ID NO: 31169 - DNA, 50 bp, synthetic construct
  source 1..50: mol_type = other DNA
cgcgtgaccctggagttgccgttgatccagctgagctacgggtgctttcg

SEQ ID NO: 31170 - DNA, 50 bp, synthetic construct
  source 1..50: mol_type = other DNA
tcaacctataagataggtctctttattaaaagtgaaatcgaatctttaga

SEQ ID NO: 31171 - DNA, 50 bp, synthetic construct
  source 1..50: mol_type = other DNA
gaataattacctttggcgaaatatctagtgctcgccaaagtcaaagggtg

SEQ ID NO: 31172 - DNA, 50 bp, synthetic construct
  source 1..50: mol_type = other DNA
agttgtctgattgagaatgatgaacttcttgttcggattcacagaaaact

SEQ ID NO: 31173 - DNA, 50 bp, synthetic construct
  source 1..50: mol_type = other DNA
actgaaggcccgggtttaatgaaagattttatggaacacgggcgccttgt

SEQ ID NO: 31174 - DNA, 50 bp, synthetic construct
  source 1..50: mol_type = other DNA
ggtggtcatggtgggacatctgtctgaacatcaagtaataactggcagca

SEQ ID NO: 31175 - DNA, 50 bp, synthetic construct
  source 1..50: mol_type = other DNA
aaagaggggcttgcaacccgcgacaagaagcgtatgtcaaggcaaagcat

SEQ ID NO: 31176 - DNA, 50 bp, synthetic construct
  source 1..50: mol_type = other DNA
gttgccacgttgaagaatgcctacatgtacgcggcacaatttatggcagc

SEQ ID NO: 31177 - DNA, 50 bp, synthetic construct
  source 1..50: mol_type = other DNA
aaacgttttaatgaagatggtgaaatatcatgattatcgtttaaaatttt

SEQ ID NO: 31178 - DNA, 50 bp, synthetic construct
  source 1..50: mol_type = other DNA
aaaagtcaataaaaaagacttgacataattaactatctttgctttttctt

SEQ ID NO: 31179 - DNA, 50 bp, synthetic construct
  source 1..50: mol_type = other DNA
aagttttctactttgttcataaaaaattttaactgcattatagcaaactt

SEQ ID NO: 31180 - DNA, 50 bp, synthetic construct
  source 1..50: mol_type = other DNA
atagaaatggtgctattaagcatatttttatttaaaaagacaattaaggt

SEQ ID NO: 31181 - DNA, 50 bp, synthetic construct
  source 1..50: mol_type = other DNA
tgcaacatatcaaaaatataagtgtttgattttatctatgaattcttgcc

SEQ ID NO: 31182 - DNA, 50 bp, synthetic construct
  source 1..50: mol_type = other DNA
ccgggccgggtgcgggtcccgtcggaattccggggcatcaccttccacga

SEQ ID NO: 31183 - DNA, 50 bp, synthetic construct
  source 1..50: mol_type = other DNA
acgacggtatctcggggcggaaggccctcgccggagcgagagggcttcgt

SEQ ID NO: 31184 - DNA, 50 bp, synthetic construct
  source 1..50: mol_type = other DNA
ttgagatataagtccaaactttttggaacatgccatgagttttatctcat

SEQ ID NO: 31185 - DNA, 50 bp, synthetic construct
  source 1..50: mol_type = other DNA
cgaataagacgattgcgggctactcctgtagcctcggatcttcgtattct

SEQ ID NO: 31186 - DNA, 50 bp, synthetic construct
  source 1..50: mol_type = other DNA
gtcttgccggaaaagacggcaagggggaagtccctcctttccgtacgtct

SEQ ID NO: 31187 - DNA, 50 bp, synthetic construct
  source 1..50: mol_type = other DNA
gttctataatggcggtattgcaaatattgatatttcaagcatttcggtag

SEQ ID NO: 31188 - DNA, 50 bp, synthetic construct
  source 1..50: mol_type = other DNA
ccgaatttttttcttttccgtcacctttgacaaaccctaaaaaactttga

SEQ ID NO: 31189 - DNA, 50 bp, synthetic construct
  source 1..50: mol_type = other DNA
gatcgatgccctagaaattctcgaattaaagaatttcacggcagctaatc

SEQ ID NO: 31190 - DNA, 50 bp, synthetic construct
  source 1..50: mol_type = other DNA
ttggcatgtggttaaggttctttacctaaagaatgctgaccaaattgaaa

SEQ ID NO: 31191 - DNA, 50 bp, synthetic construct
  source 1..50: mol_type = other DNA
gattacataacccattcttattacataatcctcctatgggttatgtaatc

SEQ ID NO: 31192 - DNA, 50 bp, synthetic construct
  source 1..50: mol_type = other DNA
cctatttattgggcctatcctagacttctcggatccttatcaagcggagc

SEQ ID NO: 31193 - DNA, 50 bp, synthetic construct
  source 1..50: mol_type = other DNA
tgagcaaagaattacagattaccgatcgaatatatgagattgcttgcttc

SEQ ID NO: 31194 - DNA, 50 bp, synthetic construct
  source 1..50: mol_type = other DNA
gatgggccttcgtggtgggcggtgcgcgccatatttcaaggctcggcggt

SEQ ID NO: 31195 - DNA, 50 bp, synthetic construct
  source 1..50: mol_type = other DNA
atcggaacagataaggaaggcaatgaaattactttaattgacgtcctgca

SEQ ID NO: 31196 - DNA, 50 bp, synthetic construct
  source 1..50: mol_type = other DNA
ttttattaaaataaccttgttccatattgaagcagcttatttcaatatta

SEQ ID NO: 31197 - DNA, 50 bp, synthetic construct
  source 1..50: mol_type = other DNA
aaaaagaaactcaaatttccgagttaactagaaaattttaattattttct

SEQ ID NO: 31198 - DNA, 50 bp, synthetic construct
  source 1..50: mol_type = other DNA
tgaatagtattagctgaaagtgagggctcttgttaagctgcctaaagcag

SEQ ID NO: 31199 - DNA, 50 bp, synthetic construct
  source 1..50: mol_type = other DNA
tattaatattattttattataactgtttttatgctaaaatcaagttatta

SEQ ID NO: 31200 - DNA, 50 bp, synthetic construct
  source 1..50: mol_type = other DNA
ctgcggccccatcagcagcaatgaacgaacagtcagtcgtaccaccgccg

SEQ ID NO: 31201 - DNA, 50 bp, synthetic construct
  source 1..50: mol_type = other DNA
ggcctgacgctccgccccgtcgccgcgcgctgctggccagcgatcagacc

SEQ ID NO: 31202 - DNA, 50 bp, synthetic construct
  source 1..50: mol_type = other DNA
tcagctttcggaagggcgtatcatagttaatttgataatcctaaaatctt

SEQ ID NO: 31203 - DNA, 50 bp, synthetic construct
  source 1..50: mol_type = other DNA
caaatccgtcttttcctaataagaactcatatcaataaaatgtgaatgat

SEQ ID NO: 31204 - DNA, 50 bp, synthetic construct
  source 1..50: mol_type = other DNA
atttctcactgggccaaaaagtcaattgaccaaaccatggtgtttgaaat

SEQ ID NO: 31205 - DNA, 50 bp, synthetic construct
  source 1..50: mol_type = other DNA
ttcatatgcaaaacattgagaaagaaaattcatattggagctgatttaaa

SEQ ID NO: 31206 - DNA, 50 bp, synthetic construct
  source 1..50: mol_type = other DNA
agaagaagggatataaattatagatatctataatttatcggatttaaatt

SEQ ID NO: 31207 - DNA, 50 bp, synthetic construct
  source 1..50: mol_type = other DNA
agcggctgccggcggagcggcccagctgggcggctccaggggtgagacgg

SEQ ID NO: 31208 - DNA, 50 bp, synthetic construct
  source 1..50: mol_type = other DNA
tgccataatatttttttgctaaactcaatatccaaactaatattatttaa

SEQ ID NO: 31209 - DNA, 50 bp, synthetic construct
  source 1..50: mol_type = other DNA
ataaaataataagttataaaataaattcattttatttttttgtactaaca

SEQ ID NO: 31210 - DNA, 50 bp, synthetic construct
  source 1..50: mol_type = other DNA
aaaaagaaactcaaatttccgagtttcacctgcaatttccttcgttgttt

SEQ ID NO: 31211 - DNA, 50 bp, synthetic construct
  source 1..50: mol_type = other DNA
aaaacacatgttagccagcattttataaaaaccaacctagggcaagttta

SEQ ID NO: 31212 - DNA, 50 bp, synthetic construct
  source 1..50: mol_type = other DNA
cagaaatgtgatttcactggaggatgttctccttcgaaatgccgatctgt

SEQ ID NO: 31213 - DNA, 50 bp, synthetic construct
  source 1..50: mol_type = other DNA
cataatacagtagattacactcataaatgagtaccactttgtactatata

SEQ ID NO: 31214 - DNA, 50 bp, synthetic construct
  source 1..50: mol_type = other DNA
gctttaggattaaatggggtaaacctcatgcgcctaatggccacaaaaaa

SEQ ID NO: 31215 - DNA, 50 bp, synthetic construct
  source 1..50: mol_type = other DNA
cgcggaactgcacaccctcgatgccgagcgcatcctcacccagctccgct

SEQ ID NO: 31216 - DNA, 50 bp, synthetic construct
  source 1..50: mol_type = other DNA
tttttactttagtatgcttaccatttcttctttttcattttcagtaactg

SEQ ID NO: 31217 - DNA, 50 bp, synthetic construct
  source 1..50: mol_type = other DNA
tgggcacggattcgcggccaggatcatatcgggcctttcatctcttccca

SEQ ID NO: 31218 - DNA, 50 bp, synthetic construct
  source 1..50: mol_type = other DNA
tggtgacttcaagcgcctccttttcatcatcaaggcgtgagtagtcacca

SEQ ID NO: 31219 - DNA, 50 bp, synthetic construct
  source 1..50: mol_type = other DNA
tgaaagtttccggtgaagctgaaatattattgcttgggattaaggtttga

SEQ ID NO: 31220 - DNA, 50 bp, synthetic construct
  source 1..50: mol_type = other DNA
ggaaagagaactacaaagtcgaagaatccttttctaccagcttcgattga

SEQ ID NO: 31221 - DNA, 50 bp, synthetic construct
  source 1..50: mol_type = other DNA
aaccagaaaagttatctacagcccaagggctatagtttaatttttaatag

SEQ ID NO: 31222 - DNA, 50 bp, synthetic construct
  source 1..50: mol_type = other DNA
tttcattgaaaacgttgaccgacttaactgcatcaacgttttgcactaac

SEQ ID NO: 31223 - DNA, 50 bp, synthetic construct
  source 1..50: mol_type = other DNA
gaacggcaggccgagcttgtcagcaagttgaggactacgtgacgccgttc

SEQ ID NO: 31224 - DNA, 50 bp, synthetic construct
  source 1..50: mol_type = other DNA
agcccagcgacgtcaaccagaccggtcgccctcgtggaggccgctgcgcc

SEQ ID NO: 31225 - DNA, 50 bp, synthetic construct
  source 1..50: mol_type = other DNA
caccgctcgggccggaacaacagttgagaatgatgtcggcccgcgcgatc

SEQ ID NO: 31226 - DNA, 50 bp, synthetic construct
  source 1..50: mol_type = other DNA
agatgggcctcgtgcgcgaaggatggattcttcgagtttacggccccgct

SEQ ID NO: 31227 - DNA, 50 bp, synthetic construct
  source 1..50: mol_type = other DNA
acccggcctcacgatttagccgctgggccggataagtataacggccgggt

SEQ ID NO: 31228 - DNA, 50 bp, synthetic construct
  source 1..50: mol_type = other DNA
cttattttcagatcatctgttgttataacaaaggaggttcccaatgaata

SEQ ID NO: 31229 - DNA, 50 bp, synthetic construct
  source 1..50: mol_type = other DNA
taattccgcgaagttttggctttgctccaagcaagatcttctcacccgcg

SEQ ID NO: 31230 - DNA, 50 bp, synthetic construct
  source 1..50: mol_type = other DNA
agttttgtagatttggcaaaagaacatgtaagagccaaagatacaactaa

SEQ ID NO: 31231 - DNA, 50 bp, synthetic construct
  source 1..50: mol_type = other DNA
gttgttttaaatttctagaataaattcaatccctagaggatgaaaaacac

SEQ ID NO: 31232 - DNA, 50 bp, synthetic construct
  source 1..50: mol_type = other DNA
gccagttctagcttttgcgggtataaggccggacaacagctaaccctgat

SEQ ID NO: 31233 - DNA, 50 bp, synthetic construct
  source 1..50: mol_type = other DNA
tcctttttattattaaaaacataatcatcaatccactttatacaaaagga

SEQ ID NO: 31234 - DNA, 50 bp, synthetic construct
  source 1..50: mol_type = other DNA
tggtcggcttcatcgggctaaagccggtttcagcggttcggtgtcgtaca

SEQ ID NO: 31235 - DNA, 50 bp, synthetic construct
  source 1..50: mol_type = other DNA
ttctaataagtttaaaaattccttttatgtatgtttttgatttattagac

SEQ ID NO: 31236 - DNA, 50 bp, synthetic construct
  source 1..50: mol_type = other DNA
ttataaattgtttccttctttttaattacaatcaaccctaatatttctat

SEQ ID NO: 31237 - DNA, 50 bp, synthetic construct
  source 1..50: mol_type = other DNA
tcatttttttcacaagctaatcctccttaaatatggtatgaaataaaagg

SEQ ID NO: 31238 - DNA, 50 bp, synthetic construct
  source 1..50: mol_type = other DNA
aggttggattaaagggcattcaagccctcagagacgctttaagccttttg

SEQ ID NO: 31239 - DNA, 50 bp, synthetic construct
  source 1..50: mol_type = other DNA
gtgcgggcgctggtcggcttgatcagcagcaaggcgctggacgccctgcg

SEQ ID NO: 31240 - DNA, 50 bp, synthetic construct
  source 1..50: mol_type = other DNA
tctgatccagctgcgaagtgtgaccgtctcgactgaccacgacgatcagt

SEQ ID NO: 31241 - DNA, 50 bp, synthetic construct
  source 1..50: mol_type = other DNA
cgaggccatcaaggccagcttcactgatggctctgctctttgacacctcc

SEQ ID NO: 31242 - DNA, 50 bp, synthetic construct
  source 1..50: mol_type = other DNA
taataactccaaatacaatgtttaaataaacattatattataacaatcta

SEQ ID NO: 31243 - DNA, 50 bp, synthetic construct
  source 1..50: mol_type = other DNA
ctgctggcggtataataaaactgtcatcgtattcatcatagtgcataata

SEQ ID NO: 31244 - DNA, 50 bp, synthetic construct
  source 1..50: mol_type = other DNA
cgagcaccaaaggaactgccttttgctgcaggaagtccctatgggtgtcg

SEQ ID NO: 31245 - DNA, 50 bp, synthetic construct
  source 1..50: mol_type = other DNA
ctgcaattatttgaagtgtcatacccataagccacccattatcattgacc

SEQ ID NO: 31246 - DNA, 50 bp, synthetic construct
  source 1..50: mol_type = other DNA
ttgatccgctgctcgctttgataccgccctctaaattcctagcgctagaa

SEQ ID NO: 31247 - DNA, 50 bp, synthetic construct
  source 1..50: mol_type = other DNA
gacgagcggcaggcccgcggctaccaagataggcgggacatgatttcttc

SEQ ID NO: 31248 - DNA, 50 bp, synthetic construct
  source 1..50: mol_type = other DNA
ccacaggcaggccgatagattctcccgctgataaaccggcctgcacatct

SEQ ID NO: 31249 - DNA, 50 bp, synthetic construct
  source 1..50: mol_type = other DNA
gatgtttttcacaatcatcacaaaacttgggaaacattgtgaaaaacttg

SEQ ID NO: 31250 - DNA, 50 bp, synthetic construct
  source 1..50: mol_type = other DNA
ttccagaagatatttgggacataatattatgttataaaagcctcctgcat

SEQ ID NO: 31251 - DNA, 50 bp, synthetic construct
  source 1..50: mol_type = other DNA
atattacttatagctacaaatctttcagctttttcattttcactaactgg

SEQ ID NO: 31252 - DNA, 50 bp, synthetic construct
  source 1..50: mol_type = other DNA
taattataaacaacatttacgcctatgttcaaaggagcggttgataattg

SEQ ID NO: 31253 - DNA, 50 bp, synthetic construct
  source 1..50: mol_type = other DNA
tttatcatctacaacagcctttccatggaaatgatcgcatagcaacccaa

SEQ ID NO: 31254 - DNA, 50 bp, synthetic construct
  source 1..50: mol_type = other DNA
ccgccggactgcaacagagcgcccgcagctcctctgttacctgctatctc

SEQ ID NO: 31255 - DNA, 50 bp, synthetic construct
  source 1..50: mol_type = other DNA
gttataggaatacatgttttaaaggattttaaataatgtagaattatcac

SEQ ID NO: 31256 - DNA, 50 bp, synthetic construct
  source 1..50: mol_type = other DNA
ctgctggaggctatcgaccacgcggacaggtgaaagataagccacagcag

SEQ ID NO: 31257 - DNA, 50 bp, synthetic construct
  source 1..50: mol_type = other DNA
tggggtaaatctaattacaccaacaatatggtttaaaacgagtaatcgtt

SEQ ID NO: 31258 - DNA, 50 bp, synthetic construct
  source 1..50: mol_type = other DNA
taaaagataattatcatttcgacaaattgcctcttgtactttttcttgat

SEQ ID NO: 31259 - DNA, 50 bp, synthetic construct
  source 1..50: mol_type = other DNA
tgcggtatgcttatagggacaaaaatttttgtctatattggctgtcggca

SEQ ID NO: 31260 - DNA, 50 bp, synthetic construct
  source 1..50: mol_type = other DNA
atactcaattaacttacgctatgtatgaattagagttattagataaatat

SEQ ID NO: 31261 - DNA, 50 bp, synthetic construct
  source 1..50: mol_type = other DNA
taagcaacctgtttcttttactgtaacaagtaaaagaattattttcagga

SEQ ID NO: 31262 - DNA, 50 bp, synthetic construct
  source 1..50: mol_type = other DNA
aaattaatatgtttaagataagcagctaattatatgatgcataataagat

SEQ ID NO: 31263 - DNA, 50 bp, synthetic construct
  source 1..50: mol_type = other DNA
tagattcaaataacatttttcttttcaatagtaaactttatttggggaat

SEQ ID NO: 31264 - DNA, 50 bp, synthetic construct
  source 1..50: mol_type = other DNA
attcttttacccgctccgatgctatttagataatggaaagagatatgaat

SEQ ID NO: 31265 - DNA, 50 bp, synthetic construct
  source 1..50: mol_type = other DNA
ccccttttttcttgagggggcaattatttattagatgtctaaacagtgca

SEQ ID NO: 31266 - DNA, 50 bp, synthetic construct
  source 1..50: mol_type = other DNA
ggaagcggagatcgacgttcgcgtgcacgaaattggcgaccttcgcagcg

SEQ ID NO: 31267 - DNA, 50 bp, synthetic construct
  source 1..50: mol_type = other DNA
gccgaaatcgtactgcattttcatcttgcaaaatcctccatcatgtacgc

SEQ ID NO: 31268 - DNA, 50 bp, synthetic construct
  source 1..50: mol_type = other DNA
caacagaacggaatgacggaatacaatgatgccgtaatcccgcattgttt

SEQ ID NO: 31269 - DNA, 50 bp, synthetic construct
  source 1..50: mol_type = other DNA
agcaatgaccttggcgaagggaatcgtcctccttgtcgaaggtgcggact

SEQ ID NO: 31270 - DNA, 50 bp, synthetic construct
  source 1..50: mol_type = other DNA
atgtttgctttaccaattaactcatacttgttaatcggattagaacttgg

SEQ ID NO: 31271 - DNA, 50 bp, synthetic construct
  source 1..50: mol_type = other DNA
tgctattttcaaaaatacggaaaacagaagaggtatttgataaaattcaa

SEQ ID NO: 31272 - DNA, 50 bp, synthetic construct
  source 1..50: mol_type = other DNA
ctttaatcattcacattttattgatattaataaaataaagcccattatta

SEQ ID NO: 31273 - DNA, 50 bp, synthetic construct
  source 1..50: mol_type = other DNA
tgtcatttttgtgtatagtgaatttaaattcaacatgttcaatcctgttt

SEQ ID NO: 31274 - DNA, 50 bp, synthetic construct
  source 1..50: mol_type = other DNA
gagcttttctttttacttcttctattctgcatatataaaaaaaataaccg

SEQ ID NO: 31275 - DNA, 50 bp, synthetic construct
  source 1..50: mol_type = other DNA
ttattttctcattaaatacatctactattctgtatgtctaaaaaaaataa

SEQ ID NO: 31276 - DNA, 50 bp, synthetic construct
  source 1..50: mol_type = other DNA
catcggggagtgctcttcctggacgaggcgcccgaattcgacaaacgcgt

SEQ ID NO: 31277 - DNA, 50 bp, synthetic construct
  source 1..50: mol_type = other DNA
gggagataggcgtgctgttgggggccttcccaccggcacggtggtgtcca

SEQ ID NO: 31278 - DNA, 50 bp, synthetic construct
  source 1..50: mol_type = other DNA
attgggccgtgaacatccgcaagttcgggagcggtcgatagcggccagta

SEQ ID NO: 31279 - DNA, 50 bp, synthetic construct
  source 1..50: mol_type = other DNA
tacaaaatatcttaacaactatttataaatatcttcgtgtcccatttgca

SEQ ID NO: 31280 - DNA, 50 bp, synthetic construct
  source 1..50: mol_type = other DNA
tcttttttcactttttccttcttaattaataaaagaaaggcctcttaagg

SEQ ID NO: 31281 - DNA, 50 bp, synthetic construct
  source 1..50: mol_type = other DNA
ttttttgtagccattaggcgcatgagatttaccccatttaaccctaaagc

SEQ ID NO: 31282 - DNA, 50 bp, synthetic construct
  source 1..50: mol_type = other DNA
tataggcgttattatcgtaagtggtattaattaaaataaatttttacata

SEQ ID NO: 31283 - DNA, 50 bp, synthetic construct
  source 1..50: mol_type = other DNA
aaaaaatttttccgaaattgacattaaaaataatttcataaccatgtttg

SEQ ID NO: 31284 - DNA, 50 bp, synthetic construct
  source 1..50: mol_type = other DNA
cattttcgtgcggcagagggaatgaagaaaggctctgctgcatgaaaaac

SEQ ID NO: 31285 - DNA, 50 bp, synthetic construct
  source 1..50: mol_type = other DNA
caccggagcgggaaaggactaaaccggacgtcgcctcgggacctctcgac

SEQ ID NO: 31286 - DNA, 50 bp, synthetic construct
  source 1..50: mol_type = other DNA
ttgattcttgagcataaaaaacagccatattttttagtaatttcatacaa

SEQ ID NO: 31287 - DNA, 50 bp, synthetic construct
  source 1..50: mol_type = other DNA
cggaaaagttctctcactttttgagctcaaaaaccgcgagaacccagctt

SEQ ID NO: 31288 - DNA, 50 bp, synthetic construct
  source 1..50: mol_type = other DNA
attcatatatttggacattcactatttaggaattaaatccctaagtgaat

SEQ ID NO: 31289 - DNA, 50 bp, synthetic construct
  source 1..50: mol_type = other DNA
cgagacgttcagaattcgatcttccgctgtatcgcgttctgagaggattt

SEQ ID NO: 31290 - DNA, 50 bp, synthetic construct
  source 1..50: mol_type = other DNA
gccgccccgcaccgcccgcagcaggcgtcctgccgcaccacatgggcgag

SEQ ID NO: 31291 - DNA, 50 bp, synthetic construct
  source 1..50: mol_type = other DNA
gtgggactgggccttgcggcgccgaacccgatcagcagccccgcgacgat

SEQ ID NO: 31292 - DNA, 50 bp, synthetic construct
  source 1..50: mol_type = other DNA
catgcgagcgcgcccgccgccgatggccgggcgggcggccatgggcccat

SEQ ID NO: 31293 - DNA, 50 bp, synthetic construct
  source 1..50: mol_type = other DNA
accatgtaatagaagctaaataacttccagtttagtaaaaacattgtaag

SEQ ID NO: 31294 - DNA, 50 bp, synthetic construct
  source 1..50: mol_type = other DNA
aaccctgataccatgctttctaatggttcagaaataccgccttgcgggtt

SEQ ID NO: 31295 - DNA, 50 bp, synthetic construct
  source 1..50: mol_type = other DNA
ttagcagaacttgatttaagccctttagcgataaagttgattacttcttt

SEQ ID NO: 31296 - DNA, 50 bp, synthetic construct
  source 1..50: mol_type = other DNA
tactataggactaaccaagtaaatattttttaagcttttaatctaaataa

SEQ ID NO: 31297 - DNA, 50 bp, synthetic construct
  source 1..50: mol_type = other DNA
atcgcggtcgcggcgcgcgcaccactgcgtctccgcgccgctcgcctcga

SEQ ID NO: 31298 - DNA, 50 bp, synthetic construct
  source 1..50: mol_type = other DNA
tcaacaataaaaagaaaccgtttaaacctcaatatccttttttctatatc

SEQ ID NO: 31299 - DNA, 50 bp, synthetic construct
  source 1..50: mol_type = other DNA
acttgtggaaatgtaggttactaaaacaaattactgaaatcatcacaaat

SEQ ID NO: 31300 - DNA, 50 bp, synthetic construct
  source 1..50: mol_type = other DNA
attttatgattcccttttctatcagaagatcgaaaagaaagtcctaaaac

SEQ ID NO: 31301 - DNA, 50 bp, synthetic construct
  source 1..50: mol_type = other DNA
tttgggaggggcttttaccatacctagttacttttaattttactaccaaa

SEQ ID NO: 31302 - DNA, 50 bp, synthetic construct
  source 1..50: mol_type = other DNA
atgaacaagtcttacgttaaatgatatcatttaacatagaataaaatccg

SEQ ID NO: 31303 - DNA, 50 bp, synthetic construct
  source 1..50: mol_type = other DNA
acgcgcatgcccatcagcccctggtcccagcctttgatgacacggccagt

SEQ ID NO: 31304 - DNA, 50 bp, synthetic construct
  source 1..50: mol_type = other DNA
agttggtttagaccatagtgatagataatcagcttcgtcatcaaagtgtt

SEQ ID NO: 31305 - DNA, 50 bp, synthetic construct
  source 1..50: mol_type = other DNA
atttttattagtaaagaagaaattcatctttttaccttaagtataaaaga

SEQ ID NO: 31306 - DNA, 50 bp, synthetic construct
  source 1..50: mol_type = other DNA
atctttaaaactgagtcacgtaagcatgcaattgattctcatttaaagat

SEQ ID NO: 31307 - DNA, 50 bp, synthetic construct
  source 1..50: mol_type = other DNA
gttggtaaaatcacaaatgttaatttataaatctcatagattttttgaat

SEQ ID NO: 31308 - DNA, 50 bp, synthetic construct
  source 1..50: mol_type = other DNA
acaattttatcatagagtagatacgaatccatatgttaaaataagattag

SEQ ID NO: 31309 - DNA, 50 bp, synthetic construct
  source 1..50: mol_type = other DNA
cgttccgcgagggtgtacgggcccgtcggcttcaacaggctcgccgaact

SEQ ID NO: 31310 - DNA, 50 bp, synthetic construct
  source 1..50: mol_type = other DNA
accaacaccacccgggtgggctggatcctttccacccggaaacacctgaa

SEQ ID NO: 31311 - DNA, 50 bp, synthetic construct
  source 1..50: mol_type = other DNA
gcatgctcatatttcgtcacatgtacaggagtgtgttcttgtgttttaga

SEQ ID NO: 31312 - DNA, 50 bp, synthetic construct
  source 1..50: mol_type = other DNA
tcctcgtcattaattattaattttttaaattatatgattaaccgcgaaga

SEQ ID NO: 31313 - DNA, 50 bp, synthetic construct
  source 1..50: mol_type = other DNA
atttacagagtcatttaatcgtaaatgcactgccgcctgactcaattaat

SEQ ID NO: 31314 - DNA, 50 bp, synthetic construct
  source 1..50: mol_type = other DNA
catctcaaatgaaatgtataattgtacaattatacatctcaaacgcaatg

SEQ ID NO: 31315 - DNA, 50 bp, synthetic construct
  source 1..50: mol_type = other DNA
attcacattttattgatatgagtaattatgcataacaaacgcaatgcaaa

SEQ ID NO: 31316 - DNA, 50 bp, synthetic construct
  source 1..50: mol_type = other DNA
accaacaaggtgacgacaaagcacgatttttttgtcatcaccttgttggc

SEQ ID NO: 31317 - DNA, 50 bp, synthetic construct
  source 1..50: mol_type = other DNA
attcttttattaattatcatatttatatactatcttcttcataaaaataa

SEQ ID NO: 31318 - DNA, 50 bp, synthetic construct
  source 1..50: mol_type = other DNA
tttgctgccagctattacttgatgttcatctaacatacgatgagggcaat

SEQ ID NO: 31319 - DNA, 50 bp, synthetic construct
  source 1..50: mol_type = other DNA
gttatgtaagtggaaatttatctaatgatactcataatcactgatataaa

SEQ ID NO: 31320 - DNA, 50 bp, synthetic construct
  source 1..50: mol_type = other DNA
acttctatattattaattgaagttccgcatactcctcctaataaggaagc

SEQ ID NO: 31321 - DNA, 50 bp, synthetic construct
  source 1..50: mol_type = other DNA
aatgtttggctatccaccaagacaggagactcgggcggcgcccaatcaag

SEQ ID NO: 31322 - DNA, 50 bp, synthetic construct
  source 1..50: mol_type = other DNA
gaattctatagaccgtatttctaactgtagagatcaattatagagaattg

SEQ ID NO: 31323 - DNA, 50 bp, synthetic construct
  source 1..50: mol_type = other DNA
atggccatgactataggggtaccaattggattgatgctcgttccatgatg

SEQ ID NO: 31324 - DNA, 50 bp, synthetic construct
  source 1..50: mol_type = other DNA
cagtccgaagaacaagctttccgtatactggaaatctgttgattgttcta

SEQ ID NO: 31325 - DNA, 50 bp, synthetic construct
  source 1..50: mol_type = other DNA
tgggaactttgggttgggtagaaacggttccaccctcagcctgcggtgca

SEQ ID NO: 31326 - DNA, 50 bp, synthetic construct
  source 1..50: mol_type = other DNA
accggcgacgattgagtttgagtaagggaaaccggtcaatcttatccgga

SEQ ID NO: 31327 - DNA, 50 bp, synthetic construct
  source 1..50: mol_type = other DNA
atccttcaggatgttctccaggccgccctttggaagaacgcctgtatctc

SEQ ID NO: 31328 - DNA, 50 bp, synthetic construct
  source 1..50: mol_type = other DNA
aaggccacaaacccccgggcagaactgcttgccgcaggctttggcttttt

SEQ ID NO: 31329 - DNA, 50 bp, synthetic construct
  source 1..50: mol_type = other DNA
cccgtcccgccgggagagctggtcggagacgtccacaacggcgggacggg

SEQ ID NO: 31330 - DNA, 50 bp, synthetic construct
  source 1..50: mol_type = other DNA
tataaaggagacgctttgctccaaaagtaagccgggctgaattcctcctg

SEQ ID NO: 31331 - DNA, 50 bp, synthetic construct
  source 1..50: mol_type = other DNA
atatagcgtatctttttcatggcgagtaatgtcattgttatctctggtat

SEQ ID NO: 31332 - DNA, 50 bp, synthetic construct
  source 1..50: mol_type = other DNA
caaggctcattccgcgcctttttggcgcggaagccgcggaaaaaggcggc

SEQ ID NO: 31333 - DNA, 50 bp, synthetic construct
  source 1..50: mol_type = other DNA
atacagggcgggtcttacttattctgcaatcagtcgaacatgccctatcc

SEQ ID NO: 31334 - DNA, 50 bp, synthetic construct
  source 1..50: mol_type = other DNA
agccgggccttcctgggcttccatcgcgatcagtcaggcgcttggcggct

SEQ ID NO: 31335 - DNA, 50 bp, synthetic construct
  source 1..50: mol_type = other DNA
cccaatcgtcccgactcttgatatagcagttcaaaggcgggacgatttgg

SEQ ID NO: 31336 - DNA, 50 bp, synthetic construct
  source 1..50: mol_type = other DNA
tttatgactatctgtaaaagtaaatatatatttatttttatatttttaca

SEQ ID NO: 31337 - DNA, 50 bp, synthetic construct
  source 1..50: mol_type = other DNA
gcaacaaatcttttgcggctataatacattattgcgatgggattggtgga

SEQ ID NO: 31338 - DNA, 50 bp, synthetic construct
  source 1..50: mol_type = other DNA
cgggatgtgatcacctcagaagatgtttcttctcagccctgttctttcct

SEQ ID NO: 31339 - DNA, 50 bp, synthetic construct
  source 1..50: mol_type = other DNA
ttaggatggtcgctaatgtagcgggtctgcttcatggcggaccagatctg

SEQ ID NO: 31340 - DNA, 50 bp, synthetic construct
  source 1..50: mol_type = other DNA
acgccgggcaggaggatctgaaagcggcttatagccctcctggcgagcca

SEQ ID NO: 31341 - DNA, 50 bp, synthetic construct
  source 1..50: mol_type = other DNA
gcaggtaaaaatagggggagcgctcagggtgctctcctttttcaacccca

SEQ ID NO: 31342 - DNA, 50 bp, synthetic construct
  source 1..50: mol_type = other DNA
atggaaaagaagaaaaatgtggcaggtaaaacatttaccgttgaccccat

SEQ ID NO: 31343 - DNA, 50 bp, synthetic construct
  source 1..50: mol_type = other DNA
tcgccttacctcaaaaaactttaggaaaaaagttttgacaaagcgaaact

SEQ ID NO: 31344 - DNA, 50 bp, synthetic construct
  source 1..50: mol_type = other DNA
aaaagattgagaatcagcgcactaaataaagaaacgaaaagaaacttttt

SEQ ID NO: 31345 - DNA, 50 bp, synthetic construct
  source 1..50: mol_type = other DNA
cggcctcgctcgcctgctcctcggcgcctccagggaggcggccgtggccg

SEQ ID NO: 31346 - DNA, 50 bp, synthetic construct
  source 1..50: mol_type = other DNA
atcctgaagagacctttctattgatatcataagaaaggtgtaatcctcga

SEQ ID NO: 31347 - DNA, 50 bp, synthetic construct
  source 1..50: mol_type = other DNA
gaaaaaatggtatttagttcattcatatccaaggatagttcgtttttatt

SEQ ID NO: 31348 - DNA, 50 bp, synthetic construct
  source 1..50: mol_type = other DNA
tgtgaccatgtttgtcggatcgaggtgtttgtctatcaatcaaggatttt

SEQ ID NO: 31349 - DNA, 50 bp, synthetic construct
  source 1..50: mol_type = other DNA
aaagaaaacgattcttagtcgatttttgacaaaaaagaagaagtgtctga

SEQ ID NO: 31350 - DNA, 50 bp, synthetic construct
  source 1..50: mol_type = other DNA
cacttattttacagttggaaagttgatattttcgcctattgaaataagat

SEQ ID NO: 31351 - DNA, 50 bp, synthetic construct
  source 1..50: mol_type = other DNA
tatacaaaactgctcgcttcctagtattcatcaaatttaagtttactagt

SEQ ID NO: 31352 - DNA, 50 bp, synthetic construct
  source 1..50: mol_type = other DNA
ttgttttctatagttatagtaaatatattaactacacctggctggagcag

SEQ ID NO: 31353 - DNA, 50 bp, synthetic construct
  source 1..50: mol_type = other DNA
cgctaatgagcaggcttcaaaggcgcttaagccatgcaggacaacgttta

SEQ ID NO: 31354 - DNA, 50 bp, synthetic construct
  source 1..50: mol_type = other DNA
ctgttatcggaaaagtaacaaaggttcactaaacgaatttccgataacac

SEQ ID NO: 31355 - DNA, 50 bp, synthetic construct
  source 1..50: mol_type = other DNA
cctaactacattaaataaatgcagtttttaatagcatttgtgtttttgtt

SEQ ID NO: 31356 - DNA, 50 bp, synthetic construct
  source 1..50: mol_type = other DNA
cttatgctcgatgaggcgacttcaagcttagatagtaaatctgagtctgt

SEQ ID NO: 31357 - DNA, 50 bp, synthetic construct
  source 1..50: mol_type = other DNA
catatgggcaaacgtctgcgtgcatctgcggcggcccgtgtgcctataac

SEQ ID NO: 31358 - DNA, 50 bp, synthetic construct
  source 1..50: mol_type = other DNA
caaaagcaaaggcatattttgtgccagtacaaagaagcgggatgctttta

SEQ ID NO: 31359 - DNA, 50 bp, synthetic construct
  source 1..50: mol_type = other DNA
accataaaactacgatagtttaacatgttgtcttatataagactttacta

SEQ ID NO: 31360 - DNA, 50 bp, synthetic construct
  source 1..50: mol_type = other DNA
ttttttggtgttggttgcggaaatcctattattcaacaacaagtaaacaa

SEQ ID NO: 31361 - DNA, 50 bp, synthetic construct
  source 1..50: mol_type = other DNA
ctatataaatgaattgattgaaaaatttttcaattaattttaatatgcct

SEQ ID NO: 31362 - DNA, 50 bp, synthetic construct
  source 1..50: mol_type = other DNA
aaactctttctcatttttagaaagagctttaaaaaatggtgcaagaatct

SEQ ID NO: 31363 - DNA, 50 bp, synthetic construct
  source 1..50: mol_type = other DNA
tatattcaagataatgtgaccttaatccccatcactgtatcttgcttgat

SEQ ID NO: 31364 - DNA, 50 bp, synthetic construct
  source 1..50: mol_type = other DNA
ttaataaaattgttgaaacatctattattaattttcgacactgccattaa

SEQ ID NO: 31365 - DNA, 50 bp, synthetic construct
  source 1..50: mol_type = other DNA
tcctccgtgcctatattgttatcgtttgataccgatataccgatatccgt

SEQ ID NO: 31366 - DNA, 50 bp, synthetic construct
  source 1..50: mol_type = other DNA
ggcggcggcgaccgccaacatgttgcctcgctatgacggtctcgcgcgcc

SEQ ID NO: 31367 - DNA, 50 bp, synthetic construct
  source 1..50: mol_type = other DNA
agtcatatcgaggatattaataaacgattaaaaacatccaacattgcgcc

SEQ ID NO: 31368 - DNA, 50 bp, synthetic construct
  source 1..50: mol_type = other DNA
aaaatattagatatttaaatgagcttcttcttttaattgttcaagagctt

SEQ ID NO: 31369 - DNA, 50 bp, synthetic construct
  source 1..50: mol_type = other DNA
gatgaaaagagaaaaaactataaaaatttatattatttttttctttcatt

SEQ ID NO: 31370 - DNA, 50 bp, synthetic construct
  source 1..50: mol_type = other DNA
gaggagtcgttatatgtcagtacgcatgtacggacatattgaaacgatgg

SEQ ID NO: 31371 - DNA, 50 bp, synthetic construct
  source 1..50: mol_type = other DNA
tcacactgtcagacggagaacattattttcttaatactctgttgtctgta

SEQ ID NO: 31372 - DNA, 50 bp, synthetic construct
  source 1..50: mol_type = other DNA
ccgttgccgtacttgatgtcaggcgttactgttagcattggtgacgttgg

SEQ ID NO: 31373 - DNA, 50 bp, synthetic construct
  source 1..50: mol_type = other DNA
ggtgagattaaagagattaaagcagtgtctctaatgggcttaaatcgagt

SEQ ID NO: 31374 - DNA, 50 bp, synthetic construct
  source 1..50: mol_type = other DNA
aattaaattaaaaaggggtacggatgcacccaccaaattagaaattaatt

SEQ ID NO: 31375 - DNA, 50 bp, synthetic construct
  source 1..50: mol_type = other DNA
attaaagtgtttcaatttttcgagataccaaaaaacgagaagcctttaac

SEQ ID NO: 31376 - DNA, 50 bp, synthetic construct
  source 1..50: mol_type = other DNA
agatgcacgtcattggcaaaatcaaaagattaaagaatttcacggcagct

SEQ ID NO: 31377 - DNA, 50 bp, synthetic construct
  source 1..50: mol_type = other DNA
cttggaagctggactattcagacttaaggctgatttgtcatagagttcac

SEQ ID NO: 31378 - DNA, 50 bp, synthetic construct
  source 1..50: mol_type = other DNA
tgtatattcaagataatgtgaccttacattgtatttatcaagaatgaagc

SEQ ID NO: 31379 - DNA, 50 bp, synthetic construct
  source 1..50: mol_type = other DNA
cataacttaaaatccgagatcattatagcggcaaacaaacgcacattgct

SEQ ID NO: 31380 - DNA, 50 bp, synthetic construct
  source 1..50: mol_type = other DNA
aacctgtgaaacgtcaaataattcctgaattagctgagtctgtgaaggtg

SEQ ID NO: 31381 - DNA, 50 bp, synthetic construct
  source 1..50: mol_type = other DNA
cttcaaagcttaaaaagtactcaataatcatgccttttaaatctttgcgg

SEQ ID NO: 31382 - DNA, 50 bp, synthetic construct
  source 1..50: mol_type = other DNA
tcacggtcgaaaacctgtttcagataagctttgaagctactcgaccagcg

SEQ ID NO: 31383 - DNA, 50 bp, synthetic construct
  source 1..50: mol_type = other DNA
ctcttaatgatgaaggtcaccagacacctttgaagcttgctcattagcgg

SEQ ID NO: 31384 - DNA, 50 bp, synthetic construct
  source 1..50: mol_type = other DNA
tagcattagccataacggttataagcttatccgcgggggattcaacaaac

SEQ ID NO: 31385 - DNA, 50 bp, synthetic construct
  source 1..50: mol_type = other DNA
caaaaaagcgaatctttatcggtcttagcattggtgacgttggttttttc

SEQ ID NO: 31386 - DNA, 50 bp, synthetic construct
  source 1..50: mol_type = other DNA
catggaataataaagcactagtattctgtctagatttgcctgtccaagac

SEQ ID NO: 31387 - DNA, 50 bp, synthetic construct
  source 1..50: mol_type = other DNA
caaaggctcttgatgggagcaaaaaatccagacggtatctggctcttttg

SEQ ID NO: 31388 - DNA, 50 bp, synthetic construct
  source 1..50: mol_type = other DNA
cgagcgggcagtcattgtgtggaagctgccggaagataaacgccccatcg

SEQ ID NO: 31389 - DNA, 50 bp, synthetic construct
  source 1..50: mol_type = other DNA
gtcggcagcaactgaattatatcaaatacggccaaagaggatgtcgtgaa

SEQ ID NO: 31390 - DNA, 50 bp, synthetic construct
  source 1..50: mol_type = other DNA
gggggaagcgtaaaattcccccttaaaatttgaaatttactgctcaatcg

SEQ ID NO: 31391 - DNA, 50 bp, synthetic construct
  source 1..50: mol_type = other DNA
acaagaaaaagccgcttaccttttcaggaagccaaggggctttttgtggc

SEQ ID NO: 31392 - DNA, 50 bp, synthetic construct
  source 1..50: mol_type = other DNA
tatcagaatatggaggttaatttatatacattatatcgtatatttaaata

SEQ ID NO: 31393 - DNA, 50 bp, synthetic construct
  source 1..50: mol_type = other DNA
ttttaattttattacgagtaagtaataaatcgaatctaatgttattgaat

SEQ ID NO: 31394 - DNA, 50 bp, synthetic construct
  source 1..50: mol_type = other DNA
ggtgcgtcccgtgccaacccgttccgggcggggttcttcacgcgcgcacg

SEQ ID NO: 31395 - DNA, 50 bp, synthetic construct
  source 1..50: mol_type = other DNA
aagtggcccgccggtgcctccggcgcgccggccgcagcacctggccgccg

SEQ ID NO: 31396 - DNA, 50 bp, synthetic construct
  source 1..50: mol_type = other DNA
cgagcaccggcacccgctgtacgccggcgccgatgcggcctggtggctcg

SEQ ID NO: 31397 - DNA, 50 bp, synthetic construct
  source 1..50: mol_type = other DNA
ataagaagttaaaggaagtcttagatctgtacccctttttaatttaattg

SEQ ID NO: 31398 - DNA, 50 bp, synthetic construct
  source 1..50: mol_type = other DNA
tttaatacgctcttagacgctgcctagataaaatctaagacttcctttaa

SEQ ID NO: 31399 - DNA, 50 bp, synthetic construct
  source 1..50: mol_type = other DNA
cggaagaactggcacgaattgcactgttagcattggtgacgttggttttt

SEQ ID NO: 31400 - DNA, 50 bp, synthetic construct
  source 1..50: mol_type = other DNA
ctcgagggtacgacgtcatcggagttactggctgccggcgtacccatgac

SEQ ID NO: 31401 - DNA, 50 bp, synthetic construct
  source 1..50: mol_type = other DNA
tccagtttttcttttttctgcatcatgaaaattaaaacagactacaataa

SEQ ID NO: 31402 - DNA, 50 bp, synthetic construct
  source 1..50: mol_type = other DNA
tggttcatcatgagggcagcgcaagctgtcgttgagttgataaaactcgg

SEQ ID NO: 31403 - DNA, 50 bp, synthetic construct
  source 1..50: mol_type = other DNA
tcaagtatattgatcggtgagtgcttttacttctccggagataaatttgt

SEQ ID NO: 31404 - DNA, 50 bp, synthetic construct
  source 1..50: mol_type = other DNA
gaaaccctggacaatatcgtggccttcttaaacatatccctcactctttc

SEQ ID NO: 31405 - DNA, 50 bp, synthetic construct
  source 1..50: mol_type = other DNA
aaccttttttgcttgataatcatacaaataagtgccattacaacaaattg

SEQ ID NO: 31406 - DNA, 50 bp, synthetic construct
  source 1..50: mol_type = other DNA
gtgcatattattagccaccccggcaacccgaagtacccaatcgatattca

SEQ ID NO: 31407 - DNA, 50 bp, synthetic construct
  source 1..50: mol_type = other DNA
actcttaatgctgaaggtcaccagacctttgaagcttgcgcattagcggc

SEQ ID NO: 31408 - DNA, 50 bp, synthetic construct
  source 1..50: mol_type = other DNA
cccggtaacctcgtgttcaccgccgcgttggtcgcgtcgagatcgccgcc

SEQ ID NO: 31409 - DNA, 50 bp, synthetic construct
  source 1..50: mol_type = other DNA
actacgacgagccgcggcagtaccgcggcagcgccggcggtggccgtagc

SEQ ID NO: 31410 - DNA, 50 bp, synthetic construct
  source 1..50: mol_type = other DNA
gaggacaacccgctggccctgttgatagggctcgccggcggtgtgaaact

SEQ ID NO: 31411 - DNA, 50 bp, synthetic construct
  source 1..50: mol_type = other DNA
tcggggccgctggttctgataagtcgtaacgaaagcacccccggcccaat

SEQ ID NO: 31412 - DNA, 50 bp, synthetic construct
  source 1..50: mol_type = other DNA
gcaacatcgagacgacctacgcactggtgcgagcgtgcgggtgctgcgct

SEQ ID NO: 31413 - DNA, 50 bp, synthetic construct
  source 1..50: mol_type = other DNA
gccgtggctcacagaaccgccgttcgtctgcgcgatcggtgagccactgc

SEQ ID NO: 31414 - DNA, 50 bp, synthetic construct
  source 1..50: mol_type = other DNA
tcgtcgacggtcagcgcgtgcggacccgatgaggacggcaccgtcgacgg

SEQ ID NO: 31415 - DNA, 50 bp, synthetic construct
  source 1..50: mol_type = other DNA
gcgcgacgccgcactcgacggcaggtgtgcgcgggcgtgcgatttcgcag

SEQ ID NO: 31416 - DNA, 50 bp, synthetic construct
  source 1..50: mol_type = other DNA
ctcgctgcccgatctgcttccgctgcatcgtggacaagcctgccgaagag

SEQ ID NO: 31417 - DNA, 50 bp, synthetic construct
  source 1..50: mol_type = other DNA
agaagtttgtgttactcgcggtgggatgaccgtgaggtggagcaaccgcg

SEQ ID NO: 31418 - DNA, 50 bp, synthetic construct
  source 1..50: mol_type = other DNA
agtgggcgtgaccgtggtggccgtgctcggccaccttgctcaccaccacg

SEQ ID NO: 31419 - DNA, 50 bp, synthetic construct
  source 1..50: mol_type = other DNA
actacgacgagccgcggcagtaccgcggcggcgccggcggtggccgtagc

SEQ ID NO: 31420 - DNA, 50 bp, synthetic construct
  source 1..50: mol_type = other DNA
cgcactgacgatcgagtctccggtgatccgcagcggctgtctggagtgcc

SEQ ID NO: 31421 - DNA, 50 bp, synthetic construct
  source 1..50: mol_type = other DNA
atatacaatcgcattgattttaaatcgtttatttcaacgctcgtttaaaa

SEQ ID NO: 31422 - DNA, 50 bp, synthetic construct
  source 1..50: mol_type = other DNA
aaatcaaggtggagtcaagttcttgacagatcttgactaagtcagcattc

SEQ ID NO: 31423 - DNA, 50 bp, synthetic construct
  source 1..50: mol_type = other DNA
tgaagcgcctgtacgtgccggaatcgcatctggggcgtcgaggcgctggc

SEQ ID NO: 31424 - DNA, 50 bp, synthetic construct
  source 1..50: mol_type = other DNA
ccacgcagcggcattgagctcgtcggtacttcgccaatgcttctggtggt

SEQ ID NO: 31425 - DNA, 50 bp, synthetic construct
  source 1..50: mol_type = other DNA
gatggaatcccccaccacgccggagcttcgcgtggggtgaggatgccgcg

SEQ ID NO: 31426 - DNA, 50 bp, synthetic construct
  source 1..50: mol_type = other DNA
aattgtaaaacaggggagttcatagctttgttctcccgcagtttacggct

SEQ ID NO: 31427 - DNA, 50 bp, synthetic construct
  source 1..50: mol_type = other DNA
tattcattaataaatatccctatttaaatctggaaataaattagtgaatt

SEQ ID NO: 31428 - DNA, 50 bp, synthetic construct
  source 1..50: mol_type = other DNA
ttttttgtcatccaatataacattacagtaaaatattcactgatcaaaaa

SEQ ID NO: 31429 - DNA, 50 bp, synthetic construct
  source 1..50: mol_type = other DNA
agccgcgctcgcccgtcacacagaacagagtcacgtggtggaccgtgaca

SEQ ID NO: 31430 - DNA, 50 bp, synthetic construct
  source 1..50: mol_type = other DNA
tgccttcgctgaccctggtcggcctgctcctaccaggaaaagaaaatgac

SEQ ID NO: 31431 - DNA, 50 bp, synthetic construct
  source 1..50: mol_type = other DNA
caaataatactcaaaaccagtgagcctgccggtaacgcttgttttaccgt

SEQ ID NO: 31432 - DNA, 50 bp, synthetic construct
  source 1..50: mol_type = other DNA
tacactgagcccctttccatccggtttgtgcgggatgatgatggtttgga

SEQ ID NO: 31433 - DNA, 50 bp, synthetic construct
  source 1..50: mol_type = other DNA
tcgactttcgcaccctgagtttcggctaatgctacaatgccgaatagcta

SEQ ID NO: 31434 - DNA, 50 bp, synthetic construct
  source 1..50: mol_type = other DNA
ggcggtgggcgacgagaggcggaggctccggcgccggccaccgcaccgga

SEQ ID NO: 31435 - DNA, 50 bp, synthetic construct
  source 1..50: mol_type = other DNA
aaaaacatgcaaaaaggggaattaacgttttctattttttgcatcggtta

SEQ ID NO: 31436 - DNA, 50 bp, synthetic construct
  source 1..50: mol_type = other DNA
tagtccagatggaaaacttccaaaagattacctccttagcttagtaacta

SEQ ID NO: 31437 - DNA, 50 bp, synthetic construct
  source 1..50: mol_type = other DNA
gaaaagaaatgagtttgaaggggaaaccctatttaaaggattttctttta

SEQ ID NO: 31438 - DNA, 50 bp, synthetic construct
  source 1..50: mol_type = other DNA
acagactcagatttactatctaagcttgaagtcgcctcatctagcataag

SEQ ID NO: 31439 - DNA, 50 bp, synthetic construct
  source 1..50: mol_type = other DNA
actattttcaaaaatacggaaaacaacgctgccgtatttttggaaagaca

SEQ ID NO: 31440 - DNA, 50 bp, synthetic construct
  source 1..50: mol_type = other DNA
tcaatacaaacaccgacaatttcttatgtaattagacatgtttgtgaaaa

SEQ ID NO: 31441 - DNA, 50 bp, synthetic construct
  source 1..50: mol_type = other DNA
ttggtaatagattgccagtttactatagttacttttgaatctaatacatc

SEQ ID NO: 31442 - DNA, 50 bp, synthetic construct
  source 1..50: mol_type = other DNA
taaaagaaaaccctttaaatagggtttccccttcaaactcatttcttttc

SEQ ID NO: 31443 - DNA, 50 bp, synthetic construct
  source 1..50: mol_type = other DNA
aggtcattacttattgaacgtaacttttcaagaagtataagtaatgaata

SEQ ID NO: 31444 - DNA, 50 bp, synthetic construct
  source 1..50: mol_type = other DNA
gagaaggttattttttttatacatatgaaggaaaaagaacatttgttctt

SEQ ID NO: 31445 - DNA, 50 bp, synthetic construct
  source 1..50: mol_type = other DNA
ataaagatggtaattcaataacattaaagcaattgttctttcacatttaa

SEQ ID NO: 31446 - DNA, 50 bp, synthetic construct
  source 1..50: mol_type = other DNA
ttttttttatatatgcagaataggtatatattttttaagttcgaaacaaa

SEQ ID NO: 31447 - DNA, 50 bp, synthetic construct
  source 1..50: mol_type = other DNA
ttaatagattcttgttatttttcttgaattaaacttcttttatgtattaa

SEQ ID NO: 31448 - DNA, 50 bp, synthetic construct
  source 1..50: mol_type = other DNA
aagagatagtatttgctttagatgcaattctaaatcataattaaatagtc

SEQ ID NO: 31449 - DNA, 50 bp, synthetic construct
  source 1..50: mol_type = other DNA
acagactcagatttactatctaagcttgaagtcgcctcatctaacataag

SEQ ID NO: 31450 - DNA, 50 bp, synthetic construct
  source 1..50: mol_type = other DNA
aaagaacataaaaaaacttattaagctcgatgattttgaacttgtgcttt

SEQ ID NO: 31451 - DNA, 50 bp, synthetic construct
  source 1..50: mol_type = other DNA
gcatcctttgtagggagttattcactcgctttattaattacaaatcgcgt

SEQ ID NO: 31452 - DNA, 50 bp, synthetic construct
  source 1..50: mol_type = other DNA
gctcctttcaggagcttttttaacatgatccgattattccagaaagctta

SEQ ID NO: 31453 - DNA, 50 bp, synthetic construct
  source 1..50: mol_type = other DNA
cgctatatggaactgttggcaaaattatcacagaacagccggttgagctt

SEQ ID NO: 31454 - DNA, 50 bp, synthetic construct
  source 1..50: mol_type = other DNA
aacgatattatattacctttttttataaattataaaaattcaatgtagtt

SEQ ID NO: 31455 - DNA, 50 bp, synthetic construct
  source 1..50: mol_type = other DNA
tattacagtaaccaataaccaactaaagttggttattggttactgtaaga

SEQ ID NO: 31456 - DNA, 50 bp, synthetic construct
  source 1..50: mol_type = other DNA
caaaataaattttagaaatagctccagatgcattataaaaatcgattata

SEQ ID NO: 31457 - DNA, 50 bp, synthetic construct
  source 1..50: mol_type = other DNA
aaagaatttaataaaatggtgtaaagttttacctccttagtatattgtta

SEQ ID NO: 31458 - DNA, 50 bp, synthetic construct
  source 1..50: mol_type = other DNA
gcaataatttttttctccttatcaatggtttagaagaaaataattatatt

SEQ ID NO: 31459 - DNA, 50 bp, synthetic construct
  source 1..50: mol_type = other DNA
gtatacaggatttaaatttcgctgctgattataaataaaagcccttataa

SEQ ID NO: 31460 - DNA, 50 bp, synthetic construct
  source 1..50: mol_type = other DNA
acttgttttcaagaaacaagcagcttcctgatgaacacaaaaaaatatga

SEQ ID NO: 31461 - DNA, 50 bp, synthetic construct
  source 1..50: mol_type = other DNA
aggagaatcgacagttaagttcttttggttacatccctgctaattaaacc

SEQ ID NO: 31462 - DNA, 50 bp, synthetic construct
  source 1..50: mol_type = other DNA
aagattttaggactatcaaattcactatgatacgcccttccgaatgctga

SEQ ID NO: 31463 - DNA, 50 bp, synthetic construct
  source 1..50: mol_type = other DNA
caacatggtgacaacaaagaaggtgtttatgctttgtcgtcaccttgttg

SEQ ID NO: 31464 - DNA, 50 bp, synthetic construct
  source 1..50: mol_type = other DNA
aactaaatgactttgcataatttctttaaaaactttaaaggttgcggtgc

SEQ ID NO: 31465 - DNA, 50 bp, synthetic construct
  source 1..50: mol_type = other DNA
agcttattaatagtaaagagcaattagattagtattaattgtaataagaa

SEQ ID NO: 31466 - DNA, 50 bp, synthetic construct
  source 1..50: mol_type = other DNA
atatttcaataagggtaatacataatcaggtatttagatggttgcaatat

SEQ ID NO: 31467 - DNA, 50 bp, synthetic construct
  source 1..50: mol_type = other DNA
ggctcctcctctattcgttattctatagttattagtattacagaggataa

SEQ ID NO: 31468 - DNA, 50 bp, synthetic construct
  source 1..50: mol_type = other DNA
ataaggtttacaccaacaggatgatgtcaccttgttggtgtaattaggtt

SEQ ID NO: 31469 - DNA, 50 bp, synthetic construct
  source 1..50: mol_type = other DNA
taatactaataaaaagggggaatagctattcgtactttctaaacttaaca

SEQ ID NO: 31470 - DNA, 50 bp, synthetic construct
  source 1..50: mol_type = other DNA
ttttttttgatatacagaataggtactaatatatattatataggagtaag

SEQ ID NO: 31471 - DNA, 50 bp, synthetic construct
  source 1..50: mol_type = other DNA
acatttacttctttaatatttttactaaaaaaaataaccgtatctcattt

SEQ ID NO: 31472 - DNA, 50 bp, synthetic construct
  source 1..50: mol_type = other DNA
ttagatataaaacacttccttacaatgcataagtcctgtttgatatatat

SEQ ID NO: 31473 - DNA, 50 bp, synthetic construct
  source 1..50: mol_type = other DNA
cttctctctgaaaaattactttcatagaaaattaacatttgtgattttac

SEQ ID NO: 31474 - DNA, 50 bp, synthetic construct
  source 1..50: mol_type = other DNA
acgcataaggtttacaccaacatgatcttgttggtgtaattaggtttaca

SEQ ID NO: 31475 - DNA, 50 bp, synthetic construct
  source 1..50: mol_type = other DNA
attaatataattattttattctaaacctattcaaaaataattgaataggt

SEQ ID NO: 31476 - DNA, 50 bp, synthetic construct
  source 1..50: mol_type = other DNA
ttctgttagtaagtgcggaaagctgtttttttctttgatcgaaagtataa

SEQ ID NO: 31477 - DNA, 50 bp, synthetic construct
  source 1..50: mol_type = other DNA
tctttttttactcgttccttttttataaaaattcaatgtagttaagtaga

SEQ ID NO: 31478 - DNA, 50 bp, synthetic construct
  source 1..50: mol_type = other DNA
ctgatccgccatttgttttagctgaacagccaacacgacaggcttgccat

SEQ ID NO: 31479 - DNA, 50 bp, synthetic construct
  source 1..50: mol_type = other DNA
ttattacacttagtactatcctaaaagaaggaaaaagttaagaaagatac

SEQ ID NO: 31480 - DNA, 50 bp, synthetic construct
  source 1..50: mol_type = other DNA
agtattaggagcaatgaaagctattataagctttaatgatgaatatagaa

SEQ ID NO: 31481 - DNA, 50 bp, synthetic construct
  source 1..50: mol_type = other DNA
aaagaaaaagtaggcacttttcttatacgaaaagtaagtgtcataaatta

SEQ ID NO: 31482 - DNA, 50 bp, synthetic construct
  source 1..50: mol_type = other DNA
ttagtttttttctattatttatctatggaaaacttaaagaaagaaattaa

SEQ ID NO: 31483 - DNA, 50 bp, synthetic construct
  source 1..50: mol_type = other DNA
cttatttaatcactatatttatatttctagtggcgaccgtataaaattct

SEQ ID NO: 31484 - DNA, 50 bp, synthetic construct
  source 1..50: mol_type = other DNA
tataatcgatttttataatgcatctggagctatttctaaaatttattttg

SEQ ID NO: 31485 - DNA, 50 bp, synthetic construct
  source 1..50: mol_type = other DNA
aattgaaaaagcccaattaaagggctcccattaataatcctttggctaaa

SEQ ID NO: 31486 - DNA, 50 bp, synthetic construct
  source 1..50: mol_type = other DNA
agcccgaaatgaatacataaaataattattatttggattggtatgtattt

SEQ ID NO: 31487 - DNA, 50 bp, synthetic construct
  source 1..50: mol_type = other DNA
aaaaaagatattatagatgataggaaatccgaatctataagaagtatttt

SEQ ID NO: 31488 - DNA, 50 bp, synthetic construct
  source 1..50: mol_type = other DNA
ttctagggtttttacaatcatcatttatggtgattgaaaatccaaatgca

SEQ ID NO: 31489 - DNA, 50 bp, synthetic construct
  source 1..50: mol_type = other DNA
gctcttggccttaatggtgtaaaccttatgcgtttaatggcgacaaaaca

SEQ ID NO: 31490 - DNA, 50 bp, synthetic construct
  source 1..50: mol_type = other DNA
gttaataatttatctctttttggcaacataaaaatgattatatgttaaac

SEQ ID NO: 31491 - DNA, 50 bp, synthetic construct
  source 1..50: mol_type = other DNA
tctacttaactacattgaatttttataaaaaaggaacgagtaaaaaaaga

SEQ ID NO: 31492 - DNA, 50 bp, synthetic construct
  source 1..50: mol_type = other DNA
aggataaggtttcaccatttatggtgtcataaattataaaaaataattaa

SEQ ID NO: 31493 - DNA, 50 bp, synthetic construct
  source 1..50: mol_type = other DNA
ccagttgtgttagctgtttcaacaaataatgaaacatttacaacaacact

SEQ ID NO: 31494 - DNA, 50 bp, synthetic construct
  source 1..50: mol_type = other DNA
tgttttctccttttcatatgcaaaatttattatatgaaaagcagataaat

SEQ ID NO: 31495 - DNA, 50 bp, synthetic construct
  source 1..50: mol_type = other DNA
ttctctaaatttcttttcgtataaatttaagttatccataattagtacct

SEQ ID NO: 31496 - DNA, 50 bp, synthetic construct
  source 1..50: mol_type = other DNA
agtgttgttgtaaatgtttcattatttgttgaaacagctaacacaactgg

SEQ ID NO: 31497 - DNA, 50 bp, synthetic construct
  source 1..50: mol_type = other DNA
gagttttatactttcgatcaaagaaattaatgatatagttgattaaactc

SEQ ID NO: 31498 - DNA, 50 bp, synthetic construct
  source 1..50: mol_type = other DNA
tgccgacagcctatatagacaaaaatttttgtccctataagcataccgca

SEQ ID NO: 31499 - DNA, 50 bp, synthetic construct
  source 1..50: mol_type = other DNA
gcaaaagcgacgctaagaaatggcaagccattctataggattaagtttta

SEQ ID NO: 31500 - DNA, 50 bp, synthetic construct
  source 1..50: mol_type = other DNA
cctaaaaattctttttgacctgtaaaaacctttcaaatcgtttttatacc

SEQ ID NO: 31501 - DNA, 50 bp, synthetic construct
  source 1..50: mol_type = other DNA
caaaaataattctttaatacaattatatttctattaattggttccatttc

SEQ ID NO: 31502 - DNA, 50 bp, synthetic construct
  source 1..50: mol_type = other DNA
aaatggggtaaatctaattacaccaatatcaaagtagaacttttccattt

SEQ ID NO: 31503 - DNA, 50 bp, synthetic construct
  source 1..50: mol_type = other DNA
ggccagtctctaatattactaataatttttagtaaggtatcaaactgacc

SEQ ID NO: 31504 - DNA, 50 bp, synthetic construct
  source 1..50: mol_type = other DNA
aagcggtaaatacatttaatccagaacctccttatttgtatttattatat

SEQ ID NO: 31505 - DNA, 50 bp, synthetic construct
  source 1..50: mol_type = other DNA
tttcttctagactatttaaaaatatctaatttcaaatccaaataaagaaa

SEQ ID NO: 31506 - DNA, 50 bp, synthetic construct
  source 1..50: mol_type = other DNA
atattattggttttcgaacggccttaataaatttccatattcaattgtaa

SEQ ID NO: 31507 - DNA, 50 bp, synthetic construct
  source 1..50: mol_type = other DNA
cttttatttataatcacttcttttgcaaaaacgaaaagaagtaaaacgtc

SEQ ID NO: 31508 - DNA, 50 bp, synthetic construct
  source 1..50: mol_type = other DNA
agtaaaaacctatgtaaacttatacatttatttttgtgattgttttcaaa

SEQ ID NO: 31509 - DNA, 50 bp, synthetic construct
  source 1..50: mol_type = other DNA
tattttttcaaatgaaaaagtttctagaaacctcctcatttataaaatta

SEQ ID NO: 31510 - DNA, 50 bp, synthetic construct
  source 1..50: mol_type = other DNA
tattgcgccggcgcgcactagcgaattgttatatgcagcggcccgcattg

SEQ ID NO: 31511 - DNA, 50 bp, synthetic construct
  source 1..50: mol_type = other DNA
gcgatgaacgcgatgtgcctccaaccctgctgtttgatcgcgtgaatcgc

SEQ ID NO: 31512 - DNA, 50 bp, synthetic construct
  source 1..50: mol_type = other DNA
atgccatgcatatcggtcgcaaactagtttgcgatagatatgcatatcaa

SEQ ID NO: 31513 - DNA, 50 bp, synthetic construct
  source 1..50: mol_type = other DNA
tttcaatttattttcagatgcgagtttaaccacactttaataacattttc

SEQ ID NO: 31514 - DNA, 50 bp, synthetic construct
  source 1..50: mol_type = other DNA
ttgttataggaagagtttaaatacattcgagaaattactaaaaagaaatc

SEQ ID NO: 31515 - DNA, 50 bp, synthetic construct
  source 1..50: mol_type = other DNA
aaaactgaatacaagacactaaaaaattttagtatcttgcatttgattgc

SEQ ID NO: 31516 - DNA, 50 bp, synthetic construct
  source 1..50: mol_type = other DNA
aaaaaggcgatttctttttagtaatttcggtaaaaagaaaagcccggagg

SEQ ID NO: 31517 - DNA, 50 bp, synthetic construct
  source 1..50: mol_type = other DNA
attaagcacaaataaacatttttgttttaatatgtttttggctggctctt

SEQ ID NO: 31518 - DNA, 50 bp, synthetic construct
  source 1..50: mol_type = other DNA
atgctatcacaaattggctgattaaagcacatagtgcttttctccttcat

SEQ ID NO: 31519 - DNA, 50 bp, synthetic construct
  source 1..50: mol_type = other DNA
cattttctgtttcaatggagtttaatataattccattgatgagatggata

SEQ ID NO: 31520 - DNA, 50 bp, synthetic construct
  source 1..50: mol_type = other DNA
gtttgcctgaaaaaccgaagtgacttgtaagggctgtttttcaagagtat

SEQ ID NO: 31521 - DNA, 50 bp, synthetic construct
  source 1..50: mol_type = other DNA
attaaggaacggtctgattcttgatatcagggatatgaaaaaaatcacct

SEQ ID NO: 31522 - DNA, 50 bp, synthetic construct
  source 1..50: mol_type = other DNA
aaggcttatagaaaaaataactataatgccatattctttttcaaagtctt

SEQ ID NO: 31523 - DNA, 50 bp, synthetic construct
  source 1..50: mol_type = other DNA
catcgtcaaaacagcggcatcttcaaaaagttgccggtgttttttcgtgc

SEQ ID NO: 31524 - DNA, 50 bp, synthetic construct
  source 1..50: mol_type = other DNA
cggctggcacaaggcccttgtccgggcaagcaacggaaagttggcagtga

SEQ ID NO: 31525 - DNA, 50 bp, synthetic construct
  source 1..50: mol_type = other DNA
ttattcaagtaaatatggagtaatgcatgaatctataattgatgaaataa

SEQ ID NO: 31526 - DNA, 50 bp, synthetic construct
  source 1..50: mol_type = other DNA
cgaggcagacgaggattgatcgaacgtgagatcaatgaccgtctttggcg

SEQ ID NO: 31527 - DNA, 50 bp, synthetic construct
  source 1..50: mol_type = other DNA
ttaagaccggcgaggtaatggtggtttgaggcttacctttccggtctttc

SEQ ID NO: 31528 - DNA, 50 bp, synthetic construct
  source 1..50: mol_type = other DNA
tatttttatcttaataaaaattacttgtaaaattaattgcccaaacataa

SEQ ID NO: 31529 - DNA, 50 bp, synthetic construct
  source 1..50: mol_type = other DNA
ggccataatctgctgacgttgtgctagcacaatttcctgatggttggccc

SEQ ID NO: 31530 - DNA, 50 bp, synthetic construct
  source 1..50: mol_type = other DNA
atgcagatagcggttttacgcccggagcagcgtaaggctgtggcttgcag

SEQ ID NO: 31531 - DNA, 50 bp, synthetic construct
  source 1..50: mol_type = other DNA
tgtgattgcacaaaaagaaagcagatggattttcaaattgttgtatctgc

SEQ ID NO: 31532 - DNA, 50 bp, synthetic construct
  source 1..50: mol_type = other DNA
ttgccgtcctctatgcgatatccgtaaggatatcgcaggatggaaatata

SEQ ID NO: 31533 - DNA, 50 bp, synthetic construct
  source 1..50: mol_type = other DNA
ttcgaatgataaccggattcgttcctcactaagctatagacatattcggc

SEQ ID NO: 31534 - DNA, 50 bp, synthetic construct
  source 1..50: mol_type = other DNA
ctgttctgcttctttttcatcaatcaccgaatgaccgttgaccagaacct

SEQ ID NO: 31535 - DNA, 50 bp, synthetic construct
  source 1..50: mol_type = other DNA
gtccggcatgtggatatatagtttattcagttaatatccacgggttcgac

SEQ ID NO: 31536 - DNA, 50 bp, synthetic construct
  source 1..50: mol_type = other DNA
gttgaaccagtgacgacttatcgctttatttaagtcatcaatttccttaa

SEQ ID NO: 31537 - DNA, 50 bp, synthetic construct
  source 1..50: mol_type = other DNA
ataggtttttctgtgtaattctgtagccgttcttcagcaaacggttccat

SEQ ID NO: 31538 - DNA, 50 bp, synthetic construct
  source 1..50: mol_type = other DNA
atgttgtagcaggtttttattgtgtcatcaataggtgattgctccataag

SEQ ID NO: 31539 - DNA, 50 bp, synthetic construct
  source 1..50: mol_type = other DNA
ttaaattaataatttagaggaaagaatttgcattcataatactaaatctt

SEQ ID NO: 31540 - DNA, 50 bp, synthetic construct
  source 1..50: mol_type = other DNA
agacgcggggtggagcagttggcagctggtggtcgaggacacctacggcc

SEQ ID NO: 31541 - DNA, 50 bp, synthetic construct
  source 1..50: mol_type = other DNA
agttttgcaaattagcgcaaagaaatttcacggcagctaatcagggaata

SEQ ID NO: 31542 - DNA, 50 bp, synthetic construct
  source 1..50: mol_type = other DNA
tggatttgatgcttatgtcacaaggaaagcctccaaacttatcatataaa

SEQ ID NO: 31543 - DNA, 50 bp, synthetic construct
  source 1..50: mol_type = other DNA
cttcgtgtagtttataccgcgggattgtggcaggtatggatttttgtttt

SEQ ID NO: 31544 - DNA, 50 bp, synthetic construct
  source 1..50: mol_type = other DNA
tgcttcaaagatggctcggaggtcactacgcaaagtcagcaagacaaggc

SEQ ID NO: 31545 - DNA, 50 bp, synthetic construct
  source 1..50: mol_type = other DNA
ctcaatgctgacggaatcccctctcctcgagcgcggccctcacgggatag

SEQ ID NO: 31546 - DNA, 50 bp, synthetic construct
  source 1..50: mol_type = other DNA
ataagtacatattattatagtgacaagaatctattcaagcaacgttatat

SEQ ID NO: 31547 - DNA, 50 bp, synthetic construct
  source 1..50: mol_type = other DNA
ttgtgtatgtttttttcatttaaatgtttcataaaaagaaacatgtccca

SEQ ID NO: 31548 - DNA, 50 bp, synthetic construct
  source 1..50: mol_type = other DNA
tctcaatattttataaaataaaaagctttttgctttgtaaatcacttttt

SEQ ID NO: 31549 - DNA, 50 bp, synthetic construct
  source 1..50: mol_type = other DNA
tctttgcgcgtcgagcatcgccgggctggtcaggtttcgattagcaatgg

SEQ ID NO: 31550 - DNA, 50 bp, synthetic construct
  source 1..50: mol_type = other DNA
gtgaactctacgacaaatcagccttaagtctgaatagtccagcttccaag

SEQ ID NO: 31551 - DNA, 50 bp, synthetic construct
  source 1..50: mol_type = other DNA
tctttctttactttttcctttttaattaataaaagaaaggcctcttaagg

SEQ ID NO: 31552 - DNA, 50 bp, synthetic construct
  source 1..50: mol_type = other DNA
tccccaaactattgaaactggttatatttccaattgaaaccgggatcggg

SEQ ID NO: 31553 - DNA, 50 bp, synthetic construct
  source 1..50: mol_type = other DNA
taaagtaaatttttgtacaaaaaaatttttttagactgaaaataagaata

SEQ ID NO: 31554 - DNA, 50 bp, synthetic construct
  source 1..50: mol_type = other DNA
tttaattatagcattatcttctccttttatttaatctgtttctaattgca

SEQ ID NO: 31555 - DNA, 50 bp, synthetic construct
  source 1..50: mol_type = other DNA
attgtttacttctgttagttgttttaaaacaaaaaggtcgtaaaaatcat

SEQ ID NO: 31556 - DNA, 50 bp, synthetic construct
  source 1..50: mol_type = other DNA
ctcgcgggacacccagacggccttggcttgctcaacggctggtcccggat

SEQ ID NO: 31557 - DNA, 50 bp, synthetic construct
  source 1..50: mol_type = other DNA
gatatttagaaaatcactttgtgcaaagctccagttatttctctatattc

SEQ ID NO: 31558 - DNA, 50 bp, synthetic construct
  source 1..50: mol_type = other DNA
aaatattttagaaaggaacgaatgatatttcaaggtaaaacaaacaattt

SEQ ID NO: 31559 - DNA, 50 bp, synthetic construct
  source 1..50: mol_type = other DNA
tacgaaatacccgaaagatacgcaaaagcatatctttcaggtctttcctt

SEQ ID NO: 31560 - DNA, 50 bp, synthetic construct
  source 1..50: mol_type = other DNA
ttattagtggcaaaacaattagaacttgctaattatatgatgcataataa

SEQ ID NO: 31561 - DNA, 50 bp, synthetic construct
  source 1..50: mol_type = other DNA
ttcatctacagacctatattattttaaattaattaaaagaagtatatgcc

SEQ ID NO: 31562 - DNA, 50 bp, synthetic construct
  source 1..50: mol_type = other DNA
aatattttagcgtattttgctcttaaggaacaaaaatattgacaaaaatc

SEQ ID NO: 31563 - DNA, 50 bp, synthetic construct
  source 1..50: mol_type = other DNA
ataaaagcaatcgtggatgccacaaaccggaggtatgcgattgctttttt

SEQ ID NO: 31564 - DNA, 50 bp, synthetic construct
  source 1..50: mol_type = other DNA
gcggacttttagtgctatttactcttgagtaaacaagtattgactaccta

SEQ ID NO: 31565 - DNA, 50 bp, synthetic construct
  source 1..50: mol_type = other DNA
ttccttgatgccttggggtttgtcattaaaaactcctttacattaagtct

SEQ ID NO: 31566 - DNA, 50 bp, synthetic construct
  source 1..50: mol_type = other DNA
gtttctttgttcctcttccaaacataagttgcacagcggacgccctgcat

SEQ ID NO: 31567 - DNA, 50 bp, synthetic construct
  source 1..50: mol_type = other DNA
accggtggtcaatttgatcaagtgttcactttcgataatgctgtacaagt

SEQ ID NO: 31568 - DNA, 50 bp, synthetic construct
  source 1..50: mol_type = other DNA
gctgaatttggtatttttattactaaggtatcaatgtcttcaaattcagt

SEQ ID NO: 31569 - DNA, 50 bp, synthetic construct
  source 1..50: mol_type = other DNA
cgttcaggatagatacttttattgtacataccaaggcggctaagcgagca

SEQ ID NO: 31570 - DNA, 50 bp, synthetic construct
  source 1..50: mol_type = other DNA
gctttgaagaagtattctgtgaacccaattacagaacgattcttcaaaag

SEQ ID NO: 31571 - DNA, 50 bp, synthetic construct
  source 1..50: mol_type = other DNA
taattgggttgctttttgaataatgctacaatgccgaatagctacaatac

SEQ ID NO: 31572 - DNA, 50 bp, synthetic construct
  source 1..50: mol_type = other DNA
gaaaaatcatatatgtttaaacaaatcggaggtatgctatagcttttttc

SEQ ID NO: 31573 - DNA, 50 bp, synthetic construct
  source 1..50: mol_type = other DNA
agttataggaatttttcttaaattatcattgaggaagaattatgggaact

SEQ ID NO: 31574 - DNA, 50 bp, synthetic construct
  source 1..50: mol_type = other DNA
aaatagattgaatgacaaaaagtacccatgcgccgtcattctttaccatt

SEQ ID NO: 31575 - DNA, 50 bp, synthetic construct
  source 1..50: mol_type = other DNA
gaaaaaaatgatgacattcttgaaaatccctgcttgccctcattgtcatc

SEQ ID NO: 31576 - DNA, 50 bp, synthetic construct
  source 1..50: mol_type = other DNA
aagaaaaaagcattaaaaagctgttttgtaacttttcgaggaaatttctt

SEQ ID NO: 31577 - DNA, 50 bp, synthetic construct
  source 1..50: mol_type = other DNA
cttgaaatgatagtccaaacttaaatccaagtgcgcgtgttcttagcaat

SEQ ID NO: 31578 - DNA, 50 bp, synthetic construct
  source 1..50: mol_type = other DNA
tcaatatattttcattgattaacttgatatcatgcggcaaaattttttca

SEQ ID NO: 31579 - DNA, 50 bp, synthetic construct
  source 1..50: mol_type = other DNA
ttgcttcaccaatctgacgttctaagacaaaagtaaatcaggtgaagtgg

SEQ ID NO: 31580 - DNA, 50 bp, synthetic construct
  source 1..50: mol_type = other DNA
gtgaaagatgatttttggcaatcagatgcttcatccgaatcatctaccaa

SEQ ID NO: 31581 - DNA, 50 bp, synthetic construct
  source 1..50: mol_type = other DNA
ataagtggataaaataccttttttataaataagttaagttaattgagtat

SEQ ID NO: 31582 - DNA, 50 bp, synthetic construct
  source 1..50: mol_type = other DNA
acaaagaaagtaaacaagaagatagtgatcctcttaatctttttctataa

SEQ ID NO: 31583 - DNA, 50 bp, synthetic construct
  source 1..50: mol_type = other DNA
aacgtatgttaacaataaaattcttcctaaatattaaaataaatattgtt

SEQ ID NO: 31584 - DNA, 50 bp, synthetic construct
  source 1..50: mol_type = other DNA
atagatcaaccttggctgccaatagctatgatctgcccattgcgattggc

SEQ ID NO: 31585 - DNA, 50 bp, synthetic construct
  source 1..50: mol_type = other DNA
attttttggtctttcaaataaaaaattatataactccaagagtaaactgg

SEQ ID NO: 31586 - DNA, 50 bp, synthetic construct
  source 1..50: mol_type = other DNA
aatgataatcaattgcatgggagtttgataccctgcaataaccaatcacc

SEQ ID NO: 31587 - DNA, 50 bp, synthetic construct
  source 1..50: mol_type = other DNA
atgcgcagctgggtgaggatgcgttcgcgcggtggggccatcctgctcag

SEQ ID NO: 31588 - DNA, 50 bp, synthetic construct
  source 1..50: mol_type = other DNA
ttaccctaaaagaatatcagaacttatcttcaaatatttttctaggatca

SEQ ID NO: 31589 - DNA, 50 bp, synthetic construct
  source 1..50: mol_type = other DNA
aagtgtatttaaattatagcaaaatattttactataatttgaataaacct

SEQ ID NO: 31590 - DNA, 50 bp, synthetic construct
  source 1..50: mol_type = other DNA
aataatttataattcttgttcagtttatataacatgttttatattttttt

SEQ ID NO: 31591 - DNA, 50 bp, synthetic construct
  source 1..50: mol_type = other DNA
ttaaaataagatgtttaaaaattccataattattgatttagatattctaa

SEQ ID NO: 31592 - DNA, 50 bp, synthetic construct
  source 1..50: mol_type = other DNA
taattgaagtttgcttttcttgcatatagatgaaaaagaaggttcatggt

SEQ ID NO: 31593 - DNA, 50 bp, synthetic construct
  source 1..50: mol_type = other DNA
ataaattaaaagatattattcaagatcttgaataaatttttttgattata

SEQ ID NO: 31594 - DNA, 50 bp, synthetic construct
  source 1..50: mol_type = other DNA
agaaatatgagccgataatcccgtcagctcctgaacatgtattaaattga

SEQ ID NO: 31595 - DNA, 50 bp, synthetic construct
  source 1..50: mol_type = other DNA
gatattctagtaattgataaacctactgcattagctgtaactccacatac

SEQ ID NO: 31596 - DNA, 50 bp, synthetic construct
  source 1..50: mol_type = other DNA
catcaagttgtcctttaactattgttaacaggttcattgaaccgttgatg

SEQ ID NO: 31597 - DNA, 50 bp, synthetic construct
  source 1..50: mol_type = other DNA
tttttcttcttgaccagattttatttcgtcagtgtggtatgttagctctg

SEQ ID NO: 31598 - DNA, 50 bp, synthetic construct
  source 1..50: mol_type = other DNA
caaaaatgcaaaaaaaggctataaccataaattcttttttgccatttact

SEQ ID NO: 31599 - DNA, 50 bp, synthetic construct
  source 1..50: mol_type = other DNA
aagaagcaatagaaataagaaaagattttttcttttttactatgagagat

SEQ ID NO: 31600 - DNA, 50 bp, synthetic construct
  source 1..50: mol_type = other DNA
ttttataaattattttgcgaaacattcgtttctatcttgaatttaaaaat

SEQ ID NO: 31601 - DNA, 50 bp, synthetic construct
  source 1..50: mol_type = other DNA
gtaaatggcggtatgctcacaagtaagaatgtgagcatttgaaatgttac

SEQ ID NO: 31602 - DNA, 50 bp, synthetic construct
  source 1..50: mol_type = other DNA
cgccggcgaacagcgcctttccgcaacaaagaaggttcgatctgccgcag

SEQ ID NO: 31603 - DNA, 50 bp, synthetic construct
  source 1..50: mol_type = other DNA
ccaggttggcgagcaggtcgtgatgatcgtatccccgctcgccttgttgg

SEQ ID NO: 31604 - DNA, 50 bp, synthetic construct
  source 1..50: mol_type = other DNA
aaatttgtttccaaatttacttagtaacaagaagtttttctaacaaatgc

SEQ ID NO: 31605 - DNA, 50 bp, synthetic construct
  source 1..50: mol_type = other DNA
tgcagcacaacttctggataggccagcgcggtgcacgaagtggtgccgcc

SEQ ID NO: 31606 - DNA, 50 bp, synthetic construct
  source 1..50: mol_type = other DNA
gataaagagtgggttgatattaatattgcaagttgttatttgcctttatt

SEQ ID NO: 31607 - DNA, 50 bp, synthetic construct
  source 1..50: mol_type = other DNA
taattctttgattgaatgaataccaacgtaagcattatgtgcaatcctac

SEQ ID NO: 31608 - DNA, 50 bp, synthetic construct
  source 1..50: mol_type = other DNA
attgcagcgatagataactcgtctgtaatcgagtaatcaatagaattaaa

SEQ ID NO: 31609 - DNA, 50 bp, synthetic construct
  source 1..50: mol_type = other DNA
tcctccttatatttttgtacatattctattttatcaagttataaggccat

SEQ ID NO: 31610 - DNA, 50 bp, synthetic construct
  source 1..50: mol_type = other DNA
gactcattgtgcttataagatgttgcaaccaataccaaaaaacgtgatgc

SEQ ID NO: 31611 - DNA, 50 bp, synthetic construct
  source 1..50: mol_type = other DNA
attctagatagtggacgaatatttgaaaataatttgaatttcgatattta

SEQ ID NO: 31612 - DNA, 50 bp, synthetic construct
  source 1..50: mol_type = other DNA
tcttccgttatcgattctacacgcgcttcattggtcacgctattaaaaga

SEQ ID NO: 31613 - DNA, 50 bp, synthetic construct
  source 1..50: mol_type = other DNA
gataccctggcatagcctgccactcgactggacttttctaagtgggtacc

SEQ ID NO: 31614 - DNA, 50 bp, synthetic construct
  source 1..50: mol_type = other DNA
aaaaagaaagctttcaccctggttgaaatgttagtcgttttgggcattat

SEQ ID NO: 31615 - DNA, 50 bp, synthetic construct
  source 1..50: mol_type = other DNA
aaaacccaaaagggcataaaaatccccatttttatgcctttctattactg

SEQ ID NO: 31616 - DNA, 50 bp, synthetic construct
  source 1..50: mol_type = other DNA
tttgttttccgcaattagtgcagtttatgccacagttcatggaatacaaa

SEQ ID NO: 31617 - DNA, 50 bp, synthetic construct
  source 1..50: mol_type = other DNA
tggcataaatttatcaggtcgaattaaagtcaatagaacaattaatgtat

SEQ ID NO: 31618 - DNA, 50 bp, synthetic construct
  source 1..50: mol_type = other DNA
gaaaagtattacagttattccggccagaaagggtaactgaaatggttttc

SEQ ID NO: 31619 - DNA, 50 bp, synthetic construct
  source 1..50: mol_type = other DNA
aaaataatattaaacacatcgagtatggtcactgtaattagtttaatttt

SEQ ID NO: 31620 - DNA, 50 bp, synthetic construct
  source 1..50: mol_type = other DNA
gttctcgcttagtagctctaatgccttgattttcttcctgaactgatgaa

SEQ ID NO: 31621 - DNA, 50 bp, synthetic construct
  source 1..50: mol_type = other DNA
gcatcacgttttttggtattagttgcaacatcttataagcacaatgagtc

SEQ ID NO: 31622 - DNA, 50 bp, synthetic construct
  source 1..50: mol_type = other DNA
ggcgaccttgccccggccgcttgcccggaagccatcgacttatcaacgcc

SEQ ID NO: 31623 - DNA, 50 bp, synthetic construct
  source 1..50: mol_type = other DNA
tgagggtgagattaaagagattaaagctaaacactttaaggggtacatct

SEQ ID NO: 31624 - DNA, 50 bp, synthetic construct
  source 1..50: mol_type = other DNA
gggtattttgggttcccgaagcgttttacgctcggattgcccggatgact

SEQ ID NO: 31625 - DNA, 50 bp, synthetic construct
  source 1..50: mol_type = other DNA
atgggattaattggaacaaaaaagagattttttcttcatcgaaatcattg

SEQ ID NO: 31626 - DNA, 50 bp, synthetic construct
  source 1..50: mol_type = other DNA
caaggttcaggctgtcgtccgagcctccgtttccgacagccagccccact

SEQ ID NO: 31627 - DNA, 50 bp, synthetic construct
  source 1..50: mol_type = other DNA
atttctaggctcccttgtcaatttgcaacatgatgatattggctaaaaag

SEQ ID NO: 31628 - DNA, 50 bp, synthetic construct
  source 1..50: mol_type = other DNA
gactggctacaaacctggggccgtttgggggtaacccaccgttatattcg

SEQ ID NO: 31629 - DNA, 50 bp, synthetic construct
  source 1..50: mol_type = other DNA
tagatgggcgcgattgttgccagacatcgggcagaaaccgttggcatcta

SEQ ID NO: 31630 - DNA, 50 bp, synthetic construct
  source 1..50: mol_type = other DNA
tacgcgcggcggcgaggaggtgctgcaccaccgtgtcgccgccgtgtcgc

SEQ ID NO: 31631 - DNA, 50 bp, synthetic construct
  source 1..50: mol_type = other DNA
cgcgctcgacctgaacgcccgcgggagcatccgctggcatatccaggagc

SEQ ID NO: 31632 - DNA, 50 bp, synthetic construct
  source 1..50: mol_type = other DNA
gagctgtgctggatcgattggcacgaatgccaatcgcacacccggttttc

SEQ ID NO: 31633 - DNA, 50 bp, synthetic construct
  source 1..50: mol_type = other DNA
gcaaaactaactggaaagaaatattaaattctatgttcagatcggtgatg

SEQ ID NO: 31634 - DNA, 50 bp, synthetic construct
  source 1..50: mol_type = other DNA
taaacgttgtcctgcatggcttaagcgcctttgaagcttgctcattagcg

SEQ ID NO: 31635 - DNA, 50 bp, synthetic construct
  source 1..50: mol_type = other DNA
gattattgctcggaggccagggtaattcttttgaatatacaacaataatc

SEQ ID NO: 31636 - DNA, 50 bp, synthetic construct
  source 1..50: mol_type = other DNA
tatcgtgaccggaagttatttgggaaataaaagcactcaccgatcaatat

SEQ ID NO: 31637 - DNA, 50 bp, synthetic construct
  source 1..50: mol_type = other DNA
agaggatatgttcccaacatgttgtattgtcatttgccctgaacagggct

SEQ ID NO: 31638 - DNA, 50 bp, synthetic construct
  source 1..50: mol_type = other DNA
tgccccattcagtttccgccattcatagatgccgaaaattgagttgagct

SEQ ID NO: 31639 - DNA, 50 bp, synthetic construct
  source 1..50: mol_type = other DNA
aagtggcaaaagaggataagcgtaccccaccaccaccagcatttccatta

SEQ ID NO: 31640 - DNA, 50 bp, synthetic construct
  source 1..50: mol_type = other DNA
gctgaaattggcatcccgaatcacgaatcgaccgggaacccaaaccgaaa

SEQ ID NO: 31641 - DNA, 50 bp, synthetic construct
  source 1..50: mol_type = other DNA
tttttgtacaatcagttgctcacaatacccgtacacaatttgtacgggag

SEQ ID NO: 31642 - DNA, 50 bp, synthetic construct
  source 1..50: mol_type = other DNA
ccataacgtttataagttcatctttatgcatggtcttaacaaagacatca

SEQ ID NO: 31643 - DNA, 50 bp, synthetic construct
  source 1..50: mol_type = other DNA
aatgatcggcttgccagcgtcagcggtgaggcgttggcgcgcctcacccc

SEQ ID NO: 31644 - DNA, 50 bp, synthetic construct
  source 1..50: mol_type = other DNA
agttgcgtgatgatttgttcggaatcgatcgccggccggatcacgcttcc

SEQ ID NO: 31645 - DNA, 50 bp, synthetic construct
  source 1..50: mol_type = other DNA
caaaataatgaagggtgagctttaatgaaatatgcccaagcaagaatttt

SEQ ID NO: 31646 - DNA, 50 bp, synthetic construct
  source 1..50: mol_type = other DNA
ttattttgttgttttcgtattcaatgataaagaagaaagaaacaacttac

SEQ ID NO: 31647 - DNA, 50 bp, synthetic construct
  source 1..50: mol_type = other DNA
taaacatagtatatcagcttattcgcgaaagcttggaagaatccaactta

SEQ ID NO: 31648 - DNA, 50 bp, synthetic construct
  source 1..50: mol_type = other DNA
tttttacttcttctatctacctatttttaggtgattgaaaaacaaaagca

SEQ ID NO: 31649 - DNA, 50 bp, synthetic construct
  source 1..50: mol_type = other DNA
ttgttgataagattatatacatattattaaatatataattaaaaatacag

SEQ ID NO: 31650 - DNA, 50 bp, synthetic construct
  source 1..50: mol_type = other DNA
gggataaatttggaagaattcaacttgttgaattctgcctctgttattaa

SEQ ID NO: 31651 - DNA, 50 bp, synthetic construct
  source 1..50: mol_type = other DNA
tgaattcgttgatatataagggtttcatatatttaaattcaacgaacaag

SEQ ID NO: 31652 - DNA, 50 bp, synthetic construct
  source 1..50: mol_type = other DNA
tgtatttattttcataatgacctccggtctatgataataaactaactatt

SEQ ID NO: 31653 - DNA, 50 bp, synthetic construct
  source 1..50: mol_type = other DNA
aaaattcgctcggccgcgaaagggcgccgtgcagcggacaagcaattgac

SEQ ID NO: 31654 - DNA, 50 bp, synthetic construct
  source 1..50: mol_type = other DNA
tgaccaccccaaacccatcgaaacaaacacctgacggctttcgcagttca

SEQ ID NO: 31655 - DNA, 50 bp, synthetic construct
  source 1..50: mol_type = other DNA
acttaccgcgtgcaaaagaattgcgtgcatattggctggatggcgtaaaa

SEQ ID NO: 31656 - DNA, 50 bp, synthetic construct
  source 1..50: mol_type = other DNA
gaactcgaaaaaaggctattttatcaattaaatgttagattttcaaagca

SEQ ID NO: 31657 - DNA, 50 bp, synthetic construct
  source 1..50: mol_type = other DNA
tattgccttccccaaagatatgaattttcctatcttcgggtagtgacata

SEQ ID NO: 31658 - DNA, 50 bp, synthetic construct
  source 1..50: mol_type = other DNA
attatgcccagaatcacttgatatatcaaaaccttgattgcggacatttc

SEQ ID NO: 31659 - DNA, 50 bp, synthetic construct
  source 1..50: mol_type = other DNA
ttacaaatcaatttaaaaaggatttgcatcatctcaagaatgattccatc

SEQ ID NO: 31660 - DNA, 50 bp, synthetic construct
  source 1..50: mol_type = other DNA
cctcatcgttattcattttgttgatacaaaaaagggcacctgcgatgagg

SEQ ID NO: 31661 - DNA, 50 bp, synthetic construct
  source 1..50: mol_type = other DNA
aaagtctaaatttaagcaggaaaatagattcctataagatttttatcttt

SEQ ID NO: 31662 - DNA, 50 bp, synthetic construct
  source 1..50: mol_type = other DNA
ttcgcccgctgggcggcgttttcttcacgtcccaccgcgctgctggccag

SEQ ID NO: 31663 - DNA, 50 bp, synthetic construct
  source 1..50: mol_type = other DNA
cattagaataggacgtattatcgcattttttcatcgtgactattttcctg

SEQ ID NO: 31664 - DNA, 50 bp, synthetic construct
  source 1..50: mol_type = other DNA
tcgcccaggaggccacgggcagcaaagcatttcctcggcctcctgcgcga

SEQ ID NO: 31665 - DNA, 50 bp, synthetic construct
  source 1..50: mol_type = other DNA
tacaccggttgagtccaacatgctgcaaattgttgggtgaagatcatgtc

SEQ ID NO: 31666 - DNA, 50 bp, synthetic construct
  source 1..50: mol_type = other DNA
cggggttcgaggatgcgcttgagttcggtcaagaacagcctttgtcggcg

SEQ ID NO: 31667 - DNA, 50 bp, synthetic construct
  source 1..50: mol_type = other DNA
cccgaggtagaacaccgggtagaacattctaccctatcttcttcgtttca

SEQ ID NO: 31668 - DNA, 50 bp, synthetic construct
  source 1..50: mol_type = other DNA
ggatgcggctcatggcaagatagagccgtatcgaggccgtggccgccgcg

SEQ ID NO: 31669 - DNA, 50 bp, synthetic construct
  source 1..50: mol_type = other DNA
gctctactccccatgattgagaagtactccccatgattgagaagtagagc

SEQ ID NO: 31670 - DNA, 50 bp, synthetic construct
  source 1..50: mol_type = other DNA
cgagacgttcaggattcgatcttccgctgtatcgaattctgagaggattt

SEQ ID NO: 31671 - DNA, 50 bp, synthetic construct
  source 1..50: mol_type = other DNA
taaaggtaggcgttattggattaacaccactccccatataccgaagtggg

SEQ ID NO: 31672 - DNA, 50 bp, synthetic construct
  source 1..50: mol_type = other DNA
tcttgcttcttcgtcgtcaattaagttcggtttttggcgtgaaagaaaag

SEQ ID NO: 31673 - DNA, 50 bp, synthetic construct
  source 1..50: mol_type = other DNA
tttatcgaactggtgaaggcaatggccggactgctcgccgccgacattaa

SEQ ID NO: 31674 - DNA, 50 bp, synthetic construct
  source 1..50: mol_type = other DNA
ttgtaagacctaaatctgtcctattataaggatccattgccgcctgggca

SEQ ID NO: 31675 - DNA, 50 bp, synthetic construct
  source 1..50: mol_type = other DNA
gagatcgctgaagaactcgacgtcatgcgatcgccgtcggcgccgatctc

SEQ ID NO: 31676 - DNA, 50 bp, synthetic construct
  source 1..50: mol_type = other DNA
ataatcatacaaatggctgtggtattcttttcaagcatttctatgattag

SEQ ID NO: 31677 - DNA, 50 bp, synthetic construct
  source 1..50: mol_type = other DNA
cgacttggaggcctgccgaagcggcgccgcgccggcgggcacgagcgagc

SEQ ID NO: 31678 - DNA, 50 bp, synthetic construct
  source 1..50: mol_type = other DNA
gccccggcgccatcagctgcgcgcacaggcgcaggcactggccaccgtgc

SEQ ID NO: 31679 - DNA, 50 bp, synthetic construct
  source 1..50: mol_type = other DNA
ttataaacccagcgctgaattgtagccatgtttgccagctttcttaaaaa

SEQ ID NO: 31680 - DNA, 50 bp, synthetic construct
  source 1..50: mol_type = other DNA
cttttaattaaatataatggaggtaatgtaacattatattttatttcact

SEQ ID NO: 31681 - DNA, 50 bp, synthetic construct
  source 1..50: mol_type = other DNA
acaccgcgaagaattgtattattgatcaataccagtattccccgattcgt

SEQ ID NO: 31682 - DNA, 50 bp, synthetic construct
  source 1..50: mol_type = other DNA
taaatagtaaattaaaaatggacgaaaataaatttttcatttaattacct

SEQ ID NO: 31683 - DNA, 50 bp, synthetic construct
  source 1..50: mol_type = other DNA
gctataataaagacagcaaccagtttgattgttattcatattttttctcc

SEQ ID NO: 31684 - DNA, 50 bp, synthetic construct
  source 1..50: mol_type = other DNA
agcacatcctgtaataagcagggccagcgttactgttagcattggtgacg

SEQ ID NO: 31685 - DNA, 50 bp, synthetic construct
  source 1..50: mol_type = other DNA
gtgatggctgtgctcggtgtgaccatggtagtccctttgtaagacctcac

SEQ ID NO: 31686 - DNA, 50 bp, synthetic construct
  source 1..50: mol_type = other DNA
ggggtgccggtccaggtgcggaaggttggtcgacgctggtgaagccgccg

SEQ ID NO: 31687 - DNA, 50 bp, synthetic construct
  source 1..50: mol_type = other DNA
acgccgcttcccccggcgacgcctgacggcgcgctcgggggaagccaggt

SEQ ID NO: 31688 - DNA, 50 bp, synthetic construct
  source 1..50: mol_type = other DNA
ggtgacctcgataccttcgaacagaagcgctcgatgcggccgaggtcgag

SEQ ID NO: 31689 - DNA, 50 bp, synthetic construct
  source 1..50: mol_type = other DNA
cttgccgcaggaaatgttaattacaaaatgatactattacctgcggcaca

SEQ ID NO: 31690 - DNA, 50 bp, synthetic construct
  source 1..50: mol_type = other DNA
tcaataattcataagcagaatcattaattgttctgtttcccaattagaaa

SEQ ID NO: 31691 - DNA, 50 bp, synthetic construct
  source 1..50: mol_type = other DNA
attgatcatgcggagtacgcagaaattttcctgtacctcgacgcatacac

SEQ ID NO: 31692 - DNA, 50 bp, synthetic construct
  source 1..50: mol_type = other DNA
caaaaccatctgaatgtttaaagcgacgagtagcgaacgtatgagtaagc

SEQ ID NO: 31693 - DNA, 50 bp, synthetic construct
  source 1..50: mol_type = other DNA
cgcaaccatccggatcgccacgcgctcatgttgcgatccgctaacatggg

SEQ ID NO: 31694 - DNA, 50 bp, synthetic construct
  source 1..50: mol_type = other DNA
acggttgaatctcaatctgtcgggtggccgacattacgagatttcttgtc

SEQ ID NO: 31695 - DNA, 50 bp, synthetic construct
  source 1..50: mol_type = other DNA
cttttgaagaatcgttctgtaattgggttcacagaatacttcttcaaagc

SEQ ID NO: 31696 - DNA, 50 bp, synthetic construct
  source 1..50: mol_type = other DNA
aaaattacttaatgcggataaataattttttgattgctttttattccttt

SEQ ID NO: 31697 - DNA, 50 bp, synthetic construct
  source 1..50: mol_type = other DNA
cccggccgctgtcatgcggcgggcgccatctgggcacggggtaggccggc

SEQ ID NO: 31698 - DNA, 50 bp, synthetic construct
  source 1..50: mol_type = other DNA
tcctggcgtgggatgaaagctgctggacaagcttgcccaataggaccggg

SEQ ID NO: 31699 - DNA, 50 bp, synthetic construct
  source 1..50: mol_type = other DNA
ccgtggcctaggaggcggtgatgcggccatcaccgccagctgcgcctcgg

SEQ ID NO: 31700 - DNA, 50 bp, synthetic construct
  source 1..50: mol_type = other DNA
aaggcctatggccacaggtttaaaattgtaaagccattttaatactgttt

SEQ ID NO: 31701 - DNA, 50 bp, synthetic construct
  source 1..50: mol_type = other DNA
aaaaaacaaaaggagaggtatacctttataattacttctttatgtttggc

SEQ ID NO: 31702 - DNA, 50 bp, synthetic construct
  source 1..50: mol_type = other DNA
caagcccgacccccgcctcgccgatctcggcattagcgactgcggcgttc

SEQ ID NO: 31703 - DNA, 50 bp, synthetic construct
  source 1..50: mol_type = other DNA
acagcaggaattggcgcgggatggagatatcacgcgccatcgcttgcctc

SEQ ID NO: 31704 - DNA, 50 bp, synthetic construct
  source 1..50: mol_type = other DNA
gccagtcatgccttcctcctcaacacaccccgaaggcgagcaggaaccag

SEQ ID NO: 31705 - DNA, 50 bp, synthetic construct
  source 1..50: mol_type = other DNA
aagagattaaatataattacattattgaatataatatccttttacttctg

SEQ ID NO: 31706 - DNA, 50 bp, synthetic construct
  source 1..50: mol_type = other DNA
atccggctggttgcctccttcgtgaagacaattaaggtcacattatcttg

SEQ ID NO: 31707 - DNA, 50 bp, synthetic construct
  source 1..50: mol_type = other DNA
gcatgattttactccagagatgaaaattcaataataactcaaaatttcac

SEQ ID NO: 31708 - DNA, 50 bp, synthetic construct
  source 1..50: mol_type = other DNA
tatggttatcttccgtgaaaactcggattttaagttatgctatggtgata

SEQ ID NO: 31709 - DNA, 50 bp, synthetic construct
  source 1..50: mol_type = other DNA
cggcgcgtatcgcaatggcattagcgcggttgcgactgctgtaatcgccg

SEQ ID NO: 31710 - DNA, 50 bp, synthetic construct
  source 1..50: mol_type = other DNA
agcatttgcttatgtgtgataaagaatatttgcacgcatatacaaatgct

SEQ ID NO: 31711 - DNA, 50 bp, synthetic construct
  source 1..50: mol_type = other DNA
tcggaagacttggactcccaactaccttaacgctgatgtaaatattccct

SEQ ID NO: 31712 - DNA, 50 bp, synthetic construct
  source 1..50: mol_type = other DNA
taaataaccttgcgtacatacggatatccgtatgcctgcacagttaaacg

SEQ ID NO: 31713 - DNA, 50 bp, synthetic construct
  source 1..50: mol_type = other DNA
ttcccgtttcccttaattaaagatattcctcggctgagagtaaaccaaat

SEQ ID NO: 31714 - DNA, 50 bp, synthetic construct
  source 1..50: mol_type = other DNA
aatggaaatcagctccggaagattaaaatccgccggatatgcgaaccaat

SEQ ID NO: 31715 - DNA, 50 bp, synthetic construct
  source 1..50: mol_type = other DNA
cagcttccttaaaaatggaaatcagctgaactcctttcttcaattcctat

SEQ ID NO: 31716 - DNA, 50 bp, synthetic construct
  source 1..50: mol_type = other DNA
gcggcgtacaaaaaatctatatggtagtaaatagtgtttggatactattc

SEQ ID NO: 31717 - DNA, 50 bp, synthetic construct
  source 1..50: mol_type = other DNA
ataaaaaccaatctctcttttctcttgaaaagtagtaaatagtgtttgga

SEQ ID NO: 31718 - DNA, 50 bp, synthetic construct
  source 1..50: mol_type = other DNA
ctgaggttcagatacctcaatcttttaagattatgcactccatctggcag

SEQ ID NO: 31719 - DNA, 50 bp, synthetic construct
  source 1..50: mol_type = other DNA
cgcataaagggtactggtttaactttcacaaaacctttaacaatcaacaa

SEQ ID NO: 31720 - DNA, 50 bp, synthetic construct
  source 1..50: mol_type = other DNA
gcacaaaaacgttatcgctaatttttctattagcgacaacatttttggac

SEQ ID NO: 31721 - DNA, 50 bp, synthetic construct
  source 1..50: mol_type = other DNA
gcgcgtgcctgaccctgccctgggcgttctcgtcgaggtccccgccgggc

SEQ ID NO: 31722 - DNA, 50 bp, synthetic construct
  source 1..50: mol_type = other DNA
gtcctattttcagagatatagttttagatgtaattcaataaaataaggac

SEQ ID NO: 31723 - DNA, 50 bp, synthetic construct
  source 1..50: mol_type = other DNA
ctataataatataaaatcaactattaatagttacctaaatattaatttag

SEQ ID NO: 31724 - DNA, 50 bp, synthetic construct
  source 1..50: mol_type = other DNA
aatataagataattgataaatatgtttatatttattaggtaaattagaat

SEQ ID NO: 31725 - DNA, 50 bp, synthetic construct
  source 1..50: mol_type = other DNA
ggacaagggttcctgacaccgtcataacgatagttcaacagaacttgtag

SEQ ID NO: 31726 - DNA, 50 bp, synthetic construct
  source 1..50: mol_type = other DNA
cggagaggacggcggtcataactttatggcgctggagctggtcaataccg

SEQ ID NO: 31727 - DNA, 50 bp, synthetic construct
  source 1..50: mol_type = other DNA
agcgtctccaaagggcctcacgtggacgcattatccactttgggtaagct

SEQ ID NO: 31728 - DNA, 50 bp, synthetic construct
  source 1..50: mol_type = other DNA
atacggagcaccgaaagagcgtttttacatcagtgaacggtggagcgttc

SEQ ID NO: 31729 - DNA, 50 bp, synthetic construct
  source 1..50: mol_type = other DNA
aaaaaggtcttctgatattggaaatatttcctttccggaaaaagccttgt

SEQ ID NO: 31730 - DNA, 50 bp, synthetic construct
  source 1..50: mol_type = other DNA
catgtgcaaattcatgcagaacccggggtgggaggatgtatatgcttcct

SEQ ID NO: 31731 - DNA, 50 bp, synthetic construct
  source 1..50: mol_type = other DNA
aatataagtgaaaagatagatacaagtatatcactcctttatatttgatt

SEQ ID NO: 31732 - DNA, 50 bp, synthetic construct
  source 1..50: mol_type = other DNA
atcagctctggaagattaaaaaaacgtttttctgatgttatgtggctgat

SEQ ID NO: 31733 - DNA, 50 bp, synthetic construct
  source 1..50: mol_type = other DNA
taccattttttccagcaggcctccatctacaagatagcacaacaaccgtc

SEQ ID NO: 31734 - DNA, 50 bp, synthetic construct
  source 1..50: mol_type = other DNA
tttttaacggtacaaagtaccgttaaaaaccttctttctgccgtaaaaaa

SEQ ID NO: 31735 - DNA, 50 bp, synthetic construct
  source 1..50: mol_type = other DNA
gtccaaaaatgttgtcgctaatagaaaaattagcgataacgtttttgtgc

SEQ ID NO: 31736 - DNA, 50 bp, synthetic construct
  source 1..50: mol_type = other DNA
tatttactcatatttttctgctaaaattcccatattggtatgaataaatt

SEQ ID NO: 31737 - DNA, 50 bp, synthetic construct
  source 1..50: mol_type = other DNA
cttgtacccattttatcatttttcaacaaaaagcatatgagcacaacaat

SEQ ID NO: 31738 - DNA, 50 bp, synthetic construct
  source 1..50: mol_type = other DNA
caaagataattattttaaattaaattatttattaaaaagaattatctgga

SEQ ID NO: 31739 - DNA, 50 bp, synthetic construct
  source 1..50: mol_type = other DNA
gaaataaggaaacgcctatcatttttcagcgttctgctttttgttgtttt

SEQ ID NO: 31740 - DNA, 50 bp, synthetic construct
  source 1..50: mol_type = other DNA
atctggtgatttatacattcataaataatctcggctaaaaacggagagaa

SEQ ID NO: 31741 - DNA, 50 bp, synthetic construct
  source 1..50: mol_type = other DNA
atttctaatattaccgcttgactatttgaaaaacatgtattatgataaat

SEQ ID NO: 31742 - DNA, 50 bp, synthetic construct
  source 1..50: mol_type = other DNA
tgaatatttaattgtggttgggttgcatgaaaaaataaattgaatatatg

SEQ ID NO: 31743 - DNA, 50 bp, synthetic construct
  source 1..50: mol_type = other DNA
ctgtttcaatttagggaggatttcaataaatgctcatggcattgaagcgg

SEQ ID NO: 31744 - DNA, 50 bp, synthetic construct
  source 1..50: mol_type = other DNA
taccatcataaagggatggggagagatctttgcttccccttcattaatga

SEQ ID NO: 31745 - DNA, 50 bp, synthetic construct
  source 1..50: mol_type = other DNA
tattagaaattctaaggattttctgtagaaaatttgtagaatcaaaaaat

SEQ ID NO: 31746 - DNA, 50 bp, synthetic construct
  source 1..50: mol_type = other DNA
ctgtaccgttggagctgcttttttctaaaagaaacaacccacgcttatac

SEQ ID NO: 31747 - DNA, 50 bp, synthetic construct
  source 1..50: mol_type = other DNA
aagtcgccggaacttaccgcagaaacttcgacggtgacgtccggcgcgcg

SEQ ID NO: 31748 - DNA, 50 bp, synthetic construct
  source 1..50: mol_type = other DNA
cgcacgtgcggcagctgctgacccgcggagccacttctgcagcgtcatcg

SEQ ID NO: 31749 - DNA, 50 bp, synthetic construct
  source 1..50: mol_type = other DNA
gtaaaaaattttgccgttcctatccggataggattctcctctcattttca

SEQ ID NO: 31750 - DNA, 50 bp, synthetic construct
  source 1..50: mol_type = other DNA
caattgttaaatctttttctaaattacagagataaaagagataagaatgg

SEQ ID NO: 31751 - DNA, 50 bp, synthetic construct
  source 1..50: mol_type = other DNA
ctattatataatatttaaaaaaataaatatatttaatgattactaaatag

SEQ ID NO: 31752 - DNA, 50 bp, synthetic construct
  source 1..50: mol_type = other DNA
gcattgaaaatgcggtgctgttgaagccgacagtaccgttgtgcatattg

SEQ ID NO: 31753 - DNA, 50 bp, synthetic construct
  source 1..50: mol_type = other DNA
atgaaccgaccggaggggttcagttaactttgtccttcatttttgttgtt

SEQ ID NO: 31754 - DNA, 50 bp, synthetic construct
  source 1..50: mol_type = other DNA
attttaagtgtaaatgacacatacatgtatgcctggttcagaatctgcat

SEQ ID NO: 31755 - DNA, 50 bp, synthetic construct
  source 1..50: mol_type = other DNA
ttccgcaatattatgtggtggggaatgtgatttccttttattctcaggat

SEQ ID NO: 31756 - DNA, 50 bp, synthetic construct
  source 1..50: mol_type = other DNA
gactggcaggctactattcttccggccggacaaattgattgggtaatcat

SEQ ID NO: 31757 - DNA, 50 bp, synthetic construct
  source 1..50: mol_type = other DNA
aaaatattatagcagaataaatttgtttatataatgtgctatcttaattt

SEQ ID NO: 31758 - DNA, 50 bp, synthetic construct
  source 1..50: mol_type = other DNA
ttttctgttacagaaaaaaacaacccgtttttcgttcaagtaaattttta

SEQ ID NO: 31759 - DNA, 50 bp, synthetic construct
  source 1..50: mol_type = other DNA
tactagatcaacgatggatttgaatacaaaaataacagtcatacatagaa

SEQ ID NO: 31760 - DNA, 50 bp, synthetic construct
  source 1..50: mol_type = other DNA
atactgactgatattggtacagaagaacttgcccatatggagatgatctg

SEQ ID NO: 31761 - DNA, 50 bp, synthetic construct
  source 1..50: mol_type = other DNA
ggaaaaacaagatgatatctaattgaacacaatttgcagagatatcttcc

SEQ ID NO: 31762 - DNA, 50 bp, synthetic construct
  source 1..50: mol_type = other DNA
tccactccattccagattataccatttcttatcttctgttatatcacgga

SEQ ID NO: 31763 - DNA, 50 bp, synthetic construct
  source 1..50: mol_type = other DNA
tttgcctttcctatccgatactcagcggtgtacagaaggcggaaggcaat

SEQ ID NO: 31764 - DNA, 50 bp, synthetic construct
  source 1..50: mol_type = other DNA
gggtatcccttatgcccggagacaccgttctgggggtgctggggtatccc

SEQ ID NO: 31765 - DNA, 50 bp, synthetic construct
  source 1..50: mol_type = other DNA
ctacgcacggagctgctttttcttcaaacgtccagcagcaccgggtcaag

SEQ ID NO: 31766 - DNA, 50 bp, synthetic construct
  source 1..50: mol_type = other DNA
taagtatagccccgtggaggggctatgcatcatgtgcattcgcatattta

SEQ ID NO: 31767 - DNA, 50 bp, synthetic construct
  source 1..50: mol_type = other DNA
agttcgctcataatagttcgcaactgcattcgcatatttagcagcaaacc

SEQ ID NO: 31768 - DNA, 50 bp, synthetic construct
  source 1..50: mol_type = other DNA
ataggaattgaagaaaggagttcagcaaatgagaattaagaaatacaaaa

SEQ ID NO: 31769 - DNA, 50 bp, synthetic construct
  source 1..50: mol_type = other DNA
aagagatatccgttttcagcaaaaatgtttgcataaaaaaaatgtctctt

SEQ ID NO: 31770 - DNA, 50 bp, synthetic construct
  source 1..50: mol_type = other DNA
gggagtctgcacaactcccggcctcctatccgacagtcaaacagacaatg

SEQ ID NO: 31771 - DNA, 50 bp, synthetic construct
  source 1..50: mol_type = other DNA
aataaatgcaaaaaagccgccggtgcgccgttttggcggttgccgttatt

SEQ ID NO: 31772 - DNA, 50 bp, synthetic construct
  source 1..50: mol_type = other DNA
gaatataccgtctcctttgggggaagctggagctgattgacactctggag

SEQ ID NO: 31773 - DNA, 50 bp, synthetic construct
  source 1..50: mol_type = other DNA
atctcagtgaagaagtttttgtaaaaatatatttaccacctatctggccg

SEQ ID NO: 31774 - DNA, 50 bp, synthetic construct
  source 1..50: mol_type = other DNA
ccaaacgcagcccgaccaaatcgacttcttgatttacgggctgtccatgg

SEQ ID NO: 31775 - DNA, 50 bp, synthetic construct
  source 1..50: mol_type = other DNA
ggtggtcacctcccgccgcgtggacatcacacacctggcgcgtaacgctg

SEQ ID NO: 31776 - DNA, 50 bp, synthetic construct
  source 1..50: mol_type = other DNA
acatatccagggccaagagctggacgccctgctcaccatcatcatgatgc

SEQ ID NO: 31777 - DNA, 50 bp, synthetic construct
  source 1..50: mol_type = other DNA
ttttagacttgctttttaaaaaataaattatacgaaaaaagagtacaaaa

SEQ ID NO: 31778 - DNA, 50 bp, synthetic construct
  source 1..50: mol_type = other DNA
aacaggcacaggaaaattgaatacgatctcacccataaactgtgtatcgg

SEQ ID NO: 31779 - DNA, 50 bp, synthetic construct
  source 1..50: mol_type = other DNA
gagatataaagattggatacctttaagatctgcgtcaaactttatatctt

SEQ ID NO: 31780 - DNA, 50 bp, synthetic construct
  source 1..50: mol_type = other DNA
agacaagcggaatacctgtacagccttctctacaggaatcatcatttact

SEQ ID NO: 31781 - DNA, 50 bp, synthetic construct
  source 1..50: mol_type = other DNA
tcgcaaaaagcccggaaatacgccgctctggatatccttattcatatccc

SEQ ID NO: 31782 - DNA, 50 bp, synthetic construct
  source 1..50: mol_type = other DNA
tgaagcaaaccgggaagattgaagtacttcaagcttcccgcttcggtgaa

SEQ ID NO: 31783 - DNA, 50 bp, synthetic construct
  source 1..50: mol_type = other DNA
catcaaaagcaaatgcttgaagattagcgttgaagtatcattttttggtg

SEQ ID NO: 31784 - DNA, 50 bp, synthetic construct
  source 1..50: mol_type = other DNA
taatatactattttctaaatctgttatcgtttgcagaaaataatagaaat

SEQ ID NO: 31785 - DNA, 50 bp, synthetic construct
  source 1..50: mol_type = other DNA
atcttgtgactttttcattcatgggaatatccgggaaaaagaaacagctt

SEQ ID NO: 31786 - DNA, 50 bp, synthetic construct
  source 1..50: mol_type = other DNA
cttctttccatgatttttcctccttaattaagggaaacagggctgggaaa

SEQ ID NO: 31787 - DNA, 50 bp, synthetic construct
  source 1..50: mol_type = other DNA
ggatctatccaaataaagaacaggttgcaatttccagtttggttagatct

SEQ ID NO: 31788 - DNA, 50 bp, synthetic construct
  source 1..50: mol_type = other DNA
tttcggagtgtttggttcaatgcggagtcaattgtaaaaaattcagttgg

SEQ ID NO: 31789 - DNA, 50 bp, synthetic construct
  source 1..50: mol_type = other DNA
tctggtaaacatcagtgtacaaggggtgctgtgtgctgtgtttttttagc

SEQ ID NO: 31790 - DNA, 50 bp, synthetic construct
  source 1..50: mol_type = other DNA
cccaaaaagcgcggtaaaataagtgtagtggaaataaggcgtttccagaa

SEQ ID NO: 31791 - DNA, 50 bp, synthetic construct
  source 1..50: mol_type = other DNA
caaaaagaaaaaaggaagcacgtttgggcggtcttccgcgatatattttg

SEQ ID NO: 31792 - DNA, 50 bp, synthetic construct
  source 1..50: mol_type = other DNA
gaactgaccgagggttacgaacagctctcgtcgtatttctcggcctgctc

SEQ ID NO: 31793 - DNA, 50 bp, synthetic construct
  source 1..50: mol_type = other DNA
tcgccgaaccgcaccagcacaatgcctcacgtgtgggtgcggcgcgggtc

SEQ ID NO: 31794 - DNA, 50 bp, synthetic construct
  source 1..50: mol_type = other DNA
aggacatcttccctgaggccctgtcgacttggcttcatcgaagaatcctc

SEQ ID NO: 31795 - DNA, 50 bp, synthetic construct
  source 1..50: mol_type = other DNA
tatcttgcaattttttaagtttattcctaacataaaataccctccgtatc

SEQ ID NO: 31796 - DNA, 50 bp, synthetic construct
  source 1..50: mol_type = other DNA
tggtagctccattccaacaaggaaaggagctggaagcgggggaggagcag

SEQ ID NO: 31797 - DNA, 50 bp, synthetic construct
  source 1..50: mol_type = other DNA
acctcctgccgcgcagatttcccgcccgttcaatctgctcgtgcttcggc

SEQ ID NO: 31798 - DNA, 50 bp, synthetic construct
  source 1..50: mol_type = other DNA
atgaattgtgatattgtgtgtagtgaacgtatcatgtaatcacagttcac

SEQ ID NO: 31799 - DNA, 50 bp, synthetic construct
  source 1..50: mol_type = other DNA
gaagcatgtaattcttgattatgtgaatatagccaagatttatattctga

SEQ ID NO: 31800 - DNA, 50 bp, synthetic construct
  source 1..50: mol_type = other DNA
aatttctaccagagaatacagctctttttttggaggttgtatgaaaaaaa

SEQ ID NO: 31801 - DNA, 50 bp, synthetic construct
  source 1..50: mol_type = other DNA
aacttgttgttgatgtagccgtttgcaaggggaaatttgagcaattgttt

SEQ ID NO: 31802 - DNA, 50 bp, synthetic construct
  source 1..50: mol_type = other DNA
aaccgctaaaagcccgttatccacaatcggccagcgggctgtttgcggtg

SEQ ID NO: 31803 - DNA, 50 bp, synthetic construct
  source 1..50: mol_type = other DNA
gatttgaaagtaagtagagtggcaaaatcaattcaggatcatgggtaatc

SEQ ID NO: 31804 - DNA, 50 bp, synthetic construct
  source 1..50: mol_type = other DNA
ttattatagaacactaaaataaatttttttatcttagtgttccaatgtat

SEQ ID NO: 31805 - DNA, 50 bp, synthetic construct
  source 1..50: mol_type = other DNA
gtctaaaggctgggtaacatcatatttctttttagactggatctcaaaac

SEQ ID NO: 31806 - DNA, 50 bp, synthetic construct
  source 1..50: mol_type = other DNA
cccgactccgagaagttgacccgcgtggagagcaactcatcggcctcggg

SEQ ID NO: 31807 - DNA, 50 bp, synthetic construct
  source 1..50: mol_type = other DNA
tacgaaagatgttctaaccccacacccttaaagtgttttattcttctaag

SEQ ID NO: 31808 - DNA, 50 bp, synthetic construct
  source 1..50: mol_type = other DNA
cgctgcgggcattgtcgccgatggccgcatcgcgcacagggcctgcagca

SEQ ID NO: 31809 - DNA, 50 bp, synthetic construct
  source 1..50: mol_type = other DNA
gatcagcatggcaatggaaagaaggacctttttcggttgcctggtattaa

SEQ ID NO: 31810 - DNA, 50 bp, synthetic construct
  source 1..50: mol_type = other DNA
gactcaagtctttcgacttgagtcttcgctggaatcgaaatactcgccct

SEQ ID NO: 31811 - DNA, 50 bp, synthetic construct
  source 1..50: mol_type = other DNA
acctctgcgaggcccaccacatcacctgatcagcgcatggatgtgtggga

SEQ ID NO: 31812 - DNA, 50 bp, synthetic construct
  source 1..50: mol_type = other DNA
gagatgcgggctgcggtcggctgacggcacatctccttggccttcatctc

SEQ ID NO: 31813 - DNA, 50 bp, synthetic construct
  source 1..50: mol_type = other DNA
gtacggcacatgtaggactgtgcttgagcatgatgctcggggtgcgtcgg

SEQ ID NO: 31814 - DNA, 50 bp, synthetic construct
  source 1..50: mol_type = other DNA
aaagaaaatgatccatttcccgcgaatactggacattccccattttccat

SEQ ID NO: 31815 - DNA, 50 bp, synthetic construct
  source 1..50: mol_type = other DNA
ataaaaaattctagttgtgtaatctaactgatagccatggactttttctt

SEQ ID NO: 31816 - DNA, 50 bp, synthetic construct
  source 1..50: mol_type = other DNA
gtcctgttgatttttggaaataaatattcgttcctttctatcactgttac

SEQ ID NO: 31817 - DNA, 50 bp, synthetic construct
  source 1..50: mol_type = other DNA
cgtattaaatcagatacagttctaaaacctactccctccatattactaag

SEQ ID NO: 31818 - DNA, 50 bp, synthetic construct
  source 1..50: mol_type = other DNA
accaatgtatcaaaatatggagatatttcaaatcctattgtcacatttaa

SEQ ID NO: 31819 - DNA, 50 bp, synthetic construct
  source 1..50: mol_type = other DNA
taataatagaaaacagaaaaatccaatccagcgagatttttctatctttg

SEQ ID NO: 31820 - DNA, 50 bp, synthetic construct
  source 1..50: mol_type = other DNA
ctaaattaaaaccctcaagatattttatatgctttaaacagttcgtttaa

SEQ ID NO: 31821 - DNA, 50 bp, synthetic construct
  source 1..50: mol_type = other DNA
cttcgctctgtgattcacataaatgtgtttaggaacccattatactgaag

SEQ ID NO: 31822 - DNA, 50 bp, synthetic construct
  source 1..50: mol_type = other DNA
aaaactgtacggaatcacatttcaaatgccatgcagaagttaggtgtgaa

SEQ ID NO: 31823 - DNA, 50 bp, synthetic construct
  source 1..50: mol_type = other DNA
caacgacgcggcagggccgaaacctcagcttcggcgccggtgcggcgttg

SEQ ID NO: 31824 - DNA, 50 bp, synthetic construct
  source 1..50: mol_type = other DNA
tttactaaaaactttattattttcttctagtcaaagctgttttaatatct

SEQ ID NO: 31825 - DNA, 50 bp, synthetic construct
  source 1..50: mol_type = other DNA
tgtcgtattggcagtttcgacgaatgtttagcttaactgcttcaatttta

SEQ ID NO: 31826 - DNA, 50 bp, synthetic construct
  source 1..50: mol_type = other DNA
tcgtgtttccctcctctgctctcttggatcggcacaggatgaagagtcga

SEQ ID NO: 31827 - DNA, 50 bp, synthetic construct
  source 1..50: mol_type = other DNA
tcagtacattcgccataaaaatcacccgatttatcaagcgattgtgcgaa

SEQ ID NO: 31828 - DNA, 50 bp, synthetic construct
  source 1..50: mol_type = other DNA
tcaaatctgttgggagaatgccatatatacgactctcttctggtatttga

SEQ ID NO: 31829 - DNA, 50 bp, synthetic construct
  source 1..50: mol_type = other DNA
gtattcggaagaagaaaagaagttttgcgccgtttcctgattccgaaata

SEQ ID NO: 31830 - DNA, 50 bp, synthetic construct
  source 1..50: mol_type = other DNA
atattatgaaagcgtggtaacaaagttttccttcgccactttccaaaaaa

SEQ ID NO: 31831 - DNA, 50 bp, synthetic construct
  source 1..50: mol_type = other DNA
aaacacaaaatttttcattgatgacgtcatccagaaactcccttatgttc

SEQ ID NO: 31832 - DNA, 50 bp, synthetic construct
  source 1..50: mol_type = other DNA
gcagccagagccatgactgcgtttgccgtatgtatgggcgctctggcggc

SEQ ID NO: 31833 - DNA, 50 bp, synthetic construct
  source 1..50: mol_type = other DNA
cccaattacaagggctgtaccgtctttacggtatgtccgcagtagtccat

SEQ ID NO: 31834 - DNA, 50 bp, synthetic construct
  source 1..50: mol_type = other DNA
gataaaaagctataactcgatggttaagtatggggttcatgtacattcga

SEQ ID NO: 31835 - DNA, 50 bp, synthetic construct
  source 1..50: mol_type = other DNA
attttcaaaggttacaggacaatatttattgccatgaaacctttacatag

SEQ ID NO: 31836 - DNA, 50 bp, synthetic construct
  source 1..50: mol_type = other DNA
ggcggcaacatggaagtggcttgccgacaaggcggtggcggaaagccgcg

SEQ ID NO: 31837 - DNA, 50 bp, synthetic construct
  source 1..50: mol_type = other DNA
acccgaatacgcgaactgattagaaatttaatcattttatccataaaggt

SEQ ID NO: 31838 - DNA, 50 bp, synthetic construct
  source 1..50: mol_type = other DNA
ttacccccggttgctttccgaatcaggtgtcgcacctcagtcgttcacgc

SEQ ID NO: 31839 - DNA, 50 bp, synthetic construct
  source 1..50: mol_type = other DNA
aactgtatgaacatacagtgtatgatcatccgttcgacgttcatcgtcgg

SEQ ID NO: 31840 - DNA, 50 bp, synthetic construct
  source 1..50: mol_type = other DNA
gagccacaggccacggaaacacagggctggacttcgaaaccaaactgatc

SEQ ID NO: 31841 - DNA, 50 bp, synthetic construct
  source 1..50: mol_type = other DNA
tgatcccaaagatcatgatccacgcagatggatcggcccgaagggaccca

SEQ ID NO: 31842 - DNA, 50 bp, synthetic construct
  source 1..50: mol_type = other DNA
ccatgatgcgctacttcaccaatttcaaataaatcagtcgtcattcgtga

SEQ ID NO: 31843 - DNA, 50 bp, synthetic construct
  source 1..50: mol_type = other DNA
atatttgttacgaacaaaaattgtaatgccgggttgttcctcgactatat

SEQ ID NO: 31844 - DNA, 50 bp, synthetic construct
  source 1..50: mol_type = other DNA
tgtaaagcgttttctagtagcatggacatggataaggaaatagcgagaca

SEQ ID NO: 31845 - DNA, 50 bp, synthetic construct
  source 1..50: mol_type = other DNA
cctctttttaatttatctgaacgatattattaagatcaagccaccgaagg

SEQ ID NO: 31846 - DNA, 50 bp, synthetic construct
  source 1..50: mol_type = other DNA
agtaaaagatatgttcaactggtatatacttatgatgaatatcttgtatg

SEQ ID NO: 31847 - DNA, 50 bp, synthetic construct
  source 1..50: mol_type = other DNA
ctaatccacagcctaaaccctctgacttccttttttccgatgtggatgct

SEQ ID NO: 31848 - DNA, 50 bp, synthetic construct
  source 1..50: mol_type = other DNA
tccgagtccaccgttgccttgggacacccgagtgaaacgaaccctacgct

SEQ ID NO: 31849 - DNA, 50 bp, synthetic construct
  source 1..50: mol_type = other DNA
gattattcgtgagcttgcttattccggaataatcccgaaagcgaatggca

SEQ ID NO: 31850 - DNA, 50 bp, synthetic construct
  source 1..50: mol_type = other DNA
ctgtttaccggcatttcgacacgcaaccctgtatttagaccattaaattg

SEQ ID NO: 31851 - DNA, 50 bp, synthetic construct
  source 1..50: mol_type = other DNA
atttattatagatttagagatacacaggtatttcgattttatcaacttta

SEQ ID NO: 31852 - DNA, 50 bp, synthetic construct
  source 1..50: mol_type = other DNA
ccggcgtacatttatatccgccagtcgctttgggtatgtacacgcgccgc

SEQ ID NO: 31853 - DNA, 50 bp, synthetic construct
  source 1..50: mol_type = other DNA
agcggcagcccgatgcgcgcccggcagcaggcgcagtgtctgctgccgca

SEQ ID NO: 31854 - DNA, 50 bp, synthetic construct
  source 1..50: mol_type = other DNA
cgccgtccggactcggagtccggcatgccgccgtggaagatcgaccgggt

SEQ ID NO: 31855 - DNA, 50 bp, synthetic construct
  source 1..50: mol_type = other DNA
tgggaacatatgaaaacagtacttttaccggctgttttcaggcatttctc

SEQ ID NO: 31856 - DNA, 50 bp, synthetic construct
  source 1..50: mol_type = other DNA
attttcaagaaagaaggttatattcaaatatatatgatttgtttgaaaaa

SEQ ID NO: 31857 - DNA, 50 bp, synthetic construct
  source 1..50: mol_type = other DNA
taattcaattgctacactaatcataagcaattaaatttgctaacgaagca

SEQ ID NO: 31858 - DNA, 50 bp, synthetic construct
  source 1..50: mol_type = other DNA
ctgaatatactctttgtaataccgaattggagaacaacgtgtagatttac

SEQ ID NO: 31859 - DNA, 50 bp, synthetic construct
  source 1..50: mol_type = other DNA
ggttgtccatgcgggccttttacatatttggtcgaaagaactggacaacc

SEQ ID NO: 31860 - DNA, 50 bp, synthetic construct
  source 1..50: mol_type = other DNA
aaaatattacagttattccagcaaagcaattgaattaaccataatattta

SEQ ID NO: 31861 - DNA, 50 bp, synthetic construct
  source 1..50: mol_type = other DNA
aattataccaaaaaagaggttacaatatttacagtaaaacaggtattatc

SEQ ID NO: 31862 - DNA, 50 bp, synthetic construct
  source 1..50: mol_type = other DNA
cgccgggcccatctggtcgaagaatgttcaagaagatgaaggggcccacc

SEQ ID NO: 31863 - DNA, 50 bp, synthetic construct
  source 1..50: mol_type = other DNA
ggggtggcacccgaatctgcgaacagaaggctcgattggcttgctcagaa

SEQ ID NO: 31864 - DNA, 50 bp, synthetic construct
  source 1..50: mol_type = other DNA
atggcctactcccatttctgaaagtaccatcaataatggcattagaacta

SEQ ID NO: 31865 - DNA, 50 bp, synthetic construct
  source 1..50: mol_type = other DNA
tttccatttctaataatatatccgtattcttatattcttagtttttaaaa

SEQ ID NO: 31866 - DNA, 50 bp, synthetic construct
  source 1..50: mol_type = other DNA
gaacatttaatttgtatttacttgaaataggcgtaacaaaataagcctat

SEQ ID NO: 31867 - DNA, 50 bp, synthetic construct
  source 1..50: mol_type = other DNA
tgtcctaaaaagcttgctattaatagattaattctaaagttaatagcagt

SEQ ID NO: 31868 - DNA, 50 bp, synthetic construct
  source 1..50: mol_type = other DNA
taattagaccaaaaccggaactcttaaatagcccatgactctacagtaga

SEQ ID NO: 31869 - DNA, 50 bp, synthetic construct
  source 1..50: mol_type = other DNA
acctacatcccaaattcagtaacgatcgcttgcttctttgcgatgttcag

SEQ ID NO: 31870 - DNA, 50 bp, synthetic construct
  source 1..50: mol_type = other DNA
ctttggtcaatttctcatcgaacatcactctaaagaggataaatagcaag

SEQ ID NO: 31871 - DNA, 50 bp, synthetic construct
  source 1..50: mol_type = other DNA
taatgaaatgttaaaaaatgcttgactatgcttatctaagtggttcattg

SEQ ID NO: 31872 - DNA, 50 bp, synthetic construct
  source 1..50: mol_type = other DNA
attttccaattgataacaatgtcctcaaaaggtgatatcttttgaaaaag

SEQ ID NO: 31873 - DNA, 50 bp, synthetic construct
  source 1..50: mol_type = other DNA
tccaccattattaggccctgaaaataattgttggttttatcaatggattc

SEQ ID NO: 31874 - DNA, 50 bp, synthetic construct
  source 1..50: mol_type = other DNA
cctgtatagcattattaaaagtgaagcaacttttaatcgctaattaaact

SEQ ID NO: 31875 - DNA, 50 bp, synthetic construct
  source 1..50: mol_type = other DNA
atccattggcagtccctatagtaaaaccaacgtcggtgatcattatggat

SEQ ID NO: 31876 - DNA, 50 bp, synthetic construct
  source 1..50: mol_type = other DNA
atcaagggtcattgcattgtagctatagacttcattcaagggtcattgaa

SEQ ID NO: 31877 - DNA, 50 bp, synthetic construct
  source 1..50: mol_type = other DNA
gtttttaaaaaagaacaacgtgagcatgcaattgattctcatttaaagat

SEQ ID NO: 31878 - DNA, 50 bp, synthetic construct
  source 1..50: mol_type = other DNA
cttaaccgctatcgagaaagggcttgagggttcactgagtactttttaag

SEQ ID NO: 31879 - DNA, 50 bp, synthetic construct
  source 1..50: mol_type = other DNA
caaaaattgaagatttaattatcggattatcatttaaagatgaacttata

SEQ ID NO: 31880 - DNA, 50 bp, synthetic construct
  source 1..50: mol_type = other DNA
gctttcgtgaaggcgctcgcgattcgatctgctcctgcgttgtcgcaaag

SEQ ID NO: 31881 - DNA, 50 bp, synthetic construct
  source 1..50: mol_type = other DNA
gacagcgccgcgctgacttccagttcctccgaaaacagggcggcgaggtc

SEQ ID NO: 31882 - DNA, 50 bp, synthetic construct
  source 1..50: mol_type = other DNA
tgcatgctcgtgctcgacgcgctcgcgccgccgtcaccgactggcgggcg

SEQ ID NO: 31883 - DNA, 50 bp, synthetic construct
  source 1..50: mol_type = other DNA
ctggatgcgctctattatgtgtattcactttcataatagagttcattttc

SEQ ID NO: 31884 - DNA, 50 bp, synthetic construct
  source 1..50: mol_type = other DNA
accggaatggtttgagcgtcacaagattgtatcgctttagatggtgtatt

SEQ ID NO: 31885 - DNA, 50 bp, synthetic construct
  source 1..50: mol_type = other DNA
ataagtatttttagaaatcactgttaaacgttatggctaatgctacaatg

SEQ ID NO: 31886 - DNA, 50 bp, synthetic construct
  source 1..50: mol_type = other DNA
aattgattataccacgcttcaggttaactaccaatgaagtattatcaatg

SEQ ID NO: 31887 - DNA, 50 bp, synthetic construct
  source 1..50: mol_type = other DNA
gtaacaaatcaaaaggacaaattaattactttttcatattgaagtgataa

SEQ ID NO: 31888 - DNA, 50 bp, synthetic construct
  source 1..50: mol_type = other DNA
ttttagcagagataatgccctgaaatatacggttgatttcctttctaaaa

SEQ ID NO: 31889 - DNA, 50 bp, synthetic construct
  source 1..50: mol_type = other DNA
tatttagcaaatgaaaaaatggatatatgaagataagctcaccgttgaat

SEQ ID NO: 31890 - DNA, 50 bp, synthetic construct
  source 1..50: mol_type = other DNA
caagtgttgcaagcgtgcctgctcaagagcgagtcggatggcgtaacttc

SEQ ID NO: 31891 - DNA, 50 bp, synthetic construct
  source 1..50: mol_type = other DNA
ttgcccggaagcattaagtactcctattgataagaaccgcttccagttgc

SEQ ID NO: 31892 - DNA, 50 bp, synthetic construct
  source 1..50: mol_type = other DNA
tgcaattgggttggcactaagcattaaggggtacgattgtaccccttttg

SEQ ID NO: 31893 - DNA, 50 bp, synthetic construct
  source 1..50: mol_type = other DNA
taaagcgtttatctcgttaaacagcgcgtattataacgataggggctagg

SEQ ID NO: 31894 - DNA, 50 bp, synthetic construct
  source 1..50: mol_type = other DNA
tcggtgaaatgaaaaatccacgcaattgattatcatttaaagatgaactt

SEQ ID NO: 31895 - DNA, 50 bp, synthetic construct
  source 1..50: mol_type = other DNA
atacaccacctaaagcgatacaatctatggtatatgccctgggagttggt

SEQ ID NO: 31896 - DNA, 50 bp, synthetic construct
  source 1..50: mol_type = other DNA
tgctcgtcacggtcgaaaacctgcttgaagctacccgaccagcgttacta

SEQ ID NO: 31897 - DNA, 50 bp, synthetic construct
  source 1..50: mol_type = other DNA
ctgcccgctcccccgcgccagccgcgcttcaggcgatgtatgtcggcgtt

SEQ ID NO: 31898 - DNA, 50 bp, synthetic construct
  source 1..50: mol_type = other DNA
gacgccgcggatctcgcccgaggcgcagttcgggcgaggtcatgggcgac

SEQ ID NO: 31899 - DNA, 50 bp, synthetic construct
  source 1..50: mol_type = other DNA
tttattaattgttctttacttaaaattttcggtaaggaaaaacatgtaac

SEQ ID NO: 31900 - DNA, 50 bp, synthetic construct
  source 1..50: mol_type = other DNA
gtcagtcgcttacggctttcccgtgaaatatgaaggtgctagcgagttaa

SEQ ID NO: 31901 - DNA, 50 bp, synthetic construct
  source 1..50: mol_type = other DNA
tgataatcatacaaatgtgttatgctcttaacagtaacgtaaccttgaac

SEQ ID NO: 31902 - DNA, 50 bp, synthetic construct
  source 1..50: mol_type = other DNA
ttgagtagtcattaggctatcttcaataagttatattaatgtgtagaatt

SEQ ID NO: 31903 - DNA, 50 bp, synthetic construct
  source 1..50: mol_type = other DNA
acaagatttgggatttctgtagtcaccactccaataaaaccaatgttaat

SEQ ID NO: 31904 - DNA, 50 bp, synthetic construct
  source 1..50: mol_type = other DNA
ttgacgttcagtttctgcatcacattggagatgtggttgcggaccgtttt

SEQ ID NO: 31905 - DNA, 50 bp, synthetic construct
  source 1..50: mol_type = other DNA
ctggcagtcggtccacgacggcgagggcgtccgcgtcgagcgcaaggggc

SEQ ID NO: 31906 - DNA, 50 bp, synthetic construct
  source 1..50: mol_type = other DNA
aaagggccggaatacaggaatctgttcagaaccgccttttcatttttttt

SEQ ID NO: 31907 - DNA, 50 bp, synthetic construct
  source 1..50: mol_type = other DNA
gcgaacggttgtgcgccttcttgcgccccggaacatgcacaacacgaaat

SEQ ID NO: 31908 - DNA, 50 bp, synthetic construct
  source 1..50: mol_type = other DNA
acaattaaaggaatagaaactctacttaacattaagtttccttttaattg

SEQ ID NO: 31909 - DNA, 50 bp, synthetic construct
  source 1..50: mol_type = other DNA
tcgaaaccaacatcatgaacgtggatccgcatagacaatgttggtttgaa

SEQ ID NO: 31910 - DNA, 50 bp, synthetic construct
  source 1..50: mol_type = other DNA
acttaacagaagctgaaaaaaccaaccagctttagcagcttctttctttg

SEQ ID NO: 31911 - DNA, 50 bp, synthetic construct
  source 1..50: mol_type = other DNA
cttaaagctttcacattgcttgagataacaaaaagccaagtacttttaac

SEQ ID NO: 31912 - DNA, 50 bp, synthetic construct
  source 1..50: mol_type = other DNA
aagatacaataagtactgttaagctacagttccagtacttcttgttattt

SEQ ID NO: 31913 - DNA, 50 bp, synthetic construct
  source 1..50: mol_type = other DNA
tgataaacacaatagttattaaaatatttcaaactatattcaattttaaa

SEQ ID NO: 31914 - DNA, 50 bp, synthetic construct
  source 1..50: mol_type = other DNA
cttatgttcttattaaaaaattattaatagcaagctttttaggacataat

SEQ ID NO: 31915 - DNA, 50 bp, synthetic construct
  source 1..50: mol_type = other DNA
attccatatttaaattaaataaatcttctgaattacttgtcctatggaaa

SEQ ID NO: 31916 - DNA, 50 bp, synthetic construct
  source 1..50: mol_type = other DNA
cttttcagctttttcttcatcgataaacacctcccgaaaatacagataat

SEQ ID NO: 31917 - DNA, 50 bp, synthetic construct
  source 1..50: mol_type = other DNA
ggaagtgccgcaaagcgctaagaagatgctcgacgcgacgctgcgcttcc

SEQ ID NO: 31918 - DNA, 50 bp, synthetic construct
  source 1..50: mol_type = other DNA
gttgcaggttcccgattcacggtggacattgcttccggttcggctgcaac

SEQ ID NO: 31919 - DNA, 50 bp, synthetic construct
  source 1..50: mol_type = other DNA
cgccgcgcgcgccttgacgccgttccgtcgggcgacaggcgcttttccag

SEQ ID NO: 31920 - DNA, 50 bp, synthetic construct
  source 1..50: mol_type = other DNA
gatctgcagcgtgtaggtgtgaaagctttcgccaaagcgcgcacaaaatc

SEQ ID NO: 31921 - DNA, 50 bp, synthetic construct
  source 1..50: mol_type = other DNA
gatcacttcgggaacccataatgggcgcgccacctgttccatcagatgca

SEQ ID NO: 31922 - DNA, 50 bp, synthetic construct
  source 1..50: mol_type = other DNA
taccgtccaagtcgtttgtaaccttgtggttaatgtttggttgccgagct

SEQ ID NO: 31923 - DNA, 50 bp, synthetic construct
  source 1..50: mol_type = other DNA
ctattcagacttaacagaagctgaaaccgtcttctgatagctctaaccat

SEQ ID NO: 31924 - DNA, 50 bp, synthetic construct
  source 1..50: mol_type = other DNA
ttataagcttatctttaaatgagaatcagcacgattgttcactatttcgg

SEQ ID NO: 31925 - DNA, 50 bp, synthetic construct
  source 1..50: mol_type = other DNA
tttaatgagcaaacatctggagtaagcacttttgaagcctgctcattagc

SEQ ID NO: 31926 - DNA, 50 bp, synthetic construct
  source 1..50: mol_type = other DNA
agaaagatacaaaatgggaaggaggtaaaaacccaattgtagacgtttaa

SEQ ID NO: 31927 - DNA, 50 bp, synthetic construct
  source 1..50: mol_type = other DNA
aataaaagtgttataatatacttgaaggaataaagtagaaagcttttatg

SEQ ID NO: 31928 - DNA, 50 bp, synthetic construct
  source 1..50: mol_type = other DNA
ttcaagaatattttcataaatgaattgcatataattaaaatatttttaaa

SEQ ID NO: 31929 - DNA, 50 bp, synthetic construct
  source 1..50: mol_type = other DNA
tcaaactgctcgccagaacccaccgcgcaggcgctcagcctctgccttgg

SEQ ID NO: 31930 - DNA, 50 bp, synthetic construct
  source 1..50: mol_type = other DNA
ctgcctgacgatccagtacgaatcgctctttgtagggcggccagtggcgc

SEQ ID NO: 31931 - DNA, 50 bp, synthetic construct
  source 1..50: mol_type = other DNA
gaagaagtttagtgtgaatcctcacaagcggattaacatgccgtggtggg

SEQ ID NO: 31932 - DNA, 50 bp, synthetic construct
  source 1..50: mol_type = other DNA
tattagacacgtttaaatacaccatctggcggatggtgtcctgttgcgtc

SEQ ID NO: 31933 - DNA, 50 bp, synthetic construct
  source 1..50: mol_type = other DNA
agactatcacttatttaagtgatatttaggtgtgaaataaccaattacag

SEQ ID NO: 31934 - DNA, 50 bp, synthetic construct
  source 1..50: mol_type = other DNA
taatcgcggtttacatcagcgcggcgttaaagccattcagacccagagta

SEQ ID NO: 31935 - DNA, 50 bp, synthetic construct
  source 1..50: mol_type = other DNA
aaattaaacaaaaattatatcccaccacggcgctggtgatggttactcct

SEQ ID NO: 31936 - DNA, 50 bp, synthetic construct
  source 1..50: mol_type = other DNA
tcagtatgctggaatcacaagaacatgtgtttaggaacccattatactga

SEQ ID NO: 31937 - DNA, 50 bp, synthetic construct
  source 1..50: mol_type = other DNA
tcattgcgtactggttgatgaatgcccatgcaattgattctcatttaaag

SEQ ID NO: 31938 - DNA, 50 bp, synthetic construct
  source 1..50: mol_type = other DNA
tttccttactgataattgctgctaattcccgcccatcagcaaaaaggaaa

SEQ ID NO: 31939 - DNA, 50 bp, synthetic construct
  source 1..50: mol_type = other DNA
caaaaagatatagaagataattttttccaaagatcttctgtatcttttag

SEQ ID NO: 31940 - DNA, 50 bp, synthetic construct
  source 1..50: mol_type = other DNA
tcattccgctcatttagcaaatgctcaatttttttaattattattgtggc

SEQ ID NO: 31941 - DNA, 50 bp, synthetic construct
  source 1..50: mol_type = other DNA
agatgatattttaaaaaaaggcggtttttttgttttttaaaaaataatct

SEQ ID NO: 31942 - DNA, 50 bp, synthetic construct
  source 1..50: mol_type = other DNA
aacaaccattaaaaaggtcgttttctcgggaaacgcatcgaatggaactt

SEQ ID NO: 31943 - DNA, 50 bp, synthetic construct
  source 1..50: mol_type = other DNA
aaaggattgaagatgggcaaaaacatgtctttgaaataatttagccctgt

SEQ ID NO: 31944 - DNA, 50 bp, synthetic construct
  source 1..50: mol_type = other DNA
tatttttgtagaaaggttttgactttgaaaaagacttttcgaggaaaaat

SEQ ID NO: 31945 - DNA, 50 bp, synthetic construct
  source 1..50: mol_type = other DNA
atatgagccttttatgagtcaattagtgaacactttaaaaatcatcatat

SEQ ID NO: 31946 - DNA, 50 bp, synthetic construct
  source 1..50: mol_type = other DNA
tattgtaatagttacgaatctattataatagaaggagttatattgggatt

SEQ ID NO: 31947 - DNA, 50 bp, synthetic construct
  source 1..50: mol_type = other DNA
ctattatggaaaacacagagatgagaccatctatgaaaagtccatttttt

SEQ ID NO: 31948 - DNA, 50 bp, synthetic construct
  source 1..50: mol_type = other DNA
cttactaaattattttacatttattatctcatggaaaataaaaaagaaaa

SEQ ID NO: 31949 - DNA, 50 bp, synthetic construct
  source 1..50: mol_type = other DNA
cttacctgacttgattcaaagctttgaatgtatgcgcaacagaagtcatc

SEQ ID NO: 31950 - DNA, 50 bp, synthetic construct
  source 1..50: mol_type = other DNA
agtcgcggcccaacatgccggagccgggccgacgatgacgcggcgcgagc

SEQ ID NO: 31951 - DNA, 50 bp, synthetic construct
  source 1..50: mol_type = other DNA
gtgttatgattatacaaacaaatttaaatgattctgtgaatggataatat

SEQ ID NO: 31952 - DNA, 50 bp, synthetic construct
  source 1..50: mol_type = other DNA
aaaattatagtttgcaaattttaataaaaagacaattaaggtcacattat

SEQ ID NO: 31953 - DNA, 50 bp, synthetic construct
  source 1..50: mol_type = other DNA
tattccctgattagctgccgtgaaatttctaaagcgtcgattgtggcgat

SEQ ID NO: 31954 - DNA, 50 bp, synthetic construct
  source 1..50: mol_type = other DNA
ttggaggtgctgcaggacctccagacatagtgcgtttaaagctctttcaa

SEQ ID NO: 31955 - DNA, 50 bp, synthetic construct
  source 1..50: mol_type = other DNA
tgatcctgaatagcctgccggcatctatgccggtagagcaagcggtaagc

SEQ ID NO: 31956 - DNA, 50 bp, synthetic construct
  source 1..50: mol_type = other DNA
ttcccgaagaagtctttaccgttcatgaaaaattaagcgtttttaaagaa

SEQ ID NO: 31957 - DNA, 50 bp, synthetic construct
  source 1..50: mol_type = other DNA
cagcgcagcgtcaaccgcgtgatcctcgacagccgcccggtccatagcgc

SEQ ID NO: 31958 - DNA, 50 bp, synthetic construct
  source 1..50: mol_type = other DNA
atggggtaacagttaaaaggaaaaatccttccttacgctaatttcatcat

SEQ ID NO: 31959 - DNA, 50 bp, synthetic construct
  source 1..50: mol_type = other DNA
tctttttaatttatctgaacgataaatatcggctccagctatcaatcgcc

SEQ ID NO: 31960 - DNA, 50 bp, synthetic construct
  source 1..50: mol_type = other DNA
ttcttcaccaacataccgaacatacgttacttctcccggtcgtggaatag

SEQ ID NO: 31961 - DNA, 50 bp, synthetic construct
  source 1..50: mol_type = other DNA
aacatcccccataatgtgcatcagactcaacatttcttatctggggaacc

SEQ ID NO: 31962 - DNA, 50 bp, synthetic construct
  source 1..50: mol_type = other DNA
ggtgccctgcccgtcttaggcagggtgccgtttaagacggttgctccacc

SEQ ID NO: 31963 - DNA, 50 bp, synthetic construct
  source 1..50: mol_type = other DNA
tcgatatgatcatcaccaaaagcgtttccttttggtagtctatctatcac

SEQ ID NO: 31964 - DNA, 50 bp, synthetic construct
  source 1..50: mol_type = other DNA
tagaacttcaataagcaaaagagctcattctttttaaatttgaaattctt

SEQ ID NO: 31965 - DNA, 50 bp, synthetic construct
  source 1..50: mol_type = other DNA
ctttgtgtttgtacagggaaatgaccaaatttaaagtgacaaactgaaaa

SEQ ID NO: 31966 - DNA, 50 bp, synthetic construct
  source 1..50: mol_type = other DNA
cgagatgtccgaaggaaaaagaactggactttattccttcgtcaatggtt

SEQ ID NO: 31967 - DNA, 50 bp, synthetic construct
  source 1..50: mol_type = other DNA
caggggatatgacggggatgccggcgcgagaaggtcaacgatcctaccca

SEQ ID NO: 31968 - DNA, 50 bp, synthetic construct
  source 1..50: mol_type = other DNA
gtttaaatacaccacctaaagcgatagtcatccatatagtgtatttagac

SEQ ID NO: 31969 - DNA, 50 bp, synthetic construct
  source 1..50: mol_type = other DNA
atcagttcccgaatacggtccatatatgtagaaggacatcatgaaccgat

SEQ ID NO: 31970 - DNA, 50 bp, synthetic construct
  source 1..50: mol_type = other DNA
tttagttataataaatttcttgaatttgacgaagatttcttataaaaatc

SEQ ID NO: 31971 - DNA, 50 bp, synthetic construct
  source 1..50: mol_type = other DNA
aaacgtctatgaaaatatcgtccttccgcgatatattttgttttaatgtt

SEQ ID NO: 31972 - DNA, 50 bp, synthetic construct
  source 1..50: mol_type = other DNA
tggaggacatttttatgtcagaatggattatgacagcggcatatccgcat

SEQ ID NO: 31973 - DNA, 50 bp, synthetic construct
  source 1..50: mol_type = other DNA
tataaagattggatacggagaggaatacccaaaagcagaaaatacaaatg

SEQ ID NO: 31974 - DNA, 50 bp, synthetic construct
  source 1..50: mol_type = other DNA
tacaataagagatcttatcaggacggttccatcgaaccggatgaattgga

SEQ ID NO: 31975 - DNA, 50 bp, synthetic construct
  source 1..50: mol_type = other DNA
atttatcccgtaattgacttgctatttagagagtcccttgacggatatat

SEQ ID NO: 31976 - DNA, 50 bp, synthetic construct
  source 1..50: mol_type = other DNA
tggcaaaagctgaaatgaaaatgccggaattttccgggtgtctttttctt

SEQ ID NO: 31977 - DNA, 50 bp, synthetic construct
  source 1..50: mol_type = other DNA
tggatacccacccgcaggatccggatcacactcctatgtaattgtattta

SEQ ID NO: 31978 - DNA, 50 bp, synthetic construct
  source 1..50: mol_type = other DNA
gagaaactttctctcccttgtttgcggaaacatcgacatgatcatcacca

SEQ ID NO: 31979 - DNA, 50 bp, synthetic construct
  source 1..50: mol_type = other DNA
cccgtctatcaaatagtttttcccttggcataaactgaaaaaaatacggc

SEQ ID NO: 31980 - DNA, 50 bp, synthetic construct
  source 1..50: mol_type = other DNA
taagccccggaaccagcatctccacatggagatgatccatggggatcttg

SEQ ID NO: 31981 - DNA, 50 bp, synthetic construct
  source 1..50: mol_type = other DNA
tatttatattcagagaaaggatgatatctgcccagtctggaggataagca

SEQ ID NO: 31982 - DNA, 50 bp, synthetic construct
  source 1..50: mol_type = other DNA
atctccttaatatttaatattacatatttattaaaaaatattatatgaat

SEQ ID NO: 31983 - DNA, 50 bp, synthetic construct
  source 1..50: mol_type = other DNA
cactaaggtttataaaagcatactttttgaactattattaaaaaatgatg

SEQ ID NO: 31984 - DNA, 50 bp, synthetic construct
  source 1..50: mol_type = other DNA
gacagtgtggcggataccgtcctgcaggtggcggcatacgcccgagtgtc

SEQ ID NO: 31985 - DNA, 50 bp, synthetic construct
  source 1..50: mol_type = other DNA
gggtggaacaaaaagaaggaggagtcatcctgctctttttgttataccgg

SEQ ID NO: 31986 - DNA, 50 bp, synthetic construct
  source 1..50: mol_type = other DNA
acatttattcttaaaaaagccggtatcatcctttctttgaatataaatgt

SEQ ID NO: 31987 - DNA, 50 bp, synthetic construct
  source 1..50: mol_type = other DNA
gatatgatcctgatctgtatgagatatatcactcagaaagccaataatag

SEQ ID NO: 31988 - DNA, 50 bp, synthetic construct
  source 1..50: mol_type = other DNA
caaggaaagaaaggtgaaaggtattcccctttttctatgcactttccacg

SEQ ID NO: 31989 - DNA, 50 bp, synthetic construct
  source 1..50: mol_type = other DNA
atcatggcgaagaccttcatcgaataacctttgcagagcttcttcgcgag

SEQ ID NO: 31990 - DNA, 50 bp, synthetic construct
  source 1..50: mol_type = other DNA
cccggcacaggactacccggaccccgggttttacaaggccctgtgccggg

SEQ ID NO: 31991 - DNA, 50 bp, synthetic construct
  source 1..50: mol_type = other DNA
aatgaaagttacaatttcagatataacagtcttgctctcctgctttgcga

SEQ ID NO: 31992 - DNA, 50 bp, synthetic construct
  source 1..50: mol_type = other DNA
taacgggaagatgtaataacccaccccgaggagggtacatcttgtaaatg

SEQ ID NO: 31993 - DNA, 50 bp, synthetic construct
  source 1..50: mol_type = other DNA
ggcttttcaagaggaaaattatttcgaggcgtttcctccggacaaaaatt

SEQ ID NO: 31994 - DNA, 50 bp, synthetic construct
  source 1..50: mol_type = other DNA
ggtctttgaaatatcggcaaaattgtgatatttcagatattttaaagctt

SEQ ID NO: 31995 - DNA, 50 bp, synthetic construct
  source 1..50: mol_type = other DNA
ctgaagattgctatagtcgttactgcagtaacaaaggtggaatatatcaa

SEQ ID NO: 31996 - DNA, 50 bp, synthetic construct
  source 1..50: mol_type = other DNA
gaagcaggacggtaaattgtgtatataggttgaatttatcctaactttag

SEQ ID NO: 31997 - DNA, 50 bp, synthetic construct
  source 1..50: mol_type = other DNA
tcaagtgctgtggcttatacttgaaatccggtataaaaacaataccttgg

SEQ ID NO: 31998 - DNA, 50 bp, synthetic construct
  source 1..50: mol_type = other DNA
tgcatccgtgacgtggatgtggaaaagaccagctccatagttttgaggca

SEQ ID NO: 31999 - DNA, 50 bp, synthetic construct
  source 1..50: mol_type = other DNA
gaagatgaagtggcagaggcagcacatgaagcccaaacagctccatctgg

SEQ ID NO: 32000 - DNA, 50 bp, synthetic construct
  source 1..50: mol_type = other DNA
tctggaacgctatgaagcaggaatttcctcctaagacttgatttttcaga

SEQ ID NO: 32001 - DNA, 50 bp, synthetic construct
  source 1..50: mol_type = other DNA
tttaattcgtacccgaagttttagaatgggctgatcgtgttataatataa

SEQ ID NO: 32002 - DNA, 50 bp, synthetic construct
  source 1..50: mol_type = other DNA
agcggatgacgtccggcagcgcggcgtggcactgggcgtgctgctgtgct

SEQ ID NO: 32003 - DNA, 50 bp, synthetic construct
  source 1..50: mol_type = other DNA
gtaaatagaaagatgtacaaactcttttctttttacatctttttatgtac

SEQ ID NO: 32004 - DNA, 50 bp, synthetic construct
  source 1..50: mol_type = other DNA
cttacagatcaatatgtttgacggctccttccgttttggtagtctatata

SEQ ID NO: 32005 - DNA, 50 bp, synthetic construct
  source 1..50: mol_type = other DNA
attagttatttctgttttctgagaagaacaaaacaacagaaatttctaaa

SEQ ID NO: 32006 - DNA, 50 bp, synthetic construct
  source 1..50: mol_type = other DNA
tgataaaatattttaccatagaagaccgaagatgatacaatattttcgtt

SEQ ID NO: 32007 - DNA, 50 bp, synthetic construct
  source 1..50: mol_type = other DNA
cgcagattgtacttgctattattggccaatatattctttgataatcttgg

SEQ ID NO: 32008 - DNA, 50 bp, synthetic construct
  source 1..50: mol_type = other DNA
tcaaaaaagatatttatattcagagataatcttggagatatcttttgcag

SEQ ID NO: 32009 - DNA, 50 bp, synthetic construct
  source 1..50: mol_type = other DNA
atcgcccaatccccgcttttgactccagcggggaacgggtgttccgcttg

SEQ ID NO: 32010 - DNA, 50 bp, synthetic construct
  source 1..50: mol_type = other DNA
ttggctttcagagtgatatatagtgtttctaagaaacttctgaactcaga

SEQ ID NO: 32011 - DNA, 50 bp, synthetic construct
  source 1..50: mol_type = other DNA
ccagcctccaccttgcggccggtccgataccgccgtgaaagggcggtgtc

SEQ ID NO: 32012 - DNA, 50 bp, synthetic construct
  source 1..50: mol_type = other DNA
gagcgattatatagatgttacctatctttgttatatctatatcgtagctc

SEQ ID NO: 32013 - DNA, 50 bp, synthetic construct
  source 1..50: mol_type = other DNA
aaagaggagagccagattaaatataaattgataacatgactttcccaaat

SEQ ID NO: 32014 - DNA, 50 bp, synthetic construct
  source 1..50: mol_type = other DNA
tgaaaggaagcaattgatataaaaaactttatgaggtaggcttcgttttc

SEQ ID NO: 32015 - DNA, 50 bp, synthetic construct
  source 1..50: mol_type = other DNA
tatgattctatccagtgggatgtggatagtctagactggaaagaacaggg

SEQ ID NO: 32016 - DNA, 50 bp, synthetic construct
  source 1..50: mol_type = other DNA
tcttccttgcggaagctgtaaactctgtccgacagcttccgcacatccac

SEQ ID NO: 32017 - DNA, 50 bp, synthetic construct
  source 1..50: mol_type = other DNA
cataccgtctgcacttattatattataataacaaaatgccggaatgtatg

SEQ ID NO: 32018 - DNA, 50 bp, synthetic construct
  source 1..50: mol_type = other DNA
ggtgacatcgtaggcagtccctatgaatttgaccacaacaattacaagca

SEQ ID NO: 32019 - DNA, 50 bp, synthetic construct
  source 1..50: mol_type = other DNA
agatttattttccccagaacttgcaagaaagcgctgacaaaaacaaaaac

SEQ ID NO: 32020 - DNA, 50 bp, synthetic construct
  source 1..50: mol_type = other DNA
tacttaaaaacacaaggaggaattttaatcaattccaatcttttaacata

SEQ ID NO: 32021 - DNA, 50 bp, synthetic construct
  source 1..50: mol_type = other DNA
atttttccctaaaaaatgaggagagctctcttagtgcctgtagaggaaaa

SEQ ID NO: 32022 - DNA, 50 bp, synthetic construct
  source 1..50: mol_type = other DNA
gataacttaatgacaacctaaaagatattcaagattgtcataaaggtatt

SEQ ID NO: 32023 - DNA, 50 bp, synthetic construct
  source 1..50: mol_type = other DNA
tagaggatgcacaggccattttccgattatattggaataaacatttttac

SEQ ID NO: 32024 - DNA, 50 bp, synthetic construct
  source 1..50: mol_type = other DNA
aaaatggcaagaagcattactgttataccagacatatatctttgcaggtt

SEQ ID NO: 32025 - DNA, 50 bp, synthetic construct
  source 1..50: mol_type = other DNA
aataaaaaataagtagtaggcgggattttgcctgcccctttcttttatag

SEQ ID NO: 32026 - DNA, 50 bp, synthetic construct
  source 1..50: mol_type = other DNA
gttcttcctgatctgtagaaaccctgggaacatgactattgaggaggaat

SEQ ID NO: 32027 - DNA, 50 bp, synthetic construct
  source 1..50: mol_type = other DNA
tcaaattttttgcccttttttactatggtatccgtataataaatttatga

SEQ ID NO: 32028 - DNA, 50 bp, synthetic construct
  source 1..50: mol_type = other DNA
aatgaaaaagtccagaagccatgcggaagattcttctgcacccatggcag

SEQ ID NO: 32029 - DNA, 50 bp, synthetic construct
  source 1..50: mol_type = other DNA
tgacaaatcataaagaagctgattttgaacagcttgccgtgcagggagca

SEQ ID NO: 32030 - DNA, 50 bp, synthetic construct
  source 1..50: mol_type = other DNA
atcccgctgctcctagcagcttgcactcgccatggtcggagcagcgggat

SEQ ID NO: 32031 - DNA, 50 bp, synthetic construct
  source 1..50: mol_type = other DNA
acttttcaaaaaccatcgtagtacaattcgcacgatatagcattgattat

SEQ ID NO: 32032 - DNA, 50 bp, synthetic construct
  source 1..50: mol_type = other DNA
cacagaaaaatcgtcattttaccgggcggtgctgtcaccgccaccctgac

SEQ ID NO: 32033 - DNA, 50 bp, synthetic construct
  source 1..50: mol_type = other DNA
acaataaaattgattgtcctaaattgtaaacatccttgaaaagatatgac

SEQ ID NO: 32034 - DNA, 50 bp, synthetic construct
  source 1..50: mol_type = other DNA
gaatgtcctttgtcacaacgcttcccgaagcgtggcgacatgagatatta

SEQ ID NO: 32035 - DNA, 50 bp, synthetic construct
  source 1..50: mol_type = other DNA
attcggcatttccaccgagaacgccggcatcctcgcccacaatgtagaac

SEQ ID NO: 32036 - DNA, 50 bp, synthetic construct
  source 1..50: mol_type = other DNA
gctcagcgacgtggaacaagactacctggatcagttccagcagctttgcc

SEQ ID NO: 32037 - DNA, 50 bp, synthetic construct
  source 1..50: mol_type = other DNA
acagcgagaccgcagccagataccatactcgccggtgcgggtgtcgatct

SEQ ID NO: 32038 - DNA, 50 bp, synthetic construct
  source 1..50: mol_type = other DNA
aagtagagtggcaaaatcaagagtgttctcatagccgctccactcaaaaa

SEQ ID NO: 32039 - DNA, 50 bp, synthetic construct
  source 1..50: mol_type = other DNA
aaatctgattttttgcatattttgcttaccgctccgcaaaaaacatcttg

SEQ ID NO: 32040 - DNA, 50 bp, synthetic construct
  source 1..50: mol_type = other DNA
catgtttgtcctcctttgcactgtgaccggtgctgttttctacaaaaagc

SEQ ID NO: 32041 - DNA, 50 bp, synthetic construct
  source 1..50: mol_type = other DNA
attgtgtgtggctgaacagaggtgatgacaatcaggcggtggacaaaaag

SEQ ID NO: 32042 - DNA, 50 bp, synthetic construct
  source 1..50: mol_type = other DNA
gcccctcaaagagttcacccggtacgatacacacggcggatttcagcggc

SEQ ID NO: 32043 - DNA, 50 bp, synthetic construct
  source 1..50: mol_type = other DNA
cggagcgcgatatccgggtgtagcgcagtaagtacagatcgaccgggccg

SEQ ID NO: 32044 - DNA, 50 bp, synthetic construct
  source 1..50: mol_type = other DNA
tgcgcaaaaacggcggcctgcccgatcgggatagaaggatcgtctgcgca

SEQ ID NO: 32045 - DNA, 50 bp, synthetic construct
  source 1..50: mol_type = other DNA
actgcggctgccaccgccgccactatcgcagcggtctgtaaaaccgtgac

SEQ ID NO: 32046 - DNA, 50 bp, synthetic construct
  source 1..50: mol_type = other DNA
tctattgacttatactatatattcatggataggaatattattttcatagt

SEQ ID NO: 32047 - DNA, 50 bp, synthetic construct
  source 1..50: mol_type = other DNA
tataataattaagaaaatagtcaattttaggcgtttttttattttgtaat

SEQ ID NO: 32048 - DNA, 50 bp, synthetic construct
  source 1..50: mol_type = other DNA
taaatatattttactatatttaataatcaaaatattataataatcattat

SEQ ID NO: 32049 - DNA, 50 bp, synthetic construct
  source 1..50: mol_type = other DNA
ttttttaaactgtctataaattgaattcactttattttgtgaatttaaaa

SEQ ID NO: 32050 - DNA, 50 bp, synthetic construct
  source 1..50: mol_type = other DNA
tatgtggtagtgtatgttgctgacagttctccatctgcggaaaccacttt

SEQ ID NO: 32051 - DNA, 50 bp, synthetic construct
  source 1..50: mol_type = other DNA
tatatagaaaaataatcgcacgcatctgcggaaaccactttttcagcagg

SEQ ID NO: 32052 - DNA, 50 bp, synthetic construct
  source 1..50: mol_type = other DNA
aaagaggtttccaaggaagtaaaaagttctccatctgcggaaaccacttt

SEQ ID NO: 32053 - DNA, 50 bp, synthetic construct
  source 1..50: mol_type = other DNA
aagggactacacagggtaggtatctgtaccctttgtctgtgtattccttg

SEQ ID NO: 32054 - DNA, 50 bp, synthetic construct
  source 1..50: mol_type = other DNA
atctacatgatggtcagccttgccccggcagagcaccccaccgggcggtg

SEQ ID NO: 32055 - DNA, 50 bp, synthetic construct
  source 1..50: mol_type = other DNA
aacatcgctgaactctgccttgctatacgcacggtgatttcagcagactc

SEQ ID NO: 32056 - DNA, 50 bp, synthetic construct
  source 1..50: mol_type = other DNA
catagtaattgtttgccagagcgccggaggagcagcggaccgtcagtatg

SEQ ID NO: 32057 - DNA, 50 bp, synthetic construct
  source 1..50: mol_type = other DNA
atgatctggagttcgggcatcaattcggttatcaaagaacggttggtcgt

SEQ ID NO: 32058 - DNA, 50 bp, synthetic construct
  source 1..50: mol_type = other DNA
atggggacaggtttccctaatcattcaaggcacaggacacggatgccttg

SEQ ID NO: 32059 - DNA, 50 bp, synthetic construct
  source 1..50: mol_type = other DNA
gcaaaaagcccaaaagacatgcaggccggcgctatttttggcttctttgt

SEQ ID NO: 32060 - DNA, 50 bp, synthetic construct
  source 1..50: mol_type = other DNA
cggtgccacaaaccgagccattgccggagcaggttcgcattgtggatggc

SEQ ID NO: 32061 - DNA, 50 bp, synthetic construct
  source 1..50: mol_type = other DNA
gcattttgaaaggatatactataatatagaagttagcgattctgaactgc

SEQ ID NO: 32062 - DNA, 50 bp, synthetic construct
  source 1..50: mol_type = other DNA
ttctaaaagagttacactgttctcgttcagttcgattttatcttatctca

SEQ ID NO: 32063 - DNA, 50 bp, synthetic construct
  source 1..50: mol_type = other DNA
gaaagtacgtctgaatcgcggcttgcaatgcagggagtcggatgctatta

SEQ ID NO: 32064 - DNA, 50 bp, synthetic construct
  source 1..50: mol_type = other DNA
gtcaatcggtttctcctttctccgggaacaggcaggagaagccgagagaa

SEQ ID NO: 32065 - DNA, 50 bp, synthetic construct
  source 1..50: mol_type = other DNA
gcgggcggcggcgtgtcaagaaatttgcttctttacagcttttcaatttt

SEQ ID NO: 32066 - DNA, 50 bp, synthetic construct
  source 1..50: mol_type = other DNA
gaaaatgattatttaaattcgataaaccaattacttatataataattttt

SEQ ID NO: 32067 - DNA, 50 bp, synthetic construct
  source 1..50: mol_type = other DNA
tcgcaaactctatcagatccagtgcacgcttccactggttaagtgaaata

SEQ ID NO: 32068 - DNA, 50 bp, synthetic construct
  source 1..50: mol_type = other DNA
ccgctatgattggcatattggtgcgatcacgatcctgccggaggaagcgg

SEQ ID NO: 32069 - DNA, 50 bp, synthetic construct
  source 1..50: mol_type = other DNA
atcaccgacgaactgatggtgatctactttcccgaacaggcgcggatgac

SEQ ID NO: 32070 - DNA, 50 bp, synthetic construct
  source 1..50: mol_type = other DNA
tacgtacctccacaatatccgcattttataggatatacaggtataatgtt

SEQ ID NO: 32071 - DNA, 50 bp, synthetic construct
  source 1..50: mol_type = other DNA
tgcagcctgccatctggtagacgaaatcgtggagcagcgggaaggctgaa

SEQ ID NO: 32072 - DNA, 50 bp, synthetic construct
  source 1..50: mol_type = other DNA
cgtgaatagcttttgacctgtctttcaagacagataaaaagctggtcatc

SEQ ID NO: 32073 - DNA, 50 bp, synthetic construct
  source 1..50: mol_type = other DNA
tcgtcagcaaggttattctgtatcgtgacagccagcggacaggcgagcga

SEQ ID NO: 32074 - DNA, 50 bp, synthetic construct
  source 1..50: mol_type = other DNA
ttcgttttctttcgacacaggaggcgggccctgtgtgaaaagatgacccc

SEQ ID NO: 32075 - DNA, 50 bp, synthetic construct
  source 1..50: mol_type = other DNA
gtcccagctgatcgccgccagactccgcctccgggaggatctggaccggc

SEQ ID NO: 32076 - DNA, 50 bp, synthetic construct
  source 1..50: mol_type = other DNA
atgatgtgtaaagtgaggtgcttgcttcagcaggatggcatacacgaggc

SEQ ID NO: 32077 - DNA, 50 bp, synthetic construct
  source 1..50: mol_type = other DNA
aacacctttatagacgcaggagggatctaccgtacatcccaaaaggttta

SEQ ID NO: 32078 - DNA, 50 bp, synthetic construct
  source 1..50: mol_type = other DNA
gcggcggtgctgtgaccgttgccgtccggcgattactacatccccgacat

SEQ ID NO: 32079 - DNA, 50 bp, synthetic construct
  source 1..50: mol_type = other DNA
gatttcatgatctatgatataatctacaatataatcgtgatcacacaccc

SEQ ID NO: 32080 - DNA, 50 bp, synthetic construct
  source 1..50: mol_type = other DNA
aacatttgttccttgctggctgttatgaaaaagaaaaaatagcaaatgtt

SEQ ID NO: 32081 - DNA, 50 bp, synthetic construct
  source 1..50: mol_type = other DNA
ctaagaccaccaccaatcccaacggcagcggaccgtcagtatggtcttta

SEQ ID NO: 32082 - DNA, 50 bp, synthetic construct
  source 1..50: mol_type = other DNA
cgcggcggacggtcaacaacaccggccatttttataaccggtgatacgca

SEQ ID NO: 32083 - DNA, 50 bp, synthetic construct
  source 1..50: mol_type = other DNA
ccaggatatattcagggctttacacttggaaatggctgtgtgggaactgg

SEQ ID NO: 32084 - DNA, 50 bp, synthetic construct
  source 1..50: mol_type = other DNA
tttcctactgaaaatgaaacaaacatattttatgcaattcatttagtcaa

SEQ ID NO: 32085 - DNA, 50 bp, synthetic construct
  source 1..50: mol_type = other DNA
tgtgcacagaagtgaaaataacatctttgtaaaggcaggaattgtgtgat

SEQ ID NO: 32086 - DNA, 50 bp, synthetic construct
  source 1..50: mol_type = other DNA
ggtggacaactactcggtgttctacaccgcccaccgagacttcctcgctc

SEQ ID NO: 32087 - DNA, 50 bp, synthetic construct
  source 1..50: mol_type = other DNA
aaccaatttgaaaagcaacctaaaactttttaattttttcataattgaac

SEQ ID NO: 32088 - DNA, 50 bp, synthetic construct
  source 1..50: mol_type = other DNA
agtacgggttaatgttactaccttgaaaggtacggacgacagggacaggc

SEQ ID NO: 32089 - DNA, 50 bp, synthetic construct
  source 1..50: mol_type = other DNA
gtttgaagcgaaaatgcgcgagaaatgtcccgcaagcgctcggacgaaag

SEQ ID NO: 32090 - DNA, 50 bp, synthetic construct
  source 1..50: mol_type = other DNA
ggcatccttcttcggcgactcctgcgacggagtcgacgagcggggttgtt

SEQ ID NO: 32091 - DNA, 50 bp, synthetic construct
  source 1..50: mol_type = other DNA
tatgcttttcttttatggataaatatatttaacaatttgagacaagtccc

SEQ ID NO: 32092 - DNA, 50 bp, synthetic construct
  source 1..50: mol_type = other DNA
gataactgaaagaaaaattgctttttgaaggattttttgttttctaaatc

SEQ ID NO: 32093 - DNA, 50 bp, synthetic construct
  source 1..50: mol_type = other DNA
ccctaaataattttataaacatttgaccttccctgaaaagttgatttatg

SEQ ID NO: 32094 - DNA, 50 bp, synthetic construct
  source 1..50: mol_type = other DNA
tttctcaaagcccagctgaataaaattttattcagaaaggttttatctga

SEQ ID NO: 32095 - DNA, 50 bp, synthetic construct
  source 1..50: mol_type = other DNA
tgtaactttacaatagtaagggtaaaactctttaccaatgcggctttacc

SEQ ID NO: 32096 - DNA, 50 bp, synthetic construct
  source 1..50: mol_type = other DNA
gagatgatagagtacattctattcagaatcggaatgcgctcctccgcatc

SEQ ID NO: 32097 - DNA, 50 bp, synthetic construct
  source 1..50: mol_type = other DNA
cttcaaccgatcctgaaaccacgctagcgatgctcaaggatcagtggaac

SEQ ID NO: 32098 - DNA, 50 bp, synthetic construct
  source 1..50: mol_type = other DNA
aggcgtggacgccgatctatcaaccaactgatcgcccgccagccacggca

SEQ ID NO: 32099 - DNA, 50 bp, synthetic construct
  source 1..50: mol_type = other DNA
catattacactatataggctaggtgtttacgtgaacgatagtgtaacaga

SEQ ID NO: 32100 - DNA, 50 bp, synthetic construct
  source 1..50: mol_type = other DNA
ggaatatttgtattccatgaactatgtagattttggaggtcgaatggaat

SEQ ID NO: 32101 - DNA, 50 bp, synthetic construct
  source 1..50: mol_type = other DNA
gccaagaaagtgcagaacagcgttcaaacggttttcttaccttttttgca

SEQ ID NO: 32102 - DNA, 50 bp, synthetic construct
  source 1..50: mol_type = other DNA
cattatttagtcctcctatccttttaactttgaagagcgactagagaatg

SEQ ID NO: 32103 - DNA, 50 bp, synthetic construct
  source 1..50: mol_type = other DNA
atgtaattctgaatctgttagaaatattagtcaagttatcagacaaacta

SEQ ID NO: 32104 - DNA, 50 bp, synthetic construct
  source 1..50: mol_type = other DNA
ccgccatgaaaatggcttccggcagcggccgctctccagccgcttggcgt

SEQ ID NO: 32105 - DNA, 50 bp, synthetic construct
  source 1..50: mol_type = other DNA
ttggcctcttatccgagagctgccaaccgccgcctcggcggcgacgcctc

SEQ ID NO: 32106 - DNA, 50 bp, synthetic construct
  source 1..50: mol_type = other DNA
cgcgaggaacggtccgatgacggccagcgcgtgcctaaacgggccttcga

SEQ ID NO: 32107 - DNA, 50 bp, synthetic construct
  source 1..50: mol_type = other DNA
tgcgcggaaccgcggcacatcgatcgatcgacttgcaactttgtccggca

SEQ ID NO: 32108 - DNA, 50 bp, synthetic construct
  source 1..50: mol_type = other DNA
atccattcaaaaattgacaggtatcgaaacctttttatttgtgcgggaat

SEQ ID NO: 32109 - DNA, 50 bp, synthetic construct
  source 1..50: mol_type = other DNA
cgtcatcaggcttggcgacgacgacgtcgtcgtcacccacggcgggcacg

SEQ ID NO: 32110 - DNA, 50 bp, synthetic construct
  source 1..50: mol_type = other DNA
gctgctgttttcgaccttctccggatcgtgcgactgtcgaaattttgggc

SEQ ID NO: 32111 - DNA, 50 bp, synthetic construct
  source 1..50: mol_type = other DNA
gcgaggacatccgctcgctggttggcgaacctgatcgcgcgttgactcgt

SEQ ID NO: 32112 - DNA, 50 bp, synthetic construct
  source 1..50: mol_type = other DNA
tagtataaatcattaactgataaaaatggatcagcaaggggattcgaacc

SEQ ID NO: 32113 - DNA, 50 bp, synthetic construct
  source 1..50: mol_type = other DNA
aacatttgcacataatactaccatttatggaatcattaaagataaagaaa

SEQ ID NO: 32114 - DNA, 50 bp, synthetic construct
  source 1..50: mol_type = other DNA
gacaagaagaagtgacatcggcatcgctgatgatggcagcctctcttgca

SEQ ID NO: 32115 - DNA, 50 bp, synthetic construct
  source 1..50: mol_type = other DNA
caggtatggcggaatcgggcgatctggatcgcccgaccaataatgcgcgc

SEQ ID NO: 32116 - DNA, 50 bp, synthetic construct
  source 1..50: mol_type = other DNA
gatcgaagctttcctgtcgtccgcgctcggactgggcgttggccacgagc

SEQ ID NO: 32117 - DNA, 50 bp, synthetic construct
  source 1..50: mol_type = other DNA
gccgcggtttcgagggctggcccgacgccagcagtacgtcaaagagcggc

SEQ ID NO: 32118 - DNA, 50 bp, synthetic construct
  source 1..50: mol_type = other DNA
gctatatagtataaagtgcaatggatgtattgcaaaatttcctatacaca

SEQ ID NO: 32119 - DNA, 50 bp, synthetic construct
  source 1..50: mol_type = other DNA
ttttcctcttcagtcaatacttttgcaaaaacaaaaaaagaagcatttaa

SEQ ID NO: 32120 - DNA, 50 bp, synthetic construct
  source 1..50: mol_type = other DNA
gaattgggtttttcctcttcagtcaaccattcggacaaaaaagggcattt

SEQ ID NO: 32121 - DNA, 50 bp, synthetic construct
  source 1..50: mol_type = other DNA
gatgccctcatccgcatagatgtcaagtacttgataacactgagggcaac

SEQ ID NO: 32122 - DNA, 50 bp, synthetic construct
  source 1..50: mol_type = other DNA
ccgaagtaaatcattgatattaaatcattagccatgtcattttacttcgg

SEQ ID NO: 32123 - DNA, 50 bp, synthetic construct
  source 1..50: mol_type = other DNA
aacaagacctttgaccgcactggcagatgaggagcgtcagcaacctgctg

SEQ ID NO: 32124 - DNA, 50 bp, synthetic construct
  source 1..50: mol_type = other DNA
aatgctgatctggcttggtaagcaattgattgaatcgatagctcagaaat

SEQ ID NO: 32125 - DNA, 50 bp, synthetic construct
  source 1..50: mol_type = other DNA
actgcaagcaaataagaaacctgtggcagaaacgcagagttgcaggctat

SEQ ID NO: 32126 - DNA, 50 bp, synthetic construct
  source 1..50: mol_type = other DNA
tgctgagggagaatcgcctgacccgcggtcagagatacacggacaccttg

SEQ ID NO: 32127 - DNA, 50 bp, synthetic construct
  source 1..50: mol_type = other DNA
aaaagacttgaataaaaagctcttgcaacaaaccatttttcaactgtttg

SEQ ID NO: 32128 - DNA, 50 bp, synthetic construct
  source 1..50: mol_type = other DNA
tcaatgaagccatccttgattaattccacaatcaggcgctctgccattga

SEQ ID NO: 32129 - DNA, 50 bp, synthetic construct
  source 1..50: mol_type = other DNA
ggaagagccgccggaatgaacaccgttgtttttctgccggctgagtttaa

SEQ ID NO: 32130 - DNA, 50 bp, synthetic construct
  source 1..50: mol_type = other DNA
gactcatcatgaccagcttgaagttaatagctaagtgtaactgtgatatc

SEQ ID NO: 32131 - DNA, 50 bp, synthetic construct
  source 1..50: mol_type = other DNA
gttcaaattctgaaatcatttcgttcgtttgctgggcctagtaaatgtag

SEQ ID NO: 32132 - DNA, 50 bp, synthetic construct
  source 1..50: mol_type = other DNA
aagttgccttacacgtattggtttgaaaggagttgaggctgtctcggatt

SEQ ID NO: 32133 - DNA, 50 bp, synthetic construct
  source 1..50: mol_type = other DNA
cggcaggccgatcagcgaggacgaggcggacgagttcgatcccgccttcg

SEQ ID NO: 32134 - DNA, 50 bp, synthetic construct
  source 1..50: mol_type = other DNA
cccttctgaattggtgcggcgttccatcgtaaaaataatatttcaaacta

SEQ ID NO: 32135 - DNA, 50 bp, synthetic construct
  source 1..50: mol_type = other DNA
gccacctttcgcttttcttttgcggtaaagacggacaagcctgctgaacc

SEQ ID NO: 32136 - DNA, 50 bp, synthetic construct
  source 1..50: mol_type = other DNA
cggccagcctcctgttagcgttgatccatcggctaaaagacggaccgcag

SEQ ID NO: 32137 - DNA, 50 bp, synthetic construct
  source 1..50: mol_type = other DNA
ctggactgaggaaatgcgggatactagtagaatatctcaccatgttccag

SEQ ID NO: 32138 - DNA, 50 bp, synthetic construct
  source 1..50: mol_type = other DNA
caaagatgatattattgaaaaactgctcacaaaggatcttaccatagatg

SEQ ID NO: 32139 - DNA, 50 bp, synthetic construct
  source 1..50: mol_type = other DNA
cagggccgtcaccggcacgcactggaccgtccatgcttctggcggcctgc

SEQ ID NO: 32140 - DNA, 50 bp, synthetic construct
  source 1..50: mol_type = other DNA
gtgcaaaccagggttttgagtgtaaccacggaagccaggttgctttttac

SEQ ID NO: 32141 - DNA, 50 bp, synthetic construct
  source 1..50: mol_type = other DNA
ggaaaagcgcgatgtgaccgtcgcaggtttcggtcccgtccgtgccttcc

SEQ ID NO: 32142 - DNA, 50 bp, synthetic construct
  source 1..50: mol_type = other DNA
cacccgcggccacgagcgccacgagcacgtggcctgcgtcttcgcggacg

SEQ ID NO: 32143 - DNA, 50 bp, synthetic construct
  source 1..50: mol_type = other DNA
gtcggcggcgaggtcgaagagctgctcctttctggtgccccgccgcccga

SEQ ID NO: 32144 - DNA, 50 bp, synthetic construct
  source 1..50: mol_type = other DNA
acttgttttaggaggcttaaattaaaagatttaacaatgatgaaaatagt

SEQ ID NO: 32145 - DNA, 50 bp, synthetic construct
  source 1..50: mol_type = other DNA
cgcgtgaaaagaaattttaccttgatcatcaataatgttgagttcatgca

SEQ ID NO: 32146 - DNA, 50 bp, synthetic construct
  source 1..50: mol_type = other DNA
gcggctggcggaggcacttctggacgtcctcctgtcagtctgcgaaccgc

SEQ ID NO: 32147 - DNA, 50 bp, synthetic construct
  source 1..50: mol_type = other DNA
gtgtcattaatggaggcgtagatttaattcaacgctggcatcaattgctt

SEQ ID NO: 32148 - DNA, 50 bp, synthetic construct
  source 1..50: mol_type = other DNA
catcaggcgcgagatgcgcgggacgcgtggcggcgatcttgtcgcgggtg

SEQ ID NO: 32149 - DNA, 50 bp, synthetic construct
  source 1..50: mol_type = other DNA
cttgttttgaaatcataaagaggatcggctcttatttgattcaaaagtgc

SEQ ID NO: 32150 - DNA, 50 bp, synthetic construct
  source 1..50: mol_type = other DNA
ttctcacacttgattttgctggtgaaagccctaattatcaagcgttttca

SEQ ID NO: 32151 - DNA, 50 bp, synthetic construct
  source 1..50: mol_type = other DNA
aaaacggtttgggtctggcattgacgtaaggttggttgagccttcgtttt

SEQ ID NO: 32152 - DNA, 50 bp, synthetic construct
  source 1..50: mol_type = other DNA
agtattgtatcaaaaaaggtaatctagtctaccttctttgataggctttt

SEQ ID NO: 32153 - DNA, 50 bp, synthetic construct
  source 1..50: mol_type = other DNA
ttttctttatactcttttttaagaatttacaaaagatagtataataatag

SEQ ID NO: 32154 - DNA, 50 bp, synthetic construct
  source 1..50: mol_type = other DNA
gtctcaaagaaaccgtttctctcaagctgcagaaaccatttcttttattc

SEQ ID NO: 32155 - DNA, 50 bp, synthetic construct
  source 1..50: mol_type = other DNA
tttaaaggtcgagacgcggcaataggaatttccaccacttcgatagcgaa

SEQ ID NO: 32156 - DNA, 50 bp, synthetic construct
  source 1..50: mol_type = other DNA
actcgatatccttttccgccataaatgctttttaataccattaatgaaga

SEQ ID NO: 32157 - DNA, 50 bp, synthetic construct
  source 1..50: mol_type = other DNA
gagtacgagggcacgatctaccgctcgcgcaccgtcttgcccagatactt

SEQ ID NO: 32158 - DNA, 50 bp, synthetic construct
  source 1..50: mol_type = other DNA
ccgtccagtccttccggcgcgatgatcatcgcgccgagcggggccacgca

SEQ ID NO: 32159 - DNA, 50 bp, synthetic construct
  source 1..50: mol_type = other DNA
aacatgcaaaagccattattcccctgtagcgataatggctttcctatttt

SEQ ID NO: 32160 - DNA, 50 bp, synthetic construct
  source 1..50: mol_type = other DNA
ttataaaataattataccctcgtaaaatatgtgcggtaaatatttattaa

SEQ ID NO: 32161 - DNA, 50 bp, synthetic construct
  source 1..50: mol_type = other DNA
tctaaaaaaaactttggataaagtttattttatgggcagtattttttgag

SEQ ID NO: 32162 - DNA, 50 bp, synthetic construct
  source 1..50: mol_type = other DNA
tcataacccatgaactttgtggtatttatgccaaagttcatggaatacaa

SEQ ID NO: 32163 - DNA, 50 bp, synthetic construct
  source 1..50: mol_type = other DNA
ggcctgataagtaacccttatacaaatggtagcggctgttgtggtaatga

SEQ ID NO: 32164 - DNA, 50 bp, synthetic construct
  source 1..50: mol_type = other DNA
agaatattcaaatgacaaagacaaattattcatttttgctttcatcttcg

SEQ ID NO: 32165 - DNA, 50 bp, synthetic construct
  source 1..50: mol_type = other DNA
gcgggccccatcggtcttgccgccggggcctgcaccgcgtgaaggcccgc

SEQ ID NO: 32166 - DNA, 50 bp, synthetic construct
  source 1..50: mol_type = other DNA
tcccagtgagcaagttcttccgtgcctatatccgttaaaattgccttagc

SEQ ID NO: 32167 - DNA, 50 bp, synthetic construct
  source 1..50: mol_type = other DNA
ctaacaattatattatacatgacaactcatccttatcaatttcttgctta

SEQ ID NO: 32168 - DNA, 50 bp, synthetic construct
  source 1..50: mol_type = other DNA
tagataagcacgaaacagttcttttaaaatatcattttcgtcatcatctt

SEQ ID NO: 32169 - DNA, 50 bp, synthetic construct
  source 1..50: mol_type = other DNA
accaattccagtcaatgaaagaaaacctcctccgattctactgaatcggt

SEQ ID NO: 32170 - DNA, 50 bp, synthetic construct
  source 1..50: mol_type = other DNA
ataccgagatacgtttttttatcatatcgaaaaaaagggttgcggcctat

SEQ ID NO: 32171 - DNA, 50 bp, synthetic construct
  source 1..50: mol_type = other DNA
ataataacaaagaaacaaagaacactcaaggtctgcgcctatgttagggt

SEQ ID NO: 32172 - DNA, 50 bp, synthetic construct
  source 1..50: mol_type = other DNA
gaccgaactgccctggagaatggaatgcccctgttgtggtaaaagaactc

SEQ ID NO: 32173 - DNA, 50 bp, synthetic construct
  source 1..50: mol_type = other DNA
ggtccaaagagaatttccgtcttatagaagatggtaaacacatttaagag

SEQ ID NO: 32174 - DNA, 50 bp, synthetic construct
  source 1..50: mol_type = other DNA
caatctccaacccatgagatcaaggccggtccggcacctgttgtcgatac

SEQ ID NO: 32175 - DNA, 50 bp, synthetic construct
  source 1..50: mol_type = other DNA
acagtaagcgaaactccctgctaccggagataacctgtatggctgccagt

SEQ ID NO: 32176 - DNA, 50 bp, synthetic construct
  source 1..50: mol_type = other DNA
tcagcgtagccgggatggtggtaatcttctcaccggtggtgcggtcgtag

SEQ ID NO: 32177 - DNA, 50 bp, synthetic construct
  source 1..50: mol_type = other DNA
cgacagccagcggtagaccgagccgcgcatcggtaccccgaaggctcaat

SEQ ID NO: 32178 - DNA, 50 bp, synthetic construct
  source 1..50: mol_type = other DNA
gcgtttctcggcgccttcccctgaaacagagtctggaatagaagaaacgc

SEQ ID NO: 32179 - DNA, 50 bp, synthetic construct
  source 1..50: mol_type = other DNA
gtcttaaatacaaatgtaattgaatattattttatatttatctttaagat

SEQ ID NO: 32180 - DNA, 50 bp, synthetic construct
  source 1..50: mol_type = other DNA
gatccggtcctttacttcatgaaggacttaatgacgccagtgacccgagg

SEQ ID NO: 32181 - DNA, 50 bp, synthetic construct
  source 1..50: mol_type = other DNA
gatgattcgacgcaactcttttttataaaaaagagatccatagaattttc

SEQ ID NO: 32182 - DNA, 50 bp, synthetic construct
  source 1..50: mol_type = other DNA
gccatcaggatcaacgagacggtcatgtggctgccggtgatcgccttggc

SEQ ID NO: 32183 - DNA, 50 bp, synthetic construct
  source 1..50: mol_type = other DNA
gactcattgtgcttataagatgttgcaaccaatacaaagaaacgtgatgc

SEQ ID NO: 32184 - DNA, 50 bp, synthetic construct
  source 1..50: mol_type = other DNA
ccagaaattttggaaatgctatttgaaatagttttaagctcaatcaacgg

SEQ ID NO: 32185 - DNA, 50 bp, synthetic construct
  source 1..50: mol_type = other DNA
aatgtaaataacagcgcgatgtttcaaaacctgtagttgttaacgtttcg

SEQ ID NO: 32186 - DNA, 50 bp, synthetic construct
  source 1..50: mol_type = other DNA
tggaactgggggcaataataaatcccgattttttgatgggagcactgagg

SEQ ID NO: 32187 - DNA, 50 bp, synthetic construct
  source 1..50: mol_type = other DNA
tgcttcctttttggggtgcattggctttcagccagtgcctcctgaaagag

SEQ ID NO: 32188 - DNA, 50 bp, synthetic construct
  source 1..50: mol_type = other DNA
gggagtggggtacccgatcgttacgagcgccgccagggggcccaactccc

SEQ ID NO: 32189 - DNA, 50 bp, synthetic construct
  source 1..50: mol_type = other DNA
cctcgatcacccggtagtcgcacggcaggcgacgaagacggtgagccagg

SEQ ID NO: 32190 - DNA, 50 bp, synthetic construct
  source 1..50: mol_type = other DNA
cgcgtcggctgtccgattgtgggttgacgcagaatcgggaataacttgaa

SEQ ID NO: 32191 - DNA, 50 bp, synthetic construct
  source 1..50: mol_type = other DNA
aacggcagcatgtccctcaacttccttgccactgagtcgtcgctgccgtg

SEQ ID NO: 32192 - DNA, 50 bp, synthetic construct
  source 1..50: mol_type = other DNA
gtgcgaactccgcctgtaccatatcgataaagtcaaggcaattcgcgcca

SEQ ID NO: 32193 - DNA, 50 bp, synthetic construct
  source 1..50: mol_type = other DNA
tcaaatttatatatgtacaaagttttatcaaaattaatacatcaatttta

SEQ ID NO: 32194 - DNA, 50 bp, synthetic construct
  source 1..50: mol_type = other DNA
tcgttctttgctaggaaacggtttatgatacatttcctagccaagaacgg

SEQ ID NO: 32195 - DNA, 50 bp, synthetic construct
  source 1..50: mol_type = other DNA
acgcttgcctgatagttaatttgacgtacatattgcgatcaagcaaacgt

SEQ ID NO: 32196 - DNA, 50 bp, synthetic construct
  source 1..50: mol_type = other DNA
tcttaagcctttgatttatatgaattaatatctaaaagcatcgcttaaga

SEQ ID NO: 32197 - DNA, 50 bp, synthetic construct
  source 1..50: mol_type = other DNA
tgaagcagcctgccctttctcggactgccaagacaggggccgcagaaaca

SEQ ID NO: 32198 - DNA, 50 bp, synthetic construct
  source 1..50: mol_type = other DNA
catgattctgaatatttatataaaaatttatctgcgaattctgaataatg

SEQ ID NO: 32199 - DNA, 50 bp, synthetic construct
  source 1..50: mol_type = other DNA
agttaaagatgtaaccggtttttaataatatttttagtacaataacaaat

SEQ ID NO: 32200 - DNA, 50 bp, synthetic construct
  source 1..50: mol_type = other DNA
tgtgcagccagtgagcaagatggacgtccgtccaactttcgcggcgcgag

SEQ ID NO: 32201 - DNA, 50 bp, synthetic construct
  source 1..50: mol_type = other DNA
cctgaccatggaattgcgctcctgcgcaggaggggcaggccatcgccagc

SEQ ID NO: 32202 - DNA, 50 bp, synthetic construct
  source 1..50: mol_type = other DNA
atatgaaaacatcgtgttcacctcacaaggtttatacagtgttttgatat

SEQ ID NO: 32203 - DNA, 50 bp, synthetic construct
  source 1..50: mol_type = other DNA
tgaactcggtgtagtaggtgacctggtggtgacaaggtatacccgtttct

SEQ ID NO: 32204 - DNA, 50 bp, synthetic construct
  source 1..50: mol_type = other DNA
cttatcctcggcccatgatcccagggagggggacatctgcaatggacgaa

SEQ ID NO: 32205 - DNA, 50 bp, synthetic construct
  source 1..50: mol_type = other DNA
aaaatatcagccaactttgggtacattatcaaaaagaatgatggtgttgt

SEQ ID NO: 32206 - DNA, 50 bp, synthetic construct
  source 1..50: mol_type = other DNA
tttgaattttttagaggatgtttgtcgagcatcacgaatattaatatcct

SEQ ID NO: 32207 - DNA, 50 bp, synthetic construct
  source 1..50: mol_type = other DNA
gctggtaaactgctcatcggagtccggtgtcgtctgtcaatgcatccaga

SEQ ID NO: 32208 - DNA, 50 bp, synthetic construct
  source 1..50: mol_type = other DNA
tttcgttgtgccaaaaatcccgcgagcgtgggaattccggcaattcatca

SEQ ID NO: 32209 - DNA, 50 bp, synthetic construct
  source 1..50: mol_type = other DNA
aaacagaatgaaagcacaaataaattattatttattattttcttctgttg

SEQ ID NO: 32210 - DNA, 50 bp, synthetic construct
  source 1..50: mol_type = other DNA
tagctgctgaccaccaatcgtggtcgtccccggagtaaggtgagcagata

SEQ ID NO: 32211 - DNA, 50 bp, synthetic construct
  source 1..50: mol_type = other DNA
tactgacgacgatgaagattttctcaacaaaatctacagcgtttttcttt

SEQ ID NO: 32212 - DNA, 50 bp, synthetic construct
  source 1..50: mol_type = other DNA
ttaaaggaagtcttagattttatctaggcagcgtctaagagagtattaaa

SEQ ID NO: 32213 - DNA, 50 bp, synthetic construct
  source 1..50: mol_type = other DNA
tttctgattgatcctcaagaagattaatctatttgaaaatatttcaataa

SEQ ID NO: 32214 - DNA, 50 bp, synthetic construct
  source 1..50: mol_type = other DNA
aaaaatataaaaataagcaaaaatatagggttctagatctttatatttat

SEQ ID NO: 32215 - DNA, 50 bp, synthetic construct
  source 1..50: mol_type = other DNA
tttgcagcccttaataggctgcaaatcaacaacctataaaggtacccaca

SEQ ID NO: 32216 - DNA, 50 bp, synthetic construct
  source 1..50: mol_type = other DNA
tatattataccataaacggacggacttggaagatgaagtaaagaaatata

SEQ ID NO: 32217 - DNA, 50 bp, synthetic construct
  source 1..50: mol_type = other DNA
ttgtcaaacactcctgaaaaaataaatatttgatacaatgtgtgtaataa

SEQ ID NO: 32218 - DNA, 50 bp, synthetic construct
  source 1..50: mol_type = other DNA
ctgtcggagaataatcataagaaaaccagcttctgcagcacctcgatcag

SEQ ID NO: 32219 - DNA, 50 bp, synthetic construct
  source 1..50: mol_type = other DNA
tccatgcaccatagaaggaggctctagaggatttgtcaatgaagtttcga

SEQ ID NO: 32220 - DNA, 50 bp, synthetic construct
  source 1..50: mol_type = other DNA
accctttggcattttaacatcccctttaaaatccggaaattataaagtga

SEQ ID NO: 32221 - DNA, 50 bp, synthetic construct
  source 1..50: mol_type = other DNA
atccgcatagatgtctacgaactcataaagtgattcttacctatatagat

SEQ ID NO: 32222 - DNA, 50 bp, synthetic construct
  source 1..50: mol_type = other DNA
ttttatgcattgatgtaaaataactatataaagctaacaaaataatataa

SEQ ID NO: 32223 - DNA, 50 bp, synthetic construct
  source 1..50: mol_type = other DNA
ttatattattttgttagctttatatagttattttacatcaattcataaaa

SEQ ID NO: 32224 - DNA, 50 bp, synthetic construct
  source 1..50: mol_type = other DNA
actttttttgatgaattagatttaagtgaatcaaatgttagcaaatgtgt

SEQ ID NO: 32225 - DNA, 50 bp, synthetic construct
  source 1..50: mol_type = other DNA
caccctgcatttctgcaaggtgtccgatattcttgaagaaaagatactgg

SEQ ID NO: 32226 - DNA, 50 bp, synthetic construct
  source 1..50: mol_type = other DNA
tttatcagccaaagtaatattattaaaactgccttgttttttgccataat

SEQ ID NO: 32227 - DNA, 50 bp, synthetic construct
  source 1..50: mol_type = other DNA
ccacccctttttttataataattttataattacaataagaaaagggatgc

SEQ ID NO: 32228 - DNA, 50 bp, synthetic construct
  source 1..50: mol_type = other DNA
gtaaaaaaggaaattgctaatttaaacaaattcttattctctccatctac

SEQ ID NO: 32229 - DNA, 50 bp, synthetic construct
  source 1..50: mol_type = other DNA
ttcgcccgccagatcgcctagggctgtggttgatagatcgggctccacgc

SEQ ID NO: 32230 - DNA, 50 bp, synthetic construct
  source 1..50: mol_type = other DNA
gagtatagagactatataattacaaacttaatattaaagtcttcttcatt

SEQ ID NO: 32231 - DNA, 50 bp, synthetic construct
  source 1..50: mol_type = other DNA
acccattttatcattttttaggaaatctttgaatatagcaaaaagccctg

SEQ ID NO: 32232 - DNA, 50 bp, synthetic construct
  source 1..50: mol_type = other DNA
aaaaatgaaggatctgctgctgcacctgcatggggctatcctttgatttt

SEQ ID NO: 32233 - DNA, 50 bp, synthetic construct
  source 1..50: mol_type = other DNA
ttcttttttaagaaaaggagcgacaagtccgtgcttttctattagttgtt

SEQ ID NO: 32234 - DNA, 50 bp, synthetic construct
  source 1..50: mol_type = other DNA
ttatgccgagcagggcaggatagtcgattatgcagctctcaagtccggaa

SEQ ID NO: 32235 - DNA, 50 bp, synthetic construct
  source 1..50: mol_type = other DNA
gaggccggaatttccgtcagggcatagccgttgacggagagggtggcctc

SEQ ID NO: 32236 - DNA, 50 bp, synthetic construct
  source 1..50: mol_type = other DNA
ggaatctgtctgtcggagaataatcagttggaatccctgaaagaaattca

SEQ ID NO: 32237 - DNA, 50 bp, synthetic construct
  source 1..50: mol_type = other DNA
agcaattgataatgtgaaatatgaaaagtaattcaagattaaaaagagta

SEQ ID NO: 32238 - DNA, 50 bp, synthetic construct
  source 1..50: mol_type = other DNA
ttgatgagattatggatttattttataaataaaaagaaaaatctatttca

SEQ ID NO: 32239 - DNA, 50 bp, synthetic construct
  source 1..50: mol_type = other DNA
tctgttttatttcatagtctaccttatggtataatatagacggaaagact

SEQ ID NO: 32240 - DNA, 50 bp, synthetic construct
  source 1..50: mol_type = other DNA
gtaaagggaaaaatactcttatgatattattagcctatttttttatgtat

SEQ ID NO: 32241 - DNA, 50 bp, synthetic construct
  source 1..50: mol_type = other DNA
gaaatattcccgataaaaaatcttttcttactttgcggtatgaaaattta

SEQ ID NO: 32242 - DNA, 50 bp, synthetic construct
  source 1..50: mol_type = other DNA
ggatcgagaaattgggaacagtgggtaagctgttctatttttgccgctcg

SEQ ID NO: 32243 - DNA, 50 bp, synthetic construct
  source 1..50: mol_type = other DNA
ttgtacatgactcagtagctcagctgattcagctactacgttaacgacaa

SEQ ID NO: 32244 - DNA, 50 bp, synthetic construct
  source 1..50: mol_type = other DNA
aaaatgacggattttccatgttaaaattacggcaaaaaaatggtcattcg

SEQ ID NO: 32245 - DNA, 50 bp, synthetic construct
  source 1..50: mol_type = other DNA
ggctttttaccataaaagacatggagtgtaggtatttgtgctaaaatatt

SEQ ID NO: 32246 - DNA, 50 bp, synthetic construct
  source 1..50: mol_type = other DNA
ttagaatatctaaatcaatgattatggaatttttaaacatcttattttaa

SEQ ID NO: 32247 - DNA, 50 bp, synthetic construct
  source 1..50: mol_type = other DNA
attatttcaatttcctacataaattaattttcatacaatttatacattat

SEQ ID NO: 32248 - DNA, 50 bp, synthetic construct
  source 1..50: mol_type = other DNA
agcgcttgacaaaacggcctgcagcgcaagatgcaccttcaggaagcgct

SEQ ID NO: 32249 - DNA, 50 bp, synthetic construct
  source 1..50: mol_type = other DNA
ctggaaaatgcggccggtgccttccggaaggatggggcattattttttta

SEQ ID NO: 32250 - DNA, 50 bp, synthetic construct
  source 1..50: mol_type = other DNA
tttgcagggcagccagccgcccggagagcgccggaacacgcgcccggcaa

SEQ ID NO: 32251 - DNA, 50 bp, synthetic construct
  source 1..50: mol_type = other DNA
ttaccaaggagcagagggatgccatatgggtactgtctggttgacggaga

SEQ ID NO: 32252 - DNA, 50 bp, synthetic construct
  source 1..50: mol_type = other DNA
tgattatgctcagttatttttacaattgttctttgaactcaggcaaaggc

SEQ ID NO: 32253 - DNA, 50 bp, synthetic construct
  source 1..50: mol_type = other DNA
actaaaatacaaaaatagcgctaaactgagcctgatacagatattgtagt

SEQ ID NO: 32254 - DNA, 50 bp, synthetic construct
  source 1..50: mol_type = other DNA
gccagtttattatgccaacaggactttcttttttaagagtataatttgct

SEQ ID NO: 32255 - DNA, 50 bp, synthetic construct
  source 1..50: mol_type = other DNA
gtttatcctattttttaaaaataaatttattttaaaaacattgtaatact

SEQ ID NO: 32256 - DNA, 50 bp, synthetic construct
  source 1..50: mol_type = other DNA
tattttacagccgtttccgtaaatccatttaccataatctctgtaatcga

SEQ ID NO: 32257 - DNA, 50 bp, synthetic construct
  source 1..50: mol_type = other DNA
tgggtaaaagtgtatggtttccaagagtataaaaaatacacctatacggt

SEQ ID NO: 32258 - DNA, 50 bp, synthetic construct
  source 1..50: mol_type = other DNA
aagtatcattgtgattttcccttgtacaactaaaaaacactagatagctt

SEQ ID NO: 32259 - DNA, 50 bp, synthetic construct
  source 1..50: mol_type = other DNA
gggtaaagaagtctacacctaatatataaatgattaccttattgttaatc

SEQ ID NO: 32260 - DNA, 50 bp, synthetic construct
  source 1..50: mol_type = other DNA
cctgaatttattcctgctttcgatcactctaaagcgactacatatcaagg

SEQ ID NO: 32261 - DNA, 50 bp, synthetic construct
  source 1..50: mol_type = other DNA
actatgttatgtgtcggcagaatttgcctgcagcctcggatcttcatagt

SEQ ID NO: 32262 - DNA, 50 bp, synthetic construct
  source 1..50: mol_type = other DNA
tgcttatcatttaacacccatttctagattctggttacaattcataaata

SEQ ID NO: 32263 - DNA, 50 bp, synthetic construct
  source 1..50: mol_type = other DNA
cttgaaatcggctttgaaatattatataatagaccatgaacgatatgccc

SEQ ID NO: 32264 - DNA, 50 bp, synthetic construct
  source 1..50: mol_type = other DNA
ttatatataaaacattggaggtattatttaataaaaaataatataaatac

SEQ ID NO: 32265 - DNA, 50 bp, synthetic construct
  source 1..50: mol_type = other DNA
cggcgcacctggatgcgggaagtcgagcctaaaactctcacgggctgcct

SEQ ID NO: 32266 - DNA, 50 bp, synthetic construct
  source 1..50: mol_type = other DNA
gtaaccacttatcttaaaaatttttcctgatttctgggataacctcacat

SEQ ID NO: 32267 - DNA, 50 bp, synthetic construct
  source 1..50: mol_type = other DNA
aatttatcaaaaaatttatggaggaacctccgttatattttatgaaaaat

SEQ ID NO: 32268 - DNA, 50 bp, synthetic construct
  source 1..50: mol_type = other DNA
tttcttttggttagtttttaaattaggtatgacaaactaacctgaagcgt

SEQ ID NO: 32269 - DNA, 50 bp, synthetic construct
  source 1..50: mol_type = other DNA
aagcttcagaccccataaatccaatattggagttgtgggagaaggatctt

SEQ ID NO: 32270 - DNA, 50 bp, synthetic construct
  source 1..50: mol_type = other DNA
gtgtcccggcttgtcatggtgtcctggtacaatacgattgtcgggtcgat

SEQ ID NO: 32271 - DNA, 50 bp, synthetic construct
  source 1..50: mol_type = other DNA
cacttgtcagatatcatttttaaatttttaaatatgatatactaatcatg

SEQ ID NO: 32272 - DNA, 50 bp, synthetic construct
  source 1..50: mol_type = other DNA
acagtgtgaatattatgaaaatcatatgaatttttcaaagataacagtat

SEQ ID NO: 32273 - DNA, 50 bp, synthetic construct
  source 1..50: mol_type = other DNA
accgatacagaaggtggcgtgatatttatcttatcactaatggtatcggc

SEQ ID NO: 32274 - DNA, 50 bp, synthetic construct
  source 1..50: mol_type = other DNA
aagagcttcctcgacctggcggagtccacctccagcgaggaacagctcac

SEQ ID NO: 32275 - DNA, 50 bp, synthetic construct
  source 1..50: mol_type = other DNA
gggaacacatatccagggccaagagctggtgcaacgggaactggagcgcc

SEQ ID NO: 32276 - DNA, 50 bp, synthetic construct
  source 1..50: mol_type = other DNA
aatataaagtgtattatattaaatttattggataaattagaatttattag

SEQ ID NO: 32277 - DNA, 50 bp, synthetic construct
  source 1..50: mol_type = other DNA
ttgatgaatttgatttagtaggtatgtaactattaatactaataaattaa

SEQ ID NO: 32278 - DNA, 50 bp, synthetic construct
  source 1..50: mol_type = other DNA
atttaacatagaaaaattaaatattattattatgtttttactttttaaat

SEQ ID NO: 32279 - DNA, 50 bp, synthetic construct
  source 1..50: mol_type = other DNA
tagaatattattagttttaactaattgtttttaaaattaataataaattt

SEQ ID NO: 32280 - DNA, 50 bp, synthetic construct
  source 1..50: mol_type = other DNA
tttttatacccttttttagagggaattccatctcgtggagggtcaagcac

SEQ ID NO: 32281 - DNA, 50 bp, synthetic construct
  source 1..50: mol_type = other DNA
aatataagtaatgtgtttacatattgagaaagaaaagcttattggtaatt

SEQ ID NO: 32282 - DNA, 50 bp, synthetic construct
  source 1..50: mol_type = other DNA
caagacaaaactcctcgaaaaatatcgatttttcttccctcaatgatatc

SEQ ID NO: 32283 - DNA, 50 bp, synthetic construct
  source 1..50: mol_type = other DNA
ttggaggattttgatgagcaggtcttcggctgtgcatgcagctcgtcaaa

SEQ ID NO: 32284 - DNA, 50 bp, synthetic construct
  source 1..50: mol_type = other DNA
ttattctccgaaatctgttgactttaaagtttcgttgcatcggagattgt

SEQ ID NO: 32285 - DNA, 50 bp, synthetic construct
  source 1..50: mol_type = other DNA
tgtaagttggggcaatggcagcgccggcccggtctttacagcagcttgat

SEQ ID NO: 32286 - DNA, 50 bp, synthetic construct
  source 1..50: mol_type = other DNA
tcaagattcccgtgggtgtcgcctgttggcacacatcacgggaatctcac

SEQ ID NO: 32287 - DNA, 50 bp, synthetic construct
  source 1..50: mol_type = other DNA
ggcggggctggacagcgtgtatgtggcgacaccttgaatccaggtgcgcg

SEQ ID NO: 32288 - DNA, 50 bp, synthetic construct
  source 1..50: mol_type = other DNA
tgcgcgtttttgccgttctgcgtgccggatgggaacggcaaaaaaatttt

SEQ ID NO: 32289 - DNA, 50 bp, synthetic construct
  source 1..50: mol_type = other DNA
acgattatggccaagcgcagcaacgctttgctgacctcacgcatatgcgc

SEQ ID NO: 32290 - DNA, 50 bp, synthetic construct
  source 1..50: mol_type = other DNA
aggcggctacccggcgcttcttgggttcaagagattaatagacttacagt

SEQ ID NO: 32291 - DNA, 50 bp, synthetic construct
  source 1..50: mol_type = other DNA
aactgtcaggatactatcttcggcgggcgaaatcatccggaatgagccgg

SEQ ID NO: 32292 - DNA, 50 bp, synthetic construct
  source 1..50: mol_type = other DNA
cgccgcgcaaggaaaacagcagcaaacgctgtccgcccccttgcaagata

SEQ ID NO: 32293 - DNA, 50 bp, synthetic construct
  source 1..50: mol_type = other DNA
aatacggttgggaattcctttttatcgtttaacgatttccgaaccgtcat

SEQ ID NO: 32294 - DNA, 50 bp, synthetic construct
  source 1..50: mol_type = other DNA
gtctgtggacactcttgcgtatcctgtcatacgcagatgtgtgcgaggca

SEQ ID NO: 32295 - DNA, 50 bp, synthetic construct
  source 1..50: mol_type = other DNA
aataaaaatattgctgtttgagataaaactaaagaaacggtatttttctt

SEQ ID NO: 32296 - DNA, 50 bp, synthetic construct
  source 1..50: mol_type = other DNA
atgttgagatcgccttccgggacggtagtcccggaagttggtctcgatat

SEQ ID NO: 32297 - DNA, 50 bp, synthetic construct
  source 1..50: mol_type = other DNA
gcaaacccttgaaaatactgggaaagatccccgtattatcaaggatccgc

SEQ ID NO: 32298 - DNA, 50 bp, synthetic construct
  source 1..50: mol_type = other DNA
atcaatgggagccgtgtcacagccggataagtggatgaaaaccacttatc

SEQ ID NO: 32299 - DNA, 50 bp, synthetic construct
  source 1..50: mol_type = other DNA
tagcagcggaatatgtgtgttcggctgcttacatttcagttccgcccgaa

SEQ ID NO: 32300 - DNA, 50 bp, synthetic construct
  source 1..50: mol_type = other DNA
tggatatgaccgtcctgccatttcgcgaaaggtagctgcggtcgatccca

SEQ ID NO: 32301 - DNA, 50 bp, synthetic construct
  source 1..50: mol_type = other DNA
ccgcattgtatcagcttatccatgaccatcaatccgctgacacacctttc

SEQ ID NO: 32302 - DNA, 50 bp, synthetic construct
  source 1..50: mol_type = other DNA
ccgcctgttcaaacagcaggctaccggtttattgctgtccccacgggtag

SEQ ID NO: 32303 - DNA, 50 bp, synthetic construct
  source 1..50: mol_type = other DNA
attacttcggcatatccgaagcaatatactgtctgatatctgttcttatc

SEQ ID NO: 32304 - DNA, 50 bp, synthetic construct
  source 1..50: mol_type = other DNA
gattcccaatacaattaataattgggtgtagataagttcgtgctggaatg

SEQ ID NO: 32305 - DNA, 50 bp, synthetic construct
  source 1..50: mol_type = other DNA
atggtgaagaaggtgcggccggccagcagttcctgctccaactccaccat

SEQ ID NO: 32306 - DNA, 50 bp, synthetic construct
  source 1..50: mol_type = other DNA
cgatttcgcccagctccattttgtaggacaactggtgcaccagaggtacg

SEQ ID NO: 32307 - DNA, 50 bp, synthetic construct
  source 1..50: mol_type = other DNA
tcaatggggtcggcatgatccttgttcccggcttttgccatacccattat

SEQ ID NO: 32308 - DNA, 50 bp, synthetic construct
  source 1..50: mol_type = other DNA
ttttcagtttatgccaaggaaagaaaatcagcactggcaatattcatgtc

SEQ ID NO: 32309 - DNA, 50 bp, synthetic construct
  source 1..50: mol_type = other DNA
tttaacaagtttcttgtaaaattatttctttttaggagggatctgtttga

SEQ ID NO: 32310 - DNA, 50 bp, synthetic construct
  source 1..50: mol_type = other DNA
tctcagaacttttgttgatgaagtgcgcttctggacgaaggttctggaag

SEQ ID NO: 32311 - DNA, 50 bp, synthetic construct
  source 1..50: mol_type = other DNA
gcataaccggcgacccggcgctttttgttgacgcgaatcgccggtggaaa

SEQ ID NO: 32312 - DNA, 50 bp, synthetic construct
  source 1..50: mol_type = other DNA
ataagcattcgcatgcacatcttctcaaaaaagtgcaagccaaatgaaga

SEQ ID NO: 32313 - DNA, 50 bp, synthetic construct
  source 1..50: mol_type = other DNA
aattcgaaaatatctgtaaaaatcataatttcaactgatataatttaatt

SEQ ID NO: 32314 - DNA, 50 bp, synthetic construct
  source 1..50: mol_type = other DNA
ttttgaagaaggtttgaagaaattgcaatgctgttcaacattctttccta

SEQ ID NO: 32315 - DNA, 50 bp, synthetic construct
  source 1..50: mol_type = other DNA
gatttcgctggatattataggaattatgcggagtaatgtgcagcggcact

SEQ ID NO: 32316 - DNA, 50 bp, synthetic construct
  source 1..50: mol_type = other DNA
cagacagccgccccatgtggtacaattttaccgcatggggcttgcactcc

SEQ ID NO: 32317 - DNA, 50 bp, synthetic construct
  source 1..50: mol_type = other DNA
cgctttctcactgagagccgggacgctacgcgggactcctattttgagcg

SEQ ID NO: 32318 - DNA, 50 bp, synthetic construct
  source 1..50: mol_type = other DNA
gatttttataatacggattttgacggcacaggtcgagtattatacaaaat

SEQ ID NO: 32319 - DNA, 50 bp, synthetic construct
  source 1..50: mol_type = other DNA
ggacttgatttgtcatttcttgaaggttatagatttcaataatcttttca

SEQ ID NO: 32320 - DNA, 50 bp, synthetic construct
  source 1..50: mol_type = other DNA
attgaaaccacccgaggtgatatggagaggtcggcatctttgtctatgat

SEQ ID NO: 32321 - DNA, 50 bp, synthetic construct
  source 1..50: mol_type = other DNA
tgataccacccacgcctcgtacgttccttcctcgattttggttggtatca

SEQ ID NO: 32322 - DNA, 50 bp, synthetic construct
  source 1..50: mol_type = other DNA
cttctcgatgcgattcagaagaacatgttatagtatttggcatcaaaaat

SEQ ID NO: 32323 - DNA, 50 bp, synthetic construct
  source 1..50: mol_type = other DNA
ttgttcgttgtcgaaaggggctgataccaaccacttttggcaaaccacat

SEQ ID NO: 32324 - DNA, 50 bp, synthetic construct
  source 1..50: mol_type = other DNA
attttcatagtcacacttgtgcttttggcaacaaagcccaccatgccgtt

SEQ ID NO: 32325 - DNA, 50 bp, synthetic construct
  source 1..50: mol_type = other DNA
cacttcgaccgctgattgcgtctttccacacataatcagtggtagaaccg

SEQ ID NO: 32326 - DNA, 50 bp, synthetic construct
  source 1..50: mol_type = other DNA
gcaacctttcgtttccgagtgaaggtttccactatgtcggcaaagccgtt

SEQ ID NO: 32327 - DNA, 50 bp, synthetic construct
  source 1..50: mol_type = other DNA
cgaaaaaaatttgacaattgtgaaattatacacttgtatgattatcaggc

SEQ ID NO: 32328 - DNA, 50 bp, synthetic construct
  source 1..50: mol_type = other DNA
cgtcctcataggcctcacagtaggcgcctactgtggcacctgccgggaat

SEQ ID NO: 32329 - DNA, 50 bp, synthetic construct
  source 1..50: mol_type = other DNA
tgtgatcgagatgcttttcggtgtgctcggcggtcagctcgtcgatccgc

SEQ ID NO: 32330 - DNA, 50 bp, synthetic construct
  source 1..50: mol_type = other DNA
ccgcttatctccaccaatcgggtgcgcaccggattgtaggttatggtgta

SEQ ID NO: 32331 - DNA, 50 bp, synthetic construct
  source 1..50: mol_type = other DNA
tggccccgaggtcccgaggaactgaacagtccgccggatctaccagacct

SEQ ID NO: 32332 - DNA, 50 bp, synthetic construct
  source 1..50: mol_type = other DNA
ccagatcatgaagggaggacaacagctgttcggccatcttcatgacaatc

SEQ ID NO: 32333 - DNA, 50 bp, synthetic construct
  source 1..50: mol_type = other DNA
atgccgaggagccttccgaagaaggccatcttatgcagtctatgcagtat

SEQ ID NO: 32334 - DNA, 50 bp, synthetic construct
  source 1..50: mol_type = other DNA
ttgaaagtgaaggccgagtgtatggcgggcggatccgccttccccgccga

SEQ ID NO: 32335 - DNA, 50 bp, synthetic construct
  source 1..50: mol_type = other DNA
cgcttcctccatatatcacacataaatatgtggtacatatttgttgagca

SEQ ID NO: 32336 - DNA, 50 bp, synthetic construct
  source 1..50: mol_type = other DNA
atattcaggatatagttaaagataaatattattaactgtatcttttaact

SEQ ID NO: 32337 - DNA, 50 bp, synthetic construct
  source 1..50: mol_type = other DNA
gtgtcgccggttctccacatgagggccctaaaattaagaaaaggcaggct

SEQ ID NO: 32338 - DNA, 50 bp, synthetic construct
  source 1..50: mol_type = other DNA
taaaatctgatctcgaagattatttaaagacggtactttttccaacgtta

SEQ ID NO: 32339 - DNA, 50 bp, synthetic construct
  source 1..50: mol_type = other DNA
cacacctgtgggagccggattccatcaggaagatcagctccacagttttg

SEQ ID NO: 32340 - DNA, 50 bp, synthetic construct
  source 1..50: mol_type = other DNA
atcataaagggatggggagagatcaagaagcttcggcagaaatttttgat

SEQ ID NO: 32341 - DNA, 50 bp, synthetic construct
  source 1..50: mol_type = other DNA
ttccttcatctttcagtagctattcgaaaagctgcaagccgagaaagaaa

SEQ ID NO: 32342 - DNA, 50 bp, synthetic construct
  source 1..50: mol_type = other DNA
tcagctgcgggaaatgcggtagctcaagccgaaatatttcccggagcagg

SEQ ID NO: 32343 - DNA, 50 bp, synthetic construct
  source 1..50: mol_type = other DNA
gggagtgcaaacccttgaaaatactgaaattttaaaggatttagtttcca

SEQ ID NO: 32344 - DNA, 50 bp, synthetic construct
  source 1..50: mol_type = other DNA
aactggctgtgcttggcattttgtggcaggaatggcaatggcagcaagta

SEQ ID NO: 32345 - DNA, 50 bp, synthetic construct
  source 1..50: mol_type = other DNA
tggccgaaaaatatgggatatcttcgaatattgtccatatgcttcaaaaa

SEQ ID NO: 32346 - DNA, 50 bp, synthetic construct
  source 1..50: mol_type = other DNA
ctgcttcaaagacggctcgaaagtgatatttgcgtatgtctatgaagcta

SEQ ID NO: 32347 - DNA, 50 bp, synthetic construct
  source 1..50: mol_type = other DNA
aaggtgtattttttcgcccataacgctgccctctacttaaaagccacggg

SEQ ID NO: 32348 - DNA, 50 bp, synthetic construct
  source 1..50: mol_type = other DNA
aattcaaatatcgttcttgttctttaaatgctcagaaagtcaacggattt

SEQ ID NO: 32349 - DNA, 50 bp, synthetic construct
  source 1..50: mol_type = other DNA
ttgttcccaaggacaaggcacgtggaaccgggccttgtccctgaaagcca

SEQ ID NO: 32350 - DNA, 50 bp, synthetic construct
  source 1..50: mol_type = other DNA
gctccaaacggagcaataaacttagtgtctttgtctgattctttcgatga

SEQ ID NO: 32351 - DNA, 50 bp, synthetic construct
  source 1..50: mol_type = other DNA
gcggaatcaggaacagcacagtcagtggaatgaattattagtgggattag

SEQ ID NO: 32352 - DNA, 50 bp, synthetic construct
  source 1..50: mol_type = other DNA
attgttgttgacttccgcccctccatgtgaatacgatcgccaatgacaat

SEQ ID NO: 32353 - DNA, 50 bp, synthetic construct
  source 1..50: mol_type = other DNA
acgatgcaacggccgccatagcggtcgtgcttcggcggtgacgatctcgt

SEQ ID NO: 32354 - DNA, 50 bp, synthetic construct
  source 1..50: mol_type = other DNA
ctatatttttggtatgtgctaagatattttttcggatttcatcaataatt

SEQ ID NO: 32355 - DNA, 50 bp, synthetic construct
  source 1..50: mol_type = other DNA
tcgaagccattccttcgcttcctgcgcctgaagcatatccaatgcttcag

SEQ ID NO: 32356 - DNA, 50 bp, synthetic construct
  source 1..50: mol_type = other DNA
tatttaattgtattttttgtgtttttaaacctattaaaagctattaaaat

SEQ ID NO: 32357 - DNA, 50 bp, synthetic construct
  source 1..50: mol_type = other DNA
aaatccaagaaaaataattgcaccaaaagcctcctattatatatggattc

SEQ ID NO: 32358 - DNA, 50 bp, synthetic construct
  source 1..50: mol_type = other DNA
tgggattttcaatttcttgttctttaatgaagcagaggctgaaaatatca

SEQ ID NO: 32359 - DNA, 50 bp, synthetic construct
  source 1..50: mol_type = other DNA
atacggatccatttgaacaggctgaacaagaagttcacgagtattcgtat

SEQ ID NO: 32360 - DNA, 50 bp, synthetic construct
  source 1..50: mol_type = other DNA
atgcccggcaaagcaaaaaagtgagccaccttgattatctcacatttcag

SEQ ID NO: 32361 - DNA, 50 bp, synthetic construct
  source 1..50: mol_type = other DNA
ccaaagtccacaagggcttattttttctaataatgtatctcgaagtttgg

SEQ ID NO: 32362 - DNA, 50 bp, synthetic construct
  source 1..50: mol_type = other DNA
tcatcttcggagcagccatgcaagcgctcctatgctcttacactggatgt

SEQ ID NO: 32363 - DNA, 50 bp, synthetic construct
  source 1..50: mol_type = other DNA
tgttcctaaagaaattcctaattcactaataacttatttattttcttata

SEQ ID NO: 32364 - DNA, 50 bp, synthetic construct
  source 1..50: mol_type = other DNA
taatttttgtattcattctctaagttacgcaaaaatgggtacaaaaataa

SEQ ID NO: 32365 - DNA, 50 bp, synthetic construct
  source 1..50: mol_type = other DNA
gcaagattgtgatacgctgacatattcccggcagcatcagatccagaagc

SEQ ID NO: 32366 - DNA, 50 bp, synthetic construct
  source 1..50: mol_type = other DNA
tttctctatttttaggataggtcgtagaagtaatacaaaaaatatttaaa

SEQ ID NO: 32367 - DNA, 50 bp, synthetic construct
  source 1..50: mol_type = other DNA
agtatgtactgcttattatagcaatgagaatatactaagactaaaatcct

SEQ ID NO: 32368 - DNA, 50 bp, synthetic construct
  source 1..50: mol_type = other DNA
aacattcttaaaactttgaataaatagcaataagcggataaaagaatgtg

SEQ ID NO: 32369 - DNA, 50 bp, synthetic construct
  source 1..50: mol_type = other DNA
acctcttatagttttttaaaagaaggatctctgacaaatctatcaggtgt

SEQ ID NO: 32370 - DNA, 50 bp, synthetic construct
  source 1..50: mol_type = other DNA
actgttcaaaaagcaataaaagttattaatttttttgcttattgttctgt

SEQ ID NO: 32371 - DNA, 50 bp, synthetic construct
  source 1..50: mol_type = other DNA
atgaggtgatctgtgaaataatcttatcattacttctcgcatatgctgtt

SEQ ID NO: 32372 - DNA, 50 bp, synthetic construct
  source 1..50: mol_type = other DNA
ctgacaatacaaagaaaaacttatttgaaagttttattgcgtacaatttt

SEQ ID NO: 32373 - DNA, 50 bp, synthetic construct
  source 1..50: mol_type = other DNA
cttttcgtaataacccgcatcatagtgatgtgccgggcgatggcggaaag

SEQ ID NO: 32374 - DNA, 50 bp, synthetic construct
  source 1..50: mol_type = other DNA
aaaatgggggtgaaagtggtatgatttgacgaaacttttcgaaacgcttt

SEQ ID NO: 32375 - DNA, 50 bp, synthetic construct
  source 1..50: mol_type = other DNA
ataccctcgcttacgatttgtcctctcggcaaaatcgaaggtcagcgtcg

SEQ ID NO: 32376 - DNA, 50 bp, synthetic construct
  source 1..50: mol_type = other DNA
gccatggcggtggagctcgttgtgcgcggaataaactacacgaacataag

SEQ ID NO: 32377 - DNA, 50 bp, synthetic construct
  source 1..50: mol_type = other DNA
aagcggaacactcgttcctcgctggcagaactggaacgtctgaatctgct

SEQ ID NO: 32378 - DNA, 50 bp, synthetic construct
  source 1..50: mol_type = other DNA
ctctgcctgctgcccgacggcaccaagggtcacgttcattcctgccaaga

SEQ ID NO: 32379 - DNA, 50 bp, synthetic construct
  source 1..50: mol_type = other DNA
caatatcgattcttcaaagtcagaattctgatttagaaggtggcaacttt

SEQ ID NO: 32380 - DNA, 50 bp, synthetic construct
  source 1..50: mol_type = other DNA
tttggaataaaattagtacgataaatatacataagcaaatttaaaataat

SEQ ID NO: 32381 - DNA, 50 bp, synthetic construct
  source 1..50: mol_type = other DNA
gttcaaacattttctcaaagctgtgttgagatcattcaaaatgttttcag

SEQ ID NO: 32382 - DNA, 50 bp, synthetic construct
  source 1..50: mol_type = other DNA
ttagctcgtaaatgatagaaataaaattatttctatcatttatgtactaa

SEQ ID NO: 32383 - DNA, 50 bp, synthetic construct
  source 1..50: mol_type = other DNA
atccttgcagaaatcggggatttctcaccccctaccctcttaatcaatat

SEQ ID NO: 32384 - DNA, 50 bp, synthetic construct
  source 1..50: mol_type = other DNA
gtaaagcgcctcccgcgcggaacggccgacgcgtcgccgaggcggagcag

SEQ ID NO: 32385 - DNA, 50 bp, synthetic construct
  source 1..50: mol_type = other DNA
gtcgtgcgagagaaaataatattcttgtgttatatttcaactcacacgct

SEQ ID NO: 32386 - DNA, 50 bp, synthetic construct
  source 1..50: mol_type = other DNA
caaacccataccccataaagcaaacctttgctttatagctctttgccttg

SEQ ID NO: 32387 - DNA, 50 bp, synthetic construct
  source 1..50: mol_type = other DNA
acttataatccattgaaattaacgcaccgataatagcaaggattataagt

SEQ ID NO: 32388 - DNA, 50 bp, synthetic construct
  source 1..50: mol_type = other DNA
cagatggaaagcatttctgaaaaagaagcagcagaaatgctacatatata

SEQ ID NO: 32389 - DNA, 50 bp, synthetic construct
  source 1..50: mol_type = other DNA
agaagtgaaatgaacatcaagaggatcccggcgctgctgcttgttgcagt

SEQ ID NO: 32390 - DNA, 50 bp, synthetic construct
  source 1..50: mol_type = other DNA
aaagaaagcaaagatttctattatttataaccatctcaatttgtttcttg

SEQ ID NO: 32391 - DNA, 50 bp, synthetic construct
  source 1..50: mol_type = other DNA
ttccgccgctatgtcgagatcgtccggcgtttgcggacatgggggcggag

SEQ ID NO: 32392 - DNA, 50 bp, synthetic construct
  source 1..50: mol_type = other DNA
tcttagagagtttaaagctaaggcttgccgttcctttaaactctttaaaa

SEQ ID NO: 32393 - DNA, 50 bp, synthetic construct
  source 1..50: mol_type = other DNA
gtacactaatttgtacaaacaattagatttgtgagtaatcaggcaatatc

SEQ ID NO: 32394 - DNA, 50 bp, synthetic construct
  source 1..50: mol_type = other DNA
cggttttccgatcctaggcaagccatgggcaacccaggctcacaaatccg

SEQ ID NO: 32395 - DNA, 50 bp, synthetic construct
  source 1..50: mol_type = other DNA
tttgatacataaccatccaagtggatgattttggaaatacttatatgtaa

SEQ ID NO: 32396 - DNA, 50 bp, synthetic construct
  source 1..50: mol_type = other DNA
tgaatcggctgctcgatgaatgcagatttacggatccggcaggaaattca

SEQ ID NO: 32397 - DNA, 50 bp, synthetic construct
  source 1..50: mol_type = other DNA
tgatttcagatcgcacatacaaagatttttttatatatttgctgaaatca

SEQ ID NO: 32398 - DNA, 50 bp, synthetic construct
  source 1..50: mol_type = other DNA
cagaaagaattgattgactattttagcatatagtgtatcaattaattctt

SEQ ID NO: 32399 - DNA, 50 bp, synthetic construct
  source 1..50: mol_type = other DNA
gccctgaaatgcttgctatagaggggcttttcgtaaagcaacttcaatag

SEQ ID NO: 32400 - DNA, 50 bp, synthetic construct
  source 1..50: mol_type = other DNA
agcctatggagaaacaatatgaagataattcttttgtaaagatataggtt

SEQ ID NO: 32401 - DNA, 50 bp, synthetic construct
  source 1..50: mol_type = other DNA
ttttattcagttacataaattgtctgatggctttaattacttgagtaaat

SEQ ID NO: 32402 - DNA, 50 bp, synthetic construct
  source 1..50: mol_type = other DNA
atcccctatatctttagaaaatttaaggtttttcaattacattgggggct

SEQ ID NO: 32403 - DNA, 50 bp, synthetic construct
  source 1..50: mol_type = other DNA
gcggcatggcttgccgccgccaaacatttggccggctcaagccgtgccga

SEQ ID NO: 32404 - DNA, 50 bp, synthetic construct
  source 1..50: mol_type = other DNA
ttataagaatatagtcttttttatttatgttcaagctgataatgatatat

SEQ ID NO: 32405 - DNA, 50 bp, synthetic construct
  source 1..50: mol_type = other DNA
taaactttttcgtcaattatgacatccgtcctgggactcgccaaagttta

SEQ ID NO: 32406 - DNA, 50 bp, synthetic construct
  source 1..50: mol_type = other DNA
tgaagatgccgccggaatggcggacggcgtccagtccggcgccatctgga

SEQ ID NO: 32407 - DNA, 50 bp, synthetic construct
  source 1..50: mol_type = other DNA
tgaacgggagtgctttggttcaggaagtcccttatcagaaccttgataca

SEQ ID NO: 32408 - DNA, 50 bp, synthetic construct
  source 1..50: mol_type = other DNA
tccccagcagcaccattgcccaccggtatgggccatcagctcgttggcct

SEQ ID NO: 32409 - DNA, 50 bp, synthetic construct
  source 1..50: mol_type = other DNA
atgatgaaaccgaaaaagcactctatagggggatagttcgaggtcgccga

SEQ ID NO: 32410 - DNA, 50 bp, synthetic construct
  source 1..50: mol_type = other DNA
tcaagcgggtggccagcgagccggcagaacttcgtttgccacctgctcgg

SEQ ID NO: 32411 - DNA, 50 bp, synthetic construct
  source 1..50: mol_type = other DNA
ggtaaagccgcattggtaaagagttttacccttactattgtaaagttaca

SEQ ID NO: 32412 - DNA, 50 bp, synthetic construct
  source 1..50: mol_type = other DNA
atattaaaatgctggcaaaactactaagatctttgccagctgttttaatg

SEQ ID NO: 32413 - DNA, 50 bp, synthetic construct
  source 1..50: mol_type = other DNA
ggcgagtggctcaccatcgggctcgccgtcagtgaccgatacacctcgcc

SEQ ID NO: 32414 - DNA, 50 bp, synthetic construct
  source 1..50: mol_type = other DNA
ttggctttggacattaaacgcgattgtccgcttttcgggtgtacggccct

SEQ ID NO: 32415 - DNA, 50 bp, synthetic construct
  source 1..50: mol_type = other DNA
ttacacaaaatacactactaggtatatttctatcggcttcttttgtcaat

SEQ ID NO: 32416 - DNA, 50 bp, synthetic construct
  source 1..50: mol_type = other DNA
ttatagaataacacaacaagatgatatcatcaggcgaggtgattctatgt

SEQ ID NO: 32417 - DNA, 50 bp, synthetic construct
  source 1..50: mol_type = other DNA
agccactgtaagggatagtcctgatatcaggctttgaccgtaacatagca

SEQ ID NO: 32418 - DNA, 50 bp, synthetic construct
  source 1..50: mol_type = other DNA
gggctcttctcacgatcaacatccgccgatggtggcggcggtgccggcga

SEQ ID NO: 32419 - DNA, 50 bp, synthetic construct
  source 1..50: mol_type = other DNA
gcttataaagtagttcaggcaatgatataaaattaaactcacttatatgc

SEQ ID NO: 32420 - DNA, 50 bp, synthetic construct
  source 1..50: mol_type = other DNA
gtgatagccagaaaaaggaactggatcattttgattgtactaaccatcga

SEQ ID NO: 32421 - DNA, 50 bp, synthetic construct
  source 1..50: mol_type = other DNA
gtcacctggtacacctgactgtaaaactacacctggctggaacagggcag

SEQ ID NO: 32422 - DNA, 50 bp, synthetic construct
  source 1..50: mol_type = other DNA
aattattttgtaaagttaaaaaaatattttagaaacattacaaaaatata

SEQ ID NO: 32423 - DNA, 50 bp, synthetic construct
  source 1..50: mol_type = other DNA
aaaaatcaaccataaaattaatcaattaatttattcagtcggtttattat

SEQ ID NO: 32424 - DNA, 50 bp, synthetic construct
  source 1..50: mol_type = other DNA
gtatttcatttattctttccataacggtattgattgatggtatgaccacg

SEQ ID NO: 32425 - DNA, 50 bp, synthetic construct
  source 1..50: mol_type = other DNA
caatttgttgtaatggcacctatttgtatagctgtcatattgtttgtatg

SEQ ID NO: 32426 - DNA, 50 bp, synthetic construct
  source 1..50: mol_type = other DNA
ggcttgtgtcttccatattgttacaagaaaatatattgttgaaatgttga

SEQ ID NO: 32427 - DNA, 50 bp, synthetic construct
  source 1..50: mol_type = other DNA
atcgcctcacggtcagctgccgcgttcgcgggcaatggtgcggaccagat

SEQ ID NO: 32428 - DNA, 50 bp, synthetic construct
  source 1..50: mol_type = other DNA
ttccggacgcagatcgctcaggagaactggcaagggatgcagttcaggag

SEQ ID NO: 32429 - DNA, 50 bp, synthetic construct
  source 1..50: mol_type = other DNA
gtctcagctctatgtggaagaaaaaaaacaggaaataagtgagctgtgaa

SEQ ID NO: 32430 - DNA, 50 bp, synthetic construct
  source 1..50: mol_type = other DNA
tgaatttttgaaaagttgaaaatttttattttcaccttttgtataaccgt

SEQ ID NO: 32431 - DNA, 50 bp, synthetic construct
  source 1..50: mol_type = other DNA
caaggttttggatggcacatggccatggctctgtccgctccggcgcggtg

SEQ ID NO: 32432 - DNA, 50 bp, synthetic construct
  source 1..50: mol_type = other DNA
atgcggttattgccgctatcagcaattggctctggccacgctgacctctc

SEQ ID NO: 32433 - DNA, 50 bp, synthetic construct
  source 1..50: mol_type = other DNA
tacgccgctcggagccgcagggcagcaacgttgccactgatggttcttgg

SEQ ID NO: 32434 - DNA, 50 bp, synthetic construct
  source 1..50: mol_type = other DNA
ctgcaagggcgtccgggtgccggacgaccgacaccgagaagctggtgcag

SEQ ID NO: 32435 - DNA, 50 bp, synthetic construct
  source 1..50: mol_type = other DNA
cttccaccgctaaaaacagcagcattgaatgctgtatttagaccagttga

SEQ ID NO: 32436 - DNA, 50 bp, synthetic construct
  source 1..50: mol_type = other DNA
caggcgcaggcgcagctggcgcagatcgccgccagcttcgggtcgcctgg

SEQ ID NO: 32437 - DNA, 50 bp, synthetic construct
  source 1..50: mol_type = other DNA
gattcatgtatttgataatatcgaaaaccctccccaaaaatacagggagg

SEQ ID NO: 32438 - DNA, 50 bp, synthetic construct
  source 1..50: mol_type = other DNA
acaaggggggagcccatgaataagccagcgcgaattggctggcttgtttg

SEQ ID NO: 32439 - DNA, 50 bp, synthetic construct
  source 1..50: mol_type = other DNA
tcagcgagcctcaacaatcggtgaggcctcctcatgttgcgatccgctaa

SEQ ID NO: 32440 - DNA, 50 bp, synthetic construct
  source 1..50: mol_type = other DNA
aggatgaatttgatgcgtattttatttaacgtaggcaccaaattgttttt

SEQ ID NO: 32441 - DNA, 50 bp, synthetic construct
  source 1..50: mol_type = other DNA
aatagcacgtaacccgatgttatcttcatatgttgcaaaaacagtctatt

SEQ ID NO: 32442 - DNA, 50 bp, synthetic construct
  source 1..50: mol_type = other DNA
caaaataggcaatacgactttccttgcagaaagtgatcgcctgttttagt

SEQ ID NO: 32443 - DNA, 50 bp, synthetic construct
  source 1..50: mol_type = other DNA
tatttaaagaagtatttaagagtttttacttccatatccctctataaagt

SEQ ID NO: 32444 - DNA, 50 bp, synthetic construct
  source 1..50: mol_type = other DNA
aactaataaataaaatccataaagagttttttgctttttatttacatcga

SEQ ID NO: 32445 - DNA, 50 bp, synthetic construct
  source 1..50: mol_type = other DNA
cataaaataaaacagatctagaagggagtttatttctgtggcattttcac

SEQ ID NO: 32446 - DNA, 50 bp, synthetic construct
  source 1..50: mol_type = other DNA
tttataaattccaatgaatgttgattataacatatagattactttacttc

SEQ ID NO: 32447 - DNA, 50 bp, synthetic construct
  source 1..50: mol_type = other DNA
gattgacaaaaccggagtttcgcgtaagatatactcaaaaaagggcgcaa

SEQ ID NO: 32448 - DNA, 50 bp, synthetic construct
  source 1..50: mol_type = other DNA
gtgcgcggataaaggaaaagacctgctggtcttttcacttcgccgcaaat

SEQ ID NO: 32449 - DNA, 50 bp, synthetic construct
  source 1..50: mol_type = other DNA
attgcataacatatttactacctttaggggtagtaattattactgtaaat

SEQ ID NO: 32450 - DNA, 50 bp, synthetic construct
  source 1..50: mol_type = other DNA
actcgtcgtttggtaaagctgggaagggcgagataacccaaacaaaccta

SEQ ID NO: 32451 - DNA, 50 bp, synthetic construct
  source 1..50: mol_type = other DNA
taacaaattttatataaattttaccaagaaaagaaatagtgaattaaatt

SEQ ID NO: 32452 - DNA, 50 bp, synthetic construct
  source 1..50: mol_type = other DNA
ctttctctttttaacaatgctactaaattgctgaaaacaaaaagaaaatc

SEQ ID NO: 32453 - DNA, 50 bp, synthetic construct
  source 1..50: mol_type = other DNA
ggctggtgaaatgcggagtgtgtggcgctacgctacacgtctcaccacca

SEQ ID NO: 32454 - DNA, 50 bp, synthetic construct
  source 1..50: mol_type = other DNA
agcacccttcaaagaaagtcctgccatttgtgcgaatttttttgagtgcc

SEQ ID NO: 32455 - DNA, 50 bp, synthetic construct
  source 1..50: mol_type = other DNA
ttgggaagtagtgtcgaattaagcacctttcaggaatcactacacatgcc

SEQ ID NO: 32456 - DNA, 50 bp, synthetic construct
  source 1..50: mol_type = other DNA
atataattaccatatttttttaatataaaaacaaaaggaggacaaaatga

SEQ ID NO: 32457 - DNA, 50 bp, synthetic construct
  source 1..50: mol_type = other DNA
gaaatggtttatccattgccaattggattttagttaggataatccatttg

SEQ ID NO: 32458 - DNA, 50 bp, synthetic construct
  source 1..50: mol_type = other DNA
ggcaatgattgctaccatcgccagcgtgggcgatgatcatcatccacggc

SEQ ID NO: 32459 - DNA, 50 bp, synthetic construct
  source 1..50: mol_type = other DNA
tccatcattataatgagggtttataagaaaatattcaaaataaattgtta

SEQ ID NO: 32460 - DNA, 50 bp, synthetic construct
  source 1..50: mol_type = other DNA
gtaacagtgatagaaaggaacgaatatttatttccaaaaatcaacaggac

SEQ ID NO: 32461 - DNA, 50 bp, synthetic construct
  source 1..50: mol_type = other DNA
agtccttggggtcgcccattgggaggagccaacgggcaggatgaagcgca

SEQ ID NO: 32462 - DNA, 50 bp, synthetic construct
  source 1..50: mol_type = other DNA
gttggatttaaaaacatgctttgtttggaattgaagtctttaggaaaaac

SEQ ID NO: 32463 - DNA, 50 bp, synthetic construct
  source 1..50: mol_type = other DNA
ttttccacgctgcggccgcctgtggacaggggcggcatatgcgcggagcg

SEQ ID NO: 32464 - DNA, 50 bp, synthetic construct
  source 1..50: mol_type = other DNA
aaaaaaatttgatattgaaactataagtaaatttggaatcaaattttccg

SEQ ID NO: 32465 - DNA, 50 bp, synthetic construct
  source 1..50: mol_type = other DNA
tatacctaaaaatacaaaggaggtctattccctaatcattctttcccatc

SEQ ID NO: 32466 - DNA, 50 bp, synthetic construct
  source 1..50: mol_type = other DNA
cgctcttatcaagccaattgtatcatttaagtccattgttgagaaggtaa

SEQ ID NO: 32467 - DNA, 50 bp, synthetic construct
  source 1..50: mol_type = other DNA
tcaccgtcgatactgcaatgttcatttggctatcggatagtaaacggtga

SEQ ID NO: 32468 - DNA, 50 bp, synthetic construct
  source 1..50: mol_type = other DNA
acagtctgatcgaaagagaggtgcaaacacctctcattatatcattctga

SEQ ID NO: 32469 - DNA, 50 bp, synthetic construct
  source 1..50: mol_type = other DNA
aaaacatatataatatatgcctatatagtggatgctcttatacctcttgt

SEQ ID NO: 32470 - DNA, 50 bp, synthetic construct
  source 1..50: mol_type = other DNA
gcgctgtgcaccggccggctatcgaggatcacccggttaacggaacgctc

SEQ ID NO: 32471 - DNA, 50 bp, synthetic construct
  source 1..50: mol_type = other DNA
ttgggaagtagtgtcgaattaagcacctttcaggaagctctacccatgcc

SEQ ID NO: 32472 - DNA, 50 bp, synthetic construct
  source 1..50: mol_type = other DNA
atagatgagatcatagaggaaaggcgccgttatttgtagatttcatagat

SEQ ID NO: 32473 - DNA, 50 bp, synthetic construct
  source 1..50: mol_type = other DNA
aaaaacaaggttccttgtttattgtacaaaacttaacgttaagttgtatt

SEQ ID NO: 32474 - DNA, 50 bp, synthetic construct
  source 1..50: mol_type = other DNA
ataagacttattcaagatgcttatcatgtttgatcttgaatgagctatat

SEQ ID NO: 32475 - DNA, 50 bp, synthetic construct
  source 1..50: mol_type = other DNA
atttttgtgttcatttagaaattgatttatctctatgtgtaataaacgta

SEQ ID NO: 32476 - DNA, 50 bp, synthetic construct
  source 1..50: mol_type = other DNA
accgtttatggttgacctgcacctttaggacataatctcggctaaacggg

SEQ ID NO: 32477 - DNA, 50 bp, synthetic construct
  source 1..50: mol_type = other DNA
tattatactaaataataggatgtgatgatctcatttttcgtattcaaata

SEQ ID NO: 32478 - DNA, 50 bp, synthetic construct
  source 1..50: mol_type = other DNA
taatataaatatacagtcaataaatttttatttagaccatatatatcaat

SEQ ID NO: 32479 - DNA, 50 bp, synthetic construct
  source 1..50: mol_type = other DNA
ttttgaccttttttcgcgattttcttgatcagcgggtaaaacaggtcaag

SEQ ID NO: 32480 - DNA, 50 bp, synthetic construct
  source 1..50: mol_type = other DNA
ctaaaaaagatggctattttttattaataaaaaacaggaaaacctgcttt

SEQ ID NO: 32481 - DNA, 50 bp, synthetic construct
  source 1..50: mol_type = other DNA
gattcagaagatgaaggctcgtggaagcaatagcttttgagaaaaaagtt

SEQ ID NO: 32482 - DNA, 50 bp, synthetic construct
  source 1..50: mol_type = other DNA
cttctgccagacgatcagcgcgcccgaaggggctgaccgcagaacagctt

SEQ ID NO: 32483 - DNA, 50 bp, synthetic construct
  source 1..50: mol_type = other DNA
agggtatctgcttttccttgaatctttttgatgcaaaaagcagcctccct

SEQ ID NO: 32484 - DNA, 50 bp, synthetic construct
  source 1..50: mol_type = other DNA
cgtatcccacaaaaagccttcccgtgcgggaaggctttcttgctacatca

SEQ ID NO: 32485 - DNA, 50 bp, synthetic construct
  source 1..50: mol_type = other DNA
atcagtagagagataatatctctcttgaacagggcgtctactctaccgat

SEQ ID NO: 32486 - DNA, 50 bp, synthetic construct
  source 1..50: mol_type = other DNA
gatgggggagcgctgcaaaaatcaattgcttttcattttttcccgttcgg

SEQ ID NO: 32487 - DNA, 50 bp, synthetic construct
  source 1..50: mol_type = other DNA
taaaatgagccggggtttcatttttcgcacagaagaccccgcgccgtttt

SEQ ID NO: 32488 - DNA, 50 bp, synthetic construct
  source 1..50: mol_type = other DNA
nnnnnnnnnnnnnnnnattgatgtcaagcgaatgtcggagaataatgtgc

SEQ ID NO: 32489 - DNA, 50 bp, synthetic construct
  source 1..50: mol_type = other DNA
gaagaagtctcaatcatcggaaaagtttttccggcgataatggctgctac

SEQ ID NO: 32490 - DNA, 50 bp, synthetic construct
  source 1..50: mol_type = other DNA
aattaactgtatatataaacagtgtgatgaattatgtatgtgagttagga

SEQ ID NO: 32491 - DNA, 50 bp, synthetic construct
  source 1..50: mol_type = other DNA
aacagttatgaaatacaaacaaaacattttgtttgtattacatactatac

SEQ ID NO: 32492 - DNA, 50 bp, synthetic construct
  source 1..50: mol_type = other DNA
gaaagcccttgatttataggcgttttgccgactatacgagaaataaacga

SEQ ID NO: 32493 - DNA, 50 bp, synthetic construct
  source 1..50: mol_type = other DNA
cattatttcagcacacacagcttcaatcagctttgcgatgttctctaaga

SEQ ID NO: 32494 - DNA, 50 bp, synthetic construct
  source 1..50: mol_type = other DNA
tcagagcagccagcttgacttattcggtcaagtgctgcttcatctgcttc

SEQ ID NO: 32495 - DNA, 50 bp, synthetic construct
  source 1..50: mol_type = other DNA
catactgataaggaatgccgctggtagtctatatatcactctgaaagcca

SEQ ID NO: 32496 - DNA, 50 bp, synthetic construct
  source 1..50: mol_type = other DNA
ggggaggctggtctggttgtgcagtagtgcatgtgcagctgcaatttctg

SEQ ID NO: 32497 - DNA, 50 bp, synthetic construct
  source 1..50: mol_type = other DNA
tgtctttgcgggtgtggtggaattggaaaaccaccacctgcgcaaacttg

SEQ ID NO: 32498 - DNA, 50 bp, synthetic construct
  source 1..50: mol_type = other DNA
attggaagacaacctgatgagagaattgtctcatccgaaaatcccactga

SEQ ID NO: 32499 - DNA, 50 bp, synthetic construct
  source 1..50: mol_type = other DNA
catgaccgatctcggtcatgggatgaagcccatcgcgacgatccggaaaa

SEQ ID NO: 32500 - DNA, 50 bp, synthetic construct
  source 1..50: mol_type = other DNA
gggcgaacccatcttgaagccgaggtatgttcttcaagacggtttctttc

SEQ ID NO: 32501 - DNA, 50 bp, synthetic construct
  source 1..50: mol_type = other DNA
ggtttgtgtcgctcagcgtgcggttcgccgatacctgctggaccagaccc

SEQ ID NO: 32502 - DNA, 50 bp, synthetic construct
  source 1..50: mol_type = other DNA
gacgccataatcgtgagcatgacctcgcggtttagcgcggttatcttgtc

SEQ ID NO: 32503 - DNA, 50 bp, synthetic construct
  source 1..50: mol_type = other DNA
taaaaaaaagaagcaatttaccattgataaagtaggatagcttcttttta

SEQ ID NO: 32504 - DNA, 50 bp, synthetic construct
  source 1..50: mol_type = other DNA
ttcagtctcaattagtataattccacatggtaatactacttactcagtat

SEQ ID NO: 32505 - DNA, 50 bp, synthetic construct
  source 1..50: mol_type = other DNA
aatgttttatagttgttattgtatttaaaaaaggaaaatgataaaacatg

SEQ ID NO: 32506 - DNA, 50 bp, synthetic construct
  source 1..50: mol_type = other DNA
ttttcttttttctatgattgctttataaagctagtaaggaaaagctagag

SEQ ID NO: 32507 - DNA, 50 bp, synthetic construct
  source 1..50: mol_type = other DNA
aaaatcaatacattaaagaatcctttctaatggaaaaatggattgctgca

SEQ ID NO: 32508 - DNA, 50 bp, synthetic construct
  source 1..50: mol_type = other DNA
aactacgaagcattgcttgatgcaggcgctaactttgcatcttcccccag

SEQ ID NO: 32509 - DNA, 50 bp, synthetic construct
  source 1..50: mol_type = other DNA
ctcaccaatgctacatcaaagagcgagcaggttgttgtccgatttgtgga

SEQ ID NO: 32510 - DNA, 50 bp, synthetic construct
  source 1..50: mol_type = other DNA
aacgaatcttttggaaaacaagtatgtacttttttggtataatagaatta

SEQ ID NO: 32511 - DNA, 50 bp, synthetic construct
  source 1..50: mol_type = other DNA
cgttggagtcctcggttatctttgaataaagatgtaggaggaaccgaaac

SEQ ID NO: 32512 - DNA, 50 bp, synthetic construct
  source 1..50: mol_type = other DNA
tcgctattttcaaagatttgcagttttcttcaaaatttttaaaatttttt

SEQ ID NO: 32513 - DNA, 50 bp, synthetic construct
  source 1..50: mol_type = other DNA
actttttttctttacaacaacatttactgttaattgtcttataatcaagt

SEQ ID NO: 32514 - DNA, 50 bp, synthetic construct
  source 1..50: mol_type = other DNA
gattcagaattgcctctaaagtccattgccttccaaggcacccatgaaac

SEQ ID NO: 32515 - DNA, 50 bp, synthetic construct
  source 1..50: mol_type = other DNA
actcccttatatcaggcgaacatcataaacttcgcctgaagttggaacgt

SEQ ID NO: 32516 - DNA, 50 bp, synthetic construct
  source 1..50: mol_type = other DNA
cgaggactggatctatcgtttataaaagtaaattcatctatatctcctcg

SEQ ID NO: 32517 - DNA, 50 bp, synthetic construct
  source 1..50: mol_type = other DNA
ccgcaggttttatttcttgctccattatttccaagcaaaaccacctgtgc

SEQ ID NO: 32518 - DNA, 50 bp, synthetic construct
  source 1..50: mol_type = other DNA
cctataaacaacttggaatggaaacagaaccggacgaacatgtttattta

SEQ ID NO: 32519 - DNA, 50 bp, synthetic construct
  source 1..50: mol_type = other DNA
tattccatcacacaaatatcaaagatcaggtctaattgtttgtgggaaat

SEQ ID NO: 32520 - DNA, 50 bp, synthetic construct
  source 1..50: mol_type = other DNA
cgcgcccttttggatgcggatatcacatcgcgtttctccaacctcgccgt

SEQ ID NO: 32521 - DNA, 50 bp, synthetic construct
  source 1..50: mol_type = other DNA
ctggagtttcatttcaatgatggcggcccggatctgaaaatataccagtg

SEQ ID NO: 32522 - DNA, 50 bp, synthetic construct
  source 1..50: mol_type = other DNA
acataatagctcaaaagctaaaaattagcctatctttaaaaattttatca

SEQ ID NO: 32523 - DNA, 50 bp, synthetic construct
  source 1..50: mol_type = other DNA
accaattcatcctttccttccctagctatctgcggggaagacagcttggt

SEQ ID NO: 32524 - DNA, 50 bp, synthetic construct
  source 1..50: mol_type = other DNA
gtgaaatatatcagctgaaaaaagcaagtgttttcatcgatatatgctgc

SEQ ID NO: 32525 - DNA, 50 bp, synthetic construct
  source 1..50: mol_type = other DNA
tccttgccacgaagtacagcaactatttgtttcaattatatctttccgga

SEQ ID NO: 32526 - DNA, 50 bp, synthetic construct
  source 1..50: mol_type = other DNA
tccatacagaatttcctcgaaaagagctttctgaaggaaatggttatggt

SEQ ID NO: 32527 - DNA, 50 bp, synthetic construct
  source 1..50: mol_type = other DNA
agataatcccaacaggggttaaaagctttttttgcctgtgaactgcgagt

SEQ ID NO: 32528 - DNA, 50 bp, synthetic construct
  source 1..50: mol_type = other DNA
gcttgcaggagaataagatggaaagatttccagcttcgagtctttcatct

SEQ ID NO: 32529 - DNA, 50 bp, synthetic construct
  source 1..50: mol_type = other DNA
tccggccaggacgattatcccctgtacggacgctgattcactatagctga

SEQ ID NO: 32530 - DNA, 50 bp, synthetic construct
  source 1..50: mol_type = other DNA
cagggaaaaggccgaagccttcctggtggcaggctacgcccgcgtctcca

SEQ ID NO: 32531 - DNA, 50 bp, synthetic construct
  source 1..50: mol_type = other DNA
cgtgatgcatgggtgttacgacgacaacgacagaacaaaactttgtcttg

SEQ ID NO: 32532 - DNA, 50 bp, synthetic construct
  source 1..50: mol_type = other DNA
gttgcggcgggtggctggcatcagatcattccccagcaggcccccgacgt

SEQ ID NO: 32533 - DNA, 50 bp, synthetic construct
  source 1..50: mol_type = other DNA
ggctattcggcggcgatgttctacgcgcagataatcctccacgaccgcct

SEQ ID NO: 32534 - DNA, 50 bp, synthetic construct
  source 1..50: mol_type = other DNA
gataacataaactgtttaaaatcaatgtttttgtcctcttttttagggga

SEQ ID NO: 32535 - DNA, 50 bp, synthetic construct
  source 1..50: mol_type = other DNA
ttgttaaaattatttatatattacatgagatatagagataatgttatttt

SEQ ID NO: 32536 - DNA, 50 bp, synthetic construct
  source 1..50: mol_type = other DNA
aaatatgttttaatatacttatgaaaaattaagtatgttaaaatggaata

SEQ ID NO: 32537 - DNA, 50 bp, synthetic construct
  source 1..50: mol_type = other DNA
tcaattcaccgttcttactaaattatattccttacaaaacggaaaaatca

SEQ ID NO: 32538 - DNA, 50 bp, synthetic construct
  source 1..50: mol_type = other DNA
tttccgctcggcggtctctccaaggccttcgcgaactcgatcaaaggatt

SEQ ID NO: 32539 - DNA, 50 bp, synthetic construct
  source 1..50: mol_type = other DNA
aatttctgaacatatcatagcaaacgttaccgctggccatggtagcaatc

SEQ ID NO: 32540 - DNA, 50 bp, synthetic construct
  source 1..50: mol_type = other DNA
tgaattttaattaaaaataaaattagaacgtgaaaaagaattaaaaaaag

SEQ ID NO: 32541 - DNA, 50 bp, synthetic construct
  source 1..50: mol_type = other DNA
agtttggtcaaacttctgtgcaagactacctgtaccagcattactaagca

SEQ ID NO: 32542 - DNA, 50 bp, synthetic construct
  source 1..50: mol_type = other DNA
cacaaaatcacggcgttaaatagaaatcctcgtgaccagcttgttttgtg

SEQ ID NO: 32543 - DNA, 50 bp, synthetic construct
  source 1..50: mol_type = other DNA
taaccccaggtcttttaccattccaaggaatgggcaaaaagcttatatat

SEQ ID NO: 32544 - DNA, 50 bp, synthetic construct
  source 1..50: mol_type = other DNA
cggcattgtaacattagccatacgtttttatgggaaaaggtataatacca

SEQ ID NO: 32545 - DNA, 50 bp, synthetic construct
  source 1..50: mol_type = other DNA
aacagtaccgggatgaaaacaatgatagctattgtcatctccctactgtc

SEQ ID NO: 32546 - DNA, 50 bp, synthetic construct
  source 1..50: mol_type = other DNA
aaatccttgtctctattgacactgatcagttacaaataaagataggaatg

SEQ ID NO: 32547 - DNA, 50 bp, synthetic construct
  source 1..50: mol_type = other DNA
ttagaatgaatatttgttattacctcatttttggctacttgtccctctac

SEQ ID NO: 32548 - DNA, 50 bp, synthetic construct
  source 1..50: mol_type = other DNA
aaaaaattacaactcaaagcaacttaagttgattttagaaataaattttt

SEQ ID NO: 32549 - DNA, 50 bp, synthetic construct
  source 1..50: mol_type = other DNA
taaaatagtaagaatataaaataattttatttaatctttcaactgacaaa

SEQ ID NO: 32550 - DNA, 50 bp, synthetic construct
  source 1..50: mol_type = other DNA
tgcgcttgatttcctccggggagagaagaggccgcccgaagccaagcggc

SEQ ID NO: 32551 - DNA, 50 bp, synthetic construct
  source 1..50: mol_type = other DNA
ggacgagcttctcatagtcgacactggtggcgctgaggacggcatcaact

SEQ ID NO: 32552 - DNA, 50 bp, synthetic construct
  source 1..50: mol_type = other DNA
taaataatggtaaaattgataatttttgtatagaaatagggtataattgt

SEQ ID NO: 32553 - DNA, 50 bp, synthetic construct
  source 1..50: mol_type = other DNA
cagcgtactatagaatacatattctttatgatgtattttactttacgctg

SEQ ID NO: 32554 - DNA, 50 bp, synthetic construct
  source 1..50: mol_type = other DNA
gatgatgcggaacatgacgatcctccgtgcgttcgaccttcatcgtcggc

SEQ ID NO: 32555 - DNA, 50 bp, synthetic construct
  source 1..50: mol_type = other DNA
gaatacctgtcaaaactatttcaagaatgaacaagatttcaatagtattg

SEQ ID NO: 32556 - DNA, 50 bp, synthetic construct
  source 1..50: mol_type = other DNA
ataggattatttgatataaagaatgttttgctgttatattcaaatcctgt

SEQ ID NO: 32557 - DNA, 50 bp, synthetic construct
  source 1..50: mol_type = other DNA
ctataatttatcaaagaggtatggtagataacccctatataattttatac

SEQ ID NO: 32558 - DNA, 50 bp, synthetic construct
  source 1..50: mol_type = other DNA
taacaatcactcgcattctcaatttcaattgaaatcacttgaaattttta

SEQ ID NO: 32559 - DNA, 50 bp, synthetic construct
  source 1..50: mol_type = other DNA
attattattttctttcgccttattattcaatttccaaagaacagtgtaag

SEQ ID NO: 32560 - DNA, 50 bp, synthetic construct
  source 1..50: mol_type = other DNA
ctcagccatcgccaaggaggtcaccggtgtggctctatgcgatgggggat

SEQ ID NO: 32561 - DNA, 50 bp, synthetic construct
  source 1..50: mol_type = other DNA
acggattcattcaggaacgtggttataaagaccgggccgagactttgcgg

SEQ ID NO: 32562 - DNA, 50 bp, synthetic construct
  source 1..50: mol_type = other DNA
gttctggacgcagaccatcctctgataacgatttgatctgcgtatatgac

SEQ ID NO: 32563 - DNA, 50 bp, synthetic construct
  source 1..50: mol_type = other DNA
aaatatggctccaaatgacgtaaaaatttaccaagattggactccgctga

SEQ ID NO: 32564 - DNA, 50 bp, synthetic construct
  source 1..50: mol_type = other DNA
gcttaaaaatattaagtagtggttttttactaacaaaaagctttttaata

SEQ ID NO: 32565 - DNA, 50 bp, synthetic construct
  source 1..50: mol_type = other DNA
ggataaggtaacgttatttccatgaaaatgggtataattatacaataagt

SEQ ID NO: 32566 - DNA, 50 bp, synthetic construct
  source 1..50: mol_type = other DNA
agaacgttatgaccactgaaacaaaaatgtatcagttgttttacctttca

SEQ ID NO: 32567 - DNA, 50 bp, synthetic construct
  source 1..50: mol_type = other DNA
tcgcgtccatcgggagggcagacggcggcctgcccgccgtggcggcgcgc

SEQ ID NO: 32568 - DNA, 50 bp, synthetic construct
  source 1..50: mol_type = other DNA
atcaggctgctctgcgtaattgtgattaagaaaggatagattagttcaat

SEQ ID NO: 32569 - DNA, 50 bp, synthetic construct
  source 1..50: mol_type = other DNA
ccgccgtcacgctgatctgctccgcccggagcttgtgtttttgccgggaa

SEQ ID NO: 32570 - DNA, 50 bp, synthetic construct
  source 1..50: mol_type = other DNA
ttaacccggttcaataccttctgcgcgattcttgttctgctccggcttgt

SEQ ID NO: 32571 - DNA, 50 bp, synthetic construct
  source 1..50: mol_type = other DNA
tcccggcagtttttgcctgaggctttttcatcacccaaaaatcgccggat

SEQ ID NO: 32572 - DNA, 50 bp, synthetic construct
  source 1..50: mol_type = other DNA
ttgtgcgagagttcaaatctctccgcttaggtattatacatcacgcagac

SEQ ID NO: 32573 - DNA, 50 bp, synthetic construct
  source 1..50: mol_type = other DNA
gcagaaggctatatttctacagaaaattacgtaaaaatacgtatttcttg

SEQ ID NO: 32574 - DNA, 50 bp, synthetic construct
  source 1..50: mol_type = other DNA
tagccacttccagcaatttgcaaattcttgcagatgggatttatgctcca

SEQ ID NO: 32575 - DNA, 50 bp, synthetic construct
  source 1..50: mol_type = other DNA
accaaacggtacgctggccaatgccacaattgtggggcggccgttttacg

SEQ ID NO: 32576 - DNA, 50 bp, synthetic construct
  source 1..50: mol_type = other DNA
tatatttttgtaatgtttctaaaatatttttttaactttacaaaataatt

SEQ ID NO: 32577 - DNA, 50 bp, synthetic construct
  source 1..50: mol_type = other DNA
agtcaaaaaagtaaaaatatcaatatcttttaaggttaacttgttatcac

SEQ ID NO: 32578 - DNA, 50 bp, synthetic construct
  source 1..50: mol_type = other DNA
ctgtcgcgtggccggcatattcgctcgcaggtatgaccgtcacgaaaaac

SEQ ID NO: 32579 - DNA, 50 bp, synthetic construct
  source 1..50: mol_type = other DNA
catacgcggcaacgcgacgcaagctcatttcagtcgcgttgtcggtcatc

SEQ ID NO: 32580 - DNA, 50 bp, synthetic construct
  source 1..50: mol_type = other DNA
gtaaagatgttttccaataatttatttatctcccttgaacaggtctttac

SEQ ID NO: 32581 - DNA, 50 bp, synthetic construct
  source 1..50: mol_type = other DNA
ccgcattttcgccgatggcgatgcttcaatccctttctacgaaaatattt

SEQ ID NO: 32582 - DNA, 50 bp, synthetic construct
  source 1..50: mol_type = other DNA
gcaattctcccaaaaattggttaatattcggtttttttcaggcctttatc

SEQ ID NO: 32583 - DNA, 50 bp, synthetic construct
  source 1..50: mol_type = other DNA
tcaaaaatcctttcgaatgcaggaatactattagaagactgcctggttct

SEQ ID NO: 32584 - DNA, 50 bp, synthetic construct
  source 1..50: mol_type = other DNA
tgcaagatcatctgtgaagcggcaatcgccgtttccggtgggacaaatcg

SEQ ID NO: 32585 - DNA, 50 bp, synthetic construct
  source 1..50: mol_type = other DNA
gagacctttctattgatacactataacaagtgtatcataagaaaggtgta

SEQ ID NO: 32586 - DNA, 50 bp, synthetic construct
  source 1..50: mol_type = other DNA
tttaatttctttttatttgatttgatcaatcgataggaatgcaaattcaa

SEQ ID NO: 32587 - DNA, 50 bp, synthetic construct
  source 1..50: mol_type = other DNA
gctcgaagtcatctccaacttgatgcctcagttaagaggctacacacagt

SEQ ID NO: 32588 - DNA, 50 bp, synthetic construct
  source 1..50: mol_type = other DNA
tcgttcgacggaaaacccggaaactcccgcgcccaggctccgccgagcga

SEQ ID NO: 32589 - DNA, 50 bp, synthetic construct
  source 1..50: mol_type = other DNA
actgaagcggaattcaacaaaatagatacattgttgaagtccttttcagt

SEQ ID NO: 32590 - DNA, 50 bp, synthetic construct
  source 1..50: mol_type = other DNA
agtgatatttttgatattaataaaaacttttgtagatataaaatgaagca

SEQ ID NO: 32591 - DNA, 50 bp, synthetic construct
  source 1..50: mol_type = other DNA
ataagctcggctcctgagaggccgcgcgtcctcaaaacggcgcagcgtgg

SEQ ID NO: 32592 - DNA, 50 bp, synthetic construct
  source 1..50: mol_type = other DNA
acctgcatgcccatcaagccctggtcccaacctttaatcactcgaccggt

SEQ ID NO: 32593 - DNA, 50 bp, synthetic construct
  source 1..50: mol_type = other DNA
atactcaattaacttaacttatttataaatataatatttttatttggtga

SEQ ID NO: 32594 - DNA, 50 bp, synthetic construct
  source 1..50: mol_type = other DNA
cttgaacttaagtataaaggtcaaatttgctctttataatttctttatca

SEQ ID NO: 32595 - DNA, 50 bp, synthetic construct
  source 1..50: mol_type = other DNA
caaaagacattagagcagcttagtataataaattttgcttatttctaata

SEQ ID NO: 32596 - DNA, 50 bp, synthetic construct
  source 1..50: mol_type = other DNA
gttaagtttgatttgatctcggacttaaaaatgccaaaataaaacttgac

SEQ ID NO: 32597 - DNA, 50 bp, synthetic construct
  source 1..50: mol_type = other DNA
caaatatgtcttttggcatgtgcgtttgcaacttcaaaaatcaatatcga

SEQ ID NO: 32598 - DNA, 50 bp, synthetic construct
  source 1..50: mol_type = other DNA
ctgtgggacgtctccttccgtgtcgcggcatataagaagtcacccaaatg

SEQ ID NO: 32599 - DNA, 50 bp, synthetic construct
  source 1..50: mol_type = other DNA
tttgaaacgcccttctttattacatatggaaaaagaaaaacagattcaaa

SEQ ID NO: 32600 - DNA, 50 bp, synthetic construct
  source 1..50: mol_type = other DNA
gaagcgttttgttataggggttgttgttcaattcggaaaccaaaagccgg

SEQ ID NO: 32601 - DNA, 50 bp, synthetic construct
  source 1..50: mol_type = other DNA
tctatgtttccgacataaaggtaaatcaactgcattgattggcatctatt

SEQ ID NO: 32602 - DNA, 50 bp, synthetic construct
  source 1..50: mol_type = other DNA
ggaatgggccgctcttcttcggtctgaagccgagaagatcagcccatcct

SEQ ID NO: 32603 - DNA, 50 bp, synthetic construct
  source 1..50: mol_type = other DNA
ccaaggtacttttctataaccgcatatgtcattataataacgtaatcgac

SEQ ID NO: 32604 - DNA, 50 bp, synthetic construct
  source 1..50: mol_type = other DNA
gaatccggttgaaggaaaccttaaaaagcacttggcaaacaaaaaaataa

SEQ ID NO: 32605 - DNA, 50 bp, synthetic construct
  source 1..50: mol_type = other DNA
atgcaaaaacaatgctgtaacaaaaattatagactgctttgttttttcat

SEQ ID NO: 32606 - DNA, 50 bp, synthetic construct
  source 1..50: mol_type = other DNA
cggcaaaaaattctttggggtgaaatttacaaacagagaatttccagaga

SEQ ID NO: 32607 - DNA, 50 bp, synthetic construct
  source 1..50: mol_type = other DNA
ttagcaacaattaatattgaaagcatttaatacgaatttaccatcgaaaa

SEQ ID NO: 32608 - DNA, 50 bp, synthetic construct
  source 1..50: mol_type = other DNA
accaggggatcagcttgaattggaattttagttatagcttttattctttt

SEQ ID NO: 32609 - DNA, 50 bp, synthetic construct
  source 1..50: mol_type = other DNA
cataataagaacataagataaaacaagctttcttgacctttattattatc

SEQ ID NO: 32610 - DNA, 50 bp, synthetic construct
  source 1..50: mol_type = other DNA
gccatcttgatcggcaccgcccgcacctggggaaagcccagtaaggccag

SEQ ID NO: 32611 - DNA, 50 bp, synthetic construct
  source 1..50: mol_type = other DNA
cacaaaagaaaccaagcaacatgggagcccattgcgtggcaggtgctgga

SEQ ID NO: 32612 - DNA, 50 bp, synthetic construct
  source 1..50: mol_type = other DNA
atcggtaaacaacgttaaatcgctgaaacgaattaaaattgtttttattc

SEQ ID NO: 32613 - DNA, 50 bp, synthetic construct
  source 1..50: mol_type = other DNA
attttcagtttttatagtaactgatttcaagtaacgtaaaacctttcatg

SEQ ID NO: 32614 - DNA, 50 bp, synthetic construct
  source 1..50: mol_type = other DNA
tgccagacagtattcttcggaataactatcaataagtttactgctaagcc

SEQ ID NO: 32615 - DNA, 50 bp, synthetic construct
  source 1..50: mol_type = other DNA
ccaaatttatagaatcatctaaacatcgttatatgataaaatgaattatc

SEQ ID NO: 32616 - DNA, 50 bp, synthetic construct
  source 1..50: mol_type = other DNA
ttccggacttaagcgccgagtaatcgactatcctgccctgctcggcataa

SEQ ID NO: 32617 - DNA, 50 bp, synthetic construct
  source 1..50: mol_type = other DNA
ccatttattctttgaaatagcccaatgaattaattaaaatgtttaaatta

SEQ ID NO: 32618 - DNA, 50 bp, synthetic construct
  source 1..50: mol_type = other DNA
aaagaaaaacgtattaattattttaacagataaataataactttttattt

SEQ ID NO: 32619 - DNA, 50 bp, synthetic construct
  source 1..50: mol_type = other DNA
attaatagtattttaagcaatgtcttgacaatagaaaaattataattaat

SEQ ID NO: 32620 - DNA, 50 bp, synthetic construct
  source 1..50: mol_type = other DNA
tgttgaggaggaatattggagcaagttttaatatattaccccattcaact

SEQ ID NO: 32621 - DNA, 50 bp, synthetic construct
  source 1..50: mol_type = other DNA
cttttttgtttaattaaccttaaaatttaaaaaataatttttcatttaat

SEQ ID NO: 32622 - DNA, 50 bp, synthetic construct
  source 1..50: mol_type = other DNA
aaagatgcagaagatttgatctctaaagagctagttactggcagatcttt

SEQ ID NO: 32623 - DNA, 50 bp, synthetic construct
  source 1..50: mol_type = other DNA
tgtatttgtaattgttgtcataatatcgattgataaagcttacaatgcca

SEQ ID NO: 32624 - DNA, 50 bp, synthetic construct
  source 1..50: mol_type = other DNA
gcttatgcttatagacgcaaccaaacaaaaaagcttgacaaattatgttt

SEQ ID NO: 32625 - DNA, 50 bp, synthetic construct
  source 1..50: mol_type = other DNA
acaaccaaatcccatacacattatataccatgcacattgttaatgattgt

SEQ ID NO: 32626 - DNA, 50 bp, synthetic construct
  source 1..50: mol_type = other DNA
ggttacaaggaagtatattttcaattatctgttcgggcttatatgtattt

SEQ ID NO: 32627 - DNA, 50 bp, synthetic construct
  source 1..50: mol_type = other DNA
gtgttgtacgagtggtcgaaggtgcaaaacttgtttgacaactacctaaa

SEQ ID NO: 32628 - DNA, 50 bp, synthetic construct
  source 1..50: mol_type = other DNA
acgacgaggaactgaaccgggaactttttcccgcttcctccaattctctg

SEQ ID NO: 32629 - DNA, 50 bp, synthetic construct
  source 1..50: mol_type = other DNA
tttataccgtttatattgagccacatacatcggagcataaaagatagaat

SEQ ID NO: 32630 - DNA, 50 bp, synthetic construct
  source 1..50: mol_type = other DNA
ttacataaaatacaaaggagctgatatcagcttctttcctttgatgaaaa

SEQ ID NO: 32631 - DNA, 50 bp, synthetic construct
  source 1..50: mol_type = other DNA
caatgccatgagcatttactgatgtacatgagcatttgctccgggaatgt

SEQ ID NO: 32632 - DNA, 50 bp, synthetic construct
  source 1..50: mol_type = other DNA
aacaacgctatttcttcccaaacacccttttatgaagctgactgctgctt

SEQ ID NO: 32633 - DNA, 50 bp, synthetic construct
  source 1..50: mol_type = other DNA
tggcagatcaaagagacagggaaatttttctttgtatcattgatcagttt

SEQ ID NO: 32634 - DNA, 50 bp, synthetic construct
  source 1..50: mol_type = other DNA
ttttcacaagtttaaaaaactgtcatcacctcggtttaaaatatgaaaaa

SEQ ID NO: 32635 - DNA, 50 bp, synthetic construct
  source 1..50: mol_type = other DNA
ttttatcgaataatgatacaaattaaaattgttgttttggacggaagaat

SEQ ID NO: 32636 - DNA, 50 bp, synthetic construct
  source 1..50: mol_type = other DNA
cattcatcttacattcatactataataatgtttcggtggctgtgtgaaat

SEQ ID NO: 32637 - DNA, 50 bp, synthetic construct
  source 1..50: mol_type = other DNA
tacatatagtgcatattcctttgtccacatggggcggctgtctgtatagc

SEQ ID NO: 32638 - DNA, 50 bp, synthetic construct
  source 1..50: mol_type = other DNA
cggaataaccattaatatatactttcctttatatatccagtgttattaca

SEQ ID NO: 32639 - DNA, 50 bp, synthetic construct
  source 1..50: mol_type = other DNA
attttgttttatctaacaggttcaggtatctggcctgcatgccacaaaat

SEQ ID NO: 32640 - DNA, 50 bp, synthetic construct
  source 1..50: mol_type = other DNA
atcatttttaaacgtatgtatataaatatataaaagagtttatatccgaa

SEQ ID NO: 32641 - DNA, 50 bp, synthetic construct
  source 1..50: mol_type = other DNA
cagtaaaatttatttttttatagatatataaaaactccaagatattaatc

SEQ ID NO: 32642 - DNA, 50 bp, synthetic construct
  source 1..50: mol_type = other DNA
ttccttgtcaatgattaaaggtgtatccaccttatctgagtgagcaagta

SEQ ID NO: 32643 - DNA, 50 bp, synthetic construct
  source 1..50: mol_type = other DNA
ctgttcagcctgaccttcgtcaatgaattgctcatggtcccatctgcgag

SEQ ID NO: 32644 - DNA, 50 bp, synthetic construct
  source 1..50: mol_type = other DNA
gcaaataatttccctcctccagtagttatgtgactttttaatttatcaca

SEQ ID NO: 32645 - DNA, 50 bp, synthetic construct
  source 1..50: mol_type = other DNA
acagcaaaaagtatcatgtaaatagtaatattcttgatccttactccgtt

SEQ ID NO: 32646 - DNA, 50 bp, synthetic construct
  source 1..50: mol_type = other DNA
tttggttcattgatcggatttggaattacttatccgaatctgtgcagttt

SEQ ID NO: 32647 - DNA, 50 bp, synthetic construct
  source 1..50: mol_type = other DNA
aatgccttataaagaagtgacagggacctgtcttctggcattacggcatc

SEQ ID NO: 32648 - DNA, 50 bp, synthetic construct
  source 1..50: mol_type = other DNA
atagaatggtggaaaaatgtcagaagtctgagaagagggatttcttatca

SEQ ID NO: 32649 - DNA, 50 bp, synthetic construct
  source 1..50: mol_type = other DNA
cgcgaaatagaaccttagaaaggagtatcttcggattcttctgtttctaa

SEQ ID NO: 32650 - DNA, 50 bp, synthetic construct
  source 1..50: mol_type = other DNA
tcggcggcaagatggagaacctgggatgccgtggtccagaaaaagaccgc

SEQ ID NO: 32651 - DNA, 50 bp, synthetic construct
  source 1..50: mol_type = other DNA
gatgaaagaaatgcgggcaaaggaaaacgtcgtacagcatcacttcgaga

SEQ ID NO: 32652 - DNA, 50 bp, synthetic construct
  source 1..50: mol_type = other DNA
ccattcataagtttatttatgatacatatcattaatagccttactcatag

SEQ ID NO: 32653 - DNA, 50 bp, synthetic construct
  source 1..50: mol_type = other DNA
gcgttatgatggagctgatgagtccaacttgaggagccatttgataaggc

SEQ ID NO: 32654 - DNA, 50 bp, synthetic construct
  source 1..50: mol_type = other DNA
atagcgtatcttcttcatggcgaggtttctccatgaagtacaagttgtat

SEQ ID NO: 32655 - DNA, 50 bp, synthetic construct
  source 1..50: mol_type = other DNA
cctaacataaattatattatattatttctacttcaataattttcattgtt

SEQ ID NO: 32656 - DNA, 50 bp, synthetic construct
  source 1..50: mol_type = other DNA
tgaaatatggcagttagctgaatattaacgaacacaaaccattaatttca

SEQ ID NO: 32657 - DNA, 50 bp, synthetic construct
  source 1..50: mol_type = other DNA
tgcatccggcatctggtagcccatggatggatggctggatgccataaaaa

SEQ ID NO: 32658 - DNA, 50 bp, synthetic construct
  source 1..50: mol_type = other DNA
aacttcaacttgaaaggaggtgagatagcacatcctttctatgatattgc

SEQ ID NO: 32659 - DNA, 50 bp, synthetic construct
  source 1..50: mol_type = other DNA
cctgtagatcctaataaccaagatacttcaatacttactggagctataga

SEQ ID NO: 32660 - DNA, 50 bp, synthetic construct
  source 1..50: mol_type = other DNA
tatattcttctaaagtaataaaatcaactcctttatattaaaaatttata

SEQ ID NO: 32661 - DNA, 50 bp, synthetic construct
  source 1..50: mol_type = other DNA
ttatgattgtaaatatatgtttataactaatcatattatgctaattctaa

SEQ ID NO: 32662 - DNA, 50 bp, synthetic construct
  source 1..50: mol_type = other DNA
attgctggtcccaaaccaaatggatagccattaggaatgtgaccgcaggc

SEQ ID NO: 32663 - DNA, 50 bp, synthetic construct
  source 1..50: mol_type = other DNA
aatatatataattttttgtctaatgaattattcaagcttcaatataattt

SEQ ID NO: 32664 - DNA, 50 bp, synthetic construct
  source 1..50: mol_type = other DNA
tctgttttggaaaatccgttaagaaaaattaacgataattatattacctt

SEQ ID NO: 32665 - DNA, 50 bp, synthetic construct
  source 1..50: mol_type = other DNA
aaacggctcaaaaaataaaagtatttgcagggcatttctttgttagtttt

SEQ ID NO: 32666 - DNA, 50 bp, synthetic construct
  source 1..50: mol_type = other DNA
gcggacaaagtccgcaatttgctgcggagaaatctgcaggctgtttttgt

SEQ ID NO: 32667 - DNA, 50 bp, synthetic construct
  source 1..50: mol_type = other DNA
ttcttcacaaggctcttttctttgtgagtgaaaaagtcccttatgaacag

SEQ ID NO: 32668 - DNA, 50 bp, synthetic construct
  source 1..50: mol_type = other DNA
atacataatataactatttttaatatattaaatagttatcaattttatag

SEQ ID NO: 32669 - DNA, 50 bp, synthetic construct
  source 1..50: mol_type = other DNA
aaaatatctaaattaatagatagatatttatattctgaagtagattgtta

SEQ ID NO: 32670 - DNA, 50 bp, synthetic construct
  source 1..50: mol_type = other DNA
ggttctgcgacgcattgtaatagagctgcgttcgctgctcgcgcagcccc

SEQ ID NO: 32671 - DNA, 50 bp, synthetic construct
  source 1..50: mol_type = other DNA
ggccacgcgcgcattccagagatcgcgccctctgttatgaggtcaactcg

SEQ ID NO: 32672 - DNA, 50 bp, synthetic construct
  source 1..50: mol_type = other DNA
cgcgcgcacgcagctcgtgcgcatgcaacagcacgcccttcgcctgcgcg

SEQ ID NO: 32673 - DNA, 50 bp, synthetic construct
  source 1..50: mol_type = other DNA
gagcgagtataatacttgccagcaacggcgcgctcgtagagtgcgcgggc

SEQ ID NO: 32674 - DNA, 50 bp, synthetic construct
  source 1..50: mol_type = other DNA
agaataccgctccaccttgatacaataatatcaagcgaatctggtaatca

SEQ ID NO: 32675 - DNA, 50 bp, synthetic construct
  source 1..50: mol_type = other DNA
attccccgctcccaatcgctgatgtcggaaccggaaaaggaaaggggatg

SEQ ID NO: 32676 - DNA, 50 bp, synthetic construct
  source 1..50: mol_type = other DNA
gcctggatagatttggactgcctttcagtccgaagaagtggtatccattc

SEQ ID NO: 32677 - DNA, 50 bp, synthetic construct
  source 1..50: mol_type = other DNA
cccttcaataaaatatctatacattgatgtatatcctttttatatggatt

SEQ ID NO: 32678 - DNA, 50 bp, synthetic construct
  source 1..50: mol_type = other DNA
tcaccagatcgggattgaggatttcaaaatccacaaagcaatgctcctgg

SEQ ID NO: 32679 - DNA, 50 bp, synthetic construct
  source 1..50: mol_type = other DNA
nnnnnnnnnnnnnnnnnnggagtatggcatnnnnnnnnnnnnnnnnnnnn

SEQ ID NO: 32680 - DNA, 50 bp, synthetic construct
  source 1..50: mol_type = other DNA
accatataaaaggcaccctacgttatgtctatggattcaatccaaatggt

SEQ ID NO: 32681 - DNA, 50 bp, synthetic construct
  source 1..50: mol_type = other DNA
tcagataagattgaaataatgtttttaaatatcatttatgttttagtaga

SEQ ID NO: 32682 - DNA, 50 bp, synthetic construct
  source 1..50: mol_type = other DNA
gataaactacgggaaatgcgggaatagctcattaagtaaaatagtctatc

SEQ ID NO: 32683 - DNA, 50 bp, synthetic construct
  source 1..50: mol_type = other DNA
gttcatcggggatgagttcaaagcaggatttgatggcactcaggcagaaa

SEQ ID NO: 32684 - DNA, 50 bp, synthetic construct
  source 1..50: mol_type = other DNA
ttttcaaacttttttgtgggtagttaatctctgacaaaaacggggagaaa

SEQ ID NO: 32685 - DNA, 50 bp, synthetic construct
  source 1..50: mol_type = other DNA
gtggaaagatgcatcatatataagagtgcatctatcttgttaaattccac

SEQ ID NO: 32686 - DNA, 50 bp, synthetic construct
  source 1..50: mol_type = other DNA
aacaccatcaattccactgccttttaaaatgcaggggaacggcaggtgtt

SEQ ID NO: 32687 - DNA, 50 bp, synthetic construct
  source 1..50: mol_type = other DNA
gctttcagcgacttgccggaaatatatatttatatagagtgtgtataagc

SEQ ID NO: 32688 - DNA, 50 bp, synthetic construct
  source 1..50: mol_type = other DNA
tgcttttctgcttcttcatcatacacggatacagaagaacaggcaacaag

SEQ ID NO: 32689 - DNA, 50 bp, synthetic construct
  source 1..50: mol_type = other DNA
gagcaatttcttctattgtatcttcggggaggcaatagaaatggatgcaa

SEQ ID NO: 32690 - DNA, 50 bp, synthetic construct
  source 1..50: mol_type = other DNA
attatgctctaaatgacttgatatatataaaagttccaaggcatcataat

SEQ ID NO: 32691 - DNA, 50 bp, synthetic construct
  source 1..50: mol_type = other DNA
aaggtttggcttactaattcaatgaatattgaatttataaaccaaatggt

SEQ ID NO: 32692 - DNA, 50 bp, synthetic construct
  source 1..50: mol_type = other DNA
tttgacaaagaaatgtatatcctttcttgtaaaatcattgctttttccat

SEQ ID NO: 32693 - DNA, 50 bp, synthetic construct
  source 1..50: mol_type = other DNA
cgtttaaatgacttgactattcctccaggaaaaatcaaattatttaaaga

SEQ ID NO: 32694 - DNA, 50 bp, synthetic construct
  source 1..50: mol_type = other DNA
aaataaaaatggcaattattcaaatattttatgaataggactttttaaat

SEQ ID NO: 32695 - DNA, 50 bp, synthetic construct
  source 1..50: mol_type = other DNA
caatcaactatggaactaaaacacaaataatttaatggcatacttgattg

SEQ ID NO: 32696 - DNA, 50 bp, synthetic construct
  source 1..50: mol_type = other DNA
ataaataaaaagagaggaggaaagtaagattttcctctcttttggattcc

SEQ ID NO: 32697 - DNA, 50 bp, synthetic construct
  source 1..50: mol_type = other DNA
atggggaggaaacagaaattgaattaatttattttccatttctttgtcaa

SEQ ID NO: 32698 - DNA, 50 bp, synthetic construct
  source 1..50: mol_type = other DNA
tagaaaaaatatgagcctcttaagcggccaagcccaccagcttttcagca

SEQ ID NO: 32699 - DNA, 50 bp, synthetic construct
  source 1..50: mol_type = other DNA
gcgggaaaaagcgcgtcaagccacaggtgaagcgtcgaccttaactgacg

SEQ ID NO: 32700 - DNA, 50 bp, synthetic construct
  source 1..50: mol_type = other DNA
cgggcactggacggtgaaggaggtccgggattgctgataaaaactgcaca

SEQ ID NO: 32701 - DNA, 50 bp, synthetic construct
  source 1..50: mol_type = other DNA
ttatgagaaaaattggggaaactatggagtttcttacattcttcagttaa

SEQ ID NO: 32702 - DNA, 50 bp, synthetic construct
  source 1..50: mol_type = other DNA
ccttttccaccaattttgttgacggccacaaaaaggtttggtttaagggt

SEQ ID NO: 32703 - DNA, 50 bp, synthetic construct
  source 1..50: mol_type = other DNA
ttttttattttcattttattattttaaaataagaaaataggctctctttg

SEQ ID NO: 32704 - DNA, 50 bp, synthetic construct
  source 1..50: mol_type = other DNA
ggacccgagccccatcccgtcgtgcctgcgagggcgagcttaggctttga

SEQ ID NO: 32705 - DNA, 50 bp, synthetic construct
  source 1..50: mol_type = other DNA
taggatgctataaataacacatacatgtatctgtccagttaaactcaatc

SEQ ID NO: 32706 - DNA, 50 bp, synthetic construct
  source 1..50: mol_type = other DNA
cccgatatctattaccactgaaacatatttcactgagccgatatagtctg

SEQ ID NO: 32707 - DNA, 50 bp, synthetic construct
  source 1..50: mol_type = other DNA
atattggaaaggcagaaagtttgcatagtgttgctctgccgcagccatgc

SEQ ID NO: 32708 - DNA, 50 bp, synthetic construct
  source 1..50: mol_type = other DNA
ttcaaacgccacattaagagtgtcaagactcctcgccactggattttcag

SEQ ID NO: 32709 - DNA, 50 bp, synthetic construct
  source 1..50: mol_type = other DNA
agcatcctttgataagttaccgagaaatcatcagcttaccgctgtcttta

SEQ ID NO: 32710 - DNA, 50 bp, synthetic construct
  source 1..50: mol_type = other DNA
acggcggcgggcagattgattggtatctaaatcaatatgccaacctcgct

SEQ ID NO: 32711 - DNA, 50 bp, synthetic construct
  source 1..50: mol_type = other DNA
tgcgccggtattcccggctggtgacgcaaaaacagctgaatagctgccct

SEQ ID NO: 32712 - DNA, 50 bp, synthetic construct
  source 1..50: mol_type = other DNA
agcggataacgtccggcagcgcggcgttgctctgggcgtgctgctgtgct

SEQ ID NO: 32713 - DNA, 50 bp, synthetic construct
  source 1..50: mol_type = other DNA
gaaacaagcagaaacgcatatgcatcacaccgtggcttccttctctttct

SEQ ID NO: 32714 - DNA, 50 bp, synthetic construct
  source 1..50: mol_type = other DNA
ttatggacttgagttatgaaaaaaaattttttcatatctcaattacccac

SEQ ID NO: 32715 - DNA, 50 bp, synthetic construct
  source 1..50: mol_type = other DNA
ttggacttaataaaattaagtgggtttctttgtattaagcgtatgcttgc

SEQ ID NO: 32716 - DNA, 50 bp, synthetic construct
  source 1..50: mol_type = other DNA
gtatcaagaactagctaatgaaatatctttattcgggaaattcttcttaa

SEQ ID NO: 32717 - DNA, 50 bp, synthetic construct
  source 1..50: mol_type = other DNA
ttttcctgaaatttgtatgtatcattccagagcaacattttgactcaaaa

SEQ ID NO: 32718 - DNA, 50 bp, synthetic construct
  source 1..50: mol_type = other DNA
tagagcatctcgctgttaacgagaggctctgcgtgccgcttgatgctctg

SEQ ID NO: 32719 - DNA, 50 bp, synthetic construct
  source 1..50: mol_type = other DNA
tcgtcgattgcgacccgctgacaagctgttcagcgggccgcctggaaccg

SEQ ID NO: 32720 - DNA, 50 bp, synthetic construct
  source 1..50: mol_type = other DNA
cagagtttgaacgccgggtgctggaagccgccagcaggggcggtattcgt

SEQ ID NO: 32721 - DNA, 50 bp, synthetic construct
  source 1..50: mol_type = other DNA
aatagctgccgcgccgggctggccgcggcaacgccggcttggaccagttt

SEQ ID NO: 32722 - DNA, 50 bp, synthetic construct
  source 1..50: mol_type = other DNA
cctcgtgaaggcgtatatccctcccttgctcggcgggcgccgtcacgagg

SEQ ID NO: 32723 - DNA, 50 bp, synthetic construct
  source 1..50: mol_type = other DNA
tggttcaatggtcgggcgcgaggtggtcctcgcgcgccgcctgccgcgca

SEQ ID NO: 32724 - DNA, 50 bp, synthetic construct
  source 1..50: mol_type = other DNA
gttgattatcaatataattgtgttgtaaatgttgttgattataaatccgg

SEQ ID NO: 32725 - DNA, 50 bp, synthetic construct
  source 1..50: mol_type = other DNA
acgctattattaccagatgacaacatgttgtcacttagtaatgatagcga

SEQ ID NO: 32726 - DNA, 50 bp, synthetic construct
  source 1..50: mol_type = other DNA
atgattggataagcatatatatgacttgattatactttttatccaaagca

SEQ ID NO: 32727 - DNA, 50 bp, synthetic construct
  source 1..50: mol_type = other DNA
aggacacgttcttccatcggcgcggtttcgaagatggtgacaggttcccg

SEQ ID NO: 32728 - DNA, 50 bp, synthetic construct
  source 1..50: mol_type = other DNA
atatggatatttctccatttgaatatattgcaataggtaaatgttttata

SEQ ID NO: 32729 - DNA, 50 bp, synthetic construct
  source 1..50: mol_type = other DNA
ccgcgaaactttctctccgtttttagcaaaacggaaagtacgtttggcag

SEQ ID NO: 32730 - DNA, 50 bp, synthetic construct
  source 1..50: mol_type = other DNA
attacaaaggctgcgtagtattcagctaaatcacccgcagctcttgtcag

SEQ ID NO: 32731 - DNA, 50 bp, synthetic construct
  source 1..50: mol_type = other DNA
gatacaaaccctacaggagaaacctatgaaacctcaattaggtttgggtt

SEQ ID NO: 32732 - DNA, 50 bp, synthetic construct
  source 1..50: mol_type = other DNA
tttccacaggacaagagcatacgcgaagatgtgcgggtaacattcagaaa

SEQ ID NO: 32733 - DNA, 50 bp, synthetic construct
  source 1..50: mol_type = other DNA
ttgttggaagctaagatggcggaacgttgagctggcaatgcttctggcaa

SEQ ID NO: 32734 - DNA, 50 bp, synthetic construct
  source 1..50: mol_type = other DNA
acccctcccgatcggtaagctggacggtgaccttaccgcgccgcagggtg

SEQ ID NO: 32735 - DNA, 50 bp, synthetic construct
  source 1..50: mol_type = other DNA
ggcgcaaccatcagcacggtcgccacgggttcaccgctcaaggttgcaag

SEQ ID NO: 32736 - DNA, 50 bp, synthetic construct
  source 1..50: mol_type = other DNA
gtggtagctttcctcgtcctggggaagatgaggaagatgaaatgtattaa

SEQ ID NO: 32737 - DNA, 50 bp, synthetic construct
  source 1..50: mol_type = other DNA
aatagtggtatcaaaacgaggatataagtatttgtttttatataactatt

SEQ ID NO: 32738 - DNA, 50 bp, synthetic construct
  source 1..50: mol_type = other DNA
aaaaatgatcgatacccacgtatctgtgatgatggtagtcggactttttt

SEQ ID NO: 32739 - DNA, 50 bp, synthetic construct
  source 1..50: mol_type = other DNA
tcagaatgtccactttctaatcaattcaaactatcccagcgacattaggc

SEQ ID NO: 32740 - DNA, 50 bp, synthetic construct
  source 1..50: mol_type = other DNA
tttccgtatttcgacaccaacgccctatggcggtggtcgggatacacaac

SEQ ID NO: 32741 - DNA, 50 bp, synthetic construct
  source 1..50: mol_type = other DNA
ggacggacaattggtcatcaaggtagaatgtgaagaagtgctgtgcggct

SEQ ID NO: 32742 - DNA, 50 bp, synthetic construct
  source 1..50: mol_type = other DNA
ttattaacccaattgaagtggaagaaagaacaccttaaacggggttatag

SEQ ID NO: 32743 - DNA, 50 bp, synthetic construct
  source 1..50: mol_type = other DNA
attcgtaatgtattttcaagcacatatgtgctttaaaatgttgatattca

SEQ ID NO: 32744 - DNA, 50 bp, synthetic construct
  source 1..50: mol_type = other DNA
agctgcattaaaacaattaataaatattatttttaatattttaacaagtc

SEQ ID NO: 32745 - DNA, 50 bp, synthetic construct
  source 1..50: mol_type = other DNA
acattttacaatgtgcgtttggtgatcacggcctcgctttaaggaatatc

SEQ ID NO: 32746 - DNA, 50 bp, synthetic construct
  source 1..50: mol_type = other DNA
cacggcgatcttcgatccggggcgaacgcgctggacaggcgatcatcgta

SEQ ID NO: 32747 - DNA, 50 bp, synthetic construct
  source 1..50: mol_type = other DNA
ctcgcttgccgccgaaggcctggacctgcaggaggccaacgacaagctct

SEQ ID NO: 32748 - DNA, 50 bp, synthetic construct
  source 1..50: mol_type = other DNA
gaaatttacgtgtgtcaacattaaatagaattaagacatactttattttt

SEQ ID NO: 32749 - DNA, 50 bp, synthetic construct
  source 1..50: mol_type = other DNA
aaccattaatttgtttaactcgaaatttcttgttgctttttttaataata

SEQ ID NO: 32750 - DNA, 50 bp, synthetic construct
  source 1..50: mol_type = other DNA
gaatctccttttagcctgtgttcctatgaggtcaagattaaaccggattc

SEQ ID NO: 32751 - DNA, 50 bp, synthetic construct
  source 1..50: mol_type = other DNA
ggatgaccgaccggaatttcttcatacgccgttggtagtctttgtcgtcc

SEQ ID NO: 32752 - DNA, 50 bp, synthetic construct
  source 1..50: mol_type = other DNA
gagagctctaccgggatggtgaaccgttacaccatcccggaagattggat

SEQ ID NO: 32753 - DNA, 50 bp, synthetic construct
  source 1..50: mol_type = other DNA
atttcaaggcccttggaacgattccccgcaacaatcaaggcctttctgtc

SEQ ID NO: 32754 - DNA, 50 bp, synthetic construct
  source 1..50: mol_type = other DNA
tgaactttcattgcaactttatgaattcataaaaaaatagttaaaaatat

SEQ ID NO: 32755 - DNA, 50 bp, synthetic construct
  source 1..50: mol_type = other DNA
gtaaatcgtaatgcgcgaattatgcaaagtattcacgaattaccattcac

SEQ ID NO: 32756 - DNA, 50 bp, synthetic construct
  source 1..50: mol_type = other DNA
ctttccgctggaattttacggaagaaacaagaaaaattctaaaaagggag

SEQ ID NO: 32757 - DNA, 50 bp, synthetic construct
  source 1..50: mol_type = other DNA
agatgtaccccttaaagtgtttagctttaatctctttaatctcaccctca

SEQ ID NO: 32758 - DNA, 50 bp, synthetic construct
  source 1..50: mol_type = other DNA
tgcggaaactgtttttttgataaaaccacgagaagagtggtcttttcgca

SEQ ID NO: 32759 - DNA, 50 bp, synthetic construct
  source 1..50: mol_type = other DNA
ggcggaaaccaaagcgacagtaattatagtttgtcgagtatcccgccgat

SEQ ID NO: 32760 - DNA, 50 bp, synthetic construct
  source 1..50: mol_type = other DNA
aattagccaaacaaaaacctctgaataaaaaggcgtttgtttgtcatggt

SEQ ID NO: 32761 - DNA, 50 bp, synthetic construct
  source 1..50: mol_type = other DNA
ataacaattaaataaggggtaattattaatatttctttccagttagtttt

SEQ ID NO: 32762 - DNA, 50 bp, synthetic construct
  source 1..50: mol_type = other DNA
tacaagcaggttccggactggctgaagtgctgcgccgcctacgtctgatg

SEQ ID NO: 32763 - DNA, 50 bp, synthetic construct
  source 1..50: mol_type = other DNA
agtagtgcagaccgccagcttgcatatgcgcggctggcctgaaggcgagg

SEQ ID NO: 32764 - DNA, 50 bp, synthetic construct
  source 1..50: mol_type = other DNA
ttgctatcaagggctttcagaggtaagcatcacaaaatcaccgacagccg

SEQ ID NO: 32765 - DNA, 50 bp, synthetic construct
  source 1..50: mol_type = other DNA
ttaacacccatgaaaaagtacgagacttcgtttatctattacgttggggt

SEQ ID NO: 32766 - DNA, 50 bp, synthetic construct
  source 1..50: mol_type = other DNA
gtccgtaaagcaattcgaaaacagctgtcttttcttgatttattatgcca

SEQ ID NO: 32767 - DNA, 50 bp, synthetic construct
  source 1..50: mol_type = other DNA
ttctggaaggcttttcatcgatctgcggataatggcaagattttccgttc

SEQ ID NO: 32768 - DNA, 50 bp, synthetic construct
  source 1..50: mol_type = other DNA
catcgcaccacggcgacgccttcaactgaagctgaagcgcgggggcgatc

SEQ ID NO: 32769 - DNA, 50 bp, synthetic construct
  source 1..50: mol_type = other DNA
ttttattgaataaaaaaaaataaactccggcttttctttattaaaaaaca

SEQ ID NO: 32770 - DNA, 50 bp, synthetic construct
  source 1..50: mol_type = other DNA
acaccctggaaggcgcctgcatctgcggatagtttatgttgttgtaaggt

SEQ ID NO: 32771 - DNA, 50 bp, synthetic construct
  source 1..50: mol_type = other DNA
gtagtctctaacagcacaaacagaatcctgttttactaattaccttctaa

SEQ ID NO: 32772 - DNA, 50 bp, synthetic construct
  source 1..50: mol_type = other DNA
ccggaaaaatattgaaggactaagccgtgtatcaggcaatacatttcgca

SEQ ID NO: 32773 - DNA, 50 bp, synthetic construct
  source 1..50: mol_type = other DNA
cagcgatcaaaaaacaatagttatcccattttattgcggcctgattgctc

SEQ ID NO: 32774 - DNA, 50 bp, synthetic construct
  source 1..50: mol_type = other DNA
aacaagcattttgtgcccgcattcgcgataagggaggcagatataccatt

SEQ ID NO: 32775 - DNA, 50 bp, synthetic construct
  source 1..50: mol_type = other DNA
cgcttcggcaggtccgcccgccgagcgcgaagggcttcgatgccgcgccg

SEQ ID NO: 32776 - DNA, 50 bp, synthetic construct
  source 1..50: mol_type = other DNA
ccagccggggcagcccagcagcgcctgcgccgcaagcctgccccacagat

SEQ ID NO: 32777 - DNA, 50 bp, synthetic construct
  source 1..50: mol_type = other DNA
gcagtgcgtcgcgatgcaccacgtccttcccgccccccgctccgcactgc

SEQ ID NO: 32778 - DNA, 50 bp, synthetic construct
  source 1..50: mol_type = other DNA
agagaagcccagatagaacgaaagcggcggcgttcggcggcgacttcacc

SEQ ID NO: 32779 - DNA, 50 bp, synthetic construct
  source 1..50: mol_type = other DNA
agataagcgccctgtccggggcatgcagcaatcgcgatagagaaataata

SEQ ID NO: 32780 - DNA, 50 bp, synthetic construct
  source 1..50: mol_type = other DNA
ggccgttctgtatagcgcactttcggattataccactgcttaggccgaat

SEQ ID NO: 32781 - DNA, 50 bp, synthetic construct
  source 1..50: mol_type = other DNA
cacagatgggtattgcttgtgtagtactacacaagagatacccaagcacg

SEQ ID NO: 32782 - DNA, 50 bp, synthetic construct
  source 1..50: mol_type = other DNA
atataaaccattatttgtatcaaactttgataaattccaataatttatac

SEQ ID NO: 32783 - DNA, 50 bp, synthetic construct
  source 1..50: mol_type = other DNA
gaaagaaaaagctagacaaaggggttccatttgtctttgcttaatatttg

SEQ ID NO: 32784 - DNA, 50 bp, synthetic construct
  source 1..50: mol_type = other DNA
gtcagccgtatttttttccatttatgtaaatggcgcaatgagaatgtcaa

SEQ ID NO: 32785 - DNA, 50 bp, synthetic construct
  source 1..50: mol_type = other DNA
ttgccatgatgaacttcggacacagctgctttcaccgtccgcatccccag

SEQ ID NO: 32786 - DNA, 50 bp, synthetic construct
  source 1..50: mol_type = other DNA
catttcagctatccgatcccgcttataagcatactctgcctgctgaaatg

SEQ ID NO: 32787 - DNA, 50 bp, synthetic construct
  source 1..50: mol_type = other DNA
cttcattaacgacagccctgccgttttcatcagggaagtcaaagatgagc

SEQ ID NO: 32788 - DNA, 50 bp, synthetic construct
  source 1..50: mol_type = other DNA
atgaatacagcaaaaaatgattttataacgtgatttcctgctccaagagc

SEQ ID NO: 32789 - DNA, 50 bp, synthetic construct
  source 1..50: mol_type = other DNA
cgccgggcaaggaatcggcgttatatcgttttatcctttctttttcaatt

SEQ ID NO: 32790 - DNA, 50 bp, synthetic construct
  source 1..50: mol_type = other DNA
ggctgaagccagcttgaggaatgatttccaactccagtatggcttcaatc

SEQ ID NO: 32791 - DNA, 50 bp, synthetic construct
  source 1..50: mol_type = other DNA
cgggtagtattttccgataattatcgcagagggcatcccaacgccatccg

SEQ ID NO: 32792 - DNA, 50 bp, synthetic construct
  source 1..50: mol_type = other DNA
cacctgggcagaccgctccagagccggatgtggtgcgggatacgcagcgg

SEQ ID NO: 32793 - DNA, 50 bp, synthetic construct
  source 1..50: mol_type = other DNA
agtatgatgtccgttatcatctttccttctatgaacagggacacgataca

SEQ ID NO: 32794 - DNA, 50 bp, synthetic construct
  source 1..50: mol_type = other DNA
gacccaccctataaatgggtttatatgcaatccgaaaatgataaacggtc

SEQ ID NO: 32795 - DNA, 50 bp, synthetic construct
  source 1..50: mol_type = other DNA
gtatacaattttgctaagacaatgaaattcggatccatacgattgaggac

SEQ ID NO: 32796 - DNA, 50 bp, synthetic construct
  source 1..50: mol_type = other DNA
tgtgtcgccatgacactaaaggccatggcctttgccggcgggggaccggt

SEQ ID NO: 32797 - DNA, 50 bp, synthetic construct
  source 1..50: mol_type = other DNA
tcaaactttggtagcggtgttcttctaaggcggctgctaaattgtttgag

SEQ ID NO: 32798 - DNA, 50 bp, synthetic construct
  source 1..50: mol_type = other DNA
ggtttggaagatcatgattcggataatatcggatcatgcggttcattggt

SEQ ID NO: 32799 - DNA, 50 bp, synthetic construct
  source 1..50: mol_type = other DNA
tggatgtccttatggaatttcagcaccacgaactggcggcaggagaaatc

SEQ ID NO: 32800 - DNA, 50 bp, synthetic construct
  source 1..50: mol_type = other DNA
aagttgattgtcccttcaagcatcataatttgtgggtggctaataaaaat

SEQ ID NO: 32801 - DNA, 50 bp, synthetic construct
  source 1..50: mol_type = other DNA
aataaacttgccggaatatttaaagaagagaatgaaccgtttaggtcttt

SEQ ID NO: 32802 - DNA, 50 bp, synthetic construct
  source 1..50: mol_type = other DNA
cttgccttcatttgatatatattttataatatgtatagaatattatcaaa

SEQ ID NO: 32803 - DNA, 50 bp, synthetic construct
  source 1..50: mol_type = other DNA
tggcccagcccgaaacagggatcgatcgatttcggcgtcggttacgacaa

SEQ ID NO: 32804 - DNA, 50 bp, synthetic construct
  source 1..50: mol_type = other DNA
gccaggccgccacgccgaccagctcgttgcgggcggcgcggcggcggaaa

SEQ ID NO: 32805 - DNA, 50 bp, synthetic construct
  source 1..50: mol_type = other DNA
cgtgaagtcgccggacgagacgatggctccgtcccggcgacgacttctac

SEQ ID NO: 32806 - DNA, 50 bp, synthetic construct
  source 1..50: mol_type = other DNA
gcacgcgctgccgaccgggctgatgctccaccccgcgtcaattcgagcgc

SEQ ID NO: 32807 - DNA, 50 bp, synthetic construct
  source 1..50: mol_type = other DNA
tggaatcaggtgatataattaccgaaaataaaatacttacaaaaattcca

SEQ ID NO: 32808 - DNA, 50 bp, synthetic construct
  source 1..50: mol_type = other DNA
gccaacctgtctaagatgccgctgaagagcggcgcctgatgtatgttggt

SEQ ID NO: 32809 - DNA, 50 bp, synthetic construct
  source 1..50: mol_type = other DNA
ccgagcttacggacaccgagattcagcgagctcggtgagcagacgctcgg

SEQ ID NO: 32810 - DNA, 50 bp, synthetic construct
  source 1..50: mol_type = other DNA
catttgggtgacttcttatatgccgcgacacggaaggagacgtcccacag

SEQ ID NO: 32811 - DNA, 50 bp, synthetic construct
  source 1..50: mol_type = other DNA
gcttgcgccctgctttgatgaagcaggctgaacgggtgcaggacgcacaa

SEQ ID NO: 32812 - DNA, 50 bp, synthetic construct
  source 1..50: mol_type = other DNA
gcgattatctctcgaatccctgcaggcctccggtggccttagtttgcgct

SEQ ID NO: 32813 - DNA, 50 bp, synthetic construct
  source 1..50: mol_type = other DNA
atatggccaagccaaagaagaagcgcttgcttgccttggctttgggatga

SEQ ID NO: 32814 - DNA, 50 bp, synthetic construct
  source 1..50: mol_type = other DNA
gcccttacagggtcagtcgcgtatattcaagctgttgaatatccaatatt

SEQ ID NO: 32815 - DNA, 50 bp, synthetic construct
  source 1..50: mol_type = other DNA
ctttccgtcttgcttagacgcagcgagttacctctacacaagagggattg

SEQ ID NO: 32816 - DNA, 50 bp, synthetic construct
  source 1..50: mol_type = other DNA
ttgctgcgacggtgcagaccgcaattttgttgtgttcgcgctcgcttcaa

SEQ ID NO: 32817 - DNA, 50 bp, synthetic construct
  source 1..50: mol_type = other DNA
tagacgcaaattgagattacgaatggcatcgcttccgcatacactcttta

SEQ ID NO: 32818 - DNA, 50 bp, synthetic construct
  source 1..50: mol_type = other DNA
cttggcgcccaaatctggcggtcccggtttcgccactgccaggctcgcaa

SEQ ID NO: 32819 - DNA, 50 bp, synthetic construct
  source 1..50: mol_type = other DNA
ggtaagaaagtccttctcccaaaggcgttgttgagaaaatgtttatcgag

SEQ ID NO: 32820 - DNA, 50 bp, synthetic construct
  source 1..50: mol_type = other DNA
cacgcacgcgcgggcgatagatgccggcataatgggcgcgagcgttcgtc

SEQ ID NO: 32821 - DNA, 50 bp, synthetic construct
  source 1..50: mol_type = other DNA
cccctccaccgcacacggccccttcgacgcgctcgtgataggtggatggg

SEQ ID NO: 32822 - DNA, 50 bp, synthetic construct
  source 1..50: mol_type = other DNA
cgtgcagctaccggttcttgcgctgcgtcggtagatgtattagtcacacg

SEQ ID NO: 32823 - DNA, 50 bp, synthetic construct
  source 1..50: mol_type = other DNA
gcgccaccgactaccgacaggcagtccaacggctcactggtcaacagcgg

SEQ ID NO: 32824 - DNA, 50 bp, synthetic construct
  source 1..50: mol_type = other DNA
aaaaagtaaaatcttttgatattcttcgatatgaaatcattctacgctag

SEQ ID NO: 32825 - DNA, 50 bp, synthetic construct
  source 1..50: mol_type = other DNA
cactctgatacttcccaaccccaaagggcttaaatataagtaaaaagatg

SEQ ID NO: 32826 - DNA, 50 bp, synthetic construct
  source 1..50: mol_type = other DNA
tcgaaattcaaattattttccatgtacagcgagagctaccaagattttga

SEQ ID NO: 32827 - DNA, 50 bp, synthetic construct
  source 1..50: mol_type = other DNA
aaatgcttaacttaatgacattggtagtcaagttatcagaccaactattt

SEQ ID NO: 32828 - DNA, 50 bp, synthetic construct
  source 1..50: mol_type = other DNA
ctgcggattttcaaagaaagatatacgtcaacatctttttcaatccgaat

SEQ ID NO: 32829 - DNA, 50 bp, synthetic construct
  source 1..50: mol_type = other DNA
ggtataatatagttgtaaggttggtaccccttgtacaccgatgtttctga

SEQ ID NO: 32830 - DNA, 50 bp, synthetic construct
  source 1..50: mol_type = other DNA
cccccgaaggagaaagcacagcgcaatcgttgtgtttgagccatgcattc

SEQ ID NO: 32831 - DNA, 50 bp, synthetic construct
  source 1..50: mol_type = other DNA
gaaagatttattttccccagaacttgtatatgggcgaaaattctcgtcgt

SEQ ID NO: 32832 - DNA, 50 bp, synthetic construct
  source 1..50: mol_type = other DNA
taaagaggattttcgctaatataatttgtgccaatctcaaatattcttct

SEQ ID NO: 32833 - DNA, 50 bp, synthetic construct
  source 1..50: mol_type = other DNA
caatagtgcaatgatgccgccttccagatcgcggatcgtaatttctgttc

SEQ ID NO: 32834 - DNA, 50 bp, synthetic construct
  source 1..50: mol_type = other DNA
caaaattatcaatcaaaaattaacatgttgctttttttcccataattttt

SEQ ID NO: 32835 - DNA, 50 bp, synthetic construct
  source 1..50: mol_type = other DNA
tagaaacaatctgtttactagaactttagcttgtatgtatattaactctg

SEQ ID NO: 32836 - DNA, 50 bp, synthetic construct
  source 1..50: mol_type = other DNA
aaaaaataatgccccatccttccgtctggacgatgattctatgagcgata

SEQ ID NO: 32837 - DNA, 50 bp, synthetic construct
  source 1..50: mol_type = other DNA
atttaaagaaaaaccgcatccgaatacctttcacctttctttccttggca

SEQ ID NO: 32838 - DNA, 50 bp, synthetic construct
  source 1..50: mol_type = other DNA
gagatcgacgcgctcttgaggtgacgccaccttgcgggcgcgacgaacgg

SEQ ID NO: 32839 - DNA, 50 bp, synthetic construct
  source 1..50: mol_type = other DNA
gctggcgaggcccagtacggcgagatatccccgaaccaggcctcgaagac

SEQ ID NO: 32840 - DNA, 50 bp, synthetic construct
  source 1..50: mol_type = other DNA
caggatttggagtagtataattagtactaagtattcaaccccatttggag

SEQ ID NO: 32841 - DNA, 50 bp, synthetic construct
  source 1..50: mol_type = other DNA
tactatttattacatattctattcatatataagaacaagaccttatctct

SEQ ID NO: 32842 - DNA, 50 bp, synthetic construct
  source 1..50: mol_type = other DNA
tactctgattgaaatggatgtaactagtatccttgattgaaatgctggtc

SEQ ID NO: 32843 - DNA, 50 bp, synthetic construct
  source 1..50: mol_type = other DNA
aaaaacagccggtcaacgactgcaattttcaaaacagatcggctggattc

SEQ ID NO: 32844 - DNA, 50 bp, synthetic construct
  source 1..50: mol_type = other DNA
gattagatgtattatttttggatgattactaggtaataatactactagtc

SEQ ID NO: 32845 - DNA, 50 bp, synthetic construct
  source 1..50: mol_type = other DNA
agttccctaaatggggaagatttggccaacaacccgccatttgcagcgac

SEQ ID NO: 32846 - DNA, 50 bp, synthetic construct
  source 1..50: mol_type = other DNA
tcaatgatgcggcagcccacgatgccaattatggcgaagaaactggttga

SEQ ID NO: 32847 - DNA, 50 bp, synthetic construct
  source 1..50: mol_type = other DNA
ttactgtttgattttattgagatggccatagcgagaagtgcaaacattgc

SEQ ID NO: 32848 - DNA, 50 bp, synthetic construct
  source 1..50: mol_type = other DNA
tccatcaataaagatgcatgtgcctgaatataaatatcttttttgatttc

SEQ ID NO: 32849 - DNA, 50 bp, synthetic construct
  source 1..50: mol_type = other DNA
tcctgatccgttgacacacggcagtagaatgctgtgtcaactgtcaactg

SEQ ID NO: 32850 - DNA, 50 bp, synthetic construct
  source 1..50: mol_type = other DNA
ataaggaaggaaatgaaatataattaagtgtaatgaaatttgtctgatag

SEQ ID NO: 32851 - DNA, 50 bp, synthetic construct
  source 1..50: mol_type = other DNA
tttatttcttataagtttacccacttaaataatgacttatctaatttaaa

SEQ ID NO: 32852 - DNA, 50 bp, synthetic construct
  source 1..50: mol_type = other DNA
ttagaatatctaaattaatgattatggaatttttaaacatcttattttat

SEQ ID NO: 32853 - DNA, 50 bp, synthetic construct
  source 1..50: mol_type = other DNA
gctatttaataggctggggataattaataggtgtactaacatcaaatact

SEQ ID NO: 32854 - DNA, 50 bp, synthetic construct
  source 1..50: mol_type = other DNA
ccatgcggcaatatgagcagtacacccggacagctctaattcaaaatgta

SEQ ID NO: 32855 - DNA, 50 bp, synthetic construct
  source 1..50: mol_type = other DNA
gatagaaatatttcgttacatggtaatataattaattgaatctttctatc

SEQ ID NO: 32856 - DNA, 50 bp, synthetic construct
  source 1..50: mol_type = other DNA
tcaccatcaattgccctcaacatccaaacgtgggtaaaaatacttaatga

SEQ ID NO: 32857 - DNA, 50 bp, synthetic construct
  source 1..50: mol_type = other DNA
gtataataataaatagtttaagtttaaacagaacaagaattataaattat

SEQ ID NO: 32858 - DNA, 50 bp, synthetic construct
  source 1..50: mol_type = other DNA
gaccagcatttcaatcaaggatactagttacatccatttcaatcagagta

SEQ ID NO: 32859 - DNA, 50 bp, synthetic construct
  source 1..50: mol_type = other DNA
ataaattcctgatataataaaaatgtatatttattagctgcatcttttac

SEQ ID NO: 32860 - DNA, 50 bp, synthetic construct
  source 1..50: mol_type = other DNA
atctatcaaccacagattgtgggcgaaggaaaaatctgtcgctggccaga

SEQ ID NO: 32861 - DNA, 50 bp, synthetic construct
  source 1..50: mol_type = other DNA
tgctggatggagtgcataattttaagacaaaatatgagccatgtgaagca

SEQ ID NO: 32862 - DNA, 50 bp, synthetic construct
  source 1..50: mol_type = other DNA
agtgtaaatgctcctgggtatttttgaaaaacgtgaggaggaaatagcat

SEQ ID NO: 32863 - DNA, 50 bp, synthetic construct
  source 1..50: mol_type = other DNA
atgagcaattccaaaaatactttcatgcaagtatttttcaaatagcgaag

SEQ ID NO: 32864 - DNA, 50 bp, synthetic construct
  source 1..50: mol_type = other DNA
tcgacatggccgtttttctttgttacagaacagaaaaagcgccaggtcgc

SEQ ID NO: 32865 - DNA, 50 bp, synthetic construct
  source 1..50: mol_type = other DNA
cataaaattccatattttacaagttaggttgttagatatattgtaacgga

SEQ ID NO: 32866 - DNA, 50 bp, synthetic construct
  source 1..50: mol_type = other DNA
tccaaccaatcattgtctttatcgccaacgcaagcccaggatttcagaac

SEQ ID NO: 32867 - DNA, 50 bp, synthetic construct
  source 1..50: mol_type = other DNA
taatagaaattagataaatcggaattgtacctccgattttttgattattc

SEQ ID NO: 32868 - DNA, 50 bp, synthetic construct
  source 1..50: mol_type = other DNA
accgaagttttgtacggcaaagcaataattttgcctcactccgctgttgt

SEQ ID NO: 32869 - DNA, 50 bp, synthetic construct
  source 1..50: mol_type = other DNA
tatatctggcagtcttcttttttcaataatgtagacaaagttggcttata

SEQ ID NO: 32870 - DNA, 50 bp, synthetic construct
  source 1..50: mol_type = other DNA
taacaatcaaaaacaattgtgcaatgttccagaattatctttccagaccg

SEQ ID NO: 32871 - DNA, 50 bp, synthetic construct
  source 1..50: mol_type = other DNA
gcacggtttatctttggacagcatttgggcggtgcaaggataggcaggac

SEQ ID NO: 32872 - DNA, 50 bp, synthetic construct
  source 1..50: mol_type = other DNA
tatgaaatcggcggtaaagaaagcggcctttctctgtggtagattctcag

SEQ ID NO: 32873 - DNA, 50 bp, synthetic construct
  source 1..50: mol_type = other DNA
taatatattagtaggattaattataaaaaattacagttactaaaatatgc

SEQ ID NO: 32874 - DNA, 50 bp, synthetic construct
  source 1..50: mol_type = other DNA
atttattaatagtataccataatttaaatagtgttataaatatatgcaat

SEQ ID NO: 32875 - DNA, 50 bp, synthetic construct
  source 1..50: mol_type = other DNA
cataagcaaggatgtggaaacattaatattttcatatattgaaccgagtg

SEQ ID NO: 32876 - DNA, 50 bp, synthetic construct
  source 1..50: mol_type = other DNA
ggagtttttctattacattgtaacataataaaataaagaagtcaaacgtg

SEQ ID NO: 32877 - DNA, 50 bp, synthetic construct
  source 1..50: mol_type = other DNA
cccattgagttcttccgagaaaaaatttaccccggtggagaatatcgatt

SEQ ID NO: 32878 - DNA, 50 bp, synthetic construct
  source 1..50: mol_type = other DNA
tagatacaagaattcaaagaaactcaatcttcaatgaaacatttaatgtt

SEQ ID NO: 32879 - DNA, 50 bp, synthetic construct
  source 1..50: mol_type = other DNA
gtaaagacttgttttaaataaccaatattttaaaagatgcaaacaagaag

SEQ ID NO: 32880 - DNA, 50 bp, synthetic construct
  source 1..50: mol_type = other DNA
ttagattaagaaagttaaataatttaatattattgtgtttcatagcatat

SEQ ID NO: 32881 - DNA, 50 bp, synthetic construct
  source 1..50: mol_type = other DNA
agtgttattgaaattgataaagagaactttttaataacagtaaatatact

SEQ ID NO: 32882 - DNA, 50 bp, synthetic construct
  source 1..50: mol_type = other DNA
agtgaaagtaattgacctatcccaaactttataggataatccgtttccgg

SEQ ID NO: 32883 - DNA, 50 bp, synthetic construct
  source 1..50: mol_type = other DNA
ttactttttccgctgctatatcatctgcgatatttcagatattatggaga

SEQ ID NO: 32884 - DNA, 50 bp, synthetic construct
  source 1..50: mol_type = other DNA
ttaagaatacaaagttactaaaaaagtttttatgttatttatcttcttta

SEQ ID NO: 32885 - DNA, 50 bp, synthetic construct
  source 1..50: mol_type = other DNA
ggcggggctggacagcgtgtatgtggcgacaccttgaatccaggtgagtc

SEQ ID NO: 32886 - DNA, 50 bp, synthetic construct
  source 1..50: mol_type = other DNA
gtcctttacagggcgatgataactgcgattatcttaggcctgtggctata

SEQ ID NO: 32887 - DNA, 50 bp, synthetic construct
  source 1..50: mol_type = other DNA
gctgcagataggtctgccggatttaccaaccctaaatgcatgcctgcaac

SEQ ID NO: 32888 - DNA, 50 bp, synthetic construct
  source 1..50: mol_type = other DNA
gcgccgaccggaccaggccggccgccgccaacccctgtccctgcgggcgg

SEQ ID NO: 32889 - DNA, 50 bp, synthetic construct
  source 1..50: mol_type = other DNA
ttctgtgaaacagttggcagataatcttttttggtatatgcttcatagct

SEQ ID NO: 32890 - DNA, 50 bp, synthetic construct
  source 1..50: mol_type = other DNA
gtcaggatggcttgcatcaatcggcacggtcttttcggttccgtcccgga

SEQ ID NO: 32891 - DNA, 50 bp, synthetic construct
  source 1..50: mol_type = other DNA
agaaacacggcattttcggcactttccagctttcggagcgtgagcggtct

SEQ ID NO: 32892 - DNA, 50 bp, synthetic construct
  source 1..50: mol_type = other DNA
taatactgcggcacctcgccctcatttttcggtgagtattgtgtctatca

SEQ ID NO: 32893 - DNA, 50 bp, synthetic construct
  source 1..50: mol_type = other DNA
tttctgatttttctttctcccggtgaaccggaagcagaaaaagtcagaaa

SEQ ID NO: 32894 - DNA, 50 bp, synthetic construct
  source 1..50: mol_type = other DNA
tgcttgtaattgttgtggtcaaattcatagggactgcccacgatgtcacc

SEQ ID NO: 32895 - DNA, 50 bp, synthetic construct
  source 1..50: mol_type = other DNA
tttttcgcctttttgggggtagtattgatgatacaaaaaaaatcgaaaaa

SEQ ID NO: 32896 - DNA, 50 bp, synthetic construct
  source 1..50: mol_type = other DNA
aacagcctttttctctgtggcatatttccgcaaggggtcaccttgctgtt

SEQ ID NO: 32897 - DNA, 50 bp, synthetic construct
  source 1..50: mol_type = other DNA
catatttttgtttgtaattgctcaattgagcaatcacaactgcaaagatt

SEQ ID NO: 32898 - DNA, 50 bp, synthetic construct
  source 1..50: mol_type = other DNA
gccatagggcggctgggacagtggaaccggatccccatttgctaaatgcc

SEQ ID NO: 32899 - DNA, 50 bp, synthetic construct
  source 1..50: mol_type = other DNA
aagttgcttcttaaggaggaacttatctgttgaagatttagaagcaactt

SEQ ID NO: 32900 - DNA, 50 bp, synthetic construct
  source 1..50: mol_type = other DNA
acgcagcgaaccacgccgacggaggatgagggcggtttgggtcggtgggt

SEQ ID NO: 32901 - DNA, 50 bp, synthetic construct
  source 1..50: mol_type = other DNA
tttctctccctatctggctcggattacttgaatagtgcatccgatgagaa

SEQ ID NO: 32902 - DNA, 50 bp, synthetic construct
  source 1..50: mol_type = other DNA
cctaccaattttaccatgcctgcagtagcggacatgggaaaagtgcattt

SEQ ID NO: 32903 - DNA, 50 bp, synthetic construct
  source 1..50: mol_type = other DNA
gtcacaactttgcgcctgccgtaaaataacagccaccgaaaatatgtttc

SEQ ID NO: 32904 - DNA, 50 bp, synthetic construct
  source 1..50: mol_type = other DNA
ccctgtccaggttggcgagcaggtcgagcttctcccctcccaatgcaggg

SEQ ID NO: 32905 - DNA, 50 bp, synthetic construct
  source 1..50: mol_type = other DNA
cttgttttactatcaagatttcccgtcggctcatctgcaagaataaatgc

SEQ ID NO: 32906 - DNA, 50 bp, synthetic construct
  source 1..50: mol_type = other DNA
actatctgcaggctggtattaaaggagcatcagcgcagagcaccgttaag

SEQ ID NO: 32907 - DNA, 50 bp, synthetic construct
  source 1..50: mol_type = other DNA
tacaaaaaagagcctccgaagaagctctttctcggcagcggccgcttctt

SEQ ID NO: 32908 - DNA, 50 bp, synthetic construct
  source 1..50: mol_type = other DNA
acataaaaagcataaagactgccatatcactcttttctcggtttttatca

SEQ ID NO: 32909 - DNA, 50 bp, synthetic construct
  source 1..50: mol_type = other DNA
gtattgtttatattagtaatattggtaggtgcagcctggatgtaaaaaga

SEQ ID NO: 32910 - DNA, 50 bp, synthetic construct
  source 1..50: mol_type = other DNA
tttctaaagtattaaaatagtttcatttagaatttttaatacttccatca

SEQ ID NO: 32911 - DNA, 50 bp, synthetic construct
  source 1..50: mol_type = other DNA
tacatcaacgtcccgcacccgcacatgtcgataagctcgacgttgccgta

SEQ ID NO: 32912 - DNA, 50 bp, synthetic construct
  source 1..50: mol_type = other DNA
atttattaatttcattattatttaatataactcttaactcttttataatt

SEQ ID NO: 32913 - DNA, 50 bp, synthetic construct
  source 1..50: mol_type = other DNA
caccattctgaaggatgccatattgtgcttctgatttcttcaactgcttg

SEQ ID NO: 32914 - DNA, 50 bp, synthetic construct
  source 1..50: mol_type = other DNA
ccaaagtccacaagggcttattttttctaataatgcatctcgaagtttgg

SEQ ID NO: 32915 - DNA, 50 bp, synthetic construct
  source 1..50: mol_type = other DNA
cgtcatgtgccgcaccgccctcggaaaccgggggctttgtacattcgacg

SEQ ID NO: 32916 - DNA, 50 bp, synthetic construct
  source 1..50: mol_type = other DNA
ttttcgctttatgccaagaaaagaaaatcagcactggcaatattcatgtc

SEQ ID NO: 32917 - DNA, 50 bp, synthetic construct
  source 1..50: mol_type = other DNA
ttaaaccctcctttgtattaattttagccgtcattattaggagcatttaa

SEQ ID NO: 32918 - DNA, 50 bp, synthetic construct
  source 1..50: mol_type = other DNA
gcctgactcatctggaaagagtcggccgtgctggtcctgataccgcaggt

SEQ ID NO: 32919 - DNA, 50 bp, synthetic construct
  source 1..50: mol_type = other DNA
tatggtttcttgttaaataagatgaaaaatcacaaaagcagaaaaattat

SEQ ID NO: 32920 - DNA, 50 bp, synthetic construct
  source 1..50: mol_type = other DNA
tcaatagaaaacttgataaatagctatcatttcaaaaaattttatattta

SEQ ID NO: 32921 - DNA, 50 bp, synthetic construct
  source 1..50: mol_type = other DNA
cttgcccattgaaagagcgataaagcttgatgcctcttgacatcgcatcg

SEQ ID NO: 32922 - DNA, 50 bp, synthetic construct
  source 1..50: mol_type = other DNA
tgtgatataataacactgtagaaagaaatcagcagtgatggaattgagac

SEQ ID NO: 32923 - DNA, 50 bp, synthetic construct
  source 1..50: mol_type = other DNA
aatattaactgaacaggagtgatatatatcttaaaagctttttttattga

SEQ ID NO: 32924 - DNA, 50 bp, synthetic construct
  source 1..50: mol_type = other DNA
tatcaaggagtacttctctttggtaggtcaagtaaaggtattctttgaga

SEQ ID NO: 32925 - DNA, 50 bp, synthetic construct
  source 1..50: mol_type = other DNA
aatggctaaaccaaaggctctaaaatattagtaagtttagttgcaatttt

SEQ ID NO: 32926 - DNA, 50 bp, synthetic construct
  source 1..50: mol_type = other DNA
ctaccaacaggaaaggagattcatatagcatatttttttcggattggcaa

SEQ ID NO: 32927 - DNA, 50 bp, synthetic construct
  source 1..50: mol_type = other DNA
tggggtttgcagcatagggcgtcctccttgctgacttgcttgccgatgca

SEQ ID NO: 32928 - DNA, 50 bp, synthetic construct
  source 1..50: mol_type = other DNA
acgtttatttaatttaaaacatttgcaaatgttttatgctttatttttta

SEQ ID NO: 32929 - DNA, 50 bp, synthetic construct
  source 1..50: mol_type = other DNA
ttttaagaaggcaataagtatggatacccattgacaccaatatctttaac

SEQ ID NO: 32930 - DNA, 50 bp, synthetic construct
  source 1..50: mol_type = other DNA
aatattgtataataacactacaaaagtttgaggtaagtatttacgatatt

SEQ ID NO: 32931 - DNA, 50 bp, synthetic construct
  source 1..50: mol_type = other DNA
caatgcctgtatctaaatacctctaaagaggtatttagatacatgagcta

SEQ ID NO: 32932 - DNA, 50 bp, synthetic construct
  source 1..50: mol_type = other DNA
tatggttatcacatctttacttcttggcaagctaatttgtggcgaatgtg

SEQ ID NO: 32933 - DNA, 50 bp, synthetic construct
  source 1..50: mol_type = other DNA
gaacagggttgctgattacttgactaaaatggtataaagctaccctcttt

SEQ ID NO: 32934 - DNA, 50 bp, synthetic construct
  source 1..50: mol_type = other DNA
tacagttataccggccaaaaaggtactcgaactgaataggtataactata

SEQ ID NO: 32935 - DNA, 50 bp, synthetic construct
  source 1..50: mol_type = other DNA
agcatttttgcatactttgtaaatatatgaaaaatgggtataaaaataac

SEQ ID NO: 32936 - DNA, 50 bp, synthetic construct
  source 1..50: mol_type = other DNA
gctattttgctggcagatgaaccgacaggaaatctggactcaaaaacgag

SEQ ID NO: 32937 - DNA, 50 bp, synthetic construct
  source 1..50: mol_type = other DNA
agcttctggacgatgagcgaaaaatcctttcaggtaatcgtctcattggc

SEQ ID NO: 32938 - DNA, 50 bp, synthetic construct
  source 1..50: mol_type = other DNA
ttgataaaggcggggttgtatttgagggtataaaaataagccctttcaaa

SEQ ID NO: 32939 - DNA, 50 bp, synthetic construct
  source 1..50: mol_type = other DNA
taacaataagggaatgcgagactagatgtatggaaatttggccagggaaa

SEQ ID NO: 32940 - DNA, 50 bp, synthetic construct
  source 1..50: mol_type = other DNA
atacgcaaatattgaccaaactcgactgatgccggtgcaccagttcgtaa

SEQ ID NO: 32941 - DNA, 50 bp, synthetic construct
  source 1..50: mol_type = other DNA
cattttgaattagagctgtccgggcagattacgaaatttaattcaaaaag

SEQ ID NO: 32942 - DNA, 50 bp, synthetic construct
  source 1..50: mol_type = other DNA
gctttagagtgatgtatagacgtacgaagcgtgatacatacatcccaatc

SEQ ID NO: 32943 - DNA, 50 bp, synthetic construct
  source 1..50: mol_type = other DNA
gatgattggcagaaaattattgacatgttaaaggttttatttcaattatt

SEQ ID NO: 32944 - DNA, 50 bp, synthetic construct
  source 1..50: mol_type = other DNA
tgtcagaactcttaatgctgaaggtccgtaaagcattacccgacttgagt

SEQ ID NO: 32945 - DNA, 50 bp, synthetic construct
  source 1..50: mol_type = other DNA
gagctataggcgcctaacggaaaatataatagtaatcagcccttgcgtgg

SEQ ID NO: 32946 - DNA, 50 bp, synthetic construct
  source 1..50: mol_type = other DNA
tacgctgattgaaatgaatgtaactagtaaccttgattgaaatgctggtc

SEQ ID NO: 32947 - DNA, 50 bp, synthetic construct
  source 1..50: mol_type = other DNA
caatgaccgccacaccattttcaattctgcctgtcagctggctatagcac

SEQ ID NO: 32948 - DNA, 50 bp, synthetic construct
  source 1..50: mol_type = other DNA
aatctatcaacctgctggcggtaggccatacaccatttggttataagata

SEQ ID NO: 32949 - DNA, 50 bp, synthetic construct
  source 1..50: mol_type = other DNA
tgctgatgacttacgagtgggggtataccacaggcgcccagaggaccggc

SEQ ID NO: 32950 - DNA, 50 bp, synthetic construct
  source 1..50: mol_type = other DNA
gcaaatagattatatcattttagagaattaaaagtgtatatgatattgtt

SEQ ID NO: 32951 - DNA, 50 bp, synthetic construct
  source 1..50: mol_type = other DNA
tcactaaccttcacctacccggcagatggtgtttacgtgaacgatagtgt

SEQ ID NO: 32952 - DNA, 50 bp, synthetic construct
  source 1..50: mol_type = other DNA
tgaccttcattcttgactcgtttcttgaatcgttctataggtgagggagc

SEQ ID NO: 32953 - DNA, 50 bp, synthetic construct
  source 1..50: mol_type = other DNA
attattatatgctcattcactcatatatcactctaaaaggcaataatagc

SEQ ID NO: 32954 - DNA, 50 bp, synthetic construct
  source 1..50: mol_type = other DNA
tgcggtattgtgtaatggtagcacggcagctttcatctcgtccgtccaac

SEQ ID NO: 32955 - DNA, 50 bp, synthetic construct
  source 1..50: mol_type = other DNA
ttccgtgctgccactgaaggcagatgccgaccttcacgatacacacggat

SEQ ID NO: 32956 - DNA, 50 bp, synthetic construct
  source 1..50: mol_type = other DNA
ccggttataactctcttaccgacgaagggttaaacaaaagttataaaaaa

SEQ ID NO: 32957 - DNA, 50 bp, synthetic construct
  source 1..50: mol_type = other DNA
gactacgtcatgttcaagatcgcggcaccgatcaacagcactaagaagcg

SEQ ID NO: 32958 - DNA, 50 bp, synthetic construct
  source 1..50: mol_type = other DNA
ccttggaccgaggaacggcgggaaaattctatcaattcgcatcttgtttc

SEQ ID NO: 32959 - DNA, 50 bp, synthetic construct
  source 1..50: mol_type = other DNA
taactgatttttggtaatattcatagttgaatagttttgaaaatcaagtc

SEQ ID NO: 32960 - DNA, 50 bp, synthetic construct
  source 1..50: mol_type = other DNA
cgcccgtaggacagtccgggcagacagattccccatctggccccggcggc

SEQ ID NO: 32961 - DNA, 50 bp, synthetic construct
  source 1..50: mol_type = other DNA
gtactcatttttaatacaatacaaattcatacgtcattaaaaatacggaa

SEQ ID NO: 32962 - DNA, 50 bp, synthetic construct
  source 1..50: mol_type = other DNA
agtgtccgatatcagcgccaactgatatccgttaacatcgcacgtacact

SEQ ID NO: 32963 - DNA, 50 bp, synthetic construct
  source 1..50: mol_type = other DNA
tatgtacgttatactgattacatcaatgtacaatcattatatgctatgta

SEQ ID NO: 32964 - DNA, 50 bp, synthetic construct
  source 1..50: mol_type = other DNA
aaaattcgcacacctgataaaagaaataaaaaatcatttattttaatttt

SEQ ID NO: 32965 - DNA, 50 bp, synthetic construct
  source 1..50: mol_type = other DNA
tgggcgggcgttttcacgccgccgcggttcggaagcaaatacttccccca

SEQ ID NO: 32966 - DNA, 50 bp, synthetic construct
  source 1..50: mol_type = other DNA
gtagcttagaaagaatggtaataatacattcacctccgtttctatcagac

SEQ ID NO: 32967 - DNA, 50 bp, synthetic construct
  source 1..50: mol_type = other DNA
ttcaacatacatatactactgaagaagttcagtaatatcaacggttttcg

SEQ ID NO: 32968 - DNA, 50 bp, synthetic construct
  source 1..50: mol_type = other DNA
cgcgaattcagatccagcagataatcgtaatttctgttcctgattccaga

SEQ ID NO: 32969 - DNA, 50 bp, synthetic construct
  source 1..50: mol_type = other DNA
caaaaagtcctatataaggcaggcacctaatcatcatttaacactttttt

SEQ ID NO: 32970 - DNA, 50 bp, synthetic construct
  source 1..50: mol_type = other DNA
atttgttttatttgctttgccaaactctgccttgctggtataacggtaat

SEQ ID NO: 32971 - DNA, 50 bp, synthetic construct
  source 1..50: mol_type = other DNA
cccagcaaactggtaaagcggattatcatgaacttttttaatttgctggg

SEQ ID NO: 32972 - DNA, 50 bp, synthetic construct
  source 1..50: mol_type = other DNA
ggcgcccgcatccaacgagcagcacacgcgctttcttggtcggaggagcg

SEQ ID NO: 32973 - DNA, 50 bp, synthetic construct
  source 1..50: mol_type = other DNA
tttgtccttatccaccgtaatgtactttgcatacgattatcctggaatta

SEQ ID NO: 32974 - DNA, 50 bp, synthetic construct
  source 1..50: mol_type = other DNA
tacgattggcgaagaaatgcgtcaatagaagcacatttccgccgcagaca

SEQ ID NO: 32975 - DNA, 50 bp, synthetic construct
  source 1..50: mol_type = other DNA
aattcacctatgacgatatcatttacaaaaagtatatgaatagatataat

SEQ ID NO: 32976 - DNA, 50 bp, synthetic construct
  source 1..50: mol_type = other DNA
aatatgtccaaactaaaggtagaaaacaggaaggagcgtgatgagatatg

SEQ ID NO: 32977 - DNA, 50 bp, synthetic construct
  source 1..50: mol_type = other DNA
tcttggcaccgcacttcgcacagatccatgtggtaaaatagaggcataga

SEQ ID NO: 32978 - DNA, 50 bp, synthetic construct
  source 1..50: mol_type = other DNA
ttgttgtcagagccgaccgcagtttaaagggcagtgacctcacccatatg

SEQ ID NO: 32979 - DNA, 50 bp, synthetic construct
  source 1..50: mol_type = other DNA
taccgttttctatcttataaccaaatctttctatatcaaagaagatggaa

SEQ ID NO: 32980 - DNA, 50 bp, synthetic construct
  source 1..50: mol_type = other DNA
ggcctacgggaagcggaaagacgtataagtgctcttttatatcgtatcgg

SEQ ID NO: 32981 - DNA, 50 bp, synthetic construct
  source 1..50: mol_type = other DNA
aatacgttaaaataaaaattgataaaccctgtttatatgggtaaagtacg

SEQ ID NO: 32982 - DNA, 50 bp, synthetic construct
  source 1..50: mol_type = other DNA
ttatacagcatgtacgaaggtgatatcgcacttgactatgggctgtatgc

SEQ ID NO: 32983 - DNA, 50 bp, synthetic construct
  source 1..50: mol_type = other DNA
attatggccgaaattcgttgataatattatcaaatgattaaataaatctg

SEQ ID NO: 32984 - DNA, 50 bp, synthetic construct
  source 1..50: mol_type = other DNA
caacctcatagaaagcgagatgaaatataataccactttgattgaatttg

SEQ ID NO: 32985 - DNA, 50 bp, synthetic construct
  source 1..50: mol_type = other DNA
ccaaacttcgagatacattattagaaaaaataagcccttgtggactttgg

SEQ ID NO: 32986 - DNA, 50 bp, synthetic construct
  source 1..50: mol_type = other DNA
atgcgatcggaattccggaagaagatttactaccggtttgacgatctcat

SEQ ID NO: 32987 - DNA, 50 bp, synthetic construct
  source 1..50: mol_type = other DNA
tgaaaataataggcctttatatgaaaatttattctgctataatattttca

SEQ ID NO: 32988 - DNA, 50 bp, synthetic construct
  source 1..50: mol_type = other DNA
gatgtcatcgccatttttccatgtatgggtacaaaaataacgaccacaca

SEQ ID NO: 32989 - DNA, 50 bp, synthetic construct
  source 1..50: mol_type = other DNA
aaaacgggatcagtctgcttttttataatcaagcacaatgccggctgttt

SEQ ID NO: 32990 - DNA, 50 bp, synthetic construct
  source 1..50: mol_type = other DNA
gccgttacccgacctcggtaaaaaccagttccgccacctcggcctgaaat

SEQ ID NO: 32991 - DNA, 50 bp, synthetic construct
  source 1..50: mol_type = other DNA
tatcgcagattgtacttgctattattttacaacagatacagttaaagata

SEQ ID NO: 32992 - DNA, 50 bp, synthetic construct
  source 1..50: mol_type = other DNA
catcctgaaagggtggggagaaatcaggcaaaatattttacaacagatac

SEQ ID NO: 32993 - DNA, 50 bp, synthetic construct
  source 1..50: mol_type = other DNA
agccttttttcaagaaaatttttaaataaaatctttagaaaaaaaaatta

SEQ ID NO: 32994 - DNA, 50 bp, synthetic construct
  source 1..50: mol_type = other DNA
tataaagtttataaaacatctaataaattttgaaagatataaattttacc

SEQ ID NO: 32995 - DNA, 50 bp, synthetic construct
  source 1..50: mol_type = other DNA
cgctcatatagtttttttcgacttatctttccaataaacttccttggctg

SEQ ID NO: 32996 - DNA, 50 bp, synthetic construct
  source 1..50: mol_type = other DNA
tccatcttcatcgggataaaaatgcacattttctcttcgattttggtata

SEQ ID NO: 32997 - DNA, 50 bp, synthetic construct
  source 1..50: mol_type = other DNA
tttcgttgcgagcgactgtagactatcgtacacattcccgcgcagagaaa

SEQ ID NO: 32998 - DNA, 50 bp, synthetic construct
  source 1..50: mol_type = other DNA
ttaccgcatacccaaaatcagaatatgacaaaattttgcgtatcggcaga

SEQ ID NO: 32999 - DNA, 50 bp, synthetic construct
  source 1..50: mol_type = other DNA
gttatcatctttatacttattcattaattccaagctaactaaattataac

SEQ ID NO: 33000 - DNA, 50 bp, synthetic construct
  source 1..50: mol_type = other DNA
tgtttacggtatataccgattatacaggttaacggtatcgggagcaaaaa

SEQ ID NO: 33001 - DNA, 50 bp, synthetic construct
  source 1..50: mol_type = other DNA
gcggaatgactgtgaccgaccgtgctcacggtgcagaacagaagtaccgg

SEQ ID NO: 33002 - DNA, 50 bp, synthetic construct
  source 1..50: mol_type = other DNA
tgctctttggcatacggaaggagaaacctcctcatcatcacccaagccaa

SEQ ID NO: 33003 - DNA, 50 bp, synthetic construct
  source 1..50: mol_type = other DNA
ttactttgcctatatttatatattcaggtatatgaatatacacagtcgag

SEQ ID NO: 33004 - DNA, 50 bp, synthetic construct
  source 1..50: mol_type = other DNA
agcacggaaagtcaatagggttcacgccagcctccagaactttctctgca

SEQ ID NO: 33005 - DNA, 50 bp, synthetic construct
  source 1..50: mol_type = other DNA
ttccgtgctgccaccgaaggcaggtgccgaccttcccgatagacacggac

SEQ ID NO: 33006 - DNA, 50 bp, synthetic construct
  source 1..50: mol_type = other DNA
caatgcgggccgctgcatataacaattcgctaatgcgcgccggcgcagta

SEQ ID NO: 33007 - DNA, 50 bp, synthetic construct
  source 1..50: mol_type = other DNA
cgggcattttattcttaccataaactcttcctcttccagacaaatctcct

SEQ ID NO: 33008 - DNA, 50 bp, synthetic construct
  source 1..50: mol_type = other DNA
cctctgtaacaaggctgcaaaaaattatatatccagtgttattacagata

SEQ ID NO: 33009 - DNA, 50 bp, synthetic construct
  source 1..50: mol_type = other DNA
cctctgggcctacgacctgctaccgcgcggcccacgactcggccgctcgg

SEQ ID NO: 33010 - DNA, 50 bp, synthetic construct
  source 1..50: mol_type = other DNA
tacggtctaaataatttttgaataaatatagatggattggaattgccgat

SEQ ID NO: 33011 - DNA, 50 bp, synthetic construct
  source 1..50: mol_type = other DNA
aatctttgcagttgtgattgctcaattgagcaattacaaacaaaaatatg

SEQ ID NO: 33012 - DNA, 50 bp, synthetic construct
  source 1..50: mol_type = other DNA
atcttccagcagttcctctttccgctcggtaaactacgaagctggaacgg

SEQ ID NO: 33013 - DNA, 50 bp, synthetic construct
  source 1..50: mol_type = other DNA
atggtacaataaaagaaaacaagggaacttcgggtctttttttgtgccat

SEQ ID NO: 33014 - DNA, 50 bp, synthetic construct
  source 1..50: mol_type = other DNA
tttttttccttttatgccaaggaaagtgtaatggagtaaaaggaaaacag

SEQ ID NO: 33015 - DNA, 50 bp, synthetic construct
  source 1..50: mol_type = other DNA
aaaagtcagaatggcaaaattttaaaaaaagtattgcaatcttttgttta

SEQ ID NO: 33016 - DNA, 50 bp, synthetic construct
  source 1..50: mol_type = other DNA
agcctgtctgtcttcggcttctttaaaaatcagctcctttttgaaaatcg

SEQ ID NO: 33017 - DNA, 50 bp, synthetic construct
  source 1..50: mol_type = other DNA
caactgcagagcgattatatagatgtatctgttgatatgctcgattgcct

SEQ ID NO: 33018 - DNA, 50 bp, synthetic construct
  source 1..50: mol_type = other DNA
tcggtagctgcataggttttgacctgcccaaaaaaggaggcagcaaccgt

SEQ ID NO: 33019 - DNA, 50 bp, synthetic construct
  source 1..50: mol_type = other DNA
ttgaaaacgccgtgtggtgcattctggatgaagaagtccagctcatgtat

SEQ ID NO: 33020 - DNA, 50 bp, synthetic construct
  source 1..50: mol_type = other DNA
acgaaaacatgttttgatatatcattttaatctccaaaacttttttcact

SEQ ID NO: 33021 - DNA, 50 bp, synthetic construct
  source 1..50: mol_type = other DNA
gtccaagcccttatttgtcaagaaattacgtgatcaatggttttgccgat

SEQ ID NO: 33022 - DNA, 50 bp, synthetic construct
  source 1..50: mol_type = other DNA
gtaaaatctgagaccagcgcattaattcctacgctgctctcagctatttc

SEQ ID NO: 33023 - DNA, 50 bp, synthetic construct
  source 1..50: mol_type = other DNA
ggaacctcgcgacgaatcagcgaagggtcgccggatatgcgcgggtgtcc

SEQ ID NO: 33024 - DNA, 50 bp, synthetic construct
  source 1..50: mol_type = other DNA
gcacggaagctgaaaggctgtggaaatcgtcagaacagaggttttcgtag

SEQ ID NO: 33025 - DNA, 50 bp, synthetic construct
  source 1..50: mol_type = other DNA
aatgtaaaagaagcttccgagcggatcttcgtcgataattattgtattca

SEQ ID NO: 33026 - DNA, 50 bp, synthetic construct
  source 1..50: mol_type = other DNA
ttatagcgcggaaagtgcgtaaaatccgttacgcactttacgccctcgtc

SEQ ID NO: 33027 - DNA, 50 bp, synthetic construct
  source 1..50: mol_type = other DNA
aaccgctttttgagcccaaacggtgataaagatttctgaagagtccatgt

SEQ ID NO: 33028 - DNA, 50 bp, synthetic construct
  source 1..50: mol_type = other DNA
tccgttgagactcgcgcgtaacctgcagagttcgcattcacgaagtaggc

SEQ ID NO: 33029 - DNA, 50 bp, synthetic construct
  source 1..50: mol_type = other DNA
aaggcaaaagcttttacactggtagaaatgttggtggtgttgcttatcat

SEQ ID NO: 33030 - DNA, 50 bp, synthetic construct
  source 1..50: mol_type = other DNA
cgggggcaagccgcaccgcctgtccgaaccaacgtatttttttacccccg

SEQ ID NO: 33031 - DNA, 50 bp, synthetic construct
  source 1..50: mol_type = other DNA
ctatccgctgtccgcaaaaccattgatagcattttgcggaatgcggatta

SEQ ID NO: 33032 - DNA, 50 bp, synthetic construct
  source 1..50: mol_type = other DNA
atagtttgatacaaaattcgcgcttttttgcgatatttgtatgtgaaagg

SEQ ID NO: 33033 - DNA, 50 bp, synthetic construct
  source 1..50: mol_type = other DNA
cgtttctcctcacgaaataatccagctgggacacctcgagatgattggcg

SEQ ID NO: 33034 - DNA, 50 bp, synthetic construct
  source 1..50: mol_type = other DNA
cccatctgtggggcagcggtggcttcgaccgccgcttccctaccgaagcg

SEQ ID NO: 33035 - DNA, 50 bp, synthetic construct
  source 1..50: mol_type = other DNA
atagcccctgtataattttcccctaaagacaaaggacatgtttggcccgg

SEQ ID NO: 33036 - DNA, 50 bp, synthetic construct
  source 1..50: mol_type = other DNA
gaagatgaaacagaagaaagtattggggttcttaattatttgctagttct

SEQ ID NO: 33037 - DNA, 50 bp, synthetic construct
  source 1..50: mol_type = other DNA
cggcataatcgattgtgtttttcgtagtacgaaccatgccgcagatgttt

SEQ ID NO: 33038 - DNA, 50 bp, synthetic construct
  source 1..50: mol_type = other DNA
acgcacctacgataatggtcagcccgggctgtcacctttaagctctccgc

SEQ ID NO: 33039 - DNA, 50 bp, synthetic construct
  source 1..50: mol_type = other DNA
taaaataaaaaatttcaaggggtcttaaatgatattaattttgtatttca

SEQ ID NO: 33040 - DNA, 50 bp, synthetic construct
  source 1..50: mol_type = other DNA
ctttatttcttgacagagtatgtaatgttcgctccttatgacaaataaaa

SEQ ID NO: 33041 - DNA, 50 bp, synthetic construct
  source 1..50: mol_type = other DNA
atatatatataacgaaaggaggttaaaacctcattatctttaaaatactc

SEQ ID NO: 33042 - DNA, 50 bp, synthetic construct
  source 1..50: mol_type = other DNA
aagccggagaaaatgtcgaaaatataaatattcactaacttctgctgtag

SEQ ID NO: 33043 - DNA, 50 bp, synthetic construct
  source 1..50: mol_type = other DNA
tgaaaaaacacaatatttataggtcaaacaataaataaaagcttttttct

SEQ ID NO: 33044 - DNA, 50 bp, synthetic construct
  source 1..50: mol_type = other DNA
aataattgtagaacgcatcgtcaaagttgacgaaatgttaagaggttttt

SEQ ID NO: 33045 - DNA, 50 bp, synthetic construct
  source 1..50: mol_type = other DNA
ctggaaacatcgtgtactatattccggagtaattgtccagatgtaaacag

SEQ ID NO: 33046 - DNA, 50 bp, synthetic construct
  source 1..50: mol_type = other DNA
ggtcccccaccaagttcaaggacgctcgtctctgaaggaaagaatgccga

SEQ ID NO: 33047 - DNA, 50 bp, synthetic construct
  source 1..50: mol_type = other DNA
ttgattcggcgacgctccgcaagaattgccttcctgggtcagcgaaagca

SEQ ID NO: 33048 - DNA, 50 bp, synthetic construct
  source 1..50: mol_type = other DNA
tgaaacgacagtatattaggaatagccgttcctcggtccaaggagtgccg

SEQ ID NO: 33049 - DNA, 50 bp, synthetic construct
  source 1..50: mol_type = other DNA
ggcttcttgaaaggacctgatcgtatatggtcggtatttttcgagcagaa

SEQ ID NO: 33050 - DNA, 50 bp, synthetic construct
  source 1..50: mol_type = other DNA
gtcggtggtaggctgagtttcgccggcgtgaaaatcgtcctgccacttcg

SEQ ID NO: 33051 - DNA, 50 bp, synthetic construct
  source 1..50: mol_type = other DNA
gacggcggacgcatttccaagctcatgacccacctaactgacacgccgct

SEQ ID NO: 33052 - DNA, 50 bp, synthetic construct
  source 1..50: mol_type = other DNA
gatatatcccggacatgacggtaatataccgtaaacaaaggggacatatc

SEQ ID NO: 33053 - DNA, 50 bp, synthetic construct
  source 1..50: mol_type = other DNA
ttttttccacaatagtcagtttatcaataaatataaaggtgtccgacaat

SEQ ID NO: 33054 - DNA, 50 bp, synthetic construct
  source 1..50: mol_type = other DNA
cgcccttgcaggattgaaggtaaatgttgcagccatatctatcatggtgg

SEQ ID NO: 33055 - DNA, 50 bp, synthetic construct
  source 1..50: mol_type = other DNA
ttttcatactctacttttttttaaatttgaaacaaaggtatatatttttg

SEQ ID NO: 33056 - DNA, 50 bp, synthetic construct
  source 1..50: mol_type = other DNA
aaaaactatcttatcaataatgtttaatattttttgccaccgatgttctc

SEQ ID NO: 33057 - DNA, 50 bp, synthetic construct
  source 1..50: mol_type = other DNA
aaatttagattacaactacagcataaatgctgtctatgtaaaaggcctgc

SEQ ID NO: 33058 - DNA, 50 bp, synthetic construct
  source 1..50: mol_type = other DNA
tcggtgaccttttactaaattcaacatttgcttgcgtaaagattcctgtt

SEQ ID NO: 33059 - DNA, 50 bp, synthetic construct
  source 1..50: mol_type = other DNA
gttgaaagcatcacgtttttttgtatacaataaatggtggtgctggactt

SEQ ID NO: 33060 - DNA, 50 bp, synthetic construct
  source 1..50: mol_type = other DNA
gtagagtcatggagctaaaaaggagaatatttttgcctgcattttattat

SEQ ID NO: 33061 - DNA, 50 bp, synthetic construct
  source 1..50: mol_type = other DNA
aatatcgtaagttctctcatccccccactcattcaagcacttttctactt

SEQ ID NO: 33062 - DNA, 50 bp, synthetic construct
  source 1..50: mol_type = other DNA
attgtagaaaatgcacatgaagcaattgataaagaagtatttgatgcagt

SEQ ID NO: 33063 - DNA, 50 bp, synthetic construct
  source 1..50: mol_type = other DNA
tcatgcgcgtcttctttcaataattaccgtgaatacatcttaaaacatga

SEQ ID NO: 33064 - DNA, 50 bp, synthetic construct
  source 1..50: mol_type = other DNA
agtaaatggcaaaaaagaatttatggttatagcctttttttgcatttttg

SEQ ID NO: 33065 - DNA, 50 bp, synthetic construct
  source 1..50: mol_type = other DNA
ggctgatagcccgcaatcttcctccgccacaaacccgcgaaacccccgcc

SEQ ID NO: 33066 - DNA, 50 bp, synthetic construct
  source 1..50: mol_type = other DNA
caattttttttgacaaagtagagactccgcaactaatacaaaaaaacgtg

SEQ ID NO: 33067 - DNA, 50 bp, synthetic construct
  source 1..50: mol_type = other DNA
aacaggaatctttacgcaagcaaatgttgaatttagtaaaaggtcatcaa

SEQ ID NO: 33068 - DNA, 50 bp, synthetic construct
  source 1..50: mol_type = other DNA
cagttggtagagcacctgacttttaaaaaagtcctgtgataccagtacgg

SEQ ID NO: 33069 - DNA, 50 bp, synthetic construct
  source 1..50: mol_type = other DNA
catgcaaaaggcaataaatcttctatagaaaggatgtgatattttttttg

SEQ ID NO: 33070 - DNA, 50 bp, synthetic construct
  source 1..50: mol_type = other DNA
aggaaacagtctctcaaaagcatcttcctccttttgattctatattaccg

SEQ ID NO: 33071 - DNA, 50 bp, synthetic construct
  source 1..50: mol_type = other DNA
ttgctattattggctttcagagtgatatggatgcggcgaaacgatatgaa

SEQ ID NO: 33072 - DNA, 50 bp, synthetic construct
  source 1..50: mol_type = other DNA
atggccgaaaaatacgggatatcttcagataaatcttacttttcggctga

SEQ ID NO: 33073 - DNA, 50 bp, synthetic construct
  source 1..50: mol_type = other DNA
aaaaagctgtagtgacagtatctcatcgttcaaaatccatactgcatttt

SEQ ID NO: 33074 - DNA, 50 bp, synthetic construct
  source 1..50: mol_type = other DNA
caataaagacattttattaaaggacagtatttcagaagctggacatattg

SEQ ID NO: 33075 - DNA, 50 bp, synthetic construct
  source 1..50: mol_type = other DNA
ttagcttaatagataaggattcctataataaaatgtatatcttaaaataa

SEQ ID NO: 33076 - DNA, 50 bp, synthetic construct
  source 1..50: mol_type = other DNA
cgcggaaggagcagtcgtgggttcgctggcgcatccacgcgccttcctcg

SEQ ID NO: 33077 - DNA, 50 bp, synthetic construct
  source 1..50: mol_type = other DNA
ataaagttcaagaaataaaaaaacaagttgtttaattatttggtagataa

SEQ ID NO: 33078 - DNA, 50 bp, synthetic construct
  source 1..50: mol_type = other DNA
aaaaagtacagtttaaacttttgcttgcaaaatgcaaaactctacctcag

SEQ ID NO: 33079 - DNA, 50 bp, synthetic construct
  source 1..50: mol_type = other DNA
tttgaacccgtttttctgtaaaaatagagctgtaaaaaatacgtttcaaa

SEQ ID NO: 33080 - DNA, 50 bp, synthetic construct
  source 1..50: mol_type = other DNA
cccgtctttttatccaacgctcccgtcggttcatcagccaatatgataga

SEQ ID NO: 33081 - DNA, 50 bp, synthetic construct
  source 1..50: mol_type = other DNA
ttaaggaaaagatgcttgaaaaatatgcggttcaagcatcactagatagg

SEQ ID NO: 33082 - DNA, 50 bp, synthetic construct
  source 1..50: mol_type = other DNA
aaaaattgggttaccgaaaatatcaagccattgtagataaagaaacgttt

SEQ ID NO: 33083 - DNA, 50 bp, synthetic construct
  source 1..50: mol_type = other DNA
gatcagacgggtgacctgggtggccttccactctcgctctcggtgcgatc

SEQ ID NO: 33084 - DNA, 50 bp, synthetic construct
  source 1..50: mol_type = other DNA
ggggtgcgagacgaggtacctgtcctgccaggccgaccgtgcccggcccc

SEQ ID NO: 33085 - DNA, 50 bp, synthetic construct
  source 1..50: mol_type = other DNA
tttagatataatgaatgagcttgtttcaactcccatccgatatttataaa

SEQ ID NO: 33086 - DNA, 50 bp, synthetic construct
  source 1..50: mol_type = other DNA
ttcatcagtacatagatgttggaaatttacaacatatatgaaccaattct

SEQ ID NO: 33087 - DNA, 50 bp, synthetic construct
  source 1..50: mol_type = other DNA
ccataatggcctcattctgaatggatcgcctcaacgtgagaggtttgagg

SEQ ID NO: 33088 - DNA, 50 bp, synthetic construct
  source 1..50: mol_type = other DNA
ccacaagtcgcatggatggatagtgttctttgctgacaatcggtgcgtgg

SEQ ID NO: 33089 - DNA, 50 bp, synthetic construct
  source 1..50: mol_type = other DNA
gcggcatagctggtctgctgttcctctttcttccacaccagacctgcgcc

SEQ ID NO: 33090 - DNA, 50 bp, synthetic construct
  source 1..50: mol_type = other DNA
cactttggtagaaatgtaggttactagtatccttgattgaaatgttagtg

SEQ ID NO: 33091 - DNA, 50 bp, synthetic construct
  source 1..50: mol_type = other DNA
attttttcaaaataagtattcaatttattgaatatttcttgagaaataat

SEQ ID NO: 33092 - DNA, 50 bp, synthetic construct
  source 1..50: mol_type = other DNA
attaaaatatgtttattgttattaaatatattgagtaaacaagggttaaa

SEQ ID NO: 33093 - DNA, 50 bp, synthetic construct
  source 1..50: mol_type = other DNA
taagcgcagaggattatttcgaggaccctgtgcattagcctgcgcgcctg

SEQ ID NO: 33094 - DNA, 50 bp, synthetic construct
  source 1..50: mol_type = other DNA
cgcttagcatttcgctttttatgcttataatgtgagcctagatagccgaa

SEQ ID NO: 33095 - DNA, 50 bp, synthetic construct
  source 1..50: mol_type = other DNA
gcaaacagtcaaatctcaaactcagaaaagtgggagattgttcagttaga

SEQ ID NO: 33096 - DNA, 50 bp, synthetic construct
  source 1..50: mol_type = other DNA
ggagatattaacggcggtagactttaaagtcaatataacttaaaacttcc

SEQ ID NO: 33097 - DNA, 50 bp, synthetic construct
  source 1..50: mol_type = other DNA
gattcctccaaagatgcgggaaagctttttattgcattctcactggaata

SEQ ID NO: 33098 - DNA, 50 bp, synthetic construct
  source 1..50: mol_type = other DNA
ttctagtgtcttgatagccaaattcagttttgaaaatcaagtcgagtatt

SEQ ID NO: 33099 - DNA, 50 bp, synthetic construct
  source 1..50: mol_type = other DNA
tggaatctgcctgatggcaaaatataaagcgtgaaggcaggcagattaag

SEQ ID NO: 33100 - DNA, 50 bp, synthetic construct
  source 1..50: mol_type = other DNA
ttatttctcaggaaatatttaataagtattaaatcttatcttacactcta

SEQ ID NO: 33101 - DNA, 50 bp, synthetic construct
  source 1..50: mol_type = other DNA
ttctcagctctttaaagaaatcggtcaaaatttcctaaaaaatgataaaa

SEQ ID NO: 33102 - DNA, 50 bp, synthetic construct
  source 1..50: mol_type = other DNA
attgtagaaaatgcacatgaggcaattgataaagaagtatttgatacagt

SEQ ID NO: 33103 - DNA, 50 bp, synthetic construct
  source 1..50: mol_type = other DNA
tgatgccttttgaagggaaaggaaacttcttgtgacttcatgatggatga

SEQ ID NO: 33104 - DNA, 50 bp, synthetic construct
  source 1..50: mol_type = other DNA
actttaagatgtaaacaataatttataaagcaagacatatatagtaatga

SEQ ID NO: 33105 - DNA, 50 bp, synthetic construct
  source 1..50: mol_type = other DNA
agcatttcaagtagaaaagtgcttgagagaacttacgatattgcttgcct

SEQ ID NO: 33106 - DNA, 50 bp, synthetic construct
  source 1..50: mol_type = other DNA
cttaggttagaattgaaaaattaaataatatttaaaaaaattaacctaaa

SEQ ID NO: 33107 - DNA, 50 bp, synthetic construct
  source 1..50: mol_type = other DNA
tgcgcaaggcaaaaccggggatccacttacccatgcagcatccgtgcctg

SEQ ID NO: 33108 - DNA, 50 bp, synthetic construct
  source 1..50: mol_type = other DNA
tgagtaccatgtaaacgacgaaaagctgccgttggatgccatgggttctc

SEQ ID NO: 33109 - DNA, 50 bp, synthetic construct
  source 1..50: mol_type = other DNA
taggactgtcgttggcaattctcggccttttcagaataaaaagccgccta

SEQ ID NO: 33110 - DNA, 50 bp, synthetic construct
  source 1..50: mol_type = other DNA
ttcaccgaaaaatagcacagctattgatagcttcggatttattctctgac

SEQ ID NO: 33111 - DNA, 50 bp, synthetic construct
  source 1..50: mol_type = other DNA
tactgagccgattgtagtggttcagttgaaacacccccttcctatcctgg

SEQ ID NO: 33112 - DNA, 50 bp, synthetic construct
  source 1..50: mol_type = other DNA
tatatattctatcacaaaaatgcaaatgcaacattgcgcagaagaatatc

SEQ ID NO: 33113 - DNA, 50 bp, synthetic construct
  source 1..50: mol_type = other DNA
ggttaaaagcttcacgtttttttgtacaaaagctagtgaaggatttaaag

SEQ ID NO: 33114 - DNA, 50 bp, synthetic construct
  source 1..50: mol_type = other DNA
gaacgattttccgcctctgtcagttctgttacagaggcggaaaacagtct

SEQ ID NO: 33115 - DNA, 50 bp, synthetic construct
  source 1..50: mol_type = other DNA
ttgtagaaaatgcacatgaagcaattgaataaaataaaaattttgtaaaa

SEQ ID NO: 33116 - DNA, 50 bp, synthetic construct
  source 1..50: mol_type = other DNA
tattatatttatttcaatttttgaattcaaattttgaaaattatacttta

SEQ ID NO: 33117 - DNA, 50 bp, synthetic construct
  source 1..50: mol_type = other DNA
ttaacgaccacaatttccgatgaacaaacaaaaaatgccccgccagcgat

SEQ ID NO: 33118 - DNA, 50 bp, synthetic construct
  source 1..50: mol_type = other DNA
atatattatatcagataaccttaatctttactcactgtactataaatttt

SEQ ID NO: 33119 - DNA, 50 bp, synthetic construct
  source 1..50: mol_type = other DNA
aggatattttatatgaaaaggagaattaaggttatctgatataatatatt

SEQ ID NO: 33120 - DNA, 50 bp, synthetic construct
  source 1..50: mol_type = other DNA
ggtgaagctcaatcagacctttgtataaaaagagatcattttacagttct

SEQ ID NO: 33121 - DNA, 50 bp, synthetic construct
  source 1..50: mol_type = other DNA
tatggcacgcatgaactccatgcaaaactatgaccttggccagtcctctc

SEQ ID NO: 33122 - DNA, 50 bp, synthetic construct
  source 1..50: mol_type = other DNA
cagcacgctacggctcgtttccttgcagggagctaagccctgcttttctt

SEQ ID NO: 33123 - DNA, 50 bp, synthetic construct
  source 1..50: mol_type = other DNA
ttacagcatcgatgaagatacagtagcatataaacccaaaacggctgtac

SEQ ID NO: 33124 - DNA, 50 bp, synthetic construct
  source 1..50: mol_type = other DNA
cccggtgcggaacaagcggaatgttttatttctccttgttttgccccgga

SEQ ID NO: 33125 - DNA, 50 bp, synthetic construct
  source 1..50: mol_type = other DNA
aagaacagattttgatgaaatggaagacctgctcatcaaaatcctccaag

SEQ ID NO: 33126 - DNA, 50 bp, synthetic construct
  source 1..50: mol_type = other DNA
cctccaaacaccctagaaggaggctctatttcttctgcagactgccggat

SEQ ID NO: 33127 - DNA, 50 bp, synthetic construct
  source 1..50: mol_type = other DNA
tcgcggggacggcgaacgtgctggcgcgctgccgttcgccgacggggcgg

SEQ ID NO: 33128 - DNA, 50 bp, synthetic construct
  source 1..50: mol_type = other DNA
tcttttttctataccctattttaccagcaacatagctgcgtacaataaaa

SEQ ID NO: 33129 - DNA, 50 bp, synthetic construct
  source 1..50: mol_type = other DNA
aattgtttacctcctgttggtatcttgattctttcactcattgcctccct

SEQ ID NO: 33130 - DNA, 50 bp, synthetic construct
  source 1..50: mol_type = other DNA
gaagttcctgcagcgtgggtgcatatatcactctaaaaggcaggaatatc

SEQ ID NO: 33131 - DNA, 50 bp, synthetic construct
  source 1..50: mol_type = other DNA
aacggtggcggatgcctgttcgatccagcgaggagcagctcaccagctac

SEQ ID NO: 33132 - DNA, 50 bp, synthetic construct
  source 1..50: mol_type = other DNA
acggcagagcggcattgggaacacatgtgcgactatctgtgctaaaataa

SEQ ID NO: 33133 - DNA, 50 bp, synthetic construct
  source 1..50: mol_type = other DNA
atctggcccggattatgccctgaatgagcagggcgttgtcaccaagaagg

SEQ ID NO: 33134 - DNA, 50 bp, synthetic construct
  source 1..50: mol_type = other DNA
caacctttttgaaacgcaggcgctcgacatcaatcttaacacacagcagt

SEQ ID NO: 33135 - DNA, 50 bp, synthetic construct
  source 1..50: mol_type = other DNA
tacggaagtttactgtatgccccatataacttcggtgaacggcttcggcg

SEQ ID NO: 33136 - DNA, 50 bp, synthetic construct
  source 1..50: mol_type = other DNA
atgaaaaattaaaacagacgcttcttctatcgtctgttctctcattccga

SEQ ID NO: 33137 - DNA, 50 bp, synthetic construct
  source 1..50: mol_type = other DNA
aaaggttatccggggactgaccgacaatgctcacctcgcctctgtgtttt

SEQ ID NO: 33138 - DNA, 50 bp, synthetic construct
  source 1..50: mol_type = other DNA
acgatattacaattttagggacttatattgctctaaaagcgagatatatc

SEQ ID NO: 33139 - DNA, 50 bp, synthetic construct
  source 1..50: mol_type = other DNA
gtatattgaaagtgcagaggagttataaaaaataagccctttcaaataat

SEQ ID NO: 33140 - DNA, 50 bp, synthetic construct
  source 1..50: mol_type = other DNA
tacaagctgcagcagcaggagatgcgcggatccgagaaccgcatgtagct

SEQ ID NO: 33141 - DNA, 50 bp, synthetic construct
  source 1..50: mol_type = other DNA
ctggcattatagcatatgccattctgaaaagccatattgaatcctgcccg

SEQ ID NO: 33142 - DNA, 50 bp, synthetic construct
  source 1..50: mol_type = other DNA
tagctatagagcacaaaagattcattttccggctttccatgctataatat

SEQ ID NO: 33143 - DNA, 50 bp, synthetic construct
  source 1..50: mol_type = other DNA
cagactgccatccagcagattaacgctgtacaaagcacgggggctgcaat

SEQ ID NO: 33144 - DNA, 50 bp, synthetic construct
  source 1..50: mol_type = other DNA
tgccagagcccttgcctccaagccggggattttctttaagggcggcagca

SEQ ID NO: 33145 - DNA, 50 bp, synthetic construct
  source 1..50: mol_type = other DNA
tggggctatacatcagcacacgcaggtaactgtgcattattatgcctccg

SEQ ID NO: 33146 - DNA, 50 bp, synthetic construct
  source 1..50: mol_type = other DNA
ctttcctgtattttatttgtggtaatcaccaactgcaaaagcgtcaaacg

SEQ ID NO: 33147 - DNA, 50 bp, synthetic construct
  source 1..50: mol_type = other DNA
tgaattcgcaaagatgcgaaccgctccccggacgcaatttcgggaatgtg

SEQ ID NO: 33148 - DNA, 50 bp, synthetic construct
  source 1..50: mol_type = other DNA
gtggttcaaaccccgacttcgcaaggttgcgaaaattattttttaattgc

SEQ ID NO: 33149 - DNA, 50 bp, synthetic construct
  source 1..50: mol_type = other DNA
aaaaagcattatatacaatacaaaatattgtaaagctgaaaatcttttaa

SEQ ID NO: 33150 - DNA, 50 bp, synthetic construct
  source 1..50: mol_type = other DNA
ataatgtgtgaaaaatattgtatcaaaaatcaagcattttcaataaaggc

SEQ ID NO: 33151 - DNA, 50 bp, synthetic construct
  source 1..50: mol_type = other DNA
gttgacggtgaaaacacattgaaaagtttcgctgtggtttgcgtgtgcgc

SEQ ID NO: 33152 - DNA, 50 bp, synthetic construct
  source 1..50: mol_type = other DNA
ctcggttaatccgtaaaaagtctaaatattgttttcttttgcaatccgct

SEQ ID NO: 33153 - DNA, 50 bp, synthetic construct
  source 1..50: mol_type = other DNA
aagcagcctgaaaccatcaaactgctcttttcgcttgtttggggcaattc

SEQ ID NO: 33154 - DNA, 50 bp, synthetic construct
  source 1..50: mol_type = other DNA
gcgaagggcagatggcaaaatgctgtcacatttatttttctgcccgtctc

SEQ ID NO: 33155 - DNA, 50 bp, synthetic construct
  source 1..50: mol_type = other DNA
attttcacataattttataatcttataaactcatgcagcaattcagaata

SEQ ID NO: 33156 - DNA, 50 bp, synthetic construct
  source 1..50: mol_type = other DNA
tcagcgaaatataacagggccgtaacagcggccgccttatagatcgctgt

SEQ ID NO: 33157 - DNA, 50 bp, synthetic construct
  source 1..50: mol_type = other DNA
acaagaaccacagaatacgttttgtatctgtttcattctttggctcatag

SEQ ID NO: 33158 - DNA, 50 bp, synthetic construct
  source 1..50: mol_type = other DNA
tgatagccaaacatgataggcgtgtaatggcctatatttttccagcatct

SEQ ID NO: 33159 - DNA, 50 bp, synthetic construct
  source 1..50: mol_type = other DNA
caaaatagacaagatatagccccgtgcatatggtgttcctggatgttttc

SEQ ID NO: 33160 - DNA, 50 bp, synthetic construct
  source 1..50: mol_type = other DNA
cgtatccaattctttttctgcggattaccaaagagcatgaatgaaatact

SEQ ID NO: 33161 - DNA, 50 bp, synthetic construct
  source 1..50: mol_type = other DNA
gttttgtaatggttatgggagaaatatgcaaaccataactaaaaaagaag

SEQ ID NO: 33162 - DNA, 50 bp, synthetic construct
  source 1..50: mol_type = other DNA
ataagataggttggttggatcgtaaataaataaaaggataccttttgatt

SEQ ID NO: 33163 - DNA, 50 bp, synthetic construct
  source 1..50: mol_type = other DNA
atctgcctttcgtacattagttaatattaaaaaatatatgaaaggggatg

SEQ ID NO: 33164 - DNA, 50 bp, synthetic construct
  source 1..50: mol_type = other DNA
cctattaacgaaaaactcctcaccgcggtaaggagctttcagggaataga

SEQ ID NO: 33165 - DNA, 50 bp, synthetic construct
  source 1..50: mol_type = other DNA
acgggcgtaggcggcggtgcggcgcttccatcaccgccgcctcccttcat

SEQ ID NO: 33166 - DNA, 50 bp, synthetic construct
  source 1..50: mol_type = other DNA
atcctcttctgcccatcttgacggccccatcatgtcatgccccagatgtg

SEQ ID NO: 33167 - DNA, 50 bp, synthetic construct
  source 1..50: mol_type = other DNA
tttttttacgctacattcaagtccatggaattgaaatatgtattggcaaa

SEQ ID NO: 33168 - DNA, 50 bp, synthetic construct
  source 1..50: mol_type = other DNA
acgatcccggctccccattgggataccaggcacagggccgcggggattgc

SEQ ID NO: 33169 - DNA, 50 bp, synthetic construct
  source 1..50: mol_type = other DNA
gtttttgtagatacaataaaaatttttcttcttttttgtttacctgtaac

SEQ ID NO: 33170 - DNA, 50 bp, synthetic construct
  source 1..50: mol_type = other DNA
caaaaggagttatatagttaatacaaaggggtaaagcatggaaaggattg

SEQ ID NO: 33171 - DNA, 50 bp, synthetic construct
  source 1..50: mol_type = other DNA
ttaaacaaaaaatcaattgaaaaatatttttctatttgattttttattgg

SEQ ID NO: 33172 - DNA, 50 bp, synthetic construct
  source 1..50: mol_type = other DNA
taagcgtctgcagcgccgtgtcccaggggatgcggcgcagcagcgcccac

SEQ ID NO: 33173 - DNA, 50 bp, synthetic construct
  source 1..50: mol_type = other DNA
cgtacagaatctctacattctgcgatcgcaaaaagcgcgaattttgtatc

SEQ ID NO: 33174 - DNA, 50 bp, synthetic construct
  source 1..50: mol_type = other DNA
tccagctgcaccgcctgaatttttgcaaagtttattatttcccagctggg

SEQ ID NO: 33175 - DNA, 50 bp, synthetic construct
  source 1..50: mol_type = other DNA
gcgtccatgcgttatttatcacagagggtacaaaaataacagcctgagaa

SEQ ID NO: 33176 - DNA, 50 bp, synthetic construct
  source 1..50: mol_type = other DNA
tagtacttccgccagcacctgtattacttcaatacgctgcacttgtgctc

SEQ ID NO: 33177 - DNA, 50 bp, synthetic construct
  source 1..50: mol_type = other DNA
agaatgaccactgactatgatgcaattgaaaatggtgtggcggtcattga

SEQ ID NO: 33178 - DNA, 50 bp, synthetic construct
  source 1..50: mol_type = other DNA
gaccacagtgaaggtatcaccgttaacagtgtgacgctcaggcttcggtc

SEQ ID NO: 33179 - DNA, 50 bp, synthetic construct
  source 1..50: mol_type = other DNA
gtattcttgccattatgactgctttgcagaacaaataagggcaacctaca

SEQ ID NO: 33180 - DNA, 50 bp, synthetic construct
  source 1..50: mol_type = other DNA
tggcattaaaaaaggttttgagccttacatcaacaccttgcagaaatgca

SEQ ID NO: 33181 - DNA, 50 bp, synthetic construct
  source 1..50: mol_type = other DNA
gaggttactgagattatggttaatggatttatcggaaacgctgtaaaatt

SEQ ID NO: 33182 - DNA, 50 bp, synthetic construct
  source 1..50: mol_type = other DNA
gttatttttatacccatttttcatatatttacaaagtatgcaaaaatgct

SEQ ID NO: 33183 - DNA, 50 bp, synthetic construct
  source 1..50: mol_type = other DNA
ccttgatatgtagtcgctttagagtgatcgaaagcaggaataaattcagg

SEQ ID NO: 33184 - DNA, 50 bp, synthetic construct
  source 1..50: mol_type = other DNA
tgtattcttcggcgtaatcgctggtcacagtcattccgccgaccatcaat

SEQ ID NO: 33185 - DNA, 50 bp, synthetic construct
  source 1..50: mol_type = other DNA
atttctataatattataacattatagtaaatgtaataatattaaagaaaa

SEQ ID NO: 33186 - DNA, 50 bp, synthetic construct
  source 1..50: mol_type = other DNA
actactcgctggagggcaaggtctacgcaccttgccagaaacgctgtggt

SEQ ID NO: 33187 - DNA, 50 bp, synthetic construct
  source 1..50: mol_type = other DNA
tggcatgacccccgactaccagcttctgttgtaataagggtggaactgtg

SEQ ID NO: 33188 - DNA, 50 bp, synthetic construct
  source 1..50: mol_type = other DNA
gcgatgatgatcgtgtagcctccaaatggtggtacacccgtaatcatacg

SEQ ID NO: 33189 - DNA, 50 bp, synthetic construct
  source 1..50: mol_type = other DNA
ttaccaccctgcgtctgatcgaagctctatgagaattacctctccgggat

SEQ ID NO: 33190 - DNA, 50 bp, synthetic construct
  source 1..50: mol_type = other DNA
gatcaaatgtacttatttagaattaacattacatttgtaaacttttggtt

SEQ ID NO: 33191 - DNA, 50 bp, synthetic construct
  source 1..50: mol_type = other DNA
ataccaggcaaccgaaaaaggtcttcttcgatttttcggatcatttcttt

SEQ ID NO: 33192 - DNA, 50 bp, synthetic construct
  source 1..50: mol_type = other DNA
attatccgtaagcaacgcaaagaactaaatttgcgggatttggtattatc

SEQ ID NO: 33193 - DNA, 50 bp, synthetic construct
  source 1..50: mol_type = other DNA
ttcccccgcaatacccatactgacgctttcaaatgggtattgggtatgta

SEQ ID NO: 33194 - DNA, 50 bp, synthetic construct
  source 1..50: mol_type = other DNA
agctatccagcgtgaattcgctcagctcctttccggtactatacatcgct

SEQ ID NO: 33195 - DNA, 50 bp, synthetic construct
  source 1..50: mol_type = other DNA
tcaagaaaacacttgctattattggccaaataagtcaagctgcccgttct

SEQ ID NO: 33196 - DNA, 50 bp, synthetic construct
  source 1..50: mol_type = other DNA
gttgcctttgaatccagtgctcctgttggctcatcagccaaaattaattc

SEQ ID NO: 33197 - DNA, 50 bp, synthetic construct
  source 1..50: mol_type = other DNA
atcccctatgtgtcgggttcgctttaagttacaaaattagcatagcgtcc

SEQ ID NO: 33198 - DNA, 50 bp, synthetic construct
  source 1..50: mol_type = other DNA
gaataacctccttgacaagaatttagaataaaggttgcgaatctgtattc

SEQ ID NO: 33199 - DNA, 50 bp, synthetic construct
  source 1..50: mol_type = other DNA
ccgaacgaatgcaaatattgtacgaatggtagagcgtggcgttgaatcgg

SEQ ID NO: 33200 - DNA, 50 bp, synthetic construct
  source 1..50: mol_type = other DNA
atcataaagcctccattcaccatagaaatctccgatggtggcttcatttt

SEQ ID NO: 33201 - DNA, 50 bp, synthetic construct
  source 1..50: mol_type = other DNA
ttctatataatataatatcatttttataaatgatagccttttctatattc

SEQ ID NO: 33202 - DNA, 50 bp, synthetic construct
  source 1..50: mol_type = other DNA
ggaatctgtctgtcggagaataatcaattagaatccatgaaagaaattca

SEQ ID NO: 33203 - DNA, 50 bp, synthetic construct
  source 1..50: mol_type = other DNA
tttaaataaaaacagaacaaacattctattttaccatacttttatttttc

SEQ ID NO: 33204 - DNA, 50 bp, synthetic construct
  source 1..50: mol_type = other DNA
accccttttataagtattttggataatgtgcaaaaagaatatgtaggcaa

SEQ ID NO: 33205 - DNA, 50 bp, synthetic construct
  source 1..50: mol_type = other DNA
gttccttttttcaagatttaatacagtattttactcttgaaaaatggaat

SEQ ID NO: 33206 - DNA, 50 bp, synthetic construct
  source 1..50: mol_type = other DNA
tatcctgttccgtaacttcatcgccggcgataccggctactatcagccgg

SEQ ID NO: 33207 - DNA, 50 bp, synthetic construct
  source 1..50: mol_type = other DNA
tcagtccattgtaccaacttgcttattgcacaattagtacaatttatttc

SEQ ID NO: 33208 - DNA, 50 bp, synthetic construct
  source 1..50: mol_type = other DNA
gacctcgtagcattctgccacatccggatgtggtcccagcacacatccag

SEQ ID NO: 33209 - DNA, 50 bp, synthetic construct
  source 1..50: mol_type = other DNA
gttgagggaataccgcttggaggaggccctccagatggtatctggctgcg

SEQ ID NO: 33210 - DNA, 50 bp, synthetic construct
  source 1..50: mol_type = other DNA
gtcggcggccaatgttgcattggtgcactgccgcacaggggtgcgcagca

SEQ ID NO: 33211 - DNA, 50 bp, synthetic construct
  source 1..50: mol_type = other DNA
tttttatgcacattttttcatacaatgaaatgttaaaaagtgtgttaatc

SEQ ID NO: 33212 - DNA, 50 bp, synthetic construct
  source 1..50: mol_type = other DNA
ctggggagctggattttcctgcataagtgcaggtaattccagctacactg

SEQ ID NO: 33213 - DNA, 50 bp, synthetic construct
  source 1..50: mol_type = other DNA
gcacttcccgcatcaagatttcctgtaggctcatcagcaaatataaccgc

SEQ ID NO: 33214 - DNA, 50 bp, synthetic construct
  source 1..50: mol_type = other DNA
atgtgaaagatgtggaaaattatttccttatttctctcatcctttcactt

SEQ ID NO: 33215 - DNA, 50 bp, synthetic construct
  source 1..50: mol_type = other DNA
gccaaaaatttcatatgaatttatatatacatcactcagaaaggcagtta

SEQ ID NO: 33216 - DNA, 50 bp, synthetic construct
  source 1..50: mol_type = other DNA
cgcactgactgcgcagttttccgatatgcggtgggtttccagaaagtctt

SEQ ID NO: 33217 - DNA, 50 bp, synthetic construct
  source 1..50: mol_type = other DNA
cgctattgatacccttgatataggtttcggctaactctttatcaatgccc

SEQ ID NO: 33218 - DNA, 50 bp, synthetic construct
  source 1..50: mol_type = other DNA
aaatttattttaacgcaaaattgtgaacaacataactcgttacggctgaa

SEQ ID NO: 33219 - DNA, 50 bp, synthetic construct
  source 1..50: mol_type = other DNA
ttttcatttatgaccgctttgccgcccggctcgctcgaagtaaaagacag

SEQ ID NO: 33220 - DNA, 50 bp, synthetic construct
  source 1..50: mol_type = other DNA
tcggccatctatgtggatgccccggatatcgcgctccgcttccctaccga

SEQ ID NO: 33221 - DNA, 50 bp, synthetic construct
  source 1..50: mol_type = other DNA
ttttgaaagaaaaatttttctacaattttacaccaagcgtggaatcaaaa

SEQ ID NO: 33222 - DNA, 50 bp, synthetic construct
  source 1..50: mol_type = other DNA
gatttttataagaaatcttcgtcaaattcaagaaatttattataactaaa

SEQ ID NO: 33223 - DNA, 50 bp, synthetic construct
  source 1..50: mol_type = other DNA
agcttacatggccagagccatcgcccatcacgcacctggcgcgtaacgct

SEQ ID NO: 33224 - DNA, 50 bp, synthetic construct
  source 1..50: mol_type = other DNA
gcccggcagcgggcgctggcgcaaaggtgcggcaactggcgcgtcctggc

SEQ ID NO: 33225 - DNA, 50 bp, synthetic construct
  source 1..50: mol_type = other DNA
atacaatctaacgatattatattccaagctgtgaaatagttatttcacat

SEQ ID NO: 33226 - DNA, 50 bp, synthetic construct
  source 1..50: mol_type = other DNA
tcgcatggatttgcactcaataaaattccattggataaaagcataactat

SEQ ID NO: 33227 - DNA, 50 bp, synthetic construct
  source 1..50: mol_type = other DNA
tattggaaataagcaccctatattataatatattcatattacattaatac

SEQ ID NO: 33228 - DNA, 50 bp, synthetic construct
  source 1..50: mol_type = other DNA
aaggcggatattgaaacatcagaaaattctatactatccatatcaaacag

SEQ ID NO: 33229 - DNA, 50 bp, synthetic construct
  source 1..50: mol_type = other DNA
attttcaaaactgttcaactgttctttcaaccttaaacagattagtaaat

SEQ ID NO: 33230 - DNA, 50 bp, synthetic construct
  source 1..50: mol_type = other DNA
cttgccgctcatggcggcggtgccttctaccgacagcgatgagcagttta

SEQ ID NO: 33231 - DNA, 50 bp, synthetic construct
  source 1..50: mol_type = other DNA
aaagtggaccgcagcgccgcatacatccaaaaggcaatgtggtataattt

SEQ ID NO: 33232 - DNA, 50 bp, synthetic construct
  source 1..50: mol_type = other DNA
cgcgcttattttttgttaatttcttgtaaaaaagtacaaaaataacagcc

SEQ ID NO: 33233 - DNA, 50 bp, synthetic construct
  source 1..50: mol_type = other DNA
gccattccagccacgatgtctgttcctgattccagatttgcctcttttgc

SEQ ID NO: 33234 - DNA, 50 bp, synthetic construct
  source 1..50: mol_type = other DNA
aaaaagggtgtgcacattttaattataagcccgtagtgctgaccgctcac

SEQ ID NO: 33235 - DNA, 50 bp, synthetic construct
  source 1..50: mol_type = other DNA
agctggtgaactgctcgtcgctgtcgacagaagctgcgagagaatgagct

SEQ ID NO: 33236 - DNA, 50 bp, synthetic construct
  source 1..50: mol_type = other DNA
agaactggaagaagaaactgatgatatttacggttgcttcttcccagaac

SEQ ID NO: 33237 - DNA, 50 bp, synthetic construct
  source 1..50: mol_type = other DNA
gaatccggcttccttgatctgttccggtgcattccagtgtatgcagatcc

SEQ ID NO: 33238 - DNA, 50 bp, synthetic construct
  source 1..50: mol_type = other DNA
aaaagctggttatactgaaagtaaaattatcttcattaaaaatgactttt

SEQ ID NO: 33239 - DNA, 50 bp, synthetic construct
  source 1..50: mol_type = other DNA
gcgccgtcgaacatcagggggtgggccctgttgatgaagttcgacgagcg

SEQ ID NO: 33240 - DNA, 50 bp, synthetic construct
  source 1..50: mol_type = other DNA
gttgaaattttccagttttccgttgtgcagaagaacttgaagctgccgga

SEQ ID NO: 33241 - DNA, 50 bp, synthetic construct
  source 1..50: mol_type = other DNA
atcctcgaaaagctgaaataaagtaaactcagcagaagtattacgaggag

SEQ ID NO: 33242 - DNA, 50 bp, synthetic construct
  source 1..50: mol_type = other DNA
tgaatttctattataaaatggatgaagaagcccgggaccatagacattca

SEQ ID NO: 33243 - DNA, 50 bp, synthetic construct
  source 1..50: mol_type = other DNA
ttattgttccgttatattttacaatgtgataaaataagtacatcagaagc

SEQ ID NO: 33244 - DNA, 50 bp, synthetic construct
  source 1..50: mol_type = other DNA
tgatattgctttgattgtaccggtcttctttgacaatcttaacaatatcg

SEQ ID NO: 33245 - DNA, 50 bp, synthetic construct
  source 1..50: mol_type = other DNA
attcttgaaaatgctgcggatgatagatcatccagcatagcttcaagttc

SEQ ID NO: 33246 - DNA, 50 bp, synthetic construct
  source 1..50: mol_type = other DNA
tccgctgctcctccggcacgatttccaaatatgcgcgcgtcggcgccggt

SEQ ID NO: 33247 - DNA, 50 bp, synthetic construct
  source 1..50: mol_type = other DNA
tgttccagttgtctcaacaggattttaatcccattgagagtgcttgttca

SEQ ID NO: 33248 - DNA, 50 bp, synthetic construct
  source 1..50: mol_type = other DNA
catatctttttaaggtgaatggtgaaatttttgagtgaaaaaggaatttg

SEQ ID NO: 33249 - DNA, 50 bp, synthetic construct
  source 1..50: mol_type = other DNA
ctgatataacctaagccaggtgaaccttcataaggcttcgcatatgtgct

SEQ ID NO: 33250 - DNA, 50 bp, synthetic construct
  source 1..50: mol_type = other DNA
cacccaccccttagtgggtgcatcataatgtacccagagttgggcggtat

SEQ ID NO: 33251 - DNA, 50 bp, synthetic construct
  source 1..50: mol_type = other DNA
tctcttgcaggaaaaatagaatcatatccatttatagcaaacatagcaat

SEQ ID NO: 33252 - DNA, 50 bp, synthetic construct
  source 1..50: mol_type = other DNA
caaagaatatttggcaacttcctctccatggggttgaaaaaactccttta

SEQ ID NO: 33253 - DNA, 50 bp, synthetic construct
  source 1..50: mol_type = other DNA
gaaattaaaaaccgtccccaaagaaaagagacttgtcgatttttactttt

SEQ ID NO: 33254 - DNA, 50 bp, synthetic construct
  source 1..50: mol_type = other DNA
tttaatctgatttggactctgtcccaaattgtagttgtcatttgataaaa

SEQ ID NO: 33255 - DNA, 50 bp, synthetic construct
  source 1..50: mol_type = other DNA
acaatccaaaattcagccagaaaggaagccttggatgaaattctccagcg

SEQ ID NO: 33256 - DNA, 50 bp, synthetic construct
  source 1..50: mol_type = other DNA
ccgtcacttttttaaggtgacggcctgcggtcatcatgccgcaaacacgg

SEQ ID NO: 33257 - DNA, 50 bp, synthetic construct
  source 1..50: mol_type = other DNA
tatcaaatattctattttatgtcaattttactaaggaggaattttttatg

SEQ ID NO: 33258 - DNA, 50 bp, synthetic construct
  source 1..50: mol_type = other DNA
cattttaattcggaaaaaagcatatggatgctataatctcaacaatttct

SEQ ID NO: 33259 - DNA, 50 bp, synthetic construct
  source 1..50: mol_type = other DNA
ttttaatattcacgctatcatgattaaggttggtagtaggtatatagtaa

SEQ ID NO: 33260 - DNA, 50 bp, synthetic construct
  source 1..50: mol_type = other DNA
atttacggtatcattatatcatgaattcattttacagtagggacgatcat

SEQ ID NO: 33261 - DNA, 50 bp, synthetic construct
  source 1..50: mol_type = other DNA
gtgaaagcagccagatggagctgtttccatttccatccttcagctttctg

SEQ ID NO: 33262 - DNA, 50 bp, synthetic construct
  source 1..50: mol_type = other DNA
tcaccgaaataagaaacgtctgcttgattctacgttgattttttcgaaat

SEQ ID NO: 33263 - DNA, 50 bp, synthetic construct
  source 1..50: mol_type = other DNA
ttccattattgtataagtgactaccttaaggcgattataccataagggaa

SEQ ID NO: 33264 - DNA, 50 bp, synthetic construct
  source 1..50: mol_type = other DNA
tcatctttagccattactaaaagatatcaggattcaatgtccaaatattc

SEQ ID NO: 33265 - DNA, 50 bp, synthetic construct
  source 1..50: mol_type = other DNA
actggctgccttgataagtacattatactgttaaaaggtgtgctcttctg

SEQ ID NO: 33266 - DNA, 50 bp, synthetic construct
  source 1..50: mol_type = other DNA
gcaaaatagcggttgtcgaacggattcgggttattgctctgccatctcca

SEQ ID NO: 33267 - DNA, 50 bp, synthetic construct
  source 1..50: mol_type = other DNA
aacacttgctattattggctttcagataaaaagttattgtgtcagtcgtt

SEQ ID NO: 33268 - DNA, 50 bp, synthetic construct
  source 1..50: mol_type = other DNA
ttatcaggggatggggagaaatcaaatggaatactacaggcaaaggattg

SEQ ID NO: 33269 - DNA, 50 bp, synthetic construct
  source 1..50: mol_type = other DNA
ccggctcatcttgaatttttcaccgtctatcaaaacaagcaaaaagacgg

SEQ ID NO: 33270 - DNA, 50 bp, synthetic construct
  source 1..50: mol_type = other DNA
gataaaagagaaaatgtcgattgtctggatgcgacaaagttaactatgtc

SEQ ID NO: 33271 - DNA, 50 bp, synthetic construct
  source 1..50: mol_type = other DNA
aaaaagtcgaataatctttctgttttgtgcaaaaggtaattcgctccttt

SEQ ID NO: 33272 - DNA, 50 bp, synthetic construct
  source 1..50: mol_type = other DNA
taagatgttaaagaagctgaaacggccagctgatctttttaagaatcaag

SEQ ID NO: 33273 - DNA, 50 bp, synthetic construct
  source 1..50: mol_type = other DNA
ctttttgcaatatcccgtcgatcttcctatatttagggtatagcaaaaag

SEQ ID NO: 33274 - DNA, 50 bp, synthetic construct
  source 1..50: mol_type = other DNA
gatacaaaattcgcgctttttgcgatcgcagaatgtagagattctgtacg

SEQ ID NO: 33275 - DNA, 50 bp, synthetic construct
  source 1..50: mol_type = other DNA
tccataatgtcgcccgttccgttgcaggacggaagcggcggcaatggacc

SEQ ID NO: 33276 - DNA, 50 bp, synthetic construct
  source 1..50: mol_type = other DNA
atgacagtagagactttaataataaaagataagaaagtttctacaatggt

SEQ ID NO: 33277 - DNA, 50 bp, synthetic construct
  source 1..50: mol_type = other DNA
aaccgcttgtttctgtaccacttcacgatccggtacggaaagaacctgat

SEQ ID NO: 33278 - DNA, 50 bp, synthetic construct
  source 1..50: mol_type = other DNA
gaaattctgaaaacttccagaagatataaaaaagaaagccgattgatttt

SEQ ID NO: 33279 - DNA, 50 bp, synthetic construct
  source 1..50: mol_type = other DNA
taattattatttgatacaaattattaatcctttctgttaaatatatgcag

SEQ ID NO: 33280 - DNA, 50 bp, synthetic construct
  source 1..50: mol_type = other DNA
tgatatgaccttcggcattaagcaaatgcttatcttaaaaaagatgatat

SEQ ID NO: 33281 - DNA, 50 bp, synthetic construct
  source 1..50: mol_type = other DNA
cgtattttcaagggcagctgccgcttgaccttgtatcccttgaaaatagg

SEQ ID NO: 33282 - DNA, 50 bp, synthetic construct
  source 1..50: mol_type = other DNA
gattatgccgaaaacaacttgacaatattcaaattttttcttatagccag

SEQ ID NO: 33283 - DNA, 50 bp, synthetic construct
  source 1..50: mol_type = other DNA
ccaatagcatttaggcttggcagcatgtcgccaagccacattatcaactt

SEQ ID NO: 33284 - DNA, 50 bp, synthetic construct
  source 1..50: mol_type = other DNA
catatgggtgaggtcactgccctttaaactgcggtcggctctgacaacaa

SEQ ID NO: 33285 - DNA, 50 bp, synthetic construct
  source 1..50: mol_type = other DNA
ttaggttataataactattttgataaatcaaaatttgccgtaacctcttc

SEQ ID NO: 33286 - DNA, 50 bp, synthetic construct
  source 1..50: mol_type = other DNA
ctgtcgggagatacacgcttcacgggatatgcccgtgtttctaccgacag

SEQ ID NO: 33287 - DNA, 50 bp, synthetic construct
  source 1..50: mol_type = other DNA
atttcgaaaccatgctgtgcagccatcgctggttcgcatgatttccaaag

SEQ ID NO: 33288 - DNA, 50 bp, synthetic construct
  source 1..50: mol_type = other DNA
tggtctaaaggtataatctcaaatggtactgatttttagtattattctat

SEQ ID NO: 33289 - DNA, 50 bp, synthetic construct
  source 1..50: mol_type = other DNA
cagatgatcttgtcaaaatatccgtacttagccttaataaacataatcac

SEQ ID NO: 33290 - DNA, 50 bp, synthetic construct
  source 1..50: mol_type = other DNA
gatcattcattttacaacccttgattgtgggggcctatgctataataatt

SEQ ID NO: 33291 - DNA, 50 bp, synthetic construct
  source 1..50: mol_type = other DNA
gcccaaaatcacttgataaatgtagctacattgaccagattctttttacg

SEQ ID NO: 33292 - DNA, 50 bp, synthetic construct
  source 1..50: mol_type = other DNA
aaattctctccccgtttagccgagatgataagaatactggaagagaatat

SEQ ID NO: 33293 - DNA, 50 bp, synthetic construct
  source 1..50: mol_type = other DNA
aaattcttaaggttaaaaataaaaatatacgatgatacaaataagaattt

SEQ ID NO: 33294 - DNA, 50 bp, synthetic construct
  source 1..50: mol_type = other DNA
gagcttgaccttgaggatgacatagctatatcttcctctttacatgaatc

SEQ ID NO: 33295 - DNA, 50 bp, synthetic construct
  source 1..50: mol_type = other DNA
gctcgtcgggctcataacccgaaggtcttggacttgtgagctgcaagaga

SEQ ID NO: 33296 - DNA, 50 bp, synthetic construct
  source 1..50: mol_type = other DNA
tctggcgtaggctaccccaccgtgcgctgaatggggatgccgccgaaccc

SEQ ID NO: 33297 - DNA, 50 bp, synthetic construct
  source 1..50: mol_type = other DNA
ccgcatactccgcagaacagtttcccgtcaacctcctgcggcttattgcg

SEQ ID NO: 33298 - DNA, 50 bp, synthetic construct
  source 1..50: mol_type = other DNA
tttgccccgacacttcgaccgctgatcagcggtagaaccgttcgcaaaaa

SEQ ID NO: 33299 - DNA, 50 bp, synthetic construct
  source 1..50: mol_type = other DNA
ttgaaaaatgaaacgcttatttttaacgaaaacaggaaggtatttttcgg

SEQ ID NO: 33300 - DNA, 50 bp, synthetic construct
  source 1..50: mol_type = other DNA
tcaaatgcaattaaagatataaatatatgtatatttttattcgattttat

SEQ ID NO: 33301 - DNA, 50 bp, synthetic construct
  source 1..50: mol_type = other DNA
tagctttagatggagagtgacatagcgatgacatctaccatcaggccagc

SEQ ID NO: 33302 - DNA, 50 bp, synthetic construct
  source 1..50: mol_type = other DNA
ttttcatgcactcttttatttatatttcctcctaaaaaagggcataaaaa

SEQ ID NO: 33303 - DNA, 50 bp, synthetic construct
  source 1..50: mol_type = other DNA
aatatcggactataatcgcaaatcttttactaatttgattgttggatatg

SEQ ID NO: 33304 - DNA, 50 bp, synthetic construct
  source 1..50: mol_type = other DNA
tgcttctttaaatgcttcaaatagatgcgtttgttatattgtgaaaagca

SEQ ID NO: 33305 - DNA, 50 bp, synthetic construct
  source 1..50: mol_type = other DNA
ggagtatacccaagttggaaaatgaagagcacacactttgttgatattcc

SEQ ID NO: 33306 - DNA, 50 bp, synthetic construct
  source 1..50: mol_type = other DNA
gaacggtcaacgtaacgcccacccttcgatgatcgttacgctgcgaggac

SEQ ID NO: 33307 - DNA, 50 bp, synthetic construct
  source 1..50: mol_type = other DNA
ctgctgacagatattggaacggaagaattagcccaccttgaaatgattgc

SEQ ID NO: 33308 - DNA, 50 bp, synthetic construct
  source 1..50: mol_type = other DNA
gcatttattcttgcagatgagccgacgggaaatcttgatagtaaaacaag

SEQ ID NO: 33309 - DNA, 50 bp, synthetic construct
  source 1..50: mol_type = other DNA
cgagctcggcgcgtcgctgcgctaccgagatcaaaaatgcgctgagcgcg

SEQ ID NO: 33310 - DNA, 50 bp, synthetic construct
  source 1..50: mol_type = other DNA
accgtgaccagttcaagctgatgatctctgaatataaatatcttttttga

SEQ ID NO: 33311 - DNA, 50 bp, synthetic construct
  source 1..50: mol_type = other DNA
aagaaaacaggaggtactattatgaagccaataatagcaagtgttttctc

SEQ ID NO: 33312 - DNA, 50 bp, synthetic construct
  source 1..50: mol_type = other DNA
tacgaaacaattgctgcttagtatctgttagatgcagcagaagttgtttt

SEQ ID NO: 33313 - DNA, 50 bp, synthetic construct
  source 1..50: mol_type = other DNA
tcgctgcggcgcagcccgtagaatgcattacgctgtgcctcccgcgtatt

SEQ ID NO: 33314 - DNA, 50 bp, synthetic construct
  source 1..50: mol_type = other DNA
tactcaaaagctacgacaagctgatattattttcaataactttggcagtt

SEQ ID NO: 33315 - DNA, 50 bp, synthetic construct
  source 1..50: mol_type = other DNA
aaacatatattatcctctgggatagatagtcgaaaatatactgtatgtcg

SEQ ID NO: 33316 - DNA, 50 bp, synthetic construct
  source 1..50: mol_type = other DNA
aaagtatatttggaatcaggtaaattatacactattctcaaataaaattc

SEQ ID NO: 33317 - DNA, 50 bp, synthetic construct
  source 1..50: mol_type = other DNA
ctctgcgggctctttcgtaaataaggcccgttacaaaaaaaagggcacta

SEQ ID NO: 33318 - DNA, 50 bp, synthetic construct
  source 1..50: mol_type = other DNA
acagcccctgtataattttcacctaaagacaaaggacatgtttggcccgg

SEQ ID NO: 33319 - DNA, 50 bp, synthetic construct
  source 1..50: mol_type = other DNA
tcaaattactatttatctgtaaccatgtttctatatcaatagaaatagtt

SEQ ID NO: 33320 - DNA, 50 bp, synthetic construct
  source 1..50: mol_type = other DNA
gatacgctgtacttccatattctgatatgccttaagatatacaatctctc

SEQ ID NO: 33321 - DNA, 50 bp, synthetic construct
  source 1..50: mol_type = other DNA
aataaaccgcaggcgttgaaacctgcggtccggttcgcctgcctgatagg

SEQ ID NO: 33322 - DNA, 50 bp, synthetic construct
  source 1..50: mol_type = other DNA
tgtcagcggattgatggtcggcggaatccgcacccagcaaggcgcggacg

SEQ ID NO: 33323 - DNA, 50 bp, synthetic construct
  source 1..50: mol_type = other DNA
agtacagatatatatggtataacagctgtttccgaagatgatacaatact

SEQ ID NO: 33324 - DNA, 50 bp, synthetic construct
  source 1..50: mol_type = other DNA
aataaaaaataagtagtaggcgggattttgcctgcccctttgttttatag

SEQ ID NO: 33325 - DNA, 50 bp, synthetic construct
  source 1..50: mol_type = other DNA
gattcacctgataagtatctgtggtacaagaattacttaggcggtctttc

SEQ ID NO: 33326 - DNA, 50 bp, synthetic construct
  source 1..50: mol_type = other DNA
cactcagacagcagggttttctgttatttacagactatgacagcggagtg

SEQ ID NO: 33327 - DNA, 50 bp, synthetic construct
  source 1..50: mol_type = other DNA
aaaatttatatagaaaaataatcgcacgatggtggatgcggatatccttg

SEQ ID NO: 33328 - DNA, 50 bp, synthetic construct
  source 1..50: mol_type = other DNA
gagctttcgtattttattggcttcatgaagcaaagacgatcctcaagcat

SEQ ID NO: 33329 - DNA, 50 bp, synthetic construct
  source 1..50: mol_type = other DNA
gttcttaccgatattgctacagaagaattggcacatctcgaaatgattgc

SEQ ID NO: 33330 - DNA, 50 bp, synthetic construct
  source 1..50: mol_type = other DNA
acctaacagcacggtaatctcaagatctatcattgatagaactgcattaa

SEQ ID NO: 33331 - DNA, 50 bp, synthetic construct
  source 1..50: mol_type = other DNA
aatttttataaagttgtcggagttttgccgtgttactgtttatctttatt

SEQ ID NO: 33332 - DNA, 50 bp, synthetic construct
  source 1..50: mol_type = other DNA
ggcaattccgccggcgcggtatatcgattgatttttccggccttctttgc

SEQ ID NO: 33333 - DNA, 50 bp, synthetic construct
  source 1..50: mol_type = other DNA
gctaaactatgctttcagcctgaaagaagcccttgaagaaggactttatc

SEQ ID NO: 33334 - DNA, 50 bp, synthetic construct
  source 1..50: mol_type = other DNA
atactgggtggcagcgatttttgaaaacaaaaaaccctgccaacggcatt

SEQ ID NO: 33335 - DNA, 50 bp, synthetic construct
  source 1..50: mol_type = other DNA
ctttattaaattttaaatatatattatacaatccacaggctacaataatt

SEQ ID NO: 33336 - DNA, 50 bp, synthetic construct
  source 1..50: mol_type = other DNA
tcgaatcaagtatatcaaagatttctaccgattacagagaacagattgct

SEQ ID NO: 33337 - DNA, 50 bp, synthetic construct
  source 1..50: mol_type = other DNA
gccaccccggaaaggtgcgtcagcggcacaccgcagctttccgcgatggt

SEQ ID NO: 33338 - DNA, 50 bp, synthetic construct
  source 1..50: mol_type = other DNA
gataccggcgcttacagcaagagctgttaattagattatagtacagtaca

SEQ ID NO: 33339 - DNA, 50 bp, synthetic construct
  source 1..50: mol_type = other DNA
ccaggcatggggcttttcttgttatatacatggaaactattttggattct

SEQ ID NO: 33340 - DNA, 50 bp, synthetic construct
  source 1..50: mol_type = other DNA
gcctcttgcaggctgacgttgcggcccccgctcgtcaatgagccgcagca

SEQ ID NO: 33341 - DNA, 50 bp, synthetic construct
  source 1..50: mol_type = other DNA
cattacaaggcagattgttaaaatcacgcttgtcgtgctgttttttacct

SEQ ID NO: 33342 - DNA, 50 bp, synthetic construct
  source 1..50: mol_type = other DNA
acatttgccgctaaacagcagaaagtaatcctgtgtatgctgggaaaatt

SEQ ID NO: 33343 - DNA, 50 bp, synthetic construct
  source 1..50: mol_type = other DNA
tttttaattaacagtttggagaaaatttgttgaaaacagtcgattgtgtc

SEQ ID NO: 33344 - DNA, 50 bp, synthetic construct
  source 1..50: mol_type = other DNA
cgtctgagattatagagtgggtaccggtatccatataataacctccgact

SEQ ID NO: 33345 - DNA, 50 bp, synthetic construct
  source 1..50: mol_type = other DNA
ggcattgatttttagtagagcgatcgaattttctaataatcaattttgga

SEQ ID NO: 33346 - DNA, 50 bp, synthetic construct
  source 1..50: mol_type = other DNA
gcattaccacacgttttcctttcggatgaaaagaaaccaagggggaagtg

SEQ ID NO: 33347 - DNA, 50 bp, synthetic construct
  source 1..50: mol_type = other DNA
agcggcacgtttaaaattaaacgctagcaatagtttttcctcttgccgct

SEQ ID NO: 33348 - DNA, 50 bp, synthetic construct
  source 1..50: mol_type = other DNA
tcaatgccgttttcgtggattctcggtcttgtccgtgaaaacagatctgt

SEQ ID NO: 33349 - DNA, 50 bp, synthetic construct
  source 1..50: mol_type = other DNA
ggacgctatgctaattttgtaacttaaagcgaacccgacacataggggac

SEQ ID NO: 33350 - DNA, 50 bp, synthetic construct
  source 1..50: mol_type = other DNA
atcaaacggcttgcccgaaaggcttaaccttcatacttaagctgtttgat

SEQ ID NO: 33351 - DNA, 50 bp, synthetic construct
  source 1..50: mol_type = other DNA
cgagcatccgcaaataccaccgttttccgacaggtatagcgcaccttgca

SEQ ID NO: 33352 - DNA, 50 bp, synthetic construct
  source 1..50: mol_type = other DNA
acaaggtcgtttgctgcagcggtgttcgccggcgcagaattcgcccttgc

SEQ ID NO: 33353 - DNA, 50 bp, synthetic construct
  source 1..50: mol_type = other DNA
tatcatttaacatccatttctaacatgttagcaaaggtgttgccatgatt

SEQ ID NO: 33354 - DNA, 50 bp, synthetic construct
  source 1..50: mol_type = other DNA
agaaaaatcaaataaaaggagtgttttcaagtattttcttatttctttct

SEQ ID NO: 33355 - DNA, 50 bp, synthetic construct
  source 1..50: mol_type = other DNA
acggctgtcaccaaaagaccgggaaatgacgaatgttctttgacagctaa

SEQ ID NO: 33356 - DNA, 50 bp, synthetic construct
  source 1..50: mol_type = other DNA
ttcttttattcaatttcatccggtttgaacggcgcaatttcactttcacc

SEQ ID NO: 33357 - DNA, 50 bp, synthetic construct
  source 1..50: mol_type = other DNA
ctgcgccgccgaccgtcagcaggcgttgctgcttacgcccgtgtttccac

SEQ ID NO: 33358 - DNA, 50 bp, synthetic construct
  source 1..50: mol_type = other DNA
gaaaaggcacgacagcagtcactggccctggaacagcggcgtgatggggc

SEQ ID NO: 33359 - DNA, 50 bp, synthetic construct
  source 1..50: mol_type = other DNA
agggaacgccctgtgtaatgctcaacttcttgatacactatgcgttcccc

SEQ ID NO: 33360 - DNA, 50 bp, synthetic construct
  source 1..50: mol_type = other DNA
gttttccttttactccattacactttctttccttggcataaaaggaaaaa

SEQ ID NO: 33361 - DNA, 50 bp, synthetic construct
  source 1..50: mol_type = other DNA
ctgcatagcgtcccgatcgcccaaatttgttagatttggaggctacacaa

SEQ ID NO: 33362 - DNA, 50 bp, synthetic construct
  source 1..50: mol_type = other DNA
acttgacttttccgttgtagatcacaatgctcctttcgtaaaatgaaagc

SEQ ID NO: 33363 - DNA, 50 bp, synthetic construct
  source 1..50: mol_type = other DNA
ataattgatacaaaaatgctcgaaaattcgagcattttatccgggataat

SEQ ID NO: 33364 - DNA, 50 bp, synthetic construct
  source 1..50: mol_type = other DNA
tccgtgcttcctttacagaagaacgggcaatttcaataataaggccttca

SEQ ID NO: 33365 - DNA, 50 bp, synthetic construct
  source 1..50: mol_type = other DNA
accagcatctccacactgaattccggagacttgaaggtgggggcttctgt

SEQ ID NO: 33366 - DNA, 50 bp, synthetic construct
  source 1..50: mol_type = other DNA
tgtccgtgctgacacgggcatatccggacgagggtctgtttccggcacca

SEQ ID NO: 33367 - DNA, 50 bp, synthetic construct
  source 1..50: mol_type = other DNA
atatatagaagatctcgaagaagatatcttttttgatctctccccatccc

SEQ ID NO: 33368 - DNA, 50 bp, synthetic construct
  source 1..50: mol_type = other DNA
ccgaatacacaaacatactcttcatagcaagtgttttcttgaataccttt

SEQ ID NO: 33369 - DNA, 50 bp, synthetic construct
  source 1..50: mol_type = other DNA
tatggattgataaagacagaggtgacaagcacgtgctttatgaatccgcg

SEQ ID NO: 33370 - DNA, 50 bp, synthetic construct
  source 1..50: mol_type = other DNA
acctgcattgtcattcgcagattcatcaaccggctgctgacaagctcaga

SEQ ID NO: 33371 - DNA, 50 bp, synthetic construct
  source 1..50: mol_type = other DNA
tgctatatgtcaatccgtgtaatctcatatatgacagctgacagttccac

SEQ ID NO: 33372 - DNA, 50 bp, synthetic construct
  source 1..50: mol_type = other DNA
tagataaaaactctttacaccaaagctatttctcaaagaatttttatagg

SEQ ID NO: 33373 - DNA, 50 bp, synthetic construct
  source 1..50: mol_type = other DNA
aacaatcatgattattatttaggaactccttaagaggtagtggatatgcg

SEQ ID NO: 33374 - DNA, 50 bp, synthetic construct
  source 1..50: mol_type = other DNA
gaaacaagatgcgaattgatagaattttcccgccgttcctcggtccaagg

SEQ ID NO: 33375 - DNA, 50 bp, synthetic construct
  source 1..50: mol_type = other DNA
ttacagtacaacattaaaaaataccgttttccgataataatgtacccaaa

SEQ ID NO: 33376 - DNA, 50 bp, synthetic construct
  source 1..50: mol_type = other DNA
atataattttcttcaattcgaatgatcatcaaaaatataatcagcaatat

SEQ ID NO: 33377 - DNA, 50 bp, synthetic construct
  source 1..50: mol_type = other DNA
aggtatcctcttgatccgcgcgggcgcccatccggtgcatggccttactg

SEQ ID NO: 33378 - DNA, 50 bp, synthetic construct
  source 1..50: mol_type = other DNA
acacgggcataggctgccacccgcagccgggtgaggatgttggtggctgt

SEQ ID NO: 33379 - DNA, 50 bp, synthetic construct
  source 1..50: mol_type = other DNA
cagcacctccatcaagtccgaaaacatttttcagaagctgcacgttggtg

SEQ ID NO: 33380 - DNA, 50 bp, synthetic construct
  source 1..50: mol_type = other DNA
aaggcataattaaggaggcgggcaaaaccagaaggtcgagcctttgccct

SEQ ID NO: 33381 - DNA, 50 bp, synthetic construct
  source 1..50: mol_type = other DNA
cggcactgaataaatacatgccgtatgtgtgatgtacggaggcagaggca

SEQ ID NO: 33382 - DNA, 50 bp, synthetic construct
  source 1..50: mol_type = other DNA
ctgcccgataaaaagggcgggacaaacgctccgctttttgaatgtaaatt

SEQ ID NO: 33383 - DNA, 50 bp, synthetic construct
  source 1..50: mol_type = other DNA
aacagtaaaagactggacgattacatttccatgattaaactcctattgac

SEQ ID NO: 33384 - DNA, 50 bp, synthetic construct
  source 1..50: mol_type = other DNA
cagagttaatatacatacaagctaaagttctagtaaacagattgtttcta

SEQ ID NO: 33385 - DNA, 50 bp, synthetic construct
  source 1..50: mol_type = other DNA
ggatgaggactggaatgacgactccgccgtcatctttcttcttcttgaaa

SEQ ID NO: 33386 - DNA, 50 bp, synthetic construct
  source 1..50: mol_type = other DNA
aatgtcgtttgttattattgtaaaccctacattttggggcaaacctcttt

SEQ ID NO: 33387 - DNA, 50 bp, synthetic construct
  source 1..50: mol_type = other DNA
tctgcttcgactggatcggaggtggctgcctacgcccgtgtttccaccga

SEQ ID NO: 33388 - DNA, 50 bp, synthetic construct
  source 1..50: mol_type = other DNA
gaaatacaaaattaatatcatttaaagaactgataattattatggcgttt

SEQ ID NO: 33389 - DNA, 50 bp, synthetic construct
  source 1..50: mol_type = other DNA
attgatacaattttcagggaaaaataattgcaatgagggattctttttat

SEQ ID NO: 33390 - DNA, 50 bp, synthetic construct
  source 1..50: mol_type = other DNA
cagaaagcacatatgcggagccttataatctgtatttcttgccagttctt

SEQ ID NO: 33391 - DNA, 50 bp, synthetic construct
  source 1..50: mol_type = other DNA
gtgttcatgaagtcgatggagaaggaattgttgatcgatagtggctgtga

SEQ ID NO: 33392 - DNA, 50 bp, synthetic construct
  source 1..50: mol_type = other DNA
cttgaaccagtaagccactaacacaggttttcctgctcgtctttcttcaa

SEQ ID NO: 33393 - DNA, 50 bp, synthetic construct
  source 1..50: mol_type = other DNA
tgcatccgtgacgtggatgtggaaaagaccagctccacagctttgaagca

SEQ ID NO: 33394 - DNA, 50 bp, synthetic construct
  source 1..50: mol_type = other DNA
tcggttccagagccaatgcgaaggatcctgttccgggatatcggacggtt

SEQ ID NO: 33395 - DNA, 50 bp, synthetic construct
  source 1..50: mol_type = other DNA
ttcgtataataatcgacctgggcttcaatacaggtttattatctatgtaa

SEQ ID NO: 33396 - DNA, 50 bp, synthetic construct
  source 1..50: mol_type = other DNA
gttgcatacccatggctaagccacccagctcttggccctggatatgtgtt

SEQ ID NO: 33397 - DNA, 50 bp, synthetic construct
  source 1..50: mol_type = other DNA
tgtatagtaacggaaaggagctgatttcagatgcttttcatagctatcgt

SEQ ID NO: 33398 - DNA, 50 bp, synthetic construct
  source 1..50: mol_type = other DNA
ccttctgtgcggcagcctcaccggcagcggtgaggctctttttgtttatt

SEQ ID NO: 33399 - DNA, 50 bp, synthetic construct
  source 1..50: mol_type = other DNA
aagaaagagaggaccgaaatggccctcgacctcgcactccgtcggcgata

SEQ ID NO: 33400 - DNA, 50 bp, synthetic construct
  source 1..50: mol_type = other DNA
agtttaacttagatgaaaacaaaatattttgtagtctaatattttacacc

SEQ ID NO: 33401 - DNA, 50 bp, synthetic construct
  source 1..50: mol_type = other DNA
aaatatattgagactaataaaattatatttttaaagagctatgaatatca

SEQ ID NO: 33402 - DNA, 50 bp, synthetic construct
  source 1..50: mol_type = other DNA
aggttaaaagaagttagatataagattttctataattctccctttacttc

SEQ ID NO: 33403 - DNA, 50 bp, synthetic construct
  source 1..50: mol_type = other DNA
tgcgcttattgcgtttcaggttggactggacaatcgtagcaatcagcaaa

SEQ ID NO: 33404 - DNA, 50 bp, synthetic construct
  source 1..50: mol_type = other DNA
cttttgagagagcaagttataaatatatgggagacgccctcttacaaaaa

SEQ ID NO: 33405 - DNA, 50 bp, synthetic construct
  source 1..50: mol_type = other DNA
ctatgccaccatcactgaaaatcccggcacgcaggtgggtggcggcgtat

SEQ ID NO: 33406 - DNA, 50 bp, synthetic construct
  source 1..50: mol_type = other DNA
acaactcacgatgatcgctgacaagccagtcttgtatcaaaatgagcgtc

SEQ ID NO: 33407 - DNA, 50 bp, synthetic construct
  source 1..50: mol_type = other DNA
gcccggtgcctttgcttatgtgtgatcaagaataagcagcggatagcggc

SEQ ID NO: 33408 - DNA, 50 bp, synthetic construct
  source 1..50: mol_type = other DNA
ttatttcatcaattatagattcatgcattactccatatttacttgaataa

SEQ ID NO: 33409 - DNA, 50 bp, synthetic construct
  source 1..50: mol_type = other DNA
tgtttgcctcccattagtatatgaggaagcatacaattgacagagcaaca

SEQ ID NO: 33410 - DNA, 50 bp, synthetic construct
  source 1..50: mol_type = other DNA
tgattacaatctgatcgtaaaatgtgcaagtttagtaatcgtttccaagg

SEQ ID NO: 33411 - DNA, 50 bp, synthetic construct
  source 1..50: mol_type = other DNA
atatccatagtatcaaattatttatacctcttttttgataaaatgggtac

SEQ ID NO: 33412 - DNA, 50 bp, synthetic construct
  source 1..50: mol_type = other DNA
atgtccttttttaatataaaaatatatatttgcattataaagcaaagaat

SEQ ID NO: 33413 - DNA, 50 bp, synthetic construct
  source 1..50: mol_type = other DNA
cagcgaaacgtcaaccgcgttatcctcgatagccgcccggttcacagcgc

SEQ ID NO: 33414 - DNA, 50 bp, synthetic construct
  source 1..50: mol_type = other DNA
agaagaataatcccgtttcttttggaaaactgagtcaggatatgtacagg

SEQ ID NO: 33415 - DNA, 50 bp, synthetic construct
  source 1..50: mol_type = other DNA
tcaacactttttttaagttttttttaataattatataaaaaatttgttga

SEQ ID NO: 33416 - DNA, 50 bp, synthetic construct
  source 1..50: mol_type = other DNA
gctttcaacctgaaagaaggtaagcactgactccggagcaggtacacagc

SEQ ID NO: 33417 - DNA, 50 bp, synthetic construct
  source 1..50: mol_type = other DNA
gaagaagtgaaaatacagaaaaatgtttttgctccttttttagtaacttt

SEQ ID NO: 33418 - DNA, 50 bp, synthetic construct
  source 1..50: mol_type = other DNA
ttttgtaagtcctttcccttatacccatagctccgatagttcctatagct

SEQ ID NO: 33419 - DNA, 50 bp, synthetic construct
  source 1..50: mol_type = other DNA
cagcacgaagaaggatgggacaggaaaagaagataagggtggcggcctac

SEQ ID NO: 33420 - DNA, 50 bp, synthetic construct
  source 1..50: mol_type = other DNA
ggagagatcaaaaaagatatttatatgttcatctgtgttctccttcatat

SEQ ID NO: 33421 - DNA, 50 bp, synthetic construct
  source 1..50: mol_type = other DNA
taattgacaagtaaattttagatgtgaatggagatttttgtgttaaagag

SEQ ID NO: 33422 - DNA, 50 bp, synthetic construct
  source 1..50: mol_type = other DNA
caaagatattatacacttttcatatacagaaaaagaacttattaagattg

SEQ ID NO: 33423 - DNA, 50 bp, synthetic construct
  source 1..50: mol_type = other DNA
tattttcaaaggcacggtataattaaaatgactacgggcgaaagaattaa

SEQ ID NO: 33424 - DNA, 50 bp, synthetic construct
  source 1..50: mol_type = other DNA
caggtgacagaaattatggtaaatggatttatcggaaacgctgtaaaatt

SEQ ID NO: 33425 - DNA, 50 bp, synthetic construct
  source 1..50: mol_type = other DNA
ataaatcgtaaaacattctccccgtttcggaaggatttcttcagattttc

SEQ ID NO: 33426 - DNA, 50 bp, synthetic construct
  source 1..50: mol_type = other DNA
ataatatctatgtgagacagccccttctaactgtccaggaaagaattgag

SEQ ID NO: 33427 - DNA, 50 bp, synthetic construct
  source 1..50: mol_type = other DNA
atttctgtgttctacaatgcttttgcgagggcattgtagtgagactgtag

SEQ ID NO: 33428 - DNA, 50 bp, synthetic construct
  source 1..50: mol_type = other DNA
gctagtggtcacgaagctttgcagagcttgtttgctctgttaccaccaga

SEQ ID NO: 33429 - DNA, 50 bp, synthetic construct
  source 1..50: mol_type = other DNA
acaatcccgtcaaacaggcagaataccgtctcaacatgtgtcgtcatcgg

SEQ ID NO: 33430 - DNA, 50 bp, synthetic construct
  source 1..50: mol_type = other DNA
tcagctccttcagtctgccggaactgattccggcaacgaagcggagagtg

SEQ ID NO: 33431 - DNA, 50 bp, synthetic construct
  source 1..50: mol_type = other DNA
aaaaagacaaataaataatttttctaaaattcttttgttggtggctcacc

SEQ ID NO: 33432 - DNA, 50 bp, synthetic construct
  source 1..50: mol_type = other DNA
ttttttctacaatagttaatttgtcaataaatataaaggtgtccgacaat

SEQ ID NO: 33433 - DNA, 50 bp, synthetic construct
  source 1..50: mol_type = other DNA
attaaaaagccctttttcttgtacctgaaaaaatagataaactttttaac

SEQ ID NO: 33434 - DNA, 50 bp, synthetic construct
  source 1..50: mol_type = other DNA
gaatgaatattaaaacgtatttatatattaacatcttataaattacagtt

SEQ ID NO: 33435 - DNA, 50 bp, synthetic construct
  source 1..50: mol_type = other DNA
tctgattttatacattcttcaatatcatctaggatattcctaaatacatg

SEQ ID NO: 33436 - DNA, 50 bp, synthetic construct
  source 1..50: mol_type = other DNA
cgaaaaagaagctaataacctcgctatagtatttattagagttttttgcg

SEQ ID NO: 33437 - DNA, 50 bp, synthetic construct
  source 1..50: mol_type = other DNA
cgctcataggtatcatccagcggcgtcagcaccgatgacgaggagcagca

SEQ ID NO: 33438 - DNA, 50 bp, synthetic construct
  source 1..50: mol_type = other DNA
tcccgtcaaagcacacgctgaccggccgggcgcgaagtgattcgccgggg

SEQ ID NO: 33439 - DNA, 50 bp, synthetic construct
  source 1..50: mol_type = other DNA
caagcatcgactttccggtccccggcgcggcgtttttgtgctatactttg

SEQ ID NO: 33440 - DNA, 50 bp, synthetic construct
  source 1..50: mol_type = other DNA
ttattatatattaaagtaccttcatttttttttattctatagtataatta

SEQ ID NO: 33441 - DNA, 50 bp, synthetic construct
  source 1..50: mol_type = other DNA
atataaacgattatatgcatgtaaatttgcaagtataaagtggttttctt

SEQ ID NO: 33442 - DNA, 50 bp, synthetic construct
  source 1..50: mol_type = other DNA
aaatatctgtaacacgcaaaaaaacttttcgttacctgtctcatatattc

SEQ ID NO: 33443 - DNA, 50 bp, synthetic construct
  source 1..50: mol_type = other DNA
acgcaaaaaaacttataaaattaactgcatttttgtatcaattacagcgt

SEQ ID NO: 33444 - DNA, 50 bp, synthetic construct
  source 1..50: mol_type = other DNA
cagtaaaccgaaaaacattttcaccggataaaagtactgccggaaagtaa

SEQ ID NO: 33445 - DNA, 50 bp, synthetic construct
  source 1..50: mol_type = other DNA
gaagctcgtccagaaggataagaatcttcaataccatattttaaaatcaa

SEQ ID NO: 33446 - DNA, 50 bp, synthetic construct
  source 1..50: mol_type = other DNA
gttaagttgttaaagttataccttgcaagatgatattgtaacagtagata

SEQ ID NO: 33447 - DNA, 50 bp, synthetic construct
  source 1..50: mol_type = other DNA
attatttttgcacaaaagtaggagatctcaaggttctgaacaaaaccaat

SEQ ID NO: 33448 - DNA, 50 bp, synthetic construct
  source 1..50: mol_type = other DNA
tccgttgacacacggcagtaggctgcattgtagaatgctgtgtcaactgt

SEQ ID NO: 33449 - DNA, 50 bp, synthetic construct
  source 1..50: mol_type = other DNA
gaacagcatttttatcatttacatatcattcctccttaaaaatgagtata

SEQ ID NO: 33450 - DNA, 50 bp, synthetic construct
  source 1..50: mol_type = other DNA
aaaaaagacttgctattcttggggtttcgccgtttgagcaagttctattt

SEQ ID NO: 33451 - DNA, 50 bp, synthetic construct
  source 1..50: mol_type = other DNA
agagagataatgaagtaaataaaaagccatatttccttcagtttcttccg

SEQ ID NO: 33452 - DNA, 50 bp, synthetic construct
  source 1..50: mol_type = other DNA
ctggcaacaaaaaaatataccaataaattggtatattttttcgttaacat

SEQ ID NO: 33453 - DNA, 50 bp, synthetic construct
  source 1..50: mol_type = other DNA
ctgctaactatttaattcattataaaataaatgtgccgcatttatcacgt

SEQ ID NO: 33454 - DNA, 50 bp, synthetic construct
  source 1..50: mol_type = other DNA
atctttttgccgggcgtctttttcataaaaataacagccagcggggaacg

SEQ ID NO: 33455 - DNA, 50 bp, synthetic construct
  source 1..50: mol_type = other DNA
acactgtacgaactcacgccgttttcaaagtgatttccgtaaggaagaat

SEQ ID NO: 33456 - DNA, 50 bp, synthetic construct
  source 1..50: mol_type = other DNA
ataaacgctgcaccacatcgtagacgtccacgccgttttgcagggccatc

SEQ ID NO: 33457 - DNA, 50 bp, synthetic construct
  source 1..50: mol_type = other DNA
ctgtattcatggaatgcaggggtattaatgcaaatgatggaggaataatt

SEQ ID NO: 33458 - DNA, 50 bp, synthetic construct
  source 1..50: mol_type = other DNA
aatataacttttcgcagtattccccttggtataagcagaaaaaaaatatg

SEQ ID NO: 33459 - DNA, 50 bp, synthetic construct
  source 1..50: mol_type = other DNA
tcctgatatatatttttcaaagaactgtttccctgtcatatatatcaaca

SEQ ID NO: 33460 - DNA, 50 bp, synthetic construct
  source 1..50: mol_type = other DNA
ccaaatgaaaacccacaactctacacttagttttcatattcttaattttg

SEQ ID NO: 33461 - DNA, 50 bp, synthetic construct
  source 1..50: mol_type = other DNA
gcttaagtatatagatgaagagacaaggctgttgtagatgataaagcagc

SEQ ID NO: 33462 - DNA, 50 bp, synthetic construct
  source 1..50: mol_type = other DNA
aataccacccaactctgggtacattactgtaatccctgtaattgtttata

SEQ ID NO: 33463 - DNA, 50 bp, synthetic construct
  source 1..50: mol_type = other DNA
gaaagagcatatgcgaagccttatgatgacagtatttctgatgccttttg

SEQ ID NO: 33464 - DNA, 50 bp, synthetic construct
  source 1..50: mol_type = other DNA
ttttgggatgtaatgaaaggagggtatccagctgagctacgaggccaaca

SEQ ID NO: 33465 - DNA, 50 bp, synthetic construct
  source 1..50: mol_type = other DNA
aagggtggggagaaatcaaaaaagatcttcttcaagttcttccatatatt

SEQ ID NO: 33466 - DNA, 50 bp, synthetic construct
  source 1..50: mol_type = other DNA
ctcatgttcttctgctggctgttattgaaaaggatcaagaaaaaaagaag

SEQ ID NO: 33467 - DNA, 50 bp, synthetic construct
  source 1..50: mol_type = other DNA
cgttttgcgacttgcttacctcttatagcgtttgtctgtgtgctgttcct

SEQ ID NO: 33468 - DNA, 50 bp, synthetic construct
  source 1..50: mol_type = other DNA
tttgagtgctaatcaagattatatcagcatatccttgactgtgatatttt

SEQ ID NO: 33469 - DNA, 50 bp, synthetic construct
  source 1..50: mol_type = other DNA
tttggtattggttgcggaaattccttcaaatataactgaccaatttttac

SEQ ID NO: 33470 - DNA, 50 bp, synthetic construct
  source 1..50: mol_type = other DNA
cattcgtgacataatcggaaagtacacgctagcttaacatgtcaccatgc

SEQ ID NO: 33471 - DNA, 50 bp, synthetic construct
  source 1..50: mol_type = other DNA
taaaattatccgataaaataatttaaaaatccttagaggggaaattttag

SEQ ID NO: 33472 - DNA, 50 bp, synthetic construct
  source 1..50: mol_type = other DNA
tgctttttgataaccgtattgtttataaaaataacagctatcaaaaacag

SEQ ID NO: 33473 - DNA, 50 bp, synthetic construct
  source 1..50: mol_type = other DNA
tttgcgggttcgactggataaaacgcccccaagccagtcttgtatcaaaa

SEQ ID NO: 33474 - DNA, 50 bp, synthetic construct
  source 1..50: mol_type = other DNA
tggaaccatgacaccagtggggttaaaacaccccctaccgaatgaatctg

SEQ ID NO: 33475 - DNA, 50 bp, synthetic construct
  source 1..50: mol_type = other DNA
aaaacaaaaagcaactatcattgatatcatagatagctgctttggtttta

SEQ ID NO: 33476 - DNA, 50 bp, synthetic construct
  source 1..50: mol_type = other DNA
taaatagtttctgtcaaaataaaaaaattagtccttgataccactatcag

SEQ ID NO: 33477 - DNA, 50 bp, synthetic construct
  source 1..50: mol_type = other DNA
ccggaaagtcatgtcgtttctctcttgataaaaagaaaggttcttttgtt

SEQ ID NO: 33478 - DNA, 50 bp, synthetic construct
  source 1..50: mol_type = other DNA
gcacggaaatacttcattcccggtttgatatttatgaagcatttccttct

SEQ ID NO: 33479 - DNA, 50 bp, synthetic construct
  source 1..50: mol_type = other DNA
gttcagcacgaagccgtccaggggcagccctggaacggtctgtccaggtt

SEQ ID NO: 33480 - DNA, 50 bp, synthetic construct
  source 1..50: mol_type = other DNA
cttgttttgccgcaatcaacgttttggagcgggtgatgggaatcgaaccc

SEQ ID NO: 33481 - DNA, 50 bp, synthetic construct
  source 1..50: mol_type = other DNA
cttcattgtgttctttgctgattataagagtagtttatttcacaaggaag

SEQ ID NO: 33482 - DNA, 50 bp, synthetic construct
  source 1..50: mol_type = other DNA
tacatagattttctcttgtcaggatatcctggagaaagaatatccggcag

SEQ ID NO: 33483 - DNA, 50 bp, synthetic construct
  source 1..50: mol_type = other DNA
aggactattacaggagggtaaacaggtcttttttgccgtgaaattcggct

SEQ ID NO: 33484 - DNA, 50 bp, synthetic construct
  source 1..50: mol_type = other DNA
gaaggaatgcacgatatggcaagttcctctgtatgccggggcatcttccg

SEQ ID NO: 33485 - DNA, 50 bp, synthetic construct
  source 1..50: mol_type = other DNA
tctgagttcagaagtttcttagaaacactatatatcactctgaaagccga

SEQ ID NO: 33486 - DNA, 50 bp, synthetic construct
  source 1..50: mol_type = other DNA
gcaacgcataagcgctgacttgcacgaaaaatccagcccaaatgtgtagc

SEQ ID NO: 33487 - DNA, 50 bp, synthetic construct
  source 1..50: mol_type = other DNA
ttgatgtacttcgtataataatcgacaggttattggcataagcagcacag

SEQ ID NO: 33488 - DNA, 50 bp, synthetic construct
  source 1..50: mol_type = other DNA
ccacaacagataccctgtgaccatacaacatcactttgtcttagtcaatt

SEQ ID NO: 33489 - DNA, 50 bp, synthetic construct
  source 1..50: mol_type = other DNA
agtttatgccatttgtgcaaggcatatgaataatactggttaccataact

SEQ ID NO: 33490 - DNA, 50 bp, synthetic construct
  source 1..50: mol_type = other DNA
acagcacaaagtatagcacaaaaacgccctgcggcgctactgccgcatga

SEQ ID NO: 33491 - DNA, 50 bp, synthetic construct
  source 1..50: mol_type = other DNA
accacgtatggtaacggtccatacatccaatccaagttaccaaagaacat

SEQ ID NO: 33492 - DNA, 50 bp, synthetic construct
  source 1..50: mol_type = other DNA
aacatttgttagataccataaaacatattctaacgaatcgtacaaataat

SEQ ID NO: 33493 - DNA, 50 bp, synthetic construct
  source 1..50: mol_type = other DNA
aagaagcggttataatataagtgatatcattgatactatcaacagacaat

SEQ ID NO: 33494 - DNA, 50 bp, synthetic construct
  source 1..50: mol_type = other DNA
ggggaagcaaagatcgtaaaactcatcttttttgatttctccccatcccc

SEQ ID NO: 33495 - DNA, 50 bp, synthetic construct
  source 1..50: mol_type = other DNA
accgtgaccagtttaaactgatgatttccttggcataaactgaaaaaaat

SEQ ID NO: 33496 - DNA, 50 bp, synthetic construct
  source 1..50: mol_type = other DNA
gttatttttatacccatttttacatataataatattttttcgtaaataaa

SEQ ID NO: 33497 - DNA, 50 bp, synthetic construct
  source 1..50: mol_type = other DNA
atatacctaaattttaaaattaaagctttttgttttttactacttgataa

SEQ ID NO: 33498 - DNA, 50 bp, synthetic construct
  source 1..50: mol_type = other DNA
cttaaatttgacgatgtgcatccaaagcccgccgcatcctcctctttaaa

SEQ ID NO: 33499 - DNA, 50 bp, synthetic construct
  source 1..50: mol_type = other DNA
tatgaattgtaaccagaatccaacatgttagaaatgggtgttaaatgata

SEQ ID NO: 33500 - DNA, 50 bp, synthetic construct
  source 1..50: mol_type = other DNA
ttgattgtgttgaaaggaggctgatatcagaaacgttcaaagtttttata

SEQ ID NO: 33501 - DNA, 50 bp, synthetic construct
  source 1..50: mol_type = other DNA
catatgagcgaggcaatgatccgcatgctgagcattgcagcatcaatcac

SEQ ID NO: 33502 - DNA, 50 bp, synthetic construct
  source 1..50: mol_type = other DNA
ccacccaggccggcgacatcgtactcgccgccagtcgcccgccttcctgg

SEQ ID NO: 33503 - DNA, 50 bp, synthetic construct
  source 1..50: mol_type = other DNA
accattgtagaaactttcttatcttttattattaaagtctctactgtcat

SEQ ID NO: 33504 - DNA, 50 bp, synthetic construct
  source 1..50: mol_type = other DNA
cgaatccatgagactcgccgggcaccccagcggcgttcctcatacatcgg

SEQ ID NO: 33505 - DNA, 50 bp, synthetic construct
  source 1..50: mol_type = other DNA
gtaaaggtacaaaagcgtggaacgcgtagatgacgacattcattttttcc

SEQ ID NO: 33506 - DNA, 50 bp, synthetic construct
  source 1..50: mol_type = other DNA
tgaaaagctggtgcatatttttgtgaactataattatcaccataattcca

SEQ ID NO: 33507 - DNA, 50 bp, synthetic construct
  source 1..50: mol_type = other DNA
tacggggctggtggcgctgccgccgcgaggagcagctcaccagctacgaa

SEQ ID NO: 33508 - DNA, 50 bp, synthetic construct
  source 1..50: mol_type = other DNA
acctttatatatttttattttaattagctaaaataaaagataataaagaa

SEQ ID NO: 33509 - DNA, 50 bp, synthetic construct
  source 1..50: mol_type = other DNA
gtttttgtaggttttaacggggaatattttgatgccaaaagcgtgtaaag

SEQ ID NO: 33510 - DNA, 50 bp, synthetic construct
  source 1..50: mol_type = other DNA
tcatgcagtccacaatctgagaaatctttccacactttcaacagtcaaaa

SEQ ID NO: 33511 - DNA, 50 bp, synthetic construct
  source 1..50: mol_type = other DNA
tttatgctatttcacagtgggggatggccaccctcgtgaccgagggtaaa

SEQ ID NO: 33512 - DNA, 50 bp, synthetic construct
  source 1..50: mol_type = other DNA
gggctgaatggtgggcgggatgaccgcccatccgggcggcgtagtcgttg

SEQ ID NO: 33513 - DNA, 50 bp, synthetic construct
  source 1..50: mol_type = other DNA
gcaggctgacgttgcggccttaaaggagctccgctgccgcgtcgtcctcc

SEQ ID NO: 33514 - DNA, 50 bp, synthetic construct
  source 1..50: mol_type = other DNA
caaatttaggtaaaagaaaaaagatcaatagtttcttttaattctatgta

SEQ ID NO: 33515 - DNA, 50 bp, synthetic construct
  source 1..50: mol_type = other DNA
actgacctcttttttggtaaggtcttgattttattaaaaaataggtacaa

SEQ ID NO: 33516 - DNA, 50 bp, synthetic construct
  source 1..50: mol_type = other DNA
atatagcacacggacaaggaggttaacgaatccttgtccgtgtggaaact

SEQ ID NO: 33517 - DNA, 50 bp, synthetic construct
  source 1..50: mol_type = other DNA
atcaggatttcctattgtaagatacagctgctacaataggcgatgctagt

SEQ ID NO: 33518 - DNA, 50 bp, synthetic construct
  source 1..50: mol_type = other DNA
tgggttgttttattccaggcagttatcgaagaaaatgtatgcaaaaccca

SEQ ID NO: 33519 - DNA, 50 bp, synthetic construct
  source 1..50: mol_type = other DNA
gaatgtacaaagctcccggttttgcgctgaccgacgcgcttctcgcactc

SEQ ID NO: 33520 - DNA, 50 bp, synthetic construct
  source 1..50: mol_type = other DNA
ttgagccgtattattatctatataaggagatacatcaaaatacggcggtt

SEQ ID NO: 33521 - DNA, 50 bp, synthetic construct
  source 1..50: mol_type = other DNA
gccgccgccagcccggggaactaaaattagcagcgcgggcgaaggcgggc

SEQ ID NO: 33522 - DNA, 50 bp, synthetic construct
  source 1..50: mol_type = other DNA
atataaaacctttatataattaattaatttgttaaggatggttttaatat

SEQ ID NO: 33523 - DNA, 50 bp, synthetic construct
  source 1..50: mol_type = other DNA
ggcgatattaccgcagggcttctttccctccacattgcggtttctggctt

SEQ ID NO: 33524 - DNA, 50 bp, synthetic construct
  source 1..50: mol_type = other DNA
atagcccctgtataatttttccctaaagacaaaggacatgtttggcccgg

SEQ ID NO: 33525 - DNA, 50 bp, synthetic construct
  source 1..50: mol_type = other DNA
gtgctcctgtcggtaggttcaatttaactgaacccctccggttggctcat

SEQ ID NO: 33526 - DNA, 50 bp, synthetic construct
  source 1..50: mol_type = other DNA
gccgcgctgggcggcgtggtcgaggccagcatatcgcgatttggcgcgaa

SEQ ID NO: 33527 - DNA, 50 bp, synthetic construct
  source 1..50: mol_type = other DNA
cctgctcattcacataagcattgagaacaaaataacccagaagccgcata

SEQ ID NO: 33528 - DNA, 50 bp, synthetic construct
  source 1..50: mol_type = other DNA
attaagaatttttacgattatgccttcttttcgctccttattttcttgat

SEQ ID NO: 33529 - DNA, 50 bp, synthetic construct
  source 1..50: mol_type = other DNA
tcggtgccgccgtgaagcgtgacagctccaagttttctcggctgcacctt

SEQ ID NO: 33530 - DNA, 50 bp, synthetic construct
  source 1..50: mol_type = other DNA
cagacgatgcgggaagaaaaaatgctctggagcggtctttccatcgttta

SEQ ID NO: 33531 - DNA, 50 bp, synthetic construct
  source 1..50: mol_type = other DNA
gatatgtcccctttgtttacggtatataccgtatttattggctataattg

SEQ ID NO: 33532 - DNA, 50 bp, synthetic construct
  source 1..50: mol_type = other DNA
ttgtgtagcctccaaatctaacaaatttgggcgatcgggacgttatgcaa

SEQ ID NO: 33533 - DNA, 50 bp, synthetic construct
  source 1..50: mol_type = other DNA
acggtatttccccgaaacactctttgattatgccataacggaaataccgc

SEQ ID NO: 33534 - DNA, 50 bp, synthetic construct
  source 1..50: mol_type = other DNA
acaaagctcggcggaataacagccgttacagcgttcacgcgctgcgttcc

SEQ ID NO: 33535 - DNA, 50 bp, synthetic construct
  source 1..50: mol_type = other DNA
cgaccgtttttcagactacggattataaacagtacgaagaaacgccgtgt

SEQ ID NO: 33536 - DNA, 50 bp, synthetic construct
  source 1..50: mol_type = other DNA
cgcattctatcgtttgaagggccttgagatatgtgttacaataaattgca

SEQ ID NO: 33537 - DNA, 50 bp, synthetic construct
  source 1..50: mol_type = other DNA
gtaaatgtccaccagctcataatcaggagtccgatagatacgaagaaaac

SEQ ID NO: 33538 - DNA, 50 bp, synthetic construct
  source 1..50: mol_type = other DNA
tactgacctttgaaaagcggattcttgtttaacattttgcaagggaagtc

SEQ ID NO: 33539 - DNA, 50 bp, synthetic construct
  source 1..50: mol_type = other DNA
cagtctttatgataggtatgtttgcacaaaaaggaatgatagaaactatg

SEQ ID NO: 33540 - DNA, 50 bp, synthetic construct
  source 1..50: mol_type = other DNA
ctgcatttttaaccagcgcattttgctgaatatgtaatggaaaagtgcga

SEQ ID NO: 33541 - DNA, 50 bp, synthetic construct
  source 1..50: mol_type = other DNA
ttaacgacagccctgccgttttgaattgaaaaacagttcatcaatcaaaa

SEQ ID NO: 33542 - DNA, 50 bp, synthetic construct
  source 1..50: mol_type = other DNA
cttttattaattatccccccccgcatgcgttacttacgtaataatcataa

SEQ ID NO: 33543 - DNA, 50 bp, synthetic construct
  source 1..50: mol_type = other DNA
tgccacttttctctttttctggttatgctcactataagacaaatgatgcg

SEQ ID NO: 33544 - DNA, 50 bp, synthetic construct
  source 1..50: mol_type = other DNA
aagaaacgttgacagcgcatctttttaaaggagcgctgtacggcattcgc

SEQ ID NO: 33545 - DNA, 50 bp, synthetic construct
  source 1..50: mol_type = other DNA
ttcataaaattagcaataagccgcaagttacttattgataaaaacatgaa

SEQ ID NO: 33546 - DNA, 50 bp, synthetic construct
  source 1..50: mol_type = other DNA
catgatgaatatatcgaagtttccgaagaagtgaggttttcgttcacaat

SEQ ID NO: 33547 - DNA, 50 bp, synthetic construct
  source 1..50: mol_type = other DNA
gggcgaggttgagacacaggggccgcaccccctaaagccgtggttgcacc

SEQ ID NO: 33548 - DNA, 50 bp, synthetic construct
  source 1..50: mol_type = other DNA
ccgtgatattgttacttaatagcaaacgctacgacgcgaatcccttttga

SEQ ID NO: 33549 - DNA, 50 bp, synthetic construct
  source 1..50: mol_type = other DNA
gccgcatccttgccacccaggtgccggctaaacgggcttctggcggatgt

SEQ ID NO: 33550 - DNA, 50 bp, synthetic construct
  source 1..50: mol_type = other DNA
attcatataatattttttaataaatatgtaatattaaatattaaggagat

SEQ ID NO: 33551 - DNA, 50 bp, synthetic construct
  source 1..50: mol_type = other DNA
ttatggaaataaccgaagcggagatatatcacacaacacagctaacaaaa

SEQ ID NO: 33552 - DNA, 50 bp, synthetic construct
  source 1..50: mol_type = other DNA
cgcttattctaaaggcgcggaggaattcctctgcgggtttaaattctata

SEQ ID NO: 33553 - DNA, 50 bp, synthetic construct
  source 1..50: mol_type = other DNA
accgaagcagagatagaaatcattacaatgttttctatctcgatttcttc

SEQ ID NO: 33554 - DNA, 50 bp, synthetic construct
  source 1..50: mol_type = other DNA
ttttcctcctttctgaccagattattgtccccctgcagaatgccactcct

SEQ ID NO: 33555 - DNA, 50 bp, synthetic construct
  source 1..50: mol_type = other DNA
aagcgtagaaaatggtgaatttctgcgatacctttcacctttctttcctt

SEQ ID NO: 33556 - DNA, 50 bp, synthetic construct
  source 1..50: mol_type = other DNA
gatttgatttttgccctctatctgtacagatacagtctcagatacagata

SEQ ID NO: 33557 - DNA, 50 bp, synthetic construct
  source 1..50: mol_type = other DNA
tggacggggacaagtatcagaaacgctcttgaccagcgtgtccgcgtcca

SEQ ID NO: 33558 - DNA, 50 bp, synthetic construct
  source 1..50: mol_type = other DNA
tggtagaagttttggaaattggttgcgagctgatgcgtaaacgcttacca

SEQ ID NO: 33559 - DNA, 50 bp, synthetic construct
  source 1..50: mol_type = other DNA
ccggtttttgctgccccctgacagggctgacgcaagcgagcgggcctcgg

SEQ ID NO: 33560 - DNA, 50 bp, synthetic construct
  source 1..50: mol_type = other DNA
tgaaaaatcaatcggctttcttttttaaaaataagccgcttccctggttt

SEQ ID NO: 33561 - DNA, 50 bp, synthetic construct
  source 1..50: mol_type = other DNA
atcagattatatagtaaatatcgtaaagatgtgttataatattatccgat

SEQ ID NO: 33562 - DNA, 50 bp, synthetic construct
  source 1..50: mol_type = other DNA
aatgtttttgatagaaacttgaatttttacaagtccggtataaaaagcct

SEQ ID NO: 33563 - DNA, 50 bp, synthetic construct
  source 1..50: mol_type = other DNA
gttttcaaaatttctgccgccgcccgaaaacaggaaggtatttttcggtg

SEQ ID NO: 33564 - DNA, 50 bp, synthetic construct
  source 1..50: mol_type = other DNA
aaattaaaggaaattgacaagaattggttcagcgcattaatctttacctg

SEQ ID NO: 33565 - DNA, 50 bp, synthetic construct
  source 1..50: mol_type = other DNA
ccgtctccgacgcgagcttgtaggcgagatcacgatccagccggaggagg

SEQ ID NO: 33566 - DNA, 50 bp, synthetic construct
  source 1..50: mol_type = other DNA
gcctgatgccgttttcatccatttcagatcgcttgaacactatatattgt

SEQ ID NO: 33567 - DNA, 50 bp, synthetic construct
  source 1..50: mol_type = other DNA
gggatggggagaaatcaaaaaagatatgagttttacgatctttgcttccc

SEQ ID NO: 33568 - DNA, 50 bp, synthetic construct
  source 1..50: mol_type = other DNA
ctgaaataaggataaggctgatggtccttgatacggtatcctatctgcct

SEQ ID NO: 33569 - DNA, 50 bp, synthetic construct
  source 1..50: mol_type = other DNA
acgaactgttggaaatgtgggaaacccataccacatttctatcttcccga

SEQ ID NO: 33570 - DNA, 50 bp, synthetic construct
  source 1..50: mol_type = other DNA
tagccatatctttataatttataccatcctccttcttaaaagtatgaaaa

SEQ ID NO: 33571 - DNA, 50 bp, synthetic construct
  source 1..50: mol_type = other DNA
cgacattgctcctgtcaagctctatctacgagcgacacggagacattgcc

SEQ ID NO: 33572 - DNA, 50 bp, synthetic construct
  source 1..50: mol_type = other DNA
ttatgattattacgtaagtaacgcatgcggggggggataattaataaaag

SEQ ID NO: 33573 - DNA, 50 bp, synthetic construct
  source 1..50: mol_type = other DNA
tggacgcggacacgctggtcaagagcgtttctgatacttgtccccgtcca

SEQ ID NO: 33574 - DNA, 50 bp, synthetic construct
  source 1..50: mol_type = other DNA
ttttgcgggcggtcgggaatgtggcgcgttattttcgctccgttatagaa

SEQ ID NO: 33575 - DNA, 50 bp, synthetic construct
  source 1..50: mol_type = other DNA
atggttcgtactactcttcttgtcgccgaaagcgatagagatcgcacctg

SEQ ID NO: 33576 - DNA, 50 bp, synthetic construct
  source 1..50: mol_type = other DNA
ttgatagaacgctctgtatcgtgaagttccgatacagctcaatcaattca

SEQ ID NO: 33577 - DNA, 50 bp, synthetic construct
  source 1..50: mol_type = other DNA
ttctactctttgtcacggtagaaaaacctataccttgacattttgtacaa

SEQ ID NO: 33578 - DNA, 50 bp, synthetic construct
  source 1..50: mol_type = other DNA
aaaagcggttatcgaagcggaggcaaatgttcgtttataagaccgctgtt

SEQ ID NO: 33579 - DNA, 50 bp, synthetic construct
  source 1..50: mol_type = other DNA
caacgccaactccgccacggctcccggcaacgctgtcacgcttcacggcg

SEQ ID NO: 33580 - DNA, 50 bp, synthetic construct
  source 1..50: mol_type = other DNA
gggcttgccgctgtcgctggaaggcgcctctgaaccacatcggctcggag

SEQ ID NO: 33581 - DNA, 50 bp, synthetic construct
  source 1..50: mol_type = other DNA
attcagttgtcatccctgcctgtcatcaatcgcagggaatacaaccttgt

SEQ ID NO: 33582 - DNA, 50 bp, synthetic construct
  source 1..50: mol_type = other DNA
tcaaacatgacaaaatatagcattttacagatatacttttgcaagttcgg

SEQ ID NO: 33583 - DNA, 50 bp, synthetic construct
  source 1..50: mol_type = other DNA
ccgaaatgttacatttgtcagtatatttccttacaaaagtaagaaaacgg

SEQ ID NO: 33584 - DNA, 50 bp, synthetic construct
  source 1..50: mol_type = other DNA
caacttcttttaataagttcattatctaatcttttcttaaaaagaacttt

SEQ ID NO: 33585 - DNA, 50 bp, synthetic construct
  source 1..50: mol_type = other DNA
tcatccttcgctgtcttcctcaagcgctcagggggaaaagcgggatagga

SEQ ID NO: 33586 - DNA, 50 bp, synthetic construct
  source 1..50: mol_type = other DNA
actgcctaatatatggtagaaaattccggcaggtgcatatttcgcagtgc

SEQ ID NO: 33587 - DNA, 50 bp, synthetic construct
  source 1..50: mol_type = other DNA
gagataccctgacccttacacccgatcggtttgaaaggtctgctcggctg

SEQ ID NO: 33588 - DNA, 50 bp, synthetic construct
  source 1..50: mol_type = other DNA
gcggatttggaatccagtgctccggtcggttcatcggcaaggatcagctt

SEQ ID NO: 33589 - DNA, 50 bp, synthetic construct
  source 1..50: mol_type = other DNA
agatatgtcccctttgtttacggtatggaataaccatttgccgcattgct

SEQ ID NO: 33590 - DNA, 50 bp, synthetic construct
  source 1..50: mol_type = other DNA
gcgtatcctgcgacccgccgtttttgcaatcgggcgctctttggatccaa

SEQ ID NO: 33591 - DNA, 50 bp, synthetic construct
  source 1..50: mol_type = other DNA
cattacaaggcagattgttaaaatcacgcttgtcgtgctgttttttaccc

SEQ ID NO: 33592 - DNA, 50 bp, synthetic construct
  source 1..50: mol_type = other DNA
tcgcttgccgctgaacagcagaaagtaatcctgtgtatgctggaaaaatt

SEQ ID NO: 33593 - DNA, 50 bp, synthetic construct
  source 1..50: mol_type = other DNA
gttaaaaagcttatctattttttcaggtacaagaaaaagggctttttaat

SEQ ID NO: 33594 - DNA, 50 bp, synthetic construct
  source 1..50: mol_type = other DNA
ttcatgctggcaatgcagagtatttttatcatctgaactggcaagctgat

SEQ ID NO: 33595 - DNA, 50 bp, synthetic construct
  source 1..50: mol_type = other DNA
ttatatatgatataatacgattttttcatacttatctaaatcttttatat

SEQ ID NO: 33596 - DNA, 50 bp, synthetic construct
  source 1..50: mol_type = other DNA
gcaactttaaaattaaaaaaatccaactgtgcttttgtatttacagatgc

SEQ ID NO: 33597 - DNA, 50 bp, synthetic construct
  source 1..50: mol_type = other DNA
acaaaaaagcctatcatcggggatagggagagaatgattggcggtttttc

SEQ ID NO: 33598 - DNA, 50 bp, synthetic construct
  source 1..50: mol_type = other DNA
ccgctgccgccctacatcaccaagcagctccgtgcgtagtgcggggctgc

SEQ ID NO: 33599 - DNA, 50 bp, synthetic construct
  source 1..50: mol_type = other DNA
ctgcgatttcttcggtatccattcgcgaacggtgattgaacacaccgaag

SEQ ID NO: 33600 - DNA, 50 bp, synthetic construct
  source 1..50: mol_type = other DNA
ccaggaaaactttaattacgattactccatgctcattcccattttactga

SEQ ID NO: 33601 - DNA, 50 bp, synthetic construct
  source 1..50: mol_type = other DNA
gagtgtaaaacccgcagcgtctcctaaaatacgccacgctttttaaggtc

SEQ ID NO: 33602 - DNA, 50 bp, synthetic construct
  source 1..50: mol_type = other DNA
cgcctatcacatggtcagtcgggacggcatcgtctaccatcccatgtacc

SEQ ID NO: 33603 - DNA, 50 bp, synthetic construct
  source 1..50: mol_type = other DNA
gatgaaaaaagcccccgcacagggcgcccggtggggcggctttttcaaat

SEQ ID NO: 33604 - DNA, 50 bp, synthetic construct
  source 1..50: mol_type = other DNA
ttctcattgaccagtttgatacaattatgttcaaaaaattatagtgagaa

SEQ ID NO: 33605 - DNA, 50 bp, synthetic construct
  source 1..50: mol_type = other DNA
ctagtataatttcttttattataccacgctattaaaagaaatatggtgaa

SEQ ID NO: 33606 - DNA, 50 bp, synthetic construct
  source 1..50: mol_type = other DNA
gaatagcccgacgaatgagtgttttaggccactaattgactcataaatgg

SEQ ID NO: 33607 - DNA, 50 bp, synthetic construct
  source 1..50: mol_type = other DNA
tatgttaaaagattgaaattgattaaaattcctccttgtgtttttaagta

SEQ ID NO: 33608 - DNA, 50 bp, synthetic construct
  source 1..50: mol_type = other DNA
tatctgcagccggttgatcgataaccttattattgttccggtagcagatc

SEQ ID NO: 33609 - DNA, 50 bp, synthetic construct
  source 1..50: mol_type = other DNA
agggaaatgtatagagttacgcttttaagattaacttaatcggatttata

SEQ ID NO: 33610 - DNA, 50 bp, synthetic construct
  source 1..50: mol_type = other DNA
gaaatcaaaaaagatatttatattcaggcacatgcatctttattgatgga

SEQ ID NO: 33611 - DNA, 50 bp, synthetic construct
  source 1..50: mol_type = other DNA
aaaacacttgctattattggctttcaatagacaatgatataaaagcagga

SEQ ID NO: 33612 - DNA, 50 bp, synthetic construct
  source 1..50: mol_type = other DNA
ctttctcgttgccgacggtgcctttggtctgcttttctgctgcgaggccg

SEQ ID NO: 33613 - DNA, 50 bp, synthetic construct
  source 1..50: mol_type = other DNA
atttgaccacaaaagaaacgaaacatggggcattatttttttacgcaaga

SEQ ID NO: 33614 - DNA, 50 bp, synthetic construct
  source 1..50: mol_type = other DNA
tatccacccttccacagcggcaacgcgttgccgttgcggaaaggtaggtt

SEQ ID NO: 33615 - DNA, 50 bp, synthetic construct
  source 1..50: mol_type = other DNA
tgttttattccaggcagttataccgaggtttgacatcctggaatatacaa

SEQ ID NO: 33616 - DNA, 50 bp, synthetic construct
  source 1..50: mol_type = other DNA
ggaaagatttatttttcccagaactttttgaagaaactgtaaatctttcc

SEQ ID NO: 33617 - DNA, 50 bp, synthetic construct
  source 1..50: mol_type = other DNA
tctgggaagatgactaacgaaaaagcttttcagcaaggcatcatccgccg

SEQ ID NO: 33618 - DNA, 50 bp, synthetic construct
  source 1..50: mol_type = other DNA
gcagtctccaatcatcgtggatttacacatcggtgctgataggaaccgat

SEQ ID NO: 33619 - DNA, 50 bp, synthetic construct
  source 1..50: mol_type = other DNA
tttcggcgatcttgtgcagagaggctggagcggtctttccatcgtttaac

SEQ ID NO: 33620 - DNA, 50 bp, synthetic construct
  source 1..50: mol_type = other DNA
agccaccctggaaaggtgcgtcagcggagcagcagattgaccgtgttcca

SEQ ID NO: 33621 - DNA, 50 bp, synthetic construct
  source 1..50: mol_type = other DNA
attaacaaagaaaaatcgtgatacatggtcttttttatttgttaagaaat

SEQ ID NO: 33622 - DNA, 50 bp, synthetic construct
  source 1..50: mol_type = other DNA
cgatttgacagcttattttttcccatggaaaaaattgagaaataaattct

SEQ ID NO: 33623 - DNA, 50 bp, synthetic construct
  source 1..50: mol_type = other DNA
gatacaaaattcgcgctttttgcgatcgcagaatacagagattctgtacg

SEQ ID NO: 33624 - DNA, 50 bp, synthetic construct
  source 1..50: mol_type = other DNA
ctgttgacattttgaaaatcgaagaaggccgtcttcaaccgattcaacaa

SEQ ID NO: 33625 - DNA, 50 bp, synthetic construct
  source 1..50: mol_type = other DNA
cagccgagcagacctttcaaaccgatcgggtgtaagggtcagggtatctc

SEQ ID NO: 33626 - DNA, 50 bp, synthetic construct
  source 1..50: mol_type = other DNA
gacaattctgctgttaatgatataataagtgcatcaaccttttccctatc

SEQ ID NO: 33627 - DNA, 50 bp, synthetic construct
  source 1..50: mol_type = other DNA
tattgagaaatgccgtgtaataaatatctattaccaatgtcaccgaaata

SEQ ID NO: 33628 - DNA, 50 bp, synthetic construct
  source 1..50: mol_type = other DNA
aagacggattcatgctgcctttttcaaagaaagaagcgtgaaaccgatgg

SEQ ID NO: 33629 - DNA, 50 bp, synthetic construct
  source 1..50: mol_type = other DNA
gcgccgtgcgacttcgtaaatctcctgcagtgcccgctgtcgtgcttttt

SEQ ID NO: 33630 - DNA, 50 bp, synthetic construct
  source 1..50: mol_type = other DNA
cggattgatggtcggcggaatgactgtcatcgtccgcggaaatgtcaccg

SEQ ID NO: 33631 - DNA, 50 bp, synthetic construct
  source 1..50: mol_type = other DNA
ccgttttcttacttttgtaaggaaatatactgacaaatgtaacatttcgg

SEQ ID NO: 33632 - DNA, 50 bp, synthetic construct
  source 1..50: mol_type = other DNA
tgatttctatcgcctataagcaagtttttatcatcaggcgcatcggttga

SEQ ID NO: 33633 - DNA, 50 bp, synthetic construct
  source 1..50: mol_type = other DNA
acagcgttccaggtcctccggattctaatcttatctacctgagcagcata

SEQ ID NO: 33634 - DNA, 50 bp, synthetic construct
  source 1..50: mol_type = other DNA
gtacggctcaaggtgtttcatcagcgcggcggaaatcggggggggggtaa

SEQ ID NO: 33635 - DNA, 50 bp, synthetic construct
  source 1..50: mol_type = other DNA
gaaataggcgtgagcctcacattttgtagatagtctttcattatagcata

SEQ ID NO: 33636 - DNA, 50 bp, synthetic construct
  source 1..50: mol_type = other DNA
agcttgttttcgtccgatgacattataaaatcatatcctgagcccttgag

SEQ ID NO: 33637 - DNA, 50 bp, synthetic construct
  source 1..50: mol_type = other DNA
gacgggcgctgtgtttgaagtctatatagaagatgaaaacggcgttcgtc

SEQ ID NO: 33638 - DNA, 50 bp, synthetic construct
  source 1..50: mol_type = other DNA
gcaacggcatcctgcagatcgaaatgcatcgagctgaccgaagaagaatt

SEQ ID NO: 33639 - DNA, 50 bp, synthetic construct
  source 1..50: mol_type = other DNA
gataagcgattgcagcacagtaggatttattttaactgcaagaggctatt

SEQ ID NO: 33640 - DNA, 50 bp, synthetic construct
  source 1..50: mol_type = other DNA
ccgcgttccgcatcggccatcgggctgccgaaaagcgaaacgggcggcgg

SEQ ID NO: 33641 - DNA, 50 bp, synthetic construct
  source 1..50: mol_type = other DNA
gcaaaagaggcaaatctggaatcaggaacagacatcgtggctggaatggc

SEQ ID NO: 33642 - DNA, 50 bp, synthetic construct
  source 1..50: mol_type = other DNA
gtacattattatcggaaaacgacttgaccggttttcaataattgatggac

SEQ ID NO: 33643 - DNA, 50 bp, synthetic construct
  source 1..50: mol_type = other DNA
gcagcgcaagcagcatatgcgggaagcaatactttctttccttgccttgc

SEQ ID NO: 33644 - DNA, 50 bp, synthetic construct
  source 1..50: mol_type = other DNA
tcagatgaaatccggtcagaagaactttttgcgaggtttgtatcatcaga

SEQ ID NO: 33645 - DNA, 50 bp, synthetic construct
  source 1..50: mol_type = other DNA
cttttggagatgccatgattctgatatccggattccacatccaacagaag

SEQ ID NO: 33646 - DNA, 50 bp, synthetic construct
  source 1..50: mol_type = other DNA
gagcttgaattgattgacttgtatcgagtataacaaagcagttctcgctg

SEQ ID NO: 33647 - DNA, 50 bp, synthetic construct
  source 1..50: mol_type = other DNA
ctgcggccttttcatttttgttgggaagaaagacctgcaagaggcggcag

SEQ ID NO: 33648 - DNA, 50 bp, synthetic construct
  source 1..50: mol_type = other DNA
gttttactgcggaaaagggcttgcatacaattccttttctgatgtatata

SEQ ID NO: 33649 - DNA, 50 bp, synthetic construct
  source 1..50: mol_type = other DNA
tgcattggtaaatcactcggcgatatgctgcccaaagataacccgcattt

SEQ ID NO: 33650 - DNA, 50 bp, synthetic construct
  source 1..50: mol_type = other DNA
agtgcctcttgcagtttctcccgccggtcgccaggctaacgcattggtag

SEQ ID NO: 33651 - DNA, 50 bp, synthetic construct
  source 1..50: mol_type = other DNA
ttttcagcggctttggaaagcgacatgcttgctcagaaaggcgctgtcta

SEQ ID NO: 33652 - DNA, 50 bp, synthetic construct
  source 1..50: mol_type = other DNA
gccgctttgattctgcagcaaaaatgactttgcagcagctcaaaaccatt

SEQ ID NO: 33653 - DNA, 50 bp, synthetic construct
  source 1..50: mol_type = other DNA
tgttgtttgttactttgacaattgtttaattgtaaaaataactgagcata

SEQ ID NO: 33654 - DNA, 50 bp, synthetic construct
  source 1..50: mol_type = other DNA
gaggaccccgggaagggaggacggtgccgtcctgcacgcgacgcaaaagc

SEQ ID NO: 33655 - DNA, 50 bp, synthetic construct
  source 1..50: mol_type = other DNA
ctagaaatcctggtggcaactatggccatcccggccaccatcagccgtta

SEQ ID NO: 33656 - DNA, 50 bp, synthetic construct
  source 1..50: mol_type = other DNA
gagaacagaagagatttcttatacgccaatgtccaatctctgttcttttg

SEQ ID NO: 33657 - DNA, 50 bp, synthetic construct
  source 1..50: mol_type = other DNA
ccatgatgcgccacttctgaaatttcaaaaagatcagtggtcaaacggct

SEQ ID NO: 33658 - DNA, 50 bp, synthetic construct
  source 1..50: mol_type = other DNA
ctctggatgtccgccccgatctcatcgtcatcctcggcggaatcactctc

SEQ ID NO: 33659 - DNA, 50 bp, synthetic construct
  source 1..50: mol_type = other DNA
aaattgtttttacagttagaaaatatacccagataaggtaaaaacattaa

SEQ ID NO: 33660 - DNA, 50 bp, synthetic construct
  source 1..50: mol_type = other DNA
gaaaggtatcgcagattgtacttgctgccgttcatatttttttacctaga

SEQ ID NO: 33661 - DNA, 50 bp, synthetic construct
  source 1..50: mol_type = other DNA
attttggcaaaatacgttccgaaagatttcggaaatcattttggccagct

SEQ ID NO: 33662 - DNA, 50 bp, synthetic construct
  source 1..50: mol_type = other DNA
cgacgctatgctaattttgtaacttaaagcgaacctgacacataggggat

SEQ ID NO: 33663 - DNA, 50 bp, synthetic construct
  source 1..50: mol_type = other DNA
tacacaagaataggaggaatgaaaattttccggcgacgctcctcggtgaa

SEQ ID NO: 33664 - DNA, 50 bp, synthetic construct
  source 1..50: mol_type = other DNA
atccgtcgagacgcgggcgtacccagcggtctgccttagaatcggcgacg

SEQ ID NO: 33665 - DNA, 50 bp, synthetic construct
  source 1..50: mol_type = other DNA
caccccatcgcagcaggctttcgccggtggaagcccgctggaatcaggtg

SEQ ID NO: 33666 - DNA, 50 bp, synthetic construct
  source 1..50: mol_type = other DNA
cttcatcaaaaatacggcagagaatcgttactgccgtattcttattgccg

SEQ ID NO: 33667 - DNA, 50 bp, synthetic construct
  source 1..50: mol_type = other DNA
taatgagcaagcttcaaaggtgcttaagtgtctggtgaccttcatcatta

SEQ ID NO: 33668 - DNA, 50 bp, synthetic construct
  source 1..50: mol_type = other DNA
caatgcaatacaaatataaatgataaatacctattgcttgaaatttctta

SEQ ID NO: 33669 - DNA, 50 bp, synthetic construct
  source 1..50: mol_type = other DNA
atgcattttattattattactgaattttctgtatccatattttccccttt

SEQ ID NO: 33670 - DNA, 50 bp, synthetic construct
  source 1..50: mol_type = other DNA
aggaagaatatattgttgttgataaaaatcaaaaacaatatatttattag

SEQ ID NO: 33671 - DNA, 50 bp, synthetic construct
  source 1..50: mol_type = other DNA
cttgtaatatataattatccctttaaaatcatttaaatatactataaaaa

SEQ ID NO: 33672 - DNA, 50 bp, synthetic construct
  source 1..50: mol_type = other DNA
taatgaagaaataatatttaaaggaaatcctaaaagccatttctctatta

SEQ ID NO: 33673 - DNA, 50 bp, synthetic construct
  source 1..50: mol_type = other DNA
taaaggctggcatgtgcatgttttacacggaatgcatgtttatgccctgg

SEQ ID NO: 33674 - DNA, 50 bp, synthetic construct
  source 1..50: mol_type = other DNA
aaaaaggtcttctgatattggaaatattctcagtatcagcggcctttgca

SEQ ID NO: 33675 - DNA, 50 bp, synthetic construct
  source 1..50: mol_type = other DNA
ctttgataactcccttaacagtgttaaaaacattaaataaataatcaaaa

SEQ ID NO: 33676 - DNA, 50 bp, synthetic construct
  source 1..50: mol_type = other DNA
tcataaatctgattgtatattttgtccaaaatccgtttgatctgctctgc

SEQ ID NO: 33677 - DNA, 50 bp, synthetic construct
  source 1..50: mol_type = other DNA
agcttctaatttatattttaatggcaacaacaagttattaatcttaattt

SEQ ID NO: 33678 - DNA, 50 bp, synthetic construct
  source 1..50: mol_type = other DNA
ttttatgaattgatgtaaaataactatataaagctaataaaataatataa

SEQ ID NO: 33679 - DNA, 50 bp, synthetic construct
  source 1..50: mol_type = other DNA
aaaaagttgaaatattaacagtagagtatttgagtcaattgttctatttc

SEQ ID NO: 33680 - DNA, 50 bp, synthetic construct
  source 1..50: mol_type = other DNA
gattacaacaacattagtaggagtattttccctttacttccatagctata

SEQ ID NO: 33681 - DNA, 50 bp, synthetic construct
  source 1..50: mol_type = other DNA
acacatttgctaacatttgattcacttaaatctaattcatcaaaaaaagt

SEQ ID NO: 33682 - DNA, 50 bp, synthetic construct
  source 1..50: mol_type = other DNA
atattccatgaaggggttgtgtgaatattaaagtcttcttcattaaatag

SEQ ID NO: 33683 - DNA, 50 bp, synthetic construct
  source 1..50: mol_type = other DNA
attattatatcaaaattaatattaataatcattaatttagatattctaaa

SEQ ID NO: 33684 - DNA, 50 bp, synthetic construct
  source 1..50: mol_type = other DNA
ttatattattttattagctttatatagttattttacatcaattcataaaa

SEQ ID NO: 33685 - DNA, 50 bp, synthetic construct
  source 1..50: mol_type = other DNA
atttgagaagtattgagggaataaaattcttgacagaatccgtcctgatg

SEQ ID NO: 33686 - DNA, 50 bp, synthetic construct
  source 1..50: mol_type = other DNA
caataccgcgcgttcgtcctctacaatccgaggacgaatgctacaatatc

SEQ ID NO: 33687 - DNA, 50 bp, synthetic construct
  source 1..50: mol_type = other DNA
tgtcctgaatgacttgatattacggctgtatcttggcgcaattctcgacc

SEQ ID NO: 33688 - DNA, 50 bp, synthetic construct
  source 1..50: mol_type = other DNA
gaaagtccccgatgtgacagtagatatcttggcgcaattctcgaccttta

SEQ ID NO: 33689 - DNA, 50 bp, synthetic construct
  source 1..50: mol_type = other DNA
tcagcgcaaaagacctaagccaagacggtgtacagggttttttcaatttc

SEQ ID NO: 33690 - DNA, 50 bp, synthetic construct
  source 1..50: mol_type = other DNA
agttcccccgcatcgtcttccacggggctggacgcaaagccatgtagcct

SEQ ID NO: 33691 - DNA, 50 bp, synthetic construct
  source 1..50: mol_type = other DNA
caaagaattaattgatacactatatgaacctcgataaattcattgatttt

SEQ ID NO: 33692 - DNA, 50 bp, synthetic construct
  source 1..50: mol_type = other DNA
agctgttggacgagggtattttgacgacaaattttccagcgcagacagca

SEQ ID NO: 33693 - DNA, 50 bp, synthetic construct
  source 1..50: mol_type = other DNA
actactattttattatacgaggtgattcctcactttataatagaagtgag

SEQ ID NO: 33694 - DNA, 50 bp, synthetic construct
  source 1..50: mol_type = other DNA
atgaaaataattatatagctcctgtacaggagcacattaaaaagatctat

SEQ ID NO: 33695 - DNA, 50 bp, synthetic construct
  source 1..50: mol_type = other DNA
ttttgtgttattcttaagatgcggaaaatcaagtggagtattacacaaaa

SEQ ID NO: 33696 - DNA, 50 bp, synthetic construct
  source 1..50: mol_type = other DNA
ccacaatggcattggaaggaaggctcgcctcgctttcaatgaggctgtac

SEQ ID NO: 33697 - DNA, 50 bp, synthetic construct
  source 1..50: mol_type = other DNA
gactgtgccattccggcgaggtaattcaaagtcgccggaatagccgttgt

SEQ ID NO: 33698 - DNA, 50 bp, synthetic construct
  source 1..50: mol_type = other DNA
aaggacatggaagaagaaccgtccgagttcttgattttttcatattcctt

SEQ ID NO: 33699 - DNA, 50 bp, synthetic construct
  source 1..50: mol_type = other DNA
tcttcccatgcgttccttgtaccaataatagcaagtacaatctgcgatac

SEQ ID NO: 33700 - DNA, 50 bp, synthetic construct
  source 1..50: mol_type = other DNA
gttatttacttgctatttcagctcttcagcaaagaagatatccgcataac

SEQ ID NO: 33701 - DNA, 50 bp, synthetic construct
  source 1..50: mol_type = other DNA
agcaatttttctaactgcgtgaatgagggcgaaaagtgggataaatggct

SEQ ID NO: 33702 - DNA, 50 bp, synthetic construct
  source 1..50: mol_type = other DNA
taccattttttagattggagttgatattaaggaatatatacccttctgtc

SEQ ID NO: 33703 - DNA, 50 bp, synthetic construct
  source 1..50: mol_type = other DNA
tccaaaacccgatgtcatctgtgaaacttcatatctggtaaacattcatt

SEQ ID NO: 33704 - DNA, 50 bp, synthetic construct
  source 1..50: mol_type = other DNA
gcaaaataaaattaaccgctcagttaataaagcatctaatttaatgataa

SEQ ID NO: 33705 - DNA, 50 bp, synthetic construct
  source 1..50: mol_type = other DNA
gaatagctcattatttgccgacattatggagggaagttacaaagataatg

SEQ ID NO: 33706 - DNA, 50 bp, synthetic construct
  source 1..50: mol_type = other DNA
atagaacaggacggagaacttttatagaaaaagactcggccagcttcttc

SEQ ID NO: 33707 - DNA, 50 bp, synthetic construct
  source 1..50: mol_type = other DNA
gccgggcgcgtgttccggcgctctgccacaatgcggtggctgcgcccggc

SEQ ID NO: 33708 - DNA, 50 bp, synthetic construct
  source 1..50: mol_type = other DNA
taggtatttaggttaaaactttcccgggcagtggtatgaatgcattcttc

SEQ ID NO: 33709 - DNA, 50 bp, synthetic construct
  source 1..50: mol_type = other DNA
gacggcgcatgatgatctatgaggcgtcacaagccggtgcatgcgcaggg

SEQ ID NO: 33710 - DNA, 50 bp, synthetic construct
  source 1..50: mol_type = other DNA
atccagctgccaaaatcccctttatcacgcggtccttttttgtcctctat

SEQ ID NO: 33711 - DNA, 50 bp, synthetic construct
  source 1..50: mol_type = other DNA
gataagcgattgcagcatagtaggatttattttaactgcaagaggctatt

SEQ ID NO: 33712 - DNA, 50 bp, synthetic construct
  source 1..50: mol_type = other DNA
cagttgttctatcttttcttttgcggacaaaaaaaaagaggagagctttt

SEQ ID NO: 33713 - DNA, 50 bp, synthetic construct
  source 1..50: mol_type = other DNA
ctatataaaaaagttagtaataaaaatttattcctacatttcctatgtct

SEQ ID NO: 33714 - DNA, 50 bp, synthetic construct
  source 1..50: mol_type = other DNA
ttttcgccgctgtaattgtaggttataaccggacattatcccgcgcagtt

SEQ ID NO: 33715 - DNA, 50 bp, synthetic construct
  source 1..50: mol_type = other DNA
cattgttatgatggcagccttattttttctttaatcatatcagattcggt

SEQ ID NO: 33716 - DNA, 50 bp, synthetic construct
  source 1..50: mol_type = other DNA
gttctcctatgagcacgacgacagctttttctgtccattcataggtgtct

SEQ ID NO: 33717 - DNA, 50 bp, synthetic construct
  source 1..50: mol_type = other DNA
cgagccgaagagcttaaagaactcgagatgtctataagctcaagctggtg

SEQ ID NO: 33718 - DNA, 50 bp, synthetic construct
  source 1..50: mol_type = other DNA
cgtaccgcggtcacagccgcagcggcgagtagccgtgtgaacgcatccac

SEQ ID NO: 33719 - DNA, 50 bp, synthetic construct
  source 1..50: mol_type = other DNA
gccatttgcatttttttattaaaatcgaaaaattaaaaaaagatttagaa

SEQ ID NO: 33720 - DNA, 50 bp, synthetic construct
  source 1..50: mol_type = other DNA
ttagatgagcagaaagagaaaaaagattctttcactcattgcctccctgc

SEQ ID NO: 33721 - DNA, 50 bp, synthetic construct
  source 1..50: mol_type = other DNA
gctttgtaacaacaaaaaagccttgaaattctcgcaggcatttacaaagg

SEQ ID NO: 33722 - DNA, 50 bp, synthetic construct
  source 1..50: mol_type = other DNA
agatgccccagagcagccagcttgacacagaccttatctcctgccatagc

SEQ ID NO: 33723 - DNA, 50 bp, synthetic construct
  source 1..50: mol_type = other DNA
gcatgtatcaaaaaactgccccagacctccttccgttttggtagtctata

SEQ ID NO: 33724 - DNA, 50 bp, synthetic construct
  source 1..50: mol_type = other DNA
tatgctgctcaggtagataagattagaatccggaggacctggaacgctgt

SEQ ID NO: 33725 - DNA, 50 bp, synthetic construct
  source 1..50: mol_type = other DNA
tgggcgtaagcccgatgcgccgggattgagtcgaatcgggctttgcccgc

SEQ ID NO: 33726 - DNA, 50 bp, synthetic construct
  source 1..50: mol_type = other DNA
ttcctcttcttcggtatcgccgatgcatctccgtaacggaaggcccaacg

SEQ ID NO: 33727 - DNA, 50 bp, synthetic construct
  source 1..50: mol_type = other DNA
actgaggtatcactaagcgtagccttaataaacataatcacagccctcct

SEQ ID NO: 33728 - DNA, 50 bp, synthetic construct
  source 1..50: mol_type = other DNA
ggcaaagttttctttggagtaaaatatgttatgtttcagaaaatcaaaga

SEQ ID NO: 33729 - DNA, 50 bp, synthetic construct
  source 1..50: mol_type = other DNA
cgcacttcatcaatatatggataaatttatcaagtaattagtgcggtaaa

SEQ ID NO: 33730 - DNA, 50 bp, synthetic construct
  source 1..50: mol_type = other DNA
aaataggtaaaccaaaagaataaattattgttcttttctttgcttcttct

SEQ ID NO: 33731 - DNA, 50 bp, synthetic construct
  source 1..50: mol_type = other DNA
tattattggtttataagtatatcatattattggcttttaacccttgacaa

SEQ ID NO: 33732 - DNA, 50 bp, synthetic construct
  source 1..50: mol_type = other DNA
ccccccccctttacaaaaaaaatttaaatggggtttgtatgagaaaaggg

SEQ ID NO: 33733 - DNA, 50 bp, synthetic construct
  source 1..50: mol_type = other DNA
gtatattatatcacgaaagcctccatcgtccgaagcgtaatcgtatataa

SEQ ID NO: 33734 - DNA, 50 bp, synthetic construct
  source 1..50: mol_type = other DNA
ttatttttgtacccatttttgcgtaacttagagaatgaatacaaaaatta

SEQ ID NO: 33735 - DNA, 50 bp, synthetic construct
  source 1..50: mol_type = other DNA
tgtgattatgtttattaaggctaagtttgatcttggtatttccaatcagg

SEQ ID NO: 33736 - DNA, 50 bp, synthetic construct
  source 1..50: mol_type = other DNA
atcaagccatattatatcatctgtaaggcgatgatgtaatatgcgttgat

SEQ ID NO: 33737 - DNA, 50 bp, synthetic construct
  source 1..50: mol_type = other DNA
cctcctgtgatttagtctttatataagtactaatactatctatgatctca

SEQ ID NO: 33738 - DNA, 50 bp, synthetic construct
  source 1..50: mol_type = other DNA
aattcggaagcatctttaatgccttccatgaatacaggggtttctgatat

SEQ ID NO: 33739 - DNA, 50 bp, synthetic construct
  source 1..50: mol_type = other DNA
atgcaaaaaaggaaaagcccaccggatacgcgcttttttgttttttgctg

SEQ ID NO: 33740 - DNA, 50 bp, synthetic construct
  source 1..50: mol_type = other DNA
aagaattggcacattgatgttggatatccaacatctatgtacctatgaat

SEQ ID NO: 33741 - DNA, 50 bp, synthetic construct
  source 1..50: mol_type = other DNA
aaatgtgcgtgttggctgtgttatttttgccgagaccagcacgctgtttt

SEQ ID NO: 33742 - DNA, 50 bp, synthetic construct
  source 1..50: mol_type = other DNA
agccgtggaagaagaaccgtctgatatccgtgtatccggctttcgctgct

SEQ ID NO: 33743 - DNA, 50 bp, synthetic construct
  source 1..50: mol_type = other DNA
aacttttattcacccattgatagatatcactctgaaagccaataatagca

SEQ ID NO: 33744 - DNA, 50 bp, synthetic construct
  source 1..50: mol_type = other DNA
ggtatgattctttttacaatcaaaaatttggtctacaaaatgatcatcgc

SEQ ID NO: 33745 - DNA, 50 bp, synthetic construct
  source 1..50: mol_type = other DNA
agtcccgctttgatgaactcctgacggctgtgccacgattaaagaggatg

SEQ ID NO: 33746 - DNA, 50 bp, synthetic construct
  source 1..50: mol_type = other DNA
aacactataatcatctggaataatcaatcattcctgaattgtacagtgcc

SEQ ID NO: 33747 - DNA, 50 bp, synthetic construct
  source 1..50: mol_type = other DNA
acgcctttccgacgatcccgatgtcaacatccagcgcctcagcaataccg

SEQ ID NO: 33748 - DNA, 50 bp, synthetic construct
  source 1..50: mol_type = other DNA
gacgttcctatggaatatcccaaaaagttgttcaattttataagcatccc

SEQ ID NO: 33749 - DNA, 50 bp, synthetic construct
  source 1..50: mol_type = other DNA
cgaagtaatcaactatattaaatttgtttacgtcatagacggtacctgcc

SEQ ID NO: 33750 - DNA, 50 bp, synthetic construct
  source 1..50: mol_type = other DNA
ccttttttagaaaaaatagaaaggttccattttctcttcctttccgccgg

SEQ ID NO: 33751 - DNA, 50 bp, synthetic construct
  source 1..50: mol_type = other DNA
ccccccgatttccgccacgtagagagctttgtccaagggatggacaaggc

SEQ ID NO: 33752 - DNA, 50 bp, synthetic construct
  source 1..50: mol_type = other DNA
catttccaaaagtgaagaaaccattcatggattctctggctttttcccga

SEQ ID NO: 33753 - DNA, 50 bp, synthetic construct
  source 1..50: mol_type = other DNA
cagaaaaggaggaacagcattatgaatataaatatcttttttgatttctc

SEQ ID NO: 33754 - DNA, 50 bp, synthetic construct
  source 1..50: mol_type = other DNA
tgcttcaaagctgtggagctggtcttcatcagcaattcctctttaaatca

SEQ ID NO: 33755 - DNA, 50 bp, synthetic construct
  source 1..50: mol_type = other DNA
tgaatcgttacatccagcgcagtcgtcggctcatccgcaatcaggatttc

SEQ ID NO: 33756 - DNA, 50 bp, synthetic construct
  source 1..50: mol_type = other DNA
ctattgaagagcttgcgggagacctcggacggtggccacagtatcatcag

SEQ ID NO: 33757 - DNA, 50 bp, synthetic construct
  source 1..50: mol_type = other DNA
ccaaattcttacaaatgtaactgatcacaggtgcaatatttaccatctgg

SEQ ID NO: 33758 - DNA, 50 bp, synthetic construct
  source 1..50: mol_type = other DNA
ggcaatgtgatttatgtggatttccgagcagcgacccaaggtgaattgcc

SEQ ID NO: 33759 - DNA, 50 bp, synthetic construct
  source 1..50: mol_type = other DNA
tcctcgccgtccgcacggtgctggcctgatatccttgacaacttgccgga

SEQ ID NO: 33760 - DNA, 50 bp, synthetic construct
  source 1..50: mol_type = other DNA
ggctataaaaaagaaatgcctgtgaccacctgtatttcctttcatttccc

SEQ ID NO: 33761 - DNA, 50 bp, synthetic construct
  source 1..50: mol_type = other DNA
ccggatcctgatcttgcagaggcttcagcttcgcacggtgtaggatccgg

SEQ ID NO: 33762 - DNA, 50 bp, synthetic construct
  source 1..50: mol_type = other DNA
tcatttttttgctctcaaaattcactctaattcggagagggctggaatga

SEQ ID NO: 33763 - DNA, 50 bp, synthetic construct
  source 1..50: mol_type = other DNA
caaggaagaaccctttgcaagctccaaatatggtaaaatgtacttaattc

SEQ ID NO: 33764 - DNA, 50 bp, synthetic construct
  source 1..50: mol_type = other DNA
tcaaccgggcagcttgataaggaggcattactccagagcaattctttagc

SEQ ID NO: 33765 - DNA, 50 bp, synthetic construct
  source 1..50: mol_type = other DNA
ttttgggatgtaacgaaaggagggtatccagctgagctacgaggccaata

SEQ ID NO: 33766 - DNA, 50 bp, synthetic construct
  source 1..50: mol_type = other DNA
ccaaaatacagatagatgccggtatcagccgggtttgaaagctatttaca

SEQ ID NO: 33767 - DNA, 50 bp, synthetic construct
  source 1..50: mol_type = other DNA
cgtatttgtgaacagaaagagggcgggcggcgattattccgaagaaaaca

SEQ ID NO: 33768 - DNA, 50 bp, synthetic construct
  source 1..50: mol_type = other DNA
gcggcagcgcaaggctccatctccgcgggcagccagcagcagaaggcagc

SEQ ID NO: 33769 - DNA, 50 bp, synthetic construct
  source 1..50: mol_type = other DNA
aaattccagccagttttgggtggtattccacgccattctcttttagcttt

SEQ ID NO: 33770 - DNA, 50 bp, synthetic construct
  source 1..50: mol_type = other DNA
aggaaggcggcagaaaggaggcttgcaagctgtttttcttccgcagaaca

SEQ ID NO: 33771 - DNA, 50 bp, synthetic construct
  source 1..50: mol_type = other DNA
tgcaatcccccacaaaagaaaaaagctttcttcctgcgccaacgaggaca

SEQ ID NO: 33772 - DNA, 50 bp, synthetic construct
  source 1..50: mol_type = other DNA
gcaagtttctcaagccgagcttcaaatgccgctctgccgtggagccgtct

SEQ ID NO: 33773 - DNA, 50 bp, synthetic construct
  source 1..50: mol_type = other DNA
cgcgggcgtaagccgccacccgccggcgaggttgacggggatcatattac

SEQ ID NO: 33774 - DNA, 50 bp, synthetic construct
  source 1..50: mol_type = other DNA
acgatgcttcaagaggctctctgcccgcctcccgccttgcgttccacgcg

SEQ ID NO: 33775 - DNA, 50 bp, synthetic construct
  source 1..50: mol_type = other DNA
cagagggcgcgcggccgcatagcgccatctcccgcagcgcgcggcctgtg

SEQ ID NO: 33776 - DNA, 50 bp, synthetic construct
  source 1..50: mol_type = other DNA
tttacagtaaatttatctactttaaagaatatatatactaccattgtaca

SEQ ID NO: 33777 - DNA, 50 bp, synthetic construct
  source 1..50: mol_type = other DNA
atagaggatgacgcctgctttctgggcaattcgcccggcttttgttgtcc

SEQ ID NO: 33778 - DNA, 50 bp, synthetic construct
  source 1..50: mol_type = other DNA
gcaccctatattatagcaaagaaggccttttttaatgccttaactattgc

SEQ ID NO: 33779 - DNA, 50 bp, synthetic construct
  source 1..50: mol_type = other DNA
acatcccatctgtatgaagtcggcgacacgatatcattataataccatgt

SEQ ID NO: 33780 - DNA, 50 bp, synthetic construct
  source 1..50: mol_type = other DNA
gaaacattactgttataccagcaaagaggctgtaagactgtttatgttta

SEQ ID NO: 33781 - DNA, 50 bp, synthetic construct
  source 1..50: mol_type = other DNA
atacgtggtaagctgagtcctgggggcccattttatacctcgcgccgcgc

SEQ ID NO: 33782 - DNA, 50 bp, synthetic construct
  source 1..50: mol_type = other DNA
gtttttcatcgatgaccgcccggccaccccttcgtgcatcatgctcagac

SEQ ID NO: 33783 - DNA, 50 bp, synthetic construct
  source 1..50: mol_type = other DNA
gttgcagcgataattaatgaacgacctttttcactgcaggtatggtaaag

SEQ ID NO: 33784 - DNA, 50 bp, synthetic construct
  source 1..50: mol_type = other DNA
acaaaactcctcgaaaaatatcgcccaacatatttacgcaggcgttgttt

SEQ ID NO: 33785 - DNA, 50 bp, synthetic construct
  source 1..50: mol_type = other DNA
tcaaatggtgtcctttcttctataataattaaaaaatgcacaccctttga

SEQ ID NO: 33786 - DNA, 50 bp, synthetic construct
  source 1..50: mol_type = other DNA
atacatttttacaagcgatgaagacgttgtggacgcttccgctaatgtgc

SEQ ID NO: 33787 - DNA, 50 bp, synthetic construct
  source 1..50: mol_type = other DNA
tattcatcgagaaatagcgggatattcatcccgaaatttccttcaaaagc

SEQ ID NO: 33788 - DNA, 50 bp, synthetic construct
  source 1..50: mol_type = other DNA
gcaattcaattatcaaccgctgaagctataaaggcccgcaataaaatgct

SEQ ID NO: 33789 - DNA, 50 bp, synthetic construct
  source 1..50: mol_type = other DNA
cgcagcatccacgccgtggcgctggacagcgcagcggatgcagaacgcaa

SEQ ID NO: 33790 - DNA, 50 bp, synthetic construct
  source 1..50: mol_type = other DNA
tgtgtggtcgttatttttgtacccatacatggaaaaatggcgatgacatc

SEQ ID NO: 33791 - DNA, 50 bp, synthetic construct
  source 1..50: mol_type = other DNA
ttttcctcctttttggttttgagtgtactaactggtgaaccccaaatcct

SEQ ID NO: 33792 - DNA, 50 bp, synthetic construct
  source 1..50: mol_type = other DNA
tggatacccacccgcaggatccggatcacactcctatgttattgtattta

SEQ ID NO: 33793 - DNA, 50 bp, synthetic construct
  source 1..50: mol_type = other DNA
taagagatccagcaaagacccgaacattttggcgtttttccataggtttt

SEQ ID NO: 33794 - DNA, 50 bp, synthetic construct
  source 1..50: mol_type = other DNA
tttaaccacataagcaaagatattatctcatatttcaccaaaatatgcaa

SEQ ID NO: 33795 - DNA, 50 bp, synthetic construct
  source 1..50: mol_type = other DNA
tcgttaaataacagtcaaaacattaaataatttttattgatatttattga

SEQ ID NO: 33796 - DNA, 50 bp, synthetic construct
  source 1..50: mol_type = other DNA
cctccttgtcttttgtctaaaataacttatagcaacgattatgaaggata

SEQ ID NO: 33797 - DNA, 50 bp, synthetic construct
  source 1..50: mol_type = other DNA
cgaagccaacaatcttgttgttcgcaaggaaaacaatattgtcgttttcc

SEQ ID NO: 33798 - DNA, 50 bp, synthetic construct
  source 1..50: mol_type = other DNA
ttttatttgtcataaggagcgaacattacatactctgtcaagaaataaag

SEQ ID NO: 33799 - DNA, 50 bp, synthetic construct
  source 1..50: mol_type = other DNA
ccgggtgccgaaaaacgcgccgtggtaccggcgcgcagaagggtcgccgc

SEQ ID NO: 33800 - DNA, 50 bp, synthetic construct
  source 1..50: mol_type = other DNA
acctcgcggatggaaccatgacaccagtggagcgcactcatcgaccacgc

SEQ ID NO: 33801 - DNA, 50 bp, synthetic construct
  source 1..50: mol_type = other DNA
atgcatatgactgtggttcatctcatgaaagataataacagttaagacat

SEQ ID NO: 33802 - DNA, 50 bp, synthetic construct
  source 1..50: mol_type = other DNA
cagggcctggtttttttactgaaacgttatggctaatgctacaatgccga

SEQ ID NO: 33803 - DNA, 50 bp, synthetic construct
  source 1..50: mol_type = other DNA
gttgactgcatctgccgccgccgacctttagtgttcctgatttcttctgg

SEQ ID NO: 33804 - DNA, 50 bp, synthetic construct
  source 1..50: mol_type = other DNA
gctaacaggagagcaatgaaaggaagtctgaatccatatctcatggatct

SEQ ID NO: 33805 - DNA, 50 bp, synthetic construct
  source 1..50: mol_type = other DNA
atgcgccggtccagaacagcaaccgtgtttttttaactgttttggcagta

SEQ ID NO: 33806 - DNA, 50 bp, synthetic construct
  source 1..50: mol_type = other DNA
cgcagtctccgcagatcagtttacttcataactaatcttcgcctggcacg

SEQ ID NO: 33807 - DNA, 50 bp, synthetic construct
  source 1..50: mol_type = other DNA
tgccgtcctttcgtatactatgggaagaaattatttgtaaaaggaaagca

SEQ ID NO: 33808 - DNA, 50 bp, synthetic construct
  source 1..50: mol_type = other DNA
accgctgattcgtcccgcagcgccactccactacaaccacgattagcggc

SEQ ID NO: 33809 - DNA, 50 bp, synthetic construct
  source 1..50: mol_type = other DNA
ggagagctcgggtggcggggattgctaccagaagaagtcccgcgcactcg

SEQ ID NO: 33810 - DNA, 50 bp, synthetic construct
  source 1..50: mol_type = other DNA
aactcgaaacttccaggaattgagacctccgtgactcgaagttcctcgtt

SEQ ID NO: 33811 - DNA, 50 bp, synthetic construct
  source 1..50: mol_type = other DNA
ccgatctacaacgcgaagaccaaggatccgtcctttcatttgtcgatggg

SEQ ID NO: 33812 - DNA, 50 bp, synthetic construct
  source 1..50: mol_type = other DNA
tttgccccaaaatgtagggcaaaccttttcagtttacatttatcggtagt

SEQ ID NO: 33813 - DNA, 50 bp, synthetic construct
  source 1..50: mol_type = other DNA
tcttctgatactgttctgtctctggaatcctccagaacggagaaaataaa

SEQ ID NO: 33814 - DNA, 50 bp, synthetic construct
  source 1..50: mol_type = other DNA
tagagtgatgtatatacaagtgaaatctcacttttgtcaacaattttcag

SEQ ID NO: 33815 - DNA, 50 bp, synthetic construct
  source 1..50: mol_type = other DNA
ccaatagcatttaggcttggcagcataactgcggccactacttttattgt

SEQ ID NO: 33816 - DNA, 50 bp, synthetic construct
  source 1..50: mol_type = other DNA
catatgtttatgatttcttatcaaaaatgatgttattcgataaacatcgc

SEQ ID NO: 33817 - DNA, 50 bp, synthetic construct
  source 1..50: mol_type = other DNA
gcgatcgtgcgcgcactgtctctgtacattcgcttatagcggtcgattat

SEQ ID NO: 33818 - DNA, 50 bp, synthetic construct
  source 1..50: mol_type = other DNA
gggagaaaatgccggatgaaatcatgaagcacaggtcgattattacacca

SEQ ID NO: 33819 - DNA, 50 bp, synthetic construct
  source 1..50: mol_type = other DNA
atggaattcaaggaaccggaccttatgtcggacggttcttcttccatgtc

SEQ ID NO: 33820 - DNA, 50 bp, synthetic construct
  source 1..50: mol_type = other DNA
ggaaataaaaggaaattgacaagaattcctgtcgatttggcattatttct

SEQ ID NO: 33821 - DNA, 50 bp, synthetic construct
  source 1..50: mol_type = other DNA
tccaagtcgttttattatatcatattttctttttaataatttcaactggc

SEQ ID NO: 33822 - DNA, 50 bp, synthetic construct
  source 1..50: mol_type = other DNA
gaggtgacccgcagggcagcccgggcaacaacggctgtggctgtgacaac

SEQ ID NO: 33823 - DNA, 50 bp, synthetic construct
  source 1..50: mol_type = other DNA
gataataccaaatcccgcaaatttagttctttgcgttgcttacggataat

SEQ ID NO: 33824 - DNA, 50 bp, synthetic construct
  source 1..50: mol_type = other DNA
cagttgacagttgacacagcattctactgccgtgtgtcaacggatcagga

SEQ ID NO: 33825 - DNA, 50 bp, synthetic construct
  source 1..50: mol_type = other DNA
atcgaaattcaaagggatggtagtttgctaccaatgctggaaaaataacg

SEQ ID NO: 33826 - DNA, 50 bp, synthetic construct
  source 1..50: mol_type = other DNA
cgttctggagcagctctccggttccaagaccggcaagctgctccagaacc

SEQ ID NO: 33827 - DNA, 50 bp, synthetic construct
  source 1..50: mol_type = other DNA
ctttcagagtgatatatagactacccactgcaaatatatcttcctgcgga

SEQ ID NO: 33828 - DNA, 50 bp, synthetic construct
  source 1..50: mol_type = other DNA
cgtgaactgctccagacactaaggcaggatggtgtctggaacccttgttc

SEQ ID NO: 33829 - DNA, 50 bp, synthetic construct
  source 1..50: mol_type = other DNA
aatacaacttcggtttttccaccgtccttggcataaactgaaaaaaatac

SEQ ID NO: 33830 - DNA, 50 bp, synthetic construct
  source 1..50: mol_type = other DNA
gcttctttattacggccttgcccacctttccaaggtggcgatacaaaaga

SEQ ID NO: 33831 - DNA, 50 bp, synthetic construct
  source 1..50: mol_type = other DNA
aaacgatggaaagaccgctccagagctgtctgcgtaaatttccgcagaac

SEQ ID NO: 33832 - DNA, 50 bp, synthetic construct
  source 1..50: mol_type = other DNA
cgctccagagcagaaagctggacgccattccaagcaatagctggagaacg

SEQ ID NO: 33833 - DNA, 50 bp, synthetic construct
  source 1..50: mol_type = other DNA
ctgttctgggtcgatgactagatttctggcataatctccacccaaaatgg

SEQ ID NO: 33834 - DNA, 50 bp, synthetic construct
  source 1..50: mol_type = other DNA
tgtataatactcgacctgtgcctcaagtacggtcggcagtgtattacaca

SEQ ID NO: 33835 - DNA, 50 bp, synthetic construct
  source 1..50: mol_type = other DNA
aaatacacaacatttaaaggaggaaatgatacttgaaatgaattcccgca

SEQ ID NO: 33836 - DNA, 50 bp, synthetic construct
  source 1..50: mol_type = other DNA
ttcttttttagttggcggtttagtatctgactccggaacagatcaaagaa

SEQ ID NO: 33837 - DNA, 50 bp, synthetic construct
  source 1..50: mol_type = other DNA
tttcagggaacttatacacttgataattatatcatatattttctatgaaa

SEQ ID NO: 33838 - DNA, 50 bp, synthetic construct
  source 1..50: mol_type = other DNA
tccttggaattcccgaatttgatgcgggtcaaagaggaggcctgaggagc

SEQ ID NO: 33839 - DNA, 50 bp, synthetic construct
  source 1..50: mol_type = other DNA
caaattattacaaggtatatttgcagcttagctcaactttttaatattta

SEQ ID NO: 33840 - DNA, 50 bp, synthetic construct
  source 1..50: mol_type = other DNA
ctcaatccgaaaaaactgctcgacacgtctgatccttttttcgcattctg

SEQ ID NO: 33841 - DNA, 50 bp, synthetic construct
  source 1..50: mol_type = other DNA
gccgtaaggcaggtgtcctcttcctccatgagggtcgggacatttactgc

SEQ ID NO: 33842 - DNA, 50 bp, synthetic construct
  source 1..50: mol_type = other DNA
ttaacttatattccaacgattgtaatataaatggctggtatattaatttt

SEQ ID NO: 33843 - DNA, 50 bp, synthetic construct
  source 1..50: mol_type = other DNA
tttataatttttttctgaggtgaattggtttcttgataaatcattgtatt

SEQ ID NO: 33844 - DNA, 50 bp, synthetic construct
  source 1..50: mol_type = other DNA
atcttccttactcatagctgtccgtattcctgcccatcagcaaaaaggaa

SEQ ID NO: 33845 - DNA, 50 bp, synthetic construct
  source 1..50: mol_type = other DNA
ctgtaagtgtaaggcaattattccttacagtaagttcgtgttacttaata

SEQ ID NO: 33846 - DNA, 50 bp, synthetic construct
  source 1..50: mol_type = other DNA
tagcagtctatcccagcttttttagctaaaaaaggagagaaagtttggcg

SEQ ID NO: 33847 - DNA, 50 bp, synthetic construct
  source 1..50: mol_type = other DNA
ggcatcacgcgagattcaccaatcgagatcatctggattcgcgtcgtggg

SEQ ID NO: 33848 - DNA, 50 bp, synthetic construct
  source 1..50: mol_type = other DNA
ttatgggttgctagttttgtttttgtacagcaaagacttgcaacgcatac

SEQ ID NO: 33849 - DNA, 50 bp, synthetic construct
  source 1..50: mol_type = other DNA
aatcatatgattaattggaggtgacggcagcagcaaaaaacgatatgctc

SEQ ID NO: 33850 - DNA, 50 bp, synthetic construct
  source 1..50: mol_type = other DNA
gtaagaaaactaaccaaactagatatatctattccagatgcttttaaatc

SEQ ID NO: 33851 - DNA, 50 bp, synthetic construct
  source 1..50: mol_type = other DNA
aggctacatggctttgcgtccagccccgtggaagacgatgcgggggaact

SEQ ID NO: 33852 - DNA, 50 bp, synthetic construct
  source 1..50: mol_type = other DNA
tcattgacctcagcaagctggctcatcaggacccaaaacgccctcaatgc

SEQ ID NO: 33853 - DNA, 50 bp, synthetic construct
  source 1..50: mol_type = other DNA
ggaagtttccgtgacagtcgccagtcttggcggtggtaaacctcacttgg

SEQ ID NO: 33854 - DNA, 50 bp, synthetic construct
  source 1..50: mol_type = other DNA
gcggcaagaggaaaaactattgcgatcgcacagtacactactccggaggc

SEQ ID NO: 33855 - DNA, 50 bp, synthetic construct
  source 1..50: mol_type = other DNA
caattgtggacttgagttatgacaaaatccacctctcgattccggcattt

SEQ ID NO: 33856 - DNA, 50 bp, synthetic construct
  source 1..50: mol_type = other DNA
aaatatttcggatatacagttagtgtttccaagggcaagcccaccaattc

SEQ ID NO: 33857 - DNA, 50 bp, synthetic construct
  source 1..50: mol_type = other DNA
ttctaagccgtgtgtcgagtgttcgagaacaaatcgcctacgatgcacat

SEQ ID NO: 33858 - DNA, 50 bp, synthetic construct
  source 1..50: mol_type = other DNA
tgaaaacggtcacgctatgcttacaactaagccctgcttttcttcttttc

SEQ ID NO: 33859 - DNA, 50 bp, synthetic construct
  source 1..50: mol_type = other DNA
aaaccgcaccagctctgcctcctccgcaggagccggagccgctgccccag

SEQ ID NO: 33860 - DNA, 50 bp, synthetic construct
  source 1..50: mol_type = other DNA
tgttcgggaaagtattttggtttgaaccggacaaatgtattttagtacga

SEQ ID NO: 33861 - DNA, 50 bp, synthetic construct
  source 1..50: mol_type = other DNA
tccttcaaagacatcgttcatcactcgtcctttccgatgatctgtccgtt

SEQ ID NO: 33862 - DNA, 50 bp, synthetic construct
  source 1..50: mol_type = other DNA
gtatatttcgtcgttttgcgaatagctatgaacaaaacggagaaaaatca

SEQ ID NO: 33863 - DNA, 50 bp, synthetic construct
  source 1..50: mol_type = other DNA
aggatcttgccgacccatgtgaggatacaagtcaatcaattcaagctcct

SEQ ID NO: 33864 - DNA, 50 bp, synthetic construct
  source 1..50: mol_type = other DNA
tcgaaaaataccgaccatatttgggtccaagccagcatgtttcctttgga

SEQ ID NO: 33865 - DNA, 50 bp, synthetic construct
  source 1..50: mol_type = other DNA
caatgagtgagagaatcaagaaaatattttcgagttttcattcatcaaca

SEQ ID NO: 33866 - DNA, 50 bp, synthetic construct
  source 1..50: mol_type = other DNA
ttctgaaaagctcaaactctttgaagccgaagtcatcaggggcatcttct

SEQ ID NO: 33867 - DNA, 50 bp, synthetic construct
  source 1..50: mol_type = other DNA
catcatcagcgaaggagcctcagaactctgggtttccagcgaagaagtca

SEQ ID NO: 33868 - DNA, 50 bp, synthetic construct
  source 1..50: mol_type = other DNA
aaattctcgccggcaatcgcaaagatgctttcagatggcggcgagtgttt

SEQ ID NO: 33869 - DNA, 50 bp, synthetic construct
  source 1..50: mol_type = other DNA
cacccggacaagctcgccgatcgcataaggcactcggaattttccgggtg

SEQ ID NO: 33870 - DNA, 50 bp, synthetic construct
  source 1..50: mol_type = other DNA
gtgatgtacgggttgtattcctgtgtgctgggactcagatacacgcttgg

SEQ ID NO: 33871 - DNA, 50 bp, synthetic construct
  source 1..50: mol_type = other DNA
tttttgacgagctgcggggcgaagccattccgctcaactctcttcaaaaa

SEQ ID NO: 33872 - DNA, 50 bp, synthetic construct
  source 1..50: mol_type = other DNA
tcttggtcaacagagatgaggcatgaaggggccgatggtcgaaaccttgc

SEQ ID NO: 33873 - DNA, 50 bp, synthetic construct
  source 1..50: mol_type = other DNA
gctcatccgaagaatgattgagtacctcctttatgatcctgtttattatc

SEQ ID NO: 33874 - DNA, 50 bp, synthetic construct
  source 1..50: mol_type = other DNA
attatatctattcatatactttttgtaaatgatatcgtcataggtgaatt

SEQ ID NO: 33875 - DNA, 50 bp, synthetic construct
  source 1..50: mol_type = other DNA
agaagaattgtatcgtatctttgatatcgaagccggcatatttacagact

SEQ ID NO: 33876 - DNA, 50 bp, synthetic construct
  source 1..50: mol_type = other DNA
tcgacatctaacggtgcaacaacaaaggtctctgaaccactttttgtcaa

SEQ ID NO: 33877 - DNA, 50 bp, synthetic construct
  source 1..50: mol_type = other DNA
ttaaaaggtgcaacgctcatttttacagtgatgagcagttcaccagttat

SEQ ID NO: 33878 - DNA, 50 bp, synthetic construct
  source 1..50: mol_type = other DNA
aggatcccggccagcccgaaaagccggcttttttctttgccgaggaataa

SEQ ID NO: 33879 - DNA, 50 bp, synthetic construct
  source 1..50: mol_type = other DNA
gacgacctctacggtctacaccaagtgtcgtcttgtccgtcttgtaggcg

SEQ ID NO: 33880 - DNA, 50 bp, synthetic construct
  source 1..50: mol_type = other DNA
ggcagggaacatatctcgcgccgcatcaatagcgacaaaccgagcatgat

SEQ ID NO: 33881 - DNA, 50 bp, synthetic construct
  source 1..50: mol_type = other DNA
ggcattcatgatggtatgcagcaccggtactccatgccatatccggagct

SEQ ID NO: 33882 - DNA, 50 bp, synthetic construct
  source 1..50: mol_type = other DNA
catgaattccttgagaataaggtgtcagaattatctttccagaccgaatg

SEQ ID NO: 33883 - DNA, 50 bp, synthetic construct
  source 1..50: mol_type = other DNA
aagtataatagttttatggatgatttgcaatcaagactattagctaacta

SEQ ID NO: 33884 - DNA, 50 bp, synthetic construct
  source 1..50: mol_type = other DNA
aagacaattttgtcttctaaggtgctcaaattagaaagggcgatcctctc

SEQ ID NO: 33885 - DNA, 50 bp, synthetic construct
  source 1..50: mol_type = other DNA
aatgacaaaacggaaaattggtgttactgcctccatttcgttttgggttt

SEQ ID NO: 33886 - DNA, 50 bp, synthetic construct
  source 1..50: mol_type = other DNA
tgctttttatggcaatgtgagtgataccaatggcataatcccaagctgca

SEQ ID NO: 33887 - DNA, 50 bp, synthetic construct
  source 1..50: mol_type = other DNA
tgctatttggggcgaaaagagtgatgccattcttttttcctccaatctga

SEQ ID NO: 33888 - DNA, 50 bp, synthetic construct
  source 1..50: mol_type = other DNA
ctcctcagccagatggcgaaggaattctccgatggattgaaaatgtggaa

SEQ ID NO: 33889 - DNA, 50 bp, synthetic construct
  source 1..50: mol_type = other DNA
cttgaaaaataccggccaactctgggtacagacagtgaggaattgaaatc

SEQ ID NO: 33890 - DNA, 50 bp, synthetic construct
  source 1..50: mol_type = other DNA
ccaaagggtataaagccagaccccaccctttttggatttgaaccctcccc

SEQ ID NO: 33891 - DNA, 50 bp, synthetic construct
  source 1..50: mol_type = other DNA
atccgttcttcaaatcaaataattataattagttattttgtgcaacattg

SEQ ID NO: 33892 - DNA, 50 bp, synthetic construct
  source 1..50: mol_type = other DNA
taagtctatgggtatgtaagtttcttatccactacttaatgatagagttg

SEQ ID NO: 33893 - DNA, 50 bp, synthetic construct
  source 1..50: mol_type = other DNA
atataatcaacgctatggtaggaacattcttactcattgtcgttttcctc

SEQ ID NO: 33894 - DNA, 50 bp, synthetic construct
  source 1..50: mol_type = other DNA
ttgcttttataaatgctaaaaatgatcaactttagcattaatatttccaa

SEQ ID NO: 33895 - DNA, 50 bp, synthetic construct
  source 1..50: mol_type = other DNA
tatagactacccaaagagaaaggagttcatatttttttacccaggatact

SEQ ID NO: 33896 - DNA, 50 bp, synthetic construct
  source 1..50: mol_type = other DNA
ttaccgtcatggaatttcttacggatgccaaagtcatcctttgattcaag

SEQ ID NO: 33897 - DNA, 50 bp, synthetic construct
  source 1..50: mol_type = other DNA
ggatgtggacaatggttctggccatactccgcaaaagcgtggccacttcc

SEQ ID NO: 33898 - DNA, 50 bp, synthetic construct
  source 1..50: mol_type = other DNA
tgggtgtcgccggtgatatagatcatgctccataaagactgtcttttatg

SEQ ID NO: 33899 - DNA, 50 bp, synthetic construct
  source 1..50: mol_type = other DNA
acgatttgctgtttctggcgcataaataccaaccaaaaacagcccccaaa

SEQ ID NO: 33900 - DNA, 50 bp, synthetic construct
  source 1..50: mol_type = other DNA
gagtttcaccactctgtttcaatagcttttgaagcaggaggactccacac

SEQ ID NO: 33901 - DNA, 50 bp, synthetic construct
  source 1..50: mol_type = other DNA
acatgatcacaagcagccccagaaagcaacggtgcggtttgagacgatgc

SEQ ID NO: 33902 - DNA, 50 bp, synthetic construct
  source 1..50: mol_type = other DNA
acatcggcggcaagctgtccagtaataccagccctgccactcgccgtaga

SEQ ID NO: 33903 - DNA, 50 bp, synthetic construct
  source 1..50: mol_type = other DNA
attaaactgaaagagaaggctggcctgcagaatttcttcatttgtttttt

SEQ ID NO: 33904 - DNA, 50 bp, synthetic construct
  source 1..50: mol_type = other DNA
ttttcataaacggaatcttccttattgcttctccatcggctttgtggaaa

SEQ ID NO: 33905 - DNA, 50 bp, synthetic construct
  source 1..50: mol_type = other DNA
atccggtatccatatggtgtatgtcccatctctttatatggatctattcc

SEQ ID NO: 33906 - DNA, 50 bp, synthetic construct
  source 1..50: mol_type = other DNA
agcggatagcccgattcgcgctgaatcataactttttcgaggtccgcgct

SEQ ID NO: 33907 - DNA, 50 bp, synthetic construct
  source 1..50: mol_type = other DNA
cacttgtcagatatcatttttaaatttttataaagattatcttcaatatg

SEQ ID NO: 33908 - DNA, 50 bp, synthetic construct
  source 1..50: mol_type = other DNA
ggaatactgagtattttcaataatggtctaatgagagtattagttgctta

SEQ ID NO: 33909 - DNA, 50 bp, synthetic construct
  source 1..50: mol_type = other DNA
tgattgatttgtatagcaagcctcaaaagtttttaatgaacaatatatta

SEQ ID NO: 33910 - DNA, 50 bp, synthetic construct
  source 1..50: mol_type = other DNA
aaaatttaaaaaatataaatttatttgcatatcgtatttttttaaaatcc

SEQ ID NO: 33911 - DNA, 50 bp, synthetic construct
  source 1..50: mol_type = other DNA
ttctcctggtccggatttgttgcaatagcgaaaaatctagtttagaagaa

SEQ ID NO: 33912 - DNA, 50 bp, synthetic construct
  source 1..50: mol_type = other DNA
tattgctcacttatgatggaacttatcaattccatcataagtgtgctatt

SEQ ID NO: 33913 - DNA, 50 bp, synthetic construct
  source 1..50: mol_type = other DNA
cacagaaaatgtaagagagttgtgaactatattatcttaatttttgtgtg

SEQ ID NO: 33914 - DNA, 50 bp, synthetic construct
  source 1..50: mol_type = other DNA
tgtatcacatttccttggcacctgtacagttgagttcgaaccaggagcca

SEQ ID NO: 33915 - DNA, 50 bp, synthetic construct
  source 1..50: mol_type = other DNA
tcagaaagcaacttctgaccgcttctcccgggatctcctgtgctttgctc

SEQ ID NO: 33916 - DNA, 50 bp, synthetic construct
  source 1..50: mol_type = other DNA
gtggatactctcatataaatataacatttgttttatataatcgcccttct

SEQ ID NO: 33917 - DNA, 50 bp, synthetic construct
  source 1..50: mol_type = other DNA
cgccaccatgaatccatacatacaattgtaatcatggttgaatccatgtc

SEQ ID NO: 33918 - DNA, 50 bp, synthetic construct
  source 1..50: mol_type = other DNA
caatttgctgcaatggcacttatttgtatgattatcatgcaaaaaaggtg

SEQ ID NO: 33919 - DNA, 50 bp, synthetic construct
  source 1..50: mol_type = other DNA
cggatgagccagagtcagaagaagaaggacttctgcaatttcctcatccg

SEQ ID NO: 33920 - DNA, 50 bp, synthetic construct
  source 1..50: mol_type = other DNA
caaaactgtggagctggtcttcctgatggaatccggctcccacaggtgtg

SEQ ID NO: 33921 - DNA, 50 bp, synthetic construct
  source 1..50: mol_type = other DNA
tcgggaagatagaaatgtggtatgggtttcccacatttccaacagttcgt

SEQ ID NO: 33922 - DNA, 50 bp, synthetic construct
  source 1..50: mol_type = other DNA
tgatgctatgtttatggtaaccagtactggttaccataactgttggtgac

SEQ ID NO: 33923 - DNA, 50 bp, synthetic construct
  source 1..50: mol_type = other DNA
actgcgcccatccactcccatacgtttttatgggcgcgggtggattacgc

SEQ ID NO: 33924 - DNA, 50 bp, synthetic construct
  source 1..50: mol_type = other DNA
tccattaggatagtgtcagttagtgcactaactgacactatccattaggt

SEQ ID NO: 33925 - DNA, 50 bp, synthetic construct
  source 1..50: mol_type = other DNA
gttatttttgcacccttttttgcgtatgcagaaaaggcagcaaaagcaag

SEQ ID NO: 33926 - DNA, 50 bp, synthetic construct
  source 1..50: mol_type = other DNA
tgacctagattctatcggaatgatttatattaccgataacatcatggtac

SEQ ID NO: 33927 - DNA, 50 bp, synthetic construct
  source 1..50: mol_type = other DNA
cttataagtatatcgcatttcccatatgaagaccgagagataacggaccg

SEQ ID NO: 33928 - DNA, 50 bp, synthetic construct
  source 1..50: mol_type = other DNA
acccactcatataccacctcaaattcattttccagcgcatgaaggttata

SEQ ID NO: 33929 - DNA, 50 bp, synthetic construct
  source 1..50: mol_type = other DNA
atcacgcccttgtttattctcgtaggcggtgagcaggacccgtgcgagat

SEQ ID NO: 33930 - DNA, 50 bp, synthetic construct
  source 1..50: mol_type = other DNA
tcctggttatttttgtgcccgacatttgttgagcacagaccacacaattt

SEQ ID NO: 33931 - DNA, 50 bp, synthetic construct
  source 1..50: mol_type = other DNA
aagtgggccttcaatgcagcttttgaagaagctgcagctaaggtacgaca

SEQ ID NO: 33932 - DNA, 50 bp, synthetic construct
  source 1..50: mol_type = other DNA
attaccacacgttttcctttcggaaggatgaaaagaaaccaagggggaag

SEQ ID NO: 33933 - DNA, 50 bp, synthetic construct
  source 1..50: mol_type = other DNA
tttttgtactctttttactatgtattgccataggtttttccatggcggat

SEQ ID NO: 33934 - DNA, 50 bp, synthetic construct
  source 1..50: mol_type = other DNA
caaaagaaagtatatgttataatttggataaaagtgaatatgttattttt

SEQ ID NO: 33935 - DNA, 50 bp, synthetic construct
  source 1..50: mol_type = other DNA
tatatagactaccaaaacggaaggagccgtcaaacatattgatctgtaag

SEQ ID NO: 33936 - DNA, 50 bp, synthetic construct
  source 1..50: mol_type = other DNA
ggaaacagaaacgactgttgcagaaatggatatctccggaatccatgtcc

SEQ ID NO: 33937 - DNA, 50 bp, synthetic construct
  source 1..50: mol_type = other DNA
ctcggcagcaactttgacagcgtggcgacgctgtcacgcttcacggcggc

SEQ ID NO: 33938 - DNA, 50 bp, synthetic construct
  source 1..50: mol_type = other DNA
accgaggaacggcgagaaaaagccagaactttttcaaactgttctatgcg

SEQ ID NO: 33939 - DNA, 50 bp, synthetic construct
  source 1..50: mol_type = other DNA
ctgctacccgcaccatggcgagtgttcagtcttgatgatgcgttgtacag

SEQ ID NO: 33940 - DNA, 50 bp, synthetic construct
  source 1..50: mol_type = other DNA
tagtattactggggttttcggctttttcgtataaaacatataaaaaatcc

SEQ ID NO: 33941 - DNA, 50 bp, synthetic construct
  source 1..50: mol_type = other DNA
ctgagataaaccgtaaaacattctccgagctgctccgttatatatccgtc

SEQ ID NO: 33942 - DNA, 50 bp, synthetic construct
  source 1..50: mol_type = other DNA
aaagcattaatgcaatgaccgaattcattctggcattgaaccaaagcaaa

SEQ ID NO: 33943 - DNA, 50 bp, synthetic construct
  source 1..50: mol_type = other DNA
ctcatgttcttctgctggctgttattgaaaaggaacaagaaaaaaagaag

SEQ ID NO: 33944 - DNA, 50 bp, synthetic construct
  source 1..50: mol_type = other DNA
taaactgaatccgctcaacatcaatatctccatgcagcggcatttgtggc

SEQ ID NO: 33945 - DNA, 50 bp, synthetic construct
  source 1..50: mol_type = other DNA
cccacggagcgtgtgagttgaaatatatttttcttttctttttttatagt

SEQ ID NO: 33946 - DNA, 50 bp, synthetic construct
  source 1..50: mol_type = other DNA
aaggtggtcactcaatgccttgattaatcctgtatgaaagcaggcacatt

SEQ ID NO: 33947 - DNA, 50 bp, synthetic construct
  source 1..50: mol_type = other DNA
tacagttctgacattcagtagacggccgtctgaaagagcacagtcgtact

SEQ ID NO: 33948 - DNA, 50 bp, synthetic construct
  source 1..50: mol_type = other DNA
tggaacagtatagttagtaaaagacgagccgtaatgactgcagtgagtca

SEQ ID NO: 33949 - DNA, 50 bp, synthetic construct
  source 1..50: mol_type = other DNA
tgtgtggtcgttatttttgtacccatacatggaaaaatggtgatgacatc

SEQ ID NO: 33950 - DNA, 50 bp, synthetic construct
  source 1..50: mol_type = other DNA
ccccaaacggagtcaaccagttagtactaactaaactaccccaaaaccag

SEQ ID NO: 33951 - DNA, 50 bp, synthetic construct
  source 1..50: mol_type = other DNA
cagcttagcggaaaacgggctgcagcatctcccggtgttccgcagaggcc

SEQ ID NO: 33952 - DNA, 50 bp, synthetic construct
  source 1..50: mol_type = other DNA
cgttaccgcatccttccggattccggatgcgccgacaggatttcgtccgg

SEQ ID NO: 33953 - DNA, 50 bp, synthetic construct
  source 1..50: mol_type = other DNA
tacggcgacggcggcctctgggtccgggctttggggagcaagtcagcgtt

SEQ ID NO: 33954 - DNA, 50 bp, synthetic construct
  source 1..50: mol_type = other DNA
attttattatgacaatatccgcaatatttattggagtgttatgatataat

SEQ ID NO: 33955 - DNA, 50 bp, synthetic construct
  source 1..50: mol_type = other DNA
gactcacctggattcaaggtgtcgccacatacacgctgtccagccccgcc

SEQ ID NO: 33956 - DNA, 50 bp, synthetic construct
  source 1..50: mol_type = other DNA
aaggccaatggtctgtggcgagtttccccgtccagcagaccgcgggcgta

SEQ ID NO: 33957 - DNA, 50 bp, synthetic construct
  source 1..50: mol_type = other DNA
cgagctggatgcgcgtggtataatcgggctgctcgcgagcatccacgccg

SEQ ID NO: 33958 - DNA, 50 bp, synthetic construct
  source 1..50: mol_type = other DNA
gcggcgcagcaggtgtggaacacggtcggtcacagtcattccgccgacca

SEQ ID NO: 33959 - DNA, 50 bp, synthetic construct
  source 1..50: mol_type = other DNA
tctgaaatcgttaaacggtggacagagaaaacggtttgccgatggaaagg

SEQ ID NO: 33960 - DNA, 50 bp, synthetic construct
  source 1..50: mol_type = other DNA
caatttatggagtaaatactcccatccgccatggaactgcccatagtatg

SEQ ID NO: 33961 - DNA, 50 bp, synthetic construct
  source 1..50: mol_type = other DNA
tgtagccgtagggtgtatgtcccatgttaaagataggtattaaatttaca

SEQ ID NO: 33962 - DNA, 50 bp, synthetic construct
  source 1..50: mol_type = other DNA
gaggccacgtcctcgaacgcttcgccacggacgttccgcgtataaccgta

SEQ ID NO: 33963 - DNA, 50 bp, synthetic construct
  source 1..50: mol_type = other DNA
gctatgatgattgtgtagcctccaaatggtggtacacccgtaatcatacg

SEQ ID NO: 33964 - DNA, 50 bp, synthetic construct
  source 1..50: mol_type = other DNA
atttttaagtgcggcaagcgaatctgtatcatctttcagctttacaaaat

SEQ ID NO: 33965 - DNA, 50 bp, synthetic construct
  source 1..50: mol_type = other DNA
ttgtcaaatgagcgaataaaaaatttcctttcaggtcgcaggcctcacag

SEQ ID NO: 33966 - DNA, 50 bp, synthetic construct
  source 1..50: mol_type = other DNA
aatacctgggagcctcccatagaaatagatgcagcgtgttcgctgacggt

SEQ ID NO: 33967 - DNA, 50 bp, synthetic construct
  source 1..50: mol_type = other DNA
ttcttctaaactagatttttcgctattgcaacaaatccggaccaggagaa

SEQ ID NO: 33968 - DNA, 50 bp, synthetic construct
  source 1..50: mol_type = other DNA
taacgggaagatgtaataacccaccccggggagggtacatcttgtaaatg

SEQ ID NO: 33969 - DNA, 50 bp, synthetic construct
  source 1..50: mol_type = other DNA
taccaatatcctccgactttccgatttatagcagtcgtaagatatggttg

SEQ ID NO: 33970 - DNA, 50 bp, synthetic construct
  source 1..50: mol_type = other DNA
aacagagtcgagagaaaaacctggattatacagggtaaaacgtttctctt

SEQ ID NO: 33971 - DNA, 50 bp, synthetic construct
  source 1..50: mol_type = other DNA
atttcacgcggggagccaggatccataagagttgatgatttacgtcaaat

SEQ ID NO: 33972 - DNA, 50 bp, synthetic construct
  source 1..50: mol_type = other DNA
ttacaacaagtaatatcacaatacaagtcttgcactaaccaatgagttcc

SEQ ID NO: 33973 - DNA, 50 bp, synthetic construct
  source 1..50: mol_type = other DNA
cgcccataaatgttgtcgctaatgaaaataagcgagaacgtttttgggcg

SEQ ID NO: 33974 - DNA, 50 bp, synthetic construct
  source 1..50: mol_type = other DNA
ggataagaaatcgcccatagaaaggatattgtaggggctgcggtttatca

SEQ ID NO: 33975 - DNA, 50 bp, synthetic construct
  source 1..50: mol_type = other DNA
taaggaaatcccatacctgaaaaataaggcattgagcatggatagtcttc

SEQ ID NO: 33976 - DNA, 50 bp, synthetic construct
  source 1..50: mol_type = other DNA
ggaatattatggattgctatggcgacagctatggcaagcccgagatgagg

SEQ ID NO: 33977 - DNA, 50 bp, synthetic construct
  source 1..50: mol_type = other DNA
ctggtcttgctgtccagattgcctgtcggctcatcagccaatatgataga

SEQ ID NO: 33978 - DNA, 50 bp, synthetic construct
  source 1..50: mol_type = other DNA
tccctgcaggcgggtcagccggaccggcatcactgacccgctttacggcg

SEQ ID NO: 33979 - DNA, 50 bp, synthetic construct
  source 1..50: mol_type = other DNA
ccctgaaagcaccgtaccgcaagaattccggcggtgaggcgcttttttag

SEQ ID NO: 33980 - DNA, 50 bp, synthetic construct
  source 1..50: mol_type = other DNA
ttttcggcacattattatcggatatatctccgccaaggaagcgcagaacg

SEQ ID NO: 33981 - DNA, 50 bp, synthetic construct
  source 1..50: mol_type = other DNA
cagttttaattggattagtgtaatcagatacacggatagaattggcactc

SEQ ID NO: 33982 - DNA, 50 bp, synthetic construct
  source 1..50: mol_type = other DNA
aaaagccacccggcgaaagggtggcttaggattttgtgcgggacattttg

SEQ ID NO: 33983 - DNA, 50 bp, synthetic construct
  source 1..50: mol_type = other DNA
gtgtttgcttgggctgatttacgtataccactatcagcatactcaaaaac

SEQ ID NO: 33984 - DNA, 50 bp, synthetic construct
  source 1..50: mol_type = other DNA
aagaacctgaaccaccatgatagatatctatcatggtggatataatgaac

SEQ ID NO: 33985 - DNA, 50 bp, synthetic construct
  source 1..50: mol_type = other DNA
gcaaaagtaaaaaagagggtggttggctccaccattgcacaggggctgaa

SEQ ID NO: 33986 - DNA, 50 bp, synthetic construct
  source 1..50: mol_type = other DNA
tacaatacgcgcaaatgtgtgggcacgaccacacaaatgttctgattgtg

SEQ ID NO: 33987 - DNA, 50 bp, synthetic construct
  source 1..50: mol_type = other DNA
ttctatataatataatatcatttttacaaataaacatcaattatatatac

SEQ ID NO: 33988 - DNA, 50 bp, synthetic construct
  source 1..50: mol_type = other DNA
gaggttgtgataaccttaacgcaatctttttttgttgcaatcataaccac

SEQ ID NO: 33989 - DNA, 50 bp, synthetic construct
  source 1..50: mol_type = other DNA
gaacttgtcgcaaactgggcgcttgcaatcataaccacccttcaaaaggg

SEQ ID NO: 33990 - DNA, 50 bp, synthetic construct
  source 1..50: mol_type = other DNA
gatacggtttcaaatggtttcatttgtatgaaaccgattacaaactctat

SEQ ID NO: 33991 - DNA, 50 bp, synthetic construct
  source 1..50: mol_type = other DNA
taaatctatcctttgtggcaggaatgaaaatttaacaaagacttacggcg

SEQ ID NO: 33992 - DNA, 50 bp, synthetic construct
  source 1..50: mol_type = other DNA
acgccggagctgagacccaggcagcgcttatcgtggttcaaagaccccgt

SEQ ID NO: 33993 - DNA, 50 bp, synthetic construct
  source 1..50: mol_type = other DNA
gcgtttccatagatcagcttgcccacaggcaagctgttctgcggcaaatg

SEQ ID NO: 33994 - DNA, 50 bp, synthetic construct
  source 1..50: mol_type = other DNA
caagtattattaagcattccaattgcaagttctgggaaaaataaatcttt

SEQ ID NO: 33995 - DNA, 50 bp, synthetic construct
  source 1..50: mol_type = other DNA
tatacggttgtccccgaagtccttttcaagtattcagagcagaaataata

SEQ ID NO: 33996 - DNA, 50 bp, synthetic construct
  source 1..50: mol_type = other DNA
cctttaaaacgccaaaaatgaactctgtaacttttttcgccattctcatc

SEQ ID NO: 33997 - DNA, 50 bp, synthetic construct
  source 1..50: mol_type = other DNA
tcttttgcataataacgtcaccacagtccagtaaaatatccaccaaaaga

SEQ ID NO: 33998 - DNA, 50 bp, synthetic construct
  source 1..50: mol_type = other DNA
tttagttataataaatttctcgaatttgacgaagatttcttataaaaatc

SEQ ID NO: 33999 - DNA, 50 bp, synthetic construct
  source 1..50: mol_type = other DNA
cactctccgcttcgttgccggaatcagttccggcagactgaaggagctga

SEQ ID NO: 34000 - DNA, 50 bp, synthetic construct
  source 1..50: mol_type = other DNA
aatataacacaagaaaggaagatttatatcttccttggtaagttcggctt

SEQ ID NO: 34001 - DNA, 50 bp, synthetic construct
  source 1..50: mol_type = other DNA
tgatgcattccaaacagtaccttatcaacggatcaggaagaccagcttca

SEQ ID NO: 34002 - DNA, 50 bp, synthetic construct
  source 1..50: mol_type = other DNA
aagattcacttcccataaagccaatattggaatttttggaaatgaatctt

SEQ ID NO: 34003 - DNA, 50 bp, synthetic construct
  source 1..50: mol_type = other DNA
gagtatctaggtaaaaaaatatgaactcctttctctttgggtagtctata

SEQ ID NO: 34004 - DNA, 50 bp, synthetic construct
  source 1..50: mol_type = other DNA
ttttttgtgatgagtatgttctagatcgaaggtatatccgtcaaaaaagt

SEQ ID NO: 34005 - DNA, 50 bp, synthetic construct
  source 1..50: mol_type = other DNA
atctatgggtatcttaggcagttctatccgataataatgtacccaaagac

SEQ ID NO: 34006 - DNA, 50 bp, synthetic construct
  source 1..50: mol_type = other DNA
aagctgattttcatcctcctccctgcaacgagcaggatgaaagctttgaa

SEQ ID NO: 34007 - DNA, 50 bp, synthetic construct
  source 1..50: mol_type = other DNA
cagtgaatacgcgggaggcacagcgtgctgttcgacccgctcacacgccg

SEQ ID NO: 34008 - DNA, 50 bp, synthetic construct
  source 1..50: mol_type = other DNA
gtctctgtacctgtatctgtatctgaaaaacctcattcgcaccgcccaac

SEQ ID NO: 34009 - DNA, 50 bp, synthetic construct
  source 1..50: mol_type = other DNA
aaattacaagcaagggggaatttatatagcggagagaatgtttggcgatt

SEQ ID NO: 34010 - DNA, 50 bp, synthetic construct
  source 1..50: mol_type = other DNA
aggaagttgaaaatatatctgctaattaggcaatagctcatgaaagtccg

SEQ ID NO: 34011 - DNA, 50 bp, synthetic construct
  source 1..50: mol_type = other DNA
aaccgcttgaattgtatatttgaatactctgtgatatcgccgaagcggaa

SEQ ID NO: 34012 - DNA, 50 bp, synthetic construct
  source 1..50: mol_type = other DNA
tttttttacgttatttcccatcatagatgcaggagaacctgcggaaaaag

SEQ ID NO: 34013 - DNA, 50 bp, synthetic construct
  source 1..50: mol_type = other DNA
atttctctaattcttccattgtcatatgaattagcaacaatagttcaaaa

SEQ ID NO: 34014 - DNA, 50 bp, synthetic construct
  source 1..50: mol_type = other DNA
tacgggaaatccggccagccgcccaacggcgggtcgccggatacgccaga

SEQ ID NO: 34015 - DNA, 50 bp, synthetic construct
  source 1..50: mol_type = other DNA
gatgacggttcagaaatcgttgaacgacctcaaaataccgaagggtcatc

SEQ ID NO: 34016 - DNA, 50 bp, synthetic construct
  source 1..50: mol_type = other DNA
cgcgcaccgggattcaaggtgtcgccacatacacgctgtccagccccgcc

SEQ ID NO: 34017 - DNA, 50 bp, synthetic construct
  source 1..50: mol_type = other DNA
tcaattctgtgtcaaccgtgtgaccgttatggcggcctttgccctggtga

SEQ ID NO: 34018 - DNA, 50 bp, synthetic construct
  source 1..50: mol_type = other DNA
aagaggaacgctcggcgcactgccgtggcactttctcgttcgttcctgtt

SEQ ID NO: 34019 - DNA, 50 bp, synthetic construct
  source 1..50: mol_type = other DNA
atattagctactgaatatgcaatagctgttcactgttgagcagcttttat

SEQ ID NO: 34020 - DNA, 50 bp, synthetic construct
  source 1..50: mol_type = other DNA
gggctttcagagcgatgtatagtaccgcctccccgtcggggacgccgccc

SEQ ID NO: 34021 - DNA, 50 bp, synthetic construct
  source 1..50: mol_type = other DNA
tatcacggagcagaaaaagcgccgggggtcaggccgtctccggcgttggc

SEQ ID NO: 34022 - DNA, 50 bp, synthetic construct
  source 1..50: mol_type = other DNA
tggctcctggttcgaactcaactgtacagatgccaaggaaatgtgataca

SEQ ID NO: 34023 - DNA, 50 bp, synthetic construct
  source 1..50: mol_type = other DNA
gccatcaaggatgacatggcagaaatttcggctttgcgttcctcgctgtg

SEQ ID NO: 34024 - DNA, 50 bp, synthetic construct
  source 1..50: mol_type = other DNA
aatggtttgtgaaaatggtggctgaaaaatcactcctttccgacactata

SEQ ID NO: 34025 - DNA, 50 bp, synthetic construct
  source 1..50: mol_type = other DNA
gattaaactgaatccgctcaacatcaactttgagcgctttacgtttgaga

SEQ ID NO: 34026 - DNA, 50 bp, synthetic construct
  source 1..50: mol_type = other DNA
tttcaatttcttgaaagttaataattttcgtaggctttcttaaatcggaa

SEQ ID NO: 34027 - DNA, 50 bp, synthetic construct
  source 1..50: mol_type = other DNA
tgcaaaacaaatcaagatatagccaaggcattatctcatatagtttcggc

SEQ ID NO: 34028 - DNA, 50 bp, synthetic construct
  source 1..50: mol_type = other DNA
tatagactacccaaagaaaggagaaatcaaagaattttggctgaagtatt

SEQ ID NO: 34029 - DNA, 50 bp, synthetic construct
  source 1..50: mol_type = other DNA
cgtgggtatatgaaatatatccagatcatcattcaggtcaaataagtcga

SEQ ID NO: 34030 - DNA, 50 bp, synthetic construct
  source 1..50: mol_type = other DNA
atcttcggagcagtcttgcaagcggattatgatttcactgctccgggact

SEQ ID NO: 34031 - DNA, 50 bp, synthetic construct
  source 1..50: mol_type = other DNA
catagacgctgcaacgttcaataaagcattacccgacttaagcacctttg

SEQ ID NO: 34032 - DNA, 50 bp, synthetic construct
  source 1..50: mol_type = other DNA
tgattttgcttattgtatggatattaattggtgtaccataacactacact

SEQ ID NO: 34033 - DNA, 50 bp, synthetic construct
  source 1..50: mol_type = other DNA
cgatggtttcattccgctcggaatatttttcgagcggtcttgtattccgc

SEQ ID NO: 34034 - DNA, 50 bp, synthetic construct
  source 1..50: mol_type = other DNA
ggaaagacccgctgaacaaaaagcactttcagagcgtgaacggtctttcc

SEQ ID NO: 34035 - DNA, 50 bp, synthetic construct
  source 1..50: mol_type = other DNA
cagctgcgtccgtttgaaggccatccctcctttggtatcggacatattaa

SEQ ID NO: 34036 - DNA, 50 bp, synthetic construct
  source 1..50: mol_type = other DNA
accgttctgaattgttatacaaaaatagatgtattataatgggcataaag

SEQ ID NO: 34037 - DNA, 50 bp, synthetic construct
  source 1..50: mol_type = other DNA
aggaagcggaaggggaaagacttctgccaggctggacagaaccgccggaa

SEQ ID NO: 34038 - DNA, 50 bp, synthetic construct
  source 1..50: mol_type = other DNA
tatataggcataaattcacctaaaaattttattgaatttgaggtggtata

SEQ ID NO: 34039 - DNA, 50 bp, synthetic construct
  source 1..50: mol_type = other DNA
gccgaaaaaccgtagcaaatgccaggtggtatatgagtgggttttcttga

SEQ ID NO: 34040 - DNA, 50 bp, synthetic construct
  source 1..50: mol_type = other DNA
tgctaataaaaatgaagatgattctttcatattctttaattttattgaca

SEQ ID NO: 34041 - DNA, 50 bp, synthetic construct
  source 1..50: mol_type = other DNA
gtcaatgattaaaggtgtatccatttgtgccggaactgaaaatcatccac

SEQ ID NO: 34042 - DNA, 50 bp, synthetic construct
  source 1..50: mol_type = other DNA
ccacaccattttcaattctgtatccggatacagaaaaatcaaaaaaggag

SEQ ID NO: 34043 - DNA, 50 bp, synthetic construct
  source 1..50: mol_type = other DNA
cggacgaagaaatttaaaaaaagttgcaagcataaaattttctttgtccg

SEQ ID NO: 34044 - DNA, 50 bp, synthetic construct
  source 1..50: mol_type = other DNA
atatatttaagaggataaaatcctcaaacccggacttgttctaaagccaa

SEQ ID NO: 34045 - DNA, 50 bp, synthetic construct
  source 1..50: mol_type = other DNA
tactgtttcatatacagatatgccaagcaaaatctgtatataaaaatata

SEQ ID NO: 34046 - DNA, 50 bp, synthetic construct
  source 1..50: mol_type = other DNA
ctgcattataaaaatagatggatatacctccttccgttttggtagtctat

SEQ ID NO: 34047 - DNA, 50 bp, synthetic construct
  source 1..50: mol_type = other DNA
tcagcaaaacaccaaactggaaactcctttccgctttcgcagtactatct

SEQ ID NO: 34048 - DNA, 50 bp, synthetic construct
  source 1..50: mol_type = other DNA
tagtgttattcatattcctcctttaacaaggatgactctgaattacctcc

SEQ ID NO: 34049 - DNA, 50 bp, synthetic construct
  source 1..50: mol_type = other DNA
gtatccatatgggatgtaccgtatctttttgttatgctccaattggatgt

SEQ ID NO: 34050 - DNA, 50 bp, synthetic construct
  source 1..50: mol_type = other DNA
ccgcagatgcttcataagggccagtactccaacttcgtccgcgacggcgc

SEQ ID NO: 34051 - DNA, 50 bp, synthetic construct
  source 1..50: mol_type = other DNA
atattatgcataaaaaagattttaattatatccccgtttgtgcattttga

SEQ ID NO: 34052 - DNA, 50 bp, synthetic construct
  source 1..50: mol_type = other DNA
ttagttattcattttttgtctcattaaaatatgttaaaatgagcactgta

SEQ ID NO: 34053 - DNA, 50 bp, synthetic construct
  source 1..50: mol_type = other DNA
ttgccatcgatctggaacaggttggtaccgcagtaccagcccgatggccg

SEQ ID NO: 34054 - DNA, 50 bp, synthetic construct
  source 1..50: mol_type = other DNA
ccccaatatttctcgccagcccgcgaataatgtgccgaaaagagggtggt

SEQ ID NO: 34055 - DNA, 50 bp, synthetic construct
  source 1..50: mol_type = other DNA
atcaagctgctgtaaaggccgggccggatggggaaaatgagcgacctgga

SEQ ID NO: 34056 - DNA, 50 bp, synthetic construct
  source 1..50: mol_type = other DNA
gatcctccttttaaagcgcagggaaaaccgcccgatttctcaggcggtca

SEQ ID NO: 34057 - DNA, 50 bp, synthetic construct
  source 1..50: mol_type = other DNA
cgatgtttatagaatgatacccaaatttagatacgttactgtagcaatcg

SEQ ID NO: 34058 - DNA, 50 bp, synthetic construct
  source 1..50: mol_type = other DNA
catcctattaaatgatgagggaaaatttaaaaatggcatattgcaggcag

SEQ ID NO: 34059 - DNA, 50 bp, synthetic construct
  source 1..50: mol_type = other DNA
tttttaaaatatacggaatcatacttttaacattgaaacacattccaaaa

SEQ ID NO: 34060 - DNA, 50 bp, synthetic construct
  source 1..50: mol_type = other DNA
cttccggatgtctgacgagaacgcccacttcctcccgccgcatccgatag

SEQ ID NO: 34061 - DNA, 50 bp, synthetic construct
  source 1..50: mol_type = other DNA
aagccaagaagagcaaaaacaagtgtcatgttatttgctctgattgtggt

SEQ ID NO: 34062 - DNA, 50 bp, synthetic construct
  source 1..50: mol_type = other DNA
gttcctaatcttctttctttttttcggtacaggaaaagaagataagggtg

SEQ ID NO: 34063 - DNA, 50 bp, synthetic construct
  source 1..50: mol_type = other DNA
caaaaaagatatttatattcagagaaaggtgtgatacaatgtattcgttg

SEQ ID NO: 34064 - DNA, 50 bp, synthetic construct
  source 1..50: mol_type = other DNA
gggcttattttttatacccttttttatgaaataatattgtctttccggtt

SEQ ID NO: 34065 - DNA, 50 bp, synthetic construct
  source 1..50: mol_type = other DNA
cgattgctacagtaacatatctaaatttgggtatcattctataaacatcg

SEQ ID NO: 34066 - DNA, 50 bp, synthetic construct
  source 1..50: mol_type = other DNA
ttgtaactcaaaatcttatatttataaaaatgtaagcgtcacagtaattg

SEQ ID NO: 34067 - DNA, 50 bp, synthetic construct
  source 1..50: mol_type = other DNA
accgtataggtgtattttttatactcttggaaaccatacacttttaccca

SEQ ID NO: 34068 - DNA, 50 bp, synthetic construct
  source 1..50: mol_type = other DNA
tatactctttttttggaggtgggacgctcgcgctgtaattcaggagtgta

SEQ ID NO: 34069 - DNA, 50 bp, synthetic construct
  source 1..50: mol_type = other DNA
catgaacgggcttgagcttggccgcccggtcgaggacaagcccgttgcct

SEQ ID NO: 34070 - DNA, 50 bp, synthetic construct
  source 1..50: mol_type = other DNA
cttctctgctgctgcgactttttccggctcatccgccagaatcagagaag

SEQ ID NO: 34071 - DNA, 50 bp, synthetic construct
  source 1..50: mol_type = other DNA
atatcttcgctgttctggcggctcaccgtctgcctgtgcccctctgatgc

SEQ ID NO: 34072 - DNA, 50 bp, synthetic construct
  source 1..50: mol_type = other DNA
aaggaaagaaaggtgaaaggtgtcgcagaaattcaccattttctacgctt

SEQ ID NO: 34073 - DNA, 50 bp, synthetic construct
  source 1..50: mol_type = other DNA
aggagtggcattctgcagggggacaataatctggtcagaaaggaggccga

SEQ ID NO: 34074 - DNA, 50 bp, synthetic construct
  source 1..50: mol_type = other DNA
tatcgggaaatgcagctcggcgtggacagtccgacggacaaatatattaa

SEQ ID NO: 34075 - DNA, 50 bp, synthetic construct
  source 1..50: mol_type = other DNA
gcgtagagagcttctggagtaccataaaggtctgcccaaactctctgccg

SEQ ID NO: 34076 - DNA, 50 bp, synthetic construct
  source 1..50: mol_type = other DNA
catttacaagatgtaccctcctcggggtgggttattacatcttcccgtta

SEQ ID NO: 34077 - DNA, 50 bp, synthetic construct
  source 1..50: mol_type = other DNA
ctctcttctgttttacatacgcttataatcgtaccgtccacctttcagtt

SEQ ID NO: 34078 - DNA, 50 bp, synthetic construct
  source 1..50: mol_type = other DNA
agaagttttattagaactgtattacttaagtttcttctcagccctgctct

SEQ ID NO: 34079 - DNA, 50 bp, synthetic construct
  source 1..50: mol_type = other DNA
tacactcctgaatcacagcgcgagcgtctcacctcccaaaaaagagtata

SEQ ID NO: 34080 - DNA, 50 bp, synthetic construct
  source 1..50: mol_type = other DNA
gaaatcgtttatttccatttaagccgctactgagctcaatagaccattga

SEQ ID NO: 34081 - DNA, 50 bp, synthetic construct
  source 1..50: mol_type = other DNA
aatgaaaacggctatccggaacccacagggcgacgagccttgtgggaatt

SEQ ID NO: 34082 - DNA, 50 bp, synthetic construct
  source 1..50: mol_type = other DNA
tataaagattttttttgagtagttcgtcccacctccccaaaaagagtata

SEQ ID NO: 34083 - DNA, 50 bp, synthetic construct
  source 1..50: mol_type = other DNA
gtagattgtctggtatccactgaaattgtagttgagaacaagacatttaa

SEQ ID NO: 34084 - DNA, 50 bp, synthetic construct
  source 1..50: mol_type = other DNA
gcgtgacagcgtcgccggtatggtagtaggtaagctgtggaaattcaagc

SEQ ID NO: 34085 - DNA, 50 bp, synthetic construct
  source 1..50: mol_type = other DNA
aataaccctgttgtgaagttttagaagcaaatagtctataacatcccgtt

SEQ ID NO: 34086 - DNA, 50 bp, synthetic construct
  source 1..50: mol_type = other DNA
agaactataaggaggaaaaatgcaaagaaattttttaataaaggagtgtt

SEQ ID NO: 34087 - DNA, 50 bp, synthetic construct
  source 1..50: mol_type = other DNA
aaacgtcccaggaccagtaatttgcaaaaataacggccacacaaatgttc

SEQ ID NO: 34088 - DNA, 50 bp, synthetic construct
  source 1..50: mol_type = other DNA
atagtatagccgcatttacatttaacaccacctaaaaaagagtataaaaa

SEQ ID NO: 34089 - DNA, 50 bp, synthetic construct
  source 1..50: mol_type = other DNA
agccgcctgctcacacatgatatatatatatcatgtgtgttcgaacccat

SEQ ID NO: 34090 - DNA, 50 bp, synthetic construct
  source 1..50: mol_type = other DNA
ttgtaaatggctcgtacctgtgcagcccgttctgtcagagaaagttaccg

SEQ ID NO: 34091 - DNA, 50 bp, synthetic construct
  source 1..50: mol_type = other DNA
cggcccgcatctgttggatagttctccagctccccatcgcaggcgggctt

SEQ ID NO: 34092 - DNA, 50 bp, synthetic construct
  source 1..50: mol_type = other DNA
cttagaggctctgatgatgttggcgaccaaaaatccacggacgttccgag

SEQ ID NO: 34093 - DNA, 50 bp, synthetic construct
  source 1..50: mol_type = other DNA
gcggatattgaaacatcagaaaatacatccgaatatgtttcaatatctat

SEQ ID NO: 34094 - DNA, 50 bp, synthetic construct
  source 1..50: mol_type = other DNA
gggagcagatttccaaatagaacttgtagtctatatatcactctaacccc

SEQ ID NO: 34095 - DNA, 50 bp, synthetic construct
  source 1..50: mol_type = other DNA
tcgtcatcttattaggtggcgggcttaaaagtcaggtattctgatgacgg

SEQ ID NO: 34096 - DNA, 50 bp, synthetic construct
  source 1..50: mol_type = other DNA
ttgtgtagcctccaaatctaacaaatctgggcgatcgggacgctatgcag

SEQ ID NO: 34097 - DNA, 50 bp, synthetic construct
  source 1..50: mol_type = other DNA
cttcaaaatagtatctgtaggttgcctaaccataattcgatattttttaa

SEQ ID NO: 34098 - DNA, 50 bp, synthetic construct
  source 1..50: mol_type = other DNA
cgggtctctcccgccaacccgcgggcccgagcactgcgccaagcccgccg

SEQ ID NO: 34099 - DNA, 50 bp, synthetic construct
  source 1..50: mol_type = other DNA
cgagcagttggtcggcggtgttgacagcaacacggtcggtcacagtcatt

SEQ ID NO: 34100 - DNA, 50 bp, synthetic construct
  source 1..50: mol_type = other DNA
caagaccgtaggtgtggcattcggtgccgtcggatttgtggcgcaccaca

SEQ ID NO: 34101 - DNA, 50 bp, synthetic construct
  source 1..50: mol_type = other DNA
tgatttttcatatactcaaaaattgccaattgaaatacctaaaaaaatca

SEQ ID NO: 34102 - DNA, 50 bp, synthetic construct
  source 1..50: mol_type = other DNA
cggggcggtagccctcaagataggcttttattggtgttagtatataacca

SEQ ID NO: 34103 - DNA, 50 bp, synthetic construct
  source 1..50: mol_type = other DNA
gaacggcagaaggcctgatggaagatcttcccgctatcgtattgccgtac

SEQ ID NO: 34104 - DNA, 50 bp, synthetic construct
  source 1..50: mol_type = other DNA
ggattattacaaaaaaatattcagatgtagacaatttccttgccatttcc

SEQ ID NO: 34105 - DNA, 50 bp, synthetic construct
  source 1..50: mol_type = other DNA
tattgaaggttcaataggtattattattaaggttacttaatttcgcaatg

SEQ ID NO: 34106 - DNA, 50 bp, synthetic construct
  source 1..50: mol_type = other DNA
aaaattccagatactctatcacgcttaaggtactcagtaatatccttgcc

SEQ ID NO: 34107 - DNA, 50 bp, synthetic construct
  source 1..50: mol_type = other DNA
agtattgctggaaatgccggataatgtcggcaggcatttccccaaaaaca

SEQ ID NO: 34108 - DNA, 50 bp, synthetic construct
  source 1..50: mol_type = other DNA
atgcggggcagttcttctttttttgcaacaccagtgatgctgccccgcaa

SEQ ID NO: 34109 - DNA, 50 bp, synthetic construct
  source 1..50: mol_type = other DNA
cgctgcaaggttgttttagggcgcggtggccgacggcatcccgttcgtcg

SEQ ID NO: 34110 - DNA, 50 bp, synthetic construct
  source 1..50: mol_type = other DNA
tatgtccgtacatggaataataaagctgtctgagtgctcttagcgacttc

SEQ ID NO: 34111 - DNA, 50 bp, synthetic construct
  source 1..50: mol_type = other DNA
atggaagaagaaccgtccgacattccaaaatcggccagtgtttcttcgga

SEQ ID NO: 34112 - DNA, 50 bp, synthetic construct
  source 1..50: mol_type = other DNA
aactataatcagaatgattccggttctgcgatacctttcatctttctttc

SEQ ID NO: 34113 - DNA, 50 bp, synthetic construct
  source 1..50: mol_type = other DNA
gtccgactacgacaggttcctccttgccgagaatgacctcgatctcggta

SEQ ID NO: 34114 - DNA, 50 bp, synthetic construct
  source 1..50: mol_type = other DNA
cgagaacatcctcgtgcagacgatggatcttcatagtgttgctctgccgc

SEQ ID NO: 34115 - DNA, 50 bp, synthetic construct
  source 1..50: mol_type = other DNA
aacaacaagcgggaggccttcacaggagagaaagtttcccgattgatggc

SEQ ID NO: 34116 - DNA, 50 bp, synthetic construct
  source 1..50: mol_type = other DNA
ggcggggctggacagcgtgtatgtggtgacaccttgaatccaggtgagtc

SEQ ID NO: 34117 - DNA, 50 bp, synthetic construct
  source 1..50: mol_type = other DNA
gagtatttatcgggaaatcgcttgatgcagcccttttaccagtaattctc

SEQ ID NO: 34118 - DNA, 50 bp, synthetic construct
  source 1..50: mol_type = other DNA
tgaatacttatgaataggtattaataatatggaaacatcggaattattcg

SEQ ID NO: 34119 - DNA, 50 bp, synthetic construct
  source 1..50: mol_type = other DNA
cctcgctaagccgaaacacctgcaggtgcagctctactcgcttctcacac

SEQ ID NO: 34120 - DNA, 50 bp, synthetic construct
  source 1..50: mol_type = other DNA
gcaacggtggtaacgccgtccattgcaagggacattacccagcgcggcgc

SEQ ID NO: 34121 - DNA, 50 bp, synthetic construct
  source 1..50: mol_type = other DNA
gaatttataaagacaggaagaaagccattcattgatggctttaaaaacgc

SEQ ID NO: 34122 - DNA, 50 bp, synthetic construct
  source 1..50: mol_type = other DNA
acttaacactatatatactctacttatggctgagacctatggtaataacg

SEQ ID NO: 34123 - DNA, 50 bp, synthetic construct
  source 1..50: mol_type = other DNA
caccaggcgacctgttcttccttgcgcacagaacagaacagctcctgtct

SEQ ID NO: 34124 - DNA, 50 bp, synthetic construct
  source 1..50: mol_type = other DNA
tatattcctctggctgttatttttataaaaaagattacgaaacctatact

SEQ ID NO: 34125 - DNA, 50 bp, synthetic construct
  source 1..50: mol_type = other DNA
gcaggaacaatcctgtgcagtagcctaagactgccatggcaacctccctg

SEQ ID NO: 34126 - DNA, 50 bp, synthetic construct
  source 1..50: mol_type = other DNA
tccaggcagattatgtatggctgacttctaacatccataagatttgtgaa

SEQ ID NO: 34127 - DNA, 50 bp, synthetic construct
  source 1..50: mol_type = other DNA
gctctctttgcttaaacataaaattgcaattaggtttaactcatgtgagg

SEQ ID NO: 34128 - DNA, 50 bp, synthetic construct
  source 1..50: mol_type = other DNA
aaaatccgatattaaccggaaattgcatattatcagaagaaacggttttt

SEQ ID NO: 34129 - DNA, 50 bp, synthetic construct
  source 1..50: mol_type = other DNA
acgatacagtcctcaaggagcgcatctgccctccttgtatcaagtatcgg

SEQ ID NO: 34130 - DNA, 50 bp, synthetic construct
  source 1..50: mol_type = other DNA
cttttttcggttcctggggaaaggggccttcttcccagaaccaggaacgg

SEQ ID NO: 34131 - DNA, 50 bp, synthetic construct
  source 1..50: mol_type = other DNA
ttctgtctttacatcaggttattatttattgctctcctgtaaggataaat

SEQ ID NO: 34132 - DNA, 50 bp, synthetic construct
  source 1..50: mol_type = other DNA
agacccagatactgatgaagtagaagcctattggatatttatctgatagt

SEQ ID NO: 34133 - DNA, 50 bp, synthetic construct
  source 1..50: mol_type = other DNA
caaggccgaaaacggcgaaaagcccgggatattccataggaacgtccgac

SEQ ID NO: 34134 - DNA, 50 bp, synthetic construct
  source 1..50: mol_type = other DNA
cacacccttgaccttcgagcgtatctccgtcctcccttcataaaaatggt

SEQ ID NO: 34135 - DNA, 50 bp, synthetic construct
  source 1..50: mol_type = other DNA
cggtggaaacacgggcataaccggctccacctcggcttttttcagtcccg

SEQ ID NO: 34136 - DNA, 50 bp, synthetic construct
  source 1..50: mol_type = other DNA
gccgactttatcgccagctttgacgagtacgacctgctcatcattgacga

SEQ ID NO: 34137 - DNA, 50 bp, synthetic construct
  source 1..50: mol_type = other DNA
aagtattgtaaggtgaaaggtcaaaattgatagaagaagaaaggtgtgat

SEQ ID NO: 34138 - DNA, 50 bp, synthetic construct
  source 1..50: mol_type = other DNA
acaaaaagttttataaattagcatgcaattagttttttaacagattttat

SEQ ID NO: 34139 - DNA, 50 bp, synthetic construct
  source 1..50: mol_type = other DNA
gaaacccaggagtgtaaatgctcctgggagcaaaagagttcatggattcc

SEQ ID NO: 34140 - DNA, 50 bp, synthetic construct
  source 1..50: mol_type = other DNA
tttgtatggtacgctatctgccccggacggctgaatggctattcagctcc

SEQ ID NO: 34141 - DNA, 50 bp, synthetic construct
  source 1..50: mol_type = other DNA
ccatgtattgagggaaaagccagtccacgcgctttctggatgattacatc

SEQ ID NO: 34142 - DNA, 50 bp, synthetic construct
  source 1..50: mol_type = other DNA
gctttgatttacagaaaggcaggcgttcaataaggaactgaaaaggctgg

SEQ ID NO: 34143 - DNA, 50 bp, synthetic construct
  source 1..50: mol_type = other DNA
ttgaacccgtttttctgtaaaaataaagctttgaaatctaacggtttcaa

SEQ ID NO: 34144 - DNA, 50 bp, synthetic construct
  source 1..50: mol_type = other DNA
gatgaacgaattgtttaacaatgtttacattgttaaacgatactatcagg

SEQ ID NO: 34145 - DNA, 50 bp, synthetic construct
  source 1..50: mol_type = other DNA
tattaacgtcctccggatatcgttaagtgactatcaaaaggaaattaata

SEQ ID NO: 34146 - DNA, 50 bp, synthetic construct
  source 1..50: mol_type = other DNA
tggtgatgatccggcagatagagttctggggaaaataaatctttccacac

SEQ ID NO: 34147 - DNA, 50 bp, synthetic construct
  source 1..50: mol_type = other DNA
cgcatagaacagtttgaaaaagttcttgctttttcccgccgttcctcggt

SEQ ID NO: 34148 - DNA, 50 bp, synthetic construct
  source 1..50: mol_type = other DNA
atgctaatatccgggatgactgtcaaattcctccttccggtagtgtctat

SEQ ID NO: 34149 - DNA, 50 bp, synthetic construct
  source 1..50: mol_type = other DNA
agggataaggcagcagaacttgcagctgcccgttctgcggcatatcatca

SEQ ID NO: 34150 - DNA, 50 bp, synthetic construct
  source 1..50: mol_type = other DNA
ataccatgaaagcctccattcaccataataaaggaaggcaatcatatagc

SEQ ID NO: 34151 - DNA, 50 bp, synthetic construct
  source 1..50: mol_type = other DNA
ccgtaaaaatccgcatgtcaggcagccaagaaagacttaccgctttacgc

SEQ ID NO: 34152 - DNA, 50 bp, synthetic construct
  source 1..50: mol_type = other DNA
agacccggccaatgtcgcaagattgcagcgttgcggaaagggtgcatatc

SEQ ID NO: 34153 - DNA, 50 bp, synthetic construct
  source 1..50: mol_type = other DNA
atttcttatagctgactgccatgtatacatgggacatacaccctacggct

SEQ ID NO: 34154 - DNA, 50 bp, synthetic construct
  source 1..50: mol_type = other DNA
gaagcttcataaaatcagtcttatcttagcttttgatattatgtagttgt

SEQ ID NO: 34155 - DNA, 50 bp, synthetic construct
  source 1..50: mol_type = other DNA
aaatggaacagcgatgcggaggatgcaatacacgctcggcgcgtcgctga

SEQ ID NO: 34156 - DNA, 50 bp, synthetic construct
  source 1..50: mol_type = other DNA
cgtcggatcagcttcggtcagctccggagcaatccgaaatgacaaaagac

SEQ ID NO: 34157 - DNA, 50 bp, synthetic construct
  source 1..50: mol_type = other DNA
aggacttcttcgacttcgaggcatatatgcctgacggtccttttcgggca

SEQ ID NO: 34158 - DNA, 50 bp, synthetic construct
  source 1..50: mol_type = other DNA
caatcttgtcgcagattaacaaaaaaatcccgaatggctcgactccgcac

SEQ ID NO: 34159 - DNA, 50 bp, synthetic construct
  source 1..50: mol_type = other DNA
gcccagcggcggcgccgccgcgagctcatccaccggaggcagcgctggta

SEQ ID NO: 34160 - DNA, 50 bp, synthetic construct
  source 1..50: mol_type = other DNA
catggcctcgtcaaagctcaggcgctgaaatgaccaaagaggattacatg

SEQ ID NO: 34161 - DNA, 50 bp, synthetic construct
  source 1..50: mol_type = other DNA
cagagaaattcaagcattagtaaatgttctctgttatattttcttctcat

SEQ ID NO: 34162 - DNA, 50 bp, synthetic construct
  source 1..50: mol_type = other DNA
ccgggtgtagcgcagttttggtagcgcggcccaaacggcacgcttgacgg

SEQ ID NO: 34163 - DNA, 50 bp, synthetic construct
  source 1..50: mol_type = other DNA
ccgaagggtttattccgctcggaatattccgcgcggcgagagcctccacg

SEQ ID NO: 34164 - DNA, 50 bp, synthetic construct
  source 1..50: mol_type = other DNA
cctctcccacgcggaaaggaccgcttgcgttcctttcctttgtttttctt

SEQ ID NO: 34165 - DNA, 50 bp, synthetic construct
  source 1..50: mol_type = other DNA
ctattcttccgtaaggtataacatcataattataccttacggaagtatgg

SEQ ID NO: 34166 - DNA, 50 bp, synthetic construct
  source 1..50: mol_type = other DNA
taaagagtgatgtatagtgtcggaaaggcgttatccgcgaatttgacata

SEQ ID NO: 34167 - DNA, 50 bp, synthetic construct
  source 1..50: mol_type = other DNA
atcacatttggcttaaatgcttttatcaaggcattttagcactcggctac

SEQ ID NO: 34168 - DNA, 50 bp, synthetic construct
  source 1..50: mol_type = other DNA
aagcgtgaaaatgtatcttttcatttatgcaaccggcgaccttcacggaa

SEQ ID NO: 34169 - DNA, 50 bp, synthetic construct
  source 1..50: mol_type = other DNA
tacactcgtatcagatatacttgtgtacaagtatatcataagcgtgggct

SEQ ID NO: 34170 - DNA, 50 bp, synthetic construct
  source 1..50: mol_type = other DNA
aggttttatttttatacctttttttgaacgaccttataacaatggacgag

SEQ ID NO: 34171 - DNA, 50 bp, synthetic construct
  source 1..50: mol_type = other DNA
tgaacttctttcagggattctaattgattattctccgacagacagattcc

SEQ ID NO: 34172 - DNA, 50 bp, synthetic construct
  source 1..50: mol_type = other DNA
ataggcttctgcttccttgaaaccaagtttggaaattgcgagatacagca

SEQ ID NO: 34173 - DNA, 50 bp, synthetic construct
  source 1..50: mol_type = other DNA
gctatttatattgtaaaccatttggtaaaaatttttacatttactattgc

SEQ ID NO: 34174 - DNA, 50 bp, synthetic construct
  source 1..50: mol_type = other DNA
taaacgtccgcatccctgttatccgctggataaagttatgccgtattttt

SEQ ID NO: 34175 - DNA, 50 bp, synthetic construct
  source 1..50: mol_type = other DNA
ctccacgctgttgtatatgatattttgcaatcatatccaactgcgtggag

SEQ ID NO: 34176 - DNA, 50 bp, synthetic construct
  source 1..50: mol_type = other DNA
tgtatccagctcatctgcaattcggagaaattctccatctgcgggaacca

SEQ ID NO: 34177 - DNA, 50 bp, synthetic construct
  source 1..50: mol_type = other DNA
tagagaggattttcaccgatataatttgtgccaatctcaaatattcttct

SEQ ID NO: 34178 - DNA, 50 bp, synthetic construct
  source 1..50: mol_type = other DNA
gttctcgtgaatagcttttgacctgcaagtcgaaaacgcttgctgatgcg

SEQ ID NO: 34179 - DNA, 50 bp, synthetic construct
  source 1..50: mol_type = other DNA
tatgcgatggaaacgcatgaaggtataccatcatccagcaggcccttgta

SEQ ID NO: 34180 - DNA, 50 bp, synthetic construct
  source 1..50: mol_type = other DNA
acgatcaacagtgttcagcgtgtagctacacccggatatctgtaagcggt

SEQ ID NO: 34181 - DNA, 50 bp, synthetic construct
  source 1..50: mol_type = other DNA
cctttacgggtgccggcgtaagcacgctttccggcgattccgcagaaagc

SEQ ID NO: 34182 - DNA, 50 bp, synthetic construct
  source 1..50: mol_type = other DNA
tgatttgtcatttgaacagatcggtaatctgcttggacgctcgcaaatgg

SEQ ID NO: 34183 - DNA, 50 bp, synthetic construct
  source 1..50: mol_type = other DNA
catccacacacctgattccagcgggcctgctgcgatggggtgtagccaag

SEQ ID NO: 34184 - DNA, 50 bp, synthetic construct
  source 1..50: mol_type = other DNA
tgggaggactaacgataatgacaaattgcctccctgcgctcgtctgtcca

SEQ ID NO: 34185 - DNA, 50 bp, synthetic construct
  source 1..50: mol_type = other DNA
cctgtctctgaatcaagtgcgcctgtcggctcgtcaccgagaagaatctt

SEQ ID NO: 34186 - DNA, 50 bp, synthetic construct
  source 1..50: mol_type = other DNA
tgatgcattaccgatgacaaagaccgaggcagtaaatgagtgatgcagta

SEQ ID NO: 34187 - DNA, 50 bp, synthetic construct
  source 1..50: mol_type = other DNA
ccagtttgaaatgggtgcggtaattgaataccttcgacttttcacacgta

SEQ ID NO: 34188 - DNA, 50 bp, synthetic construct
  source 1..50: mol_type = other DNA
tggttcccgcagatggagaatttctccgaattgcagatgagctggataca

SEQ ID NO: 34189 - DNA, 50 bp, synthetic construct
  source 1..50: mol_type = other DNA
ataccagatacaacaataccgtctgctgccggtatactgtgttttgttat

SEQ ID NO: 34190 - DNA, 50 bp, synthetic construct
  source 1..50: mol_type = other DNA
atgacgatggtatctaccgttttgatggtgcgggtagccgacatcatcac

SEQ ID NO: 34191 - DNA, 50 bp, synthetic construct
  source 1..50: mol_type = other DNA
aacttccggacaattagtagactagaaagcctacttgctgtgtatgcgtc

SEQ ID NO: 34192 - DNA, 50 bp, synthetic construct
  source 1..50: mol_type = other DNA
atgaaataaagaaagagaaagagggagctgctgctccttgttgtggtcat

SEQ ID NO: 34193 - DNA, 50 bp, synthetic construct
  source 1..50: mol_type = other DNA
tatagtcatcggttgcttcatacagcaaccacattatactgataactatt

SEQ ID NO: 34194 - DNA, 50 bp, synthetic construct
  source 1..50: mol_type = other DNA
agctccggatatggcatggagtaccggtgctgcataccatcatgaatgcc

SEQ ID NO: 34195 - DNA, 50 bp, synthetic construct
  source 1..50: mol_type = other DNA
ccggtaatcgtggattatttctatcacgttgtataatcggtatataccga

SEQ ID NO: 34196 - DNA, 50 bp, synthetic construct
  source 1..50: mol_type = other DNA
tttcctcattcggtctcggtgtgctgacgcacctttccaaggtggctgta

SEQ ID NO: 34197 - DNA, 50 bp, synthetic construct
  source 1..50: mol_type = other DNA
gataaaaaggtcaactcaaagccgaggggcttttcgtttgcctttggcaa

SEQ ID NO: 34198 - DNA, 50 bp, synthetic construct
  source 1..50: mol_type = other DNA
tttttatttgatttgattttatttgcctacaaagtcaactcaaggaaaaa

SEQ ID NO: 34199 - DNA, 50 bp, synthetic construct
  source 1..50: mol_type = other DNA
cggttacaaaaatcatctttccaccttcttgttcatttgggttcacctcg

SEQ ID NO: 34200 - DNA, 50 bp, synthetic construct
  source 1..50: mol_type = other DNA
atcatctttccaccttctttcagtacgctgattcagtaattaaagccctc

SEQ ID NO: 34201 - DNA, 50 bp, synthetic construct
  source 1..50: mol_type = other DNA
actgtaattgtgaccggttgcgtagatacgcaagagtgtccacagacagt

SEQ ID NO: 34202 - DNA, 50 bp, synthetic construct
  source 1..50: mol_type = other DNA
tcgctccaggacagaaagctggacacctgagattttatcagatatagata

SEQ ID NO: 34203 - DNA, 50 bp, synthetic construct
  source 1..50: mol_type = other DNA
gcatttgttaaaggcacctttgtttaagcaaaggcatgattttctattga

SEQ ID NO: 34204 - DNA, 50 bp, synthetic construct
  source 1..50: mol_type = other DNA
ctgttcttttattattccgtgattgcaaacaccgcatgagcggagaaagc

SEQ ID NO: 34205 - DNA, 50 bp, synthetic construct
  source 1..50: mol_type = other DNA
acgtatcgtctattggtagtagataaatctactacatatgaataatatga

SEQ ID NO: 34206 - DNA, 50 bp, synthetic construct
  source 1..50: mol_type = other DNA
attatatcataacactccgataaatattgcggatattgtcataataaaat

SEQ ID NO: 34207 - DNA, 50 bp, synthetic construct
  source 1..50: mol_type = other DNA
tgtaaaaaaagactccgaatcaccgtttagattaggagagttattctgcg

SEQ ID NO: 34208 - DNA, 50 bp, synthetic construct
  source 1..50: mol_type = other DNA
ggctctgtggttttggtgatctcgattttcataggtaaaaaaagggagcc

SEQ ID NO: 34209 - DNA, 50 bp, synthetic construct
  source 1..50: mol_type = other DNA
gtcgcttttgggcatccttatcgttcgttcatagccgagccggggtcgaa

SEQ ID NO: 34210 - DNA, 50 bp, synthetic construct
  source 1..50: mol_type = other DNA
gtatgtagaaataatgccggaaataatagataattattctttccttgtaa

SEQ ID NO: 34211 - DNA, 50 bp, synthetic construct
  source 1..50: mol_type = other DNA
aaacaggctgagtacttatacagcctcctgtataaaattcctccttgccg

SEQ ID NO: 34212 - DNA, 50 bp, synthetic construct
  source 1..50: mol_type = other DNA
gttcgtatctatcctcaaagggaaaaaagtttttgacaagcgacacattt

SEQ ID NO: 34213 - DNA, 50 bp, synthetic construct
  source 1..50: mol_type = other DNA
acatctaggtcacctatattttataatccaaatagttctgatatagttac

SEQ ID NO: 34214 - DNA, 50 bp, synthetic construct
  source 1..50: mol_type = other DNA
gctaccaaataaagcaacaataatatctatttgtttatttattttgtaag

SEQ ID NO: 34215 - DNA, 50 bp, synthetic construct
  source 1..50: mol_type = other DNA
gtaaagcaatcaatatattgaatgattatttagtccatcatttgcattaa

SEQ ID NO: 34216 - DNA, 50 bp, synthetic construct
  source 1..50: mol_type = other DNA
ccgggccaaacatgtcctttgtctttaggggaaaattatacaggggctat

SEQ ID NO: 34217 - DNA, 50 bp, synthetic construct
  source 1..50: mol_type = other DNA
gccagtagaaattataccattcctttaggaaactccattttaatacaaat

SEQ ID NO: 34218 - DNA, 50 bp, synthetic construct
  source 1..50: mol_type = other DNA
ttgatagaacgctctgtatcgtgaagtttcgatacaagtcaatcaattca

SEQ ID NO: 34219 - DNA, 50 bp, synthetic construct
  source 1..50: mol_type = other DNA
tatgagaccggaaccccaccattatgaaatcaatcagttggcaatgaata

SEQ ID NO: 34220 - DNA, 50 bp, synthetic construct
  source 1..50: mol_type = other DNA
gatatcctttctgaccttaataagtcaagctgcccgttctgcggcatatc

SEQ ID NO: 34221 - DNA, 50 bp, synthetic construct
  source 1..50: mol_type = other DNA
actcgcatcgctgtcaagccggaatcatccagctccgttgcatagcactc

SEQ ID NO: 34222 - DNA, 50 bp, synthetic construct
  source 1..50: mol_type = other DNA
gtgctgatttttaggggcttacagccgtatatccatagaaaaatcaagta

SEQ ID NO: 34223 - DNA, 50 bp, synthetic construct
  source 1..50: mol_type = other DNA
gccgttttcatcccgccctcgaggagaattttaaaacggatgaaaatggc

SEQ ID NO: 34224 - DNA, 50 bp, synthetic construct
  source 1..50: mol_type = other DNA
ggaatttgatgcggagactttcaaagaccgctttcacgagaatcaatacc

SEQ ID NO: 34225 - DNA, 50 bp, synthetic construct
  source 1..50: mol_type = other DNA
tcgtgtccgtagaggatgtgaagggatgttcatcgagacggtggacatcg

SEQ ID NO: 34226 - DNA, 50 bp, synthetic construct
  source 1..50: mol_type = other DNA
agctcgccaacattctggaatacgggaggtatggcgaatgttgcagcctt

SEQ ID NO: 34227 - DNA, 50 bp, synthetic construct
  source 1..50: mol_type = other DNA
aggttcattgtcgtgcgttgtaaagctctggtacgttagttgctgaatct

SEQ ID NO: 34228 - DNA, 50 bp, synthetic construct
  source 1..50: mol_type = other DNA
ttcaatcaagcgcttataaagtaatgttactttcagagcaaatttttgat

SEQ ID NO: 34229 - DNA, 50 bp, synthetic construct
  source 1..50: mol_type = other DNA
agccagcagtatcgaaacaataaagctttattgtcagcctgcttagagcc

SEQ ID NO: 34230 - DNA, 50 bp, synthetic construct
  source 1..50: mol_type = other DNA
gagaagtattacccctggcggttttcaaaattattctgtggatactgcgg

SEQ ID NO: 34231 - DNA, 50 bp, synthetic construct
  source 1..50: mol_type = other DNA
ataaggtgttttagaggtaatatataacgagtacatgggcaaccgtgaaa

SEQ ID NO: 34232 - DNA, 50 bp, synthetic construct
  source 1..50: mol_type = other DNA
cggtttcattttacagacggaaacaggaagaagtccataaaatgttcttg

SEQ ID NO: 34233 - DNA, 50 bp, synthetic construct
  source 1..50: mol_type = other DNA
tcactgaaacacagcggcgccgcatccctgctgccgttgtgtaacaggga

SEQ ID NO: 34234 - DNA, 50 bp, synthetic construct
  source 1..50: mol_type = other DNA
aagtgcgaaaccatctctaaggccatggcctgtaagatcatggtataatc

SEQ ID NO: 34235 - DNA, 50 bp, synthetic construct
  source 1..50: mol_type = other DNA
ccggaggcccgtatcctatcgtttcaaaaagaatttgttcgggcagacgg

SEQ ID NO: 34236 - DNA, 50 bp, synthetic construct
  source 1..50: mol_type = other DNA
ctgctctgggcattgaccggcattttgtcgccgggactgttccatctgaa

SEQ ID NO: 34237 - DNA, 50 bp, synthetic construct
  source 1..50: mol_type = other DNA
tcctttcagccggtgttgccggctataaacggcattaccggacctaagat

SEQ ID NO: 34238 - DNA, 50 bp, synthetic construct
  source 1..50: mol_type = other DNA
aaaagatcgttgttgatgccgataagcatcgggagtaccagtgatattac

SEQ ID NO: 34239 - DNA, 50 bp, synthetic construct
  source 1..50: mol_type = other DNA
ctttgtcggccgcagaaaggaggaagtcctcctttcctgcgcggagaacc

SEQ ID NO: 34240 - DNA, 50 bp, synthetic construct
  source 1..50: mol_type = other DNA
ccggcggtatcctctgagtggaaaccgatcatctcacaggaaacctggga

SEQ ID NO: 34241 - DNA, 50 bp, synthetic construct
  source 1..50: mol_type = other DNA
tatcctggaagcattgaaatacttccggaaggttcaggacatgcaggacc

SEQ ID NO: 34242 - DNA, 50 bp, synthetic construct
  source 1..50: mol_type = other DNA
agagtctttttcatgtttcttttcctctaaattcccattggaatagaatg

SEQ ID NO: 34243 - DNA, 50 bp, synthetic construct
  source 1..50: mol_type = other DNA
gaagcactaagtattttcatctgctttcagccgaatttctatagagccga

SEQ ID NO: 34244 - DNA, 50 bp, synthetic construct
  source 1..50: mol_type = other DNA
tgtttgcgatcatatcaatcacccacacaagagagacgaaatcattcaca

SEQ ID NO: 34245 - DNA, 50 bp, synthetic construct
  source 1..50: mol_type = other DNA
tggatggttatgaaaagatgctggcgacgattacttttccatttcaagca

SEQ ID NO: 34246 - DNA, 50 bp, synthetic construct
  source 1..50: mol_type = other DNA
acaagataagctctgccgctttacggcataagcggcagagttgatcatga

SEQ ID NO: 34247 - DNA, 50 bp, synthetic construct
  source 1..50: mol_type = other DNA
cggacttcccctacaataatccggctcggacgcattctcagggacgccct

SEQ ID NO: 34248 - DNA, 50 bp, synthetic construct
  source 1..50: mol_type = other DNA
aatacaccgaagcaccggactttgaaaaaagcgacgtgtggccgcctacg

SEQ ID NO: 34249 - DNA, 50 bp, synthetic construct
  source 1..50: mol_type = other DNA
actccagagcgcagagaaaaggccattcggtttgtggagcgcgaggcagc

SEQ ID NO: 34250 - DNA, 50 bp, synthetic construct
  source 1..50: mol_type = other DNA
gatagagccgccggggccagatggggaaatactttcccgaaagctctact

SEQ ID NO: 34251 - DNA, 50 bp, synthetic construct
  source 1..50: mol_type = other DNA
gaaaccatcgacctgctcaagagcgcgccggagcgcaggccgaaaggcta

SEQ ID NO: 34252 - DNA, 50 bp, synthetic construct
  source 1..50: mol_type = other DNA
ctgctaaaaacgcttcaataagtgaccacttgcaaaagcagtgctatgaa

SEQ ID NO: 34253 - DNA, 50 bp, synthetic construct
  source 1..50: mol_type = other DNA
tctgcggagaatgaagtaaggaggtgcagctggacacagatcccatcgat

SEQ ID NO: 34254 - DNA, 50 bp, synthetic construct
  source 1..50: mol_type = other DNA
tgccctgcataaagcaaagcttaacggccttctttgctataatatagggt

SEQ ID NO: 34255 - DNA, 50 bp, synthetic construct
  source 1..50: mol_type = other DNA
ttacaaaagtaaggaatcccacatctttgtcataaatctccctattgtcc

SEQ ID NO: 34256 - DNA, 50 bp, synthetic construct
  source 1..50: mol_type = other DNA
attgctgtcttgtcctcggttatgacgctaacgctggcggcgcttcccag

SEQ ID NO: 34257 - DNA, 50 bp, synthetic construct
  source 1..50: mol_type = other DNA
caacgttttttgcgtttgctgcgatatcgcagttatcgatcaaccggctg

SEQ ID NO: 34258 - DNA, 50 bp, synthetic construct
  source 1..50: mol_type = other DNA
tttcatttttagaaagtccttttacatagatgttctcgttaaaaattcat

SEQ ID NO: 34259 - DNA, 50 bp, synthetic construct
  source 1..50: mol_type = other DNA
acctggcgacctgttcttccttgcggaagctccggacgaggtccctgatc

SEQ ID NO: 34260 - DNA, 50 bp, synthetic construct
  source 1..50: mol_type = other DNA
atggtattgcttcatccattgccgctgtggcatgacctgcgcaatagcag

SEQ ID NO: 34261 - DNA, 50 bp, synthetic construct
  source 1..50: mol_type = other DNA
aaggtcaaattttttaccttttttgcaaattttgtattaaaattcacttt

SEQ ID NO: 34262 - DNA, 50 bp, synthetic construct
  source 1..50: mol_type = other DNA
cactattcttaaaacacttgcaccatggttaaatagttttgagaatagtt

SEQ ID NO: 34263 - DNA, 50 bp, synthetic construct
  source 1..50: mol_type = other DNA
gaagtgacggagattatgatcaatggatttatcggaaacgctgtaaaatt

SEQ ID NO: 34264 - DNA, 50 bp, synthetic construct
  source 1..50: mol_type = other DNA
cggcggtctcgccaacgggcaggaaaactgctgctattttggcaccccgg

SEQ ID NO: 34265 - DNA, 50 bp, synthetic construct
  source 1..50: mol_type = other DNA
tacaagtatgcaaaaagctacccatccgggagactctctgcgtattttta

SEQ ID NO: 34266 - DNA, 50 bp, synthetic construct
  source 1..50: mol_type = other DNA
atctttttgccgggcgtctttttcataaaaataacagccagcagagaact

SEQ ID NO: 34267 - DNA, 50 bp, synthetic construct
  source 1..50: mol_type = other DNA
aaagccgcgatggctcgactggcggcggcggttgatgaaattgcggcaga

SEQ ID NO: 34268 - DNA, 50 bp, synthetic construct
  source 1..50: mol_type = other DNA
atttaattgcgtttcttcttgacataaatgccaaaagccgggaaatcgct

SEQ ID NO: 34269 - DNA, 50 bp, synthetic construct
  source 1..50: mol_type = other DNA
gatcgtgaaaaagtcatgcagattttccgtcctcgtccttgacaacgacg

SEQ ID NO: 34270 - DNA, 50 bp, synthetic construct
  source 1..50: mol_type = other DNA
atccgaaagcgaaaaattataatgacgggcatggatacgcactgccgaca

SEQ ID NO: 34271 - DNA, 50 bp, synthetic construct
  source 1..50: mol_type = other DNA
tgggaaataccgcggctggaatcgaaggatcggctgtggaatcttttgca

SEQ ID NO: 34272 - DNA, 50 bp, synthetic construct
  source 1..50: mol_type = other DNA
gtatatttcgtcgttttgcgaatagctataaccaaaacggagaaaaatca

SEQ ID NO: 34273 - DNA, 50 bp, synthetic construct
  source 1..50: mol_type = other DNA
ttttggtaacccttgcttatatagacaaataaaaaaaagggccgccaaat

SEQ ID NO: 34274 - DNA, 50 bp, synthetic construct
  source 1..50: mol_type = other DNA
atattatagcaaagaaggccggaaaattccattctgtaagtcacttatat

SEQ ID NO: 34275 - DNA, 50 bp, synthetic construct
  source 1..50: mol_type = other DNA
ttgttatatagattaagtaacttatggattataaataggtgtattaaaaa

SEQ ID NO: 34276 - DNA, 50 bp, synthetic construct
  source 1..50: mol_type = other DNA
ctgcgtgcgggaaagaatgatcgtgcacgatcgcgcgcacacgcacgcgc

SEQ ID NO: 34277 - DNA, 50 bp, synthetic construct
  source 1..50: mol_type = other DNA
tgttttcgttcaatatatttctccgatattaaaaatatttctaaaatacg

SEQ ID NO: 34278 - DNA, 50 bp, synthetic construct
  source 1..50: mol_type = other DNA
acggttcgactacagactatgtgtggcatcagagtctgtagatgatgaaa

SEQ ID NO: 34279 - DNA, 50 bp, synthetic construct
  source 1..50: mol_type = other DNA
acgcttgcatcaccttttgcggcactttttccttttacagatattccgag

SEQ ID NO: 34280 - DNA, 50 bp, synthetic construct
  source 1..50: mol_type = other DNA
gctcatagcgagaacagggatttgatgcaagcccttttccgcagtaaaac

SEQ ID NO: 34281 - DNA, 50 bp, synthetic construct
  source 1..50: mol_type = other DNA
acggtcaacagtgttcagcgtgtagctacacccggatatctgtttgcgtt

SEQ ID NO: 34282 - DNA, 50 bp, synthetic construct
  source 1..50: mol_type = other DNA
atcttatatttttaaggatagcagaagagcaaagcttttaaatattttgg

SEQ ID NO: 34283 - DNA, 50 bp, synthetic construct
  source 1..50: mol_type = other DNA
tccattacagagattatggtcaacggatttacggaaacggctgtaaaata

SEQ ID NO: 34284 - DNA, 50 bp, synthetic construct
  source 1..50: mol_type = other DNA
ttctggcttctgaagaatagatagtcatctcctttcgtcagattttcctt

SEQ ID NO: 34285 - DNA, 50 bp, synthetic construct
  source 1..50: mol_type = other DNA
cacggtttcatatacagatatgccaagtaaaatctgtatataaaaatata

SEQ ID NO: 34286 - DNA, 50 bp, synthetic construct
  source 1..50: mol_type = other DNA
aaatcctgcaatcgcttcaaggcacgcaagaaaaggcagaaagagcagga

SEQ ID NO: 34287 - DNA, 50 bp, synthetic construct
  source 1..50: mol_type = other DNA
actggtggtctatattgagtatgtcatcatcctgaaatccgaacaggtca

SEQ ID NO: 34288 - DNA, 50 bp, synthetic construct
  source 1..50: mol_type = other DNA
tgctatcggctaaggtcatcgacctatgacgatgaagatggtggaaagcg

SEQ ID NO: 34289 - DNA, 50 bp, synthetic construct
  source 1..50: mol_type = other DNA
aattactaataagtttttctttctcaatatgtaaacacattacttatatt

SEQ ID NO: 34290 - DNA, 50 bp, synthetic construct
  source 1..50: mol_type = other DNA
ttaatttagaataaattatatataaaaatatagaggattttctatattaa

SEQ ID NO: 34291 - DNA, 50 bp, synthetic construct
  source 1..50: mol_type = other DNA
ttgctggcggggcattttttgtttgccgccaaaggatgatgaagaagatg

SEQ ID NO: 34292 - DNA, 50 bp, synthetic construct
  source 1..50: mol_type = other DNA
ttttaacgtcaagaacggcgtaacaggataccccgtcaattgcgttgctt

SEQ ID NO: 34293 - DNA, 50 bp, synthetic construct
  source 1..50: mol_type = other DNA
tatcaggcggccagcgtagaagatcggtcttcttgtgttcatactttgcg

SEQ ID NO: 34294 - DNA, 50 bp, synthetic construct
  source 1..50: mol_type = other DNA
ggagtcggttcatcaatggaaagaaatctttggggcgctgcacctactcc

SEQ ID NO: 34295 - DNA, 50 bp, synthetic construct
  source 1..50: mol_type = other DNA
gaacgtgcgccagcagcacgccgccggcgctcgtctgctgagctgcggta

SEQ ID NO: 34296 - DNA, 50 bp, synthetic construct
  source 1..50: mol_type = other DNA
tctgtagtaaaaattttgccatttataaatggcaaaaatttctatataaa

SEQ ID NO: 34297 - DNA, 50 bp, synthetic construct
  source 1..50: mol_type = other DNA
cccgcctccaatggcgggggtaaaaaaatcccgccgccatatcggacagg

SEQ ID NO: 34298 - DNA, 50 bp, synthetic construct
  source 1..50: mol_type = other DNA
cagcccggaaacaaagtcgggtggaattgtcttgttttgctttcgggctg

SEQ ID NO: 34299 - DNA, 50 bp, synthetic construct
  source 1..50: mol_type = other DNA
tccattaaaggatggaataatattgctcttaggcactggggtaaaatgct

SEQ ID NO: 34300 - DNA, 50 bp, synthetic construct
  source 1..50: mol_type = other DNA
cgagaagtgaatacttttgtattatatacgcatccaatatttactttcaa

SEQ ID NO: 34301 - DNA, 50 bp, synthetic construct
  source 1..50: mol_type = other DNA
agaaattataaacctaaacttattataataaattttagatttactattga

SEQ ID NO: 34302 - DNA, 50 bp, synthetic construct
  source 1..50: mol_type = other DNA
catggaagaagaaccgtccgacattcctgtcccatccttcttcgtgctgc

SEQ ID NO: 34303 - DNA, 50 bp, synthetic construct
  source 1..50: mol_type = other DNA
ctgtcattttatcaggtaaatacaattgaatttatcaaccaaatggttta

SEQ ID NO: 34304 - DNA, 50 bp, synthetic construct
  source 1..50: mol_type = other DNA
atttatcagtaattgacttgatatatgactatatccatttccttttgaat

SEQ ID NO: 34305 - DNA, 50 bp, synthetic construct
  source 1..50: mol_type = other DNA
gttttcggttggaaggtttctgttatcccctttccccaggcaccgaaaaa

SEQ ID NO: 34306 - DNA, 50 bp, synthetic construct
  source 1..50: mol_type = other DNA
ttttctatatcattataacaaatttttaaaatatatataaatattatgta

SEQ ID NO: 34307 - DNA, 50 bp, synthetic construct
  source 1..50: mol_type = other DNA
aaaaatttattaaatatagaaaaaaagtttagaaaataaattaaatttta

SEQ ID NO: 34308 - DNA, 50 bp, synthetic construct
  source 1..50: mol_type = other DNA
acggtgctgatgtctccggtatccatggataccggattgaaaatggtcgg

SEQ ID NO: 34309 - DNA, 50 bp, synthetic construct
  source 1..50: mol_type = other DNA
gatccctttgaacaggcggcgtatgcagcatgtgtctgttgtagatcagg

SEQ ID NO: 34310 - DNA, 50 bp, synthetic construct
  source 1..50: mol_type = other DNA
ttcatctcgatattttccttcgccgtagtctgagaaaatccgtagatgat

SEQ ID NO: 34311 - DNA, 50 bp, synthetic construct
  source 1..50: mol_type = other DNA
aagtagtaaaatcaaattcgaaataattttagacgtaaatatgcctagta

SEQ ID NO: 34312 - DNA, 50 bp, synthetic construct
  source 1..50: mol_type = other DNA
atgatttcatgcaatgcggatatttgttcctccgcgcctttagaataagc

SEQ ID NO: 34313 - DNA, 50 bp, synthetic construct
  source 1..50: mol_type = other DNA
atttatctacttgtttcattaaactttttttgtgaaattgtttattaaat

SEQ ID NO: 34314 - DNA, 50 bp, synthetic construct
  source 1..50: mol_type = other DNA
gtgcggctggaagcaaaagaggcaaatggctggactgcttgcaattgcag

SEQ ID NO: 34315 - DNA, 50 bp, synthetic construct
  source 1..50: mol_type = other DNA
atttttatcacctcttttgtattatatcattttcttcatcatctgtcaaa

SEQ ID NO: 34316 - DNA, 50 bp, synthetic construct
  source 1..50: mol_type = other DNA
gtatgtatattcgctttgtcttttcttactgatacagccgatataccgtt

SEQ ID NO: 34317 - DNA, 50 bp, synthetic construct
  source 1..50: mol_type = other DNA
gaatttcgagctattttagaaaagggcatttttacaatgatgcgaaatga

SEQ ID NO: 34318 - DNA, 50 bp, synthetic construct
  source 1..50: mol_type = other DNA
gcttacggatatcggcaccgaagaacgagttagcgcatcttgagatagtt

SEQ ID NO: 34319 - DNA, 50 bp, synthetic construct
  source 1..50: mol_type = other DNA
cagcacatgccttcaggggtacatcaatataaaaatgatattgtgtcagc

SEQ ID NO: 34320 - DNA, 50 bp, synthetic construct
  source 1..50: mol_type = other DNA
taaatacaattacataggagtgtgatccggatcctgcgggtgggtatcca

SEQ ID NO: 34321 - DNA, 50 bp, synthetic construct
  source 1..50: mol_type = other DNA
acgataagaaaatatgaaggaacacctgtggagcgggatttacttttcgt

SEQ ID NO: 34322 - DNA, 50 bp, synthetic construct
  source 1..50: mol_type = other DNA
gcctgttggagcagacagaggaaaaagtttctctgtcgacaagttcaggc

SEQ ID NO: 34323 - DNA, 50 bp, synthetic construct
  source 1..50: mol_type = other DNA
ctgattacttctatattatatcacaatcaaaaatggatagaaacaaaaga

SEQ ID NO: 34324 - DNA, 50 bp, synthetic construct
  source 1..50: mol_type = other DNA
gaaaggtatcgcagattgtacttgctgccgttcatatttttttacccaga

SEQ ID NO: 34325 - DNA, 50 bp, synthetic construct
  source 1..50: mol_type = other DNA
gcggataccgatggtcaaaggaattggctgctttcaccgtccgcatcccc

SEQ ID NO: 34326 - DNA, 50 bp, synthetic construct
  source 1..50: mol_type = other DNA
aaatcaacctttcttgttaatctaattaagagaggaaaaacacatgatta

SEQ ID NO: 34327 - DNA, 50 bp, synthetic construct
  source 1..50: mol_type = other DNA
atactctaggttgtccgtatgtataaatgcaaatagacaagctagttcta

SEQ ID NO: 34328 - DNA, 50 bp, synthetic construct
  source 1..50: mol_type = other DNA
tgatgccgcgtgggcacatgccgtgcagtacatgtgcagacataagcaca

SEQ ID NO: 34329 - DNA, 50 bp, synthetic construct
  source 1..50: mol_type = other DNA
tttctcccagtttacggttccattatgcaggaaaatgaaacttatgtaat

SEQ ID NO: 34330 - DNA, 50 bp, synthetic construct
  source 1..50: mol_type = other DNA
gtagcagaattggtagcagtttcggataaatctggtaccacagctggttg

SEQ ID NO: 34331 - DNA, 50 bp, synthetic construct
  source 1..50: mol_type = other DNA
gtttccttcatccggtcatcgtccactcactctgaatacccgaaaagtca

SEQ ID NO: 34332 - DNA, 50 bp, synthetic construct
  source 1..50: mol_type = other DNA
gagaacctaaaattgtttgaccgtttaacggcattcaattttttcaacat

SEQ ID NO: 34333 - DNA, 50 bp, synthetic construct
  source 1..50: mol_type = other DNA
aaacgggaaaagtcgggtatactaatgatctcgtcccgcttttccctcac

SEQ ID NO: 34334 - DNA, 50 bp, synthetic construct
  source 1..50: mol_type = other DNA
gagaaagactggtaaggcggagtaattacagaagctggaatatcttttct

SEQ ID NO: 34335 - DNA, 50 bp, synthetic construct
  source 1..50: mol_type = other DNA
ggattcgtagaattataccgaaaatccatattgtgcaatgaagtcaatgc

SEQ ID NO: 34336 - DNA, 50 bp, synthetic construct
  source 1..50: mol_type = other DNA
attagctccacgctgttgtatatgatcatatacaacagcgtggagctagc

SEQ ID NO: 34337 - DNA, 50 bp, synthetic construct
  source 1..50: mol_type = other DNA
ttcatgtgctggctgttatttttgtactgccttcccagccaatacaagat

SEQ ID NO: 34338 - DNA, 50 bp, synthetic construct
  source 1..50: mol_type = other DNA
tccaccagctgagaatagcggcccgtcatccgcgaatgaaattggctttc

SEQ ID NO: 34339 - DNA, 50 bp, synthetic construct
  source 1..50: mol_type = other DNA
gcagttcagaatcgctaacttctatattatagtatatcctttcaaaatgc

SEQ ID NO: 34340 - DNA, 50 bp, synthetic construct
  source 1..50: mol_type = other DNA
tgaatttgacaaaatcatggtccgaagagatgatgccgattattgatgca

SEQ ID NO: 34341 - DNA, 50 bp, synthetic construct
  source 1..50: mol_type = other DNA
cagcctgatcataagcgaggtgagcagtcacctacagtaatttcaacagt

SEQ ID NO: 34342 - DNA, 50 bp, synthetic construct
  source 1..50: mol_type = other DNA
gtggcggtcttggcatagacgccttcggtcgcttcgctgaatgcggcaag

SEQ ID NO: 34343 - DNA, 50 bp, synthetic construct
  source 1..50: mol_type = other DNA
catcagacggcagtcctcaaggatgccgtatttattggctataattgtat

SEQ ID NO: 34344 - DNA, 50 bp, synthetic construct
  source 1..50: mol_type = other DNA
tccattgtatctctgggcttcactccggcaacctccctgtatggcatgga

SEQ ID NO: 34345 - DNA, 50 bp, synthetic construct
  source 1..50: mol_type = other DNA
acattcaccattcatacaatgtgaattattaaaatgataattgatagtgt

SEQ ID NO: 34346 - DNA, 50 bp, synthetic construct
  source 1..50: mol_type = other DNA
catagattttaagataaattaaagagcacggttttatgataaaatgagac

SEQ ID NO: 34347 - DNA, 50 bp, synthetic construct
  source 1..50: mol_type = other DNA
atagatagtttttttatatttggtattccaaatatacgtttgctatttat

SEQ ID NO: 34348 - DNA, 50 bp, synthetic construct
  source 1..50: mol_type = other DNA
ggaagtgaggtgcagccgaaggagggctcccattgataagctccacttct

SEQ ID NO: 34349 - DNA, 50 bp, synthetic construct
  source 1..50: mol_type = other DNA
gcagatggtgatttttccatccacaagtctattgaaaaatcatatgtagc

SEQ ID NO: 34350 - DNA, 50 bp, synthetic construct
  source 1..50: mol_type = other DNA
ttattaatgaaggggaagcaaagatctctccccatccctttatgatggta

SEQ ID NO: 34351 - DNA, 50 bp, synthetic construct
  source 1..50: mol_type = other DNA
tgtattggtactaaaaaaattccggccggttttccggcttaacatatatg

SEQ ID NO: 34352 - DNA, 50 bp, synthetic construct
  source 1..50: mol_type = other DNA
taacctattggcctgcgctccggcgcgctcttgagcaggtcgatggtttc

SEQ ID NO: 34353 - DNA, 50 bp, synthetic construct
  source 1..50: mol_type = other DNA
cgttgcaaatcttggccatgaagtccccttctaacgatagatttgcagta

SEQ ID NO: 34354 - DNA, 50 bp, synthetic construct
  source 1..50: mol_type = other DNA
cctgtacaggtgtattttttatacccagccccgatatagacctgtacatt

SEQ ID NO: 34355 - DNA, 50 bp, synthetic construct
  source 1..50: mol_type = other DNA
aaaaaatcgacaagaagctgtatgagtaatcagctcgctgtaggggtggg

SEQ ID NO: 34356 - DNA, 50 bp, synthetic construct
  source 1..50: mol_type = other DNA
ttgagcatattttattatcatatctagtattgagaatagataatgtaaaa

SEQ ID NO: 34357 - DNA, 50 bp, synthetic construct
  source 1..50: mol_type = other DNA
tagttttttattgcttttttataactggatacaaattaaataaaaataat

SEQ ID NO: 34358 - DNA, 50 bp, synthetic construct
  source 1..50: mol_type = other DNA
tctttggtcatctatgcttgttctggaaatcggtcaacgaaaggcaaaat

SEQ ID NO: 34359 - DNA, 50 bp, synthetic construct
  source 1..50: mol_type = other DNA
cagtcagaaaaattcattaaatttgcaaagttactacattctagcgactt

SEQ ID NO: 34360 - DNA, 50 bp, synthetic construct
  source 1..50: mol_type = other DNA
gaacacttccggggcgtgcaaagatatattttcacttccattctgacttg

SEQ ID NO: 34361 - DNA, 50 bp, synthetic construct
  source 1..50: mol_type = other DNA
catggatccgaccggagagccggagttcaggaatgtcggacggttcttct

SEQ ID NO: 34362 - DNA, 50 bp, synthetic construct
  source 1..50: mol_type = other DNA
tgtggaataagaggaatatgctcctcattgtttcctcctgttataccgct

SEQ ID NO: 34363 - DNA, 50 bp, synthetic construct
  source 1..50: mol_type = other DNA
tttcatcagagataaaactattaaaaatgacggtacgtgagctgatggag

SEQ ID NO: 34364 - DNA, 50 bp, synthetic construct
  source 1..50: mol_type = other DNA
cgcgtgactgtaggtgtataagctctggcttttgcccgaactgcggcgcg

SEQ ID NO: 34365 - DNA, 50 bp, synthetic construct
  source 1..50: mol_type = other DNA
ctgaatcgccgcccagacgaatgctcataaagctacgggcgcacccatac

SEQ ID NO: 34366 - DNA, 50 bp, synthetic construct
  source 1..50: mol_type = other DNA
ttatttgttctgcagccgtttcatcattcgtgattgtgaatttcaaaatt

SEQ ID NO: 34367 - DNA, 50 bp, synthetic construct
  source 1..50: mol_type = other DNA
cgattacaacgtttacgaatgcgaaaacgttcccataaaaaaccaaattt

SEQ ID NO: 34368 - DNA, 50 bp, synthetic construct
  source 1..50: mol_type = other DNA
gatatttcggaaatgaatttaactttttgcaaataaattttcaaaactcc

SEQ ID NO: 34369 - DNA, 50 bp, synthetic construct
  source 1..50: mol_type = other DNA
gagagcaagctataaaaaagtcattaatgaactgtttattactaattctt

SEQ ID NO: 34370 - DNA, 50 bp, synthetic construct
  source 1..50: mol_type = other DNA
gtatttgcaagaaaaatataaaccatttcggtcattttacttgtaaaatt

SEQ ID NO: 34371 - DNA, 50 bp, synthetic construct
  source 1..50: mol_type = other DNA
ggacagatgatatgaaagaaaaagctttttacattttggacagcttgtat

SEQ ID NO: 34372 - DNA, 50 bp, synthetic construct
  source 1..50: mol_type = other DNA
tctgttaaattccggcaactcaacatttaacattcttcataaataactga

SEQ ID NO: 34373 - DNA, 50 bp, synthetic construct
  source 1..50: mol_type = other DNA
agcgaaagggaaagaaccattatagataacagccagatacgggtgtcgag

SEQ ID NO: 34374 - DNA, 50 bp, synthetic construct
  source 1..50: mol_type = other DNA
tgggacaagggttccggataccattaagttcatagatgaatcttttctca

SEQ ID NO: 34375 - DNA, 50 bp, synthetic construct
  source 1..50: mol_type = other DNA
tcagccgtattttttttccatttatggattttattataaaattttcatgc

SEQ ID NO: 34376 - DNA, 50 bp, synthetic construct
  source 1..50: mol_type = other DNA
agggtgtggccatcaagcgctattcctgacgcgcgaaatactcacctcgc

SEQ ID NO: 34377 - DNA, 50 bp, synthetic construct
  source 1..50: mol_type = other DNA
taaagagtatgaaggggtaacaaaaaaataatacctcctcatatactaat

SEQ ID NO: 34378 - DNA, 50 bp, synthetic construct
  source 1..50: mol_type = other DNA
acaaaaggattacaggagatacgaaatcgcttctgcaatcatccttaaca

SEQ ID NO: 34379 - DNA, 50 bp, synthetic construct
  source 1..50: mol_type = other DNA
cctttatatttattgacttttttcagaaaaaagagggtttgttaaaaaga

SEQ ID NO: 34380 - DNA, 50 bp, synthetic construct
  source 1..50: mol_type = other DNA
attgagacataccaaagcggaaaatgttttctgacgggcggcttctttca

SEQ ID NO: 34381 - DNA, 50 bp, synthetic construct
  source 1..50: mol_type = other DNA
aacaatttccacaacttgttatagctgccgctcaagttcgagacctttac

SEQ ID NO: 34382 - DNA, 50 bp, synthetic construct
  source 1..50: mol_type = other DNA
tagagtttataaacttgcaaattatttaatttgcaagttttcaaatacta

SEQ ID NO: 34383 - DNA, 50 bp, synthetic construct
  source 1..50: mol_type = other DNA
gcgctatcgcacagttctccgcattcctctccggaactgccgacatcggc

SEQ ID NO: 34384 - DNA, 50 bp, synthetic construct
  source 1..50: mol_type = other DNA
tctaacatttgttagataccataaaactatattcaacacagttttatacg

SEQ ID NO: 34385 - DNA, 50 bp, synthetic construct
  source 1..50: mol_type = other DNA
gatgaaaagagaaaaaactataaaaatttgtattatttttttctttcatt

SEQ ID NO: 34386 - DNA, 50 bp, synthetic construct
  source 1..50: mol_type = other DNA
ttaataaatagtatattagagaattaaatttatattattatatttaataa

SEQ ID NO: 34387 - DNA, 50 bp, synthetic construct
  source 1..50: mol_type = other DNA
atttatagtattcactaatcaagaaaaataaagtacataatactaataac

SEQ ID NO: 34388 - DNA, 50 bp, synthetic construct
  source 1..50: mol_type = other DNA
aaatcatataaccgtacacagaacaagttttgtgtacgaaaggatgattt

SEQ ID NO: 34389 - DNA, 50 bp, synthetic construct
  source 1..50: mol_type = other DNA
tataacatgatcagcccatttctaaaaacaacatgggtgtcaaagttcct

SEQ ID NO: 34390 - DNA, 50 bp, synthetic construct
  source 1..50: mol_type = other DNA
gttatttttgtacccttttttgcgtatgcagaaaaggcagcaaaaacaag

SEQ ID NO: 34391 - DNA, 50 bp, synthetic construct
  source 1..50: mol_type = other DNA
atatattctaacaaaggagtatccatcaataatctcaccttttaaaatac

SEQ ID NO: 34392 - DNA, 50 bp, synthetic construct
  source 1..50: mol_type = other DNA
gatagacacaatactcaccgaaaaatttttccgtctgtaccgggtttact

SEQ ID NO: 34393 - DNA, 50 bp, synthetic construct
  source 1..50: mol_type = other DNA
tgccctgaacattacgaatttcaacacccctcacagaaaagaacccggca

SEQ ID NO: 34394 - DNA, 50 bp, synthetic construct
  source 1..50: mol_type = other DNA
atacagccccaaggtcgaggtatgatcatagtcacactttttccttttat

SEQ ID NO: 34395 - DNA, 50 bp, synthetic construct
  source 1..50: mol_type = other DNA
cggcgcgagactctttgtttctggcgccacgattaaagaggatgaagcca

SEQ ID NO: 34396 - DNA, 50 bp, synthetic construct
  source 1..50: mol_type = other DNA
tcatatcgatattgtttgtgaagatatcagtcgaacttcatctgatccag

SEQ ID NO: 34397 - DNA, 50 bp, synthetic construct
  source 1..50: mol_type = other DNA
tctccggcgcgtcctggcaaggggcgtctttcctgcccccgtgcctccgc

SEQ ID NO: 34398 - DNA, 50 bp, synthetic construct
  source 1..50: mol_type = other DNA
cgcagggaggcaatgagtgaaagaatcgtctctttcttttcctccgaaag

SEQ ID NO: 34399 - DNA, 50 bp, synthetic construct
  source 1..50: mol_type = other DNA
gtatggcacccgttgcgagcgtcgtcctcttaaaaaagaatgtgccgtac

SEQ ID NO: 34400 - DNA, 50 bp, synthetic construct
  source 1..50: mol_type = other DNA
cactgttttaccactatgtctctttaattaagaaaagtggaaagaaaagt

SEQ ID NO: 34401 - DNA, 50 bp, synthetic construct
  source 1..50: mol_type = other DNA
gtcttgcgaaaatgcaccaaccattttgtccgagtccatcggcgcagtgt

SEQ ID NO: 34402 - DNA, 50 bp, synthetic construct
  source 1..50: mol_type = other DNA
ttgtcaacgcccccaccgaagggcaaattcttcggtggattccgtttcaa

SEQ ID NO: 34403 - DNA, 50 bp, synthetic construct
  source 1..50: mol_type = other DNA
tatacaagcaaacaggagggtataaggatattcgtatagaggggggtatt

SEQ ID NO: 34404 - DNA, 50 bp, synthetic construct
  source 1..50: mol_type = other DNA
ttcctgtgccctacatagaaactgagaaagaaaacaatagaacacagaaa

SEQ ID NO: 34405 - DNA, 50 bp, synthetic construct
  source 1..50: mol_type = other DNA
gtatttttttcagtttatgccaaggacggtggaaaaaccgaagttgtatt

SEQ ID NO: 34406 - DNA, 50 bp, synthetic construct
  source 1..50: mol_type = other DNA
gatgagaaaaagaaaaagccggatgactccggctcatccgttttcttttg

SEQ ID NO: 34407 - DNA, 50 bp, synthetic construct
  source 1..50: mol_type = other DNA
tgcataggttttatttttataccttttttgaatattgtgaaactggcact

SEQ ID NO: 34408 - DNA, 50 bp, synthetic construct
  source 1..50: mol_type = other DNA
agtgtttgtacatttcccttatgaattttctccatcgatggacaaaagtt

SEQ ID NO: 34409 - DNA, 50 bp, synthetic construct
  source 1..50: mol_type = other DNA
cttgtaattgatcgtgtttccggcgcgggggaaatcccttcaggtccacc

SEQ ID NO: 34410 - DNA, 50 bp, synthetic construct
  source 1..50: mol_type = other DNA
atttccgaatcaatatcggcagctgtcagtgccagaattcggcaaatgcg

SEQ ID NO: 34411 - DNA, 50 bp, synthetic construct
  source 1..50: mol_type = other DNA
tactaagaagaatagggattctattgacagattaagtattgactaattta

SEQ ID NO: 34412 - DNA, 50 bp, synthetic construct
  source 1..50: mol_type = other DNA
tgttaaggatgattgcagaagcgatttcgtatctcctgtaatccttttgt

SEQ ID NO: 34413 - DNA, 50 bp, synthetic construct
  source 1..50: mol_type = other DNA
gttagctaatagtcttgattgcaataagacaatcataagtatttaatagt

SEQ ID NO: 34414 - DNA, 50 bp, synthetic construct
  source 1..50: mol_type = other DNA
tcaaatttgcagcggacaaggcgcttttcttttttcgaggccaaattttt

SEQ ID NO: 34415 - DNA, 50 bp, synthetic construct
  source 1..50: mol_type = other DNA
gtccagattgccagtcggtagctttacaccgtcctgtcggttcatcagcc

SEQ ID NO: 34416 - DNA, 50 bp, synthetic construct
  source 1..50: mol_type = other DNA
tgaccttttataatcaaatttctgatttttaaaatttttcaaaattcttc

SEQ ID NO: 34417 - DNA, 50 bp, synthetic construct
  source 1..50: mol_type = other DNA
gggtttttcatagataaaattccaatatgtcatatttcttccgaaaattt

SEQ ID NO: 34418 - DNA, 50 bp, synthetic construct
  source 1..50: mol_type = other DNA
ttgccgcattcagtgaagccaccgaccgcaggtttcaacgcctgcggttt

SEQ ID NO: 34419 - DNA, 50 bp, synthetic construct
  source 1..50: mol_type = other DNA
tctcatgcattttataaataaaggagaccccattaccgatttgtatgagg

SEQ ID NO: 34420 - DNA, 50 bp, synthetic construct
  source 1..50: mol_type = other DNA
aaaccttagtattactggggttttcgaaaaagccagttgaggtaaggaat

SEQ ID NO: 34421 - DNA, 50 bp, synthetic construct
  source 1..50: mol_type = other DNA
cacgtaaaaatccagaaaagattatttctttttttcgtcttttggctttg

SEQ ID NO: 34422 - DNA, 50 bp, synthetic construct
  source 1..50: mol_type = other DNA
aagaacataaagaccagcttgctttaagtcaagctggctgctctggggca

SEQ ID NO: 34423 - DNA, 50 bp, synthetic construct
  source 1..50: mol_type = other DNA
cacttcccccttggtttcttttcatccgaaaggaaaacgtgtggtaatgc

SEQ ID NO: 34424 - DNA, 50 bp, synthetic construct
  source 1..50: mol_type = other DNA
ccgtcgatgttgtagagggcagcttcagcagccccggacaacaatgttgc

SEQ ID NO: 34425 - DNA, 50 bp, synthetic construct
  source 1..50: mol_type = other DNA
gacatgaatattgccagtgctgattttctttccttggcataaactgaaaa

SEQ ID NO: 34426 - DNA, 50 bp, synthetic construct
  source 1..50: mol_type = other DNA
atatttaattaaggagtggttataattacatacctcccttatattcccat

SEQ ID NO: 34427 - DNA, 50 bp, synthetic construct
  source 1..50: mol_type = other DNA
attaagtgcaacaacaaataaaatccatttcgctttcatgacctcgctca

SEQ ID NO: 34428 - DNA, 50 bp, synthetic construct
  source 1..50: mol_type = other DNA
ctatttttgtatataggagatatgaaatcagctcctttccggtactatac

SEQ ID NO: 34429 - DNA, 50 bp, synthetic construct
  source 1..50: mol_type = other DNA
tagagccacaggataataaacaggatcgtattttctggccgatggcactt

SEQ ID NO: 34430 - DNA, 50 bp, synthetic construct
  source 1..50: mol_type = other DNA
tctccggggcagccatgcaagcggaaatgcctgcagcttggccctggata

SEQ ID NO: 34431 - DNA, 50 bp, synthetic construct
  source 1..50: mol_type = other DNA
atacaaaaatgcaggaaaaataccagaaattgcagagtgtttttttgtaa

SEQ ID NO: 34432 - DNA, 50 bp, synthetic construct
  source 1..50: mol_type = other DNA
caccggaagtgaaacagcagatgagtccacctgaactgtcaggtgaccga

SEQ ID NO: 34433 - DNA, 50 bp, synthetic construct
  source 1..50: mol_type = other DNA
atttgccggaatttatgctgatgacggcatcttcataagtatcaacaacg

SEQ ID NO: 34434 - DNA, 50 bp, synthetic construct
  source 1..50: mol_type = other DNA
gtgaactatatgacattttagcagtacctccaaaatttacttttggaaaa

SEQ ID NO: 34435 - DNA, 50 bp, synthetic construct
  source 1..50: mol_type = other DNA
caaggatggctgagatgatgctttccacatcattgaacggtaaaacgttc

SEQ ID NO: 34436 - DNA, 50 bp, synthetic construct
  source 1..50: mol_type = other DNA
tgtccgatggagctttgctgaaagccttggcagcagcacaccaggcatcc

SEQ ID NO: 34437 - DNA, 50 bp, synthetic construct
  source 1..50: mol_type = other DNA
cattaccagtaccaggctgcggttataaatgaagataggcaggtccgtcg

SEQ ID NO: 34438 - DNA, 50 bp, synthetic construct
  source 1..50: mol_type = other DNA
ctgcggcatcagttccacccgcttttttatgtttggaacttttgccgtct

SEQ ID NO: 34439 - DNA, 50 bp, synthetic construct
  source 1..50: mol_type = other DNA
cacatgactttgaattggcaaaaaaatccttgcaaaagcataaatattta

SEQ ID NO: 34440 - DNA, 50 bp, synthetic construct
  source 1..50: mol_type = other DNA
ctttgcccggaaccgctacgacagtgctttcggcgttggtatgggccaac

SEQ ID NO: 34441 - DNA, 50 bp, synthetic construct
  source 1..50: mol_type = other DNA
aggacagacagctgcgggccgcagatctggccccggcggctctatcgtac

SEQ ID NO: 34442 - DNA, 50 bp, synthetic construct
  source 1..50: mol_type = other DNA
tactgcctttgtttccttttctttaaaaataacagcgcacaaacgttctg

SEQ ID NO: 34443 - DNA, 50 bp, synthetic construct
  source 1..50: mol_type = other DNA
caaaccgtgtacattttcaggaaaatgcaagcattactgggaacgctttc

SEQ ID NO: 34444 - DNA, 50 bp, synthetic construct
  source 1..50: mol_type = other DNA
caattttctttttttaccagaaatatggggctgccgttcgaggaaaaagt

SEQ ID NO: 34445 - DNA, 50 bp, synthetic construct
  source 1..50: mol_type = other DNA
tgcccagtgcagacagcacctgattgcaagcccaatgatttattttcatg

SEQ ID NO: 34446 - DNA, 50 bp, synthetic construct
  source 1..50: mol_type = other DNA
aatgaaacaatgctttgaatgatgtacgaagtacagtgcttttttggtgg

SEQ ID NO: 34447 - DNA, 50 bp, synthetic construct
  source 1..50: mol_type = other DNA
tgaatggagtttgccggcatttatgcataattgtcagcatacattttaca

SEQ ID NO: 34448 - DNA, 50 bp, synthetic construct
  source 1..50: mol_type = other DNA
aagatgaagattgaaggaaacagatattggactgtttctttttttatacg

SEQ ID NO: 34449 - DNA, 50 bp, synthetic construct
  source 1..50: mol_type = other DNA
tgtggaggactacaagaagtttgttgatatactcggtatagtgctcaacc

SEQ ID NO: 34450 - DNA, 50 bp, synthetic construct
  source 1..50: mol_type = other DNA
cgatatcccggaacaggatgatactgatcaaatctggaataagggtatct

SEQ ID NO: 34451 - DNA, 50 bp, synthetic construct
  source 1..50: mol_type = other DNA
attttcacacaaattatttttatttgaaagccaataattgcaagtacaat

SEQ ID NO: 34452 - DNA, 50 bp, synthetic construct
  source 1..50: mol_type = other DNA
cgatttggaaacaacttgtgtctgataagccaccataaatttctgaatcc

SEQ ID NO: 34453 - DNA, 50 bp, synthetic construct
  source 1..50: mol_type = other DNA
attattctctgaaatccgttgactttacattggcgatctcaatgaaaagc

SEQ ID NO: 34454 - DNA, 50 bp, synthetic construct
  source 1..50: mol_type = other DNA
tatgccaaatacagttcgcttatatatttatggcggctttgtacttccaa

SEQ ID NO: 34455 - DNA, 50 bp, synthetic construct
  source 1..50: mol_type = other DNA
ttagctgtcaaagaacattcgtcatttcccggtcttttggtgacagccgt

SEQ ID NO: 34456 - DNA, 50 bp, synthetic construct
  source 1..50: mol_type = other DNA
actccgcaagtgtatttttgtacacaattgcaaaaatatacacaggaggt

SEQ ID NO: 34457 - DNA, 50 bp, synthetic construct
  source 1..50: mol_type = other DNA
tgcaatcggcttctgcgtctccaccgttggaggtgttcaggcgcatccct

SEQ ID NO: 34458 - DNA, 50 bp, synthetic construct
  source 1..50: mol_type = other DNA
ttctgcttgctgccgatggggatggcgccgcccgccgttttgaacaggaa

SEQ ID NO: 34459 - DNA, 50 bp, synthetic construct
  source 1..50: mol_type = other DNA
gatgctacaattcttttccagacaattgacgatcgtagaaatttaaaggt

SEQ ID NO: 34460 - DNA, 50 bp, synthetic construct
  source 1..50: mol_type = other DNA
ttcctccgcctttctaaagccaataatttggtgtttcccagtgggaacaa

SEQ ID NO: 34461 - DNA, 50 bp, synthetic construct
  source 1..50: mol_type = other DNA
atctccgggcggacggctatgaaaccatattcagacttttcaccgatgat

SEQ ID NO: 34462 - DNA, 50 bp, synthetic construct
  source 1..50: mol_type = other DNA
ctcggaatgtggaacggaaagccaattttgcagccttttcaaattccact

SEQ ID NO: 34463 - DNA, 50 bp, synthetic construct
  source 1..50: mol_type = other DNA
aaatgttcgttttgactcctgatagctgcggcatctgctccagagatttt

SEQ ID NO: 34464 - DNA, 50 bp, synthetic construct
  source 1..50: mol_type = other DNA
tctgcttttctacttatcgatacatatgtctaaaaaataaaatgtgcagg

SEQ ID NO: 34465 - DNA, 50 bp, synthetic construct
  source 1..50: mol_type = other DNA
cacataaaaaaggccatctataaatattttgacgcatattttacagtgtg

SEQ ID NO: 34466 - DNA, 50 bp, synthetic construct
  source 1..50: mol_type = other DNA
tactatctggtctggccaaaaacccgcgaagaagcgaagaccccataggt

SEQ ID NO: 34467 - DNA, 50 bp, synthetic construct
  source 1..50: mol_type = other DNA
atagctttatttttttacgctttttttttaacagtaaaaaaccatcggat

SEQ ID NO: 34468 - DNA, 50 bp, synthetic construct
  source 1..50: mol_type = other DNA
aaagaaaggtgaaaggtatcgcagatctcacttttggtatggctttcttc

SEQ ID NO: 34469 - DNA, 50 bp, synthetic construct
  source 1..50: mol_type = other DNA
cgcgcttatttttcgttaatttcttgtaaaaaagtacaaaaataacagcc

SEQ ID NO: 34470 - DNA, 50 bp, synthetic construct
  source 1..50: mol_type = other DNA
aagctgtgtccattgtgaaaattcaaaaacagaagtcttttcgggttctt

SEQ ID NO: 34471 - DNA, 50 bp, synthetic construct
  source 1..50: mol_type = other DNA
atttggttttatcaaccccgtaataaaggctgttgttgacgaagccactg

SEQ ID NO: 34472 - DNA, 50 bp, synthetic construct
  source 1..50: mol_type = other DNA
gacggttatttcaggtaccaacactacatcgggattatgaaaaaattctc

SEQ ID NO: 34473 - DNA, 50 bp, synthetic construct
  source 1..50: mol_type = other DNA
tttttttagaatctaatactacatctatgttcacctcttttatcaagaaa

SEQ ID NO: 34474 - DNA, 50 bp, synthetic construct
  source 1..50: mol_type = other DNA
attgataaagagttagccgaaatcatgaaaggaaaagtttatgtataata

SEQ ID NO: 34475 - DNA, 50 bp, synthetic construct
  source 1..50: mol_type = other DNA
gatatatctccgccgaaaataccactttctctttgggtagtctatatatc

SEQ ID NO: 34476 - DNA, 50 bp, synthetic construct
  source 1..50: mol_type = other DNA
aatgaaaatgtaggaacaatgtttgtttttcttgtagttttatctttcct

SEQ ID NO: 34477 - DNA, 50 bp, synthetic construct
  source 1..50: mol_type = other DNA
aaagcagctcgttcgtttctttgttaaaaatcctgagaataactcctttg

SEQ ID NO: 34478 - DNA, 50 bp, synthetic construct
  source 1..50: mol_type = other DNA
atagagccgccggggccagatggggaatcatctggtccgagtggcgagaa

SEQ ID NO: 34479 - DNA, 50 bp, synthetic construct
  source 1..50: mol_type = other DNA
ggatcgagaaattgggaacagtgggtaagctgttctatttttgccgttcg

SEQ ID NO: 34480 - DNA, 50 bp, synthetic construct
  source 1..50: mol_type = other DNA
gctctgtacgatagagccgccggggccagatttttcacatcgtccagcac

SEQ ID NO: 34481 - DNA, 50 bp, synthetic construct
  source 1..50: mol_type = other DNA
tacgggaatatatcactacccaaaaaaaaggttattgatatattcccgta

SEQ ID NO: 34482 - DNA, 50 bp, synthetic construct
  source 1..50: mol_type = other DNA
gataaacatctttttgtaatcacgttttctgttacaaaaagttcataggc

SEQ ID NO: 34483 - DNA, 50 bp, synthetic construct
  source 1..50: mol_type = other DNA
tttgagcttatgccagagctggaagctttcacctttgatgcaagctaaaa

SEQ ID NO: 34484 - DNA, 50 bp, synthetic construct
  source 1..50: mol_type = other DNA
gacgattgaagaaatataaaatatggatgttgaggaattgatcgatgctt

SEQ ID NO: 34485 - DNA, 50 bp, synthetic construct
  source 1..50: mol_type = other DNA
tgaaatgaagaattatctgaggatcgaggtatcggtagttctgcatctgg

SEQ ID NO: 34486 - DNA, 50 bp, synthetic construct
  source 1..50: mol_type = other DNA
gtccgatattcggcacattattctccagaaggccatcacgctactcgggg

SEQ ID NO: 34487 - DNA, 50 bp, synthetic construct
  source 1..50: mol_type = other DNA
aggcggcagaaagccttctcggagagaacgaacagggctttctgtttgtc

SEQ ID NO: 34488 - DNA, 50 bp, synthetic construct
  source 1..50: mol_type = other DNA
catcgagaaatatggtatgagagtgcatcgccacaccaattttcgatatg

SEQ ID NO: 34489 - DNA, 50 bp, synthetic construct
  source 1..50: mol_type = other DNA
ggaatcaggaacagcacagtcagtgcacaatatgaagatcccaatattcc

SEQ ID NO: 34490 - DNA, 50 bp, synthetic construct
  source 1..50: mol_type = other DNA
ctggtgcgctcggacggggagacacgacattgcacccccatgcgcacccc

SEQ ID NO: 34491 - DNA, 50 bp, synthetic construct
  source 1..50: mol_type = other DNA
tttccgaagaaaggaaaagtgaaaaatatcagaagaccttttttcggttg

SEQ ID NO: 34492 - DNA, 50 bp, synthetic construct
  source 1..50: mol_type = other DNA
aatagcatacgccaaaatggcggaattcctttcatttgtatgatcatatg

SEQ ID NO: 34493 - DNA, 50 bp, synthetic construct
  source 1..50: mol_type = other DNA
taaggacatcaagtccatccgggaattctcaggcggatttgatgtaaaat

SEQ ID NO: 34494 - DNA, 50 bp, synthetic construct
  source 1..50: mol_type = other DNA
gctgacgcgactgcattttgagggtagaatcaaaacggcaatctctaaca

SEQ ID NO: 34495 - DNA, 50 bp, synthetic construct
  source 1..50: mol_type = other DNA
caatttgcgcaggatggcgctcggtttggatgggtatccaggtataggtg

SEQ ID NO: 34496 - DNA, 50 bp, synthetic construct
  source 1..50: mol_type = other DNA
gcaggacaattttttctacaacgcaaaagttgtggaaaaaattcgattcg

SEQ ID NO: 34497 - DNA, 50 bp, synthetic construct
  source 1..50: mol_type = other DNA
cggcttttctataccatgattgagtcacgcatcatctttgcgaagatatt

SEQ ID NO: 34498 - DNA, 50 bp, synthetic construct
  source 1..50: mol_type = other DNA
cattataggtacaggcagccgtgtgatgcctttttcctgcatgaccgcat

SEQ ID NO: 34499 - DNA, 50 bp, synthetic construct
  source 1..50: mol_type = other DNA
accggaatcaacagaatattttgaggtcaagataaccgtttatcgccgta

SEQ ID NO: 34500 - DNA, 50 bp, synthetic construct
  source 1..50: mol_type = other DNA
catattggtaaagaaggaaggcaatattgactttcatcacactcaggatg

SEQ ID NO: 34501 - DNA, 50 bp, synthetic construct
  source 1..50: mol_type = other DNA
tctggtggtaacagagcaaacaagctccgcaaagcttcgtgaccactagc

SEQ ID NO: 34502 - DNA, 50 bp, synthetic construct
  source 1..50: mol_type = other DNA
cggagaatggctgccaccgcttccgcggaaacggtgcggagcatctacct

SEQ ID NO: 34503 - DNA, 50 bp, synthetic construct
  source 1..50: mol_type = other DNA
ctcctgcggcagagcatccgaagaatcgtgcggatcatcggaagcaggtc

SEQ ID NO: 34504 - DNA, 50 bp, synthetic construct
  source 1..50: mol_type = other DNA
agctcatcataagccaatacggcggccggtggtttcggtcgcgatgacgt

SEQ ID NO: 34505 - DNA, 50 bp, synthetic construct
  source 1..50: mol_type = other DNA
caatttggttttacagccattaaacgcgggtgtggtctaaaaccgaatac

SEQ ID NO: 34506 - DNA, 50 bp, synthetic construct
  source 1..50: mol_type = other DNA
taacaacggcaaagattatttctttatcccattattcagttcagttgttt

SEQ ID NO: 34507 - DNA, 50 bp, synthetic construct
  source 1..50: mol_type = other DNA
tatactcttttttgtgaggtgagacgaactactcaaaaaaaatctttata

SEQ ID NO: 34508 - DNA, 50 bp, synthetic construct
  source 1..50: mol_type = other DNA
aactcaaactgcaaaacggacaaattttcatccgtgtagcagtttttaca

SEQ ID NO: 34509 - DNA, 50 bp, synthetic construct
  source 1..50: mol_type = other DNA
gtatatacattatacgaaacattgatccatgtcgccgaagatgcgcagcc

SEQ ID NO: 34510 - DNA, 50 bp, synthetic construct
  source 1..50: mol_type = other DNA
cttttttcaacttctgtaagaccaattggtagggaagaggatgtccttct

SEQ ID NO: 34511 - DNA, 50 bp, synthetic construct
  source 1..50: mol_type = other DNA
aggcataagcgccatgccggaaatatattggatttttgaatcgccacagt

SEQ ID NO: 34512 - DNA, 50 bp, synthetic construct
  source 1..50: mol_type = other DNA
cgctgtccgtggaaacacgggcgtagccgagtatgtcaatcggaaaatcc

SEQ ID NO: 34513 - DNA, 50 bp, synthetic construct
  source 1..50: mol_type = other DNA
cggaagaaggaatagaattagacttggttctagtttgattatgtcgaatc

SEQ ID NO: 34514 - DNA, 50 bp, synthetic construct
  source 1..50: mol_type = other DNA
gagaatgtgaaatctttggattatacatcattgaatgatggttcgttctt

SEQ ID NO: 34515 - DNA, 50 bp, synthetic construct
  source 1..50: mol_type = other DNA
gaaacccaggagctatgcggcttctggaagactgattcaaaaaagattta

SEQ ID NO: 34516 - DNA, 50 bp, synthetic construct
  source 1..50: mol_type = other DNA
attatagaaaaagttaaggagaagcaaatcggcttaatgcttggtacgat

SEQ ID NO: 34517 - DNA, 50 bp, synthetic construct
  source 1..50: mol_type = other DNA
ttccactcaatggcgacacattcaccggaatgaatgaccattgcaatccg

SEQ ID NO: 34518 - DNA, 50 bp, synthetic construct
  source 1..50: mol_type = other DNA
ttgtaaaatcctctgaccaggaaaagttccgctgaaaatggatttaaccg

SEQ ID NO: 34519 - DNA, 50 bp, synthetic construct
  source 1..50: mol_type = other DNA
tttaacaaatccttcttattatatgaaaataatcggaagaatctgattcc

SEQ ID NO: 34520 - DNA, 50 bp, synthetic construct
  source 1..50: mol_type = other DNA
acggcaacccccaattcttgctgtttggcacggagcttgatgcccgccgt

SEQ ID NO: 34521 - DNA, 50 bp, synthetic construct
  source 1..50: mol_type = other DNA
agcttgccagttcagatgataaaaattttcttttctctttaaaagaagaa

SEQ ID NO: 34522 - DNA, 50 bp, synthetic construct
  source 1..50: mol_type = other DNA
agatgaaccattcggacttcgcccatgccggacatgaccatggacgagtc

SEQ ID NO: 34523 - DNA, 50 bp, synthetic construct
  source 1..50: mol_type = other DNA
cctctttgccctgctgccaaggggagccaaacagcagtatttcaaaatcg

SEQ ID NO: 34524 - DNA, 50 bp, synthetic construct
  source 1..50: mol_type = other DNA
gtagtatccgcttacagaagtgtagctacgcccgtgtatcgacagaccac

SEQ ID NO: 34525 - DNA, 50 bp, synthetic construct
  source 1..50: mol_type = other DNA
aactataccttgctccgtatttcatagcacctctgaatcttggtgactca

SEQ ID NO: 34526 - DNA, 50 bp, synthetic construct
  source 1..50: mol_type = other DNA
tggcgaggatggtacggagattctgctgagctataggcccaatatcgcca

SEQ ID NO: 34527 - DNA, 50 bp, synthetic construct
  source 1..50: mol_type = other DNA
caggaaacagaaaatgcggtacaatattagaatatttgccgccgtttttg

SEQ ID NO: 34528 - DNA, 50 bp, synthetic construct
  source 1..50: mol_type = other DNA
cgcctgcggggtgagcgagccgagccgacctctcgcccgccgggcacgac

SEQ ID NO: 34529 - DNA, 50 bp, synthetic construct
  source 1..50: mol_type = other DNA
gagttacgatatagatataacaaagataggtaacatctatataatcgctc

SEQ ID NO: 34530 - DNA, 50 bp, synthetic construct
  source 1..50: mol_type = other DNA
gggttacgttatcgtgttctcgtgtctgcaagatcaggatccggctgtct

SEQ ID NO: 34531 - DNA, 50 bp, synthetic construct
  source 1..50: mol_type = other DNA
gaaacagaaaatgcggtacaataaagatattgttaagcatcacaaggaat

SEQ ID NO: 34532 - DNA, 50 bp, synthetic construct
  source 1..50: mol_type = other DNA
ttttgactgcgctttaaaattgcatctgccgtaaaaaagcgtaaaaaaat

SEQ ID NO: 34533 - DNA, 50 bp, synthetic construct
  source 1..50: mol_type = other DNA
ttagcctccatcgcatctttgtacatgtacctgctctcgatcgacatcga

SEQ ID NO: 34534 - DNA, 50 bp, synthetic construct
  source 1..50: mol_type = other DNA
gtacggcgaaggcaacagcgcgaagctgctgtgcgcgcactttgccgaca

SEQ ID NO: 34535 - DNA, 50 bp, synthetic construct
  source 1..50: mol_type = other DNA
ttttttcggcactattcttgcttataccggcatgaatgtcgggaacaaaa

SEQ ID NO: 34536 - DNA, 50 bp, synthetic construct
  source 1..50: mol_type = other DNA
tagcacccgtaacaaaacccacaggtcggtggcttccgaaaaagccgcca

SEQ ID NO: 34537 - DNA, 50 bp, synthetic construct
  source 1..50: mol_type = other DNA
ctgatcgtcgtggtcggtggacacgcctcgtcaccgaactcgccgagcgc

SEQ ID NO: 34538 - DNA, 50 bp, synthetic construct
  source 1..50: mol_type = other DNA
aaaaagaatcatgtttcctcaactttcaaacttattttatcattctgttt

SEQ ID NO: 34539 - DNA, 50 bp, synthetic construct
  source 1..50: mol_type = other DNA
cgcgtgacgccgcccgagcaatggagacagtgcgcgcacgatcgcgcgca

SEQ ID NO: 34540 - DNA, 50 bp, synthetic construct
  source 1..50: mol_type = other DNA
tcattaatgaaggggaagcaaagatctctccccatccctttatgatggtg

SEQ ID NO: 34541 - DNA, 50 bp, synthetic construct
  source 1..50: mol_type = other DNA
tggagctggtcttcctggtctgttgatcagttcacggtcaaccatgatcc

SEQ ID NO: 34542 - DNA, 50 bp, synthetic construct
  source 1..50: mol_type = other DNA
cattgtaccgggcggtgtactcctccttgcctgtaatgcccgctgtcgtg

SEQ ID NO: 34543 - DNA, 50 bp, synthetic construct
  source 1..50: mol_type = other DNA
ggattgatggtcggcggaatgactgtgaccgtcagccccggaatacatcg

SEQ ID NO: 34544 - DNA, 50 bp, synthetic construct
  source 1..50: mol_type = other DNA
taaaatctgcccatattttatcagtttttttttatcttaatacgattctg

SEQ ID NO: 34545 - DNA, 50 bp, synthetic construct
  source 1..50: mol_type = other DNA
attgagctgccgcaggaggagatatcagcctcctttggtatgctgaaaaa

SEQ ID NO: 34546 - DNA, 50 bp, synthetic construct
  source 1..50: mol_type = other DNA
gcctatcccaacgaccccgcgacgatcatgttcgggtcggccgcgggccg

SEQ ID NO: 34547 - DNA, 50 bp, synthetic construct
  source 1..50: mol_type = other DNA
gacgcccagcatatcggcgcagcgcgcgcttcgtctgcgcgcgcaagggc

SEQ ID NO: 34548 - DNA, 50 bp, synthetic construct
  source 1..50: mol_type = other DNA
acccgatgaccgctcgaagcgggtcgcggagattctggcggatatcgaag

SEQ ID NO: 34549 - DNA, 50 bp, synthetic construct
  source 1..50: mol_type = other DNA
cgtttttttctttgtcgtcgaagccagcttccgcaaggaagaacaggtcg

SEQ ID NO: 34550 - DNA, 50 bp, synthetic construct
  source 1..50: mol_type = other DNA
ccttttcttttgttttttcaatctatagatgcattaaattcaagaagatt

SEQ ID NO: 34551 - DNA, 50 bp, synthetic construct
  source 1..50: mol_type = other DNA
atatttaaactcatcagattgagatatatcactctgaagggtgtaattat

SEQ ID NO: 34552 - DNA, 50 bp, synthetic construct
  source 1..50: mol_type = other DNA
tgtacaatataagcgatgaatggccgccctgtgggtggccggcctgtaca

SEQ ID NO: 34553 - DNA, 50 bp, synthetic construct
  source 1..50: mol_type = other DNA
tggagatttgggagtgccccggttcagtagagtgctggtgacaatcccca

SEQ ID NO: 34554 - DNA, 50 bp, synthetic construct
  source 1..50: mol_type = other DNA
acaatttgcattgtaattaggcaaatttatcacgttatacggcacattgt

SEQ ID NO: 34555 - DNA, 50 bp, synthetic construct
  source 1..50: mol_type = other DNA
tccgtcaggggccgcgcgaccgcacatgcgagcgaccgccggctgaccga

SEQ ID NO: 34556 - DNA, 50 bp, synthetic construct
  source 1..50: mol_type = other DNA
cttcgcgcccggctgtgcaagcgggtcagccttgacagaacgccgggaaa

SEQ ID NO: 34557 - DNA, 50 bp, synthetic construct
  source 1..50: mol_type = other DNA
gacttggtgataatcatgtcgatatttccgcgaacaatggggagaaagtt

SEQ ID NO: 34558 - DNA, 50 bp, synthetic construct
  source 1..50: mol_type = other DNA
agctggatattcctgctgaatgtttttgattttttcagtaatattcttga

SEQ ID NO: 34559 - DNA, 50 bp, synthetic construct
  source 1..50: mol_type = other DNA
ttttttgaattgataaatgccatagataccacatttcttctcagaaaggt

SEQ ID NO: 34560 - DNA, 50 bp, synthetic construct
  source 1..50: mol_type = other DNA
agaattaataaaatataaagttaaatttagctagttacattattaatgca

SEQ ID NO: 34561 - DNA, 50 bp, synthetic construct
  source 1..50: mol_type = other DNA
aatgaaagatattttaaaaacaggaatctatttctaaatcatcataaata

SEQ ID NO: 34562 - DNA, 50 bp, synthetic construct
  source 1..50: mol_type = other DNA
ctgaaagagtatgcctacgacatcgccatgccgggaatgcctgcgttcgc

SEQ ID NO: 34563 - DNA, 50 bp, synthetic construct
  source 1..50: mol_type = other DNA
cgaaaagcgcaaaaaggctgccgagagcgaaagcacctttgagtatttct

SEQ ID NO: 34564 - DNA, 50 bp, synthetic construct
  source 1..50: mol_type = other DNA
caaaattagtaaaatatgatataatatcgtaaatgattttaattttttgt

SEQ ID NO: 34565 - DNA, 50 bp, synthetic construct
  source 1..50: mol_type = other DNA
aatctatctcttgaatgtgtatgttatcataaaacttttttagatatatt

SEQ ID NO: 34566 - DNA, 50 bp, synthetic construct
  source 1..50: mol_type = other DNA
ccagaaaatcttgtttggtatggtgcagaatcgtacaggagattttcagg

SEQ ID NO: 34567 - DNA, 50 bp, synthetic construct
  source 1..50: mol_type = other DNA
agaaaataaattactggtggatgaaaacaaccaccaataattgcatcaag

SEQ ID NO: 34568 - DNA, 50 bp, synthetic construct
  source 1..50: mol_type = other DNA
cgccaaaaggcacggcttatctttggggagaggccccgaaaattatggcg

SEQ ID NO: 34569 - DNA, 50 bp, synthetic construct
  source 1..50: mol_type = other DNA
gcctgtgagtccgcccagcagaaccctttctctgtggtagattctcaggc

SEQ ID NO: 34570 - DNA, 50 bp, synthetic construct
  source 1..50: mol_type = other DNA
aggtgttcagcaggaagtggcacaccagaagcacttcctgctttaccgcg

SEQ ID NO: 34571 - DNA, 50 bp, synthetic construct
  source 1..50: mol_type = other DNA
ctgcgtgggcaccacctcctgccggaacgtccgaccaaaaatccacggac

SEQ ID NO: 34572 - DNA, 50 bp, synthetic construct
  source 1..50: mol_type = other DNA
atcaggccgaagaggttcgcaccaaaaagtgttatgacctgcaaatggaa

SEQ ID NO: 34573 - DNA, 50 bp, synthetic construct
  source 1..50: mol_type = other DNA
aggcaggataccaccgtcatagtgatattgaggtcggtatcatcaagcct

SEQ ID NO: 34574 - DNA, 50 bp, synthetic construct
  source 1..50: mol_type = other DNA
tttcaatctgctcgcagattgctgaccagcattctggaagaagagctgaa

SEQ ID NO: 34575 - DNA, 50 bp, synthetic construct
  source 1..50: mol_type = other DNA
gtagtactacctatagacgataagtacctatttgcgataagtagtactac

SEQ ID NO: 34576 - DNA, 50 bp, synthetic construct
  source 1..50: mol_type = other DNA
gggatggggagagatcaaaaaagatatcttcttcgagatcttctatatat

SEQ ID NO: 34577 - DNA, 50 bp, synthetic construct
  source 1..50: mol_type = other DNA
tgatattatgggtgtttagagcgaattgtgtctactcagctttaatgcca

SEQ ID NO: 34578 - DNA, 50 bp, synthetic construct
  source 1..50: mol_type = other DNA
cgcccgccaggcggaacggaaatatgaaactccgcgccatatgacgcgga

SEQ ID NO: 34579 - DNA, 50 bp, synthetic construct
  source 1..50: mol_type = other DNA
atctcatgtcgccacgcttcggtaggtggcgaagcgtaccctcgccgtga

SEQ ID NO: 34580 - DNA, 50 bp, synthetic construct
  source 1..50: mol_type = other DNA
aggcacacagcaagcagctttttcatgaagatgaaccttaacgagtataa

SEQ ID NO: 34581 - DNA, 50 bp, synthetic construct
  source 1..50: mol_type = other DNA
gtagtaagcgtgggtcgtttctttgaaaggagaatgtccagatgaaagtc

SEQ ID NO: 34582 - DNA, 50 bp, synthetic construct
  source 1..50: mol_type = other DNA
tagctgtcgctgcctaattaaaggcagcaccccaccggcagcaccaccgg

SEQ ID NO: 34583 - DNA, 50 bp, synthetic construct
  source 1..50: mol_type = other DNA
tatgagatcgtcaaaccggtagtaaatcctaccgttttgtggatctggta

SEQ ID NO: 34584 - DNA, 50 bp, synthetic construct
  source 1..50: mol_type = other DNA
tgatcctagaaaaatatttgaagataagttctgatattcttttagggtaa

SEQ ID NO: 34585 - DNA, 50 bp, synthetic construct
  source 1..50: mol_type = other DNA
tcatataatagaaaatgtggtttaataaaaccacctttcaagataattat

SEQ ID NO: 34586 - DNA, 50 bp, synthetic construct
  source 1..50: mol_type = other DNA
caaaaatatggtgtttgttttgaaatcaaaaaataaagatagtattttta

SEQ ID NO: 34587 - DNA, 50 bp, synthetic construct
  source 1..50: mol_type = other DNA
tgttttcggaaatcatgccaaaagaagtcaagcctccagttattgcaacc

SEQ ID NO: 34588 - DNA, 50 bp, synthetic construct
  source 1..50: mol_type = other DNA
ttaattatcacaacaaaataattataccagctttttattgagaatataaa

SEQ ID NO: 34589 - DNA, 50 bp, synthetic construct
  source 1..50: mol_type = other DNA
tttaaattctcctttatctaaagtatttattaggtaaattagaatttaca

SEQ ID NO: 34590 - DNA, 50 bp, synthetic construct
  source 1..50: mol_type = other DNA
acctatttttatgatctacaaggaaaagcacctgcattaggaaaatcaaa

SEQ ID NO: 34591 - DNA, 50 bp, synthetic construct
  source 1..50: mol_type = other DNA
gtccttattaggtaaggataaccttacagtaatcctgacggcgataggac

SEQ ID NO: 34592 - DNA, 50 bp, synthetic construct
  source 1..50: mol_type = other DNA
cggcagatcgaaccttctttgttgcgcaaccaggaaggcgagaactgctt

SEQ ID NO: 34593 - DNA, 50 bp, synthetic construct
  source 1..50: mol_type = other DNA
gtatatgtaatacatatttatctataaatgtaaaagattgttctatttaa

SEQ ID NO: 34594 - DNA, 50 bp, synthetic construct
  source 1..50: mol_type = other DNA
gcaataggagaaataataatttcctttcacgttatagttatacctatatt

SEQ ID NO: 34595 - DNA, 50 bp, synthetic construct
  source 1..50: mol_type = other DNA
acccaagtggattgtgcaactcacatgtttgttgacaaattcacttaagc

SEQ ID NO: 34596 - DNA, 50 bp, synthetic construct
  source 1..50: mol_type = other DNA
ggaaggcgtggacgccgatctatcaaggacgatctgcacaatcgtcttcg

SEQ ID NO: 34597 - DNA, 50 bp, synthetic construct
  source 1..50: mol_type = other DNA
gaccccgtccaggttggcgagcagatgacagtcagtggagcaacggggtg

SEQ ID NO: 34598 - DNA, 50 bp, synthetic construct
  source 1..50: mol_type = other DNA
tctctttgatatgctttgatagcagctgctattagtgcaaaaaaagcagg

SEQ ID NO: 34599 - DNA, 50 bp, synthetic construct
  source 1..50: mol_type = other DNA
cctgaagaacccgcactacaccggcgccgggtatgcccgcgtgtccaccg

SEQ ID NO: 34600 - DNA, 50 bp, synthetic construct
  source 1..50: mol_type = other DNA
ctgagcggctgcgcgccgagcgaggcggccctttgctaggagccgcgcaa

SEQ ID NO: 34601 - DNA, 50 bp, synthetic construct
  source 1..50: mol_type = other DNA
aggtattaaatcaaatataaccagtatattttatatttatcctaataagt

SEQ ID NO: 34602 - DNA, 50 bp, synthetic construct
  source 1..50: mol_type = other DNA
tctccttcaaatagataagctactgaactttgttatctaattcaagatta

SEQ ID NO: 34603 - DNA, 50 bp, synthetic construct
  source 1..50: mol_type = other DNA
ttggatttatgacttgatataagtgtacttgcgaacagagttaaaggatc

SEQ ID NO: 34604 - DNA, 50 bp, synthetic construct
  source 1..50: mol_type = other DNA
cgtgccaggcgaagattagttatgaagtaaactgatctgcggagactgcg

SEQ ID NO: 34605 - DNA, 50 bp, synthetic construct
  source 1..50: mol_type = other DNA
aaatccataaaacatccaaaaagtaacttttttcaattttttataaattt

SEQ ID NO: 34606 - DNA, 50 bp, synthetic construct
  source 1..50: mol_type = other DNA
tacttaaattataccattgatttgcaccaactacaggttcaaatttttta

SEQ ID NO: 34607 - DNA, 50 bp, synthetic construct
  source 1..50: mol_type = other DNA
ggctatatatttaaaaataattattttactgttattttagatgtatagca

SEQ ID NO: 34608 - DNA, 50 bp, synthetic construct
  source 1..50: mol_type = other DNA
tatgctcagttatttttacaattaaacaattgtcaaagtaacaaacaaca

SEQ ID NO: 34609 - DNA, 50 bp, synthetic construct
  source 1..50: mol_type = other DNA
actagtatttattttgaaaggagcaaattgataatgaaataaatgcgtta

SEQ ID NO: 34610 - DNA, 50 bp, synthetic construct
  source 1..50: mol_type = other DNA
tcgacaaaaaataaaattaaaatatatattaatactaattattttgagga

SEQ ID NO: 34611 - DNA, 50 bp, synthetic construct
  source 1..50: mol_type = other DNA
taggaaaaataaaagaaaaatattaatatcatcgtctacctgttttcctg

SEQ ID NO: 34612 - DNA, 50 bp, synthetic construct
  source 1..50: mol_type = other DNA
tactcggacagtccaaactttgaaattcgagttgcagcatactgcagggt

SEQ ID NO: 34613 - DNA, 50 bp, synthetic construct
  source 1..50: mol_type = other DNA
gagtatggagatcaaagagactatcaatagtttcttttaattctatgtat

SEQ ID NO: 34614 - DNA, 50 bp, synthetic construct
  source 1..50: mol_type = other DNA
acagcaatgccgcttaaatagtcgattccatatattagtataatttctgt

SEQ ID NO: 34615 - DNA, 50 bp, synthetic construct
  source 1..50: mol_type = other DNA
gaaatcaagctctctttttgattgttcaatacaggcatgctcttattttt

SEQ ID NO: 34616 - DNA, 50 bp, synthetic construct
  source 1..50: mol_type = other DNA
gcagaaaatgcggtacaataaagttgactttacgggtttctcttttggct

SEQ ID NO: 34617 - DNA, 50 bp, synthetic construct
  source 1..50: mol_type = other DNA
gaaacacgcgcataaccggcgacccgcatccagcaggatacgaaccagtt

SEQ ID NO: 34618 - DNA, 50 bp, synthetic construct
  source 1..50: mol_type = other DNA
caagaaatctggaaaacgaaacactcgcctttcttgtaataaaactctat

SEQ ID NO: 34619 - DNA, 50 bp, synthetic construct
  source 1..50: mol_type = other DNA
tcctctgaatcagttgaaactctggccattatttcaattgtttctctaaa

SEQ ID NO: 34620 - DNA, 50 bp, synthetic construct
  source 1..50: mol_type = other DNA
gtgggcgctgctgcgccgcatcccctgggacacggcgctgcagacgctta

SEQ ID NO: 34621 - DNA, 50 bp, synthetic construct
  source 1..50: mol_type = other DNA
ggttcagaggcgttgctgtgtctatgatcttccagatatgccgcaaaaga

SEQ ID NO: 34622 - DNA, 50 bp, synthetic construct
  source 1..50: mol_type = other DNA
cgcttctttttactgttgatcggtgcctcgataaacgacataaagatacg

SEQ ID NO: 34623 - DNA, 50 bp, synthetic construct
  source 1..50: mol_type = other DNA
caaagattaaaaaagattaaagggtttgctttggagttttatatgaaagg

SEQ ID NO: 34624 - DNA, 50 bp, synthetic construct
  source 1..50: mol_type = other DNA
ctataattacgaaatgtaattaaaatttggatgtcaattgatgagcatgg

SEQ ID NO: 34625 - DNA, 50 bp, synthetic construct
  source 1..50: mol_type = other DNA
cacatgaaaattaccgccccggcccgatcagcagcggcagatttctgcgc

SEQ ID NO: 34626 - DNA, 50 bp, synthetic construct
  source 1..50: mol_type = other DNA
tgatcctgtttggggtcaattttaataacagccagcggggaacaggagtt

SEQ ID NO: 34627 - DNA, 50 bp, synthetic construct
  source 1..50: mol_type = other DNA
tttattccctcaacaaaggtgctgatcagctcctttcacaggtctataca

SEQ ID NO: 34628 - DNA, 50 bp, synthetic construct
  source 1..50: mol_type = other DNA
gtgcccacgccggtggtgagctgcctgcgttcctccgtccacttgggcat

SEQ ID NO: 34629 - DNA, 50 bp, synthetic construct
  source 1..50: mol_type = other DNA
cattttctaacagcaggctctgaagcttcacctcccttcggtagtgtgac

SEQ ID NO: 34630 - DNA, 50 bp, synthetic construct
  source 1..50: mol_type = other DNA
caagagcagaagcgattccgcgcagaatcacggcatcacgtcctctctaa

SEQ ID NO: 34631 - DNA, 50 bp, synthetic construct
  source 1..50: mol_type = other DNA
atcaaaatttagctgctaagctgaaagtttattatatcataaatattgaa

SEQ ID NO: 34632 - DNA, 50 bp, synthetic construct
  source 1..50: mol_type = other DNA
cagatagctgtccgccgccagcgcctgcgctacacccggatatcgcgctc

SEQ ID NO: 34633 - DNA, 50 bp, synthetic construct
  source 1..50: mol_type = other DNA
gagaaaagggaatgcggtgcgggtgtttgagcgtcaggtgggctttacct

SEQ ID NO: 34634 - DNA, 50 bp, synthetic construct
  source 1..50: mol_type = other DNA
aaagccgcgctgctgagactggaaatgaaattgctcagcaggcgtgtttt

SEQ ID NO: 34635 - DNA, 50 bp, synthetic construct
  source 1..50: mol_type = other DNA
accttcaaaaaaaattatttttctctgtcaaatctttttttatttcatct

SEQ ID NO: 34636 - DNA, 50 bp, synthetic construct
  source 1..50: mol_type = other DNA
gggacttatttacttgctaattgtatcaaatacctgaacttttgagaccc

SEQ ID NO: 34637 - DNA, 50 bp, synthetic construct
  source 1..50: mol_type = other DNA
cagtgaagcgtaccggaaatatatgcatatggaaaatatggttatgggta

SEQ ID NO: 34638 - DNA, 50 bp, synthetic construct
  source 1..50: mol_type = other DNA
ggcctggtatggaagtcgatcagcgggcaagaagacgaacgagatcatcc

SEQ ID NO: 34639 - DNA, 50 bp, synthetic construct
  source 1..50: mol_type = other DNA
tcaatgggtacaaggaaatatttatcaaaatattcaaaaaccccaagggg

SEQ ID NO: 34640 - DNA, 50 bp, synthetic construct
  source 1..50: mol_type = other DNA
ttgcttttgatggattgaaacctttttcaaattcaatgttttgattatta

SEQ ID NO: 34641 - DNA, 50 bp, synthetic construct
  source 1..50: mol_type = other DNA
tatttaaggcgaccttcgggtcgtctttacattcaacgtcgtctaaaaaa

SEQ ID NO: 34642 - DNA, 50 bp, synthetic construct
  source 1..50: mol_type = other DNA
gattgcgtaaatttgacacattcgatgcaaaataaaaaccacccaaaatc

SEQ ID NO: 34643 - DNA, 50 bp, synthetic construct
  source 1..50: mol_type = other DNA
cgatgtgatcaccgcctatgaccccaaggtgttatacgggtatcagatcc

SEQ ID NO: 34644 - DNA, 50 bp, synthetic construct
  source 1..50: mol_type = other DNA
accatcctcatcgactgctctctctgcctgcagcattccatgagcaacgt

SEQ ID NO: 34645 - DNA, 50 bp, synthetic construct
  source 1..50: mol_type = other DNA
ctggttcgactggggagcttttttcacaagaaccatgccgttgtgagcat

SEQ ID NO: 34646 - DNA, 50 bp, synthetic construct
  source 1..50: mol_type = other DNA
aacccacgggtagtgtcacattagtactaacttaacactgcccacgggag

SEQ ID NO: 34647 - DNA, 50 bp, synthetic construct
  source 1..50: mol_type = other DNA
agggaaagtattaaatactttccctttgtattatatttaataatttccaa

SEQ ID NO: 34648 - DNA, 50 bp, synthetic construct
  source 1..50: mol_type = other DNA
gcggaagaaagtccccagtaaggaacaaggaactccgccatttgttccgt

SEQ ID NO: 34649 - DNA, 50 bp, synthetic construct
  source 1..50: mol_type = other DNA
cttttttttgtaaatgatgataaaacaataccgtgctcacttataaaagt

SEQ ID NO: 34650 - DNA, 50 bp, synthetic construct
  source 1..50: mol_type = other DNA
caaaggggtgtgcacattttaattattagcccgtagtgctgaccgctgac

SEQ ID NO: 34651 - DNA, 50 bp, synthetic construct
  source 1..50: mol_type = other DNA
atacaaaattcactataataggaaacacgaagatatcccgtatttttcgg

SEQ ID NO: 34652 - DNA, 50 bp, synthetic construct
  source 1..50: mol_type = other DNA
acatcggaattcttcccgacggggttttccgtgggttcaaattcccaggt

SEQ ID NO: 34653 - DNA, 50 bp, synthetic construct
  source 1..50: mol_type = other DNA
ggatttctatccagtatgattatcgcgataatctatcaggatgattttga

SEQ ID NO: 34654 - DNA, 50 bp, synthetic construct
  source 1..50: mol_type = other DNA
aagacctatacgccgaaaaggggcaggccgggaaccgccgtgtcagccac

SEQ ID NO: 34655 - DNA, 50 bp, synthetic construct
  source 1..50: mol_type = other DNA
accggagtgctccgtccagccacagccttgcctacctcgacatctacgtc

SEQ ID NO: 34656 - DNA, 50 bp, synthetic construct
  source 1..50: mol_type = other DNA
tattaagttgtaaatatattttagctctgaaagcaaccgcaaataggata

SEQ ID NO: 34657 - DNA, 50 bp, synthetic construct
  source 1..50: mol_type = other DNA
aaaaaaagacattatatctcacttgtatttgatatggatatttatgtttt

SEQ ID NO: 34658 - DNA, 50 bp, synthetic construct
  source 1..50: mol_type = other DNA
ggaatctgtctgtcggagaataatcaattagaatccctgaaagaagttca

SEQ ID NO: 34659 - DNA, 50 bp, synthetic construct
  source 1..50: mol_type = other DNA
ccctaccatatagaaacaagtgccttttcacttggtttcaaatgttctct

SEQ ID NO: 34660 - DNA, 50 bp, synthetic construct
  source 1..50: mol_type = other DNA
acaactaaacaaaaagctgcctcccctgagcagcatatttgtttagagcc

SEQ ID NO: 34661 - DNA, 50 bp, synthetic construct
  source 1..50: mol_type = other DNA
tgtaaaagggatagagcgttgggaaagaaaacatgaatttcccttcaaaa

SEQ ID NO: 34662 - DNA, 50 bp, synthetic construct
  source 1..50: mol_type = other DNA
aatcaggatttcttgttatgatttccacatgttaagacgaagctgcttaa

SEQ ID NO: 34663 - DNA, 50 bp, synthetic construct
  source 1..50: mol_type = other DNA
tctgctaacgcagaccgttccgtcgcagctgccgggcctgccgcagcagc

SEQ ID NO: 34664 - DNA, 50 bp, synthetic construct
  source 1..50: mol_type = other DNA
atcaaagaaagcgccgccccatcggttatgaaaacttgcggttctttgac

SEQ ID NO: 34665 - DNA, 50 bp, synthetic construct
  source 1..50: mol_type = other DNA
acggaaagccaatttcattcgcggatcggtcaaccagtctggccatccgg

SEQ ID NO: 34666 - DNA, 50 bp, synthetic construct
  source 1..50: mol_type = other DNA
caaaaagggcttgaagatgaagatgcagcaccacgcctgtccctgatact

SEQ ID NO: 34667 - DNA, 50 bp, synthetic construct
  source 1..50: mol_type = other DNA
gcggattttgttatcacggatcgccggttatccctgcaaagaaagaccgg

SEQ ID NO: 34668 - DNA, 50 bp, synthetic construct
  source 1..50: mol_type = other DNA
cggcaagagcggccagccggcaaaacaatgcgggtggcggtctattgccg

SEQ ID NO: 34669 - DNA, 50 bp, synthetic construct
  source 1..50: mol_type = other DNA
ccgacggcaccgtggcggtcttggcaaatagatcaagtttattttgtaaa

SEQ ID NO: 34670 - DNA, 50 bp, synthetic construct
  source 1..50: mol_type = other DNA
atcggataatattataacacatctttacgatatttactatataatctgat

SEQ ID NO: 34671 - DNA, 50 bp, synthetic construct
  source 1..50: mol_type = other DNA
ccgaatgtcgattgtttcttcgttaaatataaatataaatcaaataacaa

SEQ ID NO: 34672 - DNA, 50 bp, synthetic construct
  source 1..50: mol_type = other DNA
gagctacgatatagatataacaaagataggtaacatctatataaacgctc

SEQ ID NO: 34673 - DNA, 50 bp, synthetic construct
  source 1..50: mol_type = other DNA
cgtagtcgcaacaacatcatcggcatgccgatactgctaaacgagctatc

SEQ ID NO: 34674 - DNA, 50 bp, synthetic construct
  source 1..50: mol_type = other DNA
atagttccaaactcttatgaggagtgcaccgttcaagagaatgaaaattg

SEQ ID NO: 34675 - DNA, 50 bp, synthetic construct
  source 1..50: mol_type = other DNA
gctgttattgtaactgtaatcattataatttcatcaagtacagcgacagc

SEQ ID NO: 34676 - DNA, 50 bp, synthetic construct
  source 1..50: mol_type = other DNA
aaagggttctttttttgtacccttttcatggtaaaaaaaaacgcctttcg

SEQ ID NO: 34677 - DNA, 50 bp, synthetic construct
  source 1..50: mol_type = other DNA
gcacttgatatggaacttgtagaaaatgtgaaaatttgctctttttgtgt

SEQ ID NO: 34678 - DNA, 50 bp, synthetic construct
  source 1..50: mol_type = other DNA
agatgttaacgaaaaaatataccaattggtatatttttttgttgccagaa

SEQ ID NO: 34679 - DNA, 50 bp, synthetic construct
  source 1..50: mol_type = other DNA
taattccagttactataccgattctggaatcaaaattgtcgatggccttg

SEQ ID NO: 34680 - DNA, 50 bp, synthetic construct
  source 1..50: mol_type = other DNA
cacaaaaccggacaaagaaaattttatacccgactttgtccgttttgtca

SEQ ID NO: 34681 - DNA, 50 bp, synthetic construct
  source 1..50: mol_type = other DNA
ctttgccattttcttgctcctttaatcaaaggttggagaaaaaagaaaag

SEQ ID NO: 34682 - DNA, 50 bp, synthetic construct
  source 1..50: mol_type = other DNA
ttctactcacggttatagctgttggccactccagtcaacagcaggaagaa

SEQ ID NO: 34683 - DNA, 50 bp, synthetic construct
  source 1..50: mol_type = other DNA
tcatctgtatgtccataacctgcgttttgctgtttagtaaatacaaatta

SEQ ID NO: 34684 - DNA, 50 bp, synthetic construct
  source 1..50: mol_type = other DNA
tagatagatgtatggaacgcaaccttttttgatttctccccatcccttta

SEQ ID NO: 34685 - DNA, 50 bp, synthetic construct
  source 1..50: mol_type = other DNA
actgaacaatcttccccaaacataaaaatgtttatcaaaatcagggaggg

SEQ ID NO: 34686 - DNA, 50 bp, synthetic construct
  source 1..50: mol_type = other DNA
gaccgcaaatgtagaaactatctgcagacaaagtccttacttttgacaaa

SEQ ID NO: 34687 - DNA, 50 bp, synthetic construct
  source 1..50: mol_type = other DNA
ggatggctccctcatggattccattcccggattccgatctctctgcatcc

SEQ ID NO: 34688 - DNA, 50 bp, synthetic construct
  source 1..50: mol_type = other DNA
gagacgctcggtgggcgaggtcagcaccgtcctcccttcccggggtcctc

SEQ ID NO: 34689 - DNA, 50 bp, synthetic construct
  source 1..50: mol_type = other DNA
gccgggcgcagccaccgcattgtggcagagcgccggaacacgcgcccggc

SEQ ID NO: 34690 - DNA, 50 bp, synthetic construct
  source 1..50: mol_type = other DNA
gagcgcgatatccgggtgtagcgcaggcgctggcggcggacagctatctg

SEQ ID NO: 34691 - DNA, 50 bp, synthetic construct
  source 1..50: mol_type = other DNA
cgtacagaatctctacattctgcgatcgcaaaaaacgcgaattttgtatc

SEQ ID NO: 34692 - DNA, 50 bp, synthetic construct
  source 1..50: mol_type = other DNA
cgatcttcgttgctacctctaacagctggaagcggaagcagcggaacgtc

SEQ ID NO: 34693 - DNA, 50 bp, synthetic construct
  source 1..50: mol_type = other DNA
ccctatccgccggggagacccctcaggagatggcttctgggcggaaggtg

SEQ ID NO: 34694 - DNA, 50 bp, synthetic construct
  source 1..50: mol_type = other DNA
cgatacagaaaaagcccacaggccgccggctggccgctcttgccatattc

SEQ ID NO: 34695 - DNA, 50 bp, synthetic construct
  source 1..50: mol_type = other DNA
tcttccctgcgggggtggatatccctcattatccagcgatttaggcgatt

SEQ ID NO: 34696 - DNA, 50 bp, synthetic construct
  source 1..50: mol_type = other DNA
cggattttgaaatactgctgttcggccggataaaggtatagcaaaacgaa

SEQ ID NO: 34697 - DNA, 50 bp, synthetic construct
  source 1..50: mol_type = other DNA
caaggcaaagagctataaagcaaaggtttgctttatggggtatgggtttg

SEQ ID NO: 34698 - DNA, 50 bp, synthetic construct
  source 1..50: mol_type = other DNA
actgccgggtacgttatccggcggtcagaccggatagagaaccggctgaa

SEQ ID NO: 34699 - DNA, 50 bp, synthetic construct
  source 1..50: mol_type = other DNA
ttgttggattattgcactcacagtgtataaaagccacaatgctccttcaa

SEQ ID NO: 34700 - DNA, 50 bp, synthetic construct
  source 1..50: mol_type = other DNA
gtaccatgtcggaaaccacctgcgtttcttcatgtgttcgctcatggcct

SEQ ID NO: 34701 - DNA, 50 bp, synthetic construct
  source 1..50: mol_type = other DNA
tggcctgctgtaccatgtcggaaacctttccgctactatacatcactcta

SEQ ID NO: 34702 - DNA, 50 bp, synthetic construct
  source 1..50: mol_type = other DNA
gattttgaaaaaatatattccgaaaggcaagataatatttttgcaaaaag

SEQ ID NO: 34703 - DNA, 50 bp, synthetic construct
  source 1..50: mol_type = other DNA
aattttttacgttatttcccatcatataatagaagagctatgaaaaaatt

SEQ ID NO: 34704 - DNA, 50 bp, synthetic construct
  source 1..50: mol_type = other DNA
tgttcgagctataaaagaaaggggcaggtatatcttttatatggtgaaga

SEQ ID NO: 34705 - DNA, 50 bp, synthetic construct
  source 1..50: mol_type = other DNA
ttgtggcagatatcggcagcaggaagaccggctgacgaaatttgcccagt

SEQ ID NO: 34706 - DNA, 50 bp, synthetic construct
  source 1..50: mol_type = other DNA
ggacgcattgaaaacttaccggatgaaaaagatatgggacgcattatcaa

SEQ ID NO: 34707 - DNA, 50 bp, synthetic construct
  source 1..50: mol_type = other DNA
catatttttaattttatacaacaattttttttcttaaatttaacaattct

SEQ ID NO: 34708 - DNA, 50 bp, synthetic construct
  source 1..50: mol_type = other DNA
aaggagtgtgagatggactgaagttgatctcattccctctaaagaccata

SEQ ID NO: 34709 - DNA, 50 bp, synthetic construct
  source 1..50: mol_type = other DNA
cgcgccaccgatgagtaccgccagaagcgccgggtcgccggttatgcgcg

SEQ ID NO: 34710 - DNA, 50 bp, synthetic construct
  source 1..50: mol_type = other DNA
acatgaatttcaagaagaaatccgtgttcatttcatactggtgcccatac

SEQ ID NO: 34711 - DNA, 50 bp, synthetic construct
  source 1..50: mol_type = other DNA
atataatatattaaaatttggtttttttttatttttttattataacaaac

SEQ ID NO: 34712 - DNA, 50 bp, synthetic construct
  source 1..50: mol_type = other DNA
gtgttcgccaaaatcggattgttcggataagatcaatttttggagatata

SEQ ID NO: 34713 - DNA, 50 bp, synthetic construct
  source 1..50: mol_type = other DNA
tacaggtaaatctaagaacttctcatgagttgttttataatttagaaatt

SEQ ID NO: 34714 - DNA, 50 bp, synthetic construct
  source 1..50: mol_type = other DNA
ggacaagcattcggaaaattacaagggtgtcttttttcgttaaggggtag

SEQ ID NO: 34715 - DNA, 50 bp, synthetic construct
  source 1..50: mol_type = other DNA
gatgactctgcggtattttgaggtcgtttaacgatttccgaaccgtcatc

SEQ ID NO: 34716 - DNA, 50 bp, synthetic construct
  source 1..50: mol_type = other DNA
cgtttctgttttgccaccccggaaagttccttgagttccgcaaaggaacg

SEQ ID NO: 34717 - DNA, 50 bp, synthetic construct
  source 1..50: mol_type = other DNA
attttgcaaggtggtattatggagatctcttctctgcggaattgcaattc

SEQ ID NO: 34718 - DNA, 50 bp, synthetic construct
  source 1..50: mol_type = other DNA
tgttcataaaccgcaccttttgaccttcctttgagcgcggcaaatgaatg

SEQ ID NO: 34719 - DNA, 50 bp, synthetic construct
  source 1..50: mol_type = other DNA
gtcaagaagatcaagggagatcgcagggatcatccctctttctctttctt

SEQ ID NO: 34720 - DNA, 50 bp, synthetic construct
  source 1..50: mol_type = other DNA
actgtggagctggtcttcctggtccgttgatggaatccggctcccacagg

SEQ ID NO: 34721 - DNA, 50 bp, synthetic construct
  source 1..50: mol_type = other DNA
cgtggcgcagccgttttcaatgctgtagctttgcaatgtgatgtcagcga

SEQ ID NO: 34722 - DNA, 50 bp, synthetic construct
  source 1..50: mol_type = other DNA
ataacggtataattcatgctaccaaattcgacacttatttatatcgtttt

SEQ ID NO: 34723 - DNA, 50 bp, synthetic construct
  source 1..50: mol_type = other DNA
aactgcaagtgtccataatgaacgatcgttcaatgagtacaaaaatcctt

SEQ ID NO: 34724 - DNA, 50 bp, synthetic construct
  source 1..50: mol_type = other DNA
actgctgcgttcttaaagaaagcttttacttcatttaagcttatagcata

SEQ ID NO: 34725 - DNA, 50 bp, synthetic construct
  source 1..50: mol_type = other DNA
ttgaaaatgcaaaaaggaaagcaagcttcttttcctttccgttttcttcg

SEQ ID NO: 34726 - DNA, 50 bp, synthetic construct
  source 1..50: mol_type = other DNA
gcaaaaattgatacaattatgaccaacttcctaattgtaaatgtttcgtg

SEQ ID NO: 34727 - DNA, 50 bp, synthetic construct
  source 1..50: mol_type = other DNA
tgcagaacgtattcctcgatcctttcaacaaaacgggaatgtcttgtcga

SEQ ID NO: 34728 - DNA, 50 bp, synthetic construct
  source 1..50: mol_type = other DNA
caaaataaattaatattagttatcattggaagttttagtaattaatttta

SEQ ID NO: 34729 - DNA, 50 bp, synthetic construct
  source 1..50: mol_type = other DNA
tcatgcgctctcgactgtgtatattcatatgcatcaagcagaagttcctc

SEQ ID NO: 34730 - DNA, 50 bp, synthetic construct
  source 1..50: mol_type = other DNA
atcaaagaattttttggcattttctaccacccttcaaataattaactaat

SEQ ID NO: 34731 - DNA, 50 bp, synthetic construct
  source 1..50: mol_type = other DNA
gcataagcagcaaccttctttttaatttaatttaaggaaacaataattgc

SEQ ID NO: 34732 - DNA, 50 bp, synthetic construct
  source 1..50: mol_type = other DNA
tctcaaatggatggcccagaacgtggaagatcagcttcatagttttgagg

SEQ ID NO: 34733 - DNA, 50 bp, synthetic construct
  source 1..50: mol_type = other DNA
agagcctgaatttccccgctggctgggcggtttgcccatatgcagggagt

SEQ ID NO: 34734 - DNA, 50 bp, synthetic construct
  source 1..50: mol_type = other DNA
tgctgtaaatcatttatatctattccgtgtttgggaactgatcgaccgct

SEQ ID NO: 34735 - DNA, 50 bp, synthetic construct
  source 1..50: mol_type = other DNA
ctgacgctcattttacgcaccaactttgcggtatctctgttgagcgtatc

SEQ ID NO: 34736 - DNA, 50 bp, synthetic construct
  source 1..50: mol_type = other DNA
ggagaacggcatcccgccggaggatatttatggcggctttgtacttccaa

SEQ ID NO: 34737 - DNA, 50 bp, synthetic construct
  source 1..50: mol_type = other DNA
tttattataagaaaatggaggcttttaatataccatattcttttataaaa

SEQ ID NO: 34738 - DNA, 50 bp, synthetic construct
  source 1..50: mol_type = other DNA
tttgcgcgttcttccagtttcttcttaccctcgataaaatagagggcttt

SEQ ID NO: 34739 - DNA, 50 bp, synthetic construct
  source 1..50: mol_type = other DNA
agcccagctcgctacagtccggacaagtctgccaaatattgtttcggcag

SEQ ID NO: 34740 - DNA, 50 bp, synthetic construct
  source 1..50: mol_type = other DNA
attaccatgttgctttgtgcataatttttgaatctccatttgatggtatc

SEQ ID NO: 34741 - DNA, 50 bp, synthetic construct
  source 1..50: mol_type = other DNA
tagttagctaatagtcttgattgcaaatcatccataaaactattatactt

SEQ ID NO: 34742 - DNA, 50 bp, synthetic construct
  source 1..50: mol_type = other DNA
tgacaagcctttataagtcaagtataaatacggcttaagcaggctttgta

SEQ ID NO: 34743 - DNA, 50 bp, synthetic construct
  source 1..50: mol_type = other DNA
gtcaacgcaaaataaaaagccgccctgggtgcttttctttttgctgaaac

SEQ ID NO: 34744 - DNA, 50 bp, synthetic construct
  source 1..50: mol_type = other DNA
ctgtctgaggcaatcgacaatattgtgatataatcaatttggtcagaatt

SEQ ID NO: 34745 - DNA, 50 bp, synthetic construct
  source 1..50: mol_type = other DNA
tttgcacgataaggagcgtatgatttggaactcgaatgtaatcgtccagt

SEQ ID NO: 34746 - DNA, 50 bp, synthetic construct
  source 1..50: mol_type = other DNA
ctacgaatccccttggctccaccatcggctctgccgactggatttgaact

SEQ ID NO: 34747 - DNA, 50 bp, synthetic construct
  source 1..50: mol_type = other DNA
catgtttcttcacacctgtataggtgatataaaaggggctgtctcacata

SEQ ID NO: 34748 - DNA, 50 bp, synthetic construct
  source 1..50: mol_type = other DNA
gaacatcgtcggcgatgaaaagaactttctttttttcgcaaaagatgtaa

SEQ ID NO: 34749 - DNA, 50 bp, synthetic construct
  source 1..50: mol_type = other DNA
cgggaagacccggttcaaaatttaatttccttttatttcccgtcatgccg

SEQ ID NO: 34750 - DNA, 50 bp, synthetic construct
  source 1..50: mol_type = other DNA
cttccgcataaaaaggacatggaagattccatgcatcatttaacttatct

SEQ ID NO: 34751 - DNA, 50 bp, synthetic construct
  source 1..50: mol_type = other DNA
tagtatattatatattattatatatattaccaacccattacaaacctgcg

SEQ ID NO: 34752 - DNA, 50 bp, synthetic construct
  source 1..50: mol_type = other DNA
attataccataaatcagtctcctatactagaaaatcccgtcatcaaaatg

SEQ ID NO: 34753 - DNA, 50 bp, synthetic construct
  source 1..50: mol_type = other DNA
tatatcattgaccaactatactcttcacagtatagttatccattcatatc

SEQ ID NO: 34754 - DNA, 50 bp, synthetic construct
  source 1..50: mol_type = other DNA
ttaattgtttttttaaataaaaattaatgagcagaacgaaaaaggtgagc

SEQ ID NO: 34755 - DNA, 50 bp, synthetic construct
  source 1..50: mol_type = other DNA
tggacgatctgttccagatcggctgtcgccgacatgatcggcatctccca

SEQ ID NO: 34756 - DNA, 50 bp, synthetic construct
  source 1..50: mol_type = other DNA
gaggcgaatatatacatagatgaaaaatcatctccttaaaatttaagcct

SEQ ID NO: 34757 - DNA, 50 bp, synthetic construct
  source 1..50: mol_type = other DNA
ggaatattgggatcttcatattgtgcactgactgtgctgttcctgattcc

SEQ ID NO: 34758 - DNA, 50 bp, synthetic construct
  source 1..50: mol_type = other DNA
gatagccatcgttgctgagcacgagagcgaatttctcgccgccctcgaag

SEQ ID NO: 34759 - DNA, 50 bp, synthetic construct
  source 1..50: mol_type = other DNA
cagccctgatgaccgtaatgttgtataaaactagaaaaaggcaaggactt

SEQ ID NO: 34760 - DNA, 50 bp, synthetic construct
  source 1..50: mol_type = other DNA
aatagtatatgaactactacaagaatcataatagaagttcatatagtcat

SEQ ID NO: 34761 - DNA, 50 bp, synthetic construct
  source 1..50: mol_type = other DNA
acgtatcgtctattggtagtagatttatctactacatatgaataatatga

SEQ ID NO: 34762 - DNA, 50 bp, synthetic construct
  source 1..50: mol_type = other DNA
tttttgttagctacgttgtgtgatatctctgcttcggttatttccataat

SEQ ID NO: 34763 - DNA, 50 bp, synthetic construct
  source 1..50: mol_type = other DNA
atccgcaggcgtggaaggtgtcaccggtggatgggcgcacgccgtgggcg

SEQ ID NO: 34764 - DNA, 50 bp, synthetic construct
  source 1..50: mol_type = other DNA
tacagggcgcgggcattgtcagcggcgcgtggccgggtacgcgcgggtct

SEQ ID NO: 34765 - DNA, 50 bp, synthetic construct
  source 1..50: mol_type = other DNA
gacagaaagcattggagaggagtagatgcgtttctccagggctttctgag

SEQ ID NO: 34766 - DNA, 50 bp, synthetic construct
  source 1..50: mol_type = other DNA
ctggatgccccattaatttcttttacacaagaaataaatgaggcatatca

SEQ ID NO: 34767 - DNA, 50 bp, synthetic construct
  source 1..50: mol_type = other DNA
atatttctcgtttgtgagaatactatattaccgtcatccgcgagtgttat

SEQ ID NO: 34768 - DNA, 50 bp, synthetic construct
  source 1..50: mol_type = other DNA
tgccacttttttgttggaactcgtcctgttatgcttattatcctgtggct

SEQ ID NO: 34769 - DNA, 50 bp, synthetic construct
  source 1..50: mol_type = other DNA
agataaaagcagtggaggtggcaggaagatcagctccacagttttgaagc

SEQ ID NO: 34770 - DNA, 50 bp, synthetic construct
  source 1..50: mol_type = other DNA
tgcggatacgatgccctcacgcaaggctgctctggggcatctcatcatca

SEQ ID NO: 34771 - DNA, 50 bp, synthetic construct
  source 1..50: mol_type = other DNA
tcgctcagcgggctggaggagaaatatttcggctctacgcctcacagcgt

SEQ ID NO: 34772 - DNA, 50 bp, synthetic construct
  source 1..50: mol_type = other DNA
gattctgccagagcctttctttttgcgtacacttggtggtaagaagacag

SEQ ID NO: 34773 - DNA, 50 bp, synthetic construct
  source 1..50: mol_type = other DNA
tgtttgtgctaccctgactgcggggtgtgacagtcatatacgcatacact

SEQ ID NO: 34774 - DNA, 50 bp, synthetic construct
  source 1..50: mol_type = other DNA
aacggaccgaacggaaaccaaaaaggcaaagtttttttatttggcgagta

SEQ ID NO: 34775 - DNA, 50 bp, synthetic construct
  source 1..50: mol_type = other DNA
taagaacaatcggcacaagtgccggatctttgtatttcctttcaatcctt

SEQ ID NO: 34776 - DNA, 50 bp, synthetic construct
  source 1..50: mol_type = other DNA
gataagaccaagaccctttgtgtattgaagcaacaggtcttgatgtttgc

SEQ ID NO: 34777 - DNA, 50 bp, synthetic construct
  source 1..50: mol_type = other DNA
gggaagcaaagatcgtaaaactcatatcttttttgatttctccccatccc

SEQ ID NO: 34778 - DNA, 50 bp, synthetic construct
  source 1..50: mol_type = other DNA
actccgaactacctcaaccacaaatcctttctctttgggtagtctatata

SEQ ID NO: 34779 - DNA, 50 bp, synthetic construct
  source 1..50: mol_type = other DNA
gagtctgatcgccgacgccctcaagcttcacggcggcaccgatcaacagc

SEQ ID NO: 34780 - DNA, 50 bp, synthetic construct
  source 1..50: mol_type = other DNA
gaaaaagccagagaatccatgaaggcctcgccgatgcggccgcagttttt

SEQ ID NO: 34781 - DNA, 50 bp, synthetic construct
  source 1..50: mol_type = other DNA
gactcacctggattcaaggtggcgccacatacacgctgtccagccccgcc

SEQ ID NO: 34782 - DNA, 50 bp, synthetic construct
  source 1..50: mol_type = other DNA
ggcggacatcaaagaaaccgctcacaagaccttcaatgttgatgtcctca

SEQ ID NO: 34783 - DNA, 50 bp, synthetic construct
  source 1..50: mol_type = other DNA
actgaagaattagtacattaacgatatcgttgttatacagaagaaatagg

SEQ ID NO: 34784 - DNA, 50 bp, synthetic construct
  source 1..50: mol_type = other DNA
gattcggtaaaaaaagagtttatattagcaagactattcatttgctcatc

SEQ ID NO: 34785 - DNA, 50 bp, synthetic construct
  source 1..50: mol_type = other DNA
tgcggtcagcttctacatgaggctggggacgggaacctctacggatcgcg

SEQ ID NO: 34786 - DNA, 50 bp, synthetic construct
  source 1..50: mol_type = other DNA
cgaacgaacaaatcggcaaaaacgaacgtttttctgttaatctgcgacaa

SEQ ID NO: 34787 - DNA, 50 bp, synthetic construct
  source 1..50: mol_type = other DNA
gcgccagaggagtgccaagtgccaattgacactcggctgcggtcgggtgt

SEQ ID NO: 34788 - DNA, 50 bp, synthetic construct
  source 1..50: mol_type = other DNA
gtaaggctgttttctattataatctttattatactatgaatatgctttac

SEQ ID NO: 34789 - DNA, 50 bp, synthetic construct
  source 1..50: mol_type = other DNA
acgcgcgacgcgatggagtgcctgtgcctgcagtgcccgttgccgagcct

SEQ ID NO: 34790 - DNA, 50 bp, synthetic construct
  source 1..50: mol_type = other DNA
agcggattgatggtcggcggaatgacttctttgccgagctttacggcggc

SEQ ID NO: 34791 - DNA, 50 bp, synthetic construct
  source 1..50: mol_type = other DNA
ctggcaacaaaaaaatataccaataaattggtatattttttcgctaacat

SEQ ID NO: 34792 - DNA, 50 bp, synthetic construct
  source 1..50: mol_type = other DNA
cgccatcccggagatgtaattctcatttgccgagcatcttctgcatggca

SEQ ID NO: 34793 - DNA, 50 bp, synthetic construct
  source 1..50: mol_type = other DNA
agtatatgaccgttggcgacgtcgggtaaaaaggcatccggtggatggct

SEQ ID NO: 34794 - DNA, 50 bp, synthetic construct
  source 1..50: mol_type = other DNA
gtcccctatgtgtcgggttcgctttaagttacaaaattagcatagcgtct

SEQ ID NO: 34795 - DNA, 50 bp, synthetic construct
  source 1..50: mol_type = other DNA
tatgttttttctggtaaatttctataagacgttttttgagggataacagc

SEQ ID NO: 34796 - DNA, 50 bp, synthetic construct
  source 1..50: mol_type = other DNA
actgaatcatattcgaattctgggccggcagaagccgaatacgaagatta

SEQ ID NO: 34797 - DNA, 50 bp, synthetic construct
  source 1..50: mol_type = other DNA
aaccgcgcttattaacgccgcagtatttgatatagtttataacttcggtt

SEQ ID NO: 34798 - DNA, 50 bp, synthetic construct
  source 1..50: mol_type = other DNA
aggcatagaaaaagcccggagcgtgtcgagaacgggctgtatctctgccg

SEQ ID NO: 34799 - DNA, 50 bp, synthetic construct
  source 1..50: mol_type = other DNA
tcgatcggagcgccggagtgacgcataagtggctccggcgcgtcgagaaa

SEQ ID NO: 34800 - DNA, 50 bp, synthetic construct
  source 1..50: mol_type = other DNA
gcgatggacgcatgaatgaattgcagccgtttaatgggcgcgtttatgac

SEQ ID NO: 34801 - DNA, 50 bp, synthetic construct
  source 1..50: mol_type = other DNA
agcgggttgtgcttttcccaccggcggttcgcctgcctgataggaaggct

SEQ ID NO: 34802 - DNA, 50 bp, synthetic construct
  source 1..50: mol_type = other DNA
tctccaagtaagttcagaaaaagttatttttttacccccgccattggagg

SEQ ID NO: 34803 - DNA, 50 bp, synthetic construct
  source 1..50: mol_type = other DNA
gtgccccggcttgtcatggtgtcctggtacaatacgattgtcgggtcgat

SEQ ID NO: 34804 - DNA, 50 bp, synthetic construct
  source 1..50: mol_type = other DNA
cgatttaatcgttacgatattcccatggctgtattgtaacaattctccca

SEQ ID NO: 34805 - DNA, 50 bp, synthetic construct
  source 1..50: mol_type = other DNA
cagctcggcatccccgttgaaacgggcagaccagagcagaaaacgagctt

SEQ ID NO: 34806 - DNA, 50 bp, synthetic construct
  source 1..50: mol_type = other DNA
caagctcaaggacaacaacggcaactttgagaagatgcgcttttctgctg

SEQ ID NO: 34807 - DNA, 50 bp, synthetic construct
  source 1..50: mol_type = other DNA
tatcaatttttaatgcatcggtatctgtactccattttcaaaaattgctg

SEQ ID NO: 34808 - DNA, 50 bp, synthetic construct
  source 1..50: mol_type = other DNA
ttgtaacttaaaatcttatatttataaaaatataagtgtcacagtgacag

SEQ ID NO: 34809 - DNA, 50 bp, synthetic construct
  source 1..50: mol_type = other DNA
tttctatcccacgaaagggggattttgatgtcgattttcggaagtgacac

SEQ ID NO: 34810 - DNA, 50 bp, synthetic construct
  source 1..50: mol_type = other DNA
ggacaactgccgcctcgcgctcatcccttcccggggtcctcccgttaaat

SEQ ID NO: 34811 - DNA, 50 bp, synthetic construct
  source 1..50: mol_type = other DNA
aaagaaagagacgattaagaaacattcgctccttattttcttgattcttt

SEQ ID NO: 34812 - DNA, 50 bp, synthetic construct
  source 1..50: mol_type = other DNA
caaaagataatcgtgatactagcacgtaggcgtataagaaatctcttttg

SEQ ID NO: 34813 - DNA, 50 bp, synthetic construct
  source 1..50: mol_type = other DNA
ctgacgacgctatgattgcggaggcggaaaacggctggtatcgtcgaagc

SEQ ID NO: 34814 - DNA, 50 bp, synthetic construct
  source 1..50: mol_type = other DNA
acacgtcgcttcttggtgctgttgatcggtgcgtagtagagtttatcaag

SEQ ID NO: 34815 - DNA, 50 bp, synthetic construct
  source 1..50: mol_type = other DNA
agtgtttgtacatttcccttatgaatttataaagggtatttgacatacaa

SEQ ID NO: 34816 - DNA, 50 bp, synthetic construct
  source 1..50: mol_type = other DNA
gtggttaagaaatcaaagttctaaagtttttactttgtattctaattcca

SEQ ID NO: 34817 - DNA, 50 bp, synthetic construct
  source 1..50: mol_type = other DNA
tatgctgctcaggtagataagattagaatccagaggacctggaacgctgt

SEQ ID NO: 34818 - DNA, 50 bp, synthetic construct
  source 1..50: mol_type = other DNA
cctttcgccacaaaagagctgattacaataccctctattatggcgagcgc

SEQ ID NO: 34819 - DNA, 50 bp, synthetic construct
  source 1..50: mol_type = other DNA
aagaaaagcagggcttagctccctgcaaggaaacgagccgtagcgtgctg

SEQ ID NO: 34820 - DNA, 50 bp, synthetic construct
  source 1..50: mol_type = other DNA
aaaaaataattcaatttagaactctgcaggtaaaattgcaaggcagtttt

SEQ ID NO: 34821 - DNA, 50 bp, synthetic construct
  source 1..50: mol_type = other DNA
ccaagcaagaactcgcaagacagatttacggcttgcgatatattcgcagg

SEQ ID NO: 34822 - DNA, 50 bp, synthetic construct
  source 1..50: mol_type = other DNA
atgactgtgaccgaccgtgctgctgtagccgagaatgcggtccggttcgc

SEQ ID NO: 34823 - DNA, 50 bp, synthetic construct
  source 1..50: mol_type = other DNA
agaggaaaaaatcctcacgaagtcttaacgcaaaaagatgtttttcaaaa

SEQ ID NO: 34824 - DNA, 50 bp, synthetic construct
  source 1..50: mol_type = other DNA
aaaaaataaaagaattgtttttagaaataaagtcaacaatttaggtttta

SEQ ID NO: 34825 - DNA, 50 bp, synthetic construct
  source 1..50: mol_type = other DNA
aactgcgcgggataatgtccggttataacctacaattacagcggcgaaaa

SEQ ID NO: 34826 - DNA, 50 bp, synthetic construct
  source 1..50: mol_type = other DNA
ccgtcccgctccccgaccttacgcttgcggtattgcggtaatcttcaata

SEQ ID NO: 34827 - DNA, 50 bp, synthetic construct
  source 1..50: mol_type = other DNA
gttaattaaccctttaacattttttcagaaatctacaaggattataccac

SEQ ID NO: 34828 - DNA, 50 bp, synthetic construct
  source 1..50: mol_type = other DNA
atacaattaaatagaactacttcaataaaaaagtttttgcttcattttta

SEQ ID NO: 34829 - DNA, 50 bp, synthetic construct
  source 1..50: mol_type = other DNA
gtcatacaagttaccatagctattagctgagctataaccccatgtcagat

SEQ ID NO: 34830 - DNA, 50 bp, synthetic construct
  source 1..50: mol_type = other DNA
aaagcggaggtcgttgacgtgttacctataccgtaaacgtaacgtaaccg

SEQ ID NO: 34831 - DNA, 50 bp, synthetic construct
  source 1..50: mol_type = other DNA
ctacggcaaaggctgtgggaattgcgcctcaatcttttccttatctgtac

SEQ ID NO: 34832 - DNA, 50 bp, synthetic construct
  source 1..50: mol_type = other DNA
ccgttcaccatgcagtatccgaacggtttcgccgagtgtatttacgccga

SEQ ID NO: 34833 - DNA, 50 bp, synthetic construct
  source 1..50: mol_type = other DNA
gcaattttggcaattttagtaattgtaacgccctaaaggcagtgcattta

SEQ ID NO: 34834 - DNA, 50 bp, synthetic construct
  source 1..50: mol_type = other DNA
gttaaaataaatattgttgttggccttacaagaaaaatatttacgcaaag

SEQ ID NO: 34835 - DNA, 50 bp, synthetic construct
  source 1..50: mol_type = other DNA
gacaagctatattatatcatctgtaaggcgatgatgtaatatgcgttgat

SEQ ID NO: 34836 - DNA, 50 bp, synthetic construct
  source 1..50: mol_type = other DNA
gatttgaagtatttctttaaagtaacaatattacggaacaaaaacaataa

SEQ ID NO: 34837 - DNA, 50 bp, synthetic construct
  source 1..50: mol_type = other DNA
tattatatcataatccaaatagaaatttgtgttatacttacattatacga

SEQ ID NO: 34838 - DNA, 50 bp, synthetic construct
  source 1..50: mol_type = other DNA
ggtttattttttatactctttttttgtgaaatgaagaataaaaaaaatcc

SEQ ID NO: 34839 - DNA, 50 bp, synthetic construct
  source 1..50: mol_type = other DNA
tttcgcttttgggctggactttcaaacgaaccgccagcggaaaagcacac

SEQ ID NO: 34840 - DNA, 50 bp, synthetic construct
  source 1..50: mol_type = other DNA
gcttgcaaaagactactcaaagaatatcattacggtgctctttcacaaaa

SEQ ID NO: 34841 - DNA, 50 bp, synthetic construct
  source 1..50: mol_type = other DNA
acgccatgaccatgcggaagaccagcgggaggaatgcatctcgatgggcg

SEQ ID NO: 34842 - DNA, 50 bp, synthetic construct
  source 1..50: mol_type = other DNA
acattccgtgaacaagagtattatatccaatccggtttatatcggaatga

SEQ ID NO: 34843 - DNA, 50 bp, synthetic construct
  source 1..50: mol_type = other DNA
ttctgcgatagtacgggaatatgtcaggaaagccagtccttatcacagaa

SEQ ID NO: 34844 - DNA, 50 bp, synthetic construct
  source 1..50: mol_type = other DNA
gaaagcggattatataacatttttcgaaagtgtttgagttaaacgcaaag

SEQ ID NO: 34845 - DNA, 50 bp, synthetic construct
  source 1..50: mol_type = other DNA
gggaaggtgttgacgccgccgtcggtgcatcgctgcggtatctgagtcag

SEQ ID NO: 34846 - DNA, 50 bp, synthetic construct
  source 1..50: mol_type = other DNA
cccgttggaaaaacgggtatatgatacggcgcacggtcttttccgtacgc

SEQ ID NO: 34847 - DNA, 50 bp, synthetic construct
  source 1..50: mol_type = other DNA
ggcggtggcattaccacacgttttccattgctatgtgcaaaattctgcta

SEQ ID NO: 34848 - DNA, 50 bp, synthetic construct
  source 1..50: mol_type = other DNA
gcggggtaactgcctgcaggcagggacccggcagtaggcggctacccgca

SEQ ID NO: 34849 - DNA, 50 bp, synthetic construct
  source 1..50: mol_type = other DNA
cttttataatctctgcctgttctggatagaaccacgacacatgataaaat

SEQ ID NO: 34850 - DNA, 50 bp, synthetic construct
  source 1..50: mol_type = other DNA
aataatgatggcaggaagttatactcatatacatggctacgcgcattttt

SEQ ID NO: 34851 - DNA, 50 bp, synthetic construct
  source 1..50: mol_type = other DNA
caaggagcgtctgctgtttttcaatctcatttgatttcaggcgaaacttg

SEQ ID NO: 34852 - DNA, 50 bp, synthetic construct
  source 1..50: mol_type = other DNA
gctggcttttccgtttttgattttattcgtcctctccccaaaaagcctgc

SEQ ID NO: 34853 - DNA, 50 bp, synthetic construct
  source 1..50: mol_type = other DNA
cttattggttcgacaaaaattctaagtagaattttcaccaaaaaaggttg

SEQ ID NO: 34854 - DNA, 50 bp, synthetic construct
  source 1..50: mol_type = other DNA
tgacctaactagactggctaagaagttgcttaaatgactaagtaataaca

SEQ ID NO: 34855 - DNA, 50 bp, synthetic construct
  source 1..50: mol_type = other DNA
cttcaaaaatacccttgacaactccggttttttccaacgttctttaccgc

SEQ ID NO: 34856 - DNA, 50 bp, synthetic construct
  source 1..50: mol_type = other DNA
taacaaataaactattttttatatttttagacaaaacaagcaatttattt

SEQ ID NO: 34857 - DNA, 50 bp, synthetic construct
  source 1..50: mol_type = other DNA
tacgcatttgccgaattctggcactggcaaatgtttttcttaaattgtca

SEQ ID NO: 34858 - DNA, 50 bp, synthetic construct
  source 1..50: mol_type = other DNA
agacgatggacttgacacctcggttatcatgcaaggcaacgccatccttc

SEQ ID NO: 34859 - DNA, 50 bp, synthetic construct
  source 1..50: mol_type = other DNA
ttatttggcaatttatttaagagcggatttcgggcataatctccacccaa

SEQ ID NO: 34860 - DNA, 50 bp, synthetic construct
  source 1..50: mol_type = other DNA
agaagcattcagccttgtaagcggaatcgatcagatccacgaataccttc

SEQ ID NO: 34861 - DNA, 50 bp, synthetic construct
  source 1..50: mol_type = other DNA
attacgaatgcgtccggaaagacgcaaatgaatacagtataattcgtaag

SEQ ID NO: 34862 - DNA, 50 bp, synthetic construct
  source 1..50: mol_type = other DNA
gaaaggtgaaaggtatccgagaaaacagcatcggatccgtttccacgctt

SEQ ID NO: 34863 - DNA, 50 bp, synthetic construct
  source 1..50: mol_type = other DNA
ccacatgggctgcaaattttaacctaccggttcgctaccactccaaatca

SEQ ID NO: 34864 - DNA, 50 bp, synthetic construct
  source 1..50: mol_type = other DNA
gttcttcatcaacctctgctttaccactaaagaaggctttgaaagtgaaa

SEQ ID NO: 34865 - DNA, 50 bp, synthetic construct
  source 1..50: mol_type = other DNA
agtctattatcgaagatggaatgaaattctttaataaacgatttttttct

SEQ ID NO: 34866 - DNA, 50 bp, synthetic construct
  source 1..50: mol_type = other DNA
attcatgttttgcaaatacttcttcttctaaaaatttcgaaaaaataaaa

SEQ ID NO: 34867 - DNA, 50 bp, synthetic construct
  source 1..50: mol_type = other DNA
tcccgccaatccgcatatagtacaaatttaacatctgcggaatggcgtaa

SEQ ID NO: 34868 - DNA, 50 bp, synthetic construct
  source 1..50: mol_type = other DNA
agaccgctccagggcagaaagctggaaagacggctgtactgcgccgcgct

SEQ ID NO: 34869 - DNA, 50 bp, synthetic construct
  source 1..50: mol_type = other DNA
tgtcagttcagatatttcatgttatttataaaacggtcagtcttatgaca

SEQ ID NO: 34870 - DNA, 50 bp, synthetic construct
  source 1..50: mol_type = other DNA
aaattgaaaatcgtttagcaaagaaatctttattatttcattaaagaatt

SEQ ID NO: 34871 - DNA, 50 bp, synthetic construct
  source 1..50: mol_type = other DNA
aataatgagaatttatgtaagaaaatgcaataagtttttttataattatg

SEQ ID NO: 34872 - DNA, 50 bp, synthetic construct
  source 1..50: mol_type = other DNA
cttagactggcatagtgttataaatctttatgttgaactgccagagtaca

SEQ ID NO: 34873 - DNA, 50 bp, synthetic construct
  source 1..50: mol_type = other DNA
aatgacgggtcgtaaagaagcgaaattttttacacttctattgcttcctt

SEQ ID NO: 34874 - DNA, 50 bp, synthetic construct
  source 1..50: mol_type = other DNA
taagtttgattacattataggcatggatgaatggaatatccgcaatataa

SEQ ID NO: 34875 - DNA, 50 bp, synthetic construct
  source 1..50: mol_type = other DNA
aatcgtccatataaaacaggcaatgccgccgctcagttatgaggaagcgc

SEQ ID NO: 34876 - DNA, 50 bp, synthetic construct
  source 1..50: mol_type = other DNA
ctccggatttctccaatgatcatcggtaccgcataagttgaaaattttac

SEQ ID NO: 34877 - DNA, 50 bp, synthetic construct
  source 1..50: mol_type = other DNA
acgtaagctatattacgctgtcttttaagaaataaaaatggaggcgacac

SEQ ID NO: 34878 - DNA, 50 bp, synthetic construct
  source 1..50: mol_type = other DNA
tacccaaagcccgccgggctgtcctctgcctccctaccgaagcattggcg

SEQ ID NO: 34879 - DNA, 50 bp, synthetic construct
  source 1..50: mol_type = other DNA
aaagtaatattgagagaaatgatatggattatatccttgtcggggaaatc

SEQ ID NO: 34880 - DNA, 50 bp, synthetic construct
  source 1..50: mol_type = other DNA
tttggcagagcgattacttcggcatatctgtaagctccgcttctgcctca

SEQ ID NO: 34881 - DNA, 50 bp, synthetic construct
  source 1..50: mol_type = other DNA
ttactccaaaaagtggaagccttgaaggagaacgacactttgggacttaa

SEQ ID NO: 34882 - DNA, 50 bp, synthetic construct
  source 1..50: mol_type = other DNA
tactttacttcgatttcaactttttcgatttcttcaatagacggcaagct

SEQ ID NO: 34883 - DNA, 50 bp, synthetic construct
  source 1..50: mol_type = other DNA
tcgacaaatctcttaagcatattatataaatatcttttttgatttctccc

SEQ ID NO: 34884 - DNA, 50 bp, synthetic construct
  source 1..50: mol_type = other DNA
tatcactaatttcatggctaatattctgctaaaatatttataaagttatt

SEQ ID NO: 34885 - DNA, 50 bp, synthetic construct
  source 1..50: mol_type = other DNA
tcttttttgcggaaaaaagttctgcggagaaggaactgtcgcaaagaaag

SEQ ID NO: 34886 - DNA, 50 bp, synthetic construct
  source 1..50: mol_type = other DNA
agagaccggtatactttgtacttcatatgggacagcccataccggtaaag

SEQ ID NO: 34887 - DNA, 50 bp, synthetic construct
  source 1..50: mol_type = other DNA
atattgtttttcggccttatttctatagaaatgcaaagtaaagatagccc

SEQ ID NO: 34888 - DNA, 50 bp, synthetic construct
  source 1..50: mol_type = other DNA
tcgaaaaagttatgatctacgcccgccggcggtcagcatgattttcgcga

SEQ ID NO: 34889 - DNA, 50 bp, synthetic construct
  source 1..50: mol_type = other DNA
tatatttagtaagtggtacatacttgagtataaactcacgtaaaaataag

SEQ ID NO: 34890 - DNA, 50 bp, synthetic construct
  source 1..50: mol_type = other DNA
agccgtgatgacaaaaatgtagtatgaactacatcctgaatatcctgaat

SEQ ID NO: 34891 - DNA, 50 bp, synthetic construct
  source 1..50: mol_type = other DNA
caaaaatgctggaaaaatatcggccttaaaatacgtttcgagcatttgaa

SEQ ID NO: 34892 - DNA, 50 bp, synthetic construct
  source 1..50: mol_type = other DNA
cataccgaggagcggaagaagcacataatcttcttccgtatatctcggct

SEQ ID NO: 34893 - DNA, 50 bp, synthetic construct
  source 1..50: mol_type = other DNA
catttaactgtgcaggcatacggatatccgtatgcctgcaagattattta

SEQ ID NO: 34894 - DNA, 50 bp, synthetic construct
  source 1..50: mol_type = other DNA
tgtcgttttttttgtcaatatgtaaaaatctatatataaataaataatta

SEQ ID NO: 34895 - DNA, 50 bp, synthetic construct
  source 1..50: mol_type = other DNA
tctataactgcattgccgttttcaatatccaatatggctgccgttatcgg

SEQ ID NO: 34896 - DNA, 50 bp, synthetic construct
  source 1..50: mol_type = other DNA
ttcccatatactcacggattttattaatttgctccttgagcatactttct

SEQ ID NO: 34897 - DNA, 50 bp, synthetic construct
  source 1..50: mol_type = other DNA
atatgactcagaaacaggtaaccatatggatatgacatcattggcggcaa

SEQ ID NO: 34898 - DNA, 50 bp, synthetic construct
  source 1..50: mol_type = other DNA
tagcagaattttgcacatagcaatggaaaacgtgtggtaatgccaccgcc

SEQ ID NO: 34899 - DNA, 50 bp, synthetic construct
  source 1..50: mol_type = other DNA
tatcatttggcggaatcattttcctaatgccatgattttgtcaaattctt

SEQ ID NO: 34900 - DNA, 50 bp, synthetic construct
  source 1..50: mol_type = other DNA
gctttttcataaacggaatcttcttttctccatcggttttgtggaaaaat

SEQ ID NO: 34901 - DNA, 50 bp, synthetic construct
  source 1..50: mol_type = other DNA
ttgttagattttgtatatttacaacaaggtaaaaatataaaggcccagaa

SEQ ID NO: 34902 - DNA, 50 bp, synthetic construct
  source 1..50: mol_type = other DNA
gcgggagctggccgcgcgcctgagcgccgttgctgtattccagcgtgatc

SEQ ID NO: 34903 - DNA, 50 bp, synthetic construct
  source 1..50: mol_type = other DNA
tgtcgtcgatctgcacgaccgcgatctgccacagttcgatttcgacgagg

SEQ ID NO: 34904 - DNA, 50 bp, synthetic construct
  source 1..50: mol_type = other DNA
cgtccgtggatttttggtcggacgttcggccttggagggcgtcacgtctc

SEQ ID NO: 34905 - DNA, 50 bp, synthetic construct
  source 1..50: mol_type = other DNA
gaaaagccacagcttaaggcgatatttatgtcgccaagctgtcgctttag

SEQ ID NO: 34906 - DNA, 50 bp, synthetic construct
  source 1..50: mol_type = other DNA
aagctggatgccggatttcatgcaggagagtgtctgccggcggtcagctg

SEQ ID NO: 34907 - DNA, 50 bp, synthetic construct
  source 1..50: mol_type = other DNA
tccggggacttatacacttgataattaatttcgtactatccgtacagtat

SEQ ID NO: 34908 - DNA, 50 bp, synthetic construct
  source 1..50: mol_type = other DNA
tgacggtgacggttaccacggaaaattcgctgtgcatatcgtgctgctcg

SEQ ID NO: 34909 - DNA, 50 bp, synthetic construct
  source 1..50: mol_type = other DNA
gtagaatgggatgagacctataaaattatatcagcgagaatcctctctat

SEQ ID NO: 34910 - DNA, 50 bp, synthetic construct
  source 1..50: mol_type = other DNA
tttatttgtgaatttttacaaaagtgtaaaaataaaaagagccaaacttc

SEQ ID NO: 34911 - DNA, 50 bp, synthetic construct
  source 1..50: mol_type = other DNA
taaacctacctttccgcgacggcaacgcccggtgcgcaacgcgcgaggcg

SEQ ID NO: 34912 - DNA, 50 bp, synthetic construct
  source 1..50: mol_type = other DNA
taaatacaataacataggagtgtgatccggatcctgcgggtgggtatcca

SEQ ID NO: 34913 - DNA, 50 bp, synthetic construct
  source 1..50: mol_type = other DNA
agtgctagcggatgagccgaccggtaccgaccggaaacctggataccaag

SEQ ID NO: 34914 - DNA, 50 bp, synthetic construct
  source 1..50: mol_type = other DNA
ctttatagcatactataaaaggatgatcgcttttactgaatggattgaaa

SEQ ID NO: 34915 - DNA, 50 bp, synthetic construct
  source 1..50: mol_type = other DNA
ctctcgggaaacgcccttgcagcgcgctctacttaggcgattagtcaagc

SEQ ID NO: 34916 - DNA, 50 bp, synthetic construct
  source 1..50: mol_type = other DNA
ttgggttgctatgcgatcatttccatggaaaggctgttgtagatgataaa

SEQ ID NO: 34917 - DNA, 50 bp, synthetic construct
  source 1..50: mol_type = other DNA
cagcggttcgatcccgcttatctccacaaataagctgttgctcatcatca

SEQ ID NO: 34918 - DNA, 50 bp, synthetic construct
  source 1..50: mol_type = other DNA
tgtccccaatttatacaggcatagacttatgccggataaaatgcgggata

SEQ ID NO: 34919 - DNA, 50 bp, synthetic construct
  source 1..50: mol_type = other DNA
aagccttaacaagattaagaaaaagcttttagcctcccttgtaaagggag

SEQ ID NO: 34920 - DNA, 50 bp, synthetic construct
  source 1..50: mol_type = other DNA
atcacactccctgcatatgggcaaactgtactgtggagagtgcggctgcc

SEQ ID NO: 34921 - DNA, 50 bp, synthetic construct
  source 1..50: mol_type = other DNA
gatactgtgacccttcgctcttttaaaaagacccgaaaccttacggtttc

SEQ ID NO: 34922 - DNA, 50 bp, synthetic construct
  source 1..50: mol_type = other DNA
aagaactcgaggagcttgatcgcaagcctgaccgtcggcctcgacggcta

SEQ ID NO: 34923 - DNA, 50 bp, synthetic construct
  source 1..50: mol_type = other DNA
atttcccggcttttggcatttagaactttaaattacttttatctggaata

SEQ ID NO: 34924 - DNA, 50 bp, synthetic construct
  source 1..50: mol_type = other DNA
ggagaagttaccatcagggatctgatcatggtccaggcggcgacgcagat

SEQ ID NO: 34925 - DNA, 50 bp, synthetic construct
  source 1..50: mol_type = other DNA
atcattttaaaaaggaggatttgaaataaacacctcctcggtaaaagaaa

SEQ ID NO: 34926 - DNA, 50 bp, synthetic construct
  source 1..50: mol_type = other DNA
gcgggacagctagcggaacagatgaacgggtgttccgcttgcgaagctgt

SEQ ID NO: 34927 - DNA, 50 bp, synthetic construct
  source 1..50: mol_type = other DNA
gcaggcggttttccagatcctgagcgctttctgttaattaaacggcagct

SEQ ID NO: 34928 - DNA, 50 bp, synthetic construct
  source 1..50: mol_type = other DNA
ttgcatacagtctgaatgacgaaccaacagaccaggaagaccagctccat

SEQ ID NO: 34929 - DNA, 50 bp, synthetic construct
  source 1..50: mol_type = other DNA
agtaaatctaaaatttattataagaacaaataataaagttcatattcttt

SEQ ID NO: 34930 - DNA, 50 bp, synthetic construct
  source 1..50: mol_type = other DNA
tctattgagatgcgtttccgcaggggtcccatcacaggcatcttttcctt

SEQ ID NO: 34931 - DNA, 50 bp, synthetic construct
  source 1..50: mol_type = other DNA
cttccgcaggaagatatatttgcagtagtctatatatcactctgaaagcc

SEQ ID NO: 34932 - DNA, 50 bp, synthetic construct
  source 1..50: mol_type = other DNA
cgatggctgaatgtcaagtatgcgatcttaacttttccgttttgccatcg

SEQ ID NO: 34933 - DNA, 50 bp, synthetic construct
  source 1..50: mol_type = other DNA
gcaaggcttcgaatgcaactctcaaaaaagtcttgactttttggcctgac

SEQ ID NO: 34934 - DNA, 50 bp, synthetic construct
  source 1..50: mol_type = other DNA
ggtcccggtagatggccggggcgacgacgagccggggatcacgcgggacc

SEQ ID NO: 34935 - DNA, 50 bp, synthetic construct
  source 1..50: mol_type = other DNA
ttcgagtacgaaggccaggtctatcgatgcgcgtggactacaaggtcggc

SEQ ID NO: 34936 - DNA, 50 bp, synthetic construct
  source 1..50: mol_type = other DNA
gccccggggtcgaggggctccaggcggactggaccgtttgacctggggct

SEQ ID NO: 34937 - DNA, 50 bp, synthetic construct
  source 1..50: mol_type = other DNA
tacgacggggtttgtgagtgatgaattctcacatctagtacagactcgga

SEQ ID NO: 34938 - DNA, 50 bp, synthetic construct
  source 1..50: mol_type = other DNA
tgaacaacattaatatgtcccagtttcatccacattattaatgtcaatga

SEQ ID NO: 34939 - DNA, 50 bp, synthetic construct
  source 1..50: mol_type = other DNA
cctttcatgatttttctaaaaagcagtattttgccaaactaagtattaca

SEQ ID NO: 34940 - DNA, 50 bp, synthetic construct
  source 1..50: mol_type = other DNA
acccgggcataaccggcgacccttctgtggttgggaaaggatgcccgggg

SEQ ID NO: 34941 - DNA, 50 bp, synthetic construct
  source 1..50: mol_type = other DNA
aacataaaagaagtgcctgtcaagaaattctcaccaaatgattttatgga

SEQ ID NO: 34942 - DNA, 50 bp, synthetic construct
  source 1..50: mol_type = other DNA
agagaaattgaacaactgctaaagggattatagacacgccaccattcgct

SEQ ID NO: 34943 - DNA, 50 bp, synthetic construct
  source 1..50: mol_type = other DNA
ccgggggttggaccggaagcctcccgggcggcttcctcatcctcacctcg

SEQ ID NO: 34944 - DNA, 50 bp, synthetic construct
  source 1..50: mol_type = other DNA
acgcctcaaccgatcgcgactcggagaaccagcgcgatcagttgcttgtt

SEQ ID NO: 34945 - DNA, 50 bp, synthetic construct
  source 1..50: mol_type = other DNA
atcgggagacacgcgggatgtcccgcgacttcgcgcggccgtatcccggc

SEQ ID NO: 34946 - DNA, 50 bp, synthetic construct
  source 1..50: mol_type = other DNA
agctgcgcgcgacgatcgtccacgcgccgtgatgcccgtcgtgtacggca

SEQ ID NO: 34947 - DNA, 50 bp, synthetic construct
  source 1..50: mol_type = other DNA
ttatgccgagcagggcaggatagtcgattactcggcgcttaagtccggaa

SEQ ID NO: 34948 - DNA, 50 bp, synthetic construct
  source 1..50: mol_type = other DNA
gctttcattttacgaaaggagcattgtgatctacaacggaaaagtcaagt

SEQ ID NO: 34949 - DNA, 50 bp, synthetic construct
  source 1..50: mol_type = other DNA
gattgaaatgaaggatagcaaaacgccttttgatttcttttcattcaaat

SEQ ID NO: 34950 - DNA, 50 bp, synthetic construct
  source 1..50: mol_type = other DNA
atctgaccttttataatcaaatttctcatcatgattaccaccatgccatt

SEQ ID NO: 34951 - DNA, 50 bp, synthetic construct
  source 1..50: mol_type = other DNA
atatcaaagcttcaaatatatccttaattttatcttttaaatagtaatat

SEQ ID NO: 34952 - DNA, 50 bp, synthetic construct
  source 1..50: mol_type = other DNA
ggaagaatctgaaagcgtattgctgagtcgagaaattttcggtcacttcc

SEQ ID NO: 34953 - DNA, 50 bp, synthetic construct
  source 1..50: mol_type = other DNA
gtaaaaatcgttaagcatttcatgatcgtgaaatatattgacattttttg

SEQ ID NO: 34954 - DNA, 50 bp, synthetic construct
  source 1..50: mol_type = other DNA
cgactacggattatgtctggaaagactgttcagaacattatccgaaatga

SEQ ID NO: 34955 - DNA, 50 bp, synthetic construct
  source 1..50: mol_type = other DNA
aaagactgtaccaatcaagaacggtggagtgactgcatggattccacttc

SEQ ID NO: 34956 - DNA, 50 bp, synthetic construct
  source 1..50: mol_type = other DNA
gtgatagacacaatactcaccgaaaatttgatgataattgattctgaaat

SEQ ID NO: 34957 - DNA, 50 bp, synthetic construct
  source 1..50: mol_type = other DNA
aaagaaaaagccgctgacacgttatctgccgtactgtgacatttttcttt

SEQ ID NO: 34958 - DNA, 50 bp, synthetic construct
  source 1..50: mol_type = other DNA
cctccaagaaaagtcaaggaggaattctcgtacttgaccgcaaggtcagg

SEQ ID NO: 34959 - DNA, 50 bp, synthetic construct
  source 1..50: mol_type = other DNA
tattctactcatgtatgtgtacatgaaaatacacattcaggaaaagaaag

SEQ ID NO: 34960 - DNA, 50 bp, synthetic construct
  source 1..50: mol_type = other DNA
ggctttcagagtgatatatagactactgcaaatatatcttcctgcggaag

SEQ ID NO: 34961 - DNA, 50 bp, synthetic construct
  source 1..50: mol_type = other DNA
agaaaatcttttagcagctcaacctccgtatagctgcgccttggctttct

SEQ ID NO: 34962 - DNA, 50 bp, synthetic construct
  source 1..50: mol_type = other DNA
attagttggcgtaatgtctttgttatatcaagaactttccgctaagtaaa

SEQ ID NO: 34963 - DNA, 50 bp, synthetic construct
  source 1..50: mol_type = other DNA
gtgatagatagactaccaaaaggaaacgcttttggtgatgatcatatcga

SEQ ID NO: 34964 - DNA, 50 bp, synthetic construct
  source 1..50: mol_type = other DNA
cttcttggctctggctctggcctcggttttcctatggtggagccaagaag

SEQ ID NO: 34965 - DNA, 50 bp, synthetic construct
  source 1..50: mol_type = other DNA
gcgcttcagtagtattatcataaatatcgttgaaaatccccttgaagcct

SEQ ID NO: 34966 - DNA, 50 bp, synthetic construct
  source 1..50: mol_type = other DNA
cgccaaaaagcacgaggtatcttcgtgaacccccttcgcgcaaagtgaac

SEQ ID NO: 34967 - DNA, 50 bp, synthetic construct
  source 1..50: mol_type = other DNA
gaatgtgagttcatcaatcgagacgtttagctgcctgtgggctctttctc

SEQ ID NO: 34968 - DNA, 50 bp, synthetic construct
  source 1..50: mol_type = other DNA
aagaaaatttttgattcttgcagggacaaagactgcatcgaagacctccg

SEQ ID NO: 34969 - DNA, 50 bp, synthetic construct
  source 1..50: mol_type = other DNA
tgcggccagaccacgacctatggtgcactggagggcgttttcgcgctcac

SEQ ID NO: 34970 - DNA, 50 bp, synthetic construct
  source 1..50: mol_type = other DNA
tgaggagatttccgctgagcaggtcgggttgcctttatagtatcgggtca

SEQ ID NO: 34971 - DNA, 50 bp, synthetic construct
  source 1..50: mol_type = other DNA
ccccgcgcccccggtgtagtgcacgagtgctctaccattgagctatcggg

SEQ ID NO: 34972 - DNA, 50 bp, synthetic construct
  source 1..50: mol_type = other DNA
tgggtgaagtgctcgtaaaaatcaacggacaaggacgagcagttcacctc

SEQ ID NO: 34973 - DNA, 50 bp, synthetic construct
  source 1..50: mol_type = other DNA
cacattttaccttgacgacgggagcggtacagagatcacgaagtgatgta

SEQ ID NO: 34974 - DNA, 50 bp, synthetic construct
  source 1..50: mol_type = other DNA
ccgatataccgtttttgccggatgatcggcggttcaagtccgttaatttg

SEQ ID NO: 34975 - DNA, 50 bp, synthetic construct
  source 1..50: mol_type = other DNA
tatggaaaaaaacaaagtcaagtttgtttctgaacctgtttaccattata

SEQ ID NO: 34976 - DNA, 50 bp, synthetic construct
  source 1..50: mol_type = other DNA
agtaatctgttcctcataatccgttgccggatgctacggaaatccaatcc

SEQ ID NO: 34977 - DNA, 50 bp, synthetic construct
  source 1..50: mol_type = other DNA
ttgatgaagatactgtgacccttcgctaagaaaagaaaaaggtttatccc

SEQ ID NO: 34978 - DNA, 50 bp, synthetic construct
  source 1..50: mol_type = other DNA
aagcaaggtctattatagcatatttcgtgttaaaatagtatagcacattt

SEQ ID NO: 34979 - DNA, 50 bp, synthetic construct
  source 1..50: mol_type = other DNA
gcgttcgcggctatcctgaaaagcaagctgatctatggaaacgctctcgg

SEQ ID NO: 34980 - DNA, 50 bp, synthetic construct
  source 1..50: mol_type = other DNA
ccaaggaaagaaaggtgaaagggtatgacttaccacctttatttctatgc

SEQ ID NO: 34981 - DNA, 50 bp, synthetic construct
  source 1..50: mol_type = other DNA
atgcagcagaagaaagcggaaaggaagatttccgtcttcgtcatggtcat

SEQ ID NO: 34982 - DNA, 50 bp, synthetic construct
  source 1..50: mol_type = other DNA
aaagcggaggtcgttgacgtgttacctataccgtaaacgtaacataaccg

SEQ ID NO: 34983 - DNA, 50 bp, synthetic construct
  source 1..50: mol_type = other DNA
ttgatagattcaatcccggcatggtttcatctcgtacatgaaactatcaa

SEQ ID NO: 34984 - DNA, 50 bp, synthetic construct
  source 1..50: mol_type = other DNA
attcaaaaggaaatggatatagtcatatatcaagtcaattactgataaat

SEQ ID NO: 34985 - DNA, 50 bp, synthetic construct
  source 1..50: mol_type = other DNA
tcttttggtggatattttactggactgtggtgacgttattatgcaaaaga

SEQ ID NO: 34986 - DNA, 50 bp, synthetic construct
  source 1..50: mol_type = other DNA
tcaaagttccggcagaaatcgcagatcaccggattctgcgggtggcaaga

SEQ ID NO: 34987 - DNA, 50 bp, synthetic construct
  source 1..50: mol_type = other DNA
acgcaatgattgtcaacgatattttcaaaatggagattcagtcatcaaca

SEQ ID NO: 34988 - DNA, 50 bp, synthetic construct
  source 1..50: mol_type = other DNA
agaatatcgagggtgctatctaccaaagaagataagggtggcagcctact

SEQ ID NO: 34989 - DNA, 50 bp, synthetic construct
  source 1..50: mol_type = other DNA
ctgctctttgataaaattccaagtagttggcttgttccattactaatatc

SEQ ID NO: 34990 - DNA, 50 bp, synthetic construct
  source 1..50: mol_type = other DNA
gctgtcagcatatttgacctccacgcaaggaggttttccatgctgctttt

SEQ ID NO: 34991 - DNA, 50 bp, synthetic construct
  source 1..50: mol_type = other DNA
gactatctggagggcgatcactattttgcaggagcgccccaagcctacgg

SEQ ID NO: 34992 - DNA, 50 bp, synthetic construct
  source 1..50: mol_type = other DNA
tttttatacccatttttcataaaatacaatatatttacaaagtatgcaaa

SEQ ID NO: 34993 - DNA, 50 bp, synthetic construct
  source 1..50: mol_type = other DNA
tattatacatgataaagtctctatttaactttctttttgtattaagaatt

SEQ ID NO: 34994 - DNA, 50 bp, synthetic construct
  source 1..50: mol_type = other DNA
ttgatactgtcaaggcaagaacgctcaaaggcttgcttaccgacatcgga

SEQ ID NO: 34995 - DNA, 50 bp, synthetic construct
  source 1..50: mol_type = other DNA
gaaaccgagtatgctataataacagttgttccaatagctcatatagtacc

SEQ ID NO: 34996 - DNA, 50 bp, synthetic construct
  source 1..50: mol_type = other DNA
gttataatttagttagcttggaattaatgaataagtataaagatgataac

SEQ ID NO: 34997 - DNA, 50 bp, synthetic construct
  source 1..50: mol_type = other DNA
catattttctaaagtttctaagccctgcattaaaaacgacacaaaagcac

SEQ ID NO: 34998 - DNA, 50 bp, synthetic construct
  source 1..50: mol_type = other DNA
caaattggccgaaaggggcttgacttgtcaagctttttctgccaggtttt

SEQ ID NO: 34999 - DNA, 50 bp, synthetic construct
  source 1..50: mol_type = other DNA
tgtttctatatcattatagcttcttgggcagatctcttgaaatacaaagg

SEQ ID NO: 35000 - DNA, 50 bp, synthetic construct
  source 1..50: mol_type = other DNA
ctgggaagaagcaaccgtaaatatacatatcatcagtttcttcttccagt

SEQ ID NO: 35001 - DNA, 50 bp, synthetic construct
  source 1..50: mol_type = other DNA
cggctgaaatcgaccgcaaaaacgccgttttctgcggagcagttaatccg

SEQ ID NO: 35002 - DNA, 50 bp, synthetic construct
  source 1..50: mol_type = other DNA
atggttacggttatactcggaacgtctttgccggtctgctccgctgcggc

SEQ ID NO: 35003 - DNA, 50 bp, synthetic construct
  source 1..50: mol_type = other DNA
tcatacatgaacagcgagatgtggtcccgttgcttgcgcagatcgtatgc

SEQ ID NO: 35004 - DNA, 50 bp, synthetic construct
  source 1..50: mol_type = other DNA
ttgttcctgtgctgaatgtctatgaaaataaaacctatgcacaagcacgg

SEQ ID NO: 35005 - DNA, 50 bp, synthetic construct
  source 1..50: mol_type = other DNA
agcggtatccgggcatccttcatattcctgatttcttctgacaaaacgag

SEQ ID NO: 35006 - DNA, 50 bp, synthetic construct
  source 1..50: mol_type = other DNA
tgcatatccgccatccatttaattgatacaaatcgaatcacgaatataag

SEQ ID NO: 35007 - DNA, 50 bp, synthetic construct
  source 1..50: mol_type = other DNA
tcctttagccatgctcattttatggtcagtcggtgataccggaaaaagct

SEQ ID NO: 35008 - DNA, 50 bp, synthetic construct
  source 1..50: mol_type = other DNA
gaagatgtatttatcctgggcgcttaagagccgtgcataatatgttataa

SEQ ID NO: 35009 - DNA, 50 bp, synthetic construct
  source 1..50: mol_type = other DNA
tatttcttgcttttccttcatacttgcgtatttgatataattcagttgct

SEQ ID NO: 35010 - DNA, 50 bp, synthetic construct
  source 1..50: mol_type = other DNA
aaaggtattcaagaaaacacttgctatgaagagtatgtttgtgtattcgg

SEQ ID NO: 35011 - DNA, 50 bp, synthetic construct
  source 1..50: mol_type = other DNA
tatatattaaaagaaaggggaaataagttttgccttcaggcgtggaagag

SEQ ID NO: 35012 - DNA, 50 bp, synthetic construct
  source 1..50: mol_type = other DNA
cggtgctggtaggtggtgttgcagcccgcagattagacgaaagcgcaacg

SEQ ID NO: 35013 - DNA, 50 bp, synthetic construct
  source 1..50: mol_type = other DNA
tattccgggctttcagagcgatgtattcaaggctatgaagctcccacagg

SEQ ID NO: 35014 - DNA, 50 bp, synthetic construct
  source 1..50: mol_type = other DNA
aaaacataaatatccatatcaaatacaagtgagatataatgtcttttttt

SEQ ID NO: 35015 - DNA, 50 bp, synthetic construct
  source 1..50: mol_type = other DNA
aaaatatcggactataatcgcaaatcttgtcgggtctaaaaatatatttg

SEQ ID NO: 35016 - DNA, 50 bp, synthetic construct
  source 1..50: mol_type = other DNA
ctgatggatacgaatgtgatttttataataactacacttttattgtgtag

SEQ ID NO: 35017 - DNA, 50 bp, synthetic construct
  source 1..50: mol_type = other DNA
attacgattaaaaataatcaaaaaggtattttatcatttggcatagtaat

SEQ ID NO: 35018 - DNA, 50 bp, synthetic construct
  source 1..50: mol_type = other DNA
ggcaatcagatatacttttcctataactccttatagtttatctaatgaaa

SEQ ID NO: 35019 - DNA, 50 bp, synthetic construct
  source 1..50: mol_type = other DNA
cctcacagagcctctattttttcttaaggaaatttatggaggctgtgaca

SEQ ID NO: 35020 - DNA, 50 bp, synthetic construct
  source 1..50: mol_type = other DNA
ttttttccaccctctgccaaggaaagtatataaacagagcctgccaaaaa

SEQ ID NO: 35021 - DNA, 50 bp, synthetic construct
  source 1..50: mol_type = other DNA
tgaatgccaattccaaacaggcaccgggagctgtttcggattcttcctca

SEQ ID NO: 35022 - DNA, 50 bp, synthetic construct
  source 1..50: mol_type = other DNA
taaaaagatacttggatttaggctgacgcggagcgtcaagtttccttttc

SEQ ID NO: 35023 - DNA, 50 bp, synthetic construct
  source 1..50: mol_type = other DNA
atatatagctacagaaaggaggaattgccctcccaacaataaatatcacg

SEQ ID NO: 35024 - DNA, 50 bp, synthetic construct
  source 1..50: mol_type = other DNA
tagtctcattgaaagcgaggcaatataatcgaatgtgctcattgaggcta

SEQ ID NO: 35025 - DNA, 50 bp, synthetic construct
  source 1..50: mol_type = other DNA
tggcttgaaatcaaggctctatatgcactccgggactttattttttgcca

SEQ ID NO: 35026 - DNA, 50 bp, synthetic construct
  source 1..50: mol_type = other DNA
tccgcaggaagatatatttgcagtgggtagtctatatatcactctgaaag

SEQ ID NO: 35027 - DNA, 50 bp, synthetic construct
  source 1..50: mol_type = other DNA
gtaatttttaaccgagtttctacataagcagaaatccttttatacgttgg

SEQ ID NO: 35028 - DNA, 50 bp, synthetic construct
  source 1..50: mol_type = other DNA
aaagacagcaacaagtaacctattggtgaaggatgtttcttcatgccgat

SEQ ID NO: 35029 - DNA, 50 bp, synthetic construct
  source 1..50: mol_type = other DNA
ccggccatatttgggtacattattataaggatatactttaatattttcgg

SEQ ID NO: 35030 - DNA, 50 bp, synthetic construct
  source 1..50: mol_type = other DNA
gcaatgagtgagagaatcaagaaaatttttcaacaagggaattatatttt

SEQ ID NO: 35031 - DNA, 50 bp, synthetic construct
  source 1..50: mol_type = other DNA
tgcagacgacgaagagaaagagcgcaggctcttctttttcttccttgcca

SEQ ID NO: 35032 - DNA, 50 bp, synthetic construct
  source 1..50: mol_type = other DNA
cgattatcactaatccaaagctgatttgttttttgaaacattattaatcg

SEQ ID NO: 35033 - DNA, 50 bp, synthetic construct
  source 1..50: mol_type = other DNA
cctaccttgaacatgtaaaagccctctttcatctacagcctctttgtatg

SEQ ID NO: 35034 - DNA, 50 bp, synthetic construct
  source 1..50: mol_type = other DNA
ccgggccaaacatgtcctttgtttttagggaaaaattatacaggggctat

SEQ ID NO: 35035 - DNA, 50 bp, synthetic construct
  source 1..50: mol_type = other DNA
cgctgcttcggattatgacagaggaggctggtggtccttcacggtcagcg

SEQ ID NO: 35036 - DNA, 50 bp, synthetic construct
  source 1..50: mol_type = other DNA
gcgatgaccgtcttgcggccgcgcatgcgcggccagacgccgttcaccgc

SEQ ID NO: 35037 - DNA, 50 bp, synthetic construct
  source 1..50: mol_type = other DNA
tcaatcctcttgaggtgctttcttgtatctcgtcaccgatttctaattga

SEQ ID NO: 35038 - DNA, 50 bp, synthetic construct
  source 1..50: mol_type = other DNA
tgctggtaacacgatgagcggccgcaactctacgcatagcgactgtccgt

SEQ ID NO: 35039 - DNA, 50 bp, synthetic construct
  source 1..50: mol_type = other DNA
ggtacgacaaaaaggttcacgcccagcggcgtatcagagccgctctgcgg

SEQ ID NO: 35040 - DNA, 50 bp, synthetic construct
  source 1..50: mol_type = other DNA
ctatttctatatacgcgcgtactaagaaggtcgtcgaagctgcgaaaacc

SEQ ID NO: 35041 - DNA, 50 bp, synthetic construct
  source 1..50: mol_type = other DNA
gttttactgcggaaaagggcttgcatcaaatccctgttctcgctatgagc

SEQ ID NO: 35042 - DNA, 50 bp, synthetic construct
  source 1..50: mol_type = other DNA
agaatattatggcctactctgccgatcgtcaggctagcgcattggtagct

SEQ ID NO: 35043 - DNA, 50 bp, synthetic construct
  source 1..50: mol_type = other DNA
ttggtactaatataatttaaagatataattttcgattattcgcataaaca

SEQ ID NO: 35044 - DNA, 50 bp, synthetic construct
  source 1..50: mol_type = other DNA
ttctcgtttatttcacgcagtttatcgggtacgggtgtggctaacagtaa

SEQ ID NO: 35045 - DNA, 50 bp, synthetic construct
  source 1..50: mol_type = other DNA
gaaattatatttgcagatgagccgacaggaaatcttgattctaagaccag

SEQ ID NO: 35046 - DNA, 50 bp, synthetic construct
  source 1..50: mol_type = other DNA
agagaatcctgcgtttcctcttggatacaagagaaattagatgatttaag

SEQ ID NO: 35047 - DNA, 50 bp, synthetic construct
  source 1..50: mol_type = other DNA
caagaaaaggcatgtatagcattagataatactgtacaaatattctgttt

SEQ ID NO: 35048 - DNA, 50 bp, synthetic construct
  source 1..50: mol_type = other DNA
attgtattttgctcgattcatctgaagtcatcaatttccttaaattcagt

SEQ ID NO: 35049 - DNA, 50 bp, synthetic construct
  source 1..50: mol_type = other DNA
cgaatgcgtccggaaggacgcaagataatgaggggtgacagaatcatagt

SEQ ID NO: 35050 - DNA, 50 bp, synthetic construct
  source 1..50: mol_type = other DNA
ttcccgagcaaaatttaagaggcacttgcctccttgatttggctataaac

SEQ ID NO: 35051 - DNA, 50 bp, synthetic construct
  source 1..50: mol_type = other DNA
catctttgctgcaggttcatcaatctataaaattacctgttgcattaaag

SEQ ID NO: 35052 - DNA, 50 bp, synthetic construct
  source 1..50: mol_type = other DNA
ttacatatggtgggggtatcagcgatcggagatggaaactaagccgattc

SEQ ID NO: 35053 - DNA, 50 bp, synthetic construct
  source 1..50: mol_type = other DNA
ttatttcgtcggctgtggacggcaattcgcgtccaataactacactatca

SEQ ID NO: 35054 - DNA, 50 bp, synthetic construct
  source 1..50: mol_type = other DNA
cctaaggagaaagactcatgaaaatattttcttgagtctttacttttaag

SEQ ID NO: 35055 - DNA, 50 bp, synthetic construct
  source 1..50: mol_type = other DNA
atccagggccattcaggacacaataagttgtcattatgaaatagattacc

SEQ ID NO: 35056 - DNA, 50 bp, synthetic construct
  source 1..50: mol_type = other DNA
tctacaatagcagcttcttctgcaattgtagcttcttttgcattttgaat

SEQ ID NO: 35057 - DNA, 50 bp, synthetic construct
  source 1..50: mol_type = other DNA
taaatattagtatttccataaatttatagctatgcaaccagcagaatttt

SEQ ID NO: 35058 - DNA, 50 bp, synthetic construct
  source 1..50: mol_type = other DNA
ctcgtcgcccgggtccggatcgcccggggcgcgggctgccgatcggcgag

SEQ ID NO: 35059 - DNA, 50 bp, synthetic construct
  source 1..50: mol_type = other DNA
ccggcgttccgggaccgctccggagttcggccgccggggccgaggtcacc

SEQ ID NO: 35060 - DNA, 50 bp, synthetic construct
  source 1..50: mol_type = other DNA
ccgagaacggctctgttatcggccctggccgattgcgccgccattctgga

SEQ ID NO: 35061 - DNA, 50 bp, synthetic construct
  source 1..50: mol_type = other DNA
atgtgctgggcgaggtaaccgctgccgcgcgggctgctggccctggtcat

SEQ ID NO: 35062 - DNA, 50 bp, synthetic construct
  source 1..50: mol_type = other DNA
cgtataatttacctgccgtattcggaagaatcgcgcgcttaaaaagcaag

SEQ ID NO: 35063 - DNA, 50 bp, synthetic construct
  source 1..50: mol_type = other DNA
ccggtcaccgccaatcgagatccgcgaggcgcttgatcgggtgctgtcgc

SEQ ID NO: 35064 - DNA, 50 bp, synthetic construct
  source 1..50: mol_type = other DNA
ccctggctgaactactccacggtaaccgtcacggacttcgccagattcct

SEQ ID NO: 35065 - DNA, 50 bp, synthetic construct
  source 1..50: mol_type = other DNA
gtggttaggatcaatattttctaatttttctctatattacgcctcgtcac

SEQ ID NO: 35066 - DNA, 50 bp, synthetic construct
  source 1..50: mol_type = other DNA
tcgccgagctgatcaacttcacgccggcataacgaccttcagctatcatc

SEQ ID NO: 35067 - DNA, 50 bp, synthetic construct
  source 1..50: mol_type = other DNA
aaaagccgattttgttatttgcaatatttccaatatcagaaggccgtttt

SEQ ID NO: 35068 - DNA, 50 bp, synthetic construct
  source 1..50: mol_type = other DNA
gctgatcctaactggaaaattggtaaagaaagattgtggaacagatattt

SEQ ID NO: 35069 - DNA, 50 bp, synthetic construct
  source 1..50: mol_type = other DNA
ggaaacatggcagaagtagagcttatgaacgctaccgtaccatagcagaa

SEQ ID NO: 35070 - DNA, 50 bp, synthetic construct
  source 1..50: mol_type = other DNA
acgccttgctggtatagacaccgcgggcattatttttttacgcaagaaaa

SEQ ID NO: 35071 - DNA, 50 bp, synthetic construct
  source 1..50: mol_type = other DNA
cacccgtgggcagtgttaagttagtactaacttaacactacccgtgggct

SEQ ID NO: 35072 - DNA, 50 bp, synthetic construct
  source 1..50: mol_type = other DNA
accagttccaacggagtgagggttcgaacagcacggccgcccgatggttc

SEQ ID NO: 35073 - DNA, 50 bp, synthetic construct
  source 1..50: mol_type = other DNA
gccggggtgcgcggcggcagctacgcttcgtcggtgccgcaggcctcgca

SEQ ID NO: 35074 - DNA, 50 bp, synthetic construct
  source 1..50: mol_type = other DNA
tgccggccctgggccgtcggcgatcccgcgccgacgacgcccacctccgc

SEQ ID NO: 35075 - DNA, 50 bp, synthetic construct
  source 1..50: mol_type = other DNA
ctaagcgccatacaatatatagatatattatgtagttgtaatcttctttg

SEQ ID NO: 35076 - DNA, 50 bp, synthetic construct
  source 1..50: mol_type = other DNA
atccagcgcgtgctcgagcacgacggggcttgcccgacgctgcgagggcc

SEQ ID NO: 35077 - DNA, 50 bp, synthetic construct
  source 1..50: mol_type = other DNA
tatgtggtataatatagacagtacaatgcatgtctatcttcgcccatcac

SEQ ID NO: 35078 - DNA, 50 bp, synthetic construct
  source 1..50: mol_type = other DNA
ctggggagcgatgaccgtcttgcggccgcaagcgggatttcgatccccag

SEQ ID NO: 35079 - DNA, 50 bp, synthetic construct
  source 1..50: mol_type = other DNA
gccatcataaaagcggcggccaatatatctgcgacaatatacatgagcat

SEQ ID NO: 35080 - DNA, 50 bp, synthetic construct
  source 1..50: mol_type = other DNA
acattttactataaggagataaatatgtttattgaataatagttttgcca

SEQ ID NO: 35081 - DNA, 50 bp, synthetic construct
  source 1..50: mol_type = other DNA
tccaaccggcagaagccaaacttcatctccaatgattttgtctaaattga

SEQ ID NO: 35082 - DNA, 50 bp, synthetic construct
  source 1..50: mol_type = other DNA
gaaagatgggttttccaaagatgtaaacatattctcaaaaggcatcatgt

SEQ ID NO: 35083 - DNA, 50 bp, synthetic construct
  source 1..50: mol_type = other DNA
cggactttccgggttcgctctattatacgggaaaagcccggagttgtcaa

SEQ ID NO: 35084 - DNA, 50 bp, synthetic construct
  source 1..50: mol_type = other DNA
aattttacagcgtttccgataaatccatttaccatgatctctgttacatt

SEQ ID NO: 35085 - DNA, 50 bp, synthetic construct
  source 1..50: mol_type = other DNA
ttcagggttctatgttagaaagaaggttcttttttctactttattctgaa

SEQ ID NO: 35086 - DNA, 50 bp, synthetic construct
  source 1..50: mol_type = other DNA
agactaccacaaatggaaggaggaacacccccttcctatcctggtgggcc

SEQ ID NO: 35087 - DNA, 50 bp, synthetic construct
  source 1..50: mol_type = other DNA
agagccgattgtggtggttcaatatgaagcgaaccacggcggcttcgtct

SEQ ID NO: 35088 - DNA, 50 bp, synthetic construct
  source 1..50: mol_type = other DNA
agagggatttcaacaggcaacgcaaaggctatggtggatgaaatccaggc

SEQ ID NO: 35089 - DNA, 50 bp, synthetic construct
  source 1..50: mol_type = other DNA
cgcaggacagaaaaatgcttgaagaaatgcagggtgttttctgttacaaa

SEQ ID NO: 35090 - DNA, 50 bp, synthetic construct
  source 1..50: mol_type = other DNA
cgttgattgaaatgaaggatagcaaatgcttggcgtcatttcgataaatt

SEQ ID NO: 35091 - DNA, 50 bp, synthetic construct
  source 1..50: mol_type = other DNA
tattatagcatatttcctctgaaaattttaaacgtgccgctgttttaaga

SEQ ID NO: 35092 - DNA, 50 bp, synthetic construct
  source 1..50: mol_type = other DNA
ccgacttcgaccttgtcatggacgcgagtccagcgcagaaccgggcagat

SEQ ID NO: 35093 - DNA, 50 bp, synthetic construct
  source 1..50: mol_type = other DNA
ccatgcttgtctgctgtcagagaggactgcctaccagcaataaaaaaagg

SEQ ID NO: 35094 - DNA, 50 bp, synthetic construct
  source 1..50: mol_type = other DNA
tcaaatgctgggtgttatttttgtacccacacataataattattatttct

SEQ ID NO: 35095 - DNA, 50 bp, synthetic construct
  source 1..50: mol_type = other DNA
gaaaccccatttgtaagttatgtaattaaatatattgaaaaaagggtata

SEQ ID NO: 35096 - DNA, 50 bp, synthetic construct
  source 1..50: mol_type = other DNA
taatatatccatttttctgatccgcctcatacaaccacttttatatatta

SEQ ID NO: 35097 - DNA, 50 bp, synthetic construct
  source 1..50: mol_type = other DNA
tggattcattagaaaaagttgataaatgtccccactttctatcagactat

SEQ ID NO: 35098 - DNA, 50 bp, synthetic construct
  source 1..50: mol_type = other DNA
ccggattccatgtcccgcgaggaaatttatagaatggtgatgcggcctgc

SEQ ID NO: 35099 - DNA, 50 bp, synthetic construct
  source 1..50: mol_type = other DNA
gacggatctcctattgacaaaaagatctgtttttcaatccgtgtgccgtc

SEQ ID NO: 35100 - DNA, 50 bp, synthetic construct
  source 1..50: mol_type = other DNA
ctaccgtacaaattgtgtacgggtattgtgagcaactgattgtacaaaaa

SEQ ID NO: 35101 - DNA, 50 bp, synthetic construct
  source 1..50: mol_type = other DNA
ggcaaaatacgttccgaaagataagggtagtcataggcgttgaaaaggcc

SEQ ID NO: 35102 - DNA, 50 bp, synthetic construct
  source 1..50: mol_type = other DNA
acgaagtctttccggtaaattactcaacttcaagacccgcaagcagtcgt

SEQ ID NO: 35103 - DNA, 50 bp, synthetic construct
  source 1..50: mol_type = other DNA
tgaagtcccacgcaggcggtatctatatttcgctgcggagtcgttcttcc

SEQ ID NO: 35104 - DNA, 50 bp, synthetic construct
  source 1..50: mol_type = other DNA
atctgcaaaagaacaagaaaaaagccgtttgttttggtcggtttgcaagg

SEQ ID NO: 35105 - DNA, 50 bp, synthetic construct
  source 1..50: mol_type = other DNA
ttttggtattggttcctgaaataccttggcaagttcatccgccaccttca

SEQ ID NO: 35106 - DNA, 50 bp, synthetic construct
  source 1..50: mol_type = other DNA
gctgcatattcataacgagtcattgcaatgtttcgttatcctgtacttca

SEQ ID NO: 35107 - DNA, 50 bp, synthetic construct
  source 1..50: mol_type = other DNA
tccgcagtgtagctggaattacctgccgtcgatttcagcgatcatgcggt

SEQ ID NO: 35108 - DNA, 50 bp, synthetic construct
  source 1..50: mol_type = other DNA
ctttttatctgtcatttttcagttgcattgaaaacatggtgaatcaggtc

SEQ ID NO: 35109 - DNA, 50 bp, synthetic construct
  source 1..50: mol_type = other DNA
cggggcttactttataaagggagatttcggcgcatcgtaagtaagcgcct

SEQ ID NO: 35110 - DNA, 50 bp, synthetic construct
  source 1..50: mol_type = other DNA
ggcgtcattgcgtccgtgctcacagctccattagtatacccgctgcaggc

SEQ ID NO: 35111 - DNA, 50 bp, synthetic construct
  source 1..50: mol_type = other DNA
atacaatatcaccatagacaagtcattgctgtcaacagatgatattatat

SEQ ID NO: 35112 - DNA, 50 bp, synthetic construct
  source 1..50: mol_type = other DNA
gctgaacaaggtcggcagtttcaccggtgataccaccgtccatcaacccc

SEQ ID NO: 35113 - DNA, 50 bp, synthetic construct
  source 1..50: mol_type = other DNA
tccagggcggagagctggacgccggaagtcgtccagatagggggtgtgct

SEQ ID NO: 35114 - DNA, 50 bp, synthetic construct
  source 1..50: mol_type = other DNA
gttgctttagagtccagtgctccggtaggctcatctgccagtaccagctc

SEQ ID NO: 35115 - DNA, 50 bp, synthetic construct
  source 1..50: mol_type = other DNA
gacagaagcaaagggcagcagtggcaccactgatgtgctttgtgcctgag

SEQ ID NO: 35116 - DNA, 50 bp, synthetic construct
  source 1..50: mol_type = other DNA
ttatataagatataataattattatataataacgctataggtgaatgtgg

SEQ ID NO: 35117 - DNA, 50 bp, synthetic construct
  source 1..50: mol_type = other DNA
gatcatagcaaaggtattattctgttttttcggccttctttgctataata

SEQ ID NO: 35118 - DNA, 50 bp, synthetic construct
  source 1..50: mol_type = other DNA
tcccactatatgcccgtcattaagatcttcctttccgttatatttttaat

SEQ ID NO: 35119 - DNA, 50 bp, synthetic construct
  source 1..50: mol_type = other DNA
ttcaaaaagaatttgctccagattcaaggataccacaaatctttttagaa

SEQ ID NO: 35120 - DNA, 50 bp, synthetic construct
  source 1..50: mol_type = other DNA
tatcactgctgaaaattgcagaacataaaaaataaaattcagttgtttta

SEQ ID NO: 35121 - DNA, 50 bp, synthetic construct
  source 1..50: mol_type = other DNA
taacatataatgcgtaatttttcaattatcaatgtattcgccatatgtaa

SEQ ID NO: 35122 - DNA, 50 bp, synthetic construct
  source 1..50: mol_type = other DNA
acaacaccatcattctttttgataatgtacccaaagttggctgatatttt

SEQ ID NO: 35123 - DNA, 50 bp, synthetic construct
  source 1..50: mol_type = other DNA
gtagctcgtcgggctcataacccgaatgggtctagaggtcgacgagcatc

SEQ ID NO: 35124 - DNA, 50 bp, synthetic construct
  source 1..50: mol_type = other DNA
agagccgattgtagcggttcaatatgaagcgaaccacggcggcttcgtct

SEQ ID NO: 35125 - DNA, 50 bp, synthetic construct
  source 1..50: mol_type = other DNA
attacttaatacctatgattgtcttattgcaatcaagactattagctaac

SEQ ID NO: 35126 - DNA, 50 bp, synthetic construct
  source 1..50: mol_type = other DNA
agaaattattgcagccaaacatgatatttgtttttgatgcatattcttca

SEQ ID NO: 35127 - DNA, 50 bp, synthetic construct
  source 1..50: mol_type = other DNA
aagcggaacattcgttcctgctggctgcagctctgccgaatcttcaatgg

SEQ ID NO: 35128 - DNA, 50 bp, synthetic construct
  source 1..50: mol_type = other DNA
tcggcatatccgccttacatcatcgggatgcagaaaggcataagatggat

SEQ ID NO: 35129 - DNA, 50 bp, synthetic construct
  source 1..50: mol_type = other DNA
gattacagactcatgcaataaatatttattttgtagcatagtatggtata

SEQ ID NO: 35130 - DNA, 50 bp, synthetic construct
  source 1..50: mol_type = other DNA
ggcgacctgttcttccttgcggaagcttcacgaaggtgtagaaaaatgcc

SEQ ID NO: 35131 - DNA, 50 bp, synthetic construct
  source 1..50: mol_type = other DNA
ggtgcccggcggcacagtacactaataaaggtactatgccgcgcggcgtt

SEQ ID NO: 35132 - DNA, 50 bp, synthetic construct
  source 1..50: mol_type = other DNA
ccctcgcacaaaaagaaaccggtacagcccttcttctttttggccgtggc

SEQ ID NO: 35133 - DNA, 50 bp, synthetic construct
  source 1..50: mol_type = other DNA
tgcggccagaccacgacctatggggctccccccgtcgaaacctttacgcc

SEQ ID NO: 35134 - DNA, 50 bp, synthetic construct
  source 1..50: mol_type = other DNA
aaacaaggtctattatagcatatttcgtgttaaaatagtatagcacattt

SEQ ID NO: 35135 - DNA, 50 bp, synthetic construct
  source 1..50: mol_type = other DNA
ccgaccatttccaaatgaccaagttcttcagtagcaatgtcgttaatcaa

SEQ ID NO: 35136 - DNA, 50 bp, synthetic construct
  source 1..50: mol_type = other DNA
attttcttccgcccgggcacgcaggaatgccagaattggcgtaataaaat

SEQ ID NO: 35137 - DNA, 50 bp, synthetic construct
  source 1..50: mol_type = other DNA
gtttgagtagcatatcacaagaaaaattttttaagattcaactctgtaat

SEQ ID NO: 35138 - DNA, 50 bp, synthetic construct
  source 1..50: mol_type = other DNA
gaatatttaggtgaaaaatggaatatacaaaatatatcaacgagcatgag

SEQ ID NO: 35139 - DNA, 50 bp, synthetic construct
  source 1..50: mol_type = other DNA
gattgatgttatcggacagaatattgtcatgaagtccgaacagctccatc

SEQ ID NO: 35140 - DNA, 50 bp, synthetic construct
  source 1..50: mol_type = other DNA
aaacaggcagagtatctgtacagcctctccccaatggtatcttcctcctt

SEQ ID NO: 35141 - DNA, 50 bp, synthetic construct
  source 1..50: mol_type = other DNA
gagaaaacttccatccgaacacgcgatgctgtgcggctggctgttgtcat

SEQ ID NO: 35142 - DNA, 50 bp, synthetic construct
  source 1..50: mol_type = other DNA
cctcatacaaatcggtaatggggtctcctttatttataaaatgtatgaga

SEQ ID NO: 35143 - DNA, 50 bp, synthetic construct
  source 1..50: mol_type = other DNA
cttcgggtgcttttttttattgcaaatggaaaaatcaaaaaagcgcgtcc

SEQ ID NO: 35144 - DNA, 50 bp, synthetic construct
  source 1..50: mol_type = other DNA
aaggttatcaaaacccgaaagtagtcctatcttcgggtagtgacatattt

SEQ ID NO: 35145 - DNA, 50 bp, synthetic construct
  source 1..50: mol_type = other DNA
tcgtccgttaagttttctaataaataacagctatcgaaaatatgttccga

SEQ ID NO: 35146 - DNA, 50 bp, synthetic construct
  source 1..50: mol_type = other DNA
tcatccatacccacaattcgtataaatatagatatcgttttaatcgaccc

SEQ ID NO: 35147 - DNA, 50 bp, synthetic construct
  source 1..50: mol_type = other DNA
tattttagcgtgtttcggaatttctgggatttctttgcgttgcaaagatc

SEQ ID NO: 35148 - DNA, 50 bp, synthetic construct
  source 1..50: mol_type = other DNA
gatcaaatccgaaataaaaaaagattcccctttttattggttctattcat

SEQ ID NO: 35149 - DNA, 50 bp, synthetic construct
  source 1..50: mol_type = other DNA
tcagcccctttttttcatttactttaacgtatgatagggaatctttttcg

SEQ ID NO: 35150 - DNA, 50 bp, synthetic construct
  source 1..50: mol_type = other DNA
agctgataaacgatggcgcataccatgattaccgcaactggggataatgg

SEQ ID NO: 35151 - DNA, 50 bp, synthetic construct
  source 1..50: mol_type = other DNA
tgtgatataatgaaaacagcaattttccctttcggtaactgtatattacc

SEQ ID NO: 35152 - DNA, 50 bp, synthetic construct
  source 1..50: mol_type = other DNA
cgaatatctggaagctttctacaatacgaagaaaacattccgcttgttcc

SEQ ID NO: 35153 - DNA, 50 bp, synthetic construct
  source 1..50: mol_type = other DNA
ttgtatcatttcagccccttttttcatgaaatccggatgccatgactggt

SEQ ID NO: 35154 - DNA, 50 bp, synthetic construct
  source 1..50: mol_type = other DNA
caatttgttgtaacggcacctatttgtatgattatcatgcaaaaaaggtt

SEQ ID NO: 35155 - DNA, 50 bp, synthetic construct
  source 1..50: mol_type = other DNA
ttgatactaccaaataactccacatgaaaaacaggctgaggtagtcataa

SEQ ID NO: 35156 - DNA, 50 bp, synthetic construct
  source 1..50: mol_type = other DNA
ggataaataattggtattgaaataattttgattttcaaaaaaattacgcc

SEQ ID NO: 35157 - DNA, 50 bp, synthetic construct
  source 1..50: mol_type = other DNA
cactttttgataaccgtactgtttataaaaataacagctatcaaaaacaa

SEQ ID NO: 35158 - DNA, 50 bp, synthetic construct
  source 1..50: mol_type = other DNA
atagaaaaatttttgcaacaattaaataataaaagagaaaattttggaaa

SEQ ID NO: 35159 - DNA, 50 bp, synthetic construct
  source 1..50: mol_type = other DNA
tagcgcaaagtattgtaaattaaaatgttaaaccacaagatgttgtggtt

SEQ ID NO: 35160 - DNA, 50 bp, synthetic construct
  source 1..50: mol_type = other DNA
ctatttttataaagaaaggctgtgttaccagctaaaattaagaaaaactt

SEQ ID NO: 35161 - DNA, 50 bp, synthetic construct
  source 1..50: mol_type = other DNA
tacgggacgcgccggcggtatcaccagctataccaccgccagcggccgtc

SEQ ID NO: 35162 - DNA, 50 bp, synthetic construct
  source 1..50: mol_type = other DNA
cgcttatttttttaatttcggatatctaaaaaagggtataaaaataagcc

SEQ ID NO: 35163 - DNA, 50 bp, synthetic construct
  source 1..50: mol_type = other DNA
atggataatgatagcattaaatgtaaactcagtctgctataataatttta

SEQ ID NO: 35164 - DNA, 50 bp, synthetic construct
  source 1..50: mol_type = other DNA
ataaaatcgaataaaaatatacatatatttatatctttaattgcatttga

SEQ ID NO: 35165 - DNA, 50 bp, synthetic construct
  source 1..50: mol_type = other DNA
gaaaatattttaaataggagaatttaaactcttctctcctagaactattc

SEQ ID NO: 35166 - DNA, 50 bp, synthetic construct
  source 1..50: mol_type = other DNA
gtgaatggagcaggaaagatatttataaatgggagccaacctacaactat

SEQ ID NO: 35167 - DNA, 50 bp, synthetic construct
  source 1..50: mol_type = other DNA
tgagcagcatggaaaaatccccgtatataaatatctttcttgatttctcc

SEQ ID NO: 35168 - DNA, 50 bp, synthetic construct
  source 1..50: mol_type = other DNA
tcgtttccagaggccatcatttctttccttggtataaactgaaaaaaata

SEQ ID NO: 35169 - DNA, 50 bp, synthetic construct
  source 1..50: mol_type = other DNA
atcactctcagtacgaacacagcgaaggctgtataagtactcagcctgtt

SEQ ID NO: 35170 - DNA, 50 bp, synthetic construct
  source 1..50: mol_type = other DNA
tcgtactttatccgctgtttcttcatgaagaaaacaatgaggaagccgga

SEQ ID NO: 35171 - DNA, 50 bp, synthetic construct
  source 1..50: mol_type = other DNA
ttcttcatggctttgtttgggttctgagctataggcccaatcgtgaagat

SEQ ID NO: 35172 - DNA, 50 bp, synthetic construct
  source 1..50: mol_type = other DNA
tttctcttttggagatgcaatgattccggattccgtatccaaatgacgaa

SEQ ID NO: 35173 - DNA, 50 bp, synthetic construct
  source 1..50: mol_type = other DNA
ttgccggggtagcaggcagtgttgttcatgagttcctgccggtccgcaaa

SEQ ID NO: 35174 - DNA, 50 bp, synthetic construct
  source 1..50: mol_type = other DNA
gtcagccgtatttttttcagtttatgtaaacgtgtgaaagaacgagaaag

SEQ ID NO: 35175 - DNA, 50 bp, synthetic construct
  source 1..50: mol_type = other DNA
aggatggcaagaaacgtccgccctttccttcggtattttcttttcttgct

SEQ ID NO: 35176 - DNA, 50 bp, synthetic construct
  source 1..50: mol_type = other DNA
tatactatgaaagctcataataatatattagatattaatttttttctata

SEQ ID NO: 35177 - DNA, 50 bp, synthetic construct
  source 1..50: mol_type = other DNA
tccggatttcacctgatatcattggggtactgcataggtagaaaacctca

SEQ ID NO: 35178 - DNA, 50 bp, synthetic construct
  source 1..50: mol_type = other DNA
caaatacatgaagtcaaaacagaactgtctgattggattatcaaaatttt

SEQ ID NO: 35179 - DNA, 50 bp, synthetic construct
  source 1..50: mol_type = other DNA
gaaatttgcggagtataaagaagatatattccatatggatacaaaattca

SEQ ID NO: 35180 - DNA, 50 bp, synthetic construct
  source 1..50: mol_type = other DNA
gtccacaaatagattatagctttctatagagttgtaatctttagaaagaa

SEQ ID NO: 35181 - DNA, 50 bp, synthetic construct
  source 1..50: mol_type = other DNA
atagcccctgtataattttcccctaaagacaaaggacatgtttggtccgg

SEQ ID NO: 35182 - DNA, 50 bp, synthetic construct
  source 1..50: mol_type = other DNA
atgtgacatgattgcttttaatgatcatcaggaatttgatcctgatacgc

SEQ ID NO: 35183 - DNA, 50 bp, synthetic construct
  source 1..50: mol_type = other DNA
actgttcgtagtcatgcaagaatgtacatcataacataactgttcattgc

SEQ ID NO: 35184 - DNA, 50 bp, synthetic construct
  source 1..50: mol_type = other DNA
gttatttttatactcttttttacatatgaaagaatttgtctataaataag

SEQ ID NO: 35185 - DNA, 50 bp, synthetic construct
  source 1..50: mol_type = other DNA
tgctattattggctttcagagtgatatattgattggcgaaaataattcgg

SEQ ID NO: 35186 - DNA, 50 bp, synthetic construct
  source 1..50: mol_type = other DNA
ggccggaagagaaagaaatcaagtatcattttcttcttctgactccggct

SEQ ID NO: 35187 - DNA, 50 bp, synthetic construct
  source 1..50: mol_type = other DNA
taacatattatacacggctcttacaattactaatctggtatatgatgttg

SEQ ID NO: 35188 - DNA, 50 bp, synthetic construct
  source 1..50: mol_type = other DNA
acatcagcagatgaactgaaaaaaatgtttttagtttcctgctccaattc

SEQ ID NO: 35189 - DNA, 50 bp, synthetic construct
  source 1..50: mol_type = other DNA
ggcagcccggcagccgtttgtagagctggccaagcgcctgccgggcatcc

SEQ ID NO: 35190 - DNA, 50 bp, synthetic construct
  source 1..50: mol_type = other DNA
cgtgatgtggatgtggaaaagcagatcaggaagaccagctccacagcttt

SEQ ID NO: 35191 - DNA, 50 bp, synthetic construct
  source 1..50: mol_type = other DNA
cctgcatcatcgataaggatgataagtatcatcctgttccgggatatcgg

SEQ ID NO: 35192 - DNA, 50 bp, synthetic construct
  source 1..50: mol_type = other DNA
ttccccataacttgcaacggcttgcacaagcccacttccatttttacgcg

SEQ ID NO: 35193 - DNA, 50 bp, synthetic construct
  source 1..50: mol_type = other DNA
ttccgccagagccttgccgtcaccatggaaaagctcgtagctgtgcgttc

SEQ ID NO: 35194 - DNA, 50 bp, synthetic construct
  source 1..50: mol_type = other DNA
aaaagaaagccagtcctatttatttaaacgaatacgaaccttcgttttgc

SEQ ID NO: 35195 - DNA, 50 bp, synthetic construct
  source 1..50: mol_type = other DNA
cctcttcattataccacaggagagtaaaaaaatatgggaaaaggaagaaa

SEQ ID NO: 35196 - DNA, 50 bp, synthetic construct
  source 1..50: mol_type = other DNA
gctttcgtgaaggcactcgcgatccgatctgctcctgcgttgtcgcaaag

SEQ ID NO: 35197 - DNA, 50 bp, synthetic construct
  source 1..50: mol_type = other DNA
gcgtcgctgcgctacctctcccagcgtttggcgctctatatgagccgcga

SEQ ID NO: 35198 - DNA, 50 bp, synthetic construct
  source 1..50: mol_type = other DNA
aaaagtgacctggagtttttctacatcaagaggcacgccgtactcctgcg

SEQ ID NO: 35199 - DNA, 50 bp, synthetic construct
  source 1..50: mol_type = other DNA
caaggaaaggaaggtgaaaggtatcatgacttaccacctttatttctgtg

SEQ ID NO: 35200 - DNA, 50 bp, synthetic construct
  source 1..50: mol_type = other DNA
ggatataatgcagataatataaaaacaaattcgttgcggcttttatagcc

SEQ ID NO: 35201 - DNA, 50 bp, synthetic construct
  source 1..50: mol_type = other DNA
caaggaagaagccgaacgtctggatcgccatgatttcggccagttccttg

SEQ ID NO: 35202 - DNA, 50 bp, synthetic construct
  source 1..50: mol_type = other DNA
tccggtgaagcccggctcggccgaagcgggccaacagcaggatcaacaaa

SEQ ID NO: 35203 - DNA, 50 bp, synthetic construct
  source 1..50: mol_type = other DNA
ttctctgccgggacaccaagagtaaatcatctttttaaggaaagctacgg

SEQ ID NO: 35204 - DNA, 50 bp, synthetic construct
  source 1..50: mol_type = other DNA
gtgattacctggcccaggcggaaaaggccatgccattccctctaaaacac

SEQ ID NO: 35205 - DNA, 50 bp, synthetic construct
  source 1..50: mol_type = other DNA
cggcattttcagagaacttacgaatcagcggtgattcgctgaaaaaagcg

SEQ ID NO: 35206 - DNA, 50 bp, synthetic construct
  source 1..50: mol_type = other DNA
ctataatctgcttatcagccatttgcaaagccctcttggtcattaccagt

SEQ ID NO: 35207 - DNA, 50 bp, synthetic construct
  source 1..50: mol_type = other DNA
gctggcctgatggtagatgtcatcgctatgtcactctccatctaaagcta

SEQ ID NO: 35208 - DNA, 50 bp, synthetic construct
  source 1..50: mol_type = other DNA
agtatcggctcatgaagtccatcgaccgagataccgccagagaaaatact

SEQ ID NO: 35209 - DNA, 50 bp, synthetic construct
  source 1..50: mol_type = other DNA
gacgaggggcagactctgttctcaatctccaatactggctgctcagcctc

SEQ ID NO: 35210 - DNA, 50 bp, synthetic construct
  source 1..50: mol_type = other DNA
agaggaaggaggaagatctgaaggaacctcaatccattccacctgttccc

SEQ ID NO: 35211 - DNA, 50 bp, synthetic construct
  source 1..50: mol_type = other DNA
aaaacggctcagaggaaggaggaagagccctccttccaactatatatatc

SEQ ID NO: 35212 - DNA, 50 bp, synthetic construct
  source 1..50: mol_type = other DNA
tcaaattttttgcccttttttactatggtatgcgtataataaatttatga

SEQ ID NO: 35213 - DNA, 50 bp, synthetic construct
  source 1..50: mol_type = other DNA
caaaaaaaactgaccaagtaaccttaaggtagcgccttgtttcattttta

SEQ ID NO: 35214 - DNA, 50 bp, synthetic construct
  source 1..50: mol_type = other DNA
aatcatgtcctgaatgacttgatattttggcagtctcctgggaacccttt

SEQ ID NO: 35215 - DNA, 50 bp, synthetic construct
  source 1..50: mol_type = other DNA
tttcattaaaggaagttcctgtaaaagtacagaaataggcttaaaataag

SEQ ID NO: 35216 - DNA, 50 bp, synthetic construct
  source 1..50: mol_type = other DNA
ttactaacagatattggcacagaggaacttgcacacgttgaaattatcag

SEQ ID NO: 35217 - DNA, 50 bp, synthetic construct
  source 1..50: mol_type = other DNA
cagagagatgcgatgcaaagataaattataatagacaaggctgctctctg

SEQ ID NO: 35218 - DNA, 50 bp, synthetic construct
  source 1..50: mol_type = other DNA
cttgtgcagcatatatcgtgaaattgcttttttataatattctacttgtg

SEQ ID NO: 35219 - DNA, 50 bp, synthetic construct
  source 1..50: mol_type = other DNA
cgaaagctggaaacctgaaatgaaaattgacttttggtagtcttgtttta

SEQ ID NO: 35220 - DNA, 50 bp, synthetic construct
  source 1..50: mol_type = other DNA
aaatgtgaggttatcccagaaatcagagattctggaagaaatgaacagat

SEQ ID NO: 35221 - DNA, 50 bp, synthetic construct
  source 1..50: mol_type = other DNA
ccttttatagtaaaatttctgaatttcccaaaaaatccgttcataaaagt

SEQ ID NO: 35222 - DNA, 50 bp, synthetic construct
  source 1..50: mol_type = other DNA
tactttttctcattttatttactttcaagcggatatcggtaaataatgta

SEQ ID NO: 35223 - DNA, 50 bp, synthetic construct
  source 1..50: mol_type = other DNA
tttctactgtctgactaagaatttaacgctatgaacgaatagagttgaaa

SEQ ID NO: 35224 - DNA, 50 bp, synthetic construct
  source 1..50: mol_type = other DNA
gcctgcttatatcaattatatcatatatgatgcgtttgtaaaaagcaact

SEQ ID NO: 35225 - DNA, 50 bp, synthetic construct
  source 1..50: mol_type = other DNA
gattgatggtcagctcgcaatttttacataatgcctgcaagttatcaaac

SEQ ID NO: 35226 - DNA, 50 bp, synthetic construct
  source 1..50: mol_type = other DNA
tgtaatactctacttgattttcaaaattgacatacaaatagaaccataca

SEQ ID NO: 35227 - DNA, 50 bp, synthetic construct
  source 1..50: mol_type = other DNA
gcagaaaattttgttttcgctgcgaaggcattagaaacaaaatctagtgc

SEQ ID NO: 35228 - DNA, 50 bp, synthetic construct
  source 1..50: mol_type = other DNA
gtcagctgataaagtatgctggagatcttttttgcagcaggcaagctcac

SEQ ID NO: 35229 - DNA, 50 bp, synthetic construct
  source 1..50: mol_type = other DNA
ttttttgctgtgattttgctattgaatattagcaaaagaagtcaaaatta

SEQ ID NO: 35230 - DNA, 50 bp, synthetic construct
  source 1..50: mol_type = other DNA
taatttattcttttatgcattgagggtcaaggaaataatagaaaatgttg

SEQ ID NO: 35231 - DNA, 50 bp, synthetic construct
  source 1..50: mol_type = other DNA
tcgatgacagtaaaccgaaatatttggctccttcgtcgaactttcatcaa

SEQ ID NO: 35232 - DNA, 50 bp, synthetic construct
  source 1..50: mol_type = other DNA
ttgggaagtggcggttcgcaaagaaacaattgctaaaattaacttgataa

SEQ ID NO: 35233 - DNA, 50 bp, synthetic construct
  source 1..50: mol_type = other DNA
ctttgatttgttggaacaggagcgtacaatcctgccggtgaaaaacaagc

SEQ ID NO: 35234 - DNA, 50 bp, synthetic construct
  source 1..50: mol_type = other DNA
gcaacagctatatttcttgcgggaatgtagccaagaaattccctggtgtt

SEQ ID NO: 35235 - DNA, 50 bp, synthetic construct
  source 1..50: mol_type = other DNA
ggacaccgatcgccggaagacgctctgtggttatttgggattgcaagtcc

SEQ ID NO: 35236 - DNA, 50 bp, synthetic construct
  source 1..50: mol_type = other DNA
aatgacgacaaaatatggacaaaataataaaacaatgaaagatatgtata

SEQ ID NO: 35237 - DNA, 50 bp, synthetic construct
  source 1..50: mol_type = other DNA
tgagaacgaattcaaaatgagagtagaaatatatttcttattatatcaac

SEQ ID NO: 35238 - DNA, 50 bp, synthetic construct
  source 1..50: mol_type = other DNA
accaaaacgcatatccactacctcttccggtagtgcatctgcattttcct

SEQ ID NO: 35239 - DNA, 50 bp, synthetic construct
  source 1..50: mol_type = other DNA
tagacccactaccttcaatttctgcatatttcttggcgattgtggcgtct

SEQ ID NO: 35240 - DNA, 50 bp, synthetic construct
  source 1..50: mol_type = other DNA
acaatgactggtacaaatctgtgtataatcgctggaatacttgtcataaa

SEQ ID NO: 35241 - DNA, 50 bp, synthetic construct
  source 1..50: mol_type = other DNA
aataacatgtctcatgacatcaggacaccgatcaatggcattattggtat

SEQ ID NO: 35242 - DNA, 50 bp, synthetic construct
  source 1..50: mol_type = other DNA
gcggggtggagcagcccggtagctcgtgaaggaggcgaccatgaagacgc

SEQ ID NO: 35243 - DNA, 50 bp, synthetic construct
  source 1..50: mol_type = other DNA
gcagtaacactatccagattaccagtaggctcatcagctagtattattgg

SEQ ID NO: 35244 - DNA, 50 bp, synthetic construct
  source 1..50: mol_type = other DNA
aacttttaaaactatccatccatctttggctaatcgagatattaacatat

SEQ ID NO: 35245 - DNA, 50 bp, synthetic construct
  source 1..50: mol_type = other DNA
cctcggaagatgttgataccttcgaatcaatgtatctgctgctttagcct

SEQ ID NO: 35246 - DNA, 50 bp, synthetic construct
  source 1..50: mol_type = other DNA
aattctgccatatattccggtaaatctatgatgggaaataacgcaaaaaa

SEQ ID NO: 35247 - DNA, 50 bp, synthetic construct
  source 1..50: mol_type = other DNA
ttttccaaaagtaaattttggaggtactgccaaaatatcgtatagttcac

SEQ ID NO: 35248 - DNA, 50 bp, synthetic construct
  source 1..50: mol_type = other DNA
agggattgattcctctcagacaagcgcttgtctgacggggttatcatgta

SEQ ID NO: 35249 - DNA, 50 bp, synthetic construct
  source 1..50: mol_type = other DNA
tgcaagtagagttataatttcgttagtgtcacatattagctctgaaagcc

SEQ ID NO: 35250 - DNA, 50 bp, synthetic construct
  source 1..50: mol_type = other DNA
cggcggggaggagcatcagcagcgcgagaagaaggacgtgttctccgcac

SEQ ID NO: 35251 - DNA, 50 bp, synthetic construct
  source 1..50: mol_type = other DNA
tgcgcgcgatcgtgcgcgcactgtctcctgctcgcgcagacggaaaaagc

SEQ ID NO: 35252 - DNA, 50 bp, synthetic construct
  source 1..50: mol_type = other DNA
ccgatatcccggaacaggatgatacttatcatccttatcgatgatgcagg

SEQ ID NO: 35253 - DNA, 50 bp, synthetic construct
  source 1..50: mol_type = other DNA
acaataaaagtagtggccgcagttatgctgccaagcctaaatgctattgg

SEQ ID NO: 35254 - DNA, 50 bp, synthetic construct
  source 1..50: mol_type = other DNA
cggcagtgccttcgtcaacaacagccttgtactgtgaacaggcagggtcg

SEQ ID NO: 35255 - DNA, 50 bp, synthetic construct
  source 1..50: mol_type = other DNA
gtgctgtgagatttatccgcatatttgtcctctttatccgctcatagcgt

SEQ ID NO: 35256 - DNA, 50 bp, synthetic construct
  source 1..50: mol_type = other DNA
tttagaaaatgctatataataaacatgtatcaagtatagcatttaaactc

SEQ ID NO: 35257 - DNA, 50 bp, synthetic construct
  source 1..50: mol_type = other DNA
atttattaataaaaaagaaatcgaagttaatctgttttttcttaatacca

SEQ ID NO: 35258 - DNA, 50 bp, synthetic construct
  source 1..50: mol_type = other DNA
gtgtatcttcttatctgcatatttataaaaattaggagaaatttatatgt

SEQ ID NO: 35259 - DNA, 50 bp, synthetic construct
  source 1..50: mol_type = other DNA
gttttttctatgtcacagatcggagcgccgaaaaaaagggtataaaaaag

SEQ ID NO: 35260 - DNA, 50 bp, synthetic construct
  source 1..50: mol_type = other DNA
tattttactatatttaataaacatttatgtttattaaataagttaattta

SEQ ID NO: 35261 - DNA, 50 bp, synthetic construct
  source 1..50: mol_type = other DNA
accttgtttttaaaaaactgctgtactcattaatttttataaatgtatta

SEQ ID NO: 35262 - DNA, 50 bp, synthetic construct
  source 1..50: mol_type = other DNA
aaaaatatttacagtgtgctaaaataattcttcattttaataatatgtat

SEQ ID NO: 35263 - DNA, 50 bp, synthetic construct
  source 1..50: mol_type = other DNA
cttacctctcccacgatgatccgatccggattcatcctcagcgaagcccg

SEQ ID NO: 35264 - DNA, 50 bp, synthetic construct
  source 1..50: mol_type = other DNA
cgccacaaagcacgggcagttgacatggatgctgcccgggctgctttggt

SEQ ID NO: 35265 - DNA, 50 bp, synthetic construct
  source 1..50: mol_type = other DNA
taagtttgattatattataggcatggatggtgcgaatatccgcaacatgc

SEQ ID NO: 35266 - DNA, 50 bp, synthetic construct
  source 1..50: mol_type = other DNA
gaaaaaggcgtgagcctcacattttgtagatagtcttttattatagcata

SEQ ID NO: 35267 - DNA, 50 bp, synthetic construct
  source 1..50: mol_type = other DNA
agatttattgttctgtcatttaaaaattggattaataggcaaataatgaa

SEQ ID NO: 35268 - DNA, 50 bp, synthetic construct
  source 1..50: mol_type = other DNA
atgagccaacgggtagtgttaagttaactttacattacccacaggagcac

SEQ ID NO: 35269 - DNA, 50 bp, synthetic construct
  source 1..50: mol_type = other DNA
agtcgggggtgtgcattttcggcaaatggtgacaatgccgttcagcggct

SEQ ID NO: 35270 - DNA, 50 bp, synthetic construct
  source 1..50: mol_type = other DNA
catagcccacggaaaaggccacgatatcctgtatttttcggccataattg

SEQ ID NO: 35271 - DNA, 50 bp, synthetic construct
  source 1..50: mol_type = other DNA
tgacgctgcatgtcggcctcggtacgttccgtgtataaccgtaaccatac

SEQ ID NO: 35272 - DNA, 50 bp, synthetic construct
  source 1..50: mol_type = other DNA
gtgttatttttgtactcatttttaaggatttatgagtcaggaaacaaact

SEQ ID NO: 35273 - DNA, 50 bp, synthetic construct
  source 1..50: mol_type = other DNA
attcgcaacctttattctaccacgaagtgaccggagcgaaccctgctcgg

SEQ ID NO: 35274 - DNA, 50 bp, synthetic construct
  source 1..50: mol_type = other DNA
catatgatctcacagggacatcactagggattcgaaccctagacccacag

SEQ ID NO: 35275 - DNA, 50 bp, synthetic construct
  source 1..50: mol_type = other DNA
ttgtccagatttccatcctgttcatatgataataatggatttcatgccat

SEQ ID NO: 35276 - DNA, 50 bp, synthetic construct
  source 1..50: mol_type = other DNA
gctcgatcagatgtccgggtgtagcgcaggtgttcagcatcgtgctgagc

SEQ ID NO: 35277 - DNA, 50 bp, synthetic construct
  source 1..50: mol_type = other DNA
gaaacacatcaatttcaaaatcagaatatattttgaaagatatggtttta

SEQ ID NO: 35278 - DNA, 50 bp, synthetic construct
  source 1..50: mol_type = other DNA
atttttaaatattgctaatttcggaatattcaattttggaattaaaaaag

SEQ ID NO: 35279 - DNA, 50 bp, synthetic construct
  source 1..50: mol_type = other DNA
agcggtataacaggaggaaacaatgaggagcatattcctcttattccaca

SEQ ID NO: 35280 - DNA, 50 bp, synthetic construct
  source 1..50: mol_type = other DNA
aacccggcttcatcgcggccggaatcattataccagtggtttgcccggtg

SEQ ID NO: 35281 - DNA, 50 bp, synthetic construct
  source 1..50: mol_type = other DNA
agtatacaatatatactatcaaatattgttggtgtgatatgtaccttcct

SEQ ID NO: 35282 - DNA, 50 bp, synthetic construct
  source 1..50: mol_type = other DNA
gtaaggatttaacacattctcacagcttgatgctcctgttacccttgaac

SEQ ID NO: 35283 - DNA, 50 bp, synthetic construct
  source 1..50: mol_type = other DNA
accgacggcgattataccctgtccatggacaggcgcatccgcgcggtcac

SEQ ID NO: 35284 - DNA, 50 bp, synthetic construct
  source 1..50: mol_type = other DNA
atcgtgcgcgcactgtctctgtacctgtatgagttctcctgcggcgcggg

SEQ ID NO: 35285 - DNA, 50 bp, synthetic construct
  source 1..50: mol_type = other DNA
gagtatccggcatttgtcccactgaacaggtatttgcccttcggatatcg

SEQ ID NO: 35286 - DNA, 50 bp, synthetic construct
  source 1..50: mol_type = other DNA
catggaaaggttgctacatttgaacattcaaatgcaaattgattcgatag

SEQ ID NO: 35287 - DNA, 50 bp, synthetic construct
  source 1..50: mol_type = other DNA
cccgttttatgcggatttgatggatattcattaatgattgataatactgt

SEQ ID NO: 35288 - DNA, 50 bp, synthetic construct
  source 1..50: mol_type = other DNA
actcttgtatggagaattcattaaattgtgatatattgacatacatagtc

SEQ ID NO: 35289 - DNA, 50 bp, synthetic construct
  source 1..50: mol_type = other DNA
acaaaaccccgccgcagaatcgctctgggcatcctgcggtatgcggacgt

SEQ ID NO: 35290 - DNA, 50 bp, synthetic construct
  source 1..50: mol_type = other DNA
gtggcacacgcggaggaatatgcccgggggtgcgccccaccgcctgggac

SEQ ID NO: 35291 - DNA, 50 bp, synthetic construct
  source 1..50: mol_type = other DNA
tgtgaaaatacaaggaggaacgcaaatgcgccggttttggtatccgtagg

SEQ ID NO: 35292 - DNA, 50 bp, synthetic construct
  source 1..50: mol_type = other DNA
ccggcctccagcaaaaagcgcggctacaatgaacttgctcagcaggcgtg

SEQ ID NO: 35293 - DNA, 50 bp, synthetic construct
  source 1..50: mol_type = other DNA
ctctgccagatggtgtgctttttatacaaaaataacagccagcgttcgaa

SEQ ID NO: 35294 - DNA, 50 bp, synthetic construct
  source 1..50: mol_type = other DNA
tgcaaaaaaaggatttcccatagttgtatttgggacatctgcgttttgat

SEQ ID NO: 35295 - DNA, 50 bp, synthetic construct
  source 1..50: mol_type = other DNA
tacgctggagatgctgcgtcagccgcggcttctgtaaattcggcagcgct

SEQ ID NO: 35296 - DNA, 50 bp, synthetic construct
  source 1..50: mol_type = other DNA
cgcaggcgacacatttcatagcttcatacgtgagatgattgggtattgcc

SEQ ID NO: 35297 - DNA, 50 bp, synthetic construct
  source 1..50: mol_type = other DNA
tttatcggtgtccgattcggacacctgtgtcagaatctgacacagataac

SEQ ID NO: 35298 - DNA, 50 bp, synthetic construct
  source 1..50: mol_type = other DNA
tcataaatttattatacggataccatagtaaaaaagggcaaaaaatttga

SEQ ID NO: 35299 - DNA, 50 bp, synthetic construct
  source 1..50: mol_type = other DNA
tatgtacaaagctgtaatgatatttgaatattattattaactagtaaatg

SEQ ID NO: 35300 - DNA, 50 bp, synthetic construct
  source 1..50: mol_type = other DNA
aaataccgaccatatttgggtacattgatacgcacatatactttctgttt

SEQ ID NO: 35301 - DNA, 50 bp, synthetic construct
  source 1..50: mol_type = other DNA
agaatcaagaaaataaggagcgaaaatttccgttatattttttgaatcct

SEQ ID NO: 35302 - DNA, 50 bp, synthetic construct
  source 1..50: mol_type = other DNA
caatcctttgcctgtagtattccatttgatttctccccatcccctgataa

SEQ ID NO: 35303 - DNA, 50 bp, synthetic construct
  source 1..50: mol_type = other DNA
gccgcgctcatggctgaatgggcaaatgccccgccagcaatccatccgga

SEQ ID NO: 35304 - DNA, 50 bp, synthetic construct
  source 1..50: mol_type = other DNA
attcattagctcctaaccattggatatccaaaggtgtggttctaattctt

SEQ ID NO: 35305 - DNA, 50 bp, synthetic construct
  source 1..50: mol_type = other DNA
cgcccaaaaacgttctcgcttattttcattagcgacaacatttatgggcg

SEQ ID NO: 35306 - DNA, 50 bp, synthetic construct
  source 1..50: mol_type = other DNA
cccctacctattttcaagggatacaatgatacttttaaaaacattagtta

SEQ ID NO: 35307 - DNA, 50 bp, synthetic construct
  source 1..50: mol_type = other DNA
aaggtgccggggctattgggatcgggggatcctatgcgctgcggatgctg

SEQ ID NO: 35308 - DNA, 50 bp, synthetic construct
  source 1..50: mol_type = other DNA
aaagataaaccgggcagtaaaaataattttgcacagcccggtataatgcc

SEQ ID NO: 35309 - DNA, 50 bp, synthetic construct
  source 1..50: mol_type = other DNA
agaattggcgcatatatgttggaaatttccaacatctatgtactgatgaa

SEQ ID NO: 35310 - DNA, 50 bp, synthetic construct
  source 1..50: mol_type = other DNA
atatcatttgaaacaccgcttttgcaaaaaaagacttttgcatcagaata

SEQ ID NO: 35311 - DNA, 50 bp, synthetic construct
  source 1..50: mol_type = other DNA
tctgcaccgtgccgcctcctccgccgccggaggcaggggctgcgtggttg

SEQ ID NO: 35312 - DNA, 50 bp, synthetic construct
  source 1..50: mol_type = other DNA
tatattattacaaaagaagaaatgctaattttctcttttttatatattct

SEQ ID NO: 35313 - DNA, 50 bp, synthetic construct
  source 1..50: mol_type = other DNA
ccatgcgcttatattgccgctgttgcaacagcggctgtggctatgacaac

SEQ ID NO: 35314 - DNA, 50 bp, synthetic construct
  source 1..50: mol_type = other DNA
aaagaaaggtgaaaggtatcgcagatctcgctctttgtatggctttcttc

SEQ ID NO: 35315 - DNA, 50 bp, synthetic construct
  source 1..50: mol_type = other DNA
caaggaatcttccgtccgatgcaccgggatatcggacggttcttcttcca

SEQ ID NO: 35316 - DNA, 50 bp, synthetic construct
  source 1..50: mol_type = other DNA
gtggatttggagtcatgtagttagtactaactataccgccccatttggcg

SEQ ID NO: 35317 - DNA, 50 bp, synthetic construct
  source 1..50: mol_type = other DNA
ttcaaggaaggagaaagcctataaaggagcagtaattttccacctttgaa

SEQ ID NO: 35318 - DNA, 50 bp, synthetic construct
  source 1..50: mol_type = other DNA
tataaatatcaatccttccaatccctttaggaaagttcctattgttggga

SEQ ID NO: 35319 - DNA, 50 bp, synthetic construct
  source 1..50: mol_type = other DNA
tttgtaccaattttaaatatattttaaaacttctgtaacattggttccga

SEQ ID NO: 35320 - DNA, 50 bp, synthetic construct
  source 1..50: mol_type = other DNA
gcttcgccgctatcagcctttttccgcctccgcaatcatagcgtcgtcag

SEQ ID NO: 35321 - DNA, 50 bp, synthetic construct
  source 1..50: mol_type = other DNA
attgacgtccttccaaattatctcctccgatagtttagaaaaatgtgata

SEQ ID NO: 35322 - DNA, 50 bp, synthetic construct
  source 1..50: mol_type = other DNA
tgttccccgctggctgttatttttatatgtgcaacccggagtttgatctg

SEQ ID NO: 35323 - DNA, 50 bp, synthetic construct
  source 1..50: mol_type = other DNA
atgacctatgaatggggatacaggtaaatgatataatatgcataggtttg

SEQ ID NO: 35324 - DNA, 50 bp, synthetic construct
  source 1..50: mol_type = other DNA
ttttttcagccttttttgagcaaatgttaaatcaaaaagccgagaaaagc

SEQ ID NO: 35325 - DNA, 50 bp, synthetic construct
  source 1..50: mol_type = other DNA
attctgctaacgaacgtccatgcgaaaacgcggacgtttttcagcagatg

SEQ ID NO: 35326 - DNA, 50 bp, synthetic construct
  source 1..50: mol_type = other DNA
ggtacagaagaacttgcacattaacgttcatgagcctatgaacttgcgca

SEQ ID NO: 35327 - DNA, 50 bp, synthetic construct
  source 1..50: mol_type = other DNA
cacccagatccaggcggtaaacacgggcctttaccgtaaggacctggccc

SEQ ID NO: 35328 - DNA, 50 bp, synthetic construct
  source 1..50: mol_type = other DNA
tcaaactaattttactcttaaaacaagttgttaaagtaaaaacagtcatg

SEQ ID NO: 35329 - DNA, 50 bp, synthetic construct
  source 1..50: mol_type = other DNA
ttgacaaaaaatatgatatatggtataccacagtaatttttttgtgtcaa

SEQ ID NO: 35330 - DNA, 50 bp, synthetic construct
  source 1..50: mol_type = other DNA
ccggtggatctgttcccgaggacgaaggcgctgggaatcagccgccggga

SEQ ID NO: 35331 - DNA, 50 bp, synthetic construct
  source 1..50: mol_type = other DNA
gtaaaagatgcagctaataaatatacgtttttattatatcaggaatttat

SEQ ID NO: 35332 - DNA, 50 bp, synthetic construct
  source 1..50: mol_type = other DNA
ctcctgtgggcagtgttaagttagtactaattgaacactacccgtgggtt

SEQ ID NO: 35333 - DNA, 50 bp, synthetic construct
  source 1..50: mol_type = other DNA
ggtgttatttttgtacctattttttataactgctgctgcttgatgatttc

SEQ ID NO: 35334 - DNA, 50 bp, synthetic construct
  source 1..50: mol_type = other DNA
tgaaatataaaacaagaaaggaagatattcctcaaatctattgcaatttt

SEQ ID NO: 35335 - DNA, 50 bp, synthetic construct
  source 1..50: mol_type = other DNA
cggctttgccgtctgcgttgccccgccgcgccacgccgatcgtcaggcta

SEQ ID NO: 35336 - DNA, 50 bp, synthetic construct
  source 1..50: mol_type = other DNA
gacaggacggtgtaagttagtagtatactactaaattaaagttaccgaca

SEQ ID NO: 35337 - DNA, 50 bp, synthetic construct
  source 1..50: mol_type = other DNA
cgaattattttctctccttatttaagttagtaattagattaaataatggc

SEQ ID NO: 35338 - DNA, 50 bp, synthetic construct
  source 1..50: mol_type = other DNA
acagcttgttgaagaaataaaaaataaggactattacatcaacaccttgc

SEQ ID NO: 35339 - DNA, 50 bp, synthetic construct
  source 1..50: mol_type = other DNA
catcatagaaaacaaacggtatcggaggataccggattttttaagaataa

SEQ ID NO: 35340 - DNA, 50 bp, synthetic construct
  source 1..50: mol_type = other DNA
gttatttttatacttatttttaatataaaataagaagcaataaaattaat

SEQ ID NO: 35341 - DNA, 50 bp, synthetic construct
  source 1..50: mol_type = other DNA
tacaaaagaaattttcaaagaaagggactcctttgcaaaaagcttttcct

SEQ ID NO: 35342 - DNA, 50 bp, synthetic construct
  source 1..50: mol_type = other DNA
cggaaatatgtttaattccggcaaatttttcggacgttggcatattttac

SEQ ID NO: 35343 - DNA, 50 bp, synthetic construct
  source 1..50: mol_type = other DNA
aattgcaaagtaattgctctgaccaaagtcagattatttgtgataaaatt

SEQ ID NO: 35344 - DNA, 50 bp, synthetic construct
  source 1..50: mol_type = other DNA
gtaatcatcttatcaactgtaaatcgacatttttcgacatttatgtgtag

SEQ ID NO: 35345 - DNA, 50 bp, synthetic construct
  source 1..50: mol_type = other DNA
aattaccaataagcttttctttctcaatatgtaaacacattacttatatt

SEQ ID NO: 35346 - DNA, 50 bp, synthetic construct
  source 1..50: mol_type = other DNA
ttcgtcatttggatacggaatccggaatcatagcatctccaaaagagaaa

SEQ ID NO: 35347 - DNA, 50 bp, synthetic construct
  source 1..50: mol_type = other DNA
caattctccacctttcaaataacgttcagcattactcataataggaatcc

SEQ ID NO: 35348 - DNA, 50 bp, synthetic construct
  source 1..50: mol_type = other DNA
aatgttctccgtataaaaccgcacctgtataattttatatggtaagcttt

SEQ ID NO: 35349 - DNA, 50 bp, synthetic construct
  source 1..50: mol_type = other DNA
tgcgtgggcgtggagccggagcccgtggtgcggccctcaaggccaaccgt

SEQ ID NO: 35350 - DNA, 50 bp, synthetic construct
  source 1..50: mol_type = other DNA
acctgaaaataactcttttacttgttacagtataatttacaatttcgccg

SEQ ID NO: 35351 - DNA, 50 bp, synthetic construct
  source 1..50: mol_type = other DNA
atagaatgaaagagattatagtagaaaaatcagaatattagccatgaaat

SEQ ID NO: 35352 - DNA, 50 bp, synthetic construct
  source 1..50: mol_type = other DNA
gttttattatatcatattatctttaaaaatacccaggcgcatctcaggcc

SEQ ID NO: 35353 - DNA, 50 bp, synthetic construct
  source 1..50: mol_type = other DNA
ttccaaagatcttttttaattccaaactgagttagaattaatcattggaa

SEQ ID NO: 35354 - DNA, 50 bp, synthetic construct
  source 1..50: mol_type = other DNA
gccgaagatatcgctgcccctgcaccaagggggaggcagccctcaccggc

SEQ ID NO: 35355 - DNA, 50 bp, synthetic construct
  source 1..50: mol_type = other DNA
attcaaagaataaagaaaaaattaaagatgtaacatttttttctttggat

SEQ ID NO: 35356 - DNA, 50 bp, synthetic construct
  source 1..50: mol_type = other DNA
taattctgttgtttcatcttctctcccaaaaaaatgaaatgaacaaaaaa

SEQ ID NO: 35357 - DNA, 50 bp, synthetic construct
  source 1..50: mol_type = other DNA
ctttacaaatagacgatagaatttttcaaatctatcttttctttttaatc

SEQ ID NO: 35358 - DNA, 50 bp, synthetic construct
  source 1..50: mol_type = other DNA
aaagcaaaccaaaatctcaatcaccgtgcgtcatgatgatcgcgccgatg

SEQ ID NO: 35359 - DNA, 50 bp, synthetic construct
  source 1..50: mol_type = other DNA
taggatcctgtcagcagcaaagccaaggctttttggcgtgcagcttcctt

SEQ ID NO: 35360 - DNA, 50 bp, synthetic construct
  source 1..50: mol_type = other DNA
gtcggtagaaacacgggcatatccagcccgtgaagcgtgtatctccggca

SEQ ID NO: 35361 - DNA, 50 bp, synthetic construct
  source 1..50: mol_type = other DNA
tcaaatccgaaataaaaaaagatttggttcttttcacatggttctttaac

SEQ ID NO: 35362 - DNA, 50 bp, synthetic construct
  source 1..50: mol_type = other DNA
catttgccgaattctggcactgacaggtcgttgcctattttctcaaacga

SEQ ID NO: 35363 - DNA, 50 bp, synthetic construct
  source 1..50: mol_type = other DNA
cttttttaattccaaaattgaatattccgaaattagcaatatttaaaaat

SEQ ID NO: 35364 - DNA, 50 bp, synthetic construct
  source 1..50: mol_type = other DNA
ccttttacattctatcatatcaagcctacaatatgtcctaataaccatcc

SEQ ID NO: 35365 - DNA, 50 bp, synthetic construct
  source 1..50: mol_type = other DNA
agtaagaaaatatcaagtagtaaggactatctatttgatgatttcttaga

SEQ ID NO: 35366 - DNA, 50 bp, synthetic construct
  source 1..50: mol_type = other DNA
aaaaatttacaatttcttcaaaaacacctttcaagtagttttaagtttgt

SEQ ID NO: 35367 - DNA, 50 bp, synthetic construct
  source 1..50: mol_type = other DNA
tgaagataataaaaagtcttgatttcagtcaagaccttttttgaactttt

SEQ ID NO: 35368 - DNA, 50 bp, synthetic construct
  source 1..50: mol_type = other DNA
ggagcttccccgcttttgttttcaattgaacactacctgtaggctcatcc

SEQ ID NO: 35369 - DNA, 50 bp, synthetic construct
  source 1..50: mol_type = other DNA
gtataaagataggctaccgggatttatatagatagagcgcatggtttgac

SEQ ID NO: 35370 - DNA, 50 bp, synthetic construct
  source 1..50: mol_type = other DNA
ccttgccattatcttcggaaatctgcagattttcagagattatgacagcg

SEQ ID NO: 35371 - DNA, 50 bp, synthetic construct
  source 1..50: mol_type = other DNA
cgtcggtaggttcaatttagtagtatactactaactgaacccctccggta

SEQ ID NO: 35372 - DNA, 50 bp, synthetic construct
  source 1..50: mol_type = other DNA
aatcttattttacagccgtttccgtaaggggataactggtatttatatat

SEQ ID NO: 35373 - DNA, 50 bp, synthetic construct
  source 1..50: mol_type = other DNA
ttctgctttcaattttatttttttattaaaaaagatctttggaagttggt

SEQ ID NO: 35374 - DNA, 50 bp, synthetic construct
  source 1..50: mol_type = other DNA
ctggcaccggccaggtagctgtcgtagatcagtatggcggccagtgcgcc

SEQ ID NO: 35375 - DNA, 50 bp, synthetic construct
  source 1..50: mol_type = other DNA
cagcgccttggctttttcttcggtgtggctaagataaagccgaaaagatt

SEQ ID NO: 35376 - DNA, 50 bp, synthetic construct
  source 1..50: mol_type = other DNA
gtcctcgcagcgtaacgatcatcgaagggtgggcgttacgttgaccgttc

SEQ ID NO: 35377 - DNA, 50 bp, synthetic construct
  source 1..50: mol_type = other DNA
aaagcaaaactctatacatagcaatcacttgtcgtttagaaattcccaat

SEQ ID NO: 35378 - DNA, 50 bp, synthetic construct
  source 1..50: mol_type = other DNA
acacccagaccttcaacaagatgggcccatctgaatcatggtctgcacac

SEQ ID NO: 35379 - DNA, 50 bp, synthetic construct
  source 1..50: mol_type = other DNA
actgggcggaaacatggatgattttaaatggatacacctttaatcattga

SEQ ID NO: 35380 - DNA, 50 bp, synthetic construct
  source 1..50: mol_type = other DNA
ctttcttttcagggtggcttcctatacaggctaatcggcggaaaaggcga

SEQ ID NO: 35381 - DNA, 50 bp, synthetic construct
  source 1..50: mol_type = other DNA
catagctggaaccctgagaaccgccagcggtaatgaggctctttatcttc

SEQ ID NO: 35382 - DNA, 50 bp, synthetic construct
  source 1..50: mol_type = other DNA
tgatttcatccatgttgacttttacggtaaagtaatctcgattgaattca

SEQ ID NO: 35383 - DNA, 50 bp, synthetic construct
  source 1..50: mol_type = other DNA
tggaaaaatggctgcgtcacaccttttggcaaaccacattatactgataa

SEQ ID NO: 35384 - DNA, 50 bp, synthetic construct
  source 1..50: mol_type = other DNA
ataccctgaaaagtatgatctacatcaggcccaacaattcttcatagaaa

SEQ ID NO: 35385 - DNA, 50 bp, synthetic construct
  source 1..50: mol_type = other DNA
atccatgtgaggcggtggaatcttatgtgataaggattgctcacatgctt

SEQ ID NO: 35386 - DNA, 50 bp, synthetic construct
  source 1..50: mol_type = other DNA
caaaatgaactgcaccccacaaaatccgttccggggtccatctttctttc

SEQ ID NO: 35387 - DNA, 50 bp, synthetic construct
  source 1..50: mol_type = other DNA
tttctgaagaagggcatcccctttatagcaagtcggaatcactccataat

SEQ ID NO: 35388 - DNA, 50 bp, synthetic construct
  source 1..50: mol_type = other DNA
gaaagatacgttcaacagctggtatatagcagcggaaaaagtaagggaat

SEQ ID NO: 35389 - DNA, 50 bp, synthetic construct
  source 1..50: mol_type = other DNA
ccccttcgggtgcttttttatttggaaaaatcaaaaaaacgcgtcctctg

SEQ ID NO: 35390 - DNA, 50 bp, synthetic construct
  source 1..50: mol_type = other DNA
aaaggatcatcaaacataatctcattcaagattaagagccttgattttgt

SEQ ID NO: 35391 - DNA, 50 bp, synthetic construct
  source 1..50: mol_type = other DNA
cttttttggagaactgtaaaatgatctctgctatccgaacagtactgaac

SEQ ID NO: 35392 - DNA, 50 bp, synthetic construct
  source 1..50: mol_type = other DNA
atatgtacatataggatgtctataattatagacatcctatatgtactaac

SEQ ID NO: 35393 - DNA, 50 bp, synthetic construct
  source 1..50: mol_type = other DNA
atgtagaaataatgccggaaataactacttttcgctatttatttctcttt

SEQ ID NO: 35394 - DNA, 50 bp, synthetic construct
  source 1..50: mol_type = other DNA
ctgagtacttatacagccttatagaagtaatttatcaaataagaaccaag

SEQ ID NO: 35395 - DNA, 50 bp, synthetic construct
  source 1..50: mol_type = other DNA
tccgttgacacacggcagtaggccgcattgtagaatgctgtgtcaactgt

SEQ ID NO: 35396 - DNA, 50 bp, synthetic construct
  source 1..50: mol_type = other DNA
agcctacttttagtaggtctctttacaacacacttaaggaaaactaataa

SEQ ID NO: 35397 - DNA, 50 bp, synthetic construct
  source 1..50: mol_type = other DNA
acagtcaaagtcaatccgtaaataagaatttatctaatgtgcaattttgc

SEQ ID NO: 35398 - DNA, 50 bp, synthetic construct
  source 1..50: mol_type = other DNA
ctatatccatagggtgtgtgacccatgcaaaacaattcttataatgcaaa

SEQ ID NO: 35399 - DNA, 50 bp, synthetic construct
  source 1..50: mol_type = other DNA
aatgtatagatcattaagcctgctaaagaaagcataacctcgattatgtt

SEQ ID NO: 35400 - DNA, 50 bp, synthetic construct
  source 1..50: mol_type = other DNA
gataagaaaatatttaattatagaaagaacttcttgaagatataattatc

SEQ ID NO: 35401 - DNA, 50 bp, synthetic construct
  source 1..50: mol_type = other DNA
tggtgatgatccggcagatggagttctggggtaaataaatctttccacac

SEQ ID NO: 35402 - DNA, 50 bp, synthetic construct
  source 1..50: mol_type = other DNA
aaggattggctactcggcgtagagggccggcatgctcatagccactcctg

SEQ ID NO: 35403 - DNA, 50 bp, synthetic construct
  source 1..50: mol_type = other DNA
accttgaccgcgcccgcacccagttccttggcctcgtacgtctggtaggt

SEQ ID NO: 35404 - DNA, 50 bp, synthetic construct
  source 1..50: mol_type = other DNA
agtctgccgttgcccttccaccaaacgctgctgttctccaccggaaagct

SEQ ID NO: 35405 - DNA, 50 bp, synthetic construct
  source 1..50: mol_type = other DNA
ctgatgcaaaaaagggcactgattgcagcccttgtgctttttggcagtag

SEQ ID NO: 35406 - DNA, 50 bp, synthetic construct
  source 1..50: mol_type = other DNA
aaaaagctgatggagcacctgatttcgttatggtactccagaagctctct

SEQ ID NO: 35407 - DNA, 50 bp, synthetic construct
  source 1..50: mol_type = other DNA
acagaaattatactaatatatggaatcgactatgttagtggtattgctgt

SEQ ID NO: 35408 - DNA, 50 bp, synthetic construct
  source 1..50: mol_type = other DNA
ggttcaatgttttcaaatgctttttcaaccccatttggagccgacaaaac

SEQ ID NO: 35409 - DNA, 50 bp, synthetic construct
  source 1..50: mol_type = other DNA
gaaataatgagaaaaaggtcaagggaagctgacatcatccgatatatctt

SEQ ID NO: 35410 - DNA, 50 bp, synthetic construct
  source 1..50: mol_type = other DNA
ggcaacggagagttctatattctccggagaagatagaagactctcgtgca

SEQ ID NO: 35411 - DNA, 50 bp, synthetic construct
  source 1..50: mol_type = other DNA
gcacattgaggttatcaatggtttaaataccattgataacctctctgtac

SEQ ID NO: 35412 - DNA, 50 bp, synthetic construct
  source 1..50: mol_type = other DNA
aaattatagcacgctctatggagaatatccatgaggccgtgctcgcattt

SEQ ID NO: 35413 - DNA, 50 bp, synthetic construct
  source 1..50: mol_type = other DNA
ggtcttggtcttgttggtgaagttgttttcttttgcgcaaatgtcagact

SEQ ID NO: 35414 - DNA, 50 bp, synthetic construct
  source 1..50: mol_type = other DNA
acatttcttatttttgccatgcttttaatcttggcaaaaataaaaaagtc

SEQ ID NO: 35415 - DNA, 50 bp, synthetic construct
  source 1..50: mol_type = other DNA
tctactgtaatttccgggtatttcaccaatcaatctgcccgccgccgttt

SEQ ID NO: 35416 - DNA, 50 bp, synthetic construct
  source 1..50: mol_type = other DNA
aaagtcagctaccctcggctgcaacaacgaagcggagagtgtctgccggc

SEQ ID NO: 35417 - DNA, 50 bp, synthetic construct
  source 1..50: mol_type = other DNA
ttcatactgccggaaggagtcataagcatctcctttggtgttgcttgtaa

SEQ ID NO: 35418 - DNA, 50 bp, synthetic construct
  source 1..50: mol_type = other DNA
cagattactatacatattatagcatatgcttaaaaatgaaacttacatcg

SEQ ID NO: 35419 - DNA, 50 bp, synthetic construct
  source 1..50: mol_type = other DNA
caagaagcgtctgctgtttttcaatctcatttgatttcagacgaaacttg

SEQ ID NO: 35420 - DNA, 50 bp, synthetic construct
  source 1..50: mol_type = other DNA
ccttgtcaatactggcttttccgtttatgcaaaatccagtgggaacattc

SEQ ID NO: 35421 - DNA, 50 bp, synthetic construct
  source 1..50: mol_type = other DNA
gcaagtcagaatggaagtgaaaatatctttgcatgcctcggaagtgttcc

SEQ ID NO: 35422 - DNA, 50 bp, synthetic construct
  source 1..50: mol_type = other DNA
cgagcaagcttagaaaaagaagcaaaatttttctttattttctttgcttt

SEQ ID NO: 35423 - DNA, 50 bp, synthetic construct
  source 1..50: mol_type = other DNA
cgcgtttttttctttgtcgtcgaagcttccacaaggaagaacaggtcgcc

SEQ ID NO: 35424 - DNA, 50 bp, synthetic construct
  source 1..50: mol_type = other DNA
cggcgggaatgttgtagatcgcctgcaggcgcaagattgatttcctttca

SEQ ID NO: 35425 - DNA, 50 bp, synthetic construct
  source 1..50: mol_type = other DNA
gattgcaattatagtatatccggaatttgggtacaaaaataacagccagc

SEQ ID NO: 35426 - DNA, 50 bp, synthetic construct
  source 1..50: mol_type = other DNA
aaaaaaattgaatttcaattcattatacctaataccacttcaaagagtat

SEQ ID NO: 35427 - DNA, 50 bp, synthetic construct
  source 1..50: mol_type = other DNA
gtatctttatagcacttcaaagcgtcgcacccgcaatggttcaaaattca

SEQ ID NO: 35428 - DNA, 50 bp, synthetic construct
  source 1..50: mol_type = other DNA
tagataaagtattaagtgaaaatatcattttttttgctatactttaaaaa

SEQ ID NO: 35429 - DNA, 50 bp, synthetic construct
  source 1..50: mol_type = other DNA
cggaagctgtaaactctacgaataaatttttaagaaatttaccgcttcct

SEQ ID NO: 35430 - DNA, 50 bp, synthetic construct
  source 1..50: mol_type = other DNA
agcacaaaagagccattatgaaaactttttccgaaaagcttatttgtggt

SEQ ID NO: 35431 - DNA, 50 bp, synthetic construct
  source 1..50: mol_type = other DNA
atcttcatacttattgtaattcgaatatttcaaacaaagcagtaattgtg

SEQ ID NO: 35432 - DNA, 50 bp, synthetic construct
  source 1..50: mol_type = other DNA
ggggactttattcttaccactgtcagcggaccgggttttatccctgcccc

SEQ ID NO: 35433 - DNA, 50 bp, synthetic construct
  source 1..50: mol_type = other DNA
ccttttataatctctgcctgttccgggggtagtgcagaatatcttaaagg

SEQ ID NO: 35434 - DNA, 50 bp, synthetic construct
  source 1..50: mol_type = other DNA
tgaagctactgaagcgttagcctgaccatcagagtctttcataagctcca

SEQ ID NO: 35435 - DNA, 50 bp, synthetic construct
  source 1..50: mol_type = other DNA
atctcgggcttgccatagctgtatagttgtcgccatagcaatccataata

SEQ ID NO: 35436 - DNA, 50 bp, synthetic construct
  source 1..50: mol_type = other DNA
agtttaggcagttttgtctgcgtgatcgcatcgccaaagctgaagaaccg

SEQ ID NO: 35437 - DNA, 50 bp, synthetic construct
  source 1..50: mol_type = other DNA
ttttattttgcccaattttgtttttagaaacaagatagggtagaatataa

SEQ ID NO: 35438 - DNA, 50 bp, synthetic construct
  source 1..50: mol_type = other DNA
aagtattatagatttaatcatttatataatcgcttggggcattaatcaag

SEQ ID NO: 35439 - DNA, 50 bp, synthetic construct
  source 1..50: mol_type = other DNA
caggatatcgatgagggaaatctcattcgttgccctccttgtcggtaccc

SEQ ID NO: 35440 - DNA, 50 bp, synthetic construct
  source 1..50: mol_type = other DNA
tattttgtcggagtaaatataaatttatgtatatatgttataattaaaat

SEQ ID NO: 35441 - DNA, 50 bp, synthetic construct
  source 1..50: mol_type = other DNA
tgtcagatgaacttgaaatgagagatgttacatcagcagatgcaggtgca

SEQ ID NO: 35442 - DNA, 50 bp, synthetic construct
  source 1..50: mol_type = other DNA
tgaaacatataatgctgcgaagcaccagctccacagctttgaagcacagg

SEQ ID NO: 35443 - DNA, 50 bp, synthetic construct
  source 1..50: mol_type = other DNA
tgaaacatataatgctgcgaagcaccatccggtcagcatcgtcctgctcc

SEQ ID NO: 35444 - DNA, 50 bp, synthetic construct
  source 1..50: mol_type = other DNA
cgatttatgatttttcgtctcacacgtgtacatcagcaaatcgtatgacg

SEQ ID NO: 35445 - DNA, 50 bp, synthetic construct
  source 1..50: mol_type = other DNA
tgagacaaaatacaatggctttagattggtggcttttttattttttcagg

SEQ ID NO: 35446 - DNA, 50 bp, synthetic construct
  source 1..50: mol_type = other DNA
ttaacaaagataatgagaatatcaaatgtgtcacgatttttctttgttaa

SEQ ID NO: 35447 - DNA, 50 bp, synthetic construct
  source 1..50: mol_type = other DNA
ccgaattgactggatatatttcaaaaatgtcatccagtacatcgttcaaa

SEQ ID NO: 35448 - DNA, 50 bp, synthetic construct
  source 1..50: mol_type = other DNA
cggtctccgatgcggagctgtttacccggcaagcaacgcatcgccgccta

SEQ ID NO: 35449 - DNA, 50 bp, synthetic construct
  source 1..50: mol_type = other DNA
caatcaagaacggtgtccgtccttaccagcacggataaagttgtcgatcg

SEQ ID NO: 35450 - DNA, 50 bp, synthetic construct
  source 1..50: mol_type = other DNA
tttctgctgaaaagcctttcttttcaaaaagcaaggggtttccattgaga

SEQ ID NO: 35451 - DNA, 50 bp, synthetic construct
  source 1..50: mol_type = other DNA
attgcttagctaaatacttcgaaaattgctgaagtattaaaagagtacat

SEQ ID NO: 35452 - DNA, 50 bp, synthetic construct
  source 1..50: mol_type = other DNA
aatgacaacaaaatatggacaaaataataaaacaatgaaagatatgtata

SEQ ID NO: 35453 - DNA, 50 bp, synthetic construct
  source 1..50: mol_type = other DNA
gaaactgttgaaatttaatatttcaaaaaaggtacaaaaataacagtcaa

SEQ ID NO: 35454 - DNA, 50 bp, synthetic construct
  source 1..50: mol_type = other DNA
atttatataaagtgtttatttcactgaaaagataagaaatttttacaaag

SEQ ID NO: 35455 - DNA, 50 bp, synthetic construct
  source 1..50: mol_type = other DNA
gttgcgaaatttatataaagtgtttattttgtttttatgtttttatatgg

SEQ ID NO: 35456 - DNA, 50 bp, synthetic construct
  source 1..50: mol_type = other DNA
aaaaataattattaacacagataaatttgacgaaataaaatattattcta

SEQ ID NO: 35457 - DNA, 50 bp, synthetic construct
  source 1..50: mol_type = other DNA
catattaaacgaaaaaagcgccctcgatcgtgcggtttttgcggagcatt

SEQ ID NO: 35458 - DNA, 50 bp, synthetic construct
  source 1..50: mol_type = other DNA
ttcgtcaagggtttttgcaaaaaaattttttttgccccgccttagaggca

SEQ ID NO: 35459 - DNA, 50 bp, synthetic construct
  source 1..50: mol_type = other DNA
gcagacaacctgcgcaatggcgttcagctgagctaacggtccatgtcatt

SEQ ID NO: 35460 - DNA, 50 bp, synthetic construct
  source 1..50: mol_type = other DNA
agcggtatgcgattgcaaccgtgccggatgccgtgcgttcgtcatcctcg

SEQ ID NO: 35461 - DNA, 50 bp, synthetic construct
  source 1..50: mol_type = other DNA
catgttgcatcaaaaaagagaggtgaaaatctcctcacgccaatcacctg

SEQ ID NO: 35462 - DNA, 50 bp, synthetic construct
  source 1..50: mol_type = other DNA
aatccatttgcagttacattgcggcgcgtaaatctaaatcaaaagctccg

SEQ ID NO: 35463 - DNA, 50 bp, synthetic construct
  source 1..50: mol_type = other DNA
atatatgaacagacgccatgccaaattttgttttgccgagcagtttagtc

SEQ ID NO: 35464 - DNA, 50 bp, synthetic construct
  source 1..50: mol_type = other DNA
tcttttttaattccaaaattgaatattatcccttgtgttattataaaaac

SEQ ID NO: 35465 - DNA, 50 bp, synthetic construct
  source 1..50: mol_type = other DNA
catttaatgcacctgcatctgctgatttcaagttcatctgacatccgaat

SEQ ID NO: 35466 - DNA, 50 bp, synthetic construct
  source 1..50: mol_type = other DNA
ccagaagaaattattaaaatcataattgacatcaaagaccttcggactgg

SEQ ID NO: 35467 - DNA, 50 bp, synthetic construct
  source 1..50: mol_type = other DNA
gaagacggaaacctcatcattaatgataacggaatcaggtatccttgtcc

SEQ ID NO: 35468 - DNA, 50 bp, synthetic construct
  source 1..50: mol_type = other DNA
gttttccttttactccattacgctttctttccttggcataaaaggaaaaa

SEQ ID NO: 35469 - DNA, 50 bp, synthetic construct
  source 1..50: mol_type = other DNA
aaaaaatatgaagccattgagcgttcaggaagatcagcttcatagttttg

SEQ ID NO: 35470 - DNA, 50 bp, synthetic construct
  source 1..50: mol_type = other DNA
attcctgcaaaaagccggaacgagctttcttcctgtgccattgcagccat

SEQ ID NO: 35471 - DNA, 50 bp, synthetic construct
  source 1..50: mol_type = other DNA
caaaggacgcttgtcgcaggaatgatcattatatgaattacctgaaattg

SEQ ID NO: 35472 - DNA, 50 bp, synthetic construct
  source 1..50: mol_type = other DNA
gtataacgttctttggagaacttttcaaaaaccaagaaagtaatcaatga

SEQ ID NO: 35473 - DNA, 50 bp, synthetic construct
  source 1..50: mol_type = other DNA
aaagaaaggtgaaaggtatcgcagatctcactcttggtatggctttcttc

SEQ ID NO: 35474 - DNA, 50 bp, synthetic construct
  source 1..50: mol_type = other DNA
gggatggggagaggtcaaaaaagatatgagttttacgatctttgcttccc

SEQ ID NO: 35475 - DNA, 50 bp, synthetic construct
  source 1..50: mol_type = other DNA
aatttatccatccatttctcctagtgcctgctcaaatggatcaggaaatg

SEQ ID NO: 35476 - DNA, 50 bp, synthetic construct
  source 1..50: mol_type = other DNA
gactttccttcaaagtaatatctgtacacttactacatttcagataagtt

SEQ ID NO: 35477 - DNA, 50 bp, synthetic construct
  source 1..50: mol_type = other DNA
gggcgaagctgttgcggctgctgcgagcagatcctcacccagctgcgcgc

SEQ ID NO: 35478 - DNA, 50 bp, synthetic construct
  source 1..50: mol_type = other DNA
tgttctttgctggctgttatttttataaagatctgcgccagaaagatgct

SEQ ID NO: 35479 - DNA, 50 bp, synthetic construct
  source 1..50: mol_type = other DNA
ccttattttacaccttttgcggacgattccgcggcgacaagccgcgaaga

SEQ ID NO: 35480 - DNA, 50 bp, synthetic construct
  source 1..50: mol_type = other DNA
attttcaaaagcaacaaaatataaattcctgttttaatttctttgataat

SEQ ID NO: 35481 - DNA, 50 bp, synthetic construct
  source 1..50: mol_type = other DNA
gaacttgtcgcgtttacagttaggataatatgatataataaaacaacttg

SEQ ID NO: 35482 - DNA, 50 bp, synthetic construct
  source 1..50: mol_type = other DNA
aagatccttttcccacaactccaatattggatttatggggtctgaagctt

SEQ ID NO: 35483 - DNA, 50 bp, synthetic construct
  source 1..50: mol_type = other DNA
gctggcggagcatggcgtggaggcgggcataaggaataccctttgccaga

SEQ ID NO: 35484 - DNA, 50 bp, synthetic construct
  source 1..50: mol_type = other DNA
ttcctatttgcttgctgccattcctgctaaccattgcagaatcagagaaa

SEQ ID NO: 35485 - DNA, 50 bp, synthetic construct
  source 1..50: mol_type = other DNA
aaaattgacataatgcactctcttattacagatatacttttgctaattcc

SEQ ID NO: 35486 - DNA, 50 bp, synthetic construct
  source 1..50: mol_type = other DNA
caatacgtactttgtgatctgatatataaagccccagttttaggttattg

SEQ ID NO: 35487 - DNA, 50 bp, synthetic construct
  source 1..50: mol_type = other DNA
atccataaccacaaggacatggattcatggtggcgatcagttgaaagtct

SEQ ID NO: 35488 - DNA, 50 bp, synthetic construct
  source 1..50: mol_type = other DNA
gattgtataatataatagaagcaacgtacattcacttccatactggtgta

SEQ ID NO: 35489 - DNA, 50 bp, synthetic construct
  source 1..50: mol_type = other DNA
accattcattttatatttgttcttataaataataatatgtgtaaaatggt

SEQ ID NO: 35490 - DNA, 50 bp, synthetic construct
  source 1..50: mol_type = other DNA
ccaaaaataaagctctccgaaataattatttcggatatcaaccagtttat

SEQ ID NO: 35491 - DNA, 50 bp, synthetic construct
  source 1..50: mol_type = other DNA
ggataagacaggaaaatgctccgccggttcttgattttcctttttttctt

SEQ ID NO: 35492 - DNA, 50 bp, synthetic construct
  source 1..50: mol_type = other DNA
gactacgaatcagtaggtctagggttatttagatatttagtagattattc

SEQ ID NO: 35493 - DNA, 50 bp, synthetic construct
  source 1..50: mol_type = other DNA
aaagaaaaaaattaataactattttaatcaagttatttttgacattattt

SEQ ID NO: 35494 - DNA, 50 bp, synthetic construct
  source 1..50: mol_type = other DNA
aaagaaagatataaacgattgttattactctaactattagtttttacttt

SEQ ID NO: 35495 - DNA, 50 bp, synthetic construct
  source 1..50: mol_type = other DNA
atttttttccatttatgccaaggaaaaacaaggcattataagaaaaacat

SEQ ID NO: 35496 - DNA, 50 bp, synthetic construct
  source 1..50: mol_type = other DNA
caaacgggggcaggacaaggaatcttattttcttcttctgactccggctc

SEQ ID NO: 35497 - DNA, 50 bp, synthetic construct
  source 1..50: mol_type = other DNA
ggttcttgcacatgcccttctgacgccatgcgcacgccgatgcgtgcacc

SEQ ID NO: 35498 - DNA, 50 bp, synthetic construct
  source 1..50: mol_type = other DNA
atcaatgcggtatttatctcagcggtgagatgttaaaaatatgcattgaa

SEQ ID NO: 35499 - DNA, 50 bp, synthetic construct
  source 1..50: mol_type = other DNA
ttatttttataccttatataggaggactttaaaggcaggtccaaggataa

SEQ ID NO: 35500 - DNA, 50 bp, synthetic construct
  source 1..50: mol_type = other DNA
ccgtaatagagtcaggcgctcaggatacgctgtgcctgtctctgctttac

SEQ ID NO: 35501 - DNA, 50 bp, synthetic construct
  source 1..50: mol_type = other DNA
atataatcagtttttatgcaaaaaaattattgcatataaattttattata

SEQ ID NO: 35502 - DNA, 50 bp, synthetic construct
  source 1..50: mol_type = other DNA
gtcacactacaaggaggtgaaaatccattttttcctccttgcttgcggag

SEQ ID NO: 35503 - DNA, 50 bp, synthetic construct
  source 1..50: mol_type = other DNA
atatatccatcaaacagtttctgtacaggcgtactttttgaaatccatga

SEQ ID NO: 35504 - DNA, 50 bp, synthetic construct
  source 1..50: mol_type = other DNA
ggactgcctaaaatacatccggcagtaagccaacgtattttacaatatcc

SEQ ID NO: 35505 - DNA, 50 bp, synthetic construct
  source 1..50: mol_type = other DNA
ttttttaattccaaaattgaatatttaataaaaattttggaactacaaat

SEQ ID NO: 35506 - DNA, 50 bp, synthetic construct
  source 1..50: mol_type = other DNA
agccttctgttatgcgatgagcctacgggtgcgctggattccaggacttc

SEQ ID NO: 35507 - DNA, 50 bp, synthetic construct
  source 1..50: mol_type = other DNA
cgcagatgttattgtaccacctccggcgcgggtcatcatgatgtactgct

SEQ ID NO: 35508 - DNA, 50 bp, synthetic construct
  source 1..50: mol_type = other DNA
ttgtcggcaaagtgcgcgcacagcaggctccctgcggatggtgccatgcg

SEQ ID NO: 35509 - DNA, 50 bp, synthetic construct
  source 1..50: mol_type = other DNA
ttgagcgcatcgcggcggatgagtttcactcattgcctccctgcgctcgt

SEQ ID NO: 35510 - DNA, 50 bp, synthetic construct
  source 1..50: mol_type = other DNA
ccgtgaagcgtgacagcgtcgccggtcggcaaagccgttcatttttccaa

SEQ ID NO: 35511 - DNA, 50 bp, synthetic construct
  source 1..50: mol_type = other DNA
accacatttactagttaataattatataccggaatttattgcaatgcaca

SEQ ID NO: 35512 - DNA, 50 bp, synthetic construct
  source 1..50: mol_type = other DNA
gtattatttttgatattggcatcgcaaaaaaagagtataaaaaataaacc

SEQ ID NO: 35513 - DNA, 50 bp, synthetic construct
  source 1..50: mol_type = other DNA
cccgctgcgccacagctccgccgcgcgcacgatcgcgcgcacacgcacgc

SEQ ID NO: 35514 - DNA, 50 bp, synthetic construct
  source 1..50: mol_type = other DNA
acagcagaaagtatagcacaaaaacgccctgcggcgctactgccgcatga

SEQ ID NO: 35515 - DNA, 50 bp, synthetic construct
  source 1..50: mol_type = other DNA
agcttctctatgcggcggtgtttactcatccgcccccgcatccagaagtc

SEQ ID NO: 35516 - DNA, 50 bp, synthetic construct
  source 1..50: mol_type = other DNA
gcaagtcagaatggaagtgaaaatatctttgcacgccccggaagtgttcc

SEQ ID NO: 35517 - DNA, 50 bp, synthetic construct
  source 1..50: mol_type = other DNA
ccacttgtcagatatcatttttaaatttgtaaatgaaatagatattatta

SEQ ID NO: 35518 - DNA, 50 bp, synthetic construct
  source 1..50: mol_type = other DNA
cttacagatatccgggtgtagcgcaggcgctggcggcggacagctatctg

SEQ ID NO: 35519 - DNA, 50 bp, synthetic construct
  source 1..50: mol_type = other DNA
cgattgctacagtaacatatctaaatttgggtatcattctataagcatcg

SEQ ID NO: 35520 - DNA, 50 bp, synthetic construct
  source 1..50: mol_type = other DNA
aatttttataaagattttactgctaataagggaaatagtttataataaat

SEQ ID NO: 35521 - DNA, 50 bp, synthetic construct
  source 1..50: mol_type = other DNA
aatgcaccaaccatttccgcaacatgtgctatggacggcactattgcaaa

SEQ ID NO: 35522 - DNA, 50 bp, synthetic construct
  source 1..50: mol_type = other DNA
tttagaaatttctgttgttttgttcttctcagaaaacagaaataactaat

SEQ ID NO: 35523 - DNA, 50 bp, synthetic construct
  source 1..50: mol_type = other DNA
acccaagaacgggctttcgccataaaagaagccgcttccctggtttgggt

SEQ ID NO: 35524 - DNA, 50 bp, synthetic construct
  source 1..50: mol_type = other DNA
taactggtactgtatctgtaaactgttatcgagtggatcgctgacagcac

SEQ ID NO: 35525 - DNA, 50 bp, synthetic construct
  source 1..50: mol_type = other DNA
tactgacgaatttgaccttttataattcagtctggttaaaatcgtccgta

SEQ ID NO: 35526 - DNA, 50 bp, synthetic construct
  source 1..50: mol_type = other DNA
ggatttttcatagataaaatttcaatatgtcatatttcttccgaaaattt

SEQ ID NO: 35527 - DNA, 50 bp, synthetic construct
  source 1..50: mol_type = other DNA
atatcaataacacccttgaggtcagttgacggaaaggctgttgttgacga

SEQ ID NO: 35528 - DNA, 50 bp, synthetic construct
  source 1..50: mol_type = other DNA
tattcgtatttgaggaaaacaaagtttctatttttccatctttgtagatg

SEQ ID NO: 35529 - DNA, 50 bp, synthetic construct
  source 1..50: mol_type = other DNA
gtaatcttttcatctaaaatatcatttgaagtgccggagagaaggattgg

SEQ ID NO: 35530 - DNA, 50 bp, synthetic construct
  source 1..50: mol_type = other DNA
aagatttatacctatacaaaaacaatttggacggtatggaatgcaatcat

SEQ ID NO: 35531 - DNA, 50 bp, synthetic construct
  source 1..50: mol_type = other DNA
ggggcgccggagcggctgtaggccacggcctcagccgtgtagagctcctg

SEQ ID NO: 35532 - DNA, 50 bp, synthetic construct
  source 1..50: mol_type = other DNA
accattcataataaacttaacaccctaaatgatgtaggtatcgtaatatt

SEQ ID NO: 35533 - DNA, 50 bp, synthetic construct
  source 1..50: mol_type = other DNA
tccttatgtaatatattttaaataattattgaaaatactcagtattcctg

SEQ ID NO: 35534 - DNA, 50 bp, synthetic construct
  source 1..50: mol_type = other DNA
atgtctatatctaaaaaataaatatcactttattttgtgaatttaaaaat

SEQ ID NO: 35535 - DNA, 50 bp, synthetic construct
  source 1..50: mol_type = other DNA
agaaagagaatattcctgatcagaaaacgttctgcttgtatgctgtttcc

SEQ ID NO: 35536 - DNA, 50 bp, synthetic construct
  source 1..50: mol_type = other DNA
accgatggggttactccaattacaattttacttggaataatcagtataat

SEQ ID NO: 35537 - DNA, 50 bp, synthetic construct
  source 1..50: mol_type = other DNA
gaaggctttccatgctcaatgccttatttttcaggtatgggatttcctta

SEQ ID NO: 35538 - DNA, 50 bp, synthetic construct
  source 1..50: mol_type = other DNA
catgtgagcgagttctttcgctcgtacgagcgagttcttctgttcctata

SEQ ID NO: 35539 - DNA, 50 bp, synthetic construct
  source 1..50: mol_type = other DNA
ttaattggtgggctggggtttgttgtaacatcatccttaccagtaatctt

SEQ ID NO: 35540 - DNA, 50 bp, synthetic construct
  source 1..50: mol_type = other DNA
ggcttccaggatccctaaaagtttctaactctttatcaataccctgtttg

SEQ ID NO: 35541 - DNA, 50 bp, synthetic construct
  source 1..50: mol_type = other DNA
agtgtcttctcgatctggatcttttaaaaataacagcccgagaacttttg

SEQ ID NO: 35542 - DNA, 50 bp, synthetic construct
  source 1..50: mol_type = other DNA
atcaaaaaaacacgcaaaaaagcgtgactaattaaactttatggtttaat

SEQ ID NO: 35543 - DNA, 50 bp, synthetic construct
  source 1..50: mol_type = other DNA
ctatttgagcgaaaaggcgtaccattttgtacggttatgagatcaaagac

SEQ ID NO: 35544 - DNA, 50 bp, synthetic construct
  source 1..50: mol_type = other DNA
agcgtttttggagccattgcccagcactggaagtgcaaaccaaataattc

SEQ ID NO: 35545 - DNA, 50 bp, synthetic construct
  source 1..50: mol_type = other DNA
tatccagcgcatcctcgaccccggtgccgacaacatcgccctgctggacg

SEQ ID NO: 35546 - DNA, 50 bp, synthetic construct
  source 1..50: mol_type = other DNA
ttctactgtctgactaagaatttaatagtcactttcatcagcaccaagaa

SEQ ID NO: 35547 - DNA, 50 bp, synthetic construct
  source 1..50: mol_type = other DNA
tcttaagtttcgttttctgtgttatactgcattaatacataaagtttctg

SEQ ID NO: 35548 - DNA, 50 bp, synthetic construct
  source 1..50: mol_type = other DNA
tcagaacttgttgatactctggcatactttatgaattcatcaagttttgg

SEQ ID NO: 35549 - DNA, 50 bp, synthetic construct
  source 1..50: mol_type = other DNA
tcctcgtaggtcagcggcggcagaatgtgcctaccgctggctcccgcgtc

SEQ ID NO: 35550 - DNA, 50 bp, synthetic construct
  source 1..50: mol_type = other DNA
gaagaagctgtgatacaatcacaacccatggatgctatcctgtataaaac

SEQ ID NO: 35551 - DNA, 50 bp, synthetic construct
  source 1..50: mol_type = other DNA
tttttgttagctacgttgtgggatatctctgcttcggttatttccataat

SEQ ID NO: 35552 - DNA, 50 bp, synthetic construct
  source 1..50: mol_type = other DNA
tattttatcgagggtaaagaagtctactacatgatataggaagaaaattt

SEQ ID NO: 35553 - DNA, 50 bp, synthetic construct
  source 1..50: mol_type = other DNA
tattttttgatttcttccccaagatggctgcccgaagatgatacaatatt

SEQ ID NO: 35554 - DNA, 50 bp, synthetic construct
  source 1..50: mol_type = other DNA
cttgaaacaagaaatcagatgtttgaaaacatctatgatgagatcacaaa

SEQ ID NO: 35555 - DNA, 50 bp, synthetic construct
  source 1..50: mol_type = other DNA
ttcatcagcacatagatgttggaaatttccaacatctatgaaccaattct

SEQ ID NO: 35556 - DNA, 50 bp, synthetic construct
  source 1..50: mol_type = other DNA
tgcctgagtaaggtcatcagtagtaactgtttaaaaaccgcactatcagc

SEQ ID NO: 35557 - DNA, 50 bp, synthetic construct
  source 1..50: mol_type = other DNA
ttgcgccttatcttttgggcctataggatgacggggatgagctggccgcc

SEQ ID NO: 35558 - DNA, 50 bp, synthetic construct
  source 1..50: mol_type = other DNA
ctatttttataaagaaaggctgtgttaccagctaaaaataaacaaaactc

SEQ ID NO: 35559 - DNA, 50 bp, synthetic construct
  source 1..50: mol_type = other DNA
attttaaaataataaaattgtaaaaaaatgaaatttatagatttcaaaat

SEQ ID NO: 35560 - DNA, 50 bp, synthetic construct
  source 1..50: mol_type = other DNA
tagctaatagtcttgattgcaataatttcactgaatataattattaacta

SEQ ID NO: 35561 - DNA, 50 bp, synthetic construct
  source 1..50: mol_type = other DNA
caagtgttgatgccatgcataaaaactgataacggaatcaggtatccttg

SEQ ID NO: 35562 - DNA, 50 bp, synthetic construct
  source 1..50: mol_type = other DNA
tctccgtttttggttatagctattgccccatcttcacgcaaatgctttcg

SEQ ID NO: 35563 - DNA, 50 bp, synthetic construct
  source 1..50: mol_type = other DNA
cagaccccaaaatgcaagaaaccgggagaggccctgaatgggagtcattt

SEQ ID NO: 35564 - DNA, 50 bp, synthetic construct
  source 1..50: mol_type = other DNA
tggatattcaaacagcttaggagtatggcacagatcaagccatgcttcaa

SEQ ID NO: 35565 - DNA, 50 bp, synthetic construct
  source 1..50: mol_type = other DNA
cctcaaaattgcctgccaaataaccatttaaattttcctccataaataca

SEQ ID NO: 35566 - DNA, 50 bp, synthetic construct
  source 1..50: mol_type = other DNA
ttgtcaaattggttacaaaagtgggccatctttttcccactatttaccct

SEQ ID NO: 35567 - DNA, 50 bp, synthetic construct
  source 1..50: mol_type = other DNA
atccgtaaactgccggtaggagattaacgccctaaaggcagtgcatttat

SEQ ID NO: 35568 - DNA, 50 bp, synthetic construct
  source 1..50: mol_type = other DNA
tttattataccataaaccaagttcatataccgtattttctatatgagaaa

SEQ ID NO: 35569 - DNA, 50 bp, synthetic construct
  source 1..50: mol_type = other DNA
ccgccgctgtcagcctttttccggggacgctccatggctgagaggaaaaa

SEQ ID NO: 35570 - DNA, 50 bp, synthetic construct
  source 1..50: mol_type = other DNA
tggtttcttttgacggagaaatattttgatgcctcctgcaaagccaacca

SEQ ID NO: 35571 - DNA, 50 bp, synthetic construct
  source 1..50: mol_type = other DNA
ccctgctttgataaatgcaaaactgctaacttgctgtgggttaaataact

SEQ ID NO: 35572 - DNA, 50 bp, synthetic construct
  source 1..50: mol_type = other DNA
ttcctctctcaaattttaaaataatattattagaaaatttcaattctaaa

SEQ ID NO: 35573 - DNA, 50 bp, synthetic construct
  source 1..50: mol_type = other DNA
agtttccgcatgaagtttcgcctgttcaggcgaaacttggtgggggaaag

SEQ ID NO: 35574 - DNA, 50 bp, synthetic construct
  source 1..50: mol_type = other DNA
ctgattttccctgcatcagtgagaattttttaagattaagagccttgatt

SEQ ID NO: 35575 - DNA, 50 bp, synthetic construct
  source 1..50: mol_type = other DNA
atcatcggtgatataatctgcaagatagggagaaaatacgcggcgatttt

SEQ ID NO: 35576 - DNA, 50 bp, synthetic construct
  source 1..50: mol_type = other DNA
aattatacagatttcgacattccttgctgaaaacagaaaccccacttttt

SEQ ID NO: 35577 - DNA, 50 bp, synthetic construct
  source 1..50: mol_type = other DNA
cgaaaagcagaagataaatggttccccaagaatagcaagtctttttttcg

SEQ ID NO: 35578 - DNA, 50 bp, synthetic construct
  source 1..50: mol_type = other DNA
atcggcaagaatctggtggttctgatttgattgggtagattctagcatat

SEQ ID NO: 35579 - DNA, 50 bp, synthetic construct
  source 1..50: mol_type = other DNA
gataaattgcaccatgtatataaactatgatctatacgttgcaattcttc

SEQ ID NO: 35580 - DNA, 50 bp, synthetic construct
  source 1..50: mol_type = other DNA
agaaataataattattatgtgtgggtacaaaaataacacccagcatttga

SEQ ID NO: 35581 - DNA, 50 bp, synthetic construct
  source 1..50: mol_type = other DNA
agaagagctgcttaagaacctgaaggagaatgcgcctgttacgccgttct

SEQ ID NO: 35582 - DNA, 50 bp, synthetic construct
  source 1..50: mol_type = other DNA
aaggcacctggcaataggtgttatttttgtgatctcactcatatatgctt

SEQ ID NO: 35583 - DNA, 50 bp, synthetic construct
  source 1..50: mol_type = other DNA
gtcttttacattaccattctttaattctaaaggtaaggcttgtaagagct

SEQ ID NO: 35584 - DNA, 50 bp, synthetic construct
  source 1..50: mol_type = other DNA
ctatgcggttcctataacaataggtttctattgaatttttgttgaccggc

SEQ ID NO: 35585 - DNA, 50 bp, synthetic construct
  source 1..50: mol_type = other DNA
gcgatggtaattccgccctttccatcctctttgcaggaatcaaaaatttt

SEQ ID NO: 35586 - DNA, 50 bp, synthetic construct
  source 1..50: mol_type = other DNA
tgatactccaaacatgcaaaaatatttatttatgcgggtttggaacatct

SEQ ID NO: 35587 - DNA, 50 bp, synthetic construct
  source 1..50: mol_type = other DNA
aatatgaggcgaatgggctaatttgaaaaccgcgccgcccacggaggtcg

SEQ ID NO: 35588 - DNA, 50 bp, synthetic construct
  source 1..50: mol_type = other DNA
gacaagatttgtaaattcaatcgattgaatcagaatctttaacaatctga

SEQ ID NO: 35589 - DNA, 50 bp, synthetic construct
  source 1..50: mol_type = other DNA
aaaaaatataattttctcaaagtattgagtatatgtcaagtataattttt

SEQ ID NO: 35590 - DNA, 50 bp, synthetic construct
  source 1..50: mol_type = other DNA
ttagcaatgatgtgtagacatatatgcatatgctacaataacaatgcaga

SEQ ID NO: 35591 - DNA, 50 bp, synthetic construct
  source 1..50: mol_type = other DNA
catgaaacaatagaaagtatagtatatattatactgtcatcctcatgctg

SEQ ID NO: 35592 - DNA, 50 bp, synthetic construct
  source 1..50: mol_type = other DNA
gttataaaaaatgttattaaaattatattattaataatttcaattatttt

SEQ ID NO: 35593 - DNA, 50 bp, synthetic construct
  source 1..50: mol_type = other DNA
tggggaatatgataaccatgtgattgattcagatgaaatcatccgacgca

SEQ ID NO: 35594 - DNA, 50 bp, synthetic construct
  source 1..50: mol_type = other DNA
gtgaattttaatacaaaatttgcatagtaaaaaagggtaaaaaatttgac

SEQ ID NO: 35595 - DNA, 50 bp, synthetic construct
  source 1..50: mol_type = other DNA
aggaaagaaaggtgaaaggtatcgcagattatattgtactcatattcatt

SEQ ID NO: 35596 - DNA, 50 bp, synthetic construct
  source 1..50: mol_type = other DNA
gcggataccgatggtcaaaggaactggctgctttcaccgtccgcatcccc

SEQ ID NO: 35597 - DNA, 50 bp, synthetic construct
  source 1..50: mol_type = other DNA
ttctatatagtcatgaattttttcccgaaaatgtttcaaggcatccagaa

SEQ ID NO: 35598 - DNA, 50 bp, synthetic construct
  source 1..50: mol_type = other DNA
tatatcatttctgaacaatacttatacggttgccgtacataaaatatatc

SEQ ID NO: 35599 - DNA, 50 bp, synthetic construct
  source 1..50: mol_type = other DNA
gatgaattgaaaagaagagaatccagagattgactcattagatattttac

SEQ ID NO: 35600 - DNA, 50 bp, synthetic construct
  source 1..50: mol_type = other DNA
gcttttgactccatattattataatataaaaataacagccagcagagaac

SEQ ID NO: 35601 - DNA, 50 bp, synthetic construct
  source 1..50: mol_type = other DNA
agccgtatttttttcagtttatgccatgatggaatggtaaatttaaggct

SEQ ID NO: 35602 - DNA, 50 bp, synthetic construct
  source 1..50: mol_type = other DNA
acaaagaaaaaaacggaggtactagactccggctcatctgttttcttctg

SEQ ID NO: 35603 - DNA, 50 bp, synthetic construct
  source 1..50: mol_type = other DNA
attgccgcagcggcaagcgcgccggcaggcgtcaaatggctggctgccgt

SEQ ID NO: 35604 - DNA, 50 bp, synthetic construct
  source 1..50: mol_type = other DNA
tatctccatcccaatcgtaaccataatattttaagattattttgtccata

SEQ ID NO: 35605 - DNA, 50 bp, synthetic construct
  source 1..50: mol_type = other DNA
tgccttccttttcggcaaactgagcgccacgattaaagaggatgaagcca

SEQ ID NO: 35606 - DNA, 50 bp, synthetic construct
  source 1..50: mol_type = other DNA
acgctggacgatggaagtaacgaaagcttctattttccataacccattcg

SEQ ID NO: 35607 - DNA, 50 bp, synthetic construct
  source 1..50: mol_type = other DNA
aattgcagccgtggaacagtttgttaccaaaaatccgatttctgtcaatt

SEQ ID NO: 35608 - DNA, 50 bp, synthetic construct
  source 1..50: mol_type = other DNA
gatagttattctcattccaatttttcaaccctgcccaagctgaggtaatc

SEQ ID NO: 35609 - DNA, 50 bp, synthetic construct
  source 1..50: mol_type = other DNA
caggctgaacacatctatcaattaataagttgacaggccaatcaatatct

SEQ ID NO: 35610 - DNA, 50 bp, synthetic construct
  source 1..50: mol_type = other DNA
ttttaataaaatcaaatataaaggagtttcagctatcgatttcattaatt

SEQ ID NO: 35611 - DNA, 50 bp, synthetic construct
  source 1..50: mol_type = other DNA
gaacgacccggaagataaaaagtaatccctttctatctgatttggcggaa

SEQ ID NO: 35612 - DNA, 50 bp, synthetic construct
  source 1..50: mol_type = other DNA
taggttttagaggtaatatgtgacaccggcactgttacctttcaaaagac

SEQ ID NO: 35613 - DNA, 50 bp, synthetic construct
  source 1..50: mol_type = other DNA
agctttttccggtatcaccgactgaccataaaatgagcatggctaaagga

SEQ ID NO: 35614 - DNA, 50 bp, synthetic construct
  source 1..50: mol_type = other DNA
tcccggcggctgattcccagcgccttcgtcctcgggaacagatccaccgg

SEQ ID NO: 35615 - DNA, 50 bp, synthetic construct
  source 1..50: mol_type = other DNA
aaggtgaaacaaaaaaattaatattatattttgttttaatgtttcacaag

SEQ ID NO: 35616 - DNA, 50 bp, synthetic construct
  source 1..50: mol_type = other DNA
gggtttattttttatactcttttttgtgaaatgaagaataaaaaaaatcc

SEQ ID NO: 35617 - DNA, 50 bp, synthetic construct
  source 1..50: mol_type = other DNA
gaccagcatttcaatcaaggatactagttacatttatttcaatcagcgta

SEQ ID NO: 35618 - DNA, 50 bp, synthetic construct
  source 1..50: mol_type = other DNA
agttgttaaagttataccttgctattaatcaaggtataactttgaaaagt

SEQ ID NO: 35619 - DNA, 50 bp, synthetic construct
  source 1..50: mol_type = other DNA
aatgtgaccttaattgtctttttaaatatccggagtaatccatgcatcgt

SEQ ID NO: 35620 - DNA, 50 bp, synthetic construct
  source 1..50: mol_type = other DNA
attttacccataaaaaacgagggtatagacgatgagttaatggataatat

SEQ ID NO: 35621 - DNA, 50 bp, synthetic construct
  source 1..50: mol_type = other DNA
attaatctgatttgttagactgttcagttaagacaacacaagatatttac

SEQ ID NO: 35622 - DNA, 50 bp, synthetic construct
  source 1..50: mol_type = other DNA
gcaaaacccagctcgaaaatgaggcgccgcccttgatggctgtgtgggag

SEQ ID NO: 35623 - DNA, 50 bp, synthetic construct
  source 1..50: mol_type = other DNA
cctgatctcaaatcaaattatagcattcaggaatttatcacatcctcagg

SEQ ID NO: 35624 - DNA, 50 bp, synthetic construct
  source 1..50: mol_type = other DNA
agcaagacctattatcaccggtgagttggaaattgatgtatatgcttgca

SEQ ID NO: 35625 - DNA, 50 bp, synthetic construct
  source 1..50: mol_type = other DNA
tcttccagattgatcacttcattcagaaatgatataatcaatttgcgaga

SEQ ID NO: 35626 - DNA, 50 bp, synthetic construct
  source 1..50: mol_type = other DNA
cccatcggaaaaacaaccattgcttaattaatggtttttgctcctttttt

SEQ ID NO: 35627 - DNA, 50 bp, synthetic construct
  source 1..50: mol_type = other DNA
ctttatttcttgacagagtatgtaatgttcgctcctaatggcaaataaaa

SEQ ID NO: 35628 - DNA, 50 bp, synthetic construct
  source 1..50: mol_type = other DNA
gggtgtagcgcagttttggtagcgcgcttttgcaaaaaaggcggccggaa

SEQ ID NO: 35629 - DNA, 50 bp, synthetic construct
  source 1..50: mol_type = other DNA
ttatgggattatcaaaccagtagtaagggcttctttccattcttccattg

SEQ ID NO: 35630 - DNA, 50 bp, synthetic construct
  source 1..50: mol_type = other DNA
gcagccagcaggaagggaaacgccggggcggagccgggccgtcttttggg

SEQ ID NO: 35631 - DNA, 50 bp, synthetic construct
  source 1..50: mol_type = other DNA
gaagatataagaaaaaacatgatttccgttgctctttttggcatcattat

SEQ ID NO: 35632 - DNA, 50 bp, synthetic construct
  source 1..50: mol_type = other DNA
aaaccaaaaaatccgaacccttctcctgaaggcttccgctgttgtgggcg

SEQ ID NO: 35633 - DNA, 50 bp, synthetic construct
  source 1..50: mol_type = other DNA
attatactgattattccaagtaaaattgtaattggagtaaccccatcggt

SEQ ID NO: 35634 - DNA, 50 bp, synthetic construct
  source 1..50: mol_type = other DNA
tcttcaaaagaacaagaaaaaaagccatttgttttggtcggtttgcaagg

SEQ ID NO: 35635 - DNA, 50 bp, synthetic construct
  source 1..50: mol_type = other DNA
agcaaggataatcgcaggcttcgtaattaactgttgccatgattgtttcc

SEQ ID NO: 35636 - DNA, 50 bp, synthetic construct
  source 1..50: mol_type = other DNA
gtgcttacggatattggaacggaagaattagcgcatctggaaatggtcgc

SEQ ID NO: 35637 - DNA, 50 bp, synthetic construct
  source 1..50: mol_type = other DNA
caaggaatacacagacaaagggtacagaccgttaccctgtgtagtccctt

SEQ ID NO: 35638 - DNA, 50 bp, synthetic construct
  source 1..50: mol_type = other DNA
atggatatgcaggtttccgctgtctgacaccccgagcggagaatctcctg

SEQ ID NO: 35639 - DNA, 50 bp, synthetic construct
  source 1..50: mol_type = other DNA
aaggtcagattcgggaatgaaccgcctatatcattcctgttgctgagtat

SEQ ID NO: 35640 - DNA, 50 bp, synthetic construct
  source 1..50: mol_type = other DNA
aatcagctcttgttgtagaaaggagctatatcctacaacaagagatatgc

SEQ ID NO: 35641 - DNA, 50 bp, synthetic construct
  source 1..50: mol_type = other DNA
aattcccgggggatggggtcccgcgatgcggatcgcaccctccggcgtca

SEQ ID NO: 35642 - DNA, 50 bp, synthetic construct
  source 1..50: mol_type = other DNA
tttttccgatcctagtcaaatgatattcgatttgaccaggattttgattg

SEQ ID NO: 35643 - DNA, 50 bp, synthetic construct
  source 1..50: mol_type = other DNA
tccttgctttgtatcacaagcttggataagagataacgaaaaagcaactc

SEQ ID NO: 35644 - DNA, 50 bp, synthetic construct
  source 1..50: mol_type = other DNA
attgaaaaaggaaaggcagagggagctcgattttctctactgttttcaat

SEQ ID NO: 35645 - DNA, 50 bp, synthetic construct
  source 1..50: mol_type = other DNA
cgtcgattatcagcgccgaatccgtttctccataacgctaataatcaatc

SEQ ID NO: 35646 - DNA, 50 bp, synthetic construct
  source 1..50: mol_type = other DNA
tttttttgcagcccaccaaacccgtacggcattgaatggctgcaaaagga

SEQ ID NO: 35647 - DNA, 50 bp, synthetic construct
  source 1..50: mol_type = other DNA
gacgagcgtctggaaaatgcggccggggcattattttttttacgcacgaa

SEQ ID NO: 35648 - DNA, 50 bp, synthetic construct
  source 1..50: mol_type = other DNA
gatttcccccgcaaggggggataaactattgcgcacttgcgccggaaaca

SEQ ID NO: 35649 - DNA, 50 bp, synthetic construct
  source 1..50: mol_type = other DNA
ccgagattgatacaatttaattatttcgagcaggattgtatcaatttcag

SEQ ID NO: 35650 - DNA, 50 bp, synthetic construct
  source 1..50: mol_type = other DNA
gactttcccgccgtggccgttgtccatgttacgcccatatgcgcaaagct

SEQ ID NO: 35651 - DNA, 50 bp, synthetic construct
  source 1..50: mol_type = other DNA
cacgccgttttctttcttccaaccaagggtgtaaaaaataagcccttgtg

SEQ ID NO: 35652 - DNA, 50 bp, synthetic construct
  source 1..50: mol_type = other DNA
caggtggcccagcggctcgacgagcgctccgccagccgctggaggacggc

SEQ ID NO: 35653 - DNA, 50 bp, synthetic construct
  source 1..50: mol_type = other DNA
tttattttttatactcttttttaacattaaaaaaggatcctgctgccgaa

SEQ ID NO: 35654 - DNA, 50 bp, synthetic construct
  source 1..50: mol_type = other DNA
cccccgatttccgccgcgtagagagctctggcgcaggctcagctcttcca

SEQ ID NO: 35655 - DNA, 50 bp, synthetic construct
  source 1..50: mol_type = other DNA
ctattttatcaaaaaataggaggaattcatctccttctttttaaaaacgc

SEQ ID NO: 35656 - DNA, 50 bp, synthetic construct
  source 1..50: mol_type = other DNA
gcatgaaaattttataataaaatccataaatggaaaaaaaatacggctga

SEQ ID NO: 35657 - DNA, 50 bp, synthetic construct
  source 1..50: mol_type = other DNA
tgacgctatgctaattttgtaacttaaagcgaacccgacacataggggat

SEQ ID NO: 35658 - DNA, 50 bp, synthetic construct
  source 1..50: mol_type = other DNA
cgtagaactgctgcaacaggaaaagggcattatttttttttttttttacg

SEQ ID NO: 35659 - DNA, 50 bp, synthetic construct
  source 1..50: mol_type = other DNA
ccttttggagaatcgtattgtgagagtttcaacgacttccgggctttttt

SEQ ID NO: 35660 - DNA, 50 bp, synthetic construct
  source 1..50: mol_type = other DNA
taatccagaatggcagaagctcacgggaatagggatgccatattgtttta

SEQ ID NO: 35661 - DNA, 50 bp, synthetic construct
  source 1..50: mol_type = other DNA
ttcaacaaagatcgaaagcctagaagaacgtgcgacgtgactttattgaa

SEQ ID NO: 35662 - DNA, 50 bp, synthetic construct
  source 1..50: mol_type = other DNA
gcgcttgccgcttattctaaaggcgttaaacctacataagcgtcaagcag

SEQ ID NO: 35663 - DNA, 50 bp, synthetic construct
  source 1..50: mol_type = other DNA
ggcgctggaggcgaccgccgccgacgtcggcggcggcgcgacctccgagg

SEQ ID NO: 35664 - DNA, 50 bp, synthetic construct
  source 1..50: mol_type = other DNA
tgcctgtcggtaggttcattttagtactaactgaacccctccggtcggct

SEQ ID NO: 35665 - DNA, 50 bp, synthetic construct
  source 1..50: mol_type = other DNA
taattgataactaaggaggaccattcaaggtcattcgagactatcaattg

SEQ ID NO: 35666 - DNA, 50 bp, synthetic construct
  source 1..50: mol_type = other DNA
cgccagctccgtgatgtctttttccggagattcgcagctcgccgctgcac

SEQ ID NO: 35667 - DNA, 50 bp, synthetic construct
  source 1..50: mol_type = other DNA
tttaccccattccgataggtgtgcaaacaccccgattcaaatggcagcgg

SEQ ID NO: 35668 - DNA, 50 bp, synthetic construct
  source 1..50: mol_type = other DNA
atttcagggcaaaaaaattggcgattgggtaaaaaattttgtcctgccca

SEQ ID NO: 35669 - DNA, 50 bp, synthetic construct
  source 1..50: mol_type = other DNA
ccggtacttctgttctgcaccgtgagcacggtcggtcacagtcattccgc

SEQ ID NO: 35670 - DNA, 50 bp, synthetic construct
  source 1..50: mol_type = other DNA
tttttgctcccgataccgttaacctgtataatcggtatataccgtaaaca

SEQ ID NO: 35671 - DNA, 50 bp, synthetic construct
  source 1..50: mol_type = other DNA
cttccacaggaagatatatttgcagtagtctatatatcactctgaaagcc

SEQ ID NO: 35672 - DNA, 50 bp, synthetic construct
  source 1..50: mol_type = other DNA
ctacggcggatcggtgggcgcattgaaaacggccgggcggtcattgatga

SEQ ID NO: 35673 - DNA, 50 bp, synthetic construct
  source 1..50: mol_type = other DNA
tgcgctgggcgataactgtggtatcatgaccacatatatcgcacaggctt

SEQ ID NO: 35674 - DNA, 50 bp, synthetic construct
  source 1..50: mol_type = other DNA
aaattcttcatctaagatgcgtgcaagtaattactttatagatgataaat

SEQ ID NO: 35675 - DNA, 50 bp, synthetic construct
  source 1..50: mol_type = other DNA
aaaggaaagccagatattttacaaagtttcagaatatatccattagttta

SEQ ID NO: 35676 - DNA, 50 bp, synthetic construct
  source 1..50: mol_type = other DNA
agatgtgcaggccggtttatcagcgggagaatctatcggcctgcctgtgg

SEQ ID NO: 35677 - DNA, 50 bp, synthetic construct
  source 1..50: mol_type = other DNA
gaagaaatcatgtcccgcctatcttggtagccgcgggcctgccgctcgtc

SEQ ID NO: 35678 - DNA, 50 bp, synthetic construct
  source 1..50: mol_type = other DNA
tgtcagcaccgaaaagaggtgaatatccacaccacttcattctgaaaaac

SEQ ID NO: 35679 - DNA, 50 bp, synthetic construct
  source 1..50: mol_type = other DNA
aaagtaattgcgaacgttgtcttttaatagacaatcttcaacatatctca

SEQ ID NO: 35680 - DNA, 50 bp, synthetic construct
  source 1..50: mol_type = other DNA
gagcgcctgcccgagatcgcaaagaactttccgagcagccggaggccccc

SEQ ID NO: 35681 - DNA, 50 bp, synthetic construct
  source 1..50: mol_type = other DNA
atcgaaacggaagtctcggatgcgatcgcctcccgacgctcccggtcgat

SEQ ID NO: 35682 - DNA, 50 bp, synthetic construct
  source 1..50: mol_type = other DNA
ctgctgttgtcgccccggtgcagggcgctacacccggatatcgaccgccg

SEQ ID NO: 35683 - DNA, 50 bp, synthetic construct
  source 1..50: mol_type = other DNA
agcagatcctctgcaaagcgctgcattcaacgccgcccaaaccacctgct

SEQ ID NO: 35684 - DNA, 50 bp, synthetic construct
  source 1..50: mol_type = other DNA
ttccaacgacctgtacagtaataatattatatcgactcttgatgtggtgt

SEQ ID NO: 35685 - DNA, 50 bp, synthetic construct
  source 1..50: mol_type = other DNA
gcatttatccaaggatgtttttgttgccaaaggcatccgtgcagaaaagg

SEQ ID NO: 35686 - DNA, 50 bp, synthetic construct
  source 1..50: mol_type = other DNA
cctttcctcagcgattcagctgacatctcaataaaatcaaacagtaaaca

SEQ ID NO: 35687 - DNA, 50 bp, synthetic construct
  source 1..50: mol_type = other DNA
tacgttgacactgcaaagattccaattgccgtctcttttttcacaaccgg

SEQ ID NO: 35688 - DNA, 50 bp, synthetic construct
  source 1..50: mol_type = other DNA
ggaatggttttaccccccccccgatttcgtatcgggaatactgtctattc

SEQ ID NO: 35689 - DNA, 50 bp, synthetic construct
  source 1..50: mol_type = other DNA
acatcgcttgacaagggcacacagcccattgtgcttttgcagaccaaatg

SEQ ID NO: 35690 - DNA, 50 bp, synthetic construct
  source 1..50: mol_type = other DNA
aacggtaatatcgcaggcggtaagcgaccatcaccaaatatactgccgtt

SEQ ID NO: 35691 - DNA, 50 bp, synthetic construct
  source 1..50: mol_type = other DNA
ccgggccaaacatgtcctttgtctttaggtgaaaattatacaggggctgt

SEQ ID NO: 35692 - DNA, 50 bp, synthetic construct
  source 1..50: mol_type = other DNA
atgagccaacgggtagtgttcaattaacttaacacagcccacaggagcac

SEQ ID NO: 35693 - DNA, 50 bp, synthetic construct
  source 1..50: mol_type = other DNA
cgatttttgtaaaagtgatactcacattagatgcacttgtaaaaggtggt

SEQ ID NO: 35694 - DNA, 50 bp, synthetic construct
  source 1..50: mol_type = other DNA
atttactcgaaaatcaagctgctgtaaagtcaacagatttcggagcataa

SEQ ID NO: 35695 - DNA, 50 bp, synthetic construct
  source 1..50: mol_type = other DNA
aggccgatttgtcagatattttaccggacactcgtccgacaattcatatt

SEQ ID NO: 35696 - DNA, 50 bp, synthetic construct
  source 1..50: mol_type = other DNA
ctctgtgcaggaatgtgtacaatttgtgtagtcaacagacgcatcaagag

SEQ ID NO: 35697 - DNA, 50 bp, synthetic construct
  source 1..50: mol_type = other DNA
aacttttgatttttcgatttttgacatcaaatcatttaaaagcaagcgtt

SEQ ID NO: 35698 - DNA, 50 bp, synthetic construct
  source 1..50: mol_type = other DNA
tgacggtctggcgcagatgtttgccggcggtcagctgaaaaaggcaaagg

SEQ ID NO: 35699 - DNA, 50 bp, synthetic construct
  source 1..50: mol_type = other DNA
taccattttttcaccgaaacattttatccttcagaatgaaaaatatgttg

SEQ ID NO: 35700 - DNA, 50 bp, synthetic construct
  source 1..50: mol_type = other DNA
ccgtggaggggctatttctttttgatcaaccacatctattacttcaccgg

SEQ ID NO: 35701 - DNA, 50 bp, synthetic construct
  source 1..50: mol_type = other DNA
gatatcgtttctttagctttggcgaccgccggtagtaaaagccggagaca

SEQ ID NO: 35702 - DNA, 50 bp, synthetic construct
  source 1..50: mol_type = other DNA
tatggcaagagcggccagcctgcaaatgcgggtggcggtctattgccgcc

SEQ ID NO: 35703 - DNA, 50 bp, synthetic construct
  source 1..50: mol_type = other DNA
gtttgcatacagtctgaatgacgaacggatcaggaagaccagctccatag

SEQ ID NO: 35704 - DNA, 50 bp, synthetic construct
  source 1..50: mol_type = other DNA
tccggggcaaaacaaggagaaacaaaacattccgcttgttccacaccggg

SEQ ID NO: 35705 - DNA, 50 bp, synthetic construct
  source 1..50: mol_type = other DNA
gatcatagtctggcttattactaatatactcctattatttgagatgtttt

SEQ ID NO: 35706 - DNA, 50 bp, synthetic construct
  source 1..50: mol_type = other DNA
aaagaagtttccaaaaagaaactaatcataatctcattaaaggagatatt

SEQ ID NO: 35707 - DNA, 50 bp, synthetic construct
  source 1..50: mol_type = other DNA
aggggtgatccctcaatctcctacgcaaaggagaaaacaatctcccggtt

SEQ ID NO: 35708 - DNA, 50 bp, synthetic construct
  source 1..50: mol_type = other DNA
ctgccattgcgcattgtgtatccatatggatacgatagcaagagtgatgg

SEQ ID NO: 35709 - DNA, 50 bp, synthetic construct
  source 1..50: mol_type = other DNA
gttagacaaaggaactgatttaaacgccgagcacgcagactttttctttg

SEQ ID NO: 35710 - DNA, 50 bp, synthetic construct
  source 1..50: mol_type = other DNA
cgccgtgaagctcggcaaagaggtcagtcattccgccgaccatcaatccg

SEQ ID NO: 35711 - DNA, 50 bp, synthetic construct
  source 1..50: mol_type = other DNA
aaaaggcacgacagcgggcactgcaggagatttacgaaagcgcacggcgc

SEQ ID NO: 35712 - DNA, 50 bp, synthetic construct
  source 1..50: mol_type = other DNA
tacagaattctgcaatgacatatttgaatacctctctggcatttcctgtt

SEQ ID NO: 35713 - DNA, 50 bp, synthetic construct
  source 1..50: mol_type = other DNA
ctgtttacatctggacgattactccggaatatagtacacgatgtttccag

SEQ ID NO: 35714 - DNA, 50 bp, synthetic construct
  source 1..50: mol_type = other DNA
agacctcgccgaccgtcttaaagttttctgaacgaaggttctggaaatct

SEQ ID NO: 35715 - DNA, 50 bp, synthetic construct
  source 1..50: mol_type = other DNA
gcgacccggcgctttttctgttctgtaacaaagaaaaacggccatgtcga

SEQ ID NO: 35716 - DNA, 50 bp, synthetic construct
  source 1..50: mol_type = other DNA
ataaatataaagatctagaaccctatatttttgcttatttttatattttt

SEQ ID NO: 35717 - DNA, 50 bp, synthetic construct
  source 1..50: mol_type = other DNA
tatttttatactcatttttaaggagattgatattgctgaatataaaaaag

SEQ ID NO: 35718 - DNA, 50 bp, synthetic construct
  source 1..50: mol_type = other DNA
tccactctctcgggtgtgataccccagagaagcctctgcaagatcgggat

SEQ ID NO: 35719 - DNA, 50 bp, synthetic construct
  source 1..50: mol_type = other DNA
ccgctaaagccaacctgattgcacttcactgagtgtcctggctttgtatt

SEQ ID NO: 35720 - DNA, 50 bp, synthetic construct
  source 1..50: mol_type = other DNA
tttcggctttatcttgtccgcatcctgtaacggaaaagcaaaagccctct

SEQ ID NO: 35721 - DNA, 50 bp, synthetic construct
  source 1..50: mol_type = other DNA
catatcttagcagcatgccggcggcgccaagggcatggagataaccaatg

SEQ ID NO: 35722 - DNA, 50 bp, synthetic construct
  source 1..50: mol_type = other DNA
taaaacttcccttacgaattatactggacgcattcgtaatgcagatttga

SEQ ID NO: 35723 - DNA, 50 bp, synthetic construct
  source 1..50: mol_type = other DNA
gatgaaaacctattatggcatggagctcctaaatagctatcattttcatt

SEQ ID NO: 35724 - DNA, 50 bp, synthetic construct
  source 1..50: mol_type = other DNA
ataacgaactatccaaacaaggaagtgtcctcttttgcataaaccaatat

SEQ ID NO: 35725 - DNA, 50 bp, synthetic construct
  source 1..50: mol_type = other DNA
tcctgcagagcgtgtacgagccggtcctgccttttcagcgcgccccaggc

SEQ ID NO: 35726 - DNA, 50 bp, synthetic construct
  source 1..50: mol_type = other DNA
gaaaagcgtcagaaagccgcggagaaatctaacaccatctgaaatagttc

SEQ ID NO: 35727 - DNA, 50 bp, synthetic construct
  source 1..50: mol_type = other DNA
gaccggaaatatagtattcgaaaaattccccgcacacatggtcaaaggcg

SEQ ID NO: 35728 - DNA, 50 bp, synthetic construct
  source 1..50: mol_type = other DNA
attattcgcagaattgacttgataatttccaagatatttccctgtaaaaa

SEQ ID NO: 35729 - DNA, 50 bp, synthetic construct
  source 1..50: mol_type = other DNA
gagcagaaaacgatgctgaggaagatctttgtaattgtacttttctgctt

SEQ ID NO: 35730 - DNA, 50 bp, synthetic construct
  source 1..50: mol_type = other DNA
gcttttgggcctcacgctgaaggcgtttgcgcggcgtgagcggatatccc

SEQ ID NO: 35731 - DNA, 50 bp, synthetic construct
  source 1..50: mol_type = other DNA
cgccggggataacatggagtgcagcaggttcttccatcttatcaatgctc

SEQ ID NO: 35732 - DNA, 50 bp, synthetic construct
  source 1..50: mol_type = other DNA
gaagatggaaacctcattattaatgataacggaatcaggtatccttgtcc

SEQ ID NO: 35733 - DNA, 50 bp, synthetic construct
  source 1..50: mol_type = other DNA
aacttttttgcactcattgatagatatcactctgaaagccaataatagca

SEQ ID NO: 35734 - DNA, 50 bp, synthetic construct
  source 1..50: mol_type = other DNA
ctggtagaagtatcaagatttcctgtcggctcatcagccaaaataatatc

SEQ ID NO: 35735 - DNA, 50 bp, synthetic construct
  source 1..50: mol_type = other DNA
agtcattatcgcgaatatattaacatgtcattataataacgtaatcgact

SEQ ID NO: 35736 - DNA, 50 bp, synthetic construct
  source 1..50: mol_type = other DNA
cctgtgggagccggattccatcaacggaccaggaagaccagctccacagc

SEQ ID NO: 35737 - DNA, 50 bp, synthetic construct
  source 1..50: mol_type = other DNA
gtgtcatagtcgaacctatatatagctatcggaaggccgaggtaatctac

SEQ ID NO: 35738 - DNA, 50 bp, synthetic construct
  source 1..50: mol_type = other DNA
ctggatcgtcgacattgtgatgctcttccatcatttgcactgtgatcgaa

SEQ ID NO: 35739 - DNA, 50 bp, synthetic construct
  source 1..50: mol_type = other DNA
aaggcgtttttgctcgacaaggacggcccggtgtggatgtgcggcgagca

SEQ ID NO: 35740 - DNA, 50 bp, synthetic construct
  source 1..50: mol_type = other DNA
ctttgccgagccgcgttccgatggcggcatatgcccgcgtatctacggac

SEQ ID NO: 35741 - DNA, 50 bp, synthetic construct
  source 1..50: mol_type = other DNA
gaacccttcgcggtctgaaagctggacagcttcatcaccgccgcgcagat

SEQ ID NO: 35742 - DNA, 50 bp, synthetic construct
  source 1..50: mol_type = other DNA
gaacggacttacaacagtcaacgcaatagttgacggttgtgctgtagttg

SEQ ID NO: 35743 - DNA, 50 bp, synthetic construct
  source 1..50: mol_type = other DNA
ttaattgtctttttaaataaaaattaaacaggtggtgaactgatgcagga

SEQ ID NO: 35744 - DNA, 50 bp, synthetic construct
  source 1..50: mol_type = other DNA
cagacgacgaagagaaagagcgcagggaaagtctaactattaaaagtcaa

SEQ ID NO: 35745 - DNA, 50 bp, synthetic construct
  source 1..50: mol_type = other DNA
aaaagccggaacgagctgcaagggaaagcagttagctgatcggcaatttg

SEQ ID NO: 35746 - DNA, 50 bp, synthetic construct
  source 1..50: mol_type = other DNA
cagcccaccgacgacacgccccctcacggggccgtgacactgctgcgctg

SEQ ID NO: 35747 - DNA, 50 bp, synthetic construct
  source 1..50: mol_type = other DNA
cgacacgaagatagacaacgcaaaatactgcttttgcagtgttcgtgtta

SEQ ID NO: 35748 - DNA, 50 bp, synthetic construct
  source 1..50: mol_type = other DNA
gagctacgatatagatataacaaagataggtaacatctatataatcgctc

SEQ ID NO: 35749 - DNA, 50 bp, synthetic construct
  source 1..50: mol_type = other DNA
tccctgctggtaccgcaaataccaacagccatttcattgaggttcagaac

SEQ ID NO: 35750 - DNA, 50 bp, synthetic construct
  source 1..50: mol_type = other DNA
tttcaaggacggttcggaaattactcggactgtccgagccgtcctcggca

SEQ ID NO: 35751 - DNA, 50 bp, synthetic construct
  source 1..50: mol_type = other DNA
caataacaaattactgcatggcggcgccgacgtggacgcgctcaatattg

SEQ ID NO: 35752 - DNA, 50 bp, synthetic construct
  source 1..50: mol_type = other DNA
ctgaaattgatacaattctactcgaaaaaattaaattgtatcaatctcgg

SEQ ID NO: 35753 - DNA, 50 bp, synthetic construct
  source 1..50: mol_type = other DNA
cgcgtttttttctttgtcgtcgaagcttccgcaaggaagaacaggtcgcc

SEQ ID NO: 35754 - DNA, 50 bp, synthetic construct
  source 1..50: mol_type = other DNA
agtagagctttcgggaaagtatttccccatctggccccggcggctctatc

SEQ ID NO: 35755 - DNA, 50 bp, synthetic construct
  source 1..50: mol_type = other DNA
ttattgttacatacgaagatggaaatttccataattctctgtaatgtcac

SEQ ID NO: 35756 - DNA, 50 bp, synthetic construct
  source 1..50: mol_type = other DNA
ctgccttgccattctcgattcgataatgaaaatatagagtggcaaacgga

SEQ ID NO: 35757 - DNA, 50 bp, synthetic construct
  source 1..50: mol_type = other DNA
tgatcttcggacaggggttcaaatcccctcgcctccaccaatatgtagaa

SEQ ID NO: 35758 - DNA, 50 bp, synthetic construct
  source 1..50: mol_type = other DNA
ggagataaatccaaacgacacgccggctttttgccttgctttttctctca

SEQ ID NO: 35759 - DNA, 50 bp, synthetic construct
  source 1..50: mol_type = other DNA
agcgtaggcggcaacgcgccgctttttggatgcgcttttggcgggtttca

SEQ ID NO: 35760 - DNA, 50 bp, synthetic construct
  source 1..50: mol_type = other DNA
gacaagaaaagtaacgaaacaaaaatttttattataatacttttattaag

SEQ ID NO: 35761 - DNA, 50 bp, synthetic construct
  source 1..50: mol_type = other DNA
taaatcgtgcgttcagaggtaatatgaatttattgctgacctgcgagata

SEQ ID NO: 35762 - DNA, 50 bp, synthetic construct
  source 1..50: mol_type = other DNA
ctgcatggacgacggttctgagatcgacgcggccgaggtcgtcgatgcgc

SEQ ID NO: 35763 - DNA, 50 bp, synthetic construct
  source 1..50: mol_type = other DNA
gcaaccttaaacaacatttaattttaaatctaaaggatggaaatttaaaa

SEQ ID NO: 35764 - DNA, 50 bp, synthetic construct
  source 1..50: mol_type = other DNA
tggcggtcttggcatagatatgtcccctctagacaagctgctgaccgacg

SEQ ID NO: 35765 - DNA, 50 bp, synthetic construct
  source 1..50: mol_type = other DNA
ggaatgactgtgaccgaccgtgctgcttatcgatcggggtatgaagaaga

SEQ ID NO: 35766 - DNA, 50 bp, synthetic construct
  source 1..50: mol_type = other DNA
cagcttagaaaacttgaccgtataaattacttttcgcaaaataaaagcga

SEQ ID NO: 35767 - DNA, 50 bp, synthetic construct
  source 1..50: mol_type = other DNA
tctacagacagggcttgcaatcccccggacacccgtggctaccccatgca

SEQ ID NO: 35768 - DNA, 50 bp, synthetic construct
  source 1..50: mol_type = other DNA
tcatcatgcgggggcttattgtccgtggacaataagtcccccaaatagcg

SEQ ID NO: 35769 - DNA, 50 bp, synthetic construct
  source 1..50: mol_type = other DNA
tgggacgcaagcacggtttcctcgatcgccataacgtggctttcgccatg

SEQ ID NO: 35770 - DNA, 50 bp, synthetic construct
  source 1..50: mol_type = other DNA
ccgcattgccagaccggcagcgggcgcccgcacacacgttgaaagtgccc

SEQ ID NO: 35771 - DNA, 50 bp, synthetic construct
  source 1..50: mol_type = other DNA
acctgaaccagcttgcacgtgccgtgcgcggggtgcaagcgctatctgga

SEQ ID NO: 35772 - DNA, 50 bp, synthetic construct
  source 1..50: mol_type = other DNA
gctaagcgagtatgcgacgttctactaagaaagccgtgaagacatttaca

SEQ ID NO: 35773 - DNA, 50 bp, synthetic construct
  source 1..50: mol_type = other DNA
catggcgaaagccacgttatggcgatcgaggaaaccgtgcttgcgtccca

SEQ ID NO: 35774 - DNA, 50 bp, synthetic construct
  source 1..50: mol_type = other DNA
catgggccacctggtggttcacagcagcgtcgacggccaggtgatcgagg

SEQ ID NO: 35775 - DNA, 50 bp, synthetic construct
  source 1..50: mol_type = other DNA
ctacaccttcatcgagagaatcgatataccttctctgcctggtgatagct

SEQ ID NO: 35776 - DNA, 50 bp, synthetic construct
  source 1..50: mol_type = other DNA
agacgcgatcacgcggcatggcttgccagcactgtggcgttcttgcgacc

SEQ ID NO: 35777 - DNA, 50 bp, synthetic construct
  source 1..50: mol_type = other DNA
tcgctggttgcatatctcttttgattacaatgcgaaaagtatatcggcgt

SEQ ID NO: 35778 - DNA, 50 bp, synthetic construct
  source 1..50: mol_type = other DNA
taacccggttttgacgacgcgcaaaggggcgtttcgctcgcccctttgga

SEQ ID NO: 35779 - DNA, 50 bp, synthetic construct
  source 1..50: mol_type = other DNA
atatttaccttttaagttaataaatatttagaatcacaaaatataaatgt

SEQ ID NO: 35780 - DNA, 50 bp, synthetic construct
  source 1..50: mol_type = other DNA
ccctctttcttcttcattgatataataaacatactgaagaggaaatagca

SEQ ID NO: 35781 - DNA, 50 bp, synthetic construct
  source 1..50: mol_type = other DNA
tagttttaatcttttgcgattcgtcttttatgtgtttttttttaaaacta

SEQ ID NO: 35782 - DNA, 50 bp, synthetic construct
  source 1..50: mol_type = other DNA
cagttcgcctttggaatcaaaagtccccttttttttataaaaattttttg

SEQ ID NO: 35783 - DNA, 50 bp, synthetic construct
  source 1..50: mol_type = other DNA
atgccctcctggccgaggacccgttggtggctcgtccttcaggatgggat

SEQ ID NO: 35784 - DNA, 50 bp, synthetic construct
  source 1..50: mol_type = other DNA
ctccataaataaaagacattttgtgttaaaataaaagcaaactaatggat

SEQ ID NO: 35785 - DNA, 50 bp, synthetic construct
  source 1..50: mol_type = other DNA
cttttttagcagagataatgcctgaagaggcacgtgcttggctatttaaa

SEQ ID NO: 35786 - DNA, 50 bp, synthetic construct
  source 1..50: mol_type = other DNA
taattctcttgtatggctttcattttggtaaaaggcatataatcttatta

SEQ ID NO: 35787 - DNA, 50 bp, synthetic construct
  source 1..50: mol_type = other DNA
tatcatgtgtgtgtgtgaaaagaatattcttctttccaaaatcggagatt

SEQ ID NO: 35788 - DNA, 50 bp, synthetic construct
  source 1..50: mol_type = other DNA
aaaaaaggtaatctataccgacttataaatcggttaatcaagactatttc

SEQ ID NO: 35789 - DNA, 50 bp, synthetic construct
  source 1..50: mol_type = other DNA
tgaagacatattttctttatatgaaatcttattgtgaaaacttgtatttt

SEQ ID NO: 35790 - DNA, 50 bp, synthetic construct
  source 1..50: mol_type = other DNA
acgatgtattcaatgcaattatgattgaagcatggctttgaacacgccgc

SEQ ID NO: 35791 - DNA, 50 bp, synthetic construct
  source 1..50: mol_type = other DNA
tattggtatgatacaggtggcgggtacccggagactggattataagcatt

SEQ ID NO: 35792 - DNA, 50 bp, synthetic construct
  source 1..50: mol_type = other DNA
cgaaaccttcgatgctcttatgatcggacgctccgacatcgaaggattcg

SEQ ID NO: 35793 - DNA, 50 bp, synthetic construct
  source 1..50: mol_type = other DNA
caggcctgctatatcgcgggtaacgacttaaagcttatgaatctgctccc

SEQ ID NO: 35794 - DNA, 50 bp, synthetic construct
  source 1..50: mol_type = other DNA
catttcacttatattacttacaccgccaagcgcctaatgacaggctcatg

SEQ ID NO: 35795 - DNA, 50 bp, synthetic construct
  source 1..50: mol_type = other DNA
ataaaaaacacaaggaactattgttttttaaagttaaataatgttattat

SEQ ID NO: 35796 - DNA, 50 bp, synthetic construct
  source 1..50: mol_type = other DNA
atgcccgcgtcagttcgtcagccagctgcgcggcgaactgttgcgcagta

SEQ ID NO: 35797 - DNA, 50 bp, synthetic construct
  source 1..50: mol_type = other DNA
tggaggaagagtaccttttcctgattttttgaactcgggaagctcgtcca

SEQ ID NO: 35798 - DNA, 50 bp, synthetic construct
  source 1..50: mol_type = other DNA
ttttttcatgagtgcctccacgggagatgatggcaacgatgaagaaaacg

SEQ ID NO: 35799 - DNA, 50 bp, synthetic construct
  source 1..50: mol_type = other DNA
gcaaaaaacgcccgatctgactgaaagcttccagatgagcttgttttagc

SEQ ID NO: 35800 - DNA, 50 bp, synthetic construct
  source 1..50: mol_type = other DNA
tcgatggctaattgcatcaaggaagtcatcagcctgcacccggccatcgc

SEQ ID NO: 35801 - DNA, 50 bp, synthetic construct
  source 1..50: mol_type = other DNA
atggggatttgatcagttgaggggtttggctcaaccgaatcaatcaggaa

SEQ ID NO: 35802 - DNA, 50 bp, synthetic construct
  source 1..50: mol_type = other DNA
aagaaaaaagtgtcggaatagctgatccggaattagttcagttgctaaca

SEQ ID NO: 35803 - DNA, 50 bp, synthetic construct
  source 1..50: mol_type = other DNA
ggggcgccgatctggccctgcgcgctcccgatgggcgcgatcggcgatgt

SEQ ID NO: 35804 - DNA, 50 bp, synthetic construct
  source 1..50: mol_type = other DNA
gccgcgcggcggctggcgggttcagctctaccactgagctaccgcggaac

SEQ ID NO: 35805 - DNA, 50 bp, synthetic construct
  source 1..50: mol_type = other DNA
tgtcgggtaagtgcttgatcgcgaactcgcgtatctgcgcgaacccgacg

SEQ ID NO: 35806 - DNA, 50 bp, synthetic construct
  source 1..50: mol_type = other DNA
gactcatggtagcacgaccagccagctggcaaggaaggttctcatgtctt

SEQ ID NO: 35807 - DNA, 50 bp, synthetic construct
  source 1..50: mol_type = other DNA
gggttcttcagtacatcgccggtctttggtggcggtgtcctttagaacct

SEQ ID NO: 35808 - DNA, 50 bp, synthetic construct
  source 1..50: mol_type = other DNA
ggcagcgctcgaaaatgggggtggatcctcggccatctcggagcggtcat

SEQ ID NO: 35809 - DNA, 50 bp, synthetic construct
  source 1..50: mol_type = other DNA
ttctttatgaagataatatttcagttatataataaaatcaatataaatcc

SEQ ID NO: 35810 - DNA, 50 bp, synthetic construct
  source 1..50: mol_type = other DNA
ttaattttaatagtatttgcacttcaaagtcttttaactcttttgatttt

SEQ ID NO: 35811 - DNA, 50 bp, synthetic construct
  source 1..50: mol_type = other DNA
ccgcaagtgctgtccatgagcggcgtgctgccaatggacaggccacccgc

SEQ ID NO: 35812 - DNA, 50 bp, synthetic construct
  source 1..50: mol_type = other DNA
aaattatgcattttttaaaattatatattaatgtaaataaatgttaaaaa

SEQ ID NO: 35813 - DNA, 50 bp, synthetic construct
  source 1..50: mol_type = other DNA
cggcgtgtcgccgcgccttgcgcgatcgtgtgttccaccacgcgacggcg

SEQ ID NO: 35814 - DNA, 50 bp, synthetic construct
  source 1..50: mol_type = other DNA
atttgctttatttctatcaattatcgatatccgtgagaagtcctttacat

SEQ ID NO: 35815 - DNA, 50 bp, synthetic construct
  source 1..50: mol_type = other DNA
aaaaattattacaaacttaaagaaaattcaatttgtcttttgtaatttat

SEQ ID NO: 35816 - DNA, 50 bp, synthetic construct
  source 1..50: mol_type = other DNA
atattgttcatcagaagtagtggatatgcacagactcttttcttttgtag

SEQ ID NO: 35817 - DNA, 50 bp, synthetic construct
  source 1..50: mol_type = other DNA
caagtcgctcatcaaagtctctaaattttgacactttgaaagtaattgta

SEQ ID NO: 35818 - DNA, 50 bp, synthetic construct
  source 1..50: mol_type = other DNA
gtgggggatgttcaccgtgttaatagattactctttaaaacatcggtagt

SEQ ID NO: 35819 - DNA, 50 bp, synthetic construct
  source 1..50: mol_type = other DNA
ggggttggtagatgattcggatgaagaatacttcttcaaagtactacctg

SEQ ID NO: 35820 - DNA, 50 bp, synthetic construct
  source 1..50: mol_type = other DNA
taatgctgaaggtcaccagacgcttaagcgcctttgaagctcgctcatta

SEQ ID NO: 35821 - DNA, 50 bp, synthetic construct
  source 1..50: mol_type = other DNA
cgcttattgtttcggggtatgtgacgtatatagagggggaactcgtcctc

SEQ ID NO: 35822 - DNA, 50 bp, synthetic construct
  source 1..50: mol_type = other DNA
ggcgggatcgcgtattatcaggtgaaaagtatccgataaagtgatataat

SEQ ID NO: 35823 - DNA, 50 bp, synthetic construct
  source 1..50: mol_type = other DNA
aattacttatggcagattgtcataattgtgagtttctatgataagaagtt

SEQ ID NO: 35824 - DNA, 50 bp, synthetic construct
  source 1..50: mol_type = other DNA
gtatatactggattggatattatatatataatagttatatacttttattc

SEQ ID NO: 35825 - DNA, 50 bp, synthetic construct
  source 1..50: mol_type = other DNA
gagggcggtctctgtattattgccgaagaaataatacaggccccggcatt

SEQ ID NO: 35826 - DNA, 50 bp, synthetic construct
  source 1..50: mol_type = other DNA
cactgaactgtacttcatgttctaattattataataaatactctaacaat

SEQ ID NO: 35827 - DNA, 50 bp, synthetic construct
  source 1..50: mol_type = other DNA
gccccgtccactggttcggggctcggcgggcgcttaccagtgggcggggc

SEQ ID NO: 35828 - DNA, 50 bp, synthetic construct
  source 1..50: mol_type = other DNA
gccggagttggttgatttcgtccgcgaggtcgcctgccgcaccatcccca

SEQ ID NO: 35829 - DNA, 50 bp, synthetic construct
  source 1..50: mol_type = other DNA
ggtcgtgccgcgcaaggaacttttcgaagggccagacgggcaccttcccc

SEQ ID NO: 35830 - DNA, 50 bp, synthetic construct
  source 1..50: mol_type = other DNA
gaacgacaaagcgccaagctgttacgcctcaccgatgcgcagccccgcgc

SEQ ID NO: 35831 - DNA, 50 bp, synthetic construct
  source 1..50: mol_type = other DNA
ggccgttgaggacggcaaggtcgatggcgaccttgacccccagcgcggcc

SEQ ID NO: 35832 - DNA, 50 bp, synthetic construct
  source 1..50: mol_type = other DNA
atgaaggtgctgccctatttgaatttgttctcacagggcttctacgggta

SEQ ID NO: 35833 - DNA, 50 bp, synthetic construct
  source 1..50: mol_type = other DNA
ggaagccgaacatgcgctcgacgcggcccgcgtgcggaaagacgcggtcc

SEQ ID NO: 35834 - DNA, 50 bp, synthetic construct
  source 1..50: mol_type = other DNA
ctattccgagcatttttatttataaataagaataaaaagggtagtgatag

SEQ ID NO: 35835 - DNA, 50 bp, synthetic construct
  source 1..50: mol_type = other DNA
gccgcgtcgacggcgtcggaagcgcccggcaatgtcgcggacgacgtcgg

SEQ ID NO: 35836 - DNA, 50 bp, synthetic construct
  source 1..50: mol_type = other DNA
tgccgagtgcgacccgctccactgcgacgtggatcgggtcgcgcacgcca

SEQ ID NO: 35837 - DNA, 50 bp, synthetic construct
  source 1..50: mol_type = other DNA
cgccacccgagcgccctcccccgctggtggtctgggccgccgcggcggca

SEQ ID NO: 35838 - DNA, 50 bp, synthetic construct
  source 1..50: mol_type = other DNA
tgccgctagggaaatagacttacgttgctgagtcttatacgatgctatcg

SEQ ID NO: 35839 - DNA, 50 bp, synthetic construct
  source 1..50: mol_type = other DNA
cataagttatgtttttctttccaaaaatataaataaaaaaataacgggcc

SEQ ID NO: 35840 - DNA, 50 bp, synthetic construct
  source 1..50: mol_type = other DNA
caaagaaagaagctgctaaagctggttggttttttcagcttctgttaagt

SEQ ID NO: 35841 - DNA, 50 bp, synthetic construct
  source 1..50: mol_type = other DNA
acctgcatcaggttgttttttgtttcttcaaagtactacctgtaccagca

SEQ ID NO: 35842 - DNA, 50 bp, synthetic construct
  source 1..50: mol_type = other DNA
cttcgcgagcccctgacggctgacgctgtcgcgagcgtctcctccacaac

SEQ ID NO: 35843 - DNA, 50 bp, synthetic construct
  source 1..50: mol_type = other DNA
actatggccgggcgtttcgcgttccgggagtgtagagctgtatgctgttg

SEQ ID NO: 35844 - DNA, 50 bp, synthetic construct
  source 1..50: mol_type = other DNA
gcctttatattttactctccccataaacgttatggctaatgctacaatgc

SEQ ID NO: 35845 - DNA, 50 bp, synthetic construct
  source 1..50: mol_type = other DNA
attgagcgcattgaggctcaggcaaaaccctgtttcagtcctatctgaca

SEQ ID NO: 35846 - DNA, 50 bp, synthetic construct
  source 1..50: mol_type = other DNA
gtcttatagaaagtgaggtgcatgaaaggcatccgtttcttctctaaact

SEQ ID NO: 35847 - DNA, 50 bp, synthetic construct
  source 1..50: mol_type = other DNA
tcgcctgcggactgaacaacatccaggagcgcaactcaggctacaggcgg

SEQ ID NO: 35848 - DNA, 50 bp, synthetic construct
  source 1..50: mol_type = other DNA
gatgagttggacagacgagatgaaacaagctcaacgagcatattctcatc

SEQ ID NO: 35849 - DNA, 50 bp, synthetic construct
  source 1..50: mol_type = other DNA
tgaaagtatagttaatatccaatcaagagcgcgtattaactttttcgtcg

SEQ ID NO: 35850 - DNA, 50 bp, synthetic construct
  source 1..50: mol_type = other DNA
tgcacccgacccctcgggtgtggtataccgcatccgagggaacgggactg

SEQ ID NO: 35851 - DNA, 50 bp, synthetic construct
  source 1..50: mol_type = other DNA
aaacggtttaacgaagatggtgaaatatcatgattctcgtttaaaatttt

SEQ ID NO: 35852 - DNA, 50 bp, synthetic construct
  source 1..50: mol_type = other DNA
tttattgatatgttgataaatagttttacagttaattttatatacatatc

SEQ ID NO: 35853 - DNA, 50 bp, synthetic construct
  source 1..50: mol_type = other DNA
agagtcaaaaaagctgacttggaaaatatcacaggaccttttttatatct

SEQ ID NO: 35854 - DNA, 50 bp, synthetic construct
  source 1..50: mol_type = other DNA
ttctcccataattatcctatagcgtgcggtataatatgctcatgaaacta

SEQ ID NO: 35855 - DNA, 50 bp, synthetic construct
  source 1..50: mol_type = other DNA
ttgtatcaaaaaaggtaatctataccatgaaattacaattattgaaatca

SEQ ID NO: 35856 - DNA, 50 bp, synthetic construct
  source 1..50: mol_type = other DNA
agaatcagagcacttaaacaacataaatgttgcatatgttacattattgt

SEQ ID NO: 35857 - DNA, 50 bp, synthetic construct
  source 1..50: mol_type = other DNA
tttacgttcagtttctgcattacgttggaaatatggttacgcaccgtctt

SEQ ID NO: 35858 - DNA, 50 bp, synthetic construct
  source 1..50: mol_type = other DNA
cacacatgagaaaattatcatttgagtaatgattatttttatcatgtttg

SEQ ID NO: 35859 - DNA, 50 bp, synthetic construct
  source 1..50: mol_type = other DNA
tatgaatttgtgatgtaacataatgtaaatcttcatataaaaaacgctga

SEQ ID NO: 35860 - DNA, 50 bp, synthetic construct
  source 1..50: mol_type = other DNA
aaaatgaatccagcaaaaagctaaatccaataaaacattgctctgatttt

SEQ ID NO: 35861 - DNA, 50 bp, synthetic construct
  source 1..50: mol_type = other DNA
cgtcccttgcgcttttgaggaaagctccttcgcggaattcgcgcgggagg

SEQ ID NO: 35862 - DNA, 50 bp, synthetic construct
  source 1..50: mol_type = other DNA
cggcacggtccggccggtgcgcggcgcctgccgccggatcgagcgtgccg

SEQ ID NO: 35863 - DNA, 50 bp, synthetic construct
  source 1..50: mol_type = other DNA
gcaagagaagcaatgaaaaaaagagactgtttgctctttcttcttcttct

SEQ ID NO: 35864 - DNA, 50 bp, synthetic construct
  source 1..50: mol_type = other DNA
gccggtggacgatggcaccgcgcgccggcccccactgatcggaggccggg

SEQ ID NO: 35865 - DNA, 50 bp, synthetic construct
  source 1..50: mol_type = other DNA
cgccccgcacccgtgctgtcggccgccccggacccttagggtccggggcc

SEQ ID NO: 35866 - DNA, 50 bp, synthetic construct
  source 1..50: mol_type = other DNA
ctgcgtggcgccatgtggcgcgcattcacggtcagcatggtgacccgcga

SEQ ID NO: 35867 - DNA, 50 bp, synthetic construct
  source 1..50: mol_type = other DNA
tactgtatccacaggggattcagacgggataaagccctcgctgggggcca

SEQ ID NO: 35868 - DNA, 50 bp, synthetic construct
  source 1..50: mol_type = other DNA
ggcaaccgggccggctatttatggcgcagcgtgtcgcccgcgcccgcgcc

SEQ ID NO: 35869 - DNA, 50 bp, synthetic construct
  source 1..50: mol_type = other DNA
gccttgtccggcaggccgacgatctgcatgccgaccttgcccggtgcgat

SEQ ID NO: 35870 - DNA, 50 bp, synthetic construct
  source 1..50: mol_type = other DNA
gccggttaaccggccggctatttatcgacgaagccgtcaaccacgccggc

SEQ ID NO: 35871 - DNA, 50 bp, synthetic construct
  source 1..50: mol_type = other DNA
ttgagcttgaatctcggccggtctacagaccggtaacggccccatttcgg

SEQ ID NO: 35872 - DNA, 50 bp, synthetic construct
  source 1..50: mol_type = other DNA
ggtgatctccagaccaacggagacgcccctccaacgccaagacgatcacc

SEQ ID NO: 35873 - DNA, 50 bp, synthetic construct
  source 1..50: mol_type = other DNA
gagcttgtgccagatttggcttttgtctagtccaggtctggctcctgcag

SEQ ID NO: 35874 - DNA, 50 bp, synthetic construct
  source 1..50: mol_type = other DNA
cacctgattccagcgggcttccaccggcgaaagcctgctgcgatggggtg

SEQ ID NO: 35875 - DNA, 50 bp, synthetic construct
  source 1..50: mol_type = other DNA
gcaaaagggtggctcactaagggattgcactgtgtgtgcctcctttcgat

SEQ ID NO: 35876 - DNA, 50 bp, synthetic construct
  source 1..50: mol_type = other DNA
atggctgtgatgaagctatatgtgtccctttataacggtgtcaggaaccc

SEQ ID NO: 35877 - DNA, 50 bp, synthetic construct
  source 1..50: mol_type = other DNA
taggctgcaactcttatcttcttctgcaacggttcttccagtgcagccgt

SEQ ID NO: 35878 - DNA, 50 bp, synthetic construct
  source 1..50: mol_type = other DNA
cgggcctcttttttgcctgtaaaaattttgtcagcgaaacaggcgtatct

SEQ ID NO: 35879 - DNA, 50 bp, synthetic construct
  source 1..50: mol_type = other DNA
acgggctatccgaaagaggaatacgaagattcaggattgggatgcagcgc

SEQ ID NO: 35880 - DNA, 50 bp, synthetic construct
  source 1..50: mol_type = other DNA
tcgcaagaggagagccggatacttttgccgtgctgcctcgcgcctttcag

SEQ ID NO: 35881 - DNA, 50 bp, synthetic construct
  source 1..50: mol_type = other DNA
acacgagcataggctgcgactcttcgcttcatagcctcttggcacggtgt

SEQ ID NO: 35882 - DNA, 50 bp, synthetic construct
  source 1..50: mol_type = other DNA
cagcagagaaactgtgcggtagccgcccgcggcaagcagtttgagagccg

SEQ ID NO: 35883 - DNA, 50 bp, synthetic construct
  source 1..50: mol_type = other DNA
ataaaattgcaaatgaattatagaaagttattgacaaatacgtattttat

SEQ ID NO: 35884 - DNA, 50 bp, synthetic construct
  source 1..50: mol_type = other DNA
agaacttatcctgggtggatgtgagaccagctccacagttttgaagctca

SEQ ID NO: 35885 - DNA, 50 bp, synthetic construct
  source 1..50: mol_type = other DNA
tagaactttccgaagaaacactggctgttccgggatatcggacggttctt

SEQ ID NO: 35886 - DNA, 50 bp, synthetic construct
  source 1..50: mol_type = other DNA
cttcgtccgtcctttcggaatttcaagaaatctctgcaggtgcaggaatt

SEQ ID NO: 35887 - DNA, 50 bp, synthetic construct
  source 1..50: mol_type = other DNA
aacagagcatcatcaaattcctgaagtttcccgattgatggcggttaatt

SEQ ID NO: 35888 - DNA, 50 bp, synthetic construct
  source 1..50: mol_type = other DNA
tatgtcgcaaaaatgatgtaatataagaatgactactttttctagacata

SEQ ID NO: 35889 - DNA, 50 bp, synthetic construct
  source 1..50: mol_type = other DNA
ggacataccactcaaataattcttatatatcaacggatttcgggcataat

SEQ ID NO: 35890 - DNA, 50 bp, synthetic construct
  source 1..50: mol_type = other DNA
cgccctcgcggaagatgggggcgcgcctgtttcccgtgcgatatagcttt

SEQ ID NO: 35891 - DNA, 50 bp, synthetic construct
  source 1..50: mol_type = other DNA
gggaaaaggtttatataaactaagtacttagttttctataacctaacgga

SEQ ID NO: 35892 - DNA, 50 bp, synthetic construct
  source 1..50: mol_type = other DNA
cagttgttcatattccgctttggcttttacaaaatgtatatttacatctt

SEQ ID NO: 35893 - DNA, 50 bp, synthetic construct
  source 1..50: mol_type = other DNA
tgtcctttcctattttatgccaacaataaaacataagaatgaaaccgacc

SEQ ID NO: 35894 - DNA, 50 bp, synthetic construct
  source 1..50: mol_type = other DNA
atggagtcttccttgaaaatttctcccagtattttcaagggtttgcactc

SEQ ID NO: 35895 - DNA, 50 bp, synthetic construct
  source 1..50: mol_type = other DNA
caaatgtagaaactatctgcaggctgtagtaggagcaatcattacattct

SEQ ID NO: 35896 - DNA, 50 bp, synthetic construct
  source 1..50: mol_type = other DNA
tttcttctcctttggagatgccatgattcaatagaccatgctgaaagagc

SEQ ID NO: 35897 - DNA, 50 bp, synthetic construct
  source 1..50: mol_type = other DNA
gtgcttttattgacgtcaacaatttgccttttggatatcagatgaatgaa

SEQ ID NO: 35898 - DNA, 50 bp, synthetic construct
  source 1..50: mol_type = other DNA
ttccgctgaaatcgctggatatatgcggataagccgccaatacagcggaa

SEQ ID NO: 35899 - DNA, 50 bp, synthetic construct
  source 1..50: mol_type = other DNA
ttgaaaaagaacatatcaataccgcaaactaatggtagcggttatttcag

SEQ ID NO: 35900 - DNA, 50 bp, synthetic construct
  source 1..50: mol_type = other DNA
ggcacacaataaaaattctccatcatgaaatgattgttcagaagtgtgct

SEQ ID NO: 35901 - DNA, 50 bp, synthetic construct
  source 1..50: mol_type = other DNA
gacgtaataagcgggaaaaagagcttgtttggatagttcgttattaagtg

SEQ ID NO: 35902 - DNA, 50 bp, synthetic construct
  source 1..50: mol_type = other DNA
aatgtaatttattaaaaatggtaatattcacttttcgaagtgtttacgct

SEQ ID NO: 35903 - DNA, 50 bp, synthetic construct
  source 1..50: mol_type = other DNA
ggtgccctgcccgtcttaggcagggtgtagcctgcggcctttgcggcagc

SEQ ID NO: 35904 - DNA, 50 bp, synthetic construct
  source 1..50: mol_type = other DNA
gcctcaaaactatgaagctgatcttcggtgtagcctgcggcctttgcggc

SEQ ID NO: 35905 - DNA, 50 bp, synthetic construct
  source 1..50: mol_type = other DNA
ctgggtagatgggtatatcttgtgtacacaagatatatccatctgtggaa

SEQ ID NO: 35906 - DNA, 50 bp, synthetic construct
  source 1..50: mol_type = other DNA
agtataccagacagccggatcctgatcagacaatagcagtctgtgatatt

SEQ ID NO: 35907 - DNA, 50 bp, synthetic construct
  source 1..50: mol_type = other DNA
gagtaccctcggaaaaaggagaaatattgcgtcttttaagctaaaataaa

SEQ ID NO: 35908 - DNA, 50 bp, synthetic construct
  source 1..50: mol_type = other DNA
tatctacgagctggcttgtgggcataagggcgatctccgcctgttcgagc

SEQ ID NO: 35909 - DNA, 50 bp, synthetic construct
  source 1..50: mol_type = other DNA
gcgaagaaatacgttaaaattgcggatgccgtgatggagtatcaggagcg

SEQ ID NO: 35910 - DNA, 50 bp, synthetic construct
  source 1..50: mol_type = other DNA
cccgatttccgccgcgtagagagcttgcctgcggcgcgggcgcatccggg

SEQ ID NO: 35911 - DNA, 50 bp, synthetic construct
  source 1..50: mol_type = other DNA
caaagaggctgtagaggaaagatatagcgaagaacattataagctctttc

SEQ ID NO: 35912 - DNA, 50 bp, synthetic construct
  source 1..50: mol_type = other DNA
atgccagacataatgcaaaaaacccacaggatttgataccccggcggctt

SEQ ID NO: 35913 - DNA, 50 bp, synthetic construct
  source 1..50: mol_type = other DNA
cggcgtgggcgaaaacctgatcacctctgggcaggttttatcctgcacca

SEQ ID NO: 35914 - DNA, 50 bp, synthetic construct
  source 1..50: mol_type = other DNA
taactgaaataaaccgtgaaacattcctgttccacatcctatttctacta

SEQ ID NO: 35915 - DNA, 50 bp, synthetic construct
  source 1..50: mol_type = other DNA
acatcataaaatgtatcttctttatcctcagaattcacatttccatttgt

SEQ ID NO: 35916 - DNA, 50 bp, synthetic construct
  source 1..50: mol_type = other DNA
agctctgcgatggtctggttaaactcgttggccttaccaacagcgttggt

SEQ ID NO: 35917 - DNA, 50 bp, synthetic construct
  source 1..50: mol_type = other DNA
acttggatcgaatcagagaagctttaccgcttctcctattacggagcaga

SEQ ID NO: 35918 - DNA, 50 bp, synthetic construct
  source 1..50: mol_type = other DNA
ggaatttggtcatgcaaagcgaggtggggcgcttttaatgatataattgt

SEQ ID NO: 35919 - DNA, 50 bp, synthetic construct
  source 1..50: mol_type = other DNA
tttataatataaaaaatacccagtagatattaatttttttctataataat

SEQ ID NO: 35920 - DNA, 50 bp, synthetic construct
  source 1..50: mol_type = other DNA
ttacacgatgccgtatcgggaagttatcacacaagacgctgacagtgcgt

SEQ ID NO: 35921 - DNA, 50 bp, synthetic construct
  source 1..50: mol_type = other DNA
attatttgccgacatatcgttgacttgtaaacaatgttccggacggattg

SEQ ID NO: 35922 - DNA, 50 bp, synthetic construct
  source 1..50: mol_type = other DNA
tggacagacatttgatattgtcagtgtaaacaatgttccggacggattgt

SEQ ID NO: 35923 - DNA, 50 bp, synthetic construct
  source 1..50: mol_type = other DNA
caaaagatgaatttttaagtgaatgtatcggcgttcaaatcgaagcattg

SEQ ID NO: 35924 - DNA, 50 bp, synthetic construct
  source 1..50: mol_type = other DNA
aatccgaaagcgaaaaattataatgagtaaaggcgaccttctttgtagtt

SEQ ID NO: 35925 - DNA, 50 bp, synthetic construct
  source 1..50: mol_type = other DNA
aaaggcttgaaatccttgattttacgtaaaaggtgggccttcgtttatgg

SEQ ID NO: 35926 - DNA, 50 bp, synthetic construct
  source 1..50: mol_type = other DNA
atcaatctcatttgcaacgtcttcatatagacgctctaaaccagacacat

SEQ ID NO: 35927 - DNA, 50 bp, synthetic construct
  source 1..50: mol_type = other DNA
gaatgcggaaagcgcagctggcagaaaactcaagaatgttttagaacagc

SEQ ID NO: 35928 - DNA, 50 bp, synthetic construct
  source 1..50: mol_type = other DNA
atactccgcattttttatttgcggaaaaggtcgaaaaaaagatcgcatat

SEQ ID NO: 35929 - DNA, 50 bp, synthetic construct
  source 1..50: mol_type = other DNA
ttttagcgtgtttcggacttgctgtccagcacggtctgaacaccaccgat

SEQ ID NO: 35930 - DNA, 50 bp, synthetic construct
  source 1..50: mol_type = other DNA
accgtggcatcctcaatatccaaggttaagggcttccagcagggcacggt

SEQ ID NO: 35931 - DNA, 50 bp, synthetic construct
  source 1..50: mol_type = other DNA
aaagggcagcagtggcacgtgcgatagcgctgttgtgaatacaatactta

SEQ ID NO: 35932 - DNA, 50 bp, synthetic construct
  source 1..50: mol_type = other DNA
cgtcagcggattgatggtcggcggaatccgcacccagcaaggcacggacg

SEQ ID NO: 35933 - DNA, 50 bp, synthetic construct
  source 1..50: mol_type = other DNA
aggaggcagattatgtgtatattatatcttgcataatgagcgatatatcg

SEQ ID NO: 35934 - DNA, 50 bp, synthetic construct
  source 1..50: mol_type = other DNA
gaagatatagcgtctttaatactttttagtattaaagacgctatatcttt

SEQ ID NO: 35935 - DNA, 50 bp, synthetic construct
  source 1..50: mol_type = other DNA
gcggtgaatatccaccttgagttgcggataaattcctgcatgagcagcgc

SEQ ID NO: 35936 - DNA, 50 bp, synthetic construct
  source 1..50: mol_type = other DNA
ctatacaaataataccgggaggacgatgcttgcctgttttttttatttat

SEQ ID NO: 35937 - DNA, 50 bp, synthetic construct
  source 1..50: mol_type = other DNA
cgcggtaaagcaggaagtgcttctggtgtgccacttcctgctgaacacct

SEQ ID NO: 35938 - DNA, 50 bp, synthetic construct
  source 1..50: mol_type = other DNA
aaacaaaatatatcgcggaagaccgcggtcttatcgtgaagaatatgtcg

SEQ ID NO: 35939 - DNA, 50 bp, synthetic construct
  source 1..50: mol_type = other DNA
gatttctccatcaaaacatggtatatacggcagcagcatatggtagacca

SEQ ID NO: 35940 - DNA, 50 bp, synthetic construct
  source 1..50: mol_type = other DNA
gaagatgaagacgcagaaaaagaaccgtcctttattgtgtctgtatatta

SEQ ID NO: 35941 - DNA, 50 bp, synthetic construct
  source 1..50: mol_type = other DNA
cgcggagcgagccgaagagctcaaggcttttatcgacagcgatatcgacg

SEQ ID NO: 35942 - DNA, 50 bp, synthetic construct
  source 1..50: mol_type = other DNA
acgattattgttgtatattcaagataccctggcctccgagcaataatcgc

SEQ ID NO: 35943 - DNA, 50 bp, synthetic construct
  source 1..50: mol_type = other DNA
cacccctgcaccggacgagatggtgcatatcgcgatttggtgcgaacctc

SEQ ID NO: 35944 - DNA, 50 bp, synthetic construct
  source 1..50: mol_type = other DNA
gtcctcggcccacgcagataccggcacccgtaaaggccaccatgtgcctg

SEQ ID NO: 35945 - DNA, 50 bp, synthetic construct
  source 1..50: mol_type = other DNA
gttgcctttgaatccagtgctcctgttggctcatctgccaaaattaattc

SEQ ID NO: 35946 - DNA, 50 bp, synthetic construct
  source 1..50: mol_type = other DNA
cctgcggtagtgcagcacaaaaaagatgggatgagcacgtcggccacaag

SEQ ID NO: 35947 - DNA, 50 bp, synthetic construct
  source 1..50: mol_type = other DNA
tggcagtgttggggtcagcggttcgacaacgcttgacaacacggttggtt

SEQ ID NO: 35948 - DNA, 50 bp, synthetic construct
  source 1..50: mol_type = other DNA
ctctggcggctgctttaaggccgaagatggcgaaaactcagccctcagat

SEQ ID NO: 35949 - DNA, 50 bp, synthetic construct
  source 1..50: mol_type = other DNA
aatgtgcaaaagaaaaaaggcccatctgggccttttgctgtattcgattc

SEQ ID NO: 35950 - DNA, 50 bp, synthetic construct
  source 1..50: mol_type = other DNA
cgaaaaaatcaacgtagaatcgggcgccggagttgcctttgattttatta

SEQ ID NO: 35951 - DNA, 50 bp, synthetic construct
  source 1..50: mol_type = other DNA
gcctatgtaaagcaagaaatcccacggccagcagctgcgccggggcaggc

SEQ ID NO: 35952 - DNA, 50 bp, synthetic construct
  source 1..50: mol_type = other DNA
gagaaaacacttgctattattggtttcataatagtacctcctgttttctt

SEQ ID NO: 35953 - DNA, 50 bp, synthetic construct
  source 1..50: mol_type = other DNA
ttcggaaatgttaaaataaataagcatttttttatttttacatacacgaa

SEQ ID NO: 35954 - DNA, 50 bp, synthetic construct
  source 1..50: mol_type = other DNA
aatgctcgccagcgacccgggacgttgcggtcgtgatgctgtcgattacc

SEQ ID NO: 35955 - DNA, 50 bp, synthetic construct
  source 1..50: mol_type = other DNA
tgcgaactgcggggcgattttatctatgcagtatcgccgcaacattatac

SEQ ID NO: 35956 - DNA, 50 bp, synthetic construct
  source 1..50: mol_type = other DNA
ttttttctacaatagttaatttgtcaataaatataaaggtgtcagacaat

SEQ ID NO: 35957 - DNA, 50 bp, synthetic construct
  source 1..50: mol_type = other DNA
atatattccatataatacgttccgcaggtcgagtattatacaaaatatat

SEQ ID NO: 35958 - DNA, 50 bp, synthetic construct
  source 1..50: mol_type = other DNA
aaagtatgaagctatggaacgctccggacggttcttcttctatggccttt

SEQ ID NO: 35959 - DNA, 50 bp, synthetic construct
  source 1..50: mol_type = other DNA
accgtgccctgctggaagcccttaaccttggatattgaggatgccacggt

SEQ ID NO: 35960 - DNA, 50 bp, synthetic construct
  source 1..50: mol_type = other DNA
attgccgatattagcttttaagatcttactccgttgataagctcgacctc

SEQ ID NO: 35961 - DNA, 50 bp, synthetic construct
  source 1..50: mol_type = other DNA
catttgtaaaaagccgtgaaaatgcaaatttttccagctgctttcttgct

SEQ ID NO: 35962 - DNA, 50 bp, synthetic construct
  source 1..50: mol_type = other DNA
gtgaaagcagccagatggagctgtttccgtttccatccttcagctttctg

SEQ ID NO: 35963 - DNA, 50 bp, synthetic construct
  source 1..50: mol_type = other DNA
aatcaacgaaagcgctcgaaatctcacccctagctaaataatcgttgagc

SEQ ID NO: 35964 - DNA, 50 bp, synthetic construct
  source 1..50: mol_type = other DNA
tcaaaaatacggcagagaatcctgcgcaggtttccccgcccacttcttcc

SEQ ID NO: 35965 - DNA, 50 bp, synthetic construct
  source 1..50: mol_type = other DNA
gccaatctgtataatcataaccgaaggcggaactcaatggttcccttggt

SEQ ID NO: 35966 - DNA, 50 bp, synthetic construct
  source 1..50: mol_type = other DNA
tgcggtagcgccgctcgatcttatgcagtctatgcagtatcgccgcaaca

SEQ ID NO: 35967 - DNA, 50 bp, synthetic construct
  source 1..50: mol_type = other DNA
agtgaaaagctgtaaatagctttcaaaaatactataaagaggaaatccaa

SEQ ID NO: 35968 - DNA, 50 bp, synthetic construct
  source 1..50: mol_type = other DNA
ataaccggccctttatattaaaaggacacattcgataaagcgcagattat

SEQ ID NO: 35969 - DNA, 50 bp, synthetic construct
  source 1..50: mol_type = other DNA
ggcttttcttgttatatgggaaaatcaattcccctgcggagcttgaagag

SEQ ID NO: 35970 - DNA, 50 bp, synthetic construct
  source 1..50: mol_type = other DNA
cattctcgcggatgtacctctgtgtccattatcatctgcaaacggaattg

SEQ ID NO: 35971 - DNA, 50 bp, synthetic construct
  source 1..50: mol_type = other DNA
ttcttccaaaagtacgaagtggagtttgtgctcttgtctataatagtgag

SEQ ID NO: 35972 - DNA, 50 bp, synthetic construct
  source 1..50: mol_type = other DNA
cgggcgacgcgcgagactttacggtgccgtaaaccttcttcagcccgaaa

SEQ ID NO: 35973 - DNA, 50 bp, synthetic construct
  source 1..50: mol_type = other DNA
aagtttaagaaacagagggagaaatttttacccaacaatatctttaatta

SEQ ID NO: 35974 - DNA, 50 bp, synthetic construct
  source 1..50: mol_type = other DNA
gaatgctgcaggcaggagcctgctgaagcagcgcttgacctgcggcagcg

SEQ ID NO: 35975 - DNA, 50 bp, synthetic construct
  source 1..50: mol_type = other DNA
ggatctgatacccgtataacaccttgaggtcataggcggtgatcacatcg

SEQ ID NO: 35976 - DNA, 50 bp, synthetic construct
  source 1..50: mol_type = other DNA
tataatgacctttcgggaggcagcggactgccccatcgcagatgatggcc

SEQ ID NO: 35977 - DNA, 50 bp, synthetic construct
  source 1..50: mol_type = other DNA
cgtccgtggatttttggtcggacgttcagccttggatggcatcacgtctc

SEQ ID NO: 35978 - DNA, 50 bp, synthetic construct
  source 1..50: mol_type = other DNA
aaggtggtaaatcatgaacgaaaacgttttggtagtctatatatcactct

SEQ ID NO: 35979 - DNA, 50 bp, synthetic construct
  source 1..50: mol_type = other DNA
ctcttgcatttcaacgcagaaaagccctcatcgtagatgtgctgcaagag

SEQ ID NO: 35980 - DNA, 50 bp, synthetic construct
  source 1..50: mol_type = other DNA
gtcggtggaatgactgtgaccgaccggtcggggtcagcctgcgcacggca

SEQ ID NO: 35981 - DNA, 50 bp, synthetic construct
  source 1..50: mol_type = other DNA
gacacgcttgtccgcgccctgctgggcgggttgcggcttacgcccgtgtc

SEQ ID NO: 35982 - DNA, 50 bp, synthetic construct
  source 1..50: mol_type = other DNA
ttccgtttgcagatgataatggaattttttgttattaccgaccaaaggag

SEQ ID NO: 35983 - DNA, 50 bp, synthetic construct
  source 1..50: mol_type = other DNA
aatcaattctgacgatgaaggaattgtttccttcgctggcagtctggaag

SEQ ID NO: 35984 - DNA, 50 bp, synthetic construct
  source 1..50: mol_type = other DNA
tgaacttccatcggctgaaactattcagagtggaaggtcatggaggttct

SEQ ID NO: 35985 - DNA, 50 bp, synthetic construct
  source 1..50: mol_type = other DNA
tcggaattttctggtttttgcagaagtctgcgaatgtcaagccatcttga

SEQ ID NO: 35986 - DNA, 50 bp, synthetic construct
  source 1..50: mol_type = other DNA
ccgtactgcttttctcggctttttgacaatatgtattatgcgcatagcgc

SEQ ID NO: 35987 - DNA, 50 bp, synthetic construct
  source 1..50: mol_type = other DNA
atattatggaaataaccgaagcagagctttctaaacgccgattataatac

SEQ ID NO: 35988 - DNA, 50 bp, synthetic construct
  source 1..50: mol_type = other DNA
ccggcgttatttccgcagcttcgcatacggccagtccataatgccgccga

SEQ ID NO: 35989 - DNA, 50 bp, synthetic construct
  source 1..50: mol_type = other DNA
tcgctcttccccaccacgtcgccgatcagggaggtgaattggaagatggc

SEQ ID NO: 35990 - DNA, 50 bp, synthetic construct
  source 1..50: mol_type = other DNA
tgttatgacctgcatttatgtacaaaattgccaaaattgcggttataaca

SEQ ID NO: 35991 - DNA, 50 bp, synthetic construct
  source 1..50: mol_type = other DNA
acttacaggagcggatgttttatttttatataacctccgtgttttgaaat

SEQ ID NO: 35992 - DNA, 50 bp, synthetic construct
  source 1..50: mol_type = other DNA
aattatcatgggcacagcttaagtttgcaccagctttctacatttctgat

SEQ ID NO: 35993 - DNA, 50 bp, synthetic construct
  source 1..50: mol_type = other DNA
ctttttgcaaaaatattatcttgcctttcggaatatattttttcaaaatc

SEQ ID NO: 35994 - DNA, 50 bp, synthetic construct
  source 1..50: mol_type = other DNA
tattgcttgaaaattgtgcaatgcgcgctgcttgaagctggcattcaaag

SEQ ID NO: 35995 - DNA, 50 bp, synthetic construct
  source 1..50: mol_type = other DNA
cttattgtactacacatttttgtgaagaggcaaatgggtagtcagataca

SEQ ID NO: 35996 - DNA, 50 bp, synthetic construct
  source 1..50: mol_type = other DNA
ttaaatatcttattatgcatcatataatcgatatatatcaagtcatttag

SEQ ID NO: 35997 - DNA, 50 bp, synthetic construct
  source 1..50: mol_type = other DNA
tccggggataccggcctcagcaggacttcgctctggccactatctggggc

SEQ ID NO: 35998 - DNA, 50 bp, synthetic construct
  source 1..50: mol_type = other DNA
gcttgagaccagaaatgcaaataccgatgaacaacgtcctggttcagagc

SEQ ID NO: 35999 - DNA, 50 bp, synthetic construct
  source 1..50: mol_type = other DNA
attcattagctcctaacccttggatatccaaaggtgtggttctaattctt

SEQ ID NO: 36000 - DNA, 50 bp, synthetic construct
  source 1..50: mol_type = other DNA
tattataaaaatttcaaactgataatattacctctgaaaccactatatat

SEQ ID NO: 36001 - DNA, 50 bp, synthetic construct
  source 1..50: mol_type = other DNA
attgccatttatgattgaaaactcagccttatgaaatcatatatgatttg

SEQ ID NO: 36002 - DNA, 50 bp, synthetic construct
  source 1..50: mol_type = other DNA
cctattttcaagggatacaaggtcaagcggcagctgcccttgaaaatacg

SEQ ID NO: 36003 - DNA, 50 bp, synthetic construct
  source 1..50: mol_type = other DNA
ctcgcaggggctgattactctattatacgcaatatttcaaaggctgtggc

SEQ ID NO: 36004 - DNA, 50 bp, synthetic construct
  source 1..50: mol_type = other DNA
gcaaaagcatttatgccggaaattataatttttcacactatttttttgtt

SEQ ID NO: 36005 - DNA, 50 bp, synthetic construct
  source 1..50: mol_type = other DNA
atcaaagtgtggcgtttacaaatataaacttgtataatgcagtaccaatt

SEQ ID NO: 36006 - DNA, 50 bp, synthetic construct
  source 1..50: mol_type = other DNA
tacaaatatactgaatcagaaaactttttttgtgttataatatggttaca

SEQ ID NO: 36007 - DNA, 50 bp, synthetic construct
  source 1..50: mol_type = other DNA
acgattattgttgtatattcaagataccatggcctccgagcaataatcgc

SEQ ID NO: 36008 - DNA, 50 bp, synthetic construct
  source 1..50: mol_type = other DNA
gcactcttatgaacgcagtcggtcgtttgcgttaccgggcatcgtcccgc

SEQ ID NO: 36009 - DNA, 50 bp, synthetic construct
  source 1..50: mol_type = other DNA
ttgccgggcgcgtgttccggcgctctccgggcggctggctgccctgcaaa

SEQ ID NO: 36010 - DNA, 50 bp, synthetic construct
  source 1..50: mol_type = other DNA
cctcggatatgaccatgatgaagacgttttgccccgttgcatatccatat

SEQ ID NO: 36011 - DNA, 50 bp, synthetic construct
  source 1..50: mol_type = other DNA
cacagaaataaaggtggtaagtcatgatacctttcacctttctttccttg

SEQ ID NO: 36012 - DNA, 50 bp, synthetic construct
  source 1..50: mol_type = other DNA
aactttttccaagcctcttgccttgaaaagcagaagtcgatgaaaaacag

SEQ ID NO: 36013 - DNA, 50 bp, synthetic construct
  source 1..50: mol_type = other DNA
ctagcaataccaaagaaatttaggtgtataatctcaattggtattgtttc

SEQ ID NO: 36014 - DNA, 50 bp, synthetic construct
  source 1..50: mol_type = other DNA
tgaatttattgatggttgcgggaatattatggcaaatatccataccgtct

SEQ ID NO: 36015 - DNA, 50 bp, synthetic construct
  source 1..50: mol_type = other DNA
aaaaatatgtgcaatcgcgtattttaataaagaaaattatttaaatttat

SEQ ID NO: 36016 - DNA, 50 bp, synthetic construct
  source 1..50: mol_type = other DNA
tcaccagcaatttagaaaagcccacaggctgccgctccggtcgatggtga

SEQ ID NO: 36017 - DNA, 50 bp, synthetic construct
  source 1..50: mol_type = other DNA
tcgttttcgggtggccgccatagaaatttgcggcagccggaggaaaccaa

SEQ ID NO: 36018 - DNA, 50 bp, synthetic construct
  source 1..50: mol_type = other DNA
cagaaataagttgataacaggcaattttgttttcactcaaattaattctg

SEQ ID NO: 36019 - DNA, 50 bp, synthetic construct
  source 1..50: mol_type = other DNA
tatgagttttggtaaaatgaatggcttattccattgaatcaaataatgta

SEQ ID NO: 36020 - DNA, 50 bp, synthetic construct
  source 1..50: mol_type = other DNA
agtgagacttaagatgccgggcaaaacacccctttcacttcattctccgc

SEQ ID NO: 36021 - DNA, 50 bp, synthetic construct
  source 1..50: mol_type = other DNA
agcagaacaaccggcaaataactttaaagccgttttccgatattgacgcg

SEQ ID NO: 36022 - DNA, 50 bp, synthetic construct
  source 1..50: mol_type = other DNA
tttgcagtcgtttttcagccattgtgtactttctgctgtttagcggcaaa

SEQ ID NO: 36023 - DNA, 50 bp, synthetic construct
  source 1..50: mol_type = other DNA
ccgtttattcctgttatgatgtaatcccaactcacaacaggcgagggtgc

SEQ ID NO: 36024 - DNA, 50 bp, synthetic construct
  source 1..50: mol_type = other DNA
aatcccttgatatgtaatcgctttagaaagcgaggtaagctaatgggaaa

SEQ ID NO: 36025 - DNA, 50 bp, synthetic construct
  source 1..50: mol_type = other DNA
taaaaaagtagcaagaatcaatgaattcatcctccttaaaattaagtata

SEQ ID NO: 36026 - DNA, 50 bp, synthetic construct
  source 1..50: mol_type = other DNA
gataaccgcaataccgttttctatttatatatcaagggatttcgggcata

SEQ ID NO: 36027 - DNA, 50 bp, synthetic construct
  source 1..50: mol_type = other DNA
ttatggaaataaccgaagcagagatatatcacacaacgtagctaacaaaa

SEQ ID NO: 36028 - DNA, 50 bp, synthetic construct
  source 1..50: mol_type = other DNA
ccgaaaccgtaaagaaaagccgctggatcggtctttccatacttggttga

SEQ ID NO: 36029 - DNA, 50 bp, synthetic construct
  source 1..50: mol_type = other DNA
aatgcaggcatttttgttgccgggtttgcggcagtaaaaaagcccgggaa

SEQ ID NO: 36030 - DNA, 50 bp, synthetic construct
  source 1..50: mol_type = other DNA
gaggtgatattatggaaataaccgaaaaagtatgaaagaaataataccga

SEQ ID NO: 36031 - DNA, 50 bp, synthetic construct
  source 1..50: mol_type = other DNA
catgggcgctcgaacgtcctcagaccggaagaaacgttagagcgccgcgt

SEQ ID NO: 36032 - DNA, 50 bp, synthetic construct
  source 1..50: mol_type = other DNA
ttgtcacgctgcaaggtgataaccctcctcatcagcttgctcactgtcaa

SEQ ID NO: 36033 - DNA, 50 bp, synthetic construct
  source 1..50: mol_type = other DNA
aataccctgccttcttcatcaattcaaatccccataaaagggagagaatt

SEQ ID NO: 36034 - DNA, 50 bp, synthetic construct
  source 1..50: mol_type = other DNA
aaagcaccagttcaaaatttctggtgattatgattttgcaatgaagctta

SEQ ID NO: 36035 - DNA, 50 bp, synthetic construct
  source 1..50: mol_type = other DNA
gcatatcttcgtgtagtatatttcgcttgctgaagcacatatcctcgtgc

SEQ ID NO: 36036 - DNA, 50 bp, synthetic construct
  source 1..50: mol_type = other DNA
acgcccgaaatgaaagaacaggcacgtgccttgggataagctccgggcat

SEQ ID NO: 36037 - DNA, 50 bp, synthetic construct
  source 1..50: mol_type = other DNA
cgtataatttatcaagccgcttagaaatgggctgattgtgatataattat

SEQ ID NO: 36038 - DNA, 50 bp, synthetic construct
  source 1..50: mol_type = other DNA
attagctccacgcagttggatatgatcatatacaacagcgtggagctagc

SEQ ID NO: 36039 - DNA, 50 bp, synthetic construct
  source 1..50: mol_type = other DNA
acactccacgggcggtgcataagtatatgacagcctgggacgtgaagaaa

SEQ ID NO: 36040 - DNA, 50 bp, synthetic construct
  source 1..50: mol_type = other DNA
acccatttttgcatagcatacataaggatgtagctattgaccaaagcatc

SEQ ID NO: 36041 - DNA, 50 bp, synthetic construct
  source 1..50: mol_type = other DNA
gtagttctcaatatagtcaatattaaaatatttgattcagtccaaatcaa

SEQ ID NO: 36042 - DNA, 50 bp, synthetic construct
  source 1..50: mol_type = other DNA
cgagtcctgcctccgcaaccatggcggcatgagtgcggccaacttgatcc

SEQ ID NO: 36043 - DNA, 50 bp, synthetic construct
  source 1..50: mol_type = other DNA
ttatgagcagcttgtaagcgatattaatgaaattaaaaactttttgtctg

SEQ ID NO: 36044 - DNA, 50 bp, synthetic construct
  source 1..50: mol_type = other DNA
aggtcgatgaagaacatgttgaatatggtgtaaatattctgcatggacct

SEQ ID NO: 36045 - DNA, 50 bp, synthetic construct
  source 1..50: mol_type = other DNA
gcagcagcttcatctatcactgccttgacattgatagtaaaattgctgaa

SEQ ID NO: 36046 - DNA, 50 bp, synthetic construct
  source 1..50: mol_type = other DNA
ttttagattgcaatttttggtttttcaaaatcaaaatttgccattacaac

SEQ ID NO: 36047 - DNA, 50 bp, synthetic construct
  source 1..50: mol_type = other DNA
attacagtaaacaaacgaatgaactggcaggactttttttgtcttgtaaa

SEQ ID NO: 36048 - DNA, 50 bp, synthetic construct
  source 1..50: mol_type = other DNA
atatcttataacaagaatatcaggcacctcatttccttgataattcttat

SEQ ID NO: 36049 - DNA, 50 bp, synthetic construct
  source 1..50: mol_type = other DNA
cgatagcatatctataatctttaaccgaaacccttatatatcaacgattt

SEQ ID NO: 36050 - DNA, 50 bp, synthetic construct
  source 1..50: mol_type = other DNA
cctttcttccccaacttgcaaaagtaccctgacgccaagggggtaccagg

SEQ ID NO: 36051 - DNA, 50 bp, synthetic construct
  source 1..50: mol_type = other DNA
ttacagacagtcaaaaaactggtcatgaacaattagttggttgtattaaa

SEQ ID NO: 36052 - DNA, 50 bp, synthetic construct
  source 1..50: mol_type = other DNA
tatctgcaataaccttacatattgccgccattgagcggttattgcttaaa

SEQ ID NO: 36053 - DNA, 50 bp, synthetic construct
  source 1..50: mol_type = other DNA
tagcggattcgaaccgctgacctctagatgtccccggtcgtcaggatttt

SEQ ID NO: 36054 - DNA, 50 bp, synthetic construct
  source 1..50: mol_type = other DNA
ggaaggccgtaccggtcgttgtcggccgaccacgccgccaacgccaatgc

SEQ ID NO: 36055 - DNA, 50 bp, synthetic construct
  source 1..50: mol_type = other DNA
gcgaatccgtgacaaaatgtcggccattttccggcagaaaacggattatc

SEQ ID NO: 36056 - DNA, 50 bp, synthetic construct
  source 1..50: mol_type = other DNA
aacaaaaatagctaaaaattttcaggtaaaattttcacaaaagaggtgag

SEQ ID NO: 36057 - DNA, 50 bp, synthetic construct
  source 1..50: mol_type = other DNA
tgaatatctaaaatcaaataaaaattatttttaacattttgtctgtatca

SEQ ID NO: 36058 - DNA, 50 bp, synthetic construct
  source 1..50: mol_type = other DNA
tatttgtcggagaaagttatcagatatcaacagcctaccaatacacaatc

SEQ ID NO: 36059 - DNA, 50 bp, synthetic construct
  source 1..50: mol_type = other DNA
tagcctcaacattcgattgtatggcggcatactgccgtgtgtcctcctcc

SEQ ID NO: 36060 - DNA, 50 bp, synthetic construct
  source 1..50: mol_type = other DNA
tagtgaaataaattatactaattgtgcaatcctcggtaatggatcggata

SEQ ID NO: 36061 - DNA, 50 bp, synthetic construct
  source 1..50: mol_type = other DNA
atttgatatcatatttcttgctgttatatccgagaataatgtgccgaaaa

SEQ ID NO: 36062 - DNA, 50 bp, synthetic construct
  source 1..50: mol_type = other DNA
aggggctaaagagtgatgtatggtagccaactcatatatgtttcatacgg

SEQ ID NO: 36063 - DNA, 50 bp, synthetic construct
  source 1..50: mol_type = other DNA
gatgaaaatctatgagccgctgaccggtctgcggtgcaagacgccccatc

SEQ ID NO: 36064 - DNA, 50 bp, synthetic construct
  source 1..50: mol_type = other DNA
ccttgaaaaaaacggataaagcctgctttctccatgcggttgcatatagt

SEQ ID NO: 36065 - DNA, 50 bp, synthetic construct
  source 1..50: mol_type = other DNA
tttcctcattcccttgctatgtgcagacacatctgcagggaaaaacgaaa

SEQ ID NO: 36066 - DNA, 50 bp, synthetic construct
  source 1..50: mol_type = other DNA
accgataaggaaaggcctgataagtatccatcatccaccgtagtactgga

SEQ ID NO: 36067 - DNA, 50 bp, synthetic construct
  source 1..50: mol_type = other DNA
gagaaactttctctcctctgttcgcgaaaaaagaataatccagttttctc

SEQ ID NO: 36068 - DNA, 50 bp, synthetic construct
  source 1..50: mol_type = other DNA
agaatatctctacagcctcattgaaatcatctccagatgcacaatattcc

SEQ ID NO: 36069 - DNA, 50 bp, synthetic construct
  source 1..50: mol_type = other DNA
ggtgaaagcctgccgccttgccttcgaaagcgatgcggggagctttttta

SEQ ID NO: 36070 - DNA, 50 bp, synthetic construct
  source 1..50: mol_type = other DNA
atttgaaaaggccagaaagcactccggtattttttcaccctgcgccaaat

SEQ ID NO: 36071 - DNA, 50 bp, synthetic construct
  source 1..50: mol_type = other DNA
gtcaatatgaatggaaaaaactttactgccgaatttaagctcatattttt

SEQ ID NO: 36072 - DNA, 50 bp, synthetic construct
  source 1..50: mol_type = other DNA
gcagtggaagtagaatgatgccattcggggaatccttggacagacacagc

SEQ ID NO: 36073 - DNA, 50 bp, synthetic construct
  source 1..50: mol_type = other DNA
ctattattctttagtctatatatttgtatctataacgatgccttgaatac

SEQ ID NO: 36074 - DNA, 50 bp, synthetic construct
  source 1..50: mol_type = other DNA
tcgtaagctttttaccacggttgttcaccccctgggtatgtgacatatta

SEQ ID NO: 36075 - DNA, 50 bp, synthetic construct
  source 1..50: mol_type = other DNA
cggcttttgttggctgttcttttacttgccggaagcgcaagacaaagcgc

SEQ ID NO: 36076 - DNA, 50 bp, synthetic construct
  source 1..50: mol_type = other DNA
aagcccctgaaccccttgatttataggaatatcaacaggttcagcagata

SEQ ID NO: 36077 - DNA, 50 bp, synthetic construct
  source 1..50: mol_type = other DNA
gctttcacgaactggttctttacctatataaatattaaagattgggaaga

SEQ ID NO: 36078 - DNA, 50 bp, synthetic construct
  source 1..50: mol_type = other DNA
cttaattttttaacttttattatatgaaataaaaaattataataatgaga

SEQ ID NO: 36079 - DNA, 50 bp, synthetic construct
  source 1..50: mol_type = other DNA
ctcatctagaatttcattttaagaattttataaatgaaataaaaaattat

SEQ ID NO: 36080 - DNA, 50 bp, synthetic construct
  source 1..50: mol_type = other DNA
cagctgcaaaagaagcactaagcgaagaaaagttgcagcttatgctcgtg

SEQ ID NO: 36081 - DNA, 50 bp, synthetic construct
  source 1..50: mol_type = other DNA
aatcatggacaccagaaatgaaggaaatggcattcaacaagtaagtattc

SEQ ID NO: 36082 - DNA, 50 bp, synthetic construct
  source 1..50: mol_type = other DNA
agtcattcaggaaattgagaaaaatatttctcactccttattttcttcat

SEQ ID NO: 36083 - DNA, 50 bp, synthetic construct
  source 1..50: mol_type = other DNA
ctcgtgcgtatccggcgaccttccttatctgggcgacggacacctacgag

SEQ ID NO: 36084 - DNA, 50 bp, synthetic construct
  source 1..50: mol_type = other DNA
ggagcgaatatgtcatagcgaaaggacttgtcttttgaactatttgagca

SEQ ID NO: 36085 - DNA, 50 bp, synthetic construct
  source 1..50: mol_type = other DNA
gctaactacttccatgcgggtattataatattggcatggagtagaattca

SEQ ID NO: 36086 - DNA, 50 bp, synthetic construct
  source 1..50: mol_type = other DNA
cctcttttagcagaaataatgtcctaaaaatttaagcgatgaaaaagaag

SEQ ID NO: 36087 - DNA, 50 bp, synthetic construct
  source 1..50: mol_type = other DNA
taaatgaggaagaaatcgaaactctataattattttttattgtgctttta

SEQ ID NO: 36088 - DNA, 50 bp, synthetic construct
  source 1..50: mol_type = other DNA
ggctcaaacggtggagccggagcggtatcacctgctctaccgactgagct

SEQ ID NO: 36089 - DNA, 50 bp, synthetic construct
  source 1..50: mol_type = other DNA
tcatcatgatggctatatccattaattcccacgtgcaggcttcatcttaa

SEQ ID NO: 36090 - DNA, 50 bp, synthetic construct
  source 1..50: mol_type = other DNA
ataaaagagctgttctgatctcagggccttataaaagacatgaacattat

SEQ ID NO: 36091 - DNA, 50 bp, synthetic construct
  source 1..50: mol_type = other DNA
atgtttgaaagatggatacccaccatcctgtgtatccttatttattgaat

SEQ ID NO: 36092 - DNA, 50 bp, synthetic construct
  source 1..50: mol_type = other DNA
taaaggcattcagagtgatatatgtttcagtgatttttcacatggattta

SEQ ID NO: 36093 - DNA, 50 bp, synthetic construct
  source 1..50: mol_type = other DNA
tattacatgactatttatcatgaatgccgataatcctgcgtcctgtataa

SEQ ID NO: 36094 - DNA, 50 bp, synthetic construct
  source 1..50: mol_type = other DNA
tatgatgcgtgagcaaactgctggatcttacacttttttgatacaaaaac

SEQ ID NO: 36095 - DNA, 50 bp, synthetic construct
  source 1..50: mol_type = other DNA
tagcctaataacaacgaaaatacaaggataacacaatcattagctgtacc

SEQ ID NO: 36096 - DNA, 50 bp, synthetic construct
  source 1..50: mol_type = other DNA
cgaaggccgcaccttccggtcgctcaagcgacaaatcggtaacgcactcg

SEQ ID NO: 36097 - DNA, 50 bp, synthetic construct
  source 1..50: mol_type = other DNA
tataacaaaaaaaattttagattttatgatgttcaattttttttatttat

SEQ ID NO: 36098 - DNA, 50 bp, synthetic construct
  source 1..50: mol_type = other DNA
tgctgatcgttgcgccactgtccatcgcggcatatgcgcgggtatcgacc

SEQ ID NO: 36099 - DNA, 50 bp, synthetic construct
  source 1..50: mol_type = other DNA
acgaacgatatgaaaaaagcggttggcaccatacacgccatacagcgccc

SEQ ID NO: 36100 - DNA, 50 bp, synthetic construct
  source 1..50: mol_type = other DNA
tcctttaatattacaaggaaagttatagcttgcttaccaacgataaaagg

SEQ ID NO: 36101 - DNA, 50 bp, synthetic construct
  source 1..50: mol_type = other DNA
ctttgcaccgtcaaatgaaataacgcattatatactgtgacccaccttat

SEQ ID NO: 36102 - DNA, 50 bp, synthetic construct
  source 1..50: mol_type = other DNA
tatttattaggggaaacgagcagtgtaagtaactaactgcctgctggtgt

SEQ ID NO: 36103 - DNA, 50 bp, synthetic construct
  source 1..50: mol_type = other DNA
ccatccacaccacccgcaccgaaacgttctcgatgacaccatgtgcctgc

SEQ ID NO: 36104 - DNA, 50 bp, synthetic construct
  source 1..50: mol_type = other DNA
aacctactggtgcggctatggcgcaaacgcctcgaacgcaacaccccgtt

SEQ ID NO: 36105 - DNA, 50 bp, synthetic construct
  source 1..50: mol_type = other DNA
aaacattaccaataatcgattttttaaaacatcgatgtaagtatctgttt

SEQ ID NO: 36106 - DNA, 50 bp, synthetic construct
  source 1..50: mol_type = other DNA
agcagatgctcgatgccgtgttgagtgctcggcggcatcgccggctggta

SEQ ID NO: 36107 - DNA, 50 bp, synthetic construct
  source 1..50: mol_type = other DNA
gtctgggcgctgcgcggtctggacgcgtggccgacgcgccagagcaagat

SEQ ID NO: 36108 - DNA, 50 bp, synthetic construct
  source 1..50: mol_type = other DNA
acgatgctgaccggctggtcaagcacgcttgaccgcccgcgagatttccg

SEQ ID NO: 36109 - DNA, 50 bp, synthetic construct
  source 1..50: mol_type = other DNA
agcaagccacgcgaacagcgtcggccgcggcgcgtatcgcgctcgcggcg

SEQ ID NO: 36110 - DNA, 50 bp, synthetic construct
  source 1..50: mol_type = other DNA
tgcaccagatggtcggagacggcacttgccgggcgcgatcatcacctgca

SEQ ID NO: 36111 - DNA, 50 bp, synthetic construct
  source 1..50: mol_type = other DNA
taatgcccttttagccaagcttaaagaaaagggtagctgcctacgcacga

SEQ ID NO: 36112 - DNA, 50 bp, synthetic construct
  source 1..50: mol_type = other DNA
ccgataccgattgccgcgaaggaagccgccgagcaggacttcgggcacga

SEQ ID NO: 36113 - DNA, 50 bp, synthetic construct
  source 1..50: mol_type = other DNA
cgccgttgacgcgccattcgccttcgaacgataaacgctgtccacgggga

SEQ ID NO: 36114 - DNA, 50 bp, synthetic construct
  source 1..50: mol_type = other DNA
tctgatggcgcgcctgttgggcaaggagcaggagcaggcggacgcgcaac

SEQ ID NO: 36115 - DNA, 50 bp, synthetic construct
  source 1..50: mol_type = other DNA
gatcgtgaggacgcgccaacgcagacgccggcaagctcgtcctcacgatc

SEQ ID NO: 36116 - DNA, 50 bp, synthetic construct
  source 1..50: mol_type = other DNA
ctattccgcccaagaatgaattctttttaattttatctagttcattcatt

SEQ ID NO: 36117 - DNA, 50 bp, synthetic construct
  source 1..50: mol_type = other DNA
tctataataagtatagcataaataaactcccatttttcacttattatcct

SEQ ID NO: 36118 - DNA, 50 bp, synthetic construct
  source 1..50: mol_type = other DNA
taatccattaattattaatatacctgtatatatcaagtgttattgggcta

SEQ ID NO: 36119 - DNA, 50 bp, synthetic construct
  source 1..50: mol_type = other DNA
gctgaattaaaagaaaaatatacagcagatgaacctacttgtaatttaga

SEQ ID NO: 36120 - DNA, 50 bp, synthetic construct
  source 1..50: mol_type = other DNA
tttatgatgaaatatattaaagaaaattatttaataaatttttagggcaa

SEQ ID NO: 36121 - DNA, 50 bp, synthetic construct
  source 1..50: mol_type = other DNA
attctatgaagttttgctgctggctttaccgcccgaacctgtaatcgaaa

SEQ ID NO: 36122 - DNA, 50 bp, synthetic construct
  source 1..50: mol_type = other DNA
atttaaataagctggcacccatgctttttcatggtctcgctcattttctg

SEQ ID NO: 36123 - DNA, 50 bp, synthetic construct
  source 1..50: mol_type = other DNA
tgtgaacatattgaaaagagtattgaatcactcctttccggtactataca

SEQ ID NO: 36124 - DNA, 50 bp, synthetic construct
  source 1..50: mol_type = other DNA
agtaaaaactcttgaaaaatatttatgaataatatcggagactttataaa

SEQ ID NO: 36125 - DNA, 50 bp, synthetic construct
  source 1..50: mol_type = other DNA
attttgaaggcttcctaagggggttacatcactctaaaagcctataaagt

SEQ ID NO: 36126 - DNA, 50 bp, synthetic construct
  source 1..50: mol_type = other DNA
aaaatatcggctgtaaatcgtaaaacttttgttttggatagagagctttc

SEQ ID NO: 36127 - DNA, 50 bp, synthetic construct
  source 1..50: mol_type = other DNA
gaaagcagatacaggaatttgacaattatcttatttgtgttagaactaac

SEQ ID NO: 36128 - DNA, 50 bp, synthetic construct
  source 1..50: mol_type = other DNA
gccactgtaagagccaacccagagttgttatttatggctggattagtacc

SEQ ID NO: 36129 - DNA, 50 bp, synthetic construct
  source 1..50: mol_type = other DNA
aaacaccgcagccatctgcccgcggccacggcgctcaggctgcggtaggt

SEQ ID NO: 36130 - DNA, 50 bp, synthetic construct
  source 1..50: mol_type = other DNA
taaacaaatgcgctgcctgcccctcgcgggcgagggcgcgcaggagttcg

SEQ ID NO: 36131 - DNA, 50 bp, synthetic construct
  source 1..50: mol_type = other DNA
cctgcaccgcgtccggatccatcaggagctggatgatgtgcagaagcggg

SEQ ID NO: 36132 - DNA, 50 bp, synthetic construct
  source 1..50: mol_type = other DNA
ggctaatttcatacttcagcccacccatggtgcgccagcgtcacttctcc

SEQ ID NO: 36133 - DNA, 50 bp, synthetic construct
  source 1..50: mol_type = other DNA
gtaatttctttagcgacagggtctgatgacattgtcagcccagaaaccgc

SEQ ID NO: 36134 - DNA, 50 bp, synthetic construct
  source 1..50: mol_type = other DNA
tcatgacaaattttaaaaaagctaagtagcttgcaagcctattctgaaat

SEQ ID NO: 36135 - DNA, 50 bp, synthetic construct
  source 1..50: mol_type = other DNA
ttccgacaccgccgccttggactgccgcctccttgcccgcggcaatgctt

SEQ ID NO: 36136 - DNA, 50 bp, synthetic construct
  source 1..50: mol_type = other DNA
gcaagacgccgctgcagtgtctcagcgcagcacctcaagcgtcttcttgc

SEQ ID NO: 36137 - DNA, 50 bp, synthetic construct
  source 1..50: mol_type = other DNA
ggttaatggtgggagaacaaggaatattccttatggctatcagattgtag

SEQ ID NO: 36138 - DNA, 50 bp, synthetic construct
  source 1..50: mol_type = other DNA
ttatggctatttctaataaaacaaaggtgtttttgttgttatagagatgt

SEQ ID NO: 36139 - DNA, 50 bp, synthetic construct
  source 1..50: mol_type = other DNA
ctccggaaataaggactccttcttcgaagaagtcgtcctccccgcggtca

SEQ ID NO: 36140 - DNA, 50 bp, synthetic construct
  source 1..50: mol_type = other DNA
taaagtcacagttgtcaatttgcatctcctcctttaccactgtgggttca

SEQ ID NO: 36141 - DNA, 50 bp, synthetic construct
  source 1..50: mol_type = other DNA
tttcttagtattagttcctgaaatccccttggggttctaaggtcagctct

SEQ ID NO: 36142 - DNA, 50 bp, synthetic construct
  source 1..50: mol_type = other DNA
attttcatggagataacctcgcatgaggacatagttattaagtggaaaat

SEQ ID NO: 36143 - DNA, 50 bp, synthetic construct
  source 1..50: mol_type = other DNA
gcatgtacaattttgtttttgataattatactgaaaattcttgctcacgt

SEQ ID NO: 36144 - DNA, 50 bp, synthetic construct
  source 1..50: mol_type = other DNA
tttgtcgcaataattgagctgattcaaggcaactcaaatcttaagactgt

SEQ ID NO: 36145 - DNA, 50 bp, synthetic construct
  source 1..50: mol_type = other DNA
ggtttaaccagccgctctattcaagctgaagttttttggccggtataacc

SEQ ID NO: 36146 - DNA, 50 bp, synthetic construct
  source 1..50: mol_type = other DNA
aggaaggataactccttcaaacttagaagtttttacacactatatatccc

SEQ ID NO: 36147 - DNA, 50 bp, synthetic construct
  source 1..50: mol_type = other DNA
atcggtacggttcgtcgcgccccacacggggcgcgtggattgaaaccgat

SEQ ID NO: 36148 - DNA, 50 bp, synthetic construct
  source 1..50: mol_type = other DNA
accaaatttatcaaattttccatctagaaagacacctttcaaaatttgtc

SEQ ID NO: 36149 - DNA, 50 bp, synthetic construct
  source 1..50: mol_type = other DNA
caaagtaatattaaaaaatttattttcttaaataagctgattggggttgc

SEQ ID NO: 36150 - DNA, 50 bp, synthetic construct
  source 1..50: mol_type = other DNA
tagtaccatgatgttatcggtaatatattaccgataacttctatgtacac

SEQ ID NO: 36151 - DNA, 50 bp, synthetic construct
  source 1..50: mol_type = other DNA
cttgggcctatagctcaggggtagagctaattgtgaggggaaaggccaaa

SEQ ID NO: 36152 - DNA, 50 bp, synthetic construct
  source 1..50: mol_type = other DNA
ttctacccattactactgctgccgcaaaacagcaggcagaatgatttgat

SEQ ID NO: 36153 - DNA, 50 bp, synthetic construct
  source 1..50: mol_type = other DNA
ttacagtacaacattaaaaaataccgttttcggataataatgtacccaaa

SEQ ID NO: 36154 - DNA, 50 bp, synthetic construct
  source 1..50: mol_type = other DNA
ttgtacctattttttaataaaatcaagaccttaccaaaaaagaggtcagt

SEQ ID NO: 36155 - DNA, 50 bp, synthetic construct
  source 1..50: mol_type = other DNA
ctctgtacttcgtcaaacatttcctcctgtttgatagaatttgtacaggt

SEQ ID NO: 36156 - DNA, 50 bp, synthetic construct
  source 1..50: mol_type = other DNA
actttctcttacccaaagccgaactacgtcaaactacggtaagagaaaga

SEQ ID NO: 36157 - DNA, 50 bp, synthetic construct
  source 1..50: mol_type = other DNA
cggcaaaattataaagaaacgcaaattattttttttaacgaattttctta

SEQ ID NO: 36158 - DNA, 50 bp, synthetic construct
  source 1..50: mol_type = other DNA
caatatttttgagttatattttacaataataatgtaagtacaatatatgt

SEQ ID NO: 36159 - DNA, 50 bp, synthetic construct
  source 1..50: mol_type = other DNA
gatgatcatgcagaaccagctgcaataacaggagggtaacgatgatctca

SEQ ID NO: 36160 - DNA, 50 bp, synthetic construct
  source 1..50: mol_type = other DNA
tcgacagatgaattttacacaggttgtactaactacgcatcccccgtcgg

SEQ ID NO: 36161 - DNA, 50 bp, synthetic construct
  source 1..50: mol_type = other DNA
aagccgaaaagtacattttgggcggtgccgcaacatggacttttcataca

SEQ ID NO: 36162 - DNA, 50 bp, synthetic construct
  source 1..50: mol_type = other DNA
ggcggaaacagagcgattacatcatcttttgtaatatatcccatgatgcc

SEQ ID NO: 36163 - DNA, 50 bp, synthetic construct
  source 1..50: mol_type = other DNA
cgccaaaccttcaccgcttcttcaattggagaacatattaaatttcttca

SEQ ID NO: 36164 - DNA, 50 bp, synthetic construct
  source 1..50: mol_type = other DNA
acataatattgacaccggacttaaatttactactggtttgataatcttat

SEQ ID NO: 36165 - DNA, 50 bp, synthetic construct
  source 1..50: mol_type = other DNA
agcccccggcgaatcacttcgcgcccgcgccgaccgacgcgcccgtggcg

SEQ ID NO: 36166 - DNA, 50 bp, synthetic construct
  source 1..50: mol_type = other DNA
cgcgacccgcagccgctccgtcagagcgcgcgcacgtcctgctcgtcgcg

SEQ ID NO: 36167 - DNA, 50 bp, synthetic construct
  source 1..50: mol_type = other DNA
ctctgcatctgtgtgctggttgggattcagcccatcacgcacttggccag

SEQ ID NO: 36168 - DNA, 50 bp, synthetic construct
  source 1..50: mol_type = other DNA
ttcatccctttttattcaactgtccaattttattaaaaaagggggcggaa

SEQ ID NO: 36169 - DNA, 50 bp, synthetic construct
  source 1..50: mol_type = other DNA
gaaaccatcgacctgctcaagagcgcgccggagcgcaggccgaaaggtta

SEQ ID NO: 36170 - DNA, 50 bp, synthetic construct
  source 1..50: mol_type = other DNA
aataaacatacttttattttttagttaaaaaaaataaatccaagtttggc

SEQ ID NO: 36171 - DNA, 50 bp, synthetic construct
  source 1..50: mol_type = other DNA
cagcatgcggccgacggatccctccggggctacgtgcgaaccgctcactg

SEQ ID NO: 36172 - DNA, 50 bp, synthetic construct
  source 1..50: mol_type = other DNA
gaacaaggtctattatagcatatttcgtgttaaaatagtatagcacattt

SEQ ID NO: 36173 - DNA, 50 bp, synthetic construct
  source 1..50: mol_type = other DNA
aaatatgctgatataaagagtatagttttacggtttatttcagttaattt

SEQ ID NO: 36174 - DNA, 50 bp, synthetic construct
  source 1..50: mol_type = other DNA
tcacgatacggttctgtaatatttttaaatgaaaaatagccgtccccagc

SEQ ID NO: 36175 - DNA, 50 bp, synthetic construct
  source 1..50: mol_type = other DNA
tgtccgcagaggtgaacttgtcgatgacgaccagttcaccagctacgagg

SEQ ID NO: 36176 - DNA, 50 bp, synthetic construct
  source 1..50: mol_type = other DNA
gcatcccatggacggacgagcgccgcggccctcatccagccagccctttg

SEQ ID NO: 36177 - DNA, 50 bp, synthetic construct
  source 1..50: mol_type = other DNA
cggatgacacatggttgagtttcgtgcgagagagttattatagtcagccc

SEQ ID NO: 36178 - DNA, 50 bp, synthetic construct
  source 1..50: mol_type = other DNA
gaaaccccgccgcagaattgctctgcagatcgctggaaaactctaaatta

SEQ ID NO: 36179 - DNA, 50 bp, synthetic construct
  source 1..50: mol_type = other DNA
agtcaaactacaaaagccaaaagccctttttttatttttttatattatgc

SEQ ID NO: 36180 - DNA, 50 bp, synthetic construct
  source 1..50: mol_type = other DNA
tttccagtattagaaataagcaaaatcctcactatttctattgctttttc

SEQ ID NO: 36181 - DNA, 50 bp, synthetic construct
  source 1..50: mol_type = other DNA
aaaatgaggaaaagcccacaggctgttagactgccgcttttcctcactgc

SEQ ID NO: 36182 - DNA, 50 bp, synthetic construct
  source 1..50: mol_type = other DNA
ccaccctgcgcttctggatgctgtccatagcatcaccaccttcctgagta

SEQ ID NO: 36183 - DNA, 50 bp, synthetic construct
  source 1..50: mol_type = other DNA
cagctgatagccatcgttgctgagcacgatccagtaatggcccgtgccgc

SEQ ID NO: 36184 - DNA, 50 bp, synthetic construct
  source 1..50: mol_type = other DNA
tattatactctacttttttatttttatgaataatactggttaccataact

SEQ ID NO: 36185 - DNA, 50 bp, synthetic construct
  source 1..50: mol_type = other DNA
cctaagctttgcggaccggcaggaacttccgcgagagcgaaaagctccat

SEQ ID NO: 36186 - DNA, 50 bp, synthetic construct
  source 1..50: mol_type = other DNA
ggaatttcatcaaagaaatttatatttctgtataaattttatgaatttgg

SEQ ID NO: 36187 - DNA, 50 bp, synthetic construct
  source 1..50: mol_type = other DNA
ctgagggagttgtgaaacatccctgctgccatggaagcggacgacctcta

SEQ ID NO: 36188 - DNA, 50 bp, synthetic construct
  source 1..50: mol_type = other DNA
agcagtacatcataatggcccgcgccggaggtggtacaataacatctgcg

SEQ ID NO: 36189 - DNA, 50 bp, synthetic construct
  source 1..50: mol_type = other DNA
gaaagggggagattatcacggcacgaacggtcagaaaatgaccgcctgcc

SEQ ID NO: 36190 - DNA, 50 bp, synthetic construct
  source 1..50: mol_type = other DNA
ttatcgtgtttcttccgttctattataataggagatatgaaaaaagaata

SEQ ID NO: 36191 - DNA, 50 bp, synthetic construct
  source 1..50: mol_type = other DNA
catctcgtttcttcgggcagatagaaataaacgcaaccagaaaagagaaa

SEQ ID NO: 36192 - DNA, 50 bp, synthetic construct
  source 1..50: mol_type = other DNA
taaatgagacgattactcgaaaggacctcctcgttgatttccaccagctc

SEQ ID NO: 36193 - DNA, 50 bp, synthetic construct
  source 1..50: mol_type = other DNA
cttcgggtgcttttttttattgcaaatggaaaaatcaaaaaaacgcgtcc

SEQ ID NO: 36194 - DNA, 50 bp, synthetic construct
  source 1..50: mol_type = other DNA
ccattcaccatagaaggaggctcttttttggcacttgccatcttgtaaac

SEQ ID NO: 36195 - DNA, 50 bp, synthetic construct
  source 1..50: mol_type = other DNA
gtttttttgcaattatgtgtttaatatttttcataatatccagcgaaatc

SEQ ID NO: 36196 - DNA, 50 bp, synthetic construct
  source 1..50: mol_type = other DNA
tagttgctctaatgaaagagcaaaagactgctctcagtttacatgatttt

SEQ ID NO: 36197 - DNA, 50 bp, synthetic construct
  source 1..50: mol_type = other DNA
taccagtgggctgtgttaagttagtactaattgaacactacccgttggtt

SEQ ID NO: 36198 - DNA, 50 bp, synthetic construct
  source 1..50: mol_type = other DNA
ttttaacatttcctgctcggcatcctcgaatggatcaggaaatgttacat

SEQ ID NO: 36199 - DNA, 50 bp, synthetic construct
  source 1..50: mol_type = other DNA
gtcttattaatagctcttaccactgcatagataaggagagaaaataagcc

SEQ ID NO: 36200 - DNA, 50 bp, synthetic construct
  source 1..50: mol_type = other DNA
tagcgatgaatggtcgctaatttcaactctgcaaagaacattctccgctt

SEQ ID NO: 36201 - DNA, 50 bp, synthetic construct
  source 1..50: mol_type = other DNA
gaagacgcttgaggtgctgcgtgagccggagggattcctcaatcgtctta

SEQ ID NO: 36202 - DNA, 50 bp, synthetic construct
  source 1..50: mol_type = other DNA
cttctcgatgcgattcagaaggacatgttatagtatttggcatcaaaaat

SEQ ID NO: 36203 - DNA, 50 bp, synthetic construct
  source 1..50: mol_type = other DNA
tactgaacttccatatgcaatcccccggcattgcagatgcactgccaaca

SEQ ID NO: 36204 - DNA, 50 bp, synthetic construct
  source 1..50: mol_type = other DNA
aactctgctacaaaattttctataattatcggtatgaccaaactggtaaa

SEQ ID NO: 36205 - DNA, 50 bp, synthetic construct
  source 1..50: mol_type = other DNA
cgggatgtggatctgcaggttgccgtttcactcccgaaggccccatcgac

SEQ ID NO: 36206 - DNA, 50 bp, synthetic construct
  source 1..50: mol_type = other DNA
actcgtaaaaaaattgaaaccatatctatggctttctcctttccgatttt

SEQ ID NO: 36207 - DNA, 50 bp, synthetic construct
  source 1..50: mol_type = other DNA
acaggatgatactgaccggatggatataatattggtacagtcctgtctga

SEQ ID NO: 36208 - DNA, 50 bp, synthetic construct
  source 1..50: mol_type = other DNA
tgccatgcataaaaacggctgggagctctgccactcctttctctttgggt

SEQ ID NO: 36209 - DNA, 50 bp, synthetic construct
  source 1..50: mol_type = other DNA
acacggaaaccaccggagtcggccccaacctacggttttggagaccgttg

SEQ ID NO: 36210 - DNA, 50 bp, synthetic construct
  source 1..50: mol_type = other DNA
aaaaggaatgataaatcaagccacatcaggttgtagaactcatccatttt

SEQ ID NO: 36211 - DNA, 50 bp, synthetic construct
  source 1..50: mol_type = other DNA
atgtagcttttagagtgatgtatatacagatttcactccaaaatttctga

SEQ ID NO: 36212 - DNA, 50 bp, synthetic construct
  source 1..50: mol_type = other DNA
acttggtgacattacagagaattatgtttttcggctgaaaatcaaggaga

SEQ ID NO: 36213 - DNA, 50 bp, synthetic construct
  source 1..50: mol_type = other DNA
ctgaaacggtcttccaaaaagacattggccttaacgccatccatgagcag

SEQ ID NO: 36214 - DNA, 50 bp, synthetic construct
  source 1..50: mol_type = other DNA
tttataaatggctacgtcaataacatgttattttcaaatatttttttaat

SEQ ID NO: 36215 - DNA, 50 bp, synthetic construct
  source 1..50: mol_type = other DNA
tttattatcttcgttgcaaagataactatatttgctagccagttagtaaa

SEQ ID NO: 36216 - DNA, 50 bp, synthetic construct
  source 1..50: mol_type = other DNA
atatataagagattcagagctaatatatttattcataatcattactccat

SEQ ID NO: 36217 - DNA, 50 bp, synthetic construct
  source 1..50: mol_type = other DNA
ggtgaggttgctgtcctttatgacaacaatccgggtgccacaacctctga

SEQ ID NO: 36218 - DNA, 50 bp, synthetic construct
  source 1..50: mol_type = other DNA
ttttatctgtctcccgtgtataaaaatctcaaccagaaatggagagaaag

SEQ ID NO: 36219 - DNA, 50 bp, synthetic construct
  source 1..50: mol_type = other DNA
cgctatccgccgttttccggggactttacaagggactacacagggtaggt

SEQ ID NO: 36220 - DNA, 50 bp, synthetic construct
  source 1..50: mol_type = other DNA
gaacagttcgagcgtgtgcagaccatgattgttacagtaagacagagttt

SEQ ID NO: 36221 - DNA, 50 bp, synthetic construct
  source 1..50: mol_type = other DNA
aatgcgcgggaggcacagcgtaatgctgccagcgacagaagctgaagaga

SEQ ID NO: 36222 - DNA, 50 bp, synthetic construct
  source 1..50: mol_type = other DNA
tatcgggaaaacccttgatataactgcgctgatcgaggattttgaagcca

SEQ ID NO: 36223 - DNA, 50 bp, synthetic construct
  source 1..50: mol_type = other DNA
atcacaagacttttcaaaattcaatcgccaaaactgaaaaatctgtattt

SEQ ID NO: 36224 - DNA, 50 bp, synthetic construct
  source 1..50: mol_type = other DNA
gggatttgacttatgaacactcttttttatgccctctacttgtttgaacc

SEQ ID NO: 36225 - DNA, 50 bp, synthetic construct
  source 1..50: mol_type = other DNA
gagcctgcctgaaaaggaaaacacccgcattttcctgcggagcttttctt

SEQ ID NO: 36226 - DNA, 50 bp, synthetic construct
  source 1..50: mol_type = other DNA
ccctctgcaatctcaccaacgataaatatcttttttgatttctccccatc

SEQ ID NO: 36227 - DNA, 50 bp, synthetic construct
  source 1..50: mol_type = other DNA
aaagctgtggagctgatcttcctgatccgtagacctctgctccccactca

SEQ ID NO: 36228 - DNA, 50 bp, synthetic construct
  source 1..50: mol_type = other DNA
gggcttactttataaagggaaatttttttcggcgcatcgtaagtaagcgc

SEQ ID NO: 36229 - DNA, 50 bp, synthetic construct
  source 1..50: mol_type = other DNA
ttgtccagaacggcaccctcctggatggtggatataatgaactggggcat

SEQ ID NO: 36230 - DNA, 50 bp, synthetic construct
  source 1..50: mol_type = other DNA
tctgcacatcaaagaaaaggtcacgggtgacattttatcaatcgtgcttg

SEQ ID NO: 36231 - DNA, 50 bp, synthetic construct
  source 1..50: mol_type = other DNA
ttcttgcttcgcagcgtttggacggcagggtttctacagatcaggaagaa

SEQ ID NO: 36232 - DNA, 50 bp, synthetic construct
  source 1..50: mol_type = other DNA
acttgaaaaatgttcatgctgcaaaattgcgagctgaccatcaatcatat

SEQ ID NO: 36233 - DNA, 50 bp, synthetic construct
  source 1..50: mol_type = other DNA
atgaaaacggcaacagctttacgatggtataaaaataacacctatacaga

SEQ ID NO: 36234 - DNA, 50 bp, synthetic construct
  source 1..50: mol_type = other DNA
ttctccgaaattagctgcgataatgcatttttatcgctgaaagcggcaaa

SEQ ID NO: 36235 - DNA, 50 bp, synthetic construct
  source 1..50: mol_type = other DNA
aatcccactctgcaagcgaccgtttttaccctcgataaaatagagggctt

SEQ ID NO: 36236 - DNA, 50 bp, synthetic construct
  source 1..50: mol_type = other DNA
acgccgcgcggcatagtacctttgtattagtgtactgtgccgcccggaac

SEQ ID NO: 36237 - DNA, 50 bp, synthetic construct
  source 1..50: mol_type = other DNA
ggacaccgaaaaaacggtttgaacctgtcgaaaagaacaagtggctcaag

SEQ ID NO: 36238 - DNA, 50 bp, synthetic construct
  source 1..50: mol_type = other DNA
tgccctgcatcttcgtggagacctgctgggattcacgcctctgccgtctg

SEQ ID NO: 36239 - DNA, 50 bp, synthetic construct
  source 1..50: mol_type = other DNA
caaggaactggccgaaatcatggcgatccagacgttcggcttcttccttg

SEQ ID NO: 36240 - DNA, 50 bp, synthetic construct
  source 1..50: mol_type = other DNA
tttaaaattctactgtaatgagggatactacattattataatttttttcc

SEQ ID NO: 36241 - DNA, 50 bp, synthetic construct
  source 1..50: mol_type = other DNA
cgcgctgacggtcgagttcctcgagctccttgagttcttcggctcgctcg

SEQ ID NO: 36242 - DNA, 50 bp, synthetic construct
  source 1..50: mol_type = other DNA
gactaacatttcaatcaaggatagtagtaacctacatttctaccaaagtg

SEQ ID NO: 36243 - DNA, 50 bp, synthetic construct
  source 1..50: mol_type = other DNA
aatttcatccaacaatttttcttttagtagacatctatgcggatgaaggg

SEQ ID NO: 36244 - DNA, 50 bp, synthetic construct
  source 1..50: mol_type = other DNA
cggccatatctcaaactcggaaaaaatttgacgagtttgtgatacaatat

SEQ ID NO: 36245 - DNA, 50 bp, synthetic construct
  source 1..50: mol_type = other DNA
gcattttacacgcctctgcgaattcaatgctttgtgggcgttcaatgcgc

SEQ ID NO: 36246 - DNA, 50 bp, synthetic construct
  source 1..50: mol_type = other DNA
cgataaagacattttgttaaagtacagtatttcagaaactggacaaattg

SEQ ID NO: 36247 - DNA, 50 bp, synthetic construct
  source 1..50: mol_type = other DNA
ccaagaagctcattaaaggcttgcttttaagggtttaatggtataatgaa

SEQ ID NO: 36248 - DNA, 50 bp, synthetic construct
  source 1..50: mol_type = other DNA
gcaaagaggcattgtcgcgccccacacggggcgcgtggattgaaacctgt

SEQ ID NO: 36249 - DNA, 50 bp, synthetic construct
  source 1..50: mol_type = other DNA
gccctctactgcgctgggttggctatgagaagcccaggagagaggagccc

SEQ ID NO: 36250 - DNA, 50 bp, synthetic construct
  source 1..50: mol_type = other DNA
tacatcgtcaaatagtgatagtagagttagtagacatctatgcagatgaa

SEQ ID NO: 36251 - DNA, 50 bp, synthetic construct
  source 1..50: mol_type = other DNA
gtcatatctcaaattcagaaaaaaatttatttgcgaatgatccgaatgta

SEQ ID NO: 36252 - DNA, 50 bp, synthetic construct
  source 1..50: mol_type = other DNA
tctctcatagtaaaaaagaaaaaatctttttttcatttttatcctcctaa

SEQ ID NO: 36253 - DNA, 50 bp, synthetic construct
  source 1..50: mol_type = other DNA
tcagatcggcaaggagcggaatttcatcatcggatatggtgatccgctcg

SEQ ID NO: 36254 - DNA, 50 bp, synthetic construct
  source 1..50: mol_type = other DNA
agatcagagataatatagtcaaaatatccgcacgatagcaagtcaatatc

SEQ ID NO: 36255 - DNA, 50 bp, synthetic construct
  source 1..50: mol_type = other DNA
catcacgtttttttgtattagttgctctactttgtcaaaaaaaattgaat

SEQ ID NO: 36256 - DNA, 50 bp, synthetic construct
  source 1..50: mol_type = other DNA
gccccattcaaacaaaggagctgatttttatagttttgtttttcccattt

SEQ ID NO: 36257 - DNA, 50 bp, synthetic construct
  source 1..50: mol_type = other DNA
ataggaaaaactgaacaagaaagtataaattctttttgagttttaaaacc

SEQ ID NO: 36258 - DNA, 50 bp, synthetic construct
  source 1..50: mol_type = other DNA
ccacgtttataatctcattataccattaatttttgaaaaaaaaaacggaa

SEQ ID NO: 36259 - DNA, 50 bp, synthetic construct
  source 1..50: mol_type = other DNA
ccttcatctgcatagatgtctactaaggtttcaatgtatgcattggaagg

SEQ ID NO: 36260 - DNA, 50 bp, synthetic construct
  source 1..50: mol_type = other DNA
cggctgcggccacctcgtcatgctgcggcgatactccccagtatcgaccg

SEQ ID NO: 36261 - DNA, 50 bp, synthetic construct
  source 1..50: mol_type = other DNA
acaaggctttttccggaaaggaaatatttccaatatcagaagaccttttt

SEQ ID NO: 36262 - DNA, 50 bp, synthetic construct
  source 1..50: mol_type = other DNA
gcgactggaagcctgatccgaagaaccatgaagaacaggcttccagttac

SEQ ID NO: 36263 - DNA, 50 bp, synthetic construct
  source 1..50: mol_type = other DNA
aaattataggagtcaagcagtttcttacaatacagtcaacaaattaatta

SEQ ID NO: 36264 - DNA, 50 bp, synthetic construct
  source 1..50: mol_type = other DNA
aaaatatttctgaagatgaaaaaaattttttccaatatcaaaagcttttt

SEQ ID NO: 36265 - DNA, 50 bp, synthetic construct
  source 1..50: mol_type = other DNA
atgagtgggctgaatacttgataaatctatccaggctgcagctagttcaa

SEQ ID NO: 36266 - DNA, 50 bp, synthetic construct
  source 1..50: mol_type = other DNA
catcggtggcaaaaaatattacagttttaaaaaattttcaatcaacgatt

SEQ ID NO: 36267 - DNA, 50 bp, synthetic construct
  source 1..50: mol_type = other DNA
cctcctcgggatcactttatactattgggtatattaccgttctgaagagt

SEQ ID NO: 36268 - DNA, 50 bp, synthetic construct
  source 1..50: mol_type = other DNA
aggcgttctgagtgatgtatagacgtgactataagacactctcaccggga

SEQ ID NO: 36269 - DNA, 50 bp, synthetic construct
  source 1..50: mol_type = other DNA
gcgtatgcggattccccggcaaggtatattcccgtactatccgcacgata

SEQ ID NO: 36270 - DNA, 50 bp, synthetic construct
  source 1..50: mol_type = other DNA
gatgcccgaaaacgcaatttcattattatacaaatgcttgatcaattggg

SEQ ID NO: 36271 - DNA, 50 bp, synthetic construct
  source 1..50: mol_type = other DNA
tcagataaccttaatctctcatagtactttaaatttttattcttatgatg

SEQ ID NO: 36272 - DNA, 50 bp, synthetic construct
  source 1..50: mol_type = other DNA
ttcagattttggtgatattggttcagcaaccaataccaaaaaacgtgatg

SEQ ID NO: 36273 - DNA, 50 bp, synthetic construct
  source 1..50: mol_type = other DNA
tttataaaatttttttaatttggtaaacaccctacctctaatttcattta

SEQ ID NO: 36274 - DNA, 50 bp, synthetic construct
  source 1..50: mol_type = other DNA
ttgcgcatcataagaacattagttctaataaagctggtgacctggggcaa

SEQ ID NO: 36275 - DNA, 50 bp, synthetic construct
  source 1..50: mol_type = other DNA
gaaaaagttgaagcaaataaagaattctgctcatttccttcaaggatttg

SEQ ID NO: 36276 - DNA, 50 bp, synthetic construct
  source 1..50: mol_type = other DNA
cggttttcgggcacaaaggtgtacgaaatcgtatcgattccgaattacct

SEQ ID NO: 36277 - DNA, 50 bp, synthetic construct
  source 1..50: mol_type = other DNA
tataacatgatcagcccatttctaaaaataacatgactgtaaaagttccc

SEQ ID NO: 36278 - DNA, 50 bp, synthetic construct
  source 1..50: mol_type = other DNA
agactcttaatcttcaagtggaactcttaaaacatgaagattatgagtta

SEQ ID NO: 36279 - DNA, 50 bp, synthetic construct
  source 1..50: mol_type = other DNA
aacaggaatttttacgcaagcaaatgttgaatttagtaaaaggtcaccga

SEQ ID NO: 36280 - DNA, 50 bp, synthetic construct
  source 1..50: mol_type = other DNA
tattttttctataccctattttaccagcaacatggctgcatacaataaaa

SEQ ID NO: 36281 - DNA, 50 bp, synthetic construct
  source 1..50: mol_type = other DNA
aatttcttaaaaaagaatgcataaatctaacatttctccaatagcaaaag

SEQ ID NO: 36282 - DNA, 50 bp, synthetic construct
  source 1..50: mol_type = other DNA
cgtaaaagcctttactttagtggaaaaaaggtaaagtaggagcttttacc

SEQ ID NO: 36283 - DNA, 50 bp, synthetic construct
  source 1..50: mol_type = other DNA
ttaatacggctgatcgaatcgcattgcgaagtaacgttcatccgcatctt

SEQ ID NO: 36284 - DNA, 50 bp, synthetic construct
  source 1..50: mol_type = other DNA
gatgcggaagtgttcaaaacccaaattgaggcattgaaatgtttgccagg

SEQ ID NO: 36285 - DNA, 50 bp, synthetic construct
  source 1..50: mol_type = other DNA
gaatccttcgataaatgccctatctttttatctgatttaactgttcattt

SEQ ID NO: 36286 - DNA, 50 bp, synthetic construct
  source 1..50: mol_type = other DNA
cagataattattattaatataaaattctttatagtatgaatccctatttt

SEQ ID NO: 36287 - DNA, 50 bp, synthetic construct
  source 1..50: mol_type = other DNA
tactttagtggaaaccagtgtatctagatacactaatcgagatgttagtc

SEQ ID NO: 36288 - DNA, 50 bp, synthetic construct
  source 1..50: mol_type = other DNA
ttgcatggctggacgagcagggcgagcagcccatacaacattcttgtcat

SEQ ID NO: 36289 - DNA, 50 bp, synthetic construct
  source 1..50: mol_type = other DNA
gcggatcatattttcgtctaacttaaaaataagacctccttatgttctgc

SEQ ID NO: 36290 - DNA, 50 bp, synthetic construct
  source 1..50: mol_type = other DNA
tcgagcccaagcttcctgacggttaatgtaggcagaaagatacggtccga

SEQ ID NO: 36291 - DNA, 50 bp, synthetic construct
  source 1..50: mol_type = other DNA
tgatattggaaataagcaccctatatgccggtggtgtatttgttatatct

SEQ ID NO: 36292 - DNA, 50 bp, synthetic construct
  source 1..50: mol_type = other DNA
atatggtttatcaacaagttcaattctccttcctttttggtagtcctatt

SEQ ID NO: 36293 - DNA, 50 bp, synthetic construct
  source 1..50: mol_type = other DNA
tttaatgaatgaaattaaaatcaatattgtgaaaaatgtggtcaaataat

SEQ ID NO: 36294 - DNA, 50 bp, synthetic construct
  source 1..50: mol_type = other DNA
gatgcaggtaaatcaggaaaatctatttattaccataatttccctgtata

SEQ ID NO: 36295 - DNA, 50 bp, synthetic construct
  source 1..50: mol_type = other DNA
aattcgctttgaactcccgaaaaatctttttcctgcttccaagttctctc

SEQ ID NO: 36296 - DNA, 50 bp, synthetic construct
  source 1..50: mol_type = other DNA
tctatctctataccgaattttcttgtataatttgttactatacctatgat

SEQ ID NO: 36297 - DNA, 50 bp, synthetic construct
  source 1..50: mol_type = other DNA
atccataatcatcgcctcctgaatatattaaggctatattaattaatgat

SEQ ID NO: 36298 - DNA, 50 bp, synthetic construct
  source 1..50: mol_type = other DNA
tttataatctgatacctatattaaattcaaaaaaggtataaaaataaaac

SEQ ID NO: 36299 - DNA, 50 bp, synthetic construct
  source 1..50: mol_type = other DNA
aattgataatcctggagttagaatctgcctgtctgattggattgtcatat

SEQ ID NO: 36300 - DNA, 50 bp, synthetic construct
  source 1..50: mol_type = other DNA
tgtaaagctgttgaacctgattggcaccttatctattccgatggttttgt

SEQ ID NO: 36301 - DNA, 50 bp, synthetic construct
  source 1..50: mol_type = other DNA
caggcggcaatccggcgacgggttgccatccgtgccctgatccccgtgga

SEQ ID NO: 36302 - DNA, 50 bp, synthetic construct
  source 1..50: mol_type = other DNA
tacctcaaaaatgatagcggataaaagcgttccaataccgcgttggttta

SEQ ID NO: 36303 - DNA, 50 bp, synthetic construct
  source 1..50: mol_type = other DNA
atggtgatggccagatccgttaggtaatatagggtgcttatttccaatat

SEQ ID NO: 36304 - DNA, 50 bp, synthetic construct
  source 1..50: mol_type = other DNA
caaataacatcacatatcaagagggaggaagaggtgtcgggggttcaggc

SEQ ID NO: 36305 - DNA, 50 bp, synthetic construct
  source 1..50: mol_type = other DNA
gaaagaaaggtgaaaggtatcgcagatgagatctatctgaccttttttgc

SEQ ID NO: 36306 - DNA, 50 bp, synthetic construct
  source 1..50: mol_type = other DNA
acttgctattattggctttcagagtggcatgacgagacataacataaagc

SEQ ID NO: 36307 - DNA, 50 bp, synthetic construct
  source 1..50: mol_type = other DNA
tcaggcggcaatccggcagcgggttgaaagaggaccacattgtccatatg

SEQ ID NO: 36308 - DNA, 50 bp, synthetic construct
  source 1..50: mol_type = other DNA
ttgatattgaaaacggtgatgctgatctgattcaggatctgcagaatacg

SEQ ID NO: 36309 - DNA, 50 bp, synthetic construct
  source 1..50: mol_type = other DNA
ggcgacctgttcttccttgcggaagcctccgcagggaatgaaaaatttcc

SEQ ID NO: 36310 - DNA, 50 bp, synthetic construct
  source 1..50: mol_type = other DNA
taaacgaaacaacttacagaaaaattgtctacggacagacgcaaggttta

SEQ ID NO: 36311 - DNA, 50 bp, synthetic construct
  source 1..50: mol_type = other DNA
tggacctatgaaaaaaagttatcgcacgatgtcaagctgcaataccccgt

SEQ ID NO: 36312 - DNA, 50 bp, synthetic construct
  source 1..50: mol_type = other DNA
tgctatttgcaggtgtcagagcgaatatttgcttgaaaaagcaaatacca

SEQ ID NO: 36313 - DNA, 50 bp, synthetic construct
  source 1..50: mol_type = other DNA
cgggatgtggagacggaaatgcagatataaatattggcagaacacttctt

SEQ ID NO: 36314 - DNA, 50 bp, synthetic construct
  source 1..50: mol_type = other DNA
actctgctccctgcgtttgcggggagccccgactcgaacgggagcagatt

SEQ ID NO: 36315 - DNA, 50 bp, synthetic construct
  source 1..50: mol_type = other DNA
gtatgggtgcgcccgtagctttatgagcattcgtctgggcggcgattcag

SEQ ID NO: 36316 - DNA, 50 bp, synthetic construct
  source 1..50: mol_type = other DNA
gatttcaggatgatgaggtttccgaatcaattcctccaactcctgcaaaa

SEQ ID NO: 36317 - DNA, 50 bp, synthetic construct
  source 1..50: mol_type = other DNA
aacacctttgcaatgggctaaaactgataggcagccatggcgagcttttg

SEQ ID NO: 36318 - DNA, 50 bp, synthetic construct
  source 1..50: mol_type = other DNA
gagaaaacacttgctattattggcttcataatagtacctcctgttttctt

SEQ ID NO: 36319 - DNA, 50 bp, synthetic construct
  source 1..50: mol_type = other DNA
aagtacagaagagaacaggatttcgtatcatcctgttctgggatatcgga

SEQ ID NO: 36320 - DNA, 50 bp, synthetic construct
  source 1..50: mol_type = other DNA
tcctgcaaatctcaagactcctttaaggcacaggtcagctattatacgga

SEQ ID NO: 36321 - DNA, 50 bp, synthetic construct
  source 1..50: mol_type = other DNA
cgacaaggatgacaaggataccattttcagaatccatgtcttccatgtcg

SEQ ID NO: 36322 - DNA, 50 bp, synthetic construct
  source 1..50: mol_type = other DNA
actttctgaacagtctggtcattacggtactacttcacccgccagaccgc

SEQ ID NO: 36323 - DNA, 50 bp, synthetic construct
  source 1..50: mol_type = other DNA
gaatatgacgcattcaaaagagaggacgttcttctgaatgtcctctttct

SEQ ID NO: 36324 - DNA, 50 bp, synthetic construct
  source 1..50: mol_type = other DNA
gctgatttaaccaactactaagatttagcgagtataggggttacatcagc

SEQ ID NO: 36325 - DNA, 50 bp, synthetic construct
  source 1..50: mol_type = other DNA
aattaaatgctcaaaatttctctccggagaggcattccaagcaagaaggg

SEQ ID NO: 36326 - DNA, 50 bp, synthetic construct
  source 1..50: mol_type = other DNA
aaaacaccggtttcaatacaaaatatttgcaagaatgaagacggggttca

SEQ ID NO: 36327 - DNA, 50 bp, synthetic construct
  source 1..50: mol_type = other DNA
cgccggtgggtgcggtgttgttagtactaactacgcatcccccgtcggct

SEQ ID NO: 36328 - DNA, 50 bp, synthetic construct
  source 1..50: mol_type = other DNA
gccgaaggtctgacaccggaggaattattgtacgtgctcagcactgcata

SEQ ID NO: 36329 - DNA, 50 bp, synthetic construct
  source 1..50: mol_type = other DNA
acgcaattcattcgattgatttcaatggaactgaattttatcaaatgtgg

SEQ ID NO: 36330 - DNA, 50 bp, synthetic construct
  source 1..50: mol_type = other DNA
tattatatcatattatctttaaaaatttttactacctatacaaagtaatg

SEQ ID NO: 36331 - DNA, 50 bp, synthetic construct
  source 1..50: mol_type = other DNA
taagcctgtcggtataggaggaaaattcagcgtctggaacgacaggctga

SEQ ID NO: 36332 - DNA, 50 bp, synthetic construct
  source 1..50: mol_type = other DNA
caaaatcaaataaaggaggtctgaatcatactttccttttttcgacaatc

SEQ ID NO: 36333 - DNA, 50 bp, synthetic construct
  source 1..50: mol_type = other DNA
ggcctcctttgcatctgctgagggggaaaatgtgatatgtaaggttgcgt

SEQ ID NO: 36334 - DNA, 50 bp, synthetic construct
  source 1..50: mol_type = other DNA
aaccgtccgatatcccggaacagaattctggtaataggtaatatacggtt

SEQ ID NO: 36335 - DNA, 50 bp, synthetic construct
  source 1..50: mol_type = other DNA
gatccgtggaaacacggcagtaggctcctactcccggatttccacgcaat

SEQ ID NO: 36336 - DNA, 50 bp, synthetic construct
  source 1..50: mol_type = other DNA
cattaacgatagacattaaaaaaagcttttttacgtctctatcgttgcta

SEQ ID NO: 36337 - DNA, 50 bp, synthetic construct
  source 1..50: mol_type = other DNA
tggttatccgtcccatgaagcttttgaagcacaggtcgattattacacca

SEQ ID NO: 36338 - DNA, 50 bp, synthetic construct
  source 1..50: mol_type = other DNA
tcaggcaggactgtaccaatattatatccatccggtcagtatcatcctgt

SEQ ID NO: 36339 - DNA, 50 bp, synthetic construct
  source 1..50: mol_type = other DNA
agcattttaagaaaagaggtaaaaatattatggaaatttctttaaataga

SEQ ID NO: 36340 - DNA, 50 bp, synthetic construct
  source 1..50: mol_type = other DNA
aatgagtgagagaatcaagaaaataaaagttggtcatccttaaactcttc

SEQ ID NO: 36341 - DNA, 50 bp, synthetic construct
  source 1..50: mol_type = other DNA
tttgggtacattattatcggaaaacggtattttttaatgttgtactgtaa

SEQ ID NO: 36342 - DNA, 50 bp, synthetic construct
  source 1..50: mol_type = other DNA
attccagacttttttgttgttggtatatcataaaaaacattttccgggat

SEQ ID NO: 36343 - DNA, 50 bp, synthetic construct
  source 1..50: mol_type = other DNA
caattatattgacaagtaaggctgttttgcctatctattttttattagct

SEQ ID NO: 36344 - DNA, 50 bp, synthetic construct
  source 1..50: mol_type = other DNA
agccgccttggcctgcaaagaccgccaaatcattatacgctaattgacat

SEQ ID NO: 36345 - DNA, 50 bp, synthetic construct
  source 1..50: mol_type = other DNA
agcctttgaagcagaagagcggggagaccagctccacagctttgaagcac

SEQ ID NO: 36346 - DNA, 50 bp, synthetic construct
  source 1..50: mol_type = other DNA
ttgattccatactggagaaattcgtccgcatccccaggttcaggaatgtc

SEQ ID NO: 36347 - DNA, 50 bp, synthetic construct
  source 1..50: mol_type = other DNA
ctggttttggagtccagcgctcctgtgggttcatcagccaggatcaggga

SEQ ID NO: 36348 - DNA, 50 bp, synthetic construct
  source 1..50: mol_type = other DNA
gaactaccgttctcagcagcctgtttcgcaaaagcggaacgtatatcagc

SEQ ID NO: 36349 - DNA, 50 bp, synthetic construct
  source 1..50: mol_type = other DNA
ttgtgctgcatcggtagtaatggtatgctataatgatacagtaagcacaa

SEQ ID NO: 36350 - DNA, 50 bp, synthetic construct
  source 1..50: mol_type = other DNA
ctgccaatttggcccaatagctcagctgatgatgcggatgggaaaaatct

SEQ ID NO: 36351 - DNA, 50 bp, synthetic construct
  source 1..50: mol_type = other DNA
cgcggagggcgtggatagaaattctcgcattttgtcaagcacttttcggc

SEQ ID NO: 36352 - DNA, 50 bp, synthetic construct
  source 1..50: mol_type = other DNA
atccgcacataaataaaaccgccccgggggcgttttccggcagtgcggcg

SEQ ID NO: 36353 - DNA, 50 bp, synthetic construct
  source 1..50: mol_type = other DNA
ggatacgtcaggccgaccggcggcgcgcacgatcgcgcgcacacgcacgc

SEQ ID NO: 36354 - DNA, 50 bp, synthetic construct
  source 1..50: mol_type = other DNA
ttttttctggacgtggacaagaaatattccataggaacgtccgaccaaaa

SEQ ID NO: 36355 - DNA, 50 bp, synthetic construct
  source 1..50: mol_type = other DNA
gcgaccatttccagatgcgctaattcttccgttccaatatccgtaagcac

SEQ ID NO: 36356 - DNA, 50 bp, synthetic construct
  source 1..50: mol_type = other DNA
cacaagccttataaaacaggcttaaatagagctttctgtcaagattattg

SEQ ID NO: 36357 - DNA, 50 bp, synthetic construct
  source 1..50: mol_type = other DNA
ttattgctattattgtaaacaagatttagttgcaacaataaaagcaattc

SEQ ID NO: 36358 - DNA, 50 bp, synthetic construct
  source 1..50: mol_type = other DNA
ttttcattttattcttcctcttcagattaatagctagagtaaaagagtat

SEQ ID NO: 36359 - DNA, 50 bp, synthetic construct
  source 1..50: mol_type = other DNA
atactcatacaaaaggatggtatgtatatgccatactctttgccgattat

SEQ ID NO: 36360 - DNA, 50 bp, synthetic construct
  source 1..50: mol_type = other DNA
cgaaaatcctgaagaggaagaagaaatactcatctccttcaaatatttct

SEQ ID NO: 36361 - DNA, 50 bp, synthetic construct
  source 1..50: mol_type = other DNA
tggccggataagacactgtatgatatatcgaataactccatatccggctg

SEQ ID NO: 36362 - DNA, 50 bp, synthetic construct
  source 1..50: mol_type = other DNA
taaagaaacgtttgatgaatgattataataaggaatatagcgattctttg

SEQ ID NO: 36363 - DNA, 50 bp, synthetic construct
  source 1..50: mol_type = other DNA
cagaagaaaacggatgagccagagtcgtattgttcctgctcttttctcct

SEQ ID NO: 36364 - DNA, 50 bp, synthetic construct
  source 1..50: mol_type = other DNA
gtcattgatgtacttcgtataataatcattatacgaatattttctgtcca

SEQ ID NO: 36365 - DNA, 50 bp, synthetic construct
  source 1..50: mol_type = other DNA
tacaatattattatatcacaatcagtttatagtttgcagtttgtagtgat

SEQ ID NO: 36366 - DNA, 50 bp, synthetic construct
  source 1..50: mol_type = other DNA
aaataaaacggcaaaaatccacgcaagaaatggctttctccgtattatct

SEQ ID NO: 36367 - DNA, 50 bp, synthetic construct
  source 1..50: mol_type = other DNA
cggcgagttggagtggttgtggactgtcgtccaggccctcgttttcgatt

SEQ ID NO: 36368 - DNA, 50 bp, synthetic construct
  source 1..50: mol_type = other DNA
tcaaaaacgcatacttcaaaacagatttgtttttgcgtctgtaattttga

SEQ ID NO: 36369 - DNA, 50 bp, synthetic construct
  source 1..50: mol_type = other DNA
tatcaagggcttccggcgttttttataaaagaggagggtgtctatttctc

SEQ ID NO: 36370 - DNA, 50 bp, synthetic construct
  source 1..50: mol_type = other DNA
ttacccaaaaatcgaatatgtggatactctcatagggtctttgttaaaaa

SEQ ID NO: 36371 - DNA, 50 bp, synthetic construct
  source 1..50: mol_type = other DNA
cttccagactgccagcgaaggaaacaattccttcatcgtcagaattgatt

SEQ ID NO: 36372 - DNA, 50 bp, synthetic construct
  source 1..50: mol_type = other DNA
aaaagtacgataaatacggtattagcatcaaccatatttatccagtaacc

SEQ ID NO: 36373 - DNA, 50 bp, synthetic construct
  source 1..50: mol_type = other DNA
tatttttattgacaaaataaaaaaagctttttactttggaacacaactta

SEQ ID NO: 36374 - DNA, 50 bp, synthetic construct
  source 1..50: mol_type = other DNA
atcgacccgacaatcgtattgtaccaggacaccatgacaagccgggacac

SEQ ID NO: 36375 - DNA, 50 bp, synthetic construct
  source 1..50: mol_type = other DNA
gattatttatagaaaagctttttttaatagcattaaatctattacctttt

SEQ ID NO: 36376 - DNA, 50 bp, synthetic construct
  source 1..50: mol_type = other DNA
caggggaatgcagcccggcattaccagttctgcacggcctcggcaaagct

SEQ ID NO: 36377 - DNA, 50 bp, synthetic construct
  source 1..50: mol_type = other DNA
gcataaactcccacagaagaaagctgaattccatctgggcaagtttcaga

SEQ ID NO: 36378 - DNA, 50 bp, synthetic construct
  source 1..50: mol_type = other DNA
ctgtcttttacttcgagcgagccgggcggcaaagcggtcataaatgaaaa

SEQ ID NO: 36379 - DNA, 50 bp, synthetic construct
  source 1..50: mol_type = other DNA
gcggcgcagttagcggaacagatgaacgggtgttccgcttgcgaagctgt

SEQ ID NO: 36380 - DNA, 50 bp, synthetic construct
  source 1..50: mol_type = other DNA
caatatacgcagtaacaggtacattctgttgactgtttttgccgattttg

SEQ ID NO: 36381 - DNA, 50 bp, synthetic construct
  source 1..50: mol_type = other DNA
agccgcagaagaagcggcggcatccgggtgtaaaaaaaccttctcccgcc

SEQ ID NO: 36382 - DNA, 50 bp, synthetic construct
  source 1..50: mol_type = other DNA
gtcaagcaaccaattttgacgcaatactccattcttattaatttattcct

SEQ ID NO: 36383 - DNA, 50 bp, synthetic construct
  source 1..50: mol_type = other DNA
attttatttcagcatgaaaattttatccttggcataaactgaaaaaaata

SEQ ID NO: 36384 - DNA, 50 bp, synthetic construct
  source 1..50: mol_type = other DNA
ttctgaacagtcttcattccctgtgggccatgaatatggactacggcgcg

SEQ ID NO: 36385 - DNA, 50 bp, synthetic construct
  source 1..50: mol_type = other DNA
acaatatccacgtttataatctcattatcgattataaacacggtctcggt

SEQ ID NO: 36386 - DNA, 50 bp, synthetic construct
  source 1..50: mol_type = other DNA
caatttgtccagtttctgaaatactgtactttaacaaaatgtctttattg

SEQ ID NO: 36387 - DNA, 50 bp, synthetic construct
  source 1..50: mol_type = other DNA
ttgcccacccgattacttggcaggcacctccctcgtaatttggaggcgac

SEQ ID NO: 36388 - DNA, 50 bp, synthetic construct
  source 1..50: mol_type = other DNA
cccgtccttgattttacagaatgatatcatccgagaaacagccgaacaat

SEQ ID NO: 36389 - DNA, 50 bp, synthetic construct
  source 1..50: mol_type = other DNA
tggtattgtgtgtcgtgccaaaagtcgcagtgtcacgaatccccctacca

SEQ ID NO: 36390 - DNA, 50 bp, synthetic construct
  source 1..50: mol_type = other DNA
ctcttcctgtacctgagtaaaaatatcttctccaaacacccacacctcct

SEQ ID NO: 36391 - DNA, 50 bp, synthetic construct
  source 1..50: mol_type = other DNA
tttccatcttcaatgatgtatccaaagggatacatccttgctgcattcaa

SEQ ID NO: 36392 - DNA, 50 bp, synthetic construct
  source 1..50: mol_type = other DNA
cgacaaacagcttctatcaggtacttaaacggcatagaagcggtttacaa

SEQ ID NO: 36393 - DNA, 50 bp, synthetic construct
  source 1..50: mol_type = other DNA
atctgcaacctattctaaataacagttgtaaattagattttattgcatct

SEQ ID NO: 36394 - DNA, 50 bp, synthetic construct
  source 1..50: mol_type = other DNA
ctttttcattttcaacagtagtgtccgtcacactgttcttcatgaaaaag

SEQ ID NO: 36395 - DNA, 50 bp, synthetic construct
  source 1..50: mol_type = other DNA
ataatccatatcaaatattacttcagacaaagatatgttatatttcttcc

SEQ ID NO: 36396 - DNA, 50 bp, synthetic construct
  source 1..50: mol_type = other DNA
ctgtgtttgataatactcccatattattcatggaatggtattcggaagga

SEQ ID NO: 36397 - DNA, 50 bp, synthetic construct
  source 1..50: mol_type = other DNA
tagaggtttgataaaattgatattatatcatcctccttaaaaatgagtat

SEQ ID NO: 36398 - DNA, 50 bp, synthetic construct
  source 1..50: mol_type = other DNA
tccgcaggaagatatatttgctgtgggtagtctatatatcactctgaaag

SEQ ID NO: 36399 - DNA, 50 bp, synthetic construct
  source 1..50: mol_type = other DNA
tatcatgaaagcctccattcaccatagaagccctggaagccgaaatcgct

SEQ ID NO: 36400 - DNA, 50 bp, synthetic construct
  source 1..50: mol_type = other DNA
tcagtgctacaacattgccgcagatatctgtttgcgtttgccgctcacag

SEQ ID NO: 36401 - DNA, 50 bp, synthetic construct
  source 1..50: mol_type = other DNA
ttttgcatccattgtgtttatgttctttttagaacataatctcggctaaa

SEQ ID NO: 36402 - DNA, 50 bp, synthetic construct
  source 1..50: mol_type = other DNA
agtttcagaagaccgaattcctaactccggtgcttccatcttctttttct

SEQ ID NO: 36403 - DNA, 50 bp, synthetic construct
  source 1..50: mol_type = other DNA
tcatctgctcgcagtacggtgggccgggattgggtgacgcttgcagtacc

SEQ ID NO: 36404 - DNA, 50 bp, synthetic construct
  source 1..50: mol_type = other DNA
gaccttattaaatatggcgaatatatacatctttcatttttgcctcccta

SEQ ID NO: 36405 - DNA, 50 bp, synthetic construct
  source 1..50: mol_type = other DNA
atttttatatattgtgatacggttttcaaaaaatcggtcaatatattcgt

SEQ ID NO: 36406 - DNA, 50 bp, synthetic construct
  source 1..50: mol_type = other DNA
gcgaacggaagcaccgtttccggctcggcataatcgtgagcctcgtacag

SEQ ID NO: 36407 - DNA, 50 bp, synthetic construct
  source 1..50: mol_type = other DNA
actatgataccacatttcaggatcaagcccctgaattgtgataaaataag

SEQ ID NO: 36408 - DNA, 50 bp, synthetic construct
  source 1..50: mol_type = other DNA
cttatcaagtaccgttataccggaaaatgggtataaaaatacaaccaaca

SEQ ID NO: 36409 - DNA, 50 bp, synthetic construct
  source 1..50: mol_type = other DNA
aagcttattcttgctgatgagcctacaggagcacttgattcaaggtcatc

SEQ ID NO: 36410 - DNA, 50 bp, synthetic construct
  source 1..50: mol_type = other DNA
gcattcttcaaggataatcctgacaagtctacgttataccttatgaatgc

SEQ ID NO: 36411 - DNA, 50 bp, synthetic construct
  source 1..50: mol_type = other DNA
gatagtcattcaattttttttgacaatacaaaaaaacgtgatgcttttaa

SEQ ID NO: 36412 - DNA, 50 bp, synthetic construct
  source 1..50: mol_type = other DNA
gtgtggattcttcacgatacaactgtgatataatagtataaaataatatt

SEQ ID NO: 36413 - DNA, 50 bp, synthetic construct
  source 1..50: mol_type = other DNA
aaggttaccttccctatcctttgtatatacatcactctaaatgtcacaat

SEQ ID NO: 36414 - DNA, 50 bp, synthetic construct
  source 1..50: mol_type = other DNA
ggtctgtttcatgctgcttttaactccatgccatcagcatgcagaggaac

SEQ ID NO: 36415 - DNA, 50 bp, synthetic construct
  source 1..50: mol_type = other DNA
ccgccacgatgatataatgtcctttttttcacattatatcatagtcccgc

SEQ ID NO: 36416 - DNA, 50 bp, synthetic construct
  source 1..50: mol_type = other DNA
ttcattttggaattacagtttgcggattacaactttaattggattatgaa

SEQ ID NO: 36417 - DNA, 50 bp, synthetic construct
  source 1..50: mol_type = other DNA
ataatttttgaaccctattgcattttccgacactatacatcactctttat

SEQ ID NO: 36418 - DNA, 50 bp, synthetic construct
  source 1..50: mol_type = other DNA
aataatcgaagagccaaataggtgattacgcatttggtgcttgcattcaa

SEQ ID NO: 36419 - DNA, 50 bp, synthetic construct
  source 1..50: mol_type = other DNA
gaaaattcccggggcggccttttctggaaaaggccgcgacataaacgatc

SEQ ID NO: 36420 - DNA, 50 bp, synthetic construct
  source 1..50: mol_type = other DNA
cgggatataccacgcaatccgatgaatccgaattttatcggattatcccg

SEQ ID NO: 36421 - DNA, 50 bp, synthetic construct
  source 1..50: mol_type = other DNA
cgaaagcaaggcgaaaattgccaagctttctgctctggagcggtctttcc

SEQ ID NO: 36422 - DNA, 50 bp, synthetic construct
  source 1..50: mol_type = other DNA
atctttatcgaacactctcagttcacctccttggggtgtgtgacatatta

SEQ ID NO: 36423 - DNA, 50 bp, synthetic construct
  source 1..50: mol_type = other DNA
aacatttttgcagatatccttctcctgtgcggggtatgagcagttttttg

SEQ ID NO: 36424 - DNA, 50 bp, synthetic construct
  source 1..50: mol_type = other DNA
aagcgccgccccatcggtaccggtctttgtgtgtttagggggcgaggccg

SEQ ID NO: 36425 - DNA, 50 bp, synthetic construct
  source 1..50: mol_type = other DNA
caaaaaagatatatgatgatgtatgcattgattttcataaattttcttct

SEQ ID NO: 36426 - DNA, 50 bp, synthetic construct
  source 1..50: mol_type = other DNA
atatggtgggttattctgtgtacggttgtcaacagaatatgttgaaatat

SEQ ID NO: 36427 - DNA, 50 bp, synthetic construct
  source 1..50: mol_type = other DNA
aattgcactggatggagaaatgccaataaatttttccatccttagcaata

SEQ ID NO: 36428 - DNA, 50 bp, synthetic construct
  source 1..50: mol_type = other DNA
gtatggctccaaaacacaagtaaatatttcttcttgggtgtatcgcatat

SEQ ID NO: 36429 - DNA, 50 bp, synthetic construct
  source 1..50: mol_type = other DNA
ttaaaaaagaccccgcctgtgcggggttgcgtcggcaagaacaacggcaa

SEQ ID NO: 36430 - DNA, 50 bp, synthetic construct
  source 1..50: mol_type = other DNA
aactcatgggcgtctgttccttccaatcaggtcaattattatcgtgaatt

SEQ ID NO: 36431 - DNA, 50 bp, synthetic construct
  source 1..50: mol_type = other DNA
ccggccagaaagctacagcaaacggtgatttgcttgttaatgatggacta

SEQ ID NO: 36432 - DNA, 50 bp, synthetic construct
  source 1..50: mol_type = other DNA
aaacacctctgctttttttcgggttcaccagctacagcgcccaggtggac

SEQ ID NO: 36433 - DNA, 50 bp, synthetic construct
  source 1..50: mol_type = other DNA
gcagcgcatatgtggtagcaagattctcctcattgccaactacggcagtg

SEQ ID NO: 36434 - DNA, 50 bp, synthetic construct
  source 1..50: mol_type = other DNA
ttaatatgtaacactgaggagggatataatttgccagtgaagcgttttaa

SEQ ID NO: 36435 - DNA, 50 bp, synthetic construct
  source 1..50: mol_type = other DNA
ataaaagcctgaaaacaacgaagtttactcatttgaaagacggcttttca

SEQ ID NO: 36436 - DNA, 50 bp, synthetic construct
  source 1..50: mol_type = other DNA
aaaaggaaataattatattagaaatatttctaatactggaaagccgtttt

SEQ ID NO: 36437 - DNA, 50 bp, synthetic construct
  source 1..50: mol_type = other DNA
tcgaggagctcgaccgacagcgcgagctcgctgtcagtctccatcggcgc

SEQ ID NO: 36438 - DNA, 50 bp, synthetic construct
  source 1..50: mol_type = other DNA
tctgaaatgaaaacggcagggggtgcccgccgtgacgctcggctgccaga

SEQ ID NO: 36439 - DNA, 50 bp, synthetic construct
  source 1..50: mol_type = other DNA
cacacgcgcataggcggctactctgccatcaagcccgcgttgcggagggc

SEQ ID NO: 36440 - DNA, 50 bp, synthetic construct
  source 1..50: mol_type = other DNA
ccactcatccaaggaggcagattatgtgaagtgaccacgcggattctctc

SEQ ID NO: 36441 - DNA, 50 bp, synthetic construct
  source 1..50: mol_type = other DNA
atgcattcctctagattatttattttctccagaataaaaccggaacaaca

SEQ ID NO: 36442 - DNA, 50 bp, synthetic construct
  source 1..50: mol_type = other DNA
cgacccttctctttttctggctatgaatagccaaagtttatgacgatgcc

SEQ ID NO: 36443 - DNA, 50 bp, synthetic construct
  source 1..50: mol_type = other DNA
gtgagcagtctcttctaaaccttctcgcagcttggaaagtccctgcgtac

SEQ ID NO: 36444 - DNA, 50 bp, synthetic construct
  source 1..50: mol_type = other DNA
atatcaggaaatgtatgattggcttattccaaagttacacagcctgcttc

SEQ ID NO: 36445 - DNA, 50 bp, synthetic construct
  source 1..50: mol_type = other DNA
tataaaaataagacctcacatttatgtaaaaatgctgtctggccacaaat

SEQ ID NO: 36446 - DNA, 50 bp, synthetic construct
  source 1..50: mol_type = other DNA
gattaaatgtattgctgtctcttcaggcagagaaagccgtaagatacata

SEQ ID NO: 36447 - DNA, 50 bp, synthetic construct
  source 1..50: mol_type = other DNA
gtctgtgatggccgggaacatgtatgacggaaatcccggcctccaaaatc

SEQ ID NO: 36448 - DNA, 50 bp, synthetic construct
  source 1..50: mol_type = other DNA
tattgtatcacaagaacctgaaaaaatttcttcgttgttgtaataagctt

SEQ ID NO: 36449 - DNA, 50 bp, synthetic construct
  source 1..50: mol_type = other DNA
aacgccgcgcggcatagtacctttattagtgtactgtgccgcccggaacc

SEQ ID NO: 36450 - DNA, 50 bp, synthetic construct
  source 1..50: mol_type = other DNA
gcggctgttgaactggctaagaaatatttagtagattattcatcctttct

SEQ ID NO: 36451 - DNA, 50 bp, synthetic construct
  source 1..50: mol_type = other DNA
ttgacattcacattcatttgtgatatatcacaatcgattctgaaagtcca

SEQ ID NO: 36452 - DNA, 50 bp, synthetic construct
  source 1..50: mol_type = other DNA
aagcatttttgcatactttgtaaatatgaaaaaaagagtataaaaataac

SEQ ID NO: 36453 - DNA, 50 bp, synthetic construct
  source 1..50: mol_type = other DNA
caactttatattaaactcatatttataaaatagagggctttatgaggctg

SEQ ID NO: 36454 - DNA, 50 bp, synthetic construct
  source 1..50: mol_type = other DNA
cggcgttcctgtccggctgggccccctgttccagcaggaagcggccacct

SEQ ID NO: 36455 - DNA, 50 bp, synthetic construct
  source 1..50: mol_type = other DNA
ggaaacgacatgcgcgcaagtgcgctctgccttgttcgccgagcgtgatg

SEQ ID NO: 36456 - DNA, 50 bp, synthetic construct
  source 1..50: mol_type = other DNA
cagcatgacgagttgaaaacaaaaattttggttggtatcatattatgaca

SEQ ID NO: 36457 - DNA, 50 bp, synthetic construct
  source 1..50: mol_type = other DNA
tgtgacccgaaaggataacacacatgatgtggacatcgtttcggactggc

SEQ ID NO: 36458 - DNA, 50 bp, synthetic construct
  source 1..50: mol_type = other DNA
gctgttatctctcaaaaaacgtcttatagaaatttaccagaaaaaacata

SEQ ID NO: 36459 - DNA, 50 bp, synthetic construct
  source 1..50: mol_type = other DNA
tgcttcatcttgtttctccttgttcctgcaaccataaatccaatgacgca

SEQ ID NO: 36460 - DNA, 50 bp, synthetic construct
  source 1..50: mol_type = other DNA
gacttctggatgcgggggcggatgagtaaacaccgccgcatagagaagct

SEQ ID NO: 36461 - DNA, 50 bp, synthetic construct
  source 1..50: mol_type = other DNA
tggtctaaatttcttataaaaaatataatttttatatggatcatattcct

SEQ ID NO: 36462 - DNA, 50 bp, synthetic construct
  source 1..50: mol_type = other DNA
ggacacatatcattcgcccatgtatattgactttaatatgatatcatagt

SEQ ID NO: 36463 - DNA, 50 bp, synthetic construct
  source 1..50: mol_type = other DNA
aacttatctacaccgaagccatactggcatgatgtcgatgtagatggttt

SEQ ID NO: 36464 - DNA, 50 bp, synthetic construct
  source 1..50: mol_type = other DNA
caacggtctccaaaaccgtaggttggggccgactccggtggtttccgtgt

SEQ ID NO: 36465 - DNA, 50 bp, synthetic construct
  source 1..50: mol_type = other DNA
aaacattttcaccagtattagcggccatcataatcatggtgaaaaagata

SEQ ID NO: 36466 - DNA, 50 bp, synthetic construct
  source 1..50: mol_type = other DNA
ttcctttcggaaggaaaatctgacgatcaagcatttccttgaaaaaggcg

SEQ ID NO: 36467 - DNA, 50 bp, synthetic construct
  source 1..50: mol_type = other DNA
tcaccaacagttacggtaaccagtatacttagtatgttaggtgttagtgt

SEQ ID NO: 36468 - DNA, 50 bp, synthetic construct
  source 1..50: mol_type = other DNA
cataaaacagggctttttgttaatatttaactctatattgattttatata

SEQ ID NO: 36469 - DNA, 50 bp, synthetic construct
  source 1..50: mol_type = other DNA
acattaaaagatttctataacattttaatgatataatgagattataaacg

SEQ ID NO: 36470 - DNA, 50 bp, synthetic construct
  source 1..50: mol_type = other DNA
gcagcgacgaaaagctgaaaaagctggattttttcgctttttcccgccgt

SEQ ID NO: 36471 - DNA, 50 bp, synthetic construct
  source 1..50: mol_type = other DNA
tccctgcccaaccgggagatttctctatatatcactctaaaaggcaggaa

SEQ ID NO: 36472 - DNA, 50 bp, synthetic construct
  source 1..50: mol_type = other DNA
tttattatttcattatatttttcgttagaaaatgataatgaaaatttatt

SEQ ID NO: 36473 - DNA, 50 bp, synthetic construct
  source 1..50: mol_type = other DNA
aaatcggcagccgataaaaacgaagcgcattattaccgtaatgccttttg

SEQ ID NO: 36474 - DNA, 50 bp, synthetic construct
  source 1..50: mol_type = other DNA
gatgaccttgagtcaagcgctcctgtcggctcatcagcaagaataagctt

SEQ ID NO: 36475 - DNA, 50 bp, synthetic construct
  source 1..50: mol_type = other DNA
caaattgtaaatccactatgcgaggcctcacagagctaaacgacgacctg

SEQ ID NO: 36476 - DNA, 50 bp, synthetic construct
  source 1..50: mol_type = other DNA
cttaaatcatctaatttctcttgtatccaagaggaaacgcaggattctct

SEQ ID NO: 36477 - DNA, 50 bp, synthetic construct
  source 1..50: mol_type = other DNA
ccctctacatgactcggtagctcagcttcagcggaacctcctgtatacgg

SEQ ID NO: 36478 - DNA, 50 bp, synthetic construct
  source 1..50: mol_type = other DNA
gcaggaactcatgaagctaccaatgcagcgcgtgccgatctcgttctcct

SEQ ID NO: 36479 - DNA, 50 bp, synthetic construct
  source 1..50: mol_type = other DNA
taataaatatggaatatttgaaattaacatcttataaattacagttatta

SEQ ID NO: 36480 - DNA, 50 bp, synthetic construct
  source 1..50: mol_type = other DNA
aaaagcatattgagattgttatattaaaataaacatccaatttgactttt

SEQ ID NO: 36481 - DNA, 50 bp, synthetic construct
  source 1..50: mol_type = other DNA
tctaaactagatttttcgctatctgcgataaaagaataatcaagtttaag

SEQ ID NO: 36482 - DNA, 50 bp, synthetic construct
  source 1..50: mol_type = other DNA
gtggatgacagggatgtgactgaaattatgcagcttccgcaaggaagaac

SEQ ID NO: 36483 - DNA, 50 bp, synthetic construct
  source 1..50: mol_type = other DNA
aattttacagcgtttccgataaatccattgatcataatctccgtaacaga

SEQ ID NO: 36484 - DNA, 50 bp, synthetic construct
  source 1..50: mol_type = other DNA
gattttagtttttgtcgctgttgggttgtcaagggggaaatgaaaatttt

SEQ ID NO: 36485 - DNA, 50 bp, synthetic construct
  source 1..50: mol_type = other DNA
ttattttgttcccgacattcatgccggtatcggtgtactggttcccgatg

SEQ ID NO: 36486 - DNA, 50 bp, synthetic construct
  source 1..50: mol_type = other DNA
acatggcgaaatcatacgagaaataaccttctgaagtgatttcgcaatta

SEQ ID NO: 36487 - DNA, 50 bp, synthetic construct
  source 1..50: mol_type = other DNA
ctattgaacattataaaaagaaatatgtttttttcaattttgttcaatat

SEQ ID NO: 36488 - DNA, 50 bp, synthetic construct
  source 1..50: mol_type = other DNA
agaaagaaataagaaaatacttgaaaacactccttttatttgatttttct

SEQ ID NO: 36489 - DNA, 50 bp, synthetic construct
  source 1..50: mol_type = other DNA
ttagtttaataatattatcaacttcggttacaagaatattatcaaatgcg

SEQ ID NO: 36490 - DNA, 50 bp, synthetic construct
  source 1..50: mol_type = other DNA
gaatctgtctgtcggagaataatcatagtccagctcccccagatagatgt

SEQ ID NO: 36491 - DNA, 50 bp, synthetic construct
  source 1..50: mol_type = other DNA
tctgctttaccatttacaatcttatataggtgcagcggcaaacctgctac

SEQ ID NO: 36492 - DNA, 50 bp, synthetic construct
  source 1..50: mol_type = other DNA
ttttacctatgaatgtcgagatattattttctcgaaatgaaatcggtttt

SEQ ID NO: 36493 - DNA, 50 bp, synthetic construct
  source 1..50: mol_type = other DNA
aggccattattgggtacattattcgccaagaacggctgcaataaaggcct

SEQ ID NO: 36494 - DNA, 50 bp, synthetic construct
  source 1..50: mol_type = other DNA
agaggaacgccgagaggccatgagccaagaatacctgccggctttacgat

SEQ ID NO: 36495 - DNA, 50 bp, synthetic construct
  source 1..50: mol_type = other DNA
taagatcaaatgattgtatgagttgaaacgttcctgataattataaagta

SEQ ID NO: 36496 - DNA, 50 bp, synthetic construct
  source 1..50: mol_type = other DNA
atggtcttcaaatcaagaatacctttcacctttctttccttggcataaaa

SEQ ID NO: 36497 - DNA, 50 bp, synthetic construct
  source 1..50: mol_type = other DNA
tatttgtaccaggcattgccgatgctttcttagaaaaataggtataaaaa

SEQ ID NO: 36498 - DNA, 50 bp, synthetic construct
  source 1..50: mol_type = other DNA
acaagaaagcgagtcgctgcctacgccagtatagctgctgttgttctttt

SEQ ID NO: 36499 - DNA, 50 bp, synthetic construct
  source 1..50: mol_type = other DNA
aaagcgccctgatctgattactggatccgatgtctggatcacttccggtt

SEQ ID NO: 36500 - DNA, 50 bp, synthetic construct
  source 1..50: mol_type = other DNA
tcatccttgagggagtgggttagtggaaaggctattatcgataaggatga

SEQ ID NO: 36501 - DNA, 50 bp, synthetic construct
  source 1..50: mol_type = other DNA
gacaaaagcgtttaatgatccttatgttaatatcatattatgcttatgtt

SEQ ID NO: 36502 - DNA, 50 bp, synthetic construct
  source 1..50: mol_type = other DNA
atgtaacatttattttttgagtattgtgttttgaaaaatatatattatat

SEQ ID NO: 36503 - DNA, 50 bp, synthetic construct
  source 1..50: mol_type = other DNA
aatatctgactgataaggaggtattaatagcagttctgatttaccacgtt

SEQ ID NO: 36504 - DNA, 50 bp, synthetic construct
  source 1..50: mol_type = other DNA
actctattttttcgaaggggggaatcaaaaacaagaagataaaacaaagg

SEQ ID NO: 36505 - DNA, 50 bp, synthetic construct
  source 1..50: mol_type = other DNA
cgaagatcaatacgaccgattaagaagaaaaacggttatattattcttcg

SEQ ID NO: 36506 - DNA, 50 bp, synthetic construct
  source 1..50: mol_type = other DNA
aaatgtgcgagatatttggtatcaattgtgaacgatatactgtaattaga

SEQ ID NO: 36507 - DNA, 50 bp, synthetic construct
  source 1..50: mol_type = other DNA
aacgatacaagtcgagcagaagcaacaattgctcatgaacttcttcattt

SEQ ID NO: 36508 - DNA, 50 bp, synthetic construct
  source 1..50: mol_type = other DNA
gagaagatactcacgccgctatagcgcacttccggcgtgtagctgccctt

SEQ ID NO: 36509 - DNA, 50 bp, synthetic construct
  source 1..50: mol_type = other DNA
gcgtcttggatggagtttgaagtccgtgaagtcaacgccatatcggaaaa

SEQ ID NO: 36510 - DNA, 50 bp, synthetic construct
  source 1..50: mol_type = other DNA
accggtcatggtacggccgcattcgcgaatggggctgattcatgatataa

SEQ ID NO: 36511 - DNA, 50 bp, synthetic construct
  source 1..50: mol_type = other DNA
ctgtacaggtgtattttttatatccattaaagtcaaccgttccaatagag

SEQ ID NO: 36512 - DNA, 50 bp, synthetic construct
  source 1..50: mol_type = other DNA
gtaaaaggcgtttactgtttcttcgcgaggaacgagtgttccgcttgcag

SEQ ID NO: 36513 - DNA, 50 bp, synthetic construct
  source 1..50: mol_type = other DNA
gagtcataatggcaacggcgacaagaccgtcgcgtcgtcgccgttgacca

SEQ ID NO: 36514 - DNA, 50 bp, synthetic construct
  source 1..50: mol_type = other DNA
gatcgtccgcacagagtatccgcagatgtttatcgatgtggcggataacc

SEQ ID NO: 36515 - DNA, 50 bp, synthetic construct
  source 1..50: mol_type = other DNA
caaaaggtcgcccttctcgatgcgataggatgtagaaaggcgggattata

SEQ ID NO: 36516 - DNA, 50 bp, synthetic construct
  source 1..50: mol_type = other DNA
gaaaatttctctgataacttctgcttcaggaagatataagccgcagccaa

SEQ ID NO: 36517 - DNA, 50 bp, synthetic construct
  source 1..50: mol_type = other DNA
aagtagccttttcttgtggtgtgtaacgacttgtctaggtcgtgctgatt

SEQ ID NO: 36518 - DNA, 50 bp, synthetic construct
  source 1..50: mol_type = other DNA
agcgaagagtctgttagattctttaaagcacatgaaaaagtatattcggg

SEQ ID NO: 36519 - DNA, 50 bp, synthetic construct
  source 1..50: mol_type = other DNA
cgtttcgggaaccttaaactgccaaaacggagaagaatcgtcgccaaacc

SEQ ID NO: 36520 - DNA, 50 bp, synthetic construct
  source 1..50: mol_type = other DNA
atcgccgataattccggtaaatccgcaggaaccccggactgacgggctgc

SEQ ID NO: 36521 - DNA, 50 bp, synthetic construct
  source 1..50: mol_type = other DNA
tatggttcgccggtatttactattgcaataatcgtatcaatttccttatc

SEQ ID NO: 36522 - DNA, 50 bp, synthetic construct
  source 1..50: mol_type = other DNA
cacattcttttgatataagagctttaaagccttcatatatcaaggaaatc

SEQ ID NO: 36523 - DNA, 50 bp, synthetic construct
  source 1..50: mol_type = other DNA
tactaataatttcaaattcatggaactcccatcttccggtattattagcg

SEQ ID NO: 36524 - DNA, 50 bp, synthetic construct
  source 1..50: mol_type = other DNA
aaaacaatcgacggcatccgctttagataggcgattttggcgatcaattc

SEQ ID NO: 36525 - DNA, 50 bp, synthetic construct
  source 1..50: mol_type = other DNA
ggaactacttcactctttccaccgtcacccgaagagatcaaagccgttga

SEQ ID NO: 36526 - DNA, 50 bp, synthetic construct
  source 1..50: mol_type = other DNA
atcgtattgatgaagctaccaaggtattgaagaaacttcaggaatgcaat

SEQ ID NO: 36527 - DNA, 50 bp, synthetic construct
  source 1..50: mol_type = other DNA
tctctgggcggcaaatctgccgcaacgccggcacgttcatcgcggcgagc

SEQ ID NO: 36528 - DNA, 50 bp, synthetic construct
  source 1..50: mol_type = other DNA
gctgccagaacttggcgcgcttcctctgcagcttgccttctaattctggc

SEQ ID NO: 36529 - DNA, 50 bp, synthetic construct
  source 1..50: mol_type = other DNA
caaaatcctcaatctgttattcaatacagaatcgcagatatgggcacaag

SEQ ID NO: 36530 - DNA, 50 bp, synthetic construct
  source 1..50: mol_type = other DNA
agaaaatagccatgaagccattatcgacctctttttttacccttttgcac

SEQ ID NO: 36531 - DNA, 50 bp, synthetic construct
  source 1..50: mol_type = other DNA
catcgcaaagaagcaagcgatcgcattcaatctcttgcttcttggctatg

SEQ ID NO: 36532 - DNA, 50 bp, synthetic construct
  source 1..50: mol_type = other DNA
attgttgcagtatagcagacacgctttgatgtatccttttatacaacgca

SEQ ID NO: 36533 - DNA, 50 bp, synthetic construct
  source 1..50: mol_type = other DNA
ataataccaccaataataagaatatttaaatgtattataaaaagttgtat

SEQ ID NO: 36534 - DNA, 50 bp, synthetic construct
  source 1..50: mol_type = other DNA
ctggcatctgtataatttgataccaaaatttcatcttgtacaggaaacaa

SEQ ID NO: 36535 - DNA, 50 bp, synthetic construct
  source 1..50: mol_type = other DNA
ttactattaagataattctcgtatatgtcagagttcataaataaatttat

SEQ ID NO: 36536 - DNA, 50 bp, synthetic construct
  source 1..50: mol_type = other DNA
tgcgaatggtaggtgtccctgataactactccttccaccgggatttcgaa

SEQ ID NO: 36537 - DNA, 50 bp, synthetic construct
  source 1..50: mol_type = other DNA
tattgattatataatacttgattatattagcatggattttcagatttatc

SEQ ID NO: 36538 - DNA, 50 bp, synthetic construct
  source 1..50: mol_type = other DNA
ttgctatggttgcatttttttagattaccatacaaaagcaaggatagcaa

SEQ ID NO: 36539 - DNA, 50 bp, synthetic construct
  source 1..50: mol_type = other DNA
gtatcgacaaccaattcttcgagcttgcaaaaagggccgatgtgatatac

SEQ ID NO: 36540 - DNA, 50 bp, synthetic construct
  source 1..50: mol_type = other DNA
ggctggaagcaaaagaggcaaatctggatcaatacctttgtatctttgcc

SEQ ID NO: 36541 - DNA, 50 bp, synthetic construct
  source 1..50: mol_type = other DNA
cgccaaatggggcggtatagttagtactaactacatgactccaaatccac

SEQ ID NO: 36542 - DNA, 50 bp, synthetic construct
  source 1..50: mol_type = other DNA
taaacaatatccacatttataatctcgattataaacacggtctcggtgta

SEQ ID NO: 36543 - DNA, 50 bp, synthetic construct
  source 1..50: mol_type = other DNA
gatgatggggcgtgaaggaggcgttgttttttctttcgcaccccatccta

SEQ ID NO: 36544 - DNA, 50 bp, synthetic construct
  source 1..50: mol_type = other DNA
tacttgatgatttcggtatggagcgacctatccgacacaatgcgcaagtg

SEQ ID NO: 36545 - DNA, 50 bp, synthetic construct
  source 1..50: mol_type = other DNA
tgagtgggctgaatacttgataaatttttaatgatatatcagctatttca

SEQ ID NO: 36546 - DNA, 50 bp, synthetic construct
  source 1..50: mol_type = other DNA
cagttattcctgccaagaaaactatagatgttgcttatcaggatattctt

SEQ ID NO: 36547 - DNA, 50 bp, synthetic construct
  source 1..50: mol_type = other DNA
atatagtaaggaagaaaggagagtggcccaagatgaatcccgttctattt

SEQ ID NO: 36548 - DNA, 50 bp, synthetic construct
  source 1..50: mol_type = other DNA
ggtggcaaaaaatattacagttattctatgatataatattatttaagata

SEQ ID NO: 36549 - DNA, 50 bp, synthetic construct
  source 1..50: mol_type = other DNA
cttggctatcggacaatagaagcccaagattctcgcctcacatgacaaag

SEQ ID NO: 36550 - DNA, 50 bp, synthetic construct
  source 1..50: mol_type = other DNA
cagggagagcagattccggagaagatattcagcagaatcctctctacgag

SEQ ID NO: 36551 - DNA, 50 bp, synthetic construct
  source 1..50: mol_type = other DNA
gatgaagcttatgtcaatagttatttataattaaagacaagttttaaatt

SEQ ID NO: 36552 - DNA, 50 bp, synthetic construct
  source 1..50: mol_type = other DNA
gtgatatatagtaaggaagaaaggagcctttttatttttgttaaaatact

SEQ ID NO: 36553 - DNA, 50 bp, synthetic construct
  source 1..50: mol_type = other DNA
gtaaaggaggagatcatcagtggcaaaccttggatgatgctgattcttac

SEQ ID NO: 36554 - DNA, 50 bp, synthetic construct
  source 1..50: mol_type = other DNA
atttatcaaaatatggaggttcatttttgaaattgtctatttaaacgaaa

SEQ ID NO: 36555 - DNA, 50 bp, synthetic construct
  source 1..50: mol_type = other DNA
tcaattgattaatgataaggggataatcccagcgacaattaatcaattta

SEQ ID NO: 36556 - DNA, 50 bp, synthetic construct
  source 1..50: mol_type = other DNA
atatttaggattgaaacaaggagaattaattttgtaataaaaaacaattc

SEQ ID NO: 36557 - DNA, 50 bp, synthetic construct
  source 1..50: mol_type = other DNA
tagattatatattttctttgtttaattaaaaaaagtattgatgtagaata

SEQ ID NO: 36558 - DNA, 50 bp, synthetic construct
  source 1..50: mol_type = other DNA
aagatatattaattataatactatgtataaaattatactgaaaattctta

SEQ ID NO: 36559 - DNA, 50 bp, synthetic construct
  source 1..50: mol_type = other DNA
ggggaactcatgcttgcttgatattctgtaatcacatctaggagttctgc

SEQ ID NO: 36560 - DNA, 50 bp, synthetic construct
  source 1..50: mol_type = other DNA
cactgcgagctgctgaggggtaatgagttatttctcagcccctggcatca

SEQ ID NO: 36561 - DNA, 50 bp, synthetic construct
  source 1..50: mol_type = other DNA
tgaatgagtgggctgaatacttgatatccagtgcgaacaaaacccattca

SEQ ID NO: 36562 - DNA, 50 bp, synthetic construct
  source 1..50: mol_type = other DNA
aacatcggtggcaaaaaatattacagaaaatattttagtgaattgaggtt

SEQ ID NO: 36563 - DNA, 50 bp, synthetic construct
  source 1..50: mol_type = other DNA
atcaatgtattcttggtaaagagcctttactttgccatcaattgattgat

SEQ ID NO: 36564 - DNA, 50 bp, synthetic construct
  source 1..50: mol_type = other DNA
gaacttattagtattctcaaaaaagattttttgaacctgcttctgagttt

SEQ ID NO: 36565 - DNA, 50 bp, synthetic construct
  source 1..50: mol_type = other DNA
gttttcatttctaaataatggagttttatcaagtattcagcccactgatt

SEQ ID NO: 36566 - DNA, 50 bp, synthetic construct
  source 1..50: mol_type = other DNA
aatcacagccttaaaccgtgaaatattaaaagaaaaatatggatatgatg

SEQ ID NO: 36567 - DNA, 50 bp, synthetic construct
  source 1..50: mol_type = other DNA
agaagagaaaatgcctgacaaggcgttatttgatattcattttaattctg

SEQ ID NO: 36568 - DNA, 50 bp, synthetic construct
  source 1..50: mol_type = other DNA
gttaaagcctttacacttattgaaaacttgctaatagtaaaggctttaca

SEQ ID NO: 36569 - DNA, 50 bp, synthetic construct
  source 1..50: mol_type = other DNA
tgtccattacagcaccaagccacatatcactctacttgctgtaattatca

SEQ ID NO: 36570 - DNA, 50 bp, synthetic construct
  source 1..50: mol_type = other DNA
aacttgcggaaataatagagaaagaagtcatgtttttgctcatctacgct

SEQ ID NO: 36571 - DNA, 50 bp, synthetic construct
  source 1..50: mol_type = other DNA
ccttcatccgcatagatgtctactaaagtatcaacgtatgctttggaagg

SEQ ID NO: 36572 - DNA, 50 bp, synthetic construct
  source 1..50: mol_type = other DNA
tataatcgaaccacgcaactcgattataccagttagacggcattgccata

SEQ ID NO: 36573 - DNA, 50 bp, synthetic construct
  source 1..50: mol_type = other DNA
aagattccgggctacgacgaaacaatcttgccctcgtagccattgcaaaa

SEQ ID NO: 36574 - DNA, 50 bp, synthetic construct
  source 1..50: mol_type = other DNA
acctttttatactatactacaactattcccgtactatccgcacgatagca

SEQ ID NO: 36575 - DNA, 50 bp, synthetic construct
  source 1..50: mol_type = other DNA
ccggggcaggatggcaggccgccgcctggcgggcggcttttccatagcgg

SEQ ID NO: 36576 - DNA, 50 bp, synthetic construct
  source 1..50: mol_type = other DNA
attctggtggagattaccgggccgatcatcagggcgcattccaccagaat

SEQ ID NO: 36577 - DNA, 50 bp, synthetic construct
  source 1..50: mol_type = other DNA
taaactacgagcttttacactgattgatgatagtaaaggcgcgaaggggg

SEQ ID NO: 36578 - DNA, 50 bp, synthetic construct
  source 1..50: mol_type = other DNA
atagtttgatacaaaattcgcgctttacagtaaggcttgtatcctacaca

SEQ ID NO: 36579 - DNA, 50 bp, synthetic construct
  source 1..50: mol_type = other DNA
gtgaaacagataatttgctgctgcttaaaacgccaaatcctcggcttgca

SEQ ID NO: 36580 - DNA, 50 bp, synthetic construct
  source 1..50: mol_type = other DNA
ttgacatggctgcattaaacagccaatgcggttttcatatctggtgattt

SEQ ID NO: 36581 - DNA, 50 bp, synthetic construct
  source 1..50: mol_type = other DNA
ccataatcaagttaaatctactgatttagtcatattaggcttgatgatgc

SEQ ID NO: 36582 - DNA, 50 bp, synthetic construct
  source 1..50: mol_type = other DNA
aggtacatagcttatttccaaggcatctcctgctcgaaagcccagtactc

SEQ ID NO: 36583 - DNA, 50 bp, synthetic construct
  source 1..50: mol_type = other DNA
attttattgaacaaagaaaacagatataggttttccattttcatcaaaat

SEQ ID NO: 36584 - DNA, 50 bp, synthetic construct
  source 1..50: mol_type = other DNA
tcagaagaaatcaggaacactaaaggtttacacagaatgatttagaatat

SEQ ID NO: 36585 - DNA, 50 bp, synthetic construct
  source 1..50: mol_type = other DNA
gaaaagctgtaaagaagcaaatttaacgaagtggtttattacggctatta

SEQ ID NO: 36586 - DNA, 50 bp, synthetic construct
  source 1..50: mol_type = other DNA
gtgaaatgattttttgcaaaggcagctgctgttgtaataaaactgttttt

SEQ ID NO: 36587 - DNA, 50 bp, synthetic construct
  source 1..50: mol_type = other DNA
ttcattatatccaccatgatagatatatctatcatggtggttcaggttct

SEQ ID NO: 36588 - DNA, 50 bp, synthetic construct
  source 1..50: mol_type = other DNA
ttagcaaaggaattattagaaagtgaagaacagcttaattcgtttgacaa

SEQ ID NO: 36589 - DNA, 50 bp, synthetic construct
  source 1..50: mol_type = other DNA
ctcactgaaggagaaccggacaaaattatgttaaaattataaattgggag

SEQ ID NO: 36590 - DNA, 50 bp, synthetic construct
  source 1..50: mol_type = other DNA
tattttgtgttttcaattataacgattggctcaactcaaaaaagaaaagt

SEQ ID NO: 36591 - DNA, 50 bp, synthetic construct
  source 1..50: mol_type = other DNA
gaaaaatgaaaacttttgtagatacggtcggggaaaaagttctccaggga

SEQ ID NO: 36592 - DNA, 50 bp, synthetic construct
  source 1..50: mol_type = other DNA
tgattacagacgataaagaatacaattttattgtttttcagttttaaact

SEQ ID NO: 36593 - DNA, 50 bp, synthetic construct
  source 1..50: mol_type = other DNA
ccgttttgcatttcatatccgtacggaaaacgaaatcaaagaaaaagcgg

SEQ ID NO: 36594 - DNA, 50 bp, synthetic construct
  source 1..50: mol_type = other DNA
ttaataaattatgacaaacatgaacttttttgtttagtatattttatttt

SEQ ID NO: 36595 - DNA, 50 bp, synthetic construct
  source 1..50: mol_type = other DNA
gaagtgtttactataaattttcaaagaaaaaaacgccgagtaaaactcag

SEQ ID NO: 36596 - DNA, 50 bp, synthetic construct
  source 1..50: mol_type = other DNA
tgtccttcattttgggaaggaagtttcgttcggctactaaatgtgggtgc

SEQ ID NO: 36597 - DNA, 50 bp, synthetic construct
  source 1..50: mol_type = other DNA
aagttaaaacaaaagcaaaggcgggagagcattttattttatagacactt

SEQ ID NO: 36598 - DNA, 50 bp, synthetic construct
  source 1..50: mol_type = other DNA
caagcgcagttagtaccatatgcatatccaattgctgctgattgcgctct

SEQ ID NO: 36599 - DNA, 50 bp, synthetic construct
  source 1..50: mol_type = other DNA
atgattttattttatttcttttcatatgatgggaaataacgtaaaaaaat

SEQ ID NO: 36600 - DNA, 50 bp, synthetic construct
  source 1..50: mol_type = other DNA
atccacgcataatcgaagatcagacttaaagcctgacattatcaatcgag

SEQ ID NO: 36601 - DNA, 50 bp, synthetic construct
  source 1..50: mol_type = other DNA
accggaatctttaatagtttattatctcaatcactgtggaaggttccgta

SEQ ID NO: 36602 - DNA, 50 bp, synthetic construct
  source 1..50: mol_type = other DNA
aatatatcaaataatgatatagagttacttccgtcgttattttagctatt

SEQ ID NO: 36603 - DNA, 50 bp, synthetic construct
  source 1..50: mol_type = other DNA
actgtttttttgtatttggttatatccgtagcaatatcaaaaaatgcgcc

SEQ ID NO: 36604 - DNA, 50 bp, synthetic construct
  source 1..50: mol_type = other DNA
gaaaaagtgtgactatgattttacccgcaaagacacaatcatacttctta

SEQ ID NO: 36605 - DNA, 50 bp, synthetic construct
  source 1..50: mol_type = other DNA
gcatggacgcaccgacatcggagtataatccgtagtcgaatcgtccgtaa

SEQ ID NO: 36606 - DNA, 50 bp, synthetic construct
  source 1..50: mol_type = other DNA
gttagtcagtgctaactaatggcaggtatcggacatattaactctgattt

SEQ ID NO: 36607 - DNA, 50 bp, synthetic construct
  source 1..50: mol_type = other DNA
gcaataaagctttaggcttaaaaaattttttaggggtgaagatatgggtg

SEQ ID NO: 36608 - DNA, 50 bp, synthetic construct
  source 1..50: mol_type = other DNA
cggaggtcttctatgcagtctttgtccctgcaagaatcatagatcttctt

SEQ ID NO: 36609 - DNA, 50 bp, synthetic construct
  source 1..50: mol_type = other DNA
agtcgatcaacattttgccaacgccgcggatggcgagccccgcgtcgatc

SEQ ID NO: 36610 - DNA, 50 bp, synthetic construct
  source 1..50: mol_type = other DNA
taacacttctgaaaaatcaaaaacaatcccgtaacctttcatcagccttt

SEQ ID NO: 36611 - DNA, 50 bp, synthetic construct
  source 1..50: mol_type = other DNA
aacttctcaacacatatatcccgatatagtcatataattagaactcttta

SEQ ID NO: 36612 - DNA, 50 bp, synthetic construct
  source 1..50: mol_type = other DNA
ttttcaagcaacaagtaaaggagctgtactccttatgattcaaaataaaa

SEQ ID NO: 36613 - DNA, 50 bp, synthetic construct
  source 1..50: mol_type = other DNA
caaaagggaactcggcaaattcttcgaagaatttgaatccgttccagttt

SEQ ID NO: 36614 - DNA, 50 bp, synthetic construct
  source 1..50: mol_type = other DNA
atcggctgctttgtcccccttgatcgatggaagaggagggagaagacgat

SEQ ID NO: 36615 - DNA, 50 bp, synthetic construct
  source 1..50: mol_type = other DNA
ggccggataagcgggcggaggtgtctttgcctgttccggcttttccgctg

SEQ ID NO: 36616 - DNA, 50 bp, synthetic construct
  source 1..50: mol_type = other DNA
gcaatattgttatatactttcataaatatgaaagtctattacatatacgg

SEQ ID NO: 36617 - DNA, 50 bp, synthetic construct
  source 1..50: mol_type = other DNA
tataatataactctaattgaaattaatcaactggatagagtaatattata

SEQ ID NO: 36618 - DNA, 50 bp, synthetic construct
  source 1..50: mol_type = other DNA
tattcttggggtttagagtgatatatatatgcagaggaaagaagagaaag

SEQ ID NO: 36619 - DNA, 50 bp, synthetic construct
  source 1..50: mol_type = other DNA
attcctataaaactccccttgtcactctccattacattgattataccatg

SEQ ID NO: 36620 - DNA, 50 bp, synthetic construct
  source 1..50: mol_type = other DNA
cctcttttgtttaattctgtaataattattagagtatgaaacatctctgc

SEQ ID NO: 36621 - DNA, 50 bp, synthetic construct
  source 1..50: mol_type = other DNA
atagactgcgcggtaacaatcttccttaatattgtttaaaagctccgata

SEQ ID NO: 36622 - DNA, 50 bp, synthetic construct
  source 1..50: mol_type = other DNA
acgtaaagtgggaggtttttttaaaattccggttatcatccaccagccga

SEQ ID NO: 36623 - DNA, 50 bp, synthetic construct
  source 1..50: mol_type = other DNA
cttggtattcgtacctgaaataccttggtaatttgtgtgcgtataataat

SEQ ID NO: 36624 - DNA, 50 bp, synthetic construct
  source 1..50: mol_type = other DNA
agggcctggggagcgatgaccgtcttcgcgcctgaaggccccatcgacca

SEQ ID NO: 36625 - DNA, 50 bp, synthetic construct
  source 1..50: mol_type = other DNA
gaagctggtcgagcagccgatgccccgccgcaggctgctgcggcagctcg

SEQ ID NO: 36626 - DNA, 50 bp, synthetic construct
  source 1..50: mol_type = other DNA
tttccgttttttatttgaatccttcaacagaaatttctaaaaacaattct

SEQ ID NO: 36627 - DNA, 50 bp, synthetic construct
  source 1..50: mol_type = other DNA
ttaaaatccatgaatattgtatcatcagttacaatatatttaccagatac

SEQ ID NO: 36628 - DNA, 50 bp, synthetic construct
  source 1..50: mol_type = other DNA
aatcaaaaaagatatttatattcagatgcaaactgttatcttttatttgg

SEQ ID NO: 36629 - DNA, 50 bp, synthetic construct
  source 1..50: mol_type = other DNA
tacagatacctacccatttccatatgataggaaatatctccgatgctgtc

SEQ ID NO: 36630 - DNA, 50 bp, synthetic construct
  source 1..50: mol_type = other DNA
caattatatatagatacggtattatttgtcaatgaaaatatatataattt

SEQ ID NO: 36631 - DNA, 50 bp, synthetic construct
  source 1..50: mol_type = other DNA
caataagctcagacaaccttctgttgattgcttagtgtctgaagtagagg

SEQ ID NO: 36632 - DNA, 50 bp, synthetic construct
  source 1..50: mol_type = other DNA
tgaaagggaattaatgtagataaactagtatccctatacgctgtccttac

SEQ ID NO: 36633 - DNA, 50 bp, synthetic construct
  source 1..50: mol_type = other DNA
accggattcatcgcgggatggagcagacgtcgtccggcatcaacgacccg

SEQ ID NO: 36634 - DNA, 50 bp, synthetic construct
  source 1..50: mol_type = other DNA
agccaattgaggaacgtaaaaaagcactttcacttgtatatacatcactc

SEQ ID NO: 36635 - DNA, 50 bp, synthetic construct
  source 1..50: mol_type = other DNA
cggcgatgacgtcgggctgctggatgttataattatagatgcaatcagct

SEQ ID NO: 36636 - DNA, 50 bp, synthetic construct
  source 1..50: mol_type = other DNA
atggaagaagaaccgtccgacattccaaaaaaattatattctacttcagc

SEQ ID NO: 36637 - DNA, 50 bp, synthetic construct
  source 1..50: mol_type = other DNA
gggcagcaggacgcgcccggccagcggtagataccatcgtcatccgcgaa

SEQ ID NO: 36638 - DNA, 50 bp, synthetic construct
  source 1..50: mol_type = other DNA
ttgtatcatcttcggagcagtcttgcaaaaaggtatgaattatgtggcat

SEQ ID NO: 36639 - DNA, 50 bp, synthetic construct
  source 1..50: mol_type = other DNA
ttgaaatcctgcttttaaaaagaaaaagcccctttatggggcaatttcag

SEQ ID NO: 36640 - DNA, 50 bp, synthetic construct
  source 1..50: mol_type = other DNA
tacgggggcaaaaatagaacttcttcttgtattgcattgcctattccgta

SEQ ID NO: 36641 - DNA, 50 bp, synthetic construct
  source 1..50: mol_type = other DNA
cccgtaatggctgttcctatcacctaaaaaagcagagtgtccattacagg

SEQ ID NO: 36642 - DNA, 50 bp, synthetic construct
  source 1..50: mol_type = other DNA
caaccaatatcggcggtcatgcaccttcccaagaccggcggtatattttg

SEQ ID NO: 36643 - DNA, 50 bp, synthetic construct
  source 1..50: mol_type = other DNA
tgtgccatacttcacgccctcacagcggctgcaccttgaaagcgttccct

SEQ ID NO: 36644 - DNA, 50 bp, synthetic construct
  source 1..50: mol_type = other DNA
gaaccgccagcttcgactgttccgttccacattccaacggcttcaagttc

SEQ ID NO: 36645 - DNA, 50 bp, synthetic construct
  source 1..50: mol_type = other DNA
caggatgatactgaccggatggatattatcatcctgacagtttcctcggt

SEQ ID NO: 36646 - DNA, 50 bp, synthetic construct
  source 1..50: mol_type = other DNA
cctgtgcttcaaagctgtggagctggtgcttcgcagcattatatgtttca

SEQ ID NO: 36647 - DNA, 50 bp, synthetic construct
  source 1..50: mol_type = other DNA
cttttaccccatcaaaaatttcttctgccgtatttttgatgaagaaaatc

SEQ ID NO: 36648 - DNA, 50 bp, synthetic construct
  source 1..50: mol_type = other DNA
cttttatgccttgttttgcacttgaagaacagttgaacagttttgaaaat

SEQ ID NO: 36649 - DNA, 50 bp, synthetic construct
  source 1..50: mol_type = other DNA
cgcagaagatgtacaatatttggcgaccatcaatcatatcatcttcgaag

SEQ ID NO: 36650 - DNA, 50 bp, synthetic construct
  source 1..50: mol_type = other DNA
cccagggggctggacttcctccgggcccggacggagacgccaccctcact

SEQ ID NO: 36651 - DNA, 50 bp, synthetic construct
  source 1..50: mol_type = other DNA
atcaaattccgtatgtatcacgatttttagtgataagtacgataaaatat

SEQ ID NO: 36652 - DNA, 50 bp, synthetic construct
  source 1..50: mol_type = other DNA
attacccttggggtgaacgaatgaaatgcatcgacttcttcaagggtaga

SEQ ID NO: 36653 - DNA, 50 bp, synthetic construct
  source 1..50: mol_type = other DNA
ggacttcatgacagcggggtttccgagatgctccagctgtttcgccatcc

SEQ ID NO: 36654 - DNA, 50 bp, synthetic construct
  source 1..50: mol_type = other DNA
gcagcacagcggcgcagcttttccatcgatgtactgatccttatcgtagc

SEQ ID NO: 36655 - DNA, 50 bp, synthetic construct
  source 1..50: mol_type = other DNA
ataggcacggaagaattagaacattgtggaactgacgagcttggccatct

SEQ ID NO: 36656 - DNA, 50 bp, synthetic construct
  source 1..50: mol_type = other DNA
tcttcttataaattcaaggcttttccgaaaaaagggtataaaaaagaaag

SEQ ID NO: 36657 - DNA, 50 bp, synthetic construct
  source 1..50: mol_type = other DNA
ccgggtgtagcgcagttttggtagcgcggtagtaactgcgctggggctgg

SEQ ID NO: 36658 - DNA, 50 bp, synthetic construct
  source 1..50: mol_type = other DNA
gagaacatagcaatgatataggcatataatcagatgtatggaccgttacc

SEQ ID NO: 36659 - DNA, 50 bp, synthetic construct
  source 1..50: mol_type = other DNA
cgcattccgctcaaagaacgcgctttgaccacaattttgaccacaatgcc

SEQ ID NO: 36660 - DNA, 50 bp, synthetic construct
  source 1..50: mol_type = other DNA
tatactcaaaattagaaaggctggtattttccgtgactatttttttgttt

SEQ ID NO: 36661 - DNA, 50 bp, synthetic construct
  source 1..50: mol_type = other DNA
cgccctggcaaaggcgtttttgatcgcgggcctccgcctttgcctgatcg

SEQ ID NO: 36662 - DNA, 50 bp, synthetic construct
  source 1..50: mol_type = other DNA
ctcctgtgggctgtgttaagttagtactaattgaacactacccgtcggtt

SEQ ID NO: 36663 - DNA, 50 bp, synthetic construct
  source 1..50: mol_type = other DNA
atgctcacaaaggtatggttctcatgctggaacagttccttattgccccc

SEQ ID NO: 36664 - DNA, 50 bp, synthetic construct
  source 1..50: mol_type = other DNA
aagatatttatattcagagaaaggatgcttaccgagagtataaaagtctt

SEQ ID NO: 36665 - DNA, 50 bp, synthetic construct
  source 1..50: mol_type = other DNA
gtttcgcaattttcacatttcaatctcggaaaagctgaacattgccaagg

SEQ ID NO: 36666 - DNA, 50 bp, synthetic construct
  source 1..50: mol_type = other DNA
cccacaaaaggctttgttaagccaaatggctgaatattcgctgctgacgc

SEQ ID NO: 36667 - DNA, 50 bp, synthetic construct
  source 1..50: mol_type = other DNA
cacggcccttccgaattccatgcaaaactattatcttagcgagagccctc

SEQ ID NO: 36668 - DNA, 50 bp, synthetic construct
  source 1..50: mol_type = other DNA
gctaatagtcttgattgcaataatatatagcttcagtgcatactggaagc

SEQ ID NO: 36669 - DNA, 50 bp, synthetic construct
  source 1..50: mol_type = other DNA
ttttgtaccatagaggttgagcttataacttcaaccacaggctgacttgg

SEQ ID NO: 36670 - DNA, 50 bp, synthetic construct
  source 1..50: mol_type = other DNA
gtgtggggccggggcgtcctttagacatggactacgccccggcccccatc

SEQ ID NO: 36671 - DNA, 50 bp, synthetic construct
  source 1..50: mol_type = other DNA
gcggctgctggcccacaagaacgagaccgcgctctgcggccagctgcctt

SEQ ID NO: 36672 - DNA, 50 bp, synthetic construct
  source 1..50: mol_type = other DNA
atttataatattatactataatattaatatgtatttataatttaataaag

SEQ ID NO: 36673 - DNA, 50 bp, synthetic construct
  source 1..50: mol_type = other DNA
cgtgggcgattatctacggcaataaacctgttcgtcaataaccgccagat

SEQ ID NO: 36674 - DNA, 50 bp, synthetic construct
  source 1..50: mol_type = other DNA
ttgcttacgcccgcaatctttgccgccgtacataatgcggagcacagcaa

SEQ ID NO: 36675 - DNA, 50 bp, synthetic construct
  source 1..50: mol_type = other DNA
ttactatatacctactaccaaccttaatcatgatagcgtgaatattaaaa

SEQ ID NO: 36676 - DNA, 50 bp, synthetic construct
  source 1..50: mol_type = other DNA
ccagcacaccttcgtcccggagctgtcgctcacagctcatttagtatacc

SEQ ID NO: 36677 - DNA, 50 bp, synthetic construct
  source 1..50: mol_type = other DNA
aaattctccccggaattgacatcaatagatgtcaatatgcaggatgaaac

SEQ ID NO: 36678 - DNA, 50 bp, synthetic construct
  source 1..50: mol_type = other DNA
ttccagttccattatttgcggcccgcggctgctcgaccggcgggctggac

SEQ ID NO: 36679 - DNA, 50 bp, synthetic construct
  source 1..50: mol_type = other DNA
atctgaaaaataattgaataatgggacctttgcgatattatctttcagct

SEQ ID NO: 36680 - DNA, 50 bp, synthetic construct
  source 1..50: mol_type = other DNA
cactccacaaacaagatttaaaatgaattttaaatattgaatgaggtaat

SEQ ID NO: 36681 - DNA, 50 bp, synthetic construct
  source 1..50: mol_type = other DNA
atagcgctggatgcagaactttgaaatcataactccaagaagggcgctat

SEQ ID NO: 36682 - DNA, 50 bp, synthetic construct
  source 1..50: mol_type = other DNA
ttgctatatccaaaggcaacaaaaattttttctcaaaatggtatcaccaa

SEQ ID NO: 36683 - DNA, 50 bp, synthetic construct
  source 1..50: mol_type = other DNA
cgagtcaaatatcgccgaaaaatgcggatttttcgcagtcatctgccaga

SEQ ID NO: 36684 - DNA, 50 bp, synthetic construct
  source 1..50: mol_type = other DNA
tcacgcctttcaaaaaagtcaattaaaatgggtgcaaaagaaaacgctga

SEQ ID NO: 36685 - DNA, 50 bp, synthetic construct
  source 1..50: mol_type = other DNA
taagtgtataaaatgcgacattgatgggcttaccgcattccggacacttc

SEQ ID NO: 36686 - DNA, 50 bp, synthetic construct
  source 1..50: mol_type = other DNA
taaataacctgttctcctaatttctggcacaagtcttttctcgttttttc

SEQ ID NO: 36687 - DNA, 50 bp, synthetic construct
  source 1..50: mol_type = other DNA
ctatcattatcttctggaggttccgcggacttgagcgaacgcgatctgct

SEQ ID NO: 36688 - DNA, 50 bp, synthetic construct
  source 1..50: mol_type = other DNA
catcacggacgattggagctactccggcgacgctgtcacgcttcacggcg

SEQ ID NO: 36689 - DNA, 50 bp, synthetic construct
  source 1..50: mol_type = other DNA
gcatctatccgcccctgattttcctggaaatatttacatgtgtaagatta

SEQ ID NO: 36690 - DNA, 50 bp, synthetic construct
  source 1..50: mol_type = other DNA
tatgtcaaaagtagcaaaatattttaataaattttgcttatttctaatac

SEQ ID NO: 36691 - DNA, 50 bp, synthetic construct
  source 1..50: mol_type = other DNA
agaggtaatatgtgacacacgcaaggatgcgcggagaacataggcacgct

SEQ ID NO: 36692 - DNA, 50 bp, synthetic construct
  source 1..50: mol_type = other DNA
gcggaactcaatcgacgagctcatcgacggcgtcatcgccaccaacacga

SEQ ID NO: 36693 - DNA, 50 bp, synthetic construct
  source 1..50: mol_type = other DNA
gaaattggctgcaaaaacgcccgcatgcgggcgttttttcggtcgatttc

SEQ ID NO: 36694 - DNA, 50 bp, synthetic construct
  source 1..50: mol_type = other DNA
ctggcctgcacgattgggaatattaagtagtatccgattaaggttgcttg

SEQ ID NO: 36695 - DNA, 50 bp, synthetic construct
  source 1..50: mol_type = other DNA
gtcaatagcgatttttgaaccttctctttttatcaaaaatcccagttacc

SEQ ID NO: 36696 - DNA, 50 bp, synthetic construct
  source 1..50: mol_type = other DNA
aggggattatcaataaggaggggaattcacctcttaatagttaatttgaa

SEQ ID NO: 36697 - DNA, 50 bp, synthetic construct
  source 1..50: mol_type = other DNA
actatttgcaaaagaagtaggtggttatggcaagttcagatgcaattagt

SEQ ID NO: 36698 - DNA, 50 bp, synthetic construct
  source 1..50: mol_type = other DNA
cagtcaaatttctattcataatggtacaatcatgtatccgtgcctccttc

SEQ ID NO: 36699 - DNA, 50 bp, synthetic construct
  source 1..50: mol_type = other DNA
tcacggtggtggcggagcggatgcggacgtgctgtcggacaccaccaggc

SEQ ID NO: 36700 - DNA, 50 bp, synthetic construct
  source 1..50: mol_type = other DNA
cgccgaccttcagatcggcagcgccggcgcgccggcagagaaactctgca

SEQ ID NO: 36701 - DNA, 50 bp, synthetic construct
  source 1..50: mol_type = other DNA
gattcatgctccaaaacagcaaaagagggagctgtcaatgagcaccgtgc

SEQ ID NO: 36702 - DNA, 50 bp, synthetic construct
  source 1..50: mol_type = other DNA
taaaattctcgtggatagttataaatttatactatatattgatttgatta

SEQ ID NO: 36703 - DNA, 50 bp, synthetic construct
  source 1..50: mol_type = other DNA
tatcgaagcccaatcggagttagccttccgacaccgcataatcttccata

SEQ ID NO: 36704 - DNA, 50 bp, synthetic construct
  source 1..50: mol_type = other DNA
tttcacacctctattatatcaaatatgccgtgcaaaatagatttttaaaa

SEQ ID NO: 36705 - DNA, 50 bp, synthetic construct
  source 1..50: mol_type = other DNA
cacggtattgtttgtcctgcccgcaatggggcgtgccagacaaaacgttg

SEQ ID NO: 36706 - DNA, 50 bp, synthetic construct
  source 1..50: mol_type = other DNA
aacggacagcccggcaatatcaaagattgaagcgtattccaatgttggtt

SEQ ID NO: 36707 - DNA, 50 bp, synthetic construct
  source 1..50: mol_type = other DNA
ggacaaataaatacgcctgcctgttaattataagtcgtttgagcttgtca

SEQ ID NO: 36708 - DNA, 50 bp, synthetic construct
  source 1..50: mol_type = other DNA
actttttgaaatgctatgctaaccaatgtgcgaaaggcagataaaaaatt

SEQ ID NO: 36709 - DNA, 50 bp, synthetic construct
  source 1..50: mol_type = other DNA
tatgctgatgcagatatttttctctctataatttctgttacatccatatt

SEQ ID NO: 36710 - DNA, 50 bp, synthetic construct
  source 1..50: mol_type = other DNA
gcgattattctggcggatgagccgacgggcaatctggacagcaagaccac

SEQ ID NO: 36711 - DNA, 50 bp, synthetic construct
  source 1..50: mol_type = other DNA
tttttaaagggcttattttttatgccgttttgaaagaatttgtttcaact

SEQ ID NO: 36712 - DNA, 50 bp, synthetic construct
  source 1..50: mol_type = other DNA
attttcttgaatgcatccctgattttacatagtctgttatcatcttatat

SEQ ID NO: 36713 - DNA, 50 bp, synthetic construct
  source 1..50: mol_type = other DNA
gggggattaggactttcattcaaatttttcttatgaagaaaatatattgt

SEQ ID NO: 36714 - DNA, 50 bp, synthetic construct
  source 1..50: mol_type = other DNA
aataaagaatacttttaatcaaaaactttttagttcccgtatttttatca

SEQ ID NO: 36715 - DNA, 50 bp, synthetic construct
  source 1..50: mol_type = other DNA
agcgacatacgaaacgcttaaaagcgctttcagtcagttcgtaatgctcg

SEQ ID NO: 36716 - DNA, 50 bp, synthetic construct
  source 1..50: mol_type = other DNA
aagttcaagccggttttgggtggattttaagtatcaatcagtttgttccg

SEQ ID NO: 36717 - DNA, 50 bp, synthetic construct
  source 1..50: mol_type = other DNA
gggagattcaggtgccggagaatggggacaaatctttcaaaagatgatac

SEQ ID NO: 36718 - DNA, 50 bp, synthetic construct
  source 1..50: mol_type = other DNA
gattgaatatgaaaggaataaaccacggttttttccgttctttttacgat

SEQ ID NO: 36719 - DNA, 50 bp, synthetic construct
  source 1..50: mol_type = other DNA
tggaggccataccgcttcttgacccatagagcgcagcggtaaggccgtgc

SEQ ID NO: 36720 - DNA, 50 bp, synthetic construct
  source 1..50: mol_type = other DNA
tttgtgcttaaatttattgttttgaaataagtatagtatttactttgaat

SEQ ID NO: 36721 - DNA, 50 bp, synthetic construct
  source 1..50: mol_type = other DNA
agagcttgtcgttggcctcctgcaggtccaggccttcggcggcaagcgag

SEQ ID NO: 36722 - DNA, 50 bp, synthetic construct
  source 1..50: mol_type = other DNA
ccccggcagccccacctacgcgctgcgtagccacgccttagcggcggacc

SEQ ID NO: 36723 - DNA, 50 bp, synthetic construct
  source 1..50: mol_type = other DNA
tgtgattggtacagcaccaggcgatattacctctaaacctaagtaatatc

SEQ ID NO: 36724 - DNA, 50 bp, synthetic construct
  source 1..50: mol_type = other DNA
gcttgttgcggcagaagaagtaggtggttactcggcgggccggtgaaagc

SEQ ID NO: 36725 - DNA, 50 bp, synthetic construct
  source 1..50: mol_type = other DNA
aacgccgtcgtcgtccgaggactgcgcatctctcattgcctagtccgacc

SEQ ID NO: 36726 - DNA, 50 bp, synthetic construct
  source 1..50: mol_type = other DNA
acagcagcatagcgcattggagcgaatgatatccggcgctatgtcgccgt

SEQ ID NO: 36727 - DNA, 50 bp, synthetic construct
  source 1..50: mol_type = other DNA
tcgtcgagtccccccgctcgatcggcgattcgagtccgggctatggacgc

SEQ ID NO: 36728 - DNA, 50 bp, synthetic construct
  source 1..50: mol_type = other DNA
caggaaggaaaaaatttatttaagaaatttactaaatttgtcacatcttt

SEQ ID NO: 36729 - DNA, 50 bp, synthetic construct
  source 1..50: mol_type = other DNA
ttttattgaataaaaaaaaataaactgctattttttttcatttattgcgg

SEQ ID NO: 36730 - DNA, 50 bp, synthetic construct
  source 1..50: mol_type = other DNA
ttggttcaaccgaataaccaaaaatatttttggttactgaacagaagctt

SEQ ID NO: 36731 - DNA, 50 bp, synthetic construct
  source 1..50: mol_type = other DNA
ggcgaaaggcaatgtccccgttcgcgtttgcggggcttttgctcactgca

SEQ ID NO: 36732 - DNA, 50 bp, synthetic construct
  source 1..50: mol_type = other DNA
gaaccttggcgccgagctgggccagggcgtcgaaccgttcgccaaggtcg

SEQ ID NO: 36733 - DNA, 50 bp, synthetic construct
  source 1..50: mol_type = other DNA
gccggtccatcgaccggatgcgccggcgcgcgctgaaatggtggcgcggc

SEQ ID NO: 36734 - DNA, 50 bp, synthetic construct
  source 1..50: mol_type = other DNA
cgcccggcatccgatcagcggggccggccccgctgctcgactcgcgggtg

SEQ ID NO: 36735 - DNA, 50 bp, synthetic construct
  source 1..50: mol_type = other DNA
gtcgaggcaggctttgccgccgcgcgcgcaagcaccttcgccagttcgaa

SEQ ID NO: 36736 - DNA, 50 bp, synthetic construct
  source 1..50: mol_type = other DNA
gttgctttgtatcaaaatcagaggtacgaatggtttaaacccagcagtgc

SEQ ID NO: 36737 - DNA, 50 bp, synthetic construct
  source 1..50: mol_type = other DNA
gaggaacaaggcaagggagcaccattgagttccccctttcgttgttgatt

SEQ ID NO: 36738 - DNA, 50 bp, synthetic construct
  source 1..50: mol_type = other DNA
cattggagtattatgagaggaggaattccagcaatcagtgtactttttcc

SEQ ID NO: 36739 - DNA, 50 bp, synthetic construct
  source 1..50: mol_type = other DNA
tgaccttaattgtctttttaaataaaaattattaaaaatggggcgttgca

SEQ ID NO: 36740 - DNA, 50 bp, synthetic construct
  source 1..50: mol_type = other DNA
cattttttgaaagaaaaatatccggcgtgattttttcgacttcaaaatta

SEQ ID NO: 36741 - DNA, 50 bp, synthetic construct
  source 1..50: mol_type = other DNA
aacgttttaattttttattaagagtatatttttcaacaatttttatcgtt

SEQ ID NO: 36742 - DNA, 50 bp, synthetic construct
  source 1..50: mol_type = other DNA
ttacagctgattttgataagaaatatatttcagatagctataaaaaggaa

SEQ ID NO: 36743 - DNA, 50 bp, synthetic construct
  source 1..50: mol_type = other DNA
aagcaatgattctaattcttctggggcttatgctataataatcattgttg

SEQ ID NO: 36744 - DNA, 50 bp, synthetic construct
  source 1..50: mol_type = other DNA
gccttgcaagaaaaacagttgttacggaaacagaaatttctttacagcag

SEQ ID NO: 36745 - DNA, 50 bp, synthetic construct
  source 1..50: mol_type = other DNA
ctattcaatgatattggcgttgattaatcgtgcaaaatcagtttgaagtt

SEQ ID NO: 36746 - DNA, 50 bp, synthetic construct
  source 1..50: mol_type = other DNA
acaagttgtttcaacttcagctgatgtgtgcccgggcatcttccgtttgt

SEQ ID NO: 36747 - DNA, 50 bp, synthetic construct
  source 1..50: mol_type = other DNA
ttatgtggggttatcgatatattcctatatatcactctaaaagccgatta

SEQ ID NO: 36748 - DNA, 50 bp, synthetic construct
  source 1..50: mol_type = other DNA
gcagtcagcaccatcagagaagccgttgcgaagctgatgtttggaggttc

SEQ ID NO: 36749 - DNA, 50 bp, synthetic construct
  source 1..50: mol_type = other DNA
tcggttatcttcttgaccattccttcacccgaggtcaagtggaaagcaaa

SEQ ID NO: 36750 - DNA, 50 bp, synthetic construct
  source 1..50: mol_type = other DNA
atctaccgcttatgccgttatcgacagcgataacgcccaaataatcagac

SEQ ID NO: 36751 - DNA, 50 bp, synthetic construct
  source 1..50: mol_type = other DNA
cctgagaaacctttctggaagttcagctgctgccatacaggttcgtgagc

SEQ ID NO: 36752 - DNA, 50 bp, synthetic construct
  source 1..50: mol_type = other DNA
tgcctcactttcattaaccatataaaagagcgcttaaaggaaaggaggag

SEQ ID NO: 36753 - DNA, 50 bp, synthetic construct
  source 1..50: mol_type = other DNA
ctgtagagcctttttgcgagcttccggaggctgtgatacaataagagcag

SEQ ID NO: 36754 - DNA, 50 bp, synthetic construct
  source 1..50: mol_type = other DNA
tgcgcgaagatatgataatggagggaaatccttcatcaataaaaaatgcg

SEQ ID NO: 36755 - DNA, 50 bp, synthetic construct
  source 1..50: mol_type = other DNA
agcgaaatgttcctgccggttttttaaaacacgagcagaaagatttcctc

SEQ ID NO: 36756 - DNA, 50 bp, synthetic construct
  source 1..50: mol_type = other DNA
gagcacggtattgtttgtcctgcccgggcgacggcaaagccgtcgtgtcc

SEQ ID NO: 36757 - DNA, 50 bp, synthetic construct
  source 1..50: mol_type = other DNA
gtgtgtggttacaggaggcgatgaaatcatacgctccttatcgtgcaaaa

SEQ ID NO: 36758 - DNA, 50 bp, synthetic construct
  source 1..50: mol_type = other DNA
ggcaattgccagagcacttattacaagtattagccgcatcggcagaagca

SEQ ID NO: 36759 - DNA, 50 bp, synthetic construct
  source 1..50: mol_type = other DNA
tcttatcgctgtcatttacaagatgtatattacattttcccgctatcgta

SEQ ID NO: 36760 - DNA, 50 bp, synthetic construct
  source 1..50: mol_type = other DNA
attttctattacatcggaaatgagatatccagcgaaatccaaaattaaat

SEQ ID NO: 36761 - DNA, 50 bp, synthetic construct
  source 1..50: mol_type = other DNA
gtcgcgtggtcaatcatacacgccgtcaacaatcggattgactgtccgcg

SEQ ID NO: 36762 - DNA, 50 bp, synthetic construct
  source 1..50: mol_type = other DNA
cgccataattgatacaatgcagtgcgatactcattgtatcaaaactggtg

SEQ ID NO: 36763 - DNA, 50 bp, synthetic construct
  source 1..50: mol_type = other DNA
tacaccttgcacatggtcagaaaaaccttttgttaaatggtatagagggg

SEQ ID NO: 36764 - DNA, 50 bp, synthetic construct
  source 1..50: mol_type = other DNA
atatcaataatattacgttgatattcttgtctccgccgcctgttatatct

SEQ ID NO: 36765 - DNA, 50 bp, synthetic construct
  source 1..50: mol_type = other DNA
tcgctttcctcctcaaaaacatcaagagaaatatttgtgatccaatatga

SEQ ID NO: 36766 - DNA, 50 bp, synthetic construct
  source 1..50: mol_type = other DNA
aaagaaaggtgaaaggtatcgcagatctcgctttttgtatggctttcttc

SEQ ID NO: 36767 - DNA, 50 bp, synthetic construct
  source 1..50: mol_type = other DNA
ggctgttcctgggcggaaaaggcgtcagcctcccctgctctttgagagcc

SEQ ID NO: 36768 - DNA, 50 bp, synthetic construct
  source 1..50: mol_type = other DNA
ggatgtgaagaattagtacattaacgttgttatacagaagaaatttctca

SEQ ID NO: 36769 - DNA, 50 bp, synthetic construct
  source 1..50: mol_type = other DNA
tttatcataaaaccgtgcttgtgcatcaggaagatgctctttatgatatg

SEQ ID NO: 36770 - DNA, 50 bp, synthetic construct
  source 1..50: mol_type = other DNA
aagctgatccttgccgatgaaccgaccggagcactggattccaaatccgc

SEQ ID NO: 36771 - DNA, 50 bp, synthetic construct
  source 1..50: mol_type = other DNA
cagattgatgacaacgaagaaacatcaatttcttccgtttcgtcaagctt

SEQ ID NO: 36772 - DNA, 50 bp, synthetic construct
  source 1..50: mol_type = other DNA
aaaaatatgtaaagaaagggtgaggataccccatttctggacgacaggct

SEQ ID NO: 36773 - DNA, 50 bp, synthetic construct
  source 1..50: mol_type = other DNA
gagggaacagcctgatcaacccacaaatcctgttattgttctgcagaata

SEQ ID NO: 36774 - DNA, 50 bp, synthetic construct
  source 1..50: mol_type = other DNA
attagcatatgaggaggtattatttttttgttaccccttcatactcttta

SEQ ID NO: 36775 - DNA, 50 bp, synthetic construct
  source 1..50: mol_type = other DNA
gatgctttggaatccagggcaccggtcggttcatccgcgagaatcagttc

SEQ ID NO: 36776 - DNA, 50 bp, synthetic construct
  source 1..50: mol_type = other DNA
tccgagcgaagcggctaatgctcttagaaagtccagcccaaaagcgaaag

SEQ ID NO: 36777 - DNA, 50 bp, synthetic construct
  source 1..50: mol_type = other DNA
gccgctgggcttcatcatagatcttaacatcaggtgccgaggtatgcggc

SEQ ID NO: 36778 - DNA, 50 bp, synthetic construct
  source 1..50: mol_type = other DNA
atattaaaaatgacaaaaaggaaactattccttcttaaactttatacgta

SEQ ID NO: 36779 - DNA, 50 bp, synthetic construct
  source 1..50: mol_type = other DNA
aagctgtgatacaatcacaaccttagcagccgatggagttattatccctg

SEQ ID NO: 36780 - DNA, 50 bp, synthetic construct
  source 1..50: mol_type = other DNA
ggccatgaatacagcaaaaaatgattttataggaaaatgtgatatgtaag

SEQ ID NO: 36781 - DNA, 50 bp, synthetic construct
  source 1..50: mol_type = other DNA
tttttctgctccgtgataggcgtagctgaggaagtcacgaaggaacttgc

SEQ ID NO: 36782 - DNA, 50 bp, synthetic construct
  source 1..50: mol_type = other DNA
cacattctcgaagtctacggaaagttcgctttcatgacctcgctcatgtg

SEQ ID NO: 36783 - DNA, 50 bp, synthetic construct
  source 1..50: mol_type = other DNA
aataaatcagcgaacacgcttatttgtatctatcaactttctgatgtatg

SEQ ID NO: 36784 - DNA, 50 bp, synthetic construct
  source 1..50: mol_type = other DNA
actgccatgtgttctcctcctatccagataaggagagaaagactggcggt

SEQ ID NO: 36785 - DNA, 50 bp, synthetic construct
  source 1..50: mol_type = other DNA
gacaaagacgggaaaaattatttactcctattgattttttcgtcaggata

SEQ ID NO: 36786 - DNA, 50 bp, synthetic construct
  source 1..50: mol_type = other DNA
cagcgcaaagagaatctggtcctctggtactccagaagctctctacgcgg

SEQ ID NO: 36787 - DNA, 50 bp, synthetic construct
  source 1..50: mol_type = other DNA
tatatagactacccaaagagaaaggatttgtggttgaggtagttcggagt

SEQ ID NO: 36788 - DNA, 50 bp, synthetic construct
  source 1..50: mol_type = other DNA
ccggttttatatagtgccaaccttttagaattggaagcgtaacatactca

SEQ ID NO: 36789 - DNA, 50 bp, synthetic construct
  source 1..50: mol_type = other DNA
gcgtttttgcactttctgaaaaaaagacagaaccgaaagattggcttgag

SEQ ID NO: 36790 - DNA, 50 bp, synthetic construct
  source 1..50: mol_type = other DNA
ttaccgacgaagggaaagaatttgtaaaacgcattgaccgcagcgcttag

SEQ ID NO: 36791 - DNA, 50 bp, synthetic construct
  source 1..50: mol_type = other DNA
ttaagtgcattttttgcttttattgaaatcaaagcatttttcgcagcaat

SEQ ID NO: 36792 - DNA, 50 bp, synthetic construct
  source 1..50: mol_type = other DNA
tccaaaccgcctccgaacacttgacaaaaatatcacgccgagcgaagcgc

SEQ ID NO: 36793 - DNA, 50 bp, synthetic construct
  source 1..50: mol_type = other DNA
agtcagaaacgtgtggaaatgtcgatcatggtctgcacacgctcgaactg

SEQ ID NO: 36794 - DNA, 50 bp, synthetic construct
  source 1..50: mol_type = other DNA
attatcccggataaaatgctcgaattttcgagcatttttgtatcaattat

SEQ ID NO: 36795 - DNA, 50 bp, synthetic construct
  source 1..50: mol_type = other DNA
cctcctccacaaaaaggtagtagctatgctctatatggcggcagtaaagg

SEQ ID NO: 36796 - DNA, 50 bp, synthetic construct
  source 1..50: mol_type = other DNA
tgagaaaagattcatctatgaacttaatggtatccggaacccttgtccca

SEQ ID NO: 36797 - DNA, 50 bp, synthetic construct
  source 1..50: mol_type = other DNA
actccatgactaaatccgattgaaataaaaatccagcacctcgaccttga

SEQ ID NO: 36798 - DNA, 50 bp, synthetic construct
  source 1..50: mol_type = other DNA
atctgcgtcatagcgtgcgacgaaaattagtcaagcactatgccgcaaat

SEQ ID NO: 36799 - DNA, 50 bp, synthetic construct
  source 1..50: mol_type = other DNA
tgctgctgcgcatcgtataaccgaatccggtgtggaaggatgaggccaaa

SEQ ID NO: 36800 - DNA, 50 bp, synthetic construct
  source 1..50: mol_type = other DNA
taattggtcacggaaacaagatgcgaaatccctccttccggtagtgtcta

SEQ ID NO: 36801 - DNA, 50 bp, synthetic construct
  source 1..50: mol_type = other DNA
ttgtatgtcaaataccctttataaattcataagggaaatgtacaaaaaca

SEQ ID NO: 36802 - DNA, 50 bp, synthetic construct
  source 1..50: mol_type = other DNA
ggacgatacgattgcatccagcagcgtttgcgaatcaaaaaaagaggtcg

SEQ ID NO: 36803 - DNA, 50 bp, synthetic construct
  source 1..50: mol_type = other DNA
cctgaagaatgaaaaatactgcggtgacgatgatcccgccgaccatcaat

SEQ ID NO: 36804 - DNA, 50 bp, synthetic construct
  source 1..50: mol_type = other DNA
agccgcaatatttcatcgaggatcatggtcgcatttgtaacattgaaaac

SEQ ID NO: 36805 - DNA, 50 bp, synthetic construct
  source 1..50: mol_type = other DNA
ccttttctgcacggatgcctttggcaacaaaaacatccttggataaatgc

SEQ ID NO: 36806 - DNA, 50 bp, synthetic construct
  source 1..50: mol_type = other DNA
tccacaacgggctgcaccgaggcgggggctgcggtgcaggtgcgtgtcgg

SEQ ID NO: 36807 - DNA, 50 bp, synthetic construct
  source 1..50: mol_type = other DNA
aaagtcaagacttttttgcatttgaaacaatatagataagtcttttggcg

SEQ ID NO: 36808 - DNA, 50 bp, synthetic construct
  source 1..50: mol_type = other DNA
cttcccgaaatatactcttcaaaaattcttgacgagcctttttcgggact

SEQ ID NO: 36809 - DNA, 50 bp, synthetic construct
  source 1..50: mol_type = other DNA
gagacgtgatgccatccaaggccgaacgtccgaccaaaaatccacggacg

SEQ ID NO: 36810 - DNA, 50 bp, synthetic construct
  source 1..50: mol_type = other DNA
aataaagataaacagtaacacggcaaaactccgacaactttataaaaatt

SEQ ID NO: 36811 - DNA, 50 bp, synthetic construct
  source 1..50: mol_type = other DNA
tttggcgatgcaatgcttatcctgtacaggattattaaggcaatatgcaa

SEQ ID NO: 36812 - DNA, 50 bp, synthetic construct
  source 1..50: mol_type = other DNA
atttcctgatttctgaattttgaagctaatgaattaggacactttgaaat

SEQ ID NO: 36813 - DNA, 50 bp, synthetic construct
  source 1..50: mol_type = other DNA
tttatcaagtatagtgataccattcctttcaaattcttatataatataat

SEQ ID NO: 36814 - DNA, 50 bp, synthetic construct
  source 1..50: mol_type = other DNA
ttgtaccatagaggttgaattcatcaatgaccgcaataactatgataata

SEQ ID NO: 36815 - DNA, 50 bp, synthetic construct
  source 1..50: mol_type = other DNA
ccgctcaaaatattctctgccgctttcaaggccatttattttttgtctgc

SEQ ID NO: 36816 - DNA, 50 bp, synthetic construct
  source 1..50: mol_type = other DNA
tccatgctgtgaagcaaaactgaatttgcctttttgcttgcatccatacg

SEQ ID NO: 36817 - DNA, 50 bp, synthetic construct
  source 1..50: mol_type = other DNA
gatggggcgtcttgcaccgcagaccggtcagcggctcatagattttcatc

SEQ ID NO: 36818 - DNA, 50 bp, synthetic construct
  source 1..50: mol_type = other DNA
aaatttagggcagaggaaacaaaggggtatgttgcccgtgtccgcaatat

SEQ ID NO: 36819 - DNA, 50 bp, synthetic construct
  source 1..50: mol_type = other DNA
ctactaacagcctacaaaactaataaacccctttgtctagctttttcttt

SEQ ID NO: 36820 - DNA, 50 bp, synthetic construct
  source 1..50: mol_type = other DNA
ccttgaacttcgacattcttagagcgctctaaaaaacttttatatcaagc

SEQ ID NO: 36821 - DNA, 50 bp, synthetic construct
  source 1..50: mol_type = other DNA
aaatggaagtaaaaacagctagaaaatattagaacttttttgttttaaag

SEQ ID NO: 36822 - DNA, 50 bp, synthetic construct
  source 1..50: mol_type = other DNA
gatggcaaatggcaaaagttacaatattgtaatttcggttggactttttg

SEQ ID NO: 36823 - DNA, 50 bp, synthetic construct
  source 1..50: mol_type = other DNA
aaacctgcggtaccacccacattggcttgttatgtatttgtgagcagttt

SEQ ID NO: 36824 - DNA, 50 bp, synthetic construct
  source 1..50: mol_type = other DNA
cggtcacggcctgagctatctcaaggctgaggtagcgcagcgaagcgccg

SEQ ID NO: 36825 - DNA, 50 bp, synthetic construct
  source 1..50: mol_type = other DNA
tcattaatgaaggggaagcaaagatctctccccatccctttatgatggta

SEQ ID NO: 36826 - DNA, 50 bp, synthetic construct
  source 1..50: mol_type = other DNA
ggagaggtaattctcgtagagctttcgaccttgccgaggatgacctcgat

SEQ ID NO: 36827 - DNA, 50 bp, synthetic construct
  source 1..50: mol_type = other DNA
aaatcaggaacgaaaagtaaaaagtatatcctcctttatgatcctgttta

SEQ ID NO: 36828 - DNA, 50 bp, synthetic construct
  source 1..50: mol_type = other DNA
cgaaaatcggaaaaatattgcgaattttgaaaatgcttgttcgatgtccg

SEQ ID NO: 36829 - DNA, 50 bp, synthetic construct
  source 1..50: mol_type = other DNA
tggcaagtgcaagagccattattacttctcaatgcaggtaagaaaactga

SEQ ID NO: 36830 - DNA, 50 bp, synthetic construct
  source 1..50: mol_type = other DNA
ccatgcacaaaaatggttgggagcttctccccatccctttatgatggtgt

SEQ ID NO: 36831 - DNA, 50 bp, synthetic construct
  source 1..50: mol_type = other DNA
tttttacactctttgatagataatttctttccttggcataaactgaaaaa

SEQ ID NO: 36832 - DNA, 50 bp, synthetic construct
  source 1..50: mol_type = other DNA
ctgcattctatgcagcgtatagcttcgcatataagctgaagaataaaacg

SEQ ID NO: 36833 - DNA, 50 bp, synthetic construct
  source 1..50: mol_type = other DNA
gctggctggcttctcttgacggaatgttacgcgaagagaatacattatta

SEQ ID NO: 36834 - DNA, 50 bp, synthetic construct
  source 1..50: mol_type = other DNA
acaaaagtttgcacagacattttggacaaaatggatatacaaaaattatg

SEQ ID NO: 36835 - DNA, 50 bp, synthetic construct
  source 1..50: mol_type = other DNA
caaattcgctgcgtatccaacagagtaattttgaatgagcagcgttttta

SEQ ID NO: 36836 - DNA, 50 bp, synthetic construct
  source 1..50: mol_type = other DNA
ctaacgaaacagaatgataaaataattgctcagcaggcgtgttttcttat

SEQ ID NO: 36837 - DNA, 50 bp, synthetic construct
  source 1..50: mol_type = other DNA
atatatagacgcacggaaaggagggacctccttcctatgtaactatatat

SEQ ID NO: 36838 - DNA, 50 bp, synthetic construct
  source 1..50: mol_type = other DNA
cagcctgaattttttatctttcagatctggaacttggtcaacattgaata

SEQ ID NO: 36839 - DNA, 50 bp, synthetic construct
  source 1..50: mol_type = other DNA
actcccgaagaactaaatcaaagtatgttttgaattagtttactatgact

SEQ ID NO: 36840 - DNA, 50 bp, synthetic construct
  source 1..50: mol_type = other DNA
aaataatattgtatcatctccggagctccggaattagaacctgattatgc

SEQ ID NO: 36841 - DNA, 50 bp, synthetic construct
  source 1..50: mol_type = other DNA
taacccaacaggttatcaatgagaaatatcattgataacctattggagcg

SEQ ID NO: 36842 - DNA, 50 bp, synthetic construct
  source 1..50: mol_type = other DNA
ccgaattataaagggccggaaggcccgccttcgggcggctctttctttac

SEQ ID NO: 36843 - DNA, 50 bp, synthetic construct
  source 1..50: mol_type = other DNA
agtgatatatagacactaccggaaggtctgccctgtgcatttatgaacga

SEQ ID NO: 36844 - DNA, 50 bp, synthetic construct
  source 1..50: mol_type = other DNA
aatcaagaaaataaggagtgaaaagacgcatactccttatatttttcaag

SEQ ID NO: 36845 - DNA, 50 bp, synthetic construct
  source 1..50: mol_type = other DNA
tatatgtaatgacaggaggaggtcaaaccttcatttattcagataatata

SEQ ID NO: 36846 - DNA, 50 bp, synthetic construct
  source 1..50: mol_type = other DNA
tagaaatcaaaaatcaaggagacaatttggctctttttttttttcaaact

SEQ ID NO: 36847 - DNA, 50 bp, synthetic construct
  source 1..50: mol_type = other DNA
tgcaagaaaaggagagttttctaaattgtcaatgattgagcaactcggca

SEQ ID NO: 36848 - DNA, 50 bp, synthetic construct
  source 1..50: mol_type = other DNA
ctgcgggataccggaggagtaccgggcagtactcaggcagtttcagggca

SEQ ID NO: 36849 - DNA, 50 bp, synthetic construct
  source 1..50: mol_type = other DNA
tcaacacagtaaatcaatatgacaattatccagtgctttgatcagcccga

SEQ ID NO: 36850 - DNA, 50 bp, synthetic construct
  source 1..50: mol_type = other DNA
tttttgttagctgtgttgtgtgatatctctgcttcggttatttccataat

SEQ ID NO: 36851 - DNA, 50 bp, synthetic construct
  source 1..50: mol_type = other DNA
gagacgtgatgccctccaaggccgaacgtccgaccaaaaatccacggacg

SEQ ID NO: 36852 - DNA, 50 bp, synthetic construct
  source 1..50: mol_type = other DNA
cgatagcaagagcgctgattactcatttggacttactgggcttgcaggcg

SEQ ID NO: 36853 - DNA, 50 bp, synthetic construct
  source 1..50: mol_type = other DNA
cggcacgctacggctcgtttccttgcagggaactaagccctgcttttctt

SEQ ID NO: 36854 - DNA, 50 bp, synthetic construct
  source 1..50: mol_type = other DNA
ggggagtgatccccggctcttttttatccaagtcacggtgaccaccacgg

SEQ ID NO: 36855 - DNA, 50 bp, synthetic construct
  source 1..50: mol_type = other DNA
agcactgcggcgaccgctacgctgatagagtattcggctgtcaaggtgct

SEQ ID NO: 36856 - DNA, 50 bp, synthetic construct
  source 1..50: mol_type = other DNA
aataatgttataaaaaatggtacaattagacttttttttataaaaatatt

SEQ ID NO: 36857 - DNA, 50 bp, synthetic construct
  source 1..50: mol_type = other DNA
ttgatgaatagtaaagcgattgcatcttacaaagctcccttattcgccat

SEQ ID NO: 36858 - DNA, 50 bp, synthetic construct
  source 1..50: mol_type = other DNA
ctgtccgtggactgtccaataatttcaattccgaagccatccaacagctt

SEQ ID NO: 36859 - DNA, 50 bp, synthetic construct
  source 1..50: mol_type = other DNA
cagcgaaaaacagaacaacaggattttgaatgttgttttacttcacgctt

SEQ ID NO: 36860 - DNA, 50 bp, synthetic construct
  source 1..50: mol_type = other DNA
tctttaagtgaacgcgatactcttataatagtataagatatgtataaaac

SEQ ID NO: 36861 - DNA, 50 bp, synthetic construct
  source 1..50: mol_type = other DNA
tcttgcattatattctgcgtttgcaatgtcggtcagttacatttgtaaga

SEQ ID NO: 36862 - DNA, 50 bp, synthetic construct
  source 1..50: mol_type = other DNA
ggaaattaaaggaaattgacaagaatttcataacatttctttttatttgt

SEQ ID NO: 36863 - DNA, 50 bp, synthetic construct
  source 1..50: mol_type = other DNA
taaacagcgcctttctgagcaagcatgtcgctttccaaagccgctgaaaa

SEQ ID NO: 36864 - DNA, 50 bp, synthetic construct
  source 1..50: mol_type = other DNA
aatggttttgagctgctgcaaagtcatttttgctgcagaatcaaagcggc

SEQ ID NO: 36865 - DNA, 50 bp, synthetic construct
  source 1..50: mol_type = other DNA
aaccagtcaagaaacgcctgacagccctcctcattttttagggaaaaatt

SEQ ID NO: 36866 - DNA, 50 bp, synthetic construct
  source 1..50: mol_type = other DNA
ctggtaacaaaaaaatataccaataaattggtatattttttcgttaacat

SEQ ID NO: 36867 - DNA, 50 bp, synthetic construct
  source 1..50: mol_type = other DNA
ggcagtgttggggtcagcggttcgaaagaacgtgcgaagtcacgttcttt

SEQ ID NO: 36868 - DNA, 50 bp, synthetic construct
  source 1..50: mol_type = other DNA
gccagtccgaaacgatgtccacatcatgtgtgttatcctttcgggtcaca

SEQ ID NO: 36869 - DNA, 50 bp, synthetic construct
  source 1..50: mol_type = other DNA
cgtttgccatacagccgccgggcagtactcaggcagtttcagggcattcg

SEQ ID NO: 36870 - DNA, 50 bp, synthetic construct
  source 1..50: mol_type = other DNA
ctcaacgtccgcgcgcttaccatggtcataggttcggatttgttgtttct

SEQ ID NO: 36871 - DNA, 50 bp, synthetic construct
  source 1..50: mol_type = other DNA
ttatatcaaattttagtcagctctgcagcgcaatgagcggtcacagatac

SEQ ID NO: 36872 - DNA, 50 bp, synthetic construct
  source 1..50: mol_type = other DNA
tgtccgcgccttgctgggtgcggattccgccgaccatcaatccgctgacg

SEQ ID NO: 36873 - DNA, 50 bp, synthetic construct
  source 1..50: mol_type = other DNA
gagttaccatcccacgcatcatgaagccatccggcaggtgctgataactt

SEQ ID NO: 36874 - DNA, 50 bp, synthetic construct
  source 1..50: mol_type = other DNA
cttttttgatgttaatgcaggcatttttgtctgttttccgggcaaacccc

SEQ ID NO: 36875 - DNA, 50 bp, synthetic construct
  source 1..50: mol_type = other DNA
aaaagggtttcctgcggcacctcatccagaaacccgcatggattctggac

SEQ ID NO: 36876 - DNA, 50 bp, synthetic construct
  source 1..50: mol_type = other DNA
aataaaaatattgctgtttgagataaagctaaagaaacgatatctttctt

SEQ ID NO: 36877 - DNA, 50 bp, synthetic construct
  source 1..50: mol_type = other DNA
tttagcattttaagcctacacaaatatgtgtatagccttgtaaagaaaat

SEQ ID NO: 36878 - DNA, 50 bp, synthetic construct
  source 1..50: mol_type = other DNA
cgcaatggggcagatttggcgtgacttcggtttttccaagcccttttcgg

SEQ ID NO: 36879 - DNA, 50 bp, synthetic construct
  source 1..50: mol_type = other DNA
cgcttttagagtgatatatagtagcgctgtaaatcttcgctctggaataa

SEQ ID NO: 36880 - DNA, 50 bp, synthetic construct
  source 1..50: mol_type = other DNA
accttgtaagcaggcatatttcttttccagcggcgagacgcttttgctgt

SEQ ID NO: 36881 - DNA, 50 bp, synthetic construct
  source 1..50: mol_type = other DNA
ctataaaagaaaggggcaggcaaaatcccgcctactacttattttttatt

SEQ ID NO: 36882 - DNA, 50 bp, synthetic construct
  source 1..50: mol_type = other DNA
caccggcgttcgcgcccataagctcgcactgatgggagcgaacgccaagc

SEQ ID NO: 36883 - DNA, 50 bp, synthetic construct
  source 1..50: mol_type = other DNA
acctcccaacaccaaggggtatgcttttctgggactttccattatgtttc

SEQ ID NO: 36884 - DNA, 50 bp, synthetic construct
  source 1..50: mol_type = other DNA
aagacttttttacacttgaaagcaaaaaacaggcgggcaaaaagagtctg

SEQ ID NO: 36885 - DNA, 50 bp, synthetic construct
  source 1..50: mol_type = other DNA
aaaaagcagtaagcaaaaaacttacttaagtttattgattttcggcattt

SEQ ID NO: 36886 - DNA, 50 bp, synthetic construct
  source 1..50: mol_type = other DNA
cacgataaataccgaccgatctttggtcaaagcggcaggtattgatgatg

SEQ ID NO: 36887 - DNA, 50 bp, synthetic construct
  source 1..50: mol_type = other DNA
cctcgctcggacggcagcagcaacgcgtcgctgcctactgccgagtttcc

SEQ ID NO: 36888 - DNA, 50 bp, synthetic construct
  source 1..50: mol_type = other DNA
gctcatttggcaagcaacgctgaatccacggcagcagttcctcaatgata

SEQ ID NO: 36889 - DNA, 50 bp, synthetic construct
  source 1..50: mol_type = other DNA
tagataagaacggaaaagaaatggtactaccggtttgacgatctcataat

SEQ ID NO: 36890 - DNA, 50 bp, synthetic construct
  source 1..50: mol_type = other DNA
tcgttggcttgcgccattctggaattgcgcagaacatcgcaaagtaaccc

SEQ ID NO: 36891 - DNA, 50 bp, synthetic construct
  source 1..50: mol_type = other DNA
aaaccgcaggcgttgaaacctgcggtcggttgcttcactgaatgcggcga

SEQ ID NO: 36892 - DNA, 50 bp, synthetic construct
  source 1..50: mol_type = other DNA
ccacttatcagaaatatctatccaatgccatatttattggcgatgatcgt

SEQ ID NO: 36893 - DNA, 50 bp, synthetic construct
  source 1..50: mol_type = other DNA
gggcagtcctcaacaaatacgcccccttgtctatgggcacgttacagcca

SEQ ID NO: 36894 - DNA, 50 bp, synthetic construct
  source 1..50: mol_type = other DNA
cacgggcgtatccagcgacacgtctttgatgcaagctggactttcccggc

SEQ ID NO: 36895 - DNA, 50 bp, synthetic construct
  source 1..50: mol_type = other DNA
atgacgatcttgtcaacggaaatttcgagcagaattgtatcaatctcagc

SEQ ID NO: 36896 - DNA, 50 bp, synthetic construct
  source 1..50: mol_type = other DNA
ccaagatagagttatccacaagagagcgtaaaaaaataaagctatgcagc

SEQ ID NO: 36897 - DNA, 50 bp, synthetic construct
  source 1..50: mol_type = other DNA
atctgagtcccagcacagacgggtatacccaagcacacaggaatacaacc

SEQ ID NO: 36898 - DNA, 50 bp, synthetic construct
  source 1..50: mol_type = other DNA
ttataacacaaaaaaagcaaacttttaccctcttttagtttttgttcttc

SEQ ID NO: 36899 - DNA, 50 bp, synthetic construct
  source 1..50: mol_type = other DNA
taattatctgtttcttgcttttcatatatcaagtattattgggatatttc

SEQ ID NO: 36900 - DNA, 50 bp, synthetic construct
  source 1..50: mol_type = other DNA
tcgacctcttcaaaggtcatggccttcggcgatttttttgacgtgggcgg

SEQ ID NO: 36901 - DNA, 50 bp, synthetic construct
  source 1..50: mol_type = other DNA
tgatccgctgctccagtgcattcgaacgaatgttctggattgcgtgactg

SEQ ID NO: 36902 - DNA, 50 bp, synthetic construct
  source 1..50: mol_type = other DNA
gcctcaaaactgtggagctggtcttcctgccacctccactgcttttatct

SEQ ID NO: 36903 - DNA, 50 bp, synthetic construct
  source 1..50: mol_type = other DNA
ctttattgcctgttgccgcgaaagacctttcgcggcaagtgcagcgttcc

SEQ ID NO: 36904 - DNA, 50 bp, synthetic construct
  source 1..50: mol_type = other DNA
gtaatattgcgatcctctttttttaatataaatctctttttcaatatctc

SEQ ID NO: 36905 - DNA, 50 bp, synthetic construct
  source 1..50: mol_type = other DNA
tacccggcagtaggcggccactcttatccgtctgtgtctcctgccttccc

SEQ ID NO: 36906 - DNA, 50 bp, synthetic construct
  source 1..50: mol_type = other DNA
ctggtctgcagcaagaaaaatgtaaaaggcgatgccttgctgcagaaaag

SEQ ID NO: 36907 - DNA, 50 bp, synthetic construct
  source 1..50: mol_type = other DNA
tttgagcggacctgcatcaaccgttttttcttgctctttttccggatagt

SEQ ID NO: 36908 - DNA, 50 bp, synthetic construct
  source 1..50: mol_type = other DNA
tctgaagaaatgggacagctcaatattgggaacttctgcagctttttcct

SEQ ID NO: 36909 - DNA, 50 bp, synthetic construct
  source 1..50: mol_type = other DNA
tcagcagaatgccgtagaccggaatctttctttgcttggcaaaaggctga

SEQ ID NO: 36910 - DNA, 50 bp, synthetic construct
  source 1..50: mol_type = other DNA
cctatgaaaatttttcgacacaaaattttgtgtcacaaaattagcatagc

SEQ ID NO: 36911 - DNA, 50 bp, synthetic construct
  source 1..50: mol_type = other DNA
cgcctgcgccagagctatcatcaatattacagcccctactggtgaagagg

SEQ ID NO: 36912 - DNA, 50 bp, synthetic construct
  source 1..50: mol_type = other DNA
tttacccatgaacagcggacctgccgaaacagattctgttgttgtgtacc

SEQ ID NO: 36913 - DNA, 50 bp, synthetic construct
  source 1..50: mol_type = other DNA
aaggaggctttctgatggatgtggcttattatcagtcaggaagccgcttt

SEQ ID NO: 36914 - DNA, 50 bp, synthetic construct
  source 1..50: mol_type = other DNA
caaagccaaggaaggaggaacgagcactcctcggtctgttatttgaaatg

SEQ ID NO: 36915 - DNA, 50 bp, synthetic construct
  source 1..50: mol_type = other DNA
aatatggcaaccctgtttccgtttatctgcacaaaaagattttattattt

SEQ ID NO: 36916 - DNA, 50 bp, synthetic construct
  source 1..50: mol_type = other DNA
aaaggacaatcgaatgaatcatttgcaaattgatttatagattgtatttt

SEQ ID NO: 36917 - DNA, 50 bp, synthetic construct
  source 1..50: mol_type = other DNA
tccggcccagaaaaaaattttctttctgtacaatttccgccccttctgca

SEQ ID NO: 36918 - DNA, 50 bp, synthetic construct
  source 1..50: mol_type = other DNA
aagttctttccttcattttcagtacggtctgtaaactaaccaaaatcggg

SEQ ID NO: 36919 - DNA, 50 bp, synthetic construct
  source 1..50: mol_type = other DNA
agggaagggaatgtgtgggaaagtcttcttgtcctactcattctatccct

SEQ ID NO: 36920 - DNA, 50 bp, synthetic construct
  source 1..50: mol_type = other DNA
tctgtggagcatacaaaattggacacgaaaatacaggaaacacccacagc

SEQ ID NO: 36921 - DNA, 50 bp, synthetic construct
  source 1..50: mol_type = other DNA
aatcacattactagaactaaagaaattagattatttgctataatagaggc

SEQ ID NO: 36922 - DNA, 50 bp, synthetic construct
  source 1..50: mol_type = other DNA
ctattgcgattcggttttctctatcttggacgaaaccgaccagattatga

SEQ ID NO: 36923 - DNA, 50 bp, synthetic construct
  source 1..50: mol_type = other DNA
gcagcttttttatttaaagcccccgtgggttcatcggcaaacagcagatg

SEQ ID NO: 36924 - DNA, 50 bp, synthetic construct
  source 1..50: mol_type = other DNA
tttaacgattccgcttttgagaacaggttttcacgtatcttgtcctccac

SEQ ID NO: 36925 - DNA, 50 bp, synthetic construct
  source 1..50: mol_type = other DNA
ccgccgttgacggcaaatgtgtcagcgtacagcgtggcctccgccagctc

SEQ ID NO: 36926 - DNA, 50 bp, synthetic construct
  source 1..50: mol_type = other DNA
caagttcatcaatcaccagcgcgtcggaaatgccgtgatttcctctatct

SEQ ID NO: 36927 - DNA, 50 bp, synthetic construct
  source 1..50: mol_type = other DNA
atttgtttccaggaaaagccttgtttgcaagggttttcccgctaataatg

SEQ ID NO: 36928 - DNA, 50 bp, synthetic construct
  source 1..50: mol_type = other DNA
ccatcatccgcaggctgtccgccacttttcagacagccttaccgccgata

SEQ ID NO: 36929 - DNA, 50 bp, synthetic construct
  source 1..50: mol_type = other DNA
gtcgtccgaaaagtcggcaatgtgatcttgggatgtacggtcttgccggt

SEQ ID NO: 36930 - DNA, 50 bp, synthetic construct
  source 1..50: mol_type = other DNA
acaatgattatgagtttattagaagtattgtttaaacatataactattta

SEQ ID NO: 36931 - DNA, 50 bp, synthetic construct
  source 1..50: mol_type = other DNA
gctgggcctgccccaggtcaacgatatgatgagagggaagtaggcccttc

SEQ ID NO: 36932 - DNA, 50 bp, synthetic construct
  source 1..50: mol_type = other DNA
ataaatcaggcttttagagcgaatatgttcgctctgcatgagcgggaagt

SEQ ID NO: 36933 - DNA, 50 bp, synthetic construct
  source 1..50: mol_type = other DNA
aaatgagagccgccgccagcgaatttgtccattggatgcggaggagctcc

SEQ ID NO: 36934 - DNA, 50 bp, synthetic construct
  source 1..50: mol_type = other DNA
ggttcaagaaaagcctgtaagaaatttttctccctttcttgttttgttcc

SEQ ID NO: 36935 - DNA, 50 bp, synthetic construct
  source 1..50: mol_type = other DNA
tttataaaagggtttcttattttcttaaaggggtgcttatgatgaataaa

SEQ ID NO: 36936 - DNA, 50 bp, synthetic construct
  source 1..50: mol_type = other DNA
caaggcaaaggttgcttaatggctcttgcgcttaagcggactgtgaattt

SEQ ID NO: 36937 - DNA, 50 bp, synthetic construct
  source 1..50: mol_type = other DNA
cgtaagctgtttgtttacggcgtttaataaacacaaacaaaacgcccgcg

SEQ ID NO: 36938 - DNA, 50 bp, synthetic construct
  source 1..50: mol_type = other DNA
tcgttcagaaatggggacacaaaagaatttgaagaaaggagcaagaagtc

SEQ ID NO: 36939 - DNA, 50 bp, synthetic construct
  source 1..50: mol_type = other DNA
cttttattgtagcaaataacttcgccgttcgctttgacgtataatattag

SEQ ID NO: 36940 - DNA, 50 bp, synthetic construct
  source 1..50: mol_type = other DNA
tgataactgcataaagccttaatcgtcctacccgtcgtgggcaggacaaa

SEQ ID NO: 36941 - DNA, 50 bp, synthetic construct
  source 1..50: mol_type = other DNA
gctgaaggcgatgccggcgcggcactgctccaccccgcatcagagtcagc

SEQ ID NO: 36942 - DNA, 50 bp, synthetic construct
  source 1..50: mol_type = other DNA
agcccccagacggaccttttcgaaaactggaataccttcgtctgagggac

SEQ ID NO: 36943 - DNA, 50 bp, synthetic construct
  source 1..50: mol_type = other DNA
tatccagggccaagctgcaggcatttccgcttgcatggctgccccggaga

SEQ ID NO: 36944 - DNA, 50 bp, synthetic construct
  source 1..50: mol_type = other DNA
tttaaattaattagattttccacaattgaattaaccataatatttaaaaa

SEQ ID NO: 36945 - DNA, 50 bp, synthetic construct
  source 1..50: mol_type = other DNA
aatccataacttaagccgcctgctccacctcctcaattaccgtaggttcc

SEQ ID NO: 36946 - DNA, 50 bp, synthetic construct
  source 1..50: mol_type = other DNA
acgttcaaaagttgtaacaatttatcaaaataattccggtcaaacaacgt

SEQ ID NO: 36947 - DNA, 50 bp, synthetic construct
  source 1..50: mol_type = other DNA
tgcctctggctctttccattatgcgggtataaaaataacagccagaggaa

SEQ ID NO: 36948 - DNA, 50 bp, synthetic construct
  source 1..50: mol_type = other DNA
aggcttaataatgattctaagaaaaatctcttatggaggaaaagttaatg

SEQ ID NO: 36949 - DNA, 50 bp, synthetic construct
  source 1..50: mol_type = other DNA
tcagtatttgggtgcttcggagcgttgcaggcaaagcaccgcttggagga

SEQ ID NO: 36950 - DNA, 50 bp, synthetic construct
  source 1..50: mol_type = other DNA
aagcaatttagcctgtagggtaatgtatagtgatacattaagtatcttgt

SEQ ID NO: 36951 - DNA, 50 bp, synthetic construct
  source 1..50: mol_type = other DNA
aatccaaacattctctccatcatcctaaaaaaggagagaaagattggcga

SEQ ID NO: 36952 - DNA, 50 bp, synthetic construct
  source 1..50: mol_type = other DNA
acgcctgctatattgcagaccgctacagcgaggagcagcttaccagctac

SEQ ID NO: 36953 - DNA, 50 bp, synthetic construct
  source 1..50: mol_type = other DNA
cgcaagcagcatatgcgggaagtaatcattttttaattatgctgcagcag

SEQ ID NO: 36954 - DNA, 50 bp, synthetic construct
  source 1..50: mol_type = other DNA
acaaagagcaataagagcacactgatcagtgtaaaggctttaaccttata

SEQ ID NO: 36955 - DNA, 50 bp, synthetic construct
  source 1..50: mol_type = other DNA
gttggctgcaaaggagaaaatgcagctcccgcaccgccgcaccttccaac

SEQ ID NO: 36956 - DNA, 50 bp, synthetic construct
  source 1..50: mol_type = other DNA
tgttgcaaaagagtgttaaatgatgaacgattaaagaatcttggtggagg

SEQ ID NO: 36957 - DNA, 50 bp, synthetic construct
  source 1..50: mol_type = other DNA
tgattaaaaatatccataacttatttttatgtctattttataatcaatta

SEQ ID NO: 36958 - DNA, 50 bp, synthetic construct
  source 1..50: mol_type = other DNA
aataatcatgaactcaatcccatattgatcttcaaatcttcataaatatt

SEQ ID NO: 36959 - DNA, 50 bp, synthetic construct
  source 1..50: mol_type = other DNA
ctgcctgtaaagttttaaggaggaaatgatacttgaaatgaattcccgca

SEQ ID NO: 36960 - DNA, 50 bp, synthetic construct
  source 1..50: mol_type = other DNA
gtctctgtagaccatgggaacacaagcctgtcgccattgtaaaaacgtag

SEQ ID NO: 36961 - DNA, 50 bp, synthetic construct
  source 1..50: mol_type = other DNA
actattatatcactcccgggaacttaatttcctgccgggtatatctatgt

SEQ ID NO: 36962 - DNA, 50 bp, synthetic construct
  source 1..50: mol_type = other DNA
atatctggtcgagattatgcccgatataagaatctgaatagttataatat

SEQ ID NO: 36963 - DNA, 50 bp, synthetic construct
  source 1..50: mol_type = other DNA
acaggctgagtacctgtacagcctcatcagaactaccgtctccacatgat

SEQ ID NO: 36964 - DNA, 50 bp, synthetic construct
  source 1..50: mol_type = other DNA
tttccgctcaataaatgctataatataattttgcgaccatccagcggaca

SEQ ID NO: 36965 - DNA, 50 bp, synthetic construct
  source 1..50: mol_type = other DNA
catattttgccctgaagcatttcctactaactggtgaaccccaaatcctg

SEQ ID NO: 36966 - DNA, 50 bp, synthetic construct
  source 1..50: mol_type = other DNA
gatcctttaactctgttcgcaagtacacttatatcaagtcataaatccaa

SEQ ID NO: 36967 - DNA, 50 bp, synthetic construct
  source 1..50: mol_type = other DNA
attcatattcattctcctttgctccgatgcaatcgacaatgcaaatgaag

SEQ ID NO: 36968 - DNA, 50 bp, synthetic construct
  source 1..50: mol_type = other DNA
gatattatcaagcggaacttttcccttgaaaagttatgttttttgtaatc

SEQ ID NO: 36969 - DNA, 50 bp, synthetic construct
  source 1..50: mol_type = other DNA
ctgtagtcacgccaacaccaaaaagctccaagatgttgccctcggagaag

SEQ ID NO: 36970 - DNA, 50 bp, synthetic construct
  source 1..50: mol_type = other DNA
tttctaaaaaagtcattgacaaaaatttttgagaatgaaacgtttggaaa

SEQ ID NO: 36971 - DNA, 50 bp, synthetic construct
  source 1..50: mol_type = other DNA
gctaaagcaaagaccacaatcaccacaagtgtttcactcttggcagatta

SEQ ID NO: 36972 - DNA, 50 bp, synthetic construct
  source 1..50: mol_type = other DNA
atggattaattctttgtggtggttataaccacttttctcttttactccac

SEQ ID NO: 36973 - DNA, 50 bp, synthetic construct
  source 1..50: mol_type = other DNA
attgtcatattagtccttattcccatgttcatccggagaatgcgcggccg

SEQ ID NO: 36974 - DNA, 50 bp, synthetic construct
  source 1..50: mol_type = other DNA
ggtagattttggtaacgtagtcttgctgcgctggtatcgttttacataaa

SEQ ID NO: 36975 - DNA, 50 bp, synthetic construct
  source 1..50: mol_type = other DNA
cgagagcacaaggatgaaacagcctcatttgaatcatcaggacgataacc

SEQ ID NO: 36976 - DNA, 50 bp, synthetic construct
  source 1..50: mol_type = other DNA
gtaggtcatagcatttcttcgcaatatcgcgatttggtgcgaacctcttc

SEQ ID NO: 36977 - DNA, 50 bp, synthetic construct
  source 1..50: mol_type = other DNA
cgttctccagctattgcttggaatggcgtccagctttctgctctggagcg

SEQ ID NO: 36978 - DNA, 50 bp, synthetic construct
  source 1..50: mol_type = other DNA
tatggatactgttatgggaaaacatattacctctaaaaacacgatatatc

SEQ ID NO: 36979 - DNA, 50 bp, synthetic construct
  source 1..50: mol_type = other DNA
gcatcttagaacagtataccgtatgcactgggtcagaagtcgaaagaccc

SEQ ID NO: 36980 - DNA, 50 bp, synthetic construct
  source 1..50: mol_type = other DNA
gcgaatatatcgcaagccgtaaattttcaaactctgttttggatacagct

SEQ ID NO: 36981 - DNA, 50 bp, synthetic construct
  source 1..50: mol_type = other DNA
tatgccctgcaatttgatatacaagattgactgcaaatcgtcatggaata

SEQ ID NO: 36982 - DNA, 50 bp, synthetic construct
  source 1..50: mol_type = other DNA
ctgatcgaggtgctgcagaagctggttttcttatgattattctccgacag

SEQ ID NO: 36983 - DNA, 50 bp, synthetic construct
  source 1..50: mol_type = other DNA
cgagatttatcagtaattgacttgatatcgtattttacagagaaaaggtc

SEQ ID NO: 36984 - DNA, 50 bp, synthetic construct
  source 1..50: mol_type = other DNA
cgggcaaggacgcatacggaatgaggcaattcggtatggagttatgcgac

SEQ ID NO: 36985 - DNA, 50 bp, synthetic construct
  source 1..50: mol_type = other DNA
atcatattatctttaaaaatccaatattatcactgattaaataatatgta

SEQ ID NO: 36986 - DNA, 50 bp, synthetic construct
  source 1..50: mol_type = other DNA
ttgtcagtatcggagttttagcttgaaaaattaaaaaaagataaaatgaa

SEQ ID NO: 36987 - DNA, 50 bp, synthetic construct
  source 1..50: mol_type = other DNA
aacagcgcaaaaaagaaattgagcgcccctcatttctattttatcttgtt

SEQ ID NO: 36988 - DNA, 50 bp, synthetic construct
  source 1..50: mol_type = other DNA
aattttaactgacatacaattagaaaaaaaatttttatccatgtaatgaa

SEQ ID NO: 36989 - DNA, 50 bp, synthetic construct
  source 1..50: mol_type = other DNA
gcacctggcttgggaccagggggtcgcaggaatggcgtcctgcgtatccc

SEQ ID NO: 36990 - DNA, 50 bp, synthetic construct
  source 1..50: mol_type = other DNA
ctggtcttagaatcaagatttcctgtcggctcatctgcaaatataatttc

SEQ ID NO: 36991 - DNA, 50 bp, synthetic construct
  source 1..50: mol_type = other DNA
gaatcagtaggtctagggttcgaatcttcgtatcctgaccctgcttgctt

SEQ ID NO: 36992 - DNA, 50 bp, synthetic construct
  source 1..50: mol_type = other DNA
agcatcagcttctatgcattcaacaggctgttgttgacgaaggcactgcc

SEQ ID NO: 36993 - DNA, 50 bp, synthetic construct
  source 1..50: mol_type = other DNA
aaaaatctggcagaaaaagcttgacaagtgagttccagtgacgctttttc

SEQ ID NO: 36994 - DNA, 50 bp, synthetic construct
  source 1..50: mol_type = other DNA
gaactggcaaaagtatatctgtaatatctcagatattgttgaagttgttc

SEQ ID NO: 36995 - DNA, 50 bp, synthetic construct
  source 1..50: mol_type = other DNA
cgcatctgggtgcatggcggaaacatgattccgctatccaagcagaaaca

SEQ ID NO: 36996 - DNA, 50 bp, synthetic construct
  source 1..50: mol_type = other DNA
tgtcgaccagtatatacaacattatctaaaaaatgatatactagtgctag

SEQ ID NO: 36997 - DNA, 50 bp, synthetic construct
  source 1..50: mol_type = other DNA
gacagaaaacagaaaatgcggtacaattctgcttgttttctttttctgta

SEQ ID NO: 36998 - DNA, 50 bp, synthetic construct
  source 1..50: mol_type = other DNA
ggttaggttagactaacctaattatataataagtgcagacggtatgttgt

SEQ ID NO: 36999 - DNA, 50 bp, synthetic construct
  source 1..50: mol_type = other DNA
tttttaatattataattattaaggagtcttaatcaaattaataataaatt

SEQ ID NO: 37000 - DNA, 50 bp, synthetic construct
  source 1..50: mol_type = other DNA
atttgccaggattttggaaatgtcaatatacgtaaaaatgagtataaaaa

SEQ ID NO: 37001 - DNA, 50 bp, synthetic construct
  source 1..50: mol_type = other DNA
atgagttagaagtctatgctgaagagcttcacaatacttctctaagctgt

SEQ ID NO: 37002 - DNA, 50 bp, synthetic construct
  source 1..50: mol_type = other DNA
aaataaaaatataaagctctcattatcataaaaatactatatttttattt

SEQ ID NO: 37003 - DNA, 50 bp, synthetic construct
  source 1..50: mol_type = other DNA
aaaaagcactcagaccactaagcctgctgatagtgtaatgcttgtttttc

SEQ ID NO: 37004 - DNA, 50 bp, synthetic construct
  source 1..50: mol_type = other DNA
ctttttcttactgtcaacaggcttggaagttttggataatcacgaaacat

SEQ ID NO: 37005 - DNA, 50 bp, synthetic construct
  source 1..50: mol_type = other DNA
caatgcatgtatctaaatacctctaaagaggtatttagatacacgagcta

SEQ ID NO: 37006 - DNA, 50 bp, synthetic construct
  source 1..50: mol_type = other DNA
tagagtgatatatatgtgtgacaaaaaaataacattggtatatattattt

SEQ ID NO: 37007 - DNA, 50 bp, synthetic construct
  source 1..50: mol_type = other DNA
aaacgaagatgatattacatggaatgatgcgaagaattccgtcttcaacc

SEQ ID NO: 37008 - DNA, 50 bp, synthetic construct
  source 1..50: mol_type = other DNA
ccggcctttccgtcttgacttgagcacggacagtcctgcggaaagtccga

SEQ ID NO: 37009 - DNA, 50 bp, synthetic construct
  source 1..50: mol_type = other DNA
agcaatccatcagatcaatgaaggaacgtttgttccgcttgcgtttggct

SEQ ID NO: 37010 - DNA, 50 bp, synthetic construct
  source 1..50: mol_type = other DNA
agataaaagcggtggaggtggcaggaagaccagctccacagctttgaagc

SEQ ID NO: 37011 - DNA, 50 bp, synthetic construct
  source 1..50: mol_type = other DNA
agagggaaactttcctctctcaaatttatgagagatgggagtgtcataat

SEQ ID NO: 37012 - DNA, 50 bp, synthetic construct
  source 1..50: mol_type = other DNA
gaaatgattttctacaggataataaagatgtccaaaaagatccggaggag

SEQ ID NO: 37013 - DNA, 50 bp, synthetic construct
  source 1..50: mol_type = other DNA
gaatcaggtaagattaggggttcaaactgggtggcaatctgttctgtgcc

SEQ ID NO: 37014 - DNA, 50 bp, synthetic construct
  source 1..50: mol_type = other DNA
aattgctgtaaaatcaaatggaatcatgataacaggtgaatactacaata

SEQ ID NO: 37015 - DNA, 50 bp, synthetic construct
  source 1..50: mol_type = other DNA
atcaccgagtacagctgacgtgccgacggtgtggagctgtcttcggacag

SEQ ID NO: 37016 - DNA, 50 bp, synthetic construct
  source 1..50: mol_type = other DNA
ttcccggaagggaaggactgtcattataaccactccttaattaaatatat

SEQ ID NO: 37017 - DNA, 50 bp, synthetic construct
  source 1..50: mol_type = other DNA
ccgcataagcactatgtgaacatgacgccctttcgatacagcttccatgc

SEQ ID NO: 37018 - DNA, 50 bp, synthetic construct
  source 1..50: mol_type = other DNA
ccgcttctttgatggctcggaggccattctttcagcaaccaaaagagagg

SEQ ID NO: 37019 - DNA, 50 bp, synthetic construct
  source 1..50: mol_type = other DNA
taccacactgacgaaaggaggtttgtaaagatgtattcgtacacttttca

SEQ ID NO: 37020 - DNA, 50 bp, synthetic construct
  source 1..50: mol_type = other DNA
gccaacagtcgcttgcttatcacgttcgtgttacttaatagtaatgagta

SEQ ID NO: 37021 - DNA, 50 bp, synthetic construct
  source 1..50: mol_type = other DNA
gcaagcaaaagaaaacccacaactctccatctggaatttcaattgtggtg

SEQ ID NO: 37022 - DNA, 50 bp, synthetic construct
  source 1..50: mol_type = other DNA
ctatcagacaagaacaaagtgaaaaatttctgcctgttcaaggctgatat

SEQ ID NO: 37023 - DNA, 50 bp, synthetic construct
  source 1..50: mol_type = other DNA
tctgactgaaatgccccatttctctggcgaaagtgccaatttccgctttg

SEQ ID NO: 37024 - DNA, 50 bp, synthetic construct
  source 1..50: mol_type = other DNA
tttttaattcggattttttctatatatatccaacaaatcgctataaaacg

SEQ ID NO: 37025 - DNA, 50 bp, synthetic construct
  source 1..50: mol_type = other DNA
ttgaaaataaagaggataaatatatttatataaaagttcaattatttcat

SEQ ID NO: 37026 - DNA, 50 bp, synthetic construct
  source 1..50: mol_type = other DNA
ttttttgcattttaccagtttggtcaattaaacatcagcaatcaaaggag

SEQ ID NO: 37027 - DNA, 50 bp, synthetic construct
  source 1..50: mol_type = other DNA
aaaatgaagacttgcctgagactgccggtactcataagtatcttcaccag

SEQ ID NO: 37028 - DNA, 50 bp, synthetic construct
  source 1..50: mol_type = other DNA
aatatatggaagaacttgaagaagatcttttttgatttctccccaccctt

SEQ ID NO: 37029 - DNA, 50 bp, synthetic construct
  source 1..50: mol_type = other DNA
ctatccccttataaaacttagatttttatatacgtgctacattgccatac

SEQ ID NO: 37030 - DNA, 50 bp, synthetic construct
  source 1..50: mol_type = other DNA
agatgaaaagggaagagcctcactgcgcagaatctaaggtcttttcataa

SEQ ID NO: 37031 - DNA, 50 bp, synthetic construct
  source 1..50: mol_type = other DNA
aaattaagatagcacattatataaacaaatttattctgctataatatttt

SEQ ID NO: 37032 - DNA, 50 bp, synthetic construct
  source 1..50: mol_type = other DNA
agtgaaaaataaaagcgtcagggctttctcaaggtcttttttttatgtaa

SEQ ID NO: 37033 - DNA, 50 bp, synthetic construct
  source 1..50: mol_type = other DNA
cgaccatcttaatcatgttactatttattggaatttctaaaagatggaga

SEQ ID NO: 37034 - DNA, 50 bp, synthetic construct
  source 1..50: mol_type = other DNA
cccccccccccccgatttccgccgcgctgatgaaacaccttgagccgtac

SEQ ID NO: 37035 - DNA, 50 bp, synthetic construct
  source 1..50: mol_type = other DNA
gtccgcgcagcatacagctgatctgcatattatccacttgccctactaac

SEQ ID NO: 37036 - DNA, 50 bp, synthetic construct
  source 1..50: mol_type = other DNA
tataataaaatttatatgcaataattttttttgcataaaaactgattata

SEQ ID NO: 37037 - DNA, 50 bp, synthetic construct
  source 1..50: mol_type = other DNA
caatgcttcgatttgaacgccgatacattcacttaaaaattcatcttttg

SEQ ID NO: 37038 - DNA, 50 bp, synthetic construct
  source 1..50: mol_type = other DNA
ccacattcacctatagcgttattatataataattattatatcttatataa

SEQ ID NO: 37039 - DNA, 50 bp, synthetic construct
  source 1..50: mol_type = other DNA
tgctgtcttaagggcaagtcctgaaaacaggcacatatattacgaaatca

SEQ ID NO: 37040 - DNA, 50 bp, synthetic construct
  source 1..50: mol_type = other DNA
cccgcaagttttgttaaactcctatcaagcgcgctaccaaaactgcgcta

SEQ ID NO: 37041 - DNA, 50 bp, synthetic construct
  source 1..50: mol_type = other DNA
aattttaaatattaaaaatactcatagtgatttctttactatttaaaatt

SEQ ID NO: 37042 - DNA, 50 bp, synthetic construct
  source 1..50: mol_type = other DNA
cgacagcaaataaaggaggattataattctttgtactttatataaatcat

SEQ ID NO: 37043 - DNA, 50 bp, synthetic construct
  source 1..50: mol_type = other DNA
cagaataactcaccacatataaaaatgttttaagagtgtgagtttttccg

SEQ ID NO: 37044 - DNA, 50 bp, synthetic construct
  source 1..50: mol_type = other DNA
caatggatgctgggagatgttctgaacaagaaatcggggatatgtcaagg

SEQ ID NO: 37045 - DNA, 50 bp, synthetic construct
  source 1..50: mol_type = other DNA
aattataggaggtggcttatgattacctacataatgcagttcctatgata

SEQ ID NO: 37046 - DNA, 50 bp, synthetic construct
  source 1..50: mol_type = other DNA
caaaaaccggtttccgcataatttttctcttagcaaccgtgtatcagata

SEQ ID NO: 37047 - DNA, 50 bp, synthetic construct
  source 1..50: mol_type = other DNA
acgaagcatcacactgccgtcttgattaaatcgtcaatatcttccttacc

SEQ ID NO: 37048 - DNA, 50 bp, synthetic construct
  source 1..50: mol_type = other DNA
aaatggtataatattaataaggatttatttctaatactggaaagccgttt

SEQ ID NO: 37049 - DNA, 50 bp, synthetic construct
  source 1..50: mol_type = other DNA
tatctacatacctgcggactatcatcgaatcttccaggagtattcagaag

SEQ ID NO: 37050 - DNA, 50 bp, synthetic construct
  source 1..50: mol_type = other DNA
ggtatgatgctaactgaatttagaagaataaagtccccagacaccatgtg

SEQ ID NO: 37051 - DNA, 50 bp, synthetic construct
  source 1..50: mol_type = other DNA
gataaatccgcaagggtttattttttaagcaatgcctcccaggatttaca

SEQ ID NO: 37052 - DNA, 50 bp, synthetic construct
  source 1..50: mol_type = other DNA
aagaattaggaccacacctttggatatccaagggttaggagctaatgaat

SEQ ID NO: 37053 - DNA, 50 bp, synthetic construct
  source 1..50: mol_type = other DNA
ttatcagtataatgtggtttgccaaaaggtgtgacgcagccatttttcca

SEQ ID NO: 37054 - DNA, 50 bp, synthetic construct
  source 1..50: mol_type = other DNA
tgattttaaatatggacgaatcaattttcacattttcatacaacatgttg

SEQ ID NO: 37055 - DNA, 50 bp, synthetic construct
  source 1..50: mol_type = other DNA
aggaaacaaaacaaacataagtttttcaaggcttttttcttttgtcctta

SEQ ID NO: 37056 - DNA, 50 bp, synthetic construct
  source 1..50: mol_type = other DNA
taatcaagcggttgggaagtctcttaagagccgattgaacttcttgtttg

SEQ ID NO: 37057 - DNA, 50 bp, synthetic construct
  source 1..50: mol_type = other DNA
gccgtgggtaaatgcaattaccacttgtggaacagatatttacagactat

SEQ ID NO: 37058 - DNA, 50 bp, synthetic construct
  source 1..50: mol_type = other DNA
ttgcatgcatctggttgcatggcggaattccactgtataaatggatggta

SEQ ID NO: 37059 - DNA, 50 bp, synthetic construct
  source 1..50: mol_type = other DNA
aataaaaatcccgctctttatattttatcataaagaaatttatttcacta

SEQ ID NO: 37060 - DNA, 50 bp, synthetic construct
  source 1..50: mol_type = other DNA
ttctaagaattttgagaataaaaaatttttgaaaaaatttatttgacaat

SEQ ID NO: 37061 - DNA, 50 bp, synthetic construct
  source 1..50: mol_type = other DNA
taatttacctttttattatagcacggcatccgtgcagaaaaggcgtgttg

SEQ ID NO: 37062 - DNA, 50 bp, synthetic construct
  source 1..50: mol_type = other DNA
agaaaacattagagaggagcaatcatgattgcaggtctgtttcttttggg

SEQ ID NO: 37063 - DNA, 50 bp, synthetic construct
  source 1..50: mol_type = other DNA
ggagaggtaattctcatagagctttctaccttgccgagaatgacctcaat

SEQ ID NO: 37064 - DNA, 50 bp, synthetic construct
  source 1..50: mol_type = other DNA
atgcatcttcccatgtttaatcttatggttctgctcaatagaagctgcaa

SEQ ID NO: 37065 - DNA, 50 bp, synthetic construct
  source 1..50: mol_type = other DNA
aaagcgcaagatgtaataaactattgatcatttgtcaagcattttccctt

SEQ ID NO: 37066 - DNA, 50 bp, synthetic construct
  source 1..50: mol_type = other DNA
cttccttgcaagtcagagagtggatgaatatgcagggacttatgcggatg

SEQ ID NO: 37067 - DNA, 50 bp, synthetic construct
  source 1..50: mol_type = other DNA
aattttcccagcatacacaggattactttctgctgttcagcggcaagcga

SEQ ID NO: 37068 - DNA, 50 bp, synthetic construct
  source 1..50: mol_type = other DNA
cctaaattcttatttggatcatcatatgaatatcaatattaggaatttta

SEQ ID NO: 37069 - DNA, 50 bp, synthetic construct
  source 1..50: mol_type = other DNA
tcaaagaaagtcctgccaagtatcctcataccttcttggtctttagagga

SEQ ID NO: 37070 - DNA, 50 bp, synthetic construct
  source 1..50: mol_type = other DNA
ctatactggctatgctgccggattgccatccgcgaacagcgccaataaaa

SEQ ID NO: 37071 - DNA, 50 bp, synthetic construct
  source 1..50: mol_type = other DNA
gtaatatataagttatactcctgtgtgctgggacttagaaacacacttgg

SEQ ID NO: 37072 - DNA, 50 bp, synthetic construct
  source 1..50: mol_type = other DNA
tttactttgtacgcctgccaaaaacgttttaagtccgcgggtattgaaat

SEQ ID NO: 37073 - DNA, 50 bp, synthetic construct
  source 1..50: mol_type = other DNA
cccgaacgccacaaagataaaaatatctttctatcagtcaaaaattcaag

SEQ ID NO: 37074 - DNA, 50 bp, synthetic construct
  source 1..50: mol_type = other DNA
gtgaagttctctacctatgcggttcccatgatcatcggggagatccgcag

SEQ ID NO: 37075 - DNA, 50 bp, synthetic construct
  source 1..50: mol_type = other DNA
cgaaatctccgcattatgatataatattttctgacgggcggcttctttca

SEQ ID NO: 37076 - DNA, 50 bp, synthetic construct
  source 1..50: mol_type = other DNA
cgccttttctgcacggatgcctttggggaggcaaggatgcaggtgacggc

SEQ ID NO: 37077 - DNA, 50 bp, synthetic construct
  source 1..50: mol_type = other DNA
taatagctttcttaatttaatcaccggtacatagtcaaaggtttcctttg

SEQ ID NO: 37078 - DNA, 50 bp, synthetic construct
  source 1..50: mol_type = other DNA
acacagcacatattgagacggtagtctaaatgtcacaattgtcaagttgt

SEQ ID NO: 37079 - DNA, 50 bp, synthetic construct
  source 1..50: mol_type = other DNA
tattccttatgcccggagacaccttaagaataaccctgtcataaccagaa

SEQ ID NO: 37080 - DNA, 50 bp, synthetic construct
  source 1..50: mol_type = other DNA
tttgtggttccgattttatttgatatacagccgctaatcggattattaaa

SEQ ID NO: 37081 - DNA, 50 bp, synthetic construct
  source 1..50: mol_type = other DNA
aatttttcctcacacctgttattcccggaaaagggcgctcagtaaagttt

SEQ ID NO: 37082 - DNA, 50 bp, synthetic construct
  source 1..50: mol_type = other DNA
gattcagatatggcaattgatcatacaacatcaatgttctaattcttccg

SEQ ID NO: 37083 - DNA, 50 bp, synthetic construct
  source 1..50: mol_type = other DNA
agcggcagtagttccacttccgaggaactgaaagggaaacagcggcaatg

SEQ ID NO: 37084 - DNA, 50 bp, synthetic construct
  source 1..50: mol_type = other DNA
ttatgccttaaatgacttgataactacgactgtttccattcagggtaaaa

SEQ ID NO: 37085 - DNA, 50 bp, synthetic construct
  source 1..50: mol_type = other DNA
tttccagaaaacatcggcatccggcaaaaatgcagggtgttttctgtctg

SEQ ID NO: 37086 - DNA, 50 bp, synthetic construct
  source 1..50: mol_type = other DNA
atagtggaaattttgaaatttcctttctcatcattcttcctttcctctat

SEQ ID NO: 37087 - DNA, 50 bp, synthetic construct
  source 1..50: mol_type = other DNA
taatatatttttaataagtattttattcagaccataataaagataattat

SEQ ID NO: 37088 - DNA, 50 bp, synthetic construct
  source 1..50: mol_type = other DNA
aaaccatttggttgataaattcaatcttgaacgattcaaaaggcaggttg

SEQ ID NO: 37089 - DNA, 50 bp, synthetic construct
  source 1..50: mol_type = other DNA
gacttgccttcaaagtagtatctgtacacttactacatttcagataagtt

SEQ ID NO: 37090 - DNA, 50 bp, synthetic construct
  source 1..50: mol_type = other DNA
agagagtttccatcggtcgtgccattttgtgataaagatggaaacgaact

SEQ ID NO: 37091 - DNA, 50 bp, synthetic construct
  source 1..50: mol_type = other DNA
aatactccggcttatctttattatgcatcgcacagattatcatatatatc

SEQ ID NO: 37092 - DNA, 50 bp, synthetic construct
  source 1..50: mol_type = other DNA
atttcatggctaatattctgatttttctactataatctctttcattctat

SEQ ID NO: 37093 - DNA, 50 bp, synthetic construct
  source 1..50: mol_type = other DNA
gacagggagcaggaactgtactgcatgtcggacggttcttcttccatgtc

SEQ ID NO: 37094 - DNA, 50 bp, synthetic construct
  source 1..50: mol_type = other DNA
cattgctttaacgtgatatgaaattcttacaaaaacaccttgcagcaatg

SEQ ID NO: 37095 - DNA, 50 bp, synthetic construct
  source 1..50: mol_type = other DNA
ttgctattattggcgttcagagtgatatatttcgggcgtggtaaggtcaa

SEQ ID NO: 37096 - DNA, 50 bp, synthetic construct
  source 1..50: mol_type = other DNA
gggacaagggttcctgacaccgttataacggtaactggaattccatccca

SEQ ID NO: 37097 - DNA, 50 bp, synthetic construct
  source 1..50: mol_type = other DNA
ggttttattgccggaatgatgcttccaagcagcaaaggatggataaaaat

SEQ ID NO: 37098 - DNA, 50 bp, synthetic construct
  source 1..50: mol_type = other DNA
ttttgaaagaaccgttcgccgtttaaaaagtgcgaaaaatccgcccaaaa

SEQ ID NO: 37099 - DNA, 50 bp, synthetic construct
  source 1..50: mol_type = other DNA
cggcatgacgggaaattaaaggaaatcatcttagaattaccagcaacctc

SEQ ID NO: 37100 - DNA, 50 bp, synthetic construct
  source 1..50: mol_type = other DNA
aacagaatcattcagagcaacgagacccccggaaaaatcctgctatgacc

SEQ ID NO: 37101 - DNA, 50 bp, synthetic construct
  source 1..50: mol_type = other DNA
caaacctgatgtgagtcagggacgcaagtttttgggcgtttttctttttg

SEQ ID NO: 37102 - DNA, 50 bp, synthetic construct
  source 1..50: mol_type = other DNA
tcaacttctacgctttcaacagcaacggcaaaggaagaacaggaaaactc

SEQ ID NO: 37103 - DNA, 50 bp, synthetic construct
  source 1..50: mol_type = other DNA
gccgccgctggaagaaagacgaaggactcatcttgcagggatgcggcggt

SEQ ID NO: 37104 - DNA, 50 bp, synthetic construct
  source 1..50: mol_type = other DNA
tttgaaaaccataagtattgatatcgaaaaaaccaagtgtgactatgaaa

SEQ ID NO: 37105 - DNA, 50 bp, synthetic construct
  source 1..50: mol_type = other DNA
catgcgtcggcatcagcgcagacagcttagaaggctgttgctctatccag

SEQ ID NO: 37106 - DNA, 50 bp, synthetic construct
  source 1..50: mol_type = other DNA
aagataaactgttagccctgcttgcgcaaaaccgggggctttgtacattc

SEQ ID NO: 37107 - DNA, 50 bp, synthetic construct
  source 1..50: mol_type = other DNA
cctcacatatacaaaaaaacgccagctggatcgtaccgccttcgtcgagg

SEQ ID NO: 37108 - DNA, 50 bp, synthetic construct
  source 1..50: mol_type = other DNA
acaaccgtcaactattttgtaccctataaatcataatagtatctggcatt

SEQ ID NO: 37109 - DNA, 50 bp, synthetic construct
  source 1..50: mol_type = other DNA
ttttaacatttcctgctcggcatcctcaaatggatcaggaaatgttatat

SEQ ID NO: 37110 - DNA, 50 bp, synthetic construct
  source 1..50: mol_type = other DNA
tttaatttcacaagatcctgttccagtatcattcctcctgtgtaaatgta

SEQ ID NO: 37111 - DNA, 50 bp, synthetic construct
  source 1..50: mol_type = other DNA
cgaaaagctcaaaaccggcattgaggtcattgatcagtatgatgctgacg

SEQ ID NO: 37112 - DNA, 50 bp, synthetic construct
  source 1..50: mol_type = other DNA
atctcttcggcggcaaggacgaaagctttactcctttctgcgggaatgcc

SEQ ID NO: 37113 - DNA, 50 bp, synthetic construct
  source 1..50: mol_type = other DNA
gcggcggatcgctgtcgagcttggtgcgaactatgagagcgatgcgtagc

SEQ ID NO: 37114 - DNA, 50 bp, synthetic construct
  source 1..50: mol_type = other DNA
tactggagctgcaaaagattccacagccgcaatattttccagagcaatcc

SEQ ID NO: 37115 - DNA, 50 bp, synthetic construct
  source 1..50: mol_type = other DNA
cgcataccgtgtcaatcagttccagtaaatcatgaccgactctatatgct

SEQ ID NO: 37116 - DNA, 50 bp, synthetic construct
  source 1..50: mol_type = other DNA
tttcaataattgttccaccaatgacaatattggagaataaagtgccgatt

SEQ ID NO: 37117 - DNA, 50 bp, synthetic construct
  source 1..50: mol_type = other DNA
gagtctttggttcggtgtcttcgtatcggaagccagctgacccaggacta

SEQ ID NO: 37118 - DNA, 50 bp, synthetic construct
  source 1..50: mol_type = other DNA
attaaatgtaatgtaggaggaatgtgaatttctccttgacaacttcgacg

SEQ ID NO: 37119 - DNA, 50 bp, synthetic construct
  source 1..50: mol_type = other DNA
taatcaaagctcacagtaaataacatattttttgcctccttttttttcta

SEQ ID NO: 37120 - DNA, 50 bp, synthetic construct
  source 1..50: mol_type = other DNA
tttgcgattcaaggcgcagttgttccgacctctgatataataaatacaaa

SEQ ID NO: 37121 - DNA, 50 bp, synthetic construct
  source 1..50: mol_type = other DNA
gttattaagaaaaatatttgaaaaaattttcaaattaattttacaaaatt

SEQ ID NO: 37122 - DNA, 50 bp, synthetic construct
  source 1..50: mol_type = other DNA
gttgttaatttattatatatttttttaatatataataataaggtaaccac

SEQ ID NO: 37123 - DNA, 50 bp, synthetic construct
  source 1..50: mol_type = other DNA
cccttgcaaatacaagaaaaaccccgttgttgttctttaatttataagtt

SEQ ID NO: 37124 - DNA, 50 bp, synthetic construct
  source 1..50: mol_type = other DNA
ctgacgacgctatgattgcggaggcggaaaacggcggatagcggcggatc

SEQ ID NO: 37125 - DNA, 50 bp, synthetic construct
  source 1..50: mol_type = other DNA
agccctcccagaacaacggttttgggtcgtaaatatgctctggaatccag

SEQ ID NO: 37126 - DNA, 50 bp, synthetic construct
  source 1..50: mol_type = other DNA
ggcccaccaggataggaagggggtgttcctccttccatttgtggtagtct

SEQ ID NO: 37127 - DNA, 50 bp, synthetic construct
  source 1..50: mol_type = other DNA
cgagcaggagatgcttcgccgctatcagcccgcaggtcttcgactgggtg

SEQ ID NO: 37128 - DNA, 50 bp, synthetic construct
  source 1..50: mol_type = other DNA
aaaatgaaattaaaacaggaatcctactcataatgtttttcctccataaa

SEQ ID NO: 37129 - DNA, 50 bp, synthetic construct
  source 1..50: mol_type = other DNA
tatcgctgagtgagcggattagatgtctatacatcactctaaagcgtcta

SEQ ID NO: 37130 - DNA, 50 bp, synthetic construct
  source 1..50: mol_type = other DNA
ctgcggactttccgggttcgctctatctagcaccgcgcccaagaacccaa

SEQ ID NO: 37131 - DNA, 50 bp, synthetic construct
  source 1..50: mol_type = other DNA
gcatttgttttcttacattcattaacaggtgatatggtaaaataaaatag

SEQ ID NO: 37132 - DNA, 50 bp, synthetic construct
  source 1..50: mol_type = other DNA
cggagccggaatgggcatggtctctgacgcacctttccaaggtggctgta

SEQ ID NO: 37133 - DNA, 50 bp, synthetic construct
  source 1..50: mol_type = other DNA
cggttctgaaatcgttaaacggtggacactttgatctgcggaggcatcgg

SEQ ID NO: 37134 - DNA, 50 bp, synthetic construct
  source 1..50: mol_type = other DNA
tgagaaaagattcatttatgaacttaatggtatccggaacccttgtccca

SEQ ID NO: 37135 - DNA, 50 bp, synthetic construct
  source 1..50: mol_type = other DNA
agaacagatgaatgaaaagctgaatatctatcatttccatcatcaatgcg

SEQ ID NO: 37136 - DNA, 50 bp, synthetic construct
  source 1..50: mol_type = other DNA
ctgacgacgtcgtataatattgtcatgaagaaattactgagcgcactccc

SEQ ID NO: 37137 - DNA, 50 bp, synthetic construct
  source 1..50: mol_type = other DNA
gtatcggggaagacagatcgggtatcatcgtgggcggtcttccgcgatat

SEQ ID NO: 37138 - DNA, 50 bp, synthetic construct
  source 1..50: mol_type = other DNA
tttcacaaaaaagtattgacaaaataatcagtcaacagtgtttactgcct

SEQ ID NO: 37139 - DNA, 50 bp, synthetic construct
  source 1..50: mol_type = other DNA
gctttttgactggcggctgctttcatgaagcagagcaagagtaaaaaaga

SEQ ID NO: 37140 - DNA, 50 bp, synthetic construct
  source 1..50: mol_type = other DNA
aattcacctatgacgatatcatttacaaaaagtatatgaatagattgtgc

SEQ ID NO: 37141 - DNA, 50 bp, synthetic construct
  source 1..50: mol_type = other DNA
gtgggctaggattttgcaattgtggacctgtacgcaaaatgcagagaagg

SEQ ID NO: 37142 - DNA, 50 bp, synthetic construct
  source 1..50: mol_type = other DNA
ttggacttaataaaattaagtgggtttctttgtattaagcgtatgcttag

SEQ ID NO: 37143 - DNA, 50 bp, synthetic construct
  source 1..50: mol_type = other DNA
agtattattcataaaaataaatatttcagtaaaactagatgaataaaaaa

SEQ ID NO: 37144 - DNA, 50 bp, synthetic construct
  source 1..50: mol_type = other DNA
aaaataaaaaaagatttgacagacgactctgtttgtacttttaatagtga

SEQ ID NO: 37145 - DNA, 50 bp, synthetic construct
  source 1..50: mol_type = other DNA
tttattattctatcctttctaacaggtgttgaaaagcgtgatataataaa

SEQ ID NO: 37146 - DNA, 50 bp, synthetic construct
  source 1..50: mol_type = other DNA
ccagcggttatttggctaacaatcgcgtctgccagttccgccaccgcggc

SEQ ID NO: 37147 - DNA, 50 bp, synthetic construct
  source 1..50: mol_type = other DNA
tttccgccgcgtagagagcttctggagagaagcggcggttacgaaagaaa

SEQ ID NO: 37148 - DNA, 50 bp, synthetic construct
  source 1..50: mol_type = other DNA
gccgtcacctgcatccttgcctccccaaaggcatccgtgcagaaaaggcg

SEQ ID NO: 37149 - DNA, 50 bp, synthetic construct
  source 1..50: mol_type = other DNA
tgaaagaagccgcccgtcagaaaatattatatcataatgcggagatttcg

SEQ ID NO: 37150 - DNA, 50 bp, synthetic construct
  source 1..50: mol_type = other DNA
aagtttttattaaagagtacagatttagaagtactctttgataaaaataa

SEQ ID NO: 37151 - DNA, 50 bp, synthetic construct
  source 1..50: mol_type = other DNA
agtcataccatatcccggcttttacataaaaggcgggatatttttttgta

SEQ ID NO: 37152 - DNA, 50 bp, synthetic construct
  source 1..50: mol_type = other DNA
aattgacagaaatcggatttttggtaacaaactgttccacggctgcaatt

SEQ ID NO: 37153 - DNA, 50 bp, synthetic construct
  source 1..50: mol_type = other DNA
ttatcagatacgcccatattatcaaccttgaaaaagggcgtaaaaaataa

SEQ ID NO: 37154 - DNA, 50 bp, synthetic construct
  source 1..50: mol_type = other DNA
caataacagaaagcaatgacgttgcataattaatggctttttctatattc

SEQ ID NO: 37155 - DNA, 50 bp, synthetic construct
  source 1..50: mol_type = other DNA
ttttttcaatccttctttgattttcgaatatccgtaaataatgtagacaa

SEQ ID NO: 37156 - DNA, 50 bp, synthetic construct
  source 1..50: mol_type = other DNA
tagccttcagaatgctgatcaggaattataccccagaaaaagatgcgctg

SEQ ID NO: 37157 - DNA, 50 bp, synthetic construct
  source 1..50: mol_type = other DNA
attgtttttattattatacatcgtaagcctcaaccagaatgaaaaagcat

SEQ ID NO: 37158 - DNA, 50 bp, synthetic construct
  source 1..50: mol_type = other DNA
tgttggttgtatttttatacccattttccggtataacggtacttgataag

SEQ ID NO: 37159 - DNA, 50 bp, synthetic construct
  source 1..50: mol_type = other DNA
ccggtacgagttccagcaagggtcaggaaagctgctgccgcagaaaacgg

SEQ ID NO: 37160 - DNA, 50 bp, synthetic construct
  source 1..50: mol_type = other DNA
tttccatatgagccagttcttccgccgatgggatatgtgtcaaatgcaaa

SEQ ID NO: 37161 - DNA, 50 bp, synthetic construct
  source 1..50: mol_type = other DNA
actatctcacgtaacttaatcgactcactaattatgttacaatagatagc

SEQ ID NO: 37162 - DNA, 50 bp, synthetic construct
  source 1..50: mol_type = other DNA
gataatggatcaggactgaatgtgatagcgagctgtccatcaaccatatc

SEQ ID NO: 37163 - DNA, 50 bp, synthetic construct
  source 1..50: mol_type = other DNA
gtcccaacagatgtatttcatgatgtggcaggatatgcacgtgtttcaac

SEQ ID NO: 37164 - DNA, 50 bp, synthetic construct
  source 1..50: mol_type = other DNA
aaaaacggaaaactgtgctataataaatcttacatattatttcatggaaa

SEQ ID NO: 37165 - DNA, 50 bp, synthetic construct
  source 1..50: mol_type = other DNA
tattgcgataatagacttcccagaacaactcgccgtctgtaatgtcacac

SEQ ID NO: 37166 - DNA, 50 bp, synthetic construct
  source 1..50: mol_type = other DNA
ttttgactccatattattataatatatgaaaaatgggtataaaaataaca

SEQ ID NO: 37167 - DNA, 50 bp, synthetic construct
  source 1..50: mol_type = other DNA
cactgaaaatttacaggcaaagaaaagcctttgttaaatcattacttgtt

SEQ ID NO: 37168 - DNA, 50 bp, synthetic construct
  source 1..50: mol_type = other DNA
ttaatccaagtcctgcaatgtagccggctacaaatgcatcagcacttaaa

SEQ ID NO: 37169 - DNA, 50 bp, synthetic construct
  source 1..50: mol_type = other DNA
aagataaaattataaaagaatataaaaatcttattttggatttttatagt

SEQ ID NO: 37170 - DNA, 50 bp, synthetic construct
  source 1..50: mol_type = other DNA
agctggatagagcaacagccttctaaggaacaatcccgctcgatcgtgaa

SEQ ID NO: 37171 - DNA, 50 bp, synthetic construct
  source 1..50: mol_type = other DNA
catcagtgtcctgaaaggagggcgtattatctgatgaattttcataattt

SEQ ID NO: 37172 - DNA, 50 bp, synthetic construct
  source 1..50: mol_type = other DNA
gaaccgccagcgggcgcgtgaattggatcatacgaccgtggaaaaggtca

SEQ ID NO: 37173 - DNA, 50 bp, synthetic construct
  source 1..50: mol_type = other DNA
aactacaaagaaggtcgcctttactcattataatttttcgctttcggatt

SEQ ID NO: 37174 - DNA, 50 bp, synthetic construct
  source 1..50: mol_type = other DNA
tcgtcagattgatacaattttccttgcagaaatttgttacaatgctctgg

SEQ ID NO: 37175 - DNA, 50 bp, synthetic construct
  source 1..50: mol_type = other DNA
cccggtggtatttttatgcccggaaggaacggcactcggctacggtcggg

SEQ ID NO: 37176 - DNA, 50 bp, synthetic construct
  source 1..50: mol_type = other DNA
ctttgtcttaaaaatctcctttactgtacaagaagaatataagaacaaac

SEQ ID NO: 37177 - DNA, 50 bp, synthetic construct
  source 1..50: mol_type = other DNA
tcgcccgctcgatgacctcatcgggaagcaggcggacatacagggggcag

SEQ ID NO: 37178 - DNA, 50 bp, synthetic construct
  source 1..50: mol_type = other DNA
ggctctaaacaaatatgctgctcaggggaggcagctttttgtttagttgt

SEQ ID NO: 37179 - DNA, 50 bp, synthetic construct
  source 1..50: mol_type = other DNA
aacggcagtaaaccgaaaaacattttgatgttttcgcttctactctcgtt

SEQ ID NO: 37180 - DNA, 50 bp, synthetic construct
  source 1..50: mol_type = other DNA
aagccatactgaagaaaagccaaaatttttcttagcgtcttcgatggctt

SEQ ID NO: 37181 - DNA, 50 bp, synthetic construct
  source 1..50: mol_type = other DNA
tatgactatctacactaagaatgagttcattagtagtgaaataagtaaat

SEQ ID NO: 37182 - DNA, 50 bp, synthetic construct
  source 1..50: mol_type = other DNA
aaggaaatatttctgtcggtacaatttccaaccggcagaaaatttaaagt

SEQ ID NO: 37183 - DNA, 50 bp, synthetic construct
  source 1..50: mol_type = other DNA
gcaccgcgcaggaaacggaagaaaaagactttcccgttccagcgcgtccc

SEQ ID NO: 37184 - DNA, 50 bp, synthetic construct
  source 1..50: mol_type = other DNA
cgatggttcggtctgcctcgtggggagcgccgaggactaccacgagctcg

SEQ ID NO: 37185 - DNA, 50 bp, synthetic construct
  source 1..50: mol_type = other DNA
aaaaccatattacgatgaacagggccccctgtccgcatcaagcgggttta

SEQ ID NO: 37186 - DNA, 50 bp, synthetic construct
  source 1..50: mol_type = other DNA
agaacattttgattaataattttattaaaaagtattaagaatgaaaatcc

SEQ ID NO: 37187 - DNA, 50 bp, synthetic construct
  source 1..50: mol_type = other DNA
aaacgcccgtcgttgtctttctctcgaccgacaaacattgacggcttgcg

SEQ ID NO: 37188 - DNA, 50 bp, synthetic construct
  source 1..50: mol_type = other DNA
accaccactacaacgaccactactccagttgacgacgaaaacgtcgtggt

SEQ ID NO: 37189 - DNA, 50 bp, synthetic construct
  source 1..50: mol_type = other DNA
atgtcgcgacgatcgattgagagcatgagcccaatgtcgagtctgtcaaa

SEQ ID NO: 37190 - DNA, 50 bp, synthetic construct
  source 1..50: mol_type = other DNA
atcaaggtgtctcagcctttaagggtcattaaacgcgtattcaggctgac

SEQ ID NO: 37191 - DNA, 50 bp, synthetic construct
  source 1..50: mol_type = other DNA
aaagagcttactagttttcttgctctaataattaaaaatgcccgctgttt

SEQ ID NO: 37192 - DNA, 50 bp, synthetic construct
  source 1..50: mol_type = other DNA
gcaaagagcagcaatataaaaaataaattatttcttttgctggcgaacgt

SEQ ID NO: 37193 - DNA, 50 bp, synthetic construct
  source 1..50: mol_type = other DNA
ttgtcaaaatcatcggaagccattaaaaaatacattaagacttttttcaa

SEQ ID NO: 37194 - DNA, 50 bp, synthetic construct
  source 1..50: mol_type = other DNA
gggcaattaagcaaccatttctggtaccggaaagacgcgctctccagcca

SEQ ID NO: 37195 - DNA, 50 bp, synthetic construct
  source 1..50: mol_type = other DNA
tcttaaacttgaccaaatgtaaatatggaagatgaaagtggatttactga

SEQ ID NO: 37196 - DNA, 50 bp, synthetic construct
  source 1..50: mol_type = other DNA
accgtgaagaagaagaagaaggccaagccctgctaccactcctcttgcct

SEQ ID NO: 37197 - DNA, 50 bp, synthetic construct
  source 1..50: mol_type = other DNA
tcgcgccgatccatccaaaggcgatgtcgacgtgatcgggatcggcttcg

SEQ ID NO: 37198 - DNA, 50 bp, synthetic construct
  source 1..50: mol_type = other DNA
aagtatctatttgcaaaaagttcccaacaactttttatgaaattagtctt

SEQ ID NO: 37199 - DNA, 50 bp, synthetic construct
  source 1..50: mol_type = other DNA
gcgcgtgccatcgtttcaatatgtccacgtagcgaaaatatggcagccgc

SEQ ID NO: 37200 - DNA, 50 bp, synthetic construct
  source 1..50: mol_type = other DNA
tgatgatctgctctgaatcgacgagctcgtcatcatgccctgcatcatcg

SEQ ID NO: 37201 - DNA, 50 bp, synthetic construct
  source 1..50: mol_type = other DNA
tgccaccatcaagaagaatatacttacgtatctaggtattttttttactc

SEQ ID NO: 37202 - DNA, 50 bp, synthetic construct
  source 1..50: mol_type = other DNA
ccagcccagcgcgagaaacagcagtactgggtgatcagaaatttggccat

SEQ ID NO: 37203 - DNA, 50 bp, synthetic construct
  source 1..50: mol_type = other DNA
acacagagcaactatgttaccaattcactaatcacggatattctgattgg

SEQ ID NO: 37204 - DNA, 50 bp, synthetic construct
  source 1..50: mol_type = other DNA
tttcattatgaagatagtggtattgaaggcaatctatcttcttgatgtta

SEQ ID NO: 37205 - DNA, 50 bp, synthetic construct
  source 1..50: mol_type = other DNA
cccgctccctggcgcgagccgtgcgggatcgctgatcaccctggagcagg

SEQ ID NO: 37206 - DNA, 50 bp, synthetic construct
  source 1..50: mol_type = other DNA
ggacatgcgctcagccttcgagcgcggccggtatcggcgaggccatgtcc

SEQ ID NO: 37207 - DNA, 50 bp, synthetic construct
  source 1..50: mol_type = other DNA
caacgcgcagacagggcaacgcgaaacccccatgccctgaaatcgcgtat

SEQ ID NO: 37208 - DNA, 50 bp, synthetic construct
  source 1..50: mol_type = other DNA
gatcgcggcgattgtcagcttgggtggccgcgccgctgtgcttccagcga

SEQ ID NO: 37209 - DNA, 50 bp, synthetic construct
  source 1..50: mol_type = other DNA
caccaaaacctaacgaggattcgaagtccaactctttttatatttttttg

SEQ ID NO: 37210 - DNA, 50 bp, synthetic construct
  source 1..50: mol_type = other DNA
agtttttttatcagacagaacagtttgatgtgctgtaagtagctaatcaa

SEQ ID NO: 37211 - DNA, 50 bp, synthetic construct
  source 1..50: mol_type = other DNA
caaaaacaagttttctactttgctcacgcattatagcaaactttaaaaag

SEQ ID NO: 37212 - DNA, 50 bp, synthetic construct
  source 1..50: mol_type = other DNA
gtaaggcccggatgatcctgaaggctatcccatgccaacccgtcccttac

SEQ ID NO: 37213 - DNA, 50 bp, synthetic construct
  source 1..50: mol_type = other DNA
gagtgacagagtaatccggaaaatcgattttattcgttttttcatcatag

SEQ ID NO: 37214 - DNA, 50 bp, synthetic construct
  source 1..50: mol_type = other DNA
ccatgaggtagagcgactcgccgtcgcgaacgcttcgtttgacctcatgg

SEQ ID NO: 37215 - DNA, 50 bp, synthetic construct
  source 1..50: mol_type = other DNA
tccatctggttagtatttgttagtgcactaaactatatcatccatctggc

SEQ ID NO: 37216 - DNA, 50 bp, synthetic construct
  source 1..50: mol_type = other DNA
gcgcgatatgctggaggatctcggcgccgacggatttgagatgatcgcct

SEQ ID NO: 37217 - DNA, 50 bp, synthetic construct
  source 1..50: mol_type = other DNA
ttttttttgataatttgagggtcaaatccgctccaaataatagtaaaaaa

SEQ ID NO: 37218 - DNA, 50 bp, synthetic construct
  source 1..50: mol_type = other DNA
taggtcgccgtttggaagcgccgtgctgcggatggccaaacgcatggaaa

SEQ ID NO: 37219 - DNA, 50 bp, synthetic construct
  source 1..50: mol_type = other DNA
gaccaagccgctcgcctattcctacgtggcaattttcgggcggaacaatc

SEQ ID NO: 37220 - DNA, 50 bp, synthetic construct
  source 1..50: mol_type = other DNA
gttccttgccgaactcccgaatggccccgaaggggttagcctcagggatg

SEQ ID NO: 37221 - DNA, 50 bp, synthetic construct
  source 1..50: mol_type = other DNA
gtagtaccacgcggcgtctgggttgcgtcttcgacttcgcgctgtactac

SEQ ID NO: 37222 - DNA, 50 bp, synthetic construct
  source 1..50: mol_type = other DNA
accacaatattgatgatccgctcctaggagacgacgatattgataatccg

SEQ ID NO: 37223 - DNA, 50 bp, synthetic construct
  source 1..50: mol_type = other DNA
ttgcaaaatagataattatgaagttattacaattaaaattcctattacaa

SEQ ID NO: 37224 - DNA, 50 bp, synthetic construct
  source 1..50: mol_type = other DNA
tgcggcgtagagacgggcgagcagccatgctggcccagcgctttcccggc

SEQ ID NO: 37225 - DNA, 50 bp, synthetic construct
  source 1..50: mol_type = other DNA
tcaaatgacacgagagaaccggttcgaaccggtcgtatcaagcacgttgc

SEQ ID NO: 37226 - DNA, 50 bp, synthetic construct
  source 1..50: mol_type = other DNA
ggcgcttcggctggccgaaatgctgcagcagaacggccgccatgagcgca

SEQ ID NO: 37227 - DNA, 50 bp, synthetic construct
  source 1..50: mol_type = other DNA
ttcataattagagcttataataactatgtaccgtacgagttagaggtgat

SEQ ID NO: 37228 - DNA, 50 bp, synthetic construct
  source 1..50: mol_type = other DNA
ctcagaagtcttttcatccacaacagcatgttttcaaaagcggttgtgga

SEQ ID NO: 37229 - DNA, 50 bp, synthetic construct
  source 1..50: mol_type = other DNA
cgactggtcggcatcctggcgaggcagcatgatagacggccgcaagcgga

SEQ ID NO: 37230 - DNA, 50 bp, synthetic construct
  source 1..50: mol_type = other DNA
tcttggctgccgtttctgctgttcatcaacgcgaacatcagcagcgccag

SEQ ID NO: 37231 - DNA, 50 bp, synthetic construct
  source 1..50: mol_type = other DNA
ccctatatagccctcacaccgcgccggcgcggtggataatgcggcgctgg

SEQ ID NO: 37232 - DNA, 50 bp, synthetic construct
  source 1..50: mol_type = other DNA
aaatgaaacgaaattataaatatatagatattttgtcaattttgtcattt

SEQ ID NO: 37233 - DNA, 50 bp, synthetic construct
  source 1..50: mol_type = other DNA
gttctttgtattgctccacaacctaatcgtccgtacaacataaaaagaaa

SEQ ID NO: 37234 - DNA, 50 bp, synthetic construct
  source 1..50: mol_type = other DNA
atcgctaaagagattaatattgttataacgcaggatagtagtcatgcagc

SEQ ID NO: 37235 - DNA, 50 bp, synthetic construct
  source 1..50: mol_type = other DNA
catttttttcttttcagcagagatttttgcctccttaacgcaaaaaaagg

SEQ ID NO: 37236 - DNA, 50 bp, synthetic construct
  source 1..50: mol_type = other DNA
gaaaaatatcaaccgattattccgaaaaacttatacggttgattttttaa

SEQ ID NO: 37237 - DNA, 50 bp, synthetic construct
  source 1..50: mol_type = other DNA
aatcattaatcagataaatttcttataatatatcttgagaatcaaaaatt

SEQ ID NO: 37238 - DNA, 50 bp, synthetic construct
  source 1..50: mol_type = other DNA
taataggtagaatgttggtacaacaatttcatccaaaaacttaggatcaa

SEQ ID NO: 37239 - DNA, 50 bp, synthetic construct
  source 1..50: mol_type = other DNA
aagtaagtcggttccgacatgaggatgttagctaataaacctacttatag

SEQ ID NO: 37240 - DNA, 50 bp, synthetic construct
  source 1..50: mol_type = other DNA
atagaaaaattaggagagaaaacatttgtaaaatggaaaaatttttgcat

SEQ ID NO: 37241 - DNA, 50 bp, synthetic construct
  source 1..50: mol_type = other DNA
cgaacgccgcgttcgcgttcggcgcgcgccgcgtccgcgcacggcccgcg

SEQ ID NO: 37242 - DNA, 50 bp, synthetic construct
  source 1..50: mol_type = other DNA
atggtaactaataaagagagagcatcctttcagacttgattctgctttct

SEQ ID NO: 37243 - DNA, 50 bp, synthetic construct
  source 1..50: mol_type = other DNA
gaaatatatttttcattttgttcaagtgagggaaatgaactgaatatcag

SEQ ID NO: 37244 - DNA, 50 bp, synthetic construct
  source 1..50: mol_type = other DNA
catcttgatgaaacagttctactgcatttagtaactgttatttcaattaa

SEQ ID NO: 37245 - DNA, 50 bp, synthetic construct
  source 1..50: mol_type = other DNA
atcgtatctactatatttttaattatataatacaaaatataagatgttat

SEQ ID NO: 37246 - DNA, 50 bp, synthetic construct
  source 1..50: mol_type = other DNA
tgtaaaatacgaacaaacgtatgataatatatatttgtgagtaaattaga

SEQ ID NO: 37247 - DNA, 50 bp, synthetic construct
  source 1..50: mol_type = other DNA
tggtgtcgatgttggcggattgaagctggctccgatcaaccagcccacca

SEQ ID NO: 37248 - DNA, 50 bp, synthetic construct
  source 1..50: mol_type = other DNA
acaaaaccaaatagaacaaatagggcagagattgacctcggccttattgt

SEQ ID NO: 37249 - DNA, 50 bp, synthetic construct
  source 1..50: mol_type = other DNA
atcggcaccggtcgggtgatcaagggcctgatggggatgcgcgttggcgg

SEQ ID NO: 37250 - DNA, 50 bp, synthetic construct
  source 1..50: mol_type = other DNA
attgccgtaacggcgaatgcccgcatttaggcatttctgtgtataaaatt

SEQ ID NO: 37251 - DNA, 50 bp, synthetic construct
  source 1..50: mol_type = other DNA
ggaatagaaactctactattagaaaattctaaatctcaagtctcttttcc

SEQ ID NO: 37252 - DNA, 50 bp, synthetic construct
  source 1..50: mol_type = other DNA
aaaaacatcctactccaatggaggtttcctgttatattttatttgatttt

SEQ ID NO: 37253 - DNA, 50 bp, synthetic construct
  source 1..50: mol_type = other DNA
tatcaagaaacgtatatttttcatcccataaaaatatatcaatcttatat

SEQ ID NO: 37254 - DNA, 50 bp, synthetic construct
  source 1..50: mol_type = other DNA
ttttttaatctttttgtcgaacataaagataatagaaaaatattaaaagg

SEQ ID NO: 37255 - DNA, 50 bp, synthetic construct
  source 1..50: mol_type = other DNA
ctttaaagaaattaggagatgctttattaaattctagtatttcatctaaa

SEQ ID NO: 37256 - DNA, 50 bp, synthetic construct
  source 1..50: mol_type = other DNA
tctcgatccccggctcgtcgccttcgaagaagtcgagcctgtgagcaacg

SEQ ID NO: 37257 - DNA, 50 bp, synthetic construct
  source 1..50: mol_type = other DNA
aaccacaatttgcatatcgtccctacagtgaagccttagatatgatggga

SEQ ID NO: 37258 - DNA, 50 bp, synthetic construct
  source 1..50: mol_type = other DNA
aaactataatttttagataataaatattggttaccgtaagattatacacg

SEQ ID NO: 37259 - DNA, 50 bp, synthetic construct
  source 1..50: mol_type = other DNA
gaccacattttgcccacttaattttcttggtaatttaataaaagttcctt

SEQ ID NO: 37260 - DNA, 50 bp, synthetic construct
  source 1..50: mol_type = other DNA
aaaaataaagtttttttatttataaatataaatactataccataaactat

SEQ ID NO: 37261 - DNA, 50 bp, synthetic construct
  source 1..50: mol_type = other DNA
caaatatgattccgatactcattacatttgttcaagcgtatcaataattt

SEQ ID NO: 37262 - DNA, 50 bp, synthetic construct
  source 1..50: mol_type = other DNA
acgaactgatagattttttaggtgaaaagctgaaaaggttaggagtttgt

SEQ ID NO: 37263 - DNA, 50 bp, synthetic construct
  source 1..50: mol_type = other DNA
aaagaagacaaacctactatttctaatctaatagtagaattagattcttt

SEQ ID NO: 37264 - DNA, 50 bp, synthetic construct
  source 1..50: mol_type = other DNA
aaaatggttcgaaatcatatttcaaatgccatgcaaaaacttggcgtgaa

SEQ ID NO: 37265 - DNA, 50 bp, synthetic construct
  source 1..50: mol_type = other DNA
aaaaatataatatatcttcagatttgaagatttagaagataaatattttc

SEQ ID NO: 37266 - DNA, 50 bp, synthetic construct
  source 1..50: mol_type = other DNA
tgctcaacgaaagcctgtttttcggccggaaaacaggtcttcgtcgataa

SEQ ID NO: 37267 - DNA, 50 bp, synthetic construct
  source 1..50: mol_type = other DNA
ttccgtcgccatgttcggcagatgcgcgctcgacgacattggagtcgagc

SEQ ID NO: 37268 - DNA, 50 bp, synthetic construct
  source 1..50: mol_type = other DNA
tattgtatctagtcatatgattataaaaaatcatatgaaaaatatgggca

SEQ ID NO: 37269 - DNA, 50 bp, synthetic construct
  source 1..50: mol_type = other DNA
tgggcagtcaatcggtggtatattcccttcttgttcggattcacagaaaa

SEQ ID NO: 37270 - DNA, 50 bp, synthetic construct
  source 1..50: mol_type = other DNA
aatttattgatttatatgggatatgttaatgaatgagttttcaataattt

SEQ ID NO: 37271 - DNA, 50 bp, synthetic construct
  source 1..50: mol_type = other DNA
caagcaactggcccaggctggactcgatgcggcgctgggtcagttgctgg

SEQ ID NO: 37272 - DNA, 50 bp, synthetic construct
  source 1..50: mol_type = other DNA
gggacgaggccagtcagcgggtggttccatccgctgcccggcctgcgcct

SEQ ID NO: 37273 - DNA, 50 bp, synthetic construct
  source 1..50: mol_type = other DNA
aatgtaaattttccaagtcacaatcacgcctggctgtatgatgtaaacaa

SEQ ID NO: 37274 - DNA, 50 bp, synthetic construct
  source 1..50: mol_type = other DNA
ctgttcatggcatcatggcggtcggcgcgccgcctgccgcgcaagagccc

SEQ ID NO: 37275 - DNA, 50 bp, synthetic construct
  source 1..50: mol_type = other DNA
aagtatatgtgtaataacactagctagaagatgttattactaccttgctt

SEQ ID NO: 37276 - DNA, 50 bp, synthetic construct
  source 1..50: mol_type = other DNA
aaattcacttgatggttaattttacatatcatttcccatcttcttaattt

SEQ ID NO: 37277 - DNA, 50 bp, synthetic construct
  source 1..50: mol_type = other DNA
ctttctatacattacaattcgtataaaataaccgtatctcatataaaaga

SEQ ID NO: 37278 - DNA, 50 bp, synthetic construct
  source 1..50: mol_type = other DNA
agcatcttgtcctttaggtggcgcgactgccttgcagaggttgagatgtc

SEQ ID NO: 37279 - DNA, 50 bp, synthetic construct
  source 1..50: mol_type = other DNA
atttgcataccgcctcggccccctatagcaggctatccttgagggctgag

SEQ ID NO: 37280 - DNA, 50 bp, synthetic construct
  source 1..50: mol_type = other DNA
ttccagctaaaatataaggaactgctcctttctttcctgtttgacctttt

SEQ ID NO: 37281 - DNA, 50 bp, synthetic construct
  source 1..50: mol_type = other DNA
cacaaatatattgttccagtggggtgtcccatatcccatatatatgtgtg

SEQ ID NO: 37282 - DNA, 50 bp, synthetic construct
  source 1..50: mol_type = other DNA
tacctcactcttttgttcttttcgtacaaaaatctcctcatttgcaggag

SEQ ID NO: 37283 - DNA, 50 bp, synthetic construct
  source 1..50: mol_type = other DNA
acccggccaggcattttctaaccgcagagtttgaatatctctcttaaggg

SEQ ID NO: 37284 - DNA, 50 bp, synthetic construct
  source 1..50: mol_type = other DNA
ttccagaatatccgaggtgtccactgcctgtagcctcggatcttcgtatt

SEQ ID NO: 37285 - DNA, 50 bp, synthetic construct
  source 1..50: mol_type = other DNA
ggcttcttcttcgttaatcacagcgcagtatgcagcacgaatgcaaaata

SEQ ID NO: 37286 - DNA, 50 bp, synthetic construct
  source 1..50: mol_type = other DNA
cagccggcaaaggcaggatggccaattccaccgggtgccggtgattgcgc

SEQ ID NO: 37287 - DNA, 50 bp, synthetic construct
  source 1..50: mol_type = other DNA
acttcgcccggctggctgcgcatgcgcaagctggtgatcgtgcccgaaga

SEQ ID NO: 37288 - DNA, 50 bp, synthetic construct
  source 1..50: mol_type = other DNA
gaaggtttcaggcgcgccgcgtccgcgaaggtggtgcgcctccgaggggg

SEQ ID NO: 37289 - DNA, 50 bp, synthetic construct
  source 1..50: mol_type = other DNA
acctcttatcttctttgattatggatatagaattgaagatggaaaggctg

SEQ ID NO: 37290 - DNA, 50 bp, synthetic construct
  source 1..50: mol_type = other DNA
tacgagaaaatgatcgccgcgggcaagcccgcgcgacttatcaatggcta

SEQ ID NO: 37291 - DNA, 50 bp, synthetic construct
  source 1..50: mol_type = other DNA
ataatttccatgctacgcaataacggtttaggcgctctcgtcaaaattat

SEQ ID NO: 37292 - DNA, 50 bp, synthetic construct
  source 1..50: mol_type = other DNA
ggctgacctatccgcatcaattgatgccaatcttaatgcttaggttagga

SEQ ID NO: 37293 - DNA, 50 bp, synthetic construct
  source 1..50: mol_type = other DNA
ctgcccggctgttgatcgccggaatcaaccggcatcaaacagccgagcac

SEQ ID NO: 37294 - DNA, 50 bp, synthetic construct
  source 1..50: mol_type = other DNA
ggattgacagttactgaaaatgaaaagctagcttgagtacctgtagttcc

SEQ ID NO: 37295 - DNA, 50 bp, synthetic construct
  source 1..50: mol_type = other DNA
atctcgtcgacgacccgtgccggtgccgagggtgccctcgtcacgttgaa

SEQ ID NO: 37296 - DNA, 50 bp, synthetic construct
  source 1..50: mol_type = other DNA
taccaaatgacaaaaatgatataatatgaatgcaattttttcagatggtt

SEQ ID NO: 37297 - DNA, 50 bp, synthetic construct
  source 1..50: mol_type = other DNA
aggcgggcgcgggtacttgagatcccatgctcgccgacaagcgccgagct

SEQ ID NO: 37298 - DNA, 50 bp, synthetic construct
  source 1..50: mol_type = other DNA
attttttaagacgtgataacaatattattttatatatctcttttaaattt

SEQ ID NO: 37299 - DNA, 50 bp, synthetic construct
  source 1..50: mol_type = other DNA
aaaaataaaatttatgaaaatttggtccaaagagggagttttttatgaag

SEQ ID NO: 37300 - DNA, 50 bp, synthetic construct
  source 1..50: mol_type = other DNA
atgacgatcgtcaaggcgcttgcgcgctcaacggcggcgacgccgcccga

SEQ ID NO: 37301 - DNA, 50 bp, synthetic construct
  source 1..50: mol_type = other DNA
gtttattagaaaagaaaaatactaattaaattttatcaaatataataaaa

SEQ ID NO: 37302 - DNA, 50 bp, synthetic construct
  source 1..50: mol_type = other DNA
cttaactaaaaatcttctagaaaaatttttcaagacttctttctcttgcc

SEQ ID NO: 37303 - DNA, 50 bp, synthetic construct
  source 1..50: mol_type = other DNA
ttgaatgatcatttactgtatcaatacatagcaaataaataagaattata

SEQ ID NO: 37304 - DNA, 50 bp, synthetic construct
  source 1..50: mol_type = other DNA
cttgataatcgaatagaatgattgggtaaagattctttccccggaggagc

SEQ ID NO: 37305 - DNA, 50 bp, synthetic construct
  source 1..50: mol_type = other DNA
gtaaaggacaaaatatccgccggcaggacggcggacgcgatgctttttaa

SEQ ID NO: 37306 - DNA, 50 bp, synthetic construct
  source 1..50: mol_type = other DNA
tcgctgcctacaagcacctgtggaggcggcacttcgcggcgaggtcgcgg

SEQ ID NO: 37307 - DNA, 50 bp, synthetic construct
  source 1..50: mol_type = other DNA
tatagctgaaaaaagattttatgatataatctgtgtgtcgggtgattata

SEQ ID NO: 37308 - DNA, 50 bp, synthetic construct
  source 1..50: mol_type = other DNA
tgcgcccgctcttgtcgctgcccatcagggtgcgcgttggggcgggggct

SEQ ID NO: 37309 - DNA, 50 bp, synthetic construct
  source 1..50: mol_type = other DNA
ccattagaagttgatgatttggatgagtttcaatacatatattcgtcctt

SEQ ID NO: 37310 - DNA, 50 bp, synthetic construct
  source 1..50: mol_type = other DNA
gaccatgacaatggttctaccctgacgaaaaattcagcgttattgattta

SEQ ID NO: 37311 - DNA, 50 bp, synthetic construct
  source 1..50: mol_type = other DNA
aactgtcgtatttatcacggtaactagttaccgtgacatttgtaacagta

SEQ ID NO: 37312 - DNA, 50 bp, synthetic construct
  source 1..50: mol_type = other DNA
cgtgccgccgtggccgtgcgagatcatgctcagccgcccaccgcgcggcg

SEQ ID NO: 37313 - DNA, 50 bp, synthetic construct
  source 1..50: mol_type = other DNA
atccttctggaatatataagttagtactaacttatattatccttctggta

SEQ ID NO: 37314 - DNA, 50 bp, synthetic construct
  source 1..50: mol_type = other DNA
tcatcttatttgggctgtagctgaaaacagcaaaagtggaagtaacgatc

SEQ ID NO: 37315 - DNA, 50 bp, synthetic construct
  source 1..50: mol_type = other DNA
aaaaaatggtatttagttcattcataaaagaaaaatatgatgactttttt

SEQ ID NO: 37316 - DNA, 50 bp, synthetic construct
  source 1..50: mol_type = other DNA
aaaacaagcaagagatttcaatattaacaaataaatctttttttatcttt

SEQ ID NO: 37317 - DNA, 50 bp, synthetic construct
  source 1..50: mol_type = other DNA
gaaattgaaaaattaaaccggcaatcatcactttccttttttaaaatttt

SEQ ID NO: 37318 - DNA, 50 bp, synthetic construct
  source 1..50: mol_type = other DNA
ccgccaactaagttctaccgcggaattttacgtgcatccttctttgtcat

SEQ ID NO: 37319 - DNA, 50 bp, synthetic construct
  source 1..50: mol_type = other DNA
gctcaaactggcaatgcagatcatcgatgatttggaagtcctggttgagc

SEQ ID NO: 37320 - DNA, 50 bp, synthetic construct
  source 1..50: mol_type = other DNA
ggggatgccaagaatgtaagaatcatgatgtcctttctcttgaagtcgcc

SEQ ID NO: 37321 - DNA, 50 bp, synthetic construct
  source 1..50: mol_type = other DNA
ataacacctaatgatttataggtatttcacttctaataataaggtagagc

SEQ ID NO: 37322 - DNA, 50 bp, synthetic construct
  source 1..50: mol_type = other DNA
aaattgccatcccataaaaaataattatatttcacctccgatggtttgat

SEQ ID NO: 37323 - DNA, 50 bp, synthetic construct
  source 1..50: mol_type = other DNA
tatggtgtcacaatttttgataccatggtattttaatgccataaaggcac

SEQ ID NO: 37324 - DNA, 50 bp, synthetic construct
  source 1..50: mol_type = other DNA
ttttcttttggcagaccttcttcgctactcgtaatattacctaacacgga

SEQ ID NO: 37325 - DNA, 50 bp, synthetic construct
  source 1..50: mol_type = other DNA
gagcatttgtaaaaacaatgttgatatcaaagctaattagacaaatgtat

SEQ ID NO: 37326 - DNA, 50 bp, synthetic construct
  source 1..50: mol_type = other DNA
atgatcaacggccacgatgaaatatttatttcaatgtttcgacaattcac

SEQ ID NO: 37327 - DNA, 50 bp, synthetic construct
  source 1..50: mol_type = other DNA
tttttgaattaaaaaatacaagattaagtacgcactttttaggtcaatac

SEQ ID NO: 37328 - DNA, 50 bp, synthetic construct
  source 1..50: mol_type = other DNA
ttctatatttgcattaacatattgatgaagaacaggctgaaaatataaga

SEQ ID NO: 37329 - DNA, 50 bp, synthetic construct
  source 1..50: mol_type = other DNA
ttcttaaagctaggttggatttataaataatttcaaaatagtttcaaaat

SEQ ID NO: 37330 - DNA, 50 bp, synthetic construct
  source 1..50: mol_type = other DNA
aaaaataatttgatggatatgatattgccactaaagatgtcattatttta

SEQ ID NO: 37331 - DNA, 50 bp, synthetic construct
  source 1..50: mol_type = other DNA
attatattattaccagtatttgttaaaatgaaaatagctaaaaaggtaat

SEQ ID NO: 37332 - DNA, 50 bp, synthetic construct
  source 1..50: mol_type = other DNA
caaacacggctacggctgtgtttaatataatactgcaacaacggtgatga

SEQ ID NO: 37333 - DNA, 50 bp, synthetic construct
  source 1..50: mol_type = other DNA
tatcgtccactaattcagtctcaaatgtaggactgcacttaaagacgatt

SEQ ID NO: 37334 - DNA, 50 bp, synthetic construct
  source 1..50: mol_type = other DNA
tcagagatatgcgattcccgataaggttaataagtgtataagtgctattt

SEQ ID NO: 37335 - DNA, 50 bp, synthetic construct
  source 1..50: mol_type = other DNA
gcaaaatctcaagaatataacccaattttgggcattacaagacatattag

SEQ ID NO: 37336 - DNA, 50 bp, synthetic construct
  source 1..50: mol_type = other DNA
ctatttgaaaagtaactttgtatttaaatacttagtaactttttggctag

SEQ ID NO: 37337 - DNA, 50 bp, synthetic construct
  source 1..50: mol_type = other DNA
cattgttcttgtcgcggtacttttccacgctgcccgcgctgcaaatatct

SEQ ID NO: 37338 - DNA, 50 bp, synthetic construct
  source 1..50: mol_type = other DNA
taatttagacaaatataattgtacatgtatctaaatgtatatctaactta

SEQ ID NO: 37339 - DNA, 50 bp, synthetic construct
  source 1..50: mol_type = other DNA
cctttaattattttaaaaagttatttcagagtttttaaaaacattgtatt

SEQ ID NO: 37340 - DNA, 50 bp, synthetic construct
  source 1..50: mol_type = other DNA
ttctcccggttgagatagttgtagaccgtgaagcggctcaccccgagcgc

SEQ ID NO: 37341 - DNA, 50 bp, synthetic construct
  source 1..50: mol_type = other DNA
ggggctcacatcgccgatcgcgcccaggcgcgccggtcgagacccgcccg

SEQ ID NO: 37342 - DNA, 50 bp, synthetic construct
  source 1..50: mol_type = other DNA
cgaacaatctcatcctcgttactcgacgataccgagctcgcgccgctcga

SEQ ID NO: 37343 - DNA, 50 bp, synthetic construct
  source 1..50: mol_type = other DNA
tcgctcttgggcgtctggaggtatcaatgttattggaacttcacaggtgt

SEQ ID NO: 37344 - DNA, 50 bp, synthetic construct
  source 1..50: mol_type = other DNA
gtgaaatggatgggaaatgacttgatcaactctgtaccgatccagttgcg

SEQ ID NO: 37345 - DNA, 50 bp, synthetic construct
  source 1..50: mol_type = other DNA
aatgagcttaataaaaagtcttttaaagccccctttttattaagacgtta

SEQ ID NO: 37346 - DNA, 50 bp, synthetic construct
  source 1..50: mol_type = other DNA
gcggcagaacgagtccgtgctcgtcgacggggtgccgcgacgcctgccgc

SEQ ID NO: 37347 - DNA, 50 bp, synthetic construct
  source 1..50: mol_type = other DNA
tagcactgccagttggaacacactgcaccattgccctcctgatacagctg

SEQ ID NO: 37348 - DNA, 50 bp, synthetic construct
  source 1..50: mol_type = other DNA
catatttttttgtttttctagcttctaattgtggtaatataaagaatatc

SEQ ID NO: 37349 - DNA, 50 bp, synthetic construct
  source 1..50: mol_type = other DNA
agcacggcagctatattttcagctcctgctcgatttatactcatcggtgc

SEQ ID NO: 37350 - DNA, 50 bp, synthetic construct
  source 1..50: mol_type = other DNA
gtgataaaaatgaaacgaaattataaataaggcaccaatatttaaaactc

SEQ ID NO: 37351 - DNA, 50 bp, synthetic construct
  source 1..50: mol_type = other DNA
cctcgccaaacagcgagatgcctcatctcgcatatcgctttttcgcacat

SEQ ID NO: 37352 - DNA, 50 bp, synthetic construct
  source 1..50: mol_type = other DNA
tcatgcaacccaatccgattcatctcgtacgatcgattaagactgcatct

SEQ ID NO: 37353 - DNA, 50 bp, synthetic construct
  source 1..50: mol_type = other DNA
atccattattaaatattcaacgtgatcactccttatctgtatgtatgtat

SEQ ID NO: 37354 - DNA, 50 bp, synthetic construct
  source 1..50: mol_type = other DNA
aaaaggatcatttctggatcggtttaaaggggtctcggaattggatataa

SEQ ID NO: 37355 - DNA, 50 bp, synthetic construct
  source 1..50: mol_type = other DNA
attggatcatgaggtgatttaacatataataacaaacacaatcagccggc

SEQ ID NO: 37356 - DNA, 50 bp, synthetic construct
  source 1..50: mol_type = other DNA
tgaaaatgaataagtaccaaactttaaacagatttgctgttgattttgca

SEQ ID NO: 37357 - DNA, 50 bp, synthetic construct
  source 1..50: mol_type = other DNA
cctggaagaacaagtgggtaataaggttggccagttcttccatttccagc

SEQ ID NO: 37358 - DNA, 50 bp, synthetic construct
  source 1..50: mol_type = other DNA
gatagacttgacatttttatacttttgacagtaaactgagaggttctgcc

SEQ ID NO: 37359 - DNA, 50 bp, synthetic construct
  source 1..50: mol_type = other DNA
ttcttgttctgcaaatctaatagttagatgatatagcagcagaacaagta

SEQ ID NO: 37360 - DNA, 50 bp, synthetic construct
  source 1..50: mol_type = other DNA
ttttgtattttcaataactattattttattagtatttacaaaatacaaat

SEQ ID NO: 37361 - DNA, 50 bp, synthetic construct
  source 1..50: mol_type = other DNA
gaggcgccggaggtccaggaggtgatcgcctccgggacttcctgcttcag

SEQ ID NO: 37362 - DNA, 50 bp, synthetic construct
  source 1..50: mol_type = other DNA
tatattgaatactttggtaaaaagaactttttggagaaatattatagata

SEQ ID NO: 37363 - DNA, 50 bp, synthetic construct
  source 1..50: mol_type = other DNA
tatgaaataaggagttatgaaaatatattttgtttccataattcctccta

SEQ ID NO: 37364 - DNA, 50 bp, synthetic construct
  source 1..50: mol_type = other DNA
ggttctgcccctgcccggccagggtgatcgcgctcaagagcggcagacgc

SEQ ID NO: 37365 - DNA, 50 bp, synthetic construct
  source 1..50: mol_type = other DNA
atagttttaaattatttctgacatatccactaaaaatcggttaaaactat

SEQ ID NO: 37366 - DNA, 50 bp, synthetic construct
  source 1..50: mol_type = other DNA
ccataattccgatagtagtaccctatagtcaagttaatagagaattattc

SEQ ID NO: 37367 - DNA, 50 bp, synthetic construct
  source 1..50: mol_type = other DNA
ttcaataattgcctgttcgagttcatgtggaggaagccgaaaaaatacga

SEQ ID NO: 37368 - DNA, 50 bp, synthetic construct
  source 1..50: mol_type = other DNA
ccatatatggaattacagacgcggaataaatagatatatgcagcatataa

SEQ ID NO: 37369 - DNA, 50 bp, synthetic construct
  source 1..50: mol_type = other DNA
tttaagttagttaaattaatgaaaatgaggactcctttaaagaactgaaa

SEQ ID NO: 37370 - DNA, 50 bp, synthetic construct
  source 1..50: mol_type = other DNA
aactctgccggctataagggcagatatctggcattgaagcatgaaaccta

SEQ ID NO: 37371 - DNA, 50 bp, synthetic construct
  source 1..50: mol_type = other DNA
cttcctcttcattaacgacagccctggagaaaaagttaaaattcgtgaag

SEQ ID NO: 37372 - DNA, 50 bp, synthetic construct
  source 1..50: mol_type = other DNA
agccatctgcaattccacaggtaactgcacctgtggctttgctttgaact

SEQ ID NO: 37373 - DNA, 50 bp, synthetic construct
  source 1..50: mol_type = other DNA
actttcataatctaagtgaaaatttaaatgggcatccagattatgaatgt

SEQ ID NO: 37374 - DNA, 50 bp, synthetic construct
  source 1..50: mol_type = other DNA
agcaaatacagcagcaaaaaaagaaaattaattttgctaaagtatttgaa

SEQ ID NO: 37375 - DNA, 50 bp, synthetic construct
  source 1..50: mol_type = other DNA
agattaatgttccaataattacagtgctgacatacttttgcttttaattt

SEQ ID NO: 37376 - DNA, 50 bp, synthetic construct
  source 1..50: mol_type = other DNA
tttagtttcacattacattaaaaatattattcatgttcattaaaaagaaa

SEQ ID NO: 37377 - DNA, 50 bp, synthetic construct
  source 1..50: mol_type = other DNA
gatattttttagtcctttatatgttttattacaaggattaaaaattgctc

SEQ ID NO: 37378 - DNA, 50 bp, synthetic construct
  source 1..50: mol_type = other DNA
attatatccaacaagcaaagaaactgatttccttctttcttgattataga

SEQ ID NO: 37379 - DNA, 50 bp, synthetic construct
  source 1..50: mol_type = other DNA
gaacaggctgaactagcattaaaaatttattattttatttaagcgtcttt

SEQ ID NO: 37380 - DNA, 50 bp, synthetic construct
  source 1..50: mol_type = other DNA
tttattgatagcaaaacatagggaaacgcctatttcgtacgtaacatttg

SEQ ID NO: 37381 - DNA, 50 bp, synthetic construct
  source 1..50: mol_type = other DNA
caaacacattattattgtcataatcttttaacccaataattccttgtaaa

SEQ ID NO: 37382 - DNA, 50 bp, synthetic construct
  source 1..50: mol_type = other DNA
aattttaaaatacaacattttaaaaccataaaatgcaagttaccactata

SEQ ID NO: 37383 - DNA, 50 bp, synthetic construct
  source 1..50: mol_type = other DNA
ggcctgtcgcgctgatcggcaaatggcggtgccgatcctggccggatcga

SEQ ID NO: 37384 - DNA, 50 bp, synthetic construct
  source 1..50: mol_type = other DNA
ccagcgggtccgcgagaagttcagcttatgactgctgaaggcccctcagg

SEQ ID NO: 37385 - DNA, 50 bp, synthetic construct
  source 1..50: mol_type = other DNA
tttactacattatttttctatgctatagtatggctaaataaatgtataaa

SEQ ID NO: 37386 - DNA, 50 bp, synthetic construct
  source 1..50: mol_type = other DNA
attttgcatatttaccttttaagttaactaacattaacaaggaaattaat

SEQ ID NO: 37387 - DNA, 50 bp, synthetic construct
  source 1..50: mol_type = other DNA
gggttctgggcacgaccaatgactacggtttccgcattgcgccacaaaaa

SEQ ID NO: 37388 - DNA, 50 bp, synthetic construct
  source 1..50: mol_type = other DNA
ccaataccaaagagcacaccagaaaactgtggcttaccctatcacattgg

SEQ ID NO: 37389 - DNA, 50 bp, synthetic construct
  source 1..50: mol_type = other DNA
aaaaagaagataatatagatgaaattttgtggctgtattatcatcttcag

SEQ ID NO: 37390 - DNA, 50 bp, synthetic construct
  source 1..50: mol_type = other DNA
gttccccggccttgaacgtgggtacgtcaccaccatcccggcacggcccg

SEQ ID NO: 37391 - DNA, 50 bp, synthetic construct
  source 1..50: mol_type = other DNA
tggtgtgtgggcggcatgttcacggccgttcccttgccccaggtacatgt

SEQ ID NO: 37392 - DNA, 50 bp, synthetic construct
  source 1..50: mol_type = other DNA
cacccaatacatcgatggcaataatatttttgcaccagaggttttgcttt

SEQ ID NO: 37393 - DNA, 50 bp, synthetic construct
  source 1..50: mol_type = other DNA
tcatccacaacagcttttccatcttctgatgattctcgttttgttactgg

SEQ ID NO: 37394 - DNA, 50 bp, synthetic construct
  source 1..50: mol_type = other DNA
aaatattgaatgcgatattaacttggcgagcgcttgagaatcgaatatat

SEQ ID NO: 37395 - DNA, 50 bp, synthetic construct
  source 1..50: mol_type = other DNA
tccacgcgcaattgggtgaggatgcgcgccctgcaccgcgtgcgcgggga

SEQ ID NO: 37396 - DNA, 50 bp, synthetic construct
  source 1..50: mol_type = other DNA
caatccgaaaatctccgagtaaaaagttaagtattcgtatttgtaagttc

SEQ ID NO: 37397 - DNA, 50 bp, synthetic construct
  source 1..50: mol_type = other DNA
tataagtctactaatgccgttgattgtgcaacttcatcaactgacatatc

SEQ ID NO: 37398 - DNA, 50 bp, synthetic construct
  source 1..50: mol_type = other DNA
ggttttaccctgattgaactgatggtggttatcggaatcatcgccattct

SEQ ID NO: 37399 - DNA, 50 bp, synthetic construct
  source 1..50: mol_type = other DNA
tgtgcatccgcgcacggatggacaggctcccgtccgtatcaggaggagcg

SEQ ID NO: 37400 - DNA, 50 bp, synthetic construct
  source 1..50: mol_type = other DNA
cgtcactcttagcggcactgggagggcgtccagtacgcgggagagttcgc

SEQ ID NO: 37401 - DNA, 50 bp, synthetic construct
  source 1..50: mol_type = other DNA
acagcgcgacccgcatcctcacggcggctcgaggaaaagcgccgcagctg

SEQ ID NO: 37402 - DNA, 50 bp, synthetic construct
  source 1..50: mol_type = other DNA
attaattgaaaattatcgtaaattttaactttgaataattttaggaatta

SEQ ID NO: 37403 - DNA, 50 bp, synthetic construct
  source 1..50: mol_type = other DNA
cgggatgcataatattctacttttataaacatccaatgtgtcttatcccc

SEQ ID NO: 37404 - DNA, 50 bp, synthetic construct
  source 1..50: mol_type = other DNA
tcggccaccagcgcctgcatccgtgccgcactgctggtgttggtggcgtt

SEQ ID NO: 37405 - DNA, 50 bp, synthetic construct
  source 1..50: mol_type = other DNA
cgaggaaagcgagaagaagagcaggcggggttggctccccgctcctctca

SEQ ID NO: 37406 - DNA, 50 bp, synthetic construct
  source 1..50: mol_type = other DNA
taaatcaagcgaaggaaatcttggataaaaaatcacattcgtttgataga

SEQ ID NO: 37407 - DNA, 50 bp, synthetic construct
  source 1..50: mol_type = other DNA
aaccggtcgatcccgccgcgctgcgcgaagttcggccggtgtgatcggcg

SEQ ID NO: 37408 - DNA, 50 bp, synthetic construct
  source 1..50: mol_type = other DNA
cagccctatcgcgcagcatcgcgagcagcttatgcacctcgctaccgatg

SEQ ID NO: 37409 - DNA, 50 bp, synthetic construct
  source 1..50: mol_type = other DNA
cgcccggccctgctgttgctgatgtgcatcagaaccagctcagcgacggt

SEQ ID NO: 37410 - DNA, 50 bp, synthetic construct
  source 1..50: mol_type = other DNA
cgactttctcgatcatgccccgcaggcgcggggcgctttgctgtcaatct

SEQ ID NO: 37411 - DNA, 50 bp, synthetic construct
  source 1..50: mol_type = other DNA
acgaactcggcggcatacgcggggacgctggccttggccgccgtctttgt

SEQ ID NO: 37412 - DNA, 50 bp, synthetic construct
  source 1..50: mol_type = other DNA
gaccgcgcaggggctccctcctgtgagcggtcgggcgcgccggcgcggtt

SEQ ID NO: 37413 - DNA, 50 bp, synthetic construct
  source 1..50: mol_type = other DNA
gggcttcgtgcaggcgtttggaacgctctccattgcgctcctcgaagcac

SEQ ID NO: 37414 - DNA, 50 bp, synthetic construct
  source 1..50: mol_type = other DNA
gtgccgaacgcccgcagccggctcgcgagacccgcttgggcgatcttccc

SEQ ID NO: 37415 - DNA, 50 bp, synthetic construct
  source 1..50: mol_type = other DNA
tatatttgcaactccaaaaaataacctttttttcacttgcattaaaaatg

SEQ ID NO: 37416 - DNA, 50 bp, synthetic construct
  source 1..50: mol_type = other DNA
cggcgtcgatggtcgcggacgcgccatcggtgggcggcttataaggtgcg

SEQ ID NO: 37417 - DNA, 50 bp, synthetic construct
  source 1..50: mol_type = other DNA
agcacaaaaaggaaactggtgcgcaagcgcagggtcggcgaaaaggggcg

SEQ ID NO: 37418 - DNA, 50 bp, synthetic construct
  source 1..50: mol_type = other DNA
ttaaaatacggtttaaccgtttataaatgaaaagttgagatctatttttg

SEQ ID NO: 37419 - DNA, 50 bp, synthetic construct
  source 1..50: mol_type = other DNA
taatagtcatctcctaaataacgcttttacgatttagttctgttatttta

SEQ ID NO: 37420 - DNA, 50 bp, synthetic construct
  source 1..50: mol_type = other DNA
accctccaagtatcctgcatataactttaaatggctttaaatggtggagt

SEQ ID NO: 37421 - DNA, 50 bp, synthetic construct
  source 1..50: mol_type = other DNA
catcggaaacgatgatctggcagcctcacgccagcgcaggacaacctcgg

SEQ ID NO: 37422 - DNA, 50 bp, synthetic construct
  source 1..50: mol_type = other DNA
gagcagctggccagggcgtggcgcgtgctgtacgtgctggccaccagcga

SEQ ID NO: 37423 - DNA, 50 bp, synthetic construct
  source 1..50: mol_type = other DNA
ggggaacttctttgtctaggcggacgaccgccttcttgatgctcgagccg

SEQ ID NO: 37424 - DNA, 50 bp, synthetic construct
  source 1..50: mol_type = other DNA
tgccgcaaccgcatcgcaagtctcgtcgaacttgcgccggacccgctcga

SEQ ID NO: 37425 - DNA, 50 bp, synthetic construct
  source 1..50: mol_type = other DNA
ggagcagctctccagctatgaaaaccgctggaccaagtccgagctgctgg

SEQ ID NO: 37426 - DNA, 50 bp, synthetic construct
  source 1..50: mol_type = other DNA
tctggtgttttagaattgcatctgttctgatgtatttaagaaacacccgt

SEQ ID NO: 37427 - DNA, 50 bp, synthetic construct
  source 1..50: mol_type = other DNA
aacgaccgggtcagcgcactggcggcgaggttgtcgacaatacggtcgga

SEQ ID NO: 37428 - DNA, 50 bp, synthetic construct
  source 1..50: mol_type = other DNA
attctaaggctcaagaatatactccatgaaatcatttgacacattagaat

SEQ ID NO: 37429 - DNA, 50 bp, synthetic construct
  source 1..50: mol_type = other DNA
atagtgaacgacttctctttctcttaaaactccaaatcctggttcaaaat

SEQ ID NO: 37430 - DNA, 50 bp, synthetic construct
  source 1..50: mol_type = other DNA
aatctttccccaaataattttcccgaacgaatattacttggatcactttg

SEQ ID NO: 37431 - DNA, 50 bp, synthetic construct
  source 1..50: mol_type = other DNA
cacttgaaaaagaaaaagtcgaaaagcaagaactttttcgatttcaattc

SEQ ID NO: 37432 - DNA, 50 bp, synthetic construct
  source 1..50: mol_type = other DNA
cttcttcaaagatcaaacaaaattgaaatagaggatgagctgcatcgaag

SEQ ID NO: 37433 - DNA, 50 bp, synthetic construct
  source 1..50: mol_type = other DNA
gcccccgggagcgggctcccgggggcccctcggcgctcgcgaaatcggac

SEQ ID NO: 37434 - DNA, 50 bp, synthetic construct
  source 1..50: mol_type = other DNA
tgggattacctaacgaatggcaatatattaccattcagtgggcgtgccaa

SEQ ID NO: 37435 - DNA, 50 bp, synthetic construct
  source 1..50: mol_type = other DNA
tcagggtgtcgatccggatgccggcggaggtttgaggatggatatcctga

SEQ ID NO: 37436 - DNA, 50 bp, synthetic construct
  source 1..50: mol_type = other DNA
atttatccatgtaaaatcttctttttaaatttcactatattttgatactc

SEQ ID NO: 37437 - DNA, 50 bp, synthetic construct
  source 1..50: mol_type = other DNA
cgctgagccttatttgattcgcgtcgagctgattctcacgcagctcagcg

SEQ ID NO: 37438 - DNA, 50 bp, synthetic construct
  source 1..50: mol_type = other DNA
gtaatccgtttgccgtaggcggcggcccacgggatgagcgaacggcgggc

SEQ ID NO: 37439 - DNA, 50 bp, synthetic construct
  source 1..50: mol_type = other DNA
ctgctttaggcactaaccgatcattttaccgcttccagtaactatgaata

SEQ ID NO: 37440 - DNA, 50 bp, synthetic construct
  source 1..50: mol_type = other DNA
aaaaattgaggactaaaaaatattgattccatttcgtaattgcaatttta

SEQ ID NO: 37441 - DNA, 50 bp, synthetic construct
  source 1..50: mol_type = other DNA
ttttcccttttccttcatccataaagttatcgatgaagaaaaagctgaaa

SEQ ID NO: 37442 - DNA, 50 bp, synthetic construct
  source 1..50: mol_type = other DNA
ttccttaagttcaattggtaataaactaatttagtactaaactcaagaca

SEQ ID NO: 37443 - DNA, 50 bp, synthetic construct
  source 1..50: mol_type = other DNA
cctgttcaccacaaaaagaaagggatccctgtgggtttgcctgtcacttg

SEQ ID NO: 37444 - DNA, 50 bp, synthetic construct
  source 1..50: mol_type = other DNA
gctaatcaaactaatattgatagcaagcataacacatttgtatgattatc

SEQ ID NO: 37445 - DNA, 50 bp, synthetic construct
  source 1..50: mol_type = other DNA
tcacgagaaaaagggcattgccctgctggccatcgccacgaccatcgtga

SEQ ID NO: 37446 - DNA, 50 bp, synthetic construct
  source 1..50: mol_type = other DNA
atcatggaaagagaatcatttttcgagaaaattttgtctgtgttcgtaaa

SEQ ID NO: 37447 - DNA, 50 bp, synthetic construct
  source 1..50: mol_type = other DNA
tctccaaatatacatctttaacattcatgttctagtttcgtattttcatt

SEQ ID NO: 37448 - DNA, 50 bp, synthetic construct
  source 1..50: mol_type = other DNA
gtgcaatgtatttggataggagtggagagaaaccatactgtacttttatt

SEQ ID NO: 37449 - DNA, 50 bp, synthetic construct
  source 1..50: mol_type = other DNA
ctttacttttaaaatggcattccctactggtttatgggtaaaagaaaaag

SEQ ID NO: 37450 - DNA, 50 bp, synthetic construct
  source 1..50: mol_type = other DNA
tgggcagcacagcgcaaccactgagatcaagggtttagctactcgacaca

SEQ ID NO: 37451 - DNA, 50 bp, synthetic construct
  source 1..50: mol_type = other DNA
aataaactttctgataaagttccttaaggatattcaacaagattttgatt

SEQ ID NO: 37452 - DNA, 50 bp, synthetic construct
  source 1..50: mol_type = other DNA
gccgggcaaaatggcaatcgccgccgaacgtcacaggcacaccatccggt

SEQ ID NO: 37453 - DNA, 50 bp, synthetic construct
  source 1..50: mol_type = other DNA
cgtcattatcacaagcgccaccttgaaaggttgatcttatgataaagact

SEQ ID NO: 37454 - DNA, 50 bp, synthetic construct
  source 1..50: mol_type = other DNA
tgcgtttggctatttcgatcaggtcaacaacccggaaagggccgtcagca

SEQ ID NO: 37455 - DNA, 50 bp, synthetic construct
  source 1..50: mol_type = other DNA
gggggcggcttcgctgaattgttggccaacaatcatagctcgctctggta

SEQ ID NO: 37456 - DNA, 50 bp, synthetic construct
  source 1..50: mol_type = other DNA
aaaatttatagtacagtgagtaaagattaaggttatctgatataatatat

SEQ ID NO: 37457 - DNA, 50 bp, synthetic construct
  source 1..50: mol_type = other DNA
gaaaatcctttaaatagggttttcttatactcttgtttctaaccctttta

SEQ ID NO: 37458 - DNA, 50 bp, synthetic construct
  source 1..50: mol_type = other DNA
attattataattagcaagcaaaagaaatttccatagcaaatttaaaaaca

SEQ ID NO: 37459 - DNA, 50 bp, synthetic construct
  source 1..50: mol_type = other DNA
tcgacagtaaccactccatcttgaatcgttgatggacctcatatagttga

SEQ ID NO: 37460 - DNA, 50 bp, synthetic construct
  source 1..50: mol_type = other DNA
atgcaaataaaataatctgaacaatagttttatcctatttttatttttat

SEQ ID NO: 37461 - DNA, 50 bp, synthetic construct
  source 1..50: mol_type = other DNA
tcaacgttttaatgaggaggacttccaggtcgtccttctttccattcgtc

SEQ ID NO: 37462 - DNA, 50 bp, synthetic construct
  source 1..50: mol_type = other DNA
cggcgctttctggtcggcgaaaaagccagccagtagatcaggaagcgccc

SEQ ID NO: 37463 - DNA, 50 bp, synthetic construct
  source 1..50: mol_type = other DNA
acgttttgttttaagttgttgcattaaattcctcctttcccttattactc

SEQ ID NO: 37464 - DNA, 50 bp, synthetic construct
  source 1..50: mol_type = other DNA
atgcaaaaatcattctagagggtatataccttttggatatgccattcaaa

SEQ ID NO: 37465 - DNA, 50 bp, synthetic construct
  source 1..50: mol_type = other DNA
aattggtacagaaattattctttccaggagacataattggattaccgatt

SEQ ID NO: 37466 - DNA, 50 bp, synthetic construct
  source 1..50: mol_type = other DNA
taccataaatgatttctctaagtttaattttattaaaatttattaaaata

SEQ ID NO: 37467 - DNA, 50 bp, synthetic construct
  source 1..50: mol_type = other DNA
attattagaaattgaaataaatttataactttaatataatatctagtaaa

SEQ ID NO: 37468 - DNA, 50 bp, synthetic construct
  source 1..50: mol_type = other DNA
tatcgacgggaaatttcgggttccccgaaatgataaagttctaatctatc

SEQ ID NO: 37469 - DNA, 50 bp, synthetic construct
  source 1..50: mol_type = other DNA
atatgtataagcaacaaagacaatgcacctcctttttttctgtgactgct

SEQ ID NO: 37470 - DNA, 50 bp, synthetic construct
  source 1..50: mol_type = other DNA
taacttcataaatatgtattcatatataggaattgtacatagtgaattta

SEQ ID NO: 37471 - DNA, 50 bp, synthetic construct
  source 1..50: mol_type = other DNA
agcgatcgagccatctgctgaatgtggcgccagtccatggcaaacaagca

SEQ ID NO: 37472 - DNA, 50 bp, synthetic construct
  source 1..50: mol_type = other DNA
tgggtgtggatcggcaggaatcgttgtgtactcaatgcgatccaagatgt

SEQ ID NO: 37473 - DNA, 50 bp, synthetic construct
  source 1..50: mol_type = other DNA
aggccaagggcagtagcgaatggcgggcctgtcgctggtattcggtggcc

SEQ ID NO: 37474 - DNA, 50 bp, synthetic construct
  source 1..50: mol_type = other DNA
gttttatcagttgtaatggcctcttccaataatattacttctatcaatac

SEQ ID NO: 37475 - DNA, 50 bp, synthetic construct
  source 1..50: mol_type = other DNA
tgagttaatattcatatcaataccaacatattgacgtgaccgtttgtttt

SEQ ID NO: 37476 - DNA, 50 bp, synthetic construct
  source 1..50: mol_type = other DNA
gtttataatagtataaagagaattaatattgtttctatactagtatccac

SEQ ID NO: 37477 - DNA, 50 bp, synthetic construct
  source 1..50: mol_type = other DNA
tttccctctctttatcctttgcttcatcacggaggaaaacgagagggctc

SEQ ID NO: 37478 - DNA, 50 bp, synthetic construct
  source 1..50: mol_type = other DNA
gtcctgccaagtaccctgaaaataattattttaaggatactgaggtatcg

SEQ ID NO: 37479 - DNA, 50 bp, synthetic construct
  source 1..50: mol_type = other DNA
atataatagctaacgtcaaaatcttcacttttcaacttttgataagctat

SEQ ID NO: 37480 - DNA, 50 bp, synthetic construct
  source 1..50: mol_type = other DNA
cctggcatccctgctctttatataaaaatataaagattcgggaatagaag

SEQ ID NO: 37481 - DNA, 50 bp, synthetic construct
  source 1..50: mol_type = other DNA
ctctaagacattcatattttaatatatattattgaattgaatatattgaa

SEQ ID NO: 37482 - DNA, 50 bp, synthetic construct
  source 1..50: mol_type = other DNA
gccgtaatcgctatacgagcggtttcttcgtcgcgaatttcgccaatcat

SEQ ID NO: 37483 - DNA, 50 bp, synthetic construct
  source 1..50: mol_type = other DNA
caagagctaacatgtcctacgactagcagctcataaagattaggcaatta

SEQ ID NO: 37484 - DNA, 50 bp, synthetic construct
  source 1..50: mol_type = other DNA
cgaactaaattaatatttcacttaaaaccttgaggttttaaatggttgcg

SEQ ID NO: 37485 - DNA, 50 bp, synthetic construct
  source 1..50: mol_type = other DNA
aaaggaccaggacaagctattggaaaaccaatgcaagagttgaaaggttt

SEQ ID NO: 37486 - DNA, 50 bp, synthetic construct
  source 1..50: mol_type = other DNA
tcaaggaacgaaccaaattaatattgttaagaatattcttcgtaagattc

SEQ ID NO: 37487 - DNA, 50 bp, synthetic construct
  source 1..50: mol_type = other DNA
tctataagatataatcggcctgagttcttttttcggtattatcttcccct

SEQ ID NO: 37488 - DNA, 50 bp, synthetic construct
  source 1..50: mol_type = other DNA
ttgaagaagtcaaaatagaaatgaatacattagacagatggtgccttcgg

SEQ ID NO: 37489 - DNA, 50 bp, synthetic construct
  source 1..50: mol_type = other DNA
gggctggctccagtgatgctgtataaatccagcacgaatggagccgcttg

SEQ ID NO: 37490 - DNA, 50 bp, synthetic construct
  source 1..50: mol_type = other DNA
atatacttacaatatcattgaaataaaacatattgatgatgggagtgttt

SEQ ID NO: 37491 - DNA, 50 bp, synthetic construct
  source 1..50: mol_type = other DNA
caaccggaaacgcgtacattccgctatttaaattgacgcgtattaaccta

SEQ ID NO: 37492 - DNA, 50 bp, synthetic construct
  source 1..50: mol_type = other DNA
acaaaattttattcaaaataacttttttgttatttctaataagcattaat

SEQ ID NO: 37493 - DNA, 50 bp, synthetic construct
  source 1..50: mol_type = other DNA
cgctcgtttctcgatccgcgatacgtgccaatcggatcgtgaagcgagac

SEQ ID NO: 37494 - DNA, 50 bp, synthetic construct
  source 1..50: mol_type = other DNA
acgcggttcttcgaggtcttgggctcggggacccgctggaagaagatgcg

SEQ ID NO: 37495 - DNA, 50 bp, synthetic construct
  source 1..50: mol_type = other DNA
cagggcgaggaggtggtcgcgatcgcgggcgagaccacgatctcgccggt

SEQ ID NO: 37496 - DNA, 50 bp, synthetic construct
  source 1..50: mol_type = other DNA
aggatgctcgtgagctcgctcgtccctgcgagcgtgttcacggacatggc

SEQ ID NO: 37497 - DNA, 50 bp, synthetic construct
  source 1..50: mol_type = other DNA
ttttatgaattgatgtaaaatggctatataaagctaataaaataatataa

SEQ ID NO: 37498 - DNA, 50 bp, synthetic construct
  source 1..50: mol_type = other DNA
tatgaactataaagatataaatcaatatgagctggaactcctatttcatg

SEQ ID NO: 37499 - DNA, 50 bp, synthetic construct
  source 1..50: mol_type = other DNA
aagaaaaagcctgacgagcagcactgttacgcgcggcccagccacgccta

SEQ ID NO: 37500 - DNA, 50 bp, synthetic construct
  source 1..50: mol_type = other DNA
tcgcctgaccgacactggctacacgaagggtttgagtggtggtcatcgtg

SEQ ID NO: 37501 - DNA, 50 bp, synthetic construct
  source 1..50: mol_type = other DNA
cggccgatcaatcacgggctgctgagaaaaagcgcgacagctatcggatc

SEQ ID NO: 37502 - DNA, 50 bp, synthetic construct
  source 1..50: mol_type = other DNA
tcagtgacatccagcgtgaagatctacatccatacgacggatgtcaggtt

SEQ ID NO: 37503 - DNA, 50 bp, synthetic construct
  source 1..50: mol_type = other DNA
caccaagaatgacgatgcacattattgtatgccttttctaattcttggac

SEQ ID NO: 37504 - DNA, 50 bp, synthetic construct
  source 1..50: mol_type = other DNA
atgggcttttggagcgaatatgtcatgacaataagtggaaggatttcccc

SEQ ID NO: 37505 - DNA, 50 bp, synthetic construct
  source 1..50: mol_type = other DNA
gggacgacaaaaagaaacagcaggcgagtgcggcggtttttacggttcca

SEQ ID NO: 37506 - DNA, 50 bp, synthetic construct
  source 1..50: mol_type = other DNA
gcgctgtgcacagggcggctgtcgaggatcacgcggttgaccgatcgttc

SEQ ID NO: 37507 - DNA, 50 bp, synthetic construct
  source 1..50: mol_type = other DNA
ttggagatataatctcggtaataattgtattccaccttggaaatggttta

SEQ ID NO: 37508 - DNA, 50 bp, synthetic construct
  source 1..50: mol_type = other DNA
tattttcattatcctaaaacttttttaatatcttctgttacttggctaat

SEQ ID NO: 37509 - DNA, 50 bp, synthetic construct
  source 1..50: mol_type = other DNA
cttcgcggcctgccccacgcccgaggcggggcgcagattgccccgataag

SEQ ID NO: 37510 - DNA, 50 bp, synthetic construct
  source 1..50: mol_type = other DNA
gaaactcacagacaaataaatcataaatgaattaatttttctccaaattc

SEQ ID NO: 37511 - DNA, 50 bp, synthetic construct
  source 1..50: mol_type = other DNA
tgacctcgccgacgatcctgatggccagcaactcatcggcggccgggtct

SEQ ID NO: 37512 - DNA, 50 bp, synthetic construct
  source 1..50: mol_type = other DNA
gccgtacaaaactcgcttgtgggagcgcccacaagtctaatatctatagc

SEQ ID NO: 37513 - DNA, 50 bp, synthetic construct
  source 1..50: mol_type = other DNA
aacgagcctgtctatgctgacgtaggagcatcagcaggtacaggctgatc

SEQ ID NO: 37514 - DNA, 50 bp, synthetic construct
  source 1..50: mol_type = other DNA
gtaaaatttaataatgtaagaacataatttattattttagtaacatttta

SEQ ID NO: 37515 - DNA, 50 bp, synthetic construct
  source 1..50: mol_type = other DNA
ggttaataatccttatagagtaaaattttatcttgcttttattatgcata

SEQ ID NO: 37516 - DNA, 50 bp, synthetic construct
  source 1..50: mol_type = other DNA
gtcgcgccccaccacaccgcatcggccgcgtcgggtcctgggagtacgac

SEQ ID NO: 37517 - DNA, 50 bp, synthetic construct
  source 1..50: mol_type = other DNA
ttattttatataggtcgaatccatatgttctttttatttaaagaaaataa

SEQ ID NO: 37518 - DNA, 50 bp, synthetic construct
  source 1..50: mol_type = other DNA
ttctagtttctgatatttttaaatctatttaaaagtaaaattattaattt

SEQ ID NO: 37519 - DNA, 50 bp, synthetic construct
  source 1..50: mol_type = other DNA
tccatcgtccacctcaccagcacccgggaccacagctgggtggcgcggga

SEQ ID NO: 37520 - DNA, 50 bp, synthetic construct
  source 1..50: mol_type = other DNA
tttcttttaatagcgtgaccaatgaaaattaataacgcttggaaaaaaaa

SEQ ID NO: 37521 - DNA, 50 bp, synthetic construct
  source 1..50: mol_type = other DNA
aataatatcaatggatttaaaacctgtttttcttctccatttctataggt

SEQ ID NO: 37522 - DNA, 50 bp, synthetic construct
  source 1..50: mol_type = other DNA
gggcaggtcaaccttatgggtgacctatcttggataaggtattgtcctat

SEQ ID NO: 37523 - DNA, 50 bp, synthetic construct
  source 1..50: mol_type = other DNA
atacagccattttgcgaatcattttaaaattgctttaaaaatgccaaaat

SEQ ID NO: 37524 - DNA, 50 bp, synthetic construct
  source 1..50: mol_type = other DNA
gtgatattgtcattgtcaccgttagtcaacgttttcaatgaaaattagat

SEQ ID NO: 37525 - DNA, 50 bp, synthetic construct
  source 1..50: mol_type = other DNA
ctaaaacttcttttttatctttcatatgtcagataaggttgcagttttat

SEQ ID NO: 37526 - DNA, 50 bp, synthetic construct
  source 1..50: mol_type = other DNA
catcctgagcggcaactgagagaccggtcccgcgaccgccgcgccggagc

SEQ ID NO: 37527 - DNA, 50 bp, synthetic construct
  source 1..50: mol_type = other DNA
ataccagagctattttttgataagttattatcaatgcagcaagcaagtaa

SEQ ID NO: 37528 - DNA, 50 bp, synthetic construct
  source 1..50: mol_type = other DNA
gtagtgcttttattttgaggatgttaaacacctcaaatttaagacattat

SEQ ID NO: 37529 - DNA, 50 bp, synthetic construct
  source 1..50: mol_type = other DNA
acgctaaggtttacgtggttaatggagacagtcgtcaagatattacaggt

SEQ ID NO: 37530 - DNA, 50 bp, synthetic construct
  source 1..50: mol_type = other DNA
tatttaaagattctaattgtgattttaataacaattagtttatttaatag

SEQ ID NO: 37531 - DNA, 50 bp, synthetic construct
  source 1..50: mol_type = other DNA
atatattaaattatattaaagttttattaaattatattaattttgtatag

SEQ ID NO: 37532 - DNA, 50 bp, synthetic construct
  source 1..50: mol_type = other DNA
aagacaaaatgcttgaaaaagtgcttagcctgtttttgacccgattttcg

SEQ ID NO: 37533 - DNA, 50 bp, synthetic construct
  source 1..50: mol_type = other DNA
ttttatcaattattgtaataataaggaaatttaataaatttaactaaaat

SEQ ID NO: 37534 - DNA, 50 bp, synthetic construct
  source 1..50: mol_type = other DNA
aattctatagcattaaaaagtaaaatttaaaaatatcagaaactagaact

SEQ ID NO: 37535 - DNA, 50 bp, synthetic construct
  source 1..50: mol_type = other DNA
acgcagcgcgaggacctgcacggcgcggcgcgcaggtcctcgtcggctgg

SEQ ID NO: 37536 - DNA, 50 bp, synthetic construct
  source 1..50: mol_type = other DNA
agtcatcccggtaacccaaaatatttgaagttgggcaacccgaaatatcc

SEQ ID NO: 37537 - DNA, 50 bp, synthetic construct
  source 1..50: mol_type = other DNA
cagggttgtggtagtgtttgtgttgcaccacagccagtgccacccgtctg

SEQ ID NO: 37538 - DNA, 50 bp, synthetic construct
  source 1..50: mol_type = other DNA
attagagattgagccctgtggaaaaaacacttcccggaacaagctaacat

SEQ ID NO: 37539 - DNA, 50 bp, synthetic construct
  source 1..50: mol_type = other DNA
tacgggtcaaagtcgactcggcgggctcactcaccgtggctctgcccgtg

SEQ ID NO: 37540 - DNA, 50 bp, synthetic construct
  source 1..50: mol_type = other DNA
ctccgccgcagtttgccgatattggccaaaaagcgcggcgggcggcggca

SEQ ID NO: 37541 - DNA, 50 bp, synthetic construct
  source 1..50: mol_type = other DNA
ttcaattattatcttgaatgtgtggcctccagcgcccgcagccctctccc

SEQ ID NO: 37542 - DNA, 50 bp, synthetic construct
  source 1..50: mol_type = other DNA
aagtactttagcctattattatgccatcataaaaacaggaaaaccaactt

SEQ ID NO: 37543 - DNA, 50 bp, synthetic construct
  source 1..50: mol_type = other DNA
ttctgatatttttaaatctatattattatgtagattatttaaaatcagag

SEQ ID NO: 37544 - DNA, 50 bp, synthetic construct
  source 1..50: mol_type = other DNA
ttttttcaatatatgctatattttaaaaaataagtaaattataactgtta

SEQ ID NO: 37545 - DNA, 50 bp, synthetic construct
  source 1..50: mol_type = other DNA
aaataaaaaacaactatgtaaataactgttatcatcaaaccgacaaccaa

SEQ ID NO: 37546 - DNA, 50 bp, synthetic construct
  source 1..50: mol_type = other DNA
ttggttatcagtttgatgataacagttatttacatagttgttttttattt

SEQ ID NO: 37547 - DNA, 50 bp, synthetic construct
  source 1..50: mol_type = other DNA
cggctcggcgcgatcctctgtgaccgggcgcggaggatcgcggcgatctg

SEQ ID NO: 37548 - DNA, 50 bp, synthetic construct
  source 1..50: mol_type = other DNA
taagaagttttccataggacaagtaacggtctatgatgataaactaacta

SEQ ID NO: 37549 - DNA, 50 bp, synthetic construct
  source 1..50: mol_type = other DNA
ttattttgtttttatattaaattttataatataaactataaaaaaaatta

SEQ ID NO: 37550 - DNA, 50 bp, synthetic construct
  source 1..50: mol_type = other DNA
ataccacttctaagtccactaaacacgttcagcccataagaaagctactg

SEQ ID NO: 37551 - DNA, 50 bp, synthetic construct
  source 1..50: mol_type = other DNA
agtcctcgtgtttagagataaactctgcttcatgagcaaacactagagta

SEQ ID NO: 37552 - DNA, 50 bp, synthetic construct
  source 1..50: mol_type = other DNA
tcgccaaaggggaagaggaacaaacacttttgaagcttgcgcattagcgg

SEQ ID NO: 37553 - DNA, 50 bp, synthetic construct
  source 1..50: mol_type = other DNA
ttgatatgcatatctatcgcaaactagtttgcgaacgatatgcatggcat

SEQ ID NO: 37554 - DNA, 50 bp, synthetic construct
  source 1..50: mol_type = other DNA
acagggctttgcggtccgtcgtctcgagatggcgggcgataaagcccctg

SEQ ID NO: 37555 - DNA, 50 bp, synthetic construct
  source 1..50: mol_type = other DNA
tcgcggtttacatcagcgcggcgttaaatcagtactgatataaacacagt

SEQ ID NO: 37556 - DNA, 50 bp, synthetic construct
  source 1..50: mol_type = other DNA
ctaaatacactatgagaacatacctgtatcgctttaggtagtgtatttaa

SEQ ID NO: 37557 - DNA, 50 bp, synthetic construct
  source 1..50: mol_type = other DNA
tgtccaaactttttaggaggaaacaaaagatttggaaattagtttggaca

SEQ ID NO: 37558 - DNA, 50 bp, synthetic construct
  source 1..50: mol_type = other DNA
gcgtcgtcgagcgcgccggggacaacggtcgcaggcacgatccacttcgc

SEQ ID NO: 37559 - DNA, 50 bp, synthetic construct
  source 1..50: mol_type = other DNA
tcaactttcccctcattcattttattagctgaaatggctgatcaagttgc

SEQ ID NO: 37560 - DNA, 50 bp, synthetic construct
  source 1..50: mol_type = other DNA
gtctcctccaattctaatttgtttacatatttagcagaaaaataggagca

SEQ ID NO: 37561 - DNA, 50 bp, synthetic construct
  source 1..50: mol_type = other DNA
gacaatagttcctaatgacaattcttacaagctcatttggatgacatgta

SEQ ID NO: 37562 - DNA, 50 bp, synthetic construct
  source 1..50: mol_type = other DNA
taacgaacgtaaagcaaaatcataaaaataatttttctttaataaccttg

SEQ ID NO: 37563 - DNA, 50 bp, synthetic construct
  source 1..50: mol_type = other DNA
ttcgcctcaagttctttcagatattgattgctttaattacttgagtaaat

SEQ ID NO: 37564 - DNA, 50 bp, synthetic construct
  source 1..50: mol_type = other DNA
ggtagaaaatgtaaccaaataaaattgttttagtctttacaatttctaga

SEQ ID NO: 37565 - DNA, 50 bp, synthetic construct
  source 1..50: mol_type = other DNA
tccttccacagattcttggcgaaggtcgtccagatgaagaccgaccagac

SEQ ID NO: 37566 - DNA, 50 bp, synthetic construct
  source 1..50: mol_type = other DNA
tgaaacgtacttggcgaataaattttgcgcagcgcgcccagttgcagcgg

SEQ ID NO: 37567 - DNA, 50 bp, synthetic construct
  source 1..50: mol_type = other DNA
tcttcttctggctgttcttcgtactcatactaagatcctcggaaaatgaa

SEQ ID NO: 37568 - DNA, 50 bp, synthetic construct
  source 1..50: mol_type = other DNA
atgaacacctatatggggtagcaactagatactggcataccggagttgaa

SEQ ID NO: 37569 - DNA, 50 bp, synthetic construct
  source 1..50: mol_type = other DNA
aaaaccactggaaaaccttattctatagatccacattttccattcgtttc

SEQ ID NO: 37570 - DNA, 50 bp, synthetic construct
  source 1..50: mol_type = other DNA
taccacgtatacggcgcaatctatgcagcgctggcgccggtggaacgggc

SEQ ID NO: 37571 - DNA, 50 bp, synthetic construct
  source 1..50: mol_type = other DNA
attttgtgatggaagatatgagatttatcttgatacttccatgaaaaaag

SEQ ID NO: 37572 - DNA, 50 bp, synthetic construct
  source 1..50: mol_type = other DNA
ttttggtataataatcatattgagatatcaagaattgaattagatttgaa

SEQ ID NO: 37573 - DNA, 50 bp, synthetic construct
  source 1..50: mol_type = other DNA
caccataatcaaaatatcatctttcttcaattgatattgtgataatagtt

SEQ ID NO: 37574 - DNA, 50 bp, synthetic construct
  source 1..50: mol_type = other DNA
aataatatttaacaatctctatagcacctccatttcaattaaactgtagg

SEQ ID NO: 37575 - DNA, 50 bp, synthetic construct
  source 1..50: mol_type = other DNA
cctctttatcaattacggcttttccgcaatggacgccatcgaaaaagaca

SEQ ID NO: 37576 - DNA, 50 bp, synthetic construct
  source 1..50: mol_type = other DNA
ttggcaataactggtttgaaatcaagcacaaggcggacagcttacgccat

SEQ ID NO: 37577 - DNA, 50 bp, synthetic construct
  source 1..50: mol_type = other DNA
cgccgaggaactctccgtcactgagctgcgcgaactcagggtgcacggcc

SEQ ID NO: 37578 - DNA, 50 bp, synthetic construct
  source 1..50: mol_type = other DNA
aatccgatgtgttcgaggccctgaaagcagctcgtttgaccctcttcata

SEQ ID NO: 37579 - DNA, 50 bp, synthetic construct
  source 1..50: mol_type = other DNA
cgaagctgagatcgaggtgttcgagcagcgcagcctcggcctcggcgacg

SEQ ID NO: 37580 - DNA, 50 bp, synthetic construct
  source 1..50: mol_type = other DNA
gatgttcgttatctaggagggcatgatacccctcgatgatgacgtggtcc

SEQ ID NO: 37581 - DNA, 50 bp, synthetic construct
  source 1..50: mol_type = other DNA
cgcccttcctgcgccgaccatcggccgaaaatgtcggcgatttccggttg

SEQ ID NO: 37582 - DNA, 50 bp, synthetic construct
  source 1..50: mol_type = other DNA
ttttcgtgtcccggttcacggtgaaatcatcaggagcaatcttcggatct

SEQ ID NO: 37583 - DNA, 50 bp, synthetic construct
  source 1..50: mol_type = other DNA
caattaaaccttgcacattttttaattaataaatctattttacttaaaaa

SEQ ID NO: 37584 - DNA, 50 bp, synthetic construct
  source 1..50: mol_type = other DNA
ccgcgcgaagcagtagatgcagacatatccagccatgctcgcagccgcgg

SEQ ID NO: 37585 - DNA, 50 bp, synthetic construct
  source 1..50: mol_type = other DNA
tagcgcataatcatccttccggaatattccatatcagcgatgtgcaaaat

SEQ ID NO: 37586 - DNA, 50 bp, synthetic construct
  source 1..50: mol_type = other DNA
ctaacaggagccggggacagctggggccaggctgccagagcagctgttca

SEQ ID NO: 37587 - DNA, 50 bp, synthetic construct
  source 1..50: mol_type = other DNA
ggcggccgagcggttgtatcgcgcgggcgcggatcgcgaagccgcgcggg

SEQ ID NO: 37588 - DNA, 50 bp, synthetic construct
  source 1..50: mol_type = other DNA
cgccgacaccgtccaccccggcgagttcggttcggcggaaagcgatttcg

SEQ ID NO: 37589 - DNA, 50 bp, synthetic construct
  source 1..50: mol_type = other DNA
attatattgattaaggaggtatatatggattcgacctatataaaataaat

SEQ ID NO: 37590 - DNA, 50 bp, synthetic construct
  source 1..50: mol_type = other DNA
gcccggtctccaccagctcgcgcggccgcggcggaggccatgcgccgggc

SEQ ID NO: 37591 - DNA, 50 bp, synthetic construct
  source 1..50: mol_type = other DNA
atggagagaaaatttattttctaattttataaaagatatgacatcttact

SEQ ID NO: 37592 - DNA, 50 bp, synthetic construct
  source 1..50: mol_type = other DNA
tttcattttagcacaaagaaaaaatatttaaaattatttggaaaatcaaa

SEQ ID NO: 37593 - DNA, 50 bp, synthetic construct
  source 1..50: mol_type = other DNA
tagccataacgtttataagttcatctatgaaactataccatgtgtgatta

SEQ ID NO: 37594 - DNA, 50 bp, synthetic construct
  source 1..50: mol_type = other DNA
tctactcctaaatgcaataattctgcagatataggtctttgtggtccaga

SEQ ID NO: 37595 - DNA, 50 bp, synthetic construct
  source 1..50: mol_type = other DNA
attatgcccaaaatgacttgatattaattataaagaccgttctgctgaat

SEQ ID NO: 37596 - DNA, 50 bp, synthetic construct
  source 1..50: mol_type = other DNA
cccgcgaggcggagcggaaatatgatgattttttaaatatgaaatcagtt

SEQ ID NO: 37597 - DNA, 50 bp, synthetic construct
  source 1..50: mol_type = other DNA
atgcaggaggcttttataacataatattatgtcccaaatatcttctggaa

SEQ ID NO: 37598 - DNA, 50 bp, synthetic construct
  source 1..50: mol_type = other DNA
gatgattttgccgacagctacatgcgccaaggccatcgcgcgcgcaatga

SEQ ID NO: 37599 - DNA, 50 bp, synthetic construct
  source 1..50: mol_type = other DNA
tattttttataccctaaattaatacagcttcattgtcggtatgtcctatg

SEQ ID NO: 37600 - DNA, 50 bp, synthetic construct
  source 1..50: mol_type = other DNA
ttcgattgaacatgcttacaattgaaaataagtaagcatcttcaaccttt

SEQ ID NO: 37601 - DNA, 50 bp, synthetic construct
  source 1..50: mol_type = other DNA
tgcaaaggtactcaagtcgggtaatgccctgataagtgtttacctttgta

SEQ ID NO: 37602 - DNA, 50 bp, synthetic construct
  source 1..50: mol_type = other DNA
cacggtgtagagcaccgccccgaaggtcagctttggtggtccgcacccgt

SEQ ID NO: 37603 - DNA, 50 bp, synthetic construct
  source 1..50: mol_type = other DNA
gatcgctaagatcgtcgaggcccttgccgtgctcaaccacctcagcgatt

SEQ ID NO: 37604 - DNA, 50 bp, synthetic construct
  source 1..50: mol_type = other DNA
aaatcctaatataacttcttctattataagaagctggttgcaattccgtt

SEQ ID NO: 37605 - DNA, 50 bp, synthetic construct
  source 1..50: mol_type = other DNA
acttcttctattataacacagaaacatttttgccttaaattcttggaaga

SEQ ID NO: 37606 - DNA, 50 bp, synthetic construct
  source 1..50: mol_type = other DNA
ctgttctttgtaagactgaaaaacaccgttcttggcgatataaaagaacg

SEQ ID NO: 37607 - DNA, 50 bp, synthetic construct
  source 1..50: mol_type = other DNA
tgttgaggatccaagtgacatccgtacatatgttctttatagtgtctttt

SEQ ID NO: 37608 - DNA, 50 bp, synthetic construct
  source 1..50: mol_type = other DNA
ccggcgccgccagcggcacgcgctccagcgggtaccggtgatggcgcggg

SEQ ID NO: 37609 - DNA, 50 bp, synthetic construct
  source 1..50: mol_type = other DNA
aaatatatattatctatatgttgttaagtctatgcctttaaagcccattt

SEQ ID NO: 37610 - DNA, 50 bp, synthetic construct
  source 1..50: mol_type = other DNA
cataattaatataatagataatttagaagaagaaaattatattaaagatg

SEQ ID NO: 37611 - DNA, 50 bp, synthetic construct
  source 1..50: mol_type = other DNA
tacaataagaagaaaggatgaaatacacggcatccttttttcacaagccc

SEQ ID NO: 37612 - DNA, 50 bp, synthetic construct
  source 1..50: mol_type = other DNA
tagtaaaaggaaaattagtttggtatataaaacatcttttcctcgaataa

SEQ ID NO: 37613 - DNA, 50 bp, synthetic construct
  source 1..50: mol_type = other DNA
gccgattccaacgtgtgaagcaacccggcccttttccatgcggatgaggc

SEQ ID NO: 37614 - DNA, 50 bp, synthetic construct
  source 1..50: mol_type = other DNA
cctacgcgcgcgcatgctcgacggcgtcggagcgcgggcgtcagcgtcga

SEQ ID NO: 37615 - DNA, 50 bp, synthetic construct
  source 1..50: mol_type = other DNA
ccgccgcggaacgccgcgatctgctcgcagatcacgaacttcggcacggc

SEQ ID NO: 37616 - DNA, 50 bp, synthetic construct
  source 1..50: mol_type = other DNA
tcaacgacactgcagcgccaaatcgtgcggtgtggcttgcctgtcgctca

SEQ ID NO: 37617 - DNA, 50 bp, synthetic construct
  source 1..50: mol_type = other DNA
agcgtgttgaagatatttgttagatatttaacatctgaagctaacactct

SEQ ID NO: 37618 - DNA, 50 bp, synthetic construct
  source 1..50: mol_type = other DNA
acacggacataaataccgacacgtttttgtgtgtaactttaaatgtaaag

SEQ ID NO: 37619 - DNA, 50 bp, synthetic construct
  source 1..50: mol_type = other DNA
aaaagtgataaaaatgaaacgaagttaagtattccatttttattacttat

SEQ ID NO: 37620 - DNA, 50 bp, synthetic construct
  source 1..50: mol_type = other DNA
tcgacctaataactggatatttttttggttatcagcgattattaatatta

SEQ ID NO: 37621 - DNA, 50 bp, synthetic construct
  source 1..50: mol_type = other DNA
tcctatagaaattagagagggacgattagtttcctttaattttgatgttt

SEQ ID NO: 37622 - DNA, 50 bp, synthetic construct
  source 1..50: mol_type = other DNA
cgggacgcagcggtgatgttcgtgcacacggttcgaccctcgcgctccca

SEQ ID NO: 37623 - DNA, 50 bp, synthetic construct
  source 1..50: mol_type = other DNA
caaaagaaaacccacaactctactgtaatctccatctggaatttcaattg

SEQ ID NO: 37624 - DNA, 50 bp, synthetic construct
  source 1..50: mol_type = other DNA
attctccccttttcataacatatacataatctcggctaaacggggagaaa

SEQ ID NO: 37625 - DNA, 50 bp, synthetic construct
  source 1..50: mol_type = other DNA
agcatcggctattcgacttgtcactggtgccatgtaatggcccacgaatc

SEQ ID NO: 37626 - DNA, 50 bp, synthetic construct
  source 1..50: mol_type = other DNA
taatagattgccagtatatccgggggtgattatataatgcagaagtatgc

SEQ ID NO: 37627 - DNA, 50 bp, synthetic construct
  source 1..50: mol_type = other DNA
ccgcaccgcaagagccgcagcgcagtcgcgcaagggcccgcacgatgcgg

SEQ ID NO: 37628 - DNA, 50 bp, synthetic construct
  source 1..50: mol_type = other DNA
tggcaaggtgcaatatgttcggatatgattgtaacacttgtcgcttgaga

SEQ ID NO: 37629 - DNA, 50 bp, synthetic construct
  source 1..50: mol_type = other DNA
tatttttattttgacgactgtagaaacatatttccgtcgatgaaaaagta

SEQ ID NO: 37630 - DNA, 50 bp, synthetic construct
  source 1..50: mol_type = other DNA
tttttagaagtaatcgtgcaaaattctttttgcttaatagcctctacaac

SEQ ID NO: 37631 - DNA, 50 bp, synthetic construct
  source 1..50: mol_type = other DNA
aaaattttgctatttaaaaaaagttttatttttgtatattccttatcatt

SEQ ID NO: 37632 - DNA, 50 bp, synthetic construct
  source 1..50: mol_type = other DNA
tggcgatggccagatcgaaacggcctcccgtttcgtcagcattattgtgg

SEQ ID NO: 37633 - DNA, 50 bp, synthetic construct
  source 1..50: mol_type = other DNA
attgctaattaaatgtacaatagaattttataaactattttattaaataa

SEQ ID NO: 37634 - DNA, 50 bp, synthetic construct
  source 1..50: mol_type = other DNA
attttataccttattttgcatatttaaataagaagattatattataatgt

SEQ ID NO: 37635 - DNA, 50 bp, synthetic construct
  source 1..50: mol_type = other DNA
agttagtgaaaatgaaaaagctgaattgtttttgagaaatatcaactact

SEQ ID NO: 37636 - DNA, 50 bp, synthetic construct
  source 1..50: mol_type = other DNA
cttatctacattatttttttctaaatggagaaactaatagaatagatatt

SEQ ID NO: 37637 - DNA, 50 bp, synthetic construct
  source 1..50: mol_type = other DNA
ataacatgggcagaaatggacttgataaaatacatctcgttccactttat

SEQ ID NO: 37638 - DNA, 50 bp, synthetic construct
  source 1..50: mol_type = other DNA
aaccttaccaggaacaggtaattcgacaattacctctggcagacgcagga

SEQ ID NO: 37639 - DNA, 50 bp, synthetic construct
  source 1..50: mol_type = other DNA
aaataatataacattcggctagctttaatgggagagctgttagaatatca

SEQ ID NO: 37640 - DNA, 50 bp, synthetic construct
  source 1..50: mol_type = other DNA
aaagcttaaaaagtactcagtaaatcagagatgagttcttttttacggtt

SEQ ID NO: 37641 - DNA, 50 bp, synthetic construct
  source 1..50: mol_type = other DNA
ccgccgcgcccgccgcatcaaccgcgagtcaccttcggcggagggggcgg

SEQ ID NO: 37642 - DNA, 50 bp, synthetic construct
  source 1..50: mol_type = other DNA
gctgctataggcgcggcctgcccggccattcttgctgcgcgagcgacagc

SEQ ID NO: 37643 - DNA, 50 bp, synthetic construct
  source 1..50: mol_type = other DNA
cgttcctcctacagcgggaggcacgacgatgccgtcacgcaggaaatcga

SEQ ID NO: 37644 - DNA, 50 bp, synthetic construct
  source 1..50: mol_type = other DNA
caggccaaaggaacaaccttaaaaagttttaagatgattccgatgacaca

SEQ ID NO: 37645 - DNA, 50 bp, synthetic construct
  source 1..50: mol_type = other DNA
ggtgtcgggccgcaagaaatacagcgctgaagcgcttgaggaagtcggcg

SEQ ID NO: 37646 - DNA, 50 bp, synthetic construct
  source 1..50: mol_type = other DNA
ccctgggactcggtgtgggtctacgaccactttcacaccgtgccgatgcc

SEQ ID NO: 37647 - DNA, 50 bp, synthetic construct
  source 1..50: mol_type = other DNA
tgggctcatcccagatcgtatagcgcggtacgccgccccgagaaggcgca

SEQ ID NO: 37648 - DNA, 50 bp, synthetic construct
  source 1..50: mol_type = other DNA
attatatttaactttcctctgtattaattgaagttaaaaataacaatatg

SEQ ID NO: 37649 - DNA, 50 bp, synthetic construct
  source 1..50: mol_type = other DNA
aaccgcgtcttctcggcgcagagcatgatcgtcgccgaggccgagcgcat

SEQ ID NO: 37650 - DNA, 50 bp, synthetic construct
  source 1..50: mol_type = other DNA
ggacttccgtcgagatgtcatgagcgctgacaagatgtggaccgaggcac

SEQ ID NO: 37651 - DNA, 50 bp, synthetic construct
  source 1..50: mol_type = other DNA
aactttttcggatcaagctatgaaggacgcaaagagggaactaaacactt

SEQ ID NO: 37652 - DNA, 50 bp, synthetic construct
  source 1..50: mol_type = other DNA
ctaaagattggcccgataagtatgatcggggtttccccgccaagctcgcc

SEQ ID NO: 37653 - DNA, 50 bp, synthetic construct
  source 1..50: mol_type = other DNA
agggattgggaagaatggtcggtcatgaccgaaacttcttccctctggct

SEQ ID NO: 37654 - DNA, 50 bp, synthetic construct
  source 1..50: mol_type = other DNA
tcattcccgtattagccggtctaggaccagatttacagcaacgccaatca

SEQ ID NO: 37655 - DNA, 50 bp, synthetic construct
  source 1..50: mol_type = other DNA
gcgaaaatatgaaacggataaggagtaacataggaattttattttttctc

SEQ ID NO: 37656 - DNA, 50 bp, synthetic construct
  source 1..50: mol_type = other DNA
atccgccagttgcatgacggcctcggcaggccgcgatggagaaggccggg

SEQ ID NO: 37657 - DNA, 50 bp, synthetic construct
  source 1..50: mol_type = other DNA
accccaacggcgactgagcacaagatcttggcgagccgggccggtgagag

SEQ ID NO: 37658 - DNA, 50 bp, synthetic construct
  source 1..50: mol_type = other DNA
ggagcggcgcatccgggcaaagcaattactcagccccgattgccttattc

SEQ ID NO: 37659 - DNA, 50 bp, synthetic construct
  source 1..50: mol_type = other DNA
attttagcagatacgtcggtcagtttactatatctgttaaatgctaaacc

SEQ ID NO: 37660 - DNA, 50 bp, synthetic construct
  source 1..50: mol_type = other DNA
cggggcggcactgtagggaagtcatgctggttggtgacagaggctcagcg

SEQ ID NO: 37661 - DNA, 50 bp, synthetic construct
  source 1..50: mol_type = other DNA
tcgggcgttcgaatcgctccgggtgcgcccggagccggcgcgcacggagg

SEQ ID NO: 37662 - DNA, 50 bp, synthetic construct
  source 1..50: mol_type = other DNA
aaaattcaaacctattctttcagaattatgaagatattatatataatgtt

SEQ ID NO: 37663 - DNA, 50 bp, synthetic construct
  source 1..50: mol_type = other DNA
gattattaaagttccttgtaagtttaaatttataaataacgtgataaatc

SEQ ID NO: 37664 - DNA, 50 bp, synthetic construct
  source 1..50: mol_type = other DNA
actttaaaaagagtcatggatatgaacatatcgatggtaaaaatcgtagg

SEQ ID NO: 37665 - DNA, 50 bp, synthetic construct
  source 1..50: mol_type = other DNA
cctcagctcatgccttagcagaatatattaactaaaggataataatgaac

SEQ ID NO: 37666 - DNA, 50 bp, synthetic construct
  source 1..50: mol_type = other DNA
gagattttaaaacgtgatcagtgcagttttgcatcacgtttattaatatc

SEQ ID NO: 37667 - DNA, 50 bp, synthetic construct
  source 1..50: mol_type = other DNA
cactgcggccccatcagcagcaatgaacagtcagtcgtaccaccgccgat

SEQ ID NO: 37668 - DNA, 50 bp, synthetic construct
  source 1..50: mol_type = other DNA
gataatcatacaaatgtgttatgcttgctatcaatattagtttgattagc

SEQ ID NO: 37669 - DNA, 50 bp, synthetic construct
  source 1..50: mol_type = other DNA
tggtgaggtcaaaaagtatggttaaaacggcatacgatttgaaacaacct

SEQ ID NO: 37670 - DNA, 50 bp, synthetic construct
  source 1..50: mol_type = other DNA
aaaggaataaacttaaaaggagatttatgaccatttatgcctatacacga

SEQ ID NO: 37671 - DNA, 50 bp, synthetic construct
  source 1..50: mol_type = other DNA
gtgattctatatatttcatactgcaattaatattaaatatattttatgta

SEQ ID NO: 37672 - DNA, 50 bp, synthetic construct
  source 1..50: mol_type = other DNA
atatgtttactatattgttgtactatagtcttattatataatattaattt

SEQ ID NO: 37673 - DNA, 50 bp, synthetic construct
  source 1..50: mol_type = other DNA
gttatcagtttgatgatagcagttattctatatatctatcaaaaatgtaa

SEQ ID NO: 37674 - DNA, 50 bp, synthetic construct
  source 1..50: mol_type = other DNA
gctagaccttttaatctttttgtaattacgacaggcgtatttaatctatc

SEQ ID NO: 37675 - DNA, 50 bp, synthetic construct
  source 1..50: mol_type = other DNA
atcaatgataaatccttaaaaagttaactgataagatatttttacaagat

SEQ ID NO: 37676 - DNA, 50 bp, synthetic construct
  source 1..50: mol_type = other DNA
caggcatgcacaacattattcactataaaaaacttccaatcgcatggtat

SEQ ID NO: 37677 - DNA, 50 bp, synthetic construct
  source 1..50: mol_type = other DNA
acgccgccgggagcctcggccgcctcgtcgaggaagagcagcccgccgtg

SEQ ID NO: 37678 - DNA, 50 bp, synthetic construct
  source 1..50: mol_type = other DNA
tgtaaaacatcgataagagtgatttcgttgccttctttatctgtaccaat

SEQ ID NO: 37679 - DNA, 50 bp, synthetic construct
  source 1..50: mol_type = other DNA
tacctattgaagttgccaaatgtgtttggtgttggcatagagaaccggta

SEQ ID NO: 37680 - DNA, 50 bp, synthetic construct
  source 1..50: mol_type = other DNA
tgctttatatttttctagtagattctaatataggcgaaaaagatttacgg

SEQ ID NO: 37681 - DNA, 50 bp, synthetic construct
  source 1..50: mol_type = other DNA
ctgtaagcgtggttgcgatatatcgcgaacccacccagccgcgctgacct

SEQ ID NO: 37682 - DNA, 50 bp, synthetic construct
  source 1..50: mol_type = other DNA
gccataacgtttataagttcatcttttaacatttgattaacatttatggt

SEQ ID NO: 37683 - DNA, 50 bp, synthetic construct
  source 1..50: mol_type = other DNA
ctacacaaaagactgatgacccagagtggtgggatataatttttgtttaa

SEQ ID NO: 37684 - DNA, 50 bp, synthetic construct
  source 1..50: mol_type = other DNA
atatggaagaaattgtggcccttagtgtaggtatgttcctggaaccctcg

SEQ ID NO: 37685 - DNA, 50 bp, synthetic construct
  source 1..50: mol_type = other DNA
tttgtaaagagcctaacgactctttacggttgaagctgtcgctttataag

SEQ ID NO: 37686 - DNA, 50 bp, synthetic construct
  source 1..50: mol_type = other DNA
tcaaaaaggctccataatctctacagttaattattaccgagagtttatct

SEQ ID NO: 37687 - DNA, 50 bp, synthetic construct
  source 1..50: mol_type = other DNA
cttttcattataggtcatatgggactaatttaatgaatgataaaaggata

SEQ ID NO: 37688 - DNA, 50 bp, synthetic construct
  source 1..50: mol_type = other DNA
agcgaccgcctcgcccaaatcgaggcgacgatctggtcgaacgcctcgtc

SEQ ID NO: 37689 - DNA, 50 bp, synthetic construct
  source 1..50: mol_type = other DNA
ccatgaactctgagctaaatatgcgcgcatccttcgcaaccagatcgtgc

SEQ ID NO: 37690 - DNA, 50 bp, synthetic construct
  source 1..50: mol_type = other DNA
aggcactaggcaatactacacacacatatgtgtagcataccatgcaacca

SEQ ID NO: 37691 - DNA, 50 bp, synthetic construct
  source 1..50: mol_type = other DNA
gtgcgtccgagcactgcggactgcaatcagtgtgcattccctacgtgcag

SEQ ID NO: 37692 - DNA, 50 bp, synthetic construct
  source 1..50: mol_type = other DNA
gcgaggcggcgggcaaaagcgcaactctccgccattgcccgccgctttcc

SEQ ID NO: 37693 - DNA, 50 bp, synthetic construct
  source 1..50: mol_type = other DNA
ccgcgcaaaggcgcttgacgaggtggcggctgtcaaggaagctcgcgcgc

SEQ ID NO: 37694 - DNA, 50 bp, synthetic construct
  source 1..50: mol_type = other DNA
taacttattgaaatatatagagaatcttcggactatgcttatctaagtgg

SEQ ID NO: 37695 - DNA, 50 bp, synthetic construct
  source 1..50: mol_type = other DNA
tatagtactgaactttgatagagaggagaagatgcaacggacttactacc

SEQ ID NO: 37696 - DNA, 50 bp, synthetic construct
  source 1..50: mol_type = other DNA
gaaaagctgaaaggtgtttttgggcgcgatgaaaagcgtgtcgcgattct

SEQ ID NO: 37697 - DNA, 50 bp, synthetic construct
  source 1..50: mol_type = other DNA
tcatttttataaaaattttcagactcttcggactatgcttatctaagtgg

SEQ ID NO: 37698 - DNA, 50 bp, synthetic construct
  source 1..50: mol_type = other DNA
gcgtattggaatttggagaaaaattaattttattgctttatcactgaact

SEQ ID NO: 37699 - DNA, 50 bp, synthetic construct
  source 1..50: mol_type = other DNA
ttttgtattttaccagttcggtcatatgtttgatatggatgtttacaaac

SEQ ID NO: 37700 - DNA, 50 bp, synthetic construct
  source 1..50: mol_type = other DNA
tccacgcaaagcgtattgatgtttttaaacgcatatttctttttcgtcat

SEQ ID NO: 37701 - DNA, 50 bp, synthetic construct
  source 1..50: mol_type = other DNA
ataaataaaaaattcaatttcatcttgccgactggacatttttttcgtgc

SEQ ID NO: 37702 - DNA, 50 bp, synthetic construct
  source 1..50: mol_type = other DNA
tgcttttagaaataactttattcttgtaaatacagactcaaataaatata

SEQ ID NO: 37703 - DNA, 50 bp, synthetic construct
  source 1..50: mol_type = other DNA
atatggtagggcttctgtatcaagtaagctttgaagctacccgaccagcg

SEQ ID NO: 37704 - DNA, 50 bp, synthetic construct
  source 1..50: mol_type = other DNA
aatgtcctgcaacgctctttctccgaggaacaatgaatcttttcgaaatt

SEQ ID NO: 37705 - DNA, 50 bp, synthetic construct
  source 1..50: mol_type = other DNA
aaactcagatttcatacaggcatcttttcctctgtatgtgatctgtcgga

SEQ ID NO: 37706 - DNA, 50 bp, synthetic construct
  source 1..50: mol_type = other DNA
tgaatatctattcgggttaacggtatgctacaatgccgaatagctacaat

SEQ ID NO: 37707 - DNA, 50 bp, synthetic construct
  source 1..50: mol_type = other DNA
acaggcatttacatttttcttttttaaaatagcaagtacttcatttatat

SEQ ID NO: 37708 - DNA, 50 bp, synthetic construct
  source 1..50: mol_type = other DNA
gatttcgcagatcaaaaaatgcagatcacgtcctttggagatgctaaaaa

SEQ ID NO: 37709 - DNA, 50 bp, synthetic construct
  source 1..50: mol_type = other DNA
gaaaaaaccaacgtcaccaatgctaagaccgataaagattcgcttttttg

SEQ ID NO: 37710 - DNA, 50 bp, synthetic construct
  source 1..50: mol_type = other DNA
ccctgtttgtcgcgcggggatgcgagaatatccccaggcactcaacaggg

SEQ ID NO: 37711 - DNA, 50 bp, synthetic construct
  source 1..50: mol_type = other DNA
ccagttattcgctcctgatgaagatatcttgaatatacaacaataattgt

SEQ ID NO: 37712 - DNA, 50 bp, synthetic construct
  source 1..50: mol_type = other DNA
taaaaacgatcgattggggtgtaaagataatcctcaccgcttcgctttgc

SEQ ID NO: 37713 - DNA, 50 bp, synthetic construct
  source 1..50: mol_type = other DNA
tagagaggattacccctaagctgactttgcagcagcctgaaccaaagcta

SEQ ID NO: 37714 - DNA, 50 bp, synthetic construct
  source 1..50: mol_type = other DNA
atttttaaattcaagatagaaacgaatgtttcgcaaaataatttataaaa

SEQ ID NO: 37715 - DNA, 50 bp, synthetic construct
  source 1..50: mol_type = other DNA
aaattaaggtcatcatcaaataatccttgatttgactgtacgcgtatgct

SEQ ID NO: 37716 - DNA, 50 bp, synthetic construct
  source 1..50: mol_type = other DNA
tttagcagcttgagaaatatttttaaagacatatttatggagctatcgtg

SEQ ID NO: 37717 - DNA, 50 bp, synthetic construct
  source 1..50: mol_type = other DNA
cttcgcaaatccgcccctgcgccagtgggctaggggacctggcggcgacc

SEQ ID NO: 37718 - DNA, 50 bp, synthetic construct
  source 1..50: mol_type = other DNA
gaacgatcggtcaaccgcgtgatcctcgacagccgccccgtgcacagcgc

SEQ ID NO: 37719 - DNA, 50 bp, synthetic construct
  source 1..50: mol_type = other DNA
attttcagccgccatgctgcttcagctgacaaagcatgggtgcgagccga

SEQ ID NO: 37720 - DNA, 50 bp, synthetic construct
  source 1..50: mol_type = other DNA
cttctgcgtgatggaatcttttgcgtgaaacaaaggacggcaggcatggc

SEQ ID NO: 37721 - DNA, 50 bp, synthetic construct
  source 1..50: mol_type = other DNA
atggtattttttatagttatagtaattatttatcataaacataatatgct

SEQ ID NO: 37722 - DNA, 50 bp, synthetic construct
  source 1..50: mol_type = other DNA
gcatggtgcagaagttttaaatgagataattttcttctgcttgtgcatcg

SEQ ID NO: 37723 - DNA, 50 bp, synthetic construct
  source 1..50: mol_type = other DNA
taatataaaaaaacaaaatacaacaacatttttttccattttcaatatag

SEQ ID NO: 37724 - DNA, 50 bp, synthetic construct
  source 1..50: mol_type = other DNA
tccgcgctttggcgaaagctgacgcgcttcggctttgtgtcaagcgcatg

SEQ ID NO: 37725 - DNA, 50 bp, synthetic construct
  source 1..50: mol_type = other DNA
cgaccggaagagggctgatctgcccgggcatctgggcgatcccgcgctcg

SEQ ID NO: 37726 - DNA, 50 bp, synthetic construct
  source 1..50: mol_type = other DNA
tttcgctcgaggctccgctccggcacgccggagcggaggctctagggtgg

SEQ ID NO: 37727 - DNA, 50 bp, synthetic construct
  source 1..50: mol_type = other DNA
ctgtttccaggtttaagtaattaattgtagcaaaaaaaacaaaaaaacgc

SEQ ID NO: 37728 - DNA, 50 bp, synthetic construct
  source 1..50: mol_type = other DNA
acggatgtcggcgggtcgggatgtcgtggtcgccaccacccggcatccgt

SEQ ID NO: 37729 - DNA, 50 bp, synthetic construct
  source 1..50: mol_type = other DNA
ccaaagccgctgtaggcttcttttaaacacccctccatcaggtgtcgtgt

SEQ ID NO: 37730 - DNA, 50 bp, synthetic construct
  source 1..50: mol_type = other DNA
ccgccacccgcttcaaagcggtagcactaacggggtggtgcgggtttcat

SEQ ID NO: 37731 - DNA, 50 bp, synthetic construct
  source 1..50: mol_type = other DNA
ccaagcgcgtaaaccagcgtaaaggtgttttcgccgcgttctcagctagg

SEQ ID NO: 37732 - DNA, 50 bp, synthetic construct
  source 1..50: mol_type = other DNA
ttgtggtggcggcgaggggtttgccggtgatccattctttgccaacaacc

SEQ ID NO: 37733 - DNA, 50 bp, synthetic construct
  source 1..50: mol_type = other DNA
taatgagcaagcttcaaaggcgcttaagtgtctggtgaccttcatcatta

SEQ ID NO: 37734 - DNA, 50 bp, synthetic construct
  source 1..50: mol_type = other DNA
ttttacttcttctatctacctacttttctatgtagatacaaaaaaagatg

SEQ ID NO: 37735 - DNA, 50 bp, synthetic construct
  source 1..50: mol_type = other DNA
tggattgatgttttccaatcattgatcaatgtccgtatttgctgtatcca

SEQ ID NO: 37736 - DNA, 50 bp, synthetic construct
  source 1..50: mol_type = other DNA
tcaagtttatctaaaaaggatttatttttatataagataaatgtgcttga

SEQ ID NO: 37737 - DNA, 50 bp, synthetic construct
  source 1..50: mol_type = other DNA
ctgtcaccagatagataattttcatattgaatttatccttctaccatcac

SEQ ID NO: 37738 - DNA, 50 bp, synthetic construct
  source 1..50: mol_type = other DNA
acactaaataattttaagtttgtaaaaacaattttaatattaatttataa

SEQ ID NO: 37739 - DNA, 50 bp, synthetic construct
  source 1..50: mol_type = other DNA
tattataccacaattatattaattttacaagcaattattgtattttagtt

SEQ ID NO: 37740 - DNA, 50 bp, synthetic construct
  source 1..50: mol_type = other DNA
catcacgatggagaacgctcatgaaagtatcagtgttcagtatgcagatg

SEQ ID NO: 37741 - DNA, 50 bp, synthetic construct
  source 1..50: mol_type = other DNA
ggcgatttgaaatttaacggcagcgcgctgatctcatatttcgtggttgt

SEQ ID NO: 37742 - DNA, 50 bp, synthetic construct
  source 1..50: mol_type = other DNA
gacagcctcatgacaatttggaactccaatttaactgtcataagtgtcga

SEQ ID NO: 37743 - DNA, 50 bp, synthetic construct
  source 1..50: mol_type = other DNA
ctgatcaatcaataccatccgaagggaatcgggaggtctgaatggtgaag

SEQ ID NO: 37744 - DNA, 50 bp, synthetic construct
  source 1..50: mol_type = other DNA
tttttagctgatgagcgtgggataaatcattcccgctcatcagcaaaagg

SEQ ID NO: 37745 - DNA, 50 bp, synthetic construct
  source 1..50: mol_type = other DNA
acttttatcgtgacatcatcaaacaagtcaccagtatccacattaggagt

SEQ ID NO: 37746 - DNA, 50 bp, synthetic construct
  source 1..50: mol_type = other DNA
tagggcgtggccgccatcagacgcgattgtcagtattgcgcagcggtttt

SEQ ID NO: 37747 - DNA, 50 bp, synthetic construct
  source 1..50: mol_type = other DNA
acaagaagggcacttattgattggtaccaaacgttaatacgtctgaaggt

SEQ ID NO: 37748 - DNA, 50 bp, synthetic construct
  source 1..50: mol_type = other DNA
atcgatgtcgcgctcttcatagaagctgcgcgtgcgagcgccctggcgag

SEQ ID NO: 37749 - DNA, 50 bp, synthetic construct
  source 1..50: mol_type = other DNA
catgaattccaccaaattgatcaattgcattcaattcaaacgatgtttct

SEQ ID NO: 37750 - DNA, 50 bp, synthetic construct
  source 1..50: mol_type = other DNA
acttttattaacattgtgctactgactatttttgcaatgtcattaaatta

SEQ ID NO: 37751 - DNA, 50 bp, synthetic construct
  source 1..50: mol_type = other DNA
ccctcgtcatcggcggtgtcttgtggtccatacaccgcggggttggatcg

SEQ ID NO: 37752 - DNA, 50 bp, synthetic construct
  source 1..50: mol_type = other DNA
caagcaaccaaaataagagtggcagcgaggagtcttatttaagttttgca

SEQ ID NO: 37753 - DNA, 50 bp, synthetic construct
  source 1..50: mol_type = other DNA
gcaatgaacagttatgttatgatgtacattcttgcatgactacgaacagt

SEQ ID NO: 37754 - DNA, 50 bp, synthetic construct
  source 1..50: mol_type = other DNA
tgctggtacaggtaatgttttgaagaccttcagcattaagagttctgaca

SEQ ID NO: 37755 - DNA, 50 bp, synthetic construct
  source 1..50: mol_type = other DNA
ttatcaggtcgaaatagttggtctgattcattacttgaatctgttgataa

SEQ ID NO: 37756 - DNA, 50 bp, synthetic construct
  source 1..50: mol_type = other DNA
acgccattgatatactccacattagctaatcttcatagtaaattgggtaa

SEQ ID NO: 37757 - DNA, 50 bp, synthetic construct
  source 1..50: mol_type = other DNA
gccgttccatgattactttggatcatgaagaacaggcttccagttatgaa

SEQ ID NO: 37758 - DNA, 50 bp, synthetic construct
  source 1..50: mol_type = other DNA
atccgatgatgaggtcatatttcaacgttcgcatgaccgtatcatcaaag

SEQ ID NO: 37759 - DNA, 50 bp, synthetic construct
  source 1..50: mol_type = other DNA
tcttgcgtttgaagcgaaaatgcgcgacgagctgccggagttcagcaaga

SEQ ID NO: 37760 - DNA, 50 bp, synthetic construct
  source 1..50: mol_type = other DNA
tctttgctgcaaggttttccatcctctaagggggacattggcagggaaaa

SEQ ID NO: 37761 - DNA, 50 bp, synthetic construct
  source 1..50: mol_type = other DNA
aatggcggtttgcggggcattggcgctccgatgccgcccacggcgccacg

SEQ ID NO: 37762 - DNA, 50 bp, synthetic construct
  source 1..50: mol_type = other DNA
ctaactacatcaaatgaatacagttagaattattattttgacgtacttat

SEQ ID NO: 37763 - DNA, 50 bp, synthetic construct
  source 1..50: mol_type = other DNA
gccgaggtcgtcgataacaagcggttgagctcctcgacgaccagaccggc

SEQ ID NO: 37764 - DNA, 50 bp, synthetic construct
  source 1..50: mol_type = other DNA
ccaacaaggtgacgacaaagaacgaaatatctttgtagtcaccctgttgg

SEQ ID NO: 37765 - DNA, 50 bp, synthetic construct
  source 1..50: mol_type = other DNA
aaacccgttgatcgagttcgtgaaggtcggcgaacttgacggtctggttg

SEQ ID NO: 37766 - DNA, 50 bp, synthetic construct
  source 1..50: mol_type = other DNA
ttttataatgagaaatcaaataacttgatcagctcatggatattgcaaaa

SEQ ID NO: 37767 - DNA, 50 bp, synthetic construct
  source 1..50: mol_type = other DNA
ccatacaaaaaaactaaaattttttaatccatattagaaatatttaaaag

SEQ ID NO: 37768 - DNA, 50 bp, synthetic construct
  source 1..50: mol_type = other DNA
aactgttcgaggaggcaattcagaatactgcttttttgcagcgataactt

SEQ ID NO: 37769 - DNA, 50 bp, synthetic construct
  source 1..50: mol_type = other DNA
cgtccatcggcaagagccgcacctgcaggtgctttccctgccgctggcga

SEQ ID NO: 37770 - DNA, 50 bp, synthetic construct
  source 1..50: mol_type = other DNA
atctgataacagaagaggagaggcaaccctcttatattcccggaggagag

SEQ ID NO: 37771 - DNA, 50 bp, synthetic construct
  source 1..50: mol_type = other DNA
atgcgaggcatccttgtggaataggggccatagtcagcggcagacggaat

SEQ ID NO: 37772 - DNA, 50 bp, synthetic construct
  source 1..50: mol_type = other DNA
agacggtttttacatctatgccgtttagcgtccatgagtaaccgccgggc

SEQ ID NO: 37773 - DNA, 50 bp, synthetic construct
  source 1..50: mol_type = other DNA
gggatgaggaatcggctggccagcctcctgctttacgccttatccttcct

SEQ ID NO: 37774 - DNA, 50 bp, synthetic construct
  source 1..50: mol_type = other DNA
ggcggtactcctccaaccggcgggcgccgacatctggtagtagtacggct

SEQ ID NO: 37775 - DNA, 50 bp, synthetic construct
  source 1..50: mol_type = other DNA
gaccgggggaacaacaggcggttgagaaacatcctgttcgggtatcagta

SEQ ID NO: 37776 - DNA, 50 bp, synthetic construct
  source 1..50: mol_type = other DNA
gattcgggttctttatgcgcacggggatacgcacacagatttgacgaaaa

SEQ ID NO: 37777 - DNA, 50 bp, synthetic construct
  source 1..50: mol_type = other DNA
atggagcggctgaccctcacggagttacgatttccatttggccgctgaaa

SEQ ID NO: 37778 - DNA, 50 bp, synthetic construct
  source 1..50: mol_type = other DNA
acctagcccctatcgttataatacacgatttataacgagatgaaagatcg

SEQ ID NO: 37779 - DNA, 50 bp, synthetic construct
  source 1..50: mol_type = other DNA
tttaaacggtttaaagaaacaaggtatcaccagcttttttgatgttttca

SEQ ID NO: 37780 - DNA, 50 bp, synthetic construct
  source 1..50: mol_type = other DNA
ttttaaataattttgttccaaataaatccgtgttccaaaattatttttaa

SEQ ID NO: 37781 - DNA, 50 bp, synthetic construct
  source 1..50: mol_type = other DNA
tccttggcctcattcaacgcagcgtccggaagacccaggatcacaaaggc

SEQ ID NO: 37782 - DNA, 50 bp, synthetic construct
  source 1..50: mol_type = other DNA
accatgacaatgtgttagtgtaaatatcttgcttatgggaccgccagggg

SEQ ID NO: 37783 - DNA, 50 bp, synthetic construct
  source 1..50: mol_type = other DNA
tttttcaaggttctttgctaattgataaaatcagcgggcaccttgcggtg

SEQ ID NO: 37784 - DNA, 50 bp, synthetic construct
  source 1..50: mol_type = other DNA
ggggctagcctttgccggcgcagcccccagcgcgaagaaacgccagacat

SEQ ID NO: 37785 - DNA, 50 bp, synthetic construct
  source 1..50: mol_type = other DNA
aatagtagaataagatatgattcttttgatagttgaacaattatactata

SEQ ID NO: 37786 - DNA, 50 bp, synthetic construct
  source 1..50: mol_type = other DNA
caaataatacacagcctaaaattgctcacctttagtttttttattatttc

SEQ ID NO: 37787 - DNA, 50 bp, synthetic construct
  source 1..50: mol_type = other DNA
ataatacgtatagttgaattttggggcgaaaaaacagcggaaggaattaa

SEQ ID NO: 37788 - DNA, 50 bp, synthetic construct
  source 1..50: mol_type = other DNA
atggtatgtctggtaataaatggtaacggagctgctgacagttatattat

SEQ ID NO: 37789 - DNA, 50 bp, synthetic construct
  source 1..50: mol_type = other DNA
ttctcgccgctgcggacgcagcggccacgcgctgctgctggccgccggaa

SEQ ID NO: 37790 - DNA, 50 bp, synthetic construct
  source 1..50: mol_type = other DNA
tgagcctgatcctcgatcacgtcgaagtacgagatcgaagaaaagtcagg

SEQ ID NO: 37791 - DNA, 50 bp, synthetic construct
  source 1..50: mol_type = other DNA
actactacattttaaaacaaaaatcaggattttacaacaaatgggcgagt

SEQ ID NO: 37792 - DNA, 50 bp, synthetic construct
  source 1..50: mol_type = other DNA
agaagttgggaaatttcttatgaatattcgagagaaatgacgcattttct

SEQ ID NO: 37793 - DNA, 50 bp, synthetic construct
  source 1..50: mol_type = other DNA
tcttacggtaaccaataaccaactttagttggttattggttactgtaaca

SEQ ID NO: 37794 - DNA, 50 bp, synthetic construct
  source 1..50: mol_type = other DNA
gtgaagaaaagtatccgaaacgttataacatttcattgacttttatttat

SEQ ID NO: 37795 - DNA, 50 bp, synthetic construct
  source 1..50: mol_type = other DNA
gaaaagtaacagaaaaaatgttactttattttatttttatatttattttc

SEQ ID NO: 37796 - DNA, 50 bp, synthetic construct
  source 1..50: mol_type = other DNA
gagcaagaaaaaaagtcttgtaaaatttatatcaatcatttttcctttca

SEQ ID NO: 37797 - DNA, 50 bp, synthetic construct
  source 1..50: mol_type = other DNA
aaaatttaaaagctgttttcgccttataagcataacacatttgtatgatt

SEQ ID NO: 37798 - DNA, 50 bp, synthetic construct
  source 1..50: mol_type = other DNA
atcgtctgagttaggttgtccatttcgtgggtcgcgtgcaacctgacgca

SEQ ID NO: 37799 - DNA, 50 bp, synthetic construct
  source 1..50: mol_type = other DNA
ggggtggagcagtctggtagctcgtccggtggtgcagagatttgcacgta

SEQ ID NO: 37800 - DNA, 50 bp, synthetic construct
  source 1..50: mol_type = other DNA
catagatattgcttcggagctattaagcttgctcattagcggcatctgag

SEQ ID NO: 37801 - DNA, 50 bp, synthetic construct
  source 1..50: mol_type = other DNA
attatcttgttattaaaatatatccttttatatagttataacaatcttca

SEQ ID NO: 37802 - DNA, 50 bp, synthetic construct
  source 1..50: mol_type = other DNA
tatgaaatatcataactctttaaaaattcaaagctttataattattcacg

SEQ ID NO: 37803 - DNA, 50 bp, synthetic construct
  source 1..50: mol_type = other DNA
cacataccccgcacttgacaattcctgtattgtagagtagggggaacaaa

SEQ ID NO: 37804 - DNA, 50 bp, synthetic construct
  source 1..50: mol_type = other DNA
aggagaatctctattgatactcctttaggaaattcgaagtggattctcct

SEQ ID NO: 37805 - DNA, 50 bp, synthetic construct
  source 1..50: mol_type = other DNA
cattatgctgtacgttattgtgcagccaagcagcaacaattaccatagga

SEQ ID NO: 37806 - DNA, 50 bp, synthetic construct
  source 1..50: mol_type = other DNA
aatataaataacttattaagctcctttttctttttcctccacatcatatg

SEQ ID NO: 37807 - DNA, 50 bp, synthetic construct
  source 1..50: mol_type = other DNA
tttgcattgcgtttgttatgcataattactcatatcaataaaatgtgaat

SEQ ID NO: 37808 - DNA, 50 bp, synthetic construct
  source 1..50: mol_type = other DNA
atcaccccggtgaggagcagggcggctgggggcctcccagagggggtgtc

SEQ ID NO: 37809 - DNA, 50 bp, synthetic construct
  source 1..50: mol_type = other DNA
gggggacataagcgatacaaatttttattttggtatgtgtaatgtattat

SEQ ID NO: 37810 - DNA, 50 bp, synthetic construct
  source 1..50: mol_type = other DNA
aaacgtacagtttgcgatttccccaaaagctaacgagtaactgtggattg

SEQ ID NO: 37811 - DNA, 50 bp, synthetic construct
  source 1..50: mol_type = other DNA
cgtctttagggcgttctttttcatatatgattaagaatgccttaaagcat

SEQ ID NO: 37812 - DNA, 50 bp, synthetic construct
  source 1..50: mol_type = other DNA
tgtgtcgaatgacctctccaatcattttgtcggacctgtccgataccgac

SEQ ID NO: 37813 - DNA, 50 bp, synthetic construct
  source 1..50: mol_type = other DNA
attcaaaatattcagaatgtagttcaaactacattcttatcatcacgact

SEQ ID NO: 37814 - DNA, 50 bp, synthetic construct
  source 1..50: mol_type = other DNA
cgtgaaaccattgcagaacgtattcgaatccattccagaaacacatacaa

SEQ ID NO: 37815 - DNA, 50 bp, synthetic construct
  source 1..50: mol_type = other DNA
ttcaaagattgacttcatagaaatacggaaggatgaaagaatcctttgat

SEQ ID NO: 37816 - DNA, 50 bp, synthetic construct
  source 1..50: mol_type = other DNA
cgaacaaaagctctgcgtacagccaaatattcatccaaaagttgtgttaa

SEQ ID NO: 37817 - DNA, 50 bp, synthetic construct
  source 1..50: mol_type = other DNA
cttaatctatatttattattttaccatttgtataagtaatgcagattaca

SEQ ID NO: 37818 - DNA, 50 bp, synthetic construct
  source 1..50: mol_type = other DNA
gcttcggcgcggctttccagtacccggcgcggcggccgccgcgtgagtgc

SEQ ID NO: 37819 - DNA, 50 bp, synthetic construct
  source 1..50: mol_type = other DNA
tactggacaaagatggaaaaagtaattacttcattgattattccccaaga

SEQ ID NO: 37820 - DNA, 50 bp, synthetic construct
  source 1..50: mol_type = other DNA
ccctaagcactatggtattgaattgtaaatcccgaacgtagttattattc

SEQ ID NO: 37821 - DNA, 50 bp, synthetic construct
  source 1..50: mol_type = other DNA
agtttctactataatataatgcgatattcgattagatttagcttatttct

SEQ ID NO: 37822 - DNA, 50 bp, synthetic construct
  source 1..50: mol_type = other DNA
caagttctttttccgggtggaaagagtaagatttcctgacatgaaactta

SEQ ID NO: 37823 - DNA, 50 bp, synthetic construct
  source 1..50: mol_type = other DNA
ggattcaatcctgtcaaaatgagaattttcgcttaaaccgctttgcatca

SEQ ID NO: 37824 - DNA, 50 bp, synthetic construct
  source 1..50: mol_type = other DNA
cccctcgacggcgagatccgcgacggctggtccgtctcgccctcccggat

SEQ ID NO: 37825 - DNA, 50 bp, synthetic construct
  source 1..50: mol_type = other DNA
atcgatcatcgccggactggtggccgcagctggttgataagatcgtagag

SEQ ID NO: 37826 - DNA, 50 bp, synthetic construct
  source 1..50: mol_type = other DNA
gtaatgtgatacaattcacacatgatcaaatgtgaaactattatcatgac

SEQ ID NO: 37827 - DNA, 50 bp, synthetic construct
  source 1..50: mol_type = other DNA
aatttggatagttttgaggagttttgggtacaagaaaacatctcaaaaga

SEQ ID NO: 37828 - DNA, 50 bp, synthetic construct
  source 1..50: mol_type = other DNA
caataaaatttacttgggggaattagaaagaaagcagaaaaattatattg

SEQ ID NO: 37829 - DNA, 50 bp, synthetic construct
  source 1..50: mol_type = other DNA
attatttagagtatatccatttattaggtaagtacaataaaattatctat

SEQ ID NO: 37830 - DNA, 50 bp, synthetic construct
  source 1..50: mol_type = other DNA
accacagttaatggaggtaagtaaatgaaagattggtttattactttggc

SEQ ID NO: 37831 - DNA, 50 bp, synthetic construct
  source 1..50: mol_type = other DNA
taaaacacagcttgcaagagaacttaagcacttttgaagcttgcgcatta

SEQ ID NO: 37832 - DNA, 50 bp, synthetic construct
  source 1..50: mol_type = other DNA
catctttaaatgagaatcaattgcatgaggatgactctatccgaatcatc

SEQ ID NO: 37833 - DNA, 50 bp, synthetic construct
  source 1..50: mol_type = other DNA
gattaccgggataaatttcttttctagaaaaaaggcctattccctatttc

SEQ ID NO: 37834 - DNA, 50 bp, synthetic construct
  source 1..50: mol_type = other DNA
cttgcaaaagtaatcatagcgactagtcaatcaatacttacgcttgcgtt

SEQ ID NO: 37835 - DNA, 50 bp, synthetic construct
  source 1..50: mol_type = other DNA
caaaaaagagacggtaaaaagaaagtattaaagaggctgtcatgaatttg

SEQ ID NO: 37836 - DNA, 50 bp, synthetic construct
  source 1..50: mol_type = other DNA
gttttggtgcgttttagggctggatatccagcgccagtaccgtgtagggc

SEQ ID NO: 37837 - DNA, 50 bp, synthetic construct
  source 1..50: mol_type = other DNA
tctgggacggacaaagctatcggatcgcggatagccatgtcagtcagacg

SEQ ID NO: 37838 - DNA, 50 bp, synthetic construct
  source 1..50: mol_type = other DNA
cgggcgagtggggtaccagaaaggcggcttataaggtgcccttcccttca

SEQ ID NO: 37839 - DNA, 50 bp, synthetic construct
  source 1..50: mol_type = other DNA
cagcgtcatgccgccaccacagctggcgcagtatttgcggcatcagaaag

SEQ ID NO: 37840 - DNA, 50 bp, synthetic construct
  source 1..50: mol_type = other DNA
aagccgctcatcccacgggccgccgcggcagccggtcgtgcgggcggctt

SEQ ID NO: 37841 - DNA, 50 bp, synthetic construct
  source 1..50: mol_type = other DNA
gagcgcaacgttaaccgtgtgatcctcgacagccgcccggtccacagcgc

SEQ ID NO: 37842 - DNA, 50 bp, synthetic construct
  source 1..50: mol_type = other DNA
ataatatccttctaaatatcctataaacaggagtttatcataagagatgt

SEQ ID NO: 37843 - DNA, 50 bp, synthetic construct
  source 1..50: mol_type = other DNA
cggcgacggcgatgcgctgtccatcgacgctcggccgcggttcgcggccg

SEQ ID NO: 37844 - DNA, 50 bp, synthetic construct
  source 1..50: mol_type = other DNA
attttagttacccatgatatatcagaagctatttctatgtcagataaggt

SEQ ID NO: 37845 - DNA, 50 bp, synthetic construct
  source 1..50: mol_type = other DNA
aataatgtagatgacctagaagcatgggcttaaatctataatacaatatt

SEQ ID NO: 37846 - DNA, 50 bp, synthetic construct
  source 1..50: mol_type = other DNA
atgagcaagcttcaaaggtgcttaagtggctggaccactgtcttgcgcag

SEQ ID NO: 37847 - DNA, 50 bp, synthetic construct
  source 1..50: mol_type = other DNA
ggttgccatgatgtgtagaagacttgtacgccgcacagttcatggcagcg

SEQ ID NO: 37848 - DNA, 50 bp, synthetic construct
  source 1..50: mol_type = other DNA
tttagatagaacatacatcatatctagataataaagaattttattctaaa

SEQ ID NO: 37849 - DNA, 50 bp, synthetic construct
  source 1..50: mol_type = other DNA
ttcatgaagagattattattcatttaaaaaaacaaaaagctatgtttgaa

SEQ ID NO: 37850 - DNA, 50 bp, synthetic construct
  source 1..50: mol_type = other DNA
tgaatgaaaattttattcataaagttttttatatgtaaaattcacataac

SEQ ID NO: 37851 - DNA, 50 bp, synthetic construct
  source 1..50: mol_type = other DNA
cgcgctttgctgcttctggcgctaattaagtcctaaagcatcattcgtcg

SEQ ID NO: 37852 - DNA, 50 bp, synthetic construct
  source 1..50: mol_type = other DNA
tcattcattaggaaaaaatttagatgctaaaattagaacaagatttatgt

SEQ ID NO: 37853 - DNA, 50 bp, synthetic construct
  source 1..50: mol_type = other DNA
atttgatgatttattgaaaaaaatgggagttttttatttttttaaaaaag

SEQ ID NO: 37854 - DNA, 50 bp, synthetic construct
  source 1..50: mol_type = other DNA
cgatgatattcagttcatacaaaatatttttggtaatatgaatttcatca

SEQ ID NO: 37855 - DNA, 50 bp, synthetic construct
  source 1..50: mol_type = other DNA
tcatactttttattagtgttactactattctttgcgaggaaaaggtactg

SEQ ID NO: 37856 - DNA, 50 bp, synthetic construct
  source 1..50: mol_type = other DNA
cgggtcgtcccacaggtcgggggccggcgtgggttcggtgggtcgagccg

SEQ ID NO: 37857 - DNA, 50 bp, synthetic construct
  source 1..50: mol_type = other DNA
ctcgctcgcccctccagcaccgccatggtggggctgtgcgggcctgtggc

SEQ ID NO: 37858 - DNA, 50 bp, synthetic construct
  source 1..50: mol_type = other DNA
tttttattaataaagggtacttttatatcatgaggctatatttctaatat

SEQ ID NO: 37859 - DNA, 50 bp, synthetic construct
  source 1..50: mol_type = other DNA
ctacgcttctctgacccacgccaagcttggcgttgggcttaagtgtatag

SEQ ID NO: 37860 - DNA, 50 bp, synthetic construct
  source 1..50: mol_type = other DNA
tttacttcttctattaacttacatttttatcttttaataccataagtttt

SEQ ID NO: 37861 - DNA, 50 bp, synthetic construct
  source 1..50: mol_type = other DNA
ttacaccaacaaggtgacaacaaagctttgttatcaccctgttggtaaca

SEQ ID NO: 37862 - DNA, 50 bp, synthetic construct
  source 1..50: mol_type = other DNA
tttcaaataaaaaattcacttcaggtaataaggaaattctttatttgtta

SEQ ID NO: 37863 - DNA, 50 bp, synthetic construct
  source 1..50: mol_type = other DNA
cgggttatcttgccggcaagggttgcaaggaatggcggcggtatatgtgc

SEQ ID NO: 37864 - DNA, 50 bp, synthetic construct
  source 1..50: mol_type = other DNA
ccaaagacaagaacaaaacaggggtattccctatttgtgcataatattgg

SEQ ID NO: 37865 - DNA, 50 bp, synthetic construct
  source 1..50: mol_type = other DNA
tatatgcttgagaaaaatgagaagatcacctctatttgtgtaatttaata

SEQ ID NO: 37866 - DNA, 50 bp, synthetic construct
  source 1..50: mol_type = other DNA
gcgcggatggtgctgaccaccgagacggctgttgtcgacaagccggccga

SEQ ID NO: 37867 - DNA, 50 bp, synthetic construct
  source 1..50: mol_type = other DNA
acgttaaggaacataaacacactatgtagtgtgtgtatgtcctatatagt

SEQ ID NO: 37868 - DNA, 50 bp, synthetic construct
  source 1..50: mol_type = other DNA
tggcggagtagctcagttggttagagctaccgggctgctccatcccgcga

SEQ ID NO: 37869 - DNA, 50 bp, synthetic construct
  source 1..50: mol_type = other DNA
gccgccgcaacactgatggccaacatgtttgcgatcattcactcggtcaa

SEQ ID NO: 37870 - DNA, 50 bp, synthetic construct
  source 1..50: mol_type = other DNA
tcgcattgctgtggatgtggatttgtaactccatgggttttgcaacttct

SEQ ID NO: 37871 - DNA, 50 bp, synthetic construct
  source 1..50: mol_type = other DNA
cgcctggggtgccacaatcacggttcacccagatcccagcaacccgagcc

SEQ ID NO: 37872 - DNA, 50 bp, synthetic construct
  source 1..50: mol_type = other DNA
aaaagctcaaggccgcctggactccagcgggtcggcggtcttgacgcggg

SEQ ID NO: 37873 - DNA, 50 bp, synthetic construct
  source 1..50: mol_type = other DNA
cagccttgccacatggatagggtaattaccctagccacatggaatggagc

SEQ ID NO: 37874 - DNA, 50 bp, synthetic construct
  source 1..50: mol_type = other DNA
ctggaaaccctttatttatcagtattaagagctatatattcagcttcatt

SEQ ID NO: 37875 - DNA, 50 bp, synthetic construct
  source 1..50: mol_type = other DNA
ttgaaccggcaggcgcgtgcctgatatcaccctgcgtcaccgccatttta

SEQ ID NO: 37876 - DNA, 50 bp, synthetic construct
  source 1..50: mol_type = other DNA
cggcatactcccgcacgcagcgcacaaacgccgcgtggcagcctatgccc

SEQ ID NO: 37877 - DNA, 50 bp, synthetic construct
  source 1..50: mol_type = other DNA
tgtgctgacggcactattgcggtttttacaaatacatacatggtatcatt

SEQ ID NO: 37878 - DNA, 50 bp, synthetic construct
  source 1..50: mol_type = other DNA
gggcggatgcgaggagaagccggtcgccgccgtcgcgtccgcgcccgcca

SEQ ID NO: 37879 - DNA, 50 bp, synthetic construct
  source 1..50: mol_type = other DNA
gccctcggcagcggagagcaccgcgcgccttgccctcccgctgaaggcgc

SEQ ID NO: 37880 - DNA, 50 bp, synthetic construct
  source 1..50: mol_type = other DNA
ggccatatcgtcgaagtggaagtggacaattcttcttccatgccgatcat

SEQ ID NO: 37881 - DNA, 50 bp, synthetic construct
  source 1..50: mol_type = other DNA
ttcacttagacattaaaaaacgagattttgagtttttattgatatttgcc

SEQ ID NO: 37882 - DNA, 50 bp, synthetic construct
  source 1..50: mol_type = other DNA
agcgagactcgggaagaagcgacccgatatcgttgcatacgtggacgatg

SEQ ID NO: 37883 - DNA, 50 bp, synthetic construct
  source 1..50: mol_type = other DNA
gtgggttagggttaagactggatttaaattttgttggcatagcaaaaatg

SEQ ID NO: 37884 - DNA, 50 bp, synthetic construct
  source 1..50: mol_type = other DNA
gaaacattgtcgtcaagaaattgctgaatatttctcaacttcaaagtaat

SEQ ID NO: 37885 - DNA, 50 bp, synthetic construct
  source 1..50: mol_type = other DNA
gcggggtggagcagtctggcagctcgagccgtgcgaggccctacgccccg

SEQ ID NO: 37886 - DNA, 50 bp, synthetic construct
  source 1..50: mol_type = other DNA
cggaacagcttcgcaagcggaacactccttctgctcaaaagtcacttccc

SEQ ID NO: 37887 - DNA, 50 bp, synthetic construct
  source 1..50: mol_type = other DNA
ggttgccgcaaggcgtccaggacccggccgcggcaggccggaaccgccgc

SEQ ID NO: 37888 - DNA, 50 bp, synthetic construct
  source 1..50: mol_type = other DNA
cgccgtcccagaaggcggcggaagagcttttcgcaacttctgcccttaag

SEQ ID NO: 37889 - DNA, 50 bp, synthetic construct
  source 1..50: mol_type = other DNA
gggtgccgtcgatcagccctgcctcgtttcactcgccctctacgctcccc

SEQ ID NO: 37890 - DNA, 50 bp, synthetic construct
  source 1..50: mol_type = other DNA
cttggagctgttgtgggcttgggatctcccctccagccggctgctaaaag

SEQ ID NO: 37891 - DNA, 50 bp, synthetic construct
  source 1..50: mol_type = other DNA
agagactatacaataattgaagatccatttctgcccatgttatagctact

SEQ ID NO: 37892 - DNA, 50 bp, synthetic construct
  source 1..50: mol_type = other DNA
aatataagccataaattcttacatatagcaccctttttaaggatgccatt

SEQ ID NO: 37893 - DNA, 50 bp, synthetic construct
  source 1..50: mol_type = other DNA
aagagaatgaatttattgatagttttaactaataacttatttattttctt

SEQ ID NO: 37894 - DNA, 50 bp, synthetic construct
  source 1..50: mol_type = other DNA
tcggagtcgacgagcgccttggggcacccgagcgacacgaagcctacttt

SEQ ID NO: 37895 - DNA, 50 bp, synthetic construct
  source 1..50: mol_type = other DNA
gtttaaccataaatctactccattaatatggcatctattgattttaaaac

SEQ ID NO: 37896 - DNA, 50 bp, synthetic construct
  source 1..50: mol_type = other DNA
gataatttttaaagatttttcttatataagacaaaaagttaagaagtttg

SEQ ID NO: 37897 - DNA, 50 bp, synthetic construct
  source 1..50: mol_type = other DNA
tggtgacgctcggcaacccgaaagttcttgaccgcggccgagccgtaccc

SEQ ID NO: 37898 - DNA, 50 bp, synthetic construct
  source 1..50: mol_type = other DNA
acggcaagcgcgacgaaccgtagcgcgattacgcccgtcgcgcttggccc

SEQ ID NO: 37899 - DNA, 50 bp, synthetic construct
  source 1..50: mol_type = other DNA
caaatgatcgctaagctcatacgttattcataaggttttgtcctcatttc

SEQ ID NO: 37900 - DNA, 50 bp, synthetic construct
  source 1..50: mol_type = other DNA
gtagcgctggcgctgttatttttggccagttcttccatttccagcaattc

SEQ ID NO: 37901 - DNA, 50 bp, synthetic construct
  source 1..50: mol_type = other DNA
acagcctggaggaatctgcgaaggtaccttgatttaaacggatttgctgt

SEQ ID NO: 37902 - DNA, 50 bp, synthetic construct
  source 1..50: mol_type = other DNA
tctaagaataaactttattataatttgagataacaaatttaccctttatt

SEQ ID NO: 37903 - DNA, 50 bp, synthetic construct
  source 1..50: mol_type = other DNA
gtgtcgttcttaaaattccaaaagaatttctatacgtttaagaatttcgt

SEQ ID NO: 37904 - DNA, 50 bp, synthetic construct
  source 1..50: mol_type = other DNA
ttagaatatctaaattaataattatggaatttttaaatatcttattttaa

SEQ ID NO: 37905 - DNA, 50 bp, synthetic construct
  source 1..50: mol_type = other DNA
tatgtcatgtatatttttagcaacagattgataataacttatattttata

SEQ ID NO: 37906 - DNA, 50 bp, synthetic construct
  source 1..50: mol_type = other DNA
tttattacaataatataaatttattaataaaattacattttaatgtaaaa

SEQ ID NO: 37907 - DNA, 50 bp, synthetic construct
  source 1..50: mol_type = other DNA
taagagaagcttgttaaaggcttcttcatgcctttatggatgatctttta

SEQ ID NO: 37908 - DNA, 50 bp, synthetic construct
  source 1..50: mol_type = other DNA
taataaatttaattcctttagcttataattgtaaagtttaaaattattag

SEQ ID NO: 37909 - DNA, 50 bp, synthetic construct
  source 1..50: mol_type = other DNA
agttattatcaatctacctaaaggaacttttaaaagcattgatatagaaa

SEQ ID NO: 37910 - DNA, 50 bp, synthetic construct
  source 1..50: mol_type = other DNA
taaataaaggctctcctctcgttctaaaactatagcatctcctgttgtaa

SEQ ID NO: 37911 - DNA, 50 bp, synthetic construct
  source 1..50: mol_type = other DNA
aaatccggcgatagcgcaaaactacgtctttaagcggaaaaaccgggcta

SEQ ID NO: 37912 - DNA, 50 bp, synthetic construct
  source 1..50: mol_type = other DNA
gtgtaccatcgggaattttctcaaatgggacacacaccatacggatacag

SEQ ID NO: 37913 - DNA, 50 bp, synthetic construct
  source 1..50: mol_type = other DNA
cctacgacgacccgaagcagcaggcgcctgcgtttccggattacaggaaa

SEQ ID NO: 37914 - DNA, 50 bp, synthetic construct
  source 1..50: mol_type = other DNA
tgctattagtagccttttgagtgatatcattaacaatactttaggtggaa

SEQ ID NO: 37915 - DNA, 50 bp, synthetic construct
  source 1..50: mol_type = other DNA
agatagacaagacgaaaggagtgatatcaaattttgcgtcttgttttcca

SEQ ID NO: 37916 - DNA, 50 bp, synthetic construct
  source 1..50: mol_type = other DNA
aggaatgacgagaagctgactcgtaaaatgaacttctatttctcatttag

SEQ ID NO: 37917 - DNA, 50 bp, synthetic construct
  source 1..50: mol_type = other DNA
ttttaaataattctattgatttttttggctatcaaataaaagatagaaaa

SEQ ID NO: 37918 - DNA, 50 bp, synthetic construct
  source 1..50: mol_type = other DNA
atttagattagaaaagcaagaaaaaatttttatgcttcatccctttaatt

SEQ ID NO: 37919 - DNA, 50 bp, synthetic construct
  source 1..50: mol_type = other DNA
taattagaactaataatgcaaataatatcgggcattatctgtgctaacat

SEQ ID NO: 37920 - DNA, 50 bp, synthetic construct
  source 1..50: mol_type = other DNA
aatgcaaataattgactgaatttcttaaaattcaggcatttcttttcatt

SEQ ID NO: 37921 - DNA, 50 bp, synthetic construct
  source 1..50: mol_type = other DNA
ataaacctcaaatagtttcttaatcagttttattttaatttgaggtttag

SEQ ID NO: 37922 - DNA, 50 bp, synthetic construct
  source 1..50: mol_type = other DNA
aataagggtgtctttgtcatacccttcaagctgatagagacattctagct

SEQ ID NO: 37923 - DNA, 50 bp, synthetic construct
  source 1..50: mol_type = other DNA
aagggtttggtggcagggatagtggttgtctgcagtgcggaaaaaccctc

SEQ ID NO: 37924 - DNA, 50 bp, synthetic construct
  source 1..50: mol_type = other DNA
gatatactgggcgttcagaggtaatattttctcaatctatccagtagcta

SEQ ID NO: 37925 - DNA, 50 bp, synthetic construct
  source 1..50: mol_type = other DNA
tgcaaaaatatgaagatccatacaagaaaatggatgttgatgttcctgat

SEQ ID NO: 37926 - DNA, 50 bp, synthetic construct
  source 1..50: mol_type = other DNA
gcgggcgccggcctggcgggcggtggttcgcccggccgaccggcggacgt

SEQ ID NO: 37927 - DNA, 50 bp, synthetic construct
  source 1..50: mol_type = other DNA
gttctgtcactgcgccgggacctggcccggcccggggtgtgtgttggggt

SEQ ID NO: 37928 - DNA, 50 bp, synthetic construct
  source 1..50: mol_type = other DNA
tgttcatcgtcgtcatcctgcatcatgcatcaggatctcgttctcgatgc

SEQ ID NO: 37929 - DNA, 50 bp, synthetic construct
  source 1..50: mol_type = other DNA
gaagacatctccccgatcgccaagatctacgagctcgtcatcaactcgaa

SEQ ID NO: 37930 - DNA, 50 bp, synthetic construct
  source 1..50: mol_type = other DNA
acaaatcgtttctattgaaacaagatcactcgtcaaagaaataactttca

SEQ ID NO: 37931 - DNA, 50 bp, synthetic construct
  source 1..50: mol_type = other DNA
gatgtaggaaaaatgcaacctactattgtaggattaaatttatttacctg

SEQ ID NO: 37932 - DNA, 50 bp, synthetic construct
  source 1..50: mol_type = other DNA
agtcatcaaacaagaaacggtttttagtctccgtttctagtttattgagt

SEQ ID NO: 37933 - DNA, 50 bp, synthetic construct
  source 1..50: mol_type = other DNA
gccgcggtggcaaccgggaccgcgacggcggagtacgagacggccgaggc

SEQ ID NO: 37934 - DNA, 50 bp, synthetic construct
  source 1..50: mol_type = other DNA
gcctcagcacgcagaattcattgcccgcgatgccctgctcgtccagcacc

SEQ ID NO: 37935 - DNA, 50 bp, synthetic construct
  source 1..50: mol_type = other DNA
cgacacccaagcaccgcaagtgcggccaccctgtcgagggcacggcgtcc

SEQ ID NO: 37936 - DNA, 50 bp, synthetic construct
  source 1..50: mol_type = other DNA
gatgcctgcggtcatgcgaaagcgccagtgcccgcatgtcggcgaccatg

SEQ ID NO: 37937 - DNA, 50 bp, synthetic construct
  source 1..50: mol_type = other DNA
cggcctgttgtcggcctggcggctggccccgtgaggcgcgtcactcgccg

SEQ ID NO: 37938 - DNA, 50 bp, synthetic construct
  source 1..50: mol_type = other DNA
ggggccctcggagcggcttacgcggcctggactaccgcacccggggccgc

SEQ ID NO: 37939 - DNA, 50 bp, synthetic construct
  source 1..50: mol_type = other DNA
tggaaggtgatgccccggaattcgggcgggttcttcgagcgcaccttcgc

SEQ ID NO: 37940 - DNA, 50 bp, synthetic construct
  source 1..50: mol_type = other DNA
tagaggaagagggagcgggcgagccgggtcgcccgcaaggggaacctgct

SEQ ID NO: 37941 - DNA, 50 bp, synthetic construct
  source 1..50: mol_type = other DNA
cggcgggacccgggaccggtgtggatccaacccggtcaacgatgccagtc

SEQ ID NO: 37942 - DNA, 50 bp, synthetic construct
  source 1..50: mol_type = other DNA
gttctggctcctgggcatcgtcgccggaccagatgtagaggaaccagttg

SEQ ID NO: 37943 - DNA, 50 bp, synthetic construct
  source 1..50: mol_type = other DNA
cggccaggtcgtccgtgacgacgacgtcctgtgcgggggcgccctggccg

SEQ ID NO: 37944 - DNA, 50 bp, synthetic construct
  source 1..50: mol_type = other DNA
ccgccgcgtcgcccgcaagcacctcgatctgccggcgggggcttctgcgt

SEQ ID NO: 37945 - DNA, 50 bp, synthetic construct
  source 1..50: mol_type = other DNA
acacctttcttatgatacacttgttttacagtgtatcaatagaaaggtct

SEQ ID NO: 37946 - DNA, 50 bp, synthetic construct
  source 1..50: mol_type = other DNA
ttactccattcagtaattccactgtatattggaatttctgaatgcactaa

SEQ ID NO: 37947 - DNA, 50 bp, synthetic construct
  source 1..50: mol_type = other DNA
aatcgccaaacattctccccctttttaatcaaggagaattatttgctttg

SEQ ID NO: 37948 - DNA, 50 bp, synthetic construct
  source 1..50: mol_type = other DNA
ttcaaagcaaaacctctggtacaaaaatgatttggaggttatgttatgaa

SEQ ID NO: 37949 - DNA, 50 bp, synthetic construct
  source 1..50: mol_type = other DNA
gttgttgatccaggcaggattcggtaccatatactgtttatatatacagt

SEQ ID NO: 37950 - DNA, 50 bp, synthetic construct
  source 1..50: mol_type = other DNA
ttcttggacagaagcaccagtttcctagacctgttcaccaagtagaagaa

SEQ ID NO: 37951 - DNA, 50 bp, synthetic construct
  source 1..50: mol_type = other DNA
ttacctcaaaaagttaccataagatttctttgtgtaatatggtataatga

SEQ ID NO: 37952 - DNA, 50 bp, synthetic construct
  source 1..50: mol_type = other DNA
cctatagaaatggagaagaaaagcacaggctttgatggcattgatatcat

SEQ ID NO: 37953 - DNA, 50 bp, synthetic construct
  source 1..50: mol_type = other DNA
gcgccggcgagggtgagcacgcgcccggcggaggccggcctcgtcagcgc

SEQ ID NO: 37954 - DNA, 50 bp, synthetic construct
  source 1..50: mol_type = other DNA
catcgccgcgcatctcggaagagcgcgcacttccaccgcgtgcgtcgtcg

SEQ ID NO: 37955 - DNA, 50 bp, synthetic construct
  source 1..50: mol_type = other DNA
ggtgccgtcgccacgtcgcgacaagttgcccgcgacctgctcggcgcggt

SEQ ID NO: 37956 - DNA, 50 bp, synthetic construct
  source 1..50: mol_type = other DNA
gcgatggcggcggcctttccaccagcggcggccgtggccgaggccatcgc

SEQ ID NO: 37957 - DNA, 50 bp, synthetic construct
  source 1..50: mol_type = other DNA
ctggcaaccgtgctcccccgtccgtgctgccgggggacggttccggctgt

SEQ ID NO: 37958 - DNA, 50 bp, synthetic construct
  source 1..50: mol_type = other DNA
tgaatatgattcaagaaatggaattgcttttttctccgttttcatattcc

SEQ ID NO: 37959 - DNA, 50 bp, synthetic construct
  source 1..50: mol_type = other DNA
ctaaccagcaatgggggcagcggaccgccaaacgggccgtctcctgttga

SEQ ID NO: 37960 - DNA, 50 bp, synthetic construct
  source 1..50: mol_type = other DNA
acttatctggacaaatatcaattgatcaatcgaatcccgtcttttactcc

SEQ ID NO: 37961 - DNA, 50 bp, synthetic construct
  source 1..50: mol_type = other DNA
ccattcgatccttgataaagcaatagattcacctttttccgataatatga

SEQ ID NO: 37962 - DNA, 50 bp, synthetic construct
  source 1..50: mol_type = other DNA
ttgctagtaaacgcgtgtcagcatagccaggaacacaacaagaatcactt

SEQ ID NO: 37963 - DNA, 50 bp, synthetic construct
  source 1..50: mol_type = other DNA
ggaagatccagggcgacccggtgccgggcacggcgatgccgcggcccgcg

SEQ ID NO: 37964 - DNA, 50 bp, synthetic construct
  source 1..50: mol_type = other DNA
gcttggcgatctcgatgatcttctcccggagacagtcaagctcgccaagt

SEQ ID NO: 37965 - DNA, 50 bp, synthetic construct
  source 1..50: mol_type = other DNA
ggcattgagttcgccgccaagcccctcaggacgtccagcaggtatttgcc

SEQ ID NO: 37966 - DNA, 50 bp, synthetic construct
  source 1..50: mol_type = other DNA
tgtggaagagaatgaacatttgctgaaacgaatggtcatattcttgtttt

SEQ ID NO: 37967 - DNA, 50 bp, synthetic construct
  source 1..50: mol_type = other DNA
ttagaaacttggcccggatgatattcgtatttgtcttaccgtatttctgg

SEQ ID NO: 37968 - DNA, 50 bp, synthetic construct
  source 1..50: mol_type = other DNA
aatatggcggtctgatcctcggtggacagccagccccactattccgtacc

SEQ ID NO: 37969 - DNA, 50 bp, synthetic construct
  source 1..50: mol_type = other DNA
caccgggccgcccagacgggccggcgccggtgtggcgacgtgtcgaggtg

SEQ ID NO: 37970 - DNA, 50 bp, synthetic construct
  source 1..50: mol_type = other DNA
tacgcgagaccctggacctcgaacgacctggacgtgcgcggcctcggccc

SEQ ID NO: 37971 - DNA, 50 bp, synthetic construct
  source 1..50: mol_type = other DNA
cacagggattatccatgagtcaggtactggaatccgatcccctcccggta

SEQ ID NO: 37972 - DNA, 50 bp, synthetic construct
  source 1..50: mol_type = other DNA
accattttctaataatagagtagcatgatactattttaggagaaaacgga

SEQ ID NO: 37973 - DNA, 50 bp, synthetic construct
  source 1..50: mol_type = other DNA
aatcaaacgtggtattattgaagatattgactataaaggcaaccggattt

SEQ ID NO: 37974 - DNA, 50 bp, synthetic construct
  source 1..50: mol_type = other DNA
ttttacttttaaatgaggtgaaaaaacagaaaccgagcaggaaaggtaaa

SEQ ID NO: 37975 - DNA, 50 bp, synthetic construct
  source 1..50: mol_type = other DNA
acaaaaaatcaacctaaaaaataggttaattgtttgctaaaatcagttgt

SEQ ID NO: 37976 - DNA, 50 bp, synthetic construct
  source 1..50: mol_type = other DNA
cttcatctgttacattttatatagtttaattgcaaacctaattgatacag

SEQ ID NO: 37977 - DNA, 50 bp, synthetic construct
  source 1..50: mol_type = other DNA
gaaaaggtcaggataaatgacaaggatgccttatttaattcaagatttgc

SEQ ID NO: 37978 - DNA, 50 bp, synthetic construct
  source 1..50: mol_type = other DNA
aaatcgacaagttaaatcttaaaacttttaaatgcttatctgtacaattt

SEQ ID NO: 37979 - DNA, 50 bp, synthetic construct
  source 1..50: mol_type = other DNA
ggttcagaaaaatttttagaaaatttatccataagtgcttacactgaact

SEQ ID NO: 37980 - DNA, 50 bp, synthetic construct
  source 1..50: mol_type = other DNA
atttgaatgatttactaacttcttatacaaacttcttaagtgattcatca

SEQ ID NO: 37981 - DNA, 50 bp, synthetic construct
  source 1..50: mol_type = other DNA
tcacagccatgtaaaagatgattcttcaatgctctttgttttgccttctc

SEQ ID NO: 37982 - DNA, 50 bp, synthetic construct
  source 1..50: mol_type = other DNA
aaaaaataagttataagtaatataataagtcggtatagattacctttttt

SEQ ID NO: 37983 - DNA, 50 bp, synthetic construct
  source 1..50: mol_type = other DNA
gcgttttctattttttgatgaaactcccttcataaaaaaaagcgaaacgt

SEQ ID NO: 37984 - DNA, 50 bp, synthetic construct
  source 1..50: mol_type = other DNA
catgagtaagttcaaatgatccatttcaaatccggttgagtttatatatg

SEQ ID NO: 37985 - DNA, 50 bp, synthetic construct
  source 1..50: mol_type = other DNA
aataatattttcaacttcaacttcgtttagttgaagttatgtggaatagg

SEQ ID NO: 37986 - DNA, 50 bp, synthetic construct
  source 1..50: mol_type = other DNA
ccctcaaaacgatccaaaaaccggcgcgcgtccttctgggcttctattac

SEQ ID NO: 37987 - DNA, 50 bp, synthetic construct
  source 1..50: mol_type = other DNA
aattgaacacaacaataagttcagtgtataagtactcagcctgttttact

SEQ ID NO: 37988 - DNA, 50 bp, synthetic construct
  source 1..50: mol_type = other DNA
aattcttgtatagctgtcgtaccttaagggatatcgttctttcctgaatt

SEQ ID NO: 37989 - DNA, 50 bp, synthetic construct
  source 1..50: mol_type = other DNA
gccacgcatgcgccggatcagcatcgatgcgcttcatgagcgccaagttg

SEQ ID NO: 37990 - DNA, 50 bp, synthetic construct
  source 1..50: mol_type = other DNA
tcgcccaggaggtcaccgggagcaagagttcatggtcaccaaatgcaacg

SEQ ID NO: 37991 - DNA, 50 bp, synthetic construct
  source 1..50: mol_type = other DNA
tatgaaattaaaataaaataaaaaaatacaatttttattttcattaaata

SEQ ID NO: 37992 - DNA, 50 bp, synthetic construct
  source 1..50: mol_type = other DNA
cggcgatgttgtactcgccgattaagttgttatatagttccacatcttcc

SEQ ID NO: 37993 - DNA, 50 bp, synthetic construct
  source 1..50: mol_type = other DNA
aaaatcaataatggctaaccccgaatggggtattagttattagttattgg

SEQ ID NO: 37994 - DNA, 50 bp, synthetic construct
  source 1..50: mol_type = other DNA
gttaaatattatttggctcaccccgaaacgtgaatctaataacatttaat

SEQ ID NO: 37995 - DNA, 50 bp, synthetic construct
  source 1..50: mol_type = other DNA
gattataaatataatgtggtaagattgattgccacattatatctaaaaga

SEQ ID NO: 37996 - DNA, 50 bp, synthetic construct
  source 1..50: mol_type = other DNA
gtcaccgcctgatttcgttagtcaatttacgggcgatatctgcttacgat

SEQ ID NO: 37997 - DNA, 50 bp, synthetic construct
  source 1..50: mol_type = other DNA
aatattgtttttatcgatagaataataaaactatcaatgaaaacaaaaaa

SEQ ID NO: 37998 - DNA, 50 bp, synthetic construct
  source 1..50: mol_type = other DNA
ctatcgactggaccgaaccataataatggatggttcgggaattcccgaat

SEQ ID NO: 37999 - DNA, 50 bp, synthetic construct
  source 1..50: mol_type = other DNA
gtggagtatgattaacaaaagagtcacgtcttatgtaaatttttacataa

SEQ ID NO: 38000 - DNA, 50 bp, synthetic construct
  source 1..50: mol_type = other DNA
cagtcatatattcaaaccctgattgaagtcacttagagcatatatcacca

SEQ ID NO: 38001 - DNA, 50 bp, synthetic construct
  source 1..50: mol_type = other DNA
gccgatactggaatcttttcaaccgctcacgaaatgaacggagtattgcg

SEQ ID NO: 38002 - DNA, 50 bp, synthetic construct
  source 1..50: mol_type = other DNA
tatgaaacctgtctactacatccttttaaattaggtagggttcattcatt

SEQ ID NO: 38003 - DNA, 50 bp, synthetic construct
  source 1..50: mol_type = other DNA
atttacatgttatatttaatttacgacaaaattaaaataggaattcttct

SEQ ID NO: 38004 - DNA, 50 bp, synthetic construct
  source 1..50: mol_type = other DNA
aaggtgctctcttaaagaaaacatttactctttaatttagcatttctatg

SEQ ID NO: 38005 - DNA, 50 bp, synthetic construct
  source 1..50: mol_type = other DNA
agtgcttctatattcatcattaaagctttatatgtagatataaaaaaaga

SEQ ID NO: 38006 - DNA, 50 bp, synthetic construct
  source 1..50: mol_type = other DNA
aaaagaaagtatacaaaatttagatttacttctttttcgtactttctttt

SEQ ID NO: 38007 - DNA, 50 bp, synthetic construct
  source 1..50: mol_type = other DNA
ttttgctctaactaatcattatcaatagataagtaggaggaagaaaacat

SEQ ID NO: 38008 - DNA, 50 bp, synthetic construct
  source 1..50: mol_type = other DNA
gcatgaggcaaacgttaggcgatgcaggccgcgcaatgacactgtcagag

SEQ ID NO: 38009 - DNA, 50 bp, synthetic construct
  source 1..50: mol_type = other DNA
gatttgttagcgtgttgaatatatttatataattataccattatataaat

SEQ ID NO: 38010 - DNA, 50 bp, synthetic construct
  source 1..50: mol_type = other DNA
gagttgaagctagtggtaaattttaatgaatttacacataagcccaacac

SEQ ID NO: 38011 - DNA, 50 bp, synthetic construct
  source 1..50: mol_type = other DNA
gtttaatgtttatttcatcaaattgttcatttttgaaataaatgccaaca

SEQ ID NO: 38012 - DNA, 50 bp, synthetic construct
  source 1..50: mol_type = other DNA
atgatttacttttttctttttatattacacataagcccaacaccaatcag

SEQ ID NO: 38013 - DNA, 50 bp, synthetic construct
  source 1..50: mol_type = other DNA
ctaatgtgtttgatggatgtatgcatgattacatcaaaccaatacattag

SEQ ID NO: 38014 - DNA, 50 bp, synthetic construct
  source 1..50: mol_type = other DNA
cctttgtaattgccctcgcgcgccacggcgatccggatgaagatccagcg

SEQ ID NO: 38015 - DNA, 50 bp, synthetic construct
  source 1..50: mol_type = other DNA
ctagtagtttttctaactctgctttaaatcagactttaagaaaccactgg

SEQ ID NO: 38016 - DNA, 50 bp, synthetic construct
  source 1..50: mol_type = other DNA
actcttaatgatgaaggtcaccagacctttgaagcttgctcattagctga

SEQ ID NO: 38017 - DNA, 50 bp, synthetic construct
  source 1..50: mol_type = other DNA
caccgttcatcctcctctcgtatggtctcaacggactccgatgagcagtt

SEQ ID NO: 38018 - DNA, 50 bp, synthetic construct
  source 1..50: mol_type = other DNA
cctcgttgatgggacgactccctgaatcatccgtctgtaaatcaagtttc

SEQ ID NO: 38019 - DNA, 50 bp, synthetic construct
  source 1..50: mol_type = other DNA
attgttaataagattatatgccttttaaacgcgattcaaaaattagagaa

SEQ ID NO: 38020 - DNA, 50 bp, synthetic construct
  source 1..50: mol_type = other DNA
ttcagctttttcttcatcgataactgcggtatgaacaagtaaaagctgat

SEQ ID NO: 38021 - DNA, 50 bp, synthetic construct
  source 1..50: mol_type = other DNA
tctcgaccacgcactcctaaagcgatcgcttatttttttgccgttcgcga

SEQ ID NO: 38022 - DNA, 50 bp, synthetic construct
  source 1..50: mol_type = other DNA
gtgatcgaaagtcaggatgttgttttctcatatccatcttgtttgatcag

SEQ ID NO: 38023 - DNA, 50 bp, synthetic construct
  source 1..50: mol_type = other DNA
aacagcttgatgcgtcctttatgtgcaagctaattaggccataagctgtg

SEQ ID NO: 38024 - DNA, 50 bp, synthetic construct
  source 1..50: mol_type = other DNA
ttcattatattttccctcccatattttaataagagtcaatatgtaattat

SEQ ID NO: 38025 - DNA, 50 bp, synthetic construct
  source 1..50: mol_type = other DNA
ccgcattctccgcatgtgattaagcctttcaaacatttttataaatgcca

SEQ ID NO: 38026 - DNA, 50 bp, synthetic construct
  source 1..50: mol_type = other DNA
caacttgcttacgcagcaagctgggcgcggcctcgccttatcccaagttg

SEQ ID NO: 38027 - DNA, 50 bp, synthetic construct
  source 1..50: mol_type = other DNA
tgattgttcatccatccgatcggggttccgatcggatcatgcaacgatac

SEQ ID NO: 38028 - DNA, 50 bp, synthetic construct
  source 1..50: mol_type = other DNA
acataaacactgaatttagtcgtgaaaatgaaagaatgactgttttttaa

SEQ ID NO: 38029 - DNA, 50 bp, synthetic construct
  source 1..50: mol_type = other DNA
tttatttatatgaaattgtttttgcacacttgcaaaacattataaatata

SEQ ID NO: 38030 - DNA, 50 bp, synthetic construct
  source 1..50: mol_type = other DNA
tatatattaatatagttattttatcaataatttaattatactaaaatact

SEQ ID NO: 38031 - DNA, 50 bp, synthetic construct
  source 1..50: mol_type = other DNA
gatttagaaagttgaaacttaaagaagtttaattgcatttcctcttattt

SEQ ID NO: 38032 - DNA, 50 bp, synthetic construct
  source 1..50: mol_type = other DNA
cttcccgctaaacggacgcgatgaatccggggcttcccttctggacatag

SEQ ID NO: 38033 - DNA, 50 bp, synthetic construct
  source 1..50: mol_type = other DNA
tatgagggtgggaagtatagaacaatgaccaatggcttggcacctccaaa

SEQ ID NO: 38034 - DNA, 50 bp, synthetic construct
  source 1..50: mol_type = other DNA
gccttcaagagatgaacacacttttatgaggcagaacatctctttgagag

SEQ ID NO: 38035 - DNA, 50 bp, synthetic construct
  source 1..50: mol_type = other DNA
taaaatggcaaacgaaacaatgcgtaatatttgtatattttaccaattta

SEQ ID NO: 38036 - DNA, 50 bp, synthetic construct
  source 1..50: mol_type = other DNA
tgtaaatttttcttttgcatttttataaaaaatatcttgaatgtaactca

SEQ ID NO: 38037 - DNA, 50 bp, synthetic construct
  source 1..50: mol_type = other DNA
ctatgtcaagtaaattgagttaaaaccgacactcaatttttcacaccaga

SEQ ID NO: 38038 - DNA, 50 bp, synthetic construct
  source 1..50: mol_type = other DNA
acaatgaagaagatttagacgaggaaaaatttcttcccgttccactgcgt

SEQ ID NO: 38039 - DNA, 50 bp, synthetic construct
  source 1..50: mol_type = other DNA
ccggaattcatcaccgttgggaacaatttcgaacctccgaagagttcgac

SEQ ID NO: 38040 - DNA, 50 bp, synthetic construct
  source 1..50: mol_type = other DNA
gcgcacccaggccgtccacccgcaggtgccggtgatggccttggccacgc

SEQ ID NO: 38041 - DNA, 50 bp, synthetic construct
  source 1..50: mol_type = other DNA
aacggtttggtctttttcgctttgaacatcgccgctggcgagatcgagga

SEQ ID NO: 38042 - DNA, 50 bp, synthetic construct
  source 1..50: mol_type = other DNA
tcatttatagaatgctgttctataaatatatcatagatacatgtaaaggt

SEQ ID NO: 38043 - DNA, 50 bp, synthetic construct
  source 1..50: mol_type = other DNA
taagaggcgtgtcgggtgctgttagttcttttgttaattcaaaatcatta

SEQ ID NO: 38044 - DNA, 50 bp, synthetic construct
  source 1..50: mol_type = other DNA
acccttttactttctcataattttttaaatttatgctattatgaaagggc

SEQ ID NO: 38045 - DNA, 50 bp, synthetic construct
  source 1..50: mol_type = other DNA
ctgggcggtaagctgctgctgacgtttgtcagcagcccctgcccgaggag

SEQ ID NO: 38046 - DNA, 50 bp, synthetic construct
  source 1..50: mol_type = other DNA
atagcgctggttcaggtagcgcatggttggtgaaggggctgcagcaacat

SEQ ID NO: 38047 - DNA, 50 bp, synthetic construct
  source 1..50: mol_type = other DNA
ttcccgcagattgatgttttcttttacgaaataaattgaataaaagtgaa

SEQ ID NO: 38048 - DNA, 50 bp, synthetic construct
  source 1..50: mol_type = other DNA
tgttaacagcaatgtgcgcataatatattgataatcaattatttataaaa

SEQ ID NO: 38049 - DNA, 50 bp, synthetic construct
  source 1..50: mol_type = other DNA
caacctttagaagaccgtaaagtggcaattttagcgggccaaaacctttg

SEQ ID NO: 38050 - DNA, 50 bp, synthetic construct
  source 1..50: mol_type = other DNA
taggcacaccgaaaaagggtgtgtcttccgacagtttttcggttgtaaac

SEQ ID NO: 38051 - DNA, 50 bp, synthetic construct
  source 1..50: mol_type = other DNA
aaacccgttccgccagctccagatccgtctggatgcagatataccgcttt

SEQ ID NO: 38052 - DNA, 50 bp, synthetic construct
  source 1..50: mol_type = other DNA
acacatttttcccattcgcatctcatatgatccttattggacaaaactgt

SEQ ID NO: 38053 - DNA, 50 bp, synthetic construct
  source 1..50: mol_type = other DNA
atcacaatagaagggatggaagtgaccactttctccgcctccggggtgag

SEQ ID NO: 38054 - DNA, 50 bp, synthetic construct
  source 1..50: mol_type = other DNA
cgtattaggagctacctggggccgcacggaccgcgagtgctccgccaact

SEQ ID NO: 38055 - DNA, 50 bp, synthetic construct
  source 1..50: mol_type = other DNA
aataattataaaatatcgctttatttttatagtaatattatactcatatt

SEQ ID NO: 38056 - DNA, 50 bp, synthetic construct
  source 1..50: mol_type = other DNA
gctcatattttgtggtatatagtttgaactataggacgatctatacgaga

SEQ ID NO: 38057 - DNA, 50 bp, synthetic construct
  source 1..50: mol_type = other DNA
atctggaatttcatgaggcttatgagaaaaatccagttgaaaatggatta

SEQ ID NO: 38058 - DNA, 50 bp, synthetic construct
  source 1..50: mol_type = other DNA
ccccttctccgccataaagggaacatatcaatttgaaaacggtaaaatca

SEQ ID NO: 38059 - DNA, 50 bp, synthetic construct
  source 1..50: mol_type = other DNA
acataaaaaagatatgttccgcataaatgccaaaaatatctttttcatgt

SEQ ID NO: 38060 - DNA, 50 bp, synthetic construct
  source 1..50: mol_type = other DNA
aacgaagggatggtaagaccatgaaaattgtatcctacgaacccagcgtc

SEQ ID NO: 38061 - DNA, 50 bp, synthetic construct
  source 1..50: mol_type = other DNA
aatcaaagttgttggttaagcagtaatcctcctacaagtaatctaatatt

SEQ ID NO: 38062 - DNA, 50 bp, synthetic construct
  source 1..50: mol_type = other DNA
actgctgtcaattcctctgccaaagtcccggcttgcgatttgatagcacg

SEQ ID NO: 38063 - DNA, 50 bp, synthetic construct
  source 1..50: mol_type = other DNA
gaacttcagtaaaggaatcctttggatgaaggagatgtttctgttgatgc

SEQ ID NO: 38064 - DNA, 50 bp, synthetic construct
  source 1..50: mol_type = other DNA
ctgctcacagacatagggaccgaggaactggcgcatttcgagatgatcgg

SEQ ID NO: 38065 - DNA, 50 bp, synthetic construct
  source 1..50: mol_type = other DNA
aagaaaatcttgcgaaaacacaagatctgtatctttcaattcaatttctt

SEQ ID NO: 38066 - DNA, 50 bp, synthetic construct
  source 1..50: mol_type = other DNA
tcaatatctggaaataccacttttttcgacaacagctttccagatgctgg

SEQ ID NO: 38067 - DNA, 50 bp, synthetic construct
  source 1..50: mol_type = other DNA
acaggcttcgaaaaaggatacatataccatccggctttttgaaagcaacc

SEQ ID NO: 38068 - DNA, 50 bp, synthetic construct
  source 1..50: mol_type = other DNA
ctctattttatcatattagagacaaatttattgaaattgaaaaaatagaa

SEQ ID NO: 38069 - DNA, 50 bp, synthetic construct
  source 1..50: mol_type = other DNA
catcataaaggtataggtaattgtcgaggatactattgcttttggtcatc

SEQ ID NO: 38070 - DNA, 50 bp, synthetic construct
  source 1..50: mol_type = other DNA
accgtttttcctatccattgcattgcattcaaataaatatcaaaagtggt

SEQ ID NO: 38071 - DNA, 50 bp, synthetic construct
  source 1..50: mol_type = other DNA
gcttcacatccttttagaaagcggtacatcactctaaaaggctgtaaagt

SEQ ID NO: 38072 - DNA, 50 bp, synthetic construct
  source 1..50: mol_type = other DNA
ctggatgaagtggaagatgcagggcgatttggattcatattttgtgtcag

SEQ ID NO: 38073 - DNA, 50 bp, synthetic construct
  source 1..50: mol_type = other DNA
agggaaattttatgcctatcctgtcaataggatatgaaaatcattgtcga

SEQ ID NO: 38074 - DNA, 50 bp, synthetic construct
  source 1..50: mol_type = other DNA
gctggctgtctcctgcctggcggccttggcgacgccatatattgcctctg

SEQ ID NO: 38075 - DNA, 50 bp, synthetic construct
  source 1..50: mol_type = other DNA
aagatgtgcgctcccgaatacgccgcctataattaggcagcgacagctaa

SEQ ID NO: 38076 - DNA, 50 bp, synthetic construct
  source 1..50: mol_type = other DNA
ttgacgctgtccctcacttatggtgtacaccacaaagtggacagctgcaa

SEQ ID NO: 38077 - DNA, 50 bp, synthetic construct
  source 1..50: mol_type = other DNA
cgaccgcggggatactctgaatgatgctatttggaccatcccaaatggcc

SEQ ID NO: 38078 - DNA, 50 bp, synthetic construct
  source 1..50: mol_type = other DNA
ttgcagctgtccactttgtggtgtacaccataagtgagggacagcgtcaa

SEQ ID NO: 38079 - DNA, 50 bp, synthetic construct
  source 1..50: mol_type = other DNA
ccgaatctacatgggttccaaagacctcattcgctatgggaacagtgtat

SEQ ID NO: 38080 - DNA, 50 bp, synthetic construct
  source 1..50: mol_type = other DNA
cacgatccgtcatccccccggaggcccctaatcggcggtgatttttcgtt

SEQ ID NO: 38081 - DNA, 50 bp, synthetic construct
  source 1..50: mol_type = other DNA
ctattatacttaccttttatgtgttttcatagcaaaggcaaatagtttag

SEQ ID NO: 38082 - DNA, 50 bp, synthetic construct
  source 1..50: mol_type = other DNA
ttctaaatcaatttattatttcaaaatgaaaataataagattatttcagg

SEQ ID NO: 38083 - DNA, 50 bp, synthetic construct
  source 1..50: mol_type = other DNA
gaagtcggtcatttctacctctttgattgagaatggaaaagccgtgattg

SEQ ID NO: 38084 - DNA, 50 bp, synthetic construct
  source 1..50: mol_type = other DNA
cgtcggaaaaagagctggatgatccttttcaatgagacgtttggaaatag

SEQ ID NO: 38085 - DNA, 50 bp, synthetic construct
  source 1..50: mol_type = other DNA
ctgtgataaaaacggtctatgatgatcatcatatttatcgttataatcca

SEQ ID NO: 38086 - DNA, 50 bp, synthetic construct
  source 1..50: mol_type = other DNA
gtatatctgtattgtattataatataatttattataacttaaagatataa

SEQ ID NO: 38087 - DNA, 50 bp, synthetic construct
  source 1..50: mol_type = other DNA
tattgtaagcgtgggttgtttctttaatccggcacagaaagctggaaata

SEQ ID NO: 38088 - DNA, 50 bp, synthetic construct
  source 1..50: mol_type = other DNA
agtagtttgagatgggattaatttcatcggtatcttttccgcaatctact

SEQ ID NO: 38089 - DNA, 50 bp, synthetic construct
  source 1..50: mol_type = other DNA
gttttgttcaaaatgcaaccttcgaccgaaccgcgcatgtgcatcaatgg

SEQ ID NO: 38090 - DNA, 50 bp, synthetic construct
  source 1..50: mol_type = other DNA
ttcgcgtggaaatgagatattgggcgtcaagcatttcgcctcccgattcc

SEQ ID NO: 38091 - DNA, 50 bp, synthetic construct
  source 1..50: mol_type = other DNA
tgacatccaagccgaccgctacggccccgtcgcgcggcagcatgtcatca

SEQ ID NO: 38092 - DNA, 50 bp, synthetic construct
  source 1..50: mol_type = other DNA
caggcgctgctcgcggccggggtgatccgctcggccgctatatcgagctg

SEQ ID NO: 38093 - DNA, 50 bp, synthetic construct
  source 1..50: mol_type = other DNA
ggcttcgatggccgccagcatattataatatcaatcaagcactctgttat

SEQ ID NO: 38094 - DNA, 50 bp, synthetic construct
  source 1..50: mol_type = other DNA
gccggggatggtgtcccgaaaaaaagttttttcagaactatatttccggc

SEQ ID NO: 38095 - DNA, 50 bp, synthetic construct
  source 1..50: mol_type = other DNA
ttgggaggcggtcatgctgactgtgagaggtcagctttacttacttttaa

SEQ ID NO: 38096 - DNA, 50 bp, synthetic construct
  source 1..50: mol_type = other DNA
atcgtatgggcggcactcaataaataattctttcgtgttctccatcaaaa

SEQ ID NO: 38097 - DNA, 50 bp, synthetic construct
  source 1..50: mol_type = other DNA
ataagagccggggtgttatatgttttcatgtataacaccccggctctgat

SEQ ID NO: 38098 - DNA, 50 bp, synthetic construct
  source 1..50: mol_type = other DNA
gccattttcaatccggtatccatacgcatagacaccacctccaaaatggc

SEQ ID NO: 38099 - DNA, 50 bp, synthetic construct
  source 1..50: mol_type = other DNA
accctgctctcactgcctcccggccagcctggatgcccagaaggaccggt

SEQ ID NO: 38100 - DNA, 50 bp, synthetic construct
  source 1..50: mol_type = other DNA
cgccctgaagcatttccggatggtgctgcttcctttcatgctgcagcacg

SEQ ID NO: 38101 - DNA, 50 bp, synthetic construct
  source 1..50: mol_type = other DNA
gggtctttttatttctgcccgctggacatccggaagaaataaggctccag

SEQ ID NO: 38102 - DNA, 50 bp, synthetic construct
  source 1..50: mol_type = other DNA
gacaaaaaacatatgatctcattttccggtatcatccggtaagttttcaa

SEQ ID NO: 38103 - DNA, 50 bp, synthetic construct
  source 1..50: mol_type = other DNA
gaactgggcaaatttcgtcaaccggtctgtttccgaagctgctccgcctg

SEQ ID NO: 38104 - DNA, 50 bp, synthetic construct
  source 1..50: mol_type = other DNA
gtgaatgcaatgtctatcaaacaaaccccttggagtaattttgtactcaa

SEQ ID NO: 38105 - DNA, 50 bp, synthetic construct
  source 1..50: mol_type = other DNA
cacgagtaactgcagcagcatgattgctactgctgctttgggtggttttg

SEQ ID NO: 38106 - DNA, 50 bp, synthetic construct
  source 1..50: mol_type = other DNA
gctgctttgggtggttttggtggcggattaggaagaccaccggaatcagc

SEQ ID NO: 38107 - DNA, 50 bp, synthetic construct
  source 1..50: mol_type = other DNA
tgcaacgctgcacttccacctacaaagccagaaggaagctctgcagcaaa

SEQ ID NO: 38108 - DNA, 50 bp, synthetic construct
  source 1..50: mol_type = other DNA
cgggtgattttagatagacacgtttaaacaatggtcaaacgccgtcgagt

SEQ ID NO: 38109 - DNA, 50 bp, synthetic construct
  source 1..50: mol_type = other DNA
cggcagacgttgaagccgcagtagcgcgactgatcacggaatgtggatca

SEQ ID NO: 38110 - DNA, 50 bp, synthetic construct
  source 1..50: mol_type = other DNA
tcgtgccgagagaagaacaaggacaacctcctgttcttcccgttgccgag

SEQ ID NO: 38111 - DNA, 50 bp, synthetic construct
  source 1..50: mol_type = other DNA
tctcatcggcagggacttacaatatatctgagaataaagtgccgaaaaca

SEQ ID NO: 38112 - DNA, 50 bp, synthetic construct
  source 1..50: mol_type = other DNA
atattttccaatttctaagcaatgtgggggtatagtcctttggaaaatac

SEQ ID NO: 38113 - DNA, 50 bp, synthetic construct
  source 1..50: mol_type = other DNA
acagtattatgggttgatgtttctaaagaaacaaagaaaagagtatgtgc

SEQ ID NO: 38114 - DNA, 50 bp, synthetic construct
  source 1..50: mol_type = other DNA
agttaaaacgccaactcatttatgtttgcaaaagaaaataacattagact

SEQ ID NO: 38115 - DNA, 50 bp, synthetic construct
  source 1..50: mol_type = other DNA
caaaagtagacaaaaaaatataaaattccttattttatttagtattttta

SEQ ID NO: 38116 - DNA, 50 bp, synthetic construct
  source 1..50: mol_type = other DNA
gaggaaagtcgtactaaatcggctcgccttcatgaacgtagatctttttt

SEQ ID NO: 38117 - DNA, 50 bp, synthetic construct
  source 1..50: mol_type = other DNA
cgatgatgtcgttctcgatctgctcgagcatcccgaccgcgacctcgtcg

SEQ ID NO: 38118 - DNA, 50 bp, synthetic construct
  source 1..50: mol_type = other DNA
gaactggatggcggacaggatcctcgaggattcgctgcgcgacggcgagc

SEQ ID NO: 38119 - DNA, 50 bp, synthetic construct
  source 1..50: mol_type = other DNA
cccggacgatctgagccaggctttcgagagccctaacgagcgcaaccagt

SEQ ID NO: 38120 - DNA, 50 bp, synthetic construct
  source 1..50: mol_type = other DNA
gaaatcggactggttatgcaaaccgcgggaggcatttccattcgcgtcga

SEQ ID NO: 38121 - DNA, 50 bp, synthetic construct
  source 1..50: mol_type = other DNA
tgccaccctcttacaagaagaaataatattctagttctaatgttgcaaag

SEQ ID NO: 38122 - DNA, 50 bp, synthetic construct
  source 1..50: mol_type = other DNA
atagtaccttgtattacatagaactagtaccttgcattacaaagtactat

SEQ ID NO: 38123 - DNA, 50 bp, synthetic construct
  source 1..50: mol_type = other DNA
tttcccctgggcggcctgccgaaggccttcacgaattcaatgaggggggt

SEQ ID NO: 38124 - DNA, 50 bp, synthetic construct
  source 1..50: mol_type = other DNA
agataggattgcggagaatgccgtttggcctgttctcgatcccgctatct

SEQ ID NO: 38125 - DNA, 50 bp, synthetic construct
  source 1..50: mol_type = other DNA
gttatgtgtcggcagaatttgcctgtagaggtattctgcctgcagcctcg

SEQ ID NO: 38126 - DNA, 50 bp, synthetic construct
  source 1..50: mol_type = other DNA
ttggcttcatcctctttaatcgtggccagaaacaaagagtctcgcgccga

SEQ ID NO: 38127 - DNA, 50 bp, synthetic construct
  source 1..50: mol_type = other DNA
taaatattcgcaagtgccaaatttttaaattagatactacggaataatta

SEQ ID NO: 38128 - DNA, 50 bp, synthetic construct
  source 1..50: mol_type = other DNA
cacaattatattaatagcattttttactccattttattaatattcttctg

SEQ ID NO: 38129 - DNA, 50 bp, synthetic construct
  source 1..50: mol_type = other DNA
aaatatttagttgaaactgggataatcgaagagcttacaactaaaaattt

SEQ ID NO: 38130 - DNA, 50 bp, synthetic construct
  source 1..50: mol_type = other DNA
ctatttataagtgtttctaatgagtttcttttaaaacttctatttgatat

SEQ ID NO: 38131 - DNA, 50 bp, synthetic construct
  source 1..50: mol_type = other DNA
acgattattgtagttaatatacataattttatagcatgtaccatacttac

SEQ ID NO: 38132 - DNA, 50 bp, synthetic construct
  source 1..50: mol_type = other DNA
ctataaatttgttcttaatttctttcttgaaattttcctctattttatag

SEQ ID NO: 38133 - DNA, 50 bp, synthetic construct
  source 1..50: mol_type = other DNA
taggagtaatgaaaaaattttaatatcaggaactactgcctcaactcctt

SEQ ID NO: 38134 - DNA, 50 bp, synthetic construct
  source 1..50: mol_type = other DNA
tgatgatttgttcggaatcgacgagctcgtcatcatcccttgcatcatcg

SEQ ID NO: 38135 - DNA, 50 bp, synthetic construct
  source 1..50: mol_type = other DNA
gttgcgtgatgatctgttcggagtcgacggcgagcggacgaccttcgtaa

SEQ ID NO: 38136 - DNA, 50 bp, synthetic construct
  source 1..50: mol_type = other DNA
tccgcagacaattgaaactggttatatttccaattgaaaccgggatcggg

SEQ ID NO: 38137 - DNA, 50 bp, synthetic construct
  source 1..50: mol_type = other DNA
tgtcgtggaacagtgaaggtaaaacgttttaccttcattgtcgtggaaca

SEQ ID NO: 38138 - DNA, 50 bp, synthetic construct
  source 1..50: mol_type = other DNA
gcaggaccgcgccgaggatcgtcacgtgacgtcgtccgccgcggcctcct

SEQ ID NO: 38139 - DNA, 50 bp, synthetic construct
  source 1..50: mol_type = other DNA
ccttaagaggcctttcttttattaattaagaaggaaaaagtgaaaaaaga

SEQ ID NO: 38140 - DNA, 50 bp, synthetic construct
  source 1..50: mol_type = other DNA
caggcagaaattctctccccgtttagatacggagcaaggaattgttactg

SEQ ID NO: 38141 - DNA, 50 bp, synthetic construct
  source 1..50: mol_type = other DNA
ctccccctcccaaagaacgattcaaaggcatcgtattagggggctcacgt

SEQ ID NO: 38142 - DNA, 50 bp, synthetic construct
  source 1..50: mol_type = other DNA
ctgagatcagagacaatcgttggaagaaacgaaagaagggatgatctttg

SEQ ID NO: 38143 - DNA, 50 bp, synthetic construct
  source 1..50: mol_type = other DNA
aaggagattagttatttgaaaggagctccttagcactaagtttattgaat

SEQ ID NO: 38144 - DNA, 50 bp, synthetic construct
  source 1..50: mol_type = other DNA
gacttcttaatttgcacatttggcatagcacttgtgaaaattataggtgg

SEQ ID NO: 38145 - DNA, 50 bp, synthetic construct
  source 1..50: mol_type = other DNA
cccaatgctggtaaggaaaaggtatataccttttggatataacattcaaa

SEQ ID NO: 38146 - DNA, 50 bp, synthetic construct
  source 1..50: mol_type = other DNA
tgtcatcttagggagaaaaaatataaatattttttatgtataattgtaat

SEQ ID NO: 38147 - DNA, 50 bp, synthetic construct
  source 1..50: mol_type = other DNA
gctacgaaatcgtcgatcgcgaggaggctcgcaatcccctatttgttccg

SEQ ID NO: 38148 - DNA, 50 bp, synthetic construct
  source 1..50: mol_type = other DNA
tcctgccgagggcacttcagaggctatttcgtgtggccggctcggtggat

SEQ ID NO: 38149 - DNA, 50 bp, synthetic construct
  source 1..50: mol_type = other DNA
cgccaccaacgccgcgacgccgaacgttcagctccttggtgtttggtgcg

SEQ ID NO: 38150 - DNA, 50 bp, synthetic construct
  source 1..50: mol_type = other DNA
aagtaaaacgctgtcataatttgtcgataaaatacgtgatcgtcttacag

SEQ ID NO: 38151 - DNA, 50 bp, synthetic construct
  source 1..50: mol_type = other DNA
ggtaccccggagagattcggaacgggtcgattaggtcaccgggtttgacg

SEQ ID NO: 38152 - DNA, 50 bp, synthetic construct
  source 1..50: mol_type = other DNA
gcaacgcgggtacaaagtcgtaggcggtgtacaggatgtcccgcagctga

SEQ ID NO: 38153 - DNA, 50 bp, synthetic construct
  source 1..50: mol_type = other DNA
ccgttcggtgtctcgatagtcgctatcgcgcatcacgtcccaatgacgct

SEQ ID NO: 38154 - DNA, 50 bp, synthetic construct
  source 1..50: mol_type = other DNA
tcaaacaaagactaagtaaagaagatcttcttcagctcaccgcaggcgga

SEQ ID NO: 38155 - DNA, 50 bp, synthetic construct
  source 1..50: mol_type = other DNA
attttatataaacgggagttgttctgccccacaagaaattgattcaacgt

SEQ ID NO: 38156 - DNA, 50 bp, synthetic construct
  source 1..50: mol_type = other DNA
acgtcggaggccaattatgctgcggccgcgtcacgccgctcccccggcgt

SEQ ID NO: 38157 - DNA, 50 bp, synthetic construct
  source 1..50: mol_type = other DNA
cgagccgcggcagtaccgcatgccgcggcggatggtctcgccgtacagcg

SEQ ID NO: 38158 - DNA, 50 bp, synthetic construct
  source 1..50: mol_type = other DNA
gctacggccaccgccggcgccgccgcggtactgccgcggctcgtcgtagt

SEQ ID NO: 38159 - DNA, 50 bp, synthetic construct
  source 1..50: mol_type = other DNA
agtgggcaaaggcccacgactacccggcagatggtggagtcattccagga

SEQ ID NO: 38160 - DNA, 50 bp, synthetic construct
  source 1..50: mol_type = other DNA
gagcaccccggacaggaatccgggaggtcgattagatcaccgggtttgac

SEQ ID NO: 38161 - DNA, 50 bp, synthetic construct
  source 1..50: mol_type = other DNA
gtcttttcgccgtcgcgggtacgccggggtacccacaacgcgtgtcgcgt

SEQ ID NO: 38162 - DNA, 50 bp, synthetic construct
  source 1..50: mol_type = other DNA
aaaatcgttatcttctagaccaaggtcttggtcggtggacactcgacaat

SEQ ID NO: 38163 - DNA, 50 bp, synthetic construct
  source 1..50: mol_type = other DNA
tctttttaaggattttcaaaagatataagggcttaaatataagtaaaaag

SEQ ID NO: 38164 - DNA, 50 bp, synthetic construct
  source 1..50: mol_type = other DNA
cacgcttctagaaataaaggaaagtagttacttttattgaaatgttgatt

SEQ ID NO: 38165 - DNA, 50 bp, synthetic construct
  source 1..50: mol_type = other DNA
ctcaatcaaggatactaaaattatcaataattttactatccctcatttca

SEQ ID NO: 38166 - DNA, 50 bp, synthetic construct
  source 1..50: mol_type = other DNA
tatcaccatagcataacttaaaatccgagttttcacggaagatgaccata

SEQ ID NO: 38167 - DNA, 50 bp, synthetic construct
  source 1..50: mol_type = other DNA
gctttcccccgcttcatcagtgacatgtagcttatatttcaggggacgtt

SEQ ID NO: 38168 - DNA, 50 bp, synthetic construct
  source 1..50: mol_type = other DNA
aattagttcactaaattcacaataaagcgtgagggcagggtgagctttcg

SEQ ID NO: 38169 - DNA, 50 bp, synthetic construct
  source 1..50: mol_type = other DNA
ggcgctgagcgcgccgtcgctggcggccaagcgacgacgactcgagaccg

SEQ ID NO: 38170 - DNA, 50 bp, synthetic construct
  source 1..50: mol_type = other DNA
tcttcatgtccgcgtccatgttctgcccgcggtcagccgggacgcgaaga

SEQ ID NO: 38171 - DNA, 50 bp, synthetic construct
  source 1..50: mol_type = other DNA
tcacgtcccgccgttgctggtcgtaggccgccagcaggggcagggcgatg

SEQ ID NO: 38172 - DNA, 50 bp, synthetic construct
  source 1..50: mol_type = other DNA
ttcgaggaactcagcgcccgcaaccggtcgaacacgaactccgcttcgac

SEQ ID NO: 38173 - DNA, 50 bp, synthetic construct
  source 1..50: mol_type = other DNA
tccgcgacggttccatatcttcacgcgtccccatcgcgaaccctgcgatc

SEQ ID NO: 38174 - DNA, 50 bp, synthetic construct
  source 1..50: mol_type = other DNA
tttatttacagtgaaactaatatttgaaaaatacggtcactgattttaag

SEQ ID NO: 38175 - DNA, 50 bp, synthetic construct
  source 1..50: mol_type = other DNA
taatatctgttttctcattttctgccggcaaaaccatacaacagatgttc

SEQ ID NO: 38176 - DNA, 50 bp, synthetic construct
  source 1..50: mol_type = other DNA
tatttctgccgcaggatttccatatttatctatcgcctttggcaaccatt

SEQ ID NO: 38177 - DNA, 50 bp, synthetic construct
  source 1..50: mol_type = other DNA
actcgattttttgtaaaacccaaccttttggcctgcgacaacaaaaatgt

SEQ ID NO: 38178 - DNA, 50 bp, synthetic construct
  source 1..50: mol_type = other DNA
cagacatgataatgctggtattttataaaataacaagattaaaatcaatt

SEQ ID NO: 38179 - DNA, 50 bp, synthetic construct
  source 1..50: mol_type = other DNA
aagaaaaaccccgaaaaaaggctaaacaccctgatttcgggcgttctctt

SEQ ID NO: 38180 - DNA, 50 bp, synthetic construct
  source 1..50: mol_type = other DNA
atttttacatatttttacttaggagggttgggctgtttttataaaaaaca

SEQ ID NO: 38181 - DNA, 50 bp, synthetic construct
  source 1..50: mol_type = other DNA
gccaaggaaagagaggtgaaaggtattcgcttgtaaggtcattccgttta

SEQ ID NO: 38182 - DNA, 50 bp, synthetic construct
  source 1..50: mol_type = other DNA
ggaagaagcaaccgtaaatatacggaggcatatcatcagtttcttcttcc

SEQ ID NO: 38183 - DNA, 50 bp, synthetic construct
  source 1..50: mol_type = other DNA
atacagacagccgccccgtgtgatatatcaacagatacgtgtagatgtag

SEQ ID NO: 38184 - DNA, 50 bp, synthetic construct
  source 1..50: mol_type = other DNA
ctggataccgatgcagatttcgttcgaatgaacgcggcatttatatgccg

SEQ ID NO: 38185 - DNA, 50 bp, synthetic construct
  source 1..50: mol_type = other DNA
gagttcctcgacgccgcgacgcgggacagagtcgcggcgggctgcaaggg

SEQ ID NO: 38186 - DNA, 50 bp, synthetic construct
  source 1..50: mol_type = other DNA
cggttggcggagatgtgcaggccggtccccaattagccgctggctcacgg

SEQ ID NO: 38187 - DNA, 50 bp, synthetic construct
  source 1..50: mol_type = other DNA
cagtcattgcgctggcccgactggacccaatcgggcgagcagatgtcctg

SEQ ID NO: 38188 - DNA, 50 bp, synthetic construct
  source 1..50: mol_type = other DNA
gacggcgtagtagccaccatcatggccgcgttgctggctatgctcgcgtc

SEQ ID NO: 38189 - DNA, 50 bp, synthetic construct
  source 1..50: mol_type = other DNA
aaatgcgcaaaagcaattgttgctatgcgaacaactcgctcgtcgcattc

SEQ ID NO: 38190 - DNA, 50 bp, synthetic construct
  source 1..50: mol_type = other DNA
gaagttattcatattttgtcgattttaagttccacgatataaacaactac

SEQ ID NO: 38191 - DNA, 50 bp, synthetic construct
  source 1..50: mol_type = other DNA
cgacggtgatgtcgcggaatgagagttctcatccgggtcacgcggcgtgc

SEQ ID NO: 38192 - DNA, 50 bp, synthetic construct
  source 1..50: mol_type = other DNA
gtgaaaaagcaagatttagagtataaatagtaaaaatatacaattttgtg

SEQ ID NO: 38193 - DNA, 50 bp, synthetic construct
  source 1..50: mol_type = other DNA
tttcgttatagtattttatgtaaaaagttctgccaaatcaattaattcaa

SEQ ID NO: 38194 - DNA, 50 bp, synthetic construct
  source 1..50: mol_type = other DNA
tcaagtatattaccgataaatataatggaattttacaaggaaaaactata

SEQ ID NO: 38195 - DNA, 50 bp, synthetic construct
  source 1..50: mol_type = other DNA
gatgttctagaatgctcaagcagcttattgcttgagcaatccaatttaga

SEQ ID NO: 38196 - DNA, 50 bp, synthetic construct
  source 1..50: mol_type = other DNA
caaaagtcatggatgtaccattccagggaagcaaacatcttcccttttta

SEQ ID NO: 38197 - DNA, 50 bp, synthetic construct
  source 1..50: mol_type = other DNA
gatagacgcactaaatcgccaaactttcaagtgatcacaaggatatggat

SEQ ID NO: 38198 - DNA, 50 bp, synthetic construct
  source 1..50: mol_type = other DNA
caggtacaaataccaaaaagcgtgatgagccttatgtgttttgttacgga

SEQ ID NO: 38199 - DNA, 50 bp, synthetic construct
  source 1..50: mol_type = other DNA
atgagaaagaagaggaaatgatttttatttcatctatactagggtctttt

SEQ ID NO: 38200 - DNA, 50 bp, synthetic construct
  source 1..50: mol_type = other DNA
atatatgtcagtgtatataattgataaaccgtatatagcgatataatgta

SEQ ID NO: 38201 - DNA, 50 bp, synthetic construct
  source 1..50: mol_type = other DNA
accgtatccggcacggagcatggcaaggccctctccatgccggggagggc

SEQ ID NO: 38202 - DNA, 50 bp, synthetic construct
  source 1..50: mol_type = other DNA
aataataccttgtttttgtttacaaatgtatctgataacaaagtatgagg

SEQ ID NO: 38203 - DNA, 50 bp, synthetic construct
  source 1..50: mol_type = other DNA
ttggcagaacttgaagaaaaatcggatatttgttcctcaagttcggccat

SEQ ID NO: 38204 - DNA, 50 bp, synthetic construct
  source 1..50: mol_type = other DNA
ggccggtacgggtcagcaccgccacgttgaagattgccgagtaaccggcc

SEQ ID NO: 38205 - DNA, 50 bp, synthetic construct
  source 1..50: mol_type = other DNA
aaggcgtcgacgcccgtcgccactggttgatagatcggcgtccacgcctt

SEQ ID NO: 38206 - DNA, 50 bp, synthetic construct
  source 1..50: mol_type = other DNA
gtcaccgccatcgcggcgatcagccgcttggcatcggcgcgaccggcgac

SEQ ID NO: 38207 - DNA, 50 bp, synthetic construct
  source 1..50: mol_type = other DNA
tatctttggtagtaataagcgattctattgtagggtgagtaccgaagaac

SEQ ID NO: 38208 - DNA, 50 bp, synthetic construct
  source 1..50: mol_type = other DNA
tatttgcagcctaatattaatttgaaaaccttcgtattagcgctcatata

SEQ ID NO: 38209 - DNA, 50 bp, synthetic construct
  source 1..50: mol_type = other DNA
ccgagggcgacaccttcgacaatgaggaaaaaggaaggtgtggcaatgta

SEQ ID NO: 38210 - DNA, 50 bp, synthetic construct
  source 1..50: mol_type = other DNA
ttcacgcgcagattgtcgtactccacggattaccactatccctgccacca

SEQ ID NO: 38211 - DNA, 50 bp, synthetic construct
  source 1..50: mol_type = other DNA
aaaaccatttaaattctatttattaataaaaaaataattagcgtggtttt

SEQ ID NO: 38212 - DNA, 50 bp, synthetic construct
  source 1..50: mol_type = other DNA
caaaaaataaatagttggtgtgctgcagttttataaacattttgtttttg

SEQ ID NO: 38213 - DNA, 50 bp, synthetic construct
  source 1..50: mol_type = other DNA
aacaactaaagaagaattaggcattattgggataaatttctttagttaag

SEQ ID NO: 38214 - DNA, 50 bp, synthetic construct
  source 1..50: mol_type = other DNA
catccttgatgtagctttcggcggctaccaactgagctagtgaatcattg

SEQ ID NO: 38215 - DNA, 50 bp, synthetic construct
  source 1..50: mol_type = other DNA
cgggatgatcgggagcagcgtgaacgttcatcgccagcatcgccagcctg

SEQ ID NO: 38216 - DNA, 50 bp, synthetic construct
  source 1..50: mol_type = other DNA
cccccacttgccgccgtccgaccaaccgaggtgacgatacccagtgtgga

SEQ ID NO: 38217 - DNA, 50 bp, synthetic construct
  source 1..50: mol_type = other DNA
gagcttgctgaacgcgggctgcagatctgccgccacgccaccgcacatcg

SEQ ID NO: 38218 - DNA, 50 bp, synthetic construct
  source 1..50: mol_type = other DNA
ttcccgctattactgggtttattacagaaagtgaagcaaggtatagggaa

SEQ ID NO: 38219 - DNA, 50 bp, synthetic construct
  source 1..50: mol_type = other DNA
atgagcctgcaaatgaacccaagccagcttgtaagttgtcacaggctcta

SEQ ID NO: 38220 - DNA, 50 bp, synthetic construct
  source 1..50: mol_type = other DNA
agcgctttacacagttagggcagcgatctgcttcaaaccactctcgcgct

SEQ ID NO: 38221 - DNA, 50 bp, synthetic construct
  source 1..50: mol_type = other DNA
atgatcatgttcctttctaaaacatatgctatataaattaacaagtatat

SEQ ID NO: 38222 - DNA, 50 bp, synthetic construct
  source 1..50: mol_type = other DNA
tgccccctgctgacccctggacttgtgtctccgggggtaagatgaaggcg

SEQ ID NO: 38223 - DNA, 50 bp, synthetic construct
  source 1..50: mol_type = other DNA
tgagctccgcaatgaaatcctcagaacggtttatttctttgctgatctga

SEQ ID NO: 38224 - DNA, 50 bp, synthetic construct
  source 1..50: mol_type = other DNA
gtaaataaccatgccacctatgagtgatcagcagcggcatggccagctcg

SEQ ID NO: 38225 - DNA, 50 bp, synthetic construct
  source 1..50: mol_type = other DNA
tcgtgaggtaattcgtcaacgttttaaatagtggcaatatcaactctggc

SEQ ID NO: 38226 - DNA, 50 bp, synthetic construct
  source 1..50: mol_type = other DNA
gatacccaattaatatacattcctcaatgaatttatattaatccttgccg

SEQ ID NO: 38227 - DNA, 50 bp, synthetic construct
  source 1..50: mol_type = other DNA
atgtaccctattttatcaaaaaatagtttccttgccgaaatagaataatc

SEQ ID NO: 38228 - DNA, 50 bp, synthetic construct
  source 1..50: mol_type = other DNA
cgcggcatcctcaccccacgcgaagctccggcgtggtgggggattccatc

SEQ ID NO: 38229 - DNA, 50 bp, synthetic construct
  source 1..50: mol_type = other DNA
ctgagcgcctgcgcgccgagcgaggccgcgctccacgctctagcgcgcac

SEQ ID NO: 38230 - DNA, 50 bp, synthetic construct
  source 1..50: mol_type = other DNA
taaatttaaaacgataggaaatggtgcagcttactgccgtgtatcaacgg

SEQ ID NO: 38231 - DNA, 50 bp, synthetic construct
  source 1..50: mol_type = other DNA
acggatgaaaattttaaagatgattcttcttccggctccggctcatccgt

SEQ ID NO: 38232 - DNA, 50 bp, synthetic construct
  source 1..50: mol_type = other DNA
acgaagttgtgctgctgcatagcttttcctgtgcagctgccttacaaatc

SEQ ID NO: 38233 - DNA, 50 bp, synthetic construct
  source 1..50: mol_type = other DNA
ctccaaatggggctaaacacttagtactaagtatacatccccaaatcctg

SEQ ID NO: 38234 - DNA, 50 bp, synthetic construct
  source 1..50: mol_type = other DNA
gcgccatcaccggcacccggtggaattggccatcctgccttcgccggcgg

SEQ ID NO: 38235 - DNA, 50 bp, synthetic construct
  source 1..50: mol_type = other DNA
ttatcaatatatcttaaagaagataaaacttctttaattcaatttgataa

SEQ ID NO: 38236 - DNA, 50 bp, synthetic construct
  source 1..50: mol_type = other DNA
tattttatttattttatgattataattgatgaataaaaaaaatataaatc

SEQ ID NO: 38237 - DNA, 50 bp, synthetic construct
  source 1..50: mol_type = other DNA
cagatacaaaccccactgcattttttaaaatgcttttatcactataattt

SEQ ID NO: 38238 - DNA, 50 bp, synthetic construct
  source 1..50: mol_type = other DNA
atgagaaaattatcatttgagagtttgatattaatgattatttttatcat

SEQ ID NO: 38239 - DNA, 50 bp, synthetic construct
  source 1..50: mol_type = other DNA
acttaaagccaacaaattagtttattaaaactaatccaccaattcctcca

SEQ ID NO: 38240 - DNA, 50 bp, synthetic construct
  source 1..50: mol_type = other DNA
gtgttttccaaatagaaaaatggcttttaaactttccatttggactgtcg

SEQ ID NO: 38241 - DNA, 50 bp, synthetic construct
  source 1..50: mol_type = other DNA
aaattaggatcgaatcataaagtttttttttatgttttctcttctaattt

SEQ ID NO: 38242 - DNA, 50 bp, synthetic construct
  source 1..50: mol_type = other DNA
cgggccgacgccgcgctgttcggcgcttcgatccgcgcggggtcggcgcg

SEQ ID NO: 38243 - DNA, 50 bp, synthetic construct
  source 1..50: mol_type = other DNA
ctcagtatttcgcttaaaggacgaacattagacttgagccaaatactgac

SEQ ID NO: 38244 - DNA, 50 bp, synthetic construct
  source 1..50: mol_type = other DNA
gctggatctggtgcgtttcctcgcgcgcggagacattgccatccgccagc

SEQ ID NO: 38245 - DNA, 50 bp, synthetic construct
  source 1..50: mol_type = other DNA
ggcaagagaaaaccctgcaaaatggtcatttgatagtaaatttccccaga

SEQ ID NO: 38246 - DNA, 50 bp, synthetic construct
  source 1..50: mol_type = other DNA
actcatgaatggagagagtgtagttaactaaaacctcaattgaatccata

SEQ ID NO: 38247 - DNA, 50 bp, synthetic construct
  source 1..50: mol_type = other DNA
atttgatcttttgttactttttcatttgaaaaagagagcgtagcgtttgc

SEQ ID NO: 38248 - DNA, 50 bp, synthetic construct
  source 1..50: mol_type = other DNA
tgatttaagtgaagaagaaggcgttaggcgtatgttcttgcgttttggca

SEQ ID NO: 38249 - DNA, 50 bp, synthetic construct
  source 1..50: mol_type = other DNA
tatagaatacatattctttatcggactcactatgcggtgtgaattttata

SEQ ID NO: 38250 - DNA, 50 bp, synthetic construct
  source 1..50: mol_type = other DNA
ttctgactttttatattatatttctggaagaaactgattcgaagttagaa

SEQ ID NO: 38251 - DNA, 50 bp, synthetic construct
  source 1..50: mol_type = other DNA
ttctcctttttttattttcgctgtataccattaaaatactaaaaaaagaa

SEQ ID NO: 38252 - DNA, 50 bp, synthetic construct
  source 1..50: mol_type = other DNA
ctttgcgccgacgacgtcgagctgatgacgtcgtagtcccaggcgcgcag

SEQ ID NO: 38253 - DNA, 50 bp, synthetic construct
  source 1..50: mol_type = other DNA
aaggctgacaccgaggctgcacatgcgtggatcaggacatcgaagccctt

SEQ ID NO: 38254 - DNA, 50 bp, synthetic construct
  source 1..50: mol_type = other DNA
attgaacgtattcaattgcaactataacgttaaaacgtgataaggtcacg

SEQ ID NO: 38255 - DNA, 50 bp, synthetic construct
  source 1..50: mol_type = other DNA
attgatcgaaatggacgtacataaataagattaacaataatgtgattaaa

SEQ ID NO: 38256 - DNA, 50 bp, synthetic construct
  source 1..50: mol_type = other DNA
ctttagaaggaggatttttaacggtgctattaaaaataatccaatgtttt

SEQ ID NO: 38257 - DNA, 50 bp, synthetic construct
  source 1..50: mol_type = other DNA
tcatagtgagcaacgggccgcttaaataatttgcaggtttccagaatatc

SEQ ID NO: 38258 - DNA, 50 bp, synthetic construct
  source 1..50: mol_type = other DNA
atgaacaaaaaaaacacgtgattgaacaaagacctgttttttcaggttgg

SEQ ID NO: 38259 - DNA, 50 bp, synthetic construct
  source 1..50: mol_type = other DNA
atgaattttacaaaacaaaaaaataaacattttttccaagtaaaaaccag

SEQ ID NO: 38260 - DNA, 50 bp, synthetic construct
  source 1..50: mol_type = other DNA
gcgaatcccgatattgtaaaacgtattgatttttcaatatcattatattc

SEQ ID NO: 38261 - DNA, 50 bp, synthetic construct
  source 1..50: mol_type = other DNA
tttcggaattttggctccaaggtcaagacctcctaaaaaagggtataaaa

SEQ ID NO: 38262 - DNA, 50 bp, synthetic construct
  source 1..50: mol_type = other DNA
ccgatggaggggcggaggcaaaggatccgggccctgcgggccaaaatagg

SEQ ID NO: 38263 - DNA, 50 bp, synthetic construct
  source 1..50: mol_type = other DNA
cacacgccccacagccgcaggatgcctatcctgaaatcaaggcccgtgtg

SEQ ID NO: 38264 - DNA, 50 bp, synthetic construct
  source 1..50: mol_type = other DNA
cccgtgtgctgtacagtgcatccgacctatatcatgtccagttactccgg

SEQ ID NO: 38265 - DNA, 50 bp, synthetic construct
  source 1..50: mol_type = other DNA
ccatgatgcaacatccatgcaccaattggcagggggatgtgatgtcagac

SEQ ID NO: 38266 - DNA, 50 bp, synthetic construct
  source 1..50: mol_type = other DNA
tttaggaaaatttcctatcaaatgaccattttgcagggttttctcttgcc

SEQ ID NO: 38267 - DNA, 50 bp, synthetic construct
  source 1..50: mol_type = other DNA
cgtaggcaaatctcgtatttcttctgctgccaatgcaacacctgcctatc

SEQ ID NO: 38268 - DNA, 50 bp, synthetic construct
  source 1..50: mol_type = other DNA
caacttcgcattattcaatgtgccatgaagaatagcaaaaatggatcttg

SEQ ID NO: 38269 - DNA, 50 bp, synthetic construct
  source 1..50: mol_type = other DNA
caggcgcttgtattgtttgctcacgcgcgagccgtcacgctcagcaggtt

SEQ ID NO: 38270 - DNA, 50 bp, synthetic construct
  source 1..50: mol_type = other DNA
caagcagcagccccgcaggaaagcggcgcaaccgacaggcgcgccgcttg

SEQ ID NO: 38271 - DNA, 50 bp, synthetic construct
  source 1..50: mol_type = other DNA
atattcttccagattgatcacttcatgatataatcaatttgcgagaatga

SEQ ID NO: 38272 - DNA, 50 bp, synthetic construct
  source 1..50: mol_type = other DNA
gtcaaagcccatttcgtcctttaataccgtccgacactaaaggccaaaac

SEQ ID NO: 38273 - DNA, 50 bp, synthetic construct
  source 1..50: mol_type = other DNA
atattaaaaaatgcttgcgtagctgcagctaaataatactattatatata

SEQ ID NO: 38274 - DNA, 50 bp, synthetic construct
  source 1..50: mol_type = other DNA
cgatcggcagatggaatacgccgcgcgtcgcgggcgtcatctgcacggcc

SEQ ID NO: 38275 - DNA, 50 bp, synthetic construct
  source 1..50: mol_type = other DNA
acatactgggggggcaatgtgccggccgcgccgcaatacccgcaatatgt

SEQ ID NO: 38276 - DNA, 50 bp, synthetic construct
  source 1..50: mol_type = other DNA
tactcattttgcgtaagccaatggattcatcaatttacgcgaaagtcgat

SEQ ID NO: 38277 - DNA, 50 bp, synthetic construct
  source 1..50: mol_type = other DNA
aacattctttatagagaaaacgaatattcatttatggctattcaaaccgc

SEQ ID NO: 38278 - DNA, 50 bp, synthetic construct
  source 1..50: mol_type = other DNA
ggcagcaggcagcagcgccgatcggcgcgtcggcgacgatgcgcgccgcc

SEQ ID NO: 38279 - DNA, 50 bp, synthetic construct
  source 1..50: mol_type = other DNA
cgcaactgcgtgatgatttgctcggacgagaacatcggcacgccgccgct

SEQ ID NO: 38280 - DNA, 50 bp, synthetic construct
  source 1..50: mol_type = other DNA
gtggaagcttattgcaacatgaataaaatccgtgaccccgttacaggtga

SEQ ID NO: 38281 - DNA, 50 bp, synthetic construct
  source 1..50: mol_type = other DNA
aaagagggcattgcacggctgtgccagcccagccgcgcgaaaaagaatcg

SEQ ID NO: 38282 - DNA, 50 bp, synthetic construct
  source 1..50: mol_type = other DNA
gacgaacgctcgcgcccattatgccggcatctatcgcccgcgcgtgcgtg

SEQ ID NO: 38283 - DNA, 50 bp, synthetic construct
  source 1..50: mol_type = other DNA
atgctcagagcaacttccgtagattgtgctgatagacctgccgtatgcgc

SEQ ID NO: 38284 - DNA, 50 bp, synthetic construct
  source 1..50: mol_type = other DNA
ctttgtggtgtataccggtttactttagttaattatgaaacaccttaaag

SEQ ID NO: 38285 - DNA, 50 bp, synthetic construct
  source 1..50: mol_type = other DNA
ggtgcgtaaaattggtgaaggaattaattctgcagcatattttaatagtt

SEQ ID NO: 38286 - DNA, 50 bp, synthetic construct
  source 1..50: mol_type = other DNA
gacatattttttgattctacaaattttaagtacgatttaaagtttatatt

SEQ ID NO: 38287 - DNA, 50 bp, synthetic construct
  source 1..50: mol_type = other DNA
caatctgaaagacccagaactgggattcgcccgaaaggtccttcaggatg

SEQ ID NO: 38288 - DNA, 50 bp, synthetic construct
  source 1..50: mol_type = other DNA
ccaaacacatacacgacagccagacgcacgactgtgcgccttttgttctt

SEQ ID NO: 38289 - DNA, 50 bp, synthetic construct
  source 1..50: mol_type = other DNA
acggtcatcccagagagtgccgccgcggcgctcaaggcgaatatggcccg

SEQ ID NO: 38290 - DNA, 50 bp, synthetic construct
  source 1..50: mol_type = other DNA
ctgcgatcttgtcttcggccacggcgcgagttcgcgcccattcctcgttt

SEQ ID NO: 38291 - DNA, 50 bp, synthetic construct
  source 1..50: mol_type = other DNA
tcgctccgctgtcggccgaccggccgggcgccgggcgcgaggcggagcgg

SEQ ID NO: 38292 - DNA, 50 bp, synthetic construct
  source 1..50: mol_type = other DNA
attacacaataaaaatctagtttctagatacgagattttccaagtaaggc

SEQ ID NO: 38293 - DNA, 50 bp, synthetic construct
  source 1..50: mol_type = other DNA
aagcaccactaaagggtgcctgtttaatcaagcaatattttgttctaatt

SEQ ID NO: 38294 - DNA, 50 bp, synthetic construct
  source 1..50: mol_type = other DNA
taaaattatttatatattacatgacattatttagtgccggaatggttcgt

SEQ ID NO: 38295 - DNA, 50 bp, synthetic construct
  source 1..50: mol_type = other DNA
aaagcccaattaatagggctttttattaagtttccttttaattgctcttt

SEQ ID NO: 38296 - DNA, 50 bp, synthetic construct
  source 1..50: mol_type = other DNA
ttaaaattttcaagagcatatattactttaattgcttcattcttttttaa

SEQ ID NO: 38297 - DNA, 50 bp, synthetic construct
  source 1..50: mol_type = other DNA
tagtttctttaatgtttgcactactgcacttgaacttggcggacaaaaat

SEQ ID NO: 38298 - DNA, 50 bp, synthetic construct
  source 1..50: mol_type = other DNA
aaaagaacataaaaaacttattgagctctttactattcataagctctttt

SEQ ID NO: 38299 - DNA, 50 bp, synthetic construct
  source 1..50: mol_type = other DNA
ttttattaattatcatatttatttctttttcctccacatcatatgtaatg

SEQ ID NO: 38300 - DNA, 50 bp, synthetic construct
  source 1..50: mol_type = other DNA
aatgttaattttctatttttactcggataaaaaaacagaaatgtagcatt

SEQ ID NO: 38301 - DNA, 50 bp, synthetic construct
  source 1..50: mol_type = other DNA
attcaataacattagattcaatttattacttactcgtaataaaattaaaa

SEQ ID NO: 38302 - DNA, 50 bp, synthetic construct
  source 1..50: mol_type = other DNA
caccctaatgatataaatccaatcttgagaggatgtatgaatttattagt

SEQ ID NO: 38303 - DNA, 50 bp, synthetic construct
  source 1..50: mol_type = other DNA
cgcataacgtagtgactgcaagggatcgaatcctgttactacgccggtga

SEQ ID NO: 38304 - DNA, 50 bp, synthetic construct
  source 1..50: mol_type = other DNA
taacaggcttactttctatcgtttcatgtcagaagtaatcaaaactgtta

SEQ ID NO: 38305 - DNA, 50 bp, synthetic construct
  source 1..50: mol_type = other DNA
tggacttatttaaagttacacccgaatgataataaaattaaagaactgga

SEQ ID NO: 38306 - DNA, 50 bp, synthetic construct
  source 1..50: mol_type = other DNA
gacagtagaaaaattgataagtgcttatctgcttcatcctttctcctacg

SEQ ID NO: 38307 - DNA, 50 bp, synthetic construct
  source 1..50: mol_type = other DNA
acacaccataaatgataagaatcctcctcttcctaacattcaaaatctgt

SEQ ID NO: 38308 - DNA, 50 bp, synthetic construct
  source 1..50: mol_type = other DNA
tatttcttatcaccgtttacttttcgaaaaggcacaggagaaattaaata

SEQ ID NO: 38309 - DNA, 50 bp, synthetic construct
  source 1..50: mol_type = other DNA
tatatgcaaattatttatttgtctatttattaataagaaggttaactttc

SEQ ID NO: 38310 - DNA, 50 bp, synthetic construct
  source 1..50: mol_type = other DNA
ttttcattaacgacagccctgccgtttttcaatatcttcaaaaatcttaa

SEQ ID NO: 38311 - DNA, 50 bp, synthetic construct
  source 1..50: mol_type = other DNA
attatatcgttaaatctatgtaatatatttttaaggacaaaaaatatggc

SEQ ID NO: 38312 - DNA, 50 bp, synthetic construct
  source 1..50: mol_type = other DNA
agtattcggaatcagaagtgatgacttatctgtttcatcttcctgctcat

SEQ ID NO: 38313 - DNA, 50 bp, synthetic construct
  source 1..50: mol_type = other DNA
ccaatcggagtggcggtaataggcgtatgtattacagcgtcccatatcgg

SEQ ID NO: 38314 - DNA, 50 bp, synthetic construct
  source 1..50: mol_type = other DNA
tggcgttgtcattcagcaattctcagtagaaaagcattatgacatgattt

SEQ ID NO: 38315 - DNA, 50 bp, synthetic construct
  source 1..50: mol_type = other DNA
gcgcggctgtgccaaagcgggtgtcgaggaacgagtgaagcacgccgccg

SEQ ID NO: 38316 - DNA, 50 bp, synthetic construct
  source 1..50: mol_type = other DNA
cttccacccagtcgataatgttctcgcccggtatagtttcattgctgaaa

SEQ ID NO: 38317 - DNA, 50 bp, synthetic construct
  source 1..50: mol_type = other DNA
agatggtgatgaacgcctgaaaaaatttttaaaaaccatgcgcagggtct

SEQ ID NO: 38318 - DNA, 50 bp, synthetic construct
  source 1..50: mol_type = other DNA
ataacagtgtttttcatgatattcttggaaaacatgaaaataaatggttt

SEQ ID NO: 38319 - DNA, 50 bp, synthetic construct
  source 1..50: mol_type = other DNA
tcctcgatagctcagtcggtagagcgccgggaacactgtcatcctgcggt

SEQ ID NO: 38320 - DNA, 50 bp, synthetic construct
  source 1..50: mol_type = other DNA
agctacaagccatcaagtccaggttgggatggcgctggcgcaagcgcgca

SEQ ID NO: 38321 - DNA, 50 bp, synthetic construct
  source 1..50: mol_type = other DNA
gtaccgtggttatactggaaaagagctcgattccttacagtcaactagaa

SEQ ID NO: 38322 - DNA, 50 bp, synthetic construct
  source 1..50: mol_type = other DNA
atctttatgtgtggcaagctcacagagcagagttttacacctaattgggg

SEQ ID NO: 38323 - DNA, 50 bp, synthetic construct
  source 1..50: mol_type = other DNA
ggtgtaatgataatatctgtggaatatggtgcagataattttatcattag

SEQ ID NO: 38324 - DNA, 50 bp, synthetic construct
  source 1..50: mol_type = other DNA
tctcgccgattgtggcggcggcggcgccgccacctcatcaagcgtcgcgg

SEQ ID NO: 38325 - DNA, 50 bp, synthetic construct
  source 1..50: mol_type = other DNA
cgcgctgacggtcgagttcctcgagctccttgagctcttcggcccgctcg

SEQ ID NO: 38326 - DNA, 50 bp, synthetic construct
  source 1..50: mol_type = other DNA
atttttaaaattatatcacaaattaatggatctcatatagttttaaatat

SEQ ID NO: 38327 - DNA, 50 bp, synthetic construct
  source 1..50: mol_type = other DNA
agggttttctacgaccttcccttgcgcaggagcgctccaaaggaaaaccc

SEQ ID NO: 38328 - DNA, 50 bp, synthetic construct
  source 1..50: mol_type = other DNA
cgccattttcccttagttaaagatattgtcttggaggaattaaaatggcg

SEQ ID NO: 38329 - DNA, 50 bp, synthetic construct
  source 1..50: mol_type = other DNA
agtgagtttcccaaaattcttatttttataatcattttctaacctattct

SEQ ID NO: 38330 - DNA, 50 bp, synthetic construct
  source 1..50: mol_type = other DNA
aacaaaatctgtattatcaaagatataatttttctatatcatatataatt

SEQ ID NO: 38331 - DNA, 50 bp, synthetic construct
  source 1..50: mol_type = other DNA
tttaaatacattataccattatcacttccctttgcttgtttttattttat

SEQ ID NO: 38332 - DNA, 50 bp, synthetic construct
  source 1..50: mol_type = other DNA
taactcaggatcttttagattaattttttaatgttttctctcctaatttt

SEQ ID NO: 38333 - DNA, 50 bp, synthetic construct
  source 1..50: mol_type = other DNA
tttttatattaaattttatcttttacataatatcaaattaaataaaaaat

SEQ ID NO: 38334 - DNA, 50 bp, synthetic construct
  source 1..50: mol_type = other DNA
cacacctgtgggagccggattccatcaggaagaccagctccacagctttg

SEQ ID NO: 38335 - DNA, 50 bp, synthetic construct
  source 1..50: mol_type = other DNA
accatcataaagggatggggagagatatggtccgggcagtaactgagaaa

SEQ ID NO: 38336 - DNA, 50 bp, synthetic construct
  source 1..50: mol_type = other DNA
ggaacgattggtttaattaaaggcatgccgatgagtacaccaatgaatgg

SEQ ID NO: 38337 - DNA, 50 bp, synthetic construct
  source 1..50: mol_type = other DNA
gggtttgccgggggcttggccccatatcgcgccaaagctgcggcaaatgc

SEQ ID NO: 38338 - DNA, 50 bp, synthetic construct
  source 1..50: mol_type = other DNA
gatcacatcatgcccgatagccgtataaatttgaaggaaaggagatgatc

SEQ ID NO: 38339 - DNA, 50 bp, synthetic construct
  source 1..50: mol_type = other DNA
attggatcgaagggcacaggatcgcaccatcaccggccagcccgtcaccc

SEQ ID NO: 38340 - DNA, 50 bp, synthetic construct
  source 1..50: mol_type = other DNA
atacggcttgtcttcgtgtagtttataaacgaaattaagaaaagcctgta

SEQ ID NO: 38341 - DNA, 50 bp, synthetic construct
  source 1..50: mol_type = other DNA
gaacgctcatgggcagaccgttcacgctgaaggtctgcccctgctggtta

SEQ ID NO: 38342 - DNA, 50 bp, synthetic construct
  source 1..50: mol_type = other DNA
cgtgccatttggcccctctgcgtaccggcgcaaaggggcgatagggctcg

SEQ ID NO: 38343 - DNA, 50 bp, synthetic construct
  source 1..50: mol_type = other DNA
ggcggtcaccgtggatggccgaggccgccagataatcctcgcgtgccgcg

SEQ ID NO: 38344 - DNA, 50 bp, synthetic construct
  source 1..50: mol_type = other DNA
tctggccgatatcagccgccatcgccccatggtcaacaatcccgccgccc

SEQ ID NO: 38345 - DNA, 50 bp, synthetic construct
  source 1..50: mol_type = other DNA
agcaatttacgtctacttcgccctccatcgcgatgtggggctaatgcctg

SEQ ID NO: 38346 - DNA, 50 bp, synthetic construct
  source 1..50: mol_type = other DNA
tcgctttagagtgatgtatagacgtacattgcccggttccaacttagcgt

SEQ ID NO: 38347 - DNA, 50 bp, synthetic construct
  source 1..50: mol_type = other DNA
ggagagcgcctgccgcaggaaattatccttttttgcttacaatagtttct

SEQ ID NO: 38348 - DNA, 50 bp, synthetic construct
  source 1..50: mol_type = other DNA
aaaagaaaaacaccctgcattgctgcagcatcgtccagttgatttttatt

SEQ ID NO: 38349 - DNA, 50 bp, synthetic construct
  source 1..50: mol_type = other DNA
ccggaaatgtattcttcgaaaaacttttcttcctgataaataattttcat

SEQ ID NO: 38350 - DNA, 50 bp, synthetic construct
  source 1..50: mol_type = other DNA
acgaggcgcgccagaccatccgccgcggcttgcggtcgggcgcgcgaaac

SEQ ID NO: 38351 - DNA, 50 bp, synthetic construct
  source 1..50: mol_type = other DNA
atcgatttggctcggtatttggcaagaaccatataaatcgccaacattaa

SEQ ID NO: 38352 - DNA, 50 bp, synthetic construct
  source 1..50: mol_type = other DNA
ttataattacatctaatggagtgacattactgctgatgatgttgaaaaac

SEQ ID NO: 38353 - DNA, 50 bp, synthetic construct
  source 1..50: mol_type = other DNA
aagaatattttgatatttttgaagttggtgaaaaataaccaaacaccaaa

SEQ ID NO: 38354 - DNA, 50 bp, synthetic construct
  source 1..50: mol_type = other DNA
gccatttttgccatcgcaacggcgccggtgattgcggtggcgattgccga

SEQ ID NO: 38355 - DNA, 50 bp, synthetic construct
  source 1..50: mol_type = other DNA
taagaaattagtatttaggaattagagacgcaataaatcccgattttata

SEQ ID NO: 38356 - DNA, 50 bp, synthetic construct
  source 1..50: mol_type = other DNA
ggatgcgttcggaatcgacgagcgcctgctcgcggatcccgatcgccagc

SEQ ID NO: 38357 - DNA, 50 bp, synthetic construct
  source 1..50: mol_type = other DNA
tccacgcgcaactgggtgaggatgcgcgccctgtaccgcatgcgcgggga

SEQ ID NO: 38358 - DNA, 50 bp, synthetic construct
  source 1..50: mol_type = other DNA
atgtccgggcacaacgcacgccagcgctgcgacatcgaaagcctgggcta

SEQ ID NO: 38359 - DNA, 50 bp, synthetic construct
  source 1..50: mol_type = other DNA
ctccacgcgcagctgggtgaggatgcgccctgcaccgcatgcgcggggat

SEQ ID NO: 38360 - DNA, 50 bp, synthetic construct
  source 1..50: mol_type = other DNA
taaaagacttgataaatgaggcttttggtagttacttatcacatcttaga

SEQ ID NO: 38361 - DNA, 50 bp, synthetic construct
  source 1..50: mol_type = other DNA
tacaaaagagattggaggttgcgaatatactacgggaaatgacacatgag

SEQ ID NO: 38362 - DNA, 50 bp, synthetic construct
  source 1..50: mol_type = other DNA
taattaaatctcaaaaattgatgagacgtacagaaattgaaaatttatta

SEQ ID NO: 38363 - DNA, 50 bp, synthetic construct
  source 1..50: mol_type = other DNA
agttaagcagattgtttttttacaatcgtaaaaatgatttgggctatgga

SEQ ID NO: 38364 - DNA, 50 bp, synthetic construct
  source 1..50: mol_type = other DNA
tggctgagcaggtggtaaacgacgttcgtcgtctccgacagcctcaaaaa

SEQ ID NO: 38365 - DNA, 50 bp, synthetic construct
  source 1..50: mol_type = other DNA
tttttatttttttggattttatttttttaaaaatttaaacaaactaaaag

SEQ ID NO: 38366 - DNA, 50 bp, synthetic construct
  source 1..50: mol_type = other DNA
ttgagtattttagaatttcaaaagttttttaaaaatttaaacaaactaaa

SEQ ID NO: 38367 - DNA, 50 bp, synthetic construct
  source 1..50: mol_type = other DNA
gaattttctcgtcatgttcttgagcaaaagaaaggctgttacaaaaatca

SEQ ID NO: 38368 - DNA, 50 bp, synthetic construct
  source 1..50: mol_type = other DNA
actcggaataggtgatctctaatggtcattagactggttttattatgatc

SEQ ID NO: 38369 - DNA, 50 bp, synthetic construct
  source 1..50: mol_type = other DNA
agggcggtggcgtgggtgccttgccgggttcgggcataactcaccgcctg

SEQ ID NO: 38370 - DNA, 50 bp, synthetic construct
  source 1..50: mol_type = other DNA
ccgaggcgcgcgaggcgatcgacggcggctgagcgcctcggaggcgtcgg

SEQ ID NO: 38371 - DNA, 50 bp, synthetic construct
  source 1..50: mol_type = other DNA
tcaatgtaaaaaaattgtgccaacttgaggcggcagcttggtgcgcttga

SEQ ID NO: 38372 - DNA, 50 bp, synthetic construct
  source 1..50: mol_type = other DNA
ggattcccatgtccttgtgttctccaaagagaactaggaaaaactttcaa

SEQ ID NO: 38373 - DNA, 50 bp, synthetic construct
  source 1..50: mol_type = other DNA
ggatttaactttaccattttcaaactttttccacttaccaagttaaatgt

SEQ ID NO: 38374 - DNA, 50 bp, synthetic construct
  source 1..50: mol_type = other DNA
ctaaatttctttgctactggaataacatctcatgtgtccttgaaatcagt

SEQ ID NO: 38375 - DNA, 50 bp, synthetic construct
  source 1..50: mol_type = other DNA
ttgccatttttgatgatgtatccgaatgtgtggcctgaaaaaaatcacaa

SEQ ID NO: 38376 - DNA, 50 bp, synthetic construct
  source 1..50: mol_type = other DNA
taaatatcaaaaaaaatcacttagatctatgatataattttacttaagag

SEQ ID NO: 38377 - DNA, 50 bp, synthetic construct
  source 1..50: mol_type = other DNA
aaataattgtcaacaattttaaatatagttattcaagcttcgatgtactt

SEQ ID NO: 38378 - DNA, 50 bp, synthetic construct
  source 1..50: mol_type = other DNA
acgcttgttggtatgttccctctgtataccatagtaataacaacctagga

SEQ ID NO: 38379 - DNA, 50 bp, synthetic construct
  source 1..50: mol_type = other DNA
atatgtcacatcaacggaggtgacaattaatttatgatgaagtttcatag

SEQ ID NO: 38380 - DNA, 50 bp, synthetic construct
  source 1..50: mol_type = other DNA
ttgggctgaccgctcaagagcagagagtccttcttgagaagctctccaaa

SEQ ID NO: 38381 - DNA, 50 bp, synthetic construct
  source 1..50: mol_type = other DNA
ccagccaataattggcaatctatctcatcatcttgataattcatggcgac

SEQ ID NO: 38382 - DNA, 50 bp, synthetic construct
  source 1..50: mol_type = other DNA
caaatcaaccggttctggccttcccgggattctcaaccgataccgatgct

SEQ ID NO: 38383 - DNA, 50 bp, synthetic construct
  source 1..50: mol_type = other DNA
caatgtgagagctgcggttagaattatgcggcctttgtgctggaacaggt

SEQ ID NO: 38384 - DNA, 50 bp, synthetic construct
  source 1..50: mol_type = other DNA
gctaaattgttaggtacatcttctaatctatatgtaccatacaatatatc

SEQ ID NO: 38385 - DNA, 50 bp, synthetic construct
  source 1..50: mol_type = other DNA
acccgtataaaaattatttttcattaataaagaatagaataatttaggat

SEQ ID NO: 38386 - DNA, 50 bp, synthetic construct
  source 1..50: mol_type = other DNA
agaggtatgagtattgaaattgaaaagtacatttcaggactttctctagc

SEQ ID NO: 38387 - DNA, 50 bp, synthetic construct
  source 1..50: mol_type = other DNA
acttagttggcgtaggaagtagatgcaatgcgagtcaacgcgctgtaaga

SEQ ID NO: 38388 - DNA, 50 bp, synthetic construct
  source 1..50: mol_type = other DNA
actatatttgaccttggacgtgagctaccacgttcactgacaaaaatctc

SEQ ID NO: 38389 - DNA, 50 bp, synthetic construct
  source 1..50: mol_type = other DNA
cttcagtacaagaaaaaaagcattaaccttagcttttttcaagaatgtca

SEQ ID NO: 38390 - DNA, 50 bp, synthetic construct
  source 1..50: mol_type = other DNA
atatataagtccaaactataattggtatctgtcagttttgcaatatatgc

SEQ ID NO: 38391 - DNA, 50 bp, synthetic construct
  source 1..50: mol_type = other DNA
gaaaacaatccctattgcatggaaattcacaaagcgaagggtagcaggtt

SEQ ID NO: 38392 - DNA, 50 bp, synthetic construct
  source 1..50: mol_type = other DNA
ttacatttaattctattgattactcgagttatctatcgctgcaatcagaa

SEQ ID NO: 38393 - DNA, 50 bp, synthetic construct
  source 1..50: mol_type = other DNA
gaccttttactaaattcaacattatgtaacatttgcttgcgtaaagattc

SEQ ID NO: 38394 - DNA, 50 bp, synthetic construct
  source 1..50: mol_type = other DNA
tctgcatagatgtctactaactcataagagtcttatgatagctccaatta

SEQ ID NO: 38395 - DNA, 50 bp, synthetic construct
  source 1..50: mol_type = other DNA
aatcacgggttaaaaatccatgcgaacgcagcgctctcccgaacgcgaca

SEQ ID NO: 38396 - DNA, 50 bp, synthetic construct
  source 1..50: mol_type = other DNA
atccgaaacaaactgtaaaaacaaatgcgttttattcacagattttagac

SEQ ID NO: 38397 - DNA, 50 bp, synthetic construct
  source 1..50: mol_type = other DNA
gaactgtggaatatttttgtcgaaatcgggccaaatggtatccacagttt

SEQ ID NO: 38398 - DNA, 50 bp, synthetic construct
  source 1..50: mol_type = other DNA
tcagacaaggctttaagcgctgaatattaagacggttgaagaaagtctgc

SEQ ID NO: 38399 - DNA, 50 bp, synthetic construct
  source 1..50: mol_type = other DNA
ggatttcaaaatgttttattttgaaaagaagatacaagagatattttttg

SEQ ID NO: 38400 - DNA, 50 bp, synthetic construct
  source 1..50: mol_type = other DNA
ctggaactaaagtaacaaaaatggatactttttcaaaatattatcataag

SEQ ID NO: 38401 - DNA, 50 bp, synthetic construct
  source 1..50: mol_type = other DNA
ttcctagaaggtatgttagaaaggcactcattcaagcttttttctagttg

SEQ ID NO: 38402 - DNA, 50 bp, synthetic construct
  source 1..50: mol_type = other DNA
atcttgcgtttgaagcgaaaatgcgcgcactctatgtggaaaagcagggg

SEQ ID NO: 38403 - DNA, 50 bp, synthetic construct
  source 1..50: mol_type = other DNA
gcggattgtcatatccgacgatgaagtcatctaccgctgcaacaagaaat

SEQ ID NO: 38404 - DNA, 50 bp, synthetic construct
  source 1..50: mol_type = other DNA
gccgctcgtccagatctccgctccgacgagcgaggatcttgacgagctcg

SEQ ID NO: 38405 - DNA, 50 bp, synthetic construct
  source 1..50: mol_type = other DNA
tgcgggggttgatattatttcgattggtcagttctatgtcaacgcccgct

SEQ ID NO: 38406 - DNA, 50 bp, synthetic construct
  source 1..50: mol_type = other DNA
tcgaaaaaaagaaaaaacattctcctgggcagtttttttctgtttttcca

SEQ ID NO: 38407 - DNA, 50 bp, synthetic construct
  source 1..50: mol_type = other DNA
aaggtagatagaaaaatgttaaaatatattaacataatttgctctctttg

SEQ ID NO: 38408 - DNA, 50 bp, synthetic construct
  source 1..50: mol_type = other DNA
atcactttcggaacccttgctttaacaaaaagaagggttgcccaagcctc

SEQ ID NO: 38409 - DNA, 50 bp, synthetic construct
  source 1..50: mol_type = other DNA
atgataagcaagacgactaacatttctaccaaagtgaaagctttaacctt

SEQ ID NO: 38410 - DNA, 50 bp, synthetic construct
  source 1..50: mol_type = other DNA
gcgtcagcgtcaaacttcgccagaatttttccgatattttaccctgtgcc

SEQ ID NO: 38411 - DNA, 50 bp, synthetic construct
  source 1..50: mol_type = other DNA
acgtacctaaaaattttcagtataatcatacattcaatctcgaggtttaa

SEQ ID NO: 38412 - DNA, 50 bp, synthetic construct
  source 1..50: mol_type = other DNA
aaagtgaaggcttttacacttgtggaaatgttggtggtcttgctcattat

SEQ ID NO: 38413 - DNA, 50 bp, synthetic construct
  source 1..50: mol_type = other DNA
gacaggacggtgtaagttagtagtatactactactaaattaaagttaccg

SEQ ID NO: 38414 - DNA, 50 bp, synthetic construct
  source 1..50: mol_type = other DNA
caggtttattgtatcatagctccctgacgagctgctgaacagatttgctg

SEQ ID NO: 38415 - DNA, 50 bp, synthetic construct
  source 1..50: mol_type = other DNA
aacagggttctttcaaaccctgttccaggctggcagatgtgatacctcct

SEQ ID NO: 38416 - DNA, 50 bp, synthetic construct
  source 1..50: mol_type = other DNA
acaggctgtcaaaacctgtgggcatcggcgcacttggtcaggaggactgt

SEQ ID NO: 38417 - DNA, 50 bp, synthetic construct
  source 1..50: mol_type = other DNA
caacataggacgcatactgaaggttattacctctgaaggtgcctattatc

SEQ ID NO: 38418 - DNA, 50 bp, synthetic construct
  source 1..50: mol_type = other DNA
caaggaatatacagacaaaggatacagatacctaccctgtgtagtccctt

SEQ ID NO: 38419 - DNA, 50 bp, synthetic construct
  source 1..50: mol_type = other DNA
tcgatgtcgatcgacagcaggtacatgtagaggcggtagatgtccgacga

SEQ ID NO: 38420 - DNA, 50 bp, synthetic construct
  source 1..50: mol_type = other DNA
atgcaggagcattaagcccctgcatttacagcttgcggagaaatctgcag

SEQ ID NO: 38421 - DNA, 50 bp, synthetic construct
  source 1..50: mol_type = other DNA
tgtagatacattaaggaaataggaggtcgctaagacttttatcatctaac

SEQ ID NO: 38422 - DNA, 50 bp, synthetic construct
  source 1..50: mol_type = other DNA
ctctatgaatatatattacacgaatattctatatttatatatgcaaagag

SEQ ID NO: 38423 - DNA, 50 bp, synthetic construct
  source 1..50: mol_type = other DNA
tccatactacacgactctgtgacgaatacaggaataagtattagtattag

SEQ ID NO: 38424 - DNA, 50 bp, synthetic construct
  source 1..50: mol_type = other DNA
cttgttttcgctggaataatcgtaattcatattaaagcagcgaaccgtca

SEQ ID NO: 38425 - DNA, 50 bp, synthetic construct
  source 1..50: mol_type = other DNA
cgcaccaggaaggcgggcgactggcgcccccccccccccccccccgggcg

SEQ ID NO: 38426 - DNA, 50 bp, synthetic construct
  source 1..50: mol_type = other DNA
gatttctgcgctgatcccataaatgacttcatcatcggatatgacaatcc

SEQ ID NO: 38427 - DNA, 50 bp, synthetic construct
  source 1..50: mol_type = other DNA
ttcttgagcttttacttcatctataaccacactaagtaaaagctcatcat

SEQ ID NO: 38428 - DNA, 50 bp, synthetic construct
  source 1..50: mol_type = other DNA
cagactgatccgaaaggctggcatggatgcttcggaacgagaagtatctg

SEQ ID NO: 38429 - DNA, 50 bp, synthetic construct
  source 1..50: mol_type = other DNA
atgtttcttttttataccggatttttgaattaggtatccaaaacatggat

SEQ ID NO: 38430 - DNA, 50 bp, synthetic construct
  source 1..50: mol_type = other DNA
ataatatagaaaaatactgttgaaaatctaacctcattattttctatttc

SEQ ID NO: 38431 - DNA, 50 bp, synthetic construct
  source 1..50: mol_type = other DNA
cttgaaaccgttcgggtaatgttcatgagccgcagtttccagctttggcc

SEQ ID NO: 38432 - DNA, 50 bp, synthetic construct
  source 1..50: mol_type = other DNA
attactctgtttttgagcatattaatcgtcatgcccaaaactgtgcaaaa

SEQ ID NO: 38433 - DNA, 50 bp, synthetic construct
  source 1..50: mol_type = other DNA
tttccgaaaaaaacagcctgcagattccgacagccttgttattttcacaa

SEQ ID NO: 38434 - DNA, 50 bp, synthetic construct
  source 1..50: mol_type = other DNA
aggattagttagactaaaatacatttttgtattttggtcaaattgataag

SEQ ID NO: 38435 - DNA, 50 bp, synthetic construct
  source 1..50: mol_type = other DNA
tttcgtgagacactcatgactcacctagaaactcagagttagctagcatt

SEQ ID NO: 38436 - DNA, 50 bp, synthetic construct
  source 1..50: mol_type = other DNA
cgcccagagggagatggaaagggtagcgattttcccaagtgaccgtccgc

SEQ ID NO: 38437 - DNA, 50 bp, synthetic construct
  source 1..50: mol_type = other DNA
tcggtgctgacccttgcgtagaacgcccacgcccaaacggtcggcaagca

SEQ ID NO: 38438 - DNA, 50 bp, synthetic construct
  source 1..50: mol_type = other DNA
gccagtccgaaacgatgtccacatcatgtatgatatcatttcgggtcaca

SEQ ID NO: 38439 - DNA, 50 bp, synthetic construct
  source 1..50: mol_type = other DNA
cattcgcaaaaacttcccggcagaagccttttgttcagtttcggacaatt

SEQ ID NO: 38440 - DNA, 50 bp, synthetic construct
  source 1..50: mol_type = other DNA
tggattctccctcggggtgaagttctccctccattgctgttctgtagtct

SEQ ID NO: 38441 - DNA, 50 bp, synthetic construct
  source 1..50: mol_type = other DNA
cattttgtttctctccctcatcgcgtccgatgacgggacgatatttctcg

SEQ ID NO: 38442 - DNA, 50 bp, synthetic construct
  source 1..50: mol_type = other DNA
cagaatggtcagtaccgcaaacaggggtcgtcacctccgtgaccaatctg

SEQ ID NO: 38443 - DNA, 50 bp, synthetic construct
  source 1..50: mol_type = other DNA
aaagcgcatatttatgagaaagaaatttccaataagaaaatatcagaaaa

SEQ ID NO: 38444 - DNA, 50 bp, synthetic construct
  source 1..50: mol_type = other DNA
ttcaactctagtgattttgccggcatgcccgtgtcagcactgaccatgaa

SEQ ID NO: 38445 - DNA, 50 bp, synthetic construct
  source 1..50: mol_type = other DNA
gaattaagtaaggcatatcaaatcgagatgtgatatgatacctctaaagt

SEQ ID NO: 38446 - DNA, 50 bp, synthetic construct
  source 1..50: mol_type = other DNA
ataaaactttatctaaaactgactttttgtagtttttgaggaagttaaat

SEQ ID NO: 38447 - DNA, 50 bp, synthetic construct
  source 1..50: mol_type = other DNA
cttatcatttttaaataataatttataaaaaattaattgacgatagtata

SEQ ID NO: 38448 - DNA, 50 bp, synthetic construct
  source 1..50: mol_type = other DNA
gagtataataatttttcttctacatattatatggaaaaatatatataaat

SEQ ID NO: 38449 - DNA, 50 bp, synthetic construct
  source 1..50: mol_type = other DNA
aaggtaaaggcttttacgctcattgaaatgttggtggtcttattgatcat

SEQ ID NO: 38450 - DNA, 50 bp, synthetic construct
  source 1..50: mol_type = other DNA
ttttcagtataattttatacgcaagcttggtctatcgattatcgtaaatt

SEQ ID NO: 38451 - DNA, 50 bp, synthetic construct
  source 1..50: mol_type = other DNA
ttaaagcatgatttctaacatcgttaaaataatatttaaggggatgttaa

SEQ ID NO: 38452 - DNA, 50 bp, synthetic construct
  source 1..50: mol_type = other DNA
gacgaaaaaatcaataggagtgataaagcttttgcagtgatttcttcgcc

SEQ ID NO: 38453 - DNA, 50 bp, synthetic construct
  source 1..50: mol_type = other DNA
tactatattcagaagacgaaagatagttatctgggtatcaaagtatatta

SEQ ID NO: 38454 - DNA, 50 bp, synthetic construct
  source 1..50: mol_type = other DNA
ggacgctatgctaattttgtaacttaaagcgaaccagacacataggggat

SEQ ID NO: 38455 - DNA, 50 bp, synthetic construct
  source 1..50: mol_type = other DNA
tgaaaaaaatgatgacattcttgaaatagagatataggtgatttttttcg

SEQ ID NO: 38456 - DNA, 50 bp, synthetic construct
  source 1..50: mol_type = other DNA
gaagctttgcaagctcaggatattgcaaacttctgagtgtggggcttttt

SEQ ID NO: 38457 - DNA, 50 bp, synthetic construct
  source 1..50: mol_type = other DNA
gaataacagcaagatgaccccttgcgtctttgatagcctcgctgtaatac

SEQ ID NO: 38458 - DNA, 50 bp, synthetic construct
  source 1..50: mol_type = other DNA
ctgcattttgccgcttacaaaaaagatttttcgtaagggaacaaatacta

SEQ ID NO: 38459 - DNA, 50 bp, synthetic construct
  source 1..50: mol_type = other DNA
ctgaggtagagttttgcattttgcaagcaaaagtttaaactgtacttttt

SEQ ID NO: 38460 - DNA, 50 bp, synthetic construct
  source 1..50: mol_type = other DNA
tttttttcataattactccttttttaagaaaggagttgttatgaaaaaag

SEQ ID NO: 38461 - DNA, 50 bp, synthetic construct
  source 1..50: mol_type = other DNA
ctatcgttaaaaggtttaatgcgtgccaatcttaaactttttaacgatag

SEQ ID NO: 38462 - DNA, 50 bp, synthetic construct
  source 1..50: mol_type = other DNA
aatatgttacttggaaaggagatgattgctaaatactgtagctttgatag

SEQ ID NO: 38463 - DNA, 50 bp, synthetic construct
  source 1..50: mol_type = other DNA
gagttttttaaatgttttcattttatgaaactggaacttttagggaagta

SEQ ID NO: 38464 - DNA, 50 bp, synthetic construct
  source 1..50: mol_type = other DNA
cgacctgttcttccttgcggaagctggcttcgacgacaaagaaaaaaacg

SEQ ID NO: 38465 - DNA, 50 bp, synthetic construct
  source 1..50: mol_type = other DNA
aaaatagtccatttagttataggaggactttaaatgtccgttactattga

SEQ ID NO: 38466 - DNA, 50 bp, synthetic construct
  source 1..50: mol_type = other DNA
aaaggattgaagatggagaaaaacatgatgagatcatgcttgatagctat

SEQ ID NO: 38467 - DNA, 50 bp, synthetic construct
  source 1..50: mol_type = other DNA
acagtaaaaaagacagccttccgacttcggcacggtcgcaagttccacgg

SEQ ID NO: 38468 - DNA, 50 bp, synthetic construct
  source 1..50: mol_type = other DNA
gcttccatggggcagtcagattaagggtaattaaaatgctcggtggaagt

SEQ ID NO: 38469 - DNA, 50 bp, synthetic construct
  source 1..50: mol_type = other DNA
caatatattatatcagataaccttaaatttttatccattacagtaaattc

SEQ ID NO: 38470 - DNA, 50 bp, synthetic construct
  source 1..50: mol_type = other DNA
tgttattccaaaattaaacaatattaataatctttatttaataaactaag

SEQ ID NO: 38471 - DNA, 50 bp, synthetic construct
  source 1..50: mol_type = other DNA
ggtgcggaactggaacggcgcgtgaccatcagccgatacacggccacacc

SEQ ID NO: 38472 - DNA, 50 bp, synthetic construct
  source 1..50: mol_type = other DNA
aagagcagctacacgccggaagtgcgctatagcggcgtgagtatcttctc

SEQ ID NO: 38473 - DNA, 50 bp, synthetic construct
  source 1..50: mol_type = other DNA
ggttcgcgctttcccaagctgaactcgaaaagcttctacctgcatgaacc

SEQ ID NO: 38474 - DNA, 50 bp, synthetic construct
  source 1..50: mol_type = other DNA
atttttttcaactgtttttttcatttatgacaaaaaaagaaaaagtaaac

SEQ ID NO: 38475 - DNA, 50 bp, synthetic construct
  source 1..50: mol_type = other DNA
agttcgccaaaatagggattcctgtacgattatcccagccaagacgagag

SEQ ID NO: 38476 - DNA, 50 bp, synthetic construct
  source 1..50: mol_type = other DNA
atttaaacaattgctgtttaataaaatcctttttgtgcaatcgttaaagg

SEQ ID NO: 38477 - DNA, 50 bp, synthetic construct
  source 1..50: mol_type = other DNA
aacaatttcaatgagagatagtaaatttactatccttcatttcaattaga

SEQ ID NO: 38478 - DNA, 50 bp, synthetic construct
  source 1..50: mol_type = other DNA
gaatttataagaattactaaactaaagacggcgttggttcttagtgattt

SEQ ID NO: 38479 - DNA, 50 bp, synthetic construct
  source 1..50: mol_type = other DNA
ccgaaagataaaccttccatcccttggctgatgaaatatttaaacttcgt

SEQ ID NO: 38480 - DNA, 50 bp, synthetic construct
  source 1..50: mol_type = other DNA
agtcggttgggtttaataagtacatatttattttaccaaaacagttggat

SEQ ID NO: 38481 - DNA, 50 bp, synthetic construct
  source 1..50: mol_type = other DNA
gtcaataaaaaatttcttttcctctaaaagctacagcttatttgtatggt

SEQ ID NO: 38482 - DNA, 50 bp, synthetic construct
  source 1..50: mol_type = other DNA
tggatagaatcataggtgtgagcacacgctctaaaagcctgatttatcca

SEQ ID NO: 38483 - DNA, 50 bp, synthetic construct
  source 1..50: mol_type = other DNA
agtcaatattgtatcacaaactcgtccgagtttgagatatgaccgtttgc

SEQ ID NO: 38484 - DNA, 50 bp, synthetic construct
  source 1..50: mol_type = other DNA
ttcatctgcatagatgtctactaactctactatcactatttgacgatgta

SEQ ID NO: 38485 - DNA, 50 bp, synthetic construct
  source 1..50: mol_type = other DNA
aatattctttacattcctataaaatatcgatgatgaatgtatggaagatg

SEQ ID NO: 38486 - DNA, 50 bp, synthetic construct
  source 1..50: mol_type = other DNA
ctattaatgctaactttaagtctgtatatacaaatagaggcccttaatag

SEQ ID NO: 38487 - DNA, 50 bp, synthetic construct
  source 1..50: mol_type = other DNA
tgacttagtactagcctattcggtataattaatatatcttatataataca

SEQ ID NO: 38488 - DNA, 50 bp, synthetic construct
  source 1..50: mol_type = other DNA
ctcaatatattatatcagataaccttttttatttcttgaactttattgaa

SEQ ID NO: 38489 - DNA, 50 bp, synthetic construct
  source 1..50: mol_type = other DNA
tattttcggtagaattcaggagtttaaaatgaaagatactatggataagg

SEQ ID NO: 38490 - DNA, 50 bp, synthetic construct
  source 1..50: mol_type = other DNA
attactgttataccagcaaagcagatgccgaatcagagcataaaaataac

SEQ ID NO: 38491 - DNA, 50 bp, synthetic construct
  source 1..50: mol_type = other DNA
atgtcggatgaggaaattgcagaagtatctgtagtttcctcatctgtgtt

SEQ ID NO: 38492 - DNA, 50 bp, synthetic construct
  source 1..50: mol_type = other DNA
catttgccgaattctggcactgacagattgttgcctattttctcaaacga

SEQ ID NO: 38493 - DNA, 50 bp, synthetic construct
  source 1..50: mol_type = other DNA
ttctttttctgcatcatcgacactatagttggggaaaacccgaaaaagaa

SEQ ID NO: 38494 - DNA, 50 bp, synthetic construct
  source 1..50: mol_type = other DNA
tttatcgaaatgtaggttactaaaatgatagtaactgtacaggcatgaag

SEQ ID NO: 38495 - DNA, 50 bp, synthetic construct
  source 1..50: mol_type = other DNA
cttgtggaaatgtaggttactaaaattttagtatcgttgattgagatgtt

SEQ ID NO: 38496 - DNA, 50 bp, synthetic construct
  source 1..50: mol_type = other DNA
tgcccctttatcaaaatatggaggtttttgctaattttaaaaaacaagca

SEQ ID NO: 38497 - DNA, 50 bp, synthetic construct
  source 1..50: mol_type = other DNA
cataataccttcttatacaagtaccgacaacttaacaataaatccttctt

SEQ ID NO: 38498 - DNA, 50 bp, synthetic construct
  source 1..50: mol_type = other DNA
tatagacactaccggaaggaggaatttctctctaagccaagttttctatt

SEQ ID NO: 38499 - DNA, 50 bp, synthetic construct
  source 1..50: mol_type = other DNA
aatcaagaaaataaggagcgaaaagacgcatactccttatatttttcaag

SEQ ID NO: 38500 - DNA, 50 bp, synthetic construct
  source 1..50: mol_type = other DNA
actgcatcaaatacttctttatcaattgcttcatgtgcattttctacaat

SEQ ID NO: 38501 - DNA, 50 bp, synthetic construct
  source 1..50: mol_type = other DNA
gaaaagtaaaaaaaaacataaaaatttttctaagtttttatttaatctgt

SEQ ID NO: 38502 - DNA, 50 bp, synthetic construct
  source 1..50: mol_type = other DNA
atctacatcgacatcatgccccccttcttcagtatggcttcggtgtagat

SEQ ID NO: 38503 - DNA, 50 bp, synthetic construct
  source 1..50: mol_type = other DNA
ctccgcaagcaaggaggaaaaaatggattttcacctccttgtagtgtgac

SEQ ID NO: 38504 - DNA, 50 bp, synthetic construct
  source 1..50: mol_type = other DNA
ttattgggctaaaagcttgataaacagtcatgaaacttttaatcttgtaa

SEQ ID NO: 38505 - DNA, 50 bp, synthetic construct
  source 1..50: mol_type = other DNA
agaaatgagggatagtaaaattattgataattttactatccttgattgaa

SEQ ID NO: 38506 - DNA, 50 bp, synthetic construct
  source 1..50: mol_type = other DNA
atgggaatataagggaggtatgtaattataaccactccttaattaaatat

SEQ ID NO: 38507 - DNA, 50 bp, synthetic construct
  source 1..50: mol_type = other DNA
gaaatcacagagattatggtaaatggatttatcggaaacgctgtaaaatt

SEQ ID NO: 38508 - DNA, 50 bp, synthetic construct
  source 1..50: mol_type = other DNA
ttttattgtatgcagctatgttgctggtaaaatagggtatagaaaaaaga

SEQ ID NO: 38509 - DNA, 50 bp, synthetic construct
  source 1..50: mol_type = other DNA
aaaacaaggtaacctaaaaaggagtataaatttggtagaacccctgtttt

SEQ ID NO: 38510 - DNA, 50 bp, synthetic construct
  source 1..50: mol_type = other DNA
ccacctgtggtagtcttataaccattatcatctaactcacgcatgatatc

SEQ ID NO: 38511 - DNA, 50 bp, synthetic construct
  source 1..50: mol_type = other DNA
aaggccatctgcctttggcagatggccgcctgtgaaaaggtcattgcgag

SEQ ID NO: 38512 - DNA, 50 bp, synthetic construct
  source 1..50: mol_type = other DNA
aacttgcaaacacaggaaaggagaatacacctccaaaattgcgtatggaa

SEQ ID NO: 38513 - DNA, 50 bp, synthetic construct
  source 1..50: mol_type = other DNA
taattggagctatcataagactcttatgagttagtagacatctatgcaga

SEQ ID NO: 38514 - DNA, 50 bp, synthetic construct
  source 1..50: mol_type = other DNA
taattataaagagttaaaacaaatgtataattgacatagttttataattg

SEQ ID NO: 38515 - DNA, 50 bp, synthetic construct
  source 1..50: mol_type = other DNA
gagttaatatcatttgctacttgtgctgtagccctaaaagctacagctta

SEQ ID NO: 38516 - DNA, 50 bp, synthetic construct
  source 1..50: mol_type = other DNA
atggagataccctctcatgatgtcttgactaaaaaaatcagtagacttaa

SEQ ID NO: 38517 - DNA, 50 bp, synthetic construct
  source 1..50: mol_type = other DNA
actattatagacaagagcacaaaaggcgctgtgcttttacttttacaagc

SEQ ID NO: 38518 - DNA, 50 bp, synthetic construct
  source 1..50: mol_type = other DNA
accaattcttaatgttaaagaaaatattttgtttaacattttgcaaggga

SEQ ID NO: 38519 - DNA, 50 bp, synthetic construct
  source 1..50: mol_type = other DNA
ttaatatatttatgcataagtatttaaggttatctgatataatatattga

SEQ ID NO: 38520 - DNA, 50 bp, synthetic construct
  source 1..50: mol_type = other DNA
aaagtacaagcttttactctgattgaaatgcttgttgttttgctgattat

SEQ ID NO: 38521 - DNA, 50 bp, synthetic construct
  source 1..50: mol_type = other DNA
tatgatgcaaattataatcaaatttaaatttaattcacattataaacatc

SEQ ID NO: 38522 - DNA, 50 bp, synthetic construct
  source 1..50: mol_type = other DNA
gtttataggcatagattcccttaagctgtacaagtactctgcctgtttgt

SEQ ID NO: 38523 - DNA, 50 bp, synthetic construct
  source 1..50: mol_type = other DNA
gaagactcatcccggagatatagtttattatttcttttccttcggtcggc

SEQ ID NO: 38524 - DNA, 50 bp, synthetic construct
  source 1..50: mol_type = other DNA
atgatggacataagttatccctcaaaatccgttccagtttgttccagtta

SEQ ID NO: 38525 - DNA, 50 bp, synthetic construct
  source 1..50: mol_type = other DNA
aaggttaaagcctttacacttattgaaatgttggtggtcttattgatcat

SEQ ID NO: 38526 - DNA, 50 bp, synthetic construct
  source 1..50: mol_type = other DNA
aattctaattcgctatgataaaaacgccaacctcaaagcgaataataata

SEQ ID NO: 38527 - DNA, 50 bp, synthetic construct
  source 1..50: mol_type = other DNA
aaactgcgttttttaaggcgttgatctcaacccagaacggggagaatgtt

SEQ ID NO: 38528 - DNA, 50 bp, synthetic construct
  source 1..50: mol_type = other DNA
gctccgctcaattttacagacatattcattcatggcacattgaatgatgc

SEQ ID NO: 38529 - DNA, 50 bp, synthetic construct
  source 1..50: mol_type = other DNA
tcgcccacattgtaaaatccatggatcgtcggatatgacaatctgctcga

SEQ ID NO: 38530 - DNA, 50 bp, synthetic construct
  source 1..50: mol_type = other DNA
cgacattctgcacaatctgtccctcatcggtcagagcatccagaatctcc

SEQ ID NO: 38531 - DNA, 50 bp, synthetic construct
  source 1..50: mol_type = other DNA
gctgtgtgcccttgtgcttgtggccgccgggccgcgcaaggtgcgaaaga

SEQ ID NO: 38532 - DNA, 50 bp, synthetic construct
  source 1..50: mol_type = other DNA
ttgtttattctatttttgttggtgcccacctcccaaaaaagagtataaaa

SEQ ID NO: 38533 - DNA, 50 bp, synthetic construct
  source 1..50: mol_type = other DNA
agagggatatatagtgtgtaaaaacttttctatttttcatagagggaaag

SEQ ID NO: 38534 - DNA, 50 bp, synthetic construct
  source 1..50: mol_type = other DNA
ttgccatcaaactcataccggctccggagccggagactcgccttaatcaa

SEQ ID NO: 38535 - DNA, 50 bp, synthetic construct
  source 1..50: mol_type = other DNA
actgctacgttcttaaagaaagcttttacttcatttaagcttatagcata

SEQ ID NO: 38536 - DNA, 50 bp, synthetic construct
  source 1..50: mol_type = other DNA
tataaattgaaatacatcatgataatagatttagtgtctttggatatagc

SEQ ID NO: 38537 - DNA, 50 bp, synthetic construct
  source 1..50: mol_type = other DNA
gtaatgggaggctttgatactctcgcgtaatatccacaggctgttttttg

SEQ ID NO: 38538 - DNA, 50 bp, synthetic construct
  source 1..50: mol_type = other DNA
atatgataaaataactcgctttttcgtaaaacccttaatttgtatcatta

SEQ ID NO: 38539 - DNA, 50 bp, synthetic construct
  source 1..50: mol_type = other DNA
cccacggagtgtgtgagttgaaatataaggcattgggaacactcaatgtc

SEQ ID NO: 38540 - DNA, 50 bp, synthetic construct
  source 1..50: mol_type = other DNA
cactaacatttcaatcaaggatactagtaacctacatttctaccaaagtg

SEQ ID NO: 38541 - DNA, 50 bp, synthetic construct
  source 1..50: mol_type = other DNA
ctggcgagcaccacgccgtgctcgcacgagccagcacatcagcccgcagc

SEQ ID NO: 38542 - DNA, 50 bp, synthetic construct
  source 1..50: mol_type = other DNA
atgagctggaatgtagaaattttcaaaaactttgcttctgataagttcag

SEQ ID NO: 38543 - DNA, 50 bp, synthetic construct
  source 1..50: mol_type = other DNA
ataatacgcaacacgatacaacaaagttattgtatcgtgttctgtatcat

SEQ ID NO: 38544 - DNA, 50 bp, synthetic construct
  source 1..50: mol_type = other DNA
ttctctgaatttctttccttttgggttaagatgcgttcatcttcaggaaa

SEQ ID NO: 38545 - DNA, 50 bp, synthetic construct
  source 1..50: mol_type = other DNA
agaggtcaaaatacggctgaaaaacatttttcagaaagagagatccctcc

SEQ ID NO: 38546 - DNA, 50 bp, synthetic construct
  source 1..50: mol_type = other DNA
cttgttttagagtccagatttccagtcggctcatcggcaaggataatagc

SEQ ID NO: 38547 - DNA, 50 bp, synthetic construct
  source 1..50: mol_type = other DNA
ctacatgcgcccgccgcgccgcccgcgcgcggcttggcgcgcgagaactc

SEQ ID NO: 38548 - DNA, 50 bp, synthetic construct
  source 1..50: mol_type = other DNA
gctcgcccatcacggcgtgctcttccgtaggcacgcacctatctgcgctt

SEQ ID NO: 38549 - DNA, 50 bp, synthetic construct
  source 1..50: mol_type = other DNA
cttcgggcgtatagttccagcgattggtcgctcggagtagaggcccgaaa

SEQ ID NO: 38550 - DNA, 50 bp, synthetic construct
  source 1..50: mol_type = other DNA
cgcgctggaccccgcccggaacgagcagggcactcgaccgatccagtccg

SEQ ID NO: 38551 - DNA, 50 bp, synthetic construct
  source 1..50: mol_type = other DNA
agataacatcaaaggtaaaagtcgttggaatgtggcctgaaaataaccaa

SEQ ID NO: 38552 - DNA, 50 bp, synthetic construct
  source 1..50: mol_type = other DNA
ataaagaaataaatcctcttgaggatactgcagaaatattatttctcccg

SEQ ID NO: 38553 - DNA, 50 bp, synthetic construct
  source 1..50: mol_type = other DNA
acgtaaagcggattgtcatatccgacgatgtgtcgtgatccgctttcacc

SEQ ID NO: 38554 - DNA, 50 bp, synthetic construct
  source 1..50: mol_type = other DNA
gtgggttccctcgtagatcacctcgcgcggcgatcgcgtaggaatccgtg

SEQ ID NO: 38555 - DNA, 50 bp, synthetic construct
  source 1..50: mol_type = other DNA
ataagcaataatattgtatcatggaagttattgacagaattattataact

SEQ ID NO: 38556 - DNA, 50 bp, synthetic construct
  source 1..50: mol_type = other DNA
ttggaaatcccgcatcaaagtttaattatatttatttctacacttattat

SEQ ID NO: 38557 - DNA, 50 bp, synthetic construct
  source 1..50: mol_type = other DNA
ttcttcaccgattattattctatctacataatattatatcttattttcta

SEQ ID NO: 38558 - DNA, 50 bp, synthetic construct
  source 1..50: mol_type = other DNA
tgccaggagccgtcatgcagaatgtttattctgacgttaaaatcagggct

SEQ ID NO: 38559 - DNA, 50 bp, synthetic construct
  source 1..50: mol_type = other DNA
cgttccggatgacgggagctgtaagcatacgcccgtgtatcgacggaaaa

SEQ ID NO: 38560 - DNA, 50 bp, synthetic construct
  source 1..50: mol_type = other DNA
atccccgttctttttcaaggttgaccttcaaatataaaaagaaggaggat

SEQ ID NO: 38561 - DNA, 50 bp, synthetic construct
  source 1..50: mol_type = other DNA
gatgccacgccctcgatttttggttacatacaaaaaccgcccaaggcatc

SEQ ID NO: 38562 - DNA, 50 bp, synthetic construct
  source 1..50: mol_type = other DNA
ccgattattgtagatacccgcaggaggctccggacatcagcaatccggac

SEQ ID NO: 38563 - DNA, 50 bp, synthetic construct
  source 1..50: mol_type = other DNA
taaataataggctttttccataaagtaatctggacaaaaaatattatgat

SEQ ID NO: 38564 - DNA, 50 bp, synthetic construct
  source 1..50: mol_type = other DNA
gcgagaggggaatcgccgtgccaaagtgactctggtctttgacccggagg

SEQ ID NO: 38565 - DNA, 50 bp, synthetic construct
  source 1..50: mol_type = other DNA
gaaggaagcggctcgacaacgtgcaaaagcgaaatcgagtcgctctttct

SEQ ID NO: 38566 - DNA, 50 bp, synthetic construct
  source 1..50: mol_type = other DNA
ttgtacgggaatatgtgaccggaagggtcacgctacatactcaaaacatc

SEQ ID NO: 38567 - DNA, 50 bp, synthetic construct
  source 1..50: mol_type = other DNA
aaacccgtacttatggtataatgtcatctttatcaaccaactgcgggtag

SEQ ID NO: 38568 - DNA, 50 bp, synthetic construct
  source 1..50: mol_type = other DNA
taattcttgatgaaggaactttagatctagttcaatttcatcaaactcta

SEQ ID NO: 38569 - DNA, 50 bp, synthetic construct
  source 1..50: mol_type = other DNA
ttaaattggactcatcttcaggaatatgtcctctcgcgattcccatattc

SEQ ID NO: 38570 - DNA, 50 bp, synthetic construct
  source 1..50: mol_type = other DNA
gttatctaattcatctttgtcatctggatgcttaaaaataatttcataac

SEQ ID NO: 38571 - DNA, 50 bp, synthetic construct
  source 1..50: mol_type = other DNA
gaaattatataattacaaataattagatttcctgatgataacaagaattc

SEQ ID NO: 38572 - DNA, 50 bp, synthetic construct
  source 1..50: mol_type = other DNA
tacctgaactccattcttagctaaaattatttaaaaatggagttacctat

SEQ ID NO: 38573 - DNA, 50 bp, synthetic construct
  source 1..50: mol_type = other DNA
gaagcggtattcccagttctggtaacagcaagacaatcacccgccacgaa

SEQ ID NO: 38574 - DNA, 50 bp, synthetic construct
  source 1..50: mol_type = other DNA
tcgcccgcgcattgctgccgctggcgcttctgccagcaatgcatctgcgc

SEQ ID NO: 38575 - DNA, 50 bp, synthetic construct
  source 1..50: mol_type = other DNA
aacaaacgtccaaaatggatcgatataagggaagtatatagtatgttgtt

SEQ ID NO: 38576 - DNA, 50 bp, synthetic construct
  source 1..50: mol_type = other DNA
atatccagaagaaattcattattattaaaccctctattttttgtttgtat

SEQ ID NO: 38577 - DNA, 50 bp, synthetic construct
  source 1..50: mol_type = other DNA
ggatctggtcatatttttccttcgaataatggaaaaatatcccggaagat

SEQ ID NO: 38578 - DNA, 50 bp, synthetic construct
  source 1..50: mol_type = other DNA
ggtccagtcgtagccataattggaaaaaattttacatcttcccccccccc

SEQ ID NO: 38579 - DNA, 50 bp, synthetic construct
  source 1..50: mol_type = other DNA
gataaagaaaaacttatttgaaagttattatcaattattttttcagaatc

SEQ ID NO: 38580 - DNA, 50 bp, synthetic construct
  source 1..50: mol_type = other DNA
aaaacaagatttagaagaattattttaccctcgctgcaaaatctcatatc

SEQ ID NO: 38581 - DNA, 50 bp, synthetic construct
  source 1..50: mol_type = other DNA
gcaccttttgttcactttattgatttggcaataatagaggtaaaaagagc

SEQ ID NO: 38582 - DNA, 50 bp, synthetic construct
  source 1..50: mol_type = other DNA
accagaacaggtcgatgtaaccggtgacgtggtgattcacctgttctgac

SEQ ID NO: 38583 - DNA, 50 bp, synthetic construct
  source 1..50: mol_type = other DNA
gaagccgggcccgcgcttgacccccgggagagcgccgcaagcccggcttt

SEQ ID NO: 38584 - DNA, 50 bp, synthetic construct
  source 1..50: mol_type = other DNA
ggcgatgattgctaccatcgccagcgtgggcgatgatcatcatccacggc

SEQ ID NO: 38585 - DNA, 50 bp, synthetic construct
  source 1..50: mol_type = other DNA
gggcaccccaacgaaataaaccctatagggattggcgccttcgggcagcc

SEQ ID NO: 38586 - DNA, 50 bp, synthetic construct
  source 1..50: mol_type = other DNA
atcaacaggcgggtcagcgcggtaataatcgctctattaaatctgtctta

SEQ ID NO: 38587 - DNA, 50 bp, synthetic construct
  source 1..50: mol_type = other DNA
gtagttcaaaaataaagaagtaagatcttacagggttattgaacgacatg

SEQ ID NO: 38588 - DNA, 50 bp, synthetic construct
  source 1..50: mol_type = other DNA
ttacttgtgcctgtacggttatagatgtacgttaccgctggcgatagtgg

SEQ ID NO: 38589 - DNA, 50 bp, synthetic construct
  source 1..50: mol_type = other DNA
cgcttcctgcagggtactataaaatattttgttttactctgcctctagag

SEQ ID NO: 38590 - DNA, 50 bp, synthetic construct
  source 1..50: mol_type = other DNA
gcaccaccgactgctcgcaatcgatcacaactgctcggtgctgctgatgg

SEQ ID NO: 38591 - DNA, 50 bp, synthetic construct
  source 1..50: mol_type = other DNA
aaaacgcagagtgccttgttcgttttcccgatttaaatgatctaaatttt

SEQ ID NO: 38592 - DNA, 50 bp, synthetic construct
  source 1..50: mol_type = other DNA
ccgacaaaatcgctatcttgaacgagcgcaggagagaaagattttcgatt

SEQ ID NO: 38593 - DNA, 50 bp, synthetic construct
  source 1..50: mol_type = other DNA
cgcggtaaaaatgagtttgggcaatattaccatttaaaagttttattgcg

SEQ ID NO: 38594 - DNA, 50 bp, synthetic construct
  source 1..50: mol_type = other DNA
gatcaatttacttaggcacttttgtttgtccgtttttaagtacaagggct

SEQ ID NO: 38595 - DNA, 50 bp, synthetic construct
  source 1..50: mol_type = other DNA
ttgccttattctcactatttaataaagataaataagtgagagttcatttt

SEQ ID NO: 38596 - DNA, 50 bp, synthetic construct
  source 1..50: mol_type = other DNA
tagagttcgatgaaattgaattagatctaaagttccttcatcaataatta

SEQ ID NO: 38597 - DNA, 50 bp, synthetic construct
  source 1..50: mol_type = other DNA
ggttttgccgtttccgattgaaaagtagggatatcggcctgatgggaatg

SEQ ID NO: 38598 - DNA, 50 bp, synthetic construct
  source 1..50: mol_type = other DNA
ggttaaagcttttactttagtggaaagcaaataaagtaaaagcttttaca

SEQ ID NO: 38599 - DNA, 50 bp, synthetic construct
  source 1..50: mol_type = other DNA
atagtcgaacatcagcacatcgccgacacgaggaactgatcgtcgacgcg

SEQ ID NO: 38600 - DNA, 50 bp, synthetic construct
  source 1..50: mol_type = other DNA
ttacaggagttagtctgatcggattatatagaaaaaaagatctccgttaa

SEQ ID NO: 38601 - DNA, 50 bp, synthetic construct
  source 1..50: mol_type = other DNA
ctcccccggggattcaggcttccacatggtagcaatcatcgcctcggtat

SEQ ID NO: 38602 - DNA, 50 bp, synthetic construct
  source 1..50: mol_type = other DNA
tattatctaggcatggttttagaaaatgttaaaaccatacctgctactct

SEQ ID NO: 38603 - DNA, 50 bp, synthetic construct
  source 1..50: mol_type = other DNA
atattcgaactctctatacccatatctaagcgtctagccagttcggagac

SEQ ID NO: 38604 - DNA, 50 bp, synthetic construct
  source 1..50: mol_type = other DNA
aaaacattaaacccccgccataagtacttaacctgcttttttgttgttag

SEQ ID NO: 38605 - DNA, 50 bp, synthetic construct
  source 1..50: mol_type = other DNA
tgggccatctggtcgtgcacagcagctggccgtcaccacggtgatgcccg

SEQ ID NO: 38606 - DNA, 50 bp, synthetic construct
  source 1..50: mol_type = other DNA
cagccctcacgtacagatctctcgatagggggtaatgtacttgagtattg

SEQ ID NO: 38607 - DNA, 50 bp, synthetic construct
  source 1..50: mol_type = other DNA
caatcaatgggaacatttaaatttaggacttcaaatgttcccatagatta

SEQ ID NO: 38608 - DNA, 50 bp, synthetic construct
  source 1..50: mol_type = other DNA
acaagaggtataagagcatccactatataggcatatattatatatgtttt

SEQ ID NO: 38609 - DNA, 50 bp, synthetic construct
  source 1..50: mol_type = other DNA
caaggtgtactaaagtgcgatattttaatatcgtacttttgtacatactg

SEQ ID NO: 38610 - DNA, 50 bp, synthetic construct
  source 1..50: mol_type = other DNA
gccttcaggcgggtctggtaggccttttcctgccaggcccggatcaaggc

SEQ ID NO: 38611 - DNA, 50 bp, synthetic construct
  source 1..50: mol_type = other DNA
tcaataaatacttgtcttgtatgttctcatacttttcaaatatttcatta

SEQ ID NO: 38612 - DNA, 50 bp, synthetic construct
  source 1..50: mol_type = other DNA
ttagatactctatataggaaatattagaagtcaagaaatataaaattgaa

SEQ ID NO: 38613 - DNA, 50 bp, synthetic construct
  source 1..50: mol_type = other DNA
tacaatttaagtaatactgtgaagtactattttcaattatgacaattata

SEQ ID NO: 38614 - DNA, 50 bp, synthetic construct
  source 1..50: mol_type = other DNA
cttggatgattcagacgggatggcccaaatgtcggtctgagcgttcaaac

SEQ ID NO: 38615 - DNA, 50 bp, synthetic construct
  source 1..50: mol_type = other DNA
aacatacccaaattcctcatgatcataggatagagaatggaatagcagtt

SEQ ID NO: 38616 - DNA, 50 bp, synthetic construct
  source 1..50: mol_type = other DNA
acaatcgccgaatatgtgaacgcaggtgactttttttatttacggattga

SEQ ID NO: 38617 - DNA, 50 bp, synthetic construct
  source 1..50: mol_type = other DNA
tgattttggacgtaaatggattagatataatccaacaaacatgaaaatca

SEQ ID NO: 38618 - DNA, 50 bp, synthetic construct
  source 1..50: mol_type = other DNA
gctttacattggttgaaatgctatatatttttgttaaaatagggtacaag

SEQ ID NO: 38619 - DNA, 50 bp, synthetic construct
  source 1..50: mol_type = other DNA
ttgaaaattttatatatcaagtgtccagctatggtatactagcacttttt

SEQ ID NO: 38620 - DNA, 50 bp, synthetic construct
  source 1..50: mol_type = other DNA
cgaatgatcgccgggcacggccggcgccgtatcgccccggacatcaccgt

SEQ ID NO: 38621 - DNA, 50 bp, synthetic construct
  source 1..50: mol_type = other DNA
cgccgcgacacacgcccattgggaggagccaacgggcaggatgaaacgca

SEQ ID NO: 38622 - DNA, 50 bp, synthetic construct
  source 1..50: mol_type = other DNA
gaagctttggaacaatggattaatatcttagtcaattttagcgaagcggc

SEQ ID NO: 38623 - DNA, 50 bp, synthetic construct
  source 1..50: mol_type = other DNA
ggaccggcgagactgcggccggacccgtccgcacgcgggctcgccgcccc

SEQ ID NO: 38624 - DNA, 50 bp, synthetic construct
  source 1..50: mol_type = other DNA
atcgagatcgagcactcccgtttgaaattggcattggtgtcagtgttttt

SEQ ID NO: 38625 - DNA, 50 bp, synthetic construct
  source 1..50: mol_type = other DNA
caaagagctcccggctcacgatggcagggaactcagcgcggagctcagaa

SEQ ID NO: 38626 - DNA, 50 bp, synthetic construct
  source 1..50: mol_type = other DNA
gattggttgaacgaaataaccgataaattatcgaaatctttgttccaatc

SEQ ID NO: 38627 - DNA, 50 bp, synthetic construct
  source 1..50: mol_type = other DNA
agcaaaacaagctgctgagttatgctggtaacagccgaacttgtgtttct

SEQ ID NO: 38628 - DNA, 50 bp, synthetic construct
  source 1..50: mol_type = other DNA
tttcgtaaagacaaacctaaaaaatagattacaggtatccgtttagttat

SEQ ID NO: 38629 - DNA, 50 bp, synthetic construct
  source 1..50: mol_type = other DNA
gcgcagaaccgtctacaaaccgggataccggatcgtagatggtaaggctg

SEQ ID NO: 38630 - DNA, 50 bp, synthetic construct
  source 1..50: mol_type = other DNA
tggcaggctccagtttgaactgcttaagatgtacaacgaggagaaccgtg

SEQ ID NO: 38631 - DNA, 50 bp, synthetic construct
  source 1..50: mol_type = other DNA
tcgccgcctctttatctatccgacggcgtcgaggctcagctcggcggcga

SEQ ID NO: 38632 - DNA, 50 bp, synthetic construct
  source 1..50: mol_type = other DNA
gattctggaatacggtcactgtttcatgactatgaccaaccgcctgttgg

SEQ ID NO: 38633 - DNA, 50 bp, synthetic construct
  source 1..50: mol_type = other DNA
tctcaatagtatagatataacagaattatattatagcatagtttttgtgt

SEQ ID NO: 38634 - DNA, 50 bp, synthetic construct
  source 1..50: mol_type = other DNA
aatattttactataaaagtgtccttttaccattatttactgaaatatcta

SEQ ID NO: 38635 - DNA, 50 bp, synthetic construct
  source 1..50: mol_type = other DNA
cttcttttacttctttcgacattgagaaatctttgcttgatttaaagaag

SEQ ID NO: 38636 - DNA, 50 bp, synthetic construct
  source 1..50: mol_type = other DNA
agggcggcgggatttatactgggtgccataagtatttgtgattctcgccc

SEQ ID NO: 38637 - DNA, 50 bp, synthetic construct
  source 1..50: mol_type = other DNA
cggccggcagcattgcgctggtggcagagagagcgcaaggcggcaacgct

SEQ ID NO: 38638 - DNA, 50 bp, synthetic construct
  source 1..50: mol_type = other DNA
cagactgtatccctcgacttgcatcgatgcggaagtccggcactgttagc

SEQ ID NO: 38639 - DNA, 50 bp, synthetic construct
  source 1..50: mol_type = other DNA
taatccaaaaacaccgatcaggaatcttctttattgcggctttcaaattt

SEQ ID NO: 38640 - DNA, 50 bp, synthetic construct
  source 1..50: mol_type = other DNA
cggagatgccttcgtccgcataggtccaaatggatgtgcagatttctcac

SEQ ID NO: 38641 - DNA, 50 bp, synthetic construct
  source 1..50: mol_type = other DNA
aaaaagccgccagctggcggccttttcggatgactggctggcggctttta

SEQ ID NO: 38642 - DNA, 50 bp, synthetic construct
  source 1..50: mol_type = other DNA
tcgcgcccatcgggagggcggacggcggcctgcccgccgtggcggcgcgc

SEQ ID NO: 38643 - DNA, 50 bp, synthetic construct
  source 1..50: mol_type = other DNA
gatgattgagtacggcgcgattaaagtttaaatccaccctctccgtccaa

SEQ ID NO: 38644 - DNA, 50 bp, synthetic construct
  source 1..50: mol_type = other DNA
gtacccaaattcaagtaaactatataaagcaatgcattaaacttgtgtcc

SEQ ID NO: 38645 - DNA, 50 bp, synthetic construct
  source 1..50: mol_type = other DNA
ttttttttaataatctgagcatcaaatccgccccaaataatagtaaaaaa

SEQ ID NO: 38646 - DNA, 50 bp, synthetic construct
  source 1..50: mol_type = other DNA
gcaaaaagggtttttttatgtttaattaaagaaggaaaatatgttattga

SEQ ID NO: 38647 - DNA, 50 bp, synthetic construct
  source 1..50: mol_type = other DNA
ctcgtatccgaatgttgcttttttatataagagcaaacttcatatggttt

SEQ ID NO: 38648 - DNA, 50 bp, synthetic construct
  source 1..50: mol_type = other DNA
catttaaatcctatttattaattactactactataaatattattctactg

SEQ ID NO: 38649 - DNA, 50 bp, synthetic construct
  source 1..50: mol_type = other DNA
cacataggcagcctggacaccgcaagccctctgtgagtcgccgcaatgtc

SEQ ID NO: 38650 - DNA, 50 bp, synthetic construct
  source 1..50: mol_type = other DNA
gcgctgtgaacaggacgactgtcaaggatgacgcggttgactgagcgctc

SEQ ID NO: 38651 - DNA, 50 bp, synthetic construct
  source 1..50: mol_type = other DNA
cggacttgatcaagttgtacacatttatagaccggacttgatcagtaccg

SEQ ID NO: 38652 - DNA, 50 bp, synthetic construct
  source 1..50: mol_type = other DNA
ccctgccagggcgggcagaagttcaagaagtgctgcgcgccttatctgaa

SEQ ID NO: 38653 - DNA, 50 bp, synthetic construct
  source 1..50: mol_type = other DNA
attccgcgccgggcgcggatgcccgcgtcaatccgcgcctgccgccttgc

SEQ ID NO: 38654 - DNA, 50 bp, synthetic construct
  source 1..50: mol_type = other DNA
aaaatattgatatctggaaccggcccattgttccaaagcttcaataattt

SEQ ID NO: 38655 - DNA, 50 bp, synthetic construct
  source 1..50: mol_type = other DNA
gggaagccgttgcgcacacctgattaaggccacctgcgccgcggggacca

SEQ ID NO: 38656 - DNA, 50 bp, synthetic construct
  source 1..50: mol_type = other DNA
ggcagcccttagaagataaagtggtataatttgcggcggaagctgctgga

SEQ ID NO: 38657 - DNA, 50 bp, synthetic construct
  source 1..50: mol_type = other DNA
cgttcagacgctcggatttattcatatgacctcatcgtcggatatgatga

SEQ ID NO: 38658 - DNA, 50 bp, synthetic construct
  source 1..50: mol_type = other DNA
atctgcatttcgtaactggaagcctgactcgacagtacagaaggtgattt

SEQ ID NO: 38659 - DNA, 50 bp, synthetic construct
  source 1..50: mol_type = other DNA
cgatcagcccatttctaaaaaaggagcgatgcttctaagcggcttgataa

SEQ ID NO: 38660 - DNA, 50 bp, synthetic construct
  source 1..50: mol_type = other DNA
tcagtaattgcacaaaagaaacaaatgtgttgcttctgctcgacttgtat

SEQ ID NO: 38661 - DNA, 50 bp, synthetic construct
  source 1..50: mol_type = other DNA
cgattaaactctgtgcgtttcttggtcagcttgccttgaggtttgcggac

SEQ ID NO: 38662 - DNA, 50 bp, synthetic construct
  source 1..50: mol_type = other DNA
gaccgcgctgacaaggcttataatacggtataactcagaatagcccccga

SEQ ID NO: 38663 - DNA, 50 bp, synthetic construct
  source 1..50: mol_type = other DNA
tttctaaggaaatttagaattaaaattgcggtcttcaaaatgcttagaaa

SEQ ID NO: 38664 - DNA, 50 bp, synthetic construct
  source 1..50: mol_type = other DNA
gcctctcccttttcatatgaagtcaagacttaccaggagaagcagaaggc

SEQ ID NO: 38665 - DNA, 50 bp, synthetic construct
  source 1..50: mol_type = other DNA
tgcatatcatcagccatccgggtaagtactagacatacagagaacccgca

SEQ ID NO: 38666 - DNA, 50 bp, synthetic construct
  source 1..50: mol_type = other DNA
aagccctcttttctataccctattttgatagcttattgattagcctgctc

SEQ ID NO: 38667 - DNA, 50 bp, synthetic construct
  source 1..50: mol_type = other DNA
aaaagctattaattactagtgttcaaaaccactgataaaaaatagatttt

SEQ ID NO: 38668 - DNA, 50 bp, synthetic construct
  source 1..50: mol_type = other DNA
cgcgtaaatgccggtgacaaccttatagctttttcataataatttacccc

SEQ ID NO: 38669 - DNA, 50 bp, synthetic construct
  source 1..50: mol_type = other DNA
tattccgtagatgttttgagcccggcccggctcaaaattcctatcttaac

SEQ ID NO: 38670 - DNA, 50 bp, synthetic construct
  source 1..50: mol_type = other DNA
atggttctggaaagcagctccgtgttgtcagaccagcttcgaagttggtt

SEQ ID NO: 38671 - DNA, 50 bp, synthetic construct
  source 1..50: mol_type = other DNA
acagcgaatcggattttttccacaacggtgactgcgattagatttcaatt

SEQ ID NO: 38672 - DNA, 50 bp, synthetic construct
  source 1..50: mol_type = other DNA
ctgctgcggaaatatatgactccgcacggaacacctgcaacccgcacaag

SEQ ID NO: 38673 - DNA, 50 bp, synthetic construct
  source 1..50: mol_type = other DNA
cgaaaaaatcaacgtagaatcaggcgccggagttgcctttgattttatta

SEQ ID NO: 38674 - DNA, 50 bp, synthetic construct
  source 1..50: mol_type = other DNA
gagctatttatgaggatgaagaagaaatatattatatatttatctattgt

SEQ ID NO: 38675 - DNA, 50 bp, synthetic construct
  source 1..50: mol_type = other DNA
ttaatatttgattttattggataataacatctaaaaaaatcaagtcaaga

SEQ ID NO: 38676 - DNA, 50 bp, synthetic construct
  source 1..50: mol_type = other DNA
ccagctggagtaccacatctttcttggcggtttggtagtcctccatgtag

SEQ ID NO: 38677 - DNA, 50 bp, synthetic construct
  source 1..50: mol_type = other DNA
ctggcttgaccttaccccggggacggaaatcggggggggggtaaaaccat

SEQ ID NO: 38678 - DNA, 50 bp, synthetic construct
  source 1..50: mol_type = other DNA
ggcctataatttagttttccgttgcgcaacgtcctacttaatgtggcggt

SEQ ID NO: 38679 - DNA, 50 bp, synthetic construct
  source 1..50: mol_type = other DNA
ccaataaaaaagcccccgttaggaggtgataatgggcacaaagcgggtgc

SEQ ID NO: 38680 - DNA, 50 bp, synthetic construct
  source 1..50: mol_type = other DNA
ataagctgtattcttttgagatgaaatttattaatgagaatcccctttat

SEQ ID NO: 38681 - DNA, 50 bp, synthetic construct
  source 1..50: mol_type = other DNA
taaatgccggtattttatcttgagttatctagaggaatcaaccctatttt

SEQ ID NO: 38682 - DNA, 50 bp, synthetic construct
  source 1..50: mol_type = other DNA
tgacatttttattaaatataaagaaatcttttatcttcatttttcttaca

SEQ ID NO: 38683 - DNA, 50 bp, synthetic construct
  source 1..50: mol_type = other DNA
ggcaggcagcgtccgatgatagagatcggcatcaacgttatctttgtttg

SEQ ID NO: 38684 - DNA, 50 bp, synthetic construct
  source 1..50: mol_type = other DNA
tatagaggtaaaggctctgagatgctactataggagcttttaaatatata

SEQ ID NO: 38685 - DNA, 50 bp, synthetic construct
  source 1..50: mol_type = other DNA
aattgttaaaatttgatgggcaccattatatttattaaaattcaacaatt

SEQ ID NO: 38686 - DNA, 50 bp, synthetic construct
  source 1..50: mol_type = other DNA
catcccggccagggccgccaattggccgatcggcgccctgcggcgtgtag

SEQ ID NO: 38687 - DNA, 50 bp, synthetic construct
  source 1..50: mol_type = other DNA
ccttcgcgccgcgcagggaggcggcctcgatcgcgaacgcggcgtcgtgg

SEQ ID NO: 38688 - DNA, 50 bp, synthetic construct
  source 1..50: mol_type = other DNA
ctttagaaagaatgataaaaagcttaggaatttcatccagctctataaag

SEQ ID NO: 38689 - DNA, 50 bp, synthetic construct
  source 1..50: mol_type = other DNA
ataaactatttaaaatcaatacattagtgtacttattttagatacgtgat

SEQ ID NO: 38690 - DNA, 50 bp, synthetic construct
  source 1..50: mol_type = other DNA
ggagcgggtacaaaaaacactatttaattaaagtttagtaaagaaaagtt

SEQ ID NO: 38691 - DNA, 50 bp, synthetic construct
  source 1..50: mol_type = other DNA
cgggatttgattatcagaggggttaatgaatgattttgcatccgttcccg

SEQ ID NO: 38692 - DNA, 50 bp, synthetic construct
  source 1..50: mol_type = other DNA
cggtcgcgtcgaatggctcaagcgcgtcgatgatggtttcgacgatgagg

SEQ ID NO: 38693 - DNA, 50 bp, synthetic construct
  source 1..50: mol_type = other DNA
agccggggcggttggcgatcgaggcgggccgtcggtccaatgccaggtct

SEQ ID NO: 38694 - DNA, 50 bp, synthetic construct
  source 1..50: mol_type = other DNA
cgtcgtggattattacttgtgtagtactacacaagcaatacccctctgtg

SEQ ID NO: 38695 - DNA, 50 bp, synthetic construct
  source 1..50: mol_type = other DNA
cggccgaggtgcttatccagccgagctgaaccgggaacgccgctccagcg

SEQ ID NO: 38696 - DNA, 50 bp, synthetic construct
  source 1..50: mol_type = other DNA
tatcttgaagggaagacctttcccttgccaggtgtctctctaaaatgata

SEQ ID NO: 38697 - DNA, 50 bp, synthetic construct
  source 1..50: mol_type = other DNA
cattctcaaacgcgcaactcgactggtttcaagtggcgtggataggaggt

SEQ ID NO: 38698 - DNA, 50 bp, synthetic construct
  source 1..50: mol_type = other DNA
aatctatcgttagaaggggggtggcgataccggccttcttgtcgaagatg

SEQ ID NO: 38699 - DNA, 50 bp, synthetic construct
  source 1..50: mol_type = other DNA
cgccgcatccttgcttcggacagcggaaacccgccgcatccgagtcggtg

SEQ ID NO: 38700 - DNA, 50 bp, synthetic construct
  source 1..50: mol_type = other DNA
caccacctccatttcggaaagaagcgattcaaagtggaatatactacacg

SEQ ID NO: 38701 - DNA, 50 bp, synthetic construct
  source 1..50: mol_type = other DNA
tccatgatgcaggccgtggccacgtccgccaccgattcctgactcatggc

SEQ ID NO: 38702 - DNA, 50 bp, synthetic construct
  source 1..50: mol_type = other DNA
gatgagaatggcgaaaaaagttacagagttcatttttggcgttttaaagg

SEQ ID NO: 38703 - DNA, 50 bp, synthetic construct
  source 1..50: mol_type = other DNA
gggtgagctaaaccctcactcgtttggcaaagtggctgcttaccttgtcc

SEQ ID NO: 38704 - DNA, 50 bp, synthetic construct
  source 1..50: mol_type = other DNA
ccggagagatccacgcagtagcggatctgaaacaggggggatgacggttg

SEQ ID NO: 38705 - DNA, 50 bp, synthetic construct
  source 1..50: mol_type = other DNA
gaccgtatttatatcagttgttttgcacaagcacagttccatatacggag

SEQ ID NO: 38706 - DNA, 50 bp, synthetic construct
  source 1..50: mol_type = other DNA
atccttcgagaaaaggagcgtgactttcggcgctcactttctcctctccc

SEQ ID NO: 38707 - DNA, 50 bp, synthetic construct
  source 1..50: mol_type = other DNA
gatttgttttctttgccaaatgcgtatgcattaaagtatgataaagaatt

SEQ ID NO: 38708 - DNA, 50 bp, synthetic construct
  source 1..50: mol_type = other DNA
caaacctccgcgcacacctgaagcgaggctcaggccgagatggagatgct

SEQ ID NO: 38709 - DNA, 50 bp, synthetic construct
  source 1..50: mol_type = other DNA
caaaaaagatgcggttccacaggaaagcctctgcaagatcaggatccggc

SEQ ID NO: 38710 - DNA, 50 bp, synthetic construct
  source 1..50: mol_type = other DNA
cggccggaaccccaccattatgaaattatgaaatagtgaggtttagagcg

SEQ ID NO: 38711 - DNA, 50 bp, synthetic construct
  source 1..50: mol_type = other DNA
atggagatgggaccgggtgtcccgccaaatcgccccggtcccaggctacc

SEQ ID NO: 38712 - DNA, 50 bp, synthetic construct
  source 1..50: mol_type = other DNA
gtcctgaaagataagcatgaaacagctgtttgccgcttatgctcaagcag

SEQ ID NO: 38713 - DNA, 50 bp, synthetic construct
  source 1..50: mol_type = other DNA
attttaaaactaaaaggagttaaatattcgtgcttgtgtcgtttcaaata

SEQ ID NO: 38714 - DNA, 50 bp, synthetic construct
  source 1..50: mol_type = other DNA
gatcgatcagctcgttctcactcgagaacgcgatgacgacgagatcgctt

SEQ ID NO: 38715 - DNA, 50 bp, synthetic construct
  source 1..50: mol_type = other DNA
cagcatttcaaacaaggaaagtaaatttagttacgctattttcaatcaac

SEQ ID NO: 38716 - DNA, 50 bp, synthetic construct
  source 1..50: mol_type = other DNA
gtttctacgattacagcagataagaaattatcagcggtaatctaagaatg

SEQ ID NO: 38717 - DNA, 50 bp, synthetic construct
  source 1..50: mol_type = other DNA
atgcagacaggaaaagaaaggaaatattcaattcatcaagacttctgcaa

SEQ ID NO: 38718 - DNA, 50 bp, synthetic construct
  source 1..50: mol_type = other DNA
gatatcagcgccaactgatatcaagcatggaagcagatgaaaaaagacct

SEQ ID NO: 38719 - DNA, 50 bp, synthetic construct
  source 1..50: mol_type = other DNA
aaaatacgttacaaaaagaatataagcatatccacaacgcccacatttga

SEQ ID NO: 38720 - DNA, 50 bp, synthetic construct
  source 1..50: mol_type = other DNA
tcatcgtgccaggtattgcgcccggcccgtgtttcaaccgaacacgaaga

SEQ ID NO: 38721 - DNA, 50 bp, synthetic construct
  source 1..50: mol_type = other DNA
gaaaaagccgctgatcaagtaaggagaagtacctgggcagcggcgtccgc

SEQ ID NO: 38722 - DNA, 50 bp, synthetic construct
  source 1..50: mol_type = other DNA
cagcaatggtttgaacttatgccggaacttttgaagagtcacccctgccg

SEQ ID NO: 38723 - DNA, 50 bp, synthetic construct
  source 1..50: mol_type = other DNA
aaaaaatatttttattcgttaaaatttttttctaaatcagaaatattata

SEQ ID NO: 38724 - DNA, 50 bp, synthetic construct
  source 1..50: mol_type = other DNA
tctaatctgcatggagctggtacatctgtactgttttcactcgttaatac

SEQ ID NO: 38725 - DNA, 50 bp, synthetic construct
  source 1..50: mol_type = other DNA
cgcaccacagcgttacgcgccaggtgccgaacggagataccattggccgc

SEQ ID NO: 38726 - DNA, 50 bp, synthetic construct
  source 1..50: mol_type = other DNA
tttagagaaacaattgaaataatggccagagtttcaactgattcagagga

SEQ ID NO: 38727 - DNA, 50 bp, synthetic construct
  source 1..50: mol_type = other DNA
tataatatcgtaattgacacaataaatattgaggcgaataatatgccatt

SEQ ID NO: 38728 - DNA, 50 bp, synthetic construct
  source 1..50: mol_type = other DNA
gtcttttcttgaccgttgaatttgaaaccatacaagagttaaaccttact

SEQ ID NO: 38729 - DNA, 50 bp, synthetic construct
  source 1..50: mol_type = other DNA
ggcgaacaccaggtgacaatccgggaagaacaggtcgcctggtgttcgca

SEQ ID NO: 38730 - DNA, 50 bp, synthetic construct
  source 1..50: mol_type = other DNA
gcagtgcatcctgccgggcttccagccgcagggatggccgtcagcactgt

SEQ ID NO: 38731 - DNA, 50 bp, synthetic construct
  source 1..50: mol_type = other DNA
aaaaaagctcccctgccagatgacagtcaatcttgcaggagaggattccg

SEQ ID NO: 38732 - DNA, 50 bp, synthetic construct
  source 1..50: mol_type = other DNA
aaaagaagcacaaaaaaatgaattagtgttcattgtatttgaacactttt

SEQ ID NO: 38733 - DNA, 50 bp, synthetic construct
  source 1..50: mol_type = other DNA
gtacgaggacaaggtttaccggtcgcgggatgttcacgatcaaagcgtag

SEQ ID NO: 38734 - DNA, 50 bp, synthetic construct
  source 1..50: mol_type = other DNA
tgaggtgtgtgcgggtgcgcggatcgagcaacgccgaaatagtgaccgcg

SEQ ID NO: 38735 - DNA, 50 bp, synthetic construct
  source 1..50: mol_type = other DNA
gaatctttttgaattctcaagttgaggaagtctaggatttcaaaagattc

SEQ ID NO: 38736 - DNA, 50 bp, synthetic construct
  source 1..50: mol_type = other DNA
gaaagaaacgatgaaaggaggcgagatcacaaccttacatattgtcgtcg

SEQ ID NO: 38737 - DNA, 50 bp, synthetic construct
  source 1..50: mol_type = other DNA
tcacttgaatttttggcttttggaattcaaaacgattatgcttccgaaga

SEQ ID NO: 38738 - DNA, 50 bp, synthetic construct
  source 1..50: mol_type = other DNA
atcggttgatacgcgcgcatatgcggcagaatgcgcttgtttcgatggac

SEQ ID NO: 38739 - DNA, 50 bp, synthetic construct
  source 1..50: mol_type = other DNA
tacactaatcgaaatgaaggtaactagtatcctttattgaaatgctagtc

SEQ ID NO: 38740 - DNA, 50 bp, synthetic construct
  source 1..50: mol_type = other DNA
acggctttcattgtggaatatggagtgggatatggtatgatgatgagctt

SEQ ID NO: 38741 - DNA, 50 bp, synthetic construct
  source 1..50: mol_type = other DNA
ttttatttatggtacgcttctgcgtatgcttcgcctcgcatgattttaaa

SEQ ID NO: 38742 - DNA, 50 bp, synthetic construct
  source 1..50: mol_type = other DNA
cgaagcgtatcataaataaaactaaagcgtatcataaatgatgcggtttt

SEQ ID NO: 38743 - DNA, 50 bp, synthetic construct
  source 1..50: mol_type = other DNA
tcatcataccatatcccacaatgaaagccgtcgcaacgcgtaaattgttc

SEQ ID NO: 38744 - DNA, 50 bp, synthetic construct
  source 1..50: mol_type = other DNA
cctttgcttcgttgtagcaacgctacaaaagtgctaccgtctccacatga

SEQ ID NO: 38745 - DNA, 50 bp, synthetic construct
  source 1..50: mol_type = other DNA
cttttattatggcgttttgccttgtacaagaaaaagggccttttaatgcc

SEQ ID NO: 38746 - DNA, 50 bp, synthetic construct
  source 1..50: mol_type = other DNA
gtagatttgtttccgcaaacgcatcacgtcgagtgcgtagtgttgctaat

SEQ ID NO: 38747 - DNA, 50 bp, synthetic construct
  source 1..50: mol_type = other DNA
tcagcacatatttgttttggatgcattcacacagcccaaatacaaaacga

SEQ ID NO: 38748 - DNA, 50 bp, synthetic construct
  source 1..50: mol_type = other DNA
ccagacgcatcatgtggagactatagacccatcacgtcgagtgcgtagtg

SEQ ID NO: 38749 - DNA, 50 bp, synthetic construct
  source 1..50: mol_type = other DNA
agacgcatcacgtggagacggtagcagacgcatcacgtcgagtgcgtagt

SEQ ID NO: 38750 - DNA, 50 bp, synthetic construct
  source 1..50: mol_type = other DNA
tcatcaaagtgacaatgaggatactatattaaccagaatcccttgtatga

SEQ ID NO: 38751 - DNA, 50 bp, synthetic construct
  source 1..50: mol_type = other DNA
gtatgttaatgtctattgtcttatttataattgtatttgaatcggtagaa

SEQ ID NO: 38752 - DNA, 50 bp, synthetic construct
  source 1..50: mol_type = other DNA
aacatttctgtttttccagccccgcacacagcccaaataaaaaaagattt

SEQ ID NO: 38753 - DNA, 50 bp, synthetic construct
  source 1..50: mol_type = other DNA
ccagacgcatcatgtggagtgcatagacccatcacgtcgagtgcgtagtg

SEQ ID NO: 38754 - DNA, 50 bp, synthetic construct
  source 1..50: mol_type = other DNA
actactatttcacattttattattataaatataacctgtgcattagaaca

SEQ ID NO: 38755 - DNA, 50 bp, synthetic construct
  source 1..50: mol_type = other DNA
tttgcatatttaccttttaagttaataaaattgaaaggatgctatgtaat

SEQ ID NO: 38756 - DNA, 50 bp, synthetic construct
  source 1..50: mol_type = other DNA
tttgtcctctaattgaagaatctgagtttatgaaacaattagaataaaag

SEQ ID NO: 38757 - DNA, 50 bp, synthetic construct
  source 1..50: mol_type = other DNA
ttacaatgtaaaaagaggctgccctttggcaacctcttttagtaattaat

SEQ ID NO: 38758 - DNA, 50 bp, synthetic construct
  source 1..50: mol_type = other DNA
gtactaataccagatgcttctctcaaaaggttaggaatttgtataagggt

SEQ ID NO: 38759 - DNA, 50 bp, synthetic construct
  source 1..50: mol_type = other DNA
agataaacctactatttataagaagtattatataaaacagagaaggggag

SEQ ID NO: 38760 - DNA, 50 bp, synthetic construct
  source 1..50: mol_type = other DNA
aacatatacaaaacccgaaaaaaataattttttatgctataatatacgtt

SEQ ID NO: 38761 - DNA, 50 bp, synthetic construct
  source 1..50: mol_type = other DNA
cttgacttggaataatatcaataaactaattaataaaatttatatcgacg

SEQ ID NO: 38762 - DNA, 50 bp, synthetic construct
  source 1..50: mol_type = other DNA
acaggtcaaaaattacccttacgattaaattatatataatttttccctgt

SEQ ID NO: 38763 - DNA, 50 bp, synthetic construct
  source 1..50: mol_type = other DNA
ataaatcagtatttttttgtaaaatattttcagataaattttcacttgtt

SEQ ID NO: 38764 - DNA, 50 bp, synthetic construct
  source 1..50: mol_type = other DNA
atgtttggatatggggaagtgaaccagtacaaccgccatagtaccctcat

SEQ ID NO: 38765 - DNA, 50 bp, synthetic construct
  source 1..50: mol_type = other DNA
gcatctttatctaacttttctattctaattatcaagggagaaatggattt

SEQ ID NO: 38766 - DNA, 50 bp, synthetic construct
  source 1..50: mol_type = other DNA
ctgttagtctcaaacaaaacagtgcagaggttttactttgaactttacag

SEQ ID NO: 38767 - DNA, 50 bp, synthetic construct
  source 1..50: mol_type = other DNA
ttcatctacaacagcctttccatcttgactgatcccagattacgaaggaa

SEQ ID NO: 38768 - DNA, 50 bp, synthetic construct
  source 1..50: mol_type = other DNA
ggggttcgaatccccttagctccaccctcggctccacagaacagaacgtc

SEQ ID NO: 38769 - DNA, 50 bp, synthetic construct
  source 1..50: mol_type = other DNA
atgaacaacacaccaccttttgcctgtgcaaaagggtctgtgaatttcat

SEQ ID NO: 38770 - DNA, 50 bp, synthetic construct
  source 1..50: mol_type = other DNA
ttgcctgctcaattactttttttactcagctaaatacggggagaaagttt

SEQ ID NO: 38771 - DNA, 50 bp, synthetic construct
  source 1..50: mol_type = other DNA
acgaaggccatctgcatagtgaaagcttattgcatggtgaacggaatcag

SEQ ID NO: 38772 - DNA, 50 bp, synthetic construct
  source 1..50: mol_type = other DNA
accggccgggtgatcaaaggctgggatcaaggcctgatgggcatgcgcgt

SEQ ID NO: 38773 - DNA, 50 bp, synthetic construct
  source 1..50: mol_type = other DNA
atggtacctcggcgttggttttgcaccgaactgcagacccgaggtcaccg

SEQ ID NO: 38774 - DNA, 50 bp, synthetic construct
  source 1..50: mol_type = other DNA
ctcgcccaccgcggggtgctctttctggacgaggccccggagttctcggg

SEQ ID NO: 38775 - DNA, 50 bp, synthetic construct
  source 1..50: mol_type = other DNA
cgtacggccacgccgcccatgaagcgcttgtccgggggcgttgcctagga

SEQ ID NO: 38776 - DNA, 50 bp, synthetic construct
  source 1..50: mol_type = other DNA
ccagccgggtcacctttcgggaaaaatcaaaaataactgctgtttcagta

SEQ ID NO: 38777 - DNA, 50 bp, synthetic construct
  source 1..50: mol_type = other DNA
gaactaatttacgttccatttatatttataaagtcaaattcaattgtttc

SEQ ID NO: 38778 - DNA, 50 bp, synthetic construct
  source 1..50: mol_type = other DNA
tgaaaatgaatcgtcatgggggaggctgcttatttcttgaagaatatgca

SEQ ID NO: 38779 - DNA, 50 bp, synthetic construct
  source 1..50: mol_type = other DNA
gaatattacaatcgtcttcaagaaattcgatgcagatgatcatttaattg

SEQ ID NO: 38780 - DNA, 50 bp, synthetic construct
  source 1..50: mol_type = other DNA
ttcttttacgccctatagcattatatttaattttatattcgttaaaacct

SEQ ID NO: 38781 - DNA, 50 bp, synthetic construct
  source 1..50: mol_type = other DNA
gatcattgaaaaatacaggaaaacggtacctccttctattttcttccgca

SEQ ID NO: 38782 - DNA, 50 bp, synthetic construct
  source 1..50: mol_type = other DNA
cttccatcctctgccagaagaaaagttttcttccgtgccgaggatggatt

SEQ ID NO: 38783 - DNA, 50 bp, synthetic construct
  source 1..50: mol_type = other DNA
aaaggaactatccaaaaggatagttcccttttctttgtggatgttcctgt

SEQ ID NO: 38784 - DNA, 50 bp, synthetic construct
  source 1..50: mol_type = other DNA
gatggttttattataatttcaaaagtggttttcttttaaatataaacatt

SEQ ID NO: 38785 - DNA, 50 bp, synthetic construct
  source 1..50: mol_type = other DNA
cgccacacgcggcgcagatggattcaagcgcctctgcgccacgaacctct

SEQ ID NO: 38786 - DNA, 50 bp, synthetic construct
  source 1..50: mol_type = other DNA
gatataatatcacaatatgtaatatttaaaactccttgtaatattatata

SEQ ID NO: 38787 - DNA, 50 bp, synthetic construct
  source 1..50: mol_type = other DNA
cggaagcatggttctagtttctttggaagaaaagaaggaacgaaggagtt

SEQ ID NO: 38788 - DNA, 50 bp, synthetic construct
  source 1..50: mol_type = other DNA
ggcggttgtactggtttagttagctgaacggttgtactgattcacttccc

SEQ ID NO: 38789 - DNA, 50 bp, synthetic construct
  source 1..50: mol_type = other DNA
taccctttgactttggcgagcactagatatttcgccaaaggtaattattc

SEQ ID NO: 38790 - DNA, 50 bp, synthetic construct
  source 1..50: mol_type = other DNA
caatcaaaaagcaaaagcaattaaatatttttttgatctctttttatttg

SEQ ID NO: 38791 - DNA, 50 bp, synthetic construct
  source 1..50: mol_type = other DNA
ggaccaatgggcggccagccacagccagcgccagcaggtcgtgccggtcc

SEQ ID NO: 38792 - DNA, 50 bp, synthetic construct
  source 1..50: mol_type = other DNA
taagaggcgtgtcgggtgctgttagttcttttgttaattcaaagtcatta

SEQ ID NO: 38793 - DNA, 50 bp, synthetic construct
  source 1..50: mol_type = other DNA
aaaattcataccatagttcctggaattccgaaagaataggtctgaatttt

SEQ ID NO: 38794 - DNA, 50 bp, synthetic construct
  source 1..50: mol_type = other DNA
caaatataatttttcccaccacactttcattactatcaatattatatttg

SEQ ID NO: 38795 - DNA, 50 bp, synthetic construct
  source 1..50: mol_type = other DNA
ttaactcattttcatttgctttaaactaaaacagtgattaagtgttctcc

SEQ ID NO: 38796 - DNA, 50 bp, synthetic construct
  source 1..50: mol_type = other DNA
accggaatgatagaatctccctcaacttccgggtctgtaatcatgcgcag

SEQ ID NO: 38797 - DNA, 50 bp, synthetic construct
  source 1..50: mol_type = other DNA
tgctcggcgggctgatctgcaggagcacaagctctgatcgtttccgctgc

SEQ ID NO: 38798 - DNA, 50 bp, synthetic construct
  source 1..50: mol_type = other DNA
tgacctcatggctcgtattgatatgtataaaaataacagccggcggagaa

SEQ ID NO: 38799 - DNA, 50 bp, synthetic construct
  source 1..50: mol_type = other DNA
catgggccagatgttatccggtcgtctctccttgatgatccgaacccgtg

SEQ ID NO: 38800 - DNA, 50 bp, synthetic construct
  source 1..50: mol_type = other DNA
aaagggaataagcgaaatatattcaaaactatctttctggaatgtccttt

SEQ ID NO: 38801 - DNA, 50 bp, synthetic construct
  source 1..50: mol_type = other DNA
acgatgcggagtctgacaacatgtataaagagcagtttggtccgcaatct

SEQ ID NO: 38802 - DNA, 50 bp, synthetic construct
  source 1..50: mol_type = other DNA
aagcatttcatccaaataccagagacaacaccctatgcaaatccatcttt

SEQ ID NO: 38803 - DNA, 50 bp, synthetic construct
  source 1..50: mol_type = other DNA
aagcacggaatgtcacgctctcctgagtatgagcgaaaaaactcgcgctt

SEQ ID NO: 38804 - DNA, 50 bp, synthetic construct
  source 1..50: mol_type = other DNA
ctggaggtcctgcgcgagccgctggaaagcggcgagatcgtcattgcccg

SEQ ID NO: 38805 - DNA, 50 bp, synthetic construct
  source 1..50: mol_type = other DNA
atcaagggctgggaccaagatattcaaaatacttgcacatcggcctgatg

SEQ ID NO: 38806 - DNA, 50 bp, synthetic construct
  source 1..50: mol_type = other DNA
gcatgggccgcctggcgtgtatgcgtgcagcaccacggccaggcccatgg

SEQ ID NO: 38807 - DNA, 50 bp, synthetic construct
  source 1..50: mol_type = other DNA
acgaaggccatctgcatagagtaagcctactgtatggtgaacggtatcag

SEQ ID NO: 38808 - DNA, 50 bp, synthetic construct
  source 1..50: mol_type = other DNA
cagaagctgaaaaaaccaacgtcaccagacaatgacttttacccctgaac

SEQ ID NO: 38809 - DNA, 50 bp, synthetic construct
  source 1..50: mol_type = other DNA
cggagacattaaggaagttaagaacattatgctttacactaagggctacg

SEQ ID NO: 38810 - DNA, 50 bp, synthetic construct
  source 1..50: mol_type = other DNA
ggaaagcggcgaggtaaatcaagggtcattgcgctcatagtcgtttctgt

SEQ ID NO: 38811 - DNA, 50 bp, synthetic construct
  source 1..50: mol_type = other DNA
gctggcatgtggtcaaagtattgtacatataacgaaggttctctacagaa

SEQ ID NO: 38812 - DNA, 50 bp, synthetic construct
  source 1..50: mol_type = other DNA
tgatctgattttgcaaaaaggcttcaaatcgaagaagcaaagcgcttttc

SEQ ID NO: 38813 - DNA, 50 bp, synthetic construct
  source 1..50: mol_type = other DNA
ttcattaaggcgattagaaactcttttgagtggggcgtgaaagtgattgg

SEQ ID NO: 38814 - DNA, 50 bp, synthetic construct
  source 1..50: mol_type = other DNA
ttttctaaatgtggcgggctacatggcggagagatagggatttgaaccct

SEQ ID NO: 38815 - DNA, 50 bp, synthetic construct
  source 1..50: mol_type = other DNA
atgcccatgtatcaaaatatggaggtaccccttttttgataaaataggta

SEQ ID NO: 38816 - DNA, 50 bp, synthetic construct
  source 1..50: mol_type = other DNA
cttctgagcgtgaggctagcaattacaaaagctactgaagaagtttaaaa

SEQ ID NO: 38817 - DNA, 50 bp, synthetic construct
  source 1..50: mol_type = other DNA
aagcagtgataccgcctcaacttgctaccgtctcagcgtgatgcgtcagt

SEQ ID NO: 38818 - DNA, 50 bp, synthetic construct
  source 1..50: mol_type = other DNA
tttcccgcaaacccatcatgtggagaattagtcgcttcattcgttaaagg

SEQ ID NO: 38819 - DNA, 50 bp, synthetic construct
  source 1..50: mol_type = other DNA
aacatttcaatcaaggatagtaaaattttagtaacctacatttcaatcaa

SEQ ID NO: 38820 - DNA, 50 bp, synthetic construct
  source 1..50: mol_type = other DNA
gtagatatgttaccaacaacttgtcatatatactttggagaaattatggg

SEQ ID NO: 38821 - DNA, 50 bp, synthetic construct
  source 1..50: mol_type = other DNA
ggtcaatgataatgggtggcttatggatatgacacttcaaataattgcag

SEQ ID NO: 38822 - DNA, 50 bp, synthetic construct
  source 1..50: mol_type = other DNA
cctccgggcttttctttttaccaaaattactaaaaagaaatcgccttttt

SEQ ID NO: 38823 - DNA, 50 bp, synthetic construct
  source 1..50: mol_type = other DNA
gaacagtcacagcttctatatgtgtccacatgtgttgtcattggaaacat

SEQ ID NO: 38824 - DNA, 50 bp, synthetic construct
  source 1..50: mol_type = other DNA
aattaatgtctggcgttgattaaaagatttagcaacagttgattttaact

SEQ ID NO: 38825 - DNA, 50 bp, synthetic construct
  source 1..50: mol_type = other DNA
ttagccgagattatgtcctaaaaagcttgcaggcggtgacaacatgataa

SEQ ID NO: 38826 - DNA, 50 bp, synthetic construct
  source 1..50: mol_type = other DNA
tgcctgaattatttatagattagttctcttgcttataaaaaacacttgaa

SEQ ID NO: 38827 - DNA, 50 bp, synthetic construct
  source 1..50: mol_type = other DNA
aaagggccagaaaaaaagatagtcccgttgacacttttttccacttcttt

SEQ ID NO: 38828 - DNA, 50 bp, synthetic construct
  source 1..50: mol_type = other DNA
tagaagtaacagggtcaataataatatttttatcgtccctgatcaaatga

SEQ ID NO: 38829 - DNA, 50 bp, synthetic construct
  source 1..50: mol_type = other DNA
gtcatctacgcggccaaccgcgatcgctgccggtcgtcggcgtagaagat

SEQ ID NO: 38830 - DNA, 50 bp, synthetic construct
  source 1..50: mol_type = other DNA
gccagccgcgcgtcgtacggcagcgcggctgcgagcgacgcctcgccggg

SEQ ID NO: 38831 - DNA, 50 bp, synthetic construct
  source 1..50: mol_type = other DNA
agtaaaaagggggcaaaagccccctttccttattttggccccttcctcgg

SEQ ID NO: 38832 - DNA, 50 bp, synthetic construct
  source 1..50: mol_type = other DNA
gggagtgaagctttggatatgctgcaagcaatgaacacaggacacgatgg

SEQ ID NO: 38833 - DNA, 50 bp, synthetic construct
  source 1..50: mol_type = other DNA
aaagtagggttcgtttcgcttggttgcccgaaagccctcgtcgactccga

SEQ ID NO: 38834 - DNA, 50 bp, synthetic construct
  source 1..50: mol_type = other DNA
gcttttctcactaaatgacttgatatattgattcattaagtgagaaaaat

SEQ ID NO: 38835 - DNA, 50 bp, synthetic construct
  source 1..50: mol_type = other DNA
tattgaaaactgtggattttagcgatattttcgatttgatgttgacaact

SEQ ID NO: 38836 - DNA, 50 bp, synthetic construct
  source 1..50: mol_type = other DNA
tgttactggactatttatatttcatagtaaatgtaaatgttgcacagatg

SEQ ID NO: 38837 - DNA, 50 bp, synthetic construct
  source 1..50: mol_type = other DNA
gcatagcaaaatgccccctccttcgggatgcccggggttaccgaactgcc

SEQ ID NO: 38838 - DNA, 50 bp, synthetic construct
  source 1..50: mol_type = other DNA
gcctgaccgtggccgacctggacggccgtatcggtcggccgtaatctgga

SEQ ID NO: 38839 - DNA, 50 bp, synthetic construct
  source 1..50: mol_type = other DNA
gaaacggggacagtcgcggacagcgcgatatcagcgactggtcgcgcacc

SEQ ID NO: 38840 - DNA, 50 bp, synthetic construct
  source 1..50: mol_type = other DNA
agttcttcgagaagcgatacgccaccgcttgtagccggcctcgagaagct

SEQ ID NO: 38841 - DNA, 50 bp, synthetic construct
  source 1..50: mol_type = other DNA
aggcgcttgcgcggcaggccgcccgcggcagtgaatggccgccagcgtcg

SEQ ID NO: 38842 - DNA, 50 bp, synthetic construct
  source 1..50: mol_type = other DNA
ggaagtcgcttagcaggacgtaacgccttaccatctgcatgccgactttg

SEQ ID NO: 38843 - DNA, 50 bp, synthetic construct
  source 1..50: mol_type = other DNA
ctcggccggatagaacgtcttgccggggcaacatattcgacgagcctgcg

SEQ ID NO: 38844 - DNA, 50 bp, synthetic construct
  source 1..50: mol_type = other DNA
cgcgggcctcaacgtcctcgtcgccggcgacgagggtgcggacgtcgtca

SEQ ID NO: 38845 - DNA, 50 bp, synthetic construct
  source 1..50: mol_type = other DNA
tcacattccacccggcaaaggagaggcggcattgggccggaaggcgcttg

SEQ ID NO: 38846 - DNA, 50 bp, synthetic construct
  source 1..50: mol_type = other DNA
aagctgcatgggatgcaaagaaggaaccttctgaatgctggttgtttctt

SEQ ID NO: 38847 - DNA, 50 bp, synthetic construct
  source 1..50: mol_type = other DNA
tgaccgtcatcgccgtcacgacccccggcgcgtgacgcggctttccatcc

SEQ ID NO: 38848 - DNA, 50 bp, synthetic construct
  source 1..50: mol_type = other DNA
agcgtaaacttattggcgaaaaataagtttttctgaaatggtatcatcaa

SEQ ID NO: 38849 - DNA, 50 bp, synthetic construct
  source 1..50: mol_type = other DNA
tttttcagaattctggcttcaaatccgcttatgccctcatcggcaaaaat

SEQ ID NO: 38850 - DNA, 50 bp, synthetic construct
  source 1..50: mol_type = other DNA
gtccacccgctcgatctcggccaaccttgggcgagcgaggtgtgacggac

SEQ ID NO: 38851 - DNA, 50 bp, synthetic construct
  source 1..50: mol_type = other DNA
gatgtcaacgcggtcgagcaatggccggacgcatcggggtgtgcgacatc

SEQ ID NO: 38852 - DNA, 50 bp, synthetic construct
  source 1..50: mol_type = other DNA
cagtaaatatcatctcaaatgatgtacaaagtagtaactgatatagacta

SEQ ID NO: 38853 - DNA, 50 bp, synthetic construct
  source 1..50: mol_type = other DNA
gcgggagcggctggaatgaggaaggccttcgatcctgccgccgctggcgc

SEQ ID NO: 38854 - DNA, 50 bp, synthetic construct
  source 1..50: mol_type = other DNA
taatcacacatggtatagtttcatagatgaacttataaacgttatggcta

SEQ ID NO: 38855 - DNA, 50 bp, synthetic construct
  source 1..50: mol_type = other DNA
ttaaaaagtactcagtgaatcctcacatcgattgaaaatttattttgatt

SEQ ID NO: 38856 - DNA, 50 bp, synthetic construct
  source 1..50: mol_type = other DNA
caagcaagaattcatagataaaattaaagttgattacttctttcagcttc

SEQ ID NO: 38857 - DNA, 50 bp, synthetic construct
  source 1..50: mol_type = other DNA
gatcttagtatgaatatggaagaaattgtagcctttcatattaatctata

SEQ ID NO: 38858 - DNA, 50 bp, synthetic construct
  source 1..50: mol_type = other DNA
ggtgacgaagggctggaaactacacttaatgggtaattactttgtttgct

SEQ ID NO: 38859 - DNA, 50 bp, synthetic construct
  source 1..50: mol_type = other DNA
atgactttcgctacctcaaatagccgttatccgaagaaccgaaaagaaac

SEQ ID NO: 38860 - DNA, 50 bp, synthetic construct
  source 1..50: mol_type = other DNA
tgataaggttctccgtatcagtaatacttgtgatacggttcattcttcat

SEQ ID NO: 38861 - DNA, 50 bp, synthetic construct
  source 1..50: mol_type = other DNA
tagacgatcacaaagattagaatggttgtaacgttgtttgatgatgtcac

SEQ ID NO: 38862 - DNA, 50 bp, synthetic construct
  source 1..50: mol_type = other DNA
tggtagtctatttttttgcggttgaacagacctaaacgatggaatcgctt

SEQ ID NO: 38863 - DNA, 50 bp, synthetic construct
  source 1..50: mol_type = other DNA
aaattagttaagaaaggagtatatgcacattctccagataagccgacgac

SEQ ID NO: 38864 - DNA, 50 bp, synthetic construct
  source 1..50: mol_type = other DNA
aatgtactaaaaaatataaatgtatataaaattttatgtttttctacata

SEQ ID NO: 38865 - DNA, 50 bp, synthetic construct
  source 1..50: mol_type = other DNA
actacatcaaataaatacagttaggtaatttgctttttatttagtgtagt

SEQ ID NO: 38866 - DNA, 50 bp, synthetic construct
  source 1..50: mol_type = other DNA
cgcatcgagaagcctgctcatatacatccaaaagttgctgaaggaattat

SEQ ID NO: 38867 - DNA, 50 bp, synthetic construct
  source 1..50: mol_type = other DNA
ggctgcttaattaaaaagtagcccatatccagccgcgtcatgtagcggcc

SEQ ID NO: 38868 - DNA, 50 bp, synthetic construct
  source 1..50: mol_type = other DNA
ttcttgaaaaaataatatagattataacctccatattgctttatctttta

SEQ ID NO: 38869 - DNA, 50 bp, synthetic construct
  source 1..50: mol_type = other DNA
gctttagggttaaatggggtaaatctcatgcgcctaatggcaacaaaaaa

SEQ ID NO: 38870 - DNA, 50 bp, synthetic construct
  source 1..50: mol_type = other DNA
cctggtgcgtcaacgacaaaggtaggaaccgcatagcctgaggtatgacc

SEQ ID NO: 38871 - DNA, 50 bp, synthetic construct
  source 1..50: mol_type = other DNA
tgagctttcttaggatcaaatgataccccatttaatcctaaagcatcatt

SEQ ID NO: 38872 - DNA, 50 bp, synthetic construct
  source 1..50: mol_type = other DNA
taccaagaaagaaacatatttccttaaagaaaattccatcgttctttctt

SEQ ID NO: 38873 - DNA, 50 bp, synthetic construct
  source 1..50: mol_type = other DNA
ctttattttttatataatggatactagtacctattctatatgtataaaaa

SEQ ID NO: 38874 - DNA, 50 bp, synthetic construct
  source 1..50: mol_type = other DNA
atttcagcatctgcggtatacttatattggctgtctgcatctgcatggcg

SEQ ID NO: 38875 - DNA, 50 bp, synthetic construct
  source 1..50: mol_type = other DNA
aagaccttcggattatcaaattcactatgatatgccctgctgaaagctga

SEQ ID NO: 38876 - DNA, 50 bp, synthetic construct
  source 1..50: mol_type = other DNA
aaatacaccagaacattttactatataattcgaaaaaagaagttatattt

SEQ ID NO: 38877 - DNA, 50 bp, synthetic construct
  source 1..50: mol_type = other DNA
aaatagtaaaaccagtaaaaccccctgggacataactagcctaaaatgaa

SEQ ID NO: 38878 - DNA, 50 bp, synthetic construct
  source 1..50: mol_type = other DNA
taagaattttatataaatttaataatatgattgattatataaaacaaata

SEQ ID NO: 38879 - DNA, 50 bp, synthetic construct
  source 1..50: mol_type = other DNA
tatatgatctaaatatatagtagttattacttaaatacaggataaatata

SEQ ID NO: 38880 - DNA, 50 bp, synthetic construct
  source 1..50: mol_type = other DNA
agatatacatgaatgtgcacaggcggcagagcagatcctccggttattcc

SEQ ID NO: 38881 - DNA, 50 bp, synthetic construct
  source 1..50: mol_type = other DNA
ctgttcagaaagttttaggttgggtaccagaccttaaaagatgtgatgaa

SEQ ID NO: 38882 - DNA, 50 bp, synthetic construct
  source 1..50: mol_type = other DNA
gattatgaagggagaagcatatcataccgataagcagaggcgtatcataa

SEQ ID NO: 38883 - DNA, 50 bp, synthetic construct
  source 1..50: mol_type = other DNA
ggaaggaaaccgctcttccccgcttctgcggaaaagaaatgtttcaatgc

SEQ ID NO: 38884 - DNA, 50 bp, synthetic construct
  source 1..50: mol_type = other DNA
aatccatggccacggccgaatacccgggtatgcccgcgtgtccaccgacc

SEQ ID NO: 38885 - DNA, 50 bp, synthetic construct
  source 1..50: mol_type = other DNA
gcaggcgaaggtgaggttacttatttgttgggttgtcgatgtcggtgggt

SEQ ID NO: 38886 - DNA, 50 bp, synthetic construct
  source 1..50: mol_type = other DNA
cctgcatttgaaatcctgctatttgcggatgaggggatttcgggaactaa

SEQ ID NO: 38887 - DNA, 50 bp, synthetic construct
  source 1..50: mol_type = other DNA
tttccagaaagaccgtcagcaagatttcttgctctttttcggatagtaaa

SEQ ID NO: 38888 - DNA, 50 bp, synthetic construct
  source 1..50: mol_type = other DNA
cgtcaaattcccacaagaaagcaagcttgcggatggccttgatggtggaa

SEQ ID NO: 38889 - DNA, 50 bp, synthetic construct
  source 1..50: mol_type = other DNA
tttttccgcaggaggcaaggaaaaatccatccgcgccacatccatgcaga

SEQ ID NO: 38890 - DNA, 50 bp, synthetic construct
  source 1..50: mol_type = other DNA
tcctcatggtcggtggagacgcgggcgcggtggtctgcctcctcccggtg

SEQ ID NO: 38891 - DNA, 50 bp, synthetic construct
  source 1..50: mol_type = other DNA
aacatttgtgaatcagcacttttagcgaggagtgctgcgtaaatagcaaa

SEQ ID NO: 38892 - DNA, 50 bp, synthetic construct
  source 1..50: mol_type = other DNA
tcacagacaaataaatcataaaagaatttagctgatttagcaacagttga

SEQ ID NO: 38893 - DNA, 50 bp, synthetic construct
  source 1..50: mol_type = other DNA
caaaaattgaacagaaaaacagggaaacacgttcaccgcgtgcatttttt

SEQ ID NO: 38894 - DNA, 50 bp, synthetic construct
  source 1..50: mol_type = other DNA
ggatatacagcgacagaatcgaacgtttttttacgttgtttagtacctca

SEQ ID NO: 38895 - DNA, 50 bp, synthetic construct
  source 1..50: mol_type = other DNA
tagttaaactcgaaagatttgtcaaagcacaaatagaagctaacgaagaa

SEQ ID NO: 38896 - DNA, 50 bp, synthetic construct
  source 1..50: mol_type = other DNA
aggcagataaaaaaagacccgggattccgggtctttttttaaatactaac

SEQ ID NO: 38897 - DNA, 50 bp, synthetic construct
  source 1..50: mol_type = other DNA
ctccacaggatactttggattccctaggatttccggggtgactaataata

SEQ ID NO: 38898 - DNA, 50 bp, synthetic construct
  source 1..50: mol_type = other DNA
tgtcgccattaaacgcataaggtttaattaggtttacaccattaaggcca

SEQ ID NO: 38899 - DNA, 50 bp, synthetic construct
  source 1..50: mol_type = other DNA
tgtacccggagttgttgagtttccgatgtaggcttcaacggcatgtgtaa

SEQ ID NO: 38900 - DNA, 50 bp, synthetic construct
  source 1..50: mol_type = other DNA
cgattatactggtttagttagctagggtagatgatgaacgattatactga

SEQ ID NO: 38901 - DNA, 50 bp, synthetic construct
  source 1..50: mol_type = other DNA
gcacgatacatatggacgttacaaaattgtaacgaccaaacataaggacg

SEQ ID NO: 38902 - DNA, 50 bp, synthetic construct
  source 1..50: mol_type = other DNA
tgacggaattgtttatgagggagatatacccaacctaaaactttctgaac

SEQ ID NO: 38903 - DNA, 50 bp, synthetic construct
  source 1..50: mol_type = other DNA
ggtctatacagaatggtcacttcgtacgatggggtaccggaaccagggct

SEQ ID NO: 38904 - DNA, 50 bp, synthetic construct
  source 1..50: mol_type = other DNA
acgattgtactggtttagttagcgggtagatgatgaacgattgtactggt

SEQ ID NO: 38905 - DNA, 50 bp, synthetic construct
  source 1..50: mol_type = other DNA
taaacaccatctaatattttcatatttgtaattttgccaacagttccata

SEQ ID NO: 38906 - DNA, 50 bp, synthetic construct
  source 1..50: mol_type = other DNA
gctattgtgctggccgacgagccgaccggcaaccttgacagcaagaccag

SEQ ID NO: 38907 - DNA, 50 bp, synthetic construct
  source 1..50: mol_type = other DNA
gcgatagcagcctgtgcagataggtacctatttgcaatagcagcctgtgc

SEQ ID NO: 38908 - DNA, 50 bp, synthetic construct
  source 1..50: mol_type = other DNA
ctacccccggttgctttccgaatcaggtgtcgcacctcagtcgttcacgc

SEQ ID NO: 38909 - DNA, 50 bp, synthetic construct
  source 1..50: mol_type = other DNA
gctcggtggaggcgacgccgtattcgggtatgcccgcgtgtccaccgacc

SEQ ID NO: 38910 - DNA, 50 bp, synthetic construct
  source 1..50: mol_type = other DNA
tgtagagggattcacggttgagttgagtccacaccggttctccaagtacc

SEQ ID NO: 38911 - DNA, 50 bp, synthetic construct
  source 1..50: mol_type = other DNA
cagccttggctgcccgaaggatggttgtttcattggggtgcccgaaggcc

SEQ ID NO: 38912 - DNA, 50 bp, synthetic construct
  source 1..50: mol_type = other DNA
taggtggcatgattaatccattcgtatgttcacggtcggaatcgcacaaa

SEQ ID NO: 38913 - DNA, 50 bp, synthetic construct
  source 1..50: mol_type = other DNA
cgagtgcatcgactgcgccgtctgcatcgaccatgaggtcgatgagctcg

SEQ ID NO: 38914 - DNA, 50 bp, synthetic construct
  source 1..50: mol_type = other DNA
acctcgccattcatggcagaggggcggacggaaccggacttggatacact

SEQ ID NO: 38915 - DNA, 50 bp, synthetic construct
  source 1..50: mol_type = other DNA
gtcgcgcgccgccgcgacgaccgcccgcgcccgggcgcagcacgccggag

SEQ ID NO: 38916 - DNA, 50 bp, synthetic construct
  source 1..50: mol_type = other DNA
aaaaatggagaagtagtagcaatggtatttactactattatattattttt

SEQ ID NO: 38917 - DNA, 50 bp, synthetic construct
  source 1..50: mol_type = other DNA
tttgagatttaatattattatcagcttttctaattgtattaattctatta

SEQ ID NO: 38918 - DNA, 50 bp, synthetic construct
  source 1..50: mol_type = other DNA
caaacgtatctttgatttgctgatgatgtagagaatcactgatagcagta

SEQ ID NO: 38919 - DNA, 50 bp, synthetic construct
  source 1..50: mol_type = other DNA
tcaatgtcgtttcaaatcttgcggcttttggtgaattaaagtgtctatat

SEQ ID NO: 38920 - DNA, 50 bp, synthetic construct
  source 1..50: mol_type = other DNA
gtcgcaggttcgaatcctgccgaggggattcgcgtaggcgcacttgcagt

SEQ ID NO: 38921 - DNA, 50 bp, synthetic construct
  source 1..50: mol_type = other DNA
atggtattagaaaacttgtaaactaactttttgaagatatgaaattagat

SEQ ID NO: 38922 - DNA, 50 bp, synthetic construct
  source 1..50: mol_type = other DNA
tcagccccgcctcaatgaccattttgtaaccggcattctatcggggcttg

SEQ ID NO: 38923 - DNA, 50 bp, synthetic construct
  source 1..50: mol_type = other DNA
agccagttcattcgctcatacatgatcttctttgagcaaattcttctgtt

SEQ ID NO: 38924 - DNA, 50 bp, synthetic construct
  source 1..50: mol_type = other DNA
gcacaggcagctattgcaaataggtacctatctgcacaggctgctattgc

SEQ ID NO: 38925 - DNA, 50 bp, synthetic construct
  source 1..50: mol_type = other DNA
gaccggaattggcgcgacgggaggcgccttccgtccagtccaaatccgtt

SEQ ID NO: 38926 - DNA, 50 bp, synthetic construct
  source 1..50: mol_type = other DNA
tcctgcggtggaggtaacgcgacagttcaactttacgtggagctaggggg

SEQ ID NO: 38927 - DNA, 50 bp, synthetic construct
  source 1..50: mol_type = other DNA
gcgaacagaaattcaagaaatgctgcacgacattaagaaatgctgctcgc

SEQ ID NO: 38928 - DNA, 50 bp, synthetic construct
  source 1..50: mol_type = other DNA
attagtggaatatcattacacccttattgagttaattatattgcattaga

SEQ ID NO: 38929 - DNA, 50 bp, synthetic construct
  source 1..50: mol_type = other DNA
cggaatcgctgggaattacacggattctgctgtatcccctgttgattccg

SEQ ID NO: 38930 - DNA, 50 bp, synthetic construct
  source 1..50: mol_type = other DNA
agaacagcctgggccacagccagcggcttggccgcgctccaggctcgtct

SEQ ID NO: 38931 - DNA, 50 bp, synthetic construct
  source 1..50: mol_type = other DNA
cccgcgccgagccgactccgccacccgccgtggagccgggccgggtgccg

SEQ ID NO: 38932 - DNA, 50 bp, synthetic construct
  source 1..50: mol_type = other DNA
ttggccgacgttttcgacgccctggttttcgcgtcgagcccgtcagtcga

SEQ ID NO: 38933 - DNA, 50 bp, synthetic construct
  source 1..50: mol_type = other DNA
tgagggggttctatccaattattacgtctcggtcatgtcggtcccccaca

SEQ ID NO: 38934 - DNA, 50 bp, synthetic construct
  source 1..50: mol_type = other DNA
accttcatgcccatcaggccctggtcccagcccttgatgacgcgcccggt

SEQ ID NO: 38935 - DNA, 50 bp, synthetic construct
  source 1..50: mol_type = other DNA
ctggaggttttgcgtgagccgctggagtccgggcatatcgtgatttcccg

SEQ ID NO: 38936 - DNA, 50 bp, synthetic construct
  source 1..50: mol_type = other DNA
ttgagcgccagttccagcatgccgatgggcgtgcggatttcatggctcat

SEQ ID NO: 38937 - DNA, 50 bp, synthetic construct
  source 1..50: mol_type = other DNA
atgagccatgaaatccgtacgcccatcggaatgctggagctggcgctcaa

SEQ ID NO: 38938 - DNA, 50 bp, synthetic construct
  source 1..50: mol_type = other DNA
tcttagacgctgcctaacgcaattaaactctttgtagataaaatctaaga

SEQ ID NO: 38939 - DNA, 50 bp, synthetic construct
  source 1..50: mol_type = other DNA
gccgaggactggcgcgagcaagtggccagccagtccgctgccgcctgggc

SEQ ID NO: 38940 - DNA, 50 bp, synthetic construct
  source 1..50: mol_type = other DNA
cccgagccgggtgggccgaccatcagcccaatatgttgacccggtacgtt

SEQ ID NO: 38941 - DNA, 50 bp, synthetic construct
  source 1..50: mol_type = other DNA
tatgcgtggagaagcatatcataaattatctgatacgcagaggcgtatca

SEQ ID NO: 38942 - DNA, 50 bp, synthetic construct
  source 1..50: mol_type = other DNA
ccaaacttaaattaaaaaaattatataaaactcatgaaatttttggagta

SEQ ID NO: 38943 - DNA, 50 bp, synthetic construct
  source 1..50: mol_type = other DNA
atgtttcctcacacagcacggaccgaggctgttgttaaactaagcaaaaa

SEQ ID NO: 38944 - DNA, 50 bp, synthetic construct
  source 1..50: mol_type = other DNA
ttcttgaaaaaagctaaggttaaagctttgacaacgggccattgaaagaa

SEQ ID NO: 38945 - DNA, 50 bp, synthetic construct
  source 1..50: mol_type = other DNA
atgtttccccacacagcacggaccgaggcggttgttaaactaaacaaaaa

SEQ ID NO: 38946 - DNA, 50 bp, synthetic construct
  source 1..50: mol_type = other DNA
gtcgaattagtttgtctgataacttgacttaccagaagaagtaatttctt

SEQ ID NO: 38947 - DNA, 50 bp, synthetic construct
  source 1..50: mol_type = other DNA
ataccggccaagaaagtgcagaccagaagaagtaatttcttgtaaggttc

SEQ ID NO: 38948 - DNA, 50 bp, synthetic construct
  source 1..50: mol_type = other DNA
atttaaagcatatgctttgatgtcataccaaaaaacgtgatgcttttaac

SEQ ID NO: 38949 - DNA, 50 bp, synthetic construct
  source 1..50: mol_type = other DNA
tggctttgcaaactccatcttagctagatatgggagtattattatgggta

SEQ ID NO: 38950 - DNA, 50 bp, synthetic construct
  source 1..50: mol_type = other DNA
ttcacagataatcacgaagagtaaatttaccgataatcacgaaggacagc

SEQ ID NO: 38951 - DNA, 50 bp, synthetic construct
  source 1..50: mol_type = other DNA
tttaagaccgccacattctccacatgtgtcgtatgcggaaacatatcaac

SEQ ID NO: 38952 - DNA, 50 bp, synthetic construct
  source 1..50: mol_type = other DNA
atgaaaaaatatccacacgatctattgtgatacggttcatttcgaataat

SEQ ID NO: 38953 - DNA, 50 bp, synthetic construct
  source 1..50: mol_type = other DNA
cttcgggcaggcggaatacgcctacattggcgtattgactctgaaatatt

SEQ ID NO: 38954 - DNA, 50 bp, synthetic construct
  source 1..50: mol_type = other DNA
ctttggtaaaattttacgacaccaaaccttgtggatagtatttttgcaaa

SEQ ID NO: 38955 - DNA, 50 bp, synthetic construct
  source 1..50: mol_type = other DNA
gaattcataatctggatgatttgttattaccccatcccctttatttattg

SEQ ID NO: 38956 - DNA, 50 bp, synthetic construct
  source 1..50: mol_type = other DNA
atataatttgtaaattatcggtactagaactagaactttagagcttatac

SEQ ID NO: 38957 - DNA, 50 bp, synthetic construct
  source 1..50: mol_type = other DNA
ttcttattacaattaatactactatagaaaaggctgtttataagaaagaa

SEQ ID NO: 38958 - DNA, 50 bp, synthetic construct
  source 1..50: mol_type = other DNA
aaaacagtacgtaatcacatctcaaacgcaatgcaaaagctaggggttaa

SEQ ID NO: 38959 - DNA, 50 bp, synthetic construct
  source 1..50: mol_type = other DNA
acaaaaattgaaagttcttcttaaacattaagtttccttttaattgttct

SEQ ID NO: 38960 - DNA, 50 bp, synthetic construct
  source 1..50: mol_type = other DNA
tactggggaaattaaaaaaaattgttaaatttttagcaacttaccctgaa

SEQ ID NO: 38961 - DNA, 50 bp, synthetic construct
  source 1..50: mol_type = other DNA
ttatgcattactaagtttacacaatcacattataacctacatcatttatg

SEQ ID NO: 38962 - DNA, 50 bp, synthetic construct
  source 1..50: mol_type = other DNA
aaaatgaatttcactctatgcaaatatttggcagtgacaaaattcgtttt

SEQ ID NO: 38963 - DNA, 50 bp, synthetic construct
  source 1..50: mol_type = other DNA
tatgcagctactctttttcttgcggcccgaaaaaaggctgtagttgatta

SEQ ID NO: 38964 - DNA, 50 bp, synthetic construct
  source 1..50: mol_type = other DNA
cttgacttggaataatatcaataaactaattaataaaatttatattgacg

SEQ ID NO: 38965 - DNA, 50 bp, synthetic construct
  source 1..50: mol_type = other DNA
aaagaagcgatcgacacacttgtaaagcatatggaagacaaacagcatga

SEQ ID NO: 38966 - DNA, 50 bp, synthetic construct
  source 1..50: mol_type = other DNA
atggcatttgatatgcatatctatcgaccggtatgcataccatttgaaat

SEQ ID NO: 38967 - DNA, 50 bp, synthetic construct
  source 1..50: mol_type = other DNA
aaaaggcgatttctttttagtaattttttggtaaaaagaaaagcccggag

SEQ ID NO: 38968 - DNA, 50 bp, synthetic construct
  source 1..50: mol_type = other DNA
ctagtccagcggaccgccgatggtgctacagcggcccgccggcgacgtag

SEQ ID NO: 38969 - DNA, 50 bp, synthetic construct
  source 1..50: mol_type = other DNA
acataaacactgaatttggtcgtgaaaatgaaagaatgactgttttttaa

SEQ ID NO: 38970 - DNA, 50 bp, synthetic construct
  source 1..50: mol_type = other DNA
aattttccggcattcggtgaaatcgcgacttcatcgaatgaaggaaacca

SEQ ID NO: 38971 - DNA, 50 bp, synthetic construct
  source 1..50: mol_type = other DNA
atattataaatcatttagtctttattcattaattttgacattttgaatat

SEQ ID NO: 38972 - DNA, 50 bp, synthetic construct
  source 1..50: mol_type = other DNA
acaagacttaagcaggttatttataagtaaataagcgttataaacctcca

SEQ ID NO: 38973 - DNA, 50 bp, synthetic construct
  source 1..50: mol_type = other DNA
cgtggacgccgggcagccgcagccgcggaggaagagggattcgaaccccc

SEQ ID NO: 38974 - DNA, 50 bp, synthetic construct
  source 1..50: mol_type = other DNA
agtccgatcatgcggcagaaatcaggggaattccctttcaagatcggtta

SEQ ID NO: 38975 - DNA, 50 bp, synthetic construct
  source 1..50: mol_type = other DNA
gattatttgaacggaaagctttcttaacaaacagtgtcgtgcaacaaatg

SEQ ID NO: 38976 - DNA, 50 bp, synthetic construct
  source 1..50: mol_type = other DNA
ggttaataaattaagcaccaatctcaagaattttgtgtaaccttttaacg

SEQ ID NO: 38977 - DNA, 50 bp, synthetic construct
  source 1..50: mol_type = other DNA
atcgccgtctgagccgcttttaactcacagttacaatgatcgataagcaa

SEQ ID NO: 38978 - DNA, 50 bp, synthetic construct
  source 1..50: mol_type = other DNA
tgacataagcgtactgtgacgattatgaacgattgtactggtttacttcc

SEQ ID NO: 38979 - DNA, 50 bp, synthetic construct
  source 1..50: mol_type = other DNA
tgtaaacctaattacaccaacaagatcatgttggtgtaaaccttatgcgt

SEQ ID NO: 38980 - DNA, 50 bp, synthetic construct
  source 1..50: mol_type = other DNA
atgtttgggtatggggaagtaaaccagtacaatcgtcacagtacgcttat

SEQ ID NO: 38981 - DNA, 50 bp, synthetic construct
  source 1..50: mol_type = other DNA
gtaatatgtttgggtatggggaagtacatccttgctaattaaaccagtac

SEQ ID NO: 38982 - DNA, 50 bp, synthetic construct
  source 1..50: mol_type = other DNA
gtactggtttaattagcaaggatgtagatgatgagcgattatactggttt

SEQ ID NO: 38983 - DNA, 50 bp, synthetic construct
  source 1..50: mol_type = other DNA
caaccagtggatttgttcccgaatacatgtggagacggtagcactgctgt

SEQ ID NO: 38984 - DNA, 50 bp, synthetic construct
  source 1..50: mol_type = other DNA
tcaaactaactctgatatcactttattcgcttttatcatattgagttaca

SEQ ID NO: 38985 - DNA, 50 bp, synthetic construct
  source 1..50: mol_type = other DNA
cacgaccgcacagccgcacccagcgcacaacgtgcgaacctgcagtcggc

SEQ ID NO: 38986 - DNA, 50 bp, synthetic construct
  source 1..50: mol_type = other DNA
tggaacagcacttcttgatattgtgcagcacttcttgaatttctgcccac

SEQ ID NO: 38987 - DNA, 50 bp, synthetic construct
  source 1..50: mol_type = other DNA
gcggaaagcttcctccgagtttgttagttaaccaagaggaagcagttaaa

SEQ ID NO: 38988 - DNA, 50 bp, synthetic construct
  source 1..50: mol_type = other DNA
aagggaaatgaaaagaaatgcctgatcagttattccttccttttttcctt

SEQ ID NO: 38989 - DNA, 50 bp, synthetic construct
  source 1..50: mol_type = other DNA
tggggagcccgggtcgcgcaggcgccgcggtgcgcgacctggacttcccc

SEQ ID NO: 38990 - DNA, 50 bp, synthetic construct
  source 1..50: mol_type = other DNA
tcatggggctactaaacaggacaaatttgttcggtttcggctacaaaccg

SEQ ID NO: 38991 - DNA, 50 bp, synthetic construct
  source 1..50: mol_type = other DNA
cataataggtggtttgtatgcttaattaattatactgactctgtattaaa

SEQ ID NO: 38992 - DNA, 50 bp, synthetic construct
  source 1..50: mol_type = other DNA
attaaggcatagaatcacatttcaaaataaaggtgattaaaataattaat

SEQ ID NO: 38993 - DNA, 50 bp, synthetic construct
  source 1..50: mol_type = other DNA
gctgcggccggggcgcacaacctgctgttcaccgggccgcccggcaccgg

SEQ ID NO: 38994 - DNA, 50 bp, synthetic construct
  source 1..50: mol_type = other DNA
cgacgctcacgctcaacatcgagtcgcctcctgatgcagcgtgaagggga

SEQ ID NO: 38995 - DNA, 50 bp, synthetic construct
  source 1..50: mol_type = other DNA
tgtcgaggtcactgaaggagacaactgcccagttaacaagaccgacattt

SEQ ID NO: 38996 - DNA, 50 bp, synthetic construct
  source 1..50: mol_type = other DNA
ttattccaccaatgttaaaaataaaattaaggtcacattatcttgaatat

SEQ ID NO: 38997 - DNA, 50 bp, synthetic construct
  source 1..50: mol_type = other DNA
aagcagtccatatccacatgaataatcatgattttacgcattgctcacct

SEQ ID NO: 38998 - DNA, 50 bp, synthetic construct
  source 1..50: mol_type = other DNA
gtatcataaatgatgcggtttttatatcacaaatgacgacactattttat

SEQ ID NO: 38999 - DNA, 50 bp, synthetic construct
  source 1..50: mol_type = other DNA
gaaataaccaaaagaaccgtctgtctctctcagtccaatggatgtcttgc

SEQ ID NO: 39000 - DNA, 50 bp, synthetic construct
  source 1..50: mol_type = other DNA
ggttactgattaaatatcgattactcttcttccatagttgatcaataaca

SEQ ID NO: 39001 - DNA, 50 bp, synthetic construct
  source 1..50: mol_type = other DNA
atgaagataatgtttttacaaaagatcttttcaacaatagtaatatgcta

SEQ ID NO: 39002 - DNA, 50 bp, synthetic construct
  source 1..50: mol_type = other DNA
gccaaattgaccgtagccaacttgatcaagttaagagtaatgcgcttggc

SEQ ID NO: 39003 - DNA, 50 bp, synthetic construct
  source 1..50: mol_type = other DNA
tctggatagaggctatgttctgtagatacaataccttgaccacatgccag

SEQ ID NO: 39004 - DNA, 50 bp, synthetic construct
  source 1..50: mol_type = other DNA
ggaatatttgctgtggtttgccaataatggtttgataaaaagggctggcc

SEQ ID NO: 39005 - DNA, 50 bp, synthetic construct
  source 1..50: mol_type = other DNA
acgagatgatcagggatttgtgtgtcagcagaaatccttagacaagtatc

SEQ ID NO: 39006 - DNA, 50 bp, synthetic construct
  source 1..50: mol_type = other DNA
tccctatctctccgccaatttgatatccttatctgcccgccacgtttaga

SEQ ID NO: 39007 - DNA, 50 bp, synthetic construct
  source 1..50: mol_type = other DNA
taaaacttttatatacaaatattattgaaattatttatatacaacctttt

SEQ ID NO: 39008 - DNA, 50 bp, synthetic construct
  source 1..50: mol_type = other DNA
gtcacatgtagtggaacagctgtctccacgagataagtaggggacatctg

SEQ ID NO: 39009 - DNA, 50 bp, synthetic construct
  source 1..50: mol_type = other DNA
cttatgataaggcgctgcgtatcatgtggtacggagcccccgcattgatc

SEQ ID NO: 39010 - DNA, 50 bp, synthetic construct
  source 1..50: mol_type = other DNA
ccatttctaattgctggtttcttttagtattcaagcacaagaacaaaatg

SEQ ID NO: 39011 - DNA, 50 bp, synthetic construct
  source 1..50: mol_type = other DNA
taacaaaggaaaaaacagtctgtgggcacatgctgatttttctattcacg

SEQ ID NO: 39012 - DNA, 50 bp, synthetic construct
  source 1..50: mol_type = other DNA
aagagtcgcgaaagaatggtatttagaatacccattcttaaaagaagtag

SEQ ID NO: 39013 - DNA, 50 bp, synthetic construct
  source 1..50: mol_type = other DNA
tttagaaaatcactttgtgcaacgtttcgttggaaaagttgcttttcgaa

SEQ ID NO: 39014 - DNA, 50 bp, synthetic construct
  source 1..50: mol_type = other DNA
atgtttgtcggatcgaggtaacaaaggtgtattctcaatcgtgatgaaaa

SEQ ID NO: 39015 - DNA, 50 bp, synthetic construct
  source 1..50: mol_type = other DNA
gccttccggatcaatgcgggggctccagcgccttatcataagtgagacaa

SEQ ID NO: 39016 - DNA, 50 bp, synthetic construct
  source 1..50: mol_type = other DNA
tatattattctgggtgtaaatgataaatcaccttcactttcgataatgct

SEQ ID NO: 39017 - DNA, 50 bp, synthetic construct
  source 1..50: mol_type = other DNA
agttgattagtgcaatattgagaaatgattgtttatttaaggtatcaatg

SEQ ID NO: 39018 - DNA, 50 bp, synthetic construct
  source 1..50: mol_type = other DNA
aatatattattagtatataatctatataacttagctccttataataaata

SEQ ID NO: 39019 - DNA, 50 bp, synthetic construct
  source 1..50: mol_type = other DNA
tctccgggcttttctttttaccgaaattactaaaaagaaatcgccttttt

SEQ ID NO: 39020 - DNA, 50 bp, synthetic construct
  source 1..50: mol_type = other DNA
acttgccccctgaaaaaggcaattctcatttcctctcactggacgcaaag

SEQ ID NO: 39021 - DNA, 50 bp, synthetic construct
  source 1..50: mol_type = other DNA
tgtaatagcagaaagtgaggtgagatctgtttgaattacacgctggtaca

SEQ ID NO: 39022 - DNA, 50 bp, synthetic construct
  source 1..50: mol_type = other DNA
tattatttaaaaggtatcgaaatgttatgagtgtactttgttaaattcta

SEQ ID NO: 39023 - DNA, 50 bp, synthetic construct
  source 1..50: mol_type = other DNA
aattctatatctgggtaagaatttccactctcccacttagatactgctgg

SEQ ID NO: 39024 - DNA, 50 bp, synthetic construct
  source 1..50: mol_type = other DNA
tctattttgcggattctagtgaaaaattaatgaagaaaatgctaaacaag

SEQ ID NO: 39025 - DNA, 50 bp, synthetic construct
  source 1..50: mol_type = other DNA
tctacaaacgtacaaatctagtgaaagaatgttctttttgtgtttgtagt

SEQ ID NO: 39026 - DNA, 50 bp, synthetic construct
  source 1..50: mol_type = other DNA
tggtttccttcattcgatgaagccgcgatttcaccgaatgccggaaaatt

SEQ ID NO: 39027 - DNA, 50 bp, synthetic construct
  source 1..50: mol_type = other DNA
tgacttttatattaagacttatgtaaatcttggtctgaagctaaaagtca

SEQ ID NO: 39028 - DNA, 50 bp, synthetic construct
  source 1..50: mol_type = other DNA
agtaaaacttatgaaaactcgtgcgatcatttttttgatctctttttatt

SEQ ID NO: 39029 - DNA, 50 bp, synthetic construct
  source 1..50: mol_type = other DNA
ggcgcgaagagccagggcatgaagcagcttatggcgggcggcggcgttgc

SEQ ID NO: 39030 - DNA, 50 bp, synthetic construct
  source 1..50: mol_type = other DNA
tttttatggtgtcacaatttttgatattttaatgccataaaggcgcaatg

SEQ ID NO: 39031 - DNA, 50 bp, synthetic construct
  source 1..50: mol_type = other DNA
cattctgtggtgcacctatctgcaacgacactttggtgcccctggaggga

SEQ ID NO: 39032 - DNA, 50 bp, synthetic construct
  source 1..50: mol_type = other DNA
gcagcgggtactgtctttaagagcttcatttataaagagtccgtacaaca

SEQ ID NO: 39033 - DNA, 50 bp, synthetic construct
  source 1..50: mol_type = other DNA
ctaacggttgtatgcaagacatccacggcgcatttggttacttcccatct

SEQ ID NO: 39034 - DNA, 50 bp, synthetic construct
  source 1..50: mol_type = other DNA
atgcctaaacagctctgtttagcatcaccaaacagcatctgcgtattctc

SEQ ID NO: 39035 - DNA, 50 bp, synthetic construct
  source 1..50: mol_type = other DNA
catttctttgcttttttaatggtgtcgcagttcggaatgccaaacatagt

SEQ ID NO: 39036 - DNA, 50 bp, synthetic construct
  source 1..50: mol_type = other DNA
tccgtacatagaataataaagcaccagaactttagccatttctaacgact

SEQ ID NO: 39037 - DNA, 50 bp, synthetic construct
  source 1..50: mol_type = other DNA
atggcggagaataaaaaggtaatactgaagactatgccggaccacatatt

SEQ ID NO: 39038 - DNA, 50 bp, synthetic construct
  source 1..50: mol_type = other DNA
aaaaattaaacaaaaattatatcccatttagcaatttttgtttcattcat

SEQ ID NO: 39039 - DNA, 50 bp, synthetic construct
  source 1..50: mol_type = other DNA
ttgagcgatactacgcactcgatgtgtgcagtatgaggaaacatatccac

SEQ ID NO: 39040 - DNA, 50 bp, synthetic construct
  source 1..50: mol_type = other DNA
tccaaactcacgagtggatgatagtccctgtttccactagcatgtttttg

SEQ ID NO: 39041 - DNA, 50 bp, synthetic construct
  source 1..50: mol_type = other DNA
tccactttctttgcttcactttataaacaaaaaaagagaaagggtgttcc

SEQ ID NO: 39042 - DNA, 50 bp, synthetic construct
  source 1..50: mol_type = other DNA
tacacgtaatacttctttcatttaaaccgaccaaagaatttaaatatggg

SEQ ID NO: 39043 - DNA, 50 bp, synthetic construct
  source 1..50: mol_type = other DNA
tatcacatcggccctttttacaacagattttaaaaaatcgcaagaaaact

SEQ ID NO: 39044 - DNA, 50 bp, synthetic construct
  source 1..50: mol_type = other DNA
gcggccgcgggcggacaccacatgctgatggtcggcccgcccggcgccgg

SEQ ID NO: 39045 - DNA, 50 bp, synthetic construct
  source 1..50: mol_type = other DNA
ttttaattcaataaaaatttccacaaccgaaaatatcaattttatagtgg

SEQ ID NO: 39046 - DNA, 50 bp, synthetic construct
  source 1..50: mol_type = other DNA
gacctgcatttagtgtcagtgttgtacaattcaaacaaataatctgagcg

SEQ ID NO: 39047 - DNA, 50 bp, synthetic construct
  source 1..50: mol_type = other DNA
caattgctctttaatgcctttttcataggaaaggtattgtagcataatgc

SEQ ID NO: 39048 - DNA, 50 bp, synthetic construct
  source 1..50: mol_type = other DNA
gaacaccgggcacgatggaagtctataggagcttgtcttccggccatagt

SEQ ID NO: 39049 - DNA, 50 bp, synthetic construct
  source 1..50: mol_type = other DNA
tattttccaatattatattggaggtaccaatgctattgctttagataata

SEQ ID NO: 39050 - DNA, 50 bp, synthetic construct
  source 1..50: mol_type = other DNA
ccctatcgcggctgcgagcatggctgcatctactgctatgcgcggcccag

SEQ ID NO: 39051 - DNA, 50 bp, synthetic construct
  source 1..50: mol_type = other DNA
atcttgccagcttctgtcttctggcagcacgtttcagagcctggcagata

SEQ ID NO: 39052 - DNA, 50 bp, synthetic construct
  source 1..50: mol_type = other DNA
tcctttcggaaggtttctctttacttttacgcatataccttggaaagctc

SEQ ID NO: 39053 - DNA, 50 bp, synthetic construct
  source 1..50: mol_type = other DNA
atccggattcacgccgcaactgaagctacgggtgcgctgtgaagtttcga

SEQ ID NO: 39054 - DNA, 50 bp, synthetic construct
  source 1..50: mol_type = other DNA
caaacatgaaaatctgttgttattacaactgcaccgattttatgcgattg

SEQ ID NO: 39055 - DNA, 50 bp, synthetic construct
  source 1..50: mol_type = other DNA
ttttctgccatttagttcctcctttcttctgtaaaggtcgcagcacaaaa

SEQ ID NO: 39056 - DNA, 50 bp, synthetic construct
  source 1..50: mol_type = other DNA
ctcgccaagcgcccaggagctcgagtcgtgtcctcgcggcggaaaaagat

SEQ ID NO: 39057 - DNA, 50 bp, synthetic construct
  source 1..50: mol_type = other DNA
ttttggacaccgggtggcaggaagacgttccggccgccgtggcgctcaat

SEQ ID NO: 39058 - DNA, 50 bp, synthetic construct
  source 1..50: mol_type = other DNA
aaaagtacagctgcagccgctcatcaatgcacggaagcccgccagcttct

SEQ ID NO: 39059 - DNA, 50 bp, synthetic construct
  source 1..50: mol_type = other DNA
cccggaatgtcgacccagtagagcatgctacagttgcgcgatatgacgta

SEQ ID NO: 39060 - DNA, 50 bp, synthetic construct
  source 1..50: mol_type = other DNA
gacggcgatgcagtgcacgcggccgagtactcatggcctgcaggctttag

SEQ ID NO: 39061 - DNA, 50 bp, synthetic construct
  source 1..50: mol_type = other DNA
ccctaccgtggctgcgagcatggctgcatctactgcttcgccaggccgac

SEQ ID NO: 39062 - DNA, 50 bp, synthetic construct
  source 1..50: mol_type = other DNA
gctgcgccagcccctggaggacggggaagacctccagcaggaagcgcagg

SEQ ID NO: 39063 - DNA, 50 bp, synthetic construct
  source 1..50: mol_type = other DNA
gagaaagtggtacactcgacgggagaacggagagatggtacgccctaggg

SEQ ID NO: 39064 - DNA, 50 bp, synthetic construct
  source 1..50: mol_type = other DNA
accgtggttgcgagcatggctggctgtctgcatctactgctatgcgcggc

SEQ ID NO: 39065 - DNA, 50 bp, synthetic construct
  source 1..50: mol_type = other DNA
aaaataaaaaggagctattattaacaagtatattataacacttttattag

SEQ ID NO: 39066 - DNA, 50 bp, synthetic construct
  source 1..50: mol_type = other DNA
ctcatgatgtcttttcttgtacccatcaaaacagaaaggcaattcctgga

SEQ ID NO: 39067 - DNA, 50 bp, synthetic construct
  source 1..50: mol_type = other DNA
taaggttaaagctttcactctggtagatgttagtggtccttttaatcatc

SEQ ID NO: 39068 - DNA, 50 bp, synthetic construct
  source 1..50: mol_type = other DNA
gagtttggacaaaagtgctaccgtctccacatgatgcgtttgagaaaata

SEQ ID NO: 39069 - DNA, 50 bp, synthetic construct
  source 1..50: mol_type = other DNA
tccttgattagcaacactacgcactcgacgtgatgcgtttgcggaaacaa

SEQ ID NO: 39070 - DNA, 50 bp, synthetic construct
  source 1..50: mol_type = other DNA
tacacactcgacgtgtgttgtccatatgcactccacatgatgcgtttgcg

SEQ ID NO: 39071 - DNA, 50 bp, synthetic construct
  source 1..50: mol_type = other DNA
atttgtttccccagacgcatcatgtgagtgtgtaagtttacttgagaaac

SEQ ID NO: 39072 - DNA, 50 bp, synthetic construct
  source 1..50: mol_type = other DNA
attttgagccgttttataaggaaatataatgaattgaaagccagtaaaat

SEQ ID NO: 39073 - DNA, 50 bp, synthetic construct
  source 1..50: mol_type = other DNA
agaaaacttccatcaaaaattattaaggtaagggttgatacattttttat

SEQ ID NO: 39074 - DNA, 50 bp, synthetic construct
  source 1..50: mol_type = other DNA
ataaatattagcataattttaaaacaattatggtttggacttatatatca

SEQ ID NO: 39075 - DNA, 50 bp, synthetic construct
  source 1..50: mol_type = other DNA
cactacgcactcgacgtgcgttgtcttccacgtgatgcgtttgcggaaac

SEQ ID NO: 39076 - DNA, 50 bp, synthetic construct
  source 1..50: mol_type = other DNA
gcagcccgtagatttgtttccgcaaatcaaaagacaacgcacgtcgagtg

SEQ ID NO: 39077 - DNA, 50 bp, synthetic construct
  source 1..50: mol_type = other DNA
ccttaacctctaaaatcctctcagaatattatgcagttttccggttaagg

SEQ ID NO: 39078 - DNA, 50 bp, synthetic construct
  source 1..50: mol_type = other DNA
catttcagcaatccgatccctcttataagcatactctgcctgctgaaatg

SEQ ID NO: 39079 - DNA, 50 bp, synthetic construct
  source 1..50: mol_type = other DNA
ttaaagaaagcccggaaagataagccaaatatagtgaaatgctttgttaa

SEQ ID NO: 39080 - DNA, 50 bp, synthetic construct
  source 1..50: mol_type = other DNA
gatcttcttttgcgcccaggcagccgggatcctgttagggcaagaagccc

SEQ ID NO: 39081 - DNA, 50 bp, synthetic construct
  source 1..50: mol_type = other DNA
ggggagatcagggatcagccctggttccagcgcgtcccggtgatctccct

SEQ ID NO: 39082 - DNA, 50 bp, synthetic construct
  source 1..50: mol_type = other DNA
tattccacagttcttttgaaataatattattttcaatttacaggctcttg

SEQ ID NO: 39083 - DNA, 50 bp, synthetic construct
  source 1..50: mol_type = other DNA
ataataatcctcctaaaaatagaaattttgtggtttccgaatgaaatcct

SEQ ID NO: 39084 - DNA, 50 bp, synthetic construct
  source 1..50: mol_type = other DNA
ctacaagtcgctcagcgcggtcgcacgccaccgccgttgacgacaacatc

SEQ ID NO: 39085 - DNA, 50 bp, synthetic construct
  source 1..50: mol_type = other DNA
ccagcgaagcgcattacagtgctacaccaaactacggtcaatttagcgcc

SEQ ID NO: 39086 - DNA, 50 bp, synthetic construct
  source 1..50: mol_type = other DNA
cccgctgctttatcgatgctgataattagcggcatctgagaaggtgcttt

SEQ ID NO: 39087 - DNA, 50 bp, synthetic construct
  source 1..50: mol_type = other DNA
tgctgcttgttcatatgtataatctgtaatttgcattgtagcttgttcat

SEQ ID NO: 39088 - DNA, 50 bp, synthetic construct
  source 1..50: mol_type = other DNA
aagtactcaacaagccgatggcgatatcaagataatggtgtatatgaata

SEQ ID NO: 39089 - DNA, 50 bp, synthetic construct
  source 1..50: mol_type = other DNA
tcctataatttttgcctctttattaaaatcttagctacaaatttactgat

SEQ ID NO: 39090 - DNA, 50 bp, synthetic construct
  source 1..50: mol_type = other DNA
aatagctgactttttgatttgaatgcgttaatttcttttttgcagctttt

SEQ ID NO: 39091 - DNA, 50 bp, synthetic construct
  source 1..50: mol_type = other DNA
gcccacttattttttaaaactggagggaactaaacacttaattggtgtta

SEQ ID NO: 39092 - DNA, 50 bp, synthetic construct
  source 1..50: mol_type = other DNA
ttctttggttttatcgatttgaatttattcaatcgactaatggcaaatat

SEQ ID NO: 39093 - DNA, 50 bp, synthetic construct
  source 1..50: mol_type = other DNA
aaacatcattacgaaagaaaaaatttgcttttctcacagtcacttttttt

SEQ ID NO: 39094 - DNA, 50 bp, synthetic construct
  source 1..50: mol_type = other DNA
ttcgcgagcgattgacggcgtcgtcgacgctcccgcccgcgaagcgcgac

SEQ ID NO: 39095 - DNA, 50 bp, synthetic construct
  source 1..50: mol_type = other DNA
ttccaaatacgttccatatcgtatttatcaaacgatgctttgatttgctt

SEQ ID NO: 39096 - DNA, 50 bp, synthetic construct
  source 1..50: mol_type = other DNA
ctgccgcagcttcatgacacaaggagacaatcatcatgaatctgaaagag

SEQ ID NO: 39097 - DNA, 50 bp, synthetic construct
  source 1..50: mol_type = other DNA
gtgccgcgcggggcctatcactatttctacttctgccgccccgcgataga

SEQ ID NO: 39098 - DNA, 50 bp, synthetic construct
  source 1..50: mol_type = other DNA
ggccatcgcgtttgagccaatccatcgtgatcggctctggcggcttcgcg

SEQ ID NO: 39099 - DNA, 50 bp, synthetic construct
  source 1..50: mol_type = other DNA
agcactcctagagacaaaccgctgatgatccggttgcgcctcgggaagtt

SEQ ID NO: 39100 - DNA, 50 bp, synthetic construct
  source 1..50: mol_type = other DNA
acgtgcagcccggaaatcgcaatgaacatagcgacgagatggctcgtgcc

SEQ ID NO: 39101 - DNA, 50 bp, synthetic construct
  source 1..50: mol_type = other DNA
ccacgcgtcaaagctgaaatgttgctcaacttgcgagcaacctcaagtgc

SEQ ID NO: 39102 - DNA, 50 bp, synthetic construct
  source 1..50: mol_type = other DNA
cgcagtaatcgtcccgcatgagccgcataccatgaattacgcttacacct

SEQ ID NO: 39103 - DNA, 50 bp, synthetic construct
  source 1..50: mol_type = other DNA
gtcgcggccttgacgacggccatcacgaccgcactcgtcaccgccgccgc

SEQ ID NO: 39104 - DNA, 50 bp, synthetic construct
  source 1..50: mol_type = other DNA
gcagccgggccacgcggcgagcgcgcacgcgcggcgacgcggccggctgc

SEQ ID NO: 39105 - DNA, 50 bp, synthetic construct
  source 1..50: mol_type = other DNA
tgaatactacaaataactcaccaacataattgctgattttgtgatatcca

SEQ ID NO: 39106 - DNA, 50 bp, synthetic construct
  source 1..50: mol_type = other DNA
gcggagtaaatatttccttatatgaatgctcaaggaaatttctatggtct

SEQ ID NO: 39107 - DNA, 50 bp, synthetic construct
  source 1..50: mol_type = other DNA
aaaaggggtaaatggatttacacttggtcgataatcaatttagccaattg

SEQ ID NO: 39108 - DNA, 50 bp, synthetic construct
  source 1..50: mol_type = other DNA
cggtgctgatcaagtcgtacaggtttatataccggacttgatcaagtccg

SEQ ID NO: 39109 - DNA, 50 bp, synthetic construct
  source 1..50: mol_type = other DNA
ccctaccgtggttgcgagcatggctgcatctactgctatgcgcggcccag

SEQ ID NO: 39110 - DNA, 50 bp, synthetic construct
  source 1..50: mol_type = other DNA
cgcttcccgatggacaagttccgcctgctgcgcgaccacttggtcgacag

SEQ ID NO: 39111 - DNA, 50 bp, synthetic construct
  source 1..50: mol_type = other DNA
cccttgggtgcccgtaggatagcaaatggtgtcgcttgggtgccccaagg

SEQ ID NO: 39112 - DNA, 50 bp, synthetic construct
  source 1..50: mol_type = other DNA
cgggcgatgacgatatggccggattccagcggctcgcgcaggacctcgag

SEQ ID NO: 39113 - DNA, 50 bp, synthetic construct
  source 1..50: mol_type = other DNA
cgacttacctacggtaacagtatctagatacttgccttcgaggcaagtca

SEQ ID NO: 39114 - DNA, 50 bp, synthetic construct
  source 1..50: mol_type = other DNA
ccttaccgcggttgcgaacatggctgcatctactgctttgcgcggccatc

SEQ ID NO: 39115 - DNA, 50 bp, synthetic construct
  source 1..50: mol_type = other DNA
ctgtgtggcagtgggcagaaattcaagaagtgctgttccagctacctcta

SEQ ID NO: 39116 - DNA, 50 bp, synthetic construct
  source 1..50: mol_type = other DNA
aagcggatcacagtgctatgcaagatcatacataaaattaccgtgaactt

SEQ ID NO: 39117 - DNA, 50 bp, synthetic construct
  source 1..50: mol_type = other DNA
ttttttatggtgtcacaatttttgattttaatgccataaaggcacaataa

SEQ ID NO: 39118 - DNA, 50 bp, synthetic construct
  source 1..50: mol_type = other DNA
aacatctcaatcaaggatagtaaaattttagtaacctacatttccaccaa

SEQ ID NO: 39119 - DNA, 50 bp, synthetic construct
  source 1..50: mol_type = other DNA
aaacatagtgaaacatctaattcttgagagggagatctattactaagttg

SEQ ID NO: 39120 - DNA, 50 bp, synthetic construct
  source 1..50: mol_type = other DNA
attgcgtttctctaacaaactcacacgtgatgcgtttgaggaaatagatc

SEQ ID NO: 39121 - DNA, 50 bp, synthetic construct
  source 1..50: mol_type = other DNA
gccacacactccacatgtgttgtctgcactccacatgatgtgtcattggg

SEQ ID NO: 39122 - DNA, 50 bp, synthetic construct
  source 1..50: mol_type = other DNA
ttatcaatagtttaattaagttataaaaatagtaagaaaaatattgagaa

SEQ ID NO: 39123 - DNA, 50 bp, synthetic construct
  source 1..50: mol_type = other DNA
gttttcaccctatatcctgttccttcaggagatagttcaaaggaactttg

SEQ ID NO: 39124 - DNA, 50 bp, synthetic construct
  source 1..50: mol_type = other DNA
ggttatgaaattatttttaaacatcccccttgtaaaataaattcttaatt

SEQ ID NO: 39125 - DNA, 50 bp, synthetic construct
  source 1..50: mol_type = other DNA
acgacctgcatctgttggttagttttcactatccaacatctgttgctata

SEQ ID NO: 39126 - DNA, 50 bp, synthetic construct
  source 1..50: mol_type = other DNA
tatttttattatcctaaaacttttttaatatcttctgttacttggctaat

SEQ ID NO: 39127 - DNA, 50 bp, synthetic construct
  source 1..50: mol_type = other DNA
tcttttattattcattacttatacttctttatataaagataaaaaaaaga

SEQ ID NO: 39128 - DNA, 50 bp, synthetic construct
  source 1..50: mol_type = other DNA
ttttaaataatattagtttggatatttaagtaaactagaactattaaaaa

SEQ ID NO: 39129 - DNA, 50 bp, synthetic construct
  source 1..50: mol_type = other DNA
taaatattttcttgtcgttttttgtaaaaaatgcaataccgtaatattta

SEQ ID NO: 39130 - DNA, 50 bp, synthetic construct
  source 1..50: mol_type = other DNA
tataaagccttagtttatagaggtatctttttatatcctttaggtatata

SEQ ID NO: 39131 - DNA, 50 bp, synthetic construct
  source 1..50: mol_type = other DNA
ttatttgttttttagcttgtaaattaataagcatatagaaaacttgataa

SEQ ID NO: 39132 - DNA, 50 bp, synthetic construct
  source 1..50: mol_type = other DNA
acaaaatttactttaacatctgttatattcaatgcatttattaattttgt

SEQ ID NO: 39133 - DNA, 50 bp, synthetic construct
  source 1..50: mol_type = other DNA
gagctcgtgaaaaaaggatgccgggtatttcatcctttcttcttattgta

SEQ ID NO: 39134 - DNA, 50 bp, synthetic construct
  source 1..50: mol_type = other DNA
ttcaaataataaattcacttcaggtagtagaaactattttcatattcaac

SEQ ID NO: 39135 - DNA, 50 bp, synthetic construct
  source 1..50: mol_type = other DNA
aagacagttcgcaaccacatctcaaacgcaatgcaaaagctaggggttaa

SEQ ID NO: 39136 - DNA, 50 bp, synthetic construct
  source 1..50: mol_type = other DNA
ttaattgaccgaacaccatataactagttaggttgtgtttaattgaccat

SEQ ID NO: 39137 - DNA, 50 bp, synthetic construct
  source 1..50: mol_type = other DNA
tatgatacggttctcccctctttacttgtgatacggttctccacgattaa

SEQ ID NO: 39138 - DNA, 50 bp, synthetic construct
  source 1..50: mol_type = other DNA
tatatttagagctgatgttctgtttatattgagagaaattgaaaaatata

SEQ ID NO: 39139 - DNA, 50 bp, synthetic construct
  source 1..50: mol_type = other DNA
taaaggcttcttttttgttgtggatatttaacaaaggaaattgaggatta

SEQ ID NO: 39140 - DNA, 50 bp, synthetic construct
  source 1..50: mol_type = other DNA
atcattctttttccaaaattggtggatttcaatggtggagacgaggggag

SEQ ID NO: 39141 - DNA, 50 bp, synthetic construct
  source 1..50: mol_type = other DNA
ttagaatatctaaattaataattatggaatttttaaacatcttatttcat

SEQ ID NO: 39142 - DNA, 50 bp, synthetic construct
  source 1..50: mol_type = other DNA
tctaccatctcacgaaaatatttttgaaaatgttttcgtgctttgcaagc

SEQ ID NO: 39143 - DNA, 50 bp, synthetic construct
  source 1..50: mol_type = other DNA
tacaaaatatcttaacaactatttataaatatcttcgtgtcccatttgta

SEQ ID NO: 39144 - DNA, 50 bp, synthetic construct
  source 1..50: mol_type = other DNA
tccgaatcaacgaggtttttcggacagcccagggaaacgaagccgatctt

SEQ ID NO: 39145 - DNA, 50 bp, synthetic construct
  source 1..50: mol_type = other DNA
tttgaatgcttttacgatcttaatttatcgatgaagaaaaagctgaaaag

SEQ ID NO: 39146 - DNA, 50 bp, synthetic construct
  source 1..50: mol_type = other DNA
acagcttaatagaaagtgaggtgcagggctttctctttttcttcatccat

SEQ ID NO: 39147 - DNA, 50 bp, synthetic construct
  source 1..50: mol_type = other DNA
tctttggctatgaaaatggatttttaaaaactcttttaaatgcaaattct

SEQ ID NO: 39148 - DNA, 50 bp, synthetic construct
  source 1..50: mol_type = other DNA
atgttgctgttgaagcggaattcgaaagttttccgatttagcagcgtgat

SEQ ID NO: 39149 - DNA, 50 bp, synthetic construct
  source 1..50: mol_type = other DNA
actacatggctgattaggagggacgttcaatggcaacttagccatgcagg

SEQ ID NO: 39150 - DNA, 50 bp, synthetic construct
  source 1..50: mol_type = other DNA
gtgatgctactagacctgagacttataagaaatatattgaggagcattcc

SEQ ID NO: 39151 - DNA, 50 bp, synthetic construct
  source 1..50: mol_type = other DNA
tcatagtggaattcctctgtgaattaatgcttagtgctagtccaattacg

SEQ ID NO: 39152 - DNA, 50 bp, synthetic construct
  source 1..50: mol_type = other DNA
gcaggcgaaggtcagattgcttatttgttgggttgtcgatgtcggtgggc

SEQ ID NO: 39153 - DNA, 50 bp, synthetic construct
  source 1..50: mol_type = other DNA
tccatcttaaagaggtgagaggacatgttacttcagctaaagacctggct

SEQ ID NO: 39154 - DNA, 50 bp, synthetic construct
  source 1..50: mol_type = other DNA
gcaatagcagcctgtgcagataggtacctatttgcaatagctgcctgtgc

SEQ ID NO: 39155 - DNA, 50 bp, synthetic construct
  source 1..50: mol_type = other DNA
tgccggccatcgcgctcgccgtcgggcctcggcgagcgcgatcacgtccg

SEQ ID NO: 39156 - DNA, 50 bp, synthetic construct
  source 1..50: mol_type = other DNA
cacctgccccggcgtgccgcccgaagcatgacggcgcgccgatctcggtc

SEQ ID NO: 39157 - DNA, 50 bp, synthetic construct
  source 1..50: mol_type = other DNA
gcgcaatgacccttgaatataggctagctcaaatacaatgacctttgatt

SEQ ID NO: 39158 - DNA, 50 bp, synthetic construct
  source 1..50: mol_type = other DNA
ggtaaaggcgctcgccaggaggcggggatgatcaggcgaagggttcggcc

SEQ ID NO: 39159 - DNA, 50 bp, synthetic construct
  source 1..50: mol_type = other DNA
gctttctttttcaaaacctggaggataagtatagatttgaataaaaaatt

SEQ ID NO: 39160 - DNA, 50 bp, synthetic construct
  source 1..50: mol_type = other DNA
tgttagcatatgttaacgaataagttcttcaccggaaaccgcggcgtcca

SEQ ID NO: 39161 - DNA, 50 bp, synthetic construct
  source 1..50: mol_type = other DNA
acatccgaaatgtcttggcaaaatcaataccgccaacacagttcttaacc

SEQ ID NO: 39162 - DNA, 50 bp, synthetic construct
  source 1..50: mol_type = other DNA
gcttatatgctgctcttttcttatacttaatccctctccattatatatgg

SEQ ID NO: 39163 - DNA, 50 bp, synthetic construct
  source 1..50: mol_type = other DNA
tggagtaaatctaattacaccaacaatatggtttaaaacgagtaatcgtt

SEQ ID NO: 39164 - DNA, 50 bp, synthetic construct
  source 1..50: mol_type = other DNA
tttatgcgggcttttatattatttattactaacgtatgagccggcatttt

SEQ ID NO: 39165 - DNA, 50 bp, synthetic construct
  source 1..50: mol_type = other DNA
tatggaaccgttggtaaaatcacaaatatgaaggttttagatggagttta

SEQ ID NO: 39166 - DNA, 50 bp, synthetic construct
  source 1..50: mol_type = other DNA
ttattctgaacaaatatattgtatcattaaaagatattcgtgaagaacgg

SEQ ID NO: 39167 - DNA, 50 bp, synthetic construct
  source 1..50: mol_type = other DNA
atataagtccaaactttttggggataagtaacaaataaaattctttatat

SEQ ID NO: 39168 - DNA, 50 bp, synthetic construct
  source 1..50: mol_type = other DNA
atagtgtctttagagtgatatatagttaattttctctgaaaatttactat

SEQ ID NO: 39169 - DNA, 50 bp, synthetic construct
  source 1..50: mol_type = other DNA
tttgatgatccatataagcaggcagatgcttttttatacaaaagttgaaa

SEQ ID NO: 39170 - DNA, 50 bp, synthetic construct
  source 1..50: mol_type = other DNA
cgctggaccgcctcggacgcgatccgcgacttgtccgacggcgtccagcc

SEQ ID NO: 39171 - DNA, 50 bp, synthetic construct
  source 1..50: mol_type = other DNA
gcgttcgagccagccgcggcggatcggcagatggccgcgggcgcgaacgc

SEQ ID NO: 39172 - DNA, 50 bp, synthetic construct
  source 1..50: mol_type = other DNA
agggtcgcgccctcgtcgtcgactgcatatctccttctaggcgggcgcct

SEQ ID NO: 39173 - DNA, 50 bp, synthetic construct
  source 1..50: mol_type = other DNA
gttataataaataaaataactaagaatcaaataattccatttattggctg

SEQ ID NO: 39174 - DNA, 50 bp, synthetic construct
  source 1..50: mol_type = other DNA
cgcgcatgccatcgaggactgcccgcctggcatccgcgatggcaagcgct

SEQ ID NO: 39175 - DNA, 50 bp, synthetic construct
  source 1..50: mol_type = other DNA
aagctaaggttaaagcttttacattgcgacaagctttttaacagtagcag

SEQ ID NO: 39176 - DNA, 50 bp, synthetic construct
  source 1..50: mol_type = other DNA
atcaagggtcattgtatcgtagctatagacttcattcaagggtcattgaa

SEQ ID NO: 39177 - DNA, 50 bp, synthetic construct
  source 1..50: mol_type = other DNA
tgatgcgcacgtcgcagcgtagtacagtgtactatgctcggtcggcacgc

SEQ ID NO: 39178 - DNA, 50 bp, synthetic construct
  source 1..50: mol_type = other DNA
accatgattggcgagtccctttttcgataagtatcatcgcctcttcttcc

SEQ ID NO: 39179 - DNA, 50 bp, synthetic construct
  source 1..50: mol_type = other DNA
cacttgcgggctttcttgatggtgtcgcagtttttgatgccatagagggt

SEQ ID NO: 39180 - DNA, 50 bp, synthetic construct
  source 1..50: mol_type = other DNA
gaccagagggtgaggactgtttgtacacaaaaatccctgatcatctcgtc

SEQ ID NO: 39181 - DNA, 50 bp, synthetic construct
  source 1..50: mol_type = other DNA
aaatttaattgtatgtcaagcatacaatttctttgaagaaaattatatta

SEQ ID NO: 39182 - DNA, 50 bp, synthetic construct
  source 1..50: mol_type = other DNA
tttaaaattttgaaatgattttgccaacaaaaaccagtttcaatttttaa

SEQ ID NO: 39183 - DNA, 50 bp, synthetic construct
  source 1..50: mol_type = other DNA
ctgactactttgagaagttaaatgagatttgcaaggaataccctagatac

SEQ ID NO: 39184 - DNA, 50 bp, synthetic construct
  source 1..50: mol_type = other DNA
ggcattaaaaggccctttttcttgtacaagacaaaacgccataataaaag

SEQ ID NO: 39185 - DNA, 50 bp, synthetic construct
  source 1..50: mol_type = other DNA
taaactccatctaaaaccttcatatttgtgattttcccaacggttccata

SEQ ID NO: 39186 - DNA, 50 bp, synthetic construct
  source 1..50: mol_type = other DNA
attcaaccagtggataatttcccacaagcaaaagacaatgcacattgaat

SEQ ID NO: 39187 - DNA, 50 bp, synthetic construct
  source 1..50: mol_type = other DNA
ttcttgattagcaacactacgcactccacatgatgcgtttgcggaaacaa

SEQ ID NO: 39188 - DNA, 50 bp, synthetic construct
  source 1..50: mol_type = other DNA
actccacattgtgagacggtagcatttggtaataccgttgagactgtagt

SEQ ID NO: 39189 - DNA, 50 bp, synthetic construct
  source 1..50: mol_type = other DNA
ggaaagcatttataattgtggggtatacgtcattttattaaatagcttcc

SEQ ID NO: 39190 - DNA, 50 bp, synthetic construct
  source 1..50: mol_type = other DNA
ttaacccctagcttttgcattgcgtttgaaatgtgattgcgtactgtttt

SEQ ID NO: 39191 - DNA, 50 bp, synthetic construct
  source 1..50: mol_type = other DNA
aaacttgaatgcttctgttaatcgcactctccacatgcgtcgtctgtggg

SEQ ID NO: 39192 - DNA, 50 bp, synthetic construct
  source 1..50: mol_type = other DNA
tcgcatttcaacaccgtcactgactcgtctgtgggaactgatccaccggc

SEQ ID NO: 39193 - DNA, 50 bp, synthetic construct
  source 1..50: mol_type = other DNA
aaagaacatacgtacgaaaggagatagatcctttacgtgctgacgttgta

SEQ ID NO: 39194 - DNA, 50 bp, synthetic construct
  source 1..50: mol_type = other DNA
ctcaattttgagcctttttataaggaattttaacagacatcaaaatcgtg

SEQ ID NO: 39195 - DNA, 50 bp, synthetic construct
  source 1..50: mol_type = other DNA
attctatatctgggtaagaatttccccactctcccacttagatactgctg

SEQ ID NO: 39196 - DNA, 50 bp, synthetic construct
  source 1..50: mol_type = other DNA
tggcttattgcattgatgatgatttaaagcatcattcgtcgaaactgcca

SEQ ID NO: 39197 - DNA, 50 bp, synthetic construct
  source 1..50: mol_type = other DNA
ttacttatgatacggttcaccagatcacttgtgatacggttccccacgat

SEQ ID NO: 39198 - DNA, 50 bp, synthetic construct
  source 1..50: mol_type = other DNA
tttaattttacaactgtctctacatgaggagtgttagggaacatatccat

SEQ ID NO: 39199 - DNA, 50 bp, synthetic construct
  source 1..50: mol_type = other DNA
gaaataatataaaaggtggccttatacaacacctggagttcacgcttcgc

SEQ ID NO: 39200 - DNA, 50 bp, synthetic construct
  source 1..50: mol_type = other DNA
aataaatgaagctgtttcttaatttaaattaagcagttccgttaaataca

SEQ ID NO: 39201 - DNA, 50 bp, synthetic construct
  source 1..50: mol_type = other DNA
ttaaaataagatatttaaaaattccataatcattaatttagatattctaa

SEQ ID NO: 39202 - DNA, 50 bp, synthetic construct
  source 1..50: mol_type = other DNA
gtatttgcaataggggcaccaggagtcccaggggggacagtaatggcatc

SEQ ID NO: 39203 - DNA, 50 bp, synthetic construct
  source 1..50: mol_type = other DNA
aatgatataaaaataaaagttaagtacttaatttttattttctagcgatt

SEQ ID NO: 39204 - DNA, 50 bp, synthetic construct
  source 1..50: mol_type = other DNA
tatggtaaggctcaccgtagttattttatggtacggttcccctcgattaa

SEQ ID NO: 39205 - DNA, 50 bp, synthetic construct
  source 1..50: mol_type = other DNA
taatgaagaacgaaccgtaccataaagaggagacggagaaccataccata

SEQ ID NO: 39206 - DNA, 50 bp, synthetic construct
  source 1..50: mol_type = other DNA
aactcaaatgaaactcactgataaatatatcagtggttcttacgaagttt

SEQ ID NO: 39207 - DNA, 50 bp, synthetic construct
  source 1..50: mol_type = other DNA
aaattcgacatcatgctcaacatcgcgatcttgcgcacgctgcgcagcgc

SEQ ID NO: 39208 - DNA, 50 bp, synthetic construct
  source 1..50: mol_type = other DNA
cgcgcgactttgcccggcgcgcccgcgcgcaggcagcgtgtcgcgcggcg

SEQ ID NO: 39209 - DNA, 50 bp, synthetic construct
  source 1..50: mol_type = other DNA
gagggcttttagagttggcgggccgagcggacgggactcgaacccgcgac

SEQ ID NO: 39210 - DNA, 50 bp, synthetic construct
  source 1..50: mol_type = other DNA
tactactacggcaacgacctgccgtacgcaagtgacctgccgtacatgat

SEQ ID NO: 39211 - DNA, 50 bp, synthetic construct
  source 1..50: mol_type = other DNA
gaatcagggatgagcacagtcgagtacgccatcggcaccattgccgcggc

SEQ ID NO: 39212 - DNA, 50 bp, synthetic construct
  source 1..50: mol_type = other DNA
caaaacgtcaataacatcttttacatcgagcgcgatacatttacgttttg

SEQ ID NO: 39213 - DNA, 50 bp, synthetic construct
  source 1..50: mol_type = other DNA
gaccacgctgcattttagcgttaattactacgcttttgcattcgttaggc

SEQ ID NO: 39214 - DNA, 50 bp, synthetic construct
  source 1..50: mol_type = other DNA
agtaactggggcgtcagtacacctcccactgggattcgaacccaggacct

SEQ ID NO: 39215 - DNA, 50 bp, synthetic construct
  source 1..50: mol_type = other DNA
aaatcacctaatgtgataaaaagatgctcttttggggaatttggatatca

SEQ ID NO: 39216 - DNA, 50 bp, synthetic construct
  source 1..50: mol_type = other DNA
taagaaaaacattttgtcagaaaaaacgtccttcaaagtatttttgatta

SEQ ID NO: 39217 - DNA, 50 bp, synthetic construct
  source 1..50: mol_type = other DNA
caagtagacactactgtatttgatactgtcaaggtgatgctgttgtagtt

SEQ ID NO: 39218 - DNA, 50 bp, synthetic construct
  source 1..50: mol_type = other DNA
cgcagatgtattgccgaggaagtcttattaacgttctgaccacccgcacc

SEQ ID NO: 39219 - DNA, 50 bp, synthetic construct
  source 1..50: mol_type = other DNA
cgaccgggtgcgggccgcgctcatcgacctgctcgtcgcggtcccggttg

SEQ ID NO: 39220 - DNA, 50 bp, synthetic construct
  source 1..50: mol_type = other DNA
caaagcctccggcgaggcccatgaattttctgcccatatcggcttctttt

SEQ ID NO: 39221 - DNA, 50 bp, synthetic construct
  source 1..50: mol_type = other DNA
aaactttctctccttttttagcagagctgctaaaaaagctgggatagatt

SEQ ID NO: 39222 - DNA, 50 bp, synthetic construct
  source 1..50: mol_type = other DNA
tttaatgaagaaatgatgcaaaaatacttatcaatgatttttacttttgc

SEQ ID NO: 39223 - DNA, 50 bp, synthetic construct
  source 1..50: mol_type = other DNA
cttattaataaagagaagaaaaaagtaaatttataccctttgataataaa

SEQ ID NO: 39224 - DNA, 50 bp, synthetic construct
  source 1..50: mol_type = other DNA
attttaaatatgtttgattttgatatgaagaatacagggatattctgtat

SEQ ID NO: 39225 - DNA, 50 bp, synthetic construct
  source 1..50: mol_type = other DNA
gctttagaattatgaagggtgaaccgatgaatcgtatcataagtaagtgc

SEQ ID NO: 39226 - DNA, 50 bp, synthetic construct
  source 1..50: mol_type = other DNA
ccggccagcagcggggaggccagcaggcgcgtcactcgccggctggccgt

SEQ ID NO: 39227 - DNA, 50 bp, synthetic construct
  source 1..50: mol_type = other DNA
taataacaacaatatcataaatagaagtaattatgataactttattatac

SEQ ID NO: 39228 - DNA, 50 bp, synthetic construct
  source 1..50: mol_type = other DNA
gcgctgtggaccgggcggctgtcgaggatcacgcggttaacgttgcgctc

SEQ ID NO: 39229 - DNA, 50 bp, synthetic construct
  source 1..50: mol_type = other DNA
gctgtgttaagcaccaacaacatcaccatgcagttcggcagcaagccgtt

SEQ ID NO: 39230 - DNA, 50 bp, synthetic construct
  source 1..50: mol_type = other DNA
gcgaggtaaatcaaggggcattgtattcaagtgttattgaagtcataatc

SEQ ID NO: 39231 - DNA, 50 bp, synthetic construct
  source 1..50: mol_type = other DNA
ttactttttcttcgataaacattttctgatctttattaaacctaatttac

SEQ ID NO: 39232 - DNA, 50 bp, synthetic construct
  source 1..50: mol_type = other DNA
atacaagctcaaatacaaggtttgtttctatcttgaatttaaaaatattt

SEQ ID NO: 39233 - DNA, 50 bp, synthetic construct
  source 1..50: mol_type = other DNA
ttacaaggaattattgggctaaaagcttttgcagcaaactggaaacttac

SEQ ID NO: 39234 - DNA, 50 bp, synthetic construct
  source 1..50: mol_type = other DNA
gcagaccgggcatctggtgctaattagtcctctccacgcttcacactaac

SEQ ID NO: 39235 - DNA, 50 bp, synthetic construct
  source 1..50: mol_type = other DNA
cgctgtacggcgagaccatccgccgcggcatgcggtactgccgcggctcg

SEQ ID NO: 39236 - DNA, 50 bp, synthetic construct
  source 1..50: mol_type = other DNA
ggagtggtgtccggcgagtgctctatcgaatatgcgactgtggccatacc

SEQ ID NO: 39237 - DNA, 50 bp, synthetic construct
  source 1..50: mol_type = other DNA
acatgggcacgttaaaaacaaaggtacttctgtatgtaatgtgggcaacc

SEQ ID NO: 39238 - DNA, 50 bp, synthetic construct
  source 1..50: mol_type = other DNA
cccgtcccagtggtcggagccactcgaagagccctgaccagcggaaacag

SEQ ID NO: 39239 - DNA, 50 bp, synthetic construct
  source 1..50: mol_type = other DNA
atgtctttctgtgcatcccaaatatcaccttgtgaaccaaggaacgagat

SEQ ID NO: 39240 - DNA, 50 bp, synthetic construct
  source 1..50: mol_type = other DNA
tcttcagtacggtaaacattccggataaggggtgttttaggaagtgaaaa

SEQ ID NO: 39241 - DNA, 50 bp, synthetic construct
  source 1..50: mol_type = other DNA
cctttagataagactgcattgctttcaaatagttagcagccacatattgg

SEQ ID NO: 39242 - DNA, 50 bp, synthetic construct
  source 1..50: mol_type = other DNA
actatccttgattgaaatgtaggttaaaggtatttttaaatgcggatgaa

SEQ ID NO: 39243 - DNA, 50 bp, synthetic construct
  source 1..50: mol_type = other DNA
caatagttaaactcgaaagatttgtcgctataacaactggctaactaatg

SEQ ID NO: 39244 - DNA, 50 bp, synthetic construct
  source 1..50: mol_type = other DNA
agcgcgagcagaccagtgaacacacctgtggcgcttgttcctcgtgcgcg

SEQ ID NO: 39245 - DNA, 50 bp, synthetic construct
  source 1..50: mol_type = other DNA
tccatcttcaacttgaataacaagtacttggcaggcctttctttgaagga

SEQ ID NO: 39246 - DNA, 50 bp, synthetic construct
  source 1..50: mol_type = other DNA
aaatatgtaaaataaagagagccattaggctttaaagttagaacatataa

SEQ ID NO: 39247 - DNA, 50 bp, synthetic construct
  source 1..50: mol_type = other DNA
ttcgaatcccctatgctccacccaattcttgaggtgcacggggcccgttg

SEQ ID NO: 39248 - DNA, 50 bp, synthetic construct
  source 1..50: mol_type = other DNA
atcaagaacaaatgttcttgttatatctaaaaattttgcgcagagaaaca

SEQ ID NO: 39249 - DNA, 50 bp, synthetic construct
  source 1..50: mol_type = other DNA
ttgtggtcctttatattcttgtatatttgtattgctataaaaaaccacaa

SEQ ID NO: 39250 - DNA, 50 bp, synthetic construct
  source 1..50: mol_type = other DNA
aattagacctagaacctttaaaggctccttagtcgttacgaggtttaatt

SEQ ID NO: 39251 - DNA, 50 bp, synthetic construct
  source 1..50: mol_type = other DNA
cctttgtagtagaaacatttgggaagaggttaatccttttggttcaatta

SEQ ID NO: 39252 - DNA, 50 bp, synthetic construct
  source 1..50: mol_type = other DNA
gttaaaggtaagataacttagttcatataccttttggatataccattcaa

SEQ ID NO: 39253 - DNA, 50 bp, synthetic construct
  source 1..50: mol_type = other DNA
ataatctatacgatgatccatttcagcaggcggattcgggggaggatttc

SEQ ID NO: 39254 - DNA, 50 bp, synthetic construct
  source 1..50: mol_type = other DNA
aatagtaagctcaagaatattgtatctataagacaaaggaagttaatatt

SEQ ID NO: 39255 - DNA, 50 bp, synthetic construct
  source 1..50: mol_type = other DNA
gaaacagtaaaataatgacataaatacaaagtagtagttttgtaaattta

SEQ ID NO: 39256 - DNA, 50 bp, synthetic construct
  source 1..50: mol_type = other DNA
catcatggattcgtggtttcaattctatttccaatcaagaagtttctttt

SEQ ID NO: 39257 - DNA, 50 bp, synthetic construct
  source 1..50: mol_type = other DNA
atgtcagaaatgtagtgaggatacttgttgttgtacgactattgtacgtc

SEQ ID NO: 39258 - DNA, 50 bp, synthetic construct
  source 1..50: mol_type = other DNA
tccattccgctcgctccgcagcgccggaagtgcgtaaaatcaggcgatgc

SEQ ID NO: 39259 - DNA, 50 bp, synthetic construct
  source 1..50: mol_type = other DNA
aaaaagaacgaaaatactggcaaatatttgttaatattttaattatttat

SEQ ID NO: 39260 - DNA, 50 bp, synthetic construct
  source 1..50: mol_type = other DNA
atgctcctccatgtaattcctgaatatttgattactttattacggttcat

SEQ ID NO: 39261 - DNA, 50 bp, synthetic construct
  source 1..50: mol_type = other DNA
ttaacgtctttatccatataaaacccaattttataggtgaaagacgtgtt

SEQ ID NO: 39262 - DNA, 50 bp, synthetic construct
  source 1..50: mol_type = other DNA
tggcgaaggtggggggattggcccgaggctcccgagccccgccttgtcgt

SEQ ID NO: 39263 - DNA, 50 bp, synthetic construct
  source 1..50: mol_type = other DNA
ggtgtgctggccggcggcctcgacctgccctacccgcccgagaatgccgc

SEQ ID NO: 39264 - DNA, 50 bp, synthetic construct
  source 1..50: mol_type = other DNA
caccgccatctcggcatgaaattgcgccgtattgggctgagatgcggttg

SEQ ID NO: 39265 - DNA, 50 bp, synthetic construct
  source 1..50: mol_type = other DNA
ttttaaaatgaaaaaaatgatgacatttcagctcaaggttgtatcaaaaa

SEQ ID NO: 39266 - DNA, 50 bp, synthetic construct
  source 1..50: mol_type = other DNA
tcgatatcccccatatgatcagtatctgcgtgagttactaatagttggtc

SEQ ID NO: 39267 - DNA, 50 bp, synthetic construct
  source 1..50: mol_type = other DNA
cagcctcagctaatgagcaggcttcacactcaatggtttagctgaagcag

SEQ ID NO: 39268 - DNA, 50 bp, synthetic construct
  source 1..50: mol_type = other DNA
caatttgttgtaatggtacctatttgtatgattatcatgcaaaaaaggtt

SEQ ID NO: 39269 - DNA, 50 bp, synthetic construct
  source 1..50: mol_type = other DNA
taaagaaagaagctgctaaagctggttggttttttcagcttctgttaagt

SEQ ID NO: 39270 - DNA, 50 bp, synthetic construct
  source 1..50: mol_type = other DNA
gtttctacgattacagcagataagaaaatatcagcggtaatctaagaatg

SEQ ID NO: 39271 - DNA, 50 bp, synthetic construct
  source 1..50: mol_type = other DNA
aagcgattctgacgatagaatctcaactgtcttgctcgtctgaagcagaa

SEQ ID NO: 39272 - DNA, 50 bp, synthetic construct
  source 1..50: mol_type = other DNA
aaatagttagataaaataagcgaaagaagataaatgttttaaaactaatt

SEQ ID NO: 39273 - DNA, 50 bp, synthetic construct
  source 1..50: mol_type = other DNA
gtgataaaaatgaaacgaaattataataaattgaataagtaactttacaa

SEQ ID NO: 39274 - DNA, 50 bp, synthetic construct
  source 1..50: mol_type = other DNA
tacctattttatcaaaaaagaggtacctccatattttgatacatgggcat

SEQ ID NO: 39275 - DNA, 50 bp, synthetic construct
  source 1..50: mol_type = other DNA
gctctaaaaagtatatcccctaaagtacaagaaaaacagctttttaatgc

SEQ ID NO: 39276 - DNA, 50 bp, synthetic construct
  source 1..50: mol_type = other DNA
ggacaaaagtgctaccgtctcgacgtgatgcgtttgaggaaatagatcca

SEQ ID NO: 39277 - DNA, 50 bp, synthetic construct
  source 1..50: mol_type = other DNA
ctaataaaagtgttataatatacttgttaataatagctcctttttatttt

SEQ ID NO: 39278 - DNA, 50 bp, synthetic construct
  source 1..50: mol_type = other DNA
gaggtcttagattttccttgcaaccaatttctaaatcaaactccagggga

SEQ ID NO: 39279 - DNA, 50 bp, synthetic construct
  source 1..50: mol_type = other DNA
tgataaggcgctgcgtatcatgagtgtggtatggagcccccgcattgatc

SEQ ID NO: 39280 - DNA, 50 bp, synthetic construct
  source 1..50: mol_type = other DNA
ttgtttccgcaaacgcatcacgtcgagtgcgtagtgttgctaatcaagga

SEQ ID NO: 39281 - DNA, 50 bp, synthetic construct
  source 1..50: mol_type = other DNA
tttcaaatattcattaataaatatccatatcctccaatagattttttaaa

SEQ ID NO: 39282 - DNA, 50 bp, synthetic construct
  source 1..50: mol_type = other DNA
catccccctaaatccgaacattataaatatccttcgttcttcaacgcttg

SEQ ID NO: 39283 - DNA, 50 bp, synthetic construct
  source 1..50: mol_type = other DNA
tcgtagatagtttcaaattcatccgtcagttgccggaaataaatcccgca

SEQ ID NO: 39284 - DNA, 50 bp, synthetic construct
  source 1..50: mol_type = other DNA
aaactgtcgtccgttttgttcttgtgctgttccaccacatttgagaaagt

SEQ ID NO: 39285 - DNA, 50 bp, synthetic construct
  source 1..50: mol_type = other DNA
ttaaagggttgctccttttttcgccaaaaaatgcgtattatggagagtaa

SEQ ID NO: 39286 - DNA, 50 bp, synthetic construct
  source 1..50: mol_type = other DNA
tccataatagcctttaaaggaacacctattcctcctttggatttttagga

SEQ ID NO: 39287 - DNA, 50 bp, synthetic construct
  source 1..50: mol_type = other DNA
attaagaagaacacttcatcacaattagatgatgcagttgctgagttaat

SEQ ID NO: 39288 - DNA, 50 bp, synthetic construct
  source 1..50: mol_type = other DNA
agtgatataatatacttgatatataatgataagcaagttgatgaatccta

SEQ ID NO: 39289 - DNA, 50 bp, synthetic construct
  source 1..50: mol_type = other DNA
ctgaaattgatacaatacaacttaaccaagtattattaggtcaagttcag

SEQ ID NO: 39290 - DNA, 50 bp, synthetic construct
  source 1..50: mol_type = other DNA
gtataatataatcaattatgtaatatatatttgaatgaggtgttttatga

SEQ ID NO: 39291 - DNA, 50 bp, synthetic construct
  source 1..50: mol_type = other DNA
tttccaaatttacttagtaatatggagttattactatgtggaggtggaaa

SEQ ID NO: 39292 - DNA, 50 bp, synthetic construct
  source 1..50: mol_type = other DNA
agtagggatttatattgaagatattaattacaataatatcgttacttaca

SEQ ID NO: 39293 - DNA, 50 bp, synthetic construct
  source 1..50: mol_type = other DNA
caacagattgttctttggcttcgtttattttgcctaataaaaaaccggca

SEQ ID NO: 39294 - DNA, 50 bp, synthetic construct
  source 1..50: mol_type = other DNA
cggagacgaatcgagaaactaaaattgtttagtacctcaatttctctcgc

SEQ ID NO: 39295 - DNA, 50 bp, synthetic construct
  source 1..50: mol_type = other DNA
catttgaggttgctgacaagtcgctagcagcatctaaccttcgacgggtg

SEQ ID NO: 39296 - DNA, 50 bp, synthetic construct
  source 1..50: mol_type = other DNA
gccagtagataatatttttaaacttgaatttaaaaatatttctcaagctg

SEQ ID NO: 39297 - DNA, 50 bp, synthetic construct
  source 1..50: mol_type = other DNA
caggctgtatcaaaatgggaaagtggtgcatcggatccaagtacaacgaa

SEQ ID NO: 39298 - DNA, 50 bp, synthetic construct
  source 1..50: mol_type = other DNA
tgaagaatgcacagattatattgaccacgatacctgctacgattacgaag

SEQ ID NO: 39299 - DNA, 50 bp, synthetic construct
  source 1..50: mol_type = other DNA
atggttttcaacctttatgcccgtaattcgcataaaaggttgacaagcca

SEQ ID NO: 39300 - DNA, 50 bp, synthetic construct
  source 1..50: mol_type = other DNA
cagacagggcggctttacactcattggtgataggcatcatcgccatactt

SEQ ID NO: 39301 - DNA, 50 bp, synthetic construct
  source 1..50: mol_type = other DNA
aaggccgtctccatcggaatctgctgatccaacaacatccccaccaacag

SEQ ID NO: 39302 - DNA, 50 bp, synthetic construct
  source 1..50: mol_type = other DNA
cgggccatgcattatggcgagcaggactgaccgcaacttttcagtgttcg

SEQ ID NO: 39303 - DNA, 50 bp, synthetic construct
  source 1..50: mol_type = other DNA
ttccgggtgcgccatttctcttcccagggtgcaccatttcttcacaggaa

SEQ ID NO: 39304 - DNA, 50 bp, synthetic construct
  source 1..50: mol_type = other DNA
cgatgtctaggaaatggtagcggaggagggacttgaacccccgacacgcg

SEQ ID NO: 39305 - DNA, 50 bp, synthetic construct
  source 1..50: mol_type = other DNA
gctccggctgccccgtcatcgtcccggcccgattacgggacacctggggc

SEQ ID NO: 39306 - DNA, 50 bp, synthetic construct
  source 1..50: mol_type = other DNA
aatgaacgttgaagccgcaaaagccgttttatgcggcatcatcgaatgaa

SEQ ID NO: 39307 - DNA, 50 bp, synthetic construct
  source 1..50: mol_type = other DNA
gcaatctcatctccgttttcacggattgaaaatggcatagcaattataga

SEQ ID NO: 39308 - DNA, 50 bp, synthetic construct
  source 1..50: mol_type = other DNA
gattagccctaagcataaacgtttaaaaagtttaatgcctttgcgtttgg

SEQ ID NO: 39309 - DNA, 50 bp, synthetic construct
  source 1..50: mol_type = other DNA
gactaacgaaaaagcctccgagccgaacctgttgggcccttgatggagtc

SEQ ID NO: 39310 - DNA, 50 bp, synthetic construct
  source 1..50: mol_type = other DNA
aggaacttggcactgcgcaggatggcgagcctgccaagccggaacggata

SEQ ID NO: 39311 - DNA, 50 bp, synthetic construct
  source 1..50: mol_type = other DNA
gcggcttgcatcaacgtggcgttaatagccgcccggttcatgccgcacgc

SEQ ID NO: 39312 - DNA, 50 bp, synthetic construct
  source 1..50: mol_type = other DNA
tatatccggattaggcgcgcaatctgcatttttcgggctttcgtgatata

SEQ ID NO: 39313 - DNA, 50 bp, synthetic construct
  source 1..50: mol_type = other DNA
tgccttggggcacccgagggataccagtatcctatgggcacccgagggag

SEQ ID NO: 39314 - DNA, 50 bp, synthetic construct
  source 1..50: mol_type = other DNA
ttcctttataataacatttgtctaaaatacctaatgttattgataagcaa

SEQ ID NO: 39315 - DNA, 50 bp, synthetic construct
  source 1..50: mol_type = other DNA
tgccgtttaaattcctgcgccattgcaaaatcacacgtattatattttat

SEQ ID NO: 39316 - DNA, 50 bp, synthetic construct
  source 1..50: mol_type = other DNA
taggaagcccagccttcgtattgctagctgactgaagcccagccttcgtt

SEQ ID NO: 39317 - DNA, 50 bp, synthetic construct
  source 1..50: mol_type = other DNA
cgatccccacggggcccaccagtagtaatcaggcccacccgaaagtaaga

SEQ ID NO: 39318 - DNA, 50 bp, synthetic construct
  source 1..50: mol_type = other DNA
aaccattctgtggacgcgggtggactagtacgtctgaaattgtggagctt

SEQ ID NO: 39319 - DNA, 50 bp, synthetic construct
  source 1..50: mol_type = other DNA
gcgaccagtcccgccagccgcaagcccttgttccaagcgggacggcaggc

SEQ ID NO: 39320 - DNA, 50 bp, synthetic construct
  source 1..50: mol_type = other DNA
taaaggtgtcagtagctccgtttcttttttgcctcaaaatgatgctattt

SEQ ID NO: 39321 - DNA, 50 bp, synthetic construct
  source 1..50: mol_type = other DNA
tggtggtggtgccgctgatgccttcaggagccgcagcttcaaaacctcca

SEQ ID NO: 39322 - DNA, 50 bp, synthetic construct
  source 1..50: mol_type = other DNA
attgtcggacacctttatatttattgacaaattaactattgtagaaaaaa

SEQ ID NO: 39323 - DNA, 50 bp, synthetic construct
  source 1..50: mol_type = other DNA
ctgtcgctacgacattgtgtccgtggctgtacaaaaacggcgagtcgcag

SEQ ID NO: 39324 - DNA, 50 bp, synthetic construct
  source 1..50: mol_type = other DNA
taaaaattaagaaggaatatgtatacatacttgttcttttaaattaaatt

SEQ ID NO: 39325 - DNA, 50 bp, synthetic construct
  source 1..50: mol_type = other DNA
ttgtaactgctcaaaggcttgtttaatttcatagctgtgcttatctacaa

SEQ ID NO: 39326 - DNA, 50 bp, synthetic construct
  source 1..50: mol_type = other DNA
tgtctgaatttgtcgaaatactttatcaagcagctcccaccattcggtca

SEQ ID NO: 39327 - DNA, 50 bp, synthetic construct
  source 1..50: mol_type = other DNA
aggtgcccgtctagagtcgactacagcccgtctcggctggacgggcggct

SEQ ID NO: 39328 - DNA, 50 bp, synthetic construct
  source 1..50: mol_type = other DNA
taaatttggcctttagagtgatatatcaatgagaaaataggctcaatata

SEQ ID NO: 39329 - DNA, 50 bp, synthetic construct
  source 1..50: mol_type = other DNA
cccgctcccgtgagaacaggaacgagcgatcctcttcgtctccaccagta

SEQ ID NO: 39330 - DNA, 50 bp, synthetic construct
  source 1..50: mol_type = other DNA
cgttagcataaggcgaagatatgttaaaatatcttattcttaccaacctt

SEQ ID NO: 39331 - DNA, 50 bp, synthetic construct
  source 1..50: mol_type = other DNA
gaacactctcaactataaaattattaatagtttctactttgtgatagtca

SEQ ID NO: 39332 - DNA, 50 bp, synthetic construct
  source 1..50: mol_type = other DNA
gcgattctgggcgcaaacattttccgcgatttctttgccggcattcggga

SEQ ID NO: 39333 - DNA, 50 bp, synthetic construct
  source 1..50: mol_type = other DNA
attcctgccctgaccattccaataaagattggatttatatcattagggtg

SEQ ID NO: 39334 - DNA, 50 bp, synthetic construct
  source 1..50: mol_type = other DNA
ctcgccaggaggcgggcgcggcttgaaagccgcactgcccgactgtcgag

SEQ ID NO: 39335 - DNA, 50 bp, synthetic construct
  source 1..50: mol_type = other DNA
tccatgccatacagggaggttgccggagtgaagcccagagatacaatgga

SEQ ID NO: 39336 - DNA, 50 bp, synthetic construct
  source 1..50: mol_type = other DNA
ccttctgaatctgatacgaagcaaaacataatctcattcgatttccagcg

SEQ ID NO: 39337 - DNA, 50 bp, synthetic construct
  source 1..50: mol_type = other DNA
catctttataactttttcaaatgcaggcttttactatactattaattatt

SEQ ID NO: 39338 - DNA, 50 bp, synthetic construct
  source 1..50: mol_type = other DNA
atcgcgcccggaaagatcggcatgcagatcgtcggcctgcctgataaggc

SEQ ID NO: 39339 - DNA, 50 bp, synthetic construct
  source 1..50: mol_type = other DNA
agctgtctggaaagcaaaaactgctattgatttttactttttcaacgcta

SEQ ID NO: 39340 - DNA, 50 bp, synthetic construct
  source 1..50: mol_type = other DNA
cttgctcgcgagcgccggggtcatcgtcgagcccggcgtcagcgagggaa

SEQ ID NO: 39341 - DNA, 50 bp, synthetic construct
  source 1..50: mol_type = other DNA
aggcgatccgatgccgacgaccgaaagacgtctccggctggcgctccgga

SEQ ID NO: 39342 - DNA, 50 bp, synthetic construct
  source 1..50: mol_type = other DNA
tgcgaacatcttccggaagatgtttaaatatcttccgtgacttttttgcc

SEQ ID NO: 39343 - DNA, 50 bp, synthetic construct
  source 1..50: mol_type = other DNA
agtgtgatagtgatgtagttcatatataagcccaacatcaataagatgtt

SEQ ID NO: 39344 - DNA, 50 bp, synthetic construct
  source 1..50: mol_type = other DNA
tctgccttttccgtcagtttaatacggcctaaatcgacgtataacgagct

SEQ ID NO: 39345 - DNA, 50 bp, synthetic construct
  source 1..50: mol_type = other DNA
agatgagatggattcatcatacaattacaccaagaaaatctaattcatct

SEQ ID NO: 39346 - DNA, 50 bp, synthetic construct
  source 1..50: mol_type = other DNA
attagccataacggttataagcttatgattttgtaagagttcgatttaac

SEQ ID NO: 39347 - DNA, 50 bp, synthetic construct
  source 1..50: mol_type = other DNA
aaatgttaataaaatgttaaaaaatgtttaggaacctattatactgaaga

SEQ ID NO: 39348 - DNA, 50 bp, synthetic construct
  source 1..50: mol_type = other DNA
gctgataaaaaagttcatgtcttgaagaatactagtgctttattattcca

SEQ ID NO: 39349 - DNA, 50 bp, synthetic construct
  source 1..50: mol_type = other DNA
cgtctcgacgtgtgtagtctgttcctacgcactccacgtgatgcgtttga

SEQ ID NO: 39350 - DNA, 50 bp, synthetic construct
  source 1..50: mol_type = other DNA
tatctagctcattcatgttatacccttatagaatacaacatcgcttgata

SEQ ID NO: 39351 - DNA, 50 bp, synthetic construct
  source 1..50: mol_type = other DNA
taccgtctcgacgtgtgttgtccatatgcactccacatgatgcgtttgag

SEQ ID NO: 39352 - DNA, 50 bp, synthetic construct
  source 1..50: mol_type = other DNA
tttgatctgggacaataaagatatacctatcattattgacccagtcactt

SEQ ID NO: 39353 - DNA, 50 bp, synthetic construct
  source 1..50: mol_type = other DNA
cgtcgatataaatcttattaattagtttattgatattattccaagtcaag

SEQ ID NO: 39354 - DNA, 50 bp, synthetic construct
  source 1..50: mol_type = other DNA
ttatattcttctaaaacatcttcatatttagattgtttagttcctcgttt

SEQ ID NO: 39355 - DNA, 50 bp, synthetic construct
  source 1..50: mol_type = other DNA
aatcttttctttacgctcttggattttttcaagaatgtcatcattttttt

SEQ ID NO: 39356 - DNA, 50 bp, synthetic construct
  source 1..50: mol_type = other DNA
ccttgcactaaacacgtctattggtgaagtattaaacgtttatgcttagg

SEQ ID NO: 39357 - DNA, 50 bp, synthetic construct
  source 1..50: mol_type = other DNA
tcctttctttgagcgcaaaagagggaagccttttacctccatagtctcac

SEQ ID NO: 39358 - DNA, 50 bp, synthetic construct
  source 1..50: mol_type = other DNA
attaaaaaaaatgaccttttacggtcccaactaataactaataaaatgac

SEQ ID NO: 39359 - DNA, 50 bp, synthetic construct
  source 1..50: mol_type = other DNA
aggtattgacgctccataaaaaagaattacagattgtttcgtcaatagaa

SEQ ID NO: 39360 - DNA, 50 bp, synthetic construct
  source 1..50: mol_type = other DNA
gaaacaatgaaacatttaggtcagttggagatgacgctggtttttgtttc

SEQ ID NO: 39361 - DNA, 50 bp, synthetic construct
  source 1..50: mol_type = other DNA
gcagcctcgccggagtgggacgaggagcacgccccggttggcccggtagc

SEQ ID NO: 39362 - DNA, 50 bp, synthetic construct
  source 1..50: mol_type = other DNA
atcaagggtggaagtaactacaacagtgtctatttgcagtttgatttcta

SEQ ID NO: 39363 - DNA, 50 bp, synthetic construct
  source 1..50: mol_type = other DNA
gcatgggatgcccgtacgggtttccgggttgtcccggccgcaggacacca

SEQ ID NO: 39364 - DNA, 50 bp, synthetic construct
  source 1..50: mol_type = other DNA
gacaccgctttcctcgaaggattgcggccggcttcgagcatggcgttgtt

SEQ ID NO: 39365 - DNA, 50 bp, synthetic construct
  source 1..50: mol_type = other DNA
gcattagaaaaacaatgggaagtttcattttcctattgcttttctaatta

SEQ ID NO: 39366 - DNA, 50 bp, synthetic construct
  source 1..50: mol_type = other DNA
ttatactatcactgcttgttcataattgtgagtgatttacttttttaaaa

SEQ ID NO: 39367 - DNA, 50 bp, synthetic construct
  source 1..50: mol_type = other DNA
tcctgcgcctggcccggcgtggcaggtgccgcggcgcaatcggcacatcg

SEQ ID NO: 39368 - DNA, 50 bp, synthetic construct
  source 1..50: mol_type = other DNA
cagcatgccgaaggtctggaggatcgaacctacggccgctcgattaacag

SEQ ID NO: 39369 - DNA, 50 bp, synthetic construct
  source 1..50: mol_type = other DNA
atcatggttacccatgatatcgcagaagctatatctatggcagacagagt

SEQ ID NO: 39370 - DNA, 50 bp, synthetic construct
  source 1..50: mol_type = other DNA
acgctcgcggggaaaaggaccgcggtggcggagggatttgaacccccgga

SEQ ID NO: 39371 - DNA, 50 bp, synthetic construct
  source 1..50: mol_type = other DNA
agctaatatcacaatgcaatttgtattacaatgcaatttggcgataagcc

SEQ ID NO: 39372 - DNA, 50 bp, synthetic construct
  source 1..50: mol_type = other DNA
gaaaagcgcaatgctatggtggatgcaagcacttgggcattcggctaata

SEQ ID NO: 39373 - DNA, 50 bp, synthetic construct
  source 1..50: mol_type = other DNA
gcggaacgccggagttgcctttcatttcacctgcatcctcggcgtttgcg

SEQ ID NO: 39374 - DNA, 50 bp, synthetic construct
  source 1..50: mol_type = other DNA
tacaataagaagaaaggatgaaatacccggcatccttttttcatcagctc

SEQ ID NO: 39375 - DNA, 50 bp, synthetic construct
  source 1..50: mol_type = other DNA
ggcggctcgaggggcaggggaaaggccgtttccaagcctgtcctggcgaa

SEQ ID NO: 39376 - DNA, 50 bp, synthetic construct
  source 1..50: mol_type = other DNA
ggtggcattatgccgggaatacgcagcggatgtaatggccggtggcgagc

SEQ ID NO: 39377 - DNA, 50 bp, synthetic construct
  source 1..50: mol_type = other DNA
aaggtcctgggttcgaatcccagtggtgcggagttgtactgacgcccctt

SEQ ID NO: 39378 - DNA, 50 bp, synthetic construct
  source 1..50: mol_type = other DNA
cgttcaggggcattgccatcgtgacgccatgctggcgaccagattgatca

SEQ ID NO: 39379 - DNA, 50 bp, synthetic construct
  source 1..50: mol_type = other DNA
gaatctttggatattctggaaattttaattacatcaatatcaattaatat

SEQ ID NO: 39380 - DNA, 50 bp, synthetic construct
  source 1..50: mol_type = other DNA
agcttttaattcaccaaatgtaaatattcccatattgctcacaaattaaa

SEQ ID NO: 39381 - DNA, 50 bp, synthetic construct
  source 1..50: mol_type = other DNA
attttgttccgttcaaaaaatctataaggattggaaaaacgtcacgaaac

SEQ ID NO: 39382 - DNA, 50 bp, synthetic construct
  source 1..50: mol_type = other DNA
tacccacctatgcatatagtcgaaatcgcacctatgcatacttgcgagca

SEQ ID NO: 39383 - DNA, 50 bp, synthetic construct
  source 1..50: mol_type = other DNA
tcagccgcaaggcgctggaaaccttgtcgtgtacagcgcggcggacgcga

SEQ ID NO: 39384 - DNA, 50 bp, synthetic construct
  source 1..50: mol_type = other DNA
ctggccctcctcaccgacgggcgggcccgcctcgccgtgatcatcgcaga

SEQ ID NO: 39385 - DNA, 50 bp, synthetic construct
  source 1..50: mol_type = other DNA
tttacgggttgcccccgcaacatcagagcctggtggtgccggcccacctg

SEQ ID NO: 39386 - DNA, 50 bp, synthetic construct
  source 1..50: mol_type = other DNA
ttgaatccatgccacaaaccaaaatatttaatcgcagttctttcttttaa

SEQ ID NO: 39387 - DNA, 50 bp, synthetic construct
  source 1..50: mol_type = other DNA
ccccttacttaaattcatagtattatcatactaccttttttcatatagtt

SEQ ID NO: 39388 - DNA, 50 bp, synthetic construct
  source 1..50: mol_type = other DNA
acggtcgaaattccacacgaagttcagaagttctcctgcacttcgacaca

SEQ ID NO: 39389 - DNA, 50 bp, synthetic construct
  source 1..50: mol_type = other DNA
aaaaagcctttaaacacacagaaatctttcttgatgacgatcagcggtgt

SEQ ID NO: 39390 - DNA, 50 bp, synthetic construct
  source 1..50: mol_type = other DNA
cgtagcccttagtgtaaagcataatgttcttaacttccttaatgcctccg

SEQ ID NO: 39391 - DNA, 50 bp, synthetic construct
  source 1..50: mol_type = other DNA
tagtccatcattaacaagcaaatcactgtttgctgaagttttttggccgg

SEQ ID NO: 39392 - DNA, 50 bp, synthetic construct
  source 1..50: mol_type = other DNA
ttcatctgcatagatgtctactaactctactatcgctctttgatgatgta

SEQ ID NO: 39393 - DNA, 50 bp, synthetic construct
  source 1..50: mol_type = other DNA
ttgattgaaatgtaggttactaaaattttactatccttgattgaaatgtt

SEQ ID NO: 39394 - DNA, 50 bp, synthetic construct
  source 1..50: mol_type = other DNA
tggaataaaatataaaaaagataataattggattgtcgtatttgttttcc

SEQ ID NO: 39395 - DNA, 50 bp, synthetic construct
  source 1..50: mol_type = other DNA
ttccaattaaaacaccaaaaatagttgaatttttgacgatttaatttgct

SEQ ID NO: 39396 - DNA, 50 bp, synthetic construct
  source 1..50: mol_type = other DNA
attcgggcttttctttccacaaaaaatttttcggaaagaattcgagaaat

SEQ ID NO: 39397 - DNA, 50 bp, synthetic construct
  source 1..50: mol_type = other DNA
aaatgaaaagaagtattgaaaatagttcttcaggtgaattggtttcaaag

SEQ ID NO: 39398 - DNA, 50 bp, synthetic construct
  source 1..50: mol_type = other DNA
tgtatgcaagacatccactggacagacggcgcattcggctattttccatc

SEQ ID NO: 39399 - DNA, 50 bp, synthetic construct
  source 1..50: mol_type = other DNA
aattgctttctttgaatataaatagttcgttatgttaaacgagtattcgt

SEQ ID NO: 39400 - DNA, 50 bp, synthetic construct
  source 1..50: mol_type = other DNA
gttgagtaataatgaaataagatataacctaaatataataattaaacatt

SEQ ID NO: 39401 - DNA, 50 bp, synthetic construct
  source 1..50: mol_type = other DNA
cccgccgaccccctgcaccgcggagatcagcgggacatggcctcgcagat

SEQ ID NO: 39402 - DNA, 50 bp, synthetic construct
  source 1..50: mol_type = other DNA
ttgaattttgctttgaataattttaaaccagagctgagagcaaaatctca

SEQ ID NO: 39403 - DNA, 50 bp, synthetic construct
  source 1..50: mol_type = other DNA
tgcttcccgcaccgtgtccaatagtttcattgtgatacgttcgggacgca

SEQ ID NO: 39404 - DNA, 50 bp, synthetic construct
  source 1..50: mol_type = other DNA
cctgcacttgccaaaccccaccgattctggggtatgctgactagggctgt

SEQ ID NO: 39405 - DNA, 50 bp, synthetic construct
  source 1..50: mol_type = other DNA
gcttttgcttaccactttttctttatatggaaaaaacaagatataagagg

SEQ ID NO: 39406 - DNA, 50 bp, synthetic construct
  source 1..50: mol_type = other DNA
attttttcctcctaagaattaaataacaataaatctattgatgaaaaaac

SEQ ID NO: 39407 - DNA, 50 bp, synthetic construct
  source 1..50: mol_type = other DNA
atccatgtaggtaaaaacatcaggtactagttgttgcgaaagacatggat

SEQ ID NO: 39408 - DNA, 50 bp, synthetic construct
  source 1..50: mol_type = other DNA
gatcattgccgaaagtccgaagcttaagccattataagctagaaatgatg

SEQ ID NO: 39409 - DNA, 50 bp, synthetic construct
  source 1..50: mol_type = other DNA
gcgattattgctcggaggccagggtatcttgaatatacaacaataatcgt

SEQ ID NO: 39410 - DNA, 50 bp, synthetic construct
  source 1..50: mol_type = other DNA
aatgttaaaaatgcttgacattagtcttcggactatgcttatctaagtgg

SEQ ID NO: 39411 - DNA, 50 bp, synthetic construct
  source 1..50: mol_type = other DNA
gtgaactctacgacaagtcagccttaagtctgaatagtccagcttccaag

SEQ ID NO: 39412 - DNA, 50 bp, synthetic construct
  source 1..50: mol_type = other DNA
tatatagtatagcatgttgatatactcctttcaaagagataatatatatt

SEQ ID NO: 39413 - DNA, 50 bp, synthetic construct
  source 1..50: mol_type = other DNA
aatttttgattctcaagatatattataagaaatttatctgattaatgatt

SEQ ID NO: 39414 - DNA, 50 bp, synthetic construct
  source 1..50: mol_type = other DNA
ttaaaaaatcaaccgtataagtttttcggaataatcggttgatatttttc

SEQ ID NO: 39415 - DNA, 50 bp, synthetic construct
  source 1..50: mol_type = other DNA
acaatcagaccaataggactattcagtgctagtccaattacggcgattgc

SEQ ID NO: 39416 - DNA, 50 bp, synthetic construct
  source 1..50: mol_type = other DNA
acccaccgacatcgacaactcaacaactaagcaacctcaccttcgcctgc

SEQ ID NO: 39417 - DNA, 50 bp, synthetic construct
  source 1..50: mol_type = other DNA
gtgtcgcaggttcgaatcctgccgagcgattcacggaggcgcacttgcag

SEQ ID NO: 39418 - DNA, 50 bp, synthetic construct
  source 1..50: mol_type = other DNA
tacagtatctatatactgcaaaaaatctttttgagtatatccctttgcta

SEQ ID NO: 39419 - DNA, 50 bp, synthetic construct
  source 1..50: mol_type = other DNA
tattatcatacatccaccaatttgaagtaattgataactgtaagttaaaa

SEQ ID NO: 39420 - DNA, 50 bp, synthetic construct
  source 1..50: mol_type = other DNA
atgaaagctcagattggatgctgaattcatatgccaatccacactaacgc

SEQ ID NO: 39421 - DNA, 50 bp, synthetic construct
  source 1..50: mol_type = other DNA
taatttatattcatttacccaatctcgattagataataaaatgtcaaacg

SEQ ID NO: 39422 - DNA, 50 bp, synthetic construct
  source 1..50: mol_type = other DNA
aactccttcatcccaggatccatagctgtgaagatgtggatgaagcagta

SEQ ID NO: 39423 - DNA, 50 bp, synthetic construct
  source 1..50: mol_type = other DNA
cttttctggatacaatcgagaaagatttatcaggattgtcattagaaaat

SEQ ID NO: 39424 - DNA, 50 bp, synthetic construct
  source 1..50: mol_type = other DNA
gcgcatcctgaagtgaaggaattgttcaattctttattatcaagatatcg

SEQ ID NO: 39425 - DNA, 50 bp, synthetic construct
  source 1..50: mol_type = other DNA
agcccacgggtagtgttcaattagtactaacttaacactgcccacgggtg

SEQ ID NO: 39426 - DNA, 50 bp, synthetic construct
  source 1..50: mol_type = other DNA
agcccttagtgtaaagcataatgtctccgatctacacctgtgcaattccg

SEQ ID NO: 39427 - DNA, 50 bp, synthetic construct
  source 1..50: mol_type = other DNA
aattcttctacagggtaaccaacttcgttttcccaaccaggagaaatttc

SEQ ID NO: 39428 - DNA, 50 bp, synthetic construct
  source 1..50: mol_type = other DNA
gcataattgacgtaatcaatgtactttgccattgctaggacatatatggt

SEQ ID NO: 39429 - DNA, 50 bp, synthetic construct
  source 1..50: mol_type = other DNA
tcgaaggagcggtgcaccacctcgaccgggctggtgcccctctcaaggga

SEQ ID NO: 39430 - DNA, 50 bp, synthetic construct
  source 1..50: mol_type = other DNA
tgaatgattcttttttcgtatttcaaatgttattaaaaaattttcccatc

SEQ ID NO: 39431 - DNA, 50 bp, synthetic construct
  source 1..50: mol_type = other DNA
gatataggagtggataatattctaattagaataagatttatgtaaaaaag

SEQ ID NO: 39432 - DNA, 50 bp, synthetic construct
  source 1..50: mol_type = other DNA
aaaacagtacgcaatcacatctcaaacgcaatgcaaaagctaggagttaa

SEQ ID NO: 39433 - DNA, 50 bp, synthetic construct
  source 1..50: mol_type = other DNA
ttttttgttgccattaggcgcatgagatttaccccatttaaccctaaagc

SEQ ID NO: 39434 - DNA, 50 bp, synthetic construct
  source 1..50: mol_type = other DNA
tttaaatagtagccatgccttgtttcaacatgaaatggggctgtttgaat

SEQ ID NO: 39435 - DNA, 50 bp, synthetic construct
  source 1..50: mol_type = other DNA
agaacaaacgttctgtatcaaaaggaattaccatcattaatgtaccttct

SEQ ID NO: 39436 - DNA, 50 bp, synthetic construct
  source 1..50: mol_type = other DNA
ctaatggattaaaaacatacataaaattctgttaccttttcttctatcgc

SEQ ID NO: 39437 - DNA, 50 bp, synthetic construct
  source 1..50: mol_type = other DNA
tccggcaataatcttgtccagaacatggtctggactatgttcttgtgggc

SEQ ID NO: 39438 - DNA, 50 bp, synthetic construct
  source 1..50: mol_type = other DNA
ggctgaagaagatttacggcagaaaagtctgtcttaaaaaatcttacacc

SEQ ID NO: 39439 - DNA, 50 bp, synthetic construct
  source 1..50: mol_type = other DNA
ttcatgctgcggcgtaccgatacaatccccatgttcatccggagaatgcg

SEQ ID NO: 39440 - DNA, 50 bp, synthetic construct
  source 1..50: mol_type = other DNA
tcgacgtcgggcaggccgacgatcgagaacgacggcaacccgttggcaag

SEQ ID NO: 39441 - DNA, 50 bp, synthetic construct
  source 1..50: mol_type = other DNA
tcgggttgccgagcgttagccaatatattggctaacgttcgggttgccga

SEQ ID NO: 39442 - DNA, 50 bp, synthetic construct
  source 1..50: mol_type = other DNA
gcaggggtattggcagcctgcggtatcgtatcggcgcaagtgacaaatgc

SEQ ID NO: 39443 - DNA, 50 bp, synthetic construct
  source 1..50: mol_type = other DNA
ttcacctttaaggatggtacggggcgtttttctccaaagtgcggcgtgat

SEQ ID NO: 39444 - DNA, 50 bp, synthetic construct
  source 1..50: mol_type = other DNA
cccttaagagagatattcaaactctgcggttagaaaatgcctggccgggt

SEQ ID NO: 39445 - DNA, 50 bp, synthetic construct
  source 1..50: mol_type = other DNA
aattcattaaatccgggacggtcgaatgttgttcctgaaatgccatcatc

SEQ ID NO: 39446 - DNA, 50 bp, synthetic construct
  source 1..50: mol_type = other DNA
aacacattcatcagtgtactttttcccgccccattttcacccagaaggga

SEQ ID NO: 39447 - DNA, 50 bp, synthetic construct
  source 1..50: mol_type = other DNA
ttcgaaccgctggccttccgcttagggattcgaacccacggcctttcgct

SEQ ID NO: 39448 - DNA, 50 bp, synthetic construct
  source 1..50: mol_type = other DNA
ttttgatactgcaccgagtacggatatcattatctggtgcgggtaacagg

SEQ ID NO: 39449 - DNA, 50 bp, synthetic construct
  source 1..50: mol_type = other DNA
gtttgggatcgtctggttaacttcaagtcattaatatttctttccagtta

SEQ ID NO: 39450 - DNA, 50 bp, synthetic construct
  source 1..50: mol_type = other DNA
tctacgcatttcttgatctacgtttgaaatgccatcatgaaattgtttca

SEQ ID NO: 39451 - DNA, 50 bp, synthetic construct
  source 1..50: mol_type = other DNA
ccttaattgtctttttaaataaaaattttctgcgccgccacaaattttgg

SEQ ID NO: 39452 - DNA, 50 bp, synthetic construct
  source 1..50: mol_type = other DNA
tcggtggccagcgcttcgagcatctggatggcaagagccctgaccaacgc

SEQ ID NO: 39453 - DNA, 50 bp, synthetic construct
  source 1..50: mol_type = other DNA
cccaactgtcaattgtcaattatcaagatacgaagaaattttcagatggg

SEQ ID NO: 39454 - DNA, 50 bp, synthetic construct
  source 1..50: mol_type = other DNA
aaaagtcatttttaatgaagataattttactttcagtataaccagctttt

SEQ ID NO: 39455 - DNA, 50 bp, synthetic construct
  source 1..50: mol_type = other DNA
tttcggacacgagttcgactctcgtcatctccaccatttctatcaatata

SEQ ID NO: 39456 - DNA, 50 bp, synthetic construct
  source 1..50: mol_type = other DNA
ttatatatcaattcatctataaatatcattattgatgaacgtcatttact

SEQ ID NO: 39457 - DNA, 50 bp, synthetic construct
  source 1..50: mol_type = other DNA
agacctcaatggaataactggggttaacaggggaggattaaatgatgtca

SEQ ID NO: 39458 - DNA, 50 bp, synthetic construct
  source 1..50: mol_type = other DNA
tatgacatgctctgtagtatgcatagatatgcatgggagggtattcctgt

SEQ ID NO: 39459 - DNA, 50 bp, synthetic construct
  source 1..50: mol_type = other DNA
ttgattgaaatgtaggttactaaaattttactatccttgattgagatgtt

SEQ ID NO: 39460 - DNA, 50 bp, synthetic construct
  source 1..50: mol_type = other DNA
ttggtggaaatgtaggttactaaaattttactatccttgattgaaatgtt

SEQ ID NO: 39461 - DNA, 50 bp, synthetic construct
  source 1..50: mol_type = other DNA
ctcaaacgcatcatgtggagtgcatatggacaacacacgtcgagacggta

SEQ ID NO: 39462 - DNA, 50 bp, synthetic construct
  source 1..50: mol_type = other DNA
agccggtggatctatttcctcaaacgcacgtcgagacggtagcacttttg

SEQ ID NO: 39463 - DNA, 50 bp, synthetic construct
  source 1..50: mol_type = other DNA
actctattatttaagagtaacaatttggtatatgcctcttatttaagagt

SEQ ID NO: 39464 - DNA, 50 bp, synthetic construct
  source 1..50: mol_type = other DNA
cctacgggcttttctttttaccaaaattactaaaaagaaatcgccttttt

SEQ ID NO: 39465 - DNA, 50 bp, synthetic construct
  source 1..50: mol_type = other DNA
tgcaaacaatagacagaaacgaaattcctcgtttcctctcgttggacgca

SEQ ID NO: 39466 - DNA, 50 bp, synthetic construct
  source 1..50: mol_type = other DNA
ctccgggcttttctttttaccggaaaattactaaaaagaaatcgcctttt

SEQ ID NO: 39467 - DNA, 50 bp, synthetic construct
  source 1..50: mol_type = other DNA
cggccgcgatagtcccgatggcgtatattcgaccgtggacatgccatcct

SEQ ID NO: 39468 - DNA, 50 bp, synthetic construct
  source 1..50: mol_type = other DNA
tcggcaggcttgtccacgatgctggtctcggtcgtcaggatcatgcgagc

SEQ ID NO: 39469 - DNA, 50 bp, synthetic construct
  source 1..50: mol_type = other DNA
acttttcatataattgatattaatctttttctgtcatttataagaaaagt

SEQ ID NO: 39470 - DNA, 50 bp, synthetic construct
  source 1..50: mol_type = other DNA
agcgaacggtcgcaggttcgaatcctatgccagagcgcgaggtttcgcct

SEQ ID NO: 39471 - DNA, 50 bp, synthetic construct
  source 1..50: mol_type = other DNA
gcactatttaaagtgaccacggctataggcgtatacagacgcttacaggc

SEQ ID NO: 39472 - DNA, 50 bp, synthetic construct
  source 1..50: mol_type = other DNA
ttgcttcttccagcgtactatagaattttactttacgctgcttccagcgt

SEQ ID NO: 39473 - DNA, 50 bp, synthetic construct
  source 1..50: mol_type = other DNA
gtagccgttcacgatggtgacggtccaccggacaagctatggaagtacac

SEQ ID NO: 39474 - DNA, 50 bp, synthetic construct
  source 1..50: mol_type = other DNA
aagtacgcgcaagtttttcataccgttgagggcaacacgaccttttacgc

SEQ ID NO: 39475 - DNA, 50 bp, synthetic construct
  source 1..50: mol_type = other DNA
cctttaactgtgcaggcatacggatatccgtatgtacgcaaggttattta

SEQ ID NO: 39476 - DNA, 50 bp, synthetic construct
  source 1..50: mol_type = other DNA
gctcgatcccgatctggtcgagctggaccggcgacaggagcagcgcgaag

SEQ ID NO: 39477 - DNA, 50 bp, synthetic construct
  source 1..50: mol_type = other DNA
gaggcaaccctcaagtccgccgcagctgcggccatcaagagggtcgccag

SEQ ID NO: 39478 - DNA, 50 bp, synthetic construct
  source 1..50: mol_type = other DNA
agaaatacagcccgataatcggcacatgctgatttactggctttaccctc

SEQ ID NO: 39479 - DNA, 50 bp, synthetic construct
  source 1..50: mol_type = other DNA
ggagcgcaggaagaaaatcagcgaaagggctgctgtccatgatgctctcc

SEQ ID NO: 39480 - DNA, 50 bp, synthetic construct
  source 1..50: mol_type = other DNA
gacattcagtcactggcggtggccgccgcaggcaccagcaactctctggc

SEQ ID NO: 39481 - DNA, 50 bp, synthetic construct
  source 1..50: mol_type = other DNA
gaggggcagaccgagcctaccggggatcccgcgggctcgggatgatgtcc

SEQ ID NO: 39482 - DNA, 50 bp, synthetic construct
  source 1..50: mol_type = other DNA
atgtacattgaaattacaatcttttaatgtgttatcatttcaaaagtggt

SEQ ID NO: 39483 - DNA, 50 bp, synthetic construct
  source 1..50: mol_type = other DNA
ctgggccgcgcatagcagtagatgcagccatgctcgcaaccacggtaggg

SEQ ID NO: 39484 - DNA, 50 bp, synthetic construct
  source 1..50: mol_type = other DNA
ggtggcccgctgaacaggatttcagctttaaagaagcaggttatgcgccc

SEQ ID NO: 39485 - DNA, 50 bp, synthetic construct
  source 1..50: mol_type = other DNA
cggtgctgatcaagttgtacacatttatagacccgacttgatcaagtccg

SEQ ID NO: 39486 - DNA, 50 bp, synthetic construct
  source 1..50: mol_type = other DNA
atcgggcggctgtctaaaaaatcatctaataaaaatcacccgattaacgc

SEQ ID NO: 39487 - DNA, 50 bp, synthetic construct
  source 1..50: mol_type = other DNA
aaaatgacagaagaacaattcgaagacgctaaatgttcatgcttcatttt

SEQ ID NO: 39488 - DNA, 50 bp, synthetic construct
  source 1..50: mol_type = other DNA
cgttttttatatgaatatttacattatcacattatgttacatcacaaatt

SEQ ID NO: 39489 - DNA, 50 bp, synthetic construct
  source 1..50: mol_type = other DNA
cgtagcccttagtgtaaagcataatgttcttaacttccttaatgtctccg

SEQ ID NO: 39490 - DNA, 50 bp, synthetic construct
  source 1..50: mol_type = other DNA
ttgaacgaaaaaagatgaaaaaacttagttttgcatcacgtttattaata

SEQ ID NO: 39491 - DNA, 50 bp, synthetic construct
  source 1..50: mol_type = other DNA
gtaagtctacagcattgttgcaatctaatgctacaatgccgaatagctac

SEQ ID NO: 39492 - DNA, 50 bp, synthetic construct
  source 1..50: mol_type = other DNA
acgatgagagaaagtacttagagttaactggtttagcttacttacaaact

SEQ ID NO: 39493 - DNA, 50 bp, synthetic construct
  source 1..50: mol_type = other DNA
accgtatgtagaaaataggaagattattctttttattttctaaatttaaa

SEQ ID NO: 39494 - DNA, 50 bp, synthetic construct
  source 1..50: mol_type = other DNA
ttttataccttattttgcatatttacctatatacaaataattataaaagc

SEQ ID NO: 39495 - DNA, 50 bp, synthetic construct
  source 1..50: mol_type = other DNA
aaaaaatatagaaaaaatgcttaaaagtatagattgtacttatattttag

SEQ ID NO: 39496 - DNA, 50 bp, synthetic construct
  source 1..50: mol_type = other DNA
ggcttttattttataccttattttgcaaaatgcggtaataacttgcttat

SEQ ID NO: 39497 - DNA, 50 bp, synthetic construct
  source 1..50: mol_type = other DNA
ttggattggaactgcaacacaaatatatttggattggaacagcatgcact

SEQ ID NO: 39498 - DNA, 50 bp, synthetic construct
  source 1..50: mol_type = other DNA
agagcatttcgtattaatcgtggggaaccgtatcataaatagtaatagta

SEQ ID NO: 39499 - DNA, 50 bp, synthetic construct
  source 1..50: mol_type = other DNA
tacagttgtgatgtagatataaatatatagaggtacattatgttatggct

SEQ ID NO: 39500 - DNA, 50 bp, synthetic construct
  source 1..50: mol_type = other DNA
taatagaaaataactaatttaaaaaattttattttgatctaattcttcta

SEQ ID NO: 39501 - DNA, 50 bp, synthetic construct
  source 1..50: mol_type = other DNA
ttaacccctagcttttgcattgcgtttgagatgtggttacgaactgtctt

SEQ ID NO: 39502 - DNA, 50 bp, synthetic construct
  source 1..50: mol_type = other DNA
atgtttgggtatggggaagtgaaccagtacaaccgccacagtacactcat

SEQ ID NO: 39503 - DNA, 50 bp, synthetic construct
  source 1..50: mol_type = other DNA
tgaacgaaggctgggcttcgtattgcaatacgaaggctgggcatccttct

SEQ ID NO: 39504 - DNA, 50 bp, synthetic construct
  source 1..50: mol_type = other DNA
taatgaagttaactttcttgtacttcccaacaatttcattttcttccgaa

SEQ ID NO: 39505 - DNA, 50 bp, synthetic construct
  source 1..50: mol_type = other DNA
aagtgtttagttccctctttgcgtccctcatagcttgaaccgaaaaagtt

SEQ ID NO: 39506 - DNA, 50 bp, synthetic construct
  source 1..50: mol_type = other DNA
tttttagtcttttctgtaaagacgtaaccctttaaagagttacttctttt

SEQ ID NO: 39507 - DNA, 50 bp, synthetic construct
  source 1..50: mol_type = other DNA
tttctatttttactcggtggatattaaaagaaacaaaagggataaagatt

SEQ ID NO: 39508 - DNA, 50 bp, synthetic construct
  source 1..50: mol_type = other DNA
attaatcgtggagaaccgtatcataaccgttacggtgaaccgtatcataa

SEQ ID NO: 39509 - DNA, 50 bp, synthetic construct
  source 1..50: mol_type = other DNA
aacttaaaaggcgatttctttttagtaaaaaagaagtaaccctttaaaga

SEQ ID NO: 39510 - DNA, 50 bp, synthetic construct
  source 1..50: mol_type = other DNA
tcacgaagactgcgacggtctccacaatgctaccgtctccacatggtggg

SEQ ID NO: 39511 - DNA, 50 bp, synthetic construct
  source 1..50: mol_type = other DNA
agtatctaaatttgttatttttctgaagaaaaataaaaaaacagaaagaa

SEQ ID NO: 39512 - DNA, 50 bp, synthetic construct
  source 1..50: mol_type = other DNA
ttgaaaatgttatgtctgggactattcggattcacagaaaactttcgtaa

SEQ ID NO: 39513 - DNA, 50 bp, synthetic construct
  source 1..50: mol_type = other DNA
gggtttttgtcgaggtactgctggtggtagccctcggccgggtagaaggg

SEQ ID NO: 39514 - DNA, 50 bp, synthetic construct
  source 1..50: mol_type = other DNA
atctgcgcagcaggtaatcataatttgcttggtcctcccgggacaggtaa

SEQ ID NO: 39515 - DNA, 50 bp, synthetic construct
  source 1..50: mol_type = other DNA
gacgacgggatgagtaccgccgaatacgccatcggcacgatcgccgcggc

SEQ ID NO: 39516 - DNA, 50 bp, synthetic construct
  source 1..50: mol_type = other DNA
aggaacgtcggaaatgacagagtagatatgatgatccgctcgacgttctg

SEQ ID NO: 39517 - DNA, 50 bp, synthetic construct
  source 1..50: mol_type = other DNA
tcatgatcggtcgaaactctggcatatgagaataagatcatttttgacta

SEQ ID NO: 39518 - DNA, 50 bp, synthetic construct
  source 1..50: mol_type = other DNA
tttttatcaaagtataaaaaaacaaactgttttttattggcaaaccaaag

SEQ ID NO: 39519 - DNA, 50 bp, synthetic construct
  source 1..50: mol_type = other DNA
aagatatctccacactagaaaatcatttcctccttttgattctatattac

SEQ ID NO: 39520 - DNA, 50 bp, synthetic construct
  source 1..50: mol_type = other DNA
gagggatatatagtgttgaaaggagcagctttatcagctcttcatcccca

SEQ ID NO: 39521 - DNA, 50 bp, synthetic construct
  source 1..50: mol_type = other DNA
tgaagtacaggataacgaaacattgcaatgactcgttatgaatatgcagc

SEQ ID NO: 39522 - DNA, 50 bp, synthetic construct
  source 1..50: mol_type = other DNA
gacaagcatttcaatcaaagatagtactatccttcatttcaatcaaagta

SEQ ID NO: 39523 - DNA, 50 bp, synthetic construct
  source 1..50: mol_type = other DNA
accgtcgtcgacgtatccgggtcgcgcgtggcggagctcaaccagatcgt

SEQ ID NO: 39524 - DNA, 50 bp, synthetic construct
  source 1..50: mol_type = other DNA
cttcatcaaactatagattacatcatgagtattcgagacaattgaataac

SEQ ID NO: 39525 - DNA, 50 bp, synthetic construct
  source 1..50: mol_type = other DNA
gctgctatcagacaggttcttgattaatcatagttcgctctggtagcagc

SEQ ID NO: 39526 - DNA, 50 bp, synthetic construct
  source 1..50: mol_type = other DNA
tagcgggaactggactcttctcgaactggactcgaaccagcgaccttcgg

SEQ ID NO: 39527 - DNA, 50 bp, synthetic construct
  source 1..50: mol_type = other DNA
ctccgtcggctccgaggatgcgcccgtttaggtcctccgcatttacgctc

SEQ ID NO: 39528 - DNA, 50 bp, synthetic construct
  source 1..50: mol_type = other DNA
cgcgagctgccggcctatgcctcgccacgcaggccgaagcggtcgtcgcc

SEQ ID NO: 39529 - DNA, 50 bp, synthetic construct
  source 1..50: mol_type = other DNA
gttatcggcggcggttgggccggatgtgcagcagctataagcgctaaaaa

SEQ ID NO: 39530 - DNA, 50 bp, synthetic construct
  source 1..50: mol_type = other DNA
gtggattatagctcttattaacttgcaaagcgtatttaagtataagctga

SEQ ID NO: 39531 - DNA, 50 bp, synthetic construct
  source 1..50: mol_type = other DNA
aaaaggcaagagaaagaagccttaaaagtcttttcttcctcttccatttg

SEQ ID NO: 39532 - DNA, 50 bp, synthetic construct
  source 1..50: mol_type = other DNA
atagctcttattaacttgatttgtatcaaatgcaaagcgtatttaagtat

SEQ ID NO: 39533 - DNA, 50 bp, synthetic construct
  source 1..50: mol_type = other DNA
tatttaaaaaatatatttttttccaagtaaaatataagattttttgtagc

SEQ ID NO: 39534 - DNA, 50 bp, synthetic construct
  source 1..50: mol_type = other DNA
cagtaaatgaaaactctcatatcccagctattgagagcattgcaccacag

SEQ ID NO: 39535 - DNA, 50 bp, synthetic construct
  source 1..50: mol_type = other DNA
ttataaatataaataatattataatattatatatttatatatttttacca

SEQ ID NO: 39536 - DNA, 50 bp, synthetic construct
  source 1..50: mol_type = other DNA
tgataggtaataaaattgtcgttgaaaaaacacaattcaagcagttatgt

SEQ ID NO: 39537 - DNA, 50 bp, synthetic construct
  source 1..50: mol_type = other DNA
accttatctgatatgcttattgcttcaccaatatcatgcgtaactaaaat

SEQ ID NO: 39538 - DNA, 50 bp, synthetic construct
  source 1..50: mol_type = other DNA
ccatacccatcaaaaaacccatgactccttataatttttggaggtcttga

SEQ ID NO: 39539 - DNA, 50 bp, synthetic construct
  source 1..50: mol_type = other DNA
gaattctttctaaaaaacttattcaatagcaagctttttagaacataatc

SEQ ID NO: 39540 - DNA, 50 bp, synthetic construct
  source 1..50: mol_type = other DNA
aaggagtaactctttaaagggttgctatttgatttatatataaatggctc

SEQ ID NO: 39541 - DNA, 50 bp, synthetic construct
  source 1..50: mol_type = other DNA
tccacattgtgagacgtgcgtactttggtaataccgttgagactgtagtt

SEQ ID NO: 39542 - DNA, 50 bp, synthetic construct
  source 1..50: mol_type = other DNA
aaaggtataagtgttttttttgtatatcgaaaaaaaatcgatatataata

SEQ ID NO: 39543 - DNA, 50 bp, synthetic construct
  source 1..50: mol_type = other DNA
tgactgggccgcgcatagcagtagatttactggcgagggtggcccacgcc

SEQ ID NO: 39544 - DNA, 50 bp, synthetic construct
  source 1..50: mol_type = other DNA
aatgccagatctggcatagaccgcccggtttcccatttcgataccgcacg

SEQ ID NO: 39545 - DNA, 50 bp, synthetic construct
  source 1..50: mol_type = other DNA
ttaggagatgatggttgtagttacctaatgctacaatgccgaatagctac

SEQ ID NO: 39546 - DNA, 50 bp, synthetic construct
  source 1..50: mol_type = other DNA
tttttaagcgttttcaactattataaccaacatttccaccaatgtaaaag

SEQ ID NO: 39547 - DNA, 50 bp, synthetic construct
  source 1..50: mol_type = other DNA
gaaaaaaatgatgacattcttgaaaatccctacttgccctcattgtcatc

SEQ ID NO: 39548 - DNA, 50 bp, synthetic construct
  source 1..50: mol_type = other DNA
tttcgttgggggctgaattatgttttaaatgaattgatagactaacgaaa

SEQ ID NO: 39549 - DNA, 50 bp, synthetic construct
  source 1..50: mol_type = other DNA
cgctcgggtacccgaaggatagggtatagtatccctcgggtgcccgaaag

SEQ ID NO: 39550 - DNA, 50 bp, synthetic construct
  source 1..50: mol_type = other DNA
acgctcatagatgggcggctgagcgccatcagctacaagggactgagcgt

SEQ ID NO: 39551 - DNA, 50 bp, synthetic construct
  source 1..50: mol_type = other DNA
ccggccccgggcggcccgaccatcagcatgtgatggccgcccgcggccgc

SEQ ID NO: 39552 - DNA, 50 bp, synthetic construct
  source 1..50: mol_type = other DNA
gtgaagataagaatggccttggggttgcccgccgccacccagaactcctg

SEQ ID NO: 39553 - DNA, 50 bp, synthetic construct
  source 1..50: mol_type = other DNA
tgttgtacggactctttataaatgaagctcttaaagacagtacccgctgc

SEQ ID NO: 39554 - DNA, 50 bp, synthetic construct
  source 1..50: mol_type = other DNA
aagttgaaacctttgacatcgcaggcccgcaccgtcacagcaatccccgc

SEQ ID NO: 39555 - DNA, 50 bp, synthetic construct
  source 1..50: mol_type = other DNA
tcgcccagccccacacgtgctgaatcttcagcaagttgaggactacgtga

SEQ ID NO: 39556 - DNA, 50 bp, synthetic construct
  source 1..50: mol_type = other DNA
agtagcttgccggaatgccgccgatgaaggcggcattgcgaaaatcccgg

SEQ ID NO: 39557 - DNA, 50 bp, synthetic construct
  source 1..50: mol_type = other DNA
gacggggctcctgttgtcagtggtggaggcgcggagaatcgaactccggt

SEQ ID NO: 39558 - DNA, 50 bp, synthetic construct
  source 1..50: mol_type = other DNA
tcgacatgttccctcatacggatcacgatcgcgctggtggagcgcgtcga

SEQ ID NO: 39559 - DNA, 50 bp, synthetic construct
  source 1..50: mol_type = other DNA
tttccctttgccttacggcaggattgatgtggccgcagagcaaataaaag

SEQ ID NO: 39560 - DNA, 50 bp, synthetic construct
  source 1..50: mol_type = other DNA
tacaatcatcgccaaaaagcatggggaagacatttctttgataatatgga

SEQ ID NO: 39561 - DNA, 50 bp, synthetic construct
  source 1..50: mol_type = other DNA
cggtggcgcggcattgggagcacacaaatgctctgcaataggtgctgcag

SEQ ID NO: 39562 - DNA, 50 bp, synthetic construct
  source 1..50: mol_type = other DNA
gatgtcaatagagttcatggaattgtgcttggtaaataagtctttccatt

SEQ ID NO: 39563 - DNA, 50 bp, synthetic construct
  source 1..50: mol_type = other DNA
caccagttttgatacaatgagtatcgcgctgcattgtatcaattatggcg

SEQ ID NO: 39564 - DNA, 50 bp, synthetic construct
  source 1..50: mol_type = other DNA
cctcatcactttcgtgagagtctgcaccgaccgtcacgttgatgacggca

SEQ ID NO: 39565 - DNA, 50 bp, synthetic construct
  source 1..50: mol_type = other DNA
gccagcgcgttttccagcgccgtgatcatcggctttacatgggcgcgaaa

SEQ ID NO: 39566 - DNA, 50 bp, synthetic construct
  source 1..50: mol_type = other DNA
cggacaacttttatgctggtgatcatggctaccgaagaaatcgttcaacg

SEQ ID NO: 39567 - DNA, 50 bp, synthetic construct
  source 1..50: mol_type = other DNA
ggcccgaacgcgcggcccggacgagcccgtccaaggcgaccgccgcgacc

SEQ ID NO: 39568 - DNA, 50 bp, synthetic construct
  source 1..50: mol_type = other DNA
gcttctcgggaagccgcaatgccggccggcctcatcgcccgcatcgaggc

SEQ ID NO: 39569 - DNA, 50 bp, synthetic construct
  source 1..50: mol_type = other DNA
cactacgcactcgacgtgatgggtctatagtctccacatgatgcgtctgg

SEQ ID NO: 39570 - DNA, 50 bp, synthetic construct
  source 1..50: mol_type = other DNA
tctcaaagccaactgccataaaaacagtgttggcagagtacaaacaccga

SEQ ID NO: 39571 - DNA, 50 bp, synthetic construct
  source 1..50: mol_type = other DNA
aaaaatcaattagaggaaagtacatcaccgactcagccatcgtttctttc

SEQ ID NO: 39572 - DNA, 50 bp, synthetic construct
  source 1..50: mol_type = other DNA
gctttaggattaaatggggtaaatctcatgcgcctaatggccacaaaaaa

SEQ ID NO: 39573 - DNA, 50 bp, synthetic construct
  source 1..50: mol_type = other DNA
ttaatcgtggggaaccgtatcacaaatatgttacggtgaaccgtatcata

SEQ ID NO: 39574 - DNA, 50 bp, synthetic construct
  source 1..50: mol_type = other DNA
agtgaatcagtataaccgttcatcatccctgctaactaaaccagtacaac

SEQ ID NO: 39575 - DNA, 50 bp, synthetic construct
  source 1..50: mol_type = other DNA
ggtatggggaagtgaatcagtataactaaaccagtacaaccgccatagta

SEQ ID NO: 39576 - DNA, 50 bp, synthetic construct
  source 1..50: mol_type = other DNA
tgatgtgcaggcccgaaatactgatatcctgaccagatggctgatgccgg

SEQ ID NO: 39577 - DNA, 50 bp, synthetic construct
  source 1..50: mol_type = other DNA
tgttacactctccacatgaatggaattccacatggcttgtttgagggaat

SEQ ID NO: 39578 - DNA, 50 bp, synthetic construct
  source 1..50: mol_type = other DNA
tatgataggtgggccgaaaataggtcagggttgagcccccaccaccaaca

SEQ ID NO: 39579 - DNA, 50 bp, synthetic construct
  source 1..50: mol_type = other DNA
gaaccgtcgcgcagcctgcggcggatgcacgacagcctccgcgagtcttc

SEQ ID NO: 39580 - DNA, 50 bp, synthetic construct
  source 1..50: mol_type = other DNA
gggaagtgaatcagtataaccgttcagctaactaaaccagtacaaccgcc

SEQ ID NO: 39581 - DNA, 50 bp, synthetic construct
  source 1..50: mol_type = other DNA
taacatataattattcactgtttaaatagccttgtaaaaattaagtgccg

SEQ ID NO: 39582 - DNA, 50 bp, synthetic construct
  source 1..50: mol_type = other DNA
caatttgttgtaatggcacttatttgtatgattatcaggcaaaaaaggtt

SEQ ID NO: 39583 - DNA, 50 bp, synthetic construct
  source 1..50: mol_type = other DNA
gcgctgtgcacggggcggctgtcgagaatcacccggttcaccccgcgcgc

SEQ ID NO: 39584 - DNA, 50 bp, synthetic construct
  source 1..50: mol_type = other DNA
aaagaaaaaaggaataagaataaaatataatttttgtttaatttttattt

SEQ ID NO: 39585 - DNA, 50 bp, synthetic construct
  source 1..50: mol_type = other DNA
aacgatttttcgcgccctttggctaacactaaacgtacactcataatttg

SEQ ID NO: 39586 - DNA, 50 bp, synthetic construct
  source 1..50: mol_type = other DNA
cttttttatcaaaccaaaaagaatcagcaaatattcctcaggtaaatcaa

SEQ ID NO: 39587 - DNA, 50 bp, synthetic construct
  source 1..50: mol_type = other DNA
ggtttcttcgtgaagttagtagcatgtacgtacttgattaacggaaaccc

SEQ ID NO: 39588 - DNA, 50 bp, synthetic construct
  source 1..50: mol_type = other DNA
tatctctccgccactttgtgatgaaatcgtcccatgtagcccgccacatt

SEQ ID NO: 39589 - DNA, 50 bp, synthetic construct
  source 1..50: mol_type = other DNA
ggtgaaaccatctgttatgcctttatgcaagccgttggcatggtggatga

SEQ ID NO: 39590 - DNA, 50 bp, synthetic construct
  source 1..50: mol_type = other DNA
cctgtaccaggagggccaaggaaaagtaggttgtggtttccagccgccgc

SEQ ID NO: 39591 - DNA, 50 bp, synthetic construct
  source 1..50: mol_type = other DNA
gtagtaacttactgcgttcttggatatcaatttatagcatctcatcgtca

SEQ ID NO: 39592 - DNA, 50 bp, synthetic construct
  source 1..50: mol_type = other DNA
gcctttctgttttgattttatcatttttgataaaataggtacaagaaaac

SEQ ID NO: 39593 - DNA, 50 bp, synthetic construct
  source 1..50: mol_type = other DNA
ttaaaaaagaatgaagcaattaaagtaatatatgctcttgaaaattttaa

SEQ ID NO: 39594 - DNA, 50 bp, synthetic construct
  source 1..50: mol_type = other DNA
cgcaaacgcatcatgtggagacggtatggacaacacacgtcgagtgcgta

SEQ ID NO: 39595 - DNA, 50 bp, synthetic construct
  source 1..50: mol_type = other DNA
cactacgcactcgacgtgcgttgtctatagtctccacatgatgcgtttgc

SEQ ID NO: 39596 - DNA, 50 bp, synthetic construct
  source 1..50: mol_type = other DNA
gaggtcttagattttccttgcaaccaatttttaaatcaagctccaggaga

SEQ ID NO: 39597 - DNA, 50 bp, synthetic construct
  source 1..50: mol_type = other DNA
ttaaaaatagcacaaaaacgctcctttaggggtgttttttttataaaaaa

SEQ ID NO: 39598 - DNA, 50 bp, synthetic construct
  source 1..50: mol_type = other DNA
attagcaacactacgcactcgacgtgatgcgtttgcggaaacaaatctac

SEQ ID NO: 39599 - DNA, 50 bp, synthetic construct
  source 1..50: mol_type = other DNA
aacgaaggctgggcttcgtattgctagcaatacgaaggctgggcatcctt

SEQ ID NO: 39600 - DNA, 50 bp, synthetic construct
  source 1..50: mol_type = other DNA
ttagggcttaatggagtaaatctaattagatatgaatcaagaagtaataa

SEQ ID NO: 39601 - DNA, 50 bp, synthetic construct
  source 1..50: mol_type = other DNA
ttcttttaatttgtcatcttgcttatgaagtaaatgataatataaaaagc

SEQ ID NO: 39602 - DNA, 50 bp, synthetic construct
  source 1..50: mol_type = other DNA
ccggaaatgaatacataaaataattaagtatattattgatccgatggttg

SEQ ID NO: 39603 - DNA, 50 bp, synthetic construct
  source 1..50: mol_type = other DNA
ccctctccgctaacttcgctttaattatctctcgctggacgcaaagaggg

SEQ ID NO: 39604 - DNA, 50 bp, synthetic construct
  source 1..50: mol_type = other DNA
cttttgcattgcgtttgagatgtgtacacatcacatttgagatgtggttg

SEQ ID NO: 39605 - DNA, 50 bp, synthetic construct
  source 1..50: mol_type = other DNA
ccatgatgcgctacttcaccaatttcaaataaatcagtcgtcatccgtga

SEQ ID NO: 39606 - DNA, 50 bp, synthetic construct
  source 1..50: mol_type = other DNA
aaaaaggcgatttctttttagtaatttcgataaaaagaaaagcccgtagg

SEQ ID NO: 39607 - DNA, 50 bp, synthetic construct
  source 1..50: mol_type = other DNA
agtgaaccagtataatcgctcatcatcctagctaactaaaccagtataac

SEQ ID NO: 39608 - DNA, 50 bp, synthetic construct
  source 1..50: mol_type = other DNA
gtcctctgaaaaaggcgattctaatatctctcgctggacgcaaagaggga

SEQ ID NO: 39609 - DNA, 50 bp, synthetic construct
  source 1..50: mol_type = other DNA
tcttttatattttcatcgcttcaaactttttcgtttgaaaaaatagtatc

SEQ ID NO: 39610 - DNA, 50 bp, synthetic construct
  source 1..50: mol_type = other DNA
ttgtataaatccctgttgtaattttatatatttccgaggtggctacacaa

SEQ ID NO: 39611 - DNA, 50 bp, synthetic construct
  source 1..50: mol_type = other DNA
gtctttaaacaagatgcgaaaagatatagaacatcagtttgttacatggt

SEQ ID NO: 39612 - DNA, 50 bp, synthetic construct
  source 1..50: mol_type = other DNA
gcgctcgctcgtcggcgagcacaccgtcgccctcgacgcgctgcggcagc

SEQ ID NO: 39613 - DNA, 50 bp, synthetic construct
  source 1..50: mol_type = other DNA
cgcatcctcgcgctcatgctcgaagctactccgtagagcgcacggctacg

SEQ ID NO: 39614 - DNA, 50 bp, synthetic construct
  source 1..50: mol_type = other DNA
gcccaccgacatcgataacccaacaaataagcaatctgaccttcgcctgc

SEQ ID NO: 39615 - DNA, 50 bp, synthetic construct
  source 1..50: mol_type = other DNA
tatgctgttcctactgcgttttttataaaaaacactgtccccgcgtttgt

SEQ ID NO: 39616 - DNA, 50 bp, synthetic construct
  source 1..50: mol_type = other DNA
gacgacggcatgtccaccgccgagtacgccatcggcaccattgcggccgc

SEQ ID NO: 39617 - DNA, 50 bp, synthetic construct
  source 1..50: mol_type = other DNA
gcatagcgcggatggcctccgaggcagatcggatacctgcaacactaaaa

SEQ ID NO: 39618 - DNA, 50 bp, synthetic construct
  source 1..50: mol_type = other DNA
gtttttattaaaattataggtaaaattcagtagaaaactttgatagtaac

SEQ ID NO: 39619 - DNA, 50 bp, synthetic construct
  source 1..50: mol_type = other DNA
ttggtgaatgtagtaaaatatttatttgagaattttgttaatttcctcaa

SEQ ID NO: 39620 - DNA, 50 bp, synthetic construct
  source 1..50: mol_type = other DNA
actggagaacaatatgatcaggtgatcagtaatgactccgagtccgtagt

SEQ ID NO: 39621 - DNA, 50 bp, synthetic construct
  source 1..50: mol_type = other DNA
attattaaaccaatataaggtatatttaggtcatatatttttttaggtgt

SEQ ID NO: 39622 - DNA, 50 bp, synthetic construct
  source 1..50: mol_type = other DNA
gtcttgtatattcagaaaaataataaattatttttatagagtttaaaaag

SEQ ID NO: 39623 - DNA, 50 bp, synthetic construct
  source 1..50: mol_type = other DNA
agcaggaacagctgagcctttgccatgaaaaaacgaattgagttccttgg

SEQ ID NO: 39624 - DNA, 50 bp, synthetic construct
  source 1..50: mol_type = other DNA
aatattcttttcacaacagccgccttaaatcatgtccggaaattaatatt

SEQ ID NO: 39625 - DNA, 50 bp, synthetic construct
  source 1..50: mol_type = other DNA
cttttttgaataaaaaacggcaggaaatgatattattttcttcataaagg

SEQ ID NO: 39626 - DNA, 50 bp, synthetic construct
  source 1..50: mol_type = other DNA
agccgccttgggctcgtcaaactgtacagtttgtagtcattagaactact

SEQ ID NO: 39627 - DNA, 50 bp, synthetic construct
  source 1..50: mol_type = other DNA
gttgataataacaatagttttttcaattctgagaaatccttatttccatt

SEQ ID NO: 39628 - DNA, 50 bp, synthetic construct
  source 1..50: mol_type = other DNA
attttttcttttctgccgatctcgacatatatcactctaaaaggcaataa

SEQ ID NO: 39629 - DNA, 50 bp, synthetic construct
  source 1..50: mol_type = other DNA
tgctgtacatttctcgtttgcatagatatggaaacgcatggggctcaaga

SEQ ID NO: 39630 - DNA, 50 bp, synthetic construct
  source 1..50: mol_type = other DNA
tccaaatagcctgtgcagattgatttcgacaggctcactttgcattttcg

SEQ ID NO: 39631 - DNA, 50 bp, synthetic construct
  source 1..50: mol_type = other DNA
ttttatatcttgatgcacctgatgttgcctgatttcattgtcatagtttt

SEQ ID NO: 39632 - DNA, 50 bp, synthetic construct
  source 1..50: mol_type = other DNA
tgtggaaaaaagatcctgaattcaagcaaattcaaagggattgtatcacc

SEQ ID NO: 39633 - DNA, 50 bp, synthetic construct
  source 1..50: mol_type = other DNA
cgtccggagcggattgtctatgtgagaacggagattatcttatcccgaac

SEQ ID NO: 39634 - DNA, 50 bp, synthetic construct
  source 1..50: mol_type = other DNA
acatctattttgctccaaaaatggcggagctgttcctccaaaggtgtatg

SEQ ID NO: 39635 - DNA, 50 bp, synthetic construct
  source 1..50: mol_type = other DNA
tcatcatatgttgccttagtctctgcaatcgctcggatgagattttatat

SEQ ID NO: 39636 - DNA, 50 bp, synthetic construct
  source 1..50: mol_type = other DNA
caccagatgatttaatatgttttttaagtttgttattaaatattcgggta

SEQ ID NO: 39637 - DNA, 50 bp, synthetic construct
  source 1..50: mol_type = other DNA
agcatttcaatcaaggatagtgaaatttcataaaggaacctccaaatttt

SEQ ID NO: 39638 - DNA, 50 bp, synthetic construct
  source 1..50: mol_type = other DNA
accactaatagcttctatctagccttggctttcaagcaaattgtagtgag

SEQ ID NO: 39639 - DNA, 50 bp, synthetic construct
  source 1..50: mol_type = other DNA
aggtaaagtggattttgtatttttaattatacagaaaataattataaagg

SEQ ID NO: 39640 - DNA, 50 bp, synthetic construct
  source 1..50: mol_type = other DNA
cggtaatttttttggctcagctcaagtgagcaccatcttggcaattaagc

SEQ ID NO: 39641 - DNA, 50 bp, synthetic construct
  source 1..50: mol_type = other DNA
caatgtaatcattgtattatcatctagctcatatggaaatgattagcgct

SEQ ID NO: 39642 - DNA, 50 bp, synthetic construct
  source 1..50: mol_type = other DNA
tcaggagaagctgcaaaatcagctccagctgctaatatctcttcaaaata

SEQ ID NO: 39643 - DNA, 50 bp, synthetic construct
  source 1..50: mol_type = other DNA
atttttactgtaaaaccgtggccaatttttgtttaatttttatttaaaaa

SEQ ID NO: 39644 - DNA, 50 bp, synthetic construct
  source 1..50: mol_type = other DNA
atgctcgactgaaaggtaaaaaatacttcatttaaacgacgctcgatgat

SEQ ID NO: 39645 - DNA, 50 bp, synthetic construct
  source 1..50: mol_type = other DNA
acagagcatttaagattatgcgaggaggcgtatcataagtaaaactaaaa

SEQ ID NO: 39646 - DNA, 50 bp, synthetic construct
  source 1..50: mol_type = other DNA
attttccacttgataacaatgtcctcatgagaggttatctccatgaaaat

SEQ ID NO: 39647 - DNA, 50 bp, synthetic construct
  source 1..50: mol_type = other DNA
agttcagtgtaagcacttatggataaattttctaaaaatttttctgaacc

SEQ ID NO: 39648 - DNA, 50 bp, synthetic construct
  source 1..50: mol_type = other DNA
tggcgcttaaatatcgtcaatattgaaaaagttttaagatttaacttgtc

SEQ ID NO: 39649 - DNA, 50 bp, synthetic construct
  source 1..50: mol_type = other DNA
attggagctacggccattggtggacctcctgaccacccccactcgtaagt

SEQ ID NO: 39650 - DNA, 50 bp, synthetic construct
  source 1..50: mol_type = other DNA
accaaattcaagattaatccaattataatagaaataattgcaaattctat

SEQ ID NO: 39651 - DNA, 50 bp, synthetic construct
  source 1..50: mol_type = other DNA
ccatttataaatgcagtataataattttcaaatagtctatctataaaatt

SEQ ID NO: 39652 - DNA, 50 bp, synthetic construct
  source 1..50: mol_type = other DNA
tcataaaatcacatcctttaatttatatacatttatgtatatttttgtcg

SEQ ID NO: 39653 - DNA, 50 bp, synthetic construct
  source 1..50: mol_type = other DNA
ctctcctggccgcgatcactcttactccagaagttttttggccaggagac

SEQ ID NO: 39654 - DNA, 50 bp, synthetic construct
  source 1..50: mol_type = other DNA
gtaattatttttggacttgtatatatatatttgacttaaaaatatgataa

SEQ ID NO: 39655 - DNA, 50 bp, synthetic construct
  source 1..50: mol_type = other DNA
ttttttgctacaattttttagactgtagcatcttcatactatcctaaaaa

SEQ ID NO: 39656 - DNA, 50 bp, synthetic construct
  source 1..50: mol_type = other DNA
ttattaacattttatcatatttggtaacaaatcgattattcacataatat

SEQ ID NO: 39657 - DNA, 50 bp, synthetic construct
  source 1..50: mol_type = other DNA
gtccagcggacgggggccttcgtgcaaacgaaagcccccgtacaccgttc

SEQ ID NO: 39658 - DNA, 50 bp, synthetic construct
  source 1..50: mol_type = other DNA
ctgcaattatttgaagtgtcatatccataagccacccattatcattgacc

SEQ ID NO: 39659 - DNA, 50 bp, synthetic construct
  source 1..50: mol_type = other DNA
gctaatagtcttgattgcaataatatatagctttaatgcatactggaagc

SEQ ID NO: 39660 - DNA, 50 bp, synthetic construct
  source 1..50: mol_type = other DNA
tgatattatgtacgccacagtaagcggtacaattgaagtacataataaaa

SEQ ID NO: 39661 - DNA, 50 bp, synthetic construct
  source 1..50: mol_type = other DNA
cgggaatggtgtccgtcgagtagtcgcgtatgcgactgtggccatacccg

SEQ ID NO: 39662 - DNA, 50 bp, synthetic construct
  source 1..50: mol_type = other DNA
gagttcataatcagtaagtgttgaagagacacctttatgaatatgaaata

SEQ ID NO: 39663 - DNA, 50 bp, synthetic construct
  source 1..50: mol_type = other DNA
ggaacaggtggtgttaatacaacacacgacacattaacaccgattggtgg

SEQ ID NO: 39664 - DNA, 50 bp, synthetic construct
  source 1..50: mol_type = other DNA
tactgtgacgattgtactggtttaattatactggtttacttccccatacc

SEQ ID NO: 39665 - DNA, 50 bp, synthetic construct
  source 1..50: mol_type = other DNA
atttttaattatctttacttcttctagaacgttctaatgttgtttccaat

SEQ ID NO: 39666 - DNA, 50 bp, synthetic construct
  source 1..50: mol_type = other DNA
acgctggtgctggccgaggaattggggagcacctacagctctggatacga

SEQ ID NO: 39667 - DNA, 50 bp, synthetic construct
  source 1..50: mol_type = other DNA
gacatatttatttgtatgaatacaaatgtatgaatacttgtatcaagcgc

SEQ ID NO: 39668 - DNA, 50 bp, synthetic construct
  source 1..50: mol_type = other DNA
ggcaccggcacggtgtgaaagtggtcgtagacccacaccgagtcccaggg

SEQ ID NO: 39669 - DNA, 50 bp, synthetic construct
  source 1..50: mol_type = other DNA
tgattgtgcgggttcgactggataaatgttgagtcctgtccgccggaaat

SEQ ID NO: 39670 - DNA, 50 bp, synthetic construct
  source 1..50: mol_type = other DNA
tcaacgccgaccgcacactcaccatcctccaagtctgcggtggggacttt

SEQ ID NO: 39671 - DNA, 50 bp, synthetic construct
  source 1..50: mol_type = other DNA
gcctgaccggcggcgaggtggaggcgcaagacggtcatcgctccccaggc

SEQ ID NO: 39672 - DNA, 50 bp, synthetic construct
  source 1..50: mol_type = other DNA
aaataattttatttatgatacggttccccacgattaatacgaaacgctct

SEQ ID NO: 39673 - DNA, 50 bp, synthetic construct
  source 1..50: mol_type = other DNA
cctcagcggtccatcggcctcgcacagcgcagggcgatccttcggaagcg

SEQ ID NO: 39674 - DNA, 50 bp, synthetic construct
  source 1..50: mol_type = other DNA
ttttttatttgggctgtgtgaatagctacttgcggggctggaaaaactga

SEQ ID NO: 39675 - DNA, 50 bp, synthetic construct
  source 1..50: mol_type = other DNA
ataattaaaaattgcccacagggaaatccaggttgggaaacgttatttat

SEQ ID NO: 39676 - DNA, 50 bp, synthetic construct
  source 1..50: mol_type = other DNA
tgtatttcaatgaagggggaaataatttttaattacacatctcaaacgca

SEQ ID NO: 39677 - DNA, 50 bp, synthetic construct
  source 1..50: mol_type = other DNA
gttgtactggtttaattaactatgatgatgagcgattatactggttcact

SEQ ID NO: 39678 - DNA, 50 bp, synthetic construct
  source 1..50: mol_type = other DNA
agtgtctgcagatgacggcacaggaggttgttatatcggttctcaacacc

SEQ ID NO: 39679 - DNA, 50 bp, synthetic construct
  source 1..50: mol_type = other DNA
ttttttgttgccattaggcgcatgagatttactccattaagccctaaagc

SEQ ID NO: 39680 - DNA, 50 bp, synthetic construct
  source 1..50: mol_type = other DNA
tcacttctgtagatgcaattattttgaaaacatttgttctataaaagtga

SEQ ID NO: 39681 - DNA, 50 bp, synthetic construct
  source 1..50: mol_type = other DNA
gtcccaatacggacttgttccgaaatttctctggagaagaaaaagaagaa

SEQ ID NO: 39682 - DNA, 50 bp, synthetic construct
  source 1..50: mol_type = other DNA
caaggacttctgggacctggcggtcgtcctccagggtgcggaactcctcg

SEQ ID NO: 39683 - DNA, 50 bp, synthetic construct
  source 1..50: mol_type = other DNA
ggaaaccttgtgccgagagaaaaagaattttcccgttccataagacgtaa

SEQ ID NO: 39684 - DNA, 50 bp, synthetic construct
  source 1..50: mol_type = other DNA
gcaggatttctcccgccggggcctctgccgaccgcctatgaaaaggatgc

SEQ ID NO: 39685 - DNA, 50 bp, synthetic construct
  source 1..50: mol_type = other DNA
cgtaaggcttctggttcgaagcgcaatcacgcattcgcggacgcctttgt

SEQ ID NO: 39686 - DNA, 50 bp, synthetic construct
  source 1..50: mol_type = other DNA
ccctgcacacgtcaaaagcgctaatgttgtggcttgttgtcaattacggg

SEQ ID NO: 39687 - DNA, 50 bp, synthetic construct
  source 1..50: mol_type = other DNA
tggcgcgatgtggctgcgctgtcagcatggtctccagcggtggcgcggtg

SEQ ID NO: 39688 - DNA, 50 bp, synthetic construct
  source 1..50: mol_type = other DNA
gacccgcccttttcccattggtgacgacaccgcgaggagacgggcggaac

SEQ ID NO: 39689 - DNA, 50 bp, synthetic construct
  source 1..50: mol_type = other DNA
gcggcggctggaaaccacaacctacttttccttggtcctcctggtacagg

SEQ ID NO: 39690 - DNA, 50 bp, synthetic construct
  source 1..50: mol_type = other DNA
ttggcaggaacctgacaagaatactcagccaacgcaatcacccatgaaaa

SEQ ID NO: 39691 - DNA, 50 bp, synthetic construct
  source 1..50: mol_type = other DNA
aaagtgaaagtgcactaccacggcacgcttatcgatggcactgttttcga

SEQ ID NO: 39692 - DNA, 50 bp, synthetic construct
  source 1..50: mol_type = other DNA
tctgggtagaggctatgttctgtagatacagcaccttgaccacatgccag

SEQ ID NO: 39693 - DNA, 50 bp, synthetic construct
  source 1..50: mol_type = other DNA
agtttccagccaagcgcattacagttatcacggtcaatttggccccggcg

SEQ ID NO: 39694 - DNA, 50 bp, synthetic construct
  source 1..50: mol_type = other DNA
aaccatctataaaaatttcattttaaagaaagaagccatttaagatgact

SEQ ID NO: 39695 - DNA, 50 bp, synthetic construct
  source 1..50: mol_type = other DNA
ttgagcagcgtacatggctcccagcgtcgataatcatcaacgactctcaa

SEQ ID NO: 39696 - DNA, 50 bp, synthetic construct
  source 1..50: mol_type = other DNA
acgatttcattcctgaaaacaagaaaaattgttttaaaaattaaaaaata

SEQ ID NO: 39697 - DNA, 50 bp, synthetic construct
  source 1..50: mol_type = other DNA
acatcatcgaataaagtaaaggtgcggctcttttggttatttcccatcgt

SEQ ID NO: 39698 - DNA, 50 bp, synthetic construct
  source 1..50: mol_type = other DNA
gctccataccacaaataatgatatttatatcaaacaacgtgagaggggcg

SEQ ID NO: 39699 - DNA, 50 bp, synthetic construct
  source 1..50: mol_type = other DNA
ccaaaaaataatgaacataaaggtgtagagataagttcagttgctgcgcc

SEQ ID NO: 39700 - DNA, 50 bp, synthetic construct
  source 1..50: mol_type = other DNA
tacgtgaacaagattatgaagttttcacagaaaataatctctacaatgta

SEQ ID NO: 39701 - DNA, 50 bp, synthetic construct
  source 1..50: mol_type = other DNA
ctctccaacacaatgcacaactggcgaaagttcccagttttggacgggag

SEQ ID NO: 39702 - DNA, 50 bp, synthetic construct
  source 1..50: mol_type = other DNA
aagtttgtaggggaaacaatctgttacaggaatggttaacgatcatatga

SEQ ID NO: 39703 - DNA, 50 bp, synthetic construct
  source 1..50: mol_type = other DNA
agatcccgaaggccaagggcggcacgtcaagcggcatctcgcggcgatcg

SEQ ID NO: 39704 - DNA, 50 bp, synthetic construct
  source 1..50: mol_type = other DNA
cttctaaaccaggcggtaccgactttagtaagtatcgtaaattataaaaa

SEQ ID NO: 39705 - DNA, 50 bp, synthetic construct
  source 1..50: mol_type = other DNA
gacacgccggcggtattcgcagtaccgatggcgttgacggccgtgatgac

SEQ ID NO: 39706 - DNA, 50 bp, synthetic construct
  source 1..50: mol_type = other DNA
ggacgcagcccggagggccgacggcgttcaaggcccgccggaccgcttcc

SEQ ID NO: 39707 - DNA, 50 bp, synthetic construct
  source 1..50: mol_type = other DNA
ctagtaaaagggctaatcacagaagattacagccttagcctgtggaccgt

SEQ ID NO: 39708 - DNA, 50 bp, synthetic construct
  source 1..50: mol_type = other DNA
gccattgcggctgtgcgggttcaagtcagaagccttgtaagccaaatgct

SEQ ID NO: 39709 - DNA, 50 bp, synthetic construct
  source 1..50: mol_type = other DNA
gcccaaggctatcgtaaaagtaccttctgccgcatcctgctgccacccga

SEQ ID NO: 39710 - DNA, 50 bp, synthetic construct
  source 1..50: mol_type = other DNA
gtaccctcctatgcatacagtcgaaatcgcacctatgcatacaacggagc

SEQ ID NO: 39711 - DNA, 50 bp, synthetic construct
  source 1..50: mol_type = other DNA
tccagattacttttgttaccaattatctttgccaccaaaccatatagtaa

SEQ ID NO: 39712 - DNA, 50 bp, synthetic construct
  source 1..50: mol_type = other DNA
tatttgtgatatagaacaaatgtagtggattcatggcattatgccaaatt

SEQ ID NO: 39713 - DNA, 50 bp, synthetic construct
  source 1..50: mol_type = other DNA
atatcggttttatgtccgacacccattggtgttacccataagccacctat

SEQ ID NO: 39714 - DNA, 50 bp, synthetic construct
  source 1..50: mol_type = other DNA
caaaaggggtacaatcgtaccccttaatgcttagtgctattccaattgca

SEQ ID NO: 39715 - DNA, 50 bp, synthetic construct
  source 1..50: mol_type = other DNA
tgcagagggaaataaacagtttgatgcctttttcattattgtattctaat

SEQ ID NO: 39716 - DNA, 50 bp, synthetic construct
  source 1..50: mol_type = other DNA
agcaggcggcagtcatcgaactgtgcatcgatcaccgactgcatcaacag

SEQ ID NO: 39717 - DNA, 50 bp, synthetic construct
  source 1..50: mol_type = other DNA
gctggccctgctgatgttcgcgttgactcacgcggatcagaagctgcaca

SEQ ID NO: 39718 - DNA, 50 bp, synthetic construct
  source 1..50: mol_type = other DNA
gttttgaatctgcgccagcagttgatcacttcctcccgtcgattccccac

SEQ ID NO: 39719 - DNA, 50 bp, synthetic construct
  source 1..50: mol_type = other DNA
ttattttttttggaaggaatggaaatgccctggagttccagaccaaaggc

SEQ ID NO: 39720 - DNA, 50 bp, synthetic construct
  source 1..50: mol_type = other DNA
tcatcatcacgcccttgctgacgctagctgatgcggaggcttgtgcttgg

SEQ ID NO: 39721 - DNA, 50 bp, synthetic construct
  source 1..50: mol_type = other DNA
ccccgtgccggcgccgacttcgagaactcggcttcggtgacgcccggggg

SEQ ID NO: 39722 - DNA, 50 bp, synthetic construct
  source 1..50: mol_type = other DNA
aagctcctaaaaaggagcttttgtgattcgaaccctcactgtcggagccg

SEQ ID NO: 39723 - DNA, 50 bp, synthetic construct
  source 1..50: mol_type = other DNA
ataaacgaccagaatttcaaaggctcgccgcaacctttctggctttttat

SEQ ID NO: 39724 - DNA, 50 bp, synthetic construct
  source 1..50: mol_type = other DNA
ctggatacgccgaaaagcgctcttatacgccgaaaagcgctcttttccat

SEQ ID NO: 39725 - DNA, 50 bp, synthetic construct
  source 1..50: mol_type = other DNA
ggttacttgcatttgtccgggctttgcccgatggtataatgcacgatacc

SEQ ID NO: 39726 - DNA, 50 bp, synthetic construct
  source 1..50: mol_type = other DNA
tagcggcaaagccgtcgaagccgcctggaactccgacgcgatggccgcgc

SEQ ID NO: 39727 - DNA, 50 bp, synthetic construct
  source 1..50: mol_type = other DNA
taagccgctcaaccgacgggccaacgcaggcttgcccccctggggcttta

SEQ ID NO: 39728 - DNA, 50 bp, synthetic construct
  source 1..50: mol_type = other DNA
cttccgccaccaacaagcgcaacatctgaaatcgtatgatgaggtgaacg

SEQ ID NO: 39729 - DNA, 50 bp, synthetic construct
  source 1..50: mol_type = other DNA
ccctaccgtggttgcgagcatggttgcatctactgctatgcgcggcccag

SEQ ID NO: 39730 - DNA, 50 bp, synthetic construct
  source 1..50: mol_type = other DNA
gttgcacccggcaaggtcggtatgcagatcgtcggactgccggacaaggc

SEQ ID NO: 39731 - DNA, 50 bp, synthetic construct
  source 1..50: mol_type = other DNA
cggtgctgatcaagtcgtccatatttatacgacagacttgatcaagtccg

SEQ ID NO: 39732 - DNA, 50 bp, synthetic construct
  source 1..50: mol_type = other DNA
tccagacgtttacccgcacgttgtagatatcagagcccgccctgtgcggg

SEQ ID NO: 39733 - DNA, 50 bp, synthetic construct
  source 1..50: mol_type = other DNA
tatttgcgatgctcgctgaaggccgcctgcatcagcaggcaagccagtgt

SEQ ID NO: 39734 - DNA, 50 bp, synthetic construct
  source 1..50: mol_type = other DNA
ggcgacgccagttcggcgaaggcgtcgagacccaccggcccggcggtacc

SEQ ID NO: 39735 - DNA, 50 bp, synthetic construct
  source 1..50: mol_type = other DNA
ttgacgttcttgaaaagaaaatttatggtttttcgttaaaatcaatgaaa

SEQ ID NO: 39736 - DNA, 50 bp, synthetic construct
  source 1..50: mol_type = other DNA
tgaccaggacgctacccgtccaaccgccgcgacgccgaccgcggccatca

SEQ ID NO: 39737 - DNA, 50 bp, synthetic construct
  source 1..50: mol_type = other DNA
acgttcgcagcgcggcagaaacggccccgcatctgcggtgcatcgaacgg

SEQ ID NO: 39738 - DNA, 50 bp, synthetic construct
  source 1..50: mol_type = other DNA
ggcgtgacggtggacgaggcgatcgaagtaagcgacgacacgatcacgat

SEQ ID NO: 39739 - DNA, 50 bp, synthetic construct
  source 1..50: mol_type = other DNA
gggtcgtgggtgcaggctggcgacgcctcgtggccctgcaccagattgtt

SEQ ID NO: 39740 - DNA, 50 bp, synthetic construct
  source 1..50: mol_type = other DNA
gaatatgatgttatcgcctgtatgaaagtaaagtaactaatatgatatta

SEQ ID NO: 39741 - DNA, 50 bp, synthetic construct
  source 1..50: mol_type = other DNA
ctcgacgacgtcgccgcagttctggccagaccattgtggtgctcttcgag

SEQ ID NO: 39742 - DNA, 50 bp, synthetic construct
  source 1..50: mol_type = other DNA
ggcgggggcaccaattgcgcttatatttatcctctgcggtgcaccagcct

SEQ ID NO: 39743 - DNA, 50 bp, synthetic construct
  source 1..50: mol_type = other DNA
atatttatgatcaattataattaatattaactatcttgaacgaagcgccc

SEQ ID NO: 39744 - DNA, 50 bp, synthetic construct
  source 1..50: mol_type = other DNA
cggggccaaattgaccgtggtttagtagtactgtaatgcgcttggctgga

SEQ ID NO: 39745 - DNA, 50 bp, synthetic construct
  source 1..50: mol_type = other DNA
tccctatctctccgccaatttgatatccttatctgcccgccacatttaga

SEQ ID NO: 39746 - DNA, 50 bp, synthetic construct
  source 1..50: mol_type = other DNA
ttcgagttcccgagcaaacacatcaccgtcaatctggcccccgccgatct

SEQ ID NO: 39747 - DNA, 50 bp, synthetic construct
  source 1..50: mol_type = other DNA
ttagaaatgtaggttactaaaattataaaatttgttcgatacaaggaagt

SEQ ID NO: 39748 - DNA, 50 bp, synthetic construct
  source 1..50: mol_type = other DNA
gctgcaccccgcagcaagcacgataagttgttgattttttggggggctgc

SEQ ID NO: 39749 - DNA, 50 bp, synthetic construct
  source 1..50: mol_type = other DNA
tacattggtggaaatgtaggttactactatccttgattgagatgttagta

SEQ ID NO: 39750 - DNA, 50 bp, synthetic construct
  source 1..50: mol_type = other DNA
ttaaggaaattgatgacttaaataaagcgataagtcgtcactggttcaac

SEQ ID NO: 39751 - DNA, 50 bp, synthetic construct
  source 1..50: mol_type = other DNA
cctaataataactatgagtaactttgtcgtttttggtagtatttgtaaaa

SEQ ID NO: 39752 - DNA, 50 bp, synthetic construct
  source 1..50: mol_type = other DNA
atgcattaatgaagatgaatcctaaatcaccttcactttcgataatgctg

SEQ ID NO: 39753 - DNA, 50 bp, synthetic construct
  source 1..50: mol_type = other DNA
gacgaccacttctatcgcaatatcatcatgcagcgaaacatgtggtatcg

SEQ ID NO: 39754 - DNA, 50 bp, synthetic construct
  source 1..50: mol_type = other DNA
aagaccatcaagatacaatctaaagatatagatgtcagcactatccgctt

SEQ ID NO: 39755 - DNA, 50 bp, synthetic construct
  source 1..50: mol_type = other DNA
gctgagttcagtgataaagcaataaataacattttatcacctttttttac

SEQ ID NO: 39756 - DNA, 50 bp, synthetic construct
  source 1..50: mol_type = other DNA
gtggtcgcggtcgacagcattcgccctcgatcgtgcgcgacctcggcgtc

SEQ ID NO: 39757 - DNA, 50 bp, synthetic construct
  source 1..50: mol_type = other DNA
acaatcagaccaatcggactattcagtgctagtccaattacggcgattgc

SEQ ID NO: 39758 - DNA, 50 bp, synthetic construct
  source 1..50: mol_type = other DNA
ccagaggggaacccttttttgtcgaaccacagcaaatattcttcaggcaa

SEQ ID NO: 39759 - DNA, 50 bp, synthetic construct
  source 1..50: mol_type = other DNA
gtcgtttcaggtagccccaccaatgtaaacccaggcataccgttgcttat

SEQ ID NO: 39760 - DNA, 50 bp, synthetic construct
  source 1..50: mol_type = other DNA
gcacgtagttaaagtactatacagataagcatgttactaaggttctttac

SEQ ID NO: 39761 - DNA, 50 bp, synthetic construct
  source 1..50: mol_type = other DNA
gataagtgtcccaatccgtcccgttgtactgacgaactggctcacatgga

SEQ ID NO: 39762 - DNA, 50 bp, synthetic construct
  source 1..50: mol_type = other DNA
gcgcgcaaatgcatcaggatttcgttttccacacacttggaggcataagc

SEQ ID NO: 39763 - DNA, 50 bp, synthetic construct
  source 1..50: mol_type = other DNA
ctccaaatggggctaaacacttagtactaattatactgccccaaatcctg

SEQ ID NO: 39764 - DNA, 50 bp, synthetic construct
  source 1..50: mol_type = other DNA
tgccgataagggcaacgccgccgccctggcttttcgcgcccggattgtcg

SEQ ID NO: 39765 - DNA, 50 bp, synthetic construct
  source 1..50: mol_type = other DNA
gatcagttttgtcagacggtgcatgttgagacggtagtactgctttccca

SEQ ID NO: 39766 - DNA, 50 bp, synthetic construct
  source 1..50: mol_type = other DNA
gcctccaagtgtgtggaaaatgctatagcaaacgaaatcctgatgcattt

SEQ ID NO: 39767 - DNA, 50 bp, synthetic construct
  source 1..50: mol_type = other DNA
cgcccggttccgcgatgtcgttgccggtttttacgtcagggaaccgcccc

SEQ ID NO: 39768 - DNA, 50 bp, synthetic construct
  source 1..50: mol_type = other DNA
ctcgccaacggcctgccgtcgttctcgatcgtcggcctgcccgatctcga

SEQ ID NO: 39769 - DNA, 50 bp, synthetic construct
  source 1..50: mol_type = other DNA
gttctggcctgggaaaagccaatcgtgatttgctttatcactgccagaaa

SEQ ID NO: 39770 - DNA, 50 bp, synthetic construct
  source 1..50: mol_type = other DNA
ttgcaaggacagaggtagagactccggcgtcataccgatgccagccgctt

SEQ ID NO: 39771 - DNA, 50 bp, synthetic construct
  source 1..50: mol_type = other DNA
aaatatgattaaatcaacataaataaatgaatgtccatttaaaagtagag

SEQ ID NO: 39772 - DNA, 50 bp, synthetic construct
  source 1..50: mol_type = other DNA
cttaatgactatcttaaggcattgttcaaaacggtagggctgtaattaat

SEQ ID NO: 39773 - DNA, 50 bp, synthetic construct
  source 1..50: mol_type = other DNA
aatctatacgatgatccatttcagcaatgaaatggagaaaagtatgctgt

SEQ ID NO: 39774 - DNA, 50 bp, synthetic construct
  source 1..50: mol_type = other DNA
ctgggctgcccaaacaatcaaaaaatcattagggtgcccgaaaaacctgg

SEQ ID NO: 39775 - DNA, 50 bp, synthetic construct
  source 1..50: mol_type = other DNA
tatttatgaccaaatttcttattttaaatttagaaagcccttcatcaata

SEQ ID NO: 39776 - DNA, 50 bp, synthetic construct
  source 1..50: mol_type = other DNA
caaaacattgcatcagtcatcaaaataggtttgactttttttatgttttc

SEQ ID NO: 39777 - DNA, 50 bp, synthetic construct
  source 1..50: mol_type = other DNA
cgcgttcgcggcaggcggcggtatcgatagctgcacctgccatcgcggcg

SEQ ID NO: 39778 - DNA, 50 bp, synthetic construct
  source 1..50: mol_type = other DNA
attccttctttagaaggtgttatctcattatcatcatcatctgttaactt

SEQ ID NO: 39779 - DNA, 50 bp, synthetic construct
  source 1..50: mol_type = other DNA
ccgattgtggcggcggttgtggcgttcttcacaacgaccgtctttgaaat

SEQ ID NO: 39780 - DNA, 50 bp, synthetic construct
  source 1..50: mol_type = other DNA
acacgtgcatatccggcaacccgacgtttatcgacaggcagtcgatctgt

SEQ ID NO: 39781 - DNA, 50 bp, synthetic construct
  source 1..50: mol_type = other DNA
tttacgttcagcttttgcatgacattagaaatatggttgcggacggtctt

SEQ ID NO: 39782 - DNA, 50 bp, synthetic construct
  source 1..50: mol_type = other DNA
gctgctggcggtataatgaaactgtcaaggttcagaatacaaatggcggc

SEQ ID NO: 39783 - DNA, 50 bp, synthetic construct
  source 1..50: mol_type = other DNA
caggcgcattcaatgcgaccaaccgcggcccagtccgaggactgctgcgc

SEQ ID NO: 39784 - DNA, 50 bp, synthetic construct
  source 1..50: mol_type = other DNA
acagttacctgcgcttctccgatccgaagccgacatgggcagcaccatga

SEQ ID NO: 39785 - DNA, 50 bp, synthetic construct
  source 1..50: mol_type = other DNA
ttttatacggttttacatgaatttattgatcacaaataaactaaataata

SEQ ID NO: 39786 - DNA, 50 bp, synthetic construct
  source 1..50: mol_type = other DNA
agttgtggtactgtgtgtggtgataattgacaaaagaaagaacaaagact

SEQ ID NO: 39787 - DNA, 50 bp, synthetic construct
  source 1..50: mol_type = other DNA
aattcaagaatattattgaaaagattcattttctattgcgatcatgttag

SEQ ID NO: 39788 - DNA, 50 bp, synthetic construct
  source 1..50: mol_type = other DNA
agtcccctgcttgcgctcgtgaaggcctgcagaagcgcctgaagggccgc

SEQ ID NO: 39789 - DNA, 50 bp, synthetic construct
  source 1..50: mol_type = other DNA
cccagcagcagccgatcgttgggtcgacgcaccgctcggcggctagtttt

SEQ ID NO: 39790 - DNA, 50 bp, synthetic construct
  source 1..50: mol_type = other DNA
gagcagctcaaggccttcgtcatccatggatcttcagccgttcaaaactc

SEQ ID NO: 39791 - DNA, 50 bp, synthetic construct
  source 1..50: mol_type = other DNA
gtcactcaagtgcatcggactgagcgcagagcgcgttcggcggcattgtt

SEQ ID NO: 39792 - DNA, 50 bp, synthetic construct
  source 1..50: mol_type = other DNA
cgcaggttcccgtcgatacattatgcgatctatttagcccagaacgtgaa

SEQ ID NO: 39793 - DNA, 50 bp, synthetic construct
  source 1..50: mol_type = other DNA
gtgcgtccttcgatggtaaccggccgggcggttaccttcgatgcgaagac

SEQ ID NO: 39794 - DNA, 50 bp, synthetic construct
  source 1..50: mol_type = other DNA
ctcttcgggtgcgccacttccgtacatctcgtccggcgcgccatttcctt

SEQ ID NO: 39795 - DNA, 50 bp, synthetic construct
  source 1..50: mol_type = other DNA
ctttctagaacgaaattgatccagagctatcatatgtttgtttagaaaag

SEQ ID NO: 39796 - DNA, 50 bp, synthetic construct
  source 1..50: mol_type = other DNA
atgttctgtagagaacctttattctagaaccttgaccacatgccagccaa

SEQ ID NO: 39797 - DNA, 50 bp, synthetic construct
  source 1..50: mol_type = other DNA
ttttcttgggtaatagctctggctgagtattcttgtcaggttccggccaa

SEQ ID NO: 39798 - DNA, 50 bp, synthetic construct
  source 1..50: mol_type = other DNA
agtggtttctgtgcgcagttgatggtgtacttgattgacggaaacccaag

SEQ ID NO: 39799 - DNA, 50 bp, synthetic construct
  source 1..50: mol_type = other DNA
atacttatcgaccacttattgtgtgagttgaaagcaggtcagtcggcgat

SEQ ID NO: 39800 - DNA, 50 bp, synthetic construct
  source 1..50: mol_type = other DNA
ccagccggtggatctatttcctcaaataaagaaaacaacgcacgtcgaga

SEQ ID NO: 39801 - DNA, 50 bp, synthetic construct
  source 1..50: mol_type = other DNA
tgtttcttttaatttgataaattggctacttttgctaaacatacgaaaca

SEQ ID NO: 39802 - DNA, 50 bp, synthetic construct
  source 1..50: mol_type = other DNA
gatcctgacccctctcatgtcaagctattatgacacgaaaccccatggtt

SEQ ID NO: 39803 - DNA, 50 bp, synthetic construct
  source 1..50: mol_type = other DNA
gaaggataaaatgacaaaaacaacagtgtcttgcattcaatttttaaatc

SEQ ID NO: 39804 - DNA, 50 bp, synthetic construct
  source 1..50: mol_type = other DNA
ccctctttgcgtccaacgagaggaaattaaagcgaagttagcggagaggg

SEQ ID NO: 39805 - DNA, 50 bp, synthetic construct
  source 1..50: mol_type = other DNA
catataaatccaaaataatctaccaaaagagatacggttatttttacata

SEQ ID NO: 39806 - DNA, 50 bp, synthetic construct
  source 1..50: mol_type = other DNA
ggtggcgcagtacaacgtgaaggctggcacggtacaacgtgaaagccacc

SEQ ID NO: 39807 - DNA, 50 bp, synthetic construct
  source 1..50: mol_type = other DNA
cttggtcgcaggttcgaatcctgccggattcacgtaggagcaccacaaga

SEQ ID NO: 39808 - DNA, 50 bp, synthetic construct
  source 1..50: mol_type = other DNA
gcgccaagggccgcgctggcgccgagccccgccagcgccacctgcaccgt

SEQ ID NO: 39809 - DNA, 50 bp, synthetic construct
  source 1..50: mol_type = other DNA
cgcatcatttatgatacgcttccccttcaccgcgcataattttaaacgca

SEQ ID NO: 39810 - DNA, 50 bp, synthetic construct
  source 1..50: mol_type = other DNA
agaattcctgacatatcaaatacacttttatatattaggtgtagacttct

SEQ ID NO: 39811 - DNA, 50 bp, synthetic construct
  source 1..50: mol_type = other DNA
ctcccttccgaattatcgcataaatatttaaaaactaattctgacaattt

SEQ ID NO: 39812 - DNA, 50 bp, synthetic construct
  source 1..50: mol_type = other DNA
tattctatagcatttactttgacattatttcaagcaaagtatttcatact

SEQ ID NO: 39813 - DNA, 50 bp, synthetic construct
  source 1..50: mol_type = other DNA
gttattaaatctaatcataaaaatatatctttaatatccagtttttttgc

SEQ ID NO: 39814 - DNA, 50 bp, synthetic construct
  source 1..50: mol_type = other DNA
gtgtctgataaatgcagttcttgcggcaaagaagaacaattaaatattac

SEQ ID NO: 39815 - DNA, 50 bp, synthetic construct
  source 1..50: mol_type = other DNA
tttgagggataatttgacaaccgtttgtatcaacacaatagtctccacat

SEQ ID NO: 39816 - DNA, 50 bp, synthetic construct
  source 1..50: mol_type = other DNA
tggaattgtataacataagatagaattgtattagctgtcttactattcct

SEQ ID NO: 39817 - DNA, 50 bp, synthetic construct
  source 1..50: mol_type = other DNA
gcaaaaagcagattttgctctggtatgacaatgcaaaatatgaacattat

SEQ ID NO: 39818 - DNA, 50 bp, synthetic construct
  source 1..50: mol_type = other DNA
tcattttttattttgggatgttctttgcaagatcagtaaataaccaagca

SEQ ID NO: 39819 - DNA, 50 bp, synthetic construct
  source 1..50: mol_type = other DNA
atttcattcatattttttcatcctttgaaacaacaaaatattgaaccaac

SEQ ID NO: 39820 - DNA, 50 bp, synthetic construct
  source 1..50: mol_type = other DNA
ggtaaaagtgataaaaatgaaacgaaaattttatcaatatattattttag

SEQ ID NO: 39821 - DNA, 50 bp, synthetic construct
  source 1..50: mol_type = other DNA
ttattgcactaataccgttctcggcgcgcggcgctgcagaactgcagctt

SEQ ID NO: 39822 - DNA, 50 bp, synthetic construct
  source 1..50: mol_type = other DNA
gccagcatatacattatatactgcattaggtatatagaatatgggcgtat

SEQ ID NO: 39823 - DNA, 50 bp, synthetic construct
  source 1..50: mol_type = other DNA
accggcctgactttgggggtggtggcgcggcccaagcagatcagccctta

SEQ ID NO: 39824 - DNA, 50 bp, synthetic construct
  source 1..50: mol_type = other DNA
ggcgccgacgccgacgcccgcgccgcggcgctggacgcggcgctggccgg

SEQ ID NO: 39825 - DNA, 50 bp, synthetic construct
  source 1..50: mol_type = other DNA
agtcgatgagcgagtggtagaaaccggtatccaccacaagggcatcacca

SEQ ID NO: 39826 - DNA, 50 bp, synthetic construct
  source 1..50: mol_type = other DNA
ccttgaaggcgccaaggaagggcttgtgtattttcccggcgctaccctgc

SEQ ID NO: 39827 - DNA, 50 bp, synthetic construct
  source 1..50: mol_type = other DNA
gagcgcctgacccgcgatggtgaagaagaccatatccatctgtctcatac

SEQ ID NO: 39828 - DNA, 50 bp, synthetic construct
  source 1..50: mol_type = other DNA
agcttcttccagcgtactatagaatattttactttacgctgcttccagcg

SEQ ID NO: 39829 - DNA, 50 bp, synthetic construct
  source 1..50: mol_type = other DNA
agtagcaccactacaaatagacgatgtctatgtagggttactcgaagttg

SEQ ID NO: 39830 - DNA, 50 bp, synthetic construct
  source 1..50: mol_type = other DNA
atttctatagggacaattggtttaatgatatgaaggctattaccttaaat

SEQ ID NO: 39831 - DNA, 50 bp, synthetic construct
  source 1..50: mol_type = other DNA
tataccaaaattattcagtcttgttaccattataatatacttttaattct

SEQ ID NO: 39832 - DNA, 50 bp, synthetic construct
  source 1..50: mol_type = other DNA
gcaaagtatcatagtcgaatactcacaaatactcggctcttgtaacggga

SEQ ID NO: 39833 - DNA, 50 bp, synthetic construct
  source 1..50: mol_type = other DNA
tactgccatgacaatattgaatgtataatagcaagtgtttcagggcatta

SEQ ID NO: 39834 - DNA, 50 bp, synthetic construct
  source 1..50: mol_type = other DNA
ggcaacagcttgccggcggccatcaggatggccgccagctctgggtcgcc

SEQ ID NO: 39835 - DNA, 50 bp, synthetic construct
  source 1..50: mol_type = other DNA
aatgcggtgctgatcaagtcgtacagaccggacttgatcaagtccgcgca

SEQ ID NO: 39836 - DNA, 50 bp, synthetic construct
  source 1..50: mol_type = other DNA
tgagaggaagcctttatgacagcttccgctgttagtaacactttttgcat

SEQ ID NO: 39837 - DNA, 50 bp, synthetic construct
  source 1..50: mol_type = other DNA
tgcacccccaaagaccattttttatagtaaaaaatatttttggaggttta

SEQ ID NO: 39838 - DNA, 50 bp, synthetic construct
  source 1..50: mol_type = other DNA
cagtttctgcatcgtatttgcaatacaccacatttgatatgtggttccgc

SEQ ID NO: 39839 - DNA, 50 bp, synthetic construct
  source 1..50: mol_type = other DNA
acggcatgtcaaccgtggagtacgcgactacgccatcgggacgattgccg

SEQ ID NO: 39840 - DNA, 50 bp, synthetic construct
  source 1..50: mol_type = other DNA
ttattgaagataaactctttattgtccgataaagaatatgtattctatag

SEQ ID NO: 39841 - DNA, 50 bp, synthetic construct
  source 1..50: mol_type = other DNA
gatactctctcgctttagctgtttcgaaacagccaatacgacaggcttgc

SEQ ID NO: 39842 - DNA, 50 bp, synthetic construct
  source 1..50: mol_type = other DNA
aatagcccgaaatgaatacataaaaagttaaagcaacaactggggcttaa

SEQ ID NO: 39843 - DNA, 50 bp, synthetic construct
  source 1..50: mol_type = other DNA
cttgctcggcgtcaagcgcgacttgaaagcgcggtcattcgccgcgccag

SEQ ID NO: 39844 - DNA, 50 bp, synthetic construct
  source 1..50: mol_type = other DNA
caaacgaaggtgatttttttgttaaataaaaaagaaattttattcaactt

SEQ ID NO: 39845 - DNA, 50 bp, synthetic construct
  source 1..50: mol_type = other DNA
ggcgggccgggcaatgcggtgctgatcaagtccggccatccctggctgga

SEQ ID NO: 39846 - DNA, 50 bp, synthetic construct
  source 1..50: mol_type = other DNA
attctgatgcaggccgccggcatcagctctcctccgaactgcaggaagat

SEQ ID NO: 39847 - DNA, 50 bp, synthetic construct
  source 1..50: mol_type = other DNA
tttaaaatgaaaaaaatgatgacatttatcaagtgtttttccatttccaa

SEQ ID NO: 39848 - DNA, 50 bp, synthetic construct
  source 1..50: mol_type = other DNA
tttacatagaaaatgataaatttgatcttttgaaaagtttttcttgtaat

SEQ ID NO: 39849 - DNA, 50 bp, synthetic construct
  source 1..50: mol_type = other DNA
gcagacgcatcatgtggagtgcatagacccatcacgtcgagtgcgtagtg

SEQ ID NO: 39850 - DNA, 50 bp, synthetic construct
  source 1..50: mol_type = other DNA
aataattgaccaaagcgaccaacatcccttgggttagaagaccagcagag

SEQ ID NO: 39851 - DNA, 50 bp, synthetic construct
  source 1..50: mol_type = other DNA
acattacagttattccagccaagaaaatttacctgccataactgtaacca

SEQ ID NO: 39852 - DNA, 50 bp, synthetic construct
  source 1..50: mol_type = other DNA
acaaaatcgttacttgcaacggtgtacaccgatgcttatgacaaccaata

SEQ ID NO: 39853 - DNA, 50 bp, synthetic construct
  source 1..50: mol_type = other DNA
ccttgccacatggatagggtaatttaaattaccctagccacatggaatgg

SEQ ID NO: 39854 - DNA, 50 bp, synthetic construct
  source 1..50: mol_type = other DNA
cgatatgaaaccgacaaagagacctatttttgtcaagtctttttattcga

SEQ ID NO: 39855 - DNA, 50 bp, synthetic construct
  source 1..50: mol_type = other DNA
cgattctctacgatcatgtggacgatcgcgtccctgctcgtcatgccgga

SEQ ID NO: 39856 - DNA, 50 bp, synthetic construct
  source 1..50: mol_type = other DNA
gccaggttcgcatgattgagttgctgttggcgtttgcctggcgactcggc

SEQ ID NO: 39857 - DNA, 50 bp, synthetic construct
  source 1..50: mol_type = other DNA
tccagcatctcctagatgacccgaactcagcacagacggtcgaggaaatc

SEQ ID NO: 39858 - DNA, 50 bp, synthetic construct
  source 1..50: mol_type = other DNA
gcttatgatttcctctattttcatagcaacttcaagaggaactcataaga

SEQ ID NO: 39859 - DNA, 50 bp, synthetic construct
  source 1..50: mol_type = other DNA
tccttggcttcgttgagcgacgcgtcaggcaggcccaggatgacaaaggc

SEQ ID NO: 39860 - DNA, 50 bp, synthetic construct
  source 1..50: mol_type = other DNA
atatatagatatagctattatcatctctgatattagccatatctgtcgcc

SEQ ID NO: 39861 - DNA, 50 bp, synthetic construct
  source 1..50: mol_type = other DNA
cttaaaggaaccgacctgctcctcatagttgtactcattggtgtagtaat

SEQ ID NO: 39862 - DNA, 50 bp, synthetic construct
  source 1..50: mol_type = other DNA
ttaaatacactacctaaagcgatacaggtatgttctcatagtgtatttag

SEQ ID NO: 39863 - DNA, 50 bp, synthetic construct
  source 1..50: mol_type = other DNA
tagagcgatactgtaataacaaaaaatttagttatgacattattatctcg

SEQ ID NO: 39864 - DNA, 50 bp, synthetic construct
  source 1..50: mol_type = other DNA
cggttttatccggttggccttttcacgttatggctaatgctacaatgccg

SEQ ID NO: 39865 - DNA, 50 bp, synthetic construct
  source 1..50: mol_type = other DNA
agttgccataaatcgcatcttgcagttgtcttttgccaactgtggcttgc

SEQ ID NO: 39866 - DNA, 50 bp, synthetic construct
  source 1..50: mol_type = other DNA
gtaccaggaggaccaaggaaaaggaatagtaggttgtggtttccagccgc

SEQ ID NO: 39867 - DNA, 50 bp, synthetic construct
  source 1..50: mol_type = other DNA
tatagtggcgggctacatgggacgatcgacactatatggcggagagatag

SEQ ID NO: 39868 - DNA, 50 bp, synthetic construct
  source 1..50: mol_type = other DNA
tatctttgacctttttcgtatggttgaccatctgctgcaggtgctgttgt

SEQ ID NO: 39869 - DNA, 50 bp, synthetic construct
  source 1..50: mol_type = other DNA
acaggttgggcgaaaaccgattgttaactatatgttttgggttgggcgat

SEQ ID NO: 39870 - DNA, 50 bp, synthetic construct
  source 1..50: mol_type = other DNA
aactttttaggcaaatgatgcttgaaaaagtatcagaactttaccaagcc

SEQ ID NO: 39871 - DNA, 50 bp, synthetic construct
  source 1..50: mol_type = other DNA
gatatcctggtcaacttactcaaatattagattaaaatggagctgaaatg

SEQ ID NO: 39872 - DNA, 50 bp, synthetic construct
  source 1..50: mol_type = other DNA
acctgggactcgtagtggtttcaaatttaaaaccactaggaactcctggt

SEQ ID NO: 39873 - DNA, 50 bp, synthetic construct
  source 1..50: mol_type = other DNA
aaaaaatatatggaattgttttagaagaagaacaattcttcaaatttttt

SEQ ID NO: 39874 - DNA, 50 bp, synthetic construct
  source 1..50: mol_type = other DNA
aaagtaaatgttagaaccgatattcaatttaacgttatgagcggtgcatt

SEQ ID NO: 39875 - DNA, 50 bp, synthetic construct
  source 1..50: mol_type = other DNA
aaagaagtggaaaaaagtgtcaacgggactatctttttttctggcccttt

SEQ ID NO: 39876 - DNA, 50 bp, synthetic construct
  source 1..50: mol_type = other DNA
ataattccttcagcaacttttggatgtatatgagcaggcttctcgatgcg

SEQ ID NO: 39877 - DNA, 50 bp, synthetic construct
  source 1..50: mol_type = other DNA
aagtaatagttatgtaaggcttcccgggaccaggcggatgggctactttt

SEQ ID NO: 39878 - DNA, 50 bp, synthetic construct
  source 1..50: mol_type = other DNA
accttattttgcatatttaccttttaataggttctaaaaaaaaatagaac

SEQ ID NO: 39879 - DNA, 50 bp, synthetic construct
  source 1..50: mol_type = other DNA
taatgacttgtccattatagttacttttaactgtaccggatgtgcagcag

SEQ ID NO: 39880 - DNA, 50 bp, synthetic construct
  source 1..50: mol_type = other DNA
aggaattattgggttaaaagcttgatgaaactttgctcataaaaaacata

SEQ ID NO: 39881 - DNA, 50 bp, synthetic construct
  source 1..50: mol_type = other DNA
cgtttctatcaatcaagtattatactattaagccaatcttaaacctttta

SEQ ID NO: 39882 - DNA, 50 bp, synthetic construct
  source 1..50: mol_type = other DNA
aatttatttaagctaaaattcttatatactaatttaagtctatattaaag

SEQ ID NO: 39883 - DNA, 50 bp, synthetic construct
  source 1..50: mol_type = other DNA
cctcagggcttttctttttaccgaaattactaaaaagaaatcgccttttt

SEQ ID NO: 39884 - DNA, 50 bp, synthetic construct
  source 1..50: mol_type = other DNA
ttaggagtgtccaacaaacaaaaatttttttgtttatttttagcgtctaa

SEQ ID NO: 39885 - DNA, 50 bp, synthetic construct
  source 1..50: mol_type = other DNA
attccctcaaacaagccatgtggaattccattcatgtggagagtgtaaca

SEQ ID NO: 39886 - DNA, 50 bp, synthetic construct
  source 1..50: mol_type = other DNA
gtgcgcctgcctgagatgccagccttcgctggcatgacgggatttgccag

SEQ ID NO: 39887 - DNA, 50 bp, synthetic construct
  source 1..50: mol_type = other DNA
acgtcgtgcaccccggaagcccaggaagtggcggagagggtgggattcga

SEQ ID NO: 39888 - DNA, 50 bp, synthetic construct
  source 1..50: mol_type = other DNA
catctcgacggcgagatccgcgacggcggccggcacttgccgtcgacttg

SEQ ID NO: 39889 - DNA, 50 bp, synthetic construct
  source 1..50: mol_type = other DNA
cgaattcgcggatcccgactttcttgggcccagagggactcgaacccccg

SEQ ID NO: 39890 - DNA, 50 bp, synthetic construct
  source 1..50: mol_type = other DNA
aaaacaaaacccccgactgaaattataacccaatacagccgttttgtaaa

SEQ ID NO: 39891 - DNA, 50 bp, synthetic construct
  source 1..50: mol_type = other DNA
gctggaacggcaaggtctttttcggagccaacagcagtatcgttcccagc

SEQ ID NO: 39892 - DNA, 50 bp, synthetic construct
  source 1..50: mol_type = other DNA
tgatacgggcagaccagcaccaggttggacaattcggtcacaccaccgtc

SEQ ID NO: 39893 - DNA, 50 bp, synthetic construct
  source 1..50: mol_type = other DNA
aactacaacagcatcaccttgacagtatcaaatacagtagtgtctatttg

SEQ ID NO: 39894 - DNA, 50 bp, synthetic construct
  source 1..50: mol_type = other DNA
ttcgaccccgcccctggccaccagagccaggtccaccggagcttcgtctc

SEQ ID NO: 39895 - DNA, 50 bp, synthetic construct
  source 1..50: mol_type = other DNA
cgtatcgcggccttgaagaacggcttcaaattccctccatcaaccatagc

SEQ ID NO: 39896 - DNA, 50 bp, synthetic construct
  source 1..50: mol_type = other DNA
aagggaagtatccaaacgcgccatctcagtccagtgaatgtcttgcatac

SEQ ID NO: 39897 - DNA, 50 bp, synthetic construct
  source 1..50: mol_type = other DNA
aggggaaagggggcgctgccttaccggttggggagggggcgctgccccct

SEQ ID NO: 39898 - DNA, 50 bp, synthetic construct
  source 1..50: mol_type = other DNA
gcgaagtagctggcgcagcacttcttgaatttctgcccgctggcgcaggg

SEQ ID NO: 39899 - DNA, 50 bp, synthetic construct
  source 1..50: mol_type = other DNA
taaacggtaatatcatagatacggttttctatgcttgatatcagttggcg

SEQ ID NO: 39900 - DNA, 50 bp, synthetic construct
  source 1..50: mol_type = other DNA
ggaaaaagaaaagccgcattttcagctggcggcctggtttttatttccat

SEQ ID NO: 39901 - DNA, 50 bp, synthetic construct
  source 1..50: mol_type = other DNA
ttttatagaagatctgtgtttggtttcctaaaaatggaactgctataaaa

SEQ ID NO: 39902 - DNA, 50 bp, synthetic construct
  source 1..50: mol_type = other DNA
gccgtgacctcaaaacaggcttcccaaaaatactgttttacggccaccgc

SEQ ID NO: 39903 - DNA, 50 bp, synthetic construct
  source 1..50: mol_type = other DNA
cagaggatttttgtcattcaatatcaatatttaaacggatagatgctgaa

SEQ ID NO: 39904 - DNA, 50 bp, synthetic construct
  source 1..50: mol_type = other DNA
cttttggggagccatgattgaatagatatagcatcatacctgcctcggca

SEQ ID NO: 39905 - DNA, 50 bp, synthetic construct
  source 1..50: mol_type = other DNA
atttcattcttaagggcatgggtagtttacaagaaatgcacgaattaaat

SEQ ID NO: 39906 - DNA, 50 bp, synthetic construct
  source 1..50: mol_type = other DNA
ttggcggcgatatgtgaaggtcgggtccggtcttcaccgatccggaccat

SEQ ID NO: 39907 - DNA, 50 bp, synthetic construct
  source 1..50: mol_type = other DNA
cacgcaggccgaccggatctgcgtcccgccagctcaggtcggccgacggc

SEQ ID NO: 39908 - DNA, 50 bp, synthetic construct
  source 1..50: mol_type = other DNA
ccagcagcgcgcggccgggctcgtcgccgcgcatttcggcgcgcggctgc

SEQ ID NO: 39909 - DNA, 50 bp, synthetic construct
  source 1..50: mol_type = other DNA
cgagctcgcgggcgaggcgctccttttggggaaggtcgccggcgcattca

SEQ ID NO: 39910 - DNA, 50 bp, synthetic construct
  source 1..50: mol_type = other DNA
gacggatcatccccagaagaaagacgaaccgctggtggagctgatcgagc

SEQ ID NO: 39911 - DNA, 50 bp, synthetic construct
  source 1..50: mol_type = other DNA
gcttggaacacaaagaaaagtgatgcattactaatcactgcctaggcagc

SEQ ID NO: 39912 - DNA, 50 bp, synthetic construct
  source 1..50: mol_type = other DNA
cgacgaggtcggtcagcatgtgcccgggaatcttcgcgccgacctgaatc

SEQ ID NO: 39913 - DNA, 50 bp, synthetic construct
  source 1..50: mol_type = other DNA
catccattggactgaaagcaaatgtacattggacagacggctcttttggt

SEQ ID NO: 39914 - DNA, 50 bp, synthetic construct
  source 1..50: mol_type = other DNA
accactaaggtttataaaagcatacgaatttgaatatattgggtcttgtg

SEQ ID NO: 39915 - DNA, 50 bp, synthetic construct
  source 1..50: mol_type = other DNA
taataacatcttatgagggtcagaattcaatacctaaaatgatgtgttta

SEQ ID NO: 39916 - DNA, 50 bp, synthetic construct
  source 1..50: mol_type = other DNA
agcatttaagattatgcgtggagaagcagaggcgtatcataagtaaaact

SEQ ID NO: 39917 - DNA, 50 bp, synthetic construct
  source 1..50: mol_type = other DNA
gaccgctcagagagcacatgaagaattctgtcggtgacatctgatcgctg

SEQ ID NO: 39918 - DNA, 50 bp, synthetic construct
  source 1..50: mol_type = other DNA
acgagggtattttgacggaagcagaaatgcttgttcgatgtccgactgtt

SEQ ID NO: 39919 - DNA, 50 bp, synthetic construct
  source 1..50: mol_type = other DNA
cgtgcaatgaaatattaagtttacccaaaaatttaattaaattttccatt

SEQ ID NO: 39920 - DNA, 50 bp, synthetic construct
  source 1..50: mol_type = other DNA
actccaccgttcaatgatgtgtaaagaacaacgtcaaaaaggcatggctg

SEQ ID NO: 39921 - DNA, 50 bp, synthetic construct
  source 1..50: mol_type = other DNA
gcaggggcctttttgccgccgggacgtcctgtcgggcctcaggcgtccag

SEQ ID NO: 39922 - DNA, 50 bp, synthetic construct
  source 1..50: mol_type = other DNA
aaatacaagctggctgccggtgttgtctctggcaagaccgctaagtcgat

SEQ ID NO: 39923 - DNA, 50 bp, synthetic construct
  source 1..50: mol_type = other DNA
tctgcttgacgtgcaggaggtcacagggcggctctgacgacgccagtcgg

SEQ ID NO: 39924 - DNA, 50 bp, synthetic construct
  source 1..50: mol_type = other DNA
ctgcgcgggcaggtgcaggttcttgaaaggagccgcctatggcagaacag

SEQ ID NO: 39925 - skipped

SEQ ID NO: 39926 - DNA, 50 bp, synthetic construct
  source 1..50: mol_type = other DNA
tacttcttataaaaatccattgcctttgctgttgctttttggccggtata

SEQ ID NO: 39927 - DNA, 50 bp, synthetic construct
  source 1..50: mol_type = other DNA
ttcatccgcatagatgtctactaactctactatcactctttgatgatgta

SEQ ID NO: 39928 - DNA, 50 bp, synthetic construct
  source 1..50: mol_type = other DNA
ttctattgtcgggttacggtgattttcattgatataaccccccaatagag

SEQ ID NO: 39929 - DNA, 50 bp, synthetic construct
  source 1..50: mol_type = other DNA
taattaatttcaatgatttcaagtctttttttaaaaattttcattgatat

SEQ ID NO: 39930 - DNA, 50 bp, synthetic construct
  source 1..50: mol_type = other DNA
agaaagtgcagaccagtattcttcatgcaggatattgaattgatattacc

SEQ ID NO: 39931 - DNA, 50 bp, synthetic construct
  source 1..50: mol_type = other DNA
taacgtggtttgcaatatattacgataatgacgctaagcaaacaacttaa

SEQ ID NO: 39932 - DNA, 50 bp, synthetic construct
  source 1..50: mol_type = other DNA
tttttaataaaaattttttgaatcgttatcggcaaaattttacccaaacg

SEQ ID NO: 39933 - DNA, 50 bp, synthetic construct
  source 1..50: mol_type = other DNA
tttctcccacttgccatcaagcaaattttcttcctgacctgatgaagaac

SEQ ID NO: 39934 - DNA, 50 bp, synthetic construct
  source 1..50: mol_type = other DNA
gtttggagataaactctctgtaataaataacaaatagctatttttcaaac

SEQ ID NO: 39935 - DNA, 50 bp, synthetic construct
  source 1..50: mol_type = other DNA
tctggtgttgcttttccaggtggggagggacatattgaagaaggcgagaa

SEQ ID NO: 39936 - DNA, 50 bp, synthetic construct
  source 1..50: mol_type = other DNA
tttgaaagtcctttctgtttttttataacaaatttagatactcttgtttc

SEQ ID NO: 39937 - DNA, 50 bp, synthetic construct
  source 1..50: mol_type = other DNA
caaaagtgctaccgtctccacgtgcgtttgaggaaatagatccaccggct

SEQ ID NO: 39938 - DNA, 50 bp, synthetic construct
  source 1..50: mol_type = other DNA
tacattgatggaaatgaaggttactactatccttgattgaaatgttggtg

SEQ ID NO: 39939 - DNA, 50 bp, synthetic construct
  source 1..50: mol_type = other DNA
cgtttctctaataaacttacacattcgacgtgatgcgtttgaggaaatag

SEQ ID NO: 39940 - DNA, 50 bp, synthetic construct
  source 1..50: mol_type = other DNA
actacgcactcgacgtgatgggtctgctaccgtctccacgtgatgcgtct

SEQ ID NO: 39941 - DNA, 50 bp, synthetic construct
  source 1..50: mol_type = other DNA
agatcctgcctgctttatgcaacgtcctctgccattatgccggaggatct

SEQ ID NO: 39942 - DNA, 50 bp, synthetic construct
  source 1..50: mol_type = other DNA
gtcatcccgaccagattatgacgtcgacgtcacaacacatatctgatggg

SEQ ID NO: 39943 - DNA, 50 bp, synthetic construct
  source 1..50: mol_type = other DNA
cttgattcattgcatgaggttcaatatggaaacgacaccaaccaaacgag

SEQ ID NO: 39944 - DNA, 50 bp, synthetic construct
  source 1..50: mol_type = other DNA
gtttaaacttcttattaacgactgatgagtcgttagggaggtccttatca

SEQ ID NO: 39945 - DNA, 50 bp, synthetic construct
  source 1..50: mol_type = other DNA
atctttaacttattttccgatgcaaaaaattaggctttaaagttagaaca

SEQ ID NO: 39946 - DNA, 50 bp, synthetic construct
  source 1..50: mol_type = other DNA
attccgacccattcaaacaggctcaatcatctgtttgaattacacgctgg

SEQ ID NO: 39947 - DNA, 50 bp, synthetic construct
  source 1..50: mol_type = other DNA
cggagacgaatcgagaaactaaaattgtttagtccctcgttttctctcgt

SEQ ID NO: 39948 - DNA, 50 bp, synthetic construct
  source 1..50: mol_type = other DNA
agaatacttcacaaaagctaaataagaattaaagagctggaaaataaaaa

SEQ ID NO: 39949 - DNA, 50 bp, synthetic construct
  source 1..50: mol_type = other DNA
aaagatcttcgtaattattcccgaattctttgatatgataattaattagt

SEQ ID NO: 39950 - DNA, 50 bp, synthetic construct
  source 1..50: mol_type = other DNA
aaatcctctcagaattcgatacagcggaagatcgaattctgaacgtctcg

SEQ ID NO: 39951 - DNA, 50 bp, synthetic construct
  source 1..50: mol_type = other DNA
agtgatattgataaattaaaaaactttttttgtattttgatcaactcatt

SEQ ID NO: 39952 - DNA, 50 bp, synthetic construct
  source 1..50: mol_type = other DNA
aggtaaatcaagggtcattgtatttgcatacaatagtcatcgaagtcata

SEQ ID NO: 39953 - DNA, 50 bp, synthetic construct
  source 1..50: mol_type = other DNA
ccatgacgaaaacttattttagatgattctaagacttcttttagaaaaca

SEQ ID NO: 39954 - DNA, 50 bp, synthetic construct
  source 1..50: mol_type = other DNA
taaaacggcatttctgctgataatacttcagaagacgaaacgcattgata

SEQ ID NO: 39955 - DNA, 50 bp, synthetic construct
  source 1..50: mol_type = other DNA
gactttccttatggtggaagtaagggggactcgaacccctaaccccctgc

SEQ ID NO: 39956 - DNA, 50 bp, synthetic construct
  source 1..50: mol_type = other DNA
ccggtgccaggagggccactgagtagcaggttgtgcgagccagctgcggc

SEQ ID NO: 39957 - DNA, 50 bp, synthetic construct
  source 1..50: mol_type = other DNA
cagtttgccggtaagggattcgggcgccagatggatgatctggcgctctg

SEQ ID NO: 39958 - DNA, 50 bp, synthetic construct
  source 1..50: mol_type = other DNA
acgtgacaccagtgacatgttcgctagtggacatggcatcaatgacaagt

SEQ ID NO: 39959 - DNA, 50 bp, synthetic construct
  source 1..50: mol_type = other DNA
gccgaacaggaagccaggaaggcccgggcgttactggcgcgaattgaggt

SEQ ID NO: 39960 - DNA, 50 bp, synthetic construct
  source 1..50: mol_type = other DNA
gagcctcttggtgtgtttaggaaaatataaaacaaaacacaaagggggaa

SEQ ID NO: 39961 - DNA, 50 bp, synthetic construct
  source 1..50: mol_type = other DNA
atataaaaaaatatggaggatatatttttaggatctatctttttatcctg

SEQ ID NO: 39962 - DNA, 50 bp, synthetic construct
  source 1..50: mol_type = other DNA
aaacggatttctcaaatacaccacggatggtgcattgccaggtagcggtt

SEQ ID NO: 39963 - DNA, 50 bp, synthetic construct
  source 1..50: mol_type = other DNA
agcgtcttgcggacgagcacgtgctctggcggcatattcgagctgacggt

SEQ ID NO: 39964 - DNA, 50 bp, synthetic construct
  source 1..50: mol_type = other DNA
atctctttaaatgggcagttattaataaatgacttgtttttcacaatgag

SEQ ID NO: 39965 - DNA, 50 bp, synthetic construct
  source 1..50: mol_type = other DNA
ctcaaacccttccggcggttgacgttcggcaatcgccgccaggcgcgcag

SEQ ID NO: 39966 - DNA, 50 bp, synthetic construct
  source 1..50: mol_type = other DNA
aaatggaaagtgtcgccggaaaaatattggtgcggcagtcggggaagttt

SEQ ID NO: 39967 - DNA, 50 bp, synthetic construct
  source 1..50: mol_type = other DNA
accggccgcgtgatcaagggctgggatcaaggcttgatgggcatgcaggt

SEQ ID NO: 39968 - DNA, 50 bp, synthetic construct
  source 1..50: mol_type = other DNA
cgcacccggtatgccgtgggcgatccaccgcctcctcaaccacggctgga

SEQ ID NO: 39969 - DNA, 50 bp, synthetic construct
  source 1..50: mol_type = other DNA
ggagcttgcggagctggaccgctggccatcggtccagtcttccaatggtt

SEQ ID NO: 39970 - DNA, 50 bp, synthetic construct
  source 1..50: mol_type = other DNA
cagtattatcagggttttggtgtttatctacacaacttattcctataggc

SEQ ID NO: 39971 - DNA, 50 bp, synthetic construct
  source 1..50: mol_type = other DNA
gcctgaaaatagtatgcagaaaacttcttttagaaatcaccggcttgagc

SEQ ID NO: 39972 - DNA, 50 bp, synthetic construct
  source 1..50: mol_type = other DNA
aattaggagagtaaacataaaaaaatagcattcgttttaatcactatttt

SEQ ID NO: 39973 - DNA, 50 bp, synthetic construct
  source 1..50: mol_type = other DNA
atactatctaggttatgataagcatagacttaatataattggtataatat

SEQ ID NO: 39974 - DNA, 50 bp, synthetic construct
  source 1..50: mol_type = other DNA
cgccgcagccggtggccatcacctgctggtcggcagccccggatgcggca

SEQ ID NO: 39975 - DNA, 50 bp, synthetic construct
  source 1..50: mol_type = other DNA
aggcagctctttttagcgtcaccaaacgtcagcgcggcaacaccttgcgc

SEQ ID NO: 39976 - DNA, 50 bp, synthetic construct
  source 1..50: mol_type = other DNA
cttcgcgatgtgggcgacgagctgcacagcttctcccccatcgggagagt

SEQ ID NO: 39977 - DNA, 50 bp, synthetic construct
  source 1..50: mol_type = other DNA
ttgttattagatttatatgcaatattgtttgtttatattaccgataacat

SEQ ID NO: 39978 - DNA, 50 bp, synthetic construct
  source 1..50: mol_type = other DNA
gcgcaggtcatgaaagtgcagatcgcgctctgctcgaacggtcctgaggc

SEQ ID NO: 39979 - DNA, 50 bp, synthetic construct
  source 1..50: mol_type = other DNA
cccgcggcgcgcgcgcccaggcggcgcggatctcgcgcttgctgggcgcc

SEQ ID NO: 39980 - DNA, 50 bp, synthetic construct
  source 1..50: mol_type = other DNA
agtaaaaccatagctcaggacgcttctaccaactgagctatatcggccct

SEQ ID NO: 39981 - DNA, 50 bp, synthetic construct
  source 1..50: mol_type = other DNA
ctaacatcggcgaacctgataagccagctaatcagggtataagatgtatc

SEQ ID NO: 39982 - DNA, 50 bp, synthetic construct
  source 1..50: mol_type = other DNA
aatgctaggattgtatatatgagttaaacgttatggctaatgctacaatg

SEQ ID NO: 39983 - DNA, 50 bp, synthetic construct
  source 1..50: mol_type = other DNA
atttgatgtaaaaaaaggtgatacataaatcaaaaattcaaccataggta

SEQ ID NO: 39984 - DNA, 50 bp, synthetic construct
  source 1..50: mol_type = other DNA
ctgtaccccttaactgttttagctcgagatgaagcagtcgatatcaacac

SEQ ID NO: 39985 - DNA, 50 bp, synthetic construct
  source 1..50: mol_type = other DNA
tttttcttgtactcattttaacatttatatataaatgagctcatttctat

SEQ ID NO: 39986 - DNA, 50 bp, synthetic construct
  source 1..50: mol_type = other DNA
gccgcggcgggacagcactcggccttgctggtcggcccgccgggcacggg

SEQ ID NO: 39987 - DNA, 50 bp, synthetic construct
  source 1..50: mol_type = other DNA
atcgtatcataagtgatgaggttattattattacatacacatgataagag

SEQ ID NO: 39988 - DNA, 50 bp, synthetic construct
  source 1..50: mol_type = other DNA
gcgttcgggctcaccgagcacaccaatgtcgtgatagtgacgcaccgcgc

SEQ ID NO: 39989 - DNA, 50 bp, synthetic construct
  source 1..50: mol_type = other DNA
ttttgcagagttttatcgacgacagcagtacgacttcggcctgagcaaaa

SEQ ID NO: 39990 - DNA, 50 bp, synthetic construct
  source 1..50: mol_type = other DNA
acaatgatcggatacctgcctgacctgctgccgcagtatctgatcatcgc

SEQ ID NO: 39991 - DNA, 50 bp, synthetic construct
  source 1..50: mol_type = other DNA
gcggcgagcgggtctgcttggctcagcaaccaagataccccagcatccgg

SEQ ID NO: 39992 - DNA, 50 bp, synthetic construct
  source 1..50: mol_type = other DNA
attgatacgtccggcaggcatatgcctcgttcccatttagaaaccgattt

SEQ ID NO: 39993 - DNA, 50 bp, synthetic construct
  source 1..50: mol_type = other DNA
acgtgtcactggtgccatgtccactagcgaacatgtcactggtgtcacgt

SEQ ID NO: 39994 - DNA, 50 bp, synthetic construct
  source 1..50: mol_type = other DNA
tcggaaaattgcggcgtgttgagattcatcaaggacatcctttttgccgg

SEQ ID NO: 39995 - DNA, 50 bp, synthetic construct
  source 1..50: mol_type = other DNA
atgagccatgaaatccgcacgcccatcggcatgctggaactggcgctcaa

SEQ ID NO: 39996 - DNA, 50 bp, synthetic construct
  source 1..50: mol_type = other DNA
cccacgtaactggcgcagcatttcttgaacttctggccgctggcgcaggg

SEQ ID NO: 39997 - DNA, 50 bp, synthetic construct
  source 1..50: mol_type = other DNA
ttaggtgactttttaaccgctatcgaagcttgctcattagcggcatctga

SEQ ID NO: 39998 - DNA, 50 bp, synthetic construct
  source 1..50: mol_type = other DNA
tagaacaccgtcaataaactctccgaggggatgatgatgacgatgttctt

SEQ ID NO: 39999 - DNA, 50 bp, synthetic construct
  source 1..50: mol_type = other DNA
cctcgacgcttcgcgcctttcccgcacggcgaaggcccgcagcgctcgct

SEQ ID NO: 40000 - DNA, 50 bp, synthetic construct
  source 1..50: mol_type = other DNA
tgggtgatctgctcgagcagcggcagttcgctctggtagcagccgaactt

SEQ ID NO: 40001 - DNA, 50 bp, synthetic construct
  source 1..50: mol_type = other DNA
cggtgctgatcaagtccggcgtataaacgcttccgacttgatcaagtccg

SEQ ID NO: 40002 - DNA, 50 bp, synthetic construct
  source 1..50: mol_type = other DNA
taggagcatcaccaatagccataactttagcttcattggtcacgctatta

SEQ ID NO: 40003 - DNA, 50 bp, synthetic construct
  source 1..50: mol_type = other DNA
atggtacgcttctgcgtatcggttaaaaccgcattatttatgatacgctt

SEQ ID NO: 40004 - DNA, 50 bp, synthetic construct
  source 1..50: mol_type = other DNA
aaaagtgttataatatacttgaaatgccataagaagattataccacattg

SEQ ID NO: 40005 - DNA, 50 bp, synthetic construct
  source 1..50: mol_type = other DNA
ccattatagatgcaatatcatcaagttaaatgtgggagtattattatggg

SEQ ID NO: 40006 - DNA, 50 bp, synthetic construct
  source 1..50: mol_type = other DNA
atgcatatatgtctaattgcaaacatagagagtgcgagaaaatcatagat

SEQ ID NO: 40007 - DNA, 50 bp, synthetic construct
  source 1..50: mol_type = other DNA
tgaaggcttgtttattatatcagccatagttcatggtatacaaatattcc

SEQ ID NO: 40008 - DNA, 50 bp, synthetic construct
  source 1..50: mol_type = other DNA
gctttattttaccacaaaaacacaaaagtctaattgttaaaaacaatgat

SEQ ID NO: 40009 - DNA, 50 bp, synthetic construct
  source 1..50: mol_type = other DNA
gataaactctctgtaataattaactttagatgaattagagagagactata

SEQ ID NO: 40010 - DNA, 50 bp, synthetic construct
  source 1..50: mol_type = other DNA
taaaaaatttacgcgtaaaagcctttagaaactagcgttgaaatgttagt

SEQ ID NO: 40011 - DNA, 50 bp, synthetic construct
  source 1..50: mol_type = other DNA
gccttccggatcaatgcgggggctcccagcgccttatcataagtgagaca

SEQ ID NO: 40012 - DNA, 50 bp, synthetic construct
  source 1..50: mol_type = other DNA
cgcatcacttatgataaggcgctgggcgcccccgcattgatccggaaggc

SEQ ID NO: 40013 - DNA, 50 bp, synthetic construct
  source 1..50: mol_type = other DNA
ctatttcctcaaacgcatcacgtcgaatgtgtaagtttattagagaaacg

SEQ ID NO: 40014 - DNA, 50 bp, synthetic construct
  source 1..50: mol_type = other DNA
tgtatagtactgcaagaaaggaggttcgctccttttttcagtcggttaaa

SEQ ID NO: 40015 - DNA, 50 bp, synthetic construct
  source 1..50: mol_type = other DNA
taaaccggttgaggaaagcaagccagcaagcaaattagtccacattgctt

SEQ ID NO: 40016 - DNA, 50 bp, synthetic construct
  source 1..50: mol_type = other DNA
caaaaggggtacaatcgtaccccttaatgcttagtgctagtccaattgca

SEQ ID NO: 40017 - DNA, 50 bp, synthetic construct
  source 1..50: mol_type = other DNA
acgggcttgttctatcacagtttacccaacatcaatgagatgttgggcgt

SEQ ID NO: 40018 - DNA, 50 bp, synthetic construct
  source 1..50: mol_type = other DNA
tagactttaactctgcatactgatatgcctgcgacctgggcacgaatctc

SEQ ID NO: 40019 - DNA, 50 bp, synthetic construct
  source 1..50: mol_type = other DNA
gaactgcatggtgatattgttacttattaccacatatgaaactgcatggt

SEQ ID NO: 40020 - DNA, 50 bp, synthetic construct
  source 1..50: mol_type = other DNA
ccctttttgaaaaggcaagcggcagaccatgcttttcacacagcgactga

SEQ ID NO: 40021 - DNA, 50 bp, synthetic construct
  source 1..50: mol_type = other DNA
cactcattatatttaataatgtagatctatattatttaccatattgacat

SEQ ID NO: 40022 - DNA, 50 bp, synthetic construct
  source 1..50: mol_type = other DNA
ctatttttactcggttgatattatgttttagactgtgcgcttaataaacc

SEQ ID NO: 40023 - DNA, 50 bp, synthetic construct
  source 1..50: mol_type = other DNA
tcttttttcttccattcgggtttacggccacttgcatggtacaaaattcc

SEQ ID NO: 40024 - DNA, 50 bp, synthetic construct
  source 1..50: mol_type = other DNA
ttatatataatgatagactgggatttgtctattattattgttataaatat

SEQ ID NO: 40025 - DNA, 50 bp, synthetic construct
  source 1..50: mol_type = other DNA
agttaggttccttttttcaagatttaaatttagaaaataacgttccagaa

SEQ ID NO: 40026 - DNA, 50 bp, synthetic construct
  source 1..50: mol_type = other DNA
tgaatcattcctgcactaaacaatgaatggtttagaagaaaataattata

SEQ ID NO: 40027 - DNA, 50 bp, synthetic construct
  source 1..50: mol_type = other DNA
atacataaaaaaacaacgagtaccttaccactccttatctcagtatccta

SEQ ID NO: 40028 - DNA, 50 bp, synthetic construct
  source 1..50: mol_type = other DNA
cgagatttttcgggcaccctaatgattttttgggcagcccagggagacga

SEQ ID NO: 40029 - DNA, 50 bp, synthetic construct
  source 1..50: mol_type = other DNA
tggtttttgaacttcgaaatataaatttattattgattttttattaattc

SEQ ID NO: 40030 - DNA, 50 bp, synthetic construct
  source 1..50: mol_type = other DNA
ctcgaggccgggccatgagtcagaagaagtactcgtcgggcagtgccgtc

SEQ ID NO: 40031 - DNA, 50 bp, synthetic construct
  source 1..50: mol_type = other DNA
gacaagaaaaactttttcagaagatatgatgagaacgaatttttagaaaa

SEQ ID NO: 40032 - DNA, 50 bp, synthetic construct
  source 1..50: mol_type = other DNA
aaacaaatcctcgcaacaggtgttgtctctgggcaaacaaattggcgagt

SEQ ID NO: 40033 - DNA, 50 bp, synthetic construct
  source 1..50: mol_type = other DNA
caccaacatctcaataaaggatagtagtaacctacatttccaccaatgta

SEQ ID NO: 40034 - DNA, 50 bp, synthetic construct
  source 1..50: mol_type = other DNA
atgctcaggcccatgtatcaaaatatacaatgataaaaatggaggagcaa

SEQ ID NO: 40035 - DNA, 50 bp, synthetic construct
  source 1..50: mol_type = other DNA
ctcatgatgtcttttcttgtacccattatttttagaatagcccccaaaag

SEQ ID NO: 40036 - DNA, 50 bp, synthetic construct
  source 1..50: mol_type = other DNA
aaacaagagtatctaaatttgttattttaccttgttagaatccctacttg

SEQ ID NO: 40037 - DNA, 50 bp, synthetic construct
  source 1..50: mol_type = other DNA
ttataaatgaaagaaaaagaaggtgaaccttcttttattttttttgagag

SEQ ID NO: 40038 - DNA, 50 bp, synthetic construct
  source 1..50: mol_type = other DNA
ctcccactcaatgagtaggtttggctcccactcaacggttgctggtggtt

SEQ ID NO: 40039 - DNA, 50 bp, synthetic construct
  source 1..50: mol_type = other DNA
tattttcttctaaaccatttaaaaatttttatatcttttagaagaggaac

SEQ ID NO: 40040 - DNA, 50 bp, synthetic construct
  source 1..50: mol_type = other DNA
catgttctttgaaatgtaggatagtacggaactattaaataaaaaacaaa

SEQ ID NO: 40041 - DNA, 50 bp, synthetic construct
  source 1..50: mol_type = other DNA
aggatattatgaaacactatcacgtacgtgataatgtaccccataagcag

SEQ ID NO: 40042 - DNA, 50 bp, synthetic construct
  source 1..50: mol_type = other DNA
tgatttccagtaccctgctcaaccgatctgaaacagcggagcatctggca

SEQ ID NO: 40043 - DNA, 50 bp, synthetic construct
  source 1..50: mol_type = other DNA
gccaagccacacactccacatgagtctacatgcgttgtatgcgggaacat

SEQ ID NO: 40044 - DNA, 50 bp, synthetic construct
  source 1..50: mol_type = other DNA
caaacagacaagcttggttttgttataggcatactctgcttgtttgaatg

SEQ ID NO: 40045 - DNA, 50 bp, synthetic construct
  source 1..50: mol_type = other DNA
gaatcaagccatctttgatgacatattttttatcaaaagtcgattttaca

SEQ ID NO: 40046 - DNA, 50 bp, synthetic construct
  source 1..50: mol_type = other DNA
atgagtgtggaatggcggttgtactggttgacttctccatacccaaacat

SEQ ID NO: 40047 - DNA, 50 bp, synthetic construct
  source 1..50: mol_type = other DNA
gaaaaaaatgatgacattcttgaaaatccaagagcgtaaagaaaagatta

SEQ ID NO: 40048 - DNA, 50 bp, synthetic construct
  source 1..50: mol_type = other DNA
agggagtggtataccactccctcctagaaaaagaaaaacatatacatgaa

SEQ ID NO: 40049 - DNA, 50 bp, synthetic construct
  source 1..50: mol_type = other DNA
tcgcttctcgttgatccattgccatgacagaatggcaatatgacatttcg

SEQ ID NO: 40050 - DNA, 50 bp, synthetic construct
  source 1..50: mol_type = other DNA
ttttttgtggccattaggcgcatgagatttaccccatttaatcctaaagc

SEQ ID NO: 40051 - DNA, 50 bp, synthetic construct
  source 1..50: mol_type = other DNA
agagcgtttcggattaatcgtggagaaccgtaccataagtaagatattct

SEQ ID NO: 40052 - DNA, 50 bp, synthetic construct
  source 1..50: mol_type = other DNA
tttaaccttatatataataactactacaagttacacccgttatatttaat

SEQ ID NO: 40053 - DNA, 50 bp, synthetic construct
  source 1..50: mol_type = other DNA
tccataattccattttcaattccgtacagaagtgaaatctaaattttgta

SEQ ID NO: 40054 - DNA, 50 bp, synthetic construct
  source 1..50: mol_type = other DNA
agaataaacttttacacctccatttcaggtacattgtaaaagttgattat

SEQ ID NO: 40055 - DNA, 50 bp, synthetic construct
  source 1..50: mol_type = other DNA
ggaataatatcaataaactaattaaaaaatatcattatagatattatagt

SEQ ID NO: 40056 - DNA, 50 bp, synthetic construct
  source 1..50: mol_type = other DNA
aaatataacttcttttttcgaattatatagtaaagtgttctggtgtattt

SEQ ID NO: 40057 - DNA, 50 bp, synthetic construct
  source 1..50: mol_type = other DNA
cttaacgctaaattttaaaagtaaaattacttattataattcccgttaat

SEQ ID NO: 40058 - DNA, 50 bp, synthetic construct
  source 1..50: mol_type = other DNA
aaaacggtgcgtaaccatatttcgaatgtgatgcagaaactcaatgttaa

SEQ ID NO: 40059 - DNA, 50 bp, synthetic construct
  source 1..50: mol_type = other DNA
cccgtattgtcgaactttttgacgattatcttgacgatatgcgcgacgag

SEQ ID NO: 40060 - DNA, 50 bp, synthetic construct
  source 1..50: mol_type = other DNA
agaagagctcattgaagagcaactaccgtcccaaaagtataaggactgcc

SEQ ID NO: 40061 - DNA, 50 bp, synthetic construct
  source 1..50: mol_type = other DNA
tattcttttcttctgttaaataactatctattaaaataccattttttatt

SEQ ID NO: 40062 - DNA, 50 bp, synthetic construct
  source 1..50: mol_type = other DNA
tgaacactgaaaggaagctccaataaagagctccttcttttttatatgat

SEQ ID NO: 40063 - DNA, 50 bp, synthetic construct
  source 1..50: mol_type = other DNA
tcggccggcttgtcgacaaccgccgtctcggtggtgagcaccatgcgcgc

SEQ ID NO: 40064 - DNA, 50 bp, synthetic construct
  source 1..50: mol_type = other DNA
cacagtcaaagtcaatccgtaaataaatttaaacttggattttgactaca

SEQ ID NO: 40065 - DNA, 50 bp, synthetic construct
  source 1..50: mol_type = other DNA
agtgaatcagtataactcactgttgtattgaagagttagtgaaaatcacg

SEQ ID NO: 40066 - DNA, 50 bp, synthetic construct
  source 1..50: mol_type = other DNA
tttttatcgaaggttgattgtgtagttaattatatacacactcataaaaa

SEQ ID NO: 40067 - DNA, 50 bp, synthetic construct
  source 1..50: mol_type = other DNA
tttcactgataaatttgcattttttaaaaaatccaatatatgcaggttat

SEQ ID NO: 40068 - DNA, 50 bp, synthetic construct
  source 1..50: mol_type = other DNA
caatattgtataatgacaaacttatgttatagtgtaattatttgtgatta

SEQ ID NO: 40069 - DNA, 50 bp, synthetic construct
  source 1..50: mol_type = other DNA
gtatataatagattgtaatcaactatttgcttatacgaacgattattcgc

SEQ ID NO: 40070 - DNA, 50 bp, synthetic construct
  source 1..50: mol_type = other DNA
aaccggaatgaaccgtaccataagtatagatgatacggtgaaccctacca

SEQ ID NO: 40071 - DNA, 50 bp, synthetic construct
  source 1..50: mol_type = other DNA
tcacggatgacgactgatttatttgaaattggtgaagtagcgcatcatgg

SEQ ID NO: 40072 - DNA, 50 bp, synthetic construct
  source 1..50: mol_type = other DNA
agcttttatcctatcagtattagtatagtctaactgataaaataatcttt

SEQ ID NO: 40073 - DNA, 50 bp, synthetic construct
  source 1..50: mol_type = other DNA
tgtgcaaagaatatttaaaaagaaatttcttaaataatatcctttacata

SEQ ID NO: 40074 - DNA, 50 bp, synthetic construct
  source 1..50: mol_type = other DNA
atccgctaatttatttacatttgctagcttgtttatttagattatttagt

SEQ ID NO: 40075 - DNA, 50 bp, synthetic construct
  source 1..50: mol_type = other DNA
gcggagaaatgagaattcctggtttaagccacccattatcattgacccag

SEQ ID NO: 40076 - DNA, 50 bp, synthetic construct
  source 1..50: mol_type = other DNA
cttgactaatatcctttttagagtgaacttagcaaactataagtttctaa

SEQ ID NO: 40077 - DNA, 50 bp, synthetic construct
  source 1..50: mol_type = other DNA
agaccagtgttcctcatcaggtcagatggcaagtgggagaaaatcttagc

SEQ ID NO: 40078 - DNA, 50 bp, synthetic construct
  source 1..50: mol_type = other DNA
aaatcctctcagaattcgatacagcggaagatcgagtcctgaacgtctcg

SEQ ID NO: 40079 - DNA, 50 bp, synthetic construct
  source 1..50: mol_type = other DNA
ataacttgactaatatcctttttagagaaaaaaattatgaaaaaagatag

SEQ ID NO: 40080 - DNA, 50 bp, synthetic construct
  source 1..50: mol_type = other DNA
ggaaatggggaaaagtattacagttatttgatgtaattttctacaatttg

SEQ ID NO: 40081 - DNA, 50 bp, synthetic construct
  source 1..50: mol_type = other DNA
aattttgatagctttgatgtattttgggtacaagaaaagagttcaaaaga

SEQ ID NO: 40082 - DNA, 50 bp, synthetic construct
  source 1..50: mol_type = other DNA
gtgcatatgattagccatccgggtaatccgaaattcccggtggatatccc

SEQ ID NO: 40083 - DNA, 50 bp, synthetic construct
  source 1..50: mol_type = other DNA
acggtgggccccctggggcgtgaacacgccgaccgcgggggcgttgccgt

SEQ ID NO: 40084 - DNA, 50 bp, synthetic construct
  source 1..50: mol_type = other DNA
atttctttggtatcatattttctttttatagatgcatagaggcaaaaaag

SEQ ID NO: 40085 - DNA, 50 bp, synthetic construct
  source 1..50: mol_type = other DNA
gcatcgaccaaggcgttcgcgcgatgtttcgtcgtcgccttgttcgggtg

SEQ ID NO: 40086 - DNA, 50 bp, synthetic construct
  source 1..50: mol_type = other DNA
atagagatttaactcctattatggatccagctaaggatttaaccaactat

SEQ ID NO: 40087 - DNA, 50 bp, synthetic construct
  source 1..50: mol_type = other DNA
taattccttccatgttgagatacaattgtagtaaaactaaacctcttttc

SEQ ID NO: 40088 - DNA, 50 bp, synthetic construct
  source 1..50: mol_type = other DNA
tccatcgtgccttccccctttaatacggttttgggggagggggagttgga

SEQ ID NO: 40089 - DNA, 50 bp, synthetic construct
  source 1..50: mol_type = other DNA
caccccttaatagattggaaatccgctgaattctggtagaacaaggcatg

SEQ ID NO: 40090 - DNA, 50 bp, synthetic construct
  source 1..50: mol_type = other DNA
tgcgttgaacttttagcaatgatttaaaattttatggatatttcaattgg

SEQ ID NO: 40091 - DNA, 50 bp, synthetic construct
  source 1..50: mol_type = other DNA
taataaagaaagaaaaaaaggttgtttgaagtatttttcctacttctttc

SEQ ID NO: 40092 - DNA, 50 bp, synthetic construct
  source 1..50: mol_type = other DNA
tcggaatccacgaggtttttcgggcagcccagggagacgaagccgatttt

SEQ ID NO: 40093 - DNA, 50 bp, synthetic construct
  source 1..50: mol_type = other DNA
cactggacagacagccagtgtcgaattctacaccagacagacggcgcatt

SEQ ID NO: 40094 - DNA, 50 bp, synthetic construct
  source 1..50: mol_type = other DNA
tctacaatttcgggaaggcaaagtgttttataccgaagtggcggagaggg

SEQ ID NO: 40095 - DNA, 50 bp, synthetic construct
  source 1..50: mol_type = other DNA
ccgcgcctgcgggcgatggacccgggcctttccgtcgctggccgtcacga

SEQ ID NO: 40096 - DNA, 50 bp, synthetic construct
  source 1..50: mol_type = other DNA
cgccagctcgtcaacgacatcaccagcgcgatgtccgtcacgctctgtcc

SEQ ID NO: 40097 - DNA, 50 bp, synthetic construct
  source 1..50: mol_type = other DNA
gtttttcataccgtaaatggtaacttgcccctattaactcagtgaaaaac

SEQ ID NO: 40098 - DNA, 50 bp, synthetic construct
  source 1..50: mol_type = other DNA
gacgctgcgtccagcggagtgcacttggggcgagacacgggtcgcgtgat

SEQ ID NO: 40099 - DNA, 50 bp, synthetic construct
  source 1..50: mol_type = other DNA
atgttcgccccggcaagcatataaaatcacatgttcgccccggccagaag

SEQ ID NO: 40100 - DNA, 50 bp, synthetic construct
  source 1..50: mol_type = other DNA
catcgccgacgcgaccccggtcgacgtgctgccgggcgatgtcgccgagt

SEQ ID NO: 40101 - DNA, 50 bp, synthetic construct
  source 1..50: mol_type = other DNA
gccgggcgcgtcatcaagggctgggatcagggcctgatgggcatgaaagt

SEQ ID NO: 40102 - DNA, 50 bp, synthetic construct
  source 1..50: mol_type = other DNA
cgtcccgtattcggctggcctcggccggtagccctgccggattttccatg

SEQ ID NO: 40103 - DNA, 50 bp, synthetic construct
  source 1..50: mol_type = other DNA
ttgaggcccggttaaaagaaaagttttgtttgtttttcagtatttttcaa

SEQ ID NO: 40104 - DNA, 50 bp, synthetic construct
  source 1..50: mol_type = other DNA
accagatcagcagggactgggaggatcttcgctggtcctgctgtccaggt

SEQ ID NO: 40105 - DNA, 50 bp, synthetic construct
  source 1..50: mol_type = other DNA
cctgtgatgatcgcatagtcattgcggctggtcgcgcacatcatcaaaaa

SEQ ID NO: 40106 - DNA, 50 bp, synthetic construct
  source 1..50: mol_type = other DNA
agcttcgccggcaagcgccgcgacatgccccggctcaagccgcacaagac

SEQ ID NO: 40107 - DNA, 50 bp, synthetic construct
  source 1..50: mol_type = other DNA
agctgcactttacagggtgcagcctgccgtgcatcctgattctctctcct

SEQ ID NO: 40108 - DNA, 50 bp, synthetic construct
  source 1..50: mol_type = other DNA
tgtttttggttttttgctgcgccgcatagaacagataaaggccagcgaca

SEQ ID NO: 40109 - DNA, 50 bp, synthetic construct
  source 1..50: mol_type = other DNA
ccaattatgtctcctgtagttatttaaaagctcctttgagaaggaattgg

SEQ ID NO: 40110 - DNA, 50 bp, synthetic construct
  source 1..50: mol_type = other DNA
tatcgcaaacgcacatctctgattcatgttacctctgtgtgccgctaata

SEQ ID NO: 40111 - DNA, 50 bp, synthetic construct
  source 1..50: mol_type = other DNA
tcacggtggtgcccgacccgtcggcggcaatcaggcgggcaacaccctga

SEQ ID NO: 40112 - DNA, 50 bp, synthetic construct
  source 1..50: mol_type = other DNA
tggataaaagaaaaagccggaaggtcctttccgtcttttattcgtagcca

SEQ ID NO: 40113 - DNA, 50 bp, synthetic construct
  source 1..50: mol_type = other DNA
cgttccgcgtgaatggccctttttgttgccggggcttccgctgctcaacg

SEQ ID NO: 40114 - DNA, 50 bp, synthetic construct
  source 1..50: mol_type = other DNA
cacacttgtggaaatgtaggttactactatccttgatcgagatgttggtg

SEQ ID NO: 40115 - DNA, 50 bp, synthetic construct
  source 1..50: mol_type = other DNA
ttaaacattgaatttttataatttatgaattattagccttcaccaattga

SEQ ID NO: 40116 - DNA, 50 bp, synthetic construct
  source 1..50: mol_type = other DNA
gaagctgtgttttctgtcaacagattttggacgaagcaaaatccctgcgc

SEQ ID NO: 40117 - DNA, 50 bp, synthetic construct
  source 1..50: mol_type = other DNA
acagggccaacagccctttactgaatttagccaaaaaacacattacctcc

SEQ ID NO: 40118 - DNA, 50 bp, synthetic construct
  source 1..50: mol_type = other DNA
tggagaaaatcatggtttttaagaatttttgaaaaccagaaaagtcggaa

SEQ ID NO: 40119 - DNA, 50 bp, synthetic construct
  source 1..50: mol_type = other DNA
aaaatggttctgtgctggaaaaggatgattttgatcgttctggagatttc

SEQ ID NO: 40120 - DNA, 50 bp, synthetic construct
  source 1..50: mol_type = other DNA
gtcggagccgtgccgggaagatccgcgcactcacctggcacggcaagcac

SEQ ID NO: 40121 - DNA, 50 bp, synthetic construct
  source 1..50: mol_type = other DNA
aaagccagccgggcgtcctgaaagacttctcctgcaggctgtcctcaaag

SEQ ID NO: 40122 - DNA, 50 bp, synthetic construct
  source 1..50: mol_type = other DNA
aagaacatctcttagggcagtcaatattatatatgctatataatgaaaat

SEQ ID NO: 40123 - DNA, 50 bp, synthetic construct
  source 1..50: mol_type = other DNA
agcggctcgggcaggcccgtctccgcgggcaggggcaggaccgaggagat

SEQ ID NO: 40124 - DNA, 50 bp, synthetic construct
  source 1..50: mol_type = other DNA
attcacgggcggcaagcgcgcgcttctccgccttcggcccgcccgtgttt

SEQ ID NO: 40125 - DNA, 50 bp, synthetic construct
  source 1..50: mol_type = other DNA
ctgtccgtgcgtaaaagaaggcttcgaaggacgctttcgagggccacgtt

SEQ ID NO: 40126 - DNA, 50 bp, synthetic construct
  source 1..50: mol_type = other DNA
cgccgatgatgcaagggatgatgacgtcgactccgaacaaatcatcacgc

SEQ ID NO: 40127 - DNA, 50 bp, synthetic construct
  source 1..50: mol_type = other DNA
tattatttcaaagttaacgacatgaataagtgtttaacgatgtcagaaaa

SEQ ID NO: 40128 - DNA, 50 bp, synthetic construct
  source 1..50: mol_type = other DNA
tttgaaaaatggctgattttttgtattcagaaaataagtgtttaacgatg

SEQ ID NO: 40129 - DNA, 50 bp, synthetic construct
  source 1..50: mol_type = other DNA
tacgagcagagccacacactccacatgatgtgtcattgggaataagtcta

SEQ ID NO: 40130 - DNA, 50 bp, synthetic construct
  source 1..50: mol_type = other DNA
tgatacgcttctgcgtatcggttaatgcttcgcctcgcatgattttaaat

SEQ ID NO: 40131 - DNA, 50 bp, synthetic construct
  source 1..50: mol_type = other DNA
gtgggaaaaagtaatataattattaagataattatatcacttatttttta

SEQ ID NO: 40132 - DNA, 50 bp, synthetic construct
  source 1..50: mol_type = other DNA
ttagagtatctaaatatgttgtttttaaacaagagttttagatacgctat

SEQ ID NO: 40133 - DNA, 50 bp, synthetic construct
  source 1..50: mol_type = other DNA
ttgataaataagggctttagagtgattactaaaagaaacttatttatcta

SEQ ID NO: 40134 - DNA, 50 bp, synthetic construct
  source 1..50: mol_type = other DNA
tcatttcatttatattataattcaaagcaaaacaattacaaatgatttat

SEQ ID NO: 40135 - DNA, 50 bp, synthetic construct
  source 1..50: mol_type = other DNA
ttttcgacatatcgctataacaaatatttagtacctcgttatctctcgct

SEQ ID NO: 40136 - DNA, 50 bp, synthetic construct
  source 1..50: mol_type = other DNA
gcgttcttttataaagaataaagctagcttgtttatttagattgtttagt

SEQ ID NO: 40137 - DNA, 50 bp, synthetic construct
  source 1..50: mol_type = other DNA
catcaagatacaatctaaagaaatctatttctttcatttggattacccgt

SEQ ID NO: 40138 - DNA, 50 bp, synthetic construct
  source 1..50: mol_type = other DNA
tctttaaagggttacttcttttttactaaaaagaaatcgccttttaagtt

SEQ ID NO: 40139 - DNA, 50 bp, synthetic construct
  source 1..50: mol_type = other DNA
aatttttttaagtagattttattataatactaaatcttggctcaaaaaat

SEQ ID NO: 40140 - DNA, 50 bp, synthetic construct
  source 1..50: mol_type = other DNA
tacaatagtatattaacctatatttaatcgtatataaagatcacgttgaa

SEQ ID NO: 40141 - DNA, 50 bp, synthetic construct
  source 1..50: mol_type = other DNA
taccagatggcgaaggactttttgtataaaaagtcctttgccagatggcg

SEQ ID NO: 40142 - DNA, 50 bp, synthetic construct
  source 1..50: mol_type = other DNA
taatttcaatacttgaatacgattactcgaacaggcaattattgaactgt

SEQ ID NO: 40143 - DNA, 50 bp, synthetic construct
  source 1..50: mol_type = other DNA
tttttcggcttcctccttgtctactagtagaaggcgcatttgccaaagaa

SEQ ID NO: 40144 - DNA, 50 bp, synthetic construct
  source 1..50: mol_type = other DNA
cctttctttgggcgcaaaagagggattccatctttatgccgtttgagagg

SEQ ID NO: 40145 - DNA, 50 bp, synthetic construct
  source 1..50: mol_type = other DNA
ctgcctgccgccactccgctgtcatatgcaccagaagaggagaaaggcac

SEQ ID NO: 40146 - DNA, 50 bp, synthetic construct
  source 1..50: mol_type = other DNA
tattctatagcatttactttgacattatttcaagcaaaggatttcatact

SEQ ID NO: 40147 - DNA, 50 bp, synthetic construct
  source 1..50: mol_type = other DNA
taccttatcaagtatgccctctgcatagcctctccattctgcctcagatc

SEQ ID NO: 40148 - DNA, 50 bp, synthetic construct
  source 1..50: mol_type = other DNA
actatcatatgttccgtgtcatttcgtcctcaggaccgacagctgatgcg

SEQ ID NO: 40149 - DNA, 50 bp, synthetic construct
  source 1..50: mol_type = other DNA
ataacaacaaaggcaccggtcggtcataaagctacctcctttgttattat

SEQ ID NO: 40150 - DNA, 50 bp, synthetic construct
  source 1..50: mol_type = other DNA
attttttcatatttcctctttcggtctaaaaggccgaaatatcaagcgtt

SEQ ID NO: 40151 - DNA, 50 bp, synthetic construct
  source 1..50: mol_type = other DNA
gcctttcggatcaatacgggggctcccagctccgtatcataaatgaggat

SEQ ID NO: 40152 - DNA, 50 bp, synthetic construct
  source 1..50: mol_type = other DNA
ccggccccgggtgggccgaccatcagcatgtgatgcccgcccgcggccgc

SEQ ID NO: 40153 - DNA, 50 bp, synthetic construct
  source 1..50: mol_type = other DNA
cggcctggacggccgggtccgcccggcagcggactgccccgtcccggcgc

SEQ ID NO: 40154 - DNA, 50 bp, synthetic construct
  source 1..50: mol_type = other DNA
ctgatacatctgttcacaggctttattaagagagtcaacagagtccctag

SEQ ID NO: 40155 - DNA, 50 bp, synthetic construct
  source 1..50: mol_type = other DNA
ttttgagctacatgaaaaggcttctgaaagactttttattcagctcatca

SEQ ID NO: 40156 - DNA, 50 bp, synthetic construct
  source 1..50: mol_type = other DNA
cgctaaaggagtgtttctgtcgggcgaacgacagaaactctccgagcatc

SEQ ID NO: 40157 - DNA, 50 bp, synthetic construct
  source 1..50: mol_type = other DNA
acgactgcccgacgggcgcccacacgtgtgcagccactcgtcgtagtcgg

SEQ ID NO: 40158 - DNA, 50 bp, synthetic construct
  source 1..50: mol_type = other DNA
cgcgcgccacgctcacggaatggcgcccgcatccacccacgtggacgtat

SEQ ID NO: 40159 - DNA, 50 bp, synthetic construct
  source 1..50: mol_type = other DNA
aacaaaattatgcgtttgaatcgcgacagaagcagcaaaattattggtat

SEQ ID NO: 40160 - DNA, 50 bp, synthetic construct
  source 1..50: mol_type = other DNA
ttaacaaaaatttttcttctatattagactgaaagaagacatttcatttt

SEQ ID NO: 40161 - DNA, 50 bp, synthetic construct
  source 1..50: mol_type = other DNA
cttctcatcgattaacaatttcccgcggaaaattgtatcaatctgaccgt

SEQ ID NO: 40162 - DNA, 50 bp, synthetic construct
  source 1..50: mol_type = other DNA
tattataacaattatccgaaaataattatttttgggttattacaacatta

SEQ ID NO: 40163 - DNA, 50 bp, synthetic construct
  source 1..50: mol_type = other DNA
ctctggacatgaaggtagagtatcgtaaccctccggtcacacgtgaagag

SEQ ID NO: 40164 - DNA, 50 bp, synthetic construct
  source 1..50: mol_type = other DNA
tgacactttggggagcggcaccttataagattttcctctcgcacgtggaa

SEQ ID NO: 40165 - DNA, 50 bp, synthetic construct
  source 1..50: mol_type = other DNA
ctttgcccgtgccatccaggttagcccccagataccattccataccaaag

SEQ ID NO: 40166 - DNA, 50 bp, synthetic construct
  source 1..50: mol_type = other DNA
cctctccgccacttcagtcccaaactctctatgcgcaaacggctgatgtt

SEQ ID NO: 40167 - DNA, 50 bp, synthetic construct
  source 1..50: mol_type = other DNA
gtgaactctacgacaagtcagctttaagtctgaatagtccagcttccaag

SEQ ID NO: 40168 - DNA, 50 bp, synthetic construct
  source 1..50: mol_type = other DNA
gtgccggttcgattccggcactgggtacaattcctgcagatgacaagttt

SEQ ID NO: 40169 - DNA, 50 bp, synthetic construct
  source 1..50: mol_type = other DNA
cctgcttttttatactaagttggcatactaacttgagcgaaacgggaagg

SEQ ID NO: 40170 - DNA, 50 bp, synthetic construct
  source 1..50: mol_type = other DNA
acaacgcaacagacataattcctacaggagaacaatgatatgagcgttaa

SEQ ID NO: 40171 - DNA, 50 bp, synthetic construct
  source 1..50: mol_type = other DNA
cttggaagctggactattcagacttaaggctgacttgtcgtaaagttcac

SEQ ID NO: 40172 - DNA, 50 bp, synthetic construct
  source 1..50: mol_type = other DNA
caacaaacaaatttctacacgcagtatatagagaaaaatgtagttttttg

SEQ ID NO: 40173 - DNA, 50 bp, synthetic construct
  source 1..50: mol_type = other DNA
tgcaggctttgagatcttttaaccatgattatcaattagcaaagaacctt

SEQ ID NO: 40174 - DNA, 50 bp, synthetic construct
  source 1..50: mol_type = other DNA
aaaaacgaccaaaacatcaatcaaattttttttatagcctgtaaaggcca

SEQ ID NO: 40175 - DNA, 50 bp, synthetic construct
  source 1..50: mol_type = other DNA
tcaatatagatgggcgcgattgttgcgccacatccgctgttcgatattgt

SEQ ID NO: 40176 - DNA, 50 bp, synthetic construct
  source 1..50: mol_type = other DNA
tggcatgtacaactatactcgttgtacaactatactcgtcggtaaaaagg

SEQ ID NO: 40177 - DNA, 50 bp, synthetic construct
  source 1..50: mol_type = other DNA
gtgtcaatcgctccacttactataaatatatcaagtacattatagcactt

SEQ ID NO: 40178 - DNA, 50 bp, synthetic construct
  source 1..50: mol_type = other DNA
gtaacaacaatggtttcccacttttgagtttctgaaaccatacttgttgt

SEQ ID NO: 40179 - DNA, 50 bp, synthetic construct
  source 1..50: mol_type = other DNA
gtatggtctactgacttcacctatatattagtcaagttatcagaccaact

SEQ ID NO: 40180 - DNA, 50 bp, synthetic construct
  source 1..50: mol_type = other DNA
tctattatatcaaaaaaaataaagcatactggtctttcgtataccccaga

SEQ ID NO: 40181 - DNA, 50 bp, synthetic construct
  source 1..50: mol_type = other DNA
tcagttgataccctggcatagcctgctactgcaatctggttatcaataaa

SEQ ID NO: 40182 - DNA, 50 bp, synthetic construct
  source 1..50: mol_type = other DNA
agccactggtttttatctttgtggcaacaaagcgagcaaaaggagtggct

SEQ ID NO: 40183 - DNA, 50 bp, synthetic construct
  source 1..50: mol_type = other DNA
taagtaataggaaaaatatcattattaacaatgattattttcatttctta

SEQ ID NO: 40184 - DNA, 50 bp, synthetic construct
  source 1..50: mol_type = other DNA
aatgacattccagaaatataattatcatttcttattgataaaattatata

SEQ ID NO: 40185 - DNA, 50 bp, synthetic construct
  source 1..50: mol_type = other DNA
ttctgtctagttaattgtagcctatcttagttagagctatgagtccaact

SEQ ID NO: 40186 - DNA, 50 bp, synthetic construct
  source 1..50: mol_type = other DNA
gaaataccaacaaatcgtagtatgtccaacataaagcttgtaattccacc

SEQ ID NO: 40187 - DNA, 50 bp, synthetic construct
  source 1..50: mol_type = other DNA
ttctttttaccgaaaaaagaacgtatgaattaatttttctccaaattcca

SEQ ID NO: 40188 - DNA, 50 bp, synthetic construct
  source 1..50: mol_type = other DNA
tattgaaattatcttcaacttattttaatgttccaataataattgcaata

SEQ ID NO: 40189 - DNA, 50 bp, synthetic construct
  source 1..50: mol_type = other DNA
atggttagagctatcagaagatggtttcagcttctgttaagtctgaatag

SEQ ID NO: 40190 - DNA, 50 bp, synthetic construct
  source 1..50: mol_type = other DNA
agaaatgtaagaatttctttaatctcaattaatgaaattcttagtgataa

SEQ ID NO: 40191 - DNA, 50 bp, synthetic construct
  source 1..50: mol_type = other DNA
atatccaaaatctatcaagttaatttgcttttttgaaatataaataatat

SEQ ID NO: 40192 - DNA, 50 bp, synthetic construct
  source 1..50: mol_type = other DNA
tgtacataataatctaaatgttaatattatcatctaggaatatttgtaca

SEQ ID NO: 40193 - DNA, 50 bp, synthetic construct
  source 1..50: mol_type = other DNA
agcatttactgatgtgcgataaagaagtttaccgggttccagcactggaa

SEQ ID NO: 40194 - DNA, 50 bp, synthetic construct
  source 1..50: mol_type = other DNA
gtgagttcgaatctcaccgagggcaccagctcagagcaggcaaccagcac

SEQ ID NO: 40195 - DNA, 50 bp, synthetic construct
  source 1..50: mol_type = other DNA
ccccttagctccaccaaagaggtcttcttcctatagcctccaccaagaga

SEQ ID NO: 40196 - DNA, 50 bp, synthetic construct
  source 1..50: mol_type = other DNA
cgctacaagcctgccggctgcgcggaggcgcttccggcagggtccggacc

SEQ ID NO: 40197 - DNA, 50 bp, synthetic construct
  source 1..50: mol_type = other DNA
tccagccagggatgcgcggacttgatcaggaccgcgttgccggcgccggc

SEQ ID NO: 40198 - DNA, 50 bp, synthetic construct
  source 1..50: mol_type = other DNA
cttcacaaaatattatatctttattaatgaagagtcatgaattcaatcca

SEQ ID NO: 40199 - DNA, 50 bp, synthetic construct
  source 1..50: mol_type = other DNA
attacctggaaaaggtcaagatccccggatcccgcccgggcccaggttgc

SEQ ID NO: 40200 - DNA, 50 bp, synthetic construct
  source 1..50: mol_type = other DNA
tggcgggtgcgcgcgcgaccgcgacggcgcggtgctgtacgcggtggtca

SEQ ID NO: 40201 - DNA, 50 bp, synthetic construct
  source 1..50: mol_type = other DNA
tttaagataaatagaggagaagcttacgctgaagcgtatcataaataaaa

SEQ ID NO: 40202 - DNA, 50 bp, synthetic construct
  source 1..50: mol_type = other DNA
tagaaaagaatattgagtcattcatttgaaatgttcaaagttttttcgtc

SEQ ID NO: 40203 - DNA, 50 bp, synthetic construct
  source 1..50: mol_type = other DNA
tttattatccatacctagctttgactattcattatagttaggtccttacc

SEQ ID NO: 40204 - DNA, 50 bp, synthetic construct
  source 1..50: mol_type = other DNA
tgtcaactttggatgtatatcaaatatttttgatagaagtcaagtttatc

SEQ ID NO: 40205 - DNA, 50 bp, synthetic construct
  source 1..50: mol_type = other DNA
attattttataattctatataaaaacttttatttaaaactctaaaataaa

SEQ ID NO: 40206 - DNA, 50 bp, synthetic construct
  source 1..50: mol_type = other DNA
ctatatagttggtgtagtatgctacctacaatactccttgtgtataatac

SEQ ID NO: 40207 - DNA, 50 bp, synthetic construct
  source 1..50: mol_type = other DNA
aagtgcggtataacacctttattctagaaccttaacaacgtgccaaccga

SEQ ID NO: 40208 - DNA, 50 bp, synthetic construct
  source 1..50: mol_type = other DNA
ccctgggactcggtgtgggtctacgaccactttcacaccgtgccggtgcc

SEQ ID NO: 40209 - DNA, 50 bp, synthetic construct
  source 1..50: mol_type = other DNA
atatatggaaagactaaaataactttagtaaatcttatagttccatctac

SEQ ID NO: 40210 - DNA, 50 bp, synthetic construct
  source 1..50: mol_type = other DNA
aggggttcgagtcccctatgctccaccccacgcacaaggctcgaacccct

SEQ ID NO: 40211 - DNA, 50 bp, synthetic construct
  source 1..50: mol_type = other DNA
tctttggtataatggcataaatgaattctcatgtggatatatgccaagag

SEQ ID NO: 40212 - DNA, 50 bp, synthetic construct
  source 1..50: mol_type = other DNA
ccttatgggtgacttgtttggctggttagaaggaaaaatcaatgctaaaa

SEQ ID NO: 40213 - DNA, 50 bp, synthetic construct
  source 1..50: mol_type = other DNA
caaagaattttttcacttcatcattaatatattatgtaaaaaataggctg

SEQ ID NO: 40214 - DNA, 50 bp, synthetic construct
  source 1..50: mol_type = other DNA
aaaaaatgcacgcggtgaacgtgtttccctgtttttctgttcaatttttg

SEQ ID NO: 40215 - DNA, 50 bp, synthetic construct
  source 1..50: mol_type = other DNA
agggcatttcggattaatcgtggagaaccgtatcataaataaaattactt

SEQ ID NO: 40216 - DNA, 50 bp, synthetic construct
  source 1..50: mol_type = other DNA
gctcttaatgatgaaggtcaccagacctttgaagcttgctcattagctga

SEQ ID NO: 40217 - DNA, 50 bp, synthetic construct
  source 1..50: mol_type = other DNA
gtcccttctcatctcacattgccaattagcaaagaaccttgaaaaactat

SEQ ID NO: 40218 - DNA, 50 bp, synthetic construct
  source 1..50: mol_type = other DNA
caatttgttgtaatggcacctatttgtatgattatcacgcaaaaaaggtt

SEQ ID NO: 40219 - DNA, 50 bp, synthetic construct
  source 1..50: mol_type = other DNA
gcaatgaacagttatgttatgatgtacgtcatactacaacccgtcgccgc

SEQ ID NO: 40220 - DNA, 50 bp, synthetic construct
  source 1..50: mol_type = other DNA
aaatgtgccgcgggtaatagtatcatgaatctgtgatccaggtaatagtt

SEQ ID NO: 40221 - DNA, 50 bp, synthetic construct
  source 1..50: mol_type = other DNA
atgttattgcccctttatcaaaatatcgataaacaagactgctataatat

SEQ ID NO: 40222 - DNA, 50 bp, synthetic construct
  source 1..50: mol_type = other DNA
aattttttatctcctaattacactgacaaaagtggaggaattttgaaata

SEQ ID NO: 40223 - DNA, 50 bp, synthetic construct
  source 1..50: mol_type = other DNA
tcaaaaatttaaaacttatttttaattataaatcaaagtacagtttttgt

SEQ ID NO: 40224 - DNA, 50 bp, synthetic construct
  source 1..50: mol_type = other DNA
gcgaaagaatatagtgaaaattattgggaattttaattctattatttggt

SEQ ID NO: 40225 - DNA, 50 bp, synthetic construct
  source 1..50: mol_type = other DNA
tagacttattcccaatgacacatcatgtggagtgtgtggctctgctcgta

SEQ ID NO: 40226 - DNA, 50 bp, synthetic construct
  source 1..50: mol_type = other DNA
atattaaatgtaatttataaataattttatttatggagtacacattatta

SEQ ID NO: 40227 - DNA, 50 bp, synthetic construct
  source 1..50: mol_type = other DNA
caatgacacatcacgtggagtgcgtatcagcacatgtggagtgtgtggct

SEQ ID NO: 40228 - DNA, 50 bp, synthetic construct
  source 1..50: mol_type = other DNA
aacgcggtaatatagaatcaaaaggaatttagattttgacatttcgcgtg

SEQ ID NO: 40229 - DNA, 50 bp, synthetic construct
  source 1..50: mol_type = other DNA
tctcacttatgatacgtttctgcttatgataagcttccccacgcataatc

SEQ ID NO: 40230 - DNA, 50 bp, synthetic construct
  source 1..50: mol_type = other DNA
ttagatgttccctggaggccttctgatattgtacagcgaaatggacgact

SEQ ID NO: 40231 - DNA, 50 bp, synthetic construct
  source 1..50: mol_type = other DNA
taaaactcacatttttttgaaaggaagcccctcccaaaaagcaggttttt

SEQ ID NO: 40232 - DNA, 50 bp, synthetic construct
  source 1..50: mol_type = other DNA
tttatatactaagattgtgtcaaatttttgttaaaatgggtatagtaaaa

SEQ ID NO: 40233 - DNA, 50 bp, synthetic construct
  source 1..50: mol_type = other DNA
atatcaatgaaaatttttaaaaaaagacttgaaatcattgaaattaatta

SEQ ID NO: 40234 - DNA, 50 bp, synthetic construct
  source 1..50: mol_type = other DNA
cttttgagaggttttcttgtacccataattgatattacacctttaaaaaa

SEQ ID NO: 40235 - DNA, 50 bp, synthetic construct
  source 1..50: mol_type = other DNA
tgataaaacatatgatatagaaattttattgataaagatacttggtatac

SEQ ID NO: 40236 - DNA, 50 bp, synthetic construct
  source 1..50: mol_type = other DNA
gtagatatagctatcaaagtaggaaaacgaccattacaaggaacaaagtt

SEQ ID NO: 40237 - DNA, 50 bp, synthetic construct
  source 1..50: mol_type = other DNA
gaaacgaaatatggactgtctgaatattttttgccaccggtgttctcctc

SEQ ID NO: 40238 - DNA, 50 bp, synthetic construct
  source 1..50: mol_type = other DNA
taatgttagcttctaatactccatttatcaagtattcagcccactcattc

SEQ ID NO: 40239 - DNA, 50 bp, synthetic construct
  source 1..50: mol_type = other DNA
tgggctgtatgaatagcccgaaatgacaccagcctatgttgcaacttcca

SEQ ID NO: 40240 - DNA, 50 bp, synthetic construct
  source 1..50: mol_type = other DNA
tgtgggtcacactgatgcttgaactatgtcaagcagaagccatgaccaca

SEQ ID NO: 40241 - DNA, 50 bp, synthetic construct
  source 1..50: mol_type = other DNA
gtattcactgtaggctggattggaacagcatgcactaaaccccctataat

SEQ ID NO: 40242 - DNA, 50 bp, synthetic construct
  source 1..50: mol_type = other DNA
gataatggaatagcatgtcccctcgcttcgcctccaccaataagaaaccc

SEQ ID NO: 40243 - DNA, 50 bp, synthetic construct
  source 1..50: mol_type = other DNA
tatggtacggttctcccctctttacttgtgatacggttctccacgattaa

SEQ ID NO: 40244 - DNA, 50 bp, synthetic construct
  source 1..50: mol_type = other DNA
ttcaaatgacaaaaaccttacagttttttgaaaggtttaaaaaaattgct

SEQ ID NO: 40245 - DNA, 50 bp, synthetic construct
  source 1..50: mol_type = other DNA
aacgattactcgttttaaaccatattgttggtgtaattagatttacccca

SEQ ID NO: 40246 - DNA, 50 bp, synthetic construct
  source 1..50: mol_type = other DNA
tgcggtatgcttatagggacaaaaatttttgtctgtataggctgtccgca

SEQ ID NO: 40247 - DNA, 50 bp, synthetic construct
  source 1..50: mol_type = other DNA
tttatccatatagaataggtactaattagtatctattatataaaagtaaa

SEQ ID NO: 40248 - DNA, 50 bp, synthetic construct
  source 1..50: mol_type = other DNA
cacaattttttgattctcaaacacaagaattttcaatctcaaaagatatg

SEQ ID NO: 40249 - DNA, 50 bp, synthetic construct
  source 1..50: mol_type = other DNA
ccacgcgctgcaggccacgctcatggcggggcgtgggctgctgcgcttgg

SEQ ID NO: 40250 - DNA, 50 bp, synthetic construct
  source 1..50: mol_type = other DNA
aaaaattctacttaattaattaattatctaaccatccaaacataaatttt

SEQ ID NO: 40251 - DNA, 50 bp, synthetic construct
  source 1..50: mol_type = other DNA
gaagcgtataagagaatagcttttgacaaagctatcctgacataaccttt

SEQ ID NO: 40252 - DNA, 50 bp, synthetic construct
  source 1..50: mol_type = other DNA
ctaatgggaaatcgtgattgaagcccttttagttcttctttaaattcact

SEQ ID NO: 40253 - DNA, 50 bp, synthetic construct
  source 1..50: mol_type = other DNA
tcctcgtacaaatccgcgataggatctcccttcgaggcaatataggctgc

SEQ ID NO: 40254 - DNA, 50 bp, synthetic construct
  source 1..50: mol_type = other DNA
cagcactctcgcaaaacaatatttataatctgcattttgtcaagattata

SEQ ID NO: 40255 - DNA, 50 bp, synthetic construct
  source 1..50: mol_type = other DNA
tttttgctgatattgatgtagctcacctcggtacaaccgtccagcatggc

SEQ ID NO: 40256 - DNA, 50 bp, synthetic construct
  source 1..50: mol_type = other DNA
tcgactggataaaacccgggtttagatatcgccaacattatcccgcacgc

SEQ ID NO: 40257 - DNA, 50 bp, synthetic construct
  source 1..50: mol_type = other DNA
ttctgcaacgtcgtacacatcgtctaggaaatccgtacgcgaccaggcca

SEQ ID NO: 40258 - DNA, 50 bp, synthetic construct
  source 1..50: mol_type = other DNA
gagaacgacggggaaacccgccgggaaacgcgctggtcaccgtcggtaca

SEQ ID NO: 40259 - DNA, 50 bp, synthetic construct
  source 1..50: mol_type = other DNA
atattaaagcttctaaccagaacttaccagaatagaagaaactttaaaaa

SEQ ID NO: 40260 - DNA, 50 bp, synthetic construct
  source 1..50: mol_type = other DNA
ctaaatttaaatatttttatatttattatacaaaatcaaatctattttag

SEQ ID NO: 40261 - DNA, 50 bp, synthetic construct
  source 1..50: mol_type = other DNA
ctaaatttaaatatttttatatttataaatggtcatttgcttaataatcg

SEQ ID NO: 40262 - DNA, 50 bp, synthetic construct
  source 1..50: mol_type = other DNA
cgatgtaatctgcaaaaattgattttaagcaactcttccagattcttttg

SEQ ID NO: 40263 - DNA, 50 bp, synthetic construct
  source 1..50: mol_type = other DNA
tatttatgcaatgaaattacgacatatgtataactccttgatattaagta

SEQ ID NO: 40264 - DNA, 50 bp, synthetic construct
  source 1..50: mol_type = other DNA
atataaaaatgaaataattgaacttttaaacaatattttcaatattattt

SEQ ID NO: 40265 - DNA, 50 bp, synthetic construct
  source 1..50: mol_type = other DNA
ctgctgtccctggccgcctacttctacaggaagtcaccctcctggggcag

SEQ ID NO: 40266 - DNA, 50 bp, synthetic construct
  source 1..50: mol_type = other DNA
ctatatttccctactgaaatgaaagtcttcggctgggctcggaaagccag

SEQ ID NO: 40267 - DNA, 50 bp, synthetic construct
  source 1..50: mol_type = other DNA
atcccggtcccgatacgctgccttgcagctcacttcacgtgttttttgag

SEQ ID NO: 40268 - DNA, 50 bp, synthetic construct
  source 1..50: mol_type = other DNA
acatatccgctgtcctcgccgagggacctgaccaatgaggcgggatatgt

SEQ ID NO: 40269 - DNA, 50 bp, synthetic construct
  source 1..50: mol_type = other DNA
ctggatttgctgtccaggttgccggtaggctcatcagccaggatgatcgc

SEQ ID NO: 40270 - DNA, 50 bp, synthetic construct
  source 1..50: mol_type = other DNA
cgtaagaaatgtctatgatgtgatcaatcacagcattatccttttcattc

SEQ ID NO: 40271 - DNA, 50 bp, synthetic construct
  source 1..50: mol_type = other DNA
gaaagatattatcatttggttcatttatgaacagggacacgatataatta

SEQ ID NO: 40272 - DNA, 50 bp, synthetic construct
  source 1..50: mol_type = other DNA
acggatgaaaatgtaccgatgcagttgcggtcagcctcattttgtctgtt

SEQ ID NO: 40273 - DNA, 50 bp, synthetic construct
  source 1..50: mol_type = other DNA
aagggattgtcgggaaaggagatatttccttcctttccttaccttatgtc

SEQ ID NO: 40274 - DNA, 50 bp, synthetic construct
  source 1..50: mol_type = other DNA
gaagctgaataattaaaacgggcggccggccttttgtcttatgcttccgc

SEQ ID NO: 40275 - DNA, 50 bp, synthetic construct
  source 1..50: mol_type = other DNA
ttcgcttgccttttttgtcttttcatgaaaaaatagaaaaagcaaataaa

SEQ ID NO: 40276 - DNA, 50 bp, synthetic construct
  source 1..50: mol_type = other DNA
cttacaatcgccctgtcaacctctcgaaagagggacagggcgtaagggct

SEQ ID NO: 40277 - DNA, 50 bp, synthetic construct
  source 1..50: mol_type = other DNA
tggctgggatagagacttctgcaaaagtgcggatttcaaactctgacgca

SEQ ID NO: 40278 - DNA, 50 bp, synthetic construct
  source 1..50: mol_type = other DNA
acaatttgttcttctgcttgctgcatagtgacccgaaaacaatagtttgt

SEQ ID NO: 40279 - DNA, 50 bp, synthetic construct
  source 1..50: mol_type = other DNA
ccgcggagcggcgaccgcaacgcccgatcgacaggttgagcgccccgccc

SEQ ID NO: 40280 - DNA, 50 bp, synthetic construct
  source 1..50: mol_type = other DNA
cattgtacttgccttttcaactgccacaagtgaaaaaaagaaggactgca

SEQ ID NO: 40281 - DNA, 50 bp, synthetic construct
  source 1..50: mol_type = other DNA
aaaagtagtagagcacattaaaataaatttttctagcgaaaattctctaa

SEQ ID NO: 40282 - DNA, 50 bp, synthetic construct
  source 1..50: mol_type = other DNA
tcttctttttttccttgatccatgttagaaattcaagaaaaagaagcgga

SEQ ID NO: 40283 - DNA, 50 bp, synthetic construct
  source 1..50: mol_type = other DNA
tttcaattcttgaaactgtagaattaataatttagaatcagattttggtt

SEQ ID NO: 40284 - DNA, 50 bp, synthetic construct
  source 1..50: mol_type = other DNA
ctggggggttcgaactggcggatgaccaggctcgtccgccaatcccccac

SEQ ID NO: 40285 - DNA, 50 bp, synthetic construct
  source 1..50: mol_type = other DNA
gatctacaaatatttccatgacagcagctccatcgaatattaaacctgta

SEQ ID NO: 40286 - DNA, 50 bp, synthetic construct
  source 1..50: mol_type = other DNA
aggctacctgacgctcagggaaaaaattaaaactgaatacaaccgctacg

SEQ ID NO: 40287 - DNA, 50 bp, synthetic construct
  source 1..50: mol_type = other DNA
ggaaatgacttgatgatgtgcagaagtaggcacataacatattgcattca

SEQ ID NO: 40288 - DNA, 50 bp, synthetic construct
  source 1..50: mol_type = other DNA
ggtcacaatgaacgcctgcatcgcggcgtatgcgcgagtttccactgaga

SEQ ID NO: 40289 - DNA, 50 bp, synthetic construct
  source 1..50: mol_type = other DNA
ggggccagcttcttcgaatgctggccgagggtgcggcagcggcgggccga

SEQ ID NO: 40290 - DNA, 50 bp, synthetic construct
  source 1..50: mol_type = other DNA
ttatcaagttctgttactttattttcctctaaaccgaggatgcttgcgga

SEQ ID NO: 40291 - DNA, 50 bp, synthetic construct
  source 1..50: mol_type = other DNA
ggtgctgacacgggcgtatcctgccatctttcaaagcgcaaaaaaagacc

SEQ ID NO: 40292 - DNA, 50 bp, synthetic construct
  source 1..50: mol_type = other DNA
ccatcgtgcccggtgttcatcgcctgtagcatatccagtgcttccgcacc

SEQ ID NO: 40293 - DNA, 50 bp, synthetic construct
  source 1..50: mol_type = other DNA
ggaacttagcggaggcaggtatgcatagatgcctgccagcgtccagtttg

SEQ ID NO: 40294 - DNA, 50 bp, synthetic construct
  source 1..50: mol_type = other DNA
accgcattcccattctgtatgcgatatcccatagctctgcagagggaatc

SEQ ID NO: 40295 - DNA, 50 bp, synthetic construct
  source 1..50: mol_type = other DNA
gggcaggcgctgtattttttctcctcagagaacatatagaacagaaggag

SEQ ID NO: 40296 - DNA, 50 bp, synthetic construct
  source 1..50: mol_type = other DNA
ttttttgtacttatttttcgtacaattatcgaaaatccgactacaaaacg

SEQ ID NO: 40297 - DNA, 50 bp, synthetic construct
  source 1..50: mol_type = other DNA
gcgaatataccaggttatggtaaaacagcaacatatgatgaaataaatgc

SEQ ID NO: 40298 - DNA, 50 bp, synthetic construct
  source 1..50: mol_type = other DNA
gggagggatttttaccactcataagccgccgccctccaaatatccctgtt

SEQ ID NO: 40299 - DNA, 50 bp, synthetic construct
  source 1..50: mol_type = other DNA
gtatctgcaaaactggctgatggaaatcctgtaggaggcgttgcaggttt

SEQ ID NO: 40300 - DNA, 50 bp, synthetic construct
  source 1..50: mol_type = other DNA
tctcatagagttttcgtattttatcaattcagtatcaaaactgcaatgga

SEQ ID NO: 40301 - DNA, 50 bp, synthetic construct
  source 1..50: mol_type = other DNA
ttttatgtttatcagtattaactgtgcagttcatagaaggggccatccaa

SEQ ID NO: 40302 - DNA, 50 bp, synthetic construct
  source 1..50: mol_type = other DNA
cccgtgcggtcaaaaacacgaccggtacaacgtatacaaaactgctgtgg

SEQ ID NO: 40303 - DNA, 50 bp, synthetic construct
  source 1..50: mol_type = other DNA
caattgtgggcgagatctgaaacctgggcctctttcgtcatttgcctagc

SEQ ID NO: 40304 - DNA, 50 bp, synthetic construct
  source 1..50: mol_type = other DNA
tgtctcactcggatgcccgaacgatatcattagggtgcccgaaggctctc

SEQ ID NO: 40305 - DNA, 50 bp, synthetic construct
  source 1..50: mol_type = other DNA
ccgaggcgtgcgccgattcggggcgccccgcgaatcggcgccggccgggg

SEQ ID NO: 40306 - DNA, 50 bp, synthetic construct
  source 1..50: mol_type = other DNA
tggagagcttcggccttgtccgcacgcgaggaccaggccgaacgtcgccg

SEQ ID NO: 40307 - DNA, 50 bp, synthetic construct
  source 1..50: mol_type = other DNA
ttggtaaaaaaacaaggttatatacttaacgttaagttgtatttaacttt

SEQ ID NO: 40308 - DNA, 50 bp, synthetic construct
  source 1..50: mol_type = other DNA
gccgctgctggcagtcacaacgtactgtttaccggaccgcctggcactgg

SEQ ID NO: 40309 - DNA, 50 bp, synthetic construct
  source 1..50: mol_type = other DNA
accatgccgctggcctgcatgcaggccagcataaaggcgtagcaaatggt

SEQ ID NO: 40310 - DNA, 50 bp, synthetic construct
  source 1..50: mol_type = other DNA
acctgcatgcccatcaggccgatgtcccagcccttgatcactcgcccggt

SEQ ID NO: 40311 - DNA, 50 bp, synthetic construct
  source 1..50: mol_type = other DNA
cggtgctgatcaagacggggctataaatctacccgtcttgatcaagtccg

SEQ ID NO: 40312 - DNA, 50 bp, synthetic construct
  source 1..50: mol_type = other DNA
tccaagctctttacttttgcgaatgcagtctttgactcagggcttttgga

SEQ ID NO: 40313 - DNA, 50 bp, synthetic construct
  source 1..50: mol_type = other DNA
tcgcgtgatcaaagggtgggaccagttgtgaccagggcctgatggggatg

SEQ ID NO: 40314 - DNA, 50 bp, synthetic construct
  source 1..50: mol_type = other DNA
caagttccgcctgcgggagggtaagaaattcaggctgctgcacgaccacc

SEQ ID NO: 40315 - DNA, 50 bp, synthetic construct
  source 1..50: mol_type = other DNA
gggcaatcacgaattcttcgttggttcattggtcgggatcaccatggcta

SEQ ID NO: 40316 - DNA, 50 bp, synthetic construct
  source 1..50: mol_type = other DNA
ctaaggcattaaccagaagtacagcactgggcagatagattattgttttt

SEQ ID NO: 40317 - DNA, 50 bp, synthetic construct
  source 1..50: mol_type = other DNA
attggaattcagatcactgcaaatatatttgacggtatctgtatcccata

SEQ ID NO: 40318 - DNA, 50 bp, synthetic construct
  source 1..50: mol_type = other DNA
aattttaatgtctttagataaaatcttatacatctttcattgtgaacatg

SEQ ID NO: 40319 - DNA, 50 bp, synthetic construct
  source 1..50: mol_type = other DNA
tatttgtgcagtaagctaaaatgatgacaattaacagtaaaaaaatttgc

SEQ ID NO: 40320 - DNA, 50 bp, synthetic construct
  source 1..50: mol_type = other DNA
tcttccaaatgcggttggcgcaactggggttagcacttcaccttggaagc

SEQ ID NO: 40321 - DNA, 50 bp, synthetic construct
  source 1..50: mol_type = other DNA
caacggcttttttctaaatgtggcggagagatagggatttgaaccctaga

SEQ ID NO: 40322 - DNA, 50 bp, synthetic construct
  source 1..50: mol_type = other DNA
gacaaaagtgctaccgtctcgacgtgatgcgtttgaggaaatagatccac

SEQ ID NO: 40323 - DNA, 50 bp, synthetic construct
  source 1..50: mol_type = other DNA
ttccatgtggttaaataccttttatactaaattgtccataccatgtggcc

SEQ ID NO: 40324 - DNA, 50 bp, synthetic construct
  source 1..50: mol_type = other DNA
aaaaaatgcaaagaaccaaagaagcatagcttttcttctttgggatttcg

SEQ ID NO: 40325 - DNA, 50 bp, synthetic construct
  source 1..50: mol_type = other DNA
aatactcgaaaaagaaataaaaattaaatcctccttcctacacacctata

SEQ ID NO: 40326 - DNA, 50 bp, synthetic construct
  source 1..50: mol_type = other DNA
aattagtacatggttcaacggtattactaccgtctcaacgtgaactgtta

SEQ ID NO: 40327 - DNA, 50 bp, synthetic construct
  source 1..50: mol_type = other DNA
ccagcggccggcagctcgcggcacgcgggcccgtcgtagcgggcgaggac

SEQ ID NO: 40328 - DNA, 50 bp, synthetic construct
  source 1..50: mol_type = other DNA
ctcgggccgggccgccgccaccttcgagatctttaccgccgccccccaag

SEQ ID NO: 40329 - DNA, 50 bp, synthetic construct
  source 1..50: mol_type = other DNA
gagagcgtgaggctaggagcaagaaactgtaatcaagccatctggctcta

SEQ ID NO: 40330 - DNA, 50 bp, synthetic construct
  source 1..50: mol_type = other DNA
tgcggcgtcgtcgtcttcgatcaggccaacgccctgacgaacgcgacgag

SEQ ID NO: 40331 - DNA, 50 bp, synthetic construct
  source 1..50: mol_type = other DNA
ataatatatgagactaatgacaatgttttgtccactatcacaacatttat

SEQ ID NO: 40332 - DNA, 50 bp, synthetic construct
  source 1..50: mol_type = other DNA
aatcagaacgtttgtgtggtcgttatggcgatgacatctcttttacttta

SEQ ID NO: 40333 - DNA, 50 bp, synthetic construct
  source 1..50: mol_type = other DNA
catgccctagcgtaccccccgattcgcggtgcgggccgtgtgaacgcatg

SEQ ID NO: 40334 - DNA, 50 bp, synthetic construct
  source 1..50: mol_type = other DNA
catatccagttctacatatctcatctcgggtttatttataactgccctta

SEQ ID NO: 40335 - DNA, 50 bp, synthetic construct
  source 1..50: mol_type = other DNA
caattattcaacttagtggtataatattaaagttgagctttttatcctaa

SEQ ID NO: 40336 - DNA, 50 bp, synthetic construct
  source 1..50: mol_type = other DNA
tttcagcgaaccgcaagaggaaacgtgattctggctgcgggagaaggaaa

SEQ ID NO: 40337 - DNA, 50 bp, synthetic construct
  source 1..50: mol_type = other DNA
gcggcatcttcgtcaatcacggcccgcatcgtgcgcgacccgcagaccgg

SEQ ID NO: 40338 - DNA, 50 bp, synthetic construct
  source 1..50: mol_type = other DNA
tggcaaaataaatcgcgacgcgacagccagcgtttcgcgttatccgggtc

SEQ ID NO: 40339 - DNA, 50 bp, synthetic construct
  source 1..50: mol_type = other DNA
ttagaatcgcttgaaagcattaaaacacttatagtataccgcttccgtcc

SEQ ID NO: 40340 - DNA, 50 bp, synthetic construct
  source 1..50: mol_type = other DNA
gacccgaacacgagagataatgtccttacaaaaattcgggtgtcattttt

SEQ ID NO: 40341 - DNA, 50 bp, synthetic construct
  source 1..50: mol_type = other DNA
agcggccatttggtcattataataaggaggggaataatatggtgccatca

SEQ ID NO: 40342 - DNA, 50 bp, synthetic construct
  source 1..50: mol_type = other DNA
tccacttcctcgccgagcagggccgcggataaaacctgcgagatcagcgt

SEQ ID NO: 40343 - DNA, 50 bp, synthetic construct
  source 1..50: mol_type = other DNA
cttcattagctgagtttcagcctcggctccaatgcactcgcaattgcttc

SEQ ID NO: 40344 - DNA, 50 bp, synthetic construct
  source 1..50: mol_type = other DNA
ttgattgttgatggggaccaccttccgcaataaaccccacacacaatcaa

SEQ ID NO: 40345 - DNA, 50 bp, synthetic construct
  source 1..50: mol_type = other DNA
ccaagttctaatccgattaacaagtatgagttaattggtaaagcaaacat

SEQ ID NO: 40346 - DNA, 50 bp, synthetic construct
  source 1..50: mol_type = other DNA
tctacttcagagtcatgggctatttaagagttccgattttagtctaaata

SEQ ID NO: 40347 - DNA, 50 bp, synthetic construct
  source 1..50: mol_type = other DNA
ttacctcctattgaaacgccagaaaatcttggctagtcgaggggagaatt

SEQ ID NO: 40348 - DNA, 50 bp, synthetic construct
  source 1..50: mol_type = other DNA
ttactacaatgctctgatggataagtttgctgcctcgtctcaagtggtgc

SEQ ID NO: 40349 - DNA, 50 bp, synthetic construct
  source 1..50: mol_type = other DNA
gaagtcgccgcaacctttttccgacgtattaaaagtcgtatggcattttt

SEQ ID NO: 40350 - DNA, 50 bp, synthetic construct
  source 1..50: mol_type = other DNA
atgatgcaactgaaaagctcaaggccaatcccccttttcataggctggtg

SEQ ID NO: 40351 - DNA, 50 bp, synthetic construct
  source 1..50: mol_type = other DNA
gaaggggataatcttcatagcttgaaaaagctgaaaagattaggctctta

SEQ ID NO: 40352 - DNA, 50 bp, synthetic construct
  source 1..50: mol_type = other DNA
tttttaaaagtaaatatgacatcaattcgggagatattttctcttaattg

SEQ ID NO: 40353 - DNA, 50 bp, synthetic construct
  source 1..50: mol_type = other DNA
gttctcgccatctttgggtacattataagggagcgcaagatgaattcgat

SEQ ID NO: 40354 - DNA, 50 bp, synthetic construct
  source 1..50: mol_type = other DNA
ttaaattaaaaaaggggtacatctgtagctctaataatttcatggttgaa

SEQ ID NO: 40355 - DNA, 50 bp, synthetic construct
  source 1..50: mol_type = other DNA
aatgaaagaagaattaacccttacagtaagtcattaatatttctttccag

SEQ ID NO: 40356 - DNA, 50 bp, synthetic construct
  source 1..50: mol_type = other DNA
ttttgccaaggtaggttggattgctaacaatcgtccaatccttgatttcg

SEQ ID NO: 40357 - DNA, 50 bp, synthetic construct
  source 1..50: mol_type = other DNA
aacgttaaattggttatcagtttgataaaactgactattgaatatcggtt

SEQ ID NO: 40358 - DNA, 50 bp, synthetic construct
  source 1..50: mol_type = other DNA
aaaagcaacccgtaccatcaactaagtttttcaagactcgggttgcaatt

SEQ ID NO: 40359 - DNA, 50 bp, synthetic construct
  source 1..50: mol_type = other DNA
ttaagtaaaataagaacaaacgttctgccgttacttctggcattcccatt

SEQ ID NO: 40360 - DNA, 50 bp, synthetic construct
  source 1..50: mol_type = other DNA
atataatttaattatcatattcttagaagaccattatccagcaattatat

SEQ ID NO: 40361 - DNA, 50 bp, synthetic construct
  source 1..50: mol_type = other DNA
ataagtgtactatggcggttgtactgattcacttccccatacccaaacat

SEQ ID NO: 40362 - DNA, 50 bp, synthetic construct
  source 1..50: mol_type = other DNA
taaactccatctaaaaccttcatatttgtgattttaccaacggttccata

SEQ ID NO: 40363 - DNA, 50 bp, synthetic construct
  source 1..50: mol_type = other DNA
tacaccatttccgttggtacaaacgtatccgcctctccgtggatgaataa

SEQ ID NO: 40364 - DNA, 50 bp, synthetic construct
  source 1..50: mol_type = other DNA
aactgagcttggggcgaatgatatcaacgatagttggttgcagcttaggg

SEQ ID NO: 40365 - DNA, 50 bp, synthetic construct
  source 1..50: mol_type = other DNA
ttattttataccttattttgcatatttaaaataagacctatataaatttg

SEQ ID NO: 40366 - DNA, 50 bp, synthetic construct
  source 1..50: mol_type = other DNA
tattttttcaataaatttacataaatatatatttatttattgcttaaact

SEQ ID NO: 40367 - DNA, 50 bp, synthetic construct
  source 1..50: mol_type = other DNA
aaataaatatgataatatcagtgtctaattcgattggtttttatttataa

SEQ ID NO: 40368 - DNA, 50 bp, synthetic construct
  source 1..50: mol_type = other DNA
acctcgtcgatgttcaccgagctcgatcacatcggggagtgggacgaggt

SEQ ID NO: 40369 - DNA, 50 bp, synthetic construct
  source 1..50: mol_type = other DNA
ctgtctggcgcagcgtgatgaaccggttgatgccacgctgctgtagcccc

SEQ ID NO: 40370 - DNA, 50 bp, synthetic construct
  source 1..50: mol_type = other DNA
actatgtttggcattccgaactgcgacaccattaaaaaagcaaagaaatg

SEQ ID NO: 40371 - DNA, 50 bp, synthetic construct
  source 1..50: mol_type = other DNA
aacctgggagacgtcaaagagttcctgaattagctgagtctgtgaaggtg

SEQ ID NO: 40372 - DNA, 50 bp, synthetic construct
  source 1..50: mol_type = other DNA
tatgatacggttctcccctctttacttgtgatacggttccccacgattaa

SEQ ID NO: 40373 - DNA, 50 bp, synthetic construct
  source 1..50: mol_type = other DNA
atagtttttcaaggttctttgctaattggcaatgtgagatgagaagggac

SEQ ID NO: 40374 - DNA, 50 bp, synthetic construct
  source 1..50: mol_type = other DNA
cgaggaatagaccatcttatgatacaacttataagctgcttgcttcaggt

SEQ ID NO: 40375 - DNA, 50 bp, synthetic construct
  source 1..50: mol_type = other DNA
tgtaatgaaagaaagtgaggtgagatctgtttgaattacacgctggtaca

SEQ ID NO: 40376 - DNA, 50 bp, synthetic construct
  source 1..50: mol_type = other DNA
ctactggaatcatttttgttgatatttatcaaccaaacggtttataatat

SEQ ID NO: 40377 - DNA, 50 bp, synthetic construct
  source 1..50: mol_type = other DNA
cggagacgaatcgagaaactaaaattgtttagtacctcaatttctctctc

SEQ ID NO: 40378 - DNA, 50 bp, synthetic construct
  source 1..50: mol_type = other DNA
gtacaaatggcaaagattctggtactagtgctctattattccatgtacgg

SEQ ID NO: 40379 - DNA, 50 bp, synthetic construct
  source 1..50: mol_type = other DNA
aatgatgctttaggattaaacggggtaccattgtttgctaaaaaggcagt

SEQ ID NO: 40380 - DNA, 50 bp, synthetic construct
  source 1..50: mol_type = other DNA
aagggccttcgggcaccccaatgaaatccttcgggcagccaaggctgacg

SEQ ID NO: 40381 - DNA, 50 bp, synthetic construct
  source 1..50: mol_type = other DNA
tcgatcggcttccgggcggcgcgggccgccaggatccagccgccgatcgc

SEQ ID NO: 40382 - DNA, 50 bp, synthetic construct
  source 1..50: mol_type = other DNA
acgaatcgctttatcagacggggttttccagtatacatcaaagaaaatga

SEQ ID NO: 40383 - DNA, 50 bp, synthetic construct
  source 1..50: mol_type = other DNA
catcaagaaataaagtctattctttcaaaatcaaccttaatgacttcatt

SEQ ID NO: 40384 - DNA, 50 bp, synthetic construct
  source 1..50: mol_type = other DNA
ttctccccattttgggttgagattatggtttccctccgaaatcctgaaaa

SEQ ID NO: 40385 - DNA, 50 bp, synthetic construct
  source 1..50: mol_type = other DNA
aggaagctacagatacctacccgtttccgggttgacttttgtacgccctt

SEQ ID NO: 40386 - DNA, 50 bp, synthetic construct
  source 1..50: mol_type = other DNA
tcaggccagcatccgcgatggaagcagctccagcggcagggctggcgatg

SEQ ID NO: 40387 - DNA, 50 bp, synthetic construct
  source 1..50: mol_type = other DNA
attcttgaccggcagggcgatggcgctgcatcccaatctcggcgaaatct

SEQ ID NO: 40388 - DNA, 50 bp, synthetic construct
  source 1..50: mol_type = other DNA
ttcttgaccgccgcgcccggccccgcggcggcgggcgaggcgccggagat

SEQ ID NO: 40389 - DNA, 50 bp, synthetic construct
  source 1..50: mol_type = other DNA
ccgacgacatcgccgccggcgcggcaaaacgtcggcctcgctgtcgtcga

SEQ ID NO: 40390 - DNA, 50 bp, synthetic construct
  source 1..50: mol_type = other DNA
gttggatagttggaataggtgacttattttcactaatataacattccatg

SEQ ID NO: 40391 - DNA, 50 bp, synthetic construct
  source 1..50: mol_type = other DNA
ttaatagactacccaaaaagaaaggaagaatcttttggcagttgtactga

SEQ ID NO: 40392 - DNA, 50 bp, synthetic construct
  source 1..50: mol_type = other DNA
catatcggcagttaattgaatatctggatatagaattgaagatggaaaag

SEQ ID NO: 40393 - DNA, 50 bp, synthetic construct
  source 1..50: mol_type = other DNA
acaaaattctttgatttttcttcccattgccaaaaagaacatacgtttgt

SEQ ID NO: 40394 - DNA, 50 bp, synthetic construct
  source 1..50: mol_type = other DNA
aagctaacatggagggcaaaggggaatcaccagcccctggctgttgggtc

SEQ ID NO: 40395 - DNA, 50 bp, synthetic construct
  source 1..50: mol_type = other DNA
agatgcatcaatatttcattttctattgcattctcaatacatcgggcggc

SEQ ID NO: 40396 - DNA, 50 bp, synthetic construct
  source 1..50: mol_type = other DNA
gtactgtgacgattgtactggtttagggtagatgatgagcgattatactg

SEQ ID NO: 40397 - DNA, 50 bp, synthetic construct
  source 1..50: mol_type = other DNA
gcgcggacgcctggggattcggagggctccattcgttgtggcgatcgcgc

SEQ ID NO: 40398 - DNA, 50 bp, synthetic construct
  source 1..50: mol_type = other DNA
tggccatggcggagcagctcgccgggcccctgtctggtccgccagctcac

SEQ ID NO: 40399 - DNA, 50 bp, synthetic construct
  source 1..50: mol_type = other DNA
ccctcccagacggggggggattgggggggcgcgccccccgtcgcgggaag

SEQ ID NO: 40400 - DNA, 50 bp, synthetic construct
  source 1..50: mol_type = other DNA
gcgcataacctgcttctttaaagctaatctaaatcctgttcagcgggccg

SEQ ID NO: 40401 - DNA, 50 bp, synthetic construct
  source 1..50: mol_type = other DNA
ttaaaggctgggagcaaggtttttgtgaaaacgttgggaccagggcctga

SEQ ID NO: 40402 - DNA, 50 bp, synthetic construct
  source 1..50: mol_type = other DNA
atgggaacattttgatttaatactttttacgcaaattcaaatgttcccat

SEQ ID NO: 40403 - DNA, 50 bp, synthetic construct
  source 1..50: mol_type = other DNA
aatagtatcattttacaaaagaaatatttttttgtcaaaatgaaactgtt

SEQ ID NO: 40404 - DNA, 50 bp, synthetic construct
  source 1..50: mol_type = other DNA
tgcctggcatctgtttagcgcgctgtggggattgtcatttgctcgctgga

SEQ ID NO: 40405 - DNA, 50 bp, synthetic construct
  source 1..50: mol_type = other DNA
acagttgatgtcggcaagaacggcatgcgtatctgctcaatggtcacttc

SEQ ID NO: 40406 - DNA, 50 bp, synthetic construct
  source 1..50: mol_type = other DNA
attatgcgaggagaagcttatcataagtaaaactaaaaaattctgtatga

SEQ ID NO: 40407 - DNA, 50 bp, synthetic construct
  source 1..50: mol_type = other DNA
taaaccaatttgaaaagcaacctaaaaaggatgatattgaaatatatgta

SEQ ID NO: 40408 - DNA, 50 bp, synthetic construct
  source 1..50: mol_type = other DNA
gtcaaacttaccacattctccacatgcgccgtatgagggaacatatcaac

SEQ ID NO: 40409 - DNA, 50 bp, synthetic construct
  source 1..50: mol_type = other DNA
acgacgcttgtgacttataatgggaaatctttcgattggcctcacgtgaa

SEQ ID NO: 40410 - DNA, 50 bp, synthetic construct
  source 1..50: mol_type = other DNA
tttccggcaagttgttagattcaaattcaagcataaaccattgccggcaa

SEQ ID NO: 40411 - DNA, 50 bp, synthetic construct
  source 1..50: mol_type = other DNA
tctttcacttgttctgctgctatatctatatcttcagctgaaatgaaaaa

SEQ ID NO: 40412 - DNA, 50 bp, synthetic construct
  source 1..50: mol_type = other DNA
tatatgtaaaaggtaatgtaacacttattcatcattaccgctgacaacta

SEQ ID NO: 40413 - DNA, 50 bp, synthetic construct
  source 1..50: mol_type = other DNA
attactactttccgctcaacttattaataagagcttgtgccagtattgat

SEQ ID NO: 40414 - DNA, 50 bp, synthetic construct
  source 1..50: mol_type = other DNA
tttcaattatatctcgtgcattttcagacaaagaagaaattttagtgcca

SEQ ID NO: 40415 - DNA, 50 bp, synthetic construct
  source 1..50: mol_type = other DNA
ttctgccctctgttttactgtaggatcctttttggaaagagggggcaaaa

SEQ ID NO: 40416 - DNA, 50 bp, synthetic construct
  source 1..50: mol_type = other DNA
ccagcacccggtggtcccataagaagaatattgtgcattcctgctgcagc

SEQ ID NO: 40417 - DNA, 50 bp, synthetic construct
  source 1..50: mol_type = other DNA
tgagatatggaattgtgaggattggacacttaagataatttaattacaac

SEQ ID NO: 40418 - DNA, 50 bp, synthetic construct
  source 1..50: mol_type = other DNA
atccaatatcatcaaattcagtcataaggctgttgtggatgaaatagcat

SEQ ID NO: 40419 - DNA, 50 bp, synthetic construct
  source 1..50: mol_type = other DNA
gctatacaaagttacaccacggataaattagtggtataatttgtaataga

SEQ ID NO: 40420 - DNA, 50 bp, synthetic construct
  source 1..50: mol_type = other DNA
atagataagataaaaaaatttctattgattctgttttttgccttatatat

SEQ ID NO: 40421 - DNA, 50 bp, synthetic construct
  source 1..50: mol_type = other DNA
gttcccgcagacgcagcatatagagacacatattgagagtattacggctt

SEQ ID NO: 40422 - DNA, 50 bp, synthetic construct
  source 1..50: mol_type = other DNA
acttgcttcgactgaagttcatcggaacttgaaacaattgaaaagcaaat

SEQ ID NO: 40423 - DNA, 50 bp, synthetic construct
  source 1..50: mol_type = other DNA
gcggaaagcttcctccgagtttgttaattaatgaagaggaagcagttaag

SEQ ID NO: 40424 - DNA, 50 bp, synthetic construct
  source 1..50: mol_type = other DNA
ttatgatacgcctctgcttatcggtatgatatgcttctcccttcataatc

SEQ ID NO: 40425 - DNA, 50 bp, synthetic construct
  source 1..50: mol_type = other DNA
tccgtttttcggaagatagctaaaactgtaagcatattccgcctgctgga

SEQ ID NO: 40426 - DNA, 50 bp, synthetic construct
  source 1..50: mol_type = other DNA
tttcgaggtttgagagcaaaaatttgtcagtgtgacatattacctctaaa

SEQ ID NO: 40427 - DNA, 50 bp, synthetic construct
  source 1..50: mol_type = other DNA
gttgttatttctcgttctccgtctgcaggtcaaggcagaagtggacaaac

SEQ ID NO: 40428 - DNA, 50 bp, synthetic construct
  source 1..50: mol_type = other DNA
tattttccatataccgggcatttttaaacttctggcgtttatggaaaata

SEQ ID NO: 40429 - DNA, 50 bp, synthetic construct
  source 1..50: mol_type = other DNA
caagtaaaacagaggaatttttattttaaaaatgaacgctgttgaacttt

SEQ ID NO: 40430 - DNA, 50 bp, synthetic construct
  source 1..50: mol_type = other DNA
tattatggggttgtaaaagcaggtagaatggcttttagaaggctttaaga

SEQ ID NO: 40431 - DNA, 50 bp, synthetic construct
  source 1..50: mol_type = other DNA
tggcgtcggccctgggtcaccacctgtagggacacacgacgccgccgcca

SEQ ID NO: 40432 - DNA, 50 bp, synthetic construct
  source 1..50: mol_type = other DNA
gcgggggagttcgccaacagcttcgttctcgccaagatgaagctgctgac

SEQ ID NO: 40433 - DNA, 50 bp, synthetic construct
  source 1..50: mol_type = other DNA
cttctaaaacccacagaggaaggagtctcttcaactaagatttttagatc

SEQ ID NO: 40434 - DNA, 50 bp, synthetic construct
  source 1..50: mol_type = other DNA
attacaccaacaagatgacgacaaaaagaagaacattttgatattagata

SEQ ID NO: 40435 - DNA, 50 bp, synthetic construct
  source 1..50: mol_type = other DNA
ctttctgaagcccttcaaaacggctggagacttttttaatcttttcaagc

SEQ ID NO: 40436 - DNA, 50 bp, synthetic construct
  source 1..50: mol_type = other DNA
agtttaaaaaattatcagttttggatccaacactagaatttgctgaaact

SEQ ID NO: 40437 - DNA, 50 bp, synthetic construct
  source 1..50: mol_type = other DNA
tcctggcgcgttatggtgccttgctcccaaggccgcgagcgattccgaac

SEQ ID NO: 40438 - DNA, 50 bp, synthetic construct
  source 1..50: mol_type = other DNA
gaccggctcggcccccgcttcgaggcgatgtcgaggaagcaaagctcgtc

SEQ ID NO: 40439 - DNA, 50 bp, synthetic construct
  source 1..50: mol_type = other DNA
aaaagaccactaaatagtggccttttagttgtctccttaagtgagcgcgg

SEQ ID NO: 40440 - DNA, 50 bp, synthetic construct
  source 1..50: mol_type = other DNA
tttggaaagtaaagggagtatgaaatttgattaatccctccctttccact

SEQ ID NO: 40441 - DNA, 50 bp, synthetic construct
  source 1..50: mol_type = other DNA
caaattgatagaagggaggaaataaatatttattttcttataaatatgat

SEQ ID NO: 40442 - DNA, 50 bp, synthetic construct
  source 1..50: mol_type = other DNA
gcaaaggctgttgggaatggaataaacatggcattagatcactttttgtc

SEQ ID NO: 40443 - DNA, 50 bp, synthetic construct
  source 1..50: mol_type = other DNA
cccgcacccggtgggcccaccatcagcaggttgtggccgcccgccgccgc

SEQ ID NO: 40444 - DNA, 50 bp, synthetic construct
  source 1..50: mol_type = other DNA
agccttttcattgtactccaaaaatacccagtgccggaatcgaaccggca

SEQ ID NO: 40445 - DNA, 50 bp, synthetic construct
  source 1..50: mol_type = other DNA
actgtgtttatatcagtactgatttaacgccgcgctgatgtaaaccgcga

SEQ ID NO: 40446 - DNA, 50 bp, synthetic construct
  source 1..50: mol_type = other DNA
ccagttattcgctcctgatgaagatatcttgaatatacaacaataatcgt

SEQ ID NO: 40447 - DNA, 50 bp, synthetic construct
  source 1..50: mol_type = other DNA
ccttgcaggatattatcgaacaagatcacgtttattaatatcctcgatat

SEQ ID NO: 40448 - DNA, 50 bp, synthetic construct
  source 1..50: mol_type = other DNA
atcaaaaaccacgttttacaaggcaggagttataaaatgtagtataacat

SEQ ID NO: 40449 - DNA, 50 bp, synthetic construct
  source 1..50: mol_type = other DNA
gtgttcaatcagaagtttttaacggcccctacaaggggcttattgttatg

SEQ ID NO: 40450 - DNA, 50 bp, synthetic construct
  source 1..50: mol_type = other DNA
caataatcaatcctaacaaaaaattaaacctttgattaatcaatagattg

SEQ ID NO: 40451 - DNA, 50 bp, synthetic construct
  source 1..50: mol_type = other DNA
tttggctggcatgtggtcaaggtattaactaaggttctctacagaacata

SEQ ID NO: 40452 - DNA, 50 bp, synthetic construct
  source 1..50: mol_type = other DNA
catccatatcaaaatcgaacgtcggatcatgtaaagcaggggtatcaccg

SEQ ID NO: 40453 - DNA, 50 bp, synthetic construct
  source 1..50: mol_type = other DNA
gatgacattcttgaaaaaagctaaggatagcgagattgaagaatttgagt

SEQ ID NO: 40454 - DNA, 50 bp, synthetic construct
  source 1..50: mol_type = other DNA
ttattgtgttaataaagtttcttcatccgacaaacatagtcacataataa

SEQ ID NO: 40455 - DNA, 50 bp, synthetic construct
  source 1..50: mol_type = other DNA
ctgtcgtccattttgttcttgtgcttctatttacacaaaatattttacac

SEQ ID NO: 40456 - DNA, 50 bp, synthetic construct
  source 1..50: mol_type = other DNA
attataatacaatggatttgattttaaatcgatatcagcttttttctgat

SEQ ID NO: 40457 - DNA, 50 bp, synthetic construct
  source 1..50: mol_type = other DNA
ggatcaatgcgggggctccgtatcatgatacgcagcgccttatcataagt

SEQ ID NO: 40458 - DNA, 50 bp, synthetic construct
  source 1..50: mol_type = other DNA
tacggttctccgttacacctccaacgttacttgtggtacggttctccatt

SEQ ID NO: 40459 - DNA, 50 bp, synthetic construct
  source 1..50: mol_type = other DNA
tatatttttattataaaaatacactagggcgttttttatataaaaatctc

SEQ ID NO: 40460 - DNA, 50 bp, synthetic construct
  source 1..50: mol_type = other DNA
atgttccctcattctacacatgtggacacatgtggaaactgtagctaaga

SEQ ID NO: 40461 - DNA, 50 bp, synthetic construct
  source 1..50: mol_type = other DNA
tcattctacacatgtggagacggtagcaagttgaaactgtagctaagata

SEQ ID NO: 40462 - DNA, 50 bp, synthetic construct
  source 1..50: mol_type = other DNA
aaggttatgtcaggatagctttgtccagtttcccatttagatacagaagc

SEQ ID NO: 40463 - DNA, 50 bp, synthetic construct
  source 1..50: mol_type = other DNA
cggagacgaatcgagaaactaaaattgtttagtacctcgatttctctcac

SEQ ID NO: 40464 - DNA, 50 bp, synthetic construct
  source 1..50: mol_type = other DNA
tgtatgcaagatatccactggacagacggctcatttggttatttcccatc

SEQ ID NO: 40465 - DNA, 50 bp, synthetic construct
  source 1..50: mol_type = other DNA
gaaacgcaagattttcttggttgcttaacttcaggaacctctagcgttga

SEQ ID NO: 40466 - DNA, 50 bp, synthetic construct
  source 1..50: mol_type = other DNA
gccctgagacagaggctttgccaggctcttttgaacctcatcttcattat

SEQ ID NO: 40467 - DNA, 50 bp, synthetic construct
  source 1..50: mol_type = other DNA
tcaaatcctgtcatcccgaccatgaccacagacgaccgggaattttcgcc

SEQ ID NO: 40468 - DNA, 50 bp, synthetic construct
  source 1..50: mol_type = other DNA
ttgtataactttttcatcctttttataaaattaagcaaagcaaatagcac

SEQ ID NO: 40469 - DNA, 50 bp, synthetic construct
  source 1..50: mol_type = other DNA
acatcgtttcccacttaacgtatacttggcagagcctcatcaaacacaaa

SEQ ID NO: 40470 - DNA, 50 bp, synthetic construct
  source 1..50: mol_type = other DNA
aaaaatgatgctatttttagcagtgattggttaaacttgctttcacgctt

SEQ ID NO: 40471 - DNA, 50 bp, synthetic construct
  source 1..50: mol_type = other DNA
ccaccacaacacctcaccgagggccagccatcgtgttgggcttcaggtgg

SEQ ID NO: 40472 - DNA, 50 bp, synthetic construct
  source 1..50: mol_type = other DNA
tggttcatcaggcgggaagacgttgctgcctgctctggccttgtcagcca

SEQ ID NO: 40473 - DNA, 50 bp, synthetic construct
  source 1..50: mol_type = other DNA
ccggtaccgggtggcccgctgaacagcaggttgtgcgcgccggcggcagc

SEQ ID NO: 40474 - DNA, 50 bp, synthetic construct
  source 1..50: mol_type = other DNA
tcagccattttcaacgccaccacgccactgatgggcgtgctgattggcgg

SEQ ID NO: 40475 - DNA, 50 bp, synthetic construct
  source 1..50: mol_type = other DNA
taaacagagtcaaacccatctttttttcgagatgggatttactgcatatt

SEQ ID NO: 40476 - DNA, 50 bp, synthetic construct
  source 1..50: mol_type = other DNA
tgttatgagaccgaaggtatccgcatgcagaagtttcggtagtgattcct

SEQ ID NO: 40477 - DNA, 50 bp, synthetic construct
  source 1..50: mol_type = other DNA
caggaaataatttcctgtctctataaacagaaaagagaaattaataaaaa

SEQ ID NO: 40478 - DNA, 50 bp, synthetic construct
  source 1..50: mol_type = other DNA
ataccaaggcaattaattctgagcagtctaaatctgtactgccttggtct

SEQ ID NO: 40479 - DNA, 50 bp, synthetic construct
  source 1..50: mol_type = other DNA
gcgagtcggttcataccgtcatcgtcagtcccgcgtgtcggccgactcgg

SEQ ID NO: 40480 - DNA, 50 bp, synthetic construct
  source 1..50: mol_type = other DNA
aacgggtagaaggtgccgcgcttgtagaaggtgccgcgcttgtacaggta

SEQ ID NO: 40481 - DNA, 50 bp, synthetic construct
  source 1..50: mol_type = other DNA
tgccagagcaagatagcccctcggatccgaccctgaaagagcggctggcc

SEQ ID NO: 40482 - DNA, 50 bp, synthetic construct
  source 1..50: mol_type = other DNA
tgggttacgttatacagatgactgtacagtcatctgtataatgtactttg

SEQ ID NO: 40483 - DNA, 50 bp, synthetic construct
  source 1..50: mol_type = other DNA
ctttttatattatatcacaaatccatctctttgtgggatcaagaaaaaat

SEQ ID NO: 40484 - DNA, 50 bp, synthetic construct
  source 1..50: mol_type = other DNA
ttttgctacaatcttcccttgcacaagagcaatgggttgttgtaatgcca

SEQ ID NO: 40485 - DNA, 50 bp, synthetic construct
  source 1..50: mol_type = other DNA
gaccgcttgctccagttgttggcggagcttggtgttgggtggctgtggtg

SEQ ID NO: 40486 - DNA, 50 bp, synthetic construct
  source 1..50: mol_type = other DNA
ttacttgttttgccaaacttggatttatgaaagttagaaaaaataaagat

SEQ ID NO: 40487 - DNA, 50 bp, synthetic construct
  source 1..50: mol_type = other DNA
cgggggtaaaaaaatacgctggttcgatggaatacatttttcagaatgaa

SEQ ID NO: 40488 - DNA, 50 bp, synthetic construct
  source 1..50: mol_type = other DNA
ccttggcggatatcaactcttccttcaaaataaaaagatgaaaggaaagg

SEQ ID NO: 40489 - DNA, 50 bp, synthetic construct
  source 1..50: mol_type = other DNA
agccgggcgggaaaatttgccggataacctccgtctttcagcgttagact

SEQ ID NO: 40490 - DNA, 50 bp, synthetic construct
  source 1..50: mol_type = other DNA
gccccgcgggagccaatcgccacggacgttcgtgcggcacgacccggggc

SEQ ID NO: 40491 - DNA, 50 bp, synthetic construct
  source 1..50: mol_type = other DNA
gctgccgccggcggccacaacctcctgatggtcgggccgccgggctcggg

SEQ ID NO: 40492 - DNA, 50 bp, synthetic construct
  source 1..50: mol_type = other DNA
cccggccggcattcgccgtctagttgtctattcggtcggtgccggcgacg

SEQ ID NO: 40493 - DNA, 50 bp, synthetic construct
  source 1..50: mol_type = other DNA
gatttcatcgttttgagatagataaacaagtatctttaaacaatgaaagt

SEQ ID NO: 40494 - DNA, 50 bp, synthetic construct
  source 1..50: mol_type = other DNA
ataaaaaattactttgtctgcctgacaacgccgttaagctaattttttaa

SEQ ID NO: 40495 - DNA, 50 bp, synthetic construct
  source 1..50: mol_type = other DNA
gcacgacccgctcaatcagtccatgttacggctgattgatggcgtcggca

SEQ ID NO: 40496 - DNA, 50 bp, synthetic construct
  source 1..50: mol_type = other DNA
gcatattcttttaatttacgcgaacacggagcaaaggagaatgaatatga

SEQ ID NO: 40497 - DNA, 50 bp, synthetic construct
  source 1..50: mol_type = other DNA
tgttgaacgcaaccgtacctgaaaattgcgtcatcaccttcatctcaacc

SEQ ID NO: 40498 - DNA, 50 bp, synthetic construct
  source 1..50: mol_type = other DNA
tcggtatggcgcgccgtaccgggtgaaatggcgcactcaggaggattcga

SEQ ID NO: 40499 - DNA, 50 bp, synthetic construct
  source 1..50: mol_type = other DNA
tcagaatcgaccgttgccttggggcaacccaggctcacgaacccgactgt

SEQ ID NO: 40500 - DNA, 50 bp, synthetic construct
  source 1..50: mol_type = other DNA
caagtaggaagggtgcggatcgaacgcacgatgagcaccgtcaacgcttg

SEQ ID NO: 40501 - DNA, 50 bp, synthetic construct
  source 1..50: mol_type = other DNA
ccgcttcaccaagtccgaggcggacggcctccttctgctgggaggtgcgc

SEQ ID NO: 40502 - DNA, 50 bp, synthetic construct
  source 1..50: mol_type = other DNA
gtagcgtatctaaaactcttatctaaaaataacaaatttagatactcttg

SEQ ID NO: 40503 - DNA, 50 bp, synthetic construct
  source 1..50: mol_type = other DNA
aaggtgggtatggtttcgctcgggtgcccgaaggccctcgtcgactccga

SEQ ID NO: 40504 - DNA, 50 bp, synthetic construct
  source 1..50: mol_type = other DNA
ccaaacgcaaaggcattaaactttttaaacgttaatgcttagggctaatc

SEQ ID NO: 40505 - DNA, 50 bp, synthetic construct
  source 1..50: mol_type = other DNA
gaaaaatctgccgttcaaggagtttttgttttttggttatgagatttttt

SEQ ID NO: 40506 - DNA, 50 bp, synthetic construct
  source 1..50: mol_type = other DNA
aggctttttactgagtggtgcgttatgcccgcgtttccacggaaaaggaa

SEQ ID NO: 40507 - DNA, 50 bp, synthetic construct
  source 1..50: mol_type = other DNA
agacaaaccagattcatcaactttataaactgtgaaaatccggtttgcta

SEQ ID NO: 40508 - DNA, 50 bp, synthetic construct
  source 1..50: mol_type = other DNA
ccaaatcaccacagtatttttcattgtaaaaatatcctcatcgaattctt

SEQ ID NO: 40509 - DNA, 50 bp, synthetic construct
  source 1..50: mol_type = other DNA
tccgtgctgacacgggcatatcctgcaaccacaactgacttcatcacaga

SEQ ID NO: 40510 - DNA, 50 bp, synthetic construct
  source 1..50: mol_type = other DNA
atgacacacctttttatatagattttaaaagataactggacggaactcac

SEQ ID NO: 40511 - DNA, 50 bp, synthetic construct
  source 1..50: mol_type = other DNA
aacgaaggctgggcttcggtcagctagcaatacgaaggctgggcttccta

SEQ ID NO: 40512 - DNA, 50 bp, synthetic construct
  source 1..50: mol_type = other DNA
gtttttgcataacatttcaagccaatctccttggaaatgtggtttcgaac

SEQ ID NO: 40513 - DNA, 50 bp, synthetic construct
  source 1..50: mol_type = other DNA
gggcgcggaatacggccgcgcgttcggacagttcgccgtcccgcatcgcc

SEQ ID NO: 40514 - DNA, 50 bp, synthetic construct
  source 1..50: mol_type = other DNA
cacctagcccctatcgttataatacgctttataacgaagggaaagatcga

SEQ ID NO: 40515 - DNA, 50 bp, synthetic construct
  source 1..50: mol_type = other DNA
tttctttttcttacaaggagaaataaatcgagcttttatagtaaaattaa

SEQ ID NO: 40516 - DNA, 50 bp, synthetic construct
  source 1..50: mol_type = other DNA
ggcgaggttgaccgtaaagctatgtacatagcatagtgattctttttgat

SEQ ID NO: 40517 - DNA, 50 bp, synthetic construct
  source 1..50: mol_type = other DNA
tttgaatctctaattgcgtattttttaacatgaacaataaattctttaaa

SEQ ID NO: 40518 - DNA, 50 bp, synthetic construct
  source 1..50: mol_type = other DNA
cacctcttccgccatctgcgttcatatgttctccccaatccgccatttgc

SEQ ID NO: 40519 - DNA, 50 bp, synthetic construct
  source 1..50: mol_type = other DNA
tatttgcaacatagattatgtaggcgcctgagaaaatagacaatcaaatt

SEQ ID NO: 40520 - DNA, 50 bp, synthetic construct
  source 1..50: mol_type = other DNA
ctatctgcaccagtcatgcacaagatctggcaggaaatcggaaccatgag

SEQ ID NO: 40521 - DNA, 50 bp, synthetic construct
  source 1..50: mol_type = other DNA
ccgttggcccgggcaatgacgatctcgcgcaggacctccaggaccttgcg

SEQ ID NO: 40522 - DNA, 50 bp, synthetic construct
  source 1..50: mol_type = other DNA
gaagttcaagaagtgttgctactttgaagaagtgctgtgcggcttacctc

SEQ ID NO: 40523 - DNA, 50 bp, synthetic construct
  source 1..50: mol_type = other DNA
cagaagggactcatctcgctgaacgcgccggtcgagacccgcccgcccaa

SEQ ID NO: 40524 - DNA, 50 bp, synthetic construct
  source 1..50: mol_type = other DNA
agcgagctatgattgttggcaattcatcaaagctacaaagacggtcattt

SEQ ID NO: 40525 - DNA, 50 bp, synthetic construct
  source 1..50: mol_type = other DNA
acttgcatccccatgatcccctgatcccaacccttgatcacccgaccggt

SEQ ID NO: 40526 - DNA, 50 bp, synthetic construct
  source 1..50: mol_type = other DNA
gggtgatcaaggggtgggatcagggcactcccaccaccccacgaaacgcc

SEQ ID NO: 40527 - DNA, 50 bp, synthetic construct
  source 1..50: mol_type = other DNA
acatcatgtggagacggtagcattatgatgaacaagttgagtgcgtagcg

SEQ ID NO: 40528 - DNA, 50 bp, synthetic construct
  source 1..50: mol_type = other DNA
ttatgttctaaaaagcttgctattaatgcaaaaaagagcttagaacagag

SEQ ID NO: 40529 - DNA, 50 bp, synthetic construct
  source 1..50: mol_type = other DNA
attttagttacacatgatattggtgaagcaataagcatatcagataaagt

SEQ ID NO: 40530 - DNA, 50 bp, synthetic construct
  source 1..50: mol_type = other DNA
tattaaaaatccaaatagccttactttattggctatttggatttaagata

SEQ ID NO: 40531 - DNA, 50 bp, synthetic construct
  source 1..50: mol_type = other DNA
caaaataatgaagggtgagctttaatgaaatgtgtccaagtaagaatttt

SEQ ID NO: 40532 - DNA, 50 bp, synthetic construct
  source 1..50: mol_type = other DNA
gtcattccgataatcgttacaagcattcttacaacagatccggttacgac

SEQ ID NO: 40533 - DNA, 50 bp, synthetic construct
  source 1..50: mol_type = other DNA
tacattaatacataaagatgcacttaattttgtccctaaatattaataat

SEQ ID NO: 40534 - DNA, 50 bp, synthetic construct
  source 1..50: mol_type = other DNA
gtagatatgttccctcattctacacatgtggaaactgtagctaagataat

SEQ ID NO: 40535 - DNA, 50 bp, synthetic construct
  source 1..50: mol_type = other DNA
atgaagaatgaaccgtatcataaataatattgatacggagaaccttatca

SEQ ID NO: 40536 - DNA, 50 bp, synthetic construct
  source 1..50: mol_type = other DNA
agttcttttaaaattaaagtctcttaaaagcttttaataataatttaagt

SEQ ID NO: 40537 - DNA, 50 bp, synthetic construct
  source 1..50: mol_type = other DNA
aggatatatgtatttaccctaaaagatttttctaaaaatttgtatatttt

SEQ ID NO: 40538 - DNA, 50 bp, synthetic construct
  source 1..50: mol_type = other DNA
ttagaatatctaaattaatgattatggaatttttaaacatcttattttaa

SEQ ID NO: 40539 - DNA, 50 bp, synthetic construct
  source 1..50: mol_type = other DNA
attttacaactgtctctacgtgtatccacatgaggagtgttagggaacat

SEQ ID NO: 40540 - DNA, 50 bp, synthetic construct
  source 1..50: mol_type = other DNA
tcccaaacactgcccatatagagtgcactctatacatattgaaaatgtcg

SEQ ID NO: 40541 - DNA, 50 bp, synthetic construct
  source 1..50: mol_type = other DNA
tattaaaatatgattttatttataattttaaaatatccttttccttaact

SEQ ID NO: 40542 - DNA, 50 bp, synthetic construct
  source 1..50: mol_type = other DNA
atttcaaaaatgccggctcatacgtttatatgaatacatatttatgaaat

SEQ ID NO: 40543 - DNA, 50 bp, synthetic construct
  source 1..50: mol_type = other DNA
aatatagatactagttagcgcaaaactttttattatcaagtatcgttaaa

SEQ ID NO: 40544 - DNA, 50 bp, synthetic construct
  source 1..50: mol_type = other DNA
gcaattagtacatggttcaacttgctaccgtctcaacgtgaactgttatg

SEQ ID NO: 40545 - DNA, 50 bp, synthetic construct
  source 1..50: mol_type = other DNA
ttttcaaacgagaaagtttctataacgaaaagcagagaaatagaagaagt

SEQ ID NO: 40546 - DNA, 50 bp, synthetic construct
  source 1..50: mol_type = other DNA
ttcgaatcccctaggctccacccgacggaggtccactcatcggcgcccgc

SEQ ID NO: 40547 - DNA, 50 bp, synthetic construct
  source 1..50: mol_type = other DNA
cgggtgttccgagtgatgttccacgaaccccgaatcccacccaataccgg

SEQ ID NO: 40548 - DNA, 50 bp, synthetic construct
  source 1..50: mol_type = other DNA
aggatggcatgtccacggtcgagtatacgcgatcgggactatcgcggccg

SEQ ID NO: 40549 - DNA, 50 bp, synthetic construct
  source 1..50: mol_type = other DNA
tttgaaaaatggctggaaaatcacgagttttcttccctgcttttgcggga

SEQ ID NO: 40550 - DNA, 50 bp, synthetic construct
  source 1..50: mol_type = other DNA
cgcaatggtgtcatcgcctgtctggacagcgagacgaccacaccacgctc

SEQ ID NO: 40551 - DNA, 50 bp, synthetic construct
  source 1..50: mol_type = other DNA
gggttcaaatcccctatcctccgccaggaccgcatcaaggagggcaatgg

SEQ ID NO: 40552 - DNA, 50 bp, synthetic construct
  source 1..50: mol_type = other DNA
gtgtaacctgctaaacggtacttctttatgatgagttatgaaggattgaa

SEQ ID NO: 40553 - DNA, 50 bp, synthetic construct
  source 1..50: mol_type = other DNA
cttttttcctgcaccgagtacggatatcatggtctggtgccgctgatggg

SEQ ID NO: 40554 - DNA, 50 bp, synthetic construct
  source 1..50: mol_type = other DNA
agaattaacatgtaaatacaggtaattacccgtatttatatgtttttacg

SEQ ID NO: 40555 - DNA, 50 bp, synthetic construct
  source 1..50: mol_type = other DNA
taatatgaagtcattaattttgcatgcccagtatctaaaagaacaatatt

SEQ ID NO: 40556 - DNA, 50 bp, synthetic construct
  source 1..50: mol_type = other DNA
gccagctttttttatatttttttcgagaaaaaaatagggaaaattgggga

SEQ ID NO: 40557 - DNA, 50 bp, synthetic construct
  source 1..50: mol_type = other DNA
tctgcgacagcagattgccgccgccggcattcgacaagggctgcggcaga

SEQ ID NO: 40558 - DNA, 50 bp, synthetic construct
  source 1..50: mol_type = other DNA
ttttatcattgtactgttcatgatttattataaatcagttgaaaataaaa

SEQ ID NO: 40559 - DNA, 50 bp, synthetic construct
  source 1..50: mol_type = other DNA
gtgatcgccacataaatcaggaagcgcttcttgctttgcagttacataaa

SEQ ID NO: 40560 - DNA, 50 bp, synthetic construct
  source 1..50: mol_type = other DNA
ctggacagacgctcaacgtaaccaattggttacactggacagacggcgca

SEQ ID NO: 40561 - DNA, 50 bp, synthetic construct
  source 1..50: mol_type = other DNA
tgctgctgggaatcacaacttattgccataaggcgttgtttcttggcccg

SEQ ID NO: 40562 - DNA, 50 bp, synthetic construct
  source 1..50: mol_type = other DNA
tgttaccaacagggtgataacaaagctttgttgtcaccttgttggtgtaa

SEQ ID NO: 40563 - DNA, 50 bp, synthetic construct
  source 1..50: mol_type = other DNA
attggaaaaagaaaaaaccacatagtatgttttttatttattagacgaat

SEQ ID NO: 40564 - DNA, 50 bp, synthetic construct
  source 1..50: mol_type = other DNA
atggacgacggtttcctgaatcttttaacgatttcagaaccgtcgtccat

SEQ ID NO: 40565 - DNA, 50 bp, synthetic construct
  source 1..50: mol_type = other DNA
cttgcgtatcctgcgacccgccgttttaatcgaattgctggatccgcaag

SEQ ID NO: 40566 - DNA, 50 bp, synthetic construct
  source 1..50: mol_type = other DNA
ccatcactgcctggaaaaattaatgttataattttgtttaatttttattt

SEQ ID NO: 40567 - DNA, 50 bp, synthetic construct
  source 1..50: mol_type = other DNA
tataaaggaaaagggagaggggacatgtccactaatgctctttctgacaa

SEQ ID NO: 40568 - DNA, 50 bp, synthetic construct
  source 1..50: mol_type = other DNA
tgattgccggggaaggccgccagctattccacggtattgcccagcaatcc

SEQ ID NO: 40569 - DNA, 50 bp, synthetic construct
  source 1..50: mol_type = other DNA
cacccttgaaccaagggaaccagacctggggttcccttggttcacggaca

SEQ ID NO: 40570 - DNA, 50 bp, synthetic construct
  source 1..50: mol_type = other DNA
acccggctgcacgcggtgctgccaccggtcgccgtcgactgcacctgcct

SEQ ID NO: 40571 - DNA, 50 bp, synthetic construct
  source 1..50: mol_type = other DNA
tatcgaacaaaaggaggttttgaaacgacaaaatgatagtttactacaat

SEQ ID NO: 40572 - DNA, 50 bp, synthetic construct
  source 1..50: mol_type = other DNA
ttgcgtttccgtttcgtccgtttccggcaaaagaaaaaacctaaaccaaa

SEQ ID NO: 40573 - DNA, 50 bp, synthetic construct
  source 1..50: mol_type = other DNA
tcaaaaacggcggttgtaaactgacaagaggttatgcccgcccgccgccg

SEQ ID NO: 40574 - DNA, 50 bp, synthetic construct
  source 1..50: mol_type = other DNA
cgcgcgtttgcgatcgcggccgaccagatggccgcgggcgcgaacgcgcg

SEQ ID NO: 40575 - DNA, 50 bp, synthetic construct
  source 1..50: mol_type = other DNA
gccttgtccggcaggccgacaatatgcatgccgaccttgcccggcgcgat

SEQ ID NO: 40576 - DNA, 50 bp, synthetic construct
  source 1..50: mol_type = other DNA
tccgagccggcgagaaggtctttaagccaggacgcctacgccgaggcggt

SEQ ID NO: 40577 - DNA, 50 bp, synthetic construct
  source 1..50: mol_type = other DNA
tcacaaaaccagcaagaagatattctaataaaaaacagctttatttacta

SEQ ID NO: 40578 - DNA, 50 bp, synthetic construct
  source 1..50: mol_type = other DNA
ggcagaccggagtccgccaccaccgcggtgggtgcggctggtggtcatgt

SEQ ID NO: 40579 - DNA, 50 bp, synthetic construct
  source 1..50: mol_type = other DNA
atcgcggttcgaagcgcggattggaggtctgatcgacttcgagacgttcg

SEQ ID NO: 40580 - DNA, 50 bp, synthetic construct
  source 1..50: mol_type = other DNA
gtttgaaaacacttcattgacatggtacggttctccttacgggttcaata

SEQ ID NO: 40581 - DNA, 50 bp, synthetic construct
  source 1..50: mol_type = other DNA
cttgacagataagtatgaagttgttaggaacccattatactgaagacaat

SEQ ID NO: 40582 - DNA, 50 bp, synthetic construct
  source 1..50: mol_type = other DNA
tgttatagtttctatatgggctgatatcatttaaagatgaacttataacc

SEQ ID NO: 40583 - DNA, 50 bp, synthetic construct
  source 1..50: mol_type = other DNA
atcattgaaaaattaaaaaaggattcctccttatttgagttttcggaaat

SEQ ID NO: 40584 - DNA, 50 bp, synthetic construct
  source 1..50: mol_type = other DNA
gcgttggggcttaatggggtaaatctcatgcgtctaatggcgacaaaaaa

SEQ ID NO: 40585 - DNA, 50 bp, synthetic construct
  source 1..50: mol_type = other DNA
cctttttgctgatgggcagggataataattaagttgacttataaaaaata

SEQ ID NO: 40586 - DNA, 50 bp, synthetic construct
  source 1..50: mol_type = other DNA
ttttttgttgccattaggcgcatgagatttactccattaagccctagagc

SEQ ID NO: 40587 - DNA, 50 bp, synthetic construct
  source 1..50: mol_type = other DNA
aacaaaaagataagcttaaaaagtatccttgcctcatttatcattgggtt

SEQ ID NO: 40588 - DNA, 50 bp, synthetic construct
  source 1..50: mol_type = other DNA
atttaaggaaattgatgacttaaataataaacaaattacttttttacaat

SEQ ID NO: 40589 - DNA, 50 bp, synthetic construct
  source 1..50: mol_type = other DNA
gtattatcgagagtgaaggtgatttattccagcttaaagatcaattatca

SEQ ID NO: 40590 - DNA, 50 bp, synthetic construct
  source 1..50: mol_type = other DNA
ctgaatcaaagtgtaaataacactatggttttgtttattagtattgctca

SEQ ID NO: 40591 - DNA, 50 bp, synthetic construct
  source 1..50: mol_type = other DNA
cactacgcactcgacgtgatgggtctatgcactccacatgatgcgtctgg

SEQ ID NO: 40592 - DNA, 50 bp, synthetic construct
  source 1..50: mol_type = other DNA
acactcagttgcttttgcatttttgctgatgtaatcaagcaaatcttcgc

SEQ ID NO: 40593 - DNA, 50 bp, synthetic construct
  source 1..50: mol_type = other DNA
tgacagattcaatgtgtgttgtctatggtctccacatgggtcgtttgtgg

SEQ ID NO: 40594 - DNA, 50 bp, synthetic construct
  source 1..50: mol_type = other DNA
gtgttcgcaataggagcaccaggagttccaggtggaacagttatggcatc

SEQ ID NO: 40595 - DNA, 50 bp, synthetic construct
  source 1..50: mol_type = other DNA
ttaaaatatctaaattaatgattatggaatttttaaacatattattttat

SEQ ID NO: 40596 - DNA, 50 bp, synthetic construct
  source 1..50: mol_type = other DNA
ttgcaaatcgctgcaactggaatgagaggccggctttcagcgcggcgggc

SEQ ID NO: 40597 - DNA, 50 bp, synthetic construct
  source 1..50: mol_type = other DNA
aacgttaaattgtttatcagtttgatataactgattattgaatatcagtt

SEQ ID NO: 40598 - DNA, 50 bp, synthetic construct
  source 1..50: mol_type = other DNA
ataataagttcatggtttccttcataggtggcatataccaaactaattta

SEQ ID NO: 40599 - DNA, 50 bp, synthetic construct
  source 1..50: mol_type = other DNA
tgacgccaacagggtgatgacaaagctttgtcgtcaccttgttggcgtaa

SEQ ID NO: 40600 - DNA, 50 bp, synthetic construct
  source 1..50: mol_type = other DNA
ataagagtgaaattgtaaaaattaattgctttttctaatatcgcttgtaa

SEQ ID NO: 40601 - DNA, 50 bp, synthetic construct
  source 1..50: mol_type = other DNA
agttttagctgcttgagcgttgctaaaatatttctcaagctgctaaaaaa

SEQ ID NO: 40602 - DNA, 50 bp, synthetic construct
  source 1..50: mol_type = other DNA
gcaagcagcatacgcgtacagtcaaatgactgaaggcgtagaaggcgttc

SEQ ID NO: 40603 - DNA, 50 bp, synthetic construct
  source 1..50: mol_type = other DNA
tcgactatcatttactgcagaaaattctgcttgttcaaaaggatctgtga

SEQ ID NO: 40604 - DNA, 50 bp, synthetic construct
  source 1..50: mol_type = other DNA
cctcaagaaatctagtaaatagcatttgaaattattccattttccacgtt

SEQ ID NO: 40605 - DNA, 50 bp, synthetic construct
  source 1..50: mol_type = other DNA
aaacgctataaacaaaggagatagagcgatgaaatttgtaaatagaatta

SEQ ID NO: 40606 - DNA, 50 bp, synthetic construct
  source 1..50: mol_type = other DNA
cggcactggaaccgcgtaagccgccggcggcctgtttcgggtcactgaag

SEQ ID NO: 40607 - DNA, 50 bp, synthetic construct
  source 1..50: mol_type = other DNA
ttgcggtggctgtaattggattagccctgattataaaggcgctgtgcaga

SEQ ID NO: 40608 - DNA, 50 bp, synthetic construct
  source 1..50: mol_type = other DNA
taaaacgatgcgcatcaaagacgtcgaccgcttgcttgagcagcttcgtt

SEQ ID NO: 40609 - DNA, 50 bp, synthetic construct
  source 1..50: mol_type = other DNA
gccaaaaaaagctaagcctgaatccagatccgatccttgctttttttgta

SEQ ID NO: 40610 - DNA, 50 bp, synthetic construct
  source 1..50: mol_type = other DNA
ctgtgttaagcactaacaacattacactatgcagtttggcagtaagccgc

SEQ ID NO: 40611 - DNA, 50 bp, synthetic construct
  source 1..50: mol_type = other DNA
gggttcgagtcccaccggaggtaccaggtgtaccaacaagtccctaccca

SEQ ID NO: 40612 - DNA, 50 bp, synthetic construct
  source 1..50: mol_type = other DNA
catccaccacccgctcgccaccggcgccacggtgctgcgtacggacgagg

SEQ ID NO: 40613 - DNA, 50 bp, synthetic construct
  source 1..50: mol_type = other DNA
ttcccactgaccaagccgctcgcctaggcgagcgacttcgtcctcgagaa

SEQ ID NO: 40614 - DNA, 50 bp, synthetic construct
  source 1..50: mol_type = other DNA
ataatagaactgtcagcagctccgtttaccgctgacgggtttaccgttat

SEQ ID NO: 40615 - DNA, 50 bp, synthetic construct
  source 1..50: mol_type = other DNA
attaatattaatactttcatcctttagttaatgtattcattaatagattt

SEQ ID NO: 40616 - DNA, 50 bp, synthetic construct
  source 1..50: mol_type = other DNA
gaaatcaggaccccgatgaatgcaattgccgtgatcggcatgctcgaact

SEQ ID NO: 40617 - DNA, 50 bp, synthetic construct
  source 1..50: mol_type = other DNA
cgggtttggccgtttccggcatgtcggagaggcgggaattgcctttgccg

SEQ ID NO: 40618 - DNA, 50 bp, synthetic construct
  source 1..50: mol_type = other DNA
ggtttttccttatccaaaggcaaataaccgacctccaatacttgaaaacc

SEQ ID NO: 40619 - DNA, 50 bp, synthetic construct
  source 1..50: mol_type = other DNA
cagtcgagatcgtttatactcacggcattgacccagaaacttctcgccga

SEQ ID NO: 40620 - DNA, 50 bp, synthetic construct
  source 1..50: mol_type = other DNA
tatgccaatagcaatagaaattattagtaattcctattgccaacggtaag

SEQ ID NO: 40621 - DNA, 50 bp, synthetic construct
  source 1..50: mol_type = other DNA
acccagaaattctttgttttgattcatttccaaacaaaaaagcccctacc

SEQ ID NO: 40622 - DNA, 50 bp, synthetic construct
  source 1..50: mol_type = other DNA
ttaagattggcttaatagcttgattttattccacctttctcaaatcttat

SEQ ID NO: 40623 - DNA, 50 bp, synthetic construct
  source 1..50: mol_type = other DNA
tcgagccgtttcagaaatcgttccaatccctatcgtttctaacatattca

SEQ ID NO: 40624 - DNA, 50 bp, synthetic construct
  source 1..50: mol_type = other DNA
gccgataccgtggtaatgtgatacaatttcactattaccgtcgtaattgg

SEQ ID NO: 40625 - DNA, 50 bp, synthetic construct
  source 1..50: mol_type = other DNA
gttcaaatccctccgccaccgccaagtagcgccgctcttcggggtgtatt

SEQ ID NO: 40626 - DNA, 50 bp, synthetic construct
  source 1..50: mol_type = other DNA
ttttttatattaatatgataacctttcctgaagaacttcaaaataaattc

SEQ ID NO: 40627 - DNA, 50 bp, synthetic construct
  source 1..50: mol_type = other DNA
tgctacagctatgattcataccataaattgtctgaattaagcctgttgga

SEQ ID NO: 40628 - DNA, 50 bp, synthetic construct
  source 1..50: mol_type = other DNA
caacctcgcagcctaaacaatccagatggattgtttgtcctgacttagct

SEQ ID NO: 40629 - DNA, 50 bp, synthetic construct
  source 1..50: mol_type = other DNA
gcagcccagatggaatgctcatgtacacataagcaaagcggcaggggtgc

SEQ ID NO: 40630 - DNA, 50 bp, synthetic construct
  source 1..50: mol_type = other DNA
atggaaatgtccgggcatcccagcccgcgttcccacttggaaatggtctt

SEQ ID NO: 40631 - DNA, 50 bp, synthetic construct
  source 1..50: mol_type = other DNA
ggcgcaacaggagccaccggtgaaacaggtcccacaggacctacgggcgc

SEQ ID NO: 40632 - DNA, 50 bp, synthetic construct
  source 1..50: mol_type = other DNA
ccccatttcatatgattaactcctataggaagtaatcatagggagtgtat

SEQ ID NO: 40633 - DNA, 50 bp, synthetic construct
  source 1..50: mol_type = other DNA
ataataaatccaacaagggaattataaaaaccaactttttcctccattag

SEQ ID NO: 40634 - DNA, 50 bp, synthetic construct
  source 1..50: mol_type = other DNA
gtaccccaaaaataattctcttacttatacatccgattgtttttcggaat

SEQ ID NO: 40635 - DNA, 50 bp, synthetic construct
  source 1..50: mol_type = other DNA
agggtatgaccacagttgagtacgcgattattcgatcgacaccattcccg

SEQ ID NO: 40636 - DNA, 50 bp, synthetic construct
  source 1..50: mol_type = other DNA
gaggtggcgcagtacaacgtgaaggcacggtacaacgtgaaggccaccgg

SEQ ID NO: 40637 - DNA, 50 bp, synthetic construct
  source 1..50: mol_type = other DNA
acctggagcggctggtggccgtggcgccgcatccagcagcacctccagct

SEQ ID NO: 40638 - DNA, 50 bp, synthetic construct
  source 1..50: mol_type = other DNA
gagggcagagggaactttgctctgtgaagagcagagaaaaattgtggaac

SEQ ID NO: 40639 - DNA, 50 bp, synthetic construct
  source 1..50: mol_type = other DNA
ttaaaagtaaaagagtatttaaaaaatgcccgatgatccgggcgttttat

SEQ ID NO: 40640 - DNA, 50 bp, synthetic construct
  source 1..50: mol_type = other DNA
gcggcatgtaccggacggctgtcaaggatggttcgattgacgccgcgctc

SEQ ID NO: 40641 - DNA, 50 bp, synthetic construct
  source 1..50: mol_type = other DNA
tcacatcgagacggtcgcgctgctatgacgagacacacgtcgagacgatc

SEQ ID NO: 40642 - DNA, 50 bp, synthetic construct
  source 1..50: mol_type = other DNA
ggttctgtaaagaaccttagtaaagtttcgccaaagtactttaaccacgt

SEQ ID NO: 40643 - DNA, 50 bp, synthetic construct
  source 1..50: mol_type = other DNA
tatgcgtggagaagcatatcataaattaactgatacgcagaggcgtatca

SEQ ID NO: 40644 - DNA, 50 bp, synthetic construct
  source 1..50: mol_type = other DNA
ggaaatcatcgccaaactggactacggaaaccaattgaagaaatatgact

SEQ ID NO: 40645 - DNA, 50 bp, synthetic construct
  source 1..50: mol_type = other DNA
ttttagttcttggttttattcaggtacctgaataaaactaggtactttcc

SEQ ID NO: 40646 - DNA, 50 bp, synthetic construct
  source 1..50: mol_type = other DNA
gagatccgcactcccatgaacgcaattgcagtgatcgggatgctggagct

SEQ ID NO: 40647 - DNA, 50 bp, synthetic construct
  source 1..50: mol_type = other DNA
aataaatcaatcagcaagtgggaaaagagtctacccgatccttctttata

SEQ ID NO: 40648 - DNA, 50 bp, synthetic construct
  source 1..50: mol_type = other DNA
tacaatgccccaccgcgttctacatctgttgatgtaagttccggaatcgt

SEQ ID NO: 40649 - DNA, 50 bp, synthetic construct
  source 1..50: mol_type = other DNA
ttgccggcttcatgctggcctcggtgccgcattctgcacccagccggtct

SEQ ID NO: 40650 - DNA, 50 bp, synthetic construct
  source 1..50: mol_type = other DNA
cctcggcgcagatctcgccgcgatcctcgccagcgacctgcccgccgcgg

SEQ ID NO: 40651 - DNA, 50 bp, synthetic construct
  source 1..50: mol_type = other DNA
attgtattgacttttatattatgattgtagaatatacaagttttggcaat

SEQ ID NO: 40652 - DNA, 50 bp, synthetic construct
  source 1..50: mol_type = other DNA
gggtaaccgggccggctatttatggcgagcaaggtcaggccagacaacca

SEQ ID NO: 40653 - DNA, 50 bp, synthetic construct
  source 1..50: mol_type = other DNA
tagactcactcgtcggtacaggagcgcttggccatcagtgattgctcctg

SEQ ID NO: 40654 - DNA, 50 bp, synthetic construct
  source 1..50: mol_type = other DNA
ttcaggctactgctaccgcacgtgaggacatgtccaagcggcggcctgaa

SEQ ID NO: 40655 - DNA, 50 bp, synthetic construct
  source 1..50: mol_type = other DNA
catcatgtggagactatagcgttgatcaaaagacaacgcacgtggagtgt

SEQ ID NO: 40656 - DNA, 50 bp, synthetic construct
  source 1..50: mol_type = other DNA
aatgaacttggtaaaaaaacaaggttaagttgtatttaacttttgccgaa

SEQ ID NO: 40657 - DNA, 50 bp, synthetic construct
  source 1..50: mol_type = other DNA
aggaagtttagtctccaggattcccgggtggtgaagggtgtgcgcttcag

SEQ ID NO: 40658 - DNA, 50 bp, synthetic construct
  source 1..50: mol_type = other DNA
aatatataattattcactgtttaaaaatcggtactgttacattcagtaag

SEQ ID NO: 40659 - DNA, 50 bp, synthetic construct
  source 1..50: mol_type = other DNA
tatattgtaatgagctgccgtgaaatttctttgcgctaatttgcaaaact

SEQ ID NO: 40660 - DNA, 50 bp, synthetic construct
  source 1..50: mol_type = other DNA
actcttaatgatgaaggtcaccagacctttgaagcttgctcattagcggc

SEQ ID NO: 40661 - DNA, 50 bp, synthetic construct
  source 1..50: mol_type = other DNA
cttaaccgctatcgagaaagggcttgagggtttattgagtactttttaag

SEQ ID NO: 40662 - DNA, 50 bp, synthetic construct
  source 1..50: mol_type = other DNA
atttgatatcgccaaacggattcttgagatataatttttgtttaattttt

SEQ ID NO: 40663 - DNA, 50 bp, synthetic construct
  source 1..50: mol_type = other DNA
acagcccgtagatttgtttccgcaaatcaaaagacaacgcacgtcgagtg

SEQ ID NO: 40664 - DNA, 50 bp, synthetic construct
  source 1..50: mol_type = other DNA
cactacgcactcgacgtgatgggtctatagtctccacatgatgcgtctgc

SEQ ID NO: 40665 - DNA, 50 bp, synthetic construct
  source 1..50: mol_type = other DNA
gaactgtatccttcttccgtatcaattgaatacaaagaattattattaag

SEQ ID NO: 40666 - DNA, 50 bp, synthetic construct
  source 1..50: mol_type = other DNA
gaactgtatccttcttccgtatcaatatatcactctaaaggcctcattta

SEQ ID NO: 40667 - DNA, 50 bp, synthetic construct
  source 1..50: mol_type = other DNA
tacttctgattaggatcaaaggtgatattttgtgtcagttgtcggaagta

SEQ ID NO: 40668 - DNA, 50 bp, synthetic construct
  source 1..50: mol_type = other DNA
gatcaaaggtgattttctcaataaagtgattttctaaatatccttcgttc

SEQ ID NO: 40669 - DNA, 50 bp, synthetic construct
  source 1..50: mol_type = other DNA
tatctaagccagcctgacaatctttgaagatggaaaggctgttgtagatg

SEQ ID NO: 40670 - DNA, 50 bp, synthetic construct
  source 1..50: mol_type = other DNA
ttttgaaccattaagaccagttgaagctaacaccctttggtggttattaa

SEQ ID NO: 40671 - DNA, 50 bp, synthetic construct
  source 1..50: mol_type = other DNA
ctttaacgaatgaagcgactaattcgatgtgatgggtttgcgggaaaaga

SEQ ID NO: 40672 - DNA, 50 bp, synthetic construct
  source 1..50: mol_type = other DNA
cgttgtagcaacactacgcactccacatgatgcgtctgtggaaacaaatc

SEQ ID NO: 40673 - DNA, 50 bp, synthetic construct
  source 1..50: mol_type = other DNA
gaaaacaaggtttcataagcatcattggctggaataactgtaatgttttt

SEQ ID NO: 40674 - DNA, 50 bp, synthetic construct
  source 1..50: mol_type = other DNA
tttccacctccacatagtaataactccatattactaagtaaatttggaaa

SEQ ID NO: 40675 - DNA, 50 bp, synthetic construct
  source 1..50: mol_type = other DNA
cctctttgcgtccagcgagagataatttattctccgtccctcatagcttg

SEQ ID NO: 40676 - DNA, 50 bp, synthetic construct
  source 1..50: mol_type = other DNA
tttgttattaaaaactataataggaaactattagtatttttacatacatg

SEQ ID NO: 40677 - DNA, 50 bp, synthetic construct
  source 1..50: mol_type = other DNA
gaacgtatatatatcaacatctatttatatcagttttctttacatgagaa

SEQ ID NO: 40678 - DNA, 50 bp, synthetic construct
  source 1..50: mol_type = other DNA
ccctctctgctaacttcgctttaattatctctcgctggacgcaaagaggg

SEQ ID NO: 40679 - DNA, 50 bp, synthetic construct
  source 1..50: mol_type = other DNA
gccgccgcgatggtgccgatggcgtactcgacggtcgacatgcccgactc

SEQ ID NO: 40680 - DNA, 50 bp, synthetic construct
  source 1..50: mol_type = other DNA
acattcatcatggattcgtggtttcaaaagaatctgattttgatgaatat

SEQ ID NO: 40681 - DNA, 50 bp, synthetic construct
  source 1..50: mol_type = other DNA
tttatgagaaaatatttgctcgaaattataaaaaaattgattcttatgac

SEQ ID NO: 40682 - DNA, 50 bp, synthetic construct
  source 1..50: mol_type = other DNA
acaaaaagctttcggttttgaatgcctatttcatacgtgaaatttgttgt

SEQ ID NO: 40683 - DNA, 50 bp, synthetic construct
  source 1..50: mol_type = other DNA
ttgctattgcaagatttcactcgaaaacgggtgaaatttttccctgttaa

SEQ ID NO: 40684 - DNA, 50 bp, synthetic construct
  source 1..50: mol_type = other DNA
gaatttatgtgcttccgttcttgcttatcaagcttttagcccaataattc

SEQ ID NO: 40685 - DNA, 50 bp, synthetic construct
  source 1..50: mol_type = other DNA
caaattatgagcgtacgtttagtgttagccaaagggcgcgagaagtctct

SEQ ID NO: 40686 - DNA, 50 bp, synthetic construct
  source 1..50: mol_type = other DNA
gaccgattgttcggagcagacattgcatagccttcctcgaacaggacgtc

SEQ ID NO: 40687 - DNA, 50 bp, synthetic construct
  source 1..50: mol_type = other DNA
atgtgtttcactcgttaactgttgtataatatgaaacgacgaaaataaat

SEQ ID NO: 40688 - DNA, 50 bp, synthetic construct
  source 1..50: mol_type = other DNA
aaaactataatttgcttcatactttcgtgctggagcttttttataagcag

SEQ ID NO: 40689 - DNA, 50 bp, synthetic construct
  source 1..50: mol_type = other DNA
gacaagagtgcaacattttaccaaagatgctttaatatttagatctataa

SEQ ID NO: 40690 - DNA, 50 bp, synthetic construct
  source 1..50: mol_type = other DNA
catgtggttggtcttgtataataggtgggttggtcttgaaataaatcccg

SEQ ID NO: 40691 - DNA, 50 bp, synthetic construct
  source 1..50: mol_type = other DNA
tgcactttgtttaagcaggtgttgttgatcaccctattgtacaaagtgag

SEQ ID NO: 40692 - DNA, 50 bp, synthetic construct
  source 1..50: mol_type = other DNA
agggtgttgtgatatggttccctctactgtaaatgatagaaccctcacct

SEQ ID NO: 40693 - DNA, 50 bp, synthetic construct
  source 1..50: mol_type = other DNA
atgtctataaacaggcaagaaaggatcaagaattgcctgcgtatcttcat

SEQ ID NO: 40694 - DNA, 50 bp, synthetic construct
  source 1..50: mol_type = other DNA
aaagaaacgagcatttatcgtttaaataaaagattaatcaatttgttatg

SEQ ID NO: 40695 - DNA, 50 bp, synthetic construct
  source 1..50: mol_type = other DNA
aacgaaagaaaaaaagcaatattggaaaaggttgaatttttacttaacct

SEQ ID NO: 40696 - DNA, 50 bp, synthetic construct
  source 1..50: mol_type = other DNA
ccgttctttaacaatgtggaatgcaagttttccggattggcccagaaccg

SEQ ID NO: 40697 - DNA, 50 bp, synthetic construct
  source 1..50: mol_type = other DNA
taagactggctttttaaaagctcccttgtccaactatgctccctctcttg

SEQ ID NO: 40698 - DNA, 50 bp, synthetic construct
  source 1..50: mol_type = other DNA
tttttatgcctaaaaataatagattaagcttttcatcttccatatagaaa

SEQ ID NO: 40699 - DNA, 50 bp, synthetic construct
  source 1..50: mol_type = other DNA
aaaagacttgataagtaagacttttaaaattggcatttacattccatttg

SEQ ID NO: 40700 - DNA, 50 bp, synthetic construct
  source 1..50: mol_type = other DNA
agtgatttaattcaatttgacccgatattgtaaattgaaaccaaatggtt

SEQ ID NO: 40701 - DNA, 50 bp, synthetic construct
  source 1..50: mol_type = other DNA
gacaaccgaaaacggccttctgatataactagaataacgtttcgcttgtg

SEQ ID NO: 40702 - DNA, 50 bp, synthetic construct
  source 1..50: mol_type = other DNA
agggcgtttttctgctgaatattgagatatattgtgaaggttgtgacgct

SEQ ID NO: 40703 - DNA, 50 bp, synthetic construct
  source 1..50: mol_type = other DNA
ccgagcccggccgctgtcagcgcacgcttgcttaaccatgcctggctcgg

SEQ ID NO: 40704 - DNA, 50 bp, synthetic construct
  source 1..50: mol_type = other DNA
ggcgtccggctcgaagctcctatcggtgccgtggccgcggcgtggacgcg

SEQ ID NO: 40705 - DNA, 50 bp, synthetic construct
  source 1..50: mol_type = other DNA
ttaaacactctattttttaaataaaaagacctacaaaataggttctttac

SEQ ID NO: 40706 - DNA, 50 bp, synthetic construct
  source 1..50: mol_type = other DNA
aatgtatcaaaatatggagatattatacagctatcatattccgaagaata

SEQ ID NO: 40707 - DNA, 50 bp, synthetic construct
  source 1..50: mol_type = other DNA
tgcggcgtcagattctcgacgacgtccgtgcgcgaagtcttcggttttca

SEQ ID NO: 40708 - DNA, 50 bp, synthetic construct
  source 1..50: mol_type = other DNA
cactgcaataatcaaagggcagggtgctcttccaggcgattgatgcagcg

SEQ ID NO: 40709 - DNA, 50 bp, synthetic construct
  source 1..50: mol_type = other DNA
aggctggctgcgcgcccttcgtctatcgacgagatctgccatgccacact

SEQ ID NO: 40710 - DNA, 50 bp, synthetic construct
  source 1..50: mol_type = other DNA
cgtaggctggtgcaccgcagaggataagcgcaattggtgcccccgccagg

SEQ ID NO: 40711 - DNA, 50 bp, synthetic construct
  source 1..50: mol_type = other DNA
attcatattcacaccgaggcccggaaacctatgacagtaaaattcagtat

SEQ ID NO: 40712 - DNA, 50 bp, synthetic construct
  source 1..50: mol_type = other DNA
tccgtaacataacgataaatatttactcaaatagaaatttctcatattaa

SEQ ID NO: 40713 - DNA, 50 bp, synthetic construct
  source 1..50: mol_type = other DNA
catttatcatagtatttgtaagttcaatattatatttagtatgttcaata

SEQ ID NO: 40714 - DNA, 50 bp, synthetic construct
  source 1..50: mol_type = other DNA
atgaattgtatcttactggaaaaatatgcaatttgcaagaaaacttttcc

SEQ ID NO: 40715 - DNA, 50 bp, synthetic construct
  source 1..50: mol_type = other DNA
gactaaggaaagacacgaaaagcagatgatggaaaagtctttatttatta

SEQ ID NO: 40716 - DNA, 50 bp, synthetic construct
  source 1..50: mol_type = other DNA
ctatatgctattaaatcgatgataagaagtacatatttcactaaaatagt

SEQ ID NO: 40717 - DNA, 50 bp, synthetic construct
  source 1..50: mol_type = other DNA
gtgatgcggggttgctcatttctattcagcttgttttatcggatcgtcaa

SEQ ID NO: 40718 - DNA, 50 bp, synthetic construct
  source 1..50: mol_type = other DNA
tctcactcggctgagactggatgaataagtccgcgtatagcggagagaaa

SEQ ID NO: 40719 - DNA, 50 bp, synthetic construct
  source 1..50: mol_type = other DNA
catacaagtgtgttatgcttatacaagtaatccaccaagccagttatatg

SEQ ID NO: 40720 - DNA, 50 bp, synthetic construct
  source 1..50: mol_type = other DNA
atattctttatcggacataatgagttccacctacaggaagtaacatatat

SEQ ID NO: 40721 - DNA, 50 bp, synthetic construct
  source 1..50: mol_type = other DNA
attgttgtatattcaagataatgtgatgaaggaacgtcatttactgaaat

SEQ ID NO: 40722 - DNA, 50 bp, synthetic construct
  source 1..50: mol_type = other DNA
ttctgcttcagacgagcaagacagttgagattctatcgtcagtagcgctt

SEQ ID NO: 40723 - DNA, 50 bp, synthetic construct
  source 1..50: mol_type = other DNA
gtgaggtgagtaatgcgtaaaatcattcatgtggatatggactgcttttt

SEQ ID NO: 40724 - DNA, 50 bp, synthetic construct
  source 1..50: mol_type = other DNA
atctatttcatatttgggattccctagggtttccgggatggcttattata

SEQ ID NO: 40725 - DNA, 50 bp, synthetic construct
  source 1..50: mol_type = other DNA
ctaaactacccgctgaattagggtattttaagcttcagcctcattttctc

SEQ ID NO: 40726 - DNA, 50 bp, synthetic construct
  source 1..50: mol_type = other DNA
aaatccaactcatcggcttcatcaattgatgaagagctggagaagctgaa

SEQ ID NO: 40727 - DNA, 50 bp, synthetic construct
  source 1..50: mol_type = other DNA
aaatgtttagttccctctttgcgtccctcatagcttgatccgaaaaagtt

SEQ ID NO: 40728 - DNA, 50 bp, synthetic construct
  source 1..50: mol_type = other DNA
atttgcttttcaattgtttcaagttccgatgaacttcagtcgaagcaagt

SEQ ID NO: 40729 - DNA, 50 bp, synthetic construct
  source 1..50: mol_type = other DNA
aaggcggaaacattgaaattgttttctccaaattccaatacgcccacctc

SEQ ID NO: 40730 - DNA, 50 bp, synthetic construct
  source 1..50: mol_type = other DNA
aatcgttgctataagtaggtttattaataaattaacagacgagattaata

SEQ ID NO: 40731 - DNA, 50 bp, synthetic construct
  source 1..50: mol_type = other DNA
aaaaagttatccaaatttccagtccctagtgaaaaatgctttaaagcttg

SEQ ID NO: 40732 - DNA, 50 bp, synthetic construct
  source 1..50: mol_type = other DNA
ttatcttcaaaaacccaagataattcaaactatattctttttgaagataa

SEQ ID NO: 40733 - DNA, 50 bp, synthetic construct
  source 1..50: mol_type = other DNA
tgtaccagtgtgtagttcaaagagatctcacctcgctttcgcccattaca

SEQ ID NO: 40734 - DNA, 50 bp, synthetic construct
  source 1..50: mol_type = other DNA
ctttataaatgataccacacgaagatattccatatggatacaaaattcaa

SEQ ID NO: 40735 - DNA, 50 bp, synthetic construct
  source 1..50: mol_type = other DNA
attgttcggggggaaccatatcataaatgatacgcagagccttatcataa

SEQ ID NO: 40736 - DNA, 50 bp, synthetic construct
  source 1..50: mol_type = other DNA
aaatcctctcagaattcgatacagcggaagatcgaatcctgaacgtctct

SEQ ID NO: 40737 - DNA, 50 bp, synthetic construct
  source 1..50: mol_type = other DNA
aaagaattaacatgttaataaaggtacctgtatctatatgtttttacgtt

SEQ ID NO: 40738 - DNA, 50 bp, synthetic construct
  source 1..50: mol_type = other DNA
gcggcggcgggcggccataatctgctgatggtcggcccgcccggcgcggg

SEQ ID NO: 40739 - DNA, 50 bp, synthetic construct
  source 1..50: mol_type = other DNA
atgtttggctatggggaagtcaatcaatacaatcgccattcgacattgat

SEQ ID NO: 40740 - DNA, 50 bp, synthetic construct
  source 1..50: mol_type = other DNA
agtcattcgtcgtcgacttgtaacgatggatgagcaaccgttgaatgatg

SEQ ID NO: 40741 - DNA, 50 bp, synthetic construct
  source 1..50: mol_type = other DNA
ggaatggctgctgctggccacgtggcccgatgtccagcagcaccacatcg

SEQ ID NO: 40742 - DNA, 50 bp, synthetic construct
  source 1..50: mol_type = other DNA
cgacgagccggtctggaaccccggcgcaggacttccagcgcgtcgcgcga

SEQ ID NO: 40743 - DNA, 50 bp, synthetic construct
  source 1..50: mol_type = other DNA
atatatttctttatttctactcatacggaggttttgctaacatcctatat

SEQ ID NO: 40744 - DNA, 50 bp, synthetic construct
  source 1..50: mol_type = other DNA
ttcagctgggccattgctttttttgaatactgtctgcaggttccggccaa

SEQ ID NO: 40745 - DNA, 50 bp, synthetic construct
  source 1..50: mol_type = other DNA
tggaggcgtacgtcgcgcggagggcgcgttcttcgcggcggacgcgctcg

SEQ ID NO: 40746 - DNA, 50 bp, synthetic construct
  source 1..50: mol_type = other DNA
gaacgaagtcccacgattccgttgcgcaacggccctcgatgagttcgtgc

SEQ ID NO: 40747 - DNA, 50 bp, synthetic construct
  source 1..50: mol_type = other DNA
atggatttctagcaaaatcttttcaattaaaagggttgcttttcaaacca

SEQ ID NO: 40748 - DNA, 50 bp, synthetic construct
  source 1..50: mol_type = other DNA
cggggtcgcgagttcgagtctcgtttctagtcccgtttcccgctccaaaa

SEQ ID NO: 40749 - DNA, 50 bp, synthetic construct
  source 1..50: mol_type = other DNA
agaaccgtacagaataggattttttaaaaatagaatgtatgttcggtttt

SEQ ID NO: 40750 - DNA, 50 bp, synthetic construct
  source 1..50: mol_type = other DNA
cgtggaccttctaaggggctgtggcgcgacagcccgatcagcacaccgcc

SEQ ID NO: 40751 - DNA, 50 bp, synthetic construct
  source 1..50: mol_type = other DNA
ttagccggtatctgacaggaatattcaaaaaaagcgattgcccaactgaa

SEQ ID NO: 40752 - DNA, 50 bp, synthetic construct
  source 1..50: mol_type = other DNA
ccttaccgacgattccgcggagaccggcagaggcggaaacagtccgctgg

SEQ ID NO: 40753 - DNA, 50 bp, synthetic construct
  source 1..50: mol_type = other DNA
ccggggagcggtccgcgcctggctgcggcttgggatgaaatacttcccgg

SEQ ID NO: 40754 - DNA, 50 bp, synthetic construct
  source 1..50: mol_type = other DNA
cgggcgcattgatacttggaaagaattattttcaggatacttggcaggac

SEQ ID NO: 40755 - DNA, 50 bp, synthetic construct
  source 1..50: mol_type = other DNA
tcttttcaggcatttatagtgaccagtaatattctaaatgctaaacgtac

SEQ ID NO: 40756 - DNA, 50 bp, synthetic construct
  source 1..50: mol_type = other DNA
aatagtagtcaaggaacgaactaaattgtgtgaagtccaatcgtaatata

SEQ ID NO: 40757 - DNA, 50 bp, synthetic construct
  source 1..50: mol_type = other DNA
ttttttgatgaattattctcatgaggtcatcgagaggaatttagaaaagg

SEQ ID NO: 40758 - DNA, 50 bp, synthetic construct
  source 1..50: mol_type = other DNA
actgaaaaacggcctcttggtattcctttaaaatggggtgttttaggtta

SEQ ID NO: 40759 - DNA, 50 bp, synthetic construct
  source 1..50: mol_type = other DNA
gactctaataattcttttaagaattaaaaagtaatgtaattattcccatg

SEQ ID NO: 40760 - DNA, 50 bp, synthetic construct
  source 1..50: mol_type = other DNA
caacttgatattatctaaagacccttgagttttcaagacataataatatt

SEQ ID NO: 40761 - DNA, 50 bp, synthetic construct
  source 1..50: mol_type = other DNA
atgtctccgccgatgatacggtggactaagcaaatcatatacagcgcttt

SEQ ID NO: 40762 - DNA, 50 bp, synthetic construct
  source 1..50: mol_type = other DNA
tttgtccgccatcgctaaggaggcgaaagattacagcgggaccttgcagc

SEQ ID NO: 40763 - DNA, 50 bp, synthetic construct
  source 1..50: mol_type = other DNA
tctattaaattccggcaactcgctattgctcgtctagaaagagcaaaccg

SEQ ID NO: 40764 - DNA, 50 bp, synthetic construct
  source 1..50: mol_type = other DNA
caccacagagatacagaaccgcgtcaccgaggtgctgttcccggagatca

SEQ ID NO: 40765 - DNA, 50 bp, synthetic construct
  source 1..50: mol_type = other DNA
ccttgaactcgctaatatctgcattattgccgcctttttctcgcagttct

SEQ ID NO: 40766 - DNA, 50 bp, synthetic construct
  source 1..50: mol_type = other DNA
gggcggcctggccgtcaacgtgatcggccgaggtcgcccccagcccggcc

SEQ ID NO: 40767 - DNA, 50 bp, synthetic construct
  source 1..50: mol_type = other DNA
gttgcgtgaggatgcgctcggaatcgattccgagccgatctttttcctcg

SEQ ID NO: 40768 - DNA, 50 bp, synthetic construct
  source 1..50: mol_type = other DNA
ataatcaatttttgttagtattttcaaaaatgtccccctttcttaattca

SEQ ID NO: 40769 - DNA, 50 bp, synthetic construct
  source 1..50: mol_type = other DNA
ttagatgtcacacatcagaatcaatattgacgctggtatttgcccccgaa

SEQ ID NO: 40770 - DNA, 50 bp, synthetic construct
  source 1..50: mol_type = other DNA
agttccgggaagggcatgccggcggccgtcttcatgccggtgccggcctg

SEQ ID NO: 40771 - DNA, 50 bp, synthetic construct
  source 1..50: mol_type = other DNA
tgagcgcttccgtcagcccccgcagcgttattcgctgaccgaaaaactcg

SEQ ID NO: 40772 - DNA, 50 bp, synthetic construct
  source 1..50: mol_type = other DNA
tgattatacaagataaattccatgttaatatagattttcatgtgttgtcc

SEQ ID NO: 40773 - DNA, 50 bp, synthetic construct
  source 1..50: mol_type = other DNA
ctaaataatcttcattctccataattttagcgagaaaagagcccctatag

SEQ ID NO: 40774 - DNA, 50 bp, synthetic construct
  source 1..50: mol_type = other DNA
gggcgtggctcgtactgtggagcggtggacgcgcaggacgcgcgcgcccc

SEQ ID NO: 40775 - DNA, 50 bp, synthetic construct
  source 1..50: mol_type = other DNA
tgtcacctaatagaaaggagttgaatcagggtgctttttaagttgtgaca

SEQ ID NO: 40776 - DNA, 50 bp, synthetic construct
  source 1..50: mol_type = other DNA
cccaaataaagaaatcttgatactgttgtatatacatttactgaaagggg

SEQ ID NO: 40777 - DNA, 50 bp, synthetic construct
  source 1..50: mol_type = other DNA
cccggagtggttccgcgcgttcggcgccgaagtcgcggaacaccacgccg

SEQ ID NO: 40778 - DNA, 50 bp, synthetic construct
  source 1..50: mol_type = other DNA
tgatgattgggattattattgatttaattgcttaattaatatttaagggc

SEQ ID NO: 40779 - DNA, 50 bp, synthetic construct
  source 1..50: mol_type = other DNA
tgcaaggaattcctttgtcgcaggtatctggggcaaagaaatttatttca

SEQ ID NO: 40780 - DNA, 50 bp, synthetic construct
  source 1..50: mol_type = other DNA
ttcccgcggcgcaaccgaatcatgatcatcagcggcctgtcgctcggcgt

SEQ ID NO: 40781 - DNA, 50 bp, synthetic construct
  source 1..50: mol_type = other DNA
acagtaaaagcaattgaaaacagaaaaactgccacaattactttatcaaa

SEQ ID NO: 40782 - DNA, 50 bp, synthetic construct
  source 1..50: mol_type = other DNA
atggctgtgcgggttcaagtcccgctaaggctttgtaaatcattgattta

SEQ ID NO: 40783 - DNA, 50 bp, synthetic construct
  source 1..50: mol_type = other DNA
cacatgctttgtgaactaatagcgtatatatttagtgagcttaaagcggc

SEQ ID NO: 40784 - DNA, 50 bp, synthetic construct
  source 1..50: mol_type = other DNA
cagcaccgggcggttgattgcggaagtccgcaaatgctcaatttgtgctt

SEQ ID NO: 40785 - DNA, 50 bp, synthetic construct
  source 1..50: mol_type = other DNA
taggataactgatgccagtttcccttgggaaactcccttctcccatcttg

SEQ ID NO: 40786 - DNA, 50 bp, synthetic construct
  source 1..50: mol_type = other DNA
tgatcgcggaaaccatctcgatgtggtcatggagtacgcgctgccgctga

SEQ ID NO: 40787 - DNA, 50 bp, synthetic construct
  source 1..50: mol_type = other DNA
actacgtggttcgtctaccctgtcatgacagggtacgcaagccacgtaca

SEQ ID NO: 40788 - DNA, 50 bp, synthetic construct
  source 1..50: mol_type = other DNA
tgcttctccggaaagttgaagagttcagcgtaattgatgccggacgtgca

SEQ ID NO: 40789 - DNA, 50 bp, synthetic construct
  source 1..50: mol_type = other DNA
cggcatcggccgcacgtcatgcgcgccgggatgacgaaatgacgatttga

SEQ ID NO: 40790 - DNA, 50 bp, synthetic construct
  source 1..50: mol_type = other DNA
gatgcaggtgaagagagacattgccggcaaagccgcgcttcacgaaggtc

SEQ ID NO: 40791 - DNA, 50 bp, synthetic construct
  source 1..50: mol_type = other DNA
gacaagggctggggaatcaaaaattaatttttatttaaaaagacaattaa

SEQ ID NO: 40792 - DNA, 50 bp, synthetic construct
  source 1..50: mol_type = other DNA
gtaacgtcggccaggggaagcggcgagtactttttaagctttgaagctac

SEQ ID NO: 40793 - DNA, 50 bp, synthetic construct
  source 1..50: mol_type = other DNA
gcaaacgcatcacgtcgagacggtagcaagttgagtgcgtagtgttgcta

SEQ ID NO: 40794 - DNA, 50 bp, synthetic construct
  source 1..50: mol_type = other DNA
atagttaaactcgaaagatttgtcaaagcacatatttctttaggaacaac

SEQ ID NO: 40795 - DNA, 50 bp, synthetic construct
  source 1..50: mol_type = other DNA
aaaaggcgatttctttttagtaattttttggtaaaaagaaaagcccgtag

SEQ ID NO: 40796 - DNA, 50 bp, synthetic construct
  source 1..50: mol_type = other DNA
atcctgtccccgctaccaaagttcgggctactaggtacgtaggccagaga

SEQ ID NO: 40797 - DNA, 50 bp, synthetic construct
  source 1..50: mol_type = other DNA
gccagtggcgcaagggatcagaggttcgcggcatgcctggcctgcactgt

SEQ ID NO: 40798 - DNA, 50 bp, synthetic construct
  source 1..50: mol_type = other DNA
tcttaggtggcatgattaatccattctttatgtaatgcattatgctaaga

SEQ ID NO: 40799 - DNA, 50 bp, synthetic construct
  source 1..50: mol_type = other DNA
ccgggtatggccacagtcgcatacgcgtactcgacggacaccattcccgt

SEQ ID NO: 40800 - DNA, 50 bp, synthetic construct
  source 1..50: mol_type = other DNA
ggtggccttcacgttgtaccgtgccagccttcacgttgtactgcgccacc

SEQ ID NO: 40801 - DNA, 50 bp, synthetic construct
  source 1..50: mol_type = other DNA
tcaaccatatgggtgacttgtttagctgatggaatctctgataaatttga

SEQ ID NO: 40802 - DNA, 50 bp, synthetic construct
  source 1..50: mol_type = other DNA
ctgcaaaatagatacttttttctttaatcttaaaagctccgatttctgct

SEQ ID NO: 40803 - DNA, 50 bp, synthetic construct
  source 1..50: mol_type = other DNA
acgatagccttagaataagcccttattttctcttaaaagttcactatcca

SEQ ID NO: 40804 - DNA, 50 bp, synthetic construct
  source 1..50: mol_type = other DNA
actctcaggaggcgccgcccttccgccgagcgtcgtcgccgcccgccagc

SEQ ID NO: 40805 - DNA, 50 bp, synthetic construct
  source 1..50: mol_type = other DNA
ctgtgcttccggaaaatggaacgcatgaatatgagtaagttgacttacat

SEQ ID NO: 40806 - DNA, 50 bp, synthetic construct
  source 1..50: mol_type = other DNA
gggaaatgttgaaaatatattgttgaaacattaaaagcacacgattatta

SEQ ID NO: 40807 - DNA, 50 bp, synthetic construct
  source 1..50: mol_type = other DNA
aaactggcaggaacaacgtttcctattccgtaaaattctctttccttttc

SEQ ID NO: 40808 - DNA, 50 bp, synthetic construct
  source 1..50: mol_type = other DNA
agtctgtaaatatctgttccacaattttccagttaggatcagcctttttt

SEQ ID NO: 40809 - DNA, 50 bp, synthetic construct
  source 1..50: mol_type = other DNA
cataggcagtggacgatgtaattgtatattctgcgtctccactctctatg

SEQ ID NO: 40810 - DNA, 50 bp, synthetic construct
  source 1..50: mol_type = other DNA
gtaatttcaaaagcctgcaccatgctaaccacgcacctcctgtcggctca

SEQ ID NO: 40811 - DNA, 50 bp, synthetic construct
  source 1..50: mol_type = other DNA
taaatcaaaaattaaaaacctccataaggtatcacttaaccttttatttc

SEQ ID NO: 40812 - DNA, 50 bp, synthetic construct
  source 1..50: mol_type = other DNA
aagccaagaaaaaatgctcatgtacgcacatcagtaaacttataagggat

SEQ ID NO: 40813 - DNA, 50 bp, synthetic construct
  source 1..50: mol_type = other DNA
ttctcccctctgttcgcggaaataatacttttcataaactgccctcccaa

SEQ ID NO: 40814 - DNA, 50 bp, synthetic construct
  source 1..50: mol_type = other DNA
cgatttgccctcctttcttcaaatatatttgaagaaaaatggggcaaaaa

SEQ ID NO: 40815 - DNA, 50 bp, synthetic construct
  source 1..50: mol_type = other DNA
aaagatttttcttatattctcggcttctcaggaatatcagaaaaattagc

SEQ ID NO: 40816 - DNA, 50 bp, synthetic construct
  source 1..50: mol_type = other DNA
aaagaatacttctatattcattattatcctataataagtacctattctgc

SEQ ID NO: 40817 - DNA, 50 bp, synthetic construct
  source 1..50: mol_type = other DNA
ttgaattaaaaggacttttaataaaaatattttttgtattttttttaaaa

SEQ ID NO: 40818 - DNA, 50 bp, synthetic construct
  source 1..50: mol_type = other DNA
aaaatcgaaaaattcaagaatatcttccaatgttggaatttttcatattc

SEQ ID NO: 40819 - DNA, 50 bp, synthetic construct
  source 1..50: mol_type = other DNA
gagctctgtgaaatgagattggaacagtatacccttttttcaaagatgat

SEQ ID NO: 40820 - DNA, 50 bp, synthetic construct
  source 1..50: mol_type = other DNA
ccgctgctccgcttaatatcttatatttaccccattaagccctaaagcat

SEQ ID NO: 40821 - DNA, 50 bp, synthetic construct
  source 1..50: mol_type = other DNA
gggattatagcgtttgagggagcaagtgcggttggtaagagtagcacgtg

SEQ ID NO: 40822 - DNA, 50 bp, synthetic construct
  source 1..50: mol_type = other DNA
agttcgctgcaggtcgtcgaaatcacgatctccggtcccgcacgcgtcaa

SEQ ID NO: 40823 - DNA, 50 bp, synthetic construct
  source 1..50: mol_type = other DNA
ggcacactgtgccatcgcggtcggcttcgagccaggtcgtccagtgcagc

SEQ ID NO: 40824 - DNA, 50 bp, synthetic construct
  source 1..50: mol_type = other DNA
tatagcatagcgatttgcacaagtcaacaagcgcacatccggatgatgtt

SEQ ID NO: 40825 - DNA, 50 bp, synthetic construct
  source 1..50: mol_type = other DNA
gtcaccggcagccgggtcccggtgagcaggtccaccggcgactcgttgaa

SEQ ID NO: 40826 - DNA, 50 bp, synthetic construct
  source 1..50: mol_type = other DNA
aataaatatagtgaatgatcgtggttaatcgggacttaaccattttacgt

SEQ ID NO: 40827 - DNA, 50 bp, synthetic construct
  source 1..50: mol_type = other DNA
acgattattgttgtatattcaagatatcttcatcaggagcgaataactgg

SEQ ID NO: 40828 - DNA, 50 bp, synthetic construct
  source 1..50: mol_type = other DNA
attgtctttaatttttaattcattataagtgattggaaaaagagattaca

SEQ ID NO: 40829 - DNA, 50 bp, synthetic construct
  source 1..50: mol_type = other DNA
aaacagcacggtgtcatatcttttataatagatatattaagtgcgacgtt

SEQ ID NO: 40830 - DNA, 50 bp, synthetic construct
  source 1..50: mol_type = other DNA
taaactccatctaaaatcttcatatttgtgattttaccaacggttccata

SEQ ID NO: 40831 - DNA, 50 bp, synthetic construct
  source 1..50: mol_type = other DNA
agcttattaatagtaaagagcaattagaatagtattaattgtaataagaa

SEQ ID NO: 40832 - DNA, 50 bp, synthetic construct
  source 1..50: mol_type = other DNA
ttatcctctgtaatactaataactatagaataacgaatagaggaggagcc

SEQ ID NO: 40833 - DNA, 50 bp, synthetic construct
  source 1..50: mol_type = other DNA
agatagctaatatgattacaatagtatattttatattatattagataaga

SEQ ID NO: 40834 - DNA, 50 bp, synthetic construct
  source 1..50: mol_type = other DNA
tagttctaatccgattaacaagtatgtatgagttaattggtaaagcaaac

SEQ ID NO: 40835 - DNA, 50 bp, synthetic construct
  source 1..50: mol_type = other DNA
actgaaagacagccgggaactggtatttgttgcccaatttgtggtgtaac

SEQ ID NO: 40836 - DNA, 50 bp, synthetic construct
  source 1..50: mol_type = other DNA
tttagtgaaatatgtacttcttaattttccttcgtatatattttatgaat

SEQ ID NO: 40837 - DNA, 50 bp, synthetic construct
  source 1..50: mol_type = other DNA
gatattattatgcctccgattggtaaacttctgggcggcatgaattttcc

SEQ ID NO: 40838 - DNA, 50 bp, synthetic construct
  source 1..50: mol_type = other DNA
ttatgaaatattgtttgttactaaaagtaggccttgttgtctcttcatca

SEQ ID NO: 40839 - DNA, 50 bp, synthetic construct
  source 1..50: mol_type = other DNA
tgaaaagccggatcaataaaaacataatcactttttcaaccgtgctatag

SEQ ID NO: 40840 - DNA, 50 bp, synthetic construct
  source 1..50: mol_type = other DNA
cgatctttcccttcgttataaagcgtgtattataacgataggggctaggt

SEQ ID NO: 40841 - DNA, 50 bp, synthetic construct
  source 1..50: mol_type = other DNA
gtttgaaaagatgatattctcagaataaccggcgtcatttcttttcaaac

SEQ ID NO: 40842 - DNA, 50 bp, synthetic construct
  source 1..50: mol_type = other DNA
acggtaatacgcagtagcgtctttcaaaaggatttctaatctatgacaac

SEQ ID NO: 40843 - DNA, 50 bp, synthetic construct
  source 1..50: mol_type = other DNA
acccacacgtgttattagcacaagggattttgagtccccctcgtctgcca

SEQ ID NO: 40844 - DNA, 50 bp, synthetic construct
  source 1..50: mol_type = other DNA
aaaatataaaaaaatttttttggttaaaaataaaaaatattatattttct

SEQ ID NO: 40845 - DNA, 50 bp, synthetic construct
  source 1..50: mol_type = other DNA
cgagtgcggttggggagagtgaaggttttcagcatccatgagcgcacttt

SEQ ID NO: 40846 - DNA, 50 bp, synthetic construct
  source 1..50: mol_type = other DNA
ccctgatttccctctattacgaacaaaatcgtaataaaggacttttacat

SEQ ID NO: 40847 - DNA, 50 bp, synthetic construct
  source 1..50: mol_type = other DNA
aattgctttctttgaatataaattgtacgttatgttaaacgaatattctt

SEQ ID NO: 40848 - DNA, 50 bp, synthetic construct
  source 1..50: mol_type = other DNA
gccgatgagtctgttttcagccccgcatggctgagacggaagtcattaag

SEQ ID NO: 40849 - DNA, 50 bp, synthetic construct
  source 1..50: mol_type = other DNA
tttcggacaggagttcgattctcctcatctccaccatataaatatcaatc

SEQ ID NO: 40850 - DNA, 50 bp, synthetic construct
  source 1..50: mol_type = other DNA
ccgcctacctcgcccgagacggtcgcgcgcccacaggcggcggttgtcgg

SEQ ID NO: 40851 - DNA, 50 bp, synthetic construct
  source 1..50: mol_type = other DNA
tacttggttcgtatatataaagctattgcttgacaaatactaagggattg

SEQ ID NO: 40852 - DNA, 50 bp, synthetic construct
  source 1..50: mol_type = other DNA
atttattcagaattaatgatattgattattaccgtgaatacatcttaaaa

SEQ ID NO: 40853 - DNA, 50 bp, synthetic construct
  source 1..50: mol_type = other DNA
taattaatgaaatgtaatattgttgatagaatatataatattagagatac

SEQ ID NO: 40854 - DNA, 50 bp, synthetic construct
  source 1..50: mol_type = other DNA
ggagtgatagatactactaagaataatttggtactactatatatcactct

SEQ ID NO: 40855 - DNA, 50 bp, synthetic construct
  source 1..50: mol_type = other DNA
tatagaaataacaattatactaaaatttttagcaatttgttcaatcaatt

SEQ ID NO: 40856 - DNA, 50 bp, synthetic construct
  source 1..50: mol_type = other DNA
ttggaacaacaaccgatttcttattaaagttgttatatttgttgttccag

SEQ ID NO: 40857 - DNA, 50 bp, synthetic construct
  source 1..50: mol_type = other DNA
cagggcgccgcaggcagcagagctgatgctggaatgcgccgaatgcggcg

SEQ ID NO: 40858 - DNA, 50 bp, synthetic construct
  source 1..50: mol_type = other DNA
actggcaaatgctcaagaattttattgtaagagcttaagccacattcagc

SEQ ID NO: 40859 - DNA, 50 bp, synthetic construct
  source 1..50: mol_type = other DNA
tgtcacctaatagaaaggagttgaattacacgctggtacattagaagaac

SEQ ID NO: 40860 - DNA, 50 bp, synthetic construct
  source 1..50: mol_type = other DNA
atttaagcccagtaaacgctctctaacaagagcttttactgcatcaatat

SEQ ID NO: 40861 - DNA, 50 bp, synthetic construct
  source 1..50: mol_type = other DNA
tgcctaaccgtgcacgtcaaccgatatcggtttccgagacaggtcagagc

SEQ ID NO: 40862 - DNA, 50 bp, synthetic construct
  source 1..50: mol_type = other DNA
cagatgaggctgcggcagatcgaagctagcccaaacgcagtcgcgctcta

SEQ ID NO: 40863 - DNA, 50 bp, synthetic construct
  source 1..50: mol_type = other DNA
ataagcgtactatggcggttgtactgattcacttccccatacccaaacat

SEQ ID NO: 40864 - DNA, 50 bp, synthetic construct
  source 1..50: mol_type = other DNA
aaaagaaaaagtaggcacttttcttataaaaggtgcttattttcaagaag

SEQ ID NO: 40865 - DNA, 50 bp, synthetic construct
  source 1..50: mol_type = other DNA
taacttatcagttttaacaaaacaaactgctcattactgctgatgggtcc

SEQ ID NO: 40866 - DNA, 50 bp, synthetic construct
  source 1..50: mol_type = other DNA
tgcttacggcacagcgctttcagattatcggcactcgtatgcccaccgat

SEQ ID NO: 40867 - DNA, 50 bp, synthetic construct
  source 1..50: mol_type = other DNA
tgggtttcttcacaatgaaggatgcatatctaaggatatcaagatgtctt

SEQ ID NO: 40868 - DNA, 50 bp, synthetic construct
  source 1..50: mol_type = other DNA
cggtgtaaacgaaggcatttcgggtaatagatatgctgtgtttcaggagg

SEQ ID NO: 40869 - DNA, 50 bp, synthetic construct
  source 1..50: mol_type = other DNA
ctgtgtagccgtgccgctggaaacgcgttggccacggcatgacacgaccg

SEQ ID NO: 40870 - DNA, 50 bp, synthetic construct
  source 1..50: mol_type = other DNA
agcgcgtccagcgtcaggtaggcgtacaatgacctgcacgtgagcgcgac

SEQ ID NO: 40871 - DNA, 50 bp, synthetic construct
  source 1..50: mol_type = other DNA
acgggcgggccggcccttggggacacgtgatcaaggctcggcgcagcgcc

SEQ ID NO: 40872 - DNA, 50 bp, synthetic construct
  source 1..50: mol_type = other DNA
ctaggataggggcccaaccttagtggaagcaaaaaaagcccccattgttg

SEQ ID NO: 40873 - DNA, 50 bp, synthetic construct
  source 1..50: mol_type = other DNA
tctcgaacgacgccgagtcgaaccatggttggacgaccccgacccgatga

SEQ ID NO: 40874 - DNA, 50 bp, synthetic construct
  source 1..50: mol_type = other DNA
gctgacgaattggttgttaaatgatatcataccatcaccgatgagcttat

SEQ ID NO: 40875 - DNA, 50 bp, synthetic construct
  source 1..50: mol_type = other DNA
acactgagcccctttccatctggttatctacgctcggtctggccttagtt

SEQ ID NO: 40876 - DNA, 50 bp, synthetic construct
  source 1..50: mol_type = other DNA
gcttgagaacgctaaaatgtacgatccatgccgctttcattttctcagct

SEQ ID NO: 40877 - DNA, 50 bp, synthetic construct
  source 1..50: mol_type = other DNA
atgattacgtttgaaagaggtggtaactcactcctttcaacactatacat

SEQ ID NO: 40878 - DNA, 50 bp, synthetic construct
  source 1..50: mol_type = other DNA
cgggaaatcacgatatgccccgactccagcggctcacgtagaacctccag

SEQ ID NO: 40879 - DNA, 50 bp, synthetic construct
  source 1..50: mol_type = other DNA
cgggcaatgcggtgctgatcaagtcgacttgatcaagtccggccatccct

SEQ ID NO: 40880 - DNA, 50 bp, synthetic construct
  source 1..50: mol_type = other DNA
gccgccgccggcgcgcacaacctgttgctcagcggcccgccgggcaccgg

SEQ ID NO: 40881 - DNA, 50 bp, synthetic construct
  source 1..50: mol_type = other DNA
gaaattctagattttccatgtaaccaattcatgaaccaagctcctggaac

SEQ ID NO: 40882 - DNA, 50 bp, synthetic construct
  source 1..50: mol_type = other DNA
ttcaatgacgcttgaatgaagtctatagctacaatacaatgacccttgat

SEQ ID NO: 40883 - DNA, 50 bp, synthetic construct
  source 1..50: mol_type = other DNA
aaagtcggcttcgtcagccttggctgcccgaaggcgctcgtcgattccga

SEQ ID NO: 40884 - DNA, 50 bp, synthetic construct
  source 1..50: mol_type = other DNA
taaagatgcaataaaaaatttagatttaccccccccaccatgttcattta

SEQ ID NO: 40885 - DNA, 50 bp, synthetic construct
  source 1..50: mol_type = other DNA
atcggcggcgggaccaccgactgctccctgctgctgatgggcccgcagtg

SEQ ID NO: 40886 - DNA, 50 bp, synthetic construct
  source 1..50: mol_type = other DNA
atactctgggaacatttgtgaatcagtacttgcaaatgttcccattgatg

SEQ ID NO: 40887 - DNA, 50 bp, synthetic construct
  source 1..50: mol_type = other DNA
ctcgaggtcctgcgggagcctttggaagaccggcagatcacgatttcccg

SEQ ID NO: 40888 - DNA, 50 bp, synthetic construct
  source 1..50: mol_type = other DNA
gtaggtgtttcttttttaccttgagtccaagcattaccaattgtacataa

SEQ ID NO: 40889 - DNA, 50 bp, synthetic construct
  source 1..50: mol_type = other DNA
tttattgaaacatggggttgaccgttcggatgtcaaatgaatgaagaaga

SEQ ID NO: 40890 - DNA, 50 bp, synthetic construct
  source 1..50: mol_type = other DNA
ctttattctctgttatcggaaaagtacttttcctgattcaattgtgaaat

SEQ ID NO: 40891 - DNA, 50 bp, synthetic construct
  source 1..50: mol_type = other DNA
aagacagttcgcaaccatatctcaaacgcaatgcaaaagctaggggttaa

SEQ ID NO: 40892 - DNA, 50 bp, synthetic construct
  source 1..50: mol_type = other DNA
ttttttgtcgccattagacgcatgagatttaccccattaagccccaacgc

SEQ ID NO: 40893 - DNA, 50 bp, synthetic construct
  source 1..50: mol_type = other DNA
ttaactcctagcttttgcattgcatttgaaatgtgattgcgtactgtttt

SEQ ID NO: 40894 - DNA, 50 bp, synthetic construct
  source 1..50: mol_type = other DNA
ccttagctccaccaaaaacggaagcgtcttcccctttggctccaccacca

SEQ ID NO: 40895 - DNA, 50 bp, synthetic construct
  source 1..50: mol_type = other DNA
taaccgaacttgacgccggaagccttggtgttggtcttggcgttggctgc

SEQ ID NO: 40896 - DNA, 50 bp, synthetic construct
  source 1..50: mol_type = other DNA
atctggatcattatcgtagtgctcgcgagagccggatgacgactccagat

SEQ ID NO: 40897 - DNA, 50 bp, synthetic construct
  source 1..50: mol_type = other DNA
ttattagcgaaaaagaatatgaaaaagctcaagttctgtatatctatggt

SEQ ID NO: 40898 - DNA, 50 bp, synthetic construct
  source 1..50: mol_type = other DNA
tagattccttatttttattgatagaaatagcactaaaaaaatctcccaaa

SEQ ID NO: 40899 - DNA, 50 bp, synthetic construct
  source 1..50: mol_type = other DNA
tttttataagtaaaattaataatcctccttatgaattttgggtataaaaa

SEQ ID NO: 40900 - DNA, 50 bp, synthetic construct
  source 1..50: mol_type = other DNA
gcggccgcgatagtcccgatcgcgtattcgaccgtggacatgccatcctc

SEQ ID NO: 40901 - DNA, 50 bp, synthetic construct
  source 1..50: mol_type = other DNA
tcgacgggaatggtgtccgtcgcgtatgcgactgtggccatacccggaac

SEQ ID NO: 40902 - DNA, 50 bp, synthetic construct
  source 1..50: mol_type = other DNA
cgaggcggtggggcgaggtctcgacgttgagaccacctccgtccgcaccg

SEQ ID NO: 40903 - DNA, 50 bp, synthetic construct
  source 1..50: mol_type = other DNA
ctcgatgagctggcgcgcgtactcgtgatgacgcgcgccacctgcgagag

SEQ ID NO: 40904 - DNA, 50 bp, synthetic construct
  source 1..50: mol_type = other DNA
tctcgatgtgggtggcgtcgatgtcgacgcggcggccgagcacctcgcga

SEQ ID NO: 40905 - DNA, 50 bp, synthetic construct
  source 1..50: mol_type = other DNA
ggcggccggtcacgacgatggcgccgagaccatcggccagacccgcgagc

SEQ ID NO: 40906 - DNA, 50 bp, synthetic construct
  source 1..50: mol_type = other DNA
cggccggggccagggggccgacctggtcggcggccatgtggaccatgtcg

SEQ ID NO: 40907 - DNA, 50 bp, synthetic construct
  source 1..50: mol_type = other DNA
ggcggccggtgacgacgatggcgccgagaccatcggccagacccgcgagc

SEQ ID NO: 40908 - DNA, 50 bp, synthetic construct
  source 1..50: mol_type = other DNA
ttagccaagttaaagaaattggaggggtagtttttctgcccggtaacaat

SEQ ID NO: 40909 - DNA, 50 bp, synthetic construct
  source 1..50: mol_type = other DNA
aaataataccacataaatctagacatctcggtatttaggtaggaaaatca

SEQ ID NO: 40910 - DNA, 50 bp, synthetic construct
  source 1..50: mol_type = other DNA
tgaaaccggatatgctttcatttcttttgtcccaagcagatttgctgtca

SEQ ID NO: 40911 - DNA, 50 bp, synthetic construct
  source 1..50: mol_type = other DNA
agccacccgggaaatcctaaacgaattcatgcagggaatccgaaataccc

SEQ ID NO: 40912 - DNA, 50 bp, synthetic construct
  source 1..50: mol_type = other DNA
tcccgaatgccagcaaagaagtcccggaagatgttggcgcccagaatcgc

SEQ ID NO: 40913 - DNA, 50 bp, synthetic construct
  source 1..50: mol_type = other DNA
atctcgttccttggttcacaaggtgatatttgggatgcacagaaagacat

SEQ ID NO: 40914 - DNA, 50 bp, synthetic construct
  source 1..50: mol_type = other DNA
atctcgagggtttgagtgatgtatggatcgctcttggccttatccgagac

SEQ ID NO: 40915 - DNA, 50 bp, synthetic construct
  source 1..50: mol_type = other DNA
ctgacggaattcggcttgatcaattaatcaatatggatgaatttgataag

SEQ ID NO: 40916 - DNA, 50 bp, synthetic construct
  source 1..50: mol_type = other DNA
gaaaaatacggaccaacttttgctacaggttgttctactcctcatttcat

SEQ ID NO: 40917 - DNA, 50 bp, synthetic construct
  source 1..50: mol_type = other DNA
taatcactaaagctataatcgattataataaattatcttaatagtgaaat

SEQ ID NO: 40918 - DNA, 50 bp, synthetic construct
  source 1..50: mol_type = other DNA
cctggcacagttctgctctgtaaatttgcacaaaaaataaaacccatcat

SEQ ID NO: 40919 - DNA, 50 bp, synthetic construct
  source 1..50: mol_type = other DNA
ccagtgatttgccttcaaagtagtattgaagatataagtgaaaacacttt

SEQ ID NO: 40920 - DNA, 50 bp, synthetic construct
  source 1..50: mol_type = other DNA
aaagaagtaaaagaagtgtaaaaaatttctttttcctctgccgcttcttt

SEQ ID NO: 40921 - DNA, 50 bp, synthetic construct
  source 1..50: mol_type = other DNA
ctgttccgtggtacaatgaaaccacgcgcatagccaatacgacggttgcc

SEQ ID NO: 40922 - DNA, 50 bp, synthetic construct
  source 1..50: mol_type = other DNA
aggaacaagaccacgcccgtcgtaggaagcacggggcttcctttgttaat

SEQ ID NO: 40923 - DNA, 50 bp, synthetic construct
  source 1..50: mol_type = other DNA
ggcgagattaaccgtaatgtaattcgaattatacagtgattcttttcgat

SEQ ID NO: 40924 - DNA, 50 bp, synthetic construct
  source 1..50: mol_type = other DNA
accggcacgtggcgccaccgctgccgggcgcgcgggcagcacggccacgc

SEQ ID NO: 40925 - DNA, 50 bp, synthetic construct
  source 1..50: mol_type = other DNA
acttgcatgcccatcaggcccagatcccagcccttgatgacgcgaccggt

SEQ ID NO: 40926 - DNA, 50 bp, synthetic construct
  source 1..50: mol_type = other DNA
atacgttgtaaaatagaatgtaaagatttaaagcatctactacaacgtat

SEQ ID NO: 40927 - DNA, 50 bp, synthetic construct
  source 1..50: mol_type = other DNA
tacattcttttctaaatttatgatttgggatatattgtgaaaaacttgca

SEQ ID NO: 40928 - DNA, 50 bp, synthetic construct
  source 1..50: mol_type = other DNA
gtttaaatttaaaaaaagagaaataaatttctcttttcgagaattttaaa

SEQ ID NO: 40929 - DNA, 50 bp, synthetic construct
  source 1..50: mol_type = other DNA
agctaaattagaggtgaagagatatttttctccgcccctctatgcgacgc

SEQ ID NO: 40930 - DNA, 50 bp, synthetic construct
  source 1..50: mol_type = other DNA
agattatccggcaacggtaagtgaggtcaatgctgtaggccaagtaatta

SEQ ID NO: 40931 - DNA, 50 bp, synthetic construct
  source 1..50: mol_type = other DNA
actagccttttctatagcaaatcataacagtattggtattaaaggaggta

SEQ ID NO: 40932 - DNA, 50 bp, synthetic construct
  source 1..50: mol_type = other DNA
attaataattaaatattcaaaccaaataggaggagtatttaatgacaaat

SEQ ID NO: 40933 - DNA, 50 bp, synthetic construct
  source 1..50: mol_type = other DNA
atctgattgaggctctgaaagacccaggtcgcacaccgcctcaagcggat

SEQ ID NO: 40934 - DNA, 50 bp, synthetic construct
  source 1..50: mol_type = other DNA
ataaaacaccgccgaaataggccgttcggcctgccattgggggggattaa

SEQ ID NO: 40935 - DNA, 50 bp, synthetic construct
  source 1..50: mol_type = other DNA
tgtcatctttaaaactgagccacgcaattgattatcatttaaagatgaac

SEQ ID NO: 40936 - DNA, 50 bp, synthetic construct
  source 1..50: mol_type = other DNA
taatcatacaaatgtgttatgattataagcgttccacactcaaataggtg

SEQ ID NO: 40937 - DNA, 50 bp, synthetic construct
  source 1..50: mol_type = other DNA
taactggaaagaaatattaatgacttgaagttaaccagacgatcccaaac

SEQ ID NO: 40938 - DNA, 50 bp, synthetic construct
  source 1..50: mol_type = other DNA
gagcatttaagattatgcgaggagaaatcatcgatagggagaaagttatc

SEQ ID NO: 40939 - DNA, 50 bp, synthetic construct
  source 1..50: mol_type = other DNA
gtgttattgaaattgataaagagaattctctttatcaatttcaataacac

SEQ ID NO: 40940 - DNA, 50 bp, synthetic construct
  source 1..50: mol_type = other DNA
tcaatcacatcagctcttacactgttcatattagtcattcatttgattga

SEQ ID NO: 40941 - DNA, 50 bp, synthetic construct
  source 1..50: mol_type = other DNA
cagataataatgaacttagaattaaataattttaccttaatgtatatcac

SEQ ID NO: 40942 - DNA, 50 bp, synthetic construct
  source 1..50: mol_type = other DNA
ctatttcctcaaacgcatcacgtcgaatgtataagtttattagagaaacg

SEQ ID NO: 40943 - DNA, 50 bp, synthetic construct
  source 1..50: mol_type = other DNA
tgggtaacaccaattaagtgtttagttaagcacggaatttggtttgatta

SEQ ID NO: 40944 - DNA, 50 bp, synthetic construct
  source 1..50: mol_type = other DNA
tttagagtaaatggattgaaaaatttcttgttatatccatttatggtaaa

SEQ ID NO: 40945 - DNA, 50 bp, synthetic construct
  source 1..50: mol_type = other DNA
gttggtggcggtacactgtcaccaattggtggcggtacacttattccatg

SEQ ID NO: 40946 - DNA, 50 bp, synthetic construct
  source 1..50: mol_type = other DNA
taagaatattataaaccatttggttgaagaaattaattcaaatctttctg

SEQ ID NO: 40947 - DNA, 50 bp, synthetic construct
  source 1..50: mol_type = other DNA
tgtaccagcgtgtaattcaaacagatctcacctcgctttcgcccattaca

SEQ ID NO: 40948 - DNA, 50 bp, synthetic construct
  source 1..50: mol_type = other DNA
ctatgcggtggtgcagcatctcgatttgacgatgtcgattttgtgcgagt

SEQ ID NO: 40949 - DNA, 50 bp, synthetic construct
  source 1..50: mol_type = other DNA
catattgcacgtattacagaaatgattcgttctttttgacttgaaaaaga

SEQ ID NO: 40950 - DNA, 50 bp, synthetic construct
  source 1..50: mol_type = other DNA
caaccggcgttcgccgatcgacgtgcggggccttcgtgttgcgttggtca

SEQ ID NO: 40951 - DNA, 50 bp, synthetic construct
  source 1..50: mol_type = other DNA
tttttatacatatagaataggtactagtatccattatataaaaaataaag

SEQ ID NO: 40952 - DNA, 50 bp, synthetic construct
  source 1..50: mol_type = other DNA
cggacgagggaggggaagacgttggtgcccgacgtcctcgcccccgtccg

SEQ ID NO: 40953 - DNA, 50 bp, synthetic construct
  source 1..50: mol_type = other DNA
gggaggggttctcttctttgtccggacgggcgtcgccgaggaccagaccc

SEQ ID NO: 40954 - DNA, 50 bp, synthetic construct
  source 1..50: mol_type = other DNA
tgttaaagggaaaaagaaagtaattttttctacttttttacataaaaaaa

SEQ ID NO: 40955 - DNA, 50 bp, synthetic construct
  source 1..50: mol_type = other DNA
gtcacctggtacacctggctgtaaaactacacctggctggagcaggggcg

SEQ ID NO: 40956 - DNA, 50 bp, synthetic construct
  source 1..50: mol_type = other DNA
aaaagaaagggaggttgatctgctacttttttaaaaccaacaaatctttt

SEQ ID NO: 40957 - DNA, 50 bp, synthetic construct
  source 1..50: mol_type = other DNA
gcaggtaatcataatttattgtagttatagcataactagttgttgtttgg

SEQ ID NO: 40958 - DNA, 50 bp, synthetic construct
  source 1..50: mol_type = other DNA
ccggcgcgcgattgtgacccgctacgatctgctcgccaacctggacgggg

SEQ ID NO: 40959 - DNA, 50 bp, synthetic construct
  source 1..50: mol_type = other DNA
gactcgcgcgtaggcggcgacctttctcgagctccttctctgcgcgagcc

SEQ ID NO: 40960 - DNA, 50 bp, synthetic construct
  source 1..50: mol_type = other DNA
gcggagggcaagcaggaggtggtccgctcagcctctgccttggccacggc

SEQ ID NO: 40961 - DNA, 50 bp, synthetic construct
  source 1..50: mol_type = other DNA
ttcgtcgagggcctgcggggcaacctcaaaccctcgagatagtcaacgaa

SEQ ID NO: 40962 - DNA, 50 bp, synthetic construct
  source 1..50: mol_type = other DNA
gccttcgtctggatgatcaacaaggtgatgctgattgcgccgctcggcgt

SEQ ID NO: 40963 - DNA, 50 bp, synthetic construct
  source 1..50: mol_type = other DNA
cccaccagcgtaattgtcggttacatcttgccaaccagcgtaaagccagg

SEQ ID NO: 40964 - DNA, 50 bp, synthetic construct
  source 1..50: mol_type = other DNA
cagttaacaaagcatttcactatattatctttccgggctttctttaaccg

SEQ ID NO: 40965 - DNA, 50 bp, synthetic construct
  source 1..50: mol_type = other DNA
atcggtcgtaacattttcgtttttacaggagacataattggattaccgat

SEQ ID NO: 40966 - DNA, 50 bp, synthetic construct
  source 1..50: mol_type = other DNA
agaaggcgacgccgcgcggtcaagcccttgaaagagcgatttcggtttca

SEQ ID NO: 40967 - DNA, 50 bp, synthetic construct
  source 1..50: mol_type = other DNA
aggggtttcatttttacgcatataaaacgatgcaaaaaatggaaaccata

SEQ ID NO: 40968 - DNA, 50 bp, synthetic construct
  source 1..50: mol_type = other DNA
tctttccgtccgctgtcgccgtgaaatcatactgacatcattattacaga

SEQ ID NO: 40969 - DNA, 50 bp, synthetic construct
  source 1..50: mol_type = other DNA
acaaaagcaaatcatcgaattgttttttgaagcctttccttatcttgact

SEQ ID NO: 40970 - DNA, 50 bp, synthetic construct
  source 1..50: mol_type = other DNA
ataaacaatgggtctatttcttatcctcatcctttagactgatttctaac

SEQ ID NO: 40971 - DNA, 50 bp, synthetic construct
  source 1..50: mol_type = other DNA
gatcgagaattggagcgggtgaaggggtgaagggaatcgaaccctcgtcg

SEQ ID NO: 40972 - DNA, 50 bp, synthetic construct
  source 1..50: mol_type = other DNA
cgcaaacgcatcatgtggagtgcatatggacaacacacgtcgagtgtgta

SEQ ID NO: 40973 - DNA, 50 bp, synthetic construct
  source 1..50: mol_type = other DNA
tgataacttgacttattgaggctttaaaggctcaaacagtaatactatgt

SEQ ID NO: 40974 - DNA, 50 bp, synthetic construct
  source 1..50: mol_type = other DNA
tatttaattcaccaggatggaaagtttgcgtttttttggtaaaataaagc

SEQ ID NO: 40975 - DNA, 50 bp, synthetic construct
  source 1..50: mol_type = other DNA
attgcgtaactgatccaaaaggattatgagctttggagaaatggaaaaat

SEQ ID NO: 40976 - DNA, 50 bp, synthetic construct
  source 1..50: mol_type = other DNA
ctaccgagtagtttggcgttctctaaaaagaaagataaacaaaaaatctc

SEQ ID NO: 40977 - DNA, 50 bp, synthetic construct
  source 1..50: mol_type = other DNA
gctttcgcgagcaaagctacgcactccacatgatgcgtttgaggaaataa

SEQ ID NO: 40978 - DNA, 50 bp, synthetic construct
  source 1..50: mol_type = other DNA
aatcagacaagaattatgtccatatttatgaccatattgcgagtcgtttt

SEQ ID NO: 40979 - DNA, 50 bp, synthetic construct
  source 1..50: mol_type = other DNA
atttaagccctaagataaagtacgatgtttttttgtattaaaatttaaat

SEQ ID NO: 40980 - DNA, 50 bp, synthetic construct
  source 1..50: mol_type = other DNA
tgaaagaattaactgttattgtttataaataaaaaatagtccaatatttt

SEQ ID NO: 40981 - DNA, 50 bp, synthetic construct
  source 1..50: mol_type = other DNA
tgtcagaactcttaatgctgaaggtcttcaaaacattacctgtaccagca

SEQ ID NO: 40982 - DNA, 50 bp, synthetic construct
  source 1..50: mol_type = other DNA
tgccagttcgatctggattgacactccaaataatctggatcgtcaacgcc

SEQ ID NO: 40983 - DNA, 50 bp, synthetic construct
  source 1..50: mol_type = other DNA
acctcgaacacctcgtcccagtcaccctcgatcgtggtgaacatcgagtc

SEQ ID NO: 40984 - DNA, 50 bp, synthetic construct
  source 1..50: mol_type = other DNA
tatgatacggttcaccgtatcacccttgtgatacggttccccacgattaa

SEQ ID NO: 40985 - DNA, 50 bp, synthetic construct
  source 1..50: mol_type = other DNA
atgtttggatatggagaagtaaatcagtataaccgccactcgacgctaat

SEQ ID NO: 40986 - DNA, 50 bp, synthetic construct
  source 1..50: mol_type = other DNA
atgatgggcacgccgggacggccgggcggcattcccggcaaacagaatag

SEQ ID NO: 40987 - DNA, 50 bp, synthetic construct
  source 1..50: mol_type = other DNA
ccgcaactattttgttctgctgtttatcattcaataccaaaaccccgtaa

SEQ ID NO: 40988 - DNA, 50 bp, synthetic construct
  source 1..50: mol_type = other DNA
aaaaactgtttctctttctggaaagctgccgcaaaactccgacagcttta

SEQ ID NO: 40989 - DNA, 50 bp, synthetic construct
  source 1..50: mol_type = other DNA
gtgaggttgctgccctgcatgacaatcgcacagcagactacccacctcac

SEQ ID NO: 40990 - DNA, 50 bp, synthetic construct
  source 1..50: mol_type = other DNA
ggcccttagtgtaaagcataacgtctcggatctacacctgtgcagcgcct

SEQ ID NO: 40991 - DNA, 50 bp, synthetic construct
  source 1..50: mol_type = other DNA
ataggtgcaatgatcatcactttattgatcatccaaaccattgcatcaac

SEQ ID NO: 40992 - DNA, 50 bp, synthetic construct
  source 1..50: mol_type = other DNA
gctctgggtagaggctatgttctgtacgatacagcaccttgaccacatgc

SEQ ID NO: 40993 - DNA, 50 bp, synthetic construct
  source 1..50: mol_type = other DNA
cccgatagtgctgcggctttcgttaaacagaagtcatcattgtgatcggg

SEQ ID NO: 40994 - DNA, 50 bp, synthetic construct
  source 1..50: mol_type = other DNA
taaatgtggcgggctacatgggacgaatgtggcggagagatagggatttg

SEQ ID NO: 40995 - DNA, 50 bp, synthetic construct
  source 1..50: mol_type = other DNA
tgatcggctggaatccgaagaatttcaattaggcgtattcaaagctatct

SEQ ID NO: 40996 - DNA, 50 bp, synthetic construct
  source 1..50: mol_type = other DNA
gcgaaagcactggttattcctaccaacgaagagtgggtaatcgctcaaca

SEQ ID NO: 40997 - DNA, 50 bp, synthetic construct
  source 1..50: mol_type = other DNA
tatgttctgtagagaaccttagttaataccttgaccacatgccagccaaa

SEQ ID NO: 40998 - DNA, 50 bp, synthetic construct
  source 1..50: mol_type = other DNA
atggtggtgccatatggattaacataagtttatgattgccaaaccaccta

SEQ ID NO: 40999 - DNA, 50 bp, synthetic construct
  source 1..50: mol_type = other DNA
tatctctccgccatattgatacgaaatcatccctatctctccgccacatt

SEQ ID NO: 41000 - DNA, 50 bp, synthetic construct
  source 1..50: mol_type = other DNA
gtgtttcgctgcttcgactgattcaacaatcaacagaaacatttatcttt

SEQ ID NO: 41001 - DNA, 50 bp, synthetic construct
  source 1..50: mol_type = other DNA
gctctgggtagaggctatgttctgtacgataaagcaccttgaccacatgc

SEQ ID NO: 41002 - DNA, 50 bp, synthetic construct
  source 1..50: mol_type = other DNA
tcgtggtcgacctggacgacgaggatcgtggtgcgggcgatcgaggacgc

SEQ ID NO: 41003 - DNA, 50 bp, synthetic construct
  source 1..50: mol_type = other DNA
caccaacatctcaatcaaggatagtagtaacctacatttccaccaatgta

SEQ ID NO: 41004 - DNA, 50 bp, synthetic construct
  source 1..50: mol_type = other DNA
tccagctcaaattattgaaaattacctctttattgtgatagggagtggga

SEQ ID NO: 41005 - DNA, 50 bp, synthetic construct
  source 1..50: mol_type = other DNA
ttcttttaacttgcttaggctagcattttagtaacctacatttcaatcaa

SEQ ID NO: 41006 - DNA, 50 bp, synthetic construct
  source 1..50: mol_type = other DNA
cttatgttagatgaggcgacttcaagcttagatagtaaatctgagtctgt

SEQ ID NO: 41007 - DNA, 50 bp, synthetic construct
  source 1..50: mol_type = other DNA
aaaaaggcgatttctttttagtaatttcggtaaaaagaaaagcccagagg

SEQ ID NO: 41008 - DNA, 50 bp, synthetic construct
  source 1..50: mol_type = other DNA
aagtaaacttacacactcaacttgctaccgtctccacgtgatgcgtctgc

SEQ ID NO: 41009 - DNA, 50 bp, synthetic construct
  source 1..50: mol_type = other DNA
taattacaccaacaaggtgacgacaagtggatttcttattggtggcctaa

SEQ ID NO: 41010 - DNA, 50 bp, synthetic construct
  source 1..50: mol_type = other DNA
ataagtgtactgtggcggttgtattgattcacttccccatacccaaacat

SEQ ID NO: 41011 - DNA, 50 bp, synthetic construct
  source 1..50: mol_type = other DNA
cggccgtgcgccggaagtcactgtcgacttcccggtgcgccgcatcaccg

SEQ ID NO: 41012 - DNA, 50 bp, synthetic construct
  source 1..50: mol_type = other DNA
ctccgatctggcgcatgcgtttgcgggcaagcgcgcgcacgagatcggcg

SEQ ID NO: 41013 - DNA, 50 bp, synthetic construct
  source 1..50: mol_type = other DNA
cgatgctgatggcggcgctcaaggcggcgcgatcgccgccgacgtggtcg

SEQ ID NO: 41014 - DNA, 50 bp, synthetic construct
  source 1..50: mol_type = other DNA
gtaaaagcctaaaaatcagcaagagaaaaggtagatttactggcggttaa

SEQ ID NO: 41015 - DNA, 50 bp, synthetic construct
  source 1..50: mol_type = other DNA
taatgacccgcagcatcggcgctgctcaaggctttggctgccctccattg

SEQ ID NO: 41016 - DNA, 50 bp, synthetic construct
  source 1..50: mol_type = other DNA
gccgtattccgatggtagctggtttcataattttgcctatgcacctcggt

SEQ ID NO: 41017 - DNA, 50 bp, synthetic construct
  source 1..50: mol_type = other DNA
ggtgaacgagcgggatcgctcacctcggggtggcgggattcgaacccacg

SEQ ID NO: 41018 - DNA, 50 bp, synthetic construct
  source 1..50: mol_type = other DNA
ctttctcaccgatgttagcacagataacagcgatattatccgcaggaaat

SEQ ID NO: 41019 - DNA, 50 bp, synthetic construct
  source 1..50: mol_type = other DNA
caagcttcatgtcgagcaggtcatcgacggcctgctggtgcttccttttc

SEQ ID NO: 41020 - DNA, 50 bp, synthetic construct
  source 1..50: mol_type = other DNA
tgggtgtcgataagggcattaggcccacccatttcagtacgtacccagcc

SEQ ID NO: 41021 - DNA, 50 bp, synthetic construct
  source 1..50: mol_type = other DNA
gttatttgcggaaatatcgccaaaaaatccagaccttgtgatgaaataat

SEQ ID NO: 41022 - DNA, 50 bp, synthetic construct
  source 1..50: mol_type = other DNA
taaaaatcccaagttacaggccgaatatctatgttgttttacgcattcat

SEQ ID NO: 41023 - DNA, 50 bp, synthetic construct
  source 1..50: mol_type = other DNA
ttgttttctgaatattctttatagatgtatatagaatttagtaattgcag

SEQ ID NO: 41024 - DNA, 50 bp, synthetic construct
  source 1..50: mol_type = other DNA
agaaaaacatcgaagaataagcactagatcaacgccttctttcagcttct

SEQ ID NO: 41025 - DNA, 50 bp, synthetic construct
  source 1..50: mol_type = other DNA
gtctccctccctgaatcagcggaatcaggtatccttgtccccctgcagaa

SEQ ID NO: 41026 - DNA, 50 bp, synthetic construct
  source 1..50: mol_type = other DNA
gttgtgaccgttggtaggggagtgctcgaagcgctacgcacaccactcga

SEQ ID NO: 41027 - DNA, 50 bp, synthetic construct
  source 1..50: mol_type = other DNA
ataactccctagcaagtgttattataaaatgctttatttatgggcttttt

SEQ ID NO: 41028 - DNA, 50 bp, synthetic construct
  source 1..50: mol_type = other DNA
atgaacggtattattgacaatgagatctccggctctgaaatctcaaactc

SEQ ID NO: 41029 - DNA, 50 bp, synthetic construct
  source 1..50: mol_type = other DNA
ttttctgcggcttctcgcaggctcatgtgccggccagtgacatcggaaga

SEQ ID NO: 41030 - DNA, 50 bp, synthetic construct
  source 1..50: mol_type = other DNA
tgccgttcctcacggctataatcacacctttctttctatgaggctgtaca

SEQ ID NO: 41031 - DNA, 50 bp, synthetic construct
  source 1..50: mol_type = other DNA
ttccgctgatgtagttatcgaaaatgtgttcctgtcggtcatcaagggaa

SEQ ID NO: 41032 - DNA, 50 bp, synthetic construct
  source 1..50: mol_type = other DNA
gcgctactgacgatagaagctcaactcggcgctggcggcactacaggcgt

SEQ ID NO: 41033 - DNA, 50 bp, synthetic construct
  source 1..50: mol_type = other DNA
tacttaaaacctgtcagctacaaatttttgtaatgaggagggatatagta

SEQ ID NO: 41034 - DNA, 50 bp, synthetic construct
  source 1..50: mol_type = other DNA
ttgagccatgatttgttagcgtgttgagtgcataaaaaatgatttgaaaa

SEQ ID NO: 41035 - DNA, 50 bp, synthetic construct
  source 1..50: mol_type = other DNA
tgaccattaatactaaatttatcaattgataacttttttaacaaagttaa

SEQ ID NO: 41036 - DNA, 50 bp, synthetic construct
  source 1..50: mol_type = other DNA
gatgataaatattttagcaatctcaatagattcctataagatttttatct

SEQ ID NO: 41037 - DNA, 50 bp, synthetic construct
  source 1..50: mol_type = other DNA
tataactattttgatgaaaaaaaatatatttatagatgaattgatatata

SEQ ID NO: 41038 - DNA, 50 bp, synthetic construct
  source 1..50: mol_type = other DNA
ttgttgaagaaattaatcatgctgatcattaatattatgcactgctgtaa

SEQ ID NO: 41039 - DNA, 50 bp, synthetic construct
  source 1..50: mol_type = other DNA
aataacataatcaaattgatatgtctcaatgtgaagcttatattgatatg

SEQ ID NO: 41040 - DNA, 50 bp, synthetic construct
  source 1..50: mol_type = other DNA
aaacatccaaaaaggaaaaacaaaattctattttttatttttgtatattc

SEQ ID NO: 41041 - DNA, 50 bp, synthetic construct
  source 1..50: mol_type = other DNA
ataatgtcttggaagtgtggtataattattgctcgctacaaaccaagggg

SEQ ID NO: 41042 - DNA, 50 bp, synthetic construct
  source 1..50: mol_type = other DNA
gtttattttacattattgaataaatgttttttgttatatgtaaaataatt

SEQ ID NO: 41043 - DNA, 50 bp, synthetic construct
  source 1..50: mol_type = other DNA
aacacacgtctatatttagttaaaatggtaattaaaaatagacatggcgg

SEQ ID NO: 41044 - DNA, 50 bp, synthetic construct
  source 1..50: mol_type = other DNA
actgcaccactggttaagttccttcaaacgaagaattaaagagaaacaag

SEQ ID NO: 41045 - DNA, 50 bp, synthetic construct
  source 1..50: mol_type = other DNA
ccaaacgcaaaggcattaaactttttaaacgtttatgcttagggctaatc

SEQ ID NO: 41046 - DNA, 50 bp, synthetic construct
  source 1..50: mol_type = other DNA
ctttaactataaaaagcccatgcaattaaaatacgttactacacttaaaa

SEQ ID NO: 41047 - DNA, 50 bp, synthetic construct
  source 1..50: mol_type = other DNA
cagttggaaaaatcacaaatatgaatttttacaatagaggttgtcaacaa

SEQ ID NO: 41048 - DNA, 50 bp, synthetic construct
  source 1..50: mol_type = other DNA
tataaacagccttttctaaaactgacgagctttgattttatggttttata

SEQ ID NO: 41049 - DNA, 50 bp, synthetic construct
  source 1..50: mol_type = other DNA
cggcgacatcgccgcggcagccctcggtatggagagcgcgggtgaggcac

SEQ ID NO: 41050 - DNA, 50 bp, synthetic construct
  source 1..50: mol_type = other DNA
gcgcgcatcgatggtgcggcctcgaaatggcacgtcccatcaaagccttc

SEQ ID NO: 41051 - DNA, 50 bp, synthetic construct
  source 1..50: mol_type = other DNA
aaccttcatatttgtaatctttctatagaaaattaacatttgtgatttta

SEQ ID NO: 41052 - DNA, 50 bp, synthetic construct
  source 1..50: mol_type = other DNA
aaaagagcttattaatagtaaagagctcaataagttttttatgttctttt

SEQ ID NO: 41053 - DNA, 50 bp, synthetic construct
  source 1..50: mol_type = other DNA
cggttacgccggtgtgccgaaaggctcctgcgcatagaccggtgatccct

SEQ ID NO: 41054 - DNA, 50 bp, synthetic construct
  source 1..50: mol_type = other DNA
ttttctttttatttgcttcttctatttagaagctaaatcaattactaacg

SEQ ID NO: 41055 - DNA, 50 bp, synthetic construct
  source 1..50: mol_type = other DNA
gctttagggttgaatggagtaaatctcatgcgcctaatggcaacaaaaaa

SEQ ID NO: 41056 - DNA, 50 bp, synthetic construct
  source 1..50: mol_type = other DNA
cgaacaacttttcggtaaaaaccccgggcttttcctactgaaggtgtttt

SEQ ID NO: 41057 - DNA, 50 bp, synthetic construct
  source 1..50: mol_type = other DNA
tgaggaactcatgaagcgaaacggcagcgtcctccttcgcctcgtcctcg

SEQ ID NO: 41058 - DNA, 50 bp, synthetic construct
  source 1..50: mol_type = other DNA
agctagtctctgcggcggctcgccgcggcacgcaacgcggcgagactgct

SEQ ID NO: 41059 - DNA, 50 bp, synthetic construct
  source 1..50: mol_type = other DNA
aatttctctggcgcgtacgcgtagaagtggccaaagccaccacccagata

SEQ ID NO: 41060 - DNA, 50 bp, synthetic construct
  source 1..50: mol_type = other DNA
tacagcaccttaattacttattcaatacgatacagcaccttaacaacgtg

SEQ ID NO: 41061 - DNA, 50 bp, synthetic construct
  source 1..50: mol_type = other DNA
gttacggggtcttcgtcgccaccatttgcaggccaaaagtaacgcgatac

SEQ ID NO: 41062 - DNA, 50 bp, synthetic construct
  source 1..50: mol_type = other DNA
tatctaccgtattattttatatttatcaaatataaatgatccggtacacc

SEQ ID NO: 41063 - DNA, 50 bp, synthetic construct
  source 1..50: mol_type = other DNA
tgtatgcaagacatccattggacagacggctcttttggttatttcccatc

SEQ ID NO: 41064 - DNA, 50 bp, synthetic construct
  source 1..50: mol_type = other DNA
tatattgatagaaatggtggagatgacgagagtcgaactcgtgtccgaaa

SEQ ID NO: 41065 - DNA, 50 bp, synthetic construct
  source 1..50: mol_type = other DNA
ggtgtgccatttttaactattaccttctgggtgtgccattttttaaaaaa

SEQ ID NO: 41066 - DNA, 50 bp, synthetic construct
  source 1..50: mol_type = other DNA
ggtgacatcgtgggcagtccctatgaatttgaccacaacaattacaagca

SEQ ID NO: 41067 - DNA, 50 bp, synthetic construct
  source 1..50: mol_type = other DNA
acatctctaggtggtttggcaatcatccatatggcaccaccatgtgaata

SEQ ID NO: 41068 - DNA, 50 bp, synthetic construct
  source 1..50: mol_type = other DNA
ttccagtttccagccaagcgcattacggtcaatttggctccggcggattt

SEQ ID NO: 41069 - DNA, 50 bp, synthetic construct
  source 1..50: mol_type = other DNA
caatctattgattaatcgaaggtttaattttttgttaggattgattattg

SEQ ID NO: 41070 - DNA, 50 bp, synthetic construct
  source 1..50: mol_type = other DNA
gaaataaccaaaagagccgtctgtctctctctgtccaatggatgtcttgc

SEQ ID NO: 41071 - DNA, 50 bp, synthetic construct
  source 1..50: mol_type = other DNA
attggcggcggcaccaccgactgttccatgctgctgatggggccgcagtg

SEQ ID NO: 41072 - DNA, 50 bp, synthetic construct
  source 1..50: mol_type = other DNA
tggaagaagtaaaaaagtggtcttgattgcccgtgcatttattaatgcat

SEQ ID NO: 41073 - DNA, 50 bp, synthetic construct
  source 1..50: mol_type = other DNA
gctttttcttttatgaggtgaaatatatttttttacaaaaacaaaaaaga

SEQ ID NO: 41074 - DNA, 50 bp, synthetic construct
  source 1..50: mol_type = other DNA
taattttataaatgaggaggtttctagaaactttttcgtttgaaaaaata

SEQ ID NO: 41075 - DNA, 50 bp, synthetic construct
  source 1..50: mol_type = other DNA
gcagtagtttcgctaatgtttgctttagaactaggtggacaaaagtatga

SEQ ID NO: 41076 - DNA, 50 bp, synthetic construct
  source 1..50: mol_type = other DNA
tgctttcgggctggttattagcatcactggttaactccatgctgaatgag

SEQ ID NO: 41077 - DNA, 50 bp, synthetic construct
  source 1..50: mol_type = other DNA
cagtaaacacagcacttccacatgctaccgtctcatagtgagaagtatgc

SEQ ID NO: 41078 - DNA, 50 bp, synthetic construct
  source 1..50: mol_type = other DNA
tgaaaatgcttgttcgatgcccgactgaattacctctacaagacctatca

SEQ ID NO: 41079 - DNA, 50 bp, synthetic construct
  source 1..50: mol_type = other DNA
ggtgccaagctgatgacgctggagtgctcggctctggtgagctttgcaaa

SEQ ID NO: 41080 - DNA, 50 bp, synthetic construct
  source 1..50: mol_type = other DNA
tgaactgtttcataccctgagacttttccctgagagaatggcagagtttg

SEQ ID NO: 41081 - DNA, 50 bp, synthetic construct
  source 1..50: mol_type = other DNA
cagaatcgaatacacatattcccctgcttctttatggtcggtcaaatcgc

SEQ ID NO: 41082 - DNA, 50 bp, synthetic construct
  source 1..50: mol_type = other DNA
gtcatcttgaaaaatgtaaattaccatatctttctttttagcaagatatt

SEQ ID NO: 41083 - DNA, 50 bp, synthetic construct
  source 1..50: mol_type = other DNA
atatagattatcatatttctatacaaatttcgaaatatcataatctatgc

SEQ ID NO: 41084 - DNA, 50 bp, synthetic construct
  source 1..50: mol_type = other DNA
tgctctgctgtatgcataggtgcgatttcgactatatgcataggaggata

SEQ ID NO: 41085 - DNA, 50 bp, synthetic construct
  source 1..50: mol_type = other DNA
tgctctgctgtatgcataggtgcgatttcgactatatgcataggagggta

SEQ ID NO: 41086 - DNA, 50 bp, synthetic construct
  source 1..50: mol_type = other DNA
ttgcaattacatcttgtacccttaactcgaagcgggacttgaacccgcac

SEQ ID NO: 41087 - DNA, 50 bp, synthetic construct
  source 1..50: mol_type = other DNA
agtaagagtagaaataataagtgctatcacttttaccacttaatcatatg

SEQ ID NO: 41088 - DNA, 50 bp, synthetic construct
  source 1..50: mol_type = other DNA
gaataaaaagtctttcaagtagctgtacaaatataaaagactatttatac

SEQ ID NO: 41089 - DNA, 50 bp, synthetic construct
  source 1..50: mol_type = other DNA
atctagagtctaagttaaaaaacatcaattttccaacgcccacggcagat

SEQ ID NO: 41090 - DNA, 50 bp, synthetic construct
  source 1..50: mol_type = other DNA
accccctgcaattcaccaacgtttgtccttgctcttctcgtcgtcttcgc

SEQ ID NO: 41091 - DNA, 50 bp, synthetic construct
  source 1..50: mol_type = other DNA
gaggcactagtcatggtaggggtggccagcccggagccgaccccctcctc

SEQ ID NO: 41092 - DNA, 50 bp, synthetic construct
  source 1..50: mol_type = other DNA
ttccggacatgggggaacacagttgcaattaacaccctgcacacggggga

SEQ ID NO: 41093 - DNA, 50 bp, synthetic construct
  source 1..50: mol_type = other DNA
actccgacttttggaaaagaaccgtacggttttttagtataaagatgcgt

SEQ ID NO: 41094 - DNA, 50 bp, synthetic construct
  source 1..50: mol_type = other DNA
tcgttgaccagtccgcacgcctgcataaaggagtaacagatagtcgtacc

SEQ ID NO: 41095 - DNA, 50 bp, synthetic construct
  source 1..50: mol_type = other DNA
tacaggtttgaatcctgtcgaggtcagcgagttcacttaaggagacaact

SEQ ID NO: 41096 - DNA, 50 bp, synthetic construct
  source 1..50: mol_type = other DNA
gtcgaggtcacaagacgggggtttaagagtttggatagcgtcctgtcaag

SEQ ID NO: 41097 - DNA, 50 bp, synthetic construct
  source 1..50: mol_type = other DNA
aagccccttaaaaaaggagctttgtgctttttcccgaaaggtgaccgcag

SEQ ID NO: 41098 - DNA, 50 bp, synthetic construct
  source 1..50: mol_type = other DNA
aacaacgccgccgaacgggccctgcgcaggcgccagagagttcatttgca

SEQ ID NO: 41099 - DNA, 50 bp, synthetic construct
  source 1..50: mol_type = other DNA
cgggcaatgacgatctcgccgctttccagcggctcgcgcaggacctccag

SEQ ID NO: 41100 - DNA, 50 bp, synthetic construct
  source 1..50: mol_type = other DNA
taaccggctgcagctcgacgtcccgcaggatttcaggcatcagaaaggct

SEQ ID NO: 41101 - DNA, 50 bp, synthetic construct
  source 1..50: mol_type = other DNA
tccataaagcaaaacacctaatcatcaggcaggggtctttggtttcaggc

SEQ ID NO: 41102 - DNA, 50 bp, synthetic construct
  source 1..50: mol_type = other DNA
gaacgtgctgtctggggtcggttccggaaccgacccctgtctgccgagca

SEQ ID NO: 41103 - DNA, 50 bp, synthetic construct
  source 1..50: mol_type = other DNA
ggtcgccggttcgaatccggcccgggcgagccagtttcgaaagagccatt

SEQ ID NO: 41104 - DNA, 50 bp, synthetic construct
  source 1..50: mol_type = other DNA
cgatgacgtcgcctctccggagttccgccagaactgcggcgacgtcgtcg

SEQ ID NO: 41105 - DNA, 50 bp, synthetic construct
  source 1..50: mol_type = other DNA
gccttgtcgggcaggccgacgatctgcatgccgaccttgccgggcgcgac

SEQ ID NO: 41106 - DNA, 50 bp, synthetic construct
  source 1..50: mol_type = other DNA
ttggtagatgattcggatgaagcatctgattgccaaaaatcatctttcac

SEQ ID NO: 41107 - DNA, 50 bp, synthetic construct
  source 1..50: mol_type = other DNA
cgaagtggccgcggccggcggccatagggcctccgggctccggcaagtcg

SEQ ID NO: 41108 - DNA, 50 bp, synthetic construct
  source 1..50: mol_type = other DNA
ctcttaatgatgaaggtcaccagacacctttgaagcttgctcattagctg

SEQ ID NO: 41109 - DNA, 50 bp, synthetic construct
  source 1..50: mol_type = other DNA
cggtgccggtgccatccagccttgcgcaagcctgtctggcggcaagacca

SEQ ID NO: 41110 - DNA, 50 bp, synthetic construct
  source 1..50: mol_type = other DNA
ctcgccaggaggcgggcgaggcttgaaagcctggccgatatcctcaagga

SEQ ID NO: 41111 - DNA, 50 bp, synthetic construct
  source 1..50: mol_type = other DNA
ttcttcatcgctgccataaattgtgctcaattgatggactacgataagaa

SEQ ID NO: 41112 - DNA, 50 bp, synthetic construct
  source 1..50: mol_type = other DNA
caattcgcaaaagacaattgtatgatcatgcagttgactaaagagacaaa

SEQ ID NO: 41113 - DNA, 50 bp, synthetic construct
  source 1..50: mol_type = other DNA
gaggcattatggaagttatacacactatacgatagcagacattatgcttt

SEQ ID NO: 41114 - DNA, 50 bp, synthetic construct
  source 1..50: mol_type = other DNA
tataataattgttgttttgtcaatatcttgaatatacaacaataatcgta

SEQ ID NO: 41115 - DNA, 50 bp, synthetic construct
  source 1..50: mol_type = other DNA
aagcagggctgcccaccaaggcggcccactaccgaaaggcagtggggttt

SEQ ID NO: 41116 - DNA, 50 bp, synthetic construct
  source 1..50: mol_type = other DNA
tctttcccgtctccggatcccggaccacacgcgcacgctcacgggcaagc

SEQ ID NO: 41117 - DNA, 50 bp, synthetic construct
  source 1..50: mol_type = other DNA
ctttgtatcaatataagagttaacatgtttatagtgatatacataataag

SEQ ID NO: 41118 - DNA, 50 bp, synthetic construct
  source 1..50: mol_type = other DNA
agatattaatatcttctttattgctttattgaaagaatatatatatatat

SEQ ID NO: 41119 - DNA, 50 bp, synthetic construct
  source 1..50: mol_type = other DNA
accaaattgatagaaggaaggatatacatgcagtatattatcaggtgaga

SEQ ID NO: 41120 - DNA, 50 bp, synthetic construct
  source 1..50: mol_type = other DNA
tttttaaaatcattgatttttgtgtggaattaaatcactttttgtcattc

SEQ ID NO: 41121 - DNA, 50 bp, synthetic construct
  source 1..50: mol_type = other DNA
tgaaattgataaagagcaattcttgagtgataaaaatttcgataataaaa

SEQ ID NO: 41122 - DNA, 50 bp, synthetic construct
  source 1..50: mol_type = other DNA
agtaaatgacgttcatcaataatgatatttatagatgaattgatatataa

SEQ ID NO: 41123 - DNA, 50 bp, synthetic construct
  source 1..50: mol_type = other DNA
gtatattttatcagatttatcagaatttcctaaaaaatgataaaatgggt

SEQ ID NO: 41124 - DNA, 50 bp, synthetic construct
  source 1..50: mol_type = other DNA
agtttacgactacactaaatttgaagtaaaagtagatgttcagccaatgc

SEQ ID NO: 41125 - DNA, 50 bp, synthetic construct
  source 1..50: mol_type = other DNA
gatggattgtccgctttcccttagttgtttgggaaacaccagtttcccat

SEQ ID NO: 41126 - DNA, 50 bp, synthetic construct
  source 1..50: mol_type = other DNA
aaaagctatgattaaatcaatagcttagattttgtaaatttctagctttt

SEQ ID NO: 41127 - DNA, 50 bp, synthetic construct
  source 1..50: mol_type = other DNA
tatataactatgtagcactttgtcagacccagtgtctacaaaactatatt

SEQ ID NO: 41128 - DNA, 50 bp, synthetic construct
  source 1..50: mol_type = other DNA
cactcgtcttttggtgacacggttaaaactatgtcactaagaaacaattg

SEQ ID NO: 41129 - DNA, 50 bp, synthetic construct
  source 1..50: mol_type = other DNA
gctggagttgactttcctctattttaaaatgctggaagactgtatcggcc

SEQ ID NO: 41130 - DNA, 50 bp, synthetic construct
  source 1..50: mol_type = other DNA
acaaggcttttagagtgatatatggtacgttatccggctccgcaaggagt

SEQ ID NO: 41131 - DNA, 50 bp, synthetic construct
  source 1..50: mol_type = other DNA
gggatcgtcgctgaaagagaaaaagctttttctcttttgccagcttcttt

SEQ ID NO: 41132 - DNA, 50 bp, synthetic construct
  source 1..50: mol_type = other DNA
ttcttgatttgaaatttaacgaattagcactttaaatttaatcataaaag

SEQ ID NO: 41133 - DNA, 50 bp, synthetic construct
  source 1..50: mol_type = other DNA
gttcataaagaaattcatcgtttattaagttcatgaatttcttcttcttc

SEQ ID NO: 41134 - DNA, 50 bp, synthetic construct
  source 1..50: mol_type = other DNA
gaaagggtccgtgtttactgtttcatgaaagccgcccggcggaccagttc

SEQ ID NO: 41135 - DNA, 50 bp, synthetic construct
  source 1..50: mol_type = other DNA
gataatgaggtactaaacaatctaaatggaaaatttaaaactaaattatg

SEQ ID NO: 41136 - DNA, 50 bp, synthetic construct
  source 1..50: mol_type = other DNA
gacgacggaccgaccgacatcgacaacctgaccttcgcctgcggcccgca

SEQ ID NO: 41137 - DNA, 50 bp, synthetic construct
  source 1..50: mol_type = other DNA
acgtgttcgaggccgcgctgtccgcacggccaccacggccacgcccacta

SEQ ID NO: 41138 - DNA, 50 bp, synthetic construct
  source 1..50: mol_type = other DNA
ataaatctaaagttattatagtaatattccaattttttcttttagtttat

SEQ ID NO: 41139 - DNA, 50 bp, synthetic construct
  source 1..50: mol_type = other DNA
aatgacattccagaaatataattatcgtaatattgctttttatcttcaaa

SEQ ID NO: 41140 - DNA, 50 bp, synthetic construct
  source 1..50: mol_type = other DNA
actcgtcggttaatccagatggtagctcacatcgacacagcccaacgaga

SEQ ID NO: 41141 - DNA, 50 bp, synthetic construct
  source 1..50: mol_type = other DNA
aattgcctgaatttaaacgaagtgcgcgcagtggacaacatccggcagca

SEQ ID NO: 41142 - DNA, 50 bp, synthetic construct
  source 1..50: mol_type = other DNA
tccttcaactgcatgtcgcatcgcgtcagacgtaaatacaggttgcccct

SEQ ID NO: 41143 - DNA, 50 bp, synthetic construct
  source 1..50: mol_type = other DNA
gtgtaagatgggaagtaaccgaatgcatttgctatctgtccagtggatgt

SEQ ID NO: 41144 - DNA, 50 bp, synthetic construct
  source 1..50: mol_type = other DNA
ccgttttctttcacctaaataatcaacatttttttggtgatgctaaacag

SEQ ID NO: 41145 - DNA, 50 bp, synthetic construct
  source 1..50: mol_type = other DNA
actaagttctgtaaagaaccttagttatcaggtacgataaagaactttca

SEQ ID NO: 41146 - DNA, 50 bp, synthetic construct
  source 1..50: mol_type = other DNA
taattgaaccaaaaggattaacctcttcccaaatgtttctactacaaagg

SEQ ID NO: 41147 - DNA, 50 bp, synthetic construct
  source 1..50: mol_type = other DNA
tcctaacacgtcatgtcgagtgcatatggacaacacatctcgaccgtagt

SEQ ID NO: 41148 - DNA, 50 bp, synthetic construct
  source 1..50: mol_type = other DNA
taagattccgattgtcacaggcaaagttgcgattcctggtcggccttttt

SEQ ID NO: 41149 - DNA, 50 bp, synthetic construct
  source 1..50: mol_type = other DNA
gagaccgtctccagggttcgaatccccactcggcccgccataacatctaa

SEQ ID NO: 41150 - DNA, 50 bp, synthetic construct
  source 1..50: mol_type = other DNA
ggaaacttcgggttccccaacttcaaatatttcgggttaccggggtggct

SEQ ID NO: 41151 - DNA, 50 bp, synthetic construct
  source 1..50: mol_type = other DNA
tcatttaaaatgagttgtgatatatgatgattctgtctcatcataaatta

SEQ ID NO: 41152 - DNA, 50 bp, synthetic construct
  source 1..50: mol_type = other DNA
ggaggattaccccacgacctgttgcgcgcggcgtcgcgggcgagggcgcg

SEQ ID NO: 41153 - DNA, 50 bp, synthetic construct
  source 1..50: mol_type = other DNA
tctcgtggacattcgtcagcccgacctcgcgctcttcggcctcgacgaaa

SEQ ID NO: 41154 - DNA, 50 bp, synthetic construct
  source 1..50: mol_type = other DNA
aaaccagtcattttccgatagtgccggcgatatcggcctgtgcgctgtgt

SEQ ID NO: 41155 - DNA, 50 bp, synthetic construct
  source 1..50: mol_type = other DNA
gagcaatcacgaactcttcgttggttcattggttggaatcaccatcgcca

SEQ ID NO: 41156 - DNA, 50 bp, synthetic construct
  source 1..50: mol_type = other DNA
gccgaggacgcggcggtctacgtaaagattgcatccgggatctctgcggc

SEQ ID NO: 41157 - DNA, 50 bp, synthetic construct
  source 1..50: mol_type = other DNA
ttctttatattcaataaaccgaactagtgtctattatatgctataaagaa

SEQ ID NO: 41158 - DNA, 50 bp, synthetic construct
  source 1..50: mol_type = other DNA
gaaccgttctgatgaaaaattatcttcgtacctgtttatcagcaatttgt

SEQ ID NO: 41159 - DNA, 50 bp, synthetic construct
  source 1..50: mol_type = other DNA
ctctaacttcgaatcagtttcttccagaaatataatataaaaagtcagaa

SEQ ID NO: 41160 - DNA, 50 bp, synthetic construct
  source 1..50: mol_type = other DNA
tatagttgtgtaaacggacattcatttcaaaacctccatacctaattatc

SEQ ID NO: 41161 - DNA, 50 bp, synthetic construct
  source 1..50: mol_type = other DNA
cgacggcctcggtggcggccttgacgtcccgaccgccacctacttcgtcg

SEQ ID NO: 41162 - DNA, 50 bp, synthetic construct
  source 1..50: mol_type = other DNA
ttaatttaattcgtggttcaaaatatattgaaacgcacgaaaaatatgag

SEQ ID NO: 41163 - DNA, 50 bp, synthetic construct
  source 1..50: mol_type = other DNA
ataagcatgggaaaaagcattacggtataggcgcccttcttacgaagtat

SEQ ID NO: 41164 - DNA, 50 bp, synthetic construct
  source 1..50: mol_type = other DNA
atataaaaaacttccttttcaatgataaaaaagaatgctgtttatagtta

SEQ ID NO: 41165 - DNA, 50 bp, synthetic construct
  source 1..50: mol_type = other DNA
gcgtggtgaaccgggcggctgtcgaggatcacgcggttaattctacgctg

SEQ ID NO: 41166 - DNA, 50 bp, synthetic construct
  source 1..50: mol_type = other DNA
gtggtcatgactgcatggaaaatctcgatgtgtcgtagggatactgccgc

SEQ ID NO: 41167 - DNA, 50 bp, synthetic construct
  source 1..50: mol_type = other DNA
acttactgtgaaagactaagggcttggcctgatattctttgccatcaaat

SEQ ID NO: 41168 - DNA, 50 bp, synthetic construct
  source 1..50: mol_type = other DNA
tagatcagccggaatcaagctggcgcaaaggcttgaacaacgctttcacg

SEQ ID NO: 41169 - DNA, 50 bp, synthetic construct
  source 1..50: mol_type = other DNA
ctatttttcaaagtttcatcagtcgatatattcataatttatttacaatt

SEQ ID NO: 41170 - DNA, 50 bp, synthetic construct
  source 1..50: mol_type = other DNA
gaagtgcgccatgttcgggtcctggcacgtcgacaatcaccgcgtcctcc

SEQ ID NO: 41171 - DNA, 50 bp, synthetic construct
  source 1..50: mol_type = other DNA
cgttgtagagacctcgggggccggcgtcagcctgcgcatcgtccaggact

SEQ ID NO: 41172 - DNA, 50 bp, synthetic construct
  source 1..50: mol_type = other DNA
cagaaattcaagaagtgctgctacttgtgccagaatgtgaagaagtgttg

SEQ ID NO: 41173 - DNA, 50 bp, synthetic construct
  source 1..50: mol_type = other DNA
tttgcctgcttcgccaaggtgcgctcacgtcgtcattggacggtcgcagg

SEQ ID NO: 41174 - DNA, 50 bp, synthetic construct
  source 1..50: mol_type = other DNA
gctccaaattcgacgtcatccccgggcttgacccgaggatccattgatcg

SEQ ID NO: 41175 - DNA, 50 bp, synthetic construct
  source 1..50: mol_type = other DNA
ctatcgttataatacacggtaggggcacatacccgtaattctatttattt

SEQ ID NO: 41176 - DNA, 50 bp, synthetic construct
  source 1..50: mol_type = other DNA
ttccaaaggtcgggggttcgaatcccgattccaaaggtcacaggttcgaa

SEQ ID NO: 41177 - DNA, 50 bp, synthetic construct
  source 1..50: mol_type = other DNA
gcatcgccacctccgatacgacgaagtcatcggctccgcgaacacggtgc

SEQ ID NO: 41178 - DNA, 50 bp, synthetic construct
  source 1..50: mol_type = other DNA
gtgcgggttcaagtcccgcttcgagtacgagcgtctagccagaagccttg

SEQ ID NO: 41179 - DNA, 50 bp, synthetic construct
  source 1..50: mol_type = other DNA
ggtaaaaggttctgcgggttcaagtctgttaagggtactgtacttttata

SEQ ID NO: 41180 - DNA, 50 bp, synthetic construct
  source 1..50: mol_type = other DNA
ccattcgtgtctttagtcaactagatacagttgtcttttgcaaactgtgg

SEQ ID NO: 41181 - DNA, 50 bp, synthetic construct
  source 1..50: mol_type = other DNA
aagaaatttcctcgaaaagttacaaaacagctttttaatgcttttttctt

SEQ ID NO: 41182 - DNA, 50 bp, synthetic construct
  source 1..50: mol_type = other DNA
tttagaaattgaatgcaagacactaatgtgtgtgtcgttgaaaaatttac

SEQ ID NO: 41183 - DNA, 50 bp, synthetic construct
  source 1..50: mol_type = other DNA
catttctacttcttatgtatacatttcattactaatacaaagtgttgatc

SEQ ID NO: 41184 - DNA, 50 bp, synthetic construct
  source 1..50: mol_type = other DNA
agtttattaagcgcacaatctaaaacataatatccaccgagtaaaaatag

SEQ ID NO: 41185 - DNA, 50 bp, synthetic construct
  source 1..50: mol_type = other DNA
attttatgttgaaaatgataaataaagtcaaatcatatagtagttacaat

SEQ ID NO: 41186 - DNA, 50 bp, synthetic construct
  source 1..50: mol_type = other DNA
acatgccactacagtatgcagattttgaattctggactcgagctaattgg

SEQ ID NO: 41187 - DNA, 50 bp, synthetic construct
  source 1..50: mol_type = other DNA
tgttcagatagattgctgagaatcaagcagccgtaaggtttatctggttg

SEQ ID NO: 41188 - DNA, 50 bp, synthetic construct
  source 1..50: mol_type = other DNA
ttgaaaagcctgttttttgttgaaatgctcgataaaaacttgctcgttcg

SEQ ID NO: 41189 - DNA, 50 bp, synthetic construct
  source 1..50: mol_type = other DNA
gagagagaaattgaggtactaaacaattttagtttctcgattcgtctccg

SEQ ID NO: 41190 - DNA, 50 bp, synthetic construct
  source 1..50: mol_type = other DNA
tcaatagtgttgtcggcatgcctgccaccgttcataatattcatcatcgg

SEQ ID NO: 41191 - DNA, 50 bp, synthetic construct
  source 1..50: mol_type = other DNA
tccttatgtatggtcgtaactaattattttgttactgccatatgtatcgt

SEQ ID NO: 41192 - DNA, 50 bp, synthetic construct
  source 1..50: mol_type = other DNA
caaaaactcactatctttctcactaaggtgcaaaacatcttggctttttg

SEQ ID NO: 41193 - DNA, 50 bp, synthetic construct
  source 1..50: mol_type = other DNA
tctcaaggatacagtcgtcggcgaaaatttcaaccaccgtatcctaatta

SEQ ID NO: 41194 - DNA, 50 bp, synthetic construct
  source 1..50: mol_type = other DNA
gtgcatctcagtgcgacgcagctcgcgcccgacatcgccatgagcggaat

SEQ ID NO: 41195 - DNA, 50 bp, synthetic construct
  source 1..50: mol_type = other DNA
ctcatgaatattagtcggtgcatgaacatgacttctatagtaattatttt

SEQ ID NO: 41196 - DNA, 50 bp, synthetic construct
  source 1..50: mol_type = other DNA
tttgtgtgttttcattgctaacatcacgactatatcaatccacaaaaaaa

SEQ ID NO: 41197 - DNA, 50 bp, synthetic construct
  source 1..50: mol_type = other DNA
ctcgtttcgaagtaaattaattaaaaatatagttttgactttgaaaaaaa

SEQ ID NO: 41198 - DNA, 50 bp, synthetic construct
  source 1..50: mol_type = other DNA
gccttcaagctgaccttcgaaccgaaggtcgttcacgtcagcgcccaggg

SEQ ID NO: 41199 - DNA, 50 bp, synthetic construct
  source 1..50: mol_type = other DNA
gatcatcgaggccttcttcgccgacgacgaacaggaagacgaagatgatt

SEQ ID NO: 41200 - DNA, 50 bp, synthetic construct
  source 1..50: mol_type = other DNA
ttgcttaaactctctacacaatacatgttttcaatctataaattaacaaa

SEQ ID NO: 41201 - DNA, 50 bp, synthetic construct
  source 1..50: mol_type = other DNA
acccggaacggccgcgatctcgaaccaggccccgtccgggtatttcgggt

SEQ ID NO: 41202 - DNA, 50 bp, synthetic construct
  source 1..50: mol_type = other DNA
ttatatatttcataggcattcagaagggtaaaatgataggaaagatagga

SEQ ID NO: 41203 - DNA, 50 bp, synthetic construct
  source 1..50: mol_type = other DNA
ctaaaattttttaacccaaaaaccgaaaatcactggttaaaaatcacgag

SEQ ID NO: 41204 - DNA, 50 bp, synthetic construct
  source 1..50: mol_type = other DNA
gcgctattagtgtggagagtggaaagcaccagatgcccggtcaaagaagc

SEQ ID NO: 41205 - DNA, 50 bp, synthetic construct
  source 1..50: mol_type = other DNA
catccttgccgctccgtgccgtccgaattataaaatgcagcaggagaatg

SEQ ID NO: 41206 - DNA, 50 bp, synthetic construct
  source 1..50: mol_type = other DNA
tatgttcccaacatattgtatgaaaatgtatatggtacaatggttcagta

SEQ ID NO: 41207 - DNA, 50 bp, synthetic construct
  source 1..50: mol_type = other DNA
tcgagcatgctggccttgcagggaacctcctgcaccccaagcaggcaaac

SEQ ID NO: 41208 - DNA, 50 bp, synthetic construct
  source 1..50: mol_type = other DNA
attgcaacgggttcgcgttcttcaaaggaagtctcggaacgaactgaacc

SEQ ID NO: 41209 - DNA, 50 bp, synthetic construct
  source 1..50: mol_type = other DNA
gctttaatggctgccctttttaatattttgaaatacccaaagatgaaaaa

SEQ ID NO: 41210 - DNA, 50 bp, synthetic construct
  source 1..50: mol_type = other DNA
gcggttccgtcggccattaccggcacgccttgctctgtatagacttcagg

SEQ ID NO: 41211 - DNA, 50 bp, synthetic construct
  source 1..50: mol_type = other DNA
gcgccgccctgcccaggcaaccgcgcgccgtacgcggcttcccgcgtcgc

SEQ ID NO: 41212 - DNA, 50 bp, synthetic construct
  source 1..50: mol_type = other DNA
agccacctgagaaatccgtgagctgacggcgtcggattgggccgcgagcg

SEQ ID NO: 41213 - DNA, 50 bp, synthetic construct
  source 1..50: mol_type = other DNA
tgtcatttctctcgagtaccctgccaccaaagttcaattgagaatatgca

SEQ ID NO: 41214 - DNA, 50 bp, synthetic construct
  source 1..50: mol_type = other DNA
ccgtcaaactcgcacccaaaaatctcggtttttgttttcgcttttgtttt

SEQ ID NO: 41215 - DNA, 50 bp, synthetic construct
  source 1..50: mol_type = other DNA
tgtttcagcccatggatagccctccggataacgatacctgggctgaaaac

SEQ ID NO: 41216 - DNA, 50 bp, synthetic construct
  source 1..50: mol_type = other DNA
aacgaaaggacgcatatgatcatcaaaaggacggcatgccatgaatatat

SEQ ID NO: 41217 - DNA, 50 bp, synthetic construct
  source 1..50: mol_type = other DNA
gccgctatctgactggtgcctgcgcaaacaggcactctgggccgaatggc

SEQ ID NO: 41218 - DNA, 50 bp, synthetic construct
  source 1..50: mol_type = other DNA
ctctttcattattttgctctcacattcttgagagcaatgtacaataaaat

SEQ ID NO: 41219 - DNA, 50 bp, synthetic construct
  source 1..50: mol_type = other DNA
cggtaaggatgtatgagatggagaagaaaacatctcaaaaggtaatatct

SEQ ID NO: 41220 - DNA, 50 bp, synthetic construct
  source 1..50: mol_type = other DNA
gagatgttttcttgtacccattttataaaaagttatgaaaaaatcattac

SEQ ID NO: 41221 - DNA, 50 bp, synthetic construct
  source 1..50: mol_type = other DNA
aagctctaacctacctgattaacaaagctgaatcggttacactaaactag

SEQ ID NO: 41222 - DNA, 50 bp, synthetic construct
  source 1..50: mol_type = other DNA
actaatattaataaggttacataaatttatgtagatgtagaaattttatg

SEQ ID NO: 41223 - DNA, 50 bp, synthetic construct
  source 1..50: mol_type = other DNA
gcgaatgaagagggaacgactattcaaataaaaaagcccctaccattata

SEQ ID NO: 41224 - DNA, 50 bp, synthetic construct
  source 1..50: mol_type = other DNA
cgatggacgtggacccggggccacgccgggcgcgggcgcggcgagactcg

SEQ ID NO: 41225 - DNA, 50 bp, synthetic construct
  source 1..50: mol_type = other DNA
agtcgcggtcgcagccctcaccgacatcggtgtaggaccctcgagctccc

SEQ ID NO: 41226 - DNA, 50 bp, synthetic construct
  source 1..50: mol_type = other DNA
ccgatcacggccccagccccggtgatcaatatcaatgatggtgtcattaa

SEQ ID NO: 41227 - DNA, 50 bp, synthetic construct
  source 1..50: mol_type = other DNA
tggtttccttcattcgatgaagtcgcgatttcaccgaatgccggaaaatt

SEQ ID NO: 41228 - DNA, 50 bp, synthetic construct
  source 1..50: mol_type = other DNA
gaactaacccagttaacaaaagagtttagttttgtttactctaaggtcaa

SEQ ID NO: 41229 - DNA, 50 bp, synthetic construct
  source 1..50: mol_type = other DNA
atgataactatacattgatccttccggaaggaaaaatagtaattgatcca

SEQ ID NO: 41230 - DNA, 50 bp, synthetic construct
  source 1..50: mol_type = other DNA
gaaaaatatctctgtaattccagccatttactatgtgagagatatttttc

SEQ ID NO: 41231 - DNA, 50 bp, synthetic construct
  source 1..50: mol_type = other DNA
gcctggcagaagagcttaaggcggggtacgcttatcctcttttgccagtt

SEQ ID NO: 41232 - DNA, 50 bp, synthetic construct
  source 1..50: mol_type = other DNA
accatttttcattcctccagtaagtatcggatggcggaaggaaaaatagt

SEQ ID NO: 41233 - DNA, 50 bp, synthetic construct
  source 1..50: mol_type = other DNA
gtgatacaagggcccaatataagcggtgttatatgcagcctgaaatccaa

SEQ ID NO: 41234 - DNA, 50 bp, synthetic construct
  source 1..50: mol_type = other DNA
ataagcaacggaatgcctggctttacgctggtggggctacctgaaacaac

SEQ ID NO: 41235 - DNA, 50 bp, synthetic construct
  source 1..50: mol_type = other DNA
gaagaaaagtagaatcgaacatattccgcgttttatatctccttttcttg

SEQ ID NO: 41236 - DNA, 50 bp, synthetic construct
  source 1..50: mol_type = other DNA
aaaatttattgtttaaaatatttatacaaatcattccaacaattgatgtt

SEQ ID NO: 41237 - DNA, 50 bp, synthetic construct
  source 1..50: mol_type = other DNA
cctatgataataaagaatacatactagtatatattattatgtattttcga

SEQ ID NO: 41238 - DNA, 50 bp, synthetic construct
  source 1..50: mol_type = other DNA
taatagttgacctacctaatctaaaattagcctagatgtaaaaactatat

SEQ ID NO: 41239 - DNA, 50 bp, synthetic construct
  source 1..50: mol_type = other DNA
ttgcaccagcgtggacagccccgccgggcggggggtcttctctgtgggct

SEQ ID NO: 41240 - DNA, 50 bp, synthetic construct
  source 1..50: mol_type = other DNA
gttaacgcaggatttgacccggtaattggtctttcaaatccgtcgagcct

SEQ ID NO: 41241 - DNA, 50 bp, synthetic construct
  source 1..50: mol_type = other DNA
ctttttttcttttgtaaccacttaagtaaggtaaccacgagaataaaaag

SEQ ID NO: 41242 - DNA, 50 bp, synthetic construct
  source 1..50: mol_type = other DNA
tggcggaatacgctgagataaccaggcttttatctttaagtattccacgc

SEQ ID NO: 41243 - DNA, 50 bp, synthetic construct
  source 1..50: mol_type = other DNA
tccggcagcaacgaccccatggccgtcgtcaagggcctgttgtcggcgga

SEQ ID NO: 41244 - DNA, 50 bp, synthetic construct
  source 1..50: mol_type = other DNA
gcaaaccgggttcggagacgagcgcgggttcgatgccgagcaagccttgc

SEQ ID NO: 41245 - DNA, 50 bp, synthetic construct
  source 1..50: mol_type = other DNA
tcatgccggacaccgccatgcccatatcacatcggcggcgatatccaaga

SEQ ID NO: 41246 - DNA, 50 bp, synthetic construct
  source 1..50: mol_type = other DNA
atactgctcaaaggcaaaattgcctactcaatgatgcctgggtcaaggtc

SEQ ID NO: 41247 - DNA, 50 bp, synthetic construct
  source 1..50: mol_type = other DNA
ccaaaagatccgtctgtctaatgtatgtcttgcatacaaccatttttgaa

SEQ ID NO: 41248 - DNA, 50 bp, synthetic construct
  source 1..50: mol_type = other DNA
taatgagcaagcttcaaaggtgcttaagcgtctggtgaccttcagcatta

SEQ ID NO: 41249 - DNA, 50 bp, synthetic construct
  source 1..50: mol_type = other DNA
ccggcaacccaacgagagtaattgaacaagagtaaagccgggcataccat

SEQ ID NO: 41250 - DNA, 50 bp, synthetic construct
  source 1..50: mol_type = other DNA
ttcaagacatagatataaaaaagcccactttcgtgcagcttcttcttgac

SEQ ID NO: 41251 - DNA, 50 bp, synthetic construct
  source 1..50: mol_type = other DNA
gctggcatgtggtcaaagtattgtataactaaggttctctacagaacata

SEQ ID NO: 41252 - DNA, 50 bp, synthetic construct
  source 1..50: mol_type = other DNA
atttaaagaaaaataaagtagttgttttaatatttaagttttcatttgga

SEQ ID NO: 41253 - DNA, 50 bp, synthetic construct
  source 1..50: mol_type = other DNA
tgctgccagttattacttgatgttcagacagatgtcccaccatgaccacc

SEQ ID NO: 41254 - DNA, 50 bp, synthetic construct
  source 1..50: mol_type = other DNA
ctattgagatatttaaacatatatttactgcttcataaaaatcaaattca

SEQ ID NO: 41255 - DNA, 50 bp, synthetic construct
  source 1..50: mol_type = other DNA
tggcggtttcgacgaatgatgcattaaatcatcatcaatgcaataagcca

SEQ ID NO: 41256 - DNA, 50 bp, synthetic construct
  source 1..50: mol_type = other DNA
aaaatgttatgcggggaaagcttaatagctattgatataatgaacatcaa

SEQ ID NO: 41257 - DNA, 50 bp, synthetic construct
  source 1..50: mol_type = other DNA
ccaatgcccctatcgttataatacacgctttataacgaagggaaagatcg

SEQ ID NO: 41258 - DNA, 50 bp, synthetic construct
  source 1..50: mol_type = other DNA
atgagtgtactgtggcggttatactgattcacttccccatacccaaacat

SEQ ID NO: 41259 - DNA, 50 bp, synthetic construct
  source 1..50: mol_type = other DNA
tgttccctcattctacacatgtggagttgaaactgtagctaagataatca

SEQ ID NO: 41260 - DNA, 50 bp, synthetic construct
  source 1..50: mol_type = other DNA
agtttgccgaaacgaattgggcgttaacggccaattagttgaagcccatg

SEQ ID NO: 41261 - DNA, 50 bp, synthetic construct
  source 1..50: mol_type = other DNA
ttctaaaagtatttttagatatctaaactttaatataaataacatatcaa

SEQ ID NO: 41262 - DNA, 50 bp, synthetic construct
  source 1..50: mol_type = other DNA
taactatatattttagtaatatatatatatttaacaaataagtagtgtta

SEQ ID NO: 41263 - DNA, 50 bp, synthetic construct
  source 1..50: mol_type = other DNA
tgctgtacgacctgactatttaacatgtttgtttaccacgctccagaaag

SEQ ID NO: 41264 - DNA, 50 bp, synthetic construct
  source 1..50: mol_type = other DNA
aatcgctttttttgaatataaattgtacgttatgttaaacgaatattcct

SEQ ID NO: 41265 - DNA, 50 bp, synthetic construct
  source 1..50: mol_type = other DNA
ggtatttaaaaaaagtattagtaatatttatatctttttttctatatagg

SEQ ID NO: 41266 - DNA, 50 bp, synthetic construct
  source 1..50: mol_type = other DNA
aaaccttaaatagcttcttaattttatcatcaaaaggcaacttactattt

SEQ ID NO: 41267 - DNA, 50 bp, synthetic construct
  source 1..50: mol_type = other DNA
caattatgtctcctgtagttatttataatttaaaaccagattcataagtc

SEQ ID NO: 41268 - DNA, 50 bp, synthetic construct
  source 1..50: mol_type = other DNA
ttaacgacagccctgccgttttgaattcagtctgttaatctatcgtttaa

SEQ ID NO: 41269 - DNA, 50 bp, synthetic construct
  source 1..50: mol_type = other DNA
tggagattgaagaaaccgttgaaagctgacaacaatgactggaaattcgt

SEQ ID NO: 41270 - DNA, 50 bp, synthetic construct
  source 1..50: mol_type = other DNA
ggtcggggagagaggactcaacccgaggattcgaacctccggcccctgcc

SEQ ID NO: 41271 - DNA, 50 bp, synthetic construct
  source 1..50: mol_type = other DNA
ctgctcggagtcgacgagggccctcgaggctgacgaacccgaccgtgggc

SEQ ID NO: 41272 - DNA, 50 bp, synthetic construct
  source 1..50: mol_type = other DNA
ccagctcggccagatccccggcgtccggacccggcagtcgcccgagcaat

SEQ ID NO: 41273 - DNA, 50 bp, synthetic construct
  source 1..50: mol_type = other DNA
caccgcgccgtaatggctatctttgcaaaaactgcttggcaactatagtt

SEQ ID NO: 41274 - DNA, 50 bp, synthetic construct
  source 1..50: mol_type = other DNA
aaagtatcacgtaacgtaagggtcaagatactgttcaataatttttgttc

SEQ ID NO: 41275 - DNA, 50 bp, synthetic construct
  source 1..50: mol_type = other DNA
cttcaattctatatccataaggtgtgttccttatgaatgataggaacaag

SEQ ID NO: 41276 - DNA, 50 bp, synthetic construct
  source 1..50: mol_type = other DNA
ccctgactctggtgggcctgcccgaaatcgctagctaatcgcggtcaagg

SEQ ID NO: 41277 - DNA, 50 bp, synthetic construct
  source 1..50: mol_type = other DNA
ggtggaatgcagattattcgatgtggacattttgtgcaccgccttaacac

SEQ ID NO: 41278 - DNA, 50 bp, synthetic construct
  source 1..50: mol_type = other DNA
cggcgcagtttatggggaggatgaaatcaagcaagatatttcttgcatta

SEQ ID NO: 41279 - DNA, 50 bp, synthetic construct
  source 1..50: mol_type = other DNA
cccgtaaggaaagctggacagaagaataggggtggaaaaatcgaccgggg

SEQ ID NO: 41280 - DNA, 50 bp, synthetic construct
  source 1..50: mol_type = other DNA
gtcgagcgcgcgcgtccattggagaatcggcggcgacggtctgaagacgg

SEQ ID NO: 41281 - DNA, 50 bp, synthetic construct
  source 1..50: mol_type = other DNA
acgatgcaatcgccgccatagcggtcgtgcttcggcggtgacgatctcgt

SEQ ID NO: 41282 - DNA, 50 bp, synthetic construct
  source 1..50: mol_type = other DNA
ggacggtagagatgatgaaattccatgctataccaccataaataattgat

SEQ ID NO: 41283 - DNA, 50 bp, synthetic construct
  source 1..50: mol_type = other DNA
gttcccgtccaccgcaaacgtagaggtctccttttttactggacaaaacg

SEQ ID NO: 41284 - DNA, 50 bp, synthetic construct
  source 1..50: mol_type = other DNA
ctgtttatgccaaggaaagaaaggtgatttttttaacgatagttcaacag

SEQ ID NO: 41285 - DNA, 50 bp, synthetic construct
  source 1..50: mol_type = other DNA
gagaagataccggatgaaatcatggactctggctcatccgttttcttctg

SEQ ID NO: 41286 - DNA, 50 bp, synthetic construct
  source 1..50: mol_type = other DNA
cagatttgactaatagattttcagatctgatcatcataataattactctc

SEQ ID NO: 41287 - DNA, 50 bp, synthetic construct
  source 1..50: mol_type = other DNA
taacggtaacatctaatatatcagctaatttatattcaatgttattgaac

SEQ ID NO: 41288 - DNA, 50 bp, synthetic construct
  source 1..50: mol_type = other DNA
ggatttcaggatgatgaggtttccgaaccttcaccatcaattacaattcc

SEQ ID NO: 41289 - DNA, 50 bp, synthetic construct
  source 1..50: mol_type = other DNA
caaatttcacgttaatgttttcaaatatcaaatccttgaatataaatttc

SEQ ID NO: 41290 - DNA, 50 bp, synthetic construct
  source 1..50: mol_type = other DNA
gtacctagccattatatcatgaaaatactgagacagtaattgcaaagtac

SEQ ID NO: 41291 - DNA, 50 bp, synthetic construct
  source 1..50: mol_type = other DNA
acaagaaagaccagctcaaggctggttctggtcgggctgacaggatttga

SEQ ID NO: 41292 - DNA, 50 bp, synthetic construct
  source 1..50: mol_type = other DNA
cacattcaagacacgacagacgcatgcttctctgtttccacttgaatcgt

SEQ ID NO: 41293 - DNA, 50 bp, synthetic construct
  source 1..50: mol_type = other DNA
tctgattaatatattctcgataatacttgcaggagagaataatattctgg

SEQ ID NO: 41294 - DNA, 50 bp, synthetic construct
  source 1..50: mol_type = other DNA
agtgaagagatttttaaagagtttcctctctcactctaaataattacact

SEQ ID NO: 41295 - DNA, 50 bp, synthetic construct
  source 1..50: mol_type = other DNA
caaggacgtgctctgccaactgagctctcacgcggcattatacacaaccg

SEQ ID NO: 41296 - DNA, 50 bp, synthetic construct
  source 1..50: mol_type = other DNA
tggggcgtggatttgaactgtggttgtccttcgaaaatggtcaacggtag

SEQ ID NO: 41297 - DNA, 50 bp, synthetic construct
  source 1..50: mol_type = other DNA
cgcggcgttaatcgggtgatttttataaagcacgcctgcataacgccggt

SEQ ID NO: 41298 - DNA, 50 bp, synthetic construct
  source 1..50: mol_type = other DNA
gtattgtagctattcggcattgtagcattattcaaaaagcaacccaatta

SEQ ID NO: 41299 - DNA, 50 bp, synthetic construct
  source 1..50: mol_type = other DNA
aaatatatattatccatatgatgttaagtctatgcctttaaagcccattt

SEQ ID NO: 41300 - DNA, 50 bp, synthetic construct
  source 1..50: mol_type = other DNA
gtaccgcaagggcgaggaatacggttcatggggcaccgccaaagacattg

SEQ ID NO: 41301 - DNA, 50 bp, synthetic construct
  source 1..50: mol_type = other DNA
tcttattgtatgcggcaatgctattgataaaatagggtataggaaaaagg

SEQ ID NO: 41302 - DNA, 50 bp, synthetic construct
  source 1..50: mol_type = other DNA
ttatggtacgcttctgcgtatcggttatgatatgcttcgcctcgcatgat

SEQ ID NO: 41303 - DNA, 50 bp, synthetic construct
  source 1..50: mol_type = other DNA
acctgtgcagcagtccttggtgcagtgcgaccgggaggattcgaacctct

SEQ ID NO: 41304 - DNA, 50 bp, synthetic construct
  source 1..50: mol_type = other DNA
cacgatgctgcctttgggctgcatttataacccttcgggtcagtgaccac

SEQ ID NO: 41305 - DNA, 50 bp, synthetic construct
  source 1..50: mol_type = other DNA
ttgtccttgcagcgtttcgaccagagttaggcgaacaaggctctcgtcaa

SEQ ID NO: 41306 - DNA, 50 bp, synthetic construct
  source 1..50: mol_type = other DNA
taaatataaggaggaaactatgagtattcatcttttcattttttaaatta

SEQ ID NO: 41307 - DNA, 50 bp, synthetic construct
  source 1..50: mol_type = other DNA
aggttcatctatgaacaaattaaaaaagaaatttagtgccggatggagct

SEQ ID NO: 41308 - DNA, 50 bp, synthetic construct
  source 1..50: mol_type = other DNA
tcactttagaatttccggattttaaaggggatgttaaaatgccaaagggt

SEQ ID NO: 41309 - DNA, 50 bp, synthetic construct
  source 1..50: mol_type = other DNA
gttcattctcaaattagtgcgattaaaatatcaaaaatttaattcaaaaa

SEQ ID NO: 41310 - DNA, 50 bp, synthetic construct
  source 1..50: mol_type = other DNA
actgttttatttcaaataaaacaaaagtgagcgaaatgaaataaaaatca

SEQ ID NO: 41311 - DNA, 50 bp, synthetic construct
  source 1..50: mol_type = other DNA
aagcatatcataagtgatgcggttttaaccgatacgcagagatgcggttt

SEQ ID NO: 41312 - DNA, 50 bp, synthetic construct
  source 1..50: mol_type = other DNA
tttctaaattacctaactgacctaattaatccacttgttatatcgtgaaa

SEQ ID NO: 41313 - DNA, 50 bp, synthetic construct
  source 1..50: mol_type = other DNA
ttctactttctttattttcattgtaatcaagatgcataaataacgtagaa

SEQ ID NO: 41314 - DNA, 50 bp, synthetic construct
  source 1..50: mol_type = other DNA
gaaaaaatagtttctccatttatcatgtaaaacaaataatccgttttttg

SEQ ID NO: 41315 - DNA, 50 bp, synthetic construct
  source 1..50: mol_type = other DNA
taacttgttgtcaaataactatctggaggtagatatttatcactatatta

SEQ ID NO: 41316 - DNA, 50 bp, synthetic construct
  source 1..50: mol_type = other DNA
atttaaagcatatgctttgatgtcataccaaaaaacgtgatgcttttaat

SEQ ID NO: 41317 - DNA, 50 bp, synthetic construct
  source 1..50: mol_type = other DNA
aacctcatcatttatgatatgcttcttcgcctctcataatcttaaatgct

SEQ ID NO: 41318 - DNA, 50 bp, synthetic construct
  source 1..50: mol_type = other DNA
attttccaattgataacaatgttctcatgagaggttatctccatgaaaat

SEQ ID NO: 41319 - DNA, 50 bp, synthetic construct
  source 1..50: mol_type = other DNA
catctacttttacttcgctgatgcttccatcgagtaaatatctttttgga

SEQ ID NO: 41320 - DNA, 50 bp, synthetic construct
  source 1..50: mol_type = other DNA
tactgaaacaaaatcactttctattaatattagttgtatttgcaattctt

SEQ ID NO: 41321 - DNA, 50 bp, synthetic construct
  source 1..50: mol_type = other DNA
ataaatcagcttttgtaatacctgtactccagcaacaacagcagataaac

SEQ ID NO: 41322 - DNA, 50 bp, synthetic construct
  source 1..50: mol_type = other DNA
atttcactcaaagatatgttgcagaaatgtaactttacatgaagtgagaa

SEQ ID NO: 41323 - DNA, 50 bp, synthetic construct
  source 1..50: mol_type = other DNA
gttttttatgttgtttttttatttaacttgaaaaaaacaagcaagatatt

SEQ ID NO: 41324 - DNA, 50 bp, synthetic construct
  source 1..50: mol_type = other DNA
aattcaggattttttactacctatttatagtaattaaaataaagttaact

SEQ ID NO: 41325 - DNA, 50 bp, synthetic construct
  source 1..50: mol_type = other DNA
tgttctaactttaaagcctaattttttgcatcggaaaataagttaaagat

SEQ ID NO: 41326 - DNA, 50 bp, synthetic construct
  source 1..50: mol_type = other DNA
cgaaaaaagttcagcctgtagatatgattcgttccgatgaacttaagtcg

SEQ ID NO: 41327 - DNA, 50 bp, synthetic construct
  source 1..50: mol_type = other DNA
caaagccggcggtacccgccaagccaagatgccggtgaccgacggcatta

SEQ ID NO: 41328 - DNA, 50 bp, synthetic construct
  source 1..50: mol_type = other DNA
caaaaggggtacatccgtaccccttaactgcaacgggttttacatcattg

SEQ ID NO: 41329 - DNA, 50 bp, synthetic construct
  source 1..50: mol_type = other DNA
cctgaaccagacgcgggtgctgattaacatcttttaaaaatccattcata

SEQ ID NO: 41330 - DNA, 50 bp, synthetic construct
  source 1..50: mol_type = other DNA
tacaataagaagaaaggatgaaatactcggcatccttttttcaccagctc

SEQ ID NO: 41331 - DNA, 50 bp, synthetic construct
  source 1..50: mol_type = other DNA
gcgcccggtaaggtcggtatccagatccagatcgtcgggttgccggataa

SEQ ID NO: 41332 - DNA, 50 bp, synthetic construct
  source 1..50: mol_type = other DNA
aggctttgttctagagagcttccaactcgaagcgcgctggaacagagcgc

SEQ ID NO: 41333 - DNA, 50 bp, synthetic construct
  source 1..50: mol_type = other DNA
gataaaaggctagaagcatttcgctacaaaaggcgtaccgggcttttctt

SEQ ID NO: 41334 - DNA, 50 bp, synthetic construct
  source 1..50: mol_type = other DNA
ccttaaaaacatgttatcaattcatatgaactaataacatattaattctt

SEQ ID NO: 41335 - DNA, 50 bp, synthetic construct
  source 1..50: mol_type = other DNA
gaaaggcgtacaggttcgagtcctgctgcaccatttcataatcctcttta

SEQ ID NO: 41336 - DNA, 50 bp, synthetic construct
  source 1..50: mol_type = other DNA
agcttgccagacggtacataggtacagacgtatttttagagcttaaagag

SEQ ID NO: 41337 - DNA, 50 bp, synthetic construct
  source 1..50: mol_type = other DNA
cccccagggtggaccggtcgcgacggcgggcctacggttctcgacggggg

SEQ ID NO: 41338 - DNA, 50 bp, synthetic construct
  source 1..50: mol_type = other DNA
gccgtcggtgttcactgaagtgtaattttactttagtgttgccgatggtc

SEQ ID NO: 41339 - DNA, 50 bp, synthetic construct
  source 1..50: mol_type = other DNA
gcagccgccggcggccataatctcctgatggtcgggcctcccggctctgg

SEQ ID NO: 41340 - DNA, 50 bp, synthetic construct
  source 1..50: mol_type = other DNA
caaaatagacgcattaaaccgccaaatagctttttaaaccatctatcttt

SEQ ID NO: 41341 - DNA, 50 bp, synthetic construct
  source 1..50: mol_type = other DNA
tatgatacggttcaccgtaacatatttgtgatacggttccccacgattaa

SEQ ID NO: 41342 - DNA, 50 bp, synthetic construct
  source 1..50: mol_type = other DNA
cagcgcaatgaggttatcagtaaagaatgactgataacctcaatgcgcag

SEQ ID NO: 41343 - DNA, 50 bp, synthetic construct
  source 1..50: mol_type = other DNA
aaagtactagtattcttgccttaacagagagggaagctcccttctaattg

SEQ ID NO: 41344 - DNA, 50 bp, synthetic construct
  source 1..50: mol_type = other DNA
accgaattgggtcgcagcgtcggcggccgcggccttcggggcaattctgt

SEQ ID NO: 41345 - DNA, 50 bp, synthetic construct
  source 1..50: mol_type = other DNA
ggtgctcaccaaagaataactccgctaaaagacataatttagttactatg

SEQ ID NO: 41346 - DNA, 50 bp, synthetic construct
  source 1..50: mol_type = other DNA
ttaggtgacttcttaaccgctatcgaagcttgctcattagcggcatctga

SEQ ID NO: 41347 - DNA, 50 bp, synthetic construct
  source 1..50: mol_type = other DNA
ttctatgaagagaagtacaaagcatatgcttatctaagtggttcattgaa

SEQ ID NO: 41348 - DNA, 50 bp, synthetic construct
  source 1..50: mol_type = other DNA
cctatgctgtcggttacgaaagcttagcgcacgcgcccttattgcccggg

SEQ ID NO: 41349 - DNA, 50 bp, synthetic construct
  source 1..50: mol_type = other DNA
tcgcggccgcgataccggccgccgcgccatcgggactatcgcggccgcgg

SEQ ID NO: 41350 - DNA, 50 bp, synthetic construct
  source 1..50: mol_type = other DNA
cgagacgttcaggattcgatcttccgctgtatcgaattctgggaggattt

SEQ ID NO: 41351 - DNA, 50 bp, synthetic construct
  source 1..50: mol_type = other DNA
cgaaactttgcagaatcaaggtgacgggaccttctgattacaaatttgac

SEQ ID NO: 41352 - DNA, 50 bp, synthetic construct
  source 1..50: mol_type = other DNA
atagttatccggtaaatttctctttatactttaaactatagagtaattat

SEQ ID NO: 41353 - DNA, 50 bp, synthetic construct
  source 1..50: mol_type = other DNA
agtccagattgctgcgccagatggggccggatgggaatgccgcctccacc

SEQ ID NO: 41354 - DNA, 50 bp, synthetic construct
  source 1..50: mol_type = other DNA
atttacttatgatatggttcaccgtacggttcaccacgattaatacgaaa

SEQ ID NO: 41355 - DNA, 50 bp, synthetic construct
  source 1..50: mol_type = other DNA
gaacgcgtgcgggtgctgcatctcaacagccgcaacatgctgatccgcga

SEQ ID NO: 41356 - DNA, 50 bp, synthetic construct
  source 1..50: mol_type = other DNA
cgacacgcgcccttgcatcagcctcgaaatggtcgcatcttgccgcgtcg

SEQ ID NO: 41357 - DNA, 50 bp, synthetic construct
  source 1..50: mol_type = other DNA
cagatttaataagtgaaagaccactaatgagcgagaatgtattgtatttg

SEQ ID NO: 41358 - DNA, 50 bp, synthetic construct
  source 1..50: mol_type = other DNA
gtaaagttgcagcagagataggagtacaggattggctgcttctattgtac

SEQ ID NO: 41359 - DNA, 50 bp, synthetic construct
  source 1..50: mol_type = other DNA
acagccttctgcacggcggcgtagaggaacctcgccatgaagaagatacg

SEQ ID NO: 41360 - DNA, 50 bp, synthetic construct
  source 1..50: mol_type = other DNA
acatcgccgcctacctgacgcttggcccagcttgtcgtaggtgatgatgt

SEQ ID NO: 41361 - DNA, 50 bp, synthetic construct
  source 1..50: mol_type = other DNA
gatgaggctcagggtctcttcgaactctcagggcctcctattcgctcata

SEQ ID NO: 41362 - DNA, 50 bp, synthetic construct
  source 1..50: mol_type = other DNA
aacgatggtatcggcagcagtcgaattacgcggctactgcactcatcttt

SEQ ID NO: 41363 - DNA, 50 bp, synthetic construct
  source 1..50: mol_type = other DNA
gctgatgcacgtcctgccccttttgctctggtggcttaaactccatttgc

SEQ ID NO: 41364 - DNA, 50 bp, synthetic construct
  source 1..50: mol_type = other DNA
aggtcctgggttcgaatcccagtgggagttgtactgacgccccagttatt

SEQ ID NO: 41365 - DNA, 50 bp, synthetic construct
  source 1..50: mol_type = other DNA
aagatcttccagacagtctttatcatgaaaaagaatccatggcagaatcc

SEQ ID NO: 41366 - DNA, 50 bp, synthetic construct
  source 1..50: mol_type = other DNA
taataaagaactgtcataaatttgtaataattatatgtagttttaaatta

SEQ ID NO: 41367 - DNA, 50 bp, synthetic construct
  source 1..50: mol_type = other DNA
cttaagcttttagaatgatattatataaatgcttcttctaaaagctgtga

SEQ ID NO: 41368 - DNA, 50 bp, synthetic construct
  source 1..50: mol_type = other DNA
aattggcaggttcttttttgtttacataagttattcttattataacaaac

SEQ ID NO: 41369 - DNA, 50 bp, synthetic construct
  source 1..50: mol_type = other DNA
gttcagcgccgccggcacgactcttcgccgccgcccgggacgcgcggatc

SEQ ID NO: 41370 - DNA, 50 bp, synthetic construct
  source 1..50: mol_type = other DNA
gcctgacttcgctcccgggcagcaagtgatcgtataaagcaagatccggc

SEQ ID NO: 41371 - DNA, 50 bp, synthetic construct
  source 1..50: mol_type = other DNA
gaaaagccgaccatgtaatgatggatgccgcgagagatacatatttcttc

SEQ ID NO: 41372 - DNA, 50 bp, synthetic construct
  source 1..50: mol_type = other DNA
ttatgtacaagtacaaaaaagcttaacagctcctttggaaaattatttac

SEQ ID NO: 41373 - DNA, 50 bp, synthetic construct
  source 1..50: mol_type = other DNA
ttcacacctaacttctgcatggcatttgaaatgtgattccgtacagtttt

SEQ ID NO: 41374 - DNA, 50 bp, synthetic construct
  source 1..50: mol_type = other DNA
tcgccaaccagatcggatacgaatgtcttcgcgggccgcctggcgagcga

SEQ ID NO: 41375 - DNA, 50 bp, synthetic construct
  source 1..50: mol_type = other DNA
gcgaccgcgcgcgcggatcgaacggcatgtcgatgcacgaccgcactggc

SEQ ID NO: 41376 - DNA, 50 bp, synthetic construct
  source 1..50: mol_type = other DNA
agcttgaaagcacaattggaggcggccgcctccatcaacaacatggccaa

SEQ ID NO: 41377 - DNA, 50 bp, synthetic construct
  source 1..50: mol_type = other DNA
gagatccgtacgccgatgaatgcaattgcggtcatcggcatcctcgaact

SEQ ID NO: 41378 - DNA, 50 bp, synthetic construct
  source 1..50: mol_type = other DNA
accctggtcggcctgccggaaaccgcggtgcgcgagagcaaggaccgcgt

SEQ ID NO: 41379 - DNA, 50 bp, synthetic construct
  source 1..50: mol_type = other DNA
cttggaagctggactattcagacttaaagctgacttgtcgtagagttcac

SEQ ID NO: 41380 - DNA, 50 bp, synthetic construct
  source 1..50: mol_type = other DNA
acacaaccgcggggtggagcagcccgggccgatctcttgcgtgtcgccgt

SEQ ID NO: 41381 - DNA, 50 bp, synthetic construct
  source 1..50: mol_type = other DNA
ctgtgcggcagtgggcagaaattcaagaagtgctgctccagctacctcta

SEQ ID NO: 41382 - DNA, 50 bp, synthetic construct
  source 1..50: mol_type = other DNA
taccagtatggaaatgtaggttactactatccttgattgagatgaaaata

SEQ ID NO: 41383 - DNA, 50 bp, synthetic construct
  source 1..50: mol_type = other DNA
gagaggtgagcaatgcgtaaaatcatgataggacgggtgaggaatagaac

SEQ ID NO: 41384 - DNA, 50 bp, synthetic construct
  source 1..50: mol_type = other DNA
ggagaactcggccactacggccttccggatggaaaggggctcagtgtaca

SEQ ID NO: 41385 - DNA, 50 bp, synthetic construct
  source 1..50: mol_type = other DNA
gaaaatcaattcttaaattcaaaatatttttcaagcatcaattgtctaaa

SEQ ID NO: 41386 - DNA, 50 bp, synthetic construct
  source 1..50: mol_type = other DNA
tttgaacgcggtaatatagaatcaaaagcgtctgatttaccaaagactaa

SEQ ID NO: 41387 - DNA, 50 bp, synthetic construct
  source 1..50: mol_type = other DNA
aactagcatatagatttttatctgaatggggaaagttatagattttcaca

SEQ ID NO: 41388 - DNA, 50 bp, synthetic construct
  source 1..50: mol_type = other DNA
taagatcatgagaggcgaagcatatctgaagcgtatcataagtgatagta

SEQ ID NO: 41389 - DNA, 50 bp, synthetic construct
  source 1..50: mol_type = other DNA
cgtttttctaataatcccacaacttctatgtgatgcgtatttggaaataa

SEQ ID NO: 41390 - DNA, 50 bp, synthetic construct
  source 1..50: mol_type = other DNA
tgcaagagtactacggtttccacgtgagctgtttgcgggaacatatcgac

SEQ ID NO: 41391 - DNA, 50 bp, synthetic construct
  source 1..50: mol_type = other DNA
tataggtcttttttctataccctattttttcaaaaaaaaatagaccttgt

SEQ ID NO: 41392 - DNA, 50 bp, synthetic construct
  source 1..50: mol_type = other DNA
aaaagaagtaactctttaaagggttacgtctttacagaaaagactaaaaa

SEQ ID NO: 41393 - DNA, 50 bp, synthetic construct
  source 1..50: mol_type = other DNA
tccggatcaatgcgggggctccatactcattacccagcgccttatcataa

SEQ ID NO: 41394 - DNA, 50 bp, synthetic construct
  source 1..50: mol_type = other DNA
caccttcacagactcagctaattcaggaactgtttgacgtctcccaggtt

SEQ ID NO: 41395 - DNA, 50 bp, synthetic construct
  source 1..50: mol_type = other DNA
aggtatgtaaaaaagctatgcatagatacccgtaagtgttttatttttgg

SEQ ID NO: 41396 - DNA, 50 bp, synthetic construct
  source 1..50: mol_type = other DNA
tttcagtcgatacacggacatagatatcgtcgtctgtgtataaacgcttg

SEQ ID NO: 41397 - DNA, 50 bp, synthetic construct
  source 1..50: mol_type = other DNA
cgaagcgctggcgaggccggttcgccagcagaagatccgccagcgcttcc

SEQ ID NO: 41398 - DNA, 50 bp, synthetic construct
  source 1..50: mol_type = other DNA
tggccggagttgccggaggagacccggaggctctcgagcggggcccgaca

SEQ ID NO: 41399 - DNA, 50 bp, synthetic construct
  source 1..50: mol_type = other DNA
acgtgaaatgaaatggtatgataattggatcagtccatttaatttcatca

SEQ ID NO: 41400 - DNA, 50 bp, synthetic construct
  source 1..50: mol_type = other DNA
cttttcttttcacattggcgacaatatttagtaaaattagaaaattacca

SEQ ID NO: 41401 - DNA, 50 bp, synthetic construct
  source 1..50: mol_type = other DNA
acagccagagcaaaacctctggccaaaaattcgttcgatgcactcgcggt

SEQ ID NO: 41402 - DNA, 50 bp, synthetic construct
  source 1..50: mol_type = other DNA
acgataggattttaaataataaattagagtgtataaagtagcaagaacta

SEQ ID NO: 41403 - DNA, 50 bp, synthetic construct
  source 1..50: mol_type = other DNA
atgtgtatcgtacaaacgatatgcgagcatatcttttgaatgagcagaca

SEQ ID NO: 41404 - DNA, 50 bp, synthetic construct
  source 1..50: mol_type = other DNA
agcacagcagcacgcccagtgccacgccgcgctgccggacgtcatccgct

SEQ ID NO: 41405 - DNA, 50 bp, synthetic construct
  source 1..50: mol_type = other DNA
ctggtgaccaaccgccagaggccggacgggacggtgaacttttcgcattg

SEQ ID NO: 41406 - DNA, 50 bp, synthetic construct
  source 1..50: mol_type = other DNA
tgtttcggtaggaaacgaaacacaattgtcgctccttttcttaaaaaaga

SEQ ID NO: 41407 - DNA, 50 bp, synthetic construct
  source 1..50: mol_type = other DNA
tttgacttccagtccgtccagctttccggctggtttgccagcccgtaatt

SEQ ID NO: 41408 - DNA, 50 bp, synthetic construct
  source 1..50: mol_type = other DNA
cggtgccagattgtacggtaaagatatcttctgcgcggtctgtttgcttt

SEQ ID NO: 41409 - DNA, 50 bp, synthetic construct
  source 1..50: mol_type = other DNA
tgaaaggcgaagcgtatcacaaataaatcactgatagggagaagcgtatc

SEQ ID NO: 41410 - DNA, 50 bp, synthetic construct
  source 1..50: mol_type = other DNA
catttttcgcagtattgtcagggtttcgcctcgctatactacgaggttct

SEQ ID NO: 41411 - DNA, 50 bp, synthetic construct
  source 1..50: mol_type = other DNA
aatacaaatttaaattaagtatataacaatattcagtttttatttgtata

SEQ ID NO: 41412 - DNA, 50 bp, synthetic construct
  source 1..50: mol_type = other DNA
aagttaattgaatataagtttaaaaatttggatttattcataataacttt

SEQ ID NO: 41413 - DNA, 50 bp, synthetic construct
  source 1..50: mol_type = other DNA
agcccgcatcgcccaagcccgacgcgctgtgggctttcgctttcaccagc

SEQ ID NO: 41414 - DNA, 50 bp, synthetic construct
  source 1..50: mol_type = other DNA
ttttaaagcttttatatgaattagctaatataaatataaaaaaagagaac

SEQ ID NO: 41415 - DNA, 50 bp, synthetic construct
  source 1..50: mol_type = other DNA
gatatatttatattaggagagataaaaatgtgttcgattatatttatggc

SEQ ID NO: 41416 - DNA, 50 bp, synthetic construct
  source 1..50: mol_type = other DNA
cgatttttattagtaaagaagaaatttttcttttttagagatagaaccac

SEQ ID NO: 41417 - DNA, 50 bp, synthetic construct
  source 1..50: mol_type = other DNA
atatattcaggtattggtacaccttaagtgtacttaatagtaaaatataa

SEQ ID NO: 41418 - DNA, 50 bp, synthetic construct
  source 1..50: mol_type = other DNA
gtttttatagatcgatttcattatattccgagcaatgtatagtacaaaaa

SEQ ID NO: 41419 - DNA, 50 bp, synthetic construct
  source 1..50: mol_type = other DNA
gagcagcggctatttgcatcatttttaaaatttagcgttaagaggtgcca

SEQ ID NO: 41420 - DNA, 50 bp, synthetic construct
  source 1..50: mol_type = other DNA
ggacttttcttttgtcatttattacagaaaaaatttcccaagaaatttta

SEQ ID NO: 41421 - DNA, 50 bp, synthetic construct
  source 1..50: mol_type = other DNA
aacgtttaattagcggcaaaaaagtactaagttatatgacacaaaatcca

SEQ ID NO: 41422 - DNA, 50 bp, synthetic construct
  source 1..50: mol_type = other DNA
tgatagttctctgccaaacgattttcaaatacttctctctctctctttgt

SEQ ID NO: 41423 - DNA, 50 bp, synthetic construct
  source 1..50: mol_type = other DNA
caaaaatcatgaacctcattacttataagcttctccacgcataatcttaa

SEQ ID NO: 41424 - DNA, 50 bp, synthetic construct
  source 1..50: mol_type = other DNA
cttaaacttttatataataaatactagtacctattctatatgtataaaaa

SEQ ID NO: 41425 - DNA, 50 bp, synthetic construct
  source 1..50: mol_type = other DNA
cgtgtcaattttactttcagcgtaattgcgcggaacgtaaaattccgtcg

SEQ ID NO: 41426 - DNA, 50 bp, synthetic construct
  source 1..50: mol_type = other DNA
caaagccgatgaatttatagtaaatctttaacaccttaaaatcctgtttc

SEQ ID NO: 41427 - DNA, 50 bp, synthetic construct
  source 1..50: mol_type = other DNA
tttataactctatttaactatcattaatggggattgcaccagactggatg

SEQ ID NO: 41428 - DNA, 50 bp, synthetic construct
  source 1..50: mol_type = other DNA
taatattttatgaaaactggcatctttatgccaaagttcatggaatacaa

SEQ ID NO: 41429 - DNA, 50 bp, synthetic construct
  source 1..50: mol_type = other DNA
ggttttgatctcgtaatcattgacgattcaactcttgcaagcacaaaaca

SEQ ID NO: 41430 - DNA, 50 bp, synthetic construct
  source 1..50: mol_type = other DNA
ccagttaatgatttcttcacacaaacacatgtgcatcatgaggatactgg

SEQ ID NO: 41431 - DNA, 50 bp, synthetic construct
  source 1..50: mol_type = other DNA
ctcagttttgatgcggccattgccgacttaatgtttactggcaatccttc

SEQ ID NO: 41432 - DNA, 50 bp, synthetic construct
  source 1..50: mol_type = other DNA
tagaccttttcccacatacacaccacatgtggagtgtgtcagcttgttag

SEQ ID NO: 41433 - DNA, 50 bp, synthetic construct
  source 1..50: mol_type = other DNA
gcttgaaaaatatcaaccgtttataaataatgaattacaggatttcataa

SEQ ID NO: 41434 - DNA, 50 bp, synthetic construct
  source 1..50: mol_type = other DNA
ccagtaaaaggaaggaaatatcctataggttatgaccgcttttttgctat

SEQ ID NO: 41435 - DNA, 50 bp, synthetic construct
  source 1..50: mol_type = other DNA
actagtatacatgataaatgcgggatccctccttttgattctatattacc

SEQ ID NO: 41436 - DNA, 50 bp, synthetic construct
  source 1..50: mol_type = other DNA
tcagctttcggaagggcgtatcatagtgaatttgataatcctaaaatctt

SEQ ID NO: 41437 - DNA, 50 bp, synthetic construct
  source 1..50: mol_type = other DNA
ttggtagctctgagcgtgaggctagcaagcacggaaacaagccctaccat

SEQ ID NO: 41438 - DNA, 50 bp, synthetic construct
  source 1..50: mol_type = other DNA
gatgacaatgagggcaagtagggattttcaagaatgtcatcatttttttc

SEQ ID NO: 41439 - DNA, 50 bp, synthetic construct
  source 1..50: mol_type = other DNA
tttttatacatatagaataggtactaatatgtattatatgaaaaacaaac

SEQ ID NO: 41440 - DNA, 50 bp, synthetic construct
  source 1..50: mol_type = other DNA
aaaataaatatgtggtactcattaaatagcaagtacttcatttatatttt

SEQ ID NO: 41441 - DNA, 50 bp, synthetic construct
  source 1..50: mol_type = other DNA
tggttgaggaatttttgaatggaaatgttatttagtaaatttcttgaggg

SEQ ID NO: 41442 - DNA, 50 bp, synthetic construct
  source 1..50: mol_type = other DNA
taacgttttttgtctatattccgttaaaggaacattgactctactcgtaa

SEQ ID NO: 41443 - DNA, 50 bp, synthetic construct
  source 1..50: mol_type = other DNA
ctacttttaatgattatatactactgttagtatccattatataaaaaata

SEQ ID NO: 41444 - DNA, 50 bp, synthetic construct
  source 1..50: mol_type = other DNA
aataaccgtatctcttttatatgagaagaaataaatatgataattaataa

SEQ ID NO: 41445 - DNA, 50 bp, synthetic construct
  source 1..50: mol_type = other DNA
gctcaataaatgatttgatttagatttctatatcaaattaataataagaa

SEQ ID NO: 41446 - DNA, 50 bp, synthetic construct
  source 1..50: mol_type = other DNA
attttatctttgctttacttaacaatatctaatataatgaaatataaata

SEQ ID NO: 41447 - DNA, 50 bp, synthetic construct
  source 1..50: mol_type = other DNA
gaaataactgaaaaaatccttcttttgtggaaggattttttatttacatt

SEQ ID NO: 41448 - DNA, 50 bp, synthetic construct
  source 1..50: mol_type = other DNA
atttctcgaattctttccgaaaaattttttgtggaaagaaaagcccgaat

SEQ ID NO: 41449 - DNA, 50 bp, synthetic construct
  source 1..50: mol_type = other DNA
gacgacggcatgtcgacggtggagtacgcgatcggcaccatagcggcggc

SEQ ID NO: 41450 - DNA, 50 bp, synthetic construct
  source 1..50: mol_type = other DNA
tgccgccccgacttcacgggacaaaattgtcccgacaggacgactgtttt

SEQ ID NO: 41451 - DNA, 50 bp, synthetic construct
  source 1..50: mol_type = other DNA
ttatccaactccggtaccgactgcccggattcccactttgaaacagattg

SEQ ID NO: 41452 - DNA, 50 bp, synthetic construct
  source 1..50: mol_type = other DNA
ataagtgtactatggcgattatactggttcacttccccatacccaaacat

SEQ ID NO: 41453 - DNA, 50 bp, synthetic construct
  source 1..50: mol_type = other DNA
atgtttgggtatggggaagtgaatcagtacaaccgccatagtacgcttat

SEQ ID NO: 41454 - DNA, 50 bp, synthetic construct
  source 1..50: mol_type = other DNA
catctgcagtaatgtcaataagagtttttatagatgcatagaggcaaaaa

SEQ ID NO: 41455 - DNA, 50 bp, synthetic construct
  source 1..50: mol_type = other DNA
taaaaccgtttcttgtgggtggaacatttaacatacaagaaaatgggtga

SEQ ID NO: 41456 - DNA, 50 bp, synthetic construct
  source 1..50: mol_type = other DNA
tgcaaaaaatccgcaggcgtggcaggagcaaaaaatgaccagtttttgcc

SEQ ID NO: 41457 - DNA, 50 bp, synthetic construct
  source 1..50: mol_type = other DNA
aaataatcgcacgcatctgggtgcatgcactggggattagatttgtattt

SEQ ID NO: 41458 - DNA, 50 bp, synthetic construct
  source 1..50: mol_type = other DNA
atcgagaccactgccacggatgcgccaggcacctggtcaggagcatcgaa

SEQ ID NO: 41459 - DNA, 50 bp, synthetic construct
  source 1..50: mol_type = other DNA
gatccgcagctcctcctcttcgacgagccgaccaccggcctcgacgtcgc

SEQ ID NO: 41460 - DNA, 50 bp, synthetic construct
  source 1..50: mol_type = other DNA
tggcattgccgatcacggtcgtgagtgaacggcccggccccgcactggca

SEQ ID NO: 41461 - DNA, 50 bp, synthetic construct
  source 1..50: mol_type = other DNA
aaattttatgaaatttatcatcttgaaataaaattaattgcgctcgattt

SEQ ID NO: 41462 - DNA, 50 bp, synthetic construct
  source 1..50: mol_type = other DNA
aagtacctatttaggtaagaggacaaaatttcattataaaataaagtgta

SEQ ID NO: 41463 - DNA, 50 bp, synthetic construct
  source 1..50: mol_type = other DNA
ttgtaaaaattcaattataattagtaactagtaagttgcagttttttaat

SEQ ID NO: 41464 - DNA, 50 bp, synthetic construct
  source 1..50: mol_type = other DNA
cgccgcagggtcagcggcacgcggatcgtgggccggcttcgtctgcggcc

SEQ ID NO: 41465 - DNA, 50 bp, synthetic construct
  source 1..50: mol_type = other DNA
tgtgcgctgggacaacctgttcgacgccgggggattcttcccagctgaca

SEQ ID NO: 41466 - DNA, 50 bp, synthetic construct
  source 1..50: mol_type = other DNA
caaaataaaagcaccagttcaaaaatattttaatgagtgcgaaaattttc

SEQ ID NO: 41467 - DNA, 50 bp, synthetic construct
  source 1..50: mol_type = other DNA
caatatagctttatgggatattttaaacttacagtcaaaaagagctttta

SEQ ID NO: 41468 - DNA, 50 bp, synthetic construct
  source 1..50: mol_type = other DNA
aattaaaattataaaaatagatcattaaattaagtttgctcattttaaca

SEQ ID NO: 41469 - DNA, 50 bp, synthetic construct
  source 1..50: mol_type = other DNA
gactatcaaaactaaaggagttcttaaaaactcaattaccttatctagaa

SEQ ID NO: 41470 - DNA, 50 bp, synthetic construct
  source 1..50: mol_type = other DNA
gcgccggagcgggccgtcagcggccggcacttccgcttgtcgtgcggaag

SEQ ID NO: 41471 - DNA, 50 bp, synthetic construct
  source 1..50: mol_type = other DNA
cttcctcttcattaattacagccctggggcattttttggtggagaggaat

SEQ ID NO: 41472 - DNA, 50 bp, synthetic construct
  source 1..50: mol_type = other DNA
gaacccttgatgaactttgatggctattgatttcctttatacgagggatg

SEQ ID NO: 41473 - DNA, 50 bp, synthetic construct
  source 1..50: mol_type = other DNA
tagatgaaaacgtatttttattttataatataattctattatttcttcta

SEQ ID NO: 41474 - DNA, 50 bp, synthetic construct
  source 1..50: mol_type = other DNA
acctaaaaggtaattattaaatatttggaattataaatgaaattttactt

SEQ ID NO: 41475 - DNA, 50 bp, synthetic construct
  source 1..50: mol_type = other DNA
gttctgaaggggttattttgcacgaacgtattcaccaccgggcctttgct

SEQ ID NO: 41476 - DNA, 50 bp, synthetic construct
  source 1..50: mol_type = other DNA
agcgtgacgtcgaagccgagcgcggctgaactcggcttcgacggtccgga

SEQ ID NO: 41477 - DNA, 50 bp, synthetic construct
  source 1..50: mol_type = other DNA
atctaaaaatgaatatgaaaaaatcatatttttcaatcctcctttttgat

SEQ ID NO: 41478 - DNA, 50 bp, synthetic construct
  source 1..50: mol_type = other DNA
tgataaacataaaaagaaagactaaaaaggcttgacgtatatttaaatat

SEQ ID NO: 41479 - DNA, 50 bp, synthetic construct
  source 1..50: mol_type = other DNA
gtaactgctattttaaaaactttagtatgcatcaatcaaatatactagga

SEQ ID NO: 41480 - DNA, 50 bp, synthetic construct
  source 1..50: mol_type = other DNA
tctatttaactatcattaataacgtattcttgaccgcatagttattttcc

SEQ ID NO: 41481 - DNA, 50 bp, synthetic construct
  source 1..50: mol_type = other DNA
gcatcacgttttttggtattggttgcaacatcttataagcacaatgagtc

SEQ ID NO: 41482 - DNA, 50 bp, synthetic construct
  source 1..50: mol_type = other DNA
tatttatgttgacagagaataataatattcctttttagtcaacatatttc

SEQ ID NO: 41483 - DNA, 50 bp, synthetic construct
  source 1..50: mol_type = other DNA
gaagtgtataagtttattcatgtaaatttatgaggctgtagttacagaat

SEQ ID NO: 41484 - DNA, 50 bp, synthetic construct
  source 1..50: mol_type = other DNA
tgtgtcaatagttatatgagcatttattcaactatatcgccaatatcaca

SEQ ID NO: 41485 - DNA, 50 bp, synthetic construct
  source 1..50: mol_type = other DNA
ttgtatccatatggaatatatgccatgtaagccaagcagaatgggtactt

SEQ ID NO: 41486 - DNA, 50 bp, synthetic construct
  source 1..50: mol_type = other DNA
agaagaagaaacgagaaactaaaattatttagtacctcgttatctctcgc

SEQ ID NO: 41487 - DNA, 50 bp, synthetic construct
  source 1..50: mol_type = other DNA
gctcggaagccttatctgtggagccaggtggagctaaggggattcgaacc

SEQ ID NO: 41488 - DNA, 50 bp, synthetic construct
  source 1..50: mol_type = other DNA
cacagcttcaatatgtgtcggaactagtctccacatgtgtcgtcattgga

SEQ ID NO: 41489 - DNA, 50 bp, synthetic construct
  source 1..50: mol_type = other DNA
aagatttaaaatgaacaaactagtttcaggactttttcaagatttacctt

SEQ ID NO: 41490 - DNA, 50 bp, synthetic construct
  source 1..50: mol_type = other DNA
atatgctataatagactaaaaattataaattttgggcgcaaaaagcccgg

SEQ ID NO: 41491 - DNA, 50 bp, synthetic construct
  source 1..50: mol_type = other DNA
cccttggtcgcaagttcacacctgacgagacttgaactcgcgaccacctg

SEQ ID NO: 41492 - DNA, 50 bp, synthetic construct
  source 1..50: mol_type = other DNA
attggattagccctaagcataaacgtcttttaaattgcggttaatcattt

SEQ ID NO: 41493 - DNA, 50 bp, synthetic construct
  source 1..50: mol_type = other DNA
aaaggctttacagctcagcttcaactttgtagcccagcgtcaactattca

SEQ ID NO: 41494 - DNA, 50 bp, synthetic construct
  source 1..50: mol_type = other DNA
gaaactccgcgcaaaacttttgtatgaaccctaaccgggcgcttactttc

SEQ ID NO: 41495 - DNA, 50 bp, synthetic construct
  source 1..50: mol_type = other DNA
ccgggatgccttggaggtactccgccaggcgttgccacagcgcatccggg

SEQ ID NO: 41496 - DNA, 50 bp, synthetic construct
  source 1..50: mol_type = other DNA
gccatcacaatgaaacctcatcacattcctcaacaacaatttgtgacagt

SEQ ID NO: 41497 - DNA, 50 bp, synthetic construct
  source 1..50: mol_type = other DNA
gacatctactccattcttaatttttcaactttaagtagcttgatgatgtc

SEQ ID NO: 41498 - DNA, 50 bp, synthetic construct
  source 1..50: mol_type = other DNA
taaaatttttttaactgtatttcaattcaattatgattttaataatttct

SEQ ID NO: 41499 - DNA, 50 bp, synthetic construct
  source 1..50: mol_type = other DNA
taataccaaaagaagcaacaatacacgaattgtaatttcatttgcatcct

SEQ ID NO: 41500 - DNA, 50 bp, synthetic construct
  source 1..50: mol_type = other DNA
ccgaaataacccgaacaacacttcttgaacttctgcccgctgccacacgg

SEQ ID NO: 41501 - DNA, 50 bp, synthetic construct
  source 1..50: mol_type = other DNA
cacacaatttccatatgagccagttcctccgttccaatatcagtcaatat

SEQ ID NO: 41502 - DNA, 50 bp, synthetic construct
  source 1..50: mol_type = other DNA
ggacaatccgggtgacccccgggacaatccgggcggcacccagatcttcc

SEQ ID NO: 41503 - DNA, 50 bp, synthetic construct
  source 1..50: mol_type = other DNA
attgcctgatagcattaaaagaaaattttctttcaatcttatctggattt

SEQ ID NO: 41504 - DNA, 50 bp, synthetic construct
  source 1..50: mol_type = other DNA
cgcagccgcttttcgcacgaacaaacgtattaaccagaaaagacacgctg

SEQ ID NO: 41505 - DNA, 50 bp, synthetic construct
  source 1..50: mol_type = other DNA
acagcgggaggatcaacgtctcctgcagaagattttcgtcttaccgtgtg

SEQ ID NO: 41506 - DNA, 50 bp, synthetic construct
  source 1..50: mol_type = other DNA
cttccgtgaatacagcgggaggatcacaccgttctctgcgacaaaatagt

SEQ ID NO: 41507 - DNA, 50 bp, synthetic construct
  source 1..50: mol_type = other DNA
tttattgatgaaaatataagtaatatattacgtataataatatgatttaa

SEQ ID NO: 41508 - DNA, 50 bp, synthetic construct
  source 1..50: mol_type = other DNA
ataataatacctccgttattgtttttatttaataccggagggtgaagggt

SEQ ID NO: 41509 - DNA, 50 bp, synthetic construct
  source 1..50: mol_type = other DNA
tcggcggtgacgttccccatcagcgtggtctggatgtcgcgcatggcgct

SEQ ID NO: 41510 - DNA, 50 bp, synthetic construct
  source 1..50: mol_type = other DNA
gccgcgtgccgggttgccgtggagcgaagtcgagcagccggggatccggc

SEQ ID NO: 41511 - DNA, 50 bp, synthetic construct
  source 1..50: mol_type = other DNA
aaggtaaaagcttttactctgattgaaatgttagttgttttgctcattat

SEQ ID NO: 41512 - DNA, 50 bp, synthetic construct
  source 1..50: mol_type = other DNA
aaagaatcaaaaactgtaatatatttttactacacaggatttgcgatttt

SEQ ID NO: 41513 - DNA, 50 bp, synthetic construct
  source 1..50: mol_type = other DNA
tcggaaaaacgactgagacttctggattcctgtcgcagtcgtttgatact

SEQ ID NO: 41514 - DNA, 50 bp, synthetic construct
  source 1..50: mol_type = other DNA
tcaggtcgggcattggcattattgatcattagggtgcccgaaaaacctgg

SEQ ID NO: 41515 - DNA, 50 bp, synthetic construct
  source 1..50: mol_type = other DNA
agcgagacttcatcgtgcacgatgtgccattcactatgtcagcgagcgct

SEQ ID NO: 41516 - DNA, 50 bp, synthetic construct
  source 1..50: mol_type = other DNA
agcaccggccgctacgcgcctacgatggtgcgcgagcagcccgagctgcg

SEQ ID NO: 41517 - DNA, 50 bp, synthetic construct
  source 1..50: mol_type = other DNA
cgccacatcgcatcgagcgcgaggttgatggcgttgaactcgatgtgaca

SEQ ID NO: 41518 - DNA, 50 bp, synthetic construct
  source 1..50: mol_type = other DNA
gcacctcttaacgctaaattctaaattttcatcttatcgttaaaagcagg

SEQ ID NO: 41519 - DNA, 50 bp, synthetic construct
  source 1..50: mol_type = other DNA
ataattcaaactatagatgataactccgagtcatttctcgtgcagccttc

SEQ ID NO: 41520 - DNA, 50 bp, synthetic construct
  source 1..50: mol_type = other DNA
aaatcaggtattaaatgtatttttataccgctaaattacgtacttttttt

SEQ ID NO: 41521 - DNA, 50 bp, synthetic construct
  source 1..50: mol_type = other DNA
ttggtcgctggttcgaatccggcccggcccggggagccacttcatttcat

SEQ ID NO: 41522 - DNA, 50 bp, synthetic construct
  source 1..50: mol_type = other DNA
atttgtacgattgacgctttagaaatttcacggcagctaatcagggaata

SEQ ID NO: 41523 - DNA, 50 bp, synthetic construct
  source 1..50: mol_type = other DNA
aaccaggtttttcgggcatcctaatgttagggcagcccagggaaacgaag

SEQ ID NO: 41524 - DNA, 50 bp, synthetic construct
  source 1..50: mol_type = other DNA
gagaattgatagtcacttttaatagtacaaaaaaatggctaagattggat

SEQ ID NO: 41525 - DNA, 50 bp, synthetic construct
  source 1..50: mol_type = other DNA
cttggaagctggactattcagacttaaggctgacttgtcgtagagttcac

SEQ ID NO: 41526 - DNA, 50 bp, synthetic construct
  source 1..50: mol_type = other DNA
atttatggggagccctcagcgcttcgaagcagggtctatgtgaactaaaa

SEQ ID NO: 41527 - DNA, 50 bp, synthetic construct
  source 1..50: mol_type = other DNA
catcgaaagtcctctggtcagctgatcagctggaatctaaggtatctctg

SEQ ID NO: 41528 - DNA, 50 bp, synthetic construct
  source 1..50: mol_type = other DNA
cttgaaaaaagctaaggttaaagcttttgttaataatagctcctttttag

SEQ ID NO: 41529 - DNA, 50 bp, synthetic construct
  source 1..50: mol_type = other DNA
ctctgctggccttctaagccaagggatgttggtcgctttggtcaattatt

SEQ ID NO: 41530 - DNA, 50 bp, synthetic construct
  source 1..50: mol_type = other DNA
gcgtgcggtattgatccatttggaaatccttttggcatcatttaaaaaga

SEQ ID NO: 41531 - DNA, 50 bp, synthetic construct
  source 1..50: mol_type = other DNA
catatgctacctataaatcacaaaaattttactcttatgcgaaccattat

SEQ ID NO: 41532 - DNA, 50 bp, synthetic construct
  source 1..50: mol_type = other DNA
acttcattaattggagtcagattaaatactgttgctcaaattgcagaaat

SEQ ID NO: 41533 - DNA, 50 bp, synthetic construct
  source 1..50: mol_type = other DNA
gcatcacgtggagacggtagcattatgatgaacaagttgagtgcgtagtg

SEQ ID NO: 41534 - DNA, 50 bp, synthetic construct
  source 1..50: mol_type = other DNA
ataaaaactgttccctattttcaattttgagtctcatctctgtgttttcc

SEQ ID NO: 41535 - DNA, 50 bp, synthetic construct
  source 1..50: mol_type = other DNA
actctttgtatcaacgctatgcactcgacatgatgtgtcattggaaacaa

SEQ ID NO: 41536 - DNA, 50 bp, synthetic construct
  source 1..50: mol_type = other DNA
agcttgtttttgttcaagcatctaatagtattcaagcacaagaacaaaat

SEQ ID NO: 41537 - DNA, 50 bp, synthetic construct
  source 1..50: mol_type = other DNA
tgttacatggccttttatcttttacaaacaacgtgagagggacgctaacg

SEQ ID NO: 41538 - DNA, 50 bp, synthetic construct
  source 1..50: mol_type = other DNA
aacttattttccgatgcaaatttaactaaaaagaaatcgccttttaagtt

SEQ ID NO: 41539 - DNA, 50 bp, synthetic construct
  source 1..50: mol_type = other DNA
taaaaggtttctatgctttcacgagctatgcactccacatggtgtgtttg

SEQ ID NO: 41540 - DNA, 50 bp, synthetic construct
  source 1..50: mol_type = other DNA
aacttgtgatttttctttaattaaattttaacgaataaaaatattttttg

SEQ ID NO: 41541 - DNA, 50 bp, synthetic construct
  source 1..50: mol_type = other DNA
cgtttataagtcaattatcgacctaatatgctataaaagatcttaaaaca

SEQ ID NO: 41542 - DNA, 50 bp, synthetic construct
  source 1..50: mol_type = other DNA
ttgaaaataatattaagcacatcgattgattacgataatcctatgttaga

SEQ ID NO: 41543 - DNA, 50 bp, synthetic construct
  source 1..50: mol_type = other DNA
tcttcctctggctatataaaggaagagtagctggttatgccagggtatca

SEQ ID NO: 41544 - DNA, 50 bp, synthetic construct
  source 1..50: mol_type = other DNA
agatgctgaatggatggatgaaaatattttcaaacatatagtcacaaaca

SEQ ID NO: 41545 - DNA, 50 bp, synthetic construct
  source 1..50: mol_type = other DNA
tgcgcacgaggattgaaaaaacgctcgcgtaacgttttttctctcgcatc

SEQ ID NO: 41546 - DNA, 50 bp, synthetic construct
  source 1..50: mol_type = other DNA
gtacttggttttttgggggtgtacgagtaccgagcaattgagccgttagc

SEQ ID NO: 41547 - DNA, 50 bp, synthetic construct
  source 1..50: mol_type = other DNA
ttggagtactattatctcataatgtacatttacatttcttattacaattc

SEQ ID NO: 41548 - DNA, 50 bp, synthetic construct
  source 1..50: mol_type = other DNA
caaattcgataaatttttttaatctttattaaaaggacttataaaatgtg

SEQ ID NO: 41549 - DNA, 50 bp, synthetic construct
  source 1..50: mol_type = other DNA
agatgaattagaaaccctctctaacgccttaactgcttcaatgttcattt

SEQ ID NO: 41550 - DNA, 50 bp, synthetic construct
  source 1..50: mol_type = other DNA
ggctgcccgccccgcgcgagctgcgacggcctcgcgtctctgaagcctcc

SEQ ID NO: 41551 - DNA, 50 bp, synthetic construct
  source 1..50: mol_type = other DNA
atcgaatcccccgtgaccacggtgtacacccgggtcaatccggataccga

SEQ ID NO: 41552 - DNA, 50 bp, synthetic construct
  source 1..50: mol_type = other DNA
gaggacactccgcattatttttactcataaatagacttctccgcaccctc

SEQ ID NO: 41553 - DNA, 50 bp, synthetic construct
  source 1..50: mol_type = other DNA
ctgacccgccgccttgtcctccacctacggaggctgacgcggttcagaac

SEQ ID NO: 41554 - DNA, 50 bp, synthetic construct
  source 1..50: mol_type = other DNA
gcactccattgattacgatgccgtccccagcgccttattcaatggtgtgt

SEQ ID NO: 41555 - DNA, 50 bp, synthetic construct
  source 1..50: mol_type = other DNA
aatttacgggcaatgtgttctaccatttgaaaaagtgtttgctttaattt

SEQ ID NO: 41556 - DNA, 50 bp, synthetic construct
  source 1..50: mol_type = other DNA
cagatacaacaataccgctgcgggatttctgcttccagtacttgtatcct

SEQ ID NO: 41557 - DNA, 50 bp, synthetic construct
  source 1..50: mol_type = other DNA
ggaggaccggcgccggcgcgaatccgagcatccgccggacccgggactcg

SEQ ID NO: 41558 - DNA, 50 bp, synthetic construct
  source 1..50: mol_type = other DNA
cgtggtgcccgccggtccgatcggcttgcctcgtcgcattgtaaaccgtc

SEQ ID NO: 41559 - DNA, 50 bp, synthetic construct
  source 1..50: mol_type = other DNA
tatctaaatcaaaaaaagaactattatcttttatttgcgcaatttatgaa

SEQ ID NO: 41560 - DNA, 50 bp, synthetic construct
  source 1..50: mol_type = other DNA
aatattttacattattatcaaccaatttgtaaataatacaggaatatctt

SEQ ID NO: 41561 - DNA, 50 bp, synthetic construct
  source 1..50: mol_type = other DNA
gtctttttgtatgaaaaaatgggacatcaatccaattcatacaaaaggac

SEQ ID NO: 41562 - DNA, 50 bp, synthetic construct
  source 1..50: mol_type = other DNA
tttttgagcaaaacggatttgaaacaattttcatcttcgtttctcaacac

SEQ ID NO: 41563 - DNA, 50 bp, synthetic construct
  source 1..50: mol_type = other DNA
aaaaccaatcctgcattttgttgataccgataatcgttacttctgttttt

SEQ ID NO: 41564 - DNA, 50 bp, synthetic construct
  source 1..50: mol_type = other DNA
acaatcgttttaacatctttttcatattgaagttctagtaaacagattgt

SEQ ID NO: 41565 - DNA, 50 bp, synthetic construct
  source 1..50: mol_type = other DNA
tctaattgttagatggttaattgtagacccacagggattcgaaccccgac

SEQ ID NO: 41566 - DNA, 50 bp, synthetic construct
  source 1..50: mol_type = other DNA
cccgtgggcggactcggcgctggacgtacagccccgagaagagccccggc

SEQ ID NO: 41567 - DNA, 50 bp, synthetic construct
  source 1..50: mol_type = other DNA
gggttcaaatcccctatcctccgccacctccgccactgcaggaccgcatc

SEQ ID NO: 41568 - DNA, 50 bp, synthetic construct
  source 1..50: mol_type = other DNA
agacgagaaggaccccgccaggtggccacggccccgggtccaggtcgcgt

SEQ ID NO: 41569 - DNA, 50 bp, synthetic construct
  source 1..50: mol_type = other DNA
atgtgcctaccggggcattctcagggatgagcatgcccaggaggagcccg

SEQ ID NO: 41570 - DNA, 50 bp, synthetic construct
  source 1..50: mol_type = other DNA
gcgatagtcccgatcgcgtacgcgttcgactattcgaccgtggacatgcc

SEQ ID NO: 41571 - DNA, 50 bp, synthetic construct
  source 1..50: mol_type = other DNA
cccgttgcattgccgccgccgccggccgggtgctgccgcgcccggtgggg

SEQ ID NO: 41572 - DNA, 50 bp, synthetic construct
  source 1..50: mol_type = other DNA
agagattaatgttattatcagaagaacctacttctaaaacattactctca

SEQ ID NO: 41573 - DNA, 50 bp, synthetic construct
  source 1..50: mol_type = other DNA
acctgaaaccatcatggaaacgaccactcatggacatgatggttcgtctg

SEQ ID NO: 41574 - DNA, 50 bp, synthetic construct
  source 1..50: mol_type = other DNA
ttcagtctcgagagcgacgaggagatgcactggccgctgacgaagcaacc

SEQ ID NO: 41575 - DNA, 50 bp, synthetic construct
  source 1..50: mol_type = other DNA
cagtgcgggcatttatcttcagatttatcctttacgtataggacgagtcg

SEQ ID NO: 41576 - DNA, 50 bp, synthetic construct
  source 1..50: mol_type = other DNA
attcttcctgttatgtagtcttaaaatgtagactcacagggattcgaacc

SEQ ID NO: 41577 - DNA, 50 bp, synthetic construct
  source 1..50: mol_type = other DNA
cgcccaccagagcgacatcaagtaataacatctgatattgtgtggtgagg

SEQ ID NO: 41578 - DNA, 50 bp, synthetic construct
  source 1..50: mol_type = other DNA
cgacccttattcggccaagccctaacttatgtgctgttttacacgaccaa

SEQ ID NO: 41579 - DNA, 50 bp, synthetic construct
  source 1..50: mol_type = other DNA
ttcttctgttggaccatgtctctcgatgccactcctgaacaaatgaaaga

SEQ ID NO: 41580 - DNA, 50 bp, synthetic construct
  source 1..50: mol_type = other DNA
ggtacacaaagacctccatgttgcaaacaacatggtcctgcatgtttaag

SEQ ID NO: 41581 - DNA, 50 bp, synthetic construct
  source 1..50: mol_type = other DNA
acgggagaaaaactgctgacagacgtgtagtcttgcacatcttcgtccca

SEQ ID NO: 41582 - DNA, 50 bp, synthetic construct
  source 1..50: mol_type = other DNA
gattgtttacgtctgaatatgtaggggtgatcctgcctccgtcgtcaagg

SEQ ID NO: 41583 - DNA, 50 bp, synthetic construct
  source 1..50: mol_type = other DNA
ggatgtagcgtatctttttcatgtcggcgtcaaaaacgaccttggcatcc

SEQ ID NO: 41584 - DNA, 50 bp, synthetic construct
  source 1..50: mol_type = other DNA
cggaataacagtacttgcaaatggcgatacataccagagttgacagcctt

SEQ ID NO: 41585 - DNA, 50 bp, synthetic construct
  source 1..50: mol_type = other DNA
cttatcttgaatattgcagaaggtttctataatgctttattgtatatata

SEQ ID NO: 41586 - DNA, 50 bp, synthetic construct
  source 1..50: mol_type = other DNA
tttttcgcattgtccacatcctcgcgcgacattgcactcattggagaagc

SEQ ID NO: 41587 - DNA, 50 bp, synthetic construct
  source 1..50: mol_type = other DNA
agcttgaccgactccacccaatggcggcacggtccggagtcggtcctgcc

SEQ ID NO: 41588 - DNA, 50 bp, synthetic construct
  source 1..50: mol_type = other DNA
cgagcagagccacacactccacatgtgatgtgtcattgggaataagtcta

SEQ ID NO: 41589 - DNA, 50 bp, synthetic construct
  source 1..50: mol_type = other DNA
atctaattctattgaagaattggtaggtcaattattaccgtgaatacatc

SEQ ID NO: 41590 - DNA, 50 bp, synthetic construct
  source 1..50: mol_type = other DNA
caaacggtcatatctcaaactcggaaattaaaaggagatatgactagggc

SEQ ID NO: 41591 - DNA, 50 bp, synthetic construct
  source 1..50: mol_type = other DNA
aaagattgactttgctgtagcaggagttgttacaggctatctgaatcttt

SEQ ID NO: 41592 - DNA, 50 bp, synthetic construct
  source 1..50: mol_type = other DNA
ttaaggaatgttactgaaacacttttaatccttttggatcaattagcaca

SEQ ID NO: 41593 - DNA, 50 bp, synthetic construct
  source 1..50: mol_type = other DNA
gacgtatctatttttttgtctacgcatctgcctgaaaggctgaatcatca

SEQ ID NO: 41594 - DNA, 50 bp, synthetic construct
  source 1..50: mol_type = other DNA
catctgatcacgaaagtcagcaaatattatctgcctttttcattttgaat

SEQ ID NO: 41595 - DNA, 50 bp, synthetic construct
  source 1..50: mol_type = other DNA
tcacctttaaacaaccaatagatgatgatatgactcttatttaagagtaa

SEQ ID NO: 41596 - DNA, 50 bp, synthetic construct
  source 1..50: mol_type = other DNA
atatcagaatcgggaaccgacagtccttgttcccatttagatattgtttg

SEQ ID NO: 41597 - DNA, 50 bp, synthetic construct
  source 1..50: mol_type = other DNA
gtgaaaattactaataggaaatacatataatataataaagttattttcat

SEQ ID NO: 41598 - DNA, 50 bp, synthetic construct
  source 1..50: mol_type = other DNA
tttttagcgcttatagctgctgcacatccggcccaaccgccgccgataac

SEQ ID NO: 41599 - DNA, 50 bp, synthetic construct
  source 1..50: mol_type = other DNA
ctaatatagataaagaagcatgggatctttagcttctttatcctctatag

SEQ ID NO: 41600 - DNA, 50 bp, synthetic construct
  source 1..50: mol_type = other DNA
tatttgcttagtttcactacagtctccacatgaggcgtatgaggaaacat

SEQ ID NO: 41601 - DNA, 50 bp, synthetic construct
  source 1..50: mol_type = other DNA
atataattgctggataatggtcttctaagaatatgataattaaattatat

SEQ ID NO: 41602 - DNA, 50 bp, synthetic construct
  source 1..50: mol_type = other DNA
gctttaggacttaatggcgtaaatctcatgcgcctaatggccacaaaaaa

SEQ ID NO: 41603 - DNA, 50 bp, synthetic construct
  source 1..50: mol_type = other DNA
tcggtcaattaaacacaacctaactagttatatggtgttcggtcaattaa

SEQ ID NO: 41604 - DNA, 50 bp, synthetic construct
  source 1..50: mol_type = other DNA
tataggaaagtcaaatataacttcttctggtgtattttcaatttgttctt

SEQ ID NO: 41605 - DNA, 50 bp, synthetic construct
  source 1..50: mol_type = other DNA
aaagctgtagaaatcagaaaaaaatatcattttcatatttactgatagtt

SEQ ID NO: 41606 - DNA, 50 bp, synthetic construct
  source 1..50: mol_type = other DNA
gcttttgttggtattgcggtgcttgagggggattcgaacccccggtgcgc

SEQ ID NO: 41607 - DNA, 50 bp, synthetic construct
  source 1..50: mol_type = other DNA
gaaatactaggatttttaggaccatcaggtgcaggaaaatctacattaca

SEQ ID NO: 41608 - DNA, 50 bp, synthetic construct
  source 1..50: mol_type = other DNA
tttacataattatattttatcattatcagtataatttataattcgctcta

SEQ ID NO: 41609 - DNA, 50 bp, synthetic construct
  source 1..50: mol_type = other DNA
aaaataaaaaagccgttccctacttatgtagctcgtagctttttcttttg

SEQ ID NO: 41610 - DNA, 50 bp, synthetic construct
  source 1..50: mol_type = other DNA
tagaagaaggattaataaaagatactccttatttattagctgctcttcta

SEQ ID NO: 41611 - DNA, 50 bp, synthetic construct
  source 1..50: mol_type = other DNA
ttacagagttacaattattttcactttttttgataatgagaatactgtga

SEQ ID NO: 41612 - DNA, 50 bp, synthetic construct
  source 1..50: mol_type = other DNA
gccgccgcgggcggccaccacatgctgatgatcgggccgccgggcgcggg

SEQ ID NO: 41613 - DNA, 50 bp, synthetic construct
  source 1..50: mol_type = other DNA
aagactcgactctgcgcgcgttcagaagaccgcgtgccgagtcgtgttcc

SEQ ID NO: 41614 - DNA, 50 bp, synthetic construct
  source 1..50: mol_type = other DNA
gaagtccggcaacgccgtgctgctgcacggtcaaggcgctgcgggacgag

SEQ ID NO: 41615 - DNA, 50 bp, synthetic construct
  source 1..50: mol_type = other DNA
tagcactgctacagcttcaacatgcacatgaggagtttgcgggaacatat

SEQ ID NO: 41616 - DNA, 50 bp, synthetic construct
  source 1..50: mol_type = other DNA
tttaagagcttcattttaatttctatagaatttatagttttcatttataa

SEQ ID NO: 41617 - DNA, 50 bp, synthetic construct
  source 1..50: mol_type = other DNA
gcggctgctggttggcaccatgttctgctgatggggaaccccggggtggg

SEQ ID NO: 41618 - DNA, 50 bp, synthetic construct
  source 1..50: mol_type = other DNA
actgaagattgactggtcaatcttcaacgatgatccctttcttcagaagg

SEQ ID NO: 41619 - DNA, 50 bp, synthetic construct
  source 1..50: mol_type = other DNA
cagaggcggttctggggatgagctgggcgcatcccccagaacctcgtcat

SEQ ID NO: 41620 - DNA, 50 bp, synthetic construct
  source 1..50: mol_type = other DNA
tatttaatggaatagaaggttggttcacctcaattatttatcataaacat

SEQ ID NO: 41621 - DNA, 50 bp, synthetic construct
  source 1..50: mol_type = other DNA
aataccatttgttacttcgccacaattgattttcccaatcaaatttaatt

SEQ ID NO: 41622 - DNA, 50 bp, synthetic construct
  source 1..50: mol_type = other DNA
aacatataaagtactttctatttttaaaaataaaaagaaccctaaatgag

SEQ ID NO: 41623 - DNA, 50 bp, synthetic construct
  source 1..50: mol_type = other DNA
ggccgttcgcggcctcggtccgagccgccggatcgccgccgcgctcggcc

SEQ ID NO: 41624 - DNA, 50 bp, synthetic construct
  source 1..50: mol_type = other DNA
tcataaatagattaaaatggcatttaaaaaccatatgattttctttaatc

SEQ ID NO: 41625 - DNA, 50 bp, synthetic construct
  source 1..50: mol_type = other DNA
tcataaatagattaaaatggtatttaaaaaccatatgattttctttaatc

SEQ ID NO: 41626 - DNA, 50 bp, synthetic construct
  source 1..50: mol_type = other DNA
accgaaccgcacggttgcgccttttcttgtatatcggtgttcggtgtggt

SEQ ID NO: 41627 - DNA, 50 bp, synthetic construct
  source 1..50: mol_type = other DNA
aagtgtgaaacctcggatacgtctgaagattgatgagagaagaaaaaccc

SEQ ID NO: 41628 - DNA, 50 bp, synthetic construct
  source 1..50: mol_type = other DNA
caaacctcatcatttgtgataactttcattattctaaaccctcgatacac

SEQ ID NO: 41629 - DNA, 50 bp, synthetic construct
  source 1..50: mol_type = other DNA
gtggggatgaccacggccatggtgagcatgaaggcgctcgtgagccactg

SEQ ID NO: 41630 - DNA, 50 bp, synthetic construct
  source 1..50: mol_type = other DNA
caaaggaatgacttcgttaaacagatctgttttctatcgttgtatattac

SEQ ID NO: 41631 - DNA, 50 bp, synthetic construct
  source 1..50: mol_type = other DNA
ttggatacggtgactatttttttatttgaaaaaatcggcggcgaatttga

SEQ ID NO: 41632 - DNA, 50 bp, synthetic construct
  source 1..50: mol_type = other DNA
acgagcaaggattcatccgtgtttataataacgggttcatagccgcaact

SEQ ID NO: 41633 - DNA, 50 bp, synthetic construct
  source 1..50: mol_type = other DNA
gttaccatttctttaatatgggggtttcattatatagtgaaaatggttta

SEQ ID NO: 41634 - DNA, 50 bp, synthetic construct
  source 1..50: mol_type = other DNA
ggtggggccgttcatcttcttgaacattcttcgaccagatgggcccggcc

SEQ ID NO: 41635 - DNA, 50 bp, synthetic construct
  source 1..50: mol_type = other DNA
gcgaccgcgacccagaggagggcggcctccccgacgccctgtcaagtacc

SEQ ID NO: 41636 - DNA, 50 bp, synthetic construct
  source 1..50: mol_type = other DNA
ctttaggattaaatggggtaaatctagcttaaatttatctatgtataaaa

SEQ ID NO: 41637 - DNA, 50 bp, synthetic construct
  source 1..50: mol_type = other DNA
tgcctttggttggtggagccaaagggtggaggcgcggagaatcgaactcc

SEQ ID NO: 41638 - DNA, 50 bp, synthetic construct
  source 1..50: mol_type = other DNA
cgctcgtcctttgaatgagttcttccagcacgtcaagggcgtgaccagcg

SEQ ID NO: 41639 - DNA, 50 bp, synthetic construct
  source 1..50: mol_type = other DNA
tccaccagtccgccgaaccagtcgccgcacggagggggcggaccgttgtg

SEQ ID NO: 41640 - DNA, 50 bp, synthetic construct
  source 1..50: mol_type = other DNA
acgctcggtgagttcggcgcgcagcggtcagcgccgacgtcaatcagcga

SEQ ID NO: 41641 - DNA, 50 bp, synthetic construct
  source 1..50: mol_type = other DNA
tctcgatcagcgtgcgtaacgcctcggccgagatgccgagctgctcgtgc

SEQ ID NO: 41642 - DNA, 50 bp, synthetic construct
  source 1..50: mol_type = other DNA
agcgcaccgacgggccgtaggagtgcacaaagggagcccgtttttgcgcc

SEQ ID NO: 41643 - DNA, 50 bp, synthetic construct
  source 1..50: mol_type = other DNA
catcgtcttgctagcagatatcgatattgataaatgctgaaaatgacatg

SEQ ID NO: 41644 - DNA, 50 bp, synthetic construct
  source 1..50: mol_type = other DNA
cgcaggaactccggtctggtctcttatcagactgtacaggtattctgcct

SEQ ID NO: 41645 - DNA, 50 bp, synthetic construct
  source 1..50: mol_type = other DNA
aaaatctcttcagtgcggtgtagattcggacacatagcaagtgattttcg

SEQ ID NO: 41646 - DNA, 50 bp, synthetic construct
  source 1..50: mol_type = other DNA
atcctcatcagggcttatattttctacaaggtctgagcccaggggaggtg

SEQ ID NO: 41647 - DNA, 50 bp, synthetic construct
  source 1..50: mol_type = other DNA
catccactggacagagagcaaatgtacattagacagacggcgcatttggt

SEQ ID NO: 41648 - DNA, 50 bp, synthetic construct
  source 1..50: mol_type = other DNA
gagcgagcaaaacggcgaagacgggagcgggcaatcgccacgcgctgctg

SEQ ID NO: 41649 - DNA, 50 bp, synthetic construct
  source 1..50: mol_type = other DNA
cattatcgccatgatggatacttcgggtgtcattgattttttcgttattt

SEQ ID NO: 41650 - DNA, 50 bp, synthetic construct
  source 1..50: mol_type = other DNA
agatgtatgatatacaaaaaaataaatatttgtttctatatcagattcca

SEQ ID NO: 41651 - DNA, 50 bp, synthetic construct
  source 1..50: mol_type = other DNA
cgttccccaccgccacgcagggacgcgtcagtgggtggcttgagggaccg

SEQ ID NO: 41652 - DNA, 50 bp, synthetic construct
  source 1..50: mol_type = other DNA
cgcctcccgggccgcgcgggcggaaggccgtaaccgcggcccggcaggct

SEQ ID NO: 41653 - DNA, 50 bp, synthetic construct
  source 1..50: mol_type = other DNA
gctacaaagtttagataatctaataagtcaaggttaataaataatgtaat

SEQ ID NO: 41654 - DNA, 50 bp, synthetic construct
  source 1..50: mol_type = other DNA
attcctacaaacggcctgcttgtaattacaaaagaaaaattcgatagaat

SEQ ID NO: 41655 - DNA, 50 bp, synthetic construct
  source 1..50: mol_type = other DNA
ggcgggcgtacaaccgcttgcagttggtatccctcgggtgcccgaaagcc

SEQ ID NO: 41656 - DNA, 50 bp, synthetic construct
  source 1..50: mol_type = other DNA
ttcgactcgccattgaccgctattgcaaggagccccaatgccgagtcaaa

SEQ ID NO: 41657 - DNA, 50 bp, synthetic construct
  source 1..50: mol_type = other DNA
tcgggcgttcgaatcgctccgggtgcatccggacggggatgggtgcccgg

SEQ ID NO: 41658 - DNA, 50 bp, synthetic construct
  source 1..50: mol_type = other DNA
tagcccacctggcctcccaatagacgtctatttcggcgtgtgccgggcct

SEQ ID NO: 41659 - DNA, 50 bp, synthetic construct
  source 1..50: mol_type = other DNA
gaaatccgcaccccgatgaatgcaattgccgtcatcggcatgctcgaact

SEQ ID NO: 41660 - DNA, 50 bp, synthetic construct
  source 1..50: mol_type = other DNA
atatgagccgataatcccgtcattattggttcggctttgatcattaaaga

SEQ ID NO: 41661 - DNA, 50 bp, synthetic construct
  source 1..50: mol_type = other DNA
gcatttcttgatgttctgcaacaaaattgttgcagcatttcttgaatttg

SEQ ID NO: 41662 - DNA, 50 bp, synthetic construct
  source 1..50: mol_type = other DNA
tgtatgcaggatatccactggacagatggtgccttcggctacttcccgtc

SEQ ID NO: 41663 - DNA, 50 bp, synthetic construct
  source 1..50: mol_type = other DNA
ttccagcaaaacgaattacagtactaaaatcacggtcaatttggctcctg

SEQ ID NO: 41664 - DNA, 50 bp, synthetic construct
  source 1..50: mol_type = other DNA
tcatgatgtcttttcttgtacccatttgggaatatgaaaagccaatattt

SEQ ID NO: 41665 - DNA, 50 bp, synthetic construct
  source 1..50: mol_type = other DNA
tagctatgcctattatactaaataatttcttgccctaatttatgtgccta

SEQ ID NO: 41666 - DNA, 50 bp, synthetic construct
  source 1..50: mol_type = other DNA
ctcagtggcgcaggcatctccaccgactccggcattcccgactaccgggg

SEQ ID NO: 41667 - DNA, 50 bp, synthetic construct
  source 1..50: mol_type = other DNA
gcttgtcttggctcttttttacatagaaatgaaaaacagaaaagtttatg

SEQ ID NO: 41668 - DNA, 50 bp, synthetic construct
  source 1..50: mol_type = other DNA
tattcagaatagtattgtagaatgtaagttttctaactagggtctttttt

SEQ ID NO: 41669 - DNA, 50 bp, synthetic construct
  source 1..50: mol_type = other DNA
gtccgcatggaaggcagagggcattgccgcaaaggggattccatgcggtc

SEQ ID NO: 41670 - DNA, 50 bp, synthetic construct
  source 1..50: mol_type = other DNA
tgctcgaggggatcagccgcgggttcacccgcgttgacctgccccggacc

SEQ ID NO: 41671 - DNA, 50 bp, synthetic construct
  source 1..50: mol_type = other DNA
tgtttggaggtgatgaaaaaccccgtgaggtcaagtatcgaatacccaat

SEQ ID NO: 41672 - DNA, 50 bp, synthetic construct
  source 1..50: mol_type = other DNA
aaatatttctccaacaaaaaaggatattgttcttttgcataaccatattg

SEQ ID NO: 41673 - DNA, 50 bp, synthetic construct
  source 1..50: mol_type = other DNA
taccggtgaccagcggtcgcgggacgtcaggacccggcaggtcacatcgg

SEQ ID NO: 41674 - DNA, 50 bp, synthetic construct
  source 1..50: mol_type = other DNA
ataatcaatatttaataaatttggaaccaaaaaagctaacaaggaaatga

SEQ ID NO: 41675 - DNA, 50 bp, synthetic construct
  source 1..50: mol_type = other DNA
ttcaatatgaatcgttcgcagactagactcaaaagaagattattattgaa

SEQ ID NO: 41676 - DNA, 50 bp, synthetic construct
  source 1..50: mol_type = other DNA
ccgatccggaccggggtgccgtcctgagatgattatatcttccggagcgt

SEQ ID NO: 41677 - DNA, 50 bp, synthetic construct
  source 1..50: mol_type = other DNA
cggccccaaacaactgcgatagtgcccacctgcgccgtttcctggggccc

SEQ ID NO: 41678 - DNA, 50 bp, synthetic construct
  source 1..50: mol_type = other DNA
tttgtatgtggtgagcaggttttgtggaaatcctgtatatccgccggcaa

SEQ ID NO: 41679 - DNA, 50 bp, synthetic construct
  source 1..50: mol_type = other DNA
ttcaatttcatccgatttgtatgtagaaataccctgtcggtggtattgtt

SEQ ID NO: 41680 - DNA, 50 bp, synthetic construct
  source 1..50: mol_type = other DNA
ttgcaatttttcttatgatgaattatagtttggaacagcctcctttgcat

SEQ ID NO: 41681 - DNA, 50 bp, synthetic construct
  source 1..50: mol_type = other DNA
tggcggcggcggcctgcgcctgctgccgcaggtgtggcccaccaggttca

SEQ ID NO: 41682 - DNA, 50 bp, synthetic construct
  source 1..50: mol_type = other DNA
ctgtgccgcacgccattcctctcgcgccgggacggcagcgcctggaacgt

SEQ ID NO: 41683 - DNA, 50 bp, synthetic construct
  source 1..50: mol_type = other DNA
gcacgacggcttggccgacccctccgcctacatcgaggaggccgtcgagc

SEQ ID NO: 41684 - DNA, 50 bp, synthetic construct
  source 1..50: mol_type = other DNA
aagcgtccggcaggcccaggagcacgtcgcccccggcgtgcccgacgccg

SEQ ID NO: 41685 - DNA, 50 bp, synthetic construct
  source 1..50: mol_type = other DNA
cccatgcggcaataatccctctgaaaaaatgggcttttcggacgttccag

SEQ ID NO: 41686 - DNA, 50 bp, synthetic construct
  source 1..50: mol_type = other DNA
tttgaaccaatacaaacatattatacccaatatgcagagattgggttgtc

SEQ ID NO: 41687 - DNA, 50 bp, synthetic construct
  source 1..50: mol_type = other DNA
actttgaagaagctttctgtgaacccaattacagagcgattcttcaaaag

SEQ ID NO: 41688 - DNA, 50 bp, synthetic construct
  source 1..50: mol_type = other DNA
cgcgttttgctgcttctggcgctaattaagccctaaagcatcattcgtcg

SEQ ID NO: 41689 - DNA, 50 bp, synthetic construct
  source 1..50: mol_type = other DNA
gctttagggcttaatggagtaaatctcatgcgcctaatggccacaaaaaa

SEQ ID NO: 41690 - DNA, 50 bp, synthetic construct
  source 1..50: mol_type = other DNA
agaatgtcgagggttattgtttgattggttattagttaccgtgacatttg

SEQ ID NO: 41691 - DNA, 50 bp, synthetic construct
  source 1..50: mol_type = other DNA
ttacaattaatactattctaaaagcctttagctggcattattaaatgtag

SEQ ID NO: 41692 - DNA, 50 bp, synthetic construct
  source 1..50: mol_type = other DNA
agtcatgcgtgtaccgtcagcatttaaaggtgattcttacacgcagtaca

SEQ ID NO: 41693 - DNA, 50 bp, synthetic construct
  source 1..50: mol_type = other DNA
aaacaaaaagacaagcgtatgctgttacacatcgtcttctctttttgttg

SEQ ID NO: 41694 - DNA, 50 bp, synthetic construct
  source 1..50: mol_type = other DNA
atactcaattaacttaacttatttataaaaaaggtattttatccacttat

SEQ ID NO: 41695 - DNA, 50 bp, synthetic construct
  source 1..50: mol_type = other DNA
ataaaaagtcctattaccaaaaactaattttttcaaacttgtttttctgt

SEQ ID NO: 41696 - DNA, 50 bp, synthetic construct
  source 1..50: mol_type = other DNA
aatgctcatagataatttgctcctttgccaattctttttctattggactc

SEQ ID NO: 41697 - DNA, 50 bp, synthetic construct
  source 1..50: mol_type = other DNA
ttaccagtatttgttaaaattatttatataaattttaccataatatataa

SEQ ID NO: 41698 - DNA, 50 bp, synthetic construct
  source 1..50: mol_type = other DNA
tgttaccaacagggtgataacaaagctttgtcgtcaccttgttggtgtaa

SEQ ID NO: 41699 - DNA, 50 bp, synthetic construct
  source 1..50: mol_type = other DNA
aaattatttttaaacatccatttttaaaagaagatagccattcgtaattt

SEQ ID NO: 41700 - DNA, 50 bp, synthetic construct
  source 1..50: mol_type = other DNA
ctctctgaaaactctggtatattggccaatacgacaggcttgccatttct

SEQ ID NO: 41701 - DNA, 50 bp, synthetic construct
  source 1..50: mol_type = other DNA
tcaataatcggtgtaactgttgtgtttgtaacggtactaccaatagctgg

SEQ ID NO: 41702 - DNA, 50 bp, synthetic construct
  source 1..50: mol_type = other DNA
ttacaccaacaaggtgacgacaaagctttgtcatcaccctattggcgtca

SEQ ID NO: 41703 - DNA, 50 bp, synthetic construct
  source 1..50: mol_type = other DNA
tatggaaccgttgggaaaatcacaaatatgaaggttttagatggagttta

SEQ ID NO: 41704 - DNA, 50 bp, synthetic construct
  source 1..50: mol_type = other DNA
tttatacatatagaataggtactaattaatatgtattatatgaattgtaa

SEQ ID NO: 41705 - DNA, 50 bp, synthetic construct
  source 1..50: mol_type = other DNA
atgctttagggcttaatggggtaaatataagatattaagcggggcagcgg

SEQ ID NO: 41706 - DNA, 50 bp, synthetic construct
  source 1..50: mol_type = other DNA
atcctgatgagattaatggaactttagagcatcattcgtcgaaacagcca

SEQ ID NO: 41707 - DNA, 50 bp, synthetic construct
  source 1..50: mol_type = other DNA
atttttactcggttgatattatgttaaaagaaacgaaagggattaaaatc

SEQ ID NO: 41708 - DNA, 50 bp, synthetic construct
  source 1..50: mol_type = other DNA
attcaaatgacaaaaaccttacatttttgaaaggtttaaaaaattgctta

SEQ ID NO: 41709 - DNA, 50 bp, synthetic construct
  source 1..50: mol_type = other DNA
agagcgtttcggattaatcgtggagaaccgtatcataagtaatgtattct

SEQ ID NO: 41710 - DNA, 50 bp, synthetic construct
  source 1..50: mol_type = other DNA
aaattttgccgttcctatccggcacttgccgccatccataactgccagct

SEQ ID NO: 41711 - DNA, 50 bp, synthetic construct
  source 1..50: mol_type = other DNA
gggaaacaatctgttacgcgttcatatgcaagcgacaggcatggttaatg

SEQ ID NO: 41712 - DNA, 50 bp, synthetic construct
  source 1..50: mol_type = other DNA
gttttgaacaattgtaaaaagcgccttctctcaatacaattgtaaaaatg

SEQ ID NO: 41713 - DNA, 50 bp, synthetic construct
  source 1..50: mol_type = other DNA
aattgcgaaaacaattgaaaggatgcggtctttccatgtaattctctttt

SEQ ID NO: 41714 - DNA, 50 bp, synthetic construct
  source 1..50: mol_type = other DNA
attatcaaacctggcagtccttgcaaactgatggtgagtgaggggataat

SEQ ID NO: 41715 - DNA, 50 bp, synthetic construct
  source 1..50: mol_type = other DNA
attttctgcatactttcaggactaatcagtcccaaaatcatatcataaaa

SEQ ID NO: 41716 - DNA, 50 bp, synthetic construct
  source 1..50: mol_type = other DNA
ccaactgattttgtcaatcgggaatcaagacgatttaccaaatcatatca

SEQ ID NO: 41717 - DNA, 50 bp, synthetic construct
  source 1..50: mol_type = other DNA
gctaacgagctggtacacctccgcgatgggattcgaacccacgctaccgc

SEQ ID NO: 41718 - DNA, 50 bp, synthetic construct
  source 1..50: mol_type = other DNA
aaaagtggtaaaagtgataaattttcatttttatcacttttaccacttaa

SEQ ID NO: 41719 - DNA, 50 bp, synthetic construct
  source 1..50: mol_type = other DNA
tcaatatcccgatagacatttcccaattgaaactgggatcgggggccaat

SEQ ID NO: 41720 - DNA, 50 bp, synthetic construct
  source 1..50: mol_type = other DNA
aaggaaattgatgacttaaataaacagatgcttaactgcaaaattgaatt

SEQ ID NO: 41721 - DNA, 50 bp, synthetic construct
  source 1..50: mol_type = other DNA
ttctattttccaggtagcatacttaaaattatccttgctataaactatat

SEQ ID NO: 41722 - DNA, 50 bp, synthetic construct
  source 1..50: mol_type = other DNA
aatcgcttcatgcgtattttcaaatatttgaatacgttgtttacccgttt

SEQ ID NO: 41723 - DNA, 50 bp, synthetic construct
  source 1..50: mol_type = other DNA
ccataaggcctttctttttaccgaaattactaaaaagaaatcgccttttt

SEQ ID NO: 41724 - DNA, 50 bp, synthetic construct
  source 1..50: mol_type = other DNA
acagatacatccggcaaacatatccctcgttcccattttgaaacagattt

SEQ ID NO: 41725 - DNA, 50 bp, synthetic construct
  source 1..50: mol_type = other DNA
atggatttagctgtttttccagagacaacacccgcagccagcttgtattt

SEQ ID NO: 41726 - DNA, 50 bp, synthetic construct
  source 1..50: mol_type = other DNA
gaattgaccgcttaaaacggataattttagtcgttttaaatgtggatccc

SEQ ID NO: 41727 - DNA, 50 bp, synthetic construct
  source 1..50: mol_type = other DNA
gcgccggtcaccatgttcttgacgtagtcggcgtggccgggcatgtcgac

SEQ ID NO: 41728 - DNA, 50 bp, synthetic construct
  source 1..50: mol_type = other DNA
caccatctgttccatttggaagccatgtgccacacattgcttgttgatcg

SEQ ID NO: 41729 - DNA, 50 bp, synthetic construct
  source 1..50: mol_type = other DNA
caacacaattacaagttgtgatatgagcgagtcaatagctacctttggat

SEQ ID NO: 41730 - DNA, 50 bp, synthetic construct
  source 1..50: mol_type = other DNA
tctagctttacacctgaaagtcagcaccgacttaaaggtgtagaagtaca

SEQ ID NO: 41731 - DNA, 50 bp, synthetic construct
  source 1..50: mol_type = other DNA
cgatcagctgcagcaggccgccgtcagcggcggcttgcggcaggtctgga

SEQ ID NO: 41732 - DNA, 50 bp, synthetic construct
  source 1..50: mol_type = other DNA
tctaccatacatatggaagtgataataatcacgaccgcacataaagatgt

SEQ ID NO: 41733 - DNA, 50 bp, synthetic construct
  source 1..50: mol_type = other DNA
cgaagggcattggcgcgggatggagctcgatccccggccagtcgccctcg

SEQ ID NO: 41734 - DNA, 50 bp, synthetic construct
  source 1..50: mol_type = other DNA
ccctgggctgcccaaaaaatcaaaatttatatcattagggtgcccgaaaa

SEQ ID NO: 41735 - DNA, 50 bp, synthetic construct
  source 1..50: mol_type = other DNA
gtaaataaaaaaggagagtgaaccaacatcctttctctttttttattttc

SEQ ID NO: 41736 - DNA, 50 bp, synthetic construct
  source 1..50: mol_type = other DNA
tagcctaaataacatttcaaaaatagcttttttctgagtaataaaggatt

SEQ ID NO: 41737 - DNA, 50 bp, synthetic construct
  source 1..50: mol_type = other DNA
ataactattttaaaaaaatacgccaattaaaatttttataagttagaatg

SEQ ID NO: 41738 - DNA, 50 bp, synthetic construct
  source 1..50: mol_type = other DNA
ttccttttcgttaacaacagccttgcagaactaaagcaaaataaatattc

SEQ ID NO: 41739 - DNA, 50 bp, synthetic construct
  source 1..50: mol_type = other DNA
ctaaaattagtctctctgaatattatatttttccataagaagttttttaa

SEQ ID NO: 41740 - DNA, 50 bp, synthetic construct
  source 1..50: mol_type = other DNA
tcttcaagatccaataggaatagatatctttttttattgcatctaaagag

SEQ ID NO: 41741 - DNA, 50 bp, synthetic construct
  source 1..50: mol_type = other DNA
ttgtagaaaagccttataaaatcctaccaagcactaaatcatatctacat

SEQ ID NO: 41742 - DNA, 50 bp, synthetic construct
  source 1..50: mol_type = other DNA
gatcccagcgcggcgatgaatctggtcaccaccttcccggcggatgtggt

SEQ ID NO: 41743 - DNA, 50 bp, synthetic construct
  source 1..50: mol_type = other DNA
aaagctcaccggatatgacatgaaagcaaatttgataaaaaatgggcaaa

SEQ ID NO: 41744 - DNA, 50 bp, synthetic construct
  source 1..50: mol_type = other DNA
gcaagaaacgatcaacggcctcatccccgacgcgatccctctgcccttcc

SEQ ID NO: 41745 - DNA, 50 bp, synthetic construct
  source 1..50: mol_type = other DNA
aacaagccgcttgcatcttcacactcagatgatttccagatcggcgtgca

SEQ ID NO: 41746 - DNA, 50 bp, synthetic construct
  source 1..50: mol_type = other DNA
gcgaggtaaatcaaggggcattgtattcaagggttattgaagtcataatc

SEQ ID NO: 41747 - DNA, 50 bp, synthetic construct
  source 1..50: mol_type = other DNA
ctaggcttttatgagcagagcaacacgtgatgcgtattcggaaataaatc

SEQ ID NO: 41748 - DNA, 50 bp, synthetic construct
  source 1..50: mol_type = other DNA
ttctttattcttgtatatatttcttaagtattatatacttttattcttca

SEQ ID NO: 41749 - DNA, 50 bp, synthetic construct
  source 1..50: mol_type = other DNA
ctgatttatttccaaatacgcatcacatatagaagttgtgggattattaa

SEQ ID NO: 41750 - DNA, 50 bp, synthetic construct
  source 1..50: mol_type = other DNA
tcatttggtttatctttgattccttcgacgagcggaggctgggcaaaaag

SEQ ID NO: 41751 - DNA, 50 bp, synthetic construct
  source 1..50: mol_type = other DNA
ttctttcaatggcccgttgtcaaagctttaaccttagcttttttcaagaa

SEQ ID NO: 41752 - DNA, 50 bp, synthetic construct
  source 1..50: mol_type = other DNA
ccatgtatcaaaatatggaggtaaattggcaaaaatattcatttacattt

SEQ ID NO: 41753 - DNA, 50 bp, synthetic construct
  source 1..50: mol_type = other DNA
aatgtaatgaaaaagaaaataaatttatttatatattaggtacaaacatt

SEQ ID NO: 41754 - DNA, 50 bp, synthetic construct
  source 1..50: mol_type = other DNA
attttcatggagataacctctcatgaggacattgtcatcaagtggaaaat

SEQ ID NO: 41755 - DNA, 50 bp, synthetic construct
  source 1..50: mol_type = other DNA
gactcattgtgcttataagatgttgcaaccaatacaaaaaaacgtgatgc

SEQ ID NO: 41756 - DNA, 50 bp, synthetic construct
  source 1..50: mol_type = other DNA
aagaaagtgcagaccagcgttcttcatgtaagtatggttgtgcttttctt

SEQ ID NO: 41757 - DNA, 50 bp, synthetic construct
  source 1..50: mol_type = other DNA
gtaggattgcacataatgcttacgttggtattcattcaatcaaagaatta

SEQ ID NO: 41758 - DNA, 50 bp, synthetic construct
  source 1..50: mol_type = other DNA
cctgctcttgtttcagttgactatacggaaagaatggaaatatgctttaa

SEQ ID NO: 41759 - DNA, 50 bp, synthetic construct
  source 1..50: mol_type = other DNA
aaaatgggactaaaatttgcggaagattcagcagctacatttcccatacc

SEQ ID NO: 41760 - DNA, 50 bp, synthetic construct
  source 1..50: mol_type = other DNA
gagcatgaaaaaggtcatttcgaatatagatggactgtttgtcctgactt

SEQ ID NO: 41761 - DNA, 50 bp, synthetic construct
  source 1..50: mol_type = other DNA
ttttagcgaactttgtcaatattaatcatcatctccaaagtcttctagga

SEQ ID NO: 41762 - DNA, 50 bp, synthetic construct
  source 1..50: mol_type = other DNA
aatatctctctgaatgctgcgctcatcttcgctagatatggagagaaagt

SEQ ID NO: 41763 - DNA, 50 bp, synthetic construct
  source 1..50: mol_type = other DNA
tatgccaataatggtgacgacagataccgcttacgacagaccctgtcacg

SEQ ID NO: 41764 - DNA, 50 bp, synthetic construct
  source 1..50: mol_type = other DNA
atccacaaggacatgggtgcagataggactacatgggcatggatttaaag

SEQ ID NO: 41765 - DNA, 50 bp, synthetic construct
  source 1..50: mol_type = other DNA
caagatagatgtactcaaccgccaaaagagttttagcttattctattcat

SEQ ID NO: 41766 - DNA, 50 bp, synthetic construct
  source 1..50: mol_type = other DNA
aagataaacctactatttctaagaaattgtagatgctgtatgactatggc

SEQ ID NO: 41767 - DNA, 50 bp, synthetic construct
  source 1..50: mol_type = other DNA
ggtaaattttacgacacagaatgacatcatagtttgtgataaaatttctt

SEQ ID NO: 41768 - DNA, 50 bp, synthetic construct
  source 1..50: mol_type = other DNA
tacccatattatgagtgatttagaaaaaccttaagtaacggctacttatt

SEQ ID NO: 41769 - DNA, 50 bp, synthetic construct
  source 1..50: mol_type = other DNA
tatacgaactatcaattatcgtttggtttggatgcaatgcagcaggtatt

SEQ ID NO: 41770 - DNA, 50 bp, synthetic construct
  source 1..50: mol_type = other DNA
acgtgtcattatataaaaaggatgtgctttattttatggatatgctgtgc

SEQ ID NO: 41771 - DNA, 50 bp, synthetic construct
  source 1..50: mol_type = other DNA
gcgtttaaaatcatgcgaggggaagctgagacatatcacaaataaaacta

SEQ ID NO: 41772 - DNA, 50 bp, synthetic construct
  source 1..50: mol_type = other DNA
cgctgccgcgcgcctgtccgaggagctgcgcgtggagggctacgacatcg

SEQ ID NO: 41773 - DNA, 50 bp, synthetic construct
  source 1..50: mol_type = other DNA
tctgtttgatatagataaccatacgcgagggtttcaacggatagcgaaga

SEQ ID NO: 41774 - DNA, 50 bp, synthetic construct
  source 1..50: mol_type = other DNA
gggttaatgaatgccgcttttgcacttttaacggcggtattcatcgttaa

SEQ ID NO: 41775 - DNA, 50 bp, synthetic construct
  source 1..50: mol_type = other DNA
ttagacattataacctacaggtatttcattagctagtaccttttgtctat

SEQ ID NO: 41776 - DNA, 50 bp, synthetic construct
  source 1..50: mol_type = other DNA
ggggcgatgaccgggatttatttcaagaccaaccacatgcccgtgcgttt

SEQ ID NO: 41777 - DNA, 50 bp, synthetic construct
  source 1..50: mol_type = other DNA
aaccaaggagagatgaatgatatgacttctgcgttcatctctcctgcgtg

SEQ ID NO: 41778 - DNA, 50 bp, synthetic construct
  source 1..50: mol_type = other DNA
ctccacttaaatgttatttttgttcatttaaaatttaatgttaagtggtg

SEQ ID NO: 41779 - DNA, 50 bp, synthetic construct
  source 1..50: mol_type = other DNA
gcgaacttaataactaatactgatactatacacttggttttccagtacgc

SEQ ID NO: 41780 - DNA, 50 bp, synthetic construct
  source 1..50: mol_type = other DNA
ggagactcctgtcccgaaactggacgtccagattaaggataggagtggag

SEQ ID NO: 41781 - DNA, 50 bp, synthetic construct
  source 1..50: mol_type = other DNA
ttgacatgcctggtgttttggacaaacctttaaaaatacaggcattgtca

SEQ ID NO: 41782 - DNA, 50 bp, synthetic construct
  source 1..50: mol_type = other DNA
ctgatcatcgtggtctgttgaaacccagcgaatatgatttggatgatctt

SEQ ID NO: 41783 - DNA, 50 bp, synthetic construct
  source 1..50: mol_type = other DNA
ccacaccacaccatatccgatgttataactactgatgttgcccttgttgg

SEQ ID NO: 41784 - DNA, 50 bp, synthetic construct
  source 1..50: mol_type = other DNA
tgtaacgtttttatgtaaaaggaagtagccccaccaggaatcgaacctgg

SEQ ID NO: 41785 - DNA, 50 bp, synthetic construct
  source 1..50: mol_type = other DNA
tttgcgcgccaacgcgtgaatcggtacctccattaactgtggtgcacatc

SEQ ID NO: 41786 - DNA, 50 bp, synthetic construct
  source 1..50: mol_type = other DNA
cataacttaaaatccgagatcattatagtggcaaacaaacgcacaccgct

SEQ ID NO: 41787 - DNA, 50 bp, synthetic construct
  source 1..50: mol_type = other DNA
ctattttttaatagatagcacaaaatttaaacgtgtctaataaaaatcac

SEQ ID NO: 41788 - DNA, 50 bp, synthetic construct
  source 1..50: mol_type = other DNA
aatgcgtggagaagcgtatcataaattaaccgatacgcagaagcatatca

SEQ ID NO: 41789 - DNA, 50 bp, synthetic construct
  source 1..50: mol_type = other DNA
gatgggaaataaccaaaagagccgtctgtccaatggatgtcttgcataca

SEQ ID NO: 41790 - DNA, 50 bp, synthetic construct
  source 1..50: mol_type = other DNA
attatgaagctatatatgatgatatatatttatagatgaattgatatata

SEQ ID NO: 41791 - DNA, 50 bp, synthetic construct
  source 1..50: mol_type = other DNA
ccggcaacccaacgagagtaattgaacaagagtaaagccgggcatgccat

SEQ ID NO: 41792 - DNA, 50 bp, synthetic construct
  source 1..50: mol_type = other DNA
taccagaaggataatataagttagtactaacttatatatcccagaaggat

SEQ ID NO: 41793 - DNA, 50 bp, synthetic construct
  source 1..50: mol_type = other DNA
ttggtggaaatgtaggttactaaaattttactatccttgattgagatgtt

SEQ ID NO: 41794 - DNA, 50 bp, synthetic construct
  source 1..50: mol_type = other DNA
ccttataaaatttgtcaaaaaaactgctttcgactacacatttactccaa

SEQ ID NO: 41795 - DNA, 50 bp, synthetic construct
  source 1..50: mol_type = other DNA
acctctccactaaacagtattcgacgtctcaaactgctgcttctcggtaa

SEQ ID NO: 41796 - DNA, 50 bp, synthetic construct
  source 1..50: mol_type = other DNA
ccgatcgctcgccttgctgctgcacaacaggctgctatcgcagaaaagaa

SEQ ID NO: 41797 - DNA, 50 bp, synthetic construct
  source 1..50: mol_type = other DNA
ctaccaactcaacgtgtgttgaatacactccacatgtgctgtatgcggga

SEQ ID NO: 41798 - DNA, 50 bp, synthetic construct
  source 1..50: mol_type = other DNA
tgttaaaatcaacttcgcaaccgtctccacatgcgccgtatgcgggaaca

SEQ ID NO: 41799 - DNA, 50 bp, synthetic construct
  source 1..50: mol_type = other DNA
acgaactcttcgttagttggaaacctattaccaactcttcattagttggg

SEQ ID NO: 41800 - DNA, 50 bp, synthetic construct
  source 1..50: mol_type = other DNA
aaccaacattcattttaaccaataatttttatttaaaaagacaattaagg

SEQ ID NO: 41801 - DNA, 50 bp, synthetic construct
  source 1..50: mol_type = other DNA
ctccccgccgagcccctcagcgccgccaggctgtcctcgacggcggtgag

SEQ ID NO: 41802 - DNA, 50 bp, synthetic construct
  source 1..50: mol_type = other DNA
gctgtatttgagatatagatattttctcatcactgtattagttatttcca

SEQ ID NO: 41803 - DNA, 50 bp, synthetic construct
  source 1..50: mol_type = other DNA
attgccgcggcaggatcgcacaatttcttgggcctccaggcacgggcaaa

SEQ ID NO: 41804 - DNA, 50 bp, synthetic construct
  source 1..50: mol_type = other DNA
tcttaccgccaaattactcggcaacattgctttatttgttggccgtatcc

SEQ ID NO: 41805 - DNA, 50 bp, synthetic construct
  source 1..50: mol_type = other DNA
tgaacgaaggctgggcttcgtatcgcaatacgaaggctgggcttcctact

SEQ ID NO: 41806 - DNA, 50 bp, synthetic construct
  source 1..50: mol_type = other DNA
ggttcgactcccctcggctccattataatcctgcctcggctccatcctga

SEQ ID NO: 41807 - DNA, 50 bp, synthetic construct
  source 1..50: mol_type = other DNA
ttaacgtttaatttttgcattacattggagatgtggttccgaactgtttt

SEQ ID NO: 41808 - DNA, 50 bp, synthetic construct
  source 1..50: mol_type = other DNA
atgatacacttataattttaaccagtactttcaaagtagccgagtaccta

SEQ ID NO: 41809 - DNA, 50 bp, synthetic construct
  source 1..50: mol_type = other DNA
caccggaacccactggtcgggcaatgacgcccctccttacactccaactg

SEQ ID NO: 41810 - DNA, 50 bp, synthetic construct
  source 1..50: mol_type = other DNA
gaaagatcttctggcttggaggtaagcttttcgggcctggagttaatgtc

SEQ ID NO: 41811 - DNA, 50 bp, synthetic construct
  source 1..50: mol_type = other DNA
aggtgacccgggcgacggcgacgccggcggaagaaaaatgatcgtcacct

SEQ ID NO: 41812 - DNA, 50 bp, synthetic construct
  source 1..50: mol_type = other DNA
gatgatggctttgaatatcaggggcgaccttcgggttatgagcccgacga

SEQ ID NO: 41813 - DNA, 50 bp, synthetic construct
  source 1..50: mol_type = other DNA
aggtgacccgggcgacggcgacgccggcggaaaaaaaatgatcgtcacct

SEQ ID NO: 41814 - DNA, 50 bp, synthetic construct
  source 1..50: mol_type = other DNA
gcgtgccgccggcggcggctacgaggtcaagtgtaccccggccgttgcgc

SEQ ID NO: 41815 - DNA, 50 bp, synthetic construct
  source 1..50: mol_type = other DNA
ttgtcgccgttgaagcgtatcggcgtgcgcgccgacttcaacggcgtatt

SEQ ID NO: 41816 - DNA, 50 bp, synthetic construct
  source 1..50: mol_type = other DNA
actcgagcctgctaaggtccaaatgcatgccgaccttgccaggcccgacc

SEQ ID NO: 41817 - DNA, 50 bp, synthetic construct
  source 1..50: mol_type = other DNA
atctgttttaagcggtggagaaattaatgaagatggcgatggaggaagaa

SEQ ID NO: 41818 - DNA, 50 bp, synthetic construct
  source 1..50: mol_type = other DNA
tattccgagtaagaatgtcagaaatggtcttcactttcttggccggaata

SEQ ID NO: 41819 - DNA, 50 bp, synthetic construct
  source 1..50: mol_type = other DNA
aaaactccaacccgcctaatatgataaatttatgccacagttcatggaat

SEQ ID NO: 41820 - DNA, 50 bp, synthetic construct
  source 1..50: mol_type = other DNA
gaaaataatggaaagaataataaaaacggtgacaatttgtcaccgtttga

SEQ ID NO: 41821 - DNA, 50 bp, synthetic construct
  source 1..50: mol_type = other DNA
gccgatgaaagggcgaaagaggatgcatctgttactccaccttcggtgcc

SEQ ID NO: 41822 - DNA, 50 bp, synthetic construct
  source 1..50: mol_type = other DNA
atgagagcacaacaacacaggaggaacctcctttttcagcatggacatac

SEQ ID NO: 41823 - DNA, 50 bp, synthetic construct
  source 1..50: mol_type = other DNA
cctgcagctctcgccgggggccgtcccctgcctccgaagcagggctcagg

SEQ ID NO: 41824 - DNA, 50 bp, synthetic construct
  source 1..50: mol_type = other DNA
gcgtggtgaaccgggcggctgtcgaggatcacgcggttaattctgcgctg

SEQ ID NO: 41825 - DNA, 50 bp, synthetic construct
  source 1..50: mol_type = other DNA
gtttatactcttctatttgttttctaaaaaacatataagaaagtatctta

SEQ ID NO: 41826 - DNA, 50 bp, synthetic construct
  source 1..50: mol_type = other DNA
agtattttacaataagcaagtatattaatatagtcctatattaaattaca

SEQ ID NO: 41827 - DNA, 50 bp, synthetic construct
  source 1..50: mol_type = other DNA
tatatttttcattttatgtttttatattatcttttatgtaaaacaatata

SEQ ID NO: 41828 - DNA, 50 bp, synthetic construct
  source 1..50: mol_type = other DNA
aagcggcttttcgttccaaaggcttgcttctttttcagaatcgccacctc

SEQ ID NO: 41829 - DNA, 50 bp, synthetic construct
  source 1..50: mol_type = other DNA
gcggccgcgggcggccatcacatgctgatgatcgggccgccgggcgccgg

SEQ ID NO: 41830 - DNA, 50 bp, synthetic construct
  source 1..50: mol_type = other DNA
tcctcgacgaactgccggagttcgagcgaggtcaatcagttcctcgatct

SEQ ID NO: 41831 - DNA, 50 bp, synthetic construct
  source 1..50: mol_type = other DNA
gccctatgacggccaggtgctggcactccagcacctgcatcttgttgagc

SEQ ID NO: 41832 - DNA, 50 bp, synthetic construct
  source 1..50: mol_type = other DNA
tgcccggcgggccgctgagcaagcaagaacaggttgtgcgcgccggcggc

SEQ ID NO: 41833 - DNA, 50 bp, synthetic construct
  source 1..50: mol_type = other DNA
tcatcggaatcggcagccgtgaaccgttggacggcctccagggcgatcgg

SEQ ID NO: 41834 - DNA, 50 bp, synthetic construct
  source 1..50: mol_type = other DNA
gccggtgccgggcggcccgctgaacaggttatgcgccccggcagcggcaa

SEQ ID NO: 41835 - DNA, 50 bp, synthetic construct
  source 1..50: mol_type = other DNA
cggcggctacgttgaaggccgaaatcttgtgcgggccggggttgccgccg

SEQ ID NO: 41836 - DNA, 50 bp, synthetic construct
  source 1..50: mol_type = other DNA
atgctagctgtcataatggcacgcgcacgatagcctgagtgtaacctgac

SEQ ID NO: 41837 - DNA, 50 bp, synthetic construct
  source 1..50: mol_type = other DNA
aattgtacccaacaccgaccaaatatagttgtctcattaagtacccagtg

SEQ ID NO: 41838 - DNA, 50 bp, synthetic construct
  source 1..50: mol_type = other DNA
gcctctttaagtgaacttgcaaggatgaagtgagcgcgaaaggattcgaa

SEQ ID NO: 41839 - DNA, 50 bp, synthetic construct
  source 1..50: mol_type = other DNA
ggttacaggtttgaatcctgtcgagcctaccagcgagttcacaaacagct

SEQ ID NO: 41840 - DNA, 50 bp, synthetic construct
  source 1..50: mol_type = other DNA
atttatcttgacaaaattagtaaaatttctgcaagtttgtcaagacgttc

SEQ ID NO: 41841 - DNA, 50 bp, synthetic construct
  source 1..50: mol_type = other DNA
ctgtcatttctatctctataccgaatcaaaactggcagcgatctttacat

SEQ ID NO: 41842 - DNA, 50 bp, synthetic construct
  source 1..50: mol_type = other DNA
ctcatcgcctcctaaatatattttataatggcggttattctgacgatgaa

SEQ ID NO: 41843 - DNA, 50 bp, synthetic construct
  source 1..50: mol_type = other DNA
cctccgaaaacaacaataccataaagttttgcatttggaatatactgagc

SEQ ID NO: 41844 - DNA, 50 bp, synthetic construct
  source 1..50: mol_type = other DNA
aacgaacatattcgtcgagattacccatatgttcaccgagcattttcgtt

SEQ ID NO: 41845 - DNA, 50 bp, synthetic construct
  source 1..50: mol_type = other DNA
aatagaaaattaaggaataattaatattttttatcatatcattttatatg

SEQ ID NO: 41846 - DNA, 50 bp, synthetic construct
  source 1..50: mol_type = other DNA
aataaaaattaaacaaaaattatatcagaaatgacgccttttttattgca

SEQ ID NO: 41847 - DNA, 50 bp, synthetic construct
  source 1..50: mol_type = other DNA
tcagatgccgctaatgggcaagcttcgatagcggttaagaagtcacctaa

SEQ ID NO: 41848 - DNA, 50 bp, synthetic construct
  source 1..50: mol_type = other DNA
tcagatgccgctaatgagcaggcttcgatagcggttaaaaagtcacctaa

SEQ ID NO: 41849 - DNA, 50 bp, synthetic construct
  source 1..50: mol_type = other DNA
tcttattctctgattagctgccgtgaccataagtaaatcctcaaataaga

SEQ ID NO: 41850 - DNA, 50 bp, synthetic construct
  source 1..50: mol_type = other DNA
cgtctccttgggttgccctaaaggtttctttaggttgccccaaaaacctg

SEQ ID NO: 41851 - DNA, 50 bp, synthetic construct
  source 1..50: mol_type = other DNA
gatgcatttctcgcctttgtaaaatactacctgtaccagcattattaagc

SEQ ID NO: 41852 - DNA, 50 bp, synthetic construct
  source 1..50: mol_type = other DNA
tttttatggtatcgcaatttttgatattttaatgccataaaggcgcaatg

SEQ ID NO: 41853 - DNA, 50 bp, synthetic construct
  source 1..50: mol_type = other DNA
cttggaagctggactattcagacttaatgctgacttgtcgtagagttcac

SEQ ID NO: 41854 - DNA, 50 bp, synthetic construct
  source 1..50: mol_type = other DNA
ctgtgaaccctaacaagcgcggtactgaccagttgccatccggtttcttg

SEQ ID NO: 41855 - DNA, 50 bp, synthetic construct
  source 1..50: mol_type = other DNA
gccgccgcgggcggccatcacctgctgatgatcggcccgcccggcgccgg

SEQ ID NO: 41856 - DNA, 50 bp, synthetic construct
  source 1..50: mol_type = other DNA
ctacaaagcgcagtctgattttcaattgaaaataaacagaagattatcag

SEQ ID NO: 41857 - DNA, 50 bp, synthetic construct
  source 1..50: mol_type = other DNA
agtaaaaatgttttccaataatttatcccatacaggctaacttttacttg

SEQ ID NO: 41858 - DNA, 50 bp, synthetic construct
  source 1..50: mol_type = other DNA
acatagtttttttaacttactcttgtaggatgaaatccaaaaaaaacact

SEQ ID NO: 41859 - DNA, 50 bp, synthetic construct
  source 1..50: mol_type = other DNA
ggcagctgttcttcttttggatttccatctgataagaatcaattgcttct

SEQ ID NO: 41860 - DNA, 50 bp, synthetic construct
  source 1..50: mol_type = other DNA
gtcagcgcggtcatcgccacgtagatggcagcggcgacctgcgcgcgtcc

SEQ ID NO: 41861 - DNA, 50 bp, synthetic construct
  source 1..50: mol_type = other DNA
tccccaggcagctaggctgttggcgcgctgcccgccacaacgcctgcttg

SEQ ID NO: 41862 - DNA, 50 bp, synthetic construct
  source 1..50: mol_type = other DNA
gcggtggtttctctgtcatcataggatccattgcatcccccatcctatga

SEQ ID NO: 41863 - DNA, 50 bp, synthetic construct
  source 1..50: mol_type = other DNA
gcgggcgaactgtcgctgaccggcgccccggatcctaacagttcgtccgc

SEQ ID NO: 41864 - DNA, 50 bp, synthetic construct
  source 1..50: mol_type = other DNA
ccgtttcgccttagatcatcatgataaaccgaagtggcgcacccgaagag

SEQ ID NO: 41865 - DNA, 50 bp, synthetic construct
  source 1..50: mol_type = other DNA
cgggatttatttcaagaccaacccacctattatacaagaccaaccacatg

SEQ ID NO: 41866 - DNA, 50 bp, synthetic construct
  source 1..50: mol_type = other DNA
gtttcaagcagcgaattgatcttcttgaacttctgcccactgccgcacag

SEQ ID NO: 41867 - DNA, 50 bp, synthetic construct
  source 1..50: mol_type = other DNA
ccttgaactcgctaatatctgcattattgccgactttttctcgcagttct

SEQ ID NO: 41868 - DNA, 50 bp, synthetic construct
  source 1..50: mol_type = other DNA
atagacgttgggttctggtcaaaggacttgtgaattgcttgaacatcaaa

SEQ ID NO: 41869 - DNA, 50 bp, synthetic construct
  source 1..50: mol_type = other DNA
actgtggtttgccaataaaaaacagttgattttttttggtttgataaaaa

SEQ ID NO: 41870 - DNA, 50 bp, synthetic construct
  source 1..50: mol_type = other DNA
aagtaaccaaaggcaccgtctgtctagtctaaattgtcgacaatttgctt

SEQ ID NO: 41871 - DNA, 50 bp, synthetic construct
  source 1..50: mol_type = other DNA
ataaatgaagaattagaacaaaatatccggtgttgggaaatccactttgt

SEQ ID NO: 41872 - DNA, 50 bp, synthetic construct
  source 1..50: mol_type = other DNA
gtacaaccaataatctaaccatttatagttggtttaataataagttccct

SEQ ID NO: 41873 - DNA, 50 bp, synthetic construct
  source 1..50: mol_type = other DNA
ggaagggtattttcttctgctctttatatgtataaaaaaaataaccttct

SEQ ID NO: 41874 - DNA, 50 bp, synthetic construct
  source 1..50: mol_type = other DNA
cccactagactttatcctgttttattctaaacaggataaagtctagtcgg

SEQ ID NO: 41875 - DNA, 50 bp, synthetic construct
  source 1..50: mol_type = other DNA
aagtaatggttgtattagtagcgaattatatactaataatatattgtatt

SEQ ID NO: 41876 - DNA, 50 bp, synthetic construct
  source 1..50: mol_type = other DNA
caaacgagaaaagtaaaagaaatcattgggctatttcaatttcgatgtta

SEQ ID NO: 41877 - DNA, 50 bp, synthetic construct
  source 1..50: mol_type = other DNA
aacttgtggaaaaagaatttacattactgtaaattagattaagccctcct

SEQ ID NO: 41878 - DNA, 50 bp, synthetic construct
  source 1..50: mol_type = other DNA
ttctgccctgttttggagacaggaaaacccttctccaaaacaccgctcac

SEQ ID NO: 41879 - DNA, 50 bp, synthetic construct
  source 1..50: mol_type = other DNA
aatttaaagcatccatcaaagaatgcatctcagcgatgaagagctaaaag

SEQ ID NO: 41880 - DNA, 50 bp, synthetic construct
  source 1..50: mol_type = other DNA
tgatagcccgcaatcttcctccgattgggctttgggatacaagggactca

SEQ ID NO: 41881 - DNA, 50 bp, synthetic construct
  source 1..50: mol_type = other DNA
tgataaggttctccgtaactattttatttatgatacggttcattcttcat

SEQ ID NO: 41882 - DNA, 50 bp, synthetic construct
  source 1..50: mol_type = other DNA
gttcgacacccgtcgcctccaccataaaggtcacgtatcgcctccaccat

SEQ ID NO: 41883 - DNA, 50 bp, synthetic construct
  source 1..50: mol_type = other DNA
ccacatgttgataatgttatatgtctacatataacatactagatatattt

SEQ ID NO: 41884 - DNA, 50 bp, synthetic construct
  source 1..50: mol_type = other DNA
tactcttaacatttttagtttgtccatataattaaaatatttttaaaata

SEQ ID NO: 41885 - DNA, 50 bp, synthetic construct
  source 1..50: mol_type = other DNA
tttgttcattcccttttgagtattagaaaagctccaggaaggagctcaat

SEQ ID NO: 41886 - DNA, 50 bp, synthetic construct
  source 1..50: mol_type = other DNA
atgttcccaaacactcctcatgtggatacatgttgaaactgtagtaaaat

SEQ ID NO: 41887 - DNA, 50 bp, synthetic construct
  source 1..50: mol_type = other DNA
aaacaggattgaacatgttgaatttaaattcactatacacaaaaatggca

SEQ ID NO: 41888 - DNA, 50 bp, synthetic construct
  source 1..50: mol_type = other DNA
tatttgagtttctttagaaaattatatatccgtataaataaaccggcaat

SEQ ID NO: 41889 - DNA, 50 bp, synthetic construct
  source 1..50: mol_type = other DNA
tacataagagaagtttaattcaatatattgagcaaaatttatcgaatgaa

SEQ ID NO: 41890 - DNA, 50 bp, synthetic construct
  source 1..50: mol_type = other DNA
agaaatttcattacattatacatgatcatgcctaacgcaattcatttcct

SEQ ID NO: 41891 - DNA, 50 bp, synthetic construct
  source 1..50: mol_type = other DNA
agattctttgcatcaataaaacttggtagttgcattaaacttgcaaaatt

SEQ ID NO: 41892 - DNA, 50 bp, synthetic construct
  source 1..50: mol_type = other DNA
caagtaaaagttattttgtttgatacatcacctcattaaataattacttc

SEQ ID NO: 41893 - DNA, 50 bp, synthetic construct
  source 1..50: mol_type = other DNA
atgcgttgatgccagtaggatgcccagccttcgttcatgattttcgtttc

SEQ ID NO: 41894 - DNA, 50 bp, synthetic construct
  source 1..50: mol_type = other DNA
agaaggtttttcactggaactagtaagctgttgtggatgaaaagacttct

SEQ ID NO: 41895 - DNA, 50 bp, synthetic construct
  source 1..50: mol_type = other DNA
aaaaatgacaaatgtagggtttaattttctattctattttttatttttgt

SEQ ID NO: 41896 - DNA, 50 bp, synthetic construct
  source 1..50: mol_type = other DNA
cctaagcataaacgtttaatacttcaaatgattatagagcctcgcttagt

SEQ ID NO: 41897 - DNA, 50 bp, synthetic construct
  source 1..50: mol_type = other DNA
agtgggcgtgaccgtggtggccgtgctcggccaccttgctcaccacgacg

SEQ ID NO: 41898 - DNA, 50 bp, synthetic construct
  source 1..50: mol_type = other DNA
tctcgggtttcccacctatccgaccaacctgttcacgaagctgcccgaga

SEQ ID NO: 41899 - DNA, 50 bp, synthetic construct
  source 1..50: mol_type = other DNA
gaggtggcgcagtacaacgtgaaggcacagtacaacgtgaaggccaccgg

SEQ ID NO: 41900 - DNA, 50 bp, synthetic construct
  source 1..50: mol_type = other DNA
agctatatttataacctaattgaaagttccattaaatttataatgtagcc

SEQ ID NO: 41901 - DNA, 50 bp, synthetic construct
  source 1..50: mol_type = other DNA
atactatattattattattattgtttttaaagttaaatctttatttgtac

SEQ ID NO: 41902 - DNA, 50 bp, synthetic construct
  source 1..50: mol_type = other DNA
gttccacgctgctcgagagggcggcaccgccgtcgcgacgaccttgaccg

SEQ ID NO: 41903 - DNA, 50 bp, synthetic construct
  source 1..50: mol_type = other DNA
accgaaaaatcgcagtagaccagttctcttaaaaaccgcttatttccgtg

SEQ ID NO: 41904 - DNA, 50 bp, synthetic construct
  source 1..50: mol_type = other DNA
tgcggtgcgcaggcgaaggtgaggttgtcgatgtcggtgggtccgtcgtg

SEQ ID NO: 41905 - DNA, 50 bp, synthetic construct
  source 1..50: mol_type = other DNA
attttccgtatctttgtatgagtaaatctccctcgaacgatacagaacgt

SEQ ID NO: 41906 - DNA, 50 bp, synthetic construct
  source 1..50: mol_type = other DNA
ttattttttgtttacggtatttctaattgaaaataaaaaacgaaaagtta

SEQ ID NO: 41907 - DNA, 50 bp, synthetic construct
  source 1..50: mol_type = other DNA
catagttcactaaaaggagcaggcgagccgataaaatgcgaaccacaata

SEQ ID NO: 41908 - DNA, 50 bp, synthetic construct
  source 1..50: mol_type = other DNA
ccccggcgccatgcagacggcctgagtccgccacccgttcttggccggac

SEQ ID NO: 41909 - DNA, 50 bp, synthetic construct
  source 1..50: mol_type = other DNA
nnnnnnnnnnnnnnnnnnnnnnnagtgggggggnnnnnnnnnnnnnnnnn

SEQ ID NO: 41910 - DNA, 50 bp, synthetic construct
  source 1..50: mol_type = other DNA
aaaacagtacgcaaccacatctcaaacgcaatgcaaaagctaggagttaa

SEQ ID NO: 41911 - DNA, 50 bp, synthetic construct
  source 1..50: mol_type = other DNA
ttttatttatgatacggttcaccgtacggttctccacgattaatacgaaa

SEQ ID NO: 41912 - DNA, 50 bp, synthetic construct
  source 1..50: mol_type = other DNA
gttcccgcatacgactcacgtagaattcagcataccagtcatgtggagtg

SEQ ID NO: 41913 - DNA, 50 bp, synthetic construct
  source 1..50: mol_type = other DNA
gctaaagcgatatcttcagctggcttgccatttcttaacgtcgctttcgc

SEQ ID NO: 41914 - DNA, 50 bp, synthetic construct
  source 1..50: mol_type = other DNA
tataatcaccacaacactcataaatgtttaagagccaaatggtggtgttt

SEQ ID NO: 41915 - DNA, 50 bp, synthetic construct
  source 1..50: mol_type = other DNA
cctttgaggacaagccgttaacggaagtgcctgctaaaatgtttcaaatt

SEQ ID NO: 41916 - DNA, 50 bp, synthetic construct
  source 1..50: mol_type = other DNA
cggcggaggtcccggccagccattcgagctgcatgccggccgggagtccg

SEQ ID NO: 41917 - DNA, 50 bp, synthetic construct
  source 1..50: mol_type = other DNA
acccttcgccggagaatcccggccgccgcgcccgcctcctggcgagcgcc

SEQ ID NO: 41918 - DNA, 50 bp, synthetic construct
  source 1..50: mol_type = other DNA
aaaaccaaaaggaatgaggtttgctcaaaaaccgaatgaatttcatcttt

SEQ ID NO: 41919 - DNA, 50 bp, synthetic construct
  source 1..50: mol_type = other DNA
aattttatgattctaaaacacaagaacttaatttagaaaaagaaaaatta

SEQ ID NO: 41920 - DNA, 50 bp, synthetic construct
  source 1..50: mol_type = other DNA
gagacgccagacagatcatggcttcgaggcccacgtacatctgggcagcg

SEQ ID NO: 41921 - DNA, 50 bp, synthetic construct
  source 1..50: mol_type = other DNA
gctttttaaatggagaatcaaacatgaagatgattaagattttaggtttg

SEQ ID NO: 41922 - DNA, 50 bp, synthetic construct
  source 1..50: mol_type = other DNA
ggggttggtagatgattcggatgaagaatacttcttcaaagcactacctt

SEQ ID NO: 41923 - DNA, 50 bp, synthetic construct
  source 1..50: mol_type = other DNA
accgatccgggtatacaaccccacgcgctaataagcatcgacgatgccat

SEQ ID NO: 41924 - DNA, 50 bp, synthetic construct
  source 1..50: mol_type = other DNA
atagcaaccgcaaccattggtggtgctgctaacatcaccatcaattcaat

SEQ ID NO: 41925 - DNA, 50 bp, synthetic construct
  source 1..50: mol_type = other DNA
ttattcccaatgacacatcatgtggagtgtgtggctctgctcgtaaaagc

SEQ ID NO: 41926 - DNA, 50 bp, synthetic construct
  source 1..50: mol_type = other DNA
cacaagctcataatcttcatgttttaaaacatgttgtgataaagctaagt

SEQ ID NO: 41927 - DNA, 50 bp, synthetic construct
  source 1..50: mol_type = other DNA
aatatgagccatttctgagccaattaggtttaacaaaagaggagtatatt

SEQ ID NO: 41928 - DNA, 50 bp, synthetic construct
  source 1..50: mol_type = other DNA
taatagcgtgaccaatgaagctaaagttatggctatcggtgacgctccta

SEQ ID NO: 41929 - DNA, 50 bp, synthetic construct
  source 1..50: mol_type = other DNA
gtttcatcaaacttaacaaatatatttatgtttgttcagtataaagaaag

SEQ ID NO: 41930 - DNA, 50 bp, synthetic construct
  source 1..50: mol_type = other DNA
atttttattaaaaatgttaagaagattgtgtggttatcggtatgaaaaat

SEQ ID NO: 41931 - DNA, 50 bp, synthetic construct
  source 1..50: mol_type = other DNA
atagctaagtgccgaataagctaaatcttaaaagttaggatattatcaat

SEQ ID NO: 41932 - DNA, 50 bp, synthetic construct
  source 1..50: mol_type = other DNA
tttttgcggttgaacgctattgccttatgatggtcttgagtttagaaaac

SEQ ID NO: 41933 - DNA, 50 bp, synthetic construct
  source 1..50: mol_type = other DNA
tttgtttcggacttaaaaaatatatacctattctgcatatataaaaaaaa

SEQ ID NO: 41934 - DNA, 50 bp, synthetic construct
  source 1..50: mol_type = other DNA
taaatgcatataaattagaaagaaattaatttctattttatgtatgtttt

SEQ ID NO: 41935 - DNA, 50 bp, synthetic construct
  source 1..50: mol_type = other DNA
tgatggctttgtaaatgcagtaaatatttactagatttcttgagggtgat

SEQ ID NO: 41936 - DNA, 50 bp, synthetic construct
  source 1..50: mol_type = other DNA
agaaaactgaaagaagtaattatataaggatactcttctttactttttgt

SEQ ID NO: 41937 - DNA, 50 bp, synthetic construct
  source 1..50: mol_type = other DNA
ggggcaatgaaagctattaaggaatatttcataaaatttcatattggagc

SEQ ID NO: 41938 - DNA, 50 bp, synthetic construct
  source 1..50: mol_type = other DNA
aatataggcaacgattgaaagtagcttcactttcgataatgctgtacaag

SEQ ID NO: 41939 - DNA, 50 bp, synthetic construct
  source 1..50: mol_type = other DNA
gagaattgtacactcaactatgtttaaggtatcaatgtcttcaaattcag

SEQ ID NO: 41940 - DNA, 50 bp, synthetic construct
  source 1..50: mol_type = other DNA
acgttcatgaaaacagacgcattttaaaaggcgtttattttccagaagta

SEQ ID NO: 41941 - DNA, 50 bp, synthetic construct
  source 1..50: mol_type = other DNA
ttaggatatctaaattaatgattatggaatttttaaacatcttattttat

SEQ ID NO: 41942 - DNA, 50 bp, synthetic construct
  source 1..50: mol_type = other DNA
ttttggggggagtacaaataattaaaaaataatttgtaaagtttaaaatt

SEQ ID NO: 41943 - DNA, 50 bp, synthetic construct
  source 1..50: mol_type = other DNA
tttaagcaagattagagcaaaagaacaaggactatctcatcttggttttg

SEQ ID NO: 41944 - DNA, 50 bp, synthetic construct
  source 1..50: mol_type = other DNA
agcaccaggagttcgaggtggacttaaagacggtaggagtccctgggggg

SEQ ID NO: 41945 - DNA, 50 bp, synthetic construct
  source 1..50: mol_type = other DNA
gtattttgagtattatatttatttttaaataaaatagttaattataatta

SEQ ID NO: 41946 - DNA, 50 bp, synthetic construct
  source 1..50: mol_type = other DNA
taacactaaatacataaaatctaaagtattatttattttatatagaatta

SEQ ID NO: 41947 - DNA, 50 bp, synthetic construct
  source 1..50: mol_type = other DNA
aactccttcgttccttcttttcttccaaagaaactagaaccatgcttccg

SEQ ID NO: 41948 - DNA, 50 bp, synthetic construct
  source 1..50: mol_type = other DNA
taagtcgtctttttgcgttggtaatattcccaacgtgttaaagaatgaga

SEQ ID NO: 41949 - DNA, 50 bp, synthetic construct
  source 1..50: mol_type = other DNA
tccactctattttatataataactatgtcttgcatatgaaaaggagaaaa

SEQ ID NO: 41950 - DNA, 50 bp, synthetic construct
  source 1..50: mol_type = other DNA
tcaatggttaaagaaatatttcaatttaagttttttgatttttgtattga

SEQ ID NO: 41951 - DNA, 50 bp, synthetic construct
  source 1..50: mol_type = other DNA
cttcctcaataaacacgaaaaaattctctttgtcggtttcatatcggaag

SEQ ID NO: 41952 - DNA, 50 bp, synthetic construct
  source 1..50: mol_type = other DNA
caaccgaaaaaaggtcttctgatatttatttgattttaatttttttattg

SEQ ID NO: 41953 - DNA, 50 bp, synthetic construct
  source 1..50: mol_type = other DNA
aatttaattgtaaataaattatgaattctaaattggatgatataaaagga

SEQ ID NO: 41954 - DNA, 50 bp, synthetic construct
  source 1..50: mol_type = other DNA
cgtgcaggaacgccgccgcgtgcgggcgctcgcggccaccgtcctggccc

SEQ ID NO: 41955 - DNA, 50 bp, synthetic construct
  source 1..50: mol_type = other DNA
cattttcgggcttttttgatggtgtcgcagttcttgatgccataaagata

SEQ ID NO: 41956 - DNA, 50 bp, synthetic construct
  source 1..50: mol_type = other DNA
gggtcacttcaagacccaaccagtgggtccctttggtcttgcgctgcggt

SEQ ID NO: 41957 - DNA, 50 bp, synthetic construct
  source 1..50: mol_type = other DNA
gggcaccgcgtcgagtgtgcgtgtcgacacgcacactcgacgcaagtggc

SEQ ID NO: 41958 - DNA, 50 bp, synthetic construct
  source 1..50: mol_type = other DNA
acaccatatataaaaagtgtaatgatcacccctggtttattctattgagc

SEQ ID NO: 41959 - DNA, 50 bp, synthetic construct
  source 1..50: mol_type = other DNA
ataaataataaagataaataataaattttttatttttatatattccttat

SEQ ID NO: 41960 - DNA, 50 bp, synthetic construct
  source 1..50: mol_type = other DNA
cggctggggctaaattgaccgtgataacggtaatgcgcttcgctggaaac

SEQ ID NO: 41961 - DNA, 50 bp, synthetic construct
  source 1..50: mol_type = other DNA
gtcgccgcgtccttgactccttcaccgcgcggcgatttcgacgcggcgcg

SEQ ID NO: 41962 - DNA, 50 bp, synthetic construct
  source 1..50: mol_type = other DNA
ccgttaacttcgacatcgcaagcggccaccagcagcagctcggccaaggc

SEQ ID NO: 41963 - DNA, 50 bp, synthetic construct
  source 1..50: mol_type = other DNA
gacggtgacccgccgcgcgtccagatcacatcgcgcggggcatcatcgcg

SEQ ID NO: 41964 - DNA, 50 bp, synthetic construct
  source 1..50: mol_type = other DNA
ggcgagcagaaagtggtggggctggaaagagtcattggcttcgcgctcaa

SEQ ID NO: 41965 - DNA, 50 bp, synthetic construct
  source 1..50: mol_type = other DNA
catagtggttacgcatgtcgataaacttgataatgtgaagtggcacactg

SEQ ID NO: 41966 - DNA, 50 bp, synthetic construct
  source 1..50: mol_type = other DNA
aaaccaatttgaaaagcaacctaaaaaccttagtatttttaaactcagtc

SEQ ID NO: 41967 - DNA, 50 bp, synthetic construct
  source 1..50: mol_type = other DNA
atgtataaatttattattaacaaaattcttttaattcttctttagataat

SEQ ID NO: 41968 - DNA, 50 bp, synthetic construct
  source 1..50: mol_type = other DNA
cggcaccgaggaatcagtaccaccatggtggtactgaagaattcgcgcat

SEQ ID NO: 41969 - DNA, 50 bp, synthetic construct
  source 1..50: mol_type = other DNA
ttatgaaagcactagaaaataacgggatacactgtctatggccgtcatac

SEQ ID NO: 41970 - DNA, 50 bp, synthetic construct
  source 1..50: mol_type = other DNA
gccggtgttgtcgaacttcttgagatctcttcacgatatgcgccacaagc

SEQ ID NO: 41971 - DNA, 50 bp, synthetic construct
  source 1..50: mol_type = other DNA
attataatctctgcttttttttgtgacccgactggggctcgaacccagga

SEQ ID NO: 41972 - DNA, 50 bp, synthetic construct
  source 1..50: mol_type = other DNA
attatcgctaaatcctttgtttttttagcggtatcatctaaagcaatcct

SEQ ID NO: 41973 - DNA, 50 bp, synthetic construct
  source 1..50: mol_type = other DNA
agtatatctgtaataacactggatatatgtcgttgacaattatattggat

SEQ ID NO: 41974 - DNA, 50 bp, synthetic construct
  source 1..50: mol_type = other DNA
catggcagaagtggagcttatcaatgcatataaagaacatccggatgctg

SEQ ID NO: 41975 - DNA, 50 bp, synthetic construct
  source 1..50: mol_type = other DNA
cgacgcggtcttacacgacgcgaaccccgagcacgccacagaccgcgctg

SEQ ID NO: 41976 - DNA, 50 bp, synthetic construct
  source 1..50: mol_type = other DNA
tcgtggacgacgccgaagggcggcacgcgcggcttcggcggcagccacgg

SEQ ID NO: 41977 - DNA, 50 bp, synthetic construct
  source 1..50: mol_type = other DNA
gggtgccggtgtgcagggcacgggtgcccgtcggctcgtcaccgaactcg

SEQ ID NO: 41978 - DNA, 50 bp, synthetic construct
  source 1..50: mol_type = other DNA
tccaaccggcctcatcgacgagcagaacaaggtccgcggggccgggtgac

SEQ ID NO: 41979 - DNA, 50 bp, synthetic construct
  source 1..50: mol_type = other DNA
atctaccacgtggtctcaatcatgcgcaagattgtcgtgtcgatctcggg

SEQ ID NO: 41980 - DNA, 50 bp, synthetic construct
  source 1..50: mol_type = other DNA
agcaccacagttctctaaacgttaatcatacgtttcagaacatacaattt

SEQ ID NO: 41981 - DNA, 50 bp, synthetic construct
  source 1..50: mol_type = other DNA
gcctatgcctccaagtgtgtggaaaacgaaatcctgatgcatctgcgcgc

SEQ ID NO: 41982 - DNA, 50 bp, synthetic construct
  source 1..50: mol_type = other DNA
agtaatctttctgtcacatccttgtgcaccgtactcttactaatcccaaa

SEQ ID NO: 41983 - DNA, 50 bp, synthetic construct
  source 1..50: mol_type = other DNA
tcatttgtgtgtaacaaaattaaaaaatcaactttcttatctccaaaatc

SEQ ID NO: 41984 - DNA, 50 bp, synthetic construct
  source 1..50: mol_type = other DNA
gcaggcactgctcgactatctgcgcggtcggatagagcagcagtgccttg

SEQ ID NO: 41985 - DNA, 50 bp, synthetic construct
  source 1..50: mol_type = other DNA
gtcgcgaacctagcgtacgggtgtgggcctcgatacgcccgcttcgcggg

SEQ ID NO: 41986 - DNA, 50 bp, synthetic construct
  source 1..50: mol_type = other DNA
agcgacttgtatagatgcggatggatccttcatctgcagcacaaaacgtt

SEQ ID NO: 41987 - DNA, 50 bp, synthetic construct
  source 1..50: mol_type = other DNA
gcgatgtttatataataggacaaatatttcaccatatcttccatcttcat

SEQ ID NO: 41988 - DNA, 50 bp, synthetic construct
  source 1..50: mol_type = other DNA
cgtggggatgaactcggtcaggccgcaacctgcagattcacatcccgatg

SEQ ID NO: 41989 - DNA, 50 bp, synthetic construct
  source 1..50: mol_type = other DNA
ttcgtatactatgggaacattttgatttaagctctcacatatagtatcaa

SEQ ID NO: 41990 - DNA, 50 bp, synthetic construct
  source 1..50: mol_type = other DNA
gacaatttgcgagttttgaacacaaagctgatcagtagcaggaaaaacag

SEQ ID NO: 41991 - DNA, 50 bp, synthetic construct
  source 1..50: mol_type = other DNA
tcggtttgcttacgtgaaagtcctttaggtggtgtatttaaacgtgtctg

SEQ ID NO: 41992 - DNA, 50 bp, synthetic construct
  source 1..50: mol_type = other DNA
ttaggtgactttctaaccgctatcgaagcctgctcattagcggcatctga

SEQ ID NO: 41993 - DNA, 50 bp, synthetic construct
  source 1..50: mol_type = other DNA
tagacacgtttaaatacactacctaaaggaagtccttttaagactggtta

SEQ ID NO: 41994 - DNA, 50 bp, synthetic construct
  source 1..50: mol_type = other DNA
gagtaataagggaaaggaggaatttaatgcaacaacttaaaacaaaacgt

SEQ ID NO: 41995 - DNA, 50 bp, synthetic construct
  source 1..50: mol_type = other DNA
aagacgttaaaattgaattatagtattttatctaactatttttgagaatt

SEQ ID NO: 41996 - DNA, 50 bp, synthetic construct
  source 1..50: mol_type = other DNA
catcatgtcgagactatagcgttgatcaaaagacaacacacgtcgagtgc

SEQ ID NO: 41997 - DNA, 50 bp, synthetic construct
  source 1..50: mol_type = other DNA
tcctttttgatcagtgaatattttactacatatgcgttcatcaaaatata

SEQ ID NO: 41998 - DNA, 50 bp, synthetic construct
  source 1..50: mol_type = other DNA
gctccataccacaaataatgatatttatatcaaacaacgtgagagggacg

SEQ ID NO: 41999 - DNA, 50 bp, synthetic construct
  source 1..50: mol_type = other DNA
ctgccagtgccaagaggtcataaggtctttacttttttctacatacaaat

SEQ ID NO: 42000 - DNA, 50 bp, synthetic construct
  source 1..50: mol_type = other DNA
attcaaaaatttatatatgatatagaaattacataaggagtttttgaaat

SEQ ID NO: 42001 - DNA, 50 bp, synthetic construct
  source 1..50: mol_type = other DNA
gtaagtattgattgactaaacgggagataaataagaaaataaataagaaa

SEQ ID NO: 42002 - DNA, 50 bp, synthetic construct
  source 1..50: mol_type = other DNA
atatccgtaattgacttgatatatatagatatctatgaaattaggctatt

SEQ ID NO: 42003 - DNA, 50 bp, synthetic construct
  source 1..50: mol_type = other DNA
gcgaaataaaccattgccgtgtaaattatcagccatttggtttataatgt

SEQ ID NO: 42004 - DNA, 50 bp, synthetic construct
  source 1..50: mol_type = other DNA
ccattcaaaacaacatagctctaaaattagatatattagtattgataata

SEQ ID NO: 42005 - DNA, 50 bp, synthetic construct
  source 1..50: mol_type = other DNA
ttacttccgacaactgacacaaaataacctttgatcctaatcagaagtag

SEQ ID NO: 42006 - DNA, 50 bp, synthetic construct
  source 1..50: mol_type = other DNA
atggagttttaagattattttttaatttaccgctgttccttccgctccat

SEQ ID NO: 42007 - DNA, 50 bp, synthetic construct
  source 1..50: mol_type = other DNA
acatatttttcgaacaggtcctctcgataaggactgtaggacttttaagc

SEQ ID NO: 42008 - DNA, 50 bp, synthetic construct
  source 1..50: mol_type = other DNA
ctatctctctcctcatatcattgatgccaaaaaggtgcgagagcttttta

SEQ ID NO: 42009 - DNA, 50 bp, synthetic construct
  source 1..50: mol_type = other DNA
ttttactaatcactaattgatggatatatcgttaaggctgccacttaaaa

SEQ ID NO: 42010 - DNA, 50 bp, synthetic construct
  source 1..50: mol_type = other DNA
cattggaaaagcatgaaagaatttgcaaataacgccatagggcagaaaag

SEQ ID NO: 42011 - DNA, 50 bp, synthetic construct
  source 1..50: mol_type = other DNA
acaaaactaccgagcataatggagaaaacccgcagaagaactagtttttt

SEQ ID NO: 42012 - DNA, 50 bp, synthetic construct
  source 1..50: mol_type = other DNA
taattgagctattcttttttctagttatagacgaaaaagaggctcaaaaa

SEQ ID NO: 42013 - DNA, 50 bp, synthetic construct
  source 1..50: mol_type = other DNA
gcttttttgctttctaattgagctatgtgagcatttgaaatgttacaaaa

SEQ ID NO: 42014 - DNA, 50 bp, synthetic construct
  source 1..50: mol_type = other DNA
tgtaaataaaggagatagagtggttattgtaaggtgattttttaccgaac

SEQ ID NO: 42015 - DNA, 50 bp, synthetic construct
  source 1..50: mol_type = other DNA
gcatgtcgaccgtcgagtacgcgaattcgcgtacgccatcggcaccatcg

SEQ ID NO: 42016 - DNA, 50 bp, synthetic construct
  source 1..50: mol_type = other DNA
gcgatcattcttgcggatgaacctaccggagctttggactccaaaaccgg

SEQ ID NO: 42017 - DNA, 50 bp, synthetic construct
  source 1..50: mol_type = other DNA
aaaaaagaaatgatgatatcggtcttgaccgagtggataggttctttttt

SEQ ID NO: 42018 - DNA, 50 bp, synthetic construct
  source 1..50: mol_type = other DNA
tagatgggcgtaaccccgccatcttcggttggcggccccgcgcccgctgc

SEQ ID NO: 42019 - DNA, 50 bp, synthetic construct
  source 1..50: mol_type = other DNA
cctgtaaaatcaacgaaatctggcgggagggattcgaaccctcgatacgg

SEQ ID NO: 42020 - DNA, 50 bp, synthetic construct
  source 1..50: mol_type = other DNA
ttttacaagtgtggtgccccaaggcgaaatggtgcccctggccggactcg

SEQ ID NO: 42021 - DNA, 50 bp, synthetic construct
  source 1..50: mol_type = other DNA
aggtgaaatcacctcggcaacatgcaggtcttacccaagtattgatacct

SEQ ID NO: 42022 - DNA, 50 bp, synthetic construct
  source 1..50: mol_type = other DNA
aatagaggcgacaagcggtggaataatacgcagcggttcaagcaaaatag

SEQ ID NO: 42023 - DNA, 50 bp, synthetic construct
  source 1..50: mol_type = other DNA
tgaatttctttcagggattccaactgattattctccgacagacagattcc

SEQ ID NO: 42024 - DNA, 50 bp, synthetic construct
  source 1..50: mol_type = other DNA
tggaaggtatatgttgtcaactggccccagttttccgcatagtccttcaa

SEQ ID NO: 42025 - DNA, 50 bp, synthetic construct
  source 1..50: mol_type = other DNA
atttctatagaattttggggttcggaagatagctgttgttcagaagaagg

SEQ ID NO: 42026 - DNA, 50 bp, synthetic construct
  source 1..50: mol_type = other DNA
aaggcgcatattataaaagatggaaacagccggtccataatctgcacctt

SEQ ID NO: 42027 - DNA, 50 bp, synthetic construct
  source 1..50: mol_type = other DNA
cgtagatcatacaatccccccgtcttcctgtaaaaaagccgtgatctgct

SEQ ID NO: 42028 - DNA, 50 bp, synthetic construct
  source 1..50: mol_type = other DNA
tcagccgaaccacctcggcctctggtcagcgcagtagcgcaggactctgt

SEQ ID NO: 42029 - DNA, 50 bp, synthetic construct
  source 1..50: mol_type = other DNA
caagtttttgtatttttcactgcaattttggttcaccatccaaaagaact

SEQ ID NO: 42030 - DNA, 50 bp, synthetic construct
  source 1..50: mol_type = other DNA
gcgcccgggcgagcacacgccggcgcgaatcctggtcggcgctcggcttt

SEQ ID NO: 42031 - DNA, 50 bp, synthetic construct
  source 1..50: mol_type = other DNA
aagccttatctgaattaaataaaattttttcatcctttcatctattaagc

SEQ ID NO: 42032 - DNA, 50 bp, synthetic construct
  source 1..50: mol_type = other DNA
attatataaacgactggaaggagtttcctccttccacagtgataatatat

SEQ ID NO: 42033 - DNA, 50 bp, synthetic construct
  source 1..50: mol_type = other DNA
ctgtttttgatagctgttatttttataaacaatacggttatcaaaaagca

SEQ ID NO: 42034 - DNA, 50 bp, synthetic construct
  source 1..50: mol_type = other DNA
ccgctttctcgatgaaaaccggggtgcccgtgtatccaccaacaacgagg

SEQ ID NO: 42035 - DNA, 50 bp, synthetic construct
  source 1..50: mol_type = other DNA
cgtccacaacgggctgcaccgaggcgccctggtgcaggcgggcatcgacc

SEQ ID NO: 42036 - DNA, 50 bp, synthetic construct
  source 1..50: mol_type = other DNA
atccgcttagaatgtacgcaatggaaattttgcgtccaggccaagcacag

SEQ ID NO: 42037 - DNA, 50 bp, synthetic construct
  source 1..50: mol_type = other DNA
caaaaagaaaaagcccaccggagccgctatatcaccaatttttaaatttg

SEQ ID NO: 42038 - DNA, 50 bp, synthetic construct
  source 1..50: mol_type = other DNA
catgtacataagaaagcagcatcataaactactcattcccatgctatcac

SEQ ID NO: 42039 - DNA, 50 bp, synthetic construct
  source 1..50: mol_type = other DNA
gtagggtcaaactccgaaggcggatgaacgccttcgccgccgccgtattt

SEQ ID NO: 42040 - DNA, 50 bp, synthetic construct
  source 1..50: mol_type = other DNA
gggttgtcgcgggatagagtcttcggatcgcctcgccaaggcgcagggtg

SEQ ID NO: 42041 - DNA, 50 bp, synthetic construct
  source 1..50: mol_type = other DNA
aaaatgatgaggtttttgtgaacttggtgtcattaagtgagcgcgaaagg

SEQ ID NO: 42042 - DNA, 50 bp, synthetic construct
  source 1..50: mol_type = other DNA
atttacttgctgccattcctgccgcacagcatggctggcagaaagaacat

SEQ ID NO: 42043 - DNA, 50 bp, synthetic construct
  source 1..50: mol_type = other DNA
aaaatactgcgaaacacaaaaaaggcttttttctcctttcccagtatttt

SEQ ID NO: 42044 - DNA, 50 bp, synthetic construct
  source 1..50: mol_type = other DNA
tgatatagttggtataatagtccacctggccgtttgccgcgtacagttcg

SEQ ID NO: 42045 - DNA, 50 bp, synthetic construct
  source 1..50: mol_type = other DNA
cgtccccgatcagcccactgatcacccgaacgaaggggcaatcgatgacc

SEQ ID NO: 42046 - DNA, 50 bp, synthetic construct
  source 1..50: mol_type = other DNA
cctgttgttttaccggtcatcgtgaaaaagatgagcaggaaaacagctac

SEQ ID NO: 42047 - DNA, 50 bp, synthetic construct
  source 1..50: mol_type = other DNA
aagatggaacgaagcaagagacctatgttcctctaatgtcggcgtctctt

SEQ ID NO: 42048 - DNA, 50 bp, synthetic construct
  source 1..50: mol_type = other DNA
ctcctgaagcgcagccacgacggcttgcagtttttgctgcgctgggcctt

SEQ ID NO: 42049 - DNA, 50 bp, synthetic construct
  source 1..50: mol_type = other DNA
tgcgactattacggaataggggaagcttcgaccttcagctcatactcgct

SEQ ID NO: 42050 - DNA, 50 bp, synthetic construct
  source 1..50: mol_type = other DNA
gtactcccggaaatacgccctcatttggcagggcgtattttcttgactat

SEQ ID NO: 42051 - DNA, 50 bp, synthetic construct
  source 1..50: mol_type = other DNA
cacctgtattatagcagattttctattgtattaatcaaataatacagtag

SEQ ID NO: 42052 - DNA, 50 bp, synthetic construct
  source 1..50: mol_type = other DNA
gtcgctcccggaaaggtcggcatgcagatcgtcggcctgcccgacaaggc

SEQ ID NO: 42053 - DNA, 50 bp, synthetic construct
  source 1..50: mol_type = other DNA
caggtaatgttttgaagaggctgtcttcatccgaatcatctaccaacccc

SEQ ID NO: 42054 - DNA, 50 bp, synthetic construct
  source 1..50: mol_type = other DNA
tggccgccagaacgtaagcggcaagcttgtcgcttacgccagaaccagcc

SEQ ID NO: 42055 - DNA, 50 bp, synthetic construct
  source 1..50: mol_type = other DNA
gacggctaattcaaaccgctaatatattatataattttgctttttgcagg

SEQ ID NO: 42056 - DNA, 50 bp, synthetic construct
  source 1..50: mol_type = other DNA
ccgagaactgccaggaggtgtccgtacggacagcgacgagcagtttacga

SEQ ID NO: 42057 - DNA, 50 bp, synthetic construct
  source 1..50: mol_type = other DNA
ctggtggaagccatgcgccggctggacagccgccgcagcggttacagccc

SEQ ID NO: 42058 - DNA, 50 bp, synthetic construct
  source 1..50: mol_type = other DNA
gagcgctcagtcaaccgcgtcatccttgacagtcgtcctgttcatagcgc

SEQ ID NO: 42059 - DNA, 50 bp, synthetic construct
  source 1..50: mol_type = other DNA
ccaattccactggaacatccggtaattactttgtttgctcccacaagcga

SEQ ID NO: 42060 - DNA, 50 bp, synthetic construct
  source 1..50: mol_type = other DNA
tgttctccatcgcggcaagcaatgtgcggtgctggccgcgtcattttgtt

SEQ ID NO: 42061 - DNA, 50 bp, synthetic construct
  source 1..50: mol_type = other DNA
aatattactgttgataaaatcaaaattttgtatctttctacagtgttatt

SEQ ID NO: 42062 - DNA, 50 bp, synthetic construct
  source 1..50: mol_type = other DNA
cggcgagtccctcatgaagtacaaggcagttgttataaacatcttcaacg

SEQ ID NO: 42063 - DNA, 50 bp, synthetic construct
  source 1..50: mol_type = other DNA
aaatttttcataatcccgggcaaatgcggggattttgttattcgtccttt

SEQ ID NO: 42064 - DNA, 50 bp, synthetic construct
  source 1..50: mol_type = other DNA
gagatgttttcaaacaacggcttgctgaagggacaattacaaaaatctca

SEQ ID NO: 42065 - DNA, 50 bp, synthetic construct
  source 1..50: mol_type = other DNA
atgtggttaccacaggcgctactgtgaggtagcccaatagggccaccacc

SEQ ID NO: 42066 - DNA, 50 bp, synthetic construct
  source 1..50: mol_type = other DNA
cagttaaatagcaataatacacaattttgggtatatggtgggttattctg

SEQ ID NO: 42067 - DNA, 50 bp, synthetic construct
  source 1..50: mol_type = other DNA
gattatcgttttgtctaaaacaccgtagattacccgacaaaaataaaatc

SEQ ID NO: 42068 - DNA, 50 bp, synthetic construct
  source 1..50: mol_type = other DNA
tgcaatggtctggaatcaaatctgttaagtcttgaatttcaacatattcc

SEQ ID NO: 42069 - DNA, 50 bp, synthetic construct
  source 1..50: mol_type = other DNA
ccgaccgacaccgccaaagcctttggcgtaatgctggcggcgctggtggt

SEQ ID NO: 42070 - DNA, 50 bp, synthetic construct
  source 1..50: mol_type = other DNA
cactacgcacggagctgctttttcttcttcaggtcgctctctgcgtagtt

SEQ ID NO: 42071 - DNA, 50 bp, synthetic construct
  source 1..50: mol_type = other DNA
ctggcggcgagtaacaggcggtcgcgccgccggatgttcaagcatgccaa

SEQ ID NO: 42072 - DNA, 50 bp, synthetic construct
  source 1..50: mol_type = other DNA
aatgcattgttgagtttaaaatgaggtttccataaaggctccaattcaat

SEQ ID NO: 42073 - DNA, 50 bp, synthetic construct
  source 1..50: mol_type = other DNA
gggcttcctcataaaactcagccgcaattccacatgcaatgacgaagccc

SEQ ID NO: 42074 - DNA, 50 bp, synthetic construct
  source 1..50: mol_type = other DNA
agagatgaaatattgtcatacgaatgttcgttcatattcgtcgaatctcc

SEQ ID NO: 42075 - DNA, 50 bp, synthetic construct
  source 1..50: mol_type = other DNA
agcttccaatcggcccggaaaggagatcctttccgtgtccagattggaca

SEQ ID NO: 42076 - DNA, 50 bp, synthetic construct
  source 1..50: mol_type = other DNA
gttcaagtcattgatatttaatgatatcttgaatatacaacaataatcgt

SEQ ID NO: 42077 - DNA, 50 bp, synthetic construct
  source 1..50: mol_type = other DNA
acggcaccttcacgatgtaaacacgagtgttttatctgtgaactcaggct

SEQ ID NO: 42078 - DNA, 50 bp, synthetic construct
  source 1..50: mol_type = other DNA
ccattaagtttcgttaaagataattaattataattgatcataaatatcgc

SEQ ID NO: 42079 - DNA, 50 bp, synthetic construct
  source 1..50: mol_type = other DNA
attatcgaagtagtaaccgcgtcaggggcattggttagtaagtcattaat

SEQ ID NO: 42080 - DNA, 50 bp, synthetic construct
  source 1..50: mol_type = other DNA
tactaaaaagcagctttacaaaaagcactttcgaagcttgctcattagcg

SEQ ID NO: 42081 - DNA, 50 bp, synthetic construct
  source 1..50: mol_type = other DNA
atattcaagataatgtgaccttaattttatttttaacattggtggaataa

SEQ ID NO: 42082 - DNA, 50 bp, synthetic construct
  source 1..50: mol_type = other DNA
ggtatcgtgtttttcggaaacgcagctgcttttgcgagaacggtcgtgcc

SEQ ID NO: 42083 - DNA, 50 bp, synthetic construct
  source 1..50: mol_type = other DNA
tgatcctgtatttgattttgtgtccaatatactgcacaaagacaggccgt

SEQ ID NO: 42084 - DNA, 50 bp, synthetic construct
  source 1..50: mol_type = other DNA
tatttttttaatagatagcacaaaatttaaacgtgtctaataaaaatcac

SEQ ID NO: 42085 - DNA, 50 bp, synthetic construct
  source 1..50: mol_type = other DNA
ttaagcttaatgatgaccgtaagacctcttcaaaacattacctgtaccag

SEQ ID NO: 42086 - DNA, 50 bp, synthetic construct
  source 1..50: mol_type = other DNA
tgcgtcggcacagtcctatacgggcacccgattaacgccgcgctgatgta

SEQ ID NO: 42087 - DNA, 50 bp, synthetic construct
  source 1..50: mol_type = other DNA
tgcttagtaatgctggtacaggtagtcttgtactgagctttgaccaaatg

SEQ ID NO: 42088 - DNA, 50 bp, synthetic construct
  source 1..50: mol_type = other DNA
aacgcatcacgtcgagacggtagcacacgtggagtgtgtagtgttgctgg

SEQ ID NO: 42089 - DNA, 50 bp, synthetic construct
  source 1..50: mol_type = other DNA
tgaggaagtccagcaagtccacgccgttcaggaccttctgctgttcctca

SEQ ID NO: 42090 - DNA, 50 bp, synthetic construct
  source 1..50: mol_type = other DNA
cctcctggctgaacgacatggcggaagcgccattgcggccatgcaggagg

SEQ ID NO: 42091 - DNA, 50 bp, synthetic construct
  source 1..50: mol_type = other DNA
cacgcttcggtagggaagcggcggtcgatacgctggtagacgccattcct

SEQ ID NO: 42092 - DNA, 50 bp, synthetic construct
  source 1..50: mol_type = other DNA
aatattttagcacaaatacctacactccatgtcttttatggtaaaaagcc

SEQ ID NO: 42093 - DNA, 50 bp, synthetic construct
  source 1..50: mol_type = other DNA
ggaatcgacttgatatatgatggtttgccatcattatcgaagtcgccggc

SEQ ID NO: 42094 - DNA, 50 bp, synthetic construct
  source 1..50: mol_type = other DNA
cgcagcgaaagctggacagaagaaattgcctctgtggggcttactatgca

SEQ ID NO: 42095 - DNA, 50 bp, synthetic construct
  source 1..50: mol_type = other DNA
tattcttcaatcctcatttctcgaattctggaaatgatataatcaatttg

SEQ ID NO: 42096 - DNA, 50 bp, synthetic construct
  source 1..50: mol_type = other DNA
tttgaaccctaatttttttagtcgtttcacaaatttaacaaatctttcaa

SEQ ID NO: 42097 - DNA, 50 bp, synthetic construct
  source 1..50: mol_type = other DNA
gcttccgatttaagattgtctgacagctctgtgaatcaagaataaaccgc

SEQ ID NO: 42098 - DNA, 50 bp, synthetic construct
  source 1..50: mol_type = other DNA
cgtatctttttctgatctgccagccagaaacagaaacagaaacagaaaca

SEQ ID NO: 42099 - DNA, 50 bp, synthetic construct
  source 1..50: mol_type = other DNA
aaattgatacaattatgaccaaaaattcttgggcatgtcagtaacaagga

SEQ ID NO: 42100 - DNA, 50 bp, synthetic construct
  source 1..50: mol_type = other DNA
cccggaaatgaaagaaaaggcaagacattccgtccacacccctttaaggt

SEQ ID NO: 42101 - DNA, 50 bp, synthetic construct
  source 1..50: mol_type = other DNA
aaatcctctcagaattcgatacagcggaagatcgaatcctgaacgtctcg

SEQ ID NO: 42102 - DNA, 50 bp, synthetic construct
  source 1..50: mol_type = other DNA
cggagtttgagcctactttgggtacaaatggaacgcaggagcagttcgca

SEQ ID NO: 42103 - DNA, 50 bp, synthetic construct
  source 1..50: mol_type = other DNA
tcctggaacacgcggcggatgatgcgccggatacgccagagtatccacag

SEQ ID NO: 42104 - DNA, 50 bp, synthetic construct
  source 1..50: mol_type = other DNA
caggaggttcggctgtccctctttacaaaactggattttcgtggtatagt

SEQ ID NO: 42105 - DNA, 50 bp, synthetic construct
  source 1..50: mol_type = other DNA
tccaataggttatcaatgatattccgttttctcattgataacctgttggg

SEQ ID NO: 42106 - DNA, 50 bp, synthetic construct
  source 1..50: mol_type = other DNA
cgccgcgtgtaccttcctcgcgagctctctacgcggcggaaatcgggggg

SEQ ID NO: 42107 - DNA, 50 bp, synthetic construct
  source 1..50: mol_type = other DNA
tttgacgatattatgttaggtcaatattatcacaataaaatcttcctagg

SEQ ID NO: 42108 - DNA, 50 bp, synthetic construct
  source 1..50: mol_type = other DNA
acggccgcaatgccctgaatccagcgcttgttttgggtccgaaaagcgta

SEQ ID NO: 42109 - DNA, 50 bp, synthetic construct
  source 1..50: mol_type = other DNA
aatgcctgtatccaaatacctctaaataaaggtttttagatacatgagct

SEQ ID NO: 42110 - DNA, 50 bp, synthetic construct
  source 1..50: mol_type = other DNA
ttgtaatcgtatccggaagttcatcaattctgattcataatgtgttacca

SEQ ID NO: 42111 - DNA, 50 bp, synthetic construct
  source 1..50: mol_type = other DNA
aattaacttgcttagtgggtataccagtaattattgtaaggcagtttttg

SEQ ID NO: 42112 - DNA, 50 bp, synthetic construct
  source 1..50: mol_type = other DNA
cttatctttgtcaataatggcttttccttttcatcattgtcattagccca

SEQ ID NO: 42113 - DNA, 50 bp, synthetic construct
  source 1..50: mol_type = other DNA
caaccgtctcaacatgtatcggtatctacatgcacactcatcggaaacat

SEQ ID NO: 42114 - DNA, 50 bp, synthetic construct
  source 1..50: mol_type = other DNA
aaaaaccaacccagttgatgttcagaagcgcatcaccgagaagggccgat

SEQ ID NO: 42115 - DNA, 50 bp, synthetic construct
  source 1..50: mol_type = other DNA
tcaactatcagaaattgggaaaagatgagccaggacgagctggcagttat

SEQ ID NO: 42116 - DNA, 50 bp, synthetic construct
  source 1..50: mol_type = other DNA
tagaatgtgttaaaaactcatattatatcagatgttttaaaaacagtcta

SEQ ID NO: 42117 - DNA, 50 bp, synthetic construct
  source 1..50: mol_type = other DNA
gcgcgttattatgccggcaccggcattcggctgacaattaaataacgtgc

SEQ ID NO: 42118 - DNA, 50 bp, synthetic construct
  source 1..50: mol_type = other DNA
ggtccagcagcggtccggaaatgcgatgttttcgcagtcgttggtggacc

SEQ ID NO: 42119 - DNA, 50 bp, synthetic construct
  source 1..50: mol_type = other DNA
gaacggccgattgcgtcgataaaatattttacctgttagatcagccctga

SEQ ID NO: 42120 - DNA, 50 bp, synthetic construct
  source 1..50: mol_type = other DNA
aggtcctgggttcgaatcccagtgggagttgtactgacgccccagttact

SEQ ID NO: 42121 - DNA, 50 bp, synthetic construct
  source 1..50: mol_type = other DNA
cacctcgggccgggcgctggcgtaggtcatcgctccccaggccctggatg

SEQ ID NO: 42122 - DNA, 50 bp, synthetic construct
  source 1..50: mol_type = other DNA
aacacggcttcgtcatcgtcgcgccagaccgaagaagacgaagccgttcc

SEQ ID NO: 42123 - DNA, 50 bp, synthetic construct
  source 1..50: mol_type = other DNA
aacacggcttcgtcatcgtcgcgccagaccgaaaaagacgaagccgttcc

SEQ ID NO: 42124 - DNA, 50 bp, synthetic construct
  source 1..50: mol_type = other DNA
atgtacgccacgcttgaagcagcgtacgctggaagaagccattgacgcag

SEQ ID NO: 42125 - DNA, 50 bp, synthetic construct
  source 1..50: mol_type = other DNA
gcgcgttcgagccgcgttagccacccatgcgtgaccccattcgaaagccc

SEQ ID NO: 42126 - DNA, 50 bp, synthetic construct
  source 1..50: mol_type = other DNA
gcggatcgatctgaggcgaagcgagatcggtgtgccacaccacgatcccg

SEQ ID NO: 42127 - DNA, 50 bp, synthetic construct
  source 1..50: mol_type = other DNA
tttgttttctttgaaaatcgacatttataaggatttttaaagaattgata

SEQ ID NO: 42128 - DNA, 50 bp, synthetic construct
  source 1..50: mol_type = other DNA
catggcgctcctggtctactcgatcgccgatgtaccgaagggctgcactc

SEQ ID NO: 42129 - DNA, 50 bp, synthetic construct
  source 1..50: mol_type = other DNA
tttattcagaacatggaatacgaaggcgggtcttcttttttctgcataaa

SEQ ID NO: 42130 - DNA, 50 bp, synthetic construct
  source 1..50: mol_type = other DNA
aaagaaaatttagtttcaggtgttgtctctggcaaaactttagagtatag

SEQ ID NO: 42131 - DNA, 50 bp, synthetic construct
  source 1..50: mol_type = other DNA
gtggttgcgagcatggttggctatgtatagcctagcatgtctgcatctac

SEQ ID NO: 42132 - DNA, 50 bp, synthetic construct
  source 1..50: mol_type = other DNA
caccgcggcttcgagaccgtgacctacataacgagcttgagggaaagctt

SEQ ID NO: 42133 - DNA, 50 bp, synthetic construct
  source 1..50: mol_type = other DNA
tttatgatgagagattccattcttgtctcaaaaggtaatatcttttgaaa

SEQ ID NO: 42134 - DNA, 50 bp, synthetic construct
  source 1..50: mol_type = other DNA
cttgattcataaccgatttataaaatgggtacaagaaaagacatcatgag

SEQ ID NO: 42135 - DNA, 50 bp, synthetic construct
  source 1..50: mol_type = other DNA
cagactttagcaactacaaacacaaatgtgcaatgatgcacctaaatcat

SEQ ID NO: 42136 - DNA, 50 bp, synthetic construct
  source 1..50: mol_type = other DNA
ctcatccattctttgttttgagttatataactcgtgtaaatatggacata

SEQ ID NO: 42137 - DNA, 50 bp, synthetic construct
  source 1..50: mol_type = other DNA
taatagtattatttgtactatcactaaatcaaaatgttcccatagtatac

SEQ ID NO: 42138 - DNA, 50 bp, synthetic construct
  source 1..50: mol_type = other DNA
ttaaactccgatactttggacgtatttgtcgtgcattttccgtcccgttc

SEQ ID NO: 42139 - DNA, 50 bp, synthetic construct
  source 1..50: mol_type = other DNA
aatcccaaagattcgcttgggattaatatcgaaatcgcatcttggatctt

SEQ ID NO: 42140 - DNA, 50 bp, synthetic construct
  source 1..50: mol_type = other DNA
gaaaggctctggtggaggggattctggggtgcccggtggtggtggccgtc

SEQ ID NO: 42141 - DNA, 50 bp, synthetic construct
  source 1..50: mol_type = other DNA
ttctgtaacagagcgctttacgcaggagattgcagcgagttgccacagaa

SEQ ID NO: 42142 - DNA, 50 bp, synthetic construct
  source 1..50: mol_type = other DNA
aagtggtaaggcaagggtctgcaaaaacacaactccgccggaactctctg

SEQ ID NO: 42143 - DNA, 50 bp, synthetic construct
  source 1..50: mol_type = other DNA
atttttcttgcacttgctcaaacaagagagagaagaagtaaatggaatta

SEQ ID NO: 42144 - DNA, 50 bp, synthetic construct
  source 1..50: mol_type = other DNA
cgccgcctggagtcgcaggagggcatgcccacccgcccctccgcgcgcga

SEQ ID NO: 42145 - DNA, 50 bp, synthetic construct
  source 1..50: mol_type = other DNA
gtcgcgacggcgtgcagagattctgcctcggctactcacgccgcaacgac

SEQ ID NO: 42146 - DNA, 50 bp, synthetic construct
  source 1..50: mol_type = other DNA
ccttcggcacgctggtatcgggctgtctatttctcccagcttccccaccc

SEQ ID NO: 42147 - DNA, 50 bp, synthetic construct
  source 1..50: mol_type = other DNA
gacagcaaggtcctcgtcatcgacagttcggcgccgaggtcgctggtcgg

SEQ ID NO: 42148 - DNA, 50 bp, synthetic construct
  source 1..50: mol_type = other DNA
atctttagaaaagaaaaccaaacattgttttgctttatttttctgtgctt

SEQ ID NO: 42149 - DNA, 50 bp, synthetic construct
  source 1..50: mol_type = other DNA
gtgtacgggggtatgggtgccagatatcgagcaagaatatccccaggcac

SEQ ID NO: 42150 - DNA, 50 bp, synthetic construct
  source 1..50: mol_type = other DNA
ctgaatcgacaaggtttttcggacagccaagggaaacaaagccgattttc

SEQ ID NO: 42151 - DNA, 50 bp, synthetic construct
  source 1..50: mol_type = other DNA
aaaacagtaaaatacaatgtttcctctcaataagtgcccttcttgttagg

SEQ ID NO: 42152 - DNA, 50 bp, synthetic construct
  source 1..50: mol_type = other DNA
cgtttctcaagtaaacttacacactccacgtgatgcgtctggggaaataa

SEQ ID NO: 42153 - DNA, 50 bp, synthetic construct
  source 1..50: mol_type = other DNA
tatttacacgagttatatccttcatatcttgtttaaaattaaggtaaaat

SEQ ID NO: 42154 - DNA, 50 bp, synthetic construct
  source 1..50: mol_type = other DNA
cttttgaacaagcagaatacatttataatttgaatcagctattcaaaaat

SEQ ID NO: 42155 - DNA, 50 bp, synthetic construct
  source 1..50: mol_type = other DNA
cggtaccgatgccaacgcccctggtccagatcctgctggcggagccacgc

SEQ ID NO: 42156 - DNA, 50 bp, synthetic construct
  source 1..50: mol_type = other DNA
gaggatggcatgtccacggtcgaatacgccatcgggactatcgcggccgc

SEQ ID NO: 42157 - DNA, 50 bp, synthetic construct
  source 1..50: mol_type = other DNA
gcgacgtggccggtggccttcacgttgtactgcgccacctcgatgttgcc

SEQ ID NO: 42158 - DNA, 50 bp, synthetic construct
  source 1..50: mol_type = other DNA
ggccgccagatcgcacgcgaggagttcggctatttggcgatctggagacc

SEQ ID NO: 42159 - DNA, 50 bp, synthetic construct
  source 1..50: mol_type = other DNA
atcacacatccgactctccgtatagcgtagcgctggttgaggtagcgcat

SEQ ID NO: 42160 - DNA, 50 bp, synthetic construct
  source 1..50: mol_type = other DNA
cagcagaaatacctgcggataccgattactatgtgccggacttgaagctg

SEQ ID NO: 42161 - DNA, 50 bp, synthetic construct
  source 1..50: mol_type = other DNA
agtccagaccgttgctttcatcatggatgaggaaactgttttgctgaact

SEQ ID NO: 42162 - DNA, 50 bp, synthetic construct
  source 1..50: mol_type = other DNA
atggtgcaggaaatattaacgatttcaaaccacttgtttctttataccgc

SEQ ID NO: 42163 - DNA, 50 bp, synthetic construct
  source 1..50: mol_type = other DNA
agcgaagccctgttcaacattctggagaaaatgcggaattgaggttggaa

SEQ ID NO: 42164 - DNA, 50 bp, synthetic construct
  source 1..50: mol_type = other DNA
tccgaaatatcacatttgataatatataaacccaactttgttatttcacc

SEQ ID NO: 42165 - DNA, 50 bp, synthetic construct
  source 1..50: mol_type = other DNA
ggcgaaggacaacgtgcagcgcgtgttctgggtgcagagtggtttggaat

SEQ ID NO: 42166 - DNA, 50 bp, synthetic construct
  source 1..50: mol_type = other DNA
gtccgacccggcgatgattgcttttggcgtcgatcgtcgcggggtcgttg

SEQ ID NO: 42167 - DNA, 50 bp, synthetic construct
  source 1..50: mol_type = other DNA
ccaggagcgcgtccagctccatcggccggtggccctgctggagcaggggg

SEQ ID NO: 42168 - DNA, 50 bp, synthetic construct
  source 1..50: mol_type = other DNA
gtaaatataaattcaaaataaatttattattataaatattttaacttttc

SEQ ID NO: 42169 - DNA, 50 bp, synthetic construct
  source 1..50: mol_type = other DNA
ttgcattgcgtttgagatgcgtagcactacacatcacatttgagatgtgg

SEQ ID NO: 42170 - DNA, 50 bp, synthetic construct
  source 1..50: mol_type = other DNA
aaaagaaaaatttagaaacgaaaaaacctttcttttactttttttgattt

SEQ ID NO: 42171 - DNA, 50 bp, synthetic construct
  source 1..50: mol_type = other DNA
cttaacgctaaattttaaatgtaaaattacttattataattcccgttaat

SEQ ID NO: 42172 - DNA, 50 bp, synthetic construct
  source 1..50: mol_type = other DNA
atttcggctttggtggtttaggaaaaccctaaagcatcattcgtcgaaac

SEQ ID NO: 42173 - DNA, 50 bp, synthetic construct
  source 1..50: mol_type = other DNA
aatataattattctcttctaaactatagattacctttcaaaaatgtaagg

SEQ ID NO: 42174 - DNA, 50 bp, synthetic construct
  source 1..50: mol_type = other DNA
gaaaataaccttctctctttttaaatgaatatagaagtgctgttttttta

SEQ ID NO: 42175 - DNA, 50 bp, synthetic construct
  source 1..50: mol_type = other DNA
ttttttgttgccattaggcgcatgagatttaccccattaagccctaaagc

SEQ ID NO: 42176 - DNA, 50 bp, synthetic construct
  source 1..50: mol_type = other DNA
tttattcagtaagacattatacgattagtacctattctatatgtataaaa

SEQ ID NO: 42177 - DNA, 50 bp, synthetic construct
  source 1..50: mol_type = other DNA
ttttttgttgccattaggcgcatgagatttactccattcagccctaaagc

SEQ ID NO: 42178 - DNA, 50 bp, synthetic construct
  source 1..50: mol_type = other DNA
cgaggtttttcgggcaccctaatgatttttcgggcagccgagggagacaa

SEQ ID NO: 42179 - DNA, 50 bp, synthetic construct
  source 1..50: mol_type = other DNA
tttattgtacttacctaactttcttaaaaaacaccagtaagtacaatcag

SEQ ID NO: 42180 - DNA, 50 bp, synthetic construct
  source 1..50: mol_type = other DNA
aatagtggggctggctgtcggaaacgccaagtacagccagcacctctatg

SEQ ID NO: 42181 - DNA, 50 bp, synthetic construct
  source 1..50: mol_type = other DNA
cggcatcctttggtgaaaccgtcacgccacgccatcgaggtggcatggga

SEQ ID NO: 42182 - DNA, 50 bp, synthetic construct
  source 1..50: mol_type = other DNA
cgacctgccggaggacgccgacggcgcggtcgcagtgaactcccgcttca

SEQ ID NO: 42183 - DNA, 50 bp, synthetic construct
  source 1..50: mol_type = other DNA
ggtgaagatattataaaataattgtttcatttttatatatcatcttccct

SEQ ID NO: 42184 - DNA, 50 bp, synthetic construct
  source 1..50: mol_type = other DNA
tgataaaaatgaaacgaaattataaatatttttgaaaaacactaatatga

SEQ ID NO: 42185 - DNA, 50 bp, synthetic construct
  source 1..50: mol_type = other DNA
gagcaaatgctctgctgtatgcatagatatgcatcggtggatattcttgt

SEQ ID NO: 42186 - DNA, 50 bp, synthetic construct
  source 1..50: mol_type = other DNA
cgcagcgtcagcagacagacggtttccacatggctggtgtgggggaacat

SEQ ID NO: 42187 - DNA, 50 bp, synthetic construct
  source 1..50: mol_type = other DNA
aatatccagttgggcatagggatcttgttccctacacccccctctctact

SEQ ID NO: 42188 - DNA, 50 bp, synthetic construct
  source 1..50: mol_type = other DNA
gtaaatctactttattttactttttaacaacttaacattttgtcagttgt

SEQ ID NO: 42189 - DNA, 50 bp, synthetic construct
  source 1..50: mol_type = other DNA
aataaatttaataaaactattgactagcttgtttatttagattatttagt

SEQ ID NO: 42190 - DNA, 50 bp, synthetic construct
  source 1..50: mol_type = other DNA
cgcaaagacgtttttgtgtaccatctatggtatcaaccgctgtttcgctg

SEQ ID NO: 42191 - DNA, 50 bp, synthetic construct
  source 1..50: mol_type = other DNA
tctatcataatataatcctaacatgctaaaaaggcttatattccgcctat

SEQ ID NO: 42192 - DNA, 50 bp, synthetic construct
  source 1..50: mol_type = other DNA
acaaatttaaataaagtttaatatgaataataaaatgaataattctttgt

SEQ ID NO: 42193 - DNA, 50 bp, synthetic construct
  source 1..50: mol_type = other DNA
agcgcaagaatttaatcgcgccgcattgggctggatgccttctgtgggct

SEQ ID NO: 42194 - DNA, 50 bp, synthetic construct
  source 1..50: mol_type = other DNA
cgggaatggtgtccgtcgagtacgcgattacgcgactgtggccatacccg

SEQ ID NO: 42195 - DNA, 50 bp, synthetic construct
  source 1..50: mol_type = other DNA
gttcgcaaccacatctcaaatgtgatctcaaacgcaatgcaaaagctagg

SEQ ID NO: 42196 - DNA, 50 bp, synthetic construct
  source 1..50: mol_type = other DNA
cctgccgagggcaccaaagtagtcaggcgcacttttacgcagcgcgctca

SEQ ID NO: 42197 - DNA, 50 bp, synthetic construct
  source 1..50: mol_type = other DNA
agctttgacggacaggcaaagtttataaacttggtccagccgcagttaag

SEQ ID NO: 42198 - DNA, 50 bp, synthetic construct
  source 1..50: mol_type = other DNA
tctccaaatatacatctttaacattcgtgttctagtttcgtattttcatt

SEQ ID NO: 42199 - DNA, 50 bp, synthetic construct
  source 1..50: mol_type = other DNA
aattgtggttggacaaagtttatgtacataaactttgcctgcccatcaaa

SEQ ID NO: 42200 - DNA, 50 bp, synthetic construct
  source 1..50: mol_type = other DNA
atattaaaattggcagaattattactaaaaaatatccccaatattgtgtt

SEQ ID NO: 42201 - DNA, 50 bp, synthetic construct
  source 1..50: mol_type = other DNA
actccaaatgcaaagatcgcccagttcatcattctccttttttacacttg

SEQ ID NO: 42202 - DNA, 50 bp, synthetic construct
  source 1..50: mol_type = other DNA
gattgagcgacagatgcgttctttgaattgaaatcacgaatccatgacaa

SEQ ID NO: 42203 - DNA, 50 bp, synthetic construct
  source 1..50: mol_type = other DNA
accatgacaaacaaacgcctttttattcagaggtttttgtttggctaatt

SEQ ID NO: 42204 - DNA, 50 bp, synthetic construct
  source 1..50: mol_type = other DNA
aaatggcgatcagagcgtagaggcgaacatctatattctcgtcggaatta

SEQ ID NO: 42205 - DNA, 50 bp, synthetic construct
  source 1..50: mol_type = other DNA
atgattttgtttcgatctgcgggcgagattgaagaaatcggcagaatgat

SEQ ID NO: 42206 - DNA, 50 bp, synthetic construct
  source 1..50: mol_type = other DNA
tcgtcgacctcgacgacgaggacccgggcacggggtgtcgatcggcgtcg

SEQ ID NO: 42207 - DNA, 50 bp, synthetic construct
  source 1..50: mol_type = other DNA
gtgatacgcctcgccaagttgctgttcgacaaccagaacgtgcgcatctt

SEQ ID NO: 42208 - DNA, 50 bp, synthetic construct
  source 1..50: mol_type = other DNA
aagcactcttgagcactaaggatcattttttatgcccaccaagagattaa

SEQ ID NO: 42209 - DNA, 50 bp, synthetic construct
  source 1..50: mol_type = other DNA
tcatgaccacaatgcccaaaccaaatctgctttgccactttcagtctcct

SEQ ID NO: 42210 - DNA, 50 bp, synthetic construct
  source 1..50: mol_type = other DNA
aggcgctgcgtcagccgctggagtcgatggcagcgcgtcggcttgcgcgg

SEQ ID NO: 42211 - DNA, 50 bp, synthetic construct
  source 1..50: mol_type = other DNA
atcgctgagccgcgtgcccggcgtgcattcacttcccgaagctctaatac

SEQ ID NO: 42212 - DNA, 50 bp, synthetic construct
  source 1..50: mol_type = other DNA
gaaatccgcaccccgatgaatgcaattgcggtgatcggcatgctggagct

SEQ ID NO: 42213 - DNA, 50 bp, synthetic construct
  source 1..50: mol_type = other DNA
ctcacgccttgcgctttcgtctaatcgacacagcaagcagcgccgacagc

SEQ ID NO: 42214 - DNA, 50 bp, synthetic construct
  source 1..50: mol_type = other DNA
cagactcggaatgacccgatacaactttgtcgtcaccttgttggtgtaat

SEQ ID NO: 42215 - DNA, 50 bp, synthetic construct
  source 1..50: mol_type = other DNA
ttacaccaacaaggtgacgacaaagctttgtcatcaccctgttggcgtca

SEQ ID NO: 42216 - DNA, 50 bp, synthetic construct
  source 1..50: mol_type = other DNA
gatacggttcaccgtatctacccattacttatgataaggttccccacgat

SEQ ID NO: 42217 - DNA, 50 bp, synthetic construct
  source 1..50: mol_type = other DNA
ggccggatgtgcaatacatctgaaatttcgactgtattgcatgtgcagca

SEQ ID NO: 42218 - DNA, 50 bp, synthetic construct
  source 1..50: mol_type = other DNA
gtttggcgaccgagagcatgaggctacttatctattcgtaggaaatcaaa

SEQ ID NO: 42219 - DNA, 50 bp, synthetic construct
  source 1..50: mol_type = other DNA
taaactccatctaaaatcttcatatttgtaatttttccaacggttccata

SEQ ID NO: 42220 - DNA, 50 bp, synthetic construct
  source 1..50: mol_type = other DNA
ccattttcatcatatgtgtaaaactggtgttacccataagccacccatta

SEQ ID NO: 42221 - DNA, 50 bp, synthetic construct
  source 1..50: mol_type = other DNA
caggagctttctttttacttcttctataatctttttaaagaaaattccat

SEQ ID NO: 42222 - DNA, 50 bp, synthetic construct
  source 1..50: mol_type = other DNA
aaattaggaattaagaccgatgaaatagagtgaagataaagaaataatta

SEQ ID NO: 42223 - DNA, 50 bp, synthetic construct
  source 1..50: mol_type = other DNA
tggcttattgcattgatgatgatttagagcatcattcgtcgaaacagcca

SEQ ID NO: 42224 - DNA, 50 bp, synthetic construct
  source 1..50: mol_type = other DNA
aattgcaaattatgcataaaagctccatccttcactccgaatttgaacga

SEQ ID NO: 42225 - DNA, 50 bp, synthetic construct
  source 1..50: mol_type = other DNA
tatgggtaacaccaattaagtgtttaatggctctcttttaattaccacta

SEQ ID NO: 42226 - DNA, 50 bp, synthetic construct
  source 1..50: mol_type = other DNA
gtcgtgtaacgctctataagcccttcaacgttcatttagaaataaactct

SEQ ID NO: 42227 - DNA, 50 bp, synthetic construct
  source 1..50: mol_type = other DNA
tttttggagagaaaatagcacggtgagggcggctattctgccctcaaaaa

SEQ ID NO: 42228 - DNA, 50 bp, synthetic construct
  source 1..50: mol_type = other DNA
gcttcttctgaatacaaaccggaggaagccgtaactattttggacaggga

SEQ ID NO: 42229 - DNA, 50 bp, synthetic construct
  source 1..50: mol_type = other DNA
attgtagtcctccggattctcgagcgctccgggttctccggggcggttat

SEQ ID NO: 42230 - DNA, 50 bp, synthetic construct
  source 1..50: mol_type = other DNA
atggcatgtccacggtcgaatagtcgcgtacgccatcgggactatcgcgg

SEQ ID NO: 42231 - DNA, 50 bp, synthetic construct
  source 1..50: mol_type = other DNA
tcgacgggaatggtgtccgtcgagtatgcgactgtggccatacccggaac

SEQ ID NO: 42232 - DNA, 50 bp, synthetic construct
  source 1..50: mol_type = other DNA
tgatgaaaccgaaaaagcactctataccgaccgcttcgtggtctccgaca

SEQ ID NO: 42233 - DNA, 50 bp, synthetic construct
  source 1..50: mol_type = other DNA
cgcgcctacgacaacgacgccggctggcgcatcgactaccacctcgcgcg

SEQ ID NO: 42234 - DNA, 50 bp, synthetic construct
  source 1..50: mol_type = other DNA
ctgccgttgaccatttttgaggggcacccacagttcaaatctacgcccca

SEQ ID NO: 42235 - DNA, 50 bp, synthetic construct
  source 1..50: mol_type = other DNA
ggcgccatttgactccacaggggtcgaccccccacagacacatgtaacct

SEQ ID NO: 42236 - DNA, 50 bp, synthetic construct
  source 1..50: mol_type = other DNA
gctgtgttaagcactaacaacatcactatgcagttcggcagtaagccgtt

SEQ ID NO: 42237 - DNA, 50 bp, synthetic construct
  source 1..50: mol_type = other DNA
cagatacaaaaaaggtgcttttcagcccaaacgctccctttttcttatgt

SEQ ID NO: 42238 - DNA, 50 bp, synthetic construct
  source 1..50: mol_type = other DNA
tggaatgcccggttttacacttgttgactattacgttggtgggtttacct

SEQ ID NO: 42239 - DNA, 50 bp, synthetic construct
  source 1..50: mol_type = other DNA
attactaataaaacgactagcatttcaaccaatgtaaagccttttttgac

SEQ ID NO: 42240 - DNA, 50 bp, synthetic construct
  source 1..50: mol_type = other DNA
atgaagtaaaaagtccatcagtgaaaaaatagatggatattcttatcaat

SEQ ID NO: 42241 - DNA, 50 bp, synthetic construct
  source 1..50: mol_type = other DNA
gtgattggccccccgctcgcctacgcgtttcagagcaagggggcaaatta

SEQ ID NO: 42242 - DNA, 50 bp, synthetic construct
  source 1..50: mol_type = other DNA
taaaattgtttcagatataaccgctttcaattatatcataaaaacttttt

SEQ ID NO: 42243 - DNA, 50 bp, synthetic construct
  source 1..50: mol_type = other DNA
ggcgcaggcgggccgctgcgccgcggcgggggcagcggccaccctggccc

SEQ ID NO: 42244 - DNA, 50 bp, synthetic construct
  source 1..50: mol_type = other DNA
tcgcccggctcgccaacgtactgagggaagggcgttcatgagacggtcct

SEQ ID NO: 42245 - DNA, 50 bp, synthetic construct
  source 1..50: mol_type = other DNA
gtgttcatcgcttgtacaatgtttatagatttgtcatgcagcatatccaa

SEQ ID NO: 42246 - DNA, 50 bp, synthetic construct
  source 1..50: mol_type = other DNA
atattctcttttaattcctttagaaatccaatgtaggaaaaaaagtctat

SEQ ID NO: 42247 - DNA, 50 bp, synthetic construct
  source 1..50: mol_type = other DNA
cggccggggcgcacaacctgcttcttcctattcaccgggccgcccggcac

SEQ ID NO: 42248 - DNA, 50 bp, synthetic construct
  source 1..50: mol_type = other DNA
gggaaagccatggaagcgggcggcaagccacctttttaggtggctttctt

SEQ ID NO: 42249 - DNA, 50 bp, synthetic construct
  source 1..50: mol_type = other DNA
ctcggacatgtcgacggcgagggtgccggctcgccgtgcagatgcagccc

SEQ ID NO: 42250 - DNA, 50 bp, synthetic construct
  source 1..50: mol_type = other DNA
taagactaacagaaacacccatcctttggtgggtgttttttggaaaataa

SEQ ID NO: 42251 - DNA, 50 bp, synthetic construct
  source 1..50: mol_type = other DNA
cgcggcagacttcccggtgctcaatccagttgcatcagcgctctcatcgc

SEQ ID NO: 42252 - DNA, 50 bp, synthetic construct
  source 1..50: mol_type = other DNA
cttaaaaagtactcagtgaaccctcaagccctttctcgatagcggttaag

SEQ ID NO: 42253 - DNA, 50 bp, synthetic construct
  source 1..50: mol_type = other DNA
tgataaggctcaccgtaacgcatctacttatgatacggttcccctcgatt

SEQ ID NO: 42254 - DNA, 50 bp, synthetic construct
  source 1..50: mol_type = other DNA
ttccgcatacggcgcacgtcgagtgcacactacacatgtggagtgtgtgg

SEQ ID NO: 42255 - DNA, 50 bp, synthetic construct
  source 1..50: mol_type = other DNA
aactttcatatttgtaatctttctatagaaaattaacatttgtaactttc

SEQ ID NO: 42256 - DNA, 50 bp, synthetic construct
  source 1..50: mol_type = other DNA
atgctttagggcttaatggagtaaatataagatattaagcggagcagcgg

SEQ ID NO: 42257 - DNA, 50 bp, synthetic construct
  source 1..50: mol_type = other DNA
aaaccgcacttacttatgatacggttaggtgcggtaagcatcacccttca

SEQ ID NO: 42258 - DNA, 50 bp, synthetic construct
  source 1..50: mol_type = other DNA
gcgtcggtgaatcgcgatttggattgattgcaagagatagacacaacggg

SEQ ID NO: 42259 - DNA, 50 bp, synthetic construct
  source 1..50: mol_type = other DNA
atcatgaaaatacttcgagataacgagttacaccgagaaatttcttacat

SEQ ID NO: 42260 - DNA, 50 bp, synthetic construct
  source 1..50: mol_type = other DNA
tcaaatgattgacccatacatttgtcaaaatatatccttacatttttaga

SEQ ID NO: 42261 - DNA, 50 bp, synthetic construct
  source 1..50: mol_type = other DNA
gcctcagacaatccccaacgatgttttttacgttgtttagtacctcaatt

SEQ ID NO: 42262 - DNA, 50 bp, synthetic construct
  source 1..50: mol_type = other DNA
ctatactgtagtccagagtgtttgactaaattcttatgactacagtatat

SEQ ID NO: 42263 - DNA, 50 bp, synthetic construct
  source 1..50: mol_type = other DNA
aattggattagccctaagcataaacgtaataattctcttataataatatt

SEQ ID NO: 42264 - DNA, 50 bp, synthetic construct
  source 1..50: mol_type = other DNA
gctgcggccggagcgcacaacctgctgttcaccggccctccaggcaccgg

SEQ ID NO: 42265 - DNA, 50 bp, synthetic construct
  source 1..50: mol_type = other DNA
actcccctcggctccatatgttaaatttaccaagccacggctcggctcca

SEQ ID NO: 42266 - DNA, 50 bp, synthetic construct
  source 1..50: mol_type = other DNA
gttggttttttgatggagaagtgttatggggatgggggcaaaagaacaac

SEQ ID NO: 42267 - DNA, 50 bp, synthetic construct
  source 1..50: mol_type = other DNA
ctgcgcatcccaaatatcgcattaattattcatttatttcagatggttag

SEQ ID NO: 42268 - DNA, 50 bp, synthetic construct
  source 1..50: mol_type = other DNA
tgttgagcaatcacgaactcttcattggttgggataaccatagctactgc

SEQ ID NO: 42269 - DNA, 50 bp, synthetic construct
  source 1..50: mol_type = other DNA
accaatgaagaatatgttatagtacaactaatgaagagttcgtgattgct

SEQ ID NO: 42270 - DNA, 50 bp, synthetic construct
  source 1..50: mol_type = other DNA
agataaaaattgggttaccgaaaatattttaaacaacccaatattgactt

SEQ ID NO: 42271 - DNA, 50 bp, synthetic construct
  source 1..50: mol_type = other DNA
tcggcgctgcgggatgagctgctgcgctatcctacatcccgcctgaattt

SEQ ID NO: 42272 - DNA, 50 bp, synthetic construct
  source 1..50: mol_type = other DNA
gcactcagaacaatcacctccccgatgcttaagcgcattgtagcgagtca

SEQ ID NO: 42273 - DNA, 50 bp, synthetic construct
  source 1..50: mol_type = other DNA
tatagaaaaattatattgaggttaattgttgacaatgccgttttattaac

SEQ ID NO: 42274 - DNA, 50 bp, synthetic construct
  source 1..50: mol_type = other DNA
agttcgcctggtcagcgtcatcggtggagataacagcatagcagcggacg

SEQ ID NO: 42275 - DNA, 50 bp, synthetic construct
  source 1..50: mol_type = other DNA
attacactcatagcattctctccttttaaatcaaattctattgaagcaat

SEQ ID NO: 42276 - DNA, 50 bp, synthetic construct
  source 1..50: mol_type = other DNA
acgaagcgggtgacgttcccggatgggagcgatcgccccgcccgcatcgg

SEQ ID NO: 42277 - DNA, 50 bp, synthetic construct
  source 1..50: mol_type = other DNA
atatgaagtatgtaaaaataaccgtatacctccttatagttaattcatat

SEQ ID NO: 42278 - DNA, 50 bp, synthetic construct
  source 1..50: mol_type = other DNA
aatgatagagagaaaatgattattagaagaatgagtaattctcttatatt

SEQ ID NO: 42279 - DNA, 50 bp, synthetic construct
  source 1..50: mol_type = other DNA
agagacttctcgcgccctttggctaacactaaacgtacgctcataatttg

SEQ ID NO: 42280 - DNA, 50 bp, synthetic construct
  source 1..50: mol_type = other DNA
ccatgaagaaaatatcttttagatgattctaagacttcttttacaaaaca

SEQ ID NO: 42281 - DNA, 50 bp, synthetic construct
  source 1..50: mol_type = other DNA
taagcggataaataggtccccatcatgattggcatctatttgaagttggg

SEQ ID NO: 42282 - DNA, 50 bp, synthetic construct
  source 1..50: mol_type = other DNA
aacgctgtaaatattattaaaataaactttttaaacgaatccgttctttt

SEQ ID NO: 42283 - DNA, 50 bp, synthetic construct
  source 1..50: mol_type = other DNA
tcgtataaatggtgtacttctacacctttatgactaggtagattcggtgt

SEQ ID NO: 42284 - DNA, 50 bp, synthetic construct
  source 1..50: mol_type = other DNA
gcgctatgaaccggacggctatccaggatcacgcggttgacgtttcgctg

SEQ ID NO: 42285 - DNA, 50 bp, synthetic construct
  source 1..50: mol_type = other DNA
tatagtgataacttgcattttatggtattaccatccaaagtaaatatata

SEQ ID NO: 42286 - DNA, 50 bp, synthetic construct
  source 1..50: mol_type = other DNA
aattttctttgaattcttgcgataagagcatcaagcatataagccaaaat

SEQ ID NO: 42287 - DNA, 50 bp, synthetic construct
  source 1..50: mol_type = other DNA
atatggaaaacgaatttaacaggttaacatagaatgcaagttatcactat

SEQ ID NO: 42288 - DNA, 50 bp, synthetic construct
  source 1..50: mol_type = other DNA
gttggcatgtggtcaaagtactatacatgttactaaggttctctacagaa

SEQ ID NO: 42289 - DNA, 50 bp, synthetic construct
  source 1..50: mol_type = other DNA
gaaatttctaaactaaaattagttatataatttttttaatttaagtttgg

SEQ ID NO: 42290 - DNA, 50 bp, synthetic construct
  source 1..50: mol_type = other DNA
aaatcagcaaaagaaaggagagactagtttcagctttattttttcatatt

SEQ ID NO: 42291 - DNA, 50 bp, synthetic construct
  source 1..50: mol_type = other DNA
acagcattaagatttacatctcttttaagagcaccaaaaataaataatgt

SEQ ID NO: 42292 - DNA, 50 bp, synthetic construct
  source 1..50: mol_type = other DNA
gaactactgctgatagaggttcattaataagccaatcccaataatagcag

SEQ ID NO: 42293 - DNA, 50 bp, synthetic construct
  source 1..50: mol_type = other DNA
gtcaaatataacttcttttttcaaatttactcatagaatttcctgttagt

SEQ ID NO: 42294 - DNA, 50 bp, synthetic construct
  source 1..50: mol_type = other DNA
taaacaccatctaaaatcttcatatttgtaattttcccaacggtcccata

SEQ ID NO: 42295 - DNA, 50 bp, synthetic construct
  source 1..50: mol_type = other DNA
gatttattttttataatataattatattggtacgttataataagatgata

SEQ ID NO: 42296 - DNA, 50 bp, synthetic construct
  source 1..50: mol_type = other DNA
agatatgttttttattctcaaaatatttttttttaatttaaaagcaatct

SEQ ID NO: 42297 - DNA, 50 bp, synthetic construct
  source 1..50: mol_type = other DNA
tggagtaaatctaattacaccaacaaggtggtgctttttcttttggtcgg

SEQ ID NO: 42298 - DNA, 50 bp, synthetic construct
  source 1..50: mol_type = other DNA
gatatggggaagtgaaccagtacaactaaaccagtacaaccgccatagta

SEQ ID NO: 42299 - DNA, 50 bp, synthetic construct
  source 1..50: mol_type = other DNA
ttatcatgacaaatttgactaaaatatttaagtctaacttatcatgattg

SEQ ID NO: 42300 - DNA, 50 bp, synthetic construct
  source 1..50: mol_type = other DNA
atttgttctacatcatcaaagagtgatatttatgcagatgaaggtatttc

SEQ ID NO: 42301 - DNA, 50 bp, synthetic construct
  source 1..50: mol_type = other DNA
gcaaacagtcatatctcaaattcagatgtattacgccaatgcagaaatgc

SEQ ID NO: 42302 - DNA, 50 bp, synthetic construct
  source 1..50: mol_type = other DNA
cacacttgtggaaatgtaggttactactatcctttattgagatgttggtg

SEQ ID NO: 42303 - DNA, 50 bp, synthetic construct
  source 1..50: mol_type = other DNA
cattcatatatcttttctaatataatggtatatgaaaagaatccttcttc

SEQ ID NO: 42304 - DNA, 50 bp, synthetic construct
  source 1..50: mol_type = other DNA
aaagaacttagaagaaaaatataaaattatatttttcatctaatacacct

SEQ ID NO: 42305 - DNA, 50 bp, synthetic construct
  source 1..50: mol_type = other DNA
ctgatcgaagacttccagacgctggtcgagctgattgaaatggcgaagcg

SEQ ID NO: 42306 - DNA, 50 bp, synthetic construct
  source 1..50: mol_type = other DNA
cataggtttagatatgcaatacgaatatcacctcaacttcaatacctgct

SEQ ID NO: 42307 - DNA, 50 bp, synthetic construct
  source 1..50: mol_type = other DNA
acggctttgtccggcaagccgacaatgcccatcttgcccggcgcgaccat

SEQ ID NO: 42308 - DNA, 50 bp, synthetic construct
  source 1..50: mol_type = other DNA
aaaatcaatgcctttaattgctaaattctatatttgacagcagagattct

SEQ ID NO: 42309 - DNA, 50 bp, synthetic construct
  source 1..50: mol_type = other DNA
taaaccctgattcaaccctatatcatggaacattgttggtggccttcctg

SEQ ID NO: 42310 - DNA, 50 bp, synthetic construct
  source 1..50: mol_type = other DNA
cagctatcgcaagcggaactcctgttcaggagttcttttcatgaatgctg

SEQ ID NO: 42311 - DNA, 50 bp, synthetic construct
  source 1..50: mol_type = other DNA
aaccgccaatctttctccccttttggaaaagctgaatagggttcagcata

SEQ ID NO: 42312 - DNA, 50 bp, synthetic construct
  source 1..50: mol_type = other DNA
gaaacactttatgaagatccttttacaaaattatcttataaaacatgaaa

SEQ ID NO: 42313 - DNA, 50 bp, synthetic construct
  source 1..50: mol_type = other DNA
tacaaacaagataaaatagaaatgagcttttcgatgttaccgtttttgtc

SEQ ID NO: 42314 - DNA, 50 bp, synthetic construct
  source 1..50: mol_type = other DNA
ctacaaagtgcgtaaattcaaggatttcctgaaacggcaccagattgtaa

SEQ ID NO: 42315 - DNA, 50 bp, synthetic construct
  source 1..50: mol_type = other DNA
cggacttcatgacagcggggtttccggaaatacgctgcggacgaatttct

SEQ ID NO: 42316 - DNA, 50 bp, synthetic construct
  source 1..50: mol_type = other DNA
gatgttttgccaagtataccaatgttccttggcataaaaggaaaaaaata

SEQ ID NO: 42317 - DNA, 50 bp, synthetic construct
  source 1..50: mol_type = other DNA
tgagatatccggatatcccttgccagaagaagaggaatccagaagccatg

SEQ ID NO: 42318 - DNA, 50 bp, synthetic construct
  source 1..50: mol_type = other DNA
ttgattaagagaagattacatcgcttgacaagtcggcttctgctgatgaa

SEQ ID NO: 42319 - DNA, 50 bp, synthetic construct
  source 1..50: mol_type = other DNA
agaacggtatcgggcaagctaactcccgtttcccatttgcttacagcctt

SEQ ID NO: 42320 - DNA, 50 bp, synthetic construct
  source 1..50: mol_type = other DNA
gcgtaaataatccgcacaatcgtacaaagggttgcgccgatttgtggcaa

SEQ ID NO: 42321 - DNA, 50 bp, synthetic construct
  source 1..50: mol_type = other DNA
cttaggcgtttggtagagggaatgtacatggtcaactgcacctattacag

SEQ ID NO: 42322 - DNA, 50 bp, synthetic construct
  source 1..50: mol_type = other DNA
aaaactaactggaaagaaatattaataattaccccttatttaattgttat

SEQ ID NO: 42323 - DNA, 50 bp, synthetic construct
  source 1..50: mol_type = other DNA
gtttgtgttgttttgagagtttccttatggcgttgttaatcactaaaaaa

SEQ ID NO: 42324 - DNA, 50 bp, synthetic construct
  source 1..50: mol_type = other DNA
ataattaataaaatttattatttttataaataaatattttcataatctat

SEQ ID NO: 42325 - DNA, 50 bp, synthetic construct
  source 1..50: mol_type = other DNA
gtatttaaagatagcttgcgaaaatatctttccgggctttctttaactga

SEQ ID NO: 42326 - DNA, 50 bp, synthetic construct
  source 1..50: mol_type = other DNA
aggaaatgaaaagaaatgcctgaattttggtatttttcttcataatatct

SEQ ID NO: 42327 - DNA, 50 bp, synthetic construct
  source 1..50: mol_type = other DNA
gcaaattgggaacttttataatggattcatagcaatcgttggaaactaat

SEQ ID NO: 42328 - DNA, 50 bp, synthetic construct
  source 1..50: mol_type = other DNA
ttcattgatgcagttctgcatcatttctctagcataattgtatcaaattc

SEQ ID NO: 42329 - DNA, 50 bp, synthetic construct
  source 1..50: mol_type = other DNA
ttttgtatcttttatttcataccatatgatatagtacaaaccaacaaaaa

SEQ ID NO: 42330 - DNA, 50 bp, synthetic construct
  source 1..50: mol_type = other DNA
cgatcaccaccatgatatactgcttttgctgttaatcatcaccatcagtt

SEQ ID NO: 42331 - DNA, 50 bp, synthetic construct
  source 1..50: mol_type = other DNA
cttcaaaaagcatcttgacttgcgcgagctaaacggcatggagcgtgaac

SEQ ID NO: 42332 - DNA, 50 bp, synthetic construct
  source 1..50: mol_type = other DNA
gtctttctctccggcgctggcacggacacaacaactacggcgagaaagac

SEQ ID NO: 42333 - DNA, 50 bp, synthetic construct
  source 1..50: mol_type = other DNA
gcgcgcaatccgcagaaagcttgacagccagcttgggacgttcatcgccg

SEQ ID NO: 42334 - DNA, 50 bp, synthetic construct
  source 1..50: mol_type = other DNA
ctgcgcccgcatgtcagggcgtcggaagagggcctggcctcggccagcac

SEQ ID NO: 42335 - DNA, 50 bp, synthetic construct
  source 1..50: mol_type = other DNA
cgtgggatggctatattctggctttcgagccttctatctccttcagcacg

SEQ ID NO: 42336 - DNA, 50 bp, synthetic construct
  source 1..50: mol_type = other DNA
atacgttgatgccagaaggacgcccagccttcgttcatgatttttgtttc

SEQ ID NO: 42337 - DNA, 50 bp, synthetic construct
  source 1..50: mol_type = other DNA
gccagaaggacgcccagccttcgtatacgaagcccagccttcgttcatga

SEQ ID NO: 42338 - DNA, 50 bp, synthetic construct
  source 1..50: mol_type = other DNA
ccataaaatcaaagctcctaagtggatttattagagcgtggtgtttatac

SEQ ID NO: 42339 - DNA, 50 bp, synthetic construct
  source 1..50: mol_type = other DNA
gctttttcgttccaattttttaataatgtaataaatagcaaaagaaaagc

SEQ ID NO: 42340 - DNA, 50 bp, synthetic construct
  source 1..50: mol_type = other DNA
gcttgggtaatgggcacttttttatttacccaatgctatactacctaagc

SEQ ID NO: 42341 - DNA, 50 bp, synthetic construct
  source 1..50: mol_type = other DNA
ggcattttcacatgttcgttcatattgatgaatctattcttgaaaatgct

SEQ ID NO: 42342 - DNA, 50 bp, synthetic construct
  source 1..50: mol_type = other DNA
tcgctgagttctgtcattttggctgtcgccgtcatgacggagacgtgcgt

SEQ ID NO: 42343 - DNA, 50 bp, synthetic construct
  source 1..50: mol_type = other DNA
gccccagttacgggaagccccgatgcatcgggaaggggcggggtggggaa

SEQ ID NO: 42344 - DNA, 50 bp, synthetic construct
  source 1..50: mol_type = other DNA
gcggggaagccttccgaccttggcctgctcgggtcggagggtctcccacg

SEQ ID NO: 42345 - DNA, 50 bp, synthetic construct
  source 1..50: mol_type = other DNA
ttttaggtaaaaatatagggagtcaaataactataaatcttaaaaaatac

SEQ ID NO: 42346 - DNA, 50 bp, synthetic construct
  source 1..50: mol_type = other DNA
tatggcggttgtactggtttaattagtgttatactggttcacttccccat

SEQ ID NO: 42347 - DNA, 50 bp, synthetic construct
  source 1..50: mol_type = other DNA
cgtttcgtattaatcgtggggaaccggtgaaccgtatcataagtaaaatt

SEQ ID NO: 42348 - DNA, 50 bp, synthetic construct
  source 1..50: mol_type = other DNA
aaagtttctataacgaaagaacaaattttttcttgtaacttaaaatctaa

SEQ ID NO: 42349 - DNA, 50 bp, synthetic construct
  source 1..50: mol_type = other DNA
atttatctgcttttcatataataaattttgcatatgaaaaggagaaaaca

SEQ ID NO: 42350 - DNA, 50 bp, synthetic construct
  source 1..50: mol_type = other DNA
cttttcttttaattattactttatcattacgaaaacttgaaaaagaatta

SEQ ID NO: 42351 - DNA, 50 bp, synthetic construct
  source 1..50: mol_type = other DNA
tttgtttctgtattgtgaaaaaaatgcgaggaaaaacataaagaaatact

SEQ ID NO: 42352 - DNA, 50 bp, synthetic construct
  source 1..50: mol_type = other DNA
gttaatgaagtttcaaaagccgatttaacggcttttgctccttcctgttg

SEQ ID NO: 42353 - DNA, 50 bp, synthetic construct
  source 1..50: mol_type = other DNA
aaaatgaatgtgtgattctatatataactttacatgtacatttacatttt

SEQ ID NO: 42354 - DNA, 50 bp, synthetic construct
  source 1..50: mol_type = other DNA
ggacagcataccacattttaaagttttgtttttcatgatttcctctgtat

SEQ ID NO: 42355 - DNA, 50 bp, synthetic construct
  source 1..50: mol_type = other DNA
gataattttataaatatattagtaaaagataataaaaccataattttatc

SEQ ID NO: 42356 - DNA, 50 bp, synthetic construct
  source 1..50: mol_type = other DNA
gcatgcccggctttactatcgatggccaacatttactctcgttgggttgc

SEQ ID NO: 42357 - DNA, 50 bp, synthetic construct
  source 1..50: mol_type = other DNA
ggaatatttgctgtggtttgctaatattggcttgataaaaaaggctggcc

SEQ ID NO: 42358 - DNA, 50 bp, synthetic construct
  source 1..50: mol_type = other DNA
ttatgtataattccaactccgtctccatctccgaatggaagaaggacgaa

SEQ ID NO: 42359 - DNA, 50 bp, synthetic construct
  source 1..50: mol_type = other DNA
agatagccttgaagacgcttaattgaaattcttcggattccagccgatca

SEQ ID NO: 42360 - DNA, 50 bp, synthetic construct
  source 1..50: mol_type = other DNA
gtactgtgacgattgtactggtttaaagggtagatgatgaacgattgtac

SEQ ID NO: 42361 - DNA, 50 bp, synthetic construct
  source 1..50: mol_type = other DNA
atctcggcgccggggatcgagtccgggtgctcgacgtccgggttgtagat

SEQ ID NO: 42362 - DNA, 50 bp, synthetic construct
  source 1..50: mol_type = other DNA
gatcggcgcgtactcggacttctggcccgacatccacatgcgccccgagg

SEQ ID NO: 42363 - DNA, 50 bp, synthetic construct
  source 1..50: mol_type = other DNA
gggataaatcatacatgctttcgtttaagaaagcatttaagattcttcgt

SEQ ID NO: 42364 - DNA, 50 bp, synthetic construct
  source 1..50: mol_type = other DNA
gctttagggcttaatggggtaaatctcatgcgcctaatggcaacaaaaaa

SEQ ID NO: 42365 - DNA, 50 bp, synthetic construct
  source 1..50: mol_type = other DNA
ttcgcatagtttcccgcaaaagtgggtttgtaaatcagaaaatcccagcg

SEQ ID NO: 42366 - DNA, 50 bp, synthetic construct
  source 1..50: mol_type = other DNA
agtggggtacatgcaatattgacaaaattcacaaaaatgtgtagtacaat

SEQ ID NO: 42367 - DNA, 50 bp, synthetic construct
  source 1..50: mol_type = other DNA
tattttttctaaattacctatagaataattttggttatttaagaaatatg

SEQ ID NO: 42368 - DNA, 50 bp, synthetic construct
  source 1..50: mol_type = other DNA
cggtgtaataatcgaatgcttggcattccattttttctggcaggggcaga

SEQ ID NO: 42369 - DNA, 50 bp, synthetic construct
  source 1..50: mol_type = other DNA
aaacaacaacactcggtcccttcgtctgaaatagacttgtcgggttgatg

SEQ ID NO: 42370 - DNA, 50 bp, synthetic construct
  source 1..50: mol_type = other DNA
cggatcgcccgcgacccggtttttgcgcccgccgggtggccgcggccttg

SEQ ID NO: 42371 - DNA, 50 bp, synthetic construct
  source 1..50: mol_type = other DNA
atacaaatgtatattatgctatacaacacaatttcaaaatacatattcgc

SEQ ID NO: 42372 - DNA, 50 bp, synthetic construct
  source 1..50: mol_type = other DNA
cgctgcaatgcgctaccgccactcggtagaggtggtggcctcccgcagcg

SEQ ID NO: 42373 - DNA, 50 bp, synthetic construct
  source 1..50: mol_type = other DNA
tcgggccaatgcaaccatggccggccgccggcaatgtcgggctggcccga

SEQ ID NO: 42374 - DNA, 50 bp, synthetic construct
  source 1..50: mol_type = other DNA
cttggtttgtgtgaagactctgtaataagaaatatttcagaagacaaaaa

SEQ ID NO: 42375 - DNA, 50 bp, synthetic construct
  source 1..50: mol_type = other DNA
agctgctgcggtttcaccaggccttcacgcctgctgcagattcagcagaa

SEQ ID NO: 42376 - DNA, 50 bp, synthetic construct
  source 1..50: mol_type = other DNA
gtcagggtgatatccagcagtttggccaacttgcgttatcacggagagaa

SEQ ID NO: 42377 - DNA, 50 bp, synthetic construct
  source 1..50: mol_type = other DNA
ccctaccgaggttgcgagcatggttgcatctattgctatgcccgccccag

SEQ ID NO: 42378 - DNA, 50 bp, synthetic construct
  source 1..50: mol_type = other DNA
cgcttgatttctcctgatatcataggaacggcataggttgaaaatttcac

SEQ ID NO: 42379 - DNA, 50 bp, synthetic construct
  source 1..50: mol_type = other DNA
aaaactggggattgaactgccggaagttcaatagtacctatttcctcttt

SEQ ID NO: 42380 - DNA, 50 bp, synthetic construct
  source 1..50: mol_type = other DNA
ccatatccgatattattgtttagaattcaaaataattactgatgttgccc

SEQ ID NO: 42381 - DNA, 50 bp, synthetic construct
  source 1..50: mol_type = other DNA
ggtaatcgtgattgacggattgcttgagcagttcgtcgctcatccggccg

SEQ ID NO: 42382 - DNA, 50 bp, synthetic construct
  source 1..50: mol_type = other DNA
aggttacaggtttgaatcctgtcgagatacgctcgtcttgcacttaagga

SEQ ID NO: 42383 - DNA, 50 bp, synthetic construct
  source 1..50: mol_type = other DNA
gattaaagcccgcacaaggcgggctcgctgcgcttgtgcaggcccatctt

SEQ ID NO: 42384 - DNA, 50 bp, synthetic construct
  source 1..50: mol_type = other DNA
gctgttcgggccagactttctagttctagttccgatcgtcgcggaataca

SEQ ID NO: 42385 - DNA, 50 bp, synthetic construct
  source 1..50: mol_type = other DNA
gtcgctcccggaaaagtcgggatgcagatcgtcggcctgcctgacaaggc

SEQ ID NO: 42386 - DNA, 50 bp, synthetic construct
  source 1..50: mol_type = other DNA
agattaaaactaatagtgtgattgcccaaggaggggggccgtttcgatct

SEQ ID NO: 42387 - DNA, 50 bp, synthetic construct
  source 1..50: mol_type = other DNA
ccatacttatcgaccacttattgtgttgaaagcaggccagtcggcgatgt

SEQ ID NO: 42388 - DNA, 50 bp, synthetic construct
  source 1..50: mol_type = other DNA
gaaacaagagtatctaaatttgttataaaaaaacagaaaggactttcaaa

SEQ ID NO: 42389 - DNA, 50 bp, synthetic construct
  source 1..50: mol_type = other DNA
gatgacattcttgaaaaaagctaaggtcaaggcttttaccttgttagaat

SEQ ID NO: 42390 - DNA, 50 bp, synthetic construct
  source 1..50: mol_type = other DNA
atttacttgaataccaagaatgacattttcaagatggaattcaagtaaaa

SEQ ID NO: 42391 - DNA, 50 bp, synthetic construct
  source 1..50: mol_type = other DNA
tctcctgaattttaacttcccggcggagcgaaaagtttcaattatttttc

SEQ ID NO: 42392 - DNA, 50 bp, synthetic construct
  source 1..50: mol_type = other DNA
ctatggataataatatcaaacttttaaaagcttgatatagcaacgattca

SEQ ID NO: 42393 - DNA, 50 bp, synthetic construct
  source 1..50: mol_type = other DNA
gtgagagaaatcgaggtactaaacaattttagtttctcgattcgtctccg

SEQ ID NO: 42394 - DNA, 50 bp, synthetic construct
  source 1..50: mol_type = other DNA
aataaatttaataaaactattgactagcttgtttatttagattgtttagt

SEQ ID NO: 42395 - DNA, 50 bp, synthetic construct
  source 1..50: mol_type = other DNA
aacgccacttccatcgggatctgttgatcgaggagcatggcgatcagaag

SEQ ID NO: 42396 - DNA, 50 bp, synthetic construct
  source 1..50: mol_type = other DNA
ccgccgcgatcgttccgatcgcgtatattcgacggtggacatgccgtcct

SEQ ID NO: 42397 - DNA, 50 bp, synthetic construct
  source 1..50: mol_type = other DNA
caaccgaatcatgatcagatgatatggtttacctaatcatcagcggcctg

SEQ ID NO: 42398 - DNA, 50 bp, synthetic construct
  source 1..50: mol_type = other DNA
acgctggtggggctgccggaaggggcaaggaccgggtgcgcagtgccatt

SEQ ID NO: 42399 - DNA, 50 bp, synthetic construct
  source 1..50: mol_type = other DNA
atcattacccattaataaatatttaaaaagtttcattaagtagtctttat

SEQ ID NO: 42400 - DNA, 50 bp, synthetic construct
  source 1..50: mol_type = other DNA
tgtagttaattttataattagtccaaaatgtaattaaaaaatgaatatat

SEQ ID NO: 42401 - DNA, 50 bp, synthetic construct
  source 1..50: mol_type = other DNA
ggggatctgcttctttttttatcaatttggcttacaaaaagaagaaccat

SEQ ID NO: 42402 - DNA, 50 bp, synthetic construct
  source 1..50: mol_type = other DNA
aaatttgtactagatgcagatatttcgcgatctggttctccttcaaagta

SEQ ID NO: 42403 - DNA, 50 bp, synthetic construct
  source 1..50: mol_type = other DNA
gggagttattaaaatgacaacgttaatccgtacccggcttaccaaccacc

SEQ ID NO: 42404 - DNA, 50 bp, synthetic construct
  source 1..50: mol_type = other DNA
atactacaacatatgttcataaagatcagtagtaacatatgctataaatc

SEQ ID NO: 42405 - DNA, 50 bp, synthetic construct
  source 1..50: mol_type = other DNA
ggacgccaatcacaggcccgtcgctggtgacgggccaacgccttgacgaa

SEQ ID NO: 42406 - DNA, 50 bp, synthetic construct
  source 1..50: mol_type = other DNA
acttggcgaccgggggctcggcgtcgacgagaccggggtggtcgcgcttc

SEQ ID NO: 42407 - DNA, 50 bp, synthetic construct
  source 1..50: mol_type = other DNA
cttttctttttattatcggctacaaacgaaccggattttaaagcgaaaat

SEQ ID NO: 42408 - DNA, 50 bp, synthetic construct
  source 1..50: mol_type = other DNA
taggtaaagcattgagatttaccgtgttgggattaggcgtgcttttgatc

SEQ ID NO: 42409 - DNA, 50 bp, synthetic construct
  source 1..50: mol_type = other DNA
gttacttacacagccccaaaaacataatatttttcttccggtcaatatac

SEQ ID NO: 42410 - DNA, 50 bp, synthetic construct
  source 1..50: mol_type = other DNA
gaagaccagtggccggctgacctacttacttcacacgcaacagggtctta

SEQ ID NO: 42411 - DNA, 50 bp, synthetic construct
  source 1..50: mol_type = other DNA
tctcctcctcgctgcggcccttctcggcaagagcagcggcgcggttgagt

SEQ ID NO: 42412 - DNA, 50 bp, synthetic construct
  source 1..50: mol_type = other DNA
ttctcatagcaatttgattgaaaaatttggtccggttattcgcgacttca

SEQ ID NO: 42413 - DNA, 50 bp, synthetic construct
  source 1..50: mol_type = other DNA
gtatgtccgaaaacaaaaaactaattttaatttcatcatttgataatctc

SEQ ID NO: 42414 - DNA, 50 bp, synthetic construct
  source 1..50: mol_type = other DNA
ctcgcgcttggggaagggaatcttaagccaatcacatccacaagaagaag

SEQ ID NO: 42415 - DNA, 50 bp, synthetic construct
  source 1..50: mol_type = other DNA
catcgacgatgccggccagttccacatggaactgggtaaaatcgtacttc

SEQ ID NO: 42416 - DNA, 50 bp, synthetic construct
  source 1..50: mol_type = other DNA
aattggacgcaaaactgctgaaaaccctcacagcagttgaaattccacca

SEQ ID NO: 42417 - DNA, 50 bp, synthetic construct
  source 1..50: mol_type = other DNA
gaggccttgctgcagctgccggctcgagcgtgtctccatcagccggccgc

SEQ ID NO: 42418 - DNA, 50 bp, synthetic construct
  source 1..50: mol_type = other DNA
cgggtgcgtgcagccgcggtccttcgcgtagaggacgatgcgctgatccg

SEQ ID NO: 42419 - DNA, 50 bp, synthetic construct
  source 1..50: mol_type = other DNA
agctatcaactacgtagcttccctatagggaacttaccaactccattgcg

SEQ ID NO: 42420 - DNA, 50 bp, synthetic construct
  source 1..50: mol_type = other DNA
ggcatccggaaccatcctcacttctggaagggaatagcgtcattgatcgt

SEQ ID NO: 42421 - DNA, 50 bp, synthetic construct
  source 1..50: mol_type = other DNA
tttcggaaggttgaattgctcaaaagactgctaaaaacaaatttgattat

SEQ ID NO: 42422 - DNA, 50 bp, synthetic construct
  source 1..50: mol_type = other DNA
gcacgtcggcggcacgcccggtacaatcacctgtttctccacagatttgc

SEQ ID NO: 42423 - DNA, 50 bp, synthetic construct
  source 1..50: mol_type = other DNA
gtttcttcctctggtaaacaaaaatcagtttgattcgttgatgtgatggc

SEQ ID NO: 42424 - DNA, 50 bp, synthetic construct
  source 1..50: mol_type = other DNA
aatgagaaaaggcccggttaacgccgtcgataacagccaagctgcccaat

SEQ ID NO: 42425 - DNA, 50 bp, synthetic construct
  source 1..50: mol_type = other DNA
caaaaccgtttgaagtttccgtgggtgaccgcggacgcggaagataacca

SEQ ID NO: 42426 - DNA, 50 bp, synthetic construct
  source 1..50: mol_type = other DNA
ctttttataatcatattacttttatttttccacaatagctatcgaaaagg

SEQ ID NO: 42427 - DNA, 50 bp, synthetic construct
  source 1..50: mol_type = other DNA
ataaggacgcgcacttcggatcgctcgccctgtgccggaagcagcagcga

SEQ ID NO: 42428 - DNA, 50 bp, synthetic construct
  source 1..50: mol_type = other DNA
tgaaggatcacttcgtcaccgagtacactcggcgacaaagccagacttca

SEQ ID NO: 42429 - DNA, 50 bp, synthetic construct
  source 1..50: mol_type = other DNA
agcatctttcttgttttcaactggttatttaaaaagacaattaaggtcac

SEQ ID NO: 42430 - DNA, 50 bp, synthetic construct
  source 1..50: mol_type = other DNA
cgcccgagaaccctgatcaggcggcgaagcccgtcttggctggtcgggcg

SEQ ID NO: 42431 - DNA, 50 bp, synthetic construct
  source 1..50: mol_type = other DNA
agcgggggtttcccccgcttcattacgatcctgcggcggaaacaccggct

SEQ ID NO: 42432 - DNA, 50 bp, synthetic construct
  source 1..50: mol_type = other DNA
attcacacggaggcgccatgtgaatatcagcgccaaaccgccgagcgagg

SEQ ID NO: 42433 - DNA, 50 bp, synthetic construct
  source 1..50: mol_type = other DNA
acagagcttttaatcaggaatactcgattcgtcccttagagtactcgaag

SEQ ID NO: 42434 - DNA, 50 bp, synthetic construct
  source 1..50: mol_type = other DNA
atgcagggcaagtgtaaatctactttttgtcagttgttgatgcccgacgg

SEQ ID NO: 42435 - DNA, 50 bp, synthetic construct
  source 1..50: mol_type = other DNA
tctgttaaattccggcaactcgctattgctcgtctagaaagagcaaaccg

SEQ ID NO: 42436 - DNA, 50 bp, synthetic construct
  source 1..50: mol_type = other DNA
ttggacaaaagtgctaccgtctcgactccacgtgatgcgtttgaggaaat

SEQ ID NO: 42437 - DNA, 50 bp, synthetic construct
  source 1..50: mol_type = other DNA
attttccaattgataacaatgtcctcatgagaggttatcttcatgaaaat

SEQ ID NO: 42438 - DNA, 50 bp, synthetic construct
  source 1..50: mol_type = other DNA
attccttgtaaagaattaaacgtcctgctattattcagttttcaaggaac

SEQ ID NO: 42439 - DNA, 50 bp, synthetic construct
  source 1..50: mol_type = other DNA
acaaaccttcatgctaatgagtataaatacatatcaggactatcccttac

SEQ ID NO: 42440 - DNA, 50 bp, synthetic construct
  source 1..50: mol_type = other DNA
cctcttccagttgaagatattcttaaaacccgtgattccactgataaagg

SEQ ID NO: 42441 - DNA, 50 bp, synthetic construct
  source 1..50: mol_type = other DNA
gaaattatatttgcagatgagccgacaggcaatcttgattctaagaccag

SEQ ID NO: 42442 - DNA, 50 bp, synthetic construct
  source 1..50: mol_type = other DNA
gagcggagctgggtgaggatgcgctccaccatgcgcacgtagccgggcaa

SEQ ID NO: 42443 - DNA, 50 bp, synthetic construct
  source 1..50: mol_type = other DNA
gcggccttgcttgccgacgacctcgcgtcctcggcggcctgcagcagaag

SEQ ID NO: 42444 - DNA, 50 bp, synthetic construct
  source 1..50: mol_type = other DNA
ttgtggtgtcgggaccgaggtcgaggtcgggtcctcacccgacacgacgc

SEQ ID NO: 42445 - DNA, 50 bp, synthetic construct
  source 1..50: mol_type = other DNA
aagtaggttcgaatctcttccggcgcgcccggcaggattcgaaccatctg

SEQ ID NO: 42446 - DNA, 50 bp, synthetic construct
  source 1..50: mol_type = other DNA
tcaccggttgctgggttgcggccttcggggagcaacccggcttccgctgg

SEQ ID NO: 42447 - DNA, 50 bp, synthetic construct
  source 1..50: mol_type = other DNA
ctcgttcccggccttcccaatttcatcgtcgtcggcctgccggacaaggc

SEQ ID NO: 42448 - DNA, 50 bp, synthetic construct
  source 1..50: mol_type = other DNA
caccgcgggattctcttcctggacgaggcccccgagttcagcggacgggc

SEQ ID NO: 42449 - DNA, 50 bp, synthetic construct
  source 1..50: mol_type = other DNA
ggcaagatcgtcattgcggatttctggacgttctgctgtatcaactgcct

SEQ ID NO: 42450 - DNA, 50 bp, synthetic construct
  source 1..50: mol_type = other DNA
taccaggactgcccggtaaccccgcactgggttctcctcgcgtgctggtc

SEQ ID NO: 42451 - DNA, 50 bp, synthetic construct
  source 1..50: mol_type = other DNA
gaccaggccaagctcggccggctgcttgctcggtcgagcggggcttgcgg

SEQ ID NO: 42452 - DNA, 50 bp, synthetic construct
  source 1..50: mol_type = other DNA
tcggtgaccacaaagacctcctcgcgggaagaggtcggggtggtcgtcga

SEQ ID NO: 42453 - DNA, 50 bp, synthetic construct
  source 1..50: mol_type = other DNA
ttgtctttgaaggataactaatgatttttgaaggtaatcttcaaatttaa

SEQ ID NO: 42454 - DNA, 50 bp, synthetic construct
  source 1..50: mol_type = other DNA
cggtttgctctttctagacgagcaatagcgagttgccggaatttaataga

SEQ ID NO: 42455 - DNA, 50 bp, synthetic construct
  source 1..50: mol_type = other DNA
aaagaggcgattgatacgcttgtcaaacatatggaagacaaacagcatga

SEQ ID NO: 42456 - DNA, 50 bp, synthetic construct
  source 1..50: mol_type = other DNA
tatgtttatgttacaatacaaatgcttttttgtacttgtacataagcatt

SEQ ID NO: 42457 - DNA, 50 bp, synthetic construct
  source 1..50: mol_type = other DNA
ttacgtgacaccagtgacatgttcacggacgtggcaccagtgacacgtcg

SEQ ID NO: 42458 - DNA, 50 bp, synthetic construct
  source 1..50: mol_type = other DNA
gtttgtgggagattcttcatcttcaacaagtaaaagaattattttcagga

SEQ ID NO: 42459 - DNA, 50 bp, synthetic construct
  source 1..50: mol_type = other DNA
actcaagccagttgctgctcgtaaatatcagaaatggcgaccaattgaga

SEQ ID NO: 42460 - DNA, 50 bp, synthetic construct
  source 1..50: mol_type = other DNA
gttaacaaaaataaaaggctatgacttcatagcctttttcttttgcttgt

SEQ ID NO: 42461 - DNA, 50 bp, synthetic construct
  source 1..50: mol_type = other DNA
ggcctgctcgccgagcccgaggggctccacaccccgaacgcgagcaggaa

SEQ ID NO: 42462 - DNA, 50 bp, synthetic construct
  source 1..50: mol_type = other DNA
cgcagtggccccttcccgcatcctgcgtaccccggggctggggcacggcg

SEQ ID NO: 42463 - DNA, 50 bp, synthetic construct
  source 1..50: mol_type = other DNA
tctccccccacccggacaaccagggcccgcgcctggcggcaggccggagc

SEQ ID NO: 42464 - DNA, 50 bp, synthetic construct
  source 1..50: mol_type = other DNA
tttccagggcaggaaagggacgatgccacttcatcgagcggccgacgaaa

SEQ ID NO: 42465 - DNA, 50 bp, synthetic construct
  source 1..50: mol_type = other DNA
atcgaaatcaatcgttgactctttcgagagcccaaacgattgaaaaagga

SEQ ID NO: 42466 - DNA, 50 bp, synthetic construct
  source 1..50: mol_type = other DNA
ttttcattcctctacccccggaaaattatccgtatcacttttgaaaaaag

SEQ ID NO: 42467 - DNA, 50 bp, synthetic construct
  source 1..50: mol_type = other DNA
aaggtaaaacggctcattttttcggaccgctacctgtggggtttcaccaa

SEQ ID NO: 42468 - DNA, 50 bp, synthetic construct
  source 1..50: mol_type = other DNA
aaccatgaccgtctacgaggtgttccgtcttttcgagataggaggatttt

SEQ ID NO: 42469 - DNA, 50 bp, synthetic construct
  source 1..50: mol_type = other DNA
caagcgaatgagcccgcagatcgccagcgatctgcagttcgccgagctgc

SEQ ID NO: 42470 - DNA, 50 bp, synthetic construct
  source 1..50: mol_type = other DNA
ctcgtcaccccgaagacgtccgccgcaacggacagattcggcttgcctga

SEQ ID NO: 42471 - DNA, 50 bp, synthetic construct
  source 1..50: mol_type = other DNA
tcttcgggcagcctaaagatataaatttttgacttttgggcagccgaggg

SEQ ID NO: 42472 - DNA, 50 bp, synthetic construct
  source 1..50: mol_type = other DNA
agactaaattataacattatttggcatcgaataaaattacccctttctct

SEQ ID NO: 42473 - DNA, 50 bp, synthetic construct
  source 1..50: mol_type = other DNA
ctctttttcgtgttggtacctgatatgttcttttgcaaataaaaaaagat

SEQ ID NO: 42474 - DNA, 50 bp, synthetic construct
  source 1..50: mol_type = other DNA
atgaggtagcttgtaattaacacatatgcgtggcctaggagcaacaggtg

SEQ ID NO: 42475 - DNA, 50 bp, synthetic construct
  source 1..50: mol_type = other DNA
aaacctattaatgatattgagggtttaacctcaatataatttttctatat

SEQ ID NO: 42476 - DNA, 50 bp, synthetic construct
  source 1..50: mol_type = other DNA
ctgatattttcacaaataaatagagtaatttcaatttgtgagaatactcc

SEQ ID NO: 42477 - DNA, 50 bp, synthetic construct
  source 1..50: mol_type = other DNA
attaatcataggttttgtaaatgttttataaaagtaaatatcagatatta

SEQ ID NO: 42478 - DNA, 50 bp, synthetic construct
  source 1..50: mol_type = other DNA
gcttcaatatgccttgtggcggtgatcacagtttcaacgtgtgtcgtcat

SEQ ID NO: 42479 - DNA, 50 bp, synthetic construct
  source 1..50: mol_type = other DNA
agtaatatagccaacattatagctatagcggcaaaagtgtaaaatctgct

SEQ ID NO: 42480 - DNA, 50 bp, synthetic construct
  source 1..50: mol_type = other DNA
tacttttaatatattacatagtctttatatatttatatatttttaccaat

SEQ ID NO: 42481 - DNA, 50 bp, synthetic construct
  source 1..50: mol_type = other DNA
cgctgtcggtcacgacaatgatcttgatatcgttagggtgccccaaggcg

SEQ ID NO: 42482 - DNA, 50 bp, synthetic construct
  source 1..50: mol_type = other DNA
tcactaatttgtattttgtaaatactaacttaaaaaatttaatttagtat

SEQ ID NO: 42483 - DNA, 50 bp, synthetic construct
  source 1..50: mol_type = other DNA
atgtcatgagtaaaattcaatgtcagggcattatctgtgctaacatcggt

SEQ ID NO: 42484 - DNA, 50 bp, synthetic construct
  source 1..50: mol_type = other DNA
tacagacaaagcagtatttaatgatatcttgataaacagacaaagctgtg

SEQ ID NO: 42485 - DNA, 50 bp, synthetic construct
  source 1..50: mol_type = other DNA
gttgtcgaggcgttttcaaaaaagttcaattcggaaacagaatggaaaat

SEQ ID NO: 42486 - DNA, 50 bp, synthetic construct
  source 1..50: mol_type = other DNA
tattatggaataaaagaagcaatacagatgatttcttttcagctttcttt

SEQ ID NO: 42487 - DNA, 50 bp, synthetic construct
  source 1..50: mol_type = other DNA
tggagtcccaggaggcggccaggccggactccccgacctgctcgactcca

SEQ ID NO: 42488 - DNA, 50 bp, synthetic construct
  source 1..50: mol_type = other DNA
tgggcgtggccgagcagatggccgtgttgctcgcgagtcgttcacgccct

SEQ ID NO: 42489 - DNA, 50 bp, synthetic construct
  source 1..50: mol_type = other DNA
acagaagagcgtatggctcgcattatgatgggagtctaccactcttctcc

SEQ ID NO: 42490 - DNA, 50 bp, synthetic construct
  source 1..50: mol_type = other DNA
ccactccgccttgaatatgtggtccggaccattgatgggagccgcgattt

SEQ ID NO: 42491 - DNA, 50 bp, synthetic construct
  source 1..50: mol_type = other DNA
ataagtatttttagaatttactgttaaacgttatggctaatgctacaatg

SEQ ID NO: 42492 - DNA, 50 bp, synthetic construct
  source 1..50: mol_type = other DNA
ctggcatgtggtcaaggtgctgtatctacagaacatagcctctactcaga

SEQ ID NO: 42493 - DNA, 50 bp, synthetic construct
  source 1..50: mol_type = other DNA
aaaagtccgaacgacatgtgcgcatttgaccacatgccagccaaattttg

SEQ ID NO: 42494 - DNA, 50 bp, synthetic construct
  source 1..50: mol_type = other DNA
attttattggatcacttactgtgcgagctgaaagcaggtcagtcagccat

SEQ ID NO: 42495 - DNA, 50 bp, synthetic construct
  source 1..50: mol_type = other DNA
cccggctttactcttgttggtattatattgccaacggttactctcgttgg

SEQ ID NO: 42496 - DNA, 50 bp, synthetic construct
  source 1..50: mol_type = other DNA
cactctagatttcttatctgccgcattaaagtgagttgcaatcttttgtg

SEQ ID NO: 42497 - DNA, 50 bp, synthetic construct
  source 1..50: mol_type = other DNA
gaccaactattagtaactcacgcagatactgatcatatgggggatatcga

SEQ ID NO: 42498 - DNA, 50 bp, synthetic construct
  source 1..50: mol_type = other DNA
caggctataaaacgcataatgtagcttaactctaattgtcaaatagaggc

SEQ ID NO: 42499 - DNA, 50 bp, synthetic construct
  source 1..50: mol_type = other DNA
ttattttaatttaaaaaacatactaatataagtttttatattaaaaaaat

SEQ ID NO: 42500 - DNA, 50 bp, synthetic construct
  source 1..50: mol_type = other DNA
tcctgtgttctcaaattttttgagatctcttaacgatatgagctacaagc

SEQ ID NO: 42501 - DNA, 50 bp, synthetic construct
  source 1..50: mol_type = other DNA
attcatttagctacacactcaacatgcatagtatgagggaacatatcaac

SEQ ID NO: 42502 - DNA, 50 bp, synthetic construct
  source 1..50: mol_type = other DNA
gtccagagagcttgttgagacggtagcaagttgacacaagtaaattaata

SEQ ID NO: 42503 - DNA, 50 bp, synthetic construct
  source 1..50: mol_type = other DNA
agattgccatatgactccaggagttaactcatggtagggaaaggttatct

SEQ ID NO: 42504 - DNA, 50 bp, synthetic construct
  source 1..50: mol_type = other DNA
ctacaattatgatttttaataagtaattaatttaaaaataatattaccgt

SEQ ID NO: 42505 - DNA, 50 bp, synthetic construct
  source 1..50: mol_type = other DNA
caaaacaaatagcatactccttaaataagaggctgattgtgataattttt

SEQ ID NO: 42506 - DNA, 50 bp, synthetic construct
  source 1..50: mol_type = other DNA
aataaatatatgtagctatactcaattgtcgatttttaaataatatgata

SEQ ID NO: 42507 - DNA, 50 bp, synthetic construct
  source 1..50: mol_type = other DNA
ctggagtttcttttggataatttgttatacagatgcaacaggaaatccat

SEQ ID NO: 42508 - DNA, 50 bp, synthetic construct
  source 1..50: mol_type = other DNA
attttattgctatgtatcaaaattagaattttgatacaatgtaaagccat

SEQ ID NO: 42509 - DNA, 50 bp, synthetic construct
  source 1..50: mol_type = other DNA
atttgtaaattacattataaatagaactgatgttaaattaatgcaaaaag

SEQ ID NO: 42510 - DNA, 50 bp, synthetic construct
  source 1..50: mol_type = other DNA
ttggtctggatgtgcaacccagtttaagaaaattatgaaatgatatacaa

SEQ ID NO: 42511 - DNA, 50 bp, synthetic construct
  source 1..50: mol_type = other DNA
atggtaaataatatagattttgctgcatataatgcacaaatagttaaata

SEQ ID NO: 42512 - DNA, 50 bp, synthetic construct
  source 1..50: mol_type = other DNA
attattttttacttgtggtacggttctccattatttattctataagctct

SEQ ID NO: 42513 - DNA, 50 bp, synthetic construct
  source 1..50: mol_type = other DNA
ttagtatgtattattacatcataatattataattggaatgtacattgtta

SEQ ID NO: 42514 - DNA, 50 bp, synthetic construct
  source 1..50: mol_type = other DNA
caataaggcttcttttctatgcctatagagatagaatggaagttttaacc

SEQ ID NO: 42515 - DNA, 50 bp, synthetic construct
  source 1..50: mol_type = other DNA
acgtcatgttcattattcagtagaatcgctagttttgataggtctagcgt

SEQ ID NO: 42516 - DNA, 50 bp, synthetic construct
  source 1..50: mol_type = other DNA
tcttgtacccattttatcaaaaaagaggaaagatgggagcaggttaaaaa

SEQ ID NO: 42517 - DNA, 50 bp, synthetic construct
  source 1..50: mol_type = other DNA
ctgtaacgctctataatcccttcaaatatggggatgggtggccgtctccc

SEQ ID NO: 42518 - DNA, 50 bp, synthetic construct
  source 1..50: mol_type = other DNA
aggatggcaataatggcaataacaaccattaattcgattagcgtaaatcc

SEQ ID NO: 42519 - DNA, 50 bp, synthetic construct
  source 1..50: mol_type = other DNA
ggcgtccggtctcatgagaaggcgcgcgccagtgtcagctacccggcacg

SEQ ID NO: 42520 - DNA, 50 bp, synthetic construct
  source 1..50: mol_type = other DNA
gctccaccaccaacgaaggcaacgtctgatatggtatgatgtggactgcg

SEQ ID NO: 42521 - DNA, 50 bp, synthetic construct
  source 1..50: mol_type = other DNA
tcataacaacaagggagaccgctgctccatcccgcgacaggtgtttaatg

SEQ ID NO: 42522 - DNA, 50 bp, synthetic construct
  source 1..50: mol_type = other DNA
aaaattcagacctattctttcagaatactgaaactaataatactgatttt

SEQ ID NO: 42523 - DNA, 50 bp, synthetic construct
  source 1..50: mol_type = other DNA
tgtattagaatatctgatattctaatataaataataaatattagtggaga

SEQ ID NO: 42524 - DNA, 50 bp, synthetic construct
  source 1..50: mol_type = other DNA
tccgaggctcgggctgagctccagcactggtcggcttcctcgccctcacg

SEQ ID NO: 42525 - DNA, 50 bp, synthetic construct
  source 1..50: mol_type = other DNA
ggaaaccagagaaaaacgaaaatccgggatttcatttttgcataattccc

SEQ ID NO: 42526 - DNA, 50 bp, synthetic construct
  source 1..50: mol_type = other DNA
atttgacgaaatggacctgtcagccaattccgctgtaaatatcactttat

SEQ ID NO: 42527 - DNA, 50 bp, synthetic construct
  source 1..50: mol_type = other DNA
cggagaatagcatctatgctaatacgcatattggttgatgctgtcaggcg

SEQ ID NO: 42528 - DNA, 50 bp, synthetic construct
  source 1..50: mol_type = other DNA
attaaagatgttgaaacggtatatagatgccgtcttacatcccctcaaat

SEQ ID NO: 42529 - DNA, 50 bp, synthetic construct
  source 1..50: mol_type = other DNA
aataccgccccgttttcggcacattatctgtccagcaagagcagggaatt

SEQ ID NO: 42530 - DNA, 50 bp, synthetic construct
  source 1..50: mol_type = other DNA
attgttttcgtaactctaatacataaaaatattagaggatgacaaatagc

SEQ ID NO: 42531 - DNA, 50 bp, synthetic construct
  source 1..50: mol_type = other DNA
cattatatgcagatttccattagatatcttatctaatttataatatatac

SEQ ID NO: 42532 - DNA, 50 bp, synthetic construct
  source 1..50: mol_type = other DNA
gttaaactagatgagaatatgcaaaatttcatcatctctaccgtccgtgt

SEQ ID NO: 42533 - DNA, 50 bp, synthetic construct
  source 1..50: mol_type = other DNA
gcggaaagtttgttctatgcgattctattcgattatcaaggttcccggct

SEQ ID NO: 42534 - DNA, 50 bp, synthetic construct
  source 1..50: mol_type = other DNA
cgggatcggggagctgatccgggcggagcggggaggaatcccggaagcgg

SEQ ID NO: 42535 - DNA, 50 bp, synthetic construct
  source 1..50: mol_type = other DNA
cgccgttttcggaccgcagaagggcgaatgtcttcgccatgatttcggcc

SEQ ID NO: 42536 - DNA, 50 bp, synthetic construct
  source 1..50: mol_type = other DNA
tatcatgcgatacagtgggatgttgatagcttagactggaaaaattatgg

SEQ ID NO: 42537 - DNA, 50 bp, synthetic construct
  source 1..50: mol_type = other DNA
gccgacgagggccacaccccgtagccgatcggcagcgggccctgctcggc

SEQ ID NO: 42538 - DNA, 50 bp, synthetic construct
  source 1..50: mol_type = other DNA
ttgttttccctgatgttttttataattatattaaaaataagtataaaaat

SEQ ID NO: 42539 - DNA, 50 bp, synthetic construct
  source 1..50: mol_type = other DNA
cgcgatctggtccgcctcttggcccgcgcaaagcgctgggcctgatcctc

SEQ ID NO: 42540 - DNA, 50 bp, synthetic construct
  source 1..50: mol_type = other DNA
tatatccgcgcgaccttggcgaacgcgtccaacaaggtcgtcaaaataag

SEQ ID NO: 42541 - DNA, 50 bp, synthetic construct
  source 1..50: mol_type = other DNA
aaaggttttagttacctatggacatagttccatacataactaagatgtat

SEQ ID NO: 42542 - DNA, 50 bp, synthetic construct
  source 1..50: mol_type = other DNA
gctcttctagttcagcctgtgcaataggacataatcttggctagtcgagg

SEQ ID NO: 42543 - DNA, 50 bp, synthetic construct
  source 1..50: mol_type = other DNA
attgcaatccactttggaaaatttaaagcttgtgcagacgggaaccagcg

SEQ ID NO: 42544 - DNA, 50 bp, synthetic construct
  source 1..50: mol_type = other DNA
ctgcatggtgatattgttacttaatatgaaactgcatggtgatattgttg

SEQ ID NO: 42545 - DNA, 50 bp, synthetic construct
  source 1..50: mol_type = other DNA
tttcgaagaaatatatttgcagaactttctctaaaactatttttattata

SEQ ID NO: 42546 - DNA, 50 bp, synthetic construct
  source 1..50: mol_type = other DNA
tgcagaggctacgttattgagttcatgaacttataaacgttatggctaat

SEQ ID NO: 42547 - DNA, 50 bp, synthetic construct
  source 1..50: mol_type = other DNA
gttggaggagttggttggtttccccttgaatatatccaaagcgctccaag

SEQ ID NO: 42548 - DNA, 50 bp, synthetic construct
  source 1..50: mol_type = other DNA
ctctggtgagattaacgagattaaagttaaacgctttaaggggtacagat

SEQ ID NO: 42549 - DNA, 50 bp, synthetic construct
  source 1..50: mol_type = other DNA
gcgctgatgcgcgatatgttcaccaaggatgattttgctcgcatgatgtc

SEQ ID NO: 42550 - DNA, 50 bp, synthetic construct
  source 1..50: mol_type = other DNA
gcggcaggaatgccttccagaagcgcgctcgcgcaagaaagaaatgcggc

SEQ ID NO: 42551 - DNA, 50 bp, synthetic construct
  source 1..50: mol_type = other DNA
actagttaaggatggcaaagaaacaaatgccttcgccatcttttaccttc

SEQ ID NO: 42552 - DNA, 50 bp, synthetic construct
  source 1..50: mol_type = other DNA
tttcgtgcgcaccttggcccgcagctatgccgggtcgcgcgcagacgaca

SEQ ID NO: 42553 - DNA, 50 bp, synthetic construct
  source 1..50: mol_type = other DNA
ggatattgatattttggtggagatgacgagagtcgaactcgtgtccgaaa

SEQ ID NO: 42554 - DNA, 50 bp, synthetic construct
  source 1..50: mol_type = other DNA
cgccatttttatgtaattttggcagtcgccatttttataggaaaacttta

SEQ ID NO: 42555 - DNA, 50 bp, synthetic construct
  source 1..50: mol_type = other DNA
gcagttttggtagcgcgcttgaatggattcaatcatcaatccaaatctgt

SEQ ID NO: 42556 - DNA, 50 bp, synthetic construct
  source 1..50: mol_type = other DNA
ataagtgttattgaaattgataaagaatgattcaattcaatcacaattat

SEQ ID NO: 42557 - DNA, 50 bp, synthetic construct
  source 1..50: mol_type = other DNA
ggacgctgtggttttggatattgattacatggagcattacaaggacttta

SEQ ID NO: 42558 - DNA, 50 bp, synthetic construct
  source 1..50: mol_type = other DNA
gaacaatttacgcgttgcgacggctttcattgtgggatatggtatgatga

SEQ ID NO: 42559 - DNA, 50 bp, synthetic construct
  source 1..50: mol_type = other DNA
gaaaatatagaggatagcttttgttaaaaacagataaactatatatttac

SEQ ID NO: 42560 - DNA, 50 bp, synthetic construct
  source 1..50: mol_type = other DNA
gcggaagtagagactttcattttttaaagatggcggaagtagagggaatc

SEQ ID NO: 42561 - DNA, 50 bp, synthetic construct
  source 1..50: mol_type = other DNA
gaaaaaaattgactttgctgtagcaggctatctgaatctttctttcatac

SEQ ID NO: 42562 - DNA, 50 bp, synthetic construct
  source 1..50: mol_type = other DNA
ttatgagtaaaagcctaaaaacctctatattttcctccttgcttagagaa

SEQ ID NO: 42563 - DNA, 50 bp, synthetic construct
  source 1..50: mol_type = other DNA
acacaatctattttttagttttatttatgatatgcttcgcctcgcatgat

SEQ ID NO: 42564 - DNA, 50 bp, synthetic construct
  source 1..50: mol_type = other DNA
ccgttgattgagcttaaaactatttcaaatagcatttccaaaatttctgg

SEQ ID NO: 42565 - DNA, 50 bp, synthetic construct
  source 1..50: mol_type = other DNA
ctatcttttttcataatttttttctctaaaaaggatattagtcaagttat

SEQ ID NO: 42566 - DNA, 50 bp, synthetic construct
  source 1..50: mol_type = other DNA
gttttgtagcaaaatatccagaagtctcactcaatatttcaccaaggttc

SEQ ID NO: 42567 - DNA, 50 bp, synthetic construct
  source 1..50: mol_type = other DNA
attaccttttgagatgttttcttgtagtaacctacatctcaatcaaggat

SEQ ID NO: 42568 - DNA, 50 bp, synthetic construct
  source 1..50: mol_type = other DNA
tacattggtggaaatgtaggttactactatccttgattgagatgttggtg

SEQ ID NO: 42569 - DNA, 50 bp, synthetic construct
  source 1..50: mol_type = other DNA
aattaatgtcaactaactattgtatagttatgttatatcataataattga

SEQ ID NO: 42570 - DNA, 50 bp, synthetic construct
  source 1..50: mol_type = other DNA
agcttaatttcaacatctatatgtttgactatattagttgctattatcag

SEQ ID NO: 42571 - DNA, 50 bp, synthetic construct
  source 1..50: mol_type = other DNA
gcgcataatcatccttccggaatatattatccttctggtaatgttattcc

SEQ ID NO: 42572 - DNA, 50 bp, synthetic construct
  source 1..50: mol_type = other DNA
gacccgcagctgctgctcttcgacgaaccgaccacaggtctcgacgtggc

SEQ ID NO: 42573 - DNA, 50 bp, synthetic construct
  source 1..50: mol_type = other DNA
ctgctgagcaggatcctcaggaagcggatccatgaagccctgaccattcg

SEQ ID NO: 42574 - DNA, 50 bp, synthetic construct
  source 1..50: mol_type = other DNA
aaggtttccgcgatgtgaccgaggttgtatccatacatcactcaaaccct

SEQ ID NO: 42575 - DNA, 50 bp, synthetic construct
  source 1..50: mol_type = other DNA
aagctacgatggacggagacaaatcgatttctctcgctggacggaaagag

SEQ ID NO: 42576 - DNA, 50 bp, synthetic construct
  source 1..50: mol_type = other DNA
aggaggtcagcctgtggtggctctcttgtggtggacccggccggactcga

SEQ ID NO: 42577 - DNA, 50 bp, synthetic construct
  source 1..50: mol_type = other DNA
actgaagctgctgcgggtgaggaggtggtggacccggccggactcgaacc

SEQ ID NO: 42578 - DNA, 50 bp, synthetic construct
  source 1..50: mol_type = other DNA
gcgcaccgggggttcgaatccccctcaacaccgcaataccaacaaaagct

SEQ ID NO: 42579 - DNA, 50 bp, synthetic construct
  source 1..50: mol_type = other DNA
tgctcctccacctatagaaagatttaagtctttgagtagatttatgtctc

SEQ ID NO: 42580 - DNA, 50 bp, synthetic construct
  source 1..50: mol_type = other DNA
tcaaagcttgtgtggtattgtgtgtttttacatagtgtgacaagtgttat

SEQ ID NO: 42581 - DNA, 50 bp, synthetic construct
  source 1..50: mol_type = other DNA
gatcatcggctggtgtttgaatttataactaataaatccagctttatagc

SEQ ID NO: 42582 - DNA, 50 bp, synthetic construct
  source 1..50: mol_type = other DNA
aggtgaagtattggagatcactgcatgattttcaatcggtatcttgccgg

SEQ ID NO: 42583 - DNA, 50 bp, synthetic construct
  source 1..50: mol_type = other DNA
tatttagagatttcttccagaaacagatttccataataaaacggaaagtc

SEQ ID NO: 42584 - DNA, 50 bp, synthetic construct
  source 1..50: mol_type = other DNA
tcgccgagcagccgccagaactggttgcgcggatgcgcgtaatactgcgc

SEQ ID NO: 42585 - DNA, 50 bp, synthetic construct
  source 1..50: mol_type = other DNA
atatgcttcagtcttactttattgagaaataaaagcagacggaagcccga

SEQ ID NO: 42586 - DNA, 50 bp, synthetic construct
  source 1..50: mol_type = other DNA
acagctcccggatcacgtcctccgtgaccggcatcgagcatgatagatac

SEQ ID NO: 42587 - DNA, 50 bp, synthetic construct
  source 1..50: mol_type = other DNA
attcaattagaaagttagtcattttttcatgggcgaccttctaatttttg

SEQ ID NO: 42588 - DNA, 50 bp, synthetic construct
  source 1..50: mol_type = other DNA
cctctaatatagattaaaattagtatattaattttaaggtttgataaaat

SEQ ID NO: 42589 - DNA, 50 bp, synthetic construct
  source 1..50: mol_type = other DNA
tccatataaaaacataaaaacaaaatgttaatactgacattttaataaaa

SEQ ID NO: 42590 - DNA, 50 bp, synthetic construct
  source 1..50: mol_type = other DNA
ctaaagctgactccaaattttcaagtttggcggttgagtgcatctatctt

SEQ ID NO: 42591 - DNA, 50 bp, synthetic construct
  source 1..50: mol_type = other DNA
tatgccctaaatgacttgctatatcacaatagggtatgcggtagactata

SEQ ID NO: 42592 - DNA, 50 bp, synthetic construct
  source 1..50: mol_type = other DNA
tctatttatattttcgattcaaaatatttttgttataatgtaattatttg

SEQ ID NO: 42593 - DNA, 50 bp, synthetic construct
  source 1..50: mol_type = other DNA
aaactttctcacctatgttagcacagctttgaaaataggtaaaataaaag

SEQ ID NO: 42594 - DNA, 50 bp, synthetic construct
  source 1..50: mol_type = other DNA
aagatacaaatgccacttgcaatgtttttattgactggaattggtaaaag

SEQ ID NO: 42595 - DNA, 50 bp, synthetic construct
  source 1..50: mol_type = other DNA
aaatgcgtcaatacggaaaataagtacttgtttttctggttcttgtattt

SEQ ID NO: 42596 - DNA, 50 bp, synthetic construct
  source 1..50: mol_type = other DNA
gggatccaatatatgacggagcggcggcgagccgtcaagaaatattgcga

SEQ ID NO: 42597 - DNA, 50 bp, synthetic construct
  source 1..50: mol_type = other DNA
accgagggcgggaactcggcggcctcgtcgaggaagaggacgccgtgggt

SEQ ID NO: 42598 - DNA, 50 bp, synthetic construct
  source 1..50: mol_type = other DNA
cgatcgggtgtcactcctggcgggtactcggtgataagcgcgccgtcagc

SEQ ID NO: 42599 - DNA, 50 bp, synthetic construct
  source 1..50: mol_type = other DNA
atgggaacattttgatttaatactttttacgaaaattcaaatgttcccat

SEQ ID NO: 42600 - DNA, 50 bp, synthetic construct
  source 1..50: mol_type = other DNA
gcgcgcatggtgctcaccaccgagagcgccgtggtcgacaagccggccga

SEQ ID NO: 42601 - DNA, 50 bp, synthetic construct
  source 1..50: mol_type = other DNA
tgtcatctttagaactgaaccacgcaattgattctcatttaaagatgaac

SEQ ID NO: 42602 - DNA, 50 bp, synthetic construct
  source 1..50: mol_type = other DNA
gccagctgccactggtgccaatgtacgtcatggcacacgagtccttcgag

SEQ ID NO: 42603 - DNA, 50 bp, synthetic construct
  source 1..50: mol_type = other DNA
gttcgcaaccacatctcaaatgtaatcacaaacgcaatgcaaaagctagg

SEQ ID NO: 42604 - DNA, 50 bp, synthetic construct
  source 1..50: mol_type = other DNA
ttaatcgtggtgaaccgtatcacaagtaaagaggggagaaccatatcata

SEQ ID NO: 42605 - DNA, 50 bp, synthetic construct
  source 1..50: mol_type = other DNA
acccattgctatcactttctttcttagctaacccaccgatattaatacct

SEQ ID NO: 42606 - DNA, 50 bp, synthetic construct
  source 1..50: mol_type = other DNA
gaaaaacaatttgaataaaatgcctggtgattttaaaaaactattaacca

SEQ ID NO: 42607 - DNA, 50 bp, synthetic construct
  source 1..50: mol_type = other DNA
gcctgcacctgtgcttgagccatcttaacgaaagcttcacatcctttaga

SEQ ID NO: 42608 - DNA, 50 bp, synthetic construct
  source 1..50: mol_type = other DNA
taggatgcccagccttcgttcccctagcgaaacgaagcccagccttcgtt

SEQ ID NO: 42609 - DNA, 50 bp, synthetic construct
  source 1..50: mol_type = other DNA
aaaaattattatcattttctggataacctgagtgaagttatttaattttt

SEQ ID NO: 42610 - DNA, 50 bp, synthetic construct
  source 1..50: mol_type = other DNA
aataatcataagccattataaagatttatttataatctaagtccatcatt

SEQ ID NO: 42611 - DNA, 50 bp, synthetic construct
  source 1..50: mol_type = other DNA
aatactaatagactaatttgtatttaaaaagttgttacactatttaaatt

SEQ ID NO: 42612 - DNA, 50 bp, synthetic construct
  source 1..50: mol_type = other DNA
ttttgcaaactatcaccagacaaatacttattgacaaagatatgaaaaaa

SEQ ID NO: 42613 - DNA, 50 bp, synthetic construct
  source 1..50: mol_type = other DNA
ggtcgcaggttcgagccctgctcgggggagccaagtttccaaaagccaca

SEQ ID NO: 42614 - DNA, 50 bp, synthetic construct
  source 1..50: mol_type = other DNA
tgattgtatgaaaaatgtaattattaaaaattatatcaatattagaaaac

SEQ ID NO: 42615 - DNA, 50 bp, synthetic construct
  source 1..50: mol_type = other DNA
tccgggatgtcgacggtcgagtacgcgtacgcgatcggcacgatcgctgc

SEQ ID NO: 42616 - DNA, 50 bp, synthetic construct
  source 1..50: mol_type = other DNA
tgaggccagaggttcgaatcctcccggtgcgatgtatcctcccgggcaca

SEQ ID NO: 42617 - DNA, 50 bp, synthetic construct
  source 1..50: mol_type = other DNA
gcaccatgccgtgcgtccggtcctcggtgagtggttcgtcggcggggttc

SEQ ID NO: 42618 - DNA, 50 bp, synthetic construct
  source 1..50: mol_type = other DNA
tccatctttcaggaaaaactcaaacttttttagtttctttgaaagatgaa

SEQ ID NO: 42619 - DNA, 50 bp, synthetic construct
  source 1..50: mol_type = other DNA
gaacttttcgcatggggacacccacccgccggtcgggcagcgaaaagttc

SEQ ID NO: 42620 - DNA, 50 bp, synthetic construct
  source 1..50: mol_type = other DNA
gactgacggcgccacaccgccgcgggtgggctagtgtggaccaccaggtg

SEQ ID NO: 42621 - DNA, 50 bp, synthetic construct
  source 1..50: mol_type = other DNA
tggcgcagcatttcttgatcttatgcagcatttcttgaatttctgcccgc

SEQ ID NO: 42622 - DNA, 50 bp, synthetic construct
  source 1..50: mol_type = other DNA
atggttagagctatcagaagacggtttcagcttctgttaagtctgaatag

SEQ ID NO: 42623 - DNA, 50 bp, synthetic construct
  source 1..50: mol_type = other DNA
tggggctccgggggggtatagggtaatgcttccgggccgccggcggtata

SEQ ID NO: 42624 - DNA, 50 bp, synthetic construct
  source 1..50: mol_type = other DNA
gcgcctttcaacgtgcgccaggcctgctcatggcgattgtcgcaaggacg

SEQ ID NO: 42625 - DNA, 50 bp, synthetic construct
  source 1..50: mol_type = other DNA
ggcctgcgggtgttcctgcccgcggccgcctgcatcagcaggcaagccag

SEQ ID NO: 42626 - DNA, 50 bp, synthetic construct
  source 1..50: mol_type = other DNA
ggcgaggtgccggtcgcctacgtggtcagcaaaaccaccggcacctcgcg

SEQ ID NO: 42627 - DNA, 50 bp, synthetic construct
  source 1..50: mol_type = other DNA
ctgcgggtctattggcctgccgggccgaacatatgccgctcaaccgtcag

SEQ ID NO: 42628 - DNA, 50 bp, synthetic construct
  source 1..50: mol_type = other DNA
gacggcactcatagcgcgactgctcgatcccacgctcgatgagtgccgcg

SEQ ID NO: 42629 - DNA, 50 bp, synthetic construct
  source 1..50: mol_type = other DNA
ctgatctactgggatggcagcggtctgccgctggtcatgcagaagatcag

SEQ ID NO: 42630 - DNA, 50 bp, synthetic construct
  source 1..50: mol_type = other DNA
cggacttgatcaagtccggtctataaatgtgtacaacttgatcagcaccg

SEQ ID NO: 42631 - DNA, 50 bp, synthetic construct
  source 1..50: mol_type = other DNA
gctaacctttttcttatttgaggattataacgataggggcattggttagt

SEQ ID NO: 42632 - DNA, 50 bp, synthetic construct
  source 1..50: mol_type = other DNA
tcctagtcataactgtatgaacatacagcttcagctgctccatctcatca

SEQ ID NO: 42633 - DNA, 50 bp, synthetic construct
  source 1..50: mol_type = other DNA
tgcgtcggcgtggtcacaaacagcaggcaggtggacagggtgccccaggt

SEQ ID NO: 42634 - DNA, 50 bp, synthetic construct
  source 1..50: mol_type = other DNA
cacacactccacatgtgttgtccatacgcactccacgtgatgtgtcattg

SEQ ID NO: 42635 - DNA, 50 bp, synthetic construct
  source 1..50: mol_type = other DNA
ttgtgcaactcacattctactacaacattaggaggagatcatttatggaa

SEQ ID NO: 42636 - DNA, 50 bp, synthetic construct
  source 1..50: mol_type = other DNA
gtggatctttttccgcagacgcatcacatcgagtgtgtaggtctgctcac

SEQ ID NO: 42637 - DNA, 50 bp, synthetic construct
  source 1..50: mol_type = other DNA
tttaaaatcatgcgaggcgaagcatacgcagaagcatatcacaaataaaa

SEQ ID NO: 42638 - DNA, 50 bp, synthetic construct
  source 1..50: mol_type = other DNA
ttttatactagcttccacctcgaaaaaaggttcttttttaaagttttcta

SEQ ID NO: 42639 - DNA, 50 bp, synthetic construct
  source 1..50: mol_type = other DNA
gcaggcgaaggtgaggttacttatttgttgggttgtcgacatcggtcaag

SEQ ID NO: 42640 - DNA, 50 bp, synthetic construct
  source 1..50: mol_type = other DNA
agcaggagatcctcagaagatattataaactctttcgagaatcaagtgca

SEQ ID NO: 42641 - DNA, 50 bp, synthetic construct
  source 1..50: mol_type = other DNA
ccgggcagtcaagccgactgcgtggtcgcctcgtcatcttgacttcttcc

SEQ ID NO: 42642 - DNA, 50 bp, synthetic construct
  source 1..50: mol_type = other DNA
tgctggaggacttcgggtatctgccggcaaccacccggtggtcacttccg

SEQ ID NO: 42643 - DNA, 50 bp, synthetic construct
  source 1..50: mol_type = other DNA
ggaagattacctcttttgcagcatttacgctctacaacgccggggcttcc

SEQ ID NO: 42644 - DNA, 50 bp, synthetic construct
  source 1..50: mol_type = other DNA
taactcttatatttacggataaaaaagggttggattccgtgtgtaatttc

SEQ ID NO: 42645 - DNA, 50 bp, synthetic construct
  source 1..50: mol_type = other DNA
ccttataaggccctctaagaacccttttgttgttttgcaagcttagttaa

SEQ ID NO: 42646 - DNA, 50 bp, synthetic construct
  source 1..50: mol_type = other DNA
atcaaacttaacaaatatatttcatttcgaacaaattcattcagattcca

SEQ ID NO: 42647 - DNA, 50 bp, synthetic construct
  source 1..50: mol_type = other DNA
aaaccgcatcatttatgatatgcttcgcctttcatgatcttaaaggctct

SEQ ID NO: 42648 - DNA, 50 bp, synthetic construct
  source 1..50: mol_type = other DNA
gcataaaagaagagaatattgtaatgttttatttgtcttttttttgatgg

SEQ ID NO: 42649 - DNA, 50 bp, synthetic construct
  source 1..50: mol_type = other DNA
ccggcttctgatccgggttgttgggccctcccaatgggcgtgtgtcgcgg

SEQ ID NO: 42650 - DNA, 50 bp, synthetic construct
  source 1..50: mol_type = other DNA
ggagatctatagaccaactctttttaagaccgtcaactctttattcaaat

SEQ ID NO: 42651 - DNA, 50 bp, synthetic construct
  source 1..50: mol_type = other DNA
caacgattacaagcaatgcacatcccagtattcatcgcttgtagcatatc

SEQ ID NO: 42652 - DNA, 50 bp, synthetic construct
  source 1..50: mol_type = other DNA
atgttataattaggattcaaatatcaaagttttaatccttaccgcagaat

SEQ ID NO: 42653 - DNA, 50 bp, synthetic construct
  source 1..50: mol_type = other DNA
caccccgacgcccccgtcggtgaggcctcacccccgagaagatcgcggcc

SEQ ID NO: 42654 - DNA, 50 bp, synthetic construct
  source 1..50: mol_type = other DNA
acaccgtgcgctttcgctcgccggccgtgcggtgcgaaggcgcagggtct

SEQ ID NO: 42655 - DNA, 50 bp, synthetic construct
  source 1..50: mol_type = other DNA
gacaatacgcgcgcgaccgacacagcgctgagcgagtcgccggtcgggtc

SEQ ID NO: 42656 - DNA, 50 bp, synthetic construct
  source 1..50: mol_type = other DNA
ctggcggtgaagcgtgacatagcagcgcctatcgcagccgcttcggcagc

SEQ ID NO: 42657 - DNA, 50 bp, synthetic construct
  source 1..50: mol_type = other DNA
cgcactcagggcatgtggagtgcatatggacaacacaagatggggcgtcg

SEQ ID NO: 42658 - DNA, 50 bp, synthetic construct
  source 1..50: mol_type = other DNA
tcactgccctaattttttgtttccttagtaacctacatttcaatcaagga

SEQ ID NO: 42659 - DNA, 50 bp, synthetic construct
  source 1..50: mol_type = other DNA
gcgctatgcaccgggcggctgtcgaggatggcgcgattcacgttacgctg

SEQ ID NO: 42660 - DNA, 50 bp, synthetic construct
  source 1..50: mol_type = other DNA
attcatggactttttttaaataatattccttttggaagttttccgtctgg

SEQ ID NO: 42661 - DNA, 50 bp, synthetic construct
  source 1..50: mol_type = other DNA
ctactatcattgggattggcttattaatgaacctctatcagcagtagttc

SEQ ID NO: 42662 - DNA, 50 bp, synthetic construct
  source 1..50: mol_type = other DNA
aagcaatgatgaataaaaaaacttttgctctttactattcataagctctt

SEQ ID NO: 42663 - DNA, 50 bp, synthetic construct
  source 1..50: mol_type = other DNA
tgcttgaaaaatatcaaccatttataaaaaagctatatttttctcatttt

SEQ ID NO: 42664 - DNA, 50 bp, synthetic construct
  source 1..50: mol_type = other DNA
gttgaaaataatattaaacacatcgatataaaaattttattgatttcata

SEQ ID NO: 42665 - DNA, 50 bp, synthetic construct
  source 1..50: mol_type = other DNA
tagggaaattagtttggtatatggcacctccagcactactataaaccctt

SEQ ID NO: 42666 - DNA, 50 bp, synthetic construct
  source 1..50: mol_type = other DNA
aaatgtaaatgaatatttttgccaatttacctccatattttgatacatgg

SEQ ID NO: 42667 - DNA, 50 bp, synthetic construct
  source 1..50: mol_type = other DNA
cataaaagctccattaattggagcttgctaaaatttgcccagccgttttg

SEQ ID NO: 42668 - DNA, 50 bp, synthetic construct
  source 1..50: mol_type = other DNA
aaattatagatatggctacatacttaaaaatcctatgatatgtataattt

SEQ ID NO: 42669 - DNA, 50 bp, synthetic construct
  source 1..50: mol_type = other DNA
aaaaggtactggttctccttctgctaatcaaaatatccctcttagctttt

SEQ ID NO: 42670 - DNA, 50 bp, synthetic construct
  source 1..50: mol_type = other DNA
tattacagaaaaagagcttatgaatattcattatataaaatgaattgatg

SEQ ID NO: 42671 - DNA, 50 bp, synthetic construct
  source 1..50: mol_type = other DNA
tttttcccttctttacttcgcaaatgggtatagcgggaagaaaggacaaa

SEQ ID NO: 42672 - DNA, 50 bp, synthetic construct
  source 1..50: mol_type = other DNA
gaaaatgtctcacctattagctcctcctttctattaggtgacattttagc

SEQ ID NO: 42673 - DNA, 50 bp, synthetic construct
  source 1..50: mol_type = other DNA
ttttttgtggccattaggcgcatgaggtttaccccgtttaatcctaaagc

SEQ ID NO: 42674 - DNA, 50 bp, synthetic construct
  source 1..50: mol_type = other DNA
ctactacaatcatttaggtcagtttaaactgtactttcaacaagtgtaaa

SEQ ID NO: 42675 - DNA, 50 bp, synthetic construct
  source 1..50: mol_type = other DNA
tatatcagcaaatgtatatgtaattatatatttatatatttttaccaata

SEQ ID NO: 42676 - DNA, 50 bp, synthetic construct
  source 1..50: mol_type = other DNA
tctatggagttttttaagaaccgcccgcagttcttcaaccagtgcatagt

SEQ ID NO: 42677 - DNA, 50 bp, synthetic construct
  source 1..50: mol_type = other DNA
agaaactcattgtaaaggatttgcagacaattcttttagcgtagttttct

SEQ ID NO: 42678 - DNA, 50 bp, synthetic construct
  source 1..50: mol_type = other DNA
agtttgtttacacgttcccggatggacatccgggaagcacaccgcaaaga

SEQ ID NO: 42679 - DNA, 50 bp, synthetic construct
  source 1..50: mol_type = other DNA
aaaaccttacatttgtgtaaggtaattacatgacatttttgaaaggttta

SEQ ID NO: 42680 - DNA, 50 bp, synthetic construct
  source 1..50: mol_type = other DNA
ttaacccctagcttttgcattgcgtttgagatgtggttgcgaactgtctt

SEQ ID NO: 42681 - DNA, 50 bp, synthetic construct
  source 1..50: mol_type = other DNA
aaaaaacaataaaaagcaactcaaattacagttgttctttggattttttt

SEQ ID NO: 42682 - DNA, 50 bp, synthetic construct
  source 1..50: mol_type = other DNA
ataaaagataaaacattctggaggttcaagagaaatggaccattttttat

SEQ ID NO: 42683 - DNA, 50 bp, synthetic construct
  source 1..50: mol_type = other DNA
ccaacagggtgactacaaagatatttcgttctttgtcgtcaccttgttgg

SEQ ID NO: 42684 - DNA, 50 bp, synthetic construct
  source 1..50: mol_type = other DNA
gtgttatcggaaattcgtttagtgaacctttgttacttttccgataacag

SEQ ID NO: 42685 - DNA, 50 bp, synthetic construct
  source 1..50: mol_type = other DNA
aaacccgacttataaacctatctatactattaggtacacaaaatagaaat

SEQ ID NO: 42686 - DNA, 50 bp, synthetic construct
  source 1..50: mol_type = other DNA
gcgcctcgaagtcgggcaggaaccccacatcgcagtcgacggcggggcga

SEQ ID NO: 42687 - DNA, 50 bp, synthetic construct
  source 1..50: mol_type = other DNA
cttgacttggaataatatcaataaactaattaataagatttatatcgacg

SEQ ID NO: 42688 - DNA, 50 bp, synthetic construct
  source 1..50: mol_type = other DNA
gaaacgaaaatcatgaacgaaggctgggcatcctactggcatcagcgcat

SEQ ID NO: 42689 - DNA, 50 bp, synthetic construct
  source 1..50: mol_type = other DNA
aactctttaaaaatatataaaataaatatgaagactataataaacttgta

SEQ ID NO: 42690 - DNA, 50 bp, synthetic construct
  source 1..50: mol_type = other DNA
cttttgaacaagcagaatacatttataatttgaatcagctatttaaaaat

SEQ ID NO: 42691 - DNA, 50 bp, synthetic construct
  source 1..50: mol_type = other DNA
gggaagcggcgaggtaaatcaagggtcattgcgctcatagtcgtttctgt

SEQ ID NO: 42692 - DNA, 50 bp, synthetic construct
  source 1..50: mol_type = other DNA
cagagcctgaggcctccacgtcgatccaggagccgatgccgtcctgcttg

SEQ ID NO: 42693 - DNA, 50 bp, synthetic construct
  source 1..50: mol_type = other DNA
aggctcgcgccggcgccccggcagccgtctcggccttccggcgcggctcc

SEQ ID NO: 42694 - DNA, 50 bp, synthetic construct
  source 1..50: mol_type = other DNA
gtcttgccggtgccgggcgggccgactgtgaccgccggcggcggcgatct

SEQ ID NO: 42695 - DNA, 50 bp, synthetic construct
  source 1..50: mol_type = other DNA
ctgataaaactcgttctctttcaacacctttgagcgcctggtttttttcg

SEQ ID NO: 42696 - DNA, 50 bp, synthetic construct
  source 1..50: mol_type = other DNA
ttgctcctgctgctgtcagttccgttaggcattggaagcaatacacctaa

SEQ ID NO: 42697 - DNA, 50 bp, synthetic construct
  source 1..50: mol_type = other DNA
gacattatcgaatcgaataatggccagctctttccagattatgaaagctc

SEQ ID NO: 42698 - DNA, 50 bp, synthetic construct
  source 1..50: mol_type = other DNA
ccgccgcttaaagggccaaaggagcgcctgtgaaaataggtaagggcgaa

SEQ ID NO: 42699 - DNA, 50 bp, synthetic construct
  source 1..50: mol_type = other DNA
tttatgagaccgggtccttcgtgcgggattcgaacccctgaccttctcca

SEQ ID NO: 42700 - DNA, 50 bp, synthetic construct
  source 1..50: mol_type = other DNA
aggggttcgattcccctaagctccacggaggtccacagaatggtttcgca

SEQ ID NO: 42701 - DNA, 50 bp, synthetic construct
  source 1..50: mol_type = other DNA
ttgtctccctcggctgtcctaagaatcattagggtgcccaaaaaacctgg

SEQ ID NO: 42702 - DNA, 50 bp, synthetic construct
  source 1..50: mol_type = other DNA
tagggtgcgtagctcagctggatagaaatgtaactcagctgtccaaaata

SEQ ID NO: 42703 - DNA, 50 bp, synthetic construct
  source 1..50: mol_type = other DNA
gatagcgatcagcagagttggaagcgctcggtgctctcctgatggtgccg

SEQ ID NO: 42704 - DNA, 50 bp, synthetic construct
  source 1..50: mol_type = other DNA
ttatggcaaatactcaaccagtcaattttgaggtttctatggtataatga

SEQ ID NO: 42705 - DNA, 50 bp, synthetic construct
  source 1..50: mol_type = other DNA
aacagtgaagtgccccctgtcaagtactacaccattattatctcatattt

SEQ ID NO: 42706 - DNA, 50 bp, synthetic construct
  source 1..50: mol_type = other DNA
actggcaaagcccatcagcttgccatggcgatttccagcggtttgccacc

SEQ ID NO: 42707 - DNA, 50 bp, synthetic construct
  source 1..50: mol_type = other DNA
cagctccgcctgctcataaaagatttcttttttagagagaggcggagagt

SEQ ID NO: 42708 - DNA, 50 bp, synthetic construct
  source 1..50: mol_type = other DNA
gctggatttgatagccatataaaatcttctctactgccatcaaagagaag

SEQ ID NO: 42709 - DNA, 50 bp, synthetic construct
  source 1..50: mol_type = other DNA
actatcatattacagagagtatttaaaataaggctccgtatcctttgggt

SEQ ID NO: 42710 - DNA, 50 bp, synthetic construct
  source 1..50: mol_type = other DNA
atgacctcagaactgtaaccgcaaatggtgttttatgagaactccaccat

SEQ ID NO: 42711 - DNA, 50 bp, synthetic construct
  source 1..50: mol_type = other DNA
ttgcattcccaaaataaggggaactaaatttttttattagttttatgtaa

SEQ ID NO: 42712 - DNA, 50 bp, synthetic construct
  source 1..50: mol_type = other DNA
ctcgcagccgacgcagctgtttttgtcaccccgcagaacgtggcggtgaa

SEQ ID NO: 42713 - DNA, 50 bp, synthetic construct
  source 1..50: mol_type = other DNA
aggatgtcatcaaaaagcgattcggcagctgtgctttggatgtgcatttc

SEQ ID NO: 42714 - DNA, 50 bp, synthetic construct
  source 1..50: mol_type = other DNA
tgcaggcttgcctaacatataattatatcaataagttataaatgcatgtc

SEQ ID NO: 42715 - DNA, 50 bp, synthetic construct
  source 1..50: mol_type = other DNA
ccatcactccacccatgtggagtgctcccgacacatgttgcgcgtgactg

SEQ ID NO: 42716 - DNA, 50 bp, synthetic construct
  source 1..50: mol_type = other DNA
tgggagtccatgatgattcgtctcgcgcgcacggcgtccaggcaagccgt

SEQ ID NO: 42717 - DNA, 50 bp, synthetic construct
  source 1..50: mol_type = other DNA
agctggaagcgcgccgggtactgcactcacagccccccaggcagccacat

SEQ ID NO: 42718 - DNA, 50 bp, synthetic construct
  source 1..50: mol_type = other DNA
aatatctgaaaggatggaacttaaattaaatcaccttcactttcgataat

SEQ ID NO: 42719 - DNA, 50 bp, synthetic construct
  source 1..50: mol_type = other DNA
cgccccggcatgaactcaacttcgggaaatgtagagttcgagcatgcgtt

SEQ ID NO: 42720 - DNA, 50 bp, synthetic construct
  source 1..50: mol_type = other DNA
agagcaaaaatcgttacggggcagttactgcgggtaaaagtgattgatgc

SEQ ID NO: 42721 - DNA, 50 bp, synthetic construct
  source 1..50: mol_type = other DNA
gacaagccgaatcgaaatcggcaccgaagccggcttcggcggcccgctga

SEQ ID NO: 42722 - DNA, 50 bp, synthetic construct
  source 1..50: mol_type = other DNA
atctcgctgaacataagttaaagaaagaaaataattagtataattgaaat

SEQ ID NO: 42723 - DNA, 50 bp, synthetic construct
  source 1..50: mol_type = other DNA
atatctaaatatacgatataatgtataaattaacctccatattctgataa

SEQ ID NO: 42724 - DNA, 50 bp, synthetic construct
  source 1..50: mol_type = other DNA
aaaagtgataaaaatgaaacgaaatttttggttaaagtgatattgcttct

SEQ ID NO: 42725 - DNA, 50 bp, synthetic construct
  source 1..50: mol_type = other DNA
atttttattagaaactaaacttcctagcactcttttctattactatcaat

SEQ ID NO: 42726 - DNA, 50 bp, synthetic construct
  source 1..50: mol_type = other DNA
gaattttttagttttacttatgataccgcatcatttatgatatgcttctc

SEQ ID NO: 42727 - DNA, 50 bp, synthetic construct
  source 1..50: mol_type = other DNA
ttcattttttgtatgaaagaaagattactcctgctacagcaaagtcaatc

SEQ ID NO: 42728 - DNA, 50 bp, synthetic construct
  source 1..50: mol_type = other DNA
cccgcaaacagctcatgtggagactagttccgacacatgtcgagtcagta

SEQ ID NO: 42729 - DNA, 50 bp, synthetic construct
  source 1..50: mol_type = other DNA
gaggtactaaataatctaaataaacaattctttgatttagttagttttga

SEQ ID NO: 42730 - DNA, 50 bp, synthetic construct
  source 1..50: mol_type = other DNA
aaaaatagcacaaaaacactccttttataggggtgttttttttgtaaaaa

SEQ ID NO: 42731 - DNA, 50 bp, synthetic construct
  source 1..50: mol_type = other DNA
ctggcccgcacgttctccgccgtgcgcaaggacatgaccgtgaaggccaa

SEQ ID NO: 42732 - DNA, 50 bp, synthetic construct
  source 1..50: mol_type = other DNA
ccctacgttggtactaaccaatgtttacgttggtactaaccaaatcaggt

SEQ ID NO: 42733 - DNA, 50 bp, synthetic construct
  source 1..50: mol_type = other DNA
aggccaaccaggaggccttctccacttggcgagggcttccgggggtgctg

SEQ ID NO: 42734 - DNA, 50 bp, synthetic construct
  source 1..50: mol_type = other DNA
cgtggtcggtggagactcgggcgtaggcgtcctgaaggaaaccgagaacg

SEQ ID NO: 42735 - DNA, 50 bp, synthetic construct
  source 1..50: mol_type = other DNA
aaccagcaaagcttagtcaatataaagatggtgattgggttgaactggta

SEQ ID NO: 42736 - DNA, 50 bp, synthetic construct
  source 1..50: mol_type = other DNA
actgattttgattacgtcaggattcacttccttcggtagtatcacatgtt

SEQ ID NO: 42737 - DNA, 50 bp, synthetic construct
  source 1..50: mol_type = other DNA
atgactccgcctgattgctcataatctgtggcacaagattcatgcccgga

SEQ ID NO: 42738 - DNA, 50 bp, synthetic construct
  source 1..50: mol_type = other DNA
ggttcaagtcccgtcatccgcactcaagcgcagttgatttatgaaagagc

SEQ ID NO: 42739 - DNA, 50 bp, synthetic construct
  source 1..50: mol_type = other DNA
gccgttccctatccggctgattgccgcaaccctggatgatagggaaaagc

SEQ ID NO: 42740 - DNA, 50 bp, synthetic construct
  source 1..50: mol_type = other DNA
caagacatccactggacagacagtaaacggatggaagctttggctacttc

SEQ ID NO: 42741 - DNA, 50 bp, synthetic construct
  source 1..50: mol_type = other DNA
atggatgcacttctgcttgaaaaatatttttcagtcagaagcgacaacag

SEQ ID NO: 42742 - DNA, 50 bp, synthetic construct
  source 1..50: mol_type = other DNA
aaaggtatggcagatttaaaggtatatcacttgtgcttaatattatcctg

SEQ ID NO: 42743 - DNA, 50 bp, synthetic construct
  source 1..50: mol_type = other DNA
cgggcaccttgtcggcgacgaactcgcgatctgggccgtcgcagcgcccg

SEQ ID NO: 42744 - DNA, 50 bp, synthetic construct
  source 1..50: mol_type = other DNA
atatagtgtgtaaaaacttcttgtagacagtatattctttcgttctaaag

SEQ ID NO: 42745 - DNA, 50 bp, synthetic construct
  source 1..50: mol_type = other DNA
ggtcatatctcaaactcggaaaaaaattaaagaaagtttgagatttggat

SEQ ID NO: 42746 - DNA, 50 bp, synthetic construct
  source 1..50: mol_type = other DNA
ggagcgccctgtgagcgccaccgcggcgggcgcgcggtccggggcgctca

SEQ ID NO: 42747 - DNA, 50 bp, synthetic construct
  source 1..50: mol_type = other DNA
agccgacgggtagtgttcaattagtactaacttaacactgcccacaggaa

SEQ ID NO: 42748 - DNA, 50 bp, synthetic construct
  source 1..50: mol_type = other DNA
cgatacctcagaagaaccggaagtgcttttcaatatcccggatagtaaaa

SEQ ID NO: 42749 - DNA, 50 bp, synthetic construct
  source 1..50: mol_type = other DNA
gctttccggcagccgcctcatcaatgtcgataagaaggcttgcagaactt

SEQ ID NO: 42750 - DNA, 50 bp, synthetic construct
  source 1..50: mol_type = other DNA
aaaaaacgcttttatcagcaaaaactgttttcatcataaaagcttgataa

SEQ ID NO: 42751 - DNA, 50 bp, synthetic construct
  source 1..50: mol_type = other DNA
tcgtcctgtatcgatcgacctcttcgaacgcgtcgatttccggggaagta

SEQ ID NO: 42752 - DNA, 50 bp, synthetic construct
  source 1..50: mol_type = other DNA
ggcggctacaaggcagcgctcaagcggcggagggagccatgaagcgccgg

SEQ ID NO: 42753 - DNA, 50 bp, synthetic construct
  source 1..50: mol_type = other DNA
ttgattactgccaggatttatggaaatgtttataacatggccgtaaagcc

SEQ ID NO: 42754 - DNA, 50 bp, synthetic construct
  source 1..50: mol_type = other DNA
ccgtccgggttaaaacggatccgccggcacttgcgtttttgccgggagga

SEQ ID NO: 42755 - DNA, 50 bp, synthetic construct
  source 1..50: mol_type = other DNA
aatcataactcttcccgtaatgttatactgcaatgggaagtcaacggatt

SEQ ID NO: 42756 - DNA, 50 bp, synthetic construct
  source 1..50: mol_type = other DNA
acacaccacttaccctaaagctttataaaccttagtggtaagatatgatt

SEQ ID NO: 42757 - DNA, 50 bp, synthetic construct
  source 1..50: mol_type = other DNA
gctttgtccggcaagccgacaatggacatgcccatcttgcccggcgcgac

SEQ ID NO: 42758 - DNA, 50 bp, synthetic construct
  source 1..50: mol_type = other DNA
tggtgtaagcaccttctcagatgccggacaaggtgactacatctacacca

SEQ ID NO: 42759 - DNA, 50 bp, synthetic construct
  source 1..50: mol_type = other DNA
atgataatcatacaaatgtatattatagccgtcatacaaataggtgccat

SEQ ID NO: 42760 - DNA, 50 bp, synthetic construct
  source 1..50: mol_type = other DNA
ttacaggacgctctaaagggtggaattaaaccctttgaaaagtacgctgt

SEQ ID NO: 42761 - DNA, 50 bp, synthetic construct
  source 1..50: mol_type = other DNA
ttgtttccgcagacgcatcacgtggagtgcgtagtgttgctaatcaagga

SEQ ID NO: 42762 - DNA, 50 bp, synthetic construct
  source 1..50: mol_type = other DNA
agtatcaaacgactgcgacaggaatccagaagtctcagtcgtttttccga

SEQ ID NO: 42763 - DNA, 50 bp, synthetic construct
  source 1..50: mol_type = other DNA
taataatcatgctgtaggtctaatgatggaggcccttttatatgcgcgag

SEQ ID NO: 42764 - DNA, 50 bp, synthetic construct
  source 1..50: mol_type = other DNA
ctcaaacgcaccatgtggagtgcatatggacaacacatgtcgagtgtgta

SEQ ID NO: 42765 - DNA, 50 bp, synthetic construct
  source 1..50: mol_type = other DNA
tttccgcaaacgcatcatgtggagtggacaacacacgtcgagtgcgtagt

SEQ ID NO: 42766 - DNA, 50 bp, synthetic construct
  source 1..50: mol_type = other DNA
ttccataaattatggcataaatttataagattacgcatttatttatggtt

SEQ ID NO: 42767 - DNA, 50 bp, synthetic construct
  source 1..50: mol_type = other DNA
acagttattccggccaagaaagtgaagcagttcttgattgggcaaatgaa

SEQ ID NO: 42768 - DNA, 50 bp, synthetic construct
  source 1..50: mol_type = other DNA
cactcgacgtgcgttgtcttttgatttgcggaaacaaatctacgggctgt

SEQ ID NO: 42769 - DNA, 50 bp, synthetic construct
  source 1..50: mol_type = other DNA
gtcgtaaccggatctgtcgtaagaatacttgtgacgattatcgggatgac

SEQ ID NO: 42770 - DNA, 50 bp, synthetic construct
  source 1..50: mol_type = other DNA
cctgttgtaaatgattttttattaaacatcccaaagcaatttccaacaat

SEQ ID NO: 42771 - DNA, 50 bp, synthetic construct
  source 1..50: mol_type = other DNA
tatggtataccaaaacctgtatgtcctgcttgcaagtaaagtataacacg

SEQ ID NO: 42772 - DNA, 50 bp, synthetic construct
  source 1..50: mol_type = other DNA
atattttagtacaaatatcgtgtattttatcggtatttggaatataacct

SEQ ID NO: 42773 - DNA, 50 bp, synthetic construct
  source 1..50: mol_type = other DNA
agagtttatttctaaatgaatattgaagggcttatagagcgttacacgac

SEQ ID NO: 42774 - DNA, 50 bp, synthetic construct
  source 1..50: mol_type = other DNA
gaatataaatcgcttcgtataaaaaattttatctagtggggttaaaattc

SEQ ID NO: 42775 - DNA, 50 bp, synthetic construct
  source 1..50: mol_type = other DNA
tttgtaacccgttctccattgaaaaattgaaatcacgaatccatgacaaa

SEQ ID NO: 42776 - DNA, 50 bp, synthetic construct
  source 1..50: mol_type = other DNA
atgcagaattacaccagaaacacaaaacagttgatggcgggcggtggcat

SEQ ID NO: 42777 - DNA, 50 bp, synthetic construct
  source 1..50: mol_type = other DNA
tttcaaccgatcaagaatgcgcgccgggaaatttcattgctcctttgcgc

SEQ ID NO: 42778 - DNA, 50 bp, synthetic construct
  source 1..50: mol_type = other DNA
aggcaggctcttgcacaattgcttctgcaaaacagtgcggtaggaccttg

SEQ ID NO: 42779 - DNA, 50 bp, synthetic construct
  source 1..50: mol_type = other DNA
gaatcttttaagtttttttatataatcaacaaaaaagacgtaaaagctca

SEQ ID NO: 42780 - DNA, 50 bp, synthetic construct
  source 1..50: mol_type = other DNA
tcaattataaactctcaaaaacccttggatttttccatctttataaatag

SEQ ID NO: 42781 - DNA, 50 bp, synthetic construct
  source 1..50: mol_type = other DNA
gtttatattcatttccattggcgaatttacttcctgttagcaacatacac

SEQ ID NO: 42782 - DNA, 50 bp, synthetic construct
  source 1..50: mol_type = other DNA
aaaatcaattaagattaaagaaattatgttctttagaccttatggaattt

SEQ ID NO: 42783 - DNA, 50 bp, synthetic construct
  source 1..50: mol_type = other DNA
agtcctaccagtgtaatagttgggtaccccacaactgtaaagcctggcat

SEQ ID NO: 42784 - DNA, 50 bp, synthetic construct
  source 1..50: mol_type = other DNA
cgggtagcgcccacagggtgttgtcgacgtcaccgaagccgcgcaggccg

SEQ ID NO: 42785 - DNA, 50 bp, synthetic construct
  source 1..50: mol_type = other DNA
tccggcagccagataagatcagagcggggcgatggagcccggatgccggt

SEQ ID NO: 42786 - DNA, 50 bp, synthetic construct
  source 1..50: mol_type = other DNA
acgcctagatgaaccagcatcattataatgtatacgttttcacgacgtca

SEQ ID NO: 42787 - DNA, 50 bp, synthetic construct
  source 1..50: mol_type = other DNA
acgggaatggtgtccgtcgagtacgcgtatgcgactgtggccatacccgg

SEQ ID NO: 42788 - DNA, 50 bp, synthetic construct
  source 1..50: mol_type = other DNA
atcaccacaccggccacgatcaccaggtcctgcgaggccggttgggtggt

SEQ ID NO: 42789 - DNA, 50 bp, synthetic construct
  source 1..50: mol_type = other DNA
gcgaacgagctggtacacctccgcgatgggattcgaacccacgctaccgc

SEQ ID NO: 42790 - DNA, 50 bp, synthetic construct
  source 1..50: mol_type = other DNA
ggggttctcttggtggacctcctgagctaaggggaatcgaacccctgacc

SEQ ID NO: 42791 - DNA, 50 bp, synthetic construct
  source 1..50: mol_type = other DNA
ttcttctgtatctaatggtttgatatatcacaagattaactactttctat

SEQ ID NO: 42792 - DNA, 50 bp, synthetic construct
  source 1..50: mol_type = other DNA
tttgccacgatttgccctcctttcttataaacagaataaaccaaagaaaa

SEQ ID NO: 42793 - DNA, 50 bp, synthetic construct
  source 1..50: mol_type = other DNA
caccaaatatattgagactataagttatttaagtcttctgctattttgtg

SEQ ID NO: 42794 - DNA, 50 bp, synthetic construct
  source 1..50: mol_type = other DNA
tataagggcatttccagcaagataatgctaatgctggtatccaaaatatt

SEQ ID NO: 42795 - DNA, 50 bp, synthetic construct
  source 1..50: mol_type = other DNA
gtcttctttttcgttaattgctatgtttgtcattctatgaaagataagag

SEQ ID NO: 42796 - DNA, 50 bp, synthetic construct
  source 1..50: mol_type = other DNA
tatgtataataccatatggggtgtaattcataattattgtacgatctgga

SEQ ID NO: 42797 - DNA, 50 bp, synthetic construct
  source 1..50: mol_type = other DNA
acatggagcatttaaagatggaagatatctttcttttaaaatttctatcg

SEQ ID NO: 42798 - DNA, 50 bp, synthetic construct
  source 1..50: mol_type = other DNA
cctcccgccgccagccgaactcacccgtacacgatcatcgaggcgggcgg

SEQ ID NO: 42799 - DNA, 50 bp, synthetic construct
  source 1..50: mol_type = other DNA
ttaatcacagtaaacttaaaaaataaataaacgtatcactatgatgttaa

SEQ ID NO: 42800 - DNA, 50 bp, synthetic construct
  source 1..50: mol_type = other DNA
tcatggagaccgccaagagcagttcgaactccatagtgaggtctaggaac

SEQ ID NO: 42801 - DNA, 50 bp, synthetic construct
  source 1..50: mol_type = other DNA
ggatatttggggttcccgaaagcatttctctttgggttgcccggatgact

SEQ ID NO: 42802 - DNA, 50 bp, synthetic construct
  source 1..50: mol_type = other DNA
tgttttgagatatagtcacggtagtaaaaaatgcactattaatcttgtca

SEQ ID NO: 42803 - DNA, 50 bp, synthetic construct
  source 1..50: mol_type = other DNA
acgccagacttggcgacgacccctccagcaaaatatgccaattttgaatt

SEQ ID NO: 42804 - DNA, 50 bp, synthetic construct
  source 1..50: mol_type = other DNA
acattgtttaaacctttccattgtacccagtgccggaatcgaaccggcac

SEQ ID NO: 42805 - DNA, 50 bp, synthetic construct
  source 1..50: mol_type = other DNA
gtgccggttcgattccggcactgggtacaattcctgtaaaccattttata

SEQ ID NO: 42806 - DNA, 50 bp, synthetic construct
  source 1..50: mol_type = other DNA
gcggcgcagcaggggctggaagggcgtacttgaaaacatatctccaacgt

SEQ ID NO: 42807 - DNA, 50 bp, synthetic construct
  source 1..50: mol_type = other DNA
atattgccaatcgctccctgctgggaattcttgcctggcattggcaaccg

SEQ ID NO: 42808 - DNA, 50 bp, synthetic construct
  source 1..50: mol_type = other DNA
gtacggcaacagcagagcaaggcaaatattttaataactattgtatttat

SEQ ID NO: 42809 - DNA, 50 bp, synthetic construct
  source 1..50: mol_type = other DNA
ctgccggttcaaagcccctgtgggttcctgttggctcatctgcaaaaatg

SEQ ID NO: 42810 - DNA, 50 bp, synthetic construct
  source 1..50: mol_type = other DNA
atagacgaactgaacgaagaactgatcaactcttcggcctttctgtgctt

SEQ ID NO: 42811 - DNA, 50 bp, synthetic construct
  source 1..50: mol_type = other DNA
cagtagtcaaatccataccaattgggtgggaatcaaaagggttgaggaac

SEQ ID NO: 42812 - DNA, 50 bp, synthetic construct
  source 1..50: mol_type = other DNA
attaaatccatttccgagctaaaatcttttttctgttatatattcagaac

SEQ ID NO: 42813 - DNA, 50 bp, synthetic construct
  source 1..50: mol_type = other DNA
atgaacgaaggctgggcttcgtatcgataggatggctgggcatcctactg

SEQ ID NO: 42814 - DNA, 50 bp, synthetic construct
  source 1..50: mol_type = other DNA
tgatgtctttgttaagaccatgcataaagatgaacttataaacgttatgg

SEQ ID NO: 42815 - DNA, 50 bp, synthetic construct
  source 1..50: mol_type = other DNA
aaagtgtctaaagaaagcttgacgaagaacaagctttagaaggacatagt

SEQ ID NO: 42816 - DNA, 50 bp, synthetic construct
  source 1..50: mol_type = other DNA
ttttgtaatatgaattattatcaagatatttattaatgaatatttgaaat

SEQ ID NO: 42817 - DNA, 50 bp, synthetic construct
  source 1..50: mol_type = other DNA
gttatataaatgtggcttcttgttaagcaaattagagaagaattgttaga

SEQ ID NO: 42818 - DNA, 50 bp, synthetic construct
  source 1..50: mol_type = other DNA
gtctggagctccgcgaaccggcggtccgtttacttcgcggagttcgccga

SEQ ID NO: 42819 - DNA, 50 bp, synthetic construct
  source 1..50: mol_type = other DNA
caacggtataaagtcgtttagtcgccgacttaagcacctttgcagcacct

SEQ ID NO: 42820 - DNA, 50 bp, synthetic construct
  source 1..50: mol_type = other DNA
tattccaagtgtggaagagacaaaattttgacttctcaacaatagcaaat

SEQ ID NO: 42821 - DNA, 50 bp, synthetic construct
  source 1..50: mol_type = other DNA
atgcgttcggagtccaccaggttcttgattcttcgggcagccgagggaga

SEQ ID NO: 42822 - DNA, 50 bp, synthetic construct
  source 1..50: mol_type = other DNA
atcttttccatcaaaaattctttcatgatgtaatgagggtgggaaaagag

SEQ ID NO: 42823 - DNA, 50 bp, synthetic construct
  source 1..50: mol_type = other DNA
ggtgttatgcgttcttgtagtctaatttaaagacaagagcaagaaaacta

SEQ ID NO: 42824 - DNA, 50 bp, synthetic construct
  source 1..50: mol_type = other DNA
ctcttaatgctaaattttaaaaataaattttactacccgcaaaaaaagag

SEQ ID NO: 42825 - DNA, 50 bp, synthetic construct
  source 1..50: mol_type = other DNA
cttggcctggcgaaacaatagatgcagccatgctcgcagcctctatacgg

SEQ ID NO: 42826 - DNA, 50 bp, synthetic construct
  source 1..50: mol_type = other DNA
gcgcgctgaagatgccggcgatcaaacctctgacggtgtcgtctgccagt

SEQ ID NO: 42827 - DNA, 50 bp, synthetic construct
  source 1..50: mol_type = other DNA
acaggttcgctgtgtctgcgcctcccagccggcggaccgtgaactcctga

SEQ ID NO: 42828 - DNA, 50 bp, synthetic construct
  source 1..50: mol_type = other DNA
gctgtggtcacgtgcgacacgatatgcatctccaccggtgagaccaccgt

SEQ ID NO: 42829 - DNA, 50 bp, synthetic construct
  source 1..50: mol_type = other DNA
ccttaattgtttttttaaataaaaatttttgattccccagcccttgtaga

SEQ ID NO: 42830 - DNA, 50 bp, synthetic construct
  source 1..50: mol_type = other DNA
ttatattatgctttatttccaatttaaattagatgaagaagattttagaa

SEQ ID NO: 42831 - DNA, 50 bp, synthetic construct
  source 1..50: mol_type = other DNA
attaaattaaaaaggggtacagatgtatctgttaccctggtgtggtgcgt

SEQ ID NO: 42832 - DNA, 50 bp, synthetic construct
  source 1..50: mol_type = other DNA
gtttccaatgacgacacatgtggagaagctgtgactgttttacatttaaa

SEQ ID NO: 42833 - DNA, 50 bp, synthetic construct
  source 1..50: mol_type = other DNA
ttctcatatcgatagctggctgtcaaagcatctggcatcaaaccggctaa

SEQ ID NO: 42834 - DNA, 50 bp, synthetic construct
  source 1..50: mol_type = other DNA
aaccagtcgatttattcccacaaacacatgtggaattagtggcgctatta

SEQ ID NO: 42835 - DNA, 50 bp, synthetic construct
  source 1..50: mol_type = other DNA
cggcacagcgagtttatctataagttcttgcagatgaacctactggaaat

SEQ ID NO: 42836 - DNA, 50 bp, synthetic construct
  source 1..50: mol_type = other DNA
agatatccactggacagacgctcaaccggactgacggcgcattcggttac

SEQ ID NO: 42837 - DNA, 50 bp, synthetic construct
  source 1..50: mol_type = other DNA
attcccaatgacacatcatgtggagtaatacctatcaacacatgtggagt

SEQ ID NO: 42838 - DNA, 50 bp, synthetic construct
  source 1..50: mol_type = other DNA
ggcaccaggagtacgaggtgtctttaaagacggtaggagtccctgggggg

SEQ ID NO: 42839 - DNA, 50 bp, synthetic construct
  source 1..50: mol_type = other DNA
tggacgtagtaatggtgacggtaagctcgacgcagcatgcgctcggtctc

SEQ ID NO: 42840 - DNA, 50 bp, synthetic construct
  source 1..50: mol_type = other DNA
aaattgtcctagatctgataattcatgtactatcgtatcaactacaaatt

SEQ ID NO: 42841 - DNA, 50 bp, synthetic construct
  source 1..50: mol_type = other DNA
ggatggaatttgttcttctgaattataattcggaaccacagtgtcaccga

SEQ ID NO: 42842 - DNA, 50 bp, synthetic construct
  source 1..50: mol_type = other DNA
tcaccgggctcctgcccgctcaaccgcttatgcgggctaataattcagga

SEQ ID NO: 42843 - DNA, 50 bp, synthetic construct
  source 1..50: mol_type = other DNA
atctgttgtgcatcgaacgcaagatattttgctccacatgtttaattgat

SEQ ID NO: 42844 - DNA, 50 bp, synthetic construct
  source 1..50: mol_type = other DNA
tcagtgggacgttttcgcataatgaaggcgttcggtaaacgtccgcatga

SEQ ID NO: 42845 - DNA, 50 bp, synthetic construct
  source 1..50: mol_type = other DNA
taagttaacatagaattaacaattataaacgttatggctaatgctacaat

SEQ ID NO: 42846 - DNA, 50 bp, synthetic construct
  source 1..50: mol_type = other DNA
atgtttccacatacggggcatttagaatccatttcaatgtttataaaata

SEQ ID NO: 42847 - DNA, 50 bp, synthetic construct
  source 1..50: mol_type = other DNA
aatgcgtggagaagcatatcataaattaaccgatacgcagaagcatatca

SEQ ID NO: 42848 - DNA, 50 bp, synthetic construct
  source 1..50: mol_type = other DNA
aatgagaggcgaagcatatcataaattaatcgataagcagaagcgtacca

SEQ ID NO: 42849 - DNA, 50 bp, synthetic construct
  source 1..50: mol_type = other DNA
ctagaaattgtcctaaatagatattaatatcgcccctctctaatttctat

SEQ ID NO: 42850 - DNA, 50 bp, synthetic construct
  source 1..50: mol_type = other DNA
cttggtgtagcctgaattgtaattactgctacaatgagggctaactggtc

SEQ ID NO: 42851 - DNA, 50 bp, synthetic construct
  source 1..50: mol_type = other DNA
aaggtcgtggaggttcgagtcctcttttagaggtttccgggcaccatttt

SEQ ID NO: 42852 - DNA, 50 bp, synthetic construct
  source 1..50: mol_type = other DNA
ccctgcaaatgtcgcgcaggcgccgaattgattatagagcctttaaaggt

SEQ ID NO: 42853 - DNA, 50 bp, synthetic construct
  source 1..50: mol_type = other DNA
cgccagagttctgcttttcgcttgttcatgctattgacttaaccagtaaa

SEQ ID NO: 42854 - DNA, 50 bp, synthetic construct
  source 1..50: mol_type = other DNA
catgtggtgaaagttctatatcgtattgaattaataactaaagtgctcta

SEQ ID NO: 42855 - DNA, 50 bp, synthetic construct
  source 1..50: mol_type = other DNA
tcaagaattgcttctgataacgctttggccgattcggaatacataactcc

SEQ ID NO: 42856 - DNA, 50 bp, synthetic construct
  source 1..50: mol_type = other DNA
agagctgtgtcaaaatgggagaatggaaaatcattcccggacatcagtct

SEQ ID NO: 42857 - DNA, 50 bp, synthetic construct
  source 1..50: mol_type = other DNA
ccagagtagttgagtgccgcatatccggatgcggcagatacttcaaaaga

SEQ ID NO: 42858 - DNA, 50 bp, synthetic construct
  source 1..50: mol_type = other DNA
gttgaacactattgcccttttgctgaagcaaaatggcaaaagaagctaat

SEQ ID NO: 42859 - DNA, 50 bp, synthetic construct
  source 1..50: mol_type = other DNA
aatctatgacggctatcagtccgttttcatctttgaaaagtgcatagata

SEQ ID NO: 42860 - DNA, 50 bp, synthetic construct
  source 1..50: mol_type = other DNA
ctattcagacttaacagaagctgaaaagcaaaacgtttaaaactgaagct

SEQ ID NO: 42861 - DNA, 50 bp, synthetic construct
  source 1..50: mol_type = other DNA
gctactaatcgagagtttagaccgttcacactaaacttcttcaaagtact

SEQ ID NO: 42862 - DNA, 50 bp, synthetic construct
  source 1..50: mol_type = other DNA
aaaaatagcacaaaaacgctccttttataggggtgttttttttgtaaaaa

SEQ ID NO: 42863 - DNA, 50 bp, synthetic construct
  source 1..50: mol_type = other DNA
aaatgtttggttccctctttgcgtccctcatagcttgatccgaaaaagtt

SEQ ID NO: 42864 - DNA, 50 bp, synthetic construct
  source 1..50: mol_type = other DNA
ctttcgaggctaccgagcttgcgaaatggcttggtgtttagccttgttct

SEQ ID NO: 42865 - DNA, 50 bp, synthetic construct
  source 1..50: mol_type = other DNA
cttggcgtagctgtttccgaattagtcgattcgcggctttgaggacagtg

SEQ ID NO: 42866 - DNA, 50 bp, synthetic construct
  source 1..50: mol_type = other DNA
gcggctgtcactagatgctcaccgtcgtcggggtgtcgcccgaacgccgg

SEQ ID NO: 42867 - DNA, 50 bp, synthetic construct
  source 1..50: mol_type = other DNA
tcgtcaaagactgacccagcccagcaatgggctgaaaagaacctggagaa

SEQ ID NO: 42868 - DNA, 50 bp, synthetic construct
  source 1..50: mol_type = other DNA
cttatgatacggcgctacgtatcatatgatacggagcccccgcgttgatc

SEQ ID NO: 42869 - DNA, 50 bp, synthetic construct
  source 1..50: mol_type = other DNA
ggaataaaactataattgctttttataaaaaatgtttgaagtattttaca

SEQ ID NO: 42870 - DNA, 50 bp, synthetic construct
  source 1..50: mol_type = other DNA
tttgcctaaaatatgcttgtgagcaaaccgcatcatttatgatatgcttc

SEQ ID NO: 42871 - DNA, 50 bp, synthetic construct
  source 1..50: mol_type = other DNA
ccccagccgaaaatcggctttgtttccgaaaaaccttgttgattcagagc

SEQ ID NO: 42872 - DNA, 50 bp, synthetic construct
  source 1..50: mol_type = other DNA
aattaatttctaatttggtgggtgcattcgtaccccttttgaatttaatt

SEQ ID NO: 42873 - DNA, 50 bp, synthetic construct
  source 1..50: mol_type = other DNA
taaacaaaaatcatatctcaccactagttgtccggtattaagtaagttgc

SEQ ID NO: 42874 - DNA, 50 bp, synthetic construct
  source 1..50: mol_type = other DNA
atagatttgctgttgaaatacatggatattaattgtaaaattaaagatat

SEQ ID NO: 42875 - DNA, 50 bp, synthetic construct
  source 1..50: mol_type = other DNA
aaaggtcaactgttttgtagcaaggcacagctgaaaatgtctcgccgttt

SEQ ID NO: 42876 - DNA, 50 bp, synthetic construct
  source 1..50: mol_type = other DNA
atgctcacaaagactgttgagaagatcttcatctcgctcttttcaagctc

SEQ ID NO: 42877 - DNA, 50 bp, synthetic construct
  source 1..50: mol_type = other DNA
atacttattctgaaaggagttgatagtaatgttcctttcataagaggatt

SEQ ID NO: 42878 - DNA, 50 bp, synthetic construct
  source 1..50: mol_type = other DNA
ggcttccggaaggagctgaaccgtgacagcttcagttcctgagaatattc

SEQ ID NO: 42879 - DNA, 50 bp, synthetic construct
  source 1..50: mol_type = other DNA
aatagaatcggtcaggatcagccatatgcgatgcgctttccgtttctgaa

SEQ ID NO: 42880 - DNA, 50 bp, synthetic construct
  source 1..50: mol_type = other DNA
atatcttgactgtaaaggaagtcaagctcctgtttttactgttcagattt

SEQ ID NO: 42881 - DNA, 50 bp, synthetic construct
  source 1..50: mol_type = other DNA
ggctgggtacagactgaaatgggcgggcccaatgctctaatcgatacaga

SEQ ID NO: 42882 - DNA, 50 bp, synthetic construct
  source 1..50: mol_type = other DNA
gtttacagcatattaatgaaattttctacacttgataatatggcgtatat

SEQ ID NO: 42883 - DNA, 50 bp, synthetic construct
  source 1..50: mol_type = other DNA
tagccacccgggaaatcctaaacgaatcttttggcaatccgaaatacccg

SEQ ID NO: 42884 - DNA, 50 bp, synthetic construct
  source 1..50: mol_type = other DNA
cggtgctgatcaagtcgggtctataaacttgcccgacttgatcaagtccg

SEQ ID NO: 42885 - DNA, 50 bp, synthetic construct
  source 1..50: mol_type = other DNA
gcttctcgaccaacccgggcgacattccaggcccttgtctgccgcccagc

SEQ ID NO: 42886 - DNA, 50 bp, synthetic construct
  source 1..50: mol_type = other DNA
aacatctcaatcaaggatactaaaattttagtaacctacatttccaccaa

SEQ ID NO: 42887 - DNA, 50 bp, synthetic construct
  source 1..50: mol_type = other DNA
atcatggatcaaatcggtttagattagatttaccccatttaatcctaaag

SEQ ID NO: 42888 - DNA, 50 bp, synthetic construct
  source 1..50: mol_type = other DNA
cagccttcgggtacgtaaggttaccactcaagacccgcgtgcgcgtcaac

SEQ ID NO: 42889 - DNA, 50 bp, synthetic construct
  source 1..50: mol_type = other DNA
cttctttctgtttcataactccattaaaacaaaacctaaaacaaaaccaa

SEQ ID NO: 42890 - DNA, 50 bp, synthetic construct
  source 1..50: mol_type = other DNA
gcctgcgcctggttcggcatccagacctggatcggcggcgagggcatctt

SEQ ID NO: 42891 - DNA, 50 bp, synthetic construct
  source 1..50: mol_type = other DNA
aatgcgccgtctgtctggtgtgcaattaccactatgaggctctgtccagt

SEQ ID NO: 42892 - DNA, 50 bp, synthetic construct
  source 1..50: mol_type = other DNA
cgatgatgcaagggatgatgacgagctcgtcgactccgaacaaatcatca

SEQ ID NO: 42893 - DNA, 50 bp, synthetic construct
  source 1..50: mol_type = other DNA
cggtattagcggccatattgccatctggtctaacatttcctccggggacg

SEQ ID NO: 42894 - DNA, 50 bp, synthetic construct
  source 1..50: mol_type = other DNA
tgtcacgatcattccagcacgaactttcagctgcctgggtaatcgtaaca

SEQ ID NO: 42895 - DNA, 50 bp, synthetic construct
  source 1..50: mol_type = other DNA
ataacctctcatgatgtcttttcttgcacaaagattccaagaaagggaag

SEQ ID NO: 42896 - DNA, 50 bp, synthetic construct
  source 1..50: mol_type = other DNA
attttcatggagataacctcgcatgaggacattgttatcaattggaaaat

SEQ ID NO: 42897 - DNA, 50 bp, synthetic construct
  source 1..50: mol_type = other DNA
aacaacgccaccgactccacatgcactcaacatgactcgtatgcgggaac

SEQ ID NO: 42898 - DNA, 50 bp, synthetic construct
  source 1..50: mol_type = other DNA
tataaatatgtatacagtttttttaaaaaacaataatttttgaatttata

SEQ ID NO: 42899 - DNA, 50 bp, synthetic construct
  source 1..50: mol_type = other DNA
acgcgcatacccatcaggccttgatcccaccccttgattacccgaccagt

SEQ ID NO: 42900 - DNA, 50 bp, synthetic construct
  source 1..50: mol_type = other DNA
tggtttggtcaattaaacacaacctatatggtgttcggtcaattgatgac

SEQ ID NO: 42901 - DNA, 50 bp, synthetic construct
  source 1..50: mol_type = other DNA
gagccttgacgaaaatctgtttgatttctcgcgcattttcgcttcaaacg

SEQ ID NO: 42902 - DNA, 50 bp, synthetic construct
  source 1..50: mol_type = other DNA
gcccaccgacatcgacaacccaacaaataagcaatctgaccttcgcctgc

SEQ ID NO: 42903 - DNA, 50 bp, synthetic construct
  source 1..50: mol_type = other DNA
cagttcctcaatattatattgttggaagtccatataaaatccaacaacat

SEQ ID NO: 42904 - DNA, 50 bp, synthetic construct
  source 1..50: mol_type = other DNA
aattaatttctaatttggtgggtgcagatgtacccctttttaatttaatt

SEQ ID NO: 42905 - DNA, 50 bp, synthetic construct
  source 1..50: mol_type = other DNA
tattaatgcttattagaaataacaaatcttattaggaatagtgattacta

SEQ ID NO: 42906 - DNA, 50 bp, synthetic construct
  source 1..50: mol_type = other DNA
agctaacataccacactgacgaaaggttttgctggcgtcgctggttgact

SEQ ID NO: 42907 - DNA, 50 bp, synthetic construct
  source 1..50: mol_type = other DNA
atattgttcttgcgaagttccttcgtttcggaatttcgccagaggaataa

SEQ ID NO: 42908 - DNA, 50 bp, synthetic construct
  source 1..50: mol_type = other DNA
nnnnnnnnnnnnnnnnnnnngggacgtccannnnnnnnnnnnnnnnnnnn

SEQ ID NO: 42909 - DNA, 50 bp, synthetic construct
  source 1..50: mol_type = other DNA
ttaatcgtggggaaccttatcataaaccatatacggtgaaccgtatcata

SEQ ID NO: 42910 - DNA, 50 bp, synthetic construct
  source 1..50: mol_type = other DNA
tgtgcagtttgggtataattatctcatcaaaaacattgtttaactgcaca

SEQ ID NO: 42911 - DNA, 50 bp, synthetic construct
  source 1..50: mol_type = other DNA
ccgcagacgacgcacgttgagagcgtgttactgtcctggaacgtacagaa

SEQ ID NO: 42912 - DNA, 50 bp, synthetic construct
  source 1..50: mol_type = other DNA
aacggagatcatcttacctaacatctatcttaggtaaatttaacctagta

SEQ ID NO: 42913 - DNA, 50 bp, synthetic construct
  source 1..50: mol_type = other DNA
gtcgatcagtttccgggtactgttcacgtagaaaccatcgtgaaaatgcg

SEQ ID NO: 42914 - DNA, 50 bp, synthetic construct
  source 1..50: mol_type = other DNA
gctcgtcttcctcggccggcttgtcccagctccagccgaacgagaccggt

SEQ ID NO: 42915 - DNA, 50 bp, synthetic construct
  source 1..50: mol_type = other DNA
aacagcggcttgctgccgaattgcatatgaaactacattgtgatattgtt

SEQ ID NO: 42916 - DNA, 50 bp, synthetic construct
  source 1..50: mol_type = other DNA
cactaaatacatagtttttttggtttgtctaaaaaactatgtattaagtc

SEQ ID NO: 42917 - DNA, 50 bp, synthetic construct
  source 1..50: mol_type = other DNA
gtcatcccgataatcgtcacaagcattcttacgacagatccggttacgac

SEQ ID NO: 42918 - DNA, 50 bp, synthetic construct
  source 1..50: mol_type = other DNA
ccagcaaccggtccagcacgcgcagcggcgaagtaatgacgggttgctgt

SEQ ID NO: 42919 - DNA, 50 bp, synthetic construct
  source 1..50: mol_type = other DNA
gaacaaattcatgtatatgtttttctccctcctaatcaccgagtttgata

SEQ ID NO: 42920 - DNA, 50 bp, synthetic construct
  source 1..50: mol_type = other DNA
gttatggctttattaggatgttgcataaaatcatcttatggaggtataga

SEQ ID NO: 42921 - DNA, 50 bp, synthetic construct
  source 1..50: mol_type = other DNA
gccagctcgtcgagatgctggccgcgtgatcagcggctcgacgacggcgc

SEQ ID NO: 42922 - DNA, 50 bp, synthetic construct
  source 1..50: mol_type = other DNA
cctcgcaaggcgccgagcgcgacttgacgcgacgcgagcgcgcgtcgagg

SEQ ID NO: 42923 - DNA, 50 bp, synthetic construct
  source 1..50: mol_type = other DNA
ttcatcaccggagcaaaccttgtgatgaggaagataaccccggttttgag

SEQ ID NO: 42924 - DNA, 50 bp, synthetic construct
  source 1..50: mol_type = other DNA
gtttcgtccacatcatcacaggaacgttcaatgcgaaaaacggccatcga

SEQ ID NO: 42925 - DNA, 50 bp, synthetic construct
  source 1..50: mol_type = other DNA
attgaatgtctgaaaaaggccggcatgtaggtgttgtttacacttaggat

SEQ ID NO: 42926 - DNA, 50 bp, synthetic construct
  source 1..50: mol_type = other DNA
cccttatcttcttttcctgtaccgccagtcccgccataaaaagaaggact

SEQ ID NO: 42927 - DNA, 50 bp, synthetic construct
  source 1..50: mol_type = other DNA
gtaaaggcgcagctccgtctggctctcgcccgactttgctgcggtgggac

SEQ ID NO: 42928 - DNA, 50 bp, synthetic construct
  source 1..50: mol_type = other DNA
aaactttctcgccgatgtatgcacagattaaaacatcttcctttcatctt

SEQ ID NO: 42929 - DNA, 50 bp, synthetic construct
  source 1..50: mol_type = other DNA
aatatagattttgtggatatatttaaaattatatcagcaccttgcatata

SEQ ID NO: 42930 - DNA, 50 bp, synthetic construct
  source 1..50: mol_type = other DNA
caataaataaatatttattttttattgattgttatctttttcatcaattt

SEQ ID NO: 42931 - DNA, 50 bp, synthetic construct
  source 1..50: mol_type = other DNA
accctctacggcataaaaaactgcgacaccatcaaaaaagcccgcaaatg

SEQ ID NO: 42932 - DNA, 50 bp, synthetic construct
  source 1..50: mol_type = other DNA
caatttgttgtaatggcacttatttgtatgattatcaagcgaaaaaggtc

SEQ ID NO: 42933 - DNA, 50 bp, synthetic construct
  source 1..50: mol_type = other DNA
gcgcgcggcgttaatcgcgtgatgctcgacagccgcccggtgcatgccgc

SEQ ID NO: 42934 - DNA, 50 bp, synthetic construct
  source 1..50: mol_type = other DNA
atcgctatggttcggttgctggcgcgaaccgatagcgtaacgcccacgac

SEQ ID NO: 42935 - DNA, 50 bp, synthetic construct
  source 1..50: mol_type = other DNA
atgttccctcattctactcatgtggatgagcaagttgaaactgtagctaa

SEQ ID NO: 42936 - DNA, 50 bp, synthetic construct
  source 1..50: mol_type = other DNA
ggctgtccgcagaacttctccgttgcaaactacagatgcttgtgaaatcc

SEQ ID NO: 42937 - DNA, 50 bp, synthetic construct
  source 1..50: mol_type = other DNA
ttgaaaatattttaaaaatgatgaaatgttcagtttgcttgttttgtcaa

SEQ ID NO: 42938 - DNA, 50 bp, synthetic construct
  source 1..50: mol_type = other DNA
tttaaataaaagtacttttatgttacttgctcactgtaatattagctaat

SEQ ID NO: 42939 - DNA, 50 bp, synthetic construct
  source 1..50: mol_type = other DNA
gagcgtctcgaagctccagaactcggccgatgaggagcttcaggagattg

SEQ ID NO: 42940 - DNA, 50 bp, synthetic construct
  source 1..50: mol_type = other DNA
ataatgacagggcgcaaacgagcgcctcgcgtttgaactcctatcgtgag

SEQ ID NO: 42941 - DNA, 50 bp, synthetic construct
  source 1..50: mol_type = other DNA
ggctggcgagcgccgccgaaggcgtggcggcgtggtcgacctcgctggcc

SEQ ID NO: 42942 - DNA, 50 bp, synthetic construct
  source 1..50: mol_type = other DNA
tttgcgccgcttttaattcattaaattgagctcacatattaagtgatcaa

SEQ ID NO: 42943 - DNA, 50 bp, synthetic construct
  source 1..50: mol_type = other DNA
cagctcggacctggacaccgtgagtcatcccggacatcacgcgcgagcac

SEQ ID NO: 42944 - DNA, 50 bp, synthetic construct
  source 1..50: mol_type = other DNA
ccgattccggggatgccgggcggcaagccggccggcgtgcgctgcgcgca

SEQ ID NO: 42945 - DNA, 50 bp, synthetic construct
  source 1..50: mol_type = other DNA
ataatgtgaccttaattgtctttttattaaaatttgcaaactataatttt

SEQ ID NO: 42946 - DNA, 50 bp, synthetic construct
  source 1..50: mol_type = other DNA
atacttgagattaaagtccaaactttgttgtttactttatttattagtat

SEQ ID NO: 42947 - DNA, 50 bp, synthetic construct
  source 1..50: mol_type = other DNA
taaaacacagcttgcaagagaacttaagcacctttgcagcacctgaatta

SEQ ID NO: 42948 - DNA, 50 bp, synthetic construct
  source 1..50: mol_type = other DNA
ttgagacggtagttcagttggttagaaaacacagttgaaacggtagtatt

SEQ ID NO: 42949 - DNA, 50 bp, synthetic construct
  source 1..50: mol_type = other DNA
ttttatttatgatacgcttcagcgtaagcttctcctctatttatcttaaa

SEQ ID NO: 42950 - DNA, 50 bp, synthetic construct
  source 1..50: mol_type = other DNA
ttttaacatttcctgctcggcatcctcaaatggatcaggaaatgttaaat

SEQ ID NO: 42951 - DNA, 50 bp, synthetic construct
  source 1..50: mol_type = other DNA
atttatttctcgtataataatttacaacattcgacatatgagaggacatt

SEQ ID NO: 42952 - DNA, 50 bp, synthetic construct
  source 1..50: mol_type = other DNA
cgagctcgcgcgcgcctgggtcgagccgtccgatggcgcgcgccagctca

SEQ ID NO: 42953 - DNA, 50 bp, synthetic construct
  source 1..50: mol_type = other DNA
ggcttgattccagcaggtggtggtgcaccaccacctgtagcgcagaagcc

SEQ ID NO: 42954 - DNA, 50 bp, synthetic construct
  source 1..50: mol_type = other DNA
ctgatcagagcccggccagttccgcccgattgcgccagcaggttgtccag

SEQ ID NO: 42955 - DNA, 50 bp, synthetic construct
  source 1..50: mol_type = other DNA
gccccgcggggcagattccggtgctgcggaccagttcggcaaggcgtggg

SEQ ID NO: 42956 - DNA, 50 bp, synthetic construct
  source 1..50: mol_type = other DNA
cctcaccgacggccgcatcgagatcgatctttttcagatcgttggtgagc

SEQ ID NO: 42957 - DNA, 50 bp, synthetic construct
  source 1..50: mol_type = other DNA
caccaagcgaattggtggagctgagcgaagcgatgccggttcgtgggatg

SEQ ID NO: 42958 - DNA, 50 bp, synthetic construct
  source 1..50: mol_type = other DNA
gcaaagcggcacaatgtcggtcagttatgacaaatattgtgccccttgaa

SEQ ID NO: 42959 - DNA, 50 bp, synthetic construct
  source 1..50: mol_type = other DNA
aaaaacatacataaaatataaattaatatatatttgagatgtacaaaaca

SEQ ID NO: 42960 - DNA, 50 bp, synthetic construct
  source 1..50: mol_type = other DNA
cgcgcgaaacctgcgccctatgtgccagcatctggcgtaggtatcgggcc

SEQ ID NO: 42961 - DNA, 50 bp, synthetic construct
  source 1..50: mol_type = other DNA
gaaaaaagcattaaatggcttgttttaacaataaatttttcatgataata

SEQ ID NO: 42962 - DNA, 50 bp, synthetic construct
  source 1..50: mol_type = other DNA
tattgacttttatattatgatttatgaaaaagatattataaaagtcctaa

SEQ ID NO: 42963 - DNA, 50 bp, synthetic construct
  source 1..50: mol_type = other DNA
ttaggacacctgtaacagtgatagaaaaatcaacaggactagtattgaaa

SEQ ID NO: 42964 - DNA, 50 bp, synthetic construct
  source 1..50: mol_type = other DNA
tgcccatgtatcaaaatatggaggtataccccctttttgataaaatgggt

SEQ ID NO: 42965 - DNA, 50 bp, synthetic construct
  source 1..50: mol_type = other DNA
gataatgtgaccttaattgtcttttttgtcacaatgcgctgtcagttttt

SEQ ID NO: 42966 - DNA, 50 bp, synthetic construct
  source 1..50: mol_type = other DNA
aaaacatttacaacaaataattatattaaattaattgttttatatttgta

SEQ ID NO: 42967 - DNA, 50 bp, synthetic construct
  source 1..50: mol_type = other DNA
tattttttatacccttttttaggagattctgaaaaaacgaacaacatgta

SEQ ID NO: 42968 - DNA, 50 bp, synthetic construct
  source 1..50: mol_type = other DNA
ttgatacaaaaatgctggagaaatatacgtttcgagcatttgaattctcg

SEQ ID NO: 42969 - DNA, 50 bp, synthetic construct
  source 1..50: mol_type = other DNA
gaaagttctccgttctaatgctataatcgccattagaactactcgattta

SEQ ID NO: 42970 - DNA, 50 bp, synthetic construct
  source 1..50: mol_type = other DNA
aatataaaaagataaaaattaaattgatgaacctacggggaatttagatt

SEQ ID NO: 42971 - DNA, 50 bp, synthetic construct
  source 1..50: mol_type = other DNA
ggaggatttttaacggtgaaacaaccctgttttactatctaaatttccag

SEQ ID NO: 42972 - DNA, 50 bp, synthetic construct
  source 1..50: mol_type = other DNA
tattagactataattattattgatttacccaggatatttaatttttagta

SEQ ID NO: 42973 - DNA, 50 bp, synthetic construct
  source 1..50: mol_type = other DNA
tgcgcgccacagaggtcgcgtgtggcaacacgacgtggcgcgtgcgctcg

SEQ ID NO: 42974 - DNA, 50 bp, synthetic construct
  source 1..50: mol_type = other DNA
tgattttaattcattgtatttatagttaaaagttaaaataattttatatc

SEQ ID NO: 42975 - DNA, 50 bp, synthetic construct
  source 1..50: mol_type = other DNA
aaaatatggagatattatcatgaaaatacagctacttataagccaaaatt

SEQ ID NO: 42976 - DNA, 50 bp, synthetic construct
  source 1..50: mol_type = other DNA
gtgatatatggtgtacaaaagttatataaaatcttaaagttataaatctt

SEQ ID NO: 42977 - DNA, 50 bp, synthetic construct
  source 1..50: mol_type = other DNA
acgaatatgggcaaaaacattacagtcattctgttttggcggatgagtca

SEQ ID NO: 42978 - DNA, 50 bp, synthetic construct
  source 1..50: mol_type = other DNA
ctttatctgattttatacaactttgaaaaaagttatcacgatagaaccag

SEQ ID NO: 42979 - DNA, 50 bp, synthetic construct
  source 1..50: mol_type = other DNA
gaataactaccaataacttctccgataatagaaggagttatattaggatt

SEQ ID NO: 42980 - DNA, 50 bp, synthetic construct
  source 1..50: mol_type = other DNA
acacattcttatcctagaatgtgtgtttcagctctaccatcaatattttc

SEQ ID NO: 42981 - DNA, 50 bp, synthetic construct
  source 1..50: mol_type = other DNA
gcaggaatccgttgattctgccgccggcggctgcaccgccgattgccagc

SEQ ID NO: 42982 - DNA, 50 bp, synthetic construct
  source 1..50: mol_type = other DNA
atttataatctctgccgtttctggatccacataagggcccaaatctaaaa

SEQ ID NO: 42983 - DNA, 50 bp, synthetic construct
  source 1..50: mol_type = other DNA
tcttggcaaggggcgtattttttgtaccatcaatacgttcctccacaagg

SEQ ID NO: 42984 - DNA, 50 bp, synthetic construct
  source 1..50: mol_type = other DNA
tcttcaattttatcacgttccttcatgtgtatatctataaaataggaata

SEQ ID NO: 42985 - DNA, 50 bp, synthetic construct
  source 1..50: mol_type = other DNA
gaatccggcgaatcgaaataacggtgccgttatggtttttcatcccgttc

SEQ ID NO: 42986 - DNA, 50 bp, synthetic construct
  source 1..50: mol_type = other DNA
aggaaatttattgatgttagaaagaacattctaataatttttaattttaa

SEQ ID NO: 42987 - DNA, 50 bp, synthetic construct
  source 1..50: mol_type = other DNA
cgttgcggttggcctctgatcgaacgaccgatgcccagctcacgaccctc

SEQ ID NO: 42988 - DNA, 50 bp, synthetic construct
  source 1..50: mol_type = other DNA
tatacatgtgatacatcatttagatattcaaatgattcatcgcaggcata

SEQ ID NO: 42989 - DNA, 50 bp, synthetic construct
  source 1..50: mol_type = other DNA
ggtataaaataatagaaacaataatagctgtgttttgagagttttactat

SEQ ID NO: 42990 - DNA, 50 bp, synthetic construct
  source 1..50: mol_type = other DNA
ggggattgctgtgacggtgcgggccaatcggcaagtccacgatgatgctc

SEQ ID NO: 42991 - DNA, 50 bp, synthetic construct
  source 1..50: mol_type = other DNA
gatgctgcccatgtcgctacccccgtaaaccgtttaattcttgcagcaac

SEQ ID NO: 42992 - DNA, 50 bp, synthetic construct
  source 1..50: mol_type = other DNA
ataatgccaaaaataccttgatatgtatgaaatatgattttttatcttat

SEQ ID NO: 42993 - DNA, 50 bp, synthetic construct
  source 1..50: mol_type = other DNA
ttacccccggttgcttgccgaatcaggtgtcgcacctcagtcgttcacgc

SEQ ID NO: 42994 - DNA, 50 bp, synthetic construct
  source 1..50: mol_type = other DNA
gagacgttttcttgtacctattttataaaaaaattatgacaaaacaagga

SEQ ID NO: 42995 - DNA, 50 bp, synthetic construct
  source 1..50: mol_type = other DNA
gaccatcggccgcgcgcgggccgtttctgaaaatcgcgcgtacgatcgcc

SEQ ID NO: 42996 - DNA, 50 bp, synthetic construct
  source 1..50: mol_type = other DNA
ggttatctggatgacactgtggtcacgactaaagtgaaatcagcgctgtt

SEQ ID NO: 42997 - DNA, 50 bp, synthetic construct
  source 1..50: mol_type = other DNA
tttatcagtccatcttctaattaattatcatttaaagatgaacttataaa

SEQ ID NO: 42998 - DNA, 50 bp, synthetic construct
  source 1..50: mol_type = other DNA
gatggtagacttggaagcgttgtccggatttggcatcctcctcagacatc

SEQ ID NO: 42999 - DNA, 50 bp, synthetic construct
  source 1..50: mol_type = other DNA
ttttactatccttgattgaaatgtaatagcatgaataacaacatgttgac

SEQ ID NO: 43000 - DNA, 50 bp, synthetic construct
  source 1..50: mol_type = other DNA
tcggtgggcatgttcatcctctcggcctttgattgtaacattttgcgata

SEQ ID NO: 43001 - DNA, 50 bp, synthetic construct
  source 1..50: mol_type = other DNA
aagataattaattctgtcttgcacttatttgcaacatgctgtattgaaga

SEQ ID NO: 43002 - DNA, 50 bp, synthetic construct
  source 1..50: mol_type = other DNA
cgagcgagggcagcagggggcgaccgggaacaccggcacgccctggctcg

SEQ ID NO: 43003 - DNA, 50 bp, synthetic construct
  source 1..50: mol_type = other DNA
gttaaaacagcacactgaaaatagtggtttttacccagtagtgttttacc

SEQ ID NO: 43004 - DNA, 50 bp, synthetic construct
  source 1..50: mol_type = other DNA
ggctagcaattacaagaaaaacttttaattttttcttgaccttggccaga

SEQ ID NO: 43005 - DNA, 50 bp, synthetic construct
  source 1..50: mol_type = other DNA
gtcgtcaccacgcgcagccagtcgcgctgccactccgacgcggtgatcaa

SEQ ID NO: 43006 - DNA, 50 bp, synthetic construct
  source 1..50: mol_type = other DNA
cgaaggaggtaataacaaagatggaaacatatctactgtgcgaatttacc

SEQ ID NO: 43007 - DNA, 50 bp, synthetic construct
  source 1..50: mol_type = other DNA
tgggaaggttcttttataaggtgcttatcatgcaaggcaacaccgtcttt

SEQ ID NO: 43008 - DNA, 50 bp, synthetic construct
  source 1..50: mol_type = other DNA
gcatataaaaaaacgcagtatccagagaatgtctcacgatttttcatcga

SEQ ID NO: 43009 - DNA, 50 bp, synthetic construct
  source 1..50: mol_type = other DNA
tttaaagatggtcatgatgaagtcagctactattgttgaaggtctttaaa

SEQ ID NO: 43010 - DNA, 50 bp, synthetic construct
  source 1..50: mol_type = other DNA
gcataatcatccttccggaatatatatatgagtgattttaatgattatgt

SEQ ID NO: 43011 - DNA, 50 bp, synthetic construct
  source 1..50: mol_type = other DNA
aatccactttggggaagtaatccttaaggagagaaagactggcggttttt

SEQ ID NO: 43012 - DNA, 50 bp, synthetic construct
  source 1..50: mol_type = other DNA
ggcggtggcagccgaaagcagccccagttttcgtttcgtccgccacctat

SEQ ID NO: 43013 - DNA, 50 bp, synthetic construct
  source 1..50: mol_type = other DNA
gcgtgacgggtcaattcgtcgcgcgccatacaatcgatgacccgtcgcgc

SEQ ID NO: 43014 - DNA, 50 bp, synthetic construct
  source 1..50: mol_type = other DNA
cacaatctcaatataatattttgaatatggatccttatatttttcttctg

SEQ ID NO: 43015 - DNA, 50 bp, synthetic construct
  source 1..50: mol_type = other DNA
ggtcaacaattttgtaaggaattgatcaaatccttataaaaaggtgaaaa

SEQ ID NO: 43016 - DNA, 50 bp, synthetic construct
  source 1..50: mol_type = other DNA
aatcaatccgtaagccatttttaaagctcacaatagctactctttccata

SEQ ID NO: 43017 - DNA, 50 bp, synthetic construct
  source 1..50: mol_type = other DNA
gctaaatttcgagcagaaattttttggagcatttttgccttaaattcttg

SEQ ID NO: 43018 - DNA, 50 bp, synthetic construct
  source 1..50: mol_type = other DNA
aagccgtactgttcaggaaatgtttgaaattttccagaattttacgatgt

SEQ ID NO: 43019 - DNA, 50 bp, synthetic construct
  source 1..50: mol_type = other DNA
gctgctcctcaccgtcaatatcccatggataatttctgaacggtttcact

SEQ ID NO: 43020 - DNA, 50 bp, synthetic construct
  source 1..50: mol_type = other DNA
attcccgaaaggtaatcagcaaaaacgaatgctttgatcctttcgggtca

SEQ ID NO: 43021 - DNA, 50 bp, synthetic construct
  source 1..50: mol_type = other DNA
gtgtaaataagtttaatcaatttcaagaaacttattaatagccggtgatt

SEQ ID NO: 43022 - DNA, 50 bp, synthetic construct
  source 1..50: mol_type = other DNA
aagtgcgattggtcagcagatacctgattatgataaacctttgtaccctt

SEQ ID NO: 43023 - DNA, 50 bp, synthetic construct
  source 1..50: mol_type = other DNA
ggcacagccccggcacgcacccgacaacgctcgcgtgacacgacaatgcg

SEQ ID NO: 43024 - DNA, 50 bp, synthetic construct
  source 1..50: mol_type = other DNA
gcgacgtcggcccccgccgcctgaccgcaggccggcgcggtcgaccacga

SEQ ID NO: 43025 - DNA, 50 bp, synthetic construct
  source 1..50: mol_type = other DNA
gctccaccgcctactaaggcgacatcagatatcgtatgatgcggacttct

SEQ ID NO: 43026 - DNA, 50 bp, synthetic construct
  source 1..50: mol_type = other DNA
tgctcatgtagttcatctaatgctttaatgcctgatgaaaatattgatac

SEQ ID NO: 43027 - DNA, 50 bp, synthetic construct
  source 1..50: mol_type = other DNA
gaaatgataggagcttaaatagaaaattttgatttagactttatattttt

SEQ ID NO: 43028 - DNA, 50 bp, synthetic construct
  source 1..50: mol_type = other DNA
agtgttaaaaaatatatattgaaatttttagatcattatttgttaatgca

SEQ ID NO: 43029 - DNA, 50 bp, synthetic construct
  source 1..50: mol_type = other DNA
agtatctagtaaagggggaagatagctaactttatattttaatgctaagt

SEQ ID NO: 43030 - DNA, 50 bp, synthetic construct
  source 1..50: mol_type = other DNA
ttggctcaatcgggaaaacaacaatatcattatgtcaataatggaaacat

SEQ ID NO: 43031 - DNA, 50 bp, synthetic construct
  source 1..50: mol_type = other DNA
atgaaaaaattacgacaataactgtttactttttgtgataagaatttcat

SEQ ID NO: 43032 - DNA, 50 bp, synthetic construct
  source 1..50: mol_type = other DNA
ttcattagataagtgttattgaaattgtttagtttgagttatcttaatgt

SEQ ID NO: 43033 - DNA, 50 bp, synthetic construct
  source 1..50: mol_type = other DNA
atttcagttgatacacgggcatataatcctgatttaaaaccaggtgaaag

SEQ ID NO: 43034 - DNA, 50 bp, synthetic construct
  source 1..50: mol_type = other DNA
caataactgtttcattagataagtgttttcattcctttcacaaggtatta

SEQ ID NO: 43035 - DNA, 50 bp, synthetic construct
  source 1..50: mol_type = other DNA
tgatagggttgtgtctctgcttccttgtaaatgaattcaaataaaggtcc

SEQ ID NO: 43036 - DNA, 50 bp, synthetic construct
  source 1..50: mol_type = other DNA
ggaaaccggcgaggtcatgatagcccgggtgacgtaccccgcgcggttcc

SEQ ID NO: 43037 - DNA, 50 bp, synthetic construct
  source 1..50: mol_type = other DNA
gatcgcgcaggccgctgcgtgatacagcgtccgcgaacacctgcgcgacg

SEQ ID NO: 43038 - DNA, 50 bp, synthetic construct
  source 1..50: mol_type = other DNA
ctatagaatacatattctttatcggacaataaagagtttatcttcaataa

SEQ ID NO: 43039 - DNA, 50 bp, synthetic construct
  source 1..50: mol_type = other DNA
attcgggcgcacgaggagtccgatacctcggggtcgcctggagcgctgct

SEQ ID NO: 43040 - DNA, 50 bp, synthetic construct
  source 1..50: mol_type = other DNA
gcgtgcgagtcatgaccgcgggaccgcggcgggggtcgtggctcgcaccg

SEQ ID NO: 43041 - DNA, 50 bp, synthetic construct
  source 1..50: mol_type = other DNA
tgctggtaacatgccatcatttgatcccttcggatggtattgattgatca

SEQ ID NO: 43042 - DNA, 50 bp, synthetic construct
  source 1..50: mol_type = other DNA
cattgcaaacaatttagaagagaaaattcaaaagtaagccgtttgtcggc

SEQ ID NO: 43043 - DNA, 50 bp, synthetic construct
  source 1..50: mol_type = other DNA
tcttttaagaaaaaaactattggaattttctcctttctttcaggacgtga

SEQ ID NO: 43044 - DNA, 50 bp, synthetic construct
  source 1..50: mol_type = other DNA
gggccgacgcgcgccccggacacccgcgcgcacgcagcgggccggcgcgc

SEQ ID NO: 43045 - DNA, 50 bp, synthetic construct
  source 1..50: mol_type = other DNA
ggaaacctccggcatgaccacatcaattcctccgctgaccaatcggggga

SEQ ID NO: 43046 - DNA, 50 bp, synthetic construct
  source 1..50: mol_type = other DNA
ccgcgggagagcttcatcttcttcatcaacggcgcgaaggtgcgtgcccc

SEQ ID NO: 43047 - DNA, 50 bp, synthetic construct
  source 1..50: mol_type = other DNA
gtgaattcggtcgacccgacccgcgcttgtccctgttccatcgatggcac

SEQ ID NO: 43048 - DNA, 50 bp, synthetic construct
  source 1..50: mol_type = other DNA
atcgacgtcttattaatcgatgatatttcatcaatgtaagggtacaacat

SEQ ID NO: 43049 - DNA, 50 bp, synthetic construct
  source 1..50: mol_type = other DNA
tcgatactatagccttcagtactttgatttactagatcaaatagtatcgg

SEQ ID NO: 43050 - DNA, 50 bp, synthetic construct
  source 1..50: mol_type = other DNA
aatatatattatctatatgttgttactacgacttatatattaattttatt

SEQ ID NO: 43051 - DNA, 50 bp, synthetic construct
  source 1..50: mol_type = other DNA
ccgccgcccgccatgagctgttttataacagagctcatacgaatttctta

SEQ ID NO: 43052 - DNA, 50 bp, synthetic construct
  source 1..50: mol_type = other DNA
tatccggcacttgcgcagggtgtcggcacagtggctgacagtgcctgatt

SEQ ID NO: 43053 - DNA, 50 bp, synthetic construct
  source 1..50: mol_type = other DNA
aataagtccagcgcggttttgtcagaggaaaatgctctgcttcaggagtt

SEQ ID NO: 43054 - DNA, 50 bp, synthetic construct
  source 1..50: mol_type = other DNA
tgaaccaggatgagatcgtgcgccagcaggcacagagaaatgctggtagc

SEQ ID NO: 43055 - DNA, 50 bp, synthetic construct
  source 1..50: mol_type = other DNA
tattatttgtaagatattttgaggtacgtcaggatattgtacctctaatt

SEQ ID NO: 43056 - DNA, 50 bp, synthetic construct
  source 1..50: mol_type = other DNA
tcatagtagattgggtaggttcatataagaaaatcaagttttgtgaatga

SEQ ID NO: 43057 - DNA, 50 bp, synthetic construct
  source 1..50: mol_type = other DNA
agatttatttaaaaataaggaattatagatccttattctggaggtaaagg

SEQ ID NO: 43058 - DNA, 50 bp, synthetic construct
  source 1..50: mol_type = other DNA
acacaacaagtcgttttaagcaacttgttgcttcgctaattttgtgataa

SEQ ID NO: 43059 - DNA, 50 bp, synthetic construct
  source 1..50: mol_type = other DNA
ttacttgcttcgatgctatttcatctgtgatattgctgatattatggaaa

SEQ ID NO: 43060 - DNA, 50 bp, synthetic construct
  source 1..50: mol_type = other DNA
attcctccataatctttataatttaaagcagataaagattctatagtaaa

SEQ ID NO: 43061 - DNA, 50 bp, synthetic construct
  source 1..50: mol_type = other DNA
ttttaaacttatttaattataaaaataattatgttaaaataattttttac

SEQ ID NO: 43062 - DNA, 50 bp, synthetic construct
  source 1..50: mol_type = other DNA
tataaagacaagattacttttttaattccgccaacttgattgccatggcc

SEQ ID NO: 43063 - DNA, 50 bp, synthetic construct
  source 1..50: mol_type = other DNA
acattaccttgcgaaaggatagccgcatagatggcagcacgtttcaatgc

SEQ ID NO: 43064 - DNA, 50 bp, synthetic construct
  source 1..50: mol_type = other DNA
ttttttccttatcatcacggaaaatattttatttactgataagtattaag

SEQ ID NO: 43065 - DNA, 50 bp, synthetic construct
  source 1..50: mol_type = other DNA
tgcttgctttccaccaactgatagagctaaggtatgtattgcagcatcat

SEQ ID NO: 43066 - DNA, 50 bp, synthetic construct
  source 1..50: mol_type = other DNA
tgcagcctttgcgtctctttttatcgacgggaacggaaaaaacggaaacg

SEQ ID NO: 43067 - DNA, 50 bp, synthetic construct
  source 1..50: mol_type = other DNA
cgaaatagacacagcctcttccctagagtgagagggttaggtctatggtc

SEQ ID NO: 43068 - DNA, 50 bp, synthetic construct
  source 1..50: mol_type = other DNA
tttgtaaaaatttatgaaagctggtatgtacttttaataaattttaattg

SEQ ID NO: 43069 - DNA, 50 bp, synthetic construct
  source 1..50: mol_type = other DNA
atgtcaatatggtaaataatatagatctacattattaaatataatgagtg

SEQ ID NO: 43070 - DNA, 50 bp, synthetic construct
  source 1..50: mol_type = other DNA
gcaaagtcttggctgactgaagcgcctgattcatagagtcagggctttgc

SEQ ID NO: 43071 - DNA, 50 bp, synthetic construct
  source 1..50: mol_type = other DNA
cgcgcccaggttgcaagagacattgcgcgatcctcgccaacctgatcgcc

SEQ ID NO: 43072 - DNA, 50 bp, synthetic construct
  source 1..50: mol_type = other DNA
ctgcacctcaacacatgcaaattaaaccgtttttagctgaacaaccgcaa

SEQ ID NO: 43073 - DNA, 50 bp, synthetic construct
  source 1..50: mol_type = other DNA
gccgggcgagggtccggacgacctccggggctctcgggccctccccgcgc

SEQ ID NO: 43074 - DNA, 50 bp, synthetic construct
  source 1..50: mol_type = other DNA
tcccggttcacggcgggggcctcacagcgcggcgccgacggtgaccacca

SEQ ID NO: 43075 - DNA, 50 bp, synthetic construct
  source 1..50: mol_type = other DNA
agcttttattactgaatttttattaacccaaaaaagaataataaaaaggt

SEQ ID NO: 43076 - DNA, 50 bp, synthetic construct
  source 1..50: mol_type = other DNA
gccgggttggtgtaccagctctatgcttgccgtggggtgtccaacccgag

SEQ ID NO: 43077 - DNA, 50 bp, synthetic construct
  source 1..50: mol_type = other DNA
gccggcatcttcagcaccagcctggcttcgcgtggggtgaggatgccgcg

SEQ ID NO: 43078 - DNA, 50 bp, synthetic construct
  source 1..50: mol_type = other DNA
tgatttcagtgattggagacgagacatcatcgaacaggcgggtgaactca

SEQ ID NO: 43079 - DNA, 50 bp, synthetic construct
  source 1..50: mol_type = other DNA
tattttaattattatgaaaacattaaaatctgctaaaaatatgaaaaata

SEQ ID NO: 43080 - DNA, 50 bp, synthetic construct
  source 1..50: mol_type = other DNA
atggttttccagcggctgcggcgatccatgcgaccgtgctggaaaacgcc

SEQ ID NO: 43081 - DNA, 50 bp, synthetic construct
  source 1..50: mol_type = other DNA
gttaaaaagcttatctattttttcaggtacaagaaaattgcccgtttaat

SEQ ID NO: 43082 - DNA, 50 bp, synthetic construct
  source 1..50: mol_type = other DNA
cttcttaatgatggataagaaattttcattttgggctattcatacagccc

SEQ ID NO: 43083 - DNA, 50 bp, synthetic construct
  source 1..50: mol_type = other DNA
aatttttaaaataatcaaagattgcttgatcttttgctatccaaaaaatt

SEQ ID NO: 43084 - DNA, 50 bp, synthetic construct
  source 1..50: mol_type = other DNA
acgatactccctatggcggaggaggaacgattcaatacacgcattatcgt

SEQ ID NO: 43085 - DNA, 50 bp, synthetic construct
  source 1..50: mol_type = other DNA
cttcttccgggatcagttccagctcgcgcttgaactcatccgtaaaccga

SEQ ID NO: 43086 - DNA, 50 bp, synthetic construct
  source 1..50: mol_type = other DNA
tcgacgtcccccgggcggagaaaccggttcgggcggtgcgggtgcgtcga

SEQ ID NO: 43087 - DNA, 50 bp, synthetic construct
  source 1..50: mol_type = other DNA
gcgcgcccgcagcgcgagcagggaccgcgtggcgattgcaacggccgcgc

SEQ ID NO: 43088 - DNA, 50 bp, synthetic construct
  source 1..50: mol_type = other DNA
tgacttaatcttttcttgctttgccaacaaagcaggcaaccatttgaaca

SEQ ID NO: 43089 - DNA, 50 bp, synthetic construct
  source 1..50: mol_type = other DNA
ccaataatattattgtttaaagaattatcttgaatcagtcgccaagtgtt

SEQ ID NO: 43090 - DNA, 50 bp, synthetic construct
  source 1..50: mol_type = other DNA
cagtatggtttctctccactcctatcttataatgaagaaaaatcataatg

SEQ ID NO: 43091 - DNA, 50 bp, synthetic construct
  source 1..50: mol_type = other DNA
ttttatcattttttaataaattttgaaagctgatgctgaaaagtttaaag

SEQ ID NO: 43092 - DNA, 50 bp, synthetic construct
  source 1..50: mol_type = other DNA
cggctctggcttgccctctacgtggagtcggtcagcgtgccctcgcggta

SEQ ID NO: 43093 - DNA, 50 bp, synthetic construct
  source 1..50: mol_type = other DNA
caagccgtccttgatctggcgcgggcccgcgccaacctgcaaacctatac

SEQ ID NO: 43094 - DNA, 50 bp, synthetic construct
  source 1..50: mol_type = other DNA
catgtgccgggaccgggcgcgcgggcacctcgtgcaggtcccggcgcaat

SEQ ID NO: 43095 - DNA, 50 bp, synthetic construct
  source 1..50: mol_type = other DNA
tatttataatgatttagagatagatttctatctcaaaatatatgtaagta

SEQ ID NO: 43096 - DNA, 50 bp, synthetic construct
  source 1..50: mol_type = other DNA
gagaaatttgtgtacgaaacggaactgctggtgatataatcaaaattgca

SEQ ID NO: 43097 - DNA, 50 bp, synthetic construct
  source 1..50: mol_type = other DNA
tcggcgcccgccgtctgcagacggtgccgcctgctttgccaggatgccga

SEQ ID NO: 43098 - DNA, 50 bp, synthetic construct
  source 1..50: mol_type = other DNA
taatatcgaaaaagagtggctctatataggcacactcttcatagtaacat

SEQ ID NO: 43099 - DNA, 50 bp, synthetic construct
  source 1..50: mol_type = other DNA
atggaagtccgtacacggcaatggcaagcgaaccgccaagacgattgcgg

SEQ ID NO: 43100 - DNA, 50 bp, synthetic construct
  source 1..50: mol_type = other DNA
gccatgtcaacgggcgtcgattctttatctccgtcgattgttgagaagat

SEQ ID NO: 43101 - DNA, 50 bp, synthetic construct
  source 1..50: mol_type = other DNA
cctcgcccacatcatgagcgtcttcgaagtaatcgagccgatgggcgatt

SEQ ID NO: 43102 - DNA, 50 bp, synthetic construct
  source 1..50: mol_type = other DNA
cacaacgtgccagagagttgtgcagcgttgcagggtcggatcctgttcca

SEQ ID NO: 43103 - DNA, 50 bp, synthetic construct
  source 1..50: mol_type = other DNA
cccgtgtctgagcacgtcgcttagcggcttcctgatggcccagcaggctc

SEQ ID NO: 43104 - DNA, 50 bp, synthetic construct
  source 1..50: mol_type = other DNA
ttttacttcttctatctacctacttttctatgtagatacaaaaaagatga

SEQ ID NO: 43105 - DNA, 50 bp, synthetic construct
  source 1..50: mol_type = other DNA
attccccaggcaggcattgagttccggacagggacgaacagctgacgagc

SEQ ID NO: 43106 - DNA, 50 bp, synthetic construct
  source 1..50: mol_type = other DNA
ccgcctacattctcggcatggatgatactatatgctaagaatgaaagctt

SEQ ID NO: 43107 - DNA, 50 bp, synthetic construct
  source 1..50: mol_type = other DNA
atgtaattgtatcgctttgggatacttatatagaaggtattgttttaggt

SEQ ID NO: 43108 - DNA, 50 bp, synthetic construct
  source 1..50: mol_type = other DNA
cacgatacttatttataatatttataggagagctcaaaatactgataaat

SEQ ID NO: 43109 - DNA, 50 bp, synthetic construct
  source 1..50: mol_type = other DNA
gataaactcttcattttagtttcaatggaaaggctgttgtagatgatata

SEQ ID NO: 43110 - DNA, 50 bp, synthetic construct
  source 1..50: mol_type = other DNA
cgggcacgtcgatggcgagcgcgccgccgcgcctcccgccgcgatgcgca

SEQ ID NO: 43111 - DNA, 50 bp, synthetic construct
  source 1..50: mol_type = other DNA
ttataatagacctatacacataaacagttagcgattgcgaaacatatcgt

SEQ ID NO: 43112 - DNA, 50 bp, synthetic construct
  source 1..50: mol_type = other DNA
aatctctatctgcttacgctacaagcttggagcttttatgtttggccatc

SEQ ID NO: 43113 - DNA, 50 bp, synthetic construct
  source 1..50: mol_type = other DNA
cggaaactcgccgtaaacccccggcgcatctcgtctacggcgaatggctg

SEQ ID NO: 43114 - DNA, 50 bp, synthetic construct
  source 1..50: mol_type = other DNA
cattatgattttcaataagtaatcttcagaggctaattcaaatcataaac

SEQ ID NO: 43115 - DNA, 50 bp, synthetic construct
  source 1..50: mol_type = other DNA
cgtgtaaaatctctaaggccatatatcggctgtcttagaacttctaatac

SEQ ID NO: 43116 - DNA, 50 bp, synthetic construct
  source 1..50: mol_type = other DNA
ccatagtaactcttccgcagacggtactgtcgatgaaaaggcagcaggtc

SEQ ID NO: 43117 - DNA, 50 bp, synthetic construct
  source 1..50: mol_type = other DNA
cagttgatccttttgaacgagcagaacaaaggaatcaaaagcatctaggc

SEQ ID NO: 43118 - DNA, 50 bp, synthetic construct
  source 1..50: mol_type = other DNA
cgggctcgggatcggggcgatgtacgtgcagcatcccgtgcgagcgcacg

SEQ ID NO: 43119 - DNA, 50 bp, synthetic construct
  source 1..50: mol_type = other DNA
ccccgagttttcccgcgatgccctggtgatccaggcggcccccctcgagg

SEQ ID NO: 43120 - DNA, 50 bp, synthetic construct
  source 1..50: mol_type = other DNA
tcatttcaaatgtttcagcatcaagtttatcgttgaatggtttgaaatgc

SEQ ID NO: 43121 - DNA, 50 bp, synthetic construct
  source 1..50: mol_type = other DNA
tctaacgtgtttagcttcatcttcatggttatttcttctaccacgttagc

SEQ ID NO: 43122 - DNA, 50 bp, synthetic construct
  source 1..50: mol_type = other DNA
gtgttgtcaaatttcttgaggtgttaacacctcatttgttttgtgttcat

SEQ ID NO: 43123 - DNA, 50 bp, synthetic construct
  source 1..50: mol_type = other DNA
caatgcttgagataagagtatctaaatatcgtaccttgtctgcgtcattg

SEQ ID NO: 43124 - DNA, 50 bp, synthetic construct
  source 1..50: mol_type = other DNA
gatattttttactaccaatatgttccaaaacatgaaattgaaaaacgttt

SEQ ID NO: 43125 - DNA, 50 bp, synthetic construct
  source 1..50: mol_type = other DNA
aggtgaggctggcggccaacgacaacatcccaacatcgccactctttata

SEQ ID NO: 43126 - DNA, 50 bp, synthetic construct
  source 1..50: mol_type = other DNA
tgaattgcaaaaacaacaaggtgaaatcataaaattgtgttttatattca

SEQ ID NO: 43127 - DNA, 50 bp, synthetic construct
  source 1..50: mol_type = other DNA
atgtctggcgtttcttcgcgctgggggctgcgccggcaaaggctagcccc

SEQ ID NO: 43128 - DNA, 50 bp, synthetic construct
  source 1..50: mol_type = other DNA
gctgtgaggctcatccgcaggcctccgcgcatgattatgagccttccggg

SEQ ID NO: 43129 - DNA, 50 bp, synthetic construct
  source 1..50: mol_type = other DNA
gtggttgtaaaacttgttattatttaaataagtacaagtattccaaactg

SEQ ID NO: 43130 - DNA, 50 bp, synthetic construct
  source 1..50: mol_type = other DNA
gaggagcgccgggttaccggggctcaatccccgccacccgagcgctccac

SEQ ID NO: 43131 - DNA, 50 bp, synthetic construct
  source 1..50: mol_type = other DNA
tgttaaaaacatacaagaaacttcaagaagaaaagagtatgtgcttactg

SEQ ID NO: 43132 - DNA, 50 bp, synthetic construct
  source 1..50: mol_type = other DNA
attatcattacgaaaattatcatcatcgtcataatttccacttatctatc

SEQ ID NO: 43133 - DNA, 50 bp, synthetic construct
  source 1..50: mol_type = other DNA
gggtgcaacggcagttggaggattgcggttctcgtagtgcggttcgaccg

SEQ ID NO: 43134 - DNA, 50 bp, synthetic construct
  source 1..50: mol_type = other DNA
ctcatactaaattaattacttttatttaaaaaaattagacgatgtataca

SEQ ID NO: 43135 - DNA, 50 bp, synthetic construct
  source 1..50: mol_type = other DNA
ggatgcggaggctttagcgaaagattcttttcggaagaacttccgcaggc

SEQ ID NO: 43136 - DNA, 50 bp, synthetic construct
  source 1..50: mol_type = other DNA
tccatctttaatttcaatgactttatgtaatcacctttttataaatatct

SEQ ID NO: 43137 - DNA, 50 bp, synthetic construct
  source 1..50: mol_type = other DNA
tcttgcggataacgatgttggggattgtaaattcatcgtaatcagcctga

SEQ ID NO: 43138 - DNA, 50 bp, synthetic construct
  source 1..50: mol_type = other DNA
ctttttttgatttcctacgaatagatatataagtaggaggaatgaaaatg

SEQ ID NO: 43139 - DNA, 50 bp, synthetic construct
  source 1..50: mol_type = other DNA
acgattattgttgtatattcaaaagattttcaatatcgtttaataaagaa

SEQ ID NO: 43140 - DNA, 50 bp, synthetic construct
  source 1..50: mol_type = other DNA
ggagggtgatgcgaaagcagaggagatcctgcgtctcgccatcatcctgc

SEQ ID NO: 43141 - DNA, 50 bp, synthetic construct
  source 1..50: mol_type = other DNA
atccaatgccagtagataataacatttgataaactctacaatgtaatgaa

SEQ ID NO: 43142 - DNA, 50 bp, synthetic construct
  source 1..50: mol_type = other DNA
ttgaccgttacgaccccactggtgaacaccacccacatcaaaacggtaga

SEQ ID NO: 43143 - DNA, 50 bp, synthetic construct
  source 1..50: mol_type = other DNA
cgctttcaggatttaggcataagtgggcgcataggaggcaggcgaccaaa

SEQ ID NO: 43144 - DNA, 50 bp, synthetic construct
  source 1..50: mol_type = other DNA
tcttcgcggttaatcatataatttaaaaaattaataattaatgacgagga

SEQ ID NO: 43145 - DNA, 50 bp, synthetic construct
  source 1..50: mol_type = other DNA
attactactcctattaaaagtaaatctttttgcttaatagcctctataac

SEQ ID NO: 43146 - DNA, 50 bp, synthetic construct
  source 1..50: mol_type = other DNA
ttatatatcaattcatccataaatatcattattgatgaacgtcatttact

SEQ ID NO: 43147 - DNA, 50 bp, synthetic construct
  source 1..50: mol_type = other DNA
caacacgctacggctcgtttccttgcagggaactaagccctgcttttctt

SEQ ID NO: 43148 - DNA, 50 bp, synthetic construct
  source 1..50: mol_type = other DNA
gaacaccctatacttgaatcacgaattacacaagcaattttagggtgttc

SEQ ID NO: 43149 - DNA, 50 bp, synthetic construct
  source 1..50: mol_type = other DNA
gctgaaagcgaaagatatatatgcttttttgccttgctttttctttcatc

SEQ ID NO: 43150 - DNA, 50 bp, synthetic construct
  source 1..50: mol_type = other DNA
atataccttattattatagcaaattatattgctctaaaagaggaatttat

SEQ ID NO: 43151 - DNA, 50 bp, synthetic construct
  source 1..50: mol_type = other DNA
cagcgaaacgtcaaccgcgtcatcctggatagccgtccggttcatagcgc

SEQ ID NO: 43152 - DNA, 50 bp, synthetic construct
  source 1..50: mol_type = other DNA
agatacaatcttttttggcgaaaattattttgccctcatgttctgggggc

SEQ ID NO: 43153 - DNA, 50 bp, synthetic construct
  source 1..50: mol_type = other DNA
aaaattgaatttcagtggatggttataatcccccttgtaaattaaattct

SEQ ID NO: 43154 - DNA, 50 bp, synthetic construct
  source 1..50: mol_type = other DNA
tcgattggctattcgacttgtcattggtgtcatgtgatggagagagaatc

SEQ ID NO: 43155 - DNA, 50 bp, synthetic construct
  source 1..50: mol_type = other DNA
atcataaagaagactgcagcaataattatggcgtattcatcggtggtgat

SEQ ID NO: 43156 - DNA, 50 bp, synthetic construct
  source 1..50: mol_type = other DNA
taatcaacattaggttcagggctaatacaatcagaaatctacaaggatta

SEQ ID NO: 43157 - DNA, 50 bp, synthetic construct
  source 1..50: mol_type = other DNA
tttgtgggttaataattttttattataataaaaaaatataaattaaaaaa

SEQ ID NO: 43158 - DNA, 50 bp, synthetic construct
  source 1..50: mol_type = other DNA
agatgttattgtaccacctccgggcaatcgaagctggtattatcacccct

SEQ ID NO: 43159 - DNA, 50 bp, synthetic construct
  source 1..50: mol_type = other DNA
cacaaaaggatagccatcagctatccgaggctgtggctaattactttata

SEQ ID NO: 43160 - DNA, 50 bp, synthetic construct
  source 1..50: mol_type = other DNA
accgtgctttcaagggaatacgaggcaggatatgcccgtgtttccaccga

SEQ ID NO: 43161 - DNA, 50 bp, synthetic construct
  source 1..50: mol_type = other DNA
cgacaacaagccaaaggagcgtgagcggcctttcttttgcgctcttgagg

SEQ ID NO: 43162 - DNA, 50 bp, synthetic construct
  source 1..50: mol_type = other DNA
tgatattggaaataagcaccctatatcaagggatactattatgaactcgt

SEQ ID NO: 43163 - DNA, 50 bp, synthetic construct
  source 1..50: mol_type = other DNA
cggccggccgtaccgagccgcggctcgcggcggtggccggcgcggggccc

SEQ ID NO: 43164 - DNA, 50 bp, synthetic construct
  source 1..50: mol_type = other DNA
taatcttcaatacggacaagaatcgtctccgccgtccgcgccgagccggc

SEQ ID NO: 43165 - DNA, 50 bp, synthetic construct
  source 1..50: mol_type = other DNA
atggactatttaattatgatttagaattaaaagaaacacaagtcattcaa

SEQ ID NO: 43166 - DNA, 50 bp, synthetic construct
  source 1..50: mol_type = other DNA
ggctcaatacctctaataggttttataaaaccctcccaacttatgtatag

SEQ ID NO: 43167 - DNA, 50 bp, synthetic construct
  source 1..50: mol_type = other DNA
cgcatctgcggcaggaattcgcacctcagcaacttcctcgcgcttcatat

SEQ ID NO: 43168 - DNA, 50 bp, synthetic construct
  source 1..50: mol_type = other DNA
atggctgacaggtggtggcaaggtcatgcttgccacttctggtgagcatg

SEQ ID NO: 43169 - DNA, 50 bp, synthetic construct
  source 1..50: mol_type = other DNA
gcgattgccgagatgtaccccaaacgatttttctctatcatagcaccaac

SEQ ID NO: 43170 - DNA, 50 bp, synthetic construct
  source 1..50: mol_type = other DNA
ttcaaataaaaaattcacttcaggtagtagaaaccattttcatattcaac

SEQ ID NO: 43171 - DNA, 50 bp, synthetic construct
  source 1..50: mol_type = other DNA
cttgcttcgatgctatttcatctacattttaataaaagtatgtaaggcgc

SEQ ID NO: 43172 - DNA, 50 bp, synthetic construct
  source 1..50: mol_type = other DNA
ctacgtttttcttctcacgttttttataaaactctagaagctcgacggga

SEQ ID NO: 43173 - DNA, 50 bp, synthetic construct
  source 1..50: mol_type = other DNA
tttatttcgtatgctcatttttaagattacattcgatacttcaggatcaa

SEQ ID NO: 43174 - DNA, 50 bp, synthetic construct
  source 1..50: mol_type = other DNA
gtgttcatcgcctgtacaatgtttatagatttgtcatgtaacatatccaa

SEQ ID NO: 43175 - DNA, 50 bp, synthetic construct
  source 1..50: mol_type = other DNA
ggatcaaggcggcactggaaccgcgtttcgggtcactgaagcgcaagtag

SEQ ID NO: 43176 - DNA, 50 bp, synthetic construct
  source 1..50: mol_type = other DNA
tttattacatcagttccctccacaataaaaaaagaaaataatgaaataaa

SEQ ID NO: 43177 - DNA, 50 bp, synthetic construct
  source 1..50: mol_type = other DNA
ggattcgattgatccttcccgtcatatgaagatgattgacaatacaatcc

SEQ ID NO: 43178 - DNA, 50 bp, synthetic construct
  source 1..50: mol_type = other DNA
tcgcattagccaacagttgcttttgtaaaggcgatgattggctaataaga

SEQ ID NO: 43179 - DNA, 50 bp, synthetic construct
  source 1..50: mol_type = other DNA
gtcggccaggaactcaagtccggacggccgaccgtgccgggatggccgag

SEQ ID NO: 43180 - DNA, 50 bp, synthetic construct
  source 1..50: mol_type = other DNA
gagcggtcctcacgtcgatccgcgacctgctctttcgcctagtcccggtc

SEQ ID NO: 43181 - DNA, 50 bp, synthetic construct
  source 1..50: mol_type = other DNA
gcgcgcccgcagcgcgagcagcgaccgcgtggcgattgcaacggccgcgc

SEQ ID NO: 43182 - DNA, 50 bp, synthetic construct
  source 1..50: mol_type = other DNA
tcatgcgcgtcttctttcaataattaccgtgaatacatcttgaaacatga

SEQ ID NO: 43183 - DNA, 50 bp, synthetic construct
  source 1..50: mol_type = other DNA
tgtaaattattaactcaaaaaacatttataattggagttaataataattt

SEQ ID NO: 43184 - DNA, 50 bp, synthetic construct
  source 1..50: mol_type = other DNA
ttatatcatcctgctgcttggtggcgatatcctgagacgttaccttataa

SEQ ID NO: 43185 - DNA, 50 bp, synthetic construct
  source 1..50: mol_type = other DNA
tgtacaaactcaacccgggaacgaaacatatcccggaaaatgtttgcgcc

SEQ ID NO: 43186 - DNA, 50 bp, synthetic construct
  source 1..50: mol_type = other DNA
ttgattttgagtcaaaacttgaaaattctatattaccgcattcaaatcaa

SEQ ID NO: 43187 - DNA, 50 bp, synthetic construct
  source 1..50: mol_type = other DNA
tgccaagaaatatattttctgaattttcaaagaaaatatttttctcggca

SEQ ID NO: 43188 - DNA, 50 bp, synthetic construct
  source 1..50: mol_type = other DNA
ttataaaaggataaaaatttttcatatgaagaaaattggtctatttttga

SEQ ID NO: 43189 - DNA, 50 bp, synthetic construct
  source 1..50: mol_type = other DNA
agatgctaagaaaaataaagaacttaaatgacctcgctttctataaggct

SEQ ID NO: 43190 - DNA, 50 bp, synthetic construct
  source 1..50: mol_type = other DNA
ggaaggtacgcatttgaccggacatgttaccaatcaataagtgccctttt

SEQ ID NO: 43191 - DNA, 50 bp, synthetic construct
  source 1..50: mol_type = other DNA
cttttcttgttatatgggaaaatcatgtactcaaaatatacatggaaacg

SEQ ID NO: 43192 - DNA, 50 bp, synthetic construct
  source 1..50: mol_type = other DNA
tccaaaacagcttattcatattgtttataatatgatggagaaatagagga

SEQ ID NO: 43193 - DNA, 50 bp, synthetic construct
  source 1..50: mol_type = other DNA
ctgctactgttaaaaagcttgtcgcaatgtaaaagctttaaccttagctt

SEQ ID NO: 43194 - DNA, 50 bp, synthetic construct
  source 1..50: mol_type = other DNA
cgacggtctagatttgtatagttgatgaactaccggaagcaagcgcgcgt

SEQ ID NO: 43195 - DNA, 50 bp, synthetic construct
  source 1..50: mol_type = other DNA
tcgttataatacacggtaggggcgttaatcaatacccgacattggctcag

SEQ ID NO: 43196 - DNA, 50 bp, synthetic construct
  source 1..50: mol_type = other DNA
ttacggaagttttctgttaatccgaattccacaaaaaaacgaccccgtaa

SEQ ID NO: 43197 - DNA, 50 bp, synthetic construct
  source 1..50: mol_type = other DNA
atatttaagataatgtgaccttaattttatttttaacattggtggaataa

SEQ ID NO: 43198 - DNA, 50 bp, synthetic construct
  source 1..50: mol_type = other DNA
atggaaagaacaaagaagtttattttgctccaattctgtgttaaaattga

SEQ ID NO: 43199 - DNA, 50 bp, synthetic construct
  source 1..50: mol_type = other DNA
aagaagattttatgcggattattcgtgaatggcagcgcaagaatgtgccc

SEQ ID NO: 43200 - DNA, 50 bp, synthetic construct
  source 1..50: mol_type = other DNA
acagattggcatcaggctgcaggccggccggcgttggcgggccagcgtgt

SEQ ID NO: 43201 - DNA, 50 bp, synthetic construct
  source 1..50: mol_type = other DNA
aaggtaaaaataccaataaatataattgaaaaatggagatattaatgatg

SEQ ID NO: 43202 - DNA, 50 bp, synthetic construct
  source 1..50: mol_type = other DNA
ggcttcacctacagcatgggcgccgcggcacctcgcgttattcgttaggt

SEQ ID NO: 43203 - DNA, 50 bp, synthetic construct
  source 1..50: mol_type = other DNA
tatagcaacttcttctccctttggctccctttgacaaattccttccaccc

SEQ ID NO: 43204 - DNA, 50 bp, synthetic construct
  source 1..50: mol_type = other DNA
ccccgcatttgcgaggctctttgacttcaacgtaccagttaaagcaattt

SEQ ID NO: 43205 - DNA, 50 bp, synthetic construct
  source 1..50: mol_type = other DNA
aaaaaaatagataataagagaataattatcacctcattaaatattagtca

SEQ ID NO: 43206 - DNA, 50 bp, synthetic construct
  source 1..50: mol_type = other DNA
attttaaaaaaatcaggaaacccttacaatcaaattgatttttgtaaaat

SEQ ID NO: 43207 - DNA, 50 bp, synthetic construct
  source 1..50: mol_type = other DNA
tcaacgccccatcccaccgcagtgggcaccccggcagggtggcctcctga

SEQ ID NO: 43208 - DNA, 50 bp, synthetic construct
  source 1..50: mol_type = other DNA
gaacagcacgagcgcgaggccgatgttcgaccctcgcgctcccactgttg

SEQ ID NO: 43209 - DNA, 50 bp, synthetic construct
  source 1..50: mol_type = other DNA
agaagtggatatatgctctgttcagatgaccatgaggctatcataccgcc

SEQ ID NO: 43210 - DNA, 50 bp, synthetic construct
  source 1..50: mol_type = other DNA
cagtaccggcggatgcgcgtagccggcaagcaacgcatcgccgcctactg

SEQ ID NO: 43211 - DNA, 50 bp, synthetic construct
  source 1..50: mol_type = other DNA
aatgtgaggcgaatgggctaatttgaaaaccgcgccgcccacggaggtcg

SEQ ID NO: 43212 - DNA, 50 bp, synthetic construct
  source 1..50: mol_type = other DNA
cgtatcacatgcagcatcctgaccgcggttcggacggttacggtgatacc

SEQ ID NO: 43213 - DNA, 50 bp, synthetic construct
  source 1..50: mol_type = other DNA
acggctcagtggtcacacgcacctggcggtgcgcaggcagctctggccga

SEQ ID NO: 43214 - DNA, 50 bp, synthetic construct
  source 1..50: mol_type = other DNA
ccaaatttgccggagcgcaggcgaagtaagctgcgttcaccgccgcttgc

SEQ ID NO: 43215 - DNA, 50 bp, synthetic construct
  source 1..50: mol_type = other DNA
gatttccgccgcgtagagagcttctggaataaatccacatggctctattc

SEQ ID NO: 43216 - DNA, 50 bp, synthetic construct
  source 1..50: mol_type = other DNA
ctacaacttaaaggtattattataattataatatatagtatatagagtta

SEQ ID NO: 43217 - DNA, 50 bp, synthetic construct
  source 1..50: mol_type = other DNA
ttcattttcaagtgctttaataaaaatttattaaaattgctgataatgat

SEQ ID NO: 43218 - DNA, 50 bp, synthetic construct
  source 1..50: mol_type = other DNA
tgacaactgggatgaagtttcgacgtcttcaacaactttttcaccaaaag

SEQ ID NO: 43219 - DNA, 50 bp, synthetic construct
  source 1..50: mol_type = other DNA
gtgcagccggtggatatgtttgccattgcaaaggttacggccggcaacac

SEQ ID NO: 43220 - DNA, 50 bp, synthetic construct
  source 1..50: mol_type = other DNA
cggccatgggggggccgtatgtatatatgtataaccccactcataagcca

SEQ ID NO: 43221 - DNA, 50 bp, synthetic construct
  source 1..50: mol_type = other DNA
cctcctgtttttacatagtgcattcgaatcgaaaacggcaaagcagttat

SEQ ID NO: 43222 - DNA, 50 bp, synthetic construct
  source 1..50: mol_type = other DNA
acagcctttcgacttggtgacattacatcatcctctgatcctttttcttt

SEQ ID NO: 43223 - DNA, 50 bp, synthetic construct
  source 1..50: mol_type = other DNA
cacttatatcatcactctacggaaactggcgataatatttgatgtatatg

SEQ ID NO: 43224 - DNA, 50 bp, synthetic construct
  source 1..50: mol_type = other DNA
tgcgatttgctcatttcgcatcattgatgatgcgtcggaagcattcacat

SEQ ID NO: 43225 - DNA, 50 bp, synthetic construct
  source 1..50: mol_type = other DNA
gatgatcgaggccttcgagcatcagctgatgcaagaccgggtggacccgg

SEQ ID NO: 43226 - DNA, 50 bp, synthetic construct
  source 1..50: mol_type = other DNA
aaatgcgcctctcttagtcgcaaatatgtaagcgggcgagcttcgcattc

SEQ ID NO: 43227 - DNA, 50 bp, synthetic construct
  source 1..50: mol_type = other DNA
cggtaaggttgtggcctggttttttgaacttagccttctcatccttatcg

SEQ ID NO: 43228 - DNA, 50 bp, synthetic construct
  source 1..50: mol_type = other DNA
tgatgaaaaagtataatatctctacaataattaagcactctttttataag

SEQ ID NO: 43229 - DNA, 50 bp, synthetic construct
  source 1..50: mol_type = other DNA
ggttgataaaaatccaaaggtaatatattttttgagtaattttatggaca

SEQ ID NO: 43230 - DNA, 50 bp, synthetic construct
  source 1..50: mol_type = other DNA
gctgttgaagaaatacagggatacattttatcttccatggtttcctcagc

SEQ ID NO: 43231 - DNA, 50 bp, synthetic construct
  source 1..50: mol_type = other DNA
agatatcaatgccgaaattgacgcttctatcaatttcttgattttctgct

SEQ ID NO: 43232 - DNA, 50 bp, synthetic construct
  source 1..50: mol_type = other DNA
ccgaagtcgtaaaattatgcgaacaagatcgccacaaaccgcgaccgcgg

SEQ ID NO: 43233 - DNA, 50 bp, synthetic construct
  source 1..50: mol_type = other DNA
gctgacgaacggaaaagtcgcccttgacgacgtgcaccccgtgcccatgc

SEQ ID NO: 43234 - DNA, 50 bp, synthetic construct
  source 1..50: mol_type = other DNA
ttctattacattgtaacatataatttgcaatgtgttcctcggtgatatcc

SEQ ID NO: 43235 - DNA, 50 bp, synthetic construct
  source 1..50: mol_type = other DNA
agaggtgcaatatgtattatagatatatcactccctgttattgcgtttta

SEQ ID NO: 43236 - DNA, 50 bp, synthetic construct
  source 1..50: mol_type = other DNA
ataaatactactagtgcaaatggtaaaacatttttaagaagaggatttgc

SEQ ID NO: 43237 - DNA, 50 bp, synthetic construct
  source 1..50: mol_type = other DNA
aaatattttaaataggagaatttaaataaatactccattttaaatacatt

SEQ ID NO: 43238 - DNA, 50 bp, synthetic construct
  source 1..50: mol_type = other DNA
gtctattaactgacataggaactgaatggctcatgtagaaatactaggaa

SEQ ID NO: 43239 - DNA, 50 bp, synthetic construct
  source 1..50: mol_type = other DNA
gcgagtcggcaagatggttgtcagattgaagaaaaggcttgaggggttta

SEQ ID NO: 43240 - DNA, 50 bp, synthetic construct
  source 1..50: mol_type = other DNA
cttggaagtgtggtataataaaactggtttttgtggacacatgctttcaa

SEQ ID NO: 43241 - DNA, 50 bp, synthetic construct
  source 1..50: mol_type = other DNA
acataaaacagatactttgtaccttggaaaaaggagtatgcgtgctatct

SEQ ID NO: 43242 - DNA, 50 bp, synthetic construct
  source 1..50: mol_type = other DNA
ccagctcatacaaaccatgatgttataacatcatggtttctattcttcgg

SEQ ID NO: 43243 - DNA, 50 bp, synthetic construct
  source 1..50: mol_type = other DNA
tgttcagaaagttttaggttgggtatacgctggcttccacttcctgatga

SEQ ID NO: 43244 - DNA, 50 bp, synthetic construct
  source 1..50: mol_type = other DNA
ggatgatgtactcacattgactggcaacagccatatactctcattcttcc

SEQ ID NO: 43245 - DNA, 50 bp, synthetic construct
  source 1..50: mol_type = other DNA
agagtcatttgcgcaggctgaaaatgtttctctgctgccgccatgaaaaa

SEQ ID NO: 43246 - DNA, 50 bp, synthetic construct
  source 1..50: mol_type = other DNA
tgatgtatagctgaccacaatatatatcactcacaaagcgctacatatca

SEQ ID NO: 43247 - DNA, 50 bp, synthetic construct
  source 1..50: mol_type = other DNA
atctgatatacatgaaagataccggcgatattcttttatgtactgctctt

SEQ ID NO: 43248 - DNA, 50 bp, synthetic construct
  source 1..50: mol_type = other DNA
aatctgcaataaaaatgcccccatatttccttgcatctttattatactca

SEQ ID NO: 43249 - DNA, 50 bp, synthetic construct
  source 1..50: mol_type = other DNA
ttggaacaccaacatgaataaaatattttagattgctgttcttgaagcaa

SEQ ID NO: 43250 - DNA, 50 bp, synthetic construct
  source 1..50: mol_type = other DNA
tttttgagaaatttaaaaaatagaaatatattgttttaaaatatcgatcg

SEQ ID NO: 43251 - DNA, 50 bp, synthetic construct
  source 1..50: mol_type = other DNA
actattttaatacaaacgacacccttaggaacattttctattaaaatata

SEQ ID NO: 43252 - DNA, 50 bp, synthetic construct
  source 1..50: mol_type = other DNA
tgcaacttttcttttttgtaaaccattgtttttataaaaggtaaaaacca

SEQ ID NO: 43253 - DNA, 50 bp, synthetic construct
  source 1..50: mol_type = other DNA
gaaaatattttaataaaagatattatgaactctttttttacagaatcatc

SEQ ID NO: 43254 - DNA, 50 bp, synthetic construct
  source 1..50: mol_type = other DNA
agcattcttttataatgtttatgccggatgaaattgaataaaagaatgag

SEQ ID NO: 43255 - DNA, 50 bp, synthetic construct
  source 1..50: mol_type = other DNA
atatagaggacttggcttctctgtatacatgattttcagaagctatatcc

SEQ ID NO: 43256 - DNA, 50 bp, synthetic construct
  source 1..50: mol_type = other DNA
cttacagcacaggatatcaaccaactccgggcggttgtctgtctttgcag

SEQ ID NO: 43257 - DNA, 50 bp, synthetic construct
  source 1..50: mol_type = other DNA
ccggctagggctaggaaaaggtctaaagaaatcctcctgttacacaaatt

SEQ ID NO: 43258 - DNA, 50 bp, synthetic construct
  source 1..50: mol_type = other DNA
tgatattatagaaagcgataaaaatattttgatctaattcttctatatta

SEQ ID NO: 43259 - DNA, 50 bp, synthetic construct
  source 1..50: mol_type = other DNA
ccgctgaaatggctggataaatcatgtgagtttatgagccaagaagttag

SEQ ID NO: 43260 - DNA, 50 bp, synthetic construct
  source 1..50: mol_type = other DNA
tcatccaaataaaacactctcaggagcctgcgggctttttactatcagtt

SEQ ID NO: 43261 - DNA, 50 bp, synthetic construct
  source 1..50: mol_type = other DNA
gtcaatacgaagaaaaccaccaatcaatatccaattttcttttcattcca

SEQ ID NO: 43262 - DNA, 50 bp, synthetic construct
  source 1..50: mol_type = other DNA
ttcagctttttcttcatcgataactgctggtgtaacaagaaaaagaattg

SEQ ID NO: 43263 - DNA, 50 bp, synthetic construct
  source 1..50: mol_type = other DNA
caaaaaaaacaaacagagagtactatacctccgaaaatttcttaaattta

SEQ ID NO: 43264 - DNA, 50 bp, synthetic construct
  source 1..50: mol_type = other DNA
aaagaatctgccctgccatggcacaaatgcacatattattctgcttcttt

SEQ ID NO: 43265 - DNA, 50 bp, synthetic construct
  source 1..50: mol_type = other DNA
ctgcggagaatgaataaggaggtgcagccggatggttgaattggagaccg

SEQ ID NO: 43266 - DNA, 50 bp, synthetic construct
  source 1..50: mol_type = other DNA
gctgggagagcgcttgcatggcatgcaagagggtcaccgtgatttgaatc

SEQ ID NO: 43267 - DNA, 50 bp, synthetic construct
  source 1..50: mol_type = other DNA
gccatcattaactccgtagatataagtatatcatgtatgctcatgtatgc

SEQ ID NO: 43268 - DNA, 50 bp, synthetic construct
  source 1..50: mol_type = other DNA
tttatgatatggatgtttatccggttccgaataaatatctatacgataac

SEQ ID NO: 43269 - DNA, 50 bp, synthetic construct
  source 1..50: mol_type = other DNA
ttatatagaggaaaacattccattgcaatataataggttccgtgataatg

SEQ ID NO: 43270 - DNA, 50 bp, synthetic construct
  source 1..50: mol_type = other DNA
ttgccggatgacccgctggaaacgatataaatctgataaatatgcggcaa

SEQ ID NO: 43271 - DNA, 50 bp, synthetic construct
  source 1..50: mol_type = other DNA
acgggttccccgttttctttctctatagaatttttccatggagaacctac

SEQ ID NO: 43272 - DNA, 50 bp, synthetic construct
  source 1..50: mol_type = other DNA
atccgttatccccattttttccggaagcggaagttttgggacaaacgctg

SEQ ID NO: 43273 - DNA, 50 bp, synthetic construct
  source 1..50: mol_type = other DNA
ttctttttccgggtggaaagaggtttacctgcttccatatgaaaaatagg

SEQ ID NO: 43274 - DNA, 50 bp, synthetic construct
  source 1..50: mol_type = other DNA
attcccaaaaaacatgattaaaattgcctcctttcaaattttagccctat

SEQ ID NO: 43275 - DNA, 50 bp, synthetic construct
  source 1..50: mol_type = other DNA
tagattagagagaaagggcggatttgacaaggctcttttttattatcaaa

SEQ ID NO: 43276 - DNA, 50 bp, synthetic construct
  source 1..50: mol_type = other DNA
atattcagggtatttttatacccatttctccatcgccgctcatatacgcc

SEQ ID NO: 43277 - DNA, 50 bp, synthetic construct
  source 1..50: mol_type = other DNA
caaacgtacaaaccttttgaatttataaaattgaaagctacaacaagtgt

SEQ ID NO: 43278 - DNA, 50 bp, synthetic construct
  source 1..50: mol_type = other DNA
cgtctcgtacaaaaagtcttttttataataaaatcttttttatagactat

SEQ ID NO: 43279 - DNA, 50 bp, synthetic construct
  source 1..50: mol_type = other DNA
aaattaataaataatcttaaaataaaaattttaattttttctctttcttt

SEQ ID NO: 43280 - DNA, 50 bp, synthetic construct
  source 1..50: mol_type = other DNA
gaggacaaaatgtatgatcaaatgagcatacgttggttgccgatgctgtc

SEQ ID NO: 43281 - DNA, 50 bp, synthetic construct
  source 1..50: mol_type = other DNA
cagtttaataaattccatatcttaattatcatctgaaattgattcaacat

SEQ ID NO: 43282 - DNA, 50 bp, synthetic construct
  source 1..50: mol_type = other DNA
ggaacagatacagatgaagatcccgcagagtctttcgttggatttgtttt

SEQ ID NO: 43283 - DNA, 50 bp, synthetic construct
  source 1..50: mol_type = other DNA
tccgttctctttccagctcgcttttaacaccttcctgaaaaagggtataa

SEQ ID NO: 43284 - DNA, 50 bp, synthetic construct
  source 1..50: mol_type = other DNA
accgcaatcttgtaaacttttccctaacaaaaacggtacttaaaaaataa

SEQ ID NO: 43285 - DNA, 50 bp, synthetic construct
  source 1..50: mol_type = other DNA
ttcttgtaagctggtgtacaatggcagcttttcaccgaagacggtaaggg

SEQ ID NO: 43286 - DNA, 50 bp, synthetic construct
  source 1..50: mol_type = other DNA
aaccgttctggctgccgagggcgtttgtaatctgtccagccataacgctg

SEQ ID NO: 43287 - DNA, 50 bp, synthetic construct
  source 1..50: mol_type = other DNA
cgcgcatatgcggcgaccactgttttcatcccattcgccggtaatagttt

SEQ ID NO: 43288 - DNA, 50 bp, synthetic construct
  source 1..50: mol_type = other DNA
taaatatataaatttttttaataaatatctgatactaatttagctatagg

SEQ ID NO: 43289 - DNA, 50 bp, synthetic construct
  source 1..50: mol_type = other DNA
taacttattataccatacaaaaatgaacttttggaatggctgaaaagccg

SEQ ID NO: 43290 - DNA, 50 bp, synthetic construct
  source 1..50: mol_type = other DNA
tatattgcaatggaaaggaaatcatatgattcctcctttcttatggtata

SEQ ID NO: 43291 - DNA, 50 bp, synthetic construct
  source 1..50: mol_type = other DNA
gtcgttatacagaaaattcctgagaattcagagagagataatatttttat

SEQ ID NO: 43292 - DNA, 50 bp, synthetic construct
  source 1..50: mol_type = other DNA
ccgtccgcatgaatcccaagtgtccctccaccgggagcgggtggggacgg

SEQ ID NO: 43293 - DNA, 50 bp, synthetic construct
  source 1..50: mol_type = other DNA
gatgcttattctaaaaaggaattattttattcaaaaaaagtataaaaata

SEQ ID NO: 43294 - DNA, 50 bp, synthetic construct
  source 1..50: mol_type = other DNA
tctctcccttgtatgcggacttattaagaacaacgcttactatctgagga

SEQ ID NO: 43295 - DNA, 50 bp, synthetic construct
  source 1..50: mol_type = other DNA
tcagatgttctctggacgaccggcgaaccccgcgtcactggaattagtga

SEQ ID NO: 43296 - DNA, 50 bp, synthetic construct
  source 1..50: mol_type = other DNA
ccgccaatctttctctccctatctggctgcatggacggaaagattgatat

SEQ ID NO: 43297 - DNA, 50 bp, synthetic construct
  source 1..50: mol_type = other DNA
tttttatctttgattaaagtttcaaagcttcttgtaataattgagaaaaa

SEQ ID NO: 43298 - DNA, 50 bp, synthetic construct
  source 1..50: mol_type = other DNA
atttaataaaaaggagatttttatcagcaataatctataagtttatgata

SEQ ID NO: 43299 - DNA, 50 bp, synthetic construct
  source 1..50: mol_type = other DNA
cctccatgtaattcctgaatacattaatcaatttttctgtcactatatcg

SEQ ID NO: 43300 - DNA, 50 bp, synthetic construct
  source 1..50: mol_type = other DNA
cacgaaaataaaaacaagcaataaatatctgtttcaccttcattgtcgat

SEQ ID NO: 43301 - DNA, 50 bp, synthetic construct
  source 1..50: mol_type = other DNA
aaaatacgatacagtatcgtatcgtactatacatcactctaaaaccttta

SEQ ID NO: 43302 - DNA, 50 bp, synthetic construct
  source 1..50: mol_type = other DNA
ggaaagaccgctcccgccgcgaaagcacagacggcggcagctgagctgcg

SEQ ID NO: 43303 - DNA, 50 bp, synthetic construct
  source 1..50: mol_type = other DNA
cggccagcgcgtccgccagcgtctgcaggcgctggaggatgcgctgaaaa

SEQ ID NO: 43304 - DNA, 50 bp, synthetic construct
  source 1..50: mol_type = other DNA
tacagcattgcattacagccgcctatagtcaatcgatctatccggctctg

SEQ ID NO: 43305 - DNA, 50 bp, synthetic construct
  source 1..50: mol_type = other DNA
gtggcgaaaaaaacaacattccaaagcaggaagctcttcgggttcgcaat

SEQ ID NO: 43306 - DNA, 50 bp, synthetic construct
  source 1..50: mol_type = other DNA
gtggctgtggagcatggacgatgattcgcgcgggacggctttttaaaatt

SEQ ID NO: 43307 - DNA, 50 bp, synthetic construct
  source 1..50: mol_type = other DNA
aagatattttcggcatttcggcggtggattgaaaatgccgcggcgttcag

SEQ ID NO: 43308 - DNA, 50 bp, synthetic construct
  source 1..50: mol_type = other DNA
ggaaaatatatcttgaaccgcttggctttcccaagcactgcgtaaaaaca

SEQ ID NO: 43309 - DNA, 50 bp, synthetic construct
  source 1..50: mol_type = other DNA
cataaatcatttatcgttaatttgtttaaaacaatatcaaatgtgcgatt

SEQ ID NO: 43310 - DNA, 50 bp, synthetic construct
  source 1..50: mol_type = other DNA
gacttggatcagccgcaccacccgcccggattccgcagctgtcctgcacg

SEQ ID NO: 43311 - DNA, 50 bp, synthetic construct
  source 1..50: mol_type = other DNA
aaattgtgtggtctgtgctcaacaaatgtcgggcacaaaaataaccagga

SEQ ID NO: 43312 - DNA, 50 bp, synthetic construct
  source 1..50: mol_type = other DNA
cttctgttacatttaccacagatcataatcaggtctgaaatgaccagaat

SEQ ID NO: 43313 - DNA, 50 bp, synthetic construct
  source 1..50: mol_type = other DNA
ggaaatatctggaaattcagtgtccggtcattgattaccgtgagaaaatc

SEQ ID NO: 43314 - DNA, 50 bp, synthetic construct
  source 1..50: mol_type = other DNA
taaagttaaagaaaattcgttttattttaaagccatttatgtgacaactc

SEQ ID NO: 43315 - DNA, 50 bp, synthetic construct
  source 1..50: mol_type = other DNA
tttgccgcagacgccggcacgatcccggatatgcccgcgtctccaccgac

SEQ ID NO: 43316 - DNA, 50 bp, synthetic construct
  source 1..50: mol_type = other DNA
caaaggtgtgcccgaacaccgggcatgtcaaagccattggcacacctccc

SEQ ID NO: 43317 - DNA, 50 bp, synthetic construct
  source 1..50: mol_type = other DNA
gctctgcccggcttgcagggagaaccagctccctctggcggggagagaga

SEQ ID NO: 43318 - DNA, 50 bp, synthetic construct
  source 1..50: mol_type = other DNA
gctgctggtagatacgcgggcatacctccgcccttctgcgcgccagctca

SEQ ID NO: 43319 - DNA, 50 bp, synthetic construct
  source 1..50: mol_type = other DNA
aatttttcattgattaaccctgctgccggttgttggtggtcagaaaaaat

SEQ ID NO: 43320 - DNA, 50 bp, synthetic construct
  source 1..50: mol_type = other DNA
tctttccgctgctatacagcttgaaatcaagcattacttcgacggcgtta

SEQ ID NO: 43321 - DNA, 50 bp, synthetic construct
  source 1..50: mol_type = other DNA
tttccccggaactttccagagtatattccttatgtcaagtttcgcggaaa

SEQ ID NO: 43322 - DNA, 50 bp, synthetic construct
  source 1..50: mol_type = other DNA
agacaattcaaaaaataatcgtagggaacagattattgttttagaagaag

SEQ ID NO: 43323 - DNA, 50 bp, synthetic construct
  source 1..50: mol_type = other DNA
gatgtctttgcgtctttttcttaattcgcagacgcagacgaaaacacatt

SEQ ID NO: 43324 - DNA, 50 bp, synthetic construct
  source 1..50: mol_type = other DNA
cagcatttatccggcagaggttttttcatcatcctcctcgataccggcta

SEQ ID NO: 43325 - DNA, 50 bp, synthetic construct
  source 1..50: mol_type = other DNA
ctgcagcagtattttggttaatcgatataataatcaaaatacaaattgga

SEQ ID NO: 43326 - DNA, 50 bp, synthetic construct
  source 1..50: mol_type = other DNA
gttggagggataccgacagcctttccaataatggtcggtatttttccagc

SEQ ID NO: 43327 - DNA, 50 bp, synthetic construct
  source 1..50: mol_type = other DNA
ggaatgagtgcgagcaaggttttaagcaagtgttttctcggatacctttc

SEQ ID NO: 43328 - DNA, 50 bp, synthetic construct
  source 1..50: mol_type = other DNA
catataaaacacgcgccgttttcgtctctaaacctttcttctattgattt

SEQ ID NO: 43329 - DNA, 50 bp, synthetic construct
  source 1..50: mol_type = other DNA
tcggcaagctgctcctcgccatggactgacagcgacgagcagcttaccag

SEQ ID NO: 43330 - DNA, 50 bp, synthetic construct
  source 1..50: mol_type = other DNA
ccgaatggcagaataaacggaatatgtatttcgggaaaattttcatacgg

SEQ ID NO: 43331 - DNA, 50 bp, synthetic construct
  source 1..50: mol_type = other DNA
ttttccgcacatttgcacggaaatcaacacaagcacaattgtgcgatttt

SEQ ID NO: 43332 - DNA, 50 bp, synthetic construct
  source 1..50: mol_type = other DNA
cccaatcaatatctattccatctaatttatattaatataatttaattatt

SEQ ID NO: 43333 - DNA, 50 bp, synthetic construct
  source 1..50: mol_type = other DNA
taggtatttttattatataagattaaaatatgatataataaatatacaaa

SEQ ID NO: 43334 - DNA, 50 bp, synthetic construct
  source 1..50: mol_type = other DNA
acactttatcgctgaaatggcttgataaaaaatctttaggattaatttgt

SEQ ID NO: 43335 - DNA, 50 bp, synthetic construct
  source 1..50: mol_type = other DNA
ggttagaatttcaatatttacaaaattgcgcaactagcgaaaattaaaaa

SEQ ID NO: 43336 - DNA, 50 bp, synthetic construct
  source 1..50: mol_type = other DNA
gctatattgtaattccatacagaatatgtggtatgattttagtaaatatt

SEQ ID NO: 43337 - DNA, 50 bp, synthetic construct
  source 1..50: mol_type = other DNA
ctacgtgcccggctgcaaaggaacagcttcatgggcttcatacaggataa

SEQ ID NO: 43338 - DNA, 50 bp, synthetic construct
  source 1..50: mol_type = other DNA
tgacataaaactgctcaccgcctggcaccgccgcctacgcccgtgtttcc

SEQ ID NO: 43339 - DNA, 50 bp, synthetic construct
  source 1..50: mol_type = other DNA
atatttatgaacatttctaccccttaccaagtacctcaaaaaataaatcc

SEQ ID NO: 43340 - DNA, 50 bp, synthetic construct
  source 1..50: mol_type = other DNA
tattatcaaagagtgagtggaacaggaagtcaacgatatatccgagaata

SEQ ID NO: 43341 - DNA, 50 bp, synthetic construct
  source 1..50: mol_type = other DNA
aacaagacaaattataagtatttctttccaggctttctgcatctcgctgt

SEQ ID NO: 43342 - DNA, 50 bp, synthetic construct
  source 1..50: mol_type = other DNA
aggaaaaatgaaaaagatattttgtggcgtatttctgggctttttgcagg

SEQ ID NO: 43343 - DNA, 50 bp, synthetic construct
  source 1..50: mol_type = other DNA
cgatagccaaagggtgtatggcccatggcaaatacatccgctgtttatgc

SEQ ID NO: 43344 - DNA, 50 bp, synthetic construct
  source 1..50: mol_type = other DNA
aagaaataaaggctgatagcagtgatcactccttaataatcttatgtttt

SEQ ID NO: 43345 - DNA, 50 bp, synthetic construct
  source 1..50: mol_type = other DNA
agcatacaaaattatagaaaacaatccgcttttctttgattttaatgagg

SEQ ID NO: 43346 - DNA, 50 bp, synthetic construct
  source 1..50: mol_type = other DNA
tcgccctcgtcgctgtccacgccgtccggcgtgaacaccggggagagatt

SEQ ID NO: 43347 - DNA, 50 bp, synthetic construct
  source 1..50: mol_type = other DNA
taagtttcccttgcagaaaaaacaggcgttttttcatggggggaatccat

SEQ ID NO: 43348 - DNA, 50 bp, synthetic construct
  source 1..50: mol_type = other DNA
atcgttttttaggattacaaaataattattttgtagtagcttgaaacgta

SEQ ID NO: 43349 - DNA, 50 bp, synthetic construct
  source 1..50: mol_type = other DNA
gatatatggtagtaccaaattgatagatatagatgaattagaagtatatg

SEQ ID NO: 43350 - DNA, 50 bp, synthetic construct
  source 1..50: mol_type = other DNA
tatatattgtcttagaggagctgatagttacttataaaagattatataaa

SEQ ID NO: 43351 - DNA, 50 bp, synthetic construct
  source 1..50: mol_type = other DNA
attgtgaatttaatccatcaggactagtaaatgctgattaaactgtcaat

SEQ ID NO: 43352 - DNA, 50 bp, synthetic construct
  source 1..50: mol_type = other DNA
acagcgcgccgctgctttggcaaagccggtcaaaagctgcggataatact

SEQ ID NO: 43353 - DNA, 50 bp, synthetic construct
  source 1..50: mol_type = other DNA
gatcgcctgcacggccgccgctgccggagacgccgcccgcggctgtcaaa

SEQ ID NO: 43354 - DNA, 50 bp, synthetic construct
  source 1..50: mol_type = other DNA
tcttctaactgatcccctttgttcagacaagaaaaagatgaagaacaaaa

SEQ ID NO: 43355 - DNA, 50 bp, synthetic construct
  source 1..50: mol_type = other DNA
gctctggtttatcaaccagggtattttcctcctaaactataatctgctcc

SEQ ID NO: 43356 - DNA, 50 bp, synthetic construct
  source 1..50: mol_type = other DNA
ggaaaacctccgttttatccggataaatctgaaaaaaaagaatattttct

SEQ ID NO: 43357 - DNA, 50 bp, synthetic construct
  source 1..50: mol_type = other DNA
ttttcgccctttcaactacttttttgaaaaagtgactaaagacaaattaa

SEQ ID NO: 43358 - DNA, 50 bp, synthetic construct
  source 1..50: mol_type = other DNA
ggtgatgatattgaataaaaaaacgagttggtttatgcccgaagataact

SEQ ID NO: 43359 - DNA, 50 bp, synthetic construct
  source 1..50: mol_type = other DNA
ctttttgcaatatcttgccggtcttcctatatttagggtatagcaaaaag

SEQ ID NO: 43360 - DNA, 50 bp, synthetic construct
  source 1..50: mol_type = other DNA
tattttacgtacaagaatattgtatccatgttgtttttgacagtaaaata

SEQ ID NO: 43361 - DNA, 50 bp, synthetic construct
  source 1..50: mol_type = other DNA
gtgaaatgtctaatttaggaatttttaaattctcaaattcatctttcttc

SEQ ID NO: 43362 - DNA, 50 bp, synthetic construct
  source 1..50: mol_type = other DNA
attaaccgaagttataaactatatcaccagttcttgaaacttcggacggt

SEQ ID NO: 43363 - DNA, 50 bp, synthetic construct
  source 1..50: mol_type = other DNA
actaaacagatatagatcggaaagttgttcatcagcttcttgcggcaggt

SEQ ID NO: 43364 - DNA, 50 bp, synthetic construct
  source 1..50: mol_type = other DNA
ggactctactcttagtaagagatagataattctttaaaacagtatcttct

SEQ ID NO: 43365 - DNA, 50 bp, synthetic construct
  source 1..50: mol_type = other DNA
ttttagagtgatatatagtagcggaaattctaccttaaggatggaacaac

SEQ ID NO: 43366 - DNA, 50 bp, synthetic construct
  source 1..50: mol_type = other DNA
taattatactatagaataaaaaaaaatgaaggtactttaatatataataa

SEQ ID NO: 43367 - DNA, 50 bp, synthetic construct
  source 1..50: mol_type = other DNA
tgaaataatttttttgaatatgatttatcaaatgagataaaattttgagc

SEQ ID NO: 43368 - DNA, 50 bp, synthetic construct
  source 1..50: mol_type = other DNA
ttgataaatgaaagaaaacgctatatgagtgcatttataaaaatggataa

SEQ ID NO: 43369 - DNA, 50 bp, synthetic construct
  source 1..50: mol_type = other DNA
tgctttgctcttcaaacttttttcaaataacaggtttttacaggttcttt

SEQ ID NO: 43370 - DNA, 50 bp, synthetic construct
  source 1..50: mol_type = other DNA
attaattgtataactttcaaaaataaatatggtaaacttatatagaaaaa

SEQ ID NO: 43371 - DNA, 50 bp, synthetic construct
  source 1..50: mol_type = other DNA
atggctgcaatggcacaggaagaaagcccgttccggctttttgcaggaat

SEQ ID NO: 43372 - DNA, 50 bp, synthetic construct
  source 1..50: mol_type = other DNA
catgtcttaaattactccagttttctaaacgccaagaatagcaagtagaa

SEQ ID NO: 43373 - DNA, 50 bp, synthetic construct
  source 1..50: mol_type = other DNA
aaagagatgaagtttcataggattaaaagggtataaaagtccattgattt

SEQ ID NO: 43374 - DNA, 50 bp, synthetic construct
  source 1..50: mol_type = other DNA
gataggattttggggtttaactcgctaacgatgccgtaaataatcctcgg

SEQ ID NO: 43375 - DNA, 50 bp, synthetic construct
  source 1..50: mol_type = other DNA
tggcctggttttttggtagcgggtatagccgcaatcaaaccctcagccag

SEQ ID NO: 43376 - DNA, 50 bp, synthetic construct
  source 1..50: mol_type = other DNA
tcgacgaacgctttgagcctaccgttgggtggggtcaacagatatcgagc

SEQ ID NO: 43377 - DNA, 50 bp, synthetic construct
  source 1..50: mol_type = other DNA
gagcagcggcatgagcgaactctgatctgaattttttccgaaaaaatttc

SEQ ID NO: 43378 - DNA, 50 bp, synthetic construct
  source 1..50: mol_type = other DNA
tattatacataaacttttcctttcatgatttcggctaactctttatcaat

SEQ ID NO: 43379 - DNA, 50 bp, synthetic construct
  source 1..50: mol_type = other DNA
cactacacctgtgggcttggcgctatagagcaacctttacagatgtcttg

SEQ ID NO: 43380 - DNA, 50 bp, synthetic construct
  source 1..50: mol_type = other DNA
gaaagaagaattgttaaatttgagaaataaaattgttgtataaaattaaa

SEQ ID NO: 43381 - DNA, 50 bp, synthetic construct
  source 1..50: mol_type = other DNA
ttattgtgtaattatacccatttttatatcttgatactccgtgtccataa

SEQ ID NO: 43382 - DNA, 50 bp, synthetic construct
  source 1..50: mol_type = other DNA
taccgcttataccttcatctgcatattaggtatattagtaataacttcta

SEQ ID NO: 43383 - DNA, 50 bp, synthetic construct
  source 1..50: mol_type = other DNA
tttgaaaacagtaggtttaacggtttgcctgtgagtctattgtttttcca

SEQ ID NO: 43384 - DNA, 50 bp, synthetic construct
  source 1..50: mol_type = other DNA
caacttcaggaagtccaaaattaatagaaataaagtaacccactaagttg

SEQ ID NO: 43385 - DNA, 50 bp, synthetic construct
  source 1..50: mol_type = other DNA
cttcgaagcttacccgagcgattcatacatcgcttccttaagcattaatg

SEQ ID NO: 43386 - DNA, 50 bp, synthetic construct
  source 1..50: mol_type = other DNA
tcattttgcaggatagttgagtagaatttctcatctcttttgtccaagac

SEQ ID NO: 43387 - DNA, 50 bp, synthetic construct
  source 1..50: mol_type = other DNA
agaaaacgtaagtgtcttaaaaattttattgtactcactttttgttatca

SEQ ID NO: 43388 - DNA, 50 bp, synthetic construct
  source 1..50: mol_type = other DNA
cgcgccccattcatccgctactttttcaagcgcgctaccaaaactgcgct

SEQ ID NO: 43389 - DNA, 50 bp, synthetic construct
  source 1..50: mol_type = other DNA
catttttaatgttatttttaattatatctgtagtcatatatttaaaattt

SEQ ID NO: 43390 - skipped

SEQ ID NO: 43391 - DNA, 50 bp, synthetic construct
  source 1..50: mol_type = other DNA
aatttatccgtatctttgaggaagaagtgccggataggaacggcaaaatt

SEQ ID NO: 43392 - DNA, 50 bp, synthetic construct
  source 1..50: mol_type = other DNA
tcggcctcgtccgcaaagcggctgcgctacacccggatatctgtaagcgt

SEQ ID NO: 43393 - DNA, 50 bp, synthetic construct
  source 1..50: mol_type = other DNA
cgcttgtgatatgcttgtgttgccgcctctgtgcgatacgctcacaacga

SEQ ID NO: 43394 - DNA, 50 bp, synthetic construct
  source 1..50: mol_type = other DNA
cagaagcaaaggcatttatcagagacgaacgcgcgatgctggagcagatc

SEQ ID NO: 43395 - DNA, 50 bp, synthetic construct
  source 1..50: mol_type = other DNA
ttctctcccgatctctgcgccaaaacgccggcgccgcaatccgcaccgag

SEQ ID NO: 43396 - DNA, 50 bp, synthetic construct
  source 1..50: mol_type = other DNA
gcatcatgaaggcaaaagcaatttgtcaatttcttttcggtcgaggacag

SEQ ID NO: 43397 - DNA, 50 bp, synthetic construct
  source 1..50: mol_type = other DNA
tccgcagacctttctcttttttgatgttcaaaaagaaaaactaatccaga

SEQ ID NO: 43398 - DNA, 50 bp, synthetic construct
  source 1..50: mol_type = other DNA
gctccccgggggacatccgggcgtagtttccctccgggcccccctttata

SEQ ID NO: 43399 - DNA, 50 bp, synthetic construct
  source 1..50: mol_type = other DNA
ttcttagataacttgtcttacttcaataaggaattcaagggttcattgca

SEQ ID NO: 43400 - DNA, 50 bp, synthetic construct
  source 1..50: mol_type = other DNA
ccgcccgccatgagctgttttatcccgctaattcccttgtcaccgggcgg

SEQ ID NO: 43401 - DNA, 50 bp, synthetic construct
  source 1..50: mol_type = other DNA
ggattgcttgaaaattgaatatcgaacgatatgcagttttcaaggtacac

SEQ ID NO: 43402 - DNA, 50 bp, synthetic construct
  source 1..50: mol_type = other DNA
ttgcttgaaaattgaatatcgaaagtggataatatgcacttttcaaggta

SEQ ID NO: 43403 - DNA, 50 bp, synthetic construct
  source 1..50: mol_type = other DNA
aaagccagttaaaaggctaaaatccggaatttacgattggaacagatatt

SEQ ID NO: 43404 - DNA, 50 bp, synthetic construct
  source 1..50: mol_type = other DNA
ttcgccattatttttttcgtctgtacgccgccgcccgccatcgagcagag

SEQ ID NO: 43405 - DNA, 50 bp, synthetic construct
  source 1..50: mol_type = other DNA
gcgggcagccgtcgttgacggcggcgccgataaatacgccgcataagcgc

SEQ ID NO: 43406 - DNA, 50 bp, synthetic construct
  source 1..50: mol_type = other DNA
aaatatcacatattccgctcctattttcaagagcggagcatgtgtctatt

SEQ ID NO: 43407 - DNA, 50 bp, synthetic construct
  source 1..50: mol_type = other DNA
agacgataaaccgagcgcagagtttacactttccgctctcagcgcgccgc

SEQ ID NO: 43408 - DNA, 50 bp, synthetic construct
  source 1..50: mol_type = other DNA
atgccaatataaaattaaaagaagcgctcctttttattaaatagcgacga

SEQ ID NO: 43409 - DNA, 50 bp, synthetic construct
  source 1..50: mol_type = other DNA
cgcagaagccatccgtgcgattctgaagaaccgccgttgcggttcggcat

SEQ ID NO: 43410 - DNA, 50 bp, synthetic construct
  source 1..50: mol_type = other DNA
cgagattgagttctagtggtgaggagcctcccctcggaagctcaatttga

SEQ ID NO: 43411 - DNA, 50 bp, synthetic construct
  source 1..50: mol_type = other DNA
ttcggcagaggcttcgtcaacaacagctcgtgatacacatctgccctcgg

SEQ ID NO: 43412 - DNA, 50 bp, synthetic construct
  source 1..50: mol_type = other DNA
acactacactccccgtgcctgttcgcgaacgcgatttctttttctatcgc

SEQ ID NO: 43413 - DNA, 50 bp, synthetic construct
  source 1..50: mol_type = other DNA
cttattatgcatcatataattagcaaaataattataagtttaattttaaa

SEQ ID NO: 43414 - DNA, 50 bp, synthetic construct
  source 1..50: mol_type = other DNA
gtatttgcaagaaaaatataaaccatagtattaaacctttttaaaaactc

SEQ ID NO: 43415 - DNA, 50 bp, synthetic construct
  source 1..50: mol_type = other DNA
cattaccatttcgatgacctcaaatgtattaaagattagagccgttaatt

SEQ ID NO: 43416 - DNA, 50 bp, synthetic construct
  source 1..50: mol_type = other DNA
gcaatacaatcatggcaaatttgccaaggcttatgatctgattgttgcct

SEQ ID NO: 43417 - DNA, 50 bp, synthetic construct
  source 1..50: mol_type = other DNA
ccattttgggtggagattatgcccgaaatcctaatcaccatcatggcatc

SEQ ID NO: 43418 - DNA, 50 bp, synthetic construct
  source 1..50: mol_type = other DNA
agaattaaggctttattaatcagtaatatatcaaaaaaagaattaaaact

SEQ ID NO: 43419 - DNA, 50 bp, synthetic construct
  source 1..50: mol_type = other DNA
gatagctaagttaataattggaagaccgtcatgtttttttcttaacttct

SEQ ID NO: 43420 - DNA, 50 bp, synthetic construct
  source 1..50: mol_type = other DNA
atttcgaaagaagaaatagaatcaattgtttccttttcttaaaatgttat

SEQ ID NO: 43421 - DNA, 50 bp, synthetic construct
  source 1..50: mol_type = other DNA
tgagaaacttgatttacagacggcagggagtcgtcccatcaacgaggcgg

SEQ ID NO: 43422 - DNA, 50 bp, synthetic construct
  source 1..50: mol_type = other DNA
aactgctcatcggagtccgttgagaccatacgagaggaggatgaacggtg

SEQ ID NO: 43423 - DNA, 50 bp, synthetic construct
  source 1..50: mol_type = other DNA
aactggcaaaaatgctggacagcggcatcttcgcagtgtttttgaggggg

SEQ ID NO: 43424 - DNA, 50 bp, synthetic construct
  source 1..50: mol_type = other DNA
aataaaggccttaaagacgctatgaattagctctgtttagttctgttatt

SEQ ID NO: 43425 - DNA, 50 bp, synthetic construct
  source 1..50: mol_type = other DNA
ctacctgctcttttgtgtagcgcggtggaacgagaagaaagacgctgaag

SEQ ID NO: 43426 - DNA, 50 bp, synthetic construct
  source 1..50: mol_type = other DNA
atatcagccattcaatcacagaaatgttactgaaaatgaccatctaatat

SEQ ID NO: 43427 - DNA, 50 bp, synthetic construct
  source 1..50: mol_type = other DNA
gataattttgatagtaatttaatacatacagtcttattatataaaatatt

SEQ ID NO: 43428 - DNA, 50 bp, synthetic construct
  source 1..50: mol_type = other DNA
gaattcgttgatttatctaaggttaaatgtttatataaatagtggcggcg

SEQ ID NO: 43429 - DNA, 50 bp, synthetic construct
  source 1..50: mol_type = other DNA
aacaggactggtcaagaacagttaagaaaatgttctctggttggtgcttt

SEQ ID NO: 43430 - DNA, 50 bp, synthetic construct
  source 1..50: mol_type = other DNA
tctagaatttcactttaagaatggaactatttgaaagaaagtattctgga

SEQ ID NO: 43431 - DNA, 50 bp, synthetic construct
  source 1..50: mol_type = other DNA
acacgcctctatatttttcattcttctgctataataatagacagatagct

SEQ ID NO: 43432 - DNA, 50 bp, synthetic construct
  source 1..50: mol_type = other DNA
taaactaatagattatttaaataatatattttttataatcatttaaattt

SEQ ID NO: 43433 - DNA, 50 bp, synthetic construct
  source 1..50: mol_type = other DNA
cggcacttggccattgtgtcggatagggccgttttggatttcagggaatg

SEQ ID NO: 43434 - DNA, 50 bp, synthetic construct
  source 1..50: mol_type = other DNA
atttcttcttgtcttcttaagctcaaattgctaaaaacaaaagaaaaaaa

SEQ ID NO: 43435 - DNA, 50 bp, synthetic construct
  source 1..50: mol_type = other DNA
cattgtatcaaacctatatgtttttaaatactgactgtcttgatacaata

SEQ ID NO: 43436 - DNA, 50 bp, synthetic construct
  source 1..50: mol_type = other DNA
gctggtcttcctggtccgttgacacacggcaaaggaacaggcatcccact

SEQ ID NO: 43437 - DNA, 50 bp, synthetic construct
  source 1..50: mol_type = other DNA
ataagtgacttgccttcaaaatagtacctgttagaagcgaagaatcttat

SEQ ID NO: 43438 - DNA, 50 bp, synthetic construct
  source 1..50: mol_type = other DNA
tattaaatgatataaaaataaaagttaattgctttttaagtctctaaatt

SEQ ID NO: 43439 - DNA, 50 bp, synthetic construct
  source 1..50: mol_type = other DNA
gcggcctccatatcgtgtactttcggcaagaagcgcgtaaagcaagccgt

SEQ ID NO: 43440 - DNA, 50 bp, synthetic construct
  source 1..50: mol_type = other DNA
ggatatgccgctgcaatggcttccgaggaatatatgacaggcgcatccta

SEQ ID NO: 43441 - DNA, 50 bp, synthetic construct
  source 1..50: mol_type = other DNA
tagaaacgcaactccaactcctgcgcttactatgagatagtgcgagatct

SEQ ID NO: 43442 - DNA, 50 bp, synthetic construct
  source 1..50: mol_type = other DNA
tacccgtggggacagcaataaaccgcaccttattggtgtcgttaaaaaca

SEQ ID NO: 43443 - DNA, 50 bp, synthetic construct
  source 1..50: mol_type = other DNA
ctccatatttagtggttgtcgtgatataaagacaagatacaaatgctgca

SEQ ID NO: 43444 - DNA, 50 bp, synthetic construct
  source 1..50: mol_type = other DNA
gtacagtttcggttgttaaatgaaaattgttttttaaaacgaatgaagac

SEQ ID NO: 43445 - DNA, 50 bp, synthetic construct
  source 1..50: mol_type = other DNA
tgcattagcttttatagcatgtaacattatgatatataaaaagaaatgcc

SEQ ID NO: 43446 - DNA, 50 bp, synthetic construct
  source 1..50: mol_type = other DNA
gaaaaggtaagggagatacggatgtacatttctctcattgttgttgtttt

SEQ ID NO: 43447 - DNA, 50 bp, synthetic construct
  source 1..50: mol_type = other DNA
gctcatcaaacacgcctgacgcttccaccgagcaggacgacctgcgagcc

SEQ ID NO: 43448 - DNA, 50 bp, synthetic construct
  source 1..50: mol_type = other DNA
tttaattggtgaaaaagcttatcgatggtattacttttggtggaggcggt

SEQ ID NO: 43449 - DNA, 50 bp, synthetic construct
  source 1..50: mol_type = other DNA
gtttccagaaaatcccttgttatcctgatagcaagcactttagcggtata

SEQ ID NO: 43450 - DNA, 50 bp, synthetic construct
  source 1..50: mol_type = other DNA
ctcagcgcggtcgccgcggcggtcacgaccgccgcgtcggccgcgcccgc

SEQ ID NO: 43451 - DNA, 50 bp, synthetic construct
  source 1..50: mol_type = other DNA
gagccaaggggtgtgcatcttttaatctaaagtaaggagtccctttgctt

SEQ ID NO: 43452 - DNA, 50 bp, synthetic construct
  source 1..50: mol_type = other DNA
gtttaataaaaggataaaaactatatatcaagtcaatcccgcgatataaa

SEQ ID NO: 43453 - DNA, 50 bp, synthetic construct
  source 1..50: mol_type = other DNA
cgctatatgagcgacagccgagcatctgtgcgggagtcgtcgcgcgtgcg

SEQ ID NO: 43454 - DNA, 50 bp, synthetic construct
  source 1..50: mol_type = other DNA
cgattgagaaagacgtcccggcgatatcgccaaaaacattttatcaatca

SEQ ID NO: 43455 - DNA, 50 bp, synthetic construct
  source 1..50: mol_type = other DNA
acgcatgcttcaattctttcattaattaaataaagataggtaaattgcga

SEQ ID NO: 43456 - DNA, 50 bp, synthetic construct
  source 1..50: mol_type = other DNA
ttgctgtaattatcatttcctgtgtctgcgggaactcatcttgttcaaaa

SEQ ID NO: 43457 - DNA, 50 bp, synthetic construct
  source 1..50: mol_type = other DNA
tatcatataataagactggtattatgagatataatatttgagagataatt

SEQ ID NO: 43458 - DNA, 50 bp, synthetic construct
  source 1..50: mol_type = other DNA
gctaacagctttactatttttgttttttctaagattctaaaatagttacc

SEQ ID NO: 43459 - DNA, 50 bp, synthetic construct
  source 1..50: mol_type = other DNA
ttataaatcattagcgagttaaatcatcttaattccctccctatttagat

SEQ ID NO: 43460 - DNA, 50 bp, synthetic construct
  source 1..50: mol_type = other DNA
atcttgatatattttatataattcatgaggtatataaaggtgagaaagac

SEQ ID NO: 43461 - DNA, 50 bp, synthetic construct
  source 1..50: mol_type = other DNA
gcggccgtgaccatttctatcatcttcatggacgataagcccatttataa

SEQ ID NO: 43462 - DNA, 50 bp, synthetic construct
  source 1..50: mol_type = other DNA
gcttagacagctccgtcctaagtttacacatatacttttgcaagctgagg

SEQ ID NO: 43463 - DNA, 50 bp, synthetic construct
  source 1..50: mol_type = other DNA
aaaaatataaggttatcgttatgatatcatgaaacagacaataaaatata

SEQ ID NO: 43464 - DNA, 50 bp, synthetic construct
  source 1..50: mol_type = other DNA
tcctacattaacacaataccaaatacattatctctaccaaatatggtgag

SEQ ID NO: 43465 - DNA, 50 bp, synthetic construct
  source 1..50: mol_type = other DNA
tttgtcaatatatccgccccaatttcactgggggctggtgaatcaaataa

SEQ ID NO: 43466 - DNA, 50 bp, synthetic construct
  source 1..50: mol_type = other DNA
accgatggcacggcggtaaagagaattaaatttggtttcagcgcatcaat

SEQ ID NO: 43467 - DNA, 50 bp, synthetic construct
  source 1..50: mol_type = other DNA
gaggtttacataccatagaaaaatatattccctaatggtatgtacacatt

SEQ ID NO: 43468 - DNA, 50 bp, synthetic construct
  source 1..50: mol_type = other DNA
cggatagaaaaagagaaggttcaaataactttcacatctgcaccggtaca

SEQ ID NO: 43469 - DNA, 50 bp, synthetic construct
  source 1..50: mol_type = other DNA
gaagccttttaattgcattgtggtataccacctcacaattataacccaat

SEQ ID NO: 43470 - DNA, 50 bp, synthetic construct
  source 1..50: mol_type = other DNA
gcccctggaggataaaagagtcaatatttacctttggtcggggcggaaag

SEQ ID NO: 43471 - DNA, 50 bp, synthetic construct
  source 1..50: mol_type = other DNA
atgcccatggccgaaaaagacgcttacagacctgctggagacgtgggcgt

SEQ ID NO: 43472 - DNA, 50 bp, synthetic construct
  source 1..50: mol_type = other DNA
aaaaacgccgccccccggtctgatcccgcccggaagcgggcggcgctgcc

SEQ ID NO: 43473 - DNA, 50 bp, synthetic construct
  source 1..50: mol_type = other DNA
attttatcagtcggaaaacaccagaggaagaaagggaggactcatcagaa

SEQ ID NO: 43474 - DNA, 50 bp, synthetic construct
  source 1..50: mol_type = other DNA
gccacagcaagggaaagcccggaaatatcataagtttcattatctgtacc

SEQ ID NO: 43475 - DNA, 50 bp, synthetic construct
  source 1..50: mol_type = other DNA
tgacgaatcatctcaccgctgtttgcaaacagccggcaagcgcctcattt

SEQ ID NO: 43476 - DNA, 50 bp, synthetic construct
  source 1..50: mol_type = other DNA
cggatctttttcatgggcgttctcctgatctttatcatctcgtacatcca

SEQ ID NO: 43477 - DNA, 50 bp, synthetic construct
  source 1..50: mol_type = other DNA
aaattaaaaaaaatactgctaaacagccttaaccggctattttttaatat

SEQ ID NO: 43478 - DNA, 50 bp, synthetic construct
  source 1..50: mol_type = other DNA
aatggggggtttcttattagcaaaattatgccatcacgaggatcccgatc

SEQ ID NO: 43479 - DNA, 50 bp, synthetic construct
  source 1..50: mol_type = other DNA
aatctcgggcgtgtaaattccctgttcagcaattcgccaagagcctgagc

SEQ ID NO: 43480 - DNA, 50 bp, synthetic construct
  source 1..50: mol_type = other DNA
cgacaacaggtcgctggtcaggccgcggggcttccgcagcgctgctcgaa

SEQ ID NO: 43481 - DNA, 50 bp, synthetic construct
  source 1..50: mol_type = other DNA
gttcaagaaaattggcaaactcctcttcaagggtgcgaattattccggcg

SEQ ID NO: 43482 - DNA, 50 bp, synthetic construct
  source 1..50: mol_type = other DNA
taatattcttttaatttcagcatcatcaagattatagtaaaagaataaat

SEQ ID NO: 43483 - DNA, 50 bp, synthetic construct
  source 1..50: mol_type = other DNA
cgcccagatggccgcagcggcacgggcgcgcacccgttcccggctttcgc

SEQ ID NO: 43484 - DNA, 50 bp, synthetic construct
  source 1..50: mol_type = other DNA
ataatagtataaataaaaaagattataatcttcctttcagttattattgg

SEQ ID NO: 43485 - DNA, 50 bp, synthetic construct
  source 1..50: mol_type = other DNA
attaaaaccagaaagtacagatataaatatacctatattacatttttaca

SEQ ID NO: 43486 - DNA, 50 bp, synthetic construct
  source 1..50: mol_type = other DNA
tgaagaagctaccttgcttggtattaattgcaaaaaagttagatgctcta

SEQ ID NO: 43487 - DNA, 50 bp, synthetic construct
  source 1..50: mol_type = other DNA
cccattggcatatgtgtttgcaaattacgggggatacttatgtcaatttt

SEQ ID NO: 43488 - DNA, 50 bp, synthetic construct
  source 1..50: mol_type = other DNA
atatttcaacacaagttatttatatggttgaataagactttataaaatat

SEQ ID NO: 43489 - DNA, 50 bp, synthetic construct
  source 1..50: mol_type = other DNA
cgcgagctttcgctttcaaaatcaattgatttacaaaacgaaagacatgt

SEQ ID NO: 43490 - DNA, 50 bp, synthetic construct
  source 1..50: mol_type = other DNA
ttgaaatcgccgctgccggaatgcaccttattacgcaagggcgatttgca

SEQ ID NO: 43491 - DNA, 50 bp, synthetic construct
  source 1..50: mol_type = other DNA
aatttatatttttatttttttttaattaaataaaaaaagggctatatttg

SEQ ID NO: 43492 - DNA, 50 bp, synthetic construct
  source 1..50: mol_type = other DNA
atcacagctttaaatcttgaaatatttatattattcagtacagatgttgt

SEQ ID NO: 43493 - DNA, 50 bp, synthetic construct
  source 1..50: mol_type = other DNA
gtaacaaaatgcttgaacttgcagaaattattttttcggcactctgctac

SEQ ID NO: 43494 - DNA, 50 bp, synthetic construct
  source 1..50: mol_type = other DNA
cctggggattctggttgaattcggtgcccagcagtaccatgcccagcgct

SEQ ID NO: 43495 - DNA, 50 bp, synthetic construct
  source 1..50: mol_type = other DNA
atcaacgacccggaaaaacttcgccgatccaggtaatccggggacttgat

SEQ ID NO: 43496 - DNA, 50 bp, synthetic construct
  source 1..50: mol_type = other DNA
aaagtgctcacgccaatgcacttaatttgataattcgggaatagcagttt

SEQ ID NO: 43497 - DNA, 50 bp, synthetic construct
  source 1..50: mol_type = other DNA
agaaattgtaaagaatgtctgcacatgttctctcgctctgtctgatctct

SEQ ID NO: 43498 - DNA, 50 bp, synthetic construct
  source 1..50: mol_type = other DNA
ttattataccaactaaacattttcctttttgtatttagtacgtattatac

SEQ ID NO: 43499 - DNA, 50 bp, synthetic construct
  source 1..50: mol_type = other DNA
aaaacacttgctattactggcttttaatgaccaggaaattcataagtatt

SEQ ID NO: 43500 - DNA, 50 bp, synthetic construct
  source 1..50: mol_type = other DNA
catggactttatgctacggatgatttctctggaatagcaataaggtttac

SEQ ID NO: 43501 - DNA, 50 bp, synthetic construct
  source 1..50: mol_type = other DNA
tcctttctgacgggcaatccgttatcccttcgattgccgttcagaactaa

SEQ ID NO: 43502 - DNA, 50 bp, synthetic construct
  source 1..50: mol_type = other DNA
ttatacgaaatatagcaagagttttaatactctatcgccaggctgtataa

SEQ ID NO: 43503 - DNA, 50 bp, synthetic construct
  source 1..50: mol_type = other DNA
taaatcttatagatataattaattctattttaatatttctatagtttcat

SEQ ID NO: 43504 - DNA, 50 bp, synthetic construct
  source 1..50: mol_type = other DNA
ggtttcccagccaatgtttgagaaactatctgaacgggagcggtctttcc

SEQ ID NO: 43505 - DNA, 50 bp, synthetic construct
  source 1..50: mol_type = other DNA
acgccttttggataccgcaaccgttgaaagcagcgagcatgagaaggcgt

SEQ ID NO: 43506 - DNA, 50 bp, synthetic construct
  source 1..50: mol_type = other DNA
gcatgataatcatacaagtgtgatatggaaatatttcaggattacgaaaa

SEQ ID NO: 43507 - DNA, 50 bp, synthetic construct
  source 1..50: mol_type = other DNA
ttcggcattgaagataaacagaaatatttctggtttggcacttacggtag

SEQ ID NO: 43508 - DNA, 50 bp, synthetic construct
  source 1..50: mol_type = other DNA
tggttttgagaaataactgatacggttacagaagttagcaccttgcagca

SEQ ID NO: 43509 - DNA, 50 bp, synthetic construct
  source 1..50: mol_type = other DNA
cctacgcacatccaagggaaaacaattattttccggatacttggcaggcc

SEQ ID NO: 43510 - DNA, 50 bp, synthetic construct
  source 1..50: mol_type = other DNA
tttctatttctttctttttatgaatatacaaacaaaaaaaattattaaat

SEQ ID NO: 43511 - DNA, 50 bp, synthetic construct
  source 1..50: mol_type = other DNA
aaatcttatagatataattaattctttaaattatatgtactaaaagattc

SEQ ID NO: 43512 - DNA, 50 bp, synthetic construct
  source 1..50: mol_type = other DNA
atgactattcatcataattataattttgtttatttatggaagtagattta

SEQ ID NO: 43513 - DNA, 50 bp, synthetic construct
  source 1..50: mol_type = other DNA
ctgaatgactatttatatagtttttatagaagatataatgtacttaaaag

SEQ ID NO: 43514 - DNA, 50 bp, synthetic construct
  source 1..50: mol_type = other DNA
ctcacatcgccgatcgcgcccatcggtcagcaccgccgcggccatgcagc

SEQ ID NO: 43515 - DNA, 50 bp, synthetic construct
  source 1..50: mol_type = other DNA
tataaattaaatttcaaatcagaattacctgatagccaaactgattcatg

SEQ ID NO: 43516 - DNA, 50 bp, synthetic construct
  source 1..50: mol_type = other DNA
tggctaaaggacaccataaaaaattcatttttgctggaacactttacaag

SEQ ID NO: 43517 - DNA, 50 bp, synthetic construct
  source 1..50: mol_type = other DNA
tcaaattgcaatgcaacaaaacatatatgttcttcctttaaacaatattt

SEQ ID NO: 43518 - DNA, 50 bp, synthetic construct
  source 1..50: mol_type = other DNA
tttcccagcgttatgctatgccttatcgtcaggagcaggatttcctgcag

SEQ ID NO: 43519 - DNA, 50 bp, synthetic construct
  source 1..50: mol_type = other DNA
actaacatggtgcagtagtttttatttaatggatacaattttgtgtgagg

SEQ ID NO: 43520 - DNA, 50 bp, synthetic construct
  source 1..50: mol_type = other DNA
atactgcttaatttataatttaattaaaggtattatatacaaattttgat

SEQ ID NO: 43521 - DNA, 50 bp, synthetic construct
  source 1..50: mol_type = other DNA
ctaaaatcacttgataaatgtagcatatttatatcaacaataagtttttt

SEQ ID NO: 43522 - DNA, 50 bp, synthetic construct
  source 1..50: mol_type = other DNA
tttcagcaggtacactgccacattctaacaattttttatacctatctcta

SEQ ID NO: 43523 - DNA, 50 bp, synthetic construct
  source 1..50: mol_type = other DNA
taagatatttccaaatatttatcaattgaagtatatttcataaaaaaaag

SEQ ID NO: 43524 - DNA, 50 bp, synthetic construct
  source 1..50: mol_type = other DNA
ggctgttgttgatgtattccgtataaataactactataatgacaacagcc

SEQ ID NO: 43525 - DNA, 50 bp, synthetic construct
  source 1..50: mol_type = other DNA
aaaacgcctataacccttatcccgcatggttaaagggttttcggcttttg

SEQ ID NO: 43526 - DNA, 50 bp, synthetic construct
  source 1..50: mol_type = other DNA
atattttgatttttatattataaagattatcggtataaaaatcttcagga

SEQ ID NO: 43527 - DNA, 50 bp, synthetic construct
  source 1..50: mol_type = other DNA
ttacatataatggaaataagtgttaaatcactcctttcatcactatacat

SEQ ID NO: 43528 - DNA, 50 bp, synthetic construct
  source 1..50: mol_type = other DNA
agagtcagtgtggattgatattttatcgatcaactatctggatcgttaac

SEQ ID NO: 43529 - DNA, 50 bp, synthetic construct
  source 1..50: mol_type = other DNA
atagacttaattaattctacatttatcaatttcacaataacaaggatatt

SEQ ID NO: 43530 - DNA, 50 bp, synthetic construct
  source 1..50: mol_type = other DNA
tttctcatataaatgaactgcaaaaattatcatcaaatttgagtgaacat

SEQ ID NO: 43531 - DNA, 50 bp, synthetic construct
  source 1..50: mol_type = other DNA
aaagttaatgaagcacctaaaactatttttttaagtctttacttgacttt

SEQ ID NO: 43532 - DNA, 50 bp, synthetic construct
  source 1..50: mol_type = other DNA
aatgggttaaatagagtttatagatttcatcaaactctatatttaacatt

SEQ ID NO: 43533 - DNA, 50 bp, synthetic construct
  source 1..50: mol_type = other DNA
tttttcttagaaaatgttgcaggtatacctccaatattattggaaaacat

SEQ ID NO: 43534 - DNA, 50 bp, synthetic construct
  source 1..50: mol_type = other DNA
ccgtttttagcggagataatggactaagaggctattattatgaaaaaaat

SEQ ID NO: 43535 - DNA, 50 bp, synthetic construct
  source 1..50: mol_type = other DNA
accctattagacaagcagaatacgtctgtattatacatctagacaaggta

SEQ ID NO: 43536 - DNA, 50 bp, synthetic construct
  source 1..50: mol_type = other DNA
ctgtaaatcgcagaactttctctccgagcagaaaagctcgggaggataag

SEQ ID NO: 43537 - DNA, 50 bp, synthetic construct
  source 1..50: mol_type = other DNA
catgaatcagtttggctatcaggtaattctgatttgaaatttaatttata

SEQ ID NO: 43538 - DNA, 50 bp, synthetic construct
  source 1..50: mol_type = other DNA
gtaaaatacgataaaattcctaactcatcaccttttttaacgtctttata

SEQ ID NO: 43539 - DNA, 50 bp, synthetic construct
  source 1..50: mol_type = other DNA
caggaaagcttattatttgcattcatgaatacatttaaaaaatgggagtg

SEQ ID NO: 43540 - DNA, 50 bp, synthetic construct
  source 1..50: mol_type = other DNA
tcagggtcgcctcctgccattctttacagggagggtggaaacaaacctga

SEQ ID NO: 43541 - DNA, 50 bp, synthetic construct
  source 1..50: mol_type = other DNA
tcgacagtaaccactccatcttgaattttattaaatctgtctgaagtgga

SEQ ID NO: 43542 - DNA, 50 bp, synthetic construct
  source 1..50: mol_type = other DNA
aagccaaaagcgagcggcaccctgatcaaattcccgaccaacgagttctt

SEQ ID NO: 43543 - DNA, 50 bp, synthetic construct
  source 1..50: mol_type = other DNA
ttaaaccatttttgatgggagggtgcaagctgtttccgaaaatgatataa

SEQ ID NO: 43544 - DNA, 50 bp, synthetic construct
  source 1..50: mol_type = other DNA
catgaatcaatttggctatcaggtaattctgatttgaaatttaatttata

SEQ ID NO: 43545 - DNA, 50 bp, synthetic construct
  source 1..50: mol_type = other DNA
ctgaaaaagtattttaaataatatattctttcatcagcttacttttgatt

SEQ ID NO: 43546 - DNA, 50 bp, synthetic construct
  source 1..50: mol_type = other DNA
tctttttcagtttcatctttaactatattttcatatgataaggtacgagt

SEQ ID NO: 43547 - DNA, 50 bp, synthetic construct
  source 1..50: mol_type = other DNA
ggtatacatatgagccgacaagatataccctctcgggtcatatacatacg

SEQ ID NO: 43548 - DNA, 50 bp, synthetic construct
  source 1..50: mol_type = other DNA
ttttataacctctgcctccgtaggttcaaaagggtcagtatattttaact

SEQ ID NO: 43549 - DNA, 50 bp, synthetic construct
  source 1..50: mol_type = other DNA
tttcagcgtcttcttcatcaaccactttgcacatgatgcttgtgctacag

SEQ ID NO: 43550 - DNA, 50 bp, synthetic construct
  source 1..50: mol_type = other DNA
atcaggaacatcaacatccattttcttgtatggatcttcatatttttgca

SEQ ID NO: 43551 - DNA, 50 bp, synthetic construct
  source 1..50: mol_type = other DNA
aaagaaagtcctgccaagtatcctgaagacgtgatgatggctctgtctta

SEQ ID NO: 43552 - DNA, 50 bp, synthetic construct
  source 1..50: mol_type = other DNA
cgtcctgcccggcgcggtgcttggcgacgcccgccgcgtcgatcaggccg

SEQ ID NO: 43553 - DNA, 50 bp, synthetic construct
  source 1..50: mol_type = other DNA
gatatagaatgtattgttgaaaaaaacatttcaccaatagctgctatact

SEQ ID NO: 43554 - DNA, 50 bp, synthetic construct
  source 1..50: mol_type = other DNA
aagaataataaatataatgtaatagttaatgcaccatgtttactattata

SEQ ID NO: 43555 - DNA, 50 bp, synthetic construct
  source 1..50: mol_type = other DNA
taattcttgatgaaggaactttagatctaattcaatttcatcaaactcta

SEQ ID NO: 43556 - DNA, 50 bp, synthetic construct
  source 1..50: mol_type = other DNA
tcgaaaaagaactgtatgaagtttatttcttccatagagaggtttttcgt

SEQ ID NO: 43557 - DNA, 50 bp, synthetic construct
  source 1..50: mol_type = other DNA
ctgattttcaaagcttaataactgatgatttattagcctggtaaaatctt

SEQ ID NO: 43558 - DNA, 50 bp, synthetic construct
  source 1..50: mol_type = other DNA
attatatcgtgaaagaacaatatccggtaatgtttcttgccatatacaat

SEQ ID NO: 43559 - DNA, 50 bp, synthetic construct
  source 1..50: mol_type = other DNA
aaatgggattctcattaataaatgttgctacactaaattgaattgcattt

SEQ ID NO: 43560 - DNA, 50 bp, synthetic construct
  source 1..50: mol_type = other DNA
taaattctaatgtcataccacattcactcctgtatgtacatctgaattta

SEQ ID NO: 43561 - DNA, 50 bp, synthetic construct
  source 1..50: mol_type = other DNA
cgccagaaattcttaccaaagctagctggcattggtcgagatcttgagaa

SEQ ID NO: 43562 - DNA, 50 bp, synthetic construct
  source 1..50: mol_type = other DNA
ttaggattttcacattctttgtaaattatcaaaaatgttgtttataaggt

SEQ ID NO: 43563 - DNA, 50 bp, synthetic construct
  source 1..50: mol_type = other DNA
cagaactttcaaaagtatatgtgtaaaaacagtggtttttaaaactactg

SEQ ID NO: 43564 - DNA, 50 bp, synthetic construct
  source 1..50: mol_type = other DNA
ttctccaaatctcataatatcctcctcttagtataaggagaatctgttaa

SEQ ID NO: 43565 - DNA, 50 bp, synthetic construct
  source 1..50: mol_type = other DNA
cataggtcttggtgatcgagcggtcgactccgagcgcatcctgacccagc

SEQ ID NO: 43566 - DNA, 50 bp, synthetic construct
  source 1..50: mol_type = other DNA
cggctcaaaagccgcttaatcatcatgaaggcgaattccagcttgagccg

SEQ ID NO: 43567 - DNA, 50 bp, synthetic construct
  source 1..50: mol_type = other DNA
cgaaaactcgaaagaggcgagggcgcgcccaaaccgctaaaccagtttca

SEQ ID NO: 43568 - DNA, 50 bp, synthetic construct
  source 1..50: mol_type = other DNA
aaatgaccgtctttgtagctttgatgaattgccaacaatcatagctcgct

SEQ ID NO: 43569 - DNA, 50 bp, synthetic construct
  source 1..50: mol_type = other DNA
ggaacaatggattaatatcattatcagtactcgcatcaatccagaatgga

SEQ ID NO: 43570 - DNA, 50 bp, synthetic construct
  source 1..50: mol_type = other DNA
gccagagttcgagcggcgtgtgctggagctgtcgcccaagcgcctgtggc

SEQ ID NO: 43571 - DNA, 50 bp, synthetic construct
  source 1..50: mol_type = other DNA
aggaagatagactacacaaaactaataacttttgtcagatcattcttcct

SEQ ID NO: 43572 - DNA, 50 bp, synthetic construct
  source 1..50: mol_type = other DNA
cgacgaaggctgtggtgagcatgtcgacctgttctcgcccgccgccgccg

SEQ ID NO: 43573 - DNA, 50 bp, synthetic construct
  source 1..50: mol_type = other DNA
gaaaaaaaggaagagaaaacttgatatcaaatatttaggtggttattttt

SEQ ID NO: 43574 - DNA, 50 bp, synthetic construct
  source 1..50: mol_type = other DNA
taaggcgccttaggattttgtatgccccaccaaaaaagttcggacgttca

SEQ ID NO: 43575 - DNA, 50 bp, synthetic construct
  source 1..50: mol_type = other DNA
ttgttagtcatgctaaacagttgattgaggctgttttttagttaatttga

SEQ ID NO: 43576 - DNA, 50 bp, synthetic construct
  source 1..50: mol_type = other DNA
aacaaaagtaacatcaatatgatagattcaatatcaatcttttccacatt

SEQ ID NO: 43577 - DNA, 50 bp, synthetic construct
  source 1..50: mol_type = other DNA
gcgcgccgccacggcgggcaggccgccgtccgccctcccgatgggcgcga

SEQ ID NO: 43578 - DNA, 50 bp, synthetic construct
  source 1..50: mol_type = other DNA
cgaccgcttcctgtcgcaggggctgaagctgctgccccaggaaaaggacg

SEQ ID NO: 43579 - DNA, 50 bp, synthetic construct
  source 1..50: mol_type = other DNA
aaaaaggaggcttaaaaccggtcctttgaccgactccgaactcattctta

SEQ ID NO: 43580 - DNA, 50 bp, synthetic construct
  source 1..50: mol_type = other DNA
ccatttccaaacaaaaaaaagagcaggctctatagttctttatgatactt

SEQ ID NO: 43581 - DNA, 50 bp, synthetic construct
  source 1..50: mol_type = other DNA
ttaaataaagcttcataaattcccttttacatttatcagtaagttttcct

SEQ ID NO: 43582 - DNA, 50 bp, synthetic construct
  source 1..50: mol_type = other DNA
gttcttattttttatatgatattttaaagaatcacataaaaaaatagtta

SEQ ID NO: 43583 - DNA, 50 bp, synthetic construct
  source 1..50: mol_type = other DNA
taatattgcttagaaacacattattagaaagatgtttcataataatttta

SEQ ID NO: 43584 - DNA, 50 bp, synthetic construct
  source 1..50: mol_type = other DNA
tctcttattaactttacaagtggcattcttaaggatgatttaataagatc

SEQ ID NO: 43585 - DNA, 50 bp, synthetic construct
  source 1..50: mol_type = other DNA
gatccacgatgaagtttttcagcaatccttgcgggtcttcttgagtgatc

SEQ ID NO: 43586 - DNA, 50 bp, synthetic construct
  source 1..50: mol_type = other DNA
ctgaacctatatataaacggattcaggaagaattttatatacatagccat

SEQ ID NO: 43587 - DNA, 50 bp, synthetic construct
  source 1..50: mol_type = other DNA
ttgacaaaggtggagataaaacgctggtcttttttcttgccttttttcag

SEQ ID NO: 43588 - DNA, 50 bp, synthetic construct
  source 1..50: mol_type = other DNA
gatatacatatgagccgacaagatataaaaaattgtgtcatataaatacg

SEQ ID NO: 43589 - DNA, 50 bp, synthetic construct
  source 1..50: mol_type = other DNA
tttaatagggaagatatggcattatagctttctatagcttcattattaaa

SEQ ID NO: 43590 - DNA, 50 bp, synthetic construct
  source 1..50: mol_type = other DNA
cgcttttagtgcctttagcaccagtgttggtgttaaagctactatctttt

SEQ ID NO: 43591 - DNA, 50 bp, synthetic construct
  source 1..50: mol_type = other DNA
tggtgttcttcttggattttcaagatgtaaaaaatctaaaaaattatagg

SEQ ID NO: 43592 - DNA, 50 bp, synthetic construct
  source 1..50: mol_type = other DNA
taaatttaataatattgaaagtatcatctagttcaatttcatcaaactct

SEQ ID NO: 43593 - DNA, 50 bp, synthetic construct
  source 1..50: mol_type = other DNA
tttgggaatataatcttgattatgtacttattatatttaaaatatacaca

SEQ ID NO: 43594 - DNA, 50 bp, synthetic construct
  source 1..50: mol_type = other DNA
ggaaatcctattatggctttcggtgacggcaaagccataattgatgaaga

SEQ ID NO: 43595 - DNA, 50 bp, synthetic construct
  source 1..50: mol_type = other DNA
atgctgcatttataaccaatgaccagaaggattgttaatagtaatcaaat

SEQ ID NO: 43596 - DNA, 50 bp, synthetic construct
  source 1..50: mol_type = other DNA
tcctccaaacatctttgaaaacaatggggtgttgtaatatctttagatga

SEQ ID NO: 43597 - DNA, 50 bp, synthetic construct
  source 1..50: mol_type = other DNA
tttcattttataaattgcaagtttcacttccttcaaaataatcccggaca

SEQ ID NO: 43598 - DNA, 50 bp, synthetic construct
  source 1..50: mol_type = other DNA
tcagctacttatgggatatagaaaattttcccgcacccatcggactgtgc

SEQ ID NO: 43599 - DNA, 50 bp, synthetic construct
  source 1..50: mol_type = other DNA
ttgtactgtcttcactttttcttcatcaaagtgcagtgaacacattaatt

SEQ ID NO: 43600 - DNA, 50 bp, synthetic construct
  source 1..50: mol_type = other DNA
aaacataaatacagcaactccacctaaatgagtaaactaatattaaattt

SEQ ID NO: 43601 - DNA, 50 bp, synthetic construct
  source 1..50: mol_type = other DNA
cgctaataatattataaatcgtttggaaatagtccatatgatccgtagca

SEQ ID NO: 43602 - DNA, 50 bp, synthetic construct
  source 1..50: mol_type = other DNA
ttataaaaaaagatctgagctgaactttacaggataatccgtttttggta

SEQ ID NO: 43603 - DNA, 50 bp, synthetic construct
  source 1..50: mol_type = other DNA
taaagtagaatatattattttgaactatcgcagaaatatcaagttattta

SEQ ID NO: 43604 - DNA, 50 bp, synthetic construct
  source 1..50: mol_type = other DNA
tcgtatccgatgaagaaagagatctttcaacttctcttcatatagaaaat

SEQ ID NO: 43605 - DNA, 50 bp, synthetic construct
  source 1..50: mol_type = other DNA
aatctacaactacggaggtgtaattatgtaatcctgatatcctgtataca

SEQ ID NO: 43606 - DNA, 50 bp, synthetic construct
  source 1..50: mol_type = other DNA
aaaagatcgactctatttaacttcacggtttgtagtagatacgagatttt

SEQ ID NO: 43607 - DNA, 50 bp, synthetic construct
  source 1..50: mol_type = other DNA
atgaatcagcacacgggtaagatttgaagattatggaattagatttttat

SEQ ID NO: 43608 - DNA, 50 bp, synthetic construct
  source 1..50: mol_type = other DNA
cttggttcatgccggtgtctccttttctgctgacatgtgcatgggctttg

SEQ ID NO: 43609 - DNA, 50 bp, synthetic construct
  source 1..50: mol_type = other DNA
tgatatgttttaagcttgttctatttatagatagtttagaaggcattgga

SEQ ID NO: 43610 - DNA, 50 bp, synthetic construct
  source 1..50: mol_type = other DNA
ccaggagaacccgggcgataaagcggaaattatccgcaggatttaccggg

SEQ ID NO: 43611 - DNA, 50 bp, synthetic construct
  source 1..50: mol_type = other DNA
ggcggctgagaaaggagcgcaaagccgcttgcagttctttcaatttttgg

SEQ ID NO: 43612 - DNA, 50 bp, synthetic construct
  source 1..50: mol_type = other DNA
gccacgcgcggcgaactcctggaagccggtctcctttcgccgcgcggcgc

SEQ ID NO: 43613 - DNA, 50 bp, synthetic construct
  source 1..50: mol_type = other DNA
gaggtgatgcagacgcttggtatcgagatccgcgatgttctggccaaggc

SEQ ID NO: 43614 - DNA, 50 bp, synthetic construct
  source 1..50: mol_type = other DNA
ctcagctggtagagcgccgcgttgtgatcgccgcgctcatactcgactcc

SEQ ID NO: 43615 - DNA, 50 bp, synthetic construct
  source 1..50: mol_type = other DNA
ggtgccgtcgacgaccttcatcgtcgacgatgtcggtcgtgacgtgcagc

SEQ ID NO: 43616 - DNA, 50 bp, synthetic construct
  source 1..50: mol_type = other DNA
ggctgtgcgtttgtcgcgcaggtggtcacccgcgtcgagcagcgcggacc

SEQ ID NO: 43617 - DNA, 50 bp, synthetic construct
  source 1..50: mol_type = other DNA
gccgtgggcacaggttcgccgctcgcggtggccggacctgcgctcagtgc

SEQ ID NO: 43618 - DNA, 50 bp, synthetic construct
  source 1..50: mol_type = other DNA
tatcagtcactgatattcactaccaattatctgaatatccatgactgccc

SEQ ID NO: 43619 - DNA, 50 bp, synthetic construct
  source 1..50: mol_type = other DNA
ttgatgacctcagttatacattttttgaaaaccactacctaacccataag

SEQ ID NO: 43620 - DNA, 50 bp, synthetic construct
  source 1..50: mol_type = other DNA
ccgacatcatcaccgccaccgcccggtggcggtgacggtgggatttgaac

SEQ ID NO: 43621 - DNA, 50 bp, synthetic construct
  source 1..50: mol_type = other DNA
cggaaccggcttgactaccgtcaccttcggttcggttcaagccggttccg

SEQ ID NO: 43622 - DNA, 50 bp, synthetic construct
  source 1..50: mol_type = other DNA
atcgcgaagatgcgtccgggggacggtgtcgagggccgcgcgctcgcaca

SEQ ID NO: 43623 - DNA, 50 bp, synthetic construct
  source 1..50: mol_type = other DNA
tttgtattcagcaatcttttgctttttagtcaaagctgttttaatatctt

SEQ ID NO: 43624 - DNA, 50 bp, synthetic construct
  source 1..50: mol_type = other DNA
actgggtcgttgaggcatttgagcgcactctggccgtgcagcaggccagg

SEQ ID NO: 43625 - DNA, 50 bp, synthetic construct
  source 1..50: mol_type = other DNA
gtcaggcatcaacagcggattcgcctgtgatgccggcgttgatgatctgg

SEQ ID NO: 43626 - DNA, 50 bp, synthetic construct
  source 1..50: mol_type = other DNA
acacgcctccaagccgcccaggagagctcctcagccgcgtggaggcccgt

SEQ ID NO: 43627 - DNA, 50 bp, synthetic construct
  source 1..50: mol_type = other DNA
aaattaaggctgtatataaaggccttagcattgataatcatatttaattt

SEQ ID NO: 43628 - DNA, 50 bp, synthetic construct
  source 1..50: mol_type = other DNA
cttgttcctctgtagaaacacgagcattcggaagcttaggaaggaagaga

SEQ ID NO: 43629 - DNA, 50 bp, synthetic construct
  source 1..50: mol_type = other DNA
gatgtaccaaaccatccgacctccctgctagatgggtggattgtgccaga

SEQ ID NO: 43630 - DNA, 50 bp, synthetic construct
  source 1..50: mol_type = other DNA
cgcgcgggcggcagtcggagacgtcgacgtcatccccaggcgctcgcgca

SEQ ID NO: 43631 - DNA, 50 bp, synthetic construct
  source 1..50: mol_type = other DNA
ggccgtgacgcttcgtattgggctgctgcacaattgcaggaaaagcaccg

SEQ ID NO: 43632 - DNA, 50 bp, synthetic construct
  source 1..50: mol_type = other DNA
ccccggaggccaccgcgtgcacgtggacgggcccggggcggccgagtcgc

SEQ ID NO: 43633 - DNA, 50 bp, synthetic construct
  source 1..50: mol_type = other DNA
ccgaccaaagctaaggagtgttcaaatttaatctacttattaatggaaaa

SEQ ID NO: 43634 - DNA, 50 bp, synthetic construct
  source 1..50: mol_type = other DNA
cgcctgcccgatgcggggcaggtcctcccctcccccggcccgggcctgcg

SEQ ID NO: 43635 - DNA, 50 bp, synthetic construct
  source 1..50: mol_type = other DNA
cctcggcggtgccgctgatcttggccgtgtcctcatcggcccgaccgatg

SEQ ID NO: 43636 - DNA, 50 bp, synthetic construct
  source 1..50: mol_type = other DNA
ccgccaccgccgaatacgcgatcacgccatcgcgttcggcgtcggggcgc

SEQ ID NO: 43637 - DNA, 50 bp, synthetic construct
  source 1..50: mol_type = other DNA
tcggcatccgacacacgcctgagtgttctcactggtgtgctggtcaccga

SEQ ID NO: 43638 - DNA, 50 bp, synthetic construct
  source 1..50: mol_type = other DNA
ccaggtgtcttcttcgcggtcggcccgctcagcgggccgtagaacagcct

SEQ ID NO: 43639 - DNA, 50 bp, synthetic construct
  source 1..50: mol_type = other DNA
ggtccaggcatggtcggacacaagggaaagtgtgggcaaaatgtgggcac

SEQ ID NO: 43640 - DNA, 50 bp, synthetic construct
  source 1..50: mol_type = other DNA
gcaccgggaccgaggcgagggtcgccagacccgcgcgcgggtctgggggc

SEQ ID NO: 43641 - DNA, 50 bp, synthetic construct
  source 1..50: mol_type = other DNA
gccacccgcgggaactctgccgcctcgtccaggaagaggacgccccgatg

SEQ ID NO: 43642 - DNA, 50 bp, synthetic construct
  source 1..50: mol_type = other DNA
ttggaacaccagccgaagaaggggaacgccttatgaggaaggtggaccga

SEQ ID NO: 43643 - DNA, 50 bp, synthetic construct
  source 1..50: mol_type = other DNA
cgcgctgcgccgcgagtgtcagatggatctcttcgacaaggtgcagaaga

SEQ ID NO: 43644 - DNA, 50 bp, synthetic construct
  source 1..50: mol_type = other DNA
gtagtatggtccgcgctgctcgacgcgcttcgtggagcggcatctactac

SEQ ID NO: 43645 - DNA, 50 bp, synthetic construct
  source 1..50: mol_type = other DNA
gcctgcgttccacgctcagatctttactcgtctgactatgggacgtcggc

SEQ ID NO: 43646 - DNA, 50 bp, synthetic construct
  source 1..50: mol_type = other DNA
gctcgatcccgcccttctgcgcatcatcgcccagaccttcggcgtcgaga

SEQ ID NO: 43647 - DNA, 50 bp, synthetic construct
  source 1..50: mol_type = other DNA
tgatgaccgacgacgaaggcatgagcccccgccatcgtggtcgacggggt

SEQ ID NO: 43648 - DNA, 50 bp, synthetic construct
  source 1..50: mol_type = other DNA
cgatgcgtcgatggttgactgagcggtcgtagttcgccaacttacattcg

SEQ ID NO: 43649 - DNA, 50 bp, synthetic construct
  source 1..50: mol_type = other DNA
gcacccccggtgcggggcgctgaacctacatcgccgcgcaccacggcgac

SEQ ID NO: 43650 - DNA, 50 bp, synthetic construct
  source 1..50: mol_type = other DNA
gtcgtaaaacatcaagcaggaaggagcgatcctggaacgctttcgacgac

SEQ ID NO: 43651 - DNA, 50 bp, synthetic construct
  source 1..50: mol_type = other DNA
cgtgccgtccaccaccttcatcgtcgacgatgtcggtcgtgacgcgcagc

SEQ ID NO: 43652 - DNA, 50 bp, synthetic construct
  source 1..50: mol_type = other DNA
agccggtcaccgattccgtcgtgaagcattcgtgaagggggtgaccccca

SEQ ID NO: 43653 - DNA, 50 bp, synthetic construct
  source 1..50: mol_type = other DNA
gattttagtcttagcatattgtcatttcgccctatgggttgtatcaaatc

SEQ ID NO: 43654 - DNA, 50 bp, synthetic construct
  source 1..50: mol_type = other DNA
cttttttattactgctgccttttcataaaaaggcttatgaatgtttaaag

SEQ ID NO: 43655 - DNA, 50 bp, synthetic construct
  source 1..50: mol_type = other DNA
gccaggtgggggtcgcggccgagcagctcgtgcgtggagcaacggagacg

SEQ ID NO: 43656 - DNA, 50 bp, synthetic construct
  source 1..50: mol_type = other DNA
cggcactgggccgtgaacatccgcaagttcgtcgtgcgggcccatcacct

SEQ ID NO: 43657 - DNA, 50 bp, synthetic construct
  source 1..50: mol_type = other DNA
ctgctggggacggaggcggggaggtacctcgaatcggccgcagccagcag

SEQ ID NO: 43658 - DNA, 50 bp, synthetic construct
  source 1..50: mol_type = other DNA
ttacactggcgcaaacgtgcgatccggtgtctttcctgcgtactcgaata

SEQ ID NO: 43659 - DNA, 50 bp, synthetic construct
  source 1..50: mol_type = other DNA
tgtgaccaagggcgccctgggcgtctctgccggcggcttgcgcggttcaa

SEQ ID NO: 43660 - DNA, 50 bp, synthetic construct
  source 1..50: mol_type = other DNA
cggtggacgttctggaccaccaacgcgctgatggacccgaacggtgggca

SEQ ID NO: 43661 - DNA, 50 bp, synthetic construct
  source 1..50: mol_type = other DNA
acagaaaccttcgatcgtctggtgcgcacgctgcgcgaacgggctgctga

SEQ ID NO: 43662 - DNA, 50 bp, synthetic construct
  source 1..50: mol_type = other DNA
acatcaccccagattatgaggccctcgggcctcggaattcccggcctacg

SEQ ID NO: 43663 - DNA, 50 bp, synthetic construct
  source 1..50: mol_type = other DNA
tggtcagaccatcgtcgtcaggtttggtgctgacgaagggcttcacgcca

SEQ ID NO: 43664 - DNA, 50 bp, synthetic construct
  source 1..50: mol_type = other DNA
cggcgagcgcggcgagcgcgattgcgtaatcgtctagctcgtcctcgttc

SEQ ID NO: 43665 - DNA, 50 bp, synthetic construct
  source 1..50: mol_type = other DNA
tctcgaaggcggaatagagaatgacgaggcgatggtgtccgccttgccgg

SEQ ID NO: 43666 - DNA, 50 bp, synthetic construct
  source 1..50: mol_type = other DNA
tgatcccattataaaaattcatggcgtgatgacgtaggctagttaaatca

SEQ ID NO: 43667 - DNA, 50 bp, synthetic construct
  source 1..50: mol_type = other DNA
aaaccattaaagcgagccctatcagctggcagggtaatcaacgctgaact

SEQ ID NO: 43668 - DNA, 50 bp, synthetic construct
  source 1..50: mol_type = other DNA
cggccgttgatcgtcggatcgctcgcgagcgagccgacgcggatcgggtc

SEQ ID NO: 43669 - DNA, 50 bp, synthetic construct
  source 1..50: mol_type = other DNA
gctgaagtaataagcttaaatagctaattttttaaccttattatcgtagg

SEQ ID NO: 43670 - DNA, 50 bp, synthetic construct
  source 1..50: mol_type = other DNA
ggttgaagcgatatcaaatgcagttggggaaatttgataaagataaaaga

SEQ ID NO: 43671 - DNA, 50 bp, synthetic construct
  source 1..50: mol_type = other DNA
tcccccgccctcgccgcgctgctggggtgttgagcgtagggcgcggccct

SEQ ID NO: 43672 - DNA, 50 bp, synthetic construct
  source 1..50: mol_type = other DNA
taagccataatgataatggggatgactctcccctttgtacagttagatta

SEQ ID NO: 43673 - DNA, 50 bp, synthetic construct
  source 1..50: mol_type = other DNA
tttgactaaaaaccttaaataatatactgctacaaattgttttagtcaac

SEQ ID NO: 43674 - DNA, 50 bp, synthetic construct
  source 1..50: mol_type = other DNA
cccgccggctgctgctgccgcgatccgccgcggcactggccctacagtgg

SEQ ID NO: 43675 - DNA, 50 bp, synthetic construct
  source 1..50: mol_type = other DNA
acaaggggtataagagcatccactatataggcatatattatatatgtttt

SEQ ID NO: 43676 - DNA, 50 bp, synthetic construct
  source 1..50: mol_type = other DNA
gctttgtggtataatagaatacgaattcgtttttgaatatttttagtaat

SEQ ID NO: 43677 - DNA, 50 bp, synthetic construct
  source 1..50: mol_type = other DNA
tactctaatggtaaaaattacaaacatttcttctttatgttattattata

SEQ ID NO: 43678 - DNA, 50 bp, synthetic construct
  source 1..50: mol_type = other DNA
ttggtaccgaagaattagcacatttaaatgtactaacgaattagcacacg

SEQ ID NO: 43679 - DNA, 50 bp, synthetic construct
  source 1..50: mol_type = other DNA
ctggatttgatactgcttttatagaaggctaagaacagcaagaaatgaag

SEQ ID NO: 43680 - DNA, 50 bp, synthetic construct
  source 1..50: mol_type = other DNA
aacagaaataatgattgaaaaaggaggatattttcatgggtataaaggtt

SEQ ID NO: 43681 - DNA, 50 bp, synthetic construct
  source 1..50: mol_type = other DNA
tagagtttgatgaaattgaactagatctaaagttccttcatcaagaatta

SEQ ID NO: 43682 - DNA, 50 bp, synthetic construct
  source 1..50: mol_type = other DNA
taacataaaattattgtttcccgtattaataaatatctaattttctgacc

SEQ ID NO: 43683 - DNA, 50 bp, synthetic construct
  source 1..50: mol_type = other DNA
cgcccttaggagcggtcagatagggaactatctgataactttgaaaggct

SEQ ID NO: 43684 - DNA, 50 bp, synthetic construct
  source 1..50: mol_type = other DNA
acaggaactaaagttctaaagggaagtttccttttctctttatttcctgc

SEQ ID NO: 43685 - DNA, 50 bp, synthetic construct
  source 1..50: mol_type = other DNA
ataaacataataaagcagatagttatacatatctccgttattattttccg

SEQ ID NO: 43686 - DNA, 50 bp, synthetic construct
  source 1..50: mol_type = other DNA
cattttaatcttcatttttatccacaatattgtcaatgagcttgaaaaaa

SEQ ID NO: 43687 - DNA, 50 bp, synthetic construct
  source 1..50: mol_type = other DNA
cgctggatcatatcaacgaacaggatgaaattccgatcaattctccagct

SEQ ID NO: 43688 - DNA, 50 bp, synthetic construct
  source 1..50: mol_type = other DNA
tctttcaaaagtaaaggcggagccgtggctatgatcgtcttttaaaagta

SEQ ID NO: 43689 - DNA, 50 bp, synthetic construct
  source 1..50: mol_type = other DNA
cctcttgtggctcgattgttgttttaccatacccatcgaccctaaagagg

SEQ ID NO: 43690 - DNA, 50 bp, synthetic construct
  source 1..50: mol_type = other DNA
aggatgcagaccagggcttttcacttttgaaaagccgctcggtgttttga

SEQ ID NO: 43691 - DNA, 50 bp, synthetic construct
  source 1..50: mol_type = other DNA
tgttataattattttaaacatttaatgtaataataaatataaaaaaccaa

SEQ ID NO: 43692 - DNA, 50 bp, synthetic construct
  source 1..50: mol_type = other DNA
tccggaaagatatatccatctcgacaaactctgtgacataacttttttcc

SEQ ID NO: 43693 - DNA, 50 bp, synthetic construct
  source 1..50: mol_type = other DNA
gaggtcatctgcacccgtggaccagaaggtgatatggtgctgatgagcat

SEQ ID NO: 43694 - DNA, 50 bp, synthetic construct
  source 1..50: mol_type = other DNA
attaccgttatacccgcaaggcagatttccgtgtcggcgcaagtggtata

SEQ ID NO: 43695 - DNA, 50 bp, synthetic construct
  source 1..50: mol_type = other DNA
gaaatacaagcaaaatagttttggttcctaaatcattttgtttgtacaac

SEQ ID NO: 43696 - DNA, 50 bp, synthetic construct
  source 1..50: mol_type = other DNA
ctttggactagggttcgcatgttgcgcttctttccgatgttagcacaacc

SEQ ID NO: 43697 - DNA, 50 bp, synthetic construct
  source 1..50: mol_type = other DNA
gggaacttcgggttcccgaaagcatttctcttcgggttgcccgggtggct

SEQ ID NO: 43698 - DNA, 50 bp, synthetic construct
  source 1..50: mol_type = other DNA
taagaatgagttcggagtcggtcaaaggaccggttttaagcctccttttt

SEQ ID NO: 43699 - DNA, 50 bp, synthetic construct
  source 1..50: mol_type = other DNA
ttggttttttatatttattattacattaaatgtttaaaataattataaca

SEQ ID NO: 43700 - DNA, 50 bp, synthetic construct
  source 1..50: mol_type = other DNA
attattttcagcttgctttttttattaaaataaagtagtagcaaattaat

SEQ ID NO: 43701 - DNA, 50 bp, synthetic construct
  source 1..50: mol_type = other DNA
gtatgtcgttgaaaggagggaaaaaagttttaatattttataaatttatc

SEQ ID NO: 43702 - DNA, 50 bp, synthetic construct
  source 1..50: mol_type = other DNA
aacttctcagagagctttttacaaccttatgtaaagctttcgctgctgtt

SEQ ID NO: 43703 - DNA, 50 bp, synthetic construct
  source 1..50: mol_type = other DNA
cgaagttgtagcaacaacaggtacaagctgttgtggatgaaaagacttct

SEQ ID NO: 43704 - DNA, 50 bp, synthetic construct
  source 1..50: mol_type = other DNA
taatcatttgttatttgttaaattaatattgaacaaacaaagaggagaag

SEQ ID NO: 43705 - DNA, 50 bp, synthetic construct
  source 1..50: mol_type = other DNA
caacatcaatgctaccctcccctaaacaaaggcggttagcattgatgtag

SEQ ID NO: 43706 - DNA, 50 bp, synthetic construct
  source 1..50: mol_type = other DNA
aatcagcacggaaaacagaaaacctttgtttaatgttttcgtgttacagt

SEQ ID NO: 43707 - DNA, 50 bp, synthetic construct
  source 1..50: mol_type = other DNA
actaatagtttatactatatttagtagagaatatgtttaaaactaaaagc

SEQ ID NO: 43708 - DNA, 50 bp, synthetic construct
  source 1..50: mol_type = other DNA
taagcgacaaagcaagctgatccacagggtgtaacttgcttcaccgctgc

SEQ ID NO: 43709 - DNA, 50 bp, synthetic construct
  source 1..50: mol_type = other DNA
ggtcggcacatgatcatccccgagccggcgccgacgatgatctgccgacc

SEQ ID NO: 43710 - DNA, 50 bp, synthetic construct
  source 1..50: mol_type = other DNA
taatttttctccaaaaatgaaaatttaacttcccctttgaacacaatccg

SEQ ID NO: 43711 - DNA, 50 bp, synthetic construct
  source 1..50: mol_type = other DNA
ataccctcatccgcataagtacctgcaggtgcataagcagatgtcactac

SEQ ID NO: 43712 - DNA, 50 bp, synthetic construct
  source 1..50: mol_type = other DNA
gaaaacaatgatattaatatcattattaacatattacatatatcattttt

SEQ ID NO: 43713 - DNA, 50 bp, synthetic construct
  source 1..50: mol_type = other DNA
ctctttttggtattagttgccgaaatttccacaactaatgacaaaatctc

SEQ ID NO: 43714 - DNA, 50 bp, synthetic construct
  source 1..50: mol_type = other DNA
tccaccccatctgcatcatacttgatcaaaagcacccggtttgccgcggc

SEQ ID NO: 43715 - DNA, 50 bp, synthetic construct
  source 1..50: mol_type = other DNA
catttaaccttttcaagtatctcaagaaagatatcgcaaggaggcactta

SEQ ID NO: 43716 - DNA, 50 bp, synthetic construct
  source 1..50: mol_type = other DNA
agcaggggctcacatcaccgatcgcgccagcgcgccaacggcatcctgca

SEQ ID NO: 43717 - DNA, 50 bp, synthetic construct
  source 1..50: mol_type = other DNA
ggtgtgatgcggattgcgaaacgggctttgatcgcaatcggcaacacgcc

SEQ ID NO: 43718 - DNA, 50 bp, synthetic construct
  source 1..50: mol_type = other DNA
tcatgtcgtgcagtttccataatcgaaattatgcaaaatgtcggggaggg

SEQ ID NO: 43719 - DNA, 50 bp, synthetic construct
  source 1..50: mol_type = other DNA
ttgaaaattaataatataatataatatgatataatagtaagggtttcagg

SEQ ID NO: 43720 - DNA, 50 bp, synthetic construct
  source 1..50: mol_type = other DNA
gaaaagaatgtaggaatatactgcagggacgttcaccgaccgttcttttc

SEQ ID NO: 43721 - DNA, 50 bp, synthetic construct
  source 1..50: mol_type = other DNA
gcagtttcatcaaccgccgcttttccgagtgcgaatcttgtcgttacgga

SEQ ID NO: 43722 - DNA, 50 bp, synthetic construct
  source 1..50: mol_type = other DNA
ggctgcatctatgcgttatctttcacatccgatacacgataatatgagtt

SEQ ID NO: 43723 - DNA, 50 bp, synthetic construct
  source 1..50: mol_type = other DNA
tcatcaacccatgttccaccaagagctgacgcaaaaagccacgctgtctt

SEQ ID NO: 43724 - DNA, 50 bp, synthetic construct
  source 1..50: mol_type = other DNA
gcttcagatcccataaatccaatatcctttataagtaaagaatccgaatc

SEQ ID NO: 43725 - DNA, 50 bp, synthetic construct
  source 1..50: mol_type = other DNA
ctgtggcatatgacctgtcatagcaggcgattttacgtcatatttattat

SEQ ID NO: 43726 - DNA, 50 bp, synthetic construct
  source 1..50: mol_type = other DNA
cataccgtctgcatttattatattataataacaaaatgccggaatgtatg

SEQ ID NO: 43727 - DNA, 50 bp, synthetic construct
  source 1..50: mol_type = other DNA
gccggaatcacctgcacattgtttgcaattgaaggtcagcttcatctcgg

SEQ ID NO: 43728 - DNA, 50 bp, synthetic construct
  source 1..50: mol_type = other DNA
taatttcactttgacaatttagtccacactccgtggggagcgtgacatat

SEQ ID NO: 43729 - DNA, 50 bp, synthetic construct
  source 1..50: mol_type = other DNA
attgcgatgccattttcaatccgatatccgacagaaaagtcggtgcgaaa

SEQ ID NO: 43730 - DNA, 50 bp, synthetic construct
  source 1..50: mol_type = other DNA
gaaagcaaatggaactgctaaactataatttagcataaaaccactccttc

SEQ ID NO: 43731 - DNA, 50 bp, synthetic construct
  source 1..50: mol_type = other DNA
tgaaatctgacttgcggggcagactatcctgccctgctcggcataatcgt

SEQ ID NO: 43732 - DNA, 50 bp, synthetic construct
  source 1..50: mol_type = other DNA
gtgcataggttttatttttataccttgatagagaaaaattgctgatgcag

SEQ ID NO: 43733 - DNA, 50 bp, synthetic construct
  source 1..50: mol_type = other DNA
tcggaacttcccgctgagaaagcaaaagcgtacccttcgggaagttgttg

SEQ ID NO: 43734 - DNA, 50 bp, synthetic construct
  source 1..50: mol_type = other DNA
ataaaccgcaggcgttgaaacctgcgtaggtttcctcaccggcgtcgttc

SEQ ID NO: 43735 - DNA, 50 bp, synthetic construct
  source 1..50: mol_type = other DNA
tccagtcatcgaatcatccaactattagtacttgttccaactattttcaa

SEQ ID NO: 43736 - DNA, 50 bp, synthetic construct
  source 1..50: mol_type = other DNA
aatattatagactccctcgaatttccatttccgtgtgacttccgagccgt

SEQ ID NO: 43737 - DNA, 50 bp, synthetic construct
  source 1..50: mol_type = other DNA
tgtcggtggaaacacgggcgtatccggctacggcttcgttgctcatgacc

SEQ ID NO: 43738 - DNA, 50 bp, synthetic construct
  source 1..50: mol_type = other DNA
aattttacagcgtttccgataaatccattaaccataatctcagtaacctc

SEQ ID NO: 43739 - DNA, 50 bp, synthetic construct
  source 1..50: mol_type = other DNA
cgcaaaattggttttttgttgtccttttttctcgtcaaaccgattcagcg

SEQ ID NO: 43740 - DNA, 50 bp, synthetic construct
  source 1..50: mol_type = other DNA
gtaataactgcaaatatagtgatttaaaaatttgttctttttgttattag

SEQ ID NO: 43741 - DNA, 50 bp, synthetic construct
  source 1..50: mol_type = other DNA
tactgatacacaaccacagcagttacaaatgtacgatttgggtatcattc

SEQ ID NO: 43742 - DNA, 50 bp, synthetic construct
  source 1..50: mol_type = other DNA
tacactgattgaaatgaatgtaactagtatccttgattgaaatgttggtc

SEQ ID NO: 43743 - DNA, 50 bp, synthetic construct
  source 1..50: mol_type = other DNA
gtgtttttaatatttcttttcgatatatttaaaattggtacaaaaataac

SEQ ID NO: 43744 - DNA, 50 bp, synthetic construct
  source 1..50: mol_type = other DNA
tcagctgaccgctttgaagcggcccagccctgctctttccttgtagctcg

SEQ ID NO: 43745 - DNA, 50 bp, synthetic construct
  source 1..50: mol_type = other DNA
ggtttctacgggaatatgtcatacgagtgtgataagatgccgaagaaacc

SEQ ID NO: 43746 - DNA, 50 bp, synthetic construct
  source 1..50: mol_type = other DNA
gagagaaatattacgatacctacatctgtaaacctaacaatatatcttct

SEQ ID NO: 43747 - DNA, 50 bp, synthetic construct
  source 1..50: mol_type = other DNA
tggggacaccgccttccggcacggcaccgaccacgaagaccaggtcacca

SEQ ID NO: 43748 - DNA, 50 bp, synthetic construct
  source 1..50: mol_type = other DNA
catcttgctttctgcaagaaagctgcagctttattttgggcgaaaagctg

SEQ ID NO: 43749 - DNA, 50 bp, synthetic construct
  source 1..50: mol_type = other DNA
tttgtatgaagttttgaaggtatattttgtatttcaaaatggattacaaa

SEQ ID NO: 43750 - DNA, 50 bp, synthetic construct
  source 1..50: mol_type = other DNA
ggtttattttttatactctttttttgcgatgccaatatcaaaaataatat

SEQ ID NO: 43751 - DNA, 50 bp, synthetic construct
  source 1..50: mol_type = other DNA
cctaacatttgttagataccataaaacgatataatctaacaaattccgtc

SEQ ID NO: 43752 - DNA, 50 bp, synthetic construct
  source 1..50: mol_type = other DNA
tccggataccatcataaagggatgggctttgattttacagattatatgga

SEQ ID NO: 43753 - DNA, 50 bp, synthetic construct
  source 1..50: mol_type = other DNA
acactgcaatcagtgacaccactgcctcgtacagtcacttttatatatta

SEQ ID NO: 43754 - DNA, 50 bp, synthetic construct
  source 1..50: mol_type = other DNA
aaatctaagatagaaaaacatctgtcataaactttttccccctttgagtc

SEQ ID NO: 43755 - DNA, 50 bp, synthetic construct
  source 1..50: mol_type = other DNA
tgaattgattgacttgtatcggaacttcacgatacagagcgttctatcaa

SEQ ID NO: 43756 - DNA, 50 bp, synthetic construct
  source 1..50: mol_type = other DNA
atttatctcagcggtataccatgccaggttggcaaaccggatggaattga

SEQ ID NO: 43757 - DNA, 50 bp, synthetic construct
  source 1..50: mol_type = other DNA
aaggtagtaaaacataaaactaattttcaaagtttatattttaatctata

SEQ ID NO: 43758 - DNA, 50 bp, synthetic construct
  source 1..50: mol_type = other DNA
gaggggtgaatattgtatcattttcgaagatgatacaatattcttggctt

SEQ ID NO: 43759 - DNA, 50 bp, synthetic construct
  source 1..50: mol_type = other DNA
ggcatatcgcaatatttacacaagtaccaatgtattattgatacaacaat

SEQ ID NO: 43760 - DNA, 50 bp, synthetic construct
  source 1..50: mol_type = other DNA
ttgattttttcccggatatagctgaaaaaatacaccctatacaggtgcag

SEQ ID NO: 43761 - DNA, 50 bp, synthetic construct
  source 1..50: mol_type = other DNA
tggatcagctggcggcctaattgacaggaatttggcatgaatgcctgcta

SEQ ID NO: 43762 - DNA, 50 bp, synthetic construct
  source 1..50: mol_type = other DNA
ataaatagtggaaaagaaaataaaaattgattgacctttattttgataat

SEQ ID NO: 43763 - DNA, 50 bp, synthetic construct
  source 1..50: mol_type = other DNA
ggaaccgtagactcagatggacagtaccatctctctgagtaagctgatct

SEQ ID NO: 43764 - DNA, 50 bp, synthetic construct
  source 1..50: mol_type = other DNA
acggggactttcgactagttgacatatctgaaatattcgattttcaatgt

SEQ ID NO: 43765 - DNA, 50 bp, synthetic construct
  source 1..50: mol_type = other DNA
agtcggaggttattatatggatgccggcacccactctataatttcagacg

SEQ ID NO: 43766 - DNA, 50 bp, synthetic construct
  source 1..50: mol_type = other DNA
ttttcccacgaaaaaaaaggcatcccttatcgttttttgagtagggataa

SEQ ID NO: 43767 - DNA, 50 bp, synthetic construct
  source 1..50: mol_type = other DNA
taaaaaagagggatatatagtgttgacacgcttaaaattacgcttttttg

SEQ ID NO: 43768 - DNA, 50 bp, synthetic construct
  source 1..50: mol_type = other DNA
ggaagaagtgggcggggaaacctgcgcaggattctctgccgtatttttga

SEQ ID NO: 43769 - DNA, 50 bp, synthetic construct
  source 1..50: mol_type = other DNA
gatctattggttgaccacaatttgggctaattcttcagtaccaatatctg

SEQ ID NO: 43770 - DNA, 50 bp, synthetic construct
  source 1..50: mol_type = other DNA
cgaacgattgacaaggtggattccatattgatgacctgttcaagttttct

SEQ ID NO: 43771 - DNA, 50 bp, synthetic construct
  source 1..50: mol_type = other DNA
cgacctttggtttttcgtttttttaaaataggcaaaaaaggtaaaaaatt

SEQ ID NO: 43772 - DNA, 50 bp, synthetic construct
  source 1..50: mol_type = other DNA
aaaaagagagattatccatattattaaacgtatatctatataaacttttt

SEQ ID NO: 43773 - DNA, 50 bp, synthetic construct
  source 1..50: mol_type = other DNA
ccggactccaccgccacaatgggtgtacctgtctgccccatcatgtcgtg

SEQ ID NO: 43774 - DNA, 50 bp, synthetic construct
  source 1..50: mol_type = other DNA
aagcgataaaaagaaacaagtggtttgataacagaaatatttagccgctg

SEQ ID NO: 43775 - DNA, 50 bp, synthetic construct
  source 1..50: mol_type = other DNA
ctttctgctgctgtataagcgtcttgtttgctataggcttcagcagaaag

SEQ ID NO: 43776 - DNA, 50 bp, synthetic construct
  source 1..50: mol_type = other DNA
aactgagttttgcgaagctgaaaaatgttgtgctacgacaaaccgacttg

SEQ ID NO: 43777 - DNA, 50 bp, synthetic construct
  source 1..50: mol_type = other DNA
ctgggattgcagtttgccgaacagatatattaggcactcattgacatcat

SEQ ID NO: 43778 - DNA, 50 bp, synthetic construct
  source 1..50: mol_type = other DNA
ataagaaaacacgcctgctgagcaattattttatcattctgtttcgttag

SEQ ID NO: 43779 - DNA, 50 bp, synthetic construct
  source 1..50: mol_type = other DNA
taaaatggttgacaaaaaatcaacattttccttttttgtgttagaatttt

SEQ ID NO: 43780 - DNA, 50 bp, synthetic construct
  source 1..50: mol_type = other DNA
tagctcctgaggagatagatatttacctttatgtaattcatcagtagcta

SEQ ID NO: 43781 - DNA, 50 bp, synthetic construct
  source 1..50: mol_type = other DNA
atgtaatagtaccacttggctgtgttgtagtagttcatatactatttgat

SEQ ID NO: 43782 - DNA, 50 bp, synthetic construct
  source 1..50: mol_type = other DNA
tctgcacttgttttcgatttttatacataaaaatgaaaaacttaccagca

SEQ ID NO: 43783 - DNA, 50 bp, synthetic construct
  source 1..50: mol_type = other DNA
ctttcaggttctgggcgatcctgcctgccggaatcgacagaacccaaaag

SEQ ID NO: 43784 - DNA, 50 bp, synthetic construct
  source 1..50: mol_type = other DNA
aagggactacacagagtaggtatctgtaccctttgtctgtgtattccttg

SEQ ID NO: 43785 - DNA, 50 bp, synthetic construct
  source 1..50: mol_type = other DNA
tggatacccacccgcaggatccggatcacactcctatgtaattgtattga

SEQ ID NO: 43786 - DNA, 50 bp, synthetic construct
  source 1..50: mol_type = other DNA
tttttcagtttatgccaaggaaagaaattatctatcaatgagtgcaaaaa

SEQ ID NO: 43787 - DNA, 50 bp, synthetic construct
  source 1..50: mol_type = other DNA
actgacatatccctcaagaacatcagaattatcttgcaggtatgtcgctt

SEQ ID NO: 43788 - DNA, 50 bp, synthetic construct
  source 1..50: mol_type = other DNA
tataaggtgaaaaaaattcaatgtgtggaacgtctcattcaggatttatc

SEQ ID NO: 43789 - DNA, 50 bp, synthetic construct
  source 1..50: mol_type = other DNA
acgctgttgattacattcccttacgccgatcatgatgaagataaggatag

SEQ ID NO: 43790 - DNA, 50 bp, synthetic construct
  source 1..50: mol_type = other DNA
atcatgcgtctttcaccccgcattatcatgcgtctttccggtcgcatacg

SEQ ID NO: 43791 - DNA, 50 bp, synthetic construct
  source 1..50: mol_type = other DNA
gagacgattacctgaaaggacactcacagctccattagtatacccgttgc

SEQ ID NO: 43792 - DNA, 50 bp, synthetic construct
  source 1..50: mol_type = other DNA
aattattatagcataggcccccacaatcaagggttgtaaaatgaatgatc

SEQ ID NO: 43793 - DNA, 50 bp, synthetic construct
  source 1..50: mol_type = other DNA
tcagcggaagacaccgccgaggcaatcgtgacggcggttccgtccgtcgg

SEQ ID NO: 43794 - DNA, 50 bp, synthetic construct
  source 1..50: mol_type = other DNA
agcaatggccagcccgggaacaaaccttccttcatctcagttacaatgct

SEQ ID NO: 43795 - DNA, 50 bp, synthetic construct
  source 1..50: mol_type = other DNA
tgctgactatgaactacttcctaagacttgtaataagtgctctggcaatt

SEQ ID NO: 43796 - DNA, 50 bp, synthetic construct
  source 1..50: mol_type = other DNA
ctaaataacttgataaatgacgaaaaagaggtaaatgtcaagttaaaatt

SEQ ID NO: 43797 - DNA, 50 bp, synthetic construct
  source 1..50: mol_type = other DNA
aaatgaaagaaaaagcaagaattaagttcatcttttgttatttttccttt

SEQ ID NO: 43798 - DNA, 50 bp, synthetic construct
  source 1..50: mol_type = other DNA
atgccccagagcagccagcttgacttggtgtacgcctctgccgacagcac

SEQ ID NO: 43799 - DNA, 50 bp, synthetic construct
  source 1..50: mol_type = other DNA
acgcctccgagccgatgtggttcagaaggcataggcaaactcgcgggcga

SEQ ID NO: 43800 - DNA, 50 bp, synthetic construct
  source 1..50: mol_type = other DNA
gtatatatgtcaagtatgagaaacctccttccggtagtgtctatatatca

SEQ ID NO: 43801 - DNA, 50 bp, synthetic construct
  source 1..50: mol_type = other DNA
cggaggagctttttttcaagtgtttcacgactgaagaaaaagcagctccg

SEQ ID NO: 43802 - DNA, 50 bp, synthetic construct
  source 1..50: mol_type = other DNA
gtagcggatggacggatatctttatttattcagtgccgcccatactacat

SEQ ID NO: 43803 - DNA, 50 bp, synthetic construct
  source 1..50: mol_type = other DNA
cttgaattgattgacttgtatcggaagcaagtaaggattatcatgtcaag

SEQ ID NO: 43804 - DNA, 50 bp, synthetic construct
  source 1..50: mol_type = other DNA
tatttatattctttctttatttcccaggaaattttgaaatcttaataatg

SEQ ID NO: 43805 - DNA, 50 bp, synthetic construct
  source 1..50: mol_type = other DNA
acagcgcggacctcgaaaaagttatgcgattcggtggaggcgggcgggct

SEQ ID NO: 43806 - DNA, 50 bp, synthetic construct
  source 1..50: mol_type = other DNA
acccacctctttctttgttaatttgttaggagaaaaagaaaaggggctgt

SEQ ID NO: 43807 - DNA, 50 bp, synthetic construct
  source 1..50: mol_type = other DNA
cagcttcggcgatgcgatgttcattggagaagatccagaagctgatgctg

SEQ ID NO: 43808 - DNA, 50 bp, synthetic construct
  source 1..50: mol_type = other DNA
tctcatgtcgtgtataatacattcatctgaaaattgtatttgttatgtaa

SEQ ID NO: 43809 - DNA, 50 bp, synthetic construct
  source 1..50: mol_type = other DNA
aacactttctattgcatcaacatctattacatcgggcagtaggtcccgta

SEQ ID NO: 43810 - DNA, 50 bp, synthetic construct
  source 1..50: mol_type = other DNA
agcccacgggtagtgttcaattagtactaacttaacacagcccaccggag

SEQ ID NO: 43811 - DNA, 50 bp, synthetic construct
  source 1..50: mol_type = other DNA
ccgggccaaacatgtcctttgtctttagggaaaaattatacaggggctat

SEQ ID NO: 43812 - DNA, 50 bp, synthetic construct
  source 1..50: mol_type = other DNA
gccaaaaaagaaaagggagggccgtccggctggagcgtgatcaggttctc

SEQ ID NO: 43813 - DNA, 50 bp, synthetic construct
  source 1..50: mol_type = other DNA
gattttatttccaaagaatgtcagattgtatcttcaattatgacgccatc

SEQ ID NO: 43814 - DNA, 50 bp, synthetic construct
  source 1..50: mol_type = other DNA
ctgattatctattttaatgattttataagatttttaaaacttttaagcag

SEQ ID NO: 43815 - DNA, 50 bp, synthetic construct
  source 1..50: mol_type = other DNA
agcccgcccgcctccaccgaatcgcataactttttcgaggtccgcgctgt

SEQ ID NO: 43816 - DNA, 50 bp, synthetic construct
  source 1..50: mol_type = other DNA
aagccaggagtggtatcactatatctatatagattttcgtctatcttttc

SEQ ID NO: 43817 - DNA, 50 bp, synthetic construct
  source 1..50: mol_type = other DNA
aatataagaaatgttggtgcaatccgtggtcgacatacataatacatgac

SEQ ID NO: 43818 - DNA, 50 bp, synthetic construct
  source 1..50: mol_type = other DNA
agtgtgactatgattttacccataaatatggagatcatcctgttcacatt

SEQ ID NO: 43819 - DNA, 50 bp, synthetic construct
  source 1..50: mol_type = other DNA
tttcatcttccctaataaagataagattgttgttgagtcggaagccgaaa

SEQ ID NO: 43820 - DNA, 50 bp, synthetic construct
  source 1..50: mol_type = other DNA
tgcgaaaataagtaatagggaggtaaagactccataaccgaattgtcgta

SEQ ID NO: 43821 - DNA, 50 bp, synthetic construct
  source 1..50: mol_type = other DNA
atagactaccaaaacggaaggaggtatatccatctatttttataatgcag

SEQ ID NO: 43822 - DNA, 50 bp, synthetic construct
  source 1..50: mol_type = other DNA
ccgtgacgtggatgtggaaaagcagaggcatatcatcatcattttcttct

SEQ ID NO: 43823 - DNA, 50 bp, synthetic construct
  source 1..50: mol_type = other DNA
tggctgctgcatggctggcagtgtgcaatccgtcaggatgccagcggggc

SEQ ID NO: 43824 - DNA, 50 bp, synthetic construct
  source 1..50: mol_type = other DNA
atttacattcgaaagatgtttgaaatgtaaagcaagtattggttgtatta

SEQ ID NO: 43825 - DNA, 50 bp, synthetic construct
  source 1..50: mol_type = other DNA
gtatttttttcagtttatgccaaggactgtggaaaaaccgaagttgtatt

SEQ ID NO: 43826 - DNA, 50 bp, synthetic construct
  source 1..50: mol_type = other DNA
acagggaaagatttattatatattcggctccggtccatccgtttttttct

SEQ ID NO: 43827 - DNA, 50 bp, synthetic construct
  source 1..50: mol_type = other DNA
taagaaaaagaaaacaggaggtacaagtacaatctgcgatacctttcacc

SEQ ID NO: 43828 - DNA, 50 bp, synthetic construct
  source 1..50: mol_type = other DNA
tcaatacaatttgaccgaaaaactagcacttcctctctaaatattattga

SEQ ID NO: 43829 - DNA, 50 bp, synthetic construct
  source 1..50: mol_type = other DNA
ataacctttgcggttatttcaggaaattcatgccggaccgcaaagcttaa

SEQ ID NO: 43830 - DNA, 50 bp, synthetic construct
  source 1..50: mol_type = other DNA
gtgtgatctcgacgcaggccgcagagctgacgcggcactattacgaaagg

SEQ ID NO: 43831 - DNA, 50 bp, synthetic construct
  source 1..50: mol_type = other DNA
agaccggaaccccaccattatgaaattatgaaatagtgaggtttagagcg

SEQ ID NO: 43832 - DNA, 50 bp, synthetic construct
  source 1..50: mol_type = other DNA
ttttttgcttttagcttccaatcttttagatgaaagatgtttagaaattt

SEQ ID NO: 43833 - DNA, 50 bp, synthetic construct
  source 1..50: mol_type = other DNA
cacggaaagcatccccccgtttccctttgctgggaaagtagatttccgtg

SEQ ID NO: 43834 - DNA, 50 bp, synthetic construct
  source 1..50: mol_type = other DNA
ctaatcccactaataattcattccactgactgtgctgttcctgattccgc

SEQ ID NO: 43835 - DNA, 50 bp, synthetic construct
  source 1..50: mol_type = other DNA
ctataaagttgccgtagaggaaaagtgcgtagtgcggggctgcttttctg

SEQ ID NO: 43836 - DNA, 50 bp, synthetic construct
  source 1..50: mol_type = other DNA
gccggagcttccgctttgacgaatttcttaattaacgcacgcaatccggg

SEQ ID NO: 43837 - DNA, 50 bp, synthetic construct
  source 1..50: mol_type = other DNA
ccgggtttggggagactccccaacaaaatgcggagtatcatcaaaagaac

SEQ ID NO: 43838 - DNA, 50 bp, synthetic construct
  source 1..50: mol_type = other DNA
ttaatatttgaaatttggtctggatacccatttaaaataaacaccgcaat

SEQ ID NO: 43839 - DNA, 50 bp, synthetic construct
  source 1..50: mol_type = other DNA
tatgtgataagaaaccccctgaaactgacagcatgttttccaagaaagaa

SEQ ID NO: 43840 - DNA, 50 bp, synthetic construct
  source 1..50: mol_type = other DNA
attgcgcggaagattacgggaacgaatatacattaaatcggggcggcacg

SEQ ID NO: 43841 - DNA, 50 bp, synthetic construct
  source 1..50: mol_type = other DNA
tcggagcactggacgaggtagtcagtcgacggcatctgccactgctacgg

SEQ ID NO: 43842 - DNA, 50 bp, synthetic construct
  source 1..50: mol_type = other DNA
tacgcatttgtcgaattctggcaccgttgcctattttctcaaacgacagg

SEQ ID NO: 43843 - DNA, 50 bp, synthetic construct
  source 1..50: mol_type = other DNA
aatattgtaataaaaaaattaaagaataataaccttctttctaaaatttt

SEQ ID NO: 43844 - DNA, 50 bp, synthetic construct
  source 1..50: mol_type = other DNA
atttcggtatctcatacaggaacagctgttcctgattccgcagtcgaaat

SEQ ID NO: 43845 - DNA, 50 bp, synthetic construct
  source 1..50: mol_type = other DNA
cataaagaggattttcactgatgtaatcatcttccgtgatcttcttgtca

SEQ ID NO: 43846 - DNA, 50 bp, synthetic construct
  source 1..50: mol_type = other DNA
tgttttactatcaagatttcccgtcggtcggctcatctgcaagaataaat

SEQ ID NO: 43847 - DNA, 50 bp, synthetic construct
  source 1..50: mol_type = other DNA
gcgctttttaaataaattaaatatagatatttattatatggaatggaggc

SEQ ID NO: 43848 - DNA, 50 bp, synthetic construct
  source 1..50: mol_type = other DNA
tagattcattagaaaaagttgataaatgtccccactttctatcagactat

SEQ ID NO: 43849 - DNA, 50 bp, synthetic construct
  source 1..50: mol_type = other DNA
taaaaatgccgaaaatcaataaacttcttccctccgaaaaggcatttgcc

SEQ ID NO: 43850 - DNA, 50 bp, synthetic construct
  source 1..50: mol_type = other DNA
tctgactttatttaaaacgatattggaagtccgttcagaagaaagacatg

SEQ ID NO: 43851 - DNA, 50 bp, synthetic construct
  source 1..50: mol_type = other DNA
atccatcatatatttcatttgtttccatacaactgaattacatgatatgc

SEQ ID NO: 43852 - DNA, 50 bp, synthetic construct
  source 1..50: mol_type = other DNA
ttggaattacgattaaaaataatcaataccattttctccaataattccaa

SEQ ID NO: 43853 - DNA, 50 bp, synthetic construct
  source 1..50: mol_type = other DNA
tatgatggacaggtcatgcgggataaaggcggcgcgtcctgtcaaggatg

SEQ ID NO: 43854 - DNA, 50 bp, synthetic construct
  source 1..50: mol_type = other DNA
tcagattgatacaattttccttgagaataacgaaaaaatcgtcaataaga

SEQ ID NO: 43855 - DNA, 50 bp, synthetic construct
  source 1..50: mol_type = other DNA
gtgttctcggatgagccgccagatgaatacagacgcttaaggcactcggc

SEQ ID NO: 43856 - DNA, 50 bp, synthetic construct
  source 1..50: mol_type = other DNA
cgccgtatgatatccgcaaaggaggcggtatggattctgcccataccgcc

SEQ ID NO: 43857 - DNA, 50 bp, synthetic construct
  source 1..50: mol_type = other DNA
tacaaccttaaaaattttaaatatattattcaattgattattgaattgta

SEQ ID NO: 43858 - DNA, 50 bp, synthetic construct
  source 1..50: mol_type = other DNA
aaacaaaatatgtattggtgtgctataataacgtaatcgactatcctgcc

SEQ ID NO: 43859 - DNA, 50 bp, synthetic construct
  source 1..50: mol_type = other DNA
atcccatgacggcgtggaattcctgcagtactcaggcagtttcagggcat

SEQ ID NO: 43860 - DNA, 50 bp, synthetic construct
  source 1..50: mol_type = other DNA
tttaaccattgcggcccctcctgtgagtctggacggccgcaaggaggtca

SEQ ID NO: 43861 - DNA, 50 bp, synthetic construct
  source 1..50: mol_type = other DNA
aatagcgccgctattgcttgactaatattgggcaaaataagacttatacc

SEQ ID NO: 43862 - DNA, 50 bp, synthetic construct
  source 1..50: mol_type = other DNA
tatacggcgatgccgaaagaagaataatgtactttcgctcctgcccacgg

SEQ ID NO: 43863 - DNA, 50 bp, synthetic construct
  source 1..50: mol_type = other DNA
tgagcatgaaaaaagcacccaagacttctttcgtcttgcttttctcctct

SEQ ID NO: 43864 - DNA, 50 bp, synthetic construct
  source 1..50: mol_type = other DNA
aataatttcaatatttttcaaagaaaccgtgccaattgactgatgtcctt

SEQ ID NO: 43865 - DNA, 50 bp, synthetic construct
  source 1..50: mol_type = other DNA
tttttttctgctgtccatgggctttgaagaccacgaatagcagaaaacag

SEQ ID NO: 43866 - DNA, 50 bp, synthetic construct
  source 1..50: mol_type = other DNA
gcttttatgctttcagtgtgctgtgagctgtagcaaatgatcataaaaaa

SEQ ID NO: 43867 - DNA, 50 bp, synthetic construct
  source 1..50: mol_type = other DNA
aaatcaaagggttctttttttgtaccactatgctaagatatgcaggattt

SEQ ID NO: 43868 - DNA, 50 bp, synthetic construct
  source 1..50: mol_type = other DNA
atcctttttagattggagatgatatttatcattcagaaatcaaaactgac

SEQ ID NO: 43869 - DNA, 50 bp, synthetic construct
  source 1..50: mol_type = other DNA
taaagcacttttatctgaaaaagtatattggcgtttataaaaatattttt

SEQ ID NO: 43870 - DNA, 50 bp, synthetic construct
  source 1..50: mol_type = other DNA
tataaaagaaaataagctatatcagggataatgaaaaatttacttttaaa

SEQ ID NO: 43871 - DNA, 50 bp, synthetic construct
  source 1..50: mol_type = other DNA
ttacaatcccacacccagttaggaacagataccagagtgtgctaaaatac

SEQ ID NO: 43872 - DNA, 50 bp, synthetic construct
  source 1..50: mol_type = other DNA
taccttgttacacaatatattaattatgtacaatacacgctttttagata

SEQ ID NO: 43873 - DNA, 50 bp, synthetic construct
  source 1..50: mol_type = other DNA
atatctgtaattttaacagttttgtataaaagtgtttaatttacatcaat

SEQ ID NO: 43874 - DNA, 50 bp, synthetic construct
  source 1..50: mol_type = other DNA
agaaacggataatttaagaatatcaatatctttatacattatcagatact

SEQ ID NO: 43875 - DNA, 50 bp, synthetic construct
  source 1..50: mol_type = other DNA
tgtgttgcaaaatcgtgttgggcaagtttttcctcttgccgcttcacggt

SEQ ID NO: 43876 - DNA, 50 bp, synthetic construct
  source 1..50: mol_type = other DNA
tttcgatgaattatgatgaaacctaaacggctcctcttaattgaggggct

SEQ ID NO: 43877 - DNA, 50 bp, synthetic construct
  source 1..50: mol_type = other DNA
tttggtattaaaaatgtcagtctatataagataacatttaacgttgatgg

SEQ ID NO: 43878 - DNA, 50 bp, synthetic construct
  source 1..50: mol_type = other DNA
ttaaaggtatacagttccattaaagcttcaattgagtaatatataattga

SEQ ID NO: 43879 - DNA, 50 bp, synthetic construct
  source 1..50: mol_type = other DNA
ttggttgataaattcaattctggcactgcaagacttaatttgtcaagttt

SEQ ID NO: 43880 - DNA, 50 bp, synthetic construct
  source 1..50: mol_type = other DNA
attttatggtgataattggagcgtctgggaagcctgtaagcgttagaaat

SEQ ID NO: 43881 - DNA, 50 bp, synthetic construct
  source 1..50: mol_type = other DNA
caacacctaaaagctcagcaaactcatttgcgcgatataaactggtcttt

SEQ ID NO: 43882 - DNA, 50 bp, synthetic construct
  source 1..50: mol_type = other DNA
gtcttttttaaagcatcatcaaatctcctttctttcgctttaagtttcat

SEQ ID NO: 43883 - DNA, 50 bp, synthetic construct
  source 1..50: mol_type = other DNA
taattatactataaaagctggaaaaatgaagttactttacgatataataa

SEQ ID NO: 43884 - DNA, 50 bp, synthetic construct
  source 1..50: mol_type = other DNA
attacaatcttatgatggaagatataaaatatcgacataaaaatattaat

SEQ ID NO: 43885 - DNA, 50 bp, synthetic construct
  source 1..50: mol_type = other DNA
ggatggcctgggggatctcggtgaggacatcacggcccccatggacatcc

SEQ ID NO: 43886 - DNA, 50 bp, synthetic construct
  source 1..50: mol_type = other DNA
cctgaccgcttcttccggaaccaaattccctctatagcaagcatttcagg

SEQ ID NO: 43887 - DNA, 50 bp, synthetic construct
  source 1..50: mol_type = other DNA
ataatagaatctacgccgtaatccttggatggatgctagtggcggtagct

SEQ ID NO: 43888 - DNA, 50 bp, synthetic construct
  source 1..50: mol_type = other DNA
gcagcctttcgcaagcagaactcacgttctatcatagagcgaatggatgt

SEQ ID NO: 43889 - DNA, 50 bp, synthetic construct
  source 1..50: mol_type = other DNA
ttgttaaaatcatcataaatcatcaagattggatacgatgaggttagtga

SEQ ID NO: 43890 - DNA, 50 bp, synthetic construct
  source 1..50: mol_type = other DNA
tgtccagacagttgaccttgcctgcgcagaaaaaatccgggcgctgtaca

SEQ ID NO: 43891 - DNA, 50 bp, synthetic construct
  source 1..50: mol_type = other DNA
tcctccagaaggctggcgtttacaaaagtaatgaccattcttttgtaaag

SEQ ID NO: 43892 - DNA, 50 bp, synthetic construct
  source 1..50: mol_type = other DNA
atatgatagcatgaaattctaaaaatgtatagagttttgctttatgctgg

SEQ ID NO: 43893 - DNA, 50 bp, synthetic construct
  source 1..50: mol_type = other DNA
tgcagctccagaccgagagccaaagctttctgctctggagcggtctttcc

SEQ ID NO: 43894 - DNA, 50 bp, synthetic construct
  source 1..50: mol_type = other DNA
gattgatggtcggcggaatgactgtgtgttcatgtcgttcaccttttcta

SEQ ID NO: 43895 - DNA, 50 bp, synthetic construct
  source 1..50: mol_type = other DNA
ctataagtgccggatagagcaaatattcgagaaaaccttcaggtgtatat

SEQ ID NO: 43896 - DNA, 50 bp, synthetic construct
  source 1..50: mol_type = other DNA
gactctccccggattgcgtgcgttaacctttcagcagtccccggatatac

SEQ ID NO: 43897 - DNA, 50 bp, synthetic construct
  source 1..50: mol_type = other DNA
aatctgaataggaactgtccgttccggaacagaatcttccgtgccgatgt

SEQ ID NO: 43898 - DNA, 50 bp, synthetic construct
  source 1..50: mol_type = other DNA
atataatataagaggaaaaacggaaatctcctgttgacgttatattatag

SEQ ID NO: 43899 - DNA, 50 bp, synthetic construct
  source 1..50: mol_type = other DNA
tctgagtcagttgaaacacgagcatatgctattgcttcaattgaagcaac

SEQ ID NO: 43900 - DNA, 50 bp, synthetic construct
  source 1..50: mol_type = other DNA
tcttctactattattttaacatcttttaaatccgaatcaattttagacgt

SEQ ID NO: 43901 - DNA, 50 bp, synthetic construct
  source 1..50: mol_type = other DNA
ttgaccagatttgagatatagttgaacatctatataaacgctctgcagtt

SEQ ID NO: 43902 - DNA, 50 bp, synthetic construct
  source 1..50: mol_type = other DNA
tactactaaattgaacctaccgaccggaggggaggacaattaagaaagac

SEQ ID NO: 43903 - DNA, 50 bp, synthetic construct
  source 1..50: mol_type = other DNA
cttgtccgtgtaagaaagagattgatcagagatgcccttgacgggaaaat

SEQ ID NO: 43904 - DNA, 50 bp, synthetic construct
  source 1..50: mol_type = other DNA
taatttgttgattttattgcatttttaaaaacaacaatattatgcaattt

SEQ ID NO: 43905 - DNA, 50 bp, synthetic construct
  source 1..50: mol_type = other DNA
aaggaaaaaattctggaagcacgaaaaggtgcaaatgagattttttgaaa

SEQ ID NO: 43906 - DNA, 50 bp, synthetic construct
  source 1..50: mol_type = other DNA
tcgtttgcgcacacatggtatgcgcacgtataccatgtgtgtactgattc

SEQ ID NO: 43907 - DNA, 50 bp, synthetic construct
  source 1..50: mol_type = other DNA
aaatataactacatttgttacccttaagaaaagcaatagcaagctgattt

SEQ ID NO: 43908 - DNA, 50 bp, synthetic construct
  source 1..50: mol_type = other DNA
atgacgtcacaggacaggggttcaactgaaaatcttgacatgggcgtcat

SEQ ID NO: 43909 - DNA, 50 bp, synthetic construct
  source 1..50: mol_type = other DNA
ctgacagcatttatcgtctaaatgaccattttagatggaaatagtgtcat

SEQ ID NO: 43910 - DNA, 50 bp, synthetic construct
  source 1..50: mol_type = other DNA
gatgaagtcatatggactgatccaacgttattaaaatatgtgataccatt

SEQ ID NO: 43911 - DNA, 50 bp, synthetic construct
  source 1..50: mol_type = other DNA
tcaacgatgtaaatgactagaaaaaaccaattagtggcttatattttcta

SEQ ID NO: 43912 - DNA, 50 bp, synthetic construct
  source 1..50: mol_type = other DNA
ctcctctgccattctgtgctatcatgaagcagcatgaaccgacatgggaa

SEQ ID NO: 43913 - DNA, 50 bp, synthetic construct
  source 1..50: mol_type = other DNA
tcttccacaacagcttcattggacatgtgtagacagtttggattggaagg

SEQ ID NO: 43914 - DNA, 50 bp, synthetic construct
  source 1..50: mol_type = other DNA
atggataatgaagtcccgaatgtctgtagcctcggatcttcatattcctc

SEQ ID NO: 43915 - DNA, 50 bp, synthetic construct
  source 1..50: mol_type = other DNA
acagatgtcatctggggaaacgtggagaaagtttcccgattgatggcggt

SEQ ID NO: 43916 - DNA, 50 bp, synthetic construct
  source 1..50: mol_type = other DNA
ttcagttttcttctttacaaataatattattattatgaaagaaatattaa

SEQ ID NO: 43917 - DNA, 50 bp, synthetic construct
  source 1..50: mol_type = other DNA
aaaataaaatttttttgaaaaaaattgattttattaaaaaataggtacaa

SEQ ID NO: 43918 - DNA, 50 bp, synthetic construct
  source 1..50: mol_type = other DNA
aaatcaaagtgtccacgccgttctgccttgcggcttcacgcatttcctga

SEQ ID NO: 43919 - DNA, 50 bp, synthetic construct
  source 1..50: mol_type = other DNA
tcaggatttaatgcagttctatcaatagatggaactacattatgtgctaa

SEQ ID NO: 43920 - DNA, 50 bp, synthetic construct
  source 1..50: mol_type = other DNA
ggtggacggcggcatccgctccggcgccggagcgcaggccgaaaggttac

SEQ ID NO: 43921 - DNA, 50 bp, synthetic construct
  source 1..50: mol_type = other DNA
ctggccggctatcgcatggcctttgaattggccaaacggctcaaggctcg

SEQ ID NO: 43922 - DNA, 50 bp, synthetic construct
  source 1..50: mol_type = other DNA
atacaattatagccaacaaatacggcctgcgtcgttgtctggacatcgtt

SEQ ID NO: 43923 - DNA, 50 bp, synthetic construct
  source 1..50: mol_type = other DNA
cggttctgaaatcgttaaacgatggacatcgtttcttgaaaaattctgcg

SEQ ID NO: 43924 - DNA, 50 bp, synthetic construct
  source 1..50: mol_type = other DNA
ctcgtctgccttgctgtcgatggcacagctcaatcagtatacccgaagaa

SEQ ID NO: 43925 - DNA, 50 bp, synthetic construct
  source 1..50: mol_type = other DNA
gatatactggagccatcgccgatgatcgagttagttggccatatgattat

SEQ ID NO: 43926 - DNA, 50 bp, synthetic construct
  source 1..50: mol_type = other DNA
acaatatcccatatttccacagagcataaattgttatggtggtatcttgt

SEQ ID NO: 43927 - DNA, 50 bp, synthetic construct
  source 1..50: mol_type = other DNA
ttcgtatacagaaatggaggattttaaaaaccttctttctggtagcgaaa

SEQ ID NO: 43928 - DNA, 50 bp, synthetic construct
  source 1..50: mol_type = other DNA
atccgcgcgatttcatccttttgctctcaatgcagctctctcgcgcggat

SEQ ID NO: 43929 - DNA, 50 bp, synthetic construct
  source 1..50: mol_type = other DNA
tgggagatgccgatcatatcggcgacagccgatctggaacagatcgtcca

SEQ ID NO: 43930 - DNA, 50 bp, synthetic construct
  source 1..50: mol_type = other DNA
taaaataagccataagtgtaagcctgcttattatcctgtggctctactta

SEQ ID NO: 43931 - DNA, 50 bp, synthetic construct
  source 1..50: mol_type = other DNA
cagcaaaaaatcaacaggcgtttgtatcgacatatgttctcatttttgat

SEQ ID NO: 43932 - DNA, 50 bp, synthetic construct
  source 1..50: mol_type = other DNA
acaggcggaaggtcccttttgagaatttggaaaacggaaatattctggtt

SEQ ID NO: 43933 - DNA, 50 bp, synthetic construct
  source 1..50: mol_type = other DNA
attacatagttggtgttgacagcatattttgtcaatacttttttgtgaaa

SEQ ID NO: 43934 - DNA, 50 bp, synthetic construct
  source 1..50: mol_type = other DNA
tcctcaccgccgtaatggtagtgagggaaaattactcgcgcttcccaaag

SEQ ID NO: 43935 - DNA, 50 bp, synthetic construct
  source 1..50: mol_type = other DNA
tgattttatcttttgcggtagtgatatcactctgaaagccgattatatca

SEQ ID NO: 43936 - DNA, 50 bp, synthetic construct
  source 1..50: mol_type = other DNA
accgcaagacattctacccgtatttgaatacgcatttcatgcctgctgga

SEQ ID NO: 43937 - DNA, 50 bp, synthetic construct
  source 1..50: mol_type = other DNA
tgagcatctgtgaaaaagcaggtgcttcttgacgtacggtgaaatgctag

SEQ ID NO: 43938 - DNA, 50 bp, synthetic construct
  source 1..50: mol_type = other DNA
gggaatgaggggtttcccgaaatgatcgacacgatcgacgcctcattcta

SEQ ID NO: 43939 - DNA, 50 bp, synthetic construct
  source 1..50: mol_type = other DNA
gtaagcgaagcggagtattgggcgcgctaccaaaactgcgctacacccgg

SEQ ID NO: 43940 - DNA, 50 bp, synthetic construct
  source 1..50: mol_type = other DNA
aggtaaagccaacctgacgctcaaacacccgcaccgcattcccttttctt

SEQ ID NO: 43941 - DNA, 50 bp, synthetic construct
  source 1..50: mol_type = other DNA
ccgccgaattaatatagaacttatcattgttttctcctgttcttaagcta

SEQ ID NO: 43942 - DNA, 50 bp, synthetic construct
  source 1..50: mol_type = other DNA
cagggcacggattccgtttccgacatgcaggatacggaatacttaggctc

SEQ ID NO: 43943 - DNA, 50 bp, synthetic construct
  source 1..50: mol_type = other DNA
cggctcaaggataaaagaactgcgtactgacctcctttctcgttgtagtg

SEQ ID NO: 43944 - DNA, 50 bp, synthetic construct
  source 1..50: mol_type = other DNA
gtttgcaacaattgttttcacccgttcgggaaattacaatttttgcaata

SEQ ID NO: 43945 - DNA, 50 bp, synthetic construct
  source 1..50: mol_type = other DNA
cactcaagaacatgacaatggataccgcagactgctcgtattcttctttg

SEQ ID NO: 43946 - DNA, 50 bp, synthetic construct
  source 1..50: mol_type = other DNA
ggcggggctggacagcgtgtatgtggcgccaccttgaatccaggtgagtc

SEQ ID NO: 43947 - DNA, 50 bp, synthetic construct
  source 1..50: mol_type = other DNA
ttttcgcaaatgaaagaatagctgaagagtgtgaattgaatacttcgtct

SEQ ID NO: 43948 - DNA, 50 bp, synthetic construct
  source 1..50: mol_type = other DNA
gattaatcgtgaacggcagatgtttgataatctgcaatacctgcttaagg

SEQ ID NO: 43949 - DNA, 50 bp, synthetic construct
  source 1..50: mol_type = other DNA
ctttaactcggctttttcacaagatttccaatgatctgtccgtttttaag

SEQ ID NO: 43950 - DNA, 50 bp, synthetic construct
  source 1..50: mol_type = other DNA
gatgcggatcttctcgcaaagttccggaacgtgtcgagaatgtcatcgtc

SEQ ID NO: 43951 - DNA, 50 bp, synthetic construct
  source 1..50: mol_type = other DNA
attgatggtcggcggaatgactgtgaccagcgattacgccgaagaataca

SEQ ID NO: 43952 - DNA, 50 bp, synthetic construct
  source 1..50: mol_type = other DNA
cggtttttttctttcggggatgccatgctgatcctttgagattcatgccg

SEQ ID NO: 43953 - DNA, 50 bp, synthetic construct
  source 1..50: mol_type = other DNA
aaacgcaaaaagaaagcggaagctgcatatttttttatttttttctctat

SEQ ID NO: 43954 - DNA, 50 bp, synthetic construct
  source 1..50: mol_type = other DNA
taccacggtaagggaggttttgccattgacagccacaaaattccgtggta

SEQ ID NO: 43955 - DNA, 50 bp, synthetic construct
  source 1..50: mol_type = other DNA
tgtgagtacctttataggttgttgatttgcagcctattaagggctgcaaa

SEQ ID NO: 43956 - DNA, 50 bp, synthetic construct
  source 1..50: mol_type = other DNA
atatcacactccctgcatatgggcaaactgtactgtggagagtgcggctg

SEQ ID NO: 43957 - DNA, 50 bp, synthetic construct
  source 1..50: mol_type = other DNA
attctgagaaaaaccgctggatgtattcttcttgcggaaattcagcaaaa

SEQ ID NO: 43958 - DNA, 50 bp, synthetic construct
  source 1..50: mol_type = other DNA
aaatttgagattttagcgcatagccccaaaaaggcgaaaaaatctatttt

SEQ ID NO: 43959 - DNA, 50 bp, synthetic construct
  source 1..50: mol_type = other DNA
tatcaacaatttaagtagaggtttatactaagccggaaaaactcttgaac

SEQ ID NO: 43960 - DNA, 50 bp, synthetic construct
  source 1..50: mol_type = other DNA
tccgttttggtgttgccagaacggatcgcttcaaaatttttcaaaatgga

SEQ ID NO: 43961 - DNA, 50 bp, synthetic construct
  source 1..50: mol_type = other DNA
tttcttgtctcattttcataacagtaatcttggctaaataaggacagaat

SEQ ID NO: 43962 - DNA, 50 bp, synthetic construct
  source 1..50: mol_type = other DNA
tacattattatcggaaaacgcttgatccagccttacaacccaatcattaa

SEQ ID NO: 43963 - DNA, 50 bp, synthetic construct
  source 1..50: mol_type = other DNA
cccaaatgcaaattggccggcataattatggatgcagctttaaaagtgga

SEQ ID NO: 43964 - DNA, 50 bp, synthetic construct
  source 1..50: mol_type = other DNA
aaaattgccatgccatgcttatcaaactatctatctggcatggcacttgc

SEQ ID NO: 43965 - DNA, 50 bp, synthetic construct
  source 1..50: mol_type = other DNA
aaaaaagaaatgatgatatcggtcttgaccgagcggataggttctttttt

SEQ ID NO: 43966 - DNA, 50 bp, synthetic construct
  source 1..50: mol_type = other DNA
cggctatgtgacgctgcatgtgggccgtcacctacaccgtcacctacacc

SEQ ID NO: 43967 - DNA, 50 bp, synthetic construct
  source 1..50: mol_type = other DNA
atggacggcttccgggttcatgagtacgccaataccgacggcgcgtcccg

SEQ ID NO: 43968 - DNA, 50 bp, synthetic construct
  source 1..50: mol_type = other DNA
attataaattaggacatctcgataattaaagagaagtactagataatatt

SEQ ID NO: 43969 - DNA, 50 bp, synthetic construct
  source 1..50: mol_type = other DNA
catgcctgacaagaaggtcaaggcggaacttgcccatctcgagatggttg

SEQ ID NO: 43970 - DNA, 50 bp, synthetic construct
  source 1..50: mol_type = other DNA
atctgttcatttcttccagaatctctgatttctgggataacctcacattt

SEQ ID NO: 43971 - DNA, 50 bp, synthetic construct
  source 1..50: mol_type = other DNA
gacgcttgtaaaactctacgattcttgaatcccccggttttactgtatag

SEQ ID NO: 43972 - DNA, 50 bp, synthetic construct
  source 1..50: mol_type = other DNA
attttgcacccttataaagcaaaaaagattgctctttatgtgtgccaata

SEQ ID NO: 43973 - DNA, 50 bp, synthetic construct
  source 1..50: mol_type = other DNA
tgcatccttcccgttaaaaacgctaaaaattttgtgctaccccgtatttc

SEQ ID NO: 43974 - DNA, 50 bp, synthetic construct
  source 1..50: mol_type = other DNA
tttcttacttttgtaaggaaatcccatagcctccttacattagtaaggaa

SEQ ID NO: 43975 - DNA, 50 bp, synthetic construct
  source 1..50: mol_type = other DNA
tggaatccgcaatcggtttcgctttgtgacgaaaccgaggttgacgccca

SEQ ID NO: 43976 - DNA, 50 bp, synthetic construct
  source 1..50: mol_type = other DNA
ccagccagtaccacattagtacctgtattatacacgacatgagagaaata

SEQ ID NO: 43977 - DNA, 50 bp, synthetic construct
  source 1..50: mol_type = other DNA
ttgccataaaggagaaattgtgttatatatcaactttatgttttacacaa

SEQ ID NO: 43978 - DNA, 50 bp, synthetic construct
  source 1..50: mol_type = other DNA
tatttaacggtatattgcgctataatgtttcatcatatttgaaagaaaat

SEQ ID NO: 43979 - DNA, 50 bp, synthetic construct
  source 1..50: mol_type = other DNA
gtgagagaaaaatcgctgaacggtgcttcgttcactttctcttctttttt

SEQ ID NO: 43980 - DNA, 50 bp, synthetic construct
  source 1..50: mol_type = other DNA
tgcaatttgcggagctcggcctccgcgcaggccgaaaggttacttgttgc

SEQ ID NO: 43981 - DNA, 50 bp, synthetic construct
  source 1..50: mol_type = other DNA
gagattatttttatcaataaaatttaatatttttgcataaaaaaaatcat

SEQ ID NO: 43982 - DNA, 50 bp, synthetic construct
  source 1..50: mol_type = other DNA
atcgctaaatttacgtacgataccgacaagctctttcgcttatttgcctc

SEQ ID NO: 43983 - DNA, 50 bp, synthetic construct
  source 1..50: mol_type = other DNA
gccagcgggttgtgcttttcccaccggtcgaaaaaggcaacaccggcaca

SEQ ID NO: 43984 - DNA, 50 bp, synthetic construct
  source 1..50: mol_type = other DNA
cggtggtgacggccggatttgaagccagaggactcttagaaagtccagcc

SEQ ID NO: 43985 - DNA, 50 bp, synthetic construct
  source 1..50: mol_type = other DNA
gactctgtaggtaattatcttgatccatcaataaatttactgccaagcct

SEQ ID NO: 43986 - DNA, 50 bp, synthetic construct
  source 1..50: mol_type = other DNA
gagcgtgatgtaatgaagaatataagtcaatcgttcaataatgcaccctg

SEQ ID NO: 43987 - DNA, 50 bp, synthetic construct
  source 1..50: mol_type = other DNA
gatatttcggaaatgaatttaactttcgtttcggccagcacaattacatc

SEQ ID NO: 43988 - DNA, 50 bp, synthetic construct
  source 1..50: mol_type = other DNA
tctggctgttgtcccggaggtatctcctcaccgcctttgctttgagttcg

SEQ ID NO: 43989 - DNA, 50 bp, synthetic construct
  source 1..50: mol_type = other DNA
tgtaaaggaagacaaaagttctaccgagagacgttatctggcattttagt

SEQ ID NO: 43990 - DNA, 50 bp, synthetic construct
  source 1..50: mol_type = other DNA
gcagctttgaattttaaaatcggctttttctttttttgatttgaaagata

SEQ ID NO: 43991 - DNA, 50 bp, synthetic construct
  source 1..50: mol_type = other DNA
ataataagcactaaaatagcagccctcaatagcatttttgcaagtgttat

SEQ ID NO: 43992 - DNA, 50 bp, synthetic construct
  source 1..50: mol_type = other DNA
ttaaactgagtgaaagcataaaaatatagttgttcttcctcataggaagt

SEQ ID NO: 43993 - DNA, 50 bp, synthetic construct
  source 1..50: mol_type = other DNA
tcaacgccgtagatgtgtttgacgtgggttgatgacattgaacgtgttgg

SEQ ID NO: 43994 - DNA, 50 bp, synthetic construct
  source 1..50: mol_type = other DNA
acacccctattttaggcaaaaaaaattgttttgcaagttcttagttttgt

SEQ ID NO: 43995 - DNA, 50 bp, synthetic construct
  source 1..50: mol_type = other DNA
tcgttgaaactctagcataacctgcaatgttaatgttaatgtttttcttt

SEQ ID NO: 43996 - DNA, 50 bp, synthetic construct
  source 1..50: mol_type = other DNA
cacctattattcattgtatcaagactttattgcatcatcaataatagtcc

SEQ ID NO: 43997 - DNA, 50 bp, synthetic construct
  source 1..50: mol_type = other DNA
cccaggagtgtaaatgctcctgggtacttgggagtatgtatatggtccga

SEQ ID NO: 43998 - DNA, 50 bp, synthetic construct
  source 1..50: mol_type = other DNA
gcagacttccagcagaaaattacatatgtatttataatttaataaagtgc

SEQ ID NO: 43999 - DNA, 50 bp, synthetic construct
  source 1..50: mol_type = other DNA
acaataatcccttatgggtttatcataaaaaagtcagtctttgagtgtgt

SEQ ID NO: 44000 - DNA, 50 bp, synthetic construct
  source 1..50: mol_type = other DNA
cttgccattctcgatccggtaaccgaggaacaaggatgtctgagacaaag

SEQ ID NO: 44001 - DNA, 50 bp, synthetic construct
  source 1..50: mol_type = other DNA
aacttaagtataaaggtcaaattacattttttgattttttagtttaagca

SEQ ID NO: 44002 - DNA, 50 bp, synthetic construct
  source 1..50: mol_type = other DNA
ttagaacgattacttccgacaccccttttgcagttcagtaattgttacaa

SEQ ID NO: 44003 - DNA, 50 bp, synthetic construct
  source 1..50: mol_type = other DNA
ttttttgtaaaccattatttggtaatatccaaagagcaatatttcaaaat

SEQ ID NO: 44004 - DNA, 50 bp, synthetic construct
  source 1..50: mol_type = other DNA
aatattttgaatacataaaaaaattaattttaaaatatatttttcatgat

SEQ ID NO: 44005 - DNA, 50 bp, synthetic construct
  source 1..50: mol_type = other DNA
actagggccaactgcccgatgtaatattttatcgagcaaccggtcctata

SEQ ID NO: 44006 - DNA, 50 bp, synthetic construct
  source 1..50: mol_type = other DNA
cagggggacaaggatacctgattccggtatccgttatctggacaagtatt

SEQ ID NO: 44007 - DNA, 50 bp, synthetic construct
  source 1..50: mol_type = other DNA
tatcaacaagaagacggaacaattataaacctctacttaaattgttgata

SEQ ID NO: 44008 - DNA, 50 bp, synthetic construct
  source 1..50: mol_type = other DNA
gcggagcacttctgttcataggggaaatcctccaaggtaaaacttgataa

SEQ ID NO: 44009 - DNA, 50 bp, synthetic construct
  source 1..50: mol_type = other DNA
ctatatgttatgttcgatactaaaattttaaatgtggtaattttattatt

SEQ ID NO: 44010 - DNA, 50 bp, synthetic construct
  source 1..50: mol_type = other DNA
atactgttatcaataatatctgccactgccgtcattgatgattctgctgc

SEQ ID NO: 44011 - DNA, 50 bp, synthetic construct
  source 1..50: mol_type = other DNA
caggcaagcggaatacctgtacagcctaatacagggtcaatatcatactc

SEQ ID NO: 44012 - DNA, 50 bp, synthetic construct
  source 1..50: mol_type = other DNA
aaaagctggttatactgaaagtaaaattgtcttcattaaaaatgactttt

SEQ ID NO: 44013 - DNA, 50 bp, synthetic construct
  source 1..50: mol_type = other DNA
tgtgtttactatggcgaagacgaatgaaggtcttcgccatgatttctgct

SEQ ID NO: 44014 - DNA, 50 bp, synthetic construct
  source 1..50: mol_type = other DNA
tctgtcccagcgttttacaatcccgttggaatcatggacgcgttctcaga

SEQ ID NO: 44015 - DNA, 50 bp, synthetic construct
  source 1..50: mol_type = other DNA
tttagaaacatccttcaagaatacaacaattcttgcaacattagcccatg

SEQ ID NO: 44016 - DNA, 50 bp, synthetic construct
  source 1..50: mol_type = other DNA
gtgccgggaaaaactggtttgagatatttcaaaaaagtttttccggtaaa

SEQ ID NO: 44017 - DNA, 50 bp, synthetic construct
  source 1..50: mol_type = other DNA
gatgatgtgataatccggagcgttttgcaagattatattatcacaaatta

SEQ ID NO: 44018 - DNA, 50 bp, synthetic construct
  source 1..50: mol_type = other DNA
cctctataagtgtataaatcatatccacatcggatagtcgcgcgacattc

SEQ ID NO: 44019 - DNA, 50 bp, synthetic construct
  source 1..50: mol_type = other DNA
aaatacagatttttcagttttggcgattgaattttgaaaagtcttgtgat

SEQ ID NO: 44020 - DNA, 50 bp, synthetic construct
  source 1..50: mol_type = other DNA
acccctcctttaattcgtcaaatgtgcaaatttgttttttcactcggcta

SEQ ID NO: 44021 - DNA, 50 bp, synthetic construct
  source 1..50: mol_type = other DNA
aaccttgccccacaggtcacagaccactcacccttatcaagcaggcgttc

SEQ ID NO: 44022 - DNA, 50 bp, synthetic construct
  source 1..50: mol_type = other DNA
gtttatgcggtgtctgccctgtggatttccaaccaaaaacctttataata

SEQ ID NO: 44023 - DNA, 50 bp, synthetic construct
  source 1..50: mol_type = other DNA
tctgtttcaaattgattttcataattatgcggaaaccggtttttgtcatc

SEQ ID NO: 44024 - DNA, 50 bp, synthetic construct
  source 1..50: mol_type = other DNA
tcgaagccaaccatgagcgcaatgcccaggcgtatcatggagatattggc

SEQ ID NO: 44025 - DNA, 50 bp, synthetic construct
  source 1..50: mol_type = other DNA
gaaaaatggccagaccatcgaggggatcctcatagctgtggccattgacg

SEQ ID NO: 44026 - DNA, 50 bp, synthetic construct
  source 1..50: mol_type = other DNA
gctcaccataatagagcgtattatgcagagctgatgacattatggtataa

SEQ ID NO: 44027 - DNA, 50 bp, synthetic construct
  source 1..50: mol_type = other DNA
aaaatttaaataaaggaggtttattcctgaataccctattaaaaaatttt

SEQ ID NO: 44028 - DNA, 50 bp, synthetic construct
  source 1..50: mol_type = other DNA
gatatatagactacccaaagagaaagtggtattttcggcggagatatatc

SEQ ID NO: 44029 - DNA, 50 bp, synthetic construct
  source 1..50: mol_type = other DNA
gaaaaagaaatagacggacataacgacggttcttcttccatgtctttttt

SEQ ID NO: 44030 - DNA, 50 bp, synthetic construct
  source 1..50: mol_type = other DNA
ctatataaacagaaaaataaatatcgattatttgcttttgatttttatcc

SEQ ID NO: 44031 - DNA, 50 bp, synthetic construct
  source 1..50: mol_type = other DNA
taaaggccggggcttttgctttatcctataagaaaattccgcgccctcct

SEQ ID NO: 44032 - DNA, 50 bp, synthetic construct
  source 1..50: mol_type = other DNA
atcattgccaataaatacggcatatctatggaaaagcgccaaatgccgat

SEQ ID NO: 44033 - DNA, 50 bp, synthetic construct
  source 1..50: mol_type = other DNA
ataaatacattcttcccatctgaaatttcaggtgctgacaatggctcatt

SEQ ID NO: 44034 - DNA, 50 bp, synthetic construct
  source 1..50: mol_type = other DNA
aggtgttaattagttatgtctgccgcggccgatatttatatcccgtgctg

SEQ ID NO: 44035 - DNA, 50 bp, synthetic construct
  source 1..50: mol_type = other DNA
gaataaggtgattgtaaatgtctttaaaattattcacaaaatagaggtta

SEQ ID NO: 44036 - DNA, 50 bp, synthetic construct
  source 1..50: mol_type = other DNA
aatattgcaaaatcatgaaaattatgtttgtcgcaaaagtgtcgtatatg

SEQ ID NO: 44037 - DNA, 50 bp, synthetic construct
  source 1..50: mol_type = other DNA
cacggtattgtttgtcctgcccgatatccccaaggcgaattaaaaacgaa

SEQ ID NO: 44038 - DNA, 50 bp, synthetic construct
  source 1..50: mol_type = other DNA
gctttccattatttttttgttttttccaagtgctcgaacagaaatgtagc

SEQ ID NO: 44039 - DNA, 50 bp, synthetic construct
  source 1..50: mol_type = other DNA
ccatccgcgcccgttttttttatttgtatgttaaaaatgggtacaaaaat

SEQ ID NO: 44040 - DNA, 50 bp, synthetic construct
  source 1..50: mol_type = other DNA
gaatagggtgattgtaaatgtctttaaaattattcacaaaatagaggtta

SEQ ID NO: 44041 - DNA, 50 bp, synthetic construct
  source 1..50: mol_type = other DNA
gatcccgtaaccgtcgaatggcttgcgaggccgtagagcttcaggcggtc

SEQ ID NO: 44042 - DNA, 50 bp, synthetic construct
  source 1..50: mol_type = other DNA
gggtttcggaaagatgtttcagaattctctttccaccctttccggtttcc

SEQ ID NO: 44043 - DNA, 50 bp, synthetic construct
  source 1..50: mol_type = other DNA
ccttactactctcggttgttggacagtgtcacaacgggaagcaagtaagc

SEQ ID NO: 44044 - DNA, 50 bp, synthetic construct
  source 1..50: mol_type = other DNA
tttacagaagtgatagagcctttctgaaattaacctttatgatatgtact

SEQ ID NO: 44045 - DNA, 50 bp, synthetic construct
  source 1..50: mol_type = other DNA
gacttcttcaaatgttcttccgttataacgacaggctcttatctgttcgt

SEQ ID NO: 44046 - DNA, 50 bp, synthetic construct
  source 1..50: mol_type = other DNA
cgttttcgtaaatctattgaagtctttgcttcgattatttttataagctc

SEQ ID NO: 44047 - DNA, 50 bp, synthetic construct
  source 1..50: mol_type = other DNA
caacatcgagggtatgtgtatgaaatttggctcttgcttcctcggcaatg

SEQ ID NO: 44048 - DNA, 50 bp, synthetic construct
  source 1..50: mol_type = other DNA
attacttttggatgaaccatttgcaaccattttctgctttggactatgtt

SEQ ID NO: 44049 - DNA, 50 bp, synthetic construct
  source 1..50: mol_type = other DNA
cttttgtttgactgcataggaggaattctataacgaggttcagcttaaac

SEQ ID NO: 44050 - DNA, 50 bp, synthetic construct
  source 1..50: mol_type = other DNA
ttccgtaatgttattaaagtaatgtacattactttaataacattactgtt

SEQ ID NO: 44051 - DNA, 50 bp, synthetic construct
  source 1..50: mol_type = other DNA
cgtccctgttaggtgatgtcaaattaaattgtcatatcctttcgggcacg

SEQ ID NO: 44052 - DNA, 50 bp, synthetic construct
  source 1..50: mol_type = other DNA
gtatactggaggaaaagaaatccaacactatatatcactctgtttgatac

SEQ ID NO: 44053 - DNA, 50 bp, synthetic construct
  source 1..50: mol_type = other DNA
aaaaaaggcttcgcgctatgttgaatatacagcgtaatgacgccgttttt

SEQ ID NO: 44054 - DNA, 50 bp, synthetic construct
  source 1..50: mol_type = other DNA
agagccgaaaaacgaacgagaaaggaaattctcgtcggatataaggctta

SEQ ID NO: 44055 - DNA, 50 bp, synthetic construct
  source 1..50: mol_type = other DNA
aagaatatacaaacgggagggcgggatcgccatattacaagtatatgctt

SEQ ID NO: 44056 - DNA, 50 bp, synthetic construct
  source 1..50: mol_type = other DNA
ctttttcttactgtcaacaggcttggaagttttggataatcacaaaacat

SEQ ID NO: 44057 - DNA, 50 bp, synthetic construct
  source 1..50: mol_type = other DNA
gccagatgaatcctcatttttgaggaggcaactatgagcaaaccattggc

SEQ ID NO: 44058 - DNA, 50 bp, synthetic construct
  source 1..50: mol_type = other DNA
ttttatggttcattttttggtttcctttttgcgctacattccgcacggtt

SEQ ID NO: 44059 - DNA, 50 bp, synthetic construct
  source 1..50: mol_type = other DNA
tggaatggaaagccaattccgtttgcaaaccggcgagggtttcatttttt

SEQ ID NO: 44060 - DNA, 50 bp, synthetic construct
  source 1..50: mol_type = other DNA
tttgtaacttaaaatcttatatttatagttataattctttaatttgcaat

SEQ ID NO: 44061 - DNA, 50 bp, synthetic construct
  source 1..50: mol_type = other DNA
gcaccgcttataaacgatttatagcccgatatggttcagataaatcgtat

SEQ ID NO: 44062 - DNA, 50 bp, synthetic construct
  source 1..50: mol_type = other DNA
agctccatccgaaaagggcaagaccgagatggacgaggtcgtgcagagca

SEQ ID NO: 44063 - DNA, 50 bp, synthetic construct
  source 1..50: mol_type = other DNA
aaactttctccccatatttagcggagaatgtaaagatggggatgcagttc

SEQ ID NO: 44064 - DNA, 50 bp, synthetic construct
  source 1..50: mol_type = other DNA
agaaaagcgaaaagataaacatacaaaatagttgtcgtttcgaagttcgc

SEQ ID NO: 44065 - DNA, 50 bp, synthetic construct
  source 1..50: mol_type = other DNA
atgtagtatgggcggcactgaataaataaagatatccgtccatccgctgc

SEQ ID NO: 44066 - DNA, 50 bp, synthetic construct
  source 1..50: mol_type = other DNA
aacgcctatcatttttctataaaaaaaatagataaaaaaagaccggacat

SEQ ID NO: 44067 - DNA, 50 bp, synthetic construct
  source 1..50: mol_type = other DNA
ttatctatgaaaaggaaagccccagctctacttagccttaataaacataa

SEQ ID NO: 44068 - DNA, 50 bp, synthetic construct
  source 1..50: mol_type = other DNA
cgtacagaatctctacattctgcgatcgcaaaaagtgcgaattttgtatc

SEQ ID NO: 44069 - DNA, 50 bp, synthetic construct
  source 1..50: mol_type = other DNA
tcggtcacagcacaaccgtcaactatgattgcctcttctgtgttgacctc

SEQ ID NO: 44070 - DNA, 50 bp, synthetic construct
  source 1..50: mol_type = other DNA
atgttaacgaaaaaatataccaatttattggtatatttttttgttgccag

SEQ ID NO: 44071 - DNA, 50 bp, synthetic construct
  source 1..50: mol_type = other DNA
gttttggtttaatgagtacaaagataaattttattaaattaattgaaatt

SEQ ID NO: 44072 - DNA, 50 bp, synthetic construct
  source 1..50: mol_type = other DNA
agggaacattggtgaagcggtcggtgaagaccgctacaccgccattcggg

SEQ ID NO: 44073 - DNA, 50 bp, synthetic construct
  source 1..50: mol_type = other DNA
catttggtctgcaaaagcacaatgggctgtgtgcccttgtcaagcgatgt

SEQ ID NO: 44074 - DNA, 50 bp, synthetic construct
  source 1..50: mol_type = other DNA
ctgcgtgcttgggtatctcttgtgtacacaagcaatacccctgcgtgctg

SEQ ID NO: 44075 - DNA, 50 bp, synthetic construct
  source 1..50: mol_type = other DNA
cagcagatgggcgtggtggactgagctcggagtatgtggctgctctgctg

SEQ ID NO: 44076 - DNA, 50 bp, synthetic construct
  source 1..50: mol_type = other DNA
tattctcgttttgccttgtgaaaaccattcttgaaaacaaaacgagaaaa

SEQ ID NO: 44077 - DNA, 50 bp, synthetic construct
  source 1..50: mol_type = other DNA
ttcaataaaaaacttgacgaaaaatatttacaattcttttttctaaaaaa

SEQ ID NO: 44078 - DNA, 50 bp, synthetic construct
  source 1..50: mol_type = other DNA
caatacccatcagtagtattttgcttacagaatatgactgtggaatagct

SEQ ID NO: 44079 - DNA, 50 bp, synthetic construct
  source 1..50: mol_type = other DNA
aaaagctgattcggaagatttatttagaagcctgttggaaatgaaatatt

SEQ ID NO: 44080 - DNA, 50 bp, synthetic construct
  source 1..50: mol_type = other DNA
tataactaattcttgccataaaggagtatatgcctcaagaaaagattata

SEQ ID NO: 44081 - DNA, 50 bp, synthetic construct
  source 1..50: mol_type = other DNA
aggctgcggcggattgataaaggcatgctttttgcaatttcttgcatatg

SEQ ID NO: 44082 - DNA, 50 bp, synthetic construct
  source 1..50: mol_type = other DNA
ttttttcagtgagaatgtaattccaccgaactggtaaaatacaaaaaaaa

SEQ ID NO: 44083 - DNA, 50 bp, synthetic construct
  source 1..50: mol_type = other DNA
ccataattgatacaaatatgaaagaattgaaatattttgatttattatta

SEQ ID NO: 44084 - DNA, 50 bp, synthetic construct
  source 1..50: mol_type = other DNA
ggctttccatgctcaatgccttaaagttgtttttccggtatgggatttcc

SEQ ID NO: 44085 - DNA, 50 bp, synthetic construct
  source 1..50: mol_type = other DNA
atgcaaaacggcacattcagaggaagcggtttgagtgcttttttatttgc

SEQ ID NO: 44086 - DNA, 50 bp, synthetic construct
  source 1..50: mol_type = other DNA
tttatagtagaaaaatcatttttaaatattactgctattgttactatcaa

SEQ ID NO: 44087 - DNA, 50 bp, synthetic construct
  source 1..50: mol_type = other DNA
gcaaagactctagattgccagcttttaagctgctaaagcgtattcttgtt

SEQ ID NO: 44088 - DNA, 50 bp, synthetic construct
  source 1..50: mol_type = other DNA
tcgactagtttagaagcggctattttattatttgcgtcattccaagtcca

SEQ ID NO: 44089 - DNA, 50 bp, synthetic construct
  source 1..50: mol_type = other DNA
tccttgtaagagccgtccgcaatagctattggggatttgaaccccagacc

SEQ ID NO: 44090 - DNA, 50 bp, synthetic construct
  source 1..50: mol_type = other DNA
tttacagaagtgatagagtctttctgaaattaacctttatgatatgtact

SEQ ID NO: 44091 - DNA, 50 bp, synthetic construct
  source 1..50: mol_type = other DNA
ggtatagatgcgcgcgccggactgcggagactggcagatgtatctatgct

SEQ ID NO: 44092 - DNA, 50 bp, synthetic construct
  source 1..50: mol_type = other DNA
gtacggtgaattgcatttcctgatgaattcacgcttgcagtccaccaaaa

SEQ ID NO: 44093 - DNA, 50 bp, synthetic construct
  source 1..50: mol_type = other DNA
gtaaagaaagagccgcccaaaggcgggccttccggccctttataattcgg

SEQ ID NO: 44094 - DNA, 50 bp, synthetic construct
  source 1..50: mol_type = other DNA
ggccagtgacgccctcgcttccctgcaggtggcggcatacgcccgagtgt

SEQ ID NO: 44095 - DNA, 50 bp, synthetic construct
  source 1..50: mol_type = other DNA
tgtttccgcgcctgccatgtgcgccggcgctctttcacaaataaaaagct

SEQ ID NO: 44096 - DNA, 50 bp, synthetic construct
  source 1..50: mol_type = other DNA
atattatagcacgtatcacacgtattgaatgatgctttctgctataatgt

SEQ ID NO: 44097 - DNA, 50 bp, synthetic construct
  source 1..50: mol_type = other DNA
tcgctttttagtgttggttccagatatgggggatcaacatacaaaagaac

SEQ ID NO: 44098 - DNA, 50 bp, synthetic construct
  source 1..50: mol_type = other DNA
tgcagattttgaaaaaatatattccggtttatatttatattatcacttct

SEQ ID NO: 44099 - DNA, 50 bp, synthetic construct
  source 1..50: mol_type = other DNA
aaatgtgaggttatcccagaaatcaggaatacatggaaactgtcggcttt

SEQ ID NO: 44100 - DNA, 50 bp, synthetic construct
  source 1..50: mol_type = other DNA
cagcagggttcgacctcactcatcttcttgtttccattccaatcgtgctg

SEQ ID NO: 44101 - DNA, 50 bp, synthetic construct
  source 1..50: mol_type = other DNA
agaagatatgaaggaatagtaagacagttttagtttattacactggacat

SEQ ID NO: 44102 - DNA, 50 bp, synthetic construct
  source 1..50: mol_type = other DNA
ccccgacaagaggtttgacagcacgcctgcttctcgggttcttgtccgga

SEQ ID NO: 44103 - DNA, 50 bp, synthetic construct
  source 1..50: mol_type = other DNA
aaccaatattatgcaccgatatacatgtgaaaggcttgtgattattggct

SEQ ID NO: 44104 - DNA, 50 bp, synthetic construct
  source 1..50: mol_type = other DNA
cttatgcttagttgccattccgcctcggcggtcataaaatcatttatcga

SEQ ID NO: 44105 - DNA, 50 bp, synthetic construct
  source 1..50: mol_type = other DNA
tgaggaactctttgacgacacgagtgtcgatggcgtcacggagctcgtca

SEQ ID NO: 44106 - DNA, 50 bp, synthetic construct
  source 1..50: mol_type = other DNA
cgacctgcagggggagcagaagacgactcttgatgtggtgttgggggttg

SEQ ID NO: 44107 - DNA, 50 bp, synthetic construct
  source 1..50: mol_type = other DNA
ttctttgaaagggcttatttttatactggcgtgcaggctcttccaacgga

SEQ ID NO: 44108 - DNA, 50 bp, synthetic construct
  source 1..50: mol_type = other DNA
cataggtaaatttagtacttttaaattttctagtaatattataaactatc

SEQ ID NO: 44109 - DNA, 50 bp, synthetic construct
  source 1..50: mol_type = other DNA
aatagattgttttaatagtttaaaaataaaatctcgagtaggtagtcgta

SEQ ID NO: 44110 - DNA, 50 bp, synthetic construct
  source 1..50: mol_type = other DNA
acattcgattttcgagtgtcctttataggtatattcggaagtcaaaattt

SEQ ID NO: 44111 - DNA, 50 bp, synthetic construct
  source 1..50: mol_type = other DNA
tgtgatacaatcacaaccttagacaagtttcaggttcttatctccaccca

SEQ ID NO: 44112 - DNA, 50 bp, synthetic construct
  source 1..50: mol_type = other DNA
cggagctgctttttcttcagtcgtgaaacacttgaaaaaaagctcctccg

SEQ ID NO: 44113 - DNA, 50 bp, synthetic construct
  source 1..50: mol_type = other DNA
atataatataacatgagctacgatatattatcgctctgtagttggtagct

SEQ ID NO: 44114 - DNA, 50 bp, synthetic construct
  source 1..50: mol_type = other DNA
acaaaattttttaatctaaatgaaattatgttataattaaaaaaatggag

SEQ ID NO: 44115 - DNA, 50 bp, synthetic construct
  source 1..50: mol_type = other DNA
caaaaggaaatgagaacccaatataatccatcggctcttttttgctttat

SEQ ID NO: 44116 - DNA, 50 bp, synthetic construct
  source 1..50: mol_type = other DNA
ggaacttcgccctcgttctttttcattgctctaaatcagcgcgaagtcaa

SEQ ID NO: 44117 - DNA, 50 bp, synthetic construct
  source 1..50: mol_type = other DNA
aaaggcgtaaaaatcctatttgtagatagggctattatctttaaaccttc

SEQ ID NO: 44118 - DNA, 50 bp, synthetic construct
  source 1..50: mol_type = other DNA
ttaacggataatttcagcttttaagttatactattatagtaatcagttct

SEQ ID NO: 44119 - DNA, 50 bp, synthetic construct
  source 1..50: mol_type = other DNA
ttgatgtaagcgaaattgaaaagcaacattttcaatcaaaatatagtcaa

SEQ ID NO: 44120 - DNA, 50 bp, synthetic construct
  source 1..50: mol_type = other DNA
tattcaagagagttttgccatgcaatatatcaacataatataggactata

SEQ ID NO: 44121 - DNA, 50 bp, synthetic construct
  source 1..50: mol_type = other DNA
ccttgccttgtgcagggctttttactgaaaagcaactgcacagatgattt

SEQ ID NO: 44122 - DNA, 50 bp, synthetic construct
  source 1..50: mol_type = other DNA
ggatgaaaaaaataaaaaataatttaatttttttactatacctattatct

SEQ ID NO: 44123 - DNA, 50 bp, synthetic construct
  source 1..50: mol_type = other DNA
aagaacattggcgacacgcgccatcgatgtggcggataaccaatctgagc

SEQ ID NO: 44124 - DNA, 50 bp, synthetic construct
  source 1..50: mol_type = other DNA
aaaactatctggaaaacagacgtgattttggcgtttttccataggttttt

SEQ ID NO: 44125 - DNA, 50 bp, synthetic construct
  source 1..50: mol_type = other DNA
atagccgaaaaatacggcatatcttcgaatacataagacgtttcggctat

SEQ ID NO: 44126 - DNA, 50 bp, synthetic construct
  source 1..50: mol_type = other DNA
cacgacttcgagctcaacagtcaaggaggagttacgggaggcgtctcggg

SEQ ID NO: 44127 - DNA, 50 bp, synthetic construct
  source 1..50: mol_type = other DNA
cagcgcgggaagaagcatcccggcgaattatgactttacttccaattcta

SEQ ID NO: 44128 - DNA, 50 bp, synthetic construct
  source 1..50: mol_type = other DNA
ttttaacatttcctgctcggcatcctcgaatggatcaggaaatgttaaat

SEQ ID NO: 44129 - DNA, 50 bp, synthetic construct
  source 1..50: mol_type = other DNA
acataaaaatctccaagtgaaagaagtcggtttttcttcgatattttgtg

SEQ ID NO: 44130 - DNA, 50 bp, synthetic construct
  source 1..50: mol_type = other DNA
ggcaaagttttctttggagtaaaatatgttatgtcacagaaaaacaaagc

SEQ ID NO: 44131 - DNA, 50 bp, synthetic construct
  source 1..50: mol_type = other DNA
ctgctttctataaccagaacactcataactgtttattttattataccgta

SEQ ID NO: 44132 - DNA, 50 bp, synthetic construct
  source 1..50: mol_type = other DNA
cccagttcgattctgggtgtcgcctccgcgacttaaagagaaaatcagga

SEQ ID NO: 44133 - DNA, 50 bp, synthetic construct
  source 1..50: mol_type = other DNA
gtatggatacggatcaaaatggcaattccggctaccatcagccgttatac

SEQ ID NO: 44134 - DNA, 50 bp, synthetic construct
  source 1..50: mol_type = other DNA
ccaggcattgattttatcatgaatgtatttttgatgaagaaaatcagggt

SEQ ID NO: 44135 - DNA, 50 bp, synthetic construct
  source 1..50: mol_type = other DNA
ctaccccgtagaagaccagattaaagagtagctggttatgcccgggtttc

SEQ ID NO: 44136 - DNA, 50 bp, synthetic construct
  source 1..50: mol_type = other DNA
cccaatagcccagaaaatatacctttcgtgttgttttctagcctatgata

SEQ ID NO: 44137 - DNA, 50 bp, synthetic construct
  source 1..50: mol_type = other DNA
gtaaccagataaatatttgtttgcacgctgatcctctttcttctcttctt

SEQ ID NO: 44138 - DNA, 50 bp, synthetic construct
  source 1..50: mol_type = other DNA
aatgtaatccacctgtcagatatcatgtgaattcacaaataaatgaatta

SEQ ID NO: 44139 - DNA, 50 bp, synthetic construct
  source 1..50: mol_type = other DNA
atatagaaaaatgtgaattcaagaatttggatacattattttttaaatat

SEQ ID NO: 44140 - DNA, 50 bp, synthetic construct
  source 1..50: mol_type = other DNA
aatatccacgagagctgattgttgcatcgcagggaggaaatctgatagaa

SEQ ID NO: 44141 - DNA, 50 bp, synthetic construct
  source 1..50: mol_type = other DNA
ctgataatttcaacgtgtgcaagttcctctgtgccaatgtctgttagtaa

SEQ ID NO: 44142 - DNA, 50 bp, synthetic construct
  source 1..50: mol_type = other DNA
gaagttttgcttcaggacgtgcaaacttgacgctgctgttataaaacttg

SEQ ID NO: 44143 - DNA, 50 bp, synthetic construct
  source 1..50: mol_type = other DNA
ggacaaggatacctgattccgttatcattaatgatgaggtttccgtcttc

SEQ ID NO: 44144 - DNA, 50 bp, synthetic construct
  source 1..50: mol_type = other DNA
acggccggttcgaatatgacggagaaacggcgcatagatttcctgcacgt

SEQ ID NO: 44145 - DNA, 50 bp, synthetic construct
  source 1..50: mol_type = other DNA
aatgttccgggggctttttccagcgcgctaccaaaactgcgctacacccg

SEQ ID NO: 44146 - DNA, 50 bp, synthetic construct
  source 1..50: mol_type = other DNA
cagatgctgtgagaatttttttcatgtgaaaagggacagccgtgcttcct

SEQ ID NO: 44147 - DNA, 50 bp, synthetic construct
  source 1..50: mol_type = other DNA
gccacatgcagccgctcagattggttatcctcaaagaagccgcccgtgct

SEQ ID NO: 44148 - DNA, 50 bp, synthetic construct
  source 1..50: mol_type = other DNA
ctgtcagccgatacgaattgataatcagctatcctgccatgggcttcata

SEQ ID NO: 44149 - DNA, 50 bp, synthetic construct
  source 1..50: mol_type = other DNA
acgccataattgatacaatgcagcgatacgcattgtatcaaaactggtgt

SEQ ID NO: 44150 - DNA, 50 bp, synthetic construct
  source 1..50: mol_type = other DNA
aggtgtgcctttcgttaaaaggtgcaccccttggctcaaaatgcacaccc

SEQ ID NO: 44151 - DNA, 50 bp, synthetic construct
  source 1..50: mol_type = other DNA
aaaaaagaaaatattggaaaaaagtattctttaataaataattcctcgtt

SEQ ID NO: 44152 - DNA, 50 bp, synthetic construct
  source 1..50: mol_type = other DNA
attttattcaattttattaaaattataatttcataaataatcaattaaaa

SEQ ID NO: 44153 - DNA, 50 bp, synthetic construct
  source 1..50: mol_type = other DNA
gtccttttcatggaccggagaaaactccttctatggtgaatggaggcttt

SEQ ID NO: 44154 - DNA, 50 bp, synthetic construct
  source 1..50: mol_type = other DNA
ccatgcttcttaagctccgtctgcgctctacttagccttaataaacataa

SEQ ID NO: 44155 - DNA, 50 bp, synthetic construct
  source 1..50: mol_type = other DNA
ctataagggcatgctgcatcagccgtgcataatatgttataatattatat

SEQ ID NO: 44156 - DNA, 50 bp, synthetic construct
  source 1..50: mol_type = other DNA
gaaaagcattgtaacaaaacttgttaactccttttaattttttgtctttc

SEQ ID NO: 44157 - DNA, 50 bp, synthetic construct
  source 1..50: mol_type = other DNA
ttcgcagaaagccttttttgcacagctttataccctcctgtttgcttgta

SEQ ID NO: 44158 - DNA, 50 bp, synthetic construct
  source 1..50: mol_type = other DNA
gaaaaaatgtataaatttttaaaataattaagccatttaaacatttttta

SEQ ID NO: 44159 - DNA, 50 bp, synthetic construct
  source 1..50: mol_type = other DNA
tgtggtcggaagaccgtagcagctatcgctgcctgggtctcagctccggc

SEQ ID NO: 44160 - DNA, 50 bp, synthetic construct
  source 1..50: mol_type = other DNA
ggtaaaaatggcacaaaaaagacccgaatctttcgagtgccaccttcaca

SEQ ID NO: 44161 - DNA, 50 bp, synthetic construct
  source 1..50: mol_type = other DNA
cagcacgattggaatggaaacaagaagatgagtgaggtcgaaccctgctg

SEQ ID NO: 44162 - DNA, 50 bp, synthetic construct
  source 1..50: mol_type = other DNA
caattttacaaaagaatcccgttaaaataattgattcttccgtaatttta

SEQ ID NO: 44163 - DNA, 50 bp, synthetic construct
  source 1..50: mol_type = other DNA
cattcataagggaacctctcattagctaccgagtcatgtgggaatgaagg

SEQ ID NO: 44164 - DNA, 50 bp, synthetic construct
  source 1..50: mol_type = other DNA
cgaaaaatgctttggatcagtaaattcaaacctatcatatacccgttttt

SEQ ID NO: 44165 - DNA, 50 bp, synthetic construct
  source 1..50: mol_type = other DNA
ggattcaaatacgtaatcggattctgaaatgaaatgcagtaggaattttc

SEQ ID NO: 44166 - DNA, 50 bp, synthetic construct
  source 1..50: mol_type = other DNA
cacaaccgtcaactattttgtacccatcaacgataattttgatttagaaa

SEQ ID NO: 44167 - DNA, 50 bp, synthetic construct
  source 1..50: mol_type = other DNA
acagcgcatctttttctggggtataatggcagaagaacaaaattaaacta

SEQ ID NO: 44168 - DNA, 50 bp, synthetic construct
  source 1..50: mol_type = other DNA
atcccctatgtgtctggttcgccttaagttacaaaattagcatagcgtcc

SEQ ID NO: 44169 - DNA, 50 bp, synthetic construct
  source 1..50: mol_type = other DNA
cacctggaaagcctgagtgtgtagccacatccacactgtgcttgaaggtg

SEQ ID NO: 44170 - DNA, 50 bp, synthetic construct
  source 1..50: mol_type = other DNA
cttgtcaggttttgatattttcctgacactgcatatagagacctttcaaa

SEQ ID NO: 44171 - DNA, 50 bp, synthetic construct
  source 1..50: mol_type = other DNA
tgcttatacaaacaaaaaaaagaaggcgttgttttgaatctaaatcatgc

SEQ ID NO: 44172 - DNA, 50 bp, synthetic construct
  source 1..50: mol_type = other DNA
aaaaacgggtatacgataggtttgagtttacctatgtaagggacgatttg

SEQ ID NO: 44173 - DNA, 50 bp, synthetic construct
  source 1..50: mol_type = other DNA
aggagtatatgacattaaatctttttaatttttcagccgtaaatattcct

SEQ ID NO: 44174 - DNA, 50 bp, synthetic construct
  source 1..50: mol_type = other DNA
agttatcaacaatttaagtagaggttgaccgattagacggtatgattaca

SEQ ID NO: 44175 - DNA, 50 bp, synthetic construct
  source 1..50: mol_type = other DNA
gagaaaaaccgctggaagtattcgaaggaattcttcttgcggaaattcag

SEQ ID NO: 44176 - DNA, 50 bp, synthetic construct
  source 1..50: mol_type = other DNA
gttcccttgttcggggcgtcgtggacaaatactcccccaaaaaggcgaaa

SEQ ID NO: 44177 - DNA, 50 bp, synthetic construct
  source 1..50: mol_type = other DNA
attacttgctttttacggtctcggtgccttcactattttcgccaagaaaa

SEQ ID NO: 44178 - DNA, 50 bp, synthetic construct
  source 1..50: mol_type = other DNA
gaatgttgtagatcgcctgcacccgggggtgataccgatggagagtatca

SEQ ID NO: 44179 - DNA, 50 bp, synthetic construct
  source 1..50: mol_type = other DNA
aaacgataaaatcgctaaaaaatactctttttatttttatgatatttttt

SEQ ID NO: 44180 - DNA, 50 bp, synthetic construct
  source 1..50: mol_type = other DNA
cccaaagaagaatatgagcagtctgcgcgctggacgctgccggcgaaagg

SEQ ID NO: 44181 - DNA, 50 bp, synthetic construct
  source 1..50: mol_type = other DNA
cgtatattatttagttttctttacaaaacggtgaaaatataaaatatacg

SEQ ID NO: 44182 - DNA, 50 bp, synthetic construct
  source 1..50: mol_type = other DNA
atcagataaccagtcaaaagcagtccactgcttttgaccagaaattcgtc

SEQ ID NO: 44183 - DNA, 50 bp, synthetic construct
  source 1..50: mol_type = other DNA
tcctgcttttatatcattgtctattgaaagccaataatagcaagtacaat

SEQ ID NO: 44184 - DNA, 50 bp, synthetic construct
  source 1..50: mol_type = other DNA
tagggatccctttagtgcctcatagatatggaatggcaaaggcaattcta

SEQ ID NO: 44185 - DNA, 50 bp, synthetic construct
  source 1..50: mol_type = other DNA
aaaaatacaatgatgaacagcagaagtctgctgatcatcaatctacgaca

SEQ ID NO: 44186 - DNA, 50 bp, synthetic construct
  source 1..50: mol_type = other DNA
taaaataagctaagggcaggtgaaaatacaggtaggcttagagaagttaa

SEQ ID NO: 44187 - DNA, 50 bp, synthetic construct
  source 1..50: mol_type = other DNA
aattgatggctgcattggaagatttaaaacttgacaactcaaaagcaatt

SEQ ID NO: 44188 - DNA, 50 bp, synthetic construct
  source 1..50: mol_type = other DNA
aaaaataatttatgtgaggccataattcttttctctaaaaaacttttctt

SEQ ID NO: 44189 - DNA, 50 bp, synthetic construct
  source 1..50: mol_type = other DNA
gctcaatggctttttttcctaagcagtgcaataagagtaagccgttcatt

SEQ ID NO: 44190 - DNA, 50 bp, synthetic construct
  source 1..50: mol_type = other DNA
atcccctatgtgtcgggttcgctttaagttacaaaattagcatagcgtct

SEQ ID NO: 44191 - DNA, 50 bp, synthetic construct
  source 1..50: mol_type = other DNA
gcagcgcgtgagcacggtctgcttgcaagggcaacaggcattcgaccttc

SEQ ID NO: 44192 - DNA, 50 bp, synthetic construct
  source 1..50: mol_type = other DNA
attcacgagtctctttatcataagcgcatctgccaaaggcagccgtgcag

SEQ ID NO: 44193 - DNA, 50 bp, synthetic construct
  source 1..50: mol_type = other DNA
tccaaaattgattattagaaaattcgatcgctctactaaaaatcaatgcc

SEQ ID NO: 44194 - DNA, 50 bp, synthetic construct
  source 1..50: mol_type = other DNA
cctggtataaccgggcatgaggtatcttgcatatggggagttacagaagc

SEQ ID NO: 44195 - DNA, 50 bp, synthetic construct
  source 1..50: mol_type = other DNA
cggatttcaggatgatgaggtttccgctcaatacatcttgcataaatcca

SEQ ID NO: 44196 - DNA, 50 bp, synthetic construct
  source 1..50: mol_type = other DNA
ctgatgatcgaggattgtaaacagggctgacagccatccctgaccatcag

SEQ ID NO: 44197 - DNA, 50 bp, synthetic construct
  source 1..50: mol_type = other DNA
accaaactgtcgtccgtttctaatatattccttacggctatcgcattgag

SEQ ID NO: 44198 - DNA, 50 bp, synthetic construct
  source 1..50: mol_type = other DNA
ttctttccatggatatttagtatgaagatactttttatctgtcatgggaa

SEQ ID NO: 44199 - DNA, 50 bp, synthetic construct
  source 1..50: mol_type = other DNA
agttggacgcttcattactccaaaccttcggagtatgtacaaaatctgcg

SEQ ID NO: 44200 - DNA, 50 bp, synthetic construct
  source 1..50: mol_type = other DNA
tcacattctcggcgtaccacgtatgcttctgtccttcgtggagaactgct

SEQ ID NO: 44201 - DNA, 50 bp, synthetic construct
  source 1..50: mol_type = other DNA
gctttaaatagtttttcatatctataaaattaagaaaaactcctctaaag

SEQ ID NO: 44202 - DNA, 50 bp, synthetic construct
  source 1..50: mol_type = other DNA
tccagcaggtcaaagagggtcggcgccatcgcctgccttgacaggccacg

SEQ ID NO: 44203 - DNA, 50 bp, synthetic construct
  source 1..50: mol_type = other DNA
gaatacagcaaaaggcccagaaccgcggcacaggatgcacggctgttttc

SEQ ID NO: 44204 - DNA, 50 bp, synthetic construct
  source 1..50: mol_type = other DNA
tttgcgaaaagtcagcgaaaaccgcgtttgtatggcaaactttgctcttc

SEQ ID NO: 44205 - DNA, 50 bp, synthetic construct
  source 1..50: mol_type = other DNA
ccgatatcaaaaaaggaatagtatcaaaaagcacggttttatgatagaat

SEQ ID NO: 44206 - DNA, 50 bp, synthetic construct
  source 1..50: mol_type = other DNA
cgggatctgatccgtacggcacttcgaagtacatcacggatccgaacatc

SEQ ID NO: 44207 - DNA, 50 bp, synthetic construct
  source 1..50: mol_type = other DNA
aacctcgcacgaacactttttagtagttcggcaaatgctcatgtacggta

SEQ ID NO: 44208 - DNA, 50 bp, synthetic construct
  source 1..50: mol_type = other DNA
gcttttaactaaaatatgaataataacaataacattttgtatggacaatg

SEQ ID NO: 44209 - DNA, 50 bp, synthetic construct
  source 1..50: mol_type = other DNA
tttccattgggcgtgccattgtgaaaagtaaatgcagcggataaagagaa

SEQ ID NO: 44210 - DNA, 50 bp, synthetic construct
  source 1..50: mol_type = other DNA
aatcaagctcggtgagcgaatcgtccagctttcgctgcgtgagcggtctt

SEQ ID NO: 44211 - DNA, 50 bp, synthetic construct
  source 1..50: mol_type = other DNA
agtgcgtcagcggatttatggttgcaggaattaaaattttgggagtcagc

SEQ ID NO: 44212 - DNA, 50 bp, synthetic construct
  source 1..50: mol_type = other DNA
gacatttgctcaaaagcgcaactcacgttgaagcggaagtagatcatgtc

SEQ ID NO: 44213 - DNA, 50 bp, synthetic construct
  source 1..50: mol_type = other DNA
aaaaaaacggactctattatgaaaaagtgtgcggacaagtctgtttttca

SEQ ID NO: 44214 - DNA, 50 bp, synthetic construct
  source 1..50: mol_type = other DNA
gattgtcggcgggatcatggtcaccggtgtcggtttcaaagccgatgtac

SEQ ID NO: 44215 - DNA, 50 bp, synthetic construct
  source 1..50: mol_type = other DNA
gcgtggtgctgttttgcgatgaactgggaaatcgaaaacagccattcggc

SEQ ID NO: 44216 - DNA, 50 bp, synthetic construct
  source 1..50: mol_type = other DNA
gaaatcgtgtgtgacaactgccaggactggcgactgtcacggaaacttcc

SEQ ID NO: 44217 - DNA, 50 bp, synthetic construct
  source 1..50: mol_type = other DNA
agcgacaagctcgatcagatgtccgggtgccggtgatcgaggagcagctg

SEQ ID NO: 44218 - DNA, 50 bp, synthetic construct
  source 1..50: mol_type = other DNA
gttgataatgcagataccgctaataaagaaacgggattattcttctgtac

SEQ ID NO: 44219 - DNA, 50 bp, synthetic construct
  source 1..50: mol_type = other DNA
ctttcgcccatcatgctacgcctttttcttatcgaacagatgggtagctt

SEQ ID NO: 44220 - DNA, 50 bp, synthetic construct
  source 1..50: mol_type = other DNA
tgttgctcattgcctgcttgctgctcgcagcccgcaggccgtgacaaacg

SEQ ID NO: 44221 - DNA, 50 bp, synthetic construct
  source 1..50: mol_type = other DNA
taaacgtagcaaaatacatgggctacggaaaaggtgatttgctgcgattg

SEQ ID NO: 44222 - DNA, 50 bp, synthetic construct
  source 1..50: mol_type = other DNA
aaacgacaaatccgaagggtgttctcgtaaacccttcgtttgaccagtaa

SEQ ID NO: 44223 - DNA, 50 bp, synthetic construct
  source 1..50: mol_type = other DNA
ggatgaaaaatgtataataaagtgattggacgcttgacgtctacacccga

SEQ ID NO: 44224 - DNA, 50 bp, synthetic construct
  source 1..50: mol_type = other DNA
acaaagagcaataagagcacactgataagtgtaaaggccttaaccttata

SEQ ID NO: 44225 - DNA, 50 bp, synthetic construct
  source 1..50: mol_type = other DNA
tataatcgaaccacgcaactcgattataccagctagatggtatttccata

SEQ ID NO: 44226 - DNA, 50 bp, synthetic construct
  source 1..50: mol_type = other DNA
ataagcaacacgactaacatttcaatttcgactagtgtgaacccttttac

SEQ ID NO: 44227 - DNA, 50 bp, synthetic construct
  source 1..50: mol_type = other DNA
tagcctccttggttatttaagaattttttgttttttattttaggctttta

SEQ ID NO: 44228 - DNA, 50 bp, synthetic construct
  source 1..50: mol_type = other DNA
cgtttttttgttggaaaggaaatgcaaatctcctttttaactccatgact

SEQ ID NO: 44229 - DNA, 50 bp, synthetic construct
  source 1..50: mol_type = other DNA
ttcttcaatcgtttctcgtgaaatatcgcggcggagaacatcttctgaac

SEQ ID NO: 44230 - DNA, 50 bp, synthetic construct
  source 1..50: mol_type = other DNA
gccgtctttagcaaatacacaccgaattgtgctgattgggcttggaaaag

SEQ ID NO: 44231 - DNA, 50 bp, synthetic construct
  source 1..50: mol_type = other DNA
ggatcggatttgaactaccgttctcatccgtggaatgcgaaatccgaaaa

SEQ ID NO: 44232 - DNA, 50 bp, synthetic construct
  source 1..50: mol_type = other DNA
tcttctagtaaatggcaggcagaaatcgtagaaagcggtcacgcagaaga

SEQ ID NO: 44233 - DNA, 50 bp, synthetic construct
  source 1..50: mol_type = other DNA
caagtccggcaaaggaacttgattttaaatcagttcctttgcctaacaaa

SEQ ID NO: 44234 - DNA, 50 bp, synthetic construct
  source 1..50: mol_type = other DNA
attggagacttaagacccctgtaacagtaatgctatcttatgttttgggg

SEQ ID NO: 44235 - DNA, 50 bp, synthetic construct
  source 1..50: mol_type = other DNA
gattgattggtgtatattataggcgtgcctttgattcatcaattacaatg

SEQ ID NO: 44236 - DNA, 50 bp, synthetic construct
  source 1..50: mol_type = other DNA
aaagagcttaataaaaaggacaatataggaacctttttctttggcatttc

SEQ ID NO: 44237 - DNA, 50 bp, synthetic construct
  source 1..50: mol_type = other DNA
ttattgtggtataggtacaattggtccttattgtatatatatcactctaa

SEQ ID NO: 44238 - DNA, 50 bp, synthetic construct
  source 1..50: mol_type = other DNA
acaaattttcggtaaagtcgttatattaaacccactttaccatattttgg

SEQ ID NO: 44239 - DNA, 50 bp, synthetic construct
  source 1..50: mol_type = other DNA
tccacggggaagccatggaagaagcccttctcccggtgcgggatcgtggt

SEQ ID NO: 44240 - DNA, 50 bp, synthetic construct
  source 1..50: mol_type = other DNA
aaagagttgcaaaacctgcttgccgcgtcgcagaggtattcaaactctgt

SEQ ID NO: 44241 - DNA, 50 bp, synthetic construct
  source 1..50: mol_type = other DNA
gtatctgaaattaagaataaataataaaatccaattttattttaagatag

SEQ ID NO: 44242 - DNA, 50 bp, synthetic construct
  source 1..50: mol_type = other DNA
tatgactccgcacgaccgcgccctgccgggcggatacggaatttgtccct

SEQ ID NO: 44243 - DNA, 50 bp, synthetic construct
  source 1..50: mol_type = other DNA
atcatgtaacatctgttttttcacctgaaaagtatttgattaaatccttt

SEQ ID NO: 44244 - DNA, 50 bp, synthetic construct
  source 1..50: mol_type = other DNA
ctatcaattttctggcacaatctattggtatataacgtaaaaagaaaaag

SEQ ID NO: 44245 - DNA, 50 bp, synthetic construct
  source 1..50: mol_type = other DNA
cagacctcgcagatgttattgtaccagtataatagacgctgaaagggagt

SEQ ID NO: 44246 - DNA, 50 bp, synthetic construct
  source 1..50: mol_type = other DNA
caacaaacttaaaactacttgaaaggttttcacgactttgaagttgactg

SEQ ID NO: 44247 - DNA, 50 bp, synthetic construct
  source 1..50: mol_type = other DNA
gaaaatgtgcttttccggacaccgaaaggtgcttaaataagcaccttttt

SEQ ID NO: 44248 - DNA, 50 bp, synthetic construct
  source 1..50: mol_type = other DNA
acgcttcggtagggaagcggagcgcgggggattgttccccaccgaaacgc

SEQ ID NO: 44249 - DNA, 50 bp, synthetic construct
  source 1..50: mol_type = other DNA
ttttgtagccttattttgtctgtaagcccagaaaatgtattccaagagct

SEQ ID NO: 44250 - DNA, 50 bp, synthetic construct
  source 1..50: mol_type = other DNA
agatgaagaaaaatcagtttgtgatatcaccctctctattgattttataa

SEQ ID NO: 44251 - DNA, 50 bp, synthetic construct
  source 1..50: mol_type = other DNA
aagggtcaacggtcacacgatacctgtgtatcgttagagggtacacaacc

SEQ ID NO: 44252 - DNA, 50 bp, synthetic construct
  source 1..50: mol_type = other DNA
ccacatttgcccccatcaaatacatatgtattcaatctaagccaatgtta

SEQ ID NO: 44253 - DNA, 50 bp, synthetic construct
  source 1..50: mol_type = other DNA
gtatggctaaacaggataactataagaaagcgttttctgccattgtatat

SEQ ID NO: 44254 - DNA, 50 bp, synthetic construct
  source 1..50: mol_type = other DNA
gaggagaagatctgcgcgtattacagacagcacgcgcacaccgtttgcgc

SEQ ID NO: 44255 - DNA, 50 bp, synthetic construct
  source 1..50: mol_type = other DNA
aaggtaaaacaactgatacatttttcaaaatcttgcattttatttacctt

SEQ ID NO: 44256 - DNA, 50 bp, synthetic construct
  source 1..50: mol_type = other DNA
tcagggcgtattcacactcaaaaagtattctgagctgttggttgcccgcg

SEQ ID NO: 44257 - DNA, 50 bp, synthetic construct
  source 1..50: mol_type = other DNA
ttaagctttgcggtccggcatgaattttctgaaataaccgcaaaggttat

SEQ ID NO: 44258 - DNA, 50 bp, synthetic construct
  source 1..50: mol_type = other DNA
agaacggaactaccagaaaaacaattctgttcttgggttctttgggtcat

SEQ ID NO: 44259 - DNA, 50 bp, synthetic construct
  source 1..50: mol_type = other DNA
cattctaaacaccgcttttgcaagtagtttcaacaagtgcaaagccaagc

SEQ ID NO: 44260 - DNA, 50 bp, synthetic construct
  source 1..50: mol_type = other DNA
accatattatgatcggatgactctcgcaaagctttgcatatgtcgtttct

SEQ ID NO: 44261 - DNA, 50 bp, synthetic construct
  source 1..50: mol_type = other DNA
aagtgtgtatgacgataagtacttttacgaccttgacgtcaagttggaat

SEQ ID NO: 44262 - DNA, 50 bp, synthetic construct
  source 1..50: mol_type = other DNA
acccgattgtaacaccaccccgcgcgtttgggcaggacaaacaatagcgt

SEQ ID NO: 44263 - DNA, 50 bp, synthetic construct
  source 1..50: mol_type = other DNA
cagttaaactgctttgataatgccgctacatatccaaatggctgtgtatc

SEQ ID NO: 44264 - DNA, 50 bp, synthetic construct
  source 1..50: mol_type = other DNA
tgacggcactcctgcattaaaaccgcggttttgatggcggcggatactct

SEQ ID NO: 44265 - DNA, 50 bp, synthetic construct
  source 1..50: mol_type = other DNA
atcgacactatggcattgcaagtgtacatacggcttgaatattgacggag

SEQ ID NO: 44266 - DNA, 50 bp, synthetic construct
  source 1..50: mol_type = other DNA
aggcattaaaaagccctttttcttgtatttaggagcaccgactaatatag

SEQ ID NO: 44267 - DNA, 50 bp, synthetic construct
  source 1..50: mol_type = other DNA
gattatgcccaaaattccttgatatataatcaggaaacaaatgcactcct

SEQ ID NO: 44268 - DNA, 50 bp, synthetic construct
  source 1..50: mol_type = other DNA
ttgcccgccgctcaccacgaagaggtttctccgaggcttgaattacgctc

SEQ ID NO: 44269 - DNA, 50 bp, synthetic construct
  source 1..50: mol_type = other DNA
cttcgtaatacttctgctgggtttcataaacaatcgtcagtactacgctt

SEQ ID NO: 44270 - DNA, 50 bp, synthetic construct
  source 1..50: mol_type = other DNA
taaccaaatgtacccgttttattaaacactttattaaatccacatgatta

SEQ ID NO: 44271 - DNA, 50 bp, synthetic construct
  source 1..50: mol_type = other DNA
ggcgctttttctgtcataacgggggtgggatatctgacaaactttgcgcc

SEQ ID NO: 44272 - DNA, 50 bp, synthetic construct
  source 1..50: mol_type = other DNA
cctatacccatttttcggaggtggatacattggcgtatatgaggcaaagg

SEQ ID NO: 44273 - DNA, 50 bp, synthetic construct
  source 1..50: mol_type = other DNA
tgcgatgatatagctataatcggcatccaaaatatcactttattatagca

SEQ ID NO: 44274 - DNA, 50 bp, synthetic construct
  source 1..50: mol_type = other DNA
ttaccttaaggacggaaaagtgaaatttttgttttccggttgaagcctca

SEQ ID NO: 44275 - DNA, 50 bp, synthetic construct
  source 1..50: mol_type = other DNA
ggcaagatccaggccgttgtcgagcattcaacgcggcctcggcggcggcc

SEQ ID NO: 44276 - DNA, 50 bp, synthetic construct
  source 1..50: mol_type = other DNA
aatgcgaggaacaatgcatccttctgtggcaatgcgccgttcctgctttt

SEQ ID NO: 44277 - DNA, 50 bp, synthetic construct
  source 1..50: mol_type = other DNA
ttggcggataagggctgtgctgaaaatttgctgttgatcttcggcttcag

SEQ ID NO: 44278 - DNA, 50 bp, synthetic construct
  source 1..50: mol_type = other DNA
gcttctattttcagatattgacttgccgctccacgtctataaatacaaag

SEQ ID NO: 44279 - DNA, 50 bp, synthetic construct
  source 1..50: mol_type = other DNA
aaggtaaaagcttttactctaattgaaatgttagttgttttgctcattat

SEQ ID NO: 44280 - DNA, 50 bp, synthetic construct
  source 1..50: mol_type = other DNA
tttaagcaaaattgtacacaaagagtgatatacttacaattttcattaat

SEQ ID NO: 44281 - DNA, 50 bp, synthetic construct
  source 1..50: mol_type = other DNA
ggtgtttgtgcctgaaattccctcatcagggattaatatcggcaaaaaag

SEQ ID NO: 44282 - DNA, 50 bp, synthetic construct
  source 1..50: mol_type = other DNA
aagagcaaccataatttttattaccataaataaaaattcaagctgctcct

SEQ ID NO: 44283 - DNA, 50 bp, synthetic construct
  source 1..50: mol_type = other DNA
cgactgcatcttctacgcagcggacgaccactgtgtcgaacccgccgtgc

SEQ ID NO: 44284 - DNA, 50 bp, synthetic construct
  source 1..50: mol_type = other DNA
cactttggtagaaatgtaggttactagtatccttgattgaaatgttagtc

SEQ ID NO: 44285 - DNA, 50 bp, synthetic construct
  source 1..50: mol_type = other DNA
tcgccaacatcctcgaatacgggaaaagacgtgttgctggatacgcccgt

SEQ ID NO: 44286 - DNA, 50 bp, synthetic construct
  source 1..50: mol_type = other DNA
ttttccgtttctttgatggttcggagcgatgtaatcaacgaagctctgcc

SEQ ID NO: 44287 - DNA, 50 bp, synthetic construct
  source 1..50: mol_type = other DNA
aatcgtgtaatctactagcacccctagttcggcctgtgcattatttaatt

SEQ ID NO: 44288 - DNA, 50 bp, synthetic construct
  source 1..50: mol_type = other DNA
attattccttgaggccttgcaggtattctagcagcacctcgagaaataga

SEQ ID NO: 44289 - DNA, 50 bp, synthetic construct
  source 1..50: mol_type = other DNA
tattttaccagttcggtcataccgatgagatttaccctgctgagaaaata

SEQ ID NO: 44290 - DNA, 50 bp, synthetic construct
  source 1..50: mol_type = other DNA
cagcaaatctgttcagcagctcgtcagggagctatgatacaataaacttg

SEQ ID NO: 44291 - DNA, 50 bp, synthetic construct
  source 1..50: mol_type = other DNA
tgaaagaagccgcccgtcagaaaacattttccgctttggtatgtctcaat

SEQ ID NO: 44292 - DNA, 50 bp, synthetic construct
  source 1..50: mol_type = other DNA
gtatctgtaatctgtttctgattctgaaaatagactcagcagagagaaaa

SEQ ID NO: 44293 - DNA, 50 bp, synthetic construct
  source 1..50: mol_type = other DNA
cctgtgccacctccagcatctacgatcgcgtattgagaagcgggcattgg

SEQ ID NO: 44294 - DNA, 50 bp, synthetic construct
  source 1..50: mol_type = other DNA
tctcctatcggaaataagttcggattcgatcagcgctttccgctgctttt

SEQ ID NO: 44295 - DNA, 50 bp, synthetic construct
  source 1..50: mol_type = other DNA
gtaaatcgcatcgagatcacagacacgttcaagatcctgataatattgtt

SEQ ID NO: 44296 - DNA, 50 bp, synthetic construct
  source 1..50: mol_type = other DNA
aagagaagttgccggttttgtagataggtacaaaaataacacctacacgg

SEQ ID NO: 44297 - DNA, 50 bp, synthetic construct
  source 1..50: mol_type = other DNA
atttctaaaaagcataagcagatacttatcatatacccgtttttccaacg

SEQ ID NO: 44298 - DNA, 50 bp, synthetic construct
  source 1..50: mol_type = other DNA
agactaccacaaaaggaaggaggaacacccccttcctatcctggtgggcc

SEQ ID NO: 44299 - DNA, 50 bp, synthetic construct
  source 1..50: mol_type = other DNA
ttacagagccgattgtggtggttcaaatactgccacaggaggttcaaggc

SEQ ID NO: 44300 - DNA, 50 bp, synthetic construct
  source 1..50: mol_type = other DNA
ttactccaaatatcatcagcaacatcttttgtttcttatatggtgattaa

SEQ ID NO: 44301 - DNA, 50 bp, synthetic construct
  source 1..50: mol_type = other DNA
tgttttttgtggacgacgggtattcgaagctacgccgtttcccgaaaaca

SEQ ID NO: 44302 - DNA, 50 bp, synthetic construct
  source 1..50: mol_type = other DNA
aaagattatatcatatccggtcaacagagtgcatttatgatacaatatta

SEQ ID NO: 44303 - DNA, 50 bp, synthetic construct
  source 1..50: mol_type = other DNA
cagaagcggctcccccactcccgccagcttggggttgggattggcgatgc

SEQ ID NO: 44304 - DNA, 50 bp, synthetic construct
  source 1..50: mol_type = other DNA
ggttcccaaaatcacgcttcctgctctcctttcgtcagattttccttccg

SEQ ID NO: 44305 - DNA, 50 bp, synthetic construct
  source 1..50: mol_type = other DNA
tagtaaaggtgctggagcagaagtatcaaaatgtcccggccttcgctgat

SEQ ID NO: 44306 - DNA, 50 bp, synthetic construct
  source 1..50: mol_type = other DNA
caatcgcagcttttccacctgttgcgcagcttttccacctgttgcgattg

SEQ ID NO: 44307 - DNA, 50 bp, synthetic construct
  source 1..50: mol_type = other DNA
agccgcgccgagcagcgcagcttcatccggctatgctgctgtattcgacg

SEQ ID NO: 44308 - DNA, 50 bp, synthetic construct
  source 1..50: mol_type = other DNA
atatagactacccaaagagaaaggagaaaacggggtgcggaagtctatta

SEQ ID NO: 44309 - DNA, 50 bp, synthetic construct
  source 1..50: mol_type = other DNA
ggacagaaactcctcccagtaacagctccatctggctgctttcaccgtcc

SEQ ID NO: 44310 - DNA, 50 bp, synthetic construct
  source 1..50: mol_type = other DNA
tggtgttctttttcctcatataaaattttattaaatgaaaaatagccgtc

SEQ ID NO: 44311 - DNA, 50 bp, synthetic construct
  source 1..50: mol_type = other DNA
tgaacagcatgagcattgaatttttcaaacttattttatcattctgtttc

SEQ ID NO: 44312 - DNA, 50 bp, synthetic construct
  source 1..50: mol_type = other DNA
tagttgctattatgttactattacaaaaaatagtcagaaaatctttcaag

SEQ ID NO: 44313 - DNA, 50 bp, synthetic construct
  source 1..50: mol_type = other DNA
gactcacctggattcaaggtgtcgccacatacacgctgtccagtcccgcc

SEQ ID NO: 44314 - DNA, 50 bp, synthetic construct
  source 1..50: mol_type = other DNA
ctgccgcctcttgcaggtctttcttcccaagaaaaatgaaaagaccgcag

SEQ ID NO: 44315 - DNA, 50 bp, synthetic construct
  source 1..50: mol_type = other DNA
tcttcaccatataaaagatatacctgcccctttcttttatagcccgaaca

SEQ ID NO: 44316 - DNA, 50 bp, synthetic construct
  source 1..50: mol_type = other DNA
tgtagacgatagatttgtcaatctgccccgtgacacttagatattttatt

SEQ ID NO: 44317 - DNA, 50 bp, synthetic construct
  source 1..50: mol_type = other DNA
ctacccaaagagaaaggagtggcagaccatggtccgatcattttgcagaa

SEQ ID NO: 44318 - DNA, 50 bp, synthetic construct
  source 1..50: mol_type = other DNA
ttttctattgtctttcaaagggttttaaagtcctgaaatacaaatccaag

SEQ ID NO: 44319 - DNA, 50 bp, synthetic construct
  source 1..50: mol_type = other DNA
gatcgtgcgcgcactgtctctgtacccatgtagcgggtgcgtgtggcggg

SEQ ID NO: 44320 - DNA, 50 bp, synthetic construct
  source 1..50: mol_type = other DNA
cattccgtatatcattctgatgaacattggaaagaatgatataatcaatc

SEQ ID NO: 44321 - DNA, 50 bp, synthetic construct
  source 1..50: mol_type = other DNA
actgtatcgagaactgaaggaagaagtcatccttccaggcatgagcgctt

SEQ ID NO: 44322 - DNA, 50 bp, synthetic construct
  source 1..50: mol_type = other DNA
tataaaaaacgccccaacttgcgccggttggtattcggactttttctata

SEQ ID NO: 44323 - DNA, 50 bp, synthetic construct
  source 1..50: mol_type = other DNA
tgcggtgaaaaattagattagggggcccagaaatccacaatgcagagccc

SEQ ID NO: 44324 - DNA, 50 bp, synthetic construct
  source 1..50: mol_type = other DNA
ttcgtcataatgcaccgtatctcctgcggcttattgcgtttcgtgtaagg

SEQ ID NO: 44325 - DNA, 50 bp, synthetic construct
  source 1..50: mol_type = other DNA
aaaaaatcaaggggtaattcacagatttgcgttcctttcctttgtttttc

SEQ ID NO: 44326 - DNA, 50 bp, synthetic construct
  source 1..50: mol_type = other DNA
gggtctcggtgacgatctccttttcggtgagtattgtgtctatcacacga

SEQ ID NO: 44327 - DNA, 50 bp, synthetic construct
  source 1..50: mol_type = other DNA
aatggaataagtgcatatccttagcgggctggccattgctatagtccatc

SEQ ID NO: 44328 - DNA, 50 bp, synthetic construct
  source 1..50: mol_type = other DNA
ttctctttcaaaacttcttggtgatatccagcccaaatccggaaaaagaa

SEQ ID NO: 44329 - DNA, 50 bp, synthetic construct
  source 1..50: mol_type = other DNA
cacggaacgtccgtggatttttggtcgccaacatcatcagagcctccaag

SEQ ID NO: 44330 - DNA, 50 bp, synthetic construct
  source 1..50: mol_type = other DNA
gaatttaatggcagcatcttaaaaatcaaggctttgctgctgataaaacg

SEQ ID NO: 44331 - DNA, 50 bp, synthetic construct
  source 1..50: mol_type = other DNA
tatcagacatgttttttcttccttttttggagaaaaatagatgtgtgttt

SEQ ID NO: 44332 - DNA, 50 bp, synthetic construct
  source 1..50: mol_type = other DNA
aacgcgattttcctttggaggtaaattcaccgagtcttttttatcgccgg

SEQ ID NO: 44333 - DNA, 50 bp, synthetic construct
  source 1..50: mol_type = other DNA
aatggtcagcagcacggagtttatgcaatggatgcaggaaacggaaatgg

SEQ ID NO: 44334 - DNA, 50 bp, synthetic construct
  source 1..50: mol_type = other DNA
aaaccaacccgtgccaaaggagaaaagacggcgagaaaacggcttgcagt

SEQ ID NO: 44335 - DNA, 50 bp, synthetic construct
  source 1..50: mol_type = other DNA
cccgttggaaaaacgggtatatgatacggcgcacggttttttccgtacgc

SEQ ID NO: 44336 - DNA, 50 bp, synthetic construct
  source 1..50: mol_type = other DNA
caaagccttcccatgtacgggaaggccttcccgcgcagggaaggctttta

SEQ ID NO: 44337 - DNA, 50 bp, synthetic construct
  source 1..50: mol_type = other DNA
taaaaatgccgaaaatcaataaactttattaaattttttcggcaataact

SEQ ID NO: 44338 - DNA, 50 bp, synthetic construct
  source 1..50: mol_type = other DNA
ggagcagtattaaaaaaagatatggagcgattcttttgtaaaaatgatta

SEQ ID NO: 44339 - DNA, 50 bp, synthetic construct
  source 1..50: mol_type = other DNA
cggcctgcagcgcaagctccttgaagccaaggagctgtctgggcagatgc

SEQ ID NO: 44340 - DNA, 50 bp, synthetic construct
  source 1..50: mol_type = other DNA
caggccaatgagacgattacctgaaaggagaagccggttgtattcaccaa

SEQ ID NO: 44341 - DNA, 50 bp, synthetic construct
  source 1..50: mol_type = other DNA
ttttcactccatttgttccggtcaatgtcgctttccaaagccgctgaaaa

SEQ ID NO: 44342 - DNA, 50 bp, synthetic construct
  source 1..50: mol_type = other DNA
ttttatttcttttaatttctttttataacccgagccagaaagcttgttct

SEQ ID NO: 44343 - DNA, 50 bp, synthetic construct
  source 1..50: mol_type = other DNA
cagcacagacgggtattgcttgtgtacacaagagatacccaagcacgcag

SEQ ID NO: 44344 - DNA, 50 bp, synthetic construct
  source 1..50: mol_type = other DNA
ccgtgtgctgcccggtattacggtttaccgtaataccggcaaccgtcaat

SEQ ID NO: 44345 - DNA, 50 bp, synthetic construct
  source 1..50: mol_type = other DNA
agcgaccgcagaaaggagcgtgaccgctccgttctctttcacggcaaaga

SEQ ID NO: 44346 - DNA, 50 bp, synthetic construct
  source 1..50: mol_type = other DNA
aaaggaatttaccctcggcgcatatgtatttgccaagtataatatccaat

SEQ ID NO: 44347 - DNA, 50 bp, synthetic construct
  source 1..50: mol_type = other DNA
tatatcgctgaaaccgcttgacttttaataatgatattagatccgatatt

SEQ ID NO: 44348 - DNA, 50 bp, synthetic construct
  source 1..50: mol_type = other DNA
caattctacagaaaggactgaccgcaccgtctatcccctcttctccgatg

SEQ ID NO: 44349 - DNA, 50 bp, synthetic construct
  source 1..50: mol_type = other DNA
accaaagcataaacaccaaccttttggtagtctgattgttttgctttggt

SEQ ID NO: 44350 - DNA, 50 bp, synthetic construct
  source 1..50: mol_type = other DNA
gcaggggaatgcagctaggcattacctaatccctagccactaatccctag

SEQ ID NO: 44351 - DNA, 50 bp, synthetic construct
  source 1..50: mol_type = other DNA
ctgatattggaaataagcaccctatagtaattgtgaatttgtgaaatggt

SEQ ID NO: 44352 - DNA, 50 bp, synthetic construct
  source 1..50: mol_type = other DNA
ccatcgtccacccggactggcggggcaagaacattctccgtgccggatgg

SEQ ID NO: 44353 - DNA, 50 bp, synthetic construct
  source 1..50: mol_type = other DNA
ttattgatgaaatatgaacgatagatctattccatctttgttttgagtaa

SEQ ID NO: 44354 - DNA, 50 bp, synthetic construct
  source 1..50: mol_type = other DNA
atcccgccgtgccggagaacatatttatatgttgaaatagttttgataat

SEQ ID NO: 44355 - DNA, 50 bp, synthetic construct
  source 1..50: mol_type = other DNA
atatgatcgccgcaatgaagcaggtgttcctttcattgcgttaatcataa

SEQ ID NO: 44356 - DNA, 50 bp, synthetic construct
  source 1..50: mol_type = other DNA
ctacccggctgggcaccgctgcgctgccgcctgtaccggcaacggaacag

SEQ ID NO: 44357 - DNA, 50 bp, synthetic construct
  source 1..50: mol_type = other DNA
catagttcttgccagatcagccgcacctttgggaaagggcacagaccatg

SEQ ID NO: 44358 - DNA, 50 bp, synthetic construct
  source 1..50: mol_type = other DNA
gaacggctttaatactgcttctatttatcatctgctgataaacaaccgct

SEQ ID NO: 44359 - DNA, 50 bp, synthetic construct
  source 1..50: mol_type = other DNA
ttttagtcccggcagctgtgtgccgcggcagcgccctgcccggctgcggg

SEQ ID NO: 44360 - DNA, 50 bp, synthetic construct
  source 1..50: mol_type = other DNA
atacataaaaataaagaaaaagtgctagcttttgctttcatttcatcagt

SEQ ID NO: 44361 - DNA, 50 bp, synthetic construct
  source 1..50: mol_type = other DNA
aactttctttttaataatttcattgataagaaaatgttaaaaaaggattt

SEQ ID NO: 44362 - DNA, 50 bp, synthetic construct
  source 1..50: mol_type = other DNA
catggactgggcaaaaggctacctgcaggctgcctttttgtatcaggact

SEQ ID NO: 44363 - DNA, 50 bp, synthetic construct
  source 1..50: mol_type = other DNA
agaaatcaaaaaagatatttatattctggttcgtaaggtttttgatatca

SEQ ID NO: 44364 - DNA, 50 bp, synthetic construct
  source 1..50: mol_type = other DNA
caatgagcagtgcatcggatgctgtacattcgacgaagcattcctccttc

SEQ ID NO: 44365 - DNA, 50 bp, synthetic construct
  source 1..50: mol_type = other DNA
attactattttatcaaaggagatgaccatcaacattgtaataatgcatat

SEQ ID NO: 44366 - DNA, 50 bp, synthetic construct
  source 1..50: mol_type = other DNA
gctgccggagtttgaacgcgctacgctttacccagcctattttaggcagc

SEQ ID NO: 44367 - DNA, 50 bp, synthetic construct
  source 1..50: mol_type = other DNA
cattcagcgaagccaccgacctgttctgccttcggtggcagcacggaaaa

SEQ ID NO: 44368 - DNA, 50 bp, synthetic construct
  source 1..50: mol_type = other DNA
aggcaactgcccgtcagaaagccctgcgcaaaaagcggctgccggtgcct

SEQ ID NO: 44369 - DNA, 50 bp, synthetic construct
  source 1..50: mol_type = other DNA
tataaaaaagccgccctccgtgcgtcatcctggaaaagtgcttttccagc

SEQ ID NO: 44370 - DNA, 50 bp, synthetic construct
  source 1..50: mol_type = other DNA
cggcccactccaaatgcaccatccagcaataaggcactcggaattttccg

SEQ ID NO: 44371 - DNA, 50 bp, synthetic construct
  source 1..50: mol_type = other DNA
ccgatgcctccgcaaatcaaagtgtccaccgtttaacgatttcagaaccg

SEQ ID NO: 44372 - DNA, 50 bp, synthetic construct
  source 1..50: mol_type = other DNA
cgtcagcggattgatggtcggcggaatctgcacccagcaaggcacggacg

SEQ ID NO: 44373 - DNA, 50 bp, synthetic construct
  source 1..50: mol_type = other DNA
tcaataggtcgttctgataattttcctatcttcgggtagtgacatatttg

SEQ ID NO: 44374 - DNA, 50 bp, synthetic construct
  source 1..50: mol_type = other DNA
ctgaatatctactactgcaaatctatacatttatttaaaaaccgtgtcag

SEQ ID NO: 44375 - DNA, 50 bp, synthetic construct
  source 1..50: mol_type = other DNA
tttctcaaaaaaggcaagatttggacattgaccttgcaggctttgagaaa

SEQ ID NO: 44376 - DNA, 50 bp, synthetic construct
  source 1..50: mol_type = other DNA
cgctttatttgctatacatttttatatcgctccgtagggcacggcaagcc

SEQ ID NO: 44377 - DNA, 50 bp, synthetic construct
  source 1..50: mol_type = other DNA
tttttccagacagagggagcgtaaattttctctcaacagacggcatggta

SEQ ID NO: 44378 - DNA, 50 bp, synthetic construct
  source 1..50: mol_type = other DNA
taagagttacaaacaccgttgatttcaaggttcgtgagtgtggacgtttc

SEQ ID NO: 44379 - DNA, 50 bp, synthetic construct
  source 1..50: mol_type = other DNA
taatcttcgtattcggcttctgccggcccagaattcgaatatgattcagt

SEQ ID NO: 44380 - DNA, 50 bp, synthetic construct
  source 1..50: mol_type = other DNA
accgcttgcagatatccgggtgtagctacacgctgaacactgttgaccgt

SEQ ID NO: 44381 - DNA, 50 bp, synthetic construct
  source 1..50: mol_type = other DNA
atatcatattatcttcaaaaattcaaaaaattttgatacacacatcatat

SEQ ID NO: 44382 - DNA, 50 bp, synthetic construct
  source 1..50: mol_type = other DNA
aaaggcatggtattatatccgcattgatgcggagctcatcgagtgctctt

SEQ ID NO: 44383 - DNA, 50 bp, synthetic construct
  source 1..50: mol_type = other DNA
ggacgttgcagccgatggtttcattcctgaataccgactctgcaacctcg

SEQ ID NO: 44384 - DNA, 50 bp, synthetic construct
  source 1..50: mol_type = other DNA
tcagttgttcatcgcttcggcttgaattatccgaatcgatgagcaacagg

SEQ ID NO: 44385 - DNA, 50 bp, synthetic construct
  source 1..50: mol_type = other DNA
ttccgagtgaaggtcgaatactgtgctcagaatttgacctttcctcttgt

SEQ ID NO: 44386 - DNA, 50 bp, synthetic construct
  source 1..50: mol_type = other DNA
ataatttctttggcaatggcatgacgcaaaaacttcctataaaaaattat

SEQ ID NO: 44387 - DNA, 50 bp, synthetic construct
  source 1..50: mol_type = other DNA
cagatcggagacataattgaattttcttgattctttcactcattgcctcc

SEQ ID NO: 44388 - DNA, 50 bp, synthetic construct
  source 1..50: mol_type = other DNA
cagctgctcctcgttgtcggtgctgaagcaccgtcatcggcatagagcgt

SEQ ID NO: 44389 - DNA, 50 bp, synthetic construct
  source 1..50: mol_type = other DNA
gccgctgcagatgtttgaggaagatgcacccatcatacccgggcggcggc

SEQ ID NO: 44390 - DNA, 50 bp, synthetic construct
  source 1..50: mol_type = other DNA
ccgttggaagagcctgcacgccagtataaaaaataagccctttcaaaaga

SEQ ID NO: 44391 - DNA, 50 bp, synthetic construct
  source 1..50: mol_type = other DNA
ccgcgtaattcacgattatgcgctgctcggcataatcgtgagcctcgtac

SEQ ID NO: 44392 - DNA, 50 bp, synthetic construct
  source 1..50: mol_type = other DNA
ggctattgattttttaaataaatcatgatttcgtgtaaaagtaaaggaaa

SEQ ID NO: 44393 - DNA, 50 bp, synthetic construct
  source 1..50: mol_type = other DNA
ggattttccgattaacatactcggctacgcccgtgtttccacggacagcg

SEQ ID NO: 44394 - DNA, 50 bp, synthetic construct
  source 1..50: mol_type = other DNA
tgttcgtgagatccttccggacacggtgcttcagaagccactttgcaaaa

SEQ ID NO: 44395 - DNA, 50 bp, synthetic construct
  source 1..50: mol_type = other DNA
aaaatacaaaagaaaggaaatacggcggtctttccatcgtttaacgattt

SEQ ID NO: 44396 - DNA, 50 bp, synthetic construct
  source 1..50: mol_type = other DNA
tacagccaccctggaaaggtgcgtcaatccacagtgcaaggttgcttgta

SEQ ID NO: 44397 - DNA, 50 bp, synthetic construct
  source 1..50: mol_type = other DNA
atgcactcatattaaagccacttccggaatttcaagaaaggtgcagatcc

SEQ ID NO: 44398 - DNA, 50 bp, synthetic construct
  source 1..50: mol_type = other DNA
cagaaggtattatacatggatatttagctaactatctataatacaatcta

SEQ ID NO: 44399 - DNA, 50 bp, synthetic construct
  source 1..50: mol_type = other DNA
ttttatcaaatgacaactacaatttgggacagagtccaaatcagattaaa

SEQ ID NO: 44400 - DNA, 50 bp, synthetic construct
  source 1..50: mol_type = other DNA
atttattcttgcagatgagccgaccgacgggaaatcttgatagtaaaaca

SEQ ID NO: 44401 - DNA, 50 bp, synthetic construct
  source 1..50: mol_type = other DNA
attatggatttgtttcttcggattatcatccgttgacactcttgcatata

SEQ ID NO: 44402 - DNA, 50 bp, synthetic construct
  source 1..50: mol_type = other DNA
caccatcataaagggatggggagagatctttgcttccccttcattaatga

SEQ ID NO: 44403 - DNA, 50 bp, synthetic construct
  source 1..50: mol_type = other DNA
gtaatggaacaagccaactctatatggagaacaaaatcctgttctcttct

SEQ ID NO: 44404 - DNA, 50 bp, synthetic construct
  source 1..50: mol_type = other DNA
cttcgtataataatcgacctgagcttttctatgcatataactatttaaat

SEQ ID NO: 44405 - DNA, 50 bp, synthetic construct
  source 1..50: mol_type = other DNA
gagcgtttatatagatgttacctatctttgttatatctatatcgtagctc

SEQ ID NO: 44406 - DNA, 50 bp, synthetic construct
  source 1..50: mol_type = other DNA
atgacagcgcgccgctgctttggcaacgcaaaccagatgctgcgcagcac

SEQ ID NO: 44407 - DNA, 50 bp, synthetic construct
  source 1..50: mol_type = other DNA
ttattaatgaaggggaagcaaagatctctccccatccctttatgatggtg

SEQ ID NO: 44408 - DNA, 50 bp, synthetic construct
  source 1..50: mol_type = other DNA
tctgttgacacacggcagtaggctgcattgtagaatgctgtgtcaactgt

SEQ ID NO: 44409 - DNA, 50 bp, synthetic construct
  source 1..50: mol_type = other DNA
ttatttaccgatattcgcttgataaataaaaacttcatatttctatctaa

SEQ ID NO: 44410 - DNA, 50 bp, synthetic construct
  source 1..50: mol_type = other DNA
atagatttccttcttcatttcattaaaataaaatgaaagttgcaatctta

SEQ ID NO: 44411 - DNA, 50 bp, synthetic construct
  source 1..50: mol_type = other DNA
ccacctgtcaaatatgataaagaaattggattatcaaaattttcagttat

SEQ ID NO: 44412 - DNA, 50 bp, synthetic construct
  source 1..50: mol_type = other DNA
tcggcagtggcttcgtcaataacagccgtcattccataagccactctatg

SEQ ID NO: 44413 - DNA, 50 bp, synthetic construct
  source 1..50: mol_type = other DNA
ttcaaccgacaatgataccacaaagctttgtaatttccttgcataatcga

SEQ ID NO: 44414 - DNA, 50 bp, synthetic construct
  source 1..50: mol_type = other DNA
ttttgatattttatacaaacttgaaaaggagtgaaaataatgccaaagaa

SEQ ID NO: 44415 - DNA, 50 bp, synthetic construct
  source 1..50: mol_type = other DNA
ggagggacaagcaatgtccaagaaaccatttggatattgcatggtgaacg

SEQ ID NO: 44416 - DNA, 50 bp, synthetic construct
  source 1..50: mol_type = other DNA
ttcagtgcatgactaatgaaatcaattgaaagcatttcgcaatgttttgt

SEQ ID NO: 44417 - DNA, 50 bp, synthetic construct
  source 1..50: mol_type = other DNA
cctttccatcttcaattctatatccagatattcaattaactgccgatatg

SEQ ID NO: 44418 - DNA, 50 bp, synthetic construct
  source 1..50: mol_type = other DNA
tttgggaaaaatcctgtccggcaaattctccgtccaggaggattcgcttg

SEQ ID NO: 44419 - DNA, 50 bp, synthetic construct
  source 1..50: mol_type = other DNA
caaattagtggaagtaaattcagatatcgacatctacttcgagaaagaga

SEQ ID NO: 44420 - DNA, 50 bp, synthetic construct
  source 1..50: mol_type = other DNA
acgccaccttagactttcatctaagggcgaatgaacgcccgaggcctcgg

SEQ ID NO: 44421 - DNA, 50 bp, synthetic construct
  source 1..50: mol_type = other DNA
tacccgtggggacagcaataaaccgcaccttcttgctcttcggacgagga

SEQ ID NO: 44422 - DNA, 50 bp, synthetic construct
  source 1..50: mol_type = other DNA
atacatagtcatcattgctcagtgtatatccagcaatttcagcggaatat

SEQ ID NO: 44423 - DNA, 50 bp, synthetic construct
  source 1..50: mol_type = other DNA
cttgcaccgggaaaaacaacagatctggttgttgtttctcaaggtgatgc

SEQ ID NO: 44424 - DNA, 50 bp, synthetic construct
  source 1..50: mol_type = other DNA
ttgcatacagcgtagattccgagccttagcggactttctcttgtcaatgc

SEQ ID NO: 44425 - DNA, 50 bp, synthetic construct
  source 1..50: mol_type = other DNA
aaataaaaaagccaccaatagcatttaggctattctgtatttttttaatt

SEQ ID NO: 44426 - DNA, 50 bp, synthetic construct
  source 1..50: mol_type = other DNA
taaatttgatgtaattttatttatttcgaaaaaaaatttaattaaagatg

SEQ ID NO: 44427 - DNA, 50 bp, synthetic construct
  source 1..50: mol_type = other DNA
ggattctggaatcatggcgcataaatttattcgtagagtttacagcttcc

SEQ ID NO: 44428 - DNA, 50 bp, synthetic construct
  source 1..50: mol_type = other DNA
tagtaaacatcgttgcggcagttgtgaaattgctcagcaggtgttttctt

SEQ ID NO: 44429 - DNA, 50 bp, synthetic construct
  source 1..50: mol_type = other DNA
cgagcgtctgtgcagaggacgtaccagcctgttataaggacttacgggaa

SEQ ID NO: 44430 - DNA, 50 bp, synthetic construct
  source 1..50: mol_type = other DNA
gttctccttacgttctgtcaggctttaccctcgataaaataaagggcttt

SEQ ID NO: 44431 - DNA, 50 bp, synthetic construct
  source 1..50: mol_type = other DNA
agcagcgaaaacacaaagcaccgaatttaatgctttctcacaacgcttat

SEQ ID NO: 44432 - DNA, 50 bp, synthetic construct
  source 1..50: mol_type = other DNA
ttctggcactgacagcaaaatcggcagcgacaacgctgatgggcggtgcc

SEQ ID NO: 44433 - DNA, 50 bp, synthetic construct
  source 1..50: mol_type = other DNA
ttgtaacttaaaatcttatatttataaaaatataagcattacagtgacag

SEQ ID NO: 44434 - DNA, 50 bp, synthetic construct
  source 1..50: mol_type = other DNA
gaatataaatcccggaaatgaggagggtttcattttatcccattattcaa

SEQ ID NO: 44435 - DNA, 50 bp, synthetic construct
  source 1..50: mol_type = other DNA
cagctccgatatcatagtcaagatttttcttgtacatcagcacccatttt

SEQ ID NO: 44436 - DNA, 50 bp, synthetic construct
  source 1..50: mol_type = other DNA
atttcaccttgaagccatgatagccggcttctatgatgtaaaagtgacca

SEQ ID NO: 44437 - DNA, 50 bp, synthetic construct
  source 1..50: mol_type = other DNA
agcggtggatacatacggaagtctgacacattccgtatggataccggatt

SEQ ID NO: 44438 - DNA, 50 bp, synthetic construct
  source 1..50: mol_type = other DNA
ctacgatggcatcttcgaggagatccatgcgcacgccgatgcgtgcgtca

SEQ ID NO: 44439 - DNA, 50 bp, synthetic construct
  source 1..50: mol_type = other DNA
tgcaagaacgtgttaccagcacgctcgccgtgaaatattacggacttgca

SEQ ID NO: 44440 - DNA, 50 bp, synthetic construct
  source 1..50: mol_type = other DNA
ataccggcgaggaatggatagtgcatgcatataatcgtttatatagataa

SEQ ID NO: 44441 - DNA, 50 bp, synthetic construct
  source 1..50: mol_type = other DNA
cagtaccgtatcggcatttgtaaataccaataaaatttacatcggtactt

SEQ ID NO: 44442 - DNA, 50 bp, synthetic construct
  source 1..50: mol_type = other DNA
agtaaacgaaaggccttcctcatgatgcacgggaaggctttttgtcttgg

SEQ ID NO: 44443 - DNA, 50 bp, synthetic construct
  source 1..50: mol_type = other DNA
cttattagagtagcctatgaacaggtcggttcatcggcaagtatgatatc

SEQ ID NO: 44444 - DNA, 50 bp, synthetic construct
  source 1..50: mol_type = other DNA
tgtaattgtaggttatgacaatcttaagagagttataaccggacattatc

SEQ ID NO: 44445 - DNA, 50 bp, synthetic construct
  source 1..50: mol_type = other DNA
tctggtatctttgcccctgcctccaaggaggcatgacttatgttaccgag

SEQ ID NO: 44446 - DNA, 50 bp, synthetic construct
  source 1..50: mol_type = other DNA
gccagcccgggaacaaacctggctggagctttgtgagttcatcggcaatc

SEQ ID NO: 44447 - DNA, 50 bp, synthetic construct
  source 1..50: mol_type = other DNA
tacagctatatgcaagaaattgcaaatagcgaggtatgagaatggctgta

SEQ ID NO: 44448 - DNA, 50 bp, synthetic construct
  source 1..50: mol_type = other DNA
cagcgaaaattcctgcaagaagccagtgaatcttggcataatttccgcga

SEQ ID NO: 44449 - DNA, 50 bp, synthetic construct
  source 1..50: mol_type = other DNA
agatgtaatcgtatctttttctgatctcagatacagatacaggtacagag

SEQ ID NO: 44450 - DNA, 50 bp, synthetic construct
  source 1..50: mol_type = other DNA
taccacaagtttatgaaattttcaattgcaaaatcaaacagcttgtgcta

SEQ ID NO: 44451 - DNA, 50 bp, synthetic construct
  source 1..50: mol_type = other DNA
gtggtcagcctggccgcttccatttctcgcgatatcctcaatcggaacgg

SEQ ID NO: 44452 - DNA, 50 bp, synthetic construct
  source 1..50: mol_type = other DNA
gtgtgaaagatgggctgattccatcagatgaacgcgcacatcgtcgccct

SEQ ID NO: 44453 - DNA, 50 bp, synthetic construct
  source 1..50: mol_type = other DNA
cggtttgtaagatgattgtcaccgtgcgctgacacctcctttttcagcaa

SEQ ID NO: 44454 - DNA, 50 bp, synthetic construct
  source 1..50: mol_type = other DNA
tgggcaggacaaaattttttacctaatcgccaatttttttgccctgaaat

SEQ ID NO: 44455 - DNA, 50 bp, synthetic construct
  source 1..50: mol_type = other DNA
ttctccgcatcagatgcggccgatgcaatcgccaatttttttgccctgaa

SEQ ID NO: 44456 - DNA, 50 bp, synthetic construct
  source 1..50: mol_type = other DNA
tagatcgaaggatttcttgaagctttgtatggattggaatgcttttcttc

SEQ ID NO: 44457 - DNA, 50 bp, synthetic construct
  source 1..50: mol_type = other DNA
caggtattccctgtaaagctgtctaagaagctcctgcaccggaagttgaa

SEQ ID NO: 44458 - DNA, 50 bp, synthetic construct
  source 1..50: mol_type = other DNA
tcgttctcctttcaccgcggggcacattccccgcgaaaacaagtgaatat

SEQ ID NO: 44459 - DNA, 50 bp, synthetic construct
  source 1..50: mol_type = other DNA
attttattttgaaacattcttttgaataaaagaatgagtgtccataacat

SEQ ID NO: 44460 - DNA, 50 bp, synthetic construct
  source 1..50: mol_type = other DNA
gctgcaatcaattccccgattccttcatgaatctgtcaaatttttatttt

SEQ ID NO: 44461 - DNA, 50 bp, synthetic construct
  source 1..50: mol_type = other DNA
atagtgaaattatagatgtgctaacataagcacatgcttgggttcactcc

SEQ ID NO: 44462 - DNA, 50 bp, synthetic construct
  source 1..50: mol_type = other DNA
aagtaccgatgtaaattttattggtatttacaaatgccgatacggtactg

SEQ ID NO: 44463 - DNA, 50 bp, synthetic construct
  source 1..50: mol_type = other DNA
tatgacaatatatttgaaaaattatataatagttcttggatatcgttttt

SEQ ID NO: 44464 - DNA, 50 bp, synthetic construct
  source 1..50: mol_type = other DNA
cgaatctacatttgatgagcaaaaataaataatctagaggaatgcattgt

SEQ ID NO: 44465 - DNA, 50 bp, synthetic construct
  source 1..50: mol_type = other DNA
ggataaactcttgcctttttctatacatagaaaaagaagaggttttagag

SEQ ID NO: 44466 - DNA, 50 bp, synthetic construct
  source 1..50: mol_type = other DNA
tggaacaccgtcaatctgctgctccgctgacgcacctttccagggtggct

SEQ ID NO: 44467 - DNA, 50 bp, synthetic construct
  source 1..50: mol_type = other DNA
ctgcagaacatctactatctgaagcgcagtttttaaggactgttttacaa

SEQ ID NO: 44468 - DNA, 50 bp, synthetic construct
  source 1..50: mol_type = other DNA
ataccattatggccaaaaagcatggccggtcttcatggcgagaacggcat

SEQ ID NO: 44469 - DNA, 50 bp, synthetic construct
  source 1..50: mol_type = other DNA
ctatttgattgctggacagcgctgtccagcggcgatgcgcatttccggtg

SEQ ID NO: 44470 - DNA, 50 bp, synthetic construct
  source 1..50: mol_type = other DNA
tgaaacgggctcaccttttcccatttaaaggaaaatgctgtcccgtttca

SEQ ID NO: 44471 - DNA, 50 bp, synthetic construct
  source 1..50: mol_type = other DNA
cttccgcgcgttggcctcccgcttgcctgcggatcctcatactgcggatg

SEQ ID NO: 44472 - DNA, 50 bp, synthetic construct
  source 1..50: mol_type = other DNA
cgctaagtctacatcaaagctaaaatctttgcttcgtgttcctcttagca

SEQ ID NO: 44473 - DNA, 50 bp, synthetic construct
  source 1..50: mol_type = other DNA
ggaaacttatacatccatggcttaatttttaccttgtaatattttttata

SEQ ID NO: 44474 - DNA, 50 bp, synthetic construct
  source 1..50: mol_type = other DNA
atcgcaggtttatacttgaaacaaaaatacttgacaaataatattctttg

SEQ ID NO: 44475 - DNA, 50 bp, synthetic construct
  source 1..50: mol_type = other DNA
agtaaaaaaagttgctaaaaaagcaaggttatttcgccgttttcttcggt

SEQ ID NO: 44476 - DNA, 50 bp, synthetic construct
  source 1..50: mol_type = other DNA
cgtcagcttctgatccagcaggagctctcctgctggcagagcctatgaac

SEQ ID NO: 44477 - DNA, 50 bp, synthetic construct
  source 1..50: mol_type = other DNA
ccggatcctgatcttgcagaggcttcctgctctggttcctctgcttccgg

SEQ ID NO: 44478 - DNA, 50 bp, synthetic construct
  source 1..50: mol_type = other DNA
acggaatgattttaccccccccccccggggcccgggtggtcctgtgccgg

SEQ ID NO: 44479 - DNA, 50 bp, synthetic construct
  source 1..50: mol_type = other DNA
ttcattattcatattataccatatttatatatgtgaatacagcttaccaa

SEQ ID NO: 44480 - DNA, 50 bp, synthetic construct
  source 1..50: mol_type = other DNA
caatttctttcaaaatttttccgttttggaaaaacttttgtataaggggt

SEQ ID NO: 44481 - DNA, 50 bp, synthetic construct
  source 1..50: mol_type = other DNA
catgtcaaaacgtgcacatcattaaactcaatttggcctcgtttggggaa

SEQ ID NO: 44482 - DNA, 50 bp, synthetic construct
  source 1..50: mol_type = other DNA
ttttgggatgtaacgaaaggagggtatccagctgagctacgaggccaaca

SEQ ID NO: 44483 - DNA, 50 bp, synthetic construct
  source 1..50: mol_type = other DNA
aaggtattgcaaaaagcactatgccatcatcaaaccagctgcaataccta

SEQ ID NO: 44484 - DNA, 50 bp, synthetic construct
  source 1..50: mol_type = other DNA
ccgtcggaaacagctgaaagattttctcttctcctcactccaactttcgg

SEQ ID NO: 44485 - DNA, 50 bp, synthetic construct
  source 1..50: mol_type = other DNA
aaaacacgatatatttgccgtttttaaacgcaggaaatatccagtcattt

SEQ ID NO: 44486 - DNA, 50 bp, synthetic construct
  source 1..50: mol_type = other DNA
aggcaggccttcagcgccgtctcgctggaggaggagctgaaagagtgcct

SEQ ID NO: 44487 - DNA, 50 bp, synthetic construct
  source 1..50: mol_type = other DNA
caatagaacggtcagcgagatcatccatctcgtcctcgacgggctccata

SEQ ID NO: 44488 - DNA, 50 bp, synthetic construct
  source 1..50: mol_type = other DNA
ctgacctacgaaaacaaaatccgaattctaccatcgttatgcgatgttca

SEQ ID NO: 44489 - DNA, 50 bp, synthetic construct
  source 1..50: mol_type = other DNA
gaagtcgacgagttctgtaagaaatatatctttccggagcatccggcaag

SEQ ID NO: 44490 - DNA, 50 bp, synthetic construct
  source 1..50: mol_type = other DNA
gcataggttttatttttatacatttttttgaatattgtgaaactggcact

SEQ ID NO: 44491 - DNA, 50 bp, synthetic construct
  source 1..50: mol_type = other DNA
tttcgggccggtttcctacttcggatcccatacggatacacggtgcgaaa

SEQ ID NO: 44492 - DNA, 50 bp, synthetic construct
  source 1..50: mol_type = other DNA
atacttgcaccgggaaaaacaacagatccgatctttacaagcctgacagc

SEQ ID NO: 44493 - DNA, 50 bp, synthetic construct
  source 1..50: mol_type = other DNA
tccttcatgtagcgtagacgtcaacattgcgctctgcattaccgtaaggg

SEQ ID NO: 44494 - DNA, 50 bp, synthetic construct
  source 1..50: mol_type = other DNA
aacggcagtatatttggtgatggtcgcttaccgcctgcgatattaccgtt

SEQ ID NO: 44495 - DNA, 50 bp, synthetic construct
  source 1..50: mol_type = other DNA
gaattgtttaacaatgtttccaaatttttgagatcgatgtccagcagctc

SEQ ID NO: 44496 - DNA, 50 bp, synthetic construct
  source 1..50: mol_type = other DNA
ttcgaattaaccggtaatgttgctaaaacggcaaggtaaaggatttcgta

SEQ ID NO: 44497 - DNA, 50 bp, synthetic construct
  source 1..50: mol_type = other DNA
gggcggcgatgaccttcccgagcaaggctctgctatcagcagggcctctt

SEQ ID NO: 44498 - DNA, 50 bp, synthetic construct
  source 1..50: mol_type = other DNA
ttgctattattggctttcagagtgatatatatgaaagattattggcgcac

SEQ ID NO: 44499 - DNA, 50 bp, synthetic construct
  source 1..50: mol_type = other DNA
aaagcggaaggggaaagacttctgtgatgaagccttgttgtttttggaag

SEQ ID NO: 44500 - DNA, 50 bp, synthetic construct
  source 1..50: mol_type = other DNA
ggccttttcaacgcctatgactacccttatctttcggaacgtattttgcc

SEQ ID NO: 44501 - DNA, 50 bp, synthetic construct
  source 1..50: mol_type = other DNA
ctgtgaaactacaaacaaattaatttattcttatttttgtatagaatgga

SEQ ID NO: 44502 - DNA, 50 bp, synthetic construct
  source 1..50: mol_type = other DNA
gcaatcacccttttggttgatactgcacagcttacagcaagggtgcttgc

SEQ ID NO: 44503 - DNA, 50 bp, synthetic construct
  source 1..50: mol_type = other DNA
ctttaactcggctttttcacaagatttccgatgatttgcccgtttttgag

SEQ ID NO: 44504 - DNA, 50 bp, synthetic construct
  source 1..50: mol_type = other DNA
gctgccgcgcatcgtatatttcgtcggagaaaaatcaagcgtaaagtgtg

SEQ ID NO: 44505 - DNA, 50 bp, synthetic construct
  source 1..50: mol_type = other DNA
aaattaactgaaataaatcgtaaaactatactctttatatcagcatattt

SEQ ID NO: 44506 - DNA, 50 bp, synthetic construct
  source 1..50: mol_type = other DNA
gaggaagaatataaggtcgtactaatttttccatccttagcaataagctg

SEQ ID NO: 44507 - DNA, 50 bp, synthetic construct
  source 1..50: mol_type = other DNA
tgccttaccacttggctacaccccatcaggtgtgcggatggcgcgcggca

SEQ ID NO: 44508 - DNA, 50 bp, synthetic construct
  source 1..50: mol_type = other DNA
cttttttttcattaatcataattttcgtatgatgataacagaaaaaataa

SEQ ID NO: 44509 - DNA, 50 bp, synthetic construct
  source 1..50: mol_type = other DNA
tttgtaattttatttgacctatgttaaaaaagaaaatgataaattattaa

SEQ ID NO: 44510 - DNA, 50 bp, synthetic construct
  source 1..50: mol_type = other DNA
ttcgtgtaaaggttcaaagggtgtgcacaccctccagacctttcattaaa

SEQ ID NO: 44511 - DNA, 50 bp, synthetic construct
  source 1..50: mol_type = other DNA
ttgatacaataacacgattatggcaaatttctcgcgctgcattgtatcaa

SEQ ID NO: 44512 - DNA, 50 bp, synthetic construct
  source 1..50: mol_type = other DNA
atctttttgccgggcgtctttttcataaaaataacagccagcagagaacg

SEQ ID NO: 44513 - DNA, 50 bp, synthetic construct
  source 1..50: mol_type = other DNA
tatggtatctgaaaggaggaggtttaatccaaaatgactcagaacaacac

SEQ ID NO: 44514 - DNA, 50 bp, synthetic construct
  source 1..50: mol_type = other DNA
tcttcaggaacttacggtcggaatatattccgatcggcagacttttttct

SEQ ID NO: 44515 - DNA, 50 bp, synthetic construct
  source 1..50: mol_type = other DNA
tttaagatacaaaaatggatttataaacatcacaattttgtttaattaat

SEQ ID NO: 44516 - DNA, 50 bp, synthetic construct
  source 1..50: mol_type = other DNA
ttggaagaagctcaccacaacatcagaattttgtggtatccttgttggtt

SEQ ID NO: 44517 - DNA, 50 bp, synthetic construct
  source 1..50: mol_type = other DNA
tatgtcattgatttctcctgttggtttggcattgagatagaaatgacagg

SEQ ID NO: 44518 - DNA, 50 bp, synthetic construct
  source 1..50: mol_type = other DNA
cttgaaaaatataaggagtatgcgtcttttcgctccttattttcttgatt

SEQ ID NO: 44519 - DNA, 50 bp, synthetic construct
  source 1..50: mol_type = other DNA
actcaggtatatatcgtcaacacgataatgtccccaaatatggcctgtat

SEQ ID NO: 44520 - DNA, 50 bp, synthetic construct
  source 1..50: mol_type = other DNA
aagcggataccgtcaatatatggctactgaaatatctacgcattctcttt

SEQ ID NO: 44521 - DNA, 50 bp, synthetic construct
  source 1..50: mol_type = other DNA
ttataatcgttacatttatagcagcggtgcgggcaatgatctcgttaatg

SEQ ID NO: 44522 - DNA, 50 bp, synthetic construct
  source 1..50: mol_type = other DNA
ccaagaccgcctctattctggatagctttccagactgcgggctgtcctgg

SEQ ID NO: 44523 - DNA, 50 bp, synthetic construct
  source 1..50: mol_type = other DNA
agcaggaaaaagattctacggaaagcaaaattcttaaggatttaatgatc

SEQ ID NO: 44524 - DNA, 50 bp, synthetic construct
  source 1..50: mol_type = other DNA
tatataatattacaaggagttttaaatattacatattgtgatattatatc

SEQ ID NO: 44525 - DNA, 50 bp, synthetic construct
  source 1..50: mol_type = other DNA
tgttccttttctgttcttcgttctttccttggcataaactgaaaaaaata

SEQ ID NO: 44526 - DNA, 50 bp, synthetic construct
  source 1..50: mol_type = other DNA
tctgtaagcagtatgcagtttattgctattttgtcaatacttttttgtga

SEQ ID NO: 44527 - DNA, 50 bp, synthetic construct
  source 1..50: mol_type = other DNA
gtacaattttcttttgtttgactgcaaagacaaacaactttgtgagcaaa

SEQ ID NO: 44528 - DNA, 50 bp, synthetic construct
  source 1..50: mol_type = other DNA
gcggcggtcgatatccgggtgtagcgctgcacccggaacgggaggtgcgc

SEQ ID NO: 44529 - DNA, 50 bp, synthetic construct
  source 1..50: mol_type = other DNA
acttgtgcggttctatggatataatgttaaaagaccagaaaagaaacgat

SEQ ID NO: 44530 - DNA, 50 bp, synthetic construct
  source 1..50: mol_type = other DNA
tgaaagacggtcacctatataaaatgctttcgttattatcgctttcttca

SEQ ID NO: 44531 - DNA, 50 bp, synthetic construct
  source 1..50: mol_type = other DNA
gtttctctaccgcgcggccatccgcccagatggaacggcgggcttgactt

SEQ ID NO: 44532 - DNA, 50 bp, synthetic construct
  source 1..50: mol_type = other DNA
acttgtccgcagtctttgcaggcggagaatatcaaagactgcggtgtata

SEQ ID NO: 44533 - DNA, 50 bp, synthetic construct
  source 1..50: mol_type = other DNA
cgtggaaagcgcatagaaaaaggggaatacctttcacctttctttccttg

SEQ ID NO: 44534 - DNA, 50 bp, synthetic construct
  source 1..50: mol_type = other DNA
atagctaccaccgaatgttccgggaagcggaaaacagcgggctatgcccg

SEQ ID NO: 44535 - DNA, 50 bp, synthetic construct
  source 1..50: mol_type = other DNA
gaacacagaaaaacggtaagccagtttcggctttttgtgttataaggttt

SEQ ID NO: 44536 - DNA, 50 bp, synthetic construct
  source 1..50: mol_type = other DNA
tcatggaagtatcggaagaagttgcagaaattcttttatcttgagagcca

SEQ ID NO: 44537 - DNA, 50 bp, synthetic construct
  source 1..50: mol_type = other DNA
atggctgcattggaagatttaaaaaacagcaaagaaaataatgctatcat

SEQ ID NO: 44538 - DNA, 50 bp, synthetic construct
  source 1..50: mol_type = other DNA
cgtccccggtgctgctccaactgtccgggtttaccccaccgtcgggtccc

SEQ ID NO: 44539 - DNA, 50 bp, synthetic construct
  source 1..50: mol_type = other DNA
tcagtgtatgagccgtctgcaatggctattggggatttgaaccccagacc

SEQ ID NO: 44540 - DNA, 50 bp, synthetic construct
  source 1..50: mol_type = other DNA
aaaaggacatagcgatacccccttgataggtggtatatatggaaaaattg

SEQ ID NO: 44541 - DNA, 50 bp, synthetic construct
  source 1..50: mol_type = other DNA
ccatccaggccatgaatcagcttcgcgcttgcgactcatgatctggaagg

SEQ ID NO: 44542 - DNA, 50 bp, synthetic construct
  source 1..50: mol_type = other DNA
tggcatttctggaatcaagtgctccggttcatctgccagaatgatgcccg

SEQ ID NO: 44543 - DNA, 50 bp, synthetic construct
  source 1..50: mol_type = other DNA
cgcaccgtctcgtccgaccgcgaccggacgcggccgataaagtgcaagcg

SEQ ID NO: 44544 - DNA, 50 bp, synthetic construct
  source 1..50: mol_type = other DNA
cccgcagccgggcagggcgctgccgcggcacacagctgccgggactaaaa

SEQ ID NO: 44545 - DNA, 50 bp, synthetic construct
  source 1..50: mol_type = other DNA
tgaatatgaccgtagaggaagcggtgggcgcagactacgccagaaattcc

SEQ ID NO: 44546 - DNA, 50 bp, synthetic construct
  source 1..50: mol_type = other DNA
atcacatatcaagataaggagggtatttccttcttcagtgtataaagttc

SEQ ID NO: 44547 - DNA, 50 bp, synthetic construct
  source 1..50: mol_type = other DNA
gaaaaaagcacccaaggtttcaaaattttccagccacgagagtatttttt

SEQ ID NO: 44548 - DNA, 50 bp, synthetic construct
  source 1..50: mol_type = other DNA
ccgccgtatcataaaccacaagtccgaacttggagcgtatttttcggtaa

SEQ ID NO: 44549 - DNA, 50 bp, synthetic construct
  source 1..50: mol_type = other DNA
atcccctatgtgttaggttcgctttaagttacaaaattagcatagcgtct

SEQ ID NO: 44550 - DNA, 50 bp, synthetic construct
  source 1..50: mol_type = other DNA
tcgtaatacttctgctgagtttcaaagctcaccacgaaacagtacccgga

SEQ ID NO: 44551 - DNA, 50 bp, synthetic construct
  source 1..50: mol_type = other DNA
acaaaaaggcccacctggtcaccatcatacgcatagggcagccccatttc

SEQ ID NO: 44552 - DNA, 50 bp, synthetic construct
  source 1..50: mol_type = other DNA
catcgcagatttaagctcatggtatgcaaaaagagccgcaatcatgcggc

SEQ ID NO: 44553 - DNA, 50 bp, synthetic construct
  source 1..50: mol_type = other DNA
ggaaaagtcgtcccatgttcttaacgctaagcgcaatgaaatactaatag

SEQ ID NO: 44554 - DNA, 50 bp, synthetic construct
  source 1..50: mol_type = other DNA
accgctttgaaatcgcttctgccaaaggtgttcaagcccgtcaaagtccc

SEQ ID NO: 44555 - DNA, 50 bp, synthetic construct
  source 1..50: mol_type = other DNA
caaacccctgctatgtgcttttctacagcaaagcctgaatcaatattttg

SEQ ID NO: 44556 - DNA, 50 bp, synthetic construct
  source 1..50: mol_type = other DNA
gtgttcgtacaagtatatttgctattaagcaaatttactccgacaatgca

SEQ ID NO: 44557 - DNA, 50 bp, synthetic construct
  source 1..50: mol_type = other DNA
cgaaaacttacacattgcagtatgctccgactaaaataggtatattcgga

SEQ ID NO: 44558 - DNA, 50 bp, synthetic construct
  source 1..50: mol_type = other DNA
caaataactttaaagcacacctggaagaatgtcaagcggcgagatatttg

SEQ ID NO: 44559 - DNA, 50 bp, synthetic construct
  source 1..50: mol_type = other DNA
gcaggaaaaccttatgtgaatgcccggacatctggcaaagtctacatttc

SEQ ID NO: 44560 - DNA, 50 bp, synthetic construct
  source 1..50: mol_type = other DNA
gatacttgataaaaatacaggtgaaaaacccttaatttgtatcattattc

SEQ ID NO: 44561 - DNA, 50 bp, synthetic construct
  source 1..50: mol_type = other DNA
ttttcaagcatcaaaaaaggtcttccctctacttatcggagatgccagag

SEQ ID NO: 44562 - DNA, 50 bp, synthetic construct
  source 1..50: mol_type = other DNA
ggacgcgtttttttgatttttccatttgcaataaaaaaaagcacccgaag

SEQ ID NO: 44563 - DNA, 50 bp, synthetic construct
  source 1..50: mol_type = other DNA
gtagcgcagttttggtagcgcgcttgaatctggcaactgtactgcaggca

SEQ ID NO: 44564 - DNA, 50 bp, synthetic construct
  source 1..50: mol_type = other DNA
ccttattttcataccttatataggaggatattattgttttgaatataagc

SEQ ID NO: 44565 - DNA, 50 bp, synthetic construct
  source 1..50: mol_type = other DNA
cccgcaaaatcgcaaacaaaaagatgcgctgctcggcgcggcttttattc

SEQ ID NO: 44566 - DNA, 50 bp, synthetic construct
  source 1..50: mol_type = other DNA
accgtctttagcaaatacacaccgaattgtgctgactgggcttagaaaag

SEQ ID NO: 44567 - DNA, 50 bp, synthetic construct
  source 1..50: mol_type = other DNA
tcggaaaaatgaacagttttgccgaccggcgacgctgtcacgcttcacgg

SEQ ID NO: 44568 - DNA, 50 bp, synthetic construct
  source 1..50: mol_type = other DNA
cttgcaatacgccagtattcctgcgttgatgagtacacaattattggaac

SEQ ID NO: 44569 - DNA, 50 bp, synthetic construct
  source 1..50: mol_type = other DNA
tttctgaagggcattgcccgtctttatctgcgaaatatgctgcacgaaaa

SEQ ID NO: 44570 - DNA, 50 bp, synthetic construct
  source 1..50: mol_type = other DNA
ataaacaatttaaaataataatataatttttaaaattttctgttttttat

SEQ ID NO: 44571 - DNA, 50 bp, synthetic construct
  source 1..50: mol_type = other DNA
gcatatattttacaggaggatgattaactatcaatctatataatatatac

SEQ ID NO: 44572 - DNA, 50 bp, synthetic construct
  source 1..50: mol_type = other DNA
cctgtagcacggaaagtcaatagagttcttttgccgtctcgttccacatc

SEQ ID NO: 44573 - DNA, 50 bp, synthetic construct
  source 1..50: mol_type = other DNA
gaaacacgggcgtatccggcgacacggcgaacaggagcagctcgtttcct

SEQ ID NO: 44574 - DNA, 50 bp, synthetic construct
  source 1..50: mol_type = other DNA
aatggcaaatcctatcgtgacttttgatttttatgagttgttttataatt

SEQ ID NO: 44575 - DNA, 50 bp, synthetic construct
  source 1..50: mol_type = other DNA
ttaccagccgtttccggctgtctacgcagataatcgcccacgttatcccg

SEQ ID NO: 44576 - DNA, 50 bp, synthetic construct
  source 1..50: mol_type = other DNA
gttgttaccgtatcggcttgcccggacctgacagccgatacggtcacggc

SEQ ID NO: 44577 - DNA, 50 bp, synthetic construct
  source 1..50: mol_type = other DNA
cagtgcgttccaaaatatctcgtccaccgcaagagtttatatacgcaagc

SEQ ID NO: 44578 - DNA, 50 bp, synthetic construct
  source 1..50: mol_type = other DNA
acaacaccatcggcatagtgttggaaaggagaaaagaggcatggtgcctc

SEQ ID NO: 44579 - DNA, 50 bp, synthetic construct
  source 1..50: mol_type = other DNA
attgtattaagaaaaccaatttatatataaaggtgatgcagaaatgcaaa

SEQ ID NO: 44580 - DNA, 50 bp, synthetic construct
  source 1..50: mol_type = other DNA
tatataccgattatacaacgtgattaatcaccagataggtgtccggtgct

SEQ ID NO: 44581 - DNA, 50 bp, synthetic construct
  source 1..50: mol_type = other DNA
gcgcatcgacgacctcggccgcgtcgatctcagaaccgtcgtccatgcag

SEQ ID NO: 44582 - DNA, 50 bp, synthetic construct
  source 1..50: mol_type = other DNA
ggccatcggcgtcgggcagtaccagcacgaagatatgccgtactttttgg

SEQ ID NO: 44583 - DNA, 50 bp, synthetic construct
  source 1..50: mol_type = other DNA
cggaagacggtcccgtaagaatcatatcgtttgttcggtactctctttgg

SEQ ID NO: 44584 - DNA, 50 bp, synthetic construct
  source 1..50: mol_type = other DNA
aaaggcaaaaccgcgggcaagtccgcagctgctttggcggacgtccctta

SEQ ID NO: 44585 - DNA, 50 bp, synthetic construct
  source 1..50: mol_type = other DNA
ttaaattacctatagttaatatttcttattattaaattgggtaactttat

SEQ ID NO: 44586 - DNA, 50 bp, synthetic construct
  source 1..50: mol_type = other DNA
ttcgccttcgactccccatgtcttatatataaataatgtagaaaggcact

SEQ ID NO: 44587 - DNA, 50 bp, synthetic construct
  source 1..50: mol_type = other DNA
gctttattacaaaagtaaggaatccataaatctccctattgtccaaaact

SEQ ID NO: 44588 - DNA, 50 bp, synthetic construct
  source 1..50: mol_type = other DNA
aagggactacacagggtaacggtctgtaccctttgtctgtgtattcctta

SEQ ID NO: 44589 - DNA, 50 bp, synthetic construct
  source 1..50: mol_type = other DNA
attgatgtaaatctgaaagggacgataaagctatgcagcagcacaacttc

SEQ ID NO: 44590 - DNA, 50 bp, synthetic construct
  source 1..50: mol_type = other DNA
gaatctttttatcttcaaaaatttgtatcttgacgcatacaaaaagtttg

SEQ ID NO: 44591 - DNA, 50 bp, synthetic construct
  source 1..50: mol_type = other DNA
cgggctggtactgcggtactgccgccggtctctaccgcgaaacctgcgtg

SEQ ID NO: 44592 - DNA, 50 bp, synthetic construct
  source 1..50: mol_type = other DNA
tttttgcaaatgaaagaatagctgaagagtgtgaattgaatacttcgtct

SEQ ID NO: 44593 - DNA, 50 bp, synthetic construct
  source 1..50: mol_type = other DNA
tgtttctaaattgtccgaaactgaacaaaagcaacgtgaaaaaagactgg

SEQ ID NO: 44594 - DNA, 50 bp, synthetic construct
  source 1..50: mol_type = other DNA
gatctgtatacggttatttagccgacattacaaataaaagcgtcgcaggc

SEQ ID NO: 44595 - DNA, 50 bp, synthetic construct
  source 1..50: mol_type = other DNA
cgaaaatggcacaattactttacacatctcaataaagcggcgcatttccg

SEQ ID NO: 44596 - DNA, 50 bp, synthetic construct
  source 1..50: mol_type = other DNA
caaaattacggagaaaaaccgcaaatttgagattttgcaaagtaatattg

SEQ ID NO: 44597 - DNA, 50 bp, synthetic construct
  source 1..50: mol_type = other DNA
atttggaagacaaataaagaatatggatatcttgtgtttatcaaccaaat

SEQ ID NO: 44598 - DNA, 50 bp, synthetic construct
  source 1..50: mol_type = other DNA
tttgtgttgcaaaaacaggaggtgaggacaaccccggcgtgctgtccaac

SEQ ID NO: 44599 - DNA, 50 bp, synthetic construct
  source 1..50: mol_type = other DNA
ttggacgcggagctgctgcaaagcgcggccttgaacttctccttctcctc

SEQ ID NO: 44600 - DNA, 50 bp, synthetic construct
  source 1..50: mol_type = other DNA
cggaaggggcagcccacctttaccggccttggcggcagccgccacttcct

SEQ ID NO: 44601 - DNA, 50 bp, synthetic construct
  source 1..50: mol_type = other DNA
cacttgtggtcttgccggaatgtgtacaccagagcgccgaggatgcgggc

SEQ ID NO: 44602 - DNA, 50 bp, synthetic construct
  source 1..50: mol_type = other DNA
gttctgctgaacacatccggcatatttatgtattcacttttcaaagtaca

SEQ ID NO: 44603 - DNA, 50 bp, synthetic construct
  source 1..50: mol_type = other DNA
taccatttattctacgatactcttttcccgttataccctcatcaatatac

SEQ ID NO: 44604 - DNA, 50 bp, synthetic construct
  source 1..50: mol_type = other DNA
aggcgtgagtcttttgcggggcagcatctcctcgcatacgactgccgcgc

SEQ ID NO: 44605 - DNA, 50 bp, synthetic construct
  source 1..50: mol_type = other DNA
acacaaagaggtgcagcatggaatcgatgaatttgctgaccgttttgaaa

SEQ ID NO: 44606 - DNA, 50 bp, synthetic construct
  source 1..50: mol_type = other DNA
atattgcaggaagatgtcctgcacggcagctggaaacggctgcccaatct

SEQ ID NO: 44607 - DNA, 50 bp, synthetic construct
  source 1..50: mol_type = other DNA
aaaattttatattaaaaaattgaatataatgttttttatgatattttgcg

SEQ ID NO: 44608 - DNA, 50 bp, synthetic construct
  source 1..50: mol_type = other DNA
gtacggcaatacgatagcgggaagatcttccatcaggccttctgccgttc

SEQ ID NO: 44609 - DNA, 50 bp, synthetic construct
  source 1..50: mol_type = other DNA
ggatcaatcccattcttccaagaatatgatttatagaatcggagcttaca

SEQ ID NO: 44610 - DNA, 50 bp, synthetic construct
  source 1..50: mol_type = other DNA
caccaggcgacctgttcttccttgcgcacagaatagaaaagttcctggcg

SEQ ID NO: 44611 - DNA, 50 bp, synthetic construct
  source 1..50: mol_type = other DNA
aggcagatatttgtaaaatcaagtactttttattttacatttatttaagc

SEQ ID NO: 44612 - DNA, 50 bp, synthetic construct
  source 1..50: mol_type = other DNA
cgtttcatattcattcactcctttttaatgagttaattgaatatatgacc

SEQ ID NO: 44613 - DNA, 50 bp, synthetic construct
  source 1..50: mol_type = other DNA
actataaaaaaagaaaagaaaaatatatttcaactcacacgctccgtggg

SEQ ID NO: 44614 - DNA, 50 bp, synthetic construct
  source 1..50: mol_type = other DNA
gagtgtcgacagatatatataagttaacttatatatctccaccgaatcga

SEQ ID NO: 44615 - DNA, 50 bp, synthetic construct
  source 1..50: mol_type = other DNA
gaggccagactgcgggagaaattccgcaggttttcaacgcctgcgggctt

SEQ ID NO: 44616 - DNA, 50 bp, synthetic construct
  source 1..50: mol_type = other DNA
gaaaaatcccacagctttgaatggccctatccttgacagtgcggtttttc

SEQ ID NO: 44617 - DNA, 50 bp, synthetic construct
  source 1..50: mol_type = other DNA
atcagacaaaatagatacaaaaattaattttttatgctatattttcttta

SEQ ID NO: 44618 - DNA, 50 bp, synthetic construct
  source 1..50: mol_type = other DNA
ctatataatataatatcattttttataaaaataaatattatcatgtaaca

SEQ ID NO: 44619 - DNA, 50 bp, synthetic construct
  source 1..50: mol_type = other DNA
cacagaaaatataagaataaccaggaatggttatgatttaggcaagtgtg

SEQ ID NO: 44620 - DNA, 50 bp, synthetic construct
  source 1..50: mol_type = other DNA
caacccgcgggccgcatatatgcggccgtggctgtgcgggtgctggagca

SEQ ID NO: 44621 - DNA, 50 bp, synthetic construct
  source 1..50: mol_type = other DNA
ttgcacagatgttccgccggaacgaagtttagtgcggaacagcttggcga

SEQ ID NO: 44622 - DNA, 50 bp, synthetic construct
  source 1..50: mol_type = other DNA
agcgtgaatcccattcttgtgggacctcatatgctaatgggaggcaaaca

SEQ ID NO: 44623 - DNA, 50 bp, synthetic construct
  source 1..50: mol_type = other DNA
gtcgattcgcaatggcggtgcagatgtctgtcgacccattgtaaaacaca

SEQ ID NO: 44624 - DNA, 50 bp, synthetic construct
  source 1..50: mol_type = other DNA
cattcaggcctctttcccccgaaaaagttttgcggtttacagccgatatt

SEQ ID NO: 44625 - DNA, 50 bp, synthetic construct
  source 1..50: mol_type = other DNA
ataataaaagagctttattatttctgtaacgcatatccacccctttttat

SEQ ID NO: 44626 - DNA, 50 bp, synthetic construct
  source 1..50: mol_type = other DNA
ttataaaaatacttaaaaataaaaatttcatcataggtgaatttttttat

SEQ ID NO: 44627 - DNA, 50 bp, synthetic construct
  source 1..50: mol_type = other DNA
agctgctctatggagagctcctccatggtctttactaagatatctcagga

SEQ ID NO: 44628 - DNA, 50 bp, synthetic construct
  source 1..50: mol_type = other DNA
tattgctatactttagttttgtaaattcacaattctttttgatatcatcc

SEQ ID NO: 44629 - DNA, 50 bp, synthetic construct
  source 1..50: mol_type = other DNA
gttcttaatttgctcaacagtcggttccgcctgtttccttcattttctcg

SEQ ID NO: 44630 - DNA, 50 bp, synthetic construct
  source 1..50: mol_type = other DNA
cttcactaagaaaagcctcctgtgcaaagagcagatatttcacagtctcc

SEQ ID NO: 44631 - DNA, 50 bp, synthetic construct
  source 1..50: mol_type = other DNA
tcttgagcaaggcccccaccgtgtacgcagagtgggggcatttgtcaacc

SEQ ID NO: 44632 - DNA, 50 bp, synthetic construct
  source 1..50: mol_type = other DNA
actaaaaagaaaaaagaaagtatatattcaaaagcaccttttattttagc

SEQ ID NO: 44633 - DNA, 50 bp, synthetic construct
  source 1..50: mol_type = other DNA
tacagttatggaaggagtcgatgagacgcaggaagcattagataaccctg

SEQ ID NO: 44634 - DNA, 50 bp, synthetic construct
  source 1..50: mol_type = other DNA
gaaatcatgaaaggtctgacggaatactgcaacagaccctttttgtttga

SEQ ID NO: 44635 - DNA, 50 bp, synthetic construct
  source 1..50: mol_type = other DNA
ggaaaacgtgataaaataacaatgctgagggcatcttcacaggcttttgt

SEQ ID NO: 44636 - DNA, 50 bp, synthetic construct
  source 1..50: mol_type = other DNA
gtttcctgtagaaaatttgttttacttattcaaaaatgccccacggattg

SEQ ID NO: 44637 - DNA, 50 bp, synthetic construct
  source 1..50: mol_type = other DNA
ttgtcaatcttccccttataaaacaaattttactgatttaacatcttaaa

SEQ ID NO: 44638 - DNA, 50 bp, synthetic construct
  source 1..50: mol_type = other DNA
gatattccgtgatagaattcattacaccatagatattgaaacggcatctg

SEQ ID NO: 44639 - DNA, 50 bp, synthetic construct
  source 1..50: mol_type = other DNA
tagaattcattacaatctgttctagtccgagcagacatggtgtcatgctc

SEQ ID NO: 44640 - DNA, 50 bp, synthetic construct
  source 1..50: mol_type = other DNA
atacggtcggatagaaggcaaggtgaacctgataatatacaattccttac

SEQ ID NO: 44641 - DNA, 50 bp, synthetic construct
  source 1..50: mol_type = other DNA
ttatcaagcttttgtatctcctcagctggtaaaatacgcaagctctatga

SEQ ID NO: 44642 - DNA, 50 bp, synthetic construct
  source 1..50: mol_type = other DNA
ctcgccgctcatgacgttttttatgtttttgatgattcagtagcggcagc

SEQ ID NO: 44643 - DNA, 50 bp, synthetic construct
  source 1..50: mol_type = other DNA
aaggtgcaaaagtggcaggatttaatcaaatgttctaacaactgcacacc

SEQ ID NO: 44644 - DNA, 50 bp, synthetic construct
  source 1..50: mol_type = other DNA
ggttgtaggcttgagtgaaaagccgcttccttcatctcgtccgtccaact

SEQ ID NO: 44645 - DNA, 50 bp, synthetic construct
  source 1..50: mol_type = other DNA
ccaaaatacgaacgaccttgcgacctacacgaagatatcccgtatttttc

SEQ ID NO: 44646 - DNA, 50 bp, synthetic construct
  source 1..50: mol_type = other DNA
tcggggacaggataagcgagccgcggacagcatgtacatcaccaacctgg

SEQ ID NO: 44647 - DNA, 50 bp, synthetic construct
  source 1..50: mol_type = other DNA
agtaaaggcggcagacggaaaagcgtgctcttgcgtatacatcgtatttt

SEQ ID NO: 44648 - DNA, 50 bp, synthetic construct
  source 1..50: mol_type = other DNA
acatatctgaagatcatgaataagttctggttcatcagctttcttctgtg

SEQ ID NO: 44649 - DNA, 50 bp, synthetic construct
  source 1..50: mol_type = other DNA
ctgactgccgtggcggggctgattgctatcaggtccggaacggcaggatc

SEQ ID NO: 44650 - DNA, 50 bp, synthetic construct
  source 1..50: mol_type = other DNA
gcgcagaagtttggcggccccacaccggtgacacccacggcggcttccag

SEQ ID NO: 44651 - DNA, 50 bp, synthetic construct
  source 1..50: mol_type = other DNA
ggagtgcgatccggtgtatgcgttctcaggcagtttcagggcattcgtcc

SEQ ID NO: 44652 - DNA, 50 bp, synthetic construct
  source 1..50: mol_type = other DNA
aacgacttgatataattggctttcagttcggcgtggtatatacgctctgc

SEQ ID NO: 44653 - DNA, 50 bp, synthetic construct
  source 1..50: mol_type = other DNA
tgttttttataaaaacagcccaaccctcctaagtaaaaatatgtaaaaat

SEQ ID NO: 44654 - DNA, 50 bp, synthetic construct
  source 1..50: mol_type = other DNA
cggtactatcttgcctacggcagcaagcgtgtggcggcttattgccgtgt

SEQ ID NO: 44655 - DNA, 50 bp, synthetic construct
  source 1..50: mol_type = other DNA
tgaactctaaaaacaagatgcctaaaaacacatgattaacttagatgaca

SEQ ID NO: 44656 - DNA, 50 bp, synthetic construct
  source 1..50: mol_type = other DNA
agtgttttaagttttcaaaattaacgtttataatgaaatcatcaaaatga

SEQ ID NO: 44657 - DNA, 50 bp, synthetic construct
  source 1..50: mol_type = other DNA
ttgtattgcgaaaaaggaggtgagcgctgacatcccggcacgcaaaaagg

SEQ ID NO: 44658 - DNA, 50 bp, synthetic construct
  source 1..50: mol_type = other DNA
cggacaagataaatcgtcgtcatagctatgaatgtccgaaaagctgtgga

SEQ ID NO: 44659 - DNA, 50 bp, synthetic construct
  source 1..50: mol_type = other DNA
ctgcatcagcagtttttctctatcaaggtataaaaataaaacctatgcac

SEQ ID NO: 44660 - DNA, 50 bp, synthetic construct
  source 1..50: mol_type = other DNA
ctctcaggaagaaatgcgttgcgttttgtcaagctttttctgccaagttt

SEQ ID NO: 44661 - DNA, 50 bp, synthetic construct
  source 1..50: mol_type = other DNA
tgtcgccaatgcttcggtagggaggcagaccaacctttacatgggcggcg

SEQ ID NO: 44662 - DNA, 50 bp, synthetic construct
  source 1..50: mol_type = other DNA
gagattaggacagctacgatagaatattctatatcccctgtcatttgaat

SEQ ID NO: 44663 - DNA, 50 bp, synthetic construct
  source 1..50: mol_type = other DNA
acatatgagagtctaaaaaaacagaataattcttttatgcaataatatgc

SEQ ID NO: 44664 - DNA, 50 bp, synthetic construct
  source 1..50: mol_type = other DNA
ctgggataataaaagatgaaaataatagttttcacctgataaaatccatt

SEQ ID NO: 44665 - DNA, 50 bp, synthetic construct
  source 1..50: mol_type = other DNA
ctatgaacgaacgcttgaaggcaacgctgcctgtagaagtttcttcagat

SEQ ID NO: 44666 - DNA, 50 bp, synthetic construct
  source 1..50: mol_type = other DNA
gtctccgatgcggaactgtttacccggcgacgctgtcacgcttcacggcg

SEQ ID NO: 44667 - DNA, 50 bp, synthetic construct
  source 1..50: mol_type = other DNA
caatgagtgaaagaatcacgaaaatattttcgagttttcattcatcaaca

SEQ ID NO: 44668 - DNA, 50 bp, synthetic construct
  source 1..50: mol_type = other DNA
caaaaaaatgacttagaacaaagttcggacattttacggtgatttttata

SEQ ID NO: 44669 - DNA, 50 bp, synthetic construct
  source 1..50: mol_type = other DNA
tctaaggtttttccctgtctattatatatatcactctgaaagccaataat

SEQ ID NO: 44670 - DNA, 50 bp, synthetic construct
  source 1..50: mol_type = other DNA
ggaagactatgaaaatgaagaaagcgtcctcttctgtctcaaaatcttct

SEQ ID NO: 44671 - DNA, 50 bp, synthetic construct
  source 1..50: mol_type = other DNA
gttccaattcttcttcggtcagctcgagccttctgaacgcagcgaggagt

SEQ ID NO: 44672 - DNA, 50 bp, synthetic construct
  source 1..50: mol_type = other DNA
ctaaccatcggtcgggcaggagttttaagtcctccgaccccaatgctctg

SEQ ID NO: 44673 - DNA, 50 bp, synthetic construct
  source 1..50: mol_type = other DNA
aaaaatcaagttaagaggtgttattttttaaacctcaatactattgtttt

SEQ ID NO: 44674 - DNA, 50 bp, synthetic construct
  source 1..50: mol_type = other DNA
gtgcaagcgctggaggggacggatgcagccgcaccgtctggcgcgtcacc

SEQ ID NO: 44675 - DNA, 50 bp, synthetic construct
  source 1..50: mol_type = other DNA
gaccttgctgtttctcttttctatgcaacacacactaccacaccaagggc

SEQ ID NO: 44676 - DNA, 50 bp, synthetic construct
  source 1..50: mol_type = other DNA
ccccagaaaggtgtgtcagcggattgttccactgataattcttttccgca

SEQ ID NO: 44677 - DNA, 50 bp, synthetic construct
  source 1..50: mol_type = other DNA
cgtatctttatgtcgtttatcgaggcaccgatcaacagtaaaaagaagcg

SEQ ID NO: 44678 - DNA, 50 bp, synthetic construct
  source 1..50: mol_type = other DNA
gtcacggcactccttggaccgaggagcaacgaagcaagtttcgccgtatc

SEQ ID NO: 44679 - DNA, 50 bp, synthetic construct
  source 1..50: mol_type = other DNA
tggtattataatgatatcgtgtccctgttcttatctctcatataatttcg

SEQ ID NO: 44680 - DNA, 50 bp, synthetic construct
  source 1..50: mol_type = other DNA
ggttacataaacagaaaagcacccaaaacattgtttcgtataatgtatat

SEQ ID NO: 44681 - DNA, 50 bp, synthetic construct
  source 1..50: mol_type = other DNA
ttcatgtgctggctgttatttttgtattaaaaacacgccgtctggtagaa

SEQ ID NO: 44682 - DNA, 50 bp, synthetic construct
  source 1..50: mol_type = other DNA
gcgtattccataagggaaggagtgtaaaacgataattccgattaatacgc

SEQ ID NO: 44683 - DNA, 50 bp, synthetic construct
  source 1..50: mol_type = other DNA
ccgccctccttgatctgctcgggcgtgccggaggaaatcaagcaggaggg

SEQ ID NO: 44684 - DNA, 50 bp, synthetic construct
  source 1..50: mol_type = other DNA
tggtccgcctggaagccaaaatggcacttttttatattgcgggcggaccg

SEQ ID NO: 44685 - DNA, 50 bp, synthetic construct
  source 1..50: mol_type = other DNA
aggctttttataccggacttgtaaaaattcaagtttctatcaaaaacatt

SEQ ID NO: 44686 - DNA, 50 bp, synthetic construct
  source 1..50: mol_type = other DNA
atcggcgtaaaccagtagttctccaagccttgcatcacttccgccatgat

SEQ ID NO: 44687 - DNA, 50 bp, synthetic construct
  source 1..50: mol_type = other DNA
caatttgctgtgacatatctattttaaaattgatatcagagattagtgca

SEQ ID NO: 44688 - DNA, 50 bp, synthetic construct
  source 1..50: mol_type = other DNA
aaagagggacgcacgatggtagagtcgcctataatctcacgtccctacaa

SEQ ID NO: 44689 - DNA, 50 bp, synthetic construct
  source 1..50: mol_type = other DNA
attatccccatttaaattagtttctggggaataattaaaaattgcacacc

SEQ ID NO: 44690 - DNA, 50 bp, synthetic construct
  source 1..50: mol_type = other DNA
tgttctgacaaacgacagcataatgggttatagccttgaggcacagaaag

SEQ ID NO: 44691 - DNA, 50 bp, synthetic construct
  source 1..50: mol_type = other DNA
agaagattttgagacagaagaggacgctttcttcattttcatagtcttcc

SEQ ID NO: 44692 - DNA, 50 bp, synthetic construct
  source 1..50: mol_type = other DNA
ctgtttataatagcatatttttgaaatcaccttcttgatattatgtaaaa

SEQ ID NO: 44693 - DNA, 50 bp, synthetic construct
  source 1..50: mol_type = other DNA
caagtgttattaagaaaaatatttgatgattgtttttttgttttttattt

SEQ ID NO: 44694 - DNA, 50 bp, synthetic construct
  source 1..50: mol_type = other DNA
aaagcggcaggccgtctcctttttcagacaaggaagttgcccgcctcact

SEQ ID NO: 44695 - DNA, 50 bp, synthetic construct
  source 1..50: mol_type = other DNA
gctcgtcttttttgccgttaacttttcggttatttccataatatcacctc

SEQ ID NO: 44696 - DNA, 50 bp, synthetic construct
  source 1..50: mol_type = other DNA
actaattttatcattctttgaaaatatttttatgaataatactggttacc

SEQ ID NO: 44697 - DNA, 50 bp, synthetic construct
  source 1..50: mol_type = other DNA
tccacagataaaagttcatgcagtcagctgtctgaactcagatctacttt

SEQ ID NO: 44698 - DNA, 50 bp, synthetic construct
  source 1..50: mol_type = other DNA
ccgccaccttgagctttccttgatcgatcatcgaatcgccgtaggcacga

SEQ ID NO: 44699 - DNA, 50 bp, synthetic construct
  source 1..50: mol_type = other DNA
agagcgaatatgaacgggaaaggaggggcgtacccggacatattctcttt

SEQ ID NO: 44700 - DNA, 50 bp, synthetic construct
  source 1..50: mol_type = other DNA
tggacggaggagatgcgggagcaggcctgctccaataaatcctttactgc

SEQ ID NO: 44701 - DNA, 50 bp, synthetic construct
  source 1..50: mol_type = other DNA
ataaatagcaaacgtatatttggaataccaaatataaaaaaactatctat

SEQ ID NO: 44702 - DNA, 50 bp, synthetic construct
  source 1..50: mol_type = other DNA
ttatttaaaatacaaaaatacaactacttgtattttatgagatacaaaaa

SEQ ID NO: 44703 - DNA, 50 bp, synthetic construct
  source 1..50: mol_type = other DNA
gaaagaaaggtgaaaggtatcgcagataagatctatttcaccttttttgc

SEQ ID NO: 44704 - DNA, 50 bp, synthetic construct
  source 1..50: mol_type = other DNA
tcttgcaaatatcagtagtttcatatttttttaatctgttattcaaatga

SEQ ID NO: 44705 - DNA, 50 bp, synthetic construct
  source 1..50: mol_type = other DNA
catacattccggcattttgttattataatataatgagtgcagacggtatg

SEQ ID NO: 44706 - DNA, 50 bp, synthetic construct
  source 1..50: mol_type = other DNA
tcttacgccggacggactaaggcttggccttgcggcgctctggcgtgtag

SEQ ID NO: 44707 - DNA, 50 bp, synthetic construct
  source 1..50: mol_type = other DNA
cgcggtgaatcgggtcagcgtggccggtctggctgacccgcctgcaggga

SEQ ID NO: 44708 - DNA, 50 bp, synthetic construct
  source 1..50: mol_type = other DNA
tgcattgtcggagtaaatttgcttaatagcaaatatacttgtacgaacac

SEQ ID NO: 44709 - DNA, 50 bp, synthetic construct
  source 1..50: mol_type = other DNA
aaaagtggcttgacaatcgtctgaaatctgacgaagatatatgatgaatt

SEQ ID NO: 44710 - DNA, 50 bp, synthetic construct
  source 1..50: mol_type = other DNA
gcaagcggtacatagcgccaactattgagttggttccatgtccagtaaag

SEQ ID NO: 44711 - DNA, 50 bp, synthetic construct
  source 1..50: mol_type = other DNA
gtgcattttgactttgtggggtgcatcatttatattacaaaaatcggcac

SEQ ID NO: 44712 - DNA, 50 bp, synthetic construct
  source 1..50: mol_type = other DNA
caagacatggggcgtcaaaaaatgcgtatttctcagccagaactgtgcag

SEQ ID NO: 44713 - DNA, 50 bp, synthetic construct
  source 1..50: mol_type = other DNA
gctggaattttgcgtcagtcccctcaagcaagtcctctgaaagtatcagg

SEQ ID NO: 44714 - DNA, 50 bp, synthetic construct
  source 1..50: mol_type = other DNA
aattaccactttatggtaatacatgaaaacggtgtcatatcagaatcatg

SEQ ID NO: 44715 - DNA, 50 bp, synthetic construct
  source 1..50: mol_type = other DNA
tcgatctggtcggagatacctttgaataaagaatgcacccactagaaaga

SEQ ID NO: 44716 - DNA, 50 bp, synthetic construct
  source 1..50: mol_type = other DNA
aagcccacaggctgtgtaagcctgcgcacccgccgccaacgtgggagcat

SEQ ID NO: 44717 - DNA, 50 bp, synthetic construct
  source 1..50: mol_type = other DNA
gggttgatggtcggtggaatgatcgtgaccgtcagccccggaatacaccg

SEQ ID NO: 44718 - DNA, 50 bp, synthetic construct
  source 1..50: mol_type = other DNA
tgaagctgagattctttccgggaatcagttcggaaaaatatgcagcattg

SEQ ID NO: 44719 - DNA, 50 bp, synthetic construct
  source 1..50: mol_type = other DNA
ccacgggatttttcttcgtgtgcaggcgcacaagtttttatatatcggcc

SEQ ID NO: 44720 - DNA, 50 bp, synthetic construct
  source 1..50: mol_type = other DNA
acccaggagtgtaaatgctcctgggtccaggatagcggttacaactgggt

SEQ ID NO: 44721 - DNA, 50 bp, synthetic construct
  source 1..50: mol_type = other DNA
aagcattcagccttgtaagcggaatcggctgcagataagcccgaaattcc

SEQ ID NO: 44722 - DNA, 50 bp, synthetic construct
  source 1..50: mol_type = other DNA
caatgcatattgatttggcggataatgattccccagccgcgggcaacggc

SEQ ID NO: 44723 - DNA, 50 bp, synthetic construct
  source 1..50: mol_type = other DNA
gtttgtctctacactgacgacaaagcttgatctgatccgcgaggaaaatg

SEQ ID NO: 44724 - DNA, 50 bp, synthetic construct
  source 1..50: mol_type = other DNA
acacagaaaatgtaagagagttgtgaacatgaattttacgatggatgaca

SEQ ID NO: 44725 - DNA, 50 bp, synthetic construct
  source 1..50: mol_type = other DNA
ggccagagcggcttttgccgcagctcgatgccagccaaattctgctggtt

SEQ ID NO: 44726 - DNA, 50 bp, synthetic construct
  source 1..50: mol_type = other DNA
tcatattcttcatcactcatgtaggacaccctgcccgatgaagccgacat

SEQ ID NO: 44727 - DNA, 50 bp, synthetic construct
  source 1..50: mol_type = other DNA
ccagatggagctgtttggacttcataaccatgccaaaattctccatcaac

SEQ ID NO: 44728 - DNA, 50 bp, synthetic construct
  source 1..50: mol_type = other DNA
taatttttctattttgagttcgatttatatatgattatatataaaataag

SEQ ID NO: 44729 - DNA, 50 bp, synthetic construct
  source 1..50: mol_type = other DNA
ctccccatcaccggattgatgttccaggatacgaaccagttgatttttga

SEQ ID NO: 44730 - DNA, 50 bp, synthetic construct
  source 1..50: mol_type = other DNA
tgcggcgcgccacaaatccgacggcacctccttctttgccagcacctcaa

SEQ ID NO: 44731 - DNA, 50 bp, synthetic construct
  source 1..50: mol_type = other DNA
ctgcgacccgtcgtttttgtacagccacggacacaatgtcgtagcggcag

SEQ ID NO: 44732 - DNA, 50 bp, synthetic construct
  source 1..50: mol_type = other DNA
gaacaagaagcttatcggattaagaggctgtacagatactctgcctgttt

SEQ ID NO: 44733 - DNA, 50 bp, synthetic construct
  source 1..50: mol_type = other DNA
acaggtgatatgcaaagttctgtatgtagagaaaactccaacagaccttg

SEQ ID NO: 44734 - DNA, 50 bp, synthetic construct
  source 1..50: mol_type = other DNA
attcttccacaatttatagttataattcctccgttatattcccgtatatt

SEQ ID NO: 44735 - DNA, 50 bp, synthetic construct
  source 1..50: mol_type = other DNA
tttatttatggttgcaggaatagccggtagttttatcaacagcaaacaaa

SEQ ID NO: 44736 - DNA, 50 bp, synthetic construct
  source 1..50: mol_type = other DNA
ttgacaaatcacgaataatatattaaaaaatattatatgaattttattac

SEQ ID NO: 44737 - DNA, 50 bp, synthetic construct
  source 1..50: mol_type = other DNA
gtgtcccggcttgtcatagtgtcctggtacaatatggctgttggtcggtt

SEQ ID NO: 44738 - DNA, 50 bp, synthetic construct
  source 1..50: mol_type = other DNA
actgatattggaacagaagaatttgcgaatgaactggctcatatggaaat

SEQ ID NO: 44739 - DNA, 50 bp, synthetic construct
  source 1..50: mol_type = other DNA
aaggaaaagatgcctgtgatgggacccctgcggaaacgcatctcaataga

SEQ ID NO: 44740 - DNA, 50 bp, synthetic construct
  source 1..50: mol_type = other DNA
tcaaaatgagtgtctaaagtatatattcttctattatttcttgcttttgc

SEQ ID NO: 44741 - DNA, 50 bp, synthetic construct
  source 1..50: mol_type = other DNA
agagcagtgggagcagagttaatatccacaaactcaactgttttatcata

SEQ ID NO: 44742 - DNA, 50 bp, synthetic construct
  source 1..50: mol_type = other DNA
gcgatgttcattggagacgtgacgcccgaccaaaaatccacggacgttcc

SEQ ID NO: 44743 - DNA, 50 bp, synthetic construct
  source 1..50: mol_type = other DNA
aatatttgtaatctgcctgatgatttgccatcaggcagattccattcctt

SEQ ID NO: 44744 - DNA, 50 bp, synthetic construct
  source 1..50: mol_type = other DNA
attttcaaacaacaaaagggactattgggctcctttccttgttggaatgg

SEQ ID NO: 44745 - DNA, 50 bp, synthetic construct
  source 1..50: mol_type = other DNA
ttgataaacgcaagatgcttgtgtgaactgcaatgtctgcactttatcac

SEQ ID NO: 44746 - DNA, 50 bp, synthetic construct
  source 1..50: mol_type = other DNA
ggcctgtttttcatcgatgatcgccctcgtgcatcatgctcaaacaaacg

SEQ ID NO: 44747 - DNA, 50 bp, synthetic construct
  source 1..50: mol_type = other DNA
ggcatccagaatctcgccggtatccgtatcctccggacgttctggctggg

SEQ ID NO: 44748 - DNA, 50 bp, synthetic construct
  source 1..50: mol_type = other DNA
gtatttcatttaaaccatccaaaaatttctgaatcctttgaaaaatacac

SEQ ID NO: 44749 - DNA, 50 bp, synthetic construct
  source 1..50: mol_type = other DNA
ctgacagcgatgaacaggcatcaagcttgaactgcggtcatcgctgttat

SEQ ID NO: 44750 - DNA, 50 bp, synthetic construct
  source 1..50: mol_type = other DNA
agtcccggagcagtgaaatcataatccgcttgcaagactgctccgaagat

SEQ ID NO: 44751 - DNA, 50 bp, synthetic construct
  source 1..50: mol_type = other DNA
aaccgaccaacagccatattgtaccaggacaccatgacaagccgggacac

SEQ ID NO: 44752 - DNA, 50 bp, synthetic construct
  source 1..50: mol_type = other DNA
cccgggcaaaagcaatagcccgggcaagcttcagcttgcgctggccgtca

SEQ ID NO: 44753 - DNA, 50 bp, synthetic construct
  source 1..50: mol_type = other DNA
gaaaaaagccgccgattccatttctcaagaacttatctgcttcttttttt

SEQ ID NO: 44754 - DNA, 50 bp, synthetic construct
  source 1..50: mol_type = other DNA
gacaaacggactcttggcaagaacgtgtcattctcttgcggctctttgtc

SEQ ID NO: 44755 - DNA, 50 bp, synthetic construct
  source 1..50: mol_type = other DNA
agcatctcgctgggggtgccatctgcaatagtgctgcgcaggaacaagcg

SEQ ID NO: 44756 - DNA, 50 bp, synthetic construct
  source 1..50: mol_type = other DNA
gatgaaagtatttttgaagatttaaaaaaataaattgaaataaattcagc

SEQ ID NO: 44757 - DNA, 50 bp, synthetic construct
  source 1..50: mol_type = other DNA
tgtttgtcaagccaacattgagaacgcctacgcccgtgtttccacggaca

SEQ ID NO: 44758 - DNA, 50 bp, synthetic construct
  source 1..50: mol_type = other DNA
aacagcatatgcgagaagtaatgataagattatttcacaaatcttcatat

SEQ ID NO: 44759 - DNA, 50 bp, synthetic construct
  source 1..50: mol_type = other DNA
tctttagaccaattgcaatcatttatcattgatgctgtcaacagacaatt

SEQ ID NO: 44760 - DNA, 50 bp, synthetic construct
  source 1..50: mol_type = other DNA
tccgtatacacaccagcctgatactgggatccggctgtctggtatactca

SEQ ID NO: 44761 - DNA, 50 bp, synthetic construct
  source 1..50: mol_type = other DNA
cgatgccgtggtagctcattccctgcatggatgccgagaattttttatgt

SEQ ID NO: 44762 - DNA, 50 bp, synthetic construct
  source 1..50: mol_type = other DNA
tgaaaaatatcaaccatttattagtactgataaatacttaatttttcgaa

SEQ ID NO: 44763 - DNA, 50 bp, synthetic construct
  source 1..50: mol_type = other DNA
atggacatcacgcctttccgcaacattttaaaagaagaatttaaagcaaa

SEQ ID NO: 44764 - DNA, 50 bp, synthetic construct
  source 1..50: mol_type = other DNA
atccagggccaagagctggacgccggcgttgtcagctcctgtgccgggag

SEQ ID NO: 44765 - DNA, 50 bp, synthetic construct
  source 1..50: mol_type = other DNA
tcgggagatctcgttttgagatctcccgatcatacattgcctgctgataa

SEQ ID NO: 44766 - DNA, 50 bp, synthetic construct
  source 1..50: mol_type = other DNA
ctaaattctctgataaatgaaaaatatttttccggttctttaccgcctac

SEQ ID NO: 44767 - DNA, 50 bp, synthetic construct
  source 1..50: mol_type = other DNA
atggtcttgtcggcaccgaatggaactccaaaaccggtcacgagagaaag

SEQ ID NO: 44768 - DNA, 50 bp, synthetic construct
  source 1..50: mol_type = other DNA
ctgcaggagatttgtctggaagaggaagagcaaagaaagattgtggaaca

SEQ ID NO: 44769 - DNA, 50 bp, synthetic construct
  source 1..50: mol_type = other DNA
atagaaaaataatcgcacgcatctggagatttaaaaatggttttgactat

SEQ ID NO: 44770 - DNA, 50 bp, synthetic construct
  source 1..50: mol_type = other DNA
cagcttattgctaaggatggaaaaattagtacgaccttatattcttcctc

SEQ ID NO: 44771 - DNA, 50 bp, synthetic construct
  source 1..50: mol_type = other DNA
tctgagcttgtcagcagccggttgatgaatctgcgaatgacaatgcaggt

SEQ ID NO: 44772 - DNA, 50 bp, synthetic construct
  source 1..50: mol_type = other DNA
ggatcatggttgaccgtgaactgatcaacggatcaggaagaccagcttca

SEQ ID NO: 44773 - DNA, 50 bp, synthetic construct
  source 1..50: mol_type = other DNA
taccagacagggaacaggaactttatcagtttcttcttccggttctggtt

SEQ ID NO: 44774 - DNA, 50 bp, synthetic construct
  source 1..50: mol_type = other DNA
atcttgggcttgccatagctgtatagttgtcgccatagcaatccataata

SEQ ID NO: 44775 - DNA, 50 bp, synthetic construct
  source 1..50: mol_type = other DNA
atcagatgtattcatacttgtcaatagtcaccacacaatatacattggat

SEQ ID NO: 44776 - DNA, 50 bp, synthetic construct
  source 1..50: mol_type = other DNA
actattttgtaccctactggtatgtggaattcaaagctgaaaaaaatgac

SEQ ID NO: 44777 - DNA, 50 bp, synthetic construct
  source 1..50: mol_type = other DNA
tgtccaggagctctacaccgctgaggtcaacggtgttccccgggaggacg

SEQ ID NO: 44778 - DNA, 50 bp, synthetic construct
  source 1..50: mol_type = other DNA
taaaactcaataccgggtatttttgtaaaaatgggtaacgaacaccacac

SEQ ID NO: 44779 - DNA, 50 bp, synthetic construct
  source 1..50: mol_type = other DNA
gtgtgttatgcttatacaaacaaaaaaatgttgtaataagcatcacacat

SEQ ID NO: 44780 - DNA, 50 bp, synthetic construct
  source 1..50: mol_type = other DNA
catacaaaacagcggaagtgtaaaactaccaatttcagctgttttgtgct

SEQ ID NO: 44781 - DNA, 50 bp, synthetic construct
  source 1..50: mol_type = other DNA
agacgaagtattcaattcacactcttcagctattctttcatttgcgaaaa

SEQ ID NO: 44782 - DNA, 50 bp, synthetic construct
  source 1..50: mol_type = other DNA
gttacggagcagttaggcaacagtataattctgctgaaaatctccgttgg

SEQ ID NO: 44783 - DNA, 50 bp, synthetic construct
  source 1..50: mol_type = other DNA
ggcgttcaccagcatggagagcaccatcactctttatgccccagaagtca

SEQ ID NO: 44784 - DNA, 50 bp, synthetic construct
  source 1..50: mol_type = other DNA
tcaattatgatttatacggctattatagagttccactagcaggttattct

SEQ ID NO: 44785 - DNA, 50 bp, synthetic construct
  source 1..50: mol_type = other DNA
gaaaagacccggacggtatgattcaaaggcaataccttctggagttttta

SEQ ID NO: 44786 - DNA, 50 bp, synthetic construct
  source 1..50: mol_type = other DNA
aatggaaaggagacttggcatgactggctggctgctgccttcttttcatc

SEQ ID NO: 44787 - DNA, 50 bp, synthetic construct
  source 1..50: mol_type = other DNA
caaaacaggtcttgacttttcgggcagcggaaaagtcaagccgattcagc

SEQ ID NO: 44788 - DNA, 50 bp, synthetic construct
  source 1..50: mol_type = other DNA
ttttcgggcatttagagtgattaatattatatagatgatttagccgatga

SEQ ID NO: 44789 - DNA, 50 bp, synthetic construct
  source 1..50: mol_type = other DNA
cattttcctgaattttcggaggtggacatcagatgaaattaaaatgcttg

SEQ ID NO: 44790 - DNA, 50 bp, synthetic construct
  source 1..50: mol_type = other DNA
tcatgtatgcgctgacgaggagcatcacgacctgctcagcaacatggaca

SEQ ID NO: 44791 - DNA, 50 bp, synthetic construct
  source 1..50: mol_type = other DNA
gcatacgcggccacccgcctgtgtgcacccctgcgggtttgcgaccttgt

SEQ ID NO: 44792 - DNA, 50 bp, synthetic construct
  source 1..50: mol_type = other DNA
acacatttacttacatttgattcacttaaatctaattcatcaaaaaaagt

SEQ ID NO: 44793 - DNA, 50 bp, synthetic construct
  source 1..50: mol_type = other DNA
atcgaaaacagctgcaaaactgctttagcagttttaagatagttttcatt

SEQ ID NO: 44794 - DNA, 50 bp, synthetic construct
  source 1..50: mol_type = other DNA
ggtggagataagcgggatcgaaccgcggttcgatcccgcttatctccacc

SEQ ID NO: 44795 - DNA, 50 bp, synthetic construct
  source 1..50: mol_type = other DNA
actttttataaaaagttttatctttttagatccaacatgttgtgaatggt

SEQ ID NO: 44796 - DNA, 50 bp, synthetic construct
  source 1..50: mol_type = other DNA
tttataggcgtttctagctctttatagcaagtatataaatcgccagaaaa

SEQ ID NO: 44797 - DNA, 50 bp, synthetic construct
  source 1..50: mol_type = other DNA
tgattccccctaggctgacttttgtaccgacagaagctgacattgaatcg

SEQ ID NO: 44798 - DNA, 50 bp, synthetic construct
  source 1..50: mol_type = other DNA
agtttttccttaagacaagtatctatagaagccctagaagaacaaaacaa

SEQ ID NO: 44799 - DNA, 50 bp, synthetic construct
  source 1..50: mol_type = other DNA
tttttatacctgattttttagcagctggttacgcttatcaggattaaaaa

SEQ ID NO: 44800 - DNA, 50 bp, synthetic construct
  source 1..50: mol_type = other DNA
ggatattttcattataatgcgtactatatatcactctaaagcccttattt

SEQ ID NO: 44801 - DNA, 50 bp, synthetic construct
  source 1..50: mol_type = other DNA
caatttgtccagcttctgaaatactgtactttaacaaaatgtctttattg

SEQ ID NO: 44802 - DNA, 50 bp, synthetic construct
  source 1..50: mol_type = other DNA
ttctcaatttcttccatggaaaggttattttcccaaaggtaaatttcagc

SEQ ID NO: 44803 - DNA, 50 bp, synthetic construct
  source 1..50: mol_type = other DNA
ggagcgcgccctgaatcaggggctgcagcttcagctgcaatacgcctact

SEQ ID NO: 44804 - DNA, 50 bp, synthetic construct
  source 1..50: mol_type = other DNA
caataaagccattttgttaaagtacagtatttcagaaactggacaaattg

SEQ ID NO: 44805 - DNA, 50 bp, synthetic construct
  source 1..50: mol_type = other DNA
taggaatgaaactatatcctgatttaaacgtggatattgttttaattttc

SEQ ID NO: 44806 - DNA, 50 bp, synthetic construct
  source 1..50: mol_type = other DNA
ttgtcgttaacgtagtagctgaatcagctgagctactgagtcatgtacaa

SEQ ID NO: 44807 - DNA, 50 bp, synthetic construct
  source 1..50: mol_type = other DNA
tcactgtaattcaatgcttgttcgctatatcatacattaacaccgagtgc

SEQ ID NO: 44808 - DNA, 50 bp, synthetic construct
  source 1..50: mol_type = other DNA
ccccctttactatccaagaataattggtaataattgtgaagtgaacatga

SEQ ID NO: 44809 - DNA, 50 bp, synthetic construct
  source 1..50: mol_type = other DNA
caagatgaattgtggggcaaacccaatgctttgttttagcgttctgattg

SEQ ID NO: 44810 - DNA, 50 bp, synthetic construct
  source 1..50: mol_type = other DNA
ccagcgcggggacatctggaccatcgcgtgtccaccgaccacgacgatca

SEQ ID NO: 44811 - DNA, 50 bp, synthetic construct
  source 1..50: mol_type = other DNA
cgggttggacaacccacggcaagcaccatacccgccgtcggtccctcatc

SEQ ID NO: 44812 - DNA, 50 bp, synthetic construct
  source 1..50: mol_type = other DNA
tgccacccttatcttcttttcctgtactgcaaaaggcggttccggggatt

SEQ ID NO: 44813 - DNA, 50 bp, synthetic construct
  source 1..50: mol_type = other DNA
cgttcacctcggcatacagcagctccggctgccataaaatcaggtgccgg

SEQ ID NO: 44814 - DNA, 50 bp, synthetic construct
  source 1..50: mol_type = other DNA
caaagataattaattctgtcttgcacatactgacaacgtaaaaatattta

SEQ ID NO: 44815 - DNA, 50 bp, synthetic construct
  source 1..50: mol_type = other DNA
cggcgttttcagaaaatttacggatcagcggcgattcgctgaaaaaagcg

SEQ ID NO: 44816 - DNA, 50 bp, synthetic construct
  source 1..50: mol_type = other DNA
tcattttataatgctgactctaaaaagtgaggtattgcacatgaaaaaaa

SEQ ID NO: 44817 - DNA, 50 bp, synthetic construct
  source 1..50: mol_type = other DNA
atgtgctgaaaatcggggctaatggtcacaagccgatattgacaacgttg

SEQ ID NO: 44818 - DNA, 50 bp, synthetic construct
  source 1..50: mol_type = other DNA
cgaatgccctgaaactgcctgagtactgcccggcggctgtatggcaaacg

SEQ ID NO: 44819 - DNA, 50 bp, synthetic construct
  source 1..50: mol_type = other DNA
tcgattacgttattataatgacatatgaatccacctaatacatcaagaga

SEQ ID NO: 44820 - DNA, 50 bp, synthetic construct
  source 1..50: mol_type = other DNA
gtgatgggtaccatatagttaatgatataatcttgaatgtatttcatcac

SEQ ID NO: 44821 - DNA, 50 bp, synthetic construct
  source 1..50: mol_type = other DNA
ggtgagcgtcagagaaggatgatacgccccttgtcctactctcgcgagcg

SEQ ID NO: 44822 - DNA, 50 bp, synthetic construct
  source 1..50: mol_type = other DNA
ggtcatgtaaacgccggcttcctggtcaggaagcttgggctcgaattgca

SEQ ID NO: 44823 - DNA, 50 bp, synthetic construct
  source 1..50: mol_type = other DNA
cgaggagaaggtcaaggaagagaccggtcactcctttgggttacggctga

SEQ ID NO: 44824 - DNA, 50 bp, synthetic construct
  source 1..50: mol_type = other DNA
tgtgtaggatacaagccttactgtaaagcgcgaattttgtatcaaactat

SEQ ID NO: 44825 - DNA, 50 bp, synthetic construct
  source 1..50: mol_type = other DNA
ctggagccttatttcttccggatgtccagcgggcagaaataaaaaggccc

SEQ ID NO: 44826 - DNA, 50 bp, synthetic construct
  source 1..50: mol_type = other DNA
cgaaaccgggaactttcccaccatgctgctgcggtgaactcgcggttaat

SEQ ID NO: 44827 - DNA, 50 bp, synthetic construct
  source 1..50: mol_type = other DNA
tataaacggtcaaaatgcaactacaggtgagtgcagaaggtatctcagag

SEQ ID NO: 44828 - DNA, 50 bp, synthetic construct
  source 1..50: mol_type = other DNA
accagggaagagagaactggagaaaatgaacccctttttgcgtcaggggg

SEQ ID NO: 44829 - DNA, 50 bp, synthetic construct
  source 1..50: mol_type = other DNA
tttctgcgatagtacgggaatatgtccaaattcccgatgtattgcaggaa

SEQ ID NO: 44830 - DNA, 50 bp, synthetic construct
  source 1..50: mol_type = other DNA
ctttacacgcttttggcatcaaaatattccccgttaaaacctacaaaaac

SEQ ID NO: 44831 - DNA, 50 bp, synthetic construct
  source 1..50: mol_type = other DNA
gggggctggatgtggattttgaatattttttgcgtcctcctccaggtcaa

SEQ ID NO: 44832 - DNA, 50 bp, synthetic construct
  source 1..50: mol_type = other DNA
gagtatgccctgacggaaatcccggcctacccccgccgcccggcatactt

SEQ ID NO: 44833 - DNA, 50 bp, synthetic construct
  source 1..50: mol_type = other DNA
cacccagcatagaaaaatgacctcgcagggcttgtgatctgtgcgaagtg

SEQ ID NO: 44834 - DNA, 50 bp, synthetic construct
  source 1..50: mol_type = other DNA
gtttaaaatcccgacattatatttgcaaatatactaggcaaatgataaaa

SEQ ID NO: 44835 - DNA, 50 bp, synthetic construct
  source 1..50: mol_type = other DNA
ttattatatttgtgacaagataaagtctttacctctcgcaaagataagaa

SEQ ID NO: 44836 - DNA, 50 bp, synthetic construct
  source 1..50: mol_type = other DNA
gccgcccgctgtccagatgcgcaccggtcaacgtgtgctattatagccgc

SEQ ID NO: 44837 - DNA, 50 bp, synthetic construct
  source 1..50: mol_type = other DNA
cctgctacggtacaaagataataaaattacattaataatatattattaaa

SEQ ID NO: 44838 - DNA, 50 bp, synthetic construct
  source 1..50: mol_type = other DNA
gaaagccccggaaacgttgatttctagaatatcagctttccggtgaagag

SEQ ID NO: 44839 - DNA, 50 bp, synthetic construct
  source 1..50: mol_type = other DNA
tattgacgagattatcgtcacagatcactaggacaagttccctgtcaacg

SEQ ID NO: 44840 - DNA, 50 bp, synthetic construct
  source 1..50: mol_type = other DNA
ctttgatttgctgaatcagtatctcgtcgggctgattccgagctggaaag

SEQ ID NO: 44841 - DNA, 50 bp, synthetic construct
  source 1..50: mol_type = other DNA
atttttgtgcccgacatttatgtcggtacatatttgttgagcacagacca

SEQ ID NO: 44842 - DNA, 50 bp, synthetic construct
  source 1..50: mol_type = other DNA
tccgggtgtagcgcagttttggtagccgtccatcatacgtaattcccagc

SEQ ID NO: 44843 - DNA, 50 bp, synthetic construct
  source 1..50: mol_type = other DNA
ggtacctacatcggtatctaaattgcaataacgaaaccgatctaccaaca

SEQ ID NO: 44844 - DNA, 50 bp, synthetic construct
  source 1..50: mol_type = other DNA
gccgcagcggagcaggccggcgaagacgttccgagtataaccgtaaccat

SEQ ID NO: 44845 - DNA, 50 bp, synthetic construct
  source 1..50: mol_type = other DNA
caggatttggagcagtataattagtactaagtgtttagccccatttggag

SEQ ID NO: 44846 - DNA, 50 bp, synthetic construct
  source 1..50: mol_type = other DNA
ttctctccatatttagctgaaattataagccgagcggaagttacattgct

SEQ ID NO: 44847 - DNA, 50 bp, synthetic construct
  source 1..50: mol_type = other DNA
ctcggtgggcggcgggaggttgctctggcagctgtccgccgcccggaagg

SEQ ID NO: 44848 - DNA, 50 bp, synthetic construct
  source 1..50: mol_type = other DNA
cggtatataccgattatacaacgtgatggtttgtaaatcggatagcaggc

SEQ ID NO: 44849 - DNA, 50 bp, synthetic construct
  source 1..50: mol_type = other DNA
cgatactataaaggcaacccgaacatggcccgaaaacctttatgattgca

SEQ ID NO: 44850 - DNA, 50 bp, synthetic construct
  source 1..50: mol_type = other DNA
cggcgctgtccgttttccggacgccgccggagcgcaggccgaaaggttac

SEQ ID NO: 44851 - DNA, 50 bp, synthetic construct
  source 1..50: mol_type = other DNA
ttttggtaatttcgcttccgaaacgactttcacccaatgaaaggggaggg

SEQ ID NO: 44852 - DNA, 50 bp, synthetic construct
  source 1..50: mol_type = other DNA
gttagctaatagtcttgattgcaataagacaatcataagtattaagtagt

SEQ ID NO: 44853 - DNA, 50 bp, synthetic construct
  source 1..50: mol_type = other DNA
aagaacaccttgagcagacggctgttaggtttgatggtgattgtaatccg

SEQ ID NO: 44854 - DNA, 50 bp, synthetic construct
  source 1..50: mol_type = other DNA
aattgcccggcatcatcggtgtatacatacaccctacggctacagcattg

SEQ ID NO: 44855 - DNA, 50 bp, synthetic construct
  source 1..50: mol_type = other DNA
tccccggcagctctgtacgatagagctgtctgtccttttccagcaggggc

SEQ ID NO: 44856 - DNA, 50 bp, synthetic construct
  source 1..50: mol_type = other DNA
atcttttgtagataatttacctgtctccaggaagtgccgaaaccgctgat

SEQ ID NO: 44857 - DNA, 50 bp, synthetic construct
  source 1..50: mol_type = other DNA
acaaaagttctctggctgttatttttttagaaatgcctaattttttatgt

SEQ ID NO: 44858 - DNA, 50 bp, synthetic construct
  source 1..50: mol_type = other DNA
aaaaatagtaaaaaacaagttattatagtaaattctattttttaactttt

SEQ ID NO: 44859 - DNA, 50 bp, synthetic construct
  source 1..50: mol_type = other DNA
atactgtacggatagtacgaaattaattatcaagtgtataagtccccgga

SEQ ID NO: 44860 - DNA, 50 bp, synthetic construct
  source 1..50: mol_type = other DNA
atcacatggtcagtcgggacgtttgaggacggaatagtctaccatccaat

SEQ ID NO: 44861 - DNA, 50 bp, synthetic construct
  source 1..50: mol_type = other DNA
aaatcagtctcctatatagggaaggacccagctgccacagaaatagaccg

SEQ ID NO: 44862 - DNA, 50 bp, synthetic construct
  source 1..50: mol_type = other DNA
gattacgataagagattagctaatgcactgtctaattttattcccaaaga

SEQ ID NO: 44863 - DNA, 50 bp, synthetic construct
  source 1..50: mol_type = other DNA
acaggattatatttataatttaaattgtatttgtatgtatataatcttga

SEQ ID NO: 44864 - DNA, 50 bp, synthetic construct
  source 1..50: mol_type = other DNA
aagaattagaaccacacctttggatatccaagggttaggagctaatgaat

SEQ ID NO: 44865 - DNA, 50 bp, synthetic construct
  source 1..50: mol_type = other DNA
ggcaggaacaacgtttcctatttactgcatcaggaaacatctttttaata

SEQ ID NO: 44866 - DNA, 50 bp, synthetic construct
  source 1..50: mol_type = other DNA
ccgccaccccgctgtcatagtctgtacagacatcgaccgggacaaggcgg

SEQ ID NO: 44867 - DNA, 50 bp, synthetic construct
  source 1..50: mol_type = other DNA
tttattttctcttcttccagttcattgaaactgcaagaggagcgcatatc

SEQ ID NO: 44868 - DNA, 50 bp, synthetic construct
  source 1..50: mol_type = other DNA
cgctgtagaaacctcgattaaactgatcacgcggataggtgtccatcatc

SEQ ID NO: 44869 - DNA, 50 bp, synthetic construct
  source 1..50: mol_type = other DNA
attatatcaaatacgcacccgcttttttccgggttcgtctttatcctcca

SEQ ID NO: 44870 - DNA, 50 bp, synthetic construct
  source 1..50: mol_type = other DNA
ccacaccacatgagacttgtgctgatcaccgcactcagtatagcgtttga

SEQ ID NO: 44871 - DNA, 50 bp, synthetic construct
  source 1..50: mol_type = other DNA
cgaaaaaatcaacgtagaatcaggcaagtgcgcctttagctttttttgca

SEQ ID NO: 44872 - DNA, 50 bp, synthetic construct
  source 1..50: mol_type = other DNA
tttaaaaaataattattataggagttctcctttaaactatatattcaaat

SEQ ID NO: 44873 - DNA, 50 bp, synthetic construct
  source 1..50: mol_type = other DNA
gaaaaagaaaaaatggaagaaatgtttttttctatcctttttaagttttg

SEQ ID NO: 44874 - DNA, 50 bp, synthetic construct
  source 1..50: mol_type = other DNA
tgacgacgttacaagttaattaaaagtattgccgacttcatcaaccgcaa

SEQ ID NO: 44875 - DNA, 50 bp, synthetic construct
  source 1..50: mol_type = other DNA
cgacattttatgttggcttttctgtatataaaaaataatatcaaaaaata

SEQ ID NO: 44876 - DNA, 50 bp, synthetic construct
  source 1..50: mol_type = other DNA
tgtggcggaactgaacgctgatcttcagataaccgttcttcagctccaca

SEQ ID NO: 44877 - DNA, 50 bp, synthetic construct
  source 1..50: mol_type = other DNA
attcctgatatttcgaatttttcgaaaaaagcagtccagaaatcaggact

SEQ ID NO: 44878 - DNA, 50 bp, synthetic construct
  source 1..50: mol_type = other DNA
gaaaagataaagaaagaattaatgaaagtaatctgtttctttttcatttc

SEQ ID NO: 44879 - DNA, 50 bp, synthetic construct
  source 1..50: mol_type = other DNA
atattattacaacgtctcggatttaacaatcctgcgagttggaggaatat

SEQ ID NO: 44880 - DNA, 50 bp, synthetic construct
  source 1..50: mol_type = other DNA
cataaatgatgtaggttataatgtgaaaattataagctacatacatgata

SEQ ID NO: 44881 - DNA, 50 bp, synthetic construct
  source 1..50: mol_type = other DNA
agaggtaggaaggatagataaaggagtctttccgtatttttcaactatct

SEQ ID NO: 44882 - DNA, 50 bp, synthetic construct
  source 1..50: mol_type = other DNA
gtattttgtatgtttagacaaaaaacgaattgttgtggcagaagaaatca

SEQ ID NO: 44883 - DNA, 50 bp, synthetic construct
  source 1..50: mol_type = other DNA
ttttaccctgaatggaaacagtcgtatatatcaagtcttttatggtataa

SEQ ID NO: 44884 - DNA, 50 bp, synthetic construct
  source 1..50: mol_type = other DNA
ccattggacccagtttggctactctggaaaagggggcggaggtctacata

SEQ ID NO: 44885 - DNA, 50 bp, synthetic construct
  source 1..50: mol_type = other DNA
cgaccagtgtcttgggaagataaatatttatattcgtgtttctacggcaa

SEQ ID NO: 44886 - DNA, 50 bp, synthetic construct
  source 1..50: mol_type = other DNA
tgttgtttaaatatgatctattgtttgcagaatttttaataactggaaat

SEQ ID NO: 44887 - DNA, 50 bp, synthetic construct
  source 1..50: mol_type = other DNA
aaacctggagaaaatgcttgactttgccttcaatcgttcgttcatagccg

SEQ ID NO: 44888 - DNA, 50 bp, synthetic construct
  source 1..50: mol_type = other DNA
cgccgttcctgtcattccgccggccagccgcaggcaggacagcaggtcgt

SEQ ID NO: 44889 - DNA, 50 bp, synthetic construct
  source 1..50: mol_type = other DNA
gaatcctgtgacaaatattgaggttgccaaggaaatgtgatacaatattc

SEQ ID NO: 44890 - DNA, 50 bp, synthetic construct
  source 1..50: mol_type = other DNA
ttgttcacatcgcccgtgcggtaaatttcactcacgtgcttttgtaacat

SEQ ID NO: 44891 - DNA, 50 bp, synthetic construct
  source 1..50: mol_type = other DNA
ccaaataaaaaagaacggtgtccttctgaccgcctttctttttgttgtgg

SEQ ID NO: 44892 - DNA, 50 bp, synthetic construct
  source 1..50: mol_type = other DNA
ctggagccagcctaactgttccatcggaggaacaccctgtccccctccca

SEQ ID NO: 44893 - DNA, 50 bp, synthetic construct
  source 1..50: mol_type = other DNA
ggccgggaaccagatgcgctatgatttcagcaggctcctgcctgcagcat

SEQ ID NO: 44894 - DNA, 50 bp, synthetic construct
  source 1..50: mol_type = other DNA
agcggcaagaggaaaaactattgctagcgtttaattttaaacgtgccgct

SEQ ID NO: 44895 - DNA, 50 bp, synthetic construct
  source 1..50: mol_type = other DNA
cccttcgggtgcttttttaatttggaaaaatcaaaaaaacgcgtcctctg

SEQ ID NO: 44896 - DNA, 50 bp, synthetic construct
  source 1..50: mol_type = other DNA
cctcgcaacagtattgtatcataagattatgaacccatcttctttcgaga

SEQ ID NO: 44897 - DNA, 50 bp, synthetic construct
  source 1..50: mol_type = other DNA
gcctttattttttctgccttctgccagcagcagtcagaaaaaactgggga

SEQ ID NO: 44898 - DNA, 50 bp, synthetic construct
  source 1..50: mol_type = other DNA
tgaatgccaattccaaacaggcaccgggagctgtttcggattcttcttca

SEQ ID NO: 44899 - DNA, 50 bp, synthetic construct
  source 1..50: mol_type = other DNA
cttaaaagctctgcaaaggaaaccggggctttcgccccttcttttttaac

SEQ ID NO: 44900 - DNA, 50 bp, synthetic construct
  source 1..50: mol_type = other DNA
tttgtataggcttattttttatactcccgacaacacaaggcacataccaa

SEQ ID NO: 44901 - DNA, 50 bp, synthetic construct
  source 1..50: mol_type = other DNA
ggctgctggatacagggtgaagcggagacttcacaggaacacctgcagcg

SEQ ID NO: 44902 - DNA, 50 bp, synthetic construct
  source 1..50: mol_type = other DNA
tataaggaatgcaagggaatccttacaaggtacgggaggcaatcctgacg

SEQ ID NO: 44903 - DNA, 50 bp, synthetic construct
  source 1..50: mol_type = other DNA
ctatgttcgattgacatttatattaatatattgttgctcaaggaacaaac

SEQ ID NO: 44904 - DNA, 50 bp, synthetic construct
  source 1..50: mol_type = other DNA
ccagaacttgaagccgttggaatgtgggttgacggttgacgaagttaaat

SEQ ID NO: 44905 - DNA, 50 bp, synthetic construct
  source 1..50: mol_type = other DNA
tccaaaaaaatataaaaaaaataatataattttttagatagtttagaaca

SEQ ID NO: 44906 - DNA, 50 bp, synthetic construct
  source 1..50: mol_type = other DNA
ttaaatatcctataagtacaatattaatattttagaaataaaataacatt

SEQ ID NO: 44907 - DNA, 50 bp, synthetic construct
  source 1..50: mol_type = other DNA
aataatggcaacacaccgttgatatatacgcctgttgatttataattaac

SEQ ID NO: 44908 - DNA, 50 bp, synthetic construct
  source 1..50: mol_type = other DNA
aatattttaatacactaaaagaggtactgtttataatttataaatatata

SEQ ID NO: 44909 - DNA, 50 bp, synthetic construct
  source 1..50: mol_type = other DNA
aagtagagaatccaggttgttttgatcaaggcaacctacagatactactt

SEQ ID NO: 44910 - DNA, 50 bp, synthetic construct
  source 1..50: mol_type = other DNA
atgggtagtgaagaaaatggttgatatcaaccatttggtttataatgtaa

SEQ ID NO: 44911 - DNA, 50 bp, synthetic construct
  source 1..50: mol_type = other DNA
atgtgcattattgattgcttcgatataatgagtttgtataaaagcgaaat

SEQ ID NO: 44912 - DNA, 50 bp, synthetic construct
  source 1..50: mol_type = other DNA
gtcttgtgagagagttttcaaacagctgtttgatggctacattgcaggac

SEQ ID NO: 44913 - DNA, 50 bp, synthetic construct
  source 1..50: mol_type = other DNA
agcagagtgagattgacgaactattaatatttctattatcgatttctatt

SEQ ID NO: 44914 - DNA, 50 bp, synthetic construct
  source 1..50: mol_type = other DNA
tctatgcctctattttaccacatggatctgtgcgaagtgcggtgccaaga

SEQ ID NO: 44915 - DNA, 50 bp, synthetic construct
  source 1..50: mol_type = other DNA
catccaaaaacaattaggtatgaattgaaatacactggagtttttagaga

SEQ ID NO: 44916 - DNA, 50 bp, synthetic construct
  source 1..50: mol_type = other DNA
tctgaggactttaccattttctgtagacagtctattttacggtactcttc

SEQ ID NO: 44917 - DNA, 50 bp, synthetic construct
  source 1..50: mol_type = other DNA
ctccgcaatccacagcgctcccctggcatatacttttgctaattccggag

SEQ ID NO: 44918 - DNA, 50 bp, synthetic construct
  source 1..50: mol_type = other DNA
attttttaaaagctttattgtcccttattgataacctctatgtactgacg

SEQ ID NO: 44919 - DNA, 50 bp, synthetic construct
  source 1..50: mol_type = other DNA
atttcggcttttataattctaaaaaattttggaatattcaagcaaaagta

SEQ ID NO: 44920 - DNA, 50 bp, synthetic construct
  source 1..50: mol_type = other DNA
ttcaaagaaagtcctgccaaatatccgtatattgatgggctgaatgcatc

SEQ ID NO: 44921 - DNA, 50 bp, synthetic construct
  source 1..50: mol_type = other DNA
tgtgtaggatacaagccttactgtaaagcgcgaattttgtatcagactat

SEQ ID NO: 44922 - DNA, 50 bp, synthetic construct
  source 1..50: mol_type = other DNA
gatcaattccaatgatatgatatttatttcttattgcattgtaatatatt

SEQ ID NO: 44923 - DNA, 50 bp, synthetic construct
  source 1..50: mol_type = other DNA
cagttttcatagcttgaccaaaataattttataccaagtaccaaaaaact

SEQ ID NO: 44924 - DNA, 50 bp, synthetic construct
  source 1..50: mol_type = other DNA
ggaatgctcgactcagttttatcgtccggttgtgctgataaggtcattga

SEQ ID NO: 44925 - DNA, 50 bp, synthetic construct
  source 1..50: mol_type = other DNA
cgaatgtagtaatttgatgttatcatataaaggagtaattccggtgacat

SEQ ID NO: 44926 - DNA, 50 bp, synthetic construct
  source 1..50: mol_type = other DNA
tccttcaagaatacaaggataatgttggtataattagaatactttaagga

SEQ ID NO: 44927 - DNA, 50 bp, synthetic construct
  source 1..50: mol_type = other DNA
gactatcgatgacgcgaagaagtatatagtttccgtcgccctcgatgcgc

SEQ ID NO: 44928 - DNA, 50 bp, synthetic construct
  source 1..50: mol_type = other DNA
tttataaaattaagcacctattttcaatgtcaggtgtgtaagaataccaa

SEQ ID NO: 44929 - DNA, 50 bp, synthetic construct
  source 1..50: mol_type = other DNA
ttcaatgcatatttttaacatctcaccgctgagataaataccgcattgat

SEQ ID NO: 44930 - DNA, 50 bp, synthetic construct
  source 1..50: mol_type = other DNA
cgggtgcttttttttattgcaaattctgccggcataaaaaaagaccatcg

SEQ ID NO: 44931 - DNA, 50 bp, synthetic construct
  source 1..50: mol_type = other DNA
tggcacatacacatggttttcaaaaatagttgacggatgtgctgtgaccg

SEQ ID NO: 44932 - DNA, 50 bp, synthetic construct
  source 1..50: mol_type = other DNA
ttacgatacctacatcatttaggttcaggaaaagcttgtattgtgcgtaa

SEQ ID NO: 44933 - DNA, 50 bp, synthetic construct
  source 1..50: mol_type = other DNA
tacttcaattctgttgattaatgatgtttttaatcaattattttgatgcc

SEQ ID NO: 44934 - DNA, 50 bp, synthetic construct
  source 1..50: mol_type = other DNA
tttaaactatgatgataaaactaaaaatatgtttattcgtgtactttaaa

SEQ ID NO: 44935 - DNA, 50 bp, synthetic construct
  source 1..50: mol_type = other DNA
tcctggtccgttgacacacggcagtagaatgctgtgtcaactgtcaactg

SEQ ID NO: 44936 - DNA, 50 bp, synthetic construct
  source 1..50: mol_type = other DNA
aaagggaggccgctcaccccgaacggccgcgctctgcggccagctgcttt

SEQ ID NO: 44937 - DNA, 50 bp, synthetic construct
  source 1..50: mol_type = other DNA
agagcgattaaatagatattacctatgtgttgtatctgttgatatgctcg

SEQ ID NO: 44938 - DNA, 50 bp, synthetic construct
  source 1..50: mol_type = other DNA
aaagatgaatatgacgcattcaaaagactcgataggaattatccatctga

SEQ ID NO: 44939 - DNA, 50 bp, synthetic construct
  source 1..50: mol_type = other DNA
taccagaaaaccgaaaggaaggaaaatagcctccttctatggtgaatgga

SEQ ID NO: 44940 - DNA, 50 bp, synthetic construct
  source 1..50: mol_type = other DNA
tcttcgtgtagtatattccgctttgaaatccccgaaatacttctgaaagc

SEQ ID NO: 44941 - DNA, 50 bp, synthetic construct
  source 1..50: mol_type = other DNA
ggtagcgcggcattgggagtacacatatgaagtccctcatggcggcgaag

SEQ ID NO: 44942 - DNA, 50 bp, synthetic construct
  source 1..50: mol_type = other DNA
aagaaaagcaagactgggtgctacgcgtattgccgtgtcagcacttttcg

SEQ ID NO: 44943 - DNA, 50 bp, synthetic construct
  source 1..50: mol_type = other DNA
cagcgtaatgctgcaatgcagacggcaaaggcaaattgcagcaaacagac

SEQ ID NO: 44944 - DNA, 50 bp, synthetic construct
  source 1..50: mol_type = other DNA
catggtatatacattatacgaaacagctgctgtatacgatgtatgagatg

SEQ ID NO: 44945 - DNA, 50 bp, synthetic construct
  source 1..50: mol_type = other DNA
ccttttcgagatttttatcaaatacgtacttcttgcccaagtagtaaaat

SEQ ID NO: 44946 - DNA, 50 bp, synthetic construct
  source 1..50: mol_type = other DNA
acaaccataagaggttgatactgattcctgtaccgggtgctgatgtttcc

SEQ ID NO: 44947 - DNA, 50 bp, synthetic construct
  source 1..50: mol_type = other DNA
tatatatgcggcccctacaacgcagctgttttgtaggggcggatgctcgc

SEQ ID NO: 44948 - DNA, 50 bp, synthetic construct
  source 1..50: mol_type = other DNA
cttctttttccacatagccggacaggtgatcggctgcatgaaaaaagccg

SEQ ID NO: 44949 - DNA, 50 bp, synthetic construct
  source 1..50: mol_type = other DNA
atgtcaatataatttgaatgtaaagatactcacacaaaatataatactcg

SEQ ID NO: 44950 - DNA, 50 bp, synthetic construct
  source 1..50: mol_type = other DNA
tatgacatatctttgtctacattatttacatttccaaaatataagacaga

SEQ ID NO: 44951 - DNA, 50 bp, synthetic construct
  source 1..50: mol_type = other DNA
atgaatcagattatagtcagtggaagaaaaaattcagaaatttgattata

SEQ ID NO: 44952 - DNA, 50 bp, synthetic construct
  source 1..50: mol_type = other DNA
tgatcgagaactgaccgagggttacgtaaacaaaggcgtagacccgaaca

SEQ ID NO: 44953 - DNA, 50 bp, synthetic construct
  source 1..50: mol_type = other DNA
gctggatagagtgactgactacgaattcgattgcagccgtcgtagagggc

SEQ ID NO: 44954 - DNA, 50 bp, synthetic construct
  source 1..50: mol_type = other DNA
cccaaagggtgtgctctgtgagattgagcataaaaagaacacccattgca

SEQ ID NO: 44955 - DNA, 50 bp, synthetic construct
  source 1..50: mol_type = other DNA
ctatttttacggaagaaaccgaagaaaatctcccgcttccctaaaagcca

SEQ ID NO: 44956 - DNA, 50 bp, synthetic construct
  source 1..50: mol_type = other DNA
tcaattgctatctcccaaggctcttgggctcctttccttgttggaatgga

SEQ ID NO: 44957 - DNA, 50 bp, synthetic construct
  source 1..50: mol_type = other DNA
tattatatggtcgatcatgcagagtacggcgcaggcagcgcttaataata

SEQ ID NO: 44958 - DNA, 50 bp, synthetic construct
  source 1..50: mol_type = other DNA
atacagccgggcagcgtccccgttggaacgcggatgccgtgcgttcgtca

SEQ ID NO: 44959 - DNA, 50 bp, synthetic construct
  source 1..50: mol_type = other DNA
gccacacgtttctttgccactgggatcttagccacaatcacttgtgttgc

SEQ ID NO: 44960 - DNA, 50 bp, synthetic construct
  source 1..50: mol_type = other DNA
gataatgtactccggggaagtggtattgttcttttaccgaagacgaggtg

SEQ ID NO: 44961 - DNA, 50 bp, synthetic construct
  source 1..50: mol_type = other DNA
gttcatgcacagttcatattcttcctgtaacttcccgatacggcatcgtg

SEQ ID NO: 44962 - DNA, 50 bp, synthetic construct
  source 1..50: mol_type = other DNA
acacttatggagcacttagagataattatctcggcctgctcaaaccggag

SEQ ID NO: 44963 - DNA, 50 bp, synthetic construct
  source 1..50: mol_type = other DNA
aaaaatactatcttaagactattatttaaatctctttggatactctttat

SEQ ID NO: 44964 - DNA, 50 bp, synthetic construct
  source 1..50: mol_type = other DNA
gaaaaacataccaacaaaaataaagaaatatttttatctttgtggtgtga

SEQ ID NO: 44965 - DNA, 50 bp, synthetic construct
  source 1..50: mol_type = other DNA
tataggaacagaagaactcgctcgtacgagcgaaagaactcgctcacatg

SEQ ID NO: 44966 - DNA, 50 bp, synthetic construct
  source 1..50: mol_type = other DNA
gaaaaaatcaacccagaacagaacatgctaatttctctatctatttttat

SEQ ID NO: 44967 - DNA, 50 bp, synthetic construct
  source 1..50: mol_type = other DNA
gatatatagtaactgtattcttttttataaaaatagctgtgatataataa

SEQ ID NO: 44968 - DNA, 50 bp, synthetic construct
  source 1..50: mol_type = other DNA
aaaatattgacgatttattccagatttcacaaaggtatcggcagtgttgc

SEQ ID NO: 44969 - DNA, 50 bp, synthetic construct
  source 1..50: mol_type = other DNA
ctgtcctcggggatggagcaggagatatcgaattcaaaatggcagggcag

SEQ ID NO: 44970 - DNA, 50 bp, synthetic construct
  source 1..50: mol_type = other DNA
gttaggaaacagtgtagcgattccataaaatgaactgtaatgaaccttgc

SEQ ID NO: 44971 - DNA, 50 bp, synthetic construct
  source 1..50: mol_type = other DNA
aagataagtttagaatatctaaatcatagatttctttttaaacttatcta

SEQ ID NO: 44972 - DNA, 50 bp, synthetic construct
  source 1..50: mol_type = other DNA
cgcacgcggactttccgaccgtccactgagcagaagaaaaggcaggcgct

SEQ ID NO: 44973 - DNA, 50 bp, synthetic construct
  source 1..50: mol_type = other DNA
atcgaaccagcagaatttggctggcatcgagggcatgggcgaggagcggc

SEQ ID NO: 44974 - DNA, 50 bp, synthetic construct
  source 1..50: mol_type = other DNA
ctggatagagcaacagccttctaagctgtctgcgctgatgccgacgcatg

SEQ ID NO: 44975 - DNA, 50 bp, synthetic construct
  source 1..50: mol_type = other DNA
tgtaccctcgtttgaccgtatattatatgataaaacaaaaagagtgttca

SEQ ID NO: 44976 - DNA, 50 bp, synthetic construct
  source 1..50: mol_type = other DNA
gagttagaatcgttgggaaaaaaagaatctgagggcaacgataaacctca

SEQ ID NO: 44977 - DNA, 50 bp, synthetic construct
  source 1..50: mol_type = other DNA
gaattttcaaaaaacagtaagaaaaaataacacttcctttttgattattt

SEQ ID NO: 44978 - DNA, 50 bp, synthetic construct
  source 1..50: mol_type = other DNA
ctgcaaacagttcgtccaccactgtacaaaacaggaatttctgttttcac

SEQ ID NO: 44979 - DNA, 50 bp, synthetic construct
  source 1..50: mol_type = other DNA
tgaggcgtttttcatattcgtgcatataataatatagtaaatcagcctca

SEQ ID NO: 44980 - DNA, 50 bp, synthetic construct
  source 1..50: mol_type = other DNA
ttttttctacaatggttaatttgtcaataaatataaaggtgtccgacaat

SEQ ID NO: 44981 - DNA, 50 bp, synthetic construct
  source 1..50: mol_type = other DNA
aatggtataatgcatttgaaatttaacgatttcacgttagaaatcgttgg

SEQ ID NO: 44982 - DNA, 50 bp, synthetic construct
  source 1..50: mol_type = other DNA
ccaaaattccttgatatataagggatccacaatttcttctggaattttga

SEQ ID NO: 44983 - DNA, 50 bp, synthetic construct
  source 1..50: mol_type = other DNA
cagcctcatagaaagcgagaataaattttgtctcaccaaatatgtaaaaa

SEQ ID NO: 44984 - DNA, 50 bp, synthetic construct
  source 1..50: mol_type = other DNA
gggataaaacctgtccagagcaataagcagaggtgatcaggttttcgccc

SEQ ID NO: 44985 - DNA, 50 bp, synthetic construct
  source 1..50: mol_type = other DNA
tccgtttttagcaaaggagctgatttatgcctaaatttgtcaagcgcaga

SEQ ID NO: 44986 - DNA, 50 bp, synthetic construct
  source 1..50: mol_type = other DNA
gtactgcggtactgccgccctgttcgaacgctgaggaaatcacgcagtaa

SEQ ID NO: 44987 - DNA, 50 bp, synthetic construct
  source 1..50: mol_type = other DNA
gcgcttcgctcggcgtgatatttttgtcaagtgttcggaggcggtttgga

SEQ ID NO: 44988 - DNA, 50 bp, synthetic construct
  source 1..50: mol_type = other DNA
tcagtgtgagtcctgtccgtctgaaatctttcagatgcgagacaatctga

SEQ ID NO: 44989 - DNA, 50 bp, synthetic construct
  source 1..50: mol_type = other DNA
tcctgggtggcagagacggagccgcacgggtcacacattgccatcgcggg

SEQ ID NO: 44990 - DNA, 50 bp, synthetic construct
  source 1..50: mol_type = other DNA
cgcttatacaattgtgcaatgatcattatatcatcattattgttatttat

SEQ ID NO: 44991 - DNA, 50 bp, synthetic construct
  source 1..50: mol_type = other DNA
tcaaagtgaaaattttaaattattttattattttaaaatttgagagagga

SEQ ID NO: 44992 - DNA, 50 bp, synthetic construct
  source 1..50: mol_type = other DNA
tcattttcaatagtaaattaaaaatttttttctctctttcttgaaataaa

SEQ ID NO: 44993 - DNA, 50 bp, synthetic construct
  source 1..50: mol_type = other DNA
tggtgaatcgtccggaaattatattttttcaatttctcgaaatctcattt

SEQ ID NO: 44994 - DNA, 50 bp, synthetic construct
  source 1..50: mol_type = other DNA
acattaaaattcacgcccagcgcggcacaaccggcaaaaaattttcgtgt

SEQ ID NO: 44995 - DNA, 50 bp, synthetic construct
  source 1..50: mol_type = other DNA
aagtcactaatgccacaacaaaaccaagaaaaagggctttttaatgcctg

SEQ ID NO: 44996 - DNA, 50 bp, synthetic construct
  source 1..50: mol_type = other DNA
tttatactccatccaacaggcggatttccgctgaaaagaaggagatgaac

SEQ ID NO: 44997 - DNA, 50 bp, synthetic construct
  source 1..50: mol_type = other DNA
aaacattttctccgaaattagctgcgggaccaagttttatgaaaatgaca

SEQ ID NO: 44998 - DNA, 50 bp, synthetic construct
  source 1..50: mol_type = other DNA
aatagtcgttcgctggggacggctataaacttgtacttggaatgactgca

SEQ ID NO: 44999 - DNA, 50 bp, synthetic construct
  source 1..50: mol_type = other DNA
acaatttcgacgcgctggagaagcgctcttcgacaagtcggcaaaacagc

SEQ ID NO: 45000 - DNA, 50 bp, synthetic construct
  source 1..50: mol_type = other DNA
ttttcataattactataacgaaagagctttcgccatacccattatctcac

SEQ ID NO: 45001 - DNA, 50 bp, synthetic construct
  source 1..50: mol_type = other DNA
gtatttggtgtaatgattgaaacgatcaagtcgagtattacacaaaatat

SEQ ID NO: 45002 - DNA, 50 bp, synthetic construct
  source 1..50: mol_type = other DNA
aaaaaatatgggcataaatgggataaataacttttattttcatatttttc

SEQ ID NO: 45003 - DNA, 50 bp, synthetic construct
  source 1..50: mol_type = other DNA
aggcagaacgggtggttttctgccaataagtcaagctgcccgttctgagg

SEQ ID NO: 45004 - DNA, 50 bp, synthetic construct
  source 1..50: mol_type = other DNA
cgcatatccactacctcttaaggagtaaggtaagagcctgttttgctgcc

SEQ ID NO: 45005 - DNA, 50 bp, synthetic construct
  source 1..50: mol_type = other DNA
gtggatttggagtcatgtagttagtactaactataccgccccatttggag

SEQ ID NO: 45006 - DNA, 50 bp, synthetic construct
  source 1..50: mol_type = other DNA
aaagatttcagataaaattcagcagccgattgatttttccggccttcttt

SEQ ID NO: 45007 - DNA, 50 bp, synthetic construct
  source 1..50: mol_type = other DNA
atatgtagcggctttagagtgatgtacaggcaaattctgccgacacataa

SEQ ID NO: 45008 - DNA, 50 bp, synthetic construct
  source 1..50: mol_type = other DNA
cgaggctgcaggcagaatacctctacaggcaaattctgccgacacataac

SEQ ID NO: 45009 - DNA, 50 bp, synthetic construct
  source 1..50: mol_type = other DNA
gctatgattaaatcaatagcttttctcaaagccattgcaataaaaatatt

SEQ ID NO: 45010 - DNA, 50 bp, synthetic construct
  source 1..50: mol_type = other DNA
aggtaaggactattatcagtgctatttcattctgataagtaacagtagct

SEQ ID NO: 45011 - DNA, 50 bp, synthetic construct
  source 1..50: mol_type = other DNA
tcctgtgctggatattgacgagattatattataccataggcagccccgga

SEQ ID NO: 45012 - DNA, 50 bp, synthetic construct
  source 1..50: mol_type = other DNA
cacccaccttgccattgattgtcacgtgtacacctctggcaaggtgtaac

SEQ ID NO: 45013 - DNA, 50 bp, synthetic construct
  source 1..50: mol_type = other DNA
aggcaagtcgaatacacgccaaggagcagcaggagaacacccggctgcct

SEQ ID NO: 45014 - DNA, 50 bp, synthetic construct
  source 1..50: mol_type = other DNA
cgcctgctttcattgtgaatacggtcacatattacctctaaaagcatgga

SEQ ID NO: 45015 - DNA, 50 bp, synthetic construct
  source 1..50: mol_type = other DNA
gggtaaaataaaaatcagacgaagttcttattgtattttttataaaatct

SEQ ID NO: 45016 - DNA, 50 bp, synthetic construct
  source 1..50: mol_type = other DNA
gaaaaaagaactgcttgaccaatctggatgatacaatatattctttttcg

SEQ ID NO: 45017 - DNA, 50 bp, synthetic construct
  source 1..50: mol_type = other DNA
gcagcaggtttatcaatgacggcagttgaagcggatgttttaggagctgt

SEQ ID NO: 45018 - DNA, 50 bp, synthetic construct
  source 1..50: mol_type = other DNA
gagcgctgaatttattcagtatatagaaatactagataaattcaaattcc

SEQ ID NO: 45019 - DNA, 50 bp, synthetic construct
  source 1..50: mol_type = other DNA
tgaaaaaagagagattatccatattatatttgataatctcagctttgtat

SEQ ID NO: 45020 - DNA, 50 bp, synthetic construct
  source 1..50: mol_type = other DNA
agctcgaagataaaaaggtatttcaggaagtacagccagaaacctatgca

SEQ ID NO: 45021 - DNA, 50 bp, synthetic construct
  source 1..50: mol_type = other DNA
aaatgccttatatgcttgcaaggaagttatttccggcattatttctacat

SEQ ID NO: 45022 - DNA, 50 bp, synthetic construct
  source 1..50: mol_type = other DNA
gatatgtgcttgatggagttttataactaaaattacttgatttttatatc

SEQ ID NO: 45023 - DNA, 50 bp, synthetic construct
  source 1..50: mol_type = other DNA
cacaagaacatagtccagaccgttgccaatgctaaaactattttcttaat

SEQ ID NO: 45024 - DNA, 50 bp, synthetic construct
  source 1..50: mol_type = other DNA
gctgtccgcgggaattttaaccccacaacgtgtaaaagccctacgaatcg

SEQ ID NO: 45025 - DNA, 50 bp, synthetic construct
  source 1..50: mol_type = other DNA
ataaagttacccaatttaataataagaaatattaactataggtaatttaa

SEQ ID NO: 45026 - DNA, 50 bp, synthetic construct
  source 1..50: mol_type = other DNA
aaaggagaaaaaacgacccttttgctctttctggggaggttctctcccct

SEQ ID NO: 45027 - DNA, 50 bp, synthetic construct
  source 1..50: mol_type = other DNA
ttgaatgcaagcaccaaatgcgtaatcacctatttggctcttcgattatt

SEQ ID NO: 45028 - DNA, 50 bp, synthetic construct
  source 1..50: mol_type = other DNA
ttcgattctgggtgtcgcctccattttttggaagctaccccagatgagat

SEQ ID NO: 45029 - DNA, 50 bp, synthetic construct
  source 1..50: mol_type = other DNA
gaagaagatcacggctgcactttctataaaatgcagctatgattttgctt

SEQ ID NO: 45030 - DNA, 50 bp, synthetic construct
  source 1..50: mol_type = other DNA
gctgcccaaaagaagatttgttggatcggacggttcttcttccacggctt

SEQ ID NO: 45031 - DNA, 50 bp, synthetic construct
  source 1..50: mol_type = other DNA
aaagaggctgtagaggaaagatacaggttgcagcatgggacaagaatcag

SEQ ID NO: 45032 - DNA, 50 bp, synthetic construct
  source 1..50: mol_type = other DNA
gccttacaagcagagggtcataggttatgatgacaggctgattttaaggt

SEQ ID NO: 45033 - DNA, 50 bp, synthetic construct
  source 1..50: mol_type = other DNA
ggattctggagcagggcggaagatatcatttccttccttaaagtattttt

SEQ ID NO: 45034 - DNA, 50 bp, synthetic construct
  source 1..50: mol_type = other DNA
attttcaaaactgttcaactgttcttcaagtgcaaaacaaggcataaaag

SEQ ID NO: 45035 - DNA, 50 bp, synthetic construct
  source 1..50: mol_type = other DNA
cctatctttttatataatatcatacttatcatattagtgtaaaagaacct

SEQ ID NO: 45036 - DNA, 50 bp, synthetic construct
  source 1..50: mol_type = other DNA
gaccagcatttcaatcaaggacactagttacattcatttcaatcagcgta

SEQ ID NO: 45037 - DNA, 50 bp, synthetic construct
  source 1..50: mol_type = other DNA
tgggcatggatctcgttcacggccagccactgacaccgcatcctcgccca

SEQ ID NO: 45038 - DNA, 50 bp, synthetic construct
  source 1..50: mol_type = other DNA
atgagtgggctgaatacttgataaatttatacatgatattctatgtcttt

SEQ ID NO: 45039 - DNA, 50 bp, synthetic construct
  source 1..50: mol_type = other DNA
actgaagattatctgcttgagccactgttctcaatttgatacactccttt

SEQ ID NO: 45040 - DNA, 50 bp, synthetic construct
  source 1..50: mol_type = other DNA
gccgcagcggagcagaccggcaaagacgttccgagtataaccgtaaccat

SEQ ID NO: 45041 - DNA, 50 bp, synthetic construct
  source 1..50: mol_type = other DNA
ttaaaattttttcttgacatttgcttatgctgttcaaggtcaaattttgt

SEQ ID NO: 45042 - DNA, 50 bp, synthetic construct
  source 1..50: mol_type = other DNA
gaaacaatttttatatgctttagcctaataaagcagaacaacccaaattc

SEQ ID NO: 45043 - DNA, 50 bp, synthetic construct
  source 1..50: mol_type = other DNA
ttttgaggaaatactatccagaagcgtttctgtggtataatgaaatcaat

SEQ ID NO: 45044 - DNA, 50 bp, synthetic construct
  source 1..50: mol_type = other DNA
gacttttcaattcaattgaaacattaatatttcttgccaccgatgttctc

SEQ ID NO: 45045 - DNA, 50 bp, synthetic construct
  source 1..50: mol_type = other DNA
ctcatacaaggaattctggttaatatattcttttcgtttatcactttcag

SEQ ID NO: 45046 - DNA, 50 bp, synthetic construct
  source 1..50: mol_type = other DNA
acgctcattaagatacgttgcttcttgacgcatctgccaaaggcagccgt

SEQ ID NO: 45047 - DNA, 50 bp, synthetic construct
  source 1..50: mol_type = other DNA
aaacctctgcctatccgcagaaatttattccagctcaaacgcgccggtgt

SEQ ID NO: 45048 - DNA, 50 bp, synthetic construct
  source 1..50: mol_type = other DNA
aaccccagcaaatatgcggtctgctgcggtcttgtatatccactggcgcc

SEQ ID NO: 45049 - DNA, 50 bp, synthetic construct
  source 1..50: mol_type = other DNA
aagcaggctgacgacgtcgtataatataatacatagtcgacctccagagt

SEQ ID NO: 45050 - DNA, 50 bp, synthetic construct
  source 1..50: mol_type = other DNA
ataatattgagaataaatcaattcatttatttttttatttcaaaattttt

SEQ ID NO: 45051 - DNA, 50 bp, synthetic construct
  source 1..50: mol_type = other DNA
atgcagcgggagcactgctccgccggcgatctacaacattcccgccgcgc

SEQ ID NO: 45052 - DNA, 50 bp, synthetic construct
  source 1..50: mol_type = other DNA
cgtttctttagctttggcgatgctataagatcgcgtccggagaaaaaaag

SEQ ID NO: 45053 - DNA, 50 bp, synthetic construct
  source 1..50: mol_type = other DNA
tatgaccttcataatgttagccttgatgtatcaacatttccagggcctaa

SEQ ID NO: 45054 - DNA, 50 bp, synthetic construct
  source 1..50: mol_type = other DNA
aaccccgctttccggtaagggaaggctttccggtaagggaaggcggggtt

SEQ ID NO: 45055 - DNA, 50 bp, synthetic construct
  source 1..50: mol_type = other DNA
tgtttctaaattgtccgaaactgaacaaaagcaacgtaaaaaaagactgg

SEQ ID NO: 45056 - DNA, 50 bp, synthetic construct
  source 1..50: mol_type = other DNA
ttacctaaacatttttaggagaataagtttcaatatcaatgcttagagtt

SEQ ID NO: 45057 - DNA, 50 bp, synthetic construct
  source 1..50: mol_type = other DNA
ataaataaagaatcagtctcactatatatcactctaaaggccaaatttat

SEQ ID NO: 45058 - DNA, 50 bp, synthetic construct
  source 1..50: mol_type = other DNA
atcagctttaggaaagcaagtacctaggattttcttttactaaaaaacgg

SEQ ID NO: 45059 - DNA, 50 bp, synthetic construct
  source 1..50: mol_type = other DNA
aaatattgttaatatagcaaacattatagttagagattgctacaaagatc

SEQ ID NO: 45060 - DNA, 50 bp, synthetic construct
  source 1..50: mol_type = other DNA
tggaagaagaaccgtccgatatcccgggagaagttcaaaaggaactcccc

SEQ ID NO: 45061 - DNA, 50 bp, synthetic construct
  source 1..50: mol_type = other DNA
cacataaatcacagtaggtgttaataatagcaagtacaatctgcgatacc

SEQ ID NO: 45062 - DNA, 50 bp, synthetic construct
  source 1..50: mol_type = other DNA
ctgtcacctcgaccatatcgagtgttcaagtaatatttgttgttcatatt

SEQ ID NO: 45063 - DNA, 50 bp, synthetic construct
  source 1..50: mol_type = other DNA
tttaattattcctcaagagcgcaaaagtgccctgcactattagaattcaa

SEQ ID NO: 45064 - DNA, 50 bp, synthetic construct
  source 1..50: mol_type = other DNA
aaaggatccttgaaatcaaaaaccatgtttttctccatcttcaatcctct

SEQ ID NO: 45065 - DNA, 50 bp, synthetic construct
  source 1..50: mol_type = other DNA
ccttcatctgcatagatgtctactaaggtatcaacgtatgcttttgaagg

SEQ ID NO: 45066 - DNA, 50 bp, synthetic construct
  source 1..50: mol_type = other DNA
cgcgatgttcatccgaagcgtgaagtatcacgcactggagaaagccaccg

SEQ ID NO: 45067 - DNA, 50 bp, synthetic construct
  source 1..50: mol_type = other DNA
accgagaccgtgtttataatcgataatgagattataaacgtggatattgt

SEQ ID NO: 45068 - DNA, 50 bp, synthetic construct
  source 1..50: mol_type = other DNA
tctctattcagatagaatgccaaaacaggggcgatttggctgggggcatc

SEQ ID NO: 45069 - DNA, 50 bp, synthetic construct
  source 1..50: mol_type = other DNA
actccttgaactttagaagttggtgcatggaattcggaagggctgtgagt

SEQ ID NO: 45070 - DNA, 50 bp, synthetic construct
  source 1..50: mol_type = other DNA
tcgcacatttcacaagcggcttgataacatattttcaataaaatgttaaa

SEQ ID NO: 45071 - DNA, 50 bp, synthetic construct
  source 1..50: mol_type = other DNA
aatgctggagctgataattggagctatctatgcggatgaaggaatctccg

SEQ ID NO: 45072 - DNA, 50 bp, synthetic construct
  source 1..50: mol_type = other DNA
ctataacattttaataaaatcaaagttttttattttgaagaatgatataa

SEQ ID NO: 45073 - DNA, 50 bp, synthetic construct
  source 1..50: mol_type = other DNA
ggaacattttaataaaaaagagccacggcttacttcttttacaataatct

SEQ ID NO: 45074 - DNA, 50 bp, synthetic construct
  source 1..50: mol_type = other DNA
gatatcatgcgtgagttagatgataatggttataagactaccacaggtgg

SEQ ID NO: 45075 - DNA, 50 bp, synthetic construct
  source 1..50: mol_type = other DNA
gccctggcggggaaccccaatgtgggtcaagtggtgtttcccgcgtggag

SEQ ID NO: 45076 - DNA, 50 bp, synthetic construct
  source 1..50: mol_type = other DNA
ttaacagggaaaaatttcacccgttttcaggacttgtttctcccggtaaa

SEQ ID NO: 45077 - DNA, 50 bp, synthetic construct
  source 1..50: mol_type = other DNA
tacgtacgaaataggcgttatagaaataaaaaatatgtattttttgagtg

SEQ ID NO: 45078 - DNA, 50 bp, synthetic construct
  source 1..50: mol_type = other DNA
atgaaccgctatctttccgcaagcgaagttgcggcagaaccaaggcggcg

SEQ ID NO: 45079 - DNA, 50 bp, synthetic construct
  source 1..50: mol_type = other DNA
aacagggaaaaatttcacccgttttaaaagacaagccaagctctaatgtt

SEQ ID NO: 45080 - DNA, 50 bp, synthetic construct
  source 1..50: mol_type = other DNA
aagcagcatacgcgtacagtcaaatcattcttaataacggtattccgttt

SEQ ID NO: 45081 - DNA, 50 bp, synthetic construct
  source 1..50: mol_type = other DNA
acacaaaaatacgaaatctcttagttctagagatccaaccgttcttgttg

SEQ ID NO: 45082 - DNA, 50 bp, synthetic construct
  source 1..50: mol_type = other DNA
tttagataaatatttattgttgtattttacacactatatatccctctaaa

SEQ ID NO: 45083 - DNA, 50 bp, synthetic construct
  source 1..50: mol_type = other DNA
cgataaaaacaccctgcattgctgcaaatcaatgctaattgttttcatcg

SEQ ID NO: 45084 - DNA, 50 bp, synthetic construct
  source 1..50: mol_type = other DNA
ttcagctcctaaatggtcaattcgccatgctttataatttatgtgtgtaa

SEQ ID NO: 45085 - DNA, 50 bp, synthetic construct
  source 1..50: mol_type = other DNA
tttataaattcttccactgtaataattattaccgtgaatacatcttaaaa

SEQ ID NO: 45086 - DNA, 50 bp, synthetic construct
  source 1..50: mol_type = other DNA
tttttcaatagtaacatcaaatcaaaattataaatgtggatattgtttaa

SEQ ID NO: 45087 - DNA, 50 bp, synthetic construct
  source 1..50: mol_type = other DNA
taatctatgtggattggagcaactatagtatctcttatcctgcgcaaagc

SEQ ID NO: 45088 - DNA, 50 bp, synthetic construct
  source 1..50: mol_type = other DNA
tgtgcgtgttctactacgatgaacgtggtcatcgtagcacagttctcgcg

SEQ ID NO: 45089 - DNA, 50 bp, synthetic construct
  source 1..50: mol_type = other DNA
aagtccagctccaccatttattgtatacaaaaaaacgtgatgcttttaac

SEQ ID NO: 45090 - DNA, 50 bp, synthetic construct
  source 1..50: mol_type = other DNA
acatcaaacagtcatatctcaaattcagaaaacctataccgttgatttcc

SEQ ID NO: 45091 - DNA, 50 bp, synthetic construct
  source 1..50: mol_type = other DNA
acattacacatcctccagaaaattaaaatgttatagaaatcttttaatgt

SEQ ID NO: 45092 - DNA, 50 bp, synthetic construct
  source 1..50: mol_type = other DNA
ctacggtctacaccaagtaggtatgcagttgacacggcggttgaccgtgt

SEQ ID NO: 45093 - DNA, 50 bp, synthetic construct
  source 1..50: mol_type = other DNA
ccttccaaagcatacgttgataccttagtagacatctatgcagatgaagg

SEQ ID NO: 45094 - DNA, 50 bp, synthetic construct
  source 1..50: mol_type = other DNA
gtgataaaatgaatttaactgaactaaatcactccttgacattttcaggg

SEQ ID NO: 45095 - DNA, 50 bp, synthetic construct
  source 1..50: mol_type = other DNA
ttatcaaataagtcaatattttgtcgataacaacagatactatattcaaa

SEQ ID NO: 45096 - DNA, 50 bp, synthetic construct
  source 1..50: mol_type = other DNA
ataacatcccaaaaccgatcaattaatatttcacggtttaaggctgtgat

SEQ ID NO: 45097 - DNA, 50 bp, synthetic construct
  source 1..50: mol_type = other DNA
tgtaatcatgccgtctaatcggtcaacctctacttaaattgttgataact

SEQ ID NO: 45098 - DNA, 50 bp, synthetic construct
  source 1..50: mol_type = other DNA
ggatctatagacccacgccggggccacacccggcgtggatgtggaggtta

SEQ ID NO: 45099 - DNA, 50 bp, synthetic construct
  source 1..50: mol_type = other DNA
agtccactggttttaacccttcagaaagacggtaattaaacctactgatg

SEQ ID NO: 45100 - DNA, 50 bp, synthetic construct
  source 1..50: mol_type = other DNA
aattatataagtgataagcatatgtacactcctttcgctactatatatca

SEQ ID NO: 45101 - DNA, 50 bp, synthetic construct
  source 1..50: mol_type = other DNA
gaaaaagtgtgtaagtgcagtcgcattactgtggtttgtagcatattctc

SEQ ID NO: 45102 - DNA, 50 bp, synthetic construct
  source 1..50: mol_type = other DNA
ttttataaatgaagtatcaagattatcttatttgttcttcatctataaac

SEQ ID NO: 45103 - DNA, 50 bp, synthetic construct
  source 1..50: mol_type = other DNA
gaatgaatataggaagcagaaatataccattctcagtgatatcctgcaac

SEQ ID NO: 45104 - DNA, 50 bp, synthetic construct
  source 1..50: mol_type = other DNA
tttttatacaaaccgtttctatacaagtattcagcctgtttgtacggatc

SEQ ID NO: 45105 - DNA, 50 bp, synthetic construct
  source 1..50: mol_type = other DNA
tctataactgcattgccattttcaatatccaatatggctgccgttatcgg

SEQ ID NO: 45106 - DNA, 50 bp, synthetic construct
  source 1..50: mol_type = other DNA
gaatttaaacaatatccacatttatataaatgtggtctatataacaaatc

SEQ ID NO: 45107 - DNA, 50 bp, synthetic construct
  source 1..50: mol_type = other DNA
taaaagcatcacgtttttttgtattaatattaaaaaatttggaaacttta

SEQ ID NO: 45108 - DNA, 50 bp, synthetic construct
  source 1..50: mol_type = other DNA
attcaacattatgcgtcctccagagatgaagaggacattagctttttata

SEQ ID NO: 45109 - DNA, 50 bp, synthetic construct
  source 1..50: mol_type = other DNA
ctttctgcatgatataaaattggagcgccaactcagctccatgtagaacc

SEQ ID NO: 45110 - DNA, 50 bp, synthetic construct
  source 1..50: mol_type = other DNA
cggggcgtcatcggtcacggtgagcgcgcagcgttaccgctatacccgct

SEQ ID NO: 45111 - DNA, 50 bp, synthetic construct
  source 1..50: mol_type = other DNA
agaagaaatcgaaaacctcggagtcgactaagagaggcgtatttttcatc

SEQ ID NO: 45112 - DNA, 50 bp, synthetic construct
  source 1..50: mol_type = other DNA
atataaaatttatgaaaagtgcaatattattatttcttttactgtaatat

SEQ ID NO: 45113 - DNA, 50 bp, synthetic construct
  source 1..50: mol_type = other DNA
cgcttgctgccaataggaacggcagtcatccgcgattttggcatcaagca

SEQ ID NO: 45114 - DNA, 50 bp, synthetic construct
  source 1..50: mol_type = other DNA
caatatattatatcagataaccttaaatttttatccattacaataaattt

SEQ ID NO: 45115 - DNA, 50 bp, synthetic construct
  source 1..50: mol_type = other DNA
tcataaatttagattacaactacagctgtctatgtaaaaggcctgcatgg

SEQ ID NO: 45116 - DNA, 50 bp, synthetic construct
  source 1..50: mol_type = other DNA
ctgccgctacgacattgtgtccgtggctgtacaaaaacggcgggtcgcag

SEQ ID NO: 45117 - DNA, 50 bp, synthetic construct
  source 1..50: mol_type = other DNA
gtcttctatccgatttacaaaccatcacgttgtataatcggtatataccg

SEQ ID NO: 45118 - DNA, 50 bp, synthetic construct
  source 1..50: mol_type = other DNA
caatatattatatcagataaccttaaatatttagtcattacaataaattt

SEQ ID NO: 45119 - DNA, 50 bp, synthetic construct
  source 1..50: mol_type = other DNA
ttttcatacttttaagaaggaggatggtataaattataaagatatggcta

SEQ ID NO: 45120 - DNA, 50 bp, synthetic construct
  source 1..50: mol_type = other DNA
aattttttcaactaataattttttataaaaagtttttatttataaattat

SEQ ID NO: 45121 - DNA, 50 bp, synthetic construct
  source 1..50: mol_type = other DNA
agacaaataagaactgaaaaaggatttttgtttcgttacttttcttgtca

SEQ ID NO: 45122 - DNA, 50 bp, synthetic construct
  source 1..50: mol_type = other DNA
ctcaaaattaaagtgacggacttggaaaagtgagtcacttttaataccat

SEQ ID NO: 45123 - DNA, 50 bp, synthetic construct
  source 1..50: mol_type = other DNA
taagtcccacaatggaagttcaaattttccaactaattttctcctctcgc

SEQ ID NO: 45124 - DNA, 50 bp, synthetic construct
  source 1..50: mol_type = other DNA
caataaagacattttgttaaagtacagtatttcagaagctggacaaattg

SEQ ID NO: 45125 - DNA, 50 bp, synthetic construct
  source 1..50: mol_type = other DNA
gcaaacggtcaaatctcaaactcagaaaagtgggagattgtacagttaga

SEQ ID NO: 45126 - DNA, 50 bp, synthetic construct
  source 1..50: mol_type = other DNA
gatatggttgatggacagctcgcaatcacattcagtcctgagccattatc

SEQ ID NO: 45127 - DNA, 50 bp, synthetic construct
  source 1..50: mol_type = other DNA
cctaacctatataaaatagatataaatttatgtattttatggaggtataa

SEQ ID NO: 45128 - DNA, 50 bp, synthetic construct
  source 1..50: mol_type = other DNA
cccactatcatcataaccttttgtctactaaatattaccgggatgactaa

SEQ ID NO: 45129 - DNA, 50 bp, synthetic construct
  source 1..50: mol_type = other DNA
ccttcatctgcatagatgtctactaaggtatcaacgtatgctttggaagg

SEQ ID NO: 45130 - DNA, 50 bp, synthetic construct
  source 1..50: mol_type = other DNA
tgcattgccggaaaaaatgattcagctgtatcaccttccctttgtatggt

SEQ ID NO: 45131 - DNA, 50 bp, synthetic construct
  source 1..50: mol_type = other DNA
tcggctgccgtgtggtgctggatcaaaatccagcccaaatgtgtagccgc

SEQ ID NO: 45132 - DNA, 50 bp, synthetic construct
  source 1..50: mol_type = other DNA
gtaacagtcattgcatataaaaatgattttgattatggaaattatattgt

SEQ ID NO: 45133 - DNA, 50 bp, synthetic construct
  source 1..50: mol_type = other DNA
ggtaaaaatgaaaattagtctggactatcagcctgattttgatttaattt

SEQ ID NO: 45134 - DNA, 50 bp, synthetic construct
  source 1..50: mol_type = other DNA
gcaggaaagcagtatgaatgtgtaaatataaaaacaaactgcggtttgat

SEQ ID NO: 45135 - DNA, 50 bp, synthetic construct
  source 1..50: mol_type = other DNA
ttataccagcaaagcagaatttggcagatctctctggcatgcagataaaa

SEQ ID NO: 45136 - DNA, 50 bp, synthetic construct
  source 1..50: mol_type = other DNA
ctttgctcataggatactgtatgggttctttcatatcaacctgattttcc

SEQ ID NO: 45137 - DNA, 50 bp, synthetic construct
  source 1..50: mol_type = other DNA
gtgacattacagagaattatggaaatttccatcttcgtatgtaacaataa

SEQ ID NO: 45138 - DNA, 50 bp, synthetic construct
  source 1..50: mol_type = other DNA
tcgacagttgctttcaggttcggacaggctacagttcttgcaacagagta

SEQ ID NO: 45139 - DNA, 50 bp, synthetic construct
  source 1..50: mol_type = other DNA
atttaacatttcctgatccatttgaggatgccgagcaggaaatgttaaaa

SEQ ID NO: 45140 - DNA, 50 bp, synthetic construct
  source 1..50: mol_type = other DNA
aaagaaatttggatttagtccatttttatggcataaatcctgcctaaatt

SEQ ID NO: 45141 - DNA, 50 bp, synthetic construct
  source 1..50: mol_type = other DNA
tgaaaagcctgaaaaaagctacaaagttgtatttttcgagcatcttttgt

SEQ ID NO: 45142 - DNA, 50 bp, synthetic construct
  source 1..50: mol_type = other DNA
gaaatcgttaggtgggttgattttaaaaaatggacaaacatacttgacta

SEQ ID NO: 45143 - DNA, 50 bp, synthetic construct
  source 1..50: mol_type = other DNA
agtcttgcaagcggaacatctgttcttacagacacagattgagccagaac

SEQ ID NO: 45144 - DNA, 50 bp, synthetic construct
  source 1..50: mol_type = other DNA
acatattataccatttcaaacgccattaattagtaatttatacaaagaaa

SEQ ID NO: 45145 - DNA, 50 bp, synthetic construct
  source 1..50: mol_type = other DNA
gctgtaaggttttaaggaaaaagtccctcctttccgtacgtctatacatc

SEQ ID NO: 45146 - DNA, 50 bp, synthetic construct
  source 1..50: mol_type = other DNA
gcatacaaagaggctgtagaggaaagggcttttacatgttcagggtaggt

SEQ ID NO: 45147 - DNA, 50 bp, synthetic construct
  source 1..50: mol_type = other DNA
acatttgagcgcaacgctgctgagatcaatagtgacaaaccgagtatgat

SEQ ID NO: 45148 - DNA, 50 bp, synthetic construct
  source 1..50: mol_type = other DNA
aaatatttctgcaaatgtcaaaaaggtttttgagaatttgggcaatatct

SEQ ID NO: 45149 - DNA, 50 bp, synthetic construct
  source 1..50: mol_type = other DNA
tacataacacaagaaaggaagatttatatcttccttggtaagttcggctt

SEQ ID NO: 45150 - DNA, 50 bp, synthetic construct
  source 1..50: mol_type = other DNA
atcaaaaccggcttttttaatttcatctaagtaaaaattgttatattgat

SEQ ID NO: 45151 - DNA, 50 bp, synthetic construct
  source 1..50: mol_type = other DNA
gagagataaatttctcaataactgctatcgtatcgagaatggcatcgcag

SEQ ID NO: 45152 - DNA, 50 bp, synthetic construct
  source 1..50: mol_type = other DNA
tgttatttttgtacccaaaaatcatatttacaaagtatgcaaaaatgctt

SEQ ID NO: 45153 - DNA, 50 bp, synthetic construct
  source 1..50: mol_type = other DNA
tatcttactgtcaaaaacaacatggatacaatatttttgcatgtaaaata

SEQ ID NO: 45154 - DNA, 50 bp, synthetic construct
  source 1..50: mol_type = other DNA
atgggtggctcccaggtattcttagaatttctagaatttcaaaaaccgcg

SEQ ID NO: 45155 - DNA, 50 bp, synthetic construct
  source 1..50: mol_type = other DNA
cgagcggcaaaaatagaacagcttacccactgttcccaatttctcgatcc

SEQ ID NO: 45156 - DNA, 50 bp, synthetic construct
  source 1..50: mol_type = other DNA
attatgtttgtattatatcatgtttgaacctgaactggaacggttccgcg

SEQ ID NO: 45157 - DNA, 50 bp, synthetic construct
  source 1..50: mol_type = other DNA
caattctgtatccgtaaggtgtatgtatacacctttaggttacaaaaaac

SEQ ID NO: 45158 - DNA, 50 bp, synthetic construct
  source 1..50: mol_type = other DNA
cagaccaaatccacgcaatgtcgaagccgacatcggattcatgggttctg

SEQ ID NO: 45159 - DNA, 50 bp, synthetic construct
  source 1..50: mol_type = other DNA
tataaataaattaaatttatattaagtttattcattttaagttgtttatt

SEQ ID NO: 45160 - DNA, 50 bp, synthetic construct
  source 1..50: mol_type = other DNA
gtacattattatcggaaaatgacttgaagcaatttcaaatacaaccaact

SEQ ID NO: 45161 - DNA, 50 bp, synthetic construct
  source 1..50: mol_type = other DNA
tcaaaaatagtgcccatgccgtggttacaccgcaaaggaacactttttaa

SEQ ID NO: 45162 - DNA, 50 bp, synthetic construct
  source 1..50: mol_type = other DNA
tgacaatcgttgcccttatggtgtataagcaacaggggaaacgattttgt

SEQ ID NO: 45163 - DNA, 50 bp, synthetic construct
  source 1..50: mol_type = other DNA
aattcacagacagcaagccctttcgggcaagttctgcgcttctcggattt

SEQ ID NO: 45164 - DNA, 50 bp, synthetic construct
  source 1..50: mol_type = other DNA
atttgagtgccaaatcttgctgccatgacagcaatatttgcgtccacgat

SEQ ID NO: 45165 - DNA, 50 bp, synthetic construct
  source 1..50: mol_type = other DNA
ctttacctgtttttttaatcttatttatatgataaaacaaaaagagtgtt

SEQ ID NO: 45166 - DNA, 50 bp, synthetic construct
  source 1..50: mol_type = other DNA
ggttcgcccgccagatcattcagggtggaaggtgagctgatgctcgaagg

SEQ ID NO: 45167 - DNA, 50 bp, synthetic construct
  source 1..50: mol_type = other DNA
ttccgttagcgagtgtatagcgcgttaggtctatacacgctctaaaggcg

SEQ ID NO: 45168 - DNA, 50 bp, synthetic construct
  source 1..50: mol_type = other DNA
aacagccgtgcgatcttcatgaaaaaagtccagaaacccgcatggcttct

SEQ ID NO: 45169 - DNA, 50 bp, synthetic construct
  source 1..50: mol_type = other DNA
tcgtacaaacgatatgcgaggagttatccgcagcgatatctcggcatttt

SEQ ID NO: 45170 - DNA, 50 bp, synthetic construct
  source 1..50: mol_type = other DNA
gattaaatgtattgctgtctcttcaggcagagaaagctgtaaaatacata

SEQ ID NO: 45171 - DNA, 50 bp, synthetic construct
  source 1..50: mol_type = other DNA
atgaatttttaacgagaacatctatgtaaaaggactttctaaaaatgaaa

SEQ ID NO: 45172 - DNA, 50 bp, synthetic construct
  source 1..50: mol_type = other DNA
tagggtgtattttttgcacccttttaaaaataaaattcaaaatcttacaa

SEQ ID NO: 45173 - DNA, 50 bp, synthetic construct
  source 1..50: mol_type = other DNA
ttgctgtaaaggccgggccggtgttctcgaggttaagtcaggtacagcag

SEQ ID NO: 45174 - DNA, 50 bp, synthetic construct
  source 1..50: mol_type = other DNA
agagtgcctttgagttctggcaagggttgagcttaactcaaagacaatcg

SEQ ID NO: 45175 - DNA, 50 bp, synthetic construct
  source 1..50: mol_type = other DNA
aataaagataaacagtaacacggcaaaactccgacagctttataaaaatt

SEQ ID NO: 45176 - DNA, 50 bp, synthetic construct
  source 1..50: mol_type = other DNA
caatacccgcttttttgttgacgacgtcatcaacaaaaaattttgtattg

SEQ ID NO: 45177 - DNA, 50 bp, synthetic construct
  source 1..50: mol_type = other DNA
ccgctatccccgcgacggccgtttcatcacctccgttttaagtttaaggg

SEQ ID NO: 45178 - DNA, 50 bp, synthetic construct
  source 1..50: mol_type = other DNA
atataaaaaacaacaaaatatgaatttttttattttttctttgagcctgc

SEQ ID NO: 45179 - DNA, 50 bp, synthetic construct
  source 1..50: mol_type = other DNA
ttatgtttattaaggctaagtagagctggggctttccttttcatagataa

SEQ ID NO: 45180 - DNA, 50 bp, synthetic construct
  source 1..50: mol_type = other DNA
taaaggtatcactatgcattttactttcggaatcaagcaaccgattaatc

SEQ ID NO: 45181 - DNA, 50 bp, synthetic construct
  source 1..50: mol_type = other DNA
cctcggaagcgttaagcgcgtatttttcaacccgtaaccgatttccgctt

SEQ ID NO: 45182 - DNA, 50 bp, synthetic construct
  source 1..50: mol_type = other DNA
catgccgagcaacgccgccttgatcgatcaactcgtcgttcgtgtagccc

SEQ ID NO: 45183 - DNA, 50 bp, synthetic construct
  source 1..50: mol_type = other DNA
gccgaagtaaccgccgcagtccccgccgggccttctctttcatctccggc

SEQ ID NO: 45184 - DNA, 50 bp, synthetic construct
  source 1..50: mol_type = other DNA
gacacgggcgtaagccgcaacccgcccagcagggcgcggaccagcgtgtc

SEQ ID NO: 45185 - DNA, 50 bp, synthetic construct
  source 1..50: mol_type = other DNA
cacccttcccgaaaaaacggtgaagctccaaatccttttcagcaattttg

SEQ ID NO: 45186 - DNA, 50 bp, synthetic construct
  source 1..50: mol_type = other DNA
ggaatctgtctgtcggagaataatcagttggaatccatgaaagaaattca

SEQ ID NO: 45187 - DNA, 50 bp, synthetic construct
  source 1..50: mol_type = other DNA
gcatgaaaattttataataaaatccataaatgaaaaaaaaatgcggctga

SEQ ID NO: 45188 - DNA, 50 bp, synthetic construct
  source 1..50: mol_type = other DNA
ggtgaaagtgaaattgcgccgttcaaaccggatgaaattgaataaaagaa

SEQ ID NO: 45189 - DNA, 50 bp, synthetic construct
  source 1..50: mol_type = other DNA
tcatcgtcttatctgcaccaaacgggcgtggagtgctgataagtgcgcaa

SEQ ID NO: 45190 - DNA, 50 bp, synthetic construct
  source 1..50: mol_type = other DNA
cattatcagcgattatggcgttgacttcaacagcataaatggcaataaaa

SEQ ID NO: 45191 - DNA, 50 bp, synthetic construct
  source 1..50: mol_type = other DNA
cccctgatcttagcggatgagccgacgggaaatttggactccaagtcgag

SEQ ID NO: 45192 - DNA, 50 bp, synthetic construct
  source 1..50: mol_type = other DNA
ttctatagatatatatctgaaaacctgttttcaatgatatccctccttcc

SEQ ID NO: 45193 - DNA, 50 bp, synthetic construct
  source 1..50: mol_type = other DNA
cgatgagtgaaagaatcaagaaaatatttgtgatttgcttcatggtggtt

SEQ ID NO: 45194 - DNA, 50 bp, synthetic construct
  source 1..50: mol_type = other DNA
ccaggagaccaccatccagagcggcaacgaagcggagagtgtctgccggc

SEQ ID NO: 45195 - DNA, 50 bp, synthetic construct
  source 1..50: mol_type = other DNA
tcggttcttctcgttcggcgacgccaagaccgccgcaggaaactaaccga

SEQ ID NO: 45196 - DNA, 50 bp, synthetic construct
  source 1..50: mol_type = other DNA
tcccaccaggaacagacaaaacaccggaagtgttggcatttcttgtttcc

SEQ ID NO: 45197 - DNA, 50 bp, synthetic construct
  source 1..50: mol_type = other DNA
cttgtcgttgacaaacggcacaggagaggaaccagtagcgcaaaacaaag

SEQ ID NO: 45198 - DNA, 50 bp, synthetic construct
  source 1..50: mol_type = other DNA
agcgcctgcttttccagcctgattgacggcgttaccgatgagcaggcgct

SEQ ID NO: 45199 - DNA, 50 bp, synthetic construct
  source 1..50: mol_type = other DNA
gctgctgctggcccggcagggctacaggtgcgttgaacgccagcagcatg

SEQ ID NO: 45200 - DNA, 50 bp, synthetic construct
  source 1..50: mol_type = other DNA
tcagagatctgatcaaatctgcattatactagatttgtacatatagcata

SEQ ID NO: 45201 - DNA, 50 bp, synthetic construct
  source 1..50: mol_type = other DNA
ccctgcctgctatggaagataccgttgacgatctcatcgaccacatccat

SEQ ID NO: 45202 - DNA, 50 bp, synthetic construct
  source 1..50: mol_type = other DNA
aaaaagaaaaaagcccctgcgcgtgcaagcgcagtttttaaggactgttt

SEQ ID NO: 45203 - DNA, 50 bp, synthetic construct
  source 1..50: mol_type = other DNA
gaggataaactctatcctatgatctttatcaatccatacatatattctgc

SEQ ID NO: 45204 - DNA, 50 bp, synthetic construct
  source 1..50: mol_type = other DNA
cgcttttttcagcgaatcgccgctgatccgtaagttctctgaaaatgccg

SEQ ID NO: 45205 - DNA, 50 bp, synthetic construct
  source 1..50: mol_type = other DNA
acgcaaacgctgcccaaggaggtactgacagaaatgggcatcaaatcacc

SEQ ID NO: 45206 - DNA, 50 bp, synthetic construct
  source 1..50: mol_type = other DNA
ctattactttttatcatagttatttaaaaccatatgataaaaaaatcgag

SEQ ID NO: 45207 - DNA, 50 bp, synthetic construct
  source 1..50: mol_type = other DNA
cgtcacaaaataccgttcgtttgccggaacgcgaacggtcttgccatacg

SEQ ID NO: 45208 - DNA, 50 bp, synthetic construct
  source 1..50: mol_type = other DNA
gacataaaccaaaagtacgtaggtttaccgtcataatcggcatttatcca

SEQ ID NO: 45209 - DNA, 50 bp, synthetic construct
  source 1..50: mol_type = other DNA
acattgcgaacctgttcggcagtggctgctgacgctcagcttcccatttg

SEQ ID NO: 45210 - DNA, 50 bp, synthetic construct
  source 1..50: mol_type = other DNA
ggtcaggcgaggtataatatagtcaggagacggagatgttctactacgtc

SEQ ID NO: 45211 - DNA, 50 bp, synthetic construct
  source 1..50: mol_type = other DNA
aaaaatgaaaaagccgccttgcatttctgcaagacggctatgcagaatat

SEQ ID NO: 45212 - DNA, 50 bp, synthetic construct
  source 1..50: mol_type = other DNA
gggaagcaaagattgtaaaactcatatcttttttgatctctccccatccc

SEQ ID NO: 45213 - DNA, 50 bp, synthetic construct
  source 1..50: mol_type = other DNA
ctgtggagctggtcttcctggtcagttcgtcatttagactgtatgcaaac

SEQ ID NO: 45214 - DNA, 50 bp, synthetic construct
  source 1..50: mol_type = other DNA
ctattccttcgatgtaatctttttttaactccatgactctaccgacaaag

SEQ ID NO: 45215 - DNA, 50 bp, synthetic construct
  source 1..50: mol_type = other DNA
aatataagcagtttcgcgtaggtaatataataataaaaactgcttataca

SEQ ID NO: 45216 - DNA, 50 bp, synthetic construct
  source 1..50: mol_type = other DNA
ggatttgccgataagcggactgacgccagaggcagctgatcggcatgtac

SEQ ID NO: 45217 - DNA, 50 bp, synthetic construct
  source 1..50: mol_type = other DNA
ttttggaagaataaaaaaagttgttttttatattttttattctttttctt

SEQ ID NO: 45218 - DNA, 50 bp, synthetic construct
  source 1..50: mol_type = other DNA
tatctaaaaaatcataaacacattttaatttctttacatttctttggata

SEQ ID NO: 45219 - DNA, 50 bp, synthetic construct
  source 1..50: mol_type = other DNA
cggcggatcgctgtcgagcttggtgcaaagcgccgtatggctttaccctg

SEQ ID NO: 45220 - DNA, 50 bp, synthetic construct
  source 1..50: mol_type = other DNA
ctgttagccctgcttgcggaagaatatcgcttctgtagtgcgtataagcc

SEQ ID NO: 45221 - DNA, 50 bp, synthetic construct
  source 1..50: mol_type = other DNA
aaagtaccttcattttcaatagtaaatagttcttttgttatatttaattc

SEQ ID NO: 45222 - DNA, 50 bp, synthetic construct
  source 1..50: mol_type = other DNA
tcgaacctaaaccgactgtgcttttctttccattttcgtgtgacttccga

SEQ ID NO: 45223 - DNA, 50 bp, synthetic construct
  source 1..50: mol_type = other DNA
ccagatgcgctgccgaacgcatagcgcaatgctttgataaagactgctta

SEQ ID NO: 45224 - DNA, 50 bp, synthetic construct
  source 1..50: mol_type = other DNA
cgtgaagcgtgacagcgtcgccggtatccgcaacgctgtcaaagttgctg

SEQ ID NO: 45225 - DNA, 50 bp, synthetic construct
  source 1..50: mol_type = other DNA
agactttaaaaagccttgttctgatttttcaaaaagtttttttaacttct

SEQ ID NO: 45226 - DNA, 50 bp, synthetic construct
  source 1..50: mol_type = other DNA
cagctatcagttgatgctacaattctttttgtagtagtaactgatagtaa

SEQ ID NO: 45227 - DNA, 50 bp, synthetic construct
  source 1..50: mol_type = other DNA
atttattgtatcacagatttatgaatcaaatcagctgtgctataatagac

SEQ ID NO: 45228 - DNA, 50 bp, synthetic construct
  source 1..50: mol_type = other DNA
tcttattgacaattttttcgttattctcaaggaaaattgtatcaatctga

SEQ ID NO: 45229 - DNA, 50 bp, synthetic construct
  source 1..50: mol_type = other DNA
cttgtaaaacaagtagaagtaaacatctacaaatcaggttggaatagtaa

SEQ ID NO: 45230 - DNA, 50 bp, synthetic construct
  source 1..50: mol_type = other DNA
gagcaggcaaagcagcttaaggagtgattctttcactcattgcctccctg

SEQ ID NO: 45231 - DNA, 50 bp, synthetic construct
  source 1..50: mol_type = other DNA
cagctgctcctcgttgtcggtgctgaagcaccgtcgtcggcatagagcgt

SEQ ID NO: 45232 - DNA, 50 bp, synthetic construct
  source 1..50: mol_type = other DNA
aattcttataaaaataacgccctgcatcaggccaattatttatatctata

SEQ ID NO: 45233 - DNA, 50 bp, synthetic construct
  source 1..50: mol_type = other DNA
gtgcccgattcgggcacaggggaaggatgagctggaggcgaagcaagccg

SEQ ID NO: 45234 - DNA, 50 bp, synthetic construct
  source 1..50: mol_type = other DNA
tccagaagaaagtatatatattataattacatcttattatttcttctgtt

SEQ ID NO: 45235 - DNA, 50 bp, synthetic construct
  source 1..50: mol_type = other DNA
acaattgatttaccctcgtatgagccttcagctggcaacaaaacaatatc

SEQ ID NO: 45236 - DNA, 50 bp, synthetic construct
  source 1..50: mol_type = other DNA
tctgagttttctgccgtaataaacttgtatattataacacaagggtatgc

SEQ ID NO: 45237 - DNA, 50 bp, synthetic construct
  source 1..50: mol_type = other DNA
accgtacactcggtcagagaatgttcttattctttgccagaatatattca

SEQ ID NO: 45238 - DNA, 50 bp, synthetic construct
  source 1..50: mol_type = other DNA
attatattatgaagaacattcccaattcggaaacctcgtcatcattcaga

SEQ ID NO: 45239 - DNA, 50 bp, synthetic construct
  source 1..50: mol_type = other DNA
gtatgcagttgttacgcctctggctgaagaaacgcagagttgctgcatat

SEQ ID NO: 45240 - DNA, 50 bp, synthetic construct
  source 1..50: mol_type = other DNA
aagaccgttcccgccgtgatagttggacttatggcggagtgggagggatt

SEQ ID NO: 45241 - DNA, 50 bp, synthetic construct
  source 1..50: mol_type = other DNA
cgagctgtggaaaccataccctatgtattgcttgcatcacgggcagctat

SEQ ID NO: 45242 - DNA, 50 bp, synthetic construct
  source 1..50: mol_type = other DNA
aggacgtggacagaaatagccgcatattttactatatcttgcgaaaaagt

SEQ ID NO: 45243 - DNA, 50 bp, synthetic construct
  source 1..50: mol_type = other DNA
ctgccgtgccagagcagaagaatatctatgaatatgcagggacttatgcg

SEQ ID NO: 45244 - DNA, 50 bp, synthetic construct
  source 1..50: mol_type = other DNA
tctgtatacggtgtacgttctttcagtaaatatgctatactatatatgta

SEQ ID NO: 45245 - DNA, 50 bp, synthetic construct
  source 1..50: mol_type = other DNA
ggtaatagagatcttccgagatacatgtatcagctcctttgcattttatg

SEQ ID NO: 45246 - DNA, 50 bp, synthetic construct
  source 1..50: mol_type = other DNA
ttacatagataataaacctgtattgaagcccaggtcgattattatacgaa

SEQ ID NO: 45247 - DNA, 50 bp, synthetic construct
  source 1..50: mol_type = other DNA
agaatttgttgtggataaaatatggccaaataagtcaagctgcccgttct

SEQ ID NO: 45248 - DNA, 50 bp, synthetic construct
  source 1..50: mol_type = other DNA
gtaaagaaagagccgcccgaaggcgggccttccggccctttataattcgg

SEQ ID NO: 45249 - DNA, 50 bp, synthetic construct
  source 1..50: mol_type = other DNA
tataccagcattaataaggagtttgcaaagcctcctactaaacaagaatc

SEQ ID NO: 45250 - DNA, 50 bp, synthetic construct
  source 1..50: mol_type = other DNA
agaaaaacaactaagtcccagcaagaatgctgcacatatgttgataaata

SEQ ID NO: 45251 - DNA, 50 bp, synthetic construct
  source 1..50: mol_type = other DNA
cggaggtcttcgatgcagtctttgtccctgcaagaatcaaaaattttctt

SEQ ID NO: 45252 - DNA, 50 bp, synthetic construct
  source 1..50: mol_type = other DNA
agttaaaagatacagttaataatatttatctttaactatatcctgaatat

SEQ ID NO: 45253 - DNA, 50 bp, synthetic construct
  source 1..50: mol_type = other DNA
ttatgcccaaaatcccttgatatatatccatcaagggtagtgattcatag

SEQ ID NO: 45254 - DNA, 50 bp, synthetic construct
  source 1..50: mol_type = other DNA
gctaaaaattaatactaaatatttgtcaattgtctgctttaatttttggg

SEQ ID NO: 45255 - DNA, 50 bp, synthetic construct
  source 1..50: mol_type = other DNA
agctttgcaacgagtagggaggagatcgactccgctgcgaccagccgtga

SEQ ID NO: 45256 - DNA, 50 bp, synthetic construct
  source 1..50: mol_type = other DNA
cgtccgtggatttttggtcggacgttcggccttggatggcatcacgtctc

SEQ ID NO: 45257 - DNA, 50 bp, synthetic construct
  source 1..50: mol_type = other DNA
tgggacttcgagcaggagatgatccgggtcatctcctacgcgataaggtg

SEQ ID NO: 45258 - DNA, 50 bp, synthetic construct
  source 1..50: mol_type = other DNA
ggaaatttataaagaatacatgagccatcatcatgcgtcaacgtggtggc

SEQ ID NO: 45259 - DNA, 50 bp, synthetic construct
  source 1..50: mol_type = other DNA
cgcagacgatttcgatatgggcaagtgactccatatcaaaagaatggggg

SEQ ID NO: 45260 - DNA, 50 bp, synthetic construct
  source 1..50: mol_type = other DNA
tcttgattcagaggtaatatgtcacagaaggatttacctgtgattcaagg

SEQ ID NO: 45261 - DNA, 50 bp, synthetic construct
  source 1..50: mol_type = other DNA
agttttggaaaaatgaacggctttgcaaatcagtattgttttccaaaatc

SEQ ID NO: 45262 - DNA, 50 bp, synthetic construct
  source 1..50: mol_type = other DNA
taccttgtcacagattttgacggcgagaagctactctctgtgcggcggtg

SEQ ID NO: 45263 - DNA, 50 bp, synthetic construct
  source 1..50: mol_type = other DNA
ggtgaaaggtatcgcagattgtacttgtacctcctgttttctttttctta

SEQ ID NO: 45264 - DNA, 50 bp, synthetic construct
  source 1..50: mol_type = other DNA
ttgacgctgaatttgccgtgccgcctgcggcacggcaaatgcgccgcagc

SEQ ID NO: 45265 - DNA, 50 bp, synthetic construct
  source 1..50: mol_type = other DNA
ccacaagaacagaactcgcgacctttaccacgctccttccgtaattgttt

SEQ ID NO: 45266 - DNA, 50 bp, synthetic construct
  source 1..50: mol_type = other DNA
tcccttgttttcaataagactgtcaaaacaggcttatatttctcaaggaa

SEQ ID NO: 45267 - DNA, 50 bp, synthetic construct
  source 1..50: mol_type = other DNA
ccggcggcacagtacactaatacaattgtataaaggtactatgccgcgcg

SEQ ID NO: 45268 - DNA, 50 bp, synthetic construct
  source 1..50: mol_type = other DNA
atgtatgtggcgattgaagaaggatatttctccgtcatcggtgcaaataa

SEQ ID NO: 45269 - DNA, 50 bp, synthetic construct
  source 1..50: mol_type = other DNA
aaaatttaaaagtgaaggggtgttttctcactccttatctttttcatttt

SEQ ID NO: 45270 - DNA, 50 bp, synthetic construct
  source 1..50: mol_type = other DNA
cagtggttaaatgcaagtctatttgcaaataatgtacccaatagtggctg

SEQ ID NO: 45271 - DNA, 50 bp, synthetic construct
  source 1..50: mol_type = other DNA
catggtttgaggaacaagtagtaaaattgctccttaaatttaaaacccgt

SEQ ID NO: 45272 - DNA, 50 bp, synthetic construct
  source 1..50: mol_type = other DNA
gggacgtagccacagccgccatagcgctgcccggacagaacgttgttcca

SEQ ID NO: 45273 - DNA, 50 bp, synthetic construct
  source 1..50: mol_type = other DNA
attcaatcatttcttctttagtcataagctgctaaaacaaattgttaaaa

SEQ ID NO: 45274 - DNA, 50 bp, synthetic construct
  source 1..50: mol_type = other DNA
ttgtctgtacatcatacactgggtatatacattcgtgtgtccacagcaat

SEQ ID NO: 45275 - DNA, 50 bp, synthetic construct
  source 1..50: mol_type = other DNA
gttccgaaatgtccaaaggcaaaagattgctcttttggaaatttcacaac

SEQ ID NO: 45276 - DNA, 50 bp, synthetic construct
  source 1..50: mol_type = other DNA
taagtgacttgccttcaaaatagtatctccgctataaccgttgttagata

SEQ ID NO: 45277 - DNA, 50 bp, synthetic construct
  source 1..50: mol_type = other DNA
taaggcgtggtgttgtccttcgtcaggacgaaattcttgccgccggctta

SEQ ID NO: 45278 - DNA, 50 bp, synthetic construct
  source 1..50: mol_type = other DNA
ccggtgagctgtcgacgcatatcctccggtatgcgtaaacctgtccgcga

SEQ ID NO: 45279 - DNA, 50 bp, synthetic construct
  source 1..50: mol_type = other DNA
aacctaatggatagtgtaagttaatactaactgatattacccattaggaa

SEQ ID NO: 45280 - DNA, 50 bp, synthetic construct
  source 1..50: mol_type = other DNA
gatccggactggcataattctttggacatgggacataccccttacggata

SEQ ID NO: 45281 - DNA, 50 bp, synthetic construct
  source 1..50: mol_type = other DNA
gccccttgccatgcccgtaataaagatttatgatgattttaacaatctgc

SEQ ID NO: 45282 - DNA, 50 bp, synthetic construct
  source 1..50: mol_type = other DNA
catgaatctgacggagtttttggatgccgtaaaactccgacagctctata

SEQ ID NO: 45283 - DNA, 50 bp, synthetic construct
  source 1..50: mol_type = other DNA
tgaaatacagatacctacccacttttattcatatccatctctccatttca

SEQ ID NO: 45284 - DNA, 50 bp, synthetic construct
  source 1..50: mol_type = other DNA
gcatcatggcggaagtgatgcaaggccccgctttattaccgcggatatgg

SEQ ID NO: 45285 - DNA, 50 bp, synthetic construct
  source 1..50: mol_type = other DNA
cccgccgcaaagcgcttcaaacactggtgttggatgtgcagggcggcgat

SEQ ID NO: 45286 - DNA, 50 bp, synthetic construct
  source 1..50: mol_type = other DNA
cgtccgtggatttttggtcggacgttcagccttggaggacatcacgtctc

SEQ ID NO: 45287 - DNA, 50 bp, synthetic construct
  source 1..50: mol_type = other DNA
tcctggtctgttgacacacggcagtagaatgctgtgtcaactgtcaactg

SEQ ID NO: 45288 - DNA, 50 bp, synthetic construct
  source 1..50: mol_type = other DNA
gtgtatttttgtacacagaaggaggatacccataaatatgaaaaagtatc

SEQ ID NO: 45289 - DNA, 50 bp, synthetic construct
  source 1..50: mol_type = other DNA
aatggaggctgacatcaaagaaactgccccgcaagagatcagactgaaaa

SEQ ID NO: 45290 - DNA, 50 bp, synthetic construct
  source 1..50: mol_type = other DNA
cggtaacagagccggaaagacaatataagccctttcaaacattgtgggcc

SEQ ID NO: 45291 - DNA, 50 bp, synthetic construct
  source 1..50: mol_type = other DNA
tgtaatggtagcacaggtgattctggagaaggctctttgtctcccttact

SEQ ID NO: 45292 - DNA, 50 bp, synthetic construct
  source 1..50: mol_type = other DNA
ctttgcgcatcgtaccgaagaaacgagtttctacggatcgtgaggagcag

SEQ ID NO: 45293 - DNA, 50 bp, synthetic construct
  source 1..50: mol_type = other DNA
cttctcggtgagaacttccaggcaaggaactggaagcactcatccaggaa

SEQ ID NO: 45294 - DNA, 50 bp, synthetic construct
  source 1..50: mol_type = other DNA
gccccgtctgttgacgggacttgttattgcgtttcgtgtaaggacggaca

SEQ ID NO: 45295 - DNA, 50 bp, synthetic construct
  source 1..50: mol_type = other DNA
ttgcttgccgggttcttttctgtgagcacgacctcgccaccggcctgcag

SEQ ID NO: 45296 - DNA, 50 bp, synthetic construct
  source 1..50: mol_type = other DNA
gacctttcgctttcgtgtgaaggtcgagcttggagatcttcagaaggaaa

SEQ ID NO: 45297 - DNA, 50 bp, synthetic construct
  source 1..50: mol_type = other DNA
aaactgccatccaagcagtcccaactgaccggctggaagaaatgcaggcg

SEQ ID NO: 45298 - DNA, 50 bp, synthetic construct
  source 1..50: mol_type = other DNA
ttaagctttgcggtccggcatgaatttcctgaaataaccgcaaaggttat

SEQ ID NO: 45299 - DNA, 50 bp, synthetic construct
  source 1..50: mol_type = other DNA
cataaagccgatgtcggcagttccggaaaagaaaaagtagtgtataaact

SEQ ID NO: 45300 - DNA, 50 bp, synthetic construct
  source 1..50: mol_type = other DNA
gagtgatatatactatacccctttaaaaagcggcggagaacagagagctt

SEQ ID NO: 45301 - DNA, 50 bp, synthetic construct
  source 1..50: mol_type = other DNA
catttacacggagttccgtatgaagaagaatgaagatcatcggaaaaatt

SEQ ID NO: 45302 - DNA, 50 bp, synthetic construct
  source 1..50: mol_type = other DNA
agattacaatattcgcagatgaatcaatatgtatattgattccttaattc

SEQ ID NO: 45303 - DNA, 50 bp, synthetic construct
  source 1..50: mol_type = other DNA
tattatcatctatatgcgcataataatagcaagtcatttagcccataatc

SEQ ID NO: 45304 - DNA, 50 bp, synthetic construct
  source 1..50: mol_type = other DNA
ggtccaccatacttccgtaaggtatataccttacggaagaatagtccacc

SEQ ID NO: 45305 - DNA, 50 bp, synthetic construct
  source 1..50: mol_type = other DNA
gcttaccggtgcagatatcgtattagaacggtcatctccggagaagaagc

SEQ ID NO: 45306 - DNA, 50 bp, synthetic construct
  source 1..50: mol_type = other DNA
tgaattcaatcgagattactttaccgtaaaagtcaacatggatgaaatca

SEQ ID NO: 45307 - DNA, 50 bp, synthetic construct
  source 1..50: mol_type = other DNA
tataaatgaaattcagtaatatcaaggagtattagagaaatttagaggat

SEQ ID NO: 45308 - DNA, 50 bp, synthetic construct
  source 1..50: mol_type = other DNA
ttcggcaataagcgtaaattaataagatgcccatgcaggatattgccgac

SEQ ID NO: 45309 - DNA, 50 bp, synthetic construct
  source 1..50: mol_type = other DNA
cttgttcgcggaaataatgccgaaaatgtaatggtgattccggccagaag

SEQ ID NO: 45310 - DNA, 50 bp, synthetic construct
  source 1..50: mol_type = other DNA
gaaaagtgtcttttgtttcggatacggtatcctccgtcttatttcttttt

SEQ ID NO: 45311 - DNA, 50 bp, synthetic construct
  source 1..50: mol_type = other DNA
gccgggaaagtccagcttgcatcaaagacgtgtcgctggatacgcccgtg

SEQ ID NO: 45312 - DNA, 50 bp, synthetic construct
  source 1..50: mol_type = other DNA
cgtcgatataggaggttcggtcatgcacaccctccagacctttaattaaa

SEQ ID NO: 45313 - DNA, 50 bp, synthetic construct
  source 1..50: mol_type = other DNA
tataaaatgccctaatccaaaactagaggttaaactactctttttttatt

SEQ ID NO: 45314 - DNA, 50 bp, synthetic construct
  source 1..50: mol_type = other DNA
atttttgcgtaacataaaaaaggaaatccatataaatgaagacagtacca

SEQ ID NO: 45315 - DNA, 50 bp, synthetic construct
  source 1..50: mol_type = other DNA
tctcggtggctttccccggcaccgggcggcaccgatcaacagcactaaga

SEQ ID NO: 45316 - DNA, 50 bp, synthetic construct
  source 1..50: mol_type = other DNA
aatgagtgaaagaatcaagaaaataaaatgccttgatttttttcattgcc

SEQ ID NO: 45317 - DNA, 50 bp, synthetic construct
  source 1..50: mol_type = other DNA
cataatatagaaaaatactgttgaaatgtacaatgatttgacataaaata

SEQ ID NO: 45318 - DNA, 50 bp, synthetic construct
  source 1..50: mol_type = other DNA
ccgccacccgcattgctttccttgctgaaggaaagccggcaaagttgcgg

SEQ ID NO: 45319 - DNA, 50 bp, synthetic construct
  source 1..50: mol_type = other DNA
ctttgcagggataaccgttacccgcgtcaaaaatcgtgttcggcgcaaag

SEQ ID NO: 45320 - DNA, 50 bp, synthetic construct
  source 1..50: mol_type = other DNA
ggctgttatttttgtacctttttttaactatagatacagccttaagagat

SEQ ID NO: 45321 - DNA, 50 bp, synthetic construct
  source 1..50: mol_type = other DNA
cacatcattattcatcttaatttaatggagaatcaatcaattttgattct

SEQ ID NO: 45322 - DNA, 50 bp, synthetic construct
  source 1..50: mol_type = other DNA
cgcagattttgtacatactccgaaggtttggagtagtgaagcgtccaact

SEQ ID NO: 45323 - DNA, 50 bp, synthetic construct
  source 1..50: mol_type = other DNA
ttcccatgacagataaaaagtatcttcatactaaatatccatggaaagaa

SEQ ID NO: 45324 - DNA, 50 bp, synthetic construct
  source 1..50: mol_type = other DNA
aagcaacatgccggctcgcccaggataatcggcctccgaagtggtggatt

SEQ ID NO: 45325 - DNA, 50 bp, synthetic construct
  source 1..50: mol_type = other DNA
tgcactgaccaacggttctcttgttacccaggcaactgggaggatgtggt

SEQ ID NO: 45326 - DNA, 50 bp, synthetic construct
  source 1..50: mol_type = other DNA
agcgcttcctgaaggtgcatcttgcgctgcaggccgttttgtcaagcgct

SEQ ID NO: 45327 - DNA, 50 bp, synthetic construct
  source 1..50: mol_type = other DNA
ctggctttggtatccaggtttccggtcggctcatccgctagcactataga

SEQ ID NO: 45328 - DNA, 50 bp, synthetic construct
  source 1..50: mol_type = other DNA
tttgcagaagagcatatgattcagccaacaatatctttaactaagggaaa

SEQ ID NO: 45329 - DNA, 50 bp, synthetic construct
  source 1..50: mol_type = other DNA
tatgcggcttctgggttattttgttctcaatgcttatgtgaatgagcagg

SEQ ID NO: 45330 - DNA, 50 bp, synthetic construct
  source 1..50: mol_type = other DNA
gcagttcggaatcactaacttctatattatagtatatcctttcaaaatgc

SEQ ID NO: 45331 - DNA, 50 bp, synthetic construct
  source 1..50: mol_type = other DNA
tattcttattttcagtctaaaaaaatttttttgtacaaaaatttacttta

SEQ ID NO: 45332 - DNA, 50 bp, synthetic construct
  source 1..50: mol_type = other DNA
cgcggatgacgatggtatctaccgttttggggataccaaagtaatttgcc

SEQ ID NO: 45333 - DNA, 50 bp, synthetic construct
  source 1..50: mol_type = other DNA
tatactctttttttggaggtaggacgaactactcaaaaaaaatctttata

SEQ ID NO: 45334 - DNA, 50 bp, synthetic construct
  source 1..50: mol_type = other DNA
ataaaaaaagcgcttgacaaaacggcctgcaggaaaagcgttttcaagaa

SEQ ID NO: 45335 - DNA, 50 bp, synthetic construct
  source 1..50: mol_type = other DNA
gctacttaatacctatgactgtcttattgcaatcaagactattagctaac

SEQ ID NO: 45336 - DNA, 50 bp, synthetic construct
  source 1..50: mol_type = other DNA
gatgataaaccaaatcgtcacaatcacttgtgaggattttttttacacag

SEQ ID NO: 45337 - DNA, 50 bp, synthetic construct
  source 1..50: mol_type = other DNA
caaggtttaggttgaacaaaatatcgatgacacgccggacctttcccttg

SEQ ID NO: 45338 - DNA, 50 bp, synthetic construct
  source 1..50: mol_type = other DNA
gtatttttatctgaatttatacattttcatataagtaaatatattaatac

SEQ ID NO: 45339 - DNA, 50 bp, synthetic construct
  source 1..50: mol_type = other DNA
aaacaacaaaatatgaatttattttgcaatttcaggatatgttactgcaa

SEQ ID NO: 45340 - DNA, 50 bp, synthetic construct
  source 1..50: mol_type = other DNA
ctccaaatggaataatatagttagtacttgtattatacacgcaatgcgtg

SEQ ID NO: 45341 - DNA, 50 bp, synthetic construct
  source 1..50: mol_type = other DNA
aagattataaaaaattgcatgatgttgatagggggctttttttatttctt

SEQ ID NO: 45342 - DNA, 50 bp, synthetic construct
  source 1..50: mol_type = other DNA
cggagccgtacccggtaggctttttctgtcaacaaccacaaagggcttgt

SEQ ID NO: 45343 - DNA, 50 bp, synthetic construct
  source 1..50: mol_type = other DNA
ggctgattactttataattatagcatacagaacagataaagaggctaaaa

SEQ ID NO: 45344 - DNA, 50 bp, synthetic construct
  source 1..50: mol_type = other DNA
tttagtcctcctttgagtcgttatatatgccaaaactaattttatatgat

SEQ ID NO: 45345 - DNA, 50 bp, synthetic construct
  source 1..50: mol_type = other DNA
attgcatattccaaatattctttgtataaaatacttctgtaacttccaaa

SEQ ID NO: 45346 - DNA, 50 bp, synthetic construct
  source 1..50: mol_type = other DNA
attgttgtccggggctgctgatggtataggtgaatctaatgaaaaacaaa

SEQ ID NO: 45347 - DNA, 50 bp, synthetic construct
  source 1..50: mol_type = other DNA
attcataggtacatagatgttggatatccaacatcaatgtgccaattctt

SEQ ID NO: 45348 - DNA, 50 bp, synthetic construct
  source 1..50: mol_type = other DNA
cggtcgtacatacgaatattgcctctcactcatggtctgcctgcgctccg

SEQ ID NO: 45349 - DNA, 50 bp, synthetic construct
  source 1..50: mol_type = other DNA
gcgcataagcggcaaccttccgcttgcacgaagggctgcagctcatccgc

SEQ ID NO: 45350 - DNA, 50 bp, synthetic construct
  source 1..50: mol_type = other DNA
agcctttttgttagcagtttgtgccatcaaaaacgattatctgaaaggcg

SEQ ID NO: 45351 - DNA, 50 bp, synthetic construct
  source 1..50: mol_type = other DNA
aaaataggaaggaaattttttttaagtatattaaatagttatcaatttta

SEQ ID NO: 45352 - DNA, 50 bp, synthetic construct
  source 1..50: mol_type = other DNA
ggacgctatgctaattttgtaacttaaagcgaacccgacacataggggat

SEQ ID NO: 45353 - DNA, 50 bp, synthetic construct
  source 1..50: mol_type = other DNA
ttgtataggcttattttttatgcaattggataaaaaaatgattgataact

SEQ ID NO: 45354 - DNA, 50 bp, synthetic construct
  source 1..50: mol_type = other DNA
cggttttgaaataccgtttgtctgcccattcaagcgcgctaccaaaactg

SEQ ID NO: 45355 - DNA, 50 bp, synthetic construct
  source 1..50: mol_type = other DNA
gtgtaggttccacccattttttcaaatgaaagaagcagcgatactggaac

SEQ ID NO: 45356 - DNA, 50 bp, synthetic construct
  source 1..50: mol_type = other DNA
cgcggatatatatgtagcatttctgcagcgatactggaactatctccggt

SEQ ID NO: 45357 - DNA, 50 bp, synthetic construct
  source 1..50: mol_type = other DNA
tacttgctattattggctttcagagtggtgctggttgagaacagcaattt

SEQ ID NO: 45358 - DNA, 50 bp, synthetic construct
  source 1..50: mol_type = other DNA
ggaaagacttctgtgatgggacaaggacatccacacacggaagtgctaca

SEQ ID NO: 45359 - DNA, 50 bp, synthetic construct
  source 1..50: mol_type = other DNA
ggaaatgattttcttaggtatttcaaaatataacaaagaaaattatgtaa

SEQ ID NO: 45360 - DNA, 50 bp, synthetic construct
  source 1..50: mol_type = other DNA
ccgttttcttacaaaagtaaggaatccttaatactttccatgagaaacgg

SEQ ID NO: 45361 - DNA, 50 bp, synthetic construct
  source 1..50: mol_type = other DNA
tttaccccaaaaggtgtgcggtcttgcaccgggtgtgctttacgggtcat

SEQ ID NO: 45362 - DNA, 50 bp, synthetic construct
  source 1..50: mol_type = other DNA
ggtttatggttgcaggtatcattgtacgatagattatgcaatgaaggtct

SEQ ID NO: 45363 - DNA, 50 bp, synthetic construct
  source 1..50: mol_type = other DNA
caagtacggagttttgaaaaactacattttctttctcttatccctatctg

SEQ ID NO: 45364 - DNA, 50 bp, synthetic construct
  source 1..50: mol_type = other DNA
ctctaaccgatttcttttcggacacgtgcccgaaaatctgcgcgacgaag

SEQ ID NO: 45365 - DNA, 50 bp, synthetic construct
  source 1..50: mol_type = other DNA
tatattccgctgaaatcgctggataagcccagcgccgtcatgcggctgaa

SEQ ID NO: 45366 - DNA, 50 bp, synthetic construct
  source 1..50: mol_type = other DNA
aaaaggcacgacagcagtcactggcacttgctctttagcaagtgcctttt

SEQ ID NO: 45367 - DNA, 50 bp, synthetic construct
  source 1..50: mol_type = other DNA
acaatataatttccataatcaaaatcatttttatatgcaatgactgttac

SEQ ID NO: 45368 - DNA, 50 bp, synthetic construct
  source 1..50: mol_type = other DNA
cagctgctcatcctgctcactggacatcacgcccgcaatcgaagcggctg

SEQ ID NO: 45369 - DNA, 50 bp, synthetic construct
  source 1..50: mol_type = other DNA
aaattgatcattccaaacctccaataccctgagttttcaatcataaatgg

SEQ ID NO: 45370 - DNA, 50 bp, synthetic construct
  source 1..50: mol_type = other DNA
aacaaaagagataagtcggcgagagccgctatttgtttaagttttttgtt

SEQ ID NO: 45371 - DNA, 50 bp, synthetic construct
  source 1..50: mol_type = other DNA
gttctgaaatcgttaaacgatggaaagcgaaaggtgaagaatcactgaaa

SEQ ID NO: 45372 - DNA, 50 bp, synthetic construct
  source 1..50: mol_type = other DNA
caccgtgtaaaaatcaagggaatttaacctctctttctaattcataccga

SEQ ID NO: 45373 - DNA, 50 bp, synthetic construct
  source 1..50: mol_type = other DNA
taatttttttttctaaagattttatttaaaaattttcttgaaaaaaggct

SEQ ID NO: 45374 - DNA, 50 bp, synthetic construct
  source 1..50: mol_type = other DNA
tgtcggtaggttcaatttagtagtatactactaactgaacccctccggtc

SEQ ID NO: 45375 - DNA, 50 bp, synthetic construct
  source 1..50: mol_type = other DNA
aaatatttctatatttgttttttgattagtgcaataatcaataaacatcc

SEQ ID NO: 45376 - DNA, 50 bp, synthetic construct
  source 1..50: mol_type = other DNA
gcggctttctgacgacccggatgtgaacatccggctggtaagacaggaag

SEQ ID NO: 45377 - DNA, 50 bp, synthetic construct
  source 1..50: mol_type = other DNA
ccttcaatgggtaaagggggaaaatattttccaatctcgaatgttgcctg

SEQ ID NO: 45378 - DNA, 50 bp, synthetic construct
  source 1..50: mol_type = other DNA
tactgaccctcgcgtatgcgccaacagtgcctcatcggtataggtctctt

SEQ ID NO: 45379 - DNA, 50 bp, synthetic construct
  source 1..50: mol_type = other DNA
tcgcttttgggctggactttctaagattttaaagtcaatttaaaaagtga

SEQ ID NO: 45380 - DNA, 50 bp, synthetic construct
  source 1..50: mol_type = other DNA
cgaaaataacgcgcagctacgataattatgacagaaaaggattatttaaa

SEQ ID NO: 45381 - DNA, 50 bp, synthetic construct
  source 1..50: mol_type = other DNA
ttcgtaattcgagaggaggacttcgcgaagcccctctatcacgtccagaa

SEQ ID NO: 45382 - DNA, 50 bp, synthetic construct
  source 1..50: mol_type = other DNA
attccattcgccgggtttgtaggtgcgacagcaaaatccccgaaaggaac

SEQ ID NO: 45383 - DNA, 50 bp, synthetic construct
  source 1..50: mol_type = other DNA
agccttttctgttttacccctctataaaaagccgtggttcagtattttag

SEQ ID NO: 45384 - DNA, 50 bp, synthetic construct
  source 1..50: mol_type = other DNA
acacctgttttgatacaatgcgtatcgctgcattgtatcaattatggcgt

SEQ ID NO: 45385 - DNA, 50 bp, synthetic construct
  source 1..50: mol_type = other DNA
gattctaagaggcagacttggcaatgctgccaagcctaaatgctattggt

SEQ ID NO: 45386 - DNA, 50 bp, synthetic construct
  source 1..50: mol_type = other DNA
ggacagcaataaaccgcaggcgttgaatacagctcgttcagacgctgaac

SEQ ID NO: 45387 - DNA, 50 bp, synthetic construct
  source 1..50: mol_type = other DNA
tcagcggattgatggtcggcggaatgactgtcagcccaggaatacaccga

SEQ ID NO: 45388 - DNA, 50 bp, synthetic construct
  source 1..50: mol_type = other DNA
ccttcttgacgcattcgccgaccttgaggcgcgtttgcttttcaaaaaaa

SEQ ID NO: 45389 - DNA, 50 bp, synthetic construct
  source 1..50: mol_type = other DNA
gggtgatgaggaggaggtttccgaattccagatgccggagaatatctcct

SEQ ID NO: 45390 - DNA, 50 bp, synthetic construct
  source 1..50: mol_type = other DNA
taaggtcgagagggtttcatgcatttgaagatgaaacagaaccgcccacc

SEQ ID NO: 45391 - DNA, 50 bp, synthetic construct
  source 1..50: mol_type = other DNA
aaatagacattgcgaacctgttcggccgaacattcagcaaatgtgtttgc

SEQ ID NO: 45392 - DNA, 50 bp, synthetic construct
  source 1..50: mol_type = other DNA
cgtataacgtgataaatgcggcacatttgccgacagcataacgtatgaag

SEQ ID NO: 45393 - DNA, 50 bp, synthetic construct
  source 1..50: mol_type = other DNA
ataaggtgaaaaaaattcaatgtgtggatatgattgataaatcagcttgt

SEQ ID NO: 45394 - DNA, 50 bp, synthetic construct
  source 1..50: mol_type = other DNA
cggcattttcagagaatttacggatcagcggcgattcgctgaaaaaagcg

SEQ ID NO: 45395 - DNA, 50 bp, synthetic construct
  source 1..50: mol_type = other DNA
tctgcgaatgttcccgtgcgatttctctctttttcgggaacatcggcaca

SEQ ID NO: 45396 - DNA, 50 bp, synthetic construct
  source 1..50: mol_type = other DNA
ttgaatcattaaaagtatctaaattaatttattgtattttgcatattcat

SEQ ID NO: 45397 - DNA, 50 bp, synthetic construct
  source 1..50: mol_type = other DNA
tttatcactaccttccataaactattatgtttatagtaggtttatttaac

SEQ ID NO: 45398 - DNA, 50 bp, synthetic construct
  source 1..50: mol_type = other DNA
cactggcacagtccatagccacctctgccccatcatgtcatgtcccaggt

SEQ ID NO: 45399 - DNA, 50 bp, synthetic construct
  source 1..50: mol_type = other DNA
gttcgctttttaatgattcaaataattatttacataagaaaaaagatgga

SEQ ID NO: 45400 - DNA, 50 bp, synthetic construct
  source 1..50: mol_type = other DNA
tttgcaattttcccgaaaaaatttcacccttttttcgggaaaatataaac

SEQ ID NO: 45401 - DNA, 50 bp, synthetic construct
  source 1..50: mol_type = other DNA
tgcgaggtgatattatggaaataaccatatactgttggtatcaccaaacg

SEQ ID NO: 45402 - DNA, 50 bp, synthetic construct
  source 1..50: mol_type = other DNA
acggaaaaaactttgttctgcggtacgccgaggaaacaagtttcctctac

SEQ ID NO: 45403 - DNA, 50 bp, synthetic construct
  source 1..50: mol_type = other DNA
tttgacagatttatttggtaattctatatagatttcctaaaggagtgatt

SEQ ID NO: 45404 - DNA, 50 bp, synthetic construct
  source 1..50: mol_type = other DNA
tctacgcccgcggtttgctggacgggcgttgcgatgaccgtacacgtcta

SEQ ID NO: 45405 - DNA, 50 bp, synthetic construct
  source 1..50: mol_type = other DNA
aaaaggcttttgcggctgaaccggtacaagtccggtataaaaagcctttt

SEQ ID NO: 45406 - DNA, 50 bp, synthetic construct
  source 1..50: mol_type = other DNA
tacagagcataagcaccttggaaacggggcagttggttttatgctcacta

SEQ ID NO: 45407 - DNA, 50 bp, synthetic construct
  source 1..50: mol_type = other DNA
aaggcataagaaaagcgtcccttcaggacgcgacgtatctccgattcggc

SEQ ID NO: 45408 - DNA, 50 bp, synthetic construct
  source 1..50: mol_type = other DNA
atccgagttaaaacaaggaaacagccttatatccattttggaactcgaat

SEQ ID NO: 45409 - DNA, 50 bp, synthetic construct
  source 1..50: mol_type = other DNA
atcaagacacacgcaaaaggagcgtacgctcctttcttgttcgcctttcg

SEQ ID NO: 45410 - DNA, 50 bp, synthetic construct
  source 1..50: mol_type = other DNA
tccagaatccagccaattagaattgtatcgctctttggaatgatcgccga

SEQ ID NO: 45411 - DNA, 50 bp, synthetic construct
  source 1..50: mol_type = other DNA
atgttcctggaaaaataccgccctctgatgctgaccgccaaaagcgacga

SEQ ID NO: 45412 - DNA, 50 bp, synthetic construct
  source 1..50: mol_type = other DNA
ttcggacattcggacaaacatttctggaaatgtttgggcttcttgcgaaa

SEQ ID NO: 45413 - DNA, 50 bp, synthetic construct
  source 1..50: mol_type = other DNA
ttacttgagagatactttggataagccttaataaacataatcacagccct

SEQ ID NO: 45414 - DNA, 50 bp, synthetic construct
  source 1..50: mol_type = other DNA
acaagtgttctttgaaaattgaataataacagccagcaaggaacatttgt

SEQ ID NO: 45415 - DNA, 50 bp, synthetic construct
  source 1..50: mol_type = other DNA
cataccgtctgcatttattatattataataacaaaagaccggaatgtatg

SEQ ID NO: 45416 - DNA, 50 bp, synthetic construct
  source 1..50: mol_type = other DNA
ttctcagtaaaagtagcaaacaaaattttgtttccatctttcagataaaa

SEQ ID NO: 45417 - DNA, 50 bp, synthetic construct
  source 1..50: mol_type = other DNA
aaaactttgtcgcaaaagaaatattactattagttttgatacaatatttt

SEQ ID NO: 45418 - DNA, 50 bp, synthetic construct
  source 1..50: mol_type = other DNA
tgtggaaataagaaaaaggctcataattgagcctattggttacctcttca

SEQ ID NO: 45419 - DNA, 50 bp, synthetic construct
  source 1..50: mol_type = other DNA
ttttgggacgcaaagaatacttagggttacgttatcttacctcatcaaac

SEQ ID NO: 45420 - DNA, 50 bp, synthetic construct
  source 1..50: mol_type = other DNA
acaacattaaaaaataccgataagtatcaagcattttccgataataatgt

SEQ ID NO: 45421 - DNA, 50 bp, synthetic construct
  source 1..50: mol_type = other DNA
aaaatttgtattttattttcttcaattaaagaaattgcaatactttgatt

SEQ ID NO: 45422 - DNA, 50 bp, synthetic construct
  source 1..50: mol_type = other DNA
taatatcattattgtcagaaaatatttatttaatggcaaatatgatggta

SEQ ID NO: 45423 - DNA, 50 bp, synthetic construct
  source 1..50: mol_type = other DNA
attttctccagttcgtacaggtctttacaaatgtacgatttgggtatcat

SEQ ID NO: 45424 - DNA, 50 bp, synthetic construct
  source 1..50: mol_type = other DNA
cgccgggcaccgcgtgatcgccgttggcagcgaggtcggctttctcggta

SEQ ID NO: 45425 - DNA, 50 bp, synthetic construct
  source 1..50: mol_type = other DNA
aaatgctcccggcagaagcaatatctgccatgcgaaagccggtaggagac

SEQ ID NO: 45426 - DNA, 50 bp, synthetic construct
  source 1..50: mol_type = other DNA
acctgatgggagaaactccggcaccagctccatagttttgaggcacaggt

SEQ ID NO: 45427 - DNA, 50 bp, synthetic construct
  source 1..50: mol_type = other DNA
ccctggccgcccggggactgccccatcgtttaacgctttcgctgccatct

SEQ ID NO: 45428 - DNA, 50 bp, synthetic construct
  source 1..50: mol_type = other DNA
tctgctgcgggtgttgatcggcatctgctgtttccaacttcccgacgagt

SEQ ID NO: 45429 - DNA, 50 bp, synthetic construct
  source 1..50: mol_type = other DNA
atggtattaaaagtgactcacttttccaagtccgtcactttaattttgag

SEQ ID NO: 45430 - DNA, 50 bp, synthetic construct
  source 1..50: mol_type = other DNA
gatgggcgagaggagaaaattagttgtttagctttaatagcaaaaccata

SEQ ID NO: 45431 - DNA, 50 bp, synthetic construct
  source 1..50: mol_type = other DNA
ttcgcaagattacaaattttattcataaatatcttttttgatctctcccc

SEQ ID NO: 45432 - DNA, 50 bp, synthetic construct
  source 1..50: mol_type = other DNA
ctgtggagctggtcttcctggtccgttcgtcattcagactgtatgcaaac

SEQ ID NO: 45433 - DNA, 50 bp, synthetic construct
  source 1..50: mol_type = other DNA
gaggtgatattatggaaataaccgaaaagttaacggcaaaaaagacgagc

SEQ ID NO: 45434 - DNA, 50 bp, synthetic construct
  source 1..50: mol_type = other DNA
atccactaccctaagcaggttagtagggcatactggatagggtaggtctg

SEQ ID NO: 45435 - DNA, 50 bp, synthetic construct
  source 1..50: mol_type = other DNA
tttttatatgagggctatataaaaatagttaatctaatatcagcaaaaga

SEQ ID NO: 45436 - DNA, 50 bp, synthetic construct
  source 1..50: mol_type = other DNA
cttcgacctcgacctcgtaagttctgctgctaaacaggtcgtagtcgaaa

SEQ ID NO: 45437 - DNA, 50 bp, synthetic construct
  source 1..50: mol_type = other DNA
atgatttctcccttttccatttgatatccgatatcctgataagaaaagtc

SEQ ID NO: 45438 - DNA, 50 bp, synthetic construct
  source 1..50: mol_type = other DNA
gtccgaaggcttcgaggacggctatgatgctgcactcgaagccgacgcat

SEQ ID NO: 45439 - DNA, 50 bp, synthetic construct
  source 1..50: mol_type = other DNA
tatcatttaacaatgtaatagccaattgcgcggcctgctggtaaaggatt

SEQ ID NO: 45440 - DNA, 50 bp, synthetic construct
  source 1..50: mol_type = other DNA
aaacaacttgacttttgaattgatatatcagcaccggctgcaaatagttt

SEQ ID NO: 45441 - DNA, 50 bp, synthetic construct
  source 1..50: mol_type = other DNA
ttttctttttctcccagccttgctatagattatatctttcaaaagtatac

SEQ ID NO: 45442 - DNA, 50 bp, synthetic construct
  source 1..50: mol_type = other DNA
gtgacaaaatatgatatttatgcccgaatataaatatcttttttgatttc

SEQ ID NO: 45443 - DNA, 50 bp, synthetic construct
  source 1..50: mol_type = other DNA
tccggaatttgatgagctgatacagcataaacggaaaaaaatatggctga

SEQ ID NO: 45444 - DNA, 50 bp, synthetic construct
  source 1..50: mol_type = other DNA
acaattcatggttttttctcctttgcaaggtaaaaacgcttatcaatgaa

SEQ ID NO: 45445 - DNA, 50 bp, synthetic construct
  source 1..50: mol_type = other DNA
ccgatttcgacaacggttcaaaacggtttttgtgccgtctttgaagctga

SEQ ID NO: 45446 - DNA, 50 bp, synthetic construct
  source 1..50: mol_type = other DNA
aaaaggattgacggttgccggtattaagcccgaaagacggcaacggtttt

SEQ ID NO: 45447 - DNA, 50 bp, synthetic construct
  source 1..50: mol_type = other DNA
aaatagttgattggttaaaagcaaatttggctccgggactaggactcgaa

SEQ ID NO: 45448 - DNA, 50 bp, synthetic construct
  source 1..50: mol_type = other DNA
gttcttattataacaaaataacgtttacgtaaattacgtattataatata

SEQ ID NO: 45449 - DNA, 50 bp, synthetic construct
  source 1..50: mol_type = other DNA
accagcgcaaccacaagcaggcttatagacaacatacagttcccgctgat

SEQ ID NO: 45450 - DNA, 50 bp, synthetic construct
  source 1..50: mol_type = other DNA
cctgttcagcggcgatatgctgcagcgggacattagcgcttctgagcacg

SEQ ID NO: 45451 - DNA, 50 bp, synthetic construct
  source 1..50: mol_type = other DNA
attatggtaaatggaccgcagaatataaacccttgcggatttatcggaaa

SEQ ID NO: 45452 - DNA, 50 bp, synthetic construct
  source 1..50: mol_type = other DNA
agtaattttgtccggtttggtgataccaacggcaagggacgtgaatattg

SEQ ID NO: 45453 - DNA, 50 bp, synthetic construct
  source 1..50: mol_type = other DNA
tcattttgatgatttcattataaacgttaattttgaaaacttaaaacact

SEQ ID NO: 45454 - DNA, 50 bp, synthetic construct
  source 1..50: mol_type = other DNA
tccgaaatatgctataattgcactatcgtgaaatttgcaaaaaagttttt

SEQ ID NO: 45455 - DNA, 50 bp, synthetic construct
  source 1..50: mol_type = other DNA
tgtgatctacgcccgctattcttccggaaaaatacatatcgtagctaaca

SEQ ID NO: 45456 - DNA, 50 bp, synthetic construct
  source 1..50: mol_type = other DNA
gaaacaagggtagaaaaccgggatggcggacgcttgaacttttgatggga

SEQ ID NO: 45457 - DNA, 50 bp, synthetic construct
  source 1..50: mol_type = other DNA
tagaactagcttgtctatttgcatttatacatacggacatcctaaagtac

SEQ ID NO: 45458 - DNA, 50 bp, synthetic construct
  source 1..50: mol_type = other DNA
tttcagaaagctcatcttgcctgcgtctcaacatgataagtgttgggaaa

SEQ ID NO: 45459 - DNA, 50 bp, synthetic construct
  source 1..50: mol_type = other DNA
cgctacagaagaattggcacattgatttatgtaccaatgaattggcacat

SEQ ID NO: 45460 - DNA, 50 bp, synthetic construct
  source 1..50: mol_type = other DNA
tctctttcgtaaccgtcttttctctccagaagctctctacgcggcggaaa

SEQ ID NO: 45461 - DNA, 50 bp, synthetic construct
  source 1..50: mol_type = other DNA
accgtcaactattttgtaccctactgtcaggggacatttttgccatgtac

SEQ ID NO: 45462 - DNA, 50 bp, synthetic construct
  source 1..50: mol_type = other DNA
ctcgacgaataacaaagcgtttttgcaactaaattcagttgcatttttat

SEQ ID NO: 45463 - DNA, 50 bp, synthetic construct
  source 1..50: mol_type = other DNA
caataaaataaaaaggagaacctcatgcggttctataatgtaccctcgtg

SEQ ID NO: 45464 - DNA, 50 bp, synthetic construct
  source 1..50: mol_type = other DNA
ctttgtttacggtatataccgattatggtcggtagtgaccgtcagcccag

SEQ ID NO: 45465 - DNA, 50 bp, synthetic construct
  source 1..50: mol_type = other DNA
gtttttgtacagccaccctggaaaggcttcagaaacggctttgcaagctg

SEQ ID NO: 45466 - DNA, 50 bp, synthetic construct
  source 1..50: mol_type = other DNA
attgggatttggtctccattttccactatctatgataagttcggctatac

SEQ ID NO: 45467 - DNA, 50 bp, synthetic construct
  source 1..50: mol_type = other DNA
aaaattgaaaaagaaaagccagcagcgagcgggttttcttcatcaccttt

SEQ ID NO: 45468 - DNA, 50 bp, synthetic construct
  source 1..50: mol_type = other DNA
cccatcaataaagatgcatgtgcctgaatataaatatcttttttgatctc

SEQ ID NO: 45469 - DNA, 50 bp, synthetic construct
  source 1..50: mol_type = other DNA
gcttcaaagctgtggagctggtcttcctgccacctccactgcttttatct

SEQ ID NO: 45470 - DNA, 50 bp, synthetic construct
  source 1..50: mol_type = other DNA
aacggctcagaggaaggaggaagatccattccacctgttcccgaaatttt

SEQ ID NO: 45471 - DNA, 50 bp, synthetic construct
  source 1..50: mol_type = other DNA
ggcttcctacacgcttgtatgtgagccgtgtgtcaacggaccaggaagac

SEQ ID NO: 45472 - DNA, 50 bp, synthetic construct
  source 1..50: mol_type = other DNA
tcaggaagatgcagtttcagagttatcacccggaaaccccgctgtcatga

SEQ ID NO: 45473 - DNA, 50 bp, synthetic construct
  source 1..50: mol_type = other DNA
gtgcgcctgtcggtaggttcaatttaactgaacccctccggtcggctcat

SEQ ID NO: 45474 - DNA, 50 bp, synthetic construct
  source 1..50: mol_type = other DNA
tttcacgaaactgtagaagggcgctggtagccggtgtcagtttcgtatcc

SEQ ID NO: 45475 - DNA, 50 bp, synthetic construct
  source 1..50: mol_type = other DNA
ctttattgcttcaagtgcgagtctaaaagcccgtacttttcagcaaaaat

SEQ ID NO: 45476 - DNA, 50 bp, synthetic construct
  source 1..50: mol_type = other DNA
agcgcatccaatttcaaaccatgatctgtaagggcagtcttgtgaccgct

SEQ ID NO: 45477 - DNA, 50 bp, synthetic construct
  source 1..50: mol_type = other DNA
cccttttacacagaaaagtattatgcagaacttttttccgtaaaaaagag

SEQ ID NO: 45478 - DNA, 50 bp, synthetic construct
  source 1..50: mol_type = other DNA
atctgcaacatcaataagcaacagaattgggtgtaggcttaatgtccggc

SEQ ID NO: 45479 - DNA, 50 bp, synthetic construct
  source 1..50: mol_type = other DNA
aaaaccgttgccgtctttcgggcttaataccggcaaccgtcaatcctttt

SEQ ID NO: 45480 - DNA, 50 bp, synthetic construct
  source 1..50: mol_type = other DNA
tattacggtttcggtcggcgacaccctcctcgccgatgtcatcaatcgta

SEQ ID NO: 45481 - DNA, 50 bp, synthetic construct
  source 1..50: mol_type = other DNA
cgccctaagcaagccatattatatcatcaagagatgccttcattgaaact

SEQ ID NO: 45482 - DNA, 50 bp, synthetic construct
  source 1..50: mol_type = other DNA
atcagcaagatgatggaaagtatcttgatacaacttgtgttgattatgat

SEQ ID NO: 45483 - DNA, 50 bp, synthetic construct
  source 1..50: mol_type = other DNA
aagaagccttattttaatatagtattttttttgttattataccaaatgtt

SEQ ID NO: 45484 - DNA, 50 bp, synthetic construct
  source 1..50: mol_type = other DNA
gtcgtcgccgaccataataacggcgacactttggaatagtttcattgtgg

SEQ ID NO: 45485 - DNA, 50 bp, synthetic construct
  source 1..50: mol_type = other DNA
ctgagtataccagacagccggatcctgatctggattgcgggaatttccct

SEQ ID NO: 45486 - DNA, 50 bp, synthetic construct
  source 1..50: mol_type = other DNA
gctgttatccctcaaaaaacgtcttatagaaatttaccagaaaaaacata

SEQ ID NO: 45487 - DNA, 50 bp, synthetic construct
  source 1..50: mol_type = other DNA
gatggcggcagcaacgccatgctggccggcgggttgcggcttacgcccgc

SEQ ID NO: 45488 - DNA, 50 bp, synthetic construct
  source 1..50: mol_type = other DNA
gggtacgacacccaggaggcgcggctttgcgctatctgtgtacatggatt

SEQ ID NO: 45489 - DNA, 50 bp, synthetic construct
  source 1..50: mol_type = other DNA
gtaatgtcgttcatcttatcatatccaaatgagaagaatctgtacttctc

SEQ ID NO: 45490 - DNA, 50 bp, synthetic construct
  source 1..50: mol_type = other DNA
catggtactttaaaatatgtgtttttattgacatcataattatcgagatg

SEQ ID NO: 45491 - DNA, 50 bp, synthetic construct
  source 1..50: mol_type = other DNA
ggactgaaaatcctcgtgtcgctggttgacgactacgggattttcgcctg

SEQ ID NO: 45492 - DNA, 50 bp, synthetic construct
  source 1..50: mol_type = other DNA
atattatatcataaagcctccaaacagtccgagatattatgaggaaatac

SEQ ID NO: 45493 - DNA, 50 bp, synthetic construct
  source 1..50: mol_type = other DNA
atggttacggttatacacggaacgtctttgccggtctgctccgctgcggc

SEQ ID NO: 45494 - DNA, 50 bp, synthetic construct
  source 1..50: mol_type = other DNA
atccggtgccagaatggcgctggagatctgctgctctccgagaagcgccg

SEQ ID NO: 45495 - DNA, 50 bp, synthetic construct
  source 1..50: mol_type = other DNA
aaccatacgttcagtctttaccgcatgcgggagtcaaagtcccgtgcctt

SEQ ID NO: 45496 - DNA, 50 bp, synthetic construct
  source 1..50: mol_type = other DNA
aagaaaaacattttatacttgcaaatttacatgcatataatcgtttatat

SEQ ID NO: 45497 - DNA, 50 bp, synthetic construct
  source 1..50: mol_type = other DNA
caggataatcttttcaaattaaacagatactattttgaaggaaagtcact

SEQ ID NO: 45498 - DNA, 50 bp, synthetic construct
  source 1..50: mol_type = other DNA
gtgaatggatgaaagtttgtcttgtacatcaacaccttgcagcaatgcag

SEQ ID NO: 45499 - DNA, 50 bp, synthetic construct
  source 1..50: mol_type = other DNA
gactcaaagggggaaaaagtttatgacagatgtttttctatcttagattt

SEQ ID NO: 45500 - DNA, 50 bp, synthetic construct
  source 1..50: mol_type = other DNA
cccgacggggagctgggcgcttccatcaaatacttcactacccggtcgaa

SEQ ID NO: 45501 - DNA, 50 bp, synthetic construct
  source 1..50: mol_type = other DNA
gggaatgcaaaggccatcccaaaacttgggaggacccccgcttttctctg

SEQ ID NO: 45502 - DNA, 50 bp, synthetic construct
  source 1..50: mol_type = other DNA
gggattgataagctgtataatttgttaaccacctacaaaataaaaaggct

SEQ ID NO: 45503 - DNA, 50 bp, synthetic construct
  source 1..50: mol_type = other DNA
ggattgataaagacagaggtgacgaattttacctccgatattattgattg

SEQ ID NO: 45504 - DNA, 50 bp, synthetic construct
  source 1..50: mol_type = other DNA
ctgtgttaacgttttttccgtgtccaagattggaaacgacattaaaatca

SEQ ID NO: 45505 - DNA, 50 bp, synthetic construct
  source 1..50: mol_type = other DNA
gtcgtgtcagcacggatgaagatgcccatattcatttttgtatgcgatta

SEQ ID NO: 45506 - DNA, 50 bp, synthetic construct
  source 1..50: mol_type = other DNA
ccagctaattgtgtccttgctggaattcctttttccccatcaaacgctcc

SEQ ID NO: 45507 - DNA, 50 bp, synthetic construct
  source 1..50: mol_type = other DNA
tattatcgtgttacaattaataagtttaggcgctttgtggtatcataata

SEQ ID NO: 45508 - DNA, 50 bp, synthetic construct
  source 1..50: mol_type = other DNA
gggcaggcagtggcgtaagccgctgcatatcaaaggtgaatattactccc

SEQ ID NO: 45509 - DNA, 50 bp, synthetic construct
  source 1..50: mol_type = other DNA
cgccgcaacgcgcaggaatccgcgcccgcgtctctaccgaccatgaagac

SEQ ID NO: 45510 - DNA, 50 bp, synthetic construct
  source 1..50: mol_type = other DNA
gcacggtgctgcacgccaagggcaccggcccggcctttacagcagcttga

SEQ ID NO: 45511 - DNA, 50 bp, synthetic construct
  source 1..50: mol_type = other DNA
agtgctttatctctcgaaaacccttgaggactttctgacgaaaaagcagg

SEQ ID NO: 45512 - DNA, 50 bp, synthetic construct
  source 1..50: mol_type = other DNA
ttccgaatacggctttctggccaagcatggatatcaaaccagattggtcg

SEQ ID NO: 45513 - DNA, 50 bp, synthetic construct
  source 1..50: mol_type = other DNA
ttattaatgaaggggaagcaaaaatctctccccatccctttatgatggta

SEQ ID NO: 45514 - DNA, 50 bp, synthetic construct
  source 1..50: mol_type = other DNA
cccgcaggaagatatatttgcagtgggtagtctatatatcactctgaaag

SEQ ID NO: 45515 - DNA, 50 bp, synthetic construct
  source 1..50: mol_type = other DNA
aaagccaatggaataatgctcataatatacacaacctttctatttttttc

SEQ ID NO: 45516 - DNA, 50 bp, synthetic construct
  source 1..50: mol_type = other DNA
cttgttttcgctggtataatcgtaatagcataaacgaaaccgaaaaaaag

SEQ ID NO: 45517 - DNA, 50 bp, synthetic construct
  source 1..50: mol_type = other DNA
aaaaggatttcaaaacacggaggttattttccattttttcaaaatcttgc

SEQ ID NO: 45518 - DNA, 50 bp, synthetic construct
  source 1..50: mol_type = other DNA
aatcttctttaccatatccgcttctttaaattcataatttcggcaatatt

SEQ ID NO: 45519 - DNA, 50 bp, synthetic construct
  source 1..50: mol_type = other DNA
cgcccaagcataaccaaaaatcaatccttttttgtggttatttcgtcttg

SEQ ID NO: 45520 - DNA, 50 bp, synthetic construct
  source 1..50: mol_type = other DNA
gccagatggagctgtttgggcttcatccatgccaaaattctccatcaaca

SEQ ID NO: 45521 - DNA, 50 bp, synthetic construct
  source 1..50: mol_type = other DNA
gaagattttgaatcgagtgctcctgtaggttcatcagcaagaatcagctt

SEQ ID NO: 45522 - DNA, 50 bp, synthetic construct
  source 1..50: mol_type = other DNA
agtgtgtgagttgaaatataacacaagaatattattttctctcgcacgac

SEQ ID NO: 45523 - DNA, 50 bp, synthetic construct
  source 1..50: mol_type = other DNA
tgttccccgctggctgttatttttatgaaaaagacgcccggcaaaaagat

SEQ ID NO: 45524 - DNA, 50 bp, synthetic construct
  source 1..50: mol_type = other DNA
agaaagtatctgtgtcgtgattttacataatctgcctccgacaagagtgg

SEQ ID NO: 45525 - DNA, 50 bp, synthetic construct
  source 1..50: mol_type = other DNA
ttgaagagaatgtccttaccctgcatcgtggctcaggacgctatggagct

SEQ ID NO: 45526 - DNA, 50 bp, synthetic construct
  source 1..50: mol_type = other DNA
cctgatactttcagaggacttgcttgaggggactgacgcaaaattccagc

SEQ ID NO: 45527 - DNA, 50 bp, synthetic construct
  source 1..50: mol_type = other DNA
caatttaataaaattttagaaagaagcatcgctaaaaattacatcaatgc

SEQ ID NO: 45528 - DNA, 50 bp, synthetic construct
  source 1..50: mol_type = other DNA
gtaataacactggatatataaaggacagtttttatatcagttgttattga

SEQ ID NO: 45529 - DNA, 50 bp, synthetic construct
  source 1..50: mol_type = other DNA
taatgtatttgaacaactattttaattttatcaattgttctaatatcact

SEQ ID NO: 45530 - DNA, 50 bp, synthetic construct
  source 1..50: mol_type = other DNA
tttttgtaaaccattattaggtaattctttctaaaattggattacaattt

SEQ ID NO: 45531 - DNA, 50 bp, synthetic construct
  source 1..50: mol_type = other DNA
tgaggacatcaacattgaaggtcttgtgagcggtttctttgatgtccgcc

SEQ ID NO: 45532 - DNA, 50 bp, synthetic construct
  source 1..50: mol_type = other DNA
ggaatatgataaccatgtgattgaaatctgtatgagggatttcacattga

SEQ ID NO: 45533 - DNA, 50 bp, synthetic construct
  source 1..50: mol_type = other DNA
gtgatgatgtcggctacccgcaccatcaaaacggtagataccatcgtcat

SEQ ID NO: 45534 - DNA, 50 bp, synthetic construct
  source 1..50: mol_type = other DNA
agtctattggcatcaaaggaaaatcacccctcctttgtgccagcgcccgc

SEQ ID NO: 45535 - DNA, 50 bp, synthetic construct
  source 1..50: mol_type = other DNA
cggtttacctggagttttgttctatccagcgatttaggcgattcaaagcg

SEQ ID NO: 45536 - DNA, 50 bp, synthetic construct
  source 1..50: mol_type = other DNA
atattccgctgaaattgctggatataaaatgtgaaatttgccagaaatac

SEQ ID NO: 45537 - DNA, 50 bp, synthetic construct
  source 1..50: mol_type = other DNA
aaggaaaaagcacgacagcgggcattacagaaggatatgtacttatctta

SEQ ID NO: 45538 - DNA, 50 bp, synthetic construct
  source 1..50: mol_type = other DNA
aaatgcaaatattgaaggcaaaaatgatactgggtattgtctttgcaatc

SEQ ID NO: 45539 - DNA, 50 bp, synthetic construct
  source 1..50: mol_type = other DNA
ttccacaaagataaaacaggttgtctctgaatataaatatcttttttgat

SEQ ID NO: 45540 - DNA, 50 bp, synthetic construct
  source 1..50: mol_type = other DNA
tactcgacctgtgcctcaaaactatggagccaagaggctctccatccctt

SEQ ID NO: 45541 - DNA, 50 bp, synthetic construct
  source 1..50: mol_type = other DNA
tgaattattttatcatctatatccgagtgcatttatgatacaataatgtt

SEQ ID NO: 45542 - DNA, 50 bp, synthetic construct
  source 1..50: mol_type = other DNA
gtacaacgggataacttattgaatcgccccatcgtaaaatgccggggagc

SEQ ID NO: 45543 - DNA, 50 bp, synthetic construct
  source 1..50: mol_type = other DNA
tgccgtcctcaatgcggtatccgtataaggatatcgcaggatggaaatat

SEQ ID NO: 45544 - DNA, 50 bp, synthetic construct
  source 1..50: mol_type = other DNA
gaataaagcgcgttataatttagttaagtgaatttggaatactattatca

SEQ ID NO: 45545 - DNA, 50 bp, synthetic construct
  source 1..50: mol_type = other DNA
cgtagtcaatgcgcgcctcgaggtagacctccgggtttaccccaccgtcg

SEQ ID NO: 45546 - DNA, 50 bp, synthetic construct
  source 1..50: mol_type = other DNA
ttttggaactcgatgaacgaagcactgaaaaccatcatcgaggaaaagcg

SEQ ID NO: 45547 - DNA, 50 bp, synthetic construct
  source 1..50: mol_type = other DNA
cagatagctgtccgccgccagcgcctgcgctacacccggatatctgtaag

SEQ ID NO: 45548 - DNA, 50 bp, synthetic construct
  source 1..50: mol_type = other DNA
cttctttttttcttgttccttttcaataacagccagcagaagaacatgag

SEQ ID NO: 45549 - DNA, 50 bp, synthetic construct
  source 1..50: mol_type = other DNA
cctgcaagttttgtcaaactcctatcaagcgcgctaccaaaactgcgcta

SEQ ID NO: 45550 - DNA, 50 bp, synthetic construct
  source 1..50: mol_type = other DNA
acgcgcctcagaagaggcgcgtttctgttcatggaccttacgaggccgtc

SEQ ID NO: 45551 - DNA, 50 bp, synthetic construct
  source 1..50: mol_type = other DNA
cggctgggctgcacttccccggaaatttccgggccatgaatgccgcgatc

SEQ ID NO: 45552 - DNA, 50 bp, synthetic construct
  source 1..50: mol_type = other DNA
gcgctttggacttggggcaatacggaagggttgtcccaagtcagatgcac

SEQ ID NO: 45553 - DNA, 50 bp, synthetic construct
  source 1..50: mol_type = other DNA
cgtaacttgcggcgtgcccgtcgtcgtcttcgggcagctgacaaagcgcg

SEQ ID NO: 45554 - DNA, 50 bp, synthetic construct
  source 1..50: mol_type = other DNA
tccaattcatccggttcgatggaaccgtcctgataagatctcttattgta

SEQ ID NO: 45555 - DNA, 50 bp, synthetic construct
  source 1..50: mol_type = other DNA
aaagcgtagcaagcggcgcaggaacaaacagcagattatgactgtattta

SEQ ID NO: 45556 - DNA, 50 bp, synthetic construct
  source 1..50: mol_type = other DNA
tggcgccaagcaaattatagataaaaaagtctataatctgcgtcaagcgg

SEQ ID NO: 45557 - DNA, 50 bp, synthetic construct
  source 1..50: mol_type = other DNA
gtagtacgacaattttttatcaaaacattttcaagaagctgtggtacaat

SEQ ID NO: 45558 - DNA, 50 bp, synthetic construct
  source 1..50: mol_type = other DNA
ggttcttcagctttggggatgcgatgaacctcaagaaaatcggagcggcc

SEQ ID NO: 45559 - DNA, 50 bp, synthetic construct
  source 1..50: mol_type = other DNA
ggaaaacccgaacagcgtatcacagctttgaagcacaggtcgagtattat

SEQ ID NO: 45560 - DNA, 50 bp, synthetic construct
  source 1..50: mol_type = other DNA
accttccgtccgatgctcctgagaaggttcaggaatgtcggacggttctt

SEQ ID NO: 45561 - DNA, 50 bp, synthetic construct
  source 1..50: mol_type = other DNA
caaattttcacatttgccctaaaaatatttactagaaataaattgtttaa

SEQ ID NO: 45562 - DNA, 50 bp, synthetic construct
  source 1..50: mol_type = other DNA
ctggcatatgcagcaactcttctctttaaatcttcttctacgtatgctgt

SEQ ID NO: 45563 - DNA, 50 bp, synthetic construct
  source 1..50: mol_type = other DNA
agcttttgacgaaaagactaataatagagggtgggttgtcatccgaatat

SEQ ID NO: 45564 - DNA, 50 bp, synthetic construct
  source 1..50: mol_type = other DNA
ttatcgtaggcggtatgaccttgacagcaaagagaagcgatcagaagtaa

SEQ ID NO: 45565 - DNA, 50 bp, synthetic construct
  source 1..50: mol_type = other DNA
acgaggtagaagacaaaaagaaaaccgacgctttttgttttttgcgtttt

SEQ ID NO: 45566 - DNA, 50 bp, synthetic construct
  source 1..50: mol_type = other DNA
ctgttcctcgtggtctgtgctgacgcgtcagcacagacgatgaagaacag

SEQ ID NO: 45567 - DNA, 50 bp, synthetic construct
  source 1..50: mol_type = other DNA
tgaaatcctaatgattccttgatatagatgctataatctcaataatttct

SEQ ID NO: 45568 - DNA, 50 bp, synthetic construct
  source 1..50: mol_type = other DNA
atatgaatcccctgaataaaaaaacaaggttttaggcatcttgtttttag

SEQ ID NO: 45569 - DNA, 50 bp, synthetic construct
  source 1..50: mol_type = other DNA
ttccgaacatcggcatgattcctgacttcttatcagcccgcaccacgctc

SEQ ID NO: 45570 - DNA, 50 bp, synthetic construct
  source 1..50: mol_type = other DNA
gatccctttgaacaggcggcgtatgcagaccaaaagccacattgtggatt

SEQ ID NO: 45571 - DNA, 50 bp, synthetic construct
  source 1..50: mol_type = other DNA
aaacgggcgtccgtttcttgataaaaataacagccagcacggaacgagtg

SEQ ID NO: 45572 - DNA, 50 bp, synthetic construct
  source 1..50: mol_type = other DNA
ttaccataaaggatagaaatgtgcatgcatagaggcggagtattctgctc

SEQ ID NO: 45573 - DNA, 50 bp, synthetic construct
  source 1..50: mol_type = other DNA
aatcaatgatgcggcagcccacgatgtcgtggttgtgcgcatacagtcag

SEQ ID NO: 45574 - DNA, 50 bp, synthetic construct
  source 1..50: mol_type = other DNA
ctttagtagcgcacccataaggaagtttatttagtgcaccgatacaaaaa

SEQ ID NO: 45575 - DNA, 50 bp, synthetic construct
  source 1..50: mol_type = other DNA
actactatatataataaagtacaaatttgcttattcccatatataaaaga

SEQ ID NO: 45576 - DNA, 50 bp, synthetic construct
  source 1..50: mol_type = other DNA
ctgaatagtaacggcctgagatgtgccactgtcccgcgaggtgttttcag

SEQ ID NO: 45577 - DNA, 50 bp, synthetic construct
  source 1..50: mol_type = other DNA
agacaaatttatcacatgaaaagtaaacaacgcagaaaataaatttttat

SEQ ID NO: 45578 - DNA, 50 bp, synthetic construct
  source 1..50: mol_type = other DNA
taatagtagatgtcaatttcaccgtctctctaaaatgatataatctattt

SEQ ID NO: 45579 - DNA, 50 bp, synthetic construct
  source 1..50: mol_type = other DNA
ttcagagtgatgaatagacacggaaagctttgttttaggattgctccttt

SEQ ID NO: 45580 - DNA, 50 bp, synthetic construct
  source 1..50: mol_type = other DNA
acgccggaagcatggtgaagcgataaaaataacatccatacaagttgcga

SEQ ID NO: 45581 - DNA, 50 bp, synthetic construct
  source 1..50: mol_type = other DNA
aggtcaggcaaatgagtcgattcaatcataaaaacttctttatgagtacc

SEQ ID NO: 45582 - DNA, 50 bp, synthetic construct
  source 1..50: mol_type = other DNA
ggtatcaatctcgccaggctgcagatctcgaatcgttactgacaccgcgc

SEQ ID NO: 45583 - DNA, 50 bp, synthetic construct
  source 1..50: mol_type = other DNA
tccttgaaggtcacccggatgtcatcgtctgtccaagcggccttcatgga

SEQ ID NO: 45584 - DNA, 50 bp, synthetic construct
  source 1..50: mol_type = other DNA
tctgcccaaaaatacaaacaacccgcggctgattgctgtttttgggcgct

SEQ ID NO: 45585 - DNA, 50 bp, synthetic construct
  source 1..50: mol_type = other DNA
gcgcgcggccgcatagcgccgcaccgtcgcgtgggttggtggcgtcgccg

SEQ ID NO: 45586 - DNA, 50 bp, synthetic construct
  source 1..50: mol_type = other DNA
cacctgccaccacgccgcgtccgtatacggcggcggatgggaatccggaa

SEQ ID NO: 45587 - DNA, 50 bp, synthetic construct
  source 1..50: mol_type = other DNA
agcattttaccccagtgcctaagagcaatattattccatcctttaatgga

SEQ ID NO: 45588 - DNA, 50 bp, synthetic construct
  source 1..50: mol_type = other DNA
atcaaatattctattttatgtcaattattaaataaaataaaagagatgat

SEQ ID NO: 45589 - DNA, 50 bp, synthetic construct
  source 1..50: mol_type = other DNA
catgatgctttttctttcctcttgcgcgcacgccctggccgcctgcgggc

SEQ ID NO: 45590 - DNA, 50 bp, synthetic construct
  source 1..50: mol_type = other DNA
ggatccattgcagcgcaatggatacgaattgaaaatgctgcaatgctgaa

SEQ ID NO: 45591 - DNA, 50 bp, synthetic construct
  source 1..50: mol_type = other DNA
ttttcgaagaaaaatgagcgaattacaacctttctatttttctaaaaaag

SEQ ID NO: 45592 - DNA, 50 bp, synthetic construct
  source 1..50: mol_type = other DNA
gtgcttacggatattggaacggaagaactggcgcatctggaaatggtcgc

SEQ ID NO: 45593 - DNA, 50 bp, synthetic construct
  source 1..50: mol_type = other DNA
cattctgaaaacagcagaaaaagcggtatttttctgccgttttcaatatc

SEQ ID NO: 45594 - DNA, 50 bp, synthetic construct
  source 1..50: mol_type = other DNA
atgttctcgaaaagaaataattctattcgattattatttatgtataaagt

SEQ ID NO: 45595 - DNA, 50 bp, synthetic construct
  source 1..50: mol_type = other DNA
gcgaagctgaaaaatgttctcgaaaagaggacggtatttttccaggaaca

SEQ ID NO: 45596 - DNA, 50 bp, synthetic construct
  source 1..50: mol_type = other DNA
ctgctggaacagggggctgcgccacaaagctcctctgcgtggggcagctt

SEQ ID NO: 45597 - DNA, 50 bp, synthetic construct
  source 1..50: mol_type = other DNA
gatccgcctggaggtaccggtgcgatcgcagaaatgcgtgtgggtggatt

SEQ ID NO: 45598 - DNA, 50 bp, synthetic construct
  source 1..50: mol_type = other DNA
cgatcccaatgtgaacatcaacaatattattatccctctgttcgggaggg

SEQ ID NO: 45599 - DNA, 50 bp, synthetic construct
  source 1..50: mol_type = other DNA
acagaataaactgtgctatacattaacgggcaaagcaggaaggctactgg

SEQ ID NO: 45600 - DNA, 50 bp, synthetic construct
  source 1..50: mol_type = other DNA
gcagtaatgaaatcttcattttgcatactatccaaagataagccgtggcg

SEQ ID NO: 45601 - DNA, 50 bp, synthetic construct
  source 1..50: mol_type = other DNA
atatggacggccagagcagccagctttctgtcttatctgtttttccacat

SEQ ID NO: 45602 - DNA, 50 bp, synthetic construct
  source 1..50: mol_type = other DNA
actggacgattacattcgagttccaaatcatacgctccttatcgtgcaaa

SEQ ID NO: 45603 - DNA, 50 bp, synthetic construct
  source 1..50: mol_type = other DNA
aagccggcgaacggattgacgttgttattaatgaatttgtttgtacttat

SEQ ID NO: 45604 - DNA, 50 bp, synthetic construct
  source 1..50: mol_type = other DNA
tatggaacaaacaaataagcaagaaggctttcttatagctttattccata

SEQ ID NO: 45605 - DNA, 50 bp, synthetic construct
  source 1..50: mol_type = other DNA
aattggccggcgatttttttgttgaagaactgaacaatcgaaagcttgga

SEQ ID NO: 45606 - DNA, 50 bp, synthetic construct
  source 1..50: mol_type = other DNA
agaaatagtaagaagtacattacgaagaatatgtatttgctatcccttcc

SEQ ID NO: 45607 - DNA, 50 bp, synthetic construct
  source 1..50: mol_type = other DNA
ataatcagattaaaaacaaataaattttccatgttttcttacctgattat

SEQ ID NO: 45608 - DNA, 50 bp, synthetic construct
  source 1..50: mol_type = other DNA
ttatatttatcaattttttttaaaaagattaaaaaaatgcagtaatatca

SEQ ID NO: 45609 - DNA, 50 bp, synthetic construct
  source 1..50: mol_type = other DNA
tcagcacttgcattttctcacccctgtagggcagaaaatgcaagtgaaat

SEQ ID NO: 45610 - DNA, 50 bp, synthetic construct
  source 1..50: mol_type = other DNA
atcgtctatacgtagtagataaaatattagatgtattaatactagcttca

SEQ ID NO: 45611 - DNA, 50 bp, synthetic construct
  source 1..50: mol_type = other DNA
tgttgatgaatgaaaactcgaaaatattttcttgattctttcactcattg

SEQ ID NO: 45612 - DNA, 50 bp, synthetic construct
  source 1..50: mol_type = other DNA
tccaaaggaaacatgctggcttggacccaaatatggtcggtatttttcga

SEQ ID NO: 45613 - DNA, 50 bp, synthetic construct
  source 1..50: mol_type = other DNA
aatctgaagcagaaaagtacaattacatagggttaagcctccttcaaatt

SEQ ID NO: 45614 - DNA, 50 bp, synthetic construct
  source 1..50: mol_type = other DNA
tctattacagagaaaaaagctggttttccagcatttttgtatcaattatg

SEQ ID NO: 45615 - DNA, 50 bp, synthetic construct
  source 1..50: mol_type = other DNA
gcctcagagcgggcagcttgacttatttatcaaggtcacctatcatatgc

SEQ ID NO: 45616 - DNA, 50 bp, synthetic construct
  source 1..50: mol_type = other DNA
acaagagatgaccgtctgtttcggctccttccgttttggtagtctatata

SEQ ID NO: 45617 - DNA, 50 bp, synthetic construct
  source 1..50: mol_type = other DNA
agggcaaaggctcgaccttctggttttgcccgtctccttaattatgcctt

SEQ ID NO: 45618 - DNA, 50 bp, synthetic construct
  source 1..50: mol_type = other DNA
ctcattgctctgacctcccgctttcgtgagcggtagggctttcctgttac

SEQ ID NO: 45619 - DNA, 50 bp, synthetic construct
  source 1..50: mol_type = other DNA
aatcagtcgtcgagaaggtcctcgtacgaggacaacctcgcaagtcgttc

SEQ ID NO: 45620 - DNA, 50 bp, synthetic construct
  source 1..50: mol_type = other DNA
tctgttggcatagtatccgcatatttgctataatatagaggtaaagggca

SEQ ID NO: 45621 - DNA, 50 bp, synthetic construct
  source 1..50: mol_type = other DNA
acctcaagggcggcgcacttatttatacccatgtgtgttatcctttcggg

SEQ ID NO: 45622 - DNA, 50 bp, synthetic construct
  source 1..50: mol_type = other DNA
gttttatacatatcttatactattataagagtatcgcgttcacttaaaga

SEQ ID NO: 45623 - DNA, 50 bp, synthetic construct
  source 1..50: mol_type = other DNA
gctcatcttttttgccgttaacttttcggttatttccataatatcacctc

SEQ ID NO: 45624 - DNA, 50 bp, synthetic construct
  source 1..50: mol_type = other DNA
gcctcaaaactatggagctggtcttcctgccacctccactgctttgatct

SEQ ID NO: 45625 - DNA, 50 bp, synthetic construct
  source 1..50: mol_type = other DNA
gagatctacacggatataaaaaatatacaaaatatatcaacgagcatgag

SEQ ID NO: 45626 - DNA, 50 bp, synthetic construct
  source 1..50: mol_type = other DNA
atttctggctgagataccgcagggatgccaacatccgagcagagagaaag

SEQ ID NO: 45627 - DNA, 50 bp, synthetic construct
  source 1..50: mol_type = other DNA
tttatagttctcgtactgcttttttaaaccaggttgttacggtccataac

SEQ ID NO: 45628 - DNA, 50 bp, synthetic construct
  source 1..50: mol_type = other DNA
cgagcatatcctgcaactcttaaaagttatattcttcaatgccgtgcagt

SEQ ID NO: 45629 - DNA, 50 bp, synthetic construct
  source 1..50: mol_type = other DNA
caaaagcccgacaatgttttttaaatgctgcgggggttgtgggggcgcgg

SEQ ID NO: 45630 - DNA, 50 bp, synthetic construct
  source 1..50: mol_type = other DNA
aggtaaaaaacaaaaaaaaactaaaaggctttttttgagttttgaaggtt

SEQ ID NO: 45631 - DNA, 50 bp, synthetic construct
  source 1..50: mol_type = other DNA
tctcgccctttgcgccgggatcgccttctgcccctgccaaaaggtcggtt

SEQ ID NO: 45632 - DNA, 50 bp, synthetic construct
  source 1..50: mol_type = other DNA
atttcagacacgaaatgttacattatagtgtattctttaaatagggaagg

SEQ ID NO: 45633 - DNA, 50 bp, synthetic construct
  source 1..50: mol_type = other DNA
ttacaaaagtgtacatttttattcaactaaaaaacatttcactttcgtat

SEQ ID NO: 45634 - DNA, 50 bp, synthetic construct
  source 1..50: mol_type = other DNA
tggctcttcgatgacgaaggcagtgcacacgctgcaaaataacacagcca

SEQ ID NO: 45635 - DNA, 50 bp, synthetic construct
  source 1..50: mol_type = other DNA
ctgctgctgcaaacggcaaagcgcccgcgccttggcgtacagtacttcgg

SEQ ID NO: 45636 - DNA, 50 bp, synthetic construct
  source 1..50: mol_type = other DNA
agctttcgtcttgacgaatttctgaacagataaccaggaagacaaaagca

SEQ ID NO: 45637 - DNA, 50 bp, synthetic construct
  source 1..50: mol_type = other DNA
ggcagaaaacttgaagtgctggacattccgccgaccatcaatccgctgac

SEQ ID NO: 45638 - DNA, 50 bp, synthetic construct
  source 1..50: mol_type = other DNA
ggcacggcagcgggcattacaggcaaggagatcatggccgtggcagacag

SEQ ID NO: 45639 - DNA, 50 bp, synthetic construct
  source 1..50: mol_type = other DNA
gaagaaaaaagaattattggagctttcgctccttattttcttgattctct

SEQ ID NO: 45640 - DNA, 50 bp, synthetic construct
  source 1..50: mol_type = other DNA
gcaaagtcgtcttgctttttgcccaaaggccggaatatcaagcgttttcc

SEQ ID NO: 45641 - DNA, 50 bp, synthetic construct
  source 1..50: mol_type = other DNA
tttctgccagtttggacaagttcgccatgatttcggctaactctttatca

SEQ ID NO: 45642 - DNA, 50 bp, synthetic construct
  source 1..50: mol_type = other DNA
atgtatagagttacgcttttccataaacggaaaagcgctatgtaacgcaa

SEQ ID NO: 45643 - DNA, 50 bp, synthetic construct
  source 1..50: mol_type = other DNA
cactttaatatgtcaagaataacatctcttattgttattgcattattgcc

SEQ ID NO: 45644 - DNA, 50 bp, synthetic construct
  source 1..50: mol_type = other DNA
agccggatcctgatcttgcagaggcttctctggaggagcagcgggaggca

SEQ ID NO: 45645 - DNA, 50 bp, synthetic construct
  source 1..50: mol_type = other DNA
gcttttcagggattcgtagaattatagcatgtcacgggtcaatatccagc

SEQ ID NO: 45646 - DNA, 50 bp, synthetic construct
  source 1..50: mol_type = other DNA
acgatttttatcattacaaacgtaataatgaaaatataactaaaaatact

SEQ ID NO: 45647 - DNA, 50 bp, synthetic construct
  source 1..50: mol_type = other DNA
ttaccattgtttccccttcgggctatatgccataggagtcgcattatgta

SEQ ID NO: 45648 - DNA, 50 bp, synthetic construct
  source 1..50: mol_type = other DNA
gatggggagttcgtttttgtagttataaccgcaacctggtactggtaatg

SEQ ID NO: 45649 - DNA, 50 bp, synthetic construct
  source 1..50: mol_type = other DNA
atgcccgaaattccttgatatataagggcttcttctggaatttcaagcac

SEQ ID NO: 45650 - DNA, 50 bp, synthetic construct
  source 1..50: mol_type = other DNA
caaaagcacagtagtgatatagaagtcttacacgctgaatgttcgcttta

SEQ ID NO: 45651 - DNA, 50 bp, synthetic construct
  source 1..50: mol_type = other DNA
aaaaccttgtaaaatcaacctttctttctaggaaatattccttatttttt

SEQ ID NO: 45652 - DNA, 50 bp, synthetic construct
  source 1..50: mol_type = other DNA
tccacactgaaagcgcgggaccttataacgcgacaggctatcaggcaaac

SEQ ID NO: 45653 - DNA, 50 bp, synthetic construct
  source 1..50: mol_type = other DNA
aggtcgtaggcaagaaaaccgcccaaggacgaaattcttgccgccggctt

SEQ ID NO: 45654 - DNA, 50 bp, synthetic construct
  source 1..50: mol_type = other DNA
aaggagcgtatgatttcttctgtctttgctagaaaaacctaacgcttttc

SEQ ID NO: 45655 - DNA, 50 bp, synthetic construct
  source 1..50: mol_type = other DNA
tgtcgggtaggccatcaagacacacgttcgtttttcggctctgccgactg

SEQ ID NO: 45656 - DNA, 50 bp, synthetic construct
  source 1..50: mol_type = other DNA
tactgctattgtacagaaggaggaatcccaatcggcatacaatagcatga

SEQ ID NO: 45657 - DNA, 50 bp, synthetic construct
  source 1..50: mol_type = other DNA
aaagaatatgaactttattatttgttcttataataaattttagatttact

SEQ ID NO: 45658 - DNA, 50 bp, synthetic construct
  source 1..50: mol_type = other DNA
ttttttaatctttccggaatttcttcttaaactcttgaattcttcggaaa

SEQ ID NO: 45659 - DNA, 50 bp, synthetic construct
  source 1..50: mol_type = other DNA
cctggaatcgtctctgcacaagcgggcccagggttcgagtccctggaggt

SEQ ID NO: 45660 - DNA, 50 bp, synthetic construct
  source 1..50: mol_type = other DNA
tagatcctaaatgggattggattgatccgcgtaaaaaaagcgtagctcca

SEQ ID NO: 45661 - DNA, 50 bp, synthetic construct
  source 1..50: mol_type = other DNA
aagaaaccgaagaaaatatggctctgttaatatattttcataactttcct

SEQ ID NO: 45662 - DNA, 50 bp, synthetic construct
  source 1..50: mol_type = other DNA
cgtgccattaaaaaagaagaaccatgaccttcttcaatttaataggcaaa

SEQ ID NO: 45663 - DNA, 50 bp, synthetic construct
  source 1..50: mol_type = other DNA
tagagtttataaacttgcaaattatttaatttgcaagttttaaaatacta

SEQ ID NO: 45664 - DNA, 50 bp, synthetic construct
  source 1..50: mol_type = other DNA
ccgggtgatgctgatgacgtatgaatgcagttctgggcgtgaaaccccgg

SEQ ID NO: 45665 - DNA, 50 bp, synthetic construct
  source 1..50: mol_type = other DNA
attttataaaaggagaaacaaatatgttttgatgtatccttttatacaac

SEQ ID NO: 45666 - DNA, 50 bp, synthetic construct
  source 1..50: mol_type = other DNA
acgtcgcaaaaatcatccattgagcgacagcgccggtcgttttgtccagc

SEQ ID NO: 45667 - DNA, 50 bp, synthetic construct
  source 1..50: mol_type = other DNA
atctgaaagactttctgatgacggatcgcccgtgagatattttttcaatc

SEQ ID NO: 45668 - DNA, 50 bp, synthetic construct
  source 1..50: mol_type = other DNA
tggcagacgagcctacaggttatgtatacaacctacaggaaatcttgatt

SEQ ID NO: 45669 - DNA, 50 bp, synthetic construct
  source 1..50: mol_type = other DNA
atgagcctacgggtagggttcaattaacttaacacagcccaccggagcac

SEQ ID NO: 45670 - DNA, 50 bp, synthetic construct
  source 1..50: mol_type = other DNA
cttggaggctctgatgatgttggcgaccaaaaatccacggacgttccgtg

SEQ ID NO: 45671 - DNA, 50 bp, synthetic construct
  source 1..50: mol_type = other DNA
acgttggggtattgctcctgaaataatggtcagcgcgaaagaaacagcga

SEQ ID NO: 45672 - DNA, 50 bp, synthetic construct
  source 1..50: mol_type = other DNA
ttaacgtctgcggcggtttttgcgttctcaaataataaagcagacggcga

SEQ ID NO: 45673 - DNA, 50 bp, synthetic construct
  source 1..50: mol_type = other DNA
aatagcacacttatgatggaattgataagttccatcataagtgagcaata

SEQ ID NO: 45674 - DNA, 50 bp, synthetic construct
  source 1..50: mol_type = other DNA
aaataacattcgaatttgctaacggcagggacaaaatgcgaaggttttcg

SEQ ID NO: 45675 - DNA, 50 bp, synthetic construct
  source 1..50: mol_type = other DNA
cagcatatttttaagaacattttagaataaaggtaattaaacaattcgga

SEQ ID NO: 45676 - DNA, 50 bp, synthetic construct
  source 1..50: mol_type = other DNA
aaaaatataaagcatggaaaaaatatagcacttcctctctaaatattatt

SEQ ID NO: 45677 - DNA, 50 bp, synthetic construct
  source 1..50: mol_type = other DNA
gtctcagctgctgagaaattctatgggcaccatcgtgcatcagctgacac

SEQ ID NO: 45678 - DNA, 50 bp, synthetic construct
  source 1..50: mol_type = other DNA
ggcattagcagaaaaaaaagaatttatggtatatatttactgctaatata

SEQ ID NO: 45679 - DNA, 50 bp, synthetic construct
  source 1..50: mol_type = other DNA
cgggaagatagaaatgtggtatgggccccacaatctattctaatcgtcct

SEQ ID NO: 45680 - DNA, 50 bp, synthetic construct
  source 1..50: mol_type = other DNA
ggtgtaccttgaaaaataaatagagaactactggtttacgccgatgtact

SEQ ID NO: 45681 - DNA, 50 bp, synthetic construct
  source 1..50: mol_type = other DNA
agtttatcaagtccgtccgcgtttacaaaaccggataaggaggaagaata

SEQ ID NO: 45682 - DNA, 50 bp, synthetic construct
  source 1..50: mol_type = other DNA
atacttgaatcacgaattgcgaaaaatttcgccctcgttgatacaggtaa

SEQ ID NO: 45683 - DNA, 50 bp, synthetic construct
  source 1..50: mol_type = other DNA
tttcttttttctctccattttcttcgacgggaacggagaaaacggaaacg

SEQ ID NO: 45684 - DNA, 50 bp, synthetic construct
  source 1..50: mol_type = other DNA
aaaccgcaggcgttgaaacctgcggtcggtagcttcgctgaatgcggcga

SEQ ID NO: 45685 - DNA, 50 bp, synthetic construct
  source 1..50: mol_type = other DNA
ataacaccgattaaaaatcaagttaaccgtctatttcgcagatagacggt

SEQ ID NO: 45686 - DNA, 50 bp, synthetic construct
  source 1..50: mol_type = other DNA
gtgttctacatcgtgggcgaggatgcttcctcgcccagcatcttcaacag

SEQ ID NO: 45687 - DNA, 50 bp, synthetic construct
  source 1..50: mol_type = other DNA
caggatttgtcccgcagagactttaccaagctcgtgtgcgacggtgggaa

SEQ ID NO: 45688 - DNA, 50 bp, synthetic construct
  source 1..50: mol_type = other DNA
cgggtattcgtgtttgtttcccagcgctacacccggatatcgaccgccgc

SEQ ID NO: 45689 - DNA, 50 bp, synthetic construct
  source 1..50: mol_type = other DNA
tgcttatgtctgcgcatgtactgcaatctgcaccatccgtgacatgatac

SEQ ID NO: 45690 - DNA, 50 bp, synthetic construct
  source 1..50: mol_type = other DNA
gaacggatgccttaccccctgtcccatatgcggcggtgcggcgttttttc

SEQ ID NO: 45691 - DNA, 50 bp, synthetic construct
  source 1..50: mol_type = other DNA
gtctgctgttcctcgctgtccgtggaaacggaattgcagtccaagcagcg

SEQ ID NO: 45692 - DNA, 50 bp, synthetic construct
  source 1..50: mol_type = other DNA
tatgttaaaagaaaagaacctacaatttatatttggttgcttttgaaaat

SEQ ID NO: 45693 - DNA, 50 bp, synthetic construct
  source 1..50: mol_type = other DNA
agatacccttcatacagtgttcgtattggaaaactcctcaaagagtttct

SEQ ID NO: 45694 - DNA, 50 bp, synthetic construct
  source 1..50: mol_type = other DNA
ttctgattaagatatgaaaaaatatagggtgcttatttccaatatcagaa

SEQ ID NO: 45695 - DNA, 50 bp, synthetic construct
  source 1..50: mol_type = other DNA
aagcgtggaaacggatccgatgctgttttctcggatacctttcacctttc

SEQ ID NO: 45696 - DNA, 50 bp, synthetic construct
  source 1..50: mol_type = other DNA
atatgattattccgcagtacagaaaaggtttatctgctgtatggacagga

SEQ ID NO: 45697 - DNA, 50 bp, synthetic construct
  source 1..50: mol_type = other DNA
gtagttctcaatatagtcaatattaaaatatttgattcgttctaaatcaa

SEQ ID NO: 45698 - DNA, 50 bp, synthetic construct
  source 1..50: mol_type = other DNA
tttgtcgccttttcttttggcttgtataatataaataaatgtgccgcatt

SEQ ID NO: 45699 - DNA, 50 bp, synthetic construct
  source 1..50: mol_type = other DNA
cacatttgcggctcaatctttgatttttcaaaaattgctgccacccagta

SEQ ID NO: 45700 - DNA, 50 bp, synthetic construct
  source 1..50: mol_type = other DNA
cccgctccacgggtgaactggaacgctgaccagttataccgcccaggtgg

SEQ ID NO: 45701 - DNA, 50 bp, synthetic construct
  source 1..50: mol_type = other DNA
gaacgcagaaagagacatggcgaaatatcgcctttgacacttctgcactg

SEQ ID NO: 45702 - DNA, 50 bp, synthetic construct
  source 1..50: mol_type = other DNA
atatatttatttttagcttctttcaaaaaacaatataaaaataaatagtt

SEQ ID NO: 45703 - DNA, 50 bp, synthetic construct
  source 1..50: mol_type = other DNA
cgatgcgattcaggagaacatccacgaggatgtagtccggcttcccatcg

SEQ ID NO: 45704 - DNA, 50 bp, synthetic construct
  source 1..50: mol_type = other DNA
tggatatgaccgtcctgccatttcgcgaaatgtaactgcggtcgatcccc

SEQ ID NO: 45705 - DNA, 50 bp, synthetic construct
  source 1..50: mol_type = other DNA
tcaatttgtatgttgtcttgacgttgctagagccttcttttacaaattga

SEQ ID NO: 45706 - DNA, 50 bp, synthetic construct
  source 1..50: mol_type = other DNA
aatttttttacgttatttcccatcataagttagtaaaatactaaactatt

SEQ ID NO: 45707 - DNA, 50 bp, synthetic construct
  source 1..50: mol_type = other DNA
tggcttttagggaagcgggagattttcttcggtttcttccgtaaaaatag

SEQ ID NO: 45708 - DNA, 50 bp, synthetic construct
  source 1..50: mol_type = other DNA
ttcaatcatttgctgggcacgaagccgaaatcatcctttgactgaaggac

SEQ ID NO: 45709 - DNA, 50 bp, synthetic construct
  source 1..50: mol_type = other DNA
tattttccgtagcagaaacagtggtctgccaggagctgctcattccaagc

SEQ ID NO: 45710 - DNA, 50 bp, synthetic construct
  source 1..50: mol_type = other DNA
gaccgaagcctgagcgtcacactgttaacggtgataccttcactgtggtc

SEQ ID NO: 45711 - DNA, 50 bp, synthetic construct
  source 1..50: mol_type = other DNA
tcaatgaccgccacaccattttcaattgcatcatagtcagtggtcattct

SEQ ID NO: 45712 - DNA, 50 bp, synthetic construct
  source 1..50: mol_type = other DNA
tgacaaagcaaacagtaacccgcgcctgcgctgctcttccgaccatttcg

SEQ ID NO: 45713 - DNA, 50 bp, synthetic construct
  source 1..50: mol_type = other DNA
aggaaaaagtttcaaatgcatagaagtcaagcaatatcaaggtttttcaa

SEQ ID NO: 45714 - DNA, 50 bp, synthetic construct
  source 1..50: mol_type = other DNA
tctcaagccgctgagcccggaggaaggattcctcgagcagctgagcaaga

SEQ ID NO: 45715 - DNA, 50 bp, synthetic construct
  source 1..50: mol_type = other DNA
tctgcatcaccatatgcttttagcaacggaaaagccgttgtttatgagca

SEQ ID NO: 45716 - DNA, 50 bp, synthetic construct
  source 1..50: mol_type = other DNA
tccaattccataacaccacgttcaaccgataactgtgttatcgaaagaga

SEQ ID NO: 45717 - DNA, 50 bp, synthetic construct
  source 1..50: mol_type = other DNA
ttttgcccatagcgaaaaattgcacgtcaatcatttcgttatcacgcata

SEQ ID NO: 45718 - DNA, 50 bp, synthetic construct
  source 1..50: mol_type = other DNA
ggccattgtgtcggataggtcgggcgctggaagttcgcgccggaaaaacc

SEQ ID NO: 45719 - DNA, 50 bp, synthetic construct
  source 1..50: mol_type = other DNA
ataagtataataactactaataatataggctttattgttataacggctat

SEQ ID NO: 45720 - DNA, 50 bp, synthetic construct
  source 1..50: mol_type = other DNA
attgtgatactttcaagccaaatttaggattaacttgaaaaaatgacaat

SEQ ID NO: 45721 - DNA, 50 bp, synthetic construct
  source 1..50: mol_type = other DNA
aaaagtaagcttgtgttctttttgataaaaaagaacaagagggcgtgcaa

SEQ ID NO: 45722 - DNA, 50 bp, synthetic construct
  source 1..50: mol_type = other DNA
gcctacatatcccaatatatcactgcacttcattgtagagatatgtatat

SEQ ID NO: 45723 - DNA, 50 bp, synthetic construct
  source 1..50: mol_type = other DNA
agcaagtccacaatcgcctccctgtaccgaaaggcggttgtcccctcagt

SEQ ID NO: 45724 - DNA, 50 bp, synthetic construct
  source 1..50: mol_type = other DNA
atatgtagtgaagattgttctgatgctaataacgaatgcgccgtacatat

SEQ ID NO: 45725 - DNA, 50 bp, synthetic construct
  source 1..50: mol_type = other DNA
tttaatactctcttagaggctctctagataaaatctaagacttcctttaa

SEQ ID NO: 45726 - DNA, 50 bp, synthetic construct
  source 1..50: mol_type = other DNA
ttgatttagaacgaatcaaatattttaatattgactatattgagaactac

SEQ ID NO: 45727 - DNA, 50 bp, synthetic construct
  source 1..50: mol_type = other DNA
taacctttcaggtagagagcggcgactacgatctccagcttgaaagttga

SEQ ID NO: 45728 - DNA, 50 bp, synthetic construct
  source 1..50: mol_type = other DNA
ccgctcgggctgatcagaaggggatacgcccttctgcgcccagcaggagg

SEQ ID NO: 45729 - DNA, 50 bp, synthetic construct
  source 1..50: mol_type = other DNA
agaacgtactcttatagtatagagcaaaatgctcgataagacatccagta

SEQ ID NO: 45730 - DNA, 50 bp, synthetic construct
  source 1..50: mol_type = other DNA
agctgcccaacgcagaggagctttgccaactgcctgtgctttgtggcgca

SEQ ID NO: 45731 - DNA, 50 bp, synthetic construct
  source 1..50: mol_type = other DNA
gccatcccggagagataattctcatatgagaaggaaatcctttatttgga

SEQ ID NO: 45732 - DNA, 50 bp, synthetic construct
  source 1..50: mol_type = other DNA
actttgaaatgcaatttttccatatatacatactcgtagattttcttctg

SEQ ID NO: 45733 - DNA, 50 bp, synthetic construct
  source 1..50: mol_type = other DNA
aaaagtgaaattggaacttgcggtcgagagcttccgaaagcttcaccttt

SEQ ID NO: 45734 - DNA, 50 bp, synthetic construct
  source 1..50: mol_type = other DNA
tccagtctacttgatcctttaatgtagatttaataatgattacaaccgcg

SEQ ID NO: 45735 - DNA, 50 bp, synthetic construct
  source 1..50: mol_type = other DNA
ggctgcagagcgcggtctttcccggaagatgaagacgcagaaaaagaacc

SEQ ID NO: 45736 - DNA, 50 bp, synthetic construct
  source 1..50: mol_type = other DNA
attgtccaccagcaccaccacatcgccagctgcaagagatgctggacaat

SEQ ID NO: 45737 - DNA, 50 bp, synthetic construct
  source 1..50: mol_type = other DNA
tcattcaggaacttcaaacgctgcttgcgacgaaagattttccaaaatac

SEQ ID NO: 45738 - DNA, 50 bp, synthetic construct
  source 1..50: mol_type = other DNA
cgtcatacgatttgctgacgtacacgtgtgagacgaaaaatcataaatcg

SEQ ID NO: 45739 - DNA, 50 bp, synthetic construct
  source 1..50: mol_type = other DNA
gatatgaaatccccccaccgccgcaggcggcgggagtaaggcttcccgct

SEQ ID NO: 45740 - DNA, 50 bp, synthetic construct
  source 1..50: mol_type = other DNA
tgttgttccgtttgtggctgctgtccttgtgagccgcaaccggaataaca

SEQ ID NO: 45741 - DNA, 50 bp, synthetic construct
  source 1..50: mol_type = other DNA
ggtggacaaaaaggacagcatttccaccgtacctatcctttttgtgctct

SEQ ID NO: 45742 - DNA, 50 bp, synthetic construct
  source 1..50: mol_type = other DNA
aataatcggactagcttgtaaagacagctttgaagctcaggtcgattatt

SEQ ID NO: 45743 - DNA, 50 bp, synthetic construct
  source 1..50: mol_type = other DNA
gatgagcatctctaatgatattttataaaatgtaatcaggtgaatggacc

SEQ ID NO: 45744 - DNA, 50 bp, synthetic construct
  source 1..50: mol_type = other DNA
gatgatactgtcgggggtctgttctggaagttgcccgtgaaattgatgct

SEQ ID NO: 45745 - DNA, 50 bp, synthetic construct
  source 1..50: mol_type = other DNA
tacatatatagtatagcatatttactgaaagaacgtacaccgtatacaga

SEQ ID NO: 45746 - DNA, 50 bp, synthetic construct
  source 1..50: mol_type = other DNA
ccgcaaggccattacgatggaggacagcccgtcaggcttcggcccggcgg

SEQ ID NO: 45747 - DNA, 50 bp, synthetic construct
  source 1..50: mol_type = other DNA
ctggatatgcagcccgtgagcgggtatcaccttttgggtttgcaatcctg

SEQ ID NO: 45748 - DNA, 50 bp, synthetic construct
  source 1..50: mol_type = other DNA
aagcaccctatattatagcagagaagcctcttctataaaatagtactgac

SEQ ID NO: 45749 - DNA, 50 bp, synthetic construct
  source 1..50: mol_type = other DNA
ttcttccttggagaagaccgggaactttcgtctaatcagtcacggatttg

SEQ ID NO: 45750 - DNA, 50 bp, synthetic construct
  source 1..50: mol_type = other DNA
aaatgcagacaaaataaaagcaccagacggctaaaattttatcaacagtt

SEQ ID NO: 45751 - DNA, 50 bp, synthetic construct
  source 1..50: mol_type = other DNA
tcattgccggtatttcaatttttgcatcgcatcgttaacaccggccggag

SEQ ID NO: 45752 - DNA, 50 bp, synthetic construct
  source 1..50: mol_type = other DNA
tctgaatatctactactgcaaatctatatttacggcgatgtccgcaaaga

SEQ ID NO: 45753 - DNA, 50 bp, synthetic construct
  source 1..50: mol_type = other DNA
gtacctttttctcctctaccatagcctcattttttaggggaaaattatac

SEQ ID NO: 45754 - DNA, 50 bp, synthetic construct
  source 1..50: mol_type = other DNA
agctactctgcaaggcaagaggacacgtcagcctgcaaaaggctgtcaag

SEQ ID NO: 45755 - DNA, 50 bp, synthetic construct
  source 1..50: mol_type = other DNA
gcgctccggcgcgggtctttttgtttaccagaataaccgcgccggaaatg

SEQ ID NO: 45756 - DNA, 50 bp, synthetic construct
  source 1..50: mol_type = other DNA
gtattttggaaaatctttcgtcgcaagcagcgtttgaagttcctgaatga

SEQ ID NO: 45757 - DNA, 50 bp, synthetic construct
  source 1..50: mol_type = other DNA
atagatgaagttgaaggagatatggaagtacctcctttccgtacgtctat

SEQ ID NO: 45758 - DNA, 50 bp, synthetic construct
  source 1..50: mol_type = other DNA
gaattgaatattgaaaatctgaaatagttgagaaaatcttcatcgtcgtc

SEQ ID NO: 45759 - DNA, 50 bp, synthetic construct
  source 1..50: mol_type = other DNA
caggattttttgagagcctgttacattttacagttctccaaaaaaggatt

SEQ ID NO: 45760 - DNA, 50 bp, synthetic construct
  source 1..50: mol_type = other DNA
catccttgcgacaccagagatgcctgtgcatgattgatgaaagaaggtgg

SEQ ID NO: 45761 - DNA, 50 bp, synthetic construct
  source 1..50: mol_type = other DNA
tgcccgttttatatgcattttttatattaaatgaaaaatagccgtcccca

SEQ ID NO: 45762 - DNA, 50 bp, synthetic construct
  source 1..50: mol_type = other DNA
ttttatcaaataacaactacaatttgggaaagagttcagatcagattaaa

SEQ ID NO: 45763 - DNA, 50 bp, synthetic construct
  source 1..50: mol_type = other DNA
taataccgattagtaaatttgtcaatgaatctattgatgccgatgtatta

SEQ ID NO: 45764 - DNA, 50 bp, synthetic construct
  source 1..50: mol_type = other DNA
ccatagttaaagatattggtttcaattaactacggatggattaaataccg

SEQ ID NO: 45765 - DNA, 50 bp, synthetic construct
  source 1..50: mol_type = other DNA
agctttgccgaggccgtgcagaactggtaatgccgggctgcattcccctg

SEQ ID NO: 45766 - DNA, 50 bp, synthetic construct
  source 1..50: mol_type = other DNA
tggacagttcgctgtacctgttctgcaagcggctcatgaagaattatccg

SEQ ID NO: 45767 - DNA, 50 bp, synthetic construct
  source 1..50: mol_type = other DNA
cctcggatatgatcatgatgaagacgttttgccccgttgcatatccatat

SEQ ID NO: 45768 - DNA, 50 bp, synthetic construct
  source 1..50: mol_type = other DNA
gtgcttcaaagctgtggagctggtctccccgctcttctgcttcaaaggct

SEQ ID NO: 45769 - DNA, 50 bp, synthetic construct
  source 1..50: mol_type = other DNA
cgtggcgcggcgggaatgttgtagatatatcaacttcctgcggggcaacg

SEQ ID NO: 45770 - DNA, 50 bp, synthetic construct
  source 1..50: mol_type = other DNA
gtagaagcgaattatattatgcaaagcgaggaaatatgattttcttcatc

SEQ ID NO: 45771 - DNA, 50 bp, synthetic construct
  source 1..50: mol_type = other DNA
tgatgaattccagcagcttatgacgcagaaccggcagtggaaagtggtca

SEQ ID NO: 45772 - DNA, 50 bp, synthetic construct
  source 1..50: mol_type = other DNA
tttacgagctttgctgtggtacgcattttaaacataagattgctcacaaa

SEQ ID NO: 45773 - DNA, 50 bp, synthetic construct
  source 1..50: mol_type = other DNA
aggttgcggttataatccactcttgttcgtgccgtctatatttgtaatga

SEQ ID NO: 45774 - DNA, 50 bp, synthetic construct
  source 1..50: mol_type = other DNA
aagaacctgaaccaccatgatagatatctatcatggcggatataatgaac

SEQ ID NO: 45775 - DNA, 50 bp, synthetic construct
  source 1..50: mol_type = other DNA
ccttttctgtggagcacgtggaaacctttcccggtggacctgttggaagg

SEQ ID NO: 45776 - DNA, 50 bp, synthetic construct
  source 1..50: mol_type = other DNA
gaagctacacgagccaccacagaagctaaaactgtggcagctttgcctga

SEQ ID NO: 45777 - DNA, 50 bp, synthetic construct
  source 1..50: mol_type = other DNA
atccgaacaaacctcctttgtcaaggtggacagaggaacttccctccgat

SEQ ID NO: 45778 - DNA, 50 bp, synthetic construct
  source 1..50: mol_type = other DNA
agaccaccatctacaacggcgagggcccttcggatatcggatggagttcg

SEQ ID NO: 45779 - DNA, 50 bp, synthetic construct
  source 1..50: mol_type = other DNA
atcaccgctgaagcggaagacggttcgcatttttccatttcagcataaat

SEQ ID NO: 45780 - DNA, 50 bp, synthetic construct
  source 1..50: mol_type = other DNA
catctgttcgataaaaaaaggaagtgggtggattttttgacgaaaatata

SEQ ID NO: 45781 - DNA, 50 bp, synthetic construct
  source 1..50: mol_type = other DNA
catacattccggccttttgttattataatataataagtgcagacggtatg

SEQ ID NO: 45782 - DNA, 50 bp, synthetic construct
  source 1..50: mol_type = other DNA
ttgttaagcccgacaacatatcgttaacgcccttatggcggttaaaacag

SEQ ID NO: 45783 - DNA, 50 bp, synthetic construct
  source 1..50: mol_type = other DNA
gcattctcttgagatttggtcaaaatctcggctaaaaacggagagaatgt

SEQ ID NO: 45784 - DNA, 50 bp, synthetic construct
  source 1..50: mol_type = other DNA
tgtctgcgggaaaaccgcctccagcggtagagccgtcctgaccgacgagc

SEQ ID NO: 45785 - DNA, 50 bp, synthetic construct
  source 1..50: mol_type = other DNA
tgcatgcattgatggagcaggcggcgacccctgttccagaagttcgagca

SEQ ID NO: 45786 - DNA, 50 bp, synthetic construct
  source 1..50: mol_type = other DNA
atggaaaaccaaagtttgcggagaattcgccgcaaatttgactttgaaac

SEQ ID NO: 45787 - DNA, 50 bp, synthetic construct
  source 1..50: mol_type = other DNA
agaatttgttgtggataaaatatggccaaataagtcaagctgcccgctct

SEQ ID NO: 45788 - DNA, 50 bp, synthetic construct
  source 1..50: mol_type = other DNA
agggatgctccctcaaactcctacgcactggatgtggagggtacggaggc

SEQ ID NO: 45789 - DNA, 50 bp, synthetic construct
  source 1..50: mol_type = other DNA
atctctgcttcctcagttgagatgaccatcaataaggtggacgcagaaaa

SEQ ID NO: 45790 - DNA, 50 bp, synthetic construct
  source 1..50: mol_type = other DNA
tgattattccgcagtacagaaaagggattttctgtgacgaatcttaagca

SEQ ID NO: 45791 - DNA, 50 bp, synthetic construct
  source 1..50: mol_type = other DNA
ggggagaaatcaaaaaggatatttattcctcaagtgaagaatttcttgcc

SEQ ID NO: 45792 - DNA, 50 bp, synthetic construct
  source 1..50: mol_type = other DNA
cgcctgtttagcattccagatgccagtctttcaagaattgacaaaaggaa

SEQ ID NO: 45793 - DNA, 50 bp, synthetic construct
  source 1..50: mol_type = other DNA
atttttttcagtttatgccaaggaaattggtgaattaaaacatcaggaca

SEQ ID NO: 45794 - DNA, 50 bp, synthetic construct
  source 1..50: mol_type = other DNA
ccttgcaaaatgttaaacaaaatatataccttttttaaatttttcacctc

SEQ ID NO: 45795 - DNA, 50 bp, synthetic construct
  source 1..50: mol_type = other DNA
tttattcatctttggcgtcctttctttctgcattgaaatgcaagagaaat

SEQ ID NO: 45796 - DNA, 50 bp, synthetic construct
  source 1..50: mol_type = other DNA
aatcaataataaaataaggaggaattttccatttaatttcattaattcct

SEQ ID NO: 45797 - DNA, 50 bp, synthetic construct
  source 1..50: mol_type = other DNA
ccatcgctaatcaatcaagaataaaattatttatacgtattttgccatca

SEQ ID NO: 45798 - DNA, 50 bp, synthetic construct
  source 1..50: mol_type = other DNA
agcggggctggacagcgtgtatgtggtgacaccttgaatccaggtgagtc

SEQ ID NO: 45799 - DNA, 50 bp, synthetic construct
  source 1..50: mol_type = other DNA
ctgtaaagaagcaaatttaacgcttttgcacttctattgcttctttatca

SEQ ID NO: 45800 - DNA, 50 bp, synthetic construct
  source 1..50: mol_type = other DNA
acagcaataccactaacatagtcgattccatatattagtataatttctgt

SEQ ID NO: 45801 - DNA, 50 bp, synthetic construct
  source 1..50: mol_type = other DNA
ttcatcaaataatttcaatatttttctccatattgtcactccttcatata

SEQ ID NO: 45802 - DNA, 50 bp, synthetic construct
  source 1..50: mol_type = other DNA
ctcatagctggtctgctgatcctcatgagaaatcccacatttgcaatgag

SEQ ID NO: 45803 - DNA, 50 bp, synthetic construct
  source 1..50: mol_type = other DNA
taaaaaaaagtgcttgcaaaaaaaaatttttttccttatataagttttaa

SEQ ID NO: 45804 - DNA, 50 bp, synthetic construct
  source 1..50: mol_type = other DNA
catagagtggcttatggaatgacggctgttattgacgaagccactgccga

SEQ ID NO: 45805 - DNA, 50 bp, synthetic construct
  source 1..50: mol_type = other DNA
gagtacatatatagtctgatagaaagattgatcttctgcattatgtacct

SEQ ID NO: 45806 - DNA, 50 bp, synthetic construct
  source 1..50: mol_type = other DNA
gggttaaatatataattttagatttagccgatgagctatcataataaccg

SEQ ID NO: 45807 - DNA, 50 bp, synthetic construct
  source 1..50: mol_type = other DNA
ctatatggttaatgaccattagtgtgcagagaagggatgaaatcataact

SEQ ID NO: 45808 - DNA, 50 bp, synthetic construct
  source 1..50: mol_type = other DNA
tttcgtttgatgaagccggctttgatatctgccgccttgcttcaacgctt

SEQ ID NO: 45809 - DNA, 50 bp, synthetic construct
  source 1..50: mol_type = other DNA
gtttgtaaacatccatatcaaacatatgaccgaactggtaaaatacaaaa

SEQ ID NO: 45810 - DNA, 50 bp, synthetic construct
  source 1..50: mol_type = other DNA
ctaccagggccgtaatggccgcgtcaatttccgcatgacgctattgtaaa

SEQ ID NO: 45811 - DNA, 50 bp, synthetic construct
  source 1..50: mol_type = other DNA
ccgggattctgcgaacttttcgttgccacgaaacgccgtattttgcgttt

SEQ ID NO: 45812 - DNA, 50 bp, synthetic construct
  source 1..50: mol_type = other DNA
ttatattggtggcgaatttagttatctctgtaatgtcaccaagtcgaaag

SEQ ID NO: 45813 - DNA, 50 bp, synthetic construct
  source 1..50: mol_type = other DNA
aggtctcgaacctgagcggcagcagctcattatgctcactatggaattat

SEQ ID NO: 45814 - DNA, 50 bp, synthetic construct
  source 1..50: mol_type = other DNA
gcgtttcagagaatgatggctgacgtgcgcaggatgtttcgctgtccgat

SEQ ID NO: 45815 - DNA, 50 bp, synthetic construct
  source 1..50: mol_type = other DNA
ccgccgctccatcccgctggctctgctgaagcagcgggcggaagaaaaga

SEQ ID NO: 45816 - DNA, 50 bp, synthetic construct
  source 1..50: mol_type = other DNA
cgctacagaagaattggcacattgatttatgtatcaatgaattggctcac

SEQ ID NO: 45817 - DNA, 50 bp, synthetic construct
  source 1..50: mol_type = other DNA
cggagccgattgcctgtggctgcattgttttgctttagctatacaatcaa

SEQ ID NO: 45818 - DNA, 50 bp, synthetic construct
  source 1..50: mol_type = other DNA
caaagatgctgcaaaaataccagccaagacctatcttatcagtatgttct

SEQ ID NO: 45819 - DNA, 50 bp, synthetic construct
  source 1..50: mol_type = other DNA
caatgcaaaagacctttttgcatcgcccagcagaagggctttttcgtttg

SEQ ID NO: 45820 - DNA, 50 bp, synthetic construct
  source 1..50: mol_type = other DNA
cggctactctctgcttgacaaccggggcagcttcagccagactaaacagt

SEQ ID NO: 45821 - DNA, 50 bp, synthetic construct
  source 1..50: mol_type = other DNA
ctgtggaaatggtgtggattctccccggacaagccaatcgattaccccgt

SEQ ID NO: 45822 - DNA, 50 bp, synthetic construct
  source 1..50: mol_type = other DNA
acgaacctggacagaccgttccagggctgaaaggcgttgctcatgttctt

SEQ ID NO: 45823 - DNA, 50 bp, synthetic construct
  source 1..50: mol_type = other DNA
atcccctatgtgtcgggttcgctttaagttacaaaattagcatagcatct

SEQ ID NO: 45824 - DNA, 50 bp, synthetic construct
  source 1..50: mol_type = other DNA
aaaagcgtgacacaaaagtaatacagtagattttactgtgcaaatctgcg

SEQ ID NO: 45825 - DNA, 50 bp, synthetic construct
  source 1..50: mol_type = other DNA
tgccttacttatttatccaatagggctgtacgttcaatatagataccgcc

SEQ ID NO: 45826 - DNA, 50 bp, synthetic construct
  source 1..50: mol_type = other DNA
ggaattagcaggtaaagatttctggagaggttttataatgattgaattta

SEQ ID NO: 45827 - DNA, 50 bp, synthetic construct
  source 1..50: mol_type = other DNA
accttcaaaactcaaaaaaaagccttttagtttttttgtttttttacctt

SEQ ID NO: 45828 - DNA, 50 bp, synthetic construct
  source 1..50: mol_type = other DNA
tgtacaaagcccccggttttgcgcaaaacggaaactcggcgcttgacgca

SEQ ID NO: 45829 - DNA, 50 bp, synthetic construct
  source 1..50: mol_type = other DNA
ggtttatacttgaaacaaaaaaattacggttattactacaaggataaacg

SEQ ID NO: 45830 - DNA, 50 bp, synthetic construct
  source 1..50: mol_type = other DNA
ttataccacattgccttttggatttccagatcgaaggcactgtcgtccag

SEQ ID NO: 45831 - DNA, 50 bp, synthetic construct
  source 1..50: mol_type = other DNA
gggcatatccggcaactttccgccttcactgaatacagcgaggtttgccc

SEQ ID NO: 45832 - DNA, 50 bp, synthetic construct
  source 1..50: mol_type = other DNA
tgctataataaagtgatattttggatgccgatgatagctatattatcgca

SEQ ID NO: 45833 - DNA, 50 bp, synthetic construct
  source 1..50: mol_type = other DNA
caattctaattcgctatgataaaaacgatcacggcagcgaatacgtggtg

SEQ ID NO: 45834 - DNA, 50 bp, synthetic construct
  source 1..50: mol_type = other DNA
gcgcactaccaagttgcgtgctttgcatggcggagctggaaacgaagcgc

SEQ ID NO: 45835 - DNA, 50 bp, synthetic construct
  source 1..50: mol_type = other DNA
gatgtccattgaaaatcccatgatctttcatctttctttccttggcagaa

SEQ ID NO: 45836 - DNA, 50 bp, synthetic construct
  source 1..50: mol_type = other DNA
ccaattagccatgaatgaatatgaccagaaatgcctccatggcggcgttg

SEQ ID NO: 45837 - DNA, 50 bp, synthetic construct
  source 1..50: mol_type = other DNA
ttctggtcaagaaccacgaccacatcaccacccacatcaaaacggtagat

SEQ ID NO: 45838 - DNA, 50 bp, synthetic construct
  source 1..50: mol_type = other DNA
aatacccccctctatacgaatatccttatatcctccttctgtgtacaaaa

SEQ ID NO: 45839 - DNA, 50 bp, synthetic construct
  source 1..50: mol_type = other DNA
ccaggatataggtcagcaccgagggccctcggtgttggtagcgccggggg

SEQ ID NO: 45840 - DNA, 50 bp, synthetic construct
  source 1..50: mol_type = other DNA
gccgccgacttcatccgagactcggacgagtttggccgggccgcgctgaa

SEQ ID NO: 45841 - DNA, 50 bp, synthetic construct
  source 1..50: mol_type = other DNA
ataggctgatttacggtatcattatatcatgataaagtcgaaatccagta

SEQ ID NO: 45842 - DNA, 50 bp, synthetic construct
  source 1..50: mol_type = other DNA
gtaggccacatttgccgcaatagatataatgataccgtaaatcagcctat

SEQ ID NO: 45843 - DNA, 50 bp, synthetic construct
  source 1..50: mol_type = other DNA
agcagaaagctggtcgccggaaatgagttgccggagaccattgtggaatc

SEQ ID NO: 45844 - DNA, 50 bp, synthetic construct
  source 1..50: mol_type = other DNA
accgtgcaaaaaccgtgcattgaccggtcaatatagtgcttgacgatggt

SEQ ID NO: 45845 - DNA, 50 bp, synthetic construct
  source 1..50: mol_type = other DNA
atgaatccaaagcaccaatagtgaaacgaaaatacatctataatatacac

SEQ ID NO: 45846 - DNA, 50 bp, synthetic construct
  source 1..50: mol_type = other DNA
cgcttgcggatatccgggtgtagcgcgataaaaaaggcattcggcacccg

SEQ ID NO: 45847 - DNA, 50 bp, synthetic construct
  source 1..50: mol_type = other DNA
tggagatgtgctttgatcccaaatcgcataaggcgaccagctcatatcca

SEQ ID NO: 45848 - DNA, 50 bp, synthetic construct
  source 1..50: mol_type = other DNA
catttaaaagtgaaataaaattttgaagaattatattggatttttaaaga

SEQ ID NO: 45849 - DNA, 50 bp, synthetic construct
  source 1..50: mol_type = other DNA
cagattactatacacattatagcatatgcttaaaaatgaaacttacatcg

SEQ ID NO: 45850 - DNA, 50 bp, synthetic construct
  source 1..50: mol_type = other DNA
aagtcgctatatatattcgagtttctaaacttaataataaaggacgagac

SEQ ID NO: 45851 - DNA, 50 bp, synthetic construct
  source 1..50: mol_type = other DNA
ttctccttaaaagagtgatgaatgtctcaccacgactccgcatcggcagt

SEQ ID NO: 45852 - DNA, 50 bp, synthetic construct
  source 1..50: mol_type = other DNA
tgtaaaggaaagggaagctatatcctcatatagcctcacagaactctagt

SEQ ID NO: 45853 - DNA, 50 bp, synthetic construct
  source 1..50: mol_type = other DNA
ctaactcgcagatatcggaaagaaatttctttcagaaatgcagggtctaa

SEQ ID NO: 45854 - DNA, 50 bp, synthetic construct
  source 1..50: mol_type = other DNA
ctgcaagcggaacactcgttcctcgcgaagaaacagtaaacgccttttac

SEQ ID NO: 45855 - DNA, 50 bp, synthetic construct
  source 1..50: mol_type = other DNA
ctcttttgcgtgataatcatacaaatgttaagtattatcattgaccttat

SEQ ID NO: 45856 - DNA, 50 bp, synthetic construct
  source 1..50: mol_type = other DNA
ttcatctgcttccatgcatatagaaaaagatatgactgggtaggtcattt

SEQ ID NO: 45857 - DNA, 50 bp, synthetic construct
  source 1..50: mol_type = other DNA
acataacgtccataggtagtagatttatctactacgtataggtaataagt

SEQ ID NO: 45858 - DNA, 50 bp, synthetic construct
  source 1..50: mol_type = other DNA
cctcacgttgtatttctccctattctatccggcacttatagcaagtgata

SEQ ID NO: 45859 - DNA, 50 bp, synthetic construct
  source 1..50: mol_type = other DNA
atacccctacccccatgattacaggcctcattcgaagggctgaccggatc

SEQ ID NO: 45860 - DNA, 50 bp, synthetic construct
  source 1..50: mol_type = other DNA
gctccgcgggcggatacggcatccgccgttgccgtagccgtcgccggagt

SEQ ID NO: 45861 - DNA, 50 bp, synthetic construct
  source 1..50: mol_type = other DNA
ggaatattatggattgctatggcgacagctatggcaagcccaagatgggg

SEQ ID NO: 45862 - DNA, 50 bp, synthetic construct
  source 1..50: mol_type = other DNA
aaattgtggatatggaactgtccgtcttgacagtcaaataaacagtatta

SEQ ID NO: 45863 - DNA, 50 bp, synthetic construct
  source 1..50: mol_type = other DNA
ataattggaatttatcttgacaaaattaatatcagtataattaatattat

SEQ ID NO: 45864 - DNA, 50 bp, synthetic construct
  source 1..50: mol_type = other DNA
tgttgatagaagtttttgcatatctgtacatctgatactttctatagacc

SEQ ID NO: 45865 - DNA, 50 bp, synthetic construct
  source 1..50: mol_type = other DNA
gagaagcccttatatcgtcctttgccgataattttagccgatatgtactc

SEQ ID NO: 45866 - DNA, 50 bp, synthetic construct
  source 1..50: mol_type = other DNA
ggctgttatttttgtacttttttacaagaaattaacgaaaaataagcgcg

SEQ ID NO: 45867 - DNA, 50 bp, synthetic construct
  source 1..50: mol_type = other DNA
aaaatacggtgttgctccaaatggagtttatgggcagcgtctttcttttt

SEQ ID NO: 45868 - DNA, 50 bp, synthetic construct
  source 1..50: mol_type = other DNA
tcccctcgcaggaaagaaatgggacgtccgtccaactttctgctctggaa

SEQ ID NO: 45869 - DNA, 50 bp, synthetic construct
  source 1..50: mol_type = other DNA
ttacatacgtagtaggggatttttttgcatctctcctaaaacgtatgttt

SEQ ID NO: 45870 - DNA, 50 bp, synthetic construct
  source 1..50: mol_type = other DNA
atcatatctattcatatactttttgtaaatgatatcgtcataggtgaatt

SEQ ID NO: 45871 - DNA, 50 bp, synthetic construct
  source 1..50: mol_type = other DNA
atgttgtcactctgaaaatataccgcggtattttgccaggaacattgtat

SEQ ID NO: 45872 - DNA, 50 bp, synthetic construct
  source 1..50: mol_type = other DNA
ccgccaaagaaaataagtacggacggtgccgttaagatttcaatttcttg

SEQ ID NO: 45873 - DNA, 50 bp, synthetic construct
  source 1..50: mol_type = other DNA
ctcgtggagaacatcgtccaagccacggcggcaccgatcaacagcaccaa

SEQ ID NO: 45874 - DNA, 50 bp, synthetic construct
  source 1..50: mol_type = other DNA
caatgagtgagagaatcaagaaaatatttgtgatttgcttcatgggcggt

SEQ ID NO: 45875 - DNA, 50 bp, synthetic construct
  source 1..50: mol_type = other DNA
atagccaagtggtatgtttcgatgatttaataaagctctctttatacgtc

SEQ ID NO: 45876 - DNA, 50 bp, synthetic construct
  source 1..50: mol_type = other DNA
tttttcaagtgttattaagaaaaatatttcattatccaaagatttaaaaa

SEQ ID NO: 45877 - DNA, 50 bp, synthetic construct
  source 1..50: mol_type = other DNA
tttcgggccggtttcctacttcggatcccatacgggtacacgatgcgaaa

SEQ ID NO: 45878 - DNA, 50 bp, synthetic construct
  source 1..50: mol_type = other DNA
gaactacgacggagcaaagcaggactttctttatttcatcgtggatgttc

SEQ ID NO: 45879 - DNA, 50 bp, synthetic construct
  source 1..50: mol_type = other DNA
cggaaatttggccggaggagcaaggcgctcaatgagcgccgctacagcca

SEQ ID NO: 45880 - DNA, 50 bp, synthetic construct
  source 1..50: mol_type = other DNA
ttagttataaaggaggataactgacagggagagtcggtcttgatgacgaa

SEQ ID NO: 45881 - DNA, 50 bp, synthetic construct
  source 1..50: mol_type = other DNA
gctggaaaagcacttttccaggatgacgcacggagggcggctttttttat

SEQ ID NO: 45882 - DNA, 50 bp, synthetic construct
  source 1..50: mol_type = other DNA
aggtttgatgataccatttcagaaaatgctcaaattgcagaatcaaacct

SEQ ID NO: 45883 - DNA, 50 bp, synthetic construct
  source 1..50: mol_type = other DNA
ggatcaagaatattactgaaaaagtcagcttttcataaacatcacaattt

SEQ ID NO: 45884 - DNA, 50 bp, synthetic construct
  source 1..50: mol_type = other DNA
aaagctgaatataaacgcccaacttcctctgaccgtttataagtacaagg

SEQ ID NO: 45885 - DNA, 50 bp, synthetic construct
  source 1..50: mol_type = other DNA
gatacttaagatatagccaagcggtatatatttaatttatgttaaaatta

SEQ ID NO: 45886 - DNA, 50 bp, synthetic construct
  source 1..50: mol_type = other DNA
cgttgaaatatatggaagcaatggggccgaaatgttataatataatacat

SEQ ID NO: 45887 - DNA, 50 bp, synthetic construct
  source 1..50: mol_type = other DNA
gttcaatttattcctccaaattgacttgattttttgatttaaaatccaac

SEQ ID NO: 45888 - DNA, 50 bp, synthetic construct
  source 1..50: mol_type = other DNA
ggaaagaccgctcacgctccgaaagcaggcaccgaatgagcggtatccgt

SEQ ID NO: 45889 - DNA, 50 bp, synthetic construct
  source 1..50: mol_type = other DNA
cctttgggggtatctgtaaaaatttttccttttacagatattccgagcgg

SEQ ID NO: 45890 - DNA, 50 bp, synthetic construct
  source 1..50: mol_type = other DNA
cagtcacgcaatccagaacattcgttcgaatgcactggagcagcggatca

SEQ ID NO: 45891 - DNA, 50 bp, synthetic construct
  source 1..50: mol_type = other DNA
cgagctacaaggaaagagcagggctgggccgcttcaaagcggttagctga

SEQ ID NO: 45892 - DNA, 50 bp, synthetic construct
  source 1..50: mol_type = other DNA
taaaaacaccgccgagatttttaacaactaaaattacagaattgttttta

SEQ ID NO: 45893 - DNA, 50 bp, synthetic construct
  source 1..50: mol_type = other DNA
acataaaaacaaatatggaggcagcaccacctcggctgctgattttttgt

SEQ ID NO: 45894 - DNA, 50 bp, synthetic construct
  source 1..50: mol_type = other DNA
gtgactattcaaatatgagagaaaactccgttctttatctttctcgtcac

SEQ ID NO: 45895 - DNA, 50 bp, synthetic construct
  source 1..50: mol_type = other DNA
ggagagtgatttctcataaaattcccttgatctcatcgggataactgccg

SEQ ID NO: 45896 - DNA, 50 bp, synthetic construct
  source 1..50: mol_type = other DNA
ttttcgtacattctttgccattgttgatttctgcaaaaacggagtcaaaa

SEQ ID NO: 45897 - DNA, 50 bp, synthetic construct
  source 1..50: mol_type = other DNA
acgagagccagttctacggcggcgaccgccgccgtggacaacggttccta

SEQ ID NO: 45898 - DNA, 50 bp, synthetic construct
  source 1..50: mol_type = other DNA
taacagcaatttattcaattacagaatttgcattgataaagtagctgttt

SEQ ID NO: 45899 - DNA, 50 bp, synthetic construct
  source 1..50: mol_type = other DNA
acgggcatatcctgcaaccttgcgtttcaaaatttgcattaaatgcccat

SEQ ID NO: 45900 - DNA, 50 bp, synthetic construct
  source 1..50: mol_type = other DNA
cgcagatgttattgtaccacctccggcgcgggccatcatgatgtactgct

SEQ ID NO: 45901 - DNA, 50 bp, synthetic construct
  source 1..50: mol_type = other DNA
taacttttggtaatttcgcttccgaagaaaagggcaatctttgtagtata

SEQ ID NO: 45902 - DNA, 50 bp, synthetic construct
  source 1..50: mol_type = other DNA
cgttcagacctattcggataagccatggcttatacaaattcgtgaaacac

SEQ ID NO: 45903 - DNA, 50 bp, synthetic construct
  source 1..50: mol_type = other DNA
tcttcggttaagttcttcaagaaaacctgacaaaattacttgtccgaatt

SEQ ID NO: 45904 - DNA, 50 bp, synthetic construct
  source 1..50: mol_type = other DNA
agcagattcagacgttccagttctgccagcgaggaacgagtgttccgctt

SEQ ID NO: 45905 - DNA, 50 bp, synthetic construct
  source 1..50: mol_type = other DNA
ttttatatcgtgtacctttaaaaagcggttgagggtaattaaatcagtaa

SEQ ID NO: 45906 - DNA, 50 bp, synthetic construct
  source 1..50: mol_type = other DNA
tttattctgttttttctcaaaaaaattttatgcttaaaaggctaaattag

SEQ ID NO: 45907 - DNA, 50 bp, synthetic construct
  source 1..50: mol_type = other DNA
ttgacctgtctcttggtaaggaaatctttccttggcataaactgaaaaaa

SEQ ID NO: 45908 - DNA, 50 bp, synthetic construct
  source 1..50: mol_type = other DNA
gagcatccagatcgatcttctctgcgcagacggtttcaatctggccagta

SEQ ID NO: 45909 - DNA, 50 bp, synthetic construct
  source 1..50: mol_type = other DNA
tccatttaagccgtattattatctatacatcaaaatacggcggttgttct

SEQ ID NO: 45910 - DNA, 50 bp, synthetic construct
  source 1..50: mol_type = other DNA
tcccataacgaaaaaaagacacccgaaaatgtccagatttcgggacagag

SEQ ID NO: 45911 - DNA, 50 bp, synthetic construct
  source 1..50: mol_type = other DNA
ctgttgatcggcgtggccgtgtaccggtatttgacagacacgcgggacac

SEQ ID NO: 45912 - DNA, 50 bp, synthetic construct
  source 1..50: mol_type = other DNA
attgactattatctcaatattcgttcatggctaattgaattatacgcagt

SEQ ID NO: 45913 - DNA, 50 bp, synthetic construct
  source 1..50: mol_type = other DNA
atatgcagcacaagggataagcttgaatagtcacacgttgtattctggcc

SEQ ID NO: 45914 - DNA, 50 bp, synthetic construct
  source 1..50: mol_type = other DNA
atgtttaagaaacaaagaaatagtagtacataaaagaaaattcagaaaat

SEQ ID NO: 45915 - DNA, 50 bp, synthetic construct
  source 1..50: mol_type = other DNA
aattgatacaatgcagggcgagaaattttacgccgagcagcaaggtcata

SEQ ID NO: 45916 - DNA, 50 bp, synthetic construct
  source 1..50: mol_type = other DNA
tttaattataagtcttgagggtgtgcacaccctttgaacctttacacgaa

SEQ ID NO: 45917 - DNA, 50 bp, synthetic construct
  source 1..50: mol_type = other DNA
tattgaaggtgggtatattcctttcggcttcgatgtcccgtccgtcaaag

SEQ ID NO: 45918 - DNA, 50 bp, synthetic construct
  source 1..50: mol_type = other DNA
tgctcctcactgtccgtggaaacacgtgcggatgcctttgtaccggagct

SEQ ID NO: 45919 - DNA, 50 bp, synthetic construct
  source 1..50: mol_type = other DNA
tataataccgattagtaaatttgtcaacaaatgcactaattcgtgaacaa

SEQ ID NO: 45920 - DNA, 50 bp, synthetic construct
  source 1..50: mol_type = other DNA
tgcggtatccgtagggaatatgtgctcaaatcctcaataaggatatcgca

SEQ ID NO: 45921 - DNA, 50 bp, synthetic construct
  source 1..50: mol_type = other DNA
agtatgtttaccgcagcaaaaacggccgtcgtcgccctcgtagtcataca

SEQ ID NO: 45922 - DNA, 50 bp, synthetic construct
  source 1..50: mol_type = other DNA
cgttattgcttgactaatcggcggtttaaaagagggggaaaggtttaacc

SEQ ID NO: 45923 - DNA, 50 bp, synthetic construct
  source 1..50: mol_type = other DNA
aaaagaagaatatgagcggtcagcaggtttaaccctcaatggcaatatgc

SEQ ID NO: 45924 - DNA, 50 bp, synthetic construct
  source 1..50: mol_type = other DNA
ggtatccctgagtgatctgctgacactcagcacgatacagtagcgataca

SEQ ID NO: 45925 - DNA, 50 bp, synthetic construct
  source 1..50: mol_type = other DNA
cccaacggcttgcatacgttgtcaattgacaggaatagaacgcccttgga

SEQ ID NO: 45926 - DNA, 50 bp, synthetic construct
  source 1..50: mol_type = other DNA
ccttcgttatacgtgtaaatggaagcttgcgcttacacctctagcaagcc

SEQ ID NO: 45927 - DNA, 50 bp, synthetic construct
  source 1..50: mol_type = other DNA
gagtgatatatagactaccaatttgaaagagcgctgtctgcatatccaga

SEQ ID NO: 45928 - DNA, 50 bp, synthetic construct
  source 1..50: mol_type = other DNA
ccttccatattccgcttgtagaaatggttgatccagcatttcacagaagc

SEQ ID NO: 45929 - DNA, 50 bp, synthetic construct
  source 1..50: mol_type = other DNA
attcacgaaatggaggtcttacggatccgtgtgacctccgagccgtcaaa

SEQ ID NO: 45930 - DNA, 50 bp, synthetic construct
  source 1..50: mol_type = other DNA
aacagcactaccgcttgtatccatatgcgccgcacgatagtagtatgcgg

SEQ ID NO: 45931 - DNA, 50 bp, synthetic construct
  source 1..50: mol_type = other DNA
cagaaatataaaaaagcgccgtcttgcgccggtgcgcgtttgtttttctc

SEQ ID NO: 45932 - DNA, 50 bp, synthetic construct
  source 1..50: mol_type = other DNA
tatgaagaggacccaggtcagcaggaaaagcgaaaatcccgcttttcatt

SEQ ID NO: 45933 - DNA, 50 bp, synthetic construct
  source 1..50: mol_type = other DNA
atattccgctcggccgccaattcatatagtgacgaatttcaaatgaatat

SEQ ID NO: 45934 - DNA, 50 bp, synthetic construct
  source 1..50: mol_type = other DNA
tgttggtattccaagcattgcatacagcggcacggagtaaaatgtgcaca

SEQ ID NO: 45935 - DNA, 50 bp, synthetic construct
  source 1..50: mol_type = other DNA
ccgaaaatcggaaaaatattgcgaattttgcattgtttggacgttttttt

SEQ ID NO: 45936 - DNA, 50 bp, synthetic construct
  source 1..50: mol_type = other DNA
tgcgtgatctcctgcctggcaaaaagagaaaagtggcaggatatgcacgt

SEQ ID NO: 45937 - DNA, 50 bp, synthetic construct
  source 1..50: mol_type = other DNA
caatcatcctctattctatgctataattcctgtaggagaaaggaagattg

SEQ ID NO: 45938 - DNA, 50 bp, synthetic construct
  source 1..50: mol_type = other DNA
accgctgtacccgggatggagatttgagtatcaaatatcagtacaccggt

SEQ ID NO: 45939 - DNA, 50 bp, synthetic construct
  source 1..50: mol_type = other DNA
tgattaacctgggcatcgaaactgtgcagtgtcggtgcccatcctaccat

SEQ ID NO: 45940 - DNA, 50 bp, synthetic construct
  source 1..50: mol_type = other DNA
acgaactttcctgttcttctttatcgataaggaagaggaagtcccttgac

SEQ ID NO: 45941 - DNA, 50 bp, synthetic construct
  source 1..50: mol_type = other DNA
cggccaacggctccagcagcgtgatgacagcctgctggatgcggcggatg

SEQ ID NO: 45942 - DNA, 50 bp, synthetic construct
  source 1..50: mol_type = other DNA
taaacctacctttccgcgacggcaacggctttaaggaaaaggtgggcgag

SEQ ID NO: 45943 - DNA, 50 bp, synthetic construct
  source 1..50: mol_type = other DNA
gccagtgcggcgataaatgccttccaatcgggattatatctagaacacgc

SEQ ID NO: 45944 - DNA, 50 bp, synthetic construct
  source 1..50: mol_type = other DNA
actcatgccggaacttgaggccgctgcacgcgcggagttccggtagcgct

SEQ ID NO: 45945 - DNA, 50 bp, synthetic construct
  source 1..50: mol_type = other DNA
accagtggaccctaccttataagtcagtccagggaaactggtccactgcg

SEQ ID NO: 45946 - DNA, 50 bp, synthetic construct
  source 1..50: mol_type = other DNA
ttcaacttaaaagttatttattcctaagaataaattttcttttcgagctt

SEQ ID NO: 45947 - DNA, 50 bp, synthetic construct
  source 1..50: mol_type = other DNA
ccttttttgttggcacgaaaaattttaatttcttttgcacttaaaacgtt

SEQ ID NO: 45948 - DNA, 50 bp, synthetic construct
  source 1..50: mol_type = other DNA
ctgttcggatttcaggatgatgaggttatatcatccttaacaaggaaagc

SEQ ID NO: 45949 - DNA, 50 bp, synthetic construct
  source 1..50: mol_type = other DNA
agcgccggggataacatggagtgcagtgtctcgcggttatagcgcgcgcc

SEQ ID NO: 45950 - DNA, 50 bp, synthetic construct
  source 1..50: mol_type = other DNA
cagctctttaccagactgcgtgagctttcttgcttcagccgtccatttag

SEQ ID NO: 45951 - DNA, 50 bp, synthetic construct
  source 1..50: mol_type = other DNA
aaatttgtttaaaatagtgttataattatatcactccttataaaaaatat

SEQ ID NO: 45952 - DNA, 50 bp, synthetic construct
  source 1..50: mol_type = other DNA
gaatcaaaaccagcagccttaatttctaataagctttctacacttgattc

SEQ ID NO: 45953 - DNA, 50 bp, synthetic construct
  source 1..50: mol_type = other DNA
ttctagtgtcttgatagccaaattcagttttgaaaatcaagtggagtatt

SEQ ID NO: 45954 - DNA, 50 bp, synthetic construct
  source 1..50: mol_type = other DNA
agaaaagttatgaaaatatattaacagagccatattttcttcggtttctt

SEQ ID NO: 45955 - DNA, 50 bp, synthetic construct
  source 1..50: mol_type = other DNA
gctctttcagcatggtctattgaatcatggcatctccaaaggagaagaaa

SEQ ID NO: 45956 - DNA, 50 bp, synthetic construct
  source 1..50: mol_type = other DNA
cgaacaatcctacaaggatatgattgctcatatgcttcttccattcttca

SEQ ID NO: 45957 - DNA, 50 bp, synthetic construct
  source 1..50: mol_type = other DNA
catatccagccacacggcgcttgttcaatgaccacttcgtcgtggatatg

SEQ ID NO: 45958 - DNA, 50 bp, synthetic construct
  source 1..50: mol_type = other DNA
aaatagattatatcattttagagagacggtgaaattgacatctactatta

SEQ ID NO: 45959 - DNA, 50 bp, synthetic construct
  source 1..50: mol_type = other DNA
ttagaaaatccccgaccccggaaaatttacggaggtcggcggttctcttt

SEQ ID NO: 45960 - DNA, 50 bp, synthetic construct
  source 1..50: mol_type = other DNA
acaaaatttacctctatgatgacaaaggtcatcatgcgggacaatatcac

SEQ ID NO: 45961 - DNA, 50 bp, synthetic construct
  source 1..50: mol_type = other DNA
cttcgggtgcttttttttattgcaaatggaaaaatcaaaaaaacacgtcc

SEQ ID NO: 45962 - DNA, 50 bp, synthetic construct
  source 1..50: mol_type = other DNA
tttttttcttccaaaatttaatatctatacaacatttcaatcacaaaaaa

SEQ ID NO: 45963 - DNA, 50 bp, synthetic construct
  source 1..50: mol_type = other DNA
atgtattcgaagatgatatggttgatatttcattccttcttccagaacag

SEQ ID NO: 45964 - DNA, 50 bp, synthetic construct
  source 1..50: mol_type = other DNA
gcacattttaaaatttcatattttctatgatgggaaataacgtaaaaaaa

SEQ ID NO: 45965 - DNA, 50 bp, synthetic construct
  source 1..50: mol_type = other DNA
gttacttcctcggctttcccattcgtgaatggggcgctgcccaccggtac

SEQ ID NO: 45966 - DNA, 50 bp, synthetic construct
  source 1..50: mol_type = other DNA
cgcatttgccgaattctggcactgacagctgccgatattgattcggaaat

SEQ ID NO: 45967 - DNA, 50 bp, synthetic construct
  source 1..50: mol_type = other DNA
agaaaaattcgaagaaaaaaaagatatttttctttttttcatctttaggc

SEQ ID NO: 45968 - DNA, 50 bp, synthetic construct
  source 1..50: mol_type = other DNA
atccggcagcttcaagctcttctgcaatggagagataacagacgccggag

SEQ ID NO: 45969 - DNA, 50 bp, synthetic construct
  source 1..50: mol_type = other DNA
tatcatttaacatccatttctaacatgttggattctggttacaattcata

SEQ ID NO: 45970 - DNA, 50 bp, synthetic construct
  source 1..50: mol_type = other DNA
ttcatccgtatgctgattcagccatcctcctgaatctcgatatcttttat

SEQ ID NO: 45971 - DNA, 50 bp, synthetic construct
  source 1..50: mol_type = other DNA
gtgctttttccatgaaccaatcgaagtgtataagttcccggaaaaaggct

SEQ ID NO: 45972 - DNA, 50 bp, synthetic construct
  source 1..50: mol_type = other DNA
gcaaagcacaacgacaccgcaggcgaaccatatcggctcggaggcttttt

SEQ ID NO: 45973 - DNA, 50 bp, synthetic construct
  source 1..50: mol_type = other DNA
ccacggaggtgttgtctccgaagggcccttcggctacaagatgtctctgg

SEQ ID NO: 45974 - DNA, 50 bp, synthetic construct
  source 1..50: mol_type = other DNA
ccggggacctgccagcgatccagccggtgattgccacggaaactttgaac

SEQ ID NO: 45975 - DNA, 50 bp, synthetic construct
  source 1..50: mol_type = other DNA
attgcccttgtagaaaagcaatatataatctcctttctgaaataaagaat

SEQ ID NO: 45976 - DNA, 50 bp, synthetic construct
  source 1..50: mol_type = other DNA
atttccatatgagccagttcattcgcaaattcttctgttccaatatcagt

SEQ ID NO: 45977 - DNA, 50 bp, synthetic construct
  source 1..50: mol_type = other DNA
gagtgtcgacagagatatataagttaacttatgtatctccacagaaagtg

SEQ ID NO: 45978 - DNA, 50 bp, synthetic construct
  source 1..50: mol_type = other DNA
ctgtgctgcttatgccaataacctgtcgattattatacgaagtacatcaa

SEQ ID NO: 45979 - DNA, 50 bp, synthetic construct
  source 1..50: mol_type = other DNA
ctatattatagaaaaaaataatatatgccacatttttctctttaaaatat

SEQ ID NO: 45980 - DNA, 50 bp, synthetic construct
  source 1..50: mol_type = other DNA
gtcacaatcatgccgatacagtagttttttcaatctgttattcaaatgat

SEQ ID NO: 45981 - DNA, 50 bp, synthetic construct
  source 1..50: mol_type = other DNA
cattggtaagtgaaagtccgcttaaagaataaggaggaggttttataatg

SEQ ID NO: 45982 - DNA, 50 bp, synthetic construct
  source 1..50: mol_type = other DNA
gcagcagattagacgttgagtaatatcaggctgtacaagtattctgcttg

SEQ ID NO: 45983 - DNA, 50 bp, synthetic construct
  source 1..50: mol_type = other DNA
atccgtcaagcacgaggtttactgatcatcaaaagtaatggatgctgtag

SEQ ID NO: 45984 - DNA, 50 bp, synthetic construct
  source 1..50: mol_type = other DNA
gtgtcgtattgaatggtggaaagaagattttccacgccaaggaaaaacac

SEQ ID NO: 45985 - DNA, 50 bp, synthetic construct
  source 1..50: mol_type = other DNA
ttaaatataggaatagacaagattataaacctatcaattcgatgtcttac

SEQ ID NO: 45986 - DNA, 50 bp, synthetic construct
  source 1..50: mol_type = other DNA
aatttttttactatttgacttaacgtaaaagtactaataataaaaaaaaa

SEQ ID NO: 45987 - DNA, 50 bp, synthetic construct
  source 1..50: mol_type = other DNA
atttttaacgctttcataaacaaaataatgtacccaaagatggcgaaaac

SEQ ID NO: 45988 - DNA, 50 bp, synthetic construct
  source 1..50: mol_type = other DNA
actgggcaaggagattgcttttttatatagaagaaactcagatgcacagg

SEQ ID NO: 45989 - DNA, 50 bp, synthetic construct
  source 1..50: mol_type = other DNA
accgcctctattctggatagcctcttgtgcaggtccagccgctccttgcg

SEQ ID NO: 45990 - DNA, 50 bp, synthetic construct
  source 1..50: mol_type = other DNA
aagctgctcaaaagttccattttcaaatcaacgatggctttggaaaacct

SEQ ID NO: 45991 - DNA, 50 bp, synthetic construct
  source 1..50: mol_type = other DNA
tgaagaaacaggagagtttcaaacagttttgaaaatcaagtggagtatta

SEQ ID NO: 45992 - DNA, 50 bp, synthetic construct
  source 1..50: mol_type = other DNA
tatttgagaatgtcaaaaatcttgtataagatttatgaatagttacaaat

SEQ ID NO: 45993 - DNA, 50 bp, synthetic construct
  source 1..50: mol_type = other DNA
ccggaaaccagctgcaactgctgctgctgcgcgctgcatgaagtacccca

SEQ ID NO: 45994 - DNA, 50 bp, synthetic construct
  source 1..50: mol_type = other DNA
aaaatcaccgagaacgacgccggcgaaacggaagcggccaggctgaccac

SEQ ID NO: 45995 - DNA, 50 bp, synthetic construct
  source 1..50: mol_type = other DNA
tggcaaaagctgaaatgaaaatgccggaattttccgggtgcctttttctg

SEQ ID NO: 45996 - DNA, 50 bp, synthetic construct
  source 1..50: mol_type = other DNA
gcggctggcctgtgcctgttcctgcgctacacccggatatcgcgctccgc

SEQ ID NO: 45997 - DNA, 50 bp, synthetic construct
  source 1..50: mol_type = other DNA
cagttgacagttgacacagcattctactgccgtgtgtcaacggaccagga

SEQ ID NO: 45998 - DNA, 50 bp, synthetic construct
  source 1..50: mol_type = other DNA
gtagtactacctatagacaataagtacctatttgcgataagtagtactac

SEQ ID NO: 45999 - DNA, 50 bp, synthetic construct
  source 1..50: mol_type = other DNA
acaagacgtgtcatccaattcattagaaaaaatcagaaaaattacctaat

SEQ ID NO: 46000 - DNA, 50 bp, synthetic construct
  source 1..50: mol_type = other DNA
agaaagaatttttgacagaaattcaaaaaagagtataaaaaataaaccct

SEQ ID NO: 46001 - DNA, 50 bp, synthetic construct
  source 1..50: mol_type = other DNA
tcttttgtttgactgcaaggaggaatctctcctgtcttaattttaaaatt

SEQ ID NO: 46002 - DNA, 50 bp, synthetic construct
  source 1..50: mol_type = other DNA
aatactcgacttgattttcaaaactgaatttggctatcaagacactagaa

SEQ ID NO: 46003 - DNA, 50 bp, synthetic construct
  source 1..50: mol_type = other DNA
ccctctacgttcgcgccgtgcgtggaacccacgttaacggcgtgagaggc

SEQ ID NO: 46004 - DNA, 50 bp, synthetic construct
  source 1..50: mol_type = other DNA
gtttaggtgaaacggatttgttgttaaaatatctggattttccgctaaaa

SEQ ID NO: 46005 - DNA, 50 bp, synthetic construct
  source 1..50: mol_type = other DNA
ggaatgagcgtctagaggtcatcagcaatgaacctgcagacggcgatcgt

SEQ ID NO: 46006 - DNA, 50 bp, synthetic construct
  source 1..50: mol_type = other DNA
tataatatatataattgaatgaaaatttagatattcatttacctatgaat

SEQ ID NO: 46007 - DNA, 50 bp, synthetic construct
  source 1..50: mol_type = other DNA
gcaacatatgataggctacaagctcttgcttgtcgaataaacaattgcta

SEQ ID NO: 46008 - DNA, 50 bp, synthetic construct
  source 1..50: mol_type = other DNA
aataagttctaaatccattctgctttcaaagaataaatgactaacttttg

SEQ ID NO: 46009 - DNA, 50 bp, synthetic construct
  source 1..50: mol_type = other DNA
agccgaccggaggggttcagttagtactaaaatgaacctaccgaccggaa

SEQ ID NO: 46010 - DNA, 50 bp, synthetic construct
  source 1..50: mol_type = other DNA
gatgaatagcatacgccaaaatggcgcttttttggcgcatgcccaggcgg

SEQ ID NO: 46011 - DNA, 50 bp, synthetic construct
  source 1..50: mol_type = other DNA
agatgctgcgccagcggatgaaggaagcgggcagcgacccgatggcatct

SEQ ID NO: 46012 - DNA, 50 bp, synthetic construct
  source 1..50: mol_type = other DNA
gaaagaagataatcgcacctttgagctgatatcaaacagctttttctttt

SEQ ID NO: 46013 - DNA, 50 bp, synthetic construct
  source 1..50: mol_type = other DNA
gaaaaatcgacttattttctctccatgcagggaacacaataagacagttc

SEQ ID NO: 46014 - DNA, 50 bp, synthetic construct
  source 1..50: mol_type = other DNA
aaggacgcagcaaccgcagatacagcattgaaaacggttgcgccacgatt

SEQ ID NO: 46015 - DNA, 50 bp, synthetic construct
  source 1..50: mol_type = other DNA
gatcgatacaatgtttctggaaaaataccgtgagaaggacatccgggtga

SEQ ID NO: 46016 - DNA, 50 bp, synthetic construct
  source 1..50: mol_type = other DNA
gcaagaaacttatctcggcaaaattaaatttgtatagaattatttctttt

SEQ ID NO: 46017 - DNA, 50 bp, synthetic construct
  source 1..50: mol_type = other DNA
atgagcaatatcaataacacccttgaaaggctgttgttgacgaagccact

SEQ ID NO: 46018 - DNA, 50 bp, synthetic construct
  source 1..50: mol_type = other DNA
cttgaggtcagtgttttcatcagcaaaggctccgtgacactggataaatt

SEQ ID NO: 46019 - DNA, 50 bp, synthetic construct
  source 1..50: mol_type = other DNA
actgcatttgcattacagagctatttacaagcggctattggtatcccagc

SEQ ID NO: 46020 - DNA, 50 bp, synthetic construct
  source 1..50: mol_type = other DNA
atatgtgacactaacgaggaggtgaactcctcctgcaggcagagacatat

SEQ ID NO: 46021 - DNA, 50 bp, synthetic construct
  source 1..50: mol_type = other DNA
atgctggctgttatttttgtacccttgagcttgaacttgccaatgagcgc

SEQ ID NO: 46022 - DNA, 50 bp, synthetic construct
  source 1..50: mol_type = other DNA
atcatatattttttctggttcttttaaacttttaagcagaagtataaaat

SEQ ID NO: 46023 - DNA, 50 bp, synthetic construct
  source 1..50: mol_type = other DNA
attaaattatttgaagatggtgtaattctgtttaagaattcaggtttaaa

SEQ ID NO: 46024 - DNA, 50 bp, synthetic construct
  source 1..50: mol_type = other DNA
ttggaccgaggaacggcgggaaaaagcattctcaccaacgaaaagtacaa

SEQ ID NO: 46025 - DNA, 50 bp, synthetic construct
  source 1..50: mol_type = other DNA
acagagcagggaatattatattcctcggaatagagatattcttgataagc

SEQ ID NO: 46026 - DNA, 50 bp, synthetic construct
  source 1..50: mol_type = other DNA
gagatcgaagactactatgcctttgaaatggcagaacggtcatctcaact

SEQ ID NO: 46027 - DNA, 50 bp, synthetic construct
  source 1..50: mol_type = other DNA
cctgaccgccgatctctatgaacggaatcgcatcgagaagggcgactttt

SEQ ID NO: 46028 - DNA, 50 bp, synthetic construct
  source 1..50: mol_type = other DNA
acttgtaggttggtagctccattccacaatcaagaacatcgcaggcaaga

SEQ ID NO: 46029 - DNA, 50 bp, synthetic construct
  source 1..50: mol_type = other DNA
tatctacaaggcataattaaggaggcctcgtcgataatgacttggatatg

SEQ ID NO: 46030 - DNA, 50 bp, synthetic construct
  source 1..50: mol_type = other DNA
gaaggtaaagtagatgctatttttataaatagtgattccccaatatatta

SEQ ID NO: 46031 - DNA, 50 bp, synthetic construct
  source 1..50: mol_type = other DNA
tgggcgtttttcttgtacccattttaaaagaaaagctagaaaaagaccca

SEQ ID NO: 46032 - DNA, 50 bp, synthetic construct
  source 1..50: mol_type = other DNA
ttaaaaaccgccattttgtattttttatggtacaatatatatgtttttaa

SEQ ID NO: 46033 - DNA, 50 bp, synthetic construct
  source 1..50: mol_type = other DNA
agcacgggcggcttctttgcggataaccaatctgagcggctgcaggtggc

SEQ ID NO: 46034 - DNA, 50 bp, synthetic construct
  source 1..50: mol_type = other DNA
cacggtgaccttcgtgttctataacgttagcagatttcatccgagccgtg

SEQ ID NO: 46035 - DNA, 50 bp, synthetic construct
  source 1..50: mol_type = other DNA
aataacatctgcaaaacttgataaatgagcaaagtatttcagatgctcgg

SEQ ID NO: 46036 - DNA, 50 bp, synthetic construct
  source 1..50: mol_type = other DNA
atgtctgatagatccggcggactgtttcgtcaaagatggcgtaactgcat

SEQ ID NO: 46037 - DNA, 50 bp, synthetic construct
  source 1..50: mol_type = other DNA
gaactcagatttcatacaggcttcttttcctctgtatgtaatctgtcgga

SEQ ID NO: 46038 - DNA, 50 bp, synthetic construct
  source 1..50: mol_type = other DNA
taaattgctcatcactatcagttgaacataatatacagatgagcattttt

SEQ ID NO: 46039 - DNA, 50 bp, synthetic construct
  source 1..50: mol_type = other DNA
attattgagtataacaagaagctggccagcggggcattgctttacttagt

SEQ ID NO: 46040 - DNA, 50 bp, synthetic construct
  source 1..50: mol_type = other DNA
gaaaaaacagaaaggttgtgtatatttctttttctcctttgtgcatttta

SEQ ID NO: 46041 - DNA, 50 bp, synthetic construct
  source 1..50: mol_type = other DNA
ttttattttgcaaaaaatattttttaatatgtatttataatttaataaag

SEQ ID NO: 46042 - DNA, 50 bp, synthetic construct
  source 1..50: mol_type = other DNA
ctacaacgtatttatagtgaaataaacatttatgtaccaatgaattggca

SEQ ID NO: 46043 - DNA, 50 bp, synthetic construct
  source 1..50: mol_type = other DNA
aatactcaccgaaaaataccttcctggggaggtcattttcaagaagtatt

SEQ ID NO: 46044 - DNA, 50 bp, synthetic construct
  source 1..50: mol_type = other DNA
tctcaccattcagagacctatccgaagcgatgaacaactgaacagtctga

SEQ ID NO: 46045 - DNA, 50 bp, synthetic construct
  source 1..50: mol_type = other DNA
cgtccggcagcatcttggatttttcgaaaaaaccaagtgtgactatgaaa

SEQ ID NO: 46046 - DNA, 50 bp, synthetic construct
  source 1..50: mol_type = other DNA
attcatcagtatatagatgttggaaagtcatcacgagaatagtactttta

SEQ ID NO: 46047 - DNA, 50 bp, synthetic construct
  source 1..50: mol_type = other DNA
gtaaagcatattcatagtataataaagattataatagaaaacagccttac

SEQ ID NO: 46048 - DNA, 50 bp, synthetic construct
  source 1..50: mol_type = other DNA
ggattgatggtcggcggaatgactgtagttgatttgcacagtatcaatcc

SEQ ID NO: 46049 - DNA, 50 bp, synthetic construct
  source 1..50: mol_type = other DNA
ccgattatacagcatatttagagaattcactcaagaatatttgggcaagg

SEQ ID NO: 46050 - DNA, 50 bp, synthetic construct
  source 1..50: mol_type = other DNA
tgatacggacagtgaaagcagccagattcagtaccgttggaagcgtatca

SEQ ID NO: 46051 - DNA, 50 bp, synthetic construct
  source 1..50: mol_type = other DNA
gcactgttaagcttattgcagaggtacctcacatgattggaaggcagcgc

SEQ ID NO: 46052 - DNA, 50 bp, synthetic construct
  source 1..50: mol_type = other DNA
ggtgatttttataatgcgaaaaaaatctgagggcaacgataaacatcaaa

SEQ ID NO: 46053 - DNA, 50 bp, synthetic construct
  source 1..50: mol_type = other DNA
cacttgctataagtgccggatagagcagaattaccagaagcacacctgtg

SEQ ID NO: 46054 - DNA, 50 bp, synthetic construct
  source 1..50: mol_type = other DNA
acttgctattattggctttcagagtgatatcaagaaagacaatctgaacc

SEQ ID NO: 46055 - DNA, 50 bp, synthetic construct
  source 1..50: mol_type = other DNA
ggagccaagcagggaaattcttggcataaagaaagcccctgcatggggct

SEQ ID NO: 46056 - DNA, 50 bp, synthetic construct
  source 1..50: mol_type = other DNA
taaatcgccatgaagtcataagcggctccgtatggatgtgctgctatttt

SEQ ID NO: 46057 - DNA, 50 bp, synthetic construct
  source 1..50: mol_type = other DNA
cagaggacgcgtttttttgatttttccaaataaaaaagcacccgaagggg

SEQ ID NO: 46058 - DNA, 50 bp, synthetic construct
  source 1..50: mol_type = other DNA
cgctacagaagaattggcacattgatttatgtaccaatgaattggcgcac

SEQ ID NO: 46059 - DNA, 50 bp, synthetic construct
  source 1..50: mol_type = other DNA
cgagcatgtgcagaccatgattcagatgacatcgcgggtacatttggcat

SEQ ID NO: 46060 - DNA, 50 bp, synthetic construct
  source 1..50: mol_type = other DNA
cagaataacccaccatatacccaaaattgtatataacgaaggtttttcta

SEQ ID NO: 46061 - DNA, 50 bp, synthetic construct
  source 1..50: mol_type = other DNA
gggatggggagaaatcaaaaaagatatcttcttcgagatcttctatatat

SEQ ID NO: 46062 - DNA, 50 bp, synthetic construct
  source 1..50: mol_type = other DNA
caggccgcgggacctgtgggctttggattcaccacctttgccatgacctc

SEQ ID NO: 46063 - DNA, 50 bp, synthetic construct
  source 1..50: mol_type = other DNA
gcgggcgtaagccgcaacccgccggccagcatggcgttgctgccgccatc

SEQ ID NO: 46064 - DNA, 50 bp, synthetic construct
  source 1..50: mol_type = other DNA
cgacggtgtcggcgtcgataagcagatttgcatcccgtttgtcaccgtca

SEQ ID NO: 46065 - DNA, 50 bp, synthetic construct
  source 1..50: mol_type = other DNA
cttattatatatattattgtttatttttaaaaaattgcatataatattat

SEQ ID NO: 46066 - DNA, 50 bp, synthetic construct
  source 1..50: mol_type = other DNA
aaagatgtcggagaagttatgggatatccttgccgttctcagccatgaca

SEQ ID NO: 46067 - DNA, 50 bp, synthetic construct
  source 1..50: mol_type = other DNA
catgatcgaggataaccgtccgtattatacaaaatatatcaacgagcatg

SEQ ID NO: 46068 - DNA, 50 bp, synthetic construct
  source 1..50: mol_type = other DNA
ggggagagattaaaaaagatatttataaatatcatattttgtcacagtgg

SEQ ID NO: 46069 - DNA, 50 bp, synthetic construct
  source 1..50: mol_type = other DNA
gaagtttttacttcatattcaagtcttattgtaattggagtaaccccatc

SEQ ID NO: 46070 - DNA, 50 bp, synthetic construct
  source 1..50: mol_type = other DNA
atcggaagagctgttcaacaaggtgcaaggggcgaaattgcttgaaaatg

SEQ ID NO: 46071 - DNA, 50 bp, synthetic construct
  source 1..50: mol_type = other DNA
tacaggaaaaatataataaacttttaaatatcctttcttatttaccaacc

SEQ ID NO: 46072 - DNA, 50 bp, synthetic construct
  source 1..50: mol_type = other DNA
tgatattagtaatggaacaagccaacattattttaccataaccccaacaa

SEQ ID NO: 46073 - DNA, 50 bp, synthetic construct
  source 1..50: mol_type = other DNA
gatatattttgtataatactcgacctgttcatcattacgccaaatagaaa

SEQ ID NO: 46074 - DNA, 50 bp, synthetic construct
  source 1..50: mol_type = other DNA
accgcagaaaaaaacacggtctgagcaattactgcaggattttctgttag

SEQ ID NO: 46075 - DNA, 50 bp, synthetic construct
  source 1..50: mol_type = other DNA
cttttatcggcgcagcggtgaaaatgtcaataccgagatcattcaaaaaa

SEQ ID NO: 46076 - DNA, 50 bp, synthetic construct
  source 1..50: mol_type = other DNA
gcgacccgccgtttctgttttgccacgccaggatgataacggcctgttcc

SEQ ID NO: 46077 - DNA, 50 bp, synthetic construct
  source 1..50: mol_type = other DNA
gttttaccctgtataattacttgattgtacgtacatattcagagcaaaaa

SEQ ID NO: 46078 - DNA, 50 bp, synthetic construct
  source 1..50: mol_type = other DNA
tttttgcgtaacattaaagaaggaaatccatataaatgaagacagtacca

SEQ ID NO: 46079 - DNA, 50 bp, synthetic construct
  source 1..50: mol_type = other DNA
tgaaccgtcagttcggcttttacatatgtaatatggccatatagtaatct

SEQ ID NO: 46080 - DNA, 50 bp, synthetic construct
  source 1..50: mol_type = other DNA
taatatactggggaatcactatttataaaaatagcatctactttaccttc

SEQ ID NO: 46081 - DNA, 50 bp, synthetic construct
  source 1..50: mol_type = other DNA
cggcggcaacgatgatccaagcaacgttgagtaggacattgagcgagccg

SEQ ID NO: 46082 - DNA, 50 bp, synthetic construct
  source 1..50: mol_type = other DNA
gtaaaaggaaaaagtgtgactatgattataccatacctttttgaattttt

SEQ ID NO: 46083 - DNA, 50 bp, synthetic construct
  source 1..50: mol_type = other DNA
tgagacacgggcataggctgcgacctcctttgctctgtttttcaaattca

SEQ ID NO: 46084 - DNA, 50 bp, synthetic construct
  source 1..50: mol_type = other DNA
ttaagatttataaatagtatatcatatgatatactattcttgaatttttt

SEQ ID NO: 46085 - DNA, 50 bp, synthetic construct
  source 1..50: mol_type = other DNA
tctattcccagcagagcaacttcgattcgttatcttcgtttcggaagcga

SEQ ID NO: 46086 - DNA, 50 bp, synthetic construct
  source 1..50: mol_type = other DNA
tttaattattcctcaaaagcgcaaaagtgccctgcactattagaattcaa

SEQ ID NO: 46087 - DNA, 50 bp, synthetic construct
  source 1..50: mol_type = other DNA
atattttttgattttttaattttttcggccataattgtatcaatcgtggc

SEQ ID NO: 46088 - DNA, 50 bp, synthetic construct
  source 1..50: mol_type = other DNA
cctaattgggatgatttcataaagaaggatctgaaccatcaacaattaaa

SEQ ID NO: 46089 - DNA, 50 bp, synthetic construct
  source 1..50: mol_type = other DNA
actccgaattaccttaaccacaaatcctttctctgaatataaatatcttt

SEQ ID NO: 46090 - DNA, 50 bp, synthetic construct
  source 1..50: mol_type = other DNA
tttttgcactcattgatagataatttctttccttggcataaactgaaaaa

SEQ ID NO: 46091 - DNA, 50 bp, synthetic construct
  source 1..50: mol_type = other DNA
cgaacgcatatccgttcggcagcctcagctcgtgaacggtctgtccaggt

SEQ ID NO: 46092 - DNA, 50 bp, synthetic construct
  source 1..50: mol_type = other DNA
taagcagcaactcgcagtttgtaaagccacgctgtcaaagttgctgccga

SEQ ID NO: 46093 - DNA, 50 bp, synthetic construct
  source 1..50: mol_type = other DNA
tctctccatttttagccgagattatgattaatttgcaaaaaacacagtca

SEQ ID NO: 46094 - DNA, 50 bp, synthetic construct
  source 1..50: mol_type = other DNA
tagtctgatagaaagtggggacatttttatcaactttttctaatgaatcc

SEQ ID NO: 46095 - DNA, 50 bp, synthetic construct
  source 1..50: mol_type = other DNA
atttttaaaatcatttcagttaattattcggggaaaatgacttgaaatga

SEQ ID NO: 46096 - DNA, 50 bp, synthetic construct
  source 1..50: mol_type = other DNA
atacttatggagcttgaaaaggccgaggtggataagtccaccgccaacat

SEQ ID NO: 46097 - DNA, 50 bp, synthetic construct
  source 1..50: mol_type = other DNA
aacttgacgcaaaagaaaagttttttttctttccaatatttcgtttggtt

SEQ ID NO: 46098 - DNA, 50 bp, synthetic construct
  source 1..50: mol_type = other DNA
gtagctgttttcctgctcatctttttcacgatgaccggtaaaacaacagg

SEQ ID NO: 46099 - DNA, 50 bp, synthetic construct
  source 1..50: mol_type = other DNA
aaaaaaacgtccaaacaatgcaaaattcgcaatatttttccgattttcgg

SEQ ID NO: 46100 - DNA, 50 bp, synthetic construct
  source 1..50: mol_type = other DNA
tatcgaagattaccgcaataccgcaagcgtaaggtcggggagcgggatgg

SEQ ID NO: 46101 - DNA, 50 bp, synthetic construct
  source 1..50: mol_type = other DNA
taccgctttttcagttttggcgatgcatcgcccgaagcctgtcagcagcg

SEQ ID NO: 46102 - DNA, 50 bp, synthetic construct
  source 1..50: mol_type = other DNA
atttttgtacacagaaggaggatatatcaaggatttacaagtgattaagc

SEQ ID NO: 46103 - DNA, 50 bp, synthetic construct
  source 1..50: mol_type = other DNA
acggagaaaaaaatatttctcaaaagattgagatttattctccttgggca

SEQ ID NO: 46104 - DNA, 50 bp, synthetic construct
  source 1..50: mol_type = other DNA
tcagaataagaagataccgacatgatccatacttacccttctaattcttc

SEQ ID NO: 46105 - DNA, 50 bp, synthetic construct
  source 1..50: mol_type = other DNA
ggaagaagaaccgtccgacattcctgcccctgagggactttcctttttcc

SEQ ID NO: 46106 - DNA, 50 bp, synthetic construct
  source 1..50: mol_type = other DNA
gtggtgcgccgcctttaaaagtgatatcactctgaaagccaataatagca

SEQ ID NO: 46107 - DNA, 50 bp, synthetic construct
  source 1..50: mol_type = other DNA
tcatttaaaaaatctttctgctcatgtcatcagacaacatttttaatttt

SEQ ID NO: 46108 - DNA, 50 bp, synthetic construct
  source 1..50: mol_type = other DNA
tttattccatataccggccgaactgttggcataggcatagcaggaataga

SEQ ID NO: 46109 - DNA, 50 bp, synthetic construct
  source 1..50: mol_type = other DNA
taacaacgatagagacgtaaaaaagctttttttaatgtctatcgttaatg

SEQ ID NO: 46110 - DNA, 50 bp, synthetic construct
  source 1..50: mol_type = other DNA
tcatgttttgccgtttcataataagctttttgttttgctgctctccgtga

SEQ ID NO: 46111 - DNA, 50 bp, synthetic construct
  source 1..50: mol_type = other DNA
ttgttgtcagagctgcccgcagtttaaatggcggtgatctcacccatatg

SEQ ID NO: 46112 - DNA, 50 bp, synthetic construct
  source 1..50: mol_type = other DNA
gtctgagcttatcagcaactggttgaagacagtcgctgccgatgaagtta

SEQ ID NO: 46113 - DNA, 50 bp, synthetic construct
  source 1..50: mol_type = other DNA
aaatcatcctttcgtacacaaaacttattctgtgtacggttatatgattt

SEQ ID NO: 46114 - DNA, 50 bp, synthetic construct
  source 1..50: mol_type = other DNA
cattataattaatttatctttagaaattccaactgaaataatatataaaa

SEQ ID NO: 46115 - DNA, 50 bp, synthetic construct
  source 1..50: mol_type = other DNA
ccgaaatgaaagaaaaggcacgacttcaggctgcttattcggaatttctt

SEQ ID NO: 46116 - DNA, 50 bp, synthetic construct
  source 1..50: mol_type = other DNA
aaaataaatagcgaaaagtggcgtataggaacctttttctttggcatttc

SEQ ID NO: 46117 - DNA, 50 bp, synthetic construct
  source 1..50: mol_type = other DNA
gtggcttttctatcaataactgcaacaggtcagtatggcgtaaaatcaaa

SEQ ID NO: 46118 - DNA, 50 bp, synthetic construct
  source 1..50: mol_type = other DNA
caattgatagagcaacggtctccaaatggcacccgctattctgtctattc

SEQ ID NO: 46119 - DNA, 50 bp, synthetic construct
  source 1..50: mol_type = other DNA
actacttaatacttatgattgtcttattgcaatcaagactattagctaac

SEQ ID NO: 46120 - DNA, 50 bp, synthetic construct
  source 1..50: mol_type = other DNA
ttatattggaattgctattgctaatatttttaatcgtaattccaagctaa

SEQ ID NO: 46121 - DNA, 50 bp, synthetic construct
  source 1..50: mol_type = other DNA
attgatatatattctttgaatattatagatttaaaaaagattatacgatt

SEQ ID NO: 46122 - DNA, 50 bp, synthetic construct
  source 1..50: mol_type = other DNA
tttgtaatacgtccatcattaaccgattcacaggattgccggttcgtctg

SEQ ID NO: 46123 - DNA, 50 bp, synthetic construct
  source 1..50: mol_type = other DNA
gttgggatgattggttctatacaaaagataaaagaacctgtctttctgtt

SEQ ID NO: 46124 - DNA, 50 bp, synthetic construct
  source 1..50: mol_type = other DNA
tccgcctatggtcatatcacctgctcgtagttgagcaggtagccggggta

SEQ ID NO: 46125 - DNA, 50 bp, synthetic construct
  source 1..50: mol_type = other DNA
tattgcttgactaatcggcggtttaggaacaaaaacaaagtctgcagata

SEQ ID NO: 46126 - DNA, 50 bp, synthetic construct
  source 1..50: mol_type = other DNA
gagattacggaaccggtaacagttataacttcaacctcggcctgatgctc

SEQ ID NO: 46127 - DNA, 50 bp, synthetic construct
  source 1..50: mol_type = other DNA
ataaaaatgaggataatattaattcaaaattatattatctattattatat

SEQ ID NO: 46128 - DNA, 50 bp, synthetic construct
  source 1..50: mol_type = other DNA
tcccaacaaacctgtttgactaaatatttcgtacgtaacatttgttgtta

SEQ ID NO: 46129 - DNA, 50 bp, synthetic construct
  source 1..50: mol_type = other DNA
ttgctttcaatgattgttttacaacagtgtttatcaagcttttagcccaa

SEQ ID NO: 46130 - DNA, 50 bp, synthetic construct
  source 1..50: mol_type = other DNA
tccaaggattcgccccgcaccgccggaacggtgcggacgatcgccttgat

SEQ ID NO: 46131 - DNA, 50 bp, synthetic construct
  source 1..50: mol_type = other DNA
taaaataataataccaatattaccatagtaatattaataataagatttta

SEQ ID NO: 46132 - DNA, 50 bp, synthetic construct
  source 1..50: mol_type = other DNA
gatacatagcgcatccgtaattgtaagcacttacggatcaataccgtaag

SEQ ID NO: 46133 - DNA, 50 bp, synthetic construct
  source 1..50: mol_type = other DNA
tttacaatttggataaccaacaaatgttaggttgttagatatattgtaac

SEQ ID NO: 46134 - DNA, 50 bp, synthetic construct
  source 1..50: mol_type = other DNA
agcgttttgccatatgctccgatatacccacgcagaaaatccaaatctgc

SEQ ID NO: 46135 - DNA, 50 bp, synthetic construct
  source 1..50: mol_type = other DNA
atgtaacaagtgcaggatgaatcatattttttgatatgcagaaaatccat

SEQ ID NO: 46136 - DNA, 50 bp, synthetic construct
  source 1..50: mol_type = other DNA
ccgtggattttgggtcggacgttcctgaactacgttgccaacatcatcag

SEQ ID NO: 46137 - DNA, 50 bp, synthetic construct
  source 1..50: mol_type = other DNA
cggaagccatcataataaaaaagtgagttcctttcttatgattcgccgga

SEQ ID NO: 46138 - DNA, 50 bp, synthetic construct
  source 1..50: mol_type = other DNA
cacggcggctggaaaagaaagctgtaagacttgatttttcagaggaaata

SEQ ID NO: 46139 - DNA, 50 bp, synthetic construct
  source 1..50: mol_type = other DNA
ggatttttgaaaatttatttgcaaaaagttaaattcatttccgaaatatc

SEQ ID NO: 46140 - DNA, 50 bp, synthetic construct
  source 1..50: mol_type = other DNA
caaactctctgtctaacggctgactttaataccagcctgcagatagtttc

SEQ ID NO: 46141 - DNA, 50 bp, synthetic construct
  source 1..50: mol_type = other DNA
taactagaaaagatgaaagaaaccggaggtaaagtaatatgagcatgtta

SEQ ID NO: 46142 - DNA, 50 bp, synthetic construct
  source 1..50: mol_type = other DNA
attatgagatcgtcaaaccggtagtaccatttcttttccgttcttatcta

SEQ ID NO: 46143 - DNA, 50 bp, synthetic construct
  source 1..50: mol_type = other DNA
caaaaaacctcgaccgtccggagttttaaaagaggagtcgatgcttttta

SEQ ID NO: 46144 - DNA, 50 bp, synthetic construct
  source 1..50: mol_type = other DNA
ttaattcttgtattttagaattaattttttgtatataatacaaaagtatt

SEQ ID NO: 46145 - DNA, 50 bp, synthetic construct
  source 1..50: mol_type = other DNA
cttgatattccggccttttagagtgaactcttcagatggatcatatgctt

SEQ ID NO: 46146 - DNA, 50 bp, synthetic construct
  source 1..50: mol_type = other DNA
cggagagaaaaagccagagcatccatggattctttaaccatatcacgaat

SEQ ID NO: 46147 - DNA, 50 bp, synthetic construct
  source 1..50: mol_type = other DNA
cagtcgcagcgcgaaacaaagtatgattactgctcgcagcgcttcggcac

SEQ ID NO: 46148 - DNA, 50 bp, synthetic construct
  source 1..50: mol_type = other DNA
tcagggcggcaatgaccttcccgagcttttgatggtaatttccgtgctac

SEQ ID NO: 46149 - DNA, 50 bp, synthetic construct
  source 1..50: mol_type = other DNA
cgtctttcaaagggtttttattttttacaatattatcaagttgaaccatt

SEQ ID NO: 46150 - DNA, 50 bp, synthetic construct
  source 1..50: mol_type = other DNA
tagaatcgtgtacccttgtgctgctcgccatggtgcggatgaagggactt

SEQ ID NO: 46151 - DNA, 50 bp, synthetic construct
  source 1..50: mol_type = other DNA
gattttctgccgtctcttctgcagcaacacatccccaacaatagaccttt

SEQ ID NO: 46152 - DNA, 50 bp, synthetic construct
  source 1..50: mol_type = other DNA
gtattagaaataagcaaaatttattaaaatattttgctacttttgacata

SEQ ID NO: 46153 - DNA, 50 bp, synthetic construct
  source 1..50: mol_type = other DNA
ataccatacctcatgtgcatcggcaagccgcgattcagacgtactgacgt

SEQ ID NO: 46154 - DNA, 50 bp, synthetic construct
  source 1..50: mol_type = other DNA
gttaaaataagaccacctaagagtaaacttctttttaaacttattttcag

SEQ ID NO: 46155 - DNA, 50 bp, synthetic construct
  source 1..50: mol_type = other DNA
gccttgatgatggttcgtgaacggttctgttaatgatatgtcacaaatcg

SEQ ID NO: 46156 - DNA, 50 bp, synthetic construct
  source 1..50: mol_type = other DNA
tgttgacagcaatcggagacactaaaagttatccatttttatgcactacg

SEQ ID NO: 46157 - DNA, 50 bp, synthetic construct
  source 1..50: mol_type = other DNA
atgatagccgcaagtctgccgttttctgacgggcggcttctttcatctcg

SEQ ID NO: 46158 - DNA, 50 bp, synthetic construct
  source 1..50: mol_type = other DNA
acggctgcctttggcaggtgcgtcaagaagcaacgtatcttaatgagcgt

SEQ ID NO: 46159 - DNA, 50 bp, synthetic construct
  source 1..50: mol_type = other DNA
ggagttttgaaaatttatttgcaaaaagttaaattcatttccgaaatatc

SEQ ID NO: 46160 - DNA, 50 bp, synthetic construct
  source 1..50: mol_type = other DNA
gtttgaataaatgcttgacaattatatattttcccagctggaattagaaa

SEQ ID NO: 46161 - DNA, 50 bp, synthetic construct
  source 1..50: mol_type = other DNA
ctcgtttttgagtccagatttcctgtcggttcatctgccagcaaaatagc

SEQ ID NO: 46162 - DNA, 50 bp, synthetic construct
  source 1..50: mol_type = other DNA
tggaaaagctgatgtctgggataactttaaggcactctgaagcttggtag

SEQ ID NO: 46163 - DNA, 50 bp, synthetic construct
  source 1..50: mol_type = other DNA
aaggggttgattacgtctattattataataatcagcggcttcctatcctt

SEQ ID NO: 46164 - DNA, 50 bp, synthetic construct
  source 1..50: mol_type = other DNA
gtagatgttttgtaaattgatattatatcatcctccttaaaaatgagtat

SEQ ID NO: 46165 - DNA, 50 bp, synthetic construct
  source 1..50: mol_type = other DNA
tatttcgcagaaaaaacatcggaaagtttggagaaccatttaaagaaatg

SEQ ID NO: 46166 - DNA, 50 bp, synthetic construct
  source 1..50: mol_type = other DNA
gaggccggaaccccaccattatgaaatcattctcctggggcagatgctcc

SEQ ID NO: 46167 - DNA, 50 bp, synthetic construct
  source 1..50: mol_type = other DNA
catttagagtgatgtatatacaagtggttctatatcgtattgtcttaatg

SEQ ID NO: 46168 - DNA, 50 bp, synthetic construct
  source 1..50: mol_type = other DNA
tccttcttattactttcttgttttataaatcataaaattctgaagaagga

SEQ ID NO: 46169 - DNA, 50 bp, synthetic construct
  source 1..50: mol_type = other DNA
tttcccgtgtatcctgcaatgcagcgctgtcctgcaagaaaaaacggaag

SEQ ID NO: 46170 - DNA, 50 bp, synthetic construct
  source 1..50: mol_type = other DNA
agaaaatgatgatgatatgccccagaaaggtgttaccatcatcatgtcct

SEQ ID NO: 46171 - DNA, 50 bp, synthetic construct
  source 1..50: mol_type = other DNA
gtacttcgtataataatcgacctgagcgatgagataattatacgaacata

SEQ ID NO: 46172 - DNA, 50 bp, synthetic construct
  source 1..50: mol_type = other DNA
ggcacagataatggatcttgcggaatttcatttgaagaatatcagttaaa

SEQ ID NO: 46173 - DNA, 50 bp, synthetic construct
  source 1..50: mol_type = other DNA
agtaagggagacaaagagccttctccagaatcacctgtgctaccattaca

SEQ ID NO: 46174 - DNA, 50 bp, synthetic construct
  source 1..50: mol_type = other DNA
ataattgatacaaaactgcttgaaaacaacatctctttcgtattgcttat

SEQ ID NO: 46175 - DNA, 50 bp, synthetic construct
  source 1..50: mol_type = other DNA
tgtgggtacctttataggttgttgatttgcagcctattaagggctgcaaa

SEQ ID NO: 46176 - DNA, 50 bp, synthetic construct
  source 1..50: mol_type = other DNA
gtgaaaataccataatcttttctacggagaaaatgtttccttatttttag

SEQ ID NO: 46177 - DNA, 50 bp, synthetic construct
  source 1..50: mol_type = other DNA
taaaaatgaaacaaggcgctaccttaaggttacttggtcagttttttttg

SEQ ID NO: 46178 - DNA, 50 bp, synthetic construct
  source 1..50: mol_type = other DNA
cacatttttcccgatttttttatcctgataacggaatcaggaatccttgt

SEQ ID NO: 46179 - DNA, 50 bp, synthetic construct
  source 1..50: mol_type = other DNA
taatagacttccgccccccgttttctcctttctctttgggtagtctatat

SEQ ID NO: 46180 - DNA, 50 bp, synthetic construct
  source 1..50: mol_type = other DNA
ttgccgaccgtgaaggatgcgaaaatgtccttgtcattgttgaaggacaa

SEQ ID NO: 46181 - DNA, 50 bp, synthetic construct
  source 1..50: mol_type = other DNA
tacgcaatgaggacatggcttttaaggtcaagctggctgctctgaccgtc

SEQ ID NO: 46182 - DNA, 50 bp, synthetic construct
  source 1..50: mol_type = other DNA
tatatcatttacagcaccactttttcaacaagtgcaaagccaagttcata

SEQ ID NO: 46183 - DNA, 50 bp, synthetic construct
  source 1..50: mol_type = other DNA
agcagtacatcatgatgacccgcgccggaggtggtacaataacatctgcg

SEQ ID NO: 46184 - DNA, 50 bp, synthetic construct
  source 1..50: mol_type = other DNA
aataatcggactagcttgtaaagacagctttgaagcacaggtcgattatt

SEQ ID NO: 46185 - DNA, 50 bp, synthetic construct
  source 1..50: mol_type = other DNA
taaagaatattttgcctatgatcctgctttcaccgttcgcatccccgggt

SEQ ID NO: 46186 - DNA, 50 bp, synthetic construct
  source 1..50: mol_type = other DNA
aataggactaccaaaaaggaaggagaaatcctttatttggaatcactttc

SEQ ID NO: 46187 - DNA, 50 bp, synthetic construct
  source 1..50: mol_type = other DNA
taaatattagttgcaaaaagttttaatccgttttttgcacaaaataaaac

SEQ ID NO: 46188 - DNA, 50 bp, synthetic construct
  source 1..50: mol_type = other DNA
aattatgaatatttctaccatgcaacgactatgccgatattttcaaggga

SEQ ID NO: 46189 - DNA, 50 bp, synthetic construct
  source 1..50: mol_type = other DNA
ccctttctactttttctttctcccggagcaggcggaaaaagtcagaaggt

SEQ ID NO: 46190 - DNA, 50 bp, synthetic construct
  source 1..50: mol_type = other DNA
gtacagttttatttgaaacctgtcacgataaaattcaaatcaggtacaag

SEQ ID NO: 46191 - DNA, 50 bp, synthetic construct
  source 1..50: mol_type = other DNA
tggaaacgactaaaatacattcagtatttaattcgttatcttcgtttcgg

SEQ ID NO: 46192 - DNA, 50 bp, synthetic construct
  source 1..50: mol_type = other DNA
gaaaatgatttataaaattgcctctcaggatttttctatggataatggtc

SEQ ID NO: 46193 - DNA, 50 bp, synthetic construct
  source 1..50: mol_type = other DNA
accgtatcggcaatttgtaaatctactccggtaaaaattgatgaaatcgc

SEQ ID NO: 46194 - DNA, 50 bp, synthetic construct
  source 1..50: mol_type = other DNA
gtacagcttggcgcggacatcattatgataatgtgatctatcagctcttg

SEQ ID NO: 46195 - DNA, 50 bp, synthetic construct
  source 1..50: mol_type = other DNA
cggagcatttcaggatgctccggcttcccggagcaagctgggatgacgaa

SEQ ID NO: 46196 - DNA, 50 bp, synthetic construct
  source 1..50: mol_type = other DNA
gctctcgaccgcctgcacgcaatttttaatagacaaaggaggccgaaatg

SEQ ID NO: 46197 - DNA, 50 bp, synthetic construct
  source 1..50: mol_type = other DNA
aactcctgtggtattgtttgtgttgcaacacaaatcgggagcttgtcttt

SEQ ID NO: 46198 - DNA, 50 bp, synthetic construct
  source 1..50: mol_type = other DNA
cggtcagaggatcggaaaggagaaatttccgcttcggtatccgtcgcaaa

SEQ ID NO: 46199 - DNA, 50 bp, synthetic construct
  source 1..50: mol_type = other DNA
taaggtgacaacagcagatagaatcttctccgccgcgggcaaatacctcc

SEQ ID NO: 46200 - DNA, 50 bp, synthetic construct
  source 1..50: mol_type = other DNA
tttattggtgcttgccttaatgcaacgcgtctaagcacttgctaaaaagg

SEQ ID NO: 46201 - DNA, 50 bp, synthetic construct
  source 1..50: mol_type = other DNA
aggagcttgggcagttccagcttccataagctcaaaccactgctgttctg

SEQ ID NO: 46202 - DNA, 50 bp, synthetic construct
  source 1..50: mol_type = other DNA
tgcaaagcagggggacaatttactattatagtaatcagttctgttttgtt

SEQ ID NO: 46203 - DNA, 50 bp, synthetic construct
  source 1..50: mol_type = other DNA
catttttgtacctccttgaaaaatcttattatcaagtcaatcccacgata

SEQ ID NO: 46204 - DNA, 50 bp, synthetic construct
  source 1..50: mol_type = other DNA
tgccaacaataaaacgcccggagcatctacatatacttttatgttttttc

SEQ ID NO: 46205 - DNA, 50 bp, synthetic construct
  source 1..50: mol_type = other DNA
gcaataatcgctttcacttcttctatatccagtgttattacagatatact

SEQ ID NO: 46206 - DNA, 50 bp, synthetic construct
  source 1..50: mol_type = other DNA
tcgagtgttttttccggatgtgctgcagcagctccgcattgagttctgcc

SEQ ID NO: 46207 - DNA, 50 bp, synthetic construct
  source 1..50: mol_type = other DNA
ctttggattccggctcgttccggatgatcggcacgagcgtcagcttgcgg

SEQ ID NO: 46208 - DNA, 50 bp, synthetic construct
  source 1..50: mol_type = other DNA
tattacaaggcagatcgttaaaatcacgcttgtcgtgctgttttttacct

SEQ ID NO: 46209 - DNA, 50 bp, synthetic construct
  source 1..50: mol_type = other DNA
gcagattgttgaaaaatacggaagatctaaacatcatttctgttgcctgt

SEQ ID NO: 46210 - DNA, 50 bp, synthetic construct
  source 1..50: mol_type = other DNA
ggcttttggagtattatatccgcaacaagggatataataatcactctgca

SEQ ID NO: 46211 - DNA, 50 bp, synthetic construct
  source 1..50: mol_type = other DNA
ttttatgctatttattataacataatgattataaaataaaaataattaat

SEQ ID NO: 46212 - DNA, 50 bp, synthetic construct
  source 1..50: mol_type = other DNA
aacgttcgcacccttccattatgccgagataaagccgaaaagattcttcc

SEQ ID NO: 46213 - DNA, 50 bp, synthetic construct
  source 1..50: mol_type = other DNA
tgcttgtggagctggtggacgaatacgatgctccaccagcttatcctgca

SEQ ID NO: 46214 - DNA, 50 bp, synthetic construct
  source 1..50: mol_type = other DNA
gtgcagttgcttttcagtgactgcacgcagtggatgcaaaggttgacgca

SEQ ID NO: 46215 - DNA, 50 bp, synthetic construct
  source 1..50: mol_type = other DNA
gaaggaggaatgcttcgtcgaatgtacagcatccgatgcactgctcattg

SEQ ID NO: 46216 - DNA, 50 bp, synthetic construct
  source 1..50: mol_type = other DNA
cgatataatgtttattgtataagccaactatcatgatgtcactcatatat

SEQ ID NO: 46217 - DNA, 50 bp, synthetic construct
  source 1..50: mol_type = other DNA
accttccgcttcgtccggctattaatgacaagcatatcgaagtcaaaggg

SEQ ID NO: 46218 - DNA, 50 bp, synthetic construct
  source 1..50: mol_type = other DNA
ttatttttatcaaagagtacttctaaatctgtactctttaataaaaactt

SEQ ID NO: 46219 - DNA, 50 bp, synthetic construct
  source 1..50: mol_type = other DNA
taatagcacagcgcggttgaaaaatcgctttcgtccgcgctctcgcgttc

SEQ ID NO: 46220 - DNA, 50 bp, synthetic construct
  source 1..50: mol_type = other DNA
cacgcgcatatccggcaacacggcgtaccgtaggtttcttcgccggcgtc

SEQ ID NO: 46221 - DNA, 50 bp, synthetic construct
  source 1..50: mol_type = other DNA
tttgctgcccccgtaaacgtagaaaattctccgtttcggattgcagcaac

SEQ ID NO: 46222 - DNA, 50 bp, synthetic construct
  source 1..50: mol_type = other DNA
gcggattgatggtcggcggaatgactccgtttcggattgcagcaacccgc

SEQ ID NO: 46223 - DNA, 50 bp, synthetic construct
  source 1..50: mol_type = other DNA
ttgattttattgagatggcattgatttgaatcccgaaaccatagacggtc

SEQ ID NO: 46224 - DNA, 50 bp, synthetic construct
  source 1..50: mol_type = other DNA
aaatcaatggacttttatacccttttaatcctatgaaacttcatctcttt

SEQ ID NO: 46225 - DNA, 50 bp, synthetic construct
  source 1..50: mol_type = other DNA
gcctgctgtccggcaggacagccacgtggcaaagaaaaattcctttcggc

SEQ ID NO: 46226 - DNA, 50 bp, synthetic construct
  source 1..50: mol_type = other DNA
tttggaaccgctgcgctccgccgcccacggcggcttccagcggttcggaa

SEQ ID NO: 46227 - DNA, 50 bp, synthetic construct
  source 1..50: mol_type = other DNA
cagctgttgaccaagaatttacagtataataaatgcttgtcaaaacatta

SEQ ID NO: 46228 - DNA, 50 bp, synthetic construct
  source 1..50: mol_type = other DNA
gtttgataacttgcaggcattatgtaaaaattgcgagctgaccatcaatc

SEQ ID NO: 46229 - DNA, 50 bp, synthetic construct
  source 1..50: mol_type = other DNA
tatttttagctggtaattttatggtacaaatatcccacagactaaaaata

SEQ ID NO: 46230 - DNA, 50 bp, synthetic construct
  source 1..50: mol_type = other DNA
agtgattacatcagtatcagcttcttgctgcttatgctcgtgtttccaca

SEQ ID NO: 46231 - DNA, 50 bp, synthetic construct
  source 1..50: mol_type = other DNA
cctatccggcgtttgcgcattgcgccggggctggctgtacagtcctttct

SEQ ID NO: 46232 - DNA, 50 bp, synthetic construct
  source 1..50: mol_type = other DNA
ttgctgcaagcctgcctttccagaatctgccaaaggcatccgtgcagaaa

SEQ ID NO: 46233 - DNA, 50 bp, synthetic construct
  source 1..50: mol_type = other DNA
gcctgcctttccagaatctgagtttcaatgccatctcaataaaatcaaac

SEQ ID NO: 46234 - DNA, 50 bp, synthetic construct
  source 1..50: mol_type = other DNA
tgtggctggcccggcaggggctgtatgcactgtacagcacacgggccacc

SEQ ID NO: 46235 - DNA, 50 bp, synthetic construct
  source 1..50: mol_type = other DNA
gtgctgcagcgcgtggctgtcatgtgcatgagaaccatgcctttgtgagc

SEQ ID NO: 46236 - DNA, 50 bp, synthetic construct
  source 1..50: mol_type = other DNA
taaaaccatatctttcaaaatatattctgactttgaaattgatgtgtttc

SEQ ID NO: 46237 - DNA, 50 bp, synthetic construct
  source 1..50: mol_type = other DNA
gcagcgggtatactaatggagctgtggcataatcttagcatgagcctatg

SEQ ID NO: 46238 - DNA, 50 bp, synthetic construct
  source 1..50: mol_type = other DNA
aggatgatactgaccagatagatatgccggacactggtccaccatatcca

SEQ ID NO: 46239 - DNA, 50 bp, synthetic construct
  source 1..50: mol_type = other DNA
ggaaacacggcagtaggctgccaccctccaccgccctttggtgtgtttca

SEQ ID NO: 46240 - DNA, 50 bp, synthetic construct
  source 1..50: mol_type = other DNA
cgcgataccgttttcaatccggtatctacattggtgaaaacggtgaaaaa

SEQ ID NO: 46241 - DNA, 50 bp, synthetic construct
  source 1..50: mol_type = other DNA
ttccacaacaaggtctattatagcatgctatacttgtgaaagaaagtgaa

SEQ ID NO: 46242 - DNA, 50 bp, synthetic construct
  source 1..50: mol_type = other DNA
tgcaaatacgaattgaaaggcggtaactgtactttacctaactataaact

SEQ ID NO: 46243 - DNA, 50 bp, synthetic construct
  source 1..50: mol_type = other DNA
atgacggtcatttcggagcagagccggcttggcaccgtgcagagtgtgaa

SEQ ID NO: 46244 - DNA, 50 bp, synthetic construct
  source 1..50: mol_type = other DNA
ttatttaattttcctttatggtcttttttgttttttacttaataaaattt

SEQ ID NO: 46245 - DNA, 50 bp, synthetic construct
  source 1..50: mol_type = other DNA
actgtgaagctggtcttcctgatccgttgatggaatccggctcccacagg

SEQ ID NO: 46246 - DNA, 50 bp, synthetic construct
  source 1..50: mol_type = other DNA
cgcgcctcttctgaggcgcgtttctacccctatgcccaaaaagagcattt

SEQ ID NO: 46247 - DNA, 50 bp, synthetic construct
  source 1..50: mol_type = other DNA
gattgaaaaaattattgtagcattggcatctgccgcttgttttcccactc

SEQ ID NO: 46248 - DNA, 50 bp, synthetic construct
  source 1..50: mol_type = other DNA
gatacctatgatgacgagaatgacaagtcattttcggataataatgtacc

SEQ ID NO: 46249 - DNA, 50 bp, synthetic construct
  source 1..50: mol_type = other DNA
tatagtagctaactaatatagtagatcagcttgataaaatagctaaagaa

SEQ ID NO: 46250 - DNA, 50 bp, synthetic construct
  source 1..50: mol_type = other DNA
agatgtatgatcatgcaagttataaatataatatatatgagaagcataat

SEQ ID NO: 46251 - DNA, 50 bp, synthetic construct
  source 1..50: mol_type = other DNA
tgatagtggttttgtatattttttaaataaaataaaataaaattgataca

SEQ ID NO: 46252 - DNA, 50 bp, synthetic construct
  source 1..50: mol_type = other DNA
attgtattatagatagttagctaatattagttgcatatctatgatataga

SEQ ID NO: 46253 - DNA, 50 bp, synthetic construct
  source 1..50: mol_type = other DNA
gtgtcgcataacgtgatgaatgcggccgacatctgggataatatcgacaa

SEQ ID NO: 46254 - DNA, 50 bp, synthetic construct
  source 1..50: mol_type = other DNA
gctcagagtgtcgtatattttcagaacgaaaaaaattttacaaaatgtat

SEQ ID NO: 46255 - DNA, 50 bp, synthetic construct
  source 1..50: mol_type = other DNA
gcaatgtgctctgccatggcgacacaagcatcattagcactcgcaatgga

SEQ ID NO: 46256 - DNA, 50 bp, synthetic construct
  source 1..50: mol_type = other DNA
tttgctattcgactgtcccaagaaaggaggccccgccgtcatgccccgag

SEQ ID NO: 46257 - DNA, 50 bp, synthetic construct
  source 1..50: mol_type = other DNA
ttgcatatatattttacagccgtttccaccactgatgaatatattgtatc

SEQ ID NO: 46258 - DNA, 50 bp, synthetic construct
  source 1..50: mol_type = other DNA
ccggttgcatttttacaaagaaaagcagttcttttgaaaatctacatcgt

SEQ ID NO: 46259 - DNA, 50 bp, synthetic construct
  source 1..50: mol_type = other DNA
aatcatcagccagtatggtggactatggtggaccggacggtgaaatgggt

SEQ ID NO: 46260 - DNA, 50 bp, synthetic construct
  source 1..50: mol_type = other DNA
tgttccatattcttttctttttaaatcccctgataacggaatcaggaatc

SEQ ID NO: 46261 - DNA, 50 bp, synthetic construct
  source 1..50: mol_type = other DNA
acgcaggacgattacactatgattataaaaacaaaatagccgcccggtgt

SEQ ID NO: 46262 - DNA, 50 bp, synthetic construct
  source 1..50: mol_type = other DNA
gcaccgttgccgagaccctgggcaaattccattatcatctgcaaacggaa

SEQ ID NO: 46263 - DNA, 50 bp, synthetic construct
  source 1..50: mol_type = other DNA
gaaagcgaggaattgaaaatgttagatctcataatcaacgaatgtcttcg

SEQ ID NO: 46264 - DNA, 50 bp, synthetic construct
  source 1..50: mol_type = other DNA
caagctatctattttattttaccatatgcgtagataaaataccctttttc

SEQ ID NO: 46265 - DNA, 50 bp, synthetic construct
  source 1..50: mol_type = other DNA
cctgcatattcatagagaggattttcaaagcctctcggcttatattcata

SEQ ID NO: 46266 - DNA, 50 bp, synthetic construct
  source 1..50: mol_type = other DNA
atcgcacgcatctgggtgcatggtgggagatgcatacagataagagagat

SEQ ID NO: 46267 - DNA, 50 bp, synthetic construct
  source 1..50: mol_type = other DNA
attatttatattaagtctttggttatatccaatatctaaatatgtgacat

SEQ ID NO: 46268 - DNA, 50 bp, synthetic construct
  source 1..50: mol_type = other DNA
tttttatttttactatctttatactgttctaaaatagaagaaaataaaaa

SEQ ID NO: 46269 - DNA, 50 bp, synthetic construct
  source 1..50: mol_type = other DNA
atattggaaataagcaccctatattacctaacggatctggccatcaccat

SEQ ID NO: 46270 - DNA, 50 bp, synthetic construct
  source 1..50: mol_type = other DNA
atttttgaagcaaagtataaaatccctcttgattaatttatttaaaaagc

SEQ ID NO: 46271 - DNA, 50 bp, synthetic construct
  source 1..50: mol_type = other DNA
ccggcagccgcgcaaccgaaaggagttcccccgctgctacccgctgccca

SEQ ID NO: 46272 - DNA, 50 bp, synthetic construct
  source 1..50: mol_type = other DNA
tcaaattgatacaattttcattgagaactatgtaaatttgattatagtgg

SEQ ID NO: 46273 - DNA, 50 bp, synthetic construct
  source 1..50: mol_type = other DNA
taaaagcacaaccaaaactgcacaggacttaggtcttgggtgcttttttg

SEQ ID NO: 46274 - DNA, 50 bp, synthetic construct
  source 1..50: mol_type = other DNA
ctccaaatggggcggtatagttagtactaactacatgactccaaatccac

SEQ ID NO: 46275 - DNA, 50 bp, synthetic construct
  source 1..50: mol_type = other DNA
ggttaataatcggaaaagctggttattaactcctataataattatttttt

SEQ ID NO: 46276 - DNA, 50 bp, synthetic construct
  source 1..50: mol_type = other DNA
gttattaaagttttaatacctcacatttgaaaggaaaactttttaaagac

SEQ ID NO: 46277 - DNA, 50 bp, synthetic construct
  source 1..50: mol_type = other DNA
tatgaaatagataaatttttcaaagattaaaaaaatgcagtaatatcaat

SEQ ID NO: 46278 - DNA, 50 bp, synthetic construct
  source 1..50: mol_type = other DNA
agtcgacgcttttgatgctggtatcgacacaagcatcattagcactcgca

SEQ ID NO: 46279 - DNA, 50 bp, synthetic construct
  source 1..50: mol_type = other DNA
acagattacagtaatgattttaagatcttataaggtcaagcctaagaatg

SEQ ID NO: 46280 - DNA, 50 bp, synthetic construct
  source 1..50: mol_type = other DNA
tattttctccaaatcggctcacacaggttcgaaacctttacaagaattat

SEQ ID NO: 46281 - DNA, 50 bp, synthetic construct
  source 1..50: mol_type = other DNA
aacccctttaacctgcactattttcgaccatgatggccgggagggcattt

SEQ ID NO: 46282 - DNA, 50 bp, synthetic construct
  source 1..50: mol_type = other DNA
tttggcgatgcgatgtttataaaatatctttcggaacgtattttgccaaa

SEQ ID NO: 46283 - DNA, 50 bp, synthetic construct
  source 1..50: mol_type = other DNA
attccgatgcgccagccgccgtactgggtaagcagctgggcgttgtttgt

SEQ ID NO: 46284 - DNA, 50 bp, synthetic construct
  source 1..50: mol_type = other DNA
tctctatctgggttatctgttggttaacctgttctttatttggatagatt

SEQ ID NO: 46285 - DNA, 50 bp, synthetic construct
  source 1..50: mol_type = other DNA
caggatgcactggagtttgcagcccgtccttttaatcgaggtgcatacta

SEQ ID NO: 46286 - DNA, 50 bp, synthetic construct
  source 1..50: mol_type = other DNA
caaattaagtatatcgcattttccatgcaaactcgatcgggcttcctttg

SEQ ID NO: 46287 - DNA, 50 bp, synthetic construct
  source 1..50: mol_type = other DNA
gtttggcgagaccaccacggccattggtgctcagggtgtcggtggctttc

SEQ ID NO: 46288 - DNA, 50 bp, synthetic construct
  source 1..50: mol_type = other DNA
gaaaatatttaagtatattatactttagtataatttctgtatataccaac

SEQ ID NO: 46289 - DNA, 50 bp, synthetic construct
  source 1..50: mol_type = other DNA
gatggctgtcagccgtatttttttcagtttaatggaatactacaggcaaa

SEQ ID NO: 46290 - DNA, 50 bp, synthetic construct
  source 1..50: mol_type = other DNA
gcaatagttaaggcactaaaaaaggccttctctgctataatatagggtgc

SEQ ID NO: 46291 - DNA, 50 bp, synthetic construct
  source 1..50: mol_type = other DNA
ccgtcagacgggcgatcatgtccacgacacttcgctcgaccaaacctcga

SEQ ID NO: 46292 - DNA, 50 bp, synthetic construct
  source 1..50: mol_type = other DNA
gcttttggctttatatcaagggattttagcaataaatttaagacaaaagc

SEQ ID NO: 46293 - DNA, 50 bp, synthetic construct
  source 1..50: mol_type = other DNA
aaactgctctatttcgatgtcacttgatttcgtataatatataacaggaa

SEQ ID NO: 46294 - DNA, 50 bp, synthetic construct
  source 1..50: mol_type = other DNA
ccaaagtacgatgttcgttttattgcaagtttgaaaaggacttacgatga

SEQ ID NO: 46295 - DNA, 50 bp, synthetic construct
  source 1..50: mol_type = other DNA
tcgacgcgcttgtcgccgcggacggtccagctcggcggtcagctcgtcga

SEQ ID NO: 46296 - DNA, 50 bp, synthetic construct
  source 1..50: mol_type = other DNA
ggcataaccggcgacacggcgtttccaaacgctttgtcgatcattcgttc

SEQ ID NO: 46297 - DNA, 50 bp, synthetic construct
  source 1..50: mol_type = other DNA
aaaaagtggcggtttcccgccacttttagcctttgccggttttactttta

SEQ ID NO: 46298 - DNA, 50 bp, synthetic construct
  source 1..50: mol_type = other DNA
atattcatgccggagtggcggaattgcttacggcagatacttccgcatcg

SEQ ID NO: 46299 - DNA, 50 bp, synthetic construct
  source 1..50: mol_type = other DNA
agtgtaattatttagagtgagagaggaaactctttaaaaatctcttcact

SEQ ID NO: 46300 - DNA, 50 bp, synthetic construct
  source 1..50: mol_type = other DNA
atatcttcaattttctttgatatttccatataaacgaaaatagcccatgc

SEQ ID NO: 46301 - DNA, 50 bp, synthetic construct
  source 1..50: mol_type = other DNA
agagtagaggaaaaacgcatcgaaaagcgggtgcgtatttgatataattc

SEQ ID NO: 46302 - DNA, 50 bp, synthetic construct
  source 1..50: mol_type = other DNA
tctttttctttacgagtattatatgttggtagtaggtatatagtaaaaga

SEQ ID NO: 46303 - DNA, 50 bp, synthetic construct
  source 1..50: mol_type = other DNA
gcttttcaaacaggcggtttccctctcccaaatagccttgctgaaatcaa

SEQ ID NO: 46304 - DNA, 50 bp, synthetic construct
  source 1..50: mol_type = other DNA
aattcgagcccaagcttcctgacggaagtacagaaaaaagccgctgaatt

SEQ ID NO: 46305 - DNA, 50 bp, synthetic construct
  source 1..50: mol_type = other DNA
taacaacagaaggcaaatccagtaattactgtattaggaaaagacagtca

SEQ ID NO: 46306 - DNA, 50 bp, synthetic construct
  source 1..50: mol_type = other DNA
cgatgagctgacccatttcgagtgggaactctgcttgaaggcgctctccc

SEQ ID NO: 46307 - DNA, 50 bp, synthetic construct
  source 1..50: mol_type = other DNA
aagcgacatacctgcaagataattctgatgttcttgagggatatgtcagt

SEQ ID NO: 46308 - DNA, 50 bp, synthetic construct
  source 1..50: mol_type = other DNA
caacctaagctgagcgcttcattacgagttaaacagctcgtcataggtta

SEQ ID NO: 46309 - DNA, 50 bp, synthetic construct
  source 1..50: mol_type = other DNA
atcaatttgcaatattatattctgcagagaataatgtggcaaaaattggg

SEQ ID NO: 46310 - DNA, 50 bp, synthetic construct
  source 1..50: mol_type = other DNA
tgaatcaggccaccgtctccgtaaaactacggcgacggcagcaccttctg

SEQ ID NO: 46311 - DNA, 50 bp, synthetic construct
  source 1..50: mol_type = other DNA
aatattcttgtttcttgcatacttcgcggtataaactacacgaagatatc

SEQ ID NO: 46312 - DNA, 50 bp, synthetic construct
  source 1..50: mol_type = other DNA
aacgtcctctgccccgaccaaggcagccccctgttccagcaggaagcggc

SEQ ID NO: 46313 - DNA, 50 bp, synthetic construct
  source 1..50: mol_type = other DNA
gatgtttcacgttttttgaatattaaagaatgcaaaaatccgaactgcaa

SEQ ID NO: 46314 - DNA, 50 bp, synthetic construct
  source 1..50: mol_type = other DNA
ttaccgccttcaatgcggtaaccatatcattaccaaacagaagtgggtat

SEQ ID NO: 46315 - DNA, 50 bp, synthetic construct
  source 1..50: mol_type = other DNA
tggacgatctgttccagatcggctgtggccgatatgatcggcatctccca

SEQ ID NO: 46316 - DNA, 50 bp, synthetic construct
  source 1..50: mol_type = other DNA
gaagtcctggaatccagcgcacccgtaggctcatcgcataacagaaggct

SEQ ID NO: 46317 - DNA, 50 bp, synthetic construct
  source 1..50: mol_type = other DNA
cgactatagtaagcgtgtaaaaattgatttaggtatccgtactgtcgtct

SEQ ID NO: 46318 - DNA, 50 bp, synthetic construct
  source 1..50: mol_type = other DNA
tgatgtagttcgtgtaataatccacctgcgcttcatttacaatggcatca

SEQ ID NO: 46319 - DNA, 50 bp, synthetic construct
  source 1..50: mol_type = other DNA
aatgccctgccaccgcaatgcttaacccatcatcgcggtggagtccggtt

SEQ ID NO: 46320 - DNA, 50 bp, synthetic construct
  source 1..50: mol_type = other DNA
cattctctccatttttagccgagatttctgcatcaacaatagctttattg

SEQ ID NO: 46321 - DNA, 50 bp, synthetic construct
  source 1..50: mol_type = other DNA
agaaacacttgtaagacgtgaataaatattcaaaacttatctttttacct

SEQ ID NO: 46322 - DNA, 50 bp, synthetic construct
  source 1..50: mol_type = other DNA
tatataaaactatgtggtagtgtatgataataccgtgaatgttttatatg

SEQ ID NO: 46323 - DNA, 50 bp, synthetic construct
  source 1..50: mol_type = other DNA
attccatttactggaaggaatataacgttgttcctgccagtttatggtaa

SEQ ID NO: 46324 - DNA, 50 bp, synthetic construct
  source 1..50: mol_type = other DNA
agtttcaatgaaggcatctcttgatgatataatatggcttgcttagggcg

SEQ ID NO: 46325 - DNA, 50 bp, synthetic construct
  source 1..50: mol_type = other DNA
tattcagtgctgatattttttgtaaacacacaaagtcaccgctgtgataa

SEQ ID NO: 46326 - DNA, 50 bp, synthetic construct
  source 1..50: mol_type = other DNA
ctaagctttgcggaccggcaggaactcatgactcgtgcgatactgcttta

SEQ ID NO: 46327 - DNA, 50 bp, synthetic construct
  source 1..50: mol_type = other DNA
catgttgccggggatgatgcgctccggagtggagcaagcccatctgaatc

SEQ ID NO: 46328 - DNA, 50 bp, synthetic construct
  source 1..50: mol_type = other DNA
ccagatacaaattttccctgcctgcgcagagtgggggcatttgtcaacca

SEQ ID NO: 46329 - DNA, 50 bp, synthetic construct
  source 1..50: mol_type = other DNA
cgcataatccaattagccatgaatgatgtgggtaccagtaattatgacac

SEQ ID NO: 46330 - DNA, 50 bp, synthetic construct
  source 1..50: mol_type = other DNA
cagatattataccatgtccgcctcctttttcggaagccctatgtaatcat

SEQ ID NO: 46331 - DNA, 50 bp, synthetic construct
  source 1..50: mol_type = other DNA
taccgtctgcatttattatattaccaccaaagccataaatgcagaaaaca

SEQ ID NO: 46332 - DNA, 50 bp, synthetic construct
  source 1..50: mol_type = other DNA
atccagcacctgccacgcaatgggctggcggcgactggcgcacggtgcgt

SEQ ID NO: 46333 - DNA, 50 bp, synthetic construct
  source 1..50: mol_type = other DNA
tatgtaatgacaggaggaggtcaatattattggattgatgtctatacatt

SEQ ID NO: 46334 - DNA, 50 bp, synthetic construct
  source 1..50: mol_type = other DNA
aacttccataatttattgtaactaattagagtcattaatttatagtgaac

SEQ ID NO: 46335 - DNA, 50 bp, synthetic construct
  source 1..50: mol_type = other DNA
tctttttacatccaggctgcacctaccaatatcactaatataaacaatac

SEQ ID NO: 46336 - DNA, 50 bp, synthetic construct
  source 1..50: mol_type = other DNA
gtatgcacctcgattaaaaggacggtgaagctgataatcaatcagcattt

SEQ ID NO: 46337 - DNA, 50 bp, synthetic construct
  source 1..50: mol_type = other DNA
gcggagaatgaataaggaggtgcagctcctccttcttggtgggggctttg

SEQ ID NO: 46338 - DNA, 50 bp, synthetic construct
  source 1..50: mol_type = other DNA
atggatttttggaggaggtatttgattatcattcctctcttaaagtattt

SEQ ID NO: 46339 - DNA, 50 bp, synthetic construct
  source 1..50: mol_type = other DNA
gtctatatatagttttacatatgtatacttatgggtaagaatatctatta

SEQ ID NO: 46340 - DNA, 50 bp, synthetic construct
  source 1..50: mol_type = other DNA
attgcacacataggttgtgatattataaactcaacctctatggtacaaaa

SEQ ID NO: 46341 - DNA, 50 bp, synthetic construct
  source 1..50: mol_type = other DNA
tatcatattcatatccataatcatcgatgttttgcgaggctaatatgaaa

SEQ ID NO: 46342 - DNA, 50 bp, synthetic construct
  source 1..50: mol_type = other DNA
gtgtaatggtagcacaggtgattctgcaattacctgtttagcattgtatg

SEQ ID NO: 46343 - DNA, 50 bp, synthetic construct
  source 1..50: mol_type = other DNA
catccttgcaacaaggatagtccagcaggaatccctctgttgcgccgagc

SEQ ID NO: 46344 - DNA, 50 bp, synthetic construct
  source 1..50: mol_type = other DNA
tgaaacatcagaaaataccgatgtatcgactaaatgtttgctgtgtttca

SEQ ID NO: 46345 - DNA, 50 bp, synthetic construct
  source 1..50: mol_type = other DNA
cgtttttcccagttttttcaacgcatgatgggaaataacgtaaaaaaatt

SEQ ID NO: 46346 - DNA, 50 bp, synthetic construct
  source 1..50: mol_type = other DNA
aaataatcatcgcgtgtcatctgtctacagatagcttattttgtcctgtt

SEQ ID NO: 46347 - DNA, 50 bp, synthetic construct
  source 1..50: mol_type = other DNA
cttctagcatattctttaataatttcgttaagagagtaatattttttatc

SEQ ID NO: 46348 - DNA, 50 bp, synthetic construct
  source 1..50: mol_type = other DNA
aaacctctcaaagtgcctaaaatcaaggctgtgattactttgccattttt

SEQ ID NO: 46349 - DNA, 50 bp, synthetic construct
  source 1..50: mol_type = other DNA
aaaaaaatacaatgatgaacagcagaagcttggtatctttgtatggatat

SEQ ID NO: 46350 - DNA, 50 bp, synthetic construct
  source 1..50: mol_type = other DNA
cgtaattcaagcctcggagaaacgtgagtttcggcggctgttggatgaaa

SEQ ID NO: 46351 - DNA, 50 bp, synthetic construct
  source 1..50: mol_type = other DNA
ctgaggtgcagttcccggtgctttttcctgcatgattaactgaaactcat

SEQ ID NO: 46352 - DNA, 50 bp, synthetic construct
  source 1..50: mol_type = other DNA
ttcacaaaagatcatagaatatatagataaaacttaattccttttgtgaa

SEQ ID NO: 46353 - DNA, 50 bp, synthetic construct
  source 1..50: mol_type = other DNA
cattttctgaaagccattgtctcgaagattttaatttcttgcaacaaacg

SEQ ID NO: 46354 - DNA, 50 bp, synthetic construct
  source 1..50: mol_type = other DNA
accgtctttagcaaatacacaccgaattgtgctgattgggcttggaaaag

SEQ ID NO: 46355 - DNA, 50 bp, synthetic construct
  source 1..50: mol_type = other DNA
ttttcttttgcaaaaatgttatctttcggaacgtattttgccaaaatctg

SEQ ID NO: 46356 - DNA, 50 bp, synthetic construct
  source 1..50: mol_type = other DNA
acgaggcgagcgatatccaccaggcctctgttatggttcggatggctcct

SEQ ID NO: 46357 - DNA, 50 bp, synthetic construct
  source 1..50: mol_type = other DNA
gccggacggagagacacacataaggtccgacaagagtcagcgaatccgcg

SEQ ID NO: 46358 - DNA, 50 bp, synthetic construct
  source 1..50: mol_type = other DNA
taataaaagcaggtcatacgacttgctattgatatagctaataattataa

SEQ ID NO: 46359 - DNA, 50 bp, synthetic construct
  source 1..50: mol_type = other DNA
cttagccttgccccttgccggggctttacctacaaagcgaacttgcttga

SEQ ID NO: 46360 - DNA, 50 bp, synthetic construct
  source 1..50: mol_type = other DNA
ttgtctctgctgccagagatgcattgatgcagtcctgtaaaaaagcagcg

SEQ ID NO: 46361 - DNA, 50 bp, synthetic construct
  source 1..50: mol_type = other DNA
tccgcaatctccgttaaatgaaaaatttttgagtgaacgcactcttcaaa

SEQ ID NO: 46362 - DNA, 50 bp, synthetic construct
  source 1..50: mol_type = other DNA
tggtgggaaaaataactgtcaaaatgttttctaacgtctttttcttgaag

SEQ ID NO: 46363 - DNA, 50 bp, synthetic construct
  source 1..50: mol_type = other DNA
gagaattatatcagtatctttcctcagatagagatacctatatgatactc

SEQ ID NO: 46364 - DNA, 50 bp, synthetic construct
  source 1..50: mol_type = other DNA
tctgacgacggcttcggccgccggcggaagcggcccttcggctaccggat

SEQ ID NO: 46365 - DNA, 50 bp, synthetic construct
  source 1..50: mol_type = other DNA
gtgagattcccgtgatgtgtgccaacaggcgacacccacgggaatcttga

SEQ ID NO: 46366 - DNA, 50 bp, synthetic construct
  source 1..50: mol_type = other DNA
tgtcaaagtgtacctcggaggaaattcatcctccaaatagggctttggca

SEQ ID NO: 46367 - DNA, 50 bp, synthetic construct
  source 1..50: mol_type = other DNA
agatacacggtattgatgaacacatcaggagcatcatatacggataacct

SEQ ID NO: 46368 - DNA, 50 bp, synthetic construct
  source 1..50: mol_type = other DNA
gaaactggacaccaaccaagatacgcgtcttgcggccggttctcagcttc

SEQ ID NO: 46369 - DNA, 50 bp, synthetic construct
  source 1..50: mol_type = other DNA
agggaggcaatgagtgagagaatcaagatttcatattcactcaaaatatc

SEQ ID NO: 46370 - DNA, 50 bp, synthetic construct
  source 1..50: mol_type = other DNA
gtacattattatccgaaaacgcttgaaattatttttgcgtgataagctaa

SEQ ID NO: 46371 - DNA, 50 bp, synthetic construct
  source 1..50: mol_type = other DNA
ttttcccagaacttgcaacggcttgcaaagtacgtccttaccccggaaaa

SEQ ID NO: 46372 - DNA, 50 bp, synthetic construct
  source 1..50: mol_type = other DNA
aattctggtacactattaagatgttctgatgaagagggtgttatggatgt

SEQ ID NO: 46373 - DNA, 50 bp, synthetic construct
  source 1..50: mol_type = other DNA
aagaggttcgcaccaaatcgcgacatatcgcgaagaagtgttatgacctg

SEQ ID NO: 46374 - DNA, 50 bp, synthetic construct
  source 1..50: mol_type = other DNA
gcggtgtttactgtttgattttattggtagcttcaaatcatacacgacat

SEQ ID NO: 46375 - DNA, 50 bp, synthetic construct
  source 1..50: mol_type = other DNA
gtagtcggcgaaatggagtggatctatatcaagtcaattccgccgtataa

SEQ ID NO: 46376 - DNA, 50 bp, synthetic construct
  source 1..50: mol_type = other DNA
cggtttgtcactattgatcatcgggccgcccaaaacggcggagcaaatca

SEQ ID NO: 46377 - DNA, 50 bp, synthetic construct
  source 1..50: mol_type = other DNA
gtgatggagagaaaggggacggagagtttcttcttccagttctggttcat

SEQ ID NO: 46378 - DNA, 50 bp, synthetic construct
  source 1..50: mol_type = other DNA
gaggatgtgaagggccgtggaatgtacatggcaacgccgctgtcctgcaa

SEQ ID NO: 46379 - DNA, 50 bp, synthetic construct
  source 1..50: mol_type = other DNA
ggtcttttcagaacagatcgagggcaatctgcatccgcactggctgatcc

SEQ ID NO: 46380 - DNA, 50 bp, synthetic construct
  source 1..50: mol_type = other DNA
tccgggggctttttccagcgcggtcaagcgcgctaccaaaactgcgctac

SEQ ID NO: 46381 - DNA, 50 bp, synthetic construct
  source 1..50: mol_type = other DNA
ttcacgacctatttcggcgcccgggcctcccagcgtgaaactatctggag

SEQ ID NO: 46382 - DNA, 50 bp, synthetic construct
  source 1..50: mol_type = other DNA
gttatgggcgtaacctttaaggaaacccgctttacggcgacgccgatcac

SEQ ID NO: 46383 - DNA, 50 bp, synthetic construct
  source 1..50: mol_type = other DNA
aagaaaggcataaaaaattctcggcaaatattcttttctgggccttaaga

SEQ ID NO: 46384 - DNA, 50 bp, synthetic construct
  source 1..50: mol_type = other DNA
gaacagcagggagcgttttagggaaatccttataacgcttcatgctgtga

SEQ ID NO: 46385 - DNA, 50 bp, synthetic construct
  source 1..50: mol_type = other DNA
gaccggcagcgcagggaaattttcgtccagctttcagctcgtgaacggtc

SEQ ID NO: 46386 - DNA, 50 bp, synthetic construct
  source 1..50: mol_type = other DNA
acgggcgtaagcagcaactcgcagttgttccggtgtgaggttgacccagt

SEQ ID NO: 46387 - DNA, 50 bp, synthetic construct
  source 1..50: mol_type = other DNA
aatgcccatgagaccgataagctgtcttgtataccaaattgcagggcatt

SEQ ID NO: 46388 - DNA, 50 bp, synthetic construct
  source 1..50: mol_type = other DNA
ggtctatttttatgcccattctaaaattttgacggcataaaaacgagaaa

SEQ ID NO: 46389 - DNA, 50 bp, synthetic construct
  source 1..50: mol_type = other DNA
gccttcgtcagcttggaaccggcagccgtacgttccaagcccgcgatgcg

SEQ ID NO: 46390 - DNA, 50 bp, synthetic construct
  source 1..50: mol_type = other DNA
attcttcctctggaaactcataaagcctgttgactccgataaggacggca

SEQ ID NO: 46391 - DNA, 50 bp, synthetic construct
  source 1..50: mol_type = other DNA
tggtgcaaatttcacactttacgctttcacaaagttatgggcgctggatt

SEQ ID NO: 46392 - DNA, 50 bp, synthetic construct
  source 1..50: mol_type = other DNA
cacggcagaactcaacgcagagctgctccagcgcgcggacgcctgcaatc

SEQ ID NO: 46393 - DNA, 50 bp, synthetic construct
  source 1..50: mol_type = other DNA
atcaaaagagtggacttgtcaactgagattcgaactcccccttttgcgat

SEQ ID NO: 46394 - DNA, 50 bp, synthetic construct
  source 1..50: mol_type = other DNA
tgcatccgtgacgtggatgtggaaaagatcagctccacagctttgaagca

SEQ ID NO: 46395 - DNA, 50 bp, synthetic construct
  source 1..50: mol_type = other DNA
gaagacgaggcgtatgcggacagcatccgttcagcatcgtcctgttccgg

SEQ ID NO: 46396 - DNA, 50 bp, synthetic construct
  source 1..50: mol_type = other DNA
ggcggggctggacagcgtgtatgtggcgacatcttgaatccaggtgagtc

SEQ ID NO: 46397 - DNA, 50 bp, synthetic construct
  source 1..50: mol_type = other DNA
caaggctgaaaacggcgaaaagcccgggatattccataggaacgtccgac

SEQ ID NO: 46398 - DNA, 50 bp, synthetic construct
  source 1..50: mol_type = other DNA
tcttgttgacaatgggaattccgaactgctgcatcccatattcatccttg

SEQ ID NO: 46399 - DNA, 50 bp, synthetic construct
  source 1..50: mol_type = other DNA
tttcgtattctgggcgacagccctgttacaccgtttcccggaatatgcat

SEQ ID NO: 46400 - DNA, 50 bp, synthetic construct
  source 1..50: mol_type = other DNA
tcagggtggcttcctataacatcagtgcgaattaaactaaagatgtaaga

SEQ ID NO: 46401 - DNA, 50 bp, synthetic construct
  source 1..50: mol_type = other DNA
ccgccaacgggcgcgtgaactggcgcatgggcgcaagcgcacgttgttta

SEQ ID NO: 46402 - DNA, 50 bp, synthetic construct
  source 1..50: mol_type = other DNA
tctgtataagtgacgagttccgaatatattaacatcttataaattacagt

SEQ ID NO: 46403 - DNA, 50 bp, synthetic construct
  source 1..50: mol_type = other DNA
tatcgtgctttcaaagctgcttgccggcgcgcggcgctgcaaatgccgga

SEQ ID NO: 46404 - DNA, 50 bp, synthetic construct
  source 1..50: mol_type = other DNA
aatgttcggaattttttgatttttgctaaaaccaattcaaacagatgaaa

SEQ ID NO: 46405 - DNA, 50 bp, synthetic construct
  source 1..50: mol_type = other DNA
cggtgaaatctcttgactttatgctcgcaaaaaatcaagagatttgtata

SEQ ID NO: 46406 - DNA, 50 bp, synthetic construct
  source 1..50: mol_type = other DNA
ggcagaaagctttagaaaggaaaacattatcctttttaatattttcgttt

SEQ ID NO: 46407 - DNA, 50 bp, synthetic construct
  source 1..50: mol_type = other DNA
agtgttcttacaggacttgaaaggtttctgccaagtcttgaaaggtcttt

SEQ ID NO: 46408 - DNA, 50 bp, synthetic construct
  source 1..50: mol_type = other DNA
tctattcccagcagagcaactttgattcgttatcttcgtttcggaagcga

SEQ ID NO: 46409 - DNA, 50 bp, synthetic construct
  source 1..50: mol_type = other DNA
ccggcggctgattcccagtgccttgccttgtcctagggaacaaatccacg

SEQ ID NO: 46410 - DNA, 50 bp, synthetic construct
  source 1..50: mol_type = other DNA
taaacctacctttccacgacggcaacggctttaaggcaaaggtgggcgag

SEQ ID NO: 46411 - DNA, 50 bp, synthetic construct
  source 1..50: mol_type = other DNA
gtggaaaaaagatgtttattgctttgaagatgtaaacatttttatgcttt

SEQ ID NO: 46412 - DNA, 50 bp, synthetic construct
  source 1..50: mol_type = other DNA
aatcacggatggcttgaatgtatccggtcacagtcattccaccgaccatt

SEQ ID NO: 46413 - DNA, 50 bp, synthetic construct
  source 1..50: mol_type = other DNA
ggcttgaatgtatccgcttttgccgcaccacaagtcgataccttctgccc

SEQ ID NO: 46414 - DNA, 50 bp, synthetic construct
  source 1..50: mol_type = other DNA
tgcaaaccgctggaagttgccgtgggtacgatgacatcatcgccgggccg

SEQ ID NO: 46415 - DNA, 50 bp, synthetic construct
  source 1..50: mol_type = other DNA
catattggttcaccttcttttggctattgaaaagagtgcgatttcagaaa

SEQ ID NO: 46416 - DNA, 50 bp, synthetic construct
  source 1..50: mol_type = other DNA
catacattccggcattttgttattataatataataagtgcagacggtatg

SEQ ID NO: 46417 - DNA, 50 bp, synthetic construct
  source 1..50: mol_type = other DNA
taccttctatctgaagctgtgcgaattcgcagggcttccttatagacgct

SEQ ID NO: 46418 - DNA, 50 bp, synthetic construct
  source 1..50: mol_type = other DNA
tttatactctttttttgggaggtgagcaacattcaaaacatgtttataaa

SEQ ID NO: 46419 - DNA, 50 bp, synthetic construct
  source 1..50: mol_type = other DNA
gaattggcttcaagcgcgtctttatataaatcgtccaaaacaaagcaatc

SEQ ID NO: 46420 - DNA, 50 bp, synthetic construct
  source 1..50: mol_type = other DNA
ggcctgccgccggatttgatccatccggcgctgggccggggcggtttgat

SEQ ID NO: 46421 - DNA, 50 bp, synthetic construct
  source 1..50: mol_type = other DNA
tctatttgtccataaaaatagccgccctggttccggtatgtggacggaga

SEQ ID NO: 46422 - DNA, 50 bp, synthetic construct
  source 1..50: mol_type = other DNA
gaccgacaaccttccccaggaagtgattttccagaccggacaggtcgata

SEQ ID NO: 46423 - DNA, 50 bp, synthetic construct
  source 1..50: mol_type = other DNA
ctttgcagccaatgcatcctgtgctttctttccttggcataaactgaaaa

SEQ ID NO: 46424 - DNA, 50 bp, synthetic construct
  source 1..50: mol_type = other DNA
tcatatccatccacataacccagaccactgggcaatgtgccgggattcag

SEQ ID NO: 46425 - DNA, 50 bp, synthetic construct
  source 1..50: mol_type = other DNA
ggcggtggcagaaagtcagaaagtcgaagcggagagtgtctgccggcggt

SEQ ID NO: 46426 - DNA, 50 bp, synthetic construct
  source 1..50: mol_type = other DNA
gatttttctatttttcatattccataacaaaatgaaaacctggatcaata

SEQ ID NO: 46427 - DNA, 50 bp, synthetic construct
  source 1..50: mol_type = other DNA
caggctccaatagaggtaactgagggccttctttgctataatatagggtg

SEQ ID NO: 46428 - DNA, 50 bp, synthetic construct
  source 1..50: mol_type = other DNA
cgcaagaaggacctgcagctcgccgcggcgaacgattgtggcttcatcag

SEQ ID NO: 46429 - DNA, 50 bp, synthetic construct
  source 1..50: mol_type = other DNA
ccgaggaaaatgatactatggcagcatgagaatcatatcagtttcctcca

SEQ ID NO: 46430 - DNA, 50 bp, synthetic construct
  source 1..50: mol_type = other DNA
gcgggcgaggcggcaatagaccgccaccggtctggaaagaagccgcgcgt

SEQ ID NO: 46431 - DNA, 50 bp, synthetic construct
  source 1..50: mol_type = other DNA
ttcaaattcttttttctcgatatggccaccctgaaaagaaaggcttttca

SEQ ID NO: 46432 - DNA, 50 bp, synthetic construct
  source 1..50: mol_type = other DNA
ccaccaatagcatttaggcttggcagcgcaacttcaaaggcttttgttgg

SEQ ID NO: 46433 - DNA, 50 bp, synthetic construct
  source 1..50: mol_type = other DNA
accatcataaagggatggggagagatcacaaacaaggtgtttgagatggt

SEQ ID NO: 46434 - DNA, 50 bp, synthetic construct
  source 1..50: mol_type = other DNA
tcgatgcaccgtccatcttgtcaatcttgtttctactaactatgcaccgc

SEQ ID NO: 46435 - DNA, 50 bp, synthetic construct
  source 1..50: mol_type = other DNA
gtgaactgttggagcagatggttcgtgaaactactcaacccgaggcgcat

SEQ ID NO: 46436 - DNA, 50 bp, synthetic construct
  source 1..50: mol_type = other DNA
tcattaatgaatgggaagcaaagatctctccccatccctttatgatggtg

SEQ ID NO: 46437 - DNA, 50 bp, synthetic construct
  source 1..50: mol_type = other DNA
gaatgggaagcaaagatcgtaaaactttcacctttctttccttggcataa

SEQ ID NO: 46438 - DNA, 50 bp, synthetic construct
  source 1..50: mol_type = other DNA
gttttcggcgctttattatcggatatctccgcgaaagaagcgcagagcga

SEQ ID NO: 46439 - DNA, 50 bp, synthetic construct
  source 1..50: mol_type = other DNA
aatattagggctgtgaaaagccaatgattgtggatgccagcccggtggat

SEQ ID NO: 46440 - DNA, 50 bp, synthetic construct
  source 1..50: mol_type = other DNA
ttattctccgaaatctgttgactttacagcaacttgattttgaacgaaaa

SEQ ID NO: 46441 - DNA, 50 bp, synthetic construct
  source 1..50: mol_type = other DNA
tgctacggcgctgacgatgttcaggaaggaacaccggcccggcctttaca

SEQ ID NO: 46442 - DNA, 50 bp, synthetic construct
  source 1..50: mol_type = other DNA
agggaaaagtagaaatctgcggtgtcaacagcatatggatgctataatct

SEQ ID NO: 46443 - DNA, 50 bp, synthetic construct
  source 1..50: mol_type = other DNA
actcacgggagcagcgggtgacgctatccagaatagaggcggtcttggcc

SEQ ID NO: 46444 - DNA, 50 bp, synthetic construct
  source 1..50: mol_type = other DNA
aggaatcctgtaagagaaattgatttatccgacagtcaaacaggcaatgc

SEQ ID NO: 46445 - DNA, 50 bp, synthetic construct
  source 1..50: mol_type = other DNA
agcggaatcatgtttcttggttttgggcagcttttgaacagttccacagt

SEQ ID NO: 46446 - DNA, 50 bp, synthetic construct
  source 1..50: mol_type = other DNA
aattatgcccaaaattccttgatatataatcaggaaacaaatgcactcct

SEQ ID NO: 46447 - DNA, 50 bp, synthetic construct
  source 1..50: mol_type = other DNA
atcatctacggattttctcagactacggcgaaggaaaatatcgagatgaa

SEQ ID NO: 46448 - DNA, 50 bp, synthetic construct
  source 1..50: mol_type = other DNA
tgttgaaaaaattgaatgccgttaaataacaacacagaatcacttcaaca

SEQ ID NO: 46449 - DNA, 50 bp, synthetic construct
  source 1..50: mol_type = other DNA
tctcatccagtttttattctagttttctttcaagtaaaaaagagacccct

SEQ ID NO: 46450 - DNA, 50 bp, synthetic construct
  source 1..50: mol_type = other DNA
acttggccggaggacacgatacgtgcagcagttttggaacgtagctcagt

SEQ ID NO: 46451 - DNA, 50 bp, synthetic construct
  source 1..50: mol_type = other DNA
gtcgccaatgcttcggtagggaggcagctcaaggcagaaaacgaggccct

SEQ ID NO: 46452 - DNA, 50 bp, synthetic construct
  source 1..50: mol_type = other DNA
aatttatccagtgtcacggagcctttgctgatgaaaacactgacctcaag

SEQ ID NO: 46453 - DNA, 50 bp, synthetic construct
  source 1..50: mol_type = other DNA
gcaaaaaataaaggcccggagtgcagaaatagcggccatttctttttttg

SEQ ID NO: 46454 - DNA, 50 bp, synthetic construct
  source 1..50: mol_type = other DNA
aaatagctatttcatcaatgcaaattctgtaattgaataaattgctgtta

SEQ ID NO: 46455 - DNA, 50 bp, synthetic construct
  source 1..50: mol_type = other DNA
cgccatgttgcggcccaggttgcgcagcagcagagcgccggaacacgcgc

SEQ ID NO: 46456 - DNA, 50 bp, synthetic construct
  source 1..50: mol_type = other DNA
acattctctccatttttagccgagattttgaccaaatctcaagagaatgc

SEQ ID NO: 46457 - DNA, 50 bp, synthetic construct
  source 1..50: mol_type = other DNA
tcaatatatttactcccatgccagcctttctctgaatataaatatctttt

SEQ ID NO: 46458 - DNA, 50 bp, synthetic construct
  source 1..50: mol_type = other DNA
agtcgtttcttccttcccctgttctcctttctctttgggtagtctatata

SEQ ID NO: 46459 - DNA, 50 bp, synthetic construct
  source 1..50: mol_type = other DNA
cgaccctgcctgttcgcagtacaaggctgttgttgacgaaggcactgccg

SEQ ID NO: 46460 - DNA, 50 bp, synthetic construct
  source 1..50: mol_type = other DNA
agaagaaaatttatgaaaatcaatgcatacatcatcatatatcttttttg

SEQ ID NO: 46461 - DNA, 50 bp, synthetic construct
  source 1..50: mol_type = other DNA
atgagcctacgggtagtgttcaattaacttaacacagcccaccggagcac

SEQ ID NO: 46462 - DNA, 50 bp, synthetic construct
  source 1..50: mol_type = other DNA
cctaaatgacttgctatttgcaggtgaaaacaaacgaagagtctattagc

SEQ ID NO: 46463 - DNA, 50 bp, synthetic construct
  source 1..50: mol_type = other DNA
ctaccaactttaccatacctacagtggtgcaatgatggacatcttgacca

SEQ ID NO: 46464 - DNA, 50 bp, synthetic construct
  source 1..50: mol_type = other DNA
accataagatgcacagggaacattatgcgtttccttgtgcctcttaatat

SEQ ID NO: 46465 - DNA, 50 bp, synthetic construct
  source 1..50: mol_type = other DNA
caagattttatgctcttttccgagcactgtaggacgacttcaaaatcttt

SEQ ID NO: 46466 - DNA, 50 bp, synthetic construct
  source 1..50: mol_type = other DNA
ttctctccgtttttagccgagattatttatgaatgtataaatcaccagat

SEQ ID NO: 46467 - DNA, 50 bp, synthetic construct
  source 1..50: mol_type = other DNA
gcataaactcccacagaagaaagctgatctccctctgaagggcatcatat

SEQ ID NO: 46468 - DNA, 50 bp, synthetic construct
  source 1..50: mol_type = other DNA
atggtcattgatgtacttcgtataattgtattggcttcatccgtctgcat

SEQ ID NO: 46469 - DNA, 50 bp, synthetic construct
  source 1..50: mol_type = other DNA
ttttgttcccgacattcatgccggtataagcaagaatagtgccgaaaaaa

SEQ ID NO: 46470 - DNA, 50 bp, synthetic construct
  source 1..50: mol_type = other DNA
cttgtggtgcgccacaaatccgacggcacctccttctttgccagcacctc

SEQ ID NO: 46471 - DNA, 50 bp, synthetic construct
  source 1..50: mol_type = other DNA
gcaccatgagtaataccgggatatatagtcctttatatatccagtgttat

SEQ ID NO: 46472 - DNA, 50 bp, synthetic construct
  source 1..50: mol_type = other DNA
atgtgtataagagacaggtatgcggacgcagaaacgcctctgaaccacat

SEQ ID NO: 46473 - DNA, 50 bp, synthetic construct
  source 1..50: mol_type = other DNA
atcctgacagaagaagaatttgctgcatgggagaccagaacagcgtcgaa

SEQ ID NO: 46474 - DNA, 50 bp, synthetic construct
  source 1..50: mol_type = other DNA
ttaccaccgaaaggcggtaaagtcaagcggttatcgctcacagctcaatt

SEQ ID NO: 46475 - DNA, 50 bp, synthetic construct
  source 1..50: mol_type = other DNA
tcaactgctcctcgctgtctgtgctgctgtgggtggtgtacagcacggag

SEQ ID NO: 46476 - DNA, 50 bp, synthetic construct
  source 1..50: mol_type = other DNA
aacaaaatgaaaaattaagaatacagatattctgcctgtttcataggatt

SEQ ID NO: 46477 - DNA, 50 bp, synthetic construct
  source 1..50: mol_type = other DNA
aacgtgataaatgcggcacattttacaaatgatgccgaatctactccgtc

SEQ ID NO: 46478 - DNA, 50 bp, synthetic construct
  source 1..50: mol_type = other DNA
agcaaattataattaaataaagtaaataaaatatataattataattatat

SEQ ID NO: 46479 - DNA, 50 bp, synthetic construct
  source 1..50: mol_type = other DNA
gccccgcccctgatgtgcatatcatctgatttttttccggcgggcggggc

SEQ ID NO: 46480 - DNA, 50 bp, synthetic construct
  source 1..50: mol_type = other DNA
caccgaaaagcaattgccatagaacggtggatcgttctttcaaaacggtg

SEQ ID NO: 46481 - DNA, 50 bp, synthetic construct
  source 1..50: mol_type = other DNA
agctccctgaaaatgtcaaggagtgaactgcttgatgttttgtatgagaa

SEQ ID NO: 46482 - DNA, 50 bp, synthetic construct
  source 1..50: mol_type = other DNA
taaaaaaggagcaaaaaccattaatttttatggtgtttgcaatcttttta

SEQ ID NO: 46483 - DNA, 50 bp, synthetic construct
  source 1..50: mol_type = other DNA
aagaaaacacctgctgagcaatttcacaactgccgcaacgatgtttacta

SEQ ID NO: 46484 - DNA, 50 bp, synthetic construct
  source 1..50: mol_type = other DNA
gcgattattgctcggcggccagggtatcttgaatatacaacaataatcgt

SEQ ID NO: 46485 - DNA, 50 bp, synthetic construct
  source 1..50: mol_type = other DNA
agcgcttcctgaaggtgcatcttgcgctataggccgttttgtcaagcgct

SEQ ID NO: 46486 - DNA, 50 bp, synthetic construct
  source 1..50: mol_type = other DNA
gttactctgcttttagttttctaatatttaaaaagacaattacgatcaca

SEQ ID NO: 46487 - DNA, 50 bp, synthetic construct
  source 1..50: mol_type = other DNA
catatgggagaattttttcataatcctccataaaatcattttttgctgtg

SEQ ID NO: 46488 - DNA, 50 bp, synthetic construct
  source 1..50: mol_type = other DNA
tatcttataaccaaatggtgtatggcctaccgccagcaggttgatagatt

SEQ ID NO: 46489 - DNA, 50 bp, synthetic construct
  source 1..50: mol_type = other DNA
cacttcgcacagatcacaagccctgcgaggtcatttttctatgctgggtg

SEQ ID NO: 46490 - DNA, 50 bp, synthetic construct
  source 1..50: mol_type = other DNA
cgctcctccgaccaagaaagcgcgtgtgctgctcgttggatgcgggcgcc

SEQ ID NO: 46491 - DNA, 50 bp, synthetic construct
  source 1..50: mol_type = other DNA
ggaatcatgaaaataaatcattgggcttgctgatagcggctcatgtgcct

SEQ ID NO: 46492 - DNA, 50 bp, synthetic construct
  source 1..50: mol_type = other DNA
gaaaaatattgcgaattttgaagaagtgcctgtcgttatgcgattttttt

SEQ ID NO: 46493 - DNA, 50 bp, synthetic construct
  source 1..50: mol_type = other DNA
atgtattatattataacatttcggccccattgcttccatatatttcaacg

SEQ ID NO: 46494 - DNA, 50 bp, synthetic construct
  source 1..50: mol_type = other DNA
gcggctcttgtatctcaatttaataaattcaagcccctgtgagcagcagg

SEQ ID NO: 46495 - DNA, 50 bp, synthetic construct
  source 1..50: mol_type = other DNA
ggctttcacctttcacaaaatcctcaactggccgaagaaaacaaaaagct

SEQ ID NO: 46496 - DNA, 50 bp, synthetic construct
  source 1..50: mol_type = other DNA
tttctaatttcttctttacgattcctgaatcattgcaataacattatcaa

SEQ ID NO: 46497 - DNA, 50 bp, synthetic construct
  source 1..50: mol_type = other DNA
attttcttcgaaaccaagatctagataagcattttgtcttcgataaagat

SEQ ID NO: 46498 - DNA, 50 bp, synthetic construct
  source 1..50: mol_type = other DNA
ttcttctccttcagttcccggatataatccgggccagataaggagaaaaa

SEQ ID NO: 46499 - DNA, 50 bp, synthetic construct
  source 1..50: mol_type = other DNA
tcgtgcatgtcaaaaactaagactgtttacttcacacccgacaagcacga

SEQ ID NO: 46500 - DNA, 50 bp, synthetic construct
  source 1..50: mol_type = other DNA
aatactttcaaaaagatttcgcccatggtctttttctgttctcatttatc

SEQ ID NO: 46501 - DNA, 50 bp, synthetic construct
  source 1..50: mol_type = other DNA
gaaaggaaaacattatggaacttaaactcttttcatatccttttgttttt

SEQ ID NO: 46502 - DNA, 50 bp, synthetic construct
  source 1..50: mol_type = other DNA
ctcctttggagacgcgatgttcatccatgacgttgatagtgtgaaacggt

SEQ ID NO: 46503 - DNA, 50 bp, synthetic construct
  source 1..50: mol_type = other DNA
tgttagattgtgtgctttcttttaatatccttaaacttaaacatcaccgt

SEQ ID NO: 46504 - DNA, 50 bp, synthetic construct
  source 1..50: mol_type = other DNA
aaactactacgagtttctccagtagctccccaataaacggatgatatttc

SEQ ID NO: 46505 - DNA, 50 bp, synthetic construct
  source 1..50: mol_type = other DNA
atccatctccatctccaaaaaccaacggcgatctggtcatccaggaggag

SEQ ID NO: 46506 - DNA, 50 bp, synthetic construct
  source 1..50: mol_type = other DNA
aaatcgttgatggtaagaatcttgcaggaacacatgaccaaggaggattt

SEQ ID NO: 46507 - DNA, 50 bp, synthetic construct
  source 1..50: mol_type = other DNA
caacctgtgaaatcattgtatatagctttagcctcttatcacttgcctta

SEQ ID NO: 46508 - DNA, 50 bp, synthetic construct
  source 1..50: mol_type = other DNA
tccatgtgtgccagctctttatcccggctaaaagaggtaagatgcatggc

SEQ ID NO: 46509 - DNA, 50 bp, synthetic construct
  source 1..50: mol_type = other DNA
cttttccctttaaccattctactgttcagacgaaacttggtgggggaaag

SEQ ID NO: 46510 - DNA, 50 bp, synthetic construct
  source 1..50: mol_type = other DNA
attcgatatttatattgatgacggatccgtcgtctacgaaaaagcgcgtg

SEQ ID NO: 46511 - DNA, 50 bp, synthetic construct
  source 1..50: mol_type = other DNA
ctaatggaatatggtaagttcctgatttgttttctaacataattaagctc

SEQ ID NO: 46512 - DNA, 50 bp, synthetic construct
  source 1..50: mol_type = other DNA
aattatcataaatttatagattatcgactatttataaatatacatatcgc

SEQ ID NO: 46513 - DNA, 50 bp, synthetic construct
  source 1..50: mol_type = other DNA
ttattaatgaaggggaagcaaagatctctccccatccctttatgatgata

SEQ ID NO: 46514 - DNA, 50 bp, synthetic construct
  source 1..50: mol_type = other DNA
agttctgacgatttttatgtcgaaaatctaacataacatttaagggaaca

SEQ ID NO: 46515 - DNA, 50 bp, synthetic construct
  source 1..50: mol_type = other DNA
taccatcataaagggatggggagagatctttgcttccccttcattaataa

SEQ ID NO: 46516 - DNA, 50 bp, synthetic construct
  source 1..50: mol_type = other DNA
tgtcctgcctctcggacgcttcccatggtaatggtcgcaatggggtttgc

SEQ ID NO: 46517 - DNA, 50 bp, synthetic construct
  source 1..50: mol_type = other DNA
gtattgtataaaaacacaggtggaaaaccaagttagttattatactgctt

SEQ ID NO: 46518 - DNA, 50 bp, synthetic construct
  source 1..50: mol_type = other DNA
tatgaaattgacaatcgaactaatgtagaaactcggttaaaaattacata

SEQ ID NO: 46519 - DNA, 50 bp, synthetic construct
  source 1..50: mol_type = other DNA
tgcagtccatgcacggcgctctcccggacgcataacgtgcatccgggcag

SEQ ID NO: 46520 - DNA, 50 bp, synthetic construct
  source 1..50: mol_type = other DNA
cattgaaaaatgacgaatgtttcaatataatcacctttgacttttaaatc

SEQ ID NO: 46521 - DNA, 50 bp, synthetic construct
  source 1..50: mol_type = other DNA
ggcaatctctttacatcaggcaatatagtatcccagctcacaacaggcga

SEQ ID NO: 46522 - DNA, 50 bp, synthetic construct
  source 1..50: mol_type = other DNA
tgttcctgtcacttatagcgccgttgacgctggacaaactcacggcaaaa

SEQ ID NO: 46523 - DNA, 50 bp, synthetic construct
  source 1..50: mol_type = other DNA
tggcaaacaaaaagccccttggggcgttcccgtgcgctttgagttccgct

SEQ ID NO: 46524 - DNA, 50 bp, synthetic construct
  source 1..50: mol_type = other DNA
gggcgggacaaattttttagcctacataactctaaaaatttgttaaaata

SEQ ID NO: 46525 - DNA, 50 bp, synthetic construct
  source 1..50: mol_type = other DNA
accaacggacacggcggcaatacggcggaattgtcgcctttcccaccgaa

SEQ ID NO: 46526 - DNA, 50 bp, synthetic construct
  source 1..50: mol_type = other DNA
gattttgtttcacttgcttttctaatccaaaattaaattgaaagaaattc

SEQ ID NO: 46527 - DNA, 50 bp, synthetic construct
  source 1..50: mol_type = other DNA
ggacaagcggcatctggaattaccgtcatcttcccagataaagtttacgt

SEQ ID NO: 46528 - DNA, 50 bp, synthetic construct
  source 1..50: mol_type = other DNA
aaaatccggagatttatcgacagccgggtagcggcttatgcccgtgtctc

SEQ ID NO: 46529 - DNA, 50 bp, synthetic construct
  source 1..50: mol_type = other DNA
tatagcacatggaccataaaaagacatttatttgtggatcgtttgttctg

SEQ ID NO: 46530 - DNA, 50 bp, synthetic construct
  source 1..50: mol_type = other DNA
tgaccttgaatatcacaaagctcgtactttcaggaagataataaatcttt

SEQ ID NO: 46531 - DNA, 50 bp, synthetic construct
  source 1..50: mol_type = other DNA
aaaatgcaataaaaacttgcaaaaagtttgtcaagtttttggtccatatt

SEQ ID NO: 46532 - DNA, 50 bp, synthetic construct
  source 1..50: mol_type = other DNA
gagtgctatgcaacggagctggatgattccggcttgacagcgatgcgagt

SEQ ID NO: 46533 - DNA, 50 bp, synthetic construct
  source 1..50: mol_type = other DNA
cataaagccgatgtcggcagttccggtgaagatgatacattcagtgtatg

SEQ ID NO: 46534 - DNA, 50 bp, synthetic construct
  source 1..50: mol_type = other DNA
ggcagcctatttttgcttgatttttggaaatgaagcaaaaatggtctgtc

SEQ ID NO: 46535 - DNA, 50 bp, synthetic construct
  source 1..50: mol_type = other DNA
gtagttctcaatatagtcaatattaaaatatttgattcgttccaaatcaa

SEQ ID NO: 46536 - DNA, 50 bp, synthetic construct
  source 1..50: mol_type = other DNA
caggatttggggcagtataattagtactaagtgtttagccccatttggag

SEQ ID NO: 46537 - DNA, 50 bp, synthetic construct
  source 1..50: mol_type = other DNA
tctatgttaatcctctttttttcttcccaattaaagatgattttttccac

SEQ ID NO: 46538 - DNA, 50 bp, synthetic construct
  source 1..50: mol_type = other DNA
gctgccgatgagaatggaagattaaaagaaatagcccctccacggggcta

SEQ ID NO: 46539 - DNA, 50 bp, synthetic construct
  source 1..50: mol_type = other DNA
tgttaaaaatcccgacatattattataataaaaagtttcgatgattatca

SEQ ID NO: 46540 - DNA, 50 bp, synthetic construct
  source 1..50: mol_type = other DNA
ttcttgcaggacagcggcgttgccgtggcgtagccgccatccttgatgat

SEQ ID NO: 46541 - DNA, 50 bp, synthetic construct
  source 1..50: mol_type = other DNA
acctctcaatcattttatcatattcgaatcggatacctcgattgatgtga

SEQ ID NO: 46542 - DNA, 50 bp, synthetic construct
  source 1..50: mol_type = other DNA
atcgtcagcaatacagaacgaaactgcggcagggcaggttcggagattat

SEQ ID NO: 46543 - DNA, 50 bp, synthetic construct
  source 1..50: mol_type = other DNA
tgctgactcttggatgttttgggatctattgtaaccagtgggaatatcca

SEQ ID NO: 46544 - DNA, 50 bp, synthetic construct
  source 1..50: mol_type = other DNA
actgcggagtagatgattaccatgcgcagcatctcccggtgttccgcaga

SEQ ID NO: 46545 - DNA, 50 bp, synthetic construct
  source 1..50: mol_type = other DNA
cctcgttgttagtgttatttttattatgctattcatcactctgaacggct

SEQ ID NO: 46546 - DNA, 50 bp, synthetic construct
  source 1..50: mol_type = other DNA
tctatcactgccttgccattctcgatatcaatcgataaggttttcataga

SEQ ID NO: 46547 - DNA, 50 bp, synthetic construct
  source 1..50: mol_type = other DNA
cctaccctatcaagtatgccctctgcatattatctacttgccctactaat

SEQ ID NO: 46548 - DNA, 50 bp, synthetic construct
  source 1..50: mol_type = other DNA
gaggattttttggctcaaaaatataattgagtttggtccaaaaaatgctc

SEQ ID NO: 46549 - DNA, 50 bp, synthetic construct
  source 1..50: mol_type = other DNA
gcaatatcgaagaaaggaaggcaagcttgccatttcgcaaggaattgagt

SEQ ID NO: 46550 - DNA, 50 bp, synthetic construct
  source 1..50: mol_type = other DNA
tttacgggcggtatttttgcgcccatgaaaaaatacaatgtaaccgtaaa

SEQ ID NO: 46551 - DNA, 50 bp, synthetic construct
  source 1..50: mol_type = other DNA
gagagtataataatcattctttgtgcgacaacaaatattatacgcatctt

SEQ ID NO: 46552 - DNA, 50 bp, synthetic construct
  source 1..50: mol_type = other DNA
catagaattaatttgagaggaaatatacacaacctttctatttttctaaa

SEQ ID NO: 46553 - DNA, 50 bp, synthetic construct
  source 1..50: mol_type = other DNA
ttcgcagatgaatcaacaatgaattttttgattcgctctacaattgctct

SEQ ID NO: 46554 - DNA, 50 bp, synthetic construct
  source 1..50: mol_type = other DNA
ctcttcaaaaaagcttctgacctgttcagttcagaaaattagttgtattc

SEQ ID NO: 46555 - DNA, 50 bp, synthetic construct
  source 1..50: mol_type = other DNA
attgtggtcttttttctgtcagtaacgcacgggtttcaacagaccacgat

SEQ ID NO: 46556 - DNA, 50 bp, synthetic construct
  source 1..50: mol_type = other DNA
acggtctaatggaaaagtgacattataatccaacctttccagcatatcgt

SEQ ID NO: 46557 - DNA, 50 bp, synthetic construct
  source 1..50: mol_type = other DNA
gaatgtcgagatattaccgaaaatacgttccggtctgatgacggacagcg

SEQ ID NO: 46558 - DNA, 50 bp, synthetic construct
  source 1..50: mol_type = other DNA
acttgctattattggctttcagagtgggggcacagggagaaataggaagc

SEQ ID NO: 46559 - DNA, 50 bp, synthetic construct
  source 1..50: mol_type = other DNA
tcggttaccgcaaccattgtagcaggagctctctacgtggcggaaatcgg

SEQ ID NO: 46560 - DNA, 50 bp, synthetic construct
  source 1..50: mol_type = other DNA
acgaattgtttaacaatgtttctaaagagaaatatcatatatggattcga

SEQ ID NO: 46561 - DNA, 50 bp, synthetic construct
  source 1..50: mol_type = other DNA
ataaaatgtcacccgcaagtctcatttgaaactttcaaagactccatttc

SEQ ID NO: 46562 - DNA, 50 bp, synthetic construct
  source 1..50: mol_type = other DNA
ttagaaaaggagtgagacaatggctgtacatgatcagcctccgctttgat

SEQ ID NO: 46563 - DNA, 50 bp, synthetic construct
  source 1..50: mol_type = other DNA
tttggggataacttcttagtacaattttgtactaaaaggttaactccgtt

SEQ ID NO: 46564 - DNA, 50 bp, synthetic construct
  source 1..50: mol_type = other DNA
cattaacattttcgctaaggtcttttaacaccttttaagaaataaaaatg

SEQ ID NO: 46565 - DNA, 50 bp, synthetic construct
  source 1..50: mol_type = other DNA
gtacttatatcgaagacggttccttaaagaacaagcgtcgatgggattaa

SEQ ID NO: 46566 - DNA, 50 bp, synthetic construct
  source 1..50: mol_type = other DNA
tatccggaactgacacccgaaaacgctttcatcctgtaggaatcaggaca

SEQ ID NO: 46567 - DNA, 50 bp, synthetic construct
  source 1..50: mol_type = other DNA
gattatgggctaaatgacttgataattccaaaatttctgataggggggtg

SEQ ID NO: 46568 - DNA, 50 bp, synthetic construct
  source 1..50: mol_type = other DNA
cgatggatgcctataagattgctgtacaaaaagttcataggtagtttttg

SEQ ID NO: 46569 - DNA, 50 bp, synthetic construct
  source 1..50: mol_type = other DNA
ttcgcataattcagtctgtccggcagcccggattaactggctgatggtaa

SEQ ID NO: 46570 - DNA, 50 bp, synthetic construct
  source 1..50: mol_type = other DNA
aaattgtccgaaactgaacaaaaggctttttcaaaatattctcacagtat

SEQ ID NO: 46571 - DNA, 50 bp, synthetic construct
  source 1..50: mol_type = other DNA
caggtcatagcatttcttcgcgatatgtcgcgatttggcgcgaacctctt

SEQ ID NO: 46572 - DNA, 50 bp, synthetic construct
  source 1..50: mol_type = other DNA
agcagcgagtagccattgcgcgggcgcccgctgcctggccttctctttca

SEQ ID NO: 46573 - DNA, 50 bp, synthetic construct
  source 1..50: mol_type = other DNA
ggagacgcgggcgtaagccgcaacccgcagcgggggcagaccgccaggcg

SEQ ID NO: 46574 - DNA, 50 bp, synthetic construct
  source 1..50: mol_type = other DNA
ccatttcagtaagttcgcaggcaattttgcctccttccttcatataaaat

SEQ ID NO: 46575 - DNA, 50 bp, synthetic construct
  source 1..50: mol_type = other DNA
catcccacaggacggataacacagttttactttagccactctgggggaag

SEQ ID NO: 46576 - DNA, 50 bp, synthetic construct
  source 1..50: mol_type = other DNA
agttatcaatcatttttttatccaattgcataaaaaataagcctatacaa

SEQ ID NO: 46577 - DNA, 50 bp, synthetic construct
  source 1..50: mol_type = other DNA
cattccctatcggaatcaagttcggaagaacttgattccctcatggagga

SEQ ID NO: 46578 - DNA, 50 bp, synthetic construct
  source 1..50: mol_type = other DNA
tataaaagggattatacagattatgcgcctgggcaatccgcttttctatt

SEQ ID NO: 46579 - DNA, 50 bp, synthetic construct
  source 1..50: mol_type = other DNA
tagatacaaaaattattacatacaattttacctcctaatttttttatgct

SEQ ID NO: 46580 - DNA, 50 bp, synthetic construct
  source 1..50: mol_type = other DNA
ctgtgtagctggtcttcctgatccgttcgtcattcagactgtatgcaaac

SEQ ID NO: 46581 - DNA, 50 bp, synthetic construct
  source 1..50: mol_type = other DNA
tttcggcaaaaagggtgtgcacatttgcaggctgaccgtgcttgccgtat

SEQ ID NO: 46582 - DNA, 50 bp, synthetic construct
  source 1..50: mol_type = other DNA
aaatatttctatatttgttttttgatcaggaatcaatggtggaaatgccg

SEQ ID NO: 46583 - DNA, 50 bp, synthetic construct
  source 1..50: mol_type = other DNA
atttcttaacaaataaaaaagaccatgtatcacgatttttctttgttaat

SEQ ID NO: 46584 - DNA, 50 bp, synthetic construct
  source 1..50: mol_type = other DNA
ataattaattaatgtaaagtatttataaagacgcgcttgaagccaattcg

SEQ ID NO: 46585 - DNA, 50 bp, synthetic construct
  source 1..50: mol_type = other DNA
cacctccattttatttttttattgaaatataaatttacagaatggtaatg

SEQ ID NO: 46586 - DNA, 50 bp, synthetic construct
  source 1..50: mol_type = other DNA
tacgctgattgaaatgaaggttactagtatccttgattgagagtctggtg

SEQ ID NO: 46587 - DNA, 50 bp, synthetic construct
  source 1..50: mol_type = other DNA
ctttatctacaaggaaaatcgcgattttttgtttgtcctgcaaaatcgaa

SEQ ID NO: 46588 - DNA, 50 bp, synthetic construct
  source 1..50: mol_type = other DNA
tggaggacattttcatgtcagaatggattatgacagcggtatatccacat

SEQ ID NO: 46589 - DNA, 50 bp, synthetic construct
  source 1..50: mol_type = other DNA
tttttcacaataacaacagtatacagtatttatgtaagtattgttgaaaa

SEQ ID NO: 46590 - DNA, 50 bp, synthetic construct
  source 1..50: mol_type = other DNA
aagggatagagcgttgggaaaatgaacatttttgtaacgcttgacgtgtt

SEQ ID NO: 46591 - DNA, 50 bp, synthetic construct
  source 1..50: mol_type = other DNA
actaaatctacagctcaatatgcagctggttatttggcaggcaattttga

SEQ ID NO: 46592 - DNA, 50 bp, synthetic construct
  source 1..50: mol_type = other DNA
atagagctttcggagcttaccggctgcgtgataaacttcagtgcgcggat

SEQ ID NO: 46593 - DNA, 50 bp, synthetic construct
  source 1..50: mol_type = other DNA
gtcagggattatgggttaatgatttaaatcataattctctaaatcgtcca

SEQ ID NO: 46594 - DNA, 50 bp, synthetic construct
  source 1..50: mol_type = other DNA
atggaaggagcagtttccgttacgatcaggatggaaagaagcagaaggaa

SEQ ID NO: 46595 - DNA, 50 bp, synthetic construct
  source 1..50: mol_type = other DNA
gcatcgtcatgttgataacgaacagccgtaacgcatcacgccgccgattt

SEQ ID NO: 46596 - DNA, 50 bp, synthetic construct
  source 1..50: mol_type = other DNA
gcataatcaggttctaattccggagctccggagatgatacaatattattt

SEQ ID NO: 46597 - DNA, 50 bp, synthetic construct
  source 1..50: mol_type = other DNA
aagggggcggacagcgtttgctgtcccacttcaatcatctccacgatctt

SEQ ID NO: 46598 - DNA, 50 bp, synthetic construct
  source 1..50: mol_type = other DNA
cgatcagcggatagatgtcatcggatttgatgaccgaaaacagcggttcg

SEQ ID NO: 46599 - DNA, 50 bp, synthetic construct
  source 1..50: mol_type = other DNA
agttagtcaatatcattattggaattttgtatcaaactatcagcatagca

SEQ ID NO: 46600 - DNA, 50 bp, synthetic construct
  source 1..50: mol_type = other DNA
cattgcaccatagctttcccataagctttgccccgcgctgtggtatactg

SEQ ID NO: 46601 - DNA, 50 bp, synthetic construct
  source 1..50: mol_type = other DNA
aatctgaggcagaaaagtacaattacatagggttaagcctccttcaaatt

SEQ ID NO: 46602 - DNA, 50 bp, synthetic construct
  source 1..50: mol_type = other DNA
gaaacacgggcgtatccggccacacgagctgcatccagcgcctgcgtatc

SEQ ID NO: 46603 - DNA, 50 bp, synthetic construct
  source 1..50: mol_type = other DNA
agccctggaaacattagatttccgggcagatctcgaagatggaggaaaat

SEQ ID NO: 46604 - DNA, 50 bp, synthetic construct
  source 1..50: mol_type = other DNA
tgctattcagacacttcagagtgatatcaatccgaatgctcatgttgtct

SEQ ID NO: 46605 - DNA, 50 bp, synthetic construct
  source 1..50: mol_type = other DNA
taattcagatgagtgaattacaagttgctgttattgacaaatttcggtta

SEQ ID NO: 46606 - DNA, 50 bp, synthetic construct
  source 1..50: mol_type = other DNA
ggcccatctgctcacagatcgcgtcgaggagcaggcagagcagatccgga

SEQ ID NO: 46607 - DNA, 50 bp, synthetic construct
  source 1..50: mol_type = other DNA
agaatgtcccggctgacggcctgcacgcaggcgctcctccgggagcgcct

SEQ ID NO: 46608 - DNA, 50 bp, synthetic construct
  source 1..50: mol_type = other DNA
catcaacgggtttgacagcccgtctgatcgcgttgagcgcgtcgtccttg

SEQ ID NO: 46609 - DNA, 50 bp, synthetic construct
  source 1..50: mol_type = other DNA
acagaacagatgcgccaggtcctgtggcattccgcgagcaagggggcctg

SEQ ID NO: 46610 - DNA, 50 bp, synthetic construct
  source 1..50: mol_type = other DNA
attctgccgaagatctgcccacctgaaggtggggttgctctcggtgtatg

SEQ ID NO: 46611 - DNA, 50 bp, synthetic construct
  source 1..50: mol_type = other DNA
ccgtgaagcgtgacagcgtcgccggtcggcaaaactgttcatttttccga

SEQ ID NO: 46612 - DNA, 50 bp, synthetic construct
  source 1..50: mol_type = other DNA
tcaaagcccattggacttacagaaaggacggagatgttagtgggcttgat

SEQ ID NO: 46613 - DNA, 50 bp, synthetic construct
  source 1..50: mol_type = other DNA
gcgattattttagcgtgttttggaattgagcgccagcatctcgatttccg

SEQ ID NO: 46614 - DNA, 50 bp, synthetic construct
  source 1..50: mol_type = other DNA
cgctcttgccgttccgattacaatggatgtaaggcggttgtctaagttgc

SEQ ID NO: 46615 - DNA, 50 bp, synthetic construct
  source 1..50: mol_type = other DNA
ctttcttttttatacccttttttcggaaaagccttgaatttacaagaaga

SEQ ID NO: 46616 - DNA, 50 bp, synthetic construct
  source 1..50: mol_type = other DNA
gatcataggaactgcattatgtaagtaatcataagccacctcctataact

SEQ ID NO: 46617 - DNA, 50 bp, synthetic construct
  source 1..50: mol_type = other DNA
ttatcgcagccattgcagctcttgtggctgctctggggcatctcatcatc

SEQ ID NO: 46618 - DNA, 50 bp, synthetic construct
  source 1..50: mol_type = other DNA
tatctgtaataacactggatatatatgaaaaaacatttatattaaaggca

SEQ ID NO: 46619 - DNA, 50 bp, synthetic construct
  source 1..50: mol_type = other DNA
ttttctatagaagcgggagcaggaaacgttgttcctgccagtttatggta

SEQ ID NO: 46620 - DNA, 50 bp, synthetic construct
  source 1..50: mol_type = other DNA
ggaatctgtctgtcggagaataatcaattacaatccctgaaagaagttca

SEQ ID NO: 46621 - DNA, 50 bp, synthetic construct
  source 1..50: mol_type = other DNA
taggaatgtagtcactttctaacatttgtaataaaccggtgtcattctat

SEQ ID NO: 46622 - DNA, 50 bp, synthetic construct
  source 1..50: mol_type = other DNA
cgttcggggtagtgtggtgtcgcaatggcggtcacggtctccgcctccgc

SEQ ID NO: 46623 - DNA, 50 bp, synthetic construct
  source 1..50: mol_type = other DNA
aggagcgtatgagatagtacaacaaatgttgtactaactataacgcacct

SEQ ID NO: 46624 - DNA, 50 bp, synthetic construct
  source 1..50: mol_type = other DNA
tcaggaagtaatcgacctgttcaatgttgatctgcatattggctgccaga

SEQ ID NO: 46625 - DNA, 50 bp, synthetic construct
  source 1..50: mol_type = other DNA
tactattactacaagtgcggcaacgcgtctaagcacttgctaaaaaggta

SEQ ID NO: 46626 - DNA, 50 bp, synthetic construct
  source 1..50: mol_type = other DNA
ggatatagcttctgaaaatcatgtatacagagaagccaagtcctctatat

SEQ ID NO: 46627 - DNA, 50 bp, synthetic construct
  source 1..50: mol_type = other DNA
ttaatacaaagaaacaggtgatgaaatacaagaagatttctttgtaattg

SEQ ID NO: 46628 - DNA, 50 bp, synthetic construct
  source 1..50: mol_type = other DNA
cgcagtgaaagctggacaacggagatagccgttttcccgcatccactgga

SEQ ID NO: 46629 - DNA, 50 bp, synthetic construct
  source 1..50: mol_type = other DNA
actggattgatttttctgcatctctcgagatgcagaacgatattatccgt

SEQ ID NO: 46630 - DNA, 50 bp, synthetic construct
  source 1..50: mol_type = other DNA
gacggaaaagacggtgaaagtattgatgatttttcaagtggtttcggcaa

SEQ ID NO: 46631 - DNA, 50 bp, synthetic construct
  source 1..50: mol_type = other DNA
ctgcaattttgtaacaaattgcgacgaaataccttgaagcggtattccaa

SEQ ID NO: 46632 - DNA, 50 bp, synthetic construct
  source 1..50: mol_type = other DNA
tcataatactaaagttgttaatggaatggttgaacatcgtaatgttatga

SEQ ID NO: 46633 - DNA, 50 bp, synthetic construct
  source 1..50: mol_type = other DNA
tttattttcggtgtacgctataatgactatttgcagcaaaaccaagataa

SEQ ID NO: 46634 - DNA, 50 bp, synthetic construct
  source 1..50: mol_type = other DNA
catactccaccacttggcgcacattggtgcttgcctggctgctctgtatg

SEQ ID NO: 46635 - DNA, 50 bp, synthetic construct
  source 1..50: mol_type = other DNA
aataatggccggtactgcgccctcaatgcggaggtttacatggcattgaa

SEQ ID NO: 46636 - DNA, 50 bp, synthetic construct
  source 1..50: mol_type = other DNA
tatttcttttacaaccgaggggaaatttcccggatgttacatttgaaact

SEQ ID NO: 46637 - DNA, 50 bp, synthetic construct
  source 1..50: mol_type = other DNA
gataaagactttcagcagcttgttttgtaaagcgtcgcaaggggggattc

SEQ ID NO: 46638 - DNA, 50 bp, synthetic construct
  source 1..50: mol_type = other DNA
ggattgtgttataatataggtgtacacagggtaatatttatcgccatact

SEQ ID NO: 46639 - DNA, 50 bp, synthetic construct
  source 1..50: mol_type = other DNA
ccggcataaaaacagagcttccctataatatataccatattttacaacgg

SEQ ID NO: 46640 - DNA, 50 bp, synthetic construct
  source 1..50: mol_type = other DNA
caactatcactgccttgccattctcgatggaacgtatcatgtgatggttg

SEQ ID NO: 46641 - DNA, 50 bp, synthetic construct
  source 1..50: mol_type = other DNA
tgcttttctctacatacaaatgtcgcgaattttgtatcaagctatcagca

SEQ ID NO: 46642 - DNA, 50 bp, synthetic construct
  source 1..50: mol_type = other DNA
tttttcaagattttgcaaaaaagtttatggttttgtgaaacgttattcaa

SEQ ID NO: 46643 - DNA, 50 bp, synthetic construct
  source 1..50: mol_type = other DNA
ccttccaatccaaactgtctacgcatttgtagacaccccacatttttatc

SEQ ID NO: 46644 - DNA, 50 bp, synthetic construct
  source 1..50: mol_type = other DNA
gtacaatccaccttcgacaagtgaattaagaaaatagttaagacttgtat

SEQ ID NO: 46645 - DNA, 50 bp, synthetic construct
  source 1..50: mol_type = other DNA
ccagcttgacctgttcggatttcaggatgacattgccctcggtggtctga

SEQ ID NO: 46646 - DNA, 50 bp, synthetic construct
  source 1..50: mol_type = other DNA
gaagaaagccatacaaaaagcgagatctgcgatacctttcacctttcttt

SEQ ID NO: 46647 - DNA, 50 bp, synthetic construct
  source 1..50: mol_type = other DNA
cgattgtccgcgccttgctgggtgcgcaaccatcaatccgctgacacacc

SEQ ID NO: 46648 - DNA, 50 bp, synthetic construct
  source 1..50: mol_type = other DNA
gatcctgctcagcgcacaaggagcaatatcctttgcaaagaagctgggga

SEQ ID NO: 46649 - DNA, 50 bp, synthetic construct
  source 1..50: mol_type = other DNA
gcatcgagatcacagacacggaaatattttcttcattgttgtctccattc

SEQ ID NO: 46650 - DNA, 50 bp, synthetic construct
  source 1..50: mol_type = other DNA
gcatgggctattttcgtttatatggaaatatcaaagaaaattgaagatat

SEQ ID NO: 46651 - DNA, 50 bp, synthetic construct
  source 1..50: mol_type = other DNA
caaatgcagccggtgccttccgggcagacggaaggatggggcattatttt

SEQ ID NO: 46652 - DNA, 50 bp, synthetic construct
  source 1..50: mol_type = other DNA
cgatatatcgctcattatgcaagatataatatacacataatctgcctcct

SEQ ID NO: 46653 - DNA, 50 bp, synthetic construct
  source 1..50: mol_type = other DNA
taacggtggggtttctgcagtaatgaatggccagccagaccaggtcggac

SEQ ID NO: 46654 - DNA, 50 bp, synthetic construct
  source 1..50: mol_type = other DNA
ttatttttttacaaaaaaagaggtgccgctgcttgttttgctttatttaa

SEQ ID NO: 46655 - DNA, 50 bp, synthetic construct
  source 1..50: mol_type = other DNA
accgcctctattctggatagcctcttgcaaggcacttcaactccggcggt

SEQ ID NO: 46656 - DNA, 50 bp, synthetic construct
  source 1..50: mol_type = other DNA
ctgctttgacggcgcttttttgctgcagaaaaaaagcgagtgttctcaca

SEQ ID NO: 46657 - DNA, 50 bp, synthetic construct
  source 1..50: mol_type = other DNA
aacagtaaatctattaaatgtcaatatatatgggcgtggaattttttgtg

SEQ ID NO: 46658 - DNA, 50 bp, synthetic construct
  source 1..50: mol_type = other DNA
aaggtgtatggcttttattgctagttcacacaatacaataccacaagggc

SEQ ID NO: 46659 - DNA, 50 bp, synthetic construct
  source 1..50: mol_type = other DNA
accgccgcctaaaaaccgaaaagctggcttttctgtttatatcattccga

SEQ ID NO: 46660 - DNA, 50 bp, synthetic construct
  source 1..50: mol_type = other DNA
ctctccacaattttgaatattgtcctacaagtatattataccattgatag

SEQ ID NO: 46661 - DNA, 50 bp, synthetic construct
  source 1..50: mol_type = other DNA
cctctattctggatagcctcttgcagcggcacggacatccccctgtgtga

SEQ ID NO: 46662 - DNA, 50 bp, synthetic construct
  source 1..50: mol_type = other DNA
cttcaatgccatgagcatttattgatctatttttctactacgaattcaat

SEQ ID NO: 46663 - DNA, 50 bp, synthetic construct
  source 1..50: mol_type = other DNA
gctgttcggccagcggcaccagcaggcgctggtcttgctgtcaaggttgc

SEQ ID NO: 46664 - DNA, 50 bp, synthetic construct
  source 1..50: mol_type = other DNA
cttcggtagggaagcggcggtcgatatccttgatggacattccggctttt

SEQ ID NO: 46665 - DNA, 50 bp, synthetic construct
  source 1..50: mol_type = other DNA
gcgctgggccgtgccaaggacattgcacctctctttacacatcattgaat

SEQ ID NO: 46666 - DNA, 50 bp, synthetic construct
  source 1..50: mol_type = other DNA
cttaatggcagtctccaccacgaaccgttccacattccaacggcttcaag

SEQ ID NO: 46667 - DNA, 50 bp, synthetic construct
  source 1..50: mol_type = other DNA
atacagaagaatacaaaggagacacataagctctttgtattcttctgtat

SEQ ID NO: 46668 - DNA, 50 bp, synthetic construct
  source 1..50: mol_type = other DNA
acctaaaataatatttagtagtctttccgctactatatatcactctaaaa

SEQ ID NO: 46669 - DNA, 50 bp, synthetic construct
  source 1..50: mol_type = other DNA
aaaaaaagattttatagttcaacaaatgttaaaaattgtgaatgtttttt

SEQ ID NO: 46670 - DNA, 50 bp, synthetic construct
  source 1..50: mol_type = other DNA
aatcgagaataaaatggctcaaatatttttatcaccttttaatacttatc

SEQ ID NO: 46671 - DNA, 50 bp, synthetic construct
  source 1..50: mol_type = other DNA
cattttaaagaataaataagaaaaaaggctgttatttttttgcctaaaat

SEQ ID NO: 46672 - DNA, 50 bp, synthetic construct
  source 1..50: mol_type = other DNA
tttttcccacggcatttttttgcatatgccggaaatagaatttatcgccg

SEQ ID NO: 46673 - DNA, 50 bp, synthetic construct
  source 1..50: mol_type = other DNA
ggaattttttcccacggcatttttttgaaaaaaacggtgcaaaaaaatta

SEQ ID NO: 46674 - DNA, 50 bp, synthetic construct
  source 1..50: mol_type = other DNA
aagatatcctgaaaatcaacgataagccgattgatttttccggccttctt

SEQ ID NO: 46675 - DNA, 50 bp, synthetic construct
  source 1..50: mol_type = other DNA
caatatatgaaaaaatccgggcaatcgaagccttcttttttcagttcttc

SEQ ID NO: 46676 - DNA, 50 bp, synthetic construct
  source 1..50: mol_type = other DNA
tgattttcttaggtatttcaattggcactttataaggagggtattttcca

SEQ ID NO: 46677 - DNA, 50 bp, synthetic construct
  source 1..50: mol_type = other DNA
cgcactgcatcacctgctttctgatactctttggcagtgagggcagtgcc

SEQ ID NO: 46678 - DNA, 50 bp, synthetic construct
  source 1..50: mol_type = other DNA
gacctcagtatatgaggccggggcttgcccttgagctggatgccgacgtc

SEQ ID NO: 46679 - DNA, 50 bp, synthetic construct
  source 1..50: mol_type = other DNA
aacttttcaaaaaatcttatttgcacatatatattttttccataacagtc

SEQ ID NO: 46680 - DNA, 50 bp, synthetic construct
  source 1..50: mol_type = other DNA
ctttcggaggaaaagaaagagacgattctttcactcattgcctccctgcg

SEQ ID NO: 46681 - DNA, 50 bp, synthetic construct
  source 1..50: mol_type = other DNA
ttgcggggatcaaagataagagctgcagacggtatgttgtatctggtatg

SEQ ID NO: 46682 - DNA, 50 bp, synthetic construct
  source 1..50: mol_type = other DNA
atcgccgccctgcacatccaacaccagtgtttgaagcgctttgcggcggg

SEQ ID NO: 46683 - DNA, 50 bp, synthetic construct
  source 1..50: mol_type = other DNA
ctatcagcgagatattgtcatatataatcgttctggagtcggactgaaaa

SEQ ID NO: 46684 - DNA, 50 bp, synthetic construct
  source 1..50: mol_type = other DNA
gatcataggaactgcattatgtaggtaatcataagccacctcctataact

SEQ ID NO: 46685 - DNA, 50 bp, synthetic construct
  source 1..50: mol_type = other DNA
tgaaccactccacggtctccggctgctgccggagctgccctacgacatca

SEQ ID NO: 46686 - DNA, 50 bp, synthetic construct
  source 1..50: mol_type = other DNA
agaattaccagttttactttttatttatatgcagtttcaaaaaatcttct

SEQ ID NO: 46687 - DNA, 50 bp, synthetic construct
  source 1..50: mol_type = other DNA
gtctcttgcatcccttgtggtggatacgaggctaacatggtgcatgagat

SEQ ID NO: 46688 - DNA, 50 bp, synthetic construct
  source 1..50: mol_type = other DNA
gtcagcggtcagcactatgggcttataattaaaatgtgcacacccctttt

SEQ ID NO: 46689 - DNA, 50 bp, synthetic construct
  source 1..50: mol_type = other DNA
gaaaaatacgggatatcttcgtgtaggtcgcaagatagttcgcattttcg

SEQ ID NO: 46690 - DNA, 50 bp, synthetic construct
  source 1..50: mol_type = other DNA
atagactaccaaaacggaaggaggtacaaccgtcgttagcggtaatttcc

SEQ ID NO: 46691 - DNA, 50 bp, synthetic construct
  source 1..50: mol_type = other DNA
gaaataaaggcaacgaatctgccaaacggtgcttccgtgttcttttttta

SEQ ID NO: 46692 - DNA, 50 bp, synthetic construct
  source 1..50: mol_type = other DNA
ttttggacgaaaagccgaactttttaactccatgactctaccgacaaagc

SEQ ID NO: 46693 - DNA, 50 bp, synthetic construct
  source 1..50: mol_type = other DNA
tcacgagagcaaaagctgaaacttatagcagccctcttaatatttgggtt

SEQ ID NO: 46694 - DNA, 50 bp, synthetic construct
  source 1..50: mol_type = other DNA
aaaaatttaagccggaaaccctaatgccatatatttatatgtaaaatttg

SEQ ID NO: 46695 - DNA, 50 bp, synthetic construct
  source 1..50: mol_type = other DNA
tagataagaacggaaaagaaatggtactaccggtttgacgatcttataat

SEQ ID NO: 46696 - DNA, 50 bp, synthetic construct
  source 1..50: mol_type = other DNA
aaaaccagaatccagcaccagaaaaggacgaggtgctggtcttcggttat

SEQ ID NO: 46697 - DNA, 50 bp, synthetic construct
  source 1..50: mol_type = other DNA
tcccctgctcggttgctatcttctcgaaatcgaccgctatgagcaggaga

SEQ ID NO: 46698 - DNA, 50 bp, synthetic construct
  source 1..50: mol_type = other DNA
aaatagcaaagcgagcaagtgtactttcgacattgcttgcattgctcatt

SEQ ID NO: 46699 - DNA, 50 bp, synthetic construct
  source 1..50: mol_type = other DNA
aatcaagaaaataaggagcgaaaagatgcatactccttatatttttcaag

SEQ ID NO: 46700 - DNA, 50 bp, synthetic construct
  source 1..50: mol_type = other DNA
tcctgcacggcttttgcctctggctcgtcacagtaaaataccacgcgctt

SEQ ID NO: 46701 - DNA, 50 bp, synthetic construct
  source 1..50: mol_type = other DNA
tgcttacgaaatattagagcgtttgggatcgccttgtgcggtcgtcgggt

SEQ ID NO: 46702 - DNA, 50 bp, synthetic construct
  source 1..50: mol_type = other DNA
ttcgaaaaaaggaaagataaaccttagatttcatcgattccgtattaatt

SEQ ID NO: 46703 - DNA, 50 bp, synthetic construct
  source 1..50: mol_type = other DNA
catttgagggctgatttttcggaaggtgtcaaaatatcacgcttcaaaac

SEQ ID NO: 46704 - DNA, 50 bp, synthetic construct
  source 1..50: mol_type = other DNA
aattgatagagtatggaaagttcttaaactcatcaaataagttttcaagt

SEQ ID NO: 46705 - DNA, 50 bp, synthetic construct
  source 1..50: mol_type = other DNA
agataacaggcagaattatcattgatttattttctgactgcgtattatca

SEQ ID NO: 46706 - DNA, 50 bp, synthetic construct
  source 1..50: mol_type = other DNA
acgcaggtcacggtgcatatgtcttaacacatacgcatgccacggcggaa

SEQ ID NO: 46707 - DNA, 50 bp, synthetic construct
  source 1..50: mol_type = other DNA
tggaattgaatttggtaagatctgttttactgataccatttttgtaccaa

SEQ ID NO: 46708 - DNA, 50 bp, synthetic construct
  source 1..50: mol_type = other DNA
aatttagttagcttggaattacgatttcgtacattggggctaaaaaaatt

SEQ ID NO: 46709 - DNA, 50 bp, synthetic construct
  source 1..50: mol_type = other DNA
atttcgcgcacgcctgaaacaactccttgcctttcattcgaaaacgaaat

SEQ ID NO: 46710 - DNA, 50 bp, synthetic construct
  source 1..50: mol_type = other DNA
ttttattgcgtttctgcttgttgcatctaacaagttattgtgtcaataat

SEQ ID NO: 46711 - DNA, 50 bp, synthetic construct
  source 1..50: mol_type = other DNA
gaaacagatttttttgtgtgttttataaaaaacacggataaatccgtgta

SEQ ID NO: 46712 - DNA, 50 bp, synthetic construct
  source 1..50: mol_type = other DNA
tggattgtcgcatcttgattttttgatttagccgatgatgctgtaatctg

SEQ ID NO: 46713 - DNA, 50 bp, synthetic construct
  source 1..50: mol_type = other DNA
ccgccccgaaattcagagcggatctgttggctggctgcggccctcttttc

SEQ ID NO: 46714 - DNA, 50 bp, synthetic construct
  source 1..50: mol_type = other DNA
caaaacaggtcttgacttttcgggcagcggaaaagtcaagtcgattcagc

SEQ ID NO: 46715 - DNA, 50 bp, synthetic construct
  source 1..50: mol_type = other DNA
ccactggggaataaaatcaaattatacacagtgttttttctgcgaagtgc

SEQ ID NO: 46716 - DNA, 50 bp, synthetic construct
  source 1..50: mol_type = other DNA
caaacaattaaaagaaatagaagattctttttatgtaaattaattgttca

SEQ ID NO: 46717 - DNA, 50 bp, synthetic construct
  source 1..50: mol_type = other DNA
aatactgggcgttttcaccgcaattacttgttcaaaaaatgcgatgtctg

SEQ ID NO: 46718 - DNA, 50 bp, synthetic construct
  source 1..50: mol_type = other DNA
aaagatgatgggaatcgggaaggtcccctttccgcatgccggacatcttt

SEQ ID NO: 46719 - DNA, 50 bp, synthetic construct
  source 1..50: mol_type = other DNA
ctgaaagtatccccccgtttggcaagggcggaacgctcttataagcaaat

SEQ ID NO: 46720 - DNA, 50 bp, synthetic construct
  source 1..50: mol_type = other DNA
ttctgaccgcctttcagcggtggtcagcgcccgctgccgggcgatttcct

SEQ ID NO: 46721 - DNA, 50 bp, synthetic construct
  source 1..50: mol_type = other DNA
cataggccgctacccgccggcgcaccaccaacggcggggtcaggcccagg

SEQ ID NO: 46722 - DNA, 50 bp, synthetic construct
  source 1..50: mol_type = other DNA
ccttagtgaaagcaaaacagtcaaaagatgcttgtttttcttcaagcctt

SEQ ID NO: 46723 - DNA, 50 bp, synthetic construct
  source 1..50: mol_type = other DNA
aatacattctcaatgagtgtcatgaaaatgacagataaaaagagatcatt

SEQ ID NO: 46724 - DNA, 50 bp, synthetic construct
  source 1..50: mol_type = other DNA
gaatatgatgttatcgcctgtatgaaagtaaagtgactaatatgatatta

SEQ ID NO: 46725 - DNA, 50 bp, synthetic construct
  source 1..50: mol_type = other DNA
gcacattgtttgcaaccgtcccttgtacatgccatccgccaacatcttct

SEQ ID NO: 46726 - DNA, 50 bp, synthetic construct
  source 1..50: mol_type = other DNA
acttcagacagctttcaaagaatatcacgctcctttccgctaccatacat

SEQ ID NO: 46727 - DNA, 50 bp, synthetic construct
  source 1..50: mol_type = other DNA
atatattctaccttattttataaaaattctcataggaagctatgatgaaa

SEQ ID NO: 46728 - DNA, 50 bp, synthetic construct
  source 1..50: mol_type = other DNA
tgcgtcgagcttcgtactcttctcccgaaaaaggcttgaaatcaagggct

SEQ ID NO: 46729 - DNA, 50 bp, synthetic construct
  source 1..50: mol_type = other DNA
gtcggacgttcctatggaatatcccgggcttttcgccgttttcagccttg

SEQ ID NO: 46730 - DNA, 50 bp, synthetic construct
  source 1..50: mol_type = other DNA
ctgttggagggtgagatgccccggcgccgacgaaaaaagccctccaactg

SEQ ID NO: 46731 - DNA, 50 bp, synthetic construct
  source 1..50: mol_type = other DNA
aataattggcttgacaccgctttgcattctctgaaagactgccaactaca

SEQ ID NO: 46732 - DNA, 50 bp, synthetic construct
  source 1..50: mol_type = other DNA
aggcaatagccgtgcggaaaggtgcgcaccatcccggcaaccgttcagca

SEQ ID NO: 46733 - DNA, 50 bp, synthetic construct
  source 1..50: mol_type = other DNA
tcaaggacggtcatgaaacagagcgcgcttggcggcgtgaccgtcacgct

SEQ ID NO: 46734 - DNA, 50 bp, synthetic construct
  source 1..50: mol_type = other DNA
cggctcatcagcagcgctttgccgcccgtcatggctctggcggagggcga

SEQ ID NO: 46735 - DNA, 50 bp, synthetic construct
  source 1..50: mol_type = other DNA
taatagataaccagttaaaagaattatatctgcaaatattttatctacta

SEQ ID NO: 46736 - DNA, 50 bp, synthetic construct
  source 1..50: mol_type = other DNA
atcgacaaagtaggcgtcaaagccgcggctttgacgcctacaagaagtac

SEQ ID NO: 46737 - DNA, 50 bp, synthetic construct
  source 1..50: mol_type = other DNA
ttttgggcatgatcctatacaccatcacctcacgattatcttcttcaaaa

SEQ ID NO: 46738 - DNA, 50 bp, synthetic construct
  source 1..50: mol_type = other DNA
gaaatgagagaagaagcaaagaaaagattatgctctttttcgtcgtcttg

SEQ ID NO: 46739 - DNA, 50 bp, synthetic construct
  source 1..50: mol_type = other DNA
ccggccacgcctcgccgatcgtttatgtcggaaaagggaagcggagagtt

SEQ ID NO: 46740 - DNA, 50 bp, synthetic construct
  source 1..50: mol_type = other DNA
attattttttatcagaaaaacaaaaatacttttttgtgaaaaaatcttga

SEQ ID NO: 46741 - DNA, 50 bp, synthetic construct
  source 1..50: mol_type = other DNA
ccaattccttattattttttatttttatattgaaaataataaagaaatta

SEQ ID NO: 46742 - DNA, 50 bp, synthetic construct
  source 1..50: mol_type = other DNA
ccagaacaccacgccaacttcttccggaactgccgacatcggctttatgg

SEQ ID NO: 46743 - DNA, 50 bp, synthetic construct
  source 1..50: mol_type = other DNA
ttgctattctcgacctgcatggtggccaccttgattatctcacatttcag

SEQ ID NO: 46744 - DNA, 50 bp, synthetic construct
  source 1..50: mol_type = other DNA
ctcttctcttttttactattccaaccatgatttattgaataagcaaatag

SEQ ID NO: 46745 - DNA, 50 bp, synthetic construct
  source 1..50: mol_type = other DNA
ccatactcatagcgctggtactggtgcaaagtcctcggctgcgatattgg

SEQ ID NO: 46746 - DNA, 50 bp, synthetic construct
  source 1..50: mol_type = other DNA
atccgcctcaattgttccaatgaaggtacatagcaagcattatccgagag

SEQ ID NO: 46747 - DNA, 50 bp, synthetic construct
  source 1..50: mol_type = other DNA
cgactgggagccgacggcgctggcaggcccatgccgccaactccctgcag

SEQ ID NO: 46748 - DNA, 50 bp, synthetic construct
  source 1..50: mol_type = other DNA
ggagatgcgggagcaggcccggctcccttcacggcgcctgccgtcagtcc

SEQ ID NO: 46749 - DNA, 50 bp, synthetic construct
  source 1..50: mol_type = other DNA
caccaaatggggcaatataattagtactaagtatgtaaccccaaatccag

SEQ ID NO: 46750 - DNA, 50 bp, synthetic construct
  source 1..50: mol_type = other DNA
ctccgaagtggaagtgaggagttgcttttgataagcaggccgcttataag

SEQ ID NO: 46751 - DNA, 50 bp, synthetic construct
  source 1..50: mol_type = other DNA
taaaaagtgtgcctttgcggtgtaatcactcctttccgtcactatatatc

SEQ ID NO: 46752 - DNA, 50 bp, synthetic construct
  source 1..50: mol_type = other DNA
acaccaacctgccatcttatatgatgtgatatgtaaggctgcgtaaccta

SEQ ID NO: 46753 - DNA, 50 bp, synthetic construct
  source 1..50: mol_type = other DNA
accatctcaaacaccttgtttgtgatctctccccatccctttatgatggt

SEQ ID NO: 46754 - DNA, 50 bp, synthetic construct
  source 1..50: mol_type = other DNA
catcatttatttcaatcgaatccccctttctttccttggcataaatggaa

SEQ ID NO: 46755 - DNA, 50 bp, synthetic construct
  source 1..50: mol_type = other DNA
gcgtctgcaccttgaccgcacacagctgtgtctgtgcgaggacatcaatc

SEQ ID NO: 46756 - DNA, 50 bp, synthetic construct
  source 1..50: mol_type = other DNA
tgacttcgaccactgcaccgtccatgtggcggatgaggtcataggtgtca

SEQ ID NO: 46757 - DNA, 50 bp, synthetic construct
  source 1..50: mol_type = other DNA
ttttcctgttcctggacttccaggatcctcccgttaaatgtgcaggatcg

SEQ ID NO: 46758 - DNA, 50 bp, synthetic construct
  source 1..50: mol_type = other DNA
tgcaaagcgtggggtggatggcaagcttcacacaaaccataacatttgcc

SEQ ID NO: 46759 - DNA, 50 bp, synthetic construct
  source 1..50: mol_type = other DNA
ccggatgatgctgcagctattgaatatatgcgaattgcaccggtgcaact

SEQ ID NO: 46760 - DNA, 50 bp, synthetic construct
  source 1..50: mol_type = other DNA
ccaggtgcaggaggacaaaaatttatgggtttttgattttgtcttgctgt

SEQ ID NO: 46761 - DNA, 50 bp, synthetic construct
  source 1..50: mol_type = other DNA
gcatgaagggcttgtgctttccaagagtataaaaaataagcccttgtgga

SEQ ID NO: 46762 - DNA, 50 bp, synthetic construct
  source 1..50: mol_type = other DNA
tgcagaaacgctccccgagcactatcgaggtgaccgtcatcgaccctgca

SEQ ID NO: 46763 - DNA, 50 bp, synthetic construct
  source 1..50: mol_type = other DNA
ttcttccatctcggtagagactcgcgccaattttgaccatcctcgaagtc

SEQ ID NO: 46764 - DNA, 50 bp, synthetic construct
  source 1..50: mol_type = other DNA
ccgcatcaccgtcagcaacgggacggtacctgtgaaacttccgtatggct

SEQ ID NO: 46765 - DNA, 50 bp, synthetic construct
  source 1..50: mol_type = other DNA
ggggcagacgtcatttattccccctgatgagcagtaaacgggtctgcccc

SEQ ID NO: 46766 - DNA, 50 bp, synthetic construct
  source 1..50: mol_type = other DNA
tttccgtcagggcatactccaccacttggtggaatcccgccttgcggaag

SEQ ID NO: 46767 - DNA, 50 bp, synthetic construct
  source 1..50: mol_type = other DNA
aattgttttttataataagcggattttaatttttatttaaaaagacaatt

SEQ ID NO: 46768 - DNA, 50 bp, synthetic construct
  source 1..50: mol_type = other DNA
tgtggcaaagaggtctctgataacgcctcttctgaggcgcgtttgctttt

SEQ ID NO: 46769 - DNA, 50 bp, synthetic construct
  source 1..50: mol_type = other DNA
ctggtcttgctgtccagattgcctgtcggctcatccgctaagattagggg

SEQ ID NO: 46770 - DNA, 50 bp, synthetic construct
  source 1..50: mol_type = other DNA
ataaattaataaaaaataaatactcacagattctttttttattaatatta

SEQ ID NO: 46771 - DNA, 50 bp, synthetic construct
  source 1..50: mol_type = other DNA
ggcgccggtccgttttgccgctgatgacgatggagctgtagaatgattct

SEQ ID NO: 46772 - DNA, 50 bp, synthetic construct
  source 1..50: mol_type = other DNA
cttgttccgtgttgatgactgaatctgttcagcaggtatcgcggcacatc

SEQ ID NO: 46773 - DNA, 50 bp, synthetic construct
  source 1..50: mol_type = other DNA
atgcaagcctgacacttgacaacagcacacatccagcgggcggtttgtat

SEQ ID NO: 46774 - DNA, 50 bp, synthetic construct
  source 1..50: mol_type = other DNA
gataaagggaagctacacgagccaccccgaccgtagcgctccaggtcctc

SEQ ID NO: 46775 - DNA, 50 bp, synthetic construct
  source 1..50: mol_type = other DNA
cgcctgctaagaacgccgccttcacaaaaagctctttttgaagaaagaac

SEQ ID NO: 46776 - DNA, 50 bp, synthetic construct
  source 1..50: mol_type = other DNA
ccccactacatttttagcaagtgtttgcacagtctataatagtagcagga

SEQ ID NO: 46777 - DNA, 50 bp, synthetic construct
  source 1..50: mol_type = other DNA
cagccaaggaagtttattggaaagatctttgttcgaaaagcagttggatg

SEQ ID NO: 46778 - DNA, 50 bp, synthetic construct
  source 1..50: mol_type = other DNA
ggaagaaaccgttaagagcatcagcattgatgctatcaacagacaattct

SEQ ID NO: 46779 - DNA, 50 bp, synthetic construct
  source 1..50: mol_type = other DNA
gataattcattttatcatataacgatgtttagatgattctataaatttgg

SEQ ID NO: 46780 - DNA, 50 bp, synthetic construct
  source 1..50: mol_type = other DNA
tatttttttcagtttatgccaaggaaagaacgaagaacagaaaaggaaca

SEQ ID NO: 46781 - DNA, 50 bp, synthetic construct
  source 1..50: mol_type = other DNA
ggtaggtcttcctgattcagccgttatgttgaactcccggaatttaatcg

SEQ ID NO: 46782 - DNA, 50 bp, synthetic construct
  source 1..50: mol_type = other DNA
ttatttttagatgagtttcctgaattcacaggaaatgcgtaccaaccgct

SEQ ID NO: 46783 - DNA, 50 bp, synthetic construct
  source 1..50: mol_type = other DNA
aggcgacctgttcttccttgcggaagtgaagaaggatgacataggggata

SEQ ID NO: 46784 - DNA, 50 bp, synthetic construct
  source 1..50: mol_type = other DNA
aaccccaccattatgaaatagtgaggggaatatatcgtatctgtgcgtta

SEQ ID NO: 46785 - DNA, 50 bp, synthetic construct
  source 1..50: mol_type = other DNA
tgtatagtgtcggaaaggagtgattttacaagaatttgtacctctatacc

SEQ ID NO: 46786 - DNA, 50 bp, synthetic construct
  source 1..50: mol_type = other DNA
atagtgtcaaccagttgattgactactgctccgtaacggtgcatacagca

SEQ ID NO: 46787 - DNA, 50 bp, synthetic construct
  source 1..50: mol_type = other DNA
ttttttattatcccctaaaatagagttgtaatataatcacacatgctaaa

SEQ ID NO: 46788 - DNA, 50 bp, synthetic construct
  source 1..50: mol_type = other DNA
aatgaaagattctctttatcacgcaacattctgaaaccaaaatcagcatt

SEQ ID NO: 46789 - DNA, 50 bp, synthetic construct
  source 1..50: mol_type = other DNA
cagcacgctacggctcgtttccttgcagggaactaagccctgcttttctt

SEQ ID NO: 46790 - DNA, 50 bp, synthetic construct
  source 1..50: mol_type = other DNA
ttactttcagcgcatccatcaactcgatgtggtggtgctggtggacaatt

SEQ ID NO: 46791 - DNA, 50 bp, synthetic construct
  source 1..50: mol_type = other DNA
ctatctgctgttcgcctccggcgacatcgcccatggtgaacatatagtta

SEQ ID NO: 46792 - DNA, 50 bp, synthetic construct
  source 1..50: mol_type = other DNA
atggcgaataagggagctttgtaagatgcaatcgctttactattcatcaa

SEQ ID NO: 46793 - DNA, 50 bp, synthetic construct
  source 1..50: mol_type = other DNA
ccacgatatggttccaagcgatgtcggcatcgccgtatacaggcggtgtc

SEQ ID NO: 46794 - DNA, 50 bp, synthetic construct
  source 1..50: mol_type = other DNA
taactgctcgtcctgctcactggatatttgtatagatgaacaggcagtcc

SEQ ID NO: 46795 - DNA, 50 bp, synthetic construct
  source 1..50: mol_type = other DNA
aagttgataatgtggcttggcgacatgctgccaagcctaaatgctattgg

SEQ ID NO: 46796 - DNA, 50 bp, synthetic construct
  source 1..50: mol_type = other DNA
ctggctataagaaaaaatttgaatattgtcaagttgttttcggcataatc

SEQ ID NO: 46797 - DNA, 50 bp, synthetic construct
  source 1..50: mol_type = other DNA
ggcacctgaggttcttgccccaggcgcctttttcaagtcctccaagccgt

SEQ ID NO: 46798 - DNA, 50 bp, synthetic construct
  source 1..50: mol_type = other DNA
tttctctgacgagattgaggttgaaaagtgagtcacttttaataccatat

SEQ ID NO: 46799 - DNA, 50 bp, synthetic construct
  source 1..50: mol_type = other DNA
tgaacaaaaaaaagagccaaattaatttctttggttgttttcatttttac

SEQ ID NO: 46800 - DNA, 50 bp, synthetic construct
  source 1..50: mol_type = other DNA
ctttcttttttatacccttttttcggaaaagccttgaatttataagaaga

SEQ ID NO: 46801 - DNA, 50 bp, synthetic construct
  source 1..50: mol_type = other DNA
agtcgtgccgttctgccgtttccatcttcaaaaggatgtattgtaaccaa

SEQ ID NO: 46802 - DNA, 50 bp, synthetic construct
  source 1..50: mol_type = other DNA
gttagtacgacaaagactacaaaaaacgtggcaggcacgaacagacagac

SEQ ID NO: 46803 - DNA, 50 bp, synthetic construct
  source 1..50: mol_type = other DNA
taagtgctaacaaagcccagcgatatcaaaagaggcgttcctagaagata

SEQ ID NO: 46804 - DNA, 50 bp, synthetic construct
  source 1..50: mol_type = other DNA
attttgcttacgctttcctccagcaacgtgtcggaaacgtacagaatctc

SEQ ID NO: 46805 - DNA, 50 bp, synthetic construct
  source 1..50: mol_type = other DNA
cggcgagcacgaccagcataccgatataggtttcctctttcagaatactt

SEQ ID NO: 46806 - DNA, 50 bp, synthetic construct
  source 1..50: mol_type = other DNA
atagcatcaatgataaaatgacagatcaagcattttctcattggctgcgt

SEQ ID NO: 46807 - DNA, 50 bp, synthetic construct
  source 1..50: mol_type = other DNA
aataaaaatattgctgtttgagataaaactgaaaaagcgatatttttctt

SEQ ID NO: 46808 - DNA, 50 bp, synthetic construct
  source 1..50: mol_type = other DNA
ttatcaaggacattgaagtttagttttctaaaccccaatacctaaactct

SEQ ID NO: 46809 - DNA, 50 bp, synthetic construct
  source 1..50: mol_type = other DNA
cgcccttgcaggattgaaggtaaatgttgcagccatatctatcatggcgg

SEQ ID NO: 46810 - DNA, 50 bp, synthetic construct
  source 1..50: mol_type = other DNA
gcatatcccgcaatgccgccagcgacgaaacgccgggttgccgcgtatgc

SEQ ID NO: 46811 - DNA, 50 bp, synthetic construct
  source 1..50: mol_type = other DNA
cttctgcgacggtacaaccgaagaaagaagcggtgtcgccgtccgaaaaa

SEQ ID NO: 46812 - DNA, 50 bp, synthetic construct
  source 1..50: mol_type = other DNA
tttatttattatatatttatttttaagaaaactaaaaaagaaaaaataat

SEQ ID NO: 46813 - DNA, 50 bp, synthetic construct
  source 1..50: mol_type = other DNA
attatttttatttaatttgtatccagttataaaaaagcaataaaaaacta

SEQ ID NO: 46814 - DNA, 50 bp, synthetic construct
  source 1..50: mol_type = other DNA
tgtagggcaaacctccctgcaggaaggagctcttcgtcgtttatgaatat

SEQ ID NO: 46815 - DNA, 50 bp, synthetic construct
  source 1..50: mol_type = other DNA
aattcaacacggcatacttcaccgatctttgaccggatttgtgatgagat

SEQ ID NO: 46816 - DNA, 50 bp, synthetic construct
  source 1..50: mol_type = other DNA
cgatgtcggcagttccggagaggacgttctgacaaatggagtagaacttg

SEQ ID NO: 46817 - DNA, 50 bp, synthetic construct
  source 1..50: mol_type = other DNA
agaatacaatgtatcattgtgcagtagtgccaaacaacttattgatttct

SEQ ID NO: 46818 - DNA, 50 bp, synthetic construct
  source 1..50: mol_type = other DNA
ggaaatgcggcagcaagcacgtgaaatggaaatcctgctatgccatttcc

SEQ ID NO: 46819 - DNA, 50 bp, synthetic construct
  source 1..50: mol_type = other DNA
cgtccgtggatttttggtcggacgttcggcctttgagggcatcacgtctc

SEQ ID NO: 46820 - DNA, 50 bp, synthetic construct
  source 1..50: mol_type = other DNA
agaactcaaaccagccatttgacgcagaacagcagcacggtcggtcacag

SEQ ID NO: 46821 - DNA, 50 bp, synthetic construct
  source 1..50: mol_type = other DNA
atttaacgggaggaccccgagaagggatgagcgcgaggcggcagttgtcc

SEQ ID NO: 46822 - DNA, 50 bp, synthetic construct
  source 1..50: mol_type = other DNA
aaagttatgatctacgcccgcggtttgccaacgaaaccaatctcgtcttg

SEQ ID NO: 46823 - DNA, 50 bp, synthetic construct
  source 1..50: mol_type = other DNA
ccgacatgctgaaagcaactgagcgcgctcgtttgctgggtttgcgcggg

SEQ ID NO: 46824 - DNA, 50 bp, synthetic construct
  source 1..50: mol_type = other DNA
ctaaacctaatggatagtgttagttaactaacactatcctaatggatatc

SEQ ID NO: 46825 - DNA, 50 bp, synthetic construct
  source 1..50: mol_type = other DNA
ttgctcaaagaagatggaagtgactaatcacttccatcatgtatgagcga

SEQ ID NO: 46826 - DNA, 50 bp, synthetic construct
  source 1..50: mol_type = other DNA
atttaccttttctggaattacgatttacggttattcctgcaacattagat

SEQ ID NO: 46827 - DNA, 50 bp, synthetic construct
  source 1..50: mol_type = other DNA
aaattggcacaaaaacaaaagcattccgttttttgtttttatgagaatat

SEQ ID NO: 46828 - DNA, 50 bp, synthetic construct
  source 1..50: mol_type = other DNA
tggcaattaatggaccaataataactacagcttcacaacattaataacat

SEQ ID NO: 46829 - DNA, 50 bp, synthetic construct
  source 1..50: mol_type = other DNA
agccatgctatgtcaatcaccataaacaaataagacaccattgtgagcca

SEQ ID NO: 46830 - DNA, 50 bp, synthetic construct
  source 1..50: mol_type = other DNA
gtcctgtgatagaatattttgaaatatttctcaaagaattttcataggta

SEQ ID NO: 46831 - DNA, 50 bp, synthetic construct
  source 1..50: mol_type = other DNA
tcaaaaacactggcggcttttatcataatacaatacgccttgttttttgt

SEQ ID NO: 46832 - DNA, 50 bp, synthetic construct
  source 1..50: mol_type = other DNA
ttataaaatcaatagagaaggtgataggaaaatctcgacctatttttttg

SEQ ID NO: 46833 - DNA, 50 bp, synthetic construct
  source 1..50: mol_type = other DNA
gcggcaatcacatcgcagatgaataaagcaaagcttccaacgcatgtgga

SEQ ID NO: 46834 - DNA, 50 bp, synthetic construct
  source 1..50: mol_type = other DNA
gttgtgcgcatcatgccgaatcttccgtttttaagctgcaagcgcaccgt

SEQ ID NO: 46835 - DNA, 50 bp, synthetic construct
  source 1..50: mol_type = other DNA
aatccagcgcccataactttgtgaaagcgtaaagtgtgaaatttgcacca

SEQ ID NO: 46836 - DNA, 50 bp, synthetic construct
  source 1..50: mol_type = other DNA
aatgcaatttttgagctttttattaacataatcggcctccgaagtggtgg

SEQ ID NO: 46837 - DNA, 50 bp, synthetic construct
  source 1..50: mol_type = other DNA
ggagaaaaagacttacttcatgttgcgctccttcgtttttcgttttatca

SEQ ID NO: 46838 - DNA, 50 bp, synthetic construct
  source 1..50: mol_type = other DNA
cgggagagaagcgccatccggcagggtgggtggatttcatatcactttct

SEQ ID NO: 46839 - DNA, 50 bp, synthetic construct
  source 1..50: mol_type = other DNA
tacaggggcatagcgcaattgatagatataaattgattttctcccttata

SEQ ID NO: 46840 - DNA, 50 bp, synthetic construct
  source 1..50: mol_type = other DNA
ccagcgttctcctcaattttggcgcgacaccaaataggagtccacgcccc

SEQ ID NO: 46841 - DNA, 50 bp, synthetic construct
  source 1..50: mol_type = other DNA
ttgatagaacgctctgtatcgtgaagttccgatataggtcaatcaattca

SEQ ID NO: 46842 - DNA, 50 bp, synthetic construct
  source 1..50: mol_type = other DNA
gcgggcgtaagccgcaacccgccggccagcatagcgttgctgccgccatc

SEQ ID NO: 46843 - DNA, 50 bp, synthetic construct
  source 1..50: mol_type = other DNA
ggaccaattggccccacaggaccaactggtccgactggcccaaccgggcc

SEQ ID NO: 46844 - DNA, 50 bp, synthetic construct
  source 1..50: mol_type = other DNA
ctttggttgctgtacgtttttctgtacaatagcggtatcaaccaaaaggg

SEQ ID NO: 46845 - DNA, 50 bp, synthetic construct
  source 1..50: mol_type = other DNA
gactgttatttttgtacttttttacaagaaattaacgaaaaataagcgcg

SEQ ID NO: 46846 - DNA, 50 bp, synthetic construct
  source 1..50: mol_type = other DNA
cggccgcgtcgtgatccccaaggaaatcgggggggggtaaaaccattccg

SEQ ID NO: 46847 - DNA, 50 bp, synthetic construct
  source 1..50: mol_type = other DNA
gcttgtggagggcgacattggaaagctggttgacagcatccagcggtgcc

SEQ ID NO: 46848 - DNA, 50 bp, synthetic construct
  source 1..50: mol_type = other DNA
atcaaggaggaattaccaatgaaaaagatcagaaagaattcaatttgcgg

SEQ ID NO: 46849 - DNA, 50 bp, synthetic construct
  source 1..50: mol_type = other DNA
ttttttgtgccgtatcgtcatcaatattatatatgatgcgtttgtaaaaa

SEQ ID NO: 46850 - DNA, 50 bp, synthetic construct
  source 1..50: mol_type = other DNA
atggttacggttatactcggaacgtcttcgccggcctgctccgctgcggc

SEQ ID NO: 46851 - DNA, 50 bp, synthetic construct
  source 1..50: mol_type = other DNA
tccacgatgaaataaagaaagagaaatcatccgctgaaattcatcacggg

SEQ ID NO: 46852 - DNA, 50 bp, synthetic construct
  source 1..50: mol_type = other DNA
aagatctctcggatgatctctgcttccggctcgtacacggtcagcatctt

SEQ ID NO: 46853 - DNA, 50 bp, synthetic construct
  source 1..50: mol_type = other DNA
taacattttaacaagttttatgccgaaacaactgtcgtgtagtattcttc

SEQ ID NO: 46854 - DNA, 50 bp, synthetic construct
  source 1..50: mol_type = other DNA
ctttagttcattgagtgtcatggattttcccgcctaccaaatgggcaaac

SEQ ID NO: 46855 - DNA, 50 bp, synthetic construct
  source 1..50: mol_type = other DNA
ctttcttaagatttataaatagtatatactattgttgtattttaataatt

SEQ ID NO: 46856 - DNA, 50 bp, synthetic construct
  source 1..50: mol_type = other DNA
aaagaacgtgatttcgcacgttctttcgaactcctgacctcgacaatgcg

SEQ ID NO: 46857 - DNA, 50 bp, synthetic construct
  source 1..50: mol_type = other DNA
gaaccgcgcccggtgaataccaccgtgttgtagccgtccggcagcgcttc

SEQ ID NO: 46858 - DNA, 50 bp, synthetic construct
  source 1..50: mol_type = other DNA
aactcggcaaaacaaaaatgtggcttgccgctttgcgcttttccgctgtc

SEQ ID NO: 46859 - DNA, 50 bp, synthetic construct
  source 1..50: mol_type = other DNA
gcatcccggtaaaaggattgacggttgcgctgcgcccgtttccgttcgta

SEQ ID NO: 46860 - DNA, 50 bp, synthetic construct
  source 1..50: mol_type = other DNA
tctgcaaattgtgatatttgatgctttattgaaatatcaccatttgcatt

SEQ ID NO: 46861 - DNA, 50 bp, synthetic construct
  source 1..50: mol_type = other DNA
tacccatataggcaaaatcttgaactctcatctcctcatctatattcacg

SEQ ID NO: 46862 - DNA, 50 bp, synthetic construct
  source 1..50: mol_type = other DNA
tcttcccgatatgagcgaaattctgcgaaatggcaggacggtcatatcga

SEQ ID NO: 46863 - DNA, 50 bp, synthetic construct
  source 1..50: mol_type = other DNA
ggtagccaaagtgccgcaatacactaggagattgagggatcatccctctt

SEQ ID NO: 46864 - DNA, 50 bp, synthetic construct
  source 1..50: mol_type = other DNA
agccgagatatacggaagaagattatgtgcttcttccgctcctcggtatg

SEQ ID NO: 46865 - DNA, 50 bp, synthetic construct
  source 1..50: mol_type = other DNA
atataaattgctgaaagaaaaaattaaaatttataaaaaataattataac

SEQ ID NO: 46866 - DNA, 50 bp, synthetic construct
  source 1..50: mol_type = other DNA
acaaataatataaaatataagttttaaaatttataaaaaataattataac

SEQ ID NO: 46867 - DNA, 50 bp, synthetic construct
  source 1..50: mol_type = other DNA
gttttatctttctgtttgcgtaaggctttatgcttaacgagggataaaca

SEQ ID NO: 46868 - DNA, 50 bp, synthetic construct
  source 1..50: mol_type = other DNA
gctgcccgccagcacgcgaagctccggcagtgagcccattgcgtggcagg

SEQ ID NO: 46869 - DNA, 50 bp, synthetic construct
  source 1..50: mol_type = other DNA
atttgaagctaagaaaaagcaactgccaacattttgaaggcgattgaaat

SEQ ID NO: 46870 - DNA, 50 bp, synthetic construct
  source 1..50: mol_type = other DNA
ggtatatctgcgaagtctgccggcagagtttcagacttcttcgatttact

SEQ ID NO: 46871 - DNA, 50 bp, synthetic construct
  source 1..50: mol_type = other DNA
ccaatttttaattcttgagtgcacatttgcaattaaggctttaattttgt

SEQ ID NO: 46872 - DNA, 50 bp, synthetic construct
  source 1..50: mol_type = other DNA
ctccgtggtgcttgaccccttcggcggcgacgctgtcacgcttcacagcg

SEQ ID NO: 46873 - DNA, 50 bp, synthetic construct
  source 1..50: mol_type = other DNA
ggaggcaatgagtgaaagaatcaagaaatctgcttcattacaccttctcc

SEQ ID NO: 46874 - DNA, 50 bp, synthetic construct
  source 1..50: mol_type = other DNA
ctggcctaccacaatgagtttgtattcaaaatctcattctaccggaaaaa

SEQ ID NO: 46875 - DNA, 50 bp, synthetic construct
  source 1..50: mol_type = other DNA
gactttcggcggctttttttgctgaaaggcagaaaactccttagaatggg

SEQ ID NO: 46876 - DNA, 50 bp, synthetic construct
  source 1..50: mol_type = other DNA
cgggcttctttttttgcgtttatggccttaaaggcacagaaagaacagct

SEQ ID NO: 46877 - DNA, 50 bp, synthetic construct
  source 1..50: mol_type = other DNA
ttattataccagctttcggccgatttttcgcacgaaatacagtatacccg

SEQ ID NO: 46878 - DNA, 50 bp, synthetic construct
  source 1..50: mol_type = other DNA
aaaacatcgaagaataagcactaaaatagctgcattgaccgcgttgatgg

SEQ ID NO: 46879 - DNA, 50 bp, synthetic construct
  source 1..50: mol_type = other DNA
taaaatcccacaaagaaatgtgtcgccgtgctatttttcggtgaattttt

SEQ ID NO: 46880 - DNA, 50 bp, synthetic construct
  source 1..50: mol_type = other DNA
ggtacaaaatcacatgctgcttggcttcaaaacctctgcgatttccgcat

SEQ ID NO: 46881 - DNA, 50 bp, synthetic construct
  source 1..50: mol_type = other DNA
cagcttttacgagagaaatatcagccctgaaagtggacacggtaaaagtc

SEQ ID NO: 46882 - DNA, 50 bp, synthetic construct
  source 1..50: mol_type = other DNA
gccgccgcacatgccagaaggagatatgagaatatggtaaagtacgcgga

SEQ ID NO: 46883 - DNA, 50 bp, synthetic construct
  source 1..50: mol_type = other DNA
ataattaataaaaaaatatataatattattaatatttatcaagggtttat

SEQ ID NO: 46884 - DNA, 50 bp, synthetic construct
  source 1..50: mol_type = other DNA
tttgctgtttaattgtttcttgccttttcaacttgttcaaaaagaaagaa

SEQ ID NO: 46885 - DNA, 50 bp, synthetic construct
  source 1..50: mol_type = other DNA
aatcagatttcgatccgttataatacattaagggcgttattgtacctttt

SEQ ID NO: 46886 - DNA, 50 bp, synthetic construct
  source 1..50: mol_type = other DNA
tggcaccaatggcaagtttaaaacttcttttttctttacttcttccgcct

SEQ ID NO: 46887 - DNA, 50 bp, synthetic construct
  source 1..50: mol_type = other DNA
atatatagacactaccgaaaggaggactcgggacgataccgtgtatattc

SEQ ID NO: 46888 - DNA, 50 bp, synthetic construct
  source 1..50: mol_type = other DNA
gagaatcaatgaaggttgcttggacaagcataagacttaattgtttgctc

SEQ ID NO: 46889 - DNA, 50 bp, synthetic construct
  source 1..50: mol_type = other DNA
tgcctgtatttcggaatcaggaaacgccgcctgattccgataaaaaggac

SEQ ID NO: 46890 - DNA, 50 bp, synthetic construct
  source 1..50: mol_type = other DNA
gaaagtattcctccccagtcaatggccatgaactgtgggatgggaccatc

SEQ ID NO: 46891 - DNA, 50 bp, synthetic construct
  source 1..50: mol_type = other DNA
gtgcgccacaaatccgacggcaccgtggtgtcgtcgtgtgtggggacata

SEQ ID NO: 46892 - DNA, 50 bp, synthetic construct
  source 1..50: mol_type = other DNA
gaaaggtgcgtcagcggattgatggtcatacacacgataacgctccggca

SEQ ID NO: 46893 - DNA, 50 bp, synthetic construct
  source 1..50: mol_type = other DNA
cgataaaaatgcaaaaaaaaccgaatccgtgtttttttacattcagcact

SEQ ID NO: 46894 - DNA, 50 bp, synthetic construct
  source 1..50: mol_type = other DNA
cctttgcctcatatacgccaatgtatccacctccgaaaaatgggtatagg

SEQ ID NO: 46895 - DNA, 50 bp, synthetic construct
  source 1..50: mol_type = other DNA
cgcaagaccagctcggccagcaacgcgacggaaaacgatgctattagcag

SEQ ID NO: 46896 - DNA, 50 bp, synthetic construct
  source 1..50: mol_type = other DNA
tgtatccagataacggttgattctttggaatcaacggtcatggttacgtt

SEQ ID NO: 46897 - DNA, 50 bp, synthetic construct
  source 1..50: mol_type = other DNA
tgaaaggtcaaaattctacttgctttgataagtagaattttaacaagtta

SEQ ID NO: 46898 - DNA, 50 bp, synthetic construct
  source 1..50: mol_type = other DNA
cccatacaacaaaaaatgctttgtataaagagagttctttgtgctatggc

SEQ ID NO: 46899 - DNA, 50 bp, synthetic construct
  source 1..50: mol_type = other DNA
atttccttgatttttaaactcgtttactagaaaaactaacatacctaaat

SEQ ID NO: 46900 - DNA, 50 bp, synthetic construct
  source 1..50: mol_type = other DNA
cttgttttgcactttcgattgtgaatttattgactaaatactacaataag

SEQ ID NO: 46901 - DNA, 50 bp, synthetic construct
  source 1..50: mol_type = other DNA
ccaagcacacggtcaacaaggtcatcacgcctttatctgcgtgaagggtg

SEQ ID NO: 46902 - DNA, 50 bp, synthetic construct
  source 1..50: mol_type = other DNA
agccggatgtgctgtaatgattccatttataagatattgcatataggact

SEQ ID NO: 46903 - DNA, 50 bp, synthetic construct
  source 1..50: mol_type = other DNA
tgagaaatacgcaggaaacgccctgcaggcaatgcaaattgaatttctca

SEQ ID NO: 46904 - DNA, 50 bp, synthetic construct
  source 1..50: mol_type = other DNA
cggtcagtatattgaaagccaaaccggtagggctttcctgttacttctct

SEQ ID NO: 46905 - DNA, 50 bp, synthetic construct
  source 1..50: mol_type = other DNA
aggaaaatctaaagggacaaaattctaacattgtacaagggtattttcca

SEQ ID NO: 46906 - DNA, 50 bp, synthetic construct
  source 1..50: mol_type = other DNA
caattctggccgttgtgtgagataatgggctatgagccgggggaagaagt

SEQ ID NO: 46907 - DNA, 50 bp, synthetic construct
  source 1..50: mol_type = other DNA
ataagattgtcgataagtatatgatttatcgtactttacgacacattcta

SEQ ID NO: 46908 - DNA, 50 bp, synthetic construct
  source 1..50: mol_type = other DNA
gttccgtaaggaataaaaaaaggccgcgctggatagcatctgtaatgaat

SEQ ID NO: 46909 - DNA, 50 bp, synthetic construct
  source 1..50: mol_type = other DNA
agtgcaaaaaaatcaccttgggagtttccgaggggtgctttttttacgct

SEQ ID NO: 46910 - DNA, 50 bp, synthetic construct
  source 1..50: mol_type = other DNA
gggaaataaaaaaacatttgctgaatccggtggatggctttttagttccc

SEQ ID NO: 46911 - DNA, 50 bp, synthetic construct
  source 1..50: mol_type = other DNA
gagaatatgctacaaaccacagtaatgcgactgcacttacacactttttc

SEQ ID NO: 46912 - DNA, 50 bp, synthetic construct
  source 1..50: mol_type = other DNA
tgaatatgacgtaaaatcgcctctgattgtgcaattttaacaagtatttc

SEQ ID NO: 46913 - DNA, 50 bp, synthetic construct
  source 1..50: mol_type = other DNA
aagaaagccccggaaacgttgatttcagacagctcttccggggctgtctt

SEQ ID NO: 46914 - DNA, 50 bp, synthetic construct
  source 1..50: mol_type = other DNA
tacaccaagtaggtatgcaaagcagctcctttaatgggataccggtcata

SEQ ID NO: 46915 - DNA, 50 bp, synthetic construct
  source 1..50: mol_type = other DNA
aagggaatttagacttacaggcaaaaggcggtgtccgtattcatttttat

SEQ ID NO: 46916 - DNA, 50 bp, synthetic construct
  source 1..50: mol_type = other DNA
tttttaatgcacaaaatgtcgcgatctcgcagaacttttttccgtaaaaa

SEQ ID NO: 46917 - DNA, 50 bp, synthetic construct
  source 1..50: mol_type = other DNA
gtaataaaattcatataatattttttaatatattattcgtgatttgtcaa

SEQ ID NO: 46918 - DNA, 50 bp, synthetic construct
  source 1..50: mol_type = other DNA
gcagttccggagaggacggccgtcatacaatggaagatatccgggacggc

SEQ ID NO: 46919 - DNA, 50 bp, synthetic construct
  source 1..50: mol_type = other DNA
cacataaactgccacagaaaaaagcgcatacttctccaaagcatcctgct

SEQ ID NO: 46920 - DNA, 50 bp, synthetic construct
  source 1..50: mol_type = other DNA
tgtcgcaacagacgatacaaacccataagcagaaaaaaatgcggctgaca

SEQ ID NO: 46921 - DNA, 50 bp, synthetic construct
  source 1..50: mol_type = other DNA
tgtctgaaataacgagcaatagggcgttggataacccgtatgtgcagaca

SEQ ID NO: 46922 - DNA, 50 bp, synthetic construct
  source 1..50: mol_type = other DNA
tcgctttcatttccatgatggaagcgccgcagggatgacagaacaagaga

SEQ ID NO: 46923 - DNA, 50 bp, synthetic construct
  source 1..50: mol_type = other DNA
acctttgttttccgtgacagtaccgagcgattatcacgccagaatgttaa

SEQ ID NO: 46924 - DNA, 50 bp, synthetic construct
  source 1..50: mol_type = other DNA
atcgtgccgaatcagaggtaatatgtatattaaagagcattcggatgaaa

SEQ ID NO: 46925 - DNA, 50 bp, synthetic construct
  source 1..50: mol_type = other DNA
aagccggactgggcatttttccatattgggaacaaatagtgagagacgaa

SEQ ID NO: 46926 - DNA, 50 bp, synthetic construct
  source 1..50: mol_type = other DNA
atacgttttcggccgcataattacggtttgatgagcggcaaaaaagtcta

SEQ ID NO: 46927 - DNA, 50 bp, synthetic construct
  source 1..50: mol_type = other DNA
gtacccgcaaaacgcttttgctgtatttctcaaagaattttcataggtaa

SEQ ID NO: 46928 - DNA, 50 bp, synthetic construct
  source 1..50: mol_type = other DNA
accgaaagaaaagcacagcgaaaggaaattcccgacgctattcctcgtat

SEQ ID NO: 46929 - DNA, 50 bp, synthetic construct
  source 1..50: mol_type = other DNA
gatcgccaacgagctgggtgtgaaccggggcctgcaaagccttgtggatt

SEQ ID NO: 46930 - DNA, 50 bp, synthetic construct
  source 1..50: mol_type = other DNA
gcccagcgccacggctcccgcctgcgaagaacacggccgccgcgctgccg

SEQ ID NO: 46931 - DNA, 50 bp, synthetic construct
  source 1..50: mol_type = other DNA
gcaacgcgaaacggatgatatttgtttaaaggcatgttgcactgcgatgt

SEQ ID NO: 46932 - DNA, 50 bp, synthetic construct
  source 1..50: mol_type = other DNA
atgtccgtcagcaaagccttcagctcgccaagggcgcttatcacggtccg

SEQ ID NO: 46933 - DNA, 50 bp, synthetic construct
  source 1..50: mol_type = other DNA
gacctgcttacaatctcgtacattataagcaaaaaaataataatattttc

SEQ ID NO: 46934 - DNA, 50 bp, synthetic construct
  source 1..50: mol_type = other DNA
catcaagaatacatactgcaagctgttcctgtcggtcgtctttatgtata

SEQ ID NO: 46935 - DNA, 50 bp, synthetic construct
  source 1..50: mol_type = other DNA
aaaagatttgtgagtgaacaggatttcgcctccagtgtttttaatctttt

SEQ ID NO: 46936 - DNA, 50 bp, synthetic construct
  source 1..50: mol_type = other DNA
ttttcttttccagcgtatttcctgttattgggctatttcaaagaataaat

SEQ ID NO: 46937 - DNA, 50 bp, synthetic construct
  source 1..50: mol_type = other DNA
aatgaaatctatttcaagcggcagccctcttttttatggcaaaggcccgg

SEQ ID NO: 46938 - DNA, 50 bp, synthetic construct
  source 1..50: mol_type = other DNA
catatcttcgtgtagtttgtattgcgcaaaacgaaacaggcgatgtcgtg

SEQ ID NO: 46939 - DNA, 50 bp, synthetic construct
  source 1..50: mol_type = other DNA
gaaatccgcatttgaaaaggaggtcgaccaacttgacaaatttactttaa

SEQ ID NO: 46940 - DNA, 50 bp, synthetic construct
  source 1..50: mol_type = other DNA
ggcgtaaaggtttcgacggggggagccccataggtcgtggtctggccgca

SEQ ID NO: 46941 - DNA, 50 bp, synthetic construct
  source 1..50: mol_type = other DNA
ctggaattcgactgatccaaacggaaccgttcagagcattgcgacaccac

SEQ ID NO: 46942 - DNA, 50 bp, synthetic construct
  source 1..50: mol_type = other DNA
ataaaaaaagccgccctccgtgcgtcatcctggaaaagtgcttttccagc

SEQ ID NO: 46943 - DNA, 50 bp, synthetic construct
  source 1..50: mol_type = other DNA
tgacgtctacggtgtaatagcccttgagtggatatacaagtgggccccca

SEQ ID NO: 46944 - DNA, 50 bp, synthetic construct
  source 1..50: mol_type = other DNA
gcctctgacattttggctaccgcctcggcggtagcggcaaactcaacgtc

SEQ ID NO: 46945 - DNA, 50 bp, synthetic construct
  source 1..50: mol_type = other DNA
ttgtttctaacggtaattttgttggtcaacgatatatccgagaataatgt

SEQ ID NO: 46946 - DNA, 50 bp, synthetic construct
  source 1..50: mol_type = other DNA
tcggaccatatacatactcccaagtacccaggagcatttacactcctggg

SEQ ID NO: 46947 - DNA, 50 bp, synthetic construct
  source 1..50: mol_type = other DNA
gtgagcgataaccgcttgcagatatccggggttccgttggcatcgaccac

SEQ ID NO: 46948 - DNA, 50 bp, synthetic construct
  source 1..50: mol_type = other DNA
cttgtttttgctgccttttctgcgtacgcaaaaatgggtacaaaaataac

SEQ ID NO: 46949 - DNA, 50 bp, synthetic construct
  source 1..50: mol_type = other DNA
gtggttggtatcataatatgataccagaaaaacgctattttaccaaaggc

SEQ ID NO: 46950 - DNA, 50 bp, synthetic construct
  source 1..50: mol_type = other DNA
ggagggaaaaaagaacctctgcgccatcgagaagggcgaccttttgctct

SEQ ID NO: 46951 - DNA, 50 bp, synthetic construct
  source 1..50: mol_type = other DNA
gcaatcacccttttggttgatactgcacagcttaccgcaagggtgcttgc

SEQ ID NO: 46952 - DNA, 50 bp, synthetic construct
  source 1..50: mol_type = other DNA
agccaactttgtctacattattgtcgacaacaatgcggtaaaaacagccg

SEQ ID NO: 46953 - DNA, 50 bp, synthetic construct
  source 1..50: mol_type = other DNA
caacagatttttgtactgcttttaattataaagtgtggcaaaatcaaaag

SEQ ID NO: 46954 - DNA, 50 bp, synthetic construct
  source 1..50: mol_type = other DNA
agcgcttggggcattagcacagttgggcatgtgcgaaatatccttcagcg

SEQ ID NO: 46955 - DNA, 50 bp, synthetic construct
  source 1..50: mol_type = other DNA
attgaaaaatatggccataaagttttggcatcatcctgccgtttttcacc

SEQ ID NO: 46956 - DNA, 50 bp, synthetic construct
  source 1..50: mol_type = other DNA
aaagcgaaggaagaaatgattattgaagcaagggaagaatctgtgtattt

SEQ ID NO: 46957 - DNA, 50 bp, synthetic construct
  source 1..50: mol_type = other DNA
gacgcagaagcgatatgttctatcacggcgctgcccgtcacttcggtttc

SEQ ID NO: 46958 - DNA, 50 bp, synthetic construct
  source 1..50: mol_type = other DNA
ccgctcccgccgcgaaagctggacgcgtcctttgttggcggagaagccgg

SEQ ID NO: 46959 - DNA, 50 bp, synthetic construct
  source 1..50: mol_type = other DNA
gattttactttacatctatgttacaacacctatgcagttaaagtacaata

SEQ ID NO: 46960 - DNA, 50 bp, synthetic construct
  source 1..50: mol_type = other DNA
aaaagaaaactgctccgtcgattatgaaatccggcgggagttttcttatg

SEQ ID NO: 46961 - DNA, 50 bp, synthetic construct
  source 1..50: mol_type = other DNA
gaaggggcgctgacaaacctgtcaaagccatggtgtgtcagtcgaatatg

SEQ ID NO: 46962 - DNA, 50 bp, synthetic construct
  source 1..50: mol_type = other DNA
gaacagaacaagaatcacgttcctgtaggaaaaagattttgtggatatac

SEQ ID NO: 46963 - DNA, 50 bp, synthetic construct
  source 1..50: mol_type = other DNA
tataacaaaataacgttttaagtgcaatatgaataagtattttgattaac

SEQ ID NO: 46964 - DNA, 50 bp, synthetic construct
  source 1..50: mol_type = other DNA
ccttttattcccgtgatttatctatcaagcagagctgatataataaaaaa

SEQ ID NO: 46965 - DNA, 50 bp, synthetic construct
  source 1..50: mol_type = other DNA
atactcaacaagacaactggaacgataattctaattgtctggaaaagaat

SEQ ID NO: 46966 - DNA, 50 bp, synthetic construct
  source 1..50: mol_type = other DNA
tttcttctgattgttgtgcccagccgggaaatataaatttacagaatggt

SEQ ID NO: 46967 - DNA, 50 bp, synthetic construct
  source 1..50: mol_type = other DNA
ctttcatggcgttcacttcgtcataattgacgaagaagccgcagagaaga

SEQ ID NO: 46968 - DNA, 50 bp, synthetic construct
  source 1..50: mol_type = other DNA
tggtctgaagagacgccgtaaacgtcgaattgggttatttcttatatccg

SEQ ID NO: 46969 - DNA, 50 bp, synthetic construct
  source 1..50: mol_type = other DNA
aatcgagagcgactgcagctggtcggtcgcagcagcagtgctggcggcaa

SEQ ID NO: 46970 - DNA, 50 bp, synthetic construct
  source 1..50: mol_type = other DNA
tcctgtttttcaagggcaaatcgttaatgattcgctttcgaagaacaata

SEQ ID NO: 46971 - DNA, 50 bp, synthetic construct
  source 1..50: mol_type = other DNA
aattactgtaacatttcttgctatctgattatatatgcgaccatgtaatg

SEQ ID NO: 46972 - DNA, 50 bp, synthetic construct
  source 1..50: mol_type = other DNA
aggtgctgaatatacagaggaaaaaattcgattagcagcatactgcaggg

SEQ ID NO: 46973 - DNA, 50 bp, synthetic construct
  source 1..50: mol_type = other DNA
aggaagtggcggctgccgccaaggccggtaaaggtgggctgccccttccg

SEQ ID NO: 46974 - DNA, 50 bp, synthetic construct
  source 1..50: mol_type = other DNA
ataaaaacgctagacaaccagcttaaaagctcgtagtttaacggcattca

SEQ ID NO: 46975 - DNA, 50 bp, synthetic construct
  source 1..50: mol_type = other DNA
gcttccagtatgcattaaagctatatattattgcaatcaagactattagc

SEQ ID NO: 46976 - DNA, 50 bp, synthetic construct
  source 1..50: mol_type = other DNA
ggcgacctgttcttccttgcggaagctccggccgatgttactgatctgaa

SEQ ID NO: 46977 - DNA, 50 bp, synthetic construct
  source 1..50: mol_type = other DNA
gatgtacctgtcagcagctcttttctcgcgcagggaaagacagggccgct

SEQ ID NO: 46978 - DNA, 50 bp, synthetic construct
  source 1..50: mol_type = other DNA
tatagcacactgacaaggaggttaatagatgtagaaaattgggagatata

SEQ ID NO: 46979 - DNA, 50 bp, synthetic construct
  source 1..50: mol_type = other DNA
aactttttcatgaagaacagtgtgaagaattcgaattagatgacaaaggt

SEQ ID NO: 46980 - DNA, 50 bp, synthetic construct
  source 1..50: mol_type = other DNA
acaaagtgcgctgcccgtgttataattttcccaacgctctatccctttta

SEQ ID NO: 46981 - DNA, 50 bp, synthetic construct
  source 1..50: mol_type = other DNA
ttgaaggagcggcaaaacctttattcataatgatttagacgctacaatcg

SEQ ID NO: 46982 - DNA, 50 bp, synthetic construct
  source 1..50: mol_type = other DNA
ggcgaaaacggaaggcttttcggtgcgagaatttttcgcggtttttcgcc

SEQ ID NO: 46983 - DNA, 50 bp, synthetic construct
  source 1..50: mol_type = other DNA
ttctcctcgtctggatttgttgcaatagcgaaaaatctagtttagaagaa

SEQ ID NO: 46984 - DNA, 50 bp, synthetic construct
  source 1..50: mol_type = other DNA
accgtcagcgaacacgctgcatctatttctatgggaggctcccaggtatt

SEQ ID NO: 46985 - DNA, 50 bp, synthetic construct
  source 1..50: mol_type = other DNA
gattttggaggccgggatttccgtcatacatgttcccggccatcacagac

SEQ ID NO: 46986 - DNA, 50 bp, synthetic construct
  source 1..50: mol_type = other DNA
ctgcgtgtgggattcatccgcatcggctattttgggcaccccacccgcgc

SEQ ID NO: 46987 - DNA, 50 bp, synthetic construct
  source 1..50: mol_type = other DNA
ggatggcccagtatttatcagtggtaccgctgagctataggcccaatgta

SEQ ID NO: 46988 - DNA, 50 bp, synthetic construct
  source 1..50: mol_type = other DNA
tgtgcttcgtcctccagcctttttattcttatgggatctgtatatccgca

SEQ ID NO: 46989 - DNA, 50 bp, synthetic construct
  source 1..50: mol_type = other DNA
ctcctcgtaatacttctgctgagtttactttatttcagcttttcgaggat

SEQ ID NO: 46990 - DNA, 50 bp, synthetic construct
  source 1..50: mol_type = other DNA
tacaagcaattacataataattatattaaagattcatctgtttgcttaga

SEQ ID NO: 46991 - DNA, 50 bp, synthetic construct
  source 1..50: mol_type = other DNA
aaaagtcacctgaaccgttgatattatctgaaacagtcggagagagtttt

SEQ ID NO: 46992 - DNA, 50 bp, synthetic construct
  source 1..50: mol_type = other DNA
gcaacagcttttccgggtgttgttgcaggcttgcccgaaagagcagatcg

SEQ ID NO: 46993 - DNA, 50 bp, synthetic construct
  source 1..50: mol_type = other DNA
gaagaaaatacaaaaaaggcttgacttcaacgctttaatgcgatagtctt

SEQ ID NO: 46994 - DNA, 50 bp, synthetic construct
  source 1..50: mol_type = other DNA
cgtaaatcgtgacgatcgccggagtgtagcggcaaacgtcacgattttcc

SEQ ID NO: 46995 - DNA, 50 bp, synthetic construct
  source 1..50: mol_type = other DNA
aaatggagtaccttgaccgaggagcacacctgtatctcctttaccttttc

SEQ ID NO: 46996 - DNA, 50 bp, synthetic construct
  source 1..50: mol_type = other DNA
gttgatatcacctccattcagaggtaatatgtccaactcgtgattgccag

SEQ ID NO: 46997 - DNA, 50 bp, synthetic construct
  source 1..50: mol_type = other DNA
tacggtggatgccattggaaatcatcttttttccaatgttgataaaaagc

SEQ ID NO: 46998 - DNA, 50 bp, synthetic construct
  source 1..50: mol_type = other DNA
tacgcttccaattctaattcgctatgggacaacgtagaatatgcgttgta

SEQ ID NO: 46999 - DNA, 50 bp, synthetic construct
  source 1..50: mol_type = other DNA
ccagtcttttttcacgttacttttgttcagcttcggacaatttagaaaca

SEQ ID NO: 47000 - DNA, 50 bp, synthetic construct
  source 1..50: mol_type = other DNA
cgcttgctatccgcgcagctatgagcactgctttgggcgcagaacaggcg

SEQ ID NO: 47001 - DNA, 50 bp, synthetic construct
  source 1..50: mol_type = other DNA
aagaagaaccgtccgacattcctgaaagtcgaaatactgcggttcagaca

SEQ ID NO: 47002 - DNA, 50 bp, synthetic construct
  source 1..50: mol_type = other DNA
gtgaagaattgcgctcttcacgcccgagcgtgcgaagcgctggacaaagt

SEQ ID NO: 47003 - DNA, 50 bp, synthetic construct
  source 1..50: mol_type = other DNA
ttattctttgaaatagcccaataagattatattagtactttaaagaaaaa

SEQ ID NO: 47004 - DNA, 50 bp, synthetic construct
  source 1..50: mol_type = other DNA
tagaataggaggataaaaagatgattaataaatttttagggcaaatgtga

SEQ ID NO: 47005 - DNA, 50 bp, synthetic construct
  source 1..50: mol_type = other DNA
gtacaaaaatcatcaggccaaagagacctgcaaatggagtaccgtcagga

SEQ ID NO: 47006 - DNA, 50 bp, synthetic construct
  source 1..50: mol_type = other DNA
cgtcgagagtttttggttttaataatttttaaagagtatatttcgggaag

SEQ ID NO: 47007 - DNA, 50 bp, synthetic construct
  source 1..50: mol_type = other DNA
caaaaaacgccccgcccatgttaccaaactaccgccggaggtgtttttta

SEQ ID NO: 47008 - DNA, 50 bp, synthetic construct
  source 1..50: mol_type = other DNA
ttgattgattgttatttgatacatcactgtatcaaataacagttgataat

SEQ ID NO: 47009 - DNA, 50 bp, synthetic construct
  source 1..50: mol_type = other DNA
aaatacttcagtaataatttttgcttgcaaaaaattttaccgtgcccgaa

SEQ ID NO: 47010 - DNA, 50 bp, synthetic construct
  source 1..50: mol_type = other DNA
gtctattttaccgggaagggggcagtggaattcaaagctgaaaaaaatga

SEQ ID NO: 47011 - DNA, 50 bp, synthetic construct
  source 1..50: mol_type = other DNA
ttaagaaatgaaaaattagtttcaattctcggtaattagtcctttattaa

SEQ ID NO: 47012 - DNA, 50 bp, synthetic construct
  source 1..50: mol_type = other DNA
atggaatataaaaactaaatttaaaattaaatcgtaactttaaatcattt

SEQ ID NO: 47013 - DNA, 50 bp, synthetic construct
  source 1..50: mol_type = other DNA
atccatacatacaattagggtaaaaatttaccctaattgtaatcatggtt

SEQ ID NO: 47014 - DNA, 50 bp, synthetic construct
  source 1..50: mol_type = other DNA
aagagcattcccgcaatagaatatatcctttctctgaatataaatatctt

SEQ ID NO: 47015 - DNA, 50 bp, synthetic construct
  source 1..50: mol_type = other DNA
tattattttctaatacttctttagattataacgcgctttattcatttata

SEQ ID NO: 47016 - DNA, 50 bp, synthetic construct
  source 1..50: mol_type = other DNA
cagctctcttttagacacgtgatatgtatcgtgtcaacaaaaaaggtcag

SEQ ID NO: 47017 - DNA, 50 bp, synthetic construct
  source 1..50: mol_type = other DNA
cggttagcttctgtttgttttctgagcagagaacaagtgttccgcttgcg

SEQ ID NO: 47018 - DNA, 50 bp, synthetic construct
  source 1..50: mol_type = other DNA
tttcatataaaatttgacatttcatatgtctttttgaatttaatgtatca

SEQ ID NO: 47019 - DNA, 50 bp, synthetic construct
  source 1..50: mol_type = other DNA
gccccatcgtatcgagcgtcctgcggaaaagacgtgtcgccggatacgcc

SEQ ID NO: 47020 - DNA, 50 bp, synthetic construct
  source 1..50: mol_type = other DNA
ggttttggttatgagaatactgtaattaaaaaatgcacaccctttgaacc

SEQ ID NO: 47021 - DNA, 50 bp, synthetic construct
  source 1..50: mol_type = other DNA
ccagcacatagaaaggagaaagaacgttcttcgcgacatccatgatttgg

SEQ ID NO: 47022 - DNA, 50 bp, synthetic construct
  source 1..50: mol_type = other DNA
tgtttccgcgcctgccatgtgcgccggcgctttttcacaaaaagcaagca

SEQ ID NO: 47023 - DNA, 50 bp, synthetic construct
  source 1..50: mol_type = other DNA
aaattctaagtgcattattatctcttcctttaagaaaactctatgaattg

SEQ ID NO: 47024 - DNA, 50 bp, synthetic construct
  source 1..50: mol_type = other DNA
ggcggtatttttgcgcccttttttaagaaaaaggtgttagaaaatgaaaa

SEQ ID NO: 47025 - DNA, 50 bp, synthetic construct
  source 1..50: mol_type = other DNA
ggttgtacccgggcccgtgcaggacatcctgaactgcgccgggggcgtga

SEQ ID NO: 47026 - DNA, 50 bp, synthetic construct
  source 1..50: mol_type = other DNA
gtcaataaaattaaagaatatgaaaaactatcttctttaatattttttac

SEQ ID NO: 47027 - DNA, 50 bp, synthetic construct
  source 1..50: mol_type = other DNA
aaaccgccaatgcaaaaatcgtaacattgtgagctttatggtgaatcgtg

SEQ ID NO: 47028 - DNA, 50 bp, synthetic construct
  source 1..50: mol_type = other DNA
ttgcgaattttgaagaagataatcgtgaatatctctttcggctttcgcca

SEQ ID NO: 47029 - DNA, 50 bp, synthetic construct
  source 1..50: mol_type = other DNA
cgtccgtggatttttggtcggacgttcggccttggagggcatcacgtctc

SEQ ID NO: 47030 - DNA, 50 bp, synthetic construct
  source 1..50: mol_type = other DNA
gactttgctctccgccgcagtcaaatttgtttgtgcagtgcctcaatctc

SEQ ID NO: 47031 - DNA, 50 bp, synthetic construct
  source 1..50: mol_type = other DNA
gattatattatatatttttcccctaaaataataaaattgataaaataatt

SEQ ID NO: 47032 - DNA, 50 bp, synthetic construct
  source 1..50: mol_type = other DNA
caagaggaaaaactattgcgataatagtatagcacatttttcacgtcttg

SEQ ID NO: 47033 - DNA, 50 bp, synthetic construct
  source 1..50: mol_type = other DNA
ccgatcatctccagatgagccagctcctcggtgccaatatcattgaggag

SEQ ID NO: 47034 - DNA, 50 bp, synthetic construct
  source 1..50: mol_type = other DNA
tggtagtggtttccatattttttcatttcggaagtgcgacaccacgcaga

SEQ ID NO: 47035 - DNA, 50 bp, synthetic construct
  source 1..50: mol_type = other DNA
caaactcaaaaaattcagtttcacgaaaatgctactgtttttggagattt

SEQ ID NO: 47036 - DNA, 50 bp, synthetic construct
  source 1..50: mol_type = other DNA
gcctacaatggtacttctgcatagcgctatggtataagacgtctgcagaa

SEQ ID NO: 47037 - DNA, 50 bp, synthetic construct
  source 1..50: mol_type = other DNA
accggcagcgccatcaggcgatgcctttcttccccgatggccgccccgga

SEQ ID NO: 47038 - DNA, 50 bp, synthetic construct
  source 1..50: mol_type = other DNA
ttgtggtagtgtttgtgttacaaaaaaagaaaacaccatcctgacggatg

SEQ ID NO: 47039 - DNA, 50 bp, synthetic construct
  source 1..50: mol_type = other DNA
tcgaatgcgtggcggaactgaacgcttcaggtcctccgccgagaagtcgt

SEQ ID NO: 47040 - DNA, 50 bp, synthetic construct
  source 1..50: mol_type = other DNA
ataattgatacatattacttatttgcaaaaaaacccatgtggtctattct

SEQ ID NO: 47041 - DNA, 50 bp, synthetic construct
  source 1..50: mol_type = other DNA
atatatttttatgatttatttattaatattcattaataatgacggaatag

SEQ ID NO: 47042 - DNA, 50 bp, synthetic construct
  source 1..50: mol_type = other DNA
ccgctccacgatatacggctggtggcctgcacccgcatatcgtccgtcca

SEQ ID NO: 47043 - DNA, 50 bp, synthetic construct
  source 1..50: mol_type = other DNA
cgggcataggccgccacgcggcgcttccggcgtgtggctgtgggtggaat

SEQ ID NO: 47044 - DNA, 50 bp, synthetic construct
  source 1..50: mol_type = other DNA
agcggatgcgagatgcacatgggcgcgatctctggatagagttcgccgct

SEQ ID NO: 47045 - DNA, 50 bp, synthetic construct
  source 1..50: mol_type = other DNA
gcagaagtaatacatagaccattttggactggatcaatcgcgcgttatgc

SEQ ID NO: 47046 - DNA, 50 bp, synthetic construct
  source 1..50: mol_type = other DNA
tggttatggttacaccggaaaatcaccgagaagcggcggaaggaacgagc

SEQ ID NO: 47047 - DNA, 50 bp, synthetic construct
  source 1..50: mol_type = other DNA
agggcttattttttacgcccttttttggaagggaaggaagtgcaaatgaa

SEQ ID NO: 47048 - DNA, 50 bp, synthetic construct
  source 1..50: mol_type = other DNA
tttacctatccacagtgttaaacgtccgtagtccgcttgttgccggtaaa

SEQ ID NO: 47049 - DNA, 50 bp, synthetic construct
  source 1..50: mol_type = other DNA
atccaaaattcagccagaaagggggtaaagtttcgggcatgggtatgcaa

SEQ ID NO: 47050 - DNA, 50 bp, synthetic construct
  source 1..50: mol_type = other DNA
tgtatatcaactgggtgccgcaggatcatgccgcaaacacgggagatcct

SEQ ID NO: 47051 - DNA, 50 bp, synthetic construct
  source 1..50: mol_type = other DNA
caaaataaaagcaccagttcaaaaatatttcaatgagtgcgaaaattttc

SEQ ID NO: 47052 - DNA, 50 bp, synthetic construct
  source 1..50: mol_type = other DNA
cctttgcctttttcagctgaccgccggcagtctgcgaggatgtcgttcag

SEQ ID NO: 47053 - DNA, 50 bp, synthetic construct
  source 1..50: mol_type = other DNA
gtcagggcgaggttgcccatgttgatttgtttgggatgacaagcattgac

SEQ ID NO: 47054 - DNA, 50 bp, synthetic construct
  source 1..50: mol_type = other DNA
tttcccaaaaagtaatacccgcatcagcaggtctgctgtacggcgggcaa

SEQ ID NO: 47055 - DNA, 50 bp, synthetic construct
  source 1..50: mol_type = other DNA
cgcgctagattcaggttctagttccctgtaggagaattggtggagaagcg

SEQ ID NO: 47056 - DNA, 50 bp, synthetic construct
  source 1..50: mol_type = other DNA
ataaaattaaagaatatgaaaaagaataggtaaatattctttaaaagtat

SEQ ID NO: 47057 - DNA, 50 bp, synthetic construct
  source 1..50: mol_type = other DNA
agacttgatatatcgccaaatttagtaaatcgtgatttgatataagttaa

SEQ ID NO: 47058 - DNA, 50 bp, synthetic construct
  source 1..50: mol_type = other DNA
ctgatgaaagagaaccgcaagaaaatctgccagcgtttctaaatcttcat

SEQ ID NO: 47059 - DNA, 50 bp, synthetic construct
  source 1..50: mol_type = other DNA
tgttaaaaattgtgttagatggtacgtaaaaatacgtataatttttctaa

SEQ ID NO: 47060 - DNA, 50 bp, synthetic construct
  source 1..50: mol_type = other DNA
acaccaagtaggtatgcaaagcagctccgcttcgcgttccgccttggcga

SEQ ID NO: 47061 - DNA, 50 bp, synthetic construct
  source 1..50: mol_type = other DNA
tgctgaaagcggcgtacttgcagtatactgcacgtctttgtgtttatcca

SEQ ID NO: 47062 - DNA, 50 bp, synthetic construct
  source 1..50: mol_type = other DNA
tcagattatacagtaacagaaaaaatgaaggctttttgtatataatacaa

SEQ ID NO: 47063 - DNA, 50 bp, synthetic construct
  source 1..50: mol_type = other DNA
tccaacaccagccacgcaagggctcgccatcttgtgtggcgggtgtgggg

SEQ ID NO: 47064 - DNA, 50 bp, synthetic construct
  source 1..50: mol_type = other DNA
tatgtgcgccgtcggcagcagaaaagcggctgcaggtggcggcatacgcc

SEQ ID NO: 47065 - DNA, 50 bp, synthetic construct
  source 1..50: mol_type = other DNA
caagagatccagcaaagacccgaacattttggcgtttttccatgggtttt

SEQ ID NO: 47066 - DNA, 50 bp, synthetic construct
  source 1..50: mol_type = other DNA
ttcgtcttggattgatttcagagaatgctgtttttatcggcaaagacgaa

SEQ ID NO: 47067 - DNA, 50 bp, synthetic construct
  source 1..50: mol_type = other DNA
cccgcaggcccagaaaatgagcttgcccaactcctttcgaggcgtggtgg

SEQ ID NO: 47068 - DNA, 50 bp, synthetic construct
  source 1..50: mol_type = other DNA
gcgggcaccaccgtgaccttgggcatgccagtcagcacgaaattcgccgc

SEQ ID NO: 47069 - DNA, 50 bp, synthetic construct
  source 1..50: mol_type = other DNA
acactctcccaacgtttttcttttatacggggcggcggtctgtatagtgg

SEQ ID NO: 47070 - DNA, 50 bp, synthetic construct
  source 1..50: mol_type = other DNA
ggcggccatccaggcgtcggtggaggtccatggaatcaatgatggccgtg

SEQ ID NO: 47071 - DNA, 50 bp, synthetic construct
  source 1..50: mol_type = other DNA
gccggggataacatggagtgcagcacgccgtacttccacaggtcgccggt

SEQ ID NO: 47072 - DNA, 50 bp, synthetic construct
  source 1..50: mol_type = other DNA
ttgcaaaaaacaggtgtttgcagggaatagctgtactgcgctttttgcaa

SEQ ID NO: 47073 - DNA, 50 bp, synthetic construct
  source 1..50: mol_type = other DNA
cggcttctgccctttcgacgcttcatcaagcgttattttgatacaaaccg

SEQ ID NO: 47074 - DNA, 50 bp, synthetic construct
  source 1..50: mol_type = other DNA
acgaattgtttaacaatgtttctaaatagaaacatttgttctatataatt

SEQ ID NO: 47075 - DNA, 50 bp, synthetic construct
  source 1..50: mol_type = other DNA
agtatggaggtgatgagatgtccgaatggattgaacaagatcacatggat

SEQ ID NO: 47076 - DNA, 50 bp, synthetic construct
  source 1..50: mol_type = other DNA
ccctgaaatgccggaaaccgctgtaaaccgacgtaaacggcaatattgtt

SEQ ID NO: 47077 - DNA, 50 bp, synthetic construct
  source 1..50: mol_type = other DNA
caataacaaattactgcatggcggcgccgcaatgttgaagcttcggcggg

SEQ ID NO: 47078 - DNA, 50 bp, synthetic construct
  source 1..50: mol_type = other DNA
gatttttagtaagattatgaaaacaatttttcaaaaattgcattaaaata

SEQ ID NO: 47079 - DNA, 50 bp, synthetic construct
  source 1..50: mol_type = other DNA
cggaagagaaatataaattgctgaaatgattttgctattaaattaaaaac

SEQ ID NO: 47080 - DNA, 50 bp, synthetic construct
  source 1..50: mol_type = other DNA
tacagaaaagtacggaaagcgagaattatctgattttctatctttcagat

SEQ ID NO: 47081 - DNA, 50 bp, synthetic construct
  source 1..50: mol_type = other DNA
agttctcggtttttccttttttatcgttaaaaagtgaaaccttttgaaac

SEQ ID NO: 47082 - DNA, 50 bp, synthetic construct
  source 1..50: mol_type = other DNA
aagaaccgtccgacattcctgaaccctaaagtcgaaatactgcggttcag

SEQ ID NO: 47083 - DNA, 50 bp, synthetic construct
  source 1..50: mol_type = other DNA
gggatgttgagaactaagcccggatgcgatacctttcacctttctttcct

SEQ ID NO: 47084 - DNA, 50 bp, synthetic construct
  source 1..50: mol_type = other DNA
ctccccgtcccaaatacactcctgaatttattcgtagagtttacggcttc

SEQ ID NO: 47085 - DNA, 50 bp, synthetic construct
  source 1..50: mol_type = other DNA
aaaataattattgcagatgaaccaacgggagcgttagattctgaaaatac

SEQ ID NO: 47086 - DNA, 50 bp, synthetic construct
  source 1..50: mol_type = other DNA
ctaataaaaaatagataggcaaaagcaaaagcctatctattttttattta

SEQ ID NO: 47087 - DNA, 50 bp, synthetic construct
  source 1..50: mol_type = other DNA
attgtatcatcttcgagcagctctcgtgaactgaataagtataccacatc

SEQ ID NO: 47088 - DNA, 50 bp, synthetic construct
  source 1..50: mol_type = other DNA
tattatcggacggcatcatacggtggaaggaaatgtgacggaagaaaatc

SEQ ID NO: 47089 - DNA, 50 bp, synthetic construct
  source 1..50: mol_type = other DNA
gttataatttagttagcttggaattacctccatcttatctaaatttgtac

SEQ ID NO: 47090 - DNA, 50 bp, synthetic construct
  source 1..50: mol_type = other DNA
ttcagatttttcccatttcagcagatatgctgaaaaactgacgttccgaa

SEQ ID NO: 47091 - DNA, 50 bp, synthetic construct
  source 1..50: mol_type = other DNA
ctatcagcagtttatttcgatattctgactggaatatgcactgctgccag

SEQ ID NO: 47092 - DNA, 50 bp, synthetic construct
  source 1..50: mol_type = other DNA
ggacgctactacaaaaagcccaatatattaggctttttatagtagtcttg

SEQ ID NO: 47093 - DNA, 50 bp, synthetic construct
  source 1..50: mol_type = other DNA
tgcaattacgatacgtgatttgattattccaaacaagattcttctttttg

SEQ ID NO: 47094 - DNA, 50 bp, synthetic construct
  source 1..50: mol_type = other DNA
cttgtagcccttgcaattgccgcttttaatgtctttgtcagaggcacaag

SEQ ID NO: 47095 - DNA, 50 bp, synthetic construct
  source 1..50: mol_type = other DNA
tgtttctaaattgtccgaagctgaacaaaagtaacgtgaaaaaagactgg

SEQ ID NO: 47096 - DNA, 50 bp, synthetic construct
  source 1..50: mol_type = other DNA
ttgaaagacttcttgataagtttgggggaactaatcaagaatttccatat

SEQ ID NO: 47097 - DNA, 50 bp, synthetic construct
  source 1..50: mol_type = other DNA
agctccctgaaaatgtcaaggagtgaacatcttaactatcgcattgagca

SEQ ID NO: 47098 - DNA, 50 bp, synthetic construct
  source 1..50: mol_type = other DNA
atctggattctgcaatgcatcaagtgctttatccataagtaaagcaacaa

SEQ ID NO: 47099 - DNA, 50 bp, synthetic construct
  source 1..50: mol_type = other DNA
gatcgaagcatttttcgcagaataattttgctgcgcaaaatgcttgcacg

SEQ ID NO: 47100 - DNA, 50 bp, synthetic construct
  source 1..50: mol_type = other DNA
cagcctgcagatttctccgcaagccgtcacgcccggaactctgcaagctg

SEQ ID NO: 47101 - DNA, 50 bp, synthetic construct
  source 1..50: mol_type = other DNA
aagaaacctcacagaacaggctatcacaaatcttttcagaatggtatcac

SEQ ID NO: 47102 - DNA, 50 bp, synthetic construct
  source 1..50: mol_type = other DNA
tcttgctcagctgctcgaggaatccttcctccgggctcagcggcttgaga

SEQ ID NO: 47103 - DNA, 50 bp, synthetic construct
  source 1..50: mol_type = other DNA
cccgtgcctctggtgccctgcggtccaccgtcgggtcccagacctacata

SEQ ID NO: 47104 - DNA, 50 bp, synthetic construct
  source 1..50: mol_type = other DNA
cacaacggcataccaagtcagattgatatctcccaggatatcggcgttcc

SEQ ID NO: 47105 - DNA, 50 bp, synthetic construct
  source 1..50: mol_type = other DNA
tagtagacgtttttctcgtccaggcgcattgaggagcagtacggccggca

SEQ ID NO: 47106 - DNA, 50 bp, synthetic construct
  source 1..50: mol_type = other DNA
gttagtacatataggatgtctataattatagacatcctatatgtacatat

SEQ ID NO: 47107 - DNA, 50 bp, synthetic construct
  source 1..50: mol_type = other DNA
aaggagtacaaaaaagcgactgctaaagcagccgattttttttgctcttt

SEQ ID NO: 47108 - DNA, 50 bp, synthetic construct
  source 1..50: mol_type = other DNA
ctaaggagatttttcgcctctagcaacttagatggcccatgactctaacg

SEQ ID NO: 47109 - DNA, 50 bp, synthetic construct
  source 1..50: mol_type = other DNA
catgcgcgcactgtctctgtacctgtacacgttcaggctgtgctcgcaca

SEQ ID NO: 47110 - DNA, 50 bp, synthetic construct
  source 1..50: mol_type = other DNA
cacacctgtgggagccggattccatcaggaagatcagctccacagctttg

SEQ ID NO: 47111 - DNA, 50 bp, synthetic construct
  source 1..50: mol_type = other DNA
ggacaaggatacctgattctgttatcattaatgatgaggtttccgtcttc

SEQ ID NO: 47112 - DNA, 50 bp, synthetic construct
  source 1..50: mol_type = other DNA
gggtcagcccaccggcctgttcaccgcacctttccggggtggcggtacaa

SEQ ID NO: 47113 - DNA, 50 bp, synthetic construct
  source 1..50: mol_type = other DNA
tacagaaaacataaaaaatgaaaatacacctcttgtcaagacattctgga

SEQ ID NO: 47114 - DNA, 50 bp, synthetic construct
  source 1..50: mol_type = other DNA
cccgcggggtgttgatatatcggaaatccggtatatgccggaaaaataga

SEQ ID NO: 47115 - DNA, 50 bp, synthetic construct
  source 1..50: mol_type = other DNA
ccgcaggctacaccgatatttataagcatactgcagggtgtccagtgagc

SEQ ID NO: 47116 - DNA, 50 bp, synthetic construct
  source 1..50: mol_type = other DNA
gaagccgccgatgcggactatgttgtgacatagtctacaaggtcggagaa

SEQ ID NO: 47117 - DNA, 50 bp, synthetic construct
  source 1..50: mol_type = other DNA
ttaaatcgtttttggcgaaataaaacattatatccatagaaccgcacaag

SEQ ID NO: 47118 - DNA, 50 bp, synthetic construct
  source 1..50: mol_type = other DNA
accgcggtcacagccgcagcggcagttgacgctgaaatcctgaccgggac

SEQ ID NO: 47119 - DNA, 50 bp, synthetic construct
  source 1..50: mol_type = other DNA
gggaccggatgataaaaaatgcgagctccacagttttgaggcacaggtcg

SEQ ID NO: 47120 - DNA, 50 bp, synthetic construct
  source 1..50: mol_type = other DNA
aacaggaagatttgaaaacacggcttccagttctggttcatcagctttct

SEQ ID NO: 47121 - DNA, 50 bp, synthetic construct
  source 1..50: mol_type = other DNA
gttgttaggatcaccctggtattccggaaaaagaatgtgatgatatcgtc

SEQ ID NO: 47122 - DNA, 50 bp, synthetic construct
  source 1..50: mol_type = other DNA
caaacaggatcggatcaccggaagccgctccggtgtatagatctttttta

SEQ ID NO: 47123 - DNA, 50 bp, synthetic construct
  source 1..50: mol_type = other DNA
tgtaatagctaacctgggctgataactatcagaccgaagtggctgttttc

SEQ ID NO: 47124 - DNA, 50 bp, synthetic construct
  source 1..50: mol_type = other DNA
gccaccggctaagccggattttgtcaacctcctgcggcttattgcgtttt

SEQ ID NO: 47125 - DNA, 50 bp, synthetic construct
  source 1..50: mol_type = other DNA
agctttccgaggaggagcttgaatttcgtctgtccagctttcggaacgag

SEQ ID NO: 47126 - DNA, 50 bp, synthetic construct
  source 1..50: mol_type = other DNA
tatcattttcttgacttgatacgaagtcaattcggaggaataaattgaac

SEQ ID NO: 47127 - DNA, 50 bp, synthetic construct
  source 1..50: mol_type = other DNA
aatatgtgactcaaagtaagttgcaacgccgcactgccgcttatgcccgt

SEQ ID NO: 47128 - DNA, 50 bp, synthetic construct
  source 1..50: mol_type = other DNA
ccgagaagcgtaaacagcatatgcgggccggtggtggttgagcagaagct

SEQ ID NO: 47129 - DNA, 50 bp, synthetic construct
  source 1..50: mol_type = other DNA
ttttttgctcgttgttgatacaatttagcttgacaaatgcgaaaatgtcg

SEQ ID NO: 47130 - DNA, 50 bp, synthetic construct
  source 1..50: mol_type = other DNA
tgcgctcaccatccagaacgacgataatgtcgatatggagggctgaggtc

SEQ ID NO: 47131 - DNA, 50 bp, synthetic construct
  source 1..50: mol_type = other DNA
caaggatctggccgaaatcatggcgatccagacgttcggcttcttccttg

SEQ ID NO: 47132 - DNA, 50 bp, synthetic construct
  source 1..50: mol_type = other DNA
taagctcttttttcagcagacaaagttgcacgaattgaaaacgccgcaat

SEQ ID NO: 47133 - DNA, 50 bp, synthetic construct
  source 1..50: mol_type = other DNA
aatcacaaaaaaaatcaaaaaaaggccttttttcggggtttgcagcgttt

SEQ ID NO: 47134 - DNA, 50 bp, synthetic construct
  source 1..50: mol_type = other DNA
tgagaaaacaaatggagctgctgaatttagcataaaaccactccttcaaa

SEQ ID NO: 47135 - DNA, 50 bp, synthetic construct
  source 1..50: mol_type = other DNA
aaatccgtgactgattagacgaaagttatcgtaccagccagtcaggtagt

SEQ ID NO: 47136 - DNA, 50 bp, synthetic construct
  source 1..50: mol_type = other DNA
gttcagtactgttcggatagcagagatcattttacagttctccaaaaaag

SEQ ID NO: 47137 - DNA, 50 bp, synthetic construct
  source 1..50: mol_type = other DNA
gatcgccaacgagctgggtgtgaaccacatacgccacgttcagcgcgatc

SEQ ID NO: 47138 - DNA, 50 bp, synthetic construct
  source 1..50: mol_type = other DNA
ggaagcggaaaagcaggatgatacttcccagcccagatctttccacttcc

SEQ ID NO: 47139 - DNA, 50 bp, synthetic construct
  source 1..50: mol_type = other DNA
ctttctataatctggacatgatcatttcttaatgtcccggatcgtaaaaa

SEQ ID NO: 47140 - DNA, 50 bp, synthetic construct
  source 1..50: mol_type = other DNA
ggagcttaccggctgcgtcttcgtcgatgaagactgagtccgttttttgg

SEQ ID NO: 47141 - DNA, 50 bp, synthetic construct
  source 1..50: mol_type = other DNA
ttatccatacttttctgtaatagttccactttcaggaatagttttaattt

SEQ ID NO: 47142 - DNA, 50 bp, synthetic construct
  source 1..50: mol_type = other DNA
tcgccgccgggcggcgccgtctccgggtttaccccaccgtcgggtcccag

SEQ ID NO: 47143 - DNA, 50 bp, synthetic construct
  source 1..50: mol_type = other DNA
catcagatattgttcctgcactccaatgagtgctcaaatgatcctacata

SEQ ID NO: 47144 - DNA, 50 bp, synthetic construct
  source 1..50: mol_type = other DNA
cagaaaatatggtggctgtcaccttccgtgcgcagacgccgcattctgcg

SEQ ID NO: 47145 - DNA, 50 bp, synthetic construct
  source 1..50: mol_type = other DNA
aaatagaataaaaaaactaacagaaatctgtactctttaataaaaacttt

SEQ ID NO: 47146 - DNA, 50 bp, synthetic construct
  source 1..50: mol_type = other DNA
gcccgaggccaaggcggctctcaacaaacagactggcgtgaatattggtc

SEQ ID NO: 47147 - DNA, 50 bp, synthetic construct
  source 1..50: mol_type = other DNA
tgcgcattgaggcccgactggcggcaccgtttaccggatctcaatgccca

SEQ ID NO: 47148 - DNA, 50 bp, synthetic construct
  source 1..50: mol_type = other DNA
gcgcgtgaactggcgctccggcaggcaagctgccttgccagtgcaccata

SEQ ID NO: 47149 - DNA, 50 bp, synthetic construct
  source 1..50: mol_type = other DNA
ttacggcggcctcgtccatctgtgctcatctgcgacgactgccaccgccg

SEQ ID NO: 47150 - DNA, 50 bp, synthetic construct
  source 1..50: mol_type = other DNA
ccattcgtttgtcagcttttcgccgcggaggcgtgctgctggacgaatgc

SEQ ID NO: 47151 - DNA, 50 bp, synthetic construct
  source 1..50: mol_type = other DNA
ttcaagctcacaacctatgacgaggaacctttataggctttgagcttttc

SEQ ID NO: 47152 - DNA, 50 bp, synthetic construct
  source 1..50: mol_type = other DNA
attctcgtataggttcctgattttagtacatgagcaacgaaaacgagaat

SEQ ID NO: 47153 - DNA, 50 bp, synthetic construct
  source 1..50: mol_type = other DNA
atgatgtatcagaaaatatgttttacaaaacaaaaagagtgttcataagt

SEQ ID NO: 47154 - DNA, 50 bp, synthetic construct
  source 1..50: mol_type = other DNA
gagcttttaattcgttcgcatccgagaggaccatttggaactacttctgc

SEQ ID NO: 47155 - DNA, 50 bp, synthetic construct
  source 1..50: mol_type = other DNA
gtgattctcaggcttgtgatcggcctgccgtttacacctgacagaatgct

SEQ ID NO: 47156 - DNA, 50 bp, synthetic construct
  source 1..50: mol_type = other DNA
tgggggcgattatgcggtgttgcccttacaacaaaaagtacaagccaata

SEQ ID NO: 47157 - DNA, 50 bp, synthetic construct
  source 1..50: mol_type = other DNA
atatttcctgtactgtttctgcttcgaacgagctgctgaacaggaaaaag

SEQ ID NO: 47158 - DNA, 50 bp, synthetic construct
  source 1..50: mol_type = other DNA
gcaatgcaggaatgggtcgggcgctcgtacagtacgcccggctggtctgc

SEQ ID NO: 47159 - DNA, 50 bp, synthetic construct
  source 1..50: mol_type = other DNA
ccgcgcaggtatcctcgctgcggcttttcggagctgcaattcctgcgcta

SEQ ID NO: 47160 - DNA, 50 bp, synthetic construct
  source 1..50: mol_type = other DNA
tattattgtttttaacaattggagatctgcagatgcgccggcaaataaaa

SEQ ID NO: 47161 - DNA, 50 bp, synthetic construct
  source 1..50: mol_type = other DNA
ttataataaaataaaatgagaacaacaattcccatttactaccggtttga

SEQ ID NO: 47162 - DNA, 50 bp, synthetic construct
  source 1..50: mol_type = other DNA
tttctttcaagacgataggaatgatatgggagaccattcgttcgaagcgc

SEQ ID NO: 47163 - DNA, 50 bp, synthetic construct
  source 1..50: mol_type = other DNA
ctcctcctggatgaccagatcgccgttggtttttggagatggagatggat

SEQ ID NO: 47164 - DNA, 50 bp, synthetic construct
  source 1..50: mol_type = other DNA
cctttcgcgtgactgtcacgcattttctgattgcacagttcagcccatgc

SEQ ID NO: 47165 - DNA, 50 bp, synthetic construct
  source 1..50: mol_type = other DNA
aacttgatttaatagtaaaaaatatttattttttactattgaaaatagag

SEQ ID NO: 47166 - DNA, 50 bp, synthetic construct
  source 1..50: mol_type = other DNA
aaggagaaagatactattggggagaggctgtacagatattctgcctgttt

SEQ ID NO: 47167 - DNA, 50 bp, synthetic construct
  source 1..50: mol_type = other DNA
tattttgttataacttcgtcagcaattctgcgaattgaaatagcaatttg

SEQ ID NO: 47168 - DNA, 50 bp, synthetic construct
  source 1..50: mol_type = other DNA
ttatgtttaatacgcgttataatttaattaataaggaggatgaaaaagat

SEQ ID NO: 47169 - DNA, 50 bp, synthetic construct
  source 1..50: mol_type = other DNA
gttccgtagcgttttcccgtgaaggctgtatcggggataaataacgtatg

SEQ ID NO: 47170 - DNA, 50 bp, synthetic construct
  source 1..50: mol_type = other DNA
ttccgcgaaaatcaggaataggacatgcactcttccacctcttcgtcggt

SEQ ID NO: 47171 - DNA, 50 bp, synthetic construct
  source 1..50: mol_type = other DNA
cttcgttgccggaatcacctgcacatcagcatcgatgtcctgctcgtaaa

SEQ ID NO: 47172 - DNA, 50 bp, synthetic construct
  source 1..50: mol_type = other DNA
tgcttccacccgctccatcttggttcgctcacatggaaatggtatgcgcc

SEQ ID NO: 47173 - DNA, 50 bp, synthetic construct
  source 1..50: mol_type = other DNA
tgctggaggagtcttttcggctttatgcagcatgggagcctcctttcctg

SEQ ID NO: 47174 - DNA, 50 bp, synthetic construct
  source 1..50: mol_type = other DNA
aacttttatataggaaaaacttttaacaacttagtttaaataaaaaagac

SEQ ID NO: 47175 - DNA, 50 bp, synthetic construct
  source 1..50: mol_type = other DNA
tagcgggtgtagtattccacctgtgcgaaggtgggtggccctacataacg

SEQ ID NO: 47176 - DNA, 50 bp, synthetic construct
  source 1..50: mol_type = other DNA
cataataagaccgtttggtcgtattgatacaaccggggtgtcttattatt

SEQ ID NO: 47177 - DNA, 50 bp, synthetic construct
  source 1..50: mol_type = other DNA
cactctccgccgcagacaaagaaaaacttcttcccatggttaggtaattt

SEQ ID NO: 47178 - DNA, 50 bp, synthetic construct
  source 1..50: mol_type = other DNA
tttttcagattttatgtttcattgcaaaatacgacaaaaaatttattgtt

SEQ ID NO: 47179 - DNA, 50 bp, synthetic construct
  source 1..50: mol_type = other DNA
tgaaccagatgcccatgcggtatcggcgggtcgcaggatacgcaagagtg

SEQ ID NO: 47180 - DNA, 50 bp, synthetic construct
  source 1..50: mol_type = other DNA
gaaatccacagagaaaatcgacggtgccgacggatttgtggtgcgccgca

SEQ ID NO: 47181 - DNA, 50 bp, synthetic construct
  source 1..50: mol_type = other DNA
gcaatcatctcgaggtgcgccaattcttctgtagcgatatcggtaaggac

SEQ ID NO: 47182 - DNA, 50 bp, synthetic construct
  source 1..50: mol_type = other DNA
gagccataaactcaagaaataagcatgccgcgagcttgaagacatggcgc

SEQ ID NO: 47183 - DNA, 50 bp, synthetic construct
  source 1..50: mol_type = other DNA
tcacatttgccctaaaaatttattaatcatctttttatcctcctattcta

SEQ ID NO: 47184 - DNA, 50 bp, synthetic construct
  source 1..50: mol_type = other DNA
agaatcttcattaaataaaaaactttggtgtatatttctttttaaattca

SEQ ID NO: 47185 - DNA, 50 bp, synthetic construct
  source 1..50: mol_type = other DNA
ttgatggaacgctctgtttcgtgaagttccgatacaggtcaatcaattcg

SEQ ID NO: 47186 - DNA, 50 bp, synthetic construct
  source 1..50: mol_type = other DNA
catggcgggtatttgatgcgcagtacgaattacatcaaagggcgggacga

SEQ ID NO: 47187 - DNA, 50 bp, synthetic construct
  source 1..50: mol_type = other DNA
cgaagtatcttcgtgtagtatattccaaaatacttctggaagcgttcgcc

SEQ ID NO: 47188 - DNA, 50 bp, synthetic construct
  source 1..50: mol_type = other DNA
gagtttacccagcagcacggcattatagcgcaaagcccacaggtgtagtg

SEQ ID NO: 47189 - DNA, 50 bp, synthetic construct
  source 1..50: mol_type = other DNA
aaatattaattataaaacaattaatcttacatgttatataaagaattcga

SEQ ID NO: 47190 - DNA, 50 bp, synthetic construct
  source 1..50: mol_type = other DNA
tccacggcccaagccacggcctgcgcgtcggtggtgacgtgggcgtaggt

SEQ ID NO: 47191 - DNA, 50 bp, synthetic construct
  source 1..50: mol_type = other DNA
ccgccgagaatgtcgtcaaatcgttttttgctttccgacactttggtatg

SEQ ID NO: 47192 - DNA, 50 bp, synthetic construct
  source 1..50: mol_type = other DNA
agacgaagtattcaattcacactcttcagctattctttcatttgcaaaaa

SEQ ID NO: 47193 - DNA, 50 bp, synthetic construct
  source 1..50: mol_type = other DNA
gcccttcctcccgaaaaatgaaaaatttacaagtttcttgttaaaatgtt

SEQ ID NO: 47194 - DNA, 50 bp, synthetic construct
  source 1..50: mol_type = other DNA
atttgtttcttatctaatgaagtcatatattaattccctaaaaaacgggg

SEQ ID NO: 47195 - DNA, 50 bp, synthetic construct
  source 1..50: mol_type = other DNA
gttgcattctggacagcgcagttctctcttcggtatgtccatccctgaaa

SEQ ID NO: 47196 - DNA, 50 bp, synthetic construct
  source 1..50: mol_type = other DNA
aaactgtccaaggcatgaggtcctcctgtccgaaagcgctttgacaagac

SEQ ID NO: 47197 - DNA, 50 bp, synthetic construct
  source 1..50: mol_type = other DNA
gatttttataagaaatcttcgtcaaattcgagaaatttattataactaaa

SEQ ID NO: 47198 - DNA, 50 bp, synthetic construct
  source 1..50: mol_type = other DNA
gaactcttgagtcggtcgcacttgaaaaagaaatagcccctccacggggc

SEQ ID NO: 47199 - DNA, 50 bp, synthetic construct
  source 1..50: mol_type = other DNA
atgtggtcaagggcagccgggaatatatgtgcgtctgtattagcccggca

SEQ ID NO: 47200 - DNA, 50 bp, synthetic construct
  source 1..50: mol_type = other DNA
aagaaaccgggaaagcaaagccgcttagggttttgcgctcgtcaaacatt

SEQ ID NO: 47201 - DNA, 50 bp, synthetic construct
  source 1..50: mol_type = other DNA
acaccaagtaggtatgcaaagcagctgaatgttgaatacctgctttgtgt

SEQ ID NO: 47202 - DNA, 50 bp, synthetic construct
  source 1..50: mol_type = other DNA
ttacgctttatcgaaaatttggaggtttaagattttctaataaagcgtga

SEQ ID NO: 47203 - DNA, 50 bp, synthetic construct
  source 1..50: mol_type = other DNA
atcgacatccttgcaacaaggatagcgtgccctacatcatggacaacgcc

SEQ ID NO: 47204 - DNA, 50 bp, synthetic construct
  source 1..50: mol_type = other DNA
gaccagaccattgtaacgctgcgtataggcgcccttaatggattccttaa

SEQ ID NO: 47205 - DNA, 50 bp, synthetic construct
  source 1..50: mol_type = other DNA
ggcgcaacgtgtgacgtgcaaggcgctccttccagctaactgccagcgcc

SEQ ID NO: 47206 - DNA, 50 bp, synthetic construct
  source 1..50: mol_type = other DNA
gaagaggttcgcaccaaatcgcgatattgcgaagaaatgctatgacctac

SEQ ID NO: 47207 - DNA, 50 bp, synthetic construct
  source 1..50: mol_type = other DNA
gcttgagcgatgataggtgacacgactaattcaggtatcattggctattt

SEQ ID NO: 47208 - DNA, 50 bp, synthetic construct
  source 1..50: mol_type = other DNA
tcattggtcatcgagagacaccagatccaaaatggggagctgacggtggt

SEQ ID NO: 47209 - DNA, 50 bp, synthetic construct
  source 1..50: mol_type = other DNA
tttctccggccgccagcggcggcgcatcacaggagatacccacggagatt

SEQ ID NO: 47210 - DNA, 50 bp, synthetic construct
  source 1..50: mol_type = other DNA
ctgcatcacaggtgccatttccaaattgggcacatccttttgtatctgtg

SEQ ID NO: 47211 - DNA, 50 bp, synthetic construct
  source 1..50: mol_type = other DNA
gagacgtgatgccctcaaaggccgaacgtccgaccaaaaatccacggacg

SEQ ID NO: 47212 - DNA, 50 bp, synthetic construct
  source 1..50: mol_type = other DNA
tctaggtaaaaaaatatgaacggcagcaagtacaatctgcgatacctttc

SEQ ID NO: 47213 - DNA, 50 bp, synthetic construct
  source 1..50: mol_type = other DNA
cttcccccttggtttctttttatccttccgaaaggaaaacgtgtggtaat

SEQ ID NO: 47214 - DNA, 50 bp, synthetic construct
  source 1..50: mol_type = other DNA
acgtacgaaaccctcccggccattatgatgtagctgtctttttcgttgat

SEQ ID NO: 47215 - DNA, 50 bp, synthetic construct
  source 1..50: mol_type = other DNA
ccgcgtgctgctggtggacgatgtgatatactgacccctgcaagcataaa

SEQ ID NO: 47216 - DNA, 50 bp, synthetic construct
  source 1..50: mol_type = other DNA
tggagaacttttcaaaaaatctcatttgagcgagctcggaaatgcttctt

SEQ ID NO: 47217 - DNA, 50 bp, synthetic construct
  source 1..50: mol_type = other DNA
aaaattccggcctgttttgggcggtatggagaaataccggcagcagtttg

SEQ ID NO: 47218 - DNA, 50 bp, synthetic construct
  source 1..50: mol_type = other DNA
agcgggcgcgtgaactggcgctccggcgaggaagattttacagaccttcc

SEQ ID NO: 47219 - DNA, 50 bp, synthetic construct
  source 1..50: mol_type = other DNA
caggttcgactttatcgaggttgtaatctcgattgaattcatcctgcctg

SEQ ID NO: 47220 - DNA, 50 bp, synthetic construct
  source 1..50: mol_type = other DNA
gtgtttttgagaattattttcccgctcttctaaatagctaccaaaacaac

SEQ ID NO: 47221 - DNA, 50 bp, synthetic construct
  source 1..50: mol_type = other DNA
agcatttttgtattgcctgtcaggctgcgacaaggcggcaaaaaagtatc

SEQ ID NO: 47222 - DNA, 50 bp, synthetic construct
  source 1..50: mol_type = other DNA
tgatccgctgctccagtgcattcgaacgaatgttctggattgcaagctgt

SEQ ID NO: 47223 - DNA, 50 bp, synthetic construct
  source 1..50: mol_type = other DNA
tataaacggaagcttcagatcccatagaaggcttgaattttccgtttaat

SEQ ID NO: 47224 - DNA, 50 bp, synthetic construct
  source 1..50: mol_type = other DNA
aatacagagtgattcaagcggcgatcggggcatatggcaacagctgtatg

SEQ ID NO: 47225 - DNA, 50 bp, synthetic construct
  source 1..50: mol_type = other DNA
caaagcccccggttttgcgcaaggcaaaagcatcaatgccggattacgtg

SEQ ID NO: 47226 - DNA, 50 bp, synthetic construct
  source 1..50: mol_type = other DNA
acggtgtaggtgacggtgacggtgacgaccgtagccgtcagctcgccgtc

SEQ ID NO: 47227 - DNA, 50 bp, synthetic construct
  source 1..50: mol_type = other DNA
gatatatagtgtcggaaaggagtgatcaaaatattctactactatagttc

SEQ ID NO: 47228 - DNA, 50 bp, synthetic construct
  source 1..50: mol_type = other DNA
cgtttggaaaaaaccgttccaaatctgggaagaaaataggtttcaaactt

SEQ ID NO: 47229 - DNA, 50 bp, synthetic construct
  source 1..50: mol_type = other DNA
acataagcactgtaggccgtccgcaatgtgccgggatccagttctcccga

SEQ ID NO: 47230 - DNA, 50 bp, synthetic construct
  source 1..50: mol_type = other DNA
ttcgtgccattagcactgttggcgctcgatcgcgtggcggatggcacgct

SEQ ID NO: 47231 - DNA, 50 bp, synthetic construct
  source 1..50: mol_type = other DNA
cccaccccaacatttggcaaataaccgctttttgccaagaagggcggaca

SEQ ID NO: 47232 - DNA, 50 bp, synthetic construct
  source 1..50: mol_type = other DNA
aaaaaaagctttagagtataaagcttatacagccccctaaagagcgattt

SEQ ID NO: 47233 - DNA, 50 bp, synthetic construct
  source 1..50: mol_type = other DNA
agatacacggtattgatgaacacatcaggagcatcatatacggatagcct

SEQ ID NO: 47234 - DNA, 50 bp, synthetic construct
  source 1..50: mol_type = other DNA
agcagaaaagagattgatgttatcggcatatcatcagtttcttcttccag

SEQ ID NO: 47235 - DNA, 50 bp, synthetic construct
  source 1..50: mol_type = other DNA
caagaccaccttctgcaacctgattggcttgattgattatatcattcttt

SEQ ID NO: 47236 - DNA, 50 bp, synthetic construct
  source 1..50: mol_type = other DNA
cttcacgggtgtatctcccgcagccatctgtggagcagatcaccgtgttt

SEQ ID NO: 47237 - DNA, 50 bp, synthetic construct
  source 1..50: mol_type = other DNA
aacaaaaaaatagtgtgaaaaattataatttccggcataaatgcttttgc

SEQ ID NO: 47238 - DNA, 50 bp, synthetic construct
  source 1..50: mol_type = other DNA
ccggagataccttcatctgcgtaaattttcttaaatgcaggtcgtccttc

SEQ ID NO: 47239 - DNA, 50 bp, synthetic construct
  source 1..50: mol_type = other DNA
tgttcctcatcaaacagttttttatagggaaatgtgatatgtaaggctgc

SEQ ID NO: 47240 - DNA, 50 bp, synthetic construct
  source 1..50: mol_type = other DNA
tcactaattttgcattctaaaagaatatgtataggattggagcttcatcg

SEQ ID NO: 47241 - DNA, 50 bp, synthetic construct
  source 1..50: mol_type = other DNA
gtgaataatacctacaggtggtatatacgatgaaaatatatagatagcaa

SEQ ID NO: 47242 - DNA, 50 bp, synthetic construct
  source 1..50: mol_type = other DNA
gaccggcggggatcgtggattgatccgggaagatcatcaatccgcccatg

SEQ ID NO: 47243 - DNA, 50 bp, synthetic construct
  source 1..50: mol_type = other DNA
aatccgatagccaaatggtgtatggctttccattgttttgcgctcctttc

SEQ ID NO: 47244 - DNA, 50 bp, synthetic construct
  source 1..50: mol_type = other DNA
gcatgtgggaggactataaaatagatcatttttatatctgtcaaaacggt

SEQ ID NO: 47245 - DNA, 50 bp, synthetic construct
  source 1..50: mol_type = other DNA
ggcggaatagtggttgattatgacgacacaccataccacaatagttcgaa

SEQ ID NO: 47246 - DNA, 50 bp, synthetic construct
  source 1..50: mol_type = other DNA
atagacacaatactcaccgaaaaatatgagcaaggtattacggggagcat

SEQ ID NO: 47247 - DNA, 50 bp, synthetic construct
  source 1..50: mol_type = other DNA
ctgttggaggggaattcgctccataatctgcttgcaatcaccccgcacag

SEQ ID NO: 47248 - DNA, 50 bp, synthetic construct
  source 1..50: mol_type = other DNA
ccaaagttggcatagtacgaaacatccttttcgtggtatcatacgataca

SEQ ID NO: 47249 - DNA, 50 bp, synthetic construct
  source 1..50: mol_type = other DNA
atactacaaattagtaattttgtcaatactgctctactaaagcatggaac

SEQ ID NO: 47250 - DNA, 50 bp, synthetic construct
  source 1..50: mol_type = other DNA
cgacggcgttgtcggtaacgagaatatccacgaccgggacagcgcgctcc

SEQ ID NO: 47251 - DNA, 50 bp, synthetic construct
  source 1..50: mol_type = other DNA
gagctgaccagcgacgactatttccggaaaatgaaaaagctgcttgctgt

SEQ ID NO: 47252 - DNA, 50 bp, synthetic construct
  source 1..50: mol_type = other DNA
agcttgattttctctcccagcttcatcattctgacgcagaatttcaataa

SEQ ID NO: 47253 - DNA, 50 bp, synthetic construct
  source 1..50: mol_type = other DNA
ggctcgtctgtatagctgcgccacggcaggtcaaaagctattcacgagaa

SEQ ID NO: 47254 - DNA, 50 bp, synthetic construct
  source 1..50: mol_type = other DNA
gaactggcaaaagtatatctgtaatattagtatattaggttcttctgtaa

SEQ ID NO: 47255 - DNA, 50 bp, synthetic construct
  source 1..50: mol_type = other DNA
caaagccaagggagcaaaatactaaaatgcccgatgctccgggcgtttta

SEQ ID NO: 47256 - DNA, 50 bp, synthetic construct
  source 1..50: mol_type = other DNA
attatgcaggagtttattaatcgccggcgacgctgtcacgcttcacggcg

SEQ ID NO: 47257 - DNA, 50 bp, synthetic construct
  source 1..50: mol_type = other DNA
gacagacgaacgccgggagcaaatgaattgcattctggcgatcgttgata

SEQ ID NO: 47258 - DNA, 50 bp, synthetic construct
  source 1..50: mol_type = other DNA
gatgcacttgatcattgtcatccacattgatcgcagcgatcagatgttca

SEQ ID NO: 47259 - DNA, 50 bp, synthetic construct
  source 1..50: mol_type = other DNA
ttcatcccggtcggttgaaacgcgtgcgcaggtcctgtttaggtaatccc

SEQ ID NO: 47260 - DNA, 50 bp, synthetic construct
  source 1..50: mol_type = other DNA
acaatgcattcctctagattatttatttttgctcatcaaatgtagattcg

SEQ ID NO: 47261 - DNA, 50 bp, synthetic construct
  source 1..50: mol_type = other DNA
gaggctccgagttcgccgtcgggaccaccatactggctgatgatgatggc

SEQ ID NO: 47262 - DNA, 50 bp, synthetic construct
  source 1..50: mol_type = other DNA
ggatggggtagcgaatcgctaccccagggcggcaaagcgctgctgatgag

SEQ ID NO: 47263 - DNA, 50 bp, synthetic construct
  source 1..50: mol_type = other DNA
atagtctgatacaaaattcgcgcttttttgcgatatttgtatgtgaaagg

SEQ ID NO: 47264 - DNA, 50 bp, synthetic construct
  source 1..50: mol_type = other DNA
tcgaaatattcgcaaaaggagtgctatcttttcgtttttcttttttgatt

SEQ ID NO: 47265 - DNA, 50 bp, synthetic construct
  source 1..50: mol_type = other DNA
catgcgattaactccttgttaatttcccgtcacggaaggtaaaggtaatc

SEQ ID NO: 47266 - DNA, 50 bp, synthetic construct
  source 1..50: mol_type = other DNA
tcccctcacaagtaccttcttggatgtccaactttcggagcgtgagcggt

SEQ ID NO: 47267 - DNA, 50 bp, synthetic construct
  source 1..50: mol_type = other DNA
tgaaagtcgaatactgtgccgacagcaggaggctcataatccccggatca

SEQ ID NO: 47268 - DNA, 50 bp, synthetic construct
  source 1..50: mol_type = other DNA
tctctgattttcttcatctttcagtactgaaagaaggtggaaagatgatt

SEQ ID NO: 47269 - DNA, 50 bp, synthetic construct
  source 1..50: mol_type = other DNA
accgttcaaatgactttttgtaagtttttgtaaccggtgattgccacgga

SEQ ID NO: 47270 - DNA, 50 bp, synthetic construct
  source 1..50: mol_type = other DNA
ttactggtcaaacgaagggttcacgagaacacccttcggatttgtcgttt

SEQ ID NO: 47271 - DNA, 50 bp, synthetic construct
  source 1..50: mol_type = other DNA
taaaatatgatataataataaagcaatcatttttattacgttgcttttgc

SEQ ID NO: 47272 - DNA, 50 bp, synthetic construct
  source 1..50: mol_type = other DNA
tgatactctccatcggtatcacccccgggtgcaggcgatctacaacattc

SEQ ID NO: 47273 - DNA, 50 bp, synthetic construct
  source 1..50: mol_type = other DNA
ttaaagctgataagaagcagtttctcctttctgcttttcgcaagtgttcg

SEQ ID NO: 47274 - DNA, 50 bp, synthetic construct
  source 1..50: mol_type = other DNA
tgtggaaacacgagcataagcagcaagaagctgatactgatgtaatcact

SEQ ID NO: 47275 - DNA, 50 bp, synthetic construct
  source 1..50: mol_type = other DNA
gtccttgtccacgatggccgggatgcatcctcgcccacgatatagaacac

SEQ ID NO: 47276 - DNA, 50 bp, synthetic construct
  source 1..50: mol_type = other DNA
gaacaagactattcaagttagaaaaatatctaacttgaacaatcttatga

SEQ ID NO: 47277 - DNA, 50 bp, synthetic construct
  source 1..50: mol_type = other DNA
aagggtgtcggaggatacagaggcggaataattaaaatgtgcacaccctt

SEQ ID NO: 47278 - DNA, 50 bp, synthetic construct
  source 1..50: mol_type = other DNA
gaaaaatatgggatatcttcgtgtagttcggaaaactttttatattccga

SEQ ID NO: 47279 - DNA, 50 bp, synthetic construct
  source 1..50: mol_type = other DNA
attccatttattttgaaattatttttaaattgtttggaagttaaacaaac

SEQ ID NO: 47280 - DNA, 50 bp, synthetic construct
  source 1..50: mol_type = other DNA
tcggaataacattctcactctttctgcacctcgttcagctgtttttgtgt

SEQ ID NO: 47281 - DNA, 50 bp, synthetic construct
  source 1..50: mol_type = other DNA
gtaatcattaaatatattttactatagatgaagacttattttattatgga

SEQ ID NO: 47282 - DNA, 50 bp, synthetic construct
  source 1..50: mol_type = other DNA
taataatatctatttcatttacaaatttaaaaatgatatctgacaagtgg

SEQ ID NO: 47283 - DNA, 50 bp, synthetic construct
  source 1..50: mol_type = other DNA
gctggtagcgcacaacactggcagtgttggacctgttacgctgtacaatg

SEQ ID NO: 47284 - DNA, 50 bp, synthetic construct
  source 1..50: mol_type = other DNA
aatcttctttgtgaagtattgtttcggatttgcaattaaggctttgattt

SEQ ID NO: 47285 - DNA, 50 bp, synthetic construct
  source 1..50: mol_type = other DNA
caggagtgggagttcgtttttgtaattaaatatatataatcgacctccga

SEQ ID NO: 47286 - DNA, 50 bp, synthetic construct
  source 1..50: mol_type = other DNA
tcatatttatcatcaccaagatttacaagtctgcgccgcccaaaatatac

SEQ ID NO: 47287 - DNA, 50 bp, synthetic construct
  source 1..50: mol_type = other DNA
tttcgttatcatttttatacttattccaagctaactaaattataacgcgc

SEQ ID NO: 47288 - DNA, 50 bp, synthetic construct
  source 1..50: mol_type = other DNA
tttttcggcggcgcgggggtgtccactgagagtggtatccccgacttccg

SEQ ID NO: 47289 - DNA, 50 bp, synthetic construct
  source 1..50: mol_type = other DNA
cggagttttacggcagcaggcttgtccaagttcaaatgcggaaaagtcgt

SEQ ID NO: 47290 - DNA, 50 bp, synthetic construct
  source 1..50: mol_type = other DNA
tcaaaaacgcatacttcaaaacagatttgtctttgcgtctgtaattttga

SEQ ID NO: 47291 - DNA, 50 bp, synthetic construct
  source 1..50: mol_type = other DNA
cgaccggaggggttcagttagtagtactactaaattgaacctaccgaccg

SEQ ID NO: 47292 - DNA, 50 bp, synthetic construct
  source 1..50: mol_type = other DNA
ggtaatctgcaaatcaaaattattatatcttttttgatttctccccatcc

SEQ ID NO: 47293 - DNA, 50 bp, synthetic construct
  source 1..50: mol_type = other DNA
cgcctcctctttttcatttaattttggcataaaaggaaaaaaatacggct

SEQ ID NO: 47294 - DNA, 50 bp, synthetic construct
  source 1..50: mol_type = other DNA
ccgtgatgttatcagtaatataaacatttaagttttcatgctttttatag

SEQ ID NO: 47295 - DNA, 50 bp, synthetic construct
  source 1..50: mol_type = other DNA
gcccggagcatcgggcattttattctctttttattttctattctgcgctc

SEQ ID NO: 47296 - DNA, 50 bp, synthetic construct
  source 1..50: mol_type = other DNA
tgcactcgtatcatactgtgcatcctaccacatagttttatatatatcca

SEQ ID NO: 47297 - DNA, 50 bp, synthetic construct
  source 1..50: mol_type = other DNA
tctatatcatagatatgcaactaatattagctaactatctataatacaat

SEQ ID NO: 47298 - DNA, 50 bp, synthetic construct
  source 1..50: mol_type = other DNA
aaattaaattgatttatgatcaataatacctaagaaaatcatttccatca

SEQ ID NO: 47299 - DNA, 50 bp, synthetic construct
  source 1..50: mol_type = other DNA
cgtacagaatctctgcattctgcgatcgcaaaaagcgcgaattttgtatc

SEQ ID NO: 47300 - DNA, 50 bp, synthetic construct
  source 1..50: mol_type = other DNA
catgaaatagcacatatctattatggataaaagcgacaatctctaacatg

SEQ ID NO: 47301 - DNA, 50 bp, synthetic construct
  source 1..50: mol_type = other DNA
tgttattccggttgcggctcacaaggacagcagccacaaacggaacaaca

SEQ ID NO: 47302 - DNA, 50 bp, synthetic construct
  source 1..50: mol_type = other DNA
tttataatacaaaattattctaaatattaacgctcttgttccgctataag

SEQ ID NO: 47303 - DNA, 50 bp, synthetic construct
  source 1..50: mol_type = other DNA
atattatggcgcaaatgatattgacttcaaagatggttgcgccatccgta

SEQ ID NO: 47304 - DNA, 50 bp, synthetic construct
  source 1..50: mol_type = other DNA
tccctgaattccataattttttccatggagaaaatcagtgacttcatatc

SEQ ID NO: 47305 - DNA, 50 bp, synthetic construct
  source 1..50: mol_type = other DNA
ggctgttaatcggggctgccgtataaatacggcagtaacgataaaaagct

SEQ ID NO: 47306 - DNA, 50 bp, synthetic construct
  source 1..50: mol_type = other DNA
gaaaaggtcttcctgatattgacggtcatccgcaaacggaagtggctttc

SEQ ID NO: 47307 - DNA, 50 bp, synthetic construct
  source 1..50: mol_type = other DNA
tcgcaaagccagaaagtgacccggtgggtcggggctctccccctctgcga

SEQ ID NO: 47308 - DNA, 50 bp, synthetic construct
  source 1..50: mol_type = other DNA
gcggcacgggccattactggatcgtgctcagcaacgatggctatcagctg

SEQ ID NO: 47309 - DNA, 50 bp, synthetic construct
  source 1..50: mol_type = other DNA
ctgccgctggcggaatatgtctggttccagacataatccgtagtcgaatc

SEQ ID NO: 47310 - DNA, 50 bp, synthetic construct
  source 1..50: mol_type = other DNA
aatcttatcatgaacagcactcttatacgaagagccgtcctgataagatc

SEQ ID NO: 47311 - DNA, 50 bp, synthetic construct
  source 1..50: mol_type = other DNA
taccttatccagtatgccctctgcatagcctctccattctgcctcagatc

SEQ ID NO: 47312 - DNA, 50 bp, synthetic construct
  source 1..50: mol_type = other DNA
caggtcgtcctgcacctgccgcagggcgtttttagtacccgacagactga

SEQ ID NO: 47313 - DNA, 50 bp, synthetic construct
  source 1..50: mol_type = other DNA
gaatttttgtctatgtatttttaatagtccgaatacggcaggtaaattat

SEQ ID NO: 47314 - DNA, 50 bp, synthetic construct
  source 1..50: mol_type = other DNA
accacaaataatatttctaaggttgtaaaggagaaaattcatcatggcta

SEQ ID NO: 47315 - DNA, 50 bp, synthetic construct
  source 1..50: mol_type = other DNA
aaatgtgtgataatatccacaatataagctgaagatatttgagaggagtt

SEQ ID NO: 47316 - DNA, 50 bp, synthetic construct
  source 1..50: mol_type = other DNA
acattattatcggaaaacgacttgatcaagtcgccgggcggcaaagacaa

SEQ ID NO: 47317 - DNA, 50 bp, synthetic construct
  source 1..50: mol_type = other DNA
tgcactccgcactgtcatctttgctgccagctacggcagtgaggagtatc

SEQ ID NO: 47318 - DNA, 50 bp, synthetic construct
  source 1..50: mol_type = other DNA
agcaagaaagcagctggaaaaatttgcattttcacggctttttacaaatg

SEQ ID NO: 47319 - DNA, 50 bp, synthetic construct
  source 1..50: mol_type = other DNA
caaggaaagaaaggtgaaaggtattcccctttttctatgcgctttccacg

SEQ ID NO: 47320 - DNA, 50 bp, synthetic construct
  source 1..50: mol_type = other DNA
ggatatagaaagggatttgatgatgaggcatatcatcagtttcttcttcc

SEQ ID NO: 47321 - DNA, 50 bp, synthetic construct
  source 1..50: mol_type = other DNA
taatatttcgaaatagatgttataattgatgagtttattgataaaatata

SEQ ID NO: 47322 - DNA, 50 bp, synthetic construct
  source 1..50: mol_type = other DNA
taatatacataggatgaagccttgctcagtcagcttttctattataatat

SEQ ID NO: 47323 - DNA, 50 bp, synthetic construct
  source 1..50: mol_type = other DNA
ggtgacaacccaagtgccgatgaaaaatcatggatagctttatattcaat

SEQ ID NO: 47324 - DNA, 50 bp, synthetic construct
  source 1..50: mol_type = other DNA
taagcgtaccttttccaacttatgcggcgcatttggtcaaaaaaagcttt

SEQ ID NO: 47325 - DNA, 50 bp, synthetic construct
  source 1..50: mol_type = other DNA
caaaatattaccaacaatttttataaaacagaatgatacagcaatttttt

SEQ ID NO: 47326 - DNA, 50 bp, synthetic construct
  source 1..50: mol_type = other DNA
agaaaaatgtgaattcaagaatattattactttttaagaaaaaagtatct

SEQ ID NO: 47327 - DNA, 50 bp, synthetic construct
  source 1..50: mol_type = other DNA
tccttaccaatcaaaaggaagtggatccaccgcctttgaccaaaagtgga

SEQ ID NO: 47328 - DNA, 50 bp, synthetic construct
  source 1..50: mol_type = other DNA
gagagtgattccaccgaggatgacgaaggcaaggaccagatcgatgttgc

SEQ ID NO: 47329 - DNA, 50 bp, synthetic construct
  source 1..50: mol_type = other DNA
catcaggataaatgtaagcggtaaaatacccaggagcatttacactcctg

SEQ ID NO: 47330 - DNA, 50 bp, synthetic construct
  source 1..50: mol_type = other DNA
ggcatcgccgctgacaacgtcaagcccttgacgttggcgaggatagcggg

SEQ ID NO: 47331 - DNA, 50 bp, synthetic construct
  source 1..50: mol_type = other DNA
gtcatcggcatcgaccagcagcccatatgcagggagtgtgatatactgac

SEQ ID NO: 47332 - DNA, 50 bp, synthetic construct
  source 1..50: mol_type = other DNA
cttctgctgtattttcttgataaaagattctacaaaaaatatgataaata

SEQ ID NO: 47333 - DNA, 50 bp, synthetic construct
  source 1..50: mol_type = other DNA
ccgtcaagcgtgccgtttgggccgcgctaccaaaactgcgctacacccgg

SEQ ID NO: 47334 - DNA, 50 bp, synthetic construct
  source 1..50: mol_type = other DNA
aaatacttgtaaatatgaacggcactgaccgtttataagtacaaggctta

SEQ ID NO: 47335 - DNA, 50 bp, synthetic construct
  source 1..50: mol_type = other DNA
tttcgtccccaaaatacttgtaaatatttttcggaattttgggaattaag

SEQ ID NO: 47336 - DNA, 50 bp, synthetic construct
  source 1..50: mol_type = other DNA
ttagcgtgaagtttgtcgtccaattttgtcacctacaaacttgacattat

SEQ ID NO: 47337 - DNA, 50 bp, synthetic construct
  source 1..50: mol_type = other DNA
gttgctttactgatattggaaaaatatttttaattcatcggtgtgccaag

SEQ ID NO: 47338 - DNA, 50 bp, synthetic construct
  source 1..50: mol_type = other DNA
aattttaacataatttccgtcattttaatgaaggatatatatccaaaaaa

SEQ ID NO: 47339 - DNA, 50 bp, synthetic construct
  source 1..50: mol_type = other DNA
gcaattaaacctgttataattgtaggtacaatgactaatctttggtatca

SEQ ID NO: 47340 - DNA, 50 bp, synthetic construct
  source 1..50: mol_type = other DNA
cctcgacgaaggcggtacgatccagctggcgtttttttgtatatgtgagg

SEQ ID NO: 47341 - DNA, 50 bp, synthetic construct
  source 1..50: mol_type = other DNA
ccgctgcgattgtcatttacgccggcgagcagcaccactatgccgagcgc

SEQ ID NO: 47342 - DNA, 50 bp, synthetic construct
  source 1..50: mol_type = other DNA
aaattataaatataaataaagattatctattttatgcaggttaggtagct

SEQ ID NO: 47343 - DNA, 50 bp, synthetic construct
  source 1..50: mol_type = other DNA
aaaaatcacctataaccatttcgaaatcgaactggggataaaggttttgc

SEQ ID NO: 47344 - DNA, 50 bp, synthetic construct
  source 1..50: mol_type = other DNA
agatatgcttgcgctttttgccagaactgataaaaatttgttatactatt

SEQ ID NO: 47345 - DNA, 50 bp, synthetic construct
  source 1..50: mol_type = other DNA
aaaacccgttacaatattagggctgtatgccgcatactgtgaccttggag

SEQ ID NO: 47346 - DNA, 50 bp, synthetic construct
  source 1..50: mol_type = other DNA
gaaaaccggtattttccagaacgatctcgttcccgagcagaattcttttc

SEQ ID NO: 47347 - DNA, 50 bp, synthetic construct
  source 1..50: mol_type = other DNA
ctcatgctcattaatatatttcgtataatattttgcatcaaatataataa

SEQ ID NO: 47348 - DNA, 50 bp, synthetic construct
  source 1..50: mol_type = other DNA
tcacgcaagcggaacatttgttttgcgcaggcaattttcttgttgccaga

SEQ ID NO: 47349 - DNA, 50 bp, synthetic construct
  source 1..50: mol_type = other DNA
ctccacggtacacggcaggcgttccaacacggcacccatgtttctgggat

SEQ ID NO: 47350 - DNA, 50 bp, synthetic construct
  source 1..50: mol_type = other DNA
ttttaagaaacaggaattctacgaaacgagagtatctcttcagtggagaa

SEQ ID NO: 47351 - DNA, 50 bp, synthetic construct
  source 1..50: mol_type = other DNA
agcagaaagtacaacataaaattttgccagcataaaagatatgttgcgca

SEQ ID NO: 47352 - DNA, 50 bp, synthetic construct
  source 1..50: mol_type = other DNA
atacgctcgtaaaagatgcagctaattagttgcatcttagatgtgcgaaa

SEQ ID NO: 47353 - DNA, 50 bp, synthetic construct
  source 1..50: mol_type = other DNA
actttcttgatatggctctatatatacatataaagacgcacgtagatacg

SEQ ID NO: 47354 - DNA, 50 bp, synthetic construct
  source 1..50: mol_type = other DNA
tctgcccctttgccgaaatctatatcagcggcttcgtgatgcggtaaata

SEQ ID NO: 47355 - DNA, 50 bp, synthetic construct
  source 1..50: mol_type = other DNA
gtttgaagccgcaggacagtttaagccgtcaacctcctgcggcttattgc

SEQ ID NO: 47356 - DNA, 50 bp, synthetic construct
  source 1..50: mol_type = other DNA
cactctaaagctgctgaaaaacctgatttgcgttcctttcctttgttttt

SEQ ID NO: 47357 - DNA, 50 bp, synthetic construct
  source 1..50: mol_type = other DNA
tgtcataaaaatatagacttggcaagcaacaacagaccaatattatgaca

SEQ ID NO: 47358 - DNA, 50 bp, synthetic construct
  source 1..50: mol_type = other DNA
ggttgttaaaaaaattaaccttgcaaaaaataggtacaaaaataacaccc

SEQ ID NO: 47359 - DNA, 50 bp, synthetic construct
  source 1..50: mol_type = other DNA
atagacaacaatttcaacaaatgatatggtttgtttctttttttgtttat

SEQ ID NO: 47360 - DNA, 50 bp, synthetic construct
  source 1..50: mol_type = other DNA
aattcggagtgcagcggagaattgcgcaacccagcgcctcacatatcaag

SEQ ID NO: 47361 - DNA, 50 bp, synthetic construct
  source 1..50: mol_type = other DNA
gtcagtataccacactccctgcatatgggctgctggtcgatgccgatgac

SEQ ID NO: 47362 - DNA, 50 bp, synthetic construct
  source 1..50: mol_type = other DNA
ggttcagtatgaagatgaatatgggatgcggttcagcttgaactggaacg

SEQ ID NO: 47363 - DNA, 50 bp, synthetic construct
  source 1..50: mol_type = other DNA
cgcaaatattgtcgtatattggcctctctgggataacctcacatttgtta

SEQ ID NO: 47364 - DNA, 50 bp, synthetic construct
  source 1..50: mol_type = other DNA
tcagcgcctgaacgagctgtactccacagctacgcctatcacggagcaga

SEQ ID NO: 47365 - DNA, 50 bp, synthetic construct
  source 1..50: mol_type = other DNA
atctcttgtgtgtcatagttttatcaataaatgtttagacaggaagtgat

SEQ ID NO: 47366 - DNA, 50 bp, synthetic construct
  source 1..50: mol_type = other DNA
cgtagttagtagaaacaagatcataaaaaaccttctttctactgtaaaaa

SEQ ID NO: 47367 - DNA, 50 bp, synthetic construct
  source 1..50: mol_type = other DNA
gagcagtctctgccttttcctgttccggcaggaacatttcgatcttgccg

SEQ ID NO: 47368 - DNA, 50 bp, synthetic construct
  source 1..50: mol_type = other DNA
tccagataattctttttaataaataatttaatttaaaataattatctttg

SEQ ID NO: 47369 - DNA, 50 bp, synthetic construct
  source 1..50: mol_type = other DNA
agaccggcgaacgggttgacgttgttattaatgaatttgtttgtacttat

SEQ ID NO: 47370 - DNA, 50 bp, synthetic construct
  source 1..50: mol_type = other DNA
ctcctgtgggcagtgttaagttagtactaatgtaacactacccgtgggtt

SEQ ID NO: 47371 - DNA, 50 bp, synthetic construct
  source 1..50: mol_type = other DNA
tctttcctataaagcaaaaaataaccttcttttttaacagttaccgttta

SEQ ID NO: 47372 - DNA, 50 bp, synthetic construct
  source 1..50: mol_type = other DNA
agtggctgtatgaggcacacaggagctccttactggaggaaacagagagt

SEQ ID NO: 47373 - DNA, 50 bp, synthetic construct
  source 1..50: mol_type = other DNA
gacaaactgattcaaaaaaggagataattcctgcagataatcatctttac

SEQ ID NO: 47374 - DNA, 50 bp, synthetic construct
  source 1..50: mol_type = other DNA
ctattattggctttcagagtgatatatttgcattcaaaaaaaaattagaa

SEQ ID NO: 47375 - DNA, 50 bp, synthetic construct
  source 1..50: mol_type = other DNA
gacaattgaaccagaaattgattgtattgtcggcatcaggtaaaattgat

SEQ ID NO: 47376 - DNA, 50 bp, synthetic construct
  source 1..50: mol_type = other DNA
aacttccatccttttgattatttatcgaaataatctgctgtgctgataaa

SEQ ID NO: 47377 - DNA, 50 bp, synthetic construct
  source 1..50: mol_type = other DNA
tttcagcgaatcgccgctgaggtagtattcctcgtagctcatcgctgcaa

SEQ ID NO: 47378 - DNA, 50 bp, synthetic construct
  source 1..50: mol_type = other DNA
caacaacattgttgatattattatacttaagcattgcaatcatggatgaa

SEQ ID NO: 47379 - DNA, 50 bp, synthetic construct
  source 1..50: mol_type = other DNA
tttaatgaatgaaattaaaatcaatatagaaatttaactatgtaattaaa

SEQ ID NO: 47380 - DNA, 50 bp, synthetic construct
  source 1..50: mol_type = other DNA
gtatttcttttaactgatttaaagaataataaaacagttaaaaaataaat

SEQ ID NO: 47381 - DNA, 50 bp, synthetic construct
  source 1..50: mol_type = other DNA
aagctttctctccatatttagctgaaaagcatttgcaggaagaaaagaaa

SEQ ID NO: 47382 - DNA, 50 bp, synthetic construct
  source 1..50: mol_type = other DNA
aaagccaatcctattggtttctctatttgataaagttctaaattgaatta

SEQ ID NO: 47383 - DNA, 50 bp, synthetic construct
  source 1..50: mol_type = other DNA
aaggacataccacgcaaataattcttccagaagatgtgtcaaatgtcctt

SEQ ID NO: 47384 - DNA, 50 bp, synthetic construct
  source 1..50: mol_type = other DNA
agggacaatcagcgtgtcaaaaaatcttgtctgtgctgttccttgtcctt

SEQ ID NO: 47385 - DNA, 50 bp, synthetic construct
  source 1..50: mol_type = other DNA
ccggagaaccggacggagcttttgatcgaagcctctttcattttttcctg

SEQ ID NO: 47386 - DNA, 50 bp, synthetic construct
  source 1..50: mol_type = other DNA
attaatagctttccatattttattagaattgaagatggaaaggctgttgt

SEQ ID NO: 47387 - DNA, 50 bp, synthetic construct
  source 1..50: mol_type = other DNA
atataaaaagtcgccaaaaggcggtgatataataaaacgacttggaggtg

SEQ ID NO: 47388 - DNA, 50 bp, synthetic construct
  source 1..50: mol_type = other DNA
agatatccgcctattcatacttcttcccagcgtcagataggcgacgatgt

SEQ ID NO: 47389 - DNA, 50 bp, synthetic construct
  source 1..50: mol_type = other DNA
gtcttcaggggataactgcaacatataaaatccattgaataaatgcagat

SEQ ID NO: 47390 - DNA, 50 bp, synthetic construct
  source 1..50: mol_type = other DNA
tttttacacatttttgccacttcgccctcatcggcaaaaatctcataaag

SEQ ID NO: 47391 - DNA, 50 bp, synthetic construct
  source 1..50: mol_type = other DNA
agtacggtgggccggatggcgagctgccttgccctcctgcgaaagtgact

SEQ ID NO: 47392 - DNA, 50 bp, synthetic construct
  source 1..50: mol_type = other DNA
gcggttagctcagttggttagagcgcgaactgtttttcacgcaaaaccgc

SEQ ID NO: 47393 - DNA, 50 bp, synthetic construct
  source 1..50: mol_type = other DNA
gatatcatacttgccgatgaaccgacaggagcgcttgaccagaagacagg

SEQ ID NO: 47394 - DNA, 50 bp, synthetic construct
  source 1..50: mol_type = other DNA
tggttcagaggcgtttctgcgtctataagcgcaaggaccatgaaaaaagg

SEQ ID NO: 47395 - DNA, 50 bp, synthetic construct
  source 1..50: mol_type = other DNA
aataaagaaagtgcatacgccaaatatggtcggtatttttcgagcaggat

SEQ ID NO: 47396 - DNA, 50 bp, synthetic construct
  source 1..50: mol_type = other DNA
ttctttattatcttttattttagctaattaaaataaaaatatataaaggt

SEQ ID NO: 47397 - DNA, 50 bp, synthetic construct
  source 1..50: mol_type = other DNA
aatatcacacttcagtgtctcgcatatggggcacacaccttatggatata

SEQ ID NO: 47398 - DNA, 50 bp, synthetic construct
  source 1..50: mol_type = other DNA
cgacctctttccacttatccaaggcgtgttcgtccaggtaggccaggtcg

SEQ ID NO: 47399 - DNA, 50 bp, synthetic construct
  source 1..50: mol_type = other DNA
tgtaagaaaaagtcacttgggtatttataccctatacaaggttgtgaacc

SEQ ID NO: 47400 - DNA, 50 bp, synthetic construct
  source 1..50: mol_type = other DNA
aaatgcacggtggtcgtaaaacagtaccgtctttttcccattatggcggc

SEQ ID NO: 47401 - DNA, 50 bp, synthetic construct
  source 1..50: mol_type = other DNA
taaatatttatgcttttgcaaggatttttttgccaattcaaagtcatgtg

SEQ ID NO: 47402 - DNA, 50 bp, synthetic construct
  source 1..50: mol_type = other DNA
agaacattccagcgagagccagctttacgaagccttagcaggcggttcct

SEQ ID NO: 47403 - DNA, 50 bp, synthetic construct
  source 1..50: mol_type = other DNA
acttgtaagcgtatcatctttccaaagaagttgaagactggtaataaaga

SEQ ID NO: 47404 - DNA, 50 bp, synthetic construct
  source 1..50: mol_type = other DNA
cccggaacccaacgctcaaaatctggcgatttcccggagggacatccctt

SEQ ID NO: 47405 - DNA, 50 bp, synthetic construct
  source 1..50: mol_type = other DNA
cggattccggtatggatattccttgtaatacccgtccatgatcgtgagtg

SEQ ID NO: 47406 - DNA, 50 bp, synthetic construct
  source 1..50: mol_type = other DNA
tcaagatactgccggatgtccttgatcacgaactacatagagtatgtgct

SEQ ID NO: 47407 - DNA, 50 bp, synthetic construct
  source 1..50: mol_type = other DNA
tttagattaaaacaatagccagaaaaccgtatctctttttttaatctgaa

SEQ ID NO: 47408 - DNA, 50 bp, synthetic construct
  source 1..50: mol_type = other DNA
ggaaaaatgataattatttactttaaagaaaataaaaatatcatttttag

SEQ ID NO: 47409 - DNA, 50 bp, synthetic construct
  source 1..50: mol_type = other DNA
acaccgcacacattgaaaccgtagtctaaatgtcacaattgtcaagttgt

SEQ ID NO: 47410 - DNA, 50 bp, synthetic construct
  source 1..50: mol_type = other DNA
atcccctatgtgtcaggttcgctttaagttacaaaattagcatagcgtcg

SEQ ID NO: 47411 - DNA, 50 bp, synthetic construct
  source 1..50: mol_type = other DNA
aatctggtacggatggaaaccagaaataatgagacagaagaaaatagata

SEQ ID NO: 47412 - DNA, 50 bp, synthetic construct
  source 1..50: mol_type = other DNA
taccagtaccaggttgcggttataatagtgaccgctacgtccttaacggg

SEQ ID NO: 47413 - DNA, 50 bp, synthetic construct
  source 1..50: mol_type = other DNA
accatccagcagttcccgcagatccagatttgcctcttttgcttccagcc

SEQ ID NO: 47414 - DNA, 50 bp, synthetic construct
  source 1..50: mol_type = other DNA
gagggtgtcgactccgtgcttttcatgaaatccacgctaaggtgtccgtc

SEQ ID NO: 47415 - DNA, 50 bp, synthetic construct
  source 1..50: mol_type = other DNA
gaagacccttttcgattttatatccagccgtaaaaaccaaagatgttttt

SEQ ID NO: 47416 - DNA, 50 bp, synthetic construct
  source 1..50: mol_type = other DNA
tttattaagcacttctattcttttttaccacccttcaaataattaactaa

SEQ ID NO: 47417 - DNA, 50 bp, synthetic construct
  source 1..50: mol_type = other DNA
ttattggatttttctttgaggggatatttattctaagaaatcatcatcgc

SEQ ID NO: 47418 - DNA, 50 bp, synthetic construct
  source 1..50: mol_type = other DNA
acattacccaaaaacattatacaattttgtttccatctttcagataaaaa

SEQ ID NO: 47419 - DNA, 50 bp, synthetic construct
  source 1..50: mol_type = other DNA
tccaaatatcctaaaaataaactaaatatttttgggttattttattttcg

SEQ ID NO: 47420 - DNA, 50 bp, synthetic construct
  source 1..50: mol_type = other DNA
caaaaaatgattgtattacatgagatctcaaaagtcaaaaacagactttt

SEQ ID NO: 47421 - DNA, 50 bp, synthetic construct
  source 1..50: mol_type = other DNA
gcgaaatatctatatctgatatatttatatattaggtgtagacttttacc

SEQ ID NO: 47422 - DNA, 50 bp, synthetic construct
  source 1..50: mol_type = other DNA
aaaagatgacagcaatgaactttgatgaaaacggattggtatatgtattg

SEQ ID NO: 47423 - DNA, 50 bp, synthetic construct
  source 1..50: mol_type = other DNA
gccactcagataatttttataaagctgtttatctttatttgatttgtatt

SEQ ID NO: 47424 - DNA, 50 bp, synthetic construct
  source 1..50: mol_type = other DNA
cctttatccccagttcgattctgggtaaatcaggtttttggggataaagg

SEQ ID NO: 47425 - DNA, 50 bp, synthetic construct
  source 1..50: mol_type = other DNA
atttcaaagtgtcctaattcattagcttcaaaattcagaaatcaggaaat

SEQ ID NO: 47426 - DNA, 50 bp, synthetic construct
  source 1..50: mol_type = other DNA
taatatccctgatttactgtaattataagcacaataagaattaaatattg

SEQ ID NO: 47427 - DNA, 50 bp, synthetic construct
  source 1..50: mol_type = other DNA
ttcttttatagtcttaacaagtgtgctcggtgaagtagagcataatctcg

SEQ ID NO: 47428 - DNA, 50 bp, synthetic construct
  source 1..50: mol_type = other DNA
tgagctgaacggtgcgcgctcccgcggattagacgaaagcgcaaggcgtg

SEQ ID NO: 47429 - DNA, 50 bp, synthetic construct
  source 1..50: mol_type = other DNA
gtaactatctcaaatggataaaaacgttttacctcatttcatacatttac

SEQ ID NO: 47430 - DNA, 50 bp, synthetic construct
  source 1..50: mol_type = other DNA
aaatataataccaccaaaaacaaaattttgttgtcaatgagtatataatc

SEQ ID NO: 47431 - DNA, 50 bp, synthetic construct
  source 1..50: mol_type = other DNA
ctgaaattgatacaattctgctcgaaataattaaattgtatcaatctcgg

SEQ ID NO: 47432 - DNA, 50 bp, synthetic construct
  source 1..50: mol_type = other DNA
gctgcttggacagacgagcgcagggaggttttcggtgctgtcccagtcct

SEQ ID NO: 47433 - DNA, 50 bp, synthetic construct
  source 1..50: mol_type = other DNA
cgtaagcaagtcgcacatttataggccgctgcaacgacgacccctgcgag

SEQ ID NO: 47434 - DNA, 50 bp, synthetic construct
  source 1..50: mol_type = other DNA
cgcacccacctttgatgatctgcgcgggcagacggccgcagccgggggcg

SEQ ID NO: 47435 - DNA, 50 bp, synthetic construct
  source 1..50: mol_type = other DNA
tttaatctgatctgaactctttcccaaattgtagttgtcatttgataaaa

SEQ ID NO: 47436 - DNA, 50 bp, synthetic construct
  source 1..50: mol_type = other DNA
aatacaccatttcagcaggcagaatagcttaaaagcagaaatgcggataa

SEQ ID NO: 47437 - DNA, 50 bp, synthetic construct
  source 1..50: mol_type = other DNA
tgatgaaatttttagtgaaacagcaaattgttttgaaggaatatccatgc

SEQ ID NO: 47438 - DNA, 50 bp, synthetic construct
  source 1..50: mol_type = other DNA
catttctgcgaattgcagaacctttgatatatcaagcgattttggaaata

SEQ ID NO: 47439 - DNA, 50 bp, synthetic construct
  source 1..50: mol_type = other DNA
gtgtagatggctatttggaatatgattatattgctggtatgagtttacag

SEQ ID NO: 47440 - DNA, 50 bp, synthetic construct
  source 1..50: mol_type = other DNA
tgcaggaattagattgtgctgcgtagaagctgcaatatataaattatttg

SEQ ID NO: 47441 - DNA, 50 bp, synthetic construct
  source 1..50: mol_type = other DNA
gatgtcttaacacaaaacaaggctatcctgattacgagttggtggacatt

SEQ ID NO: 47442 - DNA, 50 bp, synthetic construct
  source 1..50: mol_type = other DNA
tattgtttatattagtaatattggtgtaggtgcagcctggatgtaaaaag

SEQ ID NO: 47443 - DNA, 50 bp, synthetic construct
  source 1..50: mol_type = other DNA
tgtaggggcggttatcttacctctttacgggtaagaatgtcatacagcgt

SEQ ID NO: 47444 - DNA, 50 bp, synthetic construct
  source 1..50: mol_type = other DNA
tgctgacgcgggcatatccggcggtctccccggcaacctccgctgccagt

SEQ ID NO: 47445 - DNA, 50 bp, synthetic construct
  source 1..50: mol_type = other DNA
gaacagttcgagcgtgtgcagaccatggtcgcaatcagctcatgctgttc

SEQ ID NO: 47446 - DNA, 50 bp, synthetic construct
  source 1..50: mol_type = other DNA
tggaacacggtcaatctgctgctccgctgacgcacctttccagggtggct

SEQ ID NO: 47447 - DNA, 50 bp, synthetic construct
  source 1..50: mol_type = other DNA
ccgatttacaagcgattgccgagcattctctaaatatgctgtataatcgg

SEQ ID NO: 47448 - DNA, 50 bp, synthetic construct
  source 1..50: mol_type = other DNA
taaaatttaatttattttctaaactttttttctatatttaataaattttt

SEQ ID NO: 47449 - DNA, 50 bp, synthetic construct
  source 1..50: mol_type = other DNA
cgtttgcatatctacttcgcggaactgaatataaatatcttttttgatct

SEQ ID NO: 47450 - DNA, 50 bp, synthetic construct
  source 1..50: mol_type = other DNA
cataaaaagaacatggaagaagagtcctgttcttccctgctcacgcccat

SEQ ID NO: 47451 - DNA, 50 bp, synthetic construct
  source 1..50: mol_type = other DNA
ctcatttttacggaaaggatgatatttgtcataaaagccgccgccatatc

SEQ ID NO: 47452 - DNA, 50 bp, synthetic construct
  source 1..50: mol_type = other DNA
gcacggatcgccgcggacagcggcgcgccgcggagggcggcggagtagat

SEQ ID NO: 47453 - DNA, 50 bp, synthetic construct
  source 1..50: mol_type = other DNA
gcgcggtgtcaaaggtgcgcgtgacgaaacgcactacgagatacgggcgc

SEQ ID NO: 47454 - DNA, 50 bp, synthetic construct
  source 1..50: mol_type = other DNA
aacattatcggtagagttatcaacaagtttttcgtcttcagcataatctt

SEQ ID NO: 47455 - DNA, 50 bp, synthetic construct
  source 1..50: mol_type = other DNA
acaaaaaatgaaaacaaaggaagttcgcaacttttgcaatcaattcttct

SEQ ID NO: 47456 - DNA, 50 bp, synthetic construct
  source 1..50: mol_type = other DNA
actccgcagtgtagctggaattacctgcaataccataatatctgaggata

SEQ ID NO: 47457 - DNA, 50 bp, synthetic construct
  source 1..50: mol_type = other DNA
aagttgaaaatcaaagttctagcagctgctaaaaacaagaacaacaaaaa

SEQ ID NO: 47458 - DNA, 50 bp, synthetic construct
  source 1..50: mol_type = other DNA
gcagagcagccagcttgacttattcgataacatcaatctcttttctgctt

SEQ ID NO: 47459 - DNA, 50 bp, synthetic construct
  source 1..50: mol_type = other DNA
acctgtgcctcaaaactgtggagctggtgccggagtttctcccatcaggt

SEQ ID NO: 47460 - DNA, 50 bp, synthetic construct
  source 1..50: mol_type = other DNA
aaatggagtacataggtattggaatatggaaatgggtaggtatctgtagc

SEQ ID NO: 47461 - DNA, 50 bp, synthetic construct
  source 1..50: mol_type = other DNA
accattatctattttgtaaccaaaggaaaaattaaagaatagaagcagga

SEQ ID NO: 47462 - DNA, 50 bp, synthetic construct
  source 1..50: mol_type = other DNA
caacaaatttgtgaatttatgttatataattacgattgtgcgattttctc

SEQ ID NO: 47463 - DNA, 50 bp, synthetic construct
  source 1..50: mol_type = other DNA
gcgatcatgcgcgcactgtctctgtacatgcgcttatagcggtcgattat

SEQ ID NO: 47464 - DNA, 50 bp, synthetic construct
  source 1..50: mol_type = other DNA
tgcttaaactgaaagatcaaaaaatgtaatttgacctttatacttaagct

SEQ ID NO: 47465 - DNA, 50 bp, synthetic construct
  source 1..50: mol_type = other DNA
attttgaaatattgctctttggatattaccaaataatggtttacaaaaaa

SEQ ID NO: 47466 - DNA, 50 bp, synthetic construct
  source 1..50: mol_type = other DNA
ttgtaacaattactgaattacaaaaggggtatcggaagtaatcgttctaa

SEQ ID NO: 47467 - DNA, 50 bp, synthetic construct
  source 1..50: mol_type = other DNA
attcattacagatgctatccagcgcggcctttttttattccttacggaac

SEQ ID NO: 47468 - DNA, 50 bp, synthetic construct
  source 1..50: mol_type = other DNA
taaaattgatacgatcatcgccaataatgggatttatcgatacaatttaa

SEQ ID NO: 47469 - DNA, 50 bp, synthetic construct
  source 1..50: mol_type = other DNA
gaatgtacaaagcccccggttttgcgctgaccgacgcgcttctcgcgctc

SEQ ID NO: 47470 - DNA, 50 bp, synthetic construct
  source 1..50: mol_type = other DNA
aagattgggaaataaaaaaacatttggatggctttttagttccccgggct

SEQ ID NO: 47471 - DNA, 50 bp, synthetic construct
  source 1..50: mol_type = other DNA
atgctataatacttgcataggaggaaccacctatttcttctctataattc

SEQ ID NO: 47472 - DNA, 50 bp, synthetic construct
  source 1..50: mol_type = other DNA
ttacataacaaatacaattttcagatgaatgtattatacacgatatgaga

SEQ ID NO: 47473 - DNA, 50 bp, synthetic construct
  source 1..50: mol_type = other DNA
tcagattgtctcgcatctgaaagatttcagacggacaggactcacactga

SEQ ID NO: 47474 - DNA, 50 bp, synthetic construct
  source 1..50: mol_type = other DNA
gtttgcatacagtctgaatgacgaacagaccaggaagaccagctccatag

SEQ ID NO: 47475 - DNA, 50 bp, synthetic construct
  source 1..50: mol_type = other DNA
caattatagccaataaatacggtatataccgtaaacaaaggggacatatc

SEQ ID NO: 47476 - DNA, 50 bp, synthetic construct
  source 1..50: mol_type = other DNA
ggcagagggacaaagttcaaatcccgcaccacaaattgagacattctgcc

SEQ ID NO: 47477 - DNA, 50 bp, synthetic construct
  source 1..50: mol_type = other DNA
cagcagcttcatcaatgaccgctttgatagtgtcatcgatgaatctgatg

SEQ ID NO: 47478 - DNA, 50 bp, synthetic construct
  source 1..50: mol_type = other DNA
caatatcaaaatctttttctttgctttgggacttaaagatttgcggctcg

SEQ ID NO: 47479 - DNA, 50 bp, synthetic construct
  source 1..50: mol_type = other DNA
tttttgcaaaaatacccgaaaaaattttttatccttaccttttgacgacg

SEQ ID NO: 47480 - DNA, 50 bp, synthetic construct
  source 1..50: mol_type = other DNA
gaatcagtatttgcaaatctgcagaaccaaagacctgcattttctttttc

SEQ ID NO: 47481 - DNA, 50 bp, synthetic construct
  source 1..50: mol_type = other DNA
tctgcgttcgtgaagaagcgccgatatctgaacgggctcattcccgtccg

SEQ ID NO: 47482 - DNA, 50 bp, synthetic construct
  source 1..50: mol_type = other DNA
gagggatgatccctcaatctcctacaaaggagaaaacaatctcccggttc

SEQ ID NO: 47483 - DNA, 50 bp, synthetic construct
  source 1..50: mol_type = other DNA
cgccgtacgcggggttgtcgaacgcgaatttgacggccccgcttccgaaa

SEQ ID NO: 47484 - DNA, 50 bp, synthetic construct
  source 1..50: mol_type = other DNA
tattctttcagaattaatgctataagaagagagttaaaaatgatggaata

SEQ ID NO: 47485 - DNA, 50 bp, synthetic construct
  source 1..50: mol_type = other DNA
cttttgagagagcaagttataagtatatgggggatgccctcttacaaaaa

SEQ ID NO: 47486 - DNA, 50 bp, synthetic construct
  source 1..50: mol_type = other DNA
tgacgctgcacgtcgggctcggcacgttccgtgtataaccgtaaccatac

SEQ ID NO: 47487 - DNA, 50 bp, synthetic construct
  source 1..50: mol_type = other DNA
atttttcaaaaaaatatagttaaataatggtttatatttttcttgcaaat

SEQ ID NO: 47488 - DNA, 50 bp, synthetic construct
  source 1..50: mol_type = other DNA
cgaaaagtgctgacacggcaatacgcgttcttgccgaccagcgattcggc

SEQ ID NO: 47489 - DNA, 50 bp, synthetic construct
  source 1..50: mol_type = other DNA
agcggctttgccgcggctaacgccgaggaatttgcggctgtacagcggat

SEQ ID NO: 47490 - DNA, 50 bp, synthetic construct
  source 1..50: mol_type = other DNA
tttaaaagaaaaaggtattactttaagaagcacaaaatgcaatggataag

SEQ ID NO: 47491 - DNA, 50 bp, synthetic construct
  source 1..50: mol_type = other DNA
gataagaaaactgtgcatgcgctgccttgtttatattcaaattttgtatt

SEQ ID NO: 47492 - DNA, 50 bp, synthetic construct
  source 1..50: mol_type = other DNA
gcttgtaaacgaggtgcggaggggaaacactctcggcaaagcagactgaa

SEQ ID NO: 47493 - DNA, 50 bp, synthetic construct
  source 1..50: mol_type = other DNA
tccagcatcgatatcggcctttgtttacaatgatacctgctaccataaac

SEQ ID NO: 47494 - DNA, 50 bp, synthetic construct
  source 1..50: mol_type = other DNA
tttaatgaaaggtctggagggtgtgcacatcctttgaacctttacacgaa

SEQ ID NO: 47495 - DNA, 50 bp, synthetic construct
  source 1..50: mol_type = other DNA
acccctgcatatctgtttgtacagtttttagggaaaaattatacaggggc

SEQ ID NO: 47496 - DNA, 50 bp, synthetic construct
  source 1..50: mol_type = other DNA
tcgctcagcggactggaggaaaaatatttcggctctacgcctcacagcgt

SEQ ID NO: 47497 - DNA, 50 bp, synthetic construct
  source 1..50: mol_type = other DNA
atggttactcctcatttgtatcaaatcgactacccagaagtatcgctcgg

SEQ ID NO: 47498 - DNA, 50 bp, synthetic construct
  source 1..50: mol_type = other DNA
acaaagaacttctcgcaccgcaagaaattctattgcgtgatcagctcagt

SEQ ID NO: 47499 - DNA, 50 bp, synthetic construct
  source 1..50: mol_type = other DNA
tatgtcactacccaaaggaaaggagctgcgggactttgtatataaacata

SEQ ID NO: 47500 - DNA, 50 bp, synthetic construct
  source 1..50: mol_type = other DNA
taatgcatggctaaaggagttatttaaataatatgccacatagcctttgg

SEQ ID NO: 47501 - DNA, 50 bp, synthetic construct
  source 1..50: mol_type = other DNA
atatatactatcaaatattctattttcctaattcatatgaaagttctata

SEQ ID NO: 47502 - DNA, 50 bp, synthetic construct
  source 1..50: mol_type = other DNA
agaaaaatataaaccattatttgtatcaagactattttttatattttttt

SEQ ID NO: 47503 - DNA, 50 bp, synthetic construct
  source 1..50: mol_type = other DNA
accatataataactcatttttatgatcattgaaaggaaaaataatattga

SEQ ID NO: 47504 - DNA, 50 bp, synthetic construct
  source 1..50: mol_type = other DNA
gcgcctgttcacggttatctctaactgataaatcaaccgttttcggcaat

SEQ ID NO: 47505 - DNA, 50 bp, synthetic construct
  source 1..50: mol_type = other DNA
cagatgttcgcaaaagatatgcggcagtccatattgtttcagaagggctg

SEQ ID NO: 47506 - DNA, 50 bp, synthetic construct
  source 1..50: mol_type = other DNA
atgcggctttttatggtatttccatgacatattaccgtacgatcgggcag

SEQ ID NO: 47507 - DNA, 50 bp, synthetic construct
  source 1..50: mol_type = other DNA
gatattaaaaagtgcttttgctatatattctaacaggtaatttttctatt

SEQ ID NO: 47508 - DNA, 50 bp, synthetic construct
  source 1..50: mol_type = other DNA
aaagcttatgaaggaaagcgtcgacttttactgttgcctttacaaggaac

SEQ ID NO: 47509 - DNA, 50 bp, synthetic construct
  source 1..50: mol_type = other DNA
aaaaatccctataactattttttaattaaaaatttgtcccgcccttttta

SEQ ID NO: 47510 - DNA, 50 bp, synthetic construct
  source 1..50: mol_type = other DNA
tttcgcttccgaaacgaagataacgaattatctatgtgctattcagcaaa

SEQ ID NO: 47511 - DNA, 50 bp, synthetic construct
  source 1..50: mol_type = other DNA
tgaggacgctggcatgagcattgaagtcaaggctcattttgctggaatcg

SEQ ID NO: 47512 - DNA, 50 bp, synthetic construct
  source 1..50: mol_type = other DNA
attaaaaaaagtttgaaaggaattatcattcctttctatgtttttggggt

SEQ ID NO: 47513 - DNA, 50 bp, synthetic construct
  source 1..50: mol_type = other DNA
ttctgctttaaattgatagactttataaatctgatgatttttaatctgct

SEQ ID NO: 47514 - DNA, 50 bp, synthetic construct
  source 1..50: mol_type = other DNA
agtgaactgcataactgcattactttcccaatgcagagtggcagcatatt

SEQ ID NO: 47515 - DNA, 50 bp, synthetic construct
  source 1..50: mol_type = other DNA
tgggcaaagtttacaacataatcattttgtgatacaataatctttgtgag

SEQ ID NO: 47516 - DNA, 50 bp, synthetic construct
  source 1..50: mol_type = other DNA
tgatctcaaaggtggagacgttttccacaccgattccagcccatcgttca

SEQ ID NO: 47517 - DNA, 50 bp, synthetic construct
  source 1..50: mol_type = other DNA
ttttatgccaaggaaagaaaggtgaagtccggttattccatggctgtatt

SEQ ID NO: 47518 - DNA, 50 bp, synthetic construct
  source 1..50: mol_type = other DNA
gtcatatgggtatgcaatgggagaaagcttcctgagcatgagagtatgac

SEQ ID NO: 47519 - DNA, 50 bp, synthetic construct
  source 1..50: mol_type = other DNA
aagcattggatgtctgatacctcggatgatgttctttccatcctgctctg

SEQ ID NO: 47520 - DNA, 50 bp, synthetic construct
  source 1..50: mol_type = other DNA
tcaaaagcaatcccgagtgggaaatggttctgtgatacaataaattgtac

SEQ ID NO: 47521 - DNA, 50 bp, synthetic construct
  source 1..50: mol_type = other DNA
gctcaactacgagcagccctacggcgcaggtcggcaaatcggagttcgag

SEQ ID NO: 47522 - DNA, 50 bp, synthetic construct
  source 1..50: mol_type = other DNA
caaagcgtggaaaaggcggaaaaatatgcttgctcctctctaatgttttc

SEQ ID NO: 47523 - DNA, 50 bp, synthetic construct
  source 1..50: mol_type = other DNA
tttagctaaaaaatattgtatcaaaagatgtatattacgtgttagctaaa

SEQ ID NO: 47524 - DNA, 50 bp, synthetic construct
  source 1..50: mol_type = other DNA
tgattcgttatcaacaataaaagttaagttatggtgttgcaccgcattca

SEQ ID NO: 47525 - DNA, 50 bp, synthetic construct
  source 1..50: mol_type = other DNA
tactatcataaagggatggggagagatctttgcttccccttcattaataa

SEQ ID NO: 47526 - DNA, 50 bp, synthetic construct
  source 1..50: mol_type = other DNA
ttgtgttgaaataataatggtcgcatttgtgctttattaaataaacataa

SEQ ID NO: 47527 - DNA, 50 bp, synthetic construct
  source 1..50: mol_type = other DNA
agggctgtgattatgtttattaaggcttatccaaagtatctctcaagtaa

SEQ ID NO: 47528 - DNA, 50 bp, synthetic construct
  source 1..50: mol_type = other DNA
gaccgtggaatcatggtggatcgtaaacgagaaaccttcgggtggcggca

SEQ ID NO: 47529 - DNA, 50 bp, synthetic construct
  source 1..50: mol_type = other DNA
ggaaacggtctgcattgacgtggcgagccatattttcttcggtttcttcc

SEQ ID NO: 47530 - DNA, 50 bp, synthetic construct
  source 1..50: mol_type = other DNA
aaagatttatttttcccagaacttgcaattggaatgcttaataatacttg

SEQ ID NO: 47531 - DNA, 50 bp, synthetic construct
  source 1..50: mol_type = other DNA
tggtactgtcttcatttatatggatttccttttttatgttacgcaaaaat

SEQ ID NO: 47532 - DNA, 50 bp, synthetic construct
  source 1..50: mol_type = other DNA
ataaatttcatttttccctgaaaaaataatcttggaaaaacgaaaatata

SEQ ID NO: 47533 - DNA, 50 bp, synthetic construct
  source 1..50: mol_type = other DNA
aggctggaaacacggcagtaggcagccgccgcctatttcattttcagcat

SEQ ID NO: 47534 - DNA, 50 bp, synthetic construct
  source 1..50: mol_type = other DNA
caagtcagtcgtatccatgagaaatttttcttgcaaaatggactgtattt

SEQ ID NO: 47535 - DNA, 50 bp, synthetic construct
  source 1..50: mol_type = other DNA
atccgtaaccacaaggacatggattcatggtggcgatcagttgaaagtct

SEQ ID NO: 47536 - DNA, 50 bp, synthetic construct
  source 1..50: mol_type = other DNA
aatacaatgtttatatcagcaaagtacttgtgtgataaaatcatcatata

SEQ ID NO: 47537 - DNA, 50 bp, synthetic construct
  source 1..50: mol_type = other DNA
atgccattttcaatccgatagccaaacatccagatgattgaacacggcag

SEQ ID NO: 47538 - DNA, 50 bp, synthetic construct
  source 1..50: mol_type = other DNA
cggctcggataatacatctgtgctgcatcgcagacttattatctgagatg

SEQ ID NO: 47539 - DNA, 50 bp, synthetic construct
  source 1..50: mol_type = other DNA
cgccgtctcgggatcacttccaagacggcggaggtgacggcggcgcggcg

SEQ ID NO: 47540 - DNA, 50 bp, synthetic construct
  source 1..50: mol_type = other DNA
gagtatgttacgcttccaattctaatatcaagagatgaggtagaatatta

SEQ ID NO: 47541 - DNA, 50 bp, synthetic construct
  source 1..50: mol_type = other DNA
tgctacaacttttatattttgtgcttgacaagataataaaatttgtattg

SEQ ID NO: 47542 - DNA, 50 bp, synthetic construct
  source 1..50: mol_type = other DNA
atatccctttgtccgctatgcgctcagcggaatatactacacgaagatat

SEQ ID NO: 47543 - DNA, 50 bp, synthetic construct
  source 1..50: mol_type = other DNA
gattcgccaatatcaacccttttccgggccgtcaatcagctcatcgaaaa

SEQ ID NO: 47544 - DNA, 50 bp, synthetic construct
  source 1..50: mol_type = other DNA
tgctatattgactgccgtaagcagtgttcctgtcggtcgtctttatgtat

SEQ ID NO: 47545 - DNA, 50 bp, synthetic construct
  source 1..50: mol_type = other DNA
caaatattaagcaaagacaaatggaacccctttgtctagctttttctttc

SEQ ID NO: 47546 - DNA, 50 bp, synthetic construct
  source 1..50: mol_type = other DNA
gtataaattattggaatttatcaaagtttgatacaaataatggtttatat

SEQ ID NO: 47547 - DNA, 50 bp, synthetic construct
  source 1..50: mol_type = other DNA
gcatattgtgctatatttaacataattataatgaagatggttcaattaat

SEQ ID NO: 47548 - DNA, 50 bp, synthetic construct
  source 1..50: mol_type = other DNA
ttctactactgcaatctatcgttagagcccgagttcctgcaggccgttga

SEQ ID NO: 47549 - DNA, 50 bp, synthetic construct
  source 1..50: mol_type = other DNA
tggattgaggaggtctctggctttgacaagccttgcacttccgaaatcct

SEQ ID NO: 47550 - DNA, 50 bp, synthetic construct
  source 1..50: mol_type = other DNA
aacggcatgaaacgtgtgcgtaaaaatttacagcttgcgatatattcgca

SEQ ID NO: 47551 - DNA, 50 bp, synthetic construct
  source 1..50: mol_type = other DNA
gctatgatgtcaatgactgcctaataggaggcaaacatgattatttttga

SEQ ID NO: 47552 - DNA, 50 bp, synthetic construct
  source 1..50: mol_type = other DNA
agagaaatatacaccaaaaataagcatttgttttagtagaatattttaaa

SEQ ID NO: 47553 - DNA, 50 bp, synthetic construct
  source 1..50: mol_type = other DNA
aaaacgtacaaccacagaaaaaagatatttatatatggtttgtaattctt

SEQ ID NO: 47554 - DNA, 50 bp, synthetic construct
  source 1..50: mol_type = other DNA
gacaagaaaactgtacataagctgccttgtttatattcaaattttgtatt

SEQ ID NO: 47555 - DNA, 50 bp, synthetic construct
  source 1..50: mol_type = other DNA
atttgattttcaggacataaaaatactgcggtaggcgttgacaatgccgc

SEQ ID NO: 47556 - DNA, 50 bp, synthetic construct
  source 1..50: mol_type = other DNA
gtttgcatacagtctgaatgacgaacggaccaggaagaccagctccacag

SEQ ID NO: 47557 - DNA, 50 bp, synthetic construct
  source 1..50: mol_type = other DNA
gtaatatgtcacctgtgaaggaggtgtggcactccacggatgcatatcgc

SEQ ID NO: 47558 - DNA, 50 bp, synthetic construct
  source 1..50: mol_type = other DNA
ggtatccgtacagtctgtttcgtatcaatattatcaactgttgccataaa

SEQ ID NO: 47559 - DNA, 50 bp, synthetic construct
  source 1..50: mol_type = other DNA
aatatcagaccttttctggcgatttatattcccaatccttagaatctatt

SEQ ID NO: 47560 - DNA, 50 bp, synthetic construct
  source 1..50: mol_type = other DNA
tataaatgaataaagcgcgttataataataaaaaacttaatgtatttatt

SEQ ID NO: 47561 - DNA, 50 bp, synthetic construct
  source 1..50: mol_type = other DNA
taaaaaccggggcggcgaagaaaaatttttatacccacgcccgatttcct

SEQ ID NO: 47562 - DNA, 50 bp, synthetic construct
  source 1..50: mol_type = other DNA
agtcctagggcagcggcaacatccattccctttgccgcggcggcttctct

SEQ ID NO: 47563 - DNA, 50 bp, synthetic construct
  source 1..50: mol_type = other DNA
actgcttcgttcttaaagaaagcttttacttcatttaagcttatagcata

SEQ ID NO: 47564 - DNA, 50 bp, synthetic construct
  source 1..50: mol_type = other DNA
gcattttgaaaggatatactataatatagaagttagtgattccgaactgc

SEQ ID NO: 47565 - DNA, 50 bp, synthetic construct
  source 1..50: mol_type = other DNA
gtgtcaacgccgccaaggagaagggccttgctctttggtatcaaaatcaa

SEQ ID NO: 47566 - DNA, 50 bp, synthetic construct
  source 1..50: mol_type = other DNA
agtatttgatgttagtacacctattaattatccccagcctattaaatagc

SEQ ID NO: 47567 - DNA, 50 bp, synthetic construct
  source 1..50: mol_type = other DNA
gcaagaaattgtaaaaagcatcttgcagattcgtcagtacaatacaggta

SEQ ID NO: 47568 - DNA, 50 bp, synthetic construct
  source 1..50: mol_type = other DNA
cgaatgcgtcctgaaggacgcaagataatgcggggtgacagaattgtagt

SEQ ID NO: 47569 - DNA, 50 bp, synthetic construct
  source 1..50: mol_type = other DNA
aacaaacgggttatagcgagttagtactaagtgattataaccaacaggtg

SEQ ID NO: 47570 - DNA, 50 bp, synthetic construct
  source 1..50: mol_type = other DNA
aatttaatgcctctgaaattcctaaagacgaatgaataaagcaagaaaag

SEQ ID NO: 47571 - DNA, 50 bp, synthetic construct
  source 1..50: mol_type = other DNA
cgctgctgcgccgcatcccctgcggcttctgccattgcggcgctgcagga

SEQ ID NO: 47572 - DNA, 50 bp, synthetic construct
  source 1..50: mol_type = other DNA
cagtatgatgaccttaaggcttatgcagaagccttaaggatatggcatat

SEQ ID NO: 47573 - DNA, 50 bp, synthetic construct
  source 1..50: mol_type = other DNA
gtatattatatcacgaaagcctccatcgtccgcagcgtaatcgtatataa

SEQ ID NO: 47574 - DNA, 50 bp, synthetic construct
  source 1..50: mol_type = other DNA
cggagaccttgaaaccagattcaagatttcgttcaagttcatgaagtgtc

SEQ ID NO: 47575 - DNA, 50 bp, synthetic construct
  source 1..50: mol_type = other DNA
tttgaagttgcttcttaaggaggaacttgtggttaagaaggttcttgtaa

SEQ ID NO: 47576 - DNA, 50 bp, synthetic construct
  source 1..50: mol_type = other DNA
cggtgtccgtccttacacgaaacgcaagccgcaataaattttgggcaccg

SEQ ID NO: 47577 - DNA, 50 bp, synthetic construct
  source 1..50: mol_type = other DNA
tttcgttcaatttattcctccgaattttgtgcggaataactcttggagat

SEQ ID NO: 47578 - DNA, 50 bp, synthetic construct
  source 1..50: mol_type = other DNA
gacagcatcggtcttgccggtgtcggctgaaaatcaagagaaatgctatc

SEQ ID NO: 47579 - DNA, 50 bp, synthetic construct
  source 1..50: mol_type = other DNA
tgctgctgcatagctttatttttttaaaataagaaatctttgttttcatg

SEQ ID NO: 47580 - DNA, 50 bp, synthetic construct
  source 1..50: mol_type = other DNA
agaccctggaaataatattatagcaaataacggcacaatgaattttaact

SEQ ID NO: 47581 - DNA, 50 bp, synthetic construct
  source 1..50: mol_type = other DNA
tcctcccagcggaaggtcagctcgtacgcagcgactatccacaaacagga

SEQ ID NO: 47582 - DNA, 50 bp, synthetic construct
  source 1..50: mol_type = other DNA
cgtgacgcgaagtacagcggcaagacacacttcaaagaatctgctccgaa

SEQ ID NO: 47583 - DNA, 50 bp, synthetic construct
  source 1..50: mol_type = other DNA
ctgatcaagctcgcagagaatggttcgcccatctcttcgcgcatggactt

SEQ ID NO: 47584 - DNA, 50 bp, synthetic construct
  source 1..50: mol_type = other DNA
ttcgacaccggagagcggatgactattccggatggacctagttatgtgac

SEQ ID NO: 47585 - DNA, 50 bp, synthetic construct
  source 1..50: mol_type = other DNA
ctctaggtttgataaatatgaaaaattgcgcaaggcatcataacggaaac

SEQ ID NO: 47586 - DNA, 50 bp, synthetic construct
  source 1..50: mol_type = other DNA
aaatatgcaaacaagccgaaacctacgtgtttctacagattttgaggagc

SEQ ID NO: 47587 - DNA, 50 bp, synthetic construct
  source 1..50: mol_type = other DNA
gctatttttctctcaaaaggcaggtgtcttgactttgcgagaaaaatagt

SEQ ID NO: 47588 - DNA, 50 bp, synthetic construct
  source 1..50: mol_type = other DNA
gctacatattatagcataacataaagaaaacataaaaaataaaatgtata

SEQ ID NO: 47589 - DNA, 50 bp, synthetic construct
  source 1..50: mol_type = other DNA
cgcagccgagtgccaattctatccgttatacagattagcactcggcacac

SEQ ID NO: 47590 - DNA, 50 bp, synthetic construct
  source 1..50: mol_type = other DNA
acatatttcttgtgcttatcgttcgtcaacgatatatccgagaataatgt

SEQ ID NO: 47591 - DNA, 50 bp, synthetic construct
  source 1..50: mol_type = other DNA
aaggtaatagtcttatcaatgattgtaataattatctttcgcatttattt

SEQ ID NO: 47592 - DNA, 50 bp, synthetic construct
  source 1..50: mol_type = other DNA
agcataaaaaaattaggaggtaaaattgtatgtaataatttttgtatcta

SEQ ID NO: 47593 - DNA, 50 bp, synthetic construct
  source 1..50: mol_type = other DNA
ttgttttcctgcttatcatcttgtttgcatgatggaatgcgataaaatca

SEQ ID NO: 47594 - DNA, 50 bp, synthetic construct
  source 1..50: mol_type = other DNA
taaaaaaagagagattagaatttttagaaattctaatatatcttcatttc

SEQ ID NO: 47595 - DNA, 50 bp, synthetic construct
  source 1..50: mol_type = other DNA
agaaaaaattataaaagaatatcatataatcttccattatggtttttacc

SEQ ID NO: 47596 - DNA, 50 bp, synthetic construct
  source 1..50: mol_type = other DNA
acaaactttatgtatcatgatataataaaataacgaaaaatatgctttga

SEQ ID NO: 47597 - DNA, 50 bp, synthetic construct
  source 1..50: mol_type = other DNA
acaaaacgtttcaaatcctggagatttaaacctcattttaaactcaacaa

SEQ ID NO: 47598 - DNA, 50 bp, synthetic construct
  source 1..50: mol_type = other DNA
gagcagctactccttgttttgaaattaagcaatggttcaaatatcttttc

SEQ ID NO: 47599 - DNA, 50 bp, synthetic construct
  source 1..50: mol_type = other DNA
ggatttatccctttgccttcataatattttcctgcaatgcggatataata

SEQ ID NO: 47600 - DNA, 50 bp, synthetic construct
  source 1..50: mol_type = other DNA
aagcggtgcccacggctgggttgaccggaatccagcagtcccatccgcat

SEQ ID NO: 47601 - DNA, 50 bp, synthetic construct
  source 1..50: mol_type = other DNA
acagagcaattagaggttctaatattttccagagtatctcggatgtggta

SEQ ID NO: 47602 - DNA, 50 bp, synthetic construct
  source 1..50: mol_type = other DNA
taatcttgattatccttaaatattataatactaaattataacccaaattt

SEQ ID NO: 47603 - DNA, 50 bp, synthetic construct
  source 1..50: mol_type = other DNA
aaagatattttaaaaaagctaaaacattttgatattctttatataattta

SEQ ID NO: 47604 - DNA, 50 bp, synthetic construct
  source 1..50: mol_type = other DNA
tcttctttccttttttgcagatcctgaccctcctaaaaatttcgtcgtta

SEQ ID NO: 47605 - DNA, 50 bp, synthetic construct
  source 1..50: mol_type = other DNA
tttatggcggcttggaagtacaaagctttccggctccagcccgcagcggg

SEQ ID NO: 47606 - DNA, 50 bp, synthetic construct
  source 1..50: mol_type = other DNA
ggtcctcatggtcggtggagacgcggtggtcgtgccgctccatgattttc

SEQ ID NO: 47607 - DNA, 50 bp, synthetic construct
  source 1..50: mol_type = other DNA
aaataaatctatgtaagaaaataattattttttcttatatatactatttt

SEQ ID NO: 47608 - DNA, 50 bp, synthetic construct
  source 1..50: mol_type = other DNA
tataaatttttagataatttccgttaacatttgtttttctagtatttata

SEQ ID NO: 47609 - DNA, 50 bp, synthetic construct
  source 1..50: mol_type = other DNA
gacttttcttatcaggatatcggatatcaaatggaaaagggagaaatcat

SEQ ID NO: 47610 - DNA, 50 bp, synthetic construct
  source 1..50: mol_type = other DNA
gttcaccttcaactgcgaaacggaaaaacgtctcgccgttgtagtcgata

SEQ ID NO: 47611 - DNA, 50 bp, synthetic construct
  source 1..50: mol_type = other DNA
ggattttttttattcttcatttcacaaaaaaagagtataaaaaataaacc

SEQ ID NO: 47612 - DNA, 50 bp, synthetic construct
  source 1..50: mol_type = other DNA
gcagaagccatcggccttatggcaaaggacattcgggttgccgcttacgg

SEQ ID NO: 47613 - DNA, 50 bp, synthetic construct
  source 1..50: mol_type = other DNA
tgcgttgtataaaaggatacatcaaagcgtgtctgctatactgcaacaat

SEQ ID NO: 47614 - DNA, 50 bp, synthetic construct
  source 1..50: mol_type = other DNA
tatttgcttttctatctttattctttatatcaagtcaatatcagcaaata

SEQ ID NO: 47615 - DNA, 50 bp, synthetic construct
  source 1..50: mol_type = other DNA
aaacattatcggtagagttatcaacaaacatgcaactttatataatgttt

SEQ ID NO: 47616 - DNA, 50 bp, synthetic construct
  source 1..50: mol_type = other DNA
aagcccgcaggcgttgaaaacctgcggaatttctcccgcagtctggcctc

SEQ ID NO: 47617 - DNA, 50 bp, synthetic construct
  source 1..50: mol_type = other DNA
aaaaagcccataaataaagcattttataataacacttgctagggagttat

SEQ ID NO: 47618 - DNA, 50 bp, synthetic construct
  source 1..50: mol_type = other DNA
tatgtattatatatcatatatactttattattaattttatttaataactt

SEQ ID NO: 47619 - DNA, 50 bp, synthetic construct
  source 1..50: mol_type = other DNA
atccatcaagggtaggtatacgccggggcttgatattaccgttgatgaga

SEQ ID NO: 47620 - DNA, 50 bp, synthetic construct
  source 1..50: mol_type = other DNA
gacagattaatatagaagtaacacatttccggctattgttttaatctaaa

SEQ ID NO: 47621 - DNA, 50 bp, synthetic construct
  source 1..50: mol_type = other DNA
cagaagccaagaagcggagtgtgaaattagtttcactattttggcttctt

SEQ ID NO: 47622 - DNA, 50 bp, synthetic construct
  source 1..50: mol_type = other DNA
aacggaatccgaaactccgcttctctgcttgcgctgttcctgattccgca

SEQ ID NO: 47623 - DNA, 50 bp, synthetic construct
  source 1..50: mol_type = other DNA
ggacaggaaagctgcaagtgctgaaaatagcactcgcatcctctacctta

SEQ ID NO: 47624 - DNA, 50 bp, synthetic construct
  source 1..50: mol_type = other DNA
catatctttataatttataccataattgcatcctccttcttaaaagtatg

SEQ ID NO: 47625 - DNA, 50 bp, synthetic construct
  source 1..50: mol_type = other DNA
tggacctacaggacctactgcccgatcgagcaaccgggcctcaaggagct

SEQ ID NO: 47626 - DNA, 50 bp, synthetic construct
  source 1..50: mol_type = other DNA
ctttatttatccgggatacagctttaatattgcttcggatattccgaagt

SEQ ID NO: 47627 - DNA, 50 bp, synthetic construct
  source 1..50: mol_type = other DNA
tggtactgtcttcatttatatggatttccttctttaatgttacgcaaaaa

SEQ ID NO: 47628 - DNA, 50 bp, synthetic construct
  source 1..50: mol_type = other DNA
caagaccgcaaagaaagaccgcaaaattgattttgaaaagaaaggtcttt

SEQ ID NO: 47629 - DNA, 50 bp, synthetic construct
  source 1..50: mol_type = other DNA
tcgctgtctgtggaaacacgggcgtatgtgatttcatcctcaaaataaga

SEQ ID NO: 47630 - DNA, 50 bp, synthetic construct
  source 1..50: mol_type = other DNA
aaatccgcaagggtttattttttataaaaaaaatgttgcaattattttac

SEQ ID NO: 47631 - DNA, 50 bp, synthetic construct
  source 1..50: mol_type = other DNA
tatcttcgtgtagtatattccgctgaataatgatactgattttagtgata

SEQ ID NO: 47632 - DNA, 50 bp, synthetic construct
  source 1..50: mol_type = other DNA
cagggcaaggtcctgccagtaggcattgctctggacaggttttatccctg

SEQ ID NO: 47633 - DNA, 50 bp, synthetic construct
  source 1..50: mol_type = other DNA
tgatcctcacggacatttttgattcggtcggaaagtccgcgtgcgtgtcg

SEQ ID NO: 47634 - DNA, 50 bp, synthetic construct
  source 1..50: mol_type = other DNA
atcattgtatcagcgaatcaaaaatgttgatttttcgctgtgtttatgat

SEQ ID NO: 47635 - DNA, 50 bp, synthetic construct
  source 1..50: mol_type = other DNA
tgataaataattcaaaaagagtgatatggatagtttcaaattccatatgg

SEQ ID NO: 47636 - DNA, 50 bp, synthetic construct
  source 1..50: mol_type = other DNA
acctgagatgacaagcatatctagagtcatgaatgcttatagtcaaagac

SEQ ID NO: 47637 - DNA, 50 bp, synthetic construct
  source 1..50: mol_type = other DNA
cgccaaccagcgggacgaggtgcgtggggacatcgtcccttctcccaacg

SEQ ID NO: 47638 - DNA, 50 bp, synthetic construct
  source 1..50: mol_type = other DNA
cacggtatgccttctgctgaaaaacgtcttgccgcacaaggcaaactgcc

SEQ ID NO: 47639 - DNA, 50 bp, synthetic construct
  source 1..50: mol_type = other DNA
tcgagattttgcattcagcatcgccgttcatcaataatgcttgttctcgc

SEQ ID NO: 47640 - DNA, 50 bp, synthetic construct
  source 1..50: mol_type = other DNA
tggattcagaggtaatatgacacctatttctctcatttttataggctctt

SEQ ID NO: 47641 - DNA, 50 bp, synthetic construct
  source 1..50: mol_type = other DNA
acacgcttatgctcccgacgaattgaaaaaacggcggagcatacgataac

SEQ ID NO: 47642 - DNA, 50 bp, synthetic construct
  source 1..50: mol_type = other DNA
tgatataggaaatctcggtcgggcatatagggtgcttatttccaatatca

SEQ ID NO: 47643 - DNA, 50 bp, synthetic construct
  source 1..50: mol_type = other DNA
aaatagcttgatatatctccgctttatccgggagatattagaaacggttg

SEQ ID NO: 47644 - DNA, 50 bp, synthetic construct
  source 1..50: mol_type = other DNA
ttggatgcgatcattcagaggaacatattccgcagcctggttatcttgaa

SEQ ID NO: 47645 - DNA, 50 bp, synthetic construct
  source 1..50: mol_type = other DNA
ctctcattaagacttcagttatctaaagtaaaaagaagggttgctgcata

SEQ ID NO: 47646 - DNA, 50 bp, synthetic construct
  source 1..50: mol_type = other DNA
aggcaaagggctaaagcacaattcaatgattgtactttagaaatttatga

SEQ ID NO: 47647 - DNA, 50 bp, synthetic construct
  source 1..50: mol_type = other DNA
gctatgtcatattgcaaagtgattgcaaggtcttttttatgtcttataaa

SEQ ID NO: 47648 - DNA, 50 bp, synthetic construct
  source 1..50: mol_type = other DNA
atgacattgagctgaagtatgtcatttgacgatctcataatcaacgaatg

SEQ ID NO: 47649 - DNA, 50 bp, synthetic construct
  source 1..50: mol_type = other DNA
agttctctgctggctgttatttttatgaaaaagacgcccggcaaaaagat

SEQ ID NO: 47650 - DNA, 50 bp, synthetic construct
  source 1..50: mol_type = other DNA
gtttgcatacagtctgaatgacgaacggatcaggaagaccagctccacag

SEQ ID NO: 47651 - DNA, 50 bp, synthetic construct
  source 1..50: mol_type = other DNA
ggggatgcggacggtgaaagcagccaggctttctcccagaccgcatggta

SEQ ID NO: 47652 - DNA, 50 bp, synthetic construct
  source 1..50: mol_type = other DNA
aatacagccatggaataaccggacttcacctttctttccttggcataaat

SEQ ID NO: 47653 - DNA, 50 bp, synthetic construct
  source 1..50: mol_type = other DNA
cataatcaatgaaggctcgattagtgtccaagcggccttcatggattctc

SEQ ID NO: 47654 - DNA, 50 bp, synthetic construct
  source 1..50: mol_type = other DNA
aaaaagtttcggtattccggcattaaaaggccggaatatcaagcgttttc

SEQ ID NO: 47655 - DNA, 50 bp, synthetic construct
  source 1..50: mol_type = other DNA
ctacgaatcagtaggtctagggttcgaagcaaagacgtgtttgcagtgtg

SEQ ID NO: 47656 - DNA, 50 bp, synthetic construct
  source 1..50: mol_type = other DNA
gaaacaaggcaggtcaaggacagcaaggtagctggttacgctcgtgtttc

SEQ ID NO: 47657 - DNA, 50 bp, synthetic construct
  source 1..50: mol_type = other DNA
tgaacagcaaaaccgcccagaccgaacggaatggaaggttttttaacatt

SEQ ID NO: 47658 - DNA, 50 bp, synthetic construct
  source 1..50: mol_type = other DNA
tctgctcccatctgacgttcggctatagcaacgcattatcaggatataaa

SEQ ID NO: 47659 - DNA, 50 bp, synthetic construct
  source 1..50: mol_type = other DNA
cccacgaaagtccagcttgaaatgatcataaaaatgagttattatatggt

SEQ ID NO: 47660 - DNA, 50 bp, synthetic construct
  source 1..50: mol_type = other DNA
ttaattaaaaaggtgcaatatatatttatatcaagcgatttgacgtataa

SEQ ID NO: 47661 - DNA, 50 bp, synthetic construct
  source 1..50: mol_type = other DNA
caaaaaaagacatacttatagaattttatatataacttgcatactttttg

SEQ ID NO: 47662 - DNA, 50 bp, synthetic construct
  source 1..50: mol_type = other DNA
tatttgctgatattgacttgatataaagaataaagatagaaaagcaaata

SEQ ID NO: 47663 - DNA, 50 bp, synthetic construct
  source 1..50: mol_type = other DNA
ccaaggggtgtgcatcttttaattataagcccatagtgctgaccgctgac

SEQ ID NO: 47664 - DNA, 50 bp, synthetic construct
  source 1..50: mol_type = other DNA
cgcggccaccttcggcaggtgtgtcagcacaccaagaccgaatgaggaaa

SEQ ID NO: 47665 - DNA, 50 bp, synthetic construct
  source 1..50: mol_type = other DNA
gaagcatattggaaagatccttcaaggacaggcattttgcaatgcatctc

SEQ ID NO: 47666 - DNA, 50 bp, synthetic construct
  source 1..50: mol_type = other DNA
gcaaaaggcaggctcccaagagcctgcatgcttggcggcctgctttttca

SEQ ID NO: 47667 - DNA, 50 bp, synthetic construct
  source 1..50: mol_type = other DNA
gaggtgaactgctcgtccttgtccgttgatttttacgagcacttcaccca

SEQ ID NO: 47668 - DNA, 50 bp, synthetic construct
  source 1..50: mol_type = other DNA
tattccagataaaagtaatttaaagttctaaatgccaaaagccgggaaat

SEQ ID NO: 47669 - DNA, 50 bp, synthetic construct
  source 1..50: mol_type = other DNA
cccgttaggttacagaaaactaagtacttagtttatataaaccttttccc

SEQ ID NO: 47670 - DNA, 50 bp, synthetic construct
  source 1..50: mol_type = other DNA
aagatcgatacaattatagccaacaaagcggaacaaacggtagagttctt

SEQ ID NO: 47671 - DNA, 50 bp, synthetic construct
  source 1..50: mol_type = other DNA
ccgaaaataccattaattcaccgccttggacaaactaatggtagcggtta

SEQ ID NO: 47672 - DNA, 50 bp, synthetic construct
  source 1..50: mol_type = other DNA
taataaattattataataaacctgcacttttttatttgcattatttattt

SEQ ID NO: 47673 - DNA, 50 bp, synthetic construct
  source 1..50: mol_type = other DNA
agttgattactcaaaataggggtgttgcattttataaaataacatcaaag

SEQ ID NO: 47674 - DNA, 50 bp, synthetic construct
  source 1..50: mol_type = other DNA
aatataagtaatgtgtttacatattgagaaagaaaaacttattagtaatt

SEQ ID NO: 47675 - DNA, 50 bp, synthetic construct
  source 1..50: mol_type = other DNA
aaccgaaaaattaaattcagagctatacctcttttcaaaatttttgagtt

SEQ ID NO: 47676 - DNA, 50 bp, synthetic construct
  source 1..50: mol_type = other DNA
tattacttgtaaattacgtaataaggcgtttacggaatatacagcaaaga

SEQ ID NO: 47677 - DNA, 50 bp, synthetic construct
  source 1..50: mol_type = other DNA
cagagaagctttttcccgttttgcaaggaatagagggcaatatagccgct

SEQ ID NO: 47678 - DNA, 50 bp, synthetic construct
  source 1..50: mol_type = other DNA
acaaaaaagaacaatgggataatatggattatcaaaattttcagttatgc

SEQ ID NO: 47679 - DNA, 50 bp, synthetic construct
  source 1..50: mol_type = other DNA
tgttaacggtggaacaattgtattatgtcacaattgtcaagttgttttcg

SEQ ID NO: 47680 - DNA, 50 bp, synthetic construct
  source 1..50: mol_type = other DNA
ttaaataatttaatcaagaggaggatgctcatatacataagggtatgagc

SEQ ID NO: 47681 - DNA, 50 bp, synthetic construct
  source 1..50: mol_type = other DNA
aaaaaatgagaagaaccgtgggtttatcaccacaattcttgtcaatttcc

SEQ ID NO: 47682 - DNA, 50 bp, synthetic construct
  source 1..50: mol_type = other DNA
tctgcttggtctgccggatctggctggtcagatgcggcagaccctctgca

SEQ ID NO: 47683 - DNA, 50 bp, synthetic construct
  source 1..50: mol_type = other DNA
tcatctctccaatgatcattggtatgcctgaagcatcattttgaaacctg

SEQ ID NO: 47684 - DNA, 50 bp, synthetic construct
  source 1..50: mol_type = other DNA
tggagatagtttataaatgaaaggatacttcattttttatgctatctttg

SEQ ID NO: 47685 - DNA, 50 bp, synthetic construct
  source 1..50: mol_type = other DNA
aaccagagggtctggatctgaggttgacagtagttccagaccccttgtaa

SEQ ID NO: 47686 - DNA, 50 bp, synthetic construct
  source 1..50: mol_type = other DNA
atttttcttgtttccgttgtatatgcatttttttcaatctcaagattata

SEQ ID NO: 47687 - DNA, 50 bp, synthetic construct
  source 1..50: mol_type = other DNA
ttacatatatttaatttctttttttatttccacaaattcctcatttgtaa

SEQ ID NO: 47688 - DNA, 50 bp, synthetic construct
  source 1..50: mol_type = other DNA
aaaactaatagtatttatcgtttgaaagtcagaaaaataataggggaaga

SEQ ID NO: 47689 - DNA, 50 bp, synthetic construct
  source 1..50: mol_type = other DNA
cttctttaaattatatttctaatttttgcctaaaataagggtgtcggaag

SEQ ID NO: 47690 - DNA, 50 bp, synthetic construct
  source 1..50: mol_type = other DNA
ttttacagcgtttccgataaatccgcggtcacacttacacacctgtaaaa

SEQ ID NO: 47691 - DNA, 50 bp, synthetic construct
  source 1..50: mol_type = other DNA
gttcagtactgttcggatagcagagatcatcttacagttctccaaaaaag

SEQ ID NO: 47692 - DNA, 50 bp, synthetic construct
  source 1..50: mol_type = other DNA
tgtatcatacccttgtaaatttttcaaaaaatgagcactgatgaaaatca

SEQ ID NO: 47693 - DNA, 50 bp, synthetic construct
  source 1..50: mol_type = other DNA
cttagataaccgcttgtatacgttcgaaaaattacaaaaggtagaagata

SEQ ID NO: 47694 - DNA, 50 bp, synthetic construct
  source 1..50: mol_type = other DNA
gattatgtgtatattatatcataaagaaagaaggtataataccaccgatt

SEQ ID NO: 47695 - DNA, 50 bp, synthetic construct
  source 1..50: mol_type = other DNA
gtattttggaaaatctttcgtcgcaagcagcgtttgaagctcctgaatga

SEQ ID NO: 47696 - DNA, 50 bp, synthetic construct
  source 1..50: mol_type = other DNA
attctcggctgaaaaatcaccatccgtatatcagatgttccatcgtgaaa

SEQ ID NO: 47697 - DNA, 50 bp, synthetic construct
  source 1..50: mol_type = other DNA
ccggattgccaagcagtttttgcacttggctaagatgccatgcacacgcc

SEQ ID NO: 47698 - DNA, 50 bp, synthetic construct
  source 1..50: mol_type = other DNA
attgatatttattataaatctgatttatacgatttataatcatcgtcttt

SEQ ID NO: 47699 - DNA, 50 bp, synthetic construct
  source 1..50: mol_type = other DNA
tttttgtattttaccagttcggtcatgaaaaaagttatgaaacaagtaaa

SEQ ID NO: 47700 - DNA, 50 bp, synthetic construct
  source 1..50: mol_type = other DNA
cttttttccttttactccattacgctttccttggcataaaaggaaaaaaa

SEQ ID NO: 47701 - DNA, 50 bp, synthetic construct
  source 1..50: mol_type = other DNA
atatgttaaaatttacggcggcgccggcggagccgtcaaggataaagaaa

SEQ ID NO: 47702 - DNA, 50 bp, synthetic construct
  source 1..50: mol_type = other DNA
cgttgattatatctcggtttagagtttgtaaaagcgtaatattatttgta

SEQ ID NO: 47703 - DNA, 50 bp, synthetic construct
  source 1..50: mol_type = other DNA
catctaccgtgttgaagtgggcggtggacgacactttcccgcgggagata

SEQ ID NO: 47704 - DNA, 50 bp, synthetic construct
  source 1..50: mol_type = other DNA
aacccaaaaatattgtatcaaaactacggaacgattgatatttttgataa

SEQ ID NO: 47705 - DNA, 50 bp, synthetic construct
  source 1..50: mol_type = other DNA
gcagaagtgaatcatggactgaagaaaccagatataagtttttgctcaag

SEQ ID NO: 47706 - DNA, 50 bp, synthetic construct
  source 1..50: mol_type = other DNA
tgtttcctgcatttatggctttggtggtaatataataaatgcagacggta

SEQ ID NO: 47707 - DNA, 50 bp, synthetic construct
  source 1..50: mol_type = other DNA
atttttttctgtcttttatttctttaatattaaaaaagggtataaaaaat

SEQ ID NO: 47708 - DNA, 50 bp, synthetic construct
  source 1..50: mol_type = other DNA
aataatatttgatattatttgtttataatagaatggaaaaggatattatt

SEQ ID NO: 47709 - DNA, 50 bp, synthetic construct
  source 1..50: mol_type = other DNA
tggtttgtgtgaagctcgatatgaattatcatccaccctgacagctccat

SEQ ID NO: 47710 - DNA, 50 bp, synthetic construct
  source 1..50: mol_type = other DNA
agtatgctccccagtcggtactctctccaaaactgaagaatctgtatttc

SEQ ID NO: 47711 - DNA, 50 bp, synthetic construct
  source 1..50: mol_type = other DNA
ataaaatcatcgtgctgttcaactacacttacacacggcgatggcaagta

SEQ ID NO: 47712 - DNA, 50 bp, synthetic construct
  source 1..50: mol_type = other DNA
atcaatttgtttggggcattatatatattatataatatttcaaagctgat

SEQ ID NO: 47713 - DNA, 50 bp, synthetic construct
  source 1..50: mol_type = other DNA
aatccccagcgctttttcaaactcaagaccatgaaaaaaccccggatgtt

SEQ ID NO: 47714 - DNA, 50 bp, synthetic construct
  source 1..50: mol_type = other DNA
tggcggttttgggcttttgtatttagaaacctctaaacttaaaactgcca

SEQ ID NO: 47715 - DNA, 50 bp, synthetic construct
  source 1..50: mol_type = other DNA
tgatagacacaatactcaccgaaaaatgagggcgaggtgccgcagtatta

SEQ ID NO: 47716 - DNA, 50 bp, synthetic construct
  source 1..50: mol_type = other DNA
gaccgctcacgctccgaaagctggacggagcttgcgcggcgcaagcagat

SEQ ID NO: 47717 - DNA, 50 bp, synthetic construct
  source 1..50: mol_type = other DNA
caggaggagcaattcgggaataccagtgtgactatgaaaataccctcgtt

SEQ ID NO: 47718 - DNA, 50 bp, synthetic construct
  source 1..50: mol_type = other DNA
ggacagaatgtatcgacttgcggcgcggcaaaaacggatacattcaggcg

SEQ ID NO: 47719 - DNA, 50 bp, synthetic construct
  source 1..50: mol_type = other DNA
actcttgcgtatcctgcgacccgccgccgggaataaggatattgacgatt

SEQ ID NO: 47720 - DNA, 50 bp, synthetic construct
  source 1..50: mol_type = other DNA
ttgctctcagattccttctgtgatatatgatatcctgcttttctgagctg

SEQ ID NO: 47721 - DNA, 50 bp, synthetic construct
  source 1..50: mol_type = other DNA
aaaaaatgcgagctggtcacaccgatcaggaagaccagctccatagtttt

SEQ ID NO: 47722 - DNA, 50 bp, synthetic construct
  source 1..50: mol_type = other DNA
gaaatcaaaaaagatatttatattcaggcacatgcatctttattgatggg

SEQ ID NO: 47723 - DNA, 50 bp, synthetic construct
  source 1..50: mol_type = other DNA
tttgataatggaatccacaccgtaatttcggtgtggaacggccaaaggac

SEQ ID NO: 47724 - DNA, 50 bp, synthetic construct
  source 1..50: mol_type = other DNA
attttatgaatattaaaatgaattataccatattttaaaatcaatcttgc

SEQ ID NO: 47725 - DNA, 50 bp, synthetic construct
  source 1..50: mol_type = other DNA
tcacccggatgtccttctcacggtatttttccagaaacattgtatcgatc

SEQ ID NO: 47726 - DNA, 50 bp, synthetic construct
  source 1..50: mol_type = other DNA
aaaatatttatctgttttctttgagcggttggtgaacaggctgcggtcct

SEQ ID NO: 47727 - DNA, 50 bp, synthetic construct
  source 1..50: mol_type = other DNA
cgttgcggatggtgtagccaaacggtaattgtgttttcaataccgcttga

SEQ ID NO: 47728 - DNA, 50 bp, synthetic construct
  source 1..50: mol_type = other DNA
gtgacttcaaaaccgtgtttgactgcagtccgccagcgtcaccgcggcac

SEQ ID NO: 47729 - DNA, 50 bp, synthetic construct
  source 1..50: mol_type = other DNA
tgtggaataagaggaatattctcctcattgtttcctcctgttataccgct

SEQ ID NO: 47730 - DNA, 50 bp, synthetic construct
  source 1..50: mol_type = other DNA
tataattggctttcagagtgatatatatattgctctaatattaaagtcct

SEQ ID NO: 47731 - DNA, 50 bp, synthetic construct
  source 1..50: mol_type = other DNA
agtaatgatacagagatggagggaaaattaaacatatctgcttattttct

SEQ ID NO: 47732 - DNA, 50 bp, synthetic construct
  source 1..50: mol_type = other DNA
gaagtctttataggaattgtaataaacgtcacatttatttaaacaatcat

SEQ ID NO: 47733 - DNA, 50 bp, synthetic construct
  source 1..50: mol_type = other DNA
gaaaaaatcctcacgaagtcttgactctaaatcaatttgtggatttttga

SEQ ID NO: 47734 - DNA, 50 bp, synthetic construct
  source 1..50: mol_type = other DNA
cagttgctttttacaaacgcatcatatgatataattgatataagcaggca

SEQ ID NO: 47735 - DNA, 50 bp, synthetic construct
  source 1..50: mol_type = other DNA
tgtgttgtataaaaggatacatcaaagcgtgtctgctatactgcaacaat

SEQ ID NO: 47736 - DNA, 50 bp, synthetic construct
  source 1..50: mol_type = other DNA
cgtccgtggatttttggtcggacgttcagccttggagggcatcacgtctc

SEQ ID NO: 47737 - DNA, 50 bp, synthetic construct
  source 1..50: mol_type = other DNA
gacagcaaaaattggtatggtatcattttaaaatgagtattgctaaagaa

SEQ ID NO: 47738 - DNA, 50 bp, synthetic construct
  source 1..50: mol_type = other DNA
acaaatccagccaaaagactggattttaaattacatttggatagcatttt

SEQ ID NO: 47739 - DNA, 50 bp, synthetic construct
  source 1..50: mol_type = other DNA
attgaatgatcggttgcctatatcaattaataggcaaaaagagagggaat

SEQ ID NO: 47740 - DNA, 50 bp, synthetic construct
  source 1..50: mol_type = other DNA
gagaaccccgggaagggaggacggtgccgtcctgcacgcgacgcaaaagc

SEQ ID NO: 47741 - DNA, 50 bp, synthetic construct
  source 1..50: mol_type = other DNA
agagccacaggataataagcataacattattatattttgcatgtggcaga

SEQ ID NO: 47742 - DNA, 50 bp, synthetic construct
  source 1..50: mol_type = other DNA
tattgatattgttaagattgtcaaagcgaactgccttaacaatatcagcc

SEQ ID NO: 47743 - DNA, 50 bp, synthetic construct
  source 1..50: mol_type = other DNA
ataaatcagctaatttttcggatgcaatgaagaaacggctgctcaagtaa

SEQ ID NO: 47744 - DNA, 50 bp, synthetic construct
  source 1..50: mol_type = other DNA
tccattttgaaaaattttgaagcgatccgttctggcaacaccaaaacgga

SEQ ID NO: 47745 - DNA, 50 bp, synthetic construct
  source 1..50: mol_type = other DNA
cctgattggaaataccaagatcaaacttagccttaataaacataatcaca

SEQ ID NO: 47746 - DNA, 50 bp, synthetic construct
  source 1..50: mol_type = other DNA
gtttttagtgaaattatatgaagaaaagcgtaaataatttcaataaaatc

SEQ ID NO: 47747 - DNA, 50 bp, synthetic construct
  source 1..50: mol_type = other DNA
attagcacttacataatgcgactcctgtaacgcattcggtaattgtcttc

SEQ ID NO: 47748 - DNA, 50 bp, synthetic construct
  source 1..50: mol_type = other DNA
aatggagagagttgtagaaagggtcgatcccaatgttcactgtgaccacc

SEQ ID NO: 47749 - DNA, 50 bp, synthetic construct
  source 1..50: mol_type = other DNA
ccggtaatcgtggattatttttatcacgttgtataatcggtatataccga

SEQ ID NO: 47750 - DNA, 50 bp, synthetic construct
  source 1..50: mol_type = other DNA
aaagtattcatgtactatgcgtaatattataaattttgttaatttatttt

SEQ ID NO: 47751 - DNA, 50 bp, synthetic construct
  source 1..50: mol_type = other DNA
gtaagagggtttatagtagattttataaaatcaattcttcatatctataa

SEQ ID NO: 47752 - DNA, 50 bp, synthetic construct
  source 1..50: mol_type = other DNA
taaccaaaatggtggcggattcgcattggaatatttatatttgttgcttt

SEQ ID NO: 47753 - DNA, 50 bp, synthetic construct
  source 1..50: mol_type = other DNA
caagcggaatatgcttacagtcttattagtatgtagccataatccggtgc

SEQ ID NO: 47754 - DNA, 50 bp, synthetic construct
  source 1..50: mol_type = other DNA
atttaggtcacctatattttataatattcaataatatttttgttttttac

SEQ ID NO: 47755 - DNA, 50 bp, synthetic construct
  source 1..50: mol_type = other DNA
caacgactatgccgcccggatgggcggtcatcccgcccaccattcagccc

SEQ ID NO: 47756 - DNA, 50 bp, synthetic construct
  source 1..50: mol_type = other DNA
cagaaaacagaaaatgcggtacaataaaatacatcgttatagaatttatt

SEQ ID NO: 47757 - DNA, 50 bp, synthetic construct
  source 1..50: mol_type = other DNA
tatatttttatatacagattttgcttggcatatctgtatatgaaacagta

SEQ ID NO: 47758 - DNA, 50 bp, synthetic construct
  source 1..50: mol_type = other DNA
gaaccggaaacaacggtgccgtgtgcagacggtattgttgtatctggtat

SEQ ID NO: 47759 - DNA, 50 bp, synthetic construct
  source 1..50: mol_type = other DNA
cttaaataaatattcaaattattaatgaataatactagtagttatataaa

SEQ ID NO: 47760 - DNA, 50 bp, synthetic construct
  source 1..50: mol_type = other DNA
ggtatatcgcaagtattccgggcatttttccgtaacttttgcgatatctt

SEQ ID NO: 47761 - DNA, 50 bp, synthetic construct
  source 1..50: mol_type = other DNA
tgaataaagcgcgttataatttagttttaaatagtaagtatagtttagaa

SEQ ID NO: 47762 - DNA, 50 bp, synthetic construct
  source 1..50: mol_type = other DNA
actaatcatgtaaacgtgacacagtattatgtcaccttgtcactatttat

SEQ ID NO: 47763 - DNA, 50 bp, synthetic construct
  source 1..50: mol_type = other DNA
attgttttactacttcatcgatgttaaaaacaataaagtaataagaaaat

SEQ ID NO: 47764 - DNA, 50 bp, synthetic construct
  source 1..50: mol_type = other DNA
tgattgtgatgctgccagacgtgagctaatgtgcgggtgcgggacgttga

SEQ ID NO: 47765 - DNA, 50 bp, synthetic construct
  source 1..50: mol_type = other DNA
gtccgcctcgccgaagatcacccggcagcgatatcttcggcagcatagag

SEQ ID NO: 47766 - DNA, 50 bp, synthetic construct
  source 1..50: mol_type = other DNA
atttagtatatcgtatttttccaaagaatgaaaatggtgaaatcttaaat

SEQ ID NO: 47767 - DNA, 50 bp, synthetic construct
  source 1..50: mol_type = other DNA
atataaaaggaatacaaactataaaatttataaaaataaatcttttatta

SEQ ID NO: 47768 - DNA, 50 bp, synthetic construct
  source 1..50: mol_type = other DNA
tgttcttgagctccgtgaagccggtgtcggcaacacagattatatccacg

SEQ ID NO: 47769 - DNA, 50 bp, synthetic construct
  source 1..50: mol_type = other DNA
taaacaaaggatagaaaaatcatgaattttattttttagatttgtctttc

SEQ ID NO: 47770 - DNA, 50 bp, synthetic construct
  source 1..50: mol_type = other DNA
ggtacattttttttataaaggacagctgagtttttgaataaaaatgtaca

SEQ ID NO: 47771 - DNA, 50 bp, synthetic construct
  source 1..50: mol_type = other DNA
gatatcggcctatgggcgcaagcatataatcgcttatatagataataata

SEQ ID NO: 47772 - DNA, 50 bp, synthetic construct
  source 1..50: mol_type = other DNA
gcttcaagtggtctataatttccgctgggaaatatcagaaccagacaagt

SEQ ID NO: 47773 - DNA, 50 bp, synthetic construct
  source 1..50: mol_type = other DNA
ttaagaatattataacggcaatggcgtgatattgaggtcggtatcatcaa

SEQ ID NO: 47774 - DNA, 50 bp, synthetic construct
  source 1..50: mol_type = other DNA
tctggcattgatattgaaatcattccggcatattcaatgagacaacatct

SEQ ID NO: 47775 - DNA, 50 bp, synthetic construct
  source 1..50: mol_type = other DNA
gtcctatcattgttttttttcaacctcattaagaaaaacaaggatgatac

SEQ ID NO: 47776 - DNA, 50 bp, synthetic construct
  source 1..50: mol_type = other DNA
ctttgctcataggatactgtatgtgttctttcatatcaacctgattttcc

SEQ ID NO: 47777 - DNA, 50 bp, synthetic construct
  source 1..50: mol_type = other DNA
tcagatttgctggatattataggaattccaatgtaatacagttaatcgta

SEQ ID NO: 47778 - DNA, 50 bp, synthetic construct
  source 1..50: mol_type = other DNA
gaaattgcctattatattttacgctgaatataaatatcttttttgatttc

SEQ ID NO: 47779 - DNA, 50 bp, synthetic construct
  source 1..50: mol_type = other DNA
cttcgtataataatcgacctgtgcttatacagatggattgcctctgccca

SEQ ID NO: 47780 - DNA, 50 bp, synthetic construct
  source 1..50: mol_type = other DNA
cctactaacagcttgtaaaactaatatttttcttgcaaatactgtgtaat

SEQ ID NO: 47781 - DNA, 50 bp, synthetic construct
  source 1..50: mol_type = other DNA
agcacagcctcacctcctacaacaattcagccaggtatgcagctgacgca

SEQ ID NO: 47782 - DNA, 50 bp, synthetic construct
  source 1..50: mol_type = other DNA
tttaatgaataaaaaaatattaaacaatttcattttttgtaaaaattaaa

SEQ ID NO: 47783 - DNA, 50 bp, synthetic construct
  source 1..50: mol_type = other DNA
gctcaaaacctgcacacccagattgcaggctgaccgtgcttgccgtattc

SEQ ID NO: 47784 - DNA, 50 bp, synthetic construct
  source 1..50: mol_type = other DNA
cgcaactatcatcaaaaagcctatgcataatctttgcgattgccggcgag

SEQ ID NO: 47785 - DNA, 50 bp, synthetic construct
  source 1..50: mol_type = other DNA
ttccgggctttcagagcgatgtatagatacaacggaaacaaaaatatgta

SEQ ID NO: 47786 - DNA, 50 bp, synthetic construct
  source 1..50: mol_type = other DNA
aggtcatgaaagcgaaatggagggaaacctcccgaagataaaaatagcat

SEQ ID NO: 47787 - DNA, 50 bp, synthetic construct
  source 1..50: mol_type = other DNA
taattatactatagaataaaaaaaaatgaagttactttacgatataataa

SEQ ID NO: 47788 - DNA, 50 bp, synthetic construct
  source 1..50: mol_type = other DNA
agctgaaagaaaagcactggttacagaaaagatgtgctataatttatctt

SEQ ID NO: 47789 - DNA, 50 bp, synthetic construct
  source 1..50: mol_type = other DNA
tatggattttcgtgatttggacgaaaattcacaaataaaaaaaacaactt

SEQ ID NO: 47790 - DNA, 50 bp, synthetic construct
  source 1..50: mol_type = other DNA
aattctgcttcagatagagatctatatagcgaacatcatcaaagcgcaga

SEQ ID NO: 47791 - DNA, 50 bp, synthetic construct
  source 1..50: mol_type = other DNA
cggagcagaccggcaaagatgtggatccacggacgttccgagtataaccg

SEQ ID NO: 47792 - DNA, 50 bp, synthetic construct
  source 1..50: mol_type = other DNA
atggcgcatcccagaacttgtcatgatgtaccggaactgctttgcgccgc

SEQ ID NO: 47793 - DNA, 50 bp, synthetic construct
  source 1..50: mol_type = other DNA
taatattctacctcatctcttgatattagaattggaagcgtaacatactc

SEQ ID NO: 47794 - DNA, 50 bp, synthetic construct
  source 1..50: mol_type = other DNA
gtgaactgctggagcagatggttcgtgaaactactcaatccgaggcacat

SEQ ID NO: 47795 - DNA, 50 bp, synthetic construct
  source 1..50: mol_type = other DNA
ggtggacatatgaaagtatatatccggtggattacattggttgtaggtgt

SEQ ID NO: 47796 - DNA, 50 bp, synthetic construct
  source 1..50: mol_type = other DNA
atttcctgatttctgaattttgaagctaatgaattaggacattttgaaat

SEQ ID NO: 47797 - DNA, 50 bp, synthetic construct
  source 1..50: mol_type = other DNA
cgcatctgggtgcatggcggaaacatgttttgattatgttagcagatccg

SEQ ID NO: 47798 - DNA, 50 bp, synthetic construct
  source 1..50: mol_type = other DNA
ccaacaaaagcctttgaagttgcgctgccaagcctaaatgctattggtgg

SEQ ID NO: 47799 - DNA, 50 bp, synthetic construct
  source 1..50: mol_type = other DNA
ttgtgactttgcaggagcatggatattgtcatgcaaggcagaaacctcac

SEQ ID NO: 47800 - DNA, 50 bp, synthetic construct
  source 1..50: mol_type = other DNA
cctttgataatgacatgccactcagatagtgttaatgcgttttacaatcg

SEQ ID NO: 47801 - DNA, 50 bp, synthetic construct
  source 1..50: mol_type = other DNA
ttaattagaaaatataaaccactaattgcagagatttcttctgtaaaaaa

SEQ ID NO: 47802 - DNA, 50 bp, synthetic construct
  source 1..50: mol_type = other DNA
gaagagcaaaagaaaaaagctaaaattcttgctttttctttcatttcagg

SEQ ID NO: 47803 - DNA, 50 bp, synthetic construct
  source 1..50: mol_type = other DNA
gcgttaaaggattaatcgttgatggttttcttatattaaaattaaaatat

SEQ ID NO: 47804 - DNA, 50 bp, synthetic construct
  source 1..50: mol_type = other DNA
cggagcggcacagcaggtgtggaacacggtcggtcacagtcattccgccg

SEQ ID NO: 47805 - DNA, 50 bp, synthetic construct
  source 1..50: mol_type = other DNA
ttgttcgagatttgagtagagaagaaagtcgtcggttgaatatcgacggc

SEQ ID NO: 47806 - DNA, 50 bp, synthetic construct
  source 1..50: mol_type = other DNA
ttatggttgattccaacttgcaaaggtagatatgtcgtaaataacggtga

SEQ ID NO: 47807 - DNA, 50 bp, synthetic construct
  source 1..50: mol_type = other DNA
acctatcggctcgtagatttgatggagcggaaatctattgatagttagga

SEQ ID NO: 47808 - DNA, 50 bp, synthetic construct
  source 1..50: mol_type = other DNA
aatcagagttaatatgtccgataccaaaatgtgcggccgaaactcgagcg

SEQ ID NO: 47809 - DNA, 50 bp, synthetic construct
  source 1..50: mol_type = other DNA
gccgccgctgcgaaaaaggcaaaggatttcaatgccagttcagcggcggc

SEQ ID NO: 47810 - DNA, 50 bp, synthetic construct
  source 1..50: mol_type = other DNA
ggtgtccgcccttacacgaaacgcaagcgtttattgcaaaccccatcacg

SEQ ID NO: 47811 - DNA, 50 bp, synthetic construct
  source 1..50: mol_type = other DNA
tttcggaagaaatatgacatatctttaaattgaaattttatctatgaaaa

SEQ ID NO: 47812 - DNA, 50 bp, synthetic construct
  source 1..50: mol_type = other DNA
aaaagccatcaattacgatgataaaattaaatcctgatttgacacatatt

SEQ ID NO: 47813 - DNA, 50 bp, synthetic construct
  source 1..50: mol_type = other DNA
gcaagcttatgtatttgactcgtcgtttcatttttccctcctgtgcttcg

SEQ ID NO: 47814 - DNA, 50 bp, synthetic construct
  source 1..50: mol_type = other DNA
aacctacgggtagtgtagcattagtactaacttaacacagcccacaggaa

SEQ ID NO: 47815 - DNA, 50 bp, synthetic construct
  source 1..50: mol_type = other DNA
tcatcattattagctggctctagtagtctagcgccatctaaaaataatgg

SEQ ID NO: 47816 - DNA, 50 bp, synthetic construct
  source 1..50: mol_type = other DNA
agaaaaaagcttttatttattgtttgacctataaatattgtgttttttca

SEQ ID NO: 47817 - DNA, 50 bp, synthetic construct
  source 1..50: mol_type = other DNA
gtacttgaatgccgagcatcaccataaattgaaactctcaattcttgtac

SEQ ID NO: 47818 - DNA, 50 bp, synthetic construct
  source 1..50: mol_type = other DNA
gtgtaagcaattcaaataatactttttagtcctcctttttgtcacacata

SEQ ID NO: 47819 - DNA, 50 bp, synthetic construct
  source 1..50: mol_type = other DNA
aacgtgatttaattccttgtcgtaaacgcatggtggaaataaccgcatta

SEQ ID NO: 47820 - DNA, 50 bp, synthetic construct
  source 1..50: mol_type = other DNA
aaaatattgacgatttattccagatttcataaaggtatcggcagtgttgc

SEQ ID NO: 47821 - DNA, 50 bp, synthetic construct
  source 1..50: mol_type = other DNA
atttataatgaagaataatactaaaagtagttatatatttcaatataaac

SEQ ID NO: 47822 - DNA, 50 bp, synthetic construct
  source 1..50: mol_type = other DNA
ataatccagaagatctaaaagaattacacttttatctggagtaggcaaat

SEQ ID NO: 47823 - DNA, 50 bp, synthetic construct
  source 1..50: mol_type = other DNA
attaacgaggacgatacgccgatcattctctgccgtcgtttttctgtaaa

SEQ ID NO: 47824 - DNA, 50 bp, synthetic construct
  source 1..50: mol_type = other DNA
atcagtcgagacacgggcgtaaccggcaaaaggcacgcgtccagacccag

SEQ ID NO: 47825 - DNA, 50 bp, synthetic construct
  source 1..50: mol_type = other DNA
cttttggcaccagttttcctgtttatgttacgcaaaaatgggtacaaaaa

SEQ ID NO: 47826 - DNA, 50 bp, synthetic construct
  source 1..50: mol_type = other DNA
cttcatataaattactatattataatttatatttaaaacaggatatgaaa

SEQ ID NO: 47827 - DNA, 50 bp, synthetic construct
  source 1..50: mol_type = other DNA
gcgcacctcccgttccgggtgcagcgctacacccggatatcgaccgccgc

SEQ ID NO: 47828 - DNA, 50 bp, synthetic construct
  source 1..50: mol_type = other DNA
cacggtattgtttgtcctgcccaatatccccaaggcgaattaaaaacgaa

SEQ ID NO: 47829 - DNA, 50 bp, synthetic construct
  source 1..50: mol_type = other DNA
tctggcgatttatatacttgctaattcttctaagctaagcagctatgagt

SEQ ID NO: 47830 - DNA, 50 bp, synthetic construct
  source 1..50: mol_type = other DNA
gagcacaagtgcagcgtattgaagtatatgcattatctgcagtatttttg

SEQ ID NO: 47831 - DNA, 50 bp, synthetic construct
  source 1..50: mol_type = other DNA
acagagcaagtgtgctgacagagcgggctttctcattccatttcttctgt

SEQ ID NO: 47832 - DNA, 50 bp, synthetic construct
  source 1..50: mol_type = other DNA
ttctactaattctaactgcagtattaagagaaacaaaagaattaaagcaa

SEQ ID NO: 47833 - DNA, 50 bp, synthetic construct
  source 1..50: mol_type = other DNA
ctacccaaagagaaaggagtggcagatgagacaattttatcttgtatata

SEQ ID NO: 47834 - DNA, 50 bp, synthetic construct
  source 1..50: mol_type = other DNA
tcaaaaaagatatttatattcagagatatgacctctaagatggaagctga

SEQ ID NO: 47835 - DNA, 50 bp, synthetic construct
  source 1..50: mol_type = other DNA
aagttgcttctaaatcttcaacagataagttcctccttaagaagcaactt

SEQ ID NO: 47836 - DNA, 50 bp, synthetic construct
  source 1..50: mol_type = other DNA
ccccgggggaaaaaactcccccggggaactcttcgttctggacccccggg

SEQ ID NO: 47837 - DNA, 50 bp, synthetic construct
  source 1..50: mol_type = other DNA
ttgatctgctcgggcgtgagattgcgcaagtacatcgagcggcagtcccg

SEQ ID NO: 47838 - DNA, 50 bp, synthetic construct
  source 1..50: mol_type = other DNA
attttggacatacagcagaatttaaattctttctatacatttctttaaca

SEQ ID NO: 47839 - DNA, 50 bp, synthetic construct
  source 1..50: mol_type = other DNA
ctggagttccgattcgtgttttgtaacaaaaaaatggagctgaactccaa

SEQ ID NO: 47840 - DNA, 50 bp, synthetic construct
  source 1..50: mol_type = other DNA
ttttatatctttgcaagatacgacagctaaagttctcaatctatataaaa

SEQ ID NO: 47841 - DNA, 50 bp, synthetic construct
  source 1..50: mol_type = other DNA
ttcctatactctttcattttggagatatccaacaagtgtgaacataaatg

SEQ ID NO: 47842 - DNA, 50 bp, synthetic construct
  source 1..50: mol_type = other DNA
tcagaatgaaccacgctgtgaccagctattgcaaaggtgtttgattctgc

SEQ ID NO: 47843 - DNA, 50 bp, synthetic construct
  source 1..50: mol_type = other DNA
aagagccattattacgaacccaaagcttattgatcttctcaatgcaggta

SEQ ID NO: 47844 - DNA, 50 bp, synthetic construct
  source 1..50: mol_type = other DNA
tcctgacggtactccatttgcaggtctctttggcctgatgatttttgtac

SEQ ID NO: 47845 - DNA, 50 bp, synthetic construct
  source 1..50: mol_type = other DNA
caatttgtaaatctactgtgcgaggctggaagatctagtattacaaacga

SEQ ID NO: 47846 - DNA, 50 bp, synthetic construct
  source 1..50: mol_type = other DNA
atgacttttatttttttattataaagatatcgataaaaatgaaatacatt

SEQ ID NO: 47847 - DNA, 50 bp, synthetic construct
  source 1..50: mol_type = other DNA
atcattatatattaaagtaccttcatttatcaagtgtaaaaaatattgat

SEQ ID NO: 47848 - DNA, 50 bp, synthetic construct
  source 1..50: mol_type = other DNA
gatgtattgtaatccaatgctcccgtcggctcatcacaaattaaaatatc

SEQ ID NO: 47849 - DNA, 50 bp, synthetic construct
  source 1..50: mol_type = other DNA
acaaccgcagcagcctgtgcgcttcaatctgctcgtgcttcggcggtgac

SEQ ID NO: 47850 - DNA, 50 bp, synthetic construct
  source 1..50: mol_type = other DNA
aaaataatcaaaaaggaagtgttatttaaaaataaagtttttaatttatt

SEQ ID NO: 47851 - DNA, 50 bp, synthetic construct
  source 1..50: mol_type = other DNA
ctggctccagaccgccttgccgccgggggcggtattttgccaggaacatt

SEQ ID NO: 47852 - DNA, 50 bp, synthetic construct
  source 1..50: mol_type = other DNA
agtgaactgcataactgcattactttcccaatgcagagtggcagcctatt

SEQ ID NO: 47853 - DNA, 50 bp, synthetic construct
  source 1..50: mol_type = other DNA
ttcggaacgtcagtttttcagcatatctgctgaaatgggaaaaatctgaa

SEQ ID NO: 47854 - DNA, 50 bp, synthetic construct
  source 1..50: mol_type = other DNA
tattgtatcatagctccctgaaaatgttttgtatgagaaaggctttgcgt

SEQ ID NO: 47855 - DNA, 50 bp, synthetic construct
  source 1..50: mol_type = other DNA
gttttttcatttcagttagcccaattttcggctccctaaaggtaaagagg

SEQ ID NO: 47856 - DNA, 50 bp, synthetic construct
  source 1..50: mol_type = other DNA
tccggcctttaatatagtttgtataattagcaagtaaataagtccccaga

SEQ ID NO: 47857 - DNA, 50 bp, synthetic construct
  source 1..50: mol_type = other DNA
tttcgataataaaagagctttgccatgtacgaaaaagtttatttgctcta

SEQ ID NO: 47858 - DNA, 50 bp, synthetic construct
  source 1..50: mol_type = other DNA
ataccgaccgatctttggtagtaatattcataaactttatcaataaacat

SEQ ID NO: 47859 - DNA, 50 bp, synthetic construct
  source 1..50: mol_type = other DNA
gaagcgaaaaagaattgacctggagacaaagttcagacggaacttgctcg

SEQ ID NO: 47860 - DNA, 50 bp, synthetic construct
  source 1..50: mol_type = other DNA
cgctgaaccatgcggtcgtccataaaatgaaaagaccgcaggtttcaacg

SEQ ID NO: 47861 - DNA, 50 bp, synthetic construct
  source 1..50: mol_type = other DNA
aaagttgcgattatagttcctggaaatccacttactcaatctccaataag

SEQ ID NO: 47862 - DNA, 50 bp, synthetic construct
  source 1..50: mol_type = other DNA
actgtatgtgatacgctaaaaagcgggctttttgttgtacttcatacagt

SEQ ID NO: 47863 - DNA, 50 bp, synthetic construct
  source 1..50: mol_type = other DNA
attctggatagcctcttgcaggccgatgcctgccttcggcagtcccaact

SEQ ID NO: 47864 - DNA, 50 bp, synthetic construct
  source 1..50: mol_type = other DNA
aaaataatcaaaaaggaagtgttatttaatatcttctattttaatattag

SEQ ID NO: 47865 - DNA, 50 bp, synthetic construct
  source 1..50: mol_type = other DNA
gtataattttcccctaaaaaatgaggctatggtagaggagaaaaaggtac

SEQ ID NO: 47866 - DNA, 50 bp, synthetic construct
  source 1..50: mol_type = other DNA
gccgcgttgtccatctcttcgctgtggcgacaagagatattatacgcaga

SEQ ID NO: 47867 - DNA, 50 bp, synthetic construct
  source 1..50: mol_type = other DNA
agatacaacataccgtctgcatttatagctttagaaccatttatgatact

SEQ ID NO: 47868 - DNA, 50 bp, synthetic construct
  source 1..50: mol_type = other DNA
cgggtgtagcgcagttttggtagcgcgcaccgagaacgagggcctggccg

SEQ ID NO: 47869 - DNA, 50 bp, synthetic construct
  source 1..50: mol_type = other DNA
aaatcttctagatagtggcattatcattataactcatatgcataatattg

SEQ ID NO: 47870 - DNA, 50 bp, synthetic construct
  source 1..50: mol_type = other DNA
tgccttacttatttatccaatagggctgtgcgttcaatatagataccgcc

SEQ ID NO: 47871 - DNA, 50 bp, synthetic construct
  source 1..50: mol_type = other DNA
gttggtagcgcgtttgaatggcattcaaaatatccatacgagtccataat

SEQ ID NO: 47872 - DNA, 50 bp, synthetic construct
  source 1..50: mol_type = other DNA
gagcacaagtgcagcgtattgaagtaatacaggtgctggcggaagtacta

SEQ ID NO: 47873 - DNA, 50 bp, synthetic construct
  source 1..50: mol_type = other DNA
agataatgctgtaacatacgcatcggcatggcaatgcaacagcacaggca

SEQ ID NO: 47874 - DNA, 50 bp, synthetic construct
  source 1..50: mol_type = other DNA
tttatttctagattgtgttgtaacatttatctaatagaacttataataaa

SEQ ID NO: 47875 - DNA, 50 bp, synthetic construct
  source 1..50: mol_type = other DNA
gctaccagcgcaaagccgttgtcgttcgcaagattttctttgctggtatt

SEQ ID NO: 47876 - DNA, 50 bp, synthetic construct
  source 1..50: mol_type = other DNA
catacattccggcattttgttattataatataataaatgcagacggtatg

SEQ ID NO: 47877 - DNA, 50 bp, synthetic construct
  source 1..50: mol_type = other DNA
ttttaataacttttagtaaacaattgatttttgtttaatttttatttaaa

SEQ ID NO: 47878 - DNA, 50 bp, synthetic construct
  source 1..50: mol_type = other DNA
ttccaaaagtaaattttggaggtatgattgtcatcggtagtcacgtggaa

SEQ ID NO: 47879 - DNA, 50 bp, synthetic construct
  source 1..50: mol_type = other DNA
aagcattagccctctcaaccatcatgtgatggttaagacttgttgtttca

SEQ ID NO: 47880 - DNA, 50 bp, synthetic construct
  source 1..50: mol_type = other DNA
gtagagttataatttcgttaggaatttcacttgtatatacatcactctaa

SEQ ID NO: 47881 - DNA, 50 bp, synthetic construct
  source 1..50: mol_type = other DNA
atcagcagatgcactaaacgatgcgtagaaatattcataaatctgtgata

SEQ ID NO: 47882 - DNA, 50 bp, synthetic construct
  source 1..50: mol_type = other DNA
ttccaacatttgttaggtataagaaatatgcaacccaacaaatgttggat

SEQ ID NO: 47883 - DNA, 50 bp, synthetic construct
  source 1..50: mol_type = other DNA
attcgctatgataaaaacgatttctaaaagaagatttgttcaatgcggtg

SEQ ID NO: 47884 - DNA, 50 bp, synthetic construct
  source 1..50: mol_type = other DNA
taaacaacttgtatcttttttcgccataaaaaaagaatacaagttgaggg

SEQ ID NO: 47885 - DNA, 50 bp, synthetic construct
  source 1..50: mol_type = other DNA
caagggagattcaatggtcgacgccggagtcgtcattccattcctcatcc

SEQ ID NO: 47886 - DNA, 50 bp, synthetic construct
  source 1..50: mol_type = other DNA
tagtacaacaaaaattataaaaagatcttattggtttttatatataactt

SEQ ID NO: 47887 - DNA, 50 bp, synthetic construct
  source 1..50: mol_type = other DNA
aggacggttcggaaattactcgaatttgcaggtatcttgaggacttggaa

SEQ ID NO: 47888 - DNA, 50 bp, synthetic construct
  source 1..50: mol_type = other DNA
gattaaaatagcttgtttttttattagtaaaaaaacctccattttcttta

SEQ ID NO: 47889 - DNA, 50 bp, synthetic construct
  source 1..50: mol_type = other DNA
cttgcacctggaaaaacaacagatccagttcctccatacgcaattggaga

SEQ ID NO: 47890 - DNA, 50 bp, synthetic construct
  source 1..50: mol_type = other DNA
atgttttttgtttctataaattatatacgtcgtgatgaaattgaacatat

SEQ ID NO: 47891 - DNA, 50 bp, synthetic construct
  source 1..50: mol_type = other DNA
cgaaaagagtgatgtatagtagcggatatcactatactggacttctttca

SEQ ID NO: 47892 - DNA, 50 bp, synthetic construct
  source 1..50: mol_type = other DNA
tgcaatcgcacttcgtaattcgtcatagagatacacagagacaccttgca

SEQ ID NO: 47893 - DNA, 50 bp, synthetic construct
  source 1..50: mol_type = other DNA
ttgttagattttgtatatttacaacaaagtaaaaatataaaggcccagaa

SEQ ID NO: 47894 - DNA, 50 bp, synthetic construct
  source 1..50: mol_type = other DNA
gaaaatcccttgatatgtagtcgcttatctcaacacctatgagctttttc

SEQ ID NO: 47895 - DNA, 50 bp, synthetic construct
  source 1..50: mol_type = other DNA
tgcgcaacatatcttttatgctggcaaaattttatgttgtactttctgct

SEQ ID NO: 47896 - DNA, 50 bp, synthetic construct
  source 1..50: mol_type = other DNA
tcggtattatttctttcatactttttcggttatttccataatatcacctc

SEQ ID NO: 47897 - DNA, 50 bp, synthetic construct
  source 1..50: mol_type = other DNA
taaaggagttttttcaaccccatggataagtcctttcaaaaaaagttttt

SEQ ID NO: 47898 - DNA, 50 bp, synthetic construct
  source 1..50: mol_type = other DNA
agaagattccagtatgtccggtataattgcgttgatcagtggaatcactg

SEQ ID NO: 47899 - DNA, 50 bp, synthetic construct
  source 1..50: mol_type = other DNA
acaaactatgccagaaccaaatatatatacatggacaccttgcagagatg

SEQ ID NO: 47900 - DNA, 50 bp, synthetic construct
  source 1..50: mol_type = other DNA
ttgatgaaagctacggtgaggacatcttcgcagtataacgtagaattcaa

SEQ ID NO: 47901 - DNA, 50 bp, synthetic construct
  source 1..50: mol_type = other DNA
tgtactctttatcatgttccgcttccttctttggcattgggaggctttat

SEQ ID NO: 47902 - DNA, 50 bp, synthetic construct
  source 1..50: mol_type = other DNA
aaatgctatcaaatgtcaatagaaaattatattgccggtatgagtttaca

SEQ ID NO: 47903 - DNA, 50 bp, synthetic construct
  source 1..50: mol_type = other DNA
gaatatctttatcatttgatagaaaattctggaaaatgaaaagtatatgg

SEQ ID NO: 47904 - DNA, 50 bp, synthetic construct
  source 1..50: mol_type = other DNA
cggtcgatatccgggtgtagcgcagtgctgctggcggacgagatcgaccg

SEQ ID NO: 47905 - DNA, 50 bp, synthetic construct
  source 1..50: mol_type = other DNA
cagttaataatatgaatttttgctataataatagttcattttcttattcc

SEQ ID NO: 47906 - DNA, 50 bp, synthetic construct
  source 1..50: mol_type = other DNA
atttgcaagaaaaatataaaccattatttaactatatttttttgaaaaat

SEQ ID NO: 47907 - DNA, 50 bp, synthetic construct
  source 1..50: mol_type = other DNA
ataagcgaaaaaaactaatggaattaatttggctctttttttgctcaaac

SEQ ID NO: 47908 - DNA, 50 bp, synthetic construct
  source 1..50: mol_type = other DNA
cctttgtaaatgcctgcgagaatttcaaggcttttttgttgttacaaagc

SEQ ID NO: 47909 - DNA, 50 bp, synthetic construct
  source 1..50: mol_type = other DNA
agcgacgccctcgcttccctgcagggctgcaggtggcggcatacgcccga

SEQ ID NO: 47910 - DNA, 50 bp, synthetic construct
  source 1..50: mol_type = other DNA
aaccgacgggtagtgtagcattagtactaacttaacacagcccacaggca

SEQ ID NO: 47911 - DNA, 50 bp, synthetic construct
  source 1..50: mol_type = other DNA
acaagggttccggataccattataaagaattatttaaagaagagttagaa

SEQ ID NO: 47912 - DNA, 50 bp, synthetic construct
  source 1..50: mol_type = other DNA
agaaactatctgcaggctggtattaaggagtacggttgggaatatattgt

SEQ ID NO: 47913 - DNA, 50 bp, synthetic construct
  source 1..50: mol_type = other DNA
taactcatggcatcgacagagcctatcgggctggttgatgctgtaggtga

SEQ ID NO: 47914 - DNA, 50 bp, synthetic construct
  source 1..50: mol_type = other DNA
aagacaaaatgaagagaacaagcaaaaacatgttctcttgcaaggagcta

SEQ ID NO: 47915 - DNA, 50 bp, synthetic construct
  source 1..50: mol_type = other DNA
ctgcaaataatgtcaaataacaacatgttgtaaattagattttattgcat

SEQ ID NO: 47916 - DNA, 50 bp, synthetic construct
  source 1..50: mol_type = other DNA
caacactggcagtgttggggtcagcgctggcgtgaactctgcctgatggc

SEQ ID NO: 47917 - DNA, 50 bp, synthetic construct
  source 1..50: mol_type = other DNA
acgataaggagcgtatgatttcttctcgtcaagaatacgctccataatgt

SEQ ID NO: 47918 - DNA, 50 bp, synthetic construct
  source 1..50: mol_type = other DNA
ctcgtttttaattcgccttggggatattgggcaggacaaacaataccgtg

SEQ ID NO: 47919 - DNA, 50 bp, synthetic construct
  source 1..50: mol_type = other DNA
aaaggtatcaaagaaaacacttgctagaaaattttgtggaagagaatgtt

SEQ ID NO: 47920 - DNA, 50 bp, synthetic construct
  source 1..50: mol_type = other DNA
attataaagaaaagaattatattccgggatatcggacggttcttcttcca

SEQ ID NO: 47921 - DNA, 50 bp, synthetic construct
  source 1..50: mol_type = other DNA
atattataggaattatgtagtattgttaattaaaatagtttttgaaatat

SEQ ID NO: 47922 - DNA, 50 bp, synthetic construct
  source 1..50: mol_type = other DNA
tcagaacgattacttccgacaccccttttgcaattcagtaattgttacaa

SEQ ID NO: 47923 - DNA, 50 bp, synthetic construct
  source 1..50: mol_type = other DNA
ataaagaatcttgatattgatgataaacgataaatactattagttttgat

SEQ ID NO: 47924 - DNA, 50 bp, synthetic construct
  source 1..50: mol_type = other DNA
ttgcggcttgacgcttatcaatcaattgtcagaatgtcggaaaggtgcaa

SEQ ID NO: 47925 - DNA, 50 bp, synthetic construct
  source 1..50: mol_type = other DNA
gcaaagcataaagattatgaacgatatcaaaattttcagttatgctgcca

SEQ ID NO: 47926 - DNA, 50 bp, synthetic construct
  source 1..50: mol_type = other DNA
cggcagtgccttcgtcaacaacagccttgtactgcgaacaggcagggtcg

SEQ ID NO: 47927 - DNA, 50 bp, synthetic construct
  source 1..50: mol_type = other DNA
gattttgcaaaacccgttgatttaattcgacatcatattattgaaaagtc

SEQ ID NO: 47928 - DNA, 50 bp, synthetic construct
  source 1..50: mol_type = other DNA
ttttccttgagaaatataagcctgttggattttatcttgctcttctggac

SEQ ID NO: 47929 - DNA, 50 bp, synthetic construct
  source 1..50: mol_type = other DNA
tccttgatggttttgacgtaaccatcatgactcttcaaaacccctgtggg

SEQ ID NO: 47930 - DNA, 50 bp, synthetic construct
  source 1..50: mol_type = other DNA
tcttgtttttcaaacgacttgcttataatttaaaatcttgaaaaacactt

SEQ ID NO: 47931 - DNA, 50 bp, synthetic construct
  source 1..50: mol_type = other DNA
aaacaagcattagcaagcagtctttgaagacggaaaagcagtcattgatg

SEQ ID NO: 47932 - DNA, 50 bp, synthetic construct
  source 1..50: mol_type = other DNA
gcttcaaaactgtgaagctggtcttcaggtttgccgggatcttaccgccc

SEQ ID NO: 47933 - DNA, 50 bp, synthetic construct
  source 1..50: mol_type = other DNA
ttcagattcgggatataataatctccatatttattttttagaaatcgtca

SEQ ID NO: 47934 - DNA, 50 bp, synthetic construct
  source 1..50: mol_type = other DNA
ttccctggatggatcggcaattacaatttattcgtagagtttacagcttc

SEQ ID NO: 47935 - DNA, 50 bp, synthetic construct
  source 1..50: mol_type = other DNA
agttatcaacaatttaagtagaggttgaccgattagacggcatgattaca

SEQ ID NO: 47936 - DNA, 50 bp, synthetic construct
  source 1..50: mol_type = other DNA
gcactgacagcaaaatcggcatcaaacacagccgattttgcgcttggcgc

SEQ ID NO: 47937 - DNA, 50 bp, synthetic construct
  source 1..50: mol_type = other DNA
tacgaaaatgacactgtacgaactcaaattcgttagtgattattttttct

SEQ ID NO: 47938 - DNA, 50 bp, synthetic construct
  source 1..50: mol_type = other DNA
taaaaaaataatgccccatccttccggaaggcaccggccgcattttccag

SEQ ID NO: 47939 - DNA, 50 bp, synthetic construct
  source 1..50: mol_type = other DNA
gatatgcttctgccggaaggttgggagaaaccttcgggtagcggcatatt

SEQ ID NO: 47940 - DNA, 50 bp, synthetic construct
  source 1..50: mol_type = other DNA
gaaaggggcaggcaaaatgtccgggatttgacatgctttttacaggagac

SEQ ID NO: 47941 - DNA, 50 bp, synthetic construct
  source 1..50: mol_type = other DNA
ttctcctcgtccggatttgttgcaatagcgaaaaatttagtttagaagaa

SEQ ID NO: 47942 - DNA, 50 bp, synthetic construct
  source 1..50: mol_type = other DNA
ttgatacatcaattaattttctcatatgataaaatgtattgctgtctcct

SEQ ID NO: 47943 - DNA, 50 bp, synthetic construct
  source 1..50: mol_type = other DNA
catctgcgtaaatgtccaccagctcaacaattttgacaagggctcagata

SEQ ID NO: 47944 - DNA, 50 bp, synthetic construct
  source 1..50: mol_type = other DNA
gctaacatacttttactaacacctgtttgttctgatagtacatcaagact

SEQ ID NO: 47945 - DNA, 50 bp, synthetic construct
  source 1..50: mol_type = other DNA
tagtgaactgagttttgcgaagctgaggggcaactaaacactacagccga

SEQ ID NO: 47946 - DNA, 50 bp, synthetic construct
  source 1..50: mol_type = other DNA
gaaagaaaggtgaaatgtatcgcagatgagatctatctgaccttttttgc

SEQ ID NO: 47947 - DNA, 50 bp, synthetic construct
  source 1..50: mol_type = other DNA
ggacaaggatacctgattccgttatcattaataatgaggtttccgtcttc

SEQ ID NO: 47948 - DNA, 50 bp, synthetic construct
  source 1..50: mol_type = other DNA
tttttttgtcaataagttcgtaccaaagtgataactgatgaaatcgaaaa

SEQ ID NO: 47949 - DNA, 50 bp, synthetic construct
  source 1..50: mol_type = other DNA
gtacacctgaagtggtgatctccaattacagatacagtctcagatacaga

SEQ ID NO: 47950 - DNA, 50 bp, synthetic construct
  source 1..50: mol_type = other DNA
tgcttcgcagaaccgttctgttcgatcgaactctcgaccttacggatgcg

SEQ ID NO: 47951 - DNA, 50 bp, synthetic construct
  source 1..50: mol_type = other DNA
gtttaatgtgaaccgggcgtcgtgggatcatgtaaagccttatattaaag

SEQ ID NO: 47952 - DNA, 50 bp, synthetic construct
  source 1..50: mol_type = other DNA
ctaggattgcaaggatgcgagactgacgtgaacatcgtaatcaaacgatg

SEQ ID NO: 47953 - DNA, 50 bp, synthetic construct
  source 1..50: mol_type = other DNA
atataaaataatgcacatgaaaaaattttttcaaatatttttcttaataa

SEQ ID NO: 47954 - DNA, 50 bp, synthetic construct
  source 1..50: mol_type = other DNA
gtttaaaactgatgaaaaggtctccggaaacctcatcatcctgaaatccg

SEQ ID NO: 47955 - DNA, 50 bp, synthetic construct
  source 1..50: mol_type = other DNA
gatatgcacgttatataatagatgagcatcctttacaggataagcattgc

SEQ ID NO: 47956 - DNA, 50 bp, synthetic construct
  source 1..50: mol_type = other DNA
aacttaagtataaaggtcaaattacattttttgatcttttagtttaagca

SEQ ID NO: 47957 - DNA, 50 bp, synthetic construct
  source 1..50: mol_type = other DNA
attgggatacaagccggcatgctccatctgtctaggtgtggtatcctgct

SEQ ID NO: 47958 - DNA, 50 bp, synthetic construct
  source 1..50: mol_type = other DNA
atgcggttagctgctatccgctgattgcaacggattccatggtgttgcct

SEQ ID NO: 47959 - DNA, 50 bp, synthetic construct
  source 1..50: mol_type = other DNA
tctgtaacgaccacagattcaccacggcacaaagctgtacaagttcgcca

SEQ ID NO: 47960 - DNA, 50 bp, synthetic construct
  source 1..50: mol_type = other DNA
tacaagccattggaaagctggtaattatacttgacttataaaggcttgtc

SEQ ID NO: 47961 - DNA, 50 bp, synthetic construct
  source 1..50: mol_type = other DNA
atacagtttgataaaatgtacttacataatctgcttttattgacgaatat

SEQ ID NO: 47962 - DNA, 50 bp, synthetic construct
  source 1..50: mol_type = other DNA
tctattattgaattgatgtttgaatatggtaaaaaaaattaaatgtcaac

SEQ ID NO: 47963 - DNA, 50 bp, synthetic construct
  source 1..50: mol_type = other DNA
agaacatggagcgtagctgcatgtactcaaaaaggtactcaacattattc

SEQ ID NO: 47964 - DNA, 50 bp, synthetic construct
  source 1..50: mol_type = other DNA
taaatgaatttgcgaagagcgttgattcaaattattattaaattctttta

SEQ ID NO: 47965 - DNA, 50 bp, synthetic construct
  source 1..50: mol_type = other DNA
ggatcatggttgaccgtgaactgatcaacagaccaggaagaccagctcca

SEQ ID NO: 47966 - DNA, 50 bp, synthetic construct
  source 1..50: mol_type = other DNA
gcatattcacaaagccagaaagtgacctgagtccggcgatgtggttgtgt

SEQ ID NO: 47967 - DNA, 50 bp, synthetic construct
  source 1..50: mol_type = other DNA
gcgcagtccagaccgaccttaatgccatttggggtcgttcaggaccttct

SEQ ID NO: 47968 - DNA, 50 bp, synthetic construct
  source 1..50: mol_type = other DNA
gctttttaagcacaaaatcaaagcctttttttgttgtatcgctaaaaaat

SEQ ID NO: 47969 - DNA, 50 bp, synthetic construct
  source 1..50: mol_type = other DNA
gtggtacttcgatcacaatacgggatctggtatccaagcggaacctcgaa

SEQ ID NO: 47970 - DNA, 50 bp, synthetic construct
  source 1..50: mol_type = other DNA
aattttacagcgtttccgataaatccatttaccataatctctgtaatcga

SEQ ID NO: 47971 - DNA, 50 bp, synthetic construct
  source 1..50: mol_type = other DNA
aaaattccggcctgttttgggcggcagcgaccaaaccacatcagccgttt

SEQ ID NO: 47972 - DNA, 50 bp, synthetic construct
  source 1..50: mol_type = other DNA
gggataacccttcccgccgccatagcactggctttcttcattgtattttg

SEQ ID NO: 47973 - DNA, 50 bp, synthetic construct
  source 1..50: mol_type = other DNA
tttcaaaattctccgcctgcataagcttaaaattgctgttttcattatat

SEQ ID NO: 47974 - DNA, 50 bp, synthetic construct
  source 1..50: mol_type = other DNA
cattaggatataggtttattggtcaagacctccttttgtctataaaaatg

SEQ ID NO: 47975 - DNA, 50 bp, synthetic construct
  source 1..50: mol_type = other DNA
ttttgtatcaaacctatgctttctatttgacgtataagtttgatacaaat

SEQ ID NO: 47976 - DNA, 50 bp, synthetic construct
  source 1..50: mol_type = other DNA
gggaccaactggagcgactgcccgatcgaggaacaggcccaataggatta

SEQ ID NO: 47977 - DNA, 50 bp, synthetic construct
  source 1..50: mol_type = other DNA
gatgccgaatttatggaactcgcttcggcggcagcactaccttctgcatc

SEQ ID NO: 47978 - DNA, 50 bp, synthetic construct
  source 1..50: mol_type = other DNA
gatgaggaataaggagaaaacaccatgccgtttcgaaggtatgcccgtca

SEQ ID NO: 47979 - DNA, 50 bp, synthetic construct
  source 1..50: mol_type = other DNA
atacaaagccgaggaataattaaaaatcactcctttccgacactatatat

SEQ ID NO: 47980 - DNA, 50 bp, synthetic construct
  source 1..50: mol_type = other DNA
cgccgcagtttgccatattcgtttgcaaacaaataaggctcaccgccaaa

SEQ ID NO: 47981 - DNA, 50 bp, synthetic construct
  source 1..50: mol_type = other DNA
atctttttcagaaagaaaatgaaattcctcattttgaatcgttctttggg

SEQ ID NO: 47982 - DNA, 50 bp, synthetic construct
  source 1..50: mol_type = other DNA
gtatagtaccggaaaggagctgatttcatatctcctatatacaaaaatag

SEQ ID NO: 47983 - DNA, 50 bp, synthetic construct
  source 1..50: mol_type = other DNA
ttataaataagtaaaaatcgacaagcctgaacagctctgtaggcttcaag

SEQ ID NO: 47984 - DNA, 50 bp, synthetic construct
  source 1..50: mol_type = other DNA
gcttaagcgattcttcggccctgtctttttcactgctggcatggaaaagc

SEQ ID NO: 47985 - DNA, 50 bp, synthetic construct
  source 1..50: mol_type = other DNA
gcgccatgccggaaatatagttctgaatcgccacggttccggcagggcca

SEQ ID NO: 47986 - DNA, 50 bp, synthetic construct
  source 1..50: mol_type = other DNA
atggaagaagaaccgtccgacattccgctaagtttggggtctttttccat

SEQ ID NO: 47987 - DNA, 50 bp, synthetic construct
  source 1..50: mol_type = other DNA
tgcagaacttcgcatcaggggaattgtagccagctgaacggctgtctgca

SEQ ID NO: 47988 - DNA, 50 bp, synthetic construct
  source 1..50: mol_type = other DNA
cccgctcatgtatgaaattataacattcaggaatttatcacatcctcagg

SEQ ID NO: 47989 - DNA, 50 bp, synthetic construct
  source 1..50: mol_type = other DNA
ttaaaagtacatctcttttttatttatataaaattagatattatttataa

SEQ ID NO: 47990 - DNA, 50 bp, synthetic construct
  source 1..50: mol_type = other DNA
tgttggtagatcggtttcgttattgcaatttagataccgatgtaggtacc

SEQ ID NO: 47991 - DNA, 50 bp, synthetic construct
  source 1..50: mol_type = other DNA
tgctcagtttgaagcggaatatgcaatgattttcccatacaacaagaaaa

SEQ ID NO: 47992 - DNA, 50 bp, synthetic construct
  source 1..50: mol_type = other DNA
atgagcgttattatgttgttatcgatcatttacaacattgaggtaagcac

SEQ ID NO: 47993 - DNA, 50 bp, synthetic construct
  source 1..50: mol_type = other DNA
ggactgcaaaacaggctttttatgtatatacgaagcattttggaaagtac

SEQ ID NO: 47994 - DNA, 50 bp, synthetic construct
  source 1..50: mol_type = other DNA
cttcgcagcagattcttcgtcaatgatatgacaaagactcagctgcgaga

SEQ ID NO: 47995 - DNA, 50 bp, synthetic construct
  source 1..50: mol_type = other DNA
attgtaaaggcactcaaagagcgtggatttggttttgaaacctttaccgg

SEQ ID NO: 47996 - DNA, 50 bp, synthetic construct
  source 1..50: mol_type = other DNA
ttttttcagtttatgccaaggaaagatttccttaccaagagacaggtcaa

SEQ ID NO: 47997 - DNA, 50 bp, synthetic construct
  source 1..50: mol_type = other DNA
cagcagaagaaagcggaaaggaaaagcacatgggtgacgcacttctgcag

SEQ ID NO: 47998 - DNA, 50 bp, synthetic construct
  source 1..50: mol_type = other DNA
gggataaaacctgtccagagcaataagcggaagtgatcaggttttcgccc

SEQ ID NO: 47999 - DNA, 50 bp, synthetic construct
  source 1..50: mol_type = other DNA
gtgaagaatgtaaacgacttcataaaaaagaaagccgattgatttttcag

SEQ ID NO: 48000 - DNA, 50 bp, synthetic construct
  source 1..50: mol_type = other DNA
aattatgcttgcattttttttgagtattgataaaggatttattgataata

SEQ ID NO: 48001 - DNA, 50 bp, synthetic construct
  source 1..50: mol_type = other DNA
tccacctctatcaggatattcgtataatcgactatcctgccctgctcggc

SEQ ID NO: 48002 - DNA, 50 bp, synthetic construct
  source 1..50: mol_type = other DNA
atatagaaaaggctatcatttataatcaagatgaatataataaagaatat

SEQ ID NO: 48003 - DNA, 50 bp, synthetic construct
  source 1..50: mol_type = other DNA
attctctcataaaataatagaaaaattattcaattatttttcagatgtgg

SEQ ID NO: 48004 - DNA, 50 bp, synthetic construct
  source 1..50: mol_type = other DNA
tggtctgtgctcaacaaatatgtaccgacataaatgtcgggcacaaaaat

SEQ ID NO: 48005 - DNA, 50 bp, synthetic construct
  source 1..50: mol_type = other DNA
caaacacttagaaaggcggtaacgaaaaataagccctttcaaagattgtg

SEQ ID NO: 48006 - DNA, 50 bp, synthetic construct
  source 1..50: mol_type = other DNA
aattcgccatttgtggactgcattatgccgttcctgcaaaaaacgatatt

SEQ ID NO: 48007 - DNA, 50 bp, synthetic construct
  source 1..50: mol_type = other DNA
atatagaaattatagaacctgaaccggttctccgggcggagtttttatat

SEQ ID NO: 48008 - DNA, 50 bp, synthetic construct
  source 1..50: mol_type = other DNA
gttttcctttcggaaggaaaatctgaagatattccgctggaagtgattac

SEQ ID NO: 48009 - DNA, 50 bp, synthetic construct
  source 1..50: mol_type = other DNA
acccaaagagaaaggagtggcagagctcccagccgtttttatgcatggca

SEQ ID NO: 48010 - DNA, 50 bp, synthetic construct
  source 1..50: mol_type = other DNA
ccgctgaattaatatagaacttatcattgttttctcctgttcttaagcta

SEQ ID NO: 48011 - DNA, 50 bp, synthetic construct
  source 1..50: mol_type = other DNA
gccattgacaactttgactccacacttttgcgacaaatgaaaaatatgct

SEQ ID NO: 48012 - DNA, 50 bp, synthetic construct
  source 1..50: mol_type = other DNA
acattcatttctttctgcatctgcaggcagttgtaaaaatgtgtgaaggt

SEQ ID NO: 48013 - DNA, 50 bp, synthetic construct
  source 1..50: mol_type = other DNA
cgctcgtcacgcgcccgcaccaggccagcagggcgcggtcgtgcggagtc

SEQ ID NO: 48014 - DNA, 50 bp, synthetic construct
  source 1..50: mol_type = other DNA
gattgttaatcaataaagataaataaattcctctttattgatttaagaaa

SEQ ID NO: 48015 - DNA, 50 bp, synthetic construct
  source 1..50: mol_type = other DNA
aaaatcagtatcttctttttttagtgactaaagaagaaatgattgaatgt

SEQ ID NO: 48016 - DNA, 50 bp, synthetic construct
  source 1..50: mol_type = other DNA
aattttacagcgtttccgataaatccattgatcataatctccgtcacttc

SEQ ID NO: 48017 - DNA, 50 bp, synthetic construct
  source 1..50: mol_type = other DNA
attatgaaattttctacccccttaacgaagagcgtcataaattccgtcat

SEQ ID NO: 48018 - DNA, 50 bp, synthetic construct
  source 1..50: mol_type = other DNA
tcgctctgcgcttctttcgcggagatatccgataataaagcgccgaaaac

SEQ ID NO: 48019 - DNA, 50 bp, synthetic construct
  source 1..50: mol_type = other DNA
ctcagttcccggatcatttctttttccaaagattggatttttaaaaaagc

SEQ ID NO: 48020 - DNA, 50 bp, synthetic construct
  source 1..50: mol_type = other DNA
tttatatttagttcttaacgattatagcatcttggttaactgaatataag

SEQ ID NO: 48021 - DNA, 50 bp, synthetic construct
  source 1..50: mol_type = other DNA
agtgcccagtgcatcaacaatctgatcaaatggctggggcagctggactc

SEQ ID NO: 48022 - DNA, 50 bp, synthetic construct
  source 1..50: mol_type = other DNA
gaatcagtaggtctagggttcgaatcttcgtgtcctggccctgcttggtt

SEQ ID NO: 48023 - DNA, 50 bp, synthetic construct
  source 1..50: mol_type = other DNA
aatacaaatccaataaagataaacagctttataaaaattatctgagtggc

SEQ ID NO: 48024 - DNA, 50 bp, synthetic construct
  source 1..50: mol_type = other DNA
ccggagaatatttggaacctgaaagctcctcaccactggataatctccgg

SEQ ID NO: 48025 - DNA, 50 bp, synthetic construct
  source 1..50: mol_type = other DNA
aatctctcattaaatttcttatacatgtatatcaataattagaggaaatc

SEQ ID NO: 48026 - DNA, 50 bp, synthetic construct
  source 1..50: mol_type = other DNA
caaatgtatagctatcagcttcgttaaggaaacttacagatactactttg

SEQ ID NO: 48027 - DNA, 50 bp, synthetic construct
  source 1..50: mol_type = other DNA
gaagaaaagacaaaaggatatcaatattgatattgtttttgcaatactta

SEQ ID NO: 48028 - DNA, 50 bp, synthetic construct
  source 1..50: mol_type = other DNA
tgccagaacttgaagccgttggaatgatcgaacacctcttccatctggcg

SEQ ID NO: 48029 - DNA, 50 bp, synthetic construct
  source 1..50: mol_type = other DNA
aatgacagtataaagatgatttcaggtgatgtcatctttatgcgtatgtc

SEQ ID NO: 48030 - DNA, 50 bp, synthetic construct
  source 1..50: mol_type = other DNA
gcagaaaaatcaaggaggaacgcaaaagcgtacctcctttgctttgttcg

SEQ ID NO: 48031 - DNA, 50 bp, synthetic construct
  source 1..50: mol_type = other DNA
tggagacttgtcatttttttatgtttacactcactctctgtgaggtgcat

SEQ ID NO: 48032 - DNA, 50 bp, synthetic construct
  source 1..50: mol_type = other DNA
aaaaaaaacacacgctgagagaaaaaaataagaccatctgtattacattt

SEQ ID NO: 48033 - DNA, 50 bp, synthetic construct
  source 1..50: mol_type = other DNA
cgtcgcagggaaccgaaaactccgccgcgacagtccggtcggtcacgatc

SEQ ID NO: 48034 - DNA, 50 bp, synthetic construct
  source 1..50: mol_type = other DNA
ctcccacacagccatcaagggcggcgcctcattttcgagctgggttttgc

SEQ ID NO: 48035 - DNA, 50 bp, synthetic construct
  source 1..50: mol_type = other DNA
cgtattttattggcttcatcctctttaattcctgaagccggtatttcatg

SEQ ID NO: 48036 - DNA, 50 bp, synthetic construct
  source 1..50: mol_type = other DNA
agatattactgcaaatgctagcaatattgccagcatgctttcataaacct

SEQ ID NO: 48037 - DNA, 50 bp, synthetic construct
  source 1..50: mol_type = other DNA
taaataaaaattaagacatctgtaatttatcacgttatacggcacatttt

SEQ ID NO: 48038 - DNA, 50 bp, synthetic construct
  source 1..50: mol_type = other DNA
aaactaaggggagttcggatatgagctcatctgccagcttcaccactttt

SEQ ID NO: 48039 - DNA, 50 bp, synthetic construct
  source 1..50: mol_type = other DNA
caataatggtatttgtactgaatatataagcagataaaatacaattgttc

SEQ ID NO: 48040 - DNA, 50 bp, synthetic construct
  source 1..50: mol_type = other DNA
ttaataatagcccagccaaaaacatctttttttgccttgctttttctttc

SEQ ID NO: 48041 - DNA, 50 bp, synthetic construct
  source 1..50: mol_type = other DNA
tattccaattaatgtaacaatgatatttctttgctaaacgattttcaatt

SEQ ID NO: 48042 - DNA, 50 bp, synthetic construct
  source 1..50: mol_type = other DNA
atatgatagtaaaaatgacggcaacgttgacgttgtgcttaccgctatcg

SEQ ID NO: 48043 - DNA, 50 bp, synthetic construct
  source 1..50: mol_type = other DNA
ccgcaaccttccgctttgcaatacccgggcttcaagttggtcgagggccg

SEQ ID NO: 48044 - DNA, 50 bp, synthetic construct
  source 1..50: mol_type = other DNA
gagacgtgatgccctccaaggctgaacgtccgaccaaaaatccacggacg

SEQ ID NO: 48045 - DNA, 50 bp, synthetic construct
  source 1..50: mol_type = other DNA
cctgatactgttcaggtaccttcagctcgtatcttctggtccgtatggaa

SEQ ID NO: 48046 - DNA, 50 bp, synthetic construct
  source 1..50: mol_type = other DNA
ccgcagatatttttattaaaaaaatatatttaggaggtttttattatggc

SEQ ID NO: 48047 - DNA, 50 bp, synthetic construct
  source 1..50: mol_type = other DNA
taaagggcggttagaatttctaatcggttagaatttctaatcgcccttta

SEQ ID NO: 48048 - DNA, 50 bp, synthetic construct
  source 1..50: mol_type = other DNA
tgtatagtagcggaaaggagctgatttcagatgcttttcatagctatcgt

SEQ ID NO: 48049 - DNA, 50 bp, synthetic construct
  source 1..50: mol_type = other DNA
gaacacatgaaaaaagtaaggagtgaacaactttcttttttttccgcagc

SEQ ID NO: 48050 - DNA, 50 bp, synthetic construct
  source 1..50: mol_type = other DNA
ggaagcggtgcaggtgctccagatgaatcacaggcaccagtacaaagaag

SEQ ID NO: 48051 - DNA, 50 bp, synthetic construct
  source 1..50: mol_type = other DNA
cttgtagatttgcctaattcacatatcattttcagaaaaaaatacacaag

SEQ ID NO: 48052 - DNA, 50 bp, synthetic construct
  source 1..50: mol_type = other DNA
cagtataaagcaccgagtgtgaaaatttttgtaatgaatagttaataatg

SEQ ID NO: 48053 - DNA, 50 bp, synthetic construct
  source 1..50: mol_type = other DNA
cgcatccgtaaggtcgagagttcgatcgaacaggacggttctgcgaagca

SEQ ID NO: 48054 - DNA, 50 bp, synthetic construct
  source 1..50: mol_type = other DNA
atcatataacacacactcatagtatatcccatgtcctgttgtcataggat

SEQ ID NO: 48055 - DNA, 50 bp, synthetic construct
  source 1..50: mol_type = other DNA
gttaccgtcagcgaacacgctgcatctatgggaggctcccaggtattttt

SEQ ID NO: 48056 - DNA, 50 bp, synthetic construct
  source 1..50: mol_type = other DNA
ataaataaaaaagagctagcttttacctagtggatatcttttctttttcc

SEQ ID NO: 48057 - DNA, 50 bp, synthetic construct
  source 1..50: mol_type = other DNA
tgaaaataattatatagcccctgtattcaggcattacaagaatattttca

SEQ ID NO: 48058 - DNA, 50 bp, synthetic construct
  source 1..50: mol_type = other DNA
gtaagtatggtacatgctataaaattatgtatattaactacaataatcgt

SEQ ID NO: 48059 - DNA, 50 bp, synthetic construct
  source 1..50: mol_type = other DNA
cgtatgcatacagtttgattgagagtcactaatggaactgttgccaaaaa

SEQ ID NO: 48060 - DNA, 50 bp, synthetic construct
  source 1..50: mol_type = other DNA
gaactacgaacgtgtccaaggcatcgattcctgccactatcaataaattc

SEQ ID NO: 48061 - DNA, 50 bp, synthetic construct
  source 1..50: mol_type = other DNA
aatcttttttgttgatgcaactgtataatgaaaatacctcactacctttt

SEQ ID NO: 48062 - DNA, 50 bp, synthetic construct
  source 1..50: mol_type = other DNA
gcactttattaaattataaatacatatgtaattttctgctggaagtctgc

SEQ ID NO: 48063 - DNA, 50 bp, synthetic construct
  source 1..50: mol_type = other DNA
aaatgcgtcaatacggaaaataagtatcaattttcagtccggacttgagc

SEQ ID NO: 48064 - DNA, 50 bp, synthetic construct
  source 1..50: mol_type = other DNA
gtatcgcagattgtacttgctattattggtacaaggaacgcatgggaaga

SEQ ID NO: 48065 - DNA, 50 bp, synthetic construct
  source 1..50: mol_type = other DNA
gaaggggaaagacttctgtgacgggaccgcgccggcgtattttaagatcg

SEQ ID NO: 48066 - DNA, 50 bp, synthetic construct
  source 1..50: mol_type = other DNA
ataaatgcttttcttcttcacatttaaatatctgcaattatagcaattat

SEQ ID NO: 48067 - DNA, 50 bp, synthetic construct
  source 1..50: mol_type = other DNA
agccgctgatgacctcacagggctgcatccatgtgatttcatccggggga

SEQ ID NO: 48068 - DNA, 50 bp, synthetic construct
  source 1..50: mol_type = other DNA
aagagcaaaaagaaaattaaaaatccttagaatgttttcttaactggaca

SEQ ID NO: 48069 - DNA, 50 bp, synthetic construct
  source 1..50: mol_type = other DNA
tcctggttgaaatgtcataattaccaccgcgcccgccatattggccattt

SEQ ID NO: 48070 - DNA, 50 bp, synthetic construct
  source 1..50: mol_type = other DNA
tgcgctgtggaccagttcccctggacgcaatagaagaattgaatagctgg

SEQ ID NO: 48071 - DNA, 50 bp, synthetic construct
  source 1..50: mol_type = other DNA
acttgatatatatgcgtttctacgggaatagaaacgcttatttatcatat

SEQ ID NO: 48072 - DNA, 50 bp, synthetic construct
  source 1..50: mol_type = other DNA
aaatatcttgagaaatagcaccacgagtgaaaccgtgtctgaattgaatt

SEQ ID NO: 48073 - DNA, 50 bp, synthetic construct
  source 1..50: mol_type = other DNA
tgtatcttactggaaaaatatcatccaagatgagtatgaagtaagataca

SEQ ID NO: 48074 - DNA, 50 bp, synthetic construct
  source 1..50: mol_type = other DNA
atccttttctttgaataatttccataatgatttgggtggtgaaaaaatgg

SEQ ID NO: 48075 - DNA, 50 bp, synthetic construct
  source 1..50: mol_type = other DNA
atatgcaatattattgaaccgtaaattgagttttccattgtattgtattg

SEQ ID NO: 48076 - DNA, 50 bp, synthetic construct
  source 1..50: mol_type = other DNA
agtgatagatttacaaaagaagatatgtaataatttttgtatctattttg

SEQ ID NO: 48077 - DNA, 50 bp, synthetic construct
  source 1..50: mol_type = other DNA
aagagcggtcatcccactctttgaattcaaggataccgggttcatctgac

SEQ ID NO: 48078 - DNA, 50 bp, synthetic construct
  source 1..50: mol_type = other DNA
cgcccttcatatatggcataatcatctccttatgcattgtatgcgtttca

SEQ ID NO: 48079 - DNA, 50 bp, synthetic construct
  source 1..50: mol_type = other DNA
ataaccgaagcagagatagaaatcattgttgatttctctgccgttataga

SEQ ID NO: 48080 - DNA, 50 bp, synthetic construct
  source 1..50: mol_type = other DNA
atgtgggttgtcagcacataggggtatttcctgattaccacagccggaac

SEQ ID NO: 48081 - DNA, 50 bp, synthetic construct
  source 1..50: mol_type = other DNA
gcagggcgtatttttcaaaggattcataagtttataaaaatggtagatct

SEQ ID NO: 48082 - DNA, 50 bp, synthetic construct
  source 1..50: mol_type = other DNA
gtctctacataaaaatatccatttgttgatagatataaaaaaatgtaata

SEQ ID NO: 48083 - DNA, 50 bp, synthetic construct
  source 1..50: mol_type = other DNA
aaaatcaacaccataattgccgaacgttcagaaattgcagaatttttaga

SEQ ID NO: 48084 - DNA, 50 bp, synthetic construct
  source 1..50: mol_type = other DNA
tggtgcagatggaaaatcagcatatgacgtgcgtttccatatctgcaccc

SEQ ID NO: 48085 - DNA, 50 bp, synthetic construct
  source 1..50: mol_type = other DNA
gatcgaagcataccggcacgccggagtgcgggtgctctaagtctgacagc

SEQ ID NO: 48086 - DNA, 50 bp, synthetic construct
  source 1..50: mol_type = other DNA
taccacatcctcgagatcgccatcatgcccgctcgttcgagcgggctttt

SEQ ID NO: 48087 - DNA, 50 bp, synthetic construct
  source 1..50: mol_type = other DNA
tccttcgtattgtgcgacagccatactcgccttaatcaaatcccgaattg

SEQ ID NO: 48088 - DNA, 50 bp, synthetic construct
  source 1..50: mol_type = other DNA
gattatgtgtatattatatcataaagaaagaagggataataccaccaatt

SEQ ID NO: 48089 - DNA, 50 bp, synthetic construct
  source 1..50: mol_type = other DNA
taaaggatttcaatgcgttatacgttattataacacaagaaaagccacga

SEQ ID NO: 48090 - DNA, 50 bp, synthetic construct
  source 1..50: mol_type = other DNA
gcgatttcccggcttttggcatttagaaatgaaaaaatgttgaaaataat

SEQ ID NO: 48091 - DNA, 50 bp, synthetic construct
  source 1..50: mol_type = other DNA
atttttctaattcttccattgtcataagacaatggaagaattagtaatca

SEQ ID NO: 48092 - DNA, 50 bp, synthetic construct
  source 1..50: mol_type = other DNA
gagagtatactggattggtattgccgaaaatagaactccagtctgtcttc

SEQ ID NO: 48093 - DNA, 50 bp, synthetic construct
  source 1..50: mol_type = other DNA
tctaagctgaaaatattatagcagaataattataatattcgcaataaaaa

SEQ ID NO: 48094 - DNA, 50 bp, synthetic construct
  source 1..50: mol_type = other DNA
tggccgccagcaccgctgctgcgactgcgctcactggccggctgcggcat

SEQ ID NO: 48095 - DNA, 50 bp, synthetic construct
  source 1..50: mol_type = other DNA
ttcgccgaagcgtacaagatggaaataaccccatggtgggcgccaccgtg

SEQ ID NO: 48096 - DNA, 50 bp, synthetic construct
  source 1..50: mol_type = other DNA
aaactctagcatagcccgcaacccttcctttaaatcctctgcatcactga

SEQ ID NO: 48097 - DNA, 50 bp, synthetic construct
  source 1..50: mol_type = other DNA
tgtcgtttatctcgttcccgtcgaaagtggtagaggatagagaaaagaga

SEQ ID NO: 48098 - DNA, 50 bp, synthetic construct
  source 1..50: mol_type = other DNA
ccgccaagcccgtttattcaaaacaggtcggcggtgaagtaagaaagcgc

SEQ ID NO: 48099 - DNA, 50 bp, synthetic construct
  source 1..50: mol_type = other DNA
catccagagcagaaagctggacgccggcgtccagcatctcctggtcaaag

SEQ ID NO: 48100 - DNA, 50 bp, synthetic construct
  source 1..50: mol_type = other DNA
agacaattatgaagctgattattatactagcttcagaccaattatttact

SEQ ID NO: 48101 - DNA, 50 bp, synthetic construct
  source 1..50: mol_type = other DNA
atagacgtacggaaaggagggacttcagtctcggcttttgccttggcaat

SEQ ID NO: 48102 - DNA, 50 bp, synthetic construct
  source 1..50: mol_type = other DNA
actatgaagatccgaggctacaggcaaattctgccgacacataacatagt

SEQ ID NO: 48103 - DNA, 50 bp, synthetic construct
  source 1..50: mol_type = other DNA
aaacgccataataattatcagttctttaaatgatattaattttgtatttc

SEQ ID NO: 48104 - DNA, 50 bp, synthetic construct
  source 1..50: mol_type = other DNA
tgaaattaatggtttgtgttcgttaatattcagctaactgccatatttca

SEQ ID NO: 48105 - DNA, 50 bp, synthetic construct
  source 1..50: mol_type = other DNA
tgtagagttaatcatgacgtgtctggaatatggtaatatataaatacgca

SEQ ID NO: 48106 - DNA, 50 bp, synthetic construct
  source 1..50: mol_type = other DNA
cgtgctgcagcatccgaagtacacgcagcagaatgtgctattataataga

SEQ ID NO: 48107 - DNA, 50 bp, synthetic construct
  source 1..50: mol_type = other DNA
cctgtcctttttcttttcaaaagccagcttttgccgagtaatagcaccga

SEQ ID NO: 48108 - DNA, 50 bp, synthetic construct
  source 1..50: mol_type = other DNA
tctttcagaaaataattattattttaaaatcttaattttaatcaggaagg

SEQ ID NO: 48109 - DNA, 50 bp, synthetic construct
  source 1..50: mol_type = other DNA
gttttaacaattaaataagaaaggaaataagcttgaacaattgtataaaa

SEQ ID NO: 48110 - DNA, 50 bp, synthetic construct
  source 1..50: mol_type = other DNA
cacgtgtaaatgtggtattacctccggaaacgctgtaaaatttattcgta

SEQ ID NO: 48111 - DNA, 50 bp, synthetic construct
  source 1..50: mol_type = other DNA
ttttttgaaatttatatatttttatacaaaaataacacctacttgcaaaa

SEQ ID NO: 48112 - DNA, 50 bp, synthetic construct
  source 1..50: mol_type = other DNA
tggaatgattattactggtgcccctggatctgtttgtaaagaaaattcca

SEQ ID NO: 48113 - DNA, 50 bp, synthetic construct
  source 1..50: mol_type = other DNA
cctgcaaccctgcgttttatgactatatccttatcggattttgtttcaat

SEQ ID NO: 48114 - DNA, 50 bp, synthetic construct
  source 1..50: mol_type = other DNA
tagtctgtaaatatctgttccacaatatgtatccatacttttcgtccaaa

SEQ ID NO: 48115 - DNA, 50 bp, synthetic construct
  source 1..50: mol_type = other DNA
cttccgtgggcaattttttgtgcggtggttaaggtaattgggagtccaag

SEQ ID NO: 48116 - DNA, 50 bp, synthetic construct
  source 1..50: mol_type = other DNA
aacccttgatataactggcttttagaatttcagcatccttgtcaactcat

SEQ ID NO: 48117 - DNA, 50 bp, synthetic construct
  source 1..50: mol_type = other DNA
cttggaggattttgatgagcaggtcttccatttcatcaaaatctgttctt

SEQ ID NO: 48118 - DNA, 50 bp, synthetic construct
  source 1..50: mol_type = other DNA
tttccgcataagtccctgcatattcatccactctctgacttgcaaggaag

SEQ ID NO: 48119 - DNA, 50 bp, synthetic construct
  source 1..50: mol_type = other DNA
ttttgacatcctgtttttagtatattcacacaaacaagtcttactcaaaa

SEQ ID NO: 48120 - DNA, 50 bp, synthetic construct
  source 1..50: mol_type = other DNA
cgcagagaattgcgttgccgtcatcggcgacgctgtcacgcttcacggcg

SEQ ID NO: 48121 - DNA, 50 bp, synthetic construct
  source 1..50: mol_type = other DNA
aaaaatgattaagcaataaaaaaagtttttgttataccttgatctttttt

SEQ ID NO: 48122 - DNA, 50 bp, synthetic construct
  source 1..50: mol_type = other DNA
ctcccaacaaaaacagcctgcgaatattcttgaaaagcttgtgttcaaaa

SEQ ID NO: 48123 - DNA, 50 bp, synthetic construct
  source 1..50: mol_type = other DNA
aacggtttttgaaatatccgcaaaatttctcggctacattgaaaacatca

SEQ ID NO: 48124 - DNA, 50 bp, synthetic construct
  source 1..50: mol_type = other DNA
atcgtgcacttccagcgcttcggcgaggggctgcggcttgccaaggaaaa

SEQ ID NO: 48125 - DNA, 50 bp, synthetic construct
  source 1..50: mol_type = other DNA
atgaagaaaaagagcagctcatcaaaaatagagcctccttctagggtgtt

SEQ ID NO: 48126 - DNA, 50 bp, synthetic construct
  source 1..50: mol_type = other DNA
ctgaccgaagccgccaacgagaccgcgtctaaagcaacggaagtgggcag

SEQ ID NO: 48127 - DNA, 50 bp, synthetic construct
  source 1..50: mol_type = other DNA
ggaaatgagggaaaaagcaaggcaaaatccgctaaaacacctatatttct

SEQ ID NO: 48128 - DNA, 50 bp, synthetic construct
  source 1..50: mol_type = other DNA
atcccccggctcgccaaaggttgtggggtgcagatggcgagctgggtgca

SEQ ID NO: 48129 - DNA, 50 bp, synthetic construct
  source 1..50: mol_type = other DNA
acaaaataattatatcatacatttattaaggttatatatcttccttttaa

SEQ ID NO: 48130 - DNA, 50 bp, synthetic construct
  source 1..50: mol_type = other DNA
tgagatatgttgaagattgtctattaaaagacaacgttcgcaattacttt

SEQ ID NO: 48131 - DNA, 50 bp, synthetic construct
  source 1..50: mol_type = other DNA
gatactattaatgaaagctggtttatcaacgtattttcggtaatatctcg

SEQ ID NO: 48132 - DNA, 50 bp, synthetic construct
  source 1..50: mol_type = other DNA
gcaccctatattatagcaaagaaggccttttttagtgccttaactattgc

SEQ ID NO: 48133 - DNA, 50 bp, synthetic construct
  source 1..50: mol_type = other DNA
tttttacatatttggtgagacaaaatttattctcgctttctatgaggctg

SEQ ID NO: 48134 - DNA, 50 bp, synthetic construct
  source 1..50: mol_type = other DNA
ctgcaataccgttttctatcttataggctttgatgaaaatgaagatggta

SEQ ID NO: 48135 - DNA, 50 bp, synthetic construct
  source 1..50: mol_type = other DNA
cgaaaatcggaaaaatattgcgaattttgatagaccacgcgcccagccag

SEQ ID NO: 48136 - DNA, 50 bp, synthetic construct
  source 1..50: mol_type = other DNA
ggtgccgtagccggggatgcccagcgatggccgatgcggaacgcggatgc

SEQ ID NO: 48137 - DNA, 50 bp, synthetic construct
  source 1..50: mol_type = other DNA
tgattactctataattataacataatgcctgtaaaacttgttcttaaaac

SEQ ID NO: 48138 - DNA, 50 bp, synthetic construct
  source 1..50: mol_type = other DNA
atatcagccttcataacatagattataatcgttgacggaaaggctgttgt

SEQ ID NO: 48139 - DNA, 50 bp, synthetic construct
  source 1..50: mol_type = other DNA
aaataaaaaagccaccaatagcatttctttataagatggctttttcgttt

SEQ ID NO: 48140 - DNA, 50 bp, synthetic construct
  source 1..50: mol_type = other DNA
gagaacggtgacaacccaagtgccgaagtttctttgttgtcaattttcca

SEQ ID NO: 48141 - DNA, 50 bp, synthetic construct
  source 1..50: mol_type = other DNA
atattgttgtcttgaaaaaaagaattttcttgacatcaagactacggtct

SEQ ID NO: 48142 - DNA, 50 bp, synthetic construct
  source 1..50: mol_type = other DNA
tttttggcttttaccttttaaatgtaaaaataaaggctaagttgtaaaat

SEQ ID NO: 48143 - DNA, 50 bp, synthetic construct
  source 1..50: mol_type = other DNA
catctgcagacagaacctgtttgccggcaaaaagaaaggctctggccgaa

SEQ ID NO: 48144 - DNA, 50 bp, synthetic construct
  source 1..50: mol_type = other DNA
gccagaattcaaatgctcgaaacgtatttttccagcatttttgtatcaat

SEQ ID NO: 48145 - DNA, 50 bp, synthetic construct
  source 1..50: mol_type = other DNA
ggtgttgcgagcacccgtcggccaaatggattttttgtcctcggaaagca

SEQ ID NO: 48146 - DNA, 50 bp, synthetic construct
  source 1..50: mol_type = other DNA
ggacggtgaaagcagccagatggagctgttactgggaggagtttctgtcc

SEQ ID NO: 48147 - DNA, 50 bp, synthetic construct
  source 1..50: mol_type = other DNA
gctctcatgaactttaagaccgtaatatcactctgaaagccaataatagc

SEQ ID NO: 48148 - DNA, 50 bp, synthetic construct
  source 1..50: mol_type = other DNA
tgggaaagtgctttaaaagtgcagttctttttcttttgtgcacttaggca

SEQ ID NO: 48149 - DNA, 50 bp, synthetic construct
  source 1..50: mol_type = other DNA
agcatttctgatgcttctttttcttctcggcaaaaagaagttcaacgaac

SEQ ID NO: 48150 - DNA, 50 bp, synthetic construct
  source 1..50: mol_type = other DNA
ccgggcgtcgtgggagaattaaaccgtttggattttccaccgcggccgca

SEQ ID NO: 48151 - DNA, 50 bp, synthetic construct
  source 1..50: mol_type = other DNA
tgggcagacatattggacagctcaccaattcttgcaaaactgtctttccg

SEQ ID NO: 48152 - DNA, 50 bp, synthetic construct
  source 1..50: mol_type = other DNA
gggctggacaaatgcacgtcgggcaactgcgataaaaatttgtcccgccc

SEQ ID NO: 48153 - DNA, 50 bp, synthetic construct
  source 1..50: mol_type = other DNA
aaaaatgggcgaaaatgcccctaaaaatcggggcaatttcccccgactga

SEQ ID NO: 48154 - DNA, 50 bp, synthetic construct
  source 1..50: mol_type = other DNA
atactcatttttaaggaggatgatataatatcaatttataaaacctctac

SEQ ID NO: 48155 - DNA, 50 bp, synthetic construct
  source 1..50: mol_type = other DNA
ggaaataagcaccctatattatagcaagtgtcccctgggttctgtcttcc

SEQ ID NO: 48156 - DNA, 50 bp, synthetic construct
  source 1..50: mol_type = other DNA
gccacaaagcacaggcagttggcatgcggttcatgccggtgctttcccgc

SEQ ID NO: 48157 - DNA, 50 bp, synthetic construct
  source 1..50: mol_type = other DNA
gaattccagataatataatagatatttagtttttatattccattccattc

SEQ ID NO: 48158 - DNA, 50 bp, synthetic construct
  source 1..50: mol_type = other DNA
aaaggactaattaccgagaattttgtaattttctcttttatttaatggga

SEQ ID NO: 48159 - DNA, 50 bp, synthetic construct
  source 1..50: mol_type = other DNA
tatgaagtatattgttcatctgaatctaaaccagctccatatacttcatt

SEQ ID NO: 48160 - DNA, 50 bp, synthetic construct
  source 1..50: mol_type = other DNA
ggaaatggcaaggaaattgtctacatctgaatatttttttgtaataatcc

SEQ ID NO: 48161 - DNA, 50 bp, synthetic construct
  source 1..50: mol_type = other DNA
tatcaagcggccatcgttgaagatcggtcttcttgtgttcatactttgcg

SEQ ID NO: 48162 - DNA, 50 bp, synthetic construct
  source 1..50: mol_type = other DNA
atatcggaaacggtatgtttttacagccgaagctataccgtttctctctt

SEQ ID NO: 48163 - DNA, 50 bp, synthetic construct
  source 1..50: mol_type = other DNA
ttcgccgcaaaccgggcacttgactttttcagaactatatttccggcatg

SEQ ID NO: 48164 - DNA, 50 bp, synthetic construct
  source 1..50: mol_type = other DNA
tcgtttagggcggccgaggctcctcatcgccagatggcggctgcgcatcg

SEQ ID NO: 48165 - DNA, 50 bp, synthetic construct
  source 1..50: mol_type = other DNA
aagaaaaatatgaaaaatggggcgatgaccagtttttgccctatttttaa

SEQ ID NO: 48166 - DNA, 50 bp, synthetic construct
  source 1..50: mol_type = other DNA
aaccaatctatgcaagtatgaatcaaaatgtacccttaaagaaatttata

SEQ ID NO: 48167 - DNA, 50 bp, synthetic construct
  source 1..50: mol_type = other DNA
atagttagtgtataatacacactatatagtttatatttttggataaagca

SEQ ID NO: 48168 - DNA, 50 bp, synthetic construct
  source 1..50: mol_type = other DNA
agaagtttcggtcagagcattgccaaagcaatggatattgtaaaagtttt

SEQ ID NO: 48169 - DNA, 50 bp, synthetic construct
  source 1..50: mol_type = other DNA
aacgcctattctatatgactttgtgcattatagcatagaaaatatgacag

SEQ ID NO: 48170 - DNA, 50 bp, synthetic construct
  source 1..50: mol_type = other DNA
aaaaatgtttgcatgtaatagacgatggaatcgtgctcgaccgcatattt

SEQ ID NO: 48171 - DNA, 50 bp, synthetic construct
  source 1..50: mol_type = other DNA
ataccctctccggattggagagggtaccctctccggattggagagggtat

SEQ ID NO: 48172 - DNA, 50 bp, synthetic construct
  source 1..50: mol_type = other DNA
ttttagggtaatattttatgaaaggccttacgccaatgccgggaataaac

SEQ ID NO: 48173 - DNA, 50 bp, synthetic construct
  source 1..50: mol_type = other DNA
cattgaccggaacaattttttacaggtataaaaaatacgccccttgccag

SEQ ID NO: 48174 - DNA, 50 bp, synthetic construct
  source 1..50: mol_type = other DNA
aattctctcccttttatggggatttgaattgatgaagaaggcagggtatt

SEQ ID NO: 48175 - DNA, 50 bp, synthetic construct
  source 1..50: mol_type = other DNA
atcgttgaataagcctccgttgaaatgtgaaaattgcgaaacgcagcgaa

SEQ ID NO: 48176 - DNA, 50 bp, synthetic construct
  source 1..50: mol_type = other DNA
tcagtaaatcaataaatataattatttgataaacttttttgatttacttt

SEQ ID NO: 48177 - DNA, 50 bp, synthetic construct
  source 1..50: mol_type = other DNA
aactcataaaaataagccttgaaacctttctctgaatataaatatctttt

SEQ ID NO: 48178 - DNA, 50 bp, synthetic construct
  source 1..50: mol_type = other DNA
ctacccgaagataggaaaaggcggtggcgccgatggctgagacactggag

SEQ ID NO: 48179 - DNA, 50 bp, synthetic construct
  source 1..50: mol_type = other DNA
aataagctgcatgcacgggagtcttccgacgccctggcggagcttgatca

SEQ ID NO: 48180 - DNA, 50 bp, synthetic construct
  source 1..50: mol_type = other DNA
tcgtccgtttcgcatggtgtatccgttcttccaccatccgacactgacct

SEQ ID NO: 48181 - DNA, 50 bp, synthetic construct
  source 1..50: mol_type = other DNA
tttattacaaaaaagaaatggaacttcttccatgtcctttttatgcggaa

SEQ ID NO: 48182 - DNA, 50 bp, synthetic construct
  source 1..50: mol_type = other DNA
gctataagtgccggatagagcaaatatttgacggatttcgatggaataga

SEQ ID NO: 48183 - DNA, 50 bp, synthetic construct
  source 1..50: mol_type = other DNA
gcagaacaggctgtctgccgtcggctcggccggcaagtagctttgaaagc

SEQ ID NO: 48184 - DNA, 50 bp, synthetic construct
  source 1..50: mol_type = other DNA
gaaggtgatgccgtccgggtcgagccgtcagcatggtcttgatcgtcttt

SEQ ID NO: 48185 - DNA, 50 bp, synthetic construct
  source 1..50: mol_type = other DNA
tgagcaatttcattgtaccatgatccggtccggcttgctgaaaagatgcg

SEQ ID NO: 48186 - DNA, 50 bp, synthetic construct
  source 1..50: mol_type = other DNA
agtgccatcccggagatgtaattctcagattcaaatcacgaggtgagagc

SEQ ID NO: 48187 - DNA, 50 bp, synthetic construct
  source 1..50: mol_type = other DNA
tgaagtacgagaacgcggcgtaactgcgatgtccgggtctccgtaattct

SEQ ID NO: 48188 - DNA, 50 bp, synthetic construct
  source 1..50: mol_type = other DNA
aacggaaagcgaatcctgttttcagataaaaacatgattgacattttgtt

SEQ ID NO: 48189 - DNA, 50 bp, synthetic construct
  source 1..50: mol_type = other DNA
tcagctttggtgacgctatgctaattttatggaatcgtcagcagagctgg

SEQ ID NO: 48190 - DNA, 50 bp, synthetic construct
  source 1..50: mol_type = other DNA
gagacgtgatgcactccaaggctgaacgtccgaccaaaaatccacggacg

SEQ ID NO: 48191 - DNA, 50 bp, synthetic construct
  source 1..50: mol_type = other DNA
aaaactcttttgtaaaagagctgctcctttgtcttgcgtgttctttcatt

SEQ ID NO: 48192 - DNA, 50 bp, synthetic construct
  source 1..50: mol_type = other DNA
gtcattcgagtgccagactttttcgcggaaaagtgagtcacttttaatac

SEQ ID NO: 48193 - DNA, 50 bp, synthetic construct
  source 1..50: mol_type = other DNA
tcggcttcgcggaaccccgccgcgactgcgaagaagcgccgcgttgccgg

SEQ ID NO: 48194 - DNA, 50 bp, synthetic construct
  source 1..50: mol_type = other DNA
gggacttccgcctccaaagggtcggcaaccgcttatgacaaaaatccgct

SEQ ID NO: 48195 - DNA, 50 bp, synthetic construct
  source 1..50: mol_type = other DNA
aatacgctcgtaaaagatgcagctaaggctgcatctggggcggttgtgaa

SEQ ID NO: 48196 - DNA, 50 bp, synthetic construct
  source 1..50: mol_type = other DNA
ctgaaaggaactgtgacgattattgtcaatttcctttaatttcccgtcat

SEQ ID NO: 48197 - DNA, 50 bp, synthetic construct
  source 1..50: mol_type = other DNA
agttttaggaggatttcaccatgccgcttcaaaggtatgcccgtcaaaga

SEQ ID NO: 48198 - DNA, 50 bp, synthetic construct
  source 1..50: mol_type = other DNA
gcagagcgtatataccatgccgaactgaaagccaattatatcaagtcgtt

SEQ ID NO: 48199 - DNA, 50 bp, synthetic construct
  source 1..50: mol_type = other DNA
aaaggatttcccatagttggaaaatcatttgcaacatcaagaacaccttt

SEQ ID NO: 48200 - DNA, 50 bp, synthetic construct
  source 1..50: mol_type = other DNA
caccagttttgatacaatgagtatcgccctgcattgtatcaattatggcg

SEQ ID NO: 48201 - DNA, 50 bp, synthetic construct
  source 1..50: mol_type = other DNA
tattgtatcacaaaaatccggcaccgtataagaatcttgtaacgacaatt

SEQ ID NO: 48202 - DNA, 50 bp, synthetic construct
  source 1..50: mol_type = other DNA
atagtactttgtaatgcaaggtactagttctatgttatacaaggtactat

SEQ ID NO: 48203 - DNA, 50 bp, synthetic construct
  source 1..50: mol_type = other DNA
atacagagcatttaaaatcatgcgagaagcgtatcataaatgatgcggtt

SEQ ID NO: 48204 - DNA, 50 bp, synthetic construct
  source 1..50: mol_type = other DNA
cggttttttaaatttggttgcgggggcaggatttgaacctacgaccttcg

SEQ ID NO: 48205 - DNA, 50 bp, synthetic construct
  source 1..50: mol_type = other DNA
tataaaaatcacttatggtatattctcattaatcataaatgcacgatata

SEQ ID NO: 48206 - DNA, 50 bp, synthetic construct
  source 1..50: mol_type = other DNA
ccaccgtcgaatattccagaggctattgacaatggaatacgcgatcggaa

SEQ ID NO: 48207 - DNA, 50 bp, synthetic construct
  source 1..50: mol_type = other DNA
tgcgcgatggctttaacctccactggtttccggggtgactaattatatgc

SEQ ID NO: 48208 - DNA, 50 bp, synthetic construct
  source 1..50: mol_type = other DNA
tgatacgcctctgcttattaggtaatttatgataagcttctcctcgcata

SEQ ID NO: 48209 - DNA, 50 bp, synthetic construct
  source 1..50: mol_type = other DNA
tgcgaccgtctccacgtgcgtagaattcgacatgcatcgtctgcggaaac

SEQ ID NO: 48210 - DNA, 50 bp, synthetic construct
  source 1..50: mol_type = other DNA
tatctctccgccactttgagacgaaatcgtcccatgtatcccgccatatt

SEQ ID NO: 48211 - DNA, 50 bp, synthetic construct
  source 1..50: mol_type = other DNA
ccggaattgtgcttttgtacgccaatggtaccccgtacgggatttgaacc

SEQ ID NO: 48212 - DNA, 50 bp, synthetic construct
  source 1..50: mol_type = other DNA
cgggaggacgcgcggacccgtggcgagctcgaggcgcgccagtcctggac

SEQ ID NO: 48213 - DNA, 50 bp, synthetic construct
  source 1..50: mol_type = other DNA
caggcgatcgtcaacctgacgatgaccaacatccgtaccgtgctcggctc

SEQ ID NO: 48214 - DNA, 50 bp, synthetic construct
  source 1..50: mol_type = other DNA
aatgacacatcatgtggagacggtagcaagttgagtgtgtggctctgctc

SEQ ID NO: 48215 - DNA, 50 bp, synthetic construct
  source 1..50: mol_type = other DNA
tgagtaaaagaggcgtcagtacaactatcgtggtacccccactgggattc

SEQ ID NO: 48216 - DNA, 50 bp, synthetic construct
  source 1..50: mol_type = other DNA
gatggctttaacctccactggatacttaggatttccggggtgactaatta

SEQ ID NO: 48217 - DNA, 50 bp, synthetic construct
  source 1..50: mol_type = other DNA
taattagtcaccccggaaatcctaagtatccagtggaggttaacgccatc

SEQ ID NO: 48218 - DNA, 50 bp, synthetic construct
  source 1..50: mol_type = other DNA
ccaattaagcgcaaacgcactaacacttacttgcaaaatgaaataatcgg

SEQ ID NO: 48219 - DNA, 50 bp, synthetic construct
  source 1..50: mol_type = other DNA
gtgcatataattagccaccccggaaatccaaagtatccagtggaggttaa

SEQ ID NO: 48220 - DNA, 50 bp, synthetic construct
  source 1..50: mol_type = other DNA
ggtttcacgcttatcgaactgatggtcgttattggcatcatcgccatttt

SEQ ID NO: 48221 - DNA, 50 bp, synthetic construct
  source 1..50: mol_type = other DNA
ctggatactttggattccccagtatttccggggtgactaattatatgcac

SEQ ID NO: 48222 - DNA, 50 bp, synthetic construct
  source 1..50: mol_type = other DNA
ggcaggcttgcctaacatataattatgattgactattaggcttgccctcc

SEQ ID NO: 48223 - DNA, 50 bp, synthetic construct
  source 1..50: mol_type = other DNA
acaaaggtagggacagtgttttttataaaaaatgcagtagggactgcata

SEQ ID NO: 48224 - DNA, 50 bp, synthetic construct
  source 1..50: mol_type = other DNA
tatacttaactattcacgttgagacgttgaaagagtggtaagtaaaagta

SEQ ID NO: 48225 - DNA, 50 bp, synthetic construct
  source 1..50: mol_type = other DNA
tggatatgttcccaaatacgccacatatactaataatgagacattgcgag

SEQ ID NO: 48226 - DNA, 50 bp, synthetic construct
  source 1..50: mol_type = other DNA
ccagggcatagaaggcgtgccggtcgacgggcacgccttcgagccttgcg

SEQ ID NO: 48227 - DNA, 50 bp, synthetic construct
  source 1..50: mol_type = other DNA
aagggagtaagcggagataatgtggtgggattatctaaagtcacttcctg

SEQ ID NO: 48228 - DNA, 50 bp, synthetic construct
  source 1..50: mol_type = other DNA
gtacaaatggcaaagattctggtgctagtgctctattattccatgtacgg

SEQ ID NO: 48229 - DNA, 50 bp, synthetic construct
  source 1..50: mol_type = other DNA
ttttgaacacaaagctgtttccaccaaccgaatcacaaagctgatcagta

SEQ ID NO: 48230 - DNA, 50 bp, synthetic construct
  source 1..50: mol_type = other DNA
agatcggccggtgccagattgatggtgatcctgcgcatggggaattcaaa

SEQ ID NO: 48231 - DNA, 50 bp, synthetic construct
  source 1..50: mol_type = other DNA
cagcaacagcataatgtatctttgatatcaattacattatgatagcgttt

SEQ ID NO: 48232 - DNA, 50 bp, synthetic construct
  source 1..50: mol_type = other DNA
cattttcgtgctttttttaccgtgtcgcagttcttaatcccatagagtct

SEQ ID NO: 48233 - DNA, 50 bp, synthetic construct
  source 1..50: mol_type = other DNA
ttccctcaaacgacacacgtggagacccccacatgtggaggctattgtgt

SEQ ID NO: 48234 - DNA, 50 bp, synthetic construct
  source 1..50: mol_type = other DNA
atccaagctcagcaatcatttagaagagaatagtcggggtgacaggattt

SEQ ID NO: 48235 - DNA, 50 bp, synthetic construct
  source 1..50: mol_type = other DNA
ggtcgcaggttcgaatcctgtcgtccccgacttgaattcaaaacagctcg

SEQ ID NO: 48236 - DNA, 50 bp, synthetic construct
  source 1..50: mol_type = other DNA
cagatcgtcggcaagtataaacactaattcttatcgtcggcaaagatgat

SEQ ID NO: 48237 - DNA, 50 bp, synthetic construct
  source 1..50: mol_type = other DNA
aaaccatatttcaaatggtatgcatatgcatatcaaatgccatgcagaaa

SEQ ID NO: 48238 - DNA, 50 bp, synthetic construct
  source 1..50: mol_type = other DNA
ctgccggagccaattttgagaattagtgcgagccaaattgatagattaaa

SEQ ID NO: 48239 - DNA, 50 bp, synthetic construct
  source 1..50: mol_type = other DNA
gctttaacctccactggatactttggcatttaggatttccggggtggcta

SEQ ID NO: 48240 - DNA, 50 bp, synthetic construct
  source 1..50: mol_type = other DNA
tagatatgtttccaatgacaacacacatatagaagctgtgactgttctac

SEQ ID NO: 48241 - DNA, 50 bp, synthetic construct
  source 1..50: mol_type = other DNA
aactcaagcatgccaatcaccgcaattgcattcatcggcgtgcgaatctc

SEQ ID NO: 48242 - DNA, 50 bp, synthetic construct
  source 1..50: mol_type = other DNA
taataagccatcccggaaacccgaatttggcaatcccaaatatgaaatag

SEQ ID NO: 48243 - DNA, 50 bp, synthetic construct
  source 1..50: mol_type = other DNA
cataaggtcccatttctcttatctagcaaacggtgaaacgatctctctct

SEQ ID NO: 48244 - DNA, 50 bp, synthetic construct
  source 1..50: mol_type = other DNA
cccgaggtttatacagaacaaggtgtgccggtaatggcagacggcaccgc

SEQ ID NO: 48245 - DNA, 50 bp, synthetic construct
  source 1..50: mol_type = other DNA
ggaaacttaggattcccaaaatgatttactcttggattacccggatggct

SEQ ID NO: 48246 - DNA, 50 bp, synthetic construct
  source 1..50: mol_type = other DNA
cttcgttgtagcaacactacgcactccacgtgatgcgtctgtggaaacaa

SEQ ID NO: 48247 - DNA, 50 bp, synthetic construct
  source 1..50: mol_type = other DNA
cttcgttgtagcaacactacacactccacatgatgcgtctgtggaaacaa

SEQ ID NO: 48248 - DNA, 50 bp, synthetic construct
  source 1..50: mol_type = other DNA
cttattttgtaaagacattcggctgtgtcagatgaatgcccgagactcag

SEQ ID NO: 48249 - DNA, 50 bp, synthetic construct
  source 1..50: mol_type = other DNA
aaactaatgataaaattggtcattagcatgatttattttatcaatatcat

SEQ ID NO: 48250 - DNA, 50 bp, synthetic construct
  source 1..50: mol_type = other DNA
tcccgaatgccggcgaaaaaatcgcggaaaatattggcgcctaaaatggc

SEQ ID NO: 48251 - DNA, 50 bp, synthetic construct
  source 1..50: mol_type = other DNA
ctccagcaggtgctcgtagagcaggcaggcggaacttctccatggggaag

SEQ ID NO: 48252 - DNA, 50 bp, synthetic construct
  source 1..50: mol_type = other DNA
tttttacaaaaaaaacacccctataaaaggagcgtttttgtgctattttt

SEQ ID NO: 48253 - DNA, 50 bp, synthetic construct
  source 1..50: mol_type = other DNA
aagtgtttggttccctctttgcgtccctcatagcttgatccgaaaaagtt

SEQ ID NO: 48254 - DNA, 50 bp, synthetic construct
  source 1..50: mol_type = other DNA
agtgatctattgaaaaaagagctattagctaaattacgaaataaatcact

SEQ ID NO: 48255 - DNA, 50 bp, synthetic construct
  source 1..50: mol_type = other DNA
aaggtaatactcctgttatgtgtctagaaatgtataatactgaagactat

SEQ ID NO: 48256 - DNA, 50 bp, synthetic construct
  source 1..50: mol_type = other DNA
gctgttctgtcgatgctcaatctgtaccgactgagctatcagggaacagc

SEQ ID NO: 48257 - DNA, 50 bp, synthetic construct
  source 1..50: mol_type = other DNA
gcagacgcgcgccgcgctccagcaatctggcaggcgcacgaagccattgc

SEQ ID NO: 48258 - DNA, 50 bp, synthetic construct
  source 1..50: mol_type = other DNA
tttcccgcgcggatgagcgcataggcttaggcgctcaaacgtcgtagcat

SEQ ID NO: 48259 - DNA, 50 bp, synthetic construct
  source 1..50: mol_type = other DNA
acgctgaacttatagtcatcaattttgcccagcagccacgcattcatcga

SEQ ID NO: 48260 - DNA, 50 bp, synthetic construct
  source 1..50: mol_type = other DNA
cggaattgcacaggtgtagatcggagacattatgctttacactaagggct

SEQ ID NO: 48261 - DNA, 50 bp, synthetic construct
  source 1..50: mol_type = other DNA
gtatgttaggcagataacggtttcatgaaattgttatacagataataatt

SEQ ID NO: 48262 - DNA, 50 bp, synthetic construct
  source 1..50: mol_type = other DNA
cggccgtctaaaatcatcaaggtctaaacgtgtctaataaaaatcacccg

SEQ ID NO: 48263 - DNA, 50 bp, synthetic construct
  source 1..50: mol_type = other DNA
tccagccagcggcgggcttttttgatataaaaaatagctcgcaattttta

SEQ ID NO: 48264 - DNA, 50 bp, synthetic construct
  source 1..50: mol_type = other DNA
tagccaccccggaaatcccaagtgtgatattagggaatccaaagtatcca

SEQ ID NO: 48265 - DNA, 50 bp, synthetic construct
  source 1..50: mol_type = other DNA
ctttcggcaaatgatgcgatcggggcccctaccgcgtattataacgatag

SEQ ID NO: 48266 - DNA, 50 bp, synthetic construct
  source 1..50: mol_type = other DNA
tgtaaaatggcaaaagttctggtgctggtgctttattattccatgtacgg

SEQ ID NO: 48267 - DNA, 50 bp, synthetic construct
  source 1..50: mol_type = other DNA
tacagtgtcggctacactatcgaattctctcggaatgaggcgactcgaac

SEQ ID NO: 48268 - DNA, 50 bp, synthetic construct
  source 1..50: mol_type = other DNA
gtctggaggacacaacttgatgaaatttcattatgatcggttcacccgga

SEQ ID NO: 48269 - DNA, 50 bp, synthetic construct
  source 1..50: mol_type = other DNA
ccctgtaatcctgcaggcacctgcggaaagctccctgtcggtcaggaacc

SEQ ID NO: 48270 - DNA, 50 bp, synthetic construct
  source 1..50: mol_type = other DNA
atagtcttcagtattatacatttctagacacataacaggagtattacctt

SEQ ID NO: 48271 - DNA, 50 bp, synthetic construct
  source 1..50: mol_type = other DNA
gaaccgggcggctgtccagaatcatctaataaatattaccctattaacgc

SEQ ID NO: 48272 - DNA, 50 bp, synthetic construct
  source 1..50: mol_type = other DNA
ctggaggtactgcgtgagccattggaatcggggcatatcgtgatctcccg

SEQ ID NO: 48273 - DNA, 50 bp, synthetic construct
  source 1..50: mol_type = other DNA
actggccgcgtgatcaagggttgggaccagggtttgatgggcatgcaggt

SEQ ID NO: 48274 - DNA, 50 bp, synthetic construct
  source 1..50: mol_type = other DNA
ccgcctgtttctctgcgatcaacatcacttcatcaagtagctgcctgagt

SEQ ID NO: 48275 - DNA, 50 bp, synthetic construct
  source 1..50: mol_type = other DNA
gacggtgcatgtggagacggttgtctcatatgttagcaacggtacatgtg

SEQ ID NO: 48276 - DNA, 50 bp, synthetic construct
  source 1..50: mol_type = other DNA
cgacagacaatttcaaattgggagaagaattatccagatgtgaatagtct

SEQ ID NO: 48277 - DNA, 50 bp, synthetic construct
  source 1..50: mol_type = other DNA
tcgggtggcagcaggatgcggcagaaggtacttttacgatagccttgggc

SEQ ID NO: 48278 - DNA, 50 bp, synthetic construct
  source 1..50: mol_type = other DNA
ttggccggaacctggcaagaatactcagccagagctattacccaagaaaa

SEQ ID NO: 48279 - DNA, 50 bp, synthetic construct
  source 1..50: mol_type = other DNA
cccgaatacggttcatgtggaagtcgagagtatggtgttgctacaaaagg

SEQ ID NO: 48280 - DNA, 50 bp, synthetic construct
  source 1..50: mol_type = other DNA
ttcagttgggccattgctttttttgaatactgtttgcaggttccggccaa

SEQ ID NO: 48281 - DNA, 50 bp, synthetic construct
  source 1..50: mol_type = other DNA
tcgcctataagcaagttggaatcggggcactcatagctgcgtggcttatt

SEQ ID NO: 48282 - DNA, 50 bp, synthetic construct
  source 1..50: mol_type = other DNA
agctgcttcaattaagtatattaaatttactatatttgatttcaattaat

SEQ ID NO: 48283 - DNA, 50 bp, synthetic construct
  source 1..50: mol_type = other DNA
agctgcttcaattaagtatattaaatttactatatctgatttcaattaat

SEQ ID NO: 48284 - DNA, 50 bp, synthetic construct
  source 1..50: mol_type = other DNA
agctgcttcaattaagtatattaaatttactatatctaatttcaattaat

SEQ ID NO: 48285 - DNA, 50 bp, synthetic construct
  source 1..50: mol_type = other DNA
cgccacgctggaagcagcgtaaagtatagtacgctggaagaagcaattga

SEQ ID NO: 48286 - DNA, 50 bp, synthetic construct
  source 1..50: mol_type = other DNA
catacatggagtaataaagcaccagatgaccagaatttttgccatcgtgt

SEQ ID NO: 48287 - DNA, 50 bp, synthetic construct
  source 1..50: mol_type = other DNA
cgggggcggacaacccaaagggtcgtcacccggctcccgtcacggtcgcg

SEQ ID NO: 48288 - DNA, 50 bp, synthetic construct
  source 1..50: mol_type = other DNA
gactaacatttcaatgaatgatactactatccttaatttctactaaagta

SEQ ID NO: 48289 - DNA, 50 bp, synthetic construct
  source 1..50: mol_type = other DNA
tactttagtagaaataaaggatagtagatacgtttattgaaatgttagtc

SEQ ID NO: 48290 - DNA, 50 bp, synthetic construct
  source 1..50: mol_type = other DNA
tgctgtttctcgacgagtctgtcaatctttcgacgaatgtgccgagatcg

SEQ ID NO: 48291 - DNA, 50 bp, synthetic construct
  source 1..50: mol_type = other DNA
atgttcccgcaaacagctcacgttgaaaccgtagtactcttgcagttaaa

SEQ ID NO: 48292 - DNA, 50 bp, synthetic construct
  source 1..50: mol_type = other DNA
ttggctgtctgatatggcttgggacagattgccccatatcggacattacg

SEQ ID NO: 48293 - DNA, 50 bp, synthetic construct
  source 1..50: mol_type = other DNA
gcaatttttttaaacctttcaaaaataaatgtaaggtttttgtcatttga

SEQ ID NO: 48294 - DNA, 50 bp, synthetic construct
  source 1..50: mol_type = other DNA
tgtggtccggtattgtcttcagtatatgagcattacatttttattttcgg

SEQ ID NO: 48295 - DNA, 50 bp, synthetic construct
  source 1..50: mol_type = other DNA
gatacataaacgactggttgtaattgattgcttatagccgaagatgcggc

SEQ ID NO: 48296 - DNA, 50 bp, synthetic construct
  source 1..50: mol_type = other DNA
cggcccttggagtggagccgagggggaattgaaccccggtccgatgaccg

SEQ ID NO: 48297 - DNA, 50 bp, synthetic construct
  source 1..50: mol_type = other DNA
caaactccccatgttgagagtgttactaagctcgtggcatgttgaagcag

SEQ ID NO: 48298 - DNA, 50 bp, synthetic construct
  source 1..50: mol_type = other DNA
tggatactttggattccctaatatcaccttttgggtttccggggtgacta

SEQ ID NO: 48299 - DNA, 50 bp, synthetic construct
  source 1..50: mol_type = other DNA
ctgatccagaatggaaaaaaatgcacgccccatccccctgcatttataag

SEQ ID NO: 48300 - DNA, 50 bp, synthetic construct
  source 1..50: mol_type = other DNA
cagcggttctccatgccctatccggaaaaataaatattgcacaaacactg

SEQ ID NO: 48301 - DNA, 50 bp, synthetic construct
  source 1..50: mol_type = other DNA
aagcaatttttttaaacctttcaaaaatgtaaggtttttgtcatttgaat

SEQ ID NO: 48302 - DNA, 50 bp, synthetic construct
  source 1..50: mol_type = other DNA
ccagctgttggtagtaccgttacaaacacgacagttacaccgattattga

SEQ ID NO: 48303 - DNA, 50 bp, synthetic construct
  source 1..50: mol_type = other DNA
gctgccgcaggcgggcacaatctgctgatgatcggtccaccaggtgcggg

SEQ ID NO: 48304 - DNA, 50 bp, synthetic construct
  source 1..50: mol_type = other DNA
tcgccccggggcaagcgaatggtgcccacctttgaccggaaatggtgcgg

SEQ ID NO: 48305 - DNA, 50 bp, synthetic construct
  source 1..50: mol_type = other DNA
ggttcgaatccctcctccgctaccaacagaacgggcctccgctaccatcg

SEQ ID NO: 48306 - DNA, 50 bp, synthetic construct
  source 1..50: mol_type = other DNA
gccttgtccggcaggccgacgatggacatgcccatcttgcccggcgccac

SEQ ID NO: 48307 - DNA, 50 bp, synthetic construct
  source 1..50: mol_type = other DNA
tgtgacctctgccttcggagcaattttgccttcggagggcagcactctat

SEQ ID NO: 48308 - DNA, 50 bp, synthetic construct
  source 1..50: mol_type = other DNA
aaagcgccagagctcagccctgacgcaggaatactgccgggaggcgcttc

SEQ ID NO: 48309 - DNA, 50 bp, synthetic construct
  source 1..50: mol_type = other DNA
tgcgggcaatcacaatctgttcatatctgctgcttgtcgggccaccggga

SEQ ID NO: 48310 - DNA, 50 bp, synthetic construct
  source 1..50: mol_type = other DNA
ttgcaatttgctgatggtaatggatttcagtgtggcatttggtatgaagg

SEQ ID NO: 48311 - DNA, 50 bp, synthetic construct
  source 1..50: mol_type = other DNA
atttaagattatgcgtggagaagcatacgcagaggcgtatcataagtaaa

SEQ ID NO: 48312 - DNA, 50 bp, synthetic construct
  source 1..50: mol_type = other DNA
tatgcgtggagaagcatatcataaattaactgataagcagaggcgtatca

SEQ ID NO: 48313 - DNA, 50 bp, synthetic construct
  source 1..50: mol_type = other DNA
tatgcgaggagaagcatatcataaattaaccgatacgcagaggcgtatca

SEQ ID NO: 48314 - DNA, 50 bp, synthetic construct
  source 1..50: mol_type = other DNA
cgctctgataacaccttcgacaagtgcctgtctggttcctctataggtgg

SEQ ID NO: 48315 - DNA, 50 bp, synthetic construct
  source 1..50: mol_type = other DNA
cagcgtaacgtcaatcgcgtgatccttgatagccgtccggttcatagcgc

SEQ ID NO: 48316 - DNA, 50 bp, synthetic construct
  source 1..50: mol_type = other DNA
gtgcgggttcaagtcccgcttcgagtacgagtattcctgattaaaagctc

SEQ ID NO: 48317 - DNA, 50 bp, synthetic construct
  source 1..50: mol_type = other DNA
aatttggcataatgccatgaatccactacatttgttctatatcacaaata

SEQ ID NO: 48318 - DNA, 50 bp, synthetic construct
  source 1..50: mol_type = other DNA
cgtgtccctgataggcgcggggcctgggccgcggctataccgcggacacc

SEQ ID NO: 48319 - DNA, 50 bp, synthetic construct
  source 1..50: mol_type = other DNA
gtgcccacgcaaaaagcaagcctagctagagagtatttcgtgcccacgca

SEQ ID NO: 48320 - DNA, 50 bp, synthetic construct
  source 1..50: mol_type = other DNA
ttcgtggaatagttgataagtcaaatttgacgaatattgtgtctcatgac

SEQ ID NO: 48321 - DNA, 50 bp, synthetic construct
  source 1..50: mol_type = other DNA
gtttgcgctgatcagcgcggatgaatgagctgattgtggcccataccaac

SEQ ID NO: 48322 - DNA, 50 bp, synthetic construct
  source 1..50: mol_type = other DNA
cggtttcaattggaaatacctaatatattaggtataaccagtttcaattg

SEQ ID NO: 48323 - DNA, 50 bp, synthetic construct
  source 1..50: mol_type = other DNA
cccgatcccggtttcaattggaaatataaccagtttcaattgtctgcgga

SEQ ID NO: 48324 - DNA, 50 bp, synthetic construct
  source 1..50: mol_type = other DNA
cccgatcccggtttcaattgaaaatattaccagtttcaattgtctgcgga

SEQ ID NO: 48325 - DNA, 50 bp, synthetic construct
  source 1..50: mol_type = other DNA
gaaccggacggctgtctaaaatcatctaataaaaatcacccgattaacgc

SEQ ID NO: 48326 - DNA, 50 bp, synthetic construct
  source 1..50: mol_type = other DNA
aagctatgaaggacggagaataaacgtttcctctcgttggacgcaaagag

SEQ ID NO: 48327 - DNA, 50 bp, synthetic construct
  source 1..50: mol_type = other DNA
aaacttataaaaaagaagcacccattcctgggttgcttctttttttacat

SEQ ID NO: 48328 - DNA, 50 bp, synthetic construct
  source 1..50: mol_type = other DNA
gtaaaacagtcacagcttcaatatgtgtgtcgtcattggaaacatatcta

SEQ ID NO: 48329 - DNA, 50 bp, synthetic construct
  source 1..50: mol_type = other DNA
ggtgtagacgtcaagcgtccgattaagataactttattatacatattttc

SEQ ID NO: 48330 - DNA, 50 bp, synthetic construct
  source 1..50: mol_type = other DNA
aaagtaggatttgtcagtctcggctgcccgaaagcccttgtcgattccga

SEQ ID NO: 48331 - DNA, 50 bp, synthetic construct
  source 1..50: mol_type = other DNA
gaaatccgcacaccgatgaacgcaattgccgtcatcggcatgcttgaact

SEQ ID NO: 48332 - DNA, 50 bp, synthetic construct
  source 1..50: mol_type = other DNA
agctcaagcatgccgatcaccgcaattgcattcatgggcgtgcggatttc

SEQ ID NO: 48333 - DNA, 50 bp, synthetic construct
  source 1..50: mol_type = other DNA
gaccttggtcgggctgccggaaaccggtcaaagaaagcaaagaccgggtc

SEQ ID NO: 48334 - DNA, 50 bp, synthetic construct
  source 1..50: mol_type = other DNA
tccatgaccatgccgctggcctgcatgaaggcgtaacaaatggtcgggcc

SEQ ID NO: 48335 - DNA, 50 bp, synthetic construct
  source 1..50: mol_type = other DNA
tccatgaccatgccgctggcctgcatgaaggcgtagcaaatggtcgggcc

SEQ ID NO: 48336 - DNA, 50 bp, synthetic construct
  source 1..50: mol_type = other DNA
cgacaaaccgctgatgattgggtgtttacccaatcatgattcggttgcgc

SEQ ID NO: 48337 - DNA, 50 bp, synthetic construct
  source 1..50: mol_type = other DNA
cagcgcgtcgacccacgggtaggccggcgttgccggggccctgggcgctg

SEQ ID NO: 48338 - DNA, 50 bp, synthetic construct
  source 1..50: mol_type = other DNA
accatgccgctggcctgcatgcaggccagcatgaaggcgtagcaaatggt

SEQ ID NO: 48339 - DNA, 50 bp, synthetic construct
  source 1..50: mol_type = other DNA
agttcaagcatgccgatgacggcaattgcgttcatcggtgtgcggatttc

SEQ ID NO: 48340 - DNA, 50 bp, synthetic construct
  source 1..50: mol_type = other DNA
tcggagtcgaccagcgctttcgggcaacccaaggaaacaaagccaacctt

SEQ ID NO: 48341 - DNA, 50 bp, synthetic construct
  source 1..50: mol_type = other DNA
cttgtgtcgggggttcgaatccctcctccgctaccaatccttcccggtcc

SEQ ID NO: 48342 - DNA, 50 bp, synthetic construct
  source 1..50: mol_type = other DNA
caacctgaccatgaccaatgttcacatgtaaccatgaccaacattcgtac

SEQ ID NO: 48343 - DNA, 50 bp, synthetic construct
  source 1..50: mol_type = other DNA
agaaaacttcttttagataaatcatataatgattctaagacttcttttag

SEQ ID NO: 48344 - DNA, 50 bp, synthetic construct
  source 1..50: mol_type = other DNA
tctcttgtttaggtttgccaaatatacgttcgggttgccaattcgcctgg

SEQ ID NO: 48345 - DNA, 50 bp, synthetic construct
  source 1..50: mol_type = other DNA
gaaaaaataacgatgattttaacaaaaagtttctggattggcttattgca

SEQ ID NO: 48346 - DNA, 50 bp, synthetic construct
  source 1..50: mol_type = other DNA
tttctcaagtaaactcacaacctccactcgacgtgatgcgtctgtggaaa

SEQ ID NO: 48347 - DNA, 50 bp, synthetic construct
  source 1..50: mol_type = other DNA
gcacctgccttctttagattctcaatctcaatagctgtcaaagcagttga

SEQ ID NO: 48348 - DNA, 50 bp, synthetic construct
  source 1..50: mol_type = other DNA
gccgggcggggtcgggatttgcctgccgccgccgcaataccctattcgaa

SEQ ID NO: 48349 - DNA, 50 bp, synthetic construct
  source 1..50: mol_type = other DNA
acaaaggtcgggacagtgttttttataaaaaacgcagtaggcactgcata

SEQ ID NO: 48350 - DNA, 50 bp, synthetic construct
  source 1..50: mol_type = other DNA
cactcctcgaaaaaggagtgtttttaaaaacacctcctgtttagtagcga

SEQ ID NO: 48351 - DNA, 50 bp, synthetic construct
  source 1..50: mol_type = other DNA
gcatccttgtacagaaagtaatcaattgactattatgtgtagaggtcgtc

SEQ ID NO: 48352 - DNA, 50 bp, synthetic construct
  source 1..50: mol_type = other DNA
tgccaggcgcaccaaaccaatataattgctccggggcaccatttcacaat

SEQ ID NO: 48353 - DNA, 50 bp, synthetic construct
  source 1..50: mol_type = other DNA
ccctgtcacgttacgcgcgtgacgcacgttacgcgcgtggcagaggcgtt

SEQ ID NO: 48354 - DNA, 50 bp, synthetic construct
  source 1..50: mol_type = other DNA
cctcggggccaatatttttaaggatatcaaaagacctgtttgcagggatc

SEQ ID NO: 48355 - DNA, 50 bp, synthetic construct
  source 1..50: mol_type = other DNA
taaaaagtacaaattggctgcgggaggaaaaacggctaagtctattctta

SEQ ID NO: 48356 - DNA, 50 bp, synthetic construct
  source 1..50: mol_type = other DNA
aatgcaccactcataacgttgaattgaatatcggttctgacatttacttt

SEQ ID NO: 48357 - DNA, 50 bp, synthetic construct
  source 1..50: mol_type = other DNA
gggcaaaatgttatgatcttatccttacagggttgcatggcagtgggaaa

SEQ ID NO: 48358 - DNA, 50 bp, synthetic construct
  source 1..50: mol_type = other DNA
acattcgtcatggtgcagcaaagcaagaggacttgaacctccaccgagtt

SEQ ID NO: 48359 - DNA, 50 bp, synthetic construct
  source 1..50: mol_type = other DNA
gaatcctcccggtcgcaccaaaccattgctttactgcaccaaggactgct

SEQ ID NO: 48360 - DNA, 50 bp, synthetic construct
  source 1..50: mol_type = other DNA
cccgcacggtgagacggtatgtttataatgagcatgtggagctgagcacc

SEQ ID NO: 48361 - DNA, 50 bp, synthetic construct
  source 1..50: mol_type = other DNA
aaacagtccatatcgacatgaatgattatgattttacgcattgctcacct

SEQ ID NO: 48362 - DNA, 50 bp, synthetic construct
  source 1..50: mol_type = other DNA
cagcccgtttcgtgatggtggacgccaatctggtggagccaatgggactc

SEQ ID NO: 48363 - DNA, 50 bp, synthetic construct
  source 1..50: mol_type = other DNA
gtggttttattgaactccggaagttcatcgcagaacagaacgccattatg

SEQ ID NO: 48364 - DNA, 50 bp, synthetic construct
  source 1..50: mol_type = other DNA
gataaagggcttgtcgtggctgcaacgggaattggaaaaacgtatttagc

SEQ ID NO: 48365 - DNA, 50 bp, synthetic construct
  source 1..50: mol_type = other DNA
ccataccacctgttttggttattttaaagtaactaaaacacctgattggg

SEQ ID NO: 48366 - DNA, 50 bp, synthetic construct
  source 1..50: mol_type = other DNA
gaccagcatttcaatcaaggacactagtaacccttatttcaatcagcgta

SEQ ID NO: 48367 - DNA, 50 bp, synthetic construct
  source 1..50: mol_type = other DNA
aaggtaaaagcttttacgctgattgaaatgttggtggtcttattgatcat

SEQ ID NO: 48368 - DNA, 50 bp, synthetic construct
  source 1..50: mol_type = other DNA
cgttggcgctaccaaactagatttttaaagtgtttttgcgctaccaaact

SEQ ID NO: 48369 - DNA, 50 bp, synthetic construct
  source 1..50: mol_type = other DNA
aagacattcactggacagatgtcaagtgatcaccagacagacggaagctt

SEQ ID NO: 48370 - DNA, 50 bp, synthetic construct
  source 1..50: mol_type = other DNA
caatgctttttgttcatatgtatgatttgacagtgatacttgttcatatg

SEQ ID NO: 48371 - DNA, 50 bp, synthetic construct
  source 1..50: mol_type = other DNA
ttatgctagtgaaatcggaataagaacagatatggatggtacttttttac

SEQ ID NO: 48372 - DNA, 50 bp, synthetic construct
  source 1..50: mol_type = other DNA
cgaatacgcatcacgtggagtgcgtacacacgtggagtgtgttgctctgc

SEQ ID NO: 48373 - DNA, 50 bp, synthetic construct
  source 1..50: mol_type = other DNA
tcaccagcaaaccaactacctccacgtgatgcgtattcgggaataggtca

SEQ ID NO: 48374 - DNA, 50 bp, synthetic construct
  source 1..50: mol_type = other DNA
gggtatttcggattccctgcatgaattcgtttaggattcccgggtggctg

SEQ ID NO: 48375 - DNA, 50 bp, synthetic construct
  source 1..50: mol_type = other DNA
gctgtgttaagcactaacaacatcaccatgcagttcggcagcaagccgtt

SEQ ID NO: 48376 - DNA, 50 bp, synthetic construct
  source 1..50: mol_type = other DNA
acacgttttaattttactacagtttcgacgtagtaacgctacagtctcca

SEQ ID NO: 48377 - DNA, 50 bp, synthetic construct
  source 1..50: mol_type = other DNA
ttttttatactaagttggcattataatgtttcacgttcagcttttttata

SEQ ID NO: 48378 - DNA, 50 bp, synthetic construct
  source 1..50: mol_type = other DNA
ttggtttactttgaaagatgtataagattttatctaaagacatcaaagtc

SEQ ID NO: 48379 - DNA, 50 bp, synthetic construct
  source 1..50: mol_type = other DNA
gccaaaacttccgtccgtccaatgtacatttgcgctctgtccaatggata

SEQ ID NO: 48380 - DNA, 50 bp, synthetic construct
  source 1..50: mol_type = other DNA
cgaatattactgtatagttctaagatttaccaacaatattactcaacaat

SEQ ID NO: 48381 - DNA, 50 bp, synthetic construct
  source 1..50: mol_type = other DNA
tggctggcacgttgttaaggtgctttaggattaaagtgctgtaccgtact

SEQ ID NO: 48382 - DNA, 50 bp, synthetic construct
  source 1..50: mol_type = other DNA
catgataatcatacaagtgtatgctagctgctattcaaataggtgccatt

SEQ ID NO: 48383 - DNA, 50 bp, synthetic construct
  source 1..50: mol_type = other DNA
ggcttttacgagcagagccacacactccacgtgatgtgtcattgggaata

SEQ ID NO: 48384 - DNA, 50 bp, synthetic construct
  source 1..50: mol_type = other DNA
gtgcgcatgcctgagatgccagccttcgctggcatgacgggatttgttag

SEQ ID NO: 48385 - DNA, 50 bp, synthetic construct
  source 1..50: mol_type = other DNA
aactgcggttgtgcaaagtttatgtacataaactttgcctgcccttcaaa

SEQ ID NO: 48386 - DNA, 50 bp, synthetic construct
  source 1..50: mol_type = other DNA
ttttttctcaagcaccgtcactgcttccacatgcggagtttggggaaaca

SEQ ID NO: 48387 - DNA, 50 bp, synthetic construct
  source 1..50: mol_type = other DNA
gagtatctacctgcctgttgcttatggtggaggcgcggagaatcgaactc

SEQ ID NO: 48388 - DNA, 50 bp, synthetic construct
  source 1..50: mol_type = other DNA
aacgtaattatcgggtttcctaaaattttaccaaacaatctggtggtatg

SEQ ID NO: 48389 - DNA, 50 bp, synthetic construct
  source 1..50: mol_type = other DNA
gtcaatgagctctaattaataattattgatattatttagcaggaataact

SEQ ID NO: 48390 - DNA, 50 bp, synthetic construct
  source 1..50: mol_type = other DNA
cttatgatacggctccgcgtatcgtatgatacggctcccctgcattgatc

SEQ ID NO: 48391 - DNA, 50 bp, synthetic construct
  source 1..50: mol_type = other DNA
cttctttaggtggcttggcagtgatatccatatggcgccgccttgtgaat

SEQ ID NO: 48392 - DNA, 50 bp, synthetic construct
  source 1..50: mol_type = other DNA
cacatgctttgtgagctataggcataatctttcgatgagcttaaagcggc

SEQ ID NO: 48393 - DNA, 50 bp, synthetic construct
  source 1..50: mol_type = other DNA
tcgatccaggggtaggcggacttgatcagcaccgcgttgcccgggccctg

SEQ ID NO: 48394 - DNA, 50 bp, synthetic construct
  source 1..50: mol_type = other DNA
caacgctacgcactccacatgtgttgtgtcattgggaataagtctactgg

SEQ ID NO: 48395 - DNA, 50 bp, synthetic construct
  source 1..50: mol_type = other DNA
ggtttatatgtgatataatgaaagaacttttctacgctcagataaaactt

SEQ ID NO: 48396 - DNA, 50 bp, synthetic construct
  source 1..50: mol_type = other DNA
taaacctttcaaaaatgtcatgtaattaccttacacaactgtaaggtttt

SEQ ID NO: 48397 - DNA, 50 bp, synthetic construct
  source 1..50: mol_type = other DNA
aacgaaaggacgcatacgatcatcaaaaggacggcatgccatgaatatat

SEQ ID NO: 48398 - DNA, 50 bp, synthetic construct
  source 1..50: mol_type = other DNA
agccatgcgtgtacatgctttatgtatatcaatcatgcatgtttatgacc

SEQ ID NO: 48399 - DNA, 50 bp, synthetic construct
  source 1..50: mol_type = other DNA
cgagcggctatgcagtgccgactgcactgtcccgacctttgtcgttgacg

SEQ ID NO: 48400 - DNA, 50 bp, synthetic construct
  source 1..50: mol_type = other DNA
caacatttcttcacattctggcacaagtagcaacacttcttgaatttcag

SEQ ID NO: 48401 - DNA, 50 bp, synthetic construct
  source 1..50: mol_type = other DNA
agcttaatcatggaattaaacgggtcgccggtcggctcctgacccacgca

SEQ ID NO: 48402 - DNA, 50 bp, synthetic construct
  source 1..50: mol_type = other DNA
aggtcatcccgataatcgtcacaatcttacgacagatccggttacgacag

SEQ ID NO: 48403 - DNA, 50 bp, synthetic construct
  source 1..50: mol_type = other DNA
aagctatgagggacggagacgaatcgatttctctctctggacgcaaagag

SEQ ID NO: 48404 - DNA, 50 bp, synthetic construct
  source 1..50: mol_type = other DNA
tctcgatctgctcggcgatctgcaggacgaggccggcgagcagggcgaga

SEQ ID NO: 48405 - DNA, 50 bp, synthetic construct
  source 1..50: mol_type = other DNA
caatgacgacacatgtggagactatagtaccaacacatattgaagctgtg

SEQ ID NO: 48406 - DNA, 50 bp, synthetic construct
  source 1..50: mol_type = other DNA
gtcgcgatttttccgctaacgaaccaagttatattgtatattcttttcat

SEQ ID NO: 48407 - DNA, 50 bp, synthetic construct
  source 1..50: mol_type = other DNA
cctctttgcgtccagtgagagaaaatttattctccgtccctcatagcttg

SEQ ID NO: 48408 - DNA, 50 bp, synthetic construct
  source 1..50: mol_type = other DNA
tgctgccagttattacttgatgttcagacagatgtcccaccgtgaccacc

SEQ ID NO: 48409 - DNA, 50 bp, synthetic construct
  source 1..50: mol_type = other DNA
atgtttgggtatggggaagtgaatcagtacaaccgccatagtacactcat

SEQ ID NO: 48410 - DNA, 50 bp, synthetic construct
  source 1..50: mol_type = other DNA
aaacaattttatcattattttttcatgggaaaatcaacttaaattttttt

SEQ ID NO: 48411 - DNA, 50 bp, synthetic construct
  source 1..50: mol_type = other DNA
caccttttttgcatgataatcatacaaataagtaccattgcagcaaattg

SEQ ID NO: 48412 - DNA, 50 bp, synthetic construct
  source 1..50: mol_type = other DNA
attagtcaccccggaaaccccaaaggtgtatgatattaggaaatccaaag

SEQ ID NO: 48413 - DNA, 50 bp, synthetic construct
  source 1..50: mol_type = other DNA
acacagaactcgttgccctcgggatcggcgagcgtcgcccagccgcgccc

SEQ ID NO: 48414 - DNA, 50 bp, synthetic construct
  source 1..50: mol_type = other DNA
tgactgttacttcgaatagtgtgtgtacacagtgacatccgcaaatgtta

SEQ ID NO: 48415 - DNA, 50 bp, synthetic construct
  source 1..50: mol_type = other DNA
gccttgcccacgtagcaccaggggcaggcgatgtcgctccagatctcgac

SEQ ID NO: 48416 - DNA, 50 bp, synthetic construct
  source 1..50: mol_type = other DNA
caccccggaaaccccatgtgtcaatatgatatgttaggaaatccaaagta

SEQ ID NO: 48417 - DNA, 50 bp, synthetic construct
  source 1..50: mol_type = other DNA
tattaaaatcataattgaatgcttagccatgttcatttaaaagaagaata

SEQ ID NO: 48418 - DNA, 50 bp, synthetic construct
  source 1..50: mol_type = other DNA
ccacatctcaaatgtaatttgtagcactacacatctcaaacgcaatgcaa

SEQ ID NO: 48419 - DNA, 50 bp, synthetic construct
  source 1..50: mol_type = other DNA
tggctgcccgaaagctggctgaaatatttcattggggtgcccgaaggccc

SEQ ID NO: 48420 - DNA, 50 bp, synthetic construct
  source 1..50: mol_type = other DNA
gagcgctcagtcaaccgcgtcatccttgacagtcgtcctgttcacagcgc

SEQ ID NO: 48421 - DNA, 50 bp, synthetic construct
  source 1..50: mol_type = other DNA
gtagatccgacacgttaaggaacatatgtcctatatagtacacgttatgc

SEQ ID NO: 48422 - DNA, 50 bp, synthetic construct
  source 1..50: mol_type = other DNA
gtatgttaggcagataacagtttcatgaaactatttcacagataataatt

SEQ ID NO: 48423 - DNA, 50 bp, synthetic construct
  source 1..50: mol_type = other DNA
caggcgatcgtcaacctgacgatgaccaatatccgtaccgtgctcggctc

SEQ ID NO: 48424 - DNA, 50 bp, synthetic construct
  source 1..50: mol_type = other DNA
aagacagttcgtaaccacatctcaaacgcaatgcaaaagctaggggttaa

SEQ ID NO: 48425 - DNA, 50 bp, synthetic construct
  source 1..50: mol_type = other DNA
atactttggattggctagattactattgacattctgggtttccggggtga

SEQ ID NO: 48426 - DNA, 50 bp, synthetic construct
  source 1..50: mol_type = other DNA
gtcgctcccggcaaggtcgggatgcagatcgtcggcttgcctgacaaggc

SEQ ID NO: 48427 - DNA, 50 bp, synthetic construct
  source 1..50: mol_type = other DNA
ctgtaatcaggagatggtagcggaggagggatttgaacccccgacacaag

SEQ ID NO: 48428 - DNA, 50 bp, synthetic construct
  source 1..50: mol_type = other DNA
gccgcggccggcggccataatctcttgatggtcggtcctccgggctccgg

SEQ ID NO: 48429 - DNA, 50 bp, synthetic construct
  source 1..50: mol_type = other DNA
cttgtgtcgggggttcaaatccctcctccgctaccatctcctcattacag

SEQ ID NO: 48430 - DNA, 50 bp, synthetic construct
  source 1..50: mol_type = other DNA
atcgtggggaaccttatcataagtaatgggtagatacggtgaaccgtatc

SEQ ID NO: 48431 - DNA, 50 bp, synthetic construct
  source 1..50: mol_type = other DNA
ggccttcagattggttacaagtcgttcagcttggcgccagtggtggggcc

SEQ ID NO: 48432 - DNA, 50 bp, synthetic construct
  source 1..50: mol_type = other DNA
tggatactttggattccctattattaattatatgcaccttgccgctggcg

SEQ ID NO: 48433 - DNA, 50 bp, synthetic construct
  source 1..50: mol_type = other DNA
aacgtaatactgatatttgttccctaggaacccattatactaaagaccag

SEQ ID NO: 48434 - DNA, 50 bp, synthetic construct
  source 1..50: mol_type = other DNA
accatgccggtggcctgcatgcaggcctgcatgaaggcgtagcagatggt

SEQ ID NO: 48435 - DNA, 50 bp, synthetic construct
  source 1..50: mol_type = other DNA
gtgtttgcaatcggggcaccaggagtccctgggggaacagtaatggcatc

SEQ ID NO: 48436 - DNA, 50 bp, synthetic construct
  source 1..50: mol_type = other DNA
cggattaatcgtggggaaccgtatcaacacggtgaaccgtatcataaata

SEQ ID NO: 48437 - DNA, 50 bp, synthetic construct
  source 1..50: mol_type = other DNA
atgcgttgatgccagaaggatgcccagccttcgttcatgatcttcgtttc

SEQ ID NO: 48438 - DNA, 50 bp, synthetic construct
  source 1..50: mol_type = other DNA
gcattgcgtttgaaatgtgtagtgatccctacacatcacatttgagatgt

SEQ ID NO: 48439 - DNA, 50 bp, synthetic construct
  source 1..50: mol_type = other DNA
tcttttctgccagcaaacctccaatacaagaggttttgccctaaaaaact

SEQ ID NO: 48440 - DNA, 50 bp, synthetic construct
  source 1..50: mol_type = other DNA
tccctactcagcaaagccactgactcgtctgcgggaacatatccaccggc

SEQ ID NO: 48441 - DNA, 50 bp, synthetic construct
  source 1..50: mol_type = other DNA
ttggtggaggcgaagcacgacctttattcgtgggtttcatggtggaggcg

SEQ ID NO: 48442 - DNA, 50 bp, synthetic construct
  source 1..50: mol_type = other DNA
cctgtttcagctaaatgacaagggcagtattcactaccagcatctataca

SEQ ID NO: 48443 - DNA, 50 bp, synthetic construct
  source 1..50: mol_type = other DNA
atcgtaatactagatactggccatgcacatgcaaaattaatgacttccta

SEQ ID NO: 48444 - DNA, 50 bp, synthetic construct
  source 1..50: mol_type = other DNA
atgtagtagaattaccgtctccacatgtgtcgtcactatgataagaacac

SEQ ID NO: 48445 - DNA, 50 bp, synthetic construct
  source 1..50: mol_type = other DNA
ccataagagaaatttcatttccttctaacgcaattcatttccttctttgt

SEQ ID NO: 48446 - DNA, 50 bp, synthetic construct
  source 1..50: mol_type = other DNA
tgtatagatgctggtagtgaatactgcccttgtcatttagctgaaacggg

SEQ ID NO: 48447 - DNA, 50 bp, synthetic construct
  source 1..50: mol_type = other DNA
attatagggggtttagtgcatgctgttccaatccaacctacagtgaatac

SEQ ID NO: 48448 - DNA, 50 bp, synthetic construct
  source 1..50: mol_type = other DNA
tttcagctaaatgacaagggcatgttgacagtattcactaccagcatcta

SEQ ID NO: 48449 - DNA, 50 bp, synthetic construct
  source 1..50: mol_type = other DNA
agccatgcatgtacatgctttatatatatcaatcatgcatgtttatgacc

SEQ ID NO: 48450 - DNA, 50 bp, synthetic construct
  source 1..50: mol_type = other DNA
cgtaggacacaccgatgcttgaactatgtcaagcagaagccataaccaca

SEQ ID NO: 48451 - DNA, 50 bp, synthetic construct
  source 1..50: mol_type = other DNA
acaaatctgtgatgggttttttattggtggaggcgaggggacatgctatt

SEQ ID NO: 48452 - DNA, 50 bp, synthetic construct
  source 1..50: mol_type = other DNA
ccacaaccaggttctccatataataaaatattgtgttttcctgctgccga

SEQ ID NO: 48453 - DNA, 50 bp, synthetic construct
  source 1..50: mol_type = other DNA
attggtggaggcgaaacacaacctttcatggtggaggcgaggggacatgc

SEQ ID NO: 48454 - DNA, 50 bp, synthetic construct
  source 1..50: mol_type = other DNA
atagtctctacatggcttgagaggacacactcaacgtgagcagtttgggg

SEQ ID NO: 48455 - DNA, 50 bp, synthetic construct
  source 1..50: mol_type = other DNA
ccacatccaggctcaccatacaataaaatattatgttttccagctgctga

SEQ ID NO: 48456 - DNA, 50 bp, synthetic construct
  source 1..50: mol_type = other DNA
tagcgcttatagctgcggcacatgtgcacatccggcccaaccaccaccga

SEQ ID NO: 48457 - DNA, 50 bp, synthetic construct
  source 1..50: mol_type = other DNA
gcttgcataactttgtcggcaccttgtccagttgctaaatcaatggtaat

SEQ ID NO: 48458 - DNA, 50 bp, synthetic construct
  source 1..50: mol_type = other DNA
agaatcttcttcattcatttgacaacaaccccatgtttcaataaagaagt

SEQ ID NO: 48459 - DNA, 50 bp, synthetic construct
  source 1..50: mol_type = other DNA
agccatgcatgtacatgctttatgtatatcaatcatgcatgtttatgacc

SEQ ID NO: 48460 - DNA, 50 bp, synthetic construct
  source 1..50: mol_type = other DNA
attaccattgatttagcaactggacaaggtgccgacaaagttatgcaagc

SEQ ID NO: 48461 - DNA, 50 bp, synthetic construct
  source 1..50: mol_type = other DNA
tgagagctggacattaaaagtttttttaggtgtgataaagggacaactaa

SEQ ID NO: 48462 - DNA, 50 bp, synthetic construct
  source 1..50: mol_type = other DNA
aactgcggctggacaaagtttatgtacataaactttgcctgcccgtccaa

SEQ ID NO: 48463 - DNA, 50 bp, synthetic construct
  source 1..50: mol_type = other DNA
gccattctcggcgccaatatcttccgcgacttttttgccggtatccgcga

SEQ ID NO: 48464 - DNA, 50 bp, synthetic construct
  source 1..50: mol_type = other DNA
gcgtgaactccaggtcatataagataacttatatgagggcctataaggcc

SEQ ID NO: 48465 - DNA, 50 bp, synthetic construct
  source 1..50: mol_type = other DNA
tgagacaaatttcattacacacaatactagatatatttcattaccctcct

SEQ ID NO: 48466 - DNA, 50 bp, synthetic construct
  source 1..50: mol_type = other DNA
cttatttaattttacaactgtctctagtgacactacagtctctacatgag

SEQ ID NO: 48467 - DNA, 50 bp, synthetic construct
  source 1..50: mol_type = other DNA
aataacttataaaaaagcagcttaaaaggctgctttttttgtatatatat

SEQ ID NO: 48468 - DNA, 50 bp, synthetic construct
  source 1..50: mol_type = other DNA
tatctatgagacaaatttcattacatatatttcattaccttccttatcta

SEQ ID NO: 48469 - DNA, 50 bp, synthetic construct
  source 1..50: mol_type = other DNA
tattgtggctataatattctttgctgctgtggggttattgttcctttaag

SEQ ID NO: 48470 - DNA, 50 bp, synthetic construct
  source 1..50: mol_type = other DNA
ttaagattggctccgaacgctgaacgggtaggattcgaacctacaaccta

SEQ ID NO: 48471 - DNA, 50 bp, synthetic construct
  source 1..50: mol_type = other DNA
ccctaccgcggctgcgaacatggctgcatttactgctttgcgcgacccag

SEQ ID NO: 48472 - DNA, 50 bp, synthetic construct
  source 1..50: mol_type = other DNA
cgagcccaggtcgaggagccaaccgaattggcgagccagaacaaagccaa

SEQ ID NO: 48473 - DNA, 50 bp, synthetic construct
  source 1..50: mol_type = other DNA
accttactccttgattagcaacactatagtctccacgtgatgcgtttgcg

SEQ ID NO: 48474 - DNA, 50 bp, synthetic construct
  source 1..50: mol_type = other DNA
tagagataccccgcgcagcacttcttgaatttctgcccgctgccacagat

SEQ ID NO: 48475 - DNA, 50 bp, synthetic construct
  source 1..50: mol_type = other DNA
caatcaaattgcgatactctattatttaagagtaactgaagcacctgcag

SEQ ID NO: 48476 - DNA, 50 bp, synthetic construct
  source 1..50: mol_type = other DNA
ctccactggatactttggattccctaggttttccggggtgactaattata

SEQ ID NO: 48477 - DNA, 50 bp, synthetic construct
  source 1..50: mol_type = other DNA
acccgttgatcttttcccacaaacgagtgtgtgggattgttgctgaaaaa

SEQ ID NO: 48478 - DNA, 50 bp, synthetic construct
  source 1..50: mol_type = other DNA
cgcactccacatggctggtattatcagagcaacacactccacgtgatgtg

SEQ ID NO: 48479 - DNA, 50 bp, synthetic construct
  source 1..50: mol_type = other DNA
atgtaccatccatatctgttgctatcttcttatttcggttgctactaatt

SEQ ID NO: 48480 - DNA, 50 bp, synthetic construct
  source 1..50: mol_type = other DNA
aactcttgaatcttactagtaaggtcgctacctagaccatgtcaattgtt

SEQ ID NO: 48481 - DNA, 50 bp, synthetic construct
  source 1..50: mol_type = other DNA
cgaagggtatcataaataaaactaaagcgtatcataagtgatgctgtttt

SEQ ID NO: 48482 - DNA, 50 bp, synthetic construct
  source 1..50: mol_type = other DNA
cagggggacataatctgcttcttttaaatcctattgatcggcccgccggg

SEQ ID NO: 48483 - DNA, 50 bp, synthetic construct
  source 1..50: mol_type = other DNA
actttttcggatcaagctatgagggatttctctcgttggacgcaaagagg

SEQ ID NO: 48484 - DNA, 50 bp, synthetic construct
  source 1..50: mol_type = other DNA
cggtggcggtacgactgactgttcgttcattgttgcttatgggcccccag

SEQ ID NO: 48485 - DNA, 50 bp, synthetic construct
  source 1..50: mol_type = other DNA
gcggatgtcgcgggttcaagtcccgtgtcacggagggacccaggttccgg

SEQ ID NO: 48486 - DNA, 50 bp, synthetic construct
  source 1..50: mol_type = other DNA
cagcgcggcgttaatcgggtgattttagacggccgcccggttcatgcagc

SEQ ID NO: 48487 - DNA, 50 bp, synthetic construct
  source 1..50: mol_type = other DNA
ctcttgtttaggtttccctaatataacatttaggtttgccaattcgcctg

SEQ ID NO: 48488 - DNA, 50 bp, synthetic construct
  source 1..50: mol_type = other DNA
taatctcttgtttaggtttccctaattcgggttgccaattcgcctggcta

SEQ ID NO: 48489 - DNA, 50 bp, synthetic construct
  source 1..50: mol_type = other DNA
ccaggcgaattggcaacccgaacgtatatttggcaaacctaaacaggaga

SEQ ID NO: 48490 - DNA, 50 bp, synthetic construct
  source 1..50: mol_type = other DNA
gttcccgcaaacagctcacgttgagaaacatgtcgagtcagtaacattac

SEQ ID NO: 48491 - DNA, 50 bp, synthetic construct
  source 1..50: mol_type = other DNA
tgtttgattatcttagctacagtttccacatgagtagaatgagggaacat

SEQ ID NO: 48492 - DNA, 50 bp, synthetic construct
  source 1..50: mol_type = other DNA
attctacgcatgttgagtgttgtgcgcacaacactttagacatgtggaaa

SEQ ID NO: 48493 - DNA, 50 bp, synthetic construct
  source 1..50: mol_type = other DNA
gcgaggtaaatcaagggttattgtattcaagggtcattgaagtcataatc

SEQ ID NO: 48494 - DNA, 50 bp, synthetic construct
  source 1..50: mol_type = other DNA
cggctgtctaaaatcatcaaggtctaaacgtgtctaataaaaatcacctg

SEQ ID NO: 48495 - DNA, 50 bp, synthetic construct
  source 1..50: mol_type = other DNA
tgcatataataagccatcccggaaatattagggaatcccaaatatgaaat

SEQ ID NO: 48496 - DNA, 50 bp, synthetic construct
  source 1..50: mol_type = other DNA
gaaccgggcggctgtctaacatcatctaataaaaatcacccgattaacgc

SEQ ID NO: 48497 - DNA, 50 bp, synthetic construct
  source 1..50: mol_type = other DNA
cggctgtctaagattagcaatgtctaaacgtgtctgatgaaaatcacccg

SEQ ID NO: 48498 - DNA, 50 bp, synthetic construct
  source 1..50: mol_type = other DNA
gcgatgtttgccattccggtgggtaaggcaaccgggctggatattaattt

SEQ ID NO: 48499 - DNA, 50 bp, synthetic construct
  source 1..50: mol_type = other DNA
gtagatccgagggttccaggaacatagctctaagatagcagacattatgc

SEQ ID NO: 48500 - DNA, 50 bp, synthetic construct
  source 1..50: mol_type = other DNA
ctcttgtttaggtttgccaaatataacatttaggtttgccaattcgcctg

SEQ ID NO: 48501 - DNA, 50 bp, synthetic construct
  source 1..50: mol_type = other DNA
gacgaaattactaaatcgatgactattctcaatcgcatctgcaattcgtt

SEQ ID NO: 48502 - DNA, 50 bp, synthetic construct
  source 1..50: mol_type = other DNA
ttaatcgtggggaaccgtatcacaagtaaagaggggagaaccgtatcata

SEQ ID NO: 48503 - DNA, 50 bp, synthetic construct
  source 1..50: mol_type = other DNA
taagaaatggctaaagttctggtgctagtgctttattattccatgtacgg

SEQ ID NO: 48504 - DNA, 50 bp, synthetic construct
  source 1..50: mol_type = other DNA
gcgttaatcgggtgattttcatcagatgattttagacggccgcccggttc

SEQ ID NO: 48505 - DNA, 50 bp, synthetic construct
  source 1..50: mol_type = other DNA
aaagaagcgattgacacactcgtgaagcatatggaagacaaacagcatga

SEQ ID NO: 48506 - DNA, 50 bp, synthetic construct
  source 1..50: mol_type = other DNA
cgtatgaagaaaagtggtagcgggagagggacttgaacccccgacacgcg

SEQ ID NO: 48507 - DNA, 50 bp, synthetic construct
  source 1..50: mol_type = other DNA
caagcgccttcgggcaccctagcgatcttaggggcaacccagggaaacaa

SEQ ID NO: 48508 - DNA, 50 bp, synthetic construct
  source 1..50: mol_type = other DNA
aagctgccgtcgcaccaatttacaattgtagattggtgttctgtccaatg

SEQ ID NO: 48509 - DNA, 50 bp, synthetic construct
  source 1..50: mol_type = other DNA
ccattctgtggtggcgtgccaagcgatgtacgtattaccactcgctacaa

SEQ ID NO: 48510 - DNA, 50 bp, synthetic construct
  source 1..50: mol_type = other DNA
cccgatcccggtttcaattggaaatataatcagtttcaattgtctgcgga

SEQ ID NO: 48511 - DNA, 50 bp, synthetic construct
  source 1..50: mol_type = other DNA
gatgttggtcggcgaacgcctgcaactccgcaagcgcaaacagcgcgacc

SEQ ID NO: 48512 - DNA, 50 bp, synthetic construct
  source 1..50: mol_type = other DNA
tcaaaaagaaaggagtcaatgaattttattggtggcggtacacttattcc

SEQ ID NO: 48513 - DNA, 50 bp, synthetic construct
  source 1..50: mol_type = other DNA
gaaccgggcggctgtctaaaatcatctaataaaaatcacccgattaatgc

SEQ ID NO: 48514 - DNA, 50 bp, synthetic construct
  source 1..50: mol_type = other DNA
tcagggttaaattcacggtcggtgcatcctttaggtgaaaaaggttgagt

SEQ ID NO: 48515 - DNA, 50 bp, synthetic construct
  source 1..50: mol_type = other DNA
tatttcatatttcggattgcctaatacgttcgggtttccgggatggctta

SEQ ID NO: 48516 - DNA, 50 bp, synthetic construct
  source 1..50: mol_type = other DNA
atggtgccgatggcgtattccgctcctaccgagtactcggccgtggacat

SEQ ID NO: 48517 - DNA, 50 bp, synthetic construct
  source 1..50: mol_type = other DNA
cggctgtctaagattagcaaggtctaaacgtgtctgatgaaaatcacctg

SEQ ID NO: 48518 - DNA, 50 bp, synthetic construct
  source 1..50: mol_type = other DNA
gcgttaatcgggtgattttcatcagatgattttagacagccgccctgttc

SEQ ID NO: 48519 - DNA, 50 bp, synthetic construct
  source 1..50: mol_type = other DNA
taataagccatcccggaaacccgaattagggaatccgaaatatgagatag

SEQ ID NO: 48520 - DNA, 50 bp, synthetic construct
  source 1..50: mol_type = other DNA
attgtcttcagtataatgggtccctagggaacaaatatcagcattacatt

SEQ ID NO: 48521 - DNA, 50 bp, synthetic construct
  source 1..50: mol_type = other DNA
agcattatttaacactatactattgcaatacttccagactgtaaaatgct

SEQ ID NO: 48522 - DNA, 50 bp, synthetic construct
  source 1..50: mol_type = other DNA
actcataatctgggtgattttcaatagtgattatctttaggattattatt

SEQ ID NO: 48523 - DNA, 50 bp, synthetic construct
  source 1..50: mol_type = other DNA
aatgtaatgctgatatttgttctctaggaacccattatactgaagacaat

SEQ ID NO: 48524 - DNA, 50 bp, synthetic construct
  source 1..50: mol_type = other DNA
ataaagttaactgtagcttcctttacacctcgctttctatcaaactatat

SEQ ID NO: 48525 - DNA, 50 bp, synthetic construct
  source 1..50: mol_type = other DNA
cagccactgtaagggaaagtcctgatatttaattaaggatttagtgtata

SEQ ID NO: 48526 - DNA, 50 bp, synthetic construct
  source 1..50: mol_type = other DNA
atagtatgcaggattgaaagtgagatccacttttctctcctgcaacaaat

SEQ ID NO: 48527 - DNA, 50 bp, synthetic construct
  source 1..50: mol_type = other DNA
atttctagtaaactaattatttattattactatatgtgtacaatgaaagc

SEQ ID NO: 48528 - DNA, 50 bp, synthetic construct
  source 1..50: mol_type = other DNA
cccggatgctggcgtagccaacgcgggtgagacctacatcagataccggc

SEQ ID NO: 48529 - DNA, 50 bp, synthetic construct
  source 1..50: mol_type = other DNA
acaaaatcagcgtttaccttgattgaaatggcagtggtattatttattat

SEQ ID NO: 48530 - DNA, 50 bp, synthetic construct
  source 1..50: mol_type = other DNA
atagaaagggtcgaccattgtaacgcatttggatggtctcctctttcttc

SEQ ID NO: 48531 - DNA, 50 bp, synthetic construct
  source 1..50: mol_type = other DNA
gggttgcgatccgggattctccaatattgttgatatcctgttgataactt

SEQ ID NO: 48532 - DNA, 50 bp, synthetic construct
  source 1..50: mol_type = other DNA
ttcttgatccgtctttataagttttgacccatataaacgccgcaaatggt

SEQ ID NO: 48533 - DNA, 50 bp, synthetic construct
  source 1..50: mol_type = other DNA
ggctcgacgccgccaacgacaacgcgcgacttcgtcatcctcgacgaact

SEQ ID NO: 48534 - DNA, 50 bp, synthetic construct
  source 1..50: mol_type = other DNA
gcgacgacatcccagacggcggtcgagatcgcgctcgaagatgtcagccg

SEQ ID NO: 48535 - DNA, 50 bp, synthetic construct
  source 1..50: mol_type = other DNA
attaaggcgaaagaaatagatataattaggactaccgggtaaacctgcta

SEQ ID NO: 48536 - DNA, 50 bp, synthetic construct
  source 1..50: mol_type = other DNA
tgcgtcagctcactggcaatcttgcgcgtccagaccgagcagcgcgcggc

SEQ ID NO: 48537 - DNA, 50 bp, synthetic construct
  source 1..50: mol_type = other DNA
ccgccttgtggtccccgaggaggcgagcgtcctgcacgagaagaaggtcc

SEQ ID NO: 48538 - DNA, 50 bp, synthetic construct
  source 1..50: mol_type = other DNA
gcggcgttaatcgggtgatttttattagacagccacccggttcatgcagc

SEQ ID NO: 48539 - DNA, 50 bp, synthetic construct
  source 1..50: mol_type = other DNA
agcaaccgtgtcactctcaacgtgctaccgtctcaacttgacagaccagt

SEQ ID NO: 48540 - DNA, 50 bp, synthetic construct
  source 1..50: mol_type = other DNA
tgcatgaaccgggcggctgtctaaaaaaatcacccgattaacgccgcgct

SEQ ID NO: 48541 - DNA, 50 bp, synthetic construct
  source 1..50: mol_type = other DNA
ttaacatctatttcatatttcgggtttccgggatggcttattatatgcac

SEQ ID NO: 48542 - DNA, 50 bp, synthetic construct
  source 1..50: mol_type = other DNA
gttttcgacgggcagacaaagtttataaacttagtccagccgcaattgag

SEQ ID NO: 48543 - DNA, 50 bp, synthetic construct
  source 1..50: mol_type = other DNA
taagccatcccggaaacccgaacgtattagggaatcccaaatatgaaata

SEQ ID NO: 48544 - DNA, 50 bp, synthetic construct
  source 1..50: mol_type = other DNA
gcaacggctttaacatctatctcatattgggtttccgggatggcttatta

SEQ ID NO: 48545 - DNA, 50 bp, synthetic construct
  source 1..50: mol_type = other DNA
cagttctgggcactaaagtggacaaaagtacactccggtgcacaagaatc

SEQ ID NO: 48546 - DNA, 50 bp, synthetic construct
  source 1..50: mol_type = other DNA
tacgcttatagaaatgaaagatagtagtatccttgattgaaatgttagta

SEQ ID NO: 48547 - DNA, 50 bp, synthetic construct
  source 1..50: mol_type = other DNA
aagcagtccatatccacatgaataatcatgattttacgcattactcacct

SEQ ID NO: 48548 - DNA, 50 bp, synthetic construct
  source 1..50: mol_type = other DNA
tcggccggcttgtcgacgacggcggtctccgtcgtcaggatcatccgggc

SEQ ID NO: 48549 - DNA, 27 bp, synthetic construct
  source 1..27: mol_type = other DNA
tttaccttgattgagatgttaattgtg

SEQ ID NO: 48550 - DNA, 34 bp, synthetic construct
  source 1..34: mol_type = other DNA
ctggatcatctggatcactttcgtcaaaaacctg

SEQ ID NO: 48551 - DNA, 50 bp, synthetic construct
  source 1..50: mol_type = other DNA
attgttgttgtttttccagatccagttggtcctgtaaatataagcaatcc

SEQ ID NO: 48552 - DNA, 38 bp, synthetic construct
  source 1..38: mol_type = other DNA
tgggtggtacaggtgccacattagttgtaccatttatg

SEQ ID NO: 48553 - DNA, 50 bp, synthetic construct
  source 1..50: mol_type = other DNA
gtacgtgtttagctatgtaaaagcactagtattcttgccttaacactcat

SEQ ID NO: 48554 - DNA, 50 bp, synthetic construct
  source 1..50: mol_type = other DNA
ctttaggtagtgtatttaaacgtgtcaaggtctaaatacactatgaggat

SEQ ID NO: 48555 - DNA, 50 bp, synthetic construct
  source 1..50: mol_type = other DNA
aatcataacagtaaaaagcagtatattaacagtaaattactgtacaaata

SEQ ID NO: 48556 - DNA, 50 bp, synthetic construct
  source 1..50: mol_type = other DNA
ttaacaggtctcctagaaaaccgaattcggcattgtagcattagccataa

SEQ ID NO: 48557 - DNA, 50 bp, synthetic construct
  source 1..50: mol_type = other DNA
ctacgttcgggtttccgggatggctttcatatttgggatgcctaatatca

SEQ ID NO: 48558 - DNA, 50 bp, synthetic construct
  source 1..50: mol_type = other DNA
ttatggctaatgctacaatgccgaattcggttttctaagagacctgttaa

SEQ ID NO: 48559 - DNA, 50 bp, synthetic construct
  source 1..50: mol_type = other DNA
tattgggggttgactacgttcggattccctaatatcatgtacccacaata

SEQ ID NO: 48560 - DNA, 50 bp, synthetic construct
  source 1..50: mol_type = other DNA
atcctcatagtgtatttagaccttgacacgtttaaatacactacctaaag

SEQ ID NO: 48561 - DNA, 50 bp, synthetic construct
  source 1..50: mol_type = other DNA
gtctgaagatttaaataataaccctacgtgtattttttatatcacctcac

SEQ ID NO: 48562 - DNA, 50 bp, synthetic construct
  source 1..50: mol_type = other DNA
tggtgtatttaaacgtgtctgatgaaaatcatcaaggtctaaatacactg

SEQ ID NO: 48563 - DNA, 50 bp, synthetic construct
  source 1..50: mol_type = other DNA
atcatcagtcggttttcagagaatatactcgttttcgagtgattgatgtg

SEQ ID NO: 48564 - DNA, 50 bp, synthetic construct
  source 1..50: mol_type = other DNA
ctcgcacatttgctgattgcgtattgttacccaatcgatgaatttgaagc

SEQ ID NO: 48565 - DNA, 50 bp, synthetic construct
  source 1..50: mol_type = other DNA
atgagataaggtcagtacaaataaaaaaattcgtaattttcggtactcaa

SEQ ID NO: 48566 - DNA, 50 bp, synthetic construct
  source 1..50: mol_type = other DNA
ggctaacaagccgaagtggagaccaggttgtccatgacggcaccgcagcg

SEQ ID NO: 48567 - DNA, 50 bp, synthetic construct
  source 1..50: mol_type = other DNA
cattattgcctctatcctgaagataaagcatgttgatagaacaaataaga

SEQ ID NO: 48568 - DNA, 50 bp, synthetic construct
  source 1..50: mol_type = other DNA
gagtgacgcagaccccgctgcactcaaaatggctaaaccaaaagtgcatg

SEQ ID NO: 48569 - DNA, 50 bp, synthetic construct
  source 1..50: mol_type = other DNA
gattcgcattgatggaggaaagcacagcgcagccgttttcaattctgtat

SEQ ID NO: 48570 - DNA, 50 bp, synthetic construct
  source 1..50: mol_type = other DNA
ctttttctgcttccttctggcgctcaagcgcctgacgcaggtcaaaatag

SEQ ID NO: 48571 - DNA, 50 bp, synthetic construct
  source 1..50: mol_type = other DNA
cctatattcccgtaaaagctcgtgcatatctccttttacatccagttgtg

SEQ ID NO: 48572 - DNA, 50 bp, synthetic construct
  source 1..50: mol_type = other DNA
cacggtccatgatctcccgctcctcgaggacgtattcatgatggaagtat

SEQ ID NO: 48573 - DNA, 50 bp, synthetic construct
  source 1..50: mol_type = other DNA
cctacgtagagcaaatgaatattatatattagccattgtccgtacctccc

SEQ ID NO: 48574 - DNA, 50 bp, synthetic construct
  source 1..50: mol_type = other DNA
gaaccgtgctggccagatagccaacgccgaggccctggccggcgtggtgc

SEQ ID NO: 48575 - DNA, 50 bp, synthetic construct
  source 1..50: mol_type = other DNA
tagcgtccctctaccagccagcctccgcatgttgttgtttcaggagatct

SEQ ID NO: 48576 - DNA, 50 bp, synthetic construct
  source 1..50: mol_type = other DNA
ccctaatcatcctcatagtgtatttaaatacaccacctaaagcgatacaa

SEQ ID NO: 48577 - DNA, 50 bp, synthetic construct
  source 1..50: mol_type = other DNA
aacccttctggttcagcgtcagcagcaggtgtcaccatgaaaaaagccat

SEQ ID NO: 48578 - DNA, 50 bp, synthetic construct
  source 1..50: mol_type = other DNA
aacctcatagtgtatttagaccttgacacgtttaaatacaccacctaaag

SEQ ID NO: 48579 - DNA, 50 bp, synthetic construct
  source 1..50: mol_type = other DNA
atcctcatggtgtatttagaccttgacacgtttaaatacaccatctaaag

SEQ ID NO: 48580 - DNA, 50 bp, synthetic construct
  source 1..50: mol_type = other DNA
tttacaggtctcttagaaaaccgaattcggcattgtagcattagccataa

SEQ ID NO: 48581 - DNA, 50 bp, synthetic construct
  source 1..50: mol_type = other DNA
gttctcatagtgtatttagaccttgacacgtttaaatacactacctaaag

SEQ ID NO: 48582 - DNA, 50 bp, synthetic construct
  source 1..50: mol_type = other DNA
ttaacaggtttcttagaaaaccgaattcggcattgtagcattagccataa

SEQ ID NO: 48583 - DNA, 50 bp, synthetic construct
  source 1..50: mol_type = other DNA
ttatggctaatgctacaatgccgaattcggttttctaagaaacctgttaa

SEQ ID NO: 48584 - DNA, 50 bp, synthetic construct
  source 1..50: mol_type = other DNA
ttttagatggtgtatttaaacgtgtcaaggtctaaatacactatgaggat

SEQ ID NO: 48585 - DNA, 50 bp, synthetic construct
  source 1..50: mol_type = other DNA
ggtttcacaaaaagtttttgaattaaaactcatcatctattggagcaatt

SEQ ID NO: 48586 - DNA, 50 bp, synthetic construct
  source 1..50: mol_type = other DNA
aggcgaacatctaaagaagaccgaattcggcattgtagcattagccataa

SEQ ID NO: 48587 - DNA, 50 bp, synthetic construct
  source 1..50: mol_type = other DNA
gtagagatttagtattttttgttaggatactttaccccgaaaggctgtga

SEQ ID NO: 48588 - DNA, 50 bp, synthetic construct
  source 1..50: mol_type = other DNA
tattgtgggtacatgatattagggaacccgaacgtagtcaacccccaata

SEQ ID NO: 48589 - DNA, 50 bp, synthetic construct
  source 1..50: mol_type = other DNA
tattgggggttgactacgttcgggttgcctaatatcatgtacccatcaac

SEQ ID NO: 48590 - DNA, 50 bp, synthetic construct
  source 1..50: mol_type = other DNA
aaaaatcatctttcacactggctcgaggtgaacaatgaaacgtgccattt

SEQ ID NO: 48591 - DNA, 50 bp, synthetic construct
  source 1..50: mol_type = other DNA
tcagtgctcgtctttgtggttggaataccaccacaataaaaaagttgtga

SEQ ID NO: 48592 - DNA, 50 bp, synthetic construct
  source 1..50: mol_type = other DNA
tagtgtatttagaccttgatgatttttattagacacgtttaaatacacta

SEQ ID NO: 48593 - DNA, 50 bp, synthetic construct
  source 1..50: mol_type = other DNA
cgaggtcacttatgaaaaagctgggaccagctttgtactaaatgacacta

SEQ ID NO: 48594 - DNA, 50 bp, synthetic construct
  source 1..50: mol_type = other DNA
gcatgatttatttgtttgtatagcattgtaaacaaacaaatttatcatac

SEQ ID NO: 48595 - DNA, 50 bp, synthetic construct
  source 1..50: mol_type = other DNA
aggcgaacatctaaagaaaaccgaattcggcattgtagcattagccataa

SEQ ID NO: 48596 - DNA, 50 bp, synthetic construct
  source 1..50: mol_type = other DNA
ccctaatcatcctcatagtgtatttaaatacaccacctaaaacgatacaa

SEQ ID NO: 48597 - DNA, 50 bp, synthetic construct
  source 1..50: mol_type = other DNA
tcccacgaatgagataaaagctaacattagcttaaattccaaattcttgt

SEQ ID NO: 48598 - DNA, 50 bp, synthetic construct
  source 1..50: mol_type = other DNA
tttaccctgaaaagagacttcacagatatgaagttgctagcgacatacat

SEQ ID NO: 48599 - DNA, 50 bp, synthetic construct
  source 1..50: mol_type = other DNA
cgcgtcagttcactaagcttagtcccgtacatggaataataaagcactag

SEQ ID NO: 48600 - DNA, 50 bp, synthetic construct
  source 1..50: mol_type = other DNA
aggtagacgcttaggaattggtattgttgccaaagcgggtaggtgtacca

SEQ ID NO: 48601 - DNA, 50 bp, synthetic construct
  source 1..50: mol_type = other DNA
aacctcatagtgtatttagaccttgacacgtttaaatacaccatctaaaa

SEQ ID NO: 48602 - DNA, 50 bp, synthetic construct
  source 1..50: mol_type = other DNA
aaaatgtagtttttccattcccccatttaacgataatgaaaaaagttttt

SEQ ID NO: 48603 - DNA, 50 bp, synthetic construct
  source 1..50: mol_type = other DNA
aatctcatagtgtatttagaccttgacacgtttaaatacaccacctaaag

SEQ ID NO: 48604 - DNA, 50 bp, synthetic construct
  source 1..50: mol_type = other DNA
gtatgtcggtcaatttgcttgatatttatcaccatgaggagcgtaattac

SEQ ID NO: 48605 - DNA, 50 bp, synthetic construct
  source 1..50: mol_type = other DNA
catgcaattgattctcatttaaagatcgctgaactagattatctggcatc

SEQ ID NO: 48606 - DNA, 50 bp, synthetic construct
  source 1..50: mol_type = other DNA
catcagatataaaagaatgcgccatatggcagattcttttacgatatcct

SEQ ID NO: 48607 - DNA, 50 bp, synthetic construct
  source 1..50: mol_type = other DNA
ccctaatcatcctcatagtgtatttaaatacaccatctaaaacgatacaa

SEQ ID NO: 48608 - DNA, 50 bp, synthetic construct
  source 1..50: mol_type = other DNA
aattttttcatcgtgagcccttttttagcaggtgtcaccatgaaaaaagc

SEQ ID NO: 48609 - DNA, 50 bp, synthetic construct
  source 1..50: mol_type = other DNA
gtggtgggatataatttttgtttaattaaacataaaattaaccatgatgt

SEQ ID NO: 48610 - DNA, 50 bp, synthetic construct
  source 1..50: mol_type = other DNA
tattgggggttgactacgttcgggttccctaatatcatgtacccacaata

SEQ ID NO: 48611 - DNA, 50 bp, synthetic construct
  source 1..50: mol_type = other DNA
gttctcatagtgtatttagaccttgacacgtttaaatacgccatctaaaa

SEQ ID NO: 48612 - DNA, 50 bp, synthetic construct
  source 1..50: mol_type = other DNA
agttccctgaaaagggacttcacagatatgaagctgctagtcacatacat

SEQ ID NO: 48613 - DNA, 50 bp, synthetic construct
  source 1..50: mol_type = other DNA
gctaaagtatgcttttataaaccttaagttgaagaaaaaaatactcgcct

SEQ ID NO: 48614 - DNA, 50 bp, synthetic construct
  source 1..50: mol_type = other DNA
gttctcatagtgtatttagaccttgacacgtttaaatacaccatctaaaa

SEQ ID NO: 48615 - DNA, 50 bp, synthetic construct
  source 1..50: mol_type = other DNA
aaacattacctgtaccagcattattaaccagtacaaagcaggtaagtttg

SEQ ID NO: 48616 - DNA, 50 bp, synthetic construct
  source 1..50: mol_type = other DNA
atcctcatagtgtatttagaccttgacacgtttaaatacaccatctaaaa

SEQ ID NO: 48617 - DNA, 50 bp, synthetic construct
  source 1..50: mol_type = other DNA
acgtatgcttttataaaccttagtggattaagtcaggtgtaagtataagt

SEQ ID NO: 48618 - DNA, 50 bp, synthetic construct
  source 1..50: mol_type = other DNA
ttatttttgagtaataatcactttttcacctgtaccgtacagagtaattc

SEQ ID NO: 48619 - DNA, 50 bp, synthetic construct
  source 1..50: mol_type = other DNA
tactcatttttactgcaacaggttgaaaaagtgattattactcaaaaata

SEQ ID NO: 48620 - DNA, 50 bp, synthetic construct
  source 1..50: mol_type = other DNA
gttgttcaacatgcaccacgactttaaatacactacctaaagcgatacaa

SEQ ID NO: 48621 - DNA, 50 bp, synthetic construct
  source 1..50: mol_type = other DNA
ttatggctaatgctacaatgccgaattcggttttctaagagacctgttat

SEQ ID NO: 48622 - DNA, 50 bp, synthetic construct
  source 1..50: mol_type = other DNA
gtttcaggggtattcggtaacaaatttttgtttggaaatggtatgaaaac

SEQ ID NO: 48623 - DNA, 50 bp, synthetic construct
  source 1..50: mol_type = other DNA
ttattatataagaaagcgcgatgaatacattgcaaattcttatagaatat

SEQ ID NO: 48624 - DNA, 50 bp, synthetic construct
  source 1..50: mol_type = other DNA
ataacaggtctcttagaaaaccgaattcggcattgtagcattagccataa

SEQ ID NO: 48625 - DNA, 50 bp, synthetic construct
  source 1..50: mol_type = other DNA
attttacgcattgctcacctctcaaccccctggcgagcaatcagtaaatc

SEQ ID NO: 48626 - DNA, 50 bp, synthetic construct
  source 1..50: mol_type = other DNA
ttccaaacaaaaacgcccctaccgcgttttaggcgctctcctgaatgcgt

SEQ ID NO: 48627 - DNA, 50 bp, synthetic construct
  source 1..50: mol_type = other DNA
acaggtatgttctcatagtgtatttaaatacaccacctaaagcgatacaa

SEQ ID NO: 48628 - DNA, 50 bp, synthetic construct
  source 1..50: mol_type = other DNA
atttaaaaagacaattaaggtcacatttacactttcgcgttttttgaaca

SEQ ID NO: 48629 - DNA, 50 bp, synthetic construct
  source 1..50: mol_type = other DNA
ctttaggtagtgtatttaaacgtgtcaaggtctaaatacactatgagaac

SEQ ID NO: 48630 - DNA, 50 bp, synthetic construct
  source 1..50: mol_type = other DNA
ctcgtgttatcatgggtacatgatatgtagtcaacccaaaataactaaaa

SEQ ID NO: 48631 - DNA, 50 bp, synthetic construct
  source 1..50: mol_type = other DNA
ccctctctcgtgttgatgggtacatgtcaacccacaataactaaaatttt

SEQ ID NO: 48632 - DNA, 50 bp, synthetic construct
  source 1..50: mol_type = other DNA
gcggatttgtccggcagcgatattatactggaaaaagacttgatatagtt

SEQ ID NO: 48633 - DNA, 50 bp, synthetic construct
  source 1..50: mol_type = other DNA
aacgtttcataatactgcaggaagatggaatttgtgtattatgaagggaa

SEQ ID NO: 48634 - DNA, 50 bp, synthetic construct
  source 1..50: mol_type = other DNA
taggtgtcaaggttgacacattatgatttctgagccagccccgaaaccta

SEQ ID NO: 48635 - DNA, 50 bp, synthetic construct
  source 1..50: mol_type = other DNA
tatggctaatgctacaatgccgaatattcggttttctttagatgttcgcc

SEQ ID NO: 48636 - DNA, 50 bp, synthetic construct
  source 1..50: mol_type = other DNA
ctcgacatcctgctccatcaaatcattgtatgaatatcctttacttcaag

SEQ ID NO: 48637 - DNA, 50 bp, synthetic construct
  source 1..50: mol_type = other DNA
gggaatcacagcaatgacttctcttcttttctgtcataccgcatcctccc

SEQ ID NO: 48638 - DNA, 50 bp, synthetic construct
  source 1..50: mol_type = other DNA
ccctaatcatcctcatagtgtatttaaatacaccatcttaagcgatacaa

SEQ ID NO: 48639 - DNA, 50 bp, synthetic construct
  source 1..50: mol_type = other DNA
ccttaatctcaagggctttagctacgctctataagcccttcaaatacaaa

SEQ ID NO: 48640 - DNA, 50 bp, synthetic construct
  source 1..50: mol_type = other DNA
gatatgagtgttaaggcaagaatacttttacatagctaaacacgtacatt

SEQ ID NO: 48641 - DNA, 50 bp, synthetic construct
  source 1..50: mol_type = other DNA
ctgtttgaaaagctggataaccttgaaagagaaatgtaaactggaaacag

SEQ ID NO: 48642 - DNA, 50 bp, synthetic construct
  source 1..50: mol_type = other DNA
tattgtgggtacatgatattaggcaacccgaacgtagtcaacccccaata

SEQ ID NO: 48643 - DNA, 50 bp, synthetic construct
  source 1..50: mol_type = other DNA
tcacaacttttttattgtggtggtatatcattccaaccacaaagacgagc

SEQ ID NO: 48644 - DNA, 50 bp, synthetic construct
  source 1..50: mol_type = other DNA
tgcgcggctatttttatagatgattcaatattattaaaggctaacgcgca

SEQ ID NO: 48645 - DNA, 50 bp, synthetic construct
  source 1..50: mol_type = other DNA
ccgtcactgggcgcaacgacgtccgccaacaggattgctgaagcaaacgg

SEQ ID NO: 48646 - DNA, 50 bp, synthetic construct
  source 1..50: mol_type = other DNA
atataaattctttcccttttattatttactaaaagtataagttaaaatgg

SEQ ID NO: 48647 - DNA, 50 bp, synthetic construct
  source 1..50: mol_type = other DNA
aggtgaacatctaaagaaaaccgaattcggcattgtagcattagccataa

SEQ ID NO: 48648 - DNA, 50 bp, synthetic construct
  source 1..50: mol_type = other DNA
acaggtatgttctcatggtgtatttaaacacatcattttaggtattgaat

SEQ ID NO: 48649 - DNA, 50 bp, synthetic construct
  source 1..50: mol_type = other DNA
aaataagaggtgtatttagaccttgacacgtttaaatacaccatcttaag

SEQ ID NO: 48650 - DNA, 50 bp, synthetic construct
  source 1..50: mol_type = other DNA
ttttagttattttgggttgactacatatcataaacccaccaacacgatag

SEQ ID NO: 48651 - DNA, 50 bp, synthetic construct
  source 1..50: mol_type = other DNA
ttttagatggtgtatttaaacgtgtcaaggtctaaatacacctcttattt

SEQ ID NO: 48652 - DNA, 50 bp, synthetic construct
  source 1..50: mol_type = other DNA
tattgtgggttgactacgttcgggttccctaatatcatgtacccatcaac

SEQ ID NO: 48653 - DNA, 50 bp, synthetic construct
  source 1..50: mol_type = other DNA
ttatggctaatgctacaatgccgaattcggttttctaagaaacctgtaaa

SEQ ID NO: 48654 - DNA, 50 bp, synthetic construct
  source 1..50: mol_type = other DNA
ctttaggtggtgtatttaaacgtgtcaaggtctaaatacactatgagaac

SEQ ID NO: 48655 - DNA, 50 bp, synthetic construct
  source 1..50: mol_type = other DNA
ttgtatcgctttaggtggtgtatttaaatacactatgaggtagattaggg

SEQ ID NO: 48656 - DNA, 50 bp, synthetic construct
  source 1..50: mol_type = other DNA
gttctcatagtgcatttagaccttgacacgtttaaatacaccatctaaag

SEQ ID NO: 48657 - DNA, 50 bp, synthetic construct
  source 1..50: mol_type = other DNA
aaattatatgaattaatataatattaattctgtcttgcactttatcacca

SEQ ID NO: 48658 - DNA, 50 bp, synthetic construct
  source 1..50: mol_type = other DNA
gacatcaatgccatcaactcgagccatgtggagtgtgttgtcttgatgtc

SEQ ID NO: 48659 - DNA, 50 bp, synthetic construct
  source 1..50: mol_type = other DNA
taaatactgatttaaatgttgcagttctgcaacatagcatgacctaattc

SEQ ID NO: 48660 - DNA, 50 bp, synthetic construct
  source 1..50: mol_type = other DNA
atgttactcttgtaactaacacgaggtattattaaatacaaaagtaacta

SEQ ID NO: 48661 - DNA, 50 bp, synthetic construct
  source 1..50: mol_type = other DNA
ctaaaatagaaaaaaaacctcacttaaatgaggttttggatagaattgga

SEQ ID NO: 48662 - DNA, 50 bp, synthetic construct
  source 1..50: mol_type = other DNA
tgtatcaaaatcatagctattagacaaataagaactcaaatattgataca

SEQ ID NO: 48663 - DNA, 50 bp, synthetic construct
  source 1..50: mol_type = other DNA
cgattccggtctgggaacctatacgcacataggtccgtaggctgctcccg

SEQ ID NO: 48664 - DNA, 50 bp, synthetic construct
  source 1..50: mol_type = other DNA
atgagtgttaaggcaagaatactagtgcttttacatagctaaacacgtat

SEQ ID NO: 48665 - DNA, 50 bp, synthetic construct
  source 1..50: mol_type = other DNA
tttagttattgggggttgactacgctaatatcatgtacccatcaacacga

SEQ ID NO: 48666 - DNA, 50 bp, synthetic construct
  source 1..50: mol_type = other DNA
ccgaagttgctatatattataatgcacattcatgctgttagcatcaggtc

SEQ ID NO: 48667 - DNA, 50 bp, synthetic construct
  source 1..50: mol_type = other DNA
ttgtatcgttttaggtagtgtatttaaatacactatgagaacatacctgt

SEQ ID NO: 48668 - DNA, 50 bp, synthetic construct
  source 1..50: mol_type = other DNA
agccgactggctgtcgggctggcgggccggatccgggcacggaggaggca

SEQ ID NO: 48669 - DNA, 50 bp, synthetic construct
  source 1..50: mol_type = other DNA
aagcaaccatagtgttgctttttttaaaaaacctattcaaccgcagtatt

SEQ ID NO: 48670 - DNA, 50 bp, synthetic construct
  source 1..50: mol_type = other DNA
tatcggaccgttcgtcaagctttagataagccttacaaaaatggaggaaa

SEQ ID NO: 48671 - DNA, 50 bp, synthetic construct
  source 1..50: mol_type = other DNA
ccctaatctacctcatagtgtatttaaatacaccacctaaagcgatacaa

SEQ ID NO: 48672 - DNA, 50 bp, synthetic construct
  source 1..50: mol_type = other DNA
gagggcggcataggttgccatctgaaaagtgggttctcgcgaaggccctc

SEQ ID NO: 48673 - DNA, 50 bp, synthetic construct
  source 1..50: mol_type = other DNA
cgtgaagcgtttgaaccccgcgctgcagggcgggcgggacgacgatcacg

SEQ ID NO: 48674 - DNA, 50 bp, synthetic construct
  source 1..50: mol_type = other DNA
aagagcgccttcagcgccgcttccgcgcgagatgcatttctggctttcgt

SEQ ID NO: 48675 - DNA, 50 bp, synthetic construct
  source 1..50: mol_type = other DNA
tgtctcctcgcggccggtcgatccgcgcgacgtcaactggctgggtgacg

SEQ ID NO: 48676 - DNA, 50 bp, synthetic construct
  source 1..50: mol_type = other DNA
accatctgaaacgggaggtgtatttaaatacaccacctaaagcgatacaa

SEQ ID NO: 48677 - DNA, 50 bp, synthetic construct
  source 1..50: mol_type = other DNA
accggcatcaacaaggccgaggaacgttcagaagctttcacggcaccggc

SEQ ID NO: 48678 - DNA, 50 bp, synthetic construct
  source 1..50: mol_type = other DNA
ccctaatcatcctcatagtgtatttaaatacactacctaaagcgatacaa

SEQ ID NO: 48679 - DNA, 50 bp, synthetic construct
  source 1..50: mol_type = other DNA
agcagtcgaggcgcaatacaagccgctgcttgcattcgtgcgcgctttgg

SEQ ID NO: 48680 - DNA, 50 bp, synthetic construct
  source 1..50: mol_type = other DNA
atcctcatagtgcatttagaccttgacacgtttaaatacaccacctaaag

SEQ ID NO: 48681 - DNA, 50 bp, synthetic construct
  source 1..50: mol_type = other DNA
aaataagaggtgtatttagaccttgacacgtttaaatacaccatctaaaa

SEQ ID NO: 48682 - DNA, 50 bp, synthetic construct
  source 1..50: mol_type = other DNA
tatcctcgtgccacgcaccggctcggccacccctgcccgctaatgagaat

SEQ ID NO: 48683 - DNA, 50 bp, synthetic construct
  source 1..50: mol_type = other DNA
ttgtatcgttttagatggtgtatttaaatacactatgaggatgattaggg

SEQ ID NO: 48684 - DNA, 50 bp, synthetic construct
  source 1..50: mol_type = other DNA
cccctctgctaccgagttgccagtatgagggtatcagtgcaggtcacggc

SEQ ID NO: 48685 - DNA, 50 bp, synthetic construct
  source 1..50: mol_type = other DNA
gcgggcgacggcgtccgtcaccggctccgtctgggggcgccgtcatcccg

SEQ ID NO: 48686 - DNA, 50 bp, synthetic construct
  source 1..50: mol_type = other DNA
gactatttgtcttctcggtttataataaaactactattcttcaaatctat

SEQ ID NO: 48687 - DNA, 50 bp, synthetic construct
  source 1..50: mol_type = other DNA
aaattattataatagtaagagaagtttcacttctgtagacgcaattattt

SEQ ID NO: 48688 - DNA, 50 bp, synthetic construct
  source 1..50: mol_type = other DNA
gaagaatgcacaaaatactatgattcattatagtatttacgggcatcgct

SEQ ID NO: 48689 - DNA, 50 bp, synthetic construct
  source 1..50: mol_type = other DNA
aaataacaggtgcatttagaccttgacacgtttaaatacaccatcttaag

SEQ ID NO: 48690 - DNA, 50 bp, synthetic construct
  source 1..50: mol_type = other DNA
tgccatgctggcatcggagcaaatgccgtttatcctgggcaagctgggcg

SEQ ID NO: 48691 - DNA, 50 bp, synthetic construct
  source 1..50: mol_type = other DNA
tatattgtattaaatatttccctaatttttaccatattatttaaaataat

SEQ ID NO: 48692 - DNA, 50 bp, synthetic construct
  source 1..50: mol_type = other DNA
tatcaagttattagttgcggaaacattaggttcgcaccaaaaactgctcc

SEQ ID NO: 48693 - DNA, 50 bp, synthetic construct
  source 1..50: mol_type = other DNA
ctaaatacatagaggctaataccttaataagttagactttatgtattttc

SEQ ID NO: 48694 - DNA, 50 bp, synthetic construct
  source 1..50: mol_type = other DNA
ctattcttttaatattattatcaaatgaggtgataatatgaaaagaatag

SEQ ID NO: 48695 - DNA, 50 bp, synthetic construct
  source 1..50: mol_type = other DNA
caagtgctactaaattttattagatatattataaaattgaggaataaaat

SEQ ID NO: 48696 - DNA, 50 bp, synthetic construct
  source 1..50: mol_type = other DNA
acttaaaaagtgtggaagtttttaatactgaacactgatactttttaaaa

SEQ ID NO: 48697 - DNA, 50 bp, synthetic construct
  source 1..50: mol_type = other DNA
aaattcaactatacgtattatataattgcacaatatatttagtttcccat

SEQ ID NO: 48698 - DNA, 50 bp, synthetic construct
  source 1..50: mol_type = other DNA
ttgtcactccttagtctctctatgccgattgagaacggcgtggaggcgac

SEQ ID NO: 48699 - DNA, 50 bp, synthetic construct
  source 1..50: mol_type = other DNA
ctattcaagaaacaaatagcataaattcagggtggtagttctttaaatag

SEQ ID NO: 48700 - DNA, 50 bp, synthetic construct
  source 1..50: mol_type = other DNA
cttaatcaacttcacagggtctgttaacagaagctgaaaaaaccaacgtc

SEQ ID NO: 48701 - DNA, 50 bp, synthetic construct
  source 1..50: mol_type = other DNA
agaattataaattatttcatcttccaataaatgttataattaatatgtag

SEQ ID NO: 48702 - DNA, 50 bp, synthetic construct
  source 1..50: mol_type = other DNA
atcctcatagtgtatttagaccttgacacgtttaaatacaccacctaaag

SEQ ID NO: 48703 - DNA, 50 bp, synthetic construct
  source 1..50: mol_type = other DNA
aaaaaagacctatacccttagtgtttcataaaagccagagttgcattttt

SEQ ID NO: 48704 - DNA, 50 bp, synthetic construct
  source 1..50: mol_type = other DNA
attcggatgttctcatagtgtatttaaacacatcattttaggtattgaat

SEQ ID NO: 48705 - DNA, 50 bp, synthetic construct
  source 1..50: mol_type = other DNA
ttcaacgcgaaaccttaataggtgattttatatgcaggtttttggttatc

SEQ ID NO: 48706 - DNA, 50 bp, synthetic construct
  source 1..50: mol_type = other DNA
ttgtatcaatctcaatcatctttgctcaaaggtgtttgtatttgatacaa

SEQ ID NO: 48707 - DNA, 50 bp, synthetic construct
  source 1..50: mol_type = other DNA
tacggcatttcccccaaaaactgtgagcagttatttataaaagagccgca

SEQ ID NO: 48708 - DNA, 50 bp, synthetic construct
  source 1..50: mol_type = other DNA
tctttcccgttaaagctcaagtttattaactttagtattaaagggaaaag

SEQ ID NO: 48709 - DNA, 50 bp, synthetic construct
  source 1..50: mol_type = other DNA
tttccttatataatttatgtgtactagtacacgtataaaaatatctttta

SEQ ID NO: 48710 - DNA, 50 bp, synthetic construct
  source 1..50: mol_type = other DNA
aaatggcacgtttcattgttcacctcgagccagtgtgaaagatgattttt

SEQ ID NO: 48711 - DNA, 50 bp, synthetic construct
  source 1..50: mol_type = other DNA
acaggagaacaatgatatgagtgttaatactcgcgtaattgctcaggctt

SEQ ID NO: 48712 - DNA, 50 bp, synthetic construct
  source 1..50: mol_type = other DNA
ataggatattgattttatttgcactagtgcaaataaaaaaagctctactt

SEQ ID NO: 48713 - DNA, 50 bp, synthetic construct
  source 1..50: mol_type = other DNA
tattgggggttgactacgtttgggttgcctaatatcatgtacccatcaac

SEQ ID NO: 48714 - DNA, 50 bp, synthetic construct
  source 1..50: mol_type = other DNA
cggcgcgggcgtcggcgatctgcgggcggccaacgccaaaggcggcgagc

SEQ ID NO: 48715 - DNA, 50 bp, synthetic construct
  source 1..50: mol_type = other DNA
gattgaattctcgccagtgattcgacttggcgttacacgaaaattcaaaa

SEQ ID NO: 48716 - DNA, 50 bp, synthetic construct
  source 1..50: mol_type = other DNA
gtttaatgataaatttagcgaattaaaatatcaaccatttataagtcaat

SEQ ID NO: 48717 - DNA, 50 bp, synthetic construct
  source 1..50: mol_type = other DNA
accatcttttatatatctttcatttatgtaaaggataccgcagagatgat

SEQ ID NO: 48718 - DNA, 50 bp, synthetic construct
  source 1..50: mol_type = other DNA
attggaaatctgtttagaaacaatttcttgttatcactcaaattttattg

SEQ ID NO: 48719 - DNA, 50 bp, synthetic construct
  source 1..50: mol_type = other DNA
ttccgacttcgaagattttctgagagatgtcaactaactcatagtcctcg

SEQ ID NO: 48720 - DNA, 50 bp, synthetic construct
  source 1..50: mol_type = other DNA
ttgaagttcatgccaaagaagttgaggtttacaattattatgaagagtac

SEQ ID NO: 48721 - DNA, 50 bp, synthetic construct
  source 1..50: mol_type = other DNA
agctagtctcatgttaatattgtttaaacaagcagaatatgtatacagct

SEQ ID NO: 48722 - DNA, 50 bp, synthetic construct
  source 1..50: mol_type = other DNA
aagttgcacacttacgcctacagctcatttaaagaatatgtgtgcacatt

SEQ ID NO: 48723 - DNA, 50 bp, synthetic construct
  source 1..50: mol_type = other DNA
cataatatggagtgaaaaatgaaaacattcctcagaatttccaatgaatt

SEQ ID NO: 48724 - DNA, 50 bp, synthetic construct
  source 1..50: mol_type = other DNA
tttgcgaggtaagtatcatcagagaagcgtggagatatttactacgcaaa

SEQ ID NO: 48725 - DNA, 50 bp, synthetic construct
  source 1..50: mol_type = other DNA
agttggtctataatgatttacaaattatctggaatcataacttatacgaa

SEQ ID NO: 48726 - DNA, 50 bp, synthetic construct
  source 1..50: mol_type = other DNA
ttatatatcaagggatttcgggcataggcagaacatacctgcctaaataa

SEQ ID NO: 48727 - DNA, 50 bp, synthetic construct
  source 1..50: mol_type = other DNA
actacctgtaccagcattattaagcacttaaccagtacaaagcaggtaag

SEQ ID NO: 48728 - DNA, 50 bp, synthetic construct
  source 1..50: mol_type = other DNA
gatttttcctttattttcatgcccgttttatccgctataaccgaaaaatt

SEQ ID NO: 48729 - DNA, 50 bp, synthetic construct
  source 1..50: mol_type = other DNA
aaaatgtctaagattggatttatatcaagaaataagatctgcctaataaa

SEQ ID NO: 48730 - DNA, 50 bp, synthetic construct
  source 1..50: mol_type = other DNA
aaaccagatactttcaaaacccgaattcggcgaggtagcataagccatag

SEQ ID NO: 48731 - DNA, 50 bp, synthetic construct
  source 1..50: mol_type = other DNA
ttgggcaagtctatttagttaagtgagtataataaaacggaaaaacccaa

SEQ ID NO: 48732 - DNA, 50 bp, synthetic construct
  source 1..50: mol_type = other DNA
gttatcaaatccgacgtctttgtctccacttggacgtcggatttgataag

SEQ ID NO: 48733 - DNA, 50 bp, synthetic construct
  source 1..50: mol_type = other DNA
tacctcatagtgtatttagaccttgacacgtttaaatacactacctaaag

SEQ ID NO: 48734 - DNA, 50 bp, synthetic construct
  source 1..50: mol_type = other DNA
ttgtatcgctttaggtagtgtatttaaatacactatgaggatgattaggg

SEQ ID NO: 48735 - DNA, 50 bp, synthetic construct
  source 1..50: mol_type = other DNA
aaaaggtgcggggtcgcgtttccgcgctcgctaacccgttcgcggcgctc

SEQ ID NO: 48736 - DNA, 50 bp, synthetic construct
  source 1..50: mol_type = other DNA
cattttatacaaaatcctcctgtcatgagtggcgctttttgtaaaatctg

SEQ ID NO: 48737 - DNA, 50 bp, synthetic construct
  source 1..50: mol_type = other DNA
tgagtaataatccacgtgtagggtttaatctatacctataatttcacgat

SEQ ID NO: 48738 - DNA, 50 bp, synthetic construct
  source 1..50: mol_type = other DNA
gcttttctacgaaaaagacacatcatgagaggtgtcattcgtagaatact

SEQ ID NO: 48739 - DNA, 50 bp, synthetic construct
  source 1..50: mol_type = other DNA
tgtgtgagaaaagcctgtccttttgagagcggatagacgtatcatgcact

SEQ ID NO: 48740 - DNA, 50 bp, synthetic construct
  source 1..50: mol_type = other DNA
taactcggtaaactatatcacctgattcggtaaacgttttttccgagtta

SEQ ID NO: 48741 - DNA, 50 bp, synthetic construct
  source 1..50: mol_type = other DNA
cgtgtagggtttatatcactggggtgcccttaagattttcaatctataca

SEQ ID NO: 48742 - DNA, 50 bp, synthetic construct
  source 1..50: mol_type = other DNA
gtgtggaatacccccctcccattcgagagcggtaggtgatattctcacac

SEQ ID NO: 48743 - DNA, 50 bp, synthetic construct
  source 1..50: mol_type = other DNA
ttgtatcgctttaggtggtgtatttaaatgcactatgatgatgattaggg

SEQ ID NO: 48744 - DNA, 50 bp, synthetic construct
  source 1..50: mol_type = other DNA
ctttaggtagtgtatttaaacgtgtcaaggtctaaatacactatgaggtt

SEQ ID NO: 48745 - DNA, 50 bp, synthetic construct
  source 1..50: mol_type = other DNA
ccctaatcatcctcatagtgtatttaaatacaccatctaaagcgatacaa

SEQ ID NO: 48746 - DNA, 50 bp, synthetic construct
  source 1..50: mol_type = other DNA
ttgtatcgctttaggtggtgtatttaaatgcactatgaggatgattaggg

SEQ ID NO: 48747 - DNA, 50 bp, synthetic construct
  source 1..50: mol_type = other DNA
aaatcgggtgttattggggtttacaatgtccccacaataacacgaggggg

SEQ ID NO: 48748 - DNA, 50 bp, synthetic construct
  source 1..50: mol_type = other DNA
ttttagatggtgtatttaaacgtgtcaaggtctaaatacactatgagaac

SEQ ID NO: 48749 - DNA, 50 bp, synthetic construct
  source 1..50: mol_type = other DNA
tgatccgcacatggggcgagcttggtgaagctcgacctaagtgcggtggc

SEQ ID NO: 48750 - DNA, 50 bp, synthetic construct
  source 1..50: mol_type = other DNA
tcttttttgctgtttctgccatctgcatgtgtttataactgcaataagga

SEQ ID NO: 48751 - DNA, 50 bp, synthetic construct
  source 1..50: mol_type = other DNA
aatatgactttgtaatataattttagcacacaataacacaaagtcaagta

SEQ ID NO: 48752 - DNA, 50 bp, synthetic construct
  source 1..50: mol_type = other DNA
tctcaaggaacagactacacacgttggagtgcgtagtgttgctacaacga

SEQ ID NO: 48753 - DNA, 50 bp, synthetic construct
  source 1..50: mol_type = other DNA
attcaatacctaaaatgatgtgtttaaatacactatgagaacatacctgt

SEQ ID NO: 48754 - DNA, 50 bp, synthetic construct
  source 1..50: mol_type = other DNA
gctgggggggttggtggtagcggaggtccgtcttggacacaaaccccaca

SEQ ID NO: 48755 - DNA, 50 bp, synthetic construct
  source 1..50: mol_type = other DNA
ctgttcgacccaagtggttgcgggagagcgcaaccgccgttgtcgaacgc

SEQ ID NO: 48756 - DNA, 50 bp, synthetic construct
  source 1..50: mol_type = other DNA
aatcgggtgttattgggggttgactatcatgtacccatcaacacacgaga

SEQ ID NO: 48757 - DNA, 50 bp, synthetic construct
  source 1..50: mol_type = other DNA
aacaaattgataagcaatgcttttttaaaaaccagtaatatcaatgtgtt

SEQ ID NO: 48758 - DNA, 50 bp, synthetic construct
  source 1..50: mol_type = other DNA
ttaacaggtctcctagataaccgaattcggcattgtagcattagccataa

SEQ ID NO: 48759 - DNA, 50 bp, synthetic construct
  source 1..50: mol_type = other DNA
taccgttacgttgaaagtgtctcaaaagcgatacaatctaggggttggta

SEQ ID NO: 48760 - DNA, 50 bp, synthetic construct
  source 1..50: mol_type = other DNA
ttgtatcgctttaggtggtgtatttaaatacacctcccgtttcagatggt

SEQ ID NO: 48761 - DNA, 50 bp, synthetic construct
  source 1..50: mol_type = other DNA
tattgggggttgactacgttcgggttgcctaatatcatgtacccacaata

SEQ ID NO: 48762 - DNA, 50 bp, synthetic construct
  source 1..50: mol_type = other DNA
acaggtatgttctcatagtgtatttaaacacatcattttaggtattgaat

SEQ ID NO: 48763 - DNA, 50 bp, synthetic construct
  source 1..50: mol_type = other DNA
ttatggctaatgctacaatgccgaattcggtattaataaaacaggaaata

SEQ ID NO: 48764 - DNA, 50 bp, synthetic construct
  source 1..50: mol_type = other DNA
ccccctcgtgttattgtgggggcattgtaaaccccaataactaaaatttt

SEQ ID NO: 48765 - DNA, 50 bp, synthetic construct
  source 1..50: mol_type = other DNA
tattgggggttgactacgttcgggtttcctaatatcatgtacccatcaac

SEQ ID NO: 48766 - DNA, 50 bp, synthetic construct
  source 1..50: mol_type = other DNA
tacggcctttctcccaaaatatgcgagcagtttttatcataaaggccata

SEQ ID NO: 48767 - DNA, 50 bp, synthetic construct
  source 1..50: mol_type = other DNA
ttttagttattttgggttgactacatatcatgtacccatgataacacgag

SEQ ID NO: 48768 - DNA, 50 bp, synthetic construct
  source 1..50: mol_type = other DNA
ttatggctaatgctacaatgccgaattcggttatctaggagacctgttaa

SEQ ID NO: 48769 - DNA, 50 bp, synthetic construct
  source 1..50: mol_type = other DNA
accccgaatagcctacattcaagggtcattgtatttgagctattcggcga

SEQ ID NO: 48770 - DNA, 50 bp, synthetic construct
  source 1..50: mol_type = other DNA
taagattggatttatatcattaggctgcccaaaaaatcaagaaatacatt

SEQ ID NO: 48771 - DNA, 50 bp, synthetic construct
  source 1..50: mol_type = other DNA
ccctctctcgtgttgatgggtacatgtcaacccccaataactaaaatttt

SEQ ID NO: 48772 - DNA, 50 bp, synthetic construct
  source 1..50: mol_type = other DNA
tagtgtatttagaccttgctaatcttcatcagacacgtttaaatacacca

SEQ ID NO: 48773 - DNA, 50 bp, synthetic construct
  source 1..50: mol_type = other DNA
taaggggtgttttaggaagtgaaaatcttcactttcttatgcaccctgta

SEQ ID NO: 48774 - DNA, 50 bp, synthetic construct
  source 1..50: mol_type = other DNA
ctttaggtagtttatttaaacgtgtcaaggtctaaatacactatgaggat

SEQ ID NO: 48775 - DNA, 50 bp, synthetic construct
  source 1..50: mol_type = other DNA
tctttgaagaacgtagtttttacgttcgaaaatgataggctattcattca

SEQ ID NO: 48776 - DNA, 50 bp, synthetic construct
  source 1..50: mol_type = other DNA
ccctaatcatccttatagtgtatttaaatacaccatctaaaacgatacaa

SEQ ID NO: 48777 - DNA, 50 bp, synthetic construct
  source 1..50: mol_type = other DNA
tggtgaattttttgtattttgggaattccctaaactttggtaaaatcccc

SEQ ID NO: 48778 - DNA, 50 bp, synthetic construct
  source 1..50: mol_type = other DNA
catttggggaaaggaataaacaaggtgatgtttgttctatttcccaaaat

SEQ ID NO: 48779 - DNA, 50 bp, synthetic construct
  source 1..50: mol_type = other DNA
ttctggtcactcgcagattcgagaattctttaatctttaatcacctagcc

SEQ ID NO: 48780 - DNA, 50 bp, synthetic construct
  source 1..50: mol_type = other DNA
accatttgaaacgggaggtgtatttaaatacaccacctaaagcgatacaa

SEQ ID NO: 48781 - DNA, 50 bp, synthetic construct
  source 1..50: mol_type = other DNA
caagaaggcgaggatttggatttttaacaattgtggtgcgattttacgcc

SEQ ID NO: 48782 - DNA, 50 bp, synthetic construct
  source 1..50: mol_type = other DNA
cattttttgtcatccataccacacacactcaacatggattgagaggacag

SEQ ID NO: 48783 - DNA, 50 bp, synthetic construct
  source 1..50: mol_type = other DNA
atagcgtagacatagttctcatcatcagaacagaactatgaacgccgaac

SEQ ID NO: 48784 - DNA, 50 bp, synthetic construct
  source 1..50: mol_type = other DNA
ggaaattcctttttgcaatcactatgtactgtttgcaaaaaatagttgga

SEQ ID NO: 48785 - DNA, 50 bp, synthetic construct
  source 1..50: mol_type = other DNA
cgtttacttcctattttcgacatttaaaagtcgatattatcctaaatcat

SEQ ID NO: 48786 - DNA, 50 bp, synthetic construct
  source 1..50: mol_type = other DNA
gcaacaaacaagaatgatattgcatcgactatatcattcgctagaattcc

SEQ ID NO: 48787 - DNA, 50 bp, synthetic construct
  source 1..50: mol_type = other DNA
taatattttttccatttacatctttaaaggaaaaggaggaaaaattgcta

SEQ ID NO: 48788 - DNA, 50 bp, synthetic construct
  source 1..50: mol_type = other DNA
ttaagtcaaatcatttcaaaaaatttctttatttaatatattttcaataa

SEQ ID NO: 48789 - DNA, 50 bp, synthetic construct
  source 1..50: mol_type = other DNA
catataaataggtagaaactatcatatgatattaaatgcccataaacagc

SEQ ID NO: 48790 - DNA, 50 bp, synthetic construct
  source 1..50: mol_type = other DNA
tttgcggctcttgccattttgcccgctgacaggctttcaagtctggtaaa

SEQ ID NO: 48791 - DNA, 50 bp, synthetic construct
  source 1..50: mol_type = other DNA
gtttatcataagagatgtgtagtcctaattacaactctctaatcactaac

SEQ ID NO: 48792 - DNA, 50 bp, synthetic construct
  source 1..50: mol_type = other DNA
attcaatacctaaaatgatgtgtttaaatacaccatgagaacatacctgt

SEQ ID NO: 48793 - DNA, 50 bp, synthetic construct
  source 1..50: mol_type = other DNA
caaatataagtgaaaccgccgattaataggagaggttttttatcgttata

SEQ ID NO: 48794 - DNA, 50 bp, synthetic construct
  source 1..50: mol_type = other DNA
attactggacatgtttcaagagtgtacacctatgagaagagcgaggggat

SEQ ID NO: 48795 - DNA, 50 bp, synthetic construct
  source 1..50: mol_type = other DNA
tacatacaacatatccaacgcaattcatttcattgtatatgttgtatgta

SEQ ID NO: 48796 - DNA, 50 bp, synthetic construct
  source 1..50: mol_type = other DNA
accttgcctctgtaaccaaacataataatgttaggttacagaagcaaggt

SEQ ID NO: 48797 - DNA, 50 bp, synthetic construct
  source 1..50: mol_type = other DNA
aaataaaaatatcgtagccttttttaaagtgaattaaaatatgattcttt

SEQ ID NO: 48798 - DNA, 50 bp, synthetic construct
  source 1..50: mol_type = other DNA
tatcacttttcctgttaattatacatgaaagaaaaacaggaataaaacta

SEQ ID NO: 48799 - DNA, 50 bp, synthetic construct
  source 1..50: mol_type = other DNA
aggtgtatttagaccttgctaatcttcatcagacacgtttaaatacacca

SEQ ID NO: 48800 - DNA, 50 bp, synthetic construct
  source 1..50: mol_type = other DNA
taaggggtgttttaggaagtgaaaatcttcactttcttatacaccctgta

SEQ ID NO: 48801 - DNA, 50 bp, synthetic construct
  source 1..50: mol_type = other DNA
taacaaggttgtttcttttgtaaaattttgacaaaaaaaatatttcatta

SEQ ID NO: 48802 - DNA, 50 bp, synthetic construct
  source 1..50: mol_type = other DNA
tttacaaggttttcccgtttagtgttagcgaaatactaaaacctgataaa

SEQ ID NO: 48803 - DNA, 50 bp, synthetic construct
  source 1..50: mol_type = other DNA
gtgtatcaatagaaaggtctcttcaggattacacctttcttatgatacac

SEQ ID NO: 48804 - DNA, 50 bp, synthetic construct
  source 1..50: mol_type = other DNA
gattggtcgaatgaattatgtgtctagtcacataatttattgtaagaagt

SEQ ID NO: 48805 - DNA, 50 bp, synthetic construct
  source 1..50: mol_type = other DNA
tgaagcggctgaaaaaaccgcatcatgatgcggtttctttttctagtttt

SEQ ID NO: 48806 - DNA, 50 bp, synthetic construct
  source 1..50: mol_type = other DNA
tggtggggttcaggtctcatgcgtaagcattacggatttgaagtcctgga

SEQ ID NO: 48807 - DNA, 50 bp, synthetic construct
  source 1..50: mol_type = other DNA
cgtttggacaatttaacaaccgcctcaaccggtgtactattgtccaaact

SEQ ID NO: 48808 - DNA, 50 bp, synthetic construct
  source 1..50: mol_type = other DNA
atgattccaaatagatgtgtagaaaattctacacattaatataacttatt

SEQ ID NO: 48809 - DNA, 50 bp, synthetic construct
  source 1..50: mol_type = other DNA
ttgtagcaacactacgcactccacgtgttgtctgtcccttgagaatacaa

SEQ ID NO: 48810 - DNA, 50 bp, synthetic construct
  source 1..50: mol_type = other DNA
ttgtagcaacactacgcactccacgtgtagtctgttccttgagaatacaa

SEQ ID NO: 48811 - DNA, 50 bp, synthetic construct
  source 1..50: mol_type = other DNA
ttgtagcaacactacgcactccacgtgttgtctggttcttgagaatacaa

SEQ ID NO: 48812 - DNA, 50 bp, synthetic construct
  source 1..50: mol_type = other DNA
caccttgtcattattatgacacaatcttgtgtcaagttaatgacagcatt

SEQ ID NO: 48813 - DNA, 50 bp, synthetic construct
  source 1..50: mol_type = other DNA
ttgtattctcaaggaacagactacacgtggagtgcgtagtgttgctacaa

SEQ ID NO: 48814 - DNA, 50 bp, synthetic construct
  source 1..50: mol_type = other DNA
agtttggacaatagtacaccggttgaggcggttgttaaattgtccaaacg

SEQ ID NO: 48815 - DNA, 50 bp, synthetic construct
  source 1..50: mol_type = other DNA
ttataaaccttagtggtgagatatgacgaagaagaacggaaacgccttaa

SEQ ID NO: 48816 - DNA, 50 bp, synthetic construct
  source 1..50: mol_type = other DNA
cgtttggacaatttcacaaccgcctcaaccggtgtactattgtccaaact

SEQ ID NO: 48817 - DNA, 50 bp, synthetic construct
  source 1..50: mol_type = other DNA
tacccctttttaatttaattgcgttacaaagagtttattagcaagaagta

SEQ ID NO: 48818 - DNA, 50 bp, synthetic construct
  source 1..50: mol_type = other DNA
aaccgttatgtgttattgtatcaattttaatacaaattttctaagcaaaa

SEQ ID NO: 48819 - DNA, 50 bp, synthetic construct
  source 1..50: mol_type = other DNA
aatagtgtcatttacttgacataagattgtgtcataataatgacaggtgc

SEQ ID NO: 48820 - DNA, 50 bp, synthetic construct
  source 1..50: mol_type = other DNA
gtctgtttcaaaaactaagaattttaaatttcgctatattttaaacttga

SEQ ID NO: 48821 - DNA, 50 bp, synthetic construct
  source 1..50: mol_type = other DNA
ttactccgatttctgttgcaattaattaattttatcatacaatctaacct

SEQ ID NO: 48822 - DNA, 50 bp, synthetic construct
  source 1..50: mol_type = other DNA
tgtatcaaattgagtacccacaccgaagtgtgagttctgaatttgataca

SEQ ID NO: 48823 - DNA, 50 bp, synthetic construct
  source 1..50: mol_type = other DNA
tttctaggcttttacgagcagtgcgataggtcttaccaatattatggaac

SEQ ID NO: 48824 - DNA, 50 bp, synthetic construct
  source 1..50: mol_type = other DNA
atttaggcaaaaaatcaagagttttaaatatgacatttaatagttggaaa

SEQ ID NO: 48825 - DNA, 50 bp, synthetic construct
  source 1..50: mol_type = other DNA
caggttgtgcaattgttactcttaaataagagtcacatcataattagatt

SEQ ID NO: 48826 - DNA, 50 bp, synthetic construct
  source 1..50: mol_type = other DNA
aatgtccgcaaaatccgtcctacatcagtcggtcattttttgcggacagt

SEQ ID NO: 48827 - DNA, 50 bp, synthetic construct
  source 1..50: mol_type = other DNA
cgttgtagcaacactacgcactcgacactcagcggttcgctgttaccgca

SEQ ID NO: 48828 - DNA, 50 bp, synthetic construct
  source 1..50: mol_type = other DNA
cctccaaatttaaaaacaaattcagatgaatttatagtaaatcttgattt

SEQ ID NO: 48829 - DNA, 50 bp, synthetic construct
  source 1..50: mol_type = other DNA
tgtatcaaaatgaacactcataccgaagtgtgagttctgaaattgataca

SEQ ID NO: 48830 - DNA, 50 bp, synthetic construct
  source 1..50: mol_type = other DNA
aggcttttatcaattcccctgttttaaaacagggttaaaagttgaaaaaa

SEQ ID NO: 48831 - DNA, 50 bp, synthetic construct
  source 1..50: mol_type = other DNA
catgttgtgcaattgttactcttaaataagagtcacatcataattagatt

SEQ ID NO: 48832 - DNA, 50 bp, synthetic construct
  source 1..50: mol_type = other DNA
ctgcttccaaggtccaccggaccttgcgtagtgttgctacaacgaagcaa

SEQ ID NO: 48833 - DNA, 50 bp, synthetic construct
  source 1..50: mol_type = other DNA
cttccatttttgcttccgctaatccagataagcggagggaaaaagggtta

SEQ ID NO: 48834 - DNA, 50 bp, synthetic construct
  source 1..50: mol_type = other DNA
tgtagcaacactacgcactccacatgtgtagtctgttccttgagaataca

SEQ ID NO: 48835 - DNA, 50 bp, synthetic construct
  source 1..50: mol_type = other DNA
tgtattaaaatgagtactaataccgaagtgtgagttctgaaattgataca

SEQ ID NO: 48836 - DNA, 50 bp, synthetic construct
  source 1..50: mol_type = other DNA
aatctaattatgatgtgactcttatttaagagtaacagttgcacaacctg

SEQ ID NO: 48837 - DNA, 50 bp, synthetic construct
  source 1..50: mol_type = other DNA
attataccgcccacagagtaacgtatttgagagcggaagcccgatttacc

SEQ ID NO: 48838 - DNA, 50 bp, synthetic construct
  source 1..50: mol_type = other DNA
acctgtcattattatgacacaatccctcttatgtcaagtaactgacacta

SEQ ID NO: 48839 - DNA, 50 bp, synthetic construct
  source 1..50: mol_type = other DNA
gttacaaagatggtaagctactctcctgggtatttttgcatcaagaatcc

SEQ ID NO: 48840 - DNA, 50 bp, synthetic construct
  source 1..50: mol_type = other DNA
ggcttcctgttcggcaccgataatgccaaatcatgaaaaaacaaatcgac

SEQ ID NO: 48841 - DNA, 50 bp, synthetic construct
  source 1..50: mol_type = other DNA
aaaagctaacatgtttgattctccagataaaatcaaacctaaaatcttaa

SEQ ID NO: 48842 - DNA, 50 bp, synthetic construct
  source 1..50: mol_type = other DNA
ttttttgatttctccccatcccctgaaggggaagcaaagatcgtaaaact

SEQ ID NO: 48843 - DNA, 50 bp, synthetic construct
  source 1..50: mol_type = other DNA
ccggtagagccgtttgaaaagagggccctcttttttcattccgttatcgg

SEQ ID NO: 48844 - DNA, 50 bp, synthetic construct
  source 1..50: mol_type = other DNA
cttacccgctttatattggttaagtgcttaagtcgggtaatgctttacgg

SEQ ID NO: 48845 - DNA, 50 bp, synthetic construct
  source 1..50: mol_type = other DNA
gtataaatgtaatattttaggtatatgtacctaaaatttatatttaataa

SEQ ID NO: 48846 - DNA, 50 bp, synthetic construct
  source 1..50: mol_type = other DNA
agttaccttaattgagatgttaattgatagagatgagcgaaataaaaact

SEQ ID NO: 48847 - DNA, 50 bp, synthetic construct
  source 1..50: mol_type = other DNA
cagtacccatattcgtcccactctccatattgtaccgaaaacgggaactg

SEQ ID NO: 48848 - DNA, 50 bp, synthetic construct
  source 1..50: mol_type = other DNA
ttataacgataggggcatagtcggtgaagtctacagtcgaacgggttttc

SEQ ID NO: 48849 - DNA, 50 bp, synthetic construct
  source 1..50: mol_type = other DNA
tttgtggtctattcaataaaaacagcagttcttgggggaaatgccgtaaa

SEQ ID NO: 48850 - DNA, 50 bp, synthetic construct
  source 1..50: mol_type = other DNA
aaagaacaagtgttccgcttgcgataagtatggcatttcacttgtaggga

SEQ ID NO: 48851 - DNA, 50 bp, synthetic construct
  source 1..50: mol_type = other DNA
atttctgtccaaccactgcattctttttgatggaggaattatgaagaaaa

SEQ ID NO: 48852 - DNA, 50 bp, synthetic construct
  source 1..50: mol_type = other DNA
tgtcattaccctgttggcgtcaacctaattacaccaacaaggtgacgaca

SEQ ID NO: 48853 - DNA, 50 bp, synthetic construct
  source 1..50: mol_type = other DNA
aatagtagttttatttttgtctgtatagggacataaattataaaccgaga

SEQ ID NO: 48854 - DNA, 50 bp, synthetic construct
  source 1..50: mol_type = other DNA
ctacttgccgtattcggtaaagttaatgctctacggaagttttctgtgaa

SEQ ID NO: 48855 - DNA, 50 bp, synthetic construct
  source 1..50: mol_type = other DNA
tcttttgttgcacttttattcacgaacctgtataaaagtgcaacatttaa

SEQ ID NO: 48856 - DNA, 50 bp, synthetic construct
  source 1..50: mol_type = other DNA
aaagccttgtatttacagtgttcctaggaaaacacactgtcaaaggggtt

SEQ ID NO: 48857 - DNA, 50 bp, synthetic construct
  source 1..50: mol_type = other DNA
gcataaagggataggggtacagtttaaactgaaccccatgtgcttactgt

SEQ ID NO: 48858 - DNA, 50 bp, synthetic construct
  source 1..50: mol_type = other DNA
ggaactttgttgggacaacgaaagtagttcttttatcccacaaaaaagcc

SEQ ID NO: 48859 - DNA, 50 bp, synthetic construct
  source 1..50: mol_type = other DNA
ttaaaaacatccttaccaaaccctcaaggctttgataaggatggtagtag

SEQ ID NO: 48860 - DNA, 50 bp, synthetic construct
  source 1..50: mol_type = other DNA
gtggattagttgcatcttggatgtgctcgtagaagatgcaactaataaat

SEQ ID NO: 48861 - DNA, 50 bp, synthetic construct
  source 1..50: mol_type = other DNA
aaactcagtatgtatctagggagaaatgttccgagatacatactgaaagt

SEQ ID NO: 48862 - DNA, 50 bp, synthetic construct
  source 1..50: mol_type = other DNA
tgattaaaaaactattgacattttgtaagtttgaagagacttcttaatca

SEQ ID NO: 48863 - DNA, 50 bp, synthetic construct
  source 1..50: mol_type = other DNA
tacttccatcttgtatgtgctgattcgtttgcacatacaagatggaagta

SEQ ID NO: 48864 - DNA, 50 bp, synthetic construct
  source 1..50: mol_type = other DNA
agaacgagtgaggataggattgcggtcattaattcgctttatctgttcgt

SEQ ID NO: 48865 - DNA, 50 bp, synthetic construct
  source 1..50: mol_type = other DNA
aaatttccactataatacattatcccaatagagtaagataaaggaaacga

SEQ ID NO: 48866 - DNA, 50 bp, synthetic construct
  source 1..50: mol_type = other DNA
tccttgttttgctttgtgcttctctaaagaagcaatagaaatgtaaaaaa

SEQ ID NO: 48867 - DNA, 50 bp, synthetic construct
  source 1..50: mol_type = other DNA
tgattgaaaaaagtaaaggagtcatatggcacatttaaagcacatcacaa

SEQ ID NO: 48868 - DNA, 50 bp, synthetic construct
  source 1..50: mol_type = other DNA
acgaccagaacaatatgtgtacaaatgggaacaaattagatcaatgcctg

SEQ ID NO: 48869 - DNA, 50 bp, synthetic construct
  source 1..50: mol_type = other DNA
aaaattttagttattgtgggttgacatgtacccacaataacacgagagga

SEQ ID NO: 48870 - DNA, 50 bp, synthetic construct
  source 1..50: mol_type = other DNA
ataaacagaaaaaagggtagatgatgggatataaccaaatttaattatat

SEQ ID NO: 48871 - DNA, 50 bp, synthetic construct
  source 1..50: mol_type = other DNA
gtcatgtagccggacgatgtacgaggatccctcctaagagggagatagtt

SEQ ID NO: 48872 - DNA, 50 bp, synthetic construct
  source 1..50: mol_type = other DNA
atttgtactaacttaacactgcccactggtagtgtcacattagtacaaca

SEQ ID NO: 48873 - DNA, 50 bp, synthetic construct
  source 1..50: mol_type = other DNA
ttgtttgtataagcataacacacttgagtgtgtgacgcttattacaacat

SEQ ID NO: 48874 - DNA, 50 bp, synthetic construct
  source 1..50: mol_type = other DNA
tgtagcaacactacgcactccacgtgtgtagtctgttccttgagaataca

SEQ ID NO: 48875 - DNA, 50 bp, synthetic construct
  source 1..50: mol_type = other DNA
tgttcctatcctatggacaacacacatgtggagtgcatagcattgataca

SEQ ID NO: 48876 - DNA, 50 bp, synthetic construct
  source 1..50: mol_type = other DNA
ttattaaatataaattttaggtacatatacctaaaatattacatttatac

SEQ ID NO: 48877 - DNA, 50 bp, synthetic construct
  source 1..50: mol_type = other DNA
tgttcctatccaatgcacaacacacatgtggagtgcatagcgttgataca

SEQ ID NO: 48878 - DNA, 50 bp, synthetic construct
  source 1..50: mol_type = other DNA
aagtagagctttttttatttgcactagtgcaaataaaatcaatatcctat

SEQ ID NO: 48879 - DNA, 50 bp, synthetic construct
  source 1..50: mol_type = other DNA
tttatacaacattattctgtatttgaaaataaagagcaatgttgtacatc

SEQ ID NO: 48880 - DNA, 50 bp, synthetic construct
  source 1..50: mol_type = other DNA
taaatcctttgctattaagtaacaattgtttcatatttaaaaagtgattg

SEQ ID NO: 48881 - DNA, 50 bp, synthetic construct
  source 1..50: mol_type = other DNA
gcttatcgacattaagtttggacaattgtccaaacctatattcaaatctt

SEQ ID NO: 48882 - DNA, 50 bp, synthetic construct
  source 1..50: mol_type = other DNA
aggaactgtcctactagtaacgcttgcatatgccgtactggataattcca

SEQ ID NO: 48883 - DNA, 50 bp, synthetic construct
  source 1..50: mol_type = other DNA
ctaagtagggataaagcatttcacgcaattgatggctaaataaagagggc

SEQ ID NO: 48884 - DNA, 50 bp, synthetic construct
  source 1..50: mol_type = other DNA
gatgtacaacattgctctttattttcaaatacagaataatgttgcatata

SEQ ID NO: 48885 - DNA, 50 bp, synthetic construct
  source 1..50: mol_type = other DNA
ttaggatattgattttatttgcactagtgcaaacaaaaaaagctctactt

SEQ ID NO: 48886 - DNA, 50 bp, synthetic construct
  source 1..50: mol_type = other DNA
gggctttttttgtttgcactaaaatttattagtgcaaataaaatcaatat

SEQ ID NO: 48887 - DNA, 50 bp, synthetic construct
  source 1..50: mol_type = other DNA
aaagtcggacagatccaacactttcgaaagtggcgaatctgtccgacttt

SEQ ID NO: 48888 - DNA, 50 bp, synthetic construct
  source 1..50: mol_type = other DNA
aatgctgtaatgcaatagttgtacaaaatggaaatttgtattacagcagt

SEQ ID NO: 48889 - DNA, 50 bp, synthetic construct
  source 1..50: mol_type = other DNA
atgaggtcttttgttgacaatctgctgatgttgtgatccaaagacctctc

SEQ ID NO: 48890 - DNA, 50 bp, synthetic construct
  source 1..50: mol_type = other DNA
acctgtcggtgataaagttggtagcgtcttaatctttatcacctacagca

SEQ ID NO: 48891 - DNA, 50 bp, synthetic construct
  source 1..50: mol_type = other DNA
aaactgacaagtgtacctttgatattcatcaaggtaactcttgtcaattt

SEQ ID NO: 48892 - DNA, 50 bp, synthetic construct
  source 1..50: mol_type = other DNA
aaactgacaagagttaccttgatgaagatcaaagggacacttgtcaattt

SEQ ID NO: 48893 - DNA, 50 bp, synthetic construct
  source 1..50: mol_type = other DNA
aaagtgcgcgttatagttcgtctcgggagccaattcagaacggaactgcg

SEQ ID NO: 48894 - DNA, 50 bp, synthetic construct
  source 1..50: mol_type = other DNA
ctagataatcttgatacttcatttataacaaaagtaaaaaatctaactaa

SEQ ID NO: 48895 - DNA, 50 bp, synthetic construct
  source 1..50: mol_type = other DNA
aaatttatatcttttgtatcaacgcttttgattgggaacataatttttta

SEQ ID NO: 48896 - DNA, 50 bp, synthetic construct
  source 1..50: mol_type = other DNA
accaactgagctaaagcggcgtggcgcgacgccgccgagcacgtcctgca

SEQ ID NO: 48897 - DNA, 50 bp, synthetic construct
  source 1..50: mol_type = other DNA
atgaggaatatagaaaatatggcaagagtgatatatactataccccttta

SEQ ID NO: 48898 - DNA, 50 bp, synthetic construct
  source 1..50: mol_type = other DNA
tttttctgcgtgttgtgttgaaaaattttgcaatgccctaaatcaaaaat

SEQ ID NO: 48899 - DNA, 50 bp, synthetic construct
  source 1..50: mol_type = other DNA
atcattaaccgatacgcagagacataagtgatgcggtttttattaattag

SEQ ID NO: 48900 - DNA, 50 bp, synthetic construct
  source 1..50: mol_type = other DNA
aaaaatcgcatcattaaccgatacgcatatcataaatgatgcggtttttt

SEQ ID NO: 48901 - DNA, 50 bp, synthetic construct
  source 1..50: mol_type = other DNA
ttttgggttaataatacgtttactagaggaaatggaccattaacccaaaa

SEQ ID NO: 48902 - DNA, 50 bp, synthetic construct
  source 1..50: mol_type = other DNA
tagtcattatcttgataaacagataaagctgtatttaatgatactgacta

SEQ ID NO: 48903 - DNA, 50 bp, synthetic construct
  source 1..50: mol_type = other DNA
aaaaaaaccgctactaaagaggatatctccgcatcactgcggtttttaaa

SEQ ID NO: 48904 - DNA, 50 bp, synthetic construct
  source 1..50: mol_type = other DNA
ttatggctaatgctacaatgccgaattcggttttctttagatgttcacct

SEQ ID NO: 48905 - DNA, 50 bp, synthetic construct
  source 1..50: mol_type = other DNA
cacagttaaatgaataccattttatacaatgtggtattgatatgtaataa

SEQ ID NO: 48906 - DNA, 50 bp, synthetic construct
  source 1..50: mol_type = other DNA
gtttaggtgcccatgtagtgtatttaaatacaccacctaaagcgatacaa

SEQ ID NO: 48907 - DNA, 50 bp, synthetic construct
  source 1..50: mol_type = other DNA
cacagggtgcataagaaagtgaagattttcacttcctaaaacaccccctt

SEQ ID NO: 48908 - DNA, 50 bp, synthetic construct
  source 1..50: mol_type = other DNA
ctttaggtagtgtatttaaatgtgtcaaggtctaaatacactatgaggat

SEQ ID NO: 48909 - DNA, 50 bp, synthetic construct
  source 1..50: mol_type = other DNA
ttttagatggtgtatttaaacgtgtcaaggtctaaatacactatgaggtt

SEQ ID NO: 48910 - DNA, 50 bp, synthetic construct
  source 1..50: mol_type = other DNA
ggtgagcggattggcgtgccgcgcctgcaaggcacgaatgacaggggttt

SEQ ID NO: 48911 - DNA, 50 bp, synthetic construct
  source 1..50: mol_type = other DNA
aggacagggttcaagttgagtcccctcggacaccaaaacggtcacgtttg

SEQ ID NO: 48912 - DNA, 50 bp, synthetic construct
  source 1..50: mol_type = other DNA
cttaccgctgctaccgagtaggatcgtttctaacacaacgcaaatggatc

SEQ ID NO: 48913 - DNA, 50 bp, synthetic construct
  source 1..50: mol_type = other DNA
ctagttgcgactgaccgaagagggtcccccgctcgcggccaacggcgggc

SEQ ID NO: 48914 - DNA, 50 bp, synthetic construct
  source 1..50: mol_type = other DNA
ggtttggacaatgatgagcacgttgagacggtagcacttttgtccaaact

SEQ ID NO: 48915 - DNA, 50 bp, synthetic construct
  source 1..50: mol_type = other DNA
aaaaggttaatgctaccaactagtacagttgttggcaatatttaccttta

SEQ ID NO: 48916 - DNA, 50 bp, synthetic construct
  source 1..50: mol_type = other DNA
ccccgcggtaagggctgtggtccgagcgccagccagccctcgacgcggcg

SEQ ID NO: 48917 - DNA, 50 bp, synthetic construct
  source 1..50: mol_type = other DNA
actacgcggcggccttgatcaggcggaagggctcaaggccgagccgatga

SEQ ID NO: 48918 - DNA, 50 bp, synthetic construct
  source 1..50: mol_type = other DNA
tcccccgacttacgtactacaggcaactggatgagggtagttacggatac

SEQ ID NO: 48919 - DNA, 50 bp, synthetic construct
  source 1..50: mol_type = other DNA
gttccagtcaggccccttgtcgcccataagaagattgttggaacccggta

SEQ ID NO: 48920 - DNA, 50 bp, synthetic construct
  source 1..50: mol_type = other DNA
ttgtctccaaaagttttttacaaaaattctgaaacaagctccagcagcat

SEQ ID NO: 48921 - DNA, 50 bp, synthetic construct
  source 1..50: mol_type = other DNA
ttggttccgtcggggccatgtgcgcgcccaggatacgcccacgaaaccac

SEQ ID NO: 48922 - DNA, 50 bp, synthetic construct
  source 1..50: mol_type = other DNA
gacctacccaaaaaattacaggttaatacctgtaagaaacgggcttacag

SEQ ID NO: 48923 - DNA, 50 bp, synthetic construct
  source 1..50: mol_type = other DNA
tcaatgctcaagcagtgtattgttgcaacaattacctaccaaaagcttga

SEQ ID NO: 48924 - DNA, 50 bp, synthetic construct
  source 1..50: mol_type = other DNA
ctactatttctaagaaatttaccatataagggtttcagaggtaatatgtg

SEQ ID NO: 48925 - DNA, 50 bp, synthetic construct
  source 1..50: mol_type = other DNA
agtatatattgcgcatcttacgggcaacccaaagacactagacctatact

SEQ ID NO: 48926 - DNA, 50 bp, synthetic construct
  source 1..50: mol_type = other DNA
ttgcaaatgcttattttgcaaggtcttttttgcgtgataatcatacaagt

SEQ ID NO: 48927 - DNA, 50 bp, synthetic construct
  source 1..50: mol_type = other DNA
tttagtacctcaatttctctcgctggacggagaacaaacgagaaactaaa

SEQ ID NO: 48928 - DNA, 50 bp, synthetic construct
  source 1..50: mol_type = other DNA
catggattcttcttataaaaatacagttatttttgaggaaagatgtagag

SEQ ID NO: 48929 - DNA, 50 bp, synthetic construct
  source 1..50: mol_type = other DNA
accacagaatacaaacaaaccaataaactaatttgtattgactcatcgaa

SEQ ID NO: 48930 - DNA, 50 bp, synthetic construct
  source 1..50: mol_type = other DNA
tctgaaacccttatatatcaacgatttctttcttgcataattcggacgga

SEQ ID NO: 48931 - DNA, 50 bp, synthetic construct
  source 1..50: mol_type = other DNA
actgccgcaaatcacttagtagctttacctacaggccggtttggcttagt

SEQ ID NO: 48932 - DNA, 50 bp, synthetic construct
  source 1..50: mol_type = other DNA
atggaacctttcacagaacacatccagctatgttaggctatacgttccat

SEQ ID NO: 48933 - DNA, 50 bp, synthetic construct
  source 1..50: mol_type = other DNA
atttactcggaaaatcataccacttgggtaaacgatttttcagtgggaaa

SEQ ID NO: 48934 - DNA, 50 bp, synthetic construct
  source 1..50: mol_type = other DNA
ttgggtgttttgtcacacaacattagcaagttgtggtaaaatacacccaa

SEQ ID NO: 48935 - DNA, 50 bp, synthetic construct
  source 1..50: mol_type = other DNA
agttgcattgccgacttcttctcgcagcaataacaccatgaaaaccaatt

SEQ ID NO: 48936 - DNA, 50 bp, synthetic construct
  source 1..50: mol_type = other DNA
tgtcgttaccttattggcgtcaacctaattacaccaacaaggtgacgaca

SEQ ID NO: 48937 - DNA, 50 bp, synthetic construct
  source 1..50: mol_type = other DNA
tagttttaaagattctacaaaaagaggcttttgtataaaatgctagaatg

SEQ ID NO: 48938 - DNA, 50 bp, synthetic construct
  source 1..50: mol_type = other DNA
tgtatattttggggatcttaggggcaccctagcgatataaaccctacacg

SEQ ID NO: 48939 - DNA, 50 bp, synthetic construct
  source 1..50: mol_type = other DNA
cagatgtatttcactttacgctgcttccagcgtactatagaatacatatt

SEQ ID NO: 48940 - DNA, 50 bp, synthetic construct
  source 1..50: mol_type = other DNA
acatcggcaaatatcaattatacctacacctcattaagaattgaggcgta

SEQ ID NO: 48941 - DNA, 50 bp, synthetic construct
  source 1..50: mol_type = other DNA
agtaacatattgaattttaaagaggccaaacacaaaagggatctgtattg

SEQ ID NO: 48942 - DNA, 50 bp, synthetic construct
  source 1..50: mol_type = other DNA
ttaaggtgaatagtgccaacatttactattaatggaaatattaacctttt

SEQ ID NO: 48943 - DNA, 50 bp, synthetic construct
  source 1..50: mol_type = other DNA
ccctaactcaccctcagagatgtttaggatactcgttacttagtgaataa

SEQ ID NO: 48944 - DNA, 50 bp, synthetic construct
  source 1..50: mol_type = other DNA
ccctcacatactacctttcatttcaaaaaatgctccgtcctatttgttat

SEQ ID NO: 48945 - DNA, 50 bp, synthetic construct
  source 1..50: mol_type = other DNA
atcctcatagtgtatttagaccttgacacgtttaaatacaccatctaaag

SEQ ID NO: 48946 - DNA, 50 bp, synthetic construct
  source 1..50: mol_type = other DNA
atctggtggcaactttggttcgagtattcgaaccatggtttgagtagacc

SEQ ID NO: 48947 - DNA, 50 bp, synthetic construct
  source 1..50: mol_type = other DNA
gttggtgcataatgctacaacaataacaggttgtgccctattgcaccaat

SEQ ID NO: 48948 - DNA, 50 bp, synthetic construct
  source 1..50: mol_type = other DNA
aaaaggttaatattgcataagtacttaatggtgtgtagtatttacctttt

SEQ ID NO: 48949 - DNA, 50 bp, synthetic construct
  source 1..50: mol_type = other DNA
ataagtgcatcataatctgtatagtaacgtattcattgcaatgcagtttt

SEQ ID NO: 48950 - DNA, 50 bp, synthetic construct
  source 1..50: mol_type = other DNA
ttacatttattggtatttactattgtaatagcaaatactaaaaaataaaa

SEQ ID NO: 48951 - DNA, 50 bp, synthetic construct
  source 1..50: mol_type = other DNA
tagtgtacatagctctacaatagcaggcattaaggaagttaaacacacta

SEQ ID NO: 48952 - DNA, 50 bp, synthetic construct
  source 1..50: mol_type = other DNA
aactgattgtacaaaaaaatgtctaagtacattatttatagtatttagta

SEQ ID NO: 48953 - DNA, 50 bp, synthetic construct
  source 1..50: mol_type = other DNA
atacgcaaaagcaaactgtagtttttaacatgaaaaaagtatttgtgtat

SEQ ID NO: 48954 - DNA, 50 bp, synthetic construct
  source 1..50: mol_type = other DNA
cgtgtagggtttatatcgctagggtgcccaaaagatagccaacctatact

SEQ ID NO: 48955 - DNA, 50 bp, synthetic construct
  source 1..50: mol_type = other DNA
gggctcagtgtacagctagggaagagcttcgctaccacgacaggcaggcc

SEQ ID NO: 48956 - DNA, 50 bp, synthetic construct
  source 1..50: mol_type = other DNA
ttctctcttgtttgttaatcatggtttgagcataaaaaaattagagagga

SEQ ID NO: 48957 - DNA, 50 bp, synthetic construct
  source 1..50: mol_type = other DNA
tttttcaggaagtatctttcagttttaaattcaagatagaaacgaaaaaa

SEQ ID NO: 48958 - DNA, 50 bp, synthetic construct
  source 1..50: mol_type = other DNA
taaagcctagtacggtagatatcagaggatttcggccagaccctcggctt

SEQ ID NO: 48959 - DNA, 50 bp, synthetic construct
  source 1..50: mol_type = other DNA
atacgtgtttagctatgtaaaagcactagtattcttgccttaacactcat

SEQ ID NO: 48960 - DNA, 50 bp, synthetic construct
  source 1..50: mol_type = other DNA
cggcgagcgcaggctacggccttgcccaagggtcggctctgccacccgcg

SEQ ID NO: 48961 - DNA, 50 bp, synthetic construct
  source 1..50: mol_type = other DNA
ctcggcactttcaacaataatgtctcgcagtttttgggggaaatgccgta

SEQ ID NO: 48962 - DNA, 50 bp, synthetic construct
  source 1..50: mol_type = other DNA
ggatgagatgctggcgtgtttaattgcttgttcatgtgtacaatctgcaa

SEQ ID NO: 48963 - DNA, 50 bp, synthetic construct
  source 1..50: mol_type = other DNA
atgtcgtcaatcatacagttgactaatgacaactaaatgttatactacat

SEQ ID NO: 48964 - DNA, 50 bp, synthetic construct
  source 1..50: mol_type = other DNA
gggatgtgtgagattcacccctaccagggggtggtattctcacacttcca

SEQ ID NO: 48965 - DNA, 50 bp, synthetic construct
  source 1..50: mol_type = other DNA
ccaactcgcttaattgcgagtttttaaaaaactccttttaaggagtttct

SEQ ID NO: 48966 - DNA, 50 bp, synthetic construct
  source 1..50: mol_type = other DNA
tagttatcagtcataccactgacgtacgggcaattcagcaaccatttgtg

SEQ ID NO: 48967 - DNA, 50 bp, synthetic construct
  source 1..50: mol_type = other DNA
gttctcatagtgtatttagaccttgacacgtttaaatacaccacctaaaa

SEQ ID NO: 48968 - DNA, 50 bp, synthetic construct
  source 1..50: mol_type = other DNA
gtgataaactcccatgcaattgattaaaatcttgtcaagccctttgtcaa

SEQ ID NO: 48969 - DNA, 50 bp, synthetic construct
  source 1..50: mol_type = other DNA
tctagaatctactctcgcataacaataattttgcgagttttaggtttcga

SEQ ID NO: 48970 - DNA, 50 bp, synthetic construct
  source 1..50: mol_type = other DNA
ttgagatttccatcagaatccctcctatatagtattgaaataattctagc

SEQ ID NO: 48971 - DNA, 50 bp, synthetic construct
  source 1..50: mol_type = other DNA
tgaatgacttcttgtggtaaggtttcaaatcagccattgctagtcatcca

SEQ ID NO: 48972 - DNA, 50 bp, synthetic construct
  source 1..50: mol_type = other DNA
ctctaaatcctttatttatcaagcatgtttgataattttaaaaactcaga

SEQ ID NO: 48973 - DNA, 50 bp, synthetic construct
  source 1..50: mol_type = other DNA
tttagtttctcgattcgtctccgtccagcgagagaaattgaggtactaaa

SEQ ID NO: 48974 - DNA, 50 bp, synthetic construct
  source 1..50: mol_type = other DNA
atggcggcgtactgttagtgatacaatatcagcgaagggcaggccgccat

SEQ ID NO: 48975 - DNA, 50 bp, synthetic construct
  source 1..50: mol_type = other DNA
cgtgttttgccaacacagaacggatattcgttcgtagtagttcaatcgga

SEQ ID NO: 48976 - DNA, 50 bp, synthetic construct
  source 1..50: mol_type = other DNA
cgtgtttcgatgggtgtataatattaagtgtgtcaacccattattactaa

SEQ ID NO: 48977 - DNA, 50 bp, synthetic construct
  source 1..50: mol_type = other DNA
tattttatcacaatggtaataatgtacattgttaccatttttcaaaatga

SEQ ID NO: 48978 - DNA, 50 bp, synthetic construct
  source 1..50: mol_type = other DNA
cgatcaataattttgacttttgggcaccctaatgataaaaatccaatctt

SEQ ID NO: 48979 - DNA, 50 bp, synthetic construct
  source 1..50: mol_type = other DNA
ggtttatatgtaatatccttcgggcacccgagagatactacacctatact

SEQ ID NO: 48980 - DNA, 50 bp, synthetic construct
  source 1..50: mol_type = other DNA
gagccggcagcaggagtatatttcaaaccctatactcctgcgatccgaca

SEQ ID NO: 48981 - DNA, 50 bp, synthetic construct
  source 1..50: mol_type = other DNA
aatcatttactaagtaaaaatcaaaaccgaattattagtaataaattaaa

SEQ ID NO: 48982 - DNA, 50 bp, synthetic construct
  source 1..50: mol_type = other DNA
ccccctcgcgttattgtgggggcattgtaaaccctaataactaaaatttt

SEQ ID NO: 48983 - DNA, 50 bp, synthetic construct
  source 1..50: mol_type = other DNA
tcgatggcgctacccctgccggcagcactggccaggcagcaggccaccga

SEQ ID NO: 48984 - DNA, 50 bp, synthetic construct
  source 1..50: mol_type = other DNA
acgtgctggtggaaaagccgatcgcgcgatcatctcagtgctatcgaccc

SEQ ID NO: 48985 - DNA, 50 bp, synthetic construct
  source 1..50: mol_type = other DNA
gttcttgtttttgccaattttgttgcgttaaaaccggtgggaacgacatg

SEQ ID NO: 48986 - DNA, 50 bp, synthetic construct
  source 1..50: mol_type = other DNA
tgtggtctattcaataaaaacagctcgcagtttttgggggaaatgccgta

SEQ ID NO: 48987 - DNA, 50 bp, synthetic construct
  source 1..50: mol_type = other DNA
aagattggatttttatcattagggtgcccgaaagtcaaaattattgatag

SEQ ID NO: 48988 - DNA, 50 bp, synthetic construct
  source 1..50: mol_type = other DNA
aataaaatggttcgaaaattgtcccgggacaaagtagaaaaatctacttt

SEQ ID NO: 48989 - DNA, 50 bp, synthetic construct
  source 1..50: mol_type = other DNA
tttagtacctcgttatctctcgctggaagaagaagaaacgagaaactaaa

SEQ ID NO: 48990 - DNA, 50 bp, synthetic construct
  source 1..50: mol_type = other DNA
ttcgggtggcgtcaatgtcgcgcgcgcccgagaaaacgccgagcccctcc

SEQ ID NO: 48991 - DNA, 50 bp, synthetic construct
  source 1..50: mol_type = other DNA
gacagctatccactcatctcaaaacacgttgagacggtggtattgatgtc

SEQ ID NO: 48992 - DNA, 50 bp, synthetic construct
  source 1..50: mol_type = other DNA
tcgattcgctttcccgtaggcgcgctcgaaggtgcgggcgagcgcttcga

SEQ ID NO: 48993 - DNA, 50 bp, synthetic construct
  source 1..50: mol_type = other DNA
aggcgaacagctaaagaaaaccgaattcggcattgtagcattagccataa

SEQ ID NO: 48994 - DNA, 50 bp, synthetic construct
  source 1..50: mol_type = other DNA
tttagtttctcgtttcttcttcttccaacgagagaaaacgaggaactaaa

SEQ ID NO: 48995 - DNA, 50 bp, synthetic construct
  source 1..50: mol_type = other DNA
actgataggtattgacactttgggttccctatcttatcataccaatcata

SEQ ID NO: 48996 - DNA, 50 bp, synthetic construct
  source 1..50: mol_type = other DNA
gatcacaccatacgaattgactacgcataacctgttcgtatagcgctatg

SEQ ID NO: 48997 - DNA, 50 bp, synthetic construct
  source 1..50: mol_type = other DNA
atggaacgtatagcctaacatagctggatgtgttctgtgaaaggttccat

SEQ ID NO: 48998 - DNA, 50 bp, synthetic construct
  source 1..50: mol_type = other DNA
atagtgtatttagaccttgatgatttattagacacgtttaaatacaccat

SEQ ID NO: 48999 - DNA, 50 bp, synthetic construct
  source 1..50: mol_type = other DNA
cgctctttcttgttgatgggtgtatgtcaacccgtctatagtaaaatttt

SEQ ID NO: 49000 - DNA, 50 bp, synthetic construct
  source 1..50: mol_type = other DNA
ctcgtgctgtctcgttatgattggtacctatcagtatgattttttttgca

SEQ ID NO: 49001 - DNA, 50 bp, synthetic construct
  source 1..50: mol_type = other DNA
gattagggtgccatttttttgtatttatacaaaaaatctaggtcattgaa

SEQ ID NO: 49002 - DNA, 50 bp, synthetic construct
  source 1..50: mol_type = other DNA
ataatagtaagccataaaatgttttgaatcgtttaatccttttctatcaa

SEQ ID NO: 49003 - DNA, 50 bp, synthetic construct
  source 1..50: mol_type = other DNA
gttttgaatttcttggtcatttcttttgaaattagaaagattgctcaaaa

SEQ ID NO: 49004 - DNA, 50 bp, synthetic construct
  source 1..50: mol_type = other DNA
tctccattaaaataaactaatactcaaactttaatatataataaatcact

SEQ ID NO: 49005 - DNA, 50 bp, synthetic construct
  source 1..50: mol_type = other DNA
tccaatcaagatttcccatctccattttaagataggagaatatttttgac

SEQ ID NO: 49006 - DNA, 50 bp, synthetic construct
  source 1..50: mol_type = other DNA
acatctagttttggctttatcggatatgaaaagattaaaaaactatttgg

SEQ ID NO: 49007 - DNA, 50 bp, synthetic construct
  source 1..50: mol_type = other DNA
gcagaacgcgcgactttccgactggccgcccggaaagacgagcgatcgct

SEQ ID NO: 49008 - DNA, 50 bp, synthetic construct
  source 1..50: mol_type = other DNA
gatcagttagaaactagaaaaacaacatacattctgttttataactaatt

SEQ ID NO: 49009 - DNA, 50 bp, synthetic construct
  source 1..50: mol_type = other DNA
tactctctcgtttcgatgggtgtatgtcaacccaccacattaaaaatttt

SEQ ID NO: 49010 - DNA, 50 bp, synthetic construct
  source 1..50: mol_type = other DNA
cgtgaaaaagactgattttttcatttatgaaaaaagccggactttatatt

SEQ ID NO: 49011 - DNA, 50 bp, synthetic construct
  source 1..50: mol_type = other DNA
accccatgccgcccacagaccgggcttcctccgattgggcggctgcatac

SEQ ID NO: 49012 - DNA, 50 bp, synthetic construct
  source 1..50: mol_type = other DNA
aaaaggtggtgagataaatggcatatatttatttagatacatatcttttg

SEQ ID NO: 49013 - DNA, 50 bp, synthetic construct
  source 1..50: mol_type = other DNA
attggcggtttttgcattgacttttaatggtaaatgatgatataaacaat

SEQ ID NO: 49014 - DNA, 50 bp, synthetic construct
  source 1..50: mol_type = other DNA
cggcacgcagacgggtcgctgcctacaggcgtttacccgtatgccgagca

SEQ ID NO: 49015 - DNA, 50 bp, synthetic construct
  source 1..50: mol_type = other DNA
ttctcatgcccagaaatcatggcaactgccacgattgcggcgatcgagaa

SEQ ID NO: 49016 - DNA, 50 bp, synthetic construct
  source 1..50: mol_type = other DNA
ctcctcctttcacagtgataatatatattttgagtatctgtaaggtacag

SEQ ID NO: 49017 - DNA, 50 bp, synthetic construct
  source 1..50: mol_type = other DNA
agtggagggattttgaaatattttataaaaagtaacgggattttgggatt

SEQ ID NO: 49018 - DNA, 50 bp, synthetic construct
  source 1..50: mol_type = other DNA
tcagccagtacgatagccggtttagtaaaaaggaatatccatctgggaga

SEQ ID NO: 49019 - DNA, 50 bp, synthetic construct
  source 1..50: mol_type = other DNA
gttaatattttagcctagcatttttaaattacttaattagaacagcatct

SEQ ID NO: 49020 - DNA, 50 bp, synthetic construct
  source 1..50: mol_type = other DNA
ataaagactaggtaaataaatataattatatgcatctaatacatttttaa

SEQ ID NO: 49021 - DNA, 50 bp, synthetic construct
  source 1..50: mol_type = other DNA
aacctccttctttcaagaaaataatattattttcttctcttaatatctta

SEQ ID NO: 49022 - DNA, 50 bp, synthetic construct
  source 1..50: mol_type = other DNA
taaactataaaataaacagctacaaagatagagttgtattttttagtatg

SEQ ID NO: 49023 - DNA, 50 bp, synthetic construct
  source 1..50: mol_type = other DNA
cagcagaacaagtaaaagagttattttcaaggttggatgattttctgcct

SEQ ID NO: 49024 - DNA, 50 bp, synthetic construct
  source 1..50: mol_type = other DNA
tcattttttctttatattttaaagttatcctaataatgtaggaaaaatga

SEQ ID NO: 49025 - DNA, 50 bp, synthetic construct
  source 1..50: mol_type = other DNA
gtgtatcaatagaaaggtctcttcagggttacacctttcttatgatacac

SEQ ID NO: 49026 - DNA, 50 bp, synthetic construct
  source 1..50: mol_type = other DNA
ccgagcgtctgcgccgaaaccaagttcagccgctcggcggcatcgcgcag

SEQ ID NO: 49027 - DNA, 50 bp, synthetic construct
  source 1..50: mol_type = other DNA
ttaagcggcttcaggctgtgtatgtacatacacaggcgcaagtgcactgt

SEQ ID NO: 49028 - DNA, 50 bp, synthetic construct
  source 1..50: mol_type = other DNA
gtgccgttgttgaggccgcgcggtcggccaaaacgccagcgtaacgctca

SEQ ID NO: 49029 - DNA, 50 bp, synthetic construct
  source 1..50: mol_type = other DNA
cccagtccccgccttccggcggcgctgaggcgcaaattccgggaactcat

SEQ ID NO: 49030 - DNA, 50 bp, synthetic construct
  source 1..50: mol_type = other DNA
gtccggattgaaggctgcatggcggcgatattctggcgatcgatccggac

SEQ ID NO: 49031 - DNA, 50 bp, synthetic construct
  source 1..50: mol_type = other DNA
ttcaatgacctagattttttgtataaatacaaaaaaatggcaccctaatc

SEQ ID NO: 49032 - DNA, 50 bp, synthetic construct
  source 1..50: mol_type = other DNA
ggcggcgctgatcggcggagggctgcagccgcaggaagtccagcatcgcg

SEQ ID NO: 49033 - DNA, 50 bp, synthetic construct
  source 1..50: mol_type = other DNA
tccctttccaagccggcacaccagatcgggttgcccgggctacgcaggcc

SEQ ID NO: 49034 - DNA, 50 bp, synthetic construct
  source 1..50: mol_type = other DNA
cggcccgtcggcttcagcctttccgccgccaggcacgccttgacgcccta

SEQ ID NO: 49035 - DNA, 50 bp, synthetic construct
  source 1..50: mol_type = other DNA
aacctcatagtgtatttagaccttgacacgtttaaatacactacctaaag

SEQ ID NO: 49036 - DNA, 50 bp, synthetic construct
  source 1..50: mol_type = other DNA
tattgggggttgactacgttcgggtttcctaatatcatgtacccacaata

SEQ ID NO: 49037 - DNA, 50 bp, synthetic construct
  source 1..50: mol_type = other DNA
ctcttgttattgtgggtacatgatatgtagtcaacccaaaataactaaaa

SEQ ID NO: 49038 - DNA, 50 bp, synthetic construct
  source 1..50: mol_type = other DNA
gcatcagctttcgccaaagcgcgcacgggcgatttcttcagcggtgattt

SEQ ID NO: 49039 - DNA, 50 bp, synthetic construct
  source 1..50: mol_type = other DNA
aggtgaacatccaaagaaagccgaattcggcattgtagcattagccataa

SEQ ID NO: 49040 - DNA, 50 bp, synthetic construct
  source 1..50: mol_type = other DNA
tcagaggattcgcagctcgatggccactgagcgccgcaaggatcaattga

SEQ ID NO: 49041 - DNA, 50 bp, synthetic construct
  source 1..50: mol_type = other DNA
tgcctttccaagccggcgcaccaaatcgggtggcccgggttacgcaggcc

SEQ ID NO: 49042 - DNA, 50 bp, synthetic construct
  source 1..50: mol_type = other DNA
gagctgcgtattgtcgatgacgaactgccgatatggcccgcgttgcgctc

SEQ ID NO: 49043 - DNA, 50 bp, synthetic construct
  source 1..50: mol_type = other DNA
tccgtctcgtccgaagatcgaggcgctcctcgtgtttgacccgccctgtc

SEQ ID NO: 49044 - DNA, 50 bp, synthetic construct
  source 1..50: mol_type = other DNA
ggtccacgacacgggagggagcgccggcgcgcggtccgaggagatgcgca

SEQ ID NO: 49045 - DNA, 50 bp, synthetic construct
  source 1..50: mol_type = other DNA
gccgcctctgccacatcctcttcatcagaacgggcagcttgacttatttg

SEQ ID NO: 49046 - DNA, 50 bp, synthetic construct
  source 1..50: mol_type = other DNA
atcactctgaaagccaataatagcaagttatcataatgttctcccataat

SEQ ID NO: 49047 - DNA, 50 bp, synthetic construct
  source 1..50: mol_type = other DNA
aaagaaagccgattgcattttctggctttgacggacaatttggtttctac

SEQ ID NO: 49048 - DNA, 50 bp, synthetic construct
  source 1..50: mol_type = other DNA
cgtttttggtcatgatggctcttcgcgtaggaaatctgcgacaggaaacc

SEQ ID NO: 49049 - DNA, 50 bp, synthetic construct
  source 1..50: mol_type = other DNA
aggctcgacggcgacaccggcaggggcctgccggtgtggcggagtagctc

SEQ ID NO: 49050 - DNA, 50 bp, synthetic construct
  source 1..50: mol_type = other DNA
tttatcctttttactgcggtgtacatgtacaccacagttaatggaggtaa

SEQ ID NO: 49051 - DNA, 50 bp, synthetic construct
  source 1..50: mol_type = other DNA
aggatatttaattggctgtcagatatatccgtttgccgtcagaacatcca

SEQ ID NO: 49052 - DNA, 50 bp, synthetic construct
  source 1..50: mol_type = other DNA
ttctcgcaaaccagctacatcatctagagattttcccaaactaaagagag

SEQ ID NO: 49053 - DNA, 50 bp, synthetic construct
  source 1..50: mol_type = other DNA
tctatatcgccttgatgaccttgcgctgaaggcgggggagaagatttccc

SEQ ID NO: 49054 - DNA, 50 bp, synthetic construct
  source 1..50: mol_type = other DNA
aaggaagcttcttccgaaaggtgattaccctgttcgagcgagccggcccg

SEQ ID NO: 49055 - DNA, 50 bp, synthetic construct
  source 1..50: mol_type = other DNA
tacagtaatttactgttgataatcaccatgatatactgcttattactgtt

SEQ ID NO: 49056 - DNA, 50 bp, synthetic construct
  source 1..50: mol_type = other DNA
aatgtacgtgtttagctatgtaaaagtattcttgccttaacactcatatc

SEQ ID NO: 49057 - DNA, 50 bp, synthetic construct
  source 1..50: mol_type = other DNA
ttaacaggtctcttagcaaaccgaattcggcattgtagcattagccataa

SEQ ID NO: 49058 - DNA, 50 bp, synthetic construct
  source 1..50: mol_type = other DNA
tttttattgtcaggggaattatccgctttttgcttacctgaaaataaatg

SEQ ID NO: 49059 - DNA, 50 bp, synthetic construct
  source 1..50: mol_type = other DNA
tagaaagtattgttgatcgaaggccaagttacgattaccaaacggctcaa

SEQ ID NO: 49060 - DNA, 50 bp, synthetic construct
  source 1..50: mol_type = other DNA
agaccgtcgtgattggcaagacccccggccagtgttcacgatgagattgt

SEQ ID NO: 49061 - DNA, 50 bp, synthetic construct
  source 1..50: mol_type = other DNA
atgtgtataatgcacacaaagcgcgtgcgcaatgttagcattgtacacat

SEQ ID NO: 49062 - DNA, 50 bp, synthetic construct
  source 1..50: mol_type = other DNA
atggcattccgagtgtagtgtggttatacacactaaaaataaaagacaat

SEQ ID NO: 49063 - DNA, 50 bp, synthetic construct
  source 1..50: mol_type = other DNA
tttcatgacttcgcggccttgcctgaagatcaggcgaacaagcaatgaaa

SEQ ID NO: 49064 - DNA, 50 bp, synthetic construct
  source 1..50: mol_type = other DNA
attgtcttttatttttagtgtgtataaccacactacactcggaatgccat

SEQ ID NO: 49065 - DNA, 50 bp, synthetic construct
  source 1..50: mol_type = other DNA
atttgtttgtttacattagccgttatgtatgataacctctacaaacaaat

SEQ ID NO: 49066 - DNA, 50 bp, synthetic construct
  source 1..50: mol_type = other DNA
acgcctcaattcttaatgaggtgtatgggtataattgatatttgccgatg

SEQ ID NO: 49067 - DNA, 50 bp, synthetic construct
  source 1..50: mol_type = other DNA
atattttgaactatacactattcatttgaatagtggcaatattttacaaa

SEQ ID NO: 49068 - DNA, 50 bp, synthetic construct
  source 1..50: mol_type = other DNA
taacttttatcgtgtttactctttatgaaggatcaacttagtacaatagc

SEQ ID NO: 49069 - DNA, 50 bp, synthetic construct
  source 1..50: mol_type = other DNA
atgttgtaataagcgtcacacactcaaatgtgttatgcttatacaaacaa

SEQ ID NO: 49070 - DNA, 50 bp, synthetic construct
  source 1..50: mol_type = other DNA
ttcgcaaatgttcccagattatacaatgggaacatttgaacttgcgtaaa

SEQ ID NO: 49071 - DNA, 50 bp, synthetic construct
  source 1..50: mol_type = other DNA
tgattatcatttaaagatgaacttataagggccagcttatgaatgaacga

SEQ ID NO: 49072 - DNA, 50 bp, synthetic construct
  source 1..50: mol_type = other DNA
ttgtccccattggctacgcagcgcaggtgctgcaaaggtactcaagtcgg

SEQ ID NO: 49073 - DNA, 50 bp, synthetic construct
  source 1..50: mol_type = other DNA
atttaaaaagacaattacgatcacatgtgatgctgtaggtattcacgcct

SEQ ID NO: 49074 - DNA, 50 bp, synthetic construct
  source 1..50: mol_type = other DNA
acagtttagttttcataccatttccacttgagtaatgataaaggtactgg

SEQ ID NO: 49075 - DNA, 50 bp, synthetic construct
  source 1..50: mol_type = other DNA
tgaacgaagcgtcctgagctatggtttcatagttaccagtctcataggag

SEQ ID NO: 49076 - DNA, 50 bp, synthetic construct
  source 1..50: mol_type = other DNA
aagatagcagacgttatgctttacacttaaatcaaaaaacttactgaatt

SEQ ID NO: 49077 - DNA, 50 bp, synthetic construct
  source 1..50: mol_type = other DNA
gttgatacttcactttctgtctgaatttagaaataaatctcaccatcaac

SEQ ID NO: 49078 - DNA, 50 bp, synthetic construct
  source 1..50: mol_type = other DNA
tggtgataaagtgcaagacagaattaatattatattaattcgtataattt

SEQ ID NO: 49079 - DNA, 50 bp, synthetic construct
  source 1..50: mol_type = other DNA
tggaagaggtggacgcttagtatcgctaccttcttcccaaatcttttccg

SEQ ID NO: 49080 - DNA, 50 bp, synthetic construct
  source 1..50: mol_type = other DNA
acaggtacgttctcatgatgtatttaaacacatcattttgggtattgaat

SEQ ID NO: 49081 - DNA, 50 bp, synthetic construct
  source 1..50: mol_type = other DNA
acgctcctcatggtgataaactcccatgaaattacgcagatggtttgctg

SEQ ID NO: 49082 - DNA, 50 bp, synthetic construct
  source 1..50: mol_type = other DNA
tacgcctcaattattaatgaggtgtaggtataattgatatttgccgatgt

SEQ ID NO: 49083 - DNA, 50 bp, synthetic construct
  source 1..50: mol_type = other DNA
gctattgtacttagttgattcttcataaaggatacaccctgtataatcat

SEQ ID NO: 49084 - DNA, 50 bp, synthetic construct
  source 1..50: mol_type = other DNA
cgtgtttcgatgggcgtataatattaacgtcgtcaaccccctaaaactaa

SEQ ID NO: 49085 - DNA, 50 bp, synthetic construct
  source 1..50: mol_type = other DNA
agatggtgtatttaaacgtgtctgatgatgaatgttgcgacgcaccgaga

SEQ ID NO: 49086 - DNA, 50 bp, synthetic construct
  source 1..50: mol_type = other DNA
ataaaaagacaataaaataatttttaatgtgaccttaattgtctttttaa

SEQ ID NO: 49087 - DNA, 50 bp, synthetic construct
  source 1..50: mol_type = other DNA
attttaatttactgctgtgagataaataaaaattaaacaaaaattatatc

SEQ ID NO: 49088 - DNA, 50 bp, synthetic construct
  source 1..50: mol_type = other DNA
ttttagatggcgtatttaaacgtgtcaaggtctaaatacactatgagaac

SEQ ID NO: 49089 - DNA, 50 bp, synthetic construct
  source 1..50: mol_type = other DNA
gttacccttgtgttggtgggtttatgtcaaccgttcaatactataaaaaa

SEQ ID NO: 49090 - DNA, 50 bp, synthetic construct
  source 1..50: mol_type = other DNA
gaacccgctttatattggttaagcgtgcttaataatgctggtacaggtag

SEQ ID NO: 49091 - DNA, 50 bp, synthetic construct
  source 1..50: mol_type = other DNA
ggaaacagaaagttcaggccgccatcaggatagataattttattgtactt

SEQ ID NO: 49092 - DNA, 50 bp, synthetic construct
  source 1..50: mol_type = other DNA
acttataaacgttatggctaatgctagtattgtctatataggttaacaga

SEQ ID NO: 49093 - DNA, 50 bp, synthetic construct
  source 1..50: mol_type = other DNA
ctcgtgttattgtgggtacatgatatgtagtcaacccaaaataactaaaa

SEQ ID NO: 49094 - DNA, 50 bp, synthetic construct
  source 1..50: mol_type = other DNA
ttttgaatattcccattgatgattttcgtatactatgggaacattttgat

SEQ ID NO: 49095 - DNA, 50 bp, synthetic construct
  source 1..50: mol_type = other DNA
aaattatacgaattaatataatattaattctgtcttgcactttatcacca

SEQ ID NO: 49096 - DNA, 50 bp, synthetic construct
  source 1..50: mol_type = other DNA
tatagttatcctgtttatcctaatgagtatggataaacaggataactata

SEQ ID NO: 49097 - DNA, 50 bp, synthetic construct
  source 1..50: mol_type = other DNA
aaaattttagttattggggtttacaatgcccccacaataacacgaggggg

SEQ ID NO: 49098 - DNA, 50 bp, synthetic construct
  source 1..50: mol_type = other DNA
gcgcattcaggagagcgcctaaaacgcggtaggggcgtttttgtttggaa

SEQ ID NO: 49099 - DNA, 50 bp, synthetic construct
  source 1..50: mol_type = other DNA
ctcttagaaaaccgaatagacttcattgtagctattcggcattgtagcat

SEQ ID NO: 49100 - DNA, 50 bp, synthetic construct
  source 1..50: mol_type = other DNA
gcgggttctgctccggcttaccacgggaaaaatattcaggtgaccggttt

SEQ ID NO: 49101 - DNA, 50 bp, synthetic construct
  source 1..50: mol_type = other DNA
catgtgaataaaatatagtgtgtttacacacactacattcagaagccaca

SEQ ID NO: 49102 - DNA, 50 bp, synthetic construct
  source 1..50: mol_type = other DNA
cagcctaccgagaacggccagccttaaggcactcgccagacggcaggcga

SEQ ID NO: 49103 - DNA, 50 bp, synthetic construct
  source 1..50: mol_type = other DNA
gatcgtcagggagatgattaactgcgttcttattcatttcggctgcgaca

SEQ ID NO: 49104 - DNA, 50 bp, synthetic construct
  source 1..50: mol_type = other DNA
ttctataagagaagagtaaatccttttctttttactctactttgctggtg

SEQ ID NO: 49105 - DNA, 50 bp, synthetic construct
  source 1..50: mol_type = other DNA
aggcaagtatttttttcttcaacttaaggtttataaaagcatactttagc

SEQ ID NO: 49106 - DNA, 50 bp, synthetic construct
  source 1..50: mol_type = other DNA
ttgagtatgcagcagcggagctgatatgagtaaagctgcagcgtgaaaaa

SEQ ID NO: 49107 - DNA, 50 bp, synthetic construct
  source 1..50: mol_type = other DNA
gaattactctgtacggtacaggtgaaaaagtgattattactcaaaaataa

SEQ ID NO: 49108 - DNA, 50 bp, synthetic construct
  source 1..50: mol_type = other DNA
gatatcataaaagaacaattggaaatgagctcttgttacagggccatcag

SEQ ID NO: 49109 - DNA, 50 bp, synthetic construct
  source 1..50: mol_type = other DNA
ataatctccacccaaaatggagagaatatcgagattatgacgatgatgat

SEQ ID NO: 49110 - DNA, 50 bp, synthetic construct
  source 1..50: mol_type = other DNA
tatcccctgcacggagcaggggattatcccctgcattggagcaggggatt

SEQ ID NO: 49111 - DNA, 50 bp, synthetic construct
  source 1..50: mol_type = other DNA
aaacgcccattgaaaacgctgttgtcaacaagcgtctgaaagaggcgctg

SEQ ID NO: 49112 - DNA, 50 bp, synthetic construct
  source 1..50: mol_type = other DNA
tcactttctatgaggctgtacagatatctgaaacactgcatagaactgat

SEQ ID NO: 49113 - DNA, 50 bp, synthetic construct
  source 1..50: mol_type = other DNA
aggacaacggtatcaaagtatattatcgataactgcgataccgttttcta

SEQ ID NO: 49114 - DNA, 50 bp, synthetic construct
  source 1..50: mol_type = other DNA
ttatcacgcaaaaaaggttttggccgcaaaaaacatgttttcttcaccag

SEQ ID NO: 49115 - DNA, 50 bp, synthetic construct
  source 1..50: mol_type = other DNA
gatttcagtctgagagggaaagtgtacacttcttcaatccttcataactc

SEQ ID NO: 49116 - DNA, 50 bp, synthetic construct
  source 1..50: mol_type = other DNA
ttagtaataatgggttgacacacttaatattatacacccatcgaaacacg

SEQ ID NO: 49117 - DNA, 50 bp, synthetic construct
  source 1..50: mol_type = other DNA
attggggggttgactacgttcgggttccctaatatcatgtacccatcaac

SEQ ID NO: 49118 - DNA, 50 bp, synthetic construct
  source 1..50: mol_type = other DNA
ttatggctaatgctacaatgccgaattcggttttctttagatgttcgcct

SEQ ID NO: 49119 - DNA, 50 bp, synthetic construct
  source 1..50: mol_type = other DNA
ccccctcgtgttattgtggggacattgtaaaccccaataacaccgatttt

SEQ ID NO: 49120 - DNA, 50 bp, synthetic construct
  source 1..50: mol_type = other DNA
acgaagcgatttttggcacacaaccgtatgttcgcaaaaaatcacctcca

SEQ ID NO: 49121 - DNA, 50 bp, synthetic construct
  source 1..50: mol_type = other DNA
cccctcgtgttattgtgggggcattagtcaacccccaataacaccgattt

SEQ ID NO: 49122 - DNA, 50 bp, synthetic construct
  source 1..50: mol_type = other DNA
tatacattaccctcattctttgctattttaaagatagaatatgctgtata

SEQ ID NO: 49123 - DNA, 50 bp, synthetic construct
  source 1..50: mol_type = other DNA
taagctatttcttctcgtttttatactgaagcgaagaaaagaagcgtata

SEQ ID NO: 49124 - DNA, 50 bp, synthetic construct
  source 1..50: mol_type = other DNA
atagtaggaagatactaagtagacaggactgcttacacgtgtggaacgtt

SEQ ID NO: 49125 - DNA, 50 bp, synthetic construct
  source 1..50: mol_type = other DNA
ttatggctaatgctacaatgccgaattcggttttctaagagacctgtaaa

SEQ ID NO: 49126 - DNA, 50 bp, synthetic construct
  source 1..50: mol_type = other DNA
aacaagcaataagcttagagccgtctatgaaccccggcttaaggcgccag

SEQ ID NO: 49127 - DNA, 50 bp, synthetic construct
  source 1..50: mol_type = other DNA
ttatttaatatttttttaatctctttagcaatgaagaaaatattagcctt

SEQ ID NO: 49128 - DNA, 50 bp, synthetic construct
  source 1..50: mol_type = other DNA
tcttttagcttatgtttaatgcaatttggatacaaacagaacattgaaga

SEQ ID NO: 49129 - DNA, 50 bp, synthetic construct
  source 1..50: mol_type = other DNA
cataaatctgtacaacaatatcaagaagcgtattgctgttcacagaactg

SEQ ID NO: 49130 - DNA, 50 bp, synthetic construct
  source 1..50: mol_type = other DNA
aaattttcataaatctgtacaacaatttttgtacctatttttacatattt

SEQ ID NO: 49131 - DNA, 50 bp, synthetic construct
  source 1..50: mol_type = other DNA
ggggcaggctgtttttccatcatcattgatatgtcaccactttctgcata

SEQ ID NO: 49132 - DNA, 50 bp, synthetic construct
  source 1..50: mol_type = other DNA
gtcctttttgctactttatggcacatgtggcttctcatagcaataaaaat

SEQ ID NO: 49133 - DNA, 50 bp, synthetic construct
  source 1..50: mol_type = other DNA
ataattatttggactaacatatagtattattagttagtccaaataaataa

SEQ ID NO: 49134 - DNA, 50 bp, synthetic construct
  source 1..50: mol_type = other DNA
tattaaaatctataaatatatatttaaattaatatctagtgcttttaata

SEQ ID NO: 49135 - DNA, 50 bp, synthetic construct
  source 1..50: mol_type = other DNA
tccttattaaatttcaaaaaattttaacatttttcatattttaagtcaag

SEQ ID NO: 49136 - DNA, 50 bp, synthetic construct
  source 1..50: mol_type = other DNA
atcccggcacggcccgccaagacgtttcacaaccatggcttggctgggct

SEQ ID NO: 49137 - DNA, 50 bp, synthetic construct
  source 1..50: mol_type = other DNA
aggatcagacagatagatttcgtgatggtcttgcctagctgcgcgatctc

SEQ ID NO: 49138 - DNA, 50 bp, synthetic construct
  source 1..50: mol_type = other DNA
ctttttgtattacatactgactatcaattataccaatgtaatagataaat

SEQ ID NO: 49139 - DNA, 50 bp, synthetic construct
  source 1..50: mol_type = other DNA
tttctcagtcgcttcatcttcttcattaccaagtttaatcaatttacaaa

SEQ ID NO: 49140 - DNA, 50 bp, synthetic construct
  source 1..50: mol_type = other DNA
gattataaacatctatatacccatcataaggtatatgcgccattattatg

SEQ ID NO: 49141 - DNA, 50 bp, synthetic construct
  source 1..50: mol_type = other DNA
tctataatcatcttcaattataccttgaagaaataattgatgatataaag

SEQ ID NO: 49142 - DNA, 50 bp, synthetic construct
  source 1..50: mol_type = other DNA
tactcttttttatttctattaaaagtatagaagagaagctctaggaggtg

SEQ ID NO: 49143 - DNA, 50 bp, synthetic construct
  source 1..50: mol_type = other DNA
aaacattatatgaaaaatttctataagttgggcctgttcatataattctt

SEQ ID NO: 49144 - DNA, 50 bp, synthetic construct
  source 1..50: mol_type = other DNA
tattgggggttgactacgtttgggttccctaatatcatgtacccacaata

SEQ ID NO: 49145 - DNA, 50 bp, synthetic construct
  source 1..50: mol_type = other DNA
tataatttttgtttaatttttatttaaaataaaattaaaattaaactcag

SEQ ID NO: 49146 - DNA, 50 bp, synthetic construct
  source 1..50: mol_type = other DNA
aaaattaaaatgttcccattgattgtatactatgggaacattttgattta

SEQ ID NO: 49147 - DNA, 50 bp, synthetic construct
  source 1..50: mol_type = other DNA
atctttgacgaaacttaatgggtaatcgggcattatctgaacataaaaca

SEQ ID NO: 49148 - DNA, 50 bp, synthetic construct
  source 1..50: mol_type = other DNA
tactttcgtaaagcattacccgacttagcggatatgtcttcgagcaattt

SEQ ID NO: 49149 - DNA, 50 bp, synthetic construct
  source 1..50: mol_type = other DNA
aaattatgcgaattaatataatattaattctgtcttgcactttatcacca

SEQ ID NO: 49150 - DNA, 50 bp, synthetic construct
  source 1..50: mol_type = other DNA
ttacaggtagatgaatgtacgtgtttgccttaacactcatatcattgttc

SEQ ID NO: 49151 - DNA, 50 bp, synthetic construct
  source 1..50: mol_type = other DNA
taccaacccctagattgtatcgcttttgagacactttcaacgtaacggta

SEQ ID NO: 49152 - DNA, 50 bp, synthetic construct
  source 1..50: mol_type = other DNA
tcttagtgtttgttaattctctgttataagttcatctttaaatgataatc

SEQ ID NO: 49153 - DNA, 50 bp, synthetic construct
  source 1..50: mol_type = other DNA
tggtacacctacccgctttggcaacaataccaattcctaagcgtccacct

SEQ ID NO: 49154 - DNA, 50 bp, synthetic construct
  source 1..50: mol_type = other DNA
agaagcttttacggtcatcattaagcttaaaaagtactcagtgaacccta

SEQ ID NO: 49155 - DNA, 50 bp, synthetic construct
  source 1..50: mol_type = other DNA
tataatttttgtttattttttatttaaatttcatttaagattaaattatt

SEQ ID NO: 49156 - DNA, 50 bp, synthetic construct
  source 1..50: mol_type = other DNA
gtttaatttttatttaaaaagacaattgacacgttaattcaacctacatg

SEQ ID NO: 49157 - DNA, 50 bp, synthetic construct
  source 1..50: mol_type = other DNA
gtttaatttttatttaaaaagacaattgttttttctggcatgtttgccgc

SEQ ID NO: 49158 - DNA, 50 bp, synthetic construct
  source 1..50: mol_type = other DNA
agcgggacctgaagccattctgccacgtcaccaatgctaatagtaacgct

SEQ ID NO: 49159 - DNA, 50 bp, synthetic construct
  source 1..50: mol_type = other DNA
tcctcttcataattaagcaatattgagaactaaaataattataaatggaa

SEQ ID NO: 49160 - DNA, 50 bp, synthetic construct
  source 1..50: mol_type = other DNA
tatttaaatctatcttgacaaatatttattaataaacgatgggaaaaagg

SEQ ID NO: 49161 - DNA, 50 bp, synthetic construct
  source 1..50: mol_type = other DNA
caccatcgcggccgcggccttcggcgtcgacggtgctgggcgggatgtga

SEQ ID NO: 49162 - DNA, 50 bp, synthetic construct
  source 1..50: mol_type = other DNA
tatatgcaacattattctgtatttgaaaataaagagcaatgttgtacatc

SEQ ID NO: 49163 - DNA, 50 bp, synthetic construct
  source 1..50: mol_type = other DNA
ttttcatttagtttcaatctttttcaaaaaagatccaagcaaaatgatgc

SEQ ID NO: 49164 - DNA, 50 bp, synthetic construct
  source 1..50: mol_type = other DNA
ctcttagaaaaccgaatagactttattgtagctattcggcattgtagcat

SEQ ID NO: 49165 - DNA, 50 bp, synthetic construct
  source 1..50: mol_type = other DNA
attgcccgccttgctgatgaaaacacgattatatatccaaatggcgtgtg

SEQ ID NO: 49166 - DNA, 50 bp, synthetic construct
  source 1..50: mol_type = other DNA
gtgtgatatttacccctaccattggagacggggatatagtattctcacac

SEQ ID NO: 49167 - DNA, 50 bp, synthetic construct
  source 1..50: mol_type = other DNA
attgttcaacatcatttttttagtttgctaaaaacactgctaaaataaat

SEQ ID NO: 49168 - DNA, 50 bp, synthetic construct
  source 1..50: mol_type = other DNA
atcttgaagctggcccggttcgagtattcgaaccatggtttgaatagacc

SEQ ID NO: 49169 - DNA, 50 bp, synthetic construct
  source 1..50: mol_type = other DNA
gttctcatagtgtatttagaccttgacacgtttaaatacaccacctaaag

SEQ ID NO: 49170 - DNA, 50 bp, synthetic construct
  source 1..50: mol_type = other DNA
tggtacgaacgatcaccacgatcccatgatctgtgccggctttcgcatga

SEQ ID NO: 49171 - DNA, 50 bp, synthetic construct
  source 1..50: mol_type = other DNA
ccacgcactgctgagaactcggctcgatccggtcgctcagcgaccacagc

SEQ ID NO: 49172 - DNA, 50 bp, synthetic construct
  source 1..50: mol_type = other DNA
ctgatattctcctttaatcgtgtagacctaacgcgaaaggagaaaacgtg

SEQ ID NO: 49173 - DNA, 50 bp, synthetic construct
  source 1..50: mol_type = other DNA
gatcgaggcgctgatagcggaaaaccagctcaccttccacctcgcggatg

SEQ ID NO: 49174 - DNA, 50 bp, synthetic construct
  source 1..50: mol_type = other DNA
cggccttcaggttatgagcctgacgacggtgatgccgcgctggaaggccg

SEQ ID NO: 49175 - DNA, 50 bp, synthetic construct
  source 1..50: mol_type = other DNA
tttgaacaatactatcttcaaatttcaaattacttatagcatattttaaa

SEQ ID NO: 49176 - DNA, 50 bp, synthetic construct
  source 1..50: mol_type = other DNA
cagatgacctctttactgaagaaacccatcagcagtaaagagcagttgtg

SEQ ID NO: 49177 - DNA, 50 bp, synthetic construct
  source 1..50: mol_type = other DNA
aacgccgcccctccgcgctgggcggccgcctgatcacccctggcggtcgc

SEQ ID NO: 49178 - DNA, 50 bp, synthetic construct
  source 1..50: mol_type = other DNA
aatatgtattctatagtacgctggaagcagcgtaaagtgaaatacatatg

SEQ ID NO: 49179 - DNA, 50 bp, synthetic construct
  source 1..50: mol_type = other DNA
catcggcaaatatcaattatacccatacacctcattaagaattgaggcgt

SEQ ID NO: 49180 - DNA, 50 bp, synthetic construct
  source 1..50: mol_type = other DNA
tacgcctcaattcttaatgaggtgtaggtataattgatatttgccgatgt

SEQ ID NO: 49181 - DNA, 50 bp, synthetic construct
  source 1..50: mol_type = other DNA
gctcggccatcatgtgctctaggccggcttagcggctgccttgggggctt

SEQ ID NO: 49182 - DNA, 50 bp, synthetic construct
  source 1..50: mol_type = other DNA
ttgtatcgctttaggtggtgtatttaaatacactatgagaacatacctgt

SEQ ID NO: 49183 - DNA, 50 bp, synthetic construct
  source 1..50: mol_type = other DNA
aacctcatagtgtatttagaccttgacacatttaaatacactacctaaag

SEQ ID NO: 49184 - DNA, 50 bp, synthetic construct
  source 1..50: mol_type = other DNA
ttgtttgtataagcataacacatttgagtgcgtgacgcttattacaacat

SEQ ID NO: 49185 - DNA, 50 bp, synthetic construct
  source 1..50: mol_type = other DNA
tgtggctcttataataaaaacctctcgcagtttttgggagaaatgccgta

SEQ ID NO: 49186 - DNA, 50 bp, synthetic construct
  source 1..50: mol_type = other DNA
agattccagaattcctctattcttgttagaatagtgggaggtcaaaagaa

SEQ ID NO: 49187 - DNA, 50 bp, synthetic construct
  source 1..50: mol_type = other DNA
cataaaatcttctgtcaacatttccaacaattttaacagacgacattttt

SEQ ID NO: 49188 - DNA, 50 bp, synthetic construct
  source 1..50: mol_type = other DNA
gtaagtgcccttcttattcggattcaactacgaacccgaaccacaatctg

SEQ ID NO: 49189 - DNA, 50 bp, synthetic construct
  source 1..50: mol_type = other DNA
gaggagatgctatttaatgtcatctggatgacattaagcccacagatggt

SEQ ID NO: 49190 - DNA, 50 bp, synthetic construct
  source 1..50: mol_type = other DNA
tttgagttgttgcatgattttttcatgagccgcttgatacgcatgagtgt

SEQ ID NO: 49191 - DNA, 50 bp, synthetic construct
  source 1..50: mol_type = other DNA
agctttgatgaatattttgaaatatggatttccgttgatacacgaacata

SEQ ID NO: 49192 - DNA, 50 bp, synthetic construct
  source 1..50: mol_type = other DNA
atgataatatatgaatatttttgaaaaatgaaacgaaattataaatatat

SEQ ID NO: 49193 - DNA, 50 bp, synthetic construct
  source 1..50: mol_type = other DNA
aagtaacctattgcttgtttcatcgtgatgaagtcattaatgctagactc

SEQ ID NO: 49194 - DNA, 50 bp, synthetic construct
  source 1..50: mol_type = other DNA
actttctatcaaactgtaggcatattcaaacctacaatagttccaaaagt

SEQ ID NO: 49195 - DNA, 50 bp, synthetic construct
  source 1..50: mol_type = other DNA
cttatatatcaacgatttgagggcatttttcaaaatctgcatcataaatc

SEQ ID NO: 49196 - DNA, 50 bp, synthetic construct
  source 1..50: mol_type = other DNA
ttgaataagtaactttacaaaactagaattttaaaaatggttagataaaa

SEQ ID NO: 49197 - DNA, 50 bp, synthetic construct
  source 1..50: mol_type = other DNA
agatgttgggcgtccatattagtcattttaaaaatggttagataaaataa

SEQ ID NO: 49198 - DNA, 50 bp, synthetic construct
  source 1..50: mol_type = other DNA
tactaattaatgtaagtatacattaatatatattattacattgatgttat

SEQ ID NO: 49199 - DNA, 50 bp, synthetic construct
  source 1..50: mol_type = other DNA
atattttataaatatatattttattttgttaaaatcatattataaattca

SEQ ID NO: 49200 - DNA, 50 bp, synthetic construct
  source 1..50: mol_type = other DNA
ttattttactctaaaaaatcaaaacattattcaacttgagcgtaacataa

SEQ ID NO: 49201 - DNA, 50 bp, synthetic construct
  source 1..50: mol_type = other DNA
taaaggaccagcacgcttaggagttgatttgttagcgtgttgaatatatt

SEQ ID NO: 49202 - DNA, 50 bp, synthetic construct
  source 1..50: mol_type = other DNA
tcaaacattgactgaaaatataggatcctttctgattaagcaatcgttga

SEQ ID NO: 49203 - DNA, 50 bp, synthetic construct
  source 1..50: mol_type = other DNA
acgaatatgttaatgatgaggaaagtccgatggtctgtaacaatattcta

SEQ ID NO: 49204 - DNA, 50 bp, synthetic construct
  source 1..50: mol_type = other DNA
tactgattcgcaattattaataatttaacattaaactttgtagatgtcaa

SEQ ID NO: 49205 - DNA, 50 bp, synthetic construct
  source 1..50: mol_type = other DNA
gctaagtctggatgaggtatcttttcaaagagaaatcatctgaacttgac

SEQ ID NO: 49206 - DNA, 50 bp, synthetic construct
  source 1..50: mol_type = other DNA
acatgaaaaaagttatcacgatagaactttaaggacacccgattttttga

SEQ ID NO: 49207 - DNA, 50 bp, synthetic construct
  source 1..50: mol_type = other DNA
agctatagcatttgatagactcttatatatggtgtacaaaagttatagga

SEQ ID NO: 49208 - DNA, 50 bp, synthetic construct
  source 1..50: mol_type = other DNA
taaagcatgggtgaaaatttgaattcactaaacttttcaccatttattgg

SEQ ID NO: 49209 - DNA, 50 bp, synthetic construct
  source 1..50: mol_type = other DNA
aaagtgtgtttttattgctttggtaattttacaatttaaaaataacgttg

SEQ ID NO: 49210 - DNA, 50 bp, synthetic construct
  source 1..50: mol_type = other DNA
taaggtctgtgtcagaaactaggaattcttagattttccacttgatgaca

SEQ ID NO: 49211 - DNA, 50 bp, synthetic construct
  source 1..50: mol_type = other DNA
tttctttagtgtagaacactttataataaaagtgttataatatacttgaa

SEQ ID NO: 49212 - DNA, 50 bp, synthetic construct
  source 1..50: mol_type = other DNA
cggtatcactgcttgtacgagttgaaaaactcctagaattagtgctacaa

SEQ ID NO: 49213 - DNA, 50 bp, synthetic construct
  source 1..50: mol_type = other DNA
aattataatttcgaaacgtgaataaaaattcattgtttaaaattaaaaaa

SEQ ID NO: 49214 - DNA, 50 bp, synthetic construct
  source 1..50: mol_type = other DNA
ttaaaaaaatttgataactttcctgataggagaatatcaaatgggttgca

SEQ ID NO: 49215 - DNA, 50 bp, synthetic construct
  source 1..50: mol_type = other DNA
gtcgcagggggcgatggttgcggggacacgcaacaaccgccccctgcgac

SEQ ID NO: 49216 - DNA, 50 bp, synthetic construct
  source 1..50: mol_type = other DNA
tgcattaaatcacccaactctcccgaaaaggcactgcaattattaatgca

SEQ ID NO: 49217 - DNA, 50 bp, synthetic construct
  source 1..50: mol_type = other DNA
tcactgcgctttcgggcactttgcatcctcgtataaagctccagcagtgc

SEQ ID NO: 49218 - DNA, 50 bp, synthetic construct
  source 1..50: mol_type = other DNA
ggcagaggataagctggatgacgcgacaacactgcagctcaccccttttc

SEQ ID NO: 49219 - DNA, 50 bp, synthetic construct
  source 1..50: mol_type = other DNA
ccttttgctaatgcggccctcccacttgggagaaatgccgtaaagaacga

SEQ ID NO: 49220 - DNA, 50 bp, synthetic construct
  source 1..50: mol_type = other DNA
atgtaattacttgacgcatagtggtaccaaaatgcgccctttaatctgat

SEQ ID NO: 49221 - DNA, 50 bp, synthetic construct
  source 1..50: mol_type = other DNA
ttgtccatgaacgaagcggcgcagatctacgcccgcggtctgctggacgg

SEQ ID NO: 49222 - DNA, 50 bp, synthetic construct
  source 1..50: mol_type = other DNA
ccactgagctaccgcggaacatccccgcgcgtaccgcggccgcgtcgcgg

SEQ ID NO: 49223 - DNA, 50 bp, synthetic construct
  source 1..50: mol_type = other DNA
gcgcaagaacacacccagcgccccagacttgagggggtgtttatttgcgt

SEQ ID NO: 49224 - DNA, 50 bp, synthetic construct
  source 1..50: mol_type = other DNA
aacaaattgataagcaatgcttttttaaaaaccattaatatcaatgtgtt

SEQ ID NO: 49225 - DNA, 50 bp, synthetic construct
  source 1..50: mol_type = other DNA
atgccgaatagctacaatacaatgacccttgaataaagtctattcggttt

SEQ ID NO: 49226 - DNA, 50 bp, synthetic construct
  source 1..50: mol_type = other DNA
tgtggtgtacatcctatcacaactgtagttggtaaagtatgtacgccacg

SEQ ID NO: 49227 - DNA, 50 bp, synthetic construct
  source 1..50: mol_type = other DNA
accatgagtgttaaggcaagaatacttttacatagctaaacacgtatgag

SEQ ID NO: 49228 - DNA, 50 bp, synthetic construct
  source 1..50: mol_type = other DNA
caaggcgaaatctccgcggtaacaattggcaccgcctgccggatagcgcc

SEQ ID NO: 49229 - DNA, 50 bp, synthetic construct
  source 1..50: mol_type = other DNA
agtataggtatggtatctctcgggtgcccgaaagcaagcaaaaatatacc

SEQ ID NO: 49230 - DNA, 50 bp, synthetic construct
  source 1..50: mol_type = other DNA
taagcttttaagagcagagtaacacatgtttatcattgtccaaacctata

SEQ ID NO: 49231 - DNA, 50 bp, synthetic construct
  source 1..50: mol_type = other DNA
tttacaagtctccgtgcagtcaggcccccgcaaccactgagacttgaata

SEQ ID NO: 49232 - DNA, 50 bp, synthetic construct
  source 1..50: mol_type = other DNA
aggtggtttatgatctcgggaaaaaattttctgtaaatcctaacaagcga

SEQ ID NO: 49233 - DNA, 50 bp, synthetic construct
  source 1..50: mol_type = other DNA
ttctatcgtcagaatcgcttgttaggattcactggtaagcacttgaaagg

SEQ ID NO: 49234 - DNA, 50 bp, synthetic construct
  source 1..50: mol_type = other DNA
taatcattaccatgtgtaaaatacttagcatacacacctgagactaatta

SEQ ID NO: 49235 - DNA, 50 bp, synthetic construct
  source 1..50: mol_type = other DNA
acttataaacgttatggctaatgctagtattgtctatataagttaacaga

SEQ ID NO: 49236 - DNA, 50 bp, synthetic construct
  source 1..50: mol_type = other DNA
cccgggactagataccgaggttgcgctctacctcggtatcttcaccgccg

SEQ ID NO: 49237 - DNA, 50 bp, synthetic construct
  source 1..50: mol_type = other DNA
gatctcttcggatgtgtgtgcttttgaaagcacgcgcttcaaagtcagag

SEQ ID NO: 49238 - DNA, 50 bp, synthetic construct
  source 1..50: mol_type = other DNA
agggtagatgatgaacggttgtactggtttagttagctaggatgtaacca

SEQ ID NO: 49239 - DNA, 50 bp, synthetic construct
  source 1..50: mol_type = other DNA
tcagaaatgtagtcaccgttcaggttcataccatagcacggttgaaaaag

SEQ ID NO: 49240 - DNA, 50 bp, synthetic construct
  source 1..50: mol_type = other DNA
tcatcaataaatttttttgagttcagggaacttcagaaatgagattccct

SEQ ID NO: 49241 - DNA, 50 bp, synthetic construct
  source 1..50: mol_type = other DNA
ataactttttatcttcttttacgaataagtaggaggaagaaaatatgtat

SEQ ID NO: 49242 - DNA, 50 bp, synthetic construct
  source 1..50: mol_type = other DNA
taagcggcctaaatcgacgtataacgagtgactggaatgactggcgcttt

SEQ ID NO: 49243 - DNA, 50 bp, synthetic construct
  source 1..50: mol_type = other DNA
cggctcgaagccgtatagtataggaaaatatactctagtctgctcttggt

SEQ ID NO: 49244 - DNA, 50 bp, synthetic construct
  source 1..50: mol_type = other DNA
agattgtatcgttttagatggtgtatgctaacgatacccctataccatct

SEQ ID NO: 49245 - DNA, 50 bp, synthetic construct
  source 1..50: mol_type = other DNA
aaatatcgcactttggttcaatatgctaattgaaccaaagtgcgaccttt

SEQ ID NO: 49246 - DNA, 50 bp, synthetic construct
  source 1..50: mol_type = other DNA
tacggcatttcccccaaaaactgcgagctgttcttagtggaaaggccgaa

SEQ ID NO: 49247 - DNA, 50 bp, synthetic construct
  source 1..50: mol_type = other DNA
ataatctgacttgcagattgtacatatgaacaagttacagtgtcaataat

SEQ ID NO: 49248 - DNA, 50 bp, synthetic construct
  source 1..50: mol_type = other DNA
acccaatggctgataataccagccatcatgtcgagacggtctgtttacta

SEQ ID NO: 49249 - DNA, 50 bp, synthetic construct
  source 1..50: mol_type = other DNA
cagacagttcgaagataatccttccattaggacaatttaggccaaatggt

SEQ ID NO: 49250 - DNA, 50 bp, synthetic construct
  source 1..50: mol_type = other DNA
tatttattaggataaacacatatgatcatatgtacataaaaagagactag

SEQ ID NO: 49251 - DNA, 50 bp, synthetic construct
  source 1..50: mol_type = other DNA
attaggttctcatgaagttatctaccgtcataactatatgagggactaaa

SEQ ID NO: 49252 - DNA, 50 bp, synthetic construct
  source 1..50: mol_type = other DNA
gtttatttagattgtttagtatctcgagaaactaaaattataaataaaaa

SEQ ID NO: 49253 - DNA, 50 bp, synthetic construct
  source 1..50: mol_type = other DNA
tacatcaattctatcaactcgtcccatgttgagttggtagcattgatgtc

SEQ ID NO: 49254 - DNA, 50 bp, synthetic construct
  source 1..50: mol_type = other DNA
tttagtacctcgttttctctcactggacggagaacaaatgagaaactaaa

SEQ ID NO: 49255 - DNA, 50 bp, synthetic construct
  source 1..50: mol_type = other DNA
tttttatttataattttagtttctcgaggtactaaacaacgaaaaaaaac

SEQ ID NO: 49256 - DNA, 50 bp, synthetic construct
  source 1..50: mol_type = other DNA
tttagtacctcgatttctctcactggacggagaataaatgagatactaaa

SEQ ID NO: 49257 - DNA, 50 bp, synthetic construct
  source 1..50: mol_type = other DNA
cgttttttatttggttaggttctcatgaggtactaaatagatagaagact

SEQ ID NO: 49258 - DNA, 50 bp, synthetic construct
  source 1..50: mol_type = other DNA
tatattcctatcgtagttacaacaccccttgtcactatgataagaatacg

SEQ ID NO: 49259 - DNA, 50 bp, synthetic construct
  source 1..50: mol_type = other DNA
ttaactgacacacctgactgataataaaaaacggccagcaagtgatgcca

SEQ ID NO: 49260 - DNA, 50 bp, synthetic construct
  source 1..50: mol_type = other DNA
tttagtacctcattttctctcgttggaagaagaagaaacgagatactaaa

SEQ ID NO: 49261 - DNA, 50 bp, synthetic construct
  source 1..50: mol_type = other DNA
ccttttatttatagtttagtttctcgaggtactaaacaacgtaaaaaaac

SEQ ID NO: 49262 - DNA, 50 bp, synthetic construct
  source 1..50: mol_type = other DNA
tctcaataagtttatttacttccttaaggaagtatcaatataatttgtga

SEQ ID NO: 49263 - DNA, 50 bp, synthetic construct
  source 1..50: mol_type = other DNA
tttgttaatattatttttctgtatatatacagaaatatgccaacaactta

SEQ ID NO: 49264 - DNA, 50 bp, synthetic construct
  source 1..50: mol_type = other DNA
aaccgtacttatgataagtacagtagtctatagttgtcataaatacagag

SEQ ID NO: 49265 - DNA, 50 bp, synthetic construct
  source 1..50: mol_type = other DNA
ctctctaccatatatatacttccttaaggaagtaaataaactaccaagag

SEQ ID NO: 49266 - DNA, 50 bp, synthetic construct
  source 1..50: mol_type = other DNA
tttagttcctcgttttctctcgttggacggagaataactgagaaactaaa

SEQ ID NO: 49267 - DNA, 50 bp, synthetic construct
  source 1..50: mol_type = other DNA
tttagtacctcatgtttttatgacggtagatagctatatgagaacctaat

SEQ ID NO: 49268 - DNA, 50 bp, synthetic construct
  source 1..50: mol_type = other DNA
tttagagaaaaacaactttatttaaatacaaatagcttctttatcatcaa

SEQ ID NO: 49269 - DNA, 50 bp, synthetic construct
  source 1..50: mol_type = other DNA
ctctgcatttatgacaactacagactactgtacttatcataagtacagtt

SEQ ID NO: 49270 - DNA, 50 bp, synthetic construct
  source 1..50: mol_type = other DNA
agtcttctatctatttagtacctcatgagaacctaaccaaataaaaaacg

SEQ ID NO: 49271 - DNA, 50 bp, synthetic construct
  source 1..50: mol_type = other DNA
cgtattcttatcatagtgacaaggggtgttgtaactacgataggaatata

SEQ ID NO: 49272 - DNA, 50 bp, synthetic construct
  source 1..50: mol_type = other DNA
tgttacgacaaaggtggccttgggttcactggccccccattggtgtaatt

SEQ ID NO: 49273 - DNA, 50 bp, synthetic construct
  source 1..50: mol_type = other DNA
tgttacgacaaaggtggctcagggttcgcgggaacacctatgtcgtaact

SEQ ID NO: 49274 - DNA, 50 bp, synthetic construct
  source 1..50: mol_type = other DNA
gatagtagtaacgacacattgtgagagacttgtgtgttgctacaaagacg

SEQ ID NO: 49275 - DNA, 50 bp, synthetic construct
  source 1..50: mol_type = other DNA
gagttatgaaggattgaagaagtgtacactttccctctcagactgaaatc

SEQ ID NO: 49276 - DNA, 50 bp, synthetic construct
  source 1..50: mol_type = other DNA
acgctgcatgataagtacagctttaaaaagctgattgtaagcaaactttt

SEQ ID NO: 49277 - DNA, 50 bp, synthetic construct
  source 1..50: mol_type = other DNA
atcttattaaaaaaccgcatcacttagatgatgcggttttttttctcatt

SEQ ID NO: 49278 - DNA, 50 bp, synthetic construct
  source 1..50: mol_type = other DNA
gcttgtattagtgttttgatttgggtatatatagtactattaatacaaac

SEQ ID NO: 49279 - DNA, 50 bp, synthetic construct
  source 1..50: mol_type = other DNA
tttagttcctcgttttctctcgttggagggagaagaaacgggataccaaa

SEQ ID NO: 49280 - DNA, 50 bp, synthetic construct
  source 1..50: mol_type = other DNA
ttttgtcaaaatgaaactgttctccgggtaatagtatcattttacaaaag

SEQ ID NO: 49281 - DNA, 50 bp, synthetic construct
  source 1..50: mol_type = other DNA
tttagttcctcgttttctctcgttggaagaagaagaaacgagataccaaa

SEQ ID NO: 49282 - DNA, 50 bp, synthetic construct
  source 1..50: mol_type = other DNA
caggagtttatcataagagatgtgtacaactctctaatgacttactttga

SEQ ID NO: 49283 - DNA, 50 bp, synthetic construct
  source 1..50: mol_type = other DNA
atgattccaaatagatgtgtagaaaattctacacattaagataagctatt

SEQ ID NO: 49284 - DNA, 50 bp, synthetic construct
  source 1..50: mol_type = other DNA
tttagttcctcgttttctctcgttggaagaagaataaacgagataccaaa

SEQ ID NO: 49285 - DNA, 50 bp, synthetic construct
  source 1..50: mol_type = other DNA
tttagtttctcatttattctccgtccagagagagaaatcgaggtactaaa

SEQ ID NO: 49286 - DNA, 50 bp, synthetic construct
  source 1..50: mol_type = other DNA
gtgtgtttaaagccctttcaatgggccgccgccgaggggataaaatagac

SEQ ID NO: 49287 - DNA, 50 bp, synthetic construct
  source 1..50: mol_type = other DNA
tttagtacctcattttctctcgttggaagaagaagaaacgagataccaaa

SEQ ID NO: 49288 - DNA, 50 bp, synthetic construct
  source 1..50: mol_type = other DNA
ctacttcttcctcgtcatcaatgccaagattgatgtcttggggcattttg

SEQ ID NO: 49289 - DNA, 50 bp, synthetic construct
  source 1..50: mol_type = other DNA
tttagtccctcgttttctctcgttggacggagacgaatcgagaaactaaa

SEQ ID NO: 49290 - DNA, 50 bp, synthetic construct
  source 1..50: mol_type = other DNA
cctttcccaccgcggcgcaactcattgtttttatgcttcatttagaaagg

SEQ ID NO: 49291 - DNA, 50 bp, synthetic construct
  source 1..50: mol_type = other DNA
ttctgtatatttgataagtatagtagtctatagttatcataaatacagag

SEQ ID NO: 49292 - DNA, 50 bp, synthetic construct
  source 1..50: mol_type = other DNA
tttagttcctcgctttctctcgctggacggagaataaacgagatactaat

SEQ ID NO: 49293 - DNA, 50 bp, synthetic construct
  source 1..50: mol_type = other DNA
gttgatgggtacatgatattagggaacccgaacgtagtcaacccctaata

SEQ ID NO: 49294 - DNA, 50 bp, synthetic construct
  source 1..50: mol_type = other DNA
tttagttattgggggtttactaatctaatatcatgtacccatcaacacac

SEQ ID NO: 49295 - DNA, 50 bp, synthetic construct
  source 1..50: mol_type = other DNA
gatatgagtgttaaggcaagaatacttttacatagctaaacacgcacatt

SEQ ID NO: 49296 - DNA, 50 bp, synthetic construct
  source 1..50: mol_type = other DNA
ggacggagttcattagtttatttcttcgggcaccctaatgatataaatcc

SEQ ID NO: 49297 - DNA, 50 bp, synthetic construct
  source 1..50: mol_type = other DNA
tttatttaagttttagtgcaattcatttgaggtgtaagaacagcgatacc

SEQ ID NO: 49298 - DNA, 50 bp, synthetic construct
  source 1..50: mol_type = other DNA
tggataattaaaaaatcgcatcattaagtgatgcggtttttattaattag

SEQ ID NO: 49299 - DNA, 50 bp, synthetic construct
  source 1..50: mol_type = other DNA
tttttagcaatatcactaacaaggggtttttattaattagttgctaaaaa

SEQ ID NO: 49300 - DNA, 50 bp, synthetic construct
  source 1..50: mol_type = other DNA
atgtaattacttgacgcatagtgataccaaaatgcgccctttaatctgat

SEQ ID NO: 49301 - DNA, 50 bp, synthetic construct
  source 1..50: mol_type = other DNA
ttaacaggcctcttagaaaaccgaattcggcattgtagcattagccataa

SEQ ID NO: 49302 - DNA, 50 bp, synthetic construct
  source 1..50: mol_type = other DNA
aagtgcatcattggaaggtttaatgccttatgatacactatgaatcagca

SEQ ID NO: 49303 - DNA, 50 bp, synthetic construct
  source 1..50: mol_type = other DNA
cagcgtcatttatgaaaaggttgcgagcaggtttttcatatgtgacactg

SEQ ID NO: 49304 - DNA, 50 bp, synthetic construct
  source 1..50: mol_type = other DNA
tgttttgtaacctatcataatggcagcaggttgtgtaaggttgcaaaacg

SEQ ID NO: 49305 - DNA, 50 bp, synthetic construct
  source 1..50: mol_type = other DNA
atagtaggaagatactaagtagacaggtctgctcactcgccaagaacgtt

SEQ ID NO: 49306 - DNA, 50 bp, synthetic construct
  source 1..50: mol_type = other DNA
atgactacattgaaattcagtataattatatcatttcggcctcctttgtc

SEQ ID NO: 49307 - DNA, 50 bp, synthetic construct
  source 1..50: mol_type = other DNA
gaaaattcaaatgttcccattgattatactatgggaacattttgatttaa

SEQ ID NO: 49308 - DNA, 50 bp, synthetic construct
  source 1..50: mol_type = other DNA
gtagttatgcactgtacatttgctctgtctaatgtatagtgataacttgc

SEQ ID NO: 49309 - DNA, 50 bp, synthetic construct
  source 1..50: mol_type = other DNA
gttgatgggtacatgatattaggcaacccgaacgtagtcaacccccaata

SEQ ID NO: 49310 - DNA, 50 bp, synthetic construct
  source 1..50: mol_type = other DNA
ctcttgttattgtgggtacatgatatgtagtcaaccccaaataactaaaa

SEQ ID NO: 49311 - DNA, 50 bp, synthetic construct
  source 1..50: mol_type = other DNA
ttgtatcgctttaggtggtgtatttaaatacactatgaggatgattaggg

SEQ ID NO: 49312 - DNA, 50 bp, synthetic construct
  source 1..50: mol_type = other DNA
atggcattccgagtgttgtgtggttatacacactaaaaacaaaagacaat

SEQ ID NO: 49313 - DNA, 50 bp, synthetic construct
  source 1..50: mol_type = other DNA
gtgtatcaatagaaaggtctcttcaggaatacacctttcttatgatacac

SEQ ID NO: 49314 - DNA, 50 bp, synthetic construct
  source 1..50: mol_type = other DNA
atcctcatagtgcatttagaccttgacacgtttaaatacaccatctaaaa

SEQ ID NO: 49315 - DNA, 50 bp, synthetic construct
  source 1..50: mol_type = other DNA
ctttagatggtgtatttaaacgcgtcaaggtctaaatgcacctcttattt

SEQ ID NO: 49316 - DNA, 50 bp, synthetic construct
  source 1..50: mol_type = other DNA
tcccatgcttacaagcagtgtatttaaatacaccatctaaagcgatacaa

SEQ ID NO: 49317 - DNA, 50 bp, synthetic construct
  source 1..50: mol_type = other DNA
atttaaaaacaacgagttattttaatctaagtgaaatcatagctttatcc

SEQ ID NO: 49318 - DNA, 50 bp, synthetic construct
  source 1..50: mol_type = other DNA
cggtatctcagatgaatgcccgacggcacgggaattggtctaagatatcc

SEQ ID NO: 49319 - DNA, 50 bp, synthetic construct
  source 1..50: mol_type = other DNA
tggcgtacataatatcataactgctcgtagttagtaaagtatgtacgccg

SEQ ID NO: 49320 - DNA, 50 bp, synthetic construct
  source 1..50: mol_type = other DNA
aaagcgagtgttcttacagcttttcaaaaaggaaagcccggataccctgg

SEQ ID NO: 49321 - DNA, 50 bp, synthetic construct
  source 1..50: mol_type = other DNA
tgtcgatgaaaaggcagcaggtcaaggcactaaggacttttgcatatcag

SEQ ID NO: 49322 - DNA, 50 bp, synthetic construct
  source 1..50: mol_type = other DNA
tttttagaaaaagaacagaagaattatggcttcttcaacttttatatccg

SEQ ID NO: 49323 - DNA, 50 bp, synthetic construct
  source 1..50: mol_type = other DNA
aaaattttagttattgtgggttgacataaacccatcaacacgagagaggg

SEQ ID NO: 49324 - DNA, 50 bp, synthetic construct
  source 1..50: mol_type = other DNA
ccctaatcatcctcatagtgcatttaaatacaccacctaaagcgatacaa

SEQ ID NO: 49325 - DNA, 50 bp, synthetic construct
  source 1..50: mol_type = other DNA
tgtttatacagtaatagcaaggagccctccttgggaagttggcgttgttc

SEQ ID NO: 49326 - DNA, 50 bp, synthetic construct
  source 1..50: mol_type = other DNA
cattcgttttatgccgccagtagcatcacacttccagcataaatcgatca

SEQ ID NO: 49327 - DNA, 50 bp, synthetic construct
  source 1..50: mol_type = other DNA
tcgctatacgaattgactgtgcctgcaggcgtaacctattcgtatagcgc

SEQ ID NO: 49328 - DNA, 50 bp, synthetic construct
  source 1..50: mol_type = other DNA
ttcatggattctctggctttttctcgagaaaatgagaatgaaggagtaaa

SEQ ID NO: 49329 - DNA, 50 bp, synthetic construct
  source 1..50: mol_type = other DNA
gactcgctttcttgttttcagaaccgcccctgccgtgaagaaagcgttga

SEQ ID NO: 49330 - DNA, 50 bp, synthetic construct
  source 1..50: mol_type = other DNA
ccgtggatctgaaaaccgcagatagctggcgccaagtaatacttcaacgg

SEQ ID NO: 49331 - DNA, 50 bp, synthetic construct
  source 1..50: mol_type = other DNA
aactgatttctcagttcccgctttcgattatgggaactgggtggttgctg

SEQ ID NO: 49332 - DNA, 50 bp, synthetic construct
  source 1..50: mol_type = other DNA
aggtcggtgtttcgtactttcctttgaaggcgcgctagaaacacctgcat

SEQ ID NO: 49333 - DNA, 50 bp, synthetic construct
  source 1..50: mol_type = other DNA
caacacactaaagatgttctaaaatgttttgcatcatcaaaaacaggtta

SEQ ID NO: 49334 - DNA, 50 bp, synthetic construct
  source 1..50: mol_type = other DNA
aaaatatcacttgatttatcatcttaaggagataaaatatatggaatgtg

SEQ ID NO: 49335 - DNA, 50 bp, synthetic construct
  source 1..50: mol_type = other DNA
ccctaatcaacctcatagtgtatttaaatacaccatctaaagcgatacaa

SEQ ID NO: 49336 - DNA, 50 bp, synthetic construct
  source 1..50: mol_type = other DNA
aaatgcagctctcatatctgttacatgaaacacagctagaattttcattt

SEQ ID NO: 49337 - DNA, 50 bp, synthetic construct
  source 1..50: mol_type = other DNA
ttgcccgcatccaggcgacgtatggccgatgaccgcgaacatgtacgcag

SEQ ID NO: 49338 - DNA, 50 bp, synthetic construct
  source 1..50: mol_type = other DNA
agacgcacggatacgagtagcaatcgaatgattgtcaataccgtgacgct

SEQ ID NO: 49339 - DNA, 50 bp, synthetic construct
  source 1..50: mol_type = other DNA
tttagttattgggggtttactaatctaatatcatgtacccatcaacacga

SEQ ID NO: 49340 - DNA, 50 bp, synthetic construct
  source 1..50: mol_type = other DNA
caaattgggtttatccggcttttcttgataagacggttcagtacaacttc

SEQ ID NO: 49341 - DNA, 50 bp, synthetic construct
  source 1..50: mol_type = other DNA
aataatgggttgacacacttcgggttccctaatattatacacccatcgaa

SEQ ID NO: 49342 - DNA, 50 bp, synthetic construct
  source 1..50: mol_type = other DNA
aacctcatagtgtatttagaccttgacacgtttaaatacaccatctaaag

SEQ ID NO: 49343 - DNA, 50 bp, synthetic construct
  source 1..50: mol_type = other DNA
aggggtgtattgttatacaacataagcaggttgtgatacattacacccat

SEQ ID NO: 49344 - DNA, 50 bp, synthetic construct
  source 1..50: mol_type = other DNA
ttggcgaggatggcgggatcaatgtacatctgcgaggcctgcggcaccga

SEQ ID NO: 49345 - DNA, 50 bp, synthetic construct
  source 1..50: mol_type = other DNA
gcgcagagcgccgccagctcccccgacggattgctggcggggcatttttt

SEQ ID NO: 49346 - DNA, 50 bp, synthetic construct
  source 1..50: mol_type = other DNA
tgtggcgtacaagttgcagccacttgagatgctgcgcgacgtacaccatc

SEQ ID NO: 49347 - DNA, 50 bp, synthetic construct
  source 1..50: mol_type = other DNA
tgttcgtaaacccggtagttctcgggctggatatacccacttaaagagcg

SEQ ID NO: 49348 - DNA, 50 bp, synthetic construct
  source 1..50: mol_type = other DNA
cggagtaagtgcgaatcgctcggctcatccaacgagccggacttactccc

SEQ ID NO: 49349 - DNA, 50 bp, synthetic construct
  source 1..50: mol_type = other DNA
ggtgttgttgcgttggttcacgggcaccagtgaaccaacggtccaacacc

SEQ ID NO: 49350 - DNA, 50 bp, synthetic construct
  source 1..50: mol_type = other DNA
atgttgtaataagcgtcacacactcaagtgtgttatgcttatacaaacaa

SEQ ID NO: 49351 - DNA, 50 bp, synthetic construct
  source 1..50: mol_type = other DNA
ggtgtgttttgaaccttaacaacaaatgttagcatagactaaaacacact

SEQ ID NO: 49352 - DNA, 50 bp, synthetic construct
  source 1..50: mol_type = other DNA
tacggcatttctcccaaaaactgcgagctatttttgtcagaagaaccgca

SEQ ID NO: 49353 - DNA, 50 bp, synthetic construct
  source 1..50: mol_type = other DNA
tggtgtatttaaacgtgtctgatgaagattagcaaggtctaaatacacct

SEQ ID NO: 49354 - DNA, 50 bp, synthetic construct
  source 1..50: mol_type = other DNA
gtgtgaggatagcacctaccattctcgaacggtaggggtttactccatac

SEQ ID NO: 49355 - DNA, 50 bp, synthetic construct
  source 1..50: mol_type = other DNA
tataacgatttgttactttagtaataaaactaaaaattagattgtgtata

SEQ ID NO: 49356 - DNA, 50 bp, synthetic construct
  source 1..50: mol_type = other DNA
acacagtcatctaatagggtcgacaaagcgaaaaagaggcaaaatccagt

SEQ ID NO: 49357 - DNA, 50 bp, synthetic construct
  source 1..50: mol_type = other DNA
tattgggggttgactacgttcggattgcctaatatcatgtacccacaata

SEQ ID NO: 49358 - DNA, 50 bp, synthetic construct
  source 1..50: mol_type = other DNA
tttagtgcctcatttcctctcgttggagggagaggaaatgggatacaaaa

SEQ ID NO: 49359 - DNA, 50 bp, synthetic construct
  source 1..50: mol_type = other DNA
tttaaaaaccgcactgatgcggatataccctctttagtagcggttttttt

SEQ ID NO: 49360 - DNA, 50 bp, synthetic construct
  source 1..50: mol_type = other DNA
ttgtatcgctttaggtagtgtatttaaatgcactatgatgatgattaggg

SEQ ID NO: 49361 - DNA, 50 bp, synthetic construct
  source 1..50: mol_type = other DNA
caacacccaccagctagtgggtgtgcacacccacattggaacgcatcgtg

SEQ ID NO: 49362 - DNA, 50 bp, synthetic construct
  source 1..50: mol_type = other DNA
ttggagttgcttaaacggcgcgattgtacagcacgctgtaggaactcacg

SEQ ID NO: 49363 - DNA, 50 bp, synthetic construct
  source 1..50: mol_type = other DNA
gccgcgtactggacccagccggtgtacgagcgctgggtagacatgtacgc

SEQ ID NO: 49364 - DNA, 50 bp, synthetic construct
  source 1..50: mol_type = other DNA
tatagtcatatgcacacctcagctttggcataggtgtgcatattgcttat

SEQ ID NO: 49365 - DNA, 50 bp, synthetic construct
  source 1..50: mol_type = other DNA
ttgtatcgctttaggtggtgtatttaaatgcacctcccgtttcagatggt

SEQ ID NO: 49366 - DNA, 50 bp, synthetic construct
  source 1..50: mol_type = other DNA
agtttggacaaaagtgctaccgtctcaacgtgctcatcattgtccaaacc

SEQ ID NO: 49367 - DNA, 50 bp, synthetic construct
  source 1..50: mol_type = other DNA
atgagtgttaaggcaagaatactggtaatcttacatagctaaacacgtat

SEQ ID NO: 49368 - DNA, 50 bp, synthetic construct
  source 1..50: mol_type = other DNA
gaaatcccccaaagaagaaactttataaggtggcttcttgccacccggca

SEQ ID NO: 49369 - DNA, 50 bp, synthetic construct
  source 1..50: mol_type = other DNA
gcatgtctatacacgctcaaaactgcgtttttcagcttgggtagtgggtg

SEQ ID NO: 49370 - DNA, 50 bp, synthetic construct
  source 1..50: mol_type = other DNA
gcatcggtgtgtggaacatcatgcggtcgcacaattccagtaatttgtcc

SEQ ID NO: 49371 - DNA, 50 bp, synthetic construct
  source 1..50: mol_type = other DNA
taatccgcagataggcagatagatatttcttcctccggttctgcggccag

SEQ ID NO: 49372 - DNA, 50 bp, synthetic construct
  source 1..50: mol_type = other DNA
cagcaatacaacatgaatctgcccgggggcagattcattcggtagggggt

SEQ ID NO: 49373 - DNA, 50 bp, synthetic construct
  source 1..50: mol_type = other DNA
accgcttctcccggaacactgaagaatttctttgttgcgggtatcgctgt

SEQ ID NO: 49374 - DNA, 50 bp, synthetic construct
  source 1..50: mol_type = other DNA
atatagaggttgattttatttaacctttttaattttattatatataatat

SEQ ID NO: 49375 - DNA, 50 bp, synthetic construct
  source 1..50: mol_type = other DNA
taagttttttgatttaagtgtaggtaactacactgcactaggacaaccac

SEQ ID NO: 49376 - DNA, 50 bp, synthetic construct
  source 1..50: mol_type = other DNA
tacatttatctgtataatctatcaattgggagattatacatatgccgcaa

SEQ ID NO: 49377 - DNA, 50 bp, synthetic construct
  source 1..50: mol_type = other DNA
atcctcatagtgtatttagaccttgacacgtttaaatacaccatcttaag

SEQ ID NO: 49378 - DNA, 50 bp, synthetic construct
  source 1..50: mol_type = other DNA
cagcattatagctatgtcatcaacttgatgatgacatagtgattttcttt

SEQ ID NO: 49379 - DNA, 50 bp, synthetic construct
  source 1..50: mol_type = other DNA
acaccaggattctgttatctaaaaaatgaagaatgacagtatgcagatga

SEQ ID NO: 49380 - DNA, 50 bp, synthetic construct
  source 1..50: mol_type = other DNA
attaattttttgggggtgatgaaatgattgatcactccttaaatgttaaa

SEQ ID NO: 49381 - DNA, 50 bp, synthetic construct
  source 1..50: mol_type = other DNA
aattttcaaaaagacttcttcaaaatttttataaaggagttttgtaaatg

SEQ ID NO: 49382 - DNA, 50 bp, synthetic construct
  source 1..50: mol_type = other DNA
gaatattatgtatattattaattgtaatcttaagagaatacagaattact

SEQ ID NO: 49383 - DNA, 50 bp, synthetic construct
  source 1..50: mol_type = other DNA
taatttgtaatttatataaaaatattgcacctaatactaataacaaagga

SEQ ID NO: 49384 - DNA, 50 bp, synthetic construct
  source 1..50: mol_type = other DNA
gcattccgagtgtagtgtagttagctaaaaacaaaaaacaataaagcctt

SEQ ID NO: 49385 - DNA, 50 bp, synthetic construct
  source 1..50: mol_type = other DNA
aacttttacatagatccggagggcaattccagattatctctaaaaataaa

SEQ ID NO: 49386 - DNA, 50 bp, synthetic construct
  source 1..50: mol_type = other DNA
agggttggaacgtactctcgaaactttggtcgaagttccaaccctgcccc

SEQ ID NO: 49387 - DNA, 50 bp, synthetic construct
  source 1..50: mol_type = other DNA
tcatgatgcgctcctttcagactgaccagtccgtgcgaagcggcggcaga

SEQ ID NO: 49388 - DNA, 50 bp, synthetic construct
  source 1..50: mol_type = other DNA
ctcggcactttcaacaataatatctcacagtttttgggggaaatgccgta

SEQ ID NO: 49389 - DNA, 50 bp, synthetic construct
  source 1..50: mol_type = other DNA
tagttcaaaaagaaggttctagaaatatccttcttcatctttttcaaata

SEQ ID NO: 49390 - DNA, 50 bp, synthetic construct
  source 1..50: mol_type = other DNA
aaattcataaatatgatgtagtagttgtagcacatgttatatttgaaagt

SEQ ID NO: 49391 - DNA, 50 bp, synthetic construct
  source 1..50: mol_type = other DNA
caaaaatcagtaaacttttaaactatcaagatagtttttaaagatttttc

SEQ ID NO: 49392 - DNA, 50 bp, synthetic construct
  source 1..50: mol_type = other DNA
gtcacagtgtaaaggaggacgaacatggatggtggccagcacatcccgat

SEQ ID NO: 49393 - DNA, 50 bp, synthetic construct
  source 1..50: mol_type = other DNA
cactggaaacagcccgagacatgaatacatgacacaggcagcggtatgtg

SEQ ID NO: 49394 - DNA, 50 bp, synthetic construct
  source 1..50: mol_type = other DNA
aggcaacagccagttgctttgctttttgggaatagtgctggctattcccg

SEQ ID NO: 49395 - DNA, 50 bp, synthetic construct
  source 1..50: mol_type = other DNA
tatgatatgggcgcagcttctgtttcgaacgaacggtctcccatatcata

SEQ ID NO: 49396 - DNA, 50 bp, synthetic construct
  source 1..50: mol_type = other DNA
gcatagccgaagctacgccgtttcctgcgacggagtaacttcgggcaggg

SEQ ID NO: 49397 - DNA, 50 bp, synthetic construct
  source 1..50: mol_type = other DNA
tgccctccatccgcaggaatcaaagctggatgccctgcttggtgaggtag

SEQ ID NO: 49398 - DNA, 50 bp, synthetic construct
  source 1..50: mol_type = other DNA
tgcaaccggcgatacccatggcaactccgccatggtgaccgcctattggg

SEQ ID NO: 49399 - DNA, 50 bp, synthetic construct
  source 1..50: mol_type = other DNA
aaccacctgcctccggaagaggcggtctgttctgccataggcagctcctt

SEQ ID NO: 49400 - DNA, 50 bp, synthetic construct
  source 1..50: mol_type = other DNA
tacaccatgagaaatggaaggacagtttttctcccagttgggctgggccc

SEQ ID NO: 49401 - DNA, 50 bp, synthetic construct
  source 1..50: mol_type = other DNA
taattgacataatcgccgaaataatattgattcgctgatggatctggccg

SEQ ID NO: 49402 - DNA, 50 bp, synthetic construct
  source 1..50: mol_type = other DNA
ttttttgattttagaaataaaaaaatttttttaaaaaagcctaaaaaata

SEQ ID NO: 49403 - DNA, 50 bp, synthetic construct
  source 1..50: mol_type = other DNA
tgagtctatcactcttgtacacattgtagtgggaaagatcataacccaag

SEQ ID NO: 49404 - DNA, 50 bp, synthetic construct
  source 1..50: mol_type = other DNA
aatgaattttagcttttctacgaatattcgtagaaagtgaaaatacgcct

SEQ ID NO: 49405 - DNA, 50 bp, synthetic construct
  source 1..50: mol_type = other DNA
tttagagtgtatcattagaaaggttagaccctcttatgatacacttctcc

SEQ ID NO: 49406 - DNA, 50 bp, synthetic construct
  source 1..50: mol_type = other DNA
caatttttcggaaataattcgagaaaaaagaacgtatgtgcgaaaggaga

SEQ ID NO: 49407 - DNA, 50 bp, synthetic construct
  source 1..50: mol_type = other DNA
tgtcttagattgtcggagtattttcaccgcagcggtctatatctttgatt

SEQ ID NO: 49408 - DNA, 50 bp, synthetic construct
  source 1..50: mol_type = other DNA
aaatatacatggtaaaaagttctgatactgtaattttacaatttaaaaat

SEQ ID NO: 49409 - DNA, 50 bp, synthetic construct
  source 1..50: mol_type = other DNA
ttatggctaatgctacaatgccgaattcggttttctttagatattcacct

SEQ ID NO: 49410 - DNA, 50 bp, synthetic construct
  source 1..50: mol_type = other DNA
tgataccttacccaggtgggatatacttaaaacacattttgaaaaataac

SEQ ID NO: 49411 - DNA, 50 bp, synthetic construct
  source 1..50: mol_type = other DNA
gttaaatacccagttgggtttttctagacttgcccaagtgaaattttata

SEQ ID NO: 49412 - DNA, 50 bp, synthetic construct
  source 1..50: mol_type = other DNA
gcaacaaaaacggttcggatttggatataatccgaaccaaatcttcttaa

SEQ ID NO: 49413 - DNA, 50 bp, synthetic construct
  source 1..50: mol_type = other DNA
tgttcgcaggaactcttgataggttcaccattttagacttttcgcgaaca

SEQ ID NO: 49414 - DNA, 50 bp, synthetic construct
  source 1..50: mol_type = other DNA
agtttggacaataatgctaccgtctcaacttgctcatcattgtccaaacc

SEQ ID NO: 49415 - DNA, 50 bp, synthetic construct
  source 1..50: mol_type = other DNA
aatcggcgggaatcggcgttcccgatcatcatggcgggccgaagccgacg

SEQ ID NO: 49416 - DNA, 50 bp, synthetic construct
  source 1..50: mol_type = other DNA
tagtcattatcttgataaacagataaagctgtatttaatgatattgacta

SEQ ID NO: 49417 - DNA, 50 bp, synthetic construct
  source 1..50: mol_type = other DNA
atgataataattatcaagtgtgaaaattcacacatgataattaatatcat

SEQ ID NO: 49418 - DNA, 50 bp, synthetic construct
  source 1..50: mol_type = other DNA
gtttttttagttgcctttggtagcaagcaccctttgtcaactattttttt

SEQ ID NO: 49419 - DNA, 50 bp, synthetic construct
  source 1..50: mol_type = other DNA
attgttgtctaagttacactaacgaaacctaatgtgatttaggtaactga

SEQ ID NO: 49420 - DNA, 50 bp, synthetic construct
  source 1..50: mol_type = other DNA
aatccttacagtaacacacagcatattaacaatgaattactgttgtattt

SEQ ID NO: 49421 - DNA, 50 bp, synthetic construct
  source 1..50: mol_type = other DNA
aatgtattatttttgacttttgggcagcctaaagatataaatcctacttt

SEQ ID NO: 49422 - DNA, 50 bp, synthetic construct
  source 1..50: mol_type = other DNA
atgttgtaataggcatcacacactcaagtgtgttatgcttatacaaacaa

SEQ ID NO: 49423 - DNA, 50 bp, synthetic construct
  source 1..50: mol_type = other DNA
ttaaatttgtttgtataatcataacagaacgcttattacaaaaaaatcaa

SEQ ID NO: 49424 - DNA, 50 bp, synthetic construct
  source 1..50: mol_type = other DNA
actcctaaaaataacgtaggtctatttagaacctaaaagacccattaatg

SEQ ID NO: 49425 - DNA, 50 bp, synthetic construct
  source 1..50: mol_type = other DNA
tataggtaaatattgcaaagcagcagcgttctatgtaccatttccctaga

SEQ ID NO: 49426 - DNA, 50 bp, synthetic construct
  source 1..50: mol_type = other DNA
aaccgattattcggttcccactttcgaatatgggaactggcaattaactg

SEQ ID NO: 49427 - DNA, 50 bp, synthetic construct
  source 1..50: mol_type = other DNA
aaaaggtaaataataccaacaagagtaattgctggcaatattaaccttta

SEQ ID NO: 49428 - DNA, 50 bp, synthetic construct
  source 1..50: mol_type = other DNA
gttgcttaatagaatgggtctgttataatagacctgcaataatttgagcg

SEQ ID NO: 49429 - DNA, 50 bp, synthetic construct
  source 1..50: mol_type = other DNA
tggggattttaccaaagtttagggaaccttaatactattgtccattccca

SEQ ID NO: 49430 - DNA, 50 bp, synthetic construct
  source 1..50: mol_type = other DNA
gaaaggttaatataaccaacaagcactgttgttgtcaatatttacctttt

SEQ ID NO: 49431 - DNA, 50 bp, synthetic construct
  source 1..50: mol_type = other DNA
tggggttaattcagccacgacataagcgtattgtgacttgaatatccccg

SEQ ID NO: 49432 - DNA, 50 bp, synthetic construct
  source 1..50: mol_type = other DNA
atagactttttcctaattcggaaaggaccaagaaaaaggaaattgtgacc

SEQ ID NO: 49433 - DNA, 50 bp, synthetic construct
  source 1..50: mol_type = other DNA
tgttaacgtcatttttccatgtaatattacagggaaaagaaactactcta

SEQ ID NO: 49434 - DNA, 50 bp, synthetic construct
  source 1..50: mol_type = other DNA
cgctgagatagtgcattgtaataaacagattatgatgtacttataatctg

SEQ ID NO: 49435 - DNA, 50 bp, synthetic construct
  source 1..50: mol_type = other DNA
tgcgtttttaaaatggttgtgtaataatacacaacctttttaaagtttgg

SEQ ID NO: 49436 - DNA, 50 bp, synthetic construct
  source 1..50: mol_type = other DNA
gcaaactttaaaaaggttgtgtattattacacaaccattttaaaaacgca

SEQ ID NO: 49437 - DNA, 50 bp, synthetic construct
  source 1..50: mol_type = other DNA
actcaaactcccagttcccatattcgaaaacgggaactgagaaatcagtt

SEQ ID NO: 49438 - DNA, 50 bp, synthetic construct
  source 1..50: mol_type = other DNA
tacttgatatgctatttaccaacaatagttataagatagcatatcaaaaa

SEQ ID NO: 49439 - DNA, 50 bp, synthetic construct
  source 1..50: mol_type = other DNA
tttaaacaatcataaatgtagcttattgacgacattaaaaataatttagc

SEQ ID NO: 49440 - DNA, 50 bp, synthetic construct
  source 1..50: mol_type = other DNA
atgtagtataacatttagttgtcattagtcaactgtatgattgacgacat

SEQ ID NO: 49441 - DNA, 50 bp, synthetic construct
  source 1..50: mol_type = other DNA
taaagacattgtacttgatatgctatagcatatcatacaaataacagcta

SEQ ID NO: 49442 - DNA, 50 bp, synthetic construct
  source 1..50: mol_type = other DNA
ctagagttatgtcataaccgatacaagttttcttaaaggcataaccattt

SEQ ID NO: 49443 - DNA, 50 bp, synthetic construct
  source 1..50: mol_type = other DNA
ggtgaatttttttgtattttgggaattccctaaactttagtaaaatcccc

SEQ ID NO: 49444 - DNA, 50 bp, synthetic construct
  source 1..50: mol_type = other DNA
aaatcaacttaaatgtcgtcaatcatgttatactacatttataattccta

SEQ ID NO: 49445 - DNA, 50 bp, synthetic construct
  source 1..50: mol_type = other DNA
ttgccctacccataatcataactttatcgttataatacgcggtaggggcg

SEQ ID NO: 49446 - DNA, 50 bp, synthetic construct
  source 1..50: mol_type = other DNA
atttttgatatcaagaatttcctggttcaggatagataattttattgtac

SEQ ID NO: 49447 - DNA, 50 bp, synthetic construct
  source 1..50: mol_type = other DNA
tttagtatctcgttatctctcgttggagggagaggaaatgggatacaaaa

SEQ ID NO: 49448 - DNA, 50 bp, synthetic construct
  source 1..50: mol_type = other DNA
gtaagaaacaacattatcacattgatgaatttgttaatactgttgattaa

SEQ ID NO: 49449 - DNA, 50 bp, synthetic construct
  source 1..50: mol_type = other DNA
tttagtacctcgttttctctcgttggaagaagaagaaacgagatacccaa

SEQ ID NO: 49450 - DNA, 50 bp, synthetic construct
  source 1..50: mol_type = other DNA
ttatagttaagctcctttgagaaacgttttgcaaaggagcttaaatatgt

SEQ ID NO: 49451 - DNA, 50 bp, synthetic construct
  source 1..50: mol_type = other DNA
tcacttacagttacaagaattatttcaaagataaatgtttctgttgattg

SEQ ID NO: 49452 - DNA, 50 bp, synthetic construct
  source 1..50: mol_type = other DNA
tatgcgatttttgaaatgatatgctagcatatcaagtataatgtcttaaa

SEQ ID NO: 49453 - DNA, 50 bp, synthetic construct
  source 1..50: mol_type = other DNA
tataaaggttgtgtatttgagcgtttacatagtattacacaaccatttta

SEQ ID NO: 49454 - DNA, 50 bp, synthetic construct
  source 1..50: mol_type = other DNA
aacctcatagtgtatttagaccttgacacgtttaaatacaccatcttaag

SEQ ID NO: 49455 - DNA, 50 bp, synthetic construct
  source 1..50: mol_type = other DNA
catccatggtatctcctcctctccaagcagattttattataccattgaaa

SEQ ID NO: 49456 - DNA, 50 bp, synthetic construct
  source 1..50: mol_type = other DNA
atgtcaccaaactgaccagtaaggtgctttacggaagttttctgtgaatc

SEQ ID NO: 49457 - DNA, 50 bp, synthetic construct
  source 1..50: mol_type = other DNA
ccccacactccagatgtcccaacagagggcgggttgttggcgtcgtcggc

SEQ ID NO: 49458 - DNA, 50 bp, synthetic construct
  source 1..50: mol_type = other DNA
cgcaagttccaaggtcgcatgaccgggcgcatgcgcgggccgatcttgaa

SEQ ID NO: 49459 - DNA, 50 bp, synthetic construct
  source 1..50: mol_type = other DNA
atcttcaaatgtcggttttgtgacctatattcaaaccaattaatattaga

SEQ ID NO: 49460 - DNA, 50 bp, synthetic construct
  source 1..50: mol_type = other DNA
cagacggttcgaagataatccttccattaggacaatttaggccaaatggt

SEQ ID NO: 49461 - DNA, 50 bp, synthetic construct
  source 1..50: mol_type = other DNA
aacagtagaaatgataataataatcaaatatcgaatcactttctacaaga

SEQ ID NO: 49462 - DNA, 50 bp, synthetic construct
  source 1..50: mol_type = other DNA
gaatatatttaaacttggttacatccttttttctgtttataaaaacattg

SEQ ID NO: 49463 - DNA, 50 bp, synthetic construct
  source 1..50: mol_type = other DNA
tgcggtgtacattcttgcatgactacagttatgttatgatgtacaccaca

SEQ ID NO: 49464 - DNA, 50 bp, synthetic construct
  source 1..50: mol_type = other DNA
aaccgggttcggattatcatggtctgcaccgaatgaggataaatccgaac

SEQ ID NO: 49465 - DNA, 50 bp, synthetic construct
  source 1..50: mol_type = other DNA
acgatgttttcttatcgggaggcacccgcctcctaataagaaaacatgag

SEQ ID NO: 49466 - DNA, 50 bp, synthetic construct
  source 1..50: mol_type = other DNA
ttgcttccttaccgtacatgagcatttactgatatgcgataaagaagcaa

SEQ ID NO: 49467 - DNA, 50 bp, synthetic construct
  source 1..50: mol_type = other DNA
ccttgtatcaaactcggtatgattatgttcctactgattttgatacaaaa

SEQ ID NO: 49468 - DNA, 50 bp, synthetic construct
  source 1..50: mol_type = other DNA
ggtacaactttgaaaagtcaaacaaaatgttaagttgttaaagttatacc

SEQ ID NO: 49469 - DNA, 50 bp, synthetic construct
  source 1..50: mol_type = other DNA
gtgtagagaaccgggatggaacgaaactgttccatcgacatccttaacac

SEQ ID NO: 49470 - DNA, 50 bp, synthetic construct
  source 1..50: mol_type = other DNA
gttttcatgttccattgcgtacattcatgctctaacaagtgattgacaat

SEQ ID NO: 49471 - DNA, 50 bp, synthetic construct
  source 1..50: mol_type = other DNA
ttggttattgggtaccgtgataaacaaatatcacagtaactaataaccaa

SEQ ID NO: 49472 - DNA, 50 bp, synthetic construct
  source 1..50: mol_type = other DNA
taagatattaagagaagaaaataatattattttcttgaaagaaggaggtt

SEQ ID NO: 49473 - DNA, 50 bp, synthetic construct
  source 1..50: mol_type = other DNA
tgcaaacggaattggctttccgttccgggaaaaagcagtgggcgatggca

SEQ ID NO: 49474 - DNA, 50 bp, synthetic construct
  source 1..50: mol_type = other DNA
gaaaacggcactgccgtcattgataaaaaaatgacaatcaacgaaaaaga

SEQ ID NO: 49475 - DNA, 50 bp, synthetic construct
  source 1..50: mol_type = other DNA
atatgatttcaatcagtgtgaatccttgttcagtgtatctaaaatcagtc

SEQ ID NO: 49476 - DNA, 50 bp, synthetic construct
  source 1..50: mol_type = other DNA
acgcaggcagatgtagagatccagttgagtgcctggggatattcttgctc

SEQ ID NO: 49477 - DNA, 50 bp, synthetic construct
  source 1..50: mol_type = other DNA
aaaaaatataaattttgaataaaaattttcattcaaagtttccattttat

SEQ ID NO: 49478 - DNA, 50 bp, synthetic construct
  source 1..50: mol_type = other DNA
ctcctttttgagtacaaaaataacagatttctcaggttcccaatctggtg

SEQ ID NO: 49479 - DNA, 50 bp, synthetic construct
  source 1..50: mol_type = other DNA
acttcttttcattttttattgacataattcaatagtgtcactgggttctt

SEQ ID NO: 49480 - DNA, 50 bp, synthetic construct
  source 1..50: mol_type = other DNA
ttctgaaatcaggtaaaaaaaggcctgcctttttgtatacacgcatgccc

SEQ ID NO: 49481 - DNA, 50 bp, synthetic construct
  source 1..50: mol_type = other DNA
accatatccaacatatctgaaccgataatttcaaattcatttgatatatc

SEQ ID NO: 49482 - DNA, 50 bp, synthetic construct
  source 1..50: mol_type = other DNA
tttagttactcatttgttctccgtccagcgagaggaaacgaggtactaaa

SEQ ID NO: 49483 - DNA, 50 bp, synthetic construct
  source 1..50: mol_type = other DNA
atataaaaaatcctcagtaatattctaatataaaagaggtagaggataat

SEQ ID NO: 49484 - DNA, 50 bp, synthetic construct
  source 1..50: mol_type = other DNA
aaaaataagatattttaatttatactaataaattaattaacctttatagt

SEQ ID NO: 49485 - DNA, 50 bp, synthetic construct
  source 1..50: mol_type = other DNA
tttagtacctcatttcctctcgttggaagaagaagaaacgagatactaaa

SEQ ID NO: 49486 - DNA, 50 bp, synthetic construct
  source 1..50: mol_type = other DNA
tctggatctttgttgttgtatgtgcatacatgagacaacaactcagagcc

SEQ ID NO: 49487 - DNA, 50 bp, synthetic construct
  source 1..50: mol_type = other DNA
ccttcgccatgagggtagtttactaggttggtgacaagtcgttaatacgt

SEQ ID NO: 49488 - DNA, 50 bp, synthetic construct
  source 1..50: mol_type = other DNA
gtaagttaaccattaccgcactcagctgagttaatggtctgaatcgttgc

SEQ ID NO: 49489 - DNA, 50 bp, synthetic construct
  source 1..50: mol_type = other DNA
acatcatttttcttcatatcactctggaagtctatggcgaaagttagaat

SEQ ID NO: 49490 - DNA, 50 bp, synthetic construct
  source 1..50: mol_type = other DNA
gttgatgggtgtatgatattagggaatccaaaatgccgcaaccgttcaat

SEQ ID NO: 49491 - DNA, 50 bp, synthetic construct
  source 1..50: mol_type = other DNA
tttggacataaaaaaacaactcctttttcagcttattttttatttctgta

SEQ ID NO: 49492 - DNA, 50 bp, synthetic construct
  source 1..50: mol_type = other DNA
atgaggattttgctttagaagttcatgaacatatacatcaaaataccaac
